(19) United States
(12) Patent Application Publication
(10) Pub. No.: US 2011/0183924 A1
(43) Pub. Date: Jul. 28, 2011

(54) Methods and systems for annotating biomolecular sequences

(75) Inventors: Liat Mintz, East Brunswick, NJ (US); Hanqing Xie, Lambertville, NJ (US); Dvir Dahary, Tel-Aviv (IL); Erez Levanon, Petach-Tikva (IL); Shiri Freilich, Herzlia (IL); Nili Beck, Kfar Saba (IL); Wei-Yong Zhu, Plainsboro, NJ (US); Alon Wasserman, Rehovot (IL); Jeanne Bernstein, Kfar Yona (IL)

(73) Assignee: Compugen Ltd., Tel-Aviv (IL)

(21) Appl. No.: 12/662,576

(22) Filed: Apr. 23, 2010

Related U.S. Application Data
(62) Division of application No. 11/443,428, filed on May 31, 2006, now Pat. No. 7,745,391.
Application No. 11/443,428 is a continuation of application No. 10/242,799, filed on Sep. 13, 2002, now abandoned.
(60) Provisional application No. 60/322,285, filed on Sep. 14, 2001.
(60) Provisional application No. 60/354,242, filed on Feb. 6, 2002.
(60) Provisional application No. 60/371,494, filed on Apr. 11, 2002.
(60) Provisional application No. 60/384,096, filed on May 31, 2002.

(51) Int. Cl. A61K 38/08; C07K 7/00; C07H 21/04; A61P 29/00; A61P 31/00; A61P 35/00; A61P 37/00

(52) U.S. Cl. 514/21.8; 530/329; 536/23.5; 514/21.7

(57) ABSTRACT

A method of annotating biomolecular sequences. The method comprises (a) computationally clustering the biomolecular sequences according to a progressive homology range, to thereby generate a plurality of clusters each being of a predetermined homology of the homology range; and (b) assigning at least one ontology to each cluster of the plurality of clusters, the at least one ontology being: (i) derived from an annotation preassociated with at least one biomolecular sequence of each cluster; and/or (ii) generated from analysis of the at least one biomolecular sequence of each cluster thereby annotating biomolecular sequences.

[0001] This application is a divisional application of U.S. patent application Ser. No. 11/443,482, filed on May 31, 2006, which is a continuation of U.S. patent application Ser. No. 10/242,799, filed on Sep. 13, 2002, now abandoned, which claims the benefit of U.S. Provisional Patent Application Nos. 60/322,285, filed on Sep. 14, 2001; 60/354,242, filed on Feb. 6, 2002; 60/371,494, filed on Apr. 11, 2002 and 60/384,096, filed on May 31, 2002. The contents of the above Applications are all incorporated herein by reference.

### FIELD AND BACKGROUND OF THE INVENTION

[0002] The present invention relates to systems and methods useful for annotating biomolecular sequences. More particularly, the present invention relates to computational approaches, which enable systemic characterization of biomolecular sequences and identification of differentially expressed biomolecular sequences such as sequences associated with a pathology.

[0003] In the postgenomic era, data analysis rather than data collection presents the biggest challenge to biologists. Efforts to ascribe biological meaning to genomic data, whether by identification of function, structure or expression pattern are lagging behind sequencing efforts [Boguski M S (1999) Science 286:453-455].

[0004] It is well recognized that elucidation of spatial and temporal patterns of gene expression in healthy and diseased states may contribute immensely to further understanding of disease mechanisms.

[0005] Therefore, any observational method that can rapidly, accurately and economically observe and measure the pattern of expression of selected individual genes or of whole genomes is of great value to scientists.

[0006] In recent years, a variety of techniques have been developed to analyze differential gene expression. However, current observation and measurement methods are inaccurate, time consuming, labor intensive or expensive, oftentimes requiring complex molecular and biochemical analysis of numerous gene sequences.

[0007] For example, observation methods for individual mRNA or cDNA molecules such as Northern blot analysis, RNase protection, or selective hybridization to arrayed cDNA libraries [see Sambrook et al. (1989) Molecular cloning, A laboratory manual, Cold Spring Harbor press, NY] depend on specific hybridization of a single oligonucleotide probe complementary to the known sequence of an individual molecule. Since a single human cell is estimated to express 10,000-30,000 genes [Liang et al. (1992) Science 257:967-971], single probe methods to identify all sequences in a complex sample are ineffective and laborious.

[0008] Other approaches for high throughput analysis of differential gene expression are summarized infra.

[0009] EST sequencing—The basic idea is to create cDNA libraries from tissues of interest, pick clones randomly from these libraries and then perform a single sequencing reaction from a large number of clones. Each sequencing reaction generates 300 base pairs or so of sequence that represents a unique sequence tag for a particular transcript. An EST sequencing project is technically simple to execute since it requires only a cDNA library, automated DNA sequencing capabilities and standard bioinformatics protocols.

[0010] To generate meaningful amounts of data, however, high throughput template preparation, sequencing and analysis protocols must be applied. As such, the number of new genes identified as well as the statistical significance of the data is proportional to the number of clones sequenced as well as the complexity of the tissue being analyzed [Adams et al. (1995) Nature 377:3-173; Hillier et al. (1996) Genome Res. 6:807-828].

[0011] Subtractive cloning—Subtractive cloning offers an inexpensive and flexible alternative to EST sequencing and cDNA array hybridization. In this approach, double-stranded cDNA is created from the two-cell or tissue populations of interest, linkers are ligated to the ends of the cDNA fragments and the cDNA pools are then amplified by PCR. The cDNA pool from which unique clones are desired is designated the “tester”, and the cDNA pool that is used to subtract away shared sequences is designated the “driver”. Following initial PCR amplification, the linkers are removed from both cDNA pools and unique linkers are ligated to the tester sample. The tester is then hybridized to a vast excess of driver DNA and sequences that are unique to the tester cDNA pool are amplified by PCR.

[0012] The primary limitation of subtractive methods is that they are not always comprehensive. The cDNAs identified are typically those, which differ significantly in expression level between cell-populations and subtle quantitative differences are often missed. In addition each experiment is a pair wise comparison and since subtractions are based on a series of sensitive biochemical reactions it is difficult to directly compare a series of RNA samples.

[0013] Differential display—Differential display is another PCR-based differential cloning method [Liang and Pardee (1992) Science 257:967-70; Welsh et al. (1992) Nucleic Acids Res. 20:4965-70]. In classical differential display, reverse transcription is primed with either oligo-dT or an arbitrary primer. Thereafter an arbitrary primer is used in conjunction with the reverse transcription primer to amplify cDNA fragments and the cDNA fragments are separated on a polyacrylamide gel. Differences in gene expression are visualized by the presence or absence of bands on the gel and quantitative differences in gene expression are identified by differences in the intensity of bands. Adaptation of differential display methods for fluorescent DNA sequencing machines has enhanced the ability to quantify differences in gene expression [Kato (1995) Nucleic Acids Res. 18:3685-90].

[0014] A limitation of the classical differential display approach is that false positive results are often generated during PCR or in the process of cloning the differentially expressed PCR products. Although a variety of methods have been developed to discriminate true from false positives, these typically rely on the availability of relatively large amounts of RNA.

[0015] Serial analysis of gene expression (SAGE)—this DNA sequence based method is essentially an accelerated version of EST sequencing [Valculescu et al. (1995) Science 270:484-8]. In this method a digestible unique sequence tag of 13 or more bases is generated for each transcript in the cell or tissue of interest, thereby generating a SAGE library.

[0016] Sequencing each SAGE library creates transcript profiles. Since each sequencing reaction yields information for twenty or more genes, it is possible to generate data points for tens of thousands of transcripts in modest sequencing efforts. The relative abundance of each gene is determined by counting or clustering sequence tags. The advantages of SAGE over many other methods include the high throughput that can be achieved and the ability to accumulate and compare SAGE tag data from a variety of samples, however the technical difficulties concerning the generation of good SAGE libraries and data analysis are significant.

[0017] Altogether, it is clear from the above that laboratory bench approaches are ineffective, time consuming, expensive and often times inaccurate in handling and processing the vast amount of genomic information which is now available.

[0018] It is appreciated, that much of the analysis can be effected by developing computational algorithms, which can be applied to mining data from existing databases, thereby retrieving and integrating valuable biological information.

[0019] To date, there are more than a hundred major biomolecule databases and application servers on the Internet and new sites are being introduced at an ever-increasing rates [Ashburner and Goodman (1997) Curr. Opin. Genet. Dev. 7:750-756; Karp (1998) Trends Biochem. Sci. 23:114-116].

[0020] However, these databases are organized in extremely heterogeneous formats. These reflect the inherent complexity of biological data, ranging from plain-text nucleic acid and protein sequences, through the three dimensional structures of therapeutic drugs and macromolecules and high resolution images of cells and tissues, to microarray-chip outputs. Moreover data structures are constantly evolving to reflect new research and technology development.

[0021] The heterogeneous and dynamic nature of these biological databases present major obstacles in mining data relevant to specific biological queries. Clearly, simple retrieval of data is not sufficient for data mining; efficient data retrieval requires flexible data manipulation and sophisticated data integration. Efficient data retrieval requires the use of complex queries across multiple heterogeneous data sources; data warehousing by merging data derived from multiple public sources and local (i.e., private) sources; and multiple data-analysis procedures that require feeding subsets of data derived from different sources into various application programs for gene finding, protein-structure prediction, functional domain or motif identification, phylogenetic tree construction, graphic presentation and so forth.

[0022] Current biological data retrieval systems are not fully up to the demand of smooth and flexible data integration [Etzold et al. (1996) Methods Enzymol 266:t14-t28; Schuler et al. (1996) Methods Enzymol. 266:141-162; Chung and Wong (1999) Trends Biotech. 17:351-355].

[0023] There is thus a widely recognized need for, and it would be highly advantageous to have, systems and methods which can be used for efficient retrieval and processing of data from biological databases thereby enabling annotation of previously un-annotated biomolecular sequences.

### SUMMARY OF THE INVENTION

[0024] According to one aspect of the present invention there is provided a method of annotating biomolecular sequences according to a hierarchy of interest, the method comprising: (a) computationally constructing a dendrogram having multiple nodes, the dendrogram representing the hierarchy of interest, wherein each node of the multiple nodes of the dendrogram is annotated by at least one keyword; (b) computationally assigning each biomolecular sequence of the biomolecular sequences to a specific node of the multiple nodes of the dendrogram to thereby generate assigned biomolecular sequences; and (c) computationally classifying each of the assigned biomolecular sequences to nodes hierarchically higher than the specific node, thereby annotating biomolecular sequences according to the hierarchy of interest.

[0025] According to another aspect of the present invention there is provided a method of identifying differentially expressed biomolecular sequences, the method comprising: (a) computationally constructing a dendrogram having multiple nodes, the dendrogram representing the hierarchy of interest, wherein each node of the multiple nodes of the dendrogram is annotated by at least one keyword; (b) computationally assigning each biomolecular sequence of the biomolecular sequences to a specific node of the multiple nodes of the dendrogram to thereby generate assigned biomolecular sequences; (c) computationally classifying each of the assigned biomolecular sequences to nodes hierarchically higher than the specific node, to thereby generate annotated biomolecular sequences; and (d) identifying annotated biomolecular sequences assigned to a portion of the multiple nodes, thereby identifying differentially expressed biomolecular sequences.

[0026] According to yet another aspect of the present invention there is provided a computer readable storage medium comprising a database stored in a retrievable manner, the database including files each containing data of a specific node of a dendrogram, the data including biomolecular sequence information and biomolecular sequence annotations, wherein the biomolecular sequence annotations are selected from the group consisting of contig description, tissue specific expression, pathological specific expression, functional features, parameters for ontological annotation assignment, cellular localization, database sequence source and functional alterations.

[0027] According to still another aspect of the present invention there is provided a system for generating a database of annotated biomolecular sequences, the system comprising a processing unit, the processing unit executing a software application configured for: (a) constructing a dendrogram having multiple nodes, the dendrogram representing a hierarchy of interest, wherein each node of the multiple nodes of the dendrogram is annotated by at least one keyword; (b) assigning each biomolecular sequence of the biomolecular sequences to a specific node of the multiple nodes of the dendrogram to thereby generate assigned biomolecular sequences; (c) classifying each of the assigned biomolecular sequences to nodes hierarchically higher than the specific node, to thereby generate annotated biomolecular sequences; and (d) storing sequence annotations and sequence information of the annotated biomolecular sequences, thereby generating the database of annotated biomolecular sequences.

[0028] According to further features in preferred embodiments of the invention described below, the biomolecular sequences are selected from the group consisting of polypeptide sequences and polynucleotide sequences.

[0029] According to still further features in the described preferred embodiments the polynucleotides are selected from the group consisting of genomic sequences, expressed sequence tags, contigs, complementary DNA (cDNA) sequences, pre-messenger RNA (mRNA) sequences, and mRNA sequences.

[0030] According to still further features in the described preferred embodiments the biomolecular sequences are selected from the group consisting of annotated biomolecular sequences, unannotated biomolecular sequences and partially annotated biomolecular sequences.

[0031] According to still further features in the described preferred embodiments the method further comprising homology clustering of the biomolecular sequences prior to step (b).

[0032] According to still further features in the described preferred embodiments the dendrogram is selected from the group consisting of a graph, a list, a map and a matrix.

[0033] According to still further features in the described preferred embodiments the hierarchy of interest is selected from the group consisting of a tissue expression hierarchy, a developmental expression hierarchy, a pathological expression hierarchy, a cellular expression hierarchy, an intracellular expression hierarchy, a taxonomical hierarchy and a functional hierarchy.

[0034] According to still further features in the described preferred embodiments each node of the multiple nodes is a parental node in an additional hierarchy of interest.

[0035] According to still further features in the described preferred embodiments the method further comprising classifying the biomolecular sequences of the parental node according to the additional hierarchy of interest.

[0036] According to still further features in the described preferred embodiments the system further comprising classifying the biomolecular sequences of the parental node according to the additional hierarchy of interest.

[0037] According to still further features in the described preferred embodiments each of the biomolecular sequences is a member of a sequence contig.

[0038] According to still further features in the described preferred embodiments the method further comprising the step of confirming annotations of the assigned biomolecular sequence in-vivo and/or in-vitro prior to or following step (c).

[0039] According to still further features in the described preferred embodiments the system further comprising the step of confirming annotations of the assigned biomolecular sequence in-vivo and/or in-vitro prior to or following step (c).

[0040] According to an additional aspect of the present invention there is provided a method of identifying sequence features unique to differentially expressed mRNA splice variants, the method comprising: (a) computationally identifying unique sequence features in each splice variant of an alternatively spliced expressed sequences; and (b) identifying differentially expressed splice variants of the alternatively spliced expressed sequences, thereby identifying sequence features unique to differentially expressed mRNA splice variants.

[0041] According to yet an additional aspect of the present invention there is provided a computer readable storage medium comprising data stored in a retrievable manner, the data including sequence information of sequence features unique to differentially expressed mRNA splice variants as set forth in files:

[0042] “Transcripts_nucleotide_seqs_part1”,

[0043] “Transcripts_nucleotide_seqs_part2”

[0044] “Transcripts_nucleotide_seqs_part3.new” and/or

[0045] “Protein.seqs”

[0046] provided in CD-ROMs 1 and/or 2 enclosed herewith, and sequence annotations as set forth in annotation categories “#TAA_CD” and “#TAA_TIS”, in the file “Summary_table.new” of CD-ROM3 enclosed herewith.

[0047] According to still an additional aspect of the present invention there is provided a system for generating a database of sequence features unique to differentially expressed mRNA splice variants, the system comprising a processing unit, the processing unit executing a software application configured for: (a) identifying unique sequence features in each splice variant of an alternatively spliced expressed sequences; and (b) identifying differentially expressed splice variants of the alternatively spliced expressed sequences, thereby identifying sequence features unique to differentially expressed mRNA splice variants. (c) storing the sequence features unique to the differentially expressed mRNA splice variants, thereby generating the database of sequence features unique to differentially expressed mRNA splice variants.

[0048] According to still further features in the described preferred embodiments step (b) is effected by qualifying annotations associated with the alternatively spliced expressed sequences.

[0049] According to still further features in the described preferred embodiments the method further comprising scoring the annotations associated with the alternatively spliced expressed sequences according to:(i) prevalence of the alternatively spliced expressed sequences in normal tissues; (ii) prevalence of the alternatively spliced expressed sequences in pathological tissues; (iii) prevalence of the alternatively spliced expressed sequence in total tissues; and (iv) number of tissues and/or tissue types expressing the alternatively spliced expressed sequences;

[0050] According to still further features in the described preferred embodiments the system further comprising scoring the annotations associated with the alternatively spliced expressed sequences according to:(i) prevalence of the alternatively spliced expressed sequences in normal tissues; (ii) prevalence of the alternatively spliced expressed sequences in pathological tissues; (iii) prevalence of the alternatively spliced expressed sequence in total tissues; and (iv) number of tissues and/or tissue types expressing the alternatively spliced expressed sequences;

[0051] According to still further features in the described preferred embodiments step (b) is effected by identifying the unique sequence feature.

[0052] According to still further features in the described preferred embodiments the unique sequence feature is selected from the group consisting of a donor-acceptor concatenation, an alternative exon, an exon and a retained intron.

[0053] According to still further features in the described preferred embodiments identifying unique sequence features in each splice variant of an alternatively spliced expressed sequence is effected by expressed sequence alignment.

[0054] According to a further aspect of the present invention there is provided a kit useful for detecting differentially expressed polynucleotide sequences, the kit comprising at least one oligonucleotide being designed and configured to be specifically hybridizable with a polynucleotide sequence selected from the group consisting of sequence files:

[0055] “Transcripts_nucleotide_seqs_part1”

[0056] “Transcripts_nucleotide_seqs_part2” and

[0057] “Transcripts_nucleotide_seqs_part3.new”

[0058] provided in CD-ROMs 1 and/or 2 enclosed herewith, under moderate to stringent hybridization conditions.

[0059] According to still further features in the described preferred embodiments the at least one oligonucleotide is labeled.

[0060] According to still further features in the described preferred embodiments the at least one oligonucleotide is attached to a solid substrate.

[0061] According to still further features in the described preferred embodiments the solid substrate is configured as a microarray and whereas the at least one oligonucleotide includes a plurality of oligonucleotides each being capable of hybridizing with a specific polynucleotide sequence of the polynucleotide sequences set forth in the files:

[0062] “Transcripts_nucleotide_seqs_part 1”

[0063] “Transcripts_nucleotide_seqs_part2” and/or

[0064] “Transcripts_nucleotide_seqs_part3.new”

[0065] provided in CD-ROMs 1 and/or 2 enclosed herewith.

[0066] According to still further features in the described preferred embodiments each of the plurality of oligonucleotides is being attached to the microarray in a regio-specific manner.

[0067] According to still further features in the described preferred embodiments the at least one oligonucleotide is designed and configured for DNA hybridization.

[0068] According to still further features in the described preferred embodiments the at least one oligonucleotide is designed and configured for RNA hybridization.

[0069] According to yet a further aspect of the present invention there is provided a method of annotating biomolecular sequences, the method comprising: (a) computationally clustering the biomolecular sequences according to a progressive homology range, to thereby generate a plurality of clusters each being of a predetermined homology of the homology range; and (b) assigning at least one ontology to each cluster of the plurality of clusters, the at least one ontology being: (i) derived from an annotation preassociated with at least one biomolecular sequence of each cluster; and/or (ii) generated from analysis of the at least one biomolecular sequence of each cluster thereby annotating biomolecular sequences.

[0070] According to still a further aspect of the present invention there is provided a system for generating a database of annotated biomolecular sequences, the system comprising a processing unit, the processing unit executing a software application configured for: (a) clustering the biomolecular sequences according to a progressive homology range, to thereby generate a plurality of clusters each being of a predetermined homology of the homology range; and (b) assigning at least one ontology to each cluster of the plurality of clusters, the at least one ontology being: (i) derived from an annotation preassociated with at least one biomolecular sequence of each cluster; and/or (ii) generated from analysis of the at least one biomolecular sequence of each cluster, to thereby annotate the biomolecular sequences; and (c) storing sequence annotations and sequence information of the annotated biomolecular sequences, thereby generating the database of annotated biomolecular sequences.

[0071] According to still a further aspect of the present invention there is provided a computer readable storage medium comprising a database stored in a retrievable manner, the database including sequence information as set forth in files:

[0072] “Transcripts_nucleotide_seqs_part1”

[0073] “Transcripts_nucleotide_seqs_part2”

[0074] “Transcripts_nucleotide_seqs_part3.new” and/or

[0075] “Protein.seqs”

[0076] provided in CD-ROMs 1 and/or 2 enclosed herewith, and sequence ontological annotations in #GO_P, #GO_F, #GO_C annotation categories in file “Summary_table.new” of CD-ROM3 enclosed herewith.

[0077] According to still further features in the described preferred embodiments the biomolecular sequences are selected from the group consisting of polynucleotide sequences and polypeptide sequences.

[0078] According to still further features in the described preferred embodiments the homology range is between 99%-35%.

[0079] According to still further features in the described preferred embodiments the analysis of the at least one biomolecular sequence includes literature text mining.

[0080] According to still further features in the described preferred embodiments the analysis of the at least one biomolecular sequence includes cellular localization prediction.

[0081] According to still further features in the described preferred embodiments the analysis of the at least one biomolecular sequence includes homology analysis.

[0082] According to still further features in the described preferred embodiments the at least one ontology is selected from the group consisting of molecular biology, microbiology, developmental biology, immunology, virology, biochemistry, physiology, pharmacology, medicine, bioinformatics, cell biology, endocrinology, structural biology, mathematics, chemistry, medicine, plant sciences, neurology, genetics, zoology, ecology, genomics, cheminformatics, computer sciences, statistics, physics and artificial intelligence.

[0083] According to still further features in the described preferred embodiments the ontology includes a subontology.

[0084] According to still further features in the described preferred embodiments the method further comprising scoring the at least one ontology assigned to a cluster of the plurality of clusters according to: (i) a degree of homology characterizing the cluster; and (ii) relevance of annotation to information obtained from literature text mining.

[0085] According to still further features in the described preferred embodiments the system further comprising scoring the at least one ontology assigned to a cluster of the plurality of clusters according to: (i) a degree of homology characterizing the cluster; and (ii) relevance of annotation to information obtained from literature text mining.

[0086] According to still further features in the described preferred embodiments the method further comprising generating a sequence profile to each cluster of the plurality of clusters following step (b).

[0087] According to still further features in the described preferred embodiments the system further comprising generating a sequence profile to each cluster of the plurality of clusters following step (b).

[0088] According to still a further aspect of the present invention there is provided a computer readable storage medium, comprising a database stored in a retrievable manner, the database including biomolecular sequence information as set forth in files:

[0089] “Transcripts_nucleotide_seqs_part1”

[0090] “Transcripts_nucleotide_seqs_part2”

[0091] “Transcripts_nucleotide_seqs_part3.new” and/or

[0092] “Protein.seqs”

[0093] provided in CD-ROMs 1 and/or 2 enclosed herewith, and biomolecular sequence annotations as set forth in file “Summary_table.new” of CD-ROM 3 enclosed herewith.

[0094] According to still a further aspect of the present invention there is provided a method of diagnosing colon cancer in a subject, the method comprising identifying in the subject the presence or absence of a biomolecular sequence selected from the group consisting of SEQ ID NOs: 4, 39, 24-28, 35-38, 12 and 29-31 wherein presence of the biomolecular sequence indicates colon cancer in the subject.

[0095] According to still a further aspect of the present invention there is provided method of diagnosing lung cancer in a subject, the method comprising identifying in the subject the presence or absence of a biomolecular sequence selected from the group consisting of SEQ ID NOs: 15, 18, 21 and 32 wherein presence of the biomolecular sequence indicates lung cancer in the subject.

[0096] According to still a further aspect of the present invention there is provided a method of diagnosing Ewing sarcoma in a subject, the method comprising identifying in the subject the presence or absence of a biomolecular sequence as set forth in SEQ ID NO: 7, wherein presence of the biomolecular sequence indicates Ewing sarcoma in the subject.

[0097] According to still a further aspect of the present invention there is provided a computer readable storage medium comprising data stored in a retrievable manner, the data including sequence information of differentially expressed biomolecular sequences as set forth in files:

[0098] “Transcripts_nucleotide_seqs_part1”

[0099] “Transcripts_nucleotide_seqs_part2”

[0100] “Transcripts_nucleotide_seqs_part3.new” and

[0101] “Protein.seqs”

[0102] provided in CD-ROMs 1 and/or 2 enclosed herewith, and sequence annotations as set forth in annotation categories “SA” and “RA”, in the file “Summary_table.new” of CD-ROM3 enclosed herewith.

[0103] According to still a further aspect of the present invention there is provided a computer readable storage medium comprising data stored in a retrievable manner, the data including sequence information of biomolecular sequences exhibiting gain of function or loss of function as set forth in files: “Transcripts_nucleotide_seqs_part1”

[0104] “Transcripts_nucleotide_seqs_part2”

[0105] “Transcripts_nucleotide_seqs_part3.new” and

[0106] “Protein.seqs”

[0107] provided in CD-ROMs 1 and/or 2 enclosed herewith, and sequence annotations as set forth in annotation category “DN”, in the file “Summary_table.new” of CD-ROM3 enclosed herewith.

[0108] According to still further features in the described preferred embodiments the database further includes information pertaining to generation of the data and potential uses of the data.

[0109] According to still further features in the described preferred embodiments the medium is selected from the group consisting of a magnetic storage medium, an optical storage medium and an optico-magnetic storage medium.

[0110] According to still further features in the described preferred embodiments the database further includes information pertaining to gain and/or loss of function of the differentially expressed mRNA splice variants or polypeptides encoded thereby.

[0111] The present invention successfully addresses the shortcomings of the presently known configurations by providing methods and systems useful for systematically annotating biomolecular sequences.

[0112] Unless otherwise defined, all technical and scientific terms used herein have the same meaning as commonly understood by one of ordinary skill in the art to which this invention belongs. Although methods and materials similar or equivalent to those described herein can be used in the practice or testing of the present invention, suitable methods and materials are described below. In case of conflict, the patent specification, including definitions, will control. In addition, the materials, methods, and examples are illustrative only and not intended to be limiting.

### BRIEF DESCRIPTION OF THE DRAWINGS

[0113] The invention is herein described, by way of example only, with reference to the accompanying drawings. With specific reference now to the drawings in detail, it is stressed that the particulars shown are by way of example and for purposes of illustrative discussion of the preferred embodiments of the present invention only, and are presented in the cause of providing what is believed to be the most useful and readily understood description of the principles and conceptual aspects of the invention. In this regard, no attempt is made to show structural details of the invention in more detail than is necessary for a fundamental understanding of the invention, the description taken with the drawings making apparent to those skilled in the art how the several forms of the invention may be embodied in practice.

[0114] In the drawings:

[0115] FIG. 1a illustrates a system designed and configured for generating a database of annotated biomolecular sequences according to the teachings of the present invention.

[0116] FIG. 1b illustrates a remote configuration of the system described in FIG. 1a.

[0117] FIG. 2 illustrates a gastrointestinal tissue hierarchy dendogram generated according to the teachings of the present invention.

[0118] FIG. 3 is a scheme illustrating multiple alignment of alternatively spliced expressed sequences with a genomic sequence including 3 exons (A, B and C) and two introns. Two alternative splicing events are described; One from the donor site, which involves an AB junction, between donor and proximal acceptor and an AC junction, between donor and distal acceptor; A Second alternative splicing event is described from the acceptor site, which involves AC junction, between distal donor and acceptor and BC junction, between proximal donor and acceptor.

[0119] FIG. 4 is a tissue hierarchy dendogram generated according to the teachings of the present invention. The higher annotation levels are marked with a single number, i.e., 1-16. The lower annotation levels are marked within the relevant category as one-four numbers after the point (e.g. 4. genitourinary system; 4.2 genital system; 4.2.1 women genital system; 4.2.1.1 cervix).

[0120] FIG. 5 is a graph illustrating a correlation between LOD scores of textual information analysis and accuracy of ontological annotation prediction. Results are based on self-validation studies. Only predictions made with LOD scores above 2 were evaluated and used for GO annotation process.

[0121] FIGS. 6a-c are histograms showing the distribution of proteins (closed squares) and contigs (opened squares) from Ensembl version 1.0.0 in the major nodes of three GO categories—cellular component (FIG. 6a), molecular function (FIG. 6b), and biological process (FIG. 6c).

[0122] FIG. 7 illustrates results from RT-PCR analysis of the expression pattern of the AA535072 (SEQ ID NO: 39) colorectal cancer-specific transcript. The following cell and tissue samples were tested: B—colon carcinoma cell line SW480 (ATCC-228); C—colon carcinoma cell line SW620 (ATCC-227); D—colon carcinoma cell line colo-205 (ATCC-222). Colon normal tissue indicates a pool of 10 different samples, (Biochain, cat no A406029). The adenocarcinoma sample represents a pool of spleen, lung, stomach and kidney adenocarcinomas, obtained from patients. Each of the tissues (i.e., colon carcinoma samples Duke's A-D; and normal muscle, pancreas, breast, liver, testis, lung, heart, ovary, thymus, spleen kidney, placenta, stomach, brain) were obtained from 3-6 patients and pooled.

[0123] FIG. 8 illustrates results from RT-PCR analysis of the expression pattern of the AA513157 (SEQ ID NO: 7) Ewing sarcoma specific transcript. The (+) or (−) symbols, indicate presence or absence of reverse transcriptase in the reaction mixture. A molecular weight standard is indicated by M. Tissue samples (i.e., Ewing sarcoma samples, spleen adenocarcinoma, brain, prostate and thymus) were obtained from patients. The Ln-CAP human prostatic adenocarcinoma cell line was obtained from the ATCC (Manassas, Va.).

[0124] FIG. 9 is an autoradiogram of a northern blot analysis depicting tissue distribution and expression levels of AA513157 (SEQ ID NO: 7) Ewing sarcoma specific transcript. Arrows indicate the molecular weight of 28S and 18S ribosomal RNA subunits. The indicated tissue samples were obtained from patients and SK-ES-1-Ewing sarcoma cell-line was obtained from the ATCC (CRL-1427).

[0125] FIG. 10 illustrates results from semi quantitative RT-PCR analysis of the expression pattern of the AA469088 (SEQ ID NO: 40) colorectal specific transcript. Colon normal was obtained from Biochain, cat no: A406029. The adenocarcinoma sample represents a pool of spleen, lung, stomach and kidney adenocarcinomas, obtained from patients. Each of all other tissues (i.e., colon carcinoma samples Duke's A-D; and normal thymus, spleen, kidney, placenta, stomach, brain) were obtained from 3-6 patients and pooled.

[0126] FIG. 11 is a histogram depicting Real-Time RT-PCR quantification of copy number, of a lung specific transcript, (SEQ ID NO: 15). Amplification products obtained from the following tissues were quantified; normal salivary gland from total RNA (Clontech, cat no: δ4110-1); lung normal from pooled adult total RNA (BioChain, cat no:A409363); lung tumor squamos cell carcinoma (Clontech, cat no: 64013-1); lung tumor squamos cell carcinoma (BioChain, cat no:A409017); pooled lung tumor squamos cell carcinoma (BioChain, cat no: A411075); moderately differentiated squamos cell carcinoma (BioChain, cat no: A409091); well differentiated squamos cell carcinoma (BioChain, cat no: A408175); pooled adenocarcinoma (BioChain, cat no: A411076); moderately differentiated alveolus cell carcinoma (BioChain, cat no: A409089); non-small cell lung carcinoma cell line H1299; The following normal and tumor samples were obtained from patients: normal lung (internal number-CG-207N), lung carcinoma (internal number-CG-72), squamos cell carcinoma (internal number-CG-196), squamos cell carcinoma (internal number-CG-207), lung adenocarcinoma (internal number-CG-120), lung adenocarcinoma (internal number-CG-160). Copy number was normalized to the levels of expression of the housekeeping genes Proteasome 26S subunit (dark columns) and GADPH (bright columns).

[0127] FIG. 12 is a histogram depicting Real-Time RT-PCR quantification of copy number, of the lung specific transcript (SEQ ID NO: 32). Amplification products obtained from the following tissues and cell-lines were quantified; lung normal from pooled adult total RNA (BioChain, cat no:A409363); lung tumor squamos cell carcinoma (Clontech, cat no: 64013-1); lung tumor squamos cell carcinoma (BioChain, cat no:A409017); pooled lung tumor squamos cell carcinoma (BioChain, cat no: A411075); moderately differentiated squamos cell carcinoma (BioChain, cat no: A409091); well differentiated squamos cell carcinoma (BioChain, cat no: A408175); pooled adenocarcinoma (BioChain, cat no: A411076); moderately differentiated alveolus cell carcinoma (BioChain, cat no: A409089); non-small cell lung carcinoma cell line H1299; The following normal and tumor samples were obtained from patients: normal lung (internal number-CG-207N), lung carcinoma (internal number-CG-72), squamos cell carcinoma (internal number-CG-196), squamos cell carcinoma (internal number-CG-207), lung adenocarcinoma (internal number-CG-120), lung adenocarcinoma (internal number-CG-160). Copy number was normalized to the levels of expression of the housekeeping genes Proteasome 26S subunit (dark columns) and GADPH (bright columns).

[0128] FIG. 13 is a histogram depicting Real-Time RT-PCR quantification of copy number, of the lung specific transcript (SEQ ID NO: 18). Amplification products obtained from the following tissues and cell-lines were quantified; lung normal from pooled adult total RNA (BioChain, cat no:A409363); lung tumor squamos cell carcinoma (Clontech, cat no: δ4013-1); lung tumor squamos cell carcinoma (BioChain, cat no:A409017); pooled lung tumor squamos cell carcinoma (BioChain, cat no: A411075); moderately differentiated squamos cell carcinoma (BioChain, cat no: A409091); well differentiated squamos cell carcinoma (BioChain, cat no: A408175); pooled adenocarcinoma (BioChain, cat no: A411076); moderately differentiated alveolus cell carcinoma (BioChain, cat no: A409089); non-small cell lung carcinoma cell line H1299; The following normal and tumor samples were obtained from patients: normal lung (internal number-CG-207N), lung carcinoma (internal number-CG-72), squamos cell carcinoma (internal number-CG-196), squamos cell carcinoma (internal number-CG-207), lung adenocarcinoma (internal number-CG-120), lung adenocarcinoma (internal number-CG-160). Copy number was normalized to the levels of expression of the housekeeping genes Proteasome 26S subunit (dark columns) and GADPH (bright columns).

[0129] FIG. 14 is a histogram depicting Real-Time RT-PCR quantification of copy number, of a lung specific transcript (SEQ ID NO: 21). Amplification products obtained from the following tissues and cell-lines were quantified; Samples 1-6 are commercial normal lung samples (BioChain, CDP-061010; A503205, A503384, A503385, A503204, A503206, A409363). Sample 7 is lung well differentiated adenocarcinoma (BioChain, CDP-064004A; A504117). Sample 8 is lung moderately differentiated adenocarcinoma (BioChain, CDP-064004A; A504119). Sample 9 is lung moderately to poorly differentiated adenocarcinoma (BioChain, CDP-064004A; A504116). Sample 10 is lung well differentiated adenocarcinoma (BioChain, CDP-064004A; A504118). Samples 11-16 are lung adenocarcinoma samples obtained from patients. Sample 17 is lung moderately differentiated squamous cell carcinoma (BioChain, CDP-064004B; A503187). Sample 18 is lung squamous cell carcinoma (BioChain, CDP-064004B; A503386). Samples 20-21 are lung moderately differentiated squamous cell carcinoma (BioChain, CDP-064004B; A503387, A503383). Sample 22 is lung squamous cell carcinoma pooled (BioChain, CDP-064004B; A411075). Samples 23-26 and sample 31 are lung squamous cell carcinoma obtained from patients. Sample 27 is lung squamous cell carcinoma (Clontech, 64013-1). Sample 28 is lung squamous cell carcinoma (BioChain, A409017). Sample 29 is lung moderately differentiated squamous cell carcinoma (BioChain, CDP-064004B; A409091). Sample 30 is lung well differentiated squamous cell carcinoma (BioChain, CDP-064004B; A408175). Samples 32-35 are lung small cell carcinoma (BioChain, CDP-064004D; A504115, A501390, A501389, A501391). Sample 36-37 are lung large cell carcinoma (BioChain, CDP-064004C; A504113, A504114). Sample 38 is lung moderately differentiated alveolus cell carcinoma (BioChain, A409089). Sample 39 is lung carcinoma obtained from patient. Sample 40 is lung H1299 non-small cell carcinoma cell line. Sample 41 is normal salivary gland sample (Clontech, 64110-1). Copy number was normalized to the levels of expression of the housekeeping genes Proteasome 26S subunit (dark columns) and GADPH (bright columns).

### DESCRIPTION OF THE PREFERRED EMBODIMENTS

[0130] The present invention is of methods and systems, which can be used for annotating biomolecular sequences. Specifically, the present invention can be used to identify and annotate differentially expressed biomolecular sequences, such as differentially expressed alternatively spliced sequences.

[0131] The principles and operation of the present invention may be better understood with reference to the drawings and accompanying descriptions.

[0132] Before explaining at least one embodiment of the invention in detail, it is to be understood that the invention is not limited in its application to the details of construction and the arrangement of the components set forth in the following description or illustrated in the drawings. The invention is capable of other embodiments or of being practiced or carried out in various ways. Also, it is to be understood that the phraseology and terminology employed herein is for the purpose of description and should not be regarded as limiting.

### TERMINOLOGY

[0133] As used herein, the term “oligonucleotide” refers to a single stranded or double stranded oligomer or polymer of ribonucleic acid (RNA) or deoxyribonucleic acid (DNA) or mimetics thereof. This term includes oligonucleotides composed of naturally-occurring bases, sugars and covalent internucleoside linkages (e.g., backbone) as well as oligonucleotides having non-naturally-occurring portions which function similarly. Such modified or substituted oligonucleotides are often preferred over native forms because of desirable properties such as, for example, enhanced cellular uptake, enhanced affinity for nucleic acid target and increased stability in the presence of nucleases.

[0134] The phrase “complementary DNA” (cDNA) refers to the double stranded or single stranded DNA molecule, which is synthesized from a messenger RNA template.

[0135] The term “contig” refers to a series of overlapping sequences with sufficient identity to create a longer contiguous sequence. A plurality of contigs may form a cluster. Clusters are generally formed based upon a specified degree of homology and overlap (e.g., a stringency). The different contigs in a cluster do not typically represent the entire sequence of the gene, rather the gene may comprise one or more unknown intervening sequences between the defined contigs.

[0136] The term “cluster” refers to a nucleic acid sequence cluster or a protein sequence cluster. The former refers to a group of nucleic acid sequences which share a requisite level of homology and or other similar traits according to a given clustering criterion; and the latter refers to a group of protein sequences which share a requisite level of homology and/or other similar traits according to a given clustering criterion.

[0137] A process and/or method to group nucleic acid or protein sequences as such is referred to as clustering, which is typically performed by a clustering (i.e., alignment) application program implementing a cluster algorithm.

[0138] As used herein the phrase “biomolecular sequences” refers to amino acid sequences (i.e., peptides, polypeptides) and nucleic acid sequences, which include but are not limited to genomic sequences, expressed sequence tags, contigs, complementary DNA (cDNA) sequences, pre-messenger RNA (mRNA) sequences, and mRNA sequences.

[0139] With the presentation of the human genome working draft, data analysis rather than data collection presents the biggest challenge to biologists. Efforts to ascribe biological meaning to genomic data, include the development of advanced wet laboratorial techniques as well as computerized algorithms. While the former are limited due to inaccuracy, time consumption, labor intensiveness and costs the latter are still unfeasible due to the poor organization of on hand sequence databases as well as the composite nature of biological data.

[0140] As is further described hereinbelow, the present inventors have developed a computer-based approach for the functional, spatial and temporal analysis of biological data. The present methodology generates comprehensive databases which greatly facilitate the use of available genetic information in both research and commercial applications.

[0141] As is further described hereinunder, the present invention encompasses several novel approaches for annotating biomolecular sequences.

[0142] “Annotating” refers to the act of discovering and/or assigning an annotation (i.e., critical or explanatory notes or comment) to a biomolecular sequence of the present invention.

[0143] The term “annotation” refers to a functional or structural description of a sequence, which may include identifying attributes such as locus name, keywords, Medline references, cloning data, information of coding region, regulatory regions, catalytic regions, name of encoded protein, subcellular localization of the encoded protein, protein hydrophobicity, protein function, mechanism of protein function, information on metabolic pathways, regulatory pathways, protein-protein interactions and tissue expression profile.

### The Ontological Annotation Approach

[0144] An ontology refers to the body of knowledge in a specific knowledge domain or discipline such as molecular biology, microbiology, immunology, virology, plant sciences, pharmaceutical chemistry, medicine, neurology, endocrinology, genetics, ecology, genomics, proteomics, cheminformatics, pharmacogenomics, bioinformatics, computer sciences, statistics, mathematics, chemistry, physics and artificial intelligence.

[0145] An ontology includes domain-specific concepts—referred to herein as sub-ontologies. A sub-ontology may be classified into smaller and narrower categories.

[0146] The ontological annotation approach of the present invention is effected as follows.

[0147] First, biomolecular sequences are computationally clustered according to a progressive homology range, thereby generating a plurality of clusters each being of a predetermined homology of the homology range.

[0148] Progressive homology according to this aspect of the present invention is used to identify meaningful homologies among biomolecular sequences and thereby assign new ontological annotations to sequences, which share requisite levels of homologies. Essentially, a biomolecular sequence is assigned to a specific cluster if displays a predetermined homology to at least one member of the cluster (i.e., single linkage). As used herein “progressive homology range” refers to a range of homology thresholds, which progress via predetermined increments from a low homology level (e.g. 35%) to a high homology level (e.g. 99%). Further description of a progressive homology range is provided in the Examples section which follows.

[0149] Following generation of clusters, one or more ontologies are assigned to each cluster. Ontologies are derived from an annotation preassociated with at least one biomolecular sequence of each cluster; and/or generated by analyzing (e.g., text-mining) at least one biomolecular sequence of each cluster thereby annotating biomolecular sequences.

[0150] Any annotational information identified and/or generated according to the teachings of the present invention can be stored in a database which can be generated by a suitable computing platform.

[0151] Thus, the method according to this aspect of the present invention provides a novel approach for annotating biomolecular sequences even on a scale of a genome, a transcriptom (i.e., the repertoire of all messenger RNA molecules transcribed from a genome) or a proteom (i.e., the repertoire of all proteins translated from messenger RNA molecules). This enables transcriptome-wise comparative analyses (e.g., analyzing chromosomal distribution of human genes) and cross-transcriptome comparative studies (e.g., comparing expressed data across species) both of which may involve various subontologies such as molecular function, biological process and cellular localization.

[0152] Biomolecular sequences which can be used as working material for the annotating process according to this aspect of the present invention can be obtained from a biomolecular sequence database. Such a database can include protein sequences and/or nucleic acid sequences derived from libraries of expressed messenger RNA [i.e., expressed sequence tags (EST)], cDNA clones, contigs, pre-mRNA, which are prepared from specific tissues or cell-lines or from whole organisms.

[0153] This database can be a pre-existing publicly available database [i.e., GenBank database maintained by the National Center for Biotechnology Information (NCBI), part of the National Library of Medicine, and the TIGR is database maintained by The Institute for Genomic Research, Blocks database maintained by the Fred Hutchinson Cancer Research Center, Swiss-Prot site maintained by the University of Geneva and GenPept maintained by NCBI and including public protein-sequence database which contains all the protein databases from GenBank,] or private databases (i.e., the LifeSeq.™ and PathoSeq.™ databases available from Incyte Pharmaceuticals, Inc. of Palo Alto, Calif.). Optionally, biomolecular sequences of the present invention can be assembled from a number of pre-existing databases as described in Example 5 of the Examples section.

[0154] Alternatively, the database can be generated from sequence libraries including, but not limited to, cDNA libraries, EST libraries, mRNA libraries and the like.

[0155] Construction and sequencing of a cDNA library is one approach for generating a database of expressed mRNA sequences. cDNA library construction is typically effected by tissue or cell sample preparation, RNA isolation, cDNA sequence construction and sequencing.

[0156] It will be appreciated that such cDNA libraries can be constructed from RNA isolated from whole organisms, tissues, tissue sections, or cell populations. Libraries can also be constructed from a tissue reflecting a particular pathological or physiological state.

[0157] Once raw sequence data is obtained, biomolecular sequences are computationally clustered according to a progressive homology range using one or more clustering algorithms. To obtain progressive clusters, the biomolecular sequences are clustered through single linkage. Namely, a biomolecular sequence belongs to a cluster if this sequence shares a sequence homology above a certain threshold to one member of the cluster. The threshold increments from a high homology level to a low homology level with a predetermined resolution. Preferably the homology range is selected from 99%-35%.

[0158] Computational clustering can be effected using any commercially available alignment software including the local homology algorithm of Smith & Waterman, Adv. Appl. Math. 2:482 (1981), using the homology alignment algorithm of Needleman & Wunsch, J. Mol. Biol. 48:443 (1970), using the search for similarity method of Pearson & Lipman, Proc. Nat'l. Acad. Sci. USA 85:2444 (1988), or using computerized implementations of algorithms GAP, BESTFIT, FASTA, and TFASTA in the Wisconsin Genetics Software Package Release 7.0, Genetics Computer Group, 575 Science Dr., Madison, Wis.

[0159] Another example of an algorithm which is suitable for sequence alignment is the BLAST algorithm, which is described in Altschul et al., J. Mol. Biol. 215:403-410 (1990). Software for performing BLAST analyses is publicly available through the website of the National Center for Biotechnology Information.

[0160] Since the present invention requires processing of large amounts of data, sequence alignment is preferably effected using assembly software.

[0161] A number of commonly used computer software fragment read assemblers capable of forming clusters of expressed sequences, and aligning members of the cluster (individually or as an assembled contig) with other sequences (e.g., genomic database) are now available. These packages include but are not limited to, The TIGR Assembler [Sutton G. et al. (1995) Genome Science and Technology 1:9-19], GAP [Bonfield J K. et al. (1995) Nucleic Acids Res. 23:4992-4999], CAP2 [Huang X. et al. (1996) Genomics 33:21-31], the Genome Construction Manager [Laurence C B. Et al. (1994) Genomics 23:192-201], Bio Image Sequence Assembly Manager, SeqMan [Swindell S R. and Plasterer J N. (1997) Methods Mol. Biol. 70:75-89], and LEADS and GenCarta (Compugen Ltd. Israel).

[0162] It will be appreciated that since applying sequence homology analysis on large number of sequences is computationally intensive, local alignment (i.e., the alignment of portions of protein sequences) is preferably effected prior to global alignment (alignment of protein sequences along their entire length), as described in Example 6 of the Examples section.

[0163] Once progressive clusters are formed, one or more ontological annotations (i.e., assigning an ontology) are assigned to each cluster.

[0164] Systematic and standardized ontological nomenclature is preferably used. Such nomenclature (i.e., keywords) can be obtained from several sources. For example, ontological annotations derived from three main ontologies: molecular function, biological process and cellular component are available from the website of the Gene Ontology Consortium.

[0165] Alternatively a list of homogenized ontological nomenclature can be obtained from the website of Acromed—a computer generated database of biomedical acronyms and the associated long forms extracted from the recent Medline abstracts (available at the website of the Expert Protein Analysis System-ExPASy, Swiss Institute for Bioinformatics).

[0166] Optionally, various conversion tables which link Enzyme Commission

[symbol]

[0167] Ontological annotations can also be extracted from sequence associated Medical subject heading (MeSH) terms which are assigned to published papers.

[0168] Additional information on text mining is provided in Example 7 of the Examples section and is disclosed in “Mining Text Using Keyword Distributions,” Ronen Feldman, Ido Dagan, and Haym Hirsh, Proceedings of the 1995Workshop on Knowledge Discovery in Databases, “Finding Associations in Collections of Text,” Ronen Feldman and Haym Hirsh, Machine Learning and Data Mining: Methods and Applications, edited by R. S. Michalski, I. Bratko, and M. Kubat, John Wiley & Sons, Ltd., 1997 “Technology Text Mining, Turning Information Into Knowledge: A White Paper from IBM,” edited by Daniel Tkach, Feb. 17, 1998, each of which is fully incorporated herein by reference.

[0169] It will be appreciated that text mining may be performed, in this and other embodiments of the present invention, for the text terms extracted from the definitions of gene or protein sequence records, retrievable from databases such as GenBank and Swiss-Prot and title line, abstract of scientific papers, retrievable from Medline database (e.g., PubMed at the NCBI website).

[0170] Computer-dedicated software for biological text analysis is available from Expert Protein Analysis System ExPASy website of the Swiss Institute of Bioinformatics. Examples include, but are not limited to, MedMiner—A software system which extracts and organizes relevant sentences in the literature based on a gene, gene-gene or gene-drug query; Protein Annotator's Assistant—A software system which assists protein annotators in the task of assigning functions to newly sequenced proteins; and XplorMed—A software system which explores a set of abstracts derived from a bibliographic search in MEDLINE.

[0171] Alternatively, assignment of ontological annotations may be effected by analyzing molecular, cellular and/or functional traits of the biomolecular sequences. Prediction of cellular localization may be done using any computer dedicated software. For example prediction of cellular localization can be done using the ProLoc (Einat Hazkani-Covo, Erez Levanon, Galit Rotman, Dan Graur and Amit Novik, a manuscript submitted for publication) computational platform. This software is capable of predicting the cellular localization of polypeptide sequences based on inherent features, including specific localization signatures, protein domains, amino acid composition, pI and protein length. Other examples for cellular localization prediction softwares include PSORT—Prediction of protein sorting signals and localization sites and TargetP—Prediction of subcellular location, both available from the from Expert Protein Analysis System ExPASy website of the Swiss Institute of Bioinformatics.

[0172] Prediction of functional annotations may be effected by motif analysis of the biomolecular sequences of the present invention. Thus for example, by implementing any motif analysis software, which is based on protein homology (see for example, genome.net at the Kyoto University Bioinformatics Center website) it is possible to predict functional motifs of DNA sequences including repeats, promoter sequences and CpG islands and of encoded proteins such as zinc finger and leucine zipper.

[0173] Due to the progressive nature of the clusters of the present invention, ontology assignment starts at the highest level of homology. Any biomolecular sequence in the cluster, which shares identical level of homology compared to an ontologically annotated protein in the cluster is assigned the same ontological annotation. This procedure progresses from the highest level of homology to a lower threshold level with a predetermined increment resolution. Newly discovered homologies enable assignment of existing ontological annotations to biomolecular sequences sharing homologous sequences and being previously unannotated or partially annotated (see Examples 5-9 of the Examples section).

[0174] Once assignment of an annotation is effected, annotated clusters are disassembled resulting in annotation of each biomolecular sequence of the cluster.

[0175] Such annotated biomolecular sequences are then tested for false annotation. This is effected using the following scoring parameters:

[0176] (i) A degree of homology characterizing the progressive cluster—accuracy of the annotation directly correlates with the homology level used for the annotation process (see Examples 7-9 of the Examples section).

[0177] (ii) Relevance of annotation to information obtained from literature text mining—each assigned ontological annotation which results from literature text mining or functional or cellular prediction is assessed using scoring parameters such as LOD score (For further details see Example 7 of the Examples section).

[0178] The present invention also enables the use of the homologies identified according to the teachings of the present invention to annotate more sensitively and rapidly a query sequence. Essentially this involves building a sequence profile for each annotated cluster. A profile enables scoring of a biomolecular sequence according to functional domains along a sequence and generally makes searches more sensitive. Essentially, clustered sequences are also tested for relevance to the cluster based upon shared functional domains and other characteristic sequence features.

[0179] Ontologically annotated biomolecular sequences are stored in a database for further use. Additional information on generation and contents of such databases is provided hereinunder.

[0180] Such a database can be used to query functional domains and sequences comprising thereof. Alternatively, the database can be used to query a sequence, and retrieve the compatible annotations.

[0181] Although the present methodology can be effected using prior art systems modified for such purposes, due to the large amounts of data processed and the vast amounts of processing needed, the present methodology is preferably effected using a dedicated computational system.

[0182] Thus, according to another aspect of the present invention and as illustrated in FIGS. 1a-b, there is provided a system for generating a database of annotated biomolecular sequences.

[0183] System 10 includes a processing unit 12, which executes a software application designed and configured for annotating biomolecular sequences, as described hereinabove. System 10 further serves for storing biomolecular sequence information and annotations in a retrievable/searchable database 18. Database 18 further includes information pertaining to database generation.

[0184] System 10 may also include a user interface 14 (e.g., a keyboard and/or a mouse, monitor) for inputting database or database related information, and for providing database information to a user.

[0185] System 10 of the present invention may be any computing platform known in the art including but not limited to a personal computer, a work station, a mainframe and the like.

[0186] Preferably, database 18 is stored on a computer readable media such as a magnetic optico-magnetic or optical disk.

[0187] System 10 of the present invention may be used by a user to query the stored database of annotations and sequence information to retrieve biomolecular sequences stored therein according to inputted annotations or to retrieve annotations according to a biomolecular sequence query.

[0188] It will be appreciated that the connection between user interface 14 and processing unit 12 is bi-directional. Likewise, processing unit 12 and database 18 also share a two-way communication channel, wherein processing unit 12 may also take input from database 18 in performing annotations and iterative annotations. Further, user interface 14 is linked directly to database 18, such a user may dispatch queries to database 18 and retrieve information stored therein. As such, user interface 14 allows a user to compile queries, send instructions, view querying results and performing specific analyses on the results as needed.

[0189] In performing ontological annotations, processing unit 12 may take input from one or more application modules 16. Application module 16 performs a specific operation and produced a relevant annotative input for processing unit 12. For example, application module 16 may perform cellular localization analysis on a biomolecular sequence query, thereby determining the cellular localization of the encoded protein. Such a functional annotation is then input to and used by processing unit 12. Examples for application software for cellular localization prediction are provided hereinabove.

[0190] System 10 of the present invention may also be connected to one or more external databases 20. External database 20 is linked to processing unit 12 in a bi-directional manner, similar to the connection between database 18 and processing unit 12. External database 20 may include any background information and/or sequence information that pertains to the biomolecular sequence query. External database 20 may be a proprietary database or a publicly available database which is accessible through a public network such as the Internet. External database 20 may feed relevant information to processing unit 12 as it effects iterative ontological annotation. External database 20 may also receive and store ontological annotations generated by processing unit 12. In this case external database 20 may interact with other components of system 10 like database 18.

[0191] It will be appreciated that the databases and application modules of system 10 can be directly connected with processing unit 12 and/or user interface 14 as is illustrated in FIG. 1a, or such a connection can be achieved via a network 22, as is illustrated in FIG. 1b.

[0192] Network 22 may be a private network (e.g., a local area network), a secured network, or a public network (such as the Internet), or a combination of public and private and/or secured networks.

[0193] Thus, the present invention provides a well characterized approach for the systemic annotation of biomolecular sequences. The use of text information analysis, annotation scoring system and robust sequence clustering procedure enables for the first time the creation of the best possible annotations and assignment thereof to a vast number of biomolecular sequences sharing homologous sequences. The availability of ontological annotations for a significant number of biomolecular sequences from different species can provide a comprehensive account of sequence, structural and functional information pertaining to the biomolecular sequences of interest.

### The Hierarchical Annotation Approach

[0194] “Hierarchical annotation” refers to any ontology and subontology, which can be hierarchically ordered. Examples include but are not limited to a tissue expression hierarchy, a developmental expression hierarchy, a pathological expression hierarchy, a cellular expression hierarchy, an intracellular expression hierarchy, a taxonomical hierarchy, a functional hierarchy and so forth.

[0195] According to another aspect of the present invention there is provided a method of annotating biomolecular sequences according to a hierarchy of interest. The method is effected as follows.

[0196] Each of the multiple nodes of the dendrogram is annotated by at least one keyword describing the node, and enabling literature and database text mining, as is further described hereinunder. A list of keywords can be obtained from the website of the Gene Ontology Consortium; measures are taken to include as many keywords, and to include keywords which might be out of date. For example, for tissue annotation (see FIG. 4), a hierarchy was built using all available tissue/libraries sources available in the GenBank, while considering the following parameters: ignoring GenBank synonyms, building anatomical hierarchies, enabling flexible distinction between tissue types (normal versus pathology) and tissue classification levels (organs, systems, cell types, etc.).

[0197] It will be appreciated that the dendrogram of the present invention can be illustrated as a graph, a list, a map or a matrix or any other graphic or textual organization, which can describe a dendrogram. An example of a dendrogram illustrating the gastrointestinal tissue hierarchy is provided in FIG. 2.

[0198] In a second step, each of the biomolecular sequences is assigned to at least one specific node of the dendrogram.

[0199] The biomolecular sequences according to this aspect of the present invention can be annotated biomolecular sequences, unannotated biomolecular sequences or partially annotated biomolecular sequences.

[0200] Annotated biomolecular sequences can be retrieved from pre-existing annotated databases as described hereinabove.

[0201] For example, in GenBank, relevant annotational information is provided in the definition and keyword fields. In this case, classification of the annotated biomolecular sequences to the dendrogram nodes is directly effected. A search for suitable annotated biomolecular sequences is performed using a set of keywords which are designed to classify the biomolecular sequences to the hierarchy (i.e., same keywords that populate the dendrogram)

[0202] In cases where the biomolecular sequences are unannotated or partially annotated, extraction of additional annotational information is effected prior to classification to dendrogram nodes. This can be effected by sequence alignment, as described hereinabove. Alternatively, annotational information can be predicted from structural studies. Where needed, nucleic acid sequences can be transformed to amino acid sequences to thereby enable more accurate annotational prediction.

[0203] Finally, each of the assigned biomolecular sequences is recursively classified to nodes hierarchically higher than the specific nodes, such that the root node of the dendrogram encompasses the full biomolecular sequence set, which can be classified according to a certain hierarchy, while the offspring of any node represent a partitioning of the parent set.

[0204] For example, a biomolecular sequence found to be specifically expressed in “rhabdomyosarcoma”, will be classified also to a higher hierarchy level, which is “sarcoma”, and then to “Mesenchimal cell tumors” and finally to a highest hierarchy level “Tumor”. In another example, a sequence found to be differentially expressed in endometrium cells, will be classified also to a higher hierarchy level, which is “uterus”, and then to “women genital system” and to “genital system” and finally to a highest hierarchy level “genitourinary system”. The retrieval can be performed according to each one of the requested levels.

[0205] Since annotation of publicly available databases is at times unreliable, newly annotated biomolecular sequences are confirmed using computational or laboratory approaches as is further described hereinbelow.

[0206] It will be appreciated that once temporal or spatial annotations of sequences are established using the teachings of the present invention, it is possible to identify those sequences, which are differentially expressed (i.e., exhibit spatial or temporal pattern of expression in diverse cells or tissues). Such sequences are assigned to only a portion of the nodes, which constitute the hierarchical dendrogram.

[0207] Changes in gene expression are important determinants of normal cellular physiology, including cell cycle regulation, differentiation and development, and they directly contribute to abnormal cellular physiology, including developmental anomalies, aberrant programs of differentiation and cancer. Accordingly, the identification, cloning and characterization of differentially expressed genes can provide relevant and important insights into the molecular determinants of processes such as growth, development, aging, differentiation and cancer. Additionally, identification of such genes can be useful in development of new drugs and diagnostic methods for treating or preventing the occurrence of such diseases.

[0208] Newly annotated sequences identified according to the present invention are tested under physiological conditions (i.e., temperature, pH, ionic strength, viscosity, and like biochemical parameters which are compatible with a viable organism, and/or which typically exist intracellularly in a viable cultured yeast cell or mammalian cell). This can be effected using various laboratory approaches such as, for example, FISH analysis, PCR, RT-PCR, southern blotting, northern blotting, electrophoresis and the like (see Examples 13-20 of the Examples section) or more elaborate approaches which are detailed in the Background section.

[0209] It will be appreciated that true involvement of differentially expressed genes in a biological process is better confirmed using an appropriate cell or animal model, as further described hereinunder.

[0210] Although the present methodology can be effected using prior art systems modified for such purposes, due to the large amounts of data processed and the vast amounts of processing needed, the present methodology is preferably effected using a dedicated computational system.

[0211] Such a system is described hereinabove. The system includes a processing unit which executes a software application designed and configured for hierarchically annotating biomolecular sequences as described hereinabove. The system further serves for storing biomolecular sequence information and annotations in a retrievable/searchable database.

[0212] The hierarchical annotation approach enables to assign an appropriate annotation level even in cases where expression is not restricted to a specific tissue type or cell type. For example, different expressed sequences of a single contig which are annotated as being expressed in several different tissue types of a single specific organ or a specific system, are also annotated by the present invention to a higher hierarchy level thus denoting association with the specific organ or system. In such cases using keywords alone would not efficiently identify differentially expressed sequences. Thus for example, a sequence found to be expressed in sarcoma, Ewing sarcoma tumors, pnet, rhabdomyosarcoma, liposarcoma and mesenchymal cell tumors, can not be assigned to specific sarcomas, but still can be annotated as mesenchymal cell tumor specific. Using this hierarchical annotation approach in combination with advanced sequence clustering and assembly algorithms, capable of predicting alternative splicing, may facilitate a simple and rapid identification of gene expression patterns.

### Annotation of Differentially Expressed Alternatively Spliced Sequences

[0213] Although numerous methods have been developed to identify differentially expressed genes, none of these addressed splice variants, which occur in over 50% of human genes. Given the common sequence features of splice variants it is very difficult to identify splice variants which expression is differential, using prior art methodologies. Therefore assigning unique sequence features to differentially expessed splice variants may have an important impact to the understanding of disease development and may serve as valuable markers to various pathologies.

[0214] Thus, according to another aspect of the present invention there is provided a method of identifying sequence features unique to differentially expressed mRNA splice variants. The method is effected as follows.

[0215] First, unique sequence features are computationally identified in identified splice variants of alternatively spliced expressed sequences.

[0216] As used herein the phrase “splice variants” refers to naturally occurring nucleic acid sequences and proteins encoded therefrom which are products of alternative splicing. Alternative splicing refers to intron inclusion, exon exclusion, or any addition or deletion of terminal sequences, which results in sequence dissimilarities between the splice variant sequence and the wild-type sequence.

[0217] Although most alternatively spliced variants result from alternative exon usage, some result from the retention of introns not spliced-out in the intermediate stage of RNA transcript processing.

[0218] As used herein the phrase “unique sequence features” refers to donor/acceptor concatenations (i.e., exon-exon junctions), intron sequences, alternative exon sequences and alternative polyadenylation sequences.

[0219] Alternatively spliced expressed sequences of this aspect of the present invention, can be retrieved from numerous publicly available databases. Examples include but are not limited to ASDB—an alternative splicing database generated using GenBank and Swiss-Prot annotations, AsMamDB—a database of alternative splices in human, mouse and rat, Alternative splicing database—a database of alternative splices from literature, Yeast intron database—Database of intron in yeast, available at the University of California at Santa Cruz website, The Intronerator—alternative splicing in C. elegans based on analysis of EST data available at the University of California at Santa Cruz website, ISIS—Intron Sequence Information System including a section of human alternative splices, available at the University of Queensland, Australia, website and TAP—Transcript Assembly Program result of alternative splicing available at the website of Washington University at St. Louis and HASDB—database of alternative splices detected in human EST data.

[0220] Additionally, alternative splicing sequence data utilized by this aspect of the present invention can be obtained by any of the following bioinformatical approaches.

[0221] Genomically aligned ESTs—the method identifies ESTs which come from the same gene and looks for differences between them that are consistent with alternative splicing, such as large insertion or deletion in one EST. Each candidate splice variant can be further assessed by aligning the ESTs with respective genomic sequence. This reveals candidate exons (i.e., matches to the genomic sequence) separated by candidate splices (i.e., large gaps in the EST-genomic alignment). Since intronic sequences at splice junctions (i.e., donor/acceptor concatenations) are highly conserved (essentially 99.24% of introns have a GT-AG at their 5′ and 3′ ends, respectively) sequence data can be used to verify candidate splices [Burset et al. (2000) Nucleic Acids Res. 28:4364-75 LEADS module [Shoshan, et al, Proceeding of SPIE (eds. M. L. Bittner, Y. Chen, A. N. Dorsel, E. D. Dougherty) Vol. 4266, pp. 86-95 (2001); R. Sorek, G. Ast, D. Graur, Genome Res. In press; Compugen Ltd. U.S. patent application Ser. No. 09/133,987].

[0222] (ii) Identification based on intron information—The method creates a database of individual intron sequences annotated in GenBank and utilizes such sequences to search for EST sequences which include the intronic sequences [Croft et al. (2000) Nat. Genet. 24:340-1].

[0223] (iii) EST alignment to expressed sequences—looks for insertions and deletions in ESTs relative to a set of known mRNAs. Such a method enables to uncover alternatively spliced variants with having to align ESTs with genomic sequence [Brett et al. (2000) FEBS Lett. 474-83-86].

[0224] It will be appreciated that in order to avoid false positive identification of novel splice isoforms, a set of filters is applied. For example, sequences are filtered to exclude EST having sequence deviations, such as chimerism, random variation in which a given EST sequence or potential vector contamination at the ends of an EST.

[0225] Filtering can be effected by aligning ESTs with corresponding genomic sequences. Chimeric ESTs can be easily excluded by requiring that each EST aligns completely to a single genomic locus. Genomic location found by homology search and alignment can often be checked against radiation hybrid mapping data [Muneer et al (2002) Genomic 79:344-8]. Furthermore, since the genomic regions which align with an EST sequence correspond to exon sequences and alignment gaps correspond to introns, the putative splice sites at exon/intron boundaries can be confirmed. Because splice donor and acceptor sites primarily reside within the intron sequence, this methodology can provide validation which is independent of the EST evidence. Reverse transcriptase artifacts or other cDNA synthesis errors may also be filtered out using this approach. Improper inclusion of genomic sequence in ESTs can also be excluded by requiring pairs of mutually exclusive splices in different ESTs.

[0226] Additionally, it will be appreciated that observing a given splice variant in one EST but not in a second EST may be insufficient, as the latter can be an un-spliced EST rather than a biological significant intron inclusion. Therefore measures are taken to focus on mutually exclusive splice variants, two different splice variants observed in different ESTs, which overlap in a genomic sequence. A more stringent filtering may be applied by requiring two splice variants to share one splice site but differ in another.

[0227] Once splice variants are identified, identification of unique sequence features therewithin can be effected computationally by identifying insertions, deletions and donor-acceptor concatenations in ESTs relative to mRNA and preferably genomic sequences.

[0228] As mentioned hereinabove, once alternatively spliced sequences (having unique sequence features) are identified, determination of their expression patterns is effected in order to assign an annotation to the unique sequence feature thereof.

[0229] Expression pattern identification may be effected by qualifying annotations which are preassociated with the alternatively spliced expressed sequences, as described hereinabove. This can be accomplished by scoring the annotations. For example scoring pathological expression annotations can be effected according to: (i) prevalence of the alternatively spliced expressed sequences in normal tissues; (ii) prevalence of the alternatively spliced expressed sequences in pathological tissues; (iii) prevalence of the alternatively spliced expressed sequence in total tissues; and (iv) number of tissues and/or tissue types expressing the alternatively spliced expressed sequences.

[0230] Alternatively, identifying the expression pattern of the alternatively spliced expressed sequences of the present invention, is accomplished by identifying the unique sequence feature thereof. This can be effected by any hybridization-based technique known in the art, such as northern blot, dot blot, RNase protection assay, RT-PCR and the like.

[0231] To this end oligonucleotides probes, which are substantially homologous to nucleic acid sequences that flank and/or extend across the unique sequence features of the alternatively spliced expressed sequences of the present invention are generated.

[0232] Preferably, oligonucleotides which are capable of hybridizing under stringent, moderate or mild conditions, as used in any polynucleotide hybridization assay are utilized. Further description of hybridization conditions is provided hereinunder.

[0233] Oligonucleotides generated by the teachings of the present invention may be used in any modification of nucleic acid hybridization based techniques, which are further detailed hereinunder. General features of oligonucleotide synthesis and modifications are also provided hereinunder.

[0234] Aside from being useful in identifying specific splice variants, oligonucleotides generated according to the teachings of the present invention may also be widely used as diagnostic, prognostic and therapeutic agents in a variety of disorders which are associated with specific splice variants.

[0235] Regulation of splicing is involved in 15% of genetic diseases [Krawzczak et al. (1992) Hum. Genet. 90:41-54] and may contribute for example to cancer mis-splicing of exon 18 in BRCA1, which is caused by a polymorphism in an exonic enhancer [Liu et al. (2001) Nature Genet. 27:55-58].

[0236] Thus, oligonucleotides generated according to the teachings of the present invention can be included in diagnostic kits. For example, oligonucleotides sets pertaining to a specific disease associated with differential expression of an alternatively spliced transcript can be packaged in a one or more containers with appropriate buffers and preservatives along with suitable instructions for use and used for diagnosis or for directing therapeutic treatment. Additional information on such diagnostic kits is provided hereinunder.

[0237] It will be appreciated that an ability to identify alternatively spliced sequences, also facilitates identification of the various products of alternative splicing.

[0238] Recent studies indicate that most alternative splicing events result in an altered protein product [International human genome sequencing consortium (2001) Nature 409:860-921; Modrek et al. (2001) Nucleic Acids Res. 29:2850-2859]. The majority of these changes appear to have a functional relevance (i.e., up-regulating or down-regulating activity), such as the replacement of the amino or carboxyl terminus, or in-frame addition and removal of a functional domain. For example, alternative splicing can lead to the use of a different site for translation initiation (i.e., alternative initiation), a different translation termination site due to a frameshift (i.e., truncation or extension), or the addition or removal of a stop codon in the alternative coding sequence (i.e., alternative termination). Additionally, alternative splicing can change an internal sequence region due to an in-frame insertion or deletion. One example of the latter is the new FC receptor β-like protein, whose C-terminal transmembrane domain and cytoplasmic tail, which is important for signal transduction in this class of receptors, is replaced with a new transmembrane domain and tail by alternative polyadenylation. Another example is the truncated Growth Hormone Receptor which lacks most of its intracellular domain and has been shown to heterodimerize with the full-length receptor, thus causing inhibition of signaling by Growth Hormone [Ross, R. J. M., Growth hormone & IGF Research, 9:42-46, (1999)].

[0239] Thus, assigning a unique sequence feature to a functionally altered splice variant enables identification of such variants. As used herein the phrase “functionally altered splice variants” refers to alternatively spliced expressed sequences, which protein products exhibit gain of function or loss of function or modification of the original function.

[0240] As used herein the phrase “gain of function” refers to any alternative splicing product, which exhibits increased functionality as compared to the wild type gene product.

[0241] As used herein the phrase “loss of function” refers to any alternative splicing product, which exhibits reduced function as compared to the wild type gene product including any reduction in function, total absence of function or dominant negative function.

[0242] As used herein the phrase “dominant negative” refers to the dominant effect of a splice variant on the activity of wild type mRNA. For example, a protein product of an altered splice variant may bind a wild type target protein without enzymatically activating it (e.g., receptor dimmers), thus blocking and preventing the active enzymes from binding and activating the target protein.

[0243] As used herein the phrase “functional domain” refers to a region of a polypeptide, which displays a particular function. This function may give rise to a biological, chemical, or physiological consequence which may be reversible or irreversible and which may include protein-protein interactions (e.g., binding interactions) involving the functional domain, a change in the conformation or a transformation into a different chemical state of the functional domain or of molecules acted upon by the functional domain, the transduction of an intracellular or intercellular signal, the regulation of gene or protein expression, the regulation of cell growth or death, or the activation or inhibition of an immune response.

[0244] Identification of putative functionally altered splice variants, according to this aspect of the present invention, can be effected by identifying sequence deviations from functional domains of wild-type gene products.

[0245] Identification of functional domains can be effected by comparing a wild-type gene product with a series of profiles prepared by alignment of well characterized proteins from a number of different species. This generates a consensus profile, which can then be matched with the query sequence.

[0246] Examples of programs suitable for such identification include, but are not limited to, InterPro Scan—Integrated search in PROSITE, Pfam, PRINTS and other family and domain databases, available at the European Bioinformatics Institute website; ScanProsite—Scans a sequence against PROSITE or a pattern against SWISS-PROT and TrEMBL, available at the ExPASy-Swiss Institute of Bioinformatics website; MotifScan—Scans a sequence against protein profile databases (including PROSITE), available at the hits-Swiss Institute of Bioinformatics website; Frame-ProfileScan—Scans a short DNA sequence against protein profile databases (including PROSITE), available at the ISREC—Swiss Institute of Bioinformatics website; Pfam HMM search—scans a sequence against the Pfam protein families database; FingerPRINTScan—Scans a protein sequence against the PRINTS Protein Fingerprint Database, available at the website of the University of Manchester, UK; FPAT—Regular expression searches in protein databases; PRATT—Interactively generates conserved patterns from a series of unaligned proteins, available at the European Bioinformatics Institute website; PPSEARCH—Scans a sequence against PROSITE (allows a graphical output), available at the European Bioinformatics Institute website; at EBI; PROSITE scan—Scans a sequence against PROSITE (allows mismatches), available at the website of ncsa-Pole Bio-Informatique Lyonnais, France (PBIL); PATTINPROT—Scans a protein sequence or a protein database for one or several pattern(s), available at the website of ncsa-Pole Bio-Informatique Lyonnais, France (PBIL); SMART—Simple Modular Architecture Research Tool, available at the website of the European Molecular Biology Laboratory (EMBL); TIERESIAS—Generate patterns from a collection of unaligned protein or DNA sequences; at IBM, all available at the ExPASy-Swiss Institute of Bioinformatics website.

[0247] It will be appreciated that functionally altered splice variants may also include a sequence alteration at a post-translation modification consensus site, such as, for example, a tyrosine sulfation site, a glycosylation site, etc. Examples of post-translational modification prediction softwares include but are not limited to: SignalP—Prediction of signal peptide cleavage sites; ChloroP—Prediction of chloroplast transit peptides; MITOPROT—Prediction of mitochondrial targeting sequences; Predotar—Prediction of mitochondrial and plastid targeting sequences; NetOGlyc—Prediction of type O-glycosylation sites in mammalian proteins; DictyOGlyc—Prediction of GlcNAc O-glycosylation sites in Dictyostelium; YinOYang—O-beta-GlcNAc attachment sites in eukaryotic protein sequences; big-PI Predictor—GPI Modification Site Prediction; DGPI—Prediction of GPI-anchor and cleavage sites (Mirror site); NetPhos—Prediction of Serine, Threonine and Tyrosine phosphorylation sites in eukaryotic proteins; NetPicoRNA—Prediction of protease cleavage sites in picornaviral proteins; NMT

[0248] Prediction of N-terminal N-myristoylation; Sulfinator—Prediction of tyrosine sulfation sites all available at the ExPASy-Swiss Institute of Bioinformatics website.

[0249] Once putative functionally altered splice variants are identified, they are validated by experimental verification and functional studies, using methodologies well known in the art.

[0250] The Examples section which follows illustrates identification and annotation of splice variants. Identified and annotated sequences are contained within the enclosed CD-ROMs1-3. Some of these sequences represent (i.e., are transcribed from) entirely new splice variants, while others represent new splice variants of known sequences. In any case, the sequences contained in the enclosed CD-ROM are novel in that they include previously undisclosed sequence regions in the context of a known gene or an entirely new sequence in the context of an unknown gene.

[0251] The nucleic acids of the invention can be “isolated” or “purified.” In the event the nucleic acid is genomic DNA, it is considered “isolated” when it does not include coding sequence(s) of a gene or genes immediately adjacent thereto in the naturally occurring genome of an organism; although some or all of the 5′ or 3′ non-coding sequence of an adjacent gene can be included. For example, an isolated nucleic acid (DNA or RNA) can include some or all of the 5′ or 3′ non-coding sequence that flanks the coding sequence (e.g., the DNA sequence that is transcribed into, or the RNA sequence that gives rise to, the promoter or an enhancer in the mRNA). For example, an isolated nucleic acid can contain less than about 5 kb (e.g., less than about 4 kb, 3 kb, 2 kb, 1 kb, 0.5 kb, or 0.1 kb) of the 5′ and/or 3′ sequence that naturally flanks the nucleic acid molecule in a cell in which the nucleic acid naturally occurs. In the event the nucleic acid is RNA or mRNA, it is “isolated” or “purified” from a natural source (e.g., a tissue) or a cell culture when it is substantially free of the cellular components with which it naturally associates in the cell and, if the cell was cultured, the cellular components and medium in which the cell was cultured (e.g., when the RNA or mRNA is in a form that contains less than about 20%, 10%, 5%, 1%, or less, of other cellular components or culture medium). When chemically synthesized, a nucleic acid (DNA or RNA) is “isolated” or “purified” when it is substantially free of the chemical precursors or other chemicals used in its synthesis (e.g., when the nucleic acid is in a form that contains less than about 20%, 10%, 5%, 1%, or less, of the chemical precursors or other chemicals).

[0252] Variants, fragments, and other mutant nucleic acids are also envisaged by the present invention. As noted above, where a given biomolecular sequence represents a new gene (rather than a new splice variant of a known gene), the nucleic acids of the invention include the corresponding genomic DNA and RNA. Accordingly, where a given SEQ ID represents a new gene, variations or mutations can occur not only in that nucleic acid sequence, but in the coding regions, the non-coding regions, or both, of the genomic DNA or RNA from which it was made.

[0253] The nucleic acids of the invention can be double-stranded or single-stranded and can, therefore, either be a sense strand, an antisense strand, or a portion (i.e., a fragment) of either the sense or the antisense strand. The nucleic acids of the invention can be synthesized using standard nucleotides or nucleotide analogs or derivatives (e.g., inosine, phosphorothioate, or acridine substituted nucleotides), which can alter the nucleic acid's ability to pair with complementary sequences or to resist nucleases. Indeed, the stability or solubility of a nucleic acid can be altered (e.g., improved) by modifying the nucleic acid's base moiety, sugar moiety, or phosphate backbone. For example, the nucleic acids of the invention can be modified as taught by Toulmé [Nature Biotech. 19:17, (2001)] or Faria et al. [Nature Biotech. 19:40-44, (2001)], and the deoxyribose phosphate backbone of nucleic acids can be modified to generate peptide nucleic acids [PNAs; see Hyrup et al., (1996) Bioorganic & Medicinal Chemistry 4:5-23].

[0254] PNAs are nucleic acid “mimics”; the molecule's natural backbone is replaced by a pseudopeptide backbone and only the four nucleotide bases are retained. This allows specific hybridization to DNA and RNA under conditions of low ionic strength. PNAs can be synthesized using standard solid phase peptide synthesis protocols as described, for example by Hyrup et al. (supra) and Perry-O'Keefe et al. [Proc. Natl. Acad. Sci. USA (1996) 93:14670-675]. PNAs of the nucleic acids described herein can be used in therapeutic and diagnostic applications.

[0255] Moreover, the nucleic acids of the invention include not only protein-encoding nucleic acids per se (e.g., coding sequences produced by the polymerase chain reaction (PCR) or following treatment of DNA with an endonuclease), but also, for example, recombinant DNA that is: (a) incorporated into a vector (e.g., an autonomously replicating plasmid or virus), (b) incorporated into the genomic DNA of a prokaryote or eukaryote, or (c) part of a hybrid gene that encodes an additional polypeptide sequence (i.e., a sequence that is heterologous to the nucleic acid sequences of the present invention or fragments, other mutants, or variants thereof).

[0256] This aspect of the present invention includes naturally occurring sequences of the nucleic acid sequences described above, allelic variants (same locus; functional or non-functional), homologs (different locus), and orthologs (different organism) as well as degenerate variants of those sequences and fragments thereof. The degeneracy of the genetic code is well known, and one of ordinary skill in the art will be able to make nucleotide sequences that differ from the nucleic acid sequences of the present invention but nevertheless encode the same proteins as those encoded by the nucleic acid sequences of the present invention. The variant sequences (e.g., degenerate variants) can be used in the same manner as naturally occurring sequences. For example, the variant DNA sequences of the invention can be incorporated into a vector, into the genomic DNA of a prokaryote or eukaryote, or made part of a hybrid gene. Moreover, variants (or, where appropriate, the proteins they encode) can be used in the diagnostic assays and therapeutic regimes described below.

[0257] The sequence of nucleic acids of the invention can also be varied to maximize expression in a particular expression system. For example, as few as one and as many as about 20% of the codons in a given sequence can be altered to optimize expression in bacterial cells (e.g., E. coli), yeast, human, insect, or other cell types (e.g., CHO cells).

[0258] The nucleic acids of the invention can also be shorter or longer than those disclosed on CD-ROMs 1 and 2. Where the nucleic acids of the invention encode proteins, the protein-encoding sequences can differ from those represented by specific sequences of file “Protein.seqs” in CD-ROM 2. For example, the encoded proteins can be shorter or longer than those encoded by one of the nucleic acid sequences of the present invention. Nucleotides can be deleted from, or added to, either or both ends of the nucleic acid sequences of the present invention or the novel portions of the sequences that represent new splice variants. Alternatively, the nucleic acids can encode proteins in which one or more amino acid residues have been added to, or deleted from, one or more sequence positions within the nucleic acid sequences.

[0259] The nucleic acid fragments can be short (e.g., 15-30 nucleotides). For example, in cases where peptides are to be expressed therefrom such polynucleotides need only contain a sufficient number of nucleotides to encode novel antigenic epitopes. In cases where nucleic acid fragments serve as DNA or RNA probes or PCR primers, fragments are selected of a length sufficient for specific binding to one of the sequences representing a novel gene or a unique portion of a novel splice variant.

[0260] Nucleic acids used as probes or primers are often referred to as oligonucleotides, and they can hybridize with a sense or antisense strand of DNA or RNA. Nucleic acids that hybridize to a sense strand (i.e., a nucleic acid sequence that encodes protein, e.g., the coding strand of a double-stranded cDNA molecule) or to an mRNA sequence are referred to as antisense oligonucleotides. Antisense oligonucleotides can be used to specifically inhibit transcription of any of the nucleic acid sequences of the present invention.

[0261] Design of antisense molecules must be effected while considering two aspects important to the antisense approach. The first aspect is delivery of the oligonucleotide into the cytoplasm of the appropriate cells, while the second aspect is design of an oligonucleotide which specifically binds the designated mRNA within cells in a way which inhibits translation thereof.

[0262] The prior art teaches of a number of delivery strategies which can be used to efficiently deliver oligonucleotides into a wide variety of cell types [see, for example, Luft (1998) J Mol Med 76(2): 75-6; Kronenwett et al. (1998) Blood 91(3): 852-62; Rajur et al. (1997) Bioconjug Chem 8(6): 935-40; Lavigne et al. (1997) Biochem Biophys Res Commun 237(3): 566-71 and Aoki et al. (1997) Biochem Biophys Res Commun 231(3): 540-5].

[0263] In addition, algorithms for identifying those sequences with the highest predicted binding affinity for their target mRNA based on a thermodynamic cycle that accounts for the energetics of structural alterations in both the target mRNA and the oligonucleotide are also available [see, for example, Walton et al. (1999) Biotechnol Bioeng 65(1): 1-9].

[0264] Such algorithms have been successfully used to implement an antisense approach in cells. For example, the algorithm developed by Walton et al. enabled scientists to successfully design antisense oligonucleotides for rabbit beta-globin (RBG) and mouse tumor necrosis factor-alpha (TNF alpha) transcripts. The same research group has more recently reported that the antisense activity of rationally selected oligonucleotides against three model target mRNAs (human lactate dehydrogenase A and B and rat gp130) in cell culture as evaluated by a kinetic PCR technique proved effective in almost all cases, including tests against three different targets in two cell types with phosphodiester and phosphorothioate oligonucleotide chemistries.

[0265] In addition, several approaches for designing and predicting efficiency of specific oligonucleotides using an in vitro system were also published (Matveeva et al. (1998) Nature Biotechnology 16, 1374-1375).

[0266] Several clinical trials have demonstrated safety, feasibility and activity of antisense oligonucleotides. For example, antisense oligonucleotides suitable for the treatment of cancer have been successfully used (Holmund et al. (1999) Curr Opin Mol Ther 1(3):372-85), while treatment of hematological malignancies via antisense oligonucleotides targeting c-myb gene, p53 and Bcl-2 had entered clinical trials and had been shown to be tolerated by patients [Gerwitz (1999) Curr Opin Mol Ther 1(3):297-306].

[0267] More recently, antisense-mediated suppression of human heparanase gene expression has been reported to inhibit pleural dissemination of human cancer cells in a mouse model [Uno et al. (2001) Cancer Res 61(20:7855-60].

[0268] Thus, the current consensus is that recent developments in the field of antisense technology which, as described above, have led to the generation of highly accurate antisense design algorithms and a wide variety of oligonucleotide delivery systems, enable an ordinarily skilled artisan to design and implement antisense approaches suitable for downregulating expression of known sequences without having to resort to undue trial and error experimentation.

[0269] Antisense oligonucleotides can also be a-anomeric nucleic acids, which form specific double-stranded hybrids with complementary RNA in which, contrary to the usual b-units, the strands run parallel to each other [Gaultier et al., Nucleic Acids Res. 15:6625-6641, (1987)]. Alternatively, antisense nucleic acids can comprise a 2′-o-methylribonucleotide [Inoue et al., Nucleic Acids Res. 15:6131-6148, (1987)] or a chimeric RNA-DNA analogue [Inoue et al., FEBS Lett. 215:327-330, (1987)].

[0270] The nucleic acid sequences described above can also include ribozymes catalytic sequences. Such a ribozyme will have specificity for a protein encoded by the novel nucleic acids described herein (by virtue of having one or more sequences that are complementary to the cDNAs that represent novel genes or the novel portions (i.e., the portions not found in related splice variants) of the sequences that represent new splice variants. These ribozymes can include a catalytic sequence encoding a protein that cleaves mRNA [see U.S. Pat. No. 5,093,246 or Haselhoff and Gerlach, Nature 334:585-591, (1988)]. For example, a derivative of a tetrahymena L-19 IVS RNA can be constructed in which the nucleotide sequence of the active site is complementary to the nucleotide sequence to be cleaved in an mRNA of the invention (e.g., one of the nucleic acid sequences of the present invention; see, U.S. Pat. Nos. 4,987,071 and 5,116,742). Alternatively, the mRNA sequences of the present invention can be used to select a catalytic RNA having a specific ribonuclease activity from a pool of RNA molecules [see, e.g., Bartel and Szostak, Science 261:1411-1418, (1993); see also Krol et al., Bio-Techniques 6:958-976, (1988)].

[0271] Fragments having as few as 9-10 nucleotides (e.g., 12-14, 15-17, 18-20, 21-23, or 24-27 nucleotides) can be useful as probes or expression templates and are within the scope of the present invention. Indeed, fragments that contain about 15-20 nucleotides can be used in Southern blotting, Northern blotting, dot or slot blotting, PCR amplification methods (where naturally occurring or mutant nucleic acids are amplified), colony hybridization methods, in situ hybridization, and the like.

[0272] The present invention also encompasses pairs of oligonucleotides (these can be used, for example, to amplify the new genes, or portions thereof, or the novel portions of the splice variant in, for example, potentially diseased tissue) and groups of oligonucleotides (e.g., groups that exhibit a certain degree of homology (e.g., nucleic acids that are 90% identical to one another) or that share one or more functional attributes).

[0273] When used, for example, as probes, the nucleic acids of the invention can be labeled with a radioactive isotope (e.g., using polynucleotide kinase to add ³²P-labeled ATP to the oligonucleotide used as the probe) or an enzyme. Other labels, such as chemiluminescent, fluorescent, or colorimetric, labels can be used.

[0274] As noted above, the invention features nucleic acids that are complementary to those represented by the nucleic acid sequences of the present invention or novel portions thereof (i.e., novel fragments) and as such are capable of hybridizing therewith. In many cases, nucleic acids that are used as probes or primers are absolutely or completely complementary to all, or a portion of, the target sequence. However, this is not always necessary. The sequence of a useful probe or primer can differ from that of a target sequence so long as it hybridizes with the target under the stringency conditions described herein (or the conditions routinely used to amplify sequences by PCR) to form a stable duplex.

[0275] Hybridization of a nucleic acid probe to sequences in a library or other sample of nucleic acids is typically performed under moderate to high stringency conditions. Nucleic acid duplex or hybrid stability is expressed as the melting temperature (Tm), which is the temperature at which a probe dissociates from a target DNA and, therefore, helps define the required stringency conditions. To identify sequences that are related or substantially identical to that of a probe, it is useful to first establish the lowest temperature at which only homologous hybridization occurs with a particular concentration of salt (e.g., SSC or SSPE). (The terms “identity” or “identical” as used herein are equated with the terms “homology” or “homologous”). Then, assuming a 1% mismatch requires a 1° C. decrease in the Tm, the temperature of the wash (e.g., the final wash) following the hybridization reaction is reduced accordingly. For example, if sequences having at least 95% identity with the probe are sought, the final wash temperature is decreased by 5° C. In practice, the change in Tm can be between 0.5° C. and 1.5° C. per 1% mismatch

[0276] The hybridization conditions described here can be employed when the nucleic acids of the invention are used in, for example, diagnostic assays, or when one wishes to identify, for example, the homologous genes that fall within the scope of the invention (as stated elsewhere, the invention encompasses allelic variants, homologues and orthologues of the sequences that represent new genes). Homologous genes will hybridize with the sequences that represent new genes under a stringency condition described herein.

[0277] A hybridization reaction is carried out at “high stringency” if hybridization (between the probe and a potential target sequence) is carried out at 68° C. in (a) 5×SSC/5×Denhardt's solution/1.0% SDS, (b) 0.5 M NaHPO₄(pH 7.2)/1 mM EDTA/7% SDS, or (c) 50% formamide/0.25 M NaHPO₄(pH 7.2)/0.25 M NaCl/1 mM EDTA/7% SDS, and washing is carried out with (a) 0.2×SSC/0.1% SDS at room temperature or at 42° C., (b) 0.1×SSC/0.1% SDS at 68° C., or (c) 40 mM NaHPO₄(pH 7.2)/1 mM EDTA and either 1% or 5% SDS at 50° C.

[0278] “Moderately stringent” conditions constitute the hybridization conditions described above and one or more washes in 3×SSC at 42° C. Of course, salt concentration and temperature can be varied to achieve the optimal level of identity between the probe and the target nucleic acid. This is well known in the art, and additional guidance is available in, for example, Sambrook et al., 1989, Molecular Cloning, A Laboratory Manual, Cold Spring Harbor Laboratory Press, Cold Spring Harbor, N.Y., and Ausubel et al. (eds.), 1995, Current Protocols in Molecular Biology, John Wiley & Sons, New York, N.Y.

[0279] As mentioned hereinabove, the nucleic acid sequences of the present invention can be modified to encode substitution mutants of the wild type forms. Substitution mutants can include amino acid residues that represent either a conservative or non-conservative change (or, where more than one residue is varied, possibly both). A “conservative” substitution is one in which one amino acid residue is replaced with another having a similar side chain. Families of amino acid residues having similar side chains have been defined in the art. These families include amino acids with basic side chains (e.g., lysine, arginine, histidine), acidic side chains (e.g., aspartic acid, glutamic acid), uncharged polar side chains (e.g., glycine, asparagine, glutamine, serine, threonine, tyrosine, cysteine), nonpolar side chains (e.g., alanine, valine, leucine, isoleucine, proline, phenylalanine, methionine, tryptophan), beta-branched side chains (e.g., threonine, valine, isoleucine) and aromatic side chains (e.g., tyrosine, phenylalanine, tryptophan, histidine). The invention includes polypeptides that include one, two, three, five, or more conservative amino acid substitutions, where the resulting mutant polypeptide has at least one biological activity that is the same, or substantially the same, as a biological activity of the wild type polypeptide.

[0280] Fragments or other mutant nucleic acids can be made by mutagenesis techniques well known in the art, including those applied to polynucleotides, cells, or organisms (e.g., mutations can be introduced randomly along all or part of the nucleic acid sequences of the present invention by saturation mutagenesis). The resultant mutant proteins can be screened for biological activity to identify those that retain activity or exhibit altered activity.

[0281] In certain embodiments, nucleic acids of the invention differ from the nucleic acid sequences provided in files “Transcripts_nucleotide_seqs_part1”, “Transcripts_nucleotide_seqs_part2”, “Transcripts_nucleotide_seqs_part3.new” and “ProDG_seqs” (provided in CD-ROM1 and CD-ROM2) by at least one, but less than 10, 20, 30, 40, 50, 100, or 200 nucleotides or, alternatively, at less than 1%, 5%, 10% or 20% of the nucleotides in the subject nucleic acid (excluding, of course, splice variants known in the art). Similarly, in certain embodiments, proteins of the invention can differ from those encoded by those included in File “Protein.seqs” (provided in CD-ROM2) by at least one, but less than 10, 20, 30, 40, 50, 100, or 200 amino acid residues or, alternatively, at less than 1%, 5%, 10% or 20% of the amino acid residues in a subject protein (excluding, of course, proteins encoded by splice variants known in the art (proteins of the invention are described in more detail below)). If necessary for this analysis (or any other test for homology or substantial identity described herein), the sequences should be aligned for maximum homology, as described elsewhere here.

[0282] The present invention also encompasses mutants [e.g., nucleic acids that are 80% (or more) identical to one of the nucleic acid sequences disclosed in CD-ROMs 1 and 2], which encode proteins that retain substantially at least one, or preferably substantially all of the biological activities of the referenced protein. What constitutes “substantially all” may vary considerably. For example, in some instances, a variant or mutant protein may be about 5% as effective as the protein from which it was derived. But if that level of activity is sufficient to achieve a biologically significant result (e.g., transport of a sufficient number of ions across a cell membrane), the variant or mutant protein is one that retains substantially all of at least one of the biological activities of the protein from which it was derived. A “biologically active” variant or mutant (e.g., fragment) of a protein can participate in an intra- or inter-molecular interaction that can be characterized by specific binding between molecules two or more identical molecules (in which case, homodimerization could occur) or two or more different molecules (in which case, heterodimerization could occur). Often, a biologically active fragment will be recognizable by virtue of a recognizable domain or motif, and one can confirm biological activity experimentally. More specifically, for example, one can make (by synthesis or recombinant techniques) a nucleic acid fragment that encodes a potentially biologically active portion of a protein of the present invention by inserting the active fragment into an expression vector, and expressing the protein (genetic constructs and expression systems are described further below), and finally assessing the ability of the protein to function.

[0283] The present invention also encompasses chimeric nucleic acid sequences that encode fusion proteins. For example, a nucleic acid sequence of the invention can include a sequence that encodes a hexa-histidine tag (to facilitate purification of bacterially-expressed proteins) or a hemagglutinin tag (to facilitate purification of proteins expressed in eukaryotic cells).

[0284] The fused heterologous sequence can also encode a portion of an immunoglobulin (e.g., the constant region (Fc) of an IgG molecule), a detectable marker, or a signal sequence (e.g., a sequence that is recognized and cleaved by a signal peptidase in the host cell in which the fusion protein is expressed). Fusion proteins containing an Fc region can be purified using a protein A column, and they have increased stability (e.g., a greater circulating half-life) in vivo.

[0285] Detectable markers are well known in the art and can be used in the context of the present invention. For example, the expression vector pUR278 (Ruther et al., EMBO J., 2:1791, 1983) can be used to fuse a nucleic acid of the invention to the lacZ gene (which encodes β-galactosidase).

[0286] A nucleic acid sequence of the invention can also be fused to a sequence that, when expressed, improves the quantity or quality (e.g., solubility) of the fusion protein. For example, pGEX vectors can be used to express the proteins of the invention fused to glutathione S-transferase (GST). In general, such fusion proteins are soluble and can be easily purified from lysed cells by adsorption to glutathione-agarose beads followed by elution in the presence of free glutathione. The pGEX vectors (Pharmacia Biotech Inc; Smith and Johnson, Gene 67:31-40, 1988) are designed to include thrombin or factor Xa protease cleavage sites so that the cloned target gene product can be released from the GST moiety. Other useful vectors include pMAL (New England Biolabs, Beverly, Mass.) and pRIT5 (Pharmacia, Piscataway, N.J.), which fuse maltose E binding protein and protein A, respectively, to a protein of the invention.

[0287] A signal sequence, when present, can facilitate secretion of the fusion protein from a cell, and can be cleaved off by the host cell. The nucleic acid sequences of the present invention can also be fused to “inactivating” sequences, which render the fusion protein encoded, as a whole, inactive. Such proteins can be referred to as “preproteins,” and they can be converted into an active form of the protein by removal of the inactivating sequence.

[0288] The present invention also encompasses genetic constructs (e.g., plasmids, cosmids, and other vectors that transport nucleic acids) that include a nucleic acid of the invention in a sense or antisense orientation. The nucleic acids can be operably linked to a regulatory sequence (e.g., a promoter, enhancer, or other expression control sequence, such as a polyadenylation signal) that facilitates expression of the nucleic acid. The vector can replicate autonomously or integrate into a host genome, and can be a viral vector, such as a replication defective retrovirus, an adenovirus, or an adeno-associated virus.

[0289] When present, the regulatory sequence can direct constitutive or tissue-specific expression of the nucleic acid. Tissue-specific promoters include, for example, the liver-specific albumin promoter (Pinkert et al., Genes Dev. 1:268-277, 1987), lymphoid-specific promoters (Calame and Eaton, Adv. Immunol. 43:235-275, 1988), such as those of T cell receptors (Winoto and Baltimore, EMBO J. 8:729-733, 1989) and immunoglobulins (Banerji et al., Cell 33:729-740, 1982; Queen and Baltimore, Cell 33:741-748, 1983), the neuron-specific neurofilament promoter (Byrne and Ruddle, Proc. Natl. Acad. Sci. USA 86:5473-5477, 1989), pancreas-specific promoters (Edlund et al., Science 230:912-916, 1985), and mammary gland-specific promoters (e.g., milk whey promoter; see U.S. Pat. No. 4,873,316 and European Application Publication No. 264,166). Developmentally-regulated promoters can also be used. Examples of such promoters include the murine hox promoters (Kessel and Gruss, Science 249:374-379, 1990) and the fetoprotein promoter (Campes and Tilghman, Genes Dev. 3:537-546, 1989). Moreover, the promoter can be an inducible promoter. For example, the promoter can be regulated by a steroid hormone, a polypeptide hormone, or some other polypeptide (e.g., that used in the tetracycline-inducible system, “Tet-On” and “Tet-Off”; see, e.g., Clontech Inc. (Palo Alto, Calif.), Gossen and Bujard Proc. Natl. Acad. Sci. USA 89:5547, 1992, and Paillard, Human Gene Therapy 9:983, 1989).

[0290] The expression vector will be selected or designed depending on, for example, the type of host cell to be transformed and the level of protein expression desired. For example, when the host cells are mammalian cells, the expression vector can include viral regulatory elements, such as promoters derived from polyoma, Adenovirus 2, cytomegalovirus and Simian Virus 40. The nucleic acid inserted (i.e., the sequence to be expressed) can also be modified to encode residues that are preferentially utilized in E. coli (Wada et al., Nucleic Acids Res. 20:2111-2118, 1992). These modifications can be achieved by standard DNA synthesis techniques.

[0291] Expression vectors can be used to produce the proteins encoded by the nucleic acid sequences of the invention ex vivo (e.g., the expressed proteins can be purified from expression systems such as those described herein) or in vivo (m, for example, whole organisms). Proteins can be expressed in vivo in a way that restores expression to within normal limits and/or restores the temporal or spatial patterns of expression normally observed. Alternatively, proteins can be aberrantly expressed in vivo (i.e., at a time or place, or to an extent, that does not normally occur in vivo). For example, proteins can be over expressed or under expressed with respect to expression in a wild-type state; expressed at a different developmental stage; expressed at a different time during the cell cycle; or expressed in a tissue or cell type where expression does not normally occur.

[0292] The present invention also encompasses various engineered cells, including cells that have been engineered to express or over-express a nucleic acid sequence described herein. Accordingly, the cells can be transformed with a genetic construct, such as those described above. A “transformed” cell is a cell into which (or into an ancestor of which) one has introduced a nucleic acid that encodes a protein of the invention. The nucleic acid can be introduced by any of the art-recognized techniques for introducing nucleic acids into a host cell (e.g., calcium phosphate or calcium chloride co-precipitation, DEAE-dextran-mediated transfection, lipofection, or electroporation).

[0293] The terms “transformed cell” or “host cell” refer not only to the particular subject cell, but also to the progeny or potential progeny of such cells. Mutations or environmental influences may modify the cells in succeeding generations and, even though such progeny may not be identical to the parent cell, they are nevertheless within the scope of the invention. The cells of the invention can be “isolated” cells or “purified preparations” of cells (e.g., an in vitro preparation of cells), either of which can be obtained from multicellular organisms such as plants and animals (in which case the purified preparation would constitute a subset of the cells from the organism). In the case of unicellular microorganisms (e.g., microbial cells), the preparation is purified when at least 10% (e.g., 25%, 50%, 75%, 80%, 90%, 95% or more) of the cells within it are the cells of interest (e.g., the cells that express a protein of the invention).

[0294] The expression vectors of the invention can be designed to express proteins in prokaryotic or eukaryotic cells. For example, polypeptides of the invention can be expressed in bacterial cells (e.g., E. coli), fungi, yeast, or insect cells (e.g., using baculovirus expression vectors). For example, a baculovirus such as Autographa californica nuclear polyhedrosis virus (AcNPV), which grows in Spodoptera frugiperda cells, can be used as a vector to express foreign genes. A nucleic acid of the invention can be cloned into a non-essential region (for example the polyhedrin gene) of the viral genome and placed under control of a promoter (e.g., the polyhedrin promoter). Successful insertion of the nucleic acid results in inactivation of the polyhedrin gene and production of non-occluded recombinant virus (i.e., virus lacking the proteinaceous coat encoded by the polyhedrin gene). These recombinant viruses are then typically used to infect insect cells (e.g., Spodoptera frugiperda cells) in which the inserted gene is expressed (see, e.g., Smith et al., J. Virol. 46:584, 1983 and U.S. Pat. No. 4,215,051). If desired, mammalian cells can be used in lieu of insect cells, provided the virus is engineered so that the nucleic acid is placed under the control of a promoter that is active in mammalian cells.

[0295] Useful mammalian cells include rodent cells, such as Chinese hamster ovary cells (CHO) or COS cells, primate cells, such as African green monkey kidney cells, rabbit cells, or pig cells). The mammalian cells can also be human cells (e.g., a hematopoietic cell, a fibroblast, or a tumor cell). For example, HeLa cells, 293 cells, 3T3 cells, and WI38 cells are useful. Other suitable host cells are known to those skilled in the art and are discussed further in Goeddel [Gene Expression Technology: Methods in Enzymology 185, Academic Press, San Diego, Calif., (1990)].

[0296] Proteins can also be produced in plant cells, if desired. For plant cells, viral expression vectors (e.g., cauliflower mosaic virus and tobacco mosaic virus) and plasmid expression vectors (e.g., Ti plasmid) are suitable. These cells and other types are available from a wide range of sources [e.g., the American Type Culture Collection, Manassas, Va.; see also, e.g., Ausubel et al., Current Protocols in Molecular Biology, John Wiley & Sons, New York, (1994)]. The optimal methods of transformation (by, for example, transfection) and, as noted above, the choice of expression vehicle will depend on the host system selected. Transformation and transfection methods are described in, for example, Ausubel et al., supra; expression vehicles can be chosen from those provided in, for example, Pouwels et al., Cloning Vectors: A Laboratory Manual, (1985), Supp. (1987). The host cells harboring the expression vehicle can be cultured in conventional nutrient media, adapted as needed for activation of a chosen nucleic acid, repression of a chosen nucleic acid, selection of transformants, or amplification of a chosen nucleic acid.

[0297] Expression systems can be selected based on their ability to produce proteins that are modified (e.g., by phosphorylation, glycosylation, or cleavage) in substantially the same way they would be in a cell in which they are naturally expressed. Alternatively, the system can be one in which naturally occurring modifications do not occur, or occur in a different position, or to a different extent, than they otherwise would.

[0298] If desired, the host cells can be those of a stably-transfected cell line. Vectors suitable for stable transfection of mammalian cells are available to the public (see, e.g., Pouwels et al. (supra) as are methods for constructing them (see, e.g., Ausubel et al. (supra). In one example, a nucleic acid of the invention is cloned into an expression vector that includes the dihydrofolate reductase (DHFR) gene. Integration of the plasmid and, therefore, the nucleic acid it contains, into the host cell chromosome is selected for by including 0.01-300 mM methotrexate in the cell culture medium (as described in Ausubel et al., supra). This dominant selection can be accomplished in most cell types.

[0299] Moreover, recombinant protein expression can be increased by DHFR-mediated amplification of the transfected gene. Methods for selecting cell lines bearing gene amplifications are described in Ausubel et al. (supra) and generally involve extended culture in medium containing gradually increasing levels of methotrexate. DHFR-containing expression vectors commonly used for this purpose include pCVSEII-DHFR and pAdD26SV(A) (which are also described in Ausubel et al., supra).

[0300] A number of other selection systems can be used. These include those based on herpes simplex virus thymidine kinase, hypoxanthine-guanine phosphoribosyl-transferase, and adenine phosphoribosyltransferase genes, which can be employed in tk, hgprt, or aprt cells, respectively. In addition, gpt, which confers resistance to mycophenolic acid (Mulligan et al., Proc. Natl. Acad. Sci. USA, 78:2072, 1981); neo, which confers resistance to the aminoglycoside G-418 (Colberre-Garapin et al., J. Mol. Biol. 150:1, 1981); and hygro, which confers resistance to hygromycin (Santerre et al., Gene 30:147, 1981), can be used.

[0301] In view of the foregoing, it is clear that one can synthesize proteins encoded by the nucleic acid sequences of the present invention (i.e., recombinant proteins). Methods of generating and recombinant proteins are well known in the art. Recombinant protein purification can be effected by affinity. Where a protein of the invention has been fused to a heterologous protein (e.g., a maltose binding protein, a β-galactosidase protein, or a trpE protein), antibodies or other agents that specifically bind to the latter can facilitate purification. The recombinant protein can, if desired, be further purified (e.g., by high performance liquid chromatography or other standard techniques [see, Fisher, Laboratory Techniques In Biochemistry And Molecular Biology, Eds., Work and Burdon, Elsevier, (1980)].

[0302] Other purification schemes are known as well. For example, non-denatured fusion proteins can be purified from human cell lines as described by Janknecht et al. (Proc. Natl. Acad. Sci. USA, 88:8972, 1981). In this system, a nucleic acid is subcloned into a vaccinia recombination plasmid such that it is translated, in frame, with a sequence encoding an N-terminal tag consisting of six histidine residues. Extracts of cells infected with the recombinant vaccinia virus are loaded onto Ni²⁺ nitriloacetic acid-agarose columns, and histidine-tagged proteins are selectively eluted with imidazole-containing buffers.

[0303] Alternatively, Chemical synthesis can also be utilized to generate the proteins of the present invention [e.g., proteins can be synthesized by the methods described in Solid Phase Peptide Synthesis, 2nd Ed., The Pierce Chemical Co., Rockford, Ill., (1984)].

[0304] The invention also features expression vectors that can be transcribed and translated in vitro using, for example, a T7 promoter and T7 polymerase. Thus, the invention encompasses methods of making the proteins described herein in vitro.

[0305] Sufficiently purified proteins can be used as described herein. For example, one can administer the protein to a patient, use it in diagnostic or screening assays, or use it to generate antibodies (these methods are described further below).

[0306] The cells per se can also be administered to patients in the context of replacement therapies. For example, a nucleic acid of the present invention can be operably linked to an inducible promoter (e.g., a steroid hormone receptor-regulated promoter) and introduced into a human or nonhuman (e.g., porcine) cell and then into a patient. Optionally, the cell can be cultivated for a time or encapsulated in a biocompatible material, such as poly-lysine alginate. See, e.g., Lanza, Nature Biotechnol. 14:1107, (1996); Joki et al. Nature Biotechnol. 19:35, 2001; and U.S. Pat. No. 5,876,742] When a steroid hormone receptor-regulated promoter is used, protein production can be regulated in the subject by administering a steroid hormone to the subject. Implanted recombinant cells can also express and secrete an antibody that specifically binds to one of the proteins encoded by the nucleic acid sequences of the present invention. The antibody can be any antibody or any antibody derivative described herein. An antibody “specifically binds” to a particular antigen when it binds to that antigen but not, to a detectable level, to other molecules in a sample (e.g., a tissue or cell culture) that naturally includes the antigen.

[0307] While the host cells described above express recombinant proteins, the invention also encompasses cells in which gene expression is disrupted (e.g., cells in which a gene has been knocked out). These cells can serve as models of disorders that are related to mutated or mis-expressed alleles and are also useful in drug screening.

[0308] Protein expression can also be regulated in cells without using the genetic constructs described above. Instead, one can modify the expression of an endogenous gene within a cell (e.g., a cell line or microorganism) by inserting a heterologous DNA regulatory element into the genome of the cell such that the element is operably linked to the endogenous gene. For example, an endogenous gene that is “transcriptionally silent,” (i.e., not expressed at detectable levels) can be activated by inserting a regulatory element that promotes the expression of a normally expressed gene product in that cell. Techniques such as targeted homologous recombination can be used to insert the heterologous DNA (see, e.g., U.S. Pat. No. 5,272,071 and WO 91/06667).

[0309] The polypeptides of the present invention include the protein sequences contained in the File “Protein.seqs” of CD-ROM 2 and those encoded by the nucleic acids described herein (so long as those nucleic acids contain coding sequence and are not wholly limited to an untranslated region of a nucleic acid sequence), regardless of whether they are recombinantly produced (e.g., produced in and isolated from cultured cells), otherwise manufactured (by, for example, chemical synthesis), or isolated from a natural biological source (e.g., a cell or tissue) using standard protein purification techniques.

[0310] The terms “peptide,” “polypeptide,” and “protein” are used herein interchangeably to refer to a chain of amino acid residues, regardless of length or post-translational modification (e.g., glycosylation or phosphorylation). Proteins (including antibodies that specifically bind to the products of those nucleic acid sequences that encode protein or fragments thereof) and other compounds can be “isolated” or “purified.” The proteins and compounds of the present invention are “isolated” or “purified” when they exist as a composition that is at least 60% (e.g., 70%, 75%, 80%, 85%, 90%, 95%, or 99% or more) by weight the protein or compound of interest. Thus, the proteins of the invention are substantially free from the cellular material (or other biological or cell culture material) with which they may have, at one time, been associated (naturally or otherwise). Purity can be measured by any appropriate standard method (e.g., column chromatography, polyacrylamide gel electrophoresis, or HPLC analysis

[0311] The proteins of the invention also include those encoded by novel fragments or other mutants or variants of the protein-encoding sequences of the present invention. These proteins can retain substantially all (e.g., 70%, 80%, 90%, 95%, or 99%) of the biological activity of the full-length protein from which they were derived and can, therefore, be used as agonists or mimetics of the proteins from which they were derived. The manner in which biological activity can be determined is described generally herein, and specific assays (e.g., assays of enzymatic activity or ligand-binding ability) are known to those of ordinary skill in the art. In some instances, retention of biological activity is not necessary or desirable. For example, fragments that retain little, if any, of the biological activity of a full-length protein can be used as immunogens, which, in turn, can be used as therapeutic agents (e.g., to generate an immune response in a patient), diagnostic agents (e.g., to detect the presence of antibodies or other proteins in a tissue sample obtained from a patient), or to generate or test antibodies that specifically bind the proteins of the invention.

[0312] In other instances, the proteins encoded by nucleic acids of the invention can be modified (e.g., fragmented or otherwise mutated) so their activities oppose those of the naturally occurring protein (i.e., the invention encompasses variants of the proteins encoded by nucleic acids of the invention that are antagonistic to a biological process). One of ordinary skill in the art will recognize that the more extensive the mutation, the more likely it is to affect the biological activity of the protein (this is not to say that minor modifications cannot do so as well). Thus, it is likely that mutant proteins that are agonists of those encoded by wild type proteins will differ from those wild type proteins only at non-essential residues or will contain only conservative substitutions. Conversely, antagonists are likely to differ at an essential residue or to contain non-conservative substitutions. Moreover, those of ordinary skill in the art can engineer proteins so that they retain desirable traits (i.e., those that make them efficacious in a particular therapeutic, diagnostic, or screening regime) and lose undesirable traits (i.e., those that produce side effects, or produce false-positive results through non-specific binding).

[0313] In the event a protein of the invention is encoded by a new gene, the invention encompasses proteins that arise following alternative transcription, RNA splicing, translational- or post-translational events (e.g., the invention encompasses splice variants of the new genes). In the event a protein of the invention is encoded by a novel splice variant, the invention encompasses proteins that arise following alternative translational- or post-translational events (i.e., the invention does not encompass proteins encoded by known splice variants, but does encompass other variants of the novel splice variant). Post-translational modifications are discussed above in the context of expression systems.

[0314] The fragmented or otherwise mutant proteins of the invention can differ from those encoded by the nucleic acids of the invention to a limited extent (e.g., by at least one but less than 5, 10 or 15 amino acid residues). As with other, more extensive mutations, the differences can be introduced by adding, deleting, and/or substituting one or more amino acid residues. Alternatively, the mutant proteins can differ from the wild type proteins from which they were derived by at least one residue but less than 5%, 10%, 15% or 20% of the residues when analyzed as described herein. If the mutant and wild type proteins are different lengths, they can be aligned and analyzed using the algorithms described above.

[0315] Useful variants, fragments, and other mutants of the proteins encoded by the nucleic acids of the invention can be identified by screening combinatorial libraries of these variants, fragments, and other mutants for agonist or antagonist activity. For example, libraries of fragments (e.g., N-terminal, C-terminal, or internal fragments) of one or more of the proteins of the invention can be used to generate populations of fragments that can be screened and, once identified, isolated. The proteins can include those in which one or more cysteine residues are added or deleted, or in which a glycosylated residue is added or deleted. Methods for screening libraries (e.g., combinatorial libraries of proteins made from point mutants or cDNA libraries) for proteins or genes having a particular property are known in the art. These methods can be adapted for rapid screening. Recursive ensemble mutagenesis (REM), a new technique that enhances the frequency of functional mutants in libraries, can be used in combination with screening assays to identify useful variants of the proteins of the present invention [Arkin and Yourvan, Proc. Natl. Acad. Sci. USA 89:7811-7815, (1992); Delgrave et al., Protein Engineering 6:327-331, (1993)].

[0316] Cell-based assays can be exploited to analyze variegated libraries constructed from one or more of the proteins of the invention. For example, cells in a cell line (e.g., a cell line that ordinarily responds to the protein(s) of interest in a substrate-dependent manner) can be transfected with a library of expression vectors. The transfected cells are then contacted with the protein and the effect of the expression of the mutant on signaling by the protein (substrate) can be detected (e.g., by measuring redox activity or protein folding). Plasmid DNA can then be recovered from the cells that score for inhibition, or alternatively, potentiation of signaling by the protein (substrate). Individual clones are then further characterized.

[0317] The invention also contemplates antibodies (i.e., immunoglobulin molecules) that specifically bind (see the definition above) to the proteins described herein and antibody fragments (e.g., antigen-binding fragments or other immunologically active portions of the antibody). Antibodies are proteins, and those of the invention can have at least one or two heavy chain variable regions (VH), and at least one or two light chain variable regions (VL). The VH and VL regions can be further subdivided into regions of hypervariability, termed “complementarity determining regions” (CDR), which are interspersed with more highly conserved “framework regions” (FR). These regions have been precisely defined [see, Kabat et al., Sequences of Proteins of Immunological Interest, Fifth Edition, U.S. Department of Health and Human Services, NIH Publication No. 91-3242, (1991) and Chothia.et al., J. Mol. Biol. 196:901-917, (1987)], and antibodies or antibody fragments containing one or more of them are within the scope of the invention.

[0318] The antibodies of the invention can also include a heavy and/or light chain constant region [constant regions typically mediate binding between the antibody and host tissues or factors, including effector cells of the immune system and the first component (C1q) of the classical complement system], and can therefore form heavy and light immunoglobulin chains, respectively. For example, the antibody can be a tetramer (two heavy and two light immunoglobulin chains, which can be connected by, for example, disulfide bonds). The heavy chain constant region contains three domains (CH1, CH2 and CH3), whereas the light chain constant region has one (CL).

[0319] An antigen-binding fragment of the invention can be: (i) a Fab fragment (i.e., a monovalent fragment consisting of the VL, VH, CL and CH1 domains); (ii) a F(ab′)₂fragment (i.e., a bivalent fragment containing two Fab fragments linked by a disulfide bond at the hinge region); (iii) a Fd fragment consisting of the VH and CH1 domains; (iv) a Fv fragment consisting of the VL and VH domains of a single arm of an antibody, (v) a dAb fragment [Ward et al., Nature 341:544-546, (1989)], which consists of a VH domain; and (vi) an isolated complementarity determining region (CDR).

[0320] F(ab′)₂fragments can be produced by pepsin digestion of the antibody molecule, and Fab fragments can be generated by reducing the disulfide bridges of F(ab′)₂fragments. Alternatively, Fab expression libraries can be constructed [Huse et al., Science 246:1275, (1989)] to allow rapid and easy identification of monoclonal Fab fragments with the desired specificity. Methods of making other antibodies and antibody fragments are known in the art. For example, although the two domains of the Fv fragment, VL and VH, are coded for by separate genes, they can be joined, using recombinant methods or a synthetic linker that enables them to be made as a single protein chain in which the VL and VH regions pair to form monovalent molecules [known as single chain Fv (scFv); see e.g., Bird et al., Science 242:423-426, (1988); Huston et al., Proc. Natl. Acad. Sci. USA 85:5879-5883, (1988); Colcher et al., Ann. NY Acad. Sci. 880:263-80, (1999); and Reiter, Clin. Cancer Res. 2:245-52, (1996)]. Techniques for producing single chain antibodies are also described in U.S. Pat. Nos. 4,946,778 and 4,704,692. Such single chain antibodies are encompassed within the term “antigen-binding fragment” of an antibody. These antibody fragments are obtained using conventional techniques known to those of ordinary skill in the art, and the fragments are screened for utility in the same manner that intact antibodies are screened. Moreover, a single chain antibody can form dimers or multimers and, thereby, become a multivalent antibody having specificities for different epitopes of the same target protein.

[0321] The antibody can be a polyclonal (i.e., part of a heterogeneous population of antibody molecules derived from the sera of the immunized animals) or a monoclonal antibody (i.e., part of a homogeneous population of antibodies to a particular antigen), either of which can be recombinantly produced (e.g., produced by phage display or by combinatorial methods, as described in, e.g., U.S. Pat. No. 5,223,409; WO 92/18619; WO 91/17271; WO 92/20791; WO 92/15679; WO 93/01288; WO 92/01047; WO 92/09690; WO 90/02809; Fuchs et al., Bio/Technology 9:1370-1372, (1991); Hay et al. Human Antibody Hybridomas 3:81-85, (1992); Huse et al. Science 246:1275-1281, (1989); Griffths et al. EMBO J 12:725-734, (1993); Hawkins et al., J. Mol Biol 226:889-896, (1992); Clackson et al. Nature 352:624-628, (1991); Gram et al., Proc. Natl. Acad. Sci. USA 89:3576-3580, (1992); Garrad et al., Bio/Technology 9:1373-1377, (1991); Hoogenboom et al. Nucl. Acids Res. 19:4133-4137, (1991); and Barbas et al., Proc. Natl. Acad. Sci. USA 88:7978-7982, (1991). In one embodiment, an antibody is made by immunizing an animal with a protein encoded by a nucleic acid of the invention (one, of course, that contains coding sequence) or a mutant or fragment (e.g., an antigenic peptide fragment) thereof. Alternatively, an animal can be immunized with a tissue sample (e.g., a crude tissue preparation, a whole cell (living, lysed, or fractionated) or a membrane fraction). Thus, antibodies of the invention can specifically bind to a purified antigen or a tissue (e.g., a tissue section, a whole cell (living, lysed, or fractionated) or a membrane fraction).

[0322] In the event an antigenic peptide is used, it can include at least eight (e.g., 10, 15, 20, or 30) consecutive amino acid residues found in a protein of the invention. The antibodies generated can specifically bind to one of the proteins in their native form (thus, antibodies with linear or conformational epitopes are within the invention), in a denatured or otherwise non-native form, or both. Conformational epitopes can sometimes be identified by identifying antibodies that bind to a protein in its native form, but not in a denatured form.

[0323] The host animal (e.g., a rabbit, mouse, guinea pig, or rat) can be immunized with the antigen, optionally linked to a carrier (i.e., a substance that stabilizes or otherwise improves the immunogenicity of an associated molecule), and optionally administered with an adjuvant (see, e.g., Ausubel et al., supra). An exemplary carrier is keyhole limpet hemocyanin (KLH) and exemplary adjuvants, which will be selected in view of the host animal's species, include Freund's adjuvant (complete or incomplete), adjuvant mineral gels (e.g., aluminum hydroxide), surface active substances such as lysolecithin, pluronic polyols, polyanions, peptides, oil emulsions, dinitrophenol, BCG (bacille Calmette-Guerin), and Corynebacterium parvum. KLH is also sometimes referred to as an adjuvant. The antibodies generated in the host can be purified by, for example, affinity chromatography methods in which the polypeptide antigen is immobilized on a resin.

[0324] Epitopes encompassed by an antigenic peptide may be located on the surface of the protein (e.g., in hydrophilic regions), or in regions that are highly antigenic (such regions can be selected, initially, by virtue of containing many charged residues). An Emini surface probability analysis of human protein sequences can be used to indicate the regions that have a particularly high probability of being localized to the surface of the protein.

[0325] The antibody can be a fully human antibody (e.g., an antibody made in a mouse that has been genetically engineered to produce an antibody from a human immunoglobulin sequence, such as that of a human immunoglobulin gene (the kappa, lambda, alpha (IgA1 and IgA2), gamma (IgG1, IgG2, IgG3, IgG4), delta, epsilon and mu constant region genes or the myriad immunoglobulin variable region genes). Alternatively, the antibody can be a non-human antibody (e.g., a rodent (e.g., a mouse or rat), goat, or non-human primate (e.g., monkey) antibody).

[0326] Methods of producing antibodies are well known in the art. For example, as noted above, human monoclonal antibodies can be generated in transgenic mice carrying the human immunoglobulin genes rather than those of the mouse. Splenocytes obtained from these mice (after immunization with an antigen of interest) can be used to produce hybridomas that secrete human mAbs with specific affinities for epitopes from a human protein (see, e.g., WO 91/00906, WO 91/10741; WO 92/03918; WO 92/03917; Lonberg et al., Nature 368:856-859, 1994; Green et al., Nature Genet. 7:13-21, 1994; Morrison et al. Proc. Natl. Acad. Sci. USA 81:6851-6855, 1994; Bruggeman et al., Immunol. 7:33-40, 1993; Tuaillon et al., Proc. Natl. Acad. Sci. USA 90:3720-3724, 1993; and Bruggeman et al., Eur. J. Immunol 21:1323-1326, 1991).

[0327] The antibody can also be one in which the variable region, or a portion thereof (e.g., a CDR), is generated in a non-human organism (e.g., a rat or mouse). Thus, the invention encompasses chimeric, CDR-grafted, and humanized antibodies and antibodies that are generated in a non-human organism and then modified (m, e.g., the variable framework or constant region) to decrease antigenicity in a human. Chimeric antibodies (i.e., antibodies in which different portions are derived from different animal species (e.g., the variable region of a murine mAb and the constant region of a human immunoglobulin) can be produced by recombinant techniques known in the art. For example, a gene encoding the Fc constant region of a murine (or other species) monoclonal antibody molecule can be digested with restriction enzymes to remove the region encoding the murine Fc, and the equivalent portion of a gene encoding a human Fc constant region can be substituted therefore [see European Patent Application Nos. 125,023; 184,187; 171,496; and 173,494; see also WO 86/01533; U.S. Pat. No. 4,816,567; Better et al., Science 240:1041-1043, (1988); Liu et al., Proc. Natl. Acad. Sci. USA 84:3439-3443, (1987); Liu et al., J. Immunol. 139:3521-3526, (1987); Sun et al., Proc. Natl. Acad. Sci. USA 84:214-218, (1987); Nishimura et al., Cancer Res. 47:999-1005, (1987); Wood et al., Nature 314:446-449, (1985); Shaw et al., J. Natl. Cancer Inst. 80:1553-1559, (1988); Morrison et al., Proc. Natl. Acad. Sci. USA 81:6851, (1984); Neuberger et al., Nature 312:604, (1984); and Takeda et al., Nature 314:452, (1984)].

[0328] In a humanized or CDR-grafted antibody, at least one or two, but generally all three of the recipient CDRs (of heavy and or light immuoglobulin chains) will be replaced with a donor CDR. One need only replace the number of CDRs required for binding of the humanized antibody to a protein described herein or a fragment thereof. The donor can be a rodent antibody, and the recipient can be a human framework or a human consensus framework. Typically, the immunoglobulin providing the CDRs is called the “donor” (and is often that of a rodent) and the immunoglobulin providing the framework is called the “acceptor.” The acceptor framework can be a naturally occurring (e.g., a human) framework, a consensus framework or sequence, or a sequence that is at least 85% (e.g., 90%, 95%, 99%) identical thereto. A “consensus sequence” is one formed from the most frequently occurring amino acids (or nucleotides) in a family of related sequences (see, e.g., Winnaker, From Genes to Clones, Verlagsgesellschaft, Weinheim, Germany, 1987). Each position in the consensus sequence is occupied by the amino acid residue that occurs most frequently at that position in the family (where two occur equally frequently, either can be included). A “consensus framework” refers to the framework region in the consensus immunoglobulin sequence.

[0329] An antibody can be humanized by methods known in the art. For example, humanized antibodies can be generated by replacing sequences of the Fv variable region that are not directly involved in antigen binding with equivalent sequences from human Fv variable regions. General methods for generating humanized antibodies are provided by Morrison [Science 229:1202-1207, (1985)], Oi et al. [BioTechniques 4:214, (1986)], and Queen et al. (U.S. Pat. Nos. 5,585,089; 5,693,761 and 5,693,762). Those nucleic acid sequences required by these methods can be obtained from a hybridoma producing an antibody the polypeptides of the present invention, or fragments thereof. The recombinant DNA encoding the humanized antibody, or fragment thereof, can then be cloned into an appropriate expression vector.

[0330] Humanized or CDR-grafted antibodies can be produced such that one, two, or all CDRs of an immunoglobulin chain can be replaced [see, e.g., U.S. Pat. No. 5,225,539; Jones et al., Nature 321:552-525, (1986); Verhoeyan et al., Science 239:1534, (1988); and Beidler et al., J. Immunol. 141:4053-4060, (1988)]. Thus, the invention features humanized antibodies in which specific amino acid residues have been substituted, deleted or added (m, e.g., in the framework region to improve antigen binding). For example, a humanized antibody will have framework residues identical to those of the donor or to amino acid residues other than those of the recipient framework residue. To generate such antibodies, a selected, small number of acceptor framework residues of the humanized immunoglobulin chain are replaced by the corresponding donor amino acids. The substitutions can occur adjacent to the CDR or in regions that interact with a CDR (U.S. Pat. No. 5,585,089, see especially columns 12-16). Other techniques for humanizing antibodies are described in EP 519596 A1.

[0331] In certain embodiments, the antibody has an effector function and can fix complement, while in others it can neither recruit effector cells nor fix complement. The antibody can also have little or no ability to bind an Fc receptor. For example, it can be an isotype or subtype, or a fragment or other mutant that cannot bind to an Fc receptor (e.g., the antibody can have a mutant (e.g., a deleted) Fc receptor binding region). The antibody may or may not alter (e.g., increase or decrease) the activity of a protein to which it binds.

[0332] In other embodiments, the antibody can be coupled to a heterologous substance, such as a toxin (e.g., ricin, diphtheria toxin, or active fragments thereof), another type of therapeutic agent (e.g., an antibiotic), or a detectable label. A detectable label can include an enzyme (e.g., horseradish peroxidase, alkaline phosphatase, β-galactosidase, or acetylcholinesterase), a prosthetic group (e.g., streptavidin/biotin and avidin/biotin), or a fluorescent, luminescent, bioluminescent, or radioactive material.(e.g., umbelliferone, fluorescein, fluorescein isothiocyanate, rhodamine, dichlorotriazinylamine fluorescein, dansyl chloride or phycoerythrin (which are fluorescent), luminol (which is luminescent), luciferase, luciferin, and aequorin (which are bioluminescent), and ¹²⁵I, ¹³¹I, ³⁵S or ³H (which are radioactive)).

[0333] The antibodies of the invention (e.g., a monoclonal antibody) can be used to isolate the proteins of the invention (by, for example, affinity chromatography or immunoprecipitation) or to detect them in, for example, a cell lysate or supernatant (by Western blotting, ELISAs, radioimmune assays, and the like) or a histological section. One can therefore determine the abundance and pattern of expression of a particular protein. This information can be useful in making a diagnosis or in evaluating the efficacy of a clinical test.

[0334] The invention also includes the nucleic acids that encode the antibodies described above and vectors and cells (e.g., mammalian cells such as CHO cells or lymphatic cells) that contain them. Similarly, the invention includes cell lines (e.g., hybridomas) that make the antibodies of the invention and methods of making those cell lines.

[0335] Non-human transgenic animals are also within the scope of the invention. These animals can be used to study the function or activity of proteins of the invention and to identify or evaluate agents that modulate their activity. A “transgenic animal” can be a mammal (e.g., a mouse, rat, dog, pig, cow, sheep, goat, or non-human primate), an avian (e.g., a chicken), or an amphibian (e.g. a frog) having one or more cells that include a transgene (e.g., an exogenous DNA molecule or a rearrangement (e.g., deletion of) endogenous chromosomal DNA). The transgene can be integrated into or can occur within the genome of the cells of the animal, and it can direct the expression of an encoded gene product in one or more types of cells or tissues. Alternatively, a transgene can “knock out” or reduce gene expression. This can occur when an endogenous gene has been altered by homologous recombination, which occurs between it and an exogenous DNA molecule that was introduced into a cell of the animal (e.g., an embryonic cell) at a very early stage in the animal's development.

[0336] Intronic sequences and polyadenylation signals can be included in the transgene and, when present, can increase expression. One or more tissue-specific regulatory sequences can also be operably linked to a transgene of the invention to direct expression of protein to particular cells (exemplary regulatory sequences are described above, and many others are known to those of ordinary skill in the art).

[0337] A “founder” animal is one that carries a transgene of the invention in its genome or expresses mRNA from the transgene in its cells or tissues. Founders can be bred to produce a line of transgenic animals carrying the founder's transgene or bred with founders carrying other transgenes (in which case the progeny would bear the transgenes borne by both founders). Accordingly, the invention features founder animals, their progeny, cells or populations of cells obtained therefrom, and proteins obtained therefrom. For example, a nucleic acid of the invention can be placed under the control of a promoter that directs expression of the encoded protein in the milk or eggs of the transgenic animal. The protein can then be purified or recovered from the animal's milk or eggs. Animals suitable for such purpose include pigs, cows, goats, sheep, and chickens.

[0338] The biomolecular sequences of the present invention can be divided to functional groups, according to GeneOntology classification (see the website of GeneOntology dot org), defined by the activity of the original sequences from which the new variants have been identified or to which the novel genes are homologous. Based on this classification it is possible to identify diseases and conditions which can be diagnosed and treated using novel sequence information and annotations such as those uncovered by the present invention.

[0339] Immunoglobulin:

[0340] This category contains proteins that are involved in the immune and complement systems such as antigens and autoantigens, immunoglobulins, MHC and HLA proteins and their associated proteins.

[0341] Pharmaceutical compositions including such proteins or protein encoding sequences, antibodies directed against such proteins or polynucleotides capable of altering expression of such proteins may be used to treat diseases involving the immunological system including inflammation, autoimmune diseases, infectious diseases, as well as cancerous processes; while probe sequences or antibodies may be used for diagnosis of such diseases.

[0342] Transcription Factor Binding:

[0343] This category contains proteins involved in transcription factors binding, RNA and DNA binding, such as transcription factors, RNA and DNA binding proteins, zinc fingers, helicase, isomerase, histones, nucleases.

[0344] Pharmaceutical compositions including such proteins or protein encoding sequences, antibodies directed against such proteins or polynucleotides capable of altering expression of such proteins may be used to treat diseases involving transcription factors binding proteins, for example diseases where there is non-normal replication or transcription of DNA and RNA respectively; while probe sequences or antibodies may be used for diagnosis of such diseases.

[0345] Small GTPase Regulatory/Interacting Protein:

[0346] This category contains proteins such as RAB escort protein, guanyl-nucleotide exchange factor, guanyl-nucleotide exchange factor adaptor, GDP-dissociation inhibitor, GTPase inhibitor, GTPase activator, guanyl-nucleotide releasing factor, GDP-dissociation stimulator, regulator of G-protein signaling, RAS interactor, RHO interactor, RAB interactor, RAL interactor.

[0347] Pharmaceutical compositions including such proteins or protein encoding sequences, antibodies directed against such proteins or polynucleotides capable of altering expression of such proteins may be used to treat diseases in which the signal-transduction, typically involving G-proteases is non-normal, either as a cause, or as a result of the disease; while probe sequences or antibodies may be used for diagnosis of such diseases.

[0348] Calcium Binding:

[0349] This category contains calcium binding proteins, ligand binding or carriers, such as diacylglycerol kinase, Calpain, calcium-dependent protein serine/threonine phosphatase, calcium sensing proteins, calcium storage proteins.

[0350] Oxidoreductase:

[0351] This category contains enzymes that catalyze oxidation-reduction reactions, such as oxidoreductases acting on the following groups of donors: CH—OH, CH—CH, CH—NH2, CH—NH; oxidoreductases acting on NADH or NADPH, nitrogenous compounds, sulfur group of donors, heme group, hydrogen group, diphenols and related substances as donors; oxidoreductases acting on peroxide as acceptor, superoxide radicals as acceptor, oxidizing metal ions, CH2 groups; oxidoreductases acting on reduced ferredoxin as donor; oxidoreductases acting on reduced flavodoxin as donor; and oxidoreductases acting on the aldehyde or oxo group of donors.

[0352] Pharmaceutical compositions including such proteins or protein encoding sequences, antibodies directed against such proteins or polynucleotides capable of altering expression of such proteins may be used to treat diseases caused by non-normal activity of oxidoreductases; while probe sequences or antibodies may be used for diagnosis of such diseases.

[0353] Receptors:

[0354] This category contains various receptors, such as signal transducers, complement receptors, ligand-dependent nuclear receptors, transmembrane receptors, GPI-anchored membrane-bound receptors, various coreceptors, internalization receptors, receptors to neurotransmitters, hormones and various other effectors and ligands.

[0355] Pharmaceutical compositions including such proteins or protein encoding sequences, antibodies directed against such proteins or polynucleotides capable of altering expression of such proteins may be used to treat diseases caused by non-normal activity of oxidoreductases diseases involving various receptors, including receptors to neurotransmitters, hormones and various other effectors and ligands; while probe sequences or antibodies may be used for diagnosis of such diseases.

[0356] Examples of these diseases include, but are not limited to, chronic myelomonocytic leukemia caused by growth factor beta receptor deficiency [Rao D S, Chang J C, Kumar P D, Mizukami I, Smithson G M, Bradley S V, Parlow A F, Ross T S (2001) Mol Cell Biol, 21(22):7796-806], thrombosis associated with protease-activated receptor deficiency [Sambrano G R, Weiss E J, Zheng Y W, Huang W, Coughlin S R (2001) Nature, 413(6851):26-7], hypercholesterolemia associated with low density lipoprotein receptor deficiency [Koivisto U M, Hubbard A L, Mellman I (2001) Cell, 105(5):575-85], familial Hibernian fever associated with tumour necrosis factor receptor deficiency [Simon A, Drenth J P, van der Meer J W (2001) Ned Tijdschr Geneeskd, 145(2):77-8], colitis associated with immunoglobulin E receptor expression [Dombrowicz D, Nutten S, Desreumaux P, Neut C, Torpier G, Peeters M, Colombel J F, Capron M (2001) J Exp Med, 193(1):25-34], and alagille syndrome associated with Jagged1 [Stankiewicz P, Rujner J, Loffler C, Kruger A, Nimmakayalu M, Pilacik B, Krajewska-Walasek M, Gutkowska A, Hansmann I, Giannakudis I (2001) Am J Med Genet, 103(2):166-71].

[0357] Protein Serine/Threonine Kinases:

[0358] This category contains kinases which phosphorilate serine/threonine residues, mainly involved in signal transduction, such as transmembrane receptor protein serine/threonine kinase, 3-phosphoinositide-dependent protein kinase, DNA-dependent protein kinase, G-protein-coupled receptor phosphorylating protein kinase, SNF1A/AMP-activated protein kinase, casein kinase, calmodulin regulated protein kinase, cyclic-nucleotide dependent protein kinase, cyclin-dependent protein kinase, eukaryotic translation initiation factor 2alpha kinase, galactosyltransferase-associated kinase, glycogen synthase kinase 3, protein kinase C, receptor signaling protein serine/threonine kinase, ribosomal protein S6 kinase, IkB kinase.

[0359] Pharmaceutical compositions including such proteins or protein encoding sequences, antibodies directed against such proteins or polynucleotides capable of altering expression of such proteins may be used to treat diseases which may be ameliorated by a modulating kinase activity, which is one of the main signaling pathways inside cell; while probe sequences or antibodies may be used for diagnosis of such diseases.

[0360] Channel/Pore Class Transporters:

[0361] This category contains proteins that mediate the transport of molecules and macromolecules across membranes, such as alpha-type channels, porins, pore-forming toxins.

[0362] Pharmaceutical compositions including such proteins or protein encoding sequences, antibodies directed against such proteins or polynucleotides capable of altering expression of such proteins may be used to treat diseases in which the transport of molecules and macromolecules such as neurotransmitters, hormones, sugar etc. is non-normal leading to various pathologies; while probe sequences or antibodies may be used for diagnosis of such diseases.

[0363] Hydrolases, Acting on Acid Anhydrides:

[0364] This category contains hydrolytic enzymes that are acting on acid anhydrides, such as hydrolases acting on acid anhydrides, in phosphorus-containing anhydrides, in sulfonyl-containing anhydrides; and hydrolases catalysing transmembrane movement of substances, and involved in cellular and subcellular movement.

[0365] Pharmaceutical compositions including such proteins or protein encoding sequences, antibodies directed against such proteins or polynucleotides capable of altering expression of such proteins may be used to treat diseases in which the hydrolase-related activities are non-normal (increased or decreased); while probe sequences or antibodies may be used for diagnosis of such diseases.

[0366] Transferases, Transferring Phosphorus-Containing Groups:

[0367] This category contains various enzymes that catalyze the transfer of phosphate from one molecule to another, such as phosphotransferases using the following groups as acceptors: alcohol group, carboxyl group, nitrogenous group, phosphate; phosphotransferases with regeneration of donors catalysing intramolecular transfers; diphosphotransferases; nucleotidyltransferase; and phosphotransferases for other substituted phosphate groups.

[0368] Pharmaceutical compositions including such proteins or protein encoding sequences, antibodies directed against such proteins or polynucleotides capable of altering expression of such proteins may be used to treat diseases in which the transfer of functional group to a modulated moiety is not normal so that a beneficial effect may be achieved by modulation of such transfer; while probe sequences or antibodies may be used for diagnosis of such diseases.

[0369] Phosphoric Monoester Hydrolases:

[0370] This category contains hydrolytic enzymes that are acting on ester bonds, such as: nuclease, sulfuric ester hydrolase, carboxylic ester hydrolase, thiolester hydrolase, phosphoric monoester hydrolase, phosphoric diester hydrolase, triphosphoric monoester hydrolase, diphosphoric monoester hydrolase, and phosphoric triester hydrolase.

[0371] Pharmaceutical compositions including such proteins or protein encoding sequences, antibodies directed against such proteins or polynucleotides capable of altering expression of such proteins may be used to treat diseases in which the hydrolytic cleavage of a covalent bond with accompanying addition of water, —H being added to one product of the cleavage and —OH to the other, is not normal so that a beneficial effect may be achieved by modulation of such reaction; while probe sequences or antibodies may be used for diagnosis of such diseases.

[0372] Enzyme Inhibitors:

[0373] This category contains inhibitors and suppressors of other proteins and enzymes, such as inhibitors of: kinases, phosphatases, chaperones, guanylate cyclase, DNA gyrase, ribonuclease, proteasome inhibitors, diazepam-binding inhibitor, ornithine decarboxylase inhibitor, GTPase inhibitors, dUTP pyrophosphatase inhibitor, phospholipase inhibitor, proteinase inhibitor, protein biosynthesis inhibitors, alpha-amylase inhibitors.

[0374] Pharmaceutical compositions including such proteins or protein encoding sequences, antibodies directed against such proteins or polynucleotides capable of altering expression of such proteins may be used to treat diseases in which beneficial effect may be achieved by modulating the activity of inhibitors and suppressors of proteins and enzymes; while probe sequences or antibodies may be used for diagnosis of such diseases.

[0375] Electron Transporters:

[0376] This category contains ligand binding or carrier proteins involved in electron transport, such as: flavin-containing electron transporter, cytochromes, electron donors, electron acceptors, electron carriers, and cytochrome-c oxidases.

[0377] Transferases, Transferring Glycosyl Groups:

[0378] This category contains various enzymes that catalyze the transfer of a chemical group, such as a glycosyl, from one molecule to another. It covers enzymes such as murein lytic endotransglycosylase E, and sialyltransferase.

[0379] Pharmaceutical compositions including such proteins or protein encoding sequences, antibodies directed against such proteins or polynucleotides capable of altering expression of such proteins may be used to treat diseases in which the transfer of a glycosyl chemical group from one molecule to another is not normal so that a beneficial effect may be achieved by modulation of such reaction; while probe sequences or antibodies may be used for diagnosis of such diseases.

[0380] Ligases, Forming Carbon-Oxygen Bonds:

[0381] This category contains enzymes that catalyze the linkage between carbon and oxygen, such as ligase forming aminoacyl-tRNA and related compounds.

[0382] Pharmaceutical compositions including such proteins or protein encoding sequences, antibodies directed against such proteins or polynucleotides capable of altering expression of such proteins may be used to treat diseases in which the linkage between carbon and oxygen in an energy dependent process is not normal so that a beneficial effect may be achieved by modulation of such reaction; while probe sequences or antibodies may be used for diagnosis of such diseases.

[0383] Ligases:

[0384] This category contains enzymes that catalyze the linkage of two molecules, generally utilizing ATP as the energy donor, also called synthetase. It covers enzymes such as beta-alanyl-dopamine hydrolase, carbon-oxygen bonds forming ligase, carbon-sulfur bonds forming ligase, carbon-nitrogen bonds forming ligase, carbon-carbon bonds forming ligase, and phosphoric ester bonds forming ligase.

[0385] Pharmaceutical compositions including such proteins or protein encoding sequences, antibodies directed against such proteins or polynucleotides capable of altering expression of such proteins may be used to treat diseases in which the joining together of two molecules in an energy dependent process is not normal so that a beneficial effect may be achieved by modulation of such reaction; while probe sequences or antibodies may be used for diagnosis of such diseases.

[0386] Hydrolases, Acting on Glycosyl Bonds:

[0387] This category contains hydrolytic enzymes that are acting on glycosyl bonds, such as hydrolases hydrolyzing N-glycosyl compounds, S-glycosyl compounds, and O-glycosyl compounds.

[0388] Pharmaceutical compositions including such proteins or protein encoding sequences, antibodies directed against such proteins or polynucleotides capable of altering expression of such proteins may be used to treat diseases in which the hydrolase-related activities are non-normal (increased or decreased); while probe sequences or antibodies may be used for diagnosis of such diseases.

[0389] Kinases:

[0390] This category contains kinases, which phosphorilate serine/threonine or tyrosine residues, mainly involved in signal transduction. It covers enzymes such as 2-amino-4-hydroxy-6-hydroxymethyldihydropteridine pyrophosphokinase, NAD(+) kinase, acetylglutamate kinase, adenosine kinase, adenylate kinase, adenylsulfate kinase, arginine kinase, aspartate kinase, choline kinase, creatine kinase, cytidylate kinase, deoxyadenosine kinase, deoxycytidine kinase, deoxyguanosine kinase, dephospho-CoA kinase, diacylglycerol kinase, dolichol kinase, ethanolamine kinase, galactokinase, glucokinase, glutamate 5-kinase, glycerol kinase, glycerone kinase, guanylate kinase, hexokinase, homoserine kinase, hydroxyethylthiazole kinase, inositol/phosphatidylinositol kinase, ketohexokinase, mevalonate kinase, nucleoside-diphosphate kinase, pantothenate kinase, phosphoenolpyruvate carboxykinase, phosphoglycerate kinase, phosphomevalonate kinase, protein kinase, pyruvate dehydrogenase (lipoamide) kinase, pyruvate kinase, ribokinase, ribose-phosphate pyrophosphokinase, selenide, water dikinase, shikimate kinase, thiamine pyrophosphokinase, thymidine kinase, thymidylate kinase, uridine kinase, xylulokinase, 1D-myo-inositol-trisphosphate 3-kinase, phosphofructokinase, pyridoxal kinase, sphinganine kinase, riboflavin kinase, 2-dehydro-3-deoxygalactonokinase, 2-dehydro-3-deoxygluconokinase, 4-diphosphocytidyl-2C-methyl-D-erythritol kinase, GTP pyrophosphokinase, L-fuculokinase, L-ribulokinase, L-xylulokinase, isocitrate dehydrogenase (NADP+)] kinase, acetate kinase, allose kinase, carbamate kinase, cobinamide kinase, diphosphate-purine nucleoside kinase, fructokinase, glycerate kinase, hydroxymethylpyrimidine kinase, hygromycin-B kinase, inosine kinase, kanamycin kinase, phosphomethylpyrimidine kinase, phosphoribulokinase, polyphosphate kinase, propionate kinase, pyruvate, water dikinase, rhamnulokinase, tagatose-6-phosphate kinase, tetraacyldisaccharide 4′-kinase, thiamine-phosphate kinase, undecaprenol kinase, uridylate kinase, N-acylmannosamine kinase, D-erythro-sphingosine kinase.

[0391] Pharmaceutical compositions including such proteins or protein encoding sequences, antibodies directed against such proteins or polynucleotides capable of altering expression of such proteins may be used to treat diseases which may be ameliorated by a modulating kinase activity, which is one of the main signaling pathways inside cell; while probe sequences or antibodies may be used for diagnosis of such diseases.

[0392] Examples of these diseases include, but are not limited to, acute lymphoblastic leukemia associated with spleen tyrosine kinase deficiency [Goodman P A, Wood C M, Vassilev A, Mao C, Uckun F M (2001) Oncogene, 20(30):3969-78), ataxia telangiectasia associated with ATM kinase deficiency (Boultwood J (2001) J Clin Pathol, 54(7):512-6], congenital haemolytic anaemia associated with erythrocyte pyruvate kinase deficiency [Zanella A, Bianchi P, Fermo E, Iurlo A, Zappa M, Vercellati C, Boschetti C, Baronciani L, Cotton F (2001) Br J Haematol, 113(1):43-8], mevalonic aciduria caused by mevalonate kinase deficiency [Houten S M, Koster J, Romeijn G J, Frenkel J, Di Rocco M, Caruso U, Landrieu P, Kelley R I, Kuis W, Poll-The B T, Gibson K M, Wanders R J, Waterham H R (2001) Eur J Hum Genet, 9(4):253-9], and acute myelogenous leukemia associated with over-expressed death-associated protein kinase [Guzman M L, Upchurch D, Grimes B, Howard D S, Rizzieri D A, Luger S M, Phillips G L, Jordan C T (2001) Blood, 97(7):2177-9].

[0393] Nucleotide Binding:

[0394] This category contains ligand binding or carrier proteins, involved in physical interaction with a nucleotide—any compound consisting of a nucleoside that is esterified with [ortho]phosphate or an oligophosphate at any hydroxyl group on the glycose moiety, such as purine nucleotide binding proteins.

[0395] Tubulin Binding:

[0396] This category contains binding proteins that bind tubulin, such as microtubule binding proteins.

[0397] Pharmaceutical compositions including such proteins or protein encoding sequences, antibodies directed against such proteins or polynucleotides capable of altering expression of such proteins may be used to treat diseases which are associated with non-normal tubulin activity or structure. Binding of the products of the genes of this family, or antibodies reactive therewith, can modulate a plurality of tubulin activities as well as change microtubulin structure; while probe sequences or antibodies may be used for diagnosis of such diseases.

[0398] Examples of these diseases include, but are not limited to, Alzheimer's disease associated with t-complex polypeptide 1 deficiency [Schuller E, Gulesserian T, Seidl R, Cairns N, Lube G (2001) Life Sci, 69(3):263-70], neurodegeneration associated with apoE deficiency [Masliah E, Mallory M, Ge N, Alford M, Veinbergs I, Roses A D (1995) Exp Neurol, 136(2):107-22], progressive axonopathy associated with dysfunctional neurofilaments [Griffiths I R, Kyriakides E, Barrie J (1989) Neuropathol Appl Neurobiol, 15(1):63-74], familial frontotemporal dementia associated with tau deficiency [astor P, Pastor E, Carnero C, Vela R, Garcia T, Amer G, Tolosa E, Oliva R (2001) Ann Neurol, 49(2):263-7], and colon cancer suppressed by APC [White R L (1997) Pathol Biol (Paris), 45(3):240-4].

[0399] Receptor Signaling Proteins:

[0400] This category contains receptor proteins involved in signal transduction, such as receptor signaling protein serine/threonine kinase, receptor signaling protein tyrosine kinase, receptor signaling protein tyrosine phosphatase, aryl hydrocarbon receptor nuclear translocator, hematopoeitin/interferon-class (D200-domain) cytokine receptor signal transducer, transmembrane receptor protein tyrosine kinase signaling protein, transmembrane receptor protein serine/threonine kinase signaling protein, receptor signaling protein serine/threonine kinase signaling protein, receptor signaling protein serine/threonine phosphatase signaling protein, small GTPase regulatory/interacting protein, receptor signaling protein tyrosine kinase signaling protein, receptor signaling protein serine/threonine phosphatase.

[0401] Pharmaceutical compositions including such proteins or protein encoding sequences, antibodies directed against such proteins or polynucleotides capable of altering expression of such proteins may be used to treat diseases in which the signal-transduction is non-normal, either as a cause, or as a result of the disease; while probe sequences or antibodies may be used for diagnosis of such diseases.

[0402] Examples of these diseases include, but are not limited to, complete hypogonadotropic hypogonadism associated with GnRH receptor deficiency [Kottler M L, Chauvin S, Lahlou N, Harris C E, Johnston C J, Lagarde J P, Bouchard P, Farid N R, Counis R (2000) J Clin Endocrinol Metab, 85(9):3002-8], severe combined immunodeficiency disease associated with IL-7 receptor deficiency (Puel A, Leonard W J (2000) Curr Opin Immunol, 12(4):468-73), schizophrenia associated N-methyl-D-aspartate receptor deficiency (Mohn A R, Gainetdinov R R, Caron M G, Koller B H (1999) Cell, 98(4):427-36), Yersinia-associated arthritis associated with tumor necrosis factor receptor p55 deficiency [Zhao Y X, Zhang H, Chiu B, Payne U, Inman R D (1999) Arthritis Rheum, 42(8):1662-72], and Dwarfism of Sindh caused by growth hormone-releasing hormone receptor deficiency [aheshwari H G, Silverman B L, Dupuis J, Baumann G (1998) J Clin Endocrinol Metab, 83(10:4065-74].

[0403] Molecular Function Unknown:

[0404] This category contains various proteins with unknown molecular function, such as cell surface antigens.

[0405] Pharmaceutical compositions including such proteins or protein encoding sequences, antibodies directed against such proteins or polynucleotides capable of altering expression of such proteins may be used to treat diseases in which regulation of the recognition, or participation or bind of cell surface antigens to other moieties may improve the disease. These diseases include autoimmune diseases, various infectious diseases, cancer diseases which involve non cell surface antigens recognition and activity, etc; while probe sequences or antibodies may be used for diagnosis of such diseases.

[0406] Enzyme Activators:

[0407] This category contains enzyme regulators, such as activators of: kinases, phosphatases, sphingolipids, chaperones, guanylate cyclase, tryptophan hydroxylase, proteases, phospholipases, caspases, proprotein convertase 2 activator, cyclin-dependent protein kinase 5 activator, superoxide-generating NADPH oxidase activator, sphingomyelin phosphodiesterase activator, monophenol monooxygenase activator, proteasome activator, GTPase activator.

[0408] Pharmaceutical compositions including such proteins or protein encoding sequences, antibodies directed against such proteins or polynucleotides capable of altering expression of such proteins may be used to treat diseases in which beneficial effect may be achieved by modulating the activity of activators of proteins and enzymes; while probe sequences or antibodies may be used for diagnosis of such diseases.

[0409] Transferases, Transferring One-Carbon Groups:

[0410] This category contains various enzymes that catalyze the transfer of a chemical group, such as a one-carbon, from one molecule to another. The category covers enzymes such as methyltransferase, amidinotransferase, hydroxymethyl-, formyl- and related transferase, carboxyl- and carbamoyltransferase.

[0411] Pharmaceutical compositions including such proteins or protein encoding to sequences, antibodies directed against such proteins or polynucleotides capable of altering expression of such proteins may be used to treat diseases in which the transfer of a one-carbon chemical group from one molecule to another is not normal so that a beneficial effect may be achieved by modulation of such reaction; while probe sequences or antibodies may be used for diagnosis of such diseases.

[0412] Transferases:

[0413] This category contains various enzymes that catalyze the transfer of a chemical group, such as a phosphate or amine, from one molecule to another. It covers enzymes such as: transferases, transferring one-carbon groups, aldehyde or ketonic groups, acyl groups, glycosyl groups, alkyl or aryl (other than methyl) groups, nitrogenous, phosphorus-containing groups, sulfur-containing groups, lipoyltransferase, deoxycytidyl transferases.

[0414] Pharmaceutical compositions including such proteins or protein encoding sequences, antibodies directed against such proteins or polynucleotides capable of altering expression of such proteins may be used to treat diseases in which the transfer of a chemical group from one molecule to another is not normal so that a beneficial effect may be achieved by modulation of such reaction; while probe sequences or antibodies may be used for diagnosis of such diseases.

[0415] Chaperone:

[0416] This category contains functional classes of unrelated families of proteins that assist the correct non-covalent assembly of other polypeptide-containing structures in vivo, but are not components of these assembled structures when they a performing their normal biological function. The category covers proteins such as: ribosomal chaperone, peptidylprolyl isomerase, lectin-binding chaperone, nucleosome assembly chaperone, chaperonin ATPase, cochaperone, heat shock protein, HSP70/HSP90 organizing protein, fimbrial chaperone, metallochaperone, tubulin folding, HSC70-interacting protein.

[0417] Pharmaceutical compositions including such proteins or protein encoding sequences, antibodies directed against such proteins or polynucleotides capable of altering expression of such proteins may be used to treat diseases which are associated with non-normal protein activity or structure or abnormal degradation of such proteins; while probe sequences or antibodies may be used for diagnosis of such diseases.

[0418] Cell Adhesion Molecule:

[0419] This category contains proteins that serve as adhesion molecules between adjoining cells, such as: membrane-associated protein with guanylate kinase activity, cell adhesion receptor, neuroligin, calcium-dependent cell adhesion molecule, selectin, calcium-independent cell adhesion molecule, extracellular matrix protein.

[0420] Pharmaceutical compositions including such proteins or protein encoding sequences, antibodies directed against such proteins or polynucleotides capable of altering expression of such proteins may be used to treat diseases in which adhesion between adjoining cells is involved, typically conditions in which the adhesion is non-normal; while probe sequences or antibodies may be used for diagnosis of such diseases. Typical examples of such conditions are cancer conditions in which non-normal adhesion may cause and enhance the process of metastasis. Other examples of such conditions include conditions of non-normal growth and development of various tissues in which modulation adhesion among adjoining cells can improve the condition.

[0421] Examples of theses diseases include, but are not limited to, Wiskott-Aldrich syndrome associated with WAS deficiency [Westerberg L, Greicius G, Snapper S B, Aspenstrom P, Severinson E (2001) Blood, 98(4):1086-94], asthma associated with intercellular adhesion molecule-1 deficiency [Tang M L, Fiscus L C (2001) Pulm Pharmacol Ther, 14(3):203-10], intra-atrial thrombogenesis associated with increased von Willebrand factor activity [Fukuchi M, Watanabe J, Kumagai K, Katori Y, Baba S, Fukuda K, Yagi T, Iguchi A, Yokoyama H, Miura M, Kagaya Y, Sato S, Tabayashi K, Shirato K (2001) J Am Coll Cardiol, 37(5):1436-42], junctional epidermolysis bullosa associated with laminin 5 beta3 deficiency [Robbins P B, Lin Q, Goodnough J B, Tian H, Chen X, Khavari P A (2001) Proc Natl Acad Sci USA, 98(9):5193-8], and hydrocephalus caused by neural adhesion molecule L1 deficiency [Rolf B, Kutsche M, Bartsch U (2001) Brain Res, 891(1-2):247-52].

[0422] Motor Proteins:

[0423] This category contains proteins that are held to generate force or energy by the hydrolysis of ATP and that functions in the production of intracellular movement or transportation. It covers proteins such as: microfilament motor, axonemal motor, microtubule motor, and kinetochore motor (like dynein, kinesin, or myosin).

[0424] Defense/Immunity Proteins:

[0425] This category contains proteins that are involved in the immune and complement systems, such as acute-phase response proteins, antimicrobial peptides, antiviral response proteins, blood coagulation factors, complement components, immunoglobulins, major histocompatibility complex antigens, opsonins.

[0426] Pharmaceutical compositions including such proteins or protein encoding sequences, antibodies directed against such proteins or polynucleotides capable of altering expression of such proteins may be used to treat diseases involving the immunological system including inflammation, autoimmune diseases, infectious diseases, as well as cancerous processes or diseases which are manifested by non-normal coagulation processes, which may include abnormal bleeding or excessive coagulation; while probe sequences or antibodies may be used for diagnosis of such diseases.

[0427] Examples of these diseases include, but are not limited to, late (C5-9) complement component deficiency associated with opsonin receptor allotypes [Fijen C A, Bredius R G, Kuijper E J, Out T A, De Haas M, De Wit A P, Daha M R, De Winkel J G (2000) Clin Exp Immunol, 120(2):338-45], combined immunodeficiency associated with defective expression of MHC class II genes [Griscelli C, Lisowska-Grospierre B, Mach B (1989) Immunodefic Rev 1(2):135-53], loss of antiviral activity of CD4 T cells caused by neutralization of endogenous TNF alpha [Pavic I, Polic B, Crnkovic I, Lucin P, Jonjic S, Koszinowski U H (1993) J Gen Virol, 74 (Pt 10):2215-23], autoimmune diseases associated with natural resistance-associated macrophage protein deficiency [Evans C A, Harbuz M S, Ostenfeld T, Norrish A, Blackwell J M (2001) Neurogenetics, 3(2):69-78], and Epstein-Barr virus-associated lymphoproliferative disease inhibited by combined GM-CSF and IL-2 therapy [Baiocchi R A, Ward J S, Carrodeguas L, Eisenbeis C F, Peng R, Roychowdhury S, Vourganti S, Sekula T, O'Brien M, Moeschberger M, Caligiuri M A (2001) J Clin Invest, 108(6): 887-94].

[0428] Intracellular Transporters:

[0429] This category contains proteins that mediate the transport of molecules and macromolecules inside the cell, such as: intracellular nucleoside transporter, vacuolar assembly proteins, vesicle transporters, vesicle fusion proteins, type II protein secretors.

[0430] Pharmaceutical compositions including such proteins or protein encoding sequences, antibodies directed against such proteins or polynucleotides capable of altering expression of such proteins may be used to treat diseases in which the transport of molecules and macromolecules is non-normal leading to various pathologies; while probe sequences or antibodies may be used for diagnosis of such diseases.

[0431] Transporters:

[0432] This category contains proteins that mediate the transport of molecules and macromolecules, such as channels, exchangers, pumps. The category covers proteins such as: amine/polyamine transporter, lipid transporter, neurotransmitter transporter, organic acid transporter, oxygen transporter, water transporter, carriers, intracellular transportes, protein transporters, ion transporters, carbohydrate transporter, polyol transporter, amino acid transporters, vitamin/cofactor transporters, siderophore transporter, drug transporter, channel/pore class transporter, group translocator, auxiliary transport proteins, permeases, murein transporter, organic alcohol transporter, nucleobase, nucleoside, nucleotide and nucleic acid transporters.

[0433] Pharmaceutical compositions including such proteins or protein encoding sequences, antibodies directed against such proteins or polynucleotides capable of altering expression of such proteins may be used to treat diseases in which the transport of molecules and macromolecules such as neurotransmitters, hormones, sugar etc. is non-normal leading to various pathologies; while probe sequences or antibodies may be used for diagnosis of such diseases.

[0434] Examples of these diseases include, but are not limited to, glycogen storage disease caused by glucose-6-phosphate transporter deficiency (Hiraiwa H, Chou J Y (2001) DNA Cell Biol, 20(8):447-53), tangier disease associated with ATP-binding cassette transporter-1 deficiency (McNeish J, Aiello R J, Guyot D, Turi T, Gabel C, Aldinger C, Hoppe K L, Roach M L, Royer L J, de Wet J, Broccardo C, Chimini G, Francone O L (2000) Proc Natl Acad Sci USA, 97(8):4245-50), systemic primary carnitine deficiency associated with organic cation transporter deficiency (Tang N L, Ganaphthy V, Wu X, Hui J, Seth P, Yuen P M, Wanders R J, Fok T F, Hjelm N M (1999) Hum Mol Genet, 8(4):655-60), Wilson disease associated with copper-transporting ATPases deficiency (Payne A S, Kelly E J, Gitlin J D (1998) Proc Natl Acad Sci USA, 95(18):10854-9), and atelosteogenesis associated with diastrophic dysplasia sulphate transporter deficiency (Newbury-Ecob R (1998) J Med Genet, 35(1):49-53).

[0435] Lyases:

[0436] This category contains enzymes that catalyze the formation of double bonds by removing chemical groups from a substrate without hydrolysis or catalyze the addition of chemical groups to double bonds. It covers enzymes such as carbon-carbon lyase, carbon-oxygen lyase, carbon-nitrogen lyase, carbon-sulfur lyase, carbon-halide lyase, phosphorus-oxygen lyase, and other lyases.

[0437] Actin Binding Proteins:

[0438] This category contains actin binding proteins, such as actin cross-linking, actin bundling, F-actin capping, actin monomer binding, actin lateral binding, actin depolymerizing, actin monomer sequestering, actin filament severing, actin modulating, membrane associated actin binding, actin thin filament length regulation, and actin polymerizing proteins.

[0439] Protein Binding Proteins:

[0440] This category contains various proteins, involved in diverse biological functions, such as: intermediate filament binding, LIM-domain binding, LLR-domain binding, clathrin binding, ARF binding, vinculin binding, KU70 binding, troponin C binding PDZ-domain binding, SH3-domain binding, fibroblast growth factor binding, membrane-associated protein with guanylate kinase activity interacting, Wnt-protein binding, DEAD/H-box RNA helicase binding, beta-amyloid binding, myosin binding, TATA-binding protein binding DNA topoisomerase I binding, polypeptide hormone binding, RHO binding, FH 1-domain binding, syntaxin-1 binding, HSC70-interacting, transcription factor binding, metarhodopsin binding, tubulin binding, JUN kinase binding, RAN protein binding, protein signal sequence binding, importin alpha export receptor, poly-glutamine tract binding, protein carrier, beta-catenin binding, protein C-terminus binding, lipoprotein binding, cytoskeletal protein binding protein, nuclear localization sequence binding, protein phosphatase 1 binding, adenylate cyclase binding, eukaryotic initiation factor 4E binding, calmodulin binding, collagen binding, insulin-like growth factor binding, lamin binding, profilin binding, tropomyosin binding, actin binding, peroxisome targeting sequence binding, SNARE binding, cyclin binding.

[0441] Pharmaceutical compositions including such proteins or protein encoding sequences, antibodies directed against such proteins or polynucleotides capable of altering expression of such proteins may be used to treat diseases which are associated with non-normal protein activity or structure. Binding of the products of the variants of this family, or antibodies reactive therewith, can modulate a plurality of protein activities as well as change protein structure; while probe sequences or antibodies may be used for diagnosis of such diseases.

[0442] Ligand Binding or Carrier Proteins:

[0443] This category contains various proteins, involved in diverse biological functions, such as: pyridoxal phosphate binding, carbohydrate binding, magnesium binding, amino acid binding, cyclosporin A binding, nickel binding, chlorophyll binding, biotin binding, penicillin binding, selenium binding, tocopherol binding, lipid binding, drug binding, oxygen transporter, electron transporter, steroid binding, juvenile hormone binding, retinoid binding, heavy metal binding, calcium binding, protein binding, glycosaminoglycan binding, folate binding, odorant binding, lipopolysaccharide binding, nucleotide binding.

[0444] ATPases:

[0445] This category contains enzymes that catalyze the hydrolysis of ATP to ADP, releasing energy that is used in the cell; adenosine triphosphatase. It covers enzymes such as plasma membrane cation-transporting ATPase, ATP-binding cassette (ABC) transporter, magnesium-ATPase, hydrogen-/sodium-translocating ATPase, arsenite-transporting ATPase, protein-transporting ATPase, DNA translocase, P-type ATPase, hydrolase, acting on acid to anhydrides, —involved in cellular and subcellular movement.

[0446] Carboxylic Ester Hydrolases:

[0447] This category contains hydrolytic enzymes, acting on carboxylic ester bonds, such as N-acetylglucosaminylphosphatidylinositol deacetylase, 2-acetyl-1-alkylglycerophosphocholine esterase, aminoacyl-tRNA hydrolase, arylesterase, carboxylesterase, cholinesterase, gluconolactonase, sterol esterase, acetylesterase, carboxymethylenebutenolidase, protein-glutamate methylesterase, lipase, 6-phosphogluconolactonase.

[0448] Pharmaceutical compositions including such proteins or protein encoding sequences, antibodies directed against such proteins or polynucleotides capable of altering expression of such proteins may be used to treat diseases in which the hydrolytic cleavage of a covalent bond with accompanying addition of water, —H being added to one product of the cleavage and —OH to the other, is not normal so that a beneficial effect may be achieved by modulation of such reaction; while probe sequences or antibodies may be used for diagnosis of such diseases.

[0449] Hydrolase, Acting on Ester Bonds:

[0450] This category contains hydrolytic enzymes, acting on ester bonds, such as nucleases, sulfuric ester hydrolase, carboxylic ester hydrolases, thiolester hydrolase, phosphoric monoester hydrolase, phosphoric diester hydrolase, triphosphoric monoester hydrolase, diphosphoric monoester hydrolase, phosphoric triester hydrolase.

[0451] Pharmaceutical compositions including such proteins or protein encoding to sequences, antibodies directed against such proteins or polynucleotides capable of altering expression of such proteins may be used to treat diseases in which the hydrolytic cleavage of a covalent bond with accompanying addition of water, —H being added to one product of the cleavage and —OH to the other, is not normal so that a beneficial effect may be achieved by modulation of such reaction; while probe sequences or antibodies may be used for diagnosis of such diseases.

[0452] Hydrolases:

[0453] This category contains hydrolytic enzymes, such as GPI-anchor transamidase, peptidases, hydrolases, acting on ester bonds, glycosyl bonds, ether bonds, carbon-nitrogen (but not peptide) bonds, acid anhydrides, acid carbon-carbon bonds, acid halide bonds, acid phosphorus-nitrogen bonds, acid sulfur-nitrogen bonds, acid carbon-phosphorus bonds, acid sulfur-sulfur bonds.

[0454] Pharmaceutical compositions including such proteins or protein encoding sequences, antibodies directed against such proteins or polynucleotides capable of altering expression of such proteins may be used to treat diseases in which the hydrolytic cleavage of a covalent bond with accompanying addition of water, —H being added to one product of the cleavage and —OH to the other, is not normal so that a beneficial effect may be achieved by modulation of such reaction; while probe sequences or antibodies may be used for diagnosis of such diseases.

[0455] Enzymes:

[0456] This category contains naturally occurring or synthetic macromolecular substance composed wholly or largely of protein, that catalyzes, more or less specifically, one or more (bio)chemical reactions at relatively low temperatures. The action of RNA that has catalytic activity (ribozyme) is often also regarded as enzymic. Nevertheless, enzymes are mainly proteinaceous and are often easily inactivated by heating or by protein-denaturing agents. The substances upon which they act are known as substrates, for which the enzyme possesses a specific binding or active site.

[0457] This category covers various proteins possessing enzymatic activities, such as mannosylphosphate transferase, para-hydroxybenzoate:polyprenyltransferase, Rieske iron-sulfur protein, imidazoleglycerol-phosphate synthase, sphingosine hydroxylase, tRNA 2′-phosphotransferase, sterol C-24(28) reductase, C-8 sterol isomerase, C-22 sterol desaturase, C-14 sterol reductase, C-3 sterol dehydrogenase (C-4 sterol decarboxylase), 3-keto sterol reductase, C-4 methyl sterol oxidase, dihydronicotinamide riboside quinone reductase, glutamate phosphate reductase, DNA repair enzyme, telomerase, alpha-ketoacid dehydrogenase, beta-alanyl-dopamine synthase, RNA editase, aldo-keto reductase, alkylbase DNA glycosidase, glycogen debranching enzyme, dihydropterin deaminase, dihydropterin oxidase, dimethylnitrosamine demethylase, ecdysteroid UDP-glucosyl/UDP glucuronosyl transferase, glycine cleavage system, helicase, histone deacetylase, mevaldate reductase, monooxygenase, poly(ADP-ribose) glycohydrolase, pyruvate dehydrogenase, serine esterase, sterol carrier protein X-related thiolase, transposase, tyramine-beta hydroxylase, para-aminobenzoic acid (PABA) synthase, glu-tRNA(gln) amidotransferase, molybdopterin cofactor sulfurase, lanosterol 14-alpha-demethylase, aromatase, 4-hydroxybenzoate octaprenyltransferase, 7,8-dihydro-8-oxoguanine-triphosphatase, CDP-alcohol phosphotransferase, 2,5-diamino-6-(ribosylamino)-4(3H)-pyrimidonone 5′-phosphate deaminase, diphosphoinositol polyphosphate phosphohydrolase, gamma-glutamyl carboxylase, small protein conjugating enzyme, small protein activating enzyme, 1-deoxyxylulose-5-phosphate synthase, 2′-phosphotransferase, 2-octoprenyl-3-methyl-6-methoxy-1,4-benzoquinone hydroxylase, 2C-methyl-D-erythritol 2,4-cyclodiphosphate synthase, 3,4 dihydroxy-2-butanone-4-phosphate synthase, 4-amino-4-deoxychorismate lyase, 4-diphosphocytidyl-2C-methyl-D-erythritol synthase, ADP-L-glycero-D-manno-heptose synthase, D-erythro-7,8-dihydroneopterin triphosphate 2′-epimerase, N-ethylmaleimide reductase, O-antigen ligase, O-antigen polymerase, UDP-2,3-diacylglucosamine hydrolase, arsenate reductase, carnitine racemase, cobalamin [5′-phosphate] synthase, cobinamide phosphate guanylyltransferase, enterobactin synthetase, enterochelin esterase, enterochelin synthetase, glycolate oxidase, integrase, lauroyl transferase, peptidoglycan synthetase, phosphopantetheinyltransferase, phosphoglucosamine mutase, phosphoheptose isomerase, quinolinate synthase, siroheme synthase, N-acylmannosamine-6-phosphate 2-epimerase, N-acetyl-anhydromuramoyl-L-alanine amidase, carbon-phosphorous lyase, heme-copper terminal oxidase, disulfide oxidoreductase, phthalate dioxygenase reductase, sphingosine-1-phosphate lyase, molybdopterin oxidoreductase, dehydrogenase, NADPH oxidase, naringenin-chalcone synthase, N-ethylammeline chlorohydrolase, polyketide synthase, aldolase, kinase, phosphatase, CoA-ligase, oxidoreductase, transferase, hydrolase, lyase, isomerase, ligase, ATPase, sulfhydryl oxidase, lipoate-protein ligase, delta-1-pyrroline-5-carboxyate synthetase, lipoic acid synthase, and tRNA dihydrouridine synthase.

[0458] Pharmaceutical compositions including such proteins or protein encoding sequences, antibodies directed against such proteins or polynucleotides capable of altering expression of such proteins may be used to treat diseases which can be ameliorated by modulating the activity of various enzymes which are involved both in enzymatic processes inside cells as well as in cell signaling; while probe sequences or antibodies may be used for diagnosis of such diseases.

[0459] Cytoskeletal Proteins:

[0460] This category contains proteins involved in the structure formation of the cytoskeleton.

[0461] Pharmaceutical compositions including such proteins or protein encoding sequences, antibodies directed against such proteins or polynucleotides capable of altering expression of such proteins may be used to treat diseases which are caused or due to abnormalities in cytoskeleton, including cancerous cells, and diseased cells including those which do not propagate, grow or function normally; while probe sequences or antibodies may be used for diagnosis of such diseases.

[0462] Structural Proteins:

[0463] This category contains proteins involved in the structure formation of the cell, such as: structural proteins of ribosome, cell wall structural proteins, structural proteins of cytoskeleton, extracellular matrix structural proteins, extracellular matrix glycoproteins, amyloid proteins, plasma proteins, structural proteins of eye lens, structural protein of chorion (sensu Insecta), structural protein of cuticle (sensu Insecta), puparial glue protein (sensu Diptera), structural proteins of bone, yolk proteins, structural proteins of muscle, structural protein of vitelline membrane (sensu Insecta), structural proteins of peritrophic membrane (sensu Insecta), structural proteins of nuclear pores.

[0464] Pharmaceutical compositions including such proteins or protein encoding sequences, antibodies directed against such proteins or polynucleotides capable of altering expression of such proteins may be used to treat diseases which are caused or due to abnormalities in cytoskelaton, including cancerous cells, and diseased cells including those which do not propagate, grow or function normally; while probe sequences or antibodies may be used for diagnosis of such diseases.

[0465] Ligands:

[0466] This category contains proteins that bind to another chemical entity to form a larger complex, involved in various biological processes, such as signal trunsduction, metabolism, growth and differentiation, etc. The category covers ligands such as: opioid peptides, baboon receptor ligand, branchless receptor ligand, breathless receptor ligand, ephrin, frizzled receptor ligand, frizzled-2 receptor ligand, heartless receptor ligand, Notch receptor ligand, patched receptor ligand, punt receptor ligand, Ror receptor ligand, saxophone receptor ligand, SE20 receptor ligand, sevenless receptor ligand, smooth receptor ligand, thickveins receptor ligand, Toll receptor ligand, Torso receptor ligand, death receptor ligand, scavenger receptor ligand, neuroligin, integrin ligand, hormones, pheromones, growth factors, sulfonylurea receptor ligand.

[0467] Pharmaceutical compositions including such proteins or protein encoding sequences, antibodies directed against such proteins or polynucleotides capable of altering expression of such proteins may be used to treat diseases which involve non-normal secretion of proteins which may be due to non-normal presence, absence or non-normal response to normal levels of secreted proteins including hormones, neurotransmitters, and various other proteins secreted by cells to the extracellular environment or diseases which are endocrine in nature (cause or are a result of hormones); while probe sequences or antibodies may be used for diagnosis of such diseases.

[0468] Examples of these diseases include, but are not limited to, analgesia inhibited by orphanin FQ/nociceptin [Shane R, Lazar D A, Rossi G C, Pasternak G W, Bodnar R J (2001) Brain Res, 907(1-2):109-16], stroke protected by estrogen [Alkayed N J, Goto S, Sugo N, Joh H D, Klaus J, Crain B J, Bernard O, Traystman R J, Hurn P D (2001) J Neurosci, 21(19):7543-50], atherosclerosis associated with growth hormone deficiency [Elhadd T A, Abdu T A, Oxtoby J, Kennedy G, McLaren M, Neary R, Belch J J, Clayton R N (2001) J Clin Endocrinol Metab, 86(9):4223-32], diabetes inhibited by alpha-galactosylceramide [Hong S, Wilson M T, Serizawa I, Wu L, Singh N, Naidenko O V, Miura T, Haba T, Scherer D C, Wei J, Kronenberg M, Koezuka Y, Van Kaer L (2001) Nat Med, 7(9):1052-6], and Huntington's disease associated with huntingtin deficiency [Rao D S, Chang J C, Kumar P D, Mizukami I, Smithson G M, Bradley S V, Parlow A F, Ross T S (2001) Mol Cell Biol, 21(22):7796-806].

[0469] Signal Transducer:

[0470] This category contains various signal transducers, such as: activin inhibitors, receptor-associated proteins, alpha-2 macroglobulin receptors, morphogens, quorum sensing signal generators, quorum sensing response regulators, receptor signaling proteins, ligands, receptors, two-component sensor molecules, two-component response regulators.

[0471] Pharmaceutical compositions including such proteins or protein encoding sequences, antibodies directed against such proteins or polynucleotides capable of altering expression of such proteins may be used to treat diseases in which the signal-transduction is non-normal, either as a cause, or as a result of the disease; while probe sequences or antibodies may be used for diagnosis of such diseases.

[0472] Examples of these diseases include, but are not limited to, altered sexual dimorphism associated with signal transducer and activator of transcription 5b [Udy G B, Towers R P, Snell R G, Wilkins R J, Park S H, Ram P A, Waxman D J, Davey H W (1997) Proc Natl Acad Sci USA, 94(14):7239-44], multiple sclerosis associated with sgp130 deficiency [Padberg F, Feneberg W, Schmidt S, Schwarz M J, Korschenhausen D, Greenberg B D, Nolde T, Muller N, Trapmann H, Konig N, Moller H J, Hampel H (1999) J Neuroimmunol, 99(2):218-23], intestinal inflammation associated with elevated signal transducer and activator of transcription 3 activity [Suzuki A, Hanada T, Mitsuyama K, Yoshida T, Kamizono S, Hoshino T, Kubo M, Yamashita A, Okabe M, Takeda K, Akira S, Matsumoto S, Toyonaga A, Sata M, Yoshimura A (2001) J Exp Med, 193(4):471-81], carcinoid tumor inhibited by increased signal transducer and activators of transcription 1 and 2 [Zhou Y, Wang S, Gobl A, Oberg K (2001) Oncology, 60(4):330-8], and esophageal cancer associated with loss of EGF-STAT1 pathway [Watanabe G, Kaganoi J, Imamura M, Shimada Y, Itami A, Uchida S, Sato F, Kitagawa M (2001) Cancer J, 7(2):132-9].

[0473] RNA Polymerase II Transcription Factors:

[0474] This category contains proteins, such as specific and non-specific RNA polymerase II transcription factors, enhancer binding, ligand-regulated transcription factor, general RNA polymerase II transcription factors.

[0475] Pharmaceutical compositions including such proteins or protein encoding sequences, antibodies directed against such proteins or polynucleotides capable of altering expression of such proteins may be used to treat diseases involving RNA polymerase II transcription factors, for example diseases where there is non-normal transcription of RNA; while probe sequences or antibodies may be used for diagnosis of such diseases.

[0476] RNA Binding Proteins:

[0477] This category contains RNA binding proteins involved in splicing and translation regulation, such as tRNA binding proteins, RNA helicases, double-stranded RNA and single-stranded RNA binding proteins, mRNA binding proteins, snRNA cap binding proteins, 5S RNA and 7S RNA binding proteins, poly-pyrimidine tract binding proteins, snRNA binding proteins, and AU-specific RNA binding proteins.

[0478] Pharmaceutical compositions including such proteins or protein encoding sequences, antibodies directed against such proteins or polynucleotides capable of altering expression of such proteins may be used to treat diseases involving transcription and translation factors such as: helicases, isomerases, histones and nucleases, for example diseases where there is non-normal transcription, splicing, post-transcriptional processing, translation or stability of the RNA; while probe sequences or antibodies may be used for diagnosis of such diseases.

[0479] Nucleic Acid Binding Proteins:

[0480] This category contains proteins involved in RNA and DNA synthesis and expression regulation, such as transcription factors, RNA and DNA binding proteins, zinc fingers, helicase, isomerase, histones, nucleases, ribonucleoproteins, transcription and translation factors and other.

[0481] Pharmaceutical compositions including such proteins or protein encoding sequences, antibodies directed against such proteins or polynucleotides capable of altering expression of such proteins may be used to treat diseases involving DNA or RNA binding proteins such as: helicases, isomerases, histones and nucleases, for example diseases where there is non-normal replication or transcription of DNA and RNA respectively; while probe sequences or antibodies may be used for diagnosis of such diseases.

[0482] Proteins Involved in Metabolism:

[0483] The totality of the chemical reactions and physical changes that occur in living organisms, comprising anabolism and catabolism; may be qualified to mean the chemical reactions and physical processes undergone by a particular substance, or class of substances, in a living organism.

[0484] This category covers proteins involved in the reactions of cell growth and maintenance, such as: metabolism resulting in cell growth, carbohydrate metabolism, energy pathways, electron transport, nucleobase, nucleoside, nucleotide and nucleic acid metabolism, protein metabolism and modification, amino acid and derivative metabolism, protein targeting, lipid metabolism, aromatic compound metabolism, one-carbon compound metabolism, coenzymes and prosthetic group metabolism, sulfur metabolism, phosphorus metabolism, phosphate metabolism, oxygen and radical metabolism, xenobiotic metabolism, nitrogen metabolism, fat body metabolism (sensu Insecta), protein localization, catabolism, biosynthesis, toxin metabolism, methylglyoxal metabolism, cyanate metabolism, glycolate metabolism, carbon utilization, antibiotic metabolism.

[0485] Examples of metabolism-related diseases include, but are not limited to, multisystem mitochondrial disorder caused by mitochondrial DNA cytochrome C oxidase II deficiency [Campos Y, Garcia-Redondo A, Fernandez-Moreno M A, Martinez-Pardo M, Goda G, Rubio J C, Martin M A, del Hoyo P, Cabello A, Bornstein B, Garesse R, Arenas J (2001) Ann Neurol Sep; 50(3):409-13], conduction defects and ventricular dysfunction in the heart associated with heterogeneous connexin43 expression [Gutstein D E, Morley G E, Vaidya D, Liu F, Chen F L, Stuhlmann H, Fishman G I (2001) Circulation, 104(10):1194-9], atherosclerosis associated with growth suppressor p27 deficiency [Diez-Juan A, Andres V (2001) FASEB J, 15(11):1989-95], colitis associated with glutathione peroxidase deficiency [Esworthy R S, Aranda R, Martin M G, Doroshow J H, Binder S W, Chu F F (2001) Am J Physiol Gastrointest Liver Physiol, 281(3):G848-55], and systemic lupus erythematosus associated with deoxyribonuclease I deficiency [Yasutomo K, Horiuchi T, Kagami S, Tsukamoto H, Hashimura C, Urushihara M, Kuroda Y (2001) Nat Genet, 28(4):313-4].

[0486] Cell Growth and/or Maintenance Proteins:

[0487] This category contains proteins involved in any biological process required for cell survival, growth and maintenance. It covers proteins involved in biological processes such as: cell organization and biogenesis, cell growth, cell proliferation, metabolism, cell cycle, budding, cell shape and cell size control, sporulation (sensu Saccharomyces), transport, ion homeostasis, autophagy, cell motility, chemi-mechanical coupling, membrane fusion, cell-cell fusion, stress response.

[0488] Pharmaceutical compositions including such proteins or protein encoding sequences, antibodies directed against such proteins or polynucleotides capable of altering expression of such proteins may be used to treat or prevent diseases such as cancer, degenerative diseases, for example neurodegenerative diseases or conditions associated with aging, or alternatively, diseases wherein apoptosis which should have taken place, does not take place; while probe sequences or antibodies may be used for diagnosis of such diseases. Detection of pre-disposition to a disease, as well as for determination of the stage of the disease can also be effected

[0489] Examples of these diseases include, but are not limited to, ataxia-telangiectasia associated with ataxia-telangiectasia mutated deficiency [Hande et al (2001) Hum Mol Genet, 10(5):519-28], osteoporosis associated with osteonectin deficiency [Delany et al (2000) J Clin Invest, 105(7):915-23], arthritis caused by membrane-bound matrix metalloproteinase deficiency [Holmbeck et al (1999) Cell, 99(1):81-92], defective stratum corneum and early neonatal death associated with transglutaminase 1 deficiency [Matsuki et al (1998) Proc Natl Acad Sci USA, 95(3):1044-9], and Alzheimer's disease associated with estrogen [Simpkins et al (1997) Am J Med, 103(3A):19S-25S].

[0490] Thus, the nucleic acid sequences of the present invention and the proteins encoded thereby and the cells and antibodies described hereinabove can be used in, for example, screening assays, therapeutic or prophylactic methods of treatment, or predictive medicine (e.g., diagnostic and prognostic assays, including those used to monitor clinical trials, and pharmacogenetics).

[0491] More specifically, the nucleic acids of the invention can be used to: (i) express a protein of the invention in a host cell (in culture or in an intact multicellular organism following, e.g., gene therapy, given, of course, that the transcript in question contains more than untranslated sequence); (ii) detect an mRNA; or (iii) detect an alteration in a gene to which a nucleic acid of the invention specifically binds; or to modulate such a gene's activity.

[0492] The nucleic acids and proteins of the invention can also be used to treat disorders characterized by either insufficient or excessive production of those nucleic acids or proteins, a failure in a biochemical pathway in which they normally participate in a cell, or other aberrant or unwanted activity relative to the wild type protein (e.g., inappropriate enzymatic activity or unproductive protein folding). The proteins of the invention are especially useful in screening for naturally occurring protein substrates or other compounds (e.g., drugs) that modulate protein activity. The antibodies of the invention can also be used to detect and isolate the proteins of the invention, to regulate their bioavailability, or otherwise modulate their activity. These uses, and the methods by which they can be achieved, are described in detail below.

### Screening Assays

[0493] The present invention provides methods (or “screening assays”) for identifying agents (or “test compounds” that bind to or otherwise modulate (i.e., stimulate or inhibit) the expression or activity of a nucleic acid of the present invention or the protein it encodes. An agent may be, for example, a small molecule such as a peptide, peptidomimetic (e.g., a peptoid), an amino acid or an analog thereof, a polynucleotide or an analog thereof, a nucleotide or an analog thereof, or an organic or inorganic compound (e.g., a heteroorganic or organometallic compound) having a molecular weight less than about 10,000 (e.g., about 5,000, 1,000, or 500) grams per mole and salts, esters, and other pharmaceutically acceptable forms of such compounds.

[0494] Agents identified in the screening assays can be used, for example, to modulate the expression or activity of the nucleic acids or proteins of the invention in a therapeutic protocol, or to discover more about the biological functions of the proteins.

[0495] The assays can be constructed to screen for agents that modulate the expression or activity of a protein of the invention or another cellular component with which it interacts. For example, where the protein of the invention is an enzyme, the screening assay can be constructed to detect agents that modulate either the enzyme's expression or activity or that of its substrate. The agents tested can be those obtained from combinatorial libraries. Methods known in the art allow the production and screening of: biological libraries; peptoid libraries [i.e., libraries of molecules that function as peptides even though they have a non-peptide backbone that confers resistance to enzymatic degradation; see, e.g., Zuckermann et al., J. Med. Chem. 37:2678-85, (1994)]; spatially addressable parallel solid phase or solution phase libraries; synthetic libraries requiring deconvolution; “one-bead one-compound” libraries; and synthetic libraries. The biological and peptoid libraries can be used to test only peptides, but the other four are applicable to testing peptides, non-peptide oligomers or libraries of small molecules [Lam, Anticancer Drug Des. 12:145, (1997)]. Molecular libraries can be synthesized as described by DeWitt et al. [Proc. Natl. Acad. Sci. USA 90:6909, (1993)] Erb et al. [Proc. Natl. Acad. Sci. USA 91:11422, (1994)] Zuckermann et al. [J. Med. Chem. 37:2678, (1994)] Cho et al. [Science 261:1303, (1993)] and Gallop et al. [J. Med. Chem. 37:1233, (1994)].

[0496] Libraries of compounds may be presented in solution [see, e.g., Houghten, Biotechniques 13:412-421, (1992)], or on beads [Lam, Nature 354:82-84, (1991)], chips [Fodor, Nature 364:555-556, (1993)], bacteria or spores (U.S. Pat. No. 5,223,409), plasmids [Cull et al., Proc Natl Acad Sci USA 89:1865-1869, (1992)] or on phage [Scott and Smith, Science 249:386-390, (1990); Devlin, Science 249:404-406, (1990); Cwirla et al., Proc. Natl. Acad. Sci. USA 87:6378-6382, (1990); Felici, J. Mol. Biol. 222:301-310, (1991); and U.S. Pat. No. 5,223,409].

[0497] The screening assay can be a cell-based assay, in which case the screening method includes contacting a cell that expresses a protein of the invention with a test compound and determining the ability of the test compound to modulate the protein's activity. The cell used can be a mammalian cell, including a cell obtained from a human or from a human cell line.

[0498] Alternatively, or in addition to examining the ability of an agent to modulate expression or activity generally, one can examine the ability of an agent to interact with, for example, to specifically bind to, a nucleic acid or protein of the invention. For example, one can couple an agent (e.g., a substrate) to a label (those described above, including radioactive or enzymatically active substances, are suitable), contact the nucleic acid or protein of the invention with the labeled agent, and determine whether they bind one another (by detecting, for example, a complex containing the nucleic acid or protein and the labeled agent). Labels are not, however, always required. For example, one can use a microphysiometer to detect interaction between an agent and a protein of the invention, neither of which were previously labeled [McConnell et al., Science 257:1906-1912, (1992). A microphysiometer (also known as a cytosensor) is an analytical instrument that measures the rate at which a cell acidifies its environment. The instrument uses a light-addressable potentiometric sensor (LAPS), and changes in the acidification rate indicate interaction between an agent and a protein of the invention. Molecular interactions can also be detected using fluorescence energy transfer (FET; see, e.g., U.S. Pat. Nos. 5,631,169 and 4,868,103). An FET binding event can be conveniently measured through fluorometric detection means well known in the art (e.g., by means of a fluorimeter). Where analysis in real time is desirable, one can examine the interaction (e.g., binding) between an agent and a protein of the invention with Biomolecular Interaction Analysis [BIA; see, e.g., Sjolander and Urbaniczky Anal. Chem. 63:2338-2345, (1991) and Szabo et al., Curr. Opin. Struct. Biol. 5:699-705, (1995)]. BIA allows one to detect biospecific interactions in real time without labeling any of the interactants (e.g., BIAcore).

[0499] The screening assays can also be cell-free assays (i.e., soluble or membrane-bound forms of the proteins of the invention, including the variants, mutants, and other fragments described above, can be used to identify agents that bind those proteins or otherwise modulate their expression or activity). The basic protocol is the same as that for a cell-based assay in that, in either case, one must contact the protein of the invention with an agent of interest [for a sufficient time and under appropriate (e.g., physiological) conditions] to allow any potential interaction to occur and then determine whether the agent binds the protein or otherwise modulates its expression or activity.

[0500] Those of ordinary skill in the art will, however, appreciate that there are differences between cell-based and cell-free assays. For example, when membrane-bound forms of the protein are used, it may be desirable to utilize a solubilizing agent (e.g., non-ionic detergents such as n-octylglucoside, n-dodecylglucoside, n-dodecylmaltoside, octanoyl-N-methylglucamide, decanoyl-N-methylglucamide, Triton® X-100, Triton® X-114, Thesit®, Isotridecypoly(ethylene glycol ether)ₙ, 3-[(3-cholamidopropyl)dimethylamminio]-1-propane sulfonate (CHAPS), 3-[(3-cholamidopropyl)dimethylamminio]-2-hydroxy-1-propane sulfonate (CHAPSO), or N-dodecyl=N,N-dimethyl-3-ammonio-1-propane sulfonate).

[0501] In the assays of the invention, any of the proteins described herein or the agents being tested can be anchored to a solid phase or otherwise immobilized (assays in which one of two substances that interact with one another are anchored to a solid phase are sometimes referred to as “heterogeneous” assays). For example, a protein of the present invention can be anchored to a microtiter plate, a test tube, a microcentrifuge tube, a column, or the like before it is exposed to an agent. Any complex that forms on the solid phase is detected at the end of the period of exposure. For example, a protein of the present invention can be anchored to a solid surface, and the test compound (which is not anchored and can be labeled, directly or indirectly) is added to the surface bearing the anchored protein. Un-reacted (e.g., unbound) components can be removed (by, e.g., washing) under conditions that allow any complexes formed to remain immobilized on the solid surface, where they can be detected (e.g., by virtue of a label attached to the protein or the agent or with a labeled antibody that specifically binds an immobilized component and may, itself, be directly or indirectly labeled).

[0502] One can immobilize either a protein of the present invention or an antibody to which it specifically binds to facilitate separation of complexed (or bound) protein from uncomplexed (or unbound) protein. Such immobilization can also make it easier to automate the assay, and fusing the proteins of the invention to heterologous proteins can facilitate their immobilization. For example, proteins fused to glutathione-S-transferase can be adsorbed onto glutathione sepharose beads (Sigma Chemical Co., St. Louis, Mo.) or glutathione derivatized microtiter plates, then combined with the agent and incubated under conditions conducive to complex formation (e.g., conditions in which the salt and pH levels are within physiological levels). Following incubation, the solid phase is washed to remove any unbound components (where the solid phase includes beads, the matrix can be immobilized), the presence or absence of a complex is determined. Alternatively, complexes can be dissociated from a matrix, and the level of protein binding or activity can be determined using standard techniques.

[0503] Immobilization can be achieved with methods known in the art. For example, biotinylated protein can be prepared from biotin-NHS (N-hydroxy-succinimide) using techniques known in the art (e.g., the biotinylation kit from Pierce Chemicals, Rockford, Ill.) and immobilized in the wells of streptavidin-coated tissue culture plates (also from Pierce Chemical).

[0504] The screening assays of the invention can employ antibodies that react with the proteins of the invention but do not interfere with their activity. These antibodies can be derivatized to a solid surface, where they will trap a protein of the invention. Any interaction between a protein of the invention and an agent can then be detected using a second antibody that specifically binds the complex formed between the protein of the invention and the agent to which it is bound.

[0505] Cell-free assays can also be conducted in a liquid phase, in which case any reaction product can be separated (and thereby detected) by, for example: differential centrifugation (Rivas and Minton, Trends Biochem Sci 18:284-7, 1993); chromatography (e.g., gel filtration or ion-exchange chromatography); electrophoresis [see, e.g., Ausubel et al., Eds., Current Protocols in Molecular Biology, J. Wiley & Sons, New York, N.Y., (1999)]; or immunoprecipitation [see, e.g., Ausubel et al. (supra); see also Heegaard, J. Mol. Recognit. 11:141-148, (1998) and Hage and Tweed, J. Chromatogr. Biomed. Sci. Appl. 699:499-525, (1997)]. Fluorescence energy transfer (see above) can also be used, and is convenient because binding can be detected without purifying the complex from solution. Assays in which the entire reaction of interest is carried out in a liquid phase are sometimes referred to as homogeneous assays.

[0506] The screening methods of the invention can also be designed as competition assays in which an agent and a substance that is known to bind a protein of the present invention compete to bind that protein. Depending upon the order of addition of reaction components and the reaction conditions (e.g., whether the reaction is allowed to reach equilibrium), agents that inhibit complex formation can be distinguished from those that disrupt preformed complexes.

[0507] In either approach, the order in which reactants are added can be varied to obtain different information about the agents being tested. For example, agents that interfere with the interaction between a gene product and one or more of its binding partners (by, e.g., competing with the binding partner), can be identified by adding the binding partner and the agent to the reaction at about the same time. Agents that disrupt preformed complexes (by, e.g., displacing one of the components from the complex), can be added after a complex containing the gene product and its binding partner has formed.

[0508] The proteins of the invention can also be used as “bait proteins” in a two- or three-hybrid assay [see, e.g., U.S. Pat. No. 5,283,317; Zervos et al., Cell 72:223-232, (1993); Madura et al., J. Biol. Chem. 268:12046-12054, (1993); Bartel et al. Biotechniques 14:920-924, (1993); Iwabuchi et al., Oncogene 8:1693-1696, (1993); and WO 94/10300] to identify other proteins that bind to (e.g., specifically bind to) or otherwise interact with a protein of the invention. Such binding proteins can activate or inhibit the proteins of the invention (and thereby influence the biochemical pathways and events in which those proteins are active).

[0509] As noted above, the screening assays of the invention can be used to identify an agent that inhibits the expression of a protein of the invention by, for example, inhibiting the transcription or translation of a nucleic acid that encodes it. In these assays, one can contact a cell or cell free mixture with the agent and then evaluate mRNA or protein expression relative to the levels that are observed in the absence of the agent (a statistically significant increase in expression indicating that the agent stimulates mRNA or protein expression and a decrease (again, one that is statistically significant) indicating tat the agent inhibits mRNA or protein expression). Methods for determining levels of mRNA or protein expression are known in the art and, here, would employ the nucleic acids, proteins, and antibodies of the present invention.

[0510] It should be noted that if desired, two or more of the methods described herein can be practiced together. For example, one can evaluate an agent that was first identified in a cell-based assay in a cell free assay. Similarly, and the ability of the agent to modulate the activity of a protein of the invention can be confirmed in vivo (e.g., in a transgenic animal).

[0511] The screening methods of the present invention can also be used to identify proteins (in the event transcripts of the present invention encode proteins) that are associated (e.g., causally) with drug resistance. One can then block the activity of these proteins (with, e.g., an antibody of the invention) and thereby improve the ability of a therapeutic agent to exert a desirable effect on a cell or tissue in a subject (e.g., a human patient).

[0512] Monitoring the influence of therapeutic agents (e.g., drugs) or other events (e.g., radiation therapy) on the expression or activity of a biomolecular sequence of the present invention can be useful in clinical trials (a desired extension of the screening assays described above). For example, agents that exert an effect by, in part, altering the expression or activity of a protein of the invention ex vivo can be tested for their ability to do so as the treatment progresses in a subject. Moreover, in animal or clinical trials, the expression or activity of a nucleic acid can be used, optionally in conjunction with that of other genes, as a “read out” or marker of the phenotype of a particular cell.

### Detection Assays

[0513] The nucleic acid sequences of the invention can serve as polynucleotide reagents that are useful in detecting a specific nucleic acid sequence. For example, one can use the nucleic acid sequences of the present invention to map the corresponding genes on a chromosome (and thereby discover which proteins of the invention are associated with genetic disease) or to identify an individual from a biological sample (i.e., to carry out tissue typing, which is useful in criminal investigations and forensic science). The novel transcripts of the present invention can be used to identify those tissues or cells affected by a disease (e.g., the nucleic acids of the invention can be used as markers to identify cells, tissues, and specific pathologies, such as cancer), and to identify individuals who may have or be at risk for a particular cancer. Specific methods of detection are described herein and are known to those of ordinary skill in the art.

[0514] The nucleic acids of the present invention can be used to determine whether a particular individual is the source of a biological sample (e.g., a blood sample). This is presently achieved by examining restriction fragment length polymorphisms (RFLPs; U.S. Pat. No. 5,272,057), and the sequences disclosed here are useful as additional DNA markers for RFLP. For example, one can digest a sample of an individual's genomic DNA, separate the fragments (e.g. by Southern blotting), and expose the fragments to probes generated from the nucleic acids of the present invention (methods employing restriction endonucleases are discussed further below). If the pattern of binding matches that obtained from a tissue of an unknown source, then the individual is the source of the tissue.

[0515] The nucleic acids of the present invention can also be used to determine the sequence of selected portions of an individual's genome. For example, the sequences that represent new genes can be used to prepare primers that can be used to amplify an individual's DNA and subsequently sequence it. Panels of DNA sequences (each amplified with a different set of primers) can uniquely identify individuals (as every person will have unique sequences due to allelic differences).

[0516] Allelic variation occurs to some degree in the coding regions of these sequences, and to a greater degree in the noncoding regions. Each of the sequences described herein can, to some degree, be used as a standard against which DNA from an individual can be compared for identification purposes. Because greater numbers of polymorphisms occur in the noncoding regions, fewer sequences are necessary to differentiate individuals. The noncoding sequences disclosed herein can provide positive individual identification with a panel of perhaps 10 to 1,000 primers which each yield a noncoding amplified sequence of 100 bases. If predicted coding sequences are used, a more appropriate number of primers for positive individual identification would be 500-2,000.

[0517] If a panel of reagents from the nucleic acids described herein is used to generate a unique identification database for an individual, those same reagents can later be used to identify tissue from that individual. Using the database, the individual, whether still living or dead, can subsequently be linked to even very small tissue samples.

[0518] DNA-based identification techniques, including those in which small samples of DNA are amplified (e.g, by PCR) can also be used in forensic biology. Sequences amplified from tissues (such as hair or skin) or body fluids (such as blood, saliva, or semen) found at a crime scene can be compared to a standard (e.g., sequences obtained and amplified from a suspect), thereby allowing one to determine whether the suspect is the source of the tissue or bodily fluid.

[0519] The nucleic acids of the invention, when used as probes or primers, can target specific loci in the human genome. This will improve the reliability of DNA-based forensic identifications because the more identifying markers examined, the less likely it is that one individual will be mistaken for another. Moreover, tests that rely on obtaining actual genomic sequence (which is possible here) are more accurate than those in which identification is based on the patterns formed by restriction enzyme generated fragments.

[0520] The nucleic acids of the invention can also be used to study the expression of the mRNAs in histological sections (i.e., they can be used in in situ hybridization). This approach can be useful when forensic pathologists are presented with tissues of unknown origin or when the purity of a population of cells (e.g., a cell line) is in question. The nucleic acids can also be used in diagnosing a particular condition and in monitoring a treatment regime.

### Predictive Medicine

[0521] The nucleic acids, proteins, antibodies, and cells described hereinabove are generally useful in the field of predictive medicine and, more specifically, are useful in diagnostic and prognostic assays and in monitoring clinical trials. For example, one can determine whether a subject is at risk of developing a disorder associated with a lesion in, or the misexpression of, a nucleic acid of the invention (e.g., a cancer such as pancreatic cancer, breast cancer, or a cancer within the urinary system). In addition, the nucleic acids expressed in tumor tissues and not in normal tissues are markers that can be used to determine whether a subject has or is likely to develop a particular type of cancer.

[0522] The “subject” referred to in the context of any of the methods of the present invention, is a vertebrate animal (e.g., a mammal such as an animal commonly used in experimental studies (e.g. rats, mice, rabbits and guinea pigs); a domesticated animal (e.g., a dog or cat); an animal kept as livestock (e.g., a pig, cow, sheep, goat, or horse); a non-human primate (e.g. an ape, monkey, or chimpanzee); a human primate; an avian (e.g., a chicken); an amphibian (e.g., a frog); or a reptile. The animal can be an unborn animal (accordingly, the methods of the invention can be used to carry out genetic screening or to make prenatal diagnoses). The subject can also be a human.

[0523] The methods related to predictive medicine can also be carried out by using a nucleic acid of the invention to, for example detect, in a tissue of a subject: (i) the presence or absence of a mutation that affects the expression of the corresponding gene (e.g., a mutation in the 5′ regulatory region of the gene); (ii) the presence or absence of a mutation that alters the structure of the corresponding gene; (iii) an altered level (i.e., a non-wild type level) of mRNA of the corresponding gene (the proteins of the invention can be similarly used to detect an altered level of protein expression); (iv) a deletion or addition of one or more nucleotides from the nucleic acid sequences of the present invention; (v) a substitution of one or more nucleotides in the nucleic acid sequences of the present invention (e.g., a point mutation); (vi) a gross chromosomal rearrangement (e.g., a translocation, inversion, or deletion); or (vii) aberrant modification of a gene corresponding to the nucleic acid sequences of the present invention (e.g., modification of the methylation pattern of the genomic DNA). Similarly, one can test for inappropriate post-translational modification of any protein encoded. Abnormal expression or abnormal gene or protein structures indicate that the subject is at risk for the associated disorder.

[0524] A genetic lesion can be detected by, for example, providing an oligonucleotide probe or primer having a sequence that hybridizes to a sense or antisense strand of a nucleic acid sequence of the present invention, a naturally occurring mutant thereof, or the 5′ or 3′ sequences that are naturally associated with the corresponding gene, and exposing the probe or primer to a nucleic acid within a tissue of interest (e.g., a tumor). One can detect hybridization between the probe or primer and the nucleic acid of the tissue by standard methods (e.g., in situ hybridization) and thereby detect the presence or absence of the genetic lesion. Where the probe or primer specifically hybridizes with a new splice variant, the probe or primer can be used to detect a non-wild type splicing pattern of the mRNA. The antibodies of the invention can be similarly used to detect the presence or absence of a protein encoded by a mutant, mis-expressed, or otherwise deficient gene. Diagnostic and prognostic assays are described further below.

[0525] Qualitative or quantitative analyses (which reveal the presence or absence of a substance or its level of expression or activity, respectively) can be carried out for any one of the nucleic acid sequences of the present invention, or (where the nucleic acid encodes a protein) the proteins they encode, by obtaining a biological sample from a subject and contacting the sample with an agent capable of specifically binding a nucleic acid represented by the nucleic acid sequences of the present invention or a protein those nucleic acids encode. The conditions in which contacting is performed should allow for specific binding. Suitable conditions are known to those of ordinary skill in the art. The biological sample can be a tissue, a cell, or a bodily fluid (e.g., blood or serum), which may or may not be extracted from the subject (i.e., expression can be monitored in vivo).

[0526] More specifically, the expression of a nucleic acid sequence can be examined by, for example, Southern or Northern analyses, polymerase chain reaction analyses, or with probe arrays. For example, one can diagnose a condition associated with expression or mis-expression of a gene by isolating mRNA from a cell and contacting the mRNA with a nucleic acid probe with which it can hybridize under stringent conditions (the characteristics of useful probes are known to those of ordinary skill in the art and are discussed elsewhere herein). The mRNA can be immobilized on a surface (e.g., a membrane, such as nitrocellulose or other commercially available membrane) following gel electrophoresis.

[0527] Alternatively, one or more nucleic acids (the target sequence or the probe) can be distributed on a two-dimensional array (e.g., a gene chip). Arrays are useful in detecting mutations because a probe positioned on the array can have one or more mismatches to a nucleic acid of the invention (e.g., a destabilizing mismatch). For example, genetic mutations in any of nucleic acid sequences of the present invention can be identified in two-dimensional arrays containing light-generated DNA probes [Cronin et al., Human Mutation 7:244-255, (1996)]. Briefly, when a light-generated DNA probe is used, a first array of probes is used to scan through long stretches of DNA in a sample and a control to identify base changes between the sequences by making linear arrays of sequential overlapping probes. This step allows the identification of point mutations, and it can be followed by use of a second array that allows the characterization of specific mutations by using smaller, specialized probe arrays complementary to all variants or mutations detected. Each mutation array is composed of parallel probe sets, one complementary to the wild-type gene and the other complementary to the mutant gene. Arrays are discussed further below; see also; Kozal et al. [Nature Medicine 2:753-759, (1996)].

[0528] The level of an mRNA in a sample can also be evaluated with a nucleic acid amplification technique e.g., RT-PCR (U.S. Pat. No. 4,683,202), ligase chain reaction [LCR; Barany, Proc. Natl. Acad. Sci. USA 88:189-193, (1991)]; LCR can be particularly useful for detecting point mutations), self sustained sequence replication [Guatelli et al., Proc. Natl. Acad. Sci. USA 87:1874-1878, (1990)], transcriptional amplification system [Kwoh et al., Proc. Natl. Acad. Sci. USA 86:1173-1177, (1989)], Q-Beta Replicase [Lizardi et al., Bio/Technology 6:1197, (1988)], or rolling circle replication (U.S. Pat. No. 5,854,033). Following amplification, the nucleic acid can be detected using techniques known in the art. Amplification primers are a pair of nucleic acids that anneal to 5′ or 3′ regions of a gene (plus and minus strands, respectively, or vice-versa) at some distance (possibly a short distance) from one another. For example, each primer can consist of about 10 to 30 nucleotides and bind to sequences that are about 50 to 200 nucleotides apart. Serial analysis of gene expression can be used to detect transcript levels (U.S. Pat. No. 5,695,937). Other useful amplification techniques (useful in, for example, detecting an alteration in a gene) include anchor PCR or RACE PCR.

[0529] Mutations in the gene sequences of the invention can also be identified by examining alterations in restriction enzyme cleavage patterns. For example, one can isolate DNA from a sample cell or tissue and a control, amplify it (if necessary), digest it with one or more restriction endonucleases, and determine the length(s) of the fragment(s) produced (e.g., by gel electrophoresis). If the size of the fragment obtained from the sample is different from the size of the fragment obtained from the control, there is a mutation in the DNA in the sample tissue. Sequence specific ribozymes (see, for example, U.S. Pat. No. 5,498,531) can be used to detect specific mutations by development or loss of a ribozyme cleavage site.

[0530] Any sequencing reaction known in the art (including those that are automated) can also be used to determine whether there is a mutation, and, if so, how the mutant differs from the wild type sequence. Mutations can also be identified by using cleavage agents to detect mismatched bases in RNA/RNA or RNA/DNA duplexes [Myers et al., Science 230:1242, (1985); Cotton et al., Proc. Natl. Acad. Sci. USA 85:4397, (1988); Saleeba et al., Methods Enzymol. 217:286-295, (1992)]. Mismatch cleavage reactions employ one or more proteins that recognize mismatched base pairs in double-stranded DNA (so called “DNA mismatch repair” enzymes; e.g., the mutY enzyme of E. coli cleaves A at G/A mismatches and the thymidine DNA glycosylase from HeLa cells cleaves T at G/T mismatches [see Hsu et al., Carcinogenesis 15:1657-1662, (1994) and U.S. Pat. No. 5,459,039].

[0531] Alterations in electrophoretic mobility can also be used to identify mutations. For example, single strand conformation polymorphism (SSCP) can be used to detect differences in electrophoretic mobility between mutant and wild type nucleic acids [Orita et al., Proc. Natl. Acad. Sci. USA 86:2766, (1989); see also Cotton Mutat. Res. 285:125-144, (1993); and Hayashi, Genet. Anal. Tech. Appl. 9:73-79, (1992)]. Single-stranded DNA fragments of sample and control nucleic acids are denatured and allowed to renature. The secondary structure of single-stranded nucleic acids varies according to sequence, and the resulting alteration in electrophoretic mobility enables the detection of even a single base change. The sensitivity of the assay is enhanced when RNA (rather than DNA) is used because RNA's secondary structure is more sensitive to a change in sequence. See also Keen et al., Trends Genet. 7:5, (1991). The movement of mutant or wild-type fragments through gels containing a gradient of denaturant is also informative.

[0532] When denaturing gradient gel electrophoresis [DGGE; Myers et al., Nature 313:495, (1985)] is used, DNA can be modified so it will not completely denature (this can be done by, for example by adding a GC clamp of approximately 40 bp of high-melting GC-rich DNA by PCR). A temperature gradient can be used in place of a denaturing gradient to identify differences in the mobility of control and sample DNA [Rosenbaum and Reissner, Biophys. Chem. 265:12753, (1987)].

[0533] Point mutations can also be detected by selective oligonucleotide hybridization, selective amplification, or selective primer extension [Point et al., Nature 324:163, (1986); Saiki et al., Proc. Natl. Acad. Sci. USA 86:6230, (1989)] or by chemical ligation of oligonucleotides as described in Xu et al., Nature Biotechnol. 19:148, (2001). Allele specific amplification technology can also be used [see, e.g., Gibbs et al., Nucleic Acids Res. 17:2437-2448, (1989); Prossner, Tibtech. 11:238, (1993); and Barany, Proc. Natl. Acad. Sci. USA 88:189, (1991)].

[0534] When analysis of a gene or protein is carried out in a cell or tissue sample, the cell or tissue can be immobilized on a support, typically a glass slide, and then contacted with a probe that can hybridize to the nucleic acid or protein of interest.

[0535] The detection methods of the invention can be carried out with appropriate controls (e.g., analyses can be conducted in parallel with a sample known to contain the target sequence and a target known to lack it).

[0536] Various approaches can be used to determine protein expression or activity. For example, one can evaluate the amount of protein in a sample by exposing the sample to an antibody that specifically binds the protein of interest. The antibodies described above (e.g., monoclonal antibodies, detectably labeled antibodies, intact antibodies and fragments thereof) can be used. The methods can be carried out in-vitro (e.g., one can perform an enzyme linked immunosorbent assay (ELISA), an immunoprecipitation, an immunofluorescence analysis, an enzyme immunoassay (EIA), a radioimmunoassay (RIA), or a Western blot analysis) or in vivo (e.g., one can introduce a labelled antibody that specifically binds to a protein of the present invention into a subject and then detect it by a standard imaging technique). Alternatively, the sample can be labeled and then contacted with an antibody. For example, one can biotinylate the sample, contact it with an antibody (e.g., an antibody positioned on an antibody array) and then detect the bound sample (e.g., with avidin coupled to a fluorescent label). As with methods to detect nucleic acids, appropriate control studies can be performed in parallel with those designed to detect protein expression.

[0537] The diagnostic molecules disclosed herein can be assembled as kits. Accordingly, the invention features kits for detecting the presence of the biomolecular sequences of the present invention in a biological sample. The kit can include a probe (e.g., a nucleic acid sequence or an antibody), a standard and, optionally, instructions for use. More specifically, antibody-based kits can include a first antibody (e.g., in solution or attached to a solid support) that specifically binds a protein of the present invention and, optionally, a second, different antibody that specifically binds to the first antibody and is conjugated to a detectable agent. Oligonucleotide-based kits can include an oligonucleotide (e.g., a labeled oligonucleotide) that hybridizes with one of the nucleic acids of the present invention under stringent conditions or a pair of oligonucleotides that can be used to amplify a nucleic acid sequence of the present invention. The kits can also include a buffering agent, a preservative, a protein-stabilizing agent, or a component necessary for detecting any included label (e.g., an enzyme or substrate). The kits can also contain a control sample or a series of control samples that can be assayed and compared to the test sample contained. Each component of the kit can be enclosed within an individual container, and all of the various containers can be within a single package.

[0538] The detection methods described herein can identify a subject who has, or is at risk of developing, a disease, disorder, condition, or syndrome (the term “disease” is used to encompass all deviations from a normal state) associated with aberrant or unwanted expression or activity of a biomolecular sequence of the present invention. The detection methods also have prognostic value (e.g., they can be used to determine whether or not it is likely that a subject will respond positively (i.e., be effectively treated with) to an agent (e.g., a nucleic acid, protein, small molecule or other drug)). Samples can also be obtained from a subject during the course of treatment to monitor the treatment's efficacy at a cellular level.

[0539] The present invention also features methods of evaluating a sample by creating a gene expression profile for the sample that includes the level of expression of one or more of biomolecular sequences of the present invention. The sample's profile can be compared with that of a reference profile, either of which can be obtained by the methods described herein (e.g., by obtaining a nucleic acid from the sample and contacting the nucleic acid with those on an array). As with other detection methods, profile-based assays can be performed prior to the onset of symptoms (in which case they can be diagnostic), prior to treatment (in which case they can be predictive) or during the course of treatment (in which case they serve as monitors) [see, e.g., Golub et al., Science 286:531, (1999)].

[0540] As described hereinabove, the screening methods of the invention can be used to identify candidate therapeutic agents, and those agents can be evaluated further by examining their ability to alter the expression of one or more of the proteins of the invention. For example, one can obtain a cell from a subject, contact the cell with the agent, and subsequently examine the cell's expression profile with respect to a reference profile (which can be, for example, the profile of a normal cell or that of a cell in a physiologically acceptable condition). The agent is evaluated favorably if the expression profile in the subject's cell is, following exposure to the agent, more similar to that of a normal cell or a cell in a physiologically acceptable condition. A control assay can be performed with, for example, a cell that is not exposed to the agent.

[0541] Expression profiles (obtained by evaluating either nucleic acid or protein expression) are also useful in evaluating subjects. One can obtain a sample from a subject (either directly or indirectly from a caregiver), create an expression profile, and, optionally, compare the subject's expression profile to one or more reference profiles and/or select a reference profile most similar to that of the subject. A variety of routine statistical measures can be used to compare two reference profiles. One possible metric is the length of the distance vector that is the difference between the two profiles. Each of the subject and reference profile is represented as a multi-dimensional vector, wherein each dimension is a value in the profile.

[0542] The result, which can be communicated to the subject, a caregiver, or another interested party, can be the subject's expression profile per se, a result of a comparison of the subject's expression profile with another profile, a most similar reference profile, or a descriptor of any of these. Communication can be mediated by a computer network (e.g., in the form of a computer transmission such as a computer data signal embedded in a carrier wave).

[0543] Accordingly, the invention also features a computer medium having executable code for effecting the following steps: receive a subject expression profile; access a database of reference expression profiles; and either i) select a matching reference profile most similar to the subject expression profile, or ii) determine at least one comparison score for the similarity of the subject expression profile to at least one reference profile. The subject expression profile and the reference expression profile each include a value representing the level of expression of one or more of the biomolecular sequences of the present invention.

### Arrays and Uses Thereof

[0544] The present invention also encompasses arrays that include a substrate having a plurality of addresses, at least one of which includes a capture probe that specifically binds or hybridizes to a nucleic acid represented by any one of the biomolecular sequences of the present invention. The array can have a density of at least 10, 50, 100, 200, 500, 1,000, 2,000, or 10,000 or more addresses/cm², or densities between these. In some embodiments, the plurality of addresses includes at least 10, 100, 500, 1,000, 5,000, 10,000, or 50,000 addresses, while in other embodiments, the plurality of addresses can be equal to, or less than, those numbers.

[0545] Regardless of whether the array contains nucleic acids (as probes or targets) or proteins (as probes or targets), the substrate can be two-dimensional (formed, e.g., by a glass slide, a wafer (e.g., silica or plastic), or a mass spectroscopy plate) or three-dimensional (formed, e.g., by a gel or pad). Addresses in addition to the addresses of the plurality can be disposed on the array.

[0546] At least one address of the plurality can include a nucleic acid capture probe that hybridizes specifically to one or more of the nucleic acid sequences of the present invention. In certain embodiments, a subset of addresses of the plurality will be occupied by a nucleic acid capture probe for one of the nucleic acid sequences of the present invention; each address in the subset can bear a capture probe that hybridizes to a different region of a selected nucleic acid. In other embodiments, the probe at each address is unique, overlapping, and complementary to a different variant of a selected nucleic acid (e.g., an allelic variant, or all possible hypothetical variants). If desired, the array can be used to sequence the selected nucleic acid by hybridization (see, e.g., U.S. Pat. No. 5,695,940). Alternatively, the capture probe can be a protein that specifically binds to a protein of the present invention or a fragment thereof (e.g., a naturally-occurring interaction partners of a protein of the invention or an antibody described herein). In some instances (e.g., in the event of an autoimmune disease), it is significant that a subject produces antibodies, and the arrays described herein can be used to detect those antibodies. More generally, an array that contains some or all of the proteins of the present invention can be used to detect any substance to which one or more those proteins bind (e.g., a natural binding partner, an antibody, or a synthetic molecule).

[0547] An array can be generated by methods known to those of ordinary skill in the art. For example, an array can be generated by photolithographic methods (see, e.g., U.S. Pat. Nos. 5,143,854; 5,510,270; and 5,527,681), mechanical methods (e.g., directed-flow methods as described in U.S. Pat. No. 5,384,261), pin-based methods (e.g., as described in U.S. Pat. No. 5,288,514), and bead-based techniques (e.g., as described in PCT US/93/04145). Methods of producing protein-based arrays are described in, for example, De Wildt et al. [Nature Biotech. 18:89-994, (2000)], Lueking et al. [Anal. Biochem. 270:103-111, (1999)], Ge [Nucleic Acids Res. 28:e3, (2000)], MacBeath and Schreiber [Science 289:1760-1763, (2000)], and WO 99/51773A1. Addresses in addition to the address of the plurality can be disposed on the array.

[0548] The arrays described above can be used to analyze the expression of any of the biomolecular sequences of the present invention. For example, one can contact an array with a sample and detect binding between a component of the sample and a component of the array. In the event nucleic acids are analyzed, one can amplify the nucleic acids obtained from a sample prior to their application to the array. The array can also be used to examine tissue-specific gene expression. For example, the nucleic acids or proteins of the invention (all or a subset thereof) can be distributed on an array that is then exposed to nucleic acids or proteins obtained from a particular tissue, tumor, or cell type. If a sufficient number of diverse samples are analyzed, clustering (e.g., hierarchical clustering, k-means clustering, Bayesian clustering and the like) can be used to identify other genes that are co-regulated with those of the invention. The array can be used not only to determine tissue specific expression, but also to ascertain the level of expression of a battery of genes.

[0549] Array analysis of the nucleic acids or proteins of the invention can be used to study the effect of cell-cell interactions or therapeutic agents on the expression of those nucleic acids or proteins. For example, nucleic acid or protein that has been obtained from a cell that has been placed in the vicinity of a tissue that has been perturbed in some way can be obtained and exposed to the probes of an array. Thus, one can use the methods of the invention to determine the effect of one cell type on another (i.e., the response (e.g., a change in the type or quantity of nucleic acids or proteins expressed) to a biological stimulus can be determined). Similarly, nucleic acid or protein that has been obtained from a cell that has been treated with an agent can be obtained and exposed to the probes of an array. In this scenario, one can determine how the therapeutic agent affects the expression of any of the biomolecular sequences of the present invention. Appropriate controls (e.g., assays using cells that have not received a biological stimulus or a potentially therapeutic treatment) can be performed in parallel. Moreover, desirable and undesirable responses can be detected. If an event (e.g., exposure to a biological stimulus or therapeutic compound) has an undesirable effect on a cell, one can either avoid the event (by, e.g., prescribing an alternative therapy) or take steps to counteract or neutralize it.

[0550] In more straightforward assays, the arrays described here can be used to monitor the expression of one or more of the biomolecular sequences of the present invention, with respect to time. Such analyses allow one to characterize a disease process associated with the examined sequence.

[0551] The arrays are also useful for ascertaining the effect of the expression of a gene on the expression of other genes in the same cell or in different cells (e.g., ascertaining the effect of the expression of any one of the biomolecular sequences of the present invention on the expression of other genes). If altering the expression of one gene has a deleterious effect on the cell (due to its effect on the expression of other genes) one can, again, avoid that effect (by, e.g., selecting an alternate molecular target or counteracting or neutralizing the effect).

### Markers

[0552] The molecules of the present invention are also useful as markers of: (i) a cell or tissue type; (ii) disease; (iii) a pre-disease state; (iv) drug activity, and (v) predisposition for disease.

[0553] Using the methods described herein, the presence or amount of the biomolecular sequences of the present invention, can be detected and correlated with one or more biological states (e.g., a disease state or a developmental state). When used in this way, the compositions of the invention serve as surrogate markers; they provide an objective indicia of the presence or extent of a disease (e.g., cancer). Surrogate markers are particularly useful when a disease is difficult to assess with standard methods (e.g., when a subject has a small tumor or when pre-cancerous cells are present). It follows that surrogate markers can be used to assess a disease before a potentially dangerous clinical endpoint is reached. Other examples of surrogate markers are known in the art (see, e.g., Koomen et al., J. Mass Spectrom. 35:258-264, 2000, and James, AIDS Treatment News Archive 209, 1994).

[0554] The biomolecular sequences of the present invention, can also serve as pharmacodynamic markers, which provide an indicia of a therapeutic result. As pharmacodynamic markers are not directly related to the disease for which the drug is being administered, their presence (or levels of expression) indicates the presence or activity of a drug in a subject (i.e., the pharmacodynamic marker may indicate the concentration of a drug in a biological tissue, as the gene or protein serving as the marker is either expressed or transcribed (or not) in the body in relationship to the level or activity of the drug). One can also monitor the distribution of a drug with a pharmacodynamic marker (e.g., these markers can be used to determine whether a drug is taken up by a particular cell type). The presence or amount of pharmacodynamic markers can be related to the drug per se or to a metabolite produced from the drug. Thus, these markers can indicate the rate at which a drug is broken down in vivo. Pharmacodynamic markers can be particularly sensitive (e.g., even a small amount of a drug may activate substantial transcription or translation of a marker), and they are therefore useful in assessing drugs that are administered at low doses. Examples regarding the use of pharmacodynamic markers are known in the art and include: U.S. Pat. No. 6,033,862; Hattis et al. Env. Health Perspect. 90:229-238, (1991); Schentag, Am. J. Health-Syst. Pharm. 56 Suppl. 3:S21-S24, (1999); and Nicolau, Am. J. Health-Syst. Pharm. 56 Suppl. 3: S16-S20, (1991).

[0555] The biomolecular sequences of the present invention, are also useful as pharmacogenomic markers, which can provide an objective correlate to a specific clinical drug response or susceptibility in a particular subject or class of subjects [see, e.g., McLeod et al., Eur. J. Cancer 35:1650-1652, (1999)]. The presence or amount of the pharmacogenomic marker is related to the predicted response of a subject to a specific drug (or type of drug) prior to administration of the drug. By assessing one or more pharmacogenomic markers in a subject, the drug therapy that is most appropriate for the subject, or which is predicted to have a greater likelihood of success, can be selected. For example, based on the presence or amount of RNA or protein associated with a specific tumor marker in a subject, an optimal drug or treatment regime can be prescribed for the subject.

[0556] More generally, pharmacogenomics addresses the relationship between an individual's genotype and that individual's response to a foreign compound or drug. Differences in the way individual subjects metabolize therapeutics can lead to severe toxicity or therapeutic failure because metabolism alters the relation between dose and blood concentration of the pharmacologically active drug. Thus, a physician would consider the results of pharmacogenomic studies when determining whether to administer a composition of the present invention and how to tailor a therapeutic regimen for the subject.

[0557] Pharmacogenomics deals with clinically significant hereditary variations in the response to drugs due to altered drug disposition and abnormal action in affected persons. See, e.g., Eichelbaum et al., Clin. Exp. Pharmacol. Physiol. 23:983-985, (1996), and Linder et al., Clin. Chem. 43:254-266, (1997). In general, two types of pharmacogenetic conditions can be differentiated. Genetic conditions transmitted as a single factor can: (i) alter the way drugs act on the body (altered drug action) or (ii) the way the body acts on drugs (altered drug metabolism). These pharmacogenetic conditions can occur either as rare genetic defects or as naturally-occurring polymorphisms.

[0558] One approach that can be used to identify genes that predict drug response, known as “a genome-wide association,” relies primarily on a high-resolution map of the human genome consisting of already known gene-related markers (e.g., a “bi-allelic” gene marker map that consists of 60,000-100,000 polymorphic or variable sites on the human genome, each of which has two variants.) Such a high-resolution genetic map can be compared to a map of the genome of each of a statistically significant number of patients taking part in a Phase II/III drug trial to identify markers associated with a particular observed drug response or side effect. Alternatively, a high resolution map can be generated from a combination of some ten-million known single nucleotide polymorphisms (SNPs; a common alteration that occurs in a single nucleotide base in a stretch of DNA) in the human genome. For example, a SNP may occur once per every 1000 bases of DNA. While a SNP may be involved in a disease process, the vast majority may not be disease-associated. Given a genetic map based on the occurrence of such SNPs, individuals can be grouped into genetic categories depending on a particular pattern of SNPs in their individual genome. In such a manner, treatment regimens can be tailored to groups of genetically similar individuals, taking into account traits that may be common among such genetically similar individuals.

[0559] Two alternative methods, the “candidate gene approach” and “gene expression profiling,” can be used to identify pharmacogenomic markers. According to the first method, if a gene that encodes a drug's target is known, all common variants of that gene can be fairly easily identified in the population, and one can determine whether having one version of the gene versus another is associated with a particular drug response. In the second approach, the gene expression of an animal dosed with a drug (e.g., a composition of the invention) can reveal whether gene pathways related to toxicity have been activated.

[0560] Information generated using one or more of the approaches described above can be used in designing therapeutic or prophylactic treatments that are less likely to fail or to produce adverse side effects when a subject is treated with a therapeutic composition.

### Informatics

[0561] The biomolecular sequences of the present invention can be provided in a variety of media to facilitate their use. For example, one or more of the sequences (e.g., subsets of the sequences expressed in a defined tissue type) can be provided as a manufacture (e.g., a computer-readable storage medium such as a magnetic, optical, optico-magnetic, chemical or mechanical information storage device). The manufacture can provide a nucleic acid or amino acid sequence in a form that will allow examination of the manufacture in ways that are not applicable to a sequence that exists in nature or in purified form. The sequence information can include full-length sequences, fragments thereof, polymorphic sequences including single nucleotide polymorphisms (SNPs), epitope sequence, and the like.

[0562] The computer readable storage medium further includes sequence annotations (as described in Example 10 of the Examples section).

[0563] The computer readable storage medium can further include information pertaining to generation of the data and/or potential uses thereof.

[0564] As used herein, a “computer-readable medium” refers to any medium that can be read and accessed directly by a machine [e.g., a digital or analog computer; e.g., a desktop PC, laptop, mainframe, server (e.g., a web server, network server, or server farm), a handheld digital assistant, pager, mobile telephone, or the like]. Computer-readable media include: magnetic storage media, such as floppy discs, hard disc storage medium, and magnetic tape; optical storage media such as CD-ROM; electrical storage media such as RAM, ROM, EPROM, EEPROM, flash memory, and the like; and hybrids of these categories such as magnetic/optical storage media.

[0565] A variety of data storage structures are available to those of ordinary skill in the art and can be used to create a computer-readable medium that has recorded one or more (or all) of the nucleic acids and/or amino acid sequences of the present invention. The data storage structure will generally depend on the means chosen to access the stored information. In addition, a variety of data processor programs and formats can be used to store the sequence information of the present invention on machine or computer-readable medium. The sequence information can be represented in a word processing text file, formatted in commercially-available software such as WordPerfect and Microsoft Word, or represented in the form of an ASCII file, stored in a database application, such as DB2, Sybase, Oracle, or the like. One of ordinary skill in the art can readily adapt any number of data processor structuring formats (e.g., text file or database) to obtain machine or computer-readable medium having recorded thereon the sequence information of the present invention.

[0566] The sequence information and annotations are stored in a relational database (such as Sybase or Oracle) that can have a first table for storing sequence (nucleic acid and/or amino acid sequence) information. The sequence information can be stored in one field (e.g., a first column) of a table row and an identifier for the sequence can be stored in another field (e.g., a second column) of the table row. The database can have a second table (to, for example, store annotations). The second table can have a field for the sequence identifier, a field for a descriptor or annotation text (e.g., the descriptor can refer to a functionality of the sequence), a field for the initial position in the sequence to which the annotation refers, and a field for the ultimate position in the sequence to which the annotation refers. Examples for annotation to nucleic acid sequences and amino acid sequences are provided in Examples 10 and 14-20 of the Examples section.

### Pharmaceutical Compositions

[0567] The nucleic acids, fragments thereof, hybrid sequences of which they are a part, and gene constructs containing them; proteins, fragments thereof, chimeras, and antibodies that specifically bind thereto; and cells, including those that are engineered to express the nucleic acids or proteins of the invention) can be incorporated into pharmaceutical compositions. These compositions typically also include a solvent, a dispersion medium, a coating, an antimicrobial (e.g., an antibacterial or antifungal) agent, an absorption delaying agent (when desired, such as aluminum monostearate and gelatin), or the like, compatible with pharmaceutical administration (see below). Active compounds, in addition to those of the present invention, can also be included in the composition and may enhance or supplement the activity of the present agents.

[0568] The composition will be formulated in accordance with their intended route of administration. Acceptable routes include oral or parenteral routes (e.g., intravenous, intradermal, transdermal (e.g., subcutaneous or topical), or transmucosal (i.e., across a membrane that lines the respiratory or anogenital tract). The compositions can be formulated as a solution or suspension and, thus, can include a sterile diluent (e.g., water, saline solution, a fixed oil, polyethylene glycol, glycerine, propylene glycol or another synthetic solvent); an antimicrobial agent (e.g., benzyl alcohol or methyl parabens; chlorobutanol, phenol, ascorbic acid, thimerosal, and the like); an antioxidant (e.g., ascorbic acid or sodium bisulfite); a chelating agent (e.g., ethylenediaminetetraacetic acid); or a buffer (e.g., an acetate-, citrate-, or phosphate-based buffer). When necessary, the pH of the solution or suspension can be adjusted with an acid (e.g., hydrochloric acid) or a base (e.g., sodium hydroxide). Proper fluidity (which can ease passage through a needle) can be maintained by a coating such as lecithin, by maintaining the required particle size (in the case of a dispersion), or by the use of surfactants.

[0569] The compositions of the invention can be prepared as sterile powders (by, e.g., vacuum drying or freeze-drying), which can contain the active ingredient plus any additional desired ingredient from a previously sterile-filtered solution.

[0570] Oral compositions generally include an inert diluent or an edible carrier. For example, the active compound can be incorporated with excipients and used in the form of tablets, troches, or capsules (e.g., gelatin capsules). Oral compositions can be prepared using fluid carries and used as mouthwashes. The tablets etc. can also contain a binder (e.g., microcrystalline cellulose, gum tragacanth, or gelatin); an excipient (e.g., starch or lactose), a disintegrating agent (e.g., alginic acid, Primogel, or corn starch); a lubricant (e.g., magnesium stearate or Sterotes); a glidant (e.g., colloidal silicon dioxide); a sweetening agent (e.g., sucrose or saccharine); or a flavoring agent (e.g., peppermint, methyl salicylate, or orange flavoring.

[0571] For administration by way of the respiratory system, the compositions can be formulated as aerosol sprays (e.g., from a pressured container or dispenser that contains a suitable propellant (e.g., a gas such as carbon dioxide), or a nebulizer. The ability of a composition to cross a biological barrier can be enhanced by agents known in the art. For example, detergents, bile salts, and fusidic acid derivatives can facilitate transport across the mucosa (and therefore, be included in nasal sprays or suppositories).

[0572] For topical administration, the active compounds are formulated into ointments, salves, gels, or creams according to methods known in the art.

[0573] Controlled release can also be achieved by using implants and microencapsulated delivery systems (see, e.g., the materials commercially available from Alza Corporation and Nova Pharmaceuticals, Inc.; see also U.S. Pat. No. 4,522,811 for the use of liposome-based suspensions).

[0574] The pharmaceutical compositions of the invention can be formulated in dosage units (i.e., physically discrete units containing a predetermined quantity of the active compound) for uniformity and ease of administration.

[0575] The toxicity and therapeutic efficacy of any given compound can be determined by standard pharmaceutical procedures carried out in cell culture or in experimental animals. For example, one of ordinary skill in the art can routinely determine the LD50 (the dose lethal to 50% of the population) and the ED50 (the dose therapeutically effective in 50% of the population). The dose ratio between toxic and therapeutic effects is the therapeutic index. Compounds that exhibit high therapeutic indices are preferred. While compounds that exhibit toxic side effects may be used, care should be taken to design a delivery system that targets such compounds to the site of affected tissue in order to minimize potential damage to uninfected cells and, thereby, reduce side effects.

[0576] The data obtained from the cell culture assays and animal studies described hereinabove can be used to formulate a range of dosage for use in humans (preferably a dosage within a range of circulating concentrations that include the ED50 with little or no toxicity). The dosage may vary within this range depending upon the formulation and the route of administration. For any compound used in the method of the invention, the therapeutically effective dose can be estimated initially from cell culture assays. A dose may be formulated in animal models to achieve a circulating plasma concentration range that includes the IC50 (i.e., the concentration of the test compound which achieves a half-maximal inhibition of symptoms) as determined in cell culture. Such information can be used to more accurately determine useful doses in humans. Levels in plasma may be measured, for example, by high performance liquid chromatography.

[0577] A therapeutically effective amount of a protein of the present invention can range from about 0.001 to 30 mg/kg body weight (e.g., about 0.01 to 25 mg/kg, about 0.1 to 20 mg/kg, or about 1 to 10 (e.g., 2-9, 3-8, 4-7, or 5-6) mg/kg). The protein can be administered one time per week for between about 1 to 10 weeks (e.g., 2 to 8 weeks, 3 to 7 weeks, or about 4, 5, or 6 weeks). However, a single administration can also be efficacious. Certain factors can influence the dosage and timing required to effectively treat a subject. These factors include the severity of the disease, previous treatments, and the general health or age of the subject.

[0578] When the active ingredient is an antibody, the dosage can be about 0.1 mg/kg of body weight (generally 10-20 mg/kg). If the antibody is to act in the brain, a dosage of 50 mg/kg to 100 mg/kg is usually appropriate. Generally, partially human antibodies and fully human antibodies have a longer half-life within the human body than other antibodies. Accordingly, lower dosages and less frequent administration are often possible with these types of antibodies. Modifications such as lipidation can be used to stabilize antibodies and to enhance uptake and tissue penetration [e.g., into the brain; see Cruikshank et al., J. Acquired Immune Deficiency Syndromes and Human Retrovirology 14:193, (1997)].

[0579] As noted above, the present invention encompasses agents (e.g., small molecules) that modulate expression or activity of a nucleic acid represented by any of biomolecular sequences of the present invention. Exemplary doses of these agents include milligram or microgram amounts of the small molecule per kilogram of subject or sample weight (e.g., about 1-500 mg/kg; about 100 mg/kg; about 5 mg/kg; about 1 mg/kg; or about 50 μg/kg). Appropriate doses of a small molecule depend upon the potency of the small molecule with respect to the expression or activity to be modulated. When one or more of these small molecules is to be administered to an animal (e.g., a human) to modulate expression or activity of nucleic acid or protein of the invention, a physician, veterinarian, or researcher may prescribe a relatively low dose at first, subsequently increasing the dose until an appropriate response is obtained. In addition, it is understood that the specific dose level for any particular animal subject will depend upon a variety of factors including the activity of the specific compound employed, the age, body weight, general health, gender, and diet of the subject, the time of administration, the route of administration, the rate of excretion, any drug combination, and the degree of expression or activity to be modulated.

[0580] Pharmaceutical compositions of the present invention may also include a therapeutic moiety such as a cytotoxin (i.e., an agent that is detrimental to a cell), a therapeutic agent, or a radioactive ion can be conjugated to the biomolecular sequences of the present invention or related compositions, described hereinabove (e.g., antibodies, antisense molecules, ribozymes etc.). The cytotoxin can be, for example, taxol, cytochalasin B, gramicidin D, ethidium bromide, emetine, mitomycin, etoposide, tenoposide, vincristine, vinblastine, colchicin, doxorubicin, daunorubicin, dihydroxy anthracin dione, mitoxantrone, mithramycin, actinomycin D, 1-dehydrotestosterone, glucocorticoids, procaine, tetracaine, lidocaine, propranolol, puromycin, maytansinoids (e.g., maytansinol; see U.S. Pat. No. 5,208,020), CC-1065 (see U.S. Pat. Nos. 5,475,092, 5,585,499, and 5,846,545) and analogs or homologs thereof. Therapeutic agents include antimetabolites (e.g., methotrexate, 6-mercaptopurine, 6-thioguanine, cytarabine, 5-fluorouracil decarbazine), alkylating agents (e.g., mechlorethamine, thioepa chlorambucil, CC-1065, melphalan, carmustine (BSNU) and lomustine (CCNU), cyclothosphamide, busulfan, dibromomannitol, streptozotocin, mitomycin C, and cis-dichlorodiamine platinum (II) (DDP) cisplatin), anthracyclines (e.g., daunorubicin (formerly daunomycin) and doxorubicin), antibiotics (e.g., dactinomycin (formerly actinomycin), bleomycin, mithramycin, and anthramycin (AMC)), and anti-mitotic agents (e.g., vincristine, vinblastine, taxol and maytansinoids). Radioactive ions include, but are not limited to iodine, yttrium and praseodymium.

[0581] Other therapeutic moieties include, but are not limited to, toxins such as abrin, ricin A, pseudomonas exotoxin, or diphtheria toxin; a protein such as tumor necrosis factor, γ-interferon, β-interferon, nerve growth factor, platelet derived growth factor, tissue plasminogen activator; or, biological response modifiers such as, for example, lymphokines, interleukin-1 (IL-1), interleukin-2(IL-2), interleukin-6 (IL-6), granulocyte macrophase colony stimulating factor (GM-CSF), granulocyte colony stimulating factor (G-CSF), or other growth factors.

[0582] The nucleic acid molecules of the invention can be inserted into vectors and used as gene therapy vectors. Gene therapy vectors can be delivered to a subject by, for example, intravenous injection, local administration (see U.S. Pat. No. 5,328,470) or by stereotactic injection (see e.g., Chen et al., Proc. Natl. Acad. Sci. USA 91:3054-3057, 1994). The pharmaceutical preparation of the gene therapy vector can include the gene therapy vector in an acceptable diluent, or can comprise a slow release matrix in which the gene delivery vehicle is imbedded. Alternatively, where the complete gene delivery vector can be produced intact from recombinant cells (e.g. retroviral vectors), the pharmaceutical preparation can include one or more cells which produce the gene delivery system. The pharmaceutical compositions of the invention can be included in a container, pack, or dispenser together with instructions for administration.

### Methods of Treatment

[0583] The present invention provides for both prophylactic and therapeutic methods of treating a subject at risk of (or susceptible to) a disorder or having a disorder associated with aberrant or unwanted expression or activity of a nucleic acid or protein of the invention. “Treatment” encompasses the application or administration of a therapeutic agent to a patient, or to an isolated tissue or cell line (e.g., one obtained from the patient to be treated), with the purpose of curing or lessening the severity of the disease or a symptom associated with the disease.

[0584] Whether carried out prophylactically or therapeutically, the methods of the invention can be specifically tailored or modified, based on knowledge obtained from the field of pharmacogenomics (see above).

[0585] Thus, the invention provides a method for preventing in a subject, a disease associated with mis-expression of a nucleic acid or protein of the present invention. Such diseases include cellular proliferative and/or differentiative disorders, disorders associated with bone metabolism, immune disorders, cardiovascular disorders, liver disorders, viral diseases, pain or metabolic disorders.

[0586] Examples of cellular proliferative and/or differentiative disorders include cancer (e.g., carcinoma, sarcoma, metastatic disorders or hematopoietic neoplastic disorders such as leukemias and lymphomas). A metastatic tumor can arise from a multitude of primary tumor types, including but not limited to those of prostate, colon, lung, breast or liver.

[0587] The terms “cancer,” “hyperproliferative,” and “neoplastic,” are used in reference to cells that have exhibited a capacity for autonomous growth (i.e., an abnormal state or condition characterized by rapid cellular proliferation). Hyperproliferative and neoplastic disease states can be categorized as pathologic (i.e., characterizing or constituting a disease state), or can be categorized as non-pathologic (i.e., deviating from normal but not associated with a disease state). The term is meant to include all types of cancerous growths or oncogenic processes, metastatic tissues or malignantly transformed cells, tissues, or organs, irrespective of histopathologic type or stage of invasiveness. “Pathologic hyperproliferative” cells occur in disease states characterized by malignant tumor growth. Examples of non-pathologic hyperproliferative cells include proliferation of cells associated with wound repair.

[0588] The terms “cancer” or “neoplasms” include malignancies of the various organ systems, such as affecting lung, breast, thyroid, lymphoid, gastrointestinal, and genito-urinary tract, as well as adenocarcinomas, which include malignancies such as most colon cancers, renal-cell carcinoma, prostate cancer and/or testicular tumors, non-small cell carcinoma of the lung, cancer of the small intestine and cancer of the esophagus.

[0589] The term “carcinoma” refers to malignancies of epithelial or endocrine tissues including respiratory system carcinomas, gastrointestinal system carcinomas, genitourinary system carcinomas, testicular carcinomas, breast carcinomas, prostatic carcinomas, endocrine system carcinomas, and melanomas. Exemplary carcinomas include those forming from tissue of the cervix, lung, prostate, breast, head and neck, colon and ovary. The term also includes carcinosarcomas (e.g., which include malignant tumors composed of carcinomatous and sarcomatous tissues). An “adenocarcinoma” refers to a carcinoma derived from glandular tissue or in which the tumor cells form recognizable glandular structures. The term “sarcoma” is art recognized and refers to malignant tumors of mesenchymal derivation. As used herein, the term “hematopoietic neoplastic disorder(s)” includes diseases involving hyperplastic/neoplastic cells of hematopoietic origin. A hematopoietic neoplastic disorder can arise from myeloid, lymphoid or erythroid lineages, or precursor cells thereof. Preferably, the diseases arise from poorly differentiated acute leukemias (e.g., erythroblastic leukemia and acute megakaryoblastic leukemia). Additional exemplary myeloid disorders include, but are not limited to, acute promyeloid leukemia (APML), acute myelogenous leukemia (AML) and chronic myelogenous leukemia (CML) (see Vaickus, Crit. Rev. in Oncol./Hemotol. 11:267-97, 1991); lymphoid malignancies include, but are not limited to acute lymphoblastic leukemia (ALL) which includes B-lineage ALL and T-lineage ALL, chronic lymphocytic leukemia (CLL), prolymphocytic leukemia (PLL), hairy cell leukemia (HLL) and Waldenstrom's macroglobulinemia (WM). Additional forms of malignant lymphomas include, but are not limited to non-Hodgkin lymphoma and variants thereof, peripheral T cell lymphomas, adult T cell leukemia/lymphoma (ATL), cutaneous T-cell lymphoma (CTCL), large granular lymphocytic leukemia (LGF), Hodgkin's disease and Reed-Sternberg disease.

[0590] The leukemias, including B-lymphoid leukemias, T-lymphoid leukemias, undifferentiated leukemias, erythroleukemia, megakaryoblastic leukemia, and monocytic leukemias are encompassed with and without differentiation; chronic and acute lymphoblastic leukemia, chronic and acute lymphocytic leukemia, chronic and acute myelogenous leukemia, lymphoma, myelo dysplastic syndrome, chronic and acute myeloid leukemia, myelomonocytic leukemia; chronic and acute myeloblastic leukemia, chronic and acute myelogenous leukemia, chronic and acute promyelocytic leukemia, chronic and acute myelocytic leukemia, hematologic malignancies of monocyte-macrophage lineage, such as juvenile chronic myelogenous leukemia; secondary AML, antecedent hematological disorder; refractory anemia; aplastic anemia; reactive cutaneous angioendotheliomatosis; fibrosing disorders involving altered expression in dendritic cells, disorders including systemic sclerosis, E-M syndrome, epidemic toxic oil syndrome, eosinophilic fasciitis localized forms of scleroderma, keloid, and fibrosing colonopathy; angiomatoid malignant fibrous histiocytoma; carcinoma, including primary head and neck squamous cell carcinoma; sarcoma, including kaposi's sarcoma; fibroadanoma and phyllodes tumors, including mammary fibroadenoma; stromal tumors; phyllodes tumors, including histiocytoma; erythroblastosis; and neurofibromatosis.

[0591] Examples of disorders involving the heart or “cardiovascular disorders” include, but are not limited to, a disease, disorder, or state involving the cardiovascular system, e.g., the heart, the blood vessels, and/or the blood. A cardiovascular disorder can be caused by an imbalance in arterial pressure, a malfunction of the heart, or an occlusion of a blood vessel, e.g., by a thrombus. Examples of such disorders include hypertension, atherosclerosis, coronary artery spasm, congestive heart failure, coronary artery disease, valvular disease, arrhythmias, and cardiomyopathies.

[0592] As discussed, diseases associated (e.g., causally associated) with over expression of a nucleic acid of the invention (as determined, for example, by the in vivo or ex vivo analyses described above), can be treated with techniques in which one inhibits the expression or activity of the nucleic acid or its gene products. For example, a compound (e.g., an agent identified using an assay described above) that exhibits negative modulatory activity with respect to a nucleic acid of the invention (the expression or over expression of which is causally associated with a disease) can be used to prevent and/or ameliorate that disease or one or more of the symptoms associated with it. The compound can be a peptide, phosphopeptide, small organic or inorganic molecule, or antibody (e.g., a polyclonal, monoclonal, humanized, anti-idiotypic, chimeric or single chain antibodies, and Fab, F(ab′)2 and Fab expression library fragments, scFV molecules, and epitope-binding fragments thereof).

[0593] Further, antisense, ribozyme, and triple-helix molecules (see above) that inhibit expression of the target gene (e.g., a gene of the invention) can also be used to reduce the level of target gene expression, thus effectively reducing the level of target gene activity. If necessary, to achieve a desirable level of gene expression, molecules that inhibit gene expression can be administered with nucleic acid molecules that encode and express target gene polypeptides exhibiting normal target gene activity. Of course, where the assays of the invention indicate that expression or over expression is desirable, the nucleic acid can be introduced into cells via gene therapy methods with little or no treatment with inhibitory agents (this can be done to combat not only under expression, but over secretion of a gene product).

[0594] Aptamer molecules (nucleic acid molecules having a tertiary structure that permits them to specifically bind to protein ligands; [see, e.g., Osborne et al., Curr. Opin. Chem. Biol. 1: 5-9, (1997) and Patel Curr. Opin. Chem. Biol. 1:32-46, (1997)] are also useful therapeutics. Since nucleic acid molecules can usually be more conveniently introduced into target cells than therapeutic proteins may be, aptamers offer a method by which protein activity can be specifically decreased without the introduction of drugs or other molecules that may have pluripotent effects.

[0595] As noted above, the nucleic acids of the invention and the proteins they encode can be used as immunotherapeutic agents (to, e.g., elicit an immune response against a protein of interest). However, in some circumstances, undesirable effects occur when a subject is injected with a protein or an epitope that stimulate antibody production. In those circumstances, one can instead generate an immune response with an anti-idiotypic antibody [see, e.g., Herlyn, Ann. Med. 31:66-78, 1991 and Bhattacharya-Chatterjee and Foon, Cancer Treat. Res. 94:51-68, (1998)]. Effective anti-idiotypic antibodies stimulate the production of anti-anti-idiotypic antibodies, which specifically bind the protein in question. Vaccines directed to a disease characterized by expression of the nucleic acids of the present invention can also be generated in this fashion. In other circumstances, the target antigen is intracellular. In these circumstances, antibodies (including fragments, single chain antibodies, or other types of antibodies described above) can be internalized within a cell by delivering them with, for example, a lipid-based delivery system (e.g., Lipofectin™ or liposomes). Single chain antibodies can also be administered by delivering nucleotide sequences that encode them to the target cell population (see, e.g., Marasco et al., Proc. Natl. Acad. Sci. USA 90:7889-7893, 1993).

[0596] Additional objects, advantages, and novel features of the present invention will become apparent to one ordinarily skilled in the art upon examination of the following examples, which are not intended to be limiting. Additionally, each of the various embodiments and aspects of the present invention as delineated hereinabove and as claimed in the claims section below finds experimental support in the following examples.

### EXAMPLES

[0597] Reference is now made to the following examples, which together with the above descriptions, illustrate the invention in a non limiting fashion.

[0598] Generally, the nomenclature used herein and the laboratory procedures utilized in the present invention include molecular, biochemical, microbiological and recombinant DNA techniques. Such techniques are thoroughly explained in the literature. See, for example, “Molecular Cloning: A laboratory Manual” Sambrook et al., (1989); “Current Protocols in Molecular Biology” Volumes I-III Ausubel, R. M., ed. (1994); Ausubel et al., “Current Protocols in Molecular Biology”, John Wiley and Sons, Baltimore, Md. (1989); Perbal, “A Practical Guide to Molecular Cloning”, John Wiley & Sons, New York (1988); Watson et al., “Recombinant DNA”, Scientific American Books, New York; Birren et al. (eds) “Genome Analysis: A Laboratory Manual Series”, Vols. 1-4, Cold Spring Harbor Laboratory Press, New York (1998); methodologies as set forth in U.S. Pat. Nos. 4,666,828; 4,683,202; 4,801,531; 5,192,659 and 5,272,057; “Cell Biology: A Laboratory Handbook”, Volumes I-III Cellis, J. E., ed. (1994); “Current Protocols in Immunology” Volumes I-III Coligan J. E., ed. (1994); Stites et al. (eds), “Basic and Clinical Immunology” (8th Edition), Appleton & Lange, Norwalk, Conn. (1994); Mishell and Shiigi (eds), “Selected Methods in Cellular Immunology”, W. H. Freeman and Co., New York (1980); available immunoassays are extensively described in the patent and scientific literature, see, for example, U.S. Pat. Nos. 3,791,932; 3,839,153; 3,850,752; 3,850,578; 3,853,987; 3,867,517; 3,879,262; 3,901,654; 3,935,074; 3,984,533; 3,996,345; 4,034,074; 4,098,876; 4,879,219; 5,011,771 and 5,281,521; “Oligonucleotide Synthesis” Gait, M. J., ed. (1984); “Nucleic Acid Hybridization” Hames, B. D., and Higgins S. J., eds. (1985); “Transcription and Translation” Hames, B. D., and Higgins S. J., eds. (1984); “Animal Cell Culture” Freshney, R. I., ed. (1986); “Immobilized Cells and Enzymes” IRL Press, (1986); “A Practical Guide to Molecular Cloning” Perbal, B., (1984) and “Methods in Enzymology” Vol. 1-317, Academic Press; “PCR Protocols: A Guide To Methods And Applications”, Academic Press, San Diego, Calif. (1990); Marshak et al., “Strategies for Protein Purification and Characterization—A Laboratory Course Manual” CSHL Press (1996); all of which are incorporated by reference as if fully set forth herein. Other general references are provided throughout this document. The procedures therein are believed to be well known in the art and are provided for the convenience of the reader. All the information contained therein is incorporated herein by reference.

### Example 1

### Identification of Alternatively Spliced Expressed Sequences Background

[0599] The etiology of many kinds of cancers, especially those involving multiple genes or sporadic mutations, is yet to be elucidated. Accumulative EST information coming from heterogeneous tissues and cell-types, can be used as a considerable source to understanding some of the events inherent to carcinogenesis.

[0600] Although a large number of current bioinformatics tools are used to predict tissue specific genes in general and cancer specific genes in particular, all fail to consider alternatively spliced variants [Boguski and Schuler (1995) Nat. Genet. 10:369-71, Audic and Claverie (1997) Genome Res. 7:986-995; Huminiecki and Bicknell (2000) Genome Res. 10:1796-1806; Kawamoto et al. (2000) Genome Res. 10:1817-1827]. Alternative splicing is also overlooked by wet laboratory methods such as SAGE and microarray experiments which have been widely used to study gene expression, however remain to be linked to alternative splicing modeling [see Background section and Valculescu et al. (1995) Science 270:484-487; Caron et al. (2001) Science 291:1289-1292 and Schena et al. (1995) Science 270:467-470].

[0601] A computational-based approach was developed to identify alternatively spliced transcripts, which are expressed in a temporal and/or spatial pattern. Examples 1-4 below describe the identification of cancer specific alternatively spliced isoforms, which were identified according to the teachings of the present invention.

[0602] Experimental Procedures and Reagents

[0603] DATA and LEADS alternative splicing modeling—GenBank version 125 with genomic build #25 from National Center for Biotechnology Information (NCBI) was used as an input to the LEADS platform as described [Shoshan et al. (2001) Proc. SPIE Microarrays: Optical Technologies and Informatics 4266:86-95; Matloubian (2000) Nat. Immunol. 1:298-304; David et al. (2002) J. Biol. Chem. 277:18084-18090; Sorek et al. (2002) Genome Res. 12:1060-7]. UniGene Build #146 and libraryQuest.txt were obtained from NCBI and Cancer Genome Anatomy Project (CGAP) in National Cancer Institute (NCI), respectively.

[0604] EST tissue information—EST information was available in web form from Library Browser or Library Finder in NCBI or in the flat file libraryQuest.txt. The file listed 53 tissue sources, 5 histological states (cancer, multiple histology, normal, pre-cancer, and uncharacterized histology), 6 types of tissue preparations (bulk, cell line, flow-sorted, microdissected, multiple preparation, and uncharacterized), and brief descriptions on each library. 5318 libraries were from bulk tissue preparation {including 5000 ORESTES libraries [Camargo et al. (2001) Proc. Natl. Acad. Sci. USA 98:12103-12108]}, 329 from cell lines, 37 flow-sorted, 66 microdissected, 5 multiple preparation, and 1121 were from uncharacterized preparations. Excluding ORESTES libraries, 507 libraries were designated as ‘non-normalized’ and 100 were designated ‘normalized’ or ‘subtracted’ indicating the pretreatment of mRNA before cDNA library construction. A small number of libraries were derived from the same original sample. These were not considered separately. Library counts of ESTs rather than direct EST counts were used to provide semi-quantitative measurements of expression level, since EST counts in some cases reflect the prevalence of ESTs in one or a few particular libraries, and library counts provide better indications across different tissue types when both normalized and non-normalized libraries were analyzed. Such tissue information analyses are limited to those tissues with a sufficient number of libraries. The inclusion of normalized cDNA libraries allowed the examination of genes expressed at low levels.

[0605] The ESTs from ‘pooled tissue’ or ‘uncharacterized tissue’ were considered as non-conforming in order to maintain the robustness of the results. In addition, 139,243 ESTs that had no library information were considered non-conforming in investigating tissue- or cancer-specific alternative splicing events.

[0606] Results—Human EST and mRNA sequences aligned against genomic sequences and clustered through Compugen's LEADS platform were used to identify intron boundaries and alternative splicing sites [Shoshan et al. (2001) Proc. SPIE Microarrays: Optical Technologies and Informatics 4266:86-95; Matloubian (2000) Nat. Immunol. 1:298-304; David et al. (2002) J. Biol. Chem. 277:18084-18090; Sorek et al. (2002) Genome Res. 12:1060-7].

[0607] 20,301 clusters with 2.0 million ESTs contained at least one mRNA sequence, in general agreement with UniGene build #148 with 20,876 such clusters. The remaining EST sequences, which were clustered to unknown regions of known genes or to unknown genes were not analyzed. Table 1 below provides some statistics about EST and mRNA clustering. 125,115 introns, and 213,483 exons were aligned either with an mRNA, or with ESTs from at least two libraries if there was no RNA aligned to the gene segment. This was effected to exclude possible genomic contamination in expressed sequences, or other EST technology associated faults.

TABLE 1

| EST | Cluster | RNA | Cluster |
|---|---|---|---|
| 1 | 963 | 1 | 6527 |
| 2-3 | 1457 | 2-3 | 6372 |
| 4-7 | 1532 | 4-7 | 6204 |
| 8-15 | 1655 | 8-15 | 1915 |
| 16-31 | 1879 | 16-31 | 226 |
| 32-63 | 2500 | 32-63 | 40 |
| 64-127 | 3481 | 64 and above | 17 |
| 128-255 | 3240 | Total | 20301 |
| 256-511 | 1406 | | |
| 512-1023 | 422 | | |
| 1024-above | 1766 | | |
| Total | 20301 | | |

### Example 2

### Cluster Distribution of Alternatively Spliced Donor and Acceptor Sites

[0608] Alternative splice events include exon skipping, alternative 5′ or 3′ splicing, and intron retention, which can be described by the following simplification: a single exon connects to at least two other exons in either the 3′ end (donor site) or the 5′ end (acceptor site), as shown in FIG. 3. Table 2 below lists some statistics of alternative splicing events based on this simplification.

TABLE 2

| Alternative | | Alternative | |
|---|---|---|---|
| donor site | Cluster | acceptor site | Cluster |
| 1 | 3690 | 1 | 3751 |
| 2 | 2269 | 2 | 2388 |
| 3 | 1348 | 3 | 1511 |
| 4 | 760 | 4 | 799 |
| 5 | 435 | 5 | 508 |
| 6 and above | 566 | 6 and above | 710 |
| Total | 9068 | Total | 9667 |

[0609] Distribution analysis—As described hereinabove a valid donor-acceptor concatenation must be supported by at least one mRNA or by ESTs from at least two different libraries. 8254 clusters were found to have both alternatively spliced donor and acceptor sites. When the lower bound on the number of EST libraries supporting each donor-acceptor concatenation was increased to three, 13,402 alternatively spliced donor sites were shown to be included in 6892 clusters and 15,015 alternatively spliced acceptor sites where shown to be included in 7570 clusters, while 6111 clusters comprised both alternatively spliced donor and acceptor sites.

### Example 3

### Tissue Distribution of ESTs and Libraries Following LEADS Alternative Splicing Modeling

[0610] Cluster analysis performed to identify alternatively spliced ESTs (see Example 2) was further used for tissue information extraction. Table 3 below lists ten tissue types with the largest numbers of ESTs along with those from pooled or uncharacterized tissues.

TABLE 3

| | Number of ESTs | | | Number of Libraries | | |
|---|---|---|---|---|---|---|
| Tissue | Normal | Cancer | Total | Normal | Cancer | Total |
| Brain | 93024 | 87803 | 180827 | 30 | 25 | 55 |
| Lung | 35455 | 85596 | 121051 | 92 | 156 | 248 |
| Placenta | 86571 | 27291 | 113862 | 259 | 3 | 262 |
| Uterus | 30052 | 71521 | 101573 | 99 | 107 | 206 |
| Colon | 23796 | 74998 | 98794 | 274 | 445 | 719 |
| Kidney | 42628 | 46811 | 89439 | 9 | 54 | 63 |
| Skin | 32436 | 43085 | 75521 | 8 | 10 | 18 |
| Prostate | 40312 | 27963 | 68275 | 131 | 135 | 266 |
| Mammary gland | 26509 | 36638 | 63147 | 305 | 665 | 970 |
| Head and neck | 12354 | 50167 | 62521 | 62 | 800 | 862 |
| Pooled | 178618 | 992 | 179610 | 15 | 1 | 16 |
| Uncharacterized | 76193 | 9721 | 85914 | 778 | 106 | 884 |

[0611] Evidently, ESTs derived from lung, uterus, colon, kidney, mammary gland, head and neck were obtained aminly from cancerous libraries. The distribution of ESTs in normal and cancer libraries in each case was taken into a consideration and used as a parameter for scoring the differential expression annotation.

### Example 4

### Identification of Putative Cancer Specific Alternatively Spliced Transcripts

[0612] Alternative splicing events restricted to cancer tissues were identified by looking for any donor-acceptor concatenations exclusively supported by ESTs from cancer tissues. Table 4 below lists six examples for such. An interesting example is the NONO gene (GenBank Accession No: BC003129), represented by 1496 ESTs. The NONO gene has been previously suggested to code for a possible splicing factor [Dong B, Horowitz D S, Kobayashi R, Krainer A R. Nucleic Acids Res (1993) 25; 21(17):4085-92]. It's newly discovered restricted to expression to cancer tissues suggests that alternative splicing of multiple genes may be regulated during carcinogenesis.

TABLE 4

| | | | | | | | | Non-specific | | | |
|---|---|---|---|---|---|---|---|---|---|---|---|
| mRNA/ | Uni Gene | | Total | | | Specific | | E | | | Possible |
| EST | ID | Pos. | E | R | Type | E | R | C | N | R | function |
| BC003129 | 172207 | 123, 237 | 1496 | 8 | d+ | 15 | 1 | 46 | 20 | 3 | Splicing factor |
| | | | | | | | | | | | candidate |
| NM_018035 | 279851 | 220, 301 | 584 | 2 | d− | 7 | 0 | 21 | 9 | 2 | No known |
| | | | | | | | | | | | function |
| AL519365 | 21938 | 474, 513 | 162 | 3 | a− | 8 | 3 | 6 | 1 | 0 | Oxysterol |
| | | | | | | | | | | | binding |
| BF341144 | 155596 | 507, 542 | 148 | 1 | a+ | 6 | 0 | 7 | 4 | 1 | BCL2/adenovir- |
| | | | | | | | | | | | us E1B |
| | | | | | | | | | | | interacting |
| AB009357 | 7510 | 1372, 1452 | 205 | 6 | a+ | 7 | 4 | 2 | 4 | 2 | MAPKKK 7 |
| NM_002382 | 42712 | 57, 84 | 165 | 7 | a− | 8 | 1 | 7 | 3 | 6 | MAX protein |

One mRNA/EST containing both splicing junctions identifies the cluster. ‘Type’—indicates the type of transcript, which was shown to be cancer specific. The following symbols were used, (d) donor site; (a) acceptor site; (‘+) proximal exon; (‘−’) distal exon. ‘Total’—indicates the number of ESTs or mRNAs which were used for analysis. ‘Specific/non-specific’—indicates total library number which was used for analysis. All mRNA sequences under ‘specific’ were from cancer tissues. ‘Position’—identifies splicing boundaries on the sequence. E—EST; R—RNA; C—Cancer; N—Normal.

### Example 5

### Ontological Annotation of Proteins—Data Collection

### Background

[0613] Recent progress in genomic sequencing, computational biology and ontology development has presented an opportunity to investigate broad biological systems

[0614] A gene ontology system was developed and specifically used to annotate human proteins. Examples 5-9 below describe the development of an ontology engine, a computational platform for annotation and resultant annotations of human proteins.

[0615] Gene Ontology (GO) and gene association files were obtained from the website of the Gene Ontology Consortium. InterPro scan from the website of the European Bioinformatics Institute, and enzyme database from PROTEOME available at the ExPASy-Swiss Institute of Bioinformatics website. The following databases and versions were used, GenBank release 122.0, SwissProt release 39.0, Enzyme database Release 26.0, InterPro database as of Apr. 6, 2001, NCBI LocusLink data as of Mar. 6, 2001, MEDLINE databases as of Apr. 6, 2001, and the following files from Gene Ontology Consortium: gene_association.fb (version 1.26, Feb. 19, 2001), gene_association.mgi (version 1.19, Mar. 1, 2001), gene_association.sgd (version 1.251, Mar. 13, 2001), gene_association.pombase (version 1.2, Jul. 22, 2000), ec2go (version 1.2, Oct. 23, 2000), and swp2go (version 1.4, Nov. 15, 2000). 58118 SWISS-Prot proteins have been assigned with at least one GO node by the following sources: 15534 proteins were assigned with at least a functional GO node by conversion of EC (enzyme nomenclature) to GO node. MGI has assigned 5984 SwissProt proteins with GO nodes. 31869 SwissProt proteins were assigned a GO node using SwissProt keyword correspondence and 33048 SwissProt proteins were assigned GO node by InterPro scanning (available at the European Bioinformatics Institute website). The nonredundant protein database was constructed from GenPep file from NCBI, along with proteins collected from the Saccharomyces genome database (SGD) [Dwight et al. (2002) Nucleic Acids Res. 30:69-72] and the Drosophila genome database (Flybase) [The Flybase consortium 2002 Nucleic Acids Res. 30:106-108], with a total number of 670130.

### Example 6

### Generation of Progressive Sequence Clusters

[0616] A two-stage strategy was used to build a detailed homology map between all proteins in the comprehensive protein database (Example 5). In a first stage, all protein pairs with an E score lower than 0.01 using Blastp with default parameters were cataloged. Table 5 lists the distribution of Blastp results.

TABLE 5

| E escore | Percentage |
|---|---|
| 10⁻¹⁰-10⁻² | 17.58 |
| 10⁻²⁰-10⁻¹⁰ | 13.81 |
| 10⁻³⁰-10⁻²⁰ | 11.02 |
| 10⁻⁴⁰-10⁻³⁰ | 12.91 |
| 10⁻⁵⁰-10⁻⁴⁰ | 10.24 |
| 10⁻⁶⁰-10⁻⁵⁰ | 5.81 |
| 10⁻⁷⁰-10⁻⁶⁰ | 3.64 |
| 10⁻⁸⁰-10⁻⁷⁰ | 2.65 |
| 10⁻⁹⁰-10⁻⁸⁰ | 2.86 |
| 10⁻¹⁰⁰-10⁻⁹⁰ | 2.53 |
| 10⁻¹¹⁰-10⁻¹⁰⁰ | 2.18 |
| 10⁻¹²⁰-10⁻¹¹⁰ | 1.58 |
| 10⁻¹³⁰-10⁻¹²⁰ | 1.50 |
| 10⁻¹⁴⁰-10⁻¹³⁰ | 1.13 |
| 10⁻¹⁵⁰-10⁻¹⁴⁰ | 1.01 |
| 10⁻¹⁶⁰-10⁻¹⁵⁰ | 1.01 |
| 10⁻¹⁷⁰-10⁻¹⁶⁰ | 0.92 |
| 10⁻¹⁷⁸-10⁻¹⁷⁰ | 0.90 |
| 0.00 | 6.72 |

[0617] In the second stage, all homologous protein pairs were aligned through Needlman-Wunsch algorithm with a global alignment to obtain the percentage of identical amino acids between the two proteins. BLOSUM62 was used as the substitution matrix. The percentage of identity was defined as the number of amino acids aligned with nonnegative scores divided by the number of amino acids in both aligned and unaligned length of two proteins in the global alignment. Table 6 shows a percent identity distribution of protein pairs following global alignment. Evidently, the majority of protein pairs (i.e., 68.5%) exhibited identity levels in the range of 10-50%.

TABLE 6

| Identity Level | Percentage |
|---|---|
| 0-10% | 5.67 |
| 10-20% | 24.66 |
| 20-30% | 19.94 |
| 30-40% | 10.94 |
| 40-50% | 7.31 |
| 50-60% | 7.09 |
| 60-70% | 7.24 |
| 70-80% | 6.70 |
| 80-90% | 5.98 |
| 90-100% | 4.47 |

### Example 7

### Text Mining

[0618] Correlations between presence of specific MeSH terms, or specific English words in available text information and Gene Ontology assignments in the training data were obtained. The correlations were then used to predict Gene Ontology for unassigned genes.

[0619] Method—Non-characters in titles and abstracts, and in definition line of gene records were eliminated and words were stemmed through the Lingua::stem module available at the website of the Comprehensive Perl Archive Network. Due to the standardized and curated nature of MeSH terms, MeSH terms were not parsed or stemmed. The frequency of each word in all the available text information was calculated. Words that occurred at least 5 times over the whole text information space were retained for further studies. This cutoff threshold was used to eliminate rare words, wrong spellings, and sometimes even the base pair sequence present in either the definition lines or abstracts. In addition, an upper limit of word frequency (common words such as ‘and’, ‘gene’, ‘protein’) and a lower limit of word frequency were defined through repeated training process and manual review. The words within the upper and the lower limits were considered as predictive. Since the correlation between the GO nodes and specific words is positive by nature, negative sentences with words such as ‘not’ and its variants, such as ‘unlikely’ or ‘unresponsive’ were excluded from consideration.

[0620] Genes with GO annotation from other sources such as GO consortium, InterPro scanning or keyword mappings were used as training data to obtain the correlation between specific words and specific GO nodes.

[0621] The following formula was used. S=log(P(m,g)/P(m)P(g)), wherein S is the LOD score for word m-GO g combination, wherein P(m,g) is the frequency of term m and GO node g co-occurrence among all word and GO combinations, P(m) is the frequency of occurrence of term m among all word occurrences, and P(g) is the frequency of occurrence of GO node g among all GO occurrences.

[0622] In order to predict GO node for any specific gene which is linked to one to a few dozen words, the sums of LOD scores from all these words for each possible GO were calculated and sorted, and used for further GO annotation. Multiple MeSH terms-GO correlations were tested and were found to be no more informative than the single MeSH term-GO correlation, and therefore they were not used.

[0623] Results—Table 7 below, lists general statistics of text information from publicly available sequence databases.

TABLE 7

| | MeSH | | | Definition |
|---|---|---|---|---|
| | term | Title | Abstract | line |
| Number of proteins | 110608 | 106190 | 113073 | 516952 |
| Number of articles | 71703 | 77314 | 82654 | n/a |
| Number of unique | 40011 | 18175 | 26630 | 25915 |
| words* | | | | |
| Average number of | 19.05 | 2.70 | 11.65 | 6.56 |
| words per article | | | | |
| or per definition | | | | |
| line | | | | |

[0624] A predictive probabilistic model was then applied to create possible GO annotations based on the associated text information. Definition lines of sequence records, MeSH term annotations, titles and abstracts from sequence related publications were modeled separately.

[0625] The frequency of association of a specific term with a specific GO node in the training data was examined. Parameters such as boundaries of the frequency of MeSH terms and other words were optimized through the training process, using self-validation and cross validation methods. LOD (logarithm of odds) scores, defined as the logarithm of the ratio between the association frequency of any term-GO pair and the calculated frequency of the random combination of this pair, were used to indicate the relatedness of certain terms with certain GO node. These LOD scores were found to be correlative with the accuracy of GO prediction, as shown in FIG. 5. Text information from titles of MEDLINE records appeared to have more predictive power, in particular at lower LOD scores, than text information from other categories. This suggests that the title tended to summarize the gist of an article in a straightforward manner. MeSH terms had similar predictive capabilities as the abstracts, possibly because the MeSH terms were derived from the abstracts, and thus had similar information contents.

[0626] Based on text information, a significant number of proteins were predicted to be associated with one or more GO nodes. Table 8 below, lists the number of proteins with predicted GO node from four types of text information in the three categories of GO. These predicted GO annotations were incorporated in GO process to increase the accuracy of homology-based GO annotation and to generate de novo annotations.

TABLE 8

| | MeSH | | | Definition | |
|---|---|---|---|---|---|
| | term | Title | Abstract | Line | Total |
| Cellular Component | 57845 | 52094 | 57597 | 514191 | 521396 |
| Molecular Function | 57845 | 54152 | 57632 | 516319 | 523384 |
| Biological Process | 57845 | 53970 | 57631 | 516402 | 523385 |

[0627] To further enhance the accuracy and coverage of GO annotation process, a computational platform for predicting cellular localization, ProLoc (Einat Hazkani-Covo, Erez Levanon, Galit Rotman, Dan Graur and Amit Novik, a manuscript submitted for publication), was used to predict the cellular localization of individual proteins based on their inherent features such as specific localization signatures, protein domains, amino acid composition, pI, and protein length. Only protein sequences that begin with methionine underwent ProLoc analysis. Thus, 88997 out of 93110 proteins in SwissProt version 39 were analyzed, and 78111 proteins have one to three GO predictions in cellular component category.

### Example 8

### Gene Ontology Assignment

[0628] Progressive single-linkage clusters with 1% resolution were generated to assign GO annotations (i.e., nodes) to proteins (see Example 6). Protein clustering and annotation assignment were effected at each level of homology. The resolution was 1% for global alignment identity (i.e., clustering was first effected at 98%, then at 97% and so forth). The resolution was 10 fold for the E score of a BlastP homology pair. For example, clustering was performed at 10⁻⁵⁰, then at 10⁻⁴⁰ and so forth.

[0629] To examine clustering efficiency and homology transitivity, all homology pairs clustered with at least 90% identity were examined. At this level, there were a total of 57,004 clusters containing 263,259 protein members. Among these clusters, 23,231 clusters contained at least three protein members (see FIGS. 6a-c). The lowest homology pairs had an identity of 46% while being clustered at 90% or higher identity levels.

[0630] Clusters containing proteins with preassociated or predicted ontological annotations were analyzed and best annotations for individual proteins in the clusters were selected through an error weight calculation. Table 9 below, provides statistics on the number of input gene ontology annotations and the number of output annotations following processing.

TABLE 9

| | Input | | |
|---|---|---|---|
| | GO Consortium annotation, | | |
| | Enzyme conversion, | Text mining | |
| | InterPro mapping, etc. | ProLoc | Output |
| Cellular Component | 44702 | 522179 | 574607 |
| Molecular Function | 85626 | 526083 | 580767 |
| Biological Process | 69726 | 525842 | 578636 |

[0631] Over 85% of proteins were annotated with one or more GO nodes in each of three GO categories. Table 10 below, analyses the number of proteins annotated at different homology levels, showing that GO annotations were achieved throughout the homology spectra.

TABLE 10

| | Cellular | Molecular | Biological |
|---|---|---|---|
| | Component | Function | Process |
| Text | 32257 | 34137 | 30149 |
| 10⁻²-10⁻¹⁰ | 87967 | 71717 | 74277 |
| 10⁻¹⁰-10⁻⁵⁰ | 122992 | 70088 | 79318 |
| 10⁻⁵⁰-0.0 | 98059 | 55132 | 59051 |
| 35%-75% | 111130 | 97209 | 108334 |
| 75%-90% | 38509 | 68282 | 67429 |
| 90%-99% | 38991 | 98576 | 90352 |
| Input GO | 44702 | 85626 | 69726 |

### Example 9

### Statistical Validation of Ontological Annotations

[0632] Gene ontology annotations, which were assigned according to the teachings of the present invention, were assessed by automatic cross-validation. One fifth of input of input GO annotations were withheld during the GO annotation process and the resultant annotations were compared with the withheld GO nodes. For each protein, the GO node with the lowest error score was examined. Table 11 below, lists the coverage and accuracy of such representative test.

TABLE 11

| | Total | Predicted GO | Accurate GO |
|---|---|---|---|
| Cellular Component | 7431 | 7186 | 4642 |
| Molecular Function | 12999 | 12864 | 10138 |
| Biological Process | 10811 | 10690 | 8080 |

[0633] Evidently, sample coverage ranged from 96% to 99% and the reproducibility was between 65% and 80%. The lower reproducibility of GO annotations in the “cellular component” category, as compared with that in the other two GO categories was consistent with the notion that a short amino acid segment such as a signal peptide affects significantly protein localization. The presence or absence of such small amino acid segments could not be completely captured in sequence similarity comparisons. Detailed analysis of the validation of data indicated that the accuracy of the annotations correlated with the homology levels (data not shown). Manual validation of assigned annotations was performed on a total of 500 annotations and about 85%-93% of annotations were found to be correct. The higher percentage of accuracy in the manual examination over the automatic cross-validation resulted from the incomplete annotation of input GO.

### Example 10

### Description of Data

[0634] Example 10a-e below describe the data table in “Summary_table” file, on the attached CD-ROM3. The data table shows a collection of annotations of differentially expressed nucleic acid sequences, which were identified according to the teachings of the present invention.

[0635] Each feature in the data table is identified by “#”.

[0636] Each transcript in the data table is identified by:

[0637] (i) A Serial number, e.g. “251470” in Example 10a, “445259”-“445262” in Example 10b. I

[0638] (ii) An internal arbitrary transcript accession number, e.g. “N62228_{—}4” in Example 10a, “BE674469_{—}0”, “BE674469_{—}0_{—}124”, “BE674469_{—}1”, “BE674469_{—}1_{—}124” in Example 10b.

[0639] The first number of the internal transcript accession number is shared by all transcripts which belong to the same contig, and represent alternatively spliced variants of each other, e.g. “BE674469” in “BE674469_{—}0”, “BE674469_{—}0_{—}124”, “BE674469_{—}1”, “BE674469_{—}1_{—}124” in Example 10b.

[0640] The second number of the internal transcript accession number is an internal serial transcript number of a specific contig, e.g. “_{—}0” or “_{—}1” in “BE674469_{—}0”, “BE674469_{—}0_{—}124”, “BE674469_{—}1”, “BE674469_{—}1_{—}124” in Example 10b.

[0641] The third number of the internal transcript accession number is optional, and represents the GenBank database version used for clustering, assembly and annotation processes. Unless otherwise mentioned, GenBank database version 126 was used. “124” indicates the use of GenBank version 124, as in “BE674469_{—}1_{—}124” of Example 10b.

[0642] “ProDG” following the internal accession number indicates an EST sequence data from a proprietary source, e.g., Examples 3d and 3e.

[0643] “han” represents the use of GenBank version 125. This version was used in the annotation of lung and colon cancer specific expressed sequences.

[0644] “lab” indicates expressed sequences which differential pattern of expression has been confirmed in the laboratory.

[0645] Transcript accession number identifies each sequence in the nucleotide sequence data files “Transcripts_nucleotide_seqs_part1”, “Transcripts_nucleotide_seqs_part2” and “Transcripts_nucleotide_seqs_part3” on CD-ROMs 1 and 2, and in the respective amino acid sequences data file “Protein.seqs” on CD-ROM2. Of note, some nucleotide sequence data files of the above, do not have respective amino acid sequences in the amino acid sequence file “Protein.seqs” attached on CD-ROM2.

[0646] Additional lines of the file contain the following information:

[0647] “*” indicates optional fields; “**” indicates repeatable features.

[0648] “#EST” represents a list of GenBank accession numbers of all expressed sequences (ESTs and RNAs) clustered to a contig, from which a respective transcript is derived. The GenBank accession numbers of these expressed sequences are listed only for the first transcript in the contig, e.g.“#EST BC006216,BE674469,BE798748,NM032716” in Example 10b. The rest of the transcripts derived from the same contig, are indicated by an #EST field marked with “the same”.

[0649] Expressed sequences, marked with “ProDGyXXX”, e.g., “ProDGy933” in Example 10d, and expressed sequences, marked with “GeneID XXX”, e.g., “GeneID1007Forward” in Example 10e, are proprietary sequences which do not appear in GenBank database. These sequences are deposited in the nucleotide sequence file “ProDG_seqs” in the attached CD-ROM2.

[0650] Data pertaining to differentially expressed alternatively spliced sequences is presented in the following format:

[0651] *, ** “#TAA_CD” represents the coordinates of the differentially expressed sequence segment. A single number represents a differentially expressed edge, corresponding to the specific junction between 2 exons. “TAA_CD” represented by a pair of numbers represents the start and end positions of a differentially expressed sequence node. For example, “#TAA_CD 269 296” in Example 10a indicates that the transcript identified as N62228_{—}4 contains a differentially expressed segment, located between the nucleotides at positions 269 and 296.

[0652] *, ** “#TAA_TIS” contains information pertaining to specific tissue(s), in which the respective transcript is predicted to be expressed differentially. Tumor tissues are indicated accordingly. For example, “#TAA_TIS lung Tumor” indicates that transcript BE674469_{—}0 in Example 10b is predicted to be differentially expressed in lung tumor tissues.

[0653] *, ** “#DN” represents information pertaining transcripts, which contain altered functional domains, predicted to act in a dominant negative manner. This field lists the description of the functional domain(s), which is altered in the respective splice variants e.g., “#DN EGF-like domain” in Example 10a.

[0654] Functional annotations of transcripts based on Gene Ontology (GO) are indicated by the following format.

[0655] *, ** “#GO_P”, annotations related to Biological Process,

[0656] *, ** “#GO_F”, annotations related to Molecular Function, and

[0657] *, ** “#GO_C”,annotations related to Cellular Component.

[0658] For each category the following features are optionally addressed:

[0659] “#GOPR” represents internal arbitrary accession number of the predicted protein corresponding to the functionally annotated transcript. This internal accession number identifies the protein in the amino acid sequence file “Protein.seqs” in the attached CD-ROM2, together with the internal arbitrary transcript accession number. For example, “#GOPR human_{—}281192” in Example 10a, is a protein sequence encoded by transcript N622284, which appears in the amino acid sequence file “Protein.seqs” in the attached CD-ROM2 and is identified by both numbers, “N62228_{—}4” and “human_{—}281192”.

[0660] “#GO_Acc” represents the accession number of the assigned GO entry, corresponding to the following “#GO_Desc” field.

[0661] “#GO_Desc” represents the description of the assigned GO entry, corresponding to the mentioned “#GO_Acc” field. For example, “#GO_Acc 7165 #GO_Desc signal transduction” in Example 10a, means that the respective transcript is assigned to GO entry number 7165, corresponding to signal transduction pathway.

[0662] “#CL” represents the confidence level of the GO assignment, when #CL1 is the highest and #CL5 is the lowest possible confidence level.

[0663] “#DB” marks the database on which the GO assignment relies on. The “sp”, as in Example 10a, relates to SwissProt Protein knowledgebase, available from the ExPASy-Swiss Institute of Bioinformatics website. “InterPro”, as in Example 10c, refers to the InterPro combined database, available from the European Bioinformatics Institute website, which contains information regarding protein families, collected from the following databases: SwissProt available at the European Bioinformatics Institute website, Prosite—available at the ExPASy-Swiss Institute of Bioinformatics website, Pfam—available at the website of Wellcome Trust Sanger Institute, Prints—available at the website of the Center for Bioinformatics and Computational Biology, Manchester University, UK, Prodom—available at the website of the Laboratoire de Génétique Cellulaire, INRA Toulouse, France; Smart-available at the website of the European Molecular Biology Laboratory, Heidelberg and Tigrfams—available at the website of the J. Craig Venter Institute.

[0664] “#EN” represents the accession of the entity in the database(#DB), corresponding to the best hit of the predicted protein. For example, “#DB sp #EN_NRG2_HUMAN” in Example 10a means that the GO assignment in this case was based on SwissProt database, while the closest homologue to the assigned protein is depicted in SwissProt entry “NRG2_HUMAN”, corresponding to protein named “Pro-neuregulin-2” (see entry 014511 at the ExPASy-Swiss Institute of Bioinformatics website). “#DB interpro #EN IPRO01609” in Example 10c means that GO assignment in this case was based on InterPro database, while the best hit of the assigned protein is to protein family depicted in SwissProt accession number “IPRO01609”, corresponding to “Myosin head (motor domain)” protein family (available at the European Bioinformatics Institute website).

[0665] The following two fields correspond to the hierarchical assignment of the differentially expressed sequences to a specific tissue(s), based on the EST content and EST libraries' origin within the contig.

[0666] *, ** “#SA” indicates that tissue assignment requires a contig, containing at least 3 ESTs, where at least 80% thereof are assigned to a selected tissue.

[0667] *, ** “#RA” indicates that tissue assignment requires a contig derived from at least two different EST libraries, originally constructed from a specific tissue.

### Example 10a

[0668] 251470 N62228_{—}4 #EST the_same #TAA_CD 269 296 #TAA_TIS ovary, #TAA_CD 269 296 #TAA_TIS ovary Tumor, #TAA_CD 269 296 #TAA_TIS skin Tumor, #TAA_CD 59 269 #TAA_TIS ovary, #TAA_CD 59 269 #TAA_TIS ovary Tumor, #TAA_CD 59 269 #TAA_TIS skin Tumor #DN EGF-like domain #GO_F #GOPR human_{—}281192 #GO_Ace 3823 #GO_Desc antibody #CL 2 #DB sp

[0669] #EN NRG2_HUMAN #GO_P #GOPR human_{—}281192 #GO_Acc 7165 #GO_Desc signal transduction #CL 2 #DB sp #EN NRG2_—HUMAN

### Example 10b

[0670] 445259 BE674469_{—}0 #EST BC006216,BE674469,BE798748,NM032716 #TAA_CD 0 2537 #TAA_TIS lung, #TAA_CD 0 2537 #TAA_TIS lung Tumor

[0671] 445260 BE674469_{—}0_{—}124 #124EST BC006216,BE674469,BE798748,NM_{—}032716 #SA Lung Tumor #RA lung_cancer

[0672] 445261 BE674469_{—}1 #EST the_same #TAA_CD 0 2537 #TAA_TIS lung, #TAA_CD 0 2537 #TAA_TIS lung Tumor

[0673] 445262 BE674469_{—}1_{—}124 #124EST BC006216,BE674469,BE798748,NM_{—}032716 #SA Lung Tumor #RA lung_cancer

### Example 10c

[0674] 314251 HUMM7BA_{—}0 #EST BF804381,BF805793,BF805830,BG978076,HUMM7BA #GO_C #GOPR human_{—}313276 #GO_Acc 16459 #GO_Desc myosin #CL 2 #DB interpro #EN IPRO01609 #GO_F #GOPR human 313281 #GO_Acc 3774 #GO_Desc motor #CL 1 #DB sp #EN Q14786 #GO_F #GOPR human_{—}313281 #GO_Acc 5524 #GO_Desc ATP binding #CL 1 #DB sp #EN Q14786 #GO_P #GOPR human 313281 #GO_Acc 5983 #GO_Desc starch catabolism #CL 4 #DB sp #EN Q14786 #SA colon, colonic, gut #RA colon_normal

### Example 10d

[0675] 723873 AA157684_T0_ProDG #EST

[0676] AA157684,AA157764,AK057980,BF355351,ProDGy933

[0677] #GO_C #GO_Acc 0016021 #GO_Desc “integral membrane protein” #GO_F

[0678] #GO_Acc 0005978 #GO_Desc “glycogen biosynthesis” #GO_P #GO_Acc 0003707 #GO_Desc “steroid hormone receptor”

### Example 10e

[0679] 723928 GeneID1007Forward_T0_ProDG #EST

[0680] AC018755CDS1,AC018755mRNA1,AW403840,AY040820CDS0,BF3 59557,

BF896787,BF898989,BF899932,BF900235,BF905509,BI518761,BI756629,BI 822428,BI906477,BI906754,BM550096,BM922784,GeneID1007Forward,Gen eID285Forward,ProDGy1006 #GO_C #GO_Acc 0005887 #GO_Desc “integral plasma membrane protein” #GO_F #GO_Acc 0007267 #GO_Desc “cell-cell signaling”#GO_P #GO_Acc 0005530 #GO_Desc “lectin”

### Example 11

### Description of the Sequence Files on the Enclosed CD-ROM

[0681] The sequences in the CD-ROM sequence files are in FastA text format. Each transcript sequence starts with “>” mark, followed by the transcript internal accession number. The proprietary ProDG EST sequences starts with “>” mark, to followed by the internal sequence accession. An example of the sequence file is presented below.

### Example 11a

>R42278_0
(SEQ ID NO: 41)
TGTTTTAGAAATCTCATGATTCCCAGGAAAAAAATTTTAAATTGTGA
TACAGGTTTGACAGCCTTTTAGTCAAATAAGTTAAAACACACACGC
AAACTCATTTACTCACTTTGCCATTATAATTCAATCACAAAGAAATT
TTGGCCAGGCGTGGTGGTTACGCCTGTAATCCCAGCACTTTGGGAGG
CCGAGGCAGGTGGATCACGAGGTCAGGGGATCAAGATCATCCTGGC
TAACATGTGAAACCCCGTCTCTATTAAAAATAAAAAATTAGCCTGGT
GTGGTGGCGGGTGCCTGTAGTCCCAGCTACTCGGGAGGCTGAGGCA
GCAGAATGGCGTGAACTCAGGAGGCGGAGCTTGCAGTGAGCCGAG
ATCGCGCCACTGCACTCCAGCCTGGATGACAGAGCGAGACTCCATC
TCAAAAAAAAAA

### Example 11b

>GeneID3Reverse #TY RNA #DE ProDGy sequence
#DT 18-JUN-1000 #DR 5 #LN 348
(SEQ ID NO: 1)
GTGGTTATTACAGCATGGTTCCCAGCCTTACAGTGTCTAAGTGCTTC
TCTTGTGTCCTGTAGATGTTGTGAAAAAGAAAAAAACAAAAAATAC
ACCACACTGTACTTTTTCCCCCTGCCCCCGTTACTGCCGGTGATTATT
ATTAAAAATTAGTTTTTTTCACATCATTATATCTGGCTTCCTATAAAC
AACAGCCTTAATTCAGTCAAGACTCCCTTTGGGGAATTCATTTTATT
AAAAATTGGTGTCTGGATACTTCCCTGTACATGCATAAATATGCATG
CATGTACAGAAAGACTGTATGTGTGTGCCTTGCACACACACCCATAC
CTCTCAGAAAAAGTGTTT

### Example 11c

[0684] >ProDGy1339 #OS Homo sapiens #DE ProDGy sequence #DT 26-JUL-

2002 #TY EST #DR 5 #AC ProDGyl339 #LN 132
(SEQ ID NO: 2)
CAGAAAGCCCAGAGTAGTCCCTGTAAGAAGCTGAGGGGCGCATACC
TCTGGGGTTTGGGTTCCCTTCAGGGAAGCGAAGGGAGATGACCTCTT
TCCAGGCTGGGGACCAAGAGGGCTCCCTAGAAGATATTA

### Example 12

### Description of the CD-ROM Content

[0685] The CD-ROMs enclosed herewith contain the following files:

CD-ROM1 (1 file):
1. Transcripts_nucleotide_seqs_part1/580,375 KB/Sep. 4, 2002/ASCII file/PC.
CD-ROM2 (4 files):
1. ProDG_seqs/395 KB/Sep. 9, 2002/ASCII file/PC.
2. Protein.seqs/95,546 KB/Sep. 9, 2002/ASCII file/PC.
3. Transcripts_nucleotide_seqs_part2/129,269 KB/Sep. 9, 2002/ASCII file/PC.
4. Transcripts_nucleotide_seqs_part3/27,060 KB/Sep. 11, 2002/ASCII file/PC.
CD-ROM3 (1 file):
1. Summary_table/570,042 KB/Sep. 11, 2002/ASCII file/PC.
CD-ROM4 (1 file):
1. Pat11_US5_Patentin.part1/604,186 KB/Apr. 27, 2006/text file/PC.
CD-ROM5 (1 file):
1. Pat11_US5_Patentin.part2/605,957 KB/Apr. 27, 2006/text file/PC.
CD-ROM6 (1 file):
1. Pat11_US5_Patentin.part3/594,390 KB/Apr. 27, 2006/text file/PC.

### Example 13

### In-Vitro Confirmation of Differentially Expressed Transcripts

### Experimental Procedures and Reagents

[0686] In-vitro confirmation of in-silico obtained differentially expressed polynucleotide sequences was effected utilizing laboratorial methodologies, based on nucleotide hybridization including northern analysis, RT-PCR and real-time PCR.

[0687] RNA preparation—Total RNA was isolated from the indicated cell lines or tumor tissues using the Tri-Reagent (Molecular Research Center Inc.) following the manufacturer's recommendations. Poly(A) RNA was purified from total RNA using oligo(dT)₂₅Dynabeads (Dynal).

[0688] Northern blotting—20 μg of total RNA or 2 μg of poly(A) RNA were electrophoresed on 1% agarose gels containing formaldehyde, and blotted onto Nytran Super Charge membranes (Shcleicher & Schuell). Hybridization was carried out using a DNA probe (SEQ ID NO: 3) in EZ-Hybridization Solution (Biological Industries, Beit Haemek, Israel) at 68° C. for 18 hrs. The membranes were rinsed twice with 2×SSC, 0.1% SDS at room temperature, followed by two washes with 0.1×SSC, 0.1% SDS at 50° C. Autoradiograms were obtained by exposing the membranes to X-ray films.

[0689] RT-PCR analysis—Prior to RT reactions, total RNA was digested with DNase (DNA-free™, Ambion) in the presence of RNasin. Reverse transcription was carried out on 2 μg of total RNA, in a 20 μl reaction, using 2.5 units of Superscript II Reverse Transcriptase (Bibco/BRL) in the buffer supplied by the manufacturer, with 10 pmol of oligo(dT)₂₅(Promega), and 30 units of Rnasin (Promega). RT reactions were standardized by PCR with GAPDH-specific primers, for 20 cycles. The calibrated reverse transcriptase samples were then analyzed with gene-specific primers either at 35 cycles, or at lower cycles (15 and 20 cycles). PCR products of lower number of cycles were visualized by southern blotting, followed by hybridization with the appropriate probe (the same PCR product).

[0690] Real-Time RT-PCR—Total RNA samples were treated with DnaseI (Ambion) and purified with Rneasy columns (Qiagen). 2 μg of treated RNA samples were added into 20 μl RT-reaction mixture including. RT-PCR end product 200 units SuperscriptII (Invitrogen), 40 units RNasin, and 500 pmol oligo dT. All components were incubated for 1 hr at 50° C. and then inactivated by incubation for 15 min at 70° C. Amplification products were diluted, 1:20, in water. 5 μl of diluted products were used as templates in Real-Time PCR reactions using specific primers and the intercalating dye Sybr Green.

[0691] The amplification stage was effected as follows, 95° C. for 15 sec, 64° C. for 7 sec, 78° C. for 5 sec and 72° C. for 14 sec. Detection was effected using Roch light cycler detector. The cycle in which the reactions achieved a threshold level of fluorescence was registered and served to calculate the initial transcript copy number in the RT reaction. The copy number was calculated using a standard curve created using serial dilutions of a purified amplicon product. To minimize inherent differences in the RT reaction, the resulting copy number was normalized to the levels of expression of the housekeeping genes Proteasome 26S subunit (GenBank Accession number D78151) or GADPH (GenBank Accession number: AF261085).

[0692] Semiquantitative PCR—RT-PCR reaction was performed with sample specific primers, for 16 cycles. PCR products were used as probes. Labeling procedure was carried out using “Random primer DNA labeling mix” according to manufacturer's instructions (Cat. No: 20-101-25). Briefly, 25 ng of template DNA were denatured by heating to 100° C. for 5 minutes, and then chilled on ice for 5 minutes. Labeling solution contained 11 μl of denatured DNA, 4 μl of labeling mix solution (Biological industries), 5 μl of ³²(p)dCTP (Amersham, Pharmacia, AA0005). Labeling was effected for 10 minutes in 37° C. Removal of unincorporated nucleotides was effected using Sephadex G-50 columns. Prior to hybridization, labeled DNA was denatured by heating to 100° C. for 5 minutes and then rapidly cooled on ice.

[0693] Southern blotting—PCR products were separated on 1.5% agarose gel and size separated. The gel was denatured by two consecutive washes for 20 min in 1× denaturation buffer, containing 1.5M NaCl, 0.5M NaOH. Thereafter a neutralization procedure was effected by washing twice for 20 min in 1× neutralization buffer, containing 1.5M NaCl, 0.5m Tris/HCL pH=7.0. Blotting of the denatured DNA to the nylon membrane was performed overnight with 20×SSC. DNA was UV crosslinked (Stratalinker) to a nylon membrane prior to prehybridization step. Prehybridization was performed using EZ-hybridization solution (Biological Industries, Cat no: 01-889-1B) at 68° C. for 1 hour. The DNA blot was subjected to Southern hybridization using specific oligonucleotides end-labeled with adenosine 5′[γ-³²P]triphosphate (>5000 Ci/mmol, Amersham Biosciences, Inc.). Hybridization step was effected at 68° C. for 16 hours.

[0694] Following hybridization the membrane was washed at gradually increasing stringent conditions: twice in 2×SSC, 0.1% SDS, for 15 min. at room temperature and twice in 0.1×SSC, 0.1% SDS, for 15 min, at 60° C. Radioactive signal was visualized by autoradiography.

### Example 14

### Colorectal Cancer Specific Expression of AA535072

[0695] AA535072 (SEQ ID NO: 39) is a common sequence feature to a series of overlapping sequences (SEQ ID NOs: 4, 24-28) with predicted amino acid sequences provided in SEQ ID NOs: 35-38.

[0696] The indicated tissues and cell lines were examined for AA535072 (SEQ ID NOs: 39) expression by RT-PCR analysis. Primers for AA535072 were GTGACAGCCAGTAGCTGCCATCTC (SEQ ID NO: 5) and TCCGTTTCTAGCGGCCAGACCTTT (SEQ ID NO: 6). PCR reactions were denatured at 94° C. for 2 minutes followed by 35 cycles at 94° C. for 30 sec, 64° C. for 30 sec and 72° C. for 60 sec. All PCR products were separated on an ethidium bromide stained gel.

[0697] As shown in FIG. 7 amplification yielded a major PCR product of 1000 bp. Evidently, AA535072 expression was limited to colorectal cancer tissues; adenocarcinoma, colon carcinoma cell line and colon carcinoma Duke A cells. Since colon carcinoma Duke A cells represent an early stage of colon cancer progression, differentially expressed AA535072 can be used as a putative marker of polyps and benign stages of colon cancer. Furthermore, corresponding protein products (SEQ ID NOs: 35-38) may be utilized as important colon cancer specific diagnostic and prognostic tools.

### Example 15

### Bone Tumor Ewing's Sarcoma Specific expression of AA513157 (SEQ ID NO: 7)

[0698] The indicated tissues and cell lines were examined for AA513157 (SEQ ID NO: 7) expression by RT-PCR analysis. Primers for SEQ ID NO: 7 were GAAGGCAGGCGGATGCTACC (SEQ ID NO: 8) and AGCCTTCCACGCTGTACACGCCA (SEQ ID NO: 9). PCR reactions were denatured at 94° C. for 2 minutes followed by 35 cycles at 94° C. for 30 sec, 64° C. for 30 sec and 72° C. for 45 sec. All PCR products were separated on an ethidium bromide stained gel.

[0699] As shown in FIG. 8, amplification reaction yielded a specific PCR product of 600 bp. As shown in FIG. 8, in the presence of reverse transcriptase (indicated by +) high expression of AA513157 was evident in both samples of Ewing sarcoma, while only residual expression of AA513157 was seen in Ln-Cap cells, brain and splenic adenocarcinoma.

[0700] To substantiate these, Northern blot analysis of AA513157 was effected. The following primers were used, GAAGGCAGGCTGGATGCTACC (SEQ ID NO: 10), GGTAGTATAACCGGGCTCTGT (SEQ ID NO: 11). FIG. 9 illustrates RNA expression of AA513157 in various tissues. Several transcripts were evident upon Northern analysis: two major transcripts of 800 bp and 1800 bp from ployA RNA preparation and total RNA preparation, respectively. Expression of both transcripts was limited to the Ewing sarcoma cell line. Low expression of the 1800 bp transcript was evident in Bone Ewing sarcoma tissue as well.

[0701] These results corroborate AA513157 as a putative Ewing sarcoma marker and a putative pharmaceutical target.

### Example 16

### Colorectal Cancer Specific Expression of AA469088

[0702] AA469088 (SEQ ID NO: 40) is a common sequence feature to a series of overlapping sequences (SEQ ID NOs: 12 and 29-31).

[0703] The indicated tissues and cell lines were examined for AA469088 (SEQ ID NO: 40) expression by semi quantitative RT-PCR analysis. Primers for AA469088 were CATATTTCACTCTGTTCTCTCACC (SEQ ID NO: 13) and CAGAATGGGATTATGGTAGTCTATCT (SEQ ID NO: 14). PCR reactions were effected as follows: 14 cycles at 92° C. for 20 sec, 59° C. for 30 sec and 68° C. for 45 sec. The PCR products were size separated on agarose 1.5% gel, and undergone Southern blot analysis using the PCR products as specific probe, as described in details in Example 13. The visualization of the hybridization signal of the PCR products was performed by autoradiogram exposure to X-ray film.

[0704] As shown in FIG. 10 amplification reaction yielded a major PCR product of 484 bp. Evidently, AA469088 expression was limited to colorectal tumor tissues, normal colon and adenocarcinoma with only minor expression in the spleen and kidney.

### Example 17

### HUMMCDR—A Lung Cancer Specific Marker

[0705] Real-time quantitative RT-PCR was used to measure the mRNA steady state levels of HUMMCDR (SEQ ID NO: 15). The following primers were used CTTCAATTGGATTATGTTGACCTCTAC (SEQ ID NO: 16) and CACTATAGGCAACCAGAACAATGTC (SEQ ID NO: 17).

[0706] Real-time PCR analysis (FIG. 11) indicates that SEQ ID NO: 15 is specifically expressed in lung squamous cell carcinoma with an evident 2-10 fold higher expression than in normal lung samples.

### Example 18

### SEQ ID NO: 18—A Lung Cancer Specific Transcript

[0707] Real-time quantitative RT-PCR was used to measure the mRNA steady state levels of SEQ ID NO: 18. The following primers were used GCGAGGACCGGGTATAAGAAGC (SEQ ID NO: 19) and TCGGCTCAGCCAAACACTGTCAG (SEQ ID NO: 20).

[0708] Real-time PCR analysis indicates that SEQ ID NO: 18 is specifically expressed in lung adenocarcinoma samples and in lung alveolus cell carcinoma (FIG. 13).

### Example 19

### SEQ ID NO: 21—A Lung Cancer Specific Transcript

[0709] Real-time quantitative RT-PCR was used to measure the mRNA steady state levels of SEQ ID NO: 21. The following primers were used GCTTCGACCGGCTTAGAACT (SEQ ID NO: 22) and GGTGAGCACGATACGGGC (SEQ ID NO: 23).

[0710] Real-time PCR analysis indicates that SEQ ID NO: 21 is specifically expressed in small lung cell carcinoma and in adenocarcinoma (FIG. 14).

### Example 20

### HSGPGI—A Lung Cancer Specific Transcript

[0711] Real-time quantitative RT-PCR was used to measure the mRNA steady state levels of HSGPGI (SEQ ID NO: 32). The following primers were used GAGCCCTGTGCGCCGCTCAGATGTG (SEQ ID NO: 33) and AGCCCAAGTTGAATCACCAACCAG (SEQ ID NO: 34).

[0712] As shown in FIG. 12, real-time PCR analysis exhibited specific expression of SEQ ID NO: 32 in lung adenocarcinoma and lung squamos cell carcinoma, as compared to the expression in normal lung tissue (2-25 fold).

[0713] It is appreciated that certain features of the invention, which are, for clarity, described in the context of separate embodiments, may also be provided in combination in a single embodiment. Conversely, various features of the invention, which are, for brevity, described in the context of a single embodiment, may also be provided separately or in any suitable subcombination.

[0714] Although the invention has been described in conjunction with specific embodiments thereof, it is evident that many alternatives, modifications and variations will be apparent to those skilled in the art. Accordingly, it is intended to embrace all such alternatives, modifications and variations that fall within the spirit and broad scope of the appended claims. All publications, patents, patent applications and sequences identified by their accession numbers mentioned in this specification are herein incorporated in their entirety by reference into the specification, to the same extent as if each individual publication, patent, patent application or sequence identified by their accession number was specifically and individually indicated to be incorporated herein by reference. In addition, citation or identification of any reference in this application shall not be construed as an admission that such reference is available as prior art to the present invention.

### CD-ROM Content

[0715] The following lists the file content of the three CD-ROMs which are enclosed herewith and filed with the application. The content of the CD-ROMs is incorporated-by-reference in it's entirety as if fully set forth by reference herein. File information is provided as: File name/bite size/date of creation/operating system/machine format.

CD-ROM1 (1 file):
1. Transcripts_nucleotide_seqs_part1/580,375 KB/Sep. 4, 2002/ASCII file/PC.
CD-ROM2 (4 files):
1. ProDG_seqs/395 KB/Sep. 9, 2002/ASCII file/PC.
2. Protein.seqs/95,546 KB/Sep. 9, 2002/ASCII file/PC.
3. Transcripts_nucleotide_seqs_part2/129,269 KB/Sep. 9, 2002/ASCII file/PC.
4. Transcripts_nucleotide_seqs_part3/27,060 KB/Sep. 11, 2002/ASCII file/PC.
CD-ROM3 (1 file):
1. Summary_table/570,042 KB/Sep. 11, 2002/ASCII file/PC.
CD-ROM4 (1 file):
1. Pat11_US5_Patentin.part1/604,186 KB/Apr. 27, 2006/text file/PC.
CD-ROM5 (1 file):
1. Pat11_US5_Patentin.part2/605,957 KB/Apr. 27, 2006/text file/PC.
CD-ROM6 (1 file):
1. Pat11_US5_Patentin.part3/594,390 KB/Apr. 27, 2006/text file/PC.

LENGTHY TABLES
The patent application contains a lengthy table section. A copy of the table is available in electronic form from the USPTO web site (http://seqdata.uspto.gov/?pageRequest=docDetail&DocID=US20110183924A1). An electronic copy of the table will also be available from the USPTO upon request and payment of the fee set forth in 37 CFR 1.19(b)(3).

The application's sequence listing, which the Patent Office published only in electronic form, follows.

SEQUENCE LISTING (1034312 sequences)

SEQ ID NO: 1 - DNA, 348 bp, Homo sapiens
gtggttattacagcatggttcccagccttacagtgtctaagtgcttctcttgtgtcctgtagatgttgtgaaaaagaaaaaaacaaaaaatacaccacactgtactttttccccctgcccccgttactgccggtgattattattaaaaattagtttttttcacatcattatatctggcttcctataaacaacagccttaattcagtcaagactccctttggggaattcattttattaaaaattggtgtctggatacttccctgtacatgcataaatatgcatgcatgtacagaaagactgtatgtgtgtgccttgcacacacacccatacctctcagaaaaagtgttt

SEQ ID NO: 2 - DNA, 132 bp, Homo sapiens
cagaaagcccagagtagtccctgtaagaagctgaggggcgcatacctctggggtttgggttcccttcagggaagcgaagggagatgacctctttccaggctggggaccaagagggctccctagaagatatta

SEQ ID NO: 3 - DNA, 114 bp, Artificial sequence
  Single strand DNA oligonucleotide
gtagtataaccgggctctgtgattccagaggacatttagctggaaggtaccggcatggcacaggtcaccccctccctaccccatacttcctgctgagaaccagtgggtcacagg

SEQ ID NO: 4 - DNA, 10453 bp, Homo sapiens
ccctccctctcacatttccaactcccaaggataacttgtcgctcgcttcagacgcccatggcttctttcagcccctgggactcagctttctcctctacctcttttgtctatttgtgcatttgatgtttctctgggcgcgcccttggatctgcttctctcttgccttttatattctcatattctcatattctctctctctctctctctctctctctccctccctccctccctccctctctccctccctctctccctctctgcctctctccctctctctctcttctctctctctctctcttctctctctcttctctctctctctgctctctccggccatctgggcgctgctcctccgcgcctctggcctccccgcggcgcgccaggcccatctcctcaccagccgctctgggatccgacggcgccgtgggtgggggcaggtgagacggccgagccccgcccgggcggaggcaggaagcgctcgcgccaatccccctcccggaccctgtcctcgcccgccactcaccggcgccaggggaacgcaggagcgtgagccccttcgcgcccccagcgccgtcggcgtcgctgccccagacacagacactgcctcgagaggcctcacagaggcgggggcagaaggcggcgacccagagccgccacatcccccgccttgggcgccgtcacagtccccagacgccctggactcctgcagtctacgaagacgcgcgggggacggcgtggttccgagaggtaggtgaggaggcgggcgcagcccttcctctcgcagctggggactgcggcgtgaaaggcccctctccaagctgggcagccccgtggcccgagctttcaggaccaaccgcccgtggcaggcgtgggcttcccggggccaccggcttaaccttgatctccagaccgaggcagcttcccgggtagggcctcggggcgcacccgaaaacgccttggcctccctgtccgctcgcacccgaccctacctctccaacaggtgtgtgtgtggggaaagggggtcgcctcccctcgttctaccggaaaccctggctccccagagccgagtgctcagtgccccgcccagcctgaggccctgcgtcctgggcctcctgctcacaaccccggattccaggcggatgccgtgagagaggcaagggccagacgccctgagcagccttgggggtgaggaatcgcttgggatggaagaagggccacttttcctaacggaaattaggaattggcctggaactcttggtctagacagaagcccccagctccccaaggtgcagaatcagctctcccgcgcgctgtctctctagctgcctcctggcgtggagggggcagaatacttgggggagtctcttgctttggcttttgggggcctcataggttttcttcccctctggactgtgagcagcctcctgcctgagagagcgtgtatctgaatctaaggaatgccaggagacgccatcttatttgaaacccacactcacaaaaacggggcatgtgcatttttgtggagggacctgttgtttatgggagtgggcagagggcatccaaaggatttcaaactgtatggactgactcatgggtcaatacaaaaattattcgcctttgaaaaggcatgtaaagaaaagcaagcataaaggggtgtgcatcgtgcatcgtgggtattgtggagtctgagaggaattagtaactcgccggagtcggctaggaatcttatatgacagcaactgtgcctctcggagtagtcaagcaccgtttaaagattgaggatttatacagacatgcgaaagagatgtgaaattatgtgctcccaactgtgctcaataataaaggcagtagaagggaaattcatattttcatctatatgcctcccccctcgcaaagtagaacattgcatggtatatttcacatagtccacataccagaggcggaatgtgcaactgactgcccaggactgtgctttccagtacaaatggaagcacaaagatgcctaatggagaagagttaagtgaaagttctcttttctcagtgcacttccctaaccctttgaggaagcaagtctggggggcctttcctgataggatcttccctccaaatcccttttggagctggagctcctctctttccctaaagtctggcgcacttggctccaagtccccatttctccagtccagaagggatgaagcctcctccaccccaaacatatagcctttggctcgctgggaggagaattgctcaccttctgcggtggtttagaacaccaccctacacagggatacacatacacagtgccccagaggaaatgcaaagaaaggttttgctagtccaagcaaggtgttgtgggagacctcagagacccttagaaagagcctcactccccacactgcaacttgaaagacccaggacatccctcccacccccaggacagacagggttctcaccagctgggaacgcacagagcccgtgacaacaggaggatctgttgggctgggaacttcacatcccacccaccctgcctccaacttctttttttttctggccagattaaaagtcaagcttaaagtgctgttgggttagagagtttcattgttttagtctattggtttctctccctcattttcttctccctcatctcccttttactcccaggttttgcccattttttttctctctctccacacagaaaatctgtgaattttctgggcttgaacggaaggaatgaggagggaaaggagggaatatttgacctatccaggcagcactcagagctgtaattgacaccaagtcatcctagtagaccttgtcctcacaggcttagaggatatttgattccagaatcccccaccagcaccccaagatccagtggtacctccttcctccttggggcttctatagttttcaaaaatgggagaaatcaaaaatgccatcattattccagtgaccgggtgtggagggagtctgcagtttggccagaggcctggtctcagagaaaggagtcctgagggctggggggttggggcaaggcctagggccaacttggttctgaccttgcctgccagtagagaatcttgggctcttcaccaagtaaaggcaagatcaagggactggaggtctgagtccctctcttgcctaactgccccaagggccccagaaactactctgggccaaaaatcagtaatagttgaaagaaagaaacaaatactgaaaacacccagatttataatctgcttagacacccaaactcatccttaaagcagtaaataaaatttatctccttgactgccttgcaactttctactcagtttggcaatgtgtagatggggtcagcttgagtttcagagcttgggggtccagcactaaatgtctagagagctagatctggggcctctcaccccctttcctcatatacctcctcttgcttccttcccctcccagggcttctcagaaagtgacagctgacttccttttagaactgtgaaatcccacaatttcagaggatttcaaattccttgaacttcaggttgagagctatttggattaatcagagaagtttgtgtctggaaaatgatgccagatttagccagaaaactgaaagaccaaatgctttactttttttttcctttgtctgatctcagtgcttatcaggtcaaccttcacctttaaaaacaccctggtggcagtatttctttgccatcactgtctgtaaagcaaagggcaagcatctcagggcttttagttgggccgggaattcaaatgtctcctttctcaagaagatgccaaagtggccaccctcagcccactttccgtccttacctcctctgccctttccccagctgtagttataggaataatggcctttaacttgcagagatcattaaggccaaagccctcactccttcccatctctcctcttggggccgtctgagtcgcttcctccacgaccctcctcttttgaagcactccctagtactgttaaaggccgaatttgggctggagcgaagatgggggctcagtccaaaataacctagatattaagtaatagtaatgatttttttaaaaggtaactatgaactctcaagcctcgaccacccagtaaagttcctccttaaattgttgccggccctgggtgcagacacgcaaggactggccagaacgcgagaaacttcttcaaggagagagaagtcagggcccaaattcctcatgctttaaagcagtataagaggagagagtccaaatttttactcgttaaacctcctcttacctcttcctcaggtctgttcactccttggtccagggaccggagctcctgggcttcgaggtgaaccagagggaacgtggctccccgcagcaacctttttgcttcagggctcctcctgggggctgagtggtcccctttgctttgctattcccgctgcggctcctggggggacagctccgtgggaccaggtctctcagggggtggagggtcgccgaagtcgtgaccaggagttggagaccgctgcgtccctccgctgcggacctgcttgggactgcgtggaatggaccaagtcctccgtctaggattccctagtgctcgacggcgcgcactccgcagtgctccgctggagatctgcacctgtgtcccggggctgggcgcagagtgaagatctccgtgcacgctgctgaccggctcggcgactgcctccctgctgtgagcaggagaacaggaagtctgcccgacagggaggtggccgggcgggagcggcagagtcggcgttgagaggagggtcagctgcacctcgggattccgcgcgccttcaactccctcttgcggacagcccagccgcgggttggcgccgcagtgatggaacctggggagggcctagcttagagtcccagcagtccagaggaggggaccagagcagaggattaggaacggggctttcatatccagcctaggcgcccagaagcggcacttaaggggcgaagggaggccgcaattacaaaggtgcgccctccgacgcctcaacgtcaagggcctgtagattcacaacctcctctgtcggggatgggggaagatgaggtgggatagggaggctatgtccagccaccagcgcagggagtggctctaaacgctgacccaacgcctcgccccaagcgggatcttggcgcgcagatagaccgagcccgtggtggggcgccatgccgggctccctcgcccttaccgagtgagcatcttcttcccaatttgctgctcagagagggagtgggtcctagtctctggatctcagcgctcacgactacctcgctgctcctaacgaacagttcatctgctctctcctggccgcctgcgccagcgccgctcacccacttttccagccctggatctcctctccccggatgcgtccttccttcccacaattaacaaatgatctagcgaaaccccgccaggtccccggcagagaagcacctccatccgccctaaccaaccaattaatcagatcattaaggagcctgaggagttgtaattgggtggtttgggacgagggggcgctgaggaggtcattaacctccccgtaaagatggggaacggagacgcgcctggccgcctctgccgcccctgccgcccctgccgcccctgtgggctcttcttagcacgcgggttttggccactccacctgcctgctgcgctccagttcccgcctccagtccagctatttcacttctctctttgtcattctccgtcttttctctggcaaccgtccagggcccctttctttgtgcctacttctgtctacctgtccagctgcctcttgcaccctttttgtggcccagcggccaagaaaactcaaaggtcatggctgttggcccccgctgatgatctctgggctcccgggtctcagacaattcctcagggctggctagaaatggtgggagctggagatttggacactatacccattccccaagagaagggcatttgcaaaggggaagtttcctgaaacgttcaattctctttcggtatgagatagctttggacaaggtgacaaatggcggaaggtccaggccccagtggataaaagctccatattaatttaattagagacacagagaccttgcatactccttgtctgcacaggcaaatatggaggaggtagtgattgggtgttgtggcctgactggtctcagtctaagagtccccagcacctgtgacctggttcctggtgttccaagaagtccaggtgacagtatctgttcaaccttgtggaacaataaattgtttgtccttttaatttgtcttgtcagatccccaagtatattacaatgcctccctctgcattacatttttggttggttgtgtaagaatggtggatgagaggttcttaacattttggggccactccctgatatgataatttaaattttgatgaacaatattgattcccctctacccagaaaaaaaatgtgcgtatgtagtactcaccaaatcccacaatttcagagagtttcagactcctcagacaccaagttaacaactacaatttggatagatcaaaggagctggtgtctgggaaatgccgaggccaaatatagtcagtttacgtaggtcttcaccctttctcttggctgacatctccattttgccaggccagccttcacctgtaaaaacactccggtggcagtgtcctctccccaccattacctgtagggtctgggctcccagtgggagtcagtctttccttcccagcagctgggagcctgagaacgtgggaagagctttgctggggaaagctgatcttagactggccagcagttggaccagcaatggaaggaaatcaggcttaagcagcttcccagggactaaaaaccataccagaactcctggaagggaagactatctggaaacagcctcctaactaaagctgcctataagtcaagcaaatggggactgggcaatagaatgttcctttgtgtcccttattgactcacttattccatttcctcagggacccagctctacttggggctgatttagccaaggttagaggctggggaataccaaatgctgaacttaaaggggaaggatttgctccctaatattttagtaatcttgtttgtaagagataaacagcatgtgacccctgactatcctgggggacctcctaattacgcccagcctcttgtgttgtggcctgtttagacacagagtgtaaagaaggacttagctcttctttcccggcctattaagtttcctggccatctccccacatgtgtgaattgaccaagctagatctcccaggagaaaaatcaggcttctttggggtctgggaagtaaaaagaaacttcctttttcaaggactatgttaagacaaattaggagaactggaaattatctggctaattgtaccctccccctccatacatacttacactccaaacccaagccctcctggctgctcctcaattgtctatacatttcaaacaaatgtgacttggcacaggaaagactccaactcatttctagttgcccctctctgtgctgcacaaccaccacccacctgcccagcagttcgaggctgtgacaagaagccaatggttggctaatagtattcagacccctgcctgaaaatacaaagaaaaaaataaacaattctcttcttgggacagcttaaactggataatcttggctgtgaaaacctgacctaaatgcttttaatcagagcagaagaaatatatgctcatttgctccctactttactaattaaagaaagctaattggtgttctcagaaacttccaactgagggtcaggagcctctagccatctctttgcctgccccacccctccctgcactgggccatctgcaccatggagttggcctttttctgatagacaattagaagggggtgctcccgaccttctggctccgcccctgcactaggacttggccctgaaaaggcagtgctgctattggccagaagttcttgcccagcaggcttgtcttccttcttgtgtcctggacttgtttctaggagccaagacctcttgctggctgccacatcggcactgccaaccggtggggtgcagccctgctgaagccccagagctcagcccagtgctgggcacatagtaggcgctcaggaaatgattgctgaatgtggaatgaaagtccccagcagacaaaaggctgtgacttctgttagtggggtggtggtcctctggggcgagtgtatggagaacttcaaggcctcctcctggctgcccaggaagtaggtaagacctgatttttgtcaagcgtttcttagatgttttgtttaattccagcttcctggccccctatttcttgtctacccattttctaaggcaggaccgtgctcaccacagcaaagggaaataactccttgaaaagccaaaggaatacaagccaccacttctcagacctttcccctatgagatccagatactacaggctaaagggagtttgaacctgaaatgagccagataattgccccaattctctgtaccttattgaagaggtagttacaggccaggaagtcccagaaatatttattcttgtgactctcacaaaatggaaaagggtctcaatttttgtttctttaaggaacttgtgttctgcgtctgtgtctacactgcctcctctcaccaaccaaattgtctagcccccctccagttacgctagaactctgctttatcttcaaggaagaaagggagtggggagaagttacctctaaaccctccagcatggccatcaattttctgaataatttggaggtcaacatgcttttggaaaagtgtttggaaaacgtttgggggtgaaaagaaatgttgcctaactggcctttactcacggagtgaccatcatctcagctagttagtgtatgagcggcaccagcaccccggccatgggtgtctgtgctgagcctctgaaagttgacttatcctttggggagccctcggaaagacacagctggtatctatgggaatggctttggggtgtcctttggcaccatacagataattttgtttttttaattggaatccatggcctgggttcttgggatgggggtagggggaagccacaaagcccctggaaatgtatgcaaaacatatgggtgtgcaggtgcatcatcctaaggctatggcctcttcagtttttccaaagagtctaagactataaaaggtttccatctccttttctcagccagggagccacagagacccaggccagcagtaggctgggagccagcacaccggcccccaccaggtgcccggtaggggatgggtaataacactcttgaatggtctggaaactgctggcccctcagtcctgccgtcctcccagagggaaatcctaatagaagaagtgacagccagtagctgccatctcagtattttgaatgaaaatataacatgataaagagcaaatgagggaggctggaggggcctccccatgcaaatactggaatatgaatgttggccagaaataagatacttcctgccctccagctgttaaagagctccccaattcctcccttttggtgctaggaaggggccagagggcactgcccccagaccaccacccacctctggagagctggggccgagtgggactgcctgcagcagagttaacccttcagaaaattcaaaacctatactgcctagtattttccctgcccgtttattttttaatcagatttttaaaatatccagcagcactttggtgccttttcttggggttggggagtggggttatctatgtgtgtatctatgggaaggtgggtgccttcagtgcactaaaccccctcttgggcctgcagctggacctcactcctgtacctgaacactctgcctgagcctgagctaatcttagccatccattgtgtctcaaaactgttttggaggtgaataactgtgaggcaggatggagaaccttttgctctcccatccagaagggcacctaaccaggcccctggagcagacaaaaggagcaggaagtcaatcacttcgatcccagttctctgaagcccaagaagaaaacggattttccttcgttttggttcggaggcctagtagagaatttggattccaccaagttctcttttttcaaaaaaagtaaacggtccagagcagacaaaaactgtggaaacttgaggcctgggtagtagtggttttgtttgattttgaggctttaaagagataaggagacggtggtggagctccgccacgccgcgtggctctcacttccacgccgaggaagaccgaccggcccctaggtttatcctctgggagcccccggcccaatcagcccccttcaggccttgggagtcaccccgagtcttatcttctgtccccttccagcaagtacccggcaataaacgggcagggctgggcaaaggtctggccgctagaaacggaaaaggaaagagaaaagtaaagttaaa

SEQ ID NO: 5 - DNA, 24 bp, Artificial sequence
  Single strand DNA oligonucleotide
gtgacagccagtagctgccatctc

SEQ ID NO: 6 - DNA, 24 bp, Artificial sequence
  Single strand DNA oligonucleotide
tccgtttctagcggccagaccttt

SEQ ID NO: 7 - DNA, 1302 bp, Homo sapiens
aacgtgtgcagtgaaagatgccagacgcaaagccacggggtagaggattccttcactatggaaaatccggagcaggcaaatccatggagacagaaagcagaggaggaggtcgaggctcagagaggcgaggggggcctacccaaggccatgtcattgagagaatgaggagccaggatccaaagaaggcaggctggatgctacctcctgggaagactccatgggccatggggacaatcggggacatttgtggctgagcccctgcaggtccggggcctcagagcacggaattaactgcatcctcagctcaccggctccctgtcaacagccctcctcccacacccaacgcacagacacaggaaaaggaagggtcgcagagctcctagtgagctgggggcagagacggaagccttccacgctgtacacgccacggcctggcccatggcacagaggagcagcctggggtctgagaagtcacacagcagagttagagccaagtctgagccagtgccagctctgcaccctttccagtgatggcacagccgcgtggccaggggcagccggcaccctcactcacagttcgggccactcataaagtatgagagtcaacagccaaacccttacattttaaggacgctccatgttctggaacaatccacccatggtggaggggcagggctggagggcctgtgtcttcaggctctgaggaacaccacggggccgtcaagtggacggagcaaatgtgcctgccggtgctcaggcctgtcccaggctcgtggccaaagccatggaggtgacagattccagcctgagattctctcttcctggctgtgtgactcaggccctgtgtcacgtgctggggttcagtgtccccgtgtataagatggagaggactgtccctccctctcaggctggggtagtataaccgggctctgtgattccagaggacatttagctggaaggtaccggcatggcacaggtcaccccctccctaccccatacttcctgctgagaaccagtgggtcacaggcggccatcgatgggctgatggagtcaaaaattagaagtgtcctcattccctgtgtcacctcctgttgtcattcccattctctcatagtgactggggcgtcccagtcatcggtacagtggccacatcctcccaattgccacccgaggagtgcctgaaacctcggccgctggttgttccagtgggcgcacggctccccaggcaggcggaagtcccaccctcgcccgcgtggggctcatgatggctcggatttcaaaatatatgagcaactgaaagac

SEQ ID NO: 8 - DNA, 20 bp, Artificial sequence
  Single strand DNA oligonucleotide
gaaggcaggcggatgctacc

SEQ ID NO: 9 - DNA, 23 bp, Artificial sequence
  Single strand DNA oligonucleotide
agccttccacgctgtacacgcca

SEQ ID NO: 10 - DNA, 21 bp, Artificial sequence
  Single strand DNA oligonucleotide
gaaggcaggctggatgctacc

SEQ ID NO: 11 - DNA, 21 bp, Artificial sequence
  Single strand DNA oligonucleotide
ggtagtataaccgggctctgt

SEQ ID NO: 12 - DNA, 4128 bp, Homo sapiens
tgagaatatgagaatataaaaggcaagagagaagcagatccaagggcgcgcccagagaaacatcaaatgcacaaatagacaaaagaggtagaggagaaagctgagtcccaggggctgaaagaagccatgggcgtctgaagcgagcgacaagttatccttgggagttggaaatgtgagagggaggggcgaggccgaaggaggctgagaaggggagggggcgctcacaccctgggcgggaggcgactgatccacacttagggctccgaatccggagaaagagagcgccggaccctcctccgcccacctcccgccccagccgcagcccagcgacttcccgccatcctcggccaccgagcggctcctgcctggggttgttccaccgggatggctgcaccaggctgaaggtgcaagcttaaagtgttgctgccagacctttcttctcttctaatttaccaagtgaagaatgttgaaatatccaactataatttgtggatttctcctttcaatgctatcatttttggtgcttcatgtatttttgaagctctattattagcctctcttgaaccttcacagtccagccgagctgccatctcttcaaggaagttttccctgaagccctcaggtagacccgtttttccatggcggccacatcagcatgcagcacatttaattggaagtctccacatatgagttggttttccttacttaaaatatgcttatcatcccttggaggtattgactgctgcctcatgaaggctggtcctgtctctatagtgaatattgtgcacctcagggtagaatggagagcagaagacttcaaatcaggcagtctgggttcagaccccaattctagtgctaaatagctacgtgactttaggccgattgtgtgtgacttccctgagccccagtctctttgcctgcaaaatgagaaaaattataacaatgtcatcggttgttctgaggattctgagaggaattagtaggagagagaaataagaagctgcgggcctctacagagccattcaactggcatttcggaagatgttgcccatcagagtcagaccttcttagcatcttccggctgggcccaaacttcccaagaccatttggacaaggtcatctctatcccaccatggcctcctcccagaggaggagaagaatcatgctgttacagcagaaccgaagatttgggcaagggagctaatgattatgttctgcgtcaggtcagagatgggctgggaaagccactccaaagccaagacaagcagtttcctggaaaaagaaggctgcgcggagcccagagtggcctggatcctgcctcatttcctggaccagctccttaggtggttactggattgccaataaagcagagcttattaaagtcaacgagctcaggcttcatcgccgccatggtatccaagcaccagtctgtctgggatttcatttgccagatggacaaaggagaggttgttccaatacatatcctgagtggtgggggtggggagagaaggggaagaatgctctctagagaattctctttgtcctctgaagtaaatagagatcatgtcttccccagccacactcagtgatctgaatctcttggactgtggatttttcctttacctgctgtgaagccttgaaaagtatgaattagcttgataatgatcctctaaagatgttcaagagttaaagacgtgtttaagttcttcaggcaatccaatatgactacgggtttccaaaaatttgaaggaaactgaaaatcatagttcccaaaccagatattttccggtgtccagatgttcactggcatgcaaaccaaatgtctggattatgagctccttttttcatttctttttatcagcttacatccagatgttggatccaactggtcagaggcctggggcagagacagaaatcaaatctagggtgttcatctagagtctcctgctcctccattcctgcttcctcctcacgctgcccccacatcctccccaactcaccttcatgctacatctcggcaaatacagctcatatccaggcacggtgcagcccttgacagctgggtccgcaaaggcagatcgggtatatctttaaagaaaagttatcttaaccattgagaagccttccttcctcagaggagagcacctccccagcagacctccgaggagaccaagggcaggacaggaagggtgaaaggaagtttcaggactgcaggaaataagagcttggaggtcaagggagagatcagataaaacatgaatctgatcagcatcctagtggtctagagtggagacaatctgcggagtcaacctcagtaaggacacacatagagaagaaccaaagcctctaaagacgaagctgagaagtgtacggtcgtagaagactcgtgtctgttattcttaaaagctcaaggaggtataaactgcataagatttaaatggaggaacacacgatcttacttgctttcagaggattttggggtccccattctcccactagcagccaggcaactctctctgtcctctccaaagggaggagtggaaaggcttcaaaatccctaggaaataaatgtcccctccacccaaagtccagtgtgtagcctgaggacaggactttcactgagagaaatatataaaagaaggggatagaagccaggcacccaggtggtgggtaacagaagggaactttctagctggttttatttagggagggcatcctgggcaaaagtcagaatgcaactttttttttaaaccccttttaacaagatgctgttgaattcctcttttgcagatgttctgccaattgaatggaaactgtccatagtggggagcagagagcctcatcttttctggaactgaacatccatccttaaggccagatttctcccatcaccaactttaactcctgccctagccctctctcttccttttcaaaaccctctccacccaggaagggagattctggagccaagactgtaccagccacacctccccagagttgttaaggaaggaactcgaagccaggggtggtcctctggcaagcacccccactaccagtagcaggacagatgtgtttctaatggactacactatccccggaggtcacatgattcaggctgccaagggtacctgcccttgggaaatcaactcccgaagataaattgggattgggtcctgagaagatccatggaagcccagaggaccctgcctctctctgttgcttcatgctgtagaggcagtactggggagggcctgccccacatccggcggggcagctggaaccatgtgtttgatgacactctgctccctcaatgtggagcctcatcctcatctcacagtctagcaggcctctggtgggttaggcttgtctcacccagtgtgtgagtttttttggaagtgacctgattttggagtttccctccaagcctttctcaggtacatgctttctcttttattctgtcttctttttttgatcttcttaaatctggttttctcctttttccctctcttgtctccatcttttttccagtctctcgcttctctttatttctccccatatttcactctgttctctcaccccaacctttcccttctgtttctctccctccctctcttcccaccccctgcctggccttccatatatcaagcagagttttatcaccttatgcaggggcagccctgccacctgccataaagttgataggctaatgacattttgtggatattgccatgtcacaagtccaggacagcatcaaaaatagccctgatgtctaaaccacttcagctatcttttttatttttaaaataaatacattcacatgcttttaagaaactataaaaatatataaagtaaaaagatctttctctcacactgtctccacctctcctggtctcaccgttgtgcttaggggaaaccattgtgattagtttctcctgtgtccttccagagtgtctttatgcaaatgaaaattattgtgataatatattcctattttcccccttactacacaaaagatagactaccataatcccattctgcacttttttttcacttgataataaaaacatgattttattaatgggtgtttatggagtgattaccatgtgctatgtgcctgctgggcactgc

SEQ ID NO: 13 - DNA, 24 bp, Artificial sequence
  Single strand DNA oligonucleotide
catatttcactctgttctctcacc

SEQ ID NO: 14 - DNA, 26 bp, Artificial sequence
  Single strand DNA oligonucleotide
cagaatgggattatggtagtctatct

SEQ ID NO: 15 - DNA, 600 bp, Homo sapiens
cagagttggtccgaccagccttggaaaggtcactgaaaaatcttcaattggattatgttgacctctaccttattcattttccagtgtctgtaaagccaggtgaggaagtgatcccaaaagatgaaaatggaaaaatactatttgacacagtggatctctgtgccacgtgggaggccatggagaagtgtaaagatgcaggattggccaagtccatcggggtgtccaacttcaaccacaggcagctggagatgatcctcaacaagccagggctcaagtacaagcctgtctgcaaccaggtggaatgtcatccttacttcaaccagagaaaactgctggatttctgcaagtcaaaagacattgttctggttgcctatagtgctctgggatcccaccgagaagaaccatgggtggacccgaactccccggtgctcttggaggacccagtcctttgtgccttggcaaaaaagcacaagcgaaccccagccctgattgccctgcgctaccagctacagcgtggggttgtggtcctggccaagagctacaatgagcagcgcatcagacagaacgtgcaggtgtttgaattccagttgacttcagagg

SEQ ID NO: 16 - DNA, 27 bp, Artificial sequence
  Single strand DNA oligonucleotide
cttcaattggattatgttgacctctac

SEQ ID NO: 17 - DNA, 25 bp, Artificial sequence
  Single strand DNA oligonucleotide
cactataggcaaccagaacaatgtc

SEQ ID NO: 18 - DNA, 527 bp, Homo sapiens
gctggaggggcgaggaccgggtataagaagcctcgtggccttgcccgggcagccgcaggttccccgcgcgccccgagcccccgcgccatgaagctcgccgccctcctggggctctgcgtggccctgtcctgcagctccgctgctgctttcttagtgggctcggccaagcctgtggcccagcctgtcgctgcgctggagtcggcggcggaggccggggccgggaccctggccaaccccctcggcaccctcaacccgctgaagctcctgctgagcagcctgggcatccccgtgaaccacctcatagagggctcccagaagtgtgtggctgagctgggtccccaggccgtgggggccgtgaaggccctgaaggccctgctgggggccctgacagtgtttggctgagccgagactggagcatctacacctgaggacaagacgctgcccacccgcgagggctgaaaaccccgccgcggggaggaccgtccatccccttcccccggcccctctcaataaacgtggttaagagc

SEQ ID NO: 19 - DNA, 22 bp, Artificial sequence
  Single strand DNA oligonucleotide
gcgaggaccgggtataagaagc

SEQ ID NO: 20 - DNA, 23 bp, Artificial sequence
  Single strand DNA oligonucleotide
tcggctcagccaaacactgtcag

SEQ ID NO: 21 - DNA, 1417 bp, Homo sapiens
gggcggaggcccctcgaggtgacacccaccactcagccgagcgggactacgagtctgctttgtgctccgcgaggaccagaaacacctgcaagaggcacggagaggaggcgcctttcaagaggcgcctttcatggaactgaggactggcctggcttggggacaccaacaagccttccccctcctgctggacacagagacacccacccagcacaccagacacaccctctgagtcacctaggccgcctggggctgagaagacctaaccgaggggccagatggcttcgaccggcttagaactgctgggcatgaccctggctgtgctgggctggctggggaccctggtgtcctgcgccctgcccctgtggaaggtgaccgccttcatcggcaacagcatcgtggtggcccaggtggtgtgggagggcctgtggatgtcctgcgtggtgcagagcacgggccagatgcagtgcaaggtgtacgactcactgctggctctgccgcaggacctgcaggccgcacgtgccctctgtgtcattgccctcctgctggccctgcttggcctcctggtggccatcacaggtgcccagtgtaccacgtgtgtggaggacgaaggtgccaaggcccgtatcgtgctcaccgcgggggtcatcctcctcctcgccggcatcctggtgctcatccctgtgtgctggacggcgcacgccatcatccaggacttctacaaccccctggtggctgaggccctcaagcgggagctgggggcctccctctacctgggctgggcggcggctgcactgcttatgctgggcggggggctcctctgctgcacgtgccccccgccccaggtcgagcggccccgcggacctcggctgggctactccatcccctcccgctcgggtgcatctggactggacaagagggactacgtgtgaggcggaggtttcccctgggagcccactgctccccactgccccgccctttcgaccttggcctgatgaccagatgccctgctccatcacaacctccttccccaggaaaacccactttccaaaagcccaagctacacctggctgcagggctgggtcagctggcctggctgagctcttctcagtggggtcccctttgatgttctcccccaagttgggcagcctagaggtgttgggaaccctggcctgcccccacctccccagtaattgtttccttccgttgcccaggacactggctggccttccttctcttctgagccctcccctgccccaggaaccctggcctcaccaaaacagcagcagctcgttggctccaaaaccagggagcagaccatgccctcccaaccctggagttgtcagggagggcctgcccatcacctccctctccccaacatccccaccctcgagttggaaataaagagcatttgtaactg

SEQ ID NO: 22 - DNA, 20 bp, Artificial sequence
  Single strand DNA oligonucleotide
gcttcgaccggcttagaact

SEQ ID NO: 23 - DNA, 18 bp, Artificial sequence
  Single strand DNA oligonucleotide
ggtgagcacgatacgggc

SEQ ID NO: 24 - DNA, 10618 bp, Homo sapiens
  misc_feature (9466)..(9466): any nucleotide
ccctccctctcacatttccaactcccaaggataacttgtcgctcgcttcagacgcccatggcttctttcagcccctgggactcagctttctcctctacctcttttgtctatttgtgcatttgatgtttctctgggcgcgcccttggatctgcttctctcttgccttttatattctcatattctcatattctctctctctctctctctctctctctccctccctccctccctccctctctccctccctctctccctctctgcctctctccctctctctctcttctctctctctctctcttctctctctcttctctctctctctgctctctccggccatctgggcgctgctcctccgcgcctctggcctccccgcggcgcgccaggcccatctcctcaccagccgctctgggatccgacggcgccgtgggtgggggcaggtgagacggccgagccccgcccgggcggaggcaggaagcgctcgcgccaatccccctcccggaccctgtcctcgcccgccactcaccggcgccaggggaacgcaggagcgtgagccccttcgcgcccccagcgccgtcggcgtcgctgccccagacacagacactgcctcgagaggcctcacagaggcgggggcagaaggcggcgacccagagccgccacatcccccgccttgggcgccgtcacagtccccagacgccctggactcctgcagtctacgaagacgcgcgggggacggcgtggttccgagaggtaggtgaggaggcgggcgcagcccttcctctcgcagctggggactgcggcgtgaaaggcccctctccaagctgggcagccccgtggcccgagctttcaggaccaaccgcccgtggcaggcgtgggcttcccggggccaccggcttaaccttgatctccagaccgaggcagcttcccgggtagggcctcggggcgcacccgaaaacgccttggcctccctgtccgctcgcacccgaccctacctctccaacaggtgtgtgtgtggggaaagggggtcgcctcccctcgttctaccggaaaccctggctccccagagccgagtgctcagtgccccgcccagcctgaggccctgcgtcctgggcctcctgctcacaaccccggattccaggcggatgccgtgagagaggcaagggccagacgccctgagcagccttgggggtgaggaatcgcttgggatggaagaagggccacttttcctaacggaaattaggaattggcctggaactcttggtctagacagaagcccccagctccccaaggtgcagaatcagctctcccgcgcgctgtctctctagctgcctcctggcgtggagggggcagaatacttgggggagtctcttgctttggcttttgggggcctcataggttttcttcccctctggactgtgagcagcctcctgcctgagagagcgtgtatctgaatctaaggaatgccaggagacgccatcttatttgaaacccacactcacaaaaacggggcatgtgcatttttgtggagggacctgttgtttatgggagtgggcagagggcatccaaaggatttcaaactgtatggactgactcatgggtcaatacaaaaattattcgcctttgaaaaggcatgtaaagaaaagcaagcataaaggggtgtgcatcgtgcatcgtgggtattgtggagtctgagaggaattagtaactcgccggagtcggctaggaatcttatatgacagcaactgtgcctctcggagtagtcaagcaccgtttaaagattgaggatttatacagacatgcgaaagagatgtgaaattatgtgctcccaactgtgctcaataataaaggcagtagaagggaaattcatattttcatctatatgcctcccccctcgcaaagtagaacattgcatggtatatttcacatagtccacataccagaggcggaatgtgcaactgactgcccaggactgtgctttccagtacaaatggaagcacaaagatgcctaatggagaagagttaagtgaaagttctcttttctcagtgcacttccctaaccctttgaggaagcaagtctggggggcctttcctgataggatcttccctccaaatcccttttggagctggagctcctctctttccctaaagtctggcgcacttggctccaagtccccatttctccagtccagaagggatgaagcctcctccaccccaaacatatagcctttggctcgctgggaggagaattgctcaccttctgcggtggtttagaacaccaccctacacagggatacacatacacagtgccccagaggaaatgcaaagaaaggttttgctagtccaagcaaggtgttgtgggagacctcagagacccttagaaagagcctcactccccacactgcaacttgaaagacccaggacatccctcccacccccaggacagacagggttctcaccagctgggaacgcacagagcccgtgacaacaggaggatctgttgggctgggaacttcacatcccacccaccctgcctccaacttctttttttttctggccagattaaaagtcaagcttaaagtgctgttgggttagagagtttcattgttttagtctattggtttctctccctcattttcttctccctcatctcccttttactcccaggttttgcccattttttttctctctctccacacagaaaatctgtgaattttctgggcttgaacggaaggaatgaggagggaaaggagggaatatttgacctatccaggcagcactcagagctgtaattgacaccaagtcatcctagtagaccttgtcctcacaggcttagaggatatttgattccagaatcccccaccagcaccccaagatccagtggtacctccttcctccttggggcttctatagttttcaaaaatgggagaaatcaaaaatgccatcattattccagtgaccgggtgtggagggagtctgcagtttggccagaggcctggtctcagagaaaggagtcctgagggctggggggttggggcaaggcctagggccaacttggttctgaccttgcctgccagtagagaatcttgggctcttcaccaagtaaaggcaagatcaagggactggaggtctgagtccctctcttgcctaactgccccaagggccccagaaactactctgggccaaaaatcagtaatagttgaaagaaagaaacaaatactgaaaacacccagatttataatctgcttagacacccaaactcatccttaaagcagtaaataaaatttatctccttgactgccttgcaactttctactcagtttggcaatgtgtagatggggtcagcttgagtttcagagcttgggggtccagcactaaatgtctagagagctagatctggggcctctcaccccctttcctcatatacctcctcttgcttccttcccctcccagggcttctcagaaagtgacagctgacttccttttagaactgtgaaatcccacaatttcagaggatttcaaattccttgaacttcaggttgagagctatttggattaatcagagaagtttgtgtctggaaaatgatgccagatttagccagaaaactgaaagaccaaatgctttactttttttttcctttgtctgatctcagtgcttatcaggtcaaccttcacctttaaaaacaccctggtggcagtatttctttgccatcactgtctgtaaagcaaagggcaagcatctcagggcttttagttgggccgggaattcaaatgtctcctttctcaagaagatgccaaagtggccaccctcagcccactttccgtccttacctcctctgccctttccccagctgtagttataggaataatggcctttaacttgcagagatcattaaggccaaagccctcactccttcccatctctcctcttggggccgtctgagtcgcttcctccacgaccctcctcttttgaagcactccctagtactgttaaaggccgaatttgggctggagcgaagatgggggctcagtccaaaataacctagatattaagtaatagtaatgatttttttaaaaggtaactatgaactctcaagcctcgaccacccagtaaagttcctccttaaattgttgccggccctgggtgcagacacgcaaggactggccagaacgcgagaaacttcttcaaggagagagaagtcagggcccaaattcctcatgctttaaagcagtataagaggagagagtccaaatttttactcgttaaacctcctcttacctcttcctcaggtctgttcactccttggtccagggaccggagctcctgggcttcgaggtgaaccagagggaacgtggctccccgcagcaacctttttgcttcagggctcctcctgggggctgagtggtcccctttgctttgctattcccgctgcggctcctggggggacagctccgtgggaccaggtctctcagggggtggagggtcgccgaagtcgtgaccaggagttggagaccgctgcgtccctccgctgcggacctgcttgggactgcgtggaatggaccaagtcctccgtctaggattccctagtgctcgacggcgcgcactccgcagtgctccgctggagatctgcacctgtgtcccggggctgggcgcagagtgaagatctccgtgcacgctgctgaccggctcggcgactgcctccctgctgtgagcaggagaacaggaagtctgcccgacagggaggtggccgggcgggagcggcagagtcggcgttgagaggagggtcagctgcacctcgggattccgcgcgccttcaactccctcttgcggacagcccagccgcgggttggcgccgcagtgatggaacctggggagggcctagcttagagtcccagcagtccagaggaggggaccagagcagaggattaggaacggggctttcatatccagcctaggcgcccagaagcggcacttaaggggcgaagggaggccgcaattacaaaggtgcgccctccgacgcctcaacgtcaagggcctgtagattcacaacctcctctgtcggggatgggggaagatgaggtgggatagggaggctatgtccagccaccagcgcagggagtggctctaaacgctgacccaacgcctcgccccaagcgggatcttggcgcgcagatagaccgagcccgtggtggggcgccatgccgggctccctcgcccttaccgagtgagcatcttcttcccaatttgctgctcagagagggagtgggtcctagtctctggatctcagcgctcacgactacctcgctgctcctaacgaacagttcatctgctctctcctggccgcctgcgccagcgccgctcacccacttttccagccctggatctcctctccccggatgcgtccttccttcccacaattaacaaatgatctagcgaaaccccgccaggtccccggcagagaagcacctccatccgccctaaccaaccaattaatcagatcattaaggagcctgaggagttgtaattgggtggtttgggacgagggggcgctgaggaggtcattaacctccccgtaaagatggggaacggagacgcgcctggccgcctctgccgcccctgccgcccctgccgcccctgtgggctcttcttagcacgcgggttttggccactccacctgcctgctgcgctccagttcccgcctccagtccagctatttcacttctctctttgtcattctccgtcttttctctggcaaccgtccagggcccctttctttgtgcctacttctgtctacctgtccagctgcctcttgcaccctttttgtggcccagcggccaagaaaactcaaaggtcatggctgttggcccccgctgatgatctctgggctcccgggtctcagacaattcctcagggctggctagaaatggtgggagctggagatttggacactatacccattccccaagagaagggcatttgcaaaggggaagtttcctgaaacgttcaattctctttcggtatgagatagctttggacaaggtgacaaatggcggaaggtccaggccccagtggataaaagctccatattaatttaattagagacacagagaccttgcatactccttgtctgcacaggcaaatatggaggaggtagtgattgggtgttgtggcctgactggtctcagtctaagagtccccagcacctgtgacctggttcctggtgttccaagaagtccaggtgacagtatctgttcaaccttgtggaacaataaattgtttgtccttttaatttgtcttgtcagatccccaagtatattacaatgcctccctctgcattacatttttggttggttgtgtaagaatggtggatgagaggttcttaacattttggggccactccctgatatgataatttaaattttgatgaacaatattgattcccctctacccagaaaaaaaatgtgcgtatgtagtactcaccaaatcccacaatttcagagagtttcagactcctcagacaccaagttaacaactacaatttggatagatcaaaggagctggtgtctgggaaatgccgaggccaaatatagtcagtttacgtaggtcttcaccctttctcttggctgacatctccattttgccaggccagccttcacctgtaaaaacactccggtggcagtgtcctctccccaccattacctgtagggtctgggctcccagtgggagtcagtctttccttcccagcagctgggagcctgagaacgtgggaagagctttgctggggaaagctgatcttagactggccagcagttggaccagcaatggaaggaaatcaggcttaagcagcttcccagggactaaaaaccataccagaactcctggaagggaagactatctggaaacagcctcctaactaaagctgcctataagtcaagcaaatggggactgggcaatagaatgttcctttgtgtcccttattgactcacttattccatttcctcagggacccagctctacttggggctgatttagccaaggttagaggctggggaataccaaatgctgaacttaaaggggaaggatttgctccctaatattttagtaatcttgtttgtaagagataaacagcatgtgacccctgactatcctgggggacctcctaattacgcccagcctcttgtgttgtggcctgtttagacacagagtgtaaagaaggacttagctcttctttcccggcctattaagtttcctggccatctccccacatgtgtgaattgaccaagctagatctcccaggagaaaaatcaggcttctttggggtctgggaagtaaaaagaaacttcctttttcaaggactatgttaagacaaattaggagaactggaaattatctggctaattgtaccctccccctccatacatacttacactccaaacccaagccctcctggctgctcctcaattgtctatacatttcaaacaaatgtgacttggcacaggaaagactccaactcatttctagttgcccctctctgtgctgcacaaccaccacccacctgcccagcagttcgaggctgtgacaagaagccaatggttggctaatagtattcagacccctgcctgaaaatacaaagaaaaaaataaacaattctcttcttgggacagcttaaactggataatcttggctgtgaaaacctgacctaaatgcttttaatcagagcagaagaaatatatgctcatttgctccctactttactaattaaagaaagctaattggtgttctcagaaacttccaactgagggtcaggagcctctagccatctctttgcctgccccacccctccctgcactgggccatctgcaccatggagttggcctttttctgatagacaattagaagggggtgctcccgaccttctggctccgcccctgcactaggacttggccctgaaaaggcagtgctgctattggccagaagttcttgcccagcaggcttgtcttccttcttgtgtcctggacttgtttctaggagccaagacctcttgctggctgccacatcggcactgccaaccggtggggtgcagccctgctgaagccccagagctcagcccagtgctgggcacatagtaggcgctcaggaaatgattgctgaatgtggaatgaaagtccccagcagacaaaaggctgtgacttctgttagtggggtggtggtcctctggggcgagtgtatggagaacttcaaggcctcctcctggctgcccaggaagtaggtaagacctgatttttgtcaagcgtttcttagatgttttgtttaattccagcttcctggccccctatttcttgtctacccattttctaaggcaggaccgtgctcaccacagcaaagggaaataactccttgaaaagccaaaggaatacaagccaccacttctcagacctttcccctatgagatccagatactacaggctaaagggagtttgaacctgaaatgagccagataattgccccaattctctgtaccttattgaagaggtagttacaggccaaggggtccaaggggcctcacttttatagacattgctctaagtcaaaagaatacattatacatatacagctggggtctaggaactcggcttctggcacctctgaattctccgagactgtctcctccctccccgcctgtaatgaaccctgtgaagggagacaggccaggaagtcccagaaatatttattcttgtgactctcacaaaatggaaaagggtctcaatttttgtttctttaaggaacttgtgttctgcgtctgtgtctacactgcctcctctcaccaaccaaattgtctagcccccctccagttacgctagaactctgctttatcttcaaggaagaaagggagtggggagaagttacctctaaaccctccagcatggccatcaattttctgaataatttggaggtcaacatgcttttggaaaagtgtttggaaaacgtttgggggtgaaaagaaatgttgcctaactggcctttactcacggagtgaccatcatctcagctagttagtgtatgagcggcaccagcaccccggccatgggtgtctgtgctgagcctctgaaagttgacttatcctttggggagccctcggaaagacacagctggtatctatgggaatggcttcggggtgtcctttggcaccatacagataattttgtttttttaattggaatccatggcctgggttcttgggatgggggtagggggaagccacaaagcccctggaaatgtatgcaaaacatatgggtgtgcaggtgcatcatcctaaggctatggcctcttcagtttttccaaagagtctaagactataaaaggtttccatctccttttctcagccagggagccacagagacccaggccagcagtaggctgggagccagcacaccggcccccaccaggtgcccggtaggggatgggtaatancactcttgaatggtctggaaactgctggcccctcagtcctgccgtcctcccagagggaaatcctaatagaagaagtgacagccagtagctgccatctcagtattttgaatgaaaatataacatgataaagagcaaatgagggaggctggaggggcctccccatgcaaatactggaatatgaatgttggccagaaataagatacttcctgccctccagctgttaaagagctccccaattcctcccttttggtgctaggaaggggccagagggcactgcccccagaccaccacccacctctggagagctggggccgagtgggactgcctgcagcagagttaacccttcagaaaattcaaaacctatactgcctagtattttccctgcccgtttattttttaatcagatttttaaaatatccagcagcactttggtgccttttcttggggttggggagtggggttatctatgtgtgtatctatgggaaggtgggtgccttcagtgcactaaaccccctcttgggcctgcagctggacctcactcctgtacctgaacactctgcctgagcctgagctaatcttagccatccattgtgtctcaaaactgttttggaggtgaataactgtgaggcaggatggagaaccttttgctctcccatccagaagggcacctaaccaggcccctggagcagacaaaaggagcaggaagtcaatcacttcgatcccagttctctgaagcccaagaagaaaacggattttccttcgttttggttcggaggcctagtagagaatttggattccaccaagttctcttttttcaaaaaaagtaaacggtccagagcagacaaaaactgtggaaacttgaggcctgggtagtagtggttttgtttgattttgaggctttaaagagataaggagacggtggtggagctccgccacgccgcgtggctctcacttccacgccgaggaagaccgaccggcccctaggtttatcctctgggagcccccggcccaatcagcccccttcaggccttgggagtcaccccgagtcttatcttctgtccccttccagcaagtacccggcaataaacgggcagggctgggcaaaggtctggccgctagaaacggaaaaggaaagagaaaagtaaagttaaa

SEQ ID NO: 25 - DNA, 10512 bp, Homo sapiens
ccctccctctcacatttccaactcccaaggataacttgtcgctcgcttcagacgcccatggcttctttcagcccctgggactcagctttctcctctacctcttttgtctatttgtgcatttgatgtttctctgggcgcgcccttggatctgcttctctcttgccttttatattctcatattctcatattctctctctctctctctctctctctctccctccctccctccctccctctctccctccctctctccctctctgcctctctccctctctctctcttctctctctctctctcttctctctctcttctctctctctctgctctctccggccatctgggcgctgctcctccgcgcctctggcctccccgcggcgcgccaggcccatctcctcaccagccgctctgggatccgacggcgccgtgggtgggggcaggtgagacggccgagccccgcccgggcggaggcaggaagcgctcgcgccaatccccctcccggaccctgtcctcgcccgccactcaccggcgccaggggaacgcaggagcgtgagccccttcgcgcccccagcgccgtcggcgtcgctgccccagacacagacactgcctcgagaggcctcacagaggcgggggcagaaggcggcgacccagagccgccacatcccccgccttgggcgccgtcacagtccccagacgccctggactcctgcagtctacgaagacgcgcgggggacggcgtggttccgagaggtaggtgaggaggcgggcgcagcccttcctctcgcagctggggactgcggcgtgaaaggcccctctccaagctgggcagccccgtggcccgagctttcaggaccaaccgcccgtggcaggcgtgggcttcccggggccaccggcttaaccttgatctccagaccgaggcagcttcccgggtagggcctcggggcgcacccgaaaacgccttggcctccctgtccgctcgcacccgaccctacctctccaacaggtgtgtgtgtggggaaagggggtcgcctcccctcgttctaccggaaaccctggctccccagagccgagtgctcagtgccccgcccagcctgaggccctgcgtcctgggcctcctgctcacaaccccggattccaggcggatgccgtgagagaggcaagggccagacgccctgagcagccttgggggtgaggaatcgcttgggatggaagaagggccacttttcctaacggaaattaggaattggcctggaactcttggtctagacagaagcccccagctccccaaggtgcagaatcagctctcccgcgcgctgtctctctagctgcctcctggcgtggagggggcagaatacttgggggagtctcttgctttggcttttgggggcctcataggttttcttcccctctggactgtgagcagcctcctgcctgagagagcgtgtatctgaatctaaggaatgccaggagacgccatcttatttgaaacccacactcacaaaaacggggcatgtgcatttttgtggagggacctgttgtttatgggagtgggcagagggcatccaaaggatttcaaactgtatggactgactcatgggtcaatacaaaaattattcgcctttgaaaaggcatgtaaagaaaagcaagcataaaggggtgtgcatcgtgcatcgtgggtattgtggagtctgagaggaattagtaactcgccggagtcggctaggaatcttatatgacagcaactgtgcctctcggagtagtcaagcaccgtttaaagattgaggatttatacagacatgcgaaagagatgtgaaattatgtgctcccaactgtgctcaataataaaggcagtagaagggaaattcatattttcatctatatgcctcccccctcgcaaagtagaacattgcatggtatatttcacatagtccacataccagaggcggaatgtgcaactgactgcccaggactgtgctttccagtacaaatggaagcacaaagatgcctaatggagaagagttaagtgaaagttctcttttctcagtgcacttccctaaccctttgaggaagcaagtctggggggcctttcctgataggatcttccctccaaatcccttttggagctggagctcctctctttccctaaagtctggcgcacttggctccaagtccccatttctccagtccagaagggatgaagcctcctccaccccaaacatatagcctttggctcgctgggaggagaattgctcaccttctgcggtggtttagaacaccaccctacacagggatacacatacacagtgccccagaggaaatgcaaagaaaggttttgctagtccaagcaaggtgttgtgggagacctcagagacccttagaaagagcctcactccccacactgcaacttgaaagacccaggacatccctcccacccccaggacagacagggttctcaccagctgggaacgcacagagcccgtgacaacaggaggatctgttgggctgggaacttcacatcccacccaccctgcctccaacttctttttttttctggccagattaaaagtcaagcttaaagtgctgttgggttagagagtttcattgttttagtctattggtttctctccctcattttcttctccctcatctcccttttactcccaggttttgcccattttttttctctctctccacacagaaaatctgtgaattttctgggcttgaacggaaggaatgaggagggaaaggagggaatatttgacctatccaggcagcactcagagctgtaattgacaccaagtcatcctagtagaccttgtcctcacaggcttagaggatatttgattccagaatcccccaccagcaccccaagatccagtggtacctccttcctccttggggcttctatagttttcaaaaatgggagaaatcaaaaatgccatcattattccagtgaccgggtgtggagggagtctgcagtttggccagaggcctggtctcagagaaaggagtcctgagggctggggggttggggcaaggcctagggccaacttggttctgaccttgcctgccagtagagaatcttgggctcttcaccaagtaaaggcaagatcaagggactggaggtctgagtccctctcttgcctaactgccccaagggccccagaaactactctgggccaaaaatcagtaatagttgaaagaaagaaacaaatactgaaaacacccagatttataatctgcttagacacccaaactcatccttaaagcagtaaataaaatttatctccttgactgccttgcaactttctactcagtttggcaatgtgtagatggggtcagcttgagtttcagagcttgggggtccagcactaaatgtctagagagctagatctggggcctctcaccccctttcctcatatacctcctcttgcttccttcccctcccagggcttctcagaaagtgacagctgacttccttttagaactgtgaaatcccacaatttcagaggatttcaaattccttgaacttcaggttgagagctatttggattaatcagagaagtttgtgtctggaaaatgatgccagatttagccagaaaactgaaagaccaaatgctttactttttttttcctttgtctgatctcagtgcttatcaggtcaaccttcacctttaaaaacaccctggtggcagtatttctttgccatcactgtctgtaaagcaaagggcaagcatctcagggcttttagttgggccgggaattcaaatgtctcctttctcaagaagatgccaaagtggccaccctcagcccactttccgtccttacctcctctgccctttccccagctgtagttataggaataatggcctttaacttgcagagatcattaaggccaaagccctcactccttcccatctctcctcttggggccgtctgagtcgcttcctccacgaccctcctcttttgaagcactccctagtactgttaaaggccgaatttgggctggagcgaagatgggggctcagtccaaaataacctagatattaagtaatagtaatgatttttttaaaaggtaactatgaactctcaagcctcgaccacccagtaaagttcctccttaaattgttgccggccctgggtgcagacacgcaaggactggccagaacgcgagaaacttcttcaaggagagagaagtcagggcccaaattcctcatgctttaaagcagtataagaggagagagtccaaatttttactcgttaaacctcctcttacctcttcctcaggtctgttcactccttggtccagggaccggagctcctgggcttcgaggtgaaccagagggaacgtggctccccgcagcaacctttttgcttcagggctcctcctgggggctgagtggtcccctttgctttgctattcccgctgcggctcctggggggacagctccgtgggaccaggtctctcagggggtggagggtcgccgaagtcgtgaccaggagttggagaccgctgcgtccctccgctgcggacctgcttgggactgcgtggaatggaccaagtcctccgtctaggattccctagtgctcgacggcgcgcactccgcagtgctccgctggagatctgcacctgtgtcccggggctgggcgcagagtgaagatctccgtgcacgctgctgaccggctcggcgactgcctccctgctgtgagcaggagaacaggaagtctgcccgacagggaggtggccgggcgggagcggcagagtcggcgttgagaggagggtcagctgcacctcgggattccgcgcgccttcaactccctcttgcggacagcccagccgcgggttggcgccgcagtgatggaacctggggagggcctagcttagagtcccagcagtccagaggaggggaccagagcagaggattaggaacggggctttcatatccagcctaggcgcccagaagcggcacttaaggggcgaagggaggccgcaattacaaaggtgcgccctccgacgcctcaacgtcaagggcctgtagattcacaacctcctctgtcggggatgggggaagatgaggtgggatagggaggctatgtccagccaccagcgcagggagtggctctaaacgctgacccaacgcctcgccccaagcgggatcttggcgcgcagatagaccgagcccgtggtggggcgccatgccgggctccctcgcccttaccgagtgagcatcttcttcccaatttgctgctcagagagggagtgggtcctagtctctggatctcagcgctcacgactacctcgctgctcctaacgaacagttcatctgctctctcctggccgcctgcgccagcgccgctcacccacttttccagccctggatctcctctccccggatgcgtccttccttcccacaattaacaaatgatctagcgaaaccccgccaggtccccggcagagaagcacctccatccgccctaaccaaccaattaatcagatcattaaggagcctgaggagttgtaattgggtggtttgggacgagggggcgctgaggaggtcattaacctccccgtaaagatggggaacggagacgcgcctggccgcctctgccgcccctgccgcccctgccgcccctgtgggctcttcttagcacgcgggttttggccactccacctgcctgctgcgctccagttcccgcctccagtccagctatttcacttctctctttgtcattctccgtcttttctctggcaaccgtccagggcccctttctttgtgcctacttctgtctacctgtccagctgcctcttgcaccctttttgtggcccagcggccaagaaaactcaaaggtcatggctgttggcccccgctgatgatctctgggctcccgggtctcagacaattcctcagggctggctagaaatggtgggagctggagatttggacactatacccattccccaagagaagggcatttgcaaaggggaagtttcctgaaacgttcaattctctttcggtatgagatagctttggacaaggtgacaaatggcggaaggtccaggccccagtggataaaagctccatattaatttaattagagacacagagaccttgcatactccttgtctgcacaggcaaatatggaggaggtagtgattgggtgttgtggcctgactggtctcagtctaagagtccccagcacctgtgacctggttcctggtgttccaagaagtccaggtgacagtatctgttcaaccttgtggaacaataaattgtttgtccttttaatttgtcttgtcagatccccaagtatattacaatgcctccctctgcattacatttttggttggttgtgtaagaatggtggatgagaggttcttaacattttggggccactccctgatatgataatttaaattttgatgaacaatattgattcccctctacccagaaaaaaaatgtgcgtatgtagtactcaccaaatcccacaatttcagagagtttcagactcctcagacaccaagttaacaactacaatttggatagatcaaaggagctggtgtctgggaaatgccgaggccaaatatagtcagtttacgtaggtcttcaccctttctcttggctgacatctccattttgccaggccagccttcacctgtaaaaacactccggtggcagtgtcctctccccaccattacctgtagggtctgggctcccagtgggagtcagtctttccttcccagcagctgggagcctgagaacgtgggaagagctttgctggggaaagctgatcttagactggccagcagttggaccagcaatggaaggaaatcaggcttaagcagcttcccagggactaaaaaccataccagaactcctggaagggaagactatctggaaacagcctcctaactaaagctgcctataagtcaagcaaatggggactgggcaatagaatgttcctttgtgtcccttattgactcacttattccatttcctcagggacccagctctacttggggctgatttagccaaggttagaggctggggaataccaaatgctgaacttaaaggggaaggatttgctccctaatattttagtaatcttgtttgtaagagataaacagcatgtgacccctgactatcctgggggacctcctaattacgcccagcctcttgtgttgtggcctgtttagacacagagtgtaaagaaggacttagctcttctttcccggcctattaagtttcctggccatctccccacatgtgtgaattgaccaagctagatctcccaggagaaaaatcaggcttctttggggtctgggaagtaaaaagaaacttcctttttcaaggactatgttaagacaaattaggagaactggaaattatctggctaattgtaccctccccctccatacatacttacactccaaacccaagccctcctggctgctcctcaattgtctatacatttcaaacaaatgtgacttggcacaggaaagactccaactcatttctagttgcccctctctgtgctgcacaaccaccacccacctgcccagcagttcgaggctgtgacaagaagccaatggttggctaatagtattcagacccctgcctgaaaatacaaagaaaaaaataaacaattctcttcttgggacagcttaaactggataatcttggctgtgaaaacctgacctaaatgcttttaatcagagcagaagaaatatatgctcatttgctccctactttactaattaaagaaagctaattggtgttctcagaaacttccaactgagggtcaggagcctctagccatctctttgcctgccccacccctccctgcactgggccatctgcaccatggagttggcctttttctgatagacaattagaagggggtgctcccgaccttctggctccgcccctgcactaggacttggccctgaaaaggcagtgctgctattggccagaagttcttgcccagcaggcttgtcttccttcttgtgtcctggacttgtttctaggagccaagacctcttgctggctgccacatcggcactgccaaccggtggggtgcagccctgctgaagccccagagctcagcccagtgctgggcacatagtaggcgctcaggaaatgattgctgaatgtggaatgaaagtccccagcagacaaaaggctgtgacttctgttagtggggtggtggtcctctggggcgagtgtatggagaacttcaaggcctcctcctggctgcccaggaagtagagggcgccaaaggcgacgtgccggccgccagctccaggccgagccccgagcgcctgcaggaacaggccccttcacccggcgcgggacgcagagctgcgagagaatcttgttcagcgcggactcaacgccagggcgccgcctagaggttggtctctgtctcggcctcacccgccgggagaccacagagctgcttccccagccgcccgccgccagaaattggaaaaaaaaaaaaaatccagctggggtctaggaactcggcttctggcacctctgaattctccgagactgtctcctccctccccgcctgtaatgaaccctgtgaagggagacaggccaggaagtcccagaaatatttattcttgtgactctcacaaaatggaaaagggtctcaatttttgtttctttaaggaacttgtgttctgcgtctgtgtctacactgcctcctctcaccaaccaaattgtctagcccccctccagttacgctagaactctgctttatcttcaaggaagaaagggagtggggagaagttacctctaaaccctccagcatggccatcaattttctgaataatttggaggtcaacatgcttttggaaaagtgtttggaaaacgtttgggggtgaaaagaaatgttgcctaactggcctttactcacggagtgaccatcatctcagctagttagtgtatgagcggcaccagcaccccggccatgggtgtctgtgctgagcctctgaaagttgacttatcctttggggagccctcggaaagacacagctggtatctatgggaatggctttggggtgtcctttggcaccatacagataattttgtttttttaattggaatccatggcctgggttcttgggatgggggtagggggaagccacaaagcccctggaaatgtatgcaaaacatatgggtgtgcaggtgcatcatcctaaggctatggcctcttcagtttttccaaagagtctaagactataaaaggtttccatctccttttctcagccagggagccacagagacccaggccagcagtaggctgggagccagcacaccggcccccaccaggtgcccggtaggggatgggtaataacactcttgaatggtctggaaactgctggcccctcagtcctgccgtcctcccagagggaaatcctaatagaagaagtgacagccagtagctgccatctcagtattttgaatgaaaatataacatgataaagagcaaatgagggaggctggaggggcctccccatgcaaatactggaatatgaatgttggccagaaataagatacttcctgccctccagctgttaaagagctccccaattcctcccttttggtgctaggaaggggccagagggcactgcccccagaccaccacccacctctggagagctggggccgagtgggactgcctgcagcagagttaacccttcagaaaattcaaaacctatactgcctagtattttccctgcccgtttattttttaatcagatttttaaaatatccagcagcactttggtgccttttcttggggttggggagtggggttatctatgtgtgtatctatgggaaggtgggtgccttcagtgcactaaaccccctcttgggcctgcagctggacctcactcctgtacctgaacactctgcctgagcctgagctaatcttagccatccattgtgtctcaaaactgttttggaggtgaataactgtgaggcaggatggagaaccttttgctctcccatccagaagggcacctaaccaggcccctggagcagacaaaaggagcaggaagtcaatcacttcgatcccagttctctgaagcccaagaagaaaacggattttccttcgttttggttcggaggcctagtagagaatttggattccaccaagttctcttttttcaaaaaaagtaaacggtccagagcagacaaaaactgtggaaacttgaggcctgggtagtagtggttttgtttgattttgaggctttaaagagataaggagacggtggtggagctccgccacgccgcgtggctctcacttccacgccgaggaagaccgaccggcccctaggtttatcctctgggagcccccggcccaatcagcccccttcaggccttgggagtcaccccgagtcttatcttctgtccccttccagcaagtacccggcaataaacgggcagggctgggcaaaggtctggccgctagaaacggaaaaggaaagagaaaagtaaagttaaa

SEQ ID NO: 26 - DNA, 2399 bp, Homo sapiens
ctcctcctggctgcccaggaagtagtgtcttcttttgcaagctgggggaggggtttaaagatgctggcgctgccctctagccggctgctggggacatcaaaggagattcgggctgtggaaggctccctagcgtcggagatggagttaggagagggcgccaaaggcgacgtgccggccgccagctccaggccgagccccgagcgcctgcaggaacaggccccttcacccggcgcgggacgcagagctgcgagagaatcttgttcagcgcggactcaacgccagggcgccgcctagaggttggtctctgtctcggcctcacccgccgggagaccacagagctgcttccccagccgcccgccgccagaaattggaaaaaaaaaaaaaatccagctggggtctaggaactcggcttctggcacctctgaattctccgagactgtctcctccctccccgcctgtaatgaaccctgtgaagggagacaggccaggaagtcccagaaatatttattcttgtgactctcacaaaatggaaaagggtctcaatttttgtttctttaaggaacttgtgttctgcgtctgtgtctacactgcctcctctcaccaaccaaattgtctagcccccctccagttacgctagaactctgctttatcttcaaggaagaaagggagtggggagaagttacctctaaaccctccagcatggccatcaattttctgaataatttggaggtcaacatgcttttggaaaagtgtttggaaaacgtttgggggtgaaaagaaatgttgcctaactggcctttactcacggagtgaccatcatctcagctagttagtgtatgagcggcaccagcaccccggccatgggtgtctgtgctgagcctctgaaagttgacttatcctttggggagccctcggaaagacacagctggtatctatgggaatggctttggggtgtcctttggcaccatacagataattttgtttttttaattggaatccatggcctgggttcttgggatgggggtagggggaagccacaaagcccctggaaatgtatgcaaaacatatgggtgtgcaggtgcatcatcctaaggctatggcctcttcagtttttccaaagagtctaagactataaaaggtttccatctccttttctcagccagggagccacagagacccaggccagcagtaggctgggagccagcacaccggcccccaccaggtgcccggtaggggatgggtaataacactcttgaatggtctggaaactgctggcccctcagtcctgccgtcctcccagagggaaatcctaatagaagaagtgacagccagtagctgccatctcagtattttgaatgaaaatataacatgataaagagcaaatgagggaggctggaggggcctccccatgcaaatactggaatatgaatgttggccagaaataagatacttcctgccctccagctgttaaagagctccccaattcctcccttttggtgctaggaaggggccagagggcactgcccccagaccaccacccacctctggagagctggggccgagtgggactgcctgcagcagagttaacccttcagaaaattcaaaacctatactgcctagtattttccctgcccgtttattttttaatcagatttttaaaatatccagcagcactttggtgccttttcttggggttggggagtggggttatctatgtgtgtatctatgggaaggtgggtgccttcagtgcactaaaccccctcttgggcctgcagctggacctcactcctgtacctgaacactctgcctgagcctgagctaatcttagccatccattgtgtctcaaaactgttttggaggtgaataactgtgaggcaggatggagaaccttttgctctcccatccagaagggcacctaaccaggcccctggagcagacaaaaggagcaggaagtcaatcacttcgatcccagttctctgaagcccaagaagaaaacggattttccttcgttttggttcggaggcctagtagagaatttggattccaccaagttctcttttttcaaaaaaagtaaacggtccagagcagacaaaaactgtggaaacttgaggcctgggtagtagtggttttgtttgattttgaggctttaaagagataaggagacggtggtggagctccgccacgccgcgtggctctcacttccacgccgaggaagaccgaccggcccctaggtttatcctctgggagcccccggcccaatcagcccccttcaggccttgggagtcaccccgagtcttatcttctgtccccttccagcaagtacccggcaataaacgggcagggctgggcaaaggtctggccgctagaaacggaaaaggaaagagaaaagtaaagttaaa

SEQ ID NO: 27 - DNA, 2490 bp, Homo sapiens
ctcctggctgcccaggaagtagtgtcttcttttgcaagctgggggaggggtttaaagatgctggcgctgccctctagccggctgctggggacatcaaaggagattcgggctgtggaaggctccctagcgtcggagatggagttaggaggtaagggccagggggtgggagcggatggggccttgattagctgtggatttctgtcccagcgcactcatttaaccgtgtttctcttggttggcagagggcgccaaaggcgacgtgccggccgccagctccaggccgagccccgagcgcctgcaggaacaggccccttcacccggcgcgggacgcagagctgcgagagaatcttgttcagcgcggactcaacgccagggcgccgcctagaggttggtctctgtctcggcctcacccgccgggagaccacagagctgcttccccagccgcccgccgccagaaattggaaaaaaaaaaaaaatccagctggggtctaggaactcggcttctggcacctctgaattctccgagactgtctcctccctccccgcctgtaatgaaccctgtgaagggagacaggccaggaagtcccagaaatatttattcttgtgactctcacaaaatggaaaagggtctcaatttttgtttctttaaggaacttgtgttctgcgtctgtgtctacactgcctcctctcaccaaccaaattgtctagcccccctccagttacgctagaactctgctttatcttcaaggaagaaagggagtggggagaagttacctctaaaccctccagcatggccatcaattttctgaataatttggaggtcaacatgcttttggaaaagtgtttggaaaacgtttgggggtgaaaagaaatgttgcctaactggcctttactcacggagtgaccatcatctcagctagttagtgtatgagcggcaccagcaccccggccatgggtgtctgtgctgagcctctgaaagttgacttatcctttggggagccctcggaaagacacagctggtatctatgggaatggctttggggtgtcctttggcaccatacagataattttgtttttttaattggaatccatggcctgggttcttgggatgggggtagggggaagccacaaagcccctggaaatgtatgcaaaacatatgggtgtgcaggtgcatcatcctaaggctatggcctcttcagtttttccaaagagtctaagactataaaaggtttccatctccttttctcagccagggagccacagagacccaggccagcagtaggctgggagccagcacaccggcccccaccaggtgcccggtaggggatgggtaataacactcttgaatggtctggaaactgctggcccctcagtcctgccgtcctcccagagggaaatcctaatagaagaagtgacagccagtagctgccatctcagtattttgaatgaaaatataacatgataaagagcaaatgagggaggctggaggggcctccccatgcaaatactggaatatgaatgttggccagaaataagatacttcctgccctccagctgttaaagagctccccaattcctcccttttggtgctaggaaggggccagagggcactgcccccagaccaccacccacctctggagagctggggccgagtgggactgcctgcagcagagttaacccttcagaaaattcaaaacctatactgcctagtattttccctgcccgtttattttttaatcagatttttaaaatatccagcagcactttggtgccttttcttggggttggggagtggggttatctatgtgtgtatctatgggaaggtgggtgccttcagtgcactaaaccccctcttgggcctgcagctggacctcactcctgtacctgaacactctgcctgagcctgagctaatcttagccatccattgtgtctcaaaactgttttggaggtgaataactgtgaggcaggatggagaaccttttgctctcccatccagaagggcacctaaccaggcccctggagcagacaaaaggagcaggaagtcaatcacttcgatcccagttctctgaagcccaagaagaaaacggattttccttcgttttggttcggaggcctagtagagaatttggattccaccaagttctcttttttcaaaaaaagtaaacggtccagagcagacaaaaactgtggaaacttgaggcctgggtagtagtggttttgtttgattttgaggctttaaagagataaggagacggtggtggagctccgccacgccgcgtggctctcacttccacgccgaggaagaccgaccggcccctaggtttatcctctgggagcccccggcccaatcagcccccttcaggccttgggagtcaccccgagtcttatcttctgtccccttccagcaagtacccggcaataaacgggcagggctgggcaaaggtctggccgctagaaacggaaaaggaaagagaaaagtaaagttaaa

SEQ ID NO: 28 - DNA, 2995 bp, Homo sapiens
ccctccctctcacatttccaactcccaaggataacttgtcgctcgcttcagacgcccatggcttctttcagcccctgggactcagctttctcctctacctcttttgtctatttgtgcatttgatgtttctctgggcgcgcccttggatctgcttctctcttgccttttatattctcatattctcatattctctctctctctctctctctctctctccctccctccctccctccctctctccctccctctctccctctctgcctctctccctctctctctcttctctctctctctctcttctctctctcttctctctctctctgctctctccggccatctgggcgctgctcctccgcgcctctggcctccccgcggcgcgccaggcccatctcctcaccagccgctctgggatccgacggcgccgtgggtgggggcaggtgagacggccgagccccgcccgggcggaggcaggaagcgctcgcgccaatccccctcccggaccctgtcctcgcccgccactcaccggcgccaggggaacgcaggagcgtgagccccttcgcgcccccagcgccgtcggcgtcgctgccccagacacagacactgcctcgagaggcctcacagaggcgggggcagaaggcggcgacccagagccgccacatcccccgccttgggcgccgtcacagtccccagacgccctggactcctgcagtctacgaagacgcgcgggggacggcgtggttccgagagagggcgccaaaggcgacgtgccggccgccagctccaggccgagccccgagcgcctgcaggaacaggccccttcacccggcgcgggacgcagagctgcgagagaatcttgttcagcgcggactcaacgccagggcgccgcctagaggttggtctctgtctcggcctcacccgccgggagaccacagagctgcttccccagccgcccgccgccagaaattggaaaaaaaaaaaaaatccagctggggtctaggaactcggcttctggcacctctgaattctccgagactgtctcctccctccccgcctgtaatgaaccctgtgaagggagacaggccaggaagtcccagaaatatttattcttgtgactctcacaaaatggaaaagggtctcaatttttgtttctttaaggaacttgtgttctgcgtctgtgtctacactgcctcctctcaccaaccaaattgtctagcccccctccagttacgctagaactctgctttatcttcaaggaagaaagggagtggggagaagttacctctaaaccctccagcatggccatcaattttctgaataatttggaggtcaacatgcttttggaaaagtgtttggaaaacgtttgggggtgaaaagaaatgttgcctaactggcctttactcacggagtgaccatcatctcagctagttagtgtatgagcggcaccagcaccccggccatgggtgtctgtgctgagcctctgaaagttgacttatcctttggggagccctcggaaagacacagctggtatctatgggaatggctttggggtgtcctttggcaccatacagataattttgtttttttaattggaatccatggcctgggttcttgggatgggggtagggggaagccacaaagcccctggaaatgtatgcaaaacatatgggtgtgcaggtgcatcatcctaaggctatggcctcttcagtttttccaaagagtctaagactataaaaggtttccatctccttttctcagccagggagccacagagacccaggccagcagtaggctgggagccagcacaccggcccccaccaggtgcccggtaggggatgggtaataacactcttgaatggtctggaaactgctggcccctcagtcctgccgtcctcccagagggaaatcctaatagaagaagtgacagccagtagctgccatctcagtattttgaatgaaaatataacatgataaagagcaaatgagggaggctggaggggcctccccatgcaaatactggaatatgaatgttggccagaaataagatacttcctgccctccagctgttaaagagctccccaattcctcccttttggtgctaggaaggggccagagggcactgcccccagaccaccacccacctctggagagctggggccgagtgggactgcctgcagcagagttaacccttcagaaaattcaaaacctatactgcctagtattttccctgcccgtttattttttaatcagatttttaaaatatccagcagcactttggtgccttttcttggggttggggagtggggttatctatgtgtgtatctatgggaaggtgggtgccttcagtgcactaaaccccctcttgggcctgcagctggacctcactcctgtacctgaacactctgcctgagcctgagctaatcttagccatccattgtgtctcaaaactgttttggaggtgaataactgtgaggcaggatggagaaccttttgctctcccatccagaagggcacctaaccaggcccctggagcagacaaaaggagcaggaagtcaatcacttcgatcccagttctctgaagcccaagaagaaaacggattttccttcgttttggttcggaggcctagtagagaatttggattccaccaagttctcttttttcaaaaaaagtaaacggtccagagcagacaaaaactgtggaaacttgaggcctgggtagtagtggttttgtttgattttgaggctttaaagagataaggagacggtggtggagctccgccacgccgcgtggctctcacttccacgccgaggaagaccgaccggcccctaggtttatcctctgggagcccccggcccaatcagcccccttcaggccttgggagtcaccccgagtcttatcttctgtccccttccagcaagtacccggcaataaacgggcagggctgggcaaaggtctggccgctagaaacggaaaaggaaagagaaaagtaaagttaaa

SEQ ID NO: 29 - DNA, 3753 bp, Homo sapiens
  misc_feature (1005)..(1005): any nucleotide
tgagaatatgagaatataaaaggcaagagagaagcagatccaagggcgcgcccagagaaacatcaaatgcacaaatagacaaaagaggtagaggagaaagctgagtcccaggggctgaaagaagccatgggcgtctgaagcgagcgacaagttatccttgggagttggaaatgtgagagggaggggcgaggccgaaggaggctgagaaggggagggggcgctcacaccctgggcgggaggcgactgatccacacttagggctccgaatccggagaaagagagcgccggaccctcctccgcccacctcccgccccagccgcagcccagcgacttcccgccatcctcggccaccgagcggctcctgcctggggttgttccaccgggatggctgcaccaggctgaaggtgcaagcttaaagtgttgctgccagacctttcttctcttctaatttaccaagtgaagaatgttgaaatatccaactataatttgtggatttctcctttcaatgctatcatttttggtgcttcatgtatttttgaagctctattattagcctctcttgaaccttcacagtccagccgagctgccatctcttcaaggaagttttccctgaagccctcaggtagacccgtttttccatggcggccacatcagcatgcagcacatttaattggaagtctccacatatgagttggttttccttacttaaaatatgcttatcatcccttggaggtattgactgctgcctcatgaaggctggtcctgtctctatagtgaatattgtgcacctcagggtagaatggagagcagaagacttcaaatcaggcagtctgggttcagaccccaattctagtgctaaatagctacgtgactttaggccgattgtgtgtgacttccctgagccccagtctctttgcctgcaaaatgagaaaaattataacaatgtcatcggttgttctgaggattctgagaggaattagtaggagagagaactaagaagctgcnggcctctacagagccattcaactggcatttcggaagatgttgcccatcagagtcagaccttcttagcatcttccggctgggcccaaacttcccaagaccatttggacaaggtcatctctatcccaccatggcctcctcccagaggaggagaagaatcatgctgttacagcagaaccgaagatttgggcaagggagctaatgattatgttctgcgtcaggtcagagatgggctgggaaagccactccaaagccaagacaagcagtttcctggaaaaagaaggctgcgcggagcccagagtggcctggatcctgcctcatttcctggaccagctccttaggtggttactggattgccaataaagcagagcttattaaagtcaacgagctcaggcttcatcgccgccatggtatccaagcaccagtctgtctgggatttcatttgccagatggacaaaggagaggttgttccaatacatatcctgagtggtgggggtggggagagaaggggaagaatgctctctagagaattctctttgtcctctgaagtaaatagagatcatgtcttccccagccacactcagtgatctgaatctcttggactgtggatttttcctttacctgctgtgaagccttgaaaagtatgaattagcttgataatgatcctctaaagatgttcaagagttaaagacgtgtttaagttcttcaggcaatccaatatgactacgggtttccaaaaatttgaaggaaactgaaaatcatagttcccaaaccagatattttccggtgtccagatgttcactggcatgcaaaccaaatgtctggattatgagctccttttttcatttctttttatcagcttacatccagatgttggatccaactggtcagaggcctggggcagagacagaaatcaaatctagggtgttcatctagagtctcctgctcctccattcctgcttcctcctcacgctgcccccacatcctccccaactcaccttcatgctacatctcggcaaatacagctcatatccaggcacggtgcagcccttgacagctgggtccgcaaaggcagatcgggtatatctttaaagaaaagttatcttaaccattgagaagccttccttcctcagaggagagcacctccccagcagacctccgaggagaccaagggcaggacaggaagggtgaaaggaagtttcaggactgcaggaaataagagcttggaggtcaagggagagatcagataaaacatgaatctgatcagcatcctagtggtctagagtggagacaatctgcggagtcaacctcagtaaggacacacatagagaagaaccaaagcctctaaagacgaagctgagaagtgtacggtcgtagaagactcgtgtctgttattcttaaaagctcaaggagatgttctgccaattgaatggaaactgtccatagtggggagcagagagcctcatcttttctggaactgaacatccatccttaaggccagatttctcccatcaccaactttaactcctgccctagccctctctcttccttttcaaaaccctctccacccaggaagggagattctggagccaagactgtaccagccacacctccccagagttgttaaggaaggaactcgaagccaggggtggtcctctggcaagcacccccactaccagtagcaggacagatgtgtttctaatggactacactatccccggaggtcacatgattcaggctgccaagggtacctgcccttgggaaatcaactcccgaagataaattgggattgggtcctgagaagatccatggaagcccagaggaccctgcctctctctgttgcttcatgctgtagaggcagtactggggagggcctgccccacatccggcggggcagctggaaccatgtgtttgatgacactctgctccctcaatgtggagcctcatcctcatctcacagtctagcaggcctctggtgggttaggcttgtctcacccagtgtgtgagtttttttggaagtgacctgattttggagtttccctccaagcctttctcaggtacatgctttctcttttattctgtcttctttttttgatcttcttaaatctggttttctcctttttccctctcttgtctccatcttttttccagtctctcgcttctctttatttctccccatatttcactctgttctctcaccccaacctttcccttctgtttctctccctccctctcttcccaccccctgcctggccttccatatatcaagcagagttttatcaccttatgcaggggcagccctgccacctgccataaagttgataggctaatgacattttgtggatattgccatgtcacaagtccaggacagcatcaaaaatagccctgatgtctaaaccacttcagctatcttttttatttttaaaataaatacattcacatgcttttaagaaactataaaaatatataaagtaaaaagatctttctctcacactgtctccacctctcctggtctcaccgttgtgcttaggggaaaccattgtgattagtttctcctgtgtccttccagagtgtctttatgcaaatgaaaattattgtgataatatattcctattttcccccttactacacaaaagatagactaccataatcccattctgcacttttttttcacttgataataaaaacatgattttattaatgggtgtttatggagtgattaccatgtgctatgtgcctgctgggcactgc

SEQ ID NO: 30 - DNA, 3260 bp, Homo sapiens
  misc_feature (1005)..(1005): any nucleotide
tgagaatatgagaatataaaaggcaagagagaagcagatccaagggcgcgcccagagaaacatcaaatgcacaaatagacaaaagaggtagaggagaaagctgagtcccaggggctgaaagaagccatgggcgtctgaagcgagcgacaagttatccttgggagttggaaatgtgagagggaggggcgaggccgaaggaggctgagaaggggagggggcgctcacaccctgggcgggaggcgactgatccacacttagggctccgaatccggagaaagagagcgccggaccctcctccgcccacctcccgccccagccgcagcccagcgacttcccgccatcctcggccaccgagcggctcctgcctggggttgttccaccgggatggctgcaccaggctgaaggtgcaagcttaaagtgttgctgccagacctttcttctcttctaatttaccaagtgaagaatgttgaaatatccaactataatttgtggatttctcctttcaatgctatcatttttggtgcttcatgtatttttgaagctctattattagcctctcttgaaccttcacagtccagccgagctgccatctcttcaaggaagttttccctgaagccctcaggtagacccgtttttccatggcggccacatcagcatgcagcacatttaattggaagtctccacatatgagttggttttccttacttaaaatatgcttatcatcccttggaggtattgactgctgcctcatgaaggctggtcctgtctctatagtgaatattgtgcacctcagggtagaatggagagcagaagacttcaaatcaggcagtctgggttcagaccccaattctagtgctaaatagctacgtgactttaggccgattgtgtgtgacttccctgagccccagtctctttgcctgcaaaatgagaaaaattataacaatgtcatcggttgttctgaggattctgagaggaattagtaggagagagaactaagaagctgcnggcctctacagagccattcaactggcatttcggaagatgttgcccatcagagtcagaccttcttagcatcttccggctgggcccaaacttcccaagaccatttggacaaggtcatctctatcccaccatggcctcctcccagaggaggagaagaatcatgctgttacagcagaaccgaagatttgggcaagggagctaatgattatgttctgcgtcaggtcagagatgggctgggaaagccactccaaagccaagacaagcagtttcctggaaaaagaaggctgcgcggagcccagagtggcctggatcctgcctcatttcctggaccagctccttaggtggttactggattgccaataaagcagagcttattaaagtcaacgagctcaggctttatcgccgccatggtatccaagcaccagtctgtctgggatttcatttgccagatggacaaaggagaggttgttccaatacatatcctgagtggtgggggtggggagagaaggggaagaatgctctctagagaattctctttgtcctctgaagtaaatagagatcatgtcttccccagccacactcagtgatctgaatctcttggactgtggatttttcctttacctgctgtgaagccttgaaaagtatgaattagcttgataatgatcctctaaagatgttcaagagttaaagacgtgtttaagttcttcaggcaatccaatatgactacgggtttccaaaaatttgaaggaaactgaaaatcatagttcccaaaccagatattttccggtgtccagatgttcactggcatgcaaaccaaatgtctggattatgagctccttttttcatttctttttatcagcttacatccagatgttggatccaactggtcagaggcctggggcagagacagaaatcaaatctagggtgttcatctagagtctcctgctcctccattcctgcttcctcctcacgctgcccccacatcctccccaactcaccttcatgctacatctcggcaaatacagctcatatccaggcacggtgcagcccttgacagctgggtccgcaaaggcagatcgggaagggagattctggagccaagactgtaccagccacacctccccagagttgttaaggaaggaactcgaagccaggggtggtcttctggcaagcacccccactaccagtagcaggacagatgtgtttctaatggactacactatccccggaggtcacatgattcaggctgccaagggtacctgcccttgggaaataactcccgaagataaattgggattgggtcctgagaagatccatggaagcccagaggaccctgcctctctctgttgcttcatgctgtagaggcagtactggggagggcctgccccacatccggcggggcagctggaaccatgtgtttgatgacactctgctccctcaatgtggagcctcatcctcatctcacagtctagcaggcctctggtgggttaggcttgtctcacccagtgtgtgagtttttttggaagtgacctgattttggagtttccctccaagcctttctcaggtacatgctttctcttttattctgtcttctttttttgatcttcttaaatctggttttctcctttttccctctcttgtctccatcttttttccagtctctcgcttctctttatttctccccatatttcactctgttctctcaccccaacctttcccttctgtttctctccctccctctcttcccaccccctgcctggccttccatatatcaagcagagttttatcaccttatgcaggggcagccctgccacctgccataaagttgataggctaatgacattttgtggatattgccatgtcacaagtccaggacagcatcaaaaatagccctgatgtctaaaccacttcagctatcttttttatttttaaaataaatacattcacatgcttttaagaaactataaaaatatataaagtaaaaagatctttctctcacactgtctccacctctcctggtctcaccgttgtgcttaggggaaaccattgtgattagtttctcctgtgtccttccagagtgtctttatgcaaatgaaaattattgtgataatatattcctattttcccccttactacacaaaagatagactaccataatcccattctgcacttttttttcacttgataataaaaacatgattttattaatgggtgtttatggagtgattaccatgtgctatgtgcctgctgggcactgc

SEQ ID NO: 31 - DNA, 2932 bp, Homo sapiens
gcaagcttaaagtgttgctgccagacctttcttctcttctaatttaccaagtgaagaatgttgaaatatccaactataatttgtggatttctcctttcaatgctatcatttttggtgcttcatgtatttttgaagctctattattaggctagagtgcaatggcacgatcttggctcactgaaacctccgcctcctgggttcaagcgattctcctgtctcagcctctggagcagctgggattacaggcgcatgccaccatgcccggctaatttttgtatttttagtagggatggggtttcaccatgttggccaggctggtctcgaactcctgacctcaggtgatctgccagcctcggcctcccaaagtgctggaattacaggtgtgagtcactgggcctggtcaggatttctttcatttcaactaactgttggcttattaaccctacttttttgttttaatttttagtggttactgttattttaatgtattagtcagatttttccagaaaaacaaaacctataggagatagataggtagatagatagatagatagatagacagacagaggaggatttactataaggaattggcttgcatgattatggaggctgagaagtcccaagatctgcagttgacaagctggggacccaggagcatcagtggcataactccagtctgaatctgtgtctaaaggctggagaagatcagtgttccagctcaaaaacattcaggcagggagagccttccactactggcaggagcgcctttttgttcttgtcagttcttcaatcgattggatgtggtccacccatattagggagggcaatgtgctttactcagtctattgattcaaataatgtcatgcagaaacacccttgtagacgtacccagaataatgtttaactgaatatctggcaccccatggcctagtcaagttgacacataaaattaaccatcacatttgagatttataatttgcatctttaacttatcacggtctatctgcaaagaatattatatcacttagctgggcgtagtgctgtgtgcctatagtcccagctactcaggaggctaagtggggaggattgcttgagccctgaagttcgaggctgcagtgagctgcgatcacatcactgctctccagcctgggctacagagaaagagcttgtctctaaaaaaattaaaaataaaataaaaagaatattacctcatgtatggtgatacaatagtatacttctatttccttctcttttgtggctattgctgacatataatttatctgtagctatgagccctgcagtacattgctattatgttttgcttaaatagtaaattgtcttttaaatatattaaaatgaaataaggtgttttatatttatatgcatatttaacatttgtatactgcaggtatgctggcgacagtttcttttagcttttgtctgaaatagtcatttaaaggtaaaacattttaaaactttataatttgcaataatattatacttatgaagaattacaaaattgcccaaaaaatttccataaacctatttcccaatttcttcatacggtaacatccacaaaactaccatccaaactaaaagattgacattgatacaatactattagctcacctggagaccttattccagttttgtccattgtcctactattgtcccttttcttgaccagtattcaatctagggttgcttattgcctttaattgtcttttcttcttagtctcctttaatctgggatagttcctcaggcttcctttcttgacacttgtgctggttgtttgtggttgccctgcagagcaaagatcagcaactctacccaaatgtggtttgaatgtggagactgatgatgccacatatacacaaagagggcatgaggcattctgggcagagcacaacaggctccccaaaaggccccaaaatggcttgagaacaagggaggggcaagttgccttgggtcttattgaggttaagggctggggatagggcatggttttcccatgcacaggccagtgtttgaacttccctgctggagccaagggaggaaacacctacgcttttttgtctaccaaatggagggcaaaagattaaggaggagttgtggggcttcaaagctgtcagtggtcaaacatcaaatatggaattggattctgttacgattcacccctgatgtttaatggattactgaaatctagggaagtggagtcctacggacacagcaaaccaccacgagaatcatggagatgaataggggcaggataatttaccagaggaagcctagagtggagtgctggacagaccaccatgtggagttgccatctgaggacattgctacttggatacccccacagtccagccgagctgccatctcttcaaggaagttttccctgaagccctcaggtagacccgtttttccatggcggccacatcagcatgcagcacatttaattggaagtctccacatatgagttggttttccttacttaaaatatgcttatcatcccttggaggctggagtgcagtggcatgatcacggctcactgcagcctcaacctcccaagctcaagggattctcccacctcggactcccaagcagctggggctacaggtattgactgctgcctcatgaaggctggtcctgtctctatagtgaatattgtgcacctcagggtagaatggagagcagaagacttcaaatcaggcagtctgggttcagaccccaattctagtgctaaatagctacgtgactttaggccgattgtgtgtgacttccctgagccccagtctctttgcctgcaaaatgagaaaaattataacaatgtcatcggttgttctgaggattctgagaggaattagtaggagagagaaataagaagctgcgggcctctacagagccattcaactggcatttcggaagatg

SEQ ID NO: 32 - DNA, 600 bp, Homo sapiens
gagaactgtcagaatgaggagatcctgaacagtctcaagtatgtccgtcctgggggtggataccagcccaccttcacccttgtccaaaaatgtgaggtgaatgggcagaacgagcatcctgtcttcgcctacctgaaggacaagctcccctacccttatgatgacccattttccctcatgaccgatcccaagctcatcatttggagccctgtgcgccgctcagatgtggcctggaactttgagaagttcctcatagggccggagggagagcccttccgacgctacagccgcaccttcccaaccatcaacattgagcctgacatcaagcgcctccttaaagttgccatatagatgtgaactgctcaacacacagatctcctactccatccagtcctgaggagccttaggatgcagcatgccttcaggagacactgctggacctcagcattcccttgatatcagtccccttcactgcagagccttgcctttcccctctgcctgtttccttttcctctcccaaccctctggttggtgattcaacttgggctccaagacttgggtaagctctgggccttcacagaatgatggcaccttcctaaa

SEQ ID NO: 33 - DNA, 25 bp, Artificial sequence
  Single strand DNA oligonucleotide
gagccctgtgcgccgctcagatgtg

SEQ ID NO: 34 - DNA, 24 bp, Artificial sequence
  Single strand DNA oligonucleotide
agcccaagttgaatcaccaaccag

SEQ ID NO: 35 - protein, 161 aa, Homo sapiens
RAPKATCRPPAPGRAPSACRNRPLHPARDAELRENLVQRGLNARAPPRGWSLSRPHPPGDHRAASPAARRQKLEKKKKSSWGLGTRLLAPLNSPRLSPPSPPVMNPVKGDRPGSPRNIYSCDSHKMEKGLNFCFFKELVFCVCVYTASSHQPNCLAPLQLR

SEQ ID NO: 36 - protein, 97 aa, Homo sapiens
LLLAAQEVVSSFASWGRGLKMLALPSSRLLGTSKEIRAVEGSLASEMELGEGAKGDVPAASSRPSPERLQEQAPSPGAGRRAARESCSARTQRQGAA

SEQ ID NO: 37 - protein, 163 aa, Homo sapiens
LLAAQEVVSSFASWGRGLKMLALPSSRLLGTSKEIRAVEGSLASEMELGGKGQGVGADGALISCGFLSQRTHLTVFLLVGRGRQRRRAGRQLQAEPRAPAGTGPFTRRGTQSCERILFSADSTPGRRLEVGLCLGLTRRETTELLPQPPAARNWKKKKNPAGV

SEQ ID NO: 38 - protein, 96 aa, Homo sapiens
MSGTSTPAMGVCAEPLKVDLSFGEPSERHSWYLWEWLWGVLWHHTDNFVFLIGIHGLGSWDGGRGKPQSPWKCMQNIWVCRCIILRLWPLQFFQRV

SEQ ID NO: 39 - DNA, 1052 bp, Homo sapiens
gtgacagccagtagctgccatctcagtattttgaatgaaaatataacatgataaagagcaaatgagggaggctggaggggcctccccatgcaaatactggaatatgaatgttggccagaaataagatacttcctgccctccagctgttaaagagctccccaattcctcccttttggtgctaggaaggggccagagggcactgcccccagaccaccacccacctctggagagctggggccgagtgggactgcctgcagcagagttaacccttcagaaaattcaaaacctatactgcctagtattttccctgcccgtttattttttaatcagatttttaaaatatccagcagcactttggtgccttttcttggggttggggagtggggttatctatgtgtgtatctatgggaaggtgggtgccttcagtgcactaaaccccctcttgggcctgcagctggacctcactcctgtacctgaacactctgcctgagcctgagctaatcttagccatccattgtgtctcaaaactgttttggaggtgaataactgtgaggcaggatggagaaccttttgctctcccatccagaagggcacctaaccaggcccctggagcagacaaaaggagcaggaagtcaatcacttcgatcccagttctctgaagcccaagaagaaaacggattttccttcgttttggttcggaggcctagtagagaatttggattccaccaagttctcttttttcaaaaaaagtaaacggtccagagcagacaaaaactgtggaaacttgaggcctgggtagtagtggttttgtttgattttgaggctttaaagagataaggagacggtggtggagctccgccacgccgcgtggctctcacttccacgccgaggaagaccgaccggcccctaggtttatcctctgggagcccccggcccaatcagcccccttcaggccttgggagtcaccccgagtcttatcttctgtccccttccagcaagtacccggcaataaacgggcagggctgggcaaaggtctggccgctagaaacgga

SEQ ID NO: 40 - DNA, 484 bp, Homo sapiens
catatttcactctgttctctcaccccaacctttcccttctgtttctctccctccctctcttcccaccccctgcctggccttccatatatcaagcagagttttatcaccttatgcaggggcagccctgccacctgccataaagttgataggctaatgacattttgtggatattgccatgtcacaagtccaggacagcatcaaaaatagccctgatgtctaaaccacttcagctatcttttttatttttaaaataaatacattcacatgcttttaagaaactataaaaatatataaagtaaaaagatctttctctcacactgtctccacctctcctggtctcaccgttgtgcttaggggaaaccattgtgattagtttctcctgtgtccttccagagtgtctttatgcaaatgaaaattattgtgataatatattcctattttcccccttactacacaaaagatagactaccataatcccattctg

SEQ ID NO: 41 - DNA, 429 bp, Homo sapiens
tgttttagaaatctcatgattcccaggaaaaaaattttaaattgtgatacaggtttgacagccttttagtcaaataagttaaaacacacacgcaaactcatttactcactttgccattataattcaatcacaaagaaattttggccaggcgtggtggttacgcctgtaatcccagcactttgggaggccgaggcaggtggatcacgaggtcaggggatcaagatcatcctggctaacatgtgaaaccccgtctctattaaaaataaaaaattagcctggtgtggtggcgggtgcctgtagtcccagctactcgggaggctgaggcagcagaatggcgtgaactcaggaggcggagcttgcagtgagccgagatcgcgccactgcactccagcctggatgacagagcgagactccatctcaaaaaaaaaa

SEQ ID NO: 42 - DNA, 1964 bp, Homo sapiens
ttttttataaggatgaaaatccgttgcagaagattttgccttgagtcccattggctaaaactgggttccatgcctgtgccctagctgcaagggatgctgggaatctgagtatctagcacttcctcctggactgtgggaagctgactctgccagggtgacaatgggtgttcatagacagcttgcccatgtacagtggggaatggaagagtcctgtactctcctcctcaatgcctgtgtctctcccacggctgcaggtcagaggattcccagctcccaaccccgcagctagccaacccagagccaggagacaagagtaatgaacctgaagatgctgggaccagagacccagaccccactccagagggagcctggcagtcagacagcagctctggaagcagagccctggatgaagtggacgagcagctgttccgctccgtggagggccaggccgcctctgacgaggaggaggtggaggaggagaggtggcaggaggagaagaagacgccggcagccgaggccaagacactgctggcccggctctccagctgcagaggcaggtgtgatgaccagacggcggagaagctcatgacttactttggtcacttcggcggtgccaaccatgcccataccctgggggagctggaggcctgcattgccatgctggtggagcagctgaggactcaaggctgcggtgggaggaccctggggacctctgaggaggaggcagagttgcagcagaaggtggaagagaatgagcacctgaggctggagctgcagatggtagagaccgagagggtgcggctgtccctgctggaggagaagctggtggacgtgctgcagctcctgcagaggctccgggacctgaacatatcgaaaagagccctggggaagattttgctgagcacgctggacgctttcagggaccccacccacgagggaaggcccagccctgcagccatcctggatgccctgcaccaagccttggctgcctgccagctgttgcggagacagccctcggcaccagcctctgcagcagctgcgctcaccaaccccctcctcgtctcctgctgaggttactggcccaccctgtgggcaccctgctcagcctgactgcctttggaccagcctccatgatcagcccaaccactgacagctggtctgaccaccgtcacatcatcagaacttgagtctctgctggctccttccaaggttaagcccgagcccagagcctcccattgcagcacctggcagccaccccttcctcgggctcctccacattacctcgcagcccctgcattcctgccaccagagtccacattaaagccctgcagttgctggatcagcctgcacctgatgccgtatctttcccctgccctcagggcagagatgcccactttctgactgagtctgaccccaaatctcttccccagagtttcaggatctcctcccctcccagcactgtctccttcctcccactggcatgcctgctgcaacggagactgggcccaacctttgggatacctggtctgtaggaaagcactccacaccccaggaaatgttgatgactaggaaaggctgagggaattccaaggaaggaacaatcactgtaggctccctggtagaagctggccttgaaccagctctagaggacaggtaggatttagacaggtaaagaaaggagggaagggcatagaatctaaggtaatggcaagagcaaaggtgtggaaccagaggggggccccaggaatgcagtgcttggagcccctgctcctgaacacgcattaactcctgaactgcgagcccctcctcctgaactgcgtcatggggttgcaggaaggagtaggccaagatacccagtctcacctaacttagactgtcattagagagaaagatccattgccaaacagtgccatgggggtgaaaccagtgctaaatggaggtaaaataaagtttgtaagagccca

SEQ ID NO: 43 - DNA, 2059 bp, Homo sapiens
  misc_feature (967)..(967): n is a, c, g, or t
agttgtttctacattttctccaccaccgctctggtttcctggaggccttgatcttgcctgcccaggcacccctcaggaaagtcatagccctgtggctggggagggtggagtgttgtgggccatcaggaaataaactggcagtcacaaagttctgaagggcatagccaccccttttctaagaatatttaaaggaaacagggcttggaggatcctaaaattagctggccttccagtcacatccctaaagagcagaggcactgggccttccctcttcctgcccaagcccagggtggaccctgagtgccctcaggcaccacactttccactgcttctctttccctccattggtgccaggggaagggaatgcctcgtgcctggcatgcctgctttagaaggcaggggccacaaaacactttgtgactgcctggcatcctagtgttactgggtacaactgacggtttaggtggccccctggccaagagtgggcccaagactccgactgggccaaccacgcccctctcctggggctctccatgctgggggatggggatggctggagagggtctttctcggctgtggctcttggataagaggcttgggacactcccactgtctcaaccctgtcccattcctgaggttctccagctgctagtccattctgggatctgcccactagcctgccataaatttcctctctgtgtaagctagccagattggcttctgcagcttcccactaaacttaatttgtttgaaagaaacaaaaccagagaagagaagggagaatggagtccttagagtgggaaacaaaatatacaactcttacatcagtccaacccgctgtgtggctttaggccacacactcagcttctctgggcctcagcaccagcctcggggagatggagtagttgatcctgccacctggaaggctgggagaggccagcaaagtgagcactgagccccttctctncccaggcagagttgcagcagaaggtggaagagaatgagcacctgaggctggagctgcagatggtagagaccgagagggtgcggctgtccctgctggaggagaagctggtggacgtgctgcagctcctgcagaggctccgggacctggtaggctcacgggagagctgccacactcagggaagggaaaggagctcttgggagggagccccacttgtgtcaggcaccaggctctaggctctccttacagtaggcagctgttatcccattttacagatgcagaaatggaggctcagaagaaccaaccaaaaatagggttggggggctccccaggtcattttaagaagctaataaaactcttgtatgtatccttttctggttctgttctcaaaaccagaaaaggataaatggaagaaagacaagaaaggaaaattataaactaatgtgacatttaaacatggatgcaaaattattaaatacaatactagcaaaccaaatctggcagtgtttaaagaaatgcaacatgaccaagttggacttatcctacaaattcaaggatgattccacatcaaaaaatctattaccaaaatacaccacattgcagattaaaggagaaagaccaaatgatcatctcaattgatgcagaaaaggaagtcaataaaattcaatctcctttgattataaaacccctcagcaaattaagaatagtagggatcttccttcaccagataagggctctcaaccaaatacttcatgcagatctcacactgactggtgacgtgttcagaggaatccccctaaaatcagatgtggctgggcctggtggtgcatgcctgtaatcccagcactttgggaggcctaggtgggtggatcgcttgagctcaggagttcgagaccagcctggccaatatggtgaaacccccacctctacaaaaaaaaaaaaaaaattagctgggcatggtggtgtatgcctgtggtcccagctacttgggaggctgaggtgggaggattgccaaagtccaggaggcaaaagttgcagtgagctgagattgtgccactgcactccagcctgggtgacagagtaagaccttatctc

SEQ ID NO: 44 - DNA, 147 bp, Homo sapiens
gactgagtcctaatcaaaacacttccaaacatttgtccagatggatttcacaattgctttggaccagtgactcctttgaatttctcaattttctcctttttgaagagggatgtctgtagcagttatcttatgccctctcctgccact

SEQ ID NO: 45 - DNA, 429 bp, Homo sapiens; identical to SEQ ID NO: 41

SEQ ID NO: 46 - DNA, 441 bp, Homo sapiens
cttgtcattcatgtgtttacatggcccctgccatcaaacttcacctgtgtcagtcaacaccagcaaagttcaccctaggatgatcactctgcccaggaaaggattcttgcaaatcaaagcattgactggttcagaagcaggaacatctggccaccatttctagtccccaccagttccatttccagattcaaagtagccttctgtctcctgccaccctagaggacacactgggtgtgactgagtaggcaacacagcattcttggttgttaggcctctagggtcatactgtgccctctctgggccatgactcaaactaattcaattttgatgaatgaagccactatttcttataaaaccctctggaagatgattccacatgctgtaccagatacgcccatttctgaaagagctcacagttgggaagctgaagtcagtcatgaa

SEQ ID NO: 47 - DNA, 584 bp, Homo sapiens
ggagctattactactgatcttacagaaataactagggctataaaaggatactatgaacaattgtatggtaacagattagataacataaacaaaatggacaaattcctagaaacatgcatgcaaactatctaaactgactcaaggctggacgcggtggcttatgtctgtagtcccagcactttgtgaggccgaggcgggtggatcacctgaggtcaggagttcgagaccagcctggccaacatggtgaaatgctgttcctactaaaaatacaaaaattagccaggtatgctggcgtgcgcctgtagtccgagatactggggaggctgaggtgggagaatcacttgaactcgggaggtagaagttgcagtgagccaagatggcaccactgcactccagcctgggcgacagagcgagaccaaactgactcaagaagaaacagaaaatctgaatagacctataacaaataaagaatcagtagtcaaaaaacttccaatgaaagaaaagttcagaaactttcactacagttatacgttttagcttccaaaaagaaaagtcaatttcaataaggaaattgaatcaatagt

SEQ ID NO: 48 - DNA, 556 bp, Homo sapiens
gcaaataaaacagtagcttaaagtgtcaatttcaaccagaaaataacagctctgatttctcatggctcacactcttttaaaacgactcgggtagaggctgagaaaggccgtgttgtttgtctacctgggactagaaacaatcataacaagaataagaagcaagccgggtgcggtggctcatgcctgtaattccagcactttgggaggccgagctgggaggatcacttgagcccaggagtttgagaccaacctgggtaacataatgagaccttacaaaaaaaaataaaattaaatttcaaaaacataattagataccagtgtatccccagcagattgacacaaattaaaagtcaacagtatcctgtgttggtgaagacatacagcaactggaagtctcctgtgcatgttagccatgtttatacctttcatctcagcagtttcactcttaacgatatatgctagagaaactcttactcatgtgctccacagacaggtaggagggcccaaggtaaccttgtttgtaattaagaaaaaataaaaacaggaaacaagcaaa

SEQ ID NO: 49 - DNA, 389 bp, Homo sapiens
cgcaccactctttttatttttaattttttaaaacttttttagagacatggtctccctaggttgcccaggagtttgagaccaacctgggtaacataatgagaccttacaaaaaaaaataaaattaaatttcaaaaacataattagataccagtgtatccccagcagattgacacaaattaaaagtcaacagtatcctgtgttggtgaagacatacagcaactggaagtctcctgtgcatgttagccatgtttatacctttcatctcagcagtttcactcttaacgatatatgctagagaaactcttactcatgtgctccacagacaggtaggagggcccaaggtaaccttgtttgtaattaagaaaaaataaaaacaggaaacaagcaaa

SEQ ID NO: 50 - DNA, 278 bp, Homo sapiens
agaagcatccactgacctgactgttatcaccgtagcttaggtttgcctcttagagctttgtacacatgaaatcttgtgatatttatgatgtttacattttttcttgtcaacgtgctttcattctcacattagcccttgtcagaagaaatatgtgaaatacacagaagagcaggtacagcagtccccaccccccactctttttttctttttttgagacacggtctcactctgtcacccaggctggagtgcagtagtgcgatgttggctcactgcaacct

SEQ ID NO: 51 - DNA, 409 bp, Homo sapiens
gcgcctcatgtgcccaggcgtgtcaactaggcctggcttggggagaccttctcaggcagcagaagaacaacagcctgaacaataagcctggcttgaggccctggagccactcagcagcctcacattctctgtcattactctttaatcctctccacgccttgggagagaaagcaagtctgagtcacccgctcaataggtaagaaagctgtggcttgagaggttgtgacagctgcaaccacactcacacaccaaagcagcagaacccaaactggggccatggccagtctgtgtccaggggagccatctgtgtgccgtcctcccaagcacagctgacacatcctgagctcacctcttactgctggggctggtggttttgctgaagttgcttgagacgaaaagacttggaaga

SEQ ID NO: 52 - DNA, 496 bp, Homo sapiens
gggtaattaaatgggtatttataattagaacttaataatttgcatcagggacaaatgagctctgattttaatctgcagcgcatttagattagcccaaagatagtgtaatttgatggtttataggcctcctctcggattatgaaacaataccaagccttcaagtgcagtgtgtctatgtcaggagggtgttaaagaagaagatgcaatgaaaatgtttgacaacgtgaaagcagccataaattacatgacaactgtgtaaaagtcatgatgaaacaaataaagggctgacctataatgcgtctgattcattgtgacacacacaactccctgcgctaatctctgcccagccaacgcattcttaagcggggaactacttagcaccaggaacgttgtaaattatcactagtcaacagcattgatttttagtcgacatttcaatcaggttgaagtagaaatactacccggctcatccaacagcctcttaaccagtccactg

SEQ ID NO: 53 - DNA, 542 bp, Homo sapiens
tgatcaccctggtattgcagagtcagggccccagaccatggaacaaaggggcaggaaaggcaggatgtccctccttgttcctccgtctgccagctccacagagctggaggtggggactggggtcaggaatcagggaccagagaacaaaaggttcccgtcatcccagggcctgtgccttcctctgagtgcagtcgcttggctgaaacaggatgaaaggttttcctggggcccttggagtctgagaagctgggctccagccccactgctgcgatggacatgctgtgtgacctcaagaacataagtccccctctctgagcccctgtctcctcatctatgaaacagggatgataatccttacctcacaggattggaatggtgtcaggatgacatgtgagtttcatggtcggtcagactgacttcagactccagctctgccctctattcgctctatgatcttgtgtaagtctccacctctccacgcctcagtttcctcgtccgaaaaacaaggatgttaagacctcctgtcagctggacacggtggc

SEQ ID NO: 54 - DNA, 652 bp, Homo sapiens
tgggcgggaaggctaacctggtgcggagccagcctgggtctcagccccgcgtacggcctttcacgagtcttcaagccttcaggctttcttctagtcaagatgagtgataaaccagacttgtcggaagtggagaagtttgacaggtcaaaactgaagaaaactaatactgaagaaaaaaatactcttccctcaaaggaaactatccagcaggagaaagagtgtgttcaaacatcataaaatggggatctcctccaaagagcagatttcagcattgcctgacagtcttggttttaggcttgtttttttgtaaacctgtgtgtttgtagagatttcagacatcttctgatttcttctcacctatattccctggttaagaggtcaggggtagtgaatgtttccttaagttcctttttaaacttcccattggtatgtaaattccaaatggcagatgctgtcaataaccttgccatggatgacctttgtgtaggtagtccttgcacctcatgcaggataagccaattttaactttctacaatgggtgcctcaatagtttcataatcttcatgaagttgcatcctttggcagcttcttacagtttattttcacttccaatgtagcaataaaataataaatataatcgttgttgtctgac

SEQ ID NO: 55 - DNA, 441 bp, Homo sapiens
tgggcgggaaggctaacctggtgcggagccagcctgggtctcagccccgcgtacggcctttcacgagtcttcaagccttcaggctttcttctagtcaagatgagtgataaaccagacttgtcggaagtggagaagtttgacaggtcaaaactgaagaaaactaatactgaagaaaaaaatactcttccctcaaaggaaacgagactctgtctcaaaaaaagaaaaagttttctctctttaaacctggaaccatcttactagcaataaatgacctgatcttaaaagtctgacaggaaacagcattggaatttgggatggtaccttcttggtgattgctatttctttaattcttcttaatcgctaaatccttgtttggttcagtttctgggatttatgttttacattcatatatttaataaatgtttctgaatgtattatcat

SEQ ID NO: 56 - DNA, 395 bp, Homo sapiens
atttttgtctaattttaaaaatatatatagcttattaatgaggaacacaaattttgaaaccagactgtactgcctagagaggagtcatgtttcatgacttactagctattgacatctttttctgttgtgattgtttttgattgtttgtttgtttctttttttgagacaggatctcactctgttacccaggctggagtgagtggtgcaatcacggctcactacagcctagacctcccaggctcaagtggtcctctcacctcagcctctcctccagcagctaggactgcagggacgtgccaccaaattttttttgtagagtcaggaggtggaggttgcagtgagctgagatcatgagactgcactccagcctgggtgacagagtgagactccatctc

SEQ ID NO: 57 - DNA, 739 bp, Homo sapiens
gttttgtaaatgctaatatatatatgagtcaatactttctgacatttatttgttagaaaattacacacatttaaaaattcaaattaaaactatgcttctatttaggctattgtaagagatttctttattttcttggaaattctctggaacagtagggtcatttgaatcatacccgttggtattgtcagatacattgtaaagtttcaactattgaacatatgtatggaatagaaattttaaaatagaaaattcgctatcttgccatttaagtatgataaaactatacccgattaaaacgttgactctattagaggttcgcctagtaagtaattctctggtcaagaatttgggaaattttaaactctgttaaccattaaaacaattacttctttaaggtaccggattttcatccatatttgaggagccttattaagttgttgggtggtctttttgtaaaggtttatgtggttaaaaaagtagatcttttcacccttctattacagttaacattaatatctttaaaaggtactatataaatccagacctaatttattctggatgatttttcttaactaaatgaaatctaacaaatttgtctatttttaagtgaatcttttttttatttctagtatttattggaagttcacttagactctatataggttagaagttaaagtaaataattttgactatttttttctttcatttcatgtttgaatatttccccctttacataaac

SEQ ID NO: 58 - DNA, 338 bp, Homo sapiens
actttgaccaggttaggttggttttctatacagatacctgggcaacccttcaatagcctctttcccaaggcagcaacttacatggaagccactgggtgcttaacaatggaagattcaatctttgttgaatagagagggtgattgtagcacttgagctgtgtctcttttcattacacattggggaagtggggaaatgaggaagcttttggaagctaatccatttagtgtgtgtgttgagggtacagggagagattaaaaacaacccaagataagactctgtcgctcaccctcccagagtgatgtggccccaagctggcaagaaaacaattctaatggag

SEQ ID NO: 59 - DNA, 438 bp, Homo sapiens
caaccacttcatactcattagaatgatcattatttttttagaaagaaagaaacaccaggaaataacagtgtagaaactggagcccttgagcattgctggtgagaatgtaaactgctacagccactgtggaaaacgtgatggttcctcaaaaaattgaagagttactataggacccaacaattccacttctgattgtatacccaaaagaggtgacaccagcagtttcttggggatttttttggtagagatagggtctcgctatgttgcccaggctggtctcaaactcctggcctcaagtaatcttcctgcctgggcctcccaaaatgctgggattacaggcatgagccaccatgcccagcctacacaaaggaactgaaagcaagtagaacagaaacttgtaaaacacatgttcacagtagcattattcgcaatagtcta

SEQ ID NO: 60 - DNA, 396 bp, Homo sapiens
gggaaatacacatctcctttggctgcaatagtgagattttggctgctgcctccctgtggtttgggttccactcaattggagaaatattttcatgctaggtagcctaacaaaagacaacagtataactgcaaagtgtgcaaagtacagatgcacaggttgttcactgcagaactgttttttcagtgaatcacttactcttagttcatagcatagaaagcatcaaggaaagaatggaaacatatttttcattttctcaattacacagtatgtttcttagtgaaaaaatacaaaaattcattgaaaaaaatcttcaaccaatatgtcccacacagcactctaagagataaggagtaggaagttttagctttaacttacaggtctggagacagaggcctg

SEQ ID NO: 61 - DNA, 369 bp, Homo sapiens
catctctgtcccactccatgctgggtgtcttgcctggggctgccctttggaagcggccacactggataagaaaatcaaactccccaccaatggacaagcagaaaatatgccagatggggtgcagtggctcacgcctgtaatcccagcactttgggagtccgaggcgggtggatcacttgaggccaggagttcgagaccagccttggtgaaaccccctgtctactaaaagtacaaaattcagcctggtgcggtggtgtgcgcctgtaatcccaacacgagaattgcttgaacccaggaggcggaggttgcaatgagccgagatcgcatcactgcactccagcctgggcgacagagcaagactctgtctca

SEQ ID NO: 62 - DNA, 286 bp, Homo sapiens
ctccctctccaaacgacttccatcattttagttaggttctaggatgcatgagcctctacctctcttctgcatcatcctcaggattaaattcaggaaggagtcagtcagcagccttgattaattctccttcttggctaatctactcttcatgcatagactagcatgcatgcacgcacacatgcacatgcgcacgtacacacacacacacacacacacacaccaaataaagcgtaatatttgcaacttcatgtaagcatatttgcaggacaaattctcttgaaatgct

SEQ ID NO: 63 - DNA, 690 bp, Homo sapiens
agaagctaggaatgaatccatgaccttggatgggcatcctctgtcttccccaggacaggggttcagtgtcattttccaggaacctaatgaagcagccttgttcttctggggtgatacccgagatttgttgcctaatggtcataaaaaactaggatgtggacacacaagagtgaggttaagagcagaagtttaataggtggaagaaagagaaaagctccctgtgctgcagagagaggggtcccaaatgggctgcaggatccacagtgaaatgcatgggattttatagatgcctgatgaggggggcggtgtttgatttacacagggcacgaaagattggttggaccaggtatgtcatttgcatggagcatgaaaaattggttagaggtatgtcatttgcatggattacggaaaatttgcataggtggcaaatttgtgtccactcccaccctaatcttgtattatgtaagtgggtcttaagtgggtcttcttcctgagctgcatcatattgcccattcctttactctacatgtagtaacaacaacaacaacaaaaatggagcctctgtgttggacatgcctggcccacaggtagcccttttctattggcacagctgccggcattcacccttccaagttccagcttgcttatctatgtttgcagctccatttttcaggctgatctttgttagta

SEQ ID NO: 64 - DNA, 848 bp, Homo sapiens
ggccattccagctgaatctcaaacagaaggcagtaatgagagcctacaaatgggagggacctaagtgcctacctactcgctaatcgcaggtgcaaacacacaaggagtttggtgggcttaaggtcagaggagtgtgtagggagggatgtatgtggaaggtaagattcagggcaagctaaaaatccgatactgcaacgttttccaaaatcccagaaggcaaactgtgcatgttctaccctgaaccacccaagcaacactttctaccttgccttatttttaattggattcactgtccaaaatgcagaggtttgctttgcttttttttcagaagttccaaacagcaactttgagagcagtggggtgcttggcagctgttctgtgttttccaggaatccaactgagcattgaaatctctcatttgccgacttatttttataggaagccaatttaaaaaaaaaaaaagttttcttatagtattggaactacttctaattttaaaatgacttttttgatgtattttttgttaaatactatgtagtgtaatgtataattgctcttgtttattgcttttacaatcatatttattaaacagataatgtctctaaagtctttgcctcaggtatttttttttttaatcctaaacccttggtgttcattctaaatatagaagtgttgcatgtataggatttcataaaggctaattgcataagaaagagtaaacaccacaggcttgaggtttttggctgttttttactaacaaggcagaatgtatgtactacctgaattctacctgcatttcaattaactatacaatgtctgtttattaaattactttgatttaaaaatta

SEQ ID NO: 65 - DNA, 437 bp, Homo sapiens
agatggcactgcaagagcagggaggatcacactcatgtccagaaagtgaaacataaaacagctaaacatgtaccacacagctttcatacaaaaattttatatacacaaattttgaaaaaatagagatggggttttgcttgttgtcccggctggtttcgaactcctgaactcaagtgatctgcctgcctcagcttcccaaagtgatgcaattacaggcatgtgccaccatgcctggtgactttttttctgttttgagacggggtctcactctgtctcccaggctggagttcagtggcatgatcatagctcactgcagtctcgacctcctaggctcaagtgatcctcccacctcagcctcctgagtagtgggaccacaggtgtgcaccaccgtgtccagctaatttttgtagagatggggtctcatcatgctgcccagg

SEQ ID NO: 66 - DNA, 532 bp, Homo sapiens
caggttaaagatatcagagacatgatcaagatgagagtcaaggtcaggatcagcaacctctgccctacttcctagcaccaggtgctggctgttgtgaatgcaactttctgaaatgctcttcctccatttatctgcatgtcttcctccttcacgtgcttggaccatttaatgctgcctcacgctccctgccctttcactaggatgtgagtgtcacaaagacagtgatcttggaatgaaatgttttgctcactaatgggtcccaggcagttagaagagtgcttgggccggaggaggcactcgataagagtttagtatcgatgagtgtgcataaaagtattccttgaaaaaagtacatctgggaataaaatataaaagctgttcacagtagttctctctggagtggaattataagaaagcttcatggtcaatttgatatatgttcatattgtttttttttttttgagatggagtcttgctctgtcacccaggctggagtgcagtggcgcgatctcagctcactgcaagctccgcc

SEQ ID NO: 67 - DNA, 823 bp, Homo sapiens
aaaagaagctaacctaaacaggctacattgaaaacctgttgttcagtgtagccacctttatcagtgatctcagctagatcttctggagaacttgctgcagcttctccatcagcacttgctgtttcacctcgcacttttattttatggatatggcttctttccttcaacctcatgaatcacccttgctagcttcagacttttgttctgcagcttactcacctctctcagccttcatagacttgaagagagttagggccttgccgtggattaggctttggtttaagggaatgttgtgaccggcttgattttctatccagaccactgaaactttctccatttcagcaatgaggatgcttcactttctgataatttgtatgttcactggagtagcgcttttttgttgttgttgttcttttgaaacagggtctcactctttcacccaggctggaatgcagtggcatattcacagctcactgcagcctcaaacccctgcactgaagtgatccactgcctcagcctctggagtagctgcgacctacaagcacatgccaccatgtccagctaatttatttgttatttttcatatagatggggtctcaaactcgagggctcaagtgatcctcccaccttggcctcccaaagtgctgacattacaggcgtgagccgccccacccagcccagagtagcacttttaatttccttctagatcttttcctttacattcacaacttggctagctttggcacaaaaagcctagctttcagcctgtctcagctttcaacatgccttcctcactaagcttaattgtttctagcttttgatt

SEQ ID NO: 68 - DNA, 370 bp, Homo sapiens
tgttgctagaaccagataaactccaacaccacttctatatctatcatcctgcccttctgtttgtaccattgattagttctctgtccacttctaactttgattattgccctaaaattctaagatttttggaatgttttccagattttttctcatttcttcatgaaaattgaaagaaatatctttttcctttttataccttattttaggggttatctgagagtaatattatctcatttgtcatgaacagaacttgttgaaaacaatgtcaaatatttaacatgaaagtttaggaaattataattcaacgtgcattcctgttacaagaaacataaaatgtacagaaactgtggtttttccccctgagaaaatg

SEQ ID NO: 69 - DNA, 255 bp, Homo sapiens
ttctttccttttccttcctctctcaacatgtatctcatcaattccaacctgcttaaaacccttcagtgacttcccactgacctaagattaagtcattgctctcaaatatggcactgcttacccattgttctgcatattatattctctctccatcactttctatgttccaaccacattggacttctttaatatcctcaaaactacaagtcgtataccagggaagggcttttacacaggctgtttattcactgtgga

SEQ ID NO: 70 - DNA, 551 bp, Homo sapiens
gccatatgtcagatttctatatgtgctcccttataatcttatgggaccactgtcatataagtgtggtctattgttgactgaaaaacgttgttgtgcagtgcaagactgtactaaggaaacaccatcctcccggtatagaaggtccataccccagattttatgcaagtcactgcctcctagggtctgtttccccatcttccgaataaggagtttggacttgactgattgacaatcagtggcagatacttcattatcttggtcaattagagcccttaatacatttctgctctcaggcaatgagaggaaattagtctagacaagacagataaaagggaaaaggatggttggacttgatcagaattcctaagggaggttgtaacattgttttcctgaggatcttggtgatcagagcagaccctgctggtctgtgatggagcaatgaggagggtgaaccccaagctgagacttaaccccttcccatctgcccaccttcctttccccttcccaagaggctatggtgagcaaatggctttgattcagaggggcctgat

SEQ ID NO: 71 - DNA, 487 bp, Homo sapiens
cccttggatgccagtgggcaaagattctgcaactacggaggggctccttccctgacagagagcaagagagggagaccctgatgacttcttcgtcccacgtcagcaggaagtagttacagaagacccacgacgtccttatgcccaaagcttttcagggtctccaactcttgagggggaatactgttagggtaggcaggtagccagacaagagcaggcaaggaagcccctgggaaaggaatctttagaaatgcagcccgctgatggcctccttggaaacgctgcacgctgagtcagcaaaaggaggagcgtggctacactggctacacctggccttgtggctgcattcctctgttccagaagggaacttatcaaggcccagccagaggttaccaaggtaggagctattccccactaagaagcatgtatacttctctaataattcaccctaatataccattttgttcattaaaataataaaaaaaaccac

SEQ ID NO: 72 - DNA, 292 bp, Homo sapiens
catggaaaagttatcaatgaaatttgctaaatgaaaaaagcctaactcaaaaagttacgtattatattattccatatatatgacattctggaaatgcaaaattatagggacagaaatcaaagggtttccactgactgaggagggaaatgtggctgacttcaaaaaagcagcacattaaaatttgagggaaaagtgtaatgatgcatttttatacatgacacagagttaattttggtgtgtgtgtgtgtgtgtgtgtcctggagtttctaacaacctagttttttgttaaaaa

SEQ ID NO: 73 - DNA, 356 bp, Homo sapiens
tgaaaacagaaaaaaaatgttgttagattgatcattgatcacattagctttatcttactcctactccttcattctataaatatacttttcctaaaccctaagaatcactttttaacaaatctattgttttcattactgaggcattgaattagagtatgactttgggctttgattgaatactgactctcaaaaacctgtgtaataacactaaattggagacacagagagggtcagtgattctctgtgttacctgttttatataacaactatgtttgagcattgtgattttctttgtaaaacatatctccaggctaactaaatggattttaaaaactgatactatcaggaaaaaaaaa

SEQ ID NO: 74 - DNA, 324 bp, Homo sapiens
gcgttgcagacccctctgccccagcctcaggcccaggcttgagtttcctggctgggctgagcctcactacccggcacccaccctacctgaagctggtgatctccttcctgttcatctctgctgctgttcaggtggagcagagctacctggtcctgttctgtacacatgcctcccagctacacgaccacgtccagggcctgaggtctcagccgtgctgagcaccccgctgtgggagtgggttctccagcgctttgggaagaagacgtcagcctttgggatctttgcgatggtgccctttgcgatcttgctggctgctgtgcccac

SEQ ID NO: 75 - DNA, 404 bp, Homo sapiens
cagagtggtaagagagaactaggagtaagtggtaaaatgtccctgatgccatgaagctccattccagatctgtaccaacttttacatgaataagaaatacattttaggctgggcgtggtggctcacgcctgtaatcccagcactttgagaggccgaggcaggcggatcacgaggtcaggggatcgagaccatcctggctaacacggtgaaaccccattctctactaaaaaaaaaaatacaaaaattagccaggcgtggtggtgggtgcctgtagtcccagctactcgggaggctgaggcaggagagttgcttgaacccaggtggcagaggttgcagtgagccgagatcgcgccactgcactccagcccgggcaaccgacagagtcaagtccgtctcaaaaaaaa

SEQ ID NO: 76 - DNA, 580 bp, Homo sapiens
ttccagacgtgaaaatacatatcaaaaacactgtgcaggcaccagagtcctgagattgtcagagaatttctcacagcaatgaaaagccacaagttgaccaagacccatttggtgttacatcaggcacacaggtggtacaatccacgaactaaatgcacttctcccaccctctttctccaagtgaactctgaagacaaaacatcttccgtgtgtgtgtgcaaatcttccatgtgtatcttctgtactggtgtataacattttttaaaaactgtagtaaaatacacataacatagccgggcaccgtggctcatgcctgtaatcccatttctttgggagcccgaggcaggcgggtcacctgaggttgggaattcgagaccagcctgactaacatggagaaaccctgtctctactagaaatacaaaattagctgggtgtggtggcacatacctgtaatcccagctactcgggaagctgagggaggagaatcgcttgaacctgaaaggcagaggctgcggtgagctgagattgcgccattgcactccagcctgggcaacaagagtgaaactctgtctcaaaaaat

SEQ ID NO: 77 - DNA, 361 bp, Homo sapiens
aattgaaattcctgagactgcaagggaccctacactgacagctgacttattgaactttctccagcttcaacagaccagagagtcaatctgtccagttcacttcctgcagtgtactatctgtcaggaagctcaaatccaggcttgtgaaactgagagccgcatccatttcccgtcttttccatgtgtcaggaaataagatgaaattaacttgcacagtaattaacaagtgaggcttgaattacctcaggctgggaagtgccagcctgatgctgagaatcgcttgacccaggaggcagaggttgcagtgagccaagatcacaccattgcactccagcctgggtgacagaaggaaactgtctca

SEQ ID NO: 78 - DNA, 332 bp, Homo sapiens
tttttgttgttgttgttgttgttgttgttgttggatacagagtcttgctctgttgcccaggctgaagtctactggattaatcatagctcaccgcagcctccaactccagggctcagatgatcctcccacttcagcctcccaaatagctgggactacagatgcatatcaccacacctaattttgggggtgggtagggagcgaggtctcactgtgttgctcaggctggtctgaaactcctgagctcaagccattctcctgtctagacctcccagagtgctgggattacaggtgtgagctaccacttgtggcaaaagcattaattctaaggaaac

SEQ ID NO: 79 - DNA, 426 bp, Homo sapiens
taatagtattctgccttctataaatttctaatatattcctcttggcagaaaccatgccattcagttttaaactccctgtacctagcactgaacaggctttcaataaatatctgctcaataaatatatggtttggatgcattgataggtgtaagagcaaatgcgtaaatgaatttaggaattttcaaaaaagaaaataatatggttgttgtaagcctattatgtttggaggcagaaattccacttgagaaacaatccttgtaagctaatgttacagaaattaagtgttaacaatgagaattgtaaaagagggatcatcaaggcagagataacttatgaggctcacattttcttagaataaagataagtaacttttaacctataagcttagctccattccatccttccagccaccaaaacccaaacac

SEQ ID NO: 80 - DNA, 334 bp, Homo sapiens
actttctatgtaagttggtttttaaacacataaagcccgaataccttgttttgtgattagagcccatttttctgctacctctgagtccttttaaggacaagaaccgtgtctaaccgtccaccccttcctcctttccaggtcctgtagaacatagctgcgcctggaattgaatgatcgtgttttccgtgcagagctatctgcctttggacaggaggagaactctcagcaccattccctttccacgggagcttcttttttctcattctttttcttgcctccctcaactcccatcctctgttctgggagaaggtgaagctggcctgacaggcctgag

SEQ ID NO: 81 - DNA, 245 bp, Homo sapiens
gtcatataattagatgaggaaattacataagaaacatgtagagtgaacattttaaatacatgcccatattaattgcagaacacaccctgatttcaaaaacattaaaatatcatttaaaaacaaagagggacatttaagcctaaaaattgacctggtaaagtggtttttagtaacagcaactttttgaggcttagcatgttttaatactaatgggatttttcatctgcttcttggagaaacctttt

SEQ ID NO: 82 - DNA, 387 bp, Homo sapiens
cctctgcctcccggattcaaatgatgatcgtgcctcagccttctgagtagctgggattacaggcatacaccaccatgccaagctaattttgtatttttagtagagacaggggtttctccatgttgaccaggatagtctggaactcctgacctcaagtgatctgccagcctcggcctcccaaagtgctgggattataggagcaagccgccatgcctggcccacaataaaagaaaatcttctattaaaaaaaggaatgttgacatcttgtggtggtagggggccagcttggtataaaatcctggaaggcaagctgctgctggctgggaaggggcctcgccttcccctgaattgcagttgctaatcacacctgctatgggtatttaaatg

SEQ ID NO: 83 - DNA, 367 bp, Homo sapiens
cctgatgttgaagaaaagaaaaatttgcttatgaaaaatatcactagagaaactgttcaaggactgtacctcactgggaaggatcaagccaatctcagggacacgggcctgcttcaaaattgccatcaagttgcaaagcagctccacccctaaatcccaagcaacacatcaggtgcttttactcaatgaagtggtctctgagagaaaagaaaatacaacttgtttgttatgtctttttagagtcaaattgaatataaaacattattcaaatccatatcttcaccatattgcctccacttccagtgggttctcttaagtttggttgttttttgttgtttgtttttttgatcattaaaaatgctgcaat

SEQ ID NO: 84 - DNA, 414 bp, Homo sapiens
atagggtccaggactgcacttccagtttccaaagggaaaagcttacctttcttctaaatcttctattacctttctcattttctcattttctctttttctcttcatgactaggaaaatatcagaccaagggagctgccttggggtgtaatgacataagcacgaacctgacaactttataacttgttccaacaaactgtgatacaagtccaatcacctatgaactctccactaagcattattccctcaaaccaattctaaaatacacaagccattgttaaagctgaggtcaaagcttttaatggaaaagagtatctggcaattttcccatgatgaacgattcaaacattttctttttttttctttttctttttcttttttttttttgagatgaagtctcactctatcgcccaggct

SEQ ID NO: 85 - DNA, 397 bp, Homo sapiens
tgttttccagcagttttgctgggtgactgcaggaagcacttggctttcatcattggccaactggggatatccacccctggaagtcatttgatcacttaagctcccaactcactcaaaaggtagcctgcaagggtcttgcagctttgatccaaattttccatccaaacagccatgtaaacggagaggctcctgattccagccaaggcccaagttgccgctctctttctcaacgaaaagaaagaaaatgtgtcttccactgtggctgagctacctgaacagatcaagtgctggaatgcactgattgctttgaggagcaggatcctttttggcttcatcttttcattttgctgccgggcttaaggaggctcaaattttattgcttgttataagcctcacc

SEQ ID NO: 86 - DNA, 432 bp, Homo sapiens
gctcccagtgcaactgaaaagttaatctaaaaatcttatatcacatttgaaatagaacatgtcccaatattgtttctcatatttgatagtggatgtttttgtgtatcttaaagtgtgttcatgtgttttaagttatggttttatctctagagaaaaagcaatgatgacttctaaatcataaaattgagactcttagatggatggaaaaataatatattacctatatattattcatagataagtagcatttttatttcatttcaaaataattggcatcaatttgaataacgcatagtttaagaagcttgtagcataattaaaaatggcaggttttgctttgttcctgtatcactaatgaactgttagaattttgtagagagctaacaacttttggaaataggaaggcagaaaacattactgatatagtgatat

SEQ ID NO: 87 - DNA, 326 bp, Homo sapiens
cctacagtgtgtgaggaagtgcactggcctcatgcgcagttctctgtgtgagatctgtagggagagaggagcagacagacagcatcccagccctgtggttctcccagcagggccttgctctgctagacccatctttatctgcgtgagcccctcccggaagcccagctctggtcttctgtggggccgtgggtcccagggctgcctcctacccaggaatacagctagaacatgtctttttggactgactttcaggagacacagggtggaacagcctagcctttaaataaacacctcttacacacatgtaaacacacacactggctcac

SEQ ID NO: 88 - DNA, 257 bp, Homo sapiens
tttttagaaaatctctttattagaaatcctctattcataaagtttctgtgtgactacagtactaagtagtatattcccacatttctgaggcagaataaactagaattaagggaagaagtgtaatgttatttttctatgaaatatagtattttggttaaaaccattgggaaacctacttcgattctagttgctgatgaaaattgatggtatccttttattaagcccaaatcttatccacatttaaaagcgtgaaaaga

SEQ ID NO: 89 - DNA, 764 bp, Homo sapiens
aggcttccgaaatctctgcaatgtgcttcaccccattattcccccaacccctgtcagcctaataaaatcatccagtagtttccctataaggtctgagcagagaaagaaagccagttatactattgctacaagtccaggacactgtgccctctccatggctgctgccctggtcctttattcttgctagctaacctagttcacttgtacagtaacacactacctttgctggaaagttagcatgggtctccaggctcagtaatggccaactctactgatgcagaagtatttagggatgttttttccattcattgcactaaagactaaaccaggtcaaatttatctaggaaaaaaaaggtgtgtaagatttgttttgtttttgtctgttaaaaataagctactaaataaaatggatgactctttggtaaaaaaaaaaaaaaaaaaaaaaaaaaaaaaaaaaaaaaaaaaaaaaaaaaaaaaaaaaaaaaaaaaaaaaaaaaaaaaaaaaaaaaaaaaaaaaaaaaaaaaaaaaaaaaaaaaaaaaaaaaaaaaaaaaaaaacttgggggggggccccggacccaaattccccttatggggggccttttaaaaattaagggcccgctttttaaaaactcggtaatgggaaaaccctggggttacccaaattaaacccctttgaaaaaaatccccttttgccaagttggctaaaatccaaaaagccccaacccaagggcctttcaaaaaatttgccaaccttaatgggaa

SEQ ID NO: 90 - DNA, 464 bp, Homo sapiens
gagaggatggaggaagagtgttgaatatggttccaggtggaggaattcattcattcgtttattcagaagctgttctcctagggcacattctgtgcccagactgtgattagaagtgaggtgaggcatctcagatgggtgctgtggttcatgcctgtaattccagcacttcaggaggccgaggtgtgtggattgcttgagtccaggagttcgagaccagcctgggcaacacagcaaaaccctgtctctacaaaaaatacaaagattagcggggcatggtggggcgtgcttgtcatcccagctattcgggagactgagctcgggaggacggcttgggcccaggaggtggaggttgtagtgagccctgaccacaccactacattccgtcctggtggtgaaggttgcagtgagctatgattgtgccactgcacttcaccctgggtgacagagtgagaccctgtttcaaa

SEQ ID NO: 91 - DNA, 309 bp, Homo sapiens
gtaaaatgataggagttaatgttgcaaagagtagtttacatattcaatttctgaagacacttgaatttaggaccgatgtatctgtgacaagcatgctagaagtggcaggggccatcagggctagctacttcatacccactatcctcccctggggatccaagacctgagacacaaagcaacagcctgccgagatctctcttttcatcatatctctttcaaggtttgtccatgccaacacaacctttgggcatcaaacatcagaaggtctgtgtgtctcagccctgttaaggggcaggtttctctttcacc

SEQ ID NO: 92 - DNA, 420 bp, Homo sapiens
agggcacactggaacaagtctagatggtaccttaggtcaactgtggtaagtaatgaggctgggaataactctaggggaaggcaaggcctcttcttgccatgaatctgtggctttctgagataatgagaaggcatatgcaccctcttctgtcctcaggctcctgttcaaaatatttctcttagttttcctcataaaattgtttgatctaatagtgtgtagctgttaaagcaaggctacatgttggtattaaaaaaattcatctggctgggcgtagtggctcatgcctgtaaccccagctctttgggagccaacatagtgaaaccccatctctactaaaaatacaaaaattagccgggtatggtggcaggcacctgtagtctcagctacttgggagactgaggtgggataatctcttgaacc

SEQ ID NO: 93 - DNA, 411 bp, Homo sapiens
gcttctcagaaaatggggcaaaaaatctccagacagccctactcaggttcctggtctctgttctcatgttctgacccccagaaggcctctaaatcactcaacttggagactcgccagttttttctaatcagctgcctgaaagcggttcagagttctgtcaacaagcccttgcacgctgggcttattaatgctgggccactcagagccatgactcaggaacatggcttggggtcaacactgaaaagcagaaatcacagtactgataatgggaattttgtaggaggaaacaggcttttggaacttaatgcctttgttaggtttctggatttgcagatctcattgtgtgggcctgctttaggaggaaaagctgggattcataacaatctaataaacctgacccaaaccacctgc

SEQ ID NO: 94 - DNA, 469 bp, Homo sapiens
ggcatgggtaacaaacatccactgctgggaacatgatgtactctgtctaatcctccccagtcctgcaaaggtgggcatgaagagccacgtttcagagacgaggaaacggggagaggctgaataactctccaaagcttatcctgatagtgagttgtgaagctgggatgggagccaggcctgtgaagcctcccgcaaggcagcggctgactcggaaaaggtgtgaacccagcctcagccaacacaggaaaggaaaggagcgacaatggtaattgaggaaattagagtctaggttccattctgaaggtgtcatgttgcctgcactggtaattgggcaatttaggactaggagggtccatctgttctcaacactctgcttcctcaaggctttcagtccctggctcgcatcaactccaaggatggtgtaggtgaggggagtatgcaagtgcctctagagctggaagaggctcag

SEQ ID NO: 95 - DNA, 457 bp, Homo sapiens
ctcagcctcccaagtagctgggattacaggcacgcaccaccatgcccggctaatttttgtgtttttagtagagatgggtttccaccatgttggccaggctggtcttgaactcctgacctcgtgatccacccaccttggcctcccaaagtgctaggattacaggcgtgagccaccatgtctggcctcatcatttttaatgaattgagagcatgaagtaaagtaaaacaatagggggttacaaagtctattgctgcccctttgcaatgaataaattgaagctgtagaagttgtggtttctcaaggtcacagccaggactagagccaggtctcttttcctcatccagcccaatgcccttcctacaacaccttgactgctaatagagaaggacattattaatacatggttccagtagtcaggtctctttttgcacaaaggttacctttgcaggttttatgc

SEQ ID NO: 96 - DNA, 318 bp, Homo sapiens
ttggcagggggagaggaaagagtgtccccctttatgatgctgaactaacttgtagaatctgtgatatgtttaaacccaatgccttctgtgagaggcccagcaatgtgatagaaagaggcagtgtgggcttcaagacaattgggcttaaatttggactgtagggtaggtttcttcccttatctaggcctcagtgttaccatataaaatagaggggttgaattcaatgccttgtgagtctgtgatgctgggagcccatcaaagtcgacggttgtggtgacagttttccagacttcattcaagaggtcgctgtcagtctat

SEQ ID NO: 97 - DNA, 772 bp, Homo sapiens
ggctaatttttgtatttttagtagaggcggggtttcaccatgttggccaggctggtctcaaactcctgacctcaggtgatccgcccacctcggcctccccaaagtgctgggattacaggcgtgagccaccgcacccagcttttttttttgggggggggcggggagagatgaggtctcgccatgttgcccaggctgaaagtaaaaattttatgacctcaagagttgaaaatgatttcttctttttatttttttgagacggagtctcactctgtcgcccgggctagagtgcagtggtgcgatcttggctcactgcaagctccgcctcctgggttcacgccattctcctgcctcagcctcctgagtagctgggactacaggtgcccgccaccacacccagctaatttttgtattttagtagagacggggtttcaccgtgttagccaggatggtctgaccttgtgatccgtccacctcggcctcccaaagtgctgggattacaggcgtgagccactgcgcctggccgaaaatgatttcttaaataataacacaaaaagtatacagacccctaaaaccctgccaataacaagtattggttaggcagcacagaacaggacctgtgaatttgatgagttatcactcctgtgatttgatgatgtcatatggcatagttgcccttgttttgttttgctttgttttgttgagacagggtctcatttgttgcccaggctgcagtgcagtggtgaaaccataggtcactgcaacccggaactcc

SEQ ID NO: 98 - DNA, 1164 bp, Homo sapiens
attgtagctctgtatagcacttggataatgtctgggtgtctccttaaccatcaaactgttctttatttgctattgttgttcctaaagctaagctttgctgggaaggaaatgacctatagtttcttaaagaatcattaatccttataggattcctgagttactgttttgttcctccccactgcttcccattcctgagttttgtaattcctaatccttctataatttctattaccttcaccatagtcattctttccttacgcaaagcccaaggaatgagctgctgctactttaaagtgtggtcattatgatgaatgtgaaaagagttttggcttgttctaaataatttttacaagttatggtacagacagttgttacatatcaaaaaaaacctgtttattgaaacaggaaataaaaaagggatcttttacattatagaattaaaactaattttttcttgtatataaactaattggtttgattttaaatatttctggcttttattaatatgtcttaattttgagtttgaaaatgttaagtgcaataaaaacatactagtacagattttgttttgttccaattggcatactctggggatgatcacttaaaaaaacagattttacataatgcctacttctggtagatgtcttatgagattgttctgctttttctaagttacttagatgttggatatgtacatagctgtttcttgttctgtatacatttctcaaatgtacacttgtattataataacctcccagttctaggggatatttgtgcaataaatacacatgtcaacttgaaaaaaaaaaaagaaaaaaaaaaaaaaaaaaaaaaaaaagaatgataaaaagaaagaaaaagggggggggaaaagtcgggggaagcgcaccaatcaatcagcggcaccacctggtgcagtgaagaacaggggctgccccaaactgggacagccataatcaacaaggccaacagcacgcgcgcacataaacaaccgcgcggcggagaaaaacacggtcgcaggcggaacataacgaggaagaacccccccattggggagggaccaacactggcggacacagccccaagaaatcgcgcgcagcgacaaacaacgggtgctagaggaaccacgcagacaacggcgcgaaacgcaccccgtacgaaaaa

SEQ ID NO: 99 - DNA, 375 bp, Homo sapiens
tctcagctcactgcaacctccgcctcccagttcaagtgattctcctgcctcagcccccaagtagctgggattacaagtgtgcgccaccacacccagctaattttttatttttagtagagatgagatttcaccatgtgttggtcaggctggtcttgaactcctgaactcaagtgatccacctgcctcgacctcccaaagtactgggattacaggcgtgagccactgtgcccagccttgtacttttttttttttttattgtagctctgtatagcacttggataatgtctgggtgtctccttaaccatcaaactgttctttatttaaaatgtttaattaccgtttagaaattctagtcctcaataagtgggtggctca

SEQ ID NO: 100 - DNA, 418 bp, Homo sapiens
aacacactggggggttaggcttcaaccaattaatctgtagaggacaaacacgttcagtccatagcaggaagcagtgccgccatggggaagagcattgtcgtgaaaccttttgcccctcttgttgagttttctcctccagcacaccctgaacatgctgacagtgtcaccttcctctttacttgtccctcttccgctccaagttgcctcctggcttcccagtgtctctgtgggcttgagaccagagcttgtcataagagatagatgacgtcacttgatggaaagagtcaagtgcagtgaccagcacatagaaggcggccatcaacattggtttcatcctttagagcaaagtttccccaagcgcctggtgtgcactggtgagatttggggacggggtggtacttaagacctggcactaatt

SEQ ID NO: 101 - DNA, 491 bp, Homo sapiens
gacttctcccaaaatgcagaagggggtttatagacactatttcctggattttgacggggcaagatgacatttgggttgcatcggtggagtttcccaggcctgtctcttgtattcatcattggtacctcttttctttttcgggaaactgtggtagagggaagaggagttttggagacaggctaacctgaatttgcaaccaatctctgtttctgttgcttaacctatttgagccacttagtttttcagccataaaaaaaagtctcacaggacacaggattgtgaagaggcttaaattaaaagacatctcatacacaggttaaaaattcaggtcttaacgccaaagtgcttgattcaaatcctggctctaccatctgctagccatgtgaatttggataagttattcaatttcctcttataaaaaatggggcagctgggcgtggtggttcacgcctgtaatcctagcactttgggaggccaaggtgggccaatta

SEQ ID NO: 102 - DNA, 358 bp, Homo sapiens
tttttctttccttttttttttttttctgagatagggtctcaccctgtcacccaggctggagggcagtggcatgatcttggctcactgcaacctccgccttctgggttcaagtgattctcttgcctcagcctcccaagtagctgggaccacaggcacgagccaccatgcctggctaatttctgtattttttggtgagatgaggtctcatgttgcccaggctggtctcaaactcctgtgctcatgtgctcctcctgccttggcctcccaaagtgctggtattacaggcatgagcaccacgtccagccccatttcactttctcttagtttccatgtctctgccaaaattccctatctgttc

SEQ ID NO: 103 - DNA, 332 bp, Homo sapiens
caaactgagaggaaggtacagagatacctcatatacccccttccctacacatgcataacttgacctcattatttccctttttaataaatggcaactttgtcttccatttgctcagaccaaaaccctggagtcatccttgatgtctcaagaaaaagatcttatacatttcacattcagtctaattctggtcagctccaccttgaaaatacatttagaatgtgagcactttcatcattaccaaagctatactctagtcaactgcagtagtttcttactaatttcccagtgtctacccctgccctctacagtatgtcttccacaggcaaccaaaa

SEQ ID NO: 104 - DNA, 351 bp, Homo sapiens
tttttttttttgagacagggtttcgctctgtcgcccaggctggagtgcagtggcactatctcggctcactgcaagctcagcctcctgggttcacgccattctcctgcctcagcctcccgagtagctgggactacaggcgcctgccactgcacccggataattttttgtatttttagtagagacagggttttaccgtgttagccaggatggtctcgatctcttgaccttgtgatccacccgcctgggcctcccacagtattgagattacaggcgtgagccaccacacccagccgtctatgatctatttttatgttcatttttgtataaggtataagatatacgtggaggttc

SEQ ID NO: 105 - DNA, 598 bp, Homo sapiens
gggggtaaccctcctatcctgctgtgagaatataacatggtatagccaccttggaaaacagcttgtcagtttcttcaaagttcagtgtagcagggcgcgatggctcacgcctgtaatctcagcactttgagaggcctcccttgatcatgaggtcaagagattgagaccatcctggccaacatggtgaaacctcgtctctactaaaaatacaaaaattagccgggtgtggtggcgcgtgcctgtaatcccagctactcaggaggctgaggcaggtgaatctcttgaatccacgaggcggaggttgcagtgagccaagatcatgccactgcactccaacttggtgacagaacgagactccgtctcaattaaaaaaaaaaaaaaagttcagtgtaaatttaccctattcctagtaattgcactcctacgtaaatatccaagagatatcaaggaatatgtccagacaaaaccttgctcaagtatgttcactgtaacattattcccaatacccaaaggtggaaacaaccaaaatatctataaactgatgactggatcaacagacagtatgttcatgtcacagaatagttagtgctcagcaata

SEQ ID NO: 106 - DNA, 455 bp, Homo sapiens
  misc_feature (1)..(1): n is a, c, g, or t
ncatttagcttggcgttttattcattccatcaccccttactgtaactactatggcaactccaaataattgtcatgggactatgtcccatcttaatgggtctggatggcatggtgctcctcttaagtgtgctggaattctgcattgctgtgtccctctctgcctttggatgtaaagtgctctgttgtaccctggtggggttgtgttaattctgccatcacattctcacatggcagaaacagcatctcccacaccacttaatgaggtttgaggccaccaaaagatcaacagacgaaatgctccagaaatctatgctgactgtgacacaagagcctcacatgagaaattaccagtatccaacttcgatactgatagacttgttgatattattattatatgtaatccaattatgaactgtgtgtgtatagagagataataaattcaaaattatgttctc

SEQ ID NO: 107 - DNA, 338 bp, Homo sapiens
cattattagagctaaatacagagataggctacaatataataagaacaggagactttaacttcctctttcatcattggacaaatcatttggacagaaaatccgcaaggaaacatcaggcttaatctgtgctatagatcaaatggaccagatagatatttatagaacattttatcaaatggctgcagatgcacattcttctcagcacatagattattttcaaggataaatcatattttaggctaaaaaacacgtcttaaaaattaaaattaaaattaaattttatatcaagtatcatctcagacttcagagatgacgcaaaactagaaatcaataacaag

SEQ ID NO: 108 - DNA, 396 bp, Homo sapiens
ctcaaaactgatgcgtatccagagagaggcaatatcctcctcattatcacagacagtgtccttaaaaaaactgccttttaacttttcagcaataggcactgttaaccgtccactctttcttgaaattcactcatctcttgattttatcataatatttacaattggctcttttttggctgagccaattctttatttacatattaattgattcatttatctattctatttaatagataaattaattactcatctattcaaaaatatttgcacacggtaaactgaataaatcatcagcttagtgaattgtcacaatatgaacatgtttatttaaaactatctagatcgtgaaataatctatgaccatcacaacagaagcactccttatacactttccca

SEQ ID NO: 109 - DNA, 474 bp, Homo sapiens
gcccaaggcatgaggcagagcccaagacctgctgagcccatgggagtgagccggggcaactgaggcagggagcctgggaggaagccatcactgaggcaggcaggagatcagcgggtggactggaaagcaaattaggaggaaaacctaaggggcgattgggtcaaatcaaacagaaggactgagtgtgggggctgacagagaaggaggaatcaggagtcctgtccaggtttctgaccagcaactggagagatgcttactgagacagtggccatgcgggaaggcgggaggggtgttcagaacgtgctcaagttcacacatgtggggatggagatgctcttaagctgctgggctgtttctcctgagacaagcccacactggagcggccagcagcctacagatggtaattaaagccacagggaggatgagctcacgcagggagaacgcgtggagggaggaggtgaggactgggatcca

SEQ ID NO: 110 - DNA, 435 bp, Homo sapiens
gtggaaccctgctctactaaaaatacaaaaattagccaaatgtggtggcagctgcttataatcccagctactcaggaggctgaggcaggagaatcgcttgaacccaggaggtggaggttgcagtgagccgagtgcagtttgggtgacaagagcaaaactctgtctcaaaaaaaataagagaaatctttgggatagctgtgaggcaccatgatgttgaggtaattgcatgggttttagattcccacctcgggtttgaatcttggcctggccacttctgagaccttgggaatccacttggccatttgagcctgagttgtctcatcaaacagaagtaacactattaatcttgtgagtgttgattgtaataataaacatgaaatactttgtttacagccttggcatattggaaatgttaataaatagtaacttctgtca

SEQ ID NO: 111 - DNA, 383 bp, Homo sapiens
catgcccagcgtgatgacaagcagcaggggttttgaggggaacaaggcagacatggcccttgctctcctgaagtacatagccttgcttacaatacttgtcattggccgggggcagtggctcacgcctgtaatctcagaactttgggaggctgaggtgagaggatcgcttgagcccagaagttcaagaccagcctgggcaacatggcgaaatctgtctctaaggaaaatgaaaaaaattagccaggaaaggtggtgttcgtctgtagtcccagctactcatgaggctgaggtaggaggatcccttaagcccaggagatgcaggttgcagggactgagaacatgcatggcactccagcctgagtaacagagtgagaccctttctc

SEQ ID NO: 112 - DNA, 150 bp, Homo sapiens
cacttgttaccatacctacccgagtttaaaatataaaagtttaaggcagttaacattagtctgcatctgtgtcttaccaatatatatgtataggcaataaatggtaataaaagttatggggtaggaatagaaatactgggcttaaaagca

SEQ ID NO: 113 - DNA, 299 bp, Homo sapiens
ttccctctaaaccaggttatacaagagtatacatttcattgccacttttctaaagcaactcatctgttttcatagcgaattctactattcaattggattcatgaaagttgataagaatacaatttgtaagattaaccctctaacaaacaacctgtaacagttcctactccctaatcatctcgtcaaatggtaccaataagggaggctgaaggaagagggggagatatatatggtttgatggagaggcagtaatataaaatgcgagaaaaaaaccatttctcacagggtacacctttctc

SEQ ID NO: 114 - DNA, 399 bp, Homo sapiens
ccataagagtagaggtccttggattttactctacccttactgaaatgaaaaatgcatacttaatcttagtctttttatttagtttcattaataatgccagtggtaataggaagagctgtgcagttaaatgagggtttgaatcaaggctacctgagcctcagtttgtttatgaagttgggataatatccagtacattcaagttctaagaattaaatgagataatctatgttaaatgctcagtaagtgcttgttgcaaaaatgatagtattgccatagagcagtaaagcaatctgtgcttttacttgtaaaatttgcttagttctgagcatggcagttcatttcctagtcactcccaggcttatctattgtatacactgttatacactatattatatacta

SEQ ID NO: 115 - DNA, 408 bp, Homo sapiens
gagtcaatcagcatttactgagcacctactatgcggctcctgcacctcttcctgcccgaccaagcccgattcaggacgagggcagggctgagcctgtgtgagcctgtgacctagggtctctgtggcttcacacctgagcctggtcagggcaggcaggtgcagactggggtaaccgcagcccaggtgcccacccagggcctccttagagccaccccttcctctggagcctccccctctcttgcctgtttctcagcagcttgcaaaaccagttaagccttaatctttggtgattgaaggggtgtcctagtcctaaacccagctctgagccagagggagcccctgctgggagcacctgccagagtcacaggccttcctcagaagacaggcaggatggctgggtgtggcagc

SEQ ID NO: 116 - DNA, 407 bp, Homo sapiens
gtttttcaaaaaaaatttggggggtgggaggtcacactcttatcactgttttctatgacatagggaaactgagtcatgttcccagggtctgcatagctagtaagttcttggaatgggaagtggtcccagttctgattcccaaaaacacatggcttaaccatgccctttaactcagctttcctgagtcccaaggaggaaatcccatgctctctcctcagaactcccccaacctttgcatttctgtggacacctgtcatttacttgcatggcaaggaaatatgttgcatagtgcttggcacatagaaggccctgagagtacttgcgcttcttgcccttcctcctgaaggcaagccctgaatcagagtcaggtttctaatgccggcagcctggtgcctggcacgtggttg

SEQ ID NO: 117 - DNA, 474 bp, Homo sapiens
cacactaagccactgcgctggtttagaactgtctgaagtccctcctagaggtcgtgtgtttgattctgcatctccgtgatttgtgaatcttgcatcatttaaattcagccttacacactgatgcctttggtgccgtcccaatatttaggtagcaaactcgtagtgggtagagattcaggcttaagcttccagcctggctctgaggagaactgtctggggctccctgccctcttccccatggatgagactcttcccagccttgggcaaacacagcggggagctggcaccatctcccgctagacacctcctccttttcctcttgcccttaccatgactcccgagttattctcagaagtaaaagctttccacgcctgctcttctctcctgcagccaggagtgcaaatttagatattggagctgctcaggcagaaaaatggccctggaatcagggaagcagaaacctgcagctgccac

SEQ ID NO: 118 - DNA, 414 bp, Homo sapiens
atcacccgggcccagggtacagcttgcaagagccctgaggccagggtcgaggttgaggacagcagggcgggctcgcagccgagtggcccctgggacaggggaggaggccactgtgagccgccattgagacttttattggagtgaaatgggggctcaggcggctgatggaggaggcatgtgacctacataaggttttcaaaagattgtttgctggatgggggctctgatgccaggggagctgggtacgggtcccagcgagaggagaccacctcgatctgagcaggtggtggctgggagggcaggaagcattagagccaggtgtggctggaaggcccaaccacatgggtttgctgactgatccgctgttggggcggaggcacatttatgaaaaggggaaggactcgggttgagccc

SEQ ID NO: 119 - DNA, 370 bp, Homo sapiens
ttctttttttttttgatggagtctcacttttgttgcccgggctggagtgcaatgctgcgatctcagctcactgcaatctccgcctcctgggttcaagaaattctcctgcctcagcctcccgagtagctgggattacaggcatgtaccaccacgcttggctaatttttgtatttttagtagagaaagggttttgccatgctggccaggctggtctcgaactcctgacttcaagtgttccacgcatctcagcctcccaaagtgctgggattacaagcatgagccaccgcacccggccgatccttcttaatgtaggtaactctttgaaaatctgtttgtgaacccataaaatggatcctataaacgtgctcct

SEQ ID NO: 120 - DNA, 716 bp, Homo sapiens
attccaaactattaaactgcaaaagcagacatgagaaaagaaacttaagtcaatgtttttatcacatgttggtgccagcgtcccatagtggtgctaaatttatgaaattgcaacaaaacaaaaacccaaacaacccaacaacgaaaagctatttagtgaacaccgtgactaacaagcttattagaactgcttatcagagctatgtgtggattttgtagggggaaagattttcttccctcgtagacattttgcaaaataaaagtaaaatattacctttatgtacgtggtagatagaattccacaagcttcaaattcaacgactcaaaaaggttgcttttactttcccatatctcagaagtcacttttattttatttattttttagagatagggtctcgctctgttgcccaagctggagttgcagtggcacaatcatagctcactgcagccttgaactcctgggctcaagcagtcctcttatctcagcatcctgagtagctgggactacaggcgcataccaccactcctagctgatttttaaattctgtgtagacataggatcttgctgtactgcccaggctagtcttgaactcttggcctcaagtgatcctcccaccttggcctcctaaagtgccgggattgcaggtgtgagccaccatacctgcccagaaatctcttattttaaaccccaattcctcctgatagtaaaaaaaaaaa

SEQ ID NO: 121 - DNA, 240 bp, Homo sapiens
tggatataaacctaggagtagaattgttttatcaaagtgtatttcttttagctttttggggtaccactgaattatttttaatgtgtatatatacacagatatttgtttttgagacagagtctcaccgtcacccaggccagagtgcagtggcacgatctcggctcaccacagcctctgcctcctgtgttcaagtgattctcctgcctcagcttcccgagtagctgggactacaggcgcatg

SEQ ID NO: 122 - DNA, 378 bp, Homo sapiens
cttcgggctgtaaagaaagcatagttgtttctgcttctaggaggactcaggaagcctcacaaccataccagaaggccaagcggcaatgaagtgtttcatatagcaggagcagaagcacgacagcgagaggaaagaggtgccatatcctgttatgcaacttgatctcatgagagctcactatgaggagatcagcatcacaaagacgatgcttaactattggtgaaggatctgccccccaccccatatccacccctcgctgtctccatgcagaagcctgagacagaggcagagcctcttggaaaacctctactagggcagcgcagaaggaaaatatgggtttggagcccctatgcaggaggccaccatcctccagacccc

SEQ ID NO: 123 - DNA, 441 bp, Homo sapiens
aaccagtgataataccagttgctctcctcatcatgtgtatttggtcgttctcgcattgtataaagaaatactcaagacctagtaattttttaaagcaatttaattggcttatggttctgcaggctgtacaggaagcatggcaccaacaactctcagcttctgcagaagcctcagggagcttttactagtggcagaaggcgaagaaggagcaggcacatcacatggagaaagcaggagcaagagagagagaggggagcaggtgctacacactttcaaacaaccagatctcttgagaactcactcactaccacaagaacagcaccagctgggtgcagcggctcacgcctgtaatccaagcactttgggaggccaaggcaggcggatcatctgaggtcaggagttaaagaccagcctgaccaacatggtgaaaccccatctcta

SEQ ID NO: 124 - DNA, 459 bp, Homo sapiens
atcaaaaaagccctttcctaaactatatccacagtgaagttatatggtcctcccccactccaggcttgttaagaaaaaataacacagctgttcctaaaaggcagctgacaaattcaccctcatcctttttctatactcctctacccccacttgaaacaaattttggagacaaggccattgctactgtgatgagaaaggagctctcctccccagtttctgttgtcaggttagtgcaaatgtcagaaatggccactatcagttgtaaagaactgtggatcactgtggtcaagtgccccggcgttgctgttagtttggtcactgaatggaagaaagaactggcagtttagaggaatacccctgagacagaaatctcattttaatctgcatattgcagactggtaaacttacttggaaaaaaaaagaaggcgctcataatgtccctctatgttgtgctgacga

SEQ ID NO: 125 - DNA, 358 bp, Homo sapiens
ggtttgcggaaattaaaaattaaataacatggttataccagctagattttgcatcatccagaatgggtgaaaaatatgaacatatttttatatgtcaaaatcagaagtcactctagaaatggatatgaatagtctttaactagaatatcagagtttcacaaagctttcatctctgtagctgcgatatagccaaatttgcatttcgaggactgttccagagtatagttttgtaaggcctgaaaatgagaacttgattttcatcatcctgaactggtctttgaacagtgtgccaagggtgatcaacattaaatatatgctctaagtgtctcttgattatagggacattggttaaataatg

SEQ ID NO: 126 - DNA, 447 bp, Homo sapiens
gtacaaagatacttactgtttggagtttgcataaacatacttgtttaaaaacaacagcattttttaggctaaatctgtttttccattagttgaagtcatagaaccttcaaggcttcctgcatttctgtacctggtatgtcccctcacattttggaactattatctccttgtaaattattagaaaaattaaattagattaaaacttcttgagcatttctttattaggaaaaatggaaatccattacatattcttttgcttgcattcaatcttactgtgctttttactgcaagctgaagtcccctttctactttaaatgggagagaaaatcttgtgctgacatgagatgctcattaccaccaaggcactcattaccaacaagggcagtaaaggaatcgcagctttggctgcctctcacactgaatctgagagttgctattattagaatg

SEQ ID NO: 127 - DNA, 360 bp, Homo sapiens
aaaaggaaagttgcacactttgaaggctcagcttctccagtagaaagtaacctgtggggctatagaaaggcaccaggtatggaatcccaagtcagttccttctcagctatatggatttaggaatacattcagcctcaacatgctcagctgtaaaatgggaataaaaaaactgcactacccttcatattcccgaagactgttgcaaaaatgatctttatggattcacatgtaaaaagaactgcacaataataaaaaagtatttcctattacagtgattttgtttaccaggcaaataaaacagatttggacacaaaatggaaaaggtcatatattataactaaagtctccttggtgatataa

SEQ ID NO: 128 - DNA, 251 bp, Homo sapiens
tgcatttcttattgaaattgaacccagactggggactgtgccatttttcccatttgttactactgttctcttacaccaatgtcttttttgactgctaaacttcattctgtaaaggcaaaatagaaatttttttccaaaaggaaaagtctatatgccttctgtacaaacttgtgaaattagactaaatggggaatcatcacgagtccttaagtaaagggcaatagataaaatttccaaaacattaatttttt

SEQ ID NO: 129 - DNA, 396 bp, Homo sapiens
ggagaatgacccaataatccagtgaggtcctgacacttatttgtatacccttcttcacagggacagggttgatgaggagtgtagggataaatgacttacaggggaaatgaataagcccaaagcacggtggtctgggacaaagttcctctgagctctaggacaggtggagggaaggtgagtggttgagcttcactgtaatcaaaggttatcttattatgcagataaagcctcccaggtaatctcttggagctgtcttgagaagaatagatgaaaagtctttctgggtgcagtggagactcccagtgtctcctcttctccagtggttaatctttcctggttgtttgatgagattcctagggaggaggtcttaagacaattgcatttccttttaaaggg

SEQ ID NO: 130 - DNA, 406 bp, Homo sapiens
ctccattgatctacttatgtctgttgtggcattggccctacaatgctttatttacagtggctttaggattcattttgatgccattagtattaaaaatgtaccttgctgtttttgagcaaatacatgtccccagtgaccaagcttagctgtgaatgttgtcgtggacatcagaggcaggcctagccagtggggggcatgggctttgggaatccttatttgttgctgcttttaaaaatgtggctcataaatgcccctggcatttgctgtcagagaggcccttctgagtgtccctgacatagggcacagtctcgcagggtggccaccttaagctgcaaccccagttataggttcgtcaaagatccagttgtgatgttacacacccatgccaggtgcacatcacaatccc

SEQ ID NO: 131 - DNA, 387 bp, Homo sapiens
gcagatgttcatattttggatagggtaaggtcagtgccgtcgtcagaggaaaaactctcggccatcacaggatgggagagaaagtttgagttgtgaagaatactcaaatgccgtttaaggaaatgggttcttctgcacctattctttggaatatttagggctaagttcttagtttttgacatcataaaaatgtcaaagtattctgttctaagagccatttcaaacaactgactagaatttcagagcaattacatgagagtaataccattaaaatgtttaaattacccatagtcctatatccctaacaagtatgttcacgcttgcatgttctcttctcatctttactgtgtgcatactttcttagtaatggcacgtagacattgttta

SEQ ID NO: 132 - DNA, 515 bp, Homo sapiens
agttaacatgcttttcttgtatttgtactcaaataatagtttggtggggtataacattccagaatttcatttttttttccttgaaacattttatgcatttgttgtttcactgttctctttattcatattgctggtagaggtctgacgccagcctgcattttgcacccttttcatgtatttttgttaaactgcactctcacaataaaacattctttgaataatcaatcacgtgtttattatttactggatttttttcagtgtctgacctactctacacacatcaagggattcaatttctttggcattcagtaattgtactataatatggcttgacattgactgctctgttaaacttcccttggacacagtatgccttttcagtcattagattcaagttagcttttattactgggaagttatatataatgttcttgaaataagtaaaataatggagatcagttaaatacatatgggctctccactgcctaccttcgttgtcttttcatatctttaac

SEQ ID NO: 133 - DNA, 378 bp, Homo sapiens
agatgatgtatgaaaaggctattgggaatgccatgtacagttgtatcatctgtgcactgctcaaaagcacctgctataggcaggaggcaaggctagaatccctatgtcaggtcacattccagaggaaggggcaccatttttgataagtccacccagaggggagtgcctttatgtgcttgtccaccatgaggggcaacatttaggttttcttatgaaggctgagtaggaggctgcctggcctggagcagcggccagttcctgcccagaggcagtactgaaatagtccctgtctgtcttgatgagcattataagactgtaattatgagcatgattaagtgtgctgagtcccctgtcatcgctgtgacctcaccccaaaga

SEQ ID NO: 134 - DNA, 242 bp, Homo sapiens
agcaaaatcctgtctcaaaaaaaaaaaaaaaagaaagaaagaaagaaaccgaccaaccaaccaaacaaacaaaaacattagccaggtgtggtggcatgtgtctatagttccaactactggggaagctgagatgggagaatcacctgagcccaggaggttgaagctgcagtgagctgagccatgattacgtcactgcattccagcctgggtaacagagagaaactttatctcaaaaaaaaaaa

SEQ ID NO: 135 - DNA, 544 bp, Homo sapiens
ggcttttgcctcttatacacatgttaaagctgattatgatgttagataacatagaaattgggtgtttggactcacaaatagattttcagaattcagatgtatgataaagtggagtgatggtaacaattttttttttttaacggctttttggttttctcttcctgactcttgtcaaagaatttcttgctcttgagggaaagcccatgggagagtgaaacaaagaaaattagtagaaggcactgaatgccaaaaatgtcttcttacatataattataatcaattatttcccattattgtcaatatccttccctaggatgtatcttgactgggaaaaaaagtaacttggaagagctaaagcagtatagatttgccatgctgattattttaaatgtaaccagaatggcttttgggaatgccaaatttttataaggtgcagtagacagatagaacccaaggataaaaactttcacatggttctttcagatttgatgtgcattcattaataaagttgtcagaacccattgtatcaaaccataacatgaaa

SEQ ID NO: 136 - DNA, 440 bp, Homo sapiens
agcaaccatacagacctgtgtttgaattcctcctctgccacttcctagccatgcagcactaggcaaatcatttaaactctctgaactgttcttcatctgaaaaaatggagattcttctgaatatttattatatgcccactatgtgtcagatgctgttctaggtgctgggggtctacttgtgattaagagtattaagctcggacgggtgcggtggctcatactttttttttttttttgagaaaggcagtattggcacgagttcctgtgtcgaacccacccacccccggggaaaagtggtctcccatgaacccagttctgggtgccaaaagggtgggggatagctgtggtaggaaacttctgggggtgggaacaaattcagtaaattggggtcagggcttggaaaatttggcctaaatgaggggtccgagctcgatttcgaa

SEQ ID NO: 137 - DNA, 317 bp, Homo sapiens
agcaaccatacagacctgtgtttgaattcctcctctgccacttcctagccatgcagcactaggcaaatcatttaaactctctgaactgttcttcatctgaaaaaatggagattcttctgaatatttattatatgcccactatgtgtcagatgctgttctaggtgctgggggtctacttgtgattaagagtattaagctcggacgggtgcggtggctcatgcctgtaatcccagcactttgggaggccgaggcggacagatcacgaggtcaggagttcaagaccagcctggccaacatagtgaaaccgctgtctctgc

SEQ ID NO: 138 - DNA, 316 bp, Homo sapiens
ggccatctctattgctccacttcctcctgcctgtgctccacttctgccactacaagaacagaggcagcatgctgcagcacaaacaactgaagacttcagagtggggcagacctagctgcagtcctatctccaccacttagtgctgtgtaatgctgataagctgcatggcctccctgtaattctatggcatagcttagaaagtggggacttcagtaaaaacatgtgggctactgtgatcaagtgagctacttaggtgaagcacaggcagtcaccccctagtgatgttggctcatctccacagggtgggctgaagtac

SEQ ID NO: 139 - DNA, 598 bp, Homo sapiens
ttgggggctgtattacagattagtgatttctgccctctgaagccagttttatttgttaagtgttttgcatgactttatttttaacgagttttgtggtttggggctgggggcaggcaagtggagtggaaatgtggggtgctcttgatggaaagtgtcttgaactcttctgtcagtatatatatatacatttgagctgatattgtattcccatgaacatcgttttgcatgtttcttgtcacatgtcctacttctaaaagtatttaaaaattagaaaggaatgtacctagtattgtcacatcctttgttaaccatacttacatgttttgtttaacaaagaggaggggaaaaggagaaaagaatggtggtgtaaactagtaagggggatggataggtttttactaatttgcgctaaaacccaaatagattttcttatttctggactctaagaatggtccttgttgctcttgggaaagaggttcacagcttttctgtcctgggggaggaagaaacactcatcttctagaccccagcagccagagcatatcttccacggaaaaaaacagccagcatccttctctcaagtgtgcctcttccatgg

SEQ ID NO: 140 - DNA, 412 bp, Homo sapiens
ttataccgtgaaataaaattccaagtattcttagctctgtttttttttccacagttatttttgcacacctagcacagtgcttagcatttagtacaccttaaaaatacttgctagaacagccagggacagtggctcatgcctgtaatcccaggactttgggaggccgaggcagacggatcacctgaggtcaggagttcaagacccccctggccaacatggtgaaaccccgtctctactaaatatacaaaaaattagccaggtgttgtggtggtcactgtaatcccagctactcgggaggctaaggtaggagaattgcttgaacccaagagagggaggttacagtgagacgagactgagccgttacacttcagcctgggctacaagagcgagaatctgtctcaaaaagaaaaaa

SEQ ID NO: 141 - DNA, 429 bp, Homo sapiens
atccctgccctttcactcctttgcagcggttttctcccctaattccagctcatcgcctctcctttttcccctccatctcctccttcatctccccccccagtcttttccccttagccagatttggtccttctctgccaatctagggcgggggtgccgttccgatgtaatcatatcctcactttgcatcacccgaggacgatcaaaagctcgtcgatggtgccacaagtcacctcgagaagaggggacattgagcagcaccctgctaggcagtgcctttctggtgttctttcggttgagcggtcccggtttagattggaaatttccaggggtttcctttgccatcgcccaattccaccgctgccctcagcctggatttcccaccctgtccgcggggaaccacacccttcccttcgcgaggttgccagccct

SEQ ID NO: 142 - DNA, 1302 bp, Homo sapiens; identical to SEQ ID NO: 7

SEQ ID NO: 143 - DNA, 3329 bp, Homo sapiens
gtgggggccaggcagcacagatgaagcatttacctatctaggtaagtcaggaggagctcaaaaggagaagaaaacagtaggaggcaggggaagcagcctctgtctccatctctgccctttgaaacaaaagggtatttcttttctctcttcagcccccaacccagtggaggcccggcttgggacattgttcacttcccctcgcttcccctctagaagccccctttgccatccctgcaccttgtttcgggtgatgcccgagagggagctgtggccagcggggactggctcagaacccgtgacccgtgtcggcagctgtgacagcatgatgagcagcacctccacccgctctggatctagtgatagcagctacgacttcctgtccactgaagagaaggagtgtctgctcttcctggaggagaccattggctcactggacacggaggctgacagcggactgtccactgacgagtctgagccagccacaactcccagaggtttccgagcactgcccataacccaacccactccccggggaggtccagaggagaccatcactcagcaaggacgaacgccaaggacagtaactgagtccagctcatcccaccctcctgagccccagggcctaggcctcaggtctggctcctacagcctccctaggaatatccacattgccagaagccagaacttcaggaaaagcaccacccaggctagcagtcacaaccctggagaaccggggaggcttgcgccagagcctgagaaagaacaggtcagccagagcagccaacccaggcaggcacctgccagcccccaggaggctgcccttgacttggacgtggtgctcatccctccgccagaagctttccgggacacccagccagagcagtgtagggaagccagcctgcccgaggggccaggacagcagggccacacaccccagctccacacaccatccagctcccaggaaagagagcagactccttcagaagccatgtcccaaaaagccaaggaaacagtctcaaccaggtacacacaaccccagcctcctcctgcagggttgcctcagaatgcaagagctgaagatgctcccctctcatcaggggaggacccaaacagccgactagctcccctcacaacccctaagccccggaagctgccacctaatattgttctgaagagcagccgaagcagtttccacagtgacccccagcactggctgtcccgccacactgaggctgcccctggagattctggcctgatctcctgttcactgcaagagcagagaaaagcacgtaaagaagctctagagaagctggggctaccccaggatcaagatgagcctggactccacttaagtaagcccaccagctccatcagacccaaggagacacgggcccagcatctgtccccagctccaggtctggctcagcctgcagctccagcccaggcctcagcagctattcctgctgctgggaaggctctggctcaagctccggctccagctccaggtccagctcagggacctttgccaatgaagtctccagctccaggcaatgttgcagctagcaaatctatgccaattcctatccctaaggccccaagggcaaacagtgccctgactccaccgaagccagagtcagggctgactctccaggagagcaacacccctggcctgagacagatgaacttcaagtccaacactctggagcgctcaggcgtgggactgagcagctacctttcaactgagaaagatgccagccccaaaaccagcacttctctgggaaagggctccttcttggacaagatctcgcccagtgtcttacgtaattctcggccccgcccggcctccctgggcacggggaaagattttgcaggtatccaggtaggcaagctggctgacctggagcaggagcagagctccaagcgcctgtcctaccaaggacagagccgtgacaagcttcctcgccccccctgtgtcagtgtcaagatctccccaaagggtgtccccaatgaacacagaagggaggccctgaagaagctgggactgttgaaggagtagactctgcgaccagtacagaccctgtcctggctgaacaagaagagacacatgctccacttgggagcctttgccaccacgcaactcagggctcaagatgaatgggagggagagatttgagtccaagcatacatttatattcagtgttgtgccattgagttcccatgtggatcattctgaaggtgatctccacaagagggtgtgtgtgtgtgtgtttggtgtgtgtgtggagggggggccgctggatacatcactgaagctattgatataacacaatgagtcactgttcagaattttgctcttgttagatgttttcttacattgggtagagtccagcctagtgagagctgagtgaaggggctggccatgcctgagacaaaaagtcaaatgagacaatggacgtgtcaatgacttgaaaaaaagtcacatccagcaaatgcagggtcacatgaaatatgggcctcctggaatccctacagtggatggagactggctcataccttgccagatccctctctcagttccagccttctggacaaggcctgggctaagaggagctgattcgttatctcttcacccactgccctctcagtatcaccagtcccaaagacaggatacgtccctgtaacccaatctctcggttgattgatagcagaacagctcttgttggtctgagaaggcaggataagtgaccacatatttatgccactacctccaccagggagagtccttctccacaggcttgataaattcaatcaccaactgtgctgtcgtccctgactctgctactcccgttcttcctgctttcctgctccgtatctcagtctgcactgaccccagggctgggctgacatcaagatgggagcccagcccacgggctttataaacacccaagaaccgtttcagatcttctctgtgctgatgcaggtagttttaaatttttctcagttccagtgatagaaaacccacacaatacatcctctgccagtcttaatagaatatcagaggtaagaggggcctcagagaagctctgacgcagtgctgctggggaagggaagtgactaaccccgggtcagcctgccatttagggaaagagctgaggttcttacccttgttgcatgctgccacctctccttagccagtgctcttgtacatccacacagcaccctaaggagccatagtcaccatcaaagactcaaccctaaggcccttcaagatctcaaagtgccttctgaagcatcagagattaaatattgttcaaactaaaaaagttatt

SEQ ID NO: 144 - DNA, 2184 bp, Homo sapiens
  misc_feature (2043)..(2043): n is a, c, g, or t
gtgggggccaggcagcacagatgaagcatttacctatctaggtaagtcaggaggagctcaaaaggagaagaaaacagtaggaggcaggggaagcagcctctgtctccatctctgccctttgaaacaaaagggtatttcttttctctcttcagcccccaacccagtggaggcccggcttgggacattgttcacttcccctcgcttcccctctagaagccccctttgccatccctgcaccttgtttcgggtgatgcccgagagggagctgtggccagcggggactggctcagaacccgtgacccgtgtcggcagctgtgacagcatgatgagcagcacctccacccgctctggatctagtgatagcagctacgacttcctgtccactgaagagaaggagtgtctgctcttcctggaggagaccattggctcactggacacggaggctgacagcggactgtccactgacgagtctgagccagccacaactcccagaggtttccgagcactgcccataacccaacccactccccggggaggtccagaggagaccatcactcagcaaggacgaacgccaaggacagtaactgagtccagctcatcccaccctcctgagccccagggcctaggcctcaggtctggctcctacagcctccctaggaatatccacattgccagaagccagaacttcaggaaaagcaccacccaggctagcagtcacaaccctggagaaccggggaggcttgcgccagagcctgagaaagaacaggtcagccagagcagccaacccaggcaggcacctgccagcccccaggaggctgcccttgacttggacgtggtgctcatccctccgccagaagctttccgggacacccagccagagcagtgtagggaagccagcctgcccgaggggccaggacagcagggccacacaccccagctccacacaccatccagctcccaggaaagagagcagactccttcagaagccatgtcccaaaaagccaaggaaacagtctcaaccaggtacacacaaccccagcctcctcctgcagggttgcctcagaatgcaagagctgaagatgctcccctctcatcaggggaggacccaaacagccgactagctcccctcacaacccctaagccccggaagctgccacctaatattgttctgaagagcagccgaagcagtttccacagtgacccccagcactggctgtcccgccacactgaggctgcccctggagattctggcctgatctcctgttcactgcaagagcagagaaaagcacgtaaagaagctctagagaagctggggctaccccaggatcaagatgagcctggactccacttaagtaagcccaccagctccatcagacccaaggagacacgggcccagcatctgtccccagctccaggtctggctcagcctgcagctccagcccaggcctcagcagctattcctgctgctgggaaggctctggctcaagctccggctccagctccaggtccagctcagggacctttgccaatgaagtctccagctccaggcaatgttgcagctagcaaatctatgccaattcctatccctaaggccccaagggcaaacagtgccctgactccaccgaagccagagtcagggctgactctccaggagagcaacacccctggcctgagacagatgaacttcaagtccaacactctggagcgctcaggcgtgggactgagcagctacctttcaactgagaaagatgccagccccaaaaccagcacttctctgggaaagggctccttcttggacaagatctcgcccagtgtcttacgtaattctcggccccgcccggcctccctgggcacggggaaagattttgcaggtatccaggtaggcaagctggctgacctggagcaggagcagagctccaagcgcctgtcctaccaaggacagagccgtgacaagcttcctcgccccccctgtgtcagtgtcaagatctccccaaagggtgtcccccattcatcttgagccctgagttgcgtggtggcaaaggntcccaagtggagcatgtgtctcttcttgttcagccaggacagggtctgtactggtcgcagagtctactccttcaacagtcccagcttcttcagggcctcccttctgtgttcattggggacaccctttggggaggtctgacc

SEQ ID NO: 145 - DNA, 1657 bp, Homo sapiens
gtgggggccaggcagcacagatgaagcatttacctatctaggtaagtcaggaggagctcaaaaggagaagaaaacagtaggaggcaggggaagcagcctctgtctccatctctgccctttgaaacaaaagggtatttcttttctctcttcagcccccaacccagtggaggcccggcttgggacattgttcacttcccctcgcttcccctctagaagccccctttgccatccctgcaccttgtttcgggtgatgcccgagagggagctgtggccagcggggactggctcagaacccgtgacccgtgtcggcagctgtgacagcatgatgagcagcacctccacccgctctggatctagtgatagcagctacgacttcctgtccactgaagagaaggagtgtctgctcttcctggaggagaccattggctcactggacacggaggctgacagcggactgtccactgacgagtctgagccagccacaactcccagaggtttccgagcactgcccataacccaacccactccccggggaggtccagaggagaccatcactcagcaaggacgaacgccaaggacagtaactgagtccagctcatcccaccctcctgagccccagggcctaggcctcaggtctggctcctacagcctccctaggaatatccacattgccagaagccagaacttcaggaaaagcaccacccaggctagcagtcacaaccctggagaaccggggaggcttgcgccagagcctgagaaagaacaggtcagccagagcagccaacccaggcaggcacctgccagcccccaggaggctgcccttgacttggacgtggtgctcatccctccgccagaagctttccgggacacccagccagagcagtgtagggaagccagcctgcccgaggggccaggacagcagggccacacaccccagctccacacaccatccagctcccaggaaagagagcagactccttcagaagccatgtcccaaaaagccaaggaaacagtctcaaccaggtacacacaaccccagcctcctcctgcagggttgcctcagaatgcaagagctgaagatgctcccctctcatcaggggaggacccaaacagccgactagctcccctcacaacccctaagccccggaagctgccacctaatattgttctgaagagcagccgaagcagtttccacagtgacccccagcactggctgtcccgccacactgaggctgcccctggagattctggcctgatctcctgttcactgcaagagcagagaaaagcacgtaaagaagctctagagaagctggggctaccccaggatcaagatgagcctggactccacttaagtaagcccaccagctccatcagacccaaggagacacgggcccagcatctgtccccagctccaggtctggctcagcctgcagctccagcccaggcctcagtgtggcgggacagccagtgctgggggtcactgtggaaactgcttcggctgctcttcagaacaatattaggtggcagcttccggggcttaggggttgtgaggggagctagtcggctgtttgggtcctcccctgatgagaggggagcatcttcagctcttgcattctgaggcaaccctgcaggaggaggctggggttgtgtgtacctg

SEQ ID NO: 146 - DNA, 1422 bp, Homo sapiens
gtgggggccaggcagcacagatgaagcatttacctatctaggtaagtcaggaggagctcaaaaggagaagaaaacagtaggaggcaggggaagcagcctctgtctccatctctgccctttgaaacaaaagggtatttcttttctctcttcagcccccaacccagtggaggcccggcttgggacattgttcacttcccctcgcttcccctctagaagccccctttgccatccctgcaccttgtttcgggtgatgcccgagagggagctgtggccagcggggactggctcagaacccgtgacccgtgtcggcagctgtgacagcatgatgagcagcacctccacccgctctggatctagtgatagcagctacgacttcctgtccactgaagagaaggagtgtctgctcttcctggaggagaccattggctcactggacacggaggctgacagcggactgtccactgacgagtctgagccagccacaactcccagaggtttccgagcactgcccataacccaacccactccccggggaggtccagaggagaccatcactcagcaaggacgaacgccaaggacagtaactgagtccagctcatcccaccctcctgagccccagggcctaggcctcaggtctggctcctacagcctccctaggaatatccacattgccagaagccagaacttcaggaaaagcaccacccaggctagcagtcacaaccctggagaaccggggaggcttgcgccagagcctgagaaagaacaggtcagccagagcagccaacccaggcaggcacctgccagcccccaggaggctgcccttgacttggacgtggtgctcatccctccgccagaagctttccgggacacccagccagagcagtgtagggaagccagcctgcccgaggggccaggacagcagggccacacaccccagctccacacaccatccagctcccaggaaagagagcagactccttcagaagccatgtcccaaaaagccaaggaaacagtctcaaccaggtacacacaaccccagcctcctcctgcagggttgcctcagaatgcaagagctgaagatgctcccctctcatcaggggaggacccaaacagccgactagctcccctcacaacccctaagccccggaagctgccacctaatattgttctgaagagcagccgaagcagtttccacagtgacccccagcactggctgtcccgccacactgaggcctgggctggagctgcaggctgagccagacctggagctggggacagatgctgggcccgtgtctccttgggtctgatggagctggtgggcttacttaagtggagtccaggctcatcttgatcctggggtagccccagcttctctagagcttctttacgtgcttttctctgctccttgcagtaccacggagg

SEQ ID NO: 147 - DNA, 497 bp, Homo sapiens
atgtgagaaaatactataaagaaggaattgggctggtctgagtgcagtggtcgtttacatctaattgatcacaaccagttacagatttctttgttccttccccactcccactgcttaatttgcctagcttaaaaacaaaaacaaagaaagaaagaattggttaagcaaatattcaggaataaaacttcatgtgtcatcataaaagtaactttaaaagcaaacattttaaatatacattttaacataagtttgaggggacttatctttttcaatctgacaccgatctaaatagtttttgcttcatttacttatttatgaatgaatgaacaagacaaggtcttgttctgtcgcccaggctggagtgcactgacaccatcatggctcactgcagcctcaaactcctggcctcaagccaccctcttgcctcagcctcctgagtaactggaactacaggcatgtgtcaccatgcctggttaattttttttttcattttgtat

SEQ ID NO: 148 - DNA, 451 bp, Homo sapiens
gtctttaaggagcttaaagtccaacgaagctttcatagaaagtcacttcctatgaaaatttggtgtcgcactagccatgatgctagagttttagatcaatagttcctcagtgccatttctctgctgagattgctgcaaaagaatcacctggggaacttgttaagaacagaggttattgtggccgggcacggtggctcacgcctgtaatcccagcactttgggaggccgaggtgggtgtatcacctgaggtcaagagttcgaaaccagcctggccaacatggtgaaaccccatctgtactaaaaatacaaaaaattagctgggtgtggtggctcatgcctgtaatccttagctactcaggaggctgaggcaggagaattgcttgaacctgggaggcggaggttgcattgagctgagattgtgccattgcactccagcctgggcaacaagagt

SEQ ID NO: 149 - DNA, 377 bp, Homo sapiens
ctgtgtagcatttccctttaacatcctcctcatttccttatatcccatatataatctttacatttttaattcaatcttttgaaaagtgttgtgtttcatttaaatgtgttataaaatgtttaaggaaagaaatatgactctaaaatgttttgaaagcaggtttctgtaaagggctagctcctaaaatgacagcactcaaagaaggcactgagtagagagggaatgggagttgatgttgttagaaggggttttgccagagaaaccatttcctgcttgaaaaccactgtacgattgacataaacttatgaattatgtaagtttgttgaataacctaagcattcttgggctttttccatctgatcatggccaaaaaaaaa

SEQ ID NO: 150 - DNA, 374 bp, Homo sapiens
acttttacaaaattaagttggagatggaaaattactgtcccgacataaataaccctgccgctggatgtgacagtgttaacgcaatcaacaggatgattcataaagaaagaaatgttgtcatacttattacttctgtgcgctccatcttttatagaatattacagtgtgaattgaaattttatatgatttaataagcctcaaaaagatattatggccaagtaaccacataactgtaacaaatcgtcctcctccctcattacagagctttctccgcatgtgggactctcggcctcattatgagtggcatctttgacaatccagggcccattaaaaacaccttgaagaaagcattcaccatgctgtggagcttcaca

SEQ ID NO: 151 - DNA, 343 bp, Homo sapiens
cgtatcacttgaggtcaggagttcgagaccagcctggccaacatggtgaaactctgtctctactaaaaatacaaaaattagccgggaggcggaggttgcagtgagccaagtttgtgccactgcactccagcctgggtgacaaaagcaaaactccatctcgaaaaagcaaaacaaaaaaacaaaaaaacagcggcagcctctaatgggcccagaggataagaatggaagggagacttactatacgatacctaacatataagaggagcttaatcttccttgataatctctctctccatgaattatctttttttttttttctgttttgagacagggtcttgctctg

SEQ ID NO: 152 - DNA, 433 bp, Homo sapiens
gaagaggaatgaaattggaggtgcttgaaggatctccaaccttaaaccaatgcgagttagtgaataatatgttatcgtatacttgtaactcagtttatatagtttgtaccatactatagtaaaagtggttaagtacttcaattttaatcccactgagtttgactttaaagaatcatctctcaaaagtagccttggaaagttgttggataaagcttctatggaaatctggttgaggggagaaaaaatcagttttaaatggtggttttatgacttaaaccatcgtgttaaattttttaataaaatatttaaccacttactgagttcttcctttctggcaggtgttgtaaactctataagaaagtgacttattttgcctaccattatattgccaatcctaacatgtaatggatgtttggtaaatttttgttgaatg

SEQ ID NO: 153 - DNA, 824 bp, Homo sapiens
ctcaaaattaagagatttatatagtttctagggggaaggagaaattttagctcacttgaaattcagcgatcagtattactttagtttgttacttctaaactcttgtactgaagtatcctaatgttgagagtgaaagcatataaaatttaatctttaggaaaaactgttttgctaatcttatgggttttgcatgttatctaacatattcctcttccctacagttccctccagctgtagatctaatgccatcaaattttatcacccactttgtctggttgctgttattcactgataccattcaagttattctcatttaatgactcaccattgtcctctccaacaaaactcctctcctgtcttaactcattgtcatcttaatacacatggtgatgattcttctattaccctggtctcttgtagcttgaactcttctcctgtgtaatcttgtctttcactctaccttagccagtctttccatcttcataccttaaaccttaatgttaccaataactgcaaccctttcaaaatctatttcatgcatctactttctgaccaccacttgccatctttccagataactccctccaccccaaccctagcaatttcttgatgctaccaggatctttactccactgtttctgccaccttttcctgcttctcacccccttcatgaaaacaattctactccttaaattccctagtgaagcagtataatcactcctttgcagttaccttgcccttcacccttctctgatttcatcatcattgcttagcaaaatcaccacattaaataaatccaactctgcctacaccacacttgcaga

SEQ ID NO: 154 - DNA, 253 bp, Homo sapiens
ggcaggagaatggcgtgaacctgggaggcggagtttgcagtgagccgacgtcgtgccactgcactccagcctgggcgactgagagagactccgtctccaaaaataaaaaataaaataaaaaataaatgaactagtacagttgatggtgatctgcaaaaccaaaatcatatagttattttcataaggaaattctaaaatgaaaatgggttagactgattcataatttaataatctcaaataacaaagtgtgcta

SEQ ID NO: 155 - DNA, 483 bp, Homo sapiens
gtctgtcatatatggtgcaattgaaaacttctttgcttcagttttccttctgacacattaattacaaaaccattcccagttcccctggaaaaccaaatgttttataatttctaattctagtgtgagctcattagcttgtttgttatcagattgactgcatataggaagttggatgataacagaaacgcaaaatgttggtccagtttgtttctgcccaacagaacttccaagactttgtgcctgcaatttgagagagcaatttgagagtcgcaccaggatatttagtccacagtttgatttacaaagcctacttacaaaatttatacggaacctgcaaagaaattagagtggacatggagaaagcatgcattcagagtagccacattaagttaggatccatgggctctatttccaaaaggattaggttttaaaaaattaaaatccaagtccagtaagaaatattttgtgtgacttgacactcct

SEQ ID NO: 156 - DNA, 280 bp, Homo sapiens
ccaaagtgctgggattacaggcgtgagccaccacgcccggccatgcttgttttttatccctctcctcccactaggacgaagctccatacagcaacgtttgtctgttatcagggatgcagctagtcaactgtaagcgctgttgaatgaaccgtttacaggaagacatttccactagatactacaagtgccgtgtgagaaaatgcactttgcacagagaagtctttctgccttctttccctacaagagcttggggctacttgatgagctccactctcagcaa

SEQ ID NO: 157 - DNA, 343 bp, Homo sapiens
tggaatacgggctctttggggagtctgtctgcaaggcgaggttagaagcaggagcacagggagaaaatgtggcagccaaggttctggcaggaaacaggtggaatctttcgacgggaatttgaagagtagtattaaagggattatttacaaatgtggggacaggatgtagggatatcagagagcaggggcagcactggggttagtcatagcaggaagctgttactacctctaagcgcaaatgggcaagggaggtgagaggttcccagaaccacaggatagggagggtgagtgatgggaacctgcggacaggagctgtggacctcagtggtggggaccagcctgc

SEQ ID NO: 158 - DNA, 104 bp, Homo sapiens
gggagatatgaaaagaagcagagctggctgcagcagggtgagagcatccagccaacctggcccctgtctatgctagactcagcccgtctatgctagcatgctgc

SEQ ID NO: 159 - DNA, 396 bp, Homo sapiens
ttttattttattggcagagttcatgtagctaaacccctcagtgcttcaatttaagacatcgggagatgaatgaaattgttatgttattaagtagatgctgcagctctgcttgctagggatgaaatcctattttatgaaataatatagtgtgaagctgtcagtaatttccaattgtagaagaggcctaatcagaaagttgggttttttttgttttttgttttttgttttttttagacaggcccagacagttttttgaccagacatctatacatgtttcagtgagttaattactcattttattgtaatttcatctgttagaaagtacccaaataattgcaaagtttatgtatataaacttttatggatatatcacaggcaaacaataggtgatctttg

SEQ ID NO: 160 - DNA, 671 bp, Homo sapiens
ggcctgaggcagtcacctatttgtagaactcaattgatccccaacctgccaggcttcctatctcataggaaacatcctcattgatcctcttcagttggagtctcccaaatttaatgtggaagacaaagtgttggaaaatcaaaagaggctcactcaaaccagcacagggagtcctcagagttgcagttcaattcattttaattagaaaagtatgaaagaggtataacactcttattctagcacagtgccttgcctagagtagtagtatgaaaactatttgttgaagaaataaatgaatggaaagacatagggaagaatgggctgtaaatcctaattaaaaatagaggtcgacatgagatacctggcattttgggaagtgaccaaagatggccagctagagattcagcatctccaggatcctcatgtgcctctcctcaaagctccctcccatctgtaggagattagtgaggcaaggtgctgctcagagaggaggacctcattgttcttaggaccttggccagttgttctcaaagtgtggtacctggattcagcagtatcactatcacttgggctagtttagagatccagattctggatccataccccatacctactgaattagaaactctaggggatgaatagtggtgttctctgttgctaagtgacagtgg

SEQ ID NO: 161 - DNA, 444 bp, Homo sapiens
gatgcaataggttgtgtttcagacatcacaactcttcatggaactgagttttagtagcttttcctcattaaatctttctcatagggctgtatgtccttaggaacattttcagagactttaaatggttgttttttaatacttttcatcagtttcactagggagtgttccagggaacgcctcagactgctatgctagagtctgtcctctcaatatttaggaagcttcttaaaccttaattccaaaattctgataaagatgataccaaaatgaaactgtagattagtttactattattaaagatatgaaagtgggctggattggccgggcgcggtggctcatgcctgtaatcccagcactttgggaggccgaggcaggcggatcacgaggtcaggagatcaagaccatcctggctaacacggtgaaaccccatctctactaaaaata

SEQ ID NO: 162 - DNA, 481 bp, Homo sapiens
attcgcggccgcgtcgacattctttaaagacttaaagaatcgccatgatgtgtgagattttaatggataaatattctcctgaaagctacataccaagtctaaattttgataatcataactaaaggacccaggcgtggtggctcatgcctgtaatcccagcactttgggaggccgaggcaggtggatcacctgaggtcaggagtttgagaccagcctgaccaacatgatgaaatcccgtctctactaaaaatacaaaattagccaggcatggtggtgggcgcccataatcccagccactcgggaggctgaggcaggagaatcacttgaacctaggaggaagaggttgcagtaagccgagatagcaccattgcactccagcctggacaagagagcaactctgtcccaaaataaataaataaataaaaggtcgacgcggccgcaaatttagtagtagtagtcccccggggaatttcggaccggt

SEQ ID NO: 163 - DNA, 446 bp, Homo sapiens
gacatgtgaagagggaaggaaggatccagcttcggggggctttcagactggcaggagatgacacgcacacatctgaaacaacccgtgcccagagaaagtgaaaagggatctggtggcaactgaatacgcagttcaaagcagtcattgtcataggcactttccctgcctgtcctgcccatgctccttctagggaacatgccctgctcacagctgttaaaggtgttgacccatgacgtccaggcccatccccatcccactaaaaggtgttaaaacaaggaatatccactaaaaggtgttaaagcaagggtgtgtctggtctcatcgcctgattttagtgcttttaacgctaaaaggtattaaaagcaaggaagattcactaaaaggtagatgggaccaaacatgcccttgctttacaccttttagtggatcttccttgctttcagatt

SEQ ID NO: 164 - DNA, 369 bp, Homo sapiens
ctttgttcttgggggaggcggttgtgatgagttctaaatataaacatcactgagcatcacattttatgttgaaagtggcttaatgaaaaatgagaaacacggaagtaagagtgagaaaggaaaaagagtaaagtataaatttgtagcctgaataagttataccaaaggctatttataatgttgtctatgtacccatgctatgaaattatacttaaatccactggagctctgaatcacagaaagcaatcttatctgaggtaataatataaatgtccaatttcacagataaaggagggatgggattttttaaagatcactttccttaatgcggcctaattaagggtataaattaaaaaggtttttgagtta

SEQ ID NO: 165 - DNA, 358 bp, Homo sapiens
tgggagtggatgtgtcagtcagggaatgaggagcagggcctggaaggagcacacagtagagccaagcccccataaccgggggcaagtctgcaccatctctgacctttgtcttcttgtgtgtgcactaggttagtctagagcagcacttcccaaaatgaggtcccccagccagcagcatcagcataacctggaaattgttcaaaatgaagttccagctaggtgctgcagctcacgcctataatcccagtacgttgggaggccaaggtgggaggatcacttgagcccaggagtctagtctgtctgagaccagcctgggcaaaaaagccagatattgaaagaaaagaagagagaagaaaag

SEQ ID NO: 166 - DNA, 469 bp, Homo sapiens
catacctcaaatgaaagtttcttttgttgatactgtcataatcagttgaaaagcagtctaaaatgcaatgccatctgttgaaaaataaaaatgaaattgttcatactacatatctgggcagattttcttaaaatggtgcaacacaaaatagagaaatcatctgaatgctaaggttgttttgtattgtcattcataatatcaaattttacattttttggctaaatacctgcattattttcattgactttcaaaatgtcagttttatctgttttacatgctgaggttctatacaagatctcatccaaagaaaatgttctactgttgttttttttttaagtatcaaaacctttattgcaaccctttactgctcaaagttctctcagcaaaactttgtgacaatgcagacatttcctttccctgaaggtccccactttaatcagccttctcttgctggggccagtctttaatc

SEQ ID NO: 167 - DNA, 461 bp, Homo sapiens
cttttgcatgtgatttgactatgcgctgaggacctagcgtggtatatcagcaaagtggaaaagtgactgaagtgactgtttatcatcttgtaccaagttacaccactttaagctttaactccacagctcttgcattattttaaaaccgtctggcagatctctaaaactaatggtacaaaccactctgtgatacattaaaatacatcccactctgtcatactgcaaacaagtagctgctccccagtctttgaaaaagtactttcaagataaaatatgtactcatgggttctgcaggtttttaaaaagtcttgaatcttcacagatttactgggggggaaggggcgtttcatgtaaaatgtgtttttccttgacatttagaggtcttgcaaagtggtttattatagatcttgtggacatctcgctatttaattaaatttcagaaatatattctctgcactcat

SEQ ID NO: 168 - DNA, 460 bp, Homo sapiens
ttacctaaagatttttccttgctatcttttccaaagggtcattttagagaatggtgtatctgaataaacttttaatttatttgtgtctttttctccataaaatatgctcagcaaaagaaaggacgtctaaattggggtttgcttggaattgtatggagacattcttgcaaagtctttggttgagggctgaatatcccactttcccttggatgttcaggagtctaagagtggagttgaaagtaaatcatatgtttctgaggagattatcattgacatttccatattttccctcagtttctcaaatgtgccatctaattctgcagcccacagattattctgaatgatgttcttccaaaagggcttatctgagtaggtgctatgggccagcctgtttcatcttcatgacaatccttcgaggtatgattttagccacatttttctacaagaaggggactctgag

SEQ ID NO: 169 - DNA, 823 bp, Homo sapiens
atactggtagtataacagttctttccaagcttgagataaaaatgatttcaaatcttgaatctgtaaacaaacaatcaagtcatggtaggataggttgtcaaaatgaaaagattcagaaagtttacaaccaatgggcaccatatgaagaaaactgagaatgtgcaaggtaaatacagaagatactggaaacagtaaggaccaggatgacccaggtgacacaattctttagctgttactgtacttgattttacaagaaaaatacttatgtgttcattacaattacattgtaagggctgtttgtttttagttttaaaaatgaacctaaggcccagagaatataattttaggtactgatcataatgtaaactattataaacttaacaatgtaagaaatcataacaataaaatttcaatttaaaattcttgtagtttgtcattaaattcactggttctgtgtgactttctcctatggcctatgttggatatataagagccaagtgttatccattcagattgcttcaatcatcatctcttccagataaatgctgagtcagtattttcagctcaaacgtcactcttagactccagcttatattttagacagccagctgaatgtcttgctctggatgtcctaccagaatagcaaaattcaacatgtctcagtctgaatccatcatgtactccctcttaaatgctcaacagccttttccttatgatgcccctatctctaattaaccctaccacaacttaatacttagtctttgtattagttagagttctctagagggacagaactaataggatagatgtatatatgaaggaa

SEQ ID NO: 170 - DNA, 362 bp, Homo sapiens
aagtatgctagggtaaatgattgatagttcattatcatagaaatattatattccacatagtttactttaaatattggcagcttgaaatttggcttagcaaattggcagcttgaaaatccctgctttattagttagcaaatgattctgagttttatcacattttattgtcaatctcagtttttaggtgcctaggaattaaaaattatatgctcagctgaccctttaattagctctcattctgtcttacgtgatttatagcctggtggcttacatgtaaaaatgatgtatgatttaatgagctggaaaggcagaatagtttcccacctctgatcgtttaatgcttttctctggctggtgactgg

SEQ ID NO: 171 - DNA, 400 bp, Homo sapiens
gtcccagctacttgggaggctgaggcaggagaatggcttgaacccgggaggtggagcttgcagtgagctgagattgcgccactgcacttcagcccgggcgacagagcaagactcggtctcaaaaaaaaaaaaagaaaaaatagatgagcatggtggtgcgtgcctatagtcccagtcctgctgaggcaggatcccttgagcccaggagttggaggctgcagtgagccaagattgtgccactgcactccagcctaggtgacagagtgagaccctatctcaaaaaaaagaaacccaagacatgtattaacctcatttaatcttcacaatgattccatgaagtggttctattaagatacatattttggccaggcacggtggctcacaccaacacttgtgagag

SEQ ID NO: 172 - DNA, 393 bp, Homo sapiens
ttttttttgttgttgttctctgggctgagctgttgtgttaaaaagttgattgagaaataaattgccttgagaagcaatgagcaatcagaagtaactggatttccaaggtcacaatggggcatgacgtgcccagaccgcaaaggggcagtgtggagcaggatttgttatttcacaattaactagatgtgagaagacaccaacctgatactgtattatctcatttgctgctgattcaagaatggaatgatatcaaaaatgagttctaaaagaaacagcacatcagagttggatgtaattcccctgctgagaagctgagcctctgctataataaaagctcctacaatgacagctgctcatttctgctggtccagggctgttatcctttattttttg

SEQ ID NO: 173 - DNA, 469 bp, Homo sapiens
tcacagatccacactgggagctggctggggtgacctctcctggactccatggcccgagagaggagcaggtggaagcagtagacctctgcagctcatcctcctctctccttaccacctcctcttcctctgagccctttgttcttcccccagtcctctcctgggccttgggataaggctgagtgagctgggccttcggtgaagctgagtgagccagtaggagctggctctagccacgtttgtttgttgcccttgggtttgaggccctgcgcctcaggctgcctcttacggccatgctgggagctgatgacacagttttggggacatgaaggggctgctcagagcgggcacctttggacatcctttgagtaaatgtgattgcaggggcgagagggaggtgaggcatctcgcggaagcccaggcttctctgcgccaacatcctctcttctaggaagccttcgcttggggcccc

SEQ ID NO: 174 - DNA, 431 bp, Homo sapiens
agagtgtcaaacagtctgagagaataaatgggggtcttgtcttacattagggtgagagtttgattatttaggatgatcccagtgatttcatgtgtgctctctgacctctgagtatcatagtatcattaaagtaaagatttaagtctgtataaaggaggagagttactgattggcaaaaaagattggcacaaagcatgaagaaaccccatttttcccagggtaatcatgaaagaaggctcagagaaagagggaaacaaaagcctgttcagcagaggcccctttagtattatggactgggcaaagcccactataaactataggagaaagaagttctgataaacctcttagtatgctcagcctccttctttgctatgtccctaagccaacagggtataacacaggccctggtgataatgagggtgtcctaaaga

SEQ ID NO: 175 - DNA, 434 bp, Homo sapiens
cttacaaagtccctgcagcctcaacctcaccgggaagctcatatggctcctctgctgagcaccaggtcctgtgcccacctcacagcggggaagccaaggaaggagatgacgtcttccttgagctttcaggcagtttgtctgcctttaattattctgacattgtagggaaatcatcaagttatttgaaaggaacaatatttgttctgttttgttttctttcttaagcaaataaacaagccaagtaatttcctgtgatatcacccactgtggtgagacagtatcaggtgtgagatcacccacttagatagccttgaaccctcatgaaaccaggagggtcagctgaccctggggaagtcccattcctcacaatctccacccaggaacccacgcccccttgcccttccagacagggatatgtccccctccttgggctg

SEQ ID NO: 176 - DNA, 781 bp, Homo sapiens
atatctgttgctgaataataactctttcaaagcattaatgctgagtttatatagttcaaaaattctaatattcattcagttttaatacctaaatacttatattttactagtgatggcattctaatatattaagtcctcatttaaatacttgatactttgttaactgtggcattatatttctgaattttaaaacctttaatatgtggtaactattgcatattcttttaataaaacatgcagcatatttttttataaaaggaaaagaattcattgtttatatctagagagcataaagcctaagttaagtaagttattaaacaataacttcacaagatgttcaaatcgatttatcactgaaagaagatctatgaaaatgtgttttgaccaaacttagtattaggcaggtacacagataagattttccattcttaacattctcactgtaatgcacgacatttgaagcacctggatgtgctatcaatcaggtgggaaatttagcattatatattggaagcattgagaaacattggtctttcatttctatttttttttcccctcctttcctcctcctgccccacaatatattattcatctggttttaatgctacataaatatgcattgtctcatgcctgtttgtgttggatgccttgtgctaagctgtaacaaaatgttgcttcttttgctgtctgtatacagctgcttgctttaaattagtagattctgaaatagctttccttgcatgtctaaaataaaagtattgcatgtaaaaaaattcgtctc

SEQ ID NO: 177 - DNA, 378 bp, Homo sapiens
catattttctaatacttttttctcattaattagattttctcatcctgagtctcataattcaaagacttcggaaaactgggcataaagaagaaaattatttcatgaaaacacaaatttggttaaacatgcttatgccatttttttttgcataaaatgcaaagtaaaaatgctatgatccaaatacatgaagctaaaatagtacctaatcacacttttcctttttgaaatatcatttttgtatatttaatgatggggttctactttagtattatagttggccaattattgttcactttaatcctcgccctaaatttcataaacataagtggccattactggtcactatctttcagtgtggaggacacaaatcagtagagt

SEQ ID NO: 178 - DNA, 421 bp, Homo sapiens
cagatgtgtatgaggtacaggtattgggtgtgtgagtgtgtatggggtgcaggtgggtgtgtgggtgtgcgagtgcatgatgtgtttggtgtgaggggtcggggtgtgggtgtgctgtggtttttgtctccaccaaaatttaagcgtcataaccgaatggccagtgtgatggtgttaggagtggtgaggccgtgaaggggatgaaggtccttgcagaccaggcctcagtcagcagagacctctcaccctcccagcgcctccacgtgagaacacagtgtctgtcccctccgtaggatgcagcagaaaggtaccaccttggaagctgagcgcccccctcgccagacaccagacctgctggctcctgaatcttggacttccagcctccagaatggggagaaataagtttctgttctttaaaatt

SEQ ID NO: 179 - DNA, 1125 bp, Homo sapiens
agagatggggtctcgctatgttgcccaggctggtctcaaatgccaggcctcaagcaatcctcccatctttgcctcccaaagcactggaattacaggtctgagcaaccctgctggctgtatagatctcctttcatattacctagtgactagttccttttttgcctctgtggtaaaatgtagtatcactttgtaatgatgtaataagataaaatatttaacctgatattatataacagggctgctggaatgttgggctttttgtcattaagtgtggtgattttgtcatttgattacttgttttagtataaatgttttatgcagttttatgtttctgtagtgtatttcttaggcagttaaaatttttacctgctattaagtaaaaattttaatttatgtgtttttaggcattcattgttaatgcttaaccaagatattcagagcataaaaatttgggtcattcaaaaatcttaatctgataagcaacttcagcaaagtctcaggatacaaaatcaatgtgcaaaaattacaagcattcctacacaccaagaaagacaaacagagagccaaatcatgagtgaactcccattcacaattactacaaagagaataaaatacctaggaatccaacttacaagggatgtgaaggacctcttcaaggagaactacaaaccactgctcaacgaaataaaagaggacacaaacaaatggaagaacattccatgctcatggttaggaagaatcagtatcgtgaaaacggtcatactgcccaaggtaatttatagattcaatgctatccccatcaagctaccactgagtttcttcacagaattggaaaaaactactttaaatttcatatggaaccaaaaatcttttttttgcccacattgccaaaacaatcctaagccaaaagaataaagcaggaggtatcacgccacctgactttaaactataaggctacagtaaccaaaacgcatggtactggtaacaaaacagatatatagaccaatggaacagaacagagcctcagaaataacaccacacatctacaaccatctgatctttgacaaacctgacaaaaacaagacatggggaaaggattccctatttaacaaatagtgctgggaa

SEQ ID NO: 180 - DNA, 437 bp, Homo sapiens
cctttcctcacaactctgcccctcttttatgcccccaaaccagaggcaagaagtagaacaagaaagaaggtggagtagaagcaggtcttttctgcaagactctggatatggattcatttcttaaaattacctcaagtgacttcctccctcacccagtcaacctgaaatctaggaactcaagctgtattacagaattaagggatgatgggcaattaaaactgtaatccacctagacagaaatatgacagaaacattagtctactgatatggggttaagtcttgtttcatgacacaaagttatagaaagtgcctccatgcctctgtattggcagaggatatagaatttcccaccctcttctccagtcctgactctacatcccaaacaacaaatgggtagtaagtaggggaaagaacactaaatcctttgttttcacttt

SEQ ID NO: 181 - DNA, 344 bp, Homo sapiens
ccagctccaagccccgtggcacctcccggcttgtctcaggccaatccttgaagagctccagcagatctaaactttggtaactttcctctggtaatttgaggaattcctccatttgaggaatgtcagaatggggccaggattcctgaatgcccatggaagaaaagcgagcatgctggtctggcgggcagaaataaccttctccccaggctccagagggcagaggacatttccctccaaaaggcaagtttctcagggacctcatgagaagcctgtcctcacctgagcagttctgtcaaccatcccatcccttcacctggaccccaggtccccagcaggccttttta

SEQ ID NO: 182 - DNA, 438 bp, Homo sapiens
ttgtaatataattttgaaacggccacttcatttgagaaaaaatatctttggttgctatttttcaggatctcatttgtaaagcaaagtcaattttaaaacattttctctccaaaccaaagtaaagcattaaggacctcccaaagtaattcttatatatgaaaaaagtatgtttatgctattttatgtagcataggtttatcatgtgttacacatttttattaccttattttacttgttagtaaagatataaactataaagatataatacaaaccatgtttatatctttgcattatgtttacatctttactttcaaataaatctgtcttcattaaaaattctagcattcagagttttactaagtcagactggcctctcttttatattaataattttcaagttttattttattggactagttttccttggggagataattc

SEQ ID NO: 183 - DNA, 592 bp, Homo sapiens
ctccttaactggtttctccatgttcctccctatccgtcctttcttcacacaacagtcagagtgatcttttaaacatgtaaatcaggttgcccctgtgggcttggtttgtgaggaagagcctggctcagcctgtcaggaccactgaggcttgtttcttgccatcctttccacctcagttttacacacttctcacctccagctggctgggtgtggggaagacctgccagagccacattggacaaggtggttcccattgccaagtagatggacaagatggtgcagaagaatacagctggagcattggatttgccaaaggagcttaaaaatattcccatgaccatggaattattacagcccccagaagaatcagaatatcagttaatgctaatggcaagcagcataaagatgaagaagttacatctttaacagtctgtcatgaaatctgggaaaaagttactatcaaccgagaaagaccctgaagaaaagaaaaaagaacctgcagttacattgcagaataactctgaagcgagagaagaaagtagctccggtggcagtgcaagcagcagagagggtgagacaaatgctctagata

SEQ ID NO: 184 - DNA, 319 bp, Homo sapiens
tgcctagtctctcccacttaatattcacaactcccctttgagatagacagcagtatactcatttattattgaaatcctcatatattaataaccagctcaggacaaagttctaggatctcaattcttcttactccagtcatgtgattcttataatatataataatactttaagaatccatcaaaataatgtgtgcatttaatgcatttgcctatttatggtgtgaacatttaaaacatatttttgccaggcgtgatggctcatgcctgtaatcccagcactttgggaggctgaggcaggtggatcccctgaggtcaggag

SEQ ID NO: 185 - DNA, 262 bp, Homo sapiens
ttgtcagtttaaggaggcagggacagataatgggatcagttttagataaatttgcattagagattttgaaagtttggcacttgaatatcgagtattttcaaaaagttctttatgttgtagttatttctgtgggaatcaaagtggtatttctatgacatattttgatatccatttttatattatatccattgttatgagttaattccaggtatacaaaaatcaacatgaacaaaccattgacaatataatatatccctgtatt

SEQ ID NO: 186 - DNA, 299 bp, Homo sapiens
tcatggtgaaaaatatcaccctcaatctagtgatccaagtcagaaaactgggagttatcgctactctgtttcatagaaatccccatccatcaagaaatatgaaagttaaggctgtaatatgaaatattacagtcactcactcctgtaatcccaacactttgggaggctgaggcgggaggatcacttgagcccaggagttcaagaccagcctgagcaaccaggggagaccttgtttctacaaaagaatttaaaaattagctgggcgtggtggcatatgcctgtggtcccagctactcaga

SEQ ID NO: 187 - DNA, 359 bp, Homo sapiens
tgtgctgtctgcaactccagttacctaggaaatgacagcttttcatggggtcagagggagtggtgctgatcagaagggcccttctcctgtgactgtggaggctttcacacctgtcatcactcctgtgatgtcccaggctcgatgcagccctgtgtaggtatatctaccagccaagctgatgccaaccagccaagctgatgcccgcctctgatgcctggacttgttgaaaatgtggtggaggctgggcatggtggctcatgcctataattccagcactttggaaggccgaggagggaggatggctggagcccaggagtttgaggacagcctgagcaacagagtgagacactgtctctcca

SEQ ID NO: 188 - DNA, 400 bp, Homo sapiens
gctgattataatctaattactaaactaccatgcctgtcctgccagtccccccaggcctgacctcagccctctgctgggctttccttctcctgggccaggtgcattactcacctcaagaggtacttgcacaagaagaacatattgacaagagaaaattgcccaggagccattttttaaaaatctgtcttagacattacttctaaaattggctgcctgtgtgctgaagctaagatttacttcagcgaacacttcgttgcccatgtttaaaactgccccatgttagggttttaggttgaacaaccttaacctttattgtgtcccaattacacgtggtctgtcatcttgtatatatttagtattcttgtggtttataaatttgagtactgaattaaaatgctga

SEQ ID NO: 189 - DNA, 340 bp, Homo sapiens
gtaccactcaatgataaaaggaacaagctgcctatatgtggaacaacatggatgcatttcagaaactttatgttgagtgaaagaataaacacggagaacatactatgtggttctctttatgtaacattacagaaataaaaacagaggcaaccacctttgaggcagtatggagtgagatagactggaaaaaggaaggaaggaaactctacgttgatggaaatgtctgtgtcttcattgggtggtagttatgtggggatatacatttgtcaaaatttattgaactatatactaaagaactctgcattttattggatgtaaataatacctcaattaaaaagac

SEQ ID NO: 190 - DNA, 435 bp, Homo sapiens
tgaatcatgggagtgggtttttcctgcgctgttttctcatggtagttgagtaagtctcacaagatttgatggttttataaagagcagttccactgtgcatgttcttttgccttctgtcatgtaagtcatgcctttgctcctccctcgccttccaccatgattgtgaggcctcctcatccatgtggaactgttagtccattaaacctctttttctttataaattacccagtcttgggtgtgtccttacacagcagtgtgagaacagactaatacaaacactgaccatgaactccttgggggcaagaccactatctcattggtctttgtaacctgtctccacacagatactactggttagagacagtatccatacaattcacttctgtatctcaactgcccagcagagtgttaagtgcttcatacatatctgctgaa

SEQ ID NO: 191 - DNA, 442 bp, Homo sapiens
aatataagagctgaaagtatttagataataatttcactgtttttgttttgttttgttttgttttgagacggagtcttactctgtcaaccaggctggagtgcaatggcatggtcttggctcactgcaacctctgcctcctgggttcaagcaattctcctgcctcagcctcccgagtagctgggactacaggcatgtgccaccacatctggctaatttttgtatttttggtagagacagggtttcactatgttggccaggctggtctcgaactactgacctcaggtgatccaccagcatcggtctcccaaagtgctgggattacaggcatgaaccacagcgcctggcctcatttcactgtttattgaataatggatgttaaaaaaggatggaaagaaataaggataggaaaagacaggaagaaaggaaggaagacagggaaaga

SEQ ID NO: 192 - DNA, 293 bp, Homo sapiens
gcaagtcctagtgctgtgctgtgctcaacgcctgtggacttgcggcgccctcctacaaccccagcagtgcagctcccagctccaggagagactcccttctactccttgaggaaagaagggggctttgtcttgcaatttggataccagcacagccacagtagcgtagggcacaaagcagagtcctgaggctctcactctaggtcttagctctcagataacatttctagacacagcctggatcagaaggaaacctgctgacttgaagaaaaagagccagttctggaagaatccat

SEQ ID NO: 193 - DNA, 280 bp, Homo sapiens
aagactgtcctggggagacgcccccccgccgccccggcaccccaccttcttcactctgtgaggagcaccgacctctgagttcattccacctcctacaggcaaagatttacaaaatggccaataaacataagaaaaggtgctcaacgtcatgaatcatcagagcaatacaaattaaaaccacagtgagtgcactacacgcccaccgaaacgggaatgtttttaaaatgaccataccgagtttggcgaggtttacacgcgggcgggcttgtaaactctctca

SEQ ID NO: 194 - DNA, 577 bp, Homo sapiens
aaacaaggaccgtcgacgtccaggggaatgactgtgcaaggtagtatctaagcacctgagaagcagtagtgctttgtcgccggctcacggactcccatgcagccttcctcaccaatttggcacaggcagcagtctccctcccaggctctccccatctcccctgctttggtgttgagtgatgagctgagtcagggatagggagtcccctggtgctaaccgtgaacgtagagacttgttctgaggacatccacacaatagtaggaatctccccaaccaatctgtgaatttcatgggggccaaaactgtattttgctcactgctaagtccccagctcaccttaggggctcagcaggtccctgttgaagggaggaaggggaggagagaaggagaaaggcaagcaggcagacagctatgggtctagcatctgcagtgtgttagcgttggggaaacagaagaactagaaggatggatatgctgatgactcctagattggaactccggtccggttctttctctggagctctagatactcactttttgtgccccccaaatgaatgcattttcttcccctaaactt

SEQ ID NO: 195 - DNA, 355 bp, Homo sapiens
cagttgattagttgaggctagaacccatgtccctgtttagtactttgctttgtggtgtgattctgccctctgtactagtgctcagatggtgttctgtacttagcaggggcactggagactgagctccaaaccatttattactaaagcgtatgtttaccaagtcctttttggttctgttatttattcctgtactcaactaagccaaatctagatttaattgaaaactgtatagacactgttaattccaagtgtgctctccaggtcatgtccaatgagggaggcaccttagtctttcagagacgttttgataaacatttaaagcttaccatagttatttgcttgacttaacaccttt

SEQ ID NO: 196 - DNA, 318 bp, Homo sapiens
aaacactgttctccaaagctaggttactatagtatagttaatatattttcttcctcaatccatttagtgtggtttcctcattcatttgtaatacagctatgcttatttattagtgcttatatttcattttggattctgcacacatgttgattgattttgattatttattgggagaacgtgaaatattactgattataagagtgaaagctgttatacaaaaaggcattctacttggtttaacaagtccaaaagagaattcctgattttcttccccaaacctgctttttcacctaaccttctttatctcagtaagtaaca

SEQ ID NO: 197 - DNA, 522 bp, Homo sapiens
agaaaaacacgctaaggttgtaatacccaaaactgctaagaaaccctgagctaccagagagaactaagagaacttacagaacactctaaaatttgaaggagacacaacaacatccatctgttggacaccatgctgctactaagttgttgaacctgactactaaaaatgggaactgttagataatatttctggtctagggactctccgaaaaaattaatgagacagttaaggctccatgaactaaacaagtttggaaaccactgctgtaagttcatcagccatgtagaaagagataagatgcatcataaaagttcaggaccaggagtgatgacagacagctggcatttgccagttagcacttaagagggaagagctagaccaacagggatggcagactcctctaaggggaaagtcagtctctgcaaagaatgttgcttagaattagtcttggtgcggaggttgcaatgaccttgattgcgccactgcactccagcctgggcaacagagcaagactccatctca

SEQ ID NO: 198 - DNA, 311 bp, Homo sapiens
tatatccttaatttatttcttattttttgtgtgtccttccaaattcatgctggtatttttaaaatttttaaatataaagtattaatagtttataattactccatgaacatcaaaattatcactttcatacaaaaaaaatctcttttgacacatacaatccttgaaagtattttcttgagaaacataaaatatataatacaggacttatttagcaaatgaacctatgacttatggtctagaattccagctaatttaaatatgtaagactcaactataaggaaactgaccaatgcatactccttttgagatgg

SEQ ID NO: 199 - DNA, 351 bp, Homo sapiens
ggttctggaaagtgagcactagtaatggacgtcatgtggtagtgagtcctattggaattaaagtcaatgtcatcctgtctcaccctagtatagattttttgtttgggatcgcagttttcctaaacatattgctgtagttcttaagttgctggtgtggaaaatttttggtcacgaattcacacttttacttacaatttgacagttaaaacagtatagaattgtcacataaagggtaaggtagaatgtatcacaaatgcaatagtgataatataatgcctttattgcagaatacacagattgagactttgtaagattgcaccacaagtcattcactttatagcagaaaaaaaa

SEQ ID NO: 200 - DNA, 401 bp, Homo sapiens
atttagtgtaatgttttcaagttcatccatgttgtatcttgtgtccaaattttattcctttttagggtgaatacttttccattgtatgtatataccgcattttgtatccattcatctggtgacagacgtttgggtcatcttcacctcctgacgtttgtgaataaagctgctatgattactggagtacaaatactcatttgagtttttgttttcagttctttgggatctatacctagaagtggaattgccacatcatatactaattctgtgtttaaactttgagaaaccaccaaattgttttccaccgcagctacactattttacattcttaccagcagtccactgagtttccaatatcttgtagcccacacttaccttctggcctttatattttggttttt

SEQ ID NO: 201 - DNA, 422 bp, Homo sapiens
gggtatttcatcaccgtaatttaatgttaaattgaatttcaaaaaccttcattatctgcaaggtttttgttctgttcgtttaaactttgagcagcttccaacttaataacacactcttttttaaactgataatggcttgcggcagagtaggaaggtagctaatgcacagcaacctttaactaagtctgacttcatgcatttgcatttgagaagccaacatgaagagcaatcacttttaataaatgatagttaaagccaattacaaatttgctattaaagtcacactaattccactttgaagctgaaaaatttgatttcattttcaagacaaagcacactcacgcctttctggagctgcaaaacacatttcaacagctctgtgtgctcatcttttttcactgctacttgagtcagaatcgcat

SEQ ID NO: 202 - DNA, 159 bp, Homo sapiens
aaatttaagtactgtatatagaaagataccactatgatacataatgttttcttgtaagttccttgaaggtaggactttttttgtttttttaaaccattatattcccagagcctttatatatccctgtttatatatcccttgtatataaatctttgttgg

SEQ ID NO: 203 - DNA, 386 bp, Homo sapiens
gtggggtggcgggttccccaaggacaaggtcatgctgtcccttttatctcttcacagcctgtgtgcagggaggccagggctttgatggggtggagttgggggcggacagagtgtggatgcattgcacagcagcaagtttgcccaggaggcaggagtgccagtgcctgccatccatggggttctttgtcctagacagcccttggggtcccggcatggtgccagcctatgagctgaggcctctgcctagaaagtcagtgttatcaggccccaggctggtcctggtgcagtggggtttgtctttgttcagccccattgtaagacccctggcagtgacctgttggtcacctttaaggcatctgctctttgggacagacagaggacttttc

SEQ ID NO: 204 - DNA, 236 bp, Homo sapiens
aaatgggtcaaaagataatatcaaagaaaaattcgagaaaaaactattttatattcataaaaagtataattcacaatgaagctttagtagtaataaatctttatatttgtataatatgtcattgaaatctatgaagtaaaactaccagaaatatatgtaaaattggtggaaacaatcattatgagagattgcattaagtctgataatttgcataagcaaaatgtatggagaatttg

SEQ ID NO: 205 - DNA, 360 bp, Homo sapiens
aggtttgtgtccttcctttcagggcaatgagttcccccaggccccgggcaggaccaggcatgctgtctgggagccaaggattagagtcaaataccttagaaatttacctgaagttctattctactgcagctaagctggcactcagaccataatccagaatctttgttgcacttccctcccctctccacagggagaagggcctctccctatagccatcagcaccagcagcccatagcaggggttctgccaggccactggcaatgttcacttaaagcccagtggctcttcagtcaacaagtggtgaatgctgccaggctgggaactcgttcttcagagcactgggctcccatatgccccagg

SEQ ID NO: 206 - DNA, 1792 bp, Homo sapiens
agcggatggctctgcccacggatgacaactgtgcagtttgtcttccaattaactaagaggtactctccatccctcattagcataaaagccctataagtagcagaaatccgctctttactttcgacacatttctggtgttttaagatgcctgagccagccaagtctgctcccgccccgaagaagggctccaagaaggcagtgaccaaagcgcagaagaaagatggcaagaagcgcaagcgcagccgcaaggagagttactctgtgtacgtgtacaaggtgctgaaacaggtccatcccgacactggcatctcttccaaggccatgggcatcatgaattctttcgttaacgacatatttgagcgcatcgcgggcgaggcttcccgcctggcgcattacaacaagcgctcgaccatcacctccagggagatccagacggccgtgcgcctgctgcttcccggagagctggccaagcacgccgtgtcggagggcaccaaggccgtcaccaagtacaccagctccaagtaaacattccaaggggagacaacagcttttagacatatcttttccaacagtcgtcactgctggacactgtttcatcttgcaaataaaccaatgaaaatgagtgatcctagaagaagataaatggaggtattttgaacaatcaaagaaggacaaatgaacacctggctgagaaaaattagctcttttttctatgcataaaactattaaaatattcttcatagaaatttatgacacaggaaacataaagacaaaattaaaataactcctagtatctcctattctttttatatgtatattatatatactcatattcatatatacatatatctcacatcatgtatcatatataaaataaatttaggtgtcatgatatatatttagataaatatacttagaaacttttttatggatgtataatttatggatatattgataattatgtatttgttattgactacttcaattgattcccatttttatgcattatattatagattatatagctcacacatctttgtacataaatctttgttcaaatattatttcctaaggatagacttcatgaagtggaaatactaaatcaaaagtgaaaaacattttctaaggttcttaacatatacattgccaaattgctattcaggatcataccaatttataatcccaaaataatatgaaaattcctgttttatagcactcatatttacaataaattttaaaaatcactgttaacctaatagtccttcaaaagaaaaaaaaattgaaattacattattttaatgactctattagtgagggtcattcttcccatgtttcttgttagccatgaccctataagaaataaactgcactgcaaaatgataaacatgatatcaatcattacatgggaaggcactatataaagaataataccttaggttaaggccacataaatatttatcaggtgccttttctgcggaggactctgaagggatactaaactgcatttagctgcatgcaactgaaactacttttacctacattgtctcttataaacattataactactctttgagaaagtgtttactatggactgaattgtctccccatccccccaaattcatatattgaagccataaaccccaatatgactctattcctagacaggacttataagaggtaattaaggttaaatgaggtcattaggatgggttcctaactggataggattggtggccttataagaagaggaagattctgcacttggtcttccaaattaaataatttatttaaa

SEQ ID NO: 207 - DNA, 1309 bp, Homo sapiens
tgatatctgtcatattccccacacccccattaaatccaagactgggggcacggggagacaacagcttttagacatatcttttccaacagtcgtcactgctggacactgtttcatcttgcaaataaaccaatgaaaatgagtgatcctagaagaagataaatggaggtattttgaacaatcaaagaaggacaaatgaacacctggctgagaaaaattagctcttttttctatgcataaaactattaaaatattcttcatagaaatttatgacacaggaaacataaagacaaaattaaaataactcctagtatctcctattctttttatatgtatattatatatactcatattcatatatacatatatctcacatcatgtatcatatataaaataaatttaggtgtcatgatatatatttagataaatatacttagaaacttttttatggatgtataatttatggatatattgataattatgtatttgttattgactacttcaattgattcccatttttatgcattatattatagattatatagctcacacatctttgtacataaatctttgttcaaatattatttcctaaggatagacttcatgaagtggaaatactaaatcaaaagtgaaaaacattttctaaggttcttaacatatacattgccaaattgctattcaggatcataccaatttataatcccaaaataatatgaaaattcctgttttatagcactcatatttacaataaattttaaaaatcactgttaacctaatagtccttcaaaagaaaaaaaaattgaaattacattattttaatgactctattagtgagggtcattcttcccatgtttcttgttagccatgaccctataagaaataaactgcactgcaaaatgataaacatgatatcaatcattacatgggaaggcactatataaagaataataccttaggttaaggccacataaatatttatcaggtgccttttctgcggaggactctgaagggatactaaactgcatttagctgcatgcaactgaaactacttttacctacattgtctcttataaacattataactactctttgagaaagtgtttactatggactgaattgtctccccatccccccaaattcatatattgaagccataaaccccaatatgactctattcctagacaggacttataagaggtaattaaggttaaatgaggtcattaggatgggttcctaactggataggattggtggccttataagaagaggaagattctgcacttggtcttccaaattaaataatttatttaaa

SEQ ID NO: 208 - DNA, 778 bp, Homo sapiens
agcggatggctctgcccacggatgacaactgtgcagtttgtcttccaattaactaagaggtactctccatccctcattagcataaaagccctataagtagcagaaatccgctctttactttcgacacatttctggtgttttaagatgcctgagccagccaagtctgctcccgccccgaagaagggctccaagaaggcagtgaccaaagcgcagaagaaagatggcaagaagcgcaagcgcagccgcaaggagagttactctgtgtacgtgtacaaggtgctgaaacaggtccatcccgacactggcatctcttccaaggccatgggcatcatgaattctttcgttaacgacatatttgagcgcatcgcgggcgaggcttcccgcctggcgcattacaacaagcgctcgaccatcacctccagggagatccagacggccgtgcgcctgctgcttcccggagagctggccaagcacgccgtgtcggagggcaccaaggccgtcaccaagtacaccagctccaagtaaacattccaaggggagacaacagcttttagacatatcttttccaacagtcgtcactgctggacactgtttcatcttgcaaataaaccaatgaaaatgagtgatcctagaagaagataaatggaggtattttgaacaatcaaagaaggacaaatgaacacctggctgagaaaaattagctcttttttctatgcataaaactattaaaatattcttcatagaaatttatgacacaggaaacataaagacaaaatta

SEQ ID NO: 209 - DNA, 970 bp, Homo sapiens
agcggatggctctgcccacggatgacaactgtgcagtttgtcttccaattaactaagaggtactctccatccctcattagcataaaagccctataagtagcagaaatccgctctttactttcgacacatttctggtgttttaagatgcctgagccagccaagtctgctcccgccccgaagaagggctccaagaaggcagtgaccaaagcgcagaagaaagatggcaagaagcgcaagcgcagccgcaaggagagttactctgtgtacgtgtacaaggtgctgaaacaggtccatcccgacactggcatctcttccaaggccatgggcatcatgaattctttcgttaacgacatatttgagcgcatcgcgggcgaggcttcccgcctggcgcattacaacaagcgctcgaccatcacctccagggagatccagacggccgtgcgcctgctgcttcccggagagctggccaagcacgccgtgtcggagggcaccaaggccgtcaccaagtacaccagctccaagtaaacattccaagggctggatgacactttgcacacaattattgattatgcctgtgagcagaacattccctttgtgtttgctctcaaccgcaaagctctggggcgcagtttgaataaggcagttcctgtcagtgtggtggggatcttcagctatgatggggcccaggatcagttccacaagatggttgagctgacagtggcggcccgacaggcgtacaagaccatgctggagaatgtgcagcaggagctggtgggagagcccaggcctcaggcacctcccagcctacccacacagggccccagctgccctgcagaagatggcccccagccctgaaagaaaaagaagagccacactacattgaaatctggaaaaaacatctggaagcatacagtggatgtaccctggagcttagaagaatccttggaggcttcaacctctcaatgatgaa

SEQ ID NO: 210 - DNA, 377 bp, Homo sapiens
gttttcgtggcgcacaccttcgtagtatactgaagggtgtgtctcctgggtttccaactgccccggtaatagtcttttaacctaatatgcgtcagttttgataacaacactaaggcagtacagaactaaagatggggagacaacagcttttagacatatcttttccaacagtcgtcactgctggacactgtttcatcttgcaaataaaccaatgaaaatgagtgatcctagaagaagataaatggaggtattttgaacaatcaaagaaggacaaatgaacacctggctgagaaaaattagctcttttttctatgcataaaactattaaaatattcttcatagaaatttatgacacaggaaacataaagacaaaatta

SEQ ID NO: 211 - DNA, 1518 bp, Homo sapiens
atcatccggcgcggtgtttagactccactgatgtcgtggcgctttaggggaagaagttggtgtttcgctgggccctggtactgaagacgcggtccgggtcgcccctagctgtttcctactcacccaaagccccgcacccgccttttctctctctcctctggcaggatgaggcgtgcaggcctgggtgaaggagtacctcctggcaactatgggaactatggctatgctaatagtgggtatagtgcctgtgaagaagaaaatgagaggctcactgaaagtctgagaagcaaagtaactgctataaaatctctttccattgaaataggccatgaagttaaaacccagaataaattattagctgaaatggattcacaatttgattccacaactggatttctaggtaaaactatgggcaaactgaagattttatccagagggagccaaacaaagctgctgtgctatatgatgctgttttctttatttgtcttttttatcatttattggattattaaactgaggtgatgcatgtaattgtgaatttggaatttgttccaacttaatggcttgcagtaccactttgataaaaatcagcatcaaaacattcctagtgttcaaatactgtggcattttccattgaaaattgctgaattttgcttattttataaatcacattagttaatacagtggtctttgaatactgtttcttaatgactcattttagcccctattttcaggggtagtgagagggtgtggctccactaatttccagtttgtttttctattgtttgccaactgtcagattaaatagcattataatattttgttgtaatcataaatgcaggtttatgtcccatgtaaggaaacttagtgggagagtaacagaatgcctggagagcctgactctgagctcttgaagtagtcagccagtttgtggtaaaatggtaattgaattttcctaactgcatcaactgtaatgatatactcccttctcctcctttatttagttaaaattgtaggctgatttctttttacctacaatcttcctaataatttttgatgataatgacccctcatttctttctgcccaaagacctcattctttaaataaaacttgttattttggcatatttctggtagggcccattgcacatgtgtatcagtatagttattatttcatattaactttatgaattctcttgacttggcttataatagttttatgatttttactacataggtagcacatttatcatttgtgacagaataatgtgaagttaagtaattactgaactttaaatggaaatagtatgcaagaaactcaggcattgaacttgaagataagagtattattgctttaatccagtgtatttgtttatggaaagaaaaacacaaaggcagactgttgagtaaaaaatattaaatattgttaaatattctgtattttggaatttatccatttataggcttcaaaagtaaatttttaaataaaatatattagtcgactgtaaaaaaaaaaaa

SEQ ID NO: 212 - DNA, 791 bp, Homo sapiens
atcatccggcgcggtgtttagactccactgatgtcgtggcgctttaggggaagaagttggtgtttcgctgggccctggtactgaagacgcggtccgggtcgcccctagctgtttcctactcacccaaagccccgcacccgccttttctctctctcctctggcaggatgaggcgtgcaggcctgggtgaaggagtacctcctggcaactatgggaactatggctatgctaatagtgggtatagtgcctgtgaagaagaaaatgagaggctcactgaaagtctgagaagcaaagtaactgctataaaatctctttccattgaaataggccatgaagttaaaacccagaataaattattagctgaaatggattcacaatttgattccacaactggatttctaggtaaaactatgggcaaactgaagattttatccagagggagccaaacaaagctgctgtgctatatgatgctgttttctttatttgtcttttttatcatttattggattattaaactgaggtgatgcatgtaattgtgaatttggaatttgttccaacttaatggcttgcagtaccactttgataaaaatcagcatcaaaacattcctagtgttcaaatactgtggcattttccattgaaaattgctgaattttgcttattttataaatcacattagttaatacagtggtctttgaatactgtttcttaatgactcattttagcccctattttcagggtaatgcaataattgccctattaatatttgtgggaataattaaaggcggttattgt

SEQ ID NO: 213 - DNA, 1077 bp, Homo sapiens
atcatccggcgcggtgtttagactccactgatgtcgtggcgctttaggggaagaagttggtgtttcgctgggccctggtactgaagacgcggtccgggtcgcccctagctgtttcctactcacccaaagccccgcacccgccttttctctctctcctctggcaggatgaggcgtgcaggcctgggtgaaggagtacctcctggcaactatgggaactatggctatgctaatagtgggtatagtgcctgtgaagaagaaaatgagaggctcactgaaagtctgagaagcaaagtaactgctataaaatctctttccattgaaataggccatgaagttaaaacccagaataaattattagctgaaatggattcacaatttgattccacaactggatttctaggtttatgtcccatgtaaggaaacttagtgggagagtaacagaatgcctggagagcctgactctgagctcttgaagtagtcagccagtttgtggtaaaatggtaattgaattttcctaactgcatcaactgtaatgatatactcccttctcctcctttatttagttaaaattgtaggctgatttctttttacctacaatcttcctaataatttttgatgataatgacccctcatttctttctgcccaaagacctcattctttaaataaaacttgttattttggcatatttctggtagggcccattgcacatgtgtatcagtatagttattatttcatattaactttatgaattctcttgacttggcttataatagttttatgatttttactacataggtagcacatttatcatttgtgacagaataatgtgaagttaagtaattactgaactttaaatggaaatagtatgcaagaaactcaggcattgaacttgaagataagagtattattgctttaatccagtgtatttgtttatggaaagaaaaacacaaaggcagactgttgagtaaaaaatattaaatattgttaaatattctgtattttggaatttatccatttataggcttcaaaagtaaatttttaaataaaatatattagtcgactgtaaaaaaaaaaaa

SEQ ID NO: 214 - DNA, 982 bp, Homo sapiens
atcatccggcgcggtgtttagactccactgatgtcgtggcgctttaggggaagaagttggtgtttcgctgggccctggtactgaagacgcggtccgggtcgcccctagctgtttcctactcacccaaagccccgcacccgccttttctctctctcctctggcaggatgaggcgtgcaggcctgggtaagaagagggctgaggttcgaagttcggggccctagaaccgggagcgctggggcgcgggaggaaatcgaacctgtcttatgttcctggcatttggtccaaaaaacaggatgtctagaggggatctttggggtccatgtcgagtggaaacacaccatttgtcccagatctttggaatttccttaagtttgagtcagattcaagtttggatggtaggctagagaaagtagtggactaggggtgggtgtgtacaggtggcatctcagtggtcgagtgttttagtgttattgactgagcgtggttatggacgctgctatgttttccaaagcccgactccggtttctgtttccctactggccctggatcttagtttcttcagaagcggaatttgaagagtgggtggttgcacccaaagcacgctagtaatggtcgttaatctggtaacagtgagttacaaaggtaaatgtatgtgtcattattgttaaaggtcctggaactggaacttctgggtcaaaggcgatttcttaatctgaaccttgtgccacggttaaggcagtagaacgtggttaaggtttggcgacttaacatttgatctttacctttggggttaggaaactggctcatcagcaagaataagttagacacaaggaattttaatggacccttatagtaacgcacagctactagaacggcattttctggttctgaagctttctcttaggacacgattttttttttttaaagaagaccccgctaaattagagtgcagtatacttcagaaaataaatgaaacatttg

SEQ ID NO: 215 - DNA, 867 bp, Homo sapiens
ttttacattctcagtagaatctgagaaatggtcctgacaactcagattccaacccaaatcaagcaaagttaatatttgtattgttggaacttgattcaaacaaataagcaaatcttgactctatttcaaaaatctctttaattctttatattttgggttatgaatgtattttcttggattttactgagttttcaattctttttgttcatccctaataacctgtcagtttgggttctattttttctggcttcattcgtcattatttgggcctctacctgacaggttaaaaccaccggaactgagtgtggttaagggacttaaacagataagcctgacgtgtgatgggagaggcactggtttgagttagatgacctgggttcatatctctattccttaacttgctcactgcttttgtccttgatttcttcattacaccatctatttcataggatagttgtgagaagtagataatatgttgtaaagtgcctggtatgcgataatcactcaataaatgttggttctcactaccattaacagaaattctcagaaaaggtagttattttaaggacaagacaataggttgttttcaggcttcaaggtgatgaaatacctccaagtaggtattttcatcaggcaattggagagtgactcattcattcaagaagtttttaactgtactttgtgtcaagtatgtgacaccagagctcacgggagattcagaaatcattgtcaataattaaagttgtgaaaaacgggaagagcagaaggccaaagaaaatgacttaaaaatgaaaacaggagaatcaacaatggaagtagaggatatcaaagccttaggaaaaccaatgatggcaagagaaggatgga

SEQ ID NO: 216 - DNA, 1464 bp, Homo sapiens
atcatccggcgcggtgtttagactccactgatgtcgtggcgctttaggggaagaagttggtgtttcgctgggccctggtactgaagacgcggtccgggtcgcccctagctgtttcctactcacccaaagccccgcacccgccttttctctctctcctctggcaggatgaggcgtgcaggcctgggtgaaggagtacctcctggcaactatgggaactatggctatgctaatagtgggtatagtgcctgtgaagaagaaaatgagaggctcactgaaagtctgagaagcaaagtaactgctataaaatctctttccattgaaataggccatgaagttaaaacccagaataaattattagctgaaatggattcacaatttgattccacaactggatttctaggtaaaactatgggcaaactgaagattttatccagagggagccaaacaaagctgctgtgctatatgatgctgttttctttatttgtcttttttatcatttattggattattaaactgaggtgatgcatgtaattgtgaatttggaatttgttccaacttaatggcttgcagtaccactttgataaaaatcagcatcaaaacattcctagtgttcaaatactgtggcattttccattgttgaatactgtttcttaatgactcattttagcccctattttcaggggtagtgagagggtgtggctccactaatttccagtttgtttttctattgtttgccaactgtcagattaaatagcattataatattttgttgtaatcataaatgcaggtttatgtcccatgtaaggaaacttagtgggagagtaacagaatgcctggagagcctgactctgagctcttgaagtagtcagccagtttgtggtaaaatggtaattgaattttcctaactgcatcaactgtaatgatatactcccttctcctcctttatttagttaaaattgtaggctgatttctttttacctacaatcttcctaataatttttgatgataatgacccctcatttctttctgcccaaagacctcattctttaaataaaacttgttattttggcatatttctggtagggcccattgcacatgtgtatcagtatagttattatttcatattaactttatgaattctcttgacttggcttataatagttttatgatttttactacataggtagcacatttatcatttgtgacagaataatgtgaagttaagtaattactgaactttaaatggaaatagtatgcaagaaactcaggcattgaacttgaagataagagtattattgctttaatccagtgtatttgtttatggaaagaaaaacacaaaggcagactgttgagtaaaaaatattaaatattgttaaatattctgtattttggaatttatccatttataggcttcaaaagtaaatttttaaataaaatatattagtcgactgtaaaaaaaaaaaa

SEQ ID NO: 217 - DNA, 2406 bp, Homo sapiens
ctataataagctagggacctctttaaaaatgtatatgcctgattctgtctttaaatatactgatttagaatttcgtgaggagggatctagatgtaaatattttgaaaaaagcatctctggtgattctgatgcataaccatgaaaaagcatctccggtgattctgatgcataaccatggtgaagatccatagatctaaagtatatgagccacatagacactgagctatacaaaggatatttattattatgccagggcttttacatctcaggatattataatttctatgaaagtatgtgtaatatttctagtccctacctaagcctctctcatctttaggattttccagctatgttttaatacgttagtttttccccatccatatttatagtccttatcacattttactacctctatatgatattctcttaacttaatagactctacttcaaagtcagctgtctaaacaaaaggatattaaaagtaaaggtccaaggcctagcatggtagctcacgcctatactcccaacattttgggaggatgaggtgggcggattacctgaggtcagtagttcaagaccaccctggccaacatggtgaaaccccatctctactaaaaatacaaaaaaattagctgggcgtggtggcgtgcgcctgtagtcccagctacttgggaggctgaggcaggagaatcacttgaacctgggaggcagagattgcagtgagctgagattgcaccactgcactccagcctgggcaacgagcgagactccgtctctaaataaataaataagtaaataaaagtacatttaactgctaaccgtattacattttggatgaaatcctctacttgggtagcagtcaaccatttgaccttggagagcaatggcacaacaaaaagtggggaaaaaaatctgtgtgataatgcacaaagtacttacatttattgttaattttttttatccacataattggaataacacctaaatagttttgagttgttgaattactctgtggagctgaaagaagtgtttattggacaatgaaagagctttttattcgctgagagtattactgtattttgcatggagaaatcaggctgattatccaaggttatcaacaggctcctgaattgattaaacacaagactgtcattacaaatgtactatggtaacagttattcaatgtacttggatatgcatatgtagactcttagaatctaactgtgatattttatttgcctttatctctgataggattcacaatttgattccacaactggatttctaggtaaaactatgggcaaactgaagattttatccagagggagccaaacaaagctgctgtgctatatgatgctgttttctttatttgtcttttttatcatttattggattattaaactgaggtgatgcatgtaattgtgaatttggaatttgttccaacttaatggcttgcagtaccactttgataaaaatcagcatcaaaacattcctagtgttcaaatactgtggcattttccattgaaaattgctgaattttgcttattttataaatcacattagttaatacagtggtctttgaatactgtttcttaatgactcattttagcccctattttcaggggtagtgagagggtgtggctccactaatttccagtttgtttttctattgtttgccaactgtcagattaaatagcattataatattttgttgtaatcataaatgcaggtttatgtcccatgtaaggaaacttagtgggagagtaacagaatgcctggagagcctgactctgagctcttgaagtagtcagccagtttgtggtaaaatggtaattgaattttcctaactgcatcaactgtaatgatatactcccttctcctcctttatttagttaaaattgtaggctgatttctttttacctacaatcttcctaataatttttgatgataatgacccctcatttctttctgcccaaagacctcattctttaaataaaacttgttattttggcatatttctggtagggcccattgcacatgtgtatcagtatagttattatttcatattaactttatgaattctcttgacttggcttataatagttttatgatttttactacataggtagcacatttatcatttgtgacagaataatgtgaagttaagtaattactgaactttaaatggaaatagtatgcaagaaactcaggcattgaacttgaagataagagtattattgctttaatccagtgtatttgtttatggaaagaaaaacacaaaggcagactgttgagtaaaaaatattaaatattgttaaatattctgtattttggaatttatccatttataggcttcaaaagtaaatttttaaataaaatatattagtcgactgtaaaaaaaaaaaa

SEQ ID NO: 218 - DNA, 1255 bp, Homo sapiens
  misc_feature (33)..(33): n is a, c, g, or t
  misc_feature (38)..(39): n is a, c, g, or t
cgtagacgtgtattccccactattattggaatncaggnnagggcttactgtaacttgaataggcctttgagttaaaacccagaataaattattagctgaaatggattcacaatttgattccacaactggatttctaggtaaaactatgggcaaactgaagattttatccagagggagccaaacaaagctgctgtgctatatgatgctgttttctttatttgtcttttttatcatttattggattattaaactgaggtgatgcatgtaattgtgaatttggaatttgttccaacttaatggcttgcagtaccactttgataaaaatcagcatcaaaacattcctagtgttcaaatactgtggcattttccattgaaaattgctgaattttgcttattttataaatcacattagttaatacagtggtctttgaatactgtttcttaatgactcattttagcccctattttcaggggtagtgagagggtgtggctccactaatttccagtttgtttttctattgtttgccaactgtcagattaaatagcattataatattttgttgtaatcataaatgcaggtttatgtcccatgtaaggaaacttagtgggagagtaacagaatgcctggagagcctgactctgagctcttgaagtagtcagccagtttgtggtaaaatggtaattgaattttcctaactgcatcaactgtaatgatatactcccttctcctcctttatttagttaaaattgtaggctgatttctttttacctacaatcttcctaataatttttgatgataatgacccctcatttctttctgcccaaagacctcattctttaaataaaacttgttattttggcatatttctggtagggcccattgcacatgtgtatcagtatagttattatttcatattaactttatgaattctcttgacttggcttataatagttttatgatttttactacataggtagcacatttatcatttgtgacagaataatgtgaagttaagtaattactgaactttaaatggaaatagtatgcaagaaactcaggcattgaacttgaagataagagtattattgctttaatccagtgtatttgtttatggaaagaaaaacacaaaggcagactgttgagtaaaaaatattaaatattgttaaatattctgtattttggaatttatccatttataggcttcaaaagtaaatttttaaataaaatatattagtcgactgtaaaaaaaaaaaa

SEQ ID NO: 219 - DNA, 1221 bp, Homo sapiens
  misc_feature (939)..(940): n is a, c, g, or t
  misc_feature (944)..(944): n is a, c, g, or t
atcatccggcgcggtgtttagactccactgatgtcgtggcgctttaggggaagaagttggtgtttcgctgggccctggtactgaagacgcggtccgggtcgcccctagctgtttcctactcacccaaagccccgcacccgccttttctctctctcctctggcaggatgaggcgtgcaggcctgggtgaaggagtacctcctggcaactatgggaactatggctatgctaatagtgggtatagtgcctgtgaagaagaaaatgagaggctcactgaaagtctgagaagcaaagtaactgctataaaatctctttccattgaaataggccatgaagttaaaacccagaataaattattagctgaaatgtggatccttcaggttccagggatttcaccagtagcagtgaaagcctacttctgctaattttgactgttcctcagcatttgtccagaagcttaaaaagaaggaggcttactttcagtgccatctatcacagctgcagaattatatcatgacatgtcaaaataatgactctgaagccttccaaatcttccaagaaagaagaatccttattttagattagtaggaaatggctttctaccactctgaaaagtctcttcttggccaaacatcaaagtctggagccagagatgtaagcagaaatggggcggaaagagctcacatgttgaatcaatcagccttgatttgaatcaaccttccatcaattaccagctaagtaactttaaaaaagtcacttaatctctctggctttctatttgtccctatgtaacaacctgtgatggtcatgtgtggtctgtcctgatggggaaatgtggcgcttgtaggcgagaatagcgtgggtagtatacatcatgggcctggtactgaagacgcggtccgggtcgcccctagctgtttcctactcacccaaagcccgcnnccgncttttctctctctcctctggcaggatgaggcgtgcaggcctgggtgaaggagtacctcctcgcaactatgggactatggctatgctaatagtgggtatagtgcctgtgagaagaaatgagaggctcactgaaagtctgagaagcaaagtaactgctataaatctctttccattgaataggccatgaggttaaaccaccggactgagtgtggttagggacttaacagatagcctgacgtgtgatgggagaggcactggtttgagttagatgacctcgg

SEQ ID NO: 220 - DNA, 844 bp, Homo sapiens
atcatccggcgcggtgtttagactccactgatgtcgtggcgctttaggggaagaagttggtgtttcgctgggccctggtactgaagacgcggtccgggtcgcccctagctgtttcctactcacccaaagccccgcacccgccttttctctctctcctctggcaggatgaggcgtgcaggcctgggtgaaggagtacctcctggcaactatgggaactatggctatgctaatagtgggtatagtgcctgtgaagaagaaaatgagaggctcactgaaagtctgagaagcaaagtaactgctataaaatctctttccattgaaataggccatgaagttaaaacccagaataaattattagctgaaatgtggatccttcaggttccagggatttcaccagtagcagtgaaagcctacttctgctaattttgactgttcctcagcatttgtccagaagcttaaaaagaaggaggcttactttcagtgccatctatcacagctgcagaattatatcatgacatgtcaaaataatgactctgaagccttccaaatcttccaagaaagaagaatccttattttagattagtaggaaatggctttctaccactctgaaaagtctcttcttggccaaacatcaaagtctggagccagagatgtaagcagaaatggggcggaaagagctcacatgttgaatcaatcagccttgatttgaatcaaccttccatcaattaccagctaagtaactttaaaaaagtcacttaatctctctggctttctatttccccatctggaaagtaacacatacctcacaggttgttattaggaacaaataaaaaatttgtgtcaa

SEQ ID NO: 221 - DNA, 400 bp, Homo sapiens
agaggacagaggaacatgctgcaccatgtgtatgcagtcaacaagttcagttcaaatatatcttggatccttcagcaaataatgtataaggaacataaaaggtagagagaaaaatctatggataaaaagagacttaaaagaaatgtcaaagtttaaaaataatacaatcctaattatatttggtaaacatggatgttagagctgtttttaaaagctggaatgtcattactataaaagtcaggagtgattacctgtgtgggaagggaaggggctgtgatgggactgatgccttggtggttttagatggttggtaaagttttatttcttaacctggtagtggttctgaggctttttgacttagtataactcattaaaccacacatttattttgcatgatttt

SEQ ID NO: 222 - DNA, 622 bp, Homo sapiens
aaaattagccaggcgtggtggtgggcgcctgtaatcccagctactctggagggtgaggcaggagaattgcttgaatctgggaggcggagtttgcagtgagctgagtcctcgccattgcattccagcttgggcaacagagtgagattacatctcaaaaaaaaaaaaaaaaaaaaaagaatcccagaaattaaatgttttatatttttgccacaagaaaacacgtgcaagtatgaaactttttgtaaggtcctctgagctggctgcactatggtcaagccacggtgacattcccccacccttgtgataatgtactttgtgatactcctgtccttgtgaatgtactttgtaacattcctccccacccttgtgacaatacatcctccctgcccttgtgacgatacaccctccctgcccttgtgaatgtactttgtaacatcctccccacccttgagaatgtactttgtaatatccatcccctgcctgtaaaaaattgctcctgactacaccgcctatcccaaacctataagaaccaatgataatcccaccaccttttgctgacccctttctcggactcagcccactcacacacaagtgaataaacagccatgttgctcacactaag

SEQ ID NO: 223 - DNA, 650 bp, Homo sapiens
aaatattaagtgaaaaagtagtgacttaattgtgtagaactaaaagacagtaactgcaagttaaatagacaagggagttaatccagtctttgcctatgtatgaccgtgggtaagttaatcttactatacttcagcttcatcatttataaaatgagaaattaatagtactaatcacagagattgataaaagaattaattgacgtgagatatttagcacgctgcctggagtttagaaagcatccaataaatgttatcttttccatgagttaggattttttttattataatagaaaacccaattcaaacttgcctacagagtaaaaagaaatgacttttgtcacagctgaaaagtctagcagtagaatgaactttaggtattgtttgatcagggtaccatgctttcagacctggtcttgctgatgtgttggctttatcttcagctggtttcttccctcacaatagcagataatcacagcagtttcaggccttatatccacacatccagaaagaaagaatttctcatatcctccaactatcaaaaaaaaaaaaaaaaaagtcccagtttacatgctggaactccaatttagggtctgtacccactcctgatgccatgcactgattggcacagagtatgggatgacaatttatgc

SEQ ID NO: 224 - DNA, 329 bp, Homo sapiens
catccttacatggcagtcacctagcaaaagccccactttctgtcaccatcacattgggtgtcaggatttaccatatgcattttggaggtatacaaacatttagtctatagcaatatcctttatcagatttaaagacatcttcaattcatagtttattatgaattcttatgaatgaatttgaattgtagccaatgctttttctgcatcaattaaggtgattatttgatgtttttaattcacgagatgaattagatagattttcaaattttcaaccatccttgcatttctgagataagtcaagtttgtcataatatattatctttactaaa

SEQ ID NO: 225 - DNA, 418 bp, Homo sapiens
ttcaagcgaagttcttaggggtagaatatgagcggcacaagcgcgaagctcgggcctgctgtgtacccacgcgtgcacgcaggtgtaccagtgcggacaagagctggggcagccatccacttcctgaacacggcgggagagagatgctaaggggaaggagggagcctttttggttttctctcccgcgtccgcctatgtcctggcagggggtcttggggaaatgggagggtgaaccccagcacacccacccggacggtggtgacatcatagctttccgtccccatggcaacgggcagccgggtctccggttgcattgacttaaccgccggcctagactagcagagaagcgtggactgagttcctccagccaagcactgggtggaaagttttgggggagctgcgtcctctggtggatgct

SEQ ID NO: 226 - DNA, 385 bp, Homo sapiens
tttaacatttatttacagactggaatattaagctttatgcaaacctaagaggccatcataaaaataaaaatacatcatgtatatttattttccctaaatattctaaccaacacgcaaaataattttccaagtcttagactagtaattgctcaacttgaatatgttgtttgagcaccatttggtacagtggctactgaaaagcactgagtgtttcctttcatactccatttattcccccgccttttggaagtgttcagacatttttacagttcgtgtttgtctagccaaaatatttcactggaagcccatgggggtctttctactcctcagaaagcgagcagagtgtgagtgtttgactcccagggcaccatactataatagctat

SEQ ID NO: 227 - DNA, 606 bp, Homo sapiens
cagtattcaacattaagtatatacttaagcagtaatgactctgaagctatgctttgcattcatgaacacactccatagggttacgcttcaagcactaggtgaagccaagattttctgaattatgtttcattggggaatttttacctttttttcctgtttatgacagtcatttcatctggttttataatgaggtcaggaacaggtgaatgtaaaataatactagtaagctgagtgatttctgtgttaatgattaggctattttttaaattaaaaagttctggtatttgaaacatgctcagtactttaagtacacttactagtaattaatcagaatgaaagattttaatgttctctgattatgtacaaatcattatggctacctgtctgcaagaagtcaggagaaactggtatctcggctaaaactgggggaaaaactggtgtcgtctttgcttatttttcccattctcccagtaaatacaaagcattagcatttgtataatataggggtgtacttaactctttccccttaaaaggccaactttccccctttataaaatacaggtctgctcattaaaccaataacctttaaaaaatgagacatcaaaa

SEQ ID NO: 228 - DNA, 408 bp, Homo sapiens
tcaaaaaaaaaaaaaaatttatacctatgtccccttaacttacacatacccatcccaattctgccctgttaatttatatgtgcacttccttattcattcttctttagtctttctctttataccttataatctaggatagcacagagacaaaactaatgacccaggccacaagaggggattttttttttagcaagacgaatgctttccattaaaaaaaatcaatgctttttttttggcaaaaggaatgctaatttgcaaggcacccctgaagcctgtttttaggcttggcttttggaaaaaccatttgagcctacaacacactcttagacgctccccaaacaggagacgataattaccacagaagccacattcactccacgtattcctgctgttggataaatgtatttt

SEQ ID NO: 229 - DNA, 389 bp, Homo sapiens
agtgatctgtgactgcttttgtgctacagcagcaaagttgagtagttaggacagagatacggcccacaaagtaaaaatatctactctctagccctttatagaaagtttgccaatctttgatctaatgcttagcctagaattctgcatatactggaataatacttattgaattaataaattcacttacgaatgtattatatacatttaaaaccttatatcaaattattataggtttatttacttcaattaacctaaaccaaggtaatatataagaactaagggctgggcgcagtgattcacgcctataatcctataatctcagcctcccaaagtgcctataatcctagcactttgggaggctgagatgggaggatcacttgaggccagaa

SEQ ID NO: 230 - DNA, 560 bp, Homo sapiens
agttacaatttcatactgccccccttctcctgctctagcgagaaaagaatcagactcacagcttgacccaggccaacacaggaatagttcaagctcctggcccacactgcacctgggggagcctgaagcttgtcctaccgtgggagcaggagccttgagtaccaggaatttcaatgggatgtttttgagtttaggaagttaggctggctgcattccatgacatgcaagggagaggattttggagtagcacagaaaatggaaaccttggccgggcgtggtggctcacgcctgtaatccgagcacttcgggaggctgaggcggggcggatcacctgaggtcaggagttcgagaccagcctgaccaacatggagaaaccctgtctctactgaaaatacaaaatattagccggtgtggtggtgcatgcttataatcccagctactcaggaggctgaggcaagaaaatcacttgaacccgggaggtaagaggttgtggtgagccgagattccaccattgtactgcagcctgggcaacaagaatgaaacttcgtctcaaaaaaaaa

SEQ ID NO: 231 - DNA, 466 bp, Homo sapiens
agtggaactcagtgacaatcgaacattccactgagacctaatatccttcagatgagtctggcatctggaaggcagcatgctgtggaatctggcttgttggaagacagaactgtgttctgctgtggccgttgcaattactatttccagaataattgtgcaagtgcctcgcctctctcagcttcaattgcctaatctgaatgttgagcaagtgcctgacccttcctgagcaacagttccttcatctgtaacatgggggtactttaatcaatctcatcattgtgaggattaagtgtgaaaacaaaaggtacttcaagtgatcagtaaataatggatcctcggtaagtggtagctctcttctttctttcccttaagtttcagcccaacagatctctttcgtcagctgttatcattgtaaaaatcatcagttaaaggcaaataaactggcctccaattatgaggatttatt

SEQ ID NO: 232 - DNA, 381 bp, Homo sapiens
ttcaagtcattaaggtccttcatgtgccagctagtcagagacccagagcccgtgagtccccctcccagatcagcgcacccaggccgcatctgagcgactgcgctggtgcacatgtggctcaaatctccagtctgctcatggttttgaatgtcccaacaactgcaggctttggccaaggccaccctctcatctcgctgtgtggtaagggcttacatatccagacgtgcatgtatgcactgttgtctagatttttgtttttaaaaataatcgtggacctaaaaatagtttcttcctaaaattaattccctaaaatacactgactagaagccccacactctgaactgatgctttagtgaacctctttgcttaatttttgaagat

SEQ ID NO: 233 - DNA, 323 bp, Homo sapiens
taaagcctgctggtcagagctctgatattaggcttggggagacctgggcttgaatctgggcccatcactgacttgctgtgtggccttggaggagtcactacacctctctgagttgtgctgtcctcttttgcaaaatgagaatacctcctaccttgcagggttgctgatgggagaccagagagagtttgttaagaggctatgattgtgcctggtaagaaagagcctctggctgcagagatggcattcactgttgaacatcaagcatcttaggactctggccaaccaggctgttcaggaaatgtcctgtttctttaaaaaaaaaa

SEQ ID NO: 234 - DNA, 328 bp, Homo sapiens
aacagtgtcaaacagagacggaggctctcggaagtcacagcgtttgcagcaaggtggctcccagagctgggaggaaagccccgcctgcagccaagctcctgctccaccaccccaggtgcagaggggctgccccaggcgggggactccaactccctctcagccagggccaggcctgtggggtccgggccttctcagggccgaggcctcactgcccgagcacgggccctgcctgcggcagttacgcggatggttcctttttaaacgcaggagctgccgtcatcttctctcactcaacggtcatcatggaaagtgaaaacgacggtgcggc

SEQ ID NO: 235 - DNA, 407 bp, Homo sapiens
gtccttctttaaatttgtaatacgtctttttccaagatattgtttgattctaaacccatacactgatatcaaaattaattacttaacaaaatcccaagaatgaatcttacatccttaaggagaagaacattaatctgactcagactgactgaatttaaaatttatttgcagttaacataaaacattcagttttaagatcattgttacattttcaaacaggcaaatcttgaaagacttgcctagatttgctctcagcataatttatatatttttttctctaagaaatagtttagcttccacttaaaatgcatgatgtacatatctgccatattttgttttattttagagatctaaattctacattaagtagaatatgcagttttagattaaaaaaacagaaaaccttt

SEQ ID NO: 236 - DNA, 313 bp, Homo sapiens
acatgtttttataccctatactctatctaaactgcagagcaacttctgtagcaggaagcactcttggagtctatgtggtggatctataccaagggatatatcgttcgcttgtaatgagttcttggggtgtttggctcttatttcttttctcctactgagaagtttgataaaccaagttattgatcatagaagcagtcatccaagatacggctgaaagtaaagccttgggagccagatggcttcccgctgatttttatatgcagtttatattctccttggctgtgtcttcctggatgtttcaatgaaagatatt

SEQ ID NO: 237 - DNA, 383 bp, Homo sapiens
ttcctatgtaatgcatcaggtgcacaagtctagacacatttagattagaaacagcccagaatgcatattagacgcatatttatcatcttgatttattaaggagcagctgcagaatgatactaattaagtgtctgtgctttctttttgagactataattgtttttttagaacaagcaaaatgtaaggaaacaaatgggcaagggtatttgaatgcattaaatctctattatatagacaatgtttctttacatttttctgcaacttacacattaaaggaggacattcccgtggtttacaaaaagttgtctatagtaaacattcctctgagactttttttgtggtgttatttataccattttgagtcatttagcctatagttctgg

SEQ ID NO: 238 - DNA, 417 bp, Homo sapiens
atattacgccatattataatttgaaaaacagtttcagtagtgtggttctgatgcatgattacacagacattccatggaacagaacagaaaaatccagaaatagcctcaaacacgtgaacatttactatataaagtggcatcaaaggtgggtggggggaaagatggactggtgttgagacaacagggaaacaaattagatatcatgcactgtagtagaataggctccaaataatgaagagatttcaatgtaaaagaaaaaaaaactcatcaaagtatttgaagaaaatcacgaggaaattcaaatactggagtggggaaagactttctaattaagactaaaaatctaaagcctcaaaggaaaggctagtaatttcaaatgcataaatatttttaaaacctccattatggcaaaaaaaa

SEQ ID NO: 239 - DNA, 216 bp, Homo sapiens
ctgtgtgcaatgggacccagcggggcctttgaggccacattctggctcctccgccatcatcgtgtgattttagacaagaaatttaccctctctgagccacggttttttcagcttgcaatggggatgatcactccttcttcccagggctttgcagagggtttgctgagccaccgtggtgaggagctgacagtgtgcccagcacgtagtgggtggccc

SEQ ID NO: 240 - DNA, 883 bp, Homo sapiens
gcagttgtggtagatccacaaaacgtataaagaaaaatacacgtttcctgaaacaaaacacttggaaaaataagctgctaagaactggcgaattagaagtttgcagacagggaactgaagtgtcatctcttggttcaccctggagactgatgtgagtggatctgatgcaatgctgctggaagatttacctgcacaggttgctcctctaaggcaacgcgcagtgcacgattgacgtatgcaccagagctaggctgggcctcagctcgctccatcttttgccctttttgatctctttagatagataaaataccaagttctcagagtgctaaacaacaaattatatatacctaaaggtgagatgatcaggtttaaacttcctgtaaaagaggcgagaaggcgccttgcacacccttttccagatagggctggcagcatgttattcagaactgaatcagtctctgccagagaattcccagtgggaacctggagcaggtatgttgatgaaggggatacctggggacctttggtcactcacaatgagttttggtttgtattctcactgttgttagcattgccaatgaacaattgcacctacaatttgattttagttttagatagaggcgaatccactgattaaaaactcccattaaaataaagaatggaattattgtgaaacctgcaagggtgccttcaaaaagaaaaccagtgctgttgtatacctacctcgcctttctatttgctttttgaactttctaaaaaacacaaggaagctttttgctaagcatcagggcatttaaatttatattcatcagttgttcattttcttaatatgtaatgatgcataaaaaggctgcaaggaaatcacatctgttaatttttaggg

SEQ ID NO: 241 - DNA, 415 bp, Homo sapiens
aaaatccagtacccttttagacctttggctcccaaggggcatcccatccccctgataatgaagtatggattattgcaatcctatcagtccccaacataacacccccatttttcctgttaataagccaaacggggaatatagatttgttcaggatcttagggcagttaatgaggcattagttccagtcacccaatagttcctaatctttataaaataataactcaagtccctgaagatgcttattggttcatagtattaaatttaaaagatgttttctttcacacacctttacacctggacacccaatacatttttgcatttgaatggactaatccagacactcatgctgcatctcagcttacctggactgtcctgtccccaaggttttcggacaatccccatctgtttggcaatg

SEQ ID NO: 242 - DNA, 888 bp, Homo sapiens
ctgaggaaggaggacaaagaaagcactgaagaagtgataaaggggaatgaaatgagatgttatcagaaattgctttctctttggctacggttaggagatcccatgttttacctgggccttttaatgatgacgattattatttggctctcttttgatttcaagataatctcttttaagagataacttttgatatagtttttaaataattttctgtttttcaatacttaatcttaaaaatggagttttctgccgtacgtatctcacataattattgtgaggagtaagtgggatagcaaatgccaaaattgcgcaattttacatttagaagacagcacaaccgtccatcttccagatctgctcacagctggtcgggggcctagtgaagcattgaaactggctctcctcagtctagccattgctttttgtttaaattatagtaaaatttagatttaaatttgtaataaaaaatttcaatgtttatcatttaagtgtacaattcagtgacattaagtacattcatgttgtcttgcaactattaaccactgtccacatccagaacattttgctatcccaaacagaaactctacccactaaacactaatcacacccagctctattttctgtctctgtgattttgcctatgccaggtccctcagtcactgctttttaattttcatccctatattgccccataaagtttcaaagcattggatacattaacatatgtatgacatttgaacattttaaaggtatttccaaagacagaatataaaatattattaaataaagagtgtaactgtggcagagtctggactttggtgacagatcgctggattctaatagcggttctatgctttattgtatgatggctagtcaggtcacctctca

SEQ ID NO: 243 - DNA, 381 bp, Homo sapiens
gagacagagtctcactctgtcaccaggctggagtgcagtggtgcgatctcagctcactgcaacctccgcctcccgggttcaagcgatcctcctgcctcagcctcccgagtagctgggactacaggcatgcaccaccacacccagctaatttttgtatttttaatagagatggggtttctccatgttggccaggatggtctcaatctcttgacctcatgatctgcctgcctcagactcccaaagtgctgggattacaggcatgagccaccacacctggccgatcccagcatttcctactcctctcaggaacagcttaggacagaatcacttcattatgatagagctgtacttttctgtaaaaagaatccagctacaatgtgt

SEQ ID NO: 244 - DNA, 2338 bp, Homo sapiens
tatgaactttacttgagacagaatatggttaaaattaggaacatctactttgaatgaggtttatttttctattttgaatttgccttatgtatattcaaaggcttatggaaatactgtaaaggaacattaggaaaaggacaaataggctataaccatctatcttaaaatcagacccttagtataagcacctctttttcttttcctctttgacaatttagtctcttatttaggtccatgtaattaatttcattccattattttttagctgtttattctaaaaaacaaaaattttcagccactcccatttattctcccatgacatggtcctatatagcagtacttaacacagtgccttgcacatagtaggcattcagtaaatacttacatgcatgaatgaataatgtattttcagtgtaacaaatttattataaaagtgtagttcgactcttcttggtcttggagtttgagagtacagaattacagggaatgaagagaggtataagtagatattttaatggaaatgaagtataaattaataacttgacttacccctccataagttactgctaactggagatacccttgtatgcccaacctgtaaaggaaaaagttctatttctatatttataggacattcttctcagtcaaggaacagtaagaaatatgtaggtttcaatcagttgctctcaaccctgactgcattttagaatcatttggagagtttttaaaaatatccatgcctgaatcttgattcccattttcatgtaatttgagacaagacctggtcatcagtattttttttaaagttctccaggtaatttgaatgtgcaggaaggattcagaatcactggtttaatttgttattgaaaacagtaccagtattaaatgtgtttcctcttccttcttttctgtatgtatgtgtggtttttgattttttgttgttgttgttgttttgtggccaccctttgcactagaccatcccttttattggtggtattggcctatattcccattgacaaatgcaatttttaattatttatttaatataggagtattttactgtttaatatttaaacaatgtttaatgtatttcattattaactagtattatagtttgtttttttcccatgtctccataacttttactaacatttgtttttagcagcacaacagtaatccatataaaaacaactaattcataatgaggaaaatctcataatttttaaggcagaaagaagtattaatttttgatctgccatgtagaatgagacaaatacagtttgcttatgaaaggaaagtggcatacttttaaattggtctacacagaaaagtaaaagtaaactattcatttaaataagattcattatctaataaatattgagggaatatttttcctaaataaaaatttttctgactgctaacaaaaattaaagtgattacattgttcttttttggaagggtggggaggaattatttgttgaactaaagtatataaaattttttgagactagcagtatattttataatattacaaatacaacaattatttataaaagctagtcaaattaatggcttagaaagtagctgtaaactttgtgttttgaaattgcttgtttaaatgcaaaattatgagtaagataagtctttttaaattttttatttttaatttttttggaagtttattaaagcccttcatatacacatactttttaaaaaaagattcttaataaagaaattattggtttgtctggttaaagtccatatagaatgctgagaaataatttataaaataagaactatagaaatttgttctcagctgaaaagttggcagctgctctgtttctttaaaaaagtacaacatgaaaatttaattacattagccttaatattacttgactgaatttctactatttattcacttgtgtttgagattcacccagctattctaatgatagaaataaaaagtggagaaatgactaaagttgacttaagttaagaattggagtgggaattttgaaatgccatgtcctatatattctggcatatttgttggcacatttgcaagtatgttgatcccagcattgtttatatctgttggaataataactaaggaaaaattgaaaatgtataatagatgtataaagatttatatttagttagtatataatagataatacttgcaggttttttatgtgttttgggtttctgtgtattattttaggtaatctttataagggcatcttggaagttataaatatgtgccatttactgaaaagtgggaagcatttttatatgagtaaagctaatgaaataaaactagttttattgccaaaattca

SEQ ID NO: 245 - DNA, 1423 bp, Homo sapiens
tatgaactttacttgagacagaatatggttaaaattaggaacatctactttgaatgaggtttatttttctattttgaatttgccttatgtatattcaaaggcttatggaaatactgtaaaggaacattaggaaaaggacaaataggctataaccatctatcttaaaatcagacccttagtataagcacctctttttcttttcctctttgacaatttagtctcttatttaggtccatgtaattaatttcattccattattttttagctgtttattctaaaaaacaaaaattttcagccactcccatttattctcccatgacatggtcctatatagcagtacttaacacagtgccttgcacatagtaggcattcagtaaatacttacatgcatgaatgaataatgtattttcagtgtaacaaatttattataaaagtgtagttcgactcttcttggtcttggagtttgagagtacagaattacagggaatgaagagaggtataagtagatattttaatggaaatgaagtataaattaataacttgacttacccctccataagttactgctaactggagatacccttgtatgcccaacctgtaaaggaaaaagttctatttctatatttataggacattcttctcagtcaaggaacagtaagaaatatgtaggtttcaatcagttgctctcaaccctgactgcattttagaatcatttggagagtttttaaaaatatccatgcctgaatcttgattcccattttcatgtaatttgagacaagacctggtcatcagtattttttttaaagttctccaggtaatttgaatgtgcaggaaggattcagaatcactggtttaatttgttattgaaaacagtaccagtattaaatgtgtttcctcttccttcttttctgtatgtatgtgtggtttttgattttttgttgttgttgttgttttgtggccaccctttgcactagaccatcccttttattggtggtattggcctatattcccattgacaaatgcaatttttaattatttatttaatataggagtattttactgtttaatatttaaacaatgtttaatgtatttcattattaactagtattatagtttgtttttttcccatgtctccataacttttactaacatttgtttttagcagcacaacagtaatccatataaaaacaactaattcataatgaggaaaatctcataatttttaaggcagaaagaagtattaatttttgatctgccatgtagaatgagacaaatacagtttgcttatgaaaggaaagtggcatacttttaaattggtctacacagaaaagtaaaagtaaactattcatttaaataagattcattatctaataaatattgagggaatatttttcctaaataaaaatttttctgactgctaaca

SEQ ID NO: 246 - DNA, 893 bp, Homo sapiens
ttttataatattacaaatacaagaattatttgttgaactaaagtatataaaattttttgagactagcagtatattttataatattacaaatacaacaattatttataaaagctagtcaaattaatggcttagaaagtagctgtaaactttgtgttttgaaattgcttgtttaaatgcaaaattatgagtaagataagtctttttaaattttttatttttaatttttttggaagtttattaaagcccttcatatacacatactttttaaaaaaagattcttaataaagaaattattggtttgtctggttaaagtccatatagaatgctgagaaataatttataaaataagaactatagaaatttgttctcagctgaaaagttggcagctgctctgtttctttaaaaaagtacaacatgaaaatttaattacattagccttaatattacttgactgaatttctactatttattcacttgtgtttgagattcacccagctattctaatgatagaaataaaaagtggagaaatgactaaagttgacttaagttaagaattggagtgggaattttgaaatgccatgtcctatatattctggcatatttgttggcacatttgcaagtatgttgatcccagcattgtttatatctgttggaataataactaaggaaaaattgaaaatgtataatagatgtataaagatttatatttagttagtatataatagataatacttgcaggttttttatgtgttttgggtttctgtgtattattttaggtaatctttataagggcatcttggaagttataaatatgtgccatttactgaaaagtgggaagcatttttatatgagtaaagctaatgaaataaaactagttttattgccaaaattca

SEQ ID NO: 247 - DNA, 451 bp, Homo sapiens
gctgtcagtcaagcaatctattacttgtagccaaatgcatcctagcagcaactaagtatatgttttcatcaaacttcagattcctggcaacatggcagtgcagtttgaagtgtgggcattggtgtgagttcctgaggggctgcttaccagctgtgtgtgttccagggggagttatttaacatatggaagcctcagtttcatcatctaaacaattggtattacaattgttttgaatccataggtgttacagtctgaatgtgtcccccagtattcctgtgttgggaagctaatccctaattcaacagcattggtttttaaggcttttggggaggtgtttaggtcatgagggctgagcccccatgaatagattaatgccactataaaaagggagggagtgggttcactctctcttgctcttccaccttcggcatgtaaggatacaatagtaagg

SEQ ID NO: 248 - DNA, 1790 bp, Homo sapiens
  misc_feature (1046)..(1046): n is a, c, g, or t
  misc_feature (1127)..(1127): n is a, c, g, or t
  misc_feature (1156)..(1156): n is a, c, g, or t
actgcattagaaggcaagccattgggatttgcagtaaatgtattacagaacacaagtgacttgctgatactgcttgtttagcagtttgcaagggcaatggcagtatggatttttgaattagaagggaagggctgttctttctctgtgtgggaacatctagttgatggctggggagaaaattgatttagagaacaaaatgcagccaccgttatttgtgccatttgaaaggcctctatggattagtgagtgaaaataaaaaggttgctttcggtttaggaaagagggtcttaacattgatctgcgtcttggtctggtatggagagaataaaggatggaccaccagatggagaaagggcatccaggccccatgcagcctgcagatacaggtacacactccattctcacatagttgtctttctcagctctttggctttcagaagtcggctttttgggtttattattacagtaagcttttccaatgacaacattagagttgtcatagcccccatccgtggagctcccatgtgccctaggaattggtccgccagaagccgccccctccccgtgtcaaccttcccagcctccctttgtgtggatactaattattccaccttgaaaaagagaaaacaggtgagtgggattaggggatgacagtagcacctaccccatagggtaattaccaagattaagtgagttaccaaatgcaggagcagttgcgtagtttcctggcatgggggcgctctgagggatagctgtgatctaaatagcagtccctttaaaactctacccctgctcttggacttctaggccatgcttcactgatacttccattttgtttttgcaaacccagcttccttcctacctctgaactgattttcccattaccgtgttttatttctttccttctaagatcataagcatttatctttaggcttaaaaggagaaaaaaaaaaaaggacttgttggcagtctgttttttttttttttttttttttaaatgaagtctcgctcttgtcccccaggctggagtgcaatggcgcaatctnggttcactgcaacctccacctcccaggttcaagcgattctgttgcctcagcctcccgagtagctgggattacaggcgtgcnccaccatgcccagctgatttttgtatttntagtagagtcgggatttcaccatgttggccaggctggtcacaaactcctgacctcaagtaatctgcctccctcagcctcccaaagtgctgggattacaggcgtgagccaccgcgtccggccttgttggcagtctttattgtctaagtaaaatgtcttactttggccaaacagcagaatgtgtccttggaaggcaatagctttaagtaatgtaactatcagtaagaataaagttgtgttgagttttttcatttaaagggatggaagaacaacaaaggatttggttcattctatcaaagtaagttttggcagaataaggactaggaggtatatttcagagtttttctttcgaatgtaacatggaaaatttgtcattttgaaaacaagcagggtatggaattagagggtcaagttgttgcttggttacagaaagaaaaaatttcattttgatgagggatatgtacacctgtggggagtgtgtgcatgtagttttctttttgctctgtaaagtactgtgcaaaagttgtgagtagagtagttgtggtgctgtctttcttcgtctactccatgggcttgagatttttgttgacagtcaaggttcacagctgctgctgatgtactaatatttggggaagc

SEQ ID NO: 249 - DNA, 282 bp, Homo sapiens
aactttttttcctggaattttgagtggggaatgtcaaattagcattttatcagtatctcaaacttggtatatatataactatactcctgatcttcctcccaactttcttcctccacagccttccccaggtcagttcttggaaactctattcttccagatgctcaaggcaaaaaccctggagtcattcttttttttttttttttttttggcagagtctcactctgtcacccaggctggagtgctggagtgcagtggtgcaatctcagctcactgcaaccccca

SEQ ID NO: 250 - DNA, 614 bp, Homo sapiens
tctaccctgatcatcacttcccactttactggctcatgccttctagtgccaacaattcttttatctcactgagacttagaacccattgaccctattatctttgcactgttcctcaccatactctctccttatgtccttacccttctctttattcagtttaatttctgttgttggtcatgattgttcagttgcaaatattctcagtacacttgccctcacttgcttcattgcttaatagagaaaccccagtttctctattaagaaccgcagttggttaaatccaactgtgcctactctacacttgtactttttaaaaatgtggtttagaaaaatggatatcaactgggcacggtggctcatgcctgtaatcccagcactttgggaaggcccagacaggaggattacttgaacccaggagtttgagatcggagtggacaacatagtgaaacactgtgtctgcaaaaaaattaaaaagttatttgggcatggtggcatatgcccgtagttccagctacttgggaggctaaagtgggaggatcacttgagcctgatgaggtttaggttgcagtgagctgtcattgcaccactgtactccagtgggtgactgagcctga

SEQ ID NO: 251 - DNA, 393 bp, Homo sapiens
ggcattactttcaatgtaatgtgttaagtaaattgttggagcaagctagttttattcttttcttccttgtttatatcctatgagaggagttgataatgtaattgagtaaaacacagatcatttattgggtcatattttaaagtagagagtgttactatacctccaatgccatgacccatgcatttccatatcctatccctagaacctttcacttactttcttgtattaaacagatcaaataggttccagaaacagacctggctcattagtgctaactcctgcattgtctcttgctgtttcggcttttctacatctgtgacttcaccatgtttggtctattctgagacccccaaatcttagttttctgaggaagagaacaggattcttgttgga

SEQ ID NO: 252 - DNA, 566 bp, Homo sapiens
agcaattctcctgcctcagcctcccgagcagctgggattacaggtgccagccaccttgcctggctaatttttgtatttttagtagagacaggcttcaccatgttggccagactggtctcaaactcctggcctcaagtgatccacccgcctcagcttcccaaagtgctgggattacaggcgcgagccaccacacctggcctacgtcttaactccaactccagactgagacctggctccaggtctaccgtgtcctctgagcccggctcatgatgacttgtggcccagaccccagctggttttgggcttccctctgtttgagctcttgcacagcaatcctccatacccccttcactgtctgagaacttttttttttttgagacagagcctcgctctgtcacccaggctggagtgcaatggtgcgaacttggcttactgcaaactctgcctcccgggttcaagagacgattctcccacctcagcctcctgagtagcaggggtaatttacaagcgtgcgccaccacgcccagctaattttttttgcatttttagtagagatggggtttcac

SEQ ID NO: 253 - DNA, 344 bp, Homo sapiens
ccttcctaagaaagggcaatatcaatggtagtcatcaatttattcctaacaaagcacctaacataacagatgttatgacataacagattccataaatatttgtggaataaatgaatcaatgttggtacctcctttggtccaacacagggcactatgagtttcctgatccctgattttccctgcaaagggatggaggcttgtcttatgtattcctacaacactccatacttcgcctagtatagcacttatgactttattataattgtttgctcccctcatcaacttctcacctgttgtggggcctataattaccttattcacctgtgtaatcccagcatgtagca

SEQ ID NO: 254 - DNA, 321 bp, Homo sapiens
cattttttttcctttattcctttgtcagagatgtgattcatccatatgctagaaaccaacagagtgacttttacaaaattcctatagagattgtgaataaaaccttacctatagttgccattactttgctctccctagtatacctcgcaggtcttctggcagctgcttatcaactttattacggcaccaagtataggagatttccaccttggttggaaacctggttacagtgtagaaaacagcttggattactaagttttttcttcgctatggtccatgttgcctacagcctctgcttaccgatgagaaggtcagagagat

SEQ ID NO: 255 - DNA, 225 bp, Homo sapiens
gcaaaaactgatagactgaaaggagaaaaagacaaatccataattttagtcagagattttaatgccattctcgtactagttgatagcacaagtggacagaaaaccatcaaggatgtagtagacttgttacaacactatttacttgacttgatttatagagccctctgtgcaacaacagagagacattctgctaaagtgcacatggaatattcatcaagacagacc

SEQ ID NO: 256 - DNA, 2199 bp, Homo sapiens
cgcagcaaaaaagtttgagtcgccgctgccgggttgccagcggagtcgcgcgtcgggagctacgtagggcagagaagtcatggcttctccgtccaaaggcaatgacttgttttcgcccgacgaggagggcccagcagtggtggccggaccaggcccggggcctgggggcgccgagggggccgcggaggagcgccgcgtcaaggtctccagcctgcccttcagcgtggaggcgctcatgtccgacaagaagccgcccaaggaggcgtccccgctgccggccgaaagcgcctcggccggggccaccctgcggccactgctgctgtcggggcacggcgctcgggaagcgcacagccccgggccgctggtgaagcccttcgagaccgcctcggtcaagtcggaaaattcagaagatggagcggcgtggatgcaggaacccggccgatattcgccgccgccaagacatacgagccctaccacctgcaccctgaggaaacacaagaccaatcggaagccgcgcacgccctttaccacatcccagctcctcgccctggagcgcaagttccgtcagaaacagtacctctccattgcagagcgtgcagagttctccagctctctgaacctcacagagacccaggtcaaaatctggttccagaaccgaagggccaaggcgaaaagactgcaggaggcagaactggaaaagctgaaaatggctgcaaaacctatgctgccctccagcttcagtctccctttccccatcagctcgcccctgcaggcagcgtccatatatggagcatcctacccgttccatagacctgtgcttcccatcccgcctgtgggactctatgccacgccagtgggatatggcatgtaccacctgtcctaaggaagaccagatcaatagactccatgatggatgcttgtttcaaagggtttcctctccctctccacgaaggcagtaccagccagtactcctgctctgctaaccctgcgtgcaccaccctaagcggctaggctgacagggccacacgacatagctgaaatttgttctgtaggcggaggcaccaagccctgttttcttggtgtaatcttccagatgcccccttttcctttcacaaagattggctctgatggtttttatgtataaatatatatatataataaaatataatacatttttatacagcagacgtaaaaattcaaattattttaaaaggcaaaatttatatacatatgtgctttttttctatatctcaccttcccaaaagacactgtgtaagtccatttgttgtattttcttaaagagggagacaaattatttgcaaaatgtgctaaagtcaatgatttttacgggattattgacttctgcttatggaaaacaaagaaacagacacagtgcacacagaaaatattagatatggagagattattcaaagtgaaggggacacatcatatttctgcattttacttgcattaaaagaaacctctttatatactacagttgttcctatctctcccccgccccccaccgccccaccacacacatatttttaaagtttttccttttttaagaatatttttgtaagaccaatacctgggatgagaagaatcctgagactgcctggaggtgaggtagaaaattagaaatacttcctaattcttctcaaggctgttggtaactttatttcagataattggagagtaaaatgttaaaacctgttgagaggaattgatggtttctgagaaatactaggtacattcatcctcacagattgcaaaggtgatttgggtgggggtttagtaattttctgcttaaaaaatgagtatcttgtaaccattacctatatgctaaatattcttgaacaattagtagatccagaaagaaaaaaaaaatatgctttctctgtgtgtgtacctgttgtatgtcctaaacttattagaaaattttatatacttttttacatgttggggggcagaaggtaaagccatgttttgacttggtgaaaatggggttgtcaaacagcccattaagctccctggtatttcaccttcctgtccatctctcccctccctccggtatacctttatccctttgaaagggtgcttgtacaatttgatatattttattgaagagttatctcttattctgaattaaattaagcatttgttttattgcagtaaagtttgtccaaactcacaatt

SEQ ID NO: 257 - DNA, 2109 bp, Homo sapiens
cgcagcaaaaaagtttgagtcgccgctgccgggttgccagcggagtcgcgcgtcgggagctacgtagggcagagaagtcatggcttctccgtccaaaggcaatgacttgttttcgcccgacgaggagggcccagcagtggtggccggaccaggcccggggcctgggggcgccgagggggccgcggaggagcgccgcgtcaaggtctccagcctgcccttcagcgtggaggcgctcatgtccgacaagaagccgcccaaggaggcgtccccgctgccggccgaaagcgcctcggccggggccaccctgcggccactgctgctgtcggggcacggcgctcgggaagcgcacagccccgggccgctggtgaagcccttcgagaccgcctcggtcaagtcggaaaattcagaagatggagcggcgtggatgcaggaacccggccgatattcgccgccgccaagacatacgagccctaccacctgcaccctgaggaaacacaagaccaatcggaagccgcgcacgccctttaccacatcccagctcctcgccctggagcgcaagttccgtcagaaacagtacctctccattgcagagcgtgcagagttctccagctctctgaacctcacagagacccaggtcaaaatctggttccagaaccgaagggccaaggcgaaaagactgcaggaggcagaactggaaaagctgaaaatggctgcaaaacctatgctgccctccagcttcagtctccctttccccatcagctcgcccctgcaggcagcgtccatatatggagcatcctacccgttccatagacctgtgcttcccatcccgcctgtgggactctatgccacgccagtgggatatggcatgtaccacctgtcctaaggaagaccagatcaatagactccatgatggatgcttgtttcaaagggtttcctctccctctccacgaaggcagtaccagccagtactcctgctctgctaaccctgcgtgcaccaccctaagcggctaggctgacagggccacacgacatagctgaaatttgttctgtaggcggaggcaccaagccctgttttcttggtgtaatcttccagatgcccccttttcctttcacaaagattggctctgatggtttttatgtataaatatatatatataataaaatataatacatttttatacagcagacgtaaaaattcaaattattttaaaaggcaaaatttatatacatatgtgctttttttctatatctcaccttcccaaaagacactgtgtaagtccatttgttgtattttcttaaagagggagacaaattatttgcaaaatgtgctaaagtcaatgatttttacgggattattgacttctgcttatggaaaacaaagaaacagacacagtgcacacagaaaatattagatatggagagattattcaaagtgaaggggacacatcatatttctgcattttacttgcattaaaagaaacctctttatatactacagttgttcctatctctcccccgccccccaccgccccaccacacacatatttttaaagtttttccttttttaagaatatttttgtaagaccaatacctgggatgagaagaatcctgagactgcctggaggtgaggtagaaaattagaaatacttcctaattcttctcaaggctgttggtaactttatttcagataattggagagtaaaatgttaaaacctgttgagaggaattgatggtttctgagaaatactaggtacattcatcctcacagattgcaaaggtgatttgggtgggggtttagtaattttctgcttaaaaaatgagtatcttgtaaccattacctatatgctaaatattcttgaacaattagtagatccagaaagaaaaaaaaaatatgctttctctgtgtgtgtacctgttgtatgtcaaacagcccattaagctccctggtatttcaccttcctgtccatctctcccctccctccggtatacctttatccctttgaaagggtgcttgtacaatttgatatattttattgaagagttatctcttattctgaattaaattaagcatttgttttattgcagtaaagtttgtccaaactcacaatt

SEQ ID NO: 258 - DNA, 1184 bp, Homo sapiens
cgcagcaaaaaagtttgagtcgccgctgccgggttgccagcggagtcgcgcgtcgggagctacgtagggcagagaagtcatggcttctccgtccaaaggcaatgacttgttttcgcccgacgaggagggcccagcagtggtggccggaccaggcccggggcctgggggcgccgagggggccgcggaggagcgccgcgtcaaggtctccagcctgcccttcagcgtggaggcgctcatgtccgacaagaagccgcccaaggaggcgtccccgctgccggccgaaagcgcctcggccggggccaccctgcggccactgctgctgtcggggcacggcgctcgggaagcgcacagccccgggccgctggtgaagcccttcgagaccgcctcggtcaagtcggaaaattcagaagatggagcggcgtggatgcaggaacccggccgatattcgccgccgccaagacatacgagccctaccacctgcaccctgaggaaacacaagaccaatcggaagccgcgcacgccctttaccacatcccagctcctcgccctggagcgcaagttccgtcagaaacagtacctctccattgcagagcgtgcagagttctccagctctctgaacctcacagagacccaggtcaaaatctggttccagaaccgaagggccaaggcgaaaagactgcaggaggcagaactggaaaagctgaaaatggctgcaaaacctatgctgccctccagcttcagtctccctttccccatcagctcgcccctgcaggcagcgtccatatatggagcatcctacccgttccatagacctgtgcttcccatcccgcctgtgggactctatgccacgccagtgggatatggcatgtaccacctgtcctaaggaagaccagatcaatagactccatgatggatgcttgtttcaaagggtttcctctccctctccacgaaggcagtaccagccagtactcctgctctgctaaccctgcgtgcaccaccctaagcggctaggctgacagggccacacgacatagctgaaatttgttctgtaggcggaggcaccaagccctgttttcttggtgtaatcttccagatgcccccttttcctttcacaaagattggctctgatggtttttatgtataaatatatatatataataaaatataatacatttttatacagc

SEQ ID NO: 259 - DNA, 883 bp, Homo sapiens
cgcagcaaaaaagtttgagtcgccgctgccgggttgccagcggagtcgcgcgtcgggagctacgtagggcagagaagtcatggcttctccgtccaaaggcaatgacttgttttcgcccgacgaggagggcccagcagtggtggccggaccaggcccggggcctgggggcgccgagggggccgcggaggagcgccgcgtcaaggtctccagcctgcccttcagcgtggaggcgctcatgtccgacaagaagccgcccaaggaggcgtccccgctgccggccgaaagcgcctcggccggggccaccctgcggccactgctgctgtcggggcacggcgctcgggaagcgcacagccccgggccgctggtgaagcccttcgagaccgcctcggtcaagtcggaaaattcagaagatggagcggcgtggatgcaggaacccggccgatattcgccgccgccaagacatacgagccctaccacctgcaccctgaggaaacacaagaccaatcggaagccgcgcacgccctttaccacatcccagctcctcgccctggagcgcaagttccgtcagaaacagtacctctccattgcagagcgtgcagagttctccagctctctgaacctcacagagacccaggtcaaaatctggttccagaacagaaggtaaagccatgttttgacttggtgaaaatggggttgtcaaacagcccattaagctccctggtatttcaccttcctgtccatctctcccctccctccggtatacctttatccctttgaaagggtgcttgtacaatttgatatattttattgaagagttatctcttattctgaattaaattaagcatttgttttattgcagtaaagtttgtccaaactcacaatt

SEQ ID NO: 260 - DNA, 2442 bp, Homo sapiens
cgcagcaaaaaagtttgagtcgccgctgccgggttgccagcggagtcgcgcgtcgggagctacgtagggcagagaagtcatggcttctccgtccaaaggcaatgacttgttttcgcccgacgaggagggcccagcagtggtggccggaccaggcccggggcctgggggcgccgagggggccgcggaggagcgccgcgtcaaggtctccagcctgcccttcagcgtggaggcgctcatgtccgacaagaagccgcccaaggaggcgtccccgctgccggccgaaagcgcctcggccggggccaccctgcggccactgctgctgtcggggcacggcgctcgggaagcgcacagccccgggccgctggtgaagcccttcgagaccgcctcggtcaagtcggaaaattcagaagatggagcggcgtggatgcaggaacccggccgatattcgccgccgccaagacatacgagccctaccacctgcaccctgaggaaacacaagaccaatcggaagccgcgcacgccctttaccacatcccagctcctcgccctggagcgcaagttccgtcagaaacagtacctctccattgcagagcgtgcagagttctccagctctctgaacctcacagagacccaggtcaaaatctggttccagaaccgaagggccaaggcgaaaagactgcaggaggcagaactggaaaagctgaaaatggctgcaaaacctatgctgccctccagcttcagtctccctttccccatcagctcgcccctgcaggcagcgtccatatatggagcatcctacccgttccatagacctgtgcttcccatcccgcctgtgggactctatgccacgccagtgggatatggcatgtaccacctgtcctaaggaagaccagatcaatagactccatgatggatgcttgtttcaaagggtttcctctccctctccacgaaggcagtaccagccagtactcctgctctgctaaccctgcgtgcaccaccctaagcggctaggctgacagggccacacgacatagctgaaatttgttctgtaggcggaggcaccaagccctgttttcttggtgtaatcttccagatgcccccttttcctttcacaaagattggctctgatggtttttatgtataaatatatatatataataaaatataatacatttttatacagcagacgtaaaaattcaaattattttaaaaggcaaaatttatatacatatgtgctttttttctatatctcaccttcccaaaagacactgtgtaagtccatttgttgtattttcttaaagagggagacaaattatttgcaaaatgtgctaaagtcaatgatttttacgggattattgacttctgcttatggaaaacaaagaaacagacacagtgcacacagaaaatattagatatggagagattattcaaagtgaaggggacacatcatatttctgcattttacttgcattaaaagaaacctctttatatactacagttgttcctatctctcccccgccccccaccgccccaccacacacatatttttaaagtttttccttttttaagaatatttttgtaagaccaatacctgggatgagaagaatcctgagactgcctggaggtgaggtagaaaattagaaatacttcctaattcttctcaaggctgttggtaactttatttcagataattggagagtaaaatgttaaaacctgttgagaggaattgatggtttctgagaaatactaggtacattcatcctcacagattgcaaaggtgatttgggtgggggtttagtaattttctgcttaaaaaatgagtatcttgtaaccattacctatatgctaaatattcttgaacaattagtagatccagaaagaaaaaaaaaatatgctttctctgtgtgtgtacctgttgtatgtcctaaacttattagaaaattttatatacttttttacatgttggggggcagaaggtaaagccatgttttgacttggtgaaaatggggttgtcaaacagcccattaagctccctggtatttcaccttcctgtccatctctcccctccctccggtatacctttatccctttgaaagggtgcttgtacaatttgatatattttattgaagagttatctcttattctgaattaaattaagcatttgttttattgcagtaaagtttgtccaaactcacaattattttaagaggtgttctctgttcttagctgggcttagctcgaaagtgctacccacatgagggggaagctggtcttttttaatattttaatgtaagtcaaccaagagttgtggccagattcagccatgttggggtgattggtggtggtggggagtgaactgaaactactgaaatactttgaaatgtttcctctggcagcttgttacttatggaaaagaggtggaattgctgcgaggagtttttc

SEQ ID NO: 261 - DNA, 466 bp, Homo sapiens
  misc_feature (439)..(439): n is a, c, g, or t
tctaatcctcccgcagcctagagacaggcaggcgggcgaggcagccgggcgccgacgtcctctgctgaaggagtggagaagaccgaccgacccgagtggttgatttatgcatgcgttttcgttaactaggactgaaagtggctcctggctcttctgggaaaatggagaacgtggttgttatcaatggataccaatgacttcctgaaatgctcaacttgtacaaacaaaaaatgaaaaactttctccccttaatgtagaaacacatggcattttaaaagtaggtttttcattattgtaaagatgttttaatttttaggattatgtttttgtgaaagattcgagggaaaaagagcgatgttgagttttgggccggcggaccattatgggatttttactatagggctaggaacatttagtacttacttctaagggatgtttnccaatttagtaaaatgtataaagattg

SEQ ID NO: 262 - DNA, 213 bp, Homo sapiens
agtcctctgacttccccctgaacatggatttcacaaagtacacccctttatagccatagtgcctggattcaacccagctctgtcacctcccagctctgtgactgttcaagttacgtatactgtgtttcagtgtctacctagagttgtggggattaagtgagttagtacctgtcaagctcttatagctgtctggcatatagtaagtggtatttg

SEQ ID NO: 263 - DNA, 435 bp, Homo sapiens
actttttaatttttttctttatatagggcttagctctttaaagtatgttttatcttcttttttttgagacagagtcttcctctgtcgcccaggctagagtgcagtggcatgatgttgtctcactgcagcctccgcctcctgggttcaagtgattctccagcctcagcctcctgagtagctgggactacaggtgtgtgccactgtgtctgtctaatttgtgtttttagtagagacgcagtgtcaccatgttggccaggctggtctcgaactcctgacctcaggtgatctgcctgtctcagctttccaaagtgctgagattacagacatgagccaccacgtctggcctgttctatcatttgtagagccaaatctatttatgttagtgctaggttaatgataggaattgttatctaacttaagaggaaactgtttttt

SEQ ID NO: 264 - DNA, 260 bp, Homo sapiens
tcactgttaactctcagctaatcttgtctccatcctgccaccctccactccagattattttgaagcaaattctagacatcacttccttttattaaagcaagttgcgtttcatagtgacaatagaaaccatttactcttggcacaggtgctaaggtctgaatacaactttaaggagacagtgtctgcattgaagagcttatgttttaagaaaggagtttatgttttcactggatatactcggcgttcagggaatcagagac

SEQ ID NO: 265 - DNA, 474 bp, Homo sapiens
taaaccaataataaataatttccctaccaatcccatatgtacacttaaaaaatatttgccctctcatggaactattttaatattgttcagccaatctcttcctgagcttcactcacctataataattaatgccctttctatatagagtcaacctcaaccaaaaccagaaacagttttcaccagagcctaaaatctgcaccatcagcaagtggaggggaccaggggtccatatgcttcctgtttcacccccatcatttgcctgttgaatcattgctttcctctcaccctagttgtatggagcgaatctatgtatacatccagacatctgctttggttttctctaattatttcaaagccatctggatatagagcttttccctacacccaagcccacttggctggggccctgacatcctgcctagctttgacaggcttgtctatggaggtagagctctgttacctggacccttccac

SEQ ID NO: 266 - DNA, 390 bp, Homo sapiens
acctatattttctgtttatcctacatcaagaatgaaaccaaatctactgactcttggcttttatggctatatttattttaggcttaagcatttttttttacattacatgttttctatttcaaaattcgttgacaactgcattcagttttacaacaattcatagctttagctccataataatttttttttttttttgagatggagtgttgctctgtcacccaggctgcagtgcagtggcacgatcttggctcactgcaacctccacctcctgggttcaagtgattcttctgcctcagcctctctagtagctggaactgcaggtgcacatcaccatccctggctattttttgtatttttagtagagacagggtttcaccatattggccaggc

SEQ ID NO: 267 - DNA, 896 bp, Homo sapiens
tggaggcccagccgggtgagtggttctctgcctcagtggctattcatacccatcctgaagaagaccaggtctcccagttgacgggagttactgactcacagtctagatgaggatttgtattgggcagagctgactcggtaattccctcacccactctcctctcaactccttcccactgtccttgcattactcctgatcttttgaagtaccagaatcaaatatctgaaaactgcctaaggggctaatctcccaggaatttgttgttgactgctgattataggaagaactttgaggagcctgccagcaattgcatgcaggcagcactgcaggttgaaatcttatattctttttattgaacacagacccagaacacgggcagcttctgcaggattgctgcagagcacaagtgtttcccatctgggctcctggtatattcgctgcccttccaagactctgggatctgaaaggaagatgctgtggcttttcataaacaagcagcaaagggttgcattcctcctgatattgaaggatatttaggagggtatgtgatgtggtatgagataggagccccgagtccttttgcagcattgcaaacaggttgtttgtgtgcctttgttgatgcgctgctggcgagccctgacaactgagaattactctgcagaacgaaagagcaaacttgagctctcagagcttaagcttggactttttttttaatggacagagttatttttttataaaaatataaaatgtttttatattgtgtttatttttatttttgtcaaattattgtagcaagattgagtattttgcaaaaggaaaaaaaatcacctaatctcatgatgctaaccatacgaccattttttttttgagcctgggcaacagagtgagatactatc

SEQ ID NO: 268 - DNA, 513 bp, Homo sapiens
atcaaattttatagggaggggttctgtttctcatggtatattacgctcagacaatgcatattagggcagagagagaaaatgagacagcccaaaatcatgaatatccaaagcagcccaactctatctcttcaaggctatgttgaaccaaaacccccttgtgagctgttctgagttgcagatctgtttgcacatgagcttggagcatactgggtaaacaggagtggttggtaaattctatttcacttcaccagtgagctgaaaaagcattgggtaatatgttatgagttgtagatctgtttgattgcattgttgcaaagtgggaattgttttgcaacatagattcttaatcacggaggcatctatgattgaatgcgtcgaaaattggctgaaattgaaagttaactatactgcagacggcttattctggtgtataattgaaaataaattctaataactcttcttgaaagagctgctcagaggaaatttcaagccccctggaaaaaaaaaaaaagt

SEQ ID NO: 269 - DNA, 297 bp, Homo sapiens
gcttacataagtaacaggtgtgatcaataatcgtagcttttaatgattatgtatgtgatcactgtgcctacaatcatgtttatcaacgtctttgtaacaccctagcatgacttcaatattctcatttatcttttatttttaaatttgtgatacagcaatttttatgtatgtgtgtccctctttttatgatctttatttgcttcttgaaagcagtaggttatctgtcatgtaaattttcccagttctggatttggttgcatagcatcaattaaatatgttcacccaagtcccatgttt

SEQ ID NO: 270 - DNA, 261 bp, Homo sapiens
gcctgggacgccatcctcctgggtcttctccaatgagcccagtcacctcatctgagaagccctccctgactgccctgcctaagggaactcccctagtccctagctcttaccactctccaaaatcacctccctcgtatatttattcactctcttttctctctgcactggtaagctccgtgagggcagagtccatctgtcttgtcagggcatacagcagacacacgcatgcccaatggatgggtagctgctggtggcactcca

SEQ ID NO: 271 - DNA, 180 bp, Homo sapiens
aaagatgtagtaagaactaaagctactctctgggctattttacaagcaagtattttttattcatgggctggttgtcacaaaactttctagtaaatcaagtatcttctttcaagaccctgattttttacctaaaaaaatccttctgctttatttgaaccaaccattcccagggagcttgct

SEQ ID NO: 272 - DNA, 425 bp, Homo sapiens
caaaccaaatctaattgcaaattgaaatatgttctgtggaagaaataaatggggacacttgttaggatagtcaaggaagggttatcttcctgagaaaacatttacactgagacctgaaagctgaaaaagaagtgggctaagctcctctacttttggagcggttcctttccatgtctcaggtgaataatccagcagtgggccaacgagtatacatcgagcaactgtctactactatgtgtgtgcctcgtgtatgctggacgtcagaagtacagtgaaagatgcaaccacgcaagtatacggtaggtttctgccgttctctgttctctggagtgcctccggagagcttctccgtctcaggcccctttgaccccatccagagctctcccttctaggactccacactatccgttcccccgcctcgcccc

SEQ ID NO: 273 - DNA, 325 bp, Homo sapiens
ttggtcaatatttcacctatttttgaagttttactatttgcaaatacattgttttctttgtataaaatacatctaatgtctatacactagtaatattacttgttctcagcttcaggaaacactttacagctgtaagttgaacaaacactacgttgttaaacatgccattgttgtggtgttaaatacatcaatagaaaggagaagatggatctgttgcatctgctgccactgctctataaatttatttttatttcaaaagttcttaccaacaatttatttaaaataaacaattcctgagatttacattgcactatcccagtttcag

SEQ ID NO: 274 - DNA, 387 bp, Homo sapiens
aactaaatgttttactgcagcttttcaaactgactatatttaactgattatatttaaaactgattaactgattatatttaaagctcccttggggaatgggagctgtgaggaaagaagctttggagaagacctttgttggcatgaatgaaaaattgctcagacctcccaagggaaagagcttgtttatataccagccatcaacattcccaagtatatatacatacacaatacgactccagttttaaatttcatctcctgctcttgaagggtcctgaaagggttaaactgttccaagcaaaggcctgcactttttctatcaaaatgctccagatggaaattacaaaatttcgcttccagctctgtggtgcacacacactgttctcctaa

SEQ ID NO: 275 - DNA, 457 bp, Homo sapiens
gatgtatgcaaaatcaacttggattttaaaaaggatcactgtgtctaaaatatgcagaagaaaagggcctatagggaaaataggatggaagcaggaagaccagttaggaggcttttgcagttgtccaggcaagagatgatgatgggcaggcacggtggctcacgcctgtaaatcccaacactttgggaggctgaggtgggtggattgcttgagcccaggagttcaagaccagcctggacaacatggcaagacccctgtctctacaaaacattaaaaaattagccaggtgtgatggcaatatagtgaaaccccgtctctactaaatatacaaaaattagccgggcatactggtgtgcccctttagtcacagctgcttgcaaggctgaggtgggaggatcacttgagcatgggaggctgaggctgcagtgagccatgattgcgccactgcactccggcc

SEQ ID NO: 276 - DNA, 243 bp, Homo sapiens
atttttgtcatttttagtttatgtggcaagtgacaggcacggacatgccatcattgttatagaaaaagctgtgaaagccatcaagtctggccgggcactgtggctcacgcctgtgatcccagcactttgggaggccgaggcgggcggatcacgaggtcaggagatcgagaccaccctggctaacaccgtgaaacccgtctctagtaaaaatacaaaaaaaaattagccggacgtggcggtggg

SEQ ID NO: 277 - DNA, 465 bp, Homo sapiens
tgctttctattaatgacaaatgatacgttaaaaaatatataagcaagcactaatagtttaaaaaacaatgctaagtatataataaaacgtggttcattcattcttgcgttcaacaaatattcgtccaataaatatatgtagagcatctcctatgggccaggatcttgccaaaggcacatctgcgaaccaaggaaacccctgccctcggggagcttgcattctaggcgtgggagtcgtgatggtggtcggagaaggactggatttggggatttgcttcttgcgggggacacaggcctgcccgtggggcccgcctcccgcgcggagagcgctgaggggtccggagtgacctgtaggctgagaccctggctgtccccttgcctagaggccgggcaggaggcgcggagcccgaggtcgcggggctgagggcgcggggcgggcccggcggggctcggctgcggcccgggc

SEQ ID NO: 278 - DNA, 268 bp, Homo sapiens
gatactagaggccaggaaggggaaaggaaaggaagagataagtagagatttgttaaagaatacaaaattacatctagatgggagaaataagttctagtattctgtatcactgtaggataaccacagttaacaacattatattgtatagtttcaaatgactagaagataccaaatgttcccaacacagacatgttgtttgagacgatggatttgctaattacctaggtctgatcattttatatatatattgaaacattactgagcaccc

SEQ ID NO: 279 - DNA, 434 bp, Homo sapiens
cagtcatggtagaaagggaagcagccagtcttacatggcggcaggagagagagaaaaactaccattaataaaaccatcagatctcgtgagaattcattcactatcatgagaacagcatgggggaagctgcccccagcatccaaccacttccctccctagacgcgtggggattacaattccagatgagatttgggtagggacacagagccagcccatatcaagcagggaaagctgagccctgggagaggtgagccgcagtggctggggagaaatggcttccctgtccaggcctggagacctggcatcagcagacagtgcccaggcctgccaattccatggactctgcagtgagcaacagctcagcagcacagccgcccgcaggccaggcccagagctccttggcgaagcaccctcctagaacgggaggaccacag

SEQ ID NO: 280 - DNA, 345 bp, Homo sapiens
aatatagtgatttttgtctgttcttttactgctatattttccagattttctatatacacacaaatacttttataatgagaaaaactcattaaaaaagtagagacaacaaaaaattgattcaaaaattggagcatattttggcctgtgtgtggcccaggcaggagctggtaaagcttcctgcggcttctctgctcttgggtggcgaggctatgataaaccatccctccgcttgcctccctctcgcttggtgagataggtcaaaattttaattctcccactattaatcctcaaatctaatttaatttcttatcagggagggttacgactgatttaaagttcatcaga

SEQ ID NO: 281 - DNA, 248 bp, Homo sapiens
caaagtgtttcaggagtgtgcatggggacactgctcagccctcaagagccttggcctcgagtcaagtcgtgtttgctgggccaccgctctgggagctgctgcttggtccaggccgtccggggggcaggggggagcagtaagtgcagctcaggctcctggttcagaggggttaggctgggtgaggggcaggcagatgacagaaccacgaggttcactagaggcaggatgtgttcccagctgtccttaac

SEQ ID NO: 282 - DNA, 282 bp, Homo sapiens
ctggtaaggaattaaataccactgttctcaacagtatttccatattagaatcatccaaggagtttgtttgtttttaatgatgttgcttgggccctaccccagatctgaattacaacccctgggaagtaggacctagtatcagtatttaaaaaatacttccctgccgggcatggtggctcacgcctgtattcccagcactttgggaggccgaggcgggcggatcacaaggtcaggagttccagaccagcctggccaacatggtgaaaccccatctctactaaa

SEQ ID NO: 283 - DNA, 352 bp, Homo sapiens
ctgtttcccaaattcatttgacctagaatccgtctttcctaggattcctcacagagtagaatgtgaggaacactaattaaaaggtgagaaaatggaagacccgggaagtgagcaggcttgcccaagcctccctccctgttaggggaggaggaagtcttcagacaggtgaaggtgtcttcactgattcctagacgggtgtccgtgcctctgcatcccctctgctgatgctgagagctggagatggtgcatcccgccagtggttgtataaggtctgaatgctagaatctttagggtttggtttggtttggtttggttcggttcggttcagttcggtttggagacagggtctcgg

SEQ ID NO: 284 - DNA, 389 bp, Homo sapiens
atggcatttttgtctcccttccttcccactccagatgacaagaatcccttcttttagatgattttctctaatggatgttttagaagattttttaaatagctgaccaaagtaaaatatatacaacttatttggggaccatccaagtggtttttcataacagaccgaattattagtgacacagatgtgatcccttaaattggcattaaaggaaaacctggaggagggagctgaaagaagtgagttgtatattaaaaacctgggttcagaagggcacagtggctcacgcctgtaatcccaacactttgggaggccaaggcaggcacatcacgaggtgaggagttcaagaccagcctggccaatatggtgaaaccccatttctactaaaaata

SEQ ID NO: 285 - DNA, 544 bp, Homo sapiens
aaacatatagttattatgttaaaatattcatgacacgtattaaagatggtaaggcagactttattcaggggtactgctgcaatgaagttttgtaatgggggtaagagattgagcttaataacagggtatgctgaatacaaggataagtggaaatttatagctaagaagcaaagtgggagtcagtgggtggaaaattgccaagaggaaacatcggagtaatgggaattgtggataaattgattaggcaggattattactgaaggcagccagggtgataagatattgacagtgaggcagggcagtggggcaggaatttgatcacacatatcaatggtgggagaatttctgtaaactgactcaacaggattcttgtgaaaactggaccaagcggagatgaacatggaaatcggaaagtcagggccttcttgtgaagagagttcaggagagtctgactagagttaggtaaggagagaatctgtcaactgaaagtccctttacaccttcatagtagagcaaatgtttttctggttatgtaacagtggat

SEQ ID NO: 286 - DNA, 380 bp, Homo sapiens
ttggcctcccaaagtgctgggattacaggcgtgagccaccgtgcctggccacacccagctaattcttatatttttagtagagacagggtttcaccgtgtcgaattcctgacctcaggtgagtgctgggattacaggcatgagccaccacgcccagacaaattctactatttctaaagtagcacttctctccctcttccaactaaacccagggttatatcccagtaagcagtgctctcaaggctgtttcagaaaaccccacccttcccttgagatccaggccagactcctcaagatggctgagaaaacaatctgcaatgagtgtgaagggctcagagaactgctgacaaagctctgtggagctctgttccaacccagtgct

SEQ ID NO: 287 - DNA, 471 bp, Homo sapiens
tgcaccatgtgtattgaaacacacctcagacatagtgtttagtttccctcgagcaaataaacatctaggcaaggaaaaaaaaaaactttaatagcatttactttttgtttcccctttgatgctggtttatttttgaatatagctgttgaaaataaagcaacaataaaaccaacgttgaatggattattaccctaatcttatttcttctctgtttttgagaagaggcataccagtgcacacctgtgtgtgtgttcacacgcatgcatgtgtgtgtgtaatgagagggaaataagaatggcctaagtggagggctaagaagtatgcacagaatgtgaatcccttttaaaattatctaccctgcttttgaatttaggcttcaatttaccatcttggctcaatacaggcaaaattttagtgcctcctttttaccactgggaaagtcaaatcaaagttccaataacagaaaaaaaa

SEQ ID NO: 288 - DNA, 450 bp, Homo sapiens
gggcggcgcttccctctcgccgcctaaggtcggaggcgcacgtgcccggggccgctaccacgtgagcgcagcgcctgagggcgcccagcactggccgcggctcgtgtccgggcttcgggagctcctggttccttgctctattgggctgtggctgaggtgatccgcgctcagtgtggacgcacaagtaacttcgtaaaggttgcatggtggttggggctaacctagcagagcggtttgtaagcggaaggcacgttaggttccatcccaagaggtgtgggctttagcgaagcgcagaggaagggagtggacaaagtcaaatatatctagggttctgcagattccgtgcggggttgctctgtgactagcttttcttcccttccataactagataagcattattcaccctctcttgggcctggaggaaggagaggtgtacacaatgaagaaaaa

SEQ ID NO: 289 - DNA, 387 bp, Homo sapiens
cttctgacccatacctcctgggtcctgaccatgactttcttgaaagtgtagtcccaaaattctccttacctctgaatctacttcctctgatccctgcctcctaggtactaatggttcagactttcctttcctctagcaagttgtaactccaaagggatctaaggaagctctacactgtgtccttaggcatctaggctataaacccagggagtcttatccctggtgtccctcccaatttaggtatacagctctcaacatgggctgtatacctgccccaagtttgtaatggctaagagagagagacagagaggagagagagagacagagaagagagacagagagaaaaagagggagtcaaagagagagaaatatagaaatagtaaaaaa

SEQ ID NO: 290 - DNA, 385 bp, Homo sapiens
  misc_feature (383)..(383): n is a, c, g, or t
cacttatacgtggaagctaaaaaaaagttgattcatagaagtaaaaagtagaacagataatactagaggctgggaagggtagggggaaggggatagagaaaggtttgtttaacaacacaaaattatagctagataggaggaagaaactcctagtgttctatatctgtagaatgactgtagttaacactaatatgtagtttcaaatagctagaaggaggatattgaatgttcctaaccgtatcaccccatctctacaaaaaataaaaaaattagccaggtgtggtggtgtgcacctgtagtcccagccacttggggaggactgaagcggatcacgtgagcccagggatgctgcagtgagctataattacatcactgtactctancc

SEQ ID NO: 291 - DNA, 851 bp, Homo sapiens
caggctggaatccttgagggtggcattatcaaatgaggaaatggttcctttcatttttcatctgaagactcagacagcaaacatgttatctggccctataagcaccccgatgcttctgtgaaacccaagcaagttctgcatcaccacgacagccgcggatgtcaaatcatcaaaacagcagcagaggaaggggtttattcctcctccaaatcttcagctggttttatagggttaccagtttaaagtttctttgttttcagagcatcagacctcccatttgtagctgatagccatttttcaaaggtttctggctcacccaggaattcattagggtggacgagaaaagaacagtggatagaatagaccagcagggcaatctaagccccattccctgtctctttacattggttcttggtccccgtgactcatccaaactcccttatattcctatctggaatgcgaaagctggaaatacaagtgctctgtaatcacaggcagtggttttcttggagtctggtgtgatttctgtagcttgcagcaatatgtgggacacacttgcactgaagaatttaatgacttgttttactgctgtctgccatcaatatttatctatattaactgaagaaaggcattactcgaaatggcatttcacacctctgagcattatacagtaattctaaagtcatacgttgtaccaaattctctgggcaaacacagagatacagtatgaatggaaagaatccaagttgaagtttttaaaacttgaattgtctgcagtaatctggaaaaccaaagtcaaaatgactcgaattgctatggctgggaatgactggattaaaagcaatggaaac

SEQ ID NO: 292 - DNA, 341 bp, Homo sapiens
ggcacaaaagaaagatctgtttcactttttgaaaactgaaaaatttctgtccttgcctttgcatgtcctagttgggtgttatactgaaagtgaagatcataaattcaccaaaacatgtatgcctttgtgtatgagcattaaaaaagttcttcaagttttccctagcctaagcatttaaacatgtcagcaaaaatacaaataaaaagaaatagctaactgggtgtggtgggtcccacctgtaatcccagcactttgggaggctgaggtgggaggattgcttgagcccaggagttcaagaccagcctggcaacgtgggcaacatagtgagacttcgtctcttc

SEQ ID NO: 293 - DNA, 481 bp, Homo sapiens
tcaatgttcatattgatgcaaccgaattgagatggagcagatgacattgttccttaaaccgctttgcctacaggatccagtaattccttaagaagacataatgcacttggtggtgtggcctctgcctgccctgctagacagatctcttgctactccaatttttaagctctaacttgcttccaggccttccattatgcttttgcatctgctgtggaatatcctaaactggaccaacttagaataggtcttcagacatttgttgaaattgagaaagagaagctttttttctttctctctttctcttttttttttttttttttgagagggagtggagttattaaaaactcctggagctgctagtgagtatcttctcactgttgagaggatggccttctcaagaatgaagccagtacccgccaggcgctgtggttcacgcctgtaatctcagccctttgggaggccgaggcaggcggatcacgag

SEQ ID NO: 294 - DNA, 585 bp, Homo sapiens
ctcctgtctccctgtcccctccgtgaattctggggtttcccagacttctgtccttggtgacaactctaactccatgtcccccccagatttcagaccaaccctcccccaagctactgacccatgtagccagttggtttctagcaatgtgggcatggacatcccactgacaccttgaattaacacaaaggaacagagtggtccccttctggctggcaggccctgtagcccctactctgggaagctggaaacttcgatcccctgtagccactccccacccccatcccgtctgctggcctccggctcctctccaccccgtcttcttccagagatggaatgtgggagacaattcctaggacaatgaaaggatcaagacactaactttactaacatcaatttcagaaagagaatgaggcaaagaaaatatccaataaatgatatgagaatattttcaagaactggctcaggaaatgagaagcagtcggagacacagcagatgactctgcagagacccagaagaatgaagccaagcccctgaacaggtggggagggggtgccaacgagaagcgcgtccggagacggcaggag

SEQ ID NO: 295 - DNA, 403 bp, Homo sapiens
aaaaagagtagcaggtgtagtatgcttagagctgggtttatgtaagcaagtgatagcagatgcttataaaaattggaaatgattatggagaactttaatattcagctgaaggaatcagagaatgatataattgttcatgtggatgggcctttaggaacaattttacaatgaacaattttacagaaatggaaacaagcttgtacttaatcttgtagccagtagagcatcatttgaagatttttgagttaggccgtttgaaattgggaaatatgtatttggtcttcaactccatattcggacatacaactcctataattcttagaaactccaaagtgacgtctgtttgagtgctaatgggatgactgttggctggcagcccctaggtaacttcaagatggggctg

SEQ ID NO: 296 - DNA, 412 bp, Homo sapiens
ttatctctagaaattgtattcttaggtagctgaattgtcatatttcctatttaaattttaatcacttaggagtctttaggaccttaaaattgggtgtgatgttgacactattgggttgacataatgaatgttaatgaattataaaaatactgtattttattgattctataatcaagacacatcctgtagtcagtggcatcttaggttgaatgaactgcagtagtctctctttttttttttaaatcaaaaggccaaattaattgtgaaaaatgttaacttaaaatttctcagaacttttggcttcttaattgccactggaaaaagaagtatcagtatcatcgccagctgtgcaaggcttgcatgtttgtttgtttgtttgttttttaatgggacagtgtctctctgtcactca

SEQ ID NO: 297 - DNA, 442 bp, Homo sapiens
ttccttcctcaaaatctcacctcccaaattgcatcccttcaggaaatgtaggtttcagcgaggcttggatttaggcagttctgggttcatattcctttctgctgcatatcgtatctgctgtgtgttgggcagtgtagggacactttctaggactcagttgtaacatgggattatgtctcttctgcatagggctgttttaagactgtgaaaacacagtgttgtatgtaacacgctagcacaggaccatggagttgagctcagcagttggtagctattatttcaataagctgattcaaatcactctgctaaagatatgaatgactaaaggatatagtcatgcctgtcatttcagcattttgggaggccaaggcaggagaatcatttgaggccagtcattagagactagcctgggtaacatagggagacccctatcaaaagacga

SEQ ID NO: 298 - DNA, 466 bp, Homo sapiens
gtgcagccgttccttctagctcgcgaggaaggcgcgggtcctgccttttgggtggcagagccgggggcattttcgcaagtcctgaacttttcagagagactgaagtcagggagggccgggccccggccccggtcccggccccagccagagtctttcgggatagggtccagggagctgaactcaggagatgatgcaggaggagccagcagcctcttctgccctgggagggagaacgcggtccgggtccgagctgagccagaagtttggcctgaggctgggacctcagcagttagaatgtggtatcttatccgagataaagccggagtttgcgtctctgtgggcccttcttggggacactctggggtatgggaagagcagaccgtgggggagagcactgggcaagccgtacctgtaatgtccgtggaggcgacgcgcctgcaagaaccagagcaaggagacactggtg

SEQ ID NO: 299 - DNA, 406 bp, Homo sapiens
aaactctatctcagaaacaaaaacaaaacaaaacaaaaaacatgggagatctcaccactcctcttctgtggttagaacaaaggaggaacacacgcagaaggagggatagggccttacaactctccctgccagcctggcctcatgcatgttcattaaaccccccagcaactgcagggtgcacattcttttcaaatgaatatggaatattcctcaagatagaccatatgctggcccatcagacaggtcttgataaattcaaagggattgaaataatactggatatgttctcagtgaaatttaagtggaaatcaacaacaaaagatagctagaaaattctcaattatttggaaattaaacagtacacttctaaataaaccctgggtcaaagaaattaaaaagaaaatga

SEQ ID NO: 300 - DNA, 393 bp, Homo sapiens
acacttaaaaaggcagaaagacactggcctttgagatttcaaatcttaaaaatccctccttggaaccactgggaaggtgagtaggcccttaagctattctgtaatttaaaaaagcaagaatattgattttctaaaatcgatacctgccaagaagattttggctactgtatttcttcctatgtacatctatactgatagctgcactgataaaatgctaggaaacccaaggtggttaaaaatccaatttctggcctctccttattgaggcacaggctgcataacaagccaaccgtccttgaagaatttgcaaaatgaaccccaaccagggcaagatatcatctggggtctgaacacaatgtggggtatgaatccccagctgaacggctcccctgg

SEQ ID NO: 301 - DNA, 362 bp, Homo sapiens
tacttgcaccgtgctacaaaaaggggctccgtaaatatttgttgagtcaacctgtgttatttcacctcagtttacccttttatttgatacagatgatgatccctactccgtctacctcacagaggtgttaagaggatcaaatgtgacaagaatataagtacactttatgactcggaaagcattcttcaaaggtaatgttcttagtccaactagcacagcccaagcacccaagatgctggcactgttgcaaagccctagattccagagctgttttgggcatcacctgtagtccactctcctgtctgtctagaatgctgggcaaaaaagaagaaacaaccaaccaccaaaaacttacatcatcc

SEQ ID NO: 302 - DNA, 370 bp, Homo sapiens
attacacactgcagttagggaggaaccaagaaccagttgacaattctgtttgtttatttcaatatgaactaaaatttggagcacatttttaaagtatgtagttttagctaaaaagagaagtgaaactttttctggctcatatcaaagattagcttctacagcgtctttttttttttttaactgtgcaaaaatacacatacaatttgcccttttaaccattttttgtttgttttttgtttttgagatggagtcttgctctgttaaccaggctggagtgcaaagcgcgaccacagctcactgcaacttccgcctcccgggttcaagcaattctcctgcctcagtctcctgagtagctgggactacagccatg

SEQ ID NO: 303 - DNA, 312 bp, Homo sapiens
tttaaagggaaaataatacactgacaacttatctaaggaaattctattcacattacagaaagaactagcagcagcaacattcacagtgattcaagcacaaagcggttcaatctttcatatggaaattctgtttggaggcgaaaccgtgtcatgctctattttgggtaagtagctctcaaaactcaagggggaattacaattatatatctactccatactaccttattatctactccttatttcctaagcacccccaaccctagtccaaatcagttggatttaaaaggctattttataaagaattataaacca

SEQ ID NO: 304 - DNA, 393 bp, Homo sapiens
acacgggaagataccgagactcagggagagaaaaaaatgagaaaccagagtcattgggtaacagacatgggaaagacatagggaaatgggaagacacagtctcatggggagattgagacacaaaggaggtaaaaagatttaaaaaaaaaaaaaaaaaaaagaatggaaacagaattgccaggttgccaaggctttgtggaagacttggagacccaagctatgggagagatagagacttggggagaggctttaaaagaggatgctgtggccgggcacggtggctcacgcctgtaatctcagcactttgggaggccgaggcgggtggatcacctaaggtcaggagtttgagaccagcctgaccaacatggtgaaaccctgtctctactaaaaata

SEQ ID NO: 305 - DNA, 375 bp, Homo sapiens
agtagtcctagatttgtgtgatgcattcttattctagcccacatctcgctttgtgttgcctccctgtatatcttataagctgccccaagacttcctctttaccattctcaaacccacattggcttgactccttggctctgagctcttgcttgttctccagcatctgaatcactttcctgcactggtgttggtggcctatccacttaggtatatcacaggcagaaactatcttgtgaagcggcctatttgggcaactccagctggggaaccaggacttctggaactctctttttggctccagctttaaatgatagggagataggacatgcaggacacaccaaaacagcccaatacagagtacactaaaaagatcgt

SEQ ID NO: 306 - DNA, 759 bp, Homo sapiens
tttgttatcttaataaagtgtacttctgattaattatggaaaaatccttttgcttccaccaatgataaaatttgggaaatattatgtcttttacaattatatatttaagtaataagatttaaatttataatttcaattttaaaatatgatagcattagcaatgtccttattgtgtgtcttcctcccttttattcattcatgataggatttagtttactaattttggtgaataattattgaatatcttgtagaaagcagaagtgatctgggggagaaagctgtccagagtgctgcgaacagacataggagaaaggaagcacagaatatgattggataatagtaatagaaatagaaaatactaattttggaaatcagcaagtatttactggaagggtagtatagcatgataagactatgactcaaacagatgtgagattgaatcccaacaatgacaccttggacaaagtgtttaatcaccctgagtctcaatttattaatctctacaattattcttactttattttaagattctttcgagtatttgttgtagaatgcacagcttagttaatggaatttttgaacatacactaagccttgacacagaagtatgagaaagatgtaaatggatgtgctgaaatgtgaaacatagaaacattgtcatgtgaccctacagtactgctattttctaaacaggttttctgtaattagactgtctcactcatgtgtaagggttccatgtatcttctgaactaaaatagt

SEQ ID NO: 307 - DNA, 571 bp, Homo sapiens
cctaactacgaacgctgtgtgattttgccagtgtttactactcttacaacattatttgccactactcttacaagtccttgccagtgtttagtaccattacaacaactactccccctactattgctgctgctattatgaaggaggagagggaaagaatagcatctgacattctttgagtgctggctgtgtgccaagcacagtattcagttatttacatgcattatttcatttaatcatcacagtctccctgtgaggtaggtactgttactatgttgccaagtgacagaataggaattgaagccagtcgttcagactccaagtctgaggacttaaccactacactagtatcttccctgaatacttaaggatgaaatatcttagaaaacaaaactgctgctctattagaagtcacataaaactacaaaaattatttaaagcaacaaacttgaggccaggtgcagtggctcacacctgtaatcccagcactttgggaggccaaggtgggagaattgcttgagctcaggagttcaagaccagcctgggcaacatagcaagacctcgtctctagttt

SEQ ID NO: 308 - DNA, 444 bp, Homo sapiens
ctatcacactatgtttacaaatcaatttagaagtatctaagctaaggttgagggaaaggaatgttgctgtggaaaatgattccccagaattgatgttcagccagaatatagctcatatatagaagtatgtctgtactgatcattatatggaaatacatgctagttgaaaaatatctgccctctgagccaccctatcctcagttattcaggccaactctgcctggggagccacaggtgggcacctagagggcactgacctggtaccctctagcctgccaagcctaccagccaacccatcttggttgctgcttgccagtccccatctcaacctttttctctggtcagagcagatcacagcagaatagacaatggcccaactgtggcaatggcaccctcacagggaaatacccagtgcccatctgcacccttcgtcaaccaggctgt

SEQ ID NO: 309 - DNA, 379 bp, Homo sapiens
tacatcacagaaacctcagataccgcctctgtaaatagggttaaagatgccccactccaaaaatggttgcaagctcaacacggctcctttccagacactcgaagggcgcggaccttcgctgagacgccacccacgcaagtggaggaagcacttgcgccactgctgagcggttggaaggggaacactgcaggtacgccccagtcaggcaaggaggcaggaccaaagccctgagctctccggaggctggcggggaatccccagaggctatctgtagtcccggctgacccctgagcgggtgagggggcggggggcgggatgtgggagtgatggggggcgttgagcgctgagaggatgttgtgggcgagccgcaggccctccc

SEQ ID NO: 310 - DNA, 315 bp, Homo sapiens
agctttccagggtggtagttacttatgttcactgtcctttggaagagacagagatttgctttctagcagaaatggaaaagtaaaagtgttacagatgcattgtgggaagcaacgggagggaatcacacaactgaaacggaatgcatttatcccccttctccagtggcccagctgcggctcacctagtgtctccctgtggggggcaggctgctgtcaaaaaagcgaaattgaaagcccagttagactcccactttagccttttttagctggcaagcacgcttgaagcagctaggctgcaaccacaaggggttacca

SEQ ID NO: 311 - DNA, 454 bp, Homo sapiens
ggcatctcagactcggtcattaagctattgttgcaccctccggaaaacatggcagagcatgacctttgagtaagagtgaggatgaccttgcagatgactgtgcccattcgcgctccatcctcatgaaggaaattgctgccaaggtctgtattttgaccaggcacagagggggaacatcactccagctttccatgtggttcactctgatgcgatgctgtaaatgatcaactctttgaaataggaccctcaggcccccatttcctagcagccccccttcagtttggttctacaactcaaccccttcactgcacattgagatggctcaggggttctagcaggggcttccagaaaaaaaaaacaccatttctgtcccgggggaccagttctgagctgtgctagatcatcacacgaccacccagaaacccacttgcacttcctgctggatgatcaggca

SEQ ID NO: 312 - DNA, 772 bp, Homo sapiens
ggtaacaggattcagaagccagaagcacagtaccacacagtgagcaattccccagactcgtctctttgagcttttcactagaaaatccttcttcacctctcctttctcccaattcctttttattaagagtcttttaacctggatgaacataatttgagccgatcataaacaaatagctctcttttttgcctgactttatgcatttctgttgccatgtaaaccaaataaagctagctgtgagcaaaccagctgctgcctgcagcctccttccctagaggaagggaaagggtggtgaaggtaattgggaaggactataagaagggtagaaattgagggaagagagtattctatttacatttctggtcctgattctcactctgtttatttggctatttagaatatgatgactatagttgacttagtcattcttcccagcagctgagagatatgggtgactaataattttttctctatttgtttgcatgttggaaatggttactattgaggggtggaattaatagagtctaagctatatttcagaactggaaaacttggaaaatgaatggttgtagggaatagcatgggatttatgattttttgtttcaaagagttacgctttgggtactggcattaaaaagtagttccaggggccaggcacggtggctcacgcctgtaatcccagcaccttgagaggctgagtccagaggattgcttgaggccaggagttcaacatcagccctggcaacttagcgagatctcatctctacccaaa

SEQ ID NO: 313 - DNA, 258 bp, Homo sapiens
tggtgggccaggatccctgtccacttcctccctgactcagtccacctcctttcaggaggaatccctgacccctggttggcaacgtctcactgcacagcccatgcattccttaatttaacacttcagataactctacttatttctggtggaaagaatatggtcctgccctccaccttaggctgataccaggcaactgcaaaggaagcaatttggacttggattttctattcactggcttaagcacaggacttttactca

SEQ ID NO: 314 - DNA, 448 bp, Homo sapiens
tgaaccaggcgagaaaggatgacgatgttcttcatgttgcacctggacatgccccaggaacagagacttgcccaggtggcaacactggcacagatgttgacggctgcccaactggtgccacactgagcagggagccttgtgctgcacagggctgggccctctctccagtttccttcctgcaggcatccaaataccctggaagggatttaacccctgaattccagagggaagaaagaagaacagtgaagaagtagaactggtttctgtatggggagaggaaagtcttagggacagctgcaggcggggtctcaggctgctccttggcaccagctacacagtagtgagctttcccagctttaccgatgaggaagaagttcaaatagatagacttcagcattttaattattttcctataaatgtatttatgtgtagtatgctagcaccagcc

SEQ ID NO: 315 - DNA, 434 bp, Homo sapiens
gaggagaagggagcctggttacgaaaccgctcattaatgaagaaccaagttaacatggcagcactaggagcacacaggtgcaagagacgtcatggaagcaatgagttcggggaggtggaagaaaagttgtagaatttctggaaagctagagagcctcaggctccaaactattaaggcccttttcgagtttcctcttgttatccatgagttccagactggagttagtaatctgggcttattcatgccaacatgtcccataaagatacaaaaggagatacacacattcacaaatagacatatacacagatataaagatacacagatagactgataccaaggtacatcgactcatagatccaggtacaacgtataattggaaggatacctgtttgttattccagatctcaactgtgcttcgcaaagagcaagaaaat

SEQ ID NO: 316 - DNA, 459 bp, Homo sapiens
cttacatttccatccaaatccaatagaatgtgcaacagagagtacacatttgaaaaatattttcagcctattatgttaaataagaatttcatagttattcctgtctatattaaggttaaactgttacgttttgattagacaaagaaaatattgtttcaagaagatctttcatattctcttttatttattacagcacgagagggaaaattgtgttttgttttttgtttgtttgtttgtttgtttttgagaccgagtctcgctcttgttgcccaggctgaaatgcagtgatgcgatctcggctcactgcacctcctcctcccgggttcaagtgattctcctgcctcaggctcccaagtagctggggttacaagcaccctccaccatgccagttttttttgtttgtttgtttgttttgtatttttagtagagacggggtttcaccatgttggccagtctggt

SEQ ID NO: 317 - DNA, 176 bp, Homo sapiens
taaacaagcttctatgcctcaggctggcgttccacaaactcagccaaatcgtggggttttgtgaatgctgcagtcagcagggcccaagaaggcatatttgctcacacattatgtcgatgttttgttggtttttttttttttttttttggtcctaaggatactccttggactgtggg

SEQ ID NO: 318 - DNA, 389 bp, Homo sapiens
ccaaagtagtcacccagccatccaatctctgtttactcagccttgctgcaagactgtgcagtggctaagagtttagatctatactaataataaagtatcactatggggtatgtctgaaggcataagtagtcagagaggatgaagaggagaaaataaagcattcctctttctagacacatagtgcagaaattcctccaggaatgcaggaacatacagcaattagaatgcattcctgacatgttggtcttggcatgtgtgcagtaaagcatctccaaaagcatatattgtacggaaggcttatctaagacatccacagagtttgttcattcattcatggaacaagtaaatctactgaaagccttctacaggccaggctttgtgttgcatta

SEQ ID NO: 319 - DNA, 467 bp, Homo sapiens
ccccctaggtctgtctctaaaagttgatgatgacattgccaaggcaatcagtgactggaagcgtatgaggattacagtgaaactgaccagaacagacaggcccagattgagggggtaccttctgcctctgctctcatcatcaaagccctcgacaaactgccaaaaggcagaaagaaacagaaaaacattaaacacagcggaaataacacttttgttgttgagatggagtctcactctgtagcccaagctggagtgcagtgcggcaatctcagctcacagcaacctctgcctcccgggctcaagtgattctcgtgcctcagcctccctagtagctgggactacaggtgcgccccactgcgcctggctaatttcttttattttttaaagtatagatggggtttcaccatgttgcccaaggtggtcacgaactcctgagcctgagctcaggcaactgacccacctcggcc

SEQ ID NO: 320 - DNA, 742 bp, Homo sapiens
gcacatgcctgtgatcccagctacttgggaggctgaggcgggagagtcgcttgagcctgggaggcggaggttgcagtgagccgagatcgagccattgactccagcctgggcagcaagagcgaaactccatctcaaaaaaaaaagaaatttttttaatgctattttgctataggaaataaaaaatgagtttgggggatggatgtgaaaggtataggtttgtttaagataactccagcagcagggtggaaaataaatggaatgaattactagtggcaaaaactctcacctcacagtttctgtcaaaaagtcatgaatatctgaatttagacaaagagaagaataagattgaaagaggaaaccttagattttagaggtacatctcgtttggtggtgttaaagtaattgacatgtaaaccataccactttattttgcatttaaaagatttttattgatttgtcactgaggtagatatcacaaaatttttatactctgaacgtgcttcttaggtcatgaaaacattttactaatgaagcttaagtttagctaattataataataaatcatctcaaataaccaagactttaaaaagataggcacttaactattttttttaatttaagagaagttgtgaagtatgtagttcaaagttcataatggtaccttcacaatgtcttcagggacctaggctcctttttctcccttctatctcagcactaattatgcattcctaagattccctca

SEQ ID NO: 321 - DNA, 413 bp, Homo sapiens
ctaagctctttggagaggaaataagacttaatgtactggctagcttatagacacagttaaaataaactactgttcagaaagttttatttttccatttggttgaaacctttcagctctaaaatcttcctgagtttctataggaggaaaatcaagataccgtaacttatgtgtagaggtgtggaagaactgtcaatgtaattcattattgttttcatgtgttatttatgtaataatctgttctatgattatctgaggtggtttttctttctttcatttgtttttctctgttgcagatggctatagatagcctttcagattaaacatttccaaaatagaaactaaaattaatagaaaatagattatttgtgttaatgtaaaatttgtgataacggtaagagtgcaaaaaagagcat

SEQ ID NO: 322 - DNA, 307 bp, Homo sapiens
ttgttttgttttactaagaactttgtgttctggtcctgtccaaggtgcagatggttatgctttcaaaacaccttattgtcataatagcactcatttcaaataatactctactctcagtttcaccatttcaagcactattcatttgattcttgaggagaaggtgatgctcttccactgatcctccaggaagggtctgatcctccaggaaggctccatccacctcgttcctttcccaggttcataaggagggtggcagtgtcaaatgaaccctgtgccaggcactttcacattcagtaaggagagcatg

SEQ ID NO: 323 - DNA, 402 bp, Homo sapiens
gcagtaaagcattcaagaggtaacttgtgtgttcttaaaagtattcagtttcattcgttcacaaatatatggtttgaaattggaagttatgtttaaaagggaagcagagcataaaagtccaaaaaatttgcagcctgataatgcaataaaaaagaaaaactgggccaggcacgaaggctgacacctgtaatcccagcactttgggaggctgaggcaggcagatcacaaggtcaggagtttgagaccagcctggccaatatggtgaaaccccatctctcctaaaaatacaaaaattatctgggcctggtggcaggcacctgcagtcccagctactggggaggctgagggaggagaatagcttgaatccagcctgggcgacagagtgagactctgtctcaaaaa

SEQ ID NO: 324 - DNA, 359 bp, Homo sapiens
ctcaaatccaggtcaaagggttgtcagagcaatagtgggaacagaaaactagctggaggacacccgagtactcttaaagcaatccccgtggtgagtaggaaggggagctcagaagcatcagggtaacaatgggacaggtgtggggtctggttcatttcaccttggatctttttcacactgatgatgaggaggaacgagagtacagtgaagtaatagaagaggttacagagcatgtttatttgccagctaaagctaaagtggcaaaggagggagaggtgcatccctacccttctgcaccccctcattattattttgaagaaaaagaccctccagatctttcttttccagaggacactggg

SEQ ID NO: 325 - DNA, 335 bp, Homo sapiens
gattggctttgatggaactttgttccacaaggaatcttagataggactttctaaagccgatctagacgtggtcatgcctctaatcccagcactttgggagcccaagacaggcagatcacctgaggtcaggagttcaagaccagccagaccaacatggcaaaaccccatctctatggaaaatacaagaattagctgggcgtggtggcaggcacccataatcccggctacttgggaggctgaagcaggagaatcccttgagcctgggaggtggaggttgtgagccaagatcatgccactgcactcggcctgggcgacagagcgaaactctgtctgaa

SEQ ID NO: 326 - DNA, 195 bp, Homo sapiens
aggaaggaaggaaggggggtcgagagggagggagggagggaactgtacagaaagagagttcagaaatcagtggagactcacccttaaaaagagaattcagaaatcagtggagagtcacccttaaaatattgattggcaaacgcaattgagaaaccatccatggctaaagaaagaaccacctggtccctggtgcct

SEQ ID NO: 327 - DNA, 355 bp, Homo sapiens
ctgtcctccacttcctcactctttcttcccacttattttcactccactggtgcagtttggtgtcaactctcctcactctactgaaactgctgcagccgaggttactagttatttaattaacaaaagcaacagattttgtttttttaattgcattatactctactattttgtgacatttaaactattgacaatgtctttcttgaaaatgtgtcctttctgtttttttcaaaacacgactttctccttgatgtcctcctttttctctcattatttcacctttacattctctgctgacacctttcaccttaccaaaccttaattaaatgtgtatgcttcccagtctcccattcttggc

SEQ ID NO: 328 - DNA, 857 bp, Homo sapiens
tgataatggcaccgtgtctgtgactttatcgaataaaggggtgggccactctaattcatactaaaagaattaacttgtactgtgaatttttccatgtttgttggcatcttctttagaggtacaataaaataatttcatagtcataaattttataaaagctggatgtcctctgacatcaacttggggattctgaagtatttatatatggagtcatgtgaaatcagaatttctctgtgggaaggcatctctataattgtgaaagataataaaaaatgtatactttgtatattcttactcaaaaatgttaatatgtagagtttctaaagttaaattatcttctgttcatttttttaagaggtagggtctcactctgttacccaagctggaatgcggtggtgtgatcatagctcttgtagccttgaacgcctgagctcaaaagtttctcccacctcagcctcccaagtacctaggactactggcacatgccacctggctaatttttatttcattttatagagacagagtcttgctatgttgctcaggctgttcatgaactctcggcctcaagtgatcctctcacctcagccccccagggtgctgggattgcaggcatgaaccaccatacccagcccagattgcattcttaacgtaatgtcaaggcactctaatgcattattacattggatagaaacttcttaatgaaaattatgtgtgttgtgagtgtgtctacatgccactatttttctcctaaagcaaatcacagttgcttgcccaaaaaatgtgtgtgtttgtcttttttgtctgagagagattttttgccttttacctcataactaacttgaggtctgactgtaact

SEQ ID NO: 329 - DNA, 608 bp, Homo sapiens
gtccaatggtcgatctactttggaaaagtagtctggcgccgcttatccctagggtagcatgcctctttcatattccctatcaactctattccataccagcactcgattcgatcgggacatcccgatcttgcaccgcccagtcgtggttcgttggtccgatggcgccccgcagcctaatggccatgcatgttcgtcactctagcctgtgttcgattgttgcccgccaaagcaaaagaagatatatccacacgctggaagaccattcaacagtaaaaaggaatgaattactgacacatggcacaaaatgaacgaagctcaaaaaagaaagaaagaaagatgggcacaaaagcctacctatcggccgggcgcagtggctcacacctgtgatcccagaactttgggaggccgaggcgggcggactgcttgaggccaggagttcgagacaagccttgccgccatggcaaaaccctgtctctactaaaaatacaaaaattagctgagcgtggtggcaggtgcctgtaatctcagctactcgggaggctgaggcaggagaatcgcctgaacctgggaggtagaggttgcagtgagccgagataacgccattgcgc

SEQ ID NO: 330 - DNA, 476 bp, Homo sapiens
aaaaaacctttccctgtttgacctaccatgtgcctccatttctttatctgtaaaatgcggactataacagtacccacatcacaggactcttgtgaggattaaattagttaatatatatataaagcatttagaagagttcctgacacatcataagtactgtataaatgatgttgtgtgaggaaaggccaaggggaataaaaacagtctagaggttgggtgctgtagttcatgcctgtaatcccagcactttgggcagctgaggcaggtggatcacctgaggtcaggagtttgagatcagcctggccaataaggtgaaaccctgtctctactaaaaatataaaaattagctaggcatggtggcacacacctgtagtcccagctacgtgggagggtgaggcaaaagaatcacttgaacccaggaggcggaggttgcagtgagctgagattgcaccactgcactccagcctgggtgatgg

SEQ ID NO: 331 - DNA, 507 bp, Homo sapiens
ataactattttttttaaagggatctcactctgttgcccaggctaaagtgcagttgtgcgatcatagctcactgcaacctcgaacttctggggttaagcagtcctcctacctcagcctctcctgagtagctgggactacaagcatgcaccatcatgcctggctaatttttttatttttattttttgtagagacagggtctcacccccgagtttccaaatttaatgaaaactataaacctgcagattcatgatcaatgaaccctaagtgtaagaaatatgaagaaaattataccaagtcacatcataatcaaagtatttgaagccagtaataaaaaaatcttaaaagcagctggagataagacacattatgtatagaggaacaaaataattatggcagatttctcactggaaacagtgttagctagaagaaagtggggtaacatctttataaagtactgagagaaaaaaggcaaaatgaagaatttttcagacatagaaaaggtgaaag

SEQ ID NO: 332 - DNA, 363 bp, Homo sapiens
ctgcacttcggatcatataaaaagaaactaggagaaacaaagcaaagtgtaaccaagcatcattaggaattgaactcagtaattcccaagaacacaaagtagtagagaatgatggagatgttattttaaatatgaagaaaattataccaagtcacatcataatcaaagtatttgaagccagtaataaaaaaatcttaaaagcagctggagataagacacattatgtatagaggaacaaaataattatggcagatttctcactggaaacagtgttagctagaagaaagtggggtaacatctttataaagtactgagagaaaaaaggcaaaatgaagaatttttcagacatagaaaaggtgaaag

SEQ ID NO: 333 - DNA, 106 bp, Homo sapiens
caaatattcatagcagcaccatttataatagccagaaagtagaaacaactcaaatgtccatcagctgatgataaacaaaatgtggtctatccatacaagggaatat

SEQ ID NO: 334 - DNA, 454 bp, Homo sapiens
tgtatcatgagtcacactggtgtgtggttgtcctaatagattagtgttgtccatgtagttagcctgcgtatcctctatgaaattccccatcagcctttcacctaatggttaaggccattggtgattgttgcctagttccattatttcattaagaattacaaaatgggttgggtgcggtggctcatgcctgtaatcccagcactttgggagaccaaggcgggtcaatcacttgaggccaggagttcgagaccagcctggccagcatggtgaaaccccatctctactaaaaatacaaaaattagctggcagtggtggcacccacctgtagtcccagctacatagggaggctgaggcacaagaatggtttgaacctgggaggcagagtttgcagtgagctgagatcatgccactgcactccagcctgggcaatagagtgagattctatttccaaaaa

SEQ ID NO: 335 - DNA, 339 bp, Homo sapiens
aataagactaaatgagggttatcagggaaagacaatgtaatatctatatgttctgaaaatgcagatgtagcacaactttctacatatgagggagaaatggagatcatatacaacaatcattttaaattgtgttagtcatcataggtgatatggtgttgttattttgagactgttgcttgtgtaatatgagatgaaataaaacaatgctatgaagcattctaattttattatcccctgtgtcctgagaaccaaacgtttcaatgtgaaagacaggtatacagatgtaatagggaagaggttatgtaaaagctctgtaattttgattttgaattcaaagtg

SEQ ID NO: 336 - DNA, 461 bp, Homo sapiens
ctctacttctgtccacggcgcccacgtggtcatttccagcttcagctctgggactcagaaaggagttcctggcctttgagggaggggacctgagacataaaccagtaaagggaacaactccaatccatggagaggctccagcctctctcccctacccggggtcggctcccattgtcacttcctcatgtgcaaggcatctgggtttcccggttggggtccgaggcaggggccgggcctggctcactctcccctggaccctggtcccctttggccaccgaggggtcctgctcgctgctggctccggcgggagcgctgcagacccacagcccggtcctgcgcccacagaggctgctaccctgtgcagtgtttgcttccaacaggccccgccgccccgagccagcccccttctgtgccctaagccagtcgggctccaccacaggggtctggggccgggcggcctc

SEQ ID NO: 337 - DNA, 404 bp, Homo sapiens
cctgatttctcactctcagctgatgaccttgtttcctatttcactgggaaactagaagcaactataagagaaattccaaaagttcccatcaatacagttatctattacttgtgaagatgattctgtggtttttctcttcaactatgttattatggggacttatattaacagacttctttttttttttttttgagatggagtctttatctatcgcccaggctggagtgcagtggcatgatcttggctcactgcaacctctgcctctggggttcaagccaaaacttttgcctcagcctcccgagtagctcggattagaggcacctgtcaccacgcatggctaatttttgtatttttagtagagacaggatttcaccatattggccaggctggtcttgaactcctga

SEQ ID NO: 338 - DNA, 386 bp, Homo sapiens
ttttcatgagacggagtctcgctctgtcgccaggctggagtgcagtggcatgatctcagctcactgaaacctccgccacctgggttcaagcaattcccctgcctcagcctcccaagtagctgggattacaggtgtgcaccaccatgcccggctaatttttgtatctttagcagagatggggtttcgccatgttggccaggatggtctcaatctcctgactttgcgatccacccgcctcggcctcccaaagtgctaggattacaggcgtgagccaccactcctggccgagagtttgactttcatactttagaaattcagattcaattttatttgtaattttaccttatgtgtgaatgcataggaagaaatacagaaggtattataaa

SEQ ID NO: 339 - DNA, 671 bp, Homo sapiens
gccctttgagtagtaaaattttagctcactcagaaaaacctcatagtttatttggagtaacatccctttagcccttgtagatattataagactacattacaataaagttctggtgagtctaattgttgaccagagagattgtttacttcagagcacctggatttgaattgcagtgtgccacctgctgctgtgttacctggtacaagttaatgcattctcttcacacctcagttttatcatcttctgaatgaggctaatagtagtacctgtcatagatgcttgtaacagtgcctgcatagagtaagaatgaaataatgttagctattttttattgttacatttaaaatagattttgctggtagtgaaatatgaatgataaaatcatctcctcagctgttttccttgcataagtaccttaaaataatgtatttgcaatttccttctgaatccttgaataaaagacaccagataatcagaagatgttactgacattagtaggcatttgaagttcactctgatgggatcagtctatttacaacaaattgctatagagagtaaaaagcgccaaccttttcctgtagtttttgaatgacagcatctttgttcatgcagttggctttgctgcatttccacttcatcaattttttggctctgtctttgcaaaaaaaaaa

SEQ ID NO: 340 - DNA, 406 bp, Homo sapiens
gccctgctgagctcaggaccctgtgtgactgcacaggccacacatccatgaagctggccttgtccttcgggtccttcgttcccccacccacccatctccttcagcacacacagacctctgctctccacacaaccctccctccaagaggaagtgagttccctcatttttgtcacacttgctcctctctgtgctgcctgtgggaacaagaacacttcacacagacacctgagtggggtctcgccccattcccactccctccccctgcccacctactcaggagttcaaccagatgagatggctggaaaccacagtggtatccctcaggcctcaaaactgttgtcttcctggaaccaacacttactgaatcgtataacaatatagagtcccaaaactcagattaagcaaa

SEQ ID NO: 341 - DNA, 338 bp, Homo sapiens
ggcagccacaaaggccacccatatatagtaggattccatttatataagatctccagaatgggagatcagtaaagacagaaaggagattagtggttccctgggtggggtgggggagaagtgggggatgatagctaaagggtataggattttctttttgggataatgaaaatggtccaaaattagattatggtgatggccataccactctgtgaatataccaaaatccattgaattgcacatcttaaatgagtgaattattattattattattggagatggagtttcactctcgctgcccaggctggaacgcaatggcgcggtctcagctcatcacaacc

SEQ ID NO: 342 - DNA, 450 bp, Homo sapiens
gaaatgacattgagggagattcatacactggcatttagacgccattttaaggacaagctttatttggcttctctttggaattccagagtctctacccagtgtaaagactgtgtttaatgcctgaatgcatttgctagtgaaggtgatttcccaagatttctataataaaagtggggagaagtattaagaaatacaatcttgagccaggcacagtggctcatgcttgtaaccccagcactttgggaggccgaggtgggtggatcatctgaggtcaggagttcgagaccagcctggccaacatggtgaaaccctgtctataccaaaaatacaaaaaattagcctggcatggtggtgggcacctgaattccagctacttgggaggctgaggcaagaatattgcttgaacccaagaggtggaggttgtagtgagctgagatcgcaccattgcac

SEQ ID NO: 343 - DNA, 711 bp, Homo sapiens
tttccactttctttaattccttatcagcacgcggaagtctgcagctgtcaaaggtgaagttcaagtgacgttttggtacaaactgccatccaccaccaatccaactgaccatacatccttctggggagtactaatccagtacgcactccctgctataacagggacagtgacaggcagaattgtaacatcaacagctctttctcttggagagaacctctgggtcagaggtaatggaaccctgtattattttgagagcccattgagcccagacaagctgactctgtggaagtgtggttttaatgtgtatgtatggctttagcagaaggtaacttggattctggtccgagggtgtggattccaatcacttaactccagcctgggttgagtcagcaatccagagaaagggcttcagtcaaacaattcttaggagatccagtactgtccaactaaccttcatatattctctcgactctagtacatggatatgcttgacatttttaaagaacaggaggtgggcagacacttcctgttttacaaggcgaagcatcccactatccttgtaagcaagatcagtctgtccagcagaattttgcatctcatcccttcccttaccttctcataaacctcatgcatcagccatctcctctctcccctatcttcaacattctctttctcctaactcttccccatcagcatatgcacactcccaag

SEQ ID NO: 344 - DNA, 1599 bp, Homo sapiens
aagatatcccccatggcagagaaaaaaaaaagtttcttctgggatgcagacaatccaggaatcagtgataatccactgacctttctaggaagtaagagcaaagaacaaacaggttagattctgagaagctgtttctaagtttgatggttttttttttcctaagcctgaggcactgagaagggttcaagcttgtattctccagatgcaagatttactgttacagcacactgaagtcctgagccctccgccacccgcaaggccttcctcggagacagggacctatccagagatgtctctgtcactgtcaggatgcgctgcaagtggacaaagggtttccttcgtgttgaccctaagaagacctcgacttgatcaaggaagaactgagcatggcttgcagtagagacagtcacacacagcttcccatgaataggtgtgggcctgatcatcttagcaccttctctagccttcaagaagctctcaaaatcagggccatcttggtatttcactagctgcttctttctttttttgatattttaagagacagggacttgctatgttgcccaggttggacttgtattcctgggctcaagccattatcctgccccagggctcccaagtagctgggactacaggcctgtgccacctcacccaccctcgctgtttatttcaatgaactgcaggttgatgatgatcaatcttctttcctaatctcctggttgaaattagggatattcagatttttttgaagtggagactatcagggtgttagaagacctagttctgaacctgctctctgctaacttaccatacgactttaggcaagttgctgccccactaagaacttcagtcttatctgtgaaatcaagggactggactaagtggtctccgagatcccctccagctgaaaccatctcctgtactgtccactattatagcaaataaccacacatggctgattaaatctaaattaatgaaataaaagtcagaatgtagttcctcaatctcactaatcatatgtcaagggctttaatagccatgtgtggccagtggctgccaggttgaacagtgtagttctcctgctctcattttattgatgatcatggtttcataacaaaacctgccagttgaagaccactttcacgtgtatggtgcattttaatacacgcttacatttaactacccaaaataggcaagagagatattctaatatctgccttatcagatgaggacactaactcaaagagtaaattacttgctatagggtcataccactaatgactaaatgtagtttccaagcccaggactctctaacacatggtacaaagtcatgacgagaagacatgtgccccctggccaaaactattcaacccatggtagcaccagaactgagatccagggattaagggctgatctggagaccctgtgccttggtgtagaccttagctcagcacatcctagctgtgtgaccatgggcaagttatttaatatctctgggctcctttctagtcctctgttaaatgggaatgaccacaggatccactgcttatgagaactgcacaagtagatgcaaataaaatgctttgcatgggaggtcaggca

SEQ ID NO: 345 - DNA, 1037 bp, Homo sapiens
aagatatcccccatggcagagaaaaaaaaaagtttcttctgggatgcagacaatccaggaatcagtgataatccactgacctttctaggaagtaagagcaaagaacaaacaggttagattctgagaagctgtttctaagtttgatggttttttttttcctaagcctgaggcactgagaagggttcaagcttgtattctccagatgcaagatttactgttacagcacactgaagtcctgagccctccgccacccgcaaggccttcctcggagacagggacctatccagagatgtctctgtcactgtcaggatgcgctgcaagtggacaaagggtttccttcgtgttgaccctaagaagacctcgacttgatcaaggaagaactgagcatggcttgcagtagagacagtcacacacagcttcccatgaataggtgtgggcctgatcatcttagcaccttctctagccttcaagaagctctcaaaatcagggccatcttggtatttcactagctgcttctttctttttttgatattttaagagacagggacttgctatgttgcccaggttggacttgtattcctgggctcaagccattatcctgccccagggctcccaagtagctgggactacaggcctgtgccacctcacccaccctcgctgtttatttcaatgaactgcaggttgatgatgatcaatcttctttcctaatctcctggttgaaattagggatattcagatttttttgaagtggagactatcagggtgttagaagacctagttctgaacctgctctctgctaacttaccatacgactttaggcaagttgctgccccactaagaacttcagtcttatctgtgaaatcaagggactggactaagtggtctccgagatcccctccagctgaaaccatctcctgtactgtccactattatagcaaataaccacacatggctgattaaatctaaattaatgaaataaagccggatccgggccgaaccccccttccctatcgacccaccaccccgcgaccccctcc

SEQ ID NO: 346 - DNA, 379 bp, Homo sapiens
ggcatttcaaagctgacagctccagctgtccagccttcctccctccaatgactcatacccaacagatggtgcaaatagcttggcatcaattcactgaatcagtgttgggggaaaagccttgccagacgactgatggtttctttgaagttgttcattctggcaacaatgcacagctaatagaacagccttggctgaacaaaaagatatgaaactgatgtttgagagaaaatctggaacataggggtctatatctgtcacagtgcttgcaattattttctaccaataatatcatttttattattattatctaccagagctatgtaattctctcacttgacattcctaatacttgatattaaaataagcctattaatcctgc

SEQ ID NO: 347 - DNA, 722 bp, Homo sapiens
atgcccaactgatgtttttgtatttttagtagagatggggtttcaccatgttggccagactggtctcgaactcctgacctcaggtgatccactgcctcagcctcccaaagtgctgggattacaggcgtgatcctaagtacagttttataggacaaccatgctcattcatttccgtatcgtccacggctgctctacagcagcagagtttagtggtcaggacagaaccggcacaacctgcacaacctgcacaactttcaaaggctgaatatttactctccggctctttagagaaagtttgcaactcctactttagactgatgcttctccaatgctaacgcgccagtcaccaaatcaccggcatctggtcccagcctccaaccataaaccacagctgaatggaaacttggtagcgcttgccttcaatagcagatgctgtaagaggaaagcaaggtgaccaagaaaacattgcaaaactctgggcagaatctggggcctgaagactctgagtcagaggcctctttttttgctctaaacacatattagcaagagtccaagaggcatcaaagatgagttagcagcaaaatgaggctttgtccttcatgtagaaaggattaaatgatagttgaaaatgcaataactttcaccctgtgggattcagtgatgttcagtgctgtgattatgtccaacttcaaatcttgctgtcccaactgggacagcccaaa

SEQ ID NO: 348 - DNA, 829 bp, Homo sapiens
gcagctgcttgtcctactacttttagctgtgggtgcatcctttctgcgtcctgctaaaaattatattcttgttttcacttttaaaacctaagacggttccagagctgtgtttggtttttgctttaaactaatgcccgagcgcccctttagttagtcaccaatcactgtttaggtaagttgatgattcctttttgctacccaagatttttttatttaaaattgagcatttttaacttgctttttaggtcagaggatcaatgtcctctgtggtattcctcctccatctaagcttcttaaagcagtattataaatagaggctttcaacctaaaaagtactgtgtatttcattgactagaactgaactgaactgtaggctaataaaaagtaccaaatgaaaatattatggtatctcattgcactccattgtagatgtaatgtagtgtgaccagcagtagctttgattcattgtaaatcccatctgaatactgacaacagttcaaaacatcaggagataaacctcaaaggtcacatttgtgtgaatggtcattgtgcatataagacatcattttattatttgaaaactagtagtgtagctcttaagacagggcagtgtcctaacctctgacagggatagaggcgagaggagaatcagtgggctgccaaacagtcatgtgttcataggtgaggttctgtttcttctttagctgttactattgttattattattattattattatttgcatgaatggtagcagttacttcacaggcaaatttcctatgaatcccagagtattgcaacagattagcagcaaataaagacctgagata

SEQ ID NO: 349 - DNA, 441 bp, Homo sapiens
aaccattataaatacaaaattcaataattttagtaaatttatgtaactgtgcaaccattctaaaatccagttttgaacatttccgtcactccaaaagtgccatcattctttattacagttaatccaagtccaaaccctagtcctaggcaacaactgatctgctttctttataaatttgccctttctctacagcttataaaaatgaaattccacaatatataatcttttgtatctgccttctttcacagagcataatgtttttgagagtactccatattgaagtgtataaatgtagttcatgccctatgccctttaacttcaggatattatttctttctttctttctttctttctttatttgagacagagtcttactctgtcacccaggctggagtgcagtggcgtgatctcagctcactgcaaccttcgcccccccaggtt

SEQ ID NO: 350 - DNA, 405 bp, Homo sapiens
gggggccctacctttgctgggtcaggaaggggaggtcaggccaacatctagattctgacagaatcttcctgcatgacgggaatttcaacatctattcaacaacacaaaagtcagtgccactgtgaacatcagactgaagtctgagatcttcccggagaccagctggccaaaagatgtcattgatgcctagctctgggcaggcagaagagacccggagcctgttacaaacgccttctccttcttcttggagttggttctggctttcataattcacagtggatccagagttgcagagataattcttagtcttgggccattctggatatatcattcttcctcatagaccattctggatacgtctttgtggccaaaaaagagttaaatagctgcaaggttgttgatttg

SEQ ID NO: 351 - DNA, 387 bp, Homo sapiens
gcgtccttccgctgcaccatgaacccccaggcaggggcagcctctttttatttgggtgtaataaagatctgattgggtctccttggtcagcctttgttctcacctgccttctatcttgagagcagagtgtagcacttccatggttcctacccagttcaacttcagaagcctttggggaagggtgtctgtttttctgaagacatggcgagggagacagaggtgcataacgtcttcaaaattctaccttaggcatcttttgattctcttccccaaagttctcctcttttgccagctgtcttatctttttttcacccttctctatttccatagcctctttaagacttccagcattccagtgcccccctcagcttgtacacccactgagca

SEQ ID NO: 352 - DNA, 332 bp, Homo sapiens
cggagttttgcctgcttgttacattagtgaatgtaggaccacttgagtaaaggaccaaacctttattcttttgcttttctgccattgaaaccattcaacccatgctgattaatacctactgtttgccaggtaatatgccccttgcagaaagacgcaaacagctaaaccccaaatgggatgttgtacaggacaaatgaccgtgtcaattaataccaataattaagataatagtataattatgatgataatataattaattcgagcctggaggaaacaaaagaaagtggaactgaactattagagaataaatgagcttaaaagacgtcattgaa

SEQ ID NO: 353 - DNA, 1217 bp, Homo sapiens
tagtggcttaaaatctagaagtttatttcactcttacagtaatattcacatgtaagcaatcaagtcagccatgaatcaagctactttctacttccttctctatcgtggccatcatagatctcaccctcatgatccaacatgaacctccagccatcacattggctaattgcaaacagcagtgtagatgatgcagcaatacacttcgggaactctgtagaaaatttctcaggaggaattgttatgtaatagttctactttcatccttttagtcacatgccactactcaatgcaaagatgagaaatgtatctttcatttcagttggccatgacatcaattagaaattagtggtgttgtttggaggaaaattccatagggaagacagctggcagtctctgcatagatttcttcattgttctttaaatccgccgtattatacaatcattttaacaattaatgaaataaccttgatattaggaggctgtaaaaggaacttgacccacctgactttgtgctttttgaaatgtatttctattttataacttttatccatcaccgcgccctgtttcttgtgatatttcatgggtctgacctcaaacataaggataatattaatcaaatgatcttgattattcagttggcaaatattaaaggcagatgtaacatagattgaaaaaaatgaatttttatatgaacaaatggagactgagttatttaactagatctttgctgatgtgatgtaaaacaaagaaaacagagataaaaacaatgtttaatatacaatttaattattctttaaccagcaagaaataaaaattaacttctcaatatgtaagtgcaaattgacaattttctgtggttctttagaatatatatgtatgttataaacagtgagattattggcagatagaacttaactttctcttgagttaagcatttattgcatatgcaatctgtgacaaatgctataataggtagcagagctcataaggaccaacatatacatgtgcctgccttttaccatcatttttacatgtggttcaaggtacgctttttgattctatgtccccaacatgctgcctccaaacagtttcttaaaaagttctgttactattaaattgcatgaaatcttagaacttcatatagtgcttccatgagggaatccctctcttgcattaacgaggaaactaatcttcttccaaatcttcaatcctgaaaa

SEQ ID NO: 354 - DNA, 329 bp, Homo sapiens
gacatgagatttgggaggggccaggggggaatgatatggtttggctgtgtccccacccaaatctcatcttgaattcccacgtgttatgggaggaacctggagtgaggtaattgaatcatgggggtgggtctttcccatgctgttcttatgatagtgagtaagtctcacaagatctgatggttttaaaaatgggagtttccctgcacaagctctcttctcttgtttgctgtcatgtgagacatgccttttgccttccaccatgactgtggtggcatgtggcactgtaagcctaataaacttctttcttttgtaaattgcccagtctcagg

SEQ ID NO: 355 - DNA, 424 bp, Homo sapiens
tctgttacccacaagcacttggttttggggcttcgctccttatgtttctctttctttgcttggaaacttccgatccccaggaccctgcaaactgcatctcgtaatttgccctccacggcacgggacgagcagccacagctgctctgggcctccctcctcgggtccttgatttccccagaaattcccagggaacctctccgccccacagctcgtgtcagaggactctgagacttcactcttcaggaacccttttccagccgttatttttgttttctttaccggcctttcacctccacccccaccaagacgtacccttttctccgcaacacaggactgttctctgcccttacagagcctgttttaattccgagacttttctcctgtctttcttattttgagagtcaaggagtaacaggggctttct

SEQ ID NO: 356 - DNA, 340 bp, Homo sapiens
ctggcttggggctggtgtgggcagtggctcccagctgtgagccctagctgtgaattgatgtgagaatccagtgagatagaggggtggggatgccttgcaggggctccacagaccagccaatgatgctggcctagagaccaccctccacggagaaaggggagcaagattaacacaaagaggccaggcgtggtggctcacgcctgtcatcccagcactttgggaagccaaggtgggaagattccttgagcaggagttcaggatcagcctgagcaacacagtgagatgtcatctctaccaacaataataataatttttacattagcccagtgcagtggcacgt

SEQ ID NO: 357 - DNA, 355 bp, Homo sapiens
taagcattgttcttgaaggtagttcacttgctttatatcaccttagttttgttggaggcataattgtatgccttgttagtgcaggtctactatggttttatctttactcctaaagtgaatatcttagttttgggaggtggtctttgcttctaaaatgttgtctttctaaattatagatgacctgaacaaatggaaacacatcccatgctctttgatgggtagaatcaatgtgaaaatgaccatattgccaaaagcaatctacaaattcaatgcaattcccatcaaaataccaccgtaattcttcacagaactagaaaaaccaatcctaaaattcatatggaacccaaaaacagcc

SEQ ID NO: 358 - DNA, 356 bp, Homo sapiens
tagttcaggttaattattggcaatctgtagatgtgcagcataggagcttctcttcccctcggcctgggcctctggaggtttcttttatgagctctgaaccctgagggaggacttaaagtaatgaattttcctgtaatcagatttgagggtttgttccctgagccatccagtcaattggagaattgagcactgactggtttatttggctacgggatgcaggagatgatgcacagagcatctgataagcaacccggggaggagagtgaagaaatggcatgacatattcaagaagttgacctctgggcttggagggagcggttctgtttacaagggggacatagtgtctgggagctatt

SEQ ID NO: 359 - DNA, 505 bp, Homo sapiens
gtgtatgcagtgatcactctcagctagcaaacttagagaaggctggcaatagtgacaagtgtagtttccatttactaattgattactatgtgccaggcatggctgcagagctttttatgctatcttatccaattctcataataaccctatgaggcaggtcctacttattagtcccatctgacagttgatgaaacatggcacaaacttatagcctaagacaggggtgagcaaactgtggccgttgggtcaaacgagactctaaagaggtactggcatgtccaggccccattattcacagtgtacatggctgcttttgagcttcagtggcagagttcatcagttgtgaccaagaccttaggccccataaggccaaaactatttactatctggccctgcctagaaaaagctcaccaacccctagtgtaaaacacagttgattcatgaataaagaaaaaaggcaagaacacgtggacagcttcacatagaacttacattgaaatttctt

SEQ ID NO: 360 - DNA, 346 bp, Homo sapiens
tcatcgtaaattaacattgcctgctcatgaacttcatctaaatgaaatcatgcagtatgtatttttttatatgtactcagcaatagcaaaggaagaactactttcaacaaaaaggttgactctcagaaacatcatattgagcgaaacaaactggaatccatttgagagtgaggttcactattgacatgagtgggacagcaggcaaaaaaggggggctgttctggggaatcaagatgaatgttcaccttatctttagaatataaaaacctcaagcctgtaccatacaaaagtacagtgtctggaaaaccctctcatgcaataaggctttgttctttaatagacaact

SEQ ID NO: 361 - DNA, 322 bp, Homo sapiens
gcaaagtttaggcttccagcctgacttcagttgatggattgtcaaaagaagggatctattatccctttattcttggaaccaccagtccctgccccaaacccttaaacccctagagagcactgcctcgtcctctagcctggggctcacacaacagtctgccactcaggctgctaggagattctccaatagcaggctcagcacctcaaactgcccaccacctctcctactgctcctctcccacccaccacccaaactcctcagtcctgtcatgtagcagagttccagtaactcaggaaaatggagaccaaggtcattccttaag

SEQ ID NO: 362 - DNA, 300 bp, Homo sapiens
tgttgaatcagcagaggatgtaaccacttagatagcactatgtgactcaaataaatgacagattgagtctttcaagtgtcacagtatataataaggatcacaaattttgtgtgtgtgtttttttattaagagaaaaaaaatggctttggagtcaagtacacttagtcttaaatcccggctccactgtttgctagcgatgtaactgggtgtattacctcatctgtacaatggggataataccaccaatctcatggttaaataaagtagtgtgtgtaattgctcagcatagtagcatagtac

SEQ ID NO: 363 - DNA, 201 bp, Homo sapiens
gaaaccctgtaccctttagctatcatccctctattcccaaccctttccccagcccgcggcagtcattgtgttttacaaggtgattcttggctgggcacggtggcccatgcctgtaatcccagtactttgtggggccaaggtgcgcagatcacttgaggtcaggagttggagaccagcctggccaacatagtgaaaccctgt

SEQ ID NO: 364 - DNA, 423 bp, Homo sapiens
cagagtaaattatcaaggcagtaagaggatgaaacttcagcctggggaaatggttaattgctttgccctctagttattattttggtcctagcttactgtagagtatagcatttcaagcaaagggctataaatttcatggtaaggggcatctattcaggggtgcagtggagatgggaaacgcaagcagtcattgataccaaccttgatcatcaatcatggaaaatgagtgtctttttcaggcaatgctgtctaataccccttgcattttggtttttcctgtgttttcgactccccccattcacataaacctatatgtacccaacaataaaatatacacacatgtggactcaatcagcaatgccttaggctggccgtggttttagatacctttgtgcatacaggatccttagtcaaggacaatac

SEQ ID NO: 365 - DNA, 255 bp, Homo sapiens
ttcagggcctaaagtcacaaaacggcagcctccagccaggtctggctcagcccacagagctgctggggtcagagcagctttaaaacactacgtgcagggcttggaaggccagcagagcacgggacatccctgtgtttcatgacctccccctccccatttattccagtcacctgcctggccctgtgtcctccatgtgacccaggccaggggtctccaaaatggcttactttgcaggaaaagacaaatgtgtacact

SEQ ID NO: 366 - DNA, 401 bp, Homo sapiens
agaaagcatgctgtttctggcctttcaagagctccccaagtaccagggaaccagggctctgctacaaatactaatatctaatgtaatagagtgagacttccactactgagcacaatgagggtgagggactgggtttaccctcctgcctgagacaaccaaagcaaaccaaaaaacaaaacagacaaaacccagagtcctcaagacactggacatgagcaatgaaggacagtgatccctgggagacgagagactaagtcagccctatggctgccccaactcgctgctttgagagagttcctaggctgtggcacaaggaggagggacaggcaaccctctgaattgaagaggtgctgagaatctaaggagaccaagacagccacagttcataagacagagcacca

SEQ ID NO: 367 - DNA, 481 bp, Homo sapiens
acccaaaatctggtcataaaaatggaagttaaattaaattgtcctcaaaatttaagtttgctacatttgtaagtgccacttgcttcttcaaaatttcaaactttctcatatctagcagcaaatcaaaattaggaatttaagcatgtaaattcatcgtggaaaccaaatggattaaaattttctgtgtattcatgataatgtttaaaatttttgctacatttaaaccctaagttagttacaaaaactctaaaattatgcttgtttaaaaacttgggctaacttgcttttgaaaacatactgacatattcattccattcttcttataattatttttgtgtcactcccaaacagcacaccattgtatatgtccccaaaatggcacttctttgttaaagccattaagacagaaatatttttgagccagatgcaatggctcatgcctgtaatctcagtacttagggaggcctaggttagaggactg

SEQ ID NO: 368 - DNA, 405 bp, Homo sapiens
cctttgaaggtacgatccgagaagtaaatgccacagagacaacacacagaactgctgcaggccaagcctcaccacttcttaaaagtccgagcttagtttctcattcagcccactgcagtctcctgaccaagccacacacaaacagtaaaacctcctccctctgtttctcaggaccctcacttgatttcaggctcattctggacagatggggaaatgactacttgcaaagcaggattccttacattgcaacttttcccaacagctccgtgctccttcaatatgcccagaactggaggggaacattcttctctttcccagaagattgaaaaacttgaccacagaacccatgggagggacaactgtccagcaccagagcttcctgcccagttgttgcctggcaccgct

SEQ ID NO: 369 - DNA, 340 bp, Homo sapiens
agtcagcaaatctaaagatggacaagagctctttaatggccaggcatggtggctcacgcctgtaatcccaacactttgggaggctgaggtgggtggatcacttgaggccaggagtttgagaccagcctagccaacatggcaaaaccccatttctaccaaaacaaaacgaaaacgaaacaattcaacgggcatggtggcagacacccgtaatcctagctactcgggaggctgaggcacgagaatcccaagaacccaggaagtagaagttgcaatgaaccacgatcatgccactgtacaacagagcaagactgtctcaaaaaaataataaaataatattttt

SEQ ID NO: 370 - DNA, 336 bp, Homo sapiens
ctgcttttacattttatcatccaatcctttcatttcaattataatctccctttttgttggttactgagaagagtcatttttgttctctatgagatttctgtgataaataactgttgttctcagccaaggctcctcctccaccatctcctcgttcttctcttcctcctcctctttttctttgtctcacctctactctccctggctgctaggtcagggcctcagcaaaataggaagaaagtataagagaatcaggagcaaagtcaaatcaagagaaaattgaaaggagtccaaatacagaaagacagagaatagaacatggttaccatggtccggtag

SEQ ID NO: 371 - DNA, 321 bp, Homo sapiens
gctcaggctcctcctctgggctcacagtgccctgcgcttcccccatcccagccctgtccatgctaggtcctcactgtcgcctcactgactatgagttctgtgaggaggggcctaggctgggcccaggtcactgctgtgtctccagctttgcctagaatagagctgggcacagaggaggggtcagaaaacatttagattggctgggcaggagggctcatgcctgtaatcccagcactttgggaggccaaggcaggaggatcacctgaggtcagcagttcgagaccagcctgggcaacatggtgaaaccccatctctactaaa

SEQ ID NO: 372 - DNA, 432 bp, Homo sapiens
aaacctctgcacacttgactctaattgattgcaattctaccctgatttcccttttgtctaagattggggaataactgagtaaaagcaccacctctgtggtcttttcctcccattaggcccagggaaactttctatacacaaaatacatcgtctgttttggtctttacaatttagaaactacttttaccacatactatatatataatccttctaatggccctttcattagggattaccttatctattttatggaggagtaaactaggactgagaggtcaaggttctttccaattcatactcagaaagtgtcagggtcagcttacaaactgagccaaaaagtctgtgttttttcattgtattacattgctctttgtccccccatgctggttcctgggttaggggctgaactctgaaacggccttatttgtacta

SEQ ID NO: 373 - DNA, 1719 bp, Homo sapiens
caaagccccaaatccctagagtgctttctggtctcactttggtaccaaggaagcctcacatagtggtactgcatagtcccactataagtcaagttgcagtttaaggtggtctcagccaattgttacaagctacagaatatatacatgcatctatgtacagagccttgcagagaaacacaaaattttgaggctagacccatgatcaccaccaactataattgcacaaggtcttgttatattgatctctcctcgaactcaactaacgatatcttgaaaacaaagacccttcggtgtccatctacagtaaaccccaccattaccttctagttggcataaaaacaagaaccacaaaaacttgaaaaatctgaaacagagaacagaaggccaagagccagcttctgcgttctcaactttattcaacattagacttaccttatttctttcagtgtgtagggacaagatgtactgctgtgtgtgtgtgtgtgtgtgtgtgtgtgtgtgtgtgtgtgtgtgtgtctataccttcctatccattggcaagttaacctccatctggttgatttggccatgctatgctttcttcccattcccctgctgtctattctaagcccccagactcaagcctctagactcttggatgaaacagtgagaagaaaacattttctgacttacccttttggaatctcctccattattacccaggctttgctttaagttgcactttaaatcacactgtcctattaatgcgatctggcatcttctcccacaagccccctacagggaacaactaccccctaccttaactctaaatggttctttagactatagtctgtctcctctgacctgaaatcctcttttaggcaataggccgagctttagaagcagccaggtctggtgagaaatgggcccccataccaactgtggacttggaatatcagcagagtagtaggcacagttgtaaaaaggggagatttcggtaggcacaggtgtaaaaaggggagatttcagaagacgggcgaaacaactgatgggggaagatacctggggtgagaagatgagaaagaaatgatgctgagggacctagtgaaatcaatgaaactcttgagtcttgcttaggctcgcaaacaagaagtggggaggcttgggaaattaggatatgacatatatgaaaggtttatctaagaagaaagaaacagagataatatatatatagaaagatgtatatagatgtatatatgcccaaatatattgaatgtacagaaaggaaatattcagagactttagcattgggggcagatatcttggcctggttatggggtaggacacccagattttcagacttacaatcagtggtcctggtttcaacatggaagtgagatagctgatgaaggatttcaagtctggaaatgggaaagggaggggtagaagttccttttcagaaataaagaggcattcatgaaggcttttgttgaatcctatgctactgataggaccaggaagagaggaactcggaggacaatagggaggggaagtcttggaaaatctaccacttacactgtgtgtccccatccccagcagcgtcctgccactgtagcgcctttttaaaataaataaaataaaataaagcaccattttgtttccctttcatgaagtacactgtatttccgtcttccacaggggtgggagctgctattgctctagcccctgaaatcaaactca

SEQ ID NO: 374 - DNA, 1687 bp, Homo sapiens
caaagccccaaatccctagagtgctttctggtctcactttggtaccaaggaagcctcacatagtggtactgcatagtcccactataagtcaagttgcagtttaaggtggtctcagccaattgttacaagctacagaatatatacatgcatctatgtacagagccttgcagagaaacacaaaattttgaggctagacccatgatcaccaccaactataattgcacaaggtcttgttatattgatctctcctcgaactcaactaacgatatcttgaaaacaaagacccttcggtgtccatctacagtaaaccccaccattaccttctagttggcataaaaacaagaaccacaaaaacttgaaaaatctgaaacagagaacagaaggccaagagccagcttctgcgttctcaactttattcaacattagacttaccttatttctttcagtgtgtagggacaagatgtactgctgtgtgtgtgtgtgtgtgtgtgtgtgtgtgtgtgtgtgtgtgtgtgtctataccttcctatccattggcaagttaacctccatctggttgatttggccatgctatgctttcttcccattcccctgctgtctattctaagcccccagactcaagcctctagactcttggatgaaacagtgagaagaaaacattttctgacttacccttttggaatctcctccattattacccaggctttgctttaagttgcactttaaatcacactgtcctattaatgcgatctggcatcttctcccacaagccccctacagggaacaactaccccctaccttaactctaaatggttctttagactatagtctgtctcctctgacctgaaatcctcttttaggcaataggccgagctttagaagcagccaggtctggtgagaaatgggcccccataccaactgtggacttggaatatcagcagagtagtaggcacagttgtaaaaaggggagatttcggtaggcacaggtgtaaaaaggggagatttcagaagacgggcgaaacaactgatgggggaagatacctggggtgagaagatgagaaagaaatgatgctgagggacctagtgaaatcaatgaaactcttgagtcttgcttaggctcgcaaacaagaagtggggaggcttgggaaattaggatatgacatatatgaaaggtttatctaagaagaaagaaacagagataatatatatatagaaagatgtatatagatgtatatatgcccaaatatattgaatgtacagaaaggaaatattcagagactttagcattgggggcagatatcttggcctggttatggggtaggacacccagattttcagacttacaatcagtggtcctggtttcaacatggaagtgagatagctgatgaaggatttcaagtctggaaatgggaaagggaggggtagaagttccttttcagaaataaagaggcattcatgaaggcttttgttgaatcctatgctactgataggaccaggaagagaggaactcggaggacaatagggaggggaagtcttggaaaatctaccacttacactgtgtgtccccatccccagcagcgtcctgccactgtagcgcctttttaaaataatctactcactctaagcccccacaaactttctcttctctcacaatccttggcctcctttctatctccttgcttggaaa

SEQ ID NO: 375 - DNA, 1665 bp, Homo sapiens
caaagccccaaatccctagagtgctttctggtctcactttggtaccaaggaagcctcacatagtggtactgcatagtcccactataagtcaagttgcagtttaaggtggtctcagccaattgttacaagctacagaatatatacatgcatctatgtacagagccttgcagagaaacacaaaattttgaggctagacccatgatcaccaccaactataattgcacaaggtcttgttatattgatctctcctcgaactcaactaacgatatcttgaaaacaaagacccttcggtgtccatctacagtaaaccccaccattaccttctagttggcataaaaacaagaaccacaaaaacttgaaaaatctgaaacagagaacagaaggccaagagccagcttctgcgttctcaactttattcaacattagacttaccttatttctttcagtgtgtagggacaagatgtactgctgtgtgtgtgtgtgtgtgtgtgtgtgtgtgtgtgtgtgtgtgtgtgtctataccttcctatccattggcaagttaacctccatctggttgatttggccatgctatgctttcttcccattcccctgctgtctattctaagcccccagactcaagcctctagactcttggatgaaacagtgagaagaaaacattttctgacttacccttttggaatctcctccattattacccaggctttgctttaagttgcactttaaatcacactgtcctattaatgcgatctggcatcttctcccacaagccccctacagggaacaactaccccctaccttaactctaaatggttctttagactatagtctgtctcctctgacctgaaatcctcttttaggcaataggccgagctttagaagcagccaggtctggtgagaaatgggcccccataccaactgtggacttggaatatcagcagagtagtaggcacagttgtaaaaaggggagatttcggtaggcacaggtgtaggtgagaagatgagaaagaaatgatgctgagggacctagtgaaatcaatgaaactcttgagtcttgcttaggctcgcaaacaagaagtggggaggcttgggaaattaggatatgacatatatgaaaggtttatctaagaagaaagaaacagagataatatatatatagaaagatgtatatagatgtatatatgcccaaatatattgaatgtacagaaaggaaatattcagagactttagcattgggggcagatatcttggcctggttatggggtaggacacccagattttcagacttacaatcagtggtcctggtttcaacatggaagtgagatagctgatgaaggatttcaagtctggaaatgggaaagggaggggtagaagttccttttcagaaataaagaggcattcatgaaggcttttgttgaatcctatgctactgataggaccaggaagagaggaactcggaggacaatagggaggggaagtcttggaaaatctaccacttacactgtgtgtccccatccccagcagcgtcctgccactgtagcgcctttttaaaataaataaaataaaataaagcaccattttgtttccctttcatgaagtacactgtatttccgtcttccacaggggtgggagctgctattgctctagcccctgaaatcaaactca

SEQ ID NO: 376 - DNA, 1533 bp, Homo sapiens
ggcgctgcggagggagggggcggcccggcccggcccagctctgcccccggccggcccgaccccggccccggcccccggacaagcccttatctgatcccagctccgggtttaagagtcctggcccggcccgtcgcacagctctgctcctaactcctgcccgccccgtccgtccatctgtcccgctgccccgcggcccatccaaggggccactccacctcggacccaagatgacgtcagttgccaaggtgtattacagtcagaccactcagacagaaagccggcccctaatgggcccagggatacgacggcggagagtcctgacaaaagatggtcgcagcaacgtgagaatggagcacattgccgacaagcgcttcctctacctcaaggacctgtggacaaccttcattgacatgcagtggcgctacaagcttctgctcttctctgcgacctttgcaggcacatggttcctctttggcgtggtgtggtatctggtagctgtggcacatggggacctgctggagctggaccccccggccaaccacaccccctgtgtggtacaggtgcacacactcactggagccttcctcttctcccttgaatcccaaaccaccattggctatggcttccgctacatcagtgaggaatgtccactggccattgtgcttcttattgcccagctggtgctcaccaccatcctggaaatcttcatcacaggtaccttcctggcgaagattgcccggcccaagaagcgggctgagaccattcgtttcagccagcatgcagttgtggcctcccacaatggcaagccctgcctcatgatccgagttgccaatatgcgcaaaagcctcctcattggctgccaggtgacaggaaaactgcttcagacccaccaaaccaaggaaggggagaacatccggctcaaccaggcagcccagagaagatctgtttccctgtgtcctgtgaatggaaggacccaagccaatatgttcctttgaaaagagtccagtacccaggccccatggaaaggtctgaaaataatattccagattacactgtacctggcttctcttcttcctttcctgctcagcctagatccttcttccttaaccccaactctttgggagaagggagggaaaatgcaagggccttcctctcttaacacggatgctcaagtaaaactagattcacagggcacagattccccagaaagttaacacaatcccaccatgagggatgggtaaattctcagatttccaaactgctgtacagagcctctgagaattggtgatgctttgttaaggtttgggcaggagcagaactctgtggctggcagccactattctcagttacacctcccagtgcccttctgaaaagtgccagctatttcattaggcaatgctggaaggaaatgaaattataccttctgatcaaataaccatggcttccctcagccattcctgagacttggtataaaatgaagaaatcagtgtcatctctactctcctctgccatgaggccattttcagacaagtt

SEQ ID NO: 377 - DNA, 479 bp, Homo sapiens
  misc_feature (75)..(75): n is a, c, g, or t
gaaaggaaatttcagagcttagcatgggcaattctgcctgtagggggggggggggggttttaaaaaggggggggnaaaccccaaccccagattttcagacttacaatcagtggtcctggtttcaacatggaagtgagatagctgatgaaggatttcaagtctggaaatgggaaagggaggggtagaagttccttttcagaaataaagaggcattcatgaaggcttttgttgaatcctatgctactgataggaccaggaagagaggaactcggaggacaatagggaggggaagtcttggaaaatctaccacttacactgtgtgtccccatccccagcagcgtcctgccactgtagcgcctttttaaaataaataaaataaaataaagcaccattttgtttccctttcatgaagtacactgtatttccgtcttccacaggggtgggagctgctattgctctagcccctgaaatcaaactca

SEQ ID NO: 378 - DNA, 2765 bp, Homo sapiens
ggcgctgcggagggagggggcggcccggcccggcccagctctgcccccggccggcccgaccccggccccggcccccggacaagcccttatctgatcccagctccgggtttaagagtcctggcccggcccgtcgcacagctctgctcctaactcctgcccgccccgtccgtccatctgtcccgctgccccgcggcccatccaaggggccactccacctcggacccaagatgacgtcagttgccaaggtgtattacagtcagaccactcagacagaaagccggcccctaatgggcccagggatacgacggcggagagtcctgacaaaagatggtcgcagcaacgtgagaatggagcacattgccgacaagcgcttcctctacctcaaggacctgtggacaaccttcattgacatgcagtggcgctacaagcttctgctcttctctgcgacctttgcaggcacatggttcctctttggcgtggtgtggtatctggtagctgtggcacatggggacctgctggagctggaccccccggccaaccacaccccctgtgtggtacaggtgcacacactcactggagccttcctcttctcccttgaatcccaaaccaccattggctatggcttccgctacatcagtgaggaatgtccactggccattgtgcttcttattgcccagctggtgctcaccaccatcctggaaatcttcatcacaggtaccttcctggcgaagattgcccggcccaagaagcgggctgagaccattcgtttcagccagcatgcagttgtggcctcccacaatggcaagccctgcctcatgatccgagttgccaatatgcgcaaaagcctcctcattggctgccaggtgacaggaaaactgcttcagacccaccaaaccaaggaaggggagaacatccggctcaaccaggtcaatgtgactttccaagtagacacagcctctgacagccccttccttattctaccccttaccttctatcatgtggtagatgagaccagtcccttgaaagatctccctcttcgcagtggtgagggtgactttgagctggtgctgatcctaagtgggacagtggagtccaccagtgccacctgtcaggtgcgcacttcctacctgccagaggagatcctttggggctacgagttcacacctgccatctcactgtcagccagtggtaaatacatagctgactttagcctttttgaccaagttgtgaaagtggcctctcctagtggcctccgtgacagcactgtacgctacggagaccctgaaaagctcaagttggaggagtcattaagggagcaagctgagaaggagggcagtgcccttagtgtgcgcatcagcaatgtctgatgacctgttcccactcccccattcctctggtctcttttcctctcttccaatgccctggtaaggaatactacccgggtttactggagatcccccgaagcacccatcctccactccctcttctttaacccagtggcctgttggtagcttaggccaactggagtccaggttcgcctcccactgtcccctttccacttccccagcttctgccccaatacacatacctcccttaagccaggatgggggaaagagtgggattaggctgaagtggcttagaaggcctcagccatgcttggatactcacattaggaggaccatgtggttggaaggatagactgccccctacctcccaccaccaccatgaagtttggtgacttgaggctggagctccctctgttacctttccatctagcaagttcccaaaggcaagactctctctgatggtcactttgtggtctgtgctttcagaaatacaggaatctgatatcaacatatcctagggtttctaccaatctctgttgaaagaagccagggtttgccactgtgaagcttgatttctgctggtgacttctgaccataagctagaaccatggtcgccactgttttccctctgtagtttctcaagtgaacactctcaggatacccagttccctcatagcctctgttctcagagaattggagttggcccaagaaacataaacatataaccacccatatctatcctggattctgaactcttcaatttggagtgactaacacaagttgttatctaaacctttaaacctatcttccaggcagcccagagaagatctgtttccctgtgtcctgtgaatggaaggacccaagccaatatgttcctttgaaaagagtccagtacccaggccccatggaaaggtctgaaaataatattccagattacactgtacctggcttctcttcttcctttcctgctcagcctagatccttcttccttaaccccaactctttgggagaagggagggaaaatgcaagggccttcctctcttaacacggatgctcaagtaaaactagattcacagggcacagattccccagaaagttaacacaatcccaccatgagggatgggtaaattctcagatttccaaactgctgtacagagcctctgagaattggtgatgctttgttaaggtttgggcaggagcagaactctgtggctggcagccactattctcagttacacctcccagtgcccttctgaaaagtgccagctatttcattaggcaatgctggaaggaaatgaaattataccttctgatcaaataaccatggcttccctcagccattcctgagacttggtataaaatgaagaaatcagtgtcatctctactctcctctgccatgaggccattttcagacaagtt

SEQ ID NO: 379 - DNA, 1682 bp, Homo sapiens
ggcgctgcggagggagggggcggcccggcccggcccagctctgcccccggccggcccgaccccggccccggcccccggacaagcccttatctgatcccagctccgggtttaagagtcctggcccggcccgtcgcacagctctgctcctaactcctgcccgccccgtccgtccatctgtcccgctgccccgcggcccatccaaggggccactccacctcggacccaagatgacgtcagttgccaaggtgtattacagtcagaccactcagacagaaagccggcccctaatgggcccagggatacgacggcggagagtcctgacaaaagatggtcgcagcaacgtgagaatggagcacattgccgacaagcgcttcctctacctcaaggacctgtggacaaccttcattgacatgcagtggcgctacaagcttctgctcttctctgcgacctttgcaggcacatggttcctctttggcgtggtgtggtatctggtagctgtggcacatggggacctgctggagctggaccccccggccaaccacaccccctgtgtggtacaggtgcacacactcactggagccttcctcttctcccttgaatcccaaaccaccattggctatggcttccgctacatcagtgaggaatgtccactggccattgtgcttcttattgcccagctggtgctcaccaccatcctggaaatcttcatcacaggtaccttcctggcgaagattgcccggcccaagaagcgggctgagaccattcgtttcagccagcatgcagttgtggcctcccacaatggcaagccctgcctcatgatccgagttgccaatatgcgcaaaagcctcctcattggctgccaggtgacaggaaaactgcttcagacccaccaaaccaaggaaggggagaacatccggctcaaccaggtcaatgtgactttccaagtagacacagcctctgacagccccttccttattctaccccttaccttctatcatgtggtagatgagaccagtcccttgaaagatctccctcttcgcagtggtgagggtgactttgagctggtgctgatcctaagtgggacagtggagtccaccagtgccacctgtcaggtgcgcacttcctacctgccagaggagatcctttggggctacgagttcacacctgccatctcactgtcagccagtggtaaatacatagctgactttagcctttttgaccaagttgtgaaagtggcctctcctagtggcctccgtgacagcactgtacgctacggagaccctgaaaagctcaagttggaggagtcattaagggagcaagctgagaaggagggcagtgcccttagtgtgcgcatcagcaatgtctgatgacctgttcccactcccccattcctctggtctcttttcctctcttccaatgccctggtaaggaatactacccgggtttactggagatcccccgaaagaggaactcggaggacaatagggaggggaagtcttggaaaatctaccacttacactgtgtgtccccatccccagcagcgtcctgccactgtagcgcctttttaaaataaataaaataaaataaagcaccattttgtttccctttcatgaagtacactgtatttccgtcttccacaggggtgggagctgctattgctctagcccctgaaatcaaactca

SEQ ID NO: 380 - DNA, 374 bp, Homo sapiens
ttaggaccgtcccgggctgtgacagcttcaaaccagcagaattaagacccaaaataggtgaagaaatctcagcacctcactggatggtagtactggtgacctccagcggaaaggaagttggactcctagcaaatgaggctgggaaagaagggggcagtagggcttgttccaggagagacctcttttgttcagttttttttttttagctgtctcactcagtttggctttcctctgaagggccttgatcaggtgtataggaacttaatccttcccagacacaggtctctttcttgaggggaggaatgagttaaaaatggttgcccaaagtaaattacctcgagttgtatacggtggtcgtgcagtctgctcttctg

SEQ ID NO: 381 - DNA, 511 bp, Homo sapiens
tctaaagtcgggtaatgtccaaggtgacctcatggcctcaggaggacaatattaaaatttctaaatttttccatcatataattttttaatttctggaaattttttagtagctgttttatgatgttcatgataaactaggacagcaacacatgcgtgtaatttagaaagaaagaaaaatagaggcgtgtgtgcaaaaggttttactgacatagatgcatgatcaaaatatctaagtcctctccggggttcaggctagcagggctctgaggcattttgggggtcaggggaatgggaaggcatcagaacagcactgggagacttgggctcctccctcaacttgctgtgtgtccttgggcaagccacctaatctctctgagtttataaaacaagcagaggaagcttataaaacaagtacatgcaggctccttctagcaaggggaggttgagatgatctgattctaggctttgttccagatctcagataatcctggaatcttgagactttgaaagt

SEQ ID NO: 382 - DNA, 275 bp, Homo sapiens
acactagacgttgcttagagttcagcttgaagccatgtgatgtgggtcactgcccaggaggacttttttctagtgctgtggcctggaggactttccctctagcctctcatgcaggtgtactgtgtgatgtggtgggtctcttttctaacaggaagccccagtgggtgcagcagagctgtggctctcccaactcaagcacatctccacagctagctgccggcaagtacgcagctctcttggtggtgtctgagaaatggagcattaagccctcagtc

SEQ ID NO: 383 - DNA, 484 bp, Homo sapiens
ctactcgtctatatactcaattgagtaatttaggttcaggatcacaactaatttagattcataatcacagtccagttttcttttgttttttttgagacggagtctcgctctgtcgcccaggctggagtgcagcggcgcgatctcggctcactgcaagctccacctcccaggttcacgccattctcctgcctcagcctccagagtagctgggactacaggtgcccgccaccacgcccggctaattttttttgtatttttagtagagacggggtttcaccgtgtcagccaggatggtctcaatctcctgacctcgtgctccgcccgtctcggcctcccaaagtgctgggattacagccgtgagccactgcgcccggtccagtttttttttatctatcatgttcacaaagtaaaagtttactttctccttaaattaaaagattgagtaacctctaaagtttcatcctgctctaatatgcagttaaaa

SEQ ID NO: 384 - DNA, 638 bp, Homo sapiens
tgtcagagagactgggtccatatctataggcacaaaataaatagatctttactgtgccaatccatatgctttgtgctttggcagcctgagcagtagattgtcattcagctgacgtggccccatgcagtttttactaatccagaggacagctagaaggaccaggcctgcccagaccaggctcacaggaatcctgatggaagcctgaatgtgccctccttctcgacggcgacactttgtctgctgggcagccctgggaccttgctccttgtctttgctgcaacatgcaggttccggcgatttccgagtggaacctttctcccacagtcaggactcaatatagtcaggatgcactagcacagctgtttctcagagccacatcctcagcctccacagcaaaggagactttatttccaaaccagtaacagcccctttttcccccttagtaatctctgtgtttttactggctacataagcattcactttgaggtgccaacttttctctctttcttttccccaatatggatgaaaataataaatgaaaaattttgctctcattaaccagccactgtgtctttagtagtttactggctcccttcctggcctaagagcaacgctttttgcctttgatgcagcaccct

SEQ ID NO: 385 - DNA, 267 bp, Homo sapiens
aaaaagcattatcttcaaatatgaaagattaatttgtatctactgtaaatatgtattaccagccttatctgcatttatacacactgtgtgtgtacctcagtgaccttttataaaccggaaaaatggttgatttaataatttgttatgtaaatacaaagttgtctataaattggaaaatttgatgccagatggcttcataatatacaaatgtgttttgtaacatcatgcctttatggattaagtataaatacactggattgtctatgt

SEQ ID NO: 386 - DNA, 425 bp, Homo sapiens
cccagctacttgggtggctgaggggcagagattgcagtgaattgacattgaaccactgctccagcctgggtgacagagcaaaactctgtccctcccccgccccccaaaaaaacaaagaaaagataaagctcattaaaaaaacaactatgaactaattctcttatgaatatagatggagaaattttgaacaaaatactaaccagttggatccagcaatatataaaaaggattatacaagtgggatttatcccagaaatgcaaagtagatttagcattgaaaataaattagtgtaatataccacagcaatagaataatcaccatgtgatcatctcaaaagacacacaaaaattatgtggtacaattcaatactctttcatgacgaaaactctcaatatgctaggcatagaaaataacttcctaaact

SEQ ID NO: 387 - DNA, 465 bp, Homo sapiens
agtctgccccaggagttgcaccaaggggtgggactgagctgggtctgctgaggaagctgtgccagtgaaggggcagcatgccaagccaagaagccgtgggtgcagagcctcatcgcagtgggagctggcctgtcgggaccagcatgggctctggagggccagtgtgtgggcatggaggagttttggacaagctattttaacctgcgtaatgctcacttatctttggccaagtgggggcacttcctcacgaggtcagcatgagaattaaatgttatagttcatagtagctagtcactaaatgtttatttttgaaaaatagatgggtgaatttaaaaggagatgacaaccaggcatggtggcacatggctttaataccagctacttgagaggctgagggaggagaatcacttgagcccaagagttcaaatccagccagagcaacacagtgagaccttgtctctttaa

SEQ ID NO: 388 - DNA, 350 bp, Homo sapiens
tgggtttaggcattcttttgggtcccgtccagcaatagcacccaactaaaacatgcttttcttatttctgggcctgcccatcctgacagaaatgcctcacaggtcagaaagacctgaaagtttccaaagctgcgataggcagtaacaccacctcttcccagtgctcctcctagactttgtgcaacacccaaactcaggcccacacaaaccgcaagccagagctaggtcatgctcacagtggcagagagtcatgggctggtcacaagtcctggcccagccacttgggccagccacacccacctccgtgaacctgtttactcatctgcaaattggcgacgatatgttcctca

SEQ ID NO: 389 - DNA, 617 bp, Homo sapiens
tgtttacccctaaggacattcagaatggaaggaaatctggttctagtatctatgacccactgactgctaggattgatgcaacagctgctcattatgtaagacttttgtcctcaattcttcattcctaaccaaaccagtaattcagaattgattaggacttttcttagcacatgaagcctctgctttaactaaaggcatatgaatagtggcaggtacctgctagaatatccaagcataaaacttcaatagaaggaactataatgaaatgcctaaaggaacttaaatatgcaaaatggaggaataaaatatagttcaggctacatttcacccaagtgacattatgccattacaaaagcattttattaaataagacaataaaagaagcagaaccttccatttggtaatcaataatcatacagatgtgagaaaagagacactagaggaaaatatagacaaatgatgatagtgacattatctgggtcatcttattttctcttttacactttgtttttcaaatatatgacaaatatttattttatcatcaagtaaagaaaacctacacattaacattcttctttctcctcttctgccccacccccaaaaaggtactaactcta

SEQ ID NO: 390 - DNA, 487 bp, Homo sapiens
gctacaaaatgtttctgatctagaaaaacactggcctttgacagacatatgttctcatagcatctgtatgtacatgtgctagactgcaagagatgatgctaggacaggcccccaaagtccagaccttgactgagctaagaggtcagcatcttgcctgtctccttcatcttctgcttcttcatcctagtggtctaccaccttctctcatttattttttctctccccagtctctcacattctccttttttttctacttaattttttctctttctgaaattcgtcatcatttgaaacagaagttagtctcttagttccatttatctagaaagtttagttgtttctatgttcagtgtatgttcatttcttctccaaggatgatacaccgcaggtatatgatagatatactttgtaaaatctttcaattgttcatgcttaattttaacagtaactaccaagaatgaaattcggctttaaggattgataacta

SEQ ID NO: 391 - DNA, 968 bp, Homo sapiens
gatatgaagagatcaaagaagaaatacaaatggccaacatgtagatactgttcggtccacttgtgattaaggaaatgcaagatcagaatatcttctatttaatttggaattattaaagtttatattagttttgaaatgtttagttttgaaaatataggagaaagctttctcctgtacctttgtacaaagaaataagagtggaacgtgtgtatgtggtttgcgtgggttgggaaatctacctactacatgattgatggccttgctcccaggaagtagtgatgtggatctgagtgagtatgggtgggagcattttaattttgtaattctaatttcaaaagagatttttattttattatttttttgagacggagtctcactctgttgcccaggctggagtgcagtggcatgatctcggcttactgccacctctgcctccagggttcaaggtgatagaagagatttttttgaaaaaacagtgaactaattgtttactaggccccattttaattcagtcagtgttaagagttcaagcatcaagacaatctagtttatgttcaatgtaaattttctagttgctagaaatatttggatataatacagtcctttgctagaactgacattttaatggtgggaaaaactgtcagcctttagagatgccttttttcaagtttccgtgatactaaagttcccagctggtaacaaatgtatctgcttccttgagtttcaatgtccaggcctctttaaagtattcaggtatgcaaagacaggattatgcaagtttcttttagttggacaacctttattgatgaatttcttaggtttctgtggtagtgttgttagattaaatacagtcattccctcttgtctagtttcgttttatgtgatttcgctcttatggtttcacttaccccatggttcgaaagtattaaatgaaataaacaattcctgagttttaaattggaaaaaat

SEQ ID NO: 392 - DNA, 780 bp, Homo sapiens
aagctgcagactggtgaccgccctcagatggtgtcctccctcattgttgtcttagtaaagatgtgttcctgttagcaagctcactcagtactctatagcttatgttgtagttccatcatagtgcagctagctcatcttgccaggggtgttcagaacttaatctctttgaaagttgtccttggtggaaataaaaacattatctcctttttactcttgttggaaactcaagtttgctgcggggggaagggtggcagggtgtgaggtatttcaggtgcagtattaatattatgtcttatgaaatagcatcagccaacacgaacacactcaggaattatatctctcaaaagacagaaggcaaaagggagggactaaaatctaccttgcatgttaagtaaaagcattaacattctagtgagatgacaaagttttgatagcgattatctaaagccaaagaaaagaatctgcctggtagtaaagttgggtttttttggtttggttttgttttttttttgagactgagtcttcctctatcccccaggctggaccgcaatggcacaatttcggctcactgaaaccttcgcctcccaggttcaagcaattctcctgcctcagcctcctgagtagctgaagttgcaggcacctgccaccatgcctggctaatttttgtatttttagtagagacgggtttcaccatgttggcgaggctgatctcgaactcctgacctcaactgatccgtctgcctcagcctcccgaagtgttgggattacaggcatgagcca

SEQ ID NO: 393 - DNA, 535 bp, Homo sapiens
agagctagcaccatgagcttcaataccctgtagactatcttatcgaaacccgtcatttacaaacgcagaaaaatgaggcccagagaagaagtggtccaaggacacacagctcacctggagcagagtcaggaccgtccccctctcacaaatcccaggaatctttccactactacactaagctgcttcaacctttgtgtgagtgccacagtcacctgagatgatggcaggaatgaatcagtgttggaaaccctatacaaagtgaatggagagcaacagaagagtcggcaacagaagggtccccagggcagtgtgctggtgcctgaaaatcttaccactcagaaagcagaagaattttttcagcagaagctcacctgagaattctcactgctaatgactcctcaaagatcagtggggtccttacattttggggaatcatcaacctcagagaaactgatgaaagctttgggatctttcttcttttttttttttttctgaggcggagtcttgctctgtcgcccaggctggagtgcagtgg

SEQ ID NO: 394 - DNA, 546 bp, Homo sapiens
gtctcaaaaaaaaaaaattaaaaattaaaaaaggaaccctgtagactatcttatcgaaacccgtcatttacaaacgcagaaaaatgaggcccagagaagaagtggtccaaggacacacagctcacctggagcagagtcaggaccgtccccctctcacaaatcccaggaatctttccactactacactaagctgcttcaacctttgtgtgagtgccacagtcacctgagatgatggcaggaatgaatcagtgttggaaaccctatacaaagtgaatggagagcaacagaagagtcggcaacagaagggtccccagggcagtgtgctggtgcctgaaaatcttaccactcagaaagcagaagaattttttcagcagaagctcacctgagaattctcactgctaatgactcctcaaagatcagtggggtccttacattttggggaatcatcaacctcagagaaactgatgaaagctttgggatctttcttcttttttttttttttctgaggcggagtcttgctctgtcgcccaggctggagtgcagtgg

SEQ ID NO: 395 - DNA, 450 bp, Homo sapiens
ccttgcttatataaaacaggttgcagtaaagaagccaacccaaacccaccaaaaccaagttggccacaagagtggcctctggtcctcctcactgctacactcccaacagtgccatgacagtttacaaatgccatggcaacatcagggagttaccccatgtggtctaaaaaggggaggcgtgagtaaactaccctttgtttagcatattatcaagaaataaccataaaaatgggcaacaagcagccctctgggtttctctgtctgtagagtggcctttctttcattcctttactttcctaataaacttgctttcactatactctacggactcaccctgaattctttcttgtgtgaaatctaagaaccctctctaggggtctggattggtatccatttccagtaacaatactacttacctttcttgatggttataaacactaaatatgttgg

SEQ ID NO: 396 - DNA, 385 bp, Homo sapiens
acctgggaggcagaggttgcagtgagccgagatggtgccactacactccagcctgagtgacagagtgagactccatctaaaaaacaacaacaacaacaaaattatgcaaccagtttatgtccaaaaatggctatcattaaagtactaagatttctcaaaataaagtggtgatattttttggtgtttaatagcaattcacatgattttatcaaaatagtatttaagtcaaaatgttggtgctagaagtgattttaaaaatcctaatcaggccgggcgcggtggctcactcctgtagtcccagcactttgggagactgaggtgggtggatcacgaggtcaggagatcaaggccatcctgtccaacatagtgaaacctcatctctact

SEQ ID NO: 397 - DNA, 469 bp, Homo sapiens
aatatttggtgctttttggaatatctagaacacatggcaccccaccttgcagaatagtttgttcctggttgaaggctgtctggaaaagaatcagctaatcctgcttagaaggttaatgcagtgcaaagaaagagagcactgaggtgagaccaggaaagcctgtgtatccagtgatagcaagggcattctgcaggatattgcagcattgagatcttttcacaccccttatttagttgatccaaatgaatttgtggatcctttttttcccaagcaaggaaactaggacttgaagagtgactcttggctgctttaaggccaaatactgtattttaataagttctagaaccaaggctaggttccaggtcttctgattttctagaattttttctagaattgtttttcttttccctgctatgccatccacttagtggcaaggtagttaacctatctccactgtagtttcttctga

SEQ ID NO: 398 - DNA, 474 bp, Homo sapiens
tgactaaagatagatcattggtgtcctcttccctgaagagctttaaaaatagaagccactcccttgtctagaatgatttaaagttcattccttccagtatagttaattagctccgataccatttatatttatcttattatttaattgctattgatttacatattgtcaagaagtttatagtgtatagtacctatgttggcaatgtgtagctaatgagaagcaacacttttaattattggtcattgaaactatcagggccaagggaaaacttcccctttgccctctgaagttttgttgaaaatgaccgacaagaggcagattaataggcaaaaagggcccggctcagtggctcatgcctgtaatcctagcacttttggaggccaaggtgtgtggatcgcttgagcccaggagttcaagaccagcctgggcaacatactgaaactccatctctacaaaattttaaaaaatcagccg

SEQ ID NO: 399 - DNA, 442 bp, Homo sapiens
atctccagaaaagttgtgaattagcttctcagtttgataatggagaaggcaaaatgactgcagaggcaattcacacatagactactattgatatatggcagtaattatgtgattgtgtatatacatatagatatctaaatatatatatatatacgtgtgtgtgtgtgtgtgcgcgtatctcaaagtgtagataaactttacccccaagcgaggcatgagagttattagtgttgatcatttgatagaatctagagcatcatctcatcctggtaacatattagaatcccttgggtagcctttaaaacatgccagtgcctgaactccacctgagaccaacaaaagccaagtatctgaaggtggggcctaggcactcatattctatatggccctaatgattctaatatacgagctgaaaccactggcctagtgaaaacacagaaag

SEQ ID NO: 400 - DNA, 478 bp, Homo sapiens
  misc_feature (457)..(457): n is a, c, g, or t
tttttttttttttttcaaatattctttatccatgtttggtcaaatcagaggatgcagaattgtggatacagagtgcctcctgtaacaatgttgacagtgaacccaggtctctttccaaaggctctttctatcacaataactgcctcttccatgtatcctacaaagcaaactaactacatctccatgttggttcagaatattaaccagaatgtacttcaaaaaaatccagttctaatgtagttagtatattgtaattatttgactgttgaataaattagaaaaaatatatctgtatattacctgtatatatgtgtgtatacatatatgtgtgtgtgtgtgtgtgtgtgtgtgtatctttgtttcataaaccctgtgatttggagaaagagtatgtgtcagagcttaggaaataccattccatataataatagccgtcgacgcggccgcgaatttagtngtagtaggcggccgctctaga

SEQ ID NO: 401 - DNA, 335 bp, Homo sapiens
  misc_feature (314)..(314): n is a, c, g, or t
tttttttttttttttcaaatattctttatccatgtttggtcaaatcagaggatgcagaattgtggatacagagtgcctcctgtaacaatgttgacagtgaacccaggtctctttccaaaggctctttctatcacaataactgcctcttccatgtatcctacaaagcaaactaactacatctccatgttggttcagaatattaaccagaatgtacttcaaaaaaatccagttctaatgtagttagtatattgtaattatttgactgttgaataaattagaaaaaatatatcgtcgacgcggccgcgaatttagtngtagtaggcggccgctctaga

SEQ ID NO: 402 - DNA, 381 bp, Homo sapiens
gcttccattacccttaggggaaaaaccccaaaatgaaaccttgggcatgtcttcatctcatactatgctcccctttgcacaaggcactttggtcccctgaccttctctcagaagtgttaagggaaccatgctcgtttctctccccattggagaattagtacagatttccctctgcaaaggaagctccttgtcacccagcatcatccccttcttagaatttccaggcatctttcaaaacaaagtcaaaaatcattgcttaccatccctccctagactaacctggccccctggagatgtggcttcagaacattctgtccttgctgagttggagcttcataattaattgtgaggtgtcttcctccgttggtggaatgtaaactc

SEQ ID NO: 403 - DNA, 378 bp, Homo sapiens
tctaaagctatgagaatgtatttgggggaagaacatgctcattggcaatattctactgtactctgaaacatactctagagtcaatgtctaaaacaggaaacaggtagtaacaaatgaaagaatctggtgtattagtaggcagcaaagcaagtgtagctttataatatataaatctgcccttgaggccaggcacggtggctcatgcctaatctgattatttttgtgaaagacttcaggtaaaacatagtgtatgcagtgatcactctcagctagcaaacttagagaaggctggcaatagtgacaagtgtagtttccatttactaattgatttactatgtgccaggcatggtggcagagctttttatgctatcttatcca

SEQ ID NO: 404 - DNA, 447 bp, Homo sapiens
tctccttctgttgaccaggctggtcttgaactcctggcctcatgagagtctcctgccttggtctcccaattcttttaactttttaaataaaagccattctgactggtgtatgatgacatctcaatgtggttttaatttgcatgctgataattggtgatgttgagcattaaaaaatatattttaaaaggcctttgatatgtctccagttccagtcacggacttccatcacacgataaatcctaacaaagagaaatttggctgagcccagtaaatgcaggaactatgagagataatatttttaaatgttattttaatgcaactaaatttagagtggtttgctatgcagcaatagataaaaggagcagtcctgaaagcaaactaattttgtttgtaccttttctctctctctcactatgttgcttttttttgcaaagttggccagtttat

SEQ ID NO: 405 - DNA, 586 bp, Homo sapiens
gatgaataacaggataacacgttgttacattgtcacaactcctgatccaggaattgatggctaagatattcgtaattcttatccttttcagttgtaacttattcctatttgtcagcattcaggttattagcggctgctggcgaagtccttgagaaataaactgcacactggatggtgggggtagtgtaggaaaatggaggggaaggaagtaaagtttcaaattaagcctgaacagcaaagttcccctgagaaggccacctggattctatcagaaactcgaatgtccatcttgcaaaacttccttgcccaaaccccacccctggagtcacaacccacccttgaccaatagattcatttcactgagggaggcaaagggctggtcaatagattcatttcactgggagaggcaaagggctgggggccagagaggagaagtaaaaagccacacatgaagcagcaatgcaggcatgcttctggctcatctgtgatcaccaggaaactcccagatctgacactgtagtgcatttcactgctgacaagaaggctgctgccaccagcctgtgaagcaaggttaaggtgagaaggc

SEQ ID NO: 406 - DNA, 338 bp, Homo sapiens
aatacacctcgtaattttcatttttaagtttacaggcctacttcactttgaaaatgaaaaacaactcacaaaaaaccagatcttgctcagattaatattggtctaaatttagaatttctcctacaacaggaactttacgttaaatgcatccaaatctttatttatcacacaccacagtataatatagataaaaagtacaacaaacttagatttaaaaaaccaaatgtccgaaggttaagttacacaacaagttaaatatgagagctcactggagaaaatgaatctttacaaacttcccctaagtcagaacgctttcagaatataacttctttattttg

SEQ ID NO: 407 - DNA, 1075 bp, Homo sapiens
aaaaaaagatggcatttcaatatgccaaaccacagatatgatctaaggctagatttgcatgtaataatgaaagtggccaccgtgtgtaatgtgagtcaggcccttctaagcactttacttgcgaagtccaagctattactacgttcttctgaggcagagcccattaaagctcccacttagccagatatgttcctgagttgccacttcatggttaagtgctgccccaagtaccccaggtgcctggccactgtcctggcagtggcctttgccccttctggatacccaccagcctctcatgattcacaaggggccagcagggcttcttcagttccagctctagccctgaggctggcatgtactctgattgttcagtgccttggtttcttcctgcggctataacaaaataccttagtgtaatttataaagaaaatgaacgtattgttcagagttctggaggctgggtcgtttaagatcaaggtgccagcagatcccgtatttggtgaggactgttctcaccttccacgatggcgccttcttgctatgtcctcacgtggtggaaggaacaaggcagttctcttcaacctcttttataagggcactcatcccatttatgagggtggtgctctcatgactttatcactcccccaaaggccccacctcttaatactgtcaaattggatatcaggctccagtaatacaaattttggggggatactgccattcagatcatagcactacccatgtcatgctggtggttacatatttttcaaagatgcctgggtactctttttaatcagaaactgtggtacagagcaagaattgaacctgggcaggtgggctccagagtttgtactgtccctttgccctcaggttcagaaacccacatgagaactgtgcatttcctctggggagagggagttggaacaagagatgcagctgaagctttagcagaattggatgtttacggccaggtataatcatctgtaatcccagcactttgggaggccgaggctggaggattgcttgagcccagaagttcaaaaccagcctgggcaacatagcacctgtctctaca

SEQ ID NO: 408 - DNA, 1891 bp, Homo sapiens
ctcaacgctttatacttccccggcgccgtcgcctacgcacctcaacgctttatacttgtagaagtctctgttgggtacacgggtaacaaatgtgaaaaaatataattctgaggaagggagatacaagaaagctttcatttaaggtagttgacacctaagtcttgctctgtggttgacaggtaacaggtgtaagttgttcaagccagagattactagtttggcttcagaagacatttgtcaaggtagaagagtacaatttagaatctgtgtattcatgataataaaagctctggggaaaatggggacaaataaaaaatagaatcctaacagatactactgggtagagcaagaacatatggacagaaagataatgttggcagtctttggatatgtaatctatttaaaaatacaacttctaagtaagtgtcttatagagcagaagcaggaggatcacttgagctcaggagttcgagagcagcctgggcaacaataacgatacccccctttccacaaaaaatacaaaaattagctgggcatggtaacgcgcatgtccgtagttccagcttctcagggggctgagctgagaggatcacttgagccccggaagttgaagctgctgtgagccgtgatctcgtcactgcaccccagccagggtgacaaagtgagactctgtctcaaaaaaaacaaaaaaacacagaacttctattgtatacaagaaatgccataagcagtcaaaataaaaaataatttaaatttgtttacataatgacagataaaagattgtttgttttatgacgagaactcctaaaagctaacaagaagacaataggccgaaagaaaaataggcaaagagtggagcttgacagtacatagaagagtaaatcctcatagaagggccaggcgcagtggctcacgcctgtaatcccagctctttgggaggccgaggcaggtggatcattttaggccaggagctggaaaccaacatggtgaaaccctgtctctactaaaaataaaaaaaagtacccaggcatgtggcgggtgcctgtaatcccaactactcgggaggctgaggcaagagaatcgcttgaacccaggaggcagaggttgcagtgagccaaaattgcaccactgcactccagcctgggcagcagagtgagtgagactctgtctcaaaaaaaaaaaaatcctcatggaaggattacttctaaatcgaggccgggcatggtggttcacacctgtaatcctaccacattgggaggtcgaggcaggaggatctcctgaacccaggagttcaagagcagctgggcaacataacgatatcccgtctctaccaaaaattaaaaattagctgacacaaaaaaattagccaggtgtagtggcatgcaccttatagtttcagctactccagagggtgaagtgtgaggatcactggagcctggaaggttgaggcagcagtgagttatggttgcttcactgcacttcagcctaggtgacagtgagaccctgtctcaaaaaaaaaaatatctatcaaaatgaaaaatacacccttcaactcagcaactccccataattatatgggatttgaagcccatagaaataaaagcactagtgggtaaagatacatgtctattaatggcattatttatagtaggaaaaagtggaaaacaatgtgagaatactgtgagttggggaagacataacatctctaccacagaatatttgtagccattaaaaaggatatttgagctatagcgtttgactttgcataatttccaagaaattaaggaaagcttttaagaatggcatgtttaatatttaacttttggaatgagattatataagaattataacaactacttatagcttaatctgccaatctgtcaacatcctc

SEQ ID NO: 409 - DNA, 1945 bp, Homo sapiens
ctcaacgctttatacttccccggcgccgtcgcctacgcacctcaacgctttatacttgtagaagtctctgttgggtacacgggtaacaaatgtgaaaaaatataattctgaggaagggagatacaagaaagctttcatttaaggtagttgacacctaagtcttgctctgtggttgacaggtaacaggtgtaagttgttcaagccagagattactagtttggcttcagaagacatttgtcaaggtagaagagtacaatttagaatctgtgtattcatgataataaaagctctggggaaaatggggacaaataaaaaatagaatcctaacagatactactgggtagagcaagaacatatggacagaaagataatgttggcagtctttggatatgtaatctatttaaaaatacaacttctaagtaagtgtcttatagaaaagatagaggctgggtgtgatggctcatgccagcaatcccagcactttgggaggcagaagcaggaggatcacttgagctcaggagttcgagagcagcctgggcaacaataacgatacccccctttccacaaaaaatacaaaaattagctgggcatggtaacgcgcatgtccgtagttccagcttctcagggggctgagctgagaggatcacttgagccccggaagttgaagctgctgtgagccgtgatctcgtcactgcaccccagccagggtgacaaagtgagactctgtctcaaaaaaaacaaaaaaacacagaacttctattgtatacaagaaatgccataagcagtcaaaataaaaaataatttaaatttgtttacataatgacagataaaagattgtttgttttatgacgagaactcctaaaagctaacaagaagacaataggccgaaagaaaaataggcaaagagtggagcttgacagtacatagaagagtaaatcctcatagaagggccaggcgcagtggctcacgcctgtaatcccagctctttgggaggccgaggcaggtggatcattttaggccaggagctggaaaccaacatggtgaaaccctgtctctactaaaaataaaaaaaagtacccaggcatgtggcgggtgcctgtaatcccaactactcgggaggctgaggcaagagaatcgcttgaacccaggaggcagaggttgcagtgagccaaaattgcaccactgcactccagcctgggcagcagagtgagtgagactctgtctcaaaaaaaaaaaaatcctcatggaaggattacttctaaatcgaggccgggcatggtggttcacacctgtaatcctaccacattgggaggtcgaggcaggaggatctcctgaacccaggagttcaagagcagctgggcaacataacgatatcccgtctctaccaaaaattaaaaattagctgacacaaaaaaattagccaggtgtagtggcatgcaccttatagtttcagctactccagagggtgaagtgtgaggatcactggagcctggaaggttgaggcagcagtgagttatggttgcttcactgcacttcagcctaggtgacagtgagaccctgtctcaaaaaaaaaaatatctatcaaaatgaaaaatacacccttcaactcagcaactccccataattatatgggatttgaagcccatagaaataaaagcactagtgggtaaagatacatgtctattaatggcattatttatagtaggaaaaagtggaaaacaatgtgagaatactgtgagttggggaagacataacatctctaccacagaatatttgtagccattaaaaaggatatttgagctatagcgtttgactttgcataatttccaagaaattaaggaaagcttttaagaatggcatgtttaatatttaacttttggaatgagattatataagaattataacaactacttatagcttaatctgccaatctgtcaacatcctc

SEQ ID NO: 410 - DNA, 859 bp, Homo sapiens
tggccaagttatagtctgattctcatttatccaaggtagtgggcattaggatagcagaggtcaatgtcatccagtaagggcagtttcaccttgactgattggagaggtgtaatcctaccaggcagtggagctgtgatatttcactgtttgaaaagtagaaaaactgaggctgagagattaagtgccaggtccaagcaagtgagtgacaaaaccaggacaaaaggcagactccaaacaaatccctatcctactgctttgacggatcccatctcagaggtgctgtcagtgaaactgatcctctccagtgttgttctagccatctcaggaaagactgattaagccctggagagatcacaggaaggcagcagatgggagagagaagcaaccacagaaatcctgaacatgctgcagattctgtagtcaaattcccaactaacagctggacgttagtatcccttggggttggagacagggattcttagcttcagttttttctgttatgctgagtattctgcatttcaaaaacatagtaacttgtaatgcttctacaatttgtaaaatacaaaataactggctgggcgcggtggctcacgcctgtagtcccagcactttgagaggccaaggcgggcggatcacgaggtcaggagatcgagaccatcctggctaacacggtgaaaccccgtctctactaaaaatacaaaaaaaaaaagttagccaggtgaggtggcaggcgcctgtagtcccagctactcgggaggctgaggcaagagaatggtgtgaaccccagggggcggagcctgcagtgagccgagatcgcgccactgccctccagcctgggcgacagcgagactccatctca

SEQ ID NO: 411 - DNA, 1798 bp, Homo sapiens
agactgagaattaaatgagataactttgtattcaacagtaagtagttgaaaaacattacatattatgatgttgagtaaactacacattgggcactacgagaaagtaaaaagaaaatcaaataatcttaatactctactatggcaaatgaatagtatgctggaagtaaatgtaaggacatgctcagataggaaatttaggtagctggctcctgtgtaatgggctggagagagtggatcataaacaaaactattaagaaagctataataattcaggcaaactctatgtggcatagcaatacaggctgaactggagtgttgttcaacacaggttgaaatgcagtgtagaatggagactttctgtgcctagaaccatgagcttcggaaaatctaagccatagcttaggagataacacgctttaatcatcttctaccttcaccttaataatttaggggattctaagaaatcatgactcttctaggtaccattttatagataaaactgaggctcagagagcaaggccatcattgcattattaatggaggacactattcacactgcagtctatgaaaatgacaccttctggaacacaacaaaaataagtgatggctcccgaagttgtgcaccgcagcagccctgtcagaaaggttacaatgtaagggtagatagcagaattgatctctatctaaaaacttgtgcttttcccactataacatactatctcttaccatggtatcttatttatgggtatgtagcatacctagggttaaacactgaattaaaacaaagaaacaaatcaaacatatcccagatatgggtttttcataagaacttcataggcttattaaagtgaatttaatggaatcctgtaagcactagctacttaacaacaaattaaggtgcttgatatattcttaaaccattacttaatgggaaaaataagggtaaaacagatataagagcccaaccatttactttggacttgtccaaaacagataaggcgctttacaaaaaacaaaaacaaaaacaaaaaaacctcaaaggactaacacaaaaattaagatcataaatcaattttctgcagacatttcttgaattatcccaaaattttaaggtcaatttcccccccaaaatgtttttatcattgttatcttggcaaaaaatacctaatcttagtaagaagcacatatttaactagttatttaaatataaaaaaagatttaattcatatttatgccaagaacactacaatttacaaaagtttcatccaaactcttaccctatgtctacccacaccagagggaggaacatgtctttgtggagaggatttctttgagactctaaatatgctttgttcaggaaaggggaagatacaaaaatatagaacaaaaaagaatattggctcattgtacacaagagaggccagccattaagaattgttatcaatacaataaaagggaatacttggccagagatcctctagataagtagctaaaatgtgatcaaaaggagaaagaggaagaagcaaatacacaaacgttttatgggtattaataaaaataaagacatctctgaacaaatgataaaatcccttccctgaaaaatttcaaatgagattcacagaaatgcagaagcagaagaaactttagatttagaaacatctcatttgggctgggtgcagtggctcacgcctgtaatcctagcactttgggaggccgaggcaaatgaatcacctgaggacaggaattcaagaccggcctgggcaacatggtaaaaccccatctctactaaaaatacaaa

SEQ ID NO: 412 - DNA, 314 bp, Homo sapiens
ttatactcaaggaagcatgaattgcaaaggaacaagatgaaactttaggggttatggatacattgattattttaattgtaggatgacttcacagatgtagacatctcaaaactcatcaaagtacacactttatgtgcactttactgtacactacttatttctcagtaaagccattacattttttttaaaaaactccccaacagcaccatttatgcttgagtagaaatgtaatttcagcaaaacattaataatgtagctagtttgaattttattggtgtgggtaaagttttaataaatcccttgtttgagactga

SEQ ID NO: 413 - DNA, 687 bp, Homo sapiens
  misc_feature (678)..(678): n is a, c, g, or t
ccgtgtggggtagcatgggtttggctctgataggctgcgtggtcagatcagactttgacatatcactacccttccccgtagcagttttaaatgcagcacaggtgatttgggaagacttcctaaatgtataatatttctttttgaaaagaaacttcacctactcatacgtctatacacctctctctgtattgcatcttggaatctgtgaacaagcccatgtctcccgggaagcgctcttctatcccaactcccgtttcacaggctcctggagactgcatgaatacaaactcctctcaccattgggatcccagggaatttgcttccttgtcttttgttctgattagagttcatttaagcatcacacttttctttctggaaatgttcttaatttaaatttaactaagcttccctttcttccagtctggcagcttccccaacattcatgaatacaatttcataataatatgtctagaaatgaggagtatccagcaaggagttttactctgtttctttaaacataaagacttggcctaaagagtgttttaagcaatgctccgctgccggttgtctcctccccagttttgacccttggccctttctctgtttttcttttcttttctttttttttcttttcttttctttcgaagttttgctccagcctggtgacaaagtgagggnccgtctcca

SEQ ID NO: 414 - DNA, 354 bp, Homo sapiens
agctccacaagggcagggactgtgctgttttatttatttctgtgtttcctgcacccggcatagagtagcacaatagaattttgttcaggttgggcgcagtggctcatgcctataatctcaacactttgggaggctgaggctggaggatcttgagcccaggagttcaagaccagcctgggcaacatagtgagaccatgtctctacaaaaacaaaaaaaaagtaattgagtgcagtggtgcatgcctgtagttacagctacttgggaggctgaggtgaaaggatcacttgagcccgggtgttcaagcttgcagttagctatgatcataccattgtactccagcctgggcaacagag

SEQ ID NO: 415 - DNA, 482 bp, Homo sapiens
tttcttttgttacggacacccatcatgtatggctcctcatctgagccatcaccgctcccgaaacacatggggcggcagctgctgtgcctccttctcaattcttccacccccccacaccatcagaattcggatttctctccacgtggcgtctgcctctgtccccttccaggctggagcgacgtttccacgttcggatgctgcagcctctgcacctgcctcagacagacccaccagataccacctgtctcttcgtggcatttgggagatgcgtgggcggcctgccccccgaccgccgcccctgcccaccacatgctgggacaaggttctggctggatgtcagaatggatgggggtgggggcagccctggccgtgattagttgaatgaatggggtcacaacatcccttttcctgcccctacagtttgtgttgcatatttgtgtttaaagcctattaaaataaacttgagggactttctgcgatat

SEQ ID NO: 416 - DNA, 325 bp, Homo sapiens
atgacagatgttaagagttttgtaaagtatatatcagtagctattattagtatcatttagctattaagttcttctaagaaccgtacaaggatatgaatgtcctgccaggaagtgactaatagaaagattatgccagtctctccccaacctggccatacaagtgaaggctcacttaggcaccgaggattatagccacagaggggatgttcaagaagaaccacgatgcaatgtcaatgtcctgaagatcctgaacactttcctcttcatcaccaaaacactgtacggctccagcctgggagacagagcaagactctgtctcaaaaaa

SEQ ID NO: 417 - DNA, 326 bp, Homo sapiens
tgaaccacccctgagaaaatgtgcagtgaccctgccagaagaagtagcttcaaccaacagagcaatgaaaattaaccatcttcatagggattgacctaaagcataggcaacaacagaattacatataaacaaaagtagaaaatacatgcaatcaagaatatgccattcacaatcaattgcctgaaagttttaaatttcatatgaacttttactttttgatttctaaattatttttcaaaattgtttatgctttaatcttatttgttaggatgaactaacgtattctactaaatttctcaaccaagataataaaatatgatctgtgc

SEQ ID NO: 418 - DNA, 384 bp, Homo sapiens
ctgggtatgttctgccagtgtgcaaggtggggccctccaggccctctcctcccctccctttttctagatgccatttcctgctaaagccacctctcccatggctataaactaccttcaatcagggcacgaactctagagcacaagagaacctgagattctttaaaacattctagtttaatgtcctcgttttacagataaagaaaatgggtacggccaagaccatagacctagtgattgtcagatgaacaattagacccacagaaccatccaagctacagaggacgcattctgccttcccttggatcctgtggtttgaggatggaggtctaggaccgtggcaggctttttgtcccatgagggaaggccatggagctgaggaagggg

SEQ ID NO: 419 - DNA, 376 bp, Homo sapiens
gcctcctgtcaatggctcactgcactgccacatgtgggacagggcaggagcagagccacgcgggtcctctgccggtgctggtgcaggtcccaggtctgagcttgtattcccgactgtgccgccttcctcctgatttgccatgtgatttttaaaaagcatggtcccttttttaaagttgtttttgaatcttttgagtctccttttgcagcaattttaggcctgtagaaaatctgccagtttagtccaaaaagtggtctccctcattcacctgagagccggctgccagcctcatgtcccgtcaccctgatgattttcatgtgctttacgaccatcggggcattgtcctgcacggccaccatgcagtcatggcactagg

SEQ ID NO: 420 - DNA, 458 bp, Homo sapiens
cgtgagccaccaagcccggccggcagtggtggtttaaaaagcatcccagtaagggcacttatatgcagcaaggatttctcctgctgcttatcatgctatctgtctcactgagatagatagacagtagagaaggaagagaaatatacatagaaccacaatggttggtagctttgatgggattaaaaaaatagattctaaaatagtaaaacataaaatgaatagcagatcttggcaacagagaggaaaaccagtgacatttgtcaaagatagaaaactttttggaggggaggcatttaaatattaactgaaagcataccaatctctacagcttaagtttttgggaggaaggggagacacagactacattcaatcaagccagatctttttgcccttgtcttgcatcatccatgtctatatccctgtataataatcatgaaagtaagccagaagtaaaaaaa

SEQ ID NO: 421 - DNA, 425 bp, Homo sapiens
ctgccttttctgatatattttttaaggaaatcctgttttgttagctacaataacttcatcattatccagggtgctccctttcattgtccctgtctggggaaagtcgttccacggctgacagacagaatcaagccctataaagcatttgttcagtccctgggcagtcactggagaattccttaacattgccctgcttgttctgatctcctccccacccacggcacttccatcggtccctagctgatcctcttcccgttaggtcattgcaatcccagcccacaaaacgcccacattcccaatgctcttgttcctgctgacgaagataagaaatgtgtcctgaaccggaagagctgccaggggagacacaagagggcctcggttcccctggtgctcacccaccaccatgcccacccaccaagacacac

SEQ ID NO: 422 - DNA, 505 bp, Homo sapiens
gataatttaaaagactcttgtggtgatggaattattctgtatcttgactgcatcaatgtcaacatcctagttgtgatattgttccatagctttgcaagttgttaccactggggaaaacttagaaaaggctccacagggtctcattgtacgatgtcttataattgcatatgaatctacaattaactcaacaattttttaaaaagctaaaatgattttttgtaactcagaattcataatacttctacttgaaaacattttgttcaagtcaggtgaagtctccaaattgctggtttttacttcattgttatccaatatcatcagcaaatctcacatctcactgatttctcactttacagctcagtttgctacaaataatgcaattcacctagtagacttacaatagcactccacattgtctcgtcctatcttcctatttgctattctccaccattgttttactcaggtgagcatcacaccatggctagttacctaccaacctgccaac

SEQ ID NO: 423 - DNA, 392 bp, Homo sapiens
gatgaggcatcaaacctgatcgttccctgacctcggcaagcaccattgaaaaaaagggaccgatgtaagacagaatggagccaggcaccgtggctcacacttgtgatcccagtgcttcaggaaaccaaggtgagaggattgcttgaggccaggaggtcaagatcatcctggacaaaatagtgagactttgcctctacaaaaaaatgaaaaacaattagctgggcgtggtggttcacacctgtaggccagctactcaggaggctgaggcaggaggatcgctggagcccaggagttcaacgctgcagtgagctatgatcacacctctgcactctaacctgggcaatagagcaagactcccatctcaaaaaactaaaattaaaaataaataaatt

SEQ ID NO: 424 - DNA, 380 bp, Homo sapiens
acaatttaatttagaatatactaaaaacaacaaagatagttgaagttcattcccacctggttttacactcataggccatagcgtgtcatgcatctgacactgaattcctctaagaagatgaagtcagtgcctcctccttattgcactctgcttataattgtggttatgtgtaccttaatcaaatgacagatgaaatgtatcttgaaagcagggcttatttctaatttacttgaccagctttcagtctctttacagtaccatgcaaagtaccatgaatgcttgcaaatgaattttaattactcagaacatggaagtgagatgtcagcctgaccaaatttacatacccttataaccgtgttggcaatctgtgctttacttac

SEQ ID NO: 425 - DNA, 608 bp, Homo sapiens
agccaactgctcctgcgccgggcggggtcgtcgccgccagcggctccgagcgccggaagggccaggtcgcagggctcctggagctgcaggcggcgggaggggctacaaatgcttgactcagtgatgcagaacctttcagagttagctggaagccacagccctgcctcttgatgcagcctggatccagccggtgtgaagaggagaccccttccctcttgtggggtttggatcctgtgtttctagcctttgcaaaactctacatcagggatatcctggacatgaaggagtcccgccaggtgccaggtgtatttttgtacaatggacatccaataaaacaggtagatgtcttgggaactgtcattggagtgagagaaagagatgctttctacagttatggagtggatgacagcactggagttataaactgcatctgctggaaaaagttgaatactgagtctgtatcagctgctccaagtgcagcaagagagctcagcttaacctcacaacttaagaagctacaagagaccattgagcagtacagagaagagcgagagattcatgccaccgcttactataaagtggacgacccagtgtggaacttctgcggg

SEQ ID NO: 426 - DNA, 451 bp, Homo sapiens
ctatcacagagttactccacagtgtaaaatcaggtatgtgtatcagcagttatgcattttcatcgaagatcatgaattcacccattcattaaaaaaacctatctatgtaaccagagaagacaaagacctgcacagaaagatccaccggatcattcagcaggactgccagaaaccaaatcacatggagaagggctgtcacttcctgcacatcttggcctgtgctcgcctgagcatccgcccgggcctgagcgaggctgtgctgcagcaagttctggagctcctggaggaccactactacacagcgttctgagcagagacacgcagaccagctgaggaggacaaagataaggtggcattcacccccaggctctgactttcagcatcatgcaggggcttatctgtctggaggcagttacctcataataaactataaaatatagtcatcttggga

SEQ ID NO: 427 - DNA, 365 bp, Homo sapiens
agccaactgctcctgcgccgggcggggtcgtcgccgccagcggctccgagcgccggaagggccaggtcgcagggctcctggagctgcaggcggcgggaggggctacaaatgcttgactcagtgatgcagaacctttcagagttagctggaagccacagccctgcctcttgatgcagcctggatccagccggtgtgaagaggagaccccttccctcttgtggggtttggatcctgtgtttctagcctttgcaaaactctacatcagggatatcctggacatgaaggagtcccgccaggtgccaggtgtatttttgtacaatggacatcctctacagttatggagtggatgacagcactggagtttt

SEQ ID NO: 428 - DNA, 1418 bp, Homo sapiens
agccaactgctcctgcgccgggcggggtcgtcgccgccagcggctccgagcgccggaagggccaggtcgcagggctcctggagctgcaggcggcgggaggggctacaaatgcttgactcagtgatgcagaacctttcagagttagctggaagccacagccctgcctcttgatgcagcctggatccagccggtgtgaagaggagaccccttccctcttgtggggtttggatcctgtgtttctagcctttgcaaaactctacatcagggatatcctggacatgaaggagtcccgccaggtgccaggtgtatttttgtacaatggacatccaataaaacaggtagatgtcttgggaactgtcattggagtgagagaaagagatgctttctacagttatggagtggatgacagcactggagttataaactgcatctgctggaaaaagttgaatactgagtctgtatcagctgctccaagtgcagcaagagagctcagcttaacctcacaacttaagaagctacaagagaccattgagcagaaaacaaagatagagatcggggacacgatccgagtcagaggcagtatccgcacatacagagaagagcgagagattcatgccaccgcttactataaagtggacgacccagtgtggaacattcaaattgcaaggatgcttgagctgcccactatctacaggaaagtttatgaccagccttttcacagctcagccctagagaaagaagaggcactaagcaatccaggcgccctggacctccccagtctcacgagtttgctgagtgaaaaagccaaagaattcctcatggagaacagagtgcagagcttttaccagcaggagctggaaatggtggagtctttgctgtcccttgccaatcagcctgtgattcacagtgcctgctccgaccaagtgaattttaagaaggacaccacttccaaggcaattcatagtatatttaagaatgctatacaactgctgcaggaaaaaggacttgttttccagaaagatgatggttttgataacctatactatgtaaccagagaagacaaagacctgcacagaaagatccaccggatcattcagcaggactgccagaaaccaaatcacatggagaagggctgtcacttcctgcacatcttggcctgtgctcgcctgagcatccgcccgggcctgagcgaggctgtgctgcagcaagttctggagctcctggaggaccagagtgacattgtcagcacaatggagcactactacacagcgttctgagcagagacacgcagaccagctgaggaggacaaagataaggtggcattcacccccaggctctgactttcagcatcatgcaggggcttatctgtctggaggcagttacctcataataaactataaaatatagtcatcttggga

SEQ ID NO: 429 - DNA, 1422 bp, Homo sapiens
cctgcgttcacccctcctggagtcctggacgcccacctgggagcagcgtcagggccgtgccactttgacccacgttaaacgcattgcatcctcatttctgtgtcccatctagatgcttgactcagtgatgcagaacctttcagagttagctggaagccacagccctgcctcttgatgcagcctggatccagccggtgtgaagaggagaccccttccctcttgtggggtttggatcctgtgtttctagcctttgcaaaactctacatcagggatatcctggacatgaaggagtcccgccaggtgccaggtgtatttttgtacaatggacatccaataaaacaggtagatgtcttgggaactgtcattggagtgagagaaagagatgctttctacagttatggagtggatgacagcactggagttataaactgcatctgctggaaaaagttgaatactgagtctgtatcagctgctccaagtgcagcaagagagctcagcttaacctcacaacttaagaagctacaagagaccattgagcagaaaacaaagatagagatcggggacacgatccgagtcagaggcagtatccgcacatacagagaagagcgagagattcatgccaccgcttactataaagtggacgacccagtgtggaacattcaaattgcaaggatgcttgagctgcccactatctacaggaaagtttatgaccagccttttcacagctcagccctagagaaagaagaggcactaagcaatccaggcgccctggacctccccagtctcacgagtttgctgagtgaaaaagccaaagaattcctcatggagaacagagtgcagagcttttaccagcaggagctggaaatggtggagtctttgctgtcccttgccaatcagcctgtgattcacagtgcctgctccgaccaagtgaattttaagaaggacaccacttccaaggcaattcatagtatatttaagaatgctatacaactgctgcaggaaaaaggacttgttttccagaaagatgatggttttgataacctatactatgtaaccagagaagacaaagacctgcacagaaagatccaccggatcattcagcaggactgccagaaaccaaatcacatggagaagggctgtcacttcctgcacatcttggcctgtgctcgcctgagcatccgcccgggcctgagcgaggctgtgctgcagcaagttctggagctcctggaggaccagagtgacattgtcagcacaatggagcactactacacagcgttctgagcagagacacgcagaccagctgaggaggacaaagataaggtggcattcacccccaggctctgactttcagcatcatgcaggggcttatctgtctggaggcagttacctcataataaactataaaatatagtcatcttggga

SEQ ID NO: 430 - DNA, 2240 bp, Homo sapiens
agccaactgctcctgcgccgggcggggtcgtcgccgccagcggctccgagcgccggaagggccaggtcgcagggctcctggagctgcaggcggcgggaggggctacaaatgcttgactcagtgatgcagaacctttcagagttagctggaagccacagccctgcctcttgatgcagcctggatccagccggtgtgaagaggagaccccttccctcttgtggggtttggatcctgtgtttctagcctttgcaaaactctacatcagggatatcctggacatgaaggagtcccgccaggtgccaggtgtatttttgtacaatggacatccaataaaacaggtagatgtcttgggaactgtcattggagtgagagaaagagatgctttctacagttatggagtggatgacagcactggagttataaactgcatctgctggaaaaagttgaatactgagtctgtatcagctgctccaagtgcagcaagagagctcagcttaacctcacaacttaagaagctacaagagaccattgagcagaaaacaaagatagagatcggggacacgatccgagtcagaggcagtatccgcacatacagagaagagcgagagattcatgccaccgcttactataaagtggacgacccagtgtggaacattcaaattgcaaggatgcttgagctgcccactatctacaggaaagtttatgaccagccttttcacagctcagccctagagaaagaagaggcactaagcaatccaggcgccctggacctccccagtctcacgagtttgctgagtgaaaaagccaaagaattcctcatggagaacagagtgcagagcttttaccagcaggagctggaaatggtggagtctttgctgtcccttgccaatcagcctgtgattcacagtgcctgctccgaccaagtgaattttaagaaggacaccacttccaaggcaattcatagtatatttaagaatgctatacaactgctgcaggaaaaaggacttgttttccagaaagatgatggttttgataacctatactatgtaaccagagaagacaaagacctgcacagaaagatccaccggatcattcagcaggactgccagaaaccaaatcacatggagaagggctgtcacttcctgcacatcttggcctgtgctcgcctgagcatccgcccgggcctgagcgaggctgtgctgcagcaagttctggagctcctggaggaccagagtgacattgtcagcacaatggagcactactacacagcgttctgagcagagacacgcagaccagctgaggaggacaaagataaggtggcattcacccccaggctctgactttcagcatcatgcaggggcttatctgtctggaggcagttacctcataataaactataaaatatagtcatcttgggaatgggatttggcataaatgttgttggctcccttctgtccactatgtccttggtgtacaatgactttgatctcagccatgacacaacaagaaaaccctccctgttgagctcctggctggactgtgcgttgttcgcagagcagaatggggaggaaacagtgttggcagcttaactgatgtgtgtggttggagtctcttccatggcaaagggacaccacagggtagtgaacattcaggaactgaggggcatatggcctgatcacacagttctaagcttttcaaaacttcaggttatcagagaccttcctgtgggcctctcttgctggctaagaaccggtttaggggagtagttctccctggatgagtgcttacagtttctgtggctcagttaccagcagtggggttgagacctgggtcgatgctctttacaggcctgcccagagatgggaataaacagggatccacagcgtgactatgtgtttgtcattttccttttatttccttgggaatcgaaaggtgtcccagtacatttccctgcacttacagaggtgcatgactaaatacattgtccctcgatgcccctgaagatcacggaggcagtcagccaattgcctggcaggtggtagatgttattttcagggttgccgctgagtgtgcaggatgtgctgacaccatccagacaaagactcggtatgtgcccagacaggtgatggagtcatgcttttgctcagaatgacaaggtaaaggaaaaacatctgaggtatgttgtaggcctgttctgacagcaaaatgacaaatccagccagcaaaaataaagtgtggag

SEQ ID NO: 431 - DNA, 1431 bp, Homo sapiens
tctcattcttcttgggcgctggacaagaattcaaccggtgtgtaagccagactcggcccgggcagtctcaaactcctgactccttatataatttctacaaaaattataaagctgtttcccactccccaccccacattcatgtaacctttcagagttagctggaagccacagccctgcctcttgatgcagcctggatccagccggtgtgaagaggagaccccttccctcttgtggggtttggatcctgtgtttctagcctttgcaaaactctacatcagggatatcctggacatgaaggagtcccgccaggtgccaggtgtatttttgtacaatggacatccaataaaacaggtagatgtcttgggaactgtcattggagtgagagaaagagatgctttctacagttatggagtggatgacagcactggagttataaactgcatctgctggaaaaagttgaatactgagtctgtatcagctgctccaagtgcagcaagagagctcagcttaacctcacaacttaagaagctacaagagaccattgagcagaaaacaaagatagagatcggggacacgatccgagtcagaggcagtatccgcacatacagagaagagcgagagattcatgccaccgcttactataaagtggacgacccagtgtggaacattcaaattgcaaggatgcttgagctgcccactatctacaggaaagtttatgaccagccttttcacagctcagccctagagaaagaagaggcactaagcaatccaggcgccctggacctccccagtctcacgagtttgctgagtgaaaaagccaaagaattcctcatggagaacagagtgcagagcttttaccagcaggagctggaaatggtggagtctttgctgtcccttgccaatcagcctgtgattcacagtgcctgctccgaccaagtgaattttaagaaggacaccacttccaaggcaattcatagtatatttaagaatgctatacaactgctgcaggaaaaaggacttgttttccagaaagatgatggttttgataacctatactatgtaaccagagaagacaaagacctgcacagaaagatccaccggatcattcagcaggactgccagaaaccaaatcacatggagaagggctgtcacttcctgcacatcttggcctgtgctcgcctgagcatccgcccgggcctgagcgaggctgtgctgcagcaagttctggagctcctggaggaccagagtgacattgtcagcacaatggagcactactacacagcgttctgagcagagacacgcagaccagctgaggaggacaaagataaggtggcattcacccccaggctctgactttcagcatcatgcaggggcttatctgtctggaggcagttacctcataataaactataaaatatagtcatcttggga

SEQ ID NO: 432 - DNA, 1452 bp, Homo sapiens
agccaactgctcctgcgccgggcggggtcgtcgccgccagcggctccgagcgccggaagggccaggtcgcagggctcctggagctgcaggcggcgggaggggctacaaatgcttgactcagtgatgcagaacctttcagagttagctggaagccacagccctgcctcttgatgcagcctggatccagccggtgtgaagaggagaccccttccctcttgtggggtttggatcctgtgtttctagcctttgcaaaactctacatcagggatatcctggacatgaaggagtcccgccaggtgccaggtgtatttttgtacaatggacatccaataaaacaggtagatgtcttgggaactgtcattggagtgagagaaagagatgctttctacagttatggagtggatgacagcactggagttataaactgcatctgctggaaaaagttgaatactgagtctgtatcagctgctccaagtgcagcaagagagctcagcttaacctcacaacttaagaagctacaagagaccattgagcagaaaacaaagatagagatcggggacacgatccgagtcagaggcagtatccgcacatacagagaagagcgagagattcatgccaccgcttactataaagtggacgacccagtgtggaacattcaaattgcaaggatgcttgagctgcccactatctacaggaaagtttatgaccagccttttcacagctcagccctagagaaagaagaggcactaagcaatccaggcgccctggacctccccagtctcacgagtttgctgagtgaaaaagccaaagaattcctcatggagaacagagtgcagagcttttaccagcaggagctggaaatggtggagtctttgctgtcccttgccaatcagcctgtgattcacagtgcctgctccgaccaagtgaattttaagaaggacaccacttccaaggcaattcatagtatatttaagaatgctatacaactgctgcaggaaaaaggacttgttttccagaaagatgatggttttgataacctatactatgtaaccagagaagacaaagacctgcacagaaagatccaccggatcattcagcaggactgccagaaaccaaatcacatggagaagggctgtcacttcctgcacatcttggcctgtgctcgcctgagcatccgcccgggcctgagcgaggctgtgctgcagcaagttctggagctcctggaggaccactactacacagcgttctgagcagagacacgcagaccagctgaggaggacaaagataaggtggcattcacccccaggctctgactttcagcatcatgcaggggcttatctgtctggaggcagttacctcataataaactataaaatatagtcatcttgggaatgggatttggcataaatgttgttggctcccttctgtcaaaaataataaaaaaaaaacaaa

SEQ ID NO: 433 - DNA, 239 bp, Homo sapiens
aggttgaagttcagagtccctgagcagtggctccatgtcgccgtggtgacatcaggggcctgagaacaggtgtttctgttttgtttttgtgatcaggtagatcatgcatttctgactttaatgtgcataaagatcatctggggatctggtcagaatgcagatgccaagtcaggtatggagaggacagaggagggcctgacagttgtgtccacactcagccacctacctttttcctgcag

SEQ ID NO: 434 - DNA, 323 bp, Homo sapiens
ggtatggtacagtactgggacatgaacgagcagtttccccacaggaaggggaaatagaaaaacgcccaaaggaagtactgtaggtgagagagacttgagggttgttagagactgcttgaaaagagaatgctgcataggcgtagtttgaagttgagggtcttctgtccagggtaggctggcttgctgtacttggtgctggcaagtacctttaaaaggtattcattgggtattttcacaagcacatttcactcatgcaagttcgacctctggagcatagcaaaaagtgagtgatttcgtcccactgtttgactgagttgatatct

SEQ ID NO: 435 - DNA, 342 bp, Homo sapiens
gtttatttatacttgcattatattccaaagtatggaaatgttgtaatttatttgatattaattgatgagcactttatttccagtttttgttattcagaacactgctacaatgatattgttgctcatctgtcttttgtacaattatttaagaccccctatcctctcccttcaacctattgctcccctttaaatatgagaaaaggtgagtggttctgtgacaaagtaatgtatatgtttggattttttttttttttaccctttaaatacatggattagttcttataacatgttaatggtttatttttgttatttttaaaatataattttcctgcttccctttgt

SEQ ID NO: 436 - DNA, 442 bp, Homo sapiens
actcctggagggggtgtggggaccgtgggcacctcgggctcacgtagaaggagctgagacttcgtctctactcaggcaagtgcctgggaatatggcttttgtatagggacaggcttgacttcctcctgagtgtgtccacctgaggcaggaggtggcaggttggtgaggagggagaggtggggatggtgcagcctaaggcctggaagagcactggggagccgctgagggacagggtggaatcaggagctagagccctcttggctgcagagtgtacggctgaggccaccagccctgccagactgtggaatcctcacagttcaggaagcccaaggaagattggtgtttgagtcacttaaggaaggcctggtgtgcatggcaggaagaggctcctctccacccaggaaagcctgcagagctcggaccaagcgccagccccaggcgc

SEQ ID NO: 437 - DNA, 479 bp, Homo sapiens
cttggaggtgtgggcacgttaggtatttggggcatcctccagcctggtgtggctggagaatagtgtcttggggaaatgagtcaggggaatcagggaaagggctgaaaatgcactttgggtcagtagttgtttgagccccgtgctgtagggcagtctttttcaaagtgtggtccctgcaccagctacatcagcatcccctgggagcttgctagaatatgaaagcaaattcccaggtcctgccccagtcctactgaatcaaaagctctgaaggtgggtcctagtcactgtgtacagggcccccaagccctgtctgattcccatttatacccaagtttaaggacactgctgttgctagtggtgggctatgagactgaccattaacacaaactttgaagaatgcgtgatcccctgtgtttattagatatgacatttggctgcatttaatggaaatccaaatgcagtcactgaaccaattatag

SEQ ID NO: 438 - DNA, 732 bp, Homo sapiens
gaagtttgattgcacattgctgatttagactctagtttaacatccagagatctcatcatctagcagaactaccccctgcctacctctcaagcccccaaaccatggtgcaccaggttggcccttgtctctaacacaatgagttacgtaatttagttcctatgcaccatcaccctcattgttcctttaccttgaccactatttttccattcccttctttccattcacctctccataatcttcaactaatctctgtgtcaaaatttacctcatggtcagctgctccagaaagcttttctagaaaccatcccatgctgcaaccctgccacaatttagattgtcccctttcatttcttaggtagaagcctatgtatgcatgtatcacatgcttttgctgttgatttattctctccatttagatcagcatttctcagcctcagcactattgacatttggggccagataagataactctttcttgggaaagtagacagctgtcttgtgagctgtaaaatgtttagtctcattcctaacctctactcactggatgtcagtaacctccccagttgtgaccatcagaaatatatctgcacattgtcaaatgttccctggggagcaaaatcaccaatgcataagaaccactaccttagacctatctgttttctaaggagagcctcttgaggtctgtgagacacttcaaaccacagcatggtacataggtcctgcacaccttaa

SEQ ID NO: 439 - DNA, 424 bp, Homo sapiens
atgataacatttgactaccatgtggaaggcactcaaaatgcaggttacatggagtgtgggtcatgaaggccaatgagccccaaagccccattctcaaggagtttacgtctagcagagacacagacaaataaatggccaaatattctagaaaattctataagataaatacccatgactgggatgcttaaagggctatcataattcacaggattcatttctaacttaggtcattcaggaaggcctcttggaggagggatttattaagctagattttataaggttagtaggatttagatgggaggagggcattttgggcaaagggactagcatgagacaaggtctgcttgttagatggtctggatatggctggcacatggtagatagaccagtttggcttcagtgtagaattcatggaagtattatt

SEQ ID NO: 440 - DNA, 402 bp, Homo sapiens
gctagaactttgaggcttacagattctgtttgttgattcctctaaaactaaagtcttaatataaacagatggtggtcaagcaaagattagttttgtttcatagagcatttgttgatcttcgtccatggtaagcaagaaaggaattccttcttgttaagggatacactccagtttctaatagtcctcctcctctttttttccttataaagtatatttccctttctgtactccttccttccttttatattttactgccagagttggttcctagatgtgcagaaagaattgcagtggaattttaacttttatgtggcatttctactttgtaaatgatgtagaaagaggaaggctttttaacttttgctgcttttaaagaatttactgctgtttctgatttatttt

SEQ ID NO: 441 - DNA, 674 bp, Homo sapiens
cgcttgagctcagaagttcaagaccagcttgggcaacatggtgaaaccccatctctacaaaaattagccaggcatggtggcaggagcctgtagtccctagaaatttatgactcttctaggaatcaagattgttgtcccacagcagcctcacacacctggcatagcagtgattaaactcattgggagctatctcaaaaataattgtgagtgaggcttttggtacatagagtagactccaatcagacacataaaacccacagtacattttaggaagctatactaatggcattaacctggattaaaagggactaaatgttaaaagaccctggacccccaactttctatgggcaacaagcaggcatagttgctcaaaagacagtttctagcccaggcatagtagctcatgcctgtaatcgcagcactttgagaggccaaggcgggcggatcatgaagtcaggagttcaagaccagcctggtcaaaatagtgaaaccccatctctactaaaaatacaaaaattagctgggcatggtggtgcatgcctgtagtcccagctacttgggaggctgaggcaggagaatcgcttgaacccgggaggttgaggttgcagcgagctgagatctcgccactgcactccagcttgggcaacagagtgagacttcatctcaaaaaaaaa

SEQ ID NO: 442 - DNA, 347 bp, Homo sapiens
aataataataaataaaataaattaatcattctatgtataactattatgtatcaataaaaaaactttcaaagactagcaagtagattcttttctttacattttaactttctatcattctttctccttccattgttatattcctcagaattgaattttgcttccttactcttgttttctattgtcttcctacctccagccatcatagttcaacactatgtcacctcctgctttttaacaatattacaggcttagggattagtgctgacttcctattagttcattaccctgttaattttaaaaagaaataataatggctgggtatggtggtgcacgcctgtaatcccagc

SEQ ID NO: 443 - DNA, 276 bp, Homo sapiens
ttataacttttcttgcccctattctatttcaagagaatgcagagaccccactccagggaagggaggtgtaaacgtccactgctactgaagttgttagatgaatatttttcaagtcttaaaatgcttcctcagaagtaccagctctgtcatgtttacgaagtttctccacagtgtagtgatgataactaatatctactcaacacttccccagtacaagacacctgttcaatcttcacaaccaccttctgagtaagccctgttatcattccatttaac

SEQ ID NO: 444 - DNA, 406 bp, Homo sapiens
aacactaataaatattttttttcttgcagacagggaattaagatttttcaccattttgttgatattttggctggtataacttatctggaaggaaaacagaaaagggttcttttgaaagtgagtaaatatagtagagatggtagctcaacactgtaatcccagcactttgggaggccgaggcaggcagatcacctgaggtcaggagttcgagaccagcctggccaacatggtgaaacctcatctctactaaaaataacaaaaatgagctgggcgtggtggtgcacgactgtaatcccagctactcgggaggctgaggcaggagaatcgcttgaacccgggaggcagaggttgcagtgagctgcgatggcaccactgcactccagcctgggctacaagagtgagactc

SEQ ID NO: 445 - DNA, 421 bp, Homo sapiens
aaccacattttgagtagcaagcaagattctaaggttccacctatcttggcttttgacatttggattttccttcctctgtcctttggacattgattgggatcaggtctgatgaacttcaaaaaaaaagggcataagatcatctgaggtttgacttcttggtcatcaggttacctacaaacacagcatcacatagtgcattgggtggggccgctgctctgctgagcagctgagtcacaccagattctcagacaggcaccatggctctttgggaggccaaggcagaaggattacttgagcccaggagttcaagaccagcctgggctgcatagtgagaactcgtctctaaaaaaaaaaaaaaaaattaagtaaaattttaaaaaatttaattagatttgctgagggtgaggcctggccaccagta

SEQ ID NO: 446 - DNA, 354 bp, Homo sapiens
tcatataaactctttgatctgcttgaaactttaaagtaacctgcactgttttacacgaagctggcttgattacagctatacttttatgtatgaaatctaaaattcactctgaacattcatcaggccaaagccctctgtacccaccagggactgtgctaggtgccttcatgaacagtgaggaaacagatacagcatcagattcaccccaaggagtcagacatgaggatgcatctccagtgccttggaggccagaagagggaacactcaactttgcggggcatttggggaacaccagagacacaatgagcttggagcaggctcacaaactgcttctcactgtgcctgcccaggaat

SEQ ID NO: 447 - DNA, 270 bp, Homo sapiens
ttttaactttaaagaatgtagcagaagggatgctgtatctgaaaccaaacctaaaagcacggtgaatgaaaggaggagcagattacctcaagggcagaagaaaatccaaaagccacatataaagaggggaatcagacccataattcatagcagagcaactgcacaaccaaactttgtttcaagatattcagtcttcatcacattccttgctaactcttcaaatgacagtattaacagtggagctggattactctgtaaatgctacatact

SEQ ID NO: 448 - DNA, 150 bp, Homo sapiens
agaaaactgttgaattgttttaaaattttagctaatttcaacaaatttaagatagcaaaacaaatgtatgtaatcataaaagtcatttgcatacgctgttaatttgtagccatctcaagaaataagggtaaattaaaattatattaagtc

SEQ ID NO: 449 - DNA, 394 bp, Homo sapiens
atttattaagaactctttgtataccttaatgttttcccggtgaaatcatcttaatttgagcccacattttctttggataagattattacgtaattgctacttactggccactattttctatacatttgttggtcaaacagagtgtctgtctcttccagcctggcacacagatcattccaccaggcagaggctcctggttggctccatggagccataccgtatataccctatgtgccaaaaaggatgaataaagctagactaagcattagctttttactgcagagatgaacgactccacctatcagaggactggattgtttcctcattaggggtggcaaacgatggggcacccttgggctgttttcctatggattggattaaattggataccaga

SEQ ID NO: 450 - DNA, 2917 bp, Homo sapiens
  misc_feature (342)..(342): n is a, c, g, or t
  misc_feature (346)..(346): n is a, c, g, or t
tgatttaacttttattttggggataaatagtagaaaaaagtgaaacagaatgaaggcaggtgttttttattctaatgatggaataatacagagatactggacgatctctagcagttaattattgtgacccatataaaattatacaggtcacagtataattctctattaccgtttttacaccagtaagtcttagataaactaagcatgcttatgaattatgtatacagttagaatgcattatttttacagaggaacaattgcttgtatgtactaacactgttctcttggcttgcctcaagttctactcattattttatataaaatactattaggctgggcacnggtnggctcacgcctataatcccagcactttgggaggtggaggctggcggattacttgaagccaggagttcgagaccagcctggccaaaatggtgaaaccccatctctataaaaatacaaaaattagccaggtgtcatgatacatgcctgtaatcccagcttcttgggaggctgaggcacgggaatcgcttgaacccgggaagcacaggttgcagtgagccaagatcatgccactgcaccccagcctgggtgacagagtgcaacactgtctcacaaaacaaaacaaaaacatcagattctgtttgtgatgcctagttgcttacaacctaaacagtgcaatgccttaaggaaatgaaaaggagccataagtagtcatttatatttttattttgaagtgtgctttttctaaactcccagattgacatgatggactgtaagttagtttctctgtttctgtctttgtgcctgtagagtgtacttggcacttacaaattcccagtatccagaaagatgatctgatgaaatcaaattggatggatcttggcagactgtgacactcaattacagccttcactttcagtcaaaaacggacacttggcaaggaggtgcctggttgtttcactaaatgtcacttgtgtgtgtaatattttaaagctttttccccacaggaaattcgggtcataaaatcctgaaaaataattctaggtgggaaaagcattttaggaaatgagagatgtggtgctgcttcttctctcagagtgctttctcagcaggacactagccctgcctttaagatggggaagttggggcatgtgcctctgctcttactgtctgcagctctgaaggtaggtgctgtcccactcggacaatcgcccaagcagcagtgaccatagttctcttctatgcaagtccccaggagaaggtaaactgtgtggaatggggatgtgttctggttgctgctgaatcccctcttcttaccacagtgcctggcacgttgcacacactcaaataccgtaataatgaacatttattgaaagcagcagttgaagctgaccaatttctggtaccttgtcatgtaaattttagatggtaaggcgcagatgttactttttttgctttttttcttcagcacttgatgaaatttcccaaacatgcagaaatgttgaaagacttgtatagtgaacatctacgacctagaatctgcagtaatattatgttacatttgctttatcacttgatagatgttacttttaatgagacttcaagtttggtttctctaaacaaaatattctaaaataactgaacaactttaatcaatttgtcttaagttctttgggggaacttgggacatttgctttgtaactggaattgcagccctcacgttaagctaattttaaactttgcaaatttgttatgctgaatttcagtcttatttattttgcctgaaggggtattttttgtaatggatttatttgaaggtccttgataaattgtgcagaatattctcgtgttctttttgcacttgataaattatctaatttctgtggtgagaatgtaatttggggcctattttgtttatacaagcttccagaattatgttctcagagggatgaaaaggtgtaatttagcatataggtcactaaattaggagctaagacacattttctcctgactgaccatgggtccaatcagttttgtcttcgtgtccttttccttgtaaagtagaaactagaatttgaaatttaaatattaaataatgggtaacattcattaatgtatgactctattaagaaagacactgtgaatccagggaggattctcataattctgtaaactgtatgacaagctgtggaatgaaatctgacttttgaaaattgaaagacatccagtggtcttatcacaaagcctgcttttcctcagaacttaactattgccatggaatttgtaagcagttatcctaatccatctggactctgaaaatgcatcctttatgagagggagtgaatgcaaagataagggtggggaaacactaatcatgaaaagaatgaaaatcagtgttcagttttaagagcaggttgtattgaaggaagggattaaaggaattatccagatttgaggtggcacatcttccaccactccctgcaccatcagcatgcacggagcgcataaaacaagccctgctcctaatggcagtgaaacctcggatggcctccatcaggtcaatacaactgaattgctgggctgacttaagattgaaggactccattttagtaagtagagaagtgtgacctttctcaacccaggttgtgaatgtggattcacacttatctcaaaaaggcacctggagttttaactttatgtcatgtctcagtactggttgcaaggtatgaccaaaagtgttccttgaatggcacctttttgaatattaatttagaagaaaacatgccagactgacatacttaccccctccgcactgttactacttccttaccagccctatgtactgcatcaatgtctacaagaaagcactcttcattaaaatgaaatatatatattaaaatatgatagtccaagt

SEQ ID NO: 451 - DNA, 217 bp, Homo sapiens
gcacgagcaaggaacacttttggtcataccttgcaaccagtactgagacatgacacctttttgaatattaatttagaagaaaacatgccagactgacatacttaccccctccgcactgttactacttccttaccagccctatgtactgcatcaatgtctacaagaaagcactcttcattaaaatgaaatatatatattaaaatatgatagtccaagt

SEQ ID NO: 452 - DNA, 458 bp, Homo sapiens
atgttgattctactgtgtatccgttctctgtaacaaaccttagtcatggtacaactacatgtttagtctgtaagaccttctagcaagtcaaacctgtcagtggtcctggggacccgtttaacatacccttcaagacaccagtttttgcatctgtaaaatttcggtaataacccatattactccaggattgttttgaagaggacctgaagtgtacttaaagtttttaacatgggccctaattgccatcattgtttcataaagtttttcattacttacattgttttgtgtaattacgattttataaaatgaaaacagtgacagtttgtatactgattcttggctgcacatctgatctgtgtaagtgatttacctgggtcatagatcacattcagctttacttgataatgaaaagttgtttttcgataattaaaagttgttttccaaaacagtaaaaaaaa

SEQ ID NO: 453 - DNA, 442 bp, Homo sapiens
acagtagccattttaggacataacaaggttgttctcctcattacttacaccgtaagcaagatattaaagactacacaagaagggcaacaggccaaaggtgattaatacgccataacagaattgtcttataccttctttttcatacctatttagaatccaatctgacactatttggatttctgtgaagtggcttttggtacatattcttgatttttctaccttgatatttaactttatcgccattcttcatatctagtgtagtaacatctgagtttgataacactccatacattggttcattgcattgatgatactgtgagaattgcctcttgggagaaaggcaggcaggagaatttaagtcacccatatgacaagtagaatctggctagtgaacacagctgaactgtaagcctggcctagttacattttgagggattatatt

SEQ ID NO: 454 - DNA, 446 bp, Homo sapiens
ctgtatatgatgagcatattctttgtcacttggttggaaaacagttacgatcaattatattttacttaacatactggaagctagtggaatggaaaccactctcagttggtaagatacaggctacagaagaaggagcttccttgctcatggctttagcagcgtaactaagatgtgatttttaaaaagacattaatggttaaatgcaaactttattttaaattttatatctccatctaattaaaagtgccctgtgctaggaatccgaccacttgagtaagattctcaactctgccacttatgagctctgtaactttgggcaagtcacccaagttctctgattgtgtttcttttgtaaactggaaataataatgcttgccttctattttatattgggttgttaacaggatcaaatgagagaataaatgaaacataattttataaaccat

SEQ ID NO: 455 - DNA, 157 bp, Homo sapiens
ccttgtgcttttattatttttttttaatatgctttttggttaacaacagaagtccctacagttggccctctgtgtctgcaggttctgcatccgtggattcaatcaactgcagatgaaaagttttcagaaaaaatccccccaaaataacaatacaact

SEQ ID NO: 456 - DNA, 433 bp, Homo sapiens
ccactgctaaccatgtatgggacctctctgtggctgtcccaaagcggggagattggaccagactgagcggacagttacagaggctgtgatacactccagatacctgtcaggactgagacccatttccaggagtgttggacactcattgttcagagctgctgccagctcatagctgactcttcctgggaattgtgttcagtggaggggagctgcccaaggttatgccctcttccaggggcagcccatgtctggagacttgtcgatatgggagtatggagaccccaacacccttgcctcaatttgggacatctccaaagaccatcctggctccactgcaccggtgctgtcgtcttgaggcctctgctgcgtctgcatctcagttccacctctcgcctgcccaatccagtagcccttgctcccttatgagtggtgc

SEQ ID NO: 457 - DNA, 440 bp, Homo sapiens
gaaatcaccatccccctgatgatacagaaacctttgactagcgtagccaagggcttactcaacatctgcagtccaatgtctggtgggcagctcacgtttacaaagaactgcagatcttcccccataaagctgctagtcccacagtcttgcccatctaagaaaatgtcaggaacacggaccagaggccctagagtctgacaacgcctcacctgtctgctgtggccatcctggctcaggccaccatcatccctggcttccgaccaagactttctatttccacacgggcccaccccaccctacccatcacagtctgctgtcagacatttagaacctagattagatcaagcacccctctgcttggaaccagtaagtcctctgccagtgaaacccaagtccctgcaacatccaacaaggcagaactcaatccggtgcacacgccc

SEQ ID NO: 458 - DNA, 378 bp, Homo sapiens
cctcctgccccaccctaatcccactttccagaggtaaacctcttctaatcagctgtctttgattataatctttataaccaataaaatgaatttgaaatggaaaccaaattgacctttagccacaagagaatacatacagtggcccttatggttgaatagggcagtggagtacattgaatttaataatactgtggtccaaaggaacagaccaagtagaagaaccattggatatagaaagatactttctatgtaaaagctcacaaatacaagaataaaaatgaaataaaaagtttgaatgaggaaaaaaggaaaacatcattttcatgttgtggtaggcctatagacagtccattaaaagtatagaaatggtattttcct

SEQ ID NO: 459 - DNA, 424 bp, Homo sapiens
atctctaaaggtaagaactctttgcaatttggaggtccagtgttatgtgagggtctctgttccaatcccccaacctgtataggctgaaagctttccctcttccccctcaaacctcagctgtaggcttccagggagagtttgtgtctcagctaatcagatggctaaacacacttaaaaactatttttccattatattatgctaaaagcactagaagtaatttagtttagcatgtattcatgttgtttagacatgtactactaagtatgtattatgtgtgcatgatttttacatatgcgtgtttaccactatccatttaatctataagcttctaagaggtatgaactatttctattcgccatgttttaagtaatacccagcccaatgtgattcaaaagtaaatgtataataaattctatttgatga

SEQ ID NO: 460 - DNA, 407 bp, Homo sapiens
gatcaaaattaggtcactgcctttgagaaatgatcatgatataactttttattttcaaattctccttaagtgtttgcttcttcccatattctaagaagactagctcacacccatgcacaatgaccacagataaatgcacaaactatgaactgtgtaaactttttattttaaaatataatttcatattgcctctgaaataaggcaattgtttaaaaccctagaataatctttaccaactgtttcttaggtaaaaacttattttttgctgtctgttcctacacccaaactgcactccacaaatgggaaagtccatttaggtgcgcatttattcactgttgttttaaataaccatttatcattatagaagtagtaaagtatatttttagaaagttaggaaatccggacca

SEQ ID NO: 461 - DNA, 476 bp, Homo sapiens
ctcccaccttagcattacctgaaggtggtagccagtagttttgtgcatgggtatgaaggcactttaagaaagatgttaatactgacttgtaatatgcaatggtgtaaaaccaattaagctgtgttgcattttgttacaatatttttttaattttgtttagaagaattttgaggcctttcagttaatttttctggaaaagcatcatccatttttgcttttattattgtccactaatgatttgagaggaattgtccaagttacttattgaggcttaataccttaacactttgtttttttccttagtttcacaggaaggttgtaggggatgttcactagtggggataagaaaatgagatgttgaagtggcttggtcccaaaaggtgattaggaaagaaaaataatagtagttaagaatcttaagccaagaaatggattctttctagtatcttctctttaataatcagtactatgccaaa

SEQ ID NO: 462 - DNA, 6113 bp, Homo sapiens
  misc_feature (5322)..(5322): n is a, c, g, or t
  misc_feature (5366)..(5366): n is a, c, g, or t
  misc_feature (5468)..(5468): n is a, c, g, or t
gggaaggaaatgaagagcaaagtggacacgattgtgaacttcacccaccagcacttcacctcccagttcgaggtcactgtctgggcacccaggctccccctgcagattgagatctcagacaccgagctgagccagatcaagggctggaggatcccggttgctgccaacagaaggcctacccgggaaagcgatgacgaggacgatgaggagaagaagggacgaggctgctccctgcagtaccagcacgccacagtgcgtgtcctcacccagtttgtggccgagtcacctgacttagggcagctgacctacatgctgggccccgactggcagtttgacatcactgaccttgtgaccgagttcatgaaggtggaggagccgaaaatcgctcagttacaggacggcaggaccctggctggtcgggagccgggaataaccacggtgcaggtcctctcgccgttgtctgactccatcctggctgagaagacggtgattgtcctggatgaccgagtcaccatcgcggagctgggagtgcagctcgtagctggcatgtctctctccctgcagccacaccgagcagacaaaagggccatcgtctccacagctgctgccctggatgttcttcagtccccacagcaggaagcaatagtaagttcttggattttgttcagtgatggttcggtgacacctttagacatttacgatcctaaggattattctgttactgtctcatcattggatgaaatggtggtgtctgtccaggcaaaccttgagtccaaatggccaattgtggttgcagagggtgaaggacaagggcctttgattaagttagaaatgatgataagtgaaccttgtcagaagaccaagaggaagagtgttcttgccgtgggtaaaggaaatgtcaaggtcaaattcgaaccaagtagtgatgagcaccaaggaggcagcaatgatattgagggcataaatcgggaatataaagaccacctcagtaattccatagagcgcgaaggaaaccaggagagagcagtccaggaatggttccaccgtggcacacctgttggccaagaggaaagtaccaacaaaagcacaaccccccagtctcccatggaagggaagaataagttactcaaaagtggtggtccagatgcctttacaagcttccccactcaagggaagtcaccggaccccaataatcctagtgacctcacagtgacctcaagggggctaacggacttggagattggcatgtatgccttgctctgcgtcttctgtctggccattctggtcttcttgatcaactgcgtggcgtttgcctggaaatacagacacaaaaggtttgctgtgagtgagcagggcaacatcccccattcccacgactgggtctggcttgggaatgaagtggaacttttggagaaccctgttgacattacactcccatcagaggagtgcacaaccatgatagacaggggcctgcagttcgaggagaggaacttccttctgaatggcagttcccagaagacttttcatagtcaactactcagaccctctgactatgtctatgagaaagaaattaaaaatgaacctatgaattcttcgggcccaaagaggaagagagtcaagttcacttcctacaccaccatcctcccagaggacggcggcccatacaccaactccatcctgtttgacagcgatgataacatcaagtgggtctgccaagatatggggctgggggattcacaggactttagagactatatggaaagtctgcaagaccagatgtaaactcctttcttatgtttgtattcacctttatgccttctgttttttgaatgctggagcagtgagtttgatcagcaataggggatgatttaacaaagtttgatttgtggaggtctggtgggattcatttctaagcaggtaaaagaggtttggagagctatagaagctgggttttaagtttggaaatgcctctaaaacagccacatgtggggactggagaaattctaagacaacagttttatggactgcctggtacgagctcagtgcaaatgtattaaacctgaccccacagacattgttagtcatctcgtgacaaatggccatgtggaattagaaaagatttgggtgttgatttttctatttctagaccttttaaagcacagtggacacttattgccccttggcctgagtttagacatacatgaaagatgactgaatgtagctatcctgatttgtcatgagcgctgctcattatttttatatacatttgcacctgcacctgttcctttgacctctggaattctttttgaaacatgaagagaagaaatttcagtcttttccttgagctctgtttgatttacacatgagttttcttccctgggatttgccatgccatgttatttcctgggtctccatgcaggatgtcaggtttttccagttttctgcacttcatcatctagggatggtatccaagaagcttattctcactttgttttttccttccttttgttgttgaactttcttgtataacactgggacaaagggttttacttaaaatgttaatatacagtgagggagggccatctctttactgttttctatgtgaagtttcaaacatttggaaaaaagttgtcaatcacaaacatttatttttattctctgcttgttgaaaactcatggggaactcctggagtgcatttctgagggtaaaaaggccccaacatagctgtatttatacaagtgctttgtggccaacacaatttactatccaaactgaagtcttaaagtagaattgacctacacagaaaggaaattgcctaggcaatagatgcagattacactttccattttaccagaacaaaagtttttttttttttaaataagtagaatgacagttcaagttagcaatatatagaaatccatccatacaatgaccaaaataaataaataaataaaactcaatcatgactttggcagagataaaacattgacaagggtgtgcatttgtggagagaagcagtgggtttccccccaaaatccatacaaataaatgactattccagaactcaagaagcagctattatagaaaaaaaaattaaaaaccacagctattgaaaaatcaaaacggcaagagaaaaaaagaaacaactcctgcataatgtttaaataaaaatgttattttaatagcatcatgaatggtcttaaggcaaaaatttcagattagcaaaatgtgatgacatatttattaagattgtattattggaaatgtagacactggactagtatgcctcattatgagctttactgagccatttgcatctctaagaaatatgattttaaaggcccaaagtaggaaggatctgcagggggtcacctgaagcagtgccctgactccaaatggctgataactgagctaatccaaggagaggcgttcagttgttctcttattatagatttccttgggtgggaacatgacaaccccgcctcctctagccatgacgtggcagccaaaaagttcttcctgtatctctggcccacaggactgtagtgtgtttgggaacagtgctgaaattgcaagtgatgtaggcctgacctccagagcccagcgttcagttagttgtataaaatggggcttaggaaccgaagctgatgaagttccaaaagtagttcagtttgatgggataaggaagcaaggagagccaggcattagctgcaaaaggagcttgcagagagatggctgacactttatgggaagattcctcagtcagccaaaagcttttcaaagagtttggtgcagaggtagctcagagccaaccatccaggaccgaagaaagctcatgtgctgattgacacatagctatccaggtgagtcggctccttctatgaggcttttcaatcgtctctccctttggatctctggcattccagaaagactgggaattcatttctgaaaatgatgaacctccgctgaaacggggaggaaatctcttacacacatacagcagggtcctgcccactggtaaagtgagacgttgggtagggggtgtaactggggaggaggtgaaggaaattatccctgccatggggagtgttattcaggaacataaaaattagagcattccctctgatggcagtgcttgacggggtgcagggaacaaactggggagcgttcaaacatgccagtggtttctcagcagggctggaaactggccacagtcctgaagatgcttcttgtgacaacttagagtcactgggagtcacacagctcctgtgtagccgcctttgctcctctgtgttaaaacccagtcagttcaaaataacaatcaaatggaaggccatgggggaagggttccttccaccatataacccacacccagatgtatataaacgcatatacatacatatacctgtgtgtgtgtgtgtgtgtgtgtgtgtgtgtgaatactgaagagccagacaacaaactatttagtaagaatcaacagtgactgtcaattgttctcagatttggcatggatactatttctcatgaaataatgtcattaaagtatttcctcctctaaatatttcctgaagatcataaaccatgggttatagcaccttgttttccagctagtcaatatacaactattaggtgctgtgccccaaaatatctaaaatgggggtaaagatataaactattaagccatgaaatctaattttctggggaccatgcatttgcctggattttccaggattttatggctgatagacccaaattattagtcttgataaacaacctgaaccaaacatttataaagtcccttcctctcccatgggaatggaatgctcagactcctgctgagggagacaccagcaagcctcttgagaaggcaccagacagtgaactctgtggtcacatgaagggaggttcagatgctagacgaccagcgtatgacctggaaccattgaggattgcaaccgctgcctccagggtccagatgtgctgcagtagagggcagagcacaggaatcaagaagcagctgccacaccaaagaactgatgcttaaacacacaggtgtgttgcatttgagagaaggcaagaagaaaagacaatagaaggttaccctggaaaaacaacacctagcaaacctcagaatactccatgtgtcccaagagaaggaataattgtctttctagctgttatatattgcacactggccaggataaattcccagactataataatcctgactatgtagacggaagtttctatttataaagtcatgcagggggaaagttgattaatttttgtcccattgccacatctgtagactaagtaanttttaacttgctaacttttagaatgtccacctttgtgcattttngtagcattcttgtttcattattttagaaaggggtcttcccattactgggatgtcggggccctgtcagagaactattattaaggctctgtgagggaactgttnagtctcacagcaaggaccacagagcgtggtttcatctgaaccctacaagtcagggacaccagtgtgttttctactcgagttacctaaaaatggtctcaattttccatttcattctctgtaaatgacacaatagatggtttatagactcagcagccctcaccttttattaaaattatatatgtgtgatgtaatgcatatcacctgtcatgtaaagggacggtatggatggtggaaaagttatgctaaaatatggattgcagatatttttgtatgtaatataggcaatataatgaaacaccgagttttttaaagtgaaagcatgcaaaatcgtagcttttaaatgtacagacatcccactcaaaaatatctaaactgatagtgggaaaaacatttgagacctagtaacatcatgaaatgcactgaatttggaattctggcctagaaaggctgtggcttatgttgggattgatgatggaatctgccagaacattttcatcttattcttcttgacttttggatttttttcttttctttttttctggaaatatttcggaaataaagtgacttcatttttcagcataaaagtatattctaaccacagggtaacacatcgtttttaacatgaaaataaacatttaaacattc

SEQ ID NO: 463 - DNA, 685 bp, Homo sapiens
gggaaggaaatgaagagcaaagtggacacgattgtgaacttcacccaccagcacttcacctcccagttcgaggtcactgtctgggcacccaggctccccctgcagattgagatctcagacaccgagctgagccagatcaagggctggaggatcccggttgctgccaacagaaggcctacccgggaaagcgatgacgaggacgatgaggagaagaagggacgaggctgctccctgcagtaccagcacgccacagtgcgtgtcctcacccagtttgtggccgagtcacctgacttagggcagctgacctacatgctgggccccgactggcagtttgacatcactgaccttgtgaccgagttcatgaaggtggaggagccgaaaatcgctcagttacaggacggcaggaccctggctggtcgggagccgggaataaccacggtgcaggtcctctcgccgttgtctgactccatcctggctgagaagacggtgattgtcctggatgaccgagtcaccatcgcggagctgggagtgcagctcgtagctggcatgtctctctccctgcagccacaccgagcagacaaaagggccatcgtctccacagccaggatggagtcagacaacggagagaggacctgtgggaatcggttaggaaagtgttatgctgttgtccccagtgtggagagag

SEQ ID NO: 464 - DNA, 502 bp, Homo sapiens
agtaggaagtacttataaagtacttctgctatatgtcaaagaacagtggttgtcttgagggaaaacattagtgtgatcattatagttgtgagctgaattaacccctttattcatgtaatatcctttttgtttgaaagaatgactgacaaactggttgttcagactttggtattttgcagcttcaagaacattaataaagtaaaattgttacttcaaagtaacaacttgcaatatttgttccaatgataaaatttgagcttttggcagtggctcatgcctataatcccagcacttagggaggctgaggcgggaggagcacttgagctcaggagtttgagaccagcctgggcagtctctccaaaaagaaaaaaaaaattagccaggcatggtggcatgcaccagctgaggtggaaggagcacttgagcctgggaggccaaggctgcagtgagccatgattgtaccactgcactccagcccaggcaacagagcaagatcttgtca

SEQ ID NO: 465 - DNA, 3872 bp, Homo sapiens
cagggaaggcagtggcaagatggcgtccctggatcgggtgaaggtactggtgttgggagactcaggtgttgggaaatcttcgttagtccatctcctatgccaaaatcaagtgctgggaaatccatcatggactgtgggctgctcagtggatgtcagagttcatgattacaaagaaggaaccccagaagagaagacctactacatagaattatgggatgttggaggctctgtgggcagtgccagcagcgtgaaaagcacaagagcagtattctacaactccgtaaatggtattattttcgtacacgacttaacaaataagaagtcctcccaaaacttgcgtcgttggtcattggaagctctcaacagggatttggtgccaactggagtcttggtgacaaatggggattatgatcaagaacagtttgctgataaccaaataccactgttggtaatagggactaaactggaccagattcatgaaacaaagcgccatgaagttttaactaggactgctttcctggctgaggatttcaatccagaagaaattaatttggactgcacaaatccacggtacttagctgcaggttcttccaatgctgtcaagctcagtaggttttttgataaggtcatagagaagagatactttttaagagaaggtaatcagattccaggctttcctgatcggaaaagatttggggcaggaacattaaagagccttcattatgactgaattacactcatcctttggaagagtgagcaagcagtggcagtttttcacagctcatcttgctgtgttcaattattaccatcacagccttttaacaaaatcatcttaaaatgctacccttcagccttaccctttaatggaaaaatgaaaggaagtgacaatacgggaggtccaaactttgtccctgttctctgtgttccttacctttctgtccctgtgtatagattatgtaaaagccttgtgtaaatatgagatgttgtcaaaatgatgcagtaaatgagcaatgacagtgtactgcagagaaaatttactcttgcctagaactggagggtttttatgggtctgtaattttcccacactcattgctgaaagcttaattaagtacttcaaaaacgtatctccattgttttaccttcttgaggggaacggtcttgttaaccagccctgagttgtctaccccaaacaatctctgtcattttcaaagatgcaaaatggtgttatttaattgtctccaccattgtcacacacaggaatgcctaataatagcaacccttgtctccctcttctctcctttgcaaatggctcagtgactggaagaggcggactaatagccagagttaaatataaatacaaattaataatacatagagaacagcaataccagaaaaaaagaattctggtaaaatgatgtgaaaaattgacagctccctcactcttaaggttgctgctatatacagtctaggttttctgtttggaaataggtagggtaaaatctaagacctgcacaagggcagtgagagacatttacagcctcctctctatttgtttttttaaggaaaagtcaactcctgaaatgtcccttagctataatcagaaaactaagaatattattctgtgtcaacaatgtatttatggagagaagtaaaaataagttccacagcaacacatttacatgaattatgaactaggattcttggatttcataatcactccaaagctttttggggatggtgtgtgtgtgtgtgtgtgtccgtaattgttcatcattactttttttaacctatctttttgcttgcttaatcttctctgccccagttcttcctgagtatatgaatttgatttctaaaaacaatttattcaacactctatcacccgtattctctctctggctctgctgcaggtctctgcactcctgattttgctccatacttttaaataacaataataaatatacagttttcatttctcatttaaaaaataggtggaaaacaccaaattcactttctgttccattttaattaggtttcagaagtatcttggaaatcaaggtatgctgcaagaggatattaaaataagaatgttagagagtccttttagaaaggcagtcttgggaatttggaaaaggatttttaaagcagctttcatcagctagactgttctccagcctttctttacttcctctttgaaaggacatagccctggtttctttttgacacaaaggaaagctatgcaaatcatgatctgtatgtagaattggtcacaagtatgttgttgcataggctgtacagttgggaagtagaaaccaaatgctacccagagacctaacccaattaagctctttgtatttctccttcaagaaataaatcttccttccttctttcttcctctttcttttaattttaaaaaaattcatcctgatttttttattttctatcttatttaaaaaataaaaataggccaggcgcggtggctcacacctttaatcccaacactttgggaggcgggtggatcacttgatatcaggagtttgagaccagcctggccaacatagggaaaccctgtctctactaaaaatacaaaaattagccaggcctggtggcacgcgcctgtaatcccagctacttgggaggctgaggcaggagaatcacttgaacctgggaggtggaggttgcagtgagtcaagatcgtgtcactgcactccagcctaggtgacagagtgagactccaactaaaagaaaataaataaataaatatataaatatataaataaataataaaagtaaactattgctgatgactccagggtcaatctggaaaaattaacagtattcctcaactccattactttctgcagccaagcttgattccttgaattatagttttctaagaaaaaatagtttttaataatctaaggtaaatttgttgcaattattagcagcagcataataaggctttttgcgcaaatgaatgttattagctagagttattcaaaaaagaatgaagcacaatttttgctaggacttcttgagaactattcataaaaatgcttttagataataaacaagtataaatgtcaaaatatttttttaaaagtataattggccaggtgctggctcacgcctataatcccagcactctaggagactgaggcaggaggatcacttgagctcgggagtttgaggctgcagtgattcatgattgcaccactgccttccagcagcctgatgacagagtgggactccatctctttacatatgtatatcttactctcttgatgggacaagttggtagaaataaagattttttttttctgttgtgatttcggtgtctgaccaattttctgactcattgtgaaggtgaccagatatgaaggcatatatatgactactcctctgtcccttaggtgtataagacttagctggaatccaactaaagatttgggctggtctctccatcttaacgttgatgggattcaggacacataaccccaaaatattgcaccctgttatttgagaaaactgcagaagcaaggtttctcataccttccccttaccccttctcccctgaagcaggccataaaccctaagtgactgttccctgaagtagatcataaaaccttcattccataggtaccctttatcctcacagatacagagacaccaagaagaatctggacaaataggacttgctaagttctccacagtttattaccattagattatgtccttttgtcctctgattatacttctgcataagactgtacataaaaatacacaagttttcctatttcttttttgtcttcatttctgaagattcctgtcatgtaaaacttacagtaaataaatgtgtgtgcttttctcaataa

SEQ ID NO: 466 - DNA, 4024 bp, Homo sapiens
tggtccatgtttgaaggcagtggcatgatggcgtccctggaatcgggtgaggtaccggtgttgggagactacagagataacaaaagctgcgataagaaccctcaaggaacttaaaattaagggagtggttccaagatgaccaattaggaacagctccagtctacagctcccagcgtgagcgacgcagaagacaggtgatttctgcatttccaacgaggtgttgggaaatcttcgttagtccatctcctatgccaaaatcaagtgctgggaaatccatcatggactgtgggctgctcagtggatgtcagagttcatgattacaaagaaggaaccccagaagagaagacctactacatagaattatgggatgttggaggctctgtgggcagtgccagcagcgtgaaaagcacaagagcagtattctacaactccgtaaatggtattattttcgtacacgacttaacaaataagaagtcctcccaaaacttgcgtcgttggtcattggaagctctcaacagggatttggtgccaactggagtcttggtgacaaatggggattatgatcaagaacagtttgctgataaccaaataccactgttggtaatagggactaaactggaccagattcatgaaacaaagcgccatgaagttttaactaggactgctttcctggctgaggatttcaatccagaagaaattaatttggactgcacaaatccacggtacttagctgcaggttcttccaatgctgtcaagctcagtaggttttttgataaggtcatagagaagagatactttttaagagaaggtaatcagattccaggctttcctgatcggaaaagatttggggcaggaacattaaagagccttcattatgactgaattacactcatcctttggaagagtgagcaagcagtggcagtttttcacagctcatcttgctgtgttcaattattaccatcacagccttttaacaaaatcatcttaaaatgctacccttcagccttaccctttaatggaaaaatgaaaggaagtgacaatacgggaggtccaaactttgtccctgttctctgtgttccttacctttctgtccctgtgtatagattatgtaaaagccttgtgtaaatatgagatgttgtcaaaatgatgcagtaaatgagcaatgacagtgtactgcagagaaaatttactcttgcctagaactggagggtttttatgggtctgtaattttcccacactcattgctgaaagcttaattaagtacttcaaaaacgtatctccattgttttaccttcttgaggggaacggtcttgttaaccagccctgagttgtctaccccaaacaatctctgtcattttcaaagatgcaaaatggtgttatttaattgtctccaccattgtcacacacaggaatgcctaataatagcaacccttgtctccctcttctctcctttgcaaatggctcagtgactggaagaggcggactaatagccagagttaaatataaatacaaattaataatacatagagaacagcaataccagaaaaaaagaattctggtaaaatgatgtgaaaaattgacagctccctcactcttaaggttgctgctatatacagtctaggttttctgtttggaaataggtagggtaaaatctaagacctgcacaagggcagtgagagacatttacagcctcctctctatttgtttttttaaggaaaagtcaactcctgaaatgtcccttagctataatcagaaaactaagaatattattctgtgtcaacaatgtatttatggagagaagtaaaaataagttccacagcaacacatttacatgaattatgaactaggattcttggatttcataatcactccaaagctttttggggatggtgtgtgtgtgtgtgtgtgtccgtaattgttcatcattactttttttaacctatctttttgcttgcttaatcttctctgccccagttcttcctgagtatatgaatttgatttctaaaaacaatttattcaacactctatcacccgtattctctctctggctctgctgcaggtctctgcactcctgattttgctccatacttttaaataacaataataaatatacagttttcatttctcatttaaaaaataggtggaaaacaccaaattcactttctgttccattttaattaggtttcagaagtatcttggaaatcaaggtatgctgcaagaggatattaaaataagaatgttagagagtccttttagaaaggcagtcttgggaatttggaaaaggatttttaaagcagctttcatcagctagactgttctccagcctttctttacttcctctttgaaaggacatagccctggtttctttttgacacaaaggaaagctatgcaaatcatgatctgtatgtagaattggtcacaagtatgttgttgcataggctgtacagttgggaagtagaaaccaaatgctacccagagacctaacccaattaagctctttgtatttctccttcaagaaataaatcttccttccttctttcttcctctttcttttaattttaaaaaaattcatcctgatttttttattttctatcttatttaaaaaataaaaataggccaggcgcggtggctcacacctttaatcccaacactttgggaggcgggtggatcacttgatatcaggagtttgagaccagcctggccaacatagggaaaccctgtctctactaaaaatacaaaaattagccaggcctggtggcacgcgcctgtaatcccagctacttgggaggctgaggcaggagaatcacttgaacctgggaggtggaggttgcagtgagtcaagatcgtgtcactgcactccagcctaggtgacagagtgagactccaactaaaagaaaataaataaataaatatataaatatataaataaataataaaagtaaactattgctgatgactccagggtcaatctggaaaaattaacagtattcctcaactccattactttctgcagccaagcttgattccttgaattatagttttctaagaaaaaatagtttttaataatctaaggtaaatttgttgcaattattagcagcagcataataaggctttttgcgcaaatgaatgttattagctagagttattcaaaaaagaatgaagcacaatttttgctaggacttcttgagaactattcataaaaatgcttttagataataaacaagtataaatgtcaaaatatttttttaaaagtataattggccaggtgctggctcacgcctataatcccagcactctaggagactgaggcaggaggatcacttgagctcgggagtttgaggctgcagtgattcatgattgcaccactgccttccagcagcctgatgacagagtgggactccatctctttacatatgtatatcttactctcttgatgggacaagttggtagaaataaagattttttttttctgttgtgatttcggtgtctgaccaattttctgactcattgtgaaggtgaccagatatgaaggcatatatatgactactcctctgtcccttaggtgtataagacttagctggaatccaactaaagatttgggctggtctctccatcttaacgttgatgggattcaggacacataaccccaaaatattgcaccctgttatttgagaaaactgcagaagcaaggtttctcataccttccccttaccccttctcccctgaagcaggccataaaccctaagtgactgttccctgaagtagatcataaaaccttcattccataggtaccctttatcctcacagatacagagacaccaagaagaatctggacaaataggacttgctaagttctccacagtttattaccattagattatgtccttttgtcctctgattatacttctgcataagactgtacataaaaatacacaagttttcctatttcttttttgtcttcatttctgaagattcctgtcatgtaaaacttacagtaaataaatgtgtgtgcttttctcaataa

SEQ ID NO: 467 - DNA, 3312 bp, Homo sapiens
cagggaaggcagtggcaagatggcgtccctggatcgggtgaaggtactggtgttgggagactcaggtgttgggaaatcttcgttagtccatctcctatgccaaaatcaagtgctgggaaatccatcatggactgtgggctgctcagtggatgtcagagttcatgattacaaagaaggaaccccagaagagaagacctactacatagaattatgggatgttggaggctctgtgggcagtgccagcagcgtgaaaagcacaagagcagtattctacaactccgtaaatggtattattttcgtacacgacttaacaaataagaagtcctcccaaaacttgcgtcgttggtcattggaagctctcaacagggatttggtgccaactggagtcttggtgacaaatggggattatgatcaagaacagtttgctgataaccaaataccactgttggtaatagggactaaactggaccagattcatgaaacaaagcgccatgaagttttaactaggactgctttcctggctgaggatttcaatccagaagaaattaatttggactgcacaaatccacggtacttagctgcaggttcttccaatgctgtcaagctcagtaggttttttgataaggtcatagagaagagatactttttaagagaaggtaatcagattccaggctttcctgatcggaaaagatttggggcaggaacattaaagagccttcattatgactgaattacactcatcctttggaagagtgagcaagcagtggcagtttttcacagctcatcttgctgtgttcaattattaccatcacagccttttaacaaaatcatcttaaaatgctacccttcagccttaccctttaatggaaaaatgaaaggaagtgacaatacgggaggtccaaactttgtccctgttctctgtgttccttacctttctgtccctgtgtatagattatgtaaaagccttgtgtaaatatgagatgttgtcaaaatgatgcagtaaatgagcaatgacagtgtactgcagagaaaatttactcttgcctagaactggagggtttttatgggtctgtaattttcccacactcattgctgaaagcttaattaagtacttcaaaaacgtatctccattgttttaccttcttgaggggaacggtcttgttaaccagccctgagttgtctaccccaaacaatctctgtcattttcaaagatgcaaaatggtgttatttaattgtctccaccattgtcacacacaggaatgcctaataatagcaacccttgtctccctcttctctcctttgcaaatggctcagtgactggaagaggcggactaatagccagagttaaatataaatacaaattaataatacatagagaacagcaataccagaaaaaaagaattctggtaaaatgatgtgaaaaattgacagctccctcactcttaaggttgctgctatatacagtctaggttttctgtttggaaataggtagggtaaaatctaagacctgcacaagggcagtgagagacatttacagcctcctctctatttgtttttttaaggaaaagtcaactcctgaaatgtcccttagctataatcagaaaactaagaatattattctgtgtcaacaatgtatttatggagagaagtaaaaataagttccacagcaacacatttacatgaattatgaactaggattcttggatttcataatcactccaaagctttttggggatggtgtgtgtgtgtgtgtgtgtccgtaattgttcatcattactttttttaacctatctttttgcttgcttaatcttctctgccccagttcttcctgagtatatgaatttgatttctaaaaacaatttattcaacactctatcacccgtattctctctctggctctgctgcaggtctctgcactcctgattttgctccatacttttaaataacaataataaatatacagttttcatttctcatttaaaaaataggtggaaaacaccaaattcactttctgttccattttaattaggtttcagaagtatcttggaaatcaaggtatgctgcaagaggatattaaaataagaatgttagagagtccttttagaaaggcagtcttgggaatttggaaaaggatttttaaagcagctttcatcagctagactgttctccagcctttctttacttcctctttgaaaggacatagccctggtttctttttgacacaaaggaaagctatgcaaatcatgatctgtatgtagaattggtcacaagtatgttgttgcataggctgtacagttgggaagtagaaaccaaatgctacccagagacctaacccaattaagctctttgtatttctccttcaagaaataaatcttccttccttctttcttcctctttcttttaattttaaaaaaattcatcctgatttttttattttctatcttatttaaaaaataaaaataggccaggcgcggtggctcacacctttaatcccaacactttgggaggcgggtggatcacttgatatcaggagtttgagaccagcctggccaacatagggaaaccctgtctctactaaaaatacaaaaattagccaggcctggtggcacgcgcctgtaatcccagctacttgggaggctgaggcaggagaatcatgccttccagcagcctgatgacagagtgggactccatctctttacatatgtatatcttactctcttgatgggacaagttggtagaaataaagattttttttttctgttgtgatttcggtgtctgaccaattttctgactcattgtgaaggtgaccagatatgaaggcatatatatgactactcctctgtcccttaggtgtataagacttagctggaatccaactaaagatttgggctggtctctccatcttaacgttgatgggattcaggacacataaccccaaaatattgcaccctgttatttgagaaaactgcagaagcaaggtttctcataccttccccttaccccttctcccctgaagcaggccataaaccctaagtgactgttccctgaagtagatcataaaaccttcattccataggtaccctttatcctcacagatacagagacaccaagaagaatctggacaaataggacttgctaagttctccacagtttattaccattagattatgtccttttgtcctctgattatacttctgcataagactgtacataaaaatacacaagttttcctatttcttttttgtcttcatttctgaagattcctgtcatgtaaaacttacagtaaataaatgtgtgtgcttttctcaataa

SEQ ID NO: 468 - DNA, 2461 bp, Homo sapiens
tgcttactcttctctgccccagttcttcctgagttgaatttgatttctaaaaacaatttattcaacactctatcacccgtattctctctctgggctctgcacaagggcagtgagagacatttacagcctcctctctatttgtttttttaaggaaaagtcaactcctgaaatgtcccttagctataatcagaaaactaagaatattattctgtgtcaacaatgtatttatggagagaagtaaaaataagttccacagcaacacatttacatgaattatgaactaggattcttggatttcataatcactccaaagctttttggggatggtgtgtgtgtgtgtgtgtgtccgtaattgttcatcattactttttttaacctatctttttgcttgcttaatcttctctgccccagttcttcctgagtatatgaatttgatttctaaaaacaatttattcaacactctatcacccgtattctctctctggctctgctgcaggtctctgcactcctgattttgctccatacttttaaataacaataataaatatacagttttcatttctcatttaaaaaataggtggaaaacaccaaattcactttctgttccattttaattaggtttcagaagtatcttggaaatcaaggtatgctgcaagaggatattaaaataagaatgttagagagtccttttagaaaggcagtcttgggaatttggaaaaggatttttaaagcagctttcatcagctagactgttctccagcctttctttacttcctctttgaaaggacatagccctggtttctttttgacacaaaggaaagctatgcaaatcatgatctgtatgtagaattggtcacaagtatgttgttgcataggctgtacagttgggaagtagaaaccaaatgctacccagagacctaacccaattaagctctttgtatttctccttcaagaaataaatcttccttccttctttcttcctctttcttttaattttaaaaaaattcatcctgatttttttattttctatcttatttaaaaaataaaaataggccaggcgcggtggctcacacctttaatcccaacactttgggaggcgggtggatcacttgatatcaggagtttgagaccagcctggccaacatagggaaaccctgtctctactaaaaatacaaaaattagccaggcctggtggcacgcgcctgtaatcccagctacttgggaggctgaggcaggagaatcacttgaacctgggaggtggaggttgcagtgagtcaagatcgtgtcactgcactccagcctaggtgacagagtgagactccaactaaaagaaaataaataaataaatatataaatatataaataaataataaaagtaaactattgctgatgactccagggtcaatctggaaaaattaacagtattcctcaactccattactttctgcagccaagcttgattccttgaattatagttttctaagaaaaaatagtttttaataatctaaggtaaatttgttgcaattattagcagcagcataataaggctttttgcgcaaatgaatgttattagctagagttattcaaaaaagaatgaagcacaatttttgctaggacttcttgagaactattcataaaaatgcttttagataataaacaagtataaatgtcaaaatatttttttaaaagtataattggccaggtgctggctcacgcctataatcccagcactctaggagactgaggcaggaggatcacttgagctcgggagtttgaggctgcagtgattcatgattgcaccactgccttccagcagcctgatgacagagtgggactccatctctttacatatgtatatcttactctcttgatgggacaagttggtagaaataaagattttttttttctgttgtgatttcggtgtctgaccaattttctgactcattgtgaaggtgaccagatatgaaggcatatatatgactactcctctgtcccttaggtgtataagacttagctggaatccaactaaagatttgggctggtctctccatcttaacgttgatgggattcaggacacataaccccaaaatattgcaccctgttatttgagaaaactgcagaagcaaggtttctcataccttccccttaccccttctcccctgaagcaggccataaaccctaagtgactgttccctgaagtagatcataaaaccttcattccataggtaccctttatcctcacagatacagagacaccaagaagaatctggacaaataggacttgctaagttctccacagtttattaccattagattatgtccttttgtcctctgattatacttctgcataagactgtacataaaaatacacaagttttcctatttcttttttgtcttcatttctgaagattcctgtcatgtaaaacttacagtaaataaatgtgtgtgcttttctcaataa

SEQ ID NO: 469 - DNA, 321 bp, Homo sapiens
cagggaaggcagtggcaagatggcgtccctggatcgggtgaaggtactggtgttgggagactcaggtgttgggaaatcttcgttagtccatctcctatgccaaaatcaagtgctgggaaatccatcatggactgtgggctgctcagtggatgtcagagttcatgattacaaagaaggaaccccagaagagaagacctactacatagaattatgggatgttggaggctctgtgggcagtgccagcagcaccacgaattcgccgagcagcaccacgaattcagcagcaccacgaattcgccgagcagcaccacgaattcgccg

SEQ ID NO: 470 - DNA, 248 bp, Homo sapiens
cagttagccactttttgcaggtatgtgtgctaagcctttaaaatctttgtttttcacaggtcatagagaagagatactttttaagagaaggtaatcaggttggtatctcttttcttgataaaatagattcttaaattttgataggtgatttccaaatttaagttcagaagtagttttaaaaagttggggaaagccctttataggcacaagcaactgatttccttctatcctgttaaatacaaaaggag

SEQ ID NO: 471 - DNA, 516 bp, Homo sapiens
atgaaaccaaccccaaacacagccaagcagagagatggaaagaactaggaccctaattacaccactgagcagctatagcaaccagttccagagccctctgacttcccgccaaagtgagatgataagatactgtttaatttctctcttttatagccaaacacaccaaaattgacacagagatgtgagccatacctactactgttactgctccatccctagctccaaccacagtgcatggtacatgggtagagagccaacaaacacttgaaggaatgaatgggtgcatattgagtggggatttttccagagggcagacctgggagacaagggctttcaagtgcgtgtgtttgtatttaagggaaatgctcccaggggacaatagcagagtggcagaaatgggacaagggggccagggagccaagaacagagaatcaatcgtctaaacagagccccctgttttttgtttcacctgggagtagcttctacctgatccccaggggaactctgggatgtcag

SEQ ID NO: 472 - DNA, 383 bp, Homo sapiens
atattacataagaagagtatgataacagtgggaaagcatggacaaaattctcttcttgttgcagatacatttatttatttatttagaaacattgtcttgctctgtcacccaggctggagtgcaatggggcgatctcagctcgctgcaacctctgcctcccgggttcaaggaattctgcctcagcctccctagtacctgggattacagtacaggtacgtgccaacacgtccagctaacttttgtatttttagtagagatagagtttcaccttgttggtcagtctggtctggaactcttgacctcaggtgatccattcaccttggcctcccaaagtggtgggattacaggtgtgagccaccatgcccagcaggcagatatacctt

SEQ ID NO: 473 - DNA, 386 bp, Homo sapiens
ccactcacacacctacggacacacgctactctgggaggtgatttgcgacttagccaggcccccaaagctgggctcctgtagggagaaagtctgcccaggtccacatccaagccttcatcgtttgtcctccgggttctgggatcctgctggaagaggggagcttctgcaatgggagttgccacaaccctgcagcccccaaccacttccaaaaccttgcagaagcagcatctagaagcagtgggcgcctaccaatatgtgctcactttcctcttcatgggccctttcttctcccttcttgtctttgtcctcctcttcacgtcactctggcccttctctgttttttacttggtgtggctctatgtggactgggacacacccaaccaagg

SEQ ID NO: 474 - DNA, 450 bp, Homo sapiens
atttgtttaatcaccatacttatatttgtaggggcttgtggatttcttttaatactttgagttgtaatcaaatactgatttattaatcttgttgctcaaattgttccagcttcgcccattgagcgctctctcatttggcttctgtgtccctttgctagaccccattattgtgggtcttggtgttgtatttgtgttttgagcacttttttttttttgagatggagtctcgctctgttgcccaggctggagtgcagagtgtgagctcagtctcaaaaaaaagaagtcagcacacacacatatacctccttgccctatcagctgagagggcctagaaccaatggcaccccagtatcaacaagcacatctagcaccaagattttggttttcaacaccatgcaccaacgaaaggaaccagggatacttgaagaaatggctgattctaggacttgg

SEQ ID NO: 475 - DNA, 163 bp, Homo sapiens
ttacagctttttggaagcactagacataagcacctgatagtaagcaagtttgccaatgtctcacttttgggtcatttaaggcaaaatctgaattaagtattcattttgccagccctcagaaatgtattttaatcatccaatttaacaaatagatttttagtac

SEQ ID NO: 476 - DNA, 296 bp, Homo sapiens
tatccagacgcgtctaagtggcctcacttagcgtaagtaactctataaatcaggggaactgttagcatccaccgcacaggctggctatcaatctcccccaggtcacagccaaacaggaaggggagaaaaaagagagttaccacccaggggagatttaaaacacacacactgagcaaacgcgcacagaccgcgtgcatgcctgtgcgcgcgcacacacgctcggatgcctgtgtttgtacaatcccgttatattcacatgtgcacatgtggaatctcagagtgctgcgtgtggtcgt

SEQ ID NO: 477 - DNA, 349 bp, Homo sapiens
tctcctgcctcagcctcccaagtagctggaattacaggcgcccaccaccacgcccggctaattttttgtatttttagtagagatggggtttcaccatgttggccaggctggtcacgaactcctgacctcaggtgatccacccgcctcggcctcccaaagtgctgggattacaggcatgagccactgcactcagcctactatgtgatttttaaatgacacagttttagaaaagaacagatttgtgtttgccagagattcatgtcaggctggggacaggagggaggcgggtgtgactatagatggacgacatgagcaatcctgtggtactggagcccttcagcatcatgac

SEQ ID NO: 478 - DNA, 482 bp, Homo sapiens
gaaataaaatacatttgttaacaattattaaaactggatgataagtacatgagcactcattatattattcttgttactttggggtaaatctgaaaattcttcagagccactgaaggctttttcaacaggggaatgaggaatgacagatgaaactgcccttctagcaagtacagccctggagtcggaagactagacagcgggctgccaaggagggtcactgtgatgcaggactgagctatgagagtgtcactgggggcggaggggaggatctgggtgtgaacagtattaaggagatagaagcaaaggagctaaagaagcaggaatcaaggatgaatctccagtttcaggcttacatgaatggctgcatggtggggccattcaacattcaagggaattcagaagaaattaaagttaggagtgaagggagtgatcaattccatttcagacgctttgagtgtgaggtgcctgtggaagactcagag

SEQ ID NO: 479 - DNA, 2286 bp, Homo sapiens
actcagcggttacccgcgctgcctccggtgccgctggcgaccgctgagccgcttcccgcgcgtcgcctagcccgcccctcagctcgccgcagccccggctcctccctcgtccggcccccggggcggggtctgtcagcttgccctcccctctccgcctaagcctgccctatgccagccgggtgtcctccccacagcaccacggcttctcttcctcagcacggcgacaggggcttccccttcgccgccgccgccgccgccggccaagctccgccgcgcccgcggcccgcggccgccatgcagtttatgttgctttttagtcgtcagggaaagcttcgactgcaaaaatggtatgtcccactatcagacaaagagaagaaaaagatcacaagagaacttgttcagaccgttttagcacggaaacctaaaatgtgcagcttccttgagtggcgagatctgaagattgtttacaaaagatatgctagtctgtatttttgctgtgctattgaggatcaggacaatgaactaattaccctggaaataattcatcgttatgtggaattacttgacaagtatttcggcagtgtctgtgaactagatatcatctttaattttgagaaggcttattttattttggatgagtttcttttgggaggggaagttcaggaaacatccaagaaaaatgtccttaaagcaattgagcaggctgatctactgcaggaggaagctgaaaccccacgtagtgttcttgaagaaattggactgacataactctcctcccttgttgatgacttcttgtggcatttcacacactgtagatggtcactcccttcatgtccatgttagctcatggtgtaagatgatgtcttgtcagtattactgttttgctaagccgcttcattcatgcctacacaatttttttttaaaagggaactttagttaattaagtgataagggacttaaatatgaattagaatggtgcagaaagagataccttttctggatattttaaagtttaaaggtcagtttctcttaatctgattatgtgcacatatgaaaatggcacatcatatacatgtaaaatcaggcagtatacatttattaattactgtatttgacaaaggaaactcttaaattataatgtgaaacctggttttatgaaaccaaagactagtgcagcatttcagcatatgtaaaaaaaaaaaaaaagggaattgacatgtcacatatcaaatgaatggaaactttgttgaaactttaaaaagcaaatttactccaaagacttgtattggaaattacatacctttttttttttttttaaaggactacagattatttttaatgactaaattggagtgatacttcttacactaaaaattatttcttaggcattctgaatctgggatgagaaacaggattgtttcacaatagtaagcacataatttttaaggccaaggcacatttgactcctgagatgaattttttgtggtcataatcaaatacttagttgtttttgatgccccaaaataaagtgagaatggtaatttgccaggaattcttcataacagtatcttacaaaaaacgtgttgctctcttcacagtattatgtgtaaagtcattgtttaaagcacgaatgttccctctggggtacttgttaaagctaaatttattttgcttccctccacttagaagtgctgcacactttacagcagcttcctttctttccatggcactgcctagttaacagaagtcttataaaaatttaaaaagacacatttcttacaaaaaagagttgaatgaggtaaaatggcattagatggctctatattttttaaagctatgtaattgttcagcgtcacttttctaagtacttatacatatctaaacatgtcttcatggtttatattttcacttatatatgctgggctggattaagctttgttgtgattgtgaccaacattcaggccacgtgagcactgtcttatcacatcgccaattagttgtaataaacgttcaacgtacaaacactggagtgtgtttttatctctttccaaaagtttgtcaaactatgcagagctgctgaaggaagaatttctcatttttttttcagtaaaatgttgaaaattcccctccatttgaatatggtggttgttataagcacacacaagatacatggtggaagatctaaggagtcttcatgtacttcattaaaaaataacatggattccatactgagagcctatctacacatttattttcaatcaataaatgctgcttttaaaaccttga

SEQ ID NO: 480 - DNA, 196 bp, Homo sapiens
gaggatccccgtcaatttctacacgacctagaagtgttttgagtaatattaaatcttaaacacatacatattattaatgaaccatctgtgatttatcttataagaggaaaacatgacaatcattaaaatgtttaccaaagaaaatatagctgaagtgctaggtcaaaataagcagtgccataatatatagtgtagt

SEQ ID NO: 481 - DNA, 2449 bp, Homo sapiens
actcagcggttacccgcgctgcctccggtgccgctggcgaccgctgagccgcttcccgcgcgtcgcctagcccgcccctcagctcgccgcagccccggctcctccctcgtccggcccccggggcggggtctgtcagcttgccctcccctctccgcctaagcctgccctatgccagccgggtgtcctccccacagcaccacggcttctcttcctcagcacggcgacaggggcttccccttcgccgccgccgccgccgccggccaagctccgccgcgcccgcggcccgcggccgccatgcagtttatgttgctttttagtcgtcagggaaagcttcgactgcaaaaatggtatgtcccactatcagacaaagagaagaaaaagatcacaagagaacttgttcagaccgttttagcacggaaacctaaaatgtgcagcttccttgagtggcgagatctgaagattgtttacaaaagatatgctagtctgtatttttgctgtgctattgaggatcaggacaatgaactaattaccctggaaataattcatcgttatgtggaattacttgacaagtatttcggcagtgtctgtgaactagatatcatctttaattttgagaaggcttattttattttggatgagtttcttttgggaggggaagttcaggaaacatccaagaaaaatgtccttaaagcaattgagcaggctgatctactgcaggaggaagctgaaaccccacgtagtgttcttgaagaaattggactgacataactctcctcccttgttgatgacttcttgtggcatttcacacactgtagatggtcactcccttcatgtccatgttagctcatggtgtaagatgatgtcttgtcagtattactgttttgctaagccgcttcattcatgcctacacaatttttttttaaaagggaactttagttaattaagtgataagggacttaaatatgaattagaatggtgcagaaagagataccttttctggatattttaaagtttaaaggtcagtttctcttaatctgattatgtgcacatatgaaaatggcacatcatatacatgtaaaatcaggcagtatacatttattaattactgtatttgacaaaggaaactcttaaattataatgtgaaacctggttttatgaaaccaaagactagtgcagcatttcagcatatgtaaaaaaaaaaaaaaagggaattgacatgtcacatatcaaatgaatggaaactttgttgaaactttaaaaagcaaatttactccaaagacttgtattggaaattacatacctttttttttttttttaaaggactacagattatttttaatgactaaattggagtgatacttcttacactaaaaattatttcttaggcattctgaatctgggatgagaaacaggattgtttcacaatagtaagcacataatttttaaggccaaggcacatttgactcctgagatgaattttttgtggtcataatcaaatacttagttgtttttgatgccccaaaataaagtgagaatggtaatttgccaggaattcttcataacagtatcttacaaaaaacgtgttgctctcttcacagtattatgtgtaaagtcattgtttaaagcacgaatgttccctctggggtacttgttaaagctaaatttattttgcttccctccacttagaagtgctgcacactttacagcagcttcctttctttccatggcactgcctagttaacagaagtcttataaaaatttaaaaagacacatttcttacaaaaaagagttgaatgaggtaaaatggcattagatggctctatattttttaaagctatgtaattgttcagcgtcacttttctaagtacttatacatatctaaacatgtcttcatggtttatattttcacttatatatgctgggctggattaagctttgttgtgattgtgaccaacattcaggccacgtgagcactgtcttatcacatcgccaattagttgtaataaacgttcaacgtacaaacactggagtgtgtttttatctctttccaaaagtttgtcaaactatgcagagctgctgaaggaagaatttctcatttttttttcagtaaaatgttgaaaattcccctccatttgaatatggtggttgttataagcacacacaagatacatggtggaagatctaaggagtcttcatgtacttcattaaaaaataacatggattccatactgagagcctatctacacatttattttcaatcaataaatgctgcttttaaaaccttgaaaaaaagagggacggaaccgaaacgacggggcacacagcacacccccaagagagcagcacacgcgcacaacacccagcggggggcttaaaaaaaattccgagggcggcaccacacgcacgcgccagcatgtgagagagggccccccagaagaagacaaagcac

SEQ ID NO: 482 - DNA, 2272 bp, Homo sapiens
actcagcggttacccgcgctgcctccggtgccgctggcgaccgctgagccgcttcccgcgcgtcgcctagcccgcccctcagctcgccgcagccccggctcctccctcgtccggcccccggggcggggtctgtcagcttgccctcccctctccgcctaagcctgccctatgccagccgggtgtcctccccacagcaccacggcttctcttcctcagcacggcgacaggggcttccccttcgccgccgccgccgccgccggccaagctccgccgcgcccgcggcccgcggccgccatgcagtttatgttgctttttagtcgtcagggaaagcttcgactgcaaaaatggtatgtcccactatcagacaaagagaagaaaaagatcacaagagaacttgttcagaccgttttagcacggaaacctaaaatgtgcagcttccttgagtggcgagatctgaagattgtttacaaaagatatgctagtctgtatttttgctgtgctattgaggatcaggacaatgaactaattaccctggaaataattcatcgttatgtggaattacttgacaagtatttcggcagtgtctgtgaactagatatcatctttaattttgagaaggcttattttattttggatgagtttcttttgggaggggaagttcaggaaacatccaagaaaaatgtccttaaagcaattgagcaggctgatctactgcaggaggaagctgaaaccccacgtagtgttcttgaagaaattggactgacataactctcctcccttgttgatgacttcttgtggcatttcacacactgtagatggtcactcccttcatgtccatgttagctcatggtgtaagatgatgtcttgtcagtattactgttttgctaagccgcttcattcatgcctacacaatttttttttaaaagggaactttagttaattaagtgataagggacttaaatatgaattagaatggtgcagaaagagataccttttctggatattttaaagtttaaaggtcagtttctcttaatctgattatgtgcacatatgaaaatggcacatcatatacatgtaaaatcaggcagtatacatttattaattactgtatttgacaaaggaaactcttaaattataatgtgaaacctggttttatgaaaccaaagactagtgcagcatttcagcatatgtaaaaaaaaaaaaaaagggaattgacatgtcacatatcaaatgaatggaaactttgttgaaactttaaaaagcaaatttactccaaagacttgtattggaaattacatacctttttttttttttttaaaggactacagattatttttaatgactaaattggagtgatacttcttacactaaaaattatttcttaggcattctgaatctgggatgagaaacaggattgtttcacaatagtaagcacataatttttaaggccaaggcacatttgactcctgagatgaattttttgtggtcataatcaaatacttagttgtttttgatgccccaaaataaagtgagaatggtaatttgccaggaattcttcataacagtatcttacaaaaaacgtgttgctctcttcacagtattatgtgtaaagtcattgtttaaagcacgaatgttccctctggggtacttgttaaagctaaatttattttgcttccctccacttagaagtgctgcacactttacagcagcttcctttctttccatggcactgcctagttaacagaagtcttataaaaatttaaaaagacacatttcttacaaaaaagagttgaatgaggtaaaatggcattagatggctctatattttttaaagctatgtaattgttcagcgtcacttttctaagtacttatacatatctaaacatgtcttcatggtttatattttcacttatatatgctgggctggattaagctttgttgtgattgtgaccaacattcaggccacgtgagcactgtcttatcacatcgccaattagttgtaataaacgttcaacgtacaaaaaaaaaaaaaaaaaaaaaaaaaaaaaaaaaaaaaaaaaaaaaaaaaaaaaaaaaaaaaaaaaaaaaaaaattccttggttggccgcttgggccaagtcaattttaaattgaagaaggttattgctggcggccgaatttggggctcatttggccatttcgccctattggggggcggtatcacaatcactggccggcggttaacaacggcgggacgggaaaaccccgccggtcccaattttatggcttgtga

SEQ ID NO: 483 - DNA, 2420 bp, Homo sapiens
actcagcggttacccgcgctgcctccggtgccgctggcgaccgctgagccgcttcccgcgcgtcgcctagcccgcccctcagctcgccgcagccccggctcctccctcgtccggcccccggggcggggtctgtcagcttgccctcccctctccgcctaagcctgccctatgccagccgggtgtcctccccacagcaccacggcttctcttcctcagcacggcgacaggggcttccccttcgccgccgccgccgccgccggccaagctccgccgcgcccgcggcccgcggccgccatgcagtttatgttgctttttagtcgtcagggaaagcttcgactgcaaaaatggtatgtcccactatcagacaaagagaagaaaaagatcacaagagaacttgttcagaccgttttagcacggaaacctaaaatgtgcagcttccttgagtggcgagatctgaagattgtttacaaaagatatgctagtctgtatttttgctgtgctattgaggatcaggacaatgaactaattaccctggaaataattcatcgttatgtggaattacttgacaagtatttcggcagtgtctgtgaactagatatcatctttaattttgagaaggcttattttattttggatgagtttcttttgggaggggaagttcaggaaacatccaagaaaaatgtccttaaagcaattgagcaggctgatctactgcaggaggaagctgaaaccccacgtagtgttcttgaagaaattggactgacataactctcctcccttgttgatgacttcttgtggcatttcacacactgtagatggtcactcccttcatgtccatgttagctcatggtgtaagatgatgtcttgtcagtattactgttttgctaagccgcttcattcatgcctacacaatttttttttaaaagggaactttagttaattaagtgataagggacttaaatatgaattagaatggtgcagaaagagataccttttctggatattttaaagtttaaaggtcagtttctcttaatctgattatgtgcacatatgaaaatggcacatcatatacatgtaaaatcaggcagtatacatttattaattactgtatttgacaaaggaaactcttaaattataatgtgaaacctggttttatgaaaccaaagactagtgcagcatttcagcatatgtaaaaaaaaaaaaaaagggaattgacatgtcacatatcaaatgaatggaaactttgttgaaactttaaaaagcaaatttactccaaagacttgtattggaaattacatacctttttttttttttttaaaggactacagattatttttaatgactaaattggagtgatacttcttacactaaaaattatttcttaggcattctgaatctgggatgagaaacaggattgtttcacaatagtaagcacataatttttaaggccaaggcacatttgactcctgagatgaattttttgtggtcataatcaaatacttagttgtttttgatgccccaaaataaagtgagaatggtaatttgccaggaattcttcataacagtatccccttttgaaccccaatctggggggcttttctctttagacccccgggggggaaaaacccccccccccttaaccgggggggtgtggtggggttgggtgtggtggtgttgggttgggtggtgttgggggttggtgtgtggggggtgggtgtgatgtgggtcatgttattatgtgtaaagtcattgtttaaagcacgaatgttccctctggggtacttgttaaagctaaatttattttgcttccctccacttagaagtgctgcacactttacagcagcttcctttctttccatggcactgcctagttaacagaagtcttataaaaatttaaaaagacacatttcttacaaaaaagagttgaatgaggtaaaatggcattagatggctctatattttttaaagctatgtaattgttcagcgtcacttttctaagtacttatacatatctaaacatgtcttcatggtttatattttcacttatatatgctgggctggattaagctttgttgtgattgtgaccaacattcaggccacgtgagcactgtcttatcacatcgccaattagttgtaataaacgttcaacgtacaaacactggagtgtgtttttatctctttccaaaagtttgtcaaactatgcagagctgctgaaggaagaatttctcatttttttttcagtaaaatgttgaaaattcccctccatttgaatatggtggttgttataagcacacacaagatacatggtggaagatctaaggagtcttcatgtacttcattaaaaaataacatggattccatactgagagcctatctacacatttattttcaatcaataaatgctgcttttaaaaccttga

SEQ ID NO: 484 - DNA, 2243 bp, Homo sapiens
actcagcggttacccgcgctgcctccggtgccgctggcgaccgctgagccgcttcccgcgcgtcgcctagcccgcccctcagctcgccgcagccccggctcctccctcgtccggcccccggggcggggtctgtcagcttgccctcccctctccgcctaagcctgccctatgccagccgggtgtcctccccacagcaccacggcttctcttcctcagcacggcgacaggggcttccccttcgccgccgccgccgccgccggccaagctccgccgcgcccgcggcccgcggccgccatgcagtttatgttgctttttagtcgtcagggaaagcttcgactgcaaaaatggtatgtcccactatcagacaaagagaagaaaaagatcacaagagaacttgttcagaccgttttagcacggaaacctaaaatgtgcagcttccttgagtggcgagatctgaagattgtttacaaaagatatgctagtctgtatttttgctgtgctattgaggatcaggacaatgaactaattaccctggaaataattcatcgttatgtggaattacttgacaagtatttcggcagtgtctgtgaactagatatcatctttaattttgagaaggcttattttattttggatgagtttcttttgggaggggaagttcaggaaacatccaagaaaaatgtccttaaagcaattgagcaggctgatctactgcaggaggaagctgaaaccccacgtagtgttcttgaagaaattggactgacataactctcctcccttgttgatgacttcttgtggcatttcacacactgtagatggtcactcccttcatgtccatgttagctcatggtgtaagatgatgtcttgtcagtattactgttttgctaagccgcttcattcatgcctacacaatttttttttaaaagggaactttagttaattaagtgataagggacttaaatatgaattagaatggtgcagaaagagataccttttctggatattttaaagtttaaaggtcagtttctcttaatctgattatgtgcacatatgaaaatggcacatcatatacatgtaaaatcaggcagtatacatttattaattactgtatttgacaaaggaaactcttaaattataatgtgaaacctggttttatgaaaccaaagactagtgcagcatttcagcatatgtaaaaaaaaaaaaaaagggaattgacatgtcacatatcaaatgaatggaaactttgttgaaactttaaaaagcaaatttactccaaagacttgtattggaaattacatacctttttttttttttttaaaggactacagattatttttaatgactaaattggagtgatacttcttacactaaaaattatttcttaggcattctgaatctgggatgagaaacaggattgtttcacaatagtaagcacataatttttaaggccaaggcacatttgactcctgagatgaattttttgtggtcataatcaaatacttagttgtttttgatgccccaaaataaagtgagaatggtaatttgccaggaattcttcataacagtatcttacaaaaaacgtgttgctctcttcacagtattatgtgtaaagtcattgtttaaagcacgaatgttccctctggggtacttgttaaagctaaatttattttgcttccctccatggcactgcctagttaacagaagtcttataaaaatttaaaaagacacatttcttacaaaaaagagttgaatgaggtaaaatggcattagatggctctatattttttaaagctatgtaattgttcagcgtcacttttctaagtacttatacatatctaaacatgtcttcatggtttatattttcacttatatatgctgggctggattaagctttgttgtgattgtgaccaacattcaggccacgtgagcactgtcttatcacatcgccaattagttgtaataaacgttcaacgtacaaacactggagtgtgtttttatctctttccaaaagtttgtcaaactatgcagagctgctgaaggaagaatttctcatttttttttcagtaaaatgttgaaaattcccctccatttgaatatggtggttgttataagcacacacaagatacatggtggaagatctaaggagtcttcatgtacttcattaaaaaataacatggattccatactgagagcctatctacacatttattttcaatcaataaatgctgcttttaaaaccttga

SEQ ID NO: 485 - DNA, 2030 bp, Homo sapiens
gctagctgaacgactctcttaatctaccaccgctacacatgcagtttatgttgctttttagtcgtcagggaaagcttcgactgcaaaaatggtatgtcccactatcagacaaagagaagaaaaagatcacaagagaacttgttcagaccgttttagcacggaaacctaaaatgtgcagcttccttgagtggcgagatctgaagattgtttacaaaagatatgctagtctgtatttttgctgtgctattgaggatcaggacaatgaactaattaccctggaaataattcatcgttatgtggaattacttgacaagtatttcggcagtgtctgtgaactagatatcatctttaattttgagaaggcttattttattttggatgagtttcttttgggaggggaagttcaggaaacatccaagaaaaatgtccttaaagcaattgagcaggctgatctactgcaggaggaagctgaaaccccacgtagtgttcttgaagaaattggactgacataactctcctcccttgttgatgacttcttgtggcatttcacacactgtagatggtcactcccttcatgtccatgttagctcatggtgtaagatgatgtcttgtcagtattactgttttgctaagccgcttcattcatgcctacacaatttttttttaaaagggaactttagttaattaagtgataagggacttaaatatgaattagaatggtgcagaaagagataccttttctggatattttaaagtttaaaggtcagtttctcttaatctgattatgtgcacatatgaaaatggcacatcatatacatgtaaaatcaggcagtatacatttattaattactgtatttgacaaaggaaactcttaaattataatgtgaaacctggttttatgaaaccaaagactagtgcagcatttcagcatatgtaaaaaaaaaaaaaaagggaattgacatgtcacatatcaaatgaatggaaactttgttgaaactttaaaaagcaaatttactccaaagacttgtattggaaattacatacctttttttttttttttaaaggactacagattatttttaatgactaaattggagtgatacttcttacactaaaaattatttcttaggcattctgaatctgggatgagaaacaggattgtttcacaatagtaagcacataatttttaaggccaaggcacatttgactcctgagatgaattttttgtggtcataatcaaatacttagttgtttttgatgccccaaaataaagtgagaatggtaatttgccaggaattcttcataacagtatcttacaaaaaacgtgttgctctcttcacagtattatgtgtaaagtcattgtttaaagcacgaatgttccctctggggtacttgttaaagctaaatttattttgcttccctccacttagaagtgctgcacactttacagcagcttcctttctttccatggcactgcctagttaacagaagtcttataaaaatttaaaaagacacatttcttacaaaaaagagttgaatgaggtaaaatggcattagatggctctatattttttaaagctatgtaattgttcagcgtcacttttctaagtacttatacatatctaaacatgtcttcatggtttatattttcacttatatatgctgggctggattaagctttgttgtgattgtgaccaacattcaggccacgtgagcactgtcttatcacatcgccaattagttgtaataaacgttcaacgtacaaacactggagtgtgtttttatctctttccaaaagtttgtcaaactatgcagagctgctgaaggaagaatttctcatttttttttcagtaaaatgttgaaaattcccctccatttgaatatggtggttgttataagcacacacaagatacatggtggaagatctaaggagtcttcatgtacttcattaaaaaataacatggattccatactgagagcctatctacacatttattttcaatcaataaatgctgcttttaaaaccttga

SEQ ID NO: 486 - DNA, 2058 bp, Homo sapiens
aagaatgctgagcaactcctcagaagtttggagagcctttcaagtcctaaagatgacaaagatgtgatgcagtttatgttgctttttagtcgtcagggaaagcttcgactgcaaaaatggtatgtcccactatcagacaaagagaagaaaaagatcacaagagaacttgttcagaccgttttagcacggaaacctaaaatgtgcagcttccttgagtggcgagatctgaagattgtttacaaaagatatgctagtctgtatttttgctgtgctattgaggatcaggacaatgaactaattaccctggaaataattcatcgttatgtggaattacttgacaagtatttcggcagtgtctgtgaactagatatcatctttaattttgagaaggcttattttattttggatgagtttcttttgggaggggaagttcaggaaacatccaagaaaaatgtccttaaagcaattgagcaggctgatctactgcaggaggaagctgaaaccccacgtagtgttcttgaagaaattggactgacataactctcctcccttgttgatgacttcttgtggcatttcacacactgtagatggtcactcccttcatgtccatgttagctcatggtgtaagatgatgtcttgtcagtattactgttttgctaagccgcttcattcatgcctacacaatttttttttaaaagggaactttagttaattaagtgataagggacttaaatatgaattagaatggtgcagaaagagataccttttctggatattttaaagtttaaaggtcagtttctcttaatctgattatgtgcacatatgaaaatggcacatcatatacatgtaaaatcaggcagtatacatttattaattactgtatttgacaaaggaaactcttaaattataatgtgaaacctggttttatgaaaccaaagactagtgcagcatttcagcatatgtaaaaaaaaaaaaaaagggaattgacatgtcacatatcaaatgaatggaaactttgttgaaactttaaaaagcaaatttactccaaagacttgtattggaaattacatacctttttttttttttttaaaggactacagattatttttaatgactaaattggagtgatacttcttacactaaaaattatttcttaggcattctgaatctgggatgagaaacaggattgtttcacaatagtaagcacataatttttaaggccaaggcacatttgactcctgagatgaattttttgtggtcataatcaaatacttagttgtttttgatgccccaaaataaagtgagaatggtaatttgccaggaattcttcataacagtatcttacaaaaaacgtgttgctctcttcacagtattatgtgtaaagtcattgtttaaagcacgaatgttccctctggggtacttgttaaagctaaatttattttgcttccctccacttagaagtgctgcacactttacagcagcttcctttctttccatggcactgcctagttaacagaagtcttataaaaatttaaaaagacacatttcttacaaaaaagagttgaatgaggtaaaatggcattagatggctctatattttttaaagctatgtaattgttcagcgtcacttttctaagtacttatacatatctaaacatgtcttcatggtttatattttcacttatatatgctgggctggattaagctttgttgtgattgtgaccaacattcaggccacgtgagcactgtcttatcacatcgccaattagttgtaataaacgttcaacgtacaaacactggagtgtgtttttatctctttccaaaagtttgtcaaactatgcagagctgctgaaggaagaatttctcatttttttttcagtaaaatgttgaaaattcccctccatttgaatatggtggttgttataagcacacacaagatacatggtggaagatctaaggagtcttcatgtacttcattaaaaaataacatggattccatactgagagcctatctacacatttattttcaatcaataaatgctgcttttaaaaccttga

SEQ ID NO: 487 - DNA, 2004 bp, Homo sapiens
atccttaattaaattaatcccccccccccctttagtcgtcagggaaagcttcgactgcaaaaatggtatgtcccactatcagacaaagagaagaaaaagatcacaagagaacttgttcagaccgttttagcacggaaacctaaaatgtgcagcttccttgagtggcgagatctgaagattgtttacaaaagatatgctagtctgtatttttgctgtgctattgaggatcaggacaatgaactaattaccctggaaataattcatcgttatgtggaattacttgacaagtatttcggcagtgtctgtgaactagatatcatctttaattttgagaaggcttattttattttggatgagtttcttttgggaggggaagttcaggaaacatccaagaaaaatgtccttaaagcaattgagcaggctgatctactgcaggaggaagctgaaaccccacgtagtgttcttgaagaaattggactgacataactctcctcccttgttgatgacttcttgtggcatttcacacactgtagatggtcactcccttcatgtccatgttagctcatggtgtaagatgatgtcttgtcagtattactgttttgctaagccgcttcattcatgcctacacaatttttttttaaaagggaactttagttaattaagtgataagggacttaaatatgaattagaatggtgcagaaagagataccttttctggatattttaaagtttaaaggtcagtttctcttaatctgattatgtgcacatatgaaaatggcacatcatatacatgtaaaatcaggcagtatacatttattaattactgtatttgacaaaggaaactcttaaattataatgtgaaacctggttttatgaaaccaaagactagtgcagcatttcagcatatgtaaaaaaaaaaaaaaagggaattgacatgtcacatatcaaatgaatggaaactttgttgaaactttaaaaagcaaatttactccaaagacttgtattggaaattacatacctttttttttttttttaaaggactacagattatttttaatgactaaattggagtgatacttcttacactaaaaattatttcttaggcattctgaatctgggatgagaaacaggattgtttcacaatagtaagcacataatttttaaggccaaggcacatttgactcctgagatgaattttttgtggtcataatcaaatacttagttgtttttgatgccccaaaataaagtgagaatggtaatttgccaggaattcttcataacagtatcttacaaaaaacgtgttgctctcttcacagtattatgtgtaaagtcattgtttaaagcacgaatgttccctctggggtacttgttaaagctaaatttattttgcttccctccacttagaagtgctgcacactttacagcagcttcctttctttccatggcactgcctagttaacagaagtcttataaaaatttaaaaagacacatttcttacaaaaaagagttgaatgaggtaaaatggcattagatggctctatattttttaaagctatgtaattgttcagcgtcacttttctaagtacttatacatatctaaacatgtcttcatggtttatattttcacttatatatgctgggctggattaagctttgttgtgattgtgaccaacattcaggccacgtgagcactgtcttatcacatcgccaattagttgtaataaacgttcaacgtacaaacactggagtgtgtttttatctctttccaaaagtttgtcaaactatgcagagctgctgaaggaagaatttctcatttttttttcagtaaaatgttgaaaattcccctccatttgaatatggtggttgttataagcacacacaagatacatggtggaagatctaaggagtcttcatgtacttcattaaaaaataacatggattccatactgagagcctatctacacatttattttcaatcaataaatgctgcttttaaaaccttga

SEQ ID NO: 488 - DNA, 2380 bp, Homo sapiens
actcagcggttacccgcgctgcctccggtgccgctggcgaccgctgagccgcttcccgcgcgtcgcctagcccgcccctcagctcgccgcagccccggctcctccctcgtccggcccccggggcggggtctgtcagcttgccctcccctctccgcctaagcctgccctatgccagccgggtgtcctccccacagcaccacggcttctcttcctcagcacggcgacaggggcttccccttcgccgccgccgccgccgccggccaagctccgccgcgcccgcggcccgcggccgccatgcagtttatgttgctttttagtcgtcagggaaagcttcgactgcaaaaatggtatgtcccactatcagacaaagagaagaaaaagatcacaagagaacttgttcagaccgttttagcacggaaacctaaaatgtgcagcttccttgagtggcgagatctgaagattgtttacaaaagatatgctagtctgtatttttgctgtgctattgaggatcaggacaatgaactaattaccctggaaataattcatcgttatgtggaattacttgacaagtatttcggcagtgtctgtgaactagatatcatctttaattttgagaaggcttattttattttggatgagtttcttttgggaggggaagttcaggaaacatccaagaaaaatgtccttaaagcaattgagcaggctgatctactgcaggagagccagaatgaagaatggggaggttgtctgaggatatcttatgataaagagcagtctaaggctttagtccctttgatccccaacttatttattggaagctgaaaccccacgtagtgttcttgaagaaattggactgacataactctcctcccttgttgatgacttcttgtggcatttcacacactgtagatggtcactcccttcatgtccatgttagctcatggtgtaagatgatgtcttgtcagtattactgttttgctaagccgcttcattcatgcctacacaatttttttttaaaagggaactttagttaattaagtgataagggacttaaatatgaattagaatggtgcagaaagagataccttttctggatattttaaagtttaaaggtcagtttctcttaatctgattatgtgcacatatgaaaatggcacatcatatacatgtaaaatcaggcagtatacatttattaattactgtatttgacaaaggaaactcttaaattataatgtgaaacctggttttatgaaaccaaagactagtgcagcatttcagcatatgtaaaaaaaaaaaaaaagggaattgacatgtcacatatcaaatgaatggaaactttgttgaaactttaaaaagcaaatttactccaaagacttgtattggaaattacatacctttttttttttttttaaaggactacagattatttttaatgactaaattggagtgatacttcttacactaaaaattatttcttaggcattctgaatctgggatgagaaacaggattgtttcacaatagtaagcacataatttttaaggccaaggcacatttgactcctgagatgaattttttgtggtcataatcaaatacttagttgtttttgatgccccaaaataaagtgagaatggtaatttgccaggaattcttcataacagtatcttacaaaaaacgtgttgctctcttcacagtattatgtgtaaagtcattgtttaaagcacgaatgttccctctggggtacttgttaaagctaaatttattttgcttccctccacttagaagtgctgcacactttacagcagcttcctttctttccatggcactgcctagttaacagaagtcttataaaaatttaaaaagacacatttcttacaaaaaagagttgaatgaggtaaaatggcattagatggctctatattttttaaagctatgtaattgttcagcgtcacttttctaagtacttatacatatctaaacatgtcttcatggtttatattttcacttatatatgctgggctggattaagctttgttgtgattgtgaccaacattcaggccacgtgagcactgtcttatcacatcgccaattagttgtaataaacgttcaacgtacaaacactggagtgtgtttttatctctttccaaaagtttgtcaaactatgcagagctgctgaaggaagaatttctcatttttttttcagtaaaatgttgaaaattcccctccatttgaatatggtggttgttataagcacacacaagatacatggtggaagatctaaggagtcttcatgtacttcattaaaaaataacatggattccatactgagagcctatctacacatttattttcaatcaataaatgctgcttttaaaaccttga

SEQ ID NO: 489 - DNA, 2033 bp, Homo sapiens
gacacagttaactaaaaactccaagaggaagacatttctataaatgcatgtgacaaaaagcatggaacacaacagtaggcgaagaactgtgggaactcggagggaagaggttttgaattttaccactaagataacttatctttcatatatataattgagtagcagtgatttcataaattgccagcaggtttgcactgggcttgactgctttttgcatgacagcaacggcatctagcacattggtaggtaattagcaggtacttaatgaatgctgaaaacgtccttttgtggtctccaattttgagggcacaaaaccctaaataaccaatggctgtcaactagaatgctactgtgacacgaaattgctttcttgattctctaaaacaagcatgttcttccatgtcaatgtttcacattctcaagactccctggatctgcttaccagagtctcacattttccctccacagaagctgaaaccccacgtagtgttcttgaagaaattggactgacataactctcctcccttgttgatgacttcttgtggcatttcacacactgtagatggtcactcccttcatgtccatgttagctcatggtgtaagatgatgtcttgtcagtattactgttttgctaagccgcttcattcatgcctacacaatttttttttaaaagggaactttagttaattaagtgataagggacttaaatatgaattagaatggtgcagaaagagataccttttctggatattttaaagtttaaaggtcagtttctcttaatctgattatgtgcacatatgaaaatggcacatcatatacatgtaaaatcaggcagtatacatttattaattactgtatttgacaaaggaaactcttaaattataatgtgaaacctggttttatgaaaccaaagactagtgcagcatttcagcatatgtaaaaaaaaaaaaaaagggaattgacatgtcacatatcaaatgaatggaaactttgttgaaactttaaaaagcaaatttactccaaagacttgtattggaaattacatacctttttttttttttttaaaggactacagattatttttaatgactaaattggagtgatacttcttacactaaaaattatttcttaggcattctgaatctgggatgagaaacaggattgtttcacaatagtaagcacataatttttaaggccaaggcacatttgactcctgagatgaattttttgtggtcataatcaaatacttagttgtttttgatgccccaaaataaagtgagaatggtaatttgccaggaattcttcataacagtatcttacaaaaaacgtgttgctctcttcacagtattatgtgtaaagtcattgtttaaagcacgaatgttccctctggggtacttgttaaagctaaatttattttgcttccctccacttagaagtgctgcacactttacagcagcttcctttctttccatggcactgcctagttaacagaagtcttataaaaatttaaaaagacacatttcttacaaaaaagagttgaatgaggtaaaatggcattagatggctctatattttttaaagctatgtaattgttcagcgtcacttttctaagtacttatacatatctaaacatgtcttcatggtttatattttcacttatatatgctgggctggattaagctttgttgtgattgtgaccaacattcaggccacgtgagcactgtcttatcacatcgccaattagttgtaataaacgttcaacgtacaaacactggagtgtgtttttatctctttccaaaagtttgtcaaactatgcagagctgctgaaggaagaatttctcatttttttttcagtaaaatgttgaaaattcccctccatttgaatatggtggttgttataagcacacacaagatacatggtggaagatctaaggagtcttcatgtacttcattaaaaaataacatggattccatactgagagcctatctacacatttattttcaatcaataaatgctgcttttaaaaccttga

SEQ ID NO: 490 - DNA, 1263 bp, Homo sapiens
actcagcggttacccgcgctgcctccggtgccgctggcgaccgctgagccgcttcccgcgcgtcgcctagcccgcccctcagctcgccgcagccccggctcctccctcgtccggcccccggggcggggtctgtcagcttgccctcccctctccgcctaagcctgccctatgccagccgggtgtcctccccacagcaccacggcttctcttcctcagcacggcgacaggggcttccccttcgccgccgccgccgccgccggccaagctccgccgcgcccgcggcccgcggccgccatgcagtttatgttgctttttagtcgtcagggaaagcttcgactgcaaaaatggtatgtcccactatcagacaaagagaagaaaaagatcacaagagaacttgttcagaccgttttagcacggaaacctaaaatgtgcagcttccttgagtggcgagatctgaagattgtttacaaaagatatgctagtctgtatttttgctgtgctattgaggatcaggacaatgaactaattaccctggaaataattcatcgttatgtggaattacttgacaagtatttcggcagtgtctgtgaactagatatcatctttaattttgagaaggcttattttattttggatgagtttcttttgggaggggaagttcaggaaacatccaagaaaaatgtccttaaagcaattgagcaggctgatctactgcaggagagtttcttttcttcttgaaggatgtttttccagtgaagaggggtttctccctatgaagagtattctcacatttaatagatgccacgtcatgaatattttaatgtccctgtgtactaaatgactactcatcgagtatgcagaatttcacagaggaaatagaatgctgatatacatatgaaagaaaatatcctcagcatggtgatttattgtcttgtataataatagtagaacattttagaactagtacttttatgattgtatttttttcctgttcacattccaaacttttctgttttattttcattctatatgtgatcttgatacagctcattcctttctgcaactgatttaatctcatcttgacaaaatatgacctagaagtgttttgagtaatattaaatcttaaacacatacatattattaatgaaccatctgtgatttatcttataagaggaaaacatgacaatcattaaaatgtttaccaaagaaaatatagctgaagtgctaggtcaaaataagcagtgccataatatatagtgtagt

SEQ ID NO: 491 - DNA, 1020 bp, Homo sapiens
actcagcggttacccgcgctgcctccggtgccgctggcgaccgctgagccgcttcccgcgcgtcgcctagcccgcccctcagctcgccgcagccccggctcctccctcgtccggcccccggggcggggtctgtcagcttgccctcccctctccgcctaagcctgccctatgccagccgggtgtcctccccacagcaccacggcttctcttcctcagcacggcgacaggggcttccccttcgccgccgccgccgccgccggccaagctccgccgcgcccgcggcccgcggccgccatgcagtttatgttgctttttagtcgtcagggaaagcttcgactgcaaaaatggtatgtcccactatcagacaaagagaagaaaaagatcacaagagaacttgttcagaccgttttagcacggaaacctaaaatgtgcagcttccttgagtggcgagatctgaagattgtttacaaaagatatgctagtctgtatttttgctgtgctattgaggatcaggacaatgaactaattaccctggaaataattcatcgttatgtggaattacttgacaagtatttcggcagtgtctgtgaactagatatcatctttaattttgagaaggcttattttattttggatgagtttcttttgggaggggaagttcaggaaacatccaagaaaaatgtccttaaagcaattgagcaggctgatctactgcaggagagtttcttttcttcttgaaggatgtttttccagtgaagaggggtttctccctatgaagagtattctcacatttaatagatggtaatttcttacttaagtacagtaatatggatcaatggctataaagaatagtttggcttatcatcaacccttttctttcctaaaagcagtaaaaggtgtgtcagggtataagtggtggaaatgcctgggtggtcacattgagaattgttcctgtagaattgctggtgtagttcatagtaagtctcctggggaggaatggttgcatactccgccctgttt

SEQ ID NO: 492 - DNA, 1182 bp, Homo sapiens
actcagcggttacccgcgctgcctccggtgccgctggcgaccgctgagccgcttcccgcgcgtcgcctagcccgcccctcagctcgccgcagccccggctcctccctcgtccggcccccggggcggggtctgtcagcttgccctcccctctccgcctaagcctgccctatgccagccgggtgtcctccccacagcaccacggcttctcttcctcagcacggcgacaggggcttccccttcgccgccgccgccgccgccggccaagctccgccgcgcccgcggcccgcggccgccatgcagtttatgttgctttttagtcgtcagggaaagcttcgactgcaaaaatggtatgtcccactatcagacaaagagaagaaaaagatcacaagagaacttgttcagaccgttttagcacggaaacctaaaatgtgcagcttccttgagtggcgagatctgaagattgtttacaaaagatatgctagtctgtatttttgctgtgctattgaggatcaggacaatgaactaattaccctggaaataattcatcgttatgtggaattacttgacaagtatttcggcagtgtctgtgaactagatatcatctttaattttgagaaggcttattttattttggatgagtttcttttgggaggggaagttcaggaaacatccaagaaaaatgtccttaaagcaattgagcaggctgatctactgcaggagccacgtcatgaatattttaatgtccctgtgtactaaatgactactcatcgagtatgcagaatttcacagaggaaatagaatgctgatatacatatgaaagaaaatatcctcagcatggtgatttattgtcttgtataataatagtagaacattttagaactagtacttttatgattgtatttttttcctgttcacattccaaacttttctgttttattttcattctatatgtgatcttgatacagctcattcctttctgcaactgatttaatctcatcttgacaaaatatgacctagaagtgttttgagtaatattaaatcttaaacacatacatattattaatgaaccatctgtgatttatcttataagaggaaaacatgacaatcattaaaatgtttaccaaagaaaatatagctgaagtgctaggtcaaaataagcagtgccataatatatagtgtagt

SEQ ID NO: 493 - DNA, 618 bp, Homo sapiens
ttttcttacaaaaaagagccatctaatgccattttacctcattcaactcttttttgtaagaaatgtgtctttttaaatttttataagacttctgttaactaggcagtgcatggaaagaaaggaagctgctgtaaaatggcattagatggctctatattttttaaagctatgtaattgttcagcgtcacttttctaagtacttatacatatctaaacatgtcttcatggtttatattttcacttatatatgctgggctggattaagctttgttgtgattgtgaccaacattcaggccacgtgagcactgtcttatcacatcgccaattagttgtaataaacgttcaacgtacaaacactggagtgtgtttttatctctttccaaaagtttgtcaaactatgcagagctgctgaaggaagaatttctcatttttttttcagtaaaatgttgaaaattcccctccatttgaatatggtggttgttataagcacacacaagatacatggtggaagatctaaggagtcttcatgtacttcattaaaaaataacatggattccatactgagagcctatctacacatttattttcaatcaataaatgctgcttttaaaaccttga

SEQ ID NO: 494 - DNA, 900 bp, Homo sapiens
atccttaattaaattaatcccccccccccctttagtcgtcagggaaagcttcgactgcaaaaatggtatgtcccactatcagacaaagagaagaaaaagatcacaagagaacttgttcagaccgttttagcacggaaacctaaaatgtgcagcttccttgagtggcgagatctgaagattgtttacaaaagatatgctagtctgtatttttgctgtgctattgaggatcaggacaatgaactaattaccctggaaataattcatcgttatgtggaattacttgacaagtatttcggcagtgtctgtgaactagatatcatctttaattttgagaaggcttattttattttggatgagtttcttttgggaggggaagttcaggaaacatccaagaaaaatgtccttaaagcaattgagcaggctgatctactgcaggagccacgtcatgaatattttaatgtccctgtgtactaaatgactactcatcgagtatgcagaatttcacagaggaaatagaatgctgatatacatatgaaagaaaatatcctcagcatggtgatttattgtcttgtataataatagtagaacattttagaactagtacttttatgattgtatttttttcctgttcacattccaaacttttctgttttattttcattctatatgtgatcttgatacagctcattcctttctgcaactgatttaatctcatcttgacaaaatatgacctagaagtgttttgagtaatattaaatcttaaacacatacatattattaatgaaccatctgtgatttatcttataagaggaaaacatgacaatcattaaaatgtttaccaaagaaaatatagctgaagtgctaggtcaaaataagcagtgccataatatatagtgtagt

SEQ ID NO: 495 - DNA, 1060 bp, Homo sapiens
tagacactcaaatctggagagttcgttaaaatctgtcttgaggatttttaaaaaagtaatatcctcagtctcagtcaaattctttggattttttgcttttgtaggtataagtaaacggttaaaaaccttcattgctacttaaaataccagatgagtgactacttttccagtttttattgggaaagatttttctctaggttctttagtttatgtaatacaaatgaactaatgaatttaaatactggtggaaggggaatattctaattgaatttttggtcaactcagtattgaccagatgacttacactgaaaatcttttcataatattagtagtaaatatagtgttttaggattttgtaaaatttctggaggatgtctgtcatcattttgaacactgtatgtagtaaagttagaaaaaaatgaatctaaagtcttgggcattgtttagaagttaaatattcagccttaaaccaaagaatgaaagcaaacagaaacttaagttttagttatctttactgtgagctaaatgttctagaaatctgattgtgtctgtgtcagtttgtatactgtgtgtaagaatatatgcatttcttttgtagccacgtcatgaatattttaatgtccctgtgtactaaatgactactcatcgagtatgcagaatttcacagaggaaatagaatgctgatatacatatgaaagaaaatatcctcagcatggtgatttattgtcttgtataataatagtagaacattttagaactagtacttttatgattgtatttttttcctgttcacattccaaacttttctgttttattttcattctatatgtgatcttgatacagctcattcctttctgcaactgatttaatctcatcttgacaaaatatgacctagaagtgttttgagtaatattaaatcttaaacacatacatattattaatgaaccatctgtgatttatcttataagaggaaaacatgacaatcattaaaatgtttaccaaagaaaatatagctgaagtgctaggtcaaaataagcagtgccataatatatagtgtagt

SEQ ID NO: 496 - DNA, 824 bp, Homo sapiens
ttttttttttttgaaacagtctcgctctgtcactcaggctgaagtgcagtggcgcgatctcagctcactgcaacctctgcctccagggttcaagtgactctcctgcctaagcctcccgagtaactgagactacaggcacccgccaccacaccaagctaatttttgtactttcagtagacagggtttcaccatgttacccaggctggtctcgaactcctgacctcaagtgattcgcccatctcggcctcccaaagtgctgaggtcacaggcatgagccaccatgccaggacaaaacgtaattttagatctcttatgctaagtggccattttcatttaaattttaaatttaagagccaggtctcactaggttacccaggctgcttgcaatcatagcacgctacagcttcaaattcccaggctatagcgatcctcttgccttagcctccccagtagcagggactacaagtgtgcaccacggcactaagctccaatttttatttgttatctgcttctgtctataagctccacgaggacaggagccaactgtttatttcctactcttgcagggttttgtttgaccccttcaacaaatctctccacttgctgcattacaggggtctcttgccttttgccttctacttggatacaagcaataggagcaccaacaggtcagaagatggaaaagaatgaaatccagttatttattcccccagcttattaattaatgaaaggtataggccggggacgcacggtggctcacgcctgtaatcccagcacattgggaggcctcgtgcagatcatgaggtcaggagaacgagaccatc

SEQ ID NO: 497 - DNA, 486 bp, Homo sapiens
ccgctctagagtgacccctgcacacgccgaagaaccaggctgcttgcaatcatagcacgctacagcttcaaattcccaggctatagcgatcctcttgccttagcctccccagtagcagggactacaagtgtgcaccacggcactaagctccaatttttatttgttatctgcttctgtctataagctccacgaggacaggagccaactgtttatttcctactcttgcagggttttgtttgaccccttcaacaaatctctccacttgctgcattacaggggtctcttgccttttgccttctacttggatacaagcaataggagcaccaacaggtcagaagatggaaaagaatgaaatccagttatttattcccccagcttattaattaatgaaaggtataggccggggacgcacggtggctcacgcctgtaatcccagcacattgggaggcctcgtgcagatcatgaggtcaggagaacgagaccatc

SEQ ID NO: 498 - DNA, 816 bp, Homo sapiens
cgcgcgtggcgagtctgtgtcctccctgtcccccagagcagagaaccctctctgtgtctggaccggggaggagcagacgctggacaggtttttggcagaatgctggcaattcccaggaagatatgtggagaacggaaaggttgctacacccaaatagtggcgcaaaggctatgattatggaggattggacctgcaaactccagaacagagcaaccttgtaaaatgtgtgtgggcagcacagagaccttgggcaagttaacagtttcctcatctgtaaatactgatttatggaaagcacctggtgtatgttctgccctctgaggaccctgccctttcccaaaaggggtatcttaagaaggaaaatatggctgctctttgccggacagcagagtcccagagtctcgttctgttgcccaggctggagtgcagtggcgtgatctcggctcactgcaagcttcgcctcccgggttcacgccattctcctgcttcagcctcccgagtagctgggactacaggcgcccaccaccatgcctggctaattttttttgtatttatagtagagatggggtttcaccgtgttagccaggatggtctcgatctcctgacctcgtgatctgcccgcctcggcctcccaaagtgctgggattacaggcgtgagccactgcacccagccgatagttttcttataattgagttctgtatataaaattactgtaaaacaaaactatcaaattatgtcaagggggtatacgcattttaagattttaagattctttaatatatgagtcaataaaatcttgtctttgacactgcgaa

SEQ ID NO: 499 - DNA, 984 bp, Homo sapiens
cgcgcgtggcgagtctgtgtcctccctgtcccccagagcagagaaccctctctgtgtctggaccggggaggagcagacgctggacaggtttttggcagaatgctggcaattcccaggaagatatgtggagaacggaaaggttgctacacccaaatagtggcgcaaaggctatgattatggaggattggacctgcaaactccagaacagagcaaccttgtaaaatgtgtgtgggcagcacagagaccttgggcaagttaacagtttcctcatctgtaaatactgatttatggaaagcacctggtgtatgttctgccctctgaggaccctgccctttcccaaaaggggtatcttaagaaggaaaatatggctgctctttgccggacagcagagtcccagaaccccatgcaggtgtttcagggctttacgtcattcaaggatgtggctgtgaacttcactaggaagaatggagagtactggaccttgctcagagagtcttgtacagggatgtaatgctggagaactataggaacctggtctccttgggatttccattttccaaacctggtatcatctcctagttggaagaagtggtaggcccacgaacgcaaatgcaggagggagaggtgccaagaagcagctcagcctcccgagtagctgggattacaggtgcctgccaccacacccagctaacgttttgtatttttagtagagatggggtttcaccatgttggccaggcagatctcaaacttctgacctcgtgatgcactcacctcggcctcccaaagtgctgggattgcaggcgtgagccactgcgccctgcctgtttgtagtaatttttaggcaccaaatctccctcatcttctagtgccattctcctctctgttcaggtaaatgtcacactgtgcccagaatggatgaccaggaaccttcaagagtggctgaaaagattgcagagttatcataataaattgctaacttgcgt

SEQ ID NO: 500 - DNA, 434 bp, Homo sapiens
gccagagcaggatgaccatatcatttaaattcattccaaagacaataggaaaccattttaagcctgggagtaactttaaaaaaagatgactctgactgtcatagagggtatagagcgcaagattggaagcaaggaaagtagttatgtttctacctcgtgttttgtgacttgtatatttcccttcactatttcattaatatctttcaggattgttaatgtcctgctgtgttctcatttttaacagctgcataggaatctggtatgataccctactttgttaatcctctgagtgcctagattgtatccaatttttttattatcatgaacagcactgaaatgagtgttgttaaatctttctgcacatttttgttctcaggataattcccaacaggggaagtccttgaccaagagtaggattcatttgaagacttttt

SEQ ID NO: 501 - DNA, 171 bp, Homo sapiens
aagaaagaaagaaagaaagaaaggaaggaaggaaggaaagaattgcaatctctatgtagtattggaggtggggcctggtgggaggtaattggatcacaggggtggattgctcatgaatggtttagcaccatcctcttggtgcaggtgcagtcctcatgatagcgagtgagt

SEQ ID NO: 502 - DNA, 672 bp, Homo sapiens
tgaaacattaaataagaaaaaagtattatttaagttttctgttaaatactggttttattttttctatcaaaaagtcataaaaatttaaattaatgtatattatttaaagttatttactaagtgaatctaaacttaatcattttctataggtaaatagtgaacttatttttgattcaaatgtgcttatactaattatagtaattgaaattataatgggaaagggaaaactttatataatttgtgacatgagtatgtctaggaccattctaaaaataacagcagagttggttgcttccatgtatgatgcatataacctagagtagggtaacctcctgcccgtcagtggtgtgccagagcacaggcttggggtgcacagtccatcagtgagcgaaacttgtaagtgtgttgtccaggcagtgtgccaagcagcatattccaacaaattgaagagaaagaaaatgtaagtctaattatggagacagaggcagaagcacagctcttctcaagtctatgtttgttgaattttattttaagatctctgccttttggaatgtatcttgcagatgttttcactgaattttacaagagacattgcacaattaggttatctcttgcatcctgtaacttaaatcattcaaagctcaggtccagcgtagaatttctagagaataa

SEQ ID NO: 503 - DNA, 629 bp, Homo sapiens
attccccatgtcgaccctaaattaagtgaagacttcatggttcatgtgactctcataatatttgatagtatgtattatttaattacttaatatccactaattagactcttttccttctaaagaagaatgtcccccaaacaacacattgtaactttctaaaagacagttggtgccagatgagattaaaaatgcagttactctactagataatattcaccttacacttcggtaaacactcctttaataactatttgttggtttctcaaaagcaatatcccatattaaacagacaattcaaatgtgacaattcctctgtaacaaagaagctgaattctgtaataaatgggaaacatttcattccagtcttctcaggtaccagaatcatggacttcagtagaagagagggaatagggagagaggtgggaggctgatctgttcgtggcccagcacggtgctgtaattcctgacccttctggtttccacagatcattgcagagtaatgcttgaagcgtgtgactttggacttctgctgctttaaaaggcccagtggctttccaaccaaatccttagactcaatctattggtgtgtttgtctaataaattctttttgtagtaaattaaaaaaaaat

SEQ ID NO: 504 - DNA, 447 bp, Homo sapiens
tgctccaccatgagcttgcctgggccttggctcacctccggtgccacacagggacaacctctcttgtctcaatgagacccttatcaatagtacaacccctgggtttgccaatgtctgtccctttcaggtgtgaggaggttaaaaacttgttcagggtaaccaggtagcaacgggacaaatcactgtatctcgggaccccggggccccagggttgttttcaggagatgcggcctcagtggaagggacctttttttctagagggggcccaggcctccccaggccaagggtcctcgcttggctggaggcgtctctgctgctttgcctggtggggagggccccagtctgagtgtgccaccctccggagggcgtctcctctgagtgagtgctagctgagtgatgtgggcgccgtcctcacagggctgcttcccttgcgcgtgtgccggctgc

SEQ ID NO: 505 - DNA, 464 bp, Homo sapiens
aaacatgttcctcaaacccaattaatgtcgatgaccagcaatgaccaacacacttccacccctctgtgttttaagaaatgtcattcatctctatggaaaagagaacaaacaagaagcataaaggtatttttgaagtatactgttatgaggtacttggctagtaatttgcagcctaggtacacagcataccttttagcacggctatttatctctcagggagaatgctgccgtacttacgataaaggctctgttggacctcttcatcaatagcaaacctttaaggcacagcacatctcataaatagggagttccactaacacagactttcaaaagggtaggaacttggataatttcaaaaataggaggctattatttaaggtgtttccaggcagtccatccataaaagccgtcgtatattccaaatgccagagtcctccgagcaacatgacaggtctattagaata

SEQ ID NO: 506 - DNA, 272 bp, Homo sapiens
tctttaccctaggtgctatgggtttatgagaacataaatgatacatagttatagaatcacaagctgaatagactccaacattgtctaccatgaaagaaacatttattctccaccttatgccatgccactacttttgtttggacctattgaggtacatttattttattggattttaatgagcttgggacactgagaatgcatgtcaagaagtagaagggaggaaagaaaagaaaagtaatgttatggtctgctgtgctttcttacttaatacc

SEQ ID NO: 507 - DNA, 451 bp, Homo sapiens
ctgggtgtgatggtgtacgcttgtaatgccagctacatgggggctgaggcaggagaatcacttgaacatgggaggggaagttgcagtaagccgagatcatgccactgcactccagtctgggtgacagagtgagactctgtctcaagaaaaaaaaaaaagaaaaaagaaagtcaatgcaccatggggaagatcactctaagatcattctctggtaagagaaggacagttggcaaataagagttggagaaggagaattggactcagaatttttggggggtaatatgaattttgcaataacatatattttagggaatacatgggcagatcttcaactacatagttgtatagtataacatagcatagtatagtatgtgttctctgaaatttttcatgcccagttgtctctaggaaatacatggcgcattcccataaagacatgctccagtatgaa

SEQ ID NO: 508 - DNA, 575 bp, Homo sapiens
  misc_feature (22)..(22): n is a, c, g, or t
  misc_feature (25)..(26): n is a, c, g, or t
  misc_feature (28)..(28): n is a, c, g, or t
ggtcattaaaagtagatactgnaannantaatggtaggactgacacattccctcataaattttactagctagatgttgaaagttgaccaacaactctcaaaatatgattaagaaaaggaaacccacagaacagttcgattccaaaatgatttttttttttgcacgtcttacttatttggacttacattgaaatttcgctttataggagaaaggggacaacttgtccatcgtttccctgaagcagatatgttaatatttgacaaagaatcaaaatcattccattttaaactatcccattgcttgtttcaaatgcctaagaaaatgtgtcaatcttaaaacagaagagcatatgttgttaactttattcacacaaaattgtaaaggcaaagaaaatattctctttttaaaattaaaataggcatttcttatttttaaaaacattttgggggccaggggcagtggctcatgcctataatcccagaattttcagaggccaagcctggctaatcgcttgagcccaggaatatgagaacagcctgggcaatatggcaaaatctatctctacaaaaaaaaaa

SEQ ID NO: 509 - DNA, 1034 bp, Homo sapiens
cactgtggaatagtggtttctaaagctggctggacagcaaaaccacctggggagcttttaagaaactgaaattccatgtctcataccccagccctcacgtgaggtccaggaatctgtgtgattaaaaaatacaagccccaaaacaacttggaaagtggtcgttttgcaggtggggatttaggaaccaagaatccagaactctcctaccagggccccagaaaccgtaagttgaataagtgctgaaatgaggcaaattgatctactctctattgtgattaatatcttcacacagcaagtattttcctttgttttgagttcattccttgagatgagttatcgggagcggggtgactgggtccaggatatgaggatgtttagctcagtcatacccgcattttaacacgcaaacgtacggtgccgctcatttaaaaaccaaagtgttgtatacatgtagaagctatatattattccggggcagcccaaagaggggatgttgctttcaagcgaaagcaccaaatcacattcttttctggtaaaatagaatactaatgaattgcttttggaagaaatttccagagcattactgaatgttcaagtgcttcttagagcacaagttgaacctttcttatctctgcactcagtttctcgtaaaactgaagtcacagtgacctcttccccatttcgtagaaaagaaacccaaggaagagagtggttaagaaacagaagatacggttctcatcacatttgcctgagaactacgtatagtcatccattcagtgcctcgttaagtaaataaatgattgaatcatttgtatacatgacctcatggaaaaaagcacggtaaaatgaatgtttgagggtgggtagacagaattattcaacccggacaggtgttagatgttcactctatccccccctttttttttgcattaggttttattcattatttgcatcatctatggacctaaaagcatgctcattgtcacacagatgggaacagggtgaattttcaatgatttcaatgaaaaaaaaaa

SEQ ID NO: 510 - DNA, 584 bp, Homo sapiens
cactgtggaatagtggtttctaaagctggctggacagcaaaaccacctggggagcttttaagaaactgaaattccatgtctcataccccagccctcacgtgaggtccaggaatctgtgtgattaaaaaatacaagccccaaaacaacttggaaagtggtcgttttgcaggtggggatttaggaaccaagaatccagaactctcctaccagggccccagaaaccgtaagttgaataagtgctgaaatgaggcaaattgatctactctctattgtgattaatatcttcacacagcaagtattttcctttgttttgagttcattccttgagatgagttatcgggagcggggtgactgggtccaggatatgaggatgtttagctcagtcatacccgcattttaacacgcaaacgtacggtgccgctcatttaaaaaccaaagtgttgtatacatgtagaagctatatattattccggggcagcccaaagaggggatgttgctttcaagcgaaagcaccaaatcacattcttggacagtaaaggtcagaacgtgctagtcgctgtgtggcataaggccgggactgggag

SEQ ID NO: 511 - DNA, 999 bp, Homo sapiens
cactgtggaatagtggtttctaaagctggctggacagcaaaaccacctggggagcttttaagaaactgaaattccatgtctcataccccagccctcacgtgaggtccaggaatctgtgtgattaaaaaatacaagccccaaaacaacttggaaagtggtcgttttgcaggtggggatttaggaaccaagaatccagaactctcctaccagggccccagaaaccgtaagttgaataagtgctgaaatgaggcaaattgatctactctctattgtgattaatatcttcacacagcaagtattttcctttgttttgagttcattccttgagatgagttatcgggagcggggtgactgggtccaggatatgaggatgtttagctcagtcatacccgcattttaacacgcaaacgtacggtgccgctcatttaaaaaccaaagtgttgtatacatgtagaagctatatattattccggggcagcccaaagaggggatgttgctttcaagcgaaagcaccaaatcacattcttttctggtaaaatagaatactaatgaattgcttttggaagaaatttccagagcattactgaatgttcaagtgcttcttagagcacaagttgaacctttcttatctctgcactcagtttctcgtaaaactgaagtcacagtgacctcttccccatttcgtagaaaagaaacccaaggaagagagtggttaagaaacagaagatacggttctcatcacatttgcctgagaactacgtatagtcatccattcagtgcctcgttaagtaaataaatgattgaatcatttgtatacatgacctcatggaaaaaagcaattcattagtattctattttaccagaaaagaatgtgatttggtgtttcgcttgaaagcaacatcccctctttgggctgccccggaataatatatagcttctacatgtatacaacactttggtttttcaatgagcggcaccgtacgtttgcgtggtcgacgc

SEQ ID NO: 512 - DNA, 501 bp, Homo sapiens
gcttacattctaggtggggactctaacagaaggaggttgtagttcttccatatttgaaaaaagatagctttgttgttctatgaagaatggaagagggaggccaggcagctattgtctggcatctgcaggagagatggagaacagtggaggctccctgtgctcctgagtagagggtattattccagacaccccctttaaagtagcattttatgctgggtttgtttgttttttttttttttttttttttttttttttttgcagtgggggtggggtctggggggatttggtttggttttggctaaaatagtactggttttgcgtggcttcatgacttcatcttcccagtggtcaaaagaaatattttgagaagatggataaagctgaattgcaatctatggcttagaaatgaccaatgctagtcaatgcctttgggactttctatctcttcaccttacacacacacacacacacacacacacacacacacacacacacacacac

SEQ ID NO: 513 - DNA, 295 bp, Homo sapiens
cagccaaaatgaacaaatagaattaatccctaccttttcatccctcgaacatttaacctgctgctggagtgaccacatctgcatttgtcaagagcctctttagacattcttaagccaatgaaatgacattaacagaagaaaaggaatgttgggattgagacatgccaatgaaatagaaattagggttaaaataaagaaaatcaagacaaatataagtaaggtttttgttgttgttgttgtttctttttgagatacagtcttgccctgtggccgaggcttgagtggagtggtctgg

SEQ ID NO: 514 - DNA, 496 bp, Homo sapiens
tatacttttcaaatgtagtaaagcaaaataatatgtgtagtggaaggttccatagactcgaaggatgtgggcagagatttctggatcattctccttcactaacttccttagaaaatgaaatttccctgatctcagtgttctcaattaaatttcctttttttttttttgagacgaagtctcactctatcagccaggctggagtgcggtggtgtgatcttggctcacgtcaacctctgcctgccaggttcaagcaattctgccttggcctcccaagtagctgggattacaggtgcgtgccattgggcccagctaatttttgtatttttagtagagacgggttttcgccatgttggccaggctggtcttgaactcctgacctcaggtgatccaccctcttcagcctcccaaagtgctgggattacaggtatgagccaccacatctggctttaatttttgtatttttagtagaggtgggttttcaccatgttggccaggc

SEQ ID NO: 515 - DNA, 400 bp, Homo sapiens
gctaaggagttttcaagcaaaaggttgaagctgtttgcctgatttcttcttactgcttatgataaacagtaaatgagagaagtaagctaaggaagggctcctaaacaaaaagaacccagggctttgctggttttgagaattctcagtttctcagtatgtcaaatggctaagattaagaaatggcttctaagcaaagatcaaatccagggccttcttagaaaagcattgtctaaggatgtgagtgtaaattcctttgttaagacctcaggaggatttaagatgaacctcagagaaactttcgattgaagtagtaggtcctatacgaagtgtaaatgtatgtcacttagcagaagtttaaggttgagaagagtttttctcatttatgagtgtgctttttatc

SEQ ID NO: 516 - DNA, 439 bp, Homo sapiens
tgcacccatcaacccgtcatctacattaggtatttcttctaatgctatcccttccctagccccccaccccctgacaggccccggtgtgtgatgttctcctccccatgtccatgtattctcattgttcaactcccacttatgtttattgcagcactattcacaatagcaaagacttggagtcaacccaaatgcccatcaatgatagactggataaagaaaatgtggcacagatacaccatagaatagtatgcagccataaaaaaggatgagttcatgtccttttcagggacatggatgaagctggaaaccattattctcagcaaactaacacaggaatagaaagccaaaggctagtttctaggcgctcttttggtttgattttgaaatctgaaaaatcagcattgaagttatatgtgtgtgtgtgtgtgtgtgtgtgtgt

SEQ ID NO: 517 - DNA, 452 bp, Homo sapiens
ttgttggaaatgtgtatgtgtgaccttacaagtttggatctacatcattggtcatttgcagcagagcgcagcaggtgacctgctgaatttttctctggaaagaaagagggagggagcagagcctgcatctgacagctgtgtgtgcctcccggccggatatctggtttgcatctccctcagcttaaagctcccttcagcctggtgaggcaagtgtgactgtgcagccagccctgccaacccaggctgagtttcactgcaaatcaaggtttggcagcttcagcccagactggagttttcatgctgagattttcctagcattttgtgtttcatgactaaatatggtttgtgtttcaagaccaatgagctgggaactgtactgttctttcccctcccatcaactcatttttggcacaagacgcactctagtcagttggagcaaatcccctgacccg

SEQ ID NO: 518 - DNA, 571 bp, Homo sapiens
aggaccacctttcccagcctcaggggtgcacatcctcaggagctgcctacctccagatattgtaagtccatgcagaagaggaagggcccagctggggcacctcttggttgaggaatgagtatgtgacattttcatgtgggccacattttgatactactttaaaaaatagacccaagcacagtggctcacaccctgtaattcccagcacttcgggacgctgagagaggtggatcacctgaggtcaggagttcgagatcagcctggcccaacatggagaaaccccgcctctactaaaaatacaaaacattagctgggtgtggtggcacacacctgtaattcccagctactcgggaggcagaagcaggagaatcgcttgaatccaggaggcggaggttgcagtaagccgagatcacgccactacactccagcttacactggacatgatgaggaggaggaggatgatggtggtgattatgatagaaatggtgatggtgatgatgacaatggtgatagtagggatggtcttgctctgtcgcaatcaataaatgaatgcataaacacaaaaaaaaaa

SEQ ID NO: 519 - DNA, 574 bp, Homo sapiens
aggaccacctttcccagcctcaggggtgcacatcctcaggagctgcctacctccagatattgtaagtccatgcagaagaggaagggcccagctggggcacctcttggttgaggaatgagtatgtgacattttcatgtgggccacattttgatactactttaaaaaatagacccaagcacagtggctcacaccctgtaattcccagcacttcgggacgctgagagaggtggatcacctgaggtcaggagttcgagatcagcctggcccaacatggagaaaccccgcctctactaaaaatacaaaacattagctgggtgtggtggcacacacctgtaattcccagctactcgggaggcagaagcaggagaatcgcttgaatccaggaggcggaggttgcagtaagccgagatcacgccactacactccagcttacactggacatgatgaggaggaggaggatgatcttctgcacggtaggtgatcttctgcacgatgaggtgatcttctgcacgataaggtgatcttctgcacgatgaggtgatcttctgcacgctaaggtgatcttctgcacgat

SEQ ID NO: 520 - DNA, 366 bp, Homo sapiens
tagacttagacacattaaaatgatttgcccaagataaaagctgttcaagtgagagagcaagagaacctctggtcttctgacttctaagtctcattctttctcagtatgtttaacacatggtaaccaggaacttggaaatttacttagaaataacaacaacaaaaacctactggatgctgggaatgaaaagtgagtcacagactataaattgtagttttaaattaaaatgaataccattaatgtggtgctatcaatgtacagaggttggtaaacttaaaacacagcaacaacctatttcctatctatcttttgagaactgagaaccaagaattaaaaacacttttgtacatctcaaatgtggctaaa

SEQ ID NO: 521 - DNA, 490 bp, Homo sapiens
gtgtgccctcgtgaatgagttaatgccactataaaacgacctaactgagggagtttggtcttttttacccgtctgccacatgagaacacagacttcaaggtgccatcttgcaagcagaagcccagatcctcaccagacgccagatgccagctccttgatcttggacttcccagcctccagaactgtgagaaataaatctgtcgtttataaattacccagtctcaggtattctgttacagcagcacaaaacagactgactctatgaggagccaaacatatagaaacagaagtggaatgatggttgccagggctgagaagaggagggactgagaagttgcttcataggtgcagagtttcagatgtgcaagatgaaaaagttccaggatccctttcacaacaatgtgaatatacttaacggtgcacgactgaacggtgcacttaaaaatagttaagatggtacatttttatgttttctaccacaataaaaaaa

SEQ ID NO: 522 - DNA, 359 bp, Homo sapiens
gctcgtagggtttatcagactgtcaaggcacaaaaagttaatcgctgctgtgggaacaacctaaggatggctgttctggaagaagcgctttagttctagagggttgctagttaagagaggagtagcagcagagatttccttgtgccgttttaagtggggtaattggagaagagtaggaaccaaggtatccccaggtaagggtttgaaagctgtgtaagagagtctgtatttaacattactttccaggtgtgttttgtacttgtgtttaaaatggaattgtataaccacgttttaaaaatgattttagtgggtggggcacggtggctcacgcctctaatcccagcactttgggaggccga

SEQ ID NO: 523 - DNA, 467 bp, Homo sapiens
ccaaatagaattttaggacaataagtataggaaatatctctttatcgtaagataagaaacttgaactttttaaaggaaatgtcctcttgaaaagaacatttctgactgcatgcagaagggtacttaagacatatataacaggccaggagcagtggctcacgcctgtaatcccagcactttgggaggcccaagtgggcagataacctgaggtcaggagtttgagaccagcctgaccaacatggtgaaaccccatctctactaaaaatacaaaaattagccaggcatggtggcgcatgcctgtaatcccagctactcgagaggctgagcaacatggtgaaaccccgtctctactaaaaatacaaaaattatctgggcatggtggtgggcacctgtaatcccagctacttgggaggctgaggcaggagaatcgcttgaacctgggaggcagaggtcgcagtgagccaaga

SEQ ID NO: 524 - DNA, 394 bp, Homo sapiens
aacggtttccatttgccttaaaattgggttaaatagcaaaagcaatgtctttaaaaatgattagtttagagccttttagggtaaaccctgtttaaacacttaatcatggaattgcccttgccaccatgagctctaccatccacttccatatgtaaattataagagggacttcaattaagtcactcctgagaaaatatccttttttctagaagaaagaagataaattttgaggcaatttacatttggtatttcttttaatttcattttttgtattttaatttccctacatttttgttcaactaagagtgcttatttcttcttgaaggttaacattatgtttattaagtatcaaaatggaattatcttttaatctcatggtattctttatttgctc

SEQ ID NO: 525 - DNA, 1515 bp, Homo sapiens
ccaaatagaattttaggacaataagtataggaaatatctctttatcgtaagataagaaacttgaactttttaaaggaaatgtcctcttgaaaagaacatttctgactgcatgcagaagggtacttaagacatatataacaggccaggagcagtggctcacgcctgtaatcccagcactttgggaggcccaagtgggcagataacctgaggtcaggagtttgagaccagcctgaccaacatggtgaaaccccatctctactaaaaatacaaaaattagccaggcatggtggcgcatgcctgtaatcccagctactcgagaggctgaggcaggagaatcgcttgaacccgggaggcggaggttgcagttagccgagatcgtgccattgcactccagcctgggcaacaagagtaaaactctgtctcaaaaaaaaaaaaaaaaaaaaaaaaagcaatgtctttaaaaatgattagtttagagccttttagggtaaaccctgtttaaacacttaatcatggaattgcccttgccaccatgagctctaccatccacttccatatgtaaattataagagggacttcaattaagtcactcctgagaaaatatccttttttctagaagaaagaagataaattttgaggcaatttacatttggtatttcttttaatttcattttttgtattttaatttccctacatttttgttcaactaagagtgcttatttcttcttgaaggttaacattatgtttattaagtatcaaaatggaattatcttttaaaaaagaagacaagttttccatactgtcacagtaagctccaaagaactttgtctttctcataaagtaatattctttatttgcatccatttactatgattccgttaatttgttgaattaaatgcctttataaaaatatttacaaatgttttcttgccttaaaatgtaacattttctacttaaatttaatttccaagagagtgattatttgcattacaaaggaattcttaataattcctgtaagcctaggaaataggaatgccaaagtaacatttaatgtacttctctataacttttcataatcagaaattttaaattatgtttatataacccatttacttttattttaatgtgaatatatattcagaaattatttgatgtaaatttcaaaatgattataggaattaagctgaattctaatttttttgcttagatttagaaatatgtatgtgaaatttaagaatttatataatctgtgattagtggaaataagaacatccctactttgttcctaatgagtatattatgttattgttttgtttagtttgtgaacaaccatgtattagctttacttagctgatgtcagtaaatgtttctgtctcctaaatgtaaggactgtactcattaatttgtgtaaaagtaaaacactacagtagcagaaaaaattgcactggctctttagccaaaataagcactgtaacatggatgtattactattactgccaaataaaaaagtgatgg

SEQ ID NO: 526 - DNA, 446 bp, Homo sapiens
ccaatgagtttatttagcaaatgttatgaattcaggaaaattatgattaattttggagccccagtctagacctgtcattttaacactgaagaactacagttagatgctttgtgtggttattaagaagaacagtaattatttcagtagtataaaaatatcaacaatgattacaggtgactttttggcttaaatattcaactccccaacacctttcaagaatgttgtgagatcataaaaagtccaggagcaaaatattagttaaggaagaatgaggctatttaattggttagacttgttggtgagaaaggcatgctgtttgtagtctgtttccatgaccacagctgtttccccacccagtttttagtagtataatattaagccttaatttacaactgaaagttttccacctccggtcccgtagtccaaatcaagttattaaatttaaa

SEQ ID NO: 527 - DNA, 486 bp, Homo sapiens
aaattgtttttgaatttgttgtaatattaattaatgcttaggctatatccaagggtgagaaattaaatactgtgaacaaaaatgtaaacaggagactgacccgaagaagagaacccaagagattctgatccccattcctcagtcctggcaaccggtcaaaaggaaccccccaaaacaaaacaatataaagtcgtaagagataaccctgatagggctaggctatggagacactggatctacaggtactttcatttcttttctctgtttttccatgctgtgacatgttataaaatttcacaaatttaaaatgaatgaggccaggtactggtggctcgtgctggtaatcccagcactttgggaggcctaagtgggaggattaagtccaggagttcaagaccagcccctggccaatatggtgaaaccctgtctctacaaaaataaaaaaaagtagctgggcgtggtggcgtgcgcctgcagtcccagcta

SEQ ID NO: 528 - DNA, 396 bp, Homo sapiens
aaattgtttttgaatttgttgtaatattaattaatgcttaggctatatccaagggtgagaaattaaatactgtgaacaaaaatgtaaacaggagactgacccgaagaagagaacccaagagattctgatccccattcctcagtcctggcaaccggtcaaaaggaaccccccaaaacaaaacaatataaagtcgtaagagataaccctgatagggctaggctatggagacactggatctacaggtactttcatttcttttctctgtttttccatgctgtgacatgttataaaatttcacaaatttaaaatgaatgaggccaggtactggtggctcgtgctggtaatcccagcactttggttactctctagtgtcttcaggtagttcttgtctcgtgc

SEQ ID NO: 529 - DNA, 425 bp, Homo sapiens
gtcaatgatgaacatgccttcttgaagtacacagacaaaaaagtaattacaatatcatttataagtgtcatgatgtaaggatgagtagcgtattgtggaagtgcagatgaggggcacttaattagacttgggtgatcggggagggcttcctaggtgagtaggagatgttcagcctgagtgagggaaggaatcatccagcacgtgcaaaggtcaggaggcaagagttgatattgtattaagcagcagaaggctggaatgtagagtgagaaaggacaaaatggtaagagaagaggctgagaggccaggtgcggttgctcaggcctgtaatcccagcactttgggaggctgaggcgggcagatctcctgagctcaggagttcgagaccaccctgggcaacatggtgaaactccatctctactaaaata

SEQ ID NO: 530 - DNA, 291 bp, Homo sapiens
ggagtgtgtgagtcagtaacgatagtgtaggattttgctgttgccgacagtttatggattgttggttttgtattgtttttattttgtcttttggcaaggctgtgttccttccagttgagtgaggtggatagagttttgaactctggactctaccatcaccttattcctggagatgtatcagtaccgtatacacaggggaccctatgtgtggccatgagccttgctgtagaacctgtggctccagagagccacctggccacagagagcaaaagataattttagccttgaact

SEQ ID NO: 531 - DNA, 6623 bp, Homo sapiens
cgacaataacaaaccaagccgcggcggtgtccgcggccctgccgagccctcggcgttgcctcagaatcccccagtcgcctgggcccctcggctctgacaggccgcggccttctgtcccccggccccagacccagagccgaggggcctgctcgcgtccttgtccgcccggacccctccctgcctcctagagttcggggccgcggcgggcgggcgcccgggacgccggcggttgtgtcggcttagcggtgccgaatgggcggttggtaaccgctgccgaggactaggcggcggcggaagatggtgccgggggtcgctggctctgctgctgccgccggcgaaggaggaggcgttgccggttttctgagtttaaccagtaatgccattcagttgccaatctcaagcaaagcaaacataagccagttttaatctactttttaagaaaagtggtagtccttttcacagtgcctgacgtaactgtatcagagggtgaggtataagctcacagaattcagataaatcatcatgaagttatatgtatttctggttaacactggaactactctaacatttgacactgaacttacagtgcaaactgtggcagaccttaagcatgccattcaaagcaaatacaagattgctattcaacaccaggtgctggtggtcaatggaggagaatgcatggctgcagatcgaagagtgtgtacctacagtgctgggacggatacaaatccaatttttctttttaacaaagaaatgatcttatgtgatcgtccacctgctattcctaaaactaccttttcgacagaaaatgacatggaaataaaagttgaagaatctcttatgatgcctgcagtttttcatactgttgcttcaaggacacagcttgcattggaaatgtatgaagttgccaagaaactttgttctttttgtgaaggtcttgtacatgatgaacatcttcaacaccaaggctgggctgcaatcatggccaacctggaggactgttcaaattcataccaaaagctacttttcaagtttgaaagtatttattcaaattatctgcagtccatagaagacatcaagttaaaacttactcatttaggaactgcagtttcagtaatggccaagattccactgttggagtgcctaaccagacatagttacagagaatgtttgggaagactggattctttacctgaacatgaagactcagaaaaagctgagacgaaaagatccactgaactggtgctctctcctgatatgcctagaacaactaacgaatctttgttaacctcatttcccaagtcagtggaacatgtgtccccagataccgcagatgctgaaagtggcaaagaaattagggaatcttgtcaaagtactgttcatcagcaagatgaaactacgattgacactaaagatggtgatctgcccttttttaatgtctctttgttagactggataaatgttcaagatagacctaatgatgtggaatctttggtcaggaagtgctttgattctatgagcaggcttgatccaaggattattcgaccatttatagcagaatgccgtcaaactattgccaaacttgataatcagaatatgaaagccattaaaggacttgaagatcggctctacgccctggaccagatgattgctagctgtggccgactggtgaatgaacagaaagagcttgctcagggatttttagctaatcagaagagagctgaaaacttaaaggatgcatctgtattacctgatttatgcctgagtcacgcaaatcagttgatgattatgttgcaaaatcatagaaaactgttagatattaagcagaagtgtaccactgccaaacaagaactagcaaataacctacatgtcagactgaagtggtgttgctttgtaatgcttcatgctgatcaagatggagagaagttacaagctttgctccgcctcgtaatagagctgttagaaagagtcaaaattgttgaagctcttagtacagttcctcagatgtactgcttagctgttgttgaggttgtaagaagaaaaatgttcataaaacactacagggagtgggctggtgctttagtcaaagatggaaagagattatatgaagcagaaaaatcaaaaagggaatcctttgggaaattatttaggaagtcttttttaagaaatcgtctgtttaggggactggactcctggcccccttccttttgtactcaaaagcctcgaaagtttgactgtgaacttccagatatttcattaaaagatttacagtttctgcaatcattttgtccttcggaagttcagccattcctcagggttcccttactttgtgactttgaacctctacaccagcatgtacttgctctacataatttggtaaaagcagcacaaagtttggatgaaatgtcacagaccattacagatctactgagtgaacaaaaggcatctgtgagtcagacatccccacagtctgcttcttcaccaaggatggaaagtacagcaggaattacaactactacctcaccgagaactcctccaccactgactgttcaggatcccttatgtcctgcagtttgtcccttagaagaattatctccagatagtattgatgcacatacgtttgattttgaaactattccccatccaaacatagaacagactattcaccaagtttctttagacttggattcattagcagaaagtcctgaatcagattttatgtctgctgtgaatgagtttgtaatagaagaaaatttgtcgtctcctaatcctataagtgatccacaaagcccagaaatgatggtggaatcactttattcatcagttatcaatgcgatagacagtagacgaatgcaggatacaaatgtatgtggtaaggaggattttggagatcatacttctctgaatgtccagttggaaagatgtagagttgttgcccaagactctcacttcagtatacaaaccattaaggaagacctttgccactttagaacatttgtacaaaaagaacagtgtgacttctcaaattcattaaaatgtacagcagtagaaataagaaacattattgaaaaagtaaaatgttctctggaaataacactaaaagaaaaacatcaaaaagaactactgtctttaaaaaatgaatatgaaggtaaacttgacggactaataaaggaaactgaagagaatgaaaacaaaattaaaaaattgaagggagagttagtatgccttgaggaggttttacaaaataaagataatgaatttgctttggttaaacatgaaaaagaagctgtaatctgcctgcagaatgaaaaggatcagaagttgttagagatggaaaatataatgcactctcaaaattgtgaaattaaagaactgaagcagtcacgagaaatagtgttagaagacttaaaaaagctccatgttgaaaatgatgagaagttacagttattgagggcagaacttcagtccttggagcaaagtcatctaaaggaattagaggacacacttcaggttaggcacatacaagagtttgagaaggttatgacagaccacagagtttctttggaggaattaaaaaaggaaaaccaacaaataattaatcaaatacaagaatctcatgctgaaattatccaggaaaaagaaaaacagttacaggaattaaaactcaaggtttctgatttgtcagacacgagatgcaagttagaggttgaacttgcgttgaaggaagcagaaactgatgaaataaaaattttgctggaagaaagcagagcccagcagaaggagaccttgaaatctcttcttgaacaagagacagaaaatttgagaacagaaattagtaaactcaaccaaaagattcaggataataatgaaaattatcaggtgggcttagcagagctaagaactttaatgacaattgaaaaagatcagtgtatttccgagttaattagtagacatgaagaagaatctaatatacttaaagctgaattaaacaaagtaacatctttgcataaccaagcatttgaaatagaaaaaaacctaaaagaacaaataattgaactgcagagtaaattggattcagaattgagtgctcttgaaagacaaaaagatgaaaaaattacccaacaagaagagaaatacgaagctattatccagaaccttgagaaagacagacaaaaattggtcagcagccaggagcaagacagagaacagttaattcagaagcttaattgtgaaaaagatgaagctattcagactgccctaaaagaatttaaattggagagagaagttgttgagaaagagttattagaaaaagttaaacatcttgagaatcaaatagcaaaaagtcctgccattgactctaccagaggagattcttcaagcttagttgctgaacttcaagaaaagcttcaggaagaaaaagctaagtttctagaacaacttgaagagcaagaaaaaagaaagaatgaagaaatgcaaaatgttcgaacatctttgattgcggaacaacagaccaattttaacactgttttaacaagagagaaaatgagaaaagaaaacataataaatgatcttagtgataagttgaaaagtacaatgcagcaacaagaacgggataaagatttgatagagtcactttctgaagatcgagctcgtttgcttgaggaaaagaaaaagcttgaagaagaagtcagtaagttgcgtagtagcagttttgttccttcaccatatgtagctacagccccagaactttatggagcttgtgcacctgaactcccaggtgaatcagatagatccgctgtggaaacagcagatgaaggaagagtggattcagcaatggagacaagcatgatgtctgtacaagaaaatattcatatgttgtctgaagaaaaacagcggataatgctgttagaacgaacattgcaattgaaagaagaagaaaataaacggttaaatcaaagactgatgtctcagagcatgtcttcagtatcttcaaggcattctgaaaagatagctattagagattttcaggtgggagatttggtactcatcatcctagacgaacgccatgacaattatgtgttatttactgttagtcctactttatattttctacattcagagtctctacctgccctggatctcaaaccaaggcttcaggtgcatctagaagaccctgggtacttggaaaagtaatggaaaaagaatactgtcaagccaaaaaggcacaaaacagatttaaagttcctttggggacaaagttttacagagtgaaagccgtatcatggaataagaaagtataacttatggacaaaattaatacattctatgacatttttttctgatttgtcctgcagtgctcattcatcactccaaaaacagcaggccatctttttatgcaaaagtcagcgtgacaatatacttcactggtgtacatcgtttactttttaactggcttcattttaggaataataaattcatcagaatccttggctgaattaaaatggtttttgttttttggtttttttttttacccagacaactctagaaatgcggaccaaactacttcattttctcaaagggcataccttgtgcattgtggcttatgatgagccatattaattgcctgttaaatatacactagcttgaacttagatgttaaatgttattattaccagcatttgtccttttgtgaaatcagtatcagaatacttgcactctttaacacattctttataaaatgtataaattattcagaactatttaaaataaagaggagtgttattgcatgctgataatcattttgagtttgcctcagtagatactaaagcaaattgtttcagtttttttaaatgccctttgatgtttcaaaaaaaaaaaggaactgtaatttgattgactgattttaagatcagccataagtaatcagcaatcttcaaaagcactttcagtggattggtcatctgggttctaaagggaagagtctgtgctactaaccatttcaaatgcagactcaaaccttcccaacatctttatgactctagaataatcatattgatgaaatcgtaattcatggttgagtttcagaacaaaagatattcattgcacattaaccatttagaggtcatttaaataacaaaatattgtattgtaaaagaactgtacaattttaaaacaataaagatttgaacctgtaaatgtgtgtgccttttaaagaaggatacatttttaatatatttgagtgattgctgggaagtgtgaaaatattgttatgtatcatatcaaagagaaacatgtttattacaaaaatgttctttaactatatactatgtaacagggtaaacagtgttatgtagaatagaattgtgtaaactagatctttagagaagttgccattgagcaaagttatttaaatgagttagttgagttggatgagaattgtttgaggtttgttgctagagaacaataataaaataattctttttcagaaaatatttaatttcttcataaaaataagttaaatatttttttaaatatgtatatctaatagtacaaaatggaataaacatcatagtgtatagaaaactgaatttgacaagttaatgaataaatgaacaaatgatttc

SEQ ID NO: 532 - DNA, 364 bp, Homo sapiens
ccatcctcatagctgactctagaggatacaaggagggcaagtactatttgcctactttttaagaaaagtgctagacctttacacagtgcctgacgtaactgtatcagagggtgaggtataagctcacagaattcagataaatcatcatgaagttatatgtatttctggttaacactggaactactctaacatttgacactgaacttacagtgcaaactgtggcagaccttaagcatgccattcaaagcaaatacaagattgctattcaacaccaggtgctggtggtcaatggaggagaatgcatggctgcagatcgaagagtgtgtacctacagtgctgggacggtaggtattcaagagtcctt

SEQ ID NO: 533 - DNA, 6412 bp, Homo sapiens
cgacaataacaaaccaagccgcggcggtgtccgcggccctgccgagccctcggcgttgcctcagaatcccccagtcgcctgggcccctcggctctgacaggccgcggccttctgtcccccggccccagacccagagccgaggggcctgctcgcgtccttgtccgcccggacccctccctgcctcctagagttcggggccgcggcgggcgggcgcccgggacgccggcggttgtgtcggcttagcggtgccgaatgggcggttggtaaccgctgccgaggactaggcggcggcggaagatggtgccgggggtcgctggctctgctgctgccgccggcgaaggaggaggcgttgccggttttctgagtttaaccagtaatgccattcagttgccaatctcaagcaaagcaaacataagccagttttaatctactttttaagaaaagtggtagtccttttcacagtgcctgacgacctgtacacttgctactgttacacaaagtgatggaactattaaggaggatttcttgctcagtgtagaggtgaaaagcagttcaacaggcagctgatggaagtgatggaactattatggaggatttctagctcagtgtagaggtgaaacacagatgatggaaggaattgggattcatttcccctaatttgcaagtaacggctactcttaatttgcgattataactgtatcagagggtgaggtataagctcacagaattcagataaatcatcatgaagttatatgtatttctggttaacactggaactactctaacatttgacactgaacttacagtgcaaactgtggcagaccttaagcatgccattcaaagcaaatacaagattgctattcaacaccaggtgctggtggtcaatggaggagaatgcatggctgcagatcgaagagtgtgtacctacagtgctgggacggatacaaatccaatttttctttttaacaaagaaatgatcttatgtgatcgtccacctgctattcctaaaactaccttttcgacagaaaatgacatggaaataaaagttgaagaatctcttatgatgcctgcagtttttcatactgttgcttcaaggacacagcttgcattggaaatgtatgaagttgccaagaaactttgttctttttgtgaaggtcttgtacatgatgaacatcttcaacaccaaggctgggctgcaatcatggccaacctggaggactgttcaaattcataccaaaagctacttttcaagtttgaaagtatttattcaaattatctgcagtccatagaagacatcaagttaaaacttactcatttaggaactgcagtttcagtaatggccaagattccactgttggagtgcctaaccagacatagttacagagaatgtttgggaagactggattctttacctgaacatgaagactcagaaaaagctgagacgaaaagatccactgaactggtgctctctcctgatatgcctagaacaactaacgaatctttgttaacctcatttcccaagtcagtggaacatgtgtccccagataccgcagatgctgaaagtggcaaagaaattagggaatcttgtcaaagtactgttcatcagcaagatgaaactacgattgacactaaagatggtgatctgcccttttttaatgtctctttgttagactggataaatgttcaagatagacctaatgatgtggaatctttggtcaggaagtgctttgattctatgagcaggcttgatccaaggattattcgaccatttatagcagaatgccgtcaaactattgccaaacttgataatcagaatatgaaagccattaaaggacttgaagatcggctctacgccctggaccagatgattgctagctgtggccgactggtgaatgaacagaaagagcttgctcagggatttttagctaatcagaagagagctgaaaacttaaaggatgcatctgtattacctgatttatgcctgagtcacgcaaatcagttgatgattatgttgcaaaatcatagaaaactgttagatattaagcagaagtgtaccactgccaaacaagaactagcaaataacctacatgtcagactgaagtggtgttgctttgtaatgcttcatgctgatcaagatggagagaagttacaagctttgctccgcctcgtaatagagctgttagaaagagtcaaaattgttgaagctcttagtacagttcctcagatgtactgcttagctgttgttgaggttgtaagaagaaaaatgttcataaaacactacagggagtgggctggtgctttagtcaaagatggaaagagattatatgaagcagaaaaatcaaaaagggaatcctttgggaaattatttaggaagtcttttttaagaaatcgtctgtttaggggactggactcctggcccccttccttttgtactcaaaagcctcgaaagtttgactgtgaacttccagatatttcattaaaagatttacagtttctgcaatcattttgtccttcggaagttcagccattcctcagggttcccttactttgtgactttgaacctctacaccagcatgtacttgctctacataatttggtaaaagcagcacaaagtttggatgaaatgtcacagaccattacagatctactgagtgaacaaaaggcatctgtgagtcagacatccccacagtctgcttcttcaccaaggatggaaagtacagcaggaattacaactactacctcaccgagaactcctccaccactgactgttcaggatcccttatgtcctgcagtttgtcccttagaagaattatctccagatagtattgatgcacatacgtttgattttgaaactattccccatccaaacatagaacagactattcaccaagtttctttagacttggattcattagcagaaagtcctgaatcagattttatgtctgctgtgaatgagtttgtaatagaagaaaatttgtcgtctcctaatcctataagtgatccacaaagcccagaaatgatggtggaatcactttattcatcagttatcaatgcgatagacagtagacgaatgcaggatacaaatgtatgtggtaaggaggattttggagatcatacttctctgaatgtccagttggaaagatgtagagttgttgcccaagactctcacttcagtatacaaaccattaaggaagacctttgccactttagaacatttgtacaaaaagaacagtgtgacttctcaaattcattaaaatgtacagcagtagaaataagaaacattattgaaaaagtaaaatgttctctggaaataacactaaaagaaaaacatcaaaaagaactactgtctttaaaaaatgaatatgaaggtaaacttgacggactaataaaggaaactgaagagaatgaaaacaaaattaaaaaattgaagggagagttagtatgccttgaggaggttttacaaaataaagataatgaatttgctttggttaaacatgaaaaagaagctgtaatctgcctgcagaatgaaaaggatcagaagttgttagagatggaaaatataatgcactctcaaaattgtgaaattaaagaactgaagcagtcacgagaaatagtgttagaagacttaaaaaagctccatgttgaaaatgatgagaagttacagttattgagggcagaacttcagtccttggagcaaagtcatctaaaggaattagaggacacacttcaggttaggcacatacaagagtttgagaaggttatgacagaccacagagtttctttggaggaattaaaaaaggaaaaccaacaaataattaatcaaatacaagaatctcatgctgaaattatccaggaaaaagaaaaacagttacaggaattaaaactcaaggtttctgatttgtcagacacgagatgcaagttagaggttgaacttgcgttgaaggaagcagaaactgatgaaataaaaattttgctggaagaaagcagagcccagcagaaggagaccttgaaatctcttcttgaacaagagacagaaaatttgagaacagaaattagtaaactcaaccaaaagattcaggataataatgaaaattatcaggtgggcttagcagagctaagaactttaatgacaattgaaaaagatcagtgtatttccgagttaattagtagacatgaagaagaatctaatatacttaaagctgaattaaacaaagtaacatctttgcataaccaagcatttgaaatagaaaaaaacctaaaagaacaaataattgaactgcagagtaaattggattcagaattgagtgctcttgaaagacaaaaagatgaaaaaattacccaacaagaagagaaatacgaagctattatccagaaccttgagaaagacagacaaaaattggtcagcagccaggagcaagacagagaacagttaattcagaagcttaattgtgaaaaagatgaagctattcagactgccctaaaagaatttaaattggagagagaagttgttgagaaagagttattagaaaaagttaaacatcttgagaatcaaatagcaaaaagtcctgccattgactctaccagaggagattcttcaagcttagttgctgaacttcaagaaaagcttcaggaagaaaaagctaagtttctagaacaacttgaagagcaagaaaaaagaaagaatgaagaaatgcaaaatgttcgaacatctttgattgcggaacaacagaccaattttaacactgttttaacaagagagaaaatgagaaaagaaaacataataaatgatcttagtgataagttgaaaagtacaatgcagcaacaagaacgggataaagatttgatagagtcactttctgaagatcgagctcgtttgcttgaggaaaagaaaaagcttgaagaagaagtcagtaagttgcgtagtagcagttttgttccttcaccatatgtagctacagccccagaactttatggagcttgtgcacctgaactcccaggtgaatcagatagatccgctgtggaaacagcagatgaaggaagagtggattcagcaatggagacaagcatgatgtctgtacaagaaaatattcatatgttgtctgaagaaaaacagcggataatgctgttagaacgaacattgcaattgaaagaagaagaaaataaacggttaaatcaaagactgatgtctcagagcatgtcttcagtatcttcaaggcattctgaaaagatagctattagagattttcaggtgggagatttggtactcatcatcctagacgaacgccatgacaattatgtgttatttactgttagtcctactttatattttctacattcagagtctctacctgccctggatctcaaaccaaggcttcaggtgcatctagaagaccctgggtacttggaaaagtaatggaaaaagaatactgtcaagccaaaaaggcacaaaacagatttaaagttcctttggggacaaagttttacagagtgaaagccgtatcatggaataagaaagtataacttatggacaaaattaatacattctatgacatttttttctgatttgtcctgcagtgctcattcatcactccaaaaacagcaggccatctttttatgcaaaagtcagcgtgacaatatacttcactggtgtacatcgtttactttttaactggcttcattttaggaataataaattcatcagaatccttggctgaattaaaatggtttttgttttttggtttttttttttacccagacaactctagaaatgcggaccaaactacttcattttctcaaagggcataccttgtgcattgtggcttatgatgagccatattaattgcctgttaaatatacactagcttgaacttagatgttaaatgttattattaccagcatttgtccttttgtgaaatcagtatcagaatacttgcactctttaacacattctttataaaatgtataaattattcagaactatttaaaataaagaggagtgttattgcatgctgataatcattttgagtttgcctcagtagatactaaagcaaattgtttcagtttttttaaatgccctttgatgtttcaaaaaaaaaaaggaactgtaatttgattgactgattttaagatcagccataagtaatcagcaatcttcaaaagcactttcagtggattggtcatctgggttctaaagggaagagtctgtgctactaaccatttcaaatgcagactcaaaccttcccaacatctttatgactctagaataatcatattgatgaaatcgtaattcatggttgagtttcagaacaaaagatattcattgcacattaaccatttagaggtcatttaaataacaaaatattgtattgtaaaagaactgtacaattttaaaacaataaagatttgaacctgt

SEQ ID NO: 534 - DNA, 4187 bp, Homo sapiens
tacctaaatggctgtaacgaattggtgtatgtttatgtttaacataagctttcctcttctagtgggctggtgctttagtcaaagatggaaagagattatatgaagcagaaaaatcaaaaagggaatcctttgggaaattatttaggaagtcttttttaagaaatcgtctgtttaggggactggactcctggcccccttccttttgtactcaaaagcctcgaaagtttgactgtgaacttccagatatttcattaaaagatttacagtttctgcaatcattttgtccttcggaagttcagccattcctcagggttcccttactttgtgactttgaacctctacaccagcatgtacttgctctacataatttggtaaaagcagcacaaagtttggatgaaatgtcacagaccattacagatctactgagtgaacaaaaggcatctgtgagtcagacatccccacagtctgcttcttcaccaaggatggaaagtacagcaggaattacaactactacctcaccgagaactcctccaccactgactgttcaggatcccttatgtcctgcagtttgtcccttagaagaattatctccagatagtattgatgcacatacgtttgattttgaaactattccccatccaaacatagaacagactattcaccaagtttctttagacttggattcattagcagaaagtcctgaatcagattttatgtctgctgtgaatgagtttgtaatagaagaaaatttgtcgtctcctaatcctataagtgatccacaaagcccagaaatgatggtggaatcactttattcatcagttatcaatgcgatagacagtagacgaatgcaggatacaaatgtatgtggtaaggaggattttggagatcatacttctctgaatgtccagttggaaagatgtagagttgttgcccaagactctcacttcagtatacaaaccattaaggaagacctttgccactttagaacatttgtacaaaaagaacagtgtgacttctcaaattcattaaaatgtacagcagtagaaataagaaacattattgaaaaagtaaaatgttctctggaaataacactaaaagaaaaacatcaaaaagaactactgtctttaaaaaatgaatatgaaggtaaacttgacggactaataaaggaaactgaagagaatgaaaacaaaattaaaaaattgaagggagagttagtatgccttgaggaggttttacaaaataaagataatgaatttgctttggttaaacatgaaaaagaagctgtaatctgcctgcagaatgaaaaggatcagaagttgttagagatggaaaatataatgcactctcaaaattgtgaaattaaagaactgaagcagtcacgagaaatagtgttagaagacttaaaaaagctccatgttgaaaatgatgagaagttacagttattgagggcagaacttcagtccttggagcaaagtcatctaaaggaattagaggacacacttcaggttaggcacatacaagagtttgagaaggttatgacagaccacagagtttctttggaggaattaaaaaaggaaaaccaacaaataattaatcaaatacaagaatctcatgctgaaattatccaggaaaaagaaaaacagttacaggaattaaaactcaaggtttctgatttgtcagacacgagatgcaagttagaggttgaacttgcgttgaaggaagcagaaactgatgaaataaaaattttgctggaagaaagcagagcccagcagaaggagaccttgaaatctcttcttgaacaagagacagaaaatttgagaacagaaattagtaaactcaaccaaaagattcaggataataatgaaaattatcaggtgggcttagcagagctaagaactttaatgacaattgaaaaagatcagtgtatttccgagttaattagtagacatgaagaagaatctaatatacttaaagctgaattaaacaaagtaacatctttgcataaccaagcatttgaaatagaaaaaaacctaaaagaacaaataattgaactgcagagtaaattggattcagaattgagtgctcttgaaagacaaaaagatgaaaaaattacccaacaagaagagaaatacgaagctattatccagaaccttgagaaagacagacaaaaattggtcagcagccaggagcaagacagagaacagttaattcagaagcttaattgtgaaaaagatgaagctattcagactgccctaaaagaatttaaattggagagagaagttgttgagaaagagttattagaaaaagttaaacatcttgagaatcaaatagcaaaaagtcctgccattgactctaccagaggagattcttcaagcttagttgctgaacttcaagaaaagcttcaggaagaaaaagctaagtttctagaacaacttgaagagcaagaaaaaagaaagaatgaagaaatgcaaaatgttcgaacatctttgattgcggaacaacagaccaattttaacactgttttaacaagagagaaaatgagaaaagaaaacataataaatgatcttagtgataagttgaaaagtacaatgcagcaacaagaacgggataaagatttgatagagtcactttctgaagatcgagctcgtttgcttgaggaaaagaaaaagcttgaagaagaagtcagtaagttgcgtagtagcagttttgttccttcaccatatgtagctacagccccagaactttatggagcttgtgcacctgaactcccaggtgaatcagatagatccgctgtggaaacagcagatgaaggaagagtggattcagcaatggagacaagcatgatgtctgtacaagaaaatattcatatgttgtctgaagaaaaacagcggataatgctgttagaacgaacattgcaattgaaagaagaagaaaataaacggttaaatcaaagactgatgtctcagagcatgtcttcagtatcttcaaggcattctgaaaagatagctattagagattttcaggtgggagatttggtactcatcatcctagacgaacgccatgacaattatgtgttatttactgttagtcctactttatattttctacattcagagtctctacctgccctggatctcaaaccaaggcttcaggtgcatctagaagaccctgggtacttggaaaagtaatggaaaaagaatactgtcaagccaaaaaggcacaaaacagatttaaagttcctttggggacaaagttttacagagtgaaagccgtatcatggaataagaaagtataacttatggacaaaattaatacattctatgacatttttttctgatttgtcctgcagtgctcattcatcactccaaaaacagcaggccatctttttatgcaaaagtcagcgtgacaatatacttcactggtgtacatcgtttactttttaactggcttcattttaggaataataaattcatcagaatccttggctgaattaaaatggtttttgttttttggtttttttttttacccagacaactctagaaatgcggaccaaactacttcattttctcaaagggcataccttgtgcattgtggcttatgatgagccatattaattgcctgttaaatatacactagcttgaacttagatgttaaatgttattattaccagcatttgtccttttgtgaaatcagtatcagaatacttgcactctttaacacattctttataaaatgtataaattattcagaactatttaaaataaagaggagtgttattgcatgctgataatcattttgagtttgcctcagtagatactaaagcaaattgtttcagtttttttaaatgccctttgatgtttcaaaaaaaaaaaggaactgtaatttgattgactgattttaagatcagccataagtaatcagcaatcttcaaaagcactttcagtggattggtcatctgggttctaaagggaagagtctgtgctactaaccatttcaaatgcagactcaaaccttcccaacatctttatgactctagaataatcatattgatgaaatcgtaattcatggttgagtttcagaacaaaagatattcattgcacattaaccatttagaggtcatttaaataacaaaatattgtattgtaaaagaactgtacaattttaaaacaataaagatttgaacctgt

SEQ ID NO: 535 - DNA, 6874 bp, Homo sapiens
cgacaataacaaaccaagccgcggcggtgtccgcggccctgccgagccctcggcgttgcctcagaatcccccagtcgcctgggcccctcggctctgacaggccgcggccttctgtcccccggccccagacccagagccgaggggcctgctcgcgtccttgtccgcccggacccctccctgcctcctagagttcggggccgcggcgggcgggcgcccgggacgccggcggttgtgtcggcttagcggtgccgaatgggcggttggtaaccgctgccgaggactaggcggcggcggaagatggtgccgggggtcgctggctctgctgctgccgccggcgaaggaggaggcgttgccggttttctgagtttaaccagtaatgccattcagttgccaatctcaagcaaagcaaacataagccagttttaatctactttttaagaaaagtggtagtccttttcacagtgcctgacgacctgtacacttgctactgttacacaaagtgatggaactattaaggaggatttcttgctcagtgtagaggtgaaaagcagttcaacaggcagctgatggaagtgatggaactattatggaggatttctagctcagtgtagaggtgaaacacagatgatggaaggaattgggattcatttcccctaatttgcaagtaacggctactcttaatttgcgattataactgtatcagagggtgaggtataagctcacagaattcagataaatcatcatgaagttatatgtatttctggttaacactggaactactctaacatttgacactgaacttacagtgcaaactgtggcagaccttaagcatgccattcaaagcaaatacaagattgctattcaacaccaggtgctggtggtcaatggaggagaatgcatggctgcagatcgaagagtgtgtacctacagtgctgggacggatacaaatccaatttttctttttaacaaagaaatgatcttatgtgatcgtccacctgctattcctaaaactaccttttcgacagaaaatgacatggaaataaaagttgaagaatctcttatgatgcctgcagtttttcatactgttgcttcaaggacacagcttgcattggaaatgtatgaagttgccaagaaactttgttctttttgtgaaggtcttgtacatgatgaacatcttcaacaccaaggctgggctgcaatcatggccaacctggaggactgttcaaattcataccaaaagctacttttcaagtttgaaagtatttattcaaattatctgcagtccatagaagacatcaagttaaaacttactcatttaggaactgcagtttcagtaatggccaagattccactgttggagtgcctaaccagacatagttacagagaatgtttgggaagactggattctttacctgaacatgaagactcagaaaaagctgagacgaaaagatccactgaactggtgctctctcctgatatgcctagaacaactaacgaatctttgttaacctcatttcccaagtcagtggaacatgtgtccccagataccgcagatgctgaaagtggcaaagaaattagggaatcttgtcaaagtactgttcatcagcaagatgaaactacgattgacactaaagatggtgatctgcccttttttaatgtctctttgttagactggataaatgttcaagatagacctaatgatgtggaatctttggtcaggaagtgctttgattctatgagcaggcttgatccaaggattattcgaccatttatagcagaatgccgtcaaactattgccaaacttgataatcagaatatgaaagccattaaaggacttgaagatcggctctacgccctggaccagatgattgctagctgtggccgactggtgaatgaacagaaagagcttgctcagggatttttagctaatcagaagagagctgaaaacttaaaggatgcatctgtattacctgatttatgcctgagtcacgcaaatcagttgatgattatgttgcaaaatcatagaaaactgttagatattaagcagaagtgtaccactgccaaacaagaactagcaaataacctacatgtcagactgaagtggtgttgctttgtaatgcttcatgctgatcaagatggagagaagttacaagctttgctccgcctcgtaatagagctgttagaaagagtcaaaattgttgaagctcttagtacagttcctcagatgtactgcttagctgttgttgaggttgtaagaagaaaaatgttcataaaacactacagggagtgggctggtgctttagtcaaagatggaaagagattatatgaagcagaaaaatcaaaaagggaatcctttgggaaattatttaggaagtcttttttaagaaatcgtctgtttaggggactggactcctggcccccttccttttgtactcaaaagcctcgaaagtttgactgtgaacttccagatatttcattaaaagatttacagtttctgcaatcattttgtccttcggaagttcagccattcctcagggttcccttactttgtgactttgaacctctacaccagcatgtacttgctctacataatttggtaaaagcagcacaaagtttggatgaaatgtcacagaccattacagatctactgagtgaacaaaaggcatctgtgagtcagacatccccacagtctgcttcttcaccaaggatggaaagtacagcaggaattacaactactacctcaccgagaactcctccaccactgactgttcaggatcccttatgtcctgcagtttgtcccttagaagaattatctccagatagtattgatgcacatacgtttgattttgaaactattccccatccaaacatagaacagactattcaccaagtttctttagacttggattcattagcagaaagtcctgaatcagattttatgtctgctgtgaatgagtttgtaatagaagaaaatttgtcgtctcctaatcctataagtgatccacaaagcccagaaatgatggtggaatcactttattcatcagttatcaatgcgatagacagtagacgaatgcaggatacaaatgtatgtggtaaggaggattttggagatcatacttctctgaatgtccagttggaaagatgtagagttgttgcccaagactctcacttcagtatacaaaccattaaggaagacctttgccactttagaacatttgtacaaaaagaacagtgtgacttctcaaattcattaaaatgtacagcagtagaaataagaaacattattgaaaaagtaaaatgttctctggaaataacactaaaagaaaaacatcaaaaagaactactgtctttaaaaaatgaatatgaaggtaaacttgacggactaataaaggaaactgaagagaatgaaaacaaaattaaaaaattgaagggagagttagtatgccttgaggaggttttacaaaataaagataatgaatttgctttggttaaacatgaaaaagaagctgtaatctgcctgcagaatgaaaaggatcagaagttgttagagatggaaaatataatgcactctcaaaattgtgaaattaaagaactgaagcagtcacgagaaatagtgttagaagacttaaaaaagctccatgttgaaaatgatgagaagttacagttattgagggcagaacttcagtccttggagcaaagtcatctaaaggaattagaggacacacttcaggttaggcacatacaagagtttgagaaggttatgacagaccacagagtttctttggaggaattaaaaaaggaaaaccaacaaataattaatcaaatacaagaatctcatgctgaaattatccaggaaaaagaaaaacagttacaggaattaaaactcaaggtttctgatttgtcagacacgagatgcaagttagaggttgaacttgcgttgaaggaagcagaaactgatgaaataaaaattttgctggaagaaagcagagcccagcagaaggagaccttgaaatctcttcttgaacaagagacagaaaatttgagaacagaaattagtaaactcaaccaaaagattcaggataataatgaaaattatcaggtgggcttagcagagctaagaactttaatgacaattgaaaaagatcagtgtatttccgagttaattagtagacatgaagaagaatctaatatacttaaagctgaattaaacaaagtaacatctttgcataaccaagcatttgaaatagaaaaaaacctaaaagaacaaataattgaactgcagagtaaattggattcagaattgagtgctcttgaaagacaaaaagatgaaaaaattacccaacaagaagagaaatacgaagctattatccagaaccttgagaaagacagacaaaaattggtcagcagccaggagcaagacagagaacagttaattcagaagcttaattgtgaaaaagatgaagctattcagactgccctaaaagaatttaaattggagagagaagttgttgagaaagagttattagaaaaagttaaacatcttgagaatcaaatagcaaaaagtcctgccattgactctaccagaggagattcttcaagcttagttgctgaacttcaagaaaagcttcaggaagaaaaagctaagtttctagaacaacttgaagagcaagaaaaaagaaagaatgaagaaatgcaaaatgttcgaacatctttgattgcggaacaacagaccaattttaacactgttttaacaagagagaaaatgagaaaagaaaacataataaatgatcttagtgataagttgaaaagtacaatgcagcaacaagaacgggataaagatttgatagagtcactttctgaagatcgagctcgtttgcttgaggaaaagaaaaagcttgaagaagaagtcagtaagttgcgtagtagcagttttgttccttcaccatatgtagctacagccccagaactttatggagcttgtgcacctgaactcccaggtgaatcagatagatccgctgtggaaacagcagatgaaggaagagtggattcagcaatggagacaagcatgatgtctgtacaagaaaatattcatatgttgtctgaagaaaaacagcggataatgctgttagaacgaacattgcaattgaaagaagaagaaaataaacggttaaatcaaagactgatgtctcagagcatgtcttcagtatcttcaaggcattctgaaaagatagctattagagattttcaggtgggagatttggtactcatcatcctagacgaacgccatgacaattatgtgttatttactgttagtcctactttatattttctacattcagagtctctacctgccctggatctcaaaccaaggcttcaggtgcatctagaagaccctgggtacttggaaaagtaatggaaaaagaatactgtcaagccaaaaaggcacaaaacagatttaaagttcctttggggacaaagttttacagagtgaaagccgtatcatggaataagaaagtataacttatggacaaaattaatacattctatgacatttttttctgatttgtcctgcagtgctcattcatcactccaaaaacagcaggccatctttttatgcaaaagtcagcgtgacaatatacttcactggtgtacatcgtttactttttaactggcttcattttaggaataataaattcatcagaatccttggctgaattaaaatggtttttgttttttggttttttttttgttccttttttaagcgccccccccaaaggggtacccagacaactctagaaatgcggaccaaactacttcattttctcaaagggcataccttgtgcattgtggcttatgatgagccatattaattgcctgttaaatatacactagcttgaacttagatgttaaatgttattattaccagcatttgtccttttgtgaaatcagtatcagaatacttgcactctttaacacattctttataaaatgtataaattattcagaactatttaaaataaagaggagtgttattgcatgctgataatcattttgagtttgcctcagtagatactaaagcaaattgtttcagtttttttaaatgccctttgatgtttcaaaaaaaaaaaggaactgtaatttgattgactgattttaagatcagccataagtaatcagcaatcttcaaaagcactttcagtggattggtcatctgggttctaaagggaagagtctgtgctactaaccatttcaaatgcagactcaaaccttcccaacatctttatgactctagaataatcatattgatgaaatcgtaattcatggttgagtttcagaacaaaagatattcattgcacattaaccatttagaggtcatttaaataacaaaatattgtattgtaaaagaactgtacaattttaaaacaataaagatttgaacctgtaaatgtgtgtgccttttaaagaaggatacatttttaatatatttgagtgattgctgggaagtgtgaaaatattgttatgtatcatatcaaagagaaacatgtttattacaaaaatgttctttaactatatactatgtaacagggtaaacagtgttatgtagaatagaattgtgtaaactagatctttagagaagttgccattgagcaaagttatttaaatgagttagttgagttggatgagaattgtttgaggtttgttgctagagaacaataataaaataattctttttcagaaaatatttaatttcttcataaaaataagttaaatatttttttaaatatgtatatctaatagtacaaaatggaataaacatcatagtgtatagaaaactgaatttgacaagttaatgaataaatgaacaaatgatttc

SEQ ID NO: 536 - DNA, 5419 bp, Homo sapiens
  misc_feature (5403)..(5403): n is a, c, g, or t
cgacaataacaaaccaagccgcggcggtgtccgcggccctgccgagccctcggcgttgcctcagaatcccccagtcgcctgggcccctcggctctgacaggccgcggccttctgtcccccggccccagacccagagccgaggggcctgctcgcgtccttgtccgcccggacccctccctgcctcctagagttcggggccgcggcgggcgggcgcccgggacgccggcggttgtgtcggcttagcggtgccgaatgggcggttggtaaccgctgccgaggactaggcggcggcggaagatggtgccgggggtcgctggctctgctgctgccgccggcgaaggaggaggcgttgccggttttctgagtttaaccagtaatgccattcagttgccaatctcaagcaaagcaaacataagccagttttaatctactttttaagaaaagtggtagtccttttcacagtgcctgacgacctgtacacttgctactgttacacaaagtgatggaactattaaggaggatttcttgctcagtgtagaggtgaaaagcagttcaacaggcagctgatggaagtgatggaactattatggaggatttctagctcagtgtagaggtgaaacacagatgatggaaggaattgggattcatttcccctaatttgcaagtaacggctactcttaatttgcgattataactgtatcagagggtgaggtataagctcacagaattcagataaatcatcatgaagttatatgtatttctggttaacactggaactactctaacatttgacactgaacttacagtgcaaactgtggcagaccttaagcatgccattcaaagcaaatacaagattgctattcaacaccaggtgctggtggtcaatggaggagaatgcatggctgcagatcgaagagtgtgtacctacagtgctgggacggatacaaatccaatttttctttttaacaaagaaatgatcttatgtgatcgtccacctgctattcctaaaactaccttttcgacagaaaatgacatggaaataaaagttgaagaatctcttatgatgcctgcagtttttcatactgttgcttcaaggacacagcttgcattggaaatgtatgaagttgccaagaaactttgttctttttgtgaaggtcttgtacatgatgaacatcttcaacaccaaggctgggctgcaatcatggccaacctggaggactgttcaaattcataccaaaagctacttttcaagtttgaaagtatttattcaaattatctgcagtccatagaagacatcaagttaaaacttactcatttaggaactgcagtttcagtaatggccaagattccactgttggagtgcctaaccagacatagttacagagaatgtttgggaagactggattctttacctgaacatgaagactcagaaaaagctgagacgaaaagatccactgaactggtgctctctcctgatatgcctagaacaactaacgaatctttgttaacctcatttcccaagtcagtggaacatgtgtccccagataccgcagatgctgaaagtggcaaagaaattagggaatcttgtcaaagtactgttcatcagcaagatgaaactacgattgacactaaagatggtgatctgcccttttttaatgtctctttgttagactggataaatgttcaagatagacctaatgatgtggaatctttggtcaggaagtgctttgattctatgagcaggcttgatccaaggattattcgaccatttatagcagaatgccgtcaaactattgccaaacttgataatcagaatatgaaagccattaaaggacttgaagatcggctctacgccctggaccagatgattgctagctgtggccgactggtgaatgaacagaaagagcttgctcagggatttttagctaatcagaagagagctgaaaacttaaaggatgcatctgtattacctgatttatgcctgagtcacgcaaatcagttgatgattatgttgcaaaatcatagaaaactgttagatattaagcagaagtgtaccactgccaaacaagaactagcaaataacctacatgtcagactgaagtggtgttgctttgtaatgcttcatgctgatcaagatggagagaagttacaagctttgctccgcctcgtaatagagctgttagaaagagtcaaaattgttgaagctcttagtacagttcctcagatgtactgcttagctgttgttgaggttgtaagaagaaaaatgttcataaaacactacagggagtgggctggtgctttagtcaaagatggaaagagattatatgaagcagaaaaatcaaaaagggaatcctttgggaaattatttaggaagtcttttttaagaaatcgtctgtttaggggactggactcctggcccccttccttttgtactcaaaagcctcgaaagtttgactgtgaacttccagatatttcattaaaagatttacagtttctgcaatcattttgtccttcggaagttcagccattcctcagggttcccttactttgtgactttgaacctctacaccagcatgtacttgctctacataatttggtaaaagcagcacaaagtttggatgaaatgtcacagaccattacagatctactgagtgaacaaaaggcatctgtgagtcagacatccccacagtctgcttcttcaccaaggatggaaagtacagcaggaattacaactactacctcaccgagaactcctccaccactgactgttcaggatcccttatgtcctgcagtttgtcccttagaagaattatctccagatagtattgatgcacatacgtttgattttgaaactattccccatccaaacatagaacagactattcaccaagtttctttagacttggattcattagcagaaagtcctgaatcagattttatgtctgctgtgaatgagtttgtaatagaagaaaatttgtcgtctcctaatcctataagtgatccacaaagcccagaaatgatggtggaatcactttattcatcagttatcaatgcgatagacagtagacgaatgcaggatacaaatgtatgtggtaaggaggattttggagatcatacttctctgaatgtccagttggaaagatgtagagttgttgcccaagactctcacttcagtatacaaaccattaaggaagacctttgccactttagaacatttgtacaaaaagaacagtgtgacttctcaaattcattaaaatgtacagcagtagaaataagaaacattattgaaaaagtaaaatgttctctggaaataacactaaaagaaaaacatcaaaaagaactactgtctttaaaaaatgaatatgaaggtaaacttgacggactaataaaggaaactgaagagaatgaaaacaaaattaaaaaattgaagggagagttagtatgccttgaggaggttttacaaaataaagataatgaatttgctttggttaaacatgaaaaagaagctgtaatctgcctgcagaatgaaaaggatcagaagttgttagagatggaaaatataatgcactctcaaaattgtgaaattaaagaactgaagcagtcacgagaaatagtgttagaagacttaaaaaagctccatgttgaaaatgatgagaagttacagttattgagggcagaacttcagtccttggagcaaagtcatctaaaggaattagaggacacacttcaggttaggcacatacaagagtttgagaaggttatgacagaccacagagtttctttggaggaattaaaaaaggaaaaccaacaaataattaatcaaatacaagaatctcatgctgaaattatccaggaaaaagaaaaacagttacaggaattaaaactcaaggtttctgatttgtcagacacgagatgcaagttagaggttgaacttgcgttgaaggaagcagaaactgatgaaataaaaattttgctggaagaaagcagagcccagcagaaggagaccttgaaatctcttcttgaacaagagacagaaaatttgagaacagaaattagtaaactcaaccaaaagattcaggataataatgaaaattatcaggtgggcttagcagagctaagaactttaatgacaattgaaaaagatcagtgtatttccgagttaattagtagacatgaagaagaatctaatatacttaaagctgaattaaacaaagtaacatctttgcataaccaagcatttgaaatagaaaaaaacctaaaagaacaaataattgaactgcagagtaaattggattcagaattgagtgctcttgaaagacaaaaagatgaaaaaattacccaacaagaagagaaatacgaagctattatccagaaccttgagaaagacagacaaaaattggtcagcagccaggagcaagacagagaacagttaattcagaagcttaattgtgaaaaagatgaagctattcagactgccctaaaagaatttaaattggagagagaagttgttgagaaagagttattagaaaaagttaaacatcttgagaatcaaatagcaaaaagtcctgccattgactctaccagaggagattcttcaagcttagttgctgaacttcaagaaaagcttcaggaagaaaaagctaagtttctagaacaacttgaagagcaagaaaaaagaaagaatgaagaaatgcaaaatgttcgaacatctttgattgcggaacaacagaccaattttaacactgttttaacaagagagaaaatgagaaaagaaaacataataaatgatcttagtgataagttgaaaagtacaatgcagcaacaagaacgggataaagatttgatagagtcactttctgaagatcgagctcgtttgcttgaggaaaagaaaaagcttgaagaagaagtcagtaagttgcgtagtagcagttttgttccttcaccatatgtagctacagccccagaactttatggagcttgtgcacctgaactcccaggtgaatcagatagatccgctgtggaaacagcagatgaaggaagagtggattcagcaatggagacaagcatgatgtctgtacaagaaaatattcatatgttgtctgaagaaaaacagcggataatgctgttagaacgaacattgcaattgaaagaagaagaaaataaacggttaaatcaaagactgatgtctcagagcatgtcttcagtatcttcaaggcattctgaaaagatagctattagagattttcaggtgggagatttggtactcatcatcctagacgaacgccatgacaattatgtgttatttactgttagtcctactttatattttctacattcagagtctctacctgccctggatctcaaaccaacccaagctttcaagggtggcaatcctaagaaagnaacccctgggggtaac

SEQ ID NO: 537 - DNA, 4928 bp, Homo sapiens
  misc_feature (4887)..(4888): n is a, c, g, or t
  misc_feature (4891)..(4891): n is a, c, g, or t
  misc_feature (4914)..(4914): n is a, c, g, or t
  misc_feature (4916)..(4916): n is a, c, g, or t
cgacaataacaaaccaagccgcggcggtgtccgcggccctgccgagccctcggcgttgcctcagaatcccccagtcgcctgggcccctcggctctgacaggccgcggccttctgtcccccggccccagacccagagccgaggggcctgctcgcgtccttgtccgcccggacccctccctgcctcctagagttcggggccgcggcgggcgggcgcccgggacgccggcggttgtgtcggcttagcggtgccgaatgggcggttggtaaccgctgccgaggactaggcggcggcggaagatggtgccgggggtcgctggctctgctgctgccgccggcgaaggaggaggcgttgccggttttctgagtttaaccagtaatgccattcagttgccaatctcaagcaaagcaaacataagccagttttaatctactttttaagaaaagtggtagtccttttcacagtgcctgacgacctgtacacttgctactgttacacaaagtgatggaactattaaggaggatttcttgctcagtgtagaggtgaaaagcagttcaacaggcagctgatggaagtgatggaactattatggaggatttctagctcagtgtagaggtgaaacacagatgatggaaggaattgggattcatttcccctaatttgcaagtaacggctactcttaatttgcgattataactgtatcagagggtgaggtataagctcacagaattcagataaatcatcatgaagttatatgtatttctggttaacactggaactactctaacatttgacactgaacttacagtgcaaactgtggcagaccttaagcatgccattcaaagcaaatacaagattgctattcaacaccaggtgctggtggtcaatggaggagaatgcatggctgcagatcgaagagtgtgtacctacagtgctgggacggatacaaatccaatttttctttttaacaaagaaatgatcttatgtgatcgtccacctgctattcctaaaactaccttttcgacagaaaatgacatggaaataaaagttgaagaatctcttatgatgcctgcagtttttcatactgttgcttcaaggacacagcttgcattggaaatgtatgaagttgccaagaaactttgttctttttgtgaaggtcttgtacatgatgaacatcttcaacaccaaggctgggctgcaatcatggccaacctggaggactgttcaaattcataccaaaagctacttttcaagtttgaaagtatttattcaaattatctgcagtccatagaagacatcaagttaaaacttactcatttaggaactgcagtttcagtaatggccaagattccactgttggagtgcctaaccagacatagttacagagaatgtttgggaagactggattctttacctgaacatgaagactcagaaaaagctgagacgaaaagatccactgaactggtgctctctcctgatatgcctagaacaactaacgaatctttgttaacctcatttcccaagtcagtggaacatgtgtccccagataccgcagatgctgaaagtggcaaagaaattagggaatcttgtcaaagtactgttcatcagcaagatgaaactacgattgacactaaagatggtgatctgcccttttttaatgtctctttgttagactggataaatgttcaagatagacctaatgatgtggaatctttggtcaggaagtgctttgattctatgagcaggcttgatccaaggattattcgaccatttatagcagaatgccgtcaaactattgccaaacttgataatcagaatatgaaagccattaaaggacttgaagatcggctctacgccctggaccagatgattgctagctgtggccgactggtgaatgaacagaaagagcttgctcagggatttttagctaatcagaagagagctgaaaacttaaaggatgcatctgtattacctgatttatgcctgagtcacgcaaatcagttgatgattatgttgcaaaatcatagaaaactgttagatattaagcagaagtgtaccactgccaaacaagaactagcaaataacctacatgtcagactgaagtggtgttgctttgtaatgcttcatgctgatcaagatggagagaagttacaagctttgctccgcctcgtaatagagctgttagaaagagtcaaaattgttgaagctcttagtacagttcctcagatgtactgcttagctgttgttgaggttgtaagaagaaaaatgttcataaaacactacagggagtgggctggtgctttagtcaaagatggaaagagattatatgaagcagaaaaatcaaaaagggaatcctttgggaaattatttaggaagtcttttttaagaaatcgtctgtttaggggactggactcctggcccccttccttttgtactcaaaagcctcgaaagtttgactgtgaacttccagatatttcattaaaagatttacagtttctgcaatcattttgtccttcggaagttcagccattcctcagggttcccttactttgtgactttgaacctctacaccagcatgtacttgctctacataatttggtaaaagcagcacaaagtttggatgaaatgtcacagaccattacagatctactgagtgaacaaaaggcatctgtgagtcagacatccccacagtctgcttcttcaccaaggatggaaagtacagcaggaattacaactactacctcaccgagaactcctccaccactgactgttcaggatcccttatgtcctgcagtttgtcccttagaagaattatctccagatagtattgatgcacatacgtttgattttgaaactattccccatccaaacatagaacagactattcaccaagtttctttagacttggattcattagcagaaagtcctgaatcagattttatgtctgctgtgaatgagtttgtaatagaagaaaatttgtcgtctcctaatcctataagtgatccacaaagcccagaaatgatggtggaatcactttattcatcagttatcaatgcgatagacagtagacgaatgcaggatacaaatgtatgtggtaaggaggattttggagatcatacttctctgaatgtccagttggaaagatgtagagttgttgcccaagactctcacttcagtatacaaaccattaaggaagacctttgccactttagaacatttgtacaaaaagaacagtgtgacttctcaaattcattaaaatgtacagcagtagaaataagaaacattattgaaaaagtaaaatgttctctggaaataacactaaaagaaaaacatcaaaaagaactactgtctttaaaaaatgaatatgaaggtaaacttgacggactaataaaggaaactgaagagaatgaaaacaaaattaaaaaattgaagggagagttagtatgccttgaggaggttttacaaaataaagataatgaatttgctttggttaaacatgaaaaagaagctgtaatctgcctgcagaatgaaaaggatcagaagttgttagagatggaaaatataatgcactctcaaaattgtgaaattaaagaactgaagcagtcacgagaaatagtgttagaagacttaaaaaagctccatgttgaaaatgatgagaagttacagttattgagggcagaacttcagtccttggagcaaagtcatctaaaggaattagaggacacacttcaggttaggcacatacaagagtttgagaaggttatgacagaccacagagtttctttggaggaattaaaaaaggaaaaccaacaaataattaatcaaatacaagaatctcatgctgaaattatccaggaaaaagaaaaacagttacaggaattaaaactcaaggtttctgatttgtcagacacgagatgcaagttagaggttgaacttgcgttgaaggaagcagaaactgatgaaataaaaattttgctggaagaaagcagagcccagcagaaggagaccttgaaatctcttcttgaacaagagacagaaaatttgagaacagaaattagtaaactcaaccaaaagattcaggataataatgaaaattatcaggtgggcttagcagagctaagaactttaatgacaattgaaaaagatcagtgtatttccgagttaattagtagacatgaagaagaatctaatatacttaaagctgaattaaacaaagtaacatctttgcataaccaagcatttgaaatagaaaaaaacctaaaagaacaaataattgaactgcagagtaaattggattcagaattgagtgctcttgaaagacaaaaagatgaaaaaattacccaacaagaagagaaatacgaagctattatccagaaccttgagaaagacagacaaaaattggtcagcagccaggagcaagacagagaacagttaattcagaagcttaattgtgaaaaagatgaagctattcagactgccctaaaagaatttaaattggagagagaagttgttgagaaagagttattagaaaaagttaaacatcttgagaatcaaatagcaaaaagtcctgccattgactctaccagaggagattcttcaagcttagttgctgaacttcaagaaaagcttcaggaagaaaaagctaagtttctagaacaacttgaagagcaagaaaaaagaaagaatgaagaaatgcaaaatgttcgaacatctttgattgcggaacaacagaccaattttaacactgttttaacaagagagaagttgttgagaaagagttattagaaaaagttaaacatcttgagaatcaaatagcaaaaagtcctgccattgactctaccagaggagattcttcaagcttagttgctgaacttcaagaaaagcttcannaanaaaaagctaagtttctagaacancntgaagagcaaga

SEQ ID NO: 538 - DNA, 2585 bp, Homo sapiens
  misc_feature (5)..(5): n is a, c, g, or t
  misc_feature (9)..(9): n is a, c, g, or t
  misc_feature (15)..(15): n is a, c, g, or t
  misc_feature (20)..(20): n is a, c, g, or t
ctcgncggnacggtngagcnaagaagtaaattggattcagaattgagtgctcttgaaagacaaaaagatgaaaaaattacccaacaagaagagaaatacgaagctattatccagaaccttgagaaagacagacaaaaattggtcagcagccaggagcaagacagagaacagttaattcagaagcttaattgtgaaaaagatgaagctattcagactgccctaaaagaatttaaattggagagagaagttgttgagaaagagttattagaaaaagttaaacatcttgagaatcaaatagcaaaaagtcctgccattgactctaccagaggagattcttcaagcttagttgctgaacttcaagaaaagcttcaggaagaaaaagctaagtttctagaacaacttgaagagcaagaaaaaagaaagaatgaagaaatgcaaaatgttcgaacatctttgattgcggaacaacagaccaattttaacactgttttaacaagagagaaaatgagaaaagaaaacataataaatgatcttagtgataagttgaaaagtacaatgcagcaacaagaacgggataaagatttgatagagtcactttctgaagatcgagctcgtttgcttgaggaaaagaaaaagcttgaagaagaagtcagtaagttgcgtagtagcagttttgttccttcaccatatgtagctacagccccagaactttatggagcttgtgcacctgaactcccaggtgaatcagatagatccgctgtggaaacagcagatgaaggaagagtggattcagcaatggagacaagcatgatgtctgtacaagaaaatattcatatgttgtctgaagaaaaacagcggataatgctgttagaacgaacattgcaattgaaagaagaagaaaataaacggttaaatcaaagactgatgtctcagagcatgtcttcagtatcttcaaggcattctgaaaagatagctattagagattttcaggtgggagatttggtactcatcatcctagacgaacgccatgacaattatgtgttatttactgttagtcctactttatattttctacattcagagtctctacctgccctggatctcaaaccaaggcttcaggtgcatctagaagaccctgggtacttggaaaagtaatggaaaaagaatactgtcaagccaaaaaggcacaaaacagatttaaagttcctttggggacaaagttttacagagtgaaagccgtatcatggaataagaaagtataacttatggacaaaattaatacattctatgacatttttttctgatttgtcctgcagtgctcattcatcactccaaaaacagcaggccatctttttatgcaaaagtcagcgtgacaatatacttcactggtgtacatcgtttactttttaactggcttcattttaggaataataaattcatcagaatccttggctgaattaaaatggtttttgttttttggtttttttttttacccagacaactctagaaatgcggaccaaactacttcattttctcaaagggcataccttgtgcattgtggcttatgatgagccatattaattgcctgttaaatatacactagcttgaacttagatgttaaatgttattattaccagcatttgtccttttgtgaaatcagtatcagaatacttgcactctttaacacattctttataaaatgtataaattattcagaactatttaaaataaagaggagtgttattgcatgctgataatcattttgagtttgcctcagtagatactaaagcaaattgtttcagtttttttaaatgccctttgatgtttcaaaaaaaaaaaggaactgtaatttgattgactgattttaagatcagccataagtaatcagcaatcttcaaaagcactttcagtggattggtcatctgggttctaaagggaagagtctgtgctactaaccatttcaaatgcagactcaaaccttcccaacatctttatgactctagaataatcatattgatgaaatcgtaattcatggttgagtttcagaacaaaagatattcattgcacattaaccatttagaggtcatttaaataacaaaatattgtattgtaaaagaactgtacaattttaaaacaataaagatttgaacctgtaaatgtgtgtgccttttaaagaaggatacatttttaatatatttgagtgattgctgggaagtgtgaaaatattgttatgtatcatatcaaagagaaacatgtttattacaaaaatgttctttaactatatactatgtaacagggtaaacagtgttatgtagaatagaattgtgtaaactagatctttagagaagttgccattgagcaaagttatttaaatgagttagttgagttggatgagaattgtttgaggtttgttgctagagaacaataataaaataattctttttcagaaaatatttaatttcttcataaaaataagttaaatatttttttaaatatgtatatctaatagtacaaaatggaataaacatcatagtgtatagaaaactgaatttgacaagttaatgaataaatgaacaaatgatttc

SEQ ID NO: 539 - DNA, 4653 bp, Homo sapiens
cgacaataacaaaccaagccgcggcggtgtccgcggccctgccgagccctcggcgttgcctcagaatcccccagtcgcctgggcccctcggctctgacaggccgcggccttctgtcccccggccccagacccagagccgaggggcctgctcgcgtccttgtccgcccggacccctccctgcctcctagagttcggggccgcggcgggcgggcgcccgggacgccggcggttgtgtcggcttagcggtgccgaatgggcggttggtaaccgctgccgaggactaggcggcggcggaagatggtgccgggggtcgctggctctgctgctgccgccggcgaaggaggaggcgttgccggttttctgagtttaaccagtaatgccattcagttgccaatctcaagcaaagcaaacataagccagttttaatctactttttaagaaaagtggtagtccttttcacagtgcctgacgacctgtacacttgctactgttacacaaagtgatggaactattaaggaggatttcttgctcagtgtagaggtgaaaagcagttcaacaggcagctgatggaagtgatggaactattatggaggatttctagctcagtgtagaggtgaaacacagatgatggaaggaattgggattcatttcccctaatttgcaagtaacggctactcttaatttgcgattataactgtatcagagggtgaggtataagctcacagaattcagataaatcatcatgaagttatatgtatttctggttaacactggaactactctaacatttgacactgaacttacagtgcaaactgtggcagaccttaagcatgccattcaaagcaaatacaagattgctattcaacaccaggtgctggtggtcaatggaggagaatgcatggctgcagatcgaagagtgtgtacctacagtgctgggacggatacaaatccaatttttctttttaacaaagaaatgatcttatgtgatcgtccacctgctattcctaaaactaccttttcgacagaaaatgacatggaaataaaagttgaagaatctcttatgatgcctgcagtttttcatactgttgcttcaaggacacagcttgcattggaaatgtatgaagttgccaagaaactttgttctttttgtgaaggtcttgtacatgatgaacatcttcaacaccaaggctgggctgcaatcatggccaacctggaggactgttcaaattcataccaaaagctacttttcaagtttgaaagtatttattcaaattatctgcagtccatagaagacatcaagttaaaacttactcatttaggaactgcagtttcagtaatggccaagattccactgttggagtgcctaaccagacatagttacagagaatgtttgggaagactggattctttacctgaacatgaagactcagaaaaagctgagacgaaaagatccactgaactggtgctctctcctgatatgcctagaacaactaacgaatctttgttaacctcatttcccaagtcagtggaacatgtgtccccagataccgcagatgctgaaagtggcaaagaaattagggaatcttgtcaaagtactgttcatcagcaagatgaaactacgattgacactaaagatggtgatctgcccttttttaatgtctctttgttagactggataaatgttcaagatagacctaatgatgtggaatctttggtcaggaagtgctttgattctatgagcaggcttgatccaaggattattcgaccatttatagcagaatgccgtcaaactattgccaaacttgataatcagaatatgaaagccattaaaggacttgaagatcggctctacgccctggaccagatgattgctagctgtggccgactggtgaatgaacagaaagagcttgctcagggatttttagctaatcagaagagagctgaaaacttaaaggatgcatctgtattacctgatttatgcctgagtcacgcaaatcagttgatgattatgttgcaaaatcatagaaaactgttagatattaagcagaagtgtaccactgccaaacaagaactagcaaataacctacatgtcagactgaagtggtgttgctttgtaatgcttcatgctgatcaagatggagagaagttacaagctttgctccgcctcgtaatagagctgttagaaagagtcaaaattgttgaagctcttagtacagttcctcagatgtactgcttagctgttgttgaggttgtaagaagaaaaatgttcataaaacactacagggagtgggctggtgctttagtcaaagatggaaagagattatatgaagcagaaaaatcaaaaagggaatcctttgggaaattatttaggaagtcttttttaagaaatcgtctgtttaggggactggactcctggcccccttccttttgtactcaaaagcctcgaaagtttgactgtgaacttccagatatttcattaaaagatttacagtttctgcaatcattttgtccttcggaagttcagccattcctcagggttcccttactttgtgactttgaacctctacaccagcatgtacttgctctacataatttggtaaaagcagcacaaagtttggatgaaatgtcacagaccattacagatctactgagtgaacaaaaggcatctgtgagtcagacatccccacagtctgcttcttcaccaaggatggaaagtacagcaggaattacaactactacctcaccgagaactcctccaccactgactgttcaggatcccttatgtcctgcagtttgtcccttagaagaattatctccagatagtattgatgcacatacgtttgattttgaaactattccccatccaaacatagaacagactattcaccaagtttctttagacttggattcattagcagaaagtcctgaatcagattttatgtctgctgtgaatgagtttgtaatagaagaaaatttgtcgtctcctaatcctataagtgatccacaaagcccagaaatgatggtggaatcactttattcatcagttatcaatgcgatagacagtagacgaatgcaggatacaaatgtatgtggtaaggaggattttggagatcatacttctctgaatgtccagttggaaagatgtagagttgttgcccaagactctcacttcagtatacaaaccattaaggaagacctttgccactttagaacatttgtacaaaaagaacagtgtgacttctcaaattcattaaaatgtacagcagtagaaataagaaacattattgaaaaagtaaaatgttctctggaaataacactaaaagaaaaacatcaaaaagaactactgtctttaaaaaatgaatatgaaggtaaacttgacggactaataaaggaaactgaagagaatgaaaacaaaattaaaaaattgaagggagagttagtatgccttgaggaggttttacaaaataaagataatgaatttgctttggttaaacatgaaaaagaagctgtaatctgcctgcagaatgaaaaggatcagaagttgttagagatggaaaatataatgcactctcaaaattgtgaaattaaagaactgaagcagtcacgagaaatagtgttagaagacttaaaaaagctccatgttgaaaatgatgagaagttacagttattgagggcagaacttcagtccttggagcaaagtcatctaaaggaattagaggacacacttcaggttaggcacatacaagagtttgagaaggttatgacagaccacagagtttctttggaggaattaaaaaaggaaaaccaacaaataattaatcaaatacaagaatctcatgctgaaattatccaggaaaaagaaaaacagttacaggaattaaaactcaaggtttctgatttgtcagacacgagatgcaagttagaggttgaacttgcgttgaaggaagcagaaactgatgaaataaaaattttgctggaagaaagcagagcccagcagaaggagaccttgaaatctcttcttgaacaagagacagaaaatttgagaacagaaattagtaaactcaaccaaaagattcaggataataatgaaaattatcaggtgggcttagcagagctaagaactttaatgacaattgaaaaagatcagtgtatttccgagttaattagtagacatgaagaagaatctaatatacttaaagctgaattaaacaaagtaacatctttgcataaccaagcatttgaaatagaaaaaaacctaaaagaacaaataattgaactgcagagtaaattggattcagaattgagtgctcttgaaagacaaaaagatgaaaaaattacccaacaagaagagaaatacgaagctattatccagaaccttgagaaagacagacaaaaattggtcagcagccaggagcaagacagagaacagttaattcagaagcttaattgtgaaaaagatgaagctattcagactgccctaaaagaatttaaattggagagagaagttgttgagaaagagttattagaaaaagttaaacatcttgagaatcaaatagcaaaaaggtaagaattaagtttagtctgtaattataaaattaaaatatcagtgattcgtttgtgtgtaatcacagtaccttgatttactcatttacc

SEQ ID NO: 540 - DNA, 2559 bp, Homo sapiens
aattagtggtcgtcaggccgtcgttcttcattgacgagaagatatggaaatacacatacaggaagagaaatacgaagctattatccagaaccttgagaaagacagacaaaaattggtcagcagccaggagcaagacagagaacagttaattcagaagcttaattgtgaaaaagatgaagctattcagactgccctaaaagaatttaaattggagagagaagttgttgagaaagagttattagaaaaagttaaacatcttgagaatcaaatagcaaaaagtcctgccattgactctaccagaggagattcttcaagcttagttgctgaacttcaagaaaagcttcaggaagaaaaagctaagtttctagaacaacttgaagagcaagaaaaaagaaagaatgaagaaatgcaaaatgttcgaacatctttgattgcggaacaacagaccaattttaacactgttttaacaagagagaaaatgagaaaagaaaacataataaatgatcttagtgataagttgaaaagtacaatgcagcaacaagaacgggataaagatttgatagagtcactttctgaagatcgagctcgtttgcttgaggaaaagaaaaagcttgaagaagaagtcagtaagttgcgtagtagcagttttgttccttcaccatatgtagctacagccccagaactttatggagcttgtgcacctgaactcccaggtgaatcagatagatccgctgtggaaacagcagatgaaggaagagtggattcagcaatggagacaagcatgatgtctgtacaagaaaatattcatatgttgtctgaagaaaaacagcggataatgctgttagaacgaacattgcaattgaaagaagaagaaaataaacggttaaatcaaagactgatgtctcagagcatgtcttcagtatcttcaaggcattctgaaaagatagctattagagattttcaggtgggagatttggtactcatcatcctagacgaacgccatgacaattatgtgttatttactgttagtcctactttatattttctacattcagagtctctacctgccctggatctcaaaccaaggcttcaggtgcatctagaagaccctgggtacttggaaaagtaatggaaaaagaatactgtcaagccaaaaaggcacaaaacagatttaaagttcctttggggacaaagttttacagagtgaaagccgtatcatggaataagaaagtataacttatggacaaaattaatacattctatgacatttttttctgatttgtcctgcagtgctcattcatcactccaaaaacagcaggccatctttttatgcaaaagtcagcgtgacaatatacttcactggtgtacatcgtttactttttaactggcttcattttaggaataataaattcatcagaatccttggctgaattaaaatggtttttgttttttggtttttttttttacccagacaactctagaaatgcggaccaaactacttcattttctcaaagggcataccttgtgcattgtggcttatgatgagccatattaattgcctgttaaatatacactagcttgaacttagatgttaaatgttattattaccagcatttgtccttttgtgaaatcagtatcagaatacttgcactctttaacacattctttataaaatgtataaattattcagaactatttaaaataaagaggagtgttattgcatgctgataatcattttgagtttgcctcagtagatactaaagcaaattgtttcagtttttttaaatgccctttgatgtttcaaaaaaaaaaaggaactgtaatttgattgactgattttaagatcagccataagtaatcagcaatcttcaaaagcactttcagtggattggtcatctgggttctaaagggaagagtctgtgctactaaccatttcaaatgcagactcaaaccttcccaacatctttatgactctagaataatcatattgatgaaatcgtaattcatggttgagtttcagaacaaaagatattcattgcacattaaccatttagaggtcatttaaataacaaaatattgtattgtaaaagaactgtacaattttaaaacaataaagatttgaacctgtaaatgtgtgtgccttttaaagaaggatacatttttaatatatttgagtgattgctgggaagtgtgaaaatattgttatgtatcatatcaaagagaaacatgtttattacaaaaatgttctttaactatatactatgtaacagggtaaacagtgttatgtagaatagaattgtgtaaactagatctttagagaagttgccattgagcaaagttatttaaatgagttagttgagttggatgagaattgtttgaggtttgttgctagagaacaataataaaataattctttttcagaaaatatttaatttcttcataaaaataagttaaatatttttttaaatatgtatatctaatagtacaaaatggaataaacatcatagtgtatagaaaactgaatttgacaagttaatgaataaatgaacaaatgatttc

SEQ ID NO: 541 - DNA, 3526 bp, Homo sapiens
cgacaataacaaaccaagccgcggcggtgtccgcggccctgccgagccctcggcgttgcctcagaatcccccagtcgcctgggcccctcggctctgacaggccgcggccttctgtcccccggccccagacccagagccgaggggcctgctcgcgtccttgtccgcccggacccctccctgcctcctagagttcggggccgcggcgggcgggcgcccgggacgccggcggttgtgtcggcttagcggtgccgaatgggcggttggtaaccgctgccgaggactaggcggcggcggaagatggtgccgggggtcgctggctctgctgctgccgccggcgaaggaggaggcgttgccggttttctgagtttaaccagtaatgccattcagttgccaatctcaagcaaagcaaacataagccagttttaatctactttttaagaaaagtggtagtccttttcacagtgcctgacgacctgtacacttgctactgttacacaaagtgatggaactattaaggaggatttcttgctcagtgtagaggtgaaaagcagttcaacaggcagctgatggaagtgatggaactattatggaggatttctagctcagtgtagaggtgaaacacagatgatggaaggaattgggattcatttcccctaatttgcaagtaacggctactcttaatttgcgattataactgtatcagagggtgaggtataagctcacagaattcagataaatcatcatgaagttatatgtatttctggttaacactggaactactctaacatttgacactgaacttacagtgcaaactgtggcagaccttaagcatgccattcaaagcaaatacaagattgctattcaacaccaggtgctggtggtcaatggaggagaatgcatggctgcagatcgaagagtgtgtacctacagtgctgggacggatacaaatccaatttttctttttaacaaagaaatgatcttatgtgatcgtccacctgctattcctaaaactaccttttcgacagaaaatgacatggaaataaaagttgaagaatctcttatgatgcctgcagtttttcatactgttgcttcaaggacacagcttgcattggaaatgtatgaagttgccaagaaactttgttctttttgtgaaggtcttgtacatgatgaacatcttcaacaccaaggctgggctgcaatcatggccaacctggaggactgttcaaattcataccaaaagctacttttcaagtttgaaagtatttattcaaattatctgcagtccatagaagacatcaagttaaaacttactcatttaggaactgcagtttcagtaatggccaagattccactgttggagtgcctaaccagacatagttacagagaatgtttgggaagactggattctttacctgaacatgaagactcagaaaaagctgagacgaaaagatccactgaactggtgctctctcctgatatgcctagaacaactaacgaatctttgttaacctcatttcccaagtcagtggaacatgtgtccccagataccgcagatgctgaaagtggcaaagaaattagggaatcttgtcaaagtactgttcatcagcaagatgaaactacgattgacactaaagatggtgatctgcccttttttaatgtctctttgttagactggataaatgttcaagatagacctaatgatgtggaatctttggtcaggaagtgctttgattctatgagcaggcttgatccaaggattattcgaccatttatagcagaatgccgtcaaactattgccaaacttgataatcagaatatgaaagccattaaaggacttgaagatcggctctacgccctggaccagatgattgctagctgtggccgactggtgaatgaacagaaagagcttgctcagggatttttagctaatcagaagagagctgaaaacttaaaggatgcatctgtattacctgatttatgcctgagtcacgcaaatcagttgatgattatgttgcaaaatcatagaaaactgttagatattaagcagaagtgtaccactgccaaacaagaactagcaaataacctacatgtcagactgaagtggtgttgctttgtaatgcttcatgctgatcaagatggagagaagttacaagctttgctccgcctcgtaatagagctgttagaaagagtcaaaattgttgaagctcttagtacagttcctcagatgtactgcttagctgttgttgaggttgtaagaagaaaaatgttcataaaacactacagggagtgggctggtgctttagtcaaagatggaaagagattatatgaagcagaaaaatcaaaaagggaatcctttgggaaattatttaggaagtcttttttaagaaatcgtctgtttaggggactggactcctggcccccttccttttgtactcaaaagcctcgaaagtttgactgtgaacttccagatatttcattaaaagatttacagtttctgcaatcattttgtccttcggaagttcagccattcctcagggttcccttactttgtgactttgaacctctacaccagcatgtacttgctctacataatttggtaaaagcagcacaaagtttggatgaaatgtcacagaccattacagatctactgagtgaacaaaaggcatctgtgagtcagacatccccacagtctgcttcttcaccaaggatggaaagtacagcaggaattacaactactacctcaccgagaactcctccaccactgactgttcaggatcccttatgtcctgcagtttgtcccttagaagaattatctccagatagtattgatgcacatacgtttgattttgaaactattccccatccaaacatagaacagactattcaccaagtttctttagacttggattcattagcagaaagtcctgaatcagattttatgtctgctgtgaatgagtttgtaatagaagaaaatttgtcgtctcctaatcctataagtgatccacaaagcccagaaatgatggtggaatcactttattcatcagttatcaatgcgatagacagtagacgaatgcaggatacaaatgtatgtggtaaggaggattttggagatcatacttctctgaatgtccagttggaaagatgtagagttgttgcccaagactctcacttcagtatacaaaccattaaggaagacctttgccactttagaacatttgtacaaaaagaacagtgtgacttctcaaattcattaaaatgtacagcagtagaaataagaaacattattgaaaaagtaaaatgttctctggaaataacactaaaagaaaaacatcaaaaagaactactgtctttaaaaaatgaatatgaaggtaaacttgacggactaataaaggaaactgaagagaatgaaaacaaaattaaaaaattgaagggagagttagtatgccttacccatttcatcccctacaacggaagtagttaactggaagagattacccagagaataaaaagagcctccttcagtgga

SEQ ID NO: 542 - DNA, 497 bp, Homo sapiens
tagttttcattaaacttgattttacacttacatgaatgattttttggaagatagggataggaaggaatcttcacatgtgttagacttaatgtagtttctaaaacgtgtggagattttaacaaaaattatgtagcctgaggattttaatagacctgataaccagtttgagcatattcttttgctgttatttacctaagatcagccagttgttatggaatcctgttcattaaataggaagcttatatttttattactgtttttggggaaggttttagagtgaaattcattaacctctaaggtgtttttacatagtactacttggaaaataaagtcattgggcaaatataaacaactgatttattttatttcattttttgaagtgtggcagaccttaagcatgccattcaaagcaaatacaagattgctattcaacaccaggtgctggtggtcaatggaggagaatgcatggctgcagatcgaagagtgtgtacctacag

SEQ ID NO: 543 - DNA, 456 bp, Homo sapiens
ctccttttttaaaaaatataggatacaaatccaatttttctttttaacaaagaaatgatcttatgtgatcgtccacctgctattcctaaaactaccttttcgacagaaaatgacatggaaataaaagttgaagaatctcttatgatgcctgcagtttttcatactgttgcttcaaggacacagcttgcattggtaagatataaacaattattttaactgattgtttctaaaagcattcggatctaaatagcacagtagtctaaattgcataggaagtatgcaaaaagtttgacaaataaactttaaaaatattttccggttaatatatctagttttaaaatttctgggtcatacattgctggttattctactttgataatgacagtattttagagtggaaaagctgtcttaacatgatttggtcaccttctttcctagataatatgtaaatagtta

SEQ ID NO: 544 - DNA, 287 bp, Homo sapiens
attcttcaagcttagttgctgaacttcaagaaaagcttcaggaagaaaaagctaagtttctagaacaacttgaagagcaagaaaaaagaaagaatgaagaaatgcaaaatgttcgaacatctttgattgcggaacaacaggtctgtatctcttttcccatttcatttgagaactaaagaaggtagacataaattaacaaatataatttctttatgtagctgagggtttcttatatcttagatgtgatgttccttacattgatcctgttaataaatttcctcttgaca

SEQ ID NO: 545 - DNA, 179 bp, Homo sapiens
tacctaaatggctgtaacgaattggtgtatgtttatgtttaacataagctttcctcttctagtgggctggtgctttagtcaaagatggaaagagattatatgaagcagaaaaatcaaaaagggaatcctttgggaaattatttagtaagtgttcattaataattttaattacttttgta

SEQ ID NO: 546 - DNA, 5956 bp, Homo sapiens
  misc_feature (5753)..(5753): n is a, c, g, or t
  misc_feature (5785)..(5785): n is a, c, g, or t
  misc_feature (5792)..(5792): n is a, c, g, or t
  misc_feature (5846)..(5846): n is a, c, g, or t
  misc_feature (5853)..(5853): n is a, c, g, or t
  misc_feature (5859)..(5860): n is a, c, g, or t
  misc_feature (5864)..(5865): n is a, c, g, or t
  misc_feature (5868)..(5868): n is a, c, g, or t
  misc_feature (5878)..(5878): n is a, c, g, or t
  misc_feature (5882)..(5882): n is a, c, g, or t
  misc_feature (5888)..(5888): n is a, c, g, or t
  misc_feature (5956)..(5956): n is a, c, g, or t
cgacaataacaaaccaagccgcggcggtgtccgcggccctgccgagccctcggcgttgcctcagaatcccccagtcgcctgggcccctcggctctgacaggccgcggccttctgtcccccggccccagacccagagccgaggggcctgctcgcgtccttgtccgcccggacccctccctgcctcctagagttcggggccgcggcgggcgggcgcccgggacgccggcggttgtgtcggcttagcggtgccgaatgggcggttggtaaccgctgccgaggactaggcggcggcggaagatggtgccgggggtcgctggctctgctgctgccgccggcgaaggaggaggcgttgccggttttctgagtttaaccagtaatgccattcagttgccaatctcaagcaaagcaaacataagccagttttaatctactttttaagaaaagtggtagtccttttcacagtgcctgacgacctgtacacttgctactgttacacaaagtgatggaactattaaggaggatttcttgctcagtgtagaggtgaaaagcagttcaacaggcagctgatggaagtgatggaactattatggaggatttctagctcagtgtagaggtgaaacacagatgatggaaggaattgggattcatttcccctaatttgcaagtaacggctactcttaatttgcgattataactgtatcagagggtgaggtataagctcacagaattcagataaatcatcatgaagttatatgtatttctggttaacactggaactactctaacatttgacactgaacttacagtgcaaactgtggcagaccttaagcatgccattcaaagcaaatacaagattgctattcaacaccaggtgctggtggtcaatggaggagaatgcatggctgcagatcgaagagtgtgtacctacagtgctgggacggatacaaatccaatttttctttttaacaaagaaatgatcttatgtgatcgtccacctgctattcctaaaactaccttttcgacagaaaatgacatggaaataaaagttgaagaatctcttatgatgcctgcagtttttcatactgttgcttcaaggacacagcttgcattggaaatgtatgaagttgccaagaaactttgttctttttgtgaaggtcttgtacatgatgaacatcttcaacaccaaggctgggctgcaatcatggccaacctggaggactgttcaaattcataccaaaagctacttttcaagtttgaaagtatttattcaaattatctgcagtccatagaagacatcaagttaaaacttactcatttaggaactgcagtttcagtaatggccaagattccactgttggagtgcctaaccagacatagttacagagaatgtttgggaagactggattctttacctgaacatgaagactcagaaaaagctgagacgaaaagatccactgaactggtgctctctcctgatatgcctagaacaactaacgaatctttgttaacctcatttcccaagtcagtggaacatgtgtccccagataccgcagatgctgaaagtggcaaagaaattagggaatcttgtcaaagtactgttcatcagcaagatgaaactacgattgacactaaagatggtgatctgcccttttttaatgtctctttgttagactggataaatgttcaagatagacctaatgatgtggaatctttggtcaggaagtgctttgattctatgagcaggcttgatccaaggattattcgaccatttatagcagaatgccgtcaaactattgccaaacttgataatcagaatatgaaagccattaaaggacttgaagatcggctctacgccctggaccagatgattgctagctgtggccgactggtgaatgaacagaaagagcttgctcagggatttttagctaatcagaagagagctgaaaacttaaaggatgcatctgtattacctgatttatgcctgagtcacgcaaatcagttgatgattatgttgcaaaatcatagaaaactgttagatattaagcagaagtgtaccactgccaaacaagaactagcaaataacctacatgtcagactgaagtggtgttgctttgtaatgcttcatgctgatcaagatggagagaagttacaagctttgctccgcctcgtaatagagctgttagaaagagtcaaaattgttgaagctcttagtacagttcctcagatgtactgcttagctgttgttgaggttgtaagaagaaaaatgttcataaaacactacagggagtgggctggtgctttagtcaaagatggaaagagattatatgaagcagaaaaatcaaaaagggaatcctttgggaaattatttaggaagtcttttttaagaaatcgtctgtttaggggactggactcctggcccccttccttttgtactcaaaagcctcgaaagtttgactgtgaacttccagatatttcattaaaagatttacagtttctgcaatcattttgtccttcggaagttcagccattcctcagggttcccttactttgtgactttgaacctctacaccagcatgtacttgctctacataatttggtaaaagcagcacaaagtttggatgaaatgtcacagaccattacagatctactgagtgaacaaaaggcatctgtgagtcagacatccccacagtctgcttcttcaccaaggatggaaagtacagcaggaattacaactactacctcaccgagaactcctccaccactgactgttcaggatcccttatgtcctgcagtttgtcccttagaagaattatctccagatagtattgatgcacatacgtttgattttgaaactattccccatccaaacatagaacagactattcaccaagtttctttagacttggattcattagcagaaagtcctgaatcagattttatgtctgctgtgaatgagtttgtaatagaagaaaatttgtcgtctcctaatcctataagtgatccacaaagcccagaaatgatggtggaatcactttattcatcagttatcaatgcgatagacagtagacgaatgcaggatacaaatgtatgtggtaaggaggattttggagatcatacttctctgaatgtccagttggaaagatgtagagttgttgcccaagactctcacttcagtatacaaaccattaaggaagacctttgccactttagaacatttgtacaaaaagaacagtgtgacttctcaaattcattaaaatgtacagcagtagaaataagaaacattattgaaaaagtaaaatgttctctggaaataacactaaaagaaaaacatcaaaaagaactactgtctttaaaaaatgaatatgaaggtaaacttgacggactaataaaggaaactgaagagaatgaaaacaaaattaaaaaattgaagggagagttagtatgccttgaggaggttttacaaaataaagataatgaatttgctttggttaaacatgaaaaagaagctgtaatctgcctgcagaatgaaaaggatcagaagttgttagagatggaaaatataatgcactctcaaaattgtgaaattaaagaactgaagcagtcacgagaaatagtgttagaagacttaaaaaagctccatgttgaaaatgatgagaagttacagttattgagggcagaacttcagtccttggagcaaagtcatctaaaggaattagaggacacacttcaggttaggcacatacaagagtttgagaaggttatgacagaccacagagtttctttggaggaattaaaaaaggaaaaccaacaaataattaatcaaatacaagaatctcatgctgaaattatccaggaaaaagaaaaacagttacaggaattaaaactcaaggtttctgatttgtcagacacgagatgcaagttagaggttgaacttgcgttgaaggaagcagaaactgatgaaataaaaattttgctggaagaaagcagagcccagcagaaggagaccttgaaatctcttcttgaacaagagacagaaaatttgagaacagaaattagtaaactcaaccaaaagattcaggataataatgaaaattatcaggtgggcttagcagagctaagaactttaatgacaattgaaaaagatcagtgtatttccgagttaattagtagacatgaagaagaatctaatatacttaaagctgaattaaacaaagtaacatctttgcataaccaagcatttgaaatagaaaaaaacctaaaagaacaaataattgaactgcagagtaaattggattcagaattgagtgctcttgaaagacaaaaagatgaaaaaattacccaacaagaagagaaatacgaagctattatccagaaccttgagaaagacagacaaaaattggtcagcagccaggagcaagacagagaacagttaattcagaagcttaattgtgaaaaagatgaagctattcagactgccctaaaagaatttaaattggagagagaagttgttgagaaagagttattagaaaaagttaaacatcttgagaatcaaatagcaaaaagtcctgccattgactctaccagaggagattcttcaagcttagttgctgaacttcaagaaaagcttcaggaagaaaaagctaagtttctagaacaacttgaagagcaagaaaaaagaaagaatgaagaaatgcaaaatgttcgaacatctttgattgcggaacaacagaccaattttaacactgttttaacaagagagaaaatgagaaaagaaaacataataaatgatcttagtgataagttgaaaagtacaatgcagcaacaagaacgggataaagatttgatagagtcactttctgaagatcgagctcgtttgcttgaggaaaagaaaaagcttgaagaagaagtcagtaagttgcgtagtagcagttttgttccttcaccatatgtagctacagccccagaactttatggagcttgtgcacctgaactcccaggtgaatcagatagatccgctgtggaaacagcagatgaaggaagagtggattcagcaatggagacaagcatgatgtctgtacaagaaaatattcatatgttgtctgaagaaaaacagcggataatgctgttagaacgaacattgcaattgaaagaagaagaaaataaacggttaaatcaaagactgatgtctcagagcatgtcttcagtatcttcaaggcattctgaaaagatagctattagagattttcaggtgggagatttggtactcatcatcctagacgaacgccatgacaattatgtgttatttactgttagtcctactttatattttctacattcagagtctctacctgccctggatctcaaaccaaggcttcaggtgcatctagaagaccctgggtacttggaaaagtaatggaaaaagaatactgtcaagccaaaaaggcacaaaacagatttaaagttcctttggggacaaagttttacagagtgaaagccgtatcatggaataagaaagtataacttatggacaaaattaatacattctatgacatttttttctgatttgtcctgcagtgctcattcatcactccaaaaacagcaggccatctttttatgcaaaagtcagcgtgacaatatacttcactggtgtacatcgtttactttttaactggcttcattttaggaataataaattcatcagaatccttggctgaattaaaatggtttttgttttttggttttttttttacccnaacactttagaaatggcgcccaaccttctttnttttttnaaaggcctaccttggccatgggggttttgatagccttttaatggccggtaaatnaccctanctgganntaanngtnaatgtatttntccngcttgncctttgggaaaaagttcagaatcttgcccttctaaccatttttataaaggtaatttttcaacttttan

SEQ ID NO: 547 - DNA, 6711 bp, Homo sapiens
cgacaataacaaaccaagccgcggcggtgtccgcggccctgccgagccctcggcgttgcctcagaatcccccagtcgcctgggcccctcggctctgacaggccgcggccttctgtcccccggccccagacccagagccgaggggcctgctcgcgtccttgtccgcccggacccctccctgcctcctagagttcggggccgcggcgggcgggcgcccgggacgccggcggttgtgtcggcttagcggtgccgaatgggcggttggtaaccgctgccgaggactaggcggcggcggaagatggtgccgggggtcgctggctctgctgctgccgccggcgaaggaggaggcgttgccggttttctgagtttaaccagtaatgccattcagttgccaatctcaagcaaagcaaacataagccagttttaatctactttttaagaaaagtggtagtccttttcacagtgcctgacgacctgtacacttgctactgttacacaaagtgatggaactattaaggaggatttcttgctcagtgtagaggtgaaaagcagttcaacaggcagctgatggaagtgatggaactattatggaggatttctagctcagtgtagaggtgaaacacagatgatggaaggaattgggattcatttcccctaatttgcaagtaacggctactcttaatttgcgattataactgtatcagagggtgaggtataagctcacagaattcagataaatcatcatgaagttatatgtatttctggttaacactggaactactctaacatttgacactgaacttacagtgcaaactgtggcagaccttaagcatgccattcaaagcaaatacaagattgctattcaacaccaggtgctggtggtcaatggaggagaatgcatggctgcagatcgaagagtgtgtacctacagtgctgggacggatacaaatccaatttttctttttaacaaagaaatgatcttatgtgatcgtccacctgctattcctaaaactaccttttcgacagaaaatgacatggaaataaaagttgaagaatctcttatgatgcctgcagtttttcatactgttgcttcaaggacacagcttgcattggaaatgtatgaagttgccaagaaactttgttctttttgtgaaggtcttgtacatgatgaacatcttcaacaccaaggctgggctgcaatcatggccaacctggaggactgttcaaattcataccaaaagctacttttcaagtttgaaagtatttattcaaattatctgcagtccatagaagacatcaagttaaaacttactcatttaggaactgcagtttcagtaatggccaagattccactgttggagtgcctaaccagacatagttacagagaatgtttgggaagactggattctttacctgaacatgaagactcagaaaaagctgagacgaaaagatccactgaactggtgctctctcctgatatgcctagaacaactaacgaatctttgttaacctcatttcccaagtcagtggaacatgtgtccccagataccgcagatgctgaaagtggcaaagaaattagggaatcttgtcaaagtactgttcatcagcaagatgaaactacgattgacactaaagatggtgatctgcccttttttaatgtctctttgttagactggataaatgttcaagatagacctaatgatgtggaatctttggtcaggaagtgctttgattctatgagcaggcttgatccaaggattattcgaccatttatagcagaatgccgtcaaactattgccaaacttgataatcagaatatgaaagccattaaaggacttgaagatcggctctacgccctggaccagatgattgctagctgtggccgactggtgaatgaacagaaagagcttgctcagggatttttagctaatcagaagagagctgaaaacttaaaggatgcatctgtattacctgatttatgcctgagtcacgcaaatcagttgatgattatgttgcaaaatcatagaaaactgttagatattaagcagaagtgtaccactgccaaacaagaactagcaaataacctacatgtcagactgaagtggtgttgctttgtaatgcttcatgctgatcaagatggagagaagttacaagctttgctccgcctcgtaatagagctgttagaaagagtcaaaattgttgaagctcttagtacagttcctcagatgtactgcttagctgttgttgaggttgtaagaagaaaaatgttcataaaacactacagggagtgggctggtgctttagtcaaagatggaaagagattatatgaagcagaaaaatcaaaaagggaatcctttgggaaattatttaggaagtcttttttaagaaatcgtctgtttaggggactggactcctggcccccttccttttgtactcaaaagcctcgaaagtttgactgtgaacttccagatatttcattaaaagatttacagtttctgcaatcattttgtccttcggaagttcagccattcctcagggttcccttactttgtgactttgaacctctacaccagcatgtacttgctctacataatttggtaaaagcagcacaaagtttggatgaaatgtcacagaccattacagatctactgagtgaacaaaaggcatctgtgagtcagacatccccacagtctgcttcttcaccaaggatggaaagtacagcaggaattacaactactacctcaccgagaactcctccaccactgactgttcaggatcccttatgtcctgcagtttgtcccttagaagaattatctccagatagtattgatgcacatacgtttgattttgaaactattccccatccaaacatagaacagactattcaccaagtttctttagacttggattcattagcagaaagtcctgaatcagattttatgtctgctgtgaatgagtttgtaatagaagaaaatttgtcgtctcctaatcctataagtgatccacaaagcccagaaatgatggtggaatcactttattcatcagttatcaatgcgatagacagtagacgaatgcaggatacaaatgtatgtggtaaggaggattttggagatcatacttctctgaatgtccagttggaaagatgtagagttgttgcccaagactctcacttcagtatacaaaccattaaggaagacctttgccactttagaacatttgtacaaaaagaacagtgtgacttctcaaattcattaaaatgtacagcagtagaaataagaaacattattgaaaaagtaaaatgttctctggaaataacactaaaagaaaaacatcaaaaagaactactgtctttaaaaaatgaatatgaaggtaaacttgacggactaataaaggaaactgaagagaatgaaaacaaaattaaaaaattgaagggagagttagtatgccttgaggaggttttacaaaataaagataatgaatttgctttggttaaacatgaaaaagaagctgtaatctgcctgcagaatgaaaaggatcagaagttgttagagatggaaaatataatgcactctcaaaattgtgaaattaaagaactgaagcagtcacgagaaatagtgttagaagacttaaaaaagctccatgttgaaaatgatgagaagttacagttattgagggcagaacttcagtccttggagcaaagtcatctaaaggaattagaggacacacttcaggttaggcacatacaagagtttgagaaggttatgacagaccacagagtttctttggaggaattaaaaaaggaaaaccaacaaataattaatcaaatacaagaatctcatgctgaaattatccaggaaaaagaaaaacagttacaggaattaaaactcaaggtttctgatttgtcagacacgagatgcaagttagaggttgaacttgcgttgaaggaagcagaaactgatgaaataaaaattttgctggaagaaagcagagcccagcagaaggagaccttgaaatctcttcttgaacaagagacagaaaatttgagaacagaaattagtaaactcaaccaaaagattcaggataataatgaaaattatcaggtgggcttagcagagctaagaactttaatgacaattgaaaaagatcagtgtatttccgagttaattagtagacatgaagaagaatctaatatacttaaagctgaattaaacaaagtaacatctttgcataaccaagcatttgaaatagaaaaaaacctaaaagaacaaataattgaactgcagagtaaattggattcagaattgagtgctcttgaaagacaaaaagatgaaaaaattacccaacaagaagagaaatacgaagctattatccagaaccttgagaaagacagacaaaaattggtcagcagccaggagcaagacagagaacagttaattcagaagcttaattgtgaaaaagatgaagctattcagactgccctaaaagaatttaaattggagagagaagttgttgagaaagagttattagaaaaagttaaacatcttgagaatcaaatagcaaaaagtcctgccattgactctaccagaggagattcttcaagcttagttgctgaacttcaagaaaagcttcaggaagaaaaagctaagtttctagaacaacttgaagagcaagaaaaaagaaagaatgaagaaatgcaaaatgttcgaacatctttgattgcggaacaacagaccaattttaacactgttttaacaagagagaaaatgagaaaagaaaacataataaatgatcttagtgataagttgaaaagtacaatgcagcaacaagaacgggataaagatttgatagagtcactttctgaagatcgagctcgtttgcttgaggaaaagaaaaagcttgaagaagaagtcagtaagttgcgtagtagcagttttgttccttcaccatatgtagctacagccccagaactttatggagcttgtgcacctgaactcccaggtgaatcagatagatccgctgtggaaacagcagatgaaggaagagtggattcagcaatggagacaagcatgatgtctgtacaagaaaatattcatatgttgtctgaagaaaaacagcggataatgctgttagaacgaacattgcaattgaaagaagaagaaaataaacggttaaatcaaagactgatgtctcagagcatgtcttcagtatcttcaaggcattctgaaaagatagctattagagattttcaggtgggagatttggtactcatcatcctagacgaacgccatgacaattatgtgttatttactgttagtcctactttatattttctacattcagagtctctacctgccctggatctcaaaccaaggcttcaggtgcatctagaagaccctgggtacttggaaaagtaatggaaaaagaatactgtcaagccaaaaagtgctcattcatcactccaaaaacagcaggccatctttttatgcaaaagtcagcgtgacaatatacttcactggtgtacatcgtttactttttaactggcttcattttaggaataataaattcatcagaatccttggctgaattaaaatggtttttgttttttggtttttttttttacccagacaactctagaaatgcggaccaaactacttcattttctcaaagggcataccttgtgcattgtggcttatgatgagccatattaattgcctgttaaatatacactagcttgaacttagatgttaaatgttattattaccagcatttgtccttttgtgaaatcagtatcagaatacttgcactctttaacacattctttataaaatgtataaattattcagaactatttaaaataaagaggagtgttattgcatgctgataatcattttgagtttgcctcagtagatactaaagcaaattgtttcagtttttttaaatgccctttgatgtttcaaaaaaaaaaaggaactgtaatttgattgactgattttaagatcagccataagtaatcagcaatcttcaaaagcactttcagtggattggtcatctgggttctaaagggaagagtctgtgctactaaccatttcaaatgcagactcaaaccttcccaacatctttatgactctagaataatcatattgatgaaatcgtaattcatggttgagtttcagaacaaaagatattcattgcacattaaccatttagaggtcatttaaataacaaaatattgtattgtaaaagaactgtacaattttaaaacaataaagatttgaacctgtaaatgtgtgtgccttttaaagaaggatacatttttaatatatttgagtgattgctgggaagtgtgaaaatattgttatgtatcatatcaaagagaaacatgtttattacaaaaatgttctttaactatatactatgtaacagggtaaacagtgttatgtagaatagaattgtgtaaactagatctttagagaagttgccattgagcaaagttatttaaatgagttagttgagttggatgagaattgtttgaggtttgttgctagagaacaataataaaataattctttttcagaaaatatttaatttcttcataaaaataagttaaatatttttttaaatatgtatatctaatagtacaaaatggaataaacatcatagtgtatagaaaactgaatttgacaagttaatgaataaatgaacaaatgatttc

SEQ ID NO: 548 - DNA, 6822 bp, Homo sapiens
cgacaataacaaaccaagccgcggcggtgtccgcggccctgccgagccctcggcgttgcctcagaatcccccagtcgcctgggcccctcggctctgacaggccgcggccttctgtcccccggccccagacccagagccgaggggcctgctcgcgtccttgtccgcccggacccctccctgcctcctagagttcggggccgcggcgggcgggcgcccgggacgccggcggttgtgtcggcttagcggtgccgaatgggcggttggtaaccgctgccgaggactaggcggcggcggaagatggtgccgggggtcgctggctctgctgctgccgccggcgaaggaggaggcgttgccggttttctgagtttaaccagtaatgccattcagttgccaatctcaagcaaagcaaacataagccagttttaatctactttttaagaaaagtggtagtccttttcacagtgcctgacgacctgtacacttgctactgttacacaaagtgatggaactattaaggaggatttcttgctcagtgtagaggtgaaaagcagttcaacaggcagctgatggaagtgatggaactattatggaggatttctagctcagtgtagaggtgaaacacagatgatggaaggaattgggattcatttcccctaatttgcaagtaacggctactcttaatttgcgattataactgtatcagagggtgaggtataagctcacagaattcagataaatcatcatgaagttatatgtatttctggttaacactggaactactctaacatttgacactgaacttacagtgcaaactgtggcagaccttaagcatgccattcaaagcaaatacaagattgctattcaacaccaggtgctggtggtcaatggaggagaatgcatggctgcagatcgaagagtgtgtacctacagtgctgggacggatacaaatccaatttttctttttaacaaagaaatgatcttatgtgatcgtccacctgctattcctaaaactaccttttcgacagaaaatgacatggaaataaaagttgaagaatctcttatgatgcctgcagtttttcatactgttgcttcaaggacacagcttgcattggaaatgtatgaagttgccaagaaactttgttctttttgtgaaggtcttgtacatgatgaacatcttcaacaccaaggctgggctgcaatcatggccaacctggaggactgttcaaattcataccaaaagctacttttcaagtttgaaagtatttattcaaattatctgcagtccatagaagacatcaagttaaaacttactcatttaggaactgcagtttcagtaatggccaagattccactgttggagtgcctaaccagacatagttacagagaatgtttgggaagactggattctttacctgaacatgaagactcagaaaaagctgagacgaaaagatccactgaactggtgctctctcctgatatgcctagaacaactaacgaatctttgttaacctcatttcccaagtcagtggaacatgtgtccccagataccgcagatgctgaaagtggcaaagaaattagggaatcttgtcaaagtactgttcatcagcaagatgaaactacgattgacactaaagatggtgatctgcccttttttaatgtctctttgttagactggataaatgttcaagatagacctaatgatgtggaatctttggtcaggaagtgctttgattctatgagcaggcttgatccaaggattattcgaccatttatagcagaatgccgtcaaactattgccaaacttgataatcagaatatgaaagccattaaaggacttgaagatcggctctacgccctggaccagatgattgctagctgtggccgactggtgaatgaacagaaagagcttgctcagggatttttagctaatcagaagagagctgaaaacttaaaggatgcatctgtattacctgatttatgcctgagtcacgcaaatcagttgatgattatgttgcaaaatcatagaaaactgttagatattaagcagaagtgtaccactgccaaacaagaactagcaaataacctacatgtcagactgaagtggtgttgctttgtaatgcttcatgctgatcaagatggagagaagttacaagctttgctccgcctcgtaatagagctgttagaaagagtcaaaattgttgaagctcttagtacagttcctcagatgtactgcttagctgttgttgaggttgtaagaagaaaaatgttcataaaacactacagggagtgggctggtgctttagtcaaagatggaaagagattatatgaagcagaaaaatcaaaaagggaatcctttgggaaattatttaggaagtcttttttaagaaatcgtctgtttaggggactggactcctggcccccttccttttgtactcaaaagcctcgaaagtttgactgtgaacttccagatatttcattaaaagatttacagtttctgcaatcattttgtccttcggaagttcagccattcctcagggttcccttactttgtgactttgaacctctacaccagcatgtacttgctctacataatttggtaaaagcagcacaaagtttggatgaaatgtcacagaccattacagatctactgagtgaacaaaaggcatctgtgagtcagacatccccacagtctgcttcttcaccaaggatggaaagtacagcaggaattacaactactacctcaccgagaactcctccaccactgactgttcaggatcccttatgtcctgcagtttgtcccttagaagaattatctccagatagtattgatgcacatacgtttgattttgaaactattccccatccaaacatagaacagactattcaccaagtttctttagacttggattcattagcagaaagtcctgaatcagattttatgtctgctgtgaatgagtttgtaatagaagaaaatttgtcgtctcctaatcctataagtgatccacaaagcccagaaatgatggtggaatcactttattcatcagttatcaatgcgatagacagtagacgaatgcaggatacaaatgtatgtggtaaggaggattttggagatcatacttctctgaatgtccagttggaaagatgtagagttgttgcccaagactctcacttcagtatacaaaccattaaggaagacctttgccactttagaacatttgtacaaaaagaacagtgtgacttctcaaattcattaaaatgtacagcagtagaaataagaaacattattgaaaaagtaaaatgttctctggaaataacactaaaagaaaaacatcaaaaagaactactgtctttaaaaaatgaatatgaaggtaaacttgacggactaataaaggaaactgaagagaatgaaaacaaaattaaaaaattgaagggagagttagtatgccttgaggaggttttacaaaataaagataatgaatttgctttggttaaacatgaaaaagaagctgtaatctgcctgcagaatgaaaaggatcagaagttgttagagatggaaaatataatgcactctcaaaattgtgaaattaaagaactgaagcagtcacgagaaatagtgttagaagacttaaaaaagctccatgttgaaaatgatgagaagttacagttattgagggcagaacttcagtccttggagcaaagtcatctaaaggaattagaggacacacttcaggttaggcacatacaagagtttgagaaggttatgacagaccacagagtttctttggaggaattaaaaaaggaaaaccaacaaataattaatcaaatacaagaatctcatgctgaaattatccaggaaaaagaaaaacagttacaggaattaaaactcaaggtttctgatttgtcagacacgagatgcaagttagaggttgaacttgcgttgaaggaagcagaaactgatgaaataaaaattttgctggaagaaagcagagcccagcagaaggagaccttgaaatctcttcttgaacaagagacagaaaatttgagaacagaaattagtaaactcaaccaaaagattcaggataataatgaaaattatcaggtgggcttagcagagctaagaactttaatgacaattgaaaaagatcagtgtatttccgagttaattagtagacatgaagaagaatctaatatacttaaagctgaattaaacaaagtaacatctttgcataaccaagcatttgaaatagaaaaaaacctaaaagaacaaataattgaactgcagagtaaattggattcagaattgagtgctcttgaaagacaaaaagatgaaaaaattacccaacaagaagagaaatacgaagctattatccagaaccttgagaaagacagacaaaaattggtcagcagccaggagcaagacagagaacagttaattcagaagcttaattgtgaaaaagatgaagctattcagactgccctaaaagaatttaaattggagagagaagttgttgagaaagagttattagaaaaagttaaacatcttgagaatcaaatagcaaaaagaggagattcttcaagcttagttgctgaacttcaagaaaagcttcaggaagaaaaagctaagtttctagaacaacttgaagagcaagaaaaaagaaagaatgaagaaatgcaaaatgttcgaacatctttgattgcggaacaacagaccaattttaacactgttttaacaagagagaaaatgagaaaagaaaacataataaatgatcttagtgataagttgaaaagtacaatgcagcaacaagaacgggataaagatttgatagagtcactttctgaagatcgagctcgtttgcttgaggaaaagaaaaagcttgaagaagaagtcagtaagttgcgtagtagcagttttgttccttcaccatatgtagctacagccccagaactttatggagcttgtgcacctgaactcccaggtgaatcagatagatccgctgtggaaacagcagatgaaggaagagtggattcagcaatggagacaagcatgatgtctgtacaagaaaatattcatatgttgtctgaagaaaaacagcggataatgctgttagaacgaacattgcaattgaaagaagaagaaaataaacggttaaatcaaagactgatgtctcagagcatgtcttcagtatcttcaaggcattctgaaaagatagctattagagattttcaggtgggagatttggtactcatcatcctagacgaacgccatgacaattatgtgttatttactgttagtcctactttatattttctacattcagagtctctacctgccctggatctcaaaccaaggcttcaggtgcatctagaagaccctgggtacttggaaaagtaatggaaaaagaatactgtcaagccaaaaaggcacaaaacagatttaaagttcctttggggacaaagttttacagagtgaaagccgtatcatggaataagaaagtataacttatggacaaaattaatacattctatgacatttttttctgatttgtcctgcagtgctcattcatcactccaaaaacagcaggccatctttttatgcaaaagtcagcgtgacaatatacttcactggtgtacatcgtttactttttaactggcttcattttaggaataataaattcatcagaatccttggctgaattaaaatggtttttgttttttggtttttttttttacccagacaactctagaaatgcggaccaaactacttcattttctcaaagggcataccttgtgcattgtggcttatgatgagccatattaattgcctgttaaatatacactagcttgaacttagatgttaaatgttattattaccagcatttgtccttttgtgaaatcagtatcagaatacttgcactctttaacacattctttataaaatgtataaattattcagaactatttaaaataaagaggagtgttattgcatgctgataatcattttgagtttgcctcagtagatactaaagcaaattgtttcagtttttttaaatgccctttgatgtttcaaaaaaaaaaaggaactgtaatttgattgactgattttaagatcagccataagtaatcagcaatcttcaaaagcactttcagtggattggtcatctgggttctaaagggaagagtctgtgctactaaccatttcaaatgcagactcaaaccttcccaacatctttatgactctagaataatcatattgatgaaatcgtaattcatggttgagtttcagaacaaaagatattcattgcacattaaccatttagaggtcatttaaataacaaaatattgtattgtaaaagaactgtacaattttaaaacaataaagatttgaacctgtaaatgtgtgtgccttttaaagaaggatacatttttaatatatttgagtgattgctgggaagtgtgaaaatattgttatgtatcatatcaaagagaaacatgtttattacaaaaatgttctttaactatatactatgtaacagggtaaacagtgttatgtagaatagaattgtgtaaactagatctttagagaagttgccattgagcaaagttatttaaatgagttagttgagttggatgagaattgtttgaggtttgttgctagagaacaataataaaataattctttttcagaaaatatttaatttcttcataaaaataagttaaatatttttttaaatatgtatatctaatagtacaaaatggaataaacatcatagtgtatagaaaactgaatttgacaagttaatgaataaatgaacaaatgatttc

SEQ ID NO: 549 - DNA, 4685 bp, Homo sapiens
cgacaataacaaaccaagccgcggcggtgtccgcggccctgccgagccctcggcgttgcctcagaatcccccagtcgcctgggcccctcggctctgacaggccgcggccttctgtcccccggccccagacccagagccgaggggcctgctcgcgtccttgtccgcccggacccctccctgcctcctagagttcggggccgcggcgggcgggcgcccgggacgccggcggttgtgtcggcttagcggtgccgaatgggcggttggtaaccgctgccgaggactaggcggcggcggaagatggtgccgggggtcgctggctctgctgctgccgccggcgaaggaggaggcgttgccggttttctgagtttaaccagtaatgccattcagttgccaatctcaagcaaagcaaacataagccagttttaatctactttttaagaaaagtggtagtccttttcacagtgcctgacgacctgtacacttgctactgttacacaaagtgatggaactattaaggaggatttcttgctcagtgtagaggtgaaaagcagttcaacaggcagctgatggaagtgatggaactattatggaggatttctagctcagtgtagaggtgaaacacagatgatggaaggaattgggattcatttcccctaatttgcaagtaacggctactcttaatttgcgattataactgtatcagagggtgaggtataagctcacagaattcagataaatcatcatgaagttatatgtatttctggttaacactggaactactctaacatttgacactgaacttacagtgcaaactgtggcagaccttaagcatgccattcaaagcaaatacaagattgctattcaacaccaggtgctggtggtcaatggaggagaatgcatggctgcagatcgaagagtgtgtacctacagtgctgggacggatacaaatccaatttttctttttaacaaagaaatgatcttatgtgatcgtccacctgctattcctaaaactaccttttcgacagaaaatgacatggaaataaaagttgaagaatctcttatgatgcctgcagtttttcatactgttgcttcaaggacacagcttgcattggaaatgtatgaagttgccaagaaactttgttctttttgtgaaggtcttgtacatgatgaacatcttcaacaccaaggctgggctgcaatcatggccaacctggaggactgttcaaattcataccaaaagctacttttcaagtttgaaagtatttattcaaattatctgcagtccatagaagacatcaagttaaaacttactcatttaggaactgcagtttcagtaatggccaagattccactgttggagtgcctaaccagacatagttacagagaatgtttgggaagactggattctttacctgaacatgaagactcagaaaaagctgagacgaaaagatccactgaactggtgctctctcctgatatgcctagaacaactaacgaatctttgttaacctcatttcccaagtcagtggaacatgtgtccccagataccgcagatgctgaaagtggcaaagaaattagggaatcttgtcaaagtactgttcatcagcaagatgaaactacgattgacactaaagatggtgatctgcccttttttaatgtctctttgttagactggataaatgttcaagatagacctaatgatgtggaatctttggtcaggaagtgctttgattctatgagcaggcttgatccaaggattattcgaccatttatagcagaatgccgtcaaactattgccaaacttgataatcagaatatgaaagccattaaaggacttgaagatcggctctacgccctggaccagatgattgctagctgtggccgactggtgaatgaacagaaagagcttgctcagggatttttagctaatcagaagagagctgaaaacttaaaggatgcatctgtattacctgatttatgcctgagtcacgcaaatcagttgatgattatgttgcaaaatcatagaaaactgttagatattaagcagaagtgtaccactgccaaacaagaactagcaaataacctacatgtcagactgaagtggtgttgctttgtaatgcttcatgctgatcaagatggagagaagttacaagctttgctccgcctcgtaatagagctgttagaaagagtcaaaattgttgaagctcttagtacagttcctcagatgtactgcttagctgttgttgaggttgtaagaagaaaaatgttcataaaacactacagggagtgggctggtgctttagtcaaagatggaaagagattatatgaagcagaaaaatcaaaaagggaatcctttgggaaattatttaggaagtcttttttaagaaatcgtctgtttaggggactggactcctggcccccttccttttgtactcaaaagcctcgaaagtttgactgtgaacttccagatatttcattaaaagatttacagtttctgcaatcattttgtccttcggaagttcagccattcctcagggttcccttactttgtgactttgaacctctacaccagcatgtacttgctctacataatttggtaaaagcagcacaaagtttggatgaaatgtcacagaccattacagatctactgagtgaacaaaaggcatctgtgagtcagacatccccacagtctgcttcttcaccaaggatggaaagtacagcaggaattacaactactacctcaccgagaactcctccaccactgactgttcaggatcccttatgtcctgcagtttgtcccttagaagaattatctccagatagtattgatgcacatacgtttgattttgaaactattccccatccaaacatagaacagactattcaccaagtttctttagacttggattcattagcagaaagtcctgaatcagattttatgtctgctgtgaatgagtttgtaatagaagaaaatttgtcgtctcctaatcctataagtgatccacaaagcccagaaatgatggtggaatcactttattcatcagttatcaatgcgatagacagtagacgaatgcaggatacaaatgtatgtggtaaggaggattttggagatcatacttctctgaatgtccagttggaaagatgtagagttgttgcccaagactctcacttcagtatacaaaccattaaggaagacctttgccactttagaacatttgtacaaaaagaacagtgtgacttctcaaattcattaaaatgtacagcagtagaaataagaaacattattgaaaaagtaaaatgttctctggaaataacactaaaagaaaaacatcaaaaagaactactgtctttaaaaaatgaatatgaaggtaaacttgacggactaataaaggaaactgaagagaatgaaaacaaaattaaaaaattgaagggagagttagtatgccttgaggaggttttacaaaataaagataatgaatttgctttggttaaacatgaaaaagaagctgtaatctgcctgcagaatgaaaaggatcagaagttgttagagatggaaaatataatgcactctcaaaattgtgaaattaaagaactgaagcagtcacgagaaatagtgttagaagacttaaaaaagctccatgttgaaaatgatgagaagttacagttattgagggcagaacttcagtccttggagcaaagtcatctaaaggaattagaggacacacttcaggttaggcacatacaagagtttgagaaggttatgacagaccacagagtttctttggaggaattaaaaaaggaaaaccaacaaataattaatcaaatacaagaatctcatgctgaaattatccaggaaaaagaaaaacagttacaggaattaaaactcaaggtttctgatttgtcagacacgagatgcaagttagaggttgaacttgcgttgaaggaagcagaaactgatgaaataaaaattttgctggaagaaagcagagcccagcagaaggagaccttgaaatctcttcttgaacaagagacagaaaatttgagaacagaaattagtaaactcaaccaaaagattcaggataataatgaaaattatcaggtgggcttagcagagctaagaactttaatgacaattgaaaaagatcagtgtatttccgagttaattagtagacatgaagaagaatctaatatacttaaagctgaattaaacaaagtaacatctttgcataaccaagcatttgaaatagaaaaaaacctaaaagaacaaataattgaactgcagagtaaattggattcagaattgagtgctcttgaaagacaaaaagatgaaaaaattacccaacaagaagagaaatacgaagctattatccagaaccttgagaaagacagacaaaaattggtcagcagccaggagcaagacagagaacagttaattcagaagcttaattgtgaaaaagatgaagctattcagactgccctaaaagaatttaaattggagagagaagttgttgagaaagagttattagaaaaagttaaacatcttgagaatcaaatagcaaaaagtcctgccattgactctaccagaggagattcttcaagcttagttgctgaacttcaagaaaagcttcaggaagaaaaagctaagtttctagacatctgtagacactcggggtcctctagagtca

SEQ ID NO: 550 - DNA, 4539 bp, Homo sapiens
cgacaataacaaaccaagccgcggcggtgtccgcggccctgccgagccctcggcgttgcctcagaatcccccagtcgcctgggcccctcggctctgacaggccgcggccttctgtcccccggccccagacccagagccgaggggcctgctcgcgtccttgtccgcccggacccctccctgcctcctagagttcggggccgcggcgggcgggcgcccgggacgccggcggttgtgtcggcttagcggtgccgaatgggcggttggtaaccgctgccgaggactaggcggcggcggaagatggtgccgggggtcgctggctctgctgctgccgccggcgaaggaggaggcgttgccggttttctgagtttaaccagtaatgccattcagttgccaatctcaagcaaagcaaacataagccagttttaatctactttttaagaaaagtggtagtccttttcacagtgcctgacgacctgtacacttgctactgttacacaaagtgatggaactattaaggaggatttcttgctcagtgtagaggtgaaaagcagttcaacaggcagctgatggaagtgatggaactattatggaggatttctagctcagtgtagaggtgaaacacagatgatggaaggaattgggattcatttcccctaatttgcaagtaacggctactcttaatttgcgattataactgtatcagagggtgaggtataagctcacagaattcagataaatcatcatgaagttatatgtatttctggttaacactggaactactctaacatttgacactgaacttacagtgcaaactgtggcagaccttaagcatgccattcaaagcaaatacaagattgctattcaacaccaggtgctggtggtcaatggaggagaatgcatggctgcagatcgaagagtgtgtacctacagtgctgggacggatacaaatccaatttttctttttaacaaagaaatgatcttatgtgatcgtccacctgctattcctaaaactaccttttcgacagaaaatgacatggaaataaaagttgaagaatctcttatgatgcctgcagtttttcatactgttgcttcaaggacacagcttgcattggaaatgtatgaagttgccaagaaactttgttctttttgtgaaggtcttgtacatgatgaacatcttcaacaccaaggctgggctgcaatcatggccaacctggaggactgttcaaattcataccaaaagctacttttcaagtttgaaagtatttattcaaattatctgcagtccatagaagacatcaagttaaaacttactcatttaggaactgcagtttcagtaatggccaagattccactgttggagtgcctaaccagacatagttacagagaatgtttgggaagactggattctttacctgaacatgaagactcagaaaaagctgagacgaaaagatccactgaactggtgctctctcctgatatgcctagaacaactaacgaatctttgttaacctcatttcccaagtcagtggaacatgtgtccccagataccgcagatgctgaaagtggcaaagaaattagggaatcttgtcaaagtactgttcatcagcaagatgaaactacgattgacactaaagatggtgatctgcccttttttaatgtctctttgttagactggataaatgttcaagatagacctaatgatgtggaatctttggtcaggaagtgctttgattctatgagcaggcttgatccaaggattattcgaccatttatagcagaatgccgtcaaactattgccaaacttgataatcagaatatgaaagccattaaaggacttgaagatcggctctacgccctggaccagatgattgctagctgtggccgactggtgaatgaacagaaagagcttgctcagggatttttagctaatcagaagagagctgaaaacttaaaggatgcatctgtattacctgatttatgcctgagtcacgcaaatcagttgatgattatgttgcaaaatcatagaaaactgttagatattaagcagaagtgtaccactgccaaacaagaactagcaaataacctacatgtcagactgaagtggtgttgctttgtaatgcttcatgctgatcaagatggagagaagttacaagctttgctccgcctcgtaatagagctgttagaaagagtcaaaattgttgaagctcttagtacagttcctcagatgtactgcttagctgttgttgaggttgtaagaagaaaaatgttcataaaacactacagggagtgggctggtgctttagtcaaagatggaaagagattatatgaagcagaaaaatcaaaaagggaatcctttgggaaattatttaggaagtcttttttaagaaatcgtctgtttaggggactggactcctggcccccttccttttgtactcaaaagcctcgaaagtttgactgtgaacttccagatatttcattaaaagatttacagtttctgcaatcattttgtccttcggaagttcagccattcctcagggttcccttactttgtgactttgaacctctacaccagcatgtacttgctctacataatttggtaaaagcagcacaaagtttggatgaaatgtcacagaccattacagatctactgagtgaacaaaaggcatctgtgagtcagacatccccacagtctgcttcttcaccaaggatggaaagtacagcaggaattacaactactacctcaccgagaactcctccaccactgactgttcaggatcccttatgtcctgcagtttgtcccttagaagaattatctccagatagtattgatgcacatacgtttgattttgaaactattccccatccaaacatagaacagactattcaccaagtttctttagacttggattcattagcagaaagtcctgaatcagattttatgtctgctgtgaatgagtttgtaatagaagaaaatttgtcgtctcctaatcctataagtgatccacaaagcccagaaatgatggtggaatcactttattcatcagttatcaatgcgatagacagtagacgaatgcaggatacaaatgtatgtggtaaggaggattttggagatcatacttctctgaatgtccagttggaaagatgtagagttgttgcccaagactctcacttcagtatacaaaccattaaggaagacctttgccactttagaacatttgtacaaaaagaacagtgtgacttctcaaattcattaaaatgtacagcagtagaaataagaaacattattgaaaaagtaaaatgttctctggaaataacactaaaagaaaaacatcaaaaagaactactgtctttaaaaaatgaatatgaaggtaaacttgacggactaataaaggaaactgaagagaatgaaaacaaaattaaaaaattgaagggagagttagtatgccttgaggaggttttacaaaataaagataatgaatttgctttggttaaacatgaaaaagaagctgtaatctgcctgcagaatgaaaaggatcagaagttgttagagatggaaaatataatgcactctcaaaattgtgaaattaaagaactgaagcagtcacgagaaatagtgttagaagacttaaaaaagctccatgttgaaaatgatgagaagttacagttattgagggcagaacttcagtccttggagcaaagtcatctaaaggaattagaggacacacttcaggttaggcacatacaagagtttgagaaggttatgacagaccacagagtttctttggaggaattaaaaaaggaaaaccaacaaataattaatcaaatacaagaatctcatgctgaaattatccaggaaaaagaaaaacagttacaggaattaaaactcaaggtttctgatttgtcagacacgagatgcaagttagaggttgaacttgcgttgaaggaagcagaaactgatgaaataaaaattttgctggaagaaagcagagcccagcagaaggagaccttgaaatctcttcttgaacaagagacagaaaatttgagaacagaaattagtaaactcaaccaaaagattcaggataataatgaaaattatcaggtgggcttagcagagctaagaactttaatgacaattgaaaaagatcagtgtatttccgagttaattagtagacatgaagaagaatctaatatacttaaagctgaattaaacaaagtaacatctttgcataaccaagcatttgaaatagaaaaaaacctaaaagaacaaataattgaactgcagagtaaattggattcagaattgagtgctcttgaaagacaaaaagatgaaaaaattacccaacaagaagagaaatacgaagctattatccagaaccttgagaaagacagacaaaaattggtcagcagccaggagcaagacagagaacagttaattcagaagcttaattgtgaaaaagatgaagctattcagactgccctttggactgaaaaactccaagtcctgggtacctgagctctgaattcagtaactcagtggtc

SEQ ID NO: 551 - DNA, 2432 bp, Homo sapiens
tttactttttagattcaaagagagggttcacacagatatctttcatgctacattattgagcttaaggaagataaatttcccaaatatgatatttggtatatttgtgtgtctgtaattttttttttaatttaatgctgtatttaatttgtaagtcctgccattgactctaccagaggagattcttcaagcttagttgctgaacttcaagaaaagcttcaggaagaaaaagctaagtttctagaacaacttgaagagcaagaaaaaagaaagaatgaagaaatgcaaaatgttcgaacatctttgattgcggaacaacagaccaattttaacactgttttaacaagagagaaaatgagaaaagaaaacataataaatgatcttagtgataagttgaaaagtacaatgcagcaacaagaacgggataaagatttgatagagtcactttctgaagatcgagctcgtttgcttgaggaaaagaaaaagcttgaagaagaagtcagtaagttgcgtagtagcagttttgttccttcaccatatgtagctacagccccagaactttatggagcttgtgcacctgaactcccaggtgaatcagatagatccgctgtggaaacagcagatgaaggaagagtggattcagcaatggagacaagcatgatgtctgtacaagaaaatattcatatgttgtctgaagaaaaacagcggataatgctgttagaacgaacattgcaattgaaagaagaagaaaataaacggttaaatcaaagactgatgtctcagagcatgtcttcagtatcttcaaggcattctgaaaagatagctattagagattttcaggtgggagatttggtactcatcatcctagacgaacgccatgacaattatgtgttatttactgttagtcctactttatattttctacattcagagtctctacctgccctggatctcaaaccaaggcttcaggtgcatctagaagaccctgggtacttggaaaagtaatggaaaaagaatactgtcaagccaaaaaggcacaaaacagatttaaagttcctttggggacaaagttttacagagtgaaagccgtatcatggaataagaaagtataacttatggacaaaattaatacattctatgacatttttttctgatttgtcctgcagtgctcattcatcactccaaaaacagcaggccatctttttatgcaaaagtcagcgtgacaatatacttcactggtgtacatcgtttactttttaactggcttcattttaggaataataaattcatcagaatccttggctgaattaaaatggtttttgttttttggtttttttttttacccagacaactctagaaatgcggaccaaactacttcattttctcaaagggcataccttgtgcattgtggcttatgatgagccatattaattgcctgttaaatatacactagcttgaacttagatgttaaatgttattattaccagcatttgtccttttgtgaaatcagtatcagaatacttgcactctttaacacattctttataaaatgtataaattattcagaactatttaaaataaagaggagtgttattgcatgctgataatcattttgagtttgcctcagtagatactaaagcaaattgtttcagtttttttaaatgccctttgatgtttcaaaaaaaaaaaggaactgtaatttgattgactgattttaagatcagccataagtaatcagcaatcttcaaaagcactttcagtggattggtcatctgggttctaaagggaagagtctgtgctactaaccatttcaaatgcagactcaaaccttcccaacatctttatgactctagaataatcatattgatgaaatcgtaattcatggttgagtttcagaacaaaagatattcattgcacattaaccatttagaggtcatttaaataacaaaatattgtattgtaaaagaactgtacaattttaaaacaataaagatttgaacctgtaaatgtgtgtgccttttaaagaaggatacatttttaatatatttgagtgattgctgggaagtgtgaaaatattgttatgtatcatatcaaagagaaacatgtttattacaaaaatgttctttaactatatactatgtaacagggtaaacagtgttatgtagaatagaattgtgtaaactagatctttagagaagttgccattgagcaaagttatttaaatgagttagttgagttggatgagaattgtttgaggtttgttgctagagaacaataataaaataattctttttcagaaaatatttaatttcttcataaaaataagttaaatatttttttaaatatgtatatctaatagtacaaaatggaataaacatcatagtgtatagaaaactgaatttgacaagttaatgaataaatgaacaaatgatttc

SEQ ID NO: 552 - DNA, 1793 bp, Homo sapiens
ggcacgacctcgtgcgaattcggcacgagagaaaatattcatatgttgtctgaagaaaaacagcggataatgctgttagaacgaacattgcaattgaaagaagaagaaaataaacggttaaatcaaagactgatgtctcagagcatgtcttcagtatcttcaaggcattctgaaaagatagctattagagattttcaggtgggagatttggtactcatcatcctagacgaacgccatgacaattatgtgttatttactgttagtcctactttatattttctacattcagagtctctacctgccctggatctcaaaccaaggcttcaggtgcatctagaagaccctgggtacttggaaaagtaatggaaaaagaatactgtcaagccaaaaaggcacaaaacagatttaaagttcctttggggacaaagttttacagagtgaaagccgtatcatggaataagaaagtataacttatggacaaaattaatacattctatgacatttttttctgatttgtcctgcagtgctcattcatcactccaaaaacagcaggccatctttttatgcaaaagtcagcgtgacaatatacttcactggtgtacatcgtttactttttaactggcttcattttaggaataataaattcatcagaatccttggctgaattaaaatggtttttgttttttggtttttttttttacccagacaactctagaaatgcggaccaaactacttcattttctcaaagggcataccttgtgcattgtggcttatgatgagccatattaattgcctgttaaatatacactagcttgaacttagatgttaaatgttattattaccagcatttgtccttttgtgaaatcagtatcagaatacttgcactctttaacacattctttataaaatgtataaattattcagaactatttaaaataaagaggagtgttattgcatgctgataatcattttgagtttgcctcagtagatactaaagcaaattgtttcagtttttttaaatgccctttgatgtttcaaaaaaaaaaaggaactgtaatttgattgactgattttaagatcagccataagtaatcagcaatcttcaaaagcactttcagtggattggtcatctgggttctaaagggaagagtctgtgctactaaccatttcaaatgcagactcaaaccttcccaacatctttatgactctagaataatcatattgatgaaatcgtaattcatggttgagtttcagaacaaaagatattcattgcacattaaccatttagaggtcatttaaataacaaaatattgtattgtaaaagaactgtacaattttaaaacaataaagatttgaacctgtaaatgtgtgtgccttttaaagaaggatacatttttaatatatttgagtgattgctgggaagtgtgaaaatattgttatgtatcatatcaaagagaaacatgtttattacaaaaatgttctttaactatatactatgtaacagggtaaacagtgttatgtagaatagaattgtgtaaactagatctttagagaagttgccattgagcaaagttatttaaatgagttagttgagttggatgagaattgtttgaggtttgttgctagagaacaataataaaataattctttttcagaaaatatttaatttcttcataaaaataagttaaatatttttttaaatatgtatatctaatagtacaaaatggaataaacatcatagtgtatagaaaactgaatttgacaagttaatgaataaatgaacaaatgatttc

SEQ ID NO: 553 - DNA, 2280 bp, Homo sapiens
aggttcgtgacccttgagaaaagagttggtggtaaatgtgccacgtcttctaagaagggggagtcctgaacttgtctgaagcccttgtccgtaagccttgaactacgttcttaaatctatgaagtcgagggacctttcgctgcttttgtagggacttctttccttgcttcagcaacatgaggcttttcttgtggaacgcggtcttgactctgttcgtcacttctttgattggggctttgatccctgaaccagaagtgaaaattgaagttctccagaagccattcatctgccatcgcaagaccaaaggaggggatttgatgttggtccactatgaaggctacttagaaaaggacggctccttatttcactccactcacaaacataacaatggtcagcccatttggtttaccctgggcatcctggaggctctcaaaggttgggaccagggcttgaaaggaatgtgtgtaggagagaagagaaagctcatcattcctcctgctctgggctatggaaaagaaggaaaaggtaaaattcccccagaaagtacactgatatttaatattgatctcctggagattcgaaatggaccaagatcccatgaatcattccaagaaatggatcttaatgatgactggaaactctctaaagatgaggttaaagcatatttaaagaaggagtttgaaaaacatggtgcggtggtgaatgaaagtcatcatgatgctttggtggaggatatttttgataaagaagatgaagacaaagatgggtttatatctgccagagaatttacatataaacacgatgagttatagagatacatctacccttttaatatagcactcatctttcaagagagggcagtcatctttaaagaacattttatttttatacaatgttctttcttgctttgttttttatttttatatattttttctgactcctatttaaagaaccccttaggtttctaagtacccatttctttctgataagttattgggaagaaaaagctaattggtctttgaatagaagacttctggacaatttttcactttcacagatatgaagctttgttttactttctcacttataaatttaaaatgttgcaactgggaatataccacgacatgagaccaggttatagcacaaattagcaccctatatttctgcttccctctattttctccaagttagaggtcaacatttgaaaagccttttgcaatagcccaaggcttgctattttcatgttataatgaaatagtttatgtgtaactggctctgagtctctgcttgaggaccagaggaaaatggttgttggacctgacttgttaatggctactgctttactaaggagatgtgcaatgctgaagttagaaacaaggttaatagccaggcatggtggctcatgcctgtaatcccagcactttgggaggctgaggcgggcggatcacctgaggttgggagttcgagaccagcctgaccaacacggagaaaccctatctctactaaaaatacaaaagtagccgggcgtggtgatgcgtgcctgtaatcccagctacccaggaaggctgaggcggcagaatcacttgaacccggaggcggaggttgcggtaagccgagatcacctccagcctggacactctgtctcgaaaaaaagaaaagaaacacggttaataacatataaatatgtatgcattgagacatgctacctaggacttaagctgatgaagcttggctcctagtgattggtggcctattatgataaataggacaaatcatttatgtgtgagtttctttgtaataaaatgtatcaatatgttatagatgaggtagaaagttatatttatattcaatatttacttcttaaggctagcggaatatccttcctggttctttaatgggtagtctatagtatattatactacaataacattgtatcataagataaagtagtaaaccagtctacattttcccatttctgtctcatcaaaaactgaagttagctgggtgtggtggctcatgcctgtaatcccagcactttgggggccaaggagggtggatcacttgagatcaggagttcaagaccagcctggccaacatggtgaaaccttgtctctactaaaaatacaaaaattagccaggcgtggtggtgcacacctgtagtcccagctactcgggaggctgagacaggagatttgcttgaacccgggaggcggaggttgcagtgagccaagattgtgccactgcactccagcctgggtgacagagcaagactccatctca

SEQ ID NO: 554 - DNA, 1104 bp, Homo sapiens
aggttcgtgacccttgagaaaagagttggtggtaaatgtgccacgtcttctaagaagggggagtcctgaacttgtctgaagcccttgtccgtaagccttgaactacgttcttaaatctatgaagtcgagggacctttcgctgcttttgtagggacttctttccttgcttcagcaacatgaggcttttcttgtggaacgcggtcttgactctgttcgtcacttctttgattggggctttgatccctgaaccagaagtgaaaattgaagttctccagaagccattcatctgccatcgcaagaccaaaggaggggatttgatgttggtccactatgaaggctacttagaaaaggacggctccttatttcactccactcacaaacataacaatggtcagcccatttggtttaccctgggcatcctggaggctctcaaaggttgggaccagggcttgaaaggaatgtgtgtaggagagaagagaaagctcatcattcctcctgctctgggctatggaaaagaaggaaaaggtaaaattcccccagaaagtacactgatatttaatattgatctcctggagattcgaaatggaccaagatcccatgaatcattccaagaaatggatcttaatgatgactggaaactctctaaagatgaggttaaagcatatttaaagaaggagtttgaaaaacatggtgcggtggtgaatgaaagtcatcatgatgctttggtggaggatatttttgataaagaagatgaagacaaagatgggtttatatctgccagagaatttacatataaacacgatgagttatagagatacatctacccttttaatatagcactcatctttcaagagagggcagtcatctttaaagaacattttatttttatacaatgttctttcttgctttgttttttatttttatatattttttctgactcctatttaaagaaccccttaggtttctaagtacccatttctttctgataagttattgggaagaaaaagctaattggtctttgaatagaagacttctggacaatttttcactttcacagatatgaagctttgttttactttctcacttataaatttaaaatgttgc

SEQ ID NO: 555 - DNA, 762 bp, Homo sapiens
aggttcgtgacccttgagaaaagagttggtggtaaatgtgccacgtcttctaagaagggggagtcctgaacttgtctgaagcccttgtccgtaagccttgaactacgttcttaaatctatgaagtcgagggacctttcgctgcttttgtagggacttctttccttgcttcagcaacatgaggcttttcttgtggaacgcggtcttgactctgttcgtcacttctttgattggggctttgatccctgaaccagaagtgaaaattgaagttctccagaagccattcatctgccatcgcaagaccaaaggaggggatttgatgttggtccactatgaaggctacttagaaaaggacggctccttatttcactccactcacaaacataacaatggtcagcccatttggtttaccctgggcatcctggaggctctcaaaggttgggaccagggcttgaaaggaatgtgtgtaggagagaagagaaagctcatcattcctcctgctctgggctatggaaaagaaggaaaaggtaatagtatttctgtatttttcttactatagcactagagttgttctctggattaggagacagaagttagagtcactataacttttttttttcccctggaagttaatagggggtatgtattcctttagcaactgtattatgtcttgagtatcaattgaaatggccagtttaaggccgtaatgtctaaatgggcaactatgctaacaataaaaaaagaacattgaggtctattaatac

SEQ ID NO: 556 - DNA, 2372 bp, Homo sapiens
aggttcgtgacccttgagaaaagagttggtggtaaatgtgccacgtcttctaagaagggggagtcctgaacttgtctgaagcccttgtccgtaagccttgaactacgttcttaaatctatgaagtcgagggacctttcgctgcttttgtagggacttctttccttgcttcagcaacatgaggcttttcttgtggaacgcggtcttgactctgttcgtcacttctttgattggggctttgatccctgaaccagaagtgaaaattgaagttctccagaagccattcatctgccatcgcaagaccaaaggaggggatttgatgttggtccactatgaaggctacttagaaaaggacggctccttatttcactccactcacaaacataacaatggtcagcccatttggtttaccctgggcatcctggaggctctcaaaggttgggaccagggcttgaaaggaatgtgtgtaggagagaagagaaagctcatcattcctcctgctctgggctatggaaaagaaggaaaagtcttttagtacatgcttgcatgcctcttttggaaagataccagttttatcaacaacctagcgcatgtcacatctctgtctagatctgaaatggtaaaattcccccagaaagtacactgatatttaatattgatctcctggagattcgaaatggaccaagatcccatgaatcattccaagaaatggatcttaatgatgactggaaactctctaaagatgaggttaaagcatatttaaagaaggagtttgaaaaacatggtgcggtggtgaatgaaagtcatcatgatgctttggtggaggatatttttgataaagaagatgaagacaaagatgggtttatatctgccagagaatttacatataaacacgatgagttatagagatacatctacccttttaatatagcactcatctttcaagagagggcagtcatctttaaagaacattttatttttatacaatgttctttcttgctttgttttttatttttatatattttttctgactcctatttaaagaaccccttaggtttctaagtacccatttctttctgataagttattgggaagaaaaagctaattggtctttgaatagaagacttctggacaatttttcactttcacagatatgaagctttgttttactttctcacttataaatttaaaatgttgcaactgggaatataccacgacatgagaccaggttatagcacaaattagcaccctatatttctgcttccctctattttctccaagttagaggtcaacatttgaaaagccttttgcaatagcccaaggcttgctattttcatgttataatgaaatagtttatgtgtaactggctctgagtctctgcttgaggaccagaggaaaatggttgttggacctgacttgttaatggctactgctttactaaggagatgtgcaatgctgaagttagaaacaaggttaatagccaggcatggtggctcatgcctgtaatcccagcactttgggaggctgaggcgggcggatcacctgaggttgggagttcgagaccagcctgaccaacacggagaaaccctatctctactaaaaatacaaaagtagccgggcgtggtgatgcgtgcctgtaatcccagctacccaggaaggctgaggcggcagaatcacttgaacccggaggcggaggttgcggtaagccgagatcacctccagcctggacactctgtctcgaaaaaaagaaaagaaacacggttaataacatataaatatgtatgcattgagacatgctacctaggacttaagctgatgaagcttggctcctagtgattggtggcctattatgataaataggacaaatcatttatgtgtgagtttctttgtaataaaatgtatcaatatgttatagatgaggtagaaagttatatttatattcaatatttacttcttaaggctagcggaatatccttcctggttctttaatgggtagtctatagtatattatactacaataacattgtatcataagataaagtagtaaaccagtctacattttcccatttctgtctcatcaaaaactgaagttagctgggtgtggtggctcatgcctgtaatcccagcactttgggggccaaggagggtggatcacttgagatcaggagttcaagaccagcctggccaacatggtgaaaccttgtctctactaaaaatacaaaaattagccaggcgtggtggtgcacacctgtagtcccagctactcgggaggctgagacaggagatttgcttgaacccgggaggcggaggttgcagtgagccaagattgtgccactgcactccagcctgggtgacagagcaagactccatctca

SEQ ID NO: 557 - DNA, 317 bp, Homo sapiens
ctcctggagattcgaaatggaccaagatcccatgaatcattccaagaaatggatcttaatgatgactggaaactctctaaagatgaggtgacctttccttcttcctactcctctttctacttttctttggttgtttggggttttgttttgttttgtttttgtaactcactttttaaatgaatatgtgtatatttcaaatctacttttatttaggtaacatttatttataagttttcttaaaatactgatgctttgaaagtggactttttcatagtgaatcactgttttggagagaaatatattaagacttaaaaagc

SEQ ID NO: 558 - DNA, 596 bp, Homo sapiens
tgttcgtcacttctttgattggggctttgatccctgaaccagaagtgaaaattgaagttctccagaagccattcatctgccatcgcaagaccaaaggaggggatttgatgttggtccactatgaaggctacttagaaaaggacggctccttatttcactccacgtaagtaattatgccccgcaggtaaaatagtaattaagaatccactcacttatgccagctctccagcaggaaaggtggcctgtacctggttttgcctcttttacaaaaccgaaatatcttatttccttctttgggaaaggaaattgtttaaagccagttttatatagcgagcgaggcctttgaaggtcttgttggaaacatgtggtctggaaaaggctgttaattttttttattatacaaattagaactagaatctttgaaatattgcagaaatatatctgggtgtataattggccaataagtagaaaaagcccaaaagaattctcatatctcaaactccatttcttaaagaaaatgacttgattccatttttaatgtggtgtaggtgatgttcacctaaaacttttcacagcgacttcaaaagcaaactaca

SEQ ID NO: 559 - DNA, 501 bp, Homo sapiens
agccacctggcgtcagcagttactgtgtggcggctgcacggggatgatggcagctggatggatgacagccgtcgtcaggagaaacttcaaagataaagtgaacaggataaataggatgcgttggaaatctgaaacatgacagtattcgttttcttaaaagaaatgtaaactcccctcctccccactaaattctagagtaaccaacacatttagaagatctagaatctaagtgaaagtttccaggttgtggcctcagtaacatgtttttgcatatcaagaagctcagacagagcctgtaatgtacccttggcaggaatcatggagaaggggagtgtcagcatcagctccatcactggaccaaagccgagactccttgacttggatttcattgaatcgtttaaaattaggttctgatgtttctacttttccatgtaagaatgttaaaaagttaaaaagttacttctttctgcccaacaccattccattccacagactggtatt

SEQ ID NO: 560 - DNA, 409 bp, Homo sapiens
ataaagttttcagacaacatccagaagaaattttatgtaatagttaaggtcaacagatacgattccaacaacacacataactcaactgaagtgaaaacaatatgaatagctgtgactggtgtcacatgtggatgataatgacaacccagtcatgtctgccacctggccaacatcaattatacaaagtcattgattttaagattcattgattgtaaaagatttcaatgacattaaaatgtgtaggaaatgtgcatcttagaattgttaaacaataagtagtacttttgcctctgagaattggaagttgcagtaataaagtaagatgctaaggcatgtaaatgtttttaataaatacatggttttcaagagttaatacatgattgaagaggtttagaatcaattctctagg

SEQ ID NO: 561 - DNA, 148 bp, Homo sapiens
aagaatactaaggcctatatatagatatgcatatggtaaactgcctttctttcaggtgctaaaaagggaaactgaataaacaacatttcacaattccaaacaaacaagttaataaaatattcagttcatcaaagtgtaacactcacat

SEQ ID NO: 562 - DNA, 341 bp, Homo sapiens
tcattaatgactcatctctgtcctaaaagcaatcaggatgactgttcagtgcccctcctggcaccatgtgacccacataaggagtgtcttcagactgaagctttgctagaactcagagttttacaggctctgcccaggagcctctctggcattttctcacacagtctaacaggcagaaaatctcttctttctttttgtgatctttgacgaatattgttggatcttctgattctgacagcctttagcagtgctccattcaggtgcagggcagtggatgcctaggctgctgccttcatagcttctcccgctctctctatcctttttatctttaatgtcctgca

SEQ ID NO: 563 - DNA, 264 bp, Homo sapiens
aagagtgcagtgctgaaaatatacttaaagaaatcatagctgaaaactccccaaatttggtggaaggtgtaaatcttcagatttaagaaaatgagcaaaccccaagccaagaggactcaacaaccctaaaatagtatgcactgaacaacaaagttataaaataatgtgaaaactgacagaattgaaagaagaaatagataaatccacaattacagcgtggacttcaacatccttctatcactaactgatagaaccattagacaa

SEQ ID NO: 564 - DNA, 318 bp, Homo sapiens
ctaccttgagatgaacaccctagtcccctgctttcttagaagcacaaaccttacctccttcattcaggaccattatggccattctacctaagaatattcctaccagaacatttctggtactggaaaggtgttcatcaatatctactgcataaacagtgccatcatggaacctataactagctcagaacggctatgttttagatgattatttttaaaaagttagaaatcgcaaatataaaagctaagcccaaacaaaaaaagctaagcataaaaacgtaaaagaataccaactgtgataagaaggacaaaaaaacaata

SEQ ID NO: 565 - DNA, 495 bp, Homo sapiens
gaggttgcagtgagctgagatcgcaccatttcactccagcctggggacagcaagactccgtcttgaggaaaaataaacaaataataaataaataagaagtttctaatctgaatggtcagagtccaacacatcgactgggctatatggcagatggtattttccaaaatcatctcatctctcatgctgttcttatgtgatgcgaacacgtctctgttgtgaggtggggtctccctccaaacctaggctgaccttagtaactgcctcaacgaatccaatgtagtcatgctgcctgacttttttctcttgagagggagtttcgctcttgttgcccaggctggagtgcaatggcgcgatctcggctcactgcaacttccgcctcccaggttcaagcgattctgcctcctgagtagctgggattacaggcatgcgccaccatgtctggctaattttttgtatttttagtagagacagggtttctccatgttcgtcaggctg

SEQ ID NO: 566 - DNA, 314 bp, Homo sapiens
tgcactagctgttccatctttcagggctctctccccaccccccggtaccagcatggattgatcctcacttcctgcagggttctgaaggggagagtcctttttccattgccccagccctcgctgtctccctttccttgcttcatttgtcccacagcagtgatcagcatttgaccttttgtgtatttgttgatgtctgtcttcctccagtggaatgaaagttctgggacagcgaggtcttggtctattgtatgttctgctctattcccaggactgggaacagtgcctggcatatagtagaaccttaataaataatt

SEQ ID NO: 567 - DNA, 283 bp, Homo sapiens
gtcacctaaaaaggcttgatggctggcccctagtgacattagcagccccacccctaaagatacctcatggaatgccagagactctggctgtaccctctgtgacatcacatggaatgggctggcccctgctaatatcacatagaatggctttatgacctgactcccaccataccatgttggaggtccccaacccccatgacatcatgaggagtgccatgcaggcctggccttcagggacatcacaggaaagaggaggctccggaccccaccccctacaagctgt

SEQ ID NO: 568 - DNA, 400 bp, Homo sapiens
gtggttttaaactcctgggctcaagcatctcatccatcttggcttcccaaatttctgggattactggagtgagccactgcacccagcctaattttttttttgatagtctcattttttctagtgactccattaaagaataggctagttcctaagcacctcaactcatcccacctggctttccagtaagctaggaaatgtgtctgagaattgggtaaaatggaagagatggagagaagggtagacaatcataggattatagaaagaatcctttaaacccatctttgtccagagctgcttagataatcctcatttttctgaacttgttctgatcacgtgggaggttttaatgggattctcattccgacgaccaagatacacatgtgccaggtgtataactgct

SEQ ID NO: 569 - DNA, 508 bp, Homo sapiens
tggaaacatattgaaagaacacactcaaaataatattcagcctcgacaccttaacaatttcaggacacaatggcatagtgctcattcttggcaaggatgtgaggaaataggaattgtcataaacttttggagggagtgtagattgatagctttcttttttagagcaacttctaaaatctatcaacattttaaatatacaaatatcaccttaggttatttcatgcctagaaatgtatcctacagagatccattcacacaagggctcaaagatacgtgagcagagatattcatttgtaatcatgtttatcacatttttaaaaactggaaataaccaaaatgtccactaatgagttaaatagtatatggtgtatctattatgtggtatactacgcaacagtttaaaaaagtaacatgaaaatctgtgtacatgaactgacgtgaaaagaagcccacagtcattcattaagttagaaacacaagttttcaaacagtatgaactaaatcatga

SEQ ID NO: 570 - DNA, 427 bp, Homo sapiens
gtctcatccttcctggggtcacctcccagggcagccacctttgccagaagtgcccaggtttgatgctccagcctgggctggcatggccagcagaaagcacaatgtcttggaggcccagcagaaggaagacatcagtctctgaacattgaaaaggggcaggtgaaagtgtagggcgggaggaataagtcccttcgattcctccaacggtggctggcaaaacagaccccatctccctggaaggctgtgccctaggatgggagggttgcaaaatggaggcagctctgtctctgttctagtagtggagacctggatgacaccactccccagatgtccaaggactggggggcctctgggggcggcatttgaattaggccataaacgattaggagaatgtcagaggaaggaagtggtaggggaaagggggcat

SEQ ID NO: 571 - DNA, 183 bp, Homo sapiens
ctctgctggttgacaaaaactagctccctaaaataatgttacagacataagtaagaaatggattgtggtgacacataagctgttaaagaaacccatagcctaatttatagtgtatcaggtttgcaagtggtttaaaacaatagcggtttactgaatgttcttactagcgtgaggggagagctt

SEQ ID NO: 572 - DNA, 388 bp, Homo sapiens
gttcttcagcccagcaatttaactgctggaaactaatctagagaaataaaagctgcagtgagtgcatagatcagactctgcccagggttgcctgagagccagtggagccacgctggaccgtgggccttggccatgtgagccacccagcctgcctgtctctcctgcagttctcgtgggcctaaggtctcaggttcccaagactgtgacatgaaccgggctgtgaggcagcaaaactaaccctacacaccctagaaactccatgtgcctctgtcctcctgaccttgtctctctggggctggggctggattcgcctgttaatgaccatgtcctgggcctttatgcccactgttttttttgcctgctccgctcagaggggtcttggcctcat

SEQ ID NO: 573 - DNA, 477 bp, Homo sapiens
ctgtaaggggtgtggaggggatcacagcagtcttgactgtttttttgatttctctgcgaggtagctaataggaactctagtttacagaggaggacatttaaagttcgatgccctgggccacaggctggggaagcattgatttgaacccaggtcacttgtgttagtgtccttaggctgtggtaacaaatcactacaatccaggtggcttcatacagcagatttatcatctcacggtgctggaggccagaagtctgaaatcaaggtgttggcagggttggttccatctggtggctcagcgagagaatctgttccacgcttctccctcttggaacagcttctggtggctgccagcaagcctcagcattcctggccttgtagctgattcacacccatctctgtgtctgtgttcacagaggtctccctctgtgacgatctgtgcctaaactccctctccttttcgtttataaggaatgcatt

SEQ ID NO: 574 - DNA, 272 bp, Homo sapiens
tccctgtttcctgcacccagctttttccagcagggggcaccagagatagactggaagcagaactcctcccaagcccattcttgcacgctagctcagttttcagcccggagagcctcctttcccaggaacttttctcccgtgtgggggggctgctcagaactcctgttaggaagatgggtgggggcgctgcccagagggtgctcactcctagggagctgggaaggaggtccctggataactcctggacctccccggtgctgctgctgacaacc

SEQ ID NO: 575 - DNA, 549 bp, Homo sapiens
catggcatatcacagcagaggcaagaaaggctgactaggaccaaggaaaataggactttatacatggatgtgtccacatgtgtacgtgtgtataatgagagatatatcaaaatttaagaaatccttctacccatatcttttccaggctttccaattttccgcatttcacatctcagcacctaagtataagaacttgcatggaatagatactcagtaaaacttaagtgaattaaatcatatttttagggtaacagctccctgaccctgcccacacacatataccgtcccatctgtgactctactgttatttgtccatcttcttgctaacatgagaactgcatattcctctagatttccctgtagatttccctattgcagggagcaataaatagcactgccttcacctgcaagcccaggttggaactagtttcatcactagggtaatgcccaacagtcatagccactgagctgacaagactgacttcccatctattcttccccaccccaccccccgccaactacatacagtatctaggtactataatcagc

SEQ ID NO: 576 - DNA, 315 bp, Homo sapiens
taatgtgtttttatgcccactatacacacgcagtctccctggataaaactttgtctaagtgtttcaggaggctgctcaaaggaaatgtggcttgttttgggaggtctgaaatgttttcagatttgctgtcttgaaaaaaaaaaaacagacatatgggatttcttcatgcaaaaatcccatcacatgtggctgttaagatcaagaagacagtttacctgcaggatatattttttccttttcttcgtacctaccccggaataacttttcaggtcctctcacagaatgaagcagtttccttaggaactaaaaccgaga

SEQ ID NO: 577 - DNA, 2234 bp, Homo sapiens
aatgcaaggattgttcaacatacaaaaatcaatataatatactacattaacagaacgaagcgagaaccagatgatcatctcaattgatgcagacaaagcatttgacaaaatccagcagcctcttgtgattaaaaacactcaacaaatgagggataagaggaaactacctgaacataataaaagccagacatgaaaagcccacggtagacaccatacttagtggtgaaagcttttcctctaagatcaagacaatgctcatttcaccattcctattcaacacagtactaggagttctagcctgagctagaaaaagaaaagacatctaagttggaaagtaagaagtaaaatcctatatgttcacaaatgatatgatctttagacaacccgaaagattccacaccaaaaaaaaaaaataactgttaattcagtaaggtagcaggatacaaagtcaacccacaaaagtcagttgcattcctatacactaacaatgaacaacctgagaaggaaattacaagaacagtcccatttaccatagcgtcaaaaagaataaaatgcacagaaattagcttacccaaggtggtaaatggcttgtacaatgaaaactacaaaacattgcttcaataaagataaaaataaacggaaatacatctcatgttcatggattggaaaatctaatgttaatatgtcagtactactcaaagtgatgtgcagattcactacagtctctatcagaatcctaggatttttttttttttttttgcagaaatagaaaaacccatcctgaatttcatgtggaatctgaagggatcccaaatagccaagtcagtcttgagaaagaagaacaaattggaggacttaaacctgcagagtttaaaacttactataatgctacagtaatcaaaacaatgtgattctggcataaaggcagatggatagaccaatgggatagactggagaacctagaaataaaccctctcatatgtaggtaaatgatttttgacaagggtgccaaggctattcaaaggatagttttttcaacaaataatgatgggaaagctggataaccacatggctaacaaagttgcaacctcactcatttgcaaaaattaactcaaaatggaccaaagacctaaatgtgagagctaaaaccataaaactcttaggatgtggcagtggtttcttggatatgacaccaaattcacagacaacgaaagaaaaaataggcaaattatacttcattaaaattttgtgcatcaaagaacactatcaacagagtaaaaagattacctatggagtgggaggaaataatatgcagttcacgtacctaataaggattaaacatccagaatacatacaaaactcccaaaatgcaacaacagtgtaaaaacctgatttaaaaaatggcaaaggatttggatagatctccagagaggacatgcagatagccagtgagcacaggaaaaaatgcttagcatcactaaacagtaaggaaatgcaaatcaaaaccacattgagataccacttcatacccactgggatagctcttattaaaattaaaaaaacacacaagtgttggcaaggatgtggagaaattggaactcttattactgatggaaatatagtggtatgcagctgctgtagaaaacagtatggtgattttccaattaaatatagaattgtcatttgattcagcaattgcatttctgggtatatacacaaaataattgaaagcggaggcttgagggtatatttgtataccagtgttcactgcagcattattcacagtagtcaaaaggtagaaacaacccaaatacccaacagatgaatggatagacaaaatgtgttatatccatacaatggaatattattcagccataaaaaggaaatccttctacatactacatcatggatgaacctttcagacattaagtaaatcacaaaaggacaatactatatgaatccactgatgtgaggtacctagactagtgagattcatagagacaaagtagaacaaagattacgttttgtcacagggggcaggagggaatgggaatttattgtttaaggggcacagagattagtgtgggatcatgaaaaagttccggaggtgcatagtggtgactggtacatacaacgaatgtatttaatgcctttaaactgtaacttcaaaatggttaaaatttaaatcttacgtacattttgccacagtaaatttttaaaccaccaaaaaaaaa

SEQ ID NO: 578 - DNA, 1619 bp, Homo sapiens
ccggttttttggggaaccccgtgtcgacagggttcctgcccgtggccaggtacaatactatggggcgcggcgccacggattgtttaaaacttcctcagagccaagcgtccgaacaaagtgttatgtggtgagtgttagttgtttgcggaataccacggaagttacctttaatattgggaccccatattaagggggaagaaataaatccaataagttcgcagaaataaggtaattttggtgtaaaatggtaacgttcgtaccctatgcccacaactgagaccggttaccagaacatgggctactccaagtaggaactggccgaacccataagtatcaccttaatattttggtatggaccccttttttttttttgagagagccctgctcttggtgccaaggctattcaaaggatagttttttcaacaaataatgatgggaaagctggataaccacatggctaacaaagttgcaacctcactcatttgcaaaaattaactcaaaatggaccaaagacctaaatgtgagagctaaaaccataaaactcttaggatgtggcagtggtttcttggatatgacaccaaattcacagacaacgaaagaaaaaataggcaaattatacttcattaaaattttgtgcatcaaagaacactatcaacagagtaaaaagattacctatggagtgggaggaaataatatgcagttcacgtacctaataaggattaaacatccagaatacatacaaaactcccaaaatgcaacaacagtgtaaaaacctgatttaaaaaatggcaaaggatttggatagatctccagagaggacatgcagatagccagtgagcacaggaaaaaatgcttagcatcactaaacagtaaggaaatgcaaatcaaaaccacattgagataccacttcatacccactgggatagctcttattaaaattaaaaaaacacacaagtgttggcaaggatgtggagaaattggaactcttattactgatggaaatatagtggtatgcagctgctgtagaaaacagtatggtgattttccaattaaatatagaattgtcatttgattcagcaattgcatttctgggtatatacacaaaataattgaaagcggaggcttgagggtatatttgtataccagtgttcactgcagcattattcacagtagtcaaaaggtagaaacaacccaaatacccaacagatgaatggatagacaaaatgtgttatatccatacaatggaatattattcagccataaaaaggaaatccttctacatactacatcatggatgaacctttcagacattaagtaaatcacaaaaggacaatactatatgaatccactgatgtgaggtacctagactagtgagattcatagagacaaagtagaacaaagattacgttttgtcacagggggcaggagggaatgggaatttattgtttaaggggcacagagattagtgtgggatcatgaaaaagttccggaggtgcatagtggtgactggtacatacaacgaatgtatttaatgcctttaaactgtaacttcaaaatggttaaaatttaaatcttacgtacattttgccacagtaaatttttaaaccaccaaaaaaaaa

SEQ ID NO: 579 - DNA, 414 bp, Homo sapiens
tgaaatagggctacaaatggattgttcccaggactggaatttcagagaagctaccttgggcttactcgtgacccaacatgtgtcagtgtctccccagactgacggtgtgaataaaaagtgctttcggcttgtaaatatcaacattataaagacacctctaaataaacatttgacatagtagcttccataaattgccaaatctttttctaagggttgccccccttttcttaccggattctatttcatagtctggttcaagtctccctagattttcctcttctaaaatagaaacaactgctgagcacggtgagatgcgcctgtagtcctagctactcgggaggctgaggcaggaagattgcttgagctcaggagtttgggactagcctgggcaacacagcaagacccagtctctta

SEQ ID NO: 580 - DNA, 272 bp, Homo sapiens
cttaaagatcctagggatacacaacactcctggaggtcatacacaggaggtcagaaagagacttgggggccagtgcctttagtggggtcctgggtgtcacccaagcaggtttcacgtggggattttaactggtgggtttaacgcaagcaagtggccgggtgaggtgactcacgccggcaatcccagcactttgggaggctgaggcagatggatcacctgaggtcaggagtttgaaaccagcctggccagcatggtgaaacccctgtctccac

SEQ ID NO: 581 - DNA, 433 bp, Homo sapiens
tatatttttatatatatatatatatataatgaaatactattcagccataaaaaagaatgaaattatgtctttgcagcaacatggatggaattggaggccattatcataagcgaaacaatgcagaaacagaaagtcaaatactgcctgttctcatgtataagtaggagctaaataatgtgtacacatggacatagaatgtggaatgacagacactggagacttgcaagggtgggagagtggggaggcatggtgagggatgagaaattacttaaagggcacaatgtacactattctggtgatggataaactgaaagcctagacttctccattatgcaatatatccatggaacaaaactgcatttgtaccccttacatttatacaaaaaagtgattaaatgaatgaatgaataaataagcatataaacaaaccaaa

SEQ ID NO: 582 - DNA, 325 bp, Homo sapiens
ttcacagctattaaagagcaggaataaacctatggttgttccaccaaccccatctctctcctctgctagaattgcatgcctaggaagttgctccgtaagcatctgtttaatccaaaggactttcagattttctcctctgaataagatgccctatcagaggaaaaataaattattgtaatttggctggaacatctcctaatattccaaaagacaccaggacagagttggactaagcctgaactttatactggaaaagcctcactcaatttcccctctgtcactatctgctgtttactattttgtgttttttgtttgtttgtttttg

SEQ ID NO: 583 - DNA, 355 bp, Homo sapiens
ttttttgaaaaaacaggggttttgttttgtcacccaggctggtctaaaattccaggtttaaagtgatactcccacctaaaactcccaaagcgctgggattacaggcaggagcccctgtacccagctaacactgtttcattttaaatgaagtgttttacaactactgtaacaaggagacaagccatacgtgcatatatgtgactatatggagagctggaagcataatgacctaagtaaagtcccagtggaagaagagatgagagatggtagacaattagtgagttcacttgacttaatttacaatataagcaattaacagttataacttatgaattcttactatttataatacttg

SEQ ID NO: 584 - DNA, 564 bp, Homo sapiens
ttgtatttttagtagagatggggtttcactatgttggccaggctggtcttgaccccctgacctcaggtggtccgccctcctcggactcccaaagtgctgggattacaggcgtgagccactgcgcccggcatacgtttctattcttaatatcatgcatttaaaaatacgtccactgtctagattatatattttctcctgacacttcagagttcagcttttcttatatttgtatcttcttacctacttagctacaagggaaatggttaaagaaatcatgcagtggccaggtgcagaggctcacagctgtaatcctagcactttgcgaggctgaggctggtggattgcctgagctcaggagttcaagatcagcctgggcaacatggtgaaaccctgtcttgacaaacaatataaaaattagccaagtgtggtggcatgcacctgtagtcccagctacttgggaggctgaggtgggaggtttgcttgagcctgtaaggttgaggctgcagtgaggcaagattgtgccacagcactctagcctgggcaacacagtgagaccctgtgtca

SEQ ID NO: 585 - DNA, 418 bp, Homo sapiens
ggaatggtggctgccaccaaaggcaacatggtaggacagcattcgccagctgcagctaagtccagccagaccagagagaatgacatgaacatgtgcatgataaatcctgtctgttggcaaaattgaattaccttaagaagaggatatgcaactcacatgccaaatctgatccactactgctatgatttccaaggtggagccaacaggaaaatatatgggatcaatcatcaatgtctgccataggaatggggaaagggaattacaacatgtgtgccaaagacctgtgacctcaccaacctaagattaaaaacaaacaaacaaaactctgcttctatatgtttgtttgtttgtttgagatggagccttgctctgttgcccaggctggagtgcaatgacttgatctcagctcactgcaacc

SEQ ID NO: 586 - DNA, 322 bp, Homo sapiens
aaagatctctcaaacacatttttaagttaaaaaagcaaaatgcaaaactgtacataatatgctgtattatctataaaatagagcaaataagaattataggtatgcttacttgtactcatataaagaaactctagaagaataccaagaactgtggatgagggtagaatagtgaatggaaactgactgattagactaaagaggtgggagtaagaccttttatgtatcgctttacattatttgactttaggaccatgtggatgtttgcatattcaaataattaattcttaaaaagaagatgaaaatagaaggtgggcgcagtggc

SEQ ID NO: 587 - DNA, 422 bp, Homo sapiens
aagtaaaacagctataagagcactgaggttcttgttgaaataattttaccttaatgaattaccaagaccttgtaagaaccagaatggggaccttacaggtcatgcactcaggaatattaaaaggtcatcttctgggggactttataatcaaactttaagaaaaacaaaagttgtattcctagtgtctgcacacagccagaaaaagattttctgctttctggaaagttgagatggtaataacatttctcagcatgtaacatctagttagtagaaagagtggttgacagctgagactaaagatattaacctgaaacaaaacacatcataaatgacaaaatagttttatcattaatgcatgaaaactttaaatagtacgattatttctaaatactgcttttaataatattgtgatacaaatttta

SEQ ID NO: 588 - DNA, 471 bp, Homo sapiens
aaaaaccctaggccacagctcaattcttccttttaagaaaaaaaaaaagaagcaggaaacaatctgagaatgaggagaaaacaaggagaatgaccccctttagagcaccttattggttttatggcacctctatttgccagagtaaaatggaagtaatacagtctttgtgcaaatttacattgaggaaaaagagccctaaggtcaacctgcaaattctagagttcctagtccgtttttctctattttcctttctgccatgctttaagtctgctgttatttttccactgagataaaaccactgtttgggtctaatagttttttgggtttttcttgcaagctggcaaatttgtatttatctcatggctaaagtactggagtaaaagttatagaatctgtatgtgtgtatgtgtgtatgtacatgtacacatgtatgtatttgaaggcctttatgatagatgtctataattttat

SEQ ID NO: 589 - DNA, 365 bp, Homo sapiens
agtgtcagaaagggggcaggatgcagagtcatggcactgaggtacagatgtctacttgctctgtgactgttttgagcctcgttttccctgccagcaataccaactttgtaggatcattatggggatttgatgagttagggggtatgaaggcagtttgtatattgtaccactgtatgcatcacctgccttttctaaatggaaatttgttctcacaatcgtagatgggtggagatgttagggctaatagaggccctttaacctgacataagttaccatgccactttctagggtgagagcattcagtgactctcccttatgctctgaataggccctatgtgcttggatttctgccaagctcttcaaca

SEQ ID NO: 590 - DNA, 331 bp, Homo sapiens
tgttttcccccaaatcatttggcagaaatgtggctgggagcttcattgctgatgttttcagttttaatattgctgtggaaagcctgtaccaacactcagccatgttattcatccacatctccagtctgggctgtgatttgtttttcctttgagtgacacaaccttattttccattaagactcaatgcaaatagacactcatgcaccatcaccatcactccccctgcttggctgagggaagtcaatggagtgattctagtttggtgttcatattggagggttttatttgtttatttattttgagatggaatctgtctctgtcaccaggctgg

SEQ ID NO: 591 - DNA, 598 bp, Homo sapiens
caacacggcagccctggactcagcccacagggtgacagcccaagccccttgcggcagggtggggctcagggggagtcttcaaaagaaaagcccaggcgtgcccttctcgaccttcctgcctggaatgcagatgaaacagccggggcaaggcagccatctcgagaccagcgagccacagctaggacagaagccggggccggagcatgatgtcggaggaggtcagggtctctgcggcatggcagggaagtggccgccaccctgaccgcctgattgctaacaggaggaagatggatctgctgttcgtgaaagtgcttgcaaaggcagagcctgctcctcacgggagcggacctggggagctgtgtgataagcagcaggtatttattggtcttagtccctggttcctgacacaaagctcataaattccttgtaatttcctgagtgggaagggtgacaggagcatcttttgttctatttggttcttgtacaaagttcttaaaaccttacattttcctggctcggcgcgatggctcacgcctgtaatcccagcactttgggaggccgaggcgggcgggtcacgaggtcaggagattgagatcat

SEQ ID NO: 592 - DNA, 300 bp, Homo sapiens
gtaactgggagtgatagagagaagagggcgcaatagaagatcagtgtcatttgaattgggtataactttttttttttggtaagagtacaagtatttttaaaatttgagacaggaataagttaacttattatttacctgcctctattgttcatttaaaaaaatcaagatatacattaggaaaaagttttatgttaatattaccataattactgatcaagtgccaatgtttttgagcagcatttcaattgtaagtttgataaatattgcctctaacagacacatggaaaatgatcaatacta

SEQ ID NO: 593 - DNA, 325 bp, Homo sapiens
ccaggcatggtggcggacacctgtaatcccagctactcaggaggctgaggcaggagaatcacttgaacctgagaggtggaggtcgcagtgagctgagatcacagaattgcattccatgcctgactaatttttgtattttcagtagaaacagggtttcactacgttggtcaggctggtctcgaactcctgacctcaggtgatccatctgcctcggcctcccaaagtgttaggattacagccgtgagccacgcgctcagcctcatctccattttatagatgagaaaacaagaaataaagtaattggtccaagaccaacagccagcaa

SEQ ID NO: 594 - DNA, 419 bp, Homo sapiens
gcttgcacctgtaatcccaactacttgggaggctgaagtgggaggatcgcttgaatacgggaggttgaggctgcaatgagctgtgattgtgccactgtactccagcctaggtggcagagcaagaccctgtctcaagaaaaataaaaaataacaaacttgaggcagagcatggtggctcacacttgtaatcctggcatttgggaggctgagacaggaagatcgcttgagcccaggagttcaagaccagcctgggcaccataggaaggcttatctctaccaataaaataatttctttttttaattaaccaggcaatgggcatgtatggtcccagctgcttggaaggctgaggcaggaggatcacatgaggccaaaagttcaaggctgcagtgagctgtgatcttgccattgcactccagcc

SEQ ID NO: 595 - DNA, 267 bp, Homo sapiens
tccttctctcgctaactcactggccagctgcaccttgaagaggtggggctggaggtccattttcacttctgaaggtcacctgggggcatctcggaggcagagctggggtctctgcccagggaggctcctgtctctacacaggaggggctccccgtgggaaaggggattggaagctgcgtttgcaaaaccaggacagaagaataggaccacccacaaggaaggaagggcaggagggagagggtggtgccccttcctccctgcagcctg

SEQ ID NO: 596 - DNA, 435 bp, Homo sapiens
tgaaaaccactgatttatgccaacattccaaggtaaggagctacgggggtaatgaaatttgagtagaatgaagtctcactggtatggggaggatgaatttcttgacacactggtgtcatggaaaagagcccaggttttgggctgggtgtagtggcgcatgcctataatcccagcactttgggaagccaaggcagaattgcttgaagccaggagttggagaccagcttgggcaaaaaaagctagaccccagtctctacaatttttttttaattagccaggtgagatggtatgtgactgtagtccgagctactcaggaggctgaggcaagaggattgcttgagcccaggagttcaaggctgcagtgagccgagattgggccactgcactctagcctgggtgacagagggagaccctgtctcaaacaaacaaacaaaa

SEQ ID NO: 597 - DNA, 250 bp, Homo sapiens
agaaacaaaaagaaaaaaaaggcagacataacttttctttttttttctctcagtcccaccatcccaactattttttccctagttaggactccacactatcaacaccttgattttagatttctaccctccagaactgtgagacaataaatttctattgttttaagcacccagtttgtggtagtttattttggcagccctagaaaactaatagagattttggtattgggaaatgggatccttgctgtaacaa

SEQ ID NO: 598 - DNA, 415 bp, Homo sapiens
cctgaaagctctctttcctttataaaaatgttttacaagactactactaatcttcatcacacaaagcgctattattctggttttatagatggatatattgaagactatacaagtttgtaatttttctcttccttcaagatcaggaatgaatgatgagtgcctcaggtcatatgaagctgtacaagatatatgctcccagtaaggtcacagtacgtcaagagttgggtctattctctacttcatcattttccccaggggctcacagactcactggaaaaatttacacttaaccaaactcacaagaggttggctcataaaccataatatcaactccaaaattcaaaccagaaaatatatttagcaggtttcttttggaagattctctgcactaacacaattacagaaaagagaatga

SEQ ID NO: 599 - DNA, 384 bp, Homo sapiens
aatttagaggtgggaaaatggaggttcatagaagttgaattgtgtgactatgaataagtaatttccttgaaggtgcgttggaagcagagttcagatttttcagtcttaagccagatctctaccctctcttctcgattgcctcttttcttgctgttttgaaagcagtgatgagactttgattttatttagatatttataattttcttatagcattatgttaccatcatagggcatatcagtaatagtaacatactacatatgtcaatgttagacatttaatcacctctagcaacctacaagcaaataaagagacaaaactcctctggaccagcactgtccaataaaattataatttgagccacatatgtagtttgaaattttcct

SEQ ID NO: 600 - DNA, 370 bp, Homo sapiens
gagcaattaacagcagcactgctccaagtgagagagtcttagccaccaagttcacctttagagcttttggataaggcagatgcccacatcctaccctagactagggaatccaaatctcagttgcctggtaaagaaaggctctcccagcaattctggtgaccacctaaggggaggccaccgtcacctaattggcagcataagtatttgccaaataagcataacaggataatgagatccagcacaggggttagctcaggcactgcctctccacaaactttccctgaacttcaggtccaaccaagcacctatgttctcacagcaatcttctccaatgcatgcttttctttcttagtatttatcatgttatatt

SEQ ID NO: 601 - DNA, 499 bp, Homo sapiens
gcattttgcatttctaatgtaagggagatgtgagaataagagtcagtagtaggagtaggagatgtgacaacagaagcaagtgtttggagtgaaagaaggaagagttcatgagccaaggaatgcaggcagcctttaggaggtgaaataggcaggaaaacagattattcactacagtctctaggagaaaacagacttgacatctacttgatttatctcacctaggggtgtttgccagcacctctactaacactacattaatacatttgcatttcccaatgaagaaggttgaaaggtataatgtataatttccatttggatcttcccattaatgtaatactcatttccactttctcttctattatctctctcaatcatttccctatgtttctatcaccttagaggttttgctgccatattacttgataggaaaataacaagttttaatacaagatgtgtgatatgagcccaatattgtaataaacatttaaccctatatgta

SEQ ID NO: 602 - DNA, 386 bp, Homo sapiens
tccccagctaataggtgtaacaggataggcacttagttaatacaaattaagccaaagcacaagtcaagtgttaaagagagcttcatggcagtgctgcattgcctcacttatccagagagccagtagccaacctatttagacagctgacagtaagaaggaagcaaatgagacctcaagccaggccctttctcagagccttaaacttttattttagggatggtctactgagcttaatgatgtggtttttctaacccttagcagataaaagtgcaaattcaagctggaataggggattgctagaagcaagcataccaacagaagcagagataaacttgattgtgagaaaggaagaaaaaaaaactgggaaaagcagagctcagagctga

SEQ ID NO: 603 - DNA, 810 bp, Homo sapiens
ctagctgagacgactctcttaatttttccaccgctacaggatcatgaacatttgcagtcactgtttctgatgggtgttcattgtcaacaagcgaatagatttctgcatctctccgaaatagtcttcgatgtttttgatgatgagggagtgttctttgcgacagccatttcctttgatcacttaactgtgtgggccgcacggtctcgggtctgtcccttcacgctccatgacaaccctttacccccaaactgtgaatcacccaaatgtctgccagctggtgagggataaataaccgtggtacatttaagcaacggaatactactcagcaatgaaaaagaacaagcgacagaagcgttgagaaaacatagataaggcctgaagtgtgacgctgaaggaagccagacacaaggggacacgttgatgattccactgatactcagtttctagactgcattttaaattgatagattttcagcttctcagtgggacacactaagttacgaagtacctggttaccttaattctttctcaactgctctttgattttctttttattttctatataaacttgctcttttccttttagagctttttctaaaaggaactcttaacttccatttaaaagctctgtgatcagcagtagaagaaataaatgatccgttaaccagccattctaatcaggggtagcgttaaaagctttttcaccttgctattttgaagacgtttacttctttaaacaaatgattccaattaataaatacagaggcggcccgttccttaagggaggtataccatgaccctcctcctggc

SEQ ID NO: 604 - DNA, 1025 bp, Homo sapiens
ctacatacatctatttttctatatctaatctatgtatatatatatataatctatgtctacatatatatctaatctatgtctacatatatatctaatctgtgtctacatatatatctaatctgtatagctttgtctatatctacagatccatatttatatctatatcttatccataccaatatctatatttacatatgtattagtaatatatatacacacaccgtaaaatctaaagtatttttttatttgttaaggatcatgaacatttgcagtcactgtttctgatgggtgttcattgtcaacaagcgaatagatttctgcatctctccgaaatagtcttcgatgtttttgatgatgagggagtgttctttgcgacagccatttcctttgatcacttaactgtgtgggccgcacggtctcgggtctgtcccttcacgctccatgacaaccctttacccccaaactgtgaatcacccaaatgtctgccagctggtgagggataaataaccgtggtacatttaagcaacggaatactactcagcaatgaaaaagaacaagcgacagaagcgttgagaaaacatagataaggcctgaagtgtgacgctgaaggaagccagacacaaggggacacgttgatgattccactgatactcagtttctagactgcattttaaattgatagattttcagcttctcagtgggacacactaagttacgaagtacctggttaccttaattctttctcaactgctctttgattttctttttattttctatataaacttgctcttttccttttagagctttttctaaaaggaactcttaacttccatttaaaagctctgtgatcagcagtagaagaaataaatgatccgttaaccagccattctaatcaggggtagcgttaaaagctttttcaccttgctattttgaagacgtttacttctttaaacaaatgattccaattaataaatacagaggcggcccgttccttaagggaggtataccatgaccctcctcctggc

SEQ ID NO: 605 - DNA, 293 bp, Homo sapiens
gacagcaagtattgatgtatctaaacatatctaaatacagacaagatacaataaaattcccatgtaaaagataaaaaaggagcctgtaatcccagcactttgggaggccaatgcaggaggatcacttgaggcaggagttcaagaccagcttgggcgatatagtcaaacccctccaccccaactatctcttcaaaaaaatttaaaaattagccagatgtgctggcacatacctccttgtggggctgaggtgggaggattgcttgagcccaggagtttgaggctgcagtgagccg

SEQ ID NO: 606 - DNA, 471 bp, Homo sapiens
caaaactccatctcaaaagaaaaaagaaagaaagaaagcattcaggggagtgggagccagtgttgcaccggatgtagctgagaggtcaagacaagcaggaggtgtgatgttggacccaacaccatggggaccccgacaagagcatttccagagtaggaacagcaagatgtgaacatttgattggaaatggtgtaagagagaactgagaacgtctcttgtgagaaattttgctgtaaaaggaaacggagaaatggggctggagctggaggaagtccagagagtttttgttgtgattttgttttaatgtggaagaagtgacgatgtgtctgtgtgcccgtgggaatgagtacgtgggggctggggacctgctggagcaatgaccttcaggaagcaagagaaaatggggaaaataggccaggcacggtggctcaatttgggaggccgaggtgggcagatcacttcagcccagga

SEQ ID NO: 607 - DNA, 600 bp, Homo sapiens
agaacagctttttgagagaagcttctaaaaatgagacacagacttggaacacagggagctttggaccagagagatgaggagctgggaaagatggtcgatagaggtgggagatagtggccaacttcagagctttgaacaactttacccaagtgcccactttggtcacttttctcccccattacatgggaagacccctgaagacgcgggctatgtcccctctttccctgaaacttgcccaccatggatattcagtctgtgttttttattgatccagttatgggcactttcagcattgttcagatgattgcttgatggggagatcacagcagtggaagtgacagctaacagggaccccacttaaccagggaggaaaggggactctgagggactgagtgatttgtccaaggtcacagagtaaagagatggcaaagccagagaaggcattggttttgagtccggtgttctttgagttcactgttcacctctctcctgcccttgtcctcttgggagaagaagaaggtgttcaccgattcctgcccacccccacatacagtgcaatggggggcccccagagacacttcccaggtcactggttgagga

SEQ ID NO: 608 - DNA, 457 bp, Homo sapiens
gaactctgagttctcctggggagaaacaaaccttttaaatcatcacaagcagctcccctgatctgcggcaccccctctccaatgccagaagctgccccctcttccaccaccctctcctgacaatccaaatagaatgagcaaagcggtttttttcaccctacgttcctcaggccagatacattctagagaattgtgagactttgccctaagctgccaagtgctccccaaggagatcggtcaccaggagagcagccacaaaggtcaagaaagacacacacggaagcaaacccaggctctgtgctccttccagcccttgctggtgcagatgctaccccacaagcttgtcagatcgcccaggtgacgggccaggcgcagccatcgggaaggtcattcagccaacccagaggatgtagaccctgtcctcaagaagtgcagggcgagttctgccgtgccctct

SEQ ID NO: 609 - DNA, 143 bp, Homo sapiens
caaaaaaaaaaaaaaaaaagagagagaaatagttatttctatgtagaatggcggaaggaatttaatggaggtagagatgaaagctgttgttaaaaatgtaaaatggggctggtgtggtgactctcacctgtaacatcagcact

SEQ ID NO: 610 - DNA, 417 bp, Homo sapiens
tttaatatgtgagaaacctgagctctagggagaagataactaatttcctctacacaacctggtggaggtagggatagaactggcttcttaggctcttctttatattgcaacaaattgcctctcatcaaacaaactttttaaatagtctcttattatattcctgtgttccctgtgaaatgtaacatttataatcaattgacaattataagatttatatcattagacgagagcagtatattatggtgaataaaatcacagcttctggtgccaaaaacagctatgtttaaattctggctctattgtctttttttgtgacttggacaagttactaatttttagtcgcctctgttttcttttgggtaaaagaaagagcacctacttcacatattgcttgtaaaaattaaattagttaagcca

SEQ ID NO: 611 - DNA, 779 bp, Homo sapiens
tcactgcaacctccgtctcatgggttcaagcgattctcctgcctcagcctcctgagtagctgtgattacaggcgcctgccaccatgcctggctaatttttttgtatttttagtagagatggggtttcacgatgttagccaggctggtctcgaactcctgactgtgtgatccacctgcctcagccccccaaagtgttgggattacaggcatgagccactgcacccggccccaactgctcttctttcagttcctcaaatgcatggtgctgcttcctgcctcctggactttgcacgtgctgtgccctctgcctggaacaccctttaccctctttacccggtccccccagtaacttgtacttcctctgtcacagccctctttatgctgacctgcagcaaaccaagcaccctgtgggtccagggactgtgtcatgttttctgccatctccctgaacctttgtaaacacaaaagcacaggcattactgccccagggaccttgatccaaactccagctctgccacttaccagctgaggaacctcatgcaacctcttccgtgattggacctcagcttcctcatctctgaagtgaggatcacagcaccagcctccccgtgctatgtgaccacctttcataggggaatgacacaagatctgtgctgccctcacacatgggggagcagcaggggcttgcatgggccaatatgggcattctttttttttttttttttgagatgaagtctcactctcttgcccaggctggagtgcagtggcgcaatctcagc

SEQ ID NO: 612 - DNA, 429 bp, Homo sapiens
aaaatttttaaaatttaacaattagccaggcatggtggcatgcactgacggtcccagctgctcagaaggctgagctgggaggataacttaagcctaagaggtcgaggctgcagtgagccatgttcataccactgtgctccagcctgggttacaaagcaagactctgtctcaaaaaaaaaattttttttgcatatatgttacactgtattatatgtattatgtatgtatagatatttgttagcacaaaatattaaaatggactagaaagcttggttctggataagatggcctgaacacaccctccagtctcgcttccactgaatgcagctataaattccaaagagaatacatgaagcagctatttgaggactctgaaaagtaaacagtagcaggcagataggggaagaagatcaaaattttaagaaccac

SEQ ID NO: 613 - DNA, 430 bp, Homo sapiens
gaaaggtgaggagaaagggatagagtaagggggcaggaccttggcctcccaaagggctggaattacaagtgtgagccactatgcccggccaactttaattctttacatcttcggcacatttattttctgattgctctgtatgaaatcaaatccagccataactttattgctagcatgcttcagttatctatttctgtaaacaagccagcttagccgcagtagtataaaacaaaaactgttttattatgcttctggattctgcagtttaggaatttaggcagggtatggcagggatgcctggtctctgcatcatgatgtctggggcctcagctagaatggccaaggcttcaatagccagggagactcaaaagattgaaatctaaaatcctctgaaggcttctttactcttatgtctgtatctgggctgaga

SEQ ID NO: 614 - DNA, 261 bp, Homo sapiens
gcaagaatcctgttaaatcagtttagacagaatcctccacccttaatatctgatcaccttcagtatctgaccaaattcttcctctctcaccatctcccaggtaatatgggatcactgtggcctgtcttcagtaagaatcttgttaggtcagcttatcaagaattatcttacccttgcagtagtttttaaactactgaccctccacattcttcttcttggctataaatttcctcttgtggacattcccaagaatggtcgacg

SEQ ID NO: 615 - DNA, 439 bp, Homo sapiens
accaaaaccatttctgaatggggagtggggaaaaaggaggaagaagtattaagagagcaagaattctacaaaatcaggatgctaaagaaagggactttcaaaaggggggattttagtcccgtcctgcattatattttacatgttttgggcttatctgttttccttttaaaataaaaatatgtttctatattgttagggcaacagttgttattgttactttaacagtgttcaacactgtgctgaaggtactgctaaggacattgttaggcatttaataatacttgcttattgattaatttttataatatccaaataatgataaaaaatctcacttattacatttataatgagcagttctaggtgcattacatggatcatttatttaatccccacaatgagcaaatgaggtaatgttcattatttcaatgaaggtagaata

SEQ ID NO: 616 - DNA, 277 bp, Homo sapiens
tgtttgacagagtcttgctctgttgcgcagtctggagtgcggtggcatgatcctagctcactgaagttttgaattcctgggctcaagcaatccttccacctcaacctgccttatttggacattgtgtgatgagacatttggcttatttgggcatgatgtgatgagttggctactgtgattggctaaaacctggggttcctgtgattggctaaaattccgtcattttttatactcttatgttaggttttagcttgtttatttattcagtttatggttt

SEQ ID NO: 617 - DNA, 279 bp, Homo sapiens
actatgtgttttgttatatttacatccaatgaattaatttctggagcaattgtaaataatattatattttaaatttcattctccatgtgtttattgctagtatatagaaatgaaattcagttttttaaaaaaagaataagacttttaatggcagttttatatttacagaaaaattgagtagaaagtacagagggttcccatcccaccacctacacagtttctcctattattaacatcttgctttatcttggtacgtttgttacaattgatgagccaaca

SEQ ID NO: 618 - DNA, 488 bp, Homo sapiens
ttctgaagttccttgcgtctgaatgtgtgctatactgcttgacttaatttcttacaaaagattgtcaagagatacttcttttcaagggcacagtcgaatgatgaccgtccactatcaggcattttgttatcagcacttgtgggtagtgtcaacagggatctcttggctgctgggaacttgaggttgagatgacactgcagttgcatttctgtaacagcatccttttctttcatctagccctcacatatttattgagcatctgttccattctaggcaggacttgagagattgaagtaaatagagaacacttgtccttagggatctgttgtaaaatggggagatgaaaatgttggcggggtgctggtagctcatgcctataatctcagcactttgggaggccaaagtgggaggtctgcttgagcccaggagtttgagggcagcctgggcaacatagtgagaccttgtcttacttaaaaaaaaaaaaaaaa

SEQ ID NO: 619 - DNA, 407 bp, Homo sapiens
gaataaaaatgtcttggtcttaaaattttggttttgccaaggcagtcctattttacccactctcttcaaaatgaccttaaaattaacccacttcctgaagaagtggctgctttattattcatttcataaacatggtatttttgattattaacaaagaagttagacgtgctgtgtcacatgtgtatgagttttatggtaaggactttccagttgttgttgtgttatgtatacaaaggaatgcttgtgttgagtggtttttgaaaggtccatggaaacctctcttttctcatttaaagtctgggaaaactctcttttgtatgctgtgagatgctttatacactgtatttaaaagctccactaagagaatttattaaaatattttctggcagtagtccttgaagaagata

SEQ ID NO: 620 - DNA, 2274 bp, Homo sapiens
gaatacttagctttatgtaacagatgcatattcactgaatttttctaaactgaatcatattttaacctcatagaaggatcttaacttacttatgaaaggaacctgatgaagaatcagcttataaaccttcaacttaactttttaaaaatgtgactttccctatgacaaaccaacagtttatcatagttttaaagagtagctattattcacctgactctgaggtagatgctggggttattaaccaaaggaagacagttctcacgtggaaggattcactgataatagattgggaggttattctaaattccacaagctaagagggagtagcaaacagcattgaatagttatgttctagatgggagtattcaaaccaagaagactcaggggagggggtcttccctacgatctagtggaagaagtgcgatcaagccaggctttgaaaggtagagaggatttggacaggatttgggaatagcagctgggtttggtagccacagaattcagtcttgattgagtttcacttttcctgaaaacaaaggacagttcctctgagccaccttaaacctggtttccactaagactctgatacaacattcaggaacacaaagacccgattgcaatcctattaagatttctttcatgcttgtttaattatgacatacagaacagcaataatattaagtcgagtttaattatttttaggtgagcctttatttttcaatatatcttttcctctttaaaaatttcatctctacacaattctacccatcccccaccctttggcatttcctgccaggcctgggaagccaaattctggagggctttgctgcaaaggaaacaaagggtgaactagagaatctcccttagccaatctcccttgctgccctagggaaaatgcagcatggaaacatccttacaaagcaacgggagacgtttttcaaatgcgtttgaatcatctgtgtgagcacggggagaagtgagaaaaggagtgttaacaacgtaggagcaaaagtgtcatttcaaggaactcaactctgaagaacagaaacactaaaccaaaaaaaaaaaaaaaaaaaaacgaagtaaaaattaggccattggtagattttgttctaaagagacagctatgtcagattaaatctaaacgagctgacagagccgttgaggatgggtctctttcctgctagaccatactgtctacctgaggcaccactactactccgaaggagttggagagtgtgtgagcaggtttggtgagtgcttttcgagaagagattgagatgctcaacacaatgagttggtttgtgggtcaggcagccacctgggaatcaatatgctcgccagtaacagattacaagcagagatagcctcagtaatttgcaatggattttagagaaatgagatccgtggtagaggttacaggcttagtgttggcagaatcagttattaatagaatcagactccagggaagtccatctctttacttctgaagaccatctttgcttgatagtgggctggacagcaatgccatttattctaatcagccaattaacacatctttagtgagcacctatggtgtgcaaatcactgcaagatgtgacaagacttttatggcaggacctttggtcaaactagttgaggggtaagctctactctcttgtgaaggaatgcacgggtgtatgtgtgtggtggcgtgtgtctgtgtagatgagctggcggttctctggccggtcagagaaagatcgtcactggtttccacgatcaagcaaggcttcatggagcaagacaacttcacccaggtcttgaagcataacaggattcattctgtgtgataaaggaaaagttgtggagtttgttaatgctcatgtgtcccaggggcagagaaggatgtgttggctcttaatctaactgctgcagcttcgtgtaacctctttgcatataaggaaaccttacatttgaataggacctttgcttttaaaagtgccctgactggctaggtgcagtggctcatgcctgtaaccccagcactttgggaggccgaggcaggtggatcacctgaggtcaggaattcgagaccagcctgaccaatttgatgataccccatctttactaaaaatacaaaaattatccggacacggtggcgggcacctgtaatcccagctactcaggaggctaaggcaggagaatcgcttgaacccaggaggcagaggttgcagtgagccgagatcgtcccactgcactccagcctggggcaatagagctagactctgtctc

SEQ ID NO: 621 - DNA, 2122 bp, Homo sapiens
gtagaacctaccctggacctggaagcatgggtggcatttgcaagagggtaggggtaaagacatggctgctgaaacctagaaattatttccaaatctcatttgtattatttttccaatgcttgaactcccaaccaatgctatctcctacttcttccaaggaaatgataatggctaaaccagagcaaagaaggaagaggagaaagggagggtatttggaaaataaggagacagattcctgcatctacaagatcagatgcctatcggtagaggagggaggtaatgctgtgagccctccttattggactgctaggctctaaaacttaggggcttggtcagggtttgtgggggaagtgacttttggaattgcctctcccagttcccaggttcccattcaggcattgactacaagggataggagaaccactgagaggtagttttgttttttttttctggaagttacaggaaatgaaattcccagatttttagagtctgtgcatttgtatttatgacccccattgttgaaaccattctctccaacaggatcccacaaaacctgtcttgaataatttcatgatttttcctctttaaaaatttcatctctacacaattctacccatcccccaccctttggcatttcctgccaggcctgggaagccaaattctggagggctttgctgcaaaggaaacaaagggtgaactagagaatctcccttagccaatctcccttgctgccctagggaaaatgcagcatggaaacatccttacaaagcaacgggagacgtttttcaaatgcgtttgaatcatctgtgtgagcacggggagaagtgagaaaaggagtgttaacaacgtaggagcaaaagtgtcatttcaaggaactcaactctgaagaacagaaacactaaaccaaaaaaaaaaaaaaaaaaaaacgaagtaaaaattaggccattggtagattttgttctaaagagacagctatgtcagattaaatctaaacgagctgacagagccgttgaggatgggtctctttcctgctagaccatactgtctacctgaggcaccactactactccgaaggagttggagagtgtgtgagcaggtttggtgagtgcttttcgagaagagattgagatgctcaacacaatgagttggtttgtgggtcaggcagccacctgggaatcaatatgctcgccagtaacagattacaagcagagatagcctcagtaatttgcaatggattttagagaaatgagatccgtggtagaggttacaggcttagtgttggcagaatcagttattaatagaatcagactccagggaagtccatctctttacttctgaagaccatctttgcttgatagtgggctggacagcaatgccatttattctaatcagccaattaacacatctttagtgagcacctatggtgtgcaaatcactgcaagatgtgacaagacttttatggcaggacctttggtcaaactagttgaggggtaagctctactctcttgtgaaggaatgcacgggtgtatgtgtgtggtggcgtgtgtctgtgtagatgagctggcggttctctggccggtcagagaaagatcgtcactggtttccacgatcaagcaaggcttcatggagcaagacaacttcacccaggtcttgaagcataacaggattcattctgtgtgataaaggaaaagttgtggagtttgttaatgctcatgtgtcccaggggcagagaaggatgtgttggctcttaatctaactgctgcagcttcgtgtaacctctttgcatataaggaaaccttacatttgaataggacctttgcttttaaaagtgccctgactggctaggtgcagtggctcatgcctgtaaccccagcactttgggaggccgaggcaggtggatcacctgaggtcaggaattcgagaccagcctgaccaatttgatgataccccatctttactaaaaatacaaaaattatccggacacggtggcgggcacctgtaatcccagctactcaggaggctaaggcaggagaatcgcttgaacccaggaggcagaggttgcagtgagccgagatcgtcccactgcactccagcctggggcaatagagctagactctgtctc

SEQ ID NO: 622 - DNA, 910 bp, Homo sapiens
gtagaacctaccctggacctggaagcatgggtggcatttgcaagagggtaggggtaaagacatggctgctgaaacctagaaattatttccaaatctcatttgtattatttttccaatgcttgaactcccaaccaatgctatctcctacttcttccaaggaaatgataatggctaaaccagagcaaagaaggaagaggagaaagggagggtatttggaaaataaggagacagattcctgcatctacaagatcagatgcctatcggtagaggagggaggtaatgctgtgagccctccttattggactgctaggctctaaaacttaggggcttggtcagggtttgtgggggaagtgacttttggaattgcctctcccagttcccaggttcccattcaggcattgactacaagggataggagaaccactgagaggtagttttgttttttttttctggaagttacaggaaatgaaattcccagatttttagagtctgtgcatttgtatttatgacccccattgttgaaaccattctctccaacaggatcccacaaaacctgtcttgaataatttcatgatttttcctctttaaaaatttcatctctacacaattctacccatcccccaccctttggcatttcctgccaggcctgggaagccaaattctggagggctttgctgcaaaggaaacaaagggtgaactagagaatctcccttagccaatctcccttgctgccctagggaaaatgcagcatggaaacatccttacaaagcaacgggagacgtttttcaaatgcgtttgaatcatctgtgtgagcacggggagaagtgagaaaaggagtgtttctgttcttcagagttgagttccttgaaatgacacttttgctcctacgttgttaacactccgtcgcacc

SEQ ID NO: 623 - DNA, 2183 bp, Homo sapiens
atttttcagaataaaatattttaaaagaaaaaaaaagttaggcacatttaacttgtaaaagttagtgtccctcaaattctagaacattcatagacatgaaaatcaccctgcaaaacaaaatccccttcgttcaaagagagctgctcttgcagtctctgctctctcatttctttattcactctataatattcagtgtggggttactgtgctccagcgccaagtccagggggtggagaataacaagggcagagacatagtccttgccctccaagcacctgtgatggtaatacagtgccatgggagcttggtgaagggcctcagccggctgcagagttaggcttatcaaaagtggtgatctctacggtgaatcctggaggacacaatggggtggggaacagaaacagttgttccaggcaaagaagggaggaatctgtgccaaggcccaggggctggtgaacctcaggcgtgtgctgggggtgctgcctcctcccaaatgtcggggcacagggaagtcagtctcgcttatcatggtggccacttggctctacaaacccccattgcccaagtccccacaggcaaaccacacaactgctcttcttctcactcttttttttaagccaagaaagaactcactgaaacagccagtcagtcagggatgagtccaaggctttcctgacagagtgaccatgtttggcttggctgaaaatcacaaagccttggtttcccagttgcgtgattctctttgttctcaaggcttagtgcagcattacagtgggatggctaaacagagaaaaaaaaaaaaaggaggtctatttctttctcttcatacaaataaatatttgcccaagaatggaagtgcttaattcttaagaataaccaaatgctttggacttcttaacaagcaaatcatatacaaagcaattcagtgttcctactaattgagaaattgtttttagcaagaagatgttatgcagcatgtttttaaaaaacaagtttttccaacaacaacaacaacaacaaaaagaaaaaacagaaaataactgaatcactataatatccccaaaggctggctttcacaccatccaagggtcacagctcacgctacattgaagcgtatgaaagagtgtctgcttgtgttacaaacctgatggagcagaggtggggcaggggggaaatgaaagcaaaagggacagacttgaagctgcacttttgcaatcaactaacagttaggaaggacttgacttgctggggctaaggaaaacaaatctggaggttcattttgcctgtgaaattaaaattatactttagtaaataaagctgacgccatttaaccatgaacccggtgacatttcctggcttgctgcagcgtttctgcttgtctccttgttacatttgtttaaaatacaaacacagcatttccatgttgccagagaagcaaatgtgggctgactggctgattttagctgctatggtttttctgtaacctttaacaattgttgtgacaaataagattccatgtaaggtgcaatttctaactgtgcagtgtttgtgaaccacatccaccttctccaggtttggtatttggtcgactaagttgacgatgtcattacctttccttccatttaaaaaaaaaagttaatctgaatcgtgctgagagtttggtatgcacgctatactattcaagggagcattctcttctgtgtcagaataatatatttatgtgtgtgaatcattatacttgaatttgtggcaacattttgtatcaatgaatatatatgacacccaggctgactacaatggcttcaaagagtttaatttctcttaaatggactcagtatccttggaatgtgctgtttaagtgtttctgaattttctacacgccatttttacaggtccatctgtttatgatgtgatgagataaacaatcacgttgattttatgtttcttttcaaagaaaatgaatgtatatagtactaagcagatgaataaattattgaaaaaatatacttcatggatcatgcccactgataaaaatgaatttattttatttgttgaacaaactgactgttcaaattataagaatttatattgtccttattaatatgaatgccatctatttaagtgttgttcaatattgatatgtgttctctaataaaatattttaaacctctttctttaaacac

SEQ ID NO: 624 - DNA, 2130 bp, Homo sapiens
atttttcagaataaaatattttaaaagaaaaaaaaagttaggcacatttaacttgtaaaagttagtgtccctcaaattctagaacattcatagacatgaaaatcaccctgcaaaacaaaatccccttcgttcaaagagagctgctcttgcagtctctgctctctcatttctttattcactctataatattcagtgtggggttactgtgctccagcgccaagtccagggggtggagaataacaagggcagagacatagtccttgccctccaagcacctgtgatggtaatacagtgccatgggagcttggtgaagggcctcagccggctgcagagttaggcttatcaaaagtggtgatctctacggtgaatcctggaggacacaatggggtggggaacagaaacagttgttccaggcaaagaagggaggaatctgtgccaaggcccaggggctggtgaacctcaggcgtgtgctgggggtgctgcctcctcccaaatgtcggggcacagggaagtcagtctcgcttatcatggtggccacttggctctacaaacccccattgcccaagtccccacaggcaaaccacacaactgctcttcttctcactcttttttttaagccaagaaagaactcactgaaacagccagtcagtcagggatgagtccaaggctttcctgacagagtgaccatgtttggcttggctgaaaatcacaaagccttggtttcccagttgcgtgattctctttgttctcaaggcttagtgcagcattacagtgggatggctaaacagagaaaaaaaaaaaaaggaggtctatttctttctcttcatacaaataaatatttgcccaagaatggaagtgcttaattcttaagaataaccaaatgctttggacttcttaacaagcaaatcatatacaaagcaattcagtgttcctactaattgagaaattgtttttagcaagaagatgttatgcagcatgtttttaaaaaacaagtttttccaacaacaacaacaacaacaaaaagaaaaaacagaaaataactgaatcactataatatccccaaaggctggctttcacaccatccaagggtcacagctcacgctacattgaagcgtatgaaagagtgtctgcttgtgttacaaacctgatggagcagaggtggggcaggggggaaatgaaagcaaaagggacagacttgaagctgcacttttgcaatcaactaacagttaggaaggacttgacttgctggggctaaggaaaacaaatctggaggttcattttgcctgtgaaattaaaattatactttagtaaataaagctgacgccatttaaccatgaacccggtgacatttcctggcttgctgcagcgtttctgcttgtctccttgttacatttgtttggctgattttagctgctatggtttttctgtaacctttaacaattgttgtgacaaataagattccatgtaaggtgcaatttctaactgtgcagtgtttgtgaaccacatccaccttctccaggtttggtatttggtcgactaagttgacgatgtcattacctttccttccatttaaaaaaaaaagttaatctgaatcgtgctgagagtttggtatgcacgctatactattcaagggagcattctcttctgtgtcagaataatatatttatgtgtgtgaatcattatacttgaatttgtggcaacattttgtatcaatgaatatatatgacacccaggctgactacaatggcttcaaagagtttaatttctcttaaatggactcagtatccttggaatgtgctgtttaagtgtttctgaattttctacacgccatttttacaggtccatctgtttatgatgtgatgagataaacaatcacgttgattttatgtttcttttcaaagaaaatgaatgtatatagtactaagcagatgaataaattattgaaaaaatatacttcatggatcatgcccactgataaaaatgaatttattttatttgttgaacaaactgactgttcaaattataagaatttatattgtccttattaatatgaatgccatctatttaagtgttgttcaatattgatatgtgttctctaataaaatattttaaacctctttctttaaacac

SEQ ID NO: 625 - DNA, 2128 bp, Homo sapiens
atttttcagaataaaatattttaaaagaaaaaaaaagttaggcacatttaacttgtaaaagttagtgtccctcaaattctagaacattcatagacatgaaaatcaccctgcaaaacaaaatccccttcgttcaaagagagctgctcttgcagtctctgctctctcatttctttattcactctataatattcagtgtggggttactgtgctccagcgccaagtccagggggtggagaataacaagggcagagacatagtccttgccctccaagcacctgtgatggtaatacagtgccatgggagcttggtgaagggcctcagccggctgcagagttaggcttatcaaaagtggtgatctctacggtgaatcctggaggacacaatggggtggggaacagaaacagttgttccaggcaaagaagggaggaatctgtgccaaggcccaggggctggtgaacctcaggcgtgtgctgggggtgctgcctcctcccaaatgtcggggcacagggaagtcagtctcgcttatcatggtggccacttggctctacaaacccccattgcccaagtccccacaggcaaaccacacaactgctcttcttctcactcttttttttaagccaagaaagaactcactgaaacagccagtcagtcagggatgagtccaaggctttcctgacagagtgaccatgtttggcttggctgaaaatcacaaagccttggtttcccagttgcgtgattctctttgttctcaaggcttagtgcagcattacagtgggatggctaaacagagaaaaaaaaaaatgcttaattcttaagaataaccaaatgctttggacttcttaacaagcaaatcatatacaaagcaattcagtgttcctactaattgagaaattgtttttagcaagaagatgttatgcagcatgtttttaaaaaacaagtttttccaacaacaacaacaacaacaaaaagaaaaaacagaaaataactgaatcactataatatccccaaaggctggctttcacaccatccaagggtcacagctcacgctacattgaagcgtatgaaagagtgtctgcttgtgttacaaacctgatggagcagaggtggggcaggggggaaatgaaagcaaaagggacagacttgaagctgcacttttgcaatcaactaacagttaggaaggacttgacttgctggggctaaggaaaacaaatctggaggttcattttgcctgtgaaattaaaattatactttagtaaataaagctgacgccatttaaccatgaacccggtgacatttcctggcttgctgcagcgtttctgcttgtctccttgttacatttgtttaaaatacaaacacagcatttccatgttgccagagaagcaaatgtgggctgactggctgattttagctgctatggtttttctgtaacctttaacaattgttgtgacaaataagattccatgtaaggtgcaatttctaactgtgcagtgtttgtgaaccacatccaccttctccaggtttggtatttggtcgactaagttgacgatgtcattacctttccttccatttaaaaaaaaaagttaatctgaatcgtgctgagagtttggtatgcacgctatactattcaagggagcattctcttctgtgtcagaataatatatttatgtgtgtgaatcattatacttgaatttgtggcaacattttgtatcaatgaatatatatgacacccaggctgactacaatggcttcaaagagtttaatttctcttaaatggactcagtatccttggaatgtgctgtttaagtgtttctgaattttctacacgccatttttacaggtccatctgtttatgatgtgatgagataaacaatcacgttgattttatgtttcttttcaaagaaaatgaatgtatatagtactaagcagatgaataaattattgaaaaaatatacttcatggatcatgcccactgataaaaatgaatttattttatttgttgaacaaactgactgttcaaattataagaatttatattgtccttattaatatgaatgccatctatttaagtgttgttcaatattgatatgtgttctctaataaaatattttaaacctctttctttaaacac

SEQ ID NO: 626 - DNA, 1785 bp, Homo sapiens
gtccagggtgttcccaatatacccacaagacaacatgttcaaaacttcatcacctggtccccacaaacctaccaccctcttccattccctcactctggtaaaagcaagccatcttctccagttacgcaaggcagaagcccaggagtgagcacaatgctgccctttcccttgcttctgacttctcatcaatcctattagaactactgactgcaccccacctctcctccatccccacgatcactgccttcatatgaactgcctttcctgtcctctggactttcagtggcttccttttttgctcacctgtccactttcttccccttccctctctccatccctccacatagtcatcagaaagatcatcaaaacaggcaaatgtgactgtattatttccctcacttatctttgtatgcagtttagagtgatttttaagagcacacactttgaaattaggagaacctgtgtctgaatcctgatttttgccatttgtgtgacttgtcaggttatttaatctctttgagcctgtccctcctcagtgaaataggaataataatacctacctcatagagttgttgtgaggattcagtgagatagactgtttctaaagtgtgtagcacagtgcctggcacatagtgggtgctcacattggagcacactattgtcgctatccctgcaggtgtgagttttacatcctttccaagaggcatttgctaataaccctaactaccgcctatccctgtgacactattttctgcctcagcaccctatttcttttgtagacattttctaagtctgtattttatttatttgttggctttttgtctatttctctactagaatgtaagctccatgagagcaaggatgtgtttgtctgatttcccgttacagccccagcacttagctgagtgactggcacctagtaagcactcagtaactgtttgctgaataaatggaagaatggtcaaaaggctcttcttgatctgatccctgcttgtctgtctggcctcatgctgccactattcctcactgcaccttcagctcaagaaaaacctctttacttgcttctttgaagtgccccttgggcctctgtgtctttgtacctgttgttccctttgcctgaaacaccctttgcctgcccgtctacatggtgaattcctaatcattgatgaagtctcagctcaatggctacctcctctgtgaagctgtccctgatttcttcaggcagatgttctttcccgccttccctgttcccaccgcactttgtaaatacctccatggaagcactttattgtattgtattgtaatttttttttgcatgtctgtttctactattagactgtaagcaccgtaaaagcagagattgtgctttttcatcctcatgttccccgagcctagcccagtgcctggcacgtaatagcttgtcattaaatatttgttgaatgaatctgtgaatgaacaagagtcatgcagttggaaaagtgttagaagctgtatgtattataaaggaaagaaatgcccttggtggcttccagggtgtttttttttttttttttggtctaaagaggagatctagagagtgttatacaatctctttgaatataagattactcgtttggatttttaaaataatatagatcttcataaataattgcaaagatataaacaagctttgtgatttctcaaatgctatgaagtccaaaataaatatttgcactattagtatttccatagtaaatgctatgagaaaatgtacagcaataaattttgaagctttaaaactgtttg

SEQ ID NO: 627 - DNA, 463 bp, Homo sapiens
ctggacactcaagatgtgtcaccacatggcccactgcacttattcaatctcttctcctgggaaccctggaaaatctctctgcttctaggctctgctgggagcaattcccctcctacaatgtcctccttgctcttttatttatccaacccaatcaagagtatctctgcttaaaaaattcttgctgaccacccaagccacaaagagctctcctttccttaaagcatggagtcaacagttatcttacctaccttcacatagttggttcttcctgtttgcacatcctgtttccctagctaaattgtaaacttcttgagttcacatttgtttgccttccccagaaggcagccacagactttccaaagggaaagttctgaacaaagattaattgtttggtcaggagctatcaaccatatcatcactcagtgcaagaccagtctctccagcctcttttgcctccactcca

SEQ ID NO: 628 - DNA, 501 bp, Homo sapiens
tatgaatggccgggcgcggtggctcacacctataatcccagcactttgggaggccaaggcggggggatcacctgaggtcaggaggtcaagaccagcctggccaacatggcaaaaccccgtctctactaaaaatacaaaaagtagccagctgtagtggcgcatgcctgtaatcccggctatgtgggaggctgaagcaggagaatcatttgaacccgggaggcggaggttgcagtgaaccaaaattgcaccactgcactccagcctggatgacagagcaagacgcctctccaaaaaaaaaaaaaaaaagaatatatgaggcctggccactggcacggggcaggttctcattcatggtgcctctacggtgctgatggccacattcatggagctggagcccgtggcagtcgccgtgcggagccctttgcgccaccgccttggtctgcaagtcctcctgacggtcctctgcagtggctgctttaccgctctctccactcctcggat

SEQ ID NO: 629 - DNA, 426 bp, Homo sapiens
agaaaattcaaaatctgaaatgctccaagtttgacactttttgagcactgacatgacattcaaaggaaatgctcatttggagtattttggatcttggatttctggattagatatgctgaactggtaagaatatgtgatacaaatattttaaaacctgaaaaaaatccaaaatccaaaacacttctgatcccaagcgttttggataagagatactcaacctgtatcggtttcatgcaactttttgaaatattagagatttaacaagtcatgactcacttcattgtctgtatatcgtaaatgttaaaggccaggcacggtggctcacgcctgtaatcccagcactttgggaggctgaggcgggtggatcatagggtcaggagtttgagacaagcctgtccaacatggtgaaaccccgtctctgctaaa

SEQ ID NO: 630 - DNA, 375 bp, Homo sapiens
ggccaccttattaggaaaccggtctctggtatttggaacacacacaagcgtggtcccgcctccacttccctaatgccctgtttaaatccctacatgaaagacaacgtgaaaggcagcacgtggtgacgtccatctcgcagcccagggcagtctcgccaggcctgcccagaaggggcctctggaaggcacgaacggaacctgtcctctttacgctgggcccagcacaggacgtgtttggatggatgctgcagtaacagggcctcctccctacccttgagggccaggcacactcaggacctccctccctctgccatccagaaggcaggtccagatctaaaccctactggaaaagaggcagtaaattgtatcaatgag

SEQ ID NO: 631 - DNA, 280 bp, Homo sapiens
cacttgcgaccctcctctcaggctgcttctgacaggcccaagtcacagccaacttcaggggagctgtgttggatccctccaaactccgggaatgatgtgacctccccggcgctcaccctgggcctctaggttagactcagcccagaccctggctcacagggaagcagagcccatggctggcctccacccgctcagacgcccgcacacaggccaggggagggcttgggggcagctctgggagggtccctgtttgcgctgtgggtgtccaaggctgggtgtg

SEQ ID NO: 632 - DNA, 578 bp, Homo sapiens
aagtattaagaattgcatgaggttgacatcagagagttttcacacagtctttggacagagctacacaaaggtactttttaagcctcagtcagtggcatacagaggcccacagctctgcttacacatggtggcatgaacagccccggcttcagatccctgagtagcacaatgcaatcaagagcagctaattctcaccctttggcatctctttttgcttgagtattcagctggtagcagccagcaaggattgtttattaaagattttattttggccctgcagtgttgggttatatgcagactgtcacctgattttggtttatcgttttgtttgccctcatcaggtccttgagtttagagatactttttgagctttaaaataagcaagtccatgagtggtctcaatgaccaggactgtgttttatttcctcctttcctcagagtccctggcttggctcctaggaggtgcatggtacctgttggatgatgatggtgatgacaaagacaatgagggcagataccacggttttcatgcttagtacccaccaggcatggtgctaggtgacacacctgcgtctgct

SEQ ID NO: 633 - DNA, 290 bp, Homo sapiens
aaaagtagaatttactagactctggctcacagaataaggtacattttagggtcagcatctggaaatacccctttctcatatttctctgttacgtgtctatgcctttaaaacagaagttttaaaacttgttgtatggatcatgttggaaataaagactatgaatcaagtgggactttggggagtccaaatgtcagcaaagataattcactagtaatgtcattgtaaaatctcccttaaattaactggaaatgtggcattatttgaagttataaatgaggaatttcacaacg

SEQ ID NO: 634 - DNA, 758 bp, Homo sapiens
gcagcccagaggggccccgagccaggccttaccctgtgttttctctcactctcctgagtgagctgctgggataccggatgtgggacaggcaattggtgtcaggacgtatcccaagcccttgagctgggccagagggtctgtctggtttaggacccctgtgtcagctttgcctgttggctgctttgtgacctctgagacgctttccttcctggtgtgtttggaaatagcactgcttagtctagtctaggctggttcttcctgacccagcagtgccctggggctggaaaagccctacaccctacctgttccctgccccaggcaggacagcactgaagtcacagtgaacaaaaagaacctcctcctctgtaccccagcaccatggctctctgtagagcagctcgagggcatcttggtcaccatccctcattaggtcagttgctaccaaggcactgtgaaagcactgcagagctgcagcccatcagggtcagaaagggacacaggaagactcagttctctggacatgagtcttgtatgtgccacaggcagagggctgggagggggcggggagggcaggatgcctggggatcagagtgcagagcccatgaggagcacaggctgcacaccagcttccaggcccagctctggcacaaatgagtctgtgtaattctgggcaggcgtgacctctgggtcacttttccttagtctaaagtgcgttttgtgatttgcatcaactcattggcgttttggtggcaagaagt

SEQ ID NO: 635 - DNA, 341 bp, Homo sapiens
caatattatactgtcatggagaacagatgagttgttgccagagttaacgaggagtgaaaggtgagcagtaagtggctgaggctatacaagggaagcataaggtatccttgcagtaacagaaatattttgcatcttgactacctatttcagtatcttgattatgatattgtacagtttgtacatccctaatctaaaaatttgaaatccaaaatgctccaacaaatttggagcaacaaatgctccaaaaatattcaaaacgtgttcattgctgacaagatatcacaagtaggaatttctgtacctgacttcatgtgacaggtcacagtcaaaatgcgggtgca

SEQ ID NO: 636 - DNA, 415 bp, Homo sapiens
ttgagttcctcctgggctttctgatcactggataaactgttgtatcattatttctaggtcgttgccccttccatacgagcatgtagactgtatatctcaggcttcctttttatgtcttgggtaatcggttgaataaatacacacataagcccaggcaaaagtagaatttattcacatcattgtattgcaaaggttttaacactgtgttgaattcttgcagtttctgtgtaaactctatggtttggttttaccactttgaatagttaaaaatgtctatttgcttttacttaatttagtgcagttatgtaatgtgtatgcttatgttttctcttgacaaacgcagaaactctgtagtccattgtagaggagctcagtttaaaataaaagctgaaacattctgtgtgataaaaaaaaa

SEQ ID NO: 637 - DNA, 354 bp, Homo sapiens
gggttcaagagattctcctgcctcagtctcctgagtagctgggactacaggcatgcgccaccacccccagccaatttttgtatttttagtagagacgggatttcacctggttggccaggatggtctcgatctcttgacctcgccatctgcctgccttggcctcccaaagtgctgggattacaggtgtgagccacggcgcccagcctaggccttattttcagagtggctttcatggatctagtagtgtaggcattatgaaataatatgatacttaatttcattgccattacagcttgatgtacatcaaacatcaatacataagcagttctctaaatgtattaaagagttgtacca

SEQ ID NO: 638 - DNA, 426 bp, Homo sapiens
ggggaggcctcagaatcatggcagaaggggaaaggcacttatcacatgccagcagcaagagaaaatgaaaaagaagtaaaagtggaaacccctgataaacccatcagatctcgtgagacttattcactatcatgagaatagcacgggaaagactggcccttatgattcaattacttcccaccgggtctgtcccacaacacatgggaattctaggagacacaattcaagttgagatttgggtggagacacagccaaaccatatcagtaatgtattatcattttacatattgctggattcaatttgctcatcctttgttgagaatttttgcttccatgttcataagggaaattggtctttggttttctttgctttagttgtttttatttggttttggaattaggacaatgctgacctcataaaatgag

SEQ ID NO: 639 - DNA, 632 bp, Homo sapiens
caagcgacgctcccgcccgcgcgcccggggcctccaggccgctccccgccccgtgtccccacattgcgaaacggacggtcggatgctccgctccagggccggggtcgcctgtcccctgccgacctggcgcagagccgccttctgcacccggccccgtgccgccctggggttgcttacagccgggctgtgccaccgagctgagcccggaatcgaatggcgggccgcggaaaaggcggccaggcccgcaggggcgactgctcgaggtcccagaacagcgcccggggagccccaggccggcctcgaggggaccgcgggcgggacaggaggggaacagctggcatcggcgcccggcttcagctgcccgactgcggtgggcgggtaggcacgttcccccgcagccacccgcgcacgggtttccaaggcgtcaagggcaattcacctggtcgctgcaagaaagcgactgcgcccccacgtccagccagccgccttgtccatgagaaccacctggagggcagggtccagtgcccgggtgccacccgccacgtggtgacggctctgggatggcacaggctcgtgcgtggccgccgggctgccgtctcggcccctgtgcgggtctgcgctttggcggccgc

SEQ ID NO: 640 - DNA, 276 bp, Homo sapiens
aatcctgacattattcagaatgaaagactcaaactcaaaactcctgtgtgtttgacacaacagctaactgcattacctgaccctggagtggattctgtgctggaaaagaaacattattggggtcaaccaacaaaattggaacatgaatgggagattaaaacatgctaccaatgttaaatctactgaagttgataactgaatggtggttataaagagaataaccttattcttaggaaatgcataaatatttaataagaggctatggtgtatataact

SEQ ID NO: 641 - DNA, 501 bp, Homo sapiens
tcacagaggccaacctgaaggaggaggcttagccatccactgggggagcgttcttctcacccagctgctttgagcctggctgagatggaggctagacttgaggaaggacttcctgacagtgttgggcactggcttcaggtgggtgagagctggagcgatttctgaggctgagtgggcagtgaggtgggggagatgggctatctctgccattgtcctgagaggagaaagcagccatgttgggtgggggtggcgctgacccccaaccccttcccaggtgtcacaagctcccttcgagcgccagggcctcagcagcctggcctggcacagcgggggcaggcaggggcggtgggaggcagctttcaacttcagctctgcctgggaaaaattccctttcatgtggctgcctgtgatctctccaggcggctctgccgaaggggggtgtccagcagggagtagggggaggtgttgcagctggggggcaccctcacccccagcacaagg

SEQ ID NO: 642 - DNA, 319 bp, Homo sapiens
aaaaaggcactgtagaggaatagatggagtttaggctaactgcacgaatattacctcttagaactagtcttctagtaagaagtgaaaatttaaaaatgtgatgtgccattctctgcaataaactcaagttcaatcagtctactacattgccaaataagggcagatttacttgcttaactgttcgccaaaaggcaagggttgcatctgtattgaaaatcaaggaacttgttagccacaggaaggtggcacaaagcactggccaaggtctctgaggaaagcagtcttaactctgctctgatacacaaaggggtgactttgg

SEQ ID NO: 643 - DNA, 423 bp, Homo sapiens
caccccaggccaagctcctactgttaaacaaggtcacaatgaattataccctgattttttagctaaattacaagacggggttgaaaaaatctgtcctcggatgagcatgcctcaagaaattcctcccctcgtatgttagcttttgagaatgcgaaccatgagtgtaaaatggcccatgcgttccgtcccagcaacaaaatgtacctgatcaggaggtgttgcctgcatatattaaagcttgtgaagacattggatcagagacccacaaagccgttctgtgggcatgggccataaaggacagcaatcaaactggctcgactgatcctttctttcaaggtactttggtaggatgattgtggtcatctgagttctctgatttatgtatgctttatctctatctagcagaaattacctcaaaaaaaa

SEQ ID NO: 644 - DNA, 347 bp, Homo sapiens
cataatactctgtaccctttcagtcaatgcagtgccccctacctcaccacaaacatgcacgcaaatctgaatttaattaccagttattagttttatctgatttatatcatataaatatcattatacagtatgtactattagtgtgtaacttttttcattcaaaacaatacttttgagattcatccaagttgcataagtaatttactttaattgctgactggtgttttattttattgattgctgcaatgcattctttcattcttttgttgatggaaatttgtgtttggatattatgccaaatgtttctgtgtaccttcttaaactattatttgtcctcattagtttgg

SEQ ID NO: 645 - DNA, 459 bp, Homo sapiens
tttgaagctgctctcatgaaaaaggaattggtcaaagatgacaggagcacatagaaatctattttcccccttgcacctgtgaatttcagtctgctctttgataatactgcgccattctcctcatgactaaaacgagaatgggctagatcatttttgaggttcctttaagctctaagaaggaacaaacatgtgagagccatcataggtatctgtcaccaaagtgtatgttaaagagaggacggtttctatctccaagttggtgtagagggtataatcagaagacctagggtcaagttccatctctgccataactcttggtgagattttgagtgagtcacctctctcagtgtcagtctactcatctgtaaaaataagaacactggggccaggcacggtggctcatgcctgtaatctcagcactttgggaggccaaggtaggcggatcacctgaggtcagga

SEQ ID NO: 646 - DNA, 268 bp, Homo sapiens
ttaactactagttttgtcattacacttgacacgtctaggtgtcactctttaattttcattctccctgaactttaatttttacaagtctatggtaactttctcttcagtgtttgtaactaccacatttctatagaaatcttagggtgatctattgagattcttcacccttcatttctaattcctcatgatactatgcaagtgacaaaaaggtggcttgtgacagagaaatatgatatttaaataaaatccttagaatcaaaaaagtgcc

SEQ ID NO: 647 - DNA, 935 bp, Homo sapiens
tgaggttgccacacacctgagggactctcgcataaggatggcgcagggctggaagctggactgagacagtgaatgagacagcgctgccggctctctccgcgccgtggactggctcctaggcagtctcacgagcaagtgtgctgttgctcgtgcacgtgtgttttaactgagatgtgagctggcgcgttttctccacccggctccatctgctgggtccctccacattgctgcgcgtgtgcctccagtgccatggggtccccactgtgggcagccctgcattttgcccaactgcctcccaaaccatggaaccccagtgaccttcaacttgccgccatgacgagccactctcattcatatcctcaaacacggtgctctgagcccgaatgagggtttctttagagagatatctggggaccaaactgtagggacagagctcccgtctaaggtgggcctgtggtgaggtctccccagtggtacactttaatcccacagcagggcttgcaggccgccctgctccatccccaccaacactgggcaggatctagcctccaaacctttgccagtctaatagtataaaatgatagctcggtgctattttggttttgcatttccatggtgaacaatgagtttgagagtttttgttcaaaagtcctttgggagttcgagaccagactgggccaccaggagttcaagaccagcccgggcaattcagtgagatgttcatctctacaaaaaataagaaagataaaaaattagccaggcatgtttgtgtgtgcctgtggtcccagctcctcaggaggctgaggtgggaggatggcttgaccccgggaggtggaggctgcagtgagttgtgatcgtgtcagtgcacggctagcctgggcaacagagtgagaccccgtttctaaaataaaaataaaaaacaaaagagaaaagtc

SEQ ID NO: 648 - DNA, 479 bp, Homo sapiens
gaaaatccagactccttacctggataaaaagggcccttggggattagaatcctccttttctcgccaaatattgccaagtgtactgcagccacatgaaagctgtacttcccagacgtgtgatgcttgtgtgtgccaccatgccttctcatggactgttttcttgaaacccagaatgccgcccgcctccaccctatctttgatctaaataaccctgacttcttggaagctcagttcacgtgctatttcccctgaggccttttctgctcagtaatatgatttagatgccttttcccggtgttcctgcatcatcttatttatgctcccattatggctctcaacactttgtatccctgcaactcattactgatttgtgtttccttcaccaaactgcatatacaaaatctcactcaacttgctgttcttggtaattgaatgcagtaggcactcaataaatatgtgctgaatgaacagataattac

SEQ ID NO: 649 - DNA, 450 bp, Homo sapiens
tagaatgaagtttcagactaggagccaaaagagtcatactttccagttttattgctgggccttttaccacacttcattcccttttgtctttcttgcttggaaggtctgttcagggggatgagaactggtaggagatggaggtggaggagggggtagcaatgagtggaacgcattgatgtgagtcctgctcctattgtgtcatcctgagaccttattaaaaagaagcaagaccctagacccataatcaagcacagcatcactaatgatgggtcaaccggatgttgtttctcctgatgtaaggcaatagagtttatacggcatacctagctagtatgtattctggctgaaaatacccaacaggagccaccaccaatgatttatatttaatctaacctacacataagaaataaagaagataaataaactaaatgaaatcactggaaaggaact

SEQ ID NO: 650 - DNA, 1190 bp, Homo sapiens
tgaagaggaagagtttctgtgccatgatttaggagaggtttgaattacagagagctgagcctagcattgggggatgcttttgccctggagcagtttgccaattagagcaagcagttgagaggctaagatgtattaatacttccaaatcagtgcaggacaagaaggccaaagaatccaggacctgctgagcttgggagtgctgctaaaaacacctcttgccttgggcaagggataactagaaggctatattttaaggagtaaggtgaacctgaaataaattactcttcacatggactgtatatgctttttggtcatctaggcaggccagaaaatcttgaactttgaaattggattaggatgattttagatttgttagttctagatgttttatagaagcaaacaaaaatttctagaggaaaataactgcatcctgtgctcccaattatttaacactttttcaaatacagtgtcccatggtgcatatgcacacacacatgcacagtcacaaataaccaggtgtaagaaaggacaagataatatgaacaagagctagcaaaaacaaaatcacagaaacacccactgggactccagatactggtgatatcagatattgactttaaaaagttatgcttagctgggtgtggtggttcacacctataatctcagcactttgggaggctgaggcaggaggattgcttgagcctgcaagttcgagatcagcctgggaaacacagtgagacccccatctctatacaagttacctgtgcatgtgtggtgcatgcctgtggtgccacctactcaggaggctgaagtgggaagattgcttgagcacaggaggtcaggactgcagtgagccatgatcgtgccattgcccttcagcctgggtgacgtgagaccagtttcaaaaaaaaaaaaatgaaaaattatgcttactatgttgatgaaaatgaaagcaaagtttgaaaattttactagaaaactgaaactgtaaaatatgaaataccttttaacaagaacaaaacagaaattgtagaatcaagaaatataataaccaatgttgaataaaattcagtacactggtttaacagcagattaagtacaacttaagtgaatttgtaaactaaaagctaaagatagcaagaacttagcaaaaataaaacaaagagacaagttatggaaaatacagaaga

SEQ ID NO: 651 - DNA, 314 bp, Homo sapiens
gtctcatcttccatcttctaaagcaaaacaacaacaacaacaacacacagttgtgctagttttttggcttacctccttacaaggtcatactgctaaaaccctcactctggcatgactaatctgacacatagtttgcctttgttctccagaggtctaatgaacagctccctgtacaccaccaggtacagtctacactctttgagctggccttgagccccttgccatctgagctgcctcccttgttcctattttagcttcctgcatgcccaggcagcaagtgacttggctccacaaacagcctgttgctatgatct

SEQ ID NO: 652 - DNA, 349 bp, Homo sapiens
attttcaacacttgagtaatataaaggtatctcaatctatatattaatatatactcttttaataaagaattgcccttgggctccagtgtttgtttgctcattcttatatttggcaaacatgtgtggatacatctattatgtgttaagtgcagtacaagggactgggcacatgaggatgtgcaagacagagttccccatttttaaggagttgatgttctcataaaggagaaaaaattaaaatggcacatgcagaaaaatagaaaaagtgctactgtagatatgagcacttaggagaatacctaagccagattgcagattttgtattttaatgttgttttttctttttcca

SEQ ID NO: 653 - DNA, 385 bp, Homo sapiens
aaaactgtagaactaattatgaataacaaaatatacatatgaaagccattaatttcttacaaattcactatgaccacatcaatttaagtactgcatgtgaaagccacaatacaagcgactaacatatcaaataggagaatggtccaaccagaatggcttcactggccactggcagctctttcaacagatcagtattagttcatttatttgtattcacctttaataatgatatgctatgaaaaaccttagcataccatcagtcattctaaagggaagactgcttttgcatggtgtctggctgtgtaaactactgataaaagaacacagtattcagccatgcttttcagaccagcaaaacaatttaatagaattgaaatatggtgag

SEQ ID NO: 654 - DNA, 201 bp, Homo sapiens
actggaggaaaggaatatatttcaaaaatgttactgaatccagaataaaaattgagttgtctgtaatgagagttaaaaattcatgtgactaccttattatacagtattttattatataaacgtggcattttacagtataatacgctattttattgtataaagtgctgttagtatattttcttatctctgtttatagttaaa

SEQ ID NO: 655 - DNA, 485 bp, Homo sapiens
ctaaccttcctcggctcttcggcagcgaaatcgcagcagaggagatggagcagcttcgtgcgcattgcctcatttgcgcccaacgtgaaaagaactgccaggatgccccaggacaccagctcccctggcttctgcggtgcttgcacagtcctgaatcagcccgagagctgtggatctgcgtcccctggctgcatagccgactgccggctccatggaggggcctgtgccggagaacgcacatgttgacttatttcttcagtctaggcctttcttggcccccttggttattcattctagatgatacaactcttatttcagttcaaatgtctcacggaagaggcattgaagacagagtggatgcccgtgtttgttggcagtaggtagtatttaccactccggctgtagtaaaagaacaaaaggagaaattacacctatttctcatatttaagggaaaagcaattaaatcaccaaagtcaaaaaaaaaa

SEQ ID NO: 656 - DNA, 1486 bp, Homo sapiens
tgtatactctcagttctcattcagtataaataaaattttaaaatcctttcatagttctattagaaataagtagtaaattttgatatattgtacatacacacgtgtgtgtgtgtgtgtgtgtgtgtgtgtgtgtgtgtgtgtgtatttgtgtgcctctggtcaactctaaggatgacagacactgtgtaacaacacctgggtcaactcttttaatttatatacaaagcaaagaacaacattaatggagatgcacaatgattattcaaacaagctatatatatgtacaaaggcaaacagacacataacagtctctgcagactgattgtatatagtaagaaaagatcaaaagactttaaaacctaaatgacttttgacatacaaactcttcttgagaatgtttgttgtaaatggtttcaaaaatacaaattatagccaatcaaaacattgctttggttggtgcatttaagtatccaactcaaaaagcatatcaaatattttgggtactaggcagtttccaaagtagcatggtagtattacttgttaaaagggttctgttttcattaacagtactaagtggaagggatctgcagattccaaactggaataagctctatcatattctgaaacaagaattagaatgacttgagaacgggcaaataacaaagcaaaccaatataattatatggtcattctgaccccagctcttatacaaattatacatgtatttttgtgtatgtttgtgagagttgtatgtatgtgaatgtgtgtgagtgtgtattcacatacacatatatactggaacctatagtagaaaaggaaactagtagggccaaaaaaaaaaagaaaaagaaaaagaaaaaagaaaaaaaaagaaaaaactgggacctaagtataaatatctcatcctaaagtaaacaataagtttatagttaacgaagatttttttctatttaaaaccccattttcctaaagaacaaagtagtaaaataacaaaaaaatttaaaaaaattaaaaaataaaaaaaagaggtcactaaaagaccaagatgggaaacgtaacatggaatacaagcttgaatctgggaaacaagctcaaaaaacagtgaaaaaaaaaagtactggtttaggagtccaaaattccagtgaaacaaactttttgccaatagaccctaggggtctaagaaatagaattagggaagagtttaacacttacttacctatattctcagacagatttttctggaagaaaacccctttttttttttttttttaaacagtaacatccagagtgacaaattgcaggagatttaatgtataaaatttctaggaattaaaagcttaaacccaaaaattgttcatccatatataagaaattatcgaattaaaacttaatgtatgtcaattattttcaaatgtctaaattcctttggaaataaaaatatcagttttactttgaaattgctcaacttctgctattcatatggtct

SEQ ID NO: 657 - DNA, 1225 bp, Homo sapiens
cttctggcactagaggaccccaagcagttaatacagacacataacagtctctgcagactgattgtatatagtaagaaaagatcaaaagactttaaaacctaaatgacttttgacatacaaactcttcttgagaatgtttgttgtaaatggtttcaaaaatacaaattatagccaatcaaaacattgctttggttggtgcatttaagtatccaactcaaaaagcatatcaaatattttgggtactaggcagtttccaaagtagcatggtagtattacttgttaaaagggttctgttttcattaacagtactaagtggaagggatctgcagattccaaactggaataagctctatcatattctgaaacaagaattagaatgacttgagaacgggcaaataacaaagcaaaccaatataattatatggtcattctgaccccagctcttatacaaattatacatgtatttttgtgtatgtttgtgagagttgtatgtatgtgaatgtgtgtgagtgtgtattcacatacacatatatactggaacctatagtagaaaaggaaactagtagggccaaaaaaaaaaagaaaaagaaaaagaaaaaagaaaaaaaaagaaaaaactgggacctaagtataaatatctcatcctaaagtaaacaataagtttatagttaacgaagatttttttctatttaaaaccccattttcctaaagaacaaagtagtaaaataacaaaaaaatttaaaaaaattaaaaaataaaaaaaagaggtcactaaaagaccaagatgggaaacgtaacatggaatacaagcttgaatctgggaaacaagctcaaaaaacagtgaaaaaaaaaagtactggtttaggagtccaaaattccagtgaaacaaactttttgccaatagaccctaggggtctaagaaatagaattagggaagagtttaacacttacttacctatattctcagacagatttttctggaagaaaacccctttttttttttttttttaaacagtaacatccagagtgacaaattgcaggagatttaatgtataaaatttctaggaattaaaagcttaaacccaaaaattgttcatccatatataagaaattatcgaattaaaacttaatgtatgtcaattattttcaaatgtctaaattcctttggaaataaaaatatcagttttactttgaaattgctcaacttctgctattcatatggtct

SEQ ID NO: 658 - DNA, 426 bp, Homo sapiens
gaaaccagcagagtgaaaaggcaacctatggaatgggacaaaatatttgcagaccgtatatccaataagggaataatctccaaagtatttaaggaatttctataactcagcagtaaaaaacaaaagacacacaaaaaaacctaataagttgatttttaaatgagctaagtacttaaataggtatttttccaaggcaatgggtatgtgaagaaatgcccaatgctcgatgtcactaaacattagggaaacataaatactaaaactacaatgatgtatcacctcacacgtgtcagagggattattatcaaaacaaaaaagacaacacgtgttgaagaggatgtggaaaaattggaaaccttgaacatttttggtgggattgcaaaacggtgcatctgccatggaacacagtatagagtttcctcaaaa

SEQ ID NO: 659 - DNA, 506 bp, Homo sapiens
tcccaaacaatactgcccctgatggaagtataacaaggcattgcaaggtctaactgctctgtccaatgagttaaccaaaaactcagcggtaagtgacccctttaaaaggtgcctagaaaaatcattcagtaaatggaaaaaaaaaatcatagcctcagttcttacttctctcacagccatagtaggcgtattcattcttgttgggtgttttgtcataccatgcatccgtgggctggttcacagactcatacaggcagcacttactaaaacctcccttaattctcctccaccttattcagagaagctttttcttttagagaatcatgcagaacaactaagccaagacattttaaggaagtttgaagagaaggaactgtaaaaattcaagatgaagaactgttaaatatagtgaaccccaagtttctattcaaagaatcagtatgtcagtatgttcagctctcttattgattctccattttaaagtttaacttcctggttccctttgc

SEQ ID NO: 660 - DNA, 342 bp, Homo sapiens
accattgcaccgggagctgaaaatatacagagaaagctgagaatgcaagagtcgctggcttccatgcccatcggcagtgccctatcactccctttatcctgaatgttaatgtgtattggaattctgtcacttgcaactgaatgagcccagttcaatataaaaattaatcaggaaaagagcaggcctatgagaaggcttcaggcaaaggaagacatggaatatgtatgaatggtggcaagcggcaggaggagcatttccttttgttggagtcctgggtggtctccctagctccctaacacatgctaaacccaaacacatttgcagtcttagcctggtatgcag

SEQ ID NO: 661 - DNA, 391 bp, Homo sapiens
tgtgacatcagactattcctaggaaacttgtctgaacttgtagcatctgagtaaattttgcagcttcgccactggataagaggtgaacactgaaggaagatcacagaattgtaaaaagttgaaagatttcttagaatcaagtagtctaacattctagcccatgcagaaatccttcctacaccatccttgatgaatgttcattcagcttttatgtgaacatttccagacattggccactagcggcttctcaagggagtttgttacatggttggaagtctctaaatgttacttgtgcttacagaactcaatttggcctttctgtagtaaccacctagtgaactgagatctgccttccttagcaacacagaccttcccactgaacagcccttca

SEQ ID NO: 662 - DNA, 420 bp, Homo sapiens
gccccttgtaaccatcaatttatagccagttatacacccctacccatttttcccttcctatattatttgaaaacatatcttagatataatttcttccacaaatatttcagcacattctaattccttataattttgtacatctttcaagccatagtgcatgtttttttgaagtggttttccaattattttttcattggctctgctacattcaagaatatttcgtatggtaagccacagtacaaattactagaagggaagttgacactcagtgactatcaggagtatacttagaagaagaaaaacatggaagtttagtgttgcctattacctaatataagaaagaatcggagctttattttcttttgttcttctttaatgtgcaaaacggagtatacaatatggtggcctgtaggcatgcca

SEQ ID NO: 663 - DNA, 445 bp, Homo sapiens
gtttgactagaactgagccacatgatcatggtggaagctggaaaacgtcatctgcagcaggctagctgtgtgttcagctaaaatccatgcatcccattgttaaagcaaggaggagagaaaggattccagtagacacggagcaggctttgacgcccagaccgccagaaacctgggcgtttcctggggtttgccaggtctagtgaactcttcatttataccaggccctgtgaactcacaggggtaggcagaacagaccatccctctttcatggcgcccttgtctaatggggagaaaggctgaaataattcagtgcaagaaaggaagagtaaggggtgggaagagagcgtgttaacgagtctcttacatgattttattttccaagattaggttatagacactaaaatcataaaatgttgatttgaaaatgtttttacaggcacaggat

SEQ ID NO: 664 - DNA, 496 bp, Homo sapiens
ttgttctcaggacccacccgagggtgggtcaccatggctttggagcacctggtagtgtggcgtgtccacagtgaagaccagagtttcattgtccttaagactgacctgggagacgtggctgcaggccattgaggaaggtgaggcaaaagcttcctgtctgctccccgtgtgctgaggagggagctctgccatgtgctttactttcacacgttatattctacgagtcttgttttacaaaagcatcccttccttgaggcttcggctgctcatcgctgctcatcatcatagcgtgccataacatatagtaagatttgggtttgtttctgggagagatcttggcatagagaaaggagaaatgcttagagccaccatcaagacagttgggatgaaagctggggataggcagaggctggaggaaacatgtgcaccccttgtaaacacttattcatgttttagttattcacttaaagtgttaaattagtaaaaatagtattga

SEQ ID NO: 665 - DNA, 411 bp, Homo sapiens
  misc_feature (102)..(102): n is a, c, g, or t
gcctaaggagaatgcaaaacgcattgcaataaacaaaatccacttcagcatcattcagttcaatttaaaatgatagtggcattcaggctgcgtacagagatntacactttaacaccattcatgatttggcctccagactacaacaacattcaatttagttactcttttgaattgtgtgctaggagcatggactttggaatcagacagatttgaatttgctttcaggctctaaatcctgtttttttcccactgtggaaggcagaataatgttcccccaaagatgtgtattccctaatccccattcaactgtggaatatgttcatttacatgggcaaaaaggactttgcagattttgattcaggtacagactctaggagaggagagtatcttgcattatccaagtgggcgcag

SEQ ID NO: 666 - DNA, 810 bp, Homo sapiens
tcacaggcagtatcagactcacagtagtaccaactcaaaacagaccttcccctccgcagcattccgcatgccccacattatgctagaacctctatttgaatttttcttctagagcaaattcctagcctctcctctaggaaggggagggctggggaaagagcccttggggtcttttcaaggggttcactgaccctacaagctctaagctctctctacagctgtgctgtccaatatggaaatcatgagccactgagtggctactgggcacttgaaatatggctagtgcaactgagaaactgaattttttatttaatttaatgaacttaaacagccacatatggctaatgactacaatactagaaacaagatataaaacatttccatcatcacagaaagcactactctacagagtaaagacttattataattggatatatacattcctgaaaaatgtggtatataaaatattataacttgagggctcataaggcagaacactcaaactctatacagtattataaccaaatccctaaaaagtaagaatcccaacttttaaaactagcgtgatttttaaaagacatttaattcttaataaagaaatattatgataaataagtatacatttaattatttatttatggataaatgaatgaatgaaatgaatgacagggtctcacaatgttgccgaggctggcatgccgtggcgcaataatagctcactgcagcctcaacctcctgggctcaggcaatcctcccgcctcagcctcccagtagctgggattatagacacatcccaccacacctggctaa

SEQ ID NO: 667 - DNA, 196 bp, Homo sapiens
ggagtttttggaagaggttgcttattaaagcaaatgaaatccctactgtgtggtatatccagcattgtaacaaaacaaaaggaacaacttcagacagaatttaggaggaaatattaggtcaacccaacttatccaagccacccccacatcagctccctattggcaactgcttttcctggactccgcattcctgtgt

SEQ ID NO: 668 - DNA, 474 bp, Homo sapiens
aaagagagtctgtctgtactcactcttcaatccagttcctccaattctccctggaatctgctccactctggcttttgtctctaccatttcactgaaaccactcgccaagatcactaacatcctcctcactgctaaatcttctgatcaattttcagctggcatcttacctgacccatcagcagcatctgacaaggtgggttactactgcttcccttggtgtctagagtatcacgatttacaccttcctgtctgttcctcaatctgccctgctgactccatgggaccaggagaggccccagaccactcttctcactcccttggtggcctcaatccttcttatgactttgaacaacagttcaatgctaatgacttcaaatttgcctttttaatcctgacctcccactgaagtccagactctgcctacatgacctttctgcttagatatctaaagaggaatctcaaatgtaatgtgtt

SEQ ID NO: 669 - DNA, 511 bp, Homo sapiens
tgggacaggggctagaaggaagagaggctcggaagtgtgttgtgtaaacgtggttctgttttgtctaatcttttactacctgtagggacaggtggatgcagtggagctgctggcaggaaaggtggagttttttcaaggtcacgagttaagcaatagagtagaatatctttgcagctgcaagaggaggtgcgagcagcttgttcacaaggtatattttgcaggagtttccccttacaagatcttatttgcttgagagtagcgttaaggatttctgtgccaacagttagctggatctctggggttgaatcgttatcaccaatctatagttaaaataagcattaaaaaaaaaaagaagtctactttcaaagttttcccgaagtgccagtctgaagcagctacctttaaaagctgttcttgaataataggttgctatatcctagtctgtaatcttggactaatgtctgaggaaggaaaaaaaaaaaaagaatattctctctttgtccgattaaga

SEQ ID NO: 670 - DNA, 375 bp, Homo sapiens
aacttcaacctcgtttaagtgtaacagcaaataaacgttgtgtagagatctcaagatttgaaagctccactcccttactacacacactagtgctcatgtatatacatttgaacatatgaaagagtaagcaaaccagtgaagacagagttttgtacttaaaaacactaaaaatagtttaatctttcttgtctatattttcacaatcaagtttgtatgttacaaagttctaaaaatctcagtttggtctgaatatttatatttaaaaaccaaacctaatctgatggaaaagcagatgacgtctcatttatgctttaagtaacacactgaaaatgcatatcacgccagtgtgtgtgggtaggttttgcctgttcaaac

SEQ ID NO: 671 - DNA, 1686 bp, Homo sapiens
agctcctccccctgcgtctctggcctcgccggtcttggggggatggttccatcatggcgtcaatgcagaccacaggaaggagggtggaagtatggtttccaaaacgactacagaaagaactgttggctttgcaaaatgacccacctcctggaatgaccttaaatgagaagagtgttcaaaattcaattacacagtggattgtagacatggaaggtgcaccaggtaccttatatgaaggggaaaaatttcaacttctatttaaatttagtagtcgatatccttttgactctcctcaggtcatgtttactggtgaaaatattcctgttcatcctcatgtttatagcaatggtcatatctgtttatccattctaacagaagactggtccccagcgctctcagtccaatcagtttgtcttagcattattagcatgctttccagctgcaaggaaaagagacgaccaccggataattctttttatgtgcgaacatgtaacaagaatccaaagaaaacaaaatggtggtatcatgatgatacttgttgatgccactgttatcatcctcctagcagaagatagtcctactgagaaaatgagcactttgatcattcagtctttgaactttaacctttgactggaagtgacctataggcaatgaagactacttccttttactgcatttttactcgtgtgcattctgggcgcatgttgatcgctggttcagtccaggcaactgacatgcttttattagtcatacagtattaatgcaggtgtcaggaaatgtcaaatataattccattttttatttttatttttttaagcttttggaaaagctccaggtcctcatgtattgtgcaataacaatgacttccttggcggttttggtacgttcattgccggcaatgggcgttgtaacaggaaaagttttcattaactcctgccattcaatgattaatgcatgatagggcctatgaaatgaacttactggttatagtgggaatataaataaagtgagggatccaacattactttaaaagtcaccccaactgtttatatttggattctatgcactgtgatcctaaggttaacagcatgaattaacatgcgtctttaaaggactgtaatgaaagatcattgcatatttattgaattgtttatatctactgtcaagttgttttgacatggaagattttcaagtaacattggcagagaggtacagtatgttatccctatggtgaaaataaattaatttgttgtatatagttcctcaatctctgaagtaaaggtatgagtaatatagggtatgaatggtttaatcaaggctttattttggaagtaagaaaaatggcagtgatgattaaattgctgcagtccataatttgggcttgttatttgtacattaaagattttttccaagtaagttacactctgttaacttcctgctagccatcagcatgagccctactgcctaaacactatttcatttatttatgtttggaaaccccgtaaacatttttgtttgcaatcttgtttcttttgttataagtcaagtttgaatgttacaatacttttattgaaacttttgttaagttttttcttgtaaattttctttacttgtgagtatcatcttgtcctttaatcctgtaccctaaaataagaaatacatttttgacagaggcttaatgtttta

SEQ ID NO: 672 - DNA, 3985 bp, Homo sapiens
agctcctccccctgcgtctctggcctcgccggtcttggggggatggttccatcatggcgtcaatgcagaaacgactacagaaagaactgttggctttgcaaaatgacccacctcctggaatgaccttaaatgagaagagtgttcaaaattcaattacacagtggattgtagacatggaaggtgcaccaggtaccttatatgaaggggaaaaatttcaacttctatttaaatttagtagtcgatatccttttgactctcctcaggtcatgtttactggtgaaaatattcctgttcatcctcatgtttatagcaatggtcatatctgtttatccattctaacagaagactggtccccagcgctctcagtccaatcagtttgtcttagcattattagcatgctttccagctgcaaggaaaagagacgaccaccggataattctttttatgtgcgaacatgtaacaagaatccaaagaaaacaaaatggtggtatcatgatgatacttgttgatgccactgttatcatcctcctagcagaagatagtcctactgagaaaatgagcactttgatcattcagtctttgaactttaacctttgactggaagtgacctataggcaatgaagactacttccttttactgcatttttactcgtgtgcattctgggcgcatgttgatcgctggttcagtccaggcaactgacatgcttttattagtcatacagtattaatgcaggtgtcaggaaatgtcaaatataattccattttttatttttatttttttaagcttttggaaaagctccaggtcctcatgtattgtgcaataacaatgacttccttggcggttttggtacgttcattgccggcaatgggcgttgtaacaggaaaagttttcattaactcctgccattcaatgattaatgcatgatagggcctatgaaatgaacttactggttatagtgggaatataaataaagtgagggatccaacattactttaaaagtcaccccaactgtttatatttggattctatgcactgtgatcctaaggttaacagcatgaattaacatgcgtctttaaaggactgtaatgaaagatcattgcatatttattgaattgtttatatctactgtcaagttgttttgacatggaagattttcaagtaacattggcagagaggtacagtatgttatccctatggtgaaaataaattaatttgttgtatatagttcctcaatctctgaagtaaaggtatgagtaatatagggtatgaatggtttaatcaaggctttattttggaagtaagaaaaatggcagtgatgattaaattgctgcagtccataatttgggcttgttatttgtacattaaagattttttccaagtaagttacactctgttaacttcctgctagccatcagcatgagccctactgcctaaacactatttcatttatttatgtttggaaaccccgtaaacatttttgtttgcaatcttgtttcttttgttataagtcaagtttgaatgttacaatacttttattgaaacttttgttaagttttttcttgtaaattttctttacttgtgagtatcatcttgtcctttaatcctgtaccctaaaataagaaatacatttttgacagaggcttaatgttttaacaaaagagtgtggacatttttattttaaaatttaggcaaaagtcactatcaaatggttgcttatttgtctcacacagccatatagtttttcctggagggttttgttttgttgttgttgaaaagactttgcttacagctagatgaaactttctatagaaaaaaaaaattgttgaaaggtccagttctcagtaccatgtgagttaatgatactacaactaagttctttttaaaaagtgattaatgtattttataaattaccttttcacatatgcaaaatctgtttctactacaatgttatttttactaatgccttattgttgcactctttttgaaatatcctgcagtgaatatatgaatcaatttgggcttaaaactgaaagccagttggctgaaaggtttgaaatacgtaccccagtaaaaccattcaatcaataattggtaaataatattttaaaattgtttttaatctgtatagatgacattttgtagctttgtacatgttgttaattaagggcatataattttacactcaaagtataattgctgaactcaggggtgggtagacttcaaaaatatgtctgctatagaaataacttgaaaaaaaaaattaaaaccgtggccagccaccaaattgtggacactgtttatatactgctagttaacaattaccacttttaaaaaattataaccgtttttgttctatcttgactagataaattctcacaatgatctctgtcagttttattagttggcctgtttaaccaagacagaaagtctttgaattactcatagttttaaactgcttttaatatgaaaattgcagctgtaaattatgtattttcatattttgcgtaactgctctacactactgtttgacttgatcttcttctgggggttagggagaaatctgtctccatattgctggttctcttaccaaaatgcttttataaagaaatgaccggtgacatttattcaccaaaggaattaatatactgagtcaaagattaacaatgctatactatagagtaataggtcatatatagcctcaattgagttttttatgacaatattttaacatacctctctctctacatataaataccataaagtaaactaaaatgacacagaggaaagtagaggaaaatgaaataatttcggtacatcttatggtttaaagagtagaaaataagatgaaatatcctaaaatataggagcacagacatttaaaattcataatcaggctaacaacactctcttgaatttaggaatcattgaaaactccttgcacttagatttaatttatatgttagttacattattaaaagtcataaggcatttatctgagtcattgctctacagagagcaattaatggcttgtaataataaaaagaatatttctctgtaatgcattgttgaaagacaaccagaatatcaagaaaatgtatataggaatatgctacttgcctcctccctgcatttcctcgtggggcactatttgcgacataggcctacagaattagactttcatacttagaagataaggtacactcttcttcttttatttatttatttatttatttttaggccattcttctggtttgccaaattctattaagacagtgatacatttgcttccttatttatgcatgcttagatcatgaacatgatgcccttcttttttttttttttctttggtcaagtagggattaatgccataggtttagagagaaggattgttttcagtttttaagagaattttttaaaaatacattttatggttctcttaaggaattaatattcacttctgaaggacttacttgtaatatataatttatcattttagccagcagggaaataaatcatttttaatccccagaagaaagtgctggaaatagcttctatatagtcagcagttcacctggagaaagatcttaattccttgttgttttgactaggaatatcaatatttggtataaaataactagaatagtttattaccttttccctcatgaaattttaaatatatgcaaatatatatatcattagattcctgtggtggataataatttcttcagattctaaaacaggtgtctagtgactgcttaattgtttccaagttgcatcaaagatgaattggtaaataatggaaatgagtagtgatatgaaaatggttatgtaactacatattacttgtttctggtaatcaagtcttattttttaaaagcctattgtttttcagaattgagatatttaaaacttgttataacttcttcctaaaaatagaagagaagaggaggtactgtgtgttacaaaaatttttttaaataaaga

SEQ ID NO: 673 - DNA, 3554 bp, Homo sapiens
  misc_feature (3339)..(3339): n is a, c, g, or t
  misc_feature (3353)..(3354): n is a, c, g, or t
  misc_feature (3361)..(3361): n is a, c, g, or t
  misc_feature (3363)..(3363): n is a, c, g, or t
  misc_feature (3367)..(3367): n is a, c, g, or t
agctcctccccctgcgtctctggcctcgccggtcttggggggatggttccatcatggcgtcaatgcagaaacgactacagaaagaactgttggctttgcaaaatgacccacctcctggaatgaccttaaatgagaagagtgttcaaaattcaattacacagtggattgtagacatggaaggtgcaccaggtaccttatatgaaggggaaaaatttcaacttctatttaaatttagtagtcgatatccttttgactctcctcaggtcatgtttactggtgaaaatattcctgttcatcctcatgtttatagcaatggtcatatctgtttatccattctaacagaagactggtccccagcgctctcagtccaatcagtttgtcttagcattattagcatgctttccagctgcaaggaaaagagacgaccaccggataattctttttatgtgcgaacatgtaacaagaatccaaagaaaacaaaatggtggtatcatgatgatacttgttgatgccactgttatcatcctcctagcagaagatagtcctactgagaaaatgagcactttgatcattcagtctttgaactttaacctttgactggaagtgacctataggcaatgaagactacttccttttactgcatttttactcgtgtgcattctgggcgcatgttgatcgctggttcagtccaggcaactgacatgcttttattagtcatacagtattaatgcaggtgtcaggaaatgtcaaatataattccattttttatttttatttttttaagcttttggaaaagctccaggtcctcatgtattgtgcaataacaatgacttccttggcggttttggtacgttcattgccggcaatgggcgttgtaacaggaaaagttttcattaactcctgccattcaatgattaatgcatgatagggcctatgaaatgaacttactggttatagtgggaatataaataaagtgagggatccaacattactttaaaagtcaccccaactgtttatatttggattctatgcactgtgatcctaaggttaacagcatgaattaacatgcgtctttaaaggactgtaatgaaagatcattgcatatttattgaattgtttatatctactgtcaagttgttttgacatggaagattttcaagtaacattggcagagaggtacagtatgttatccctatggtgaaaataaattaatttgttgtatatagttcctcaatctctgaagtaaaggtatgagtaatatagggtatgaatggtttaatcaaggctttattttggaagtaagaaaaatggcagtgatgattaaattgctgcagtccataatttgggcttgttatttgtacattaaagattttttccaagtaagttacactctgttaacttcctgctagccatcagcatgagccctactgcctaaacactatttcatttatttatgtttggaaaccccgtaaacatttttgtttgcaatcttgtttcttttgttataagtcaagtttgaatgttacaatacttttattgaaacttttgttaagttttttcttgtaaattttctttacttgtgagtatcatcttgtcctttaatcctgtaccctaaaataagaaatacatttttgacagaggcttaatgttttaacaaaagagtgtggacatttttattttaaaatttaggcaaaagtcactatcaaatggttgcttatttgtctcacacagccatatagtttttcctggagggttttgttttgttgttgttgaaaagactttgcttacagctagatgaaactttctatagaaaaaaaaaattgttgaaaggtccagttctcagtaccatgtgagttaatgatactacaactaagttctttttaaaaagtgattaatgtattttataaattaccttttcacatatgcaaaatctgtttctactacaatgttatttttactaatgccttattgttgcactctttttgaaatatcctgcagtgaatatatgaatcaatttgggcttaaaactgaaagccagttggctgaaaggtttgaaatacgtaccccagtaaaaccattcaatcaataattggtaaataatattttaaaattgtttttaatctgtatagatgacattttgtagctttgtacatgttgttaattaagggcatataattttacactcaaagtataattgctgaactcaggggtgggtagacttcaaaaatatgtctgctatagaaataacttgaaaaaaaaaattaaaaccgtggccagccaccaaattgtggacactgtttatatactgctagttaacaattaccacttttaaaaaattataaccgtttttgttctatcttgactagataaattctcacaatgatctctgtcagttttattagttggcctgtttaaccaagacagaaagtctttgaattactcatagttttaaactgcttttaatatgaaaattgcagctgtaaattatgtattttcatattttgcgtaactgctctacactactgtttgacttgatcttcttctgggggttagggagaaatctgtctccatattgctggttctcttaccaaaatgcttttataaagaaatgaccggtgacatttattcaccaaaggaattaatatactgagtcaaagattaacaatgctatactatagagtaataggtcatatatagcctcaattgagttttttatgacaatattttaacatacctctctctctacatataaataccataaagtaaactaaaatgacacagaggaaagtagaggaaaatgaaataatttcggtacatcttatggtttaaagagtagaaaataagatgaaatatcctaaaatataggagcacagacatttaaaattcataatcaggctaacaacactctcttgaatttaggaatcattgaaaactccttgcacttagatttaatttatatgttagttacattattaaaagtcataaggcatttatctgagtcattgctctacagagagcaattaatggcttgtaataataaaaagaatatttctctgtaatgcattgttgaaagacaaccagaatatcaagaaaatgtatataggaatatgctacttgcctcctccctgcatttcctcgtggggcactatttgcgacataggcctacagaattagactttcatacttagaagataaggtacactcttcttcttttatttatttatttatttatttttaggccattcttctggtttgccaaattctattaagacagtgatacatttgcttccttatttatgcatgcttagatcatgaacatgatgcccttcttataataanaacaatgggccaannagggctnangccnaaaggttaagcacaacacaggatggtccacaagattttataggacgacattatataacaaaatgcatttatatgaggtcctcgttagcggaactaaatatttacctcttgataggactacactggaaaatatataatgatagtgttagtcacgagagaaaatactacattcaagtccctagatgagt

SEQ ID NO: 674 - DNA, 3836 bp, Homo sapiens
ggggatcatggcgtcaatgcagaaacgactacagaaagaactgttggctttgcaaaatgacccacctcctggaatgaccttaaatgagaagagtgttcaaaattcaattacacagtcatgtttactggtgaaaatattcctgttcatcctcatgtttatagcaatggtcatatctgtttatccattctaacagaagactggtccccagcgctctcagtccaatcagtttgtcttagcattattagcatgctttccagctgcaaggaaaagagacgaccaccggataattctttttatgtgcgaacatgtaacaagaatccaaagaaaacaaaatggtggtatcatgatgatacttgttgatgccactgttatcatcctcctagcagaagatagtcctactgagaaaatgagcactttgatcattcagtctttgaactttaacctttgactggaagtgacctataggcaatgaagactacttccttttactgcatttttactcgtgtgcattctgggcgcatgttgatcgctggttcagtccaggcaactgacatgcttttattagtcatacagtattaatgcaggtgtcaggaaatgtcaaatataattccattttttatttttatttttttaagcttttggaaaagctccaggtcctcatgtattgtgcaataacaatgacttccttggcggttttggtacgttcattgccggcaatgggcgttgtaacaggaaaagttttcattaactcctgccattcaatgattaatgcatgatagggcctatgaaatgaacttactggttatagtgggaatataaataaagtgagggatccaacattactttaaaagtcaccccaactgtttatatttggattctatgcactgtgatcctaaggttaacagcatgaattaacatgcgtctttaaaggactgtaatgaaagatcattgcatatttattgaattgtttatatctactgtcaagttgttttgacatggaagattttcaagtaacattggcagagaggtacagtatgttatccctatggtgaaaataaattaatttgttgtatatagttcctcaatctctgaagtaaaggtatgagtaatatagggtatgaatggtttaatcaaggctttattttggaagtaagaaaaatggcagtgatgattaaattgctgcagtccataatttgggcttgttatttgtacattaaagattttttccaagtaagttacactctgttaacttcctgctagccatcagcatgagccctactgcctaaacactatttcatttatttatgtttggaaaccccgtaaacatttttgtttgcaatcttgtttcttttgttataagtcaagtttgaatgttacaatacttttattgaaacttttgttaagttttttcttgtaaattttctttacttgtgagtatcatcttgtcctttaatcctgtaccctaaaataagaaatacatttttgacagaggcttaatgttttaacaaaagagtgtggacatttttattttaaaatttaggcaaaagtcactatcaaatggttgcttatttgtctcacacagccatatagtttttcctggagggttttgttttgttgttgttgaaaagactttgcttacagctagatgaaactttctatagaaaaaaaaaattgttgaaaggtccagttctcagtaccatgtgagttaatgatactacaactaagttctttttaaaaagtgattaatgtattttataaattaccttttcacatatgcaaaatctgtttctactacaatgttatttttactaatgccttattgttgcactctttttgaaatatcctgcagtgaatatatgaatcaatttgggcttaaaactgaaagccagttggctgaaaggtttgaaatacgtaccccagtaaaaccattcaatcaataattggtaaataatattttaaaattgtttttaatctgtatagatgacattttgtagctttgtacatgttgttaattaagggcatataattttacactcaaagtataattgctgaactcaggggtgggtagacttcaaaaatatgtctgctatagaaataacttgaaaaaaaaaattaaaaccgtggccagccaccaaattgtggacactgtttatatactgctagttaacaattaccacttttaaaaaattataaccgtttttgttctatcttgactagataaattctcacaatgatctctgtcagttttattagttggcctgtttaaccaagacagaaagtctttgaattactcatagttttaaactgcttttaatatgaaaattgcagctgtaaattatgtattttcatattttgcgtaactgctctacactactgtttgacttgatcttcttctgggggttagggagaaatctgtctccatattgctggttctcttaccaaaatgcttttataaagaaatgaccggtgacatttattcaccaaaggaattaatatactgagtcaaagattaacaatgctatactatagagtaataggtcatatatagcctcaattgagttttttatgacaatattttaacatacctctctctctacatataaataccataaagtaaactaaaatgacacagaggaaagtagaggaaaatgaaataatttcggtacatcttatggtttaaagagtagaaaataagatgaaatatcctaaaatataggagcacagacatttaaaattcataatcaggctaacaacactctcttgaatttaggaatcattgaaaactccttgcacttagatttaatttatatgttagttacattattaaaagtcataaggcatttatctgagtcattgctctacagagagcaattaatggcttgtaataataaaaagaatatttctctgtaatgcattgttgaaagacaaccagaatatcaagaaaatgtatataggaatatgctacttgcctcctccctgcatttcctcgtggggcactatttgcgacataggcctacagaattagactttcatacttagaagataaggtacactcttcttcttttatttatttatttatttatttttaggccattcttctggtttgccaaattctattaagacagtgatacatttgcttccttatttatgcatgcttagatcatgaacatgatgcccttcttttttttttttttctttggtcaagtagggattaatgccataggtttagagagaaggattgttttcagtttttaagagaattttttaaaaatacattttatggttctcttaaggaattaatattcacttctgaaggacttacttgtaatatataatttatcattttagccagcagggaaataaatcatttttaatccccagaagaaagtgctggaaatagcttctatatagtcagcagttcacctggagaaagatcttaattccttgttgttttgactaggaatatcaatatttggtataaaataactagaatagtttattaccttttccctcatgaaattttaaatatatgcaaatatatatatcattagattcctgtggtggataataatttcttcagattctaaaacaggtgtctagtgactgcttaattgtttccaagttgcatcaaagatgaattggtaaataatggaaatgagtagtgatatgaaaatggttatgtaactacatattacttgtttctggtaatcaagtcttattttttaaaagcctattgtttttcagaattgagatatttaaaacttgttataacttcttcctaaaaatagaagagaagaggaggtactgtgtgttacaaaaatttttttaaataaaga

SEQ ID NO: 675 - DNA, 3900 bp, Homo sapiens
atgtgctttaatatgtagcaaatgtatcatttcgtattttaaaatatgctaggtaagcatttcctcctgtccttaaaaagctcttttaaacaactttaaaatattgtatagatagatgtacacaattttctgaataattggagttatatttacatcttttcactctttaggaaaggactggcctgtttctgtgttgggttccttcctgagtgtggcttccagctcagtggctcagacttcaagatgaagacttcagtcctggttgtgtatggtcttgggccagttaccatatgtcaggggagaagatcttctcccctgataattgaaattatttctacattaaacagacttgtagaatttacttatacatgcttgactttttaattatcttttttctccttttcttaaagatgatacttgttgatgccactgttatcatcctcctagcagaagatagtcctactgagaaaatgagcactttgatcattcagtctttgaactttaacctttgactggaagtgacctataggcaatgaagactacttccttttactgcatttttactcgtgtgcattctgggcgcatgttgatcgctggttcagtccaggcaactgacatgcttttattagtcatacagtattaatgcaggtgtcaggaaatgtcaaatataattccattttttatttttatttttttaagcttttggaaaagctccaggtcctcatgtattgtgcaataacaatgacttccttggcggttttggtacgttcattgccggcaatgggcgttgtaacaggaaaagttttcattaactcctgccattcaatgattaatgcatgatagggcctatgaaatgaacttactggttatagtgggaatataaataaagtgagggatccaacattactttaaaagtcaccccaactgtttatatttggattctatgcactgtgatcctaaggttaacagcatgaattaacatgcgtctttaaaggactgtaatgaaagatcattgcatatttattgaattgtttatatctactgtcaagttgttttgacatggaagattttcaagtaacattggcagagaggtacagtatgttatccctatggtgaaaataaattaatttgttgtatatagttcctcaatctctgaagtaaaggtatgagtaatatagggtatgaatggtttaatcaaggctttattttggaagtaagaaaaatggcagtgatgattaaattgctgcagtccataatttgggcttgttatttgtacattaaagattttttccaagtaagttacactctgttaacttcctgctagccatcagcatgagccctactgcctaaacactatttcatttatttatgtttggaaaccccgtaaacatttttgtttgcaatcttgtttcttttgttataagtcaagtttgaatgttacaatacttttattgaaacttttgttaagttttttcttgtaaattttctttacttgtgagtatcatcttgtcctttaatcctgtaccctaaaataagaaatacatttttgacagaggcttaatgttttaacaaaagagtgtggacatttttattttaaaatttaggcaaaagtcactatcaaatggttgcttatttgtctcacacagccatatagtttttcctggagggttttgttttgttgttgttgaaaagactttgcttacagctagatgaaactttctatagaaaaaaaaaattgttgaaaggtccagttctcagtaccatgtgagttaatgatactacaactaagttctttttaaaaagtgattaatgtattttataaattaccttttcacatatgcaaaatctgtttctactacaatgttatttttactaatgccttattgttgcactctttttgaaatatcctgcagtgaatatatgaatcaatttgggcttaaaactgaaagccagttggctgaaaggtttgaaatacgtaccccagtaaaaccattcaatcaataattggtaaataatattttaaaattgtttttaatctgtatagatgacattttgtagctttgtacatgttgttaattaagggcatataattttacactcaaagtataattgctgaactcaggggtgggtagacttcaaaaatatgtctgctatagaaataacttgaaaaaaaaaattaaaaccgtggccagccaccaaattgtggacactgtttatatactgctagttaacaattaccacttttaaaaaattataaccgtttttgttctatcttgactagataaattctcacaatgatctctgtcagttttattagttggcctgtttaaccaagacagaaagtctttgaattactcatagttttaaactgcttttaatatgaaaattgcagctgtaaattatgtattttcatattttgcgtaactgctctacactactgtttgacttgatcttcttctgggggttagggagaaatctgtctccatattgctggttctcttaccaaaatgcttttataaagaaatgaccggtgacatttattcaccaaaggaattaatatactgagtcaaagattaacaatgctatactatagagtaataggtcatatatagcctcaattgagttttttatgacaatattttaacatacctctctctctacatataaataccataaagtaaactaaaatgacacagaggaaagtagaggaaaatgaaataatttcggtacatcttatggtttaaagagtagaaaataagatgaaatatcctaaaatataggagcacagacatttaaaattcataatcaggctaacaacactctcttgaatttaggaatcattgaaaactccttgcacttagatttaatttatatgttagttacattattaaaagtcataaggcatttatctgagtcattgctctacagagagcaattaatggcttgtaataataaaaagaatatttctctgtaatgcattgttgaaagacaaccagaatatcaagaaaatgtatataggaatatgctacttgcctcctccctgcatttcctcgtggggcactatttgcgacataggcctacagaattagactttcatacttagaagataaggtacactcttcttcttttatttatttatttatttatttttaggccattcttctggtttgccaaattctattaagacagtgatacatttgcttccttatttatgcatgcttagatcatgaacatgatgcccttcttttttttttttttctttggtcaagtagggattaatgccataggtttagagagaaggattgttttcagtttttaagagaattttttaaaaatacattttatggttctcttaaggaattaatattcacttctgaaggacttacttgtaatatataatttatcattttagccagcagggaaataaatcatttttaatccccagaagaaagtgctggaaatagcttctatatagtcagcagttcacctggagaaagatcttaattccttgttgttttgactaggaatatcaatatttggtataaaataactagaatagtttattaccttttccctcatgaaattttaaatatatgcaaatatatatatcattagattcctgtggtggataataatttcttcagattctaaaacaggtgtctagtgactgcttaattgtttccaagttgcatcaaagatgaattggtaaataatggaaatgagtagtgatatgaaaatggttatgtaactacatattacttgtttctggtaatcaagtcttattttttaaaagcctattgtttttcagaattgagatatttaaaacttgttataacttcttcctaaaaatagaagagaagaggaggtactgtgtgttacaaaaatttttttaaataaaga

SEQ ID NO: 676 - DNA, 1325 bp, Homo sapiens
tctttgactcagtatattaatttctttggtgaataaatgtcaccggtcatttctttataaaagcattttggtaagagaaccagcaatatggagacagatttctccccgtggggtaggagtcgtggggtaggaggaaaatgaaataatttcggtacatcttatggtttaaagagtagaaaataagatgaaatatcctaaaatataggagcacagacatttaaaattcataatcaggctaacaacactctcttgaatttaggaatcattgaaaactccttgcacttagatttaatttatatgttagttacattattaaaagtcataaggcatttatctgagtcattgctctacagagagcaattaatggcttgtaataataaaaagaatatttctctgtaatgcattgttgaaagacaaccagaatatcaagaaaatgtatataggaatatgctacttgcctcctccctgcatttcctcgtggggcactatttgcgacataggcctacagaattagactttcatacttagaagataaggtacactcttcttcttttatttatttatttatttatttttaggccattcttctggtttgccaaattctattaagacagtgatacatttgcttccttatttatgcatgcttagatcatgaacatgatgcccttcttttttttttttttctttggtcaagtagggattaatgccataggtttagagagaaggattgttttcagtttttaagagaattttttaaaaatacattttatggttctcttaaggaattaatattcacttctgaaggacttacttgtaatatataatttatcattttagccagcagggaaataaatcatttttaatccccagaagaaagtgctggaaatagcttctatatagtcagcagttcacctggagaaagatcttaattccttgttgttttgactaggaatatcaatatttggtataaaataactagaatagtttattaccttttccctcatgaaattttaaatatatgcaaatatatatatcattagattcctgtggtggataataatttcttcagattctaaaacaggtgtctagtgactgcttaattgtttccaagttgcatcaaagatgaattggtaaataatggaaatgagtagtgatatgaaaatggttatgtaactacatattacttgtttctggtaatcaagtcttattttttaaaagcctattgtttttcagaattgagatatttaaaacttgttataacttcttcctaaaaatagaagagaagaggaggtactgtgtgttacaaaaatttttttaaataaaga

SEQ ID NO: 677 - DNA, 704 bp, Homo sapiens
agctcctccccctgcgtctctggcctcgccggtcttggggggatggttccatcatggcgtcaatgcagaaacgactacagaaagaactgttggctttgcaaaatgacccacctcctggaatgaccttaaatgagaagagtgttcaaaattcaattacacagtggattgtagacatggaaggtgcaccaggtaccttatatgaaggggaaaaatttcaacttctatttaaatttagtagtcgatatccttttgactctcctcaggtcatgtttactggtgaaaatattcctgttcatcctcatgtttatagcaatggtcatatctgtttatccattctaacagaagactggtccccagcgctctcagtccaatcagtttgtcttagcattattagcatgctttccagctgcaaggaaaagagacgaccaccggataattctttttatgtgcgaacatgtaacaagaatccaaagaaaacaaaatggtggtatcatgggaaatttgaacacagagacatacacaaagggaagaagatgtgaagatacaggaagaatgtgaagatggtcatctataaaccaaagagaggcttgggacagaccctaccctctcagtcttcacaggacaacaaccctgcccgcaccttgatcttggacttctagcttccagagctgtgagaaaataaatgtctattgtttaagccaaaa

SEQ ID NO: 678 - DNA, 871 bp, Homo sapiens
ggggatcatggcgtcaatgcagaaacgactacagaaagaactgttggctttgcaaaatgacccacctcctggaatgaccttaaatgagaagagtgttcaaaattcaattacacagtggattgtagacatggaaggtgcaccaggtaccttatatgaaggggaaaaatttcaacttctatttaaatttagtagtcgatatccttttgactctcctcaggtcatgtttactggtgaaaatattcctgttcatcctcatgtttatagcaatggtcatatctgtttatccattctaacagaagactggtccccagcgctctcagtccaatcagtttgtcttagcattattagcatgctttccagctgcaaggaaaagagacgaccaccggataattctttttatgtgcgaacatgtaacaagaatccaaagaaaacaaaatggtggtatcatgaactgaaatctgccttcatactatctattacggattgaatcatgtcctccaataagatgtgttgaagtcttaactcccagtacctcaaattgtgaccctatttggaaatagagtcattgcagatgtcattagttgaggtgaggttataccgaagtagaatgtggccttaatccaatataactggtgtcctaagaattggagaagagactcagacacatggggagaagaccatgcagtcatggggtgatgtatcaacaagccagcaaatgccagggattgctgggaacatcagaggctggaagaggcagggaaatgttcttccctagagctgtgggagagaacatgattctgctgacaccttgatcatggacttccagcctccagaactgtgagacaataaatgtctggtttcttttaagtct

SEQ ID NO: 679 - DNA, 4018 bp, Homo sapiens
agctcctccccctgcgtctctggcctcgccggtcttggggggatggttccatcatggcgtcaatgcagaccacaggaaggagggtggaagtatggtttccaaaacgactacagaaagaactgttggctttgcaaaatgacccacctcctggaatgaccttaaatgagaagagtgttcaaaattcaattacacagtggattgtagacatggaaggtgcaccaggtaccttatatgaaggggaaaaatttcaacttctatttaaatttagtagtcgatatccttttgactctcctcaggtcatgtttactggtgaaaatattcctgttcatcctcatgtttatagcaatggtcatatctgtttatccattctaacagaagactggtccccagcgctctcagtccaatcagtttgtcttagcattattagcatgctttccagctgcaaggaaaagagacgaccaccggataattctttttatgtgcgaacatgtaacaagaatccaaagaaaacaaaatggtggtatcatgatgatacttgttgatgccactgttatcatcctcctagcagaagatagtcctactgagaaaatgagcactttgatcattcagtctttgaactttaacctttgactggaagtgacctataggcaatgaagactacttccttttactgcatttttactcgtgtgcattctgggcgcatgttgatcgctggttcagtccaggcaactgacatgcttttattagtcatacagtattaatgcaggtgtcaggaaatgtcaaatataattccattttttatttttatttttttaagcttttggaaaagctccaggtcctcatgtattgtgcaataacaatgacttccttggcggttttggtacgttcattgccggcaatgggcgttgtaacaggaaaagttttcattaactcctgccattcaatgattaatgcatgatagggcctatgaaatgaacttactggttatagtgggaatataaataaagtgagggatccaacattactttaaaagtcaccccaactgtttatatttggattctatgcactgtgatcctaaggttaacagcatgaattaacatgcgtctttaaaggactgtaatgaaagatcattgcatatttattgaattgtttatatctactgtcaagttgttttgacatggaagattttcaagtaacattggcagagaggtacagtatgttatccctatggtgaaaataaattaatttgttgtatatagttcctcaatctctgaagtaaaggtatgagtaatatagggtatgaatggtttaatcaaggctttattttggaagtaagaaaaatggcagtgatgattaaattgctgcagtccataatttgggcttgttatttgtacattaaagattttttccaagtaagttacactctgttaacttcctgctagccatcagcatgagccctactgcctaaacactatttcatttatttatgtttggaaaccccgtaaacatttttgtttgcaatcttgtttcttttgttataagtcaagtttgaatgttacaatacttttattgaaacttttgttaagttttttcttgtaaattttctttacttgtgagtatcatcttgtcctttaatcctgtaccctaaaataagaaatacatttttgacagaggcttaatgttttaacaaaagagtgtggacatttttattttaaaatttaggcaaaagtcactatcaaatggttgcttatttgtctcacacagccatatagtttttcctggagggttttgttttgttgttgttgaaaagactttgcttacagctagatgaaactttctatagaaaaaaaaaattgttgaaaggtccagttctcagtaccatgtgagttaatgatactacaactaagttctttttaaaaagtgattaatgtattttataaattaccttttcacatatgcaaaatctgtttctactacaatgttatttttactaatgccttattgttgcactctttttgaaatatcctgcagtgaatatatgaatcaatttgggcttaaaactgaaagccagttggctgaaaggtttgaaatacgtaccccagtaaaaccattcaatcaataattggtaaataatattttaaaattgtttttaatctgtatagatgacattttgtagctttgtacatgttgttaattaagggcatataattttacactcaaagtataattgctgaactcaggggtgggtagacttcaaaaatatgtctgctatagaaataacttgaaaaaaaaaattaaaaccgtggccagccaccaaattgtggacactgtttatatactgctagttaacaattaccacttttaaaaaattataaccgtttttgttctatcttgactagataaattctcacaatgatctctgtcagttttattagttggcctgtttaaccaagacagaaagtctttgaattactcatagttttaaactgcttttaatatgaaaattgcagctgtaaattatgtattttcatattttgcgtaactgctctacactactgtttgacttgatcttcttctgggggttagggagaaatctgtctccatattgctggttctcttaccaaaatgcttttataaagaaatgaccggtgacatttattcaccaaaggaattaatatactgagtcaaagattaacaatgctatactatagagtaataggtcatatatagcctcaattgagttttttatgacaatattttaacatacctctctctctacatataaataccataaagtaaactaaaatgacacagaggaaagtagaggaaaatgaaataatttcggtacatcttatggtttaaagagtagaaaataagatgaaatatcctaaaatataggagcacagacatttaaaattcataatcaggctaacaacactctcttgaatttaggaatcattgaaaactccttgcacttagatttaatttatatgttagttacattattaaaagtcataaggcatttatctgagtcattgctctacagagagcaattaatggcttgtaataataaaaagaatatttctctgtaatgcattgttgaaagacaaccagaatatcaagaaaatgtatataggaatatgctacttgcctcctccctgcatttcctcgtggggcactatttgcgacataggcctacagaattagactttcatacttagaagataaggtacactcttcttcttttatttatttatttatttatttttaggccattcttctggtttgccaaattctattaagacagtgatacatttgcttccttatttatgcatgcttagatcatgaacatgatgcccttcttttttttttttttctttggtcaagtagggattaatgccataggtttagagagaaggattgttttcagtttttaagagaattttttaaaaatacattttatggttctcttaaggaattaatattcacttctgaaggacttacttgtaatatataatttatcattttagccagcagggaaataaatcatttttaatccccagaagaaagtgctggaaatagcttctatatagtcagcagttcacctggagaaagatcttaattccttgttgttttgactaggaatatcaatatttggtataaaataactagaatagtttattaccttttccctcatgaaattttaaatatatgcaaatatatatatcattagattcctgtggtggataataatttcttcagattctaaaacaggtgtctagtgactgcttaattgtttccaagttgcatcaaagatgaattggtaaataatggaaatgagtagtgatatgaaaatggttatgtaactacatattacttgtttctggtaatcaagtcttattttttaaaagcctattgtttttcagaattgagatatttaaaacttgttataacttcttcctaaaaatagaagagaagaggaggtactgtgtgttacaaaaatttttttaaataaaga

SEQ ID NO: 680 - DNA, 1653 bp, Homo sapiens
agctcctccccctgcgtctctggcctcgccggtcttggggggatggttccatcatggcgtcaatgcagaaacgactacagaaagaactgttggctttgcaaaatgacccacctcctggaatgaccttaaatgagaagagtgttcaaaattcaattacacagtggattgtagacatggaaggtgcaccaggtaccttatatgaaggggaaaaatttcaacttctatttaaatttagtagtcgatatccttttgactctcctcaggtcatgtttactggtgaaaatattcctgttcatcctcatgtttatagcaatggtcatatctgtttatccattctaacagaagactggtccccagcgctctcagtccaatcagtttgtcttagcattattagcatgctttccagctgcaaggaaaagagacgaccaccggataattctttttatgtgcgaacatgtaacaagaatccaaagaaaacaaaatggtggtatcatgatgatacttgttgatgccactgttatcatcctcctagcagaagatagtcctactgagaaaatgagcactttgatcattcagtctttgaactttaacctttgactggaagtgacctataggcaatgaagactacttccttttactgcatttttactcgtgtgcattctgggcgcatgttgatcgctggttcagtccaggcaactgacatgcttttattagtcatacagtattaatgcaggtgtcaggaaatgtcaaatataattccattttttatttttatttttttaagcttttggaaaagctccaggtcctcatgtattgtgcaataacaatgacttccttggcggttttggtacgttcattgccggcaatgggcgttgtaacaggaaaagttttcattaactcctgccattcaatgattaatgcatgatagggcctatgaaatgaacttactggttatagtgggaatataaataaagtgagggatccaacattactttaaaagtcaccccaactgtttatatttggattctatgcactgtgatcctaaggttaacagcatgaattaacatgcgtctttaaaggactgtaatgaaagatcattgcatatttattgaattgtttatatctactgtcaagttgttttgacatggaagattttcaagtaacattggcagagaggtacagtatgttatccctatggtgaaaataaattaatttgttgtatatagttcctcaatctctgaagtaaaggtatgagtaatatagggtatgaatggtttaatcaaggctttattttggaagtaagaaaaatggcagtgatgattaaattgctgcagtccataatttgggcttgttatttgtacattaaagattttttccaagtaagttacactctgttaacttcctgctagccatcagcatgagccctactgcctaaacactatttcatttatttatgtttggaaaccccgtaaacatttttgtttgcaatcttgtttcttttgttataagtcaagtttgaatgttacaatacttttattgaaacttttgttaagttttttcttgtaaattttctttacttgtgagtatcatcttgtcctttaatcctgtaccctaaaataagaaatacatttttgacagaggcttaatgtttta

SEQ ID NO: 681 - DNA, 2482 bp, Homo sapiens
tttaaagttttaaagtttctaaaatgaaagctggccctgcctctctcccagagtgagcggagacagcggttgcatgagcagctttccttgtgaggccacaggtccctctggacacgctgctgcctgaccatgcctcctttccctttcagctttctcatagaccaatgggcttggagcattaaggccatacccctattatgcattctagtgcgaccttgtttacacctcccctggctcagtcacacagctgtgtggtaggctactagaagtgtttagtagttgtcactgggatcatgctgatgtggccccatccccgcctctccctgccctgtgatatcggaggaaacctgacagagcaaattggccatggccaagaaaaaggaaaagaaagagtgccaccaaaagcagggagccctaagggagcagttacaggtcctctttggattccagcacgacgcatcaaaccataccatgacgtgactaggacccaacctagaaatgaaggaactgaccctacaggactcacaaccctggataatgcagtgtcctcggacggcaacaagctctggacattacctgggggatgctgaaggcggcaactgaggaggctgaatgaatcctgctccagacacagacaccattcactccagataatttgttgcttgctatgctctctgttgtacattgcaactcgcatagggatgcaaagccggaataagagcaatgaccaccatgcctgacagacctgttgctgcgcacacctgtactctccaatgaacaagactgaatgcaaaaaaaacagaaaatggggagatttaggggatcagtcagtgtggttggaaaattgtaagatgaagttacaggatatagacacaaaccttcttggaaggccagaaggtttgcatagcttcagtaaaggatttggctgaaatcctttttacctctaatcccctttaccttgagttgatagcaatagagcaaataacatgggaatgtgggggagtttatctgaatagcttgtttactcatgtggtcctaagaccaacctttgattatccgcaggtgcatgattgctctctacctgggggcagggggagttaattacccacaggtggagctgaagagccaggaggctcagagtctgcagcagcagcaggaccagtacctgggtcatctgcagcagtatgtggccacctatcagcagcaggtggtcacctatcagcagctgacctctgaggaggaggagctgcacaaccagttactgctgcagacccagctcgtggaccggctgcagcagcagaaagctcaaagcaaagctgtggccaagatgggctgccaagagttgcgggagacccaggagcacctggaagctatcagccagcagaaccagcagcctcaggcccagttgagcctcatggctctccctggggaaggagatggacagtgaggaggaggaggaggtgcctcagcccatgccaagcatcccggaggatctagagagccagaaggccatggtggcatttttcaactcagctgtagctagtgccgaggaggagcaggcacggctatgtgggcagctgaaggagtgcactgccagcgcctggctcatctgttggcctcggcccagaaggaacctgaggcagcagcgtcacgcccacaagactgggggtgatcccatgtgtggggagacccaccaggccctgcagggggccatggagaagctgtgggagagtacatcgcactgtaccagagccagagggcagtgcggaaggaggaggagtgcatcagcaggctggcccaggacaagggagaggtgaaggtgaagctgctggagctggcgtggcttgtggacgactgcaacaagtggcatagcagattcctggcagctgcccagaaccctgctgatgagcccactccaggggcccccgccccccagtagcttggggctactgacaagccagggtagtgagtagagtccttagtggacagtgggcacgcaggagcaggggagggctcccacagcaccctgcctccctctctccaaagatctttgtgaggtgagccttgccagcagtggggagtctgcacaaggagaggcggggaagcattctccctgtgacaaccccactgagcagcagatcatgcaactgcttcatgagatgcagaacctccaggagcacccaggcttgggcagcagcccttgcattccttttttgtaccagactgatgagaacaatgaggtgaagatcaccatcatctaaaagccggccactgtcagcaaaacctggggaagtggggctggaggctctgcccctaccatgtccctaccaccccttcccagtcaaccctttaccctcacagtagcaagcataagacccctgtctaatgtggggagacaggtggagatgaggtgaagatcaccataatctaaaaggccactaaataaaaaaataaaaaattttaaaaaggtaggaaaaataaa

SEQ ID NO: 682 - DNA, 2596 bp, Homo sapiens
tttaaagttttaaagtttctaaaatgaaagctggccctgcctctctcccagagtgagcggagacagcggttgcatgagcagctttccttgtgaggccacaggtccctctggacacgctgctgcctgaccatgcctcctttccctttcagctttctcatagaccaatgggcttggagcattaaggccatacccctattatgcattctagtgcgaccttgtttacacctcccctggctcagtcacacagctgtgtggtaggctactagaagtgtttagtagttgtcactgggatcatgctgatgtggccccatccccgcctctccctgccctgtgatatcggaggaaacctgacagagcaaattggccatggccaagaaaaaggaaaagaaagagtgccaccaaaagcagggagccctaagggagcagttacaggagtctgaggatctggccagccgcctttagtattccaggcagtgtgtgggagagttggagcaggctctctgctgtctccacacagcagaagaaagcagacagggtgacggagctggactccatctcaaaacaaacaaacaaacaacaacaaaaaaaaaaacaaatgagaccatgggcttggaaatgccttgaaaaaatgtcaagtgtgattcagagtgaggaagtattactgtggaatagttactgtagctattgttaccggtcggccaactgctcctctgcctgctatatcctgacttaaccttggtctgtatttgccgtacaacaaggagttaaccaaagagagagacgccctcaggctggagttatacaagaacagttcattcctttctctactgcttctggccataaccgaagcaatgaggacctgaagcaggagaaatcagaattggaagagaagcttcaagtcctggtgactgagaaggctggcatgcagcttattttagaagagccgcaaaagaaattacaaatgatggcactcctgcttcaacaggctaggggttttcaaggcactgtgaagcccctgatgcgaaacagcagttaccgcaggccatggaggagcgggcacagctgaaagcacatctagggcaggtaatggagtcagttagataactacaaacggagagagatacgtatgctgaaaatctgaaaggagggagggccatgtggtgtcagaggaagcaacagatgtcggagcagcagggccctccaaggtggagcagcagctacaagcagaggctgaccacctgcagaaggagctggagagtctggcagctccgagcccaggagcaagacactgagggcttcagtcacccgaaccaggagtaggaggagaggctgctggagctggagcaggtggccgagctcttgcgggagcaggcagagtcacgcaggcaaatcctggagaccatgcagaacaaatgcaccaccatcagccacgtgctcacccagaaccacaagctcaaagagcagctgtctccgctgcagaacggattcataaagctggtgccacgggaggcagacaccaagttctggggtctccagctgcagtgggtggccgccaattgcttctctctgtccagactaatgagaacatggagatcaccagtgcactgcagttggaatagcacgtaaagagggagctgggaaagaagctgggcaagctaaaggacatggtaaccctgccccatccaagaagagctggaaggcgggcaccagcctctggggaggggaggtgtgaagccagaggcagctccagcctgggggacaggtgaccccagcaccctccagggcagtcctgtgactgtttcttgcttcccgccctctgacatttagtggtgggttcgttcttcctaggtctggacatcatcatcccagctggagtcatggagcctcccaaacatagggaaagagatggtggtataagaggttccttagagtcaaactagattccggccttggctccactggtcacctacttttcatctctaagtctcggtttctttaacttaaaagggaagttagcaccttcctcttggaggtgctgaggattaaatgagataatacgtggaaagcattaggcatgtagcacagttagcagatggtggttggctccctctgcttttccatcagtctgtggcctagtttaaatggtgggaggaagggtgtgagatttaaggctggttgtaagggatcagtcagtgtagttggaaaaattgtaagatgaagttataggatatagacacaaaccttcctggaaggccagaaagtctgcatagcttcaataaaggatttggctgaaagcagcgtaatcccctttaccttgagttgatagcaatagagcaaataacatgggaacgtgggggagtttattgaatagcttgtttactcatgtggtcctaagaccaacctttgattatccacgggtgcatgattgctctctactcggtggtcggcaaatttaattacccacaggtgtgttgactcaaagcctctgtcattaaatctatgctgaataaatgccgtcagggccagctagtcaaggtgcacaactctttttgtgcgtggtgtggccccttagctgctctgtcactgaaaaaaaatg

SEQ ID NO: 683 - DNA, 1512 bp, Homo sapiens
gtggaaggaagatgaccccaggtggccaggagcaggtgtgcacattgagagaggagaaggaggatagcatgagttgggtataagaacagtagatgagcttggctgaacagggccctccaaggtggagcagcagctacaagcagaggctgaccacctgcagaaggagctggagagtctggcagctccgagcccaggagcaagacactgagggcttcagtcacccgaaccaggagtaggaggagaggctgctggagctggagcaggtggccgagctcttgcgggagcaggcagagtcacgcaggcaaatcctggagaccatgcagaacaaatgcaccaccatcagccacgtgctcacccagaaccacaagctcaaagagcagctgtctccgctgcagaacggattcataaagctggtgccacgggaggcagacaccaagttctggggtctccagctgcagtgggtggccgccaattgcttctctctgtccagactaatgagaacatggagatcaccagtgcactgcagttggaatagcacgtaaagagggagctgggaaagaagctgggcaagctaaaggacatggtaaccctgccccatccaagaagagctggaaggcgggcaccagcctctggggaggggaggtgtgaagccagaggcagctccagcctgggggacaggtgaccccagcaccctccagggcagtcctgtgactgtttcttgcttcccgccctctgacatttagtggtgggttcgttcttcctaggtctggacatcatcatcccagctggagtcatggagcctcccaaacatagggaaagagatggtggtataagaggttccttagagtcaaactagattccggccttggctccactggtcacctacttttcatctctaagtctcggtttctttaacttaaaagggaagttagcaccttcctcttggaggtgctgaggattaaatgagataatacgtggaaagcattaggcatgtagcacagttagcagatggtggttggctccctctgcttttccatcagtctgtggcctagtttaaatggtgggaggaagggtgtgagatttaaggctggttgtaagggatcagtcagtgtagttggaaaaattgtaagatgaagttataggatatagacacaaaccttcctggaaggccagaaagtctgcatagcttcaataaaggatttggctgaaagcagcgtaatcccctttaccttgagttgatagcaatagagcaaataacatgggaacgtgggggagtttattgaatagcttgtttactcatgtggtcctaagaccaacctttgattatccacgggtgcatgattgctctctactcggtggtcggcaaatttaattacccacaggtgtgttgactcaaagcctctgtcattaaatctatgctgaataaatgccgtcagggccagctagtcaaggtgcacaactctttttgtgcgtggtgtggccccttagctgctctgtcactgaaaaaaaatg

SEQ ID NO: 684 - DNA, 1239 bp, Homo sapiens
tttaaagttttaaagtttctaaaatgaaagctggccctgcctctctcccagagtgagcggagacagcggttgcatgagcagctttccttgtgaggccacaggtccctctggacacgctgctgcctgaccatgcctcctttccctttcagctttctcatagaccaatgggcttggagcattaaggccatacccctattatgcattctagtgcgaccttgtttacacctcccctggctcagtcacacagctgtgtggtaggctactagaagtgtttagtagttgtcactgggatcatgctgatgtggccccatccccgcctctccctgccctgtgatatcggaggaaacctgacagagcaaattggccatggccaagaaaaaggaaaagaaagagtgccaccaaaagcagggagccctaagggagcagttacaggtcctctttggattccagcacgacgcatcaaaccataccatgacgtgactaggacccaacctagaaatgaaggaactgaccctacaggactcacaaccctggataatgcagtgtcctcggacggcaacaagctctggacattacctgggggatgctgaaggcggcaactgaggaggctgaatgaatcctgctccagacacagacaccattcactccagataatttgttgcttgctatgctctctgttgtacattgcaactcgcatagggatgcaaagccggaataagagcaatgaccaccatgcctgacagacctgttgctgcgcacacctgtactctccaatgaacaagactgaatgcaaaaaaaacagaaaatggggagatttaggggatcagtcagtgtggttggaaaattgtaagatgaagttacaggatatagacacaaaccttcttggaaggccagaaggtttgcatagcttcagtaaaggatttggctgaaatcctttttacctctaatcccctttaccttgagttgatagcaatagagcaaataacatgggaatgtgggggagtttatctgaatagcttgtttactcatgtggtcctaagaccaacctttgattatccgcaggtgcatgattgctctctacctgggggcagggggagttaattacccacaggtgtgttgactcaaagcctttgtcattaagtctgtgctgaataaatgccatgagggccagccagttaaggcctgtggccgccacaactctttctgtgcatggcccggccccttagctgctctgtcact

SEQ ID NO: 685 - DNA, 1706 bp, Homo sapiens
tttaaagttttaaagtttctaaaatgaaagctggccctgcctctctcccagagtgagcggagacagcggttgcatgagcagctttccttgtgaggccacaggtccctctggacacgctgctgcctgaccatgcctcctttccctttcagctttctcatagaccaatgggcttggagcattaaggccatacccctattatgcattctagtgcgaccttgtttacacctcccctggctcagtcacacagctgtgtggtaggctactagaagtgtttagtagttgtcactgggatcatgctgatgtggccccatccccgcctctccctgccctgtgatatcggaggaaacctgacagagcaaattggccatggccaagaaaaaggaaaagaaagagtgccaccaaaagcagggagccctaagggagcagttacaggtcctctttggattccagcacgacgcatcaaaccataccatgacgtgactaggacccaacctagaaatgaaggaactgaccctacaggactcacaaccctggataatgcagtgtcctcggacggcaacaagctctggacattacctgggggatgctgaaggcggcaactgaggaggctgaatgaatcctgctccagacacagacaccattcactccagataatttgttgcttgctatgctctctgttgtacattgcaactcgcatagggatgcaaagccggaataagagcaatgaccaccatgcctgacagacctgttgctgcgcacacctgtactctccaatgaacaagactgaatgcaaaaaaaacagaaaatggggagatttaggggatcagtcagtgtggttggaaaattgtaagatgaagttacaggatatagacacaaaccttcttggaaggccagaaggtttgcatagcttcagtaaaggatttggctgaaatcctttttacctctaatcccctttaccttgagttgatagcaatagagcaaataacatgggaatgtgggggagtttatctgaatagcttgtttactcatgtggtcctaagaccaacctttgattatccgcaggtgcatgattgctctctacctgggggcagggggagttaattacccacaggtggagctgaagagccaggaggctcagagtctgcagcagcagcaggaccagtacctgggtcatctgcagcagtatgtggccacctatcagcagcaggtggtcacctatcagcagctgacctctgaggaggaggagctgcacaaccagttactgctgcagacccagctcgtggaccggctgcagcagcagaaagctcaaagcaaagctgtggccaagatgggctgccaagagttgcgggagacccaggagcacctggaagctatcagccagcagaaccagcagcctcaggcccagttgagcctcatggctctccctggggaaggtaccggagactgctcacaggaagaggagagagccccaggaggaaacgggaactgttagcagcataggattgaggagctgaaacagacttttagaacagctggtcattatgccaaccaggagatggacagtgaggaggaggaggaggtgcctcagcccatgccaagcatcccggaggatctgcatcagcctgtttcaagaacaggctgatgccactaccccttgattttccatcttaaaatatacatgtttatgtaaacaaatctctccatat

SEQ ID NO: 686 - DNA, 414 bp, Homo sapiens
gtattgactgagttgtacattaagcctagccctagcccttttaaggtgcactgtgtggaacggcccaggctccccaaatctaaacttctcactcttcaccatccagttttcaaggcactgtgaagcccctgatgcgaaacagcagttaccgcaggccatggaggagcgggcacagctgaaagcacatctagggcaggtgaagctttgcaggggagggatgtggaaggaagatgaccccaggtggccaggagcaggtgaggaccagtgacagccctttgtaacttttgtacccattctttaaggtaatggagtcagttagataactacaaacggagagagatacgtatgctgaaaatctgaaaggagggagggccatgtggtgtcagaggaagcaacagatgtcggagcaggtga

SEQ ID NO: 687 - DNA, 411 bp, Homo sapiens
ccaggagcaggtgaggaccagtgacagccctttgtaacttttgtacccattctttaaggtaatggagtcagttagataactacaaacggagagagatacgtatgctgaaaatctgaaaggagggagggccatgtggtgtcagaggaagcaacagatgtcggagcaggtgagacctgacccttcagccccccaccttagatagatcacttgatctttctaggcatctgtaaaatgggaagactatagccagagttggtcatgggtctgggctgtgtgaaggcaaggtcagagagggagatggtagcctatccagccaccagcccttctcttcagtgccctttccctctgtattttgggcaggtgtgcacattgagagaggagaaggaggatagcatgagttgggtataagaa

SEQ ID NO: 688 - DNA, 711 bp, Homo sapiens
ggggaagagggaatgatttttctaacctgcctccacccttccaggtgccacgggaggcagacaccaagttctggggtctccagctgcagtgggtggccgccaattgcttctctctgtccagactaatgagaacatggagatcaccagtgcactgcagttggaatagcacgtaaagagggagctgggaaagaagctgggcaagctaaaggacatggtaaccctgccccatccaagaagagctggaaggcgggcaccagcctctggggaggggaggtgtgaagccagaggcagctccagcctgggggacaggtgaccccagcaccctccagggcagtcctgtgactgtttcttgcttcccgccctctgacatttagtggtgggttcgttcttcctaggtctggacatcatcatcccagctggagtcatggagcctcccaaacatagggaaagagatggtggtataagaggttccttagagtcaaactagattccggccttggctccactggtcacctacttttcatctctaagtctcggtttctttaacttaaaagggaagttagcaccttcctcttggaggtgctgaggattaaatgagataatacgtggaaagcattaggcatgtagcacagttagcagatggtggttggctccctctgcttttccatcagtctgtggcctagtttaaatggtgggaggaagggtgtgaga

SEQ ID NO: 689 - DNA, 1384 bp, Homo sapiens
gcagaggtgggcccactctgcccttgttgggttgtctgaggacctctctggccacccccaacaggagatggacagtgaggaggaggaggaggtgcctcagcccatgccaagcatcccggaggatctagagagccagaaggccatggtggcatttttcaactcagctgtagctagtgccgaggaggagcaggcacggctatgtgggcagctgaaggagtgcactgccagcgcctggctcatctgttggcctcggcccagaaggaacctgaggcagcagcgtcacgcccacaagactgggggtgatcccatgtgtggggagacccaccaggccctgcagggggccatggagaagctgtgggtgagtctttcctggcatgggccaagaagggttggggcaggaaggtcgctgccttaatgtgaccccattattttggctccagagccgctttatggagctcatgcaggagagaaggtggacttgaaggagagggttgaggaactggaacattgctgcatctagctgtctggagagagacagacaccatcggggagtgggaagccagggcacggcaaagagagctgcacattggtcagaggggccccagcgtctgagtcctgtcctcctgcaggagagtacatcgcactgtaccagagccagagggcagtgcggaaggaggaggagtgcatcagcaggctggcccaggacaagggagaggtgaaggtgaagctgctggagctggcgtggcttgtggacgactgcaacaagtggcatagcagattcctggcagctgcccagaaccctgctgatgagcccactccaggggcccccgccccccagtagcttggggctactgacaagccagggtagtgagtagagtccttagtggacagtgggcacgcaggagcaggggagggctcccacagcaccctgcctccctctctccaaagatctttgtgaggtgagccttgccagcagtggggagtctgcacaaggagaggcggggaagcattctccctgtgacaaccccactgagcagcagatcatgcaactgcttcatgagatgcagaacctccaggagcacccaggcttgggcagcagcccttgcattccttttttgtaccagactgatgagaacaatgaggtgaagatcaccatcatctaaaagccggccactgtcagcaaaacctggggaagtggggctggaggctctgcccctaccatgtccctaccaccccttcccagtcaaccctttaccctcacagtagcaagcataagacccctgtctaatgtggggagacaggtggagatgaggtgaagatcaccataatctaaaaggccactaaataaaaaaataaaaaattttaaaaaggtaggaaaaataaa

SEQ ID NO: 690 - DNA, 2671 bp, Homo sapiens
tttaaagttttaaagtttctaaaatgaaagctggccctgcctctctcccagagtgagcggagacagcggttgcatgagcagctttccttgtgaggccacaggtccctctggacacgctgctgcctgaccatgcctcctttccctttcagctttctcatagaccaatgggcttggagcattaaggccatacccctattatgcattctagtgcgaccttgtttacacctcccctggctcagtcacacagctgtgtggtaggctactagaagtgtttagtagttgtcactgggatcatgctgatgtggccccatccccgcctctccctgccctgtgatatcggaggaaacctgacagagcaaattggccatggccaagaaaaaggaaaagaaagagtgccaccaaaagcagggagccctaagggagcagttacaggtcctctttggattccagcacgacgcatcaaaccataccatgacgtgactaggacccaacctagaaatgaaggaactgaccctacaggactcacaaccctggataatgcagtgtcctcggacggcaacaagctctggacattacctgggggatgctgaaggcggcaactgaggaggctgaatgaatcctgctccagacacagacaccattcactccagataatttgttgcttgctatgctctctgttgtacattgcaactcgcatagggatgcaaagccggaataagagcaatgaccaccatgcctgacagacctgttgctgcgcacacctgtactctccaatgaacaagactgaatgcaaaaaaaacagaaaatggggagatttaggggatcagtcagtgtggttggaaaattgtaagatgaagttacaggatatagacacaaaccttcttggaaggccagaaggtttgcatagcttcagtaaaggatttggctgaaatcctttttacctctaatcccctttaccttgagttgatagcaatagagcaaataacatgggaatgtgggggagtttatctgaatagcttgtttactcatgtggtcctaagaccaacctttgattatccgcaggtgcatgattgctctctacctgggggcagggggagttaattacccacaggtggagctgaagagccaggaggctcagagtctgcagcagcagcaggaccagtacctgggtcatctgcagcagtatgtggccacctatcagcagcaggtggtcacctatcagcagctgacctctgaggaggaggagctgcacaaccagttactgctgcagacccagctcgtggaccggctgcagcagcagaaagctcaaagcaaagctgtggccaagatgggctgccaagagttgcgggagacccaggagcacctggaagctatcagccagcagaaccagcagcctcaggcccagttgagcctcatggctctccctggggaaggagatggacagtgaggaggaggaggaggtgcctcagcccatgccaagcatcccggaggatctagagagccagaaggccatggtggcatttttcaactcagctgtagctagtgccgaggaggagcaggcacggctatgtgggcagctgaaggagtgcactgccagcgcctggctcatctgttggcctcggcccagaaggaacctgaggcagcagcgtcacgcccacaagactgggggtgatcccatgtgtggggagacccaccaggccctgcagggggccatggagaagctgtggagccgctttatggagctcatgcaggagagaaggtggacttgaaggagagggttgaggaactggaacattgctgcatctagctgtctggagagagacagacaccatcggggagtgggaagccagggcacggcaaagagagctgcacattggtcagaggggccccagcgtctgagtcctgtcctcctgcaggagagtacatcgcactgtaccagagccagagggcagtgcggaaggaggaggagtgcatcagcaggctggcccaggacaagggagaggtgaaggtgaagctgctggagctggcgtggcttgtggacgactgcaacaagtggcatagcagattcctggcagctgcccagaaccctgctgatgagcccactccaggggcccccgccccccagtagcttggggctactgacaagccagggtagtgagtagagtccttagtggacagtgggcacgcaggagcaggggagggctcccacagcaccctgcctccctctctccaaagatctttgtgaggtgagccttgccagcagtggggagtctgcacaaggagaggcggggaagcattctccctgtgacaaccccactgagcagcagatcatgcaactgcttcatgagatgcagaacctccaggagcacccaggcttgggcagcagcccttgcattccttttttgtaccagactgatgagaacaatgaggtgaagatcaccatcatctaaaagccggccactgtcagcaaaacctggggaagtggggctggaggctctgcccctaccatgtccctaccaccccttcccagtcaaccctttaccctcacagtagcaagcataagacccctgtctaatgtggggagacaggtggagatgaggtgaagatcaccataatctaaaaggccactaaataaaaaaataaaaaattttaaaaaggtaggaaaaataaa

SEQ ID NO: 691 - DNA, 2413 bp, Homo sapiens
aatttttaaaatttagatgacaaatttcagtccattgtagaaaagcactttgctaaaacctctcaagacataaaactgcagttttatggaaatatgtgaacagtaatgtatgatgtggtccaaatgaattgttaacttggggaagaggatatgcttgtgttcacaccccctcaggtcctctttggattccagcacgacgcatcaaaccataccatgacgtgactaggacccaacctagaaatgaaggaactgaccctacaggactcacaaccctggataatgcagtgtcctcggacggcaacaagctctggacattacctgggggatgctgaaggcggcaactgaggaggctgaatgaatcctgctccagacacagacaccattcactccagataatttgttgcttgctatgctctctgttgtacattgcaactcgcatagggatgcaaagccggaataagagcaatgaccaccatgcctgacagacctgttgctgcgcacacctgtactctccaatgaacaagactgaatgcaaaaaaaacagaaaatggggagatttaggggatcagtcagtgtggttggaaaattgtaagatgaagttacaggatatagacacaaaccttcttggaaggccagaaggtttgcatagcttcagtaaaggatttggctgaaatcctttttacctctaatcccctttaccttgagttgatagcaatagagcaaataacatgggaatgtgggggagtttatctgaatagcttgtttactcatgtggtcctaagaccaacctttgattatccgcaggtgcatgattgctctctacctgggggcagggggagttaattacccacaggtggagctgaagagccaggaggctcagagtctgcagcagcagcaggaccagtacctgggtcatctgcagcagtatgtggccacctatcagcagcaggtggtcacctatcagcagctgacctctgaggaggaggagctgcacaaccagttactgctgcagacccagctcgtggaccggctgcagcagcagaaagctcaaagcaaagctgtggccaagatgggctgccaagagttgcgggagacccaggagcacctggaagctatcagccagcagaaccagcagcctcaggcccagttgagcctcatggctctccctggggaaggagatggacagtgaggaggaggaggaggtgcctcagcccatgccaagcatcccggaggatctagagagccagaaggccatggtggcatttttcaactcagctgtagctagtgccgaggaggagcaggcacggctatgtgggcagctgaaggagtgcactgccagcgcctggctcatctgttggcctcggcccagaaggaacctgaggcagcagcgtcacgcccacaagactgggggtgatcccatgtgtggggagacccaccaggccctgcagggggccatggagaagctgtggagccgctttatggagctcatgcaggagagaaggtggacttgaaggagagggttgaggaactggaacattgctgcatctagctgtctggagagagacagacaccatcggggagtgggaagccagggcacggcaaagagagctgcacattggtcagaggggccccagcgtctgagtcctgtcctcctgcaggagagtacatcgcactgtaccagagccagagggcagtgcggaaggaggaggagtgcatcagcaggctggcccaggacaagggagaggtgaaggtgaagctgctggagctggcgtggcttgtggacgactgcaacaagtggcatagcagattcctggcagctgcccagaaccctgctgatgagcccactccaggggcccccgccccccagtagcttggggctactgacaagccagggtagtgagtagagtccttagtggacagtgggcacgcaggagcaggggagggctcccacagcaccctgcctccctctctccaaagatctttgtgaggtgagccttgccagcagtggggagtctgcacaaggagaggcggggaagcattctccctgtgacaaccccactgagcagcagatcatgcaactgcttcatgagatgcagaacctccaggagcacccaggcttgggcagcagcccttgcattccttttttgtaccagactgatgagaacaatgaggtgaagatcaccatcatctaaaagccggccactgtcagcaaaacctggggaagtggggctggaggctctgcccctaccatgtccctaccaccccttcccagtcaaccctttaccctcacagtagcaagcataagacccctgtctaatgtggggagacaggtggagatgaggtgaagatcaccataatctaaaaggccactaaataaaaaaataaaaaattttaaaaaggtaggaaaaataaa

SEQ ID NO: 692 - DNA, 927 bp, Homo sapiens
ctcacaaaacctgcatataaatgtttgcagtagatttagtagatttgctagtcatgtctaaaactggaaacaacccagatgtttttcagagtgaatggttaaacacatatggtcctaccatatcacggaatactactcagcaataagaaagaacaaacaatacaaccaggaatctccagagaattatgttaattgtaaaagccaatcctaaaaggtggcttattatatgatttcatttatatgacagtctttaaaatgcaaagttataaaaatggaaaatagattactggttgtttggggtttaggagggagtggaagtgggagagaggtgagggcaattataaaagagcaacataaggaagccttgtgatgatggaaacgttctgtatcttgactgtgccattatcaatgtcccaattgtgatattttactatagtattgcaagatgctatcattgaggaaaacggggtaaagggtacagggggtcacactgtattatttcttacaagggcatgtgaattttcaattatctcaaagtaaaagtttcaattaaatagatagcatcttttaaatgcaagaataggaggttattttgtgtactggtggcaggcaaaagtttcttttttcttaatatagtttataaagaaaatagatacattaaatatcaaaattaataccttttgttgatcaaaataaatatacccttaagaaaatgaataggcaaggcagaatttgtagaaaacaaatcaaacaaaacgtatatccacaatctatgtctatacctatacttcattttttatttttcataaataaaaataaaacaataaaaggtgggcagaataactggcaagaaactttatgaacatttatgaatgcccaaaaaaagacatacaagtctttatcctcatcatttattgaataaataca

SEQ ID NO: 693 - DNA, 1044 bp, Homo sapiens
gacagagcaagactccgtctcaaaaagaataggagacacagtgagacgaccatgagaagccagagagaaaacagccatcttacaagccaagagagaagttgtgagaaaaaaaaaaaaaaacaaaccctgctgactccttgatttttgccttccaagctccagaactgtgaggaaataaatgtctgttgttttagccaccaaacctggtaaggcagtcctagcaagctaatacaatagcctgttccttaataaacaactgcaagatttagtttatagaaaccagctcggaagcagttggtttagaatgactttcctaggaatctggtcaagaaaggaacttactaaaagactattctcatttaacaaaagagatattaagtatctcaaaggccaaatctttaaaaagattatctgttttaagccacaaaacatttgtgtggatccctttgcagcaagtttgctcttagataagattcagtcttcgttctcagctgttgcaggttaaggcttgtgaaatgatccaaaaagggaacagcagcttttggagaaaacttttatttgttcttcattctagtgtcaagtttaaaggcttgaagtcagaatgttagaagtggggaaggggaccttagaggtgacgtcttccagatgttcctgtttatgcacaaggggacagtctcggagaattaaggcgcaaaactcgggtcccaatttctaggtaggttcctgtttgttctgctgctatcgtgcgcttatggtgactgtgtgaatccaaccaaaacggaggttccgtatgccagtggggcaacgtttttcagctgcaaatcttgggaaatcaaaagcaaggctgttttttttttcttttcttttttgagacagagtttcactcttgttgcccaggctggagtgcaatggcgcaatctcagctcactgcaacctccacctcccaggttcaagagaatcgcttgaacccgggaggcagagattgcactgagctgaggtcatgccactgcactccagcctggcaacagggcaagactccatctc

SEQ ID NO: 694 - DNA, 710 bp, Homo sapiens
ttctccaagaccattcagtcgtgaagggttcaacttgttccgggttatttatttagcattctctattttctgctttgcttttgacactccaatgtttaattgtatatttaggaaataacaatgaagagtacgtttttaaaaagaagaatgttttctggaagggatttccccccacttttggacagtgagttagactccttctgaagcctctggatctaggttattacagggtttgtcttcttgaagctggaactgtccaactgttgtgctatttcagacctggcctgtctttcactttcaagctccagaaataatttatagctgtagggtgtcaggagtgggtttgaactgggcctgcccaacgtaacatggaattgtgcacagatggttaaaattactatttctgcattcaaatgactaagtacagtaaactttttactggcacagttaatttatttgaatatttatgggtcgagtgcttcacgtagaagactaacataatgaaaaagcccagcacatactcagagctgatttggctttttaaaagattctaggcttgaatatagctagctaaatggtctttagcaaattgactggcagtaaattgatccctgtggactgtggcttgaatcagcctctcattctttaaaggtattatggagatatggttatctcagcgcaaggctggtctagaaaagggatgctttcag

SEQ ID NO: 695 - DNA, 534 bp, Homo sapiens
tccctgaagtggctgctatccaggatgactgtgttgctgcagtctttgagtggttggagcgctgtaatgtctatgttaatagctgggaaatcgcagtagcagcaaccagaccactccaatggaacaatccaagttggggtaagtttgattgagcaaaaaagtcatgctgactgtgtgatgaagaggcagaactggtaacagtgacaggccctgcagtcagcagctgtggattttatgtgcagggcagactgatctggaaaatgggaagagctgactgccaataacaccttggggggaggtttgttcagtgcatctccctactccttgtatacctctgatgacatgcagaagcttaggaaataaaacacacttgtaacatcacagggtgcaagtaagtacatgtggatgccagtgtagagagaagcgaaagctagttttcattgcaagaatccaaacagagtaacagggctttgtccactgtctccagtccatggttccctggtgttcctagagtcctattaaaaaaaaaaaaaa

SEQ ID NO: 696 - DNA, 549 bp, Homo sapiens
tcaattagatagctgtattggggaaaaaagtagaccccttccttgataccatatatatagaaaaatcaattccatgtggaatatggtttaaatgcgaaaggaaataatgaaacaggagagtgtcttcatgttttggggtaggcaactatttaaaggacataaagcataaaggaacattttaaactaatttgtggtgatagaatcagggtagaggttatcactcgcctggcaaaattaatcaataagaaaagataacttagccagacacagtggctcatgcctgtaatcctagcactgggaggctgaggcatgaggatagcttaagaccaggagttcaagactagcctgggcaacatagtgagaccttgtctctacaaaaattttaaaaattaactgggtgcagtggcatgcacttgtagtcccagttacttggcaggctggggcaggaggatcatctgagcccaggagtttgagcctgcagtgaactataattgtgtcactacactccagcctgggcaacagagcaagaccctgcctgtctaaaattaa

SEQ ID NO: 697 - DNA, 294 bp, Homo sapiens
tccgccggactcgcacaacactccgccgcactcgcacaagactccgccgcggcgacctctactgaaagacccccagtcctggtgtcgcccgaaggcccaggaaaccgtgcttccgcgcttctcccccagaacgtgggaagctgccgctttaccctcattttaccccagggtcgcaaaacatctcaccgtagttgaagccagcaagccggaccaggcgtcccggccaagcaacgtgcgcgcccccccgcgagtgctcgccccgcccctagggaggagccggccgacccccggcca

SEQ ID NO: 698 - DNA, 2248 bp, Homo sapiens
ggcagccgcagaagcggcagcggcggcggcgcggcgcaggcaccggcccggggagaggcaccatgagcggatcacagaacaatgacaaaagacaatttctgctggagcgactgctggatgcagtgaaacagtgccagatccgctttggagggagaaaggagattgcctcggattccgacagcagggtcacctgtctgtgtgcccagtttgaagccgtcctgcagcatggcttgaagaggagtcgaggattggcactcacagcggcagcgatcaagcaggcagcgggctttgccagcaaaaccgaaacagagcccgtgttctggtactacgtgaaggaggtcctcaacaagcacgagctgcagcgcttctactccctgcgccacatcgcctcagacgtgggccggggtcgcgcctggctgcgctgtgccctcaacgaacactccctggagcgctacctgcacatgctcctggccgaccgctgcaggctgagcactttttatgaagactggtcttttgtgatggatgaagaaaggtccagtatgcttcctaccatggcagcaggtctgaactccatactctttgcgattaacatcgacaacaaggatttgaacgggcagagtaagtttgctcccaccgtttcagacctcttaaaggagtcaacgcagaacgtgacctccttgctgaaggagtccacgcaaggagtgagcagcctgttcagggagatcacagcctcctctgccgtctccatcctcatcaaacctgaacaggagaccgaccccttgcctgtcgtgtccaggaatgtcagtgctgatgccaaatgcaaaaaggagcggaagaagaaaaagaaagtgaccaacataatctcatttgatgatgaggaagatgagcagaactctggggacgtgtttaaaaagacacctggggcaggggagagctcagaggacaactccgaccgctcctctgtcaatatcatgtccgcctttgaaagccccttcgggcctaactccaatggaagtcagagcagcaactcatggaaaattgattccctgtctttgaacggggagtttgggtaccagaagcttgatgtgaaaggcatcgatgatgaagatgtggatgaaaacgaagatgacgtgtatggaaactcatcaggaaggaagcacaggggccactcggagtcgcccgagaagtaagtttgtgtgtaaggtggagtctcaccgtcccccaggctggagtgccgtggcgtgatctcagctcactgcaacctccacctcccgggttcaggctattctcctgcctcagcctcccgagtagctgggattacaggcacctgtcaccacacccagctaatttttgtatttttagtggggatggggtttcaccatgttggccaggctggtctcaaactcctgacctcaggtgatctgcctgccttggcctcccagattgctgggtttacaggcatgagccaccacgcccagccttcccttgcacttttaatgagggggttaagttcactgttttctctttctatggtattgggtaaaataggtctgcaagctttatatttgcccagggtatcattcattcttcagttgttgatttaggagtgttatttggaaggagtattatttgctcttcccctgagaactgaaagaggggaagggagtacatttgagggcacttaatacaaagttaatgtcagaatgtgtgccttgaaattcttgctttatacatacatctgtcattttcatttcacagggttcacagggtttcacagtctgatgagactgtgcctgttattgttttttatttttactctggattttccttgcatctgacttgccactagcacaggaagctcaggacgaaggcagcgttaggagaatagttgtggtatggtgacttctgtgtttatctgcaggagtgtgaatagccgtaacttgcctgcacctgctgccttaacagtggagttggccaggcgcagtggctcacacctgtaatcccagcactttgggacaccagggtgggtggatcacctgaggtcaggagttctagaccagcctgaccaacatggtgaaaccccttctctacgtataaaaaaatacaaaattagccaggcatggtggtgcatgcctgtaactccagatacttgggatgctgaggcaggagaatcgcttgaatatgagaggcggagccaagatgatgccattgcactccagcctgggcaacaagagagaaggtccttctc

SEQ ID NO: 699 - DNA, 1061 bp, Homo sapiens
aattcaggatccagctctgtcacccaggctggagtgcagtatctaagtatcatttctcttacttcaaattattacattttattctgtacattgattctgaactcctaatataatatttatgtcctgtatttgcagcccattggttttttttaaagtcataaatctaaatgatgccagaaaatcaaagatgccccagatgttgggcttctcttttgccagccacattggtagcactctcctgccttggcctcccagattgctgggtttacaggcatgagccaccacgcccagccttcccttgcacttttaatgagggggttaagttcactgttttctctttctatggtattgggtaaaataggtctgcaagctttatatttgcccagggtatcattcattcttcagttgttgatttaggagtgttatttggaaggagtattatttgctcttcccctgagaactgaaagaggggaagggagtacatttgagggcacttaatacaaagttaatgtcagaatgtgtgccttgaaattcttgctttatacatacatctgtcattttcatttcacagggttcacagggtttcacagtctgatgagactgtgcctgttattgttttttatttttactctggattttccttgcatctgacttgccactagcacaggaagctcaggacgaaggcagcgttaggagaatagttgtggtatggtgacttctgtgtttatctgcaggagtgtgaatagccgtaacttgcctgcacctgctgccttaacagtggagttggccaggcgcagtggctcacacctgtaatcccagcactttgggacaccagggtgggtggatcacctgaggtcaggagttctagaccagcctgaccaacatggtgaaaccccttctctacgtataaaaaaatacaaaattagccaggcatggtggtgcatgcctgtaactccagatacttgggatgctgaggcaggagaatcgcttgaatatgagaggcggagccaagatgatgccattgcactccagcctgggcaacaagagagaaggtccttctc

SEQ ID NO: 700 - DNA, 909 bp, Homo sapiens
ggcagccgcagaagcggcagcggcggcggcgcggcgcaggcaccggcccggggagaggcaccatgagcggatcacagaacaatgacaaaagacaatttctgctggagcgactgctggatgcagtgaaacagtgccagatccgctttggagggagaaaggagattgcctcggattccgacagcagggtcacctgtctgtgtgcccagtttgaagccgtcctgcagcatggcttgaagaggagtcgaggattggcactcacagcggcagcgatcaagcaggcagcgggctttgccagcaaaaccgaaacagagcccgtgttctggtactacgtgaaggaggtcctcaacaagcacgagctgcagcgcttctactccctgcgccacatcgcctcagacgtgggccggggtcgcgcctggctgcgctgtgccctcaacgaacactccctggagcgctacctgcacatgctcctggccgaccgctgcaggctgaggtacgtggccgggatgcgaactgggatgggatggagcaagaggtgaagatcttggagtctggaatcagaccacctggattttcatcctagttccccgatctgggggaagtgggcctccctctgacagctccggagtgttctgctgagctgtggagaaacttgggggagaatcattgagagactgcctgtaaagggctcagcatggcacttgcatacagccagcttggatgtggagagagctgttgtcttaggacatagcttcctcttcactttctggattttttttttttttttaaagacagggtcttgctttgttgcccaagttggagtgcagtggcatgaacatgggtctttgcagcctggacctccctggctcaagcaatcctcccaccttagcctcctgagcagctaggacccta

SEQ ID NO: 701 - DNA, 598 bp, Homo sapiens
ggcagccgcagaagcggcagcggcggcggcgcggcgcaggcaccggcccggggagaggcaccatgagcggatcacagaacaatgacaaaagacaatttctgctggagcgactgctggatgcagtgaaacagtgccagatccgctttggagggagaaaggagattgcctcggattccgacagcagggtcacctgtctgtgtgcccagtttgaagccgtcctgcagcatggcttgaagaggagtcgaggattggcactcacagcggcagcgatcaagcaggcagcgggctttgccagcaaaaccgaaacagagcccgtgttctggtactacgtgaaggaggtcctcaacaagcacgagctgcagcgcttctactccctgcgccacatcgcctcagacgtgggccggggtcgcgcctggctgcgctgtgccctcaacgaacactccctggagcgctacctgcacatgctcctggccgaccgctgcaggctgagcactttttatgaagactggtcttttgtgatggatgaagaaaggtccagtatgcttcctaccatggcagcagggtcggaacgccagtacatcggagtcccacaggcgaa

SEQ ID NO: 702 - DNA, 443 bp, Homo sapiens
ggcatatagtaaatgttcaataaatggtagctatgattgtcatcaactcaaacagcctcccttcattcacctttacctcataaagcaactctttctagaatgttctatatataacaattgtattaaaggcttcttgaaggagaagccatttgtttgtgtctttgttcaacaccaggctcctgatgctttcagtagtgtctggcgcacagcaggcatttaaaaaatatttgttaaatgaattttatagaattaagtctatcacactcttttgagtactaaaatgctattatagtctgtggataaaaataataaaacaaggccaggcgcagtggctcacacctgtaatcccagcactttgggaggccgaggtgggtggatcatgaggtcaggagattgagaccatcctggctaacacggtgaaaccccgtctctactaaaaatac

SEQ ID NO: 703 - DNA, 284 bp, Homo sapiens
caagagtgaaattccttctcaaaaaaaaaaaaaaaaaaaaaaaagaggaggaaaaagaagaactaatctgattgttgttgcatggggggcaactttgagccttctccttggaacatgaggacctcattgtacatatttgaaccactgggataacaacagtaaaaatagtcatagtagaattagccaacagtcactgaacatttactgtgagcttggtactcttccagacttcatatttattatctcatttatttcttaacctcatgaaatcaggactataattc

SEQ ID NO: 704 - DNA, 427 bp, Homo sapiens
gacacagctcagccacactgcagcctcagctctcgggacactacagatccctcacagtcactcgacaaacacacatgggtcgtgcccagtgctcactggagactctgccctccccaggtcacagtctgatcacttcaaaggagaactgggtgagtactagggtaggggtcctgaaaagggtcgtggagtaggaattctggggtcctgagccctgctctcacaccagctccagacagggcacagcctgtgagagcaactgagggggctcagtgacgagggcttggggtgtctgccccatggcagcattgacggcattgtggggacacttggaggtgcccagtggacccccactgacgtgggtgtaaaatccttaggtagggttgtgtggttttttttgttttgttttgtttttgagacagggtctcgc

SEQ ID NO: 705 - DNA, 469 bp, Homo sapiens
ttatggtcaggactgcccccatctataaagctgctaatgcccaagccttaaaggggaaagataaacaccagctgccagtcttttggttgtacaacatggaggcctgaacaacaagagcttcttctatattagtttcatgatgctttgttcctgaagtcaggaagtaccttgccagtaagggaatgccttttaattttcttttgatattggacaatgcccttggtcacccagaaccccatgagttcaacactgaaagccatgaaatggtctcttttcccccaagcacaatgtctccaagtcagcatgtagattaaagggtcataagtacctttaaggctcattacagaggatgctatatggaaaggattattaatgctgtggaagagaacccccaatagagaggacatcatacatgtttagaaggattcaaaatcctgttgaagataccattgttgctacagaaaaatcc

SEQ ID NO: 706 - DNA, 416 bp, Homo sapiens
agttataaaaatcctaatggctgatatgcactccagaagtcataaatgagtatgttttgtttggttcatatcttgttttgttgcccactgaatacctttagactgggctaaagactaggttgtctttagttctttacagttctgtatctcatttattcctggcccttatctataaatttatattacctgcttgggtccccatgggtatctgaatttggagcctctggcatacattgtacagcaggttcagaagaatgcacaataatatataagcttcccgagtctttcagcattatagaagtcacagaaaacttacttggattccaagtaatttctattttgagtctttgttcctccaggtggcagagatataatcttagaacaaatacttaaaatggaatttacttggaatctag

SEQ ID NO: 707 - DNA, 387 bp, Homo sapiens
tgagggtagggtcagtgttcacatggaaacagtgttcacatggagacgtcagaaaagtgaatgctacagttctgcagctctggggaggggtcttggttggggacaaacatcattgagctttcccataaaaatagggatttcaaatcatggaaaaggatggaacgactcaaggagattactgaaagtgagaagaaacaaacaaacaaacaaaaaacccttgagaaatgtttaaataaacagataaattaaatttaaaactacaatgagatacgatctcataccagtcagaatggctattattaaaaagacaaaaaagagatgttggtgaggatgcagagaaaagagaagtctccatatggttttccattgaggttgtgctactttccc

SEQ ID NO: 708 - DNA, 388 bp, Homo sapiens
ggaggggaaaagttgatccagcactgcagcttctctagggcagcccagagaaatagcatctgtctcacgaagctctaataggtccagcatggtctagacacctagggaagaacagagacagcagattgggctgatacatgctatagttccctaccccccagctcatcacagagcaagcagacaaagccacagctgccagcatctccctggggagggaaagagttggtagaggcctgctgaatctctggccagctgatttgtgggggtcttctcttgtatgacactaatctgtgaagactgggagaggtgcctgctttctctaatgtacggacgtgagcacaaagtcaaggaaaaatgaagaaccagctaaagatgttccatacaaaga

SEQ ID NO: 709 - DNA, 476 bp, Homo sapiens
gtaaagtgcttagagcagtattttgcacataacaagtggcatataataatttgttgaatgaataaacttgtcagagggggaactctcctcccccactcccaactctcccttctgtgtggagggatatcaattagtgtaacgttctgtctggaggagatggaatcattcatttgattggagagtatataggttagaataggacccagccttaagggacaggaaactccaaataatagtgacttaaacaagataaaggtcttctctagccaggcacagtggctcacacttgtaatcccagcactttgggaggccaaggtggatcacttgagatgaggagttcaagaacaacctggccaacactatgaaaccccatctctactaaaaatacaaaaattagccaggtgtggtggcgaacatctgtaatcccaggtacttgggaggctgaggcaggagaatcactttaatctgggaggtgg

SEQ ID NO: 710 - DNA, 548 bp, Homo sapiens
acccaggctggagtgcagtgttgcgatcacagctcactgcagcctcaaactcctgggctccaggagacctcctgcctcagcctcctgaatagctgggactacagtcgcgcaccaccacgcctggctaattttttatttttgtagaaatggggtattgctttgttgcccgtgctggcttcagccttctggtttcaagcagtcctcctgcctcagcttcccaaagtgctgggattacaggtgtgagccactgtgcccaacccagaaatacaccctttctgtgctgttttctcagcagggtgtgagctcacgggatacggtcctgccagactggccctcatagctggtcatgtgccagtcagagctgggtggggcttgcaggtcccggaaggtggtggtcttgacctggcagcagatgcttaaagaatgcctaaggtgggtggcagttggggagttcaagggtgaatgaggccagggcagcccccaggagctgaggccaactctttgagtcaggactgtgccgtgtgcccagggccttgcatgtgtgggcc

SEQ ID NO: 711 - DNA, 283 bp, Homo sapiens
ctattgcttctacgctaaagacttgtgcagcatgttactgtactgaatacggcaggcaattgtaatacaatggctacagcttgcatcagaccagcaatgagcttgtgtgctgaaacaacaaatctgaaacacgattatgactgccatcaccttgcagttaaccaatagtaatggaattcctttctggatcacgaggtcaagagttcaagactagcctgaccaacatgagtttcacacttgtcgcccagactggagtgcaatggcacaatggcacgatctcagg

SEQ ID NO: 712 - DNA, 399 bp, Homo sapiens
ggaaatttgcagtgtgaaccttgttgaagtcaaataaaatatagagacaaatctctaatgttttatttgggaagcaagaattgcaatttgagttatacacacagactgggtggtctttggtatgtccaaagaacaaacagaaggttaggagttttattagaaaaagaaatagtatgtattgctttgaaagaaagctcattgacacaagtcaagtttttgggagctgggaatctctgattggtgagacagtggtaggttaaagtagtcttagagtcacagcaggtcgtttcagcagctgggcttgtggaaaatctaattcttggagcaggtgctgtatgccctgggtgttctttcccctggccctgatttcgttggacatgacaagaatgacccaattta

SEQ ID NO: 713 - DNA, 674 bp, Homo sapiens
agttgtgtacttgtattgactcctcacaacaactccccttggctagtactactattacgttcactttaaggatgaggaaactaaggtaaagagaggttagatgacttgggcaagctcatgcagtgaataagtggtggagccatggtattcacccagggtgtctgagtttagagctggaagttttaaccacatcccatgttaagataattataatatacactttatcacttaacttacccatttaaactaatctgtgaatacattcttataagaaattgaagttttctgggtaaagctaatatgatacctgtttggtattaatccttccaagtctttctctatatggttacaataacatatgaacatcataaacatatctcgtatgtttgtggcatttttttaaaagttttatttttggttcaggagtacatgtgatggtttgttacagaggtgaatgcgtgtcatgggggggttgttgcacagattaattcatcacccaggtattaagcccggtacccaatagttatctcttctcctcctctccctcctcccagcctccaccctctagtggactccagtgtctgttgtttccttctttgtgtttgtaagttctcatcatttaactcccacttataagtgagaacatttggcatttgattttctgttcctgtgct

SEQ ID NO: 714 - DNA, 311 bp, Homo sapiens
cttaaggaggtatttgttgatacaaatatctctaaataaatgcatacacagaagtatcaaagctcatttctctattgcctgagataacctccagaatgcatgcaagtacatgaatatccataaatactgaactacccaaaataaacactgtattaagtcccttaagatggctataacaccctaattcctcctcaaagaacttcattctcctactgaaacaatttttctgaagcatccaggaagaaaaacagaagtgggaatgtagcatagtagttaaatagacttaggggtcaaaagcttgggtttgtatc

SEQ ID NO: 715 - DNA, 633 bp, Homo sapiens
ttctcaggaggctgaggcaggaggatcacttgagcccagaagttggaggctgcagtgagctgtgattgtgccactgcactccagtctgggcaacagagtgagaccctatctcaaaaaagcaggtgggagtaatccatggcaataaattgggatagaagttattcctggaggtggtgatgactggtatgggacacaaggaagccacctggggctgggaatgttctagttcttgatctgggagatggtcatgcagtcgtaggcctgtgtaagacttcctcgagctgtccacataagatttgtgcactttagctgaatgtggtggcttacacctggaatcctagcactttgagaggctgaggtgggcagattgctagaagccaggagttcgagaccagcctgagcaacatagtgagccccctgactctaaaaaaaaaatttttttttttaattatctgagcatgctggcatgcacctgtagtcccagctacttaggaggccgaggtggaaagattgcttgggcccaggagattgaggctgcagtgagctatgatcacaccacttcactccagcctgggcaacggagcgagaccctatctcaaaaaaataaataaaatatttgtgcagttctctgta

SEQ ID NO: 716 - DNA, 423 bp, Homo sapiens
cgccattgcactccagcctgggccacagagtgagactccgtctcaaaaaaaaaaaaaaaaaaaaaacatgtgcaagaacattcagatcagccttcttcataacagacccaaacaggaaacaacagacgttcatccacaggctagtgaagaggcaggttgtgaggcctccgcccacaccgtagaatgctattcagcaacatgggtgactcccctgcatgtaacattggcaaagaagccaggcacaagcaaatatacactgtaggattccatttatataaagagcaaaagcaggcaggagggccgggtgggcacagtggctcacacctgtaatcccagcactttgggaggccagttgtggggggtgaatcgcttgagcccaggagtttgagaccagcttgggcaacatagcaagaccccatctta

SEQ ID NO: 717 - DNA, 436 bp, Homo sapiens
gactccgtctcaaaaaaaaaaaaaaaaaaaaaaaaaaaaaaaaaaaaaagacatgtgcaagaacattcagatcagccttcttcataacagacccaaacaggaaacaacagacgttcatccacaggctagtgaagaggcaggttgtgaggcctccgcccacaccgtagaatgctattcagcaacatgggtgactcccctgcatgtaacattggcaaagaagccaggcacaagcaaatatacactgtaggattccatttatataaagagcaaaagcaggcaggagggccgggtgggcacagtggctcacacctgtaatcccagcactttgggaggccagttgtggggggtgaatcgcttgagcccaggagtttgagaccagcttgggcaacatagcaagaccccatcttaaaaaaaatggaaaattagccgggcgtgg

SEQ ID NO: 718 - DNA, 606 bp, Homo sapiens
aggcaggttgtgaggcctccgcccacaccgtagaatgctattcagcaacatgggtgactcccctgcatgtaacattggcaaagaagccaggcacaagcaaatatacactgtaggattccatttatataaagagcaaaagcaggcaggagggccgggtgggcacagtggctcacacctgtaatcccagcactttgggaggccagttgtggggggtgaatcgcttgagcccaggagtttgagaccagcttgggcaacatagcaagaccccatcttaaaaaaaatggaaaattagccgggcgtggtggtgcaggcctatcatcccagcttctcaggaggctgaggcaggaggatcacttgagcccagaagttggaggctgcagtgagctgtgattgtgccactgcactccagtctgggcaacagagtgagaccctatctcaaaaaagcaggtgggagtaatccatggcaataaattgggatagaagttattcctggaggtggtgatgactggtatgggacacaaggaagccacctggggctgggaatgttctagttcttgatctgggagatggtcatgcagtcgtaggcctgtgtaagacttcctcgag

SEQ ID NO: 719 - DNA, 409 bp, Homo sapiens
caattagcgtgcattttaaactctcagtttgtatattagcatggtattaaaatctctatagatcagcctaagaataatttttcagagaatgatttttcctgaggtgtgcatacgagtggcaaggctacactttgctttgatttcactgcacacaaaaaaggaaagttcttctctacgctttccatacaccacatacccacatttgatttactttttaaatgactcaacaccaacaattcaatatgacttttgctatcttagaagtataacatcttgggattataactttcaaaaaataactgcacagatcaggaatgctcatgttactttccaaaccctggtaagatacttgtataaggattgggggttaaaacatgtattaaaataaatgttcctctctgcaatatta

SEQ ID NO: 720 - DNA, 447 bp, Homo sapiens
tcaatttgcattccctctgtagttttcccaggttaactgtgttactgattgctttagtgattcttaccattcatggaatagttttgaaaattaattgttaagaaactaactgcagaaatgtcttgttacatggcatttatattaaagaataaaatactactttgtataaggtataaaaagtattattattattattattttattttttttgagacagtctcactttgtcacccaggctggagtacagtggcacgatcttggctcactgcaacctctgccttttgggttcaagtgattcttatgcctcagcctcccgagtagctggggcaacatgtgcgcaccaccacacccgggtaattattgtatttttagtagagatcggatttcaccatattggccaggctggtctcaaactcctgacctggtgatctgcctgcctcaatctcc

SEQ ID NO: 721 - DNA, 151 bp, Homo sapiens
gctggatggacaaggcatataaaaattgcaggtcagtggttgaatttaaaacagttgcattaatgtctcagattcaattatacttaatttggcattaacctatctctattcataaaattattattcataacatttattggactaattctgt

SEQ ID NO: 722 - DNA, 138 bp, Homo sapiens
ttttttgtttacgctttttatgcaacctagtgcctggcatagtactgtatgtatacacctacaccaagctaggctgacactggacccaaggtggggcagtctgcaagggggctggataatggtcctcaagagtgacag

SEQ ID NO: 723 - DNA, 204 bp, Homo sapiens
tcattgtcctgaaaatagaaaataataataataaaccctatttcaaagggtttctttcatcatgattaaaatatattagtcaggataaagtgttttgtaaactcaaagttttaatagaaaatattaattaagttccaaaattaactcatatgcaatcattgcaacggctcgattagaaagggttttgtgtaaactgtagcatca

SEQ ID NO: 724 - DNA, 421 bp, Homo sapiens
actggtactcattatttcccttggcactatccattctaaattggctggctttggcttgtcacctttatgaggtcctctggcttcttggtggtaagactcaaacattcctattagagagtttagactctgataaacatacctttctcaggctatttttgctacatttctccattcatagtcacagtcacatggtaatggaataacaagaagcaccagagtgatgacctcagtcccacacgttttactccctgctctcatggtgttacagcagccctacctccatctgattaggatcaattattcatacacaaagaagactactcttcttgcttggttccccaaacacaaggaatacaaagtgtccagttggcaacactagtttgtagtgaatgtgactatgctatgtcctttagcaagagtg

SEQ ID NO: 725 - DNA, 708 bp, Homo sapiens
gaaactagtatgacctgaaagctgagaaagataaattgcttctgcttattcagtgagtacatatatgtgtatactgatttcactggaggcaccatttttccacagtgatcctttccccctcttgtggtttgtctagccaggggttctggggcctcgggaggccctcatgttcatttcttccacggcccatactgcctcctccctttctccacacacacagcccttaacaggtatttatttcaaattaccaaagtgagttgctctcacataagaaaatgcaaatatcccgtgcacttaccaaacttgattctagtatagtagaaggtgcttaaagggtttgggccctctctgccgtgctctccctcatggcatcagggcaatacagcctaccaaacactccatgtgagggtttggggagccacctctgcccagtccctacgttgttttcccatcccatgcagaaaaaaaaaaaaaaaaaacttcaggggggggccccgtaccaaaattcgccctaatatggaggcgtattacaaatcacatggccgccgttttaaaaacgtctggactgggaaaaacccctgcggttccccaaattaaatggccttggaaaacataccccttttgcccaacttggcttaaaaaccaaaaggcccccaaccaatgcccctttccaaaaattgcccacctctgaaagccaaaagtgaaatt

SEQ ID NO: 726 - DNA, 484 bp, Homo sapiens
aaattaacaacatgagcaacaacatttaagtgacatttctagaacattccatccaacagcagcagaatacacatttttttttcaagtgcacatggaacatttaccaagatagaccatatcctgggacataaaacaaactttaacaaatttaaaataattgaagttatgtgaagtatgttttctgatcagttgtgatggaattaaactgtatgcctctcactcattcttaaaatgcaaggctggttttatactgaattaataattagtaaccttccaaaaaaagaaagtacaagacccagatggtttcactggtttcactggtgaaaccaaatgtttaaggaataaatagtatcaattctctgcaatttcttccagaaaacggaagcagagggaatacttcttaactcatcctatgaggccagcactaccctaataccgaaacgagattaagatattataataaaggaaaattaaaaaccaatct

SEQ ID NO: 727 - DNA, 639 bp, Homo sapiens
ttggaacaaccttactcatgcattataatttgcttagcaatcctttgttcataggcagtgcaaagattagttacagccctcctactgtctgaattactgtactttctgaattagtagagttggcattgataatcttaaaaatataaacagtaaataaagcatttaaaaccccccatgctgctgacttcatataaagagatagttgtttttgaatattttgatgtccgtacacatttttctacagaggcagtatttaaatgggtttgtataaataagttctctttcttgaagcttgtgcaaagcatctttacacaagaagcttataagcacagtcaataaattcaagaaaatggcccttttgaaaggaagccactgatgcatctgtgggctgacttctgcatgaatgacagcgcagtaataagaaagcagacaacggcttcctccgccaccactgccctgccgtgctcacgctgcatgggggtgccctcgcagcgggagtgtgtgtttgtcctggtggccggggactgcggcttggcctttttgtttacaagagagaggacagcagcctctgccctccagctgctgtgaaaacagtgttggaaaaccagagcgaagtttccactgaagaactcacactgg

SEQ ID NO: 728 - DNA, 410 bp, Homo sapiens
tacaaaaaaaaaaaaaaagctacattgctcaaagaaaaacaggtcgacatcatcatactgtaacagctatgctctgtgccagaagacagtggaatgacatatttcagatactgtggaacagaattttatcatcaccaagccagcttttaactattaaagctgcagacaaacttctcaaacataggggaacacaaggaatactgttcccataagctcttcctgaggaatttattagagaaaatgaattccagatgacccaaataactggaaagtccatatcaacataaaaatggtagtgggcattaaatatatatttatctgtaaaaacctgaatgagggttctaagtgacactttatactacataatgactatatgttccaacattgtagctagagcacaactatccata

SEQ ID NO: 729 - DNA, 413 bp, Homo sapiens
tattttgttaaatgttttcctctgccttttgtccttttcttcagaaagtgtctagtcagctgttaatcttatttagtgtagttttaatttcagacattgtatttttcatctccagtaaagtttgattttggtcttttaaaaaaaatctggccgggcgcagtggctcatgcctgtaatcccagcactttgggaggctgaggcgggcggatcacgaggtcaggagatcgagaccatcctggctaacacagtgaaaccccatctctactaaaaatacaaaaaattagccgggcgcggtggcgggtgcctgtagtcccagctacttgggaggctgaggcaggagaatggcgtgaacccgggaggcagagcttgcagtgagccgagatagcgccactgaactctggcctgggcgaaag

SEQ ID NO: 730 - DNA, 421 bp, Homo sapiens
tccaaaaacgttagtaataaatcgcttattaaaaaaagtaaaaattcagatcaaagtgtctagtcagctgttaatcttatttagtgtagttttaatttcagacattgtatttttcatctccagtaaagtttgattttggtcttttaaaaaaaatctggccgggcgcagtggctcatgcctgtaatcccagcactttgggaggctgaggcgggcggatcacgaggtcaggagatcgagaccatcctggctaacacagtgaaaccccatctctactaaaaatacaaaaaattagccgggcgcggtggcgggtgcctgtagtcccagctacttgggaggctgaggcaggagaatggcgtgaacccgggaggcagagcttgcagtgagccgagatagcgccactgaactctggcctgggcgaaag

SEQ ID NO: 731 - DNA, 473 bp, Homo sapiens
ctgccttggatttctggggattcacttcaggccctattcatccggtttgctcccatgcttggagatgtcacttgagaaggctggagaatagcaaaggcaataggaaggcccaagaagaggaagaaagattgaggaaatggccagtttgtgcagcagtcagaacatacgcatttactgattaagcttgctgttatatatggatgcagtttgtggcacctcaaaataattacaaaagcaacattaaagatcactgatcacaaatcaccataacatatataataagaatggaaaagtttggtatattgcaaacatgaccaaactgtgacacagagacacaaagtgagtgcacggtgtttaaaaaaatggtgcaatagacttactcaacacagggttgccacatatcttcaatatgtaaaaaatgcaaagtctgcaaagtgcaataaagaaaagcataatacaatgaagtatgccta

SEQ ID NO: 732 - DNA, 519 bp, Homo sapiens
agagaaataaaggacactgctgtcattctaactaaattgtccagaggaggaaagaagagtacaaaaatgattatgaatacttaagaagaggcatgactttgtcattggtgtggagcctataattatgtgcaattccctacttaagactttttagttatgctgaacattgaaaaaaaactaaacagcggagaggagaaaagaaaaggggaaatttaaacatttaatggaacacattcattaaatggagacatcgcttcaccataagggggcagttaagggtttggtagtcctactcacttgctattgtcaaatcatttgttttatcatggatttgagatccttataagtcttcattattattttgaattcaagaatgattccttctgctcacaaaacatgatcacttttcattgatttttttttttaatattctgactggttttgcatatctggaaaagataaatcttcaaaatttggaaataaatatttttcctccctgccaaatccataatatgatcc

SEQ ID NO: 733 - DNA, 519 bp, Homo sapiens
tttttttgacacggagttaagctcttgttgcccaggctggcgtgcaatggcgcaatctcagctcactgcaacctgcacctcctgggttcaagcgattcttctgcctcagcctcccaagtcgctgggattacaggcatgtgccaccacgcccagctaattctttgtatttagtagagatggggtttcaccatgttggtcaggctggtctcgaactcctgacctcagatgatctacctgccttggcctcacgcctggattacaggcatgagccaccatgcccagctagttttaagaaattataaccacaagccttccactaactcatacttgtaaatacaaatctttccaccaattatcctagacaaagttgctaaaacaattctctttctatttctcccaagttcaaatctacagtgcctttctgatgtttctatattcatgtgaaatttgtaggagaaaaagtaaaaggctgtatttaccccaaaaaagaaaaaatctcattaaagcttaaatttaaaa

SEQ ID NO: 734 - DNA, 329 bp, Homo sapiens
tgttatttttaattttatttttgattcagaagctacatgtgtaggttacacaggtatatttcatgatgctgagtataacccataattctttttttgagatggagtcttgctctgtcgcctaggctggagtgcagtggcgcgatcttggctcactgcaacctccccgtcctgggttcaagcaattctcctccctctacctcccaagaagctgggattacaggggctcaccaccatgcccggctaatattttttgtatttttagtagagacggggtttcatcatgttggccaggctgttcttgaactcctgacctcaagtaatccacctgc

SEQ ID NO: 735 - DNA, 484 bp, Homo sapiens
atgactatgtaagactttttaaaaaccccttatggcaaagtgcttttatgtcacttggccagtgtgagaaagcaaatccacaaaccataggcccatttgattaggaaatttcagaatgtcacttacagcttcaggagatagtagctcaatctaaaacaaaactgttgacagaattttgaaagttgtgtaatcgtatttataatctctgtctcaaagagagatccaaacaaaagaaaccaccatgtcataattaatgacaagatatactgaccaatggcaaggctgtcccttcttttgaaggctcaaacgatttgaagagtttgaatacagataccttaaatccacttagacagggacatattgttatcccctttcccttggtcagctaattcagcaagaacattctgtagtgtgtgctcctgtagttttaagactgaaccttaaaagtgaaagcaagacaatatactgtggatgaaatttgcca

SEQ ID NO: 736 - DNA, 1704 bp, Homo sapiens
cgcggcacggcctagcgagtggttcttctgcgctactgctgcgcgaatcggcgaccccagtgcctcgaccactatgccgcgctctttcctcgtcaggaagccctccgaccccaatcggaagcctaactacagcgagctgcaggactctaatccagagtttaccttccagcagccctacgaccaggcccacctgctggcagccatcccacctccggagatcctcaaccccaccgcctcgctgccaatgctcatctgggactctgtcctggcgccccaagcccagccaattgcctgggcctcccttcggctccaggagagtcccagggtggcagagctgacctccctgtcagatgaggacagtgggaaaggctcccagccccccagcccaccctcaccggctccttcgtccttctcctctacttcagtctcttccttggaggccgaggcctatgctgccttcccaggcttgggccaagtgcccaagcagctggcccagctctctgaggccaaggatctccaggctcgaaaggccttcaactgcaaatactgcaacaaggaatacctcagcctgggtgccctcaagatgcacatccgaagccacacgctgccctgcgtctgcggaacctgcgggaaggccttctctaggccctggctgctacaaggccatgtccggacccacactggcgagaagcccttctcctgtccccactgcagccgtgccttcgctgaccgctccaacctgcgggcccacctccagacccactcagatgtcaagaagtaccagtgccaggcgtgtgctcggaccttctcccgaatgtccctgctccacaagcaccaagagtccggctgctcaggatgtccccgctgaccctcgaggctccctcttcctctccatacctgcccctgcctgacagccttccccagctccagcaggaaggaccccacatccttctcactgccatggaattccctcctgagtgccccacttctggccacatcagccccacaggactttgatgaagaccattttctggttctgtgtcctctgcctgggctctggaagaggccttcccgtggccatttctgtggagggagggcagctggcccccagccctgggggattcctgagctggcctgtctgcgtgggtttttgtatccagagctgtttggatacagctgctttgagctacaggacaaaggctgacagactcactgggaagctcccaccccactcaggggaccccactcccctcacacacacccccccacaaggaaccctcaggccaccctccacgaggtgtgactaactatgcaataatccacccccaggtgcagccccagggcctgcggaggcggtggcagactagagtctgagatgccccgagcccaggcagctatttcagcctcctgtttggtggggtggcacctgtttcccgggcaatttaacaatgtctgaaaagggactgtgagtaatggctgtcacttgtcgggggcccaagtggggtgctctggtctgaccgatgtgtctcccagaactattctgggggcccgacaggtgggcctgggaggaagatgtttacatttttaaaggtacactggtatttatatttcaaacattttgtatcaaggaaacgttttgtatagttatatgtacagtttattgatattcaataaagcagttaatttatatattaaaaaaacttt

SEQ ID NO: 737 - DNA, 619 bp, Homo sapiens
cgcggcacggcctagcgagtggttcttctgcgctactgctgcgcgaatcggcgaccccagtgcctcgaccactatgccgcgctctttcctcgtcaggaagccctccgaccccaatcggaagcctaactacagcgagctgcaggactctaatccagagtttaccttccagcagccctacgaccaggcccacctgctggcagccatcccacgaggtgtgactaactatgcaataatccacccccaggtgcagccccagggcctgcggaggcggtggcagactagagtctgagatgccccgagcccaggcagctatttcagcctcctgtttggtggggtggcacctgtttcccgggcaatttaacaatgtctgaaaagggactgtgagtaatggctgtcacttgtcgggggcccaagtggggtgctctggtctgaccgatgtgtctcccagaactattctgggggcccgacaggtgggcctgggaggaagatgtttacatttttaaaggtacactggtatttatatttcaaacattttgtatcaaggaaacgttttgtatagttatatgtacagtttattgatattcaataaagcagttaatttatatattaaaaaaacttt

SEQ ID NO: 738 - DNA, 1646 bp, Homo sapiens
  misc_feature (1557)..(1557): n is a, c, g, or t
  misc_feature (1559)..(1560): n is a, c, g, or t
  misc_feature (1569)..(1569): n is a, c, g, or t
  misc_feature (1590)..(1591): n is a, c, g, or t
  misc_feature (1593)..(1593): n is a, c, g, or t
  misc_feature (1612)..(1612): n is a, c, g, or t
  misc_feature (1620)..(1620): n is a, c, g, or t
  misc_feature (1622)..(1622): n is a, c, g, or t
  misc_feature (1637)..(1637): n is a, c, g, or t
cgcggcacggcctagcgagtggttcttctgcgctactgctgcgcgaatcggcgaccccagtgcctcgaccactatgccgcgctctttcctcgtcaggaagccctccgaccccaatcggaagcctaactacagcgagctgcaggactctaatccagagtttaccttccagcagccctacgaccaggcccacctgctggcagccatcccacctccggagatcctcaaccccaccgcctcgctgccaatgctcatctgggactctgtcctggcgccccaagcccagccaattgcctgggcctcccttcggctccaggagagtcccagggtggcagagctgacctccctgtcagatgaggacagtgggaaaggctcccagccccccagcccaccctcaccggctccttcgtccttctcctctacttcagtctcttccttggaggccgaggcctatgctgccttcccaggcttgggccaagtgcccaagcagctggcccagctctctgaggccaaggatctccaggctcgaaaggccttcaactgcaaatactgcaacaaggaatacctcagcctgggtgccctcaagatgcacatccgaagccacacgctgccctgcgtctgcggaacctgcgggaaggccttctctaggccctggctgctacaaggccatgtccggacccacactggcgagaagcccttctcctgtccccactgcagccgtgccttcgctgaccgctccaacctgcgggcccacctccagacccactcagatgtcaagaagtaccagtgccaggcgtgtgctcggaccttctcccgaatgtccctgctccacaagcaccaagagtccggctgctcaggatgtccccgctgaccctcgaggctccctcttcctctccatacctgcccctgcctgacagccttccccagctccagcaggaaggaccccacatccttctcactgccatggaattccctcctgagtgccccacttctggccacatcagccccacaggactttgatgaagaccattttctggttctgtgtcctctgcctgggctctggaagaggccttcccgtggccatttctgtggagggagggcagctggcccccagccctgggggattcctgagctggcctgtctgcgtgggtttttgtatccagagctgtttggatacagctgctttgagctacaggacaaaggctgacagactcactgggaagctcccaccccactcaggggaccccactcccctcacacacacccccccacaaggaaccctcaggccaccctccacgaggtgtgactaactatgcaataatccacccccaggtgcagccccagggcctgcggaggcggtggcagactagagtctgagatgccccgagcccaggcagctatttcagcctcctgtttggtggggtggcacctgtttcccgggcaatttaacaatgtctgaaaagggactgtgagtaatggctgtcacttgtcgggggcccaagtggggtgctctggtctgaccgatgtgtctcccagaactattctgggggcccgacccgncnnccccccccngcccgcacccccccccccccnnanccacaccggtatccacacnccaaacancncgtaccaaggaaacnaaaaatata

SEQ ID NO: 739 - DNA, 368 bp, Homo sapiens
gacttttcctgtgtattgctgacacatggtagccactcaatacattttttaaaaaatgaacagttagatgccaagcaaaggaacatgaatgttattatacagctaatgaagaatcactataggattataatgaagagaatgacaataacagacctgcatcttagaaattagttacagaagcaatgcagtggaaaatggatttctgtgagatgttactaaaagcaagaaagccagttatcaaatagcaatagtccaggctgggtgtggtggctcacgtctgtaatcccagcactttgggaggccaaggtgggaggattgtttgagctcaagagttcaagaccagacagagcaacatagtgagaacttgt

SEQ ID NO: 740 - DNA, 487 bp, Homo sapiens
caggctggtctggaactcctggcctcaggtgatccacccgccttggcctcccaaagtgctgagattacaggcgtgagccaccccgcgcacagcctagactctaattttataaaactttgttgaattttctaagtgtcatttaggacatattgtgcttttctgtggagcttatatcttatcctcttatgtgcaacaaaaagggggtcggaggtaaatgctgatgatgttgtttagttttatttccttttgatctggcatgagtaaattgctctgtttccttaagcttgggtctgttacagagctttgtgccttatagggtgctcagtgtgtgttgacaaagggaataagaactgtcagtgccataaagaaccaaagattctggctactttgtcttcttcctttctctcccactatgcctacacttcctctgcccagacacttttggaaagtgtttaactgctgggcaatagagcgagactctgtctca

SEQ ID NO: 741 - DNA, 503 bp, Homo sapiens
gcaagcgctgtccgcgttagccagcatgttcttgatctgacctcgtgatccacccgccttggcctcccaaagtgctgagattacaggcgtgagccaccccgcgcacagcctagactctaattttataaaactttgttgaattttctaagtgtcatttaggacatattgtgcttttctgtggagcttatatcttatcctcttatgtgcaacaaaaagggggtcggaggtaaatgctgatgatgttgtttagttttatttccttttgatctggcatgagtaaattgctctgtttccttaagcttgggtctgttacagagctttgtgccttatagggtgctcagtgtgtgttgacaaagggaataagaactgtcagtgccataaagaaccaaagattctggctactttgtcttcttcctttctctcccactatgcctacacttcctctgcccagacacttttggaaagtgtttaactgctgggcaatagagcgagactctgtctca

SEQ ID NO: 742 - DNA, 338 bp, Homo sapiens
accaggtgacctcagggacaaaggcatttcttttgctaatttaatcagtaatagtttcaaaggcttttaaacctcaggttcctacacaaacagctcctgccaggtagataacagagggagcctgttctcttttgaatacttagccatgaattacaagcatcagttggacagaagagattgaattcctataggtactatccagatcataaaaaggtattaaggcttgccctctattcctgctccatcagcatgaagagaggtttctaagagtcttaactcacaaaaaaagcaattcaccattttgttcaaagcaaaatcataaccataaattgctctta

SEQ ID NO: 743 - DNA, 367 bp, Homo sapiens
gaggatcacatcactgggctcctttgagatccatatgcctcaattcaaccctgtcaaccatgccaagaaagaagagagcagcttatgtccaaagaaactgggaaagaaaaaacaaatctccatgatgctttctttagatgacactaagcaactgaatgggggattaaaaaacaaaaacaaacaaaaaaacaaaacaataaaaacaccaccacagtaaacaaacagaaaaaaccaaacacacattgacctcatctctgggtcttttgtaactgaagaaacaacacctgagttacatggaacaaacactttatcttagtcttcttcaccttcactgtcctatttttgaaccctagacaccacacctgcc

SEQ ID NO: 744 - DNA, 412 bp, Homo sapiens
ctcaattttgtgtaaagttatgacattaagatctttaggcatcatttattaggaacccaattgccttgagaaatttttctttcgttgggagacttactcatcatttagtaaatatagaatcacaacttcaaaggccagctctggaataattaagaatctttctgggcagatttaaggtctgcatctgaatagctgtatatacagaaagcctaaaggatcaaaatagtccagaacatttcaggactggacagctggtgagtaggtaaaggttgcctgtgcctcactctgtcagtcaatttaatgaatatcaaaatcactcatacaccaaattgagaagccaaggatctcatcttgactgagaatcggcaccttccagaacctgacttagttttgcaagagcagttttagtagc

SEQ ID NO: 745 - DNA, 387 bp, Homo sapiens
taaaatatttgttttatttggaatccatgtatttgtaattttagtgtttgtattaatacaagggagaaatgtttaaatctgtctatgccatatgtgcctctggcttattgcccaattaattgtagcctcaggctaaactttggtttctgtctttaatttttgtcagaagaaatataactgatctcaaaacatctgcttttattgtaggggctcgtgctgccatctccattcctctctcttttcttgcaatctgggtggaagttctttaatatgaacatttcaaccaccttcattctaccatgtccactatcagcacattcaaacttatccagccaaggctgtcatcttaggccagggattttttaggaatctattatgctgtgatgc

SEQ ID NO: 746 - DNA, 342 bp, Homo sapiens
ccagctgatatataacccaaaccccagacttttctcctattccactgccaaatgggaacctttccttgcctttcctctggttcccagctccacccctccaccctggctctctacagccagttctcctcccagcagacatgggatcttttgcaaaggtaaatcagtccctccctgcccttgaccctgcaaatgttcgtagtcttgtttgctggaccatgggttattggagcgtaaaacttcaccatatctttatacccatccatcaccccacagcactgagtcaagtgcttccacatcataggcacttggtaaattatttttgaataaattattggaaaaagg

SEQ ID NO: 747 - DNA, 405 bp, Homo sapiens
ttttggatgaagatgattcttcttttcctaactctgaggttgccctctttcatgtgcattcacattaactgtcagccatacctgtgtacctcaacactcactggttgctgcctgtaatactcttacaaaagatttaatgaagtgatggagaccttgggtgtctagcaactgccattgtttgtcaggggaatgtgagatatatgtgtgggaaggtccctgagttcctcttggacttatcaaaatatcacaaaattccagtacaaagtatctttccacagattcagctgtgctgtgggtcactaatacttgggtcattttaagctgtggtgcagaaacctacagcagaggtgtgaatcttcttccctttggcaactttatgtcagttctgatacattaaaaaaaaaa

SEQ ID NO: 748 - DNA, 384 bp, Homo sapiens
caggaagagattttataaacaaagccaaaacacagaaatcatacaatgaggtggtgggaatgagactaactgtgcctgtcatctccaatgtaacactaactgctgtgaattataatggatttaagtctctcagattggatagaaaaggaaatgccagctctaatggtttaatgggcagaaaagggttaaatattcaaagcagtgcacattatattatatatatatatatatacgtatatattgtataggagggagatatacatatatatacattttttttttgagacgcagtctagctctgttaccaggctggagtgcagtggcatgatttcagctcactgcaacctccacctccttggttcaagtgattcttctgcctcagcc

SEQ ID NO: 749 - DNA, 309 bp, Homo sapiens
tgacgttaacaggggggtggtgtgaagggagtttggtacatcttcagacttcaagacaggaaaaaaatgtttgggaagaggccaaataagagatacagcatggccctagctaaatggtaatgatgtaacaaagagcaatattcagcactatctagatatcagagagaacaactggatactaaaatcattataagatgtgaaattatacctctcactacttcattatcactatatttcataatatttgtctagaaaggcacacaaagtctatcaggttaaattaatcctaatgatcaatttcagttttat

SEQ ID NO: 750 - DNA, 1397 bp, Homo sapiens
tcacttccccttcctgcaccccatcctgatttgagggagcccaggatgacaaagagggagtagttgagcaaggtatggagtggcagtctctacaggagctcaaaggatgcatttgtccatctgccctgggctcagcttccacactcagagtcactcacatccctccaccgtcgccacagctcacttgtgtgcccacacagacaaggtcacactgaccccaaacgcacactgtttcaactctcagcacttcactgtcacactcgcgtgtgtacacacatgctttctaatttccacagccacatggatgctcacacactcacacctttgcacacacacacaagctggctcacagacacactgggggcccagatcctggtcattccccacaggtcttaataaaggttcatggaaggaaacctgtttcctaaggtagggtgggagtgtgtgtgagtgtgtgggggggagagggtgagagtgagtgtgtgcgtgtgttagtgtgtgtgtgtatgtaaggagcaggagtgactgggtcctgagtttagggagttgggaagaggaaggagagatggagacaagcctggaccaagagccactcagagctgcctggaagggaagccaggctgagataaaggcaaggcaaagaaataagacactgacaaggatcaagccagggttgggtagggactgggaacagagtctgcctccatgagaagctgtcacattgctgctctggtgccctgtgacagcagcaccatctccagctggagactcccctctctggatcttgtcattgtgactttgctttgttggacaaccaggagtggtgacaggcagggaatatggtgcccagggcagctagccatgccacgccagtccagctgccaacccacccgtcactggccatctcatcacctgccagagggagtggggtggtgcagatgaaaccagcgatcagcttggctgcccttgcttcgtagtgccacagtagaggctaggggagcaactggctttcctccccaaaaggcgggcagggttatccacactttgcccaggtccctgaagcctgcggctgagctcggggataacaggggccaagtcaccggtcccagacacctaggaactattagagacaggaaccagcatatgagacaggggctgttaagtaggaggttggagaacacacgtttttggtctaaaccgggggcccctctctttgcccactgagcccgcggcctgcgtggtgctgagactgcctctggccgcgtccgcttgggacaaggcctgagcggtggctgatcccacctggatgtcctgggccggctcccacccgaagcccgccatcccgggacgcggtggggagaagctggcgctgctccttgccatgcttggcggccgct

SEQ ID NO: 751 - DNA, 373 bp, Homo sapiens
aaactataaaagttccataacaccagcagatcttaatattttatggtagaactgggcattttcatgctccaccccataccatggcacattaaaaacatgcccttctgctttaagcacaatcccaccctgcttgtaaattatttttttgaccctaaatatggcacacatttaaaaagacatcattgcagtttatggatctgtgtttttttgcaaatgcaggggccattaattgcattcacagctgtggtcttccccatgctatatgcattaggctgccagtaatgcattctctgtgagagccaagaagaaaagcctcctgtgtccctcttatggagtggcttccttaagctctcaggcccaagcagcacagaaa

SEQ ID NO: 752 - DNA, 836 bp, Homo sapiens
tgagagtgatgccgaggaagacacttccctccgagtcttagtctgcccgcctgtgaaactggctcgtaacaaacccctgaccccaggctcggtcgccttgagcccaagacctcacccaatgccccccgccccgccttccctcccgggctcccaggaggtgcggggactcggggggcggccccttcctcgggaggcgcccaggtggcacgtcggtgcctcagctcccggggtctctgggctccgcgctgcccacggggtgccgaggggcctctggagggggcgggttctctcgagccagaaagtccggagccgcccaggaattttggctcgaactgagtgcatttcctctcgggccggccgggtgcgatccgggaagggcggctgcgggcagacgcggcgctgcgctcggccaggccggcaccatgcggcccctgctctgcgcgctgaccggactggccctgctccgcgccgcgggctctttggccgctgccgaacccttcagccctccgcgaggagactcagctcagagcacagcgtgtgacagacacatggctgtgcaacgccgtctagatgtcatggaggagatggtagagaagaccgtggatcacctggggacagaggtgaaaggcctgctgggcctgctggaggagctggcctggaacctgcccccgggacccttcagccccgctcccgaccttctcggagatggcttctgagccctggagctggagcccagcagttggaggtggtgcacctgccaggcagcgcccacagaaccagccctgtcctctcgacttccttccttagcttcatgtgaaataaaagctattctggtc

SEQ ID NO: 753 - DNA, 1067 bp, Homo sapiens
ttttttttgaggcagagtctcactctgtcacccaggctggagtgcaatggtgtgatctcggctcactgcaacctccacctcccggttcaagtgattctcttgcctcagcctcccgagtagctgagactacagacgcgcaccaccatgcccggcttctttttgtatttttagtagagacagggtttcgccacgttggctaggctgatcttgaactcctgacctccgatgatctgccccccttggcctcccaaagtgctgggattacaggcgtgagccaccacgcccggcctaatacttgaataatattttaatgcaattggtgcccttagtaattctatatgttttattttttgcatttaaggcattattctgagaagaggtctgtaggcttcaccacactgccaatggggtccatggcatacacagggaaaaaccattaagaactcagtaaatttcagaatcccaaacctgtcatttggcagagataccaccagggggcggaacaacaaaaggaatgtgagctccaggctgcaaagtccaaaagggagaaggtattctacaggcgcttcatccaaatctgtgactaagtgccaaaaaagaaggagccttagagagcaagccccctaggatattgtcatctggggaaactgaggcaggtaggggcagagcctgagtgaggaaaacccaggtcacttagcgcccagtcctttcccactgcaccgcactggaccgccagctgctctcttaggacctagctgatgaagcggaacgtggaaccacttctgtcctcgactttaccccacttcccactctagatggtagagaagaccgtggatcacctggggacagaggtgaaaggcctgctgggcctgctggaggagctggcctggaacctgcccccgggacccttcagccccgctcccgaccttctcggagatggcttctgagccctggagctggagcccagcagttggaggtggtgcacctgccaggcagcgcccacagaaccagccctgtcctctcgacttccttccttagcttcatgtgaaataaaagctattctggtc

SEQ ID NO: 754 - DNA, 1172 bp, Homo sapiens
tgagagtgatgccgaggaagacacttccctccgagtcttagtctgcccgcctgtgaaactggctcgtaacaaacccctgaccccaggctcggtcgccttgagcccaagacctcacccaatgccccccgccccgccttccctcccgggctcccaggaggtgcggggactcggggggcggccccttcctcgggaggcgcccaggtggcacgtcggtgcctcagctcccggggtctctgggctccgcgctgcccacggggtgccgaggggcctctggagggggcgggttctctcgagccagaaagtccggagccgcccaggaattttggctcgaactgagtgcatttcctctcgggccggccgggtgcgatccgggaagggcggctgcgggcagacgcggcgctgcgctcggccaggccggcaccatgcggcccctgctctgcgcgctgaccggactggccctgctccgcgccgcgggctctttggccgctgccgaacccttcagccctccgcgaggagactcagctcagagcacagcgtgtgacagacacatggctgtgcaacgccgtctagatgtcatggaggagatggtagagaagaccgtggatcacctggggacagaggtgaaaggcctgctgggcctgctggaggagctggcctggaacctgcccccgggacccttcagccccgctcccgaccttctcggagatggcttctgagccctggagctggagcccagcagttggaggtggtgcacctgccaggcagcgcccacagaaccagccctgtcctctcgacttccttccttagcttcatgtgaaataaaagctattctggtctcctctgtgtctgctgacagagtaacccgtttaactacagcctcctctcactccacttccatgcctggaggaagcctgcaaccccctccaggctcagacctggggacacccccactcctgtcatttataggggcagatggagcaggggttgattcacacagatgggggccctttgagtggccttgcttctcaaaatgtggccataggtgaaaagcaaggggatcagggtctcaggacccacccagactgtttaatccaaatctgcattgcaatgagacccccagggattttatgtgtccattaaagtggtttgttgttgtttttaaaaaaaaatcc

SEQ ID NO: 755 - DNA, 1403 bp, Homo sapiens
ttttttttgaggcagagtctcactctgtcacccaggctggagtgcaatggtgtgatctcggctcactgcaacctccacctcccggttcaagtgattctcttgcctcagcctcccgagtagctgagactacagacgcgcaccaccatgcccggcttctttttgtatttttagtagagacagggtttcgccacgttggctaggctgatcttgaactcctgacctccgatgatctgccccccttggcctcccaaagtgctgggattacaggcgtgagccaccacgcccggcctaatacttgaataatattttaatgcaattggtgcccttagtaattctatatgttttattttttgcatttaaggcattattctgagaagaggtctgtaggcttcaccacactgccaatggggtccatggcatacacagggaaaaaccattaagaactcagtaaatttcagaatcccaaacctgtcatttggcagagataccaccagggggcggaacaacaaaaggaatgtgagctccaggctgcaaagtccaaaagggagaaggtattctacaggcgcttcatccaaatctgtgactaagtgccaaaaaagaaggagccttagagagcaagccccctaggatattgtcatctggggaaactgaggcaggtaggggcagagcctgagtgaggaaaacccaggtcacttagcgcccagtcctttcccactgcaccgcactggaccgccagctgctctcttaggacctagctgatgaagcggaacgtggaaccacttctgtcctcgactttaccccacttcccactctagatggtagagaagaccgtggatcacctggggacagaggtgaaaggcctgctgggcctgctggaggagctggcctggaacctgcccccgggacccttcagccccgctcccgaccttctcggagatggcttctgagccctggagctggagcccagcagttggaggtggtgcacctgccaggcagcgcccacagaaccagccctgtcctctcgacttccttccttagcttcatgtgaaataaaagctattctggtctcctctgtgtctgctgacagagtaacccgtttaactacagcctcctctcactccacttccatgcctggaggaagcctgcaaccccctccaggctcagacctggggacacccccactcctgtcatttataggggcagatggagcaggggttgattcacacagatgggggccctttgagtggccttgcttctcaaaatgtggccataggtgaaaagcaaggggatcagggtctcaggacccacccagactgtttaatccaaatctgcattgcaatgagacccccagggattttatgtgtccattaaagtggtttgttgttgtttttaaaaaaaaatcc

SEQ ID NO: 756 - DNA, 715 bp, Homo sapiens
tgagagtgatgccgaggaagacacttccctccgagtcttagtctgcccgcctgtgaaactggctcgtaacaaacccctgaccccaggctcggtcgccttgagcccaagacctcacccaatgccccccgccccgccttccctcccgggctcccaggaggtgcggggactcggggggcggccccttcctcgggaggcgcccaggtggcacgtcggtgcctcagctcccggggtctctgggctccgcgctgcccacggggtgccgaggggcctctggagggggcgggttctctcgagccagaaagtccggagccgcccaggaattttggctcgaactgagtgcatttcctctcgggccggccgggtgcgatccgggaagggcggctgcgggcagacgcggcgctgcgctcggccaggccggcaccatgcggcccctgctctgcgcgctgaccggactggccctgctccgcgccgcgggctctttggccgctgccgaacccttcagccctccgcgaggagactcagctcagagcacagcgtgtgacagacacatggctgtgcaacgccgtctagatgtcatggaggagatggcttctgagccctggagctggagcccagcagttggaggtggtgcacctgccaggcagcgcccacagaaccagccctgtcctctcgacttccttccttagcttcatgtgaaataaaagctattctggtc

SEQ ID NO: 757 - DNA, 369 bp, Homo sapiens
atgaaagagagagtcatcttttaaacacagccaataatggtgactccggaaaggcagaaaaggaatctctgaagtaggtgtcctggagtcagttgttgaaacaatcctattgacaagtactgtgatagacagaacaagatacatacgccaacaggcatatgaaaaagtgttcaacatcactaattgtgagagaaatgcaaatcaaaaccatctcacaccagtcagaatgactattttggggaaatagccattggggaaatcgtggctctagatttttttttctggaagaattttcgtttgatgcagggggtatcttttgtccttggtagaaagtttcccaagagcctttgaatctgcagttactgactt

SEQ ID NO: 758 - DNA, 424 bp, Homo sapiens
gccccagccggcacacagaggctgctcctgggcctctccgagccctgtccacccaggcctgcagcagcgtctgcccagatgggctctactccctctgccgtcctgccggtccccagccacccatctccgggaggcggcttgctttcccgatttgcaggcgtgctttcttttggcagggagctgctgccgtctgtgctctggaccgtaaaacaagttttcatcaataaattaagataagcggaaagccagctccagaggaggtgggttgaggcgggctggcgggcgggaagctgttctgtgacccagaaggggccgaggcaaatccaaagcaagactgggtccccacccccttccccgggtcccctgtgccccattcgacccaggcctctcagacagggggaggattgggaggtcacctgcctcc

SEQ ID NO: 759 - DNA, 346 bp, Homo sapiens
catacagcgcatgtgagctgctgctcttttccaagtgttgccctgatggtatctttgataacaaaacaatacacataatgttgaattcatccagctttattatcctgggaaaggagggaaagaagcatctaagggaaacaaaacattctgggctggtaaatatcctgtgctaatctttaaggctgcagaaaagattgttcatgtatctcttatttatgcttagattctcctgagtgctgctgttcttttatttttcttaaagcaaggatctcctctatcatgctcattgaggaagcatgttatatcagtgttatatacaaacatcccttgatttagaggcacatgg

SEQ ID NO: 760 - DNA, 305 bp, Homo sapiens
gcttagccttctctgaaaacatacatttgcacactaagccagattcacatgggaggtacattatgccgtggcctagtctagtgtgtatttcccctttctctccccacaaagattttacaaaacttatacatgcaaacaggtatttttgtttgtttcacatgagtcgcttttgcataatataacaagcccatgatttcacatgtacagtaattcatagaaagtgatagtcatcttgcttagacaccttagttctcaaatctagcctgctaaatatagtaccttctcagacccatataaggtgtcat

SEQ ID NO: 761 - DNA, 404 bp, Homo sapiens
tgaaggcagcagcctgtttgatcatccctttcaatcatatttgtatctcagaccgtgcacagtggcttattcctgttatcccagcattttgggtggccgacctggcaaatcacttgaactagagttccagactgcctctctttaaaaaaaaaaaaaaaaaaaaaattagctgggcgtggtcactagttcctgctgtttcacctactcattctggagtgtgtggtaggagaattgcttgcgcttcagaggtggaagttgcagtaagcagagatggcgccactgccctcacacctggccaacagagtgagaccctgtctcaaaattagtaacaatcatcaccatcatatttggagctctgaggtccacgcatgctcaggcattgttctggtgcttcctggttgaga

SEQ ID NO: 762 - DNA, 526 bp, Homo sapiens
aatctgtatgaatgggcatacttgtgttccaataaaactttatttacaaaaacaggtggtagccagatttgggccacaagccataggttatggactcctgatatatggtttgtaaatacagtgaccatattcatacagctaaaaatgttcaggccagaatatgggtgcaggcagtccaaggtgtgtgactgccaagcacaccggcctatcattcattcacacatttagaaggtttctgccaaacatcactgaagtgatggacactgtgccaggcaatgaggggatgtgagagtcaaaggaattcgggcccagcctttgaggggttcacagttcatcggcattcaggctgttcaaatatacgcttaattgttcatcagcccatacaacctggggtcctgctttggaactctgtgtgtgtatgacacacatatacctaatatgtatgtataatgtatatgacagcatctcttggaaacatgaaaaaggtctcattctcccagcagcagaaataaaaagccatcacaga

SEQ ID NO: 763 - DNA, 407 bp, Homo sapiens
caaactactgatagatacaatacttaagttaatgatgacaggcacaaagactacatcactgtgtgattccacatttatgaaatgtggaaaaaccaaagctataacttacagaaatccagtcagtgggttgccaaggagtaatggaggagactgactccaatagggacacaaagaaacttttgggagtcatagaaatgtgtgtattagaattgtgtttgtgcttattggaatattgtgcaactggaatattggtgtattttatatatgtaaatgagtctttcataaaaataagttttttttcaaagcaaaagcaaactaacttagcaaactgggaatagagaagaatttccccagccaaagctgttacttaaaaaagaaagaagagggaaggatgggaaaaagaagac

SEQ ID NO: 764 - DNA, 395 bp, Homo sapiens
gtatatgctccctggttttcaggatctgaaggttctaaagttacttgaagttaaaggcagccttacttattgaacaccaagcactgtgcagaaatctttatatgtggtgtcatttaacccttttaatatttctactgatttactcatgtttcattgcccttttacagttgagagattaacacgtccaaagtcactcagacaattattaacctgctagattaatgcagatctgggattcccatccaggtgtgtcaagaccgtagagctcctgctgtttactaatcactggattctaaaggtgggagccactttctgagcatatttgctgcagacttggttccataactaaaaaggtgcctggatcatgtgacgagaattcaggaaagaacccaacc

SEQ ID NO: 765 - DNA, 305 bp, Homo sapiens
ctctcctacatgcaaaataagatgatgaatgttctccaaatgacagaggaggggaaggcctcaatgctgtgaactctgtagggtttcagctcagattggaccttccagactggcctggaaagccatgggggccagggtgtctcagcattggcccgcttttggcctggtatttgttgaacatctatcagtgggtctttttcttgtgtctgtcttacagcatttctctcatctacccctagtttagaaatgttttcttagataacttaaaattcatgtaaaataagaggtgatggatatataagttt

SEQ ID NO: 766 - DNA, 459 bp, Homo sapiens
ggttgcctgttcactgtgatgatagtttcttttgctgttcagaagctctttagtttaattagatccaatttgtcaattttggcttttgttgccattgcttttggtgctttagacatgaagtctttgcccatgcaatgtcctgaatggtattgcccattttctttttttgttttccaggggataaaatgtcttccttagaaacaaagtgtgtggttcaagtctcaacatatatcttcagttcctagccaagtaaatgatattcaataaattctataaatgctgactgattgaatgaatgattaaatctttatattaacttccatatttatctgtcttttgaagtcattgcactttagctctctttttttgtgtgtttttgactttgaagttccgggatacatatgcagaatgtgcaggtttgttacataggtatacctgtgccatggtggcttgctgcac

SEQ ID NO: 767 - DNA, 601 bp, Homo sapiens
  misc_feature (551)..(551): n is a, c, g, or t
aggcgacggtggggaagatggcgtaccagagcttgcggctggagtacctgcagatcccaccggtcagccgcgcctacaccactgcctgcgtcctcaccaccgccgccgtgcagttggaattgatcacaccttttcagttgtacttcaatcctgaattaatctttaaacactttcaaatatggagattaatcaccaacttcttattttttgggccagttggattcaattttttatttaacatgatttttctatatcgttactgtcgaatgctagaagaaggctctttccgaggtcggacagcagactttgtatttatgttcctttttggtggattcttaatgacccagtcggacaggatgagcaagtcaaaggaacttttaacccaggtattgcagttggacacatatattttttcttggaagatgtatttcccaatcaacctggtggaataagaattctgaaaacaccatctattttgaagctatttttgatcaacagatgaggatccaaatacaatcactacctgaggaacggccagaagcttcgctggngtgaggcccagcgcttggaggtagcacagtgccattatgagacccagctg

SEQ ID NO: 768 - DNA, 347 bp, Homo sapiens
  misc_feature (297)..(297): n is a, c, g, or t
gtggagccgaaggaacccctatgtccgcatgaacttccttcggccttctcaacttccaggccccctttctgccctgggtgctcatgggattttccttgttgttggggaactcaatcattgtggaccttttgggtattgcagttggacacatatattttttcttggaagatgtatttcccaatcaacctggtggaataagaattctgaaaacaccatctattttgaagctatttttgatcaacagatgaggatccaaatacaatcactacctgaggaacggccagaagcttcgctggngtgaggcccagcgcttggaggtagcacagtgccattatgagacccagctg

SEQ ID NO: 769 - DNA, 505 bp, Homo sapiens
  misc_feature (305)..(305): n is a, c, g, or t
acaggaaatgtgatcacttgaatgtgtgatattcattcatccactcattcattttgctgaccattaattaattcaattaaccctcctgagtacagctctgtgctaagcattagggactcaagatgattcttatcttcaaggcatccagcctggggagaaaaacagacgtacaactaagctgcagacggacacatcctttagtgatggggacacctggaagggattgagaaactccttgcagttggccttgggaagctggggaggacttgaaacttctaagtggccctgggagcaaccggagtggnggtgggccagtgcctgtaggcctggggctgcctggctgaggatcccagctggactactgccttgctgtctacaaatgatggagcccttccagtctcagcttcctcacaagtaaaatgcagacggcaatgcctctttccagtgacgttgtgaggattcgatgggaagtttcatgaaagcacttagcagggtttttgttgag

SEQ ID NO: 770 - DNA, 434 bp, Homo sapiens
gacatgtctggcagacaactagaagcacaggtatggagccctgaagagaggtatggggctggagatagtgatgttaacagatatattatggctgaagtaatgagaatgaaaaggcaaggaaatgattcgagaaagtatttctggaaaagggagaagacagtatcaaggaggaaaaagtggtcaatagtggcaaatgcacaaaagttcaagaatggtatttctaaccatatgcaaaaattttcagcataattagtcaatagggaaatgcaaatcaaaattacaatgaaataccactttacacccactaggatggttagaaggaaaaagatagacaataacaagtgttgataaggatatgaagaaactggaacccttatacactgctggtgggattacaaaatggtgcagctgctctggcaaacagtttggcagtt

SEQ ID NO: 771 - DNA, 450 bp, Homo sapiens
tgtgttggtaatggtagtggtggtggcaagatatagatgaaaaccacagtgtgacaccattatctagaaaggctaaaatgacagaggccaaggatctgaagcaactggaatactgagatcttgctggtaggaatataaactagaacaagtatttttggaaaattgtttgacattatctagctgaacatatgcatactccataacctagcagttcccctcctagatatatatccgtagaaatattttcatatgggtaccgaaagacatacaagaatgttcacagcaacattatttttttatagtccccaagctgaaaacaaccaaaaagcccatcaacagaaaaagtggattcagtaaattgtggctgttcatgcaatgggatactttcccacaatataaataaaacttctagtaaatgcaacaaacttggacaattcttaaaaatacatt

SEQ ID NO: 772 - DNA, 179 bp, Homo sapiens
gtgatctaggcctcgtcaatgagagcacttgcatagtcacagtgatcagcccaggagtgaatagggcagtgatctttgtagtttagtcagtgtacgttactatacgttgctgtttactgtcctggctagggatatgaagattacataatccctgtcctcaagaagctcagactgtaatt

SEQ ID NO: 773 - DNA, 368 bp, Homo sapiens
tacaagttaaaggcaaattgagcccatggcctcattgtgctacttagaataccctgtgacccagctctcctcagaaaccctgatggctttgttgcagcattgcattgcacagaagacctcagtggtggtcctgagtcctcacaacaaggtcaacccgtggcctggccactaaggcaacagagagggaaataaattttagaaaacgcttcccttaaaaatgagttaaaatgtacatttgcatcatgagactaggttaactgtcacctgagaaagtcctatattcagaaagacttaatcctggaccaggtaaatgaggcatttgctgtatgttctttgttatgaatttaatgctacaaagagaaaatggg

SEQ ID NO: 774 - DNA, 153 bp, Homo sapiens
agacccctccagtgacaggctgggtgtcccagttgttcagggtgtggtaagcggccttcagccatcagctgcaactcgccagggtcacacccttccctgggacagcccacattgcaaagtcctggacatcctggtccaaccgaggacagccct

SEQ ID NO: 775 - DNA, 631 bp, Homo sapiens
gtaaagactggagacagcataaacttgggggttgttctatcaagccacaggtcatttttcagaatctacacatgataactgaatatatttctacagatttctacatcaattttgcagcagcatttatatcaggaaacataaataatttatctttgttaataataaacatccgtttttttgttcctcacgtatgcgttcatagcaaaaggaaaggttaagacccagacatactgtcgcaaatgtgtatgagtattgtttgtggactggcaccaaaaacactatgccttttgatttttaaacagccagtcattttgagatagtcactgaaaacagatttggccagaatagcaaagtatagatgcagcttaatactttgtttatgcacaaagctgcaaacaaaaagatacaggcaaaaaacctgcttttcaaaacaaatattctattaaagtaaaaaaaaataattttattaacaaaagtataattttgttagtttgaattcctcacataattacttgatttcttcaaaatctttttagtgcataaacacagtcaaggcaaacatataaaatgtgttttctaatccatgaaagtgagaattctgcaaaaccactttgcattatagataaaattt

SEQ ID NO: 776 - DNA, 3390 bp, Homo sapiens
  misc_feature (2276)..(2276): n is a, c, g, or t
  misc_feature (2515)..(2515): n is a, c, g, or t
  misc_feature (2818)..(2818): n is a, c, g, or t
  misc_feature (2896)..(2896): n is a, c, g, or t
cccgagagcgcccattcacccccctcacccacctccccgcgttcccacttccccgcactctgacccggccggacgcccctcccctatcttgccgcccgccccctccagggggctctgctcccaccccagggagcccatccgacctctgcttgacttcccgccgcttccttcaggggcctcggctcatcgggtgcccctccccaaacttccaacccgtttgctccaggagttcctgccccatccccgagggcgcccaaatagccacactgtgtcctcctgtagtcgccgccccctgacctagcgcgacccagcgcccccgcccatgtccccccactcacctcccccggggggcgtggtgagtcgcggtctgttctcacggacggtccccgtccagcctgcgcttcgccggggccctcatctgctttcccgccaccctatcactcccttgccgtccaccctcggtcctcatggtcccagagccgggcccaaccgccaatagcaccccggcctggggggcagggccgccgtcggccccggggggcagcggctgggtggcggccgcgctgtgcgtggtcatcgcgctgacggcggcggccaactcgctgctgatcgcgctcatctgcactcagcccgcgctgcgcaacacgtccaacttcttcctggtgtcgctcttcacgtctgacctgatggtggggctggtggtgatgccgccggccatgctgaacgcgctgtacgggcgctgggtgctggcgcgcggcctctgcctgctctggaccgccttcgacgtgatgtgctgcagcgcctccatcctcaacctctgcctcatcagcctggaccgctacctgctcatcctctcgccgctgcgctacaagctgcgcatgacgcccctgcgtgccctggccctagtcctgggcgcctggagcctcgccgctctcgcctccttcctgcccctgctgctgggctggcacgagctgggccacgcacggccacccgtccctggccagtgccgcctgctggccagcctgccttttgtccttgtggcgtcgggcctcaccttcttcctgccctcgggtgccatatgcttcacctactgcaggatcctgctagctgcccgcaagcaggccgtgcaggtggcctccctcaccaccggcatggccagtcaggcctcggagacgctgcaggtgcccaggaccccacgcccaggggtggagtctgctgacagcaggcgtctagccacgaagcacagcaggaaggccctgaaggccagcctgacgctgggcatcctgctgggcatgttctttgtgacctggttgcccttctttgtggccaacatagtccaggccgtgtgcgactgcatctccccaggcctcttcgatgtcctcacatggctgggttactgtaacagcaccatgaaccccatcatctacccactcttcatgcgggacttcaagcgggcgctgggcaggttcctgccatgtccacgctgtccccgggagcgccaggccagcctggcctcgccatcactgcgcacctctcacagcggcccccggcccggccttagcctacagcaggtgctgccgctgcccctgccgccggactcagattcggactcagacgcaggctcaggcggctcctcgggcctgcggctcacggcccagctgctgcttcctggcgaggccacccaggaccccccgctgcccaccagggccgctgccgccgtcaatttcttcaacatcgaccccgcggagcccgagctgcggccgcatccacttggcatccccacgaactgacccgggcttggggctggccaatggggagctggattgagcagaacccagaccctgagtccttgggccagctcttggctaagaccaggaggctgcaagtctcctagaagccctctgagctccagaggggtgcgcagagctgaccccctgctgccatctccaggccccttacctgcagggatcatagctgactcagatatcgtgttctgaaggatgctccactgttgagtgtaacttgtgtgtgcagaggatgggctggaggactctggatgttggggagaaggacctcttggttcaggttaggatgaaaacaatcatgacctttgcccattctgtcaggctggacgggagggaatgcccccacctgcaggcatgggattaatgctgggcttgaaccccttgctactcacagtgtagtccatggacaatcggcattgccgtcacctttgggagtttgtgaaaaatgcacatctctgcccctgcccaganctgctgagtcagaactgcatgttaccaagatcccaggtgaatcatgtgcccattacagtttgagatgtgctgccttagatcatctttaaccctcagaatgatttgctggatggtttttggacctgtcagtctcccctccctggtatatatgtggcagcagctgcacctgggaggcaggcaggcatgcatgtgggcctctgctctaccacctatgagctctggggcctgacacgagttanttaacctctccgagcctcggttatcccatgtgtaaggtagagaaatgatgcctatcttgcaggttgtcttgagaattaagacaatgtgtgcccagcacccagtacacggtcagttaattggtacgttctgttgttacgacccccggctatccagccccctggcctctccggctgtgtgtcaggaagggctctttgctcccgttgttctctttccatttgcctccccctcttcagccctggcctagcctcccaaagcctgactctggttccccaactccctgttctggctcctgggtggggacnccatctctcagggaccctcccagctcccaagctgctgccctgcctttcctgggggcaaaaggggcaggtggcagtttntttttcagcctcagaactggttttcctcaatcctggggggtccttggacctagaagggaacaactgatggggataaacccagccccttgcccacctgcctctggccttccctggggtcagtgagagaaatgggaatggtagctacttgggtcagcagagtagagtcaaagagctgttcctggtgtgaggtggggcccacgaggcaggcaggtggactctggcacaggggccttggtttctgggggcagggggttggggaactcttggtcgccagtttacctgccataggtcccttttcagccctgcctcccccaagttccatcaacacaaactcccagggggtcctccatgcctggcctggccctctccttggtgctgatgagacacaactctggccccggcggctggcctctgaggggccatggtgcttgcggggcttcccctatcccccaggtctgcccaaggggactctcaataaactctagctgaaggca

SEQ ID NO: 777 - DNA, 361 bp, Homo sapiens
tctctcttaatcctttgatcattctctgtggaagctcccatgcgtgtttcttcttctttaatccttaactagattgtttgccattggctttgagtggaatccagttgttgactaataggactttcatggactctgttaaattctgcattggttgctgatttgcagttctagtttgcaacttatttacatagtttagtcactatatcatctgatattccaacaattagcaggagttcactgttggattaaataagagattaaaatgtgtaaaccggtcaggtgcagcagctcacacctgtaattccagcactttgggaggctgaggcggaaggattgcttgcgcctaggagttcaagaccag

SEQ ID NO: 778 - DNA, 658 bp, Homo sapiens
aaagttaaatacagttaccacatgacccagcaattccactccttaggttacacccaaaagaaatgaggacatatgaacaacaaaaacctacacaatgaatgttcataacagcattagtcaccttagtcaaatagtggaaacaataaaaaacatcagatttcaaacaaataaataaaatataccatatccataaaatgagtttgagaccagcctgaccaacatggcgaaaccccgtctctactaaaaatataaaaattagctgggtgtggtggtggacgcctgtaatcccagctactcaggaggctgagacagaagaattgcctgaacctgggaggcgaaggttgcagtgagccaagatcacgccatttgcactccaacctggggcaacagagtgagattctggctcaaaaaaaaaaaaaaaaaaaaaaaagagagtggagtgctgataaatgccacaatatgaacgaaactttagaatattatgttaaacaaaagaagccagtcacaaaagaccacattttgcatgattccattcatatgatggtctagaacagacaaaactttagagaaagattcgtggttgtctacagcagagagaaggggtactgagaagaaatgggagtgaccgctaatgggtatgggatttcttttgtcgagc

SEQ ID NO: 779 - DNA, 411 bp, Homo sapiens
attaaatatcattacctgaataaagtgtctaccctgagtagaaaaatgaaccatctgccactatactttatgtggttaaatgtctatttaaagttaacatcccgtcattcactttaaaaaacagaaaagctttatttaagaaaaatgtaacttaaagtaaggccccaaagcagaggtcagatacaaaattaagaattttttcccttttctttctgtggcaaaagcgtatttgactaacgacttccattaaaataatggagcaatgtaatatttctttgtgtatgaaaagaaatctttaacaacattgacacttttggattagaagtttttagatgcattttgcataactaatttgaccaactatattggcaaagaaatgtggaaacacaataggcaaaagcaggcttttaa

SEQ ID NO: 780 - DNA, 346 bp, Homo sapiens
atatgtttaggttttagcaaaatgtctttaattctttattaaatagtcaagctcatggggaaggaaatcgtaaaactgtaaaaatattaaacacaggagcttgtattgagcaatatataacattttaggatgatgcatctcttaaagaaggtttgataatgttgcattttcattgaaattaactcatagaaatgtgaaacattatcatttttcattccagccattgttttgtaatttctattacctaaagtgtaaattaaccttgaggttaatttaggttagaggtctgtattgcataatagagaaaaaccaacaagtcttattatttctaggagaatttagtatc

SEQ ID NO: 781 - DNA, 890 bp, Homo sapiens
gatctttacttaagattcggactggaacacaatacttgttccaaataacctccccaggctattcctgagagagggggtaccttggtttttggagtaggccagaagtttgtggtaggaaaggtgactgatttgcagctagactcacctgctaaagtagacacgggtctgttgcactgcaggttttgagaacagcctggaccaaaccacacagtgaccccaaaggcataaaaatgataatgaaggcagcgatggctcaactaatatcatgaagtctatgcatgaggctgcctactttgatttgcagtagttgatactttaaaacttcagtcctggcttatctgcctgtcccagggattcctgggctcccaatagtgagccaggatggggaagagctagctccatcagcacacactacatgtggacagttggactggactgttttttaaaagcacaaactcaacatttttagatcttcgtctaggattctgacttgaaaacaattcttgttacaaacagactctttatggtggtgaacaagcagagattgtaagggcccatgaaagcaatacttgggtgtgaagagccgtcatattcctaatggattcacctccaggaatctgatacatggacatgcattttaactgctgcttttattacctcccttaaaaaattagttctgtgaaattcccttgccacttttgcttggaatacatttcctttagttttctacctaatataatcttgtagcccacgtctcagaaacccagaggtccccagttgtgtcatgtatgtttcattctcacttttgattacttgaggccagccgagatctgtgtggataccatattccttgctattttttggtagcctgtgctactaacaatcaaatt

SEQ ID NO: 782 - DNA, 458 bp, Homo sapiens
ttggctcatgtgattatggaggctgtaaagtcccatgacagactgtctgcaagctggagacccaggggtggcagtaggggtagcgtggttcagtctgagtctgagggcctcagaaccagggaactcgacggtggaaccctcagtatgatattgaaggcctgaaagcaggcggagggtggagggtgctggtgtagttcctggagtccaaaggctggagttttgatatccaaggactagagaagtgtgtgttgcagctccaagagagggaagtggtgggagaagtagagaaggatgggaggagagagggagggaaagacaggagggagacccttgtctctgcctttttgttctatcggggccctagctgattggatggtgctggcccacattgtgggcgggccttcctcactcagtccacttaccctctgccagtctggaaacaccttgacagacaccca

SEQ ID NO: 783 - DNA, 388 bp, Homo sapiens
agccccatccagcagtcacccttaatcccactcagagacagccctgagagtgttcctctcgccacggggctcctcagggacctcctcgccgtccgagaggtcagcagaattaagacatcaggtatcagagggcgctggcatctctcacaagcagagcctgtgcacacatgtgcctgcacacacaccctcagggcccatgcagagaggccgatcttcaggcagaggtgctgtgggttggggattgggggcgggggtggccgctgaatcctcagtcccttccggaaccctggccctgctttcttgccagggtccccaccccctcaatcacctgtctcacctgctaggacacctgctgtgtagctcacactggttctctctctccatcctc

SEQ ID NO: 784 - DNA, 191 bp, Homo sapiens
gcgcccttctccgcccagggcagcagcgcgcggggcccccgggagccgaagagcaggcgggaactggcggcggcgcgggaggcgcagggagcggaggcggcagcagcggctcccgccgggactggtaattacgctcggggccgggccggggcgagccgggcaagcggcctctctgggtctccccgtctttc

SEQ ID NO: 785 - DNA, 292 bp, Homo sapiens
gtgagctgctttgaggaatattagaaaggaatgttttgaagaaaagaattcatgtaagtgttttttaaagccaatcaatatttatataggtatgaaacagtttttacatttgccttttaactataatatagcatttgggcaaacaaagacaacatttaaagtgaaaaatattttttttctattgctgatactcatactactcacgttattgttaaggttataatgtacacataattaaaattaaaatacagtttttatactctctaaagggcaaaataaaaagtaattatat

SEQ ID NO: 786 - DNA, 269 bp, Homo sapiens
taaataaataccatgaaacaatagaaaaaaattatgtttatatgcttttttccctggaagaagttccataacttttaaaatattcccaaaagggtccatgttccatcaaaaggttatgaccaattgaatttagtggtgattcagatatataataggaacaagcccagaatatacccataaggaaaaaaacatggagccggattcatgaaaccttgccagtgaatgaaacagtatgacactccaaaacctccattttcttattttcttat

SEQ ID NO: 787 - DNA, 964 bp, Homo sapiens
agatctcaggccagagccacgagttatgaaaaattattcccaggtcctaagttccactctaggaacttctaacattgccaccttgatttcagaattatgtgcaccaataactatgttgttcctctcattttttccacttttgagcaagaaggtcacatggcagttaccctctgcctgtcctaccattgtcttttgggtatgtgttgggcaggtaatttgtctcttaagttccagaaacgagattgagagaagcaatatatattcaaggagcagcatttaaggaactacctacacccaggaaatttcatctgtacctgcacctgtttagaagacaacatcctagctttgaagatgttcctgtaaaaagatgagacttttagggagtcatgggagggtagagtgtattttgaatatgagaaaaatataaataattggtgttcaaagagcagtgaagtatggtcgttttaaaatacggaaacattattttatacttctctcatcattggagtctaattcccctcttcctgagtgtaggctgttcctagggactcacttctaccacacggaatgtgttgaaaatgaagtgtgacttctgagggtagatcctaagaaaatttctggattccatcttgctttctctcttggatcactctgggagaagccagccactatacgtgaagacactggaggagagatgtatgaagagatccatgtgaggaattgaggtcatctgccaacaaccagcaaggaactggagccttctagcaacaaccacatgaagtgaaccatcctgaaagcaagtcctccagccacaaacaagccttcagataattacagccactgctaatatcctgactagaacttcatggggactatgagccagaatcacccagctaaattggtcccacatttctgacttacagaaactatgagataataaatgtttgtgtttgaagctgctaag

SEQ ID NO: 788 - DNA, 599 bp, Homo sapiens
aagaatgagatttgaaagtggaccatggttattcaattcccttttacccagaaactttatgctagcaataatcattaatgtgttttttctagcatatgttttaaactttactccacattacttgattcctcagatctgacatttttgaccagatactggtccattagcagtatagatacatcgaagaactaaaaggtcattcttttgttttgttttttgtttttttgagacggagtctccctctgtctcccaggctggcatgcagaggtttcagtgacctgagatcgcgccactgcactccagcctgggtgacagagcaagactccgtctcccaaaaagaaaaaaaaaaaagaagcaatagcattgattgaagtaaaggtaaaggtttgtagcctgggcaacagagcctgggcaacagaacctgggcaacagtatctacaaaaaaaaaaaaaattgagctgggcatggtggcacatgcctgtattcctagctgctcaggaggctgaggcaggaggatcacttgagcccagaagtttgggtctgcagtgagccatgattgcaccactgcactccagtgacagagtgaggccctatctctt

SEQ ID NO: 789 - DNA, 1224 bp, Homo sapiens
ggttgcatacccaggtcatctaaggagcaaatgaaaatctgtgactgaagaaagaattcaccaagttaaccagacacaaaattaacaaaaacatcagtagctttcctataaatataggctataatggagggtcattttttatttttatttagagacagggtcttaactgtcacctggactggagtgcagtggcatgatcatgtttcacggcagcctctaccttctgggctcaagcgatcctctcttctcagccacctgagtagctgggcctacaggtgtacatcaccacgcccagataatttttattgtattttttatagaggcagtgtcttgctatgttgccaaggctgttcttgtactcctggcctcaagcgaacctcctacctcagcctccccaaatgctgggattacaggcatgagacactgcacctgaccagaagtcattttttcaatagcaacccccaaaaaagataaaatacctagtaacaaatagggaaacacctatgtgaaaggtattataacattactaaggaacacaggccctgaataagtgaaagttctgttgattctcacattttgctatacagtatcttaagatgtaaaaccttcctttaaaacacaagcggattctaaagttaaaacagaaaagcaaatatgccagactagtcaaattgttttaaattctgctgtttttagaacattgtaattgaaacagcatgatgctggccctttaaaaagattcctggaacaagaaagtccacaaataagccaaatacacaggaactcggcgtggcacaaaggggccgtgtgtgatcaggaactggaactttgcaacaactacccatgctcagaagtttgggccaccttgaaaagagaaaagttggattagactcctttttatactaagggaagttccaagtggtcaagtatttacgtgtaaaaaaatacatatatatgaaaccataatcataagatactttttttgtaaattgactattattgtataaatttatagagtataaagtgatcttataaattatgcatacattgtggactagtcaagctagttacatccatcacctcaaatacttaacatttttgtagtgagaacatctgaaatttactcttagcaattttgaaatgtacaatactcaatttttgactgtattcaccatgctgtacaatagaactcagaaaaagaaaaatatagtcctcctttctaag

SEQ ID NO: 790 - DNA, 736 bp, Homo sapiens
tacatttacgcctcatgccctccctgggtgaagaagataattaaagtcatctgggcctccacaagctacacaggaagtcaaggaaacagtgatagcgaacaagaccatctagccctgtactctcctcattccctgaacactttttaaaaatacccagaaaacctaatttcctggaacaactgactttttatcagttaggaaagagtgaaaaatagcaaatgacactataatttaattctcaaaacaacaccattgttatccctgtatcacatagatgaaaaaaggtacagacggttaactatctaatccaggccctagaaactagtagacagaaagttcatcttttctagactggcgcggtggctcacatccataccacagcactttgggaggccaaggtgggtggatcacttgaggccaggagttcgagaccagccccgccaacatggtgaaaccctgtctctaccaaaaatataaaaattagccgggagtgatgccacatgcctgtaatcccagctacttgggtggctgagacacaagaattgcatgaacctgaaaggcggaggttgcaatgagccgacattgcaccactgcgctccagcctgggcgactgtaagactccgtctcaaaaaaaaaaagttcataaaatgaagtctctcagtctttccctaatatgaagtaccatccagaaaccagaaggtggagttgatgtgatattctatgttggcgtgaacat

SEQ ID NO: 791 - DNA, 964 bp, Homo sapiens
agccttcaaagctagtggcagagggtagctcccctcctgcctgtggcttgtgctggcctagagagtatagggcagaaggatggcagatgagtgactccacatccagagctgcctccctttaatccaggatcctgtccttcctgtcctgtaggagtgcctgttgccagtgtggggtgagacaagtttgtcccacagggctgtctgagcagataagattaagggctgggtctgtgctcaattaactcctgtgggcacgggggctgggaagagcaaagtcagcggtgcctacagtcagcaccatgctgggcctgccgtggaagggaggtctgtcctgggcgctgctgctgcttctcttaggctcccagatcctgctgatctatgcctggcatttccacgagcaaagggactgtgatgaacacaatgtcatggctcgttacctccctgccacagtggagtttgctgtccacacattcaaccaacagagcaaggactactatgcctacagactggggcacatcttgaattcctggaaggagcaggtggagtccaagactgtattctcaatggagctactgctggggagaactaggtgtgggaaatttgaagacgacattgacaactgccatttccaagaaagcacagagctgaacaatactttcacctgcttcttcaccatcagcaccaggccctggatgactcagttcagcctcctgaacaagacctgcttggagggattccactgagtgaaacccactcacaggcttgtccatgtgctgctcccacattccgtggacatcagcactactctcctgaggactcttcagtggctgagcagctttggacttgtttgttatcctattttgcatgtgtttgagatctcagatcagtgttttagaaaatccacacatcttgagcctaatcatgtagtgtagatcattaaacatcagcattttaagaaaaaaag

SEQ ID NO: 792 - DNA, 336 bp, Homo sapiens
aggtgtaatagttacacacatggttctttgcagtgggacagactgaggcctccacctgttctgccaccttctatctacacaatcaggacatgttctcaaaggttatttgctgcagcccagtcctcttcctattctcatatgaatgtcaaagggcccctgatccagccccacaacacccagggcccttttcttaccccaagcctctcaagcctgctgttccaccagagcagcccagcctgcacactgtcagcctggcctctgtctaggtacgcccagccaggctcagcgctgctgaccacaccaccaagactgcagagaggctgagcaaacagccct

SEQ ID NO: 793 - DNA, 428 bp, Homo sapiens
tcacctgatataccttatttatcccacacccaccccaataacatatcgtgctcactgttatctttgaggcaacccttgaattttactcagcctggagcgctcttcacgtcttgtccagagccagttcggactcattcttcagccgtgcatcagtcagtgggggctagcttaaactgtggtgacaaacaacctccaaatttcagtggctcaaaaatcttcttccttatttatttacatctcatgactggtcaggtgagaggtagctctgtgctgtgtcatcctaacacaggaatccagaaggaaggagggaccgtcaatgagatccccattgctatagaaaagagaaaaaagcatgcggaatagaacgctgtttcttggagatttctcctgaaaaagtcacatgttatttcttctcacctccatcggca

SEQ ID NO: 794 - DNA, 368 bp, Homo sapiens
aagtgtcacatctttctattgcatgatgctgcttcttgaacacccatagtagccaaggccagaattagtgtggcaccctcttccccagacaaggtccatggacagtgcatttcaaaatacaggaagctctccttacactctctgctacctagcttccatggttatcaagtaattatactttatgctgagccaacttatgcatttaggaagagatgaagagaaattatatcctcaaatgggctggaacaaaagggaataccaataatttgtaagttaatcaaattataattaaagcaggaagagacacaaggagcttggattatctatgttttctgttagaaaataatacaacaaaagtatccagggag

SEQ ID NO: 795 - DNA, 358 bp, Homo sapiens
ggtaattttaaatggaaagttattgggggaaaagccatctttaacttgctcaggacagcatttaactatgccagtagaactcaaaccttgaacaccccatcagaaaaagttctggacacgcacctccaataattttgttttttgagacagtctggacaagagcagaactccatctcaaaacaaaaaaaaacccaacaaaacaccaccaccaccaccatcaggcttatggcgtaatcccaggattttgggaggctgaggtgggcagatcacttgaggccaggagttcaagaccagcctggtcaacatggagaaacccccatctctactaaaaacataaaaattagtctggcgtggtggt

SEQ ID NO: 796 - DNA, 432 bp, Homo sapiens
gccttgctcgcatgcttttaggaggtgtactttcttagtgcttcagacttctgacctcactacacaccctcctcatcctctacagccgtagtctgctctctatgaatgaggggtcttggaaggagctcttgagtgagggcaagtgtccgaccactctcccagtggtggcaggcctctctttttattaatattggcttgggacgctgggttcaagcagctttcccatccctcactcagctgcaggtggcttttgctgctagccctccctccaccccagtgtacctttgttagagaccaggggcaggagagtttcctactctatacccactgtcttcctgattttacttcatgtaagatggggtttagtgtccatgtcccattgagagagggctattccaggcaccatctctgccccatcttgtgagcatgtga

SEQ ID NO: 797 - DNA, 454 bp, Homo sapiens
aaaaaattagccagatgtggtggtcctgtaccacccagctactcaggaggctgaggtgggaggattgctcgagctcagaagctccaggttatgatcataacctgaagctatgatttggccactgcactccagtctgggtgactgagagagagagaaagaaaagaaaagaagagggccaggcgcagtggctcacccttgtaatcccagcactttgggaggccgaggtgggtggatcacgaggtcaagagattgagaccaccctggccaacatggtgaaaccccgtctctactaaaaatacaaaaaattagccaggcatggtggtgggcacctggagtcccagctacttgggaggctgaggcaggagaatcacttgaacctgggaggcagaggttgcagtgagctgagcttgcgccactgcactccagcctggcgacagagggagactccgtctca

SEQ ID NO: 798 - DNA, 1969 bp, Homo sapiens
attttgtatgcgatcgtggcaggattgcggacgggcagcactctttctgcagaaggtaaaaatcaccttgctgaggaagcttttcgtctgctgattcttctttgtgacatcggggaataaggatttatttctaacagtcttgggggctcgtctgggatcacccagtctccttcgggtcggggtctctgattcccgcccccccaccaaggggaggcgccccactgccttactgcggtggcctcagggactgggaatccggacttacctgttgtgatgaataaacccggaccctcagcaacgtggaaaacggcgaataggcttgcattgcactgcctcggggaccagataaactctgttcacagagcaaagtaaagaaacgtcgcaagggtgcgacaaagtacttgcttggtggtcgggatattctggaggttaaaagtgtgtgtgaatagtcacaagcctcactgcagctggtgttgcttgtgtaaatcatgataagtcctactgctggaccgagcgagtgagtcttgcctgcggttccgtggctacctcatacggcttaaggcggatcttgccttggggtttataccggcacgccaatgctaagaggggcctaaattcccgtgaggaaagtggccaggtaggacaaagcgagtgaagagtgtaaaaagcctccagaaagaaaaagaggagttaaatcctcctcagggaaaacgaaacctcaagcacgtaaggttaaaaatataagcaagccaggaaaaaacaggatagacaagaaatctccaggattaagaggttaagtctacctgatattcaatatgggaaaggtttctagtaaatcgggggcaaaaaaagatgcaagttatcaaatccctcccgatagtcctttaaggctcatgttaaagtattggaaagataataaaaaaactaaattaaaaaaaagcagcagataattaagtattgttgctttatttggactaaaaagccaattctcaagccagcggttttttggtcaaaatttaggtcagataaagattaaatctgtcaacttttaataatatatgtttatagcaaaagtcctgtgtcacaagaaaaattgattatgctttgtgctagcggcaagggcctatattattctttatcctttaaaaacgatcaaagggggactagaaaataaaaaacagtcaaaaatggccttatctaataagagataggaccctctagaccaccttcccccgtttcttaataacctgccgacacctccccaggtagctgctgctgtcctagatccccttctggacctgatccctgacccagctgccactccaggcccccctgccactccaggcctcccccatataacccagattcttgtgaatcccaggagcctaaaaattctaaatatccttctttaaagaaaagactccaacaaaaattaaaacaatgtaagaaggatattcagaatttcccttttcctgccccccaaaaaagttaacttcaacattctttcctttaaggaaagttccccaaggaggagaagctattggttttgtggatgctccccttactgggtctgaagtttggagtataaaaagagaactaaagccactgttaaataatcctaacagggtggcagatcaaattgatcagtttttaggcccacagttatatacttgggctgaatcagtgtgcatcctaggtattattttttcaaggaaaaaaagaaatacgatctgggaacgtaaacatcctccaggtcaaaatgttctggcagcaaatcataaattccctgctcaggacccgcagtgggataaaataatgctgcccaccgaaataatataaggaattttttaaaaaataataatcagggggattcaaaagtcagcacccagaccccaaaacctttccaaagcatttaatgtccaacaaaagaaagatgaaggacctatgaggttcatagataaattaaaag

SEQ ID NO: 799 - DNA, 1416 bp, Homo sapiens
gcggccgctgattggaccgtttgaatgagacgccgccacggcccggcatacgcgcgggcgcgccctgacgctgaggaagtcgcgcacgcgactaacggtcttcctgggggccggagcgtggcgaggggaggcgggactcggggttttaaacgcgtgatggaaggcgctcgggccaatagggatgcgctttagtgactggtgggtcacgagactcgcatgggccaatgactgatagagaccggtcagagggcgacccagtttcgtgcagatcaaaccgctgccagccaacgaaatccgttgatttttgtatatgcaaatgaagtgtgcgctgccgcccgcgccccctcctttgagccgtggtggaggtgggcgctggaactccgactacatttttctatgaggcgccattttgtgctggaaatgctcttggacccacgtcctgtattgctaaggctcaaagatcagtcagaatgaccttgaaggcttggacagccttgcactccgtgtgtgacccccactcctgccaggcttcatcgaagacgccagcctcagtttccttatgtgacaaatgggcactgggatccgttgtattgccagggaaagaagtcagagagtgccaagacggttattcacggcatggttatgcctatgactgacccatggcctccagccacacccgccttctctgggactcagtttccctctctaggaaatggacacatagctgcctggaaaagggaccatctccagccctcagtgtcagtaaaaacgtcaggcaattgcttgagaacggtggccagagctccctgagcaggccttttggaggggcttagagaggaggagggaatgctgaagttggccttcctttgctcatctgtgcagtgcggtcgcagtgccctctcggtgtctctgccagatctgtgcgtccacagctcttcttagtttcttggcctttttcagccatggatgagagcattaacatctgggcctaatttggccacaggtacctgaaaagacccctggctaccagcttcccctcatggggcctcagcttctgaagaaggaataaggaaggtgtgaaagaaatctacatggccaaggccaggcgtggtagctcacgcctgtaatcccagcactttgggaggctgaagctggcagatcacctgaggtcaggagtttgagaccagcctggccaacatggtgaaaccccatctgtactaaaaatacaaaaattagccaggtgtgttgatgcagccctgtaatcccagctactcgtgaggctgagatgggagaatcggttaaagccgggatgtggaggttgcagtgaactgagatctcgccactgcaccccagcctgggcaacagagcaagaccctgtctcaaaaaacaaaaaagcaaaaaaaaaaaaaaaaccaa

SEQ ID NO: 800 - DNA, 597 bp, Homo sapiens
acattactctcaaaggagaaacaatagcactgaaaatcacttgtcaacagaaatgatggaagtgagaagataatggagtgccattctgaagttcctcaaagaaaaaagtgtcaacctgtaatcctatattcacaaaatatacttaaaaatgaatttgaaatagatgtttctattcaaaaactgagaaaggctgggtgaggtggcctgtaatcccagtcctttgggaggtcaaagcgggcagattgtttgagttctggagtttgagaccagcctgagcaacatggtgaaatcccttctctacaaaaaatacaaaagaattagccaggtatggtggtgcctgcctgtggtcccgctactcgggaggctgaggtgggaggactgcttgaacctaggaggttgaggctacagtgaaccatgatcatgccactgcactccagcctgggcgacagagtgagaccctgtctcaaaaacaagcaaacaaaaaaacacaaaaaaacctgagaaaatttgctgtcagcagatgtgcatacacaaaaaatactaaagggaattcttcaggtagaagaaaactgatctatgatagaatcacagaaatgc

SEQ ID NO: 801 - DNA, 380 bp, Homo sapiens
caagtgagcagcagggccaagacggaacgacctctctaaggtgtctctcacgatgtgatcctatcctctcattcggaagtaggatcctactgagcgcagtggctcacttctgtaatcctaacactttgggaggccaaggtgggtgaatcacttgagctcaggtgtttgaggccagcatgggcaacatggcaaaacccagtctctactaaaaatacaaaaattagccaggcagtggtggtgcgcccctgtggtcccagctactcgggatactgaggtaggaggatcactgtagcccaggaggtcgaggctgcagtgagccatgattgtgcccctgcactccagcctgggtgacagaacgggaccctgtctctcaaaaaaaa

SEQ ID NO: 802 - DNA, 341 bp, Homo sapiens
ttttacgttaagttccctttgtccagtgggacatacactgacacctaggcaatttgtgatgccatagacgttcaaggtggcatggggacagggctaggagtccaatgccttcagtcctttctcacctgatgatgccagctcccattgttccatctctctgggtctccacccacaatccttaaatcatgtgtgcagggccttgtccagcctggggactctttgtactatatttgggctgttcttgagctcatgcaagctatttggctgctcccaacatgcagtgaggcaagagaaactctctgaggctgtccgggtctcatgtcaacctccaggccactcta

SEQ ID NO: 803 - DNA, 483 bp, Homo sapiens
gaaaatggtctaacaccaatttgctgtctaagtgcctaacaacagggttttccatggttttaaggtaaagaatcattgattatttgaattattcaaaaagtatgagtaaatttcctagtatattttaagtgttgtcttcacttctattttaattgaacattctaaaattgacattcacagttgctagtacatttttttccatttcaaataagatgatgagcagccaaagaatgtcttagatattagaaagtgcaaatggcaaaattgcctctattaaatatctttttaattcaggagagttcacagccagttaggccaggtaggatgtacaggatgagctgaaatgagaagcatgggtcaggaccacacaaggtgattccaaatgtccttgtaggagttagggaacacagccagctcccttagagaaaagcctcttatgaagccctaaattagacatccaaaggtccagaatcagggcagcca

SEQ ID NO: 804 - DNA, 451 bp, Homo sapiens
acaaacatatcagaactgacactcagttcaaatgaagaaagtaggaattgggcgtgccgtgttattttttcaaagattctcctattgctccaaattgttggggattatcttaaagtctttgaatagcttcagttatggaagattttaccctctgagaatagaactgaattttagacaaaccatgagtccattgtagctagactggcatgcaagttgggattaaacagagtaaaacgtcttgtttaaaaaaataagaaaggccggcttgggcaacatagtgagacctcctctatgaaaagttagctgggcatggtggtgtgcgcctgtggttccagccgctcaggaggccgaggcaggaggatggaggtcaagactgcagtggactgtggttgcgccactgtactccagcctgggtgacacagcaagaccccgtctcaaaaaaagaaaacag

SEQ ID NO: 805 - DNA, 144 bp, Homo sapiens
aatggagtgggaggaatagagaaggtggggttgcaagaggagaaaggcagaggaatttcctaccgtcttcctgttttttgttgatggttagtgattaatgagacaagctgttctgtttctctgggagtcttgactgtcttgaag

SEQ ID NO: 806 - DNA, 679 bp, Homo sapiens
tgtgtgggcgggggttggggctaaggtactctcagaccaccagtcactatacaccgatgggtggtgccagataaagcattttgtaaggtgacagcaacaagatctgtcctcattcacacataccagaagcagcagcaatgcagcagggtatacacttgttaggtgcagcagggtgctagcaggtgccagggtgggtgggtgcctgactccatgtgggtgttcacagcagtgacggaggcagcacacaaaattaaaattcttaaaggtggtcatacatataacaagtgggtcaaggaagagatgaggtgcaagacaaagataaagcacatgccctagcacagtttacaactgcttaaaagaaagctactaaaatgcagacaccaaagtaacaggtgtctgttagtctgtcttctttaacactcccactatcggccaggcctagtggctcatgcctataattccagcactttgggaggccaaggcaggcatgagcctccgtgcccggatgatctcactctttctatggctgtatggctgcattgtattccatggtgagtatttaccacattttctttatccagtccaccactaaggggcatttaggtcaattccatggctttgctattgtaaacactactgcatgtgacacatgcatgcacccgtaagatcctgagagtca

SEQ ID NO: 807 - DNA, 335 bp, Homo sapiens
gcatattccactagctcttcctgagggctccactctccacacttccatcctctgcacaagctctttagctttctgggttgtctgctccattgatacatttgcccaggatctgctgtgtttcagtatgttcaaatttttctttttgaactgattttcacactaagctcaaaagaccttctccgtccaccccttctaaaactctcaacagcacctctactacaggttctctcatgcaatcactgtctccatttttatcttcttgtaacttatcaactccttgaaataagagactgcattgttatttgccatatatttatgtgggtaagggctcaaaa

SEQ ID NO: 808 - DNA, 612 bp, Homo sapiens
atatgatactgggcatatggcaatgctcagtgaatattggacagctaatacaatttgcagagtcactgaggaaaagtatagcttcagagagcttctgtgtccagatttcaacgattttctttcatcattatttcgtggggctcccaggaccatatgtggctcacaaaccacaggctaggatgtgtttaacgttaaaagcaagcagtgtgtttctctgaagtgtggctccaccatggtgttcggttacacccagaggaggaggctggtgggcagtcatagaagtgcatcttccagagcaggaagggatcaacagctcttcctgggagacttccattctcctaccccagtttctgagcacagcatgaatctaggagggagtttctcttcttgcttttcctcctagttttgtttcctctattcccttttccttgctaaagtgtgttggatggtcaggaatgtgggcggagaagagggggagctggagacatctcatcctttcatccagcttgtgtaaaaatgcctcagaactccctcataccacatgcaccataaattataaggtcaagctttgtaagcctgcagccctcttggctttttgcatgttggttagaa

SEQ ID NO: 809 - DNA, 434 bp, Homo sapiens
gcatggtctcgtactcctgggcctggtgctgcccctctgcctgggtctgtgccagctctgactccaggtgcagcaggattctgttgagctgctctacctgcagggcatagcaggtctccacctccctcaggctgttctccagaagctggccttcagatttcttatcaagtccagatggatctccaaggactggaccgtatgtctcagctccgtgagtgtcatctcagcagctccgacctgcgcggactgagtggtgaccactgtggtgctctcctcaatctgctgagaccagtacttgtctagctcctcttggttcttctgagctagctcgtcgtattgggcctgtatgtctgccatgatcttggcgaggtcctgagatttgggagcatctaccttcacggtcaacccagagctggtgagctgggcttgtaggc

SEQ ID NO: 810 - DNA, 568 bp, Homo sapiens
gatggtggtcgtcccggagggaaggcctcggccctgcgccgctcccagcctattgttctccgtggacaccgcgatatcgtggtttttgtttccttagcatgcacctggatgcttacaaccaagacccaatctgtgaggacgaggtgaagggagacggggctcaaccctctcaattaatcccttcactttagcaacaccattgcatgacctttgctctcgccacgggccctctgtggtcttagacctggagaaaagactttaattcagacctctttttagaactcgtcgaaccttccttttgtcctatgctttctttccttttcccgcttctccccctttttgattaacctcttcttatctttacagccgtctccctttaattttacttttgatttcctactgaaattcttcctttcattttcttctcggtgataagattttttttcctcctcgagggtgcttgtactcattttcagtgcagtaaactttattcttgcagttgccaattggaaaaaagccaagcatttttctttaacctctggctttccttctgtagcacccaccgacc

SEQ ID NO: 811 - DNA, 390 bp, Homo sapiens
gtttgtgccttcagtctcttgcctcagcacctgggtaatcctttgcccacacatttccgggtggctctgctctcctcttgccattctctttctacacacctgctccaagttctgactcccactccctcagcccaccccagtgcccacaaccctcctatctctctccagccctgacctttcttgggacacccagagctgcctgcagaatctttgccttcccacttgccaagtctgaaatcacactcagcctcctaaccaggaccacaaaaccaactcctccaactgcccttgcatcatcagaggaaccccaagctcttgaagtgtgctctgcctcttctcctttctaatagcactactcatggttgcatctgttctttttaaaaaaaaaaa

SEQ ID NO: 812 - DNA, 321 bp, Homo sapiens
cagctcagaaggaacactgagtgagggacagatggactggtccggcaggggacccgcccattcagcagatgtccctgggcacagctcacatgtcagttctctgcaaagcggacaggcggctgagaagtgtcagagcctgctaatgagggctgggcaagagagaagcagaagcgaacttgcctgggtcgggggaaggggatggtgcaaagcaaccctgaggccgaaagcctgtgtagctagaaccaacgggggtgggggcgggcgctcagggctcagggctcaggaaaatgaggtggctctcctagttttaccagggaaagg

SEQ ID NO: 813 - DNA, 267 bp, Homo sapiens
tttttttttttaccagaatctcactgactaaatactctaagtataaaaataagttctaaaaaaaattcaacaaaaatgtagaaaaatatcttctaaaacaagactagaaagtaagaagccattaggaagaaacaatgggtcatttagcaaacataattgcatatgtagacatctaccaagataaattaatatatatttggactgatttatattccaatgatacatttattgtgtgtattaatgagtatgggtagccctaaaagatat

SEQ ID NO: 814 - DNA, 1411 bp, Homo sapiens
gctcccatgagtagtaaaatgacacagtagttaggtttatgtccagtcacagcctcttcccatttccactgggaatgccttacctaatgagttaagacaatgaaaaaagtaaaccagttagaatacttacactttctgatttaaaactcagtaaaactatagtaataaagacagtatgttactgacataagaacagacatacagaccaatggaaccaaattgagaattcagcaataaatcttcacatttatgatccactgatttccaacaagggtatcaagataattcagtgtaaaaaatagtcttttcaacgaatggtgctgggacactgggtctacacaagccaaaaggaatgaaattggactctaatctcataccacatacaaaaattaactgaaaaaggatcagaaaccaaaatgtaaaagctaaaactgtaaaattcttaggaaaaaatacagatgtaaatcttcgtggtcttggattaggcaatggtttctaagatatgacaccaaatgcacaaacaacaaaagaaaaaacagatatttagacttcacaaaaagcaaaaacttctatgtttcaaaggtcactatcaagaaagtaaaaaaaaaaaatccacagaatggaggaagatagttgcaaattatatatctgatgtacaggacttatatccaaaatgtattttgaaaaaactcttacaattcaacaataaaacgacaagtcattaaaaaatggagcaggatttgaactaacatttctccaaagaagataaacaaatggacaataagcacatgaaaagatgctcatccatcatccatcagaataatgcaaatcaataccacaacaaaataccacttcatatctactaggatagctatcattaaaaaaaaaaaaaggacaacatcaagtgctgccaaagttgtggagaaaaactgggccctcatacactgctggcaggaaacacagacttactatataacccagcaattccactgctaggtacatatctaagagaaatgaaaacaaatgtctacccaaaaacctgtacataaatgttcataacagcattattcatagtagcaaaaaagtggaaacaatataaatatccatcaattgatgagaagaaaaataaaatgtggtatatccataaaaatggaagtttatttggtaacaagtaggaacaaaggccagagcaattaggcaagagaaaagaaataaagggcatccaaactgtaaaggaaaaagtcaaatcagccttgttcccagattacgtgatgttaaaacctaaagactctaccaaaaaaaaaaactgttagaactgtcaagaaattcagcaaagttgtagaatgccaaatcaacacacaaaaatcagtggcatttatatatgtcaacagcaaataacctgaaaaaaatc

SEQ ID NO: 815 - DNA, 494 bp, Homo sapiens
gacttagaagagttcatatcaaatagtgttattgaagtatgcagaaattatatttcacccacatcagtaaggtcaaatgccttatcctcagcaatgtgtaccaggttgataggacattgccacagtcccaccctgtctgatctattggcaatcttatacagtccgattacatagtagaggtaacgtggggtggggtcaggagcctgtgcgtgggttccagcccactggaccctgcatggcagagacaaggggcatgctcattaaggggaagggtaccccttgctatttactgtcttgaaaaatatgcttcccttactgttagtcagagtcttgctgcttcaaaaccacatcagcacaagagtgttttctcagcagacaacctcgtgtttatgtcgttctctacaaacacagctatcattcttcttaaaggggaaggcactgtactttgcctctgattctaaatgggaatgtttaaaaccaaccaagtgcccgag

SEQ ID NO: 816 - DNA, 342 bp, Homo sapiens
tctcgcctgctgtcggctcctttgtctgcgaaacacattttctcttattatcaccttgttctctgcctgccttggatggtttcagcttgtctcttaacatcaagatgttgctattaacagtcttctctttcttaacagcttacagtcacttccttttattcagtccttttccttttccctcccaaaccacgtaatcatctctttcagcctcaaataaaagttgtataaccatttcataaccactgctttagagttgctatcaaaaaggcacaagaagaaggacataaaagtaaggggagagaaatcaaaaggagaggaggtgagggatactccaataattga

SEQ ID NO: 817 - DNA, 349 bp, Homo sapiens
tagcactgagtaatactccatcgtcttgatgtatcacggtttatctagtcacctactgtcatctactgaaggacatcttggttgctttcaagctctggcaattattaatagaggtggtataaacattttgtacaggttttttgttttgttttgtcttaagacggagtcttactctgtctcccaggctggggtgcagtgccgtgatctcagctcactgcaacctccgcctcctgggttcaagtgattctcctggctcagcctcccgagtaggtgggattacaggtgagcaccaccacacctggctaatttttgtatttttagtagagaaggggtttccccatgttggcca

SEQ ID NO: 818 - DNA, 422 bp, Homo sapiens
gcgtgagcactgactgagcagtgtctacatttttatgtactattcgtctcttcctttctctctgtcttcttccctcctccaatgttagaaatccttgtcagcttaattccttcatacacttttttattttttggtaatgaaatcttagggttagaaggggcctttaaggaatcaggccaaattctcatccaatcagattaagggaactttaaaccaaaagtagagggagaaaggtagggcctaagttggaaaacatagtaaagcagtggtccagtaatttgcaggagaaaacaatcagaaagggccgggcgtggtggctcacgcctataatcccagcactttgggaggccgaggcaggtggatcacttgagctcaggaattcgagaccagcctgcgcaacatggtgaaactcagtctctata

SEQ ID NO: 819 - DNA, 4342 bp, Homo sapiens
gcggggccttctaaggccgaaagtcttcggagcttgcggcagtctcttcgcggcgtccaccacttagacgcaagttgctgaagccggccggggagaaggtgttgttgccggagctgagaccgggcggccacagtccgcagggatgaacctcgagttgctggagtcctttgggcagaactatccagaggaagctgatggaactttggattgtatcagcatggctttgacttgcacctttaacaggtggggcacactgcttgcagttggctgtaatgatggccgaattgtcatctgggatttcttgacaagaggcattgctaaaataattagtgcacacatccatccagtgtgttctttatgctggagccgagatggtcataaactcgtgagtgcttccactgataacatagtgtcacagtgggatgttctttcaggcgactgtgaccagaggtttcgattcccttcacccatcttaaaagtccaatatcatccacgagatcagaacaaggttctcgtgtgtcccatgaaatctgctcctgtcatgttgaccctttcagattccaaacatgttgttctgccggtggacgatgactccgatttgaacgttgtggcatcttttgataggcgaggggaatatatttatacgggaaacgcaaaaggcaagattttggtcctaaaaacagattctcaggatcttgttgcttccttcagagtgacaactggaacaagcaataccacagccattaagtcaattgagtttgcccggaaggggagttgctttttaattaacacggcagatcgaataatcagagtttatgatggcagagaaatcttaacatgtggaagagatggagagcctgaacctatgcaggaattgcaggatttggtgaataggaccccatggaagaaatgttgtttctctggggatggggaatacatcgtggcaggttctgcccggcagcatgccctgtacatctgggagaagagcattggcaacctggtgaagattctccatgggacgagaggagaactcctcttggatgtagcttggcatcctgttcgacccatcatagcatccatttccagtggagtggtatctatctgggcacagaatcaagtagaaaactggagtgcatttgcaccagacttcaaagaattggatgaaaatgtagaatacgaagaaagggaatcagggtttgatattgaagatgaagataagagtgagcctgagcagacaggggctgatgctgcagaagatgaggaagtggatgtcaccagcgtggaccctattgctgccttctgtagcagtgatgaagagctggaagattcaaaggctctattgtatttacccattgcccctgaggtagaagacccagaagaaaatccttacggccccccaccggatgcagtccaaacctccttgatggatgaaggggctagttcagagaagaagaggcagtcctcagcagatgggtcccagccacctaagaagaaacccaaaacaaccaatatagaacttcaaggagtaccaaatgatgaagtccatccactactgggtgtgaagggggatggcaaatccaagaagaagcaagcaggccggcctaaaggatcaaaaggtaaagagaaagattctccatttaaaccgaaactctacaaaggggacagaggtttacctctggaaggatcagcgaagggtaaagtgcaggcggaactcagccagcccttgacagcaggaggagcaatctcagaactgttatgaagaccttcgaagttcttcattctttctcactttgccatcatgtggcctctggacactgtggtcagtcatttgaaaattgactttaatttaaaacaaaggcctgtgcctcccacccaggaggtgggagggtgaattttatgtttaaatgaagaagtgaattatggaagaagagtatacgaccttcccttccctttcaagcataagtccaaatagactctcaggaatgaagatttgtgaagacatcagataggaattttggactcatttaaactttgatgcttagttatgttgctggagaaaagatacttatgttttgctcatctaacttcattgtacccagcgtcattttgacatgtcatttcctatctcccatttgccttcggtcctcaatgcatgtctttgagtgacttcttatctgaaattttgctactggtatcctaggaaagcttttgttggatactctcattttaaacttctcctctccccagatacctcctatatttccatattgtgtgcaaaggatgggcagaaaagaaagtgcttgaaagatttcaaattttcagaaagggaacaacgaaggccctctcttcctctcataccacgttttgctcaagaagctgggctgtaacaattcagggttttcccttgttttcctctcattgcatgtttccctccaatattggttcattgtcatcaatcatggtttttgaagatagctagttttatccatctccagcaaagaatcatcaatagtttatattgctttacctgtgctggcttccagagatggaaacaaacccaggtgtctctcaacaagctacttttttactggggtgggggaatctatgcaaggagtaaagtaaaaccatccagaatcaaagcagcaaccacatagttcaaatcaaagatcaaggtgaattttttgtatcactgcctgtggaaatctatcctcatcagtcattgcatttttccctgcctatacctgtgctcctttttcttactgtgttttcagtcacttcctttctgtgaaaggttgcttagctttttttttgacatttgttgttctttatataaaaataacagattggatagatgtgtacatttggtgtttgaaattctctgaaaatcccattaggaaaccaggtgtgaaaagggctcagtagcttctctgagtggcgtttttagctgactggaagtgcttaatctggatcgtcttttttttttttttttttttcaatattttaaaaggagaatttaaatactgtgcttactgtgaaatatatcagttggtgagccgggcgtggtgggtcacgcctgtaatcccagcactttgggaggccaaggcgggttgatcacccgaggtcaggagttcaagaccagcctggccaacgtggtgaaagcctgtatctattaaaagacaaaaattagctgggcgtggtggtacatgcctgtaatcccagctacactggaggctgagtcaggagaatcacttgaacgtgggaggcagaggttgcagtgagtggagatcgcaccactgccctccagcctaggtgacagaatgagactctatctcaaaaaaaaaaaaaaaatgatatcagttggtggatgctcctataggtagccaaacacattgattacctgttagattttaggatagaaatcaaagtagagcacgtcagcaagagcctctttgtctcactccatcatttaaaaccagtatattcagtagttgaagaaagagctctccctgagtcagttgcactgtcatgagttagaccagtggttgagattagtagatggctcactagacatgtttttgttttgcagacattatatccattccagtcctctgcactgtacactgcagcagtgtgcaaactatgggacttagagggtttctgccatctttccatgtgtgaagtagcttggtttcctctgcctgtgcatttggatgtttgtgctatgtccacctcctaaactggctactgagaaaatcatcttcagccctgtcagattgtctctggcagtagctcctaataattatttatgtttttggaatttttttttcaacttttaaaaaaccttctatccatttcaatttgaattatttgatttgtacaatatatgtatattctcttcttcctttttgtcatccctgccctgccacccccaaaattttgtttttaaaaatattctgggctgggcatggtggctcacacctgtaatcccagcacttggggaggccgaggctggtggatcatctgaggtcaggtgtttgagaccagcctggtcaacatggtgaaaccccgtctctactaaaaatacaaaaattagctgggcgtggtggcgggcacctgtaatcctagctactcgggaggctgaggcaggagaattgcttgaatccaggaggcagaggttgcagtgagctgagattgcgccactgcactccagcctgggtgacagagcaagactccatctcaaaaaaaaaaaaaaaaaaaaatctgtagttttgtacaagatgagacttagccttgggtacttcttgctgaagctttaatgctttgtaaataaaatcggatgttt

SEQ ID NO: 820 - DNA, 4333 bp, Homo sapiens
gcggggccttctaaggccgaaagtcttcggagcttgcggcagtctcttcgcggcgtccaccacttagacgcaagttgctgaagccggccggggagaaggtgttgttgccggagctgagaccgggcggccacagtccgcagggatgaacctcgagttgctggagtcctttgggcagaactatccagaggaagctgatggaactttggattgtatcagcatggctttgacttgcacctttaacaggtggggcacactgcttgcagttggctgtaatgatggccgaattgtcatctgggatttcttgacaagaggcattgctaaaataattagtgcacacatccatccagtgtgttctttatgctggagccgagatggtcataaactcgtgagtgcttccactgataacatagtgtcacagtgggatgttctttcaggcgactgtgaccagaggtttcgattcccttcacccatcttaaaagtccaatatcatccacgagatcagaacaaggttctcgtgtgtcccatgaaatctgctcctgtcatgttgaccctttcagattccaaacatgttgttctgccggtggacgatgactccgatttgaacgttgtggcatcttttgataggcgaggggaatatatttatacgggaaacgcaaaaggcaagattttggtcctaaaaacagattctcaggatcttgttgcttccttcagagtgacaactggaacaagcaataccacagccattaagtcaattgagtttgcccggaaggggagttgctttttaattaacacggcagatcgaataatcagagtttatgatggcagagaaatcttaacatgtggaagagatggagagcctgaacctatgcaggaattgcaggatttggtgaataggaccccatggaagaaatgttgtttctctggggatggggaatacatcgtggcaggttctgcccggcagcatgccctgtacatctgggagaagagcattggcaacctggtgaagattctccatgggacgagaggagaactcctcttggatgtagcttggcatcctgttcgacccatcatagcatccatttccagtggagtggtatctatctgggcacagaatcaagtagaaaactggagtgcatttgcaccagacttcaaagaattggatgaaaatgtagaatacgaagaaagggaatcagggtttgatattgaagatgaagataagagtgagcctgagcagacaggggctgatgctgcagaagatgaggaagtggatgtcaccagcgtggaccctattgctgccttctgtagcagtgatgaagagctggaagattcaaaggctctattgtatttacccattgcccctgaggtagaagacccagaagaaaatccttacggccccccaccggatgcagtccaaacctccttgatggatgaaggggctagttcagagaagaagaggcagtcctcagcagatgggtcccagccacctaagaagaaacccaaaacaaccaatatagaacttcaaggagtaccaaatgatgaagtccatccactactgggtgtgaagggggatggcaaatccaagaagaagcaagcaggccggcctaaaggatcaaaaggtaaagagaaagattctccatttaaaccgaaactctacaaaggggacagaggtttacctctggaaggatcagcgaagggtaaagtgcaggcggaactcagccagcccttgacagcaggaggagcaatctcagaactgttatgaagaccttcgaagttcttcattctttctcactttgccatcatgtggcctctggacactgtggtcagtcatttgaaaattgactttaatttaaaacaaaggcctgtgcctcccacccaggaggtgggagggtgaattttatgtttaaatgaagaagtgaattatggaagaagagtatacgaccttcccttccctttcaagcataagtccaaatagactctcaggaatgaagatttgtgaagacatcagataggaattttggactcatttaaactttgatgcttagttatgttgctggagaaaagatacttatgttttgctcatctaacttcattgtacccagcgtcattttgacatgtcatttcctatctcccatttgccttcggtcctcaatgcatgtctttgagtgacttcttatctgaaattttgctactggtatcctaggaaagcttttgttggatactctcattttaaacttctcctctccccagatacctcctatatttccatattgtgtgcaaaggatgggcagaaaagaaagtgcttgaaagatttcaaattttcagaaagggaacaacgaaggccctctcttcctctcataccacgttttgctcaagaagctgggctgtaacaattcagggttttcccttgttttcctctcattgcatgtttccctccaatattggttcattgtcatcaatcatggtttttgaagatagctagttttatccatctccagcaaagaatcatcaatagtttatattgctttacctgtgctggcttccagagatggaaacaaacccaggtgtctctcaacaagctacttttttactggggtgggggaatctatgcaaggagtaaagtaaaaccatccagaatcaaagcagcaaccacatagttcaaatcaaagatcaaggtgaattttttgtatcactgcctgtggaaatctatcctcatcagtcattgcatttttccctgcctatacctgtgctcctttttcttactgtgttttcagtcacttcctttctgtgaaaggttgcttagctttttttttgacatttgttgttctttatataaaaataacagattggatagatgtgtacatttggtgtttgaaattctctgaaaatcccattaggaaaccaggtgtgaaaagggctcagtagcttctctgagtggcgtttttagctgactggaagtgcttaatctggatcgtcttttttttttttttttttttcaatattttaaaaggagaatttaaatactgtgcttactgtgaaatatatcagttggtgagccgggcgtggtgggtcacgcctgtaatcccagcactttgggaggccaaggcgggttgatcacccgaggtcaggagttcaagaccagcctggccaacgtggtgaaagcctgtatctattaaaagacaaaaattagctgggcgtggtggtacatgcctgtaatcccagctacactggaggctgagtcaggagaatcacttgaacgtgggaggcagaggttgcagtgagtggagatcgcaccactgccctccagcctaggtgacagaatgagactctatctcaaaaaaaaaaaaaaaatgatatcagttggtggatgctcctataggtagccaaacacattgattacctgttagattttaggatagaaatcaaagtagagcacgtcagcaagagcctctttgtctcactccatcatttaaaaccagtatattcagtagttgaagaaagagctctccctgagtcagttgcaaaacgtctatatttttagatgccactacttttttcttaaatattcattttgagactgtcatgagttagaccagtggttgagattagtagatggctcactagacatgtttttgttttgcagacattatatccattccagtcctctgcactgtacactgcagcagtgtgcaaactatgggacttagagggtttctgccatctttccatgtgtgaagtagcttggtttcctctgcctgtgcatttggatgtttgtgctatgtccacctcctaaactggctactgagaaaatcatcttcagccctttttaaaaaaccttctatccatttcaatttgaattatttgatttgtacaatatatgtatattctcttcttcctttttgtcatccctgccctgccacccccaaaattttgtttttaaaaatattctgggctgggcatggtggctcacacctgtaatcccagcacttggggaggccgaggctggtggatcatctgaggtcaggtgtttgagaccagcctggtcaacatggtgaaaccccgtctctactaaaaatacaaaaattagctgggcgtggtggcgggcacctgtaatcctagctactcgggaggctgaggcaggagaattgcttgaatccaggaggcagaggttgcagtgagctgagattgcgccactgcactccagcctgggtgacagagcaagactccatctcaaaaaaaaaaaaaaaaaaaaatctgtagttttgtacaagatgagacttagccttgggtacttcttgctgaagctttaatgctttgtaaataaaatcggatgttt

SEQ ID NO: 821 - DNA, 4370 bp, Homo sapiens
gcggggccttctaaggccgaaagtcttcggagcttgcggcagtctcttcgcggcgtccaccacttagacgcaagttgctgaagccggccggggagaaggtgttgttgccggagctgagaccgggcggccacagtccgcagggatgaacctcgagttgctgggaagctgatggaactttggattgtatcagcatggctttgacttgcacctttaacaggtggggcacactgcttgcagttggctgtaatgatggccgaattgtcatctgggatttcttgacaagaggcattgctaaaataattagtgcacacatccatccagtgtgttctttatgctggagccgagatggtcataaactcgtgagtgcttccactgataacatagtgtcacagtgggatgttctttcaggcgactgtgaccagaggtttcgattcccttcacccatcttaaaagtccaatatcatccacgagatcagaacaaggttctcgtgtgtcccatgaaatctgctcctgtcatgttgaccctttcagattccaaacatgttgttctgccggtggacgatgactccgatttgaacgttgtggcatcttttgataggcgaggggaatatatttatacgggaaacgcaaaaggcaagattttggtcctaaaaacagattctcaggatcttgttgcttccttcagagtgacaactggaacaagcaataccacagccattaagtcaattgagtttgcccggaaggggagttgctttttaattaacacggcagatcgaataatcagagtttatgatggcagagaaatcttaacatgtggaagagatggagagcctgaacctatgcaggaattgcaggatttggtgaataggaccccatggaagaaatgttgtttctctggggatggggaatacatcgtggcaggttctgcccggcagcatgccctgtacatctgggagaagagcattggcaacctggtgaagattctccatgggacgagaggagaactcctcttggatgtagcttggcatcctgttcgacccatcatagcatccatttccagtggagtggtatctatctgggcacagaatcaagtagaaaactggagtgcatttgcaccagacttcaaagaattggatgaaaatgtagaatacgaagaaagggaatcagggtttgatattgaagatgaagataagagtgagcctgagcagacaggggctgatgctgcagaagatgaggaagtggatgtcaccagcgtggaccctattgctgccttctgtagcagtgatgaagagctggaagattcaaaggctctattgtatttacccattgcccctgaggtagaagacccagaagaaaatccttacggccccccaccggatgcagtccaaacctccttgatggatgaaggggctagttcagagaagaagaggcagtcctcagcagatgggtcccagccacctaagaagaaacccaaaacaaccaatatagaacttcaaggagtaccaaatgatgaagtccatccactactgggtgtgaagggggatggcaaatccaagaagaagcaagcaggccggcctaaaggatcaaaaggtaaagagaaagattctccatttaaaccgaaactctacaaaggggacagaggtttacctctggaaggatcagcgaagggtaaagtgcaggcggaactcagccagcccttgacagcaggaggagcaatctcagaactgttatgaagaccttcgaagttcttcattctttctcactttgccatcatgtggcctctggacactgtggtcagtcatttgaaaattgactttaatttaaaacaaaggcctgtgcctcccacccaggaggtgggagggtgaattttatgtttaaatgaagaagtgaattatggaagaagagtatacgaccttcccttccctttcaagcataagtccaaatagactctcaggaatgaagatttgtgaagacatcagataggaattttggactcatttaaactttgatgcttagttatgttgctggagaaaagatacttatgttttgctcatctaacttcattgtacccagcgtcattttgacatgtcatttcctatctcccatttgccttcggtcctcaatgcatgtctttgagtgacttcttatctgaaattttgctactggtatcctaggaaagcttttgttggatactctcattttaaacttctcctctccccagatacctcctatatttccatattgtgtgcaaaggatgggcagaaaagaaagtgcttgaaagatttcaaattttcagaaagggaacaacgaaggccctctcttcctctcataccacgttttgctcaagaagctgggctgtaacaattcagggttttcccttgttttcctctcattgcatgtttccctccaatattggttcattgtcatcaatcatggtttttgaagatagctagttttatccatctccagcaaagaatcatcaatagtttatattgctttacctgtgctggcttccagagatggaaacaaacccaggtgtctctcaacaagctacttttttactggggtgggggaatctatgcaaggagtaaagtaaaaccatccagaatcaaagcagcaaccacatagttcaaatcaaagatcaaggtgaattttttgtatcactgcctgtggaaatctatcctcatcagtcattgcatttttccctgcctatacctgtgctcctttttcttactgtgttttcagtcacttcctttctgtgaaaggttgcttagctttttttttgacatttgttgttctttatataaaaataacagattggatagatgtgtacatttggtgtttgaaattctctgaaaatcccattaggaaaccaggtgtgaaaagggctcagtagcttctctgagtggcgtttttagctgactggaagtgcttaatctggatcgtcttttttttttttttttttttcaatattttaaaaggagaatttaaatactgtgcttactgtgaaatatatcagttggtgagccgggcgtggtgggtcacgcctgtaatcccagcactttgggaggccaaggcgggttgatcacccgaggtcaggagttcaagaccagcctggccaacgtggtgaaagcctgtatctattaaaagacaaaaattagctgggcgtggtggtacatgcctgtaatcccagctacactggaggctgagtcaggagaatcacttgaacgtgggaggcagaggttgcagtgagtggagatcgcaccactgccctccagcctaggtgacagaatgagactctatctcaaaaaaaaaaaaaaaatgatatcagttggtggatgctcctataggtagccaaacacattgattacctgttagattttaggatagaaatcaaagtagagcacgtcagcaagagcctctttgtctcactccatcatttaaaaccagtatattcagtagttgaagaaagagctctccctgagtcagttgcaaaacgtctatatttttagatgccactacttttttcttaaatattcattttgagactgtcatgagttagaccagtggttgagattagtagatggctcactagacatgtttttgttttgcagacattatatccattccagtcctctgcactgtacactgcagcagtgtgcaaactatgggacttagagggtttctgccatctttccatgtgtgaagtagcttggtttcctctgcctgtgcatttggatgtttgtgctatgtccacctcctaaactggctactgagaaaatcatcttcagccctgtcagattgtctctggcagtagctcctaataattatttatgtttttggaatttttttttcaacttttaaaaaaccttctatccatttcaatttgaattatttgatttgtacaatatatgtatattctcttcttcctttttgtcatccctgccctgccacccccaaaattttgtttttaaaaatattctgggctgggcatggtggctcacacctgtaatcccagcacttggggaggccgaggctggtggatcatctgaggtcaggtgtttgagaccagcctggtcaacatggtgaaaccccgtctctactaaaaatacaaaaattagctgggcgtggtggcgggcacctgtaatcctagctactcgggaggctgaggcaggagaattgcttgaatccaggaggcagaggttgcagtgagctgagattgcgccactgcactccagcctgggtgacagagcaagactccatctcaaaaaaaaaaaaaaaaaaaaatctgtagttttgtacaagatgagacttagccttgggtacttcttgctgaagctttaatgctttgtaaataaaatcggatgttt

SEQ ID NO: 822 - DNA, 3829 bp, Homo sapiens
gcggggccttctaaggccgaaagtcttcggagcttgcggcagtctcttcgcggcgtccaccacttagacgcaagttgctgaagccggccggggagaaggtgttgttgccggagctgagaccgggcggccacagtccgcagggatgaacctcgagttgctggagtcctttgggcagaactatccagaggaagctgatggaactttggattgtatcagcatggctttgacttgcacctttaacaggtggggcacactgcttgcagttggctgtaatgatggccgaattgtcatctgggatttcttgacaagaggcattgctaaaataattagtgcacacatccatccagtgtgttctttatgctggagccgagatggtcataaactcgtgagtgcttccactgataacatagtgtcacagtgggatgttctttcaggcgactgtgaccagaggtttcgattcccttcacccatcttaaaagtccaatatcatccacgagatcagaacaaggttctcgtgtgtcccatgaaatctgctcctgtcatgttgaccctttcagattccaaacatgttgttctgccggtggacgatgactccgatttgaacgttgtggcatcttttgataggcgaggggaatatatttatacgggaaacgcaaaaggcaagattttggtcctaaaaacagattctcaggatcttgttgcttccttcagagtgacaactggaacaagcaataccacagccattaagtcaattgagtttgcccggaaggggagttgctttttaattaacacggcagatcgaataatcagagtttatgatggcagagaaatcttaacatgtggaagagatggagagcctgaacctatgcaggaattgcaggatttggtgaataggaccccatggaagaaatgttgtttctctggggatggggaatacatcgtggcaggttctgcccggcagcatgccctgtacatctgggagaagagcattggcaacctggtgaagattctccatgggacgagaggagaactcctcttggatgtagcttggcatcctgttcgacccatcatagcatccatttccagtggagtggtatctatctgggcacagaatcaagtagaaaactggagtgcatttgcaccagacttcaaagaattggatgaaaatgtagaatacgaagaaagggaatcagggtttgatattgaagatgaagataagagtgagcctgagcagacaggggctgatgctgcagaagatgaggaagtggatgtcaccagcgtggaccctattgctgccttctgtagcagtgatgaagagctggaagattcaaaggctctattgtatttacccattgcccctgaggtagaagacccagaagaaaatccttacggccccccaccggatgcagtccaaacctccttgatggatgaaggggctagttcagagaagaagaggcagtcctcagcagatgggtcccagccacctaagaagaaacccaaaacaaccaatatagaacttcaaggagtaccaaatgatgaagtccatccactactgggtgtgaagggggatggcaaatccaagaagaagcaagcaggccggcctaaaggatcaaaaggtaaagagaaagattctccatttaaaccgaaactctacaaaggggacagaggtttacctctggaaggatcagcgaagggtaaagtgcaggcggaactcagccagcccttgacagcaggaggagcaatctcagaactgttatgaagaccttcgaagttcttcattctttctcactttgccatcatgtggcctctggacactgtggtcagtcatttgaaaattgactttaatttaaaacaaaggcctgtgcctcccacccaggaggtgggagggtgaattttatgtttaaatgaagaagtgaattatggaagaagagtatacgaccttcccttccctttcaagcataagtccaaatagactctcaggaatgaagatttgtgaagacatcagataggaattttggactcatttaaactttgatgcttagttatgttgctggagaaaagatacttatgttttgctcatctaacttcattgtacccagcgtcattttgacatgtcatttcctatctcccatttgccttcggtcctcaatgcatgtctttgagtgacttcttatctgaaattttgctactggtatcctaggaaagcttttgttggatactctcattttaaacttctcctctccccagatacctcctatatttccatattgtgtgcaaaggatgggcagaaaagaaagtgcttgaaagatttcaaattttcagaaagggaacaacgaaggccctctcttcctctcataccacgttttgctcaagaagctgggctgtaacaattcagggttttcccttgttttcctctcattgcatgtttccctccaatattggttcattgtcatcaatcatggtttttgaagatagctagttttatccatctccagcaaagaatcatcaatagtttatattgctttacctgtgctggcttccagagatggaaacaaacccaggtgtctctcaacaagctacttttttactggggtgggggaatctatgcaaggagtaaagtaaaaccatccagaatcaaagcagcaaccacatagttcaaatcaaagatcaaggtgaattttttgtatcactgcctgcagaggttgcagtgagtggagatcgcaccactgccctccagcctaggtgacagaatgagactctatctcaaaaaaaaaaaaaaaatgatatcagttggtggatgctcctataggtagccaaacacattgattacctgttagattttaggatagaaatcaaagtagagcacgtcagcaagagcctctttgtctcactccatcatttaaaaccagtatattcagtagttgaagaaagagctctccctgagtcagttgcaaaacgtctatatttttagatgccactacttttttcttaaatattcattttgagactgtcatgagttagaccagtggttgagattagtagatggctcactagacatgtttttgttttgcagacattatatccattccagtcctctgcactgtacactgcagcagtgtgcaaactatgggacttagagggtttctgccatctttccatgtgtgaagtagcttggtttcctctgcctgtgcatttggatgtttgtgctatgtccacctcctaaactggctactgagaaaatcatcttcagccctgtcagattgtctctggcagtagctcctaataattatttatgtttttggaatttttttttcaacttttaaaaaaccttctatccatttcaatttgaattatttgatttgtacaatatatgtatattctcttcttcctttttgtcatccctgccctgccacccccaaaattttgtttttaaaaatattctgggctgggcatggtggctcacacctgtaatcccagcacttggggaggccgaggctggtggatcatctgaggtcaggtgtttgagaccagcctggtcaacatggtgaaaccccgtctctactaaaaatacaaaaattagctgggcgtggtggcgggcacctgtaatcctagctactcgggaggctgaggcaggagaattgcttgaatccaggaggcagaggttgcagtgagctgagattgcgccactgcactccagcctgggtgacagagcaagactccatctcaaaaaaaaaaaaaaaaaaaaatctgtagttttgtacaagatgagacttagccttgggtacttcttgctgaagctttaatgctttgtaaataaaatcggatgttt

SEQ ID NO: 823 - DNA, 2036 bp, Homo sapiens
atggtcagccggtacctctccacactggacattcaggttttcccttgttttcctctcattgcatgtttccctccaatattggttcattgtcatcaatcatggtttttgaagatagctagttttatccatctccagcaaagaatcatcaatagtttatattgctttacctgtgctggcttccagagatggaaacaaacccaggtgtctctcaacaagctacttttttactggggtgggggaatctatgcaaggagtaaagtaaaaccatccagaatcaaagcagcaaccacatagttcaaatcaaagatcaaggtgaattttttgtatcactgcctgtggaaatctatcctcatcagtcattgcatttttccctgcctatacctgtgctcctttttcttactgtgttttcagtcacttcctttctgtgaaaggttgcttagctttttttttgacatttgttgttctttatataaaaataacagattggatagatgtgtacatttggtgtttgaaattctctgaaaatcccattaggaaaccaggtgtgaaaagggctcagtagcttctctgagtggcgtttttagctgactggaagtgcttaatctggatcgtcttttttttttttttttttttcaatattttaaaaggagaatttaaatactgtgcttactgtgaaatatatcagttggtgagccgggcgtggtgggtcacgcctgtaatcccagcactttgggaggccaaggcgggttgatcacccgaggtcaggagttcaagaccagcctggccaacgtggtgaaagcctgtatctattaaaagacaaaaattagctgggcgtggtggtacatgcctgtaatcccagctacactggaggctgagtcaggagaatcacttgaacgtgggaggcagaggttgcagtgagtggagatcgcaccactgccctccagcctaggtgacagaatgagactctatctcaaaaaaaaaaaaaaaatgatatcagttggtggatgctcctataggtagccaaacacattgattacctgttagattttaggatagaaatcaaagtagagcacgtcagcaagagcctctttgtctcactccatcatttaaaaccagtatattcagtagttgaagaaagagctctccctgagtcagttgcaaaacgtctatatttttagatgccactacttttttcttaaatattcattttgagactgtcatgagttagaccagtggttgagattagtagatggctcactagacatgtttttgttttgcagacattatatccattccagtcctctgcactgtacactgcagcagtgtgcaaactatgggacttagagggtttctgccatctttccatgtgtgaagtagcttggtttcctctgcctgtgcatttggatgtttgtgctatgtccacctcctaaactggctactgagaaaatcatcttcagccctgtcagattgtctctggcagtagctcctaataattatttatgtttttggaatttttttttcaacttttaaaaaaccttctatccatttcaatttgaattatttgatttgtacaatatatgtatattctcttcttcctttttgtcatccctgccctgccacccccaaaattttgtttttaaaaatattctgggctgggcatggtggctcacacctgtaatcccagcacttggggaggccgaggctggtggatcatctgaggtcaggtgtttgagaccagcctggtcaacatggtgaaaccccgtctctactaaaaatacaaaaattagctgggcgtggtggcgggcacctgtaatcctagctactcgggaggctgaggcaggagaattgcttgaatccaggaggcagaggttgcagtgagctgagattgcgccactgcactccagcctgggtgacagagcaagactccatctcaaaaaaaaaaaaaaaaaaaaatctgtagttttgtacaagatgagacttagccttgggtacttcttgctgaagctttaatgctttgtaaataaaatcggatgttt

SEQ ID NO: 824 - DNA, 742 bp, Homo sapiens
gcggggccttctaaggccgaaagtcttcggagcttgcggcagtctcttcgcggcgtccaccacttagacgcaagttgctgaagccggccggggagaaggtgttgttgccggagctgagaccgggcggccacagtccgcagggatgaacctcgagttgctggagtcctttgggcagaactatccagaggaagctgatggaactttggattgtatcagcatggctttgacttgcacctttaacaggtggggcacactgcttgcagttggctgtaatgatggccgaattgtcatctgggatttcttgacaagaggcattgctaaaataattagtgcacacatccatccagtgtgttctttatgctggagccgagatggtcataaactcgtgagtgcttccactgataacatagtgtcacagtgggatgttctttcaggcgactgtgaccagaggtttcgattcccttcacccatcttaaaagtccaatatcatccacgagatcagaacaaggttctcgtgtgtcccatgaaatctgctcctgtcatgttgaccctttcagattccaaacatgttgttctgccggtggacgatgactccgatttgaacgttgtggcatcttttgataggcgaggggaatatatttatacgggaaacgcaaaaggcaagattttggtcctaaaaacagattctcaggatcttgttgcttccttcagagtgacgttcctcatcccaagatcctgctaa

SEQ ID NO: 825 - DNA, 4396 bp, Homo sapiens
gcggggccttctaaggccgaaagtcttcggagcttgcggcagtctcttcgcggcgtccaccacttagacgcaagttgctgaagccggccggggagaaggtgttgttgccggagctgagaccgggcggccacagtccgcagggatgaacctcgagttgctggagtcctttgggcagaactatccagaggaagctgatggaactttggattgtatcagcatggctttgacttgcacctttaacaggtggggcacactgcttgcagttggctgtaatgatggccgaattgtcatctgggatttcttgacaagaggcattgctaaaataattagtgcacacatccatccagtgtgttctttatgctggagccgagatggtcataaactcgtgagtgcttccactgataacatagtgtcacagtgggatgttctttcaggcgactgtgaccagaggtttcgattcccttcacccatcttaaaagtccaatatcatccacgagatcagaacaaggttctcgtgtgtcccatgaaatctgctcctgtcatgttgaccctttcagattccaaacatgttgttctgccggtggacgatgactccgatttgaacgttgtggcatcttttgataggcgaggggaatatatttatacgggaaacgcaaaaggcaagattttggtcctaaaaacagattctcaggatcttgttgcttccttcagagtgacaactggaacaagcaataccacagccattaagtcaattgagtttgcccggaaggggagttgctttttaattaacacggcagatcgaataatcagagtttatgatggcagagaaatcttaacatgtggaagagatggagagcctgaacctatgcaggaattgcaggatttggtgaataggaccccatggaagaaatgttgtttctctggggatggggaatacatcgtggcaggttctgcccggcagcatgccctgtacatctgggagaagagcattggcaacctggtgaagattctccatgggacgagaggagaactcctcttggatgtagcttggcatcctgttcgacccatcatagcatccatttccagtggagtggtatctatctgggcacagaatcaagtagaaaactggagtgcatttgcaccagacttcaaagaattggatgaaaatgtagaatacgaagaaagggaatcagggtttgatattgaagatgaagataagagtgagcctgagcagacaggggctgatgctgcagaagatgaggaagtggatgtcaccagcgtggaccctattgctgccttctgtagcagtgatgaagagctggaagattcaaaggctctattgtatttacccattgcccctgaggtagaagacccagaagaaaatccttacggccccccaccggatgcagtccaaacctccttgatggatgaaggggctagttcagagaagaagaggcagtcctcagcagatgggtcccagccacctaagaagaaacccaaaacaaccaatatagaacttcaaggagtaccaaatgatgaagtccatccactactgggtgtgaagggggatggcaaatccaagaagaagcaagcaggccggcctaaaggatcaaaaggtaaagagaaagattctccatttaaaccgaaactctacaaaggggacagaggtttacctctggaaggatcagcgaagggtaaagtgcaggcggaactcagccagcccttgacagcaggaggagcaatctcagaactgttatgaagaccttcgaagttcttcattctttctcactttgccatcatgtggcctctggacactgtggtcagtcatttgaaaattgactttaatttaaaacaaaggcctgtgcctcccacccaggaggtgggagggtgaattttatgtttaaatgaagaagtgaattatggaagaagagtatacgaccttcccttccctttcaagcataagtccaaatagactctcaggaatgaagatttgtgaagacatcagataggaattttggactcatttaaactttgatgcttagttatgttgctggagaaaagatacttatgttttgctcatctaacttcattgtacccagcgtcattttgacatgtcatttcctatctcccatttgccttcggtcctcaatgcatgtctttgagtgacttcttatctgaaattttgctactggtatcctaggaaagcttttgttggatactctcattttaaacttctcctctccccagatacctcctatatttccatattgtgtgcaaaggatgggcagaaaagaaagtgcttgaaagatttcaaattttcagaaagggaacaacgaaggccctctcttcctctcataccacgttttgctcaagaagctgggctgtaacaattcagggttttcccttgttttcctctcattgcatgtttccctccaatattggttcattgtcatcaatcatggtttttgaagatagctagttttatccatctccagcaaagaatcatcaatagtttatattgctttacctgtgctggcttccagagatggaaacaaacccaggtgtctctcaacaagctacttttttactggggtgggggaatctatgcaaggagtaaagtaaaaccatccagaatcaaagcagcaaccacatagttcaaatcaaagatcaaggtgaattttttgtatcactgcctgtggaaatctatcctcatcagtcattgcatttttccctgcctatacctgtgctcctttttcttactgtgttttcagtcacttcctttctgtgaaaggttgcttagctttttttttgacatttgttgttctttatataaaaataacagattggatagatgtgtacatttggtgtttgaaattctctgaaaatcccattaggaaaccaggtgtgaaaagggctcagtagcttctctgagtggcgtttttagctgactggaagtgcttaatctggatcgtcttttttttttttttttttttcaatattttaaaaggagaatttaaatactgtgcttactgtgaaatatatcagttggtgagccgggcgtggtgggtcacgcctgtaatcccagcactttgggaggccaaggcgggttgatcacccgaggtcaggagttcaagaccagcctggccaacgtggtgaaagcctgtatctattaaaagacaaaaattagctgggcgtggtggtacatgcctgtaatcccagctacactggaggctgagtcaggagaatcacttgaacgtgggaggcagaggttgcagtgagtggagatcgcaccactgccctccagcctaggtgacagaatgagactctatctcaaaaaaaaaaaaaaaatgatatcagttggtggatgctcctataggtagccaaacacattgattacctgttagattttaggatagaaatcaaagtagagcacgtcagcaagagcctctttgtctcactccatcatttaaaaccagtatattcagtagttgaagaaagagctctccctgagtcagttgcaaaacgtctatatttttagatgccactacttttttcttaaatattcattttgagactgtcatgagttagaccagtggttgagattagtagatggctcactagacatgtttttgttttgcagacattatatccattccagtcctctgcactgtacactgcagcagtgtgcaaactatgggacttagagggtttctgccatctttccatgtgtgaagtagcttggtttcctctgcctgtgcatttggatgtttgtgctatgtccacctcctaaactggctactgagaaaatcatcttcagccctgtcagattgtctctggcagtagctcctaataattatttatgtttttggaatttttttttcaacttttaaaaaaccttctatccatttcaatttgaattatttgatttgtacaatatatgtatattctcttcttcctttttgtcatccctgccctgccacccccaaaattttgtttttaaaaatattctgggctgggcatggtggctcacacctgtaatcccagcacttggggaggccgaggctggtggatcatctgaggtcaggtgtttgagaccagcctggtcaacatggtgaaaccccgtctctactaaaaatacaaaaattagctgggcgtggtggcgggcacctgtaatcctagctactcgggaggctgaggcaggagaattgcttgaatccaggaggcagaggttgcagtgagctgagattgcgccactgcactccagcctgggtgacagagcaagactccatctcaaaaaaaaaaaaaaaaaaaaatctgtagttttgtacaagatgagacttagccttgggtacttcttgctgaagctttaatgctttgtaaataaaatcggatgttt

SEQ ID NO: 826 - DNA, 4282 bp, Homo sapiens
gcggggccttctaaggccgaaagtcttcggagcttgcggcagtctcttcgcggcgtccaccacttagacgcaagttgctgaagccggccggggagaaggtgttgttgccggagctgagaccgggcggccacagtccgcagggatgaacctcgagttgctggagtcctttgggcagaactatccagaggaagctgatggaactttggattgtatcagcatggctttgacttgcacctttaacaggtggggcacactgcttgcagttggctgtaatgatggccgaattgtcatctgggatttcttgacaagaggcattgctaaaataattagtgcacacatccatccagtgtgttctttatgctggagccgagatggtcataaactcgtgagtgcttccactgataacatagtgtcacagtgggatgttctttcaggcgactgtgaccagaggtttcgattcccttcacccatcttaaaagtccaatatcatccacgagatcagaacaaggttctcgtgtgtcccatgaaatctgctcctgtcatgttgaccctttcagattccaaacatgttgttctgccggtggacgatgactccgatttgaacgttgtggcatcttttgataggcgaggggaatatatttatacgggaaacgcaaaaggcaagattttggtcctaaaaacagattctcaggatcttgttgcttccttcagagtgacaactggaacaagcaataccacagccattaagtcaattgagtttgcccggaaggggagttgctttttaattaacacggcagatcgaataatcagagtttatgatggcagagaaatcttaacatgtggaagagatggagagcctgaacctatgcaggaattgcaggatttggtgaataggaccccatggaagaaatgttgtttctctggggatggggaatacatcgtggcaggttctgcccggcagcatgccctgtacatctgggagaagagcattggcaacctggtgaagattctccatgggacgagaggagaactcctcttggatgtagcttggcatcctgttcgacccatcatagcatccatttccagtggagtggtatctatctgggcacagaatcaagtagaaaactggagtgcatttgcaccagacttcaaagaattggatgaaaatgtagaatacgaagaaagggaatcagggtttgatattgaagatgaagataagagtgagcctgagcagacaggggctgatgctgcagaagatgaggaagtggatgtcaccagcgtggaccctattgctgccttctgtagcagtgatgaagagctggaagattcaaaggctctattgtatttacccattgcccctgaggtagaagacccagaagaaaatccttacggccccccaccggatgcagtccaaacctccttgatggatgaaggggctagttcagagaagaagaggcagtcctcagcagatgggtcccagccacctaagaagaaacccaaaacaaccaatatagaacttcaaggagtaccaaatgatgaagtccatccactactgggtgtgaagggggatggcaaatccaagaagaagcaagcaggccggcctaaaggatcaaaagcaggaggagcaatctcagaactgttatgaagaccttcgaagttcttcattctttctcactttgccatcatgtggcctctggacactgtggtcagtcatttgaaaattgactttaatttaaaacaaaggcctgtgcctcccacccaggaggtgggagggtgaattttatgtttaaatgaagaagtgaattatggaagaagagtatacgaccttcccttccctttcaagcataagtccaaatagactctcaggaatgaagatttgtgaagacatcagataggaattttggactcatttaaactttgatgcttagttatgttgctggagaaaagatacttatgttttgctcatctaacttcattgtacccagcgtcattttgacatgtcatttcctatctcccatttgccttcggtcctcaatgcatgtctttgagtgacttcttatctgaaattttgctactggtatcctaggaaagcttttgttggatactctcattttaaacttctcctctccccagatacctcctatatttccatattgtgtgcaaaggatgggcagaaaagaaagtgcttgaaagatttcaaattttcagaaagggaacaacgaaggccctctcttcctctcataccacgttttgctcaagaagctgggctgtaacaattcagggttttcccttgttttcctctcattgcatgtttccctccaatattggttcattgtcatcaatcatggtttttgaagatagctagttttatccatctccagcaaagaatcatcaatagtttatattgctttacctgtgctggcttccagagatggaaacaaacccaggtgtctctcaacaagctacttttttactggggtgggggaatctatgcaaggagtaaagtaaaaccatccagaatcaaagcagcaaccacatagttcaaatcaaagatcaaggtgaattttttgtatcactgcctgtggaaatctatcctcatcagtcattgcatttttccctgcctatacctgtgctcctttttcttactgtgttttcagtcacttcctttctgtgaaaggttgcttagctttttttttgacatttgttgttctttatataaaaataacagattggatagatgtgtacatttggtgtttgaaattctctgaaaatcccattaggaaaccaggtgtgaaaagggctcagtagcttctctgagtggcgtttttagctgactggaagtgcttaatctggatcgtcttttttttttttttttttttcaatattttaaaaggagaatttaaatactgtgcttactgtgaaatatatcagttggtgagccgggcgtggtgggtcacgcctgtaatcccagcactttgggaggccaaggcgggttgatcacccgaggtcaggagttcaagaccagcctggccaacgtggtgaaagcctgtatctattaaaagacaaaaattagctgggcgtggtggtacatgcctgtaatcccagctacactggaggctgagtcaggagaatcacttgaacgtgggaggcagaggttgcagtgagtggagatcgcaccactgccctccagcctaggtgacagaatgagactctatctcaaaaaaaaaaaaaaaatgatatcagttggtggatgctcctataggtagccaaacacattgattacctgttagattttaggatagaaatcaaagtagagcacgtcagcaagagcctctttgtctcactccatcatttaaaaccagtatattcagtagttgaagaaagagctctccctgagtcagttgcaaaacgtctatatttttagatgccactacttttttcttaaatattcattttgagactgtcatgagttagaccagtggttgagattagtagatggctcactagacatgtttttgttttgcagacattatatccattccagtcctctgcactgtacactgcagcagtgtgcaaactatgggacttagagggtttctgccatctttccatgtgtgaagtagcttggtttcctctgcctgtgcatttggatgtttgtgctatgtccacctcctaaactggctactgagaaaatcatcttcagccctgtcagattgtctctggcagtagctcctaataattatttatgtttttggaatttttttttcaacttttaaaaaaccttctatccatttcaatttgaattatttgatttgtacaatatatgtatattctcttcttcctttttgtcatccctgccctgccacccccaaaattttgtttttaaaaatattctgggctgggcatggtggctcacacctgtaatcccagcacttggggaggccgaggctggtggatcatctgaggtcaggtgtttgagaccagcctggtcaacatggtgaaaccccgtctctactaaaaatacaaaaattagctgggcgtggtggcgggcacctgtaatcctagctactcgggaggctgaggcaggagaattgcttgaatccaggaggcagaggttgcagtgagctgagattgcgccactgcactccagcctgggtgacagagcaagactccatctcaaaaaaaaaaaaaaaaaaaaatctgtagttttgtacaagatgagacttagccttgggtacttcttgctgaagctttaatgctttgtaaataaaatcggatgttt

SEQ ID NO: 827 - DNA, 3505 bp, Homo sapiens
tctagaggatcccgtgtccatcccccttcgtggggatggggaatacatcgtggcaggttctgcccggcagcatgccctgtacatctgggagaagagcattggcaacctggtgaagattctccatgggacgagaggagaactcctcttggatgtagcttggcatcctgttcgacccatcatagcatccatttccagtggagtggtatctatctgggcacagaatcaagtagaaaactggagtgcatttgcaccagacttcaaagaattggatgaaaatgtagaatacgaagaaagggaatcagggtttgatattgaagatgaagataagagtgagcctgagcagacaggggctgatgctgcagaagatgaggaagtggatgtcaccagcgtggaccctattgctgccttctgtagcagtgatgaagagctggaagattcaaaggctctattgtatttacccattgcccctgaggtagaagacccagaagaaaatccttacggccccccaccggatgcagtccaaacctccttgatggatgaaggggctagttcagagaagaagaggcagtcctcagcagatgggtcccagccacctaagaagaaacccaaaacaaccaatatagaacttcaaggagtaccaaatgatgaagtccatccactactgggtgtgaagggggatggcaaatccaagaagaagcaagcaggccggcctaaaggatcaaaaggtaaagagaaagattctccatttaaaccgaaactctacaaaggggacagaggtttacctctggaaggatcagcgaagggtaaagtgcaggcggaactcagccagcccttgacagcaggaggagcaatctcagaactgttatgaagaccttcgaagttcttcattctttctcactttgccatcatgtggcctctggacactgtggtcagtcatttgaaaattgactttaatttaaaacaaaggcctgtgcctcccacccaggaggtgggagggtgaattttatgtttaaatgaagaagtgaattatggaagaagagtatacgaccttcccttccctttcaagcataagtccaaatagactctcaggaatgaagatttgtgaagacatcagataggaattttggactcatttaaactttgatgcttagttatgttgctggagaaaagatacttatgttttgctcatctaacttcattgtacccagcgtcattttgacatgtcatttcctatctcccatttgccttcggtcctcaatgcatgtctttgagtgacttcttatctgaaattttgctactggtatcctaggaaagcttttgttggatactctcattttaaacttctcctctccccagatacctcctatatttccatattgtgtgcaaaggatgggcagaaaagaaagtgcttgaaagatttcaaattttcagaaagggaacaacgaaggccctctcttcctctcataccacgttttgctcaagaagctgggctgtaacaattcagggttttcccttgttttcctctcattgcatgtttccctccaatattggttcattgtcatcaatcatggtttttgaagatagctagttttatccatctccagcaaagaatcatcaatagtttatattgctttacctgtgctggcttccagagatggaaacaaacccaggtgtctctcaacaagctacttttttactggggtgggggaatctatgcaaggagtaaagtaaaaccatccagaatcaaagcagcaaccacatagttcaaatcaaagatcaaggtgaattttttgtatcactgcctgtggaaatctatcctcatcagtcattgcatttttccctgcctatacctgtgctcctttttcttactgtgttttcagtcacttcctttctgtgaaaggttgcttagctttttttttgacatttgttgttctttatataaaaataacagattggatagatgtgtacatttggtgtttgaaattctctgaaaatcccattaggaaaccaggtgtgaaaagggctcagtagcttctctgagtggcgtttttagctgactggaagtgcttaatctggatcgtcttttttttttttttttttttcaatattttaaaaggagaatttaaatactgtgcttactgtgaaatatatcagttggtgagccgggcgtggtgggtcacgcctgtaatcccagcactttgggaggccaaggcgggttgatcacccgaggtcaggagttcaagaccagcctggccaacgtggtgaaagcctgtatctattaaaagacaaaaattagctgggcgtggtggtacatgcctgtaatcccagctacactggaggctgagtcaggagaatcacttgaacgtgggaggcagaggttgcagtgagtggagatcgcaccactgccctccagcctaggtgacagaatgagactctatctcaaaaaaaaaaaaaaaatgatatcagttggtggatgctcctataggtagccaaacacattgattacctgttagattttaggatagaaatcaaagtagagcacgtcagcaagagcctctttgtctcactccatcatttaaaaccagtatattcagtagttgaagaaagagctctccctgagtcagttgcaaaacgtctatatttttagatgccactacttttttcttaaatattcattttgagactgtcatgagttagaccagtggttgagattagtagatggctcactagacatgtttttgttttgcagacattatatccattccagtcctctgcactgtacactgcagcagtgtgcaaactatgggacttagagggtttctgccatctttccatgtgtgaagtagcttggtttcctctgcctgtgcatttggatgtttgtgctatgtccacctcctaaactggctactgagaaaatcatcttcagccctgtcagattgtctctggcagtagctcctaataattatttatgtttttggaatttttttttcaacttttaaaaaaccttctatccatttcaatttgaattatttgatttgtacaatatatgtatattctcttcttcctttttgtcatccctgccctgccacccccaaaattttgtttttaaaaatattctgggctgggcatggtggctcacacctgtaatcccagcacttggggaggccgaggctggtggatcatctgaggtcaggtgtttgagaccagcctggtcaacatggtgaaaccccgtctctactaaaaatacaaaaattagctgggcgtggtggcgggcacctgtaatcctagctactcgggaggctgaggcaggagaattgcttgaatccaggaggcagaggttgcagtgagctgagattgcgccactgcactccagcctgggtgacagagcaagactccatctcaaaaaaaaaaaaaaaaaaaaatctgtagttttgtacaagatgagacttagccttgggtacttcttgctgaagctttaatgctttgtaaataaaatcggatgttt

SEQ ID NO: 828 - DNA, 416 bp, Homo sapiens
tgaacttgagaacagatagactgttctgtcatggtatttcccaaggcatttggggtaagactggggacatgttgcatggcctacaaagctgtaccacatctggcccctgcctccccttcagttccaccccataccctcttcctcttgccagggacatgttcttctctacatccttctcctagctagctcttgctcagtctttaggtctcagctcaaaaccatccttgatccccaatctaatttaagccccttgttatacattttttttaattgagatgaaattcacataacagaaaattaaccattttaaagtacataattcagggtggcatttagtacactcagattgttgtacaactaccatttctatttagttcgagaatgttttcatcacaccaaaataaaaccatataccc

SEQ ID NO: 829 - DNA, 427 bp, Homo sapiens
gagctggggtcaaccggtactttagtggacaatgagaagtactgagggcaattcacacaacctgtctgtcggtaaacacaagcctaggtaataaccagcttctgcaaagatgaataaacaaaagtcaatcggtggagagtatgcaaaaaattactgcataatgagaggaaggaaatgtctttctaaaaggaagaagctacctttaaaaaatattcactgtgtgtcccagaagaaaaacaatggaaatttgtcttgtgtgctacatagaacatatacaaaggggataatttcaataaaataggagcagaagtttctaagaacagtgtagacagagattaaaaaacaaaagcaaaactatgattgcaatgacagaatttaaatccccagtgggggtggttaaagtgcagcagtgaccttgcaggaaacc

SEQ ID NO: 830 - DNA, 740 bp, Homo sapiens
tatttttagtagagacgggtttcaccgtgttagctaggatggtctcgatctcctgaccttgtggtccgcccacctcagcctcccaaagtgctgggattacaggcgtgagccaccgcacccggccttcattcactttctttaaatgcctccaagttgattattctcctagctcatatctccttgatgtgcatgagggagcactgggtctaatttttgggggctgagaaggtaagaaggtgaggtcagtttttcccaggagtcctaaaaaattctggtaccttacattgagggtgtgggagaaagggtgtcatagttctgaaaataggcagtagcatgaagcaccagacctgtctcattccttattagatgtctatctcaaatgacagagtttgaaaaatattggttttatcatttgatatttccatgcctgactcgggaaaataacattttctgacttttttctattttcttgccctgcacagaccctacctggtacaattttctatttcttagctcaaagtgtctatacaatgggttgcctggtatgtcagctgccctcactcttgtgtaatagaaatatattgccaggctggggacgtggaggagacgaactggattcctccctcctcctgttgccaggcctctctgcattggcactttatcctttcagtgtttctggctgtgttgggttcatttgtgagactgatgtaacaataaagtgaaatcttcccctctgaaag

SEQ ID NO: 831 - DNA, 451 bp, Homo sapiens
gacattcttagtcatttgcacctcctgtcaggtggaccaccagcctgaggctatggagtaaaatggagacaattcgcaaagtgttcctgtctccaagttctatagctgcagtgtagttaaatcccacatcgctgagtatgatggggtctataacctgcatgtttcatgtaaggaacacagccatgtaggtagcactactgtcagaaatacaactggggcactccgagccagtatgagagggagacaaatatcatgcaagatcatcttagggaagtgtccatactcataccaattcttggctaagtcttcttggtttattaccactgaaaatttgtttggtttagttgattatgctgtgaagcataatatgtactacaattttctgtggctttctaacgatcaagataaattccaaaacatcaagtgtagctcctaggctatgacatacgca

SEQ ID NO: 832 - DNA, 370 bp, Homo sapiens
taatgtaacatccagaaaagaggactaatgaaagaatagggcctaaagctaatcagtataactaagaaagaaaagaaggctactttggggaataaaatttctctttaggcaccatcatgtatccactcagatctttttactcatctcactttccccatccagacttcgaaaaattccccatcttccatctatccagtaaactccctttgtcctggggagacccccactccttcagccactttcaagcacattcatcttcacctcaccccattttctacacacatccctgcatcatctctgaaccttacatcatgtaacattttacccacttcagccttctttctacaaccagttagagcctcttaatctt

SEQ ID NO: 833 - DNA, 463 bp, Homo sapiens
gagcttcctggtgatggtggtgattctggaaaacccactagggacgagatgcgtgctaaagttgaatgagctgatggatatgaaccatcagtccaagaatctgtttaaagttcagacttaaaacagtagcaaataagaagtcctatttgtgaaaaacaaacaagaaacaacaatgaaagagcaaaattagcctggtgtggtggtgcatgcctgtaatcctagctactcaggaggctgaggcacgagaattacttgaacccgggagacagaggttgcagtgagccaagattgcaccattgcactccagcctgtgcaacagagtgagactctacaaaaagaagaaaaaaaaaataagtatccgggcttggtggcatgtgcctgtagtctcagctactctgaaggctgagatgggaggatggcttgaggccaggagtaatttgaggctgcagtgaactatgattgt

SEQ ID NO: 834 - DNA, 462 bp, Homo sapiens
tgacaacatctactgagctctttctttgtgccagtcactggggaatttgctttctccacatattatttcattcactcttctttatttattgatttatttatttttagacacagggcctcagtctgttgcccaggctggagtgcagtggcatgatcatggctgactgcagccttgaactcctaggctatagcaattcttccacctcagcctcctcagtagctaggactacagatacacgccactgtgcctgtctaattttaaaaatatatatatttgtagagatggggtctcagtatgttgctcaggctggtctcaaactcctgggcttaagcattcctcccacctcatcctcccaaagtaatgggattacaggtgtgaggcaccgcaccttgctttcatttaattttcacaataaacttacaggttaagtactattgttgtttccattttatagatggagaa

SEQ ID NO: 835 - DNA, 443 bp, Homo sapiens
cccccactcagtctttttttcttcctgtttttccattttctgccaccttgctattgatataccttaggctcttcttctcaccatcctctttaactggacttaaaaccacagactgtcggcaccagaagactctaaaagaatgtatacacttttagataaataacatgccccagatcacagctactcagcagcagaccacaggcagcattcagccctcctgactcccagggtctcacatcctagtctctctctctttcagagttttaattcttgaaggtgatagctctcacatttcccagagaataacccaaagtacaccgtctgtctcactaattctagaataaaaagtaagatttgagacagcttaactgaaatgaatacaccatcatatcaaaattttaaattagagctatattaattattaaaatactatgccgaaatcg

SEQ ID NO: 836 - DNA, 692 bp, Homo sapiens
aaagacaggaaagaggattccaagcagtggggattgtatgtgcaaagatcctacagtgaaagagagggtggcacttaggaagaactgattgtttttccttgtggtcaaggtagagttctggaatacagtgagaaacaaggctgaaggagtagacagtatttacattatagacattttcctaagccgtccattctctgtccttacttagttgagtttctgatgctaaatcctgaatctcagtgcactggtaggctcatctagcctaaattcccacttaatgggtaaaaagaatttcaactggggccccatcccaatctcaaaactgttatagctaaaaactgctccttactcagtacttaatatgtaccaggcagtgtagtaagcctttaaagagatgaattcactcctctaatcattcgtttacatgctggaatatgatcttgctttaaactgccagtctgtcgatcagggtcatatatttcagggacctaaatcagctcccttgttaccacagtccctggattccctgctgcctgtgctctgattaaggagactccagcagctctgcaataaggattgagttgattaacatctggttgaaaatctcttcgcccatatgaacctgagacaaagccatccaaagagtaattgatggcaaagacccgaagttgtctctaagatggcaactcgag

SEQ ID NO: 837 - DNA, 436 bp, Homo sapiens
agccctgtttgcggggttcctcccacacaggcaagtgaaacagccagcacagggacatctgatgccttcttcatattaggaaagtctggaagtggcctcaactccatccgtgagggattgcttcgatgattatgttgtggtttttcttactgaagtgcttattgagatgataattttccgatggaaagaaaagcctgggcttggcgtggtggctcatgcctcgggaggctgaggcgggtggattacctgaggtcaggagtttgagaccagcttgaccaacatggtgaaatccatctctattaaaaatacaaaaattagctgggcatggtggtgggcgcctgtaatcccagctactcgggaggctgaggcaggagaattgcttgaacctgagaggtggaggttgcagtgagctgagattgtgccattgcactcaaac

SEQ ID NO: 838 - DNA, 340 bp, Homo sapiens
gctccgactagtaagctgttgagagggtggacagggcataagtaaggagatatgtccgctgctctttgagccacctggacttgatgctacttcttaggagtgccatgcttaagtgtagacctggaagggaattccaagcagggtgccatagagactatggggtggggccctaagtcaaccaagaatatatgggatgttcagaaggtctcccagacggacaaagccctaatgtgcctattcgtaggggaaagatgcgcaaacgacaaggggacctgtaggagagaaaatcttcagctcctattaaggaaaaacactcattcgaagcacagctggcatcatg

SEQ ID NO: 839 - DNA, 380 bp, Homo sapiens
attcacctgtgcaagctctcagctcacttgtctacctctgcagctcaactttccaggctgctctttgttagtaaatgatttggggctgcttttcatgaggtaaaaagtgtgactgaggattcccaaacccttgctatctccctaagtgatttctttttaacttctatatcaaagagactggagatttttttttatgagaactgcatattgcctctttggtttggtttgttttaaaggcaggttatctgtggaaaccttatttatatattaatttgtttctcttactggagctgaaaaactttttaaggagggatactgtactatttaaatacctttctaaagtcccctaactcccagctttaaacacagctggtttccca

SEQ ID NO: 840 - DNA, 166 bp, Homo sapiens
gaaattgaaattgtatgaaaagtaatcaacttaaacaacatttaatattagcatactgtgactctagaaatgtttatttcgaaaacattttaccccaaaaactgttaagtgagcaagttccatatgttttgtcttagattttaggatagctttaccttaaggttaa

SEQ ID NO: 841 - DNA, 410 bp, Homo sapiens
ttttttttttgtagaaacagggtcttcctatgttgcccaggctggtctcaaactcctggcctcaaatgatcctcctgcctcgacctcccaaagtgctaggattacaagtgtgagtcaacacacctggccaaaatgccatgtctttaaaccagtgtccttctccctataatacctctcactggtcatgtatttccagaaacatactggtgagagggcaggtgttgagaacatggcacttctcacccatcataggaaggagtccaggagttaagagccacggttcctcagggagcttcctcacatggaaggtcagacatatagttagagtctccagataaccatagtcctcagagggagtaagaaggaatcatctctattaatattttgtctcccaaagcattcaaagggcc

SEQ ID NO: 842 - DNA, 343 bp, Homo sapiens
cagggtcctgacaggtgacactgcgtgtggagcgtcagcagggctagccatggacccaggggggtgagagactctccagcgtcatcttggtgagagtgatgttgggatcagagtggaaacaagacagagaggatgcggcagcaaagccataagtgaaagtcactaggaacggtcactttcggcatcagtgaaaatggtctccatggccgcagcacattgtggggacaggcagagtggagtcagcagagggaggaggcatgtggggcgttcagggagccgggcacagctccagagtcctccctgggggactccaggccacgctccctccccagcagctgtgggg

SEQ ID NO: 843 - DNA, 417 bp, Homo sapiens
agcactctatgtttgctgaggcacttctttaatgctcagtcaggttaaactcatccttggctttcacaccttgcttgtgggtagtgtcaaaatcagacacaggtgagaaaatagagctttctcaggcctttcctgaacaagtatgcgtccctgcacatgtgcttagtcttctagattccaggaatatgccaaagcttttcagatctccctggatatctcattacacaggttttcttttcaaatgtttgttcaatcacttgttttttgctgattcgttttactgttctaaacagtgagggtgttaaataattgcctggaatcatttttaacaaacacctggggagggcatttttactgagtaaggtctgactatggtcaaataaggcaagtctcaaataagttttttcagggagttac

SEQ ID NO: 844 - DNA, 439 bp, Homo sapiens
ttcatgtcacccattatatttggtctccacgatgtgtatgttctgaggttttctgctttcaatgcctgggacacgcctgaagatgaggagaaaccagaaggaaggcatgtgcaccagaatggacttcttgagtgctcgctgtttgcctagcatggggttcttaaattatcaggtgcatcagaatcacccaagagacttgttaaacatgagattctgggctccatcctgagtttctgactcagtaggcctgcgatggggcttgaaagtttgcatttgtaagtccccagatgctgctgctgctgctgttggcccagaacacacttggaaagcctctggttcagcccagggctgggcactctggcctgtccagggccagcatggggcaggaccccttcgtgggctggcaggagccctgcacaccctccacacagagcaggct

SEQ ID NO: 845 - DNA, 484 bp, Homo sapiens
gtacaattcacataagtaaagtgtgctattgaatggcttttaatatattcacagacttttacatcgtgaccacaatatatgttagaacatttttatttcaaaagaagccctacacccctcagctatcaccccggcaattgttccatctccctcaaccccacccagttctaggtcaccattaattcactttctgtctctatggagttgctcactccaagcatttatatgtaaatggaatcatgcagtatgctatcctttgagactggcttccttcagttacaaggttcatcctatacttacgcttgaaacatttattaatcacccttttctgcaaccaaaaatgtatgtgaatcgaaattgtaaagtgttctttatttcctgccaccaaaagactttaggaatttaaagtattttctgggtcatgattacaatggttgttatcatgcaacttatgaaaacaacataaatgttataaacgttgcta

SEQ ID NO: 846 - DNA, 354 bp, Homo sapiens
gctgatacctctagttaaccaggtgactggtgagagagcatgttctaagaagagatgggcagatggtgccacctcaagggtaaaacagagctctacctggcagattgaaagctgtcaggaccaatggagcctcaagttcagataaatgaatggggataccaccagggagcagatcctaggggacttgagcaaggttgaggaccctggacctcactttaatgacaggaagaaccacagcaggattttaagcaggtgtgttaatctcctagggccactgtaacaaattaaccacaaaccaagtggcttaatacaacagaaaagcattttctaatagtcctgagggccagaagtctg

SEQ ID NO: 847 - DNA, 491 bp, Homo sapiens
gcccagctagcacctggcacctactccacacccagcatctgcccctgcatgtacctgccctcaccttggccccagcctggccccttgtagcttctgactgaccttgtaaagaacaaactcctccagggccttttctttacaagtttaatacttttgagtgtagtcagtgtaaaagttacaagtacattttagcagaaacttagagggccaggcacagtggttcacacctgtaatcgcagcactttgggaggccaaggtgggtagattgcttgagtccaggagttcaagaccagcctgagcaacatggccagaccccatctctacaataaaatacagaaattacctgggcatggtggtgtgcacctgtagtcccagctgttagggaggctgatgtgggaggatcacttgagcctaggaggttgaggctgcagtgagctggcctctgcatgccactgcactctagcctgggtgacagagcaagaccctgtctc

SEQ ID NO: 848 - DNA, 285 bp, Homo sapiens
acataactcagaactcaggtattcaaggaaaggaagacaagttggataatggaatcactgcttgtcactcacagattgtgatgtcttttcttttagatagacagacagatggatagacgaaagatagatagataggtagatagatggatggatagatgaaaggtaagtaggtaaatagatagacagatagatgcctcctaccaaaagatttccatactggattgagaagtatttaaatatgaggggtctccctgcaaggtatcagattctgtgaagaaatccccc

SEQ ID NO: 849 - DNA, 252 bp, Homo sapiens
atgaactgttttttaatatatgatataccaaacaaaacatatcagcatattgagaaagctaaaagtagaatcaggaaataagaaaacagagaatgccagcttggcgtggtggtgcactcctatagtcccagctactcgggaggctcaggcaggaggatcacttgagcccaggagtttgaggctgttgtgcataatgcttgcccctatgaatagtcactgcactccagcctgggcaacacagaccccatacta

SEQ ID NO: 850 - DNA, 1039 bp, Homo sapiens
atgaaagaaaggagattcagctgtaaattgattaggttaagtaaacattgtagccctggatttatttaaaggtattaatttgaaccatatgaaattgctgtttctctagtcaaaaaccattgaatcttggcagcttaatagggttcagcataatgccagcatgacccattaatgtattttgtctcttagaaaattgtgtatttcctggttctgtccattgaaatgttctagaaacaagagccagtcctgtagcaatttgcatgcttcttggttcttggacccagatttgagtgaccagtgttacctggtgtgcccagacttcccagtttcagcacccgaatttcacatcccaggaaactcttcagtttcaggaaaaccaggatgattggccaccttcacccagattatggtacctaattatcattttcccatgaaaatgaactagggcctttgggacagttggctgattccatacctggggcatggaatgcattaaaataagccttgagtatcttattttaccacagaacaagaaagctatcaaaaagacttaacatgatggtacgaacaggactcaggagccactctgaagaggttccctctggccaaaaataagacaattggaacatcaataagaataacaacttcagtagattgaaacacatcagttgtgctcagttcatgcgttcataatgtactaaaaacaaatttaaaaactcactggtcatctctagagaatgcttgggagctaactcattattttgaaaaacgataaagaaagagaagaatcaaatgctgcttttcctatataaattgaacctcagagtaaccacattgttgatgaggggcagtttatctttatgtgaagattgtagttagtaaagaaggaatgatagactaaaccactttgcaaacccttgatgaacttatggctctagacaatgatcttcagtggcactgacatcatgaaaagaaaagcaaccaggcatcgtatgccacctaagggaagtatacaaacactacttggggagtattattg

SEQ ID NO: 851 - DNA, 365 bp, Homo sapiens
gcgcaatagcagatttcaacccagtgacaagacccaagtgttactagatgccctgggatccctatctacagcctggtcctttctttgagacgggcctccctcccagactcacaggtgacccagtaccttgcccaattccatctagtctagggacacactcctgccccaggcagcatgaatcaatctgtctttctcagtaacagaaacagagacccatggaaatggtcactgcattgtgttggacttcctaagtccaagaccttgcatgtgaagccagtattggcttcgtagcaaccaccagccttaggaaggtaaaattaggtttgagtcaaaattaagagtcttccaggggaagctgattggaa

SEQ ID NO: 852 - DNA, 386 bp, Homo sapiens
gtcttgctactgcttcatttcctatttctgtgctctttgtcctccagaatcaaatttaaaaaattttatttaacgagtgggcagtaaggtaggcaggtcttggaaaaatttaacaccgaaaatagatacaagatactcagaattaacagtattttatcaccatttatttgcacataagaagggaacattttagagaacgcaaaaagtcatatagttttgcttaatcatctgttttcattttaaggaagaacatgtgtccactgggttgacaacaaggtagaagcccatggtaattgcattttagaacaaagaggtgaaccttggagtagatttaacttggctcctttgaactgataacgtcatagtgtagaagatagtgctaaatg

SEQ ID NO: 853 - DNA, 279 bp, Homo sapiens
tttaagtgggtctttctgtttttcttcgtttttgatattttcggccgcatcagcatttatttgcacataagaagggaacattttagagaacgcaaaaagtcatatagttttgcttaatcatctgttttcattttaaggaagaacatgtgtccactgggttgacaacaaggtagaagcccatggtaattgcattttagaacaaagaggtgaaccttggagtagatttaacttggctcctttgaactgataacgtcatagtgtagaagatagtgctaaatg

SEQ ID NO: 854 - DNA, 330 bp, Homo sapiens
gctcattaggatcgggatcgccgaatctcaggcactcacctcagactgactgacttagaatctggatttttaggcaagatccccaggtgattcctaggcattttgaagtctgagagacactggactagtagttttccaacatcacatatgctaacagaacagacgcctgggcccagaatttatggacgtgggccttcaacgtgtgtatttttaatatgcttctgggttatttctaatgcacagagtgtggataactatccaaataaatgcttagaagtgtactttaatatatgagattaaaatcagaattgcaaaattttaaattagaac

SEQ ID NO: 855 - DNA, 321 bp, Homo sapiens
aaaaaaatcgtgacaggtatatcctaggcggccaacaccattggcccggggcactgtctacactgtgcgcttgcgggccacgtcggtgtctgctgagcggtggctgctccaggagcccgcgcccgtcaggcgcaagtgggagggcgcgtgcacacgcatggaccagtcctccaggtccacggggtacgcacaggcacgggatggcacctgtgcacgggtgtgtgcgtgcggcggggcccccacgtgcaagaatctggcgggcgcggttggcttccggagggaggggcccacctagagagcagaccagggacccgagaggcc

SEQ ID NO: 856 - DNA, 376 bp, Homo sapiens
agaagaaataacaaagatcagagcagaactaaatgaaagagagacaacagaaaatcaacaaaatgaaaagttggttctttgaaaagataaacaaactgataaatcattagtagactatccaagaaaagaagagagaagatccaaataaacataatcagaaatgagaaaggagacatgaaaactgaaaccaaagaaacacgaaagatcatcagagactattttggacaaccatatgctcacaaactagaaaacagagaaaaaatggataaattcctgaaaacacacaacctcctaagactgaaccaagaagaaatagaactcttgaacaggtcaataataagtagtggattgagtaagtaatttaacatctcctcat

SEQ ID NO: 857 - DNA, 444 bp, Homo sapiens
tttaaacaataaacattgtaatttaagatggttcttttgattgtaagacaataaacatttgtgaccatgcaagaaaaaaaaaattcaaattgctggatcatgttacagaaagaaaccagatacactgagacaaatactacatgaccttacacatatgtggaatctaataaaaacagacagtgaagccttcatgcaactggtcttagcaatcagtttttggatataacatcaaaggcttgggaaataaaaatacgaacatacacatagtactacaacactgtatccaaactattccaagaacatttaaagcgggactttaggcgggcatggtggctcacgcctgtaatcccagcactttgggaggccaaggcgggtggatcacgagatcaggagatcaagagcatcctggctaacactgtgaaaccccatctctactaaaaatcc

SEQ ID NO: 858 - DNA, 434 bp, Homo sapiens
tctcaacaagtttttaccaatactgttcttgtggtaggatctggtggctttgaaaacatcttatgttaggtatgagctgcaacccagcaaaacaaagcaaaacaaaacaagctcattttcctagttagttttttaaatttttggctctgccatttaataatctttaacaagttacaaaaccttagttttctcatccttaaggaggggaataataaatgtgacagaatagggtagtggtttagagcatggactctgtgtgaaagctctgcatttcccacttactagttccgtgactttaagcagttacttttctttttctttcttttttttttttagatggagtcttgctctgttgcccaggctggagtgcagtggtgcagttttggctcactgcaacccctgcaacctccacctcccaggttcaagcctcttga

SEQ ID NO: 859 - DNA, 418 bp, Homo sapiens
aaccactgctcatggccctggcatatggccctgactcatgctttgctgtatacttgtgcattgccactgatgtatccagcttctctttttcctaattatagggccttgaatttttccaatttgttatgtctcatacttctatttcagctgtaggaaatacactaaatctagcttttttactccaacatatcagatatccctacccgctttgtattatctgtacattttgaaatatgccttttctttgtccaagtgactcagatactgagtaaggcagggtcaggcagaggggctgctgtagactgcccttcaggttcatgtcacccttcagtcattactcagcagaaatttgggaagccagctttcctttcgtagggtctgcttacctggttgtttattgaaatccaaatactacatc

SEQ ID NO: 860 - DNA, 422 bp, Homo sapiens
tgtctccataattgtgcttaggactctggtgcataagtggataaactgttaaacaggatcctaggggagctagggtgacaaagttcaagtccattaaaactagcaacatacattccttactgctcacgcatgactcatggtcttaagatgtttacagttaagaaaagcagcttaatcatacctgcaaggacaaactcctacataaacacaatgtccagatgacccaatatcccatgacaatgtatgcttctaagctaattacagtcatgctttcacgtacttgcacactaaaataccaaggataggtgtttttttttttttgatggagcttcacttttgtcatccaggctggagtgcaataggacaatctcggctcattgcaacttccaccttccgggttcaagcgattctcctgcctcagc

SEQ ID NO: 861 - DNA, 286 bp, Homo sapiens
ccattatcaaaaaaattcaaaattcttccagtttatcatttgattttttaaatgattgatttaataggtgatactactctgtccccaaggtaatacagttacatggtttgaagtgtgaaaggtacaaaggagtatccaataagaagtttcccctcgcccaccttctgttctctagtcaccagctttcctctctgaaagcagccgatattactgtcacccaggctggagtgcagtggcgcaatctcagctcactgcaacctccacctcctgggttcaagagattctc

SEQ ID NO: 862 - DNA, 325 bp, Homo sapiens
aacttttgaagccattctgatgcaggacagtggagcttagtccgcaactgttcttggctttgtccagcagagaattcaaggacaagctggtggtagggtagaagaaaacagttgtatcgaggcagcagtgttaacagctctggcagtgttacaactcttgtgactgctcctgcagagagcagggctaccccataggcagtgtgctgagagtagcagttcagggcaggtctgcaatcacatttacacctacttttttgtttgtttgttttgttttgttttgttttgtttcagatggagttctctctgtcgcccaggctagagtcca

SEQ ID NO: 863 - DNA, 357 bp, Homo sapiens
ctacctgggccagtctcattttttccctgaaccttcattacccatctataagaaaggggctgcaacactgacagctgacaaccgtccccgcctcatggggttagggtagaactggacaagacggatgcctgtgactggccaggagacagtgtccgggagaagctggaagggtttgggtgattactggttactaaaaagagtaaaagtagatgtatgaaaacatgacagtttcctctgagtggtagaattatgggtaattttctttttttctctgtagtatttaaaaaatgtttccaagtatgtatttttatagtcatactaaaaatgactgttacttaaaatttctttaaaaaaaaa

SEQ ID NO: 864 - DNA, 1019 bp, Homo sapiens
cgcggtggctcaagcctgtagtcccaggactttgggaggctgaggcaggtggatcacttgaggtcaagagcctggccaacatggcaaaaccccgtctctactaaaaatagaaaaaaaatcagcctcctgagtagctgggattacaggcctacacaaccacactcagcattttgggaggccaaggtaggaggatcagttgagcccaggagtttgagactagcatgagcaacatagtgagacctcatttctacaaaaaaattagctgggcatggtggcacatgcctgtagtcccagctactcaggaggctgaaggggaagaattgcttgagcccaggaggtcagggctgcagttagccctgatcgtaccactgcactccagcctaggtgacagaatgagacactgtctcaaaaaataaataaaaatatatgctcttcaggccaggcacggtgactcacgcctgtaatcccagcactttgggaggccgaggcaggcggatcacaaggtcagcagttcaagaccagcctgatcaacatggtgaaaccccgtctctactaaaaatagaaaaaaaattagctagacttgggaggctgaggcaggagaattgcttgaaaccggaaggtggaggttgcagtgagctgagattgcgccactgcactctagcctaagcaataagagcaaaattccatctcaaaaataaatagatacataaattaagcactcttcattattttttaattacttaaagactaaattgaagcacttctatttcccattatttgccatgtgaaatcaagtaaaactttttttttcctgggtattgtagcacgggctaaaatgtataaatgtacataaagtcattttctttcagttttatatttacagacttcagatttcttctgtttggtacctaaactaataatcccatgtcttattgatgctgtctttactaagatcagaaatgttgaaatcatcccattttctccctcaaatacagttgtagtttgtaccaaaaaaaaaa

SEQ ID NO: 865 - DNA, 805 bp, Homo sapiens
ctcattagccataacttgagcacatggccttatcaggttataagggagacaaggaaatgtgtctctggctaagtgaaatttttattattaaagaaaataaggagtggttagcagataaaaaacagcagtctctgccacaatagttcactctcatagagggagaaacgtttcatccgtacataaaagggagagtattggaagttttcatggagtgtttgtggtaaaatctagatttcaaggaattgagtgaaggagtgaagattacagagtgggtgaacgtggcttttgagaagtatggtgtccatgaaagaagaggtgattctgggatgttagtggagttaaagaataaattctttttaggtagcagaatctggagcagataatagtctcagaaaaggaatatcttagaaggggagaaactgaaaaccagtacatagcatatttttagatggtatgagggcactgaattaatatagaaagtggataacactttctactccaaacacagggaaaagaggagaggtaaggttgaaatataaacattatgcaatggagaagaaaaaaatcaagaaaaatttaatgatgtcctcattttgaagtcaaaggccagccagatactcttctgagaaggaaagtgtggcagctgtgtaattgagggcagctactgaaggaaatatgatgttagtgaactagaaacacaaaaatagtgagtattttgagggtcagctgaagatagcttggatttatagtaaaattattagtatatgttttgatttttctctaacaaattatggcagcccatatg

SEQ ID NO: 866 - DNA, 571 bp, Homo sapiens
gaaaatcatccccacagtgggtagttcctctctgccactggtcttcctaatgttctccctgagtctggggtttttttgacatcagacaggagaaagtatgcactcattgggtcataggtggccatgagcaggcacagaaaaggcaacacatgttcccactctggtccataggactggtggcccagcccacgggcttcaggccctccttgatcagaaggtggagcttcaccagtgaccctcaccttcctgtccaggattctgtctgcctcccaccaccaaccatggagcccaggtcacttgtaccaaggagcatccaaagaccagtgctgatcagtccgcaacacccctcagcctccctcctacactcatcaaggcccaaagtccagagggttcaagacagcagtgggatggtgcaccagcactgacccgagtgtgcacagacccacctgggctgcgacagcatctgggcttgaccacaaccacactccaaaattagagcaggtgccatgagagatgaggcagtgagagcggacacccccaagctgcaggagaaggggggatctcctggacc

SEQ ID NO: 867 - DNA, 420 bp, Homo sapiens
gggcttgatgaataccaagccaaaacaccttcagggcctgtgaccttcttcagtgaaggaagtacgtctcattaacctgtgcttccctatacactggcccagaggaaagcctttgattgcatattgaaagaagggtcaggtgcagtggctcatgcctataatcccaacactttgagaggccaaggtaggtggattatctaaggtcaggagttcgagaccagcctggccgatatggtgaaaccccgtctctaccaaaaatacaaaaattagccgggcatggtagtgcatgcccataattccagctaaggaggctgaggcaggagaattgcttgaacccgggcagtggaggttgcagtgagccaagatcgcaccagtgcactctagcctgggcgacagagagagactccatctcaaaaaagg

SEQ ID NO: 868 - DNA, 285 bp, Homo sapiens
agaaggaagaggatataacaagtagaaaacagctacaaacatggtgaatattaaactgcaatgggtagggaagtcctcctgggcctgggaaccaaagggtggaagcaggggtggcctatatcaataatcactttaaaggtgaatggtctcaagagaatgagatgacaagccacagactgggaggaaatatttggaattctgtacttttagctcagttttactgaaaacctaaaattgctctaacaaagtctatttttaaaatatttttgaaatgtgactagccta

SEQ ID NO: 869 - DNA, 473 bp, Homo sapiens
gcaatttatacctttcttattttcatatattcaggtttgatatgttgaggatttcatgcaagaggatgatgtggtcaaatgtatgttttaggttactttggcaactctatttaggatggaagggagtgagcttggaagcagggagttgagaggccattgctgcagtataaggggtaagaaaatgagtacccgctgggcgtgttggctcacgcctgtaatcccagcactttgggaggccgaggtgggcggatcacctaaggtcgggagttcgagaccagcctgaccaacatggagaaaccccatctctagtaaaaatgcaaaattagctggttgtggtggcacatgcctataatcccagctacttgggaggctgaggcagaattgcttaaaccctggaggtggaggttgaggtgagccaagattgcgctattgcactccagcccgggcaagaagagtgaaactccgcctcaaaa

SEQ ID NO: 870 - DNA, 342 bp, Homo sapiens
catttaagaaaatgctggcttatctgataagtggggaaaaaagtgtcaagaaaaaaatgctcattagatgcaaggagtgcttccaattaggtagttaaatatgctgaatcctgtaaatctttgtatagcaacacatggcagattataactgctgggatgacccttacatatagtgaatatgaaatagtcaaacagtaaagtcctagctaggtggctgggtggcactccgttttaagtaatttttaaaaccaaccacaatatccccactgggaaatttgctacacagaaagtggccactgtttacagccattggtcactctccaacccaacaactcatttatt

SEQ ID NO: 871 - DNA, 481 bp, Homo sapiens
acattagctcatatattttgtcactttgtaaatataagattgcctatcgagttcagttgaggtagaaataactacgtctgcaaaaagctcatgatcattctcacttataagtgggagctaaacgatgagaactcataaacacaaagaaggaaacaacaggcactgaggtctacttgagggtggagggtgggaggagggagaggagcagaaaagatagctattgggtactgggcttaatacctcagtgatgaaataatctgtacaacaaaccctcatgacacaagttcacctatgtaacaaaccttcacctatgtaacaaacctaaaggggtacctttaggtttaggtacccctgagcctaaaataaaagtttaaaaaaaaagaaaagctcatgattgccaagcagtcactcaggatgtgggttccatctcttcatgaataataggaatgctgtgcttttaaggatcaccccctgccccctc

SEQ ID NO: 872 - DNA, 231 bp, Homo sapiens
agcccaccctggtctttgtcgtgtgaaagggcagtgagagggaggcaagggggatcgccctcctgccaagactctacccatcaggaaattccccaaaaaggatgcttctcaggatggaggcaggggctggagacccaccaatatcacacatgtgcaatctaggctgtttgattttaaagtcctttttaaaaattttcttttgagacagagtctcactctgtcgcccacgct

SEQ ID NO: 873 - DNA, 411 bp, Homo sapiens
tgagacagagtcccactctgtcacccaggctggagtgcagtggtgcaatcttggctcactgcaacctccacctcccaggttcaagcgattctcgtgtctcagcctccccagtagctgggactacaggtgcgccatgacgcctggctaatttttttgtattttcagtagagacggggtttcaccatgttggccagtctgctttcctcctaacctcaagtgagccgcctgcctcgaagatgctttatttataagcgctttggacacactttaataaatgctctattgtatacagttgaactctatataacattttgaataatattgttaatgcttaccctaagtactactatcatctctgtattgtttaacaaaatatttccacatttgacaataaagtcagtatttgaaagg

SEQ ID NO: 874 - DNA, 404 bp, Homo sapiens
ccgcttgtatcatggagtgtcagcttgctggaagccgaatgaattccgcgatgatatgtgcagaaaagagatccagggctttttcgattgtgcttcaagggattaggaagcctaaaaaatgagatcaatacaggagaccctgggagagtctgggagtttacctcccaataaatagagtaagttgtcatagaggtttcctaagacacctcacctaagcttaaaatggaaaagcattttcaatgatttctggactatagcttctgacaattatgcagaggcattttatagatgtttgcattgctgtgacctctttgaaggataagatgaggaaaaacactttttctaacctttggaatcaatagtatgggtagaagttatgttttatcttgaaataaaatcctctg

SEQ ID NO: 875 - DNA, 515 bp, Homo sapiens
gattgctgggggcttcagacaatgatttgtctgaagattgtgggaaccaggtttgggagtgggcaggattcaaggtgctcaaggggcaggaggtgggaggcacttaggacataattgaaacagttattcagtgtgcctgcctgcccgccccctcccagtcccccaccactgccagagagttttgctcttgttgcccaggctggagtgcaatggcacgatctgggctcactgcaacctccgcctcccgggttcaagagattggcctgcctcagcttcccaagtagctgggattatagacgcccgccaccaggcccagctaattttttgtatttttagtagatacggggtttcgccatgttgccaggctggtgattttgggttttttttttttttgcttgttttttttaagtgtcgtggtctcactctgtggcctgggcgggtatacagtggcgcaatcatagctcactgcaacctccaattcctgggtttaagtgaccctcctgagtcagcctccc

SEQ ID NO: 876 - DNA, 3016 bp, Homo sapiens
caacgagttgtagccgcggagagcaggcgtcgatgctggcgcccaaagcctccagcctgagagtcgcctcactcgtgtgacgacagagtttcactcctgttacccaggctggaggacaatgatgtgatctcgggtcaccacaacctccgcctcccggattcaagcgattctcatgcctcagcctcccgagtagctcagattacaggcatgtgccaccacgcccggctaattttgtattttcagtcgagacggggtttccccatgttggtcaggctagtcttgaattcccgacctcaggtgatctgttcgcctcggcctcccaaagtgctgggattacaggcgtgaaccactgcacccggcgaggcattttttactgtctacagaaacttattgtaattcatttttcctcactccagtagtaagaattataccaaattgaaaagatatgaatgagtatcctaaaaaaagaaaaaggaagactctacacccttctcgttattcagattcctctggaataagcagaattgcagatggattcaatggaattttctctgatcattgttacagtgtctgttctatgagacagccagatttaaaatattttgacaacaaagatgatgattctgataccgagacgtcaaatgacttgccaaaatttgcagatggaatcaaggccagaaacagaaatcagaactacctggttcccagtcctgtacttagaattctagaccacactgccttttctacagaaaaatctgctgatattgtaatttgtgatgaagagtgtgactcacctgaatcagtcaaccagcaaacccaagaggagagtcctatagaagttcacactgctgaagatgttccaattgctgtagaagtgcatgcgatttctgaggattatgatatagagacagaaaacaattcctctgagagtctccaagaccaaactgatgaagaaccgccagctaaactttgtaaaattcttgacaagagccaagctttgaatgtgactgcccagcagaaatggcctttactgagagctaatagcagtggcctctataaatgtgaactttgtgagtttaacagcaaatatttttctgacttaaagcagcatatgatcctgaagcataaacgtactgattcaaatgtgtgtcgagtatgcaaggaaagtttctctaccaatatgcttctgatagaacatgccaaactgcatgaagaggatccctacatttgtaaatactgtgattataagacagtaatttttgagaacctcagccagcacattgcagacacccattttagtgatcacctctattggtgtgaacagtgtgatgtacagttctcctcaagcagtgaactctacctacatttccaggagcacagctgtgatgaacagtacttgtgtcagttctgtgaacatgaaactaatgatccagaagacttgcatagccatgtggtaaatgagcatgcatgtaaattaatagagttaagtgataagtataacaatggtgaacatggacagtatagcctcttaagcaaaattacctttgacaaatgtaaaaacttctttgtatgtcaagtatgtggttttcggagtagacttcacacaaatgttaacaggcatgttgctattgaacatacaaaaatttttcctcatgtttgtgatgactgtgggaaaggcttttcaagtatgctagaatattgcaagcatttaaattcacatttatctgaagggatttatttatgtcaatattgtgaatattcaacaggacaaattgaagatcttaaaattcatctagatttcaagcattcagctgacttgcctcataaatgtagtgactgcttgatgaggtttggaaatgaaagggaattaataagtcaccttccagtccatgagacaacttgattattctctttaacttacagaatgttagtttaaaataataaattcatcctttttttggagatgattaaatggatgattgtaaacacaacttatgaaatctgcctttaacaagtaacttttttaaattataaaattttattggcattgctccattttctgtatataaatatatctttaatgtggtattttcaattgcgtgatagtttgtagtttcaaccactcttggtgactgtcatcctgtttcttccatattctctgatttcatgaattgaaaagaaacaaatgtattgaagaagtgagctacagttttccttccttaaccatgggtgctagtaactttttaaaactcaagacaagattagttttttatgtgtgaagtcattaaattattacacgaccagaactaaaatgcaatatacagttaagtccacggatactcccattaatgagaaataacactaggaagccactattacaggaagaaaagatttggttttcatggcagtctgtttttttaaaaaaaaatttttgagccactatctattgttgaatattttaagatgggatgagggaggaactaataagggcttacacaataaaaaataactatatcataactcattcataacttgatgtttcattttctgttgaggaaccataaattcattcacagacttaatatttttttcttagagatggtctcgttctgttgtccaggatggagtgcagtggttgatcatagctcccgggccgtagtctcccaggctcgagcaatcctcccacttcaccctcctgcatagctaggactacaggcatgtggcaccatgcccgctaagtttttaaatttcttgtagagatgagatctcgctatgttgcccaggccagtctcaaactcctggactcaagcaatcctcccaccttggccttccaaatcactgggattataggcatgagccattatgcctgactcttgcccaaatttctgatgtcaaattgttcattgacagaaaacccactgaagtatttaaagttaggaagatctgggagataggggttgctggcatgaaaatgtataacttacaacatttattaataaaatgataaattagcatc

SEQ ID NO: 877 - DNA, 494 bp, Homo sapiens
tttagagtatttagaacatgaagtgtgaagctttgggctatatgaatcgtaatagctcttctctttttgatttttgaatgcagtgaattgagatggttactcaaggaatgattgtttacattgttaggtgaggcgtttgattttattcttttttctttctttctttcttttttagacagagtttcactcctgttacccaggctggaggacaatgatgtgatctcgggtcaccacaacctccgcctcccggattcaagcgattctcatgcctcagcctcccgagtagctcagattacaggcatgtgccaccacgcccggctaattttgtatttcccgtctgtactaaaaatacaaaaaattagccgggcgcctgttgtcccagctacttgggaggctgaggcaggagaatggcatgaacccgggaggcggagcttgcagtgagccaagatagcgccactgcactccagcctgggcgaaagagcgagactctgtcc

SEQ ID NO: 878 - DNA, 3201 bp, Homo sapiens
gcccctgaggtgcgcggcgcaggcgcggagcgtggcggccagggcagtgcggccgcggagcctaggccaggggcctggcgctcagggcgtggggcgcgcggggagggagaggggtcggcccagcacagcgtccgggagcgctagggccggagcagcgctgcccgccgccgtgcgtccgcgggaaggaccgcgcggcccctccgcctgcgctctcggccgccgccgcctctgcgtgggccggccgggagggcctcgggggactgactgacagagtttcactcctgttacccaggctggaggacaatgatgtgatctcgggtcaccacaacctccgcctcccggattcaagcgattctcatgcctcagcctcccgagtagctcagattacaggcatgtgccaccacgcccggctaattttgtattttcagtcgagacggggtttccccatgttggtcaggctagtcttgaattcccgacctcaggtgatctgttcgcctcggcctcccaaagtgctgggattacaggcgtgaaccactgcacccggcgaggcattttttactgtctacagaaacttattgtaattcatttttcctcactccagtagtaagaattataccaaattgaaaagatatgaatgagtatcctaaaaaaagaaaaaggaagactctacacccttctcgttattcagattcctctggaataagcagaattgcagatggattcaatggaattttctctgatcattgttacagtgtctgttctatgagacagccagatttaaaatattttgacaacaaagatgatgattctgataccgagacgtcaaatgacttgccaaaatttgcagatggaatcaaggccagaaacagaaatcagaactacctggttcccagtcctgtacttagaattctagaccacactgccttttctacagaaaaatctgctgatattgtaatttgtgatgaagagtgtgactcacctgaatcagtcaaccagcaaacccaagaggagagtcctatagaagttcacactgctgaagatgttccaattgctgtagaagtgcatgcgatttctgaggattatgatatagagacagaaaacaattcctctgagagtctccaagaccaaactgatgaagaaccgccagctaaactttgtaaaattcttgacaagagccaagctttgaatgtgactgcccagcagaaatggcctttactgagagctaatagcagtggcctctataaatgtgaactttgtgagtttaacagcaaatatttttctgacttaaagcagcatatgatcctgaagcataaacgtactgattcaaatgtgtgtcgagtatgcaaggaaagtttctctaccaatatgcttctgatagaacatgccaaactgcatgaagaggatccctacatttgtaaatactgtgattataagacagtaatttttgagaacctcagccagcacattgcagacacccattttagtgatcacctctattggtgtgaacagtgtgatgtacagttctcctcaagcagtgaactctacctacatttccaggagcacagctgtgatgaacagtacttgtgtcagttctgtgaacatgaaactaatgatccagaagacttgcatagccatgtggtaaatgagcatgcatgtaaattaatagagttaagtgataagtataacaatggtgaacatggacagtatagcctcttaagcaaaattacctttgacaaatgtaaaaacttctttgtatgtcaagtatgtggttttcggagtagacttcacacaaatgttaacaggcatgttgctattgaacatacaaaaatttttcctcatgtttgtgatgactgtgggaaaggcttttcaagtatgctagaatattgcaagcatttaaattcacatttatctgaagggatttatttatgtcaatattgtgaatattcaacaggacaaattgaagatcttaaaattcatctagatttcaagcattcagctgacttgcctcataaatgtagtgactgcttgatgaggtttggaaatgaaagggaattaataagtcaccttccagtccatgagacaacttgattattctctttaacttacagaatgttagtttaaaataataaattcatcctttttttggagatgattaaatggatgattgtaaacacaacttatgaaatctgcctttaacaagtaacttttttaaattataaaattttattggcattgctccattttctgtatataaatatatctttaatgtggtattttcaattgcgtgatagtttgtagtttcaaccactcttggtgactgtcatcctgtttcttccatattctctgatttcatgaattgaaaagaaacaaatgtattgaagaagtgagctacagttttccttccttaaccatgggtgctagtaactttttaaaactcaagacaagattagttttttatgtgtgaagtcattaaattattacacgaccagaactaaaatgcaatatacagttaagtccacggatactcccattaatgagaaataacactaggaagccactattacaggaagaaaagatttggttttcatggcagtctgtttttttaaaaaaaaatttttgagccactatctattgttgaatattttaagatgggatgagggaggaactaataagggcttacacaataaaaaataactatatcataactcattcataacttgatgtttcattttctgttgaggaaccataaattcattcacagacttaatatttttttcttagagatggtctcgttctgttgtccaggatggagtgcagtggttgatcatagctcccgggccgtagtctcccaggctcgagcaatcctcccacttcaccctcctgcatagctaggactacaggcatgtggcaccatgcccgctaagtttttaaatttcttgtagagatgagatctcgctatgttgcccaggccagtctcaaactcctggactcaagcaatcctcccaccttggccttccaaatcactgggattataggcatgagccattatgcctgactcttgcccaaatttctgatgtcaaattgttcattgacagaaaacccactgaagtatttaaagttaggaagatctgggagataggggttgctggcatgaaaatgtataacttacaacatttattaataaaatgataaattagcatc

SEQ ID NO: 879 - DNA, 2920 bp, Homo sapiens
gcccctgaggtgcgcggcgcaggcgcggagcgtggcggccagggcagtgcggccgcggagcctaggccaggggcctggcgctcagggcgtggggcgcgcggggagggagaggggtcggcccagcacagcgtccgggagcgctagggccggagcagcgctgcccgccgccgtgcgtccgcgggaaggaccgcgcggcccctccgcctgcgctctcggccgccgccgcctctgcgtgggccggccgggagggcctcgggggactgactggcattttttactgtctacagaaacttattgtaattcatttttcctcactccagtagtaagaattataccaaattgaaaagatatgaatgagtatcctaaaaaaagaaaaaggaagactctacacccttctcgttattcagattcctctggaataagcagaattgcagatggattcaatggaattttctctgatcattgttacagtgtctgttctatgagacagccagatttaaaatattttgacaacaaagatgatgattctgataccgagacgtcaaatgacttgccaaaatttgcagatggaatcaaggccagaaacagaaatcagaactacctggttcccagtcctgtacttagaattctagaccacactgccttttctacagaaaaatctgctgatattgtaatttgtgatgaagagtgtgactcacctgaatcagtcaaccagcaaacccaagaggagagtcctatagaagttcacactgctgaagatgttccaattgctgtagaagtgcatgcgatttctgaggattatgatatagagacagaaaacaattcctctgagagtctccaagaccaaactgatgaagaaccgccagctaaactttgtaaaattcttgacaagagccaagctttgaatgtgactgcccagcagaaatggcctttactgagagctaatagcagtggcctctataaatgtgaactttgtgagtttaacagcaaatatttttctgacttaaagcagcatatgatcctgaagcataaacgtactgattcaaatgtgtgtcgagtatgcaaggaaagtttctctaccaatatgcttctgatagaacatgccaaactgcatgaagaggatccctacatttgtaaatactgtgattataagacagtaatttttgagaacctcagccagcacattgcagacacccattttagtgatcacctctattggtgtgaacagtgtgatgtacagttctcctcaagcagtgaactctacctacatttccaggagcacagctgtgatgaacagtacttgtgtcagttctgtgaacatgaaactaatgatccagaagacttgcatagccatgtggtaaatgagcatgcatgtaaattaatagagttaagtgataagtataacaatggtgaacatggacagtatagcctcttaagcaaaattacctttgacaaatgtaaaaacttctttgtatgtcaagtatgtggttttcggagtagacttcacacaaatgttaacaggcatgttgctattgaacatacaaaaatttttcctcatgtttgtgatgactgtgggaaaggcttttcaagtatgctagaatattgcaagcatttaaattcacatttatctgaagggatttatttatgtcaatattgtgaatattcaacaggacaaattgaagatcttaaaattcatctagatttcaagcattcagctgacttgcctcataaatgtagtgactgcttgatgaggtttggaaatgaaagggaattaataagtcaccttccagtccatgagacaacttgattattctctttaacttacagaatgttagtttaaaataataaattcatcctttttttggagatgattaaatggatgattgtaaacacaacttatgaaatctgcctttaacaagtaacttttttaaattataaaattttattggcattgctccattttctgtatataaatatatctttaatgtggtattttcaattgcgtgatagtttgtagtttcaaccactcttggtgactgtcatcctgtttcttccatattctctgatttcatgaattgaaaagaaacaaatgtattgaagaagtgagctacagttttccttccttaaccatgggtgctagtaactttttaaaactcaagacaagattagttttttatgtgtgaagtcattaaattattacacgaccagaactaaaatgcaatatacagttaagtccacggatactcccattaatgagaaataacactaggaagccactattacaggaagaaaagatttggttttcatggcagtctgtttttttaaaaaaaaatttttgagccactatctattgttgaatattttaagatgggatgagggaggaactaataagggcttacacaataaaaaataactatatcataactcattcataacttgatgtttcattttctgttgaggaaccataaattcattcacagacttaatatttttttcttagagatggtctcgttctgttgtccaggatggagtgcagtggttgatcatagctcccgggccgtagtctcccaggctcgagcaatcctcccacttcaccctcctgcatagctaggactacaggcatgtggcaccatgcccgctaagtttttaaatttcttgtagagatgagatctcgctatgttgcccaggccagtctcaaactcctggactcaagcaatcctcccaccttggccttccaaatcactgggattataggcatgagccattatgcctgactcttgcccaaatttctgatgtcaaattgttcattgacagaaaacccactgaagtatttaaagttaggaagatctgggagataggggttgctggcatgaaaatgtataacttacaacatttattaataaaatgataaattagcatc

SEQ ID NO: 880 - DNA, 2964 bp, Homo sapiens
gcccctgaggtgcgcggcgcaggcgcggagcgtggcggccagggcagtgcggccgcggagcctaggccaggggcctggcgctcagggcgtggggcgcgcggggagggagaggggtcggcccagcacagcgtccgggagcgctagggccggagcagcgctgcccgccgccgtgcgtccgcgggaaggaccgcgcggcccctccgcctgcgctctcggccgccgccgcctctgcgtgggccggccgggagggcctcgggggactgactgtgaattgagatggttactcaaggaatgattgtttacattgttaggcattttttactgtctacagaaacttattgtaattcatttttcctcactccagtagtaagaattataccaaattgaaaagatatgaatgagtatcctaaaaaaagaaaaaggaagactctacacccttctcgttattcagattcctctggaataagcagaattgcagatggattcaatggaattttctctgatcattgttacagtgtctgttctatgagacagccagatttaaaatattttgacaacaaagatgatgattctgataccgagacgtcaaatgacttgccaaaatttgcagatggaatcaaggccagaaacagaaatcagaactacctggttcccagtcctgtacttagaattctagaccacactgccttttctacagaaaaatctgctgatattgtaatttgtgatgaagagtgtgactcacctgaatcagtcaaccagcaaacccaagaggagagtcctatagaagttcacactgctgaagatgttccaattgctgtagaagtgcatgcgatttctgaggattatgatatagagacagaaaacaattcctctgagagtctccaagaccaaactgatgaagaaccgccagctaaactttgtaaaattcttgacaagagccaagctttgaatgtgactgcccagcagaaatggcctttactgagagctaatagcagtggcctctataaatgtgaactttgtgagtttaacagcaaatatttttctgacttaaagcagcatatgatcctgaagcataaacgtactgattcaaatgtgtgtcgagtatgcaaggaaagtttctctaccaatatgcttctgatagaacatgccaaactgcatgaagaggatccctacatttgtaaatactgtgattataagacagtaatttttgagaacctcagccagcacattgcagacacccattttagtgatcacctctattggtgtgaacagtgtgatgtacagttctcctcaagcagtgaactctacctacatttccaggagcacagctgtgatgaacagtacttgtgtcagttctgtgaacatgaaactaatgatccagaagacttgcatagccatgtggtaaatgagcatgcatgtaaattaatagagttaagtgataagtataacaatggtgaacatggacagtatagcctcttaagcaaaattacctttgacaaatgtaaaaacttctttgtatgtcaagtatgtggttttcggagtagacttcacacaaatgttaacaggcatgttgctattgaacatacaaaaatttttcctcatgtttgtgatgactgtgggaaaggcttttcaagtatgctagaatattgcaagcatttaaattcacatttatctgaagggatttatttatgtcaatattgtgaatattcaacaggacaaattgaagatcttaaaattcatctagatttcaagcattcagctgacttgcctcataaatgtagtgactgcttgatgaggtttggaaatgaaagggaattaataagtcaccttccagtccatgagacaacttgattattctctttaacttacagaatgttagtttaaaataataaattcatcctttttttggagatgattaaatggatgattgtaaacacaacttatgaaatctgcctttaacaagtaacttttttaaattataaaattttattggcattgctccattttctgtatataaatatatctttaatgtggtattttcaattgcgtgatagtttgtagtttcaaccactcttggtgactgtcatcctgtttcttccatattctctgatttcatgaattgaaaagaaacaaatgtattgaagaagtgagctacagttttccttccttaaccatgggtgctagtaactttttaaaactcaagacaagattagttttttatgtgtgaagtcattaaattattacacgaccagaactaaaatgcaatatacagttaagtccacggatactcccattaatgagaaataacactaggaagccactattacaggaagaaaagatttggttttcatggcagtctgtttttttaaaaaaaaatttttgagccactatctattgttgaatattttaagatgggatgagggaggaactaataagggcttacacaataaaaaataactatatcataactcattcataacttgatgtttcattttctgttgaggaaccataaattcattcacagacttaatatttttttcttagagatggtctcgttctgttgtccaggatggagtgcagtggttgatcatagctcccgggccgtagtctcccaggctcgagcaatcctcccacttcaccctcctgcatagctaggactacaggcatgtggcaccatgcccgctaagtttttaaatttcttgtagagatgagatctcgctatgttgcccaggccagtctcaaactcctggactcaagcaatcctcccaccttggccttccaaatcactgggattataggcatgagccattatgcctgactcttgcccaaatttctgatgtcaaattgttcattgacagaaaacccactgaagtatttaaagttaggaagatctgggagataggggttgctggcatgaaaatgtataacttacaacatttattaataaaatgataaattagcatc

SEQ ID NO: 881 - DNA, 3323 bp, Homo sapiens
gcccctgaggtgcgcggcgcaggcgcggagcgtggcggccagggcagtgcggccgcggagcctaggccaggggcctggcgctcagggcgtggggcgcgcggggagggagaggggtcggcccagcacagcgtccgggagcgctagggccggagcagcgctgcccgccgccgtgcgtccgcgggaaggaccgcgcggcccctccgcctgcgctctcggccgccgccgcctctgcgtgggccggccgggagggcctcgggggactgactgacagagtttcactcctgttacccaggctggaggacaatgatgtgatctcgggtcaccacaacctccgcctcccggattcaagcgattctcatgcctcagcctcccgagtagctcagattacaggcatgtgccaccacgcccggctaattttgtattttcagtcgagacggggtttccccatgttggtcaggctagtcttgaattcccgacctcaggtgatctgttcgcctcggcctcccaaagtgctgggattacaggcgtgaaccactgcacccggcgaggcattttttactgtctacagaaacttattgtaattcatttttcctcactccagtagtaagaattataccaaattgaaaagatatgaatgagtatcctaaaaaaagaaaaaggaagactctacacccttctcgttattcagattcctctggaataagcagaattgcagatggattcaatggaattttctctgatcattgttacagtgtctgttctatgagacagccagatttaaaatattttgacaacaaagatggagtctcgctttgtcgcccaggctggagtgcagcagcgcgatcttggctcactgcaacctccgcctcccaggttcaagcaattctcctgcctcagcttcctgagtagctggggttacagatgatgattctgataccgagacgtcaaatgacttgccaaaatttgcagatggaatcaaggccagaaacagaaatcagaactacctggttcccagtcctgtacttagaattctagaccacactgccttttctacagaaaaatctgctgatattgtaatttgtgatgaagagtgtgactcacctgaatcagtcaaccagcaaacccaagaggagagtcctatagaagttcacactgctgaagatgttccaattgctgtagaagtgcatgcgatttctgaggattatgatatagagacagaaaacaattcctctgagagtctccaagaccaaactgatgaagaaccgccagctaaactttgtaaaattcttgacaagagccaagctttgaatgtgactgcccagcagaaatggcctttactgagagctaatagcagtggcctctataaatgtgaactttgtgagtttaacagcaaatatttttctgacttaaagcagcatatgatcctgaagcataaacgtactgattcaaatgtgtgtcgagtatgcaaggaaagtttctctaccaatatgcttctgatagaacatgccaaactgcatgaagaggatccctacatttgtaaatactgtgattataagacagtaatttttgagaacctcagccagcacattgcagacacccattttagtgatcacctctattggtgtgaacagtgtgatgtacagttctcctcaagcagtgaactctacctacatttccaggagcacagctgtgatgaacagtacttgtgtcagttctgtgaacatgaaactaatgatccagaagacttgcatagccatgtggtaaatgagcatgcatgtaaattaatagagttaagtgataagtataacaatggtgaacatggacagtatagcctcttaagcaaaattacctttgacaaatgtaaaaacttctttgtatgtcaagtatgtggttttcggagtagacttcacacaaatgttaacaggcatgttgctattgaacatacaaaaatttttcctcatgtttgtgatgactgtgggaaaggcttttcaagtatgctagaatattgcaagcatttaaattcacatttatctgaagggatttatttatgtcaatattgtgaatattcaacaggacaaattgaagatcttaaaattcatctagatttcaagcattcagctgacttgcctcataaatgtagtgactgcttgatgaggtttggaaatgaaagggaattaataagtcaccttccagtccatgagacaacttgattattctctttaacttacagaatgttagtttaaaataataaattcatcctttttttggagatgattaaatggatgattgtaaacacaacttatgaaatctgcctttaacaagtaacttttttaaattataaaattttattggcattgctccattttctgtatataaatatatctttaatgtggtattttcaattgcgtgatagtttgtagtttcaaccactcttggtgactgtcatcctgtttcttccatattctctgatttcatgaattgaaaagaaacaaatgtattgaagaagtgagctacagttttccttccttaaccatgggtgctagtaactttttaaaactcaagacaagattagttttttatgtgtgaagtcattaaattattacacgaccagaactaaaatgcaatatacagttaagtccacggatactcccattaatgagaaataacactaggaagccactattacaggaagaaaagatttggttttcatggcagtctgtttttttaaaaaaaaatttttgagccactatctattgttgaatattttaagatgggatgagggaggaactaataagggcttacacaataaaaaataactatatcataactcattcataacttgatgtttcattttctgttgaggaaccataaattcattcacagacttaatatttttttcttagagatggtctcgttctgttgtccaggatggagtgcagtggttgatcatagctcccgggccgtagtctcccaggctcgagcaatcctcccacttcaccctcctgcatagctaggactacaggcatgtggcaccatgcccgctaagtttttaaatttcttgtagagatgagatctcgctatgttgcccaggccagtctcaaactcctggactcaagcaatcctcccaccttggccttccaaatcactgggattataggcatgagccattatgcctgactcttgcccaaatttctgatgtcaaattgttcattgacagaaaacccactgaagtatttaaagttaggaagatctgggagataggggttgctggcatgaaaatgtataacttacaacatttattaataaaatgataaattagcatc

SEQ ID NO: 882 - DNA, 3148 bp, Homo sapiens
gcccctgaggtgcgcggcgcaggcgcggagcgtggcggccagggcagtgcggccgcggagcctaggccaggggcctggcgctcagggcgtggggcgcgcggggagggagaggggtcggcccagcacagcgtccgggagcgctagggccggagcagcgctgcccgccgccgtgcgtccgcgggaaggaccgcgcggcccctccgcctgcgctctcggccgccgccgcctctgcgtgggccggccgggagggcctcgggggactgactgacagagtttcactcctgttacccaggctggaggacaatgatgtgatctcgggtcaccacaacctccgcctcccggattcaagcgattctcatgcctcagcctcccgagtagctcagattacaggcatgtgccaccacgcccggctaattttgtattttcagtcgagacggggtttccccatgttggtcaggctagtcttgaattcccgacctcaggtgatctgttcgcctcggcctcccaaagtgctgggattacaggcgtgaaccactgcacccggcgaggcattttttactgtctacagaaacttattgtaattcatttttcctcactccagtagtaagaattataccaaattgaaaagatatgaatgagtatcctaaaaaaagaaaaaggaagactctacacccttctcgttattcagattcctctggaataagcagaattgcagatggattcaatggaattttctctgatcattgttacagtgtctgttctatgagacagccagatttaaaatattttgacaacaaagatgatgattctgataccgagacgtcaaatgacttgccaaaatttgcagatggaatcaaggccagaaacagaaatcagaactacctggttcccagtcctgtacttagaattctagaccacactgccttttctacagaaaaatctgctgatattgtaatttgtgatgaagagtgtgactcacctgaatcagtcaaccagcaaacccaagaggagagtcctatagaagttcacactgctgaagatgttccaattgctgtagaagtgcatgcgatttctgaggattatgatatagagacagaaaacaattcctctgagagtctccaagaccaaactgatgaagaaccgccagctaaactttgtaaaattcttgacaagagccaagctttgaatgtgactgcccagcagaaatggcctttactgagagctaatagcagtggcctctataaatgtgaactttgtgagtttaacagcaaatatttttctgacttaaagcagcatatgatcctgaagcataaacgtactgattcaaatgtgtgtcgagtatgcaaggaaagtttctctaccaatatgcttctgatagaacatgccaaactgcatgaagaggatccctacatttgtaaatactgtgattataagacagtaatttttgagaacctcagccagcacattgcagacacccattttagtgatcacctctattggtgtgaacagtgtgatgtacagttctcctcaagcagtgaactctacctacatttccaggagcacagctgtgatgaacagtacttgtgtcagttctgtgaacatgaaactaatgatccagaagacttgcatagccatgtggtaaatgagcatgcatgtaaattaatagagttaagtgataagtataacaatggtgaacatggacagtatagcctcttaagcaaaattacctttgacaaatgtaaaaacttctttgtatgtcaagtatgtggttttcggagtagacttcacacaaatgttaacaggcatgttgctattgaacatacaaaaatttttcctcatgtttgtgatgactgtgggaaaggcttttcaagtatgctagaatattgcaagcatttaaattcacatttatctgaagggatttatttatgtcaatattgtgaatattcaacaggacaaattgaagatcttaaaattcatctagatttcaagcattcagctgacttgcctcataaatgtagtgactgcttgatgaggtttggaaatgaaagggaattaataagtcaccttccagtccatgagacaacttgattattctctttaacttacagaatgttagtttaaaataataaattcatcctttttttggagatgattaaatggatgattgtaaacacaacttatgaaatctgcctttaacaagtaacttttttaaattataaaattttattggcattgctccattttctgtatataaatatatctttaatgtggtattttcaattgcgtgatagtttgtagtttcaaccactcttggtgactgtcatcctgtttcttccatattctctgatttcatgaattgaaaagaaacaaatgtattgaagaagtgagctacagttttccttccttaaccatgggtgctagtaactttttgaccagaactaaaatgcaatatacagttaagtccacggatactcccattaatgagaaataacactaggaagccactattacaggaagaaaagatttggttttcatggcagtctgtttttttaaaaaaaaatttttgagccactatctattgttgaatattttaagatgggatgagggaggaactaataagggcttacacaataaaaaataactatatcataactcattcataacttgatgtttcattttctgttgaggaaccataaattcattcacagacttaatatttttttcttagagatggtctcgttctgttgtccaggatggagtgcagtggttgatcatagctcccgggccgtagtctcccaggctcgagcaatcctcccacttcaccctcctgcatagctaggactacaggcatgtggcaccatgcccgctaagtttttaaatttcttgtagagatgagatctcgctatgttgcccaggccagtctcaaactcctggactcaagcaatcctcccaccttggccttccaaatcactgggattataggcatgagccattatgcctgactcttgcccaaatttctgatgtcaaattgttcattgacagaaaacccactgaagtatttaaagttaggaagatctgggagataggggttgctggcatgaaaatgtataacttacaacatttattaataaaatgataaattagcatc

SEQ ID NO: 883 - DNA, 2610 bp, Homo sapiens
gcccctgaggtgcgcggcgcaggcgcggagcgtggcggccagggcagtgcggccgcggagcctaggccaggggcctggcgctcagggcgtggggcgcgcggggagggagaggggtcggcccagcacagcgtccgggagcgctagggccggagcagcgctgcccgccgccgtgcgtccgcgggaaggaccgcgcggcccctccgcctgcgctctcggccgccgccgcctctgcgtgggccggccgggagggcctcgggggactgactggccagaaacagaaatcagaactacctggttcccagtcctgtacttagaattctagaccacactgccttttctacagaaaaatctgctgatattgtaatttgtgatgaagagtgtgactcacctgaatcagtcaaccagcaaacccaagaggagagtcctatagaagttcacactgctgaagatgttccaattgctgtagaagtgcatgcgatttctgaggattatgatatagagacagaaaacaattcctctgagagtctccaagaccaaactgatgaagaaccgccagctaaactttgtaaaattcttgacaagagccaagctttgaatgtgactgcccagcagaaatggcctttactgagagctaatagcagtggcctctataaatgtgaactttgtgagtttaacagcaaatatttttctgacttaaagcagcatatgatcctgaagcataaacgtactgattcaaatgtgtgtcgagtatgcaaggaaagtttctctaccaatatgcttctgatagaacatgccaaactgcatgaagaggatccctacatttgtaaatactgtgattataagacagtaatttttgagaacctcagccagcacattgcagacacccattttagtgatcacctctattggtgtgaacagtgtgatgtacagttctcctcaagcagtgaactctacctacatttccaggagcacagctgtgatgaacagtacttgtgtcagttctgtgaacatgaaactaatgatccagaagacttgcatagccatgtggtaaatgagcatgcatgtaaattaatagagttaagtgataagtataacaatggtgaacatggacagtatagcctcttaagcaaaattacctttgacaaatgtaaaaacttctttgtatgtcaagtatgtggttttcggagtagacttcacacaaatgttaacaggcatgttgctattgaacatacaaaaatttttcctcatgtttgtgatgactgtgggaaaggcttttcaagtatgctagaatattgcaagcatttaaattcacatttatctgaagggatttatttatgtcaatattgtgaatattcaacaggacaaattgaagatcttaaaattcatctagatttcaagcattcagctgacttgcctcataaatgtagtgactgcttgatgaggtttggaaatgaaagggaattaataagtcaccttccagtccatgagacaacttgattattctctttaacttacagaatgttagtttaaaataataaattcatcctttttttggagatgattaaatggatgattgtaaacacaacttatgaaatctgcctttaacaagtaacttttttaaattataaaattttattggcattgctccattttctgtatataaatatatctttaatgtggtattttcaattgcgtgatagtttgtagtttcaaccactcttggtgactgtcatcctgtttcttccatattctctgatttcatgaattgaaaagaaacaaatgtattgaagaagtgagctacagttttccttccttaaccatgggtgctagtaactttttaaaactcaagacaagattagttttttatgtgtgaagtcattaaattattacacgaccagaactaaaatgcaatatacagttaagtccacggatactcccattaatgagaaataacactaggaagccactattacaggaagaaaagatttggttttcatggcagtctgtttttttaaaaaaaaatttttgagccactatctattgttgaatattttaagatgggatgagggaggaactaataagggcttacacaataaaaaataactatatcataactcattcataacttgatgtttcattttctgttgaggaaccataaattcattcacagacttaatatttttttcttagagatggtctcgttctgttgtccaggatggagtgcagtggttgatcatagctcccgggccgtagtctcccaggctcgagcaatcctcccacttcaccctcctgcatagctaggactacaggcatgtggcaccatgcccgctaagtttttaaatttcttgtagagatgagatctcgctatgttgcccaggccagtctcaaactcctggactcaagcaatcctcccaccttggccttccaaatcactgggattataggcatgagccattatgcctgactcttgcccaaatttctgatgtcaaattgttcattgacagaaaacccactgaagtatttaaagttaggaagatctgggagataggggttgctggcatgaaaatgtataacttacaacatttattaataaaatgataaattagcatc

SEQ ID NO: 884 - DNA, 3147 bp, Homo sapiens
gcccctgaggtgcgcggcgcaggcgcggagcgtggcggccagggcagtgcggccgcggagcctaggccaggggcctggcgctcagggcgtggggcgcgcggggagggagaggggtcggcccagcacagcgtccgggagcgctagggccggagcagcgctgcccgccgccgtgcgtccgcgggaaggaccgcgcggcccctccgcctgcgctctcggccgccgccgcctctgcgtgggccggccgggagggcctcgggggactgactgacagagtttcactcctgttacccaggctggaggacaatgatgtgatctcgggtcaccacaacctccgcctcccggattcaagcgattctcatgcctcagcctcccgagtagctcagattacaggcatgtgccaccacgcccggctaattttgtattttcagtcgagacggggtttccccatgttggtcaggctagtcttgaattcccgacctcaggtgatctgttcgcctcggcctcccaaagtgctgggattacaggcgtgaaccactgcacccggcgaggcattttttactgtctacagaaacttattgtaattcatttttcctcactccagtagtaagaattataccaaattgaaaagatatgaatgagtatcctaaaaaaagaaaaaggaagactctacacccttctcgttattcagattcctctggaataagcagaattgcagatggattcaatggaattttctctgatcattgttacagtgtctgttctatgagacagccagatttaaaatattttgacaacaaagatgatgattctgataccgagacgtcaaatgacttgccaaaatttgcagatggaatcaaggccagaaacagaaatcagaactacctggttcccagtcctgtacttagaattctagaccacactgccttttctacagaaaaatctgctgatattgtaatttgtgatgaagagtgtgactcacctgaatcagtcaaccagcaaacccaagaggagagtcctatagaagttcacactgctgaagatgttccaattgctgtagaagtgcatgcgatttctgaggattatgatatagagacagaaaacaattcctctgagagtctccaagaccaaactgatgaagaaccgccagctaaactttgtaaaattcttgacaagagccaagctttgaatgtgactgcccagcagaaatggcctttactgagagctaatagcagtggcctctataaatgtgaactttgtgagtttaacagcaaatatttttctgacttaaagcagcatatgatcctgaagcataaacgtactgattcaaatgtgtgtcgagtatgcaaggaaagtttctctaccaatatgcttctgatagaacatgccaaactgcatgaagaggatccctacatttgtaaatactgtgattataagacagtaatttttgagaacctcagccagcacattgcagacacccattttagtgatcacctctattggtgtgaacagtgtgatgtacagttctcctcaagcagtgaactctacctacatttccaggagcacagctgtgatgaacagtacttgtgtcagttctgtgaacatgaaactaatgatccagaagacttgcatagccatgtggtaaatgagcatgcatgtaaattaatagagttaagtgataagtataacaatggtgaacatggacagtatagcctcttaagcaaaattacctttgacaaatgtaaaaacttctttgtatgtcaagtatgtggttttcggagtagacttcacacaaatgttaacaggcatgttgctattgaacatacaaaaatttttcctcatgtttgtgatgactgtgggaaaggcttttcaagtatgctagaatattgcaagcatttaaattcacatttatctgaagggatttatttatgtcaatattgtgaatattcaacaggacaaattgaagatcttaaaattcatctagatttcaagcattcagctgacttgcctcataaatgtagtgactgcttgatgaggtttggaaatgaaagggaattaataagtcaccttccagtccatgagacaacttgattattctctttaacttacagaatgttagtttaaaataataaattcatcctttttttggagatgattaaatggatgattgtaaacacaacttatgaaatctgcctttaacaagtaacttttttaaattattattttcaattgcgtgatagtttgtagtttcaaccactcttggtgactgtcatcctgtttcttccatattctctgatttcatgaattgaaaagaaacaaatgtattgaagaagtgagctacagttttccttccttaaccatgggtgctagtaactttttaaaactcaagacaagattagttttttatgtgtgaagtcattaaattattacacgaccagaactaaaatgcaatatacagttaagtccacggatactcccattaatgagaaataacactaggaagccactattacaggaagaaaagatttggttttcatggcagtctgtttttttaaaaaaaaatttttgagccactatctattgttgaatattttaagatgggatgagggaggaactaataagggcttacacaataaaaaataactatatcataactcattcataacttgatgtttcattttctgttgaggaaccataaattcattcacagacttaatatttttttcttagagatggtctcgttctgttgtccaggatggagtgcagtggttgatcatagctcccgggccgtagtctcccaggctcgagcaatcctcccacttcaccctcctgcatagctaggactacaggcatgtggcaccatgcccgctaagtttttaaatttcttgtagagatgagatctcgctatgttgcccaggccagtctcaaactcctggactcaagcaatcctcccaccttggccttccaaatcactgggattataggcatgagccattatgcctgactcttgcccaaatttctgatgtcaaattgttcattgacagaaaacccactgaagtatttaaagttaggaagatctgggagataggggttgctggcatgaaaatgtataacttacaacatttattaataaaatgataaattagcatc

SEQ ID NO: 885 - DNA, 1523 bp, Homo sapiens
tttgtgtgaaaacccccccccaaaaaaaaaaaatttgttgggtttaaaaaaaaaaaaaaaaaaaccttttctttgtatgtcaagtatgtggttttcggagtagacttcacacaaatgttaacaggcatgttgctattgaacatacaaaaatttttcctcatgtttgtgatgactgtgggaaaggcttttcaagtatgctagaatattgcaagcatttaaattcacatttatctgaagggatttatttatgtcaatattgtgaatattcaacaggacaaattgaagatcttaaaattcatctagatttcaagcattcagctgacttgcctcataaatgtagtgactgcttgatgaggtttggaaatgaaagggaattaataagtcaccttccagtccatgagacaacttgattattctctttaacttacagaatgttagtttaaaataataaattcatcctttttttggagatgattaaatggatgattgtaaacacaacttatgaaatctgcctttaacaagtaacttttttaaattataaaattttattggcattgctccattttctgtatataaatatatctttaatgtggtattttcaattgcgtgatagtttgtagtttcaaccactcttggtgactgtcatcctgtttcttccatattctctgatttcatgaattgaaaagaaacaaatgtattgaagaagtgagctacagttttccttccttaaccatgggtgctagtaactttttaaaactcaagacaagattagttttttatgtgtgaagtcattaaattattacacgaccagaactaaaatgcaatatacagttaagtccacggatactcccattaatgagaaataacactaggaagccactattacaggaagaaaagatttggttttcatggcagtctgtttttttaaaaaaaaatttttgagccactatctattgttgaatattttaagatgggatgagggaggaactaataagggcttacacaataaaaaataactatatcataactcattcataacttgatgtttcattttctgttgaggaaccataaattcattcacagacttaatatttttttcttagagatggtctcgttctgttgtccaggatggagtgcagtggttgatcatagctcccgggccgtagtctcccaggctcgagcaatcctcccacttcaccctcctgcatagctaggactacaggcatgtggcaccatgcccgctaagtttttaaatttcttgtagagatgagatctcgctatgttgcccaggccagtctcaaactcctggactcaagcaatcctcccaccttggccttccaaatcactgggattataggcatgagccattatgcctgactcttgcccaaatttctgatgtcaaattgttcattgacagaaaacccactgaagtatttaaagttaggaagatctgggagataggggttgctggcatgaaaatgtataacttacaacatttattaataaaatgataaattagcatc

SEQ ID NO: 886 - DNA, 299 bp, Homo sapiens
aatcctaaggaacttcaaaaagtgtaatctagtccaaatggggcatcaattctaaagcatttgcttgtttgagcagattttctgtgtctgaggtatatagataacttatctttttatgactaaatccaagtccttagttcctgttggaattcaaaatcatatttaaaaattgatgctttgttctataattaatgctttgattgtataaataataagtattcttccaaatccctttttacagatgatgattctgataccgagacgtcaaatgacttgccaaaatttgcagatggaatcaa

SEQ ID NO: 887 - DNA, 617 bp, Homo sapiens
tacttccaatggtaggaaatgtgcctataaaactcctagtatggtgccataggcacagtgtttctttttttatatatacacaaaataaaatgacttaaacatgtggtttattgtaattatccagttctcacaatttatatcaacatttgaaaaagaattttttaacctccgtaagaaagaaaacagaaatcagtttctgccttgaaacctgactggaaaacaatctgaaatacaaacagaggcatcatttaacacttttcttataccatagattttcaggtggctcacatatttcatattgccaataaattcttcagttagaatttttataacgtcattaacagttgttatttgtgacatatttgttaattttttctcgttttttagattgaaaagatatgaatgagtatcctaaaaaaagaaaaaggaagactctacacccttctcgttattcaggtcagtgtataattattttaaagttgggtatggattaattcccacaaaattatattctcatccattttctcctaagtgatcagataagacttaaatatctgggtcaatatttaggtaaaacaacggtttaaatacattatctgaatatatattccttattg

SEQ ID NO: 888 - DNA, 814 bp, Homo sapiens
atggccgacctggaggagctctcccgcctgagccctctgccccccggcagcccgggttcggcggcgcggggccgggctgagccccccgaggaggaggaggaagaggaggaggaggaagaggaggcggaggccgaggcggtggcggcgctgctgctgaacggcggcagcggtgggggcggcggaggcggcggcggaggagtggggggcggcgaggcagagacgatgtcggagccgagccccgagagcgccagccaggccggggaggacgaagacgaggaggaggacgacgaggaggaggaagatgagagcagcagcagcggcgggggtgaggaggagagtagcgccgagagcctggtgggcagcagcggcgggagcagcagcgacgagacccgctcgttgagccccggcgccgccagcagcagcagcggggatggggacggcaaggagggcctggaggagcccaagggaccgcggggcagccagggcggcggcgggggcggcagcagtagcagcagcgtagtctccagcggcggcgacgagggctacgggactgggggaggcggaagcagcgcgacctccgggggccggcggggcagcttggagatgtcgtcggatggggaacccctgagccgcatggactcggaggacaggtcagtgctctgaagcgtttccccttcccttcctcctcttgaactcccgggcccctcagagggggaccaaggcgacgttttgccgcgatccccctgctccccgaatcctcggcccctcccccagactctcaactcggaaatctctcgccgtcgccgccgcgccc

SEQ ID NO: 889 - DNA, 5769 bp, Homo sapiens
atggccgacctggaggagctctcccgcctgagccctctgccccccggcagcccgggttcggcggcgcggggccgggctgagccccccgaggaggaggaggaagaggaggaggaggaagaggaggcggaggccgaggcggtggcggcgctgctgctgaacggcggcagcggtgggggcggcggaggcggcggcggaggagtggggggcggcgaggcagagacgatgtcggagccgagccccgagagcgccagccaggccggggaggacgaagacgaggaggaggacgacgaggaggaggaagatgagagcagcagcagcggcgggggtgaggaggagagtagcgccgagagcctggtgggcagcagcggcgggagcagcagcgacgagacccgctcgttgagccccggcgccgccagcagcagcagcggggatggggacggcaaggagggcctggaggagcccaagggaccgcggggcagccagggcggcggcgggggcggcagcagtagcagcagcgtagtctccagcggcggcgacgagggctacgggactgggggaggcggaagcagcgcgacctccgggggccggcggggcagcttggagatgtcgtcggatggggaacccctgagccgcatggactcggaggacagcataagcagtactataatggatgtagacagcacaatttccagtgggcgttcaactccagcaatgatgaatggacaaggaagcactacttcttcaagcaaaaatattgcctataattgttgttgggaccagtgccaggcttgcttcaactctagcccagatctggcagatcacatccgttccatacatgtagatggtcagcgaggaggggtatttgtttgcttatggaaaggttgtaaagtatataacactccatctaccagtcaaagttggttacaaaggcatatgctgacacacagtggagacaaacctttcaagtgtgttgttggtggctgcaatgccagctttgcttctcagggagggctagctcgtcatgtacccacacacttcagtcagcagaactcctcaaaagtttctagccagccaaaggccaaagaagaatctccttctaaagctggaatgaacaaaaggaggaaattaaagaacaaaagacgacgctcattaccacggccacatgatttcttcgatgcacaaacactggatgcgataagacatcgagccatatgctttaacctctcagctcatatagaaagtttagggaagggacacagtgttgtttttcatagtactgtaatagctaagagaaaagaagattctgggaagatcaaacttttgcttcattggatgcctgaagacattctgcctgatgtgtgggtgaatgaaagtgaacgacatcagttaaaaactaaagtagttcatttatcaaagctacccaaagatactgccttgcttttggacccaaacatatacagaacaatgccgcagaagaggttgaagaggtaaaaaataaataaatacataaaaagcaaacaagcggggacacctgcagtcttagtcactgacaatgggtttagggaaagttgcacattagagtcaaccccttcttttttttttttttttttttaaatccagtatttaggataatatttatgcttagtgtaaacattctggtgaatgaagtagactcttcgggtggaatatattaatatattactgtatatccacattttcatggaatggtactgtgggagactgagcaaacactcttttggcaacttagtagaacagcttcttaaaggctttgcatgcttgctgctttaagctgcttttttttttcttttcttccctttagtgatttcagtagtttatattggaaagaaaaacaattacaacatgtgcccttacaaataccaaaagcactgtaaggatatttgtcttgacagtgtttattgatttgaagtcatattaggaaatatttagacaatgaaaattatcaagagataatttacctttcaattatgataaatagatgtgattggttgccatttgtgttcttttgcagaactctgataagaaaagtgttcaatttgtatttaagcaaacagtgaacgacgtttgcaatcaactaaaaattcgtctatcgaattagggctgaaaattactgttaaagagtgttgcagtatgtctggtggctcccttttcaggactagggctttctcatggagtacagtatgttaatatttacctatataactaatctgttaacggtttttgaaaaacctttcaaattatttgaataatcttcatattttcatttaacctatatgactctaattttttttctgaggaaatcatttggtttttgagttgttttttcttaatgtaagaaaaattgtattttttttacaagtatcttcaaactgaatcttttatgcaccaaagttggtcttgaaaaggaaaataaaatcactttcttgcttggtaagcaagaagccatatcgattttttttaacttacagaaatggaaatatgtgtaacttgttagtattgtattaaacaaatgttgcatagagataatagaacattgcttgtaaataattcagcagatttgtaatatatttttatattttgaaatgtactgtagatgttttctagaggcatgaaagttaaatgtatatattatggtagaaataatattgaaggatattgtacttcactagtgctgccagaggaattgttaataaaagcaccttctttaacaataaatgtctttcacagacttaagggactatgtactactgttaatatctctaagaacaaaacacattgaacatccttccagaaagtctttgagggaggacctatacccataatagaattatggcactcatttctgacagtgatcaagaaatcagttatttccttactgttggaaggacattgtaaagtatgtggttatatgcagtgaaactgcagaaaatactcctggttgaggagttttcactttactacagtgatataaaaaccagcagtttttacactaaattttttaaagaaatattagacaaaaatatagaattaaaacctttggttccaaaatgggaaaggttccacgatacataaatcatttctcatttgctttaaaaaatttaaaagtgtaaaaattatgagagactttattcgttaacaatgggggtaaagagctatatacatgaaaatgagtcttataaaattaagtgaagtgcaaataaaagcactgctactataagacattctggaatggttgtttaataagggtattatccatttgatctatagcaatgtgattttatttttaaaaagaaaagcagtgtgttttctttttttgttgttttcttttgcttaagcacttcatcaattgctttattctgtatctgcgaagtaatctgcaatctcttttgttctttttaaaatttgatttgttataaaattgccaaatagaagtgtttcagatacatagtttgtacctgtatttttattttattgcctcatgttcttgtaagtcattcttaattgaccaatgattgtagaccttgcttgagtattttttctaataaaacaaagcaaatcacatttagcttcaaattgtaacaattcaattgaattttaaaatgacacctgaaaagatacatctgatattttctatatagagcacagtaaataagttttttcattgtgtagaaatacttagatgtcaaaaccagatttcgtgatccttgattaacttctgagtactcaatcaatcataatccttttgctgcttatctgatgttggtttgatactgttaacacaccaaaaagaatatggaattgaaatgagctagctttataacttgtatgtatacatatatacacataacatccaattatgactgggtaataagtgtgaaaattttaatttgtggttttcatttattaatgtctgcccatctgtattgttgctcctaccttcaaatatgacacctgaaataataagtctgttgtccagaatttatgtattgttcagcatcaagcaaactacagctcacaagcatacccatttatatgttgtctatgcctgctttctcctgcagtggcagaattgagtggtgagaccttaggtcctgcaagcccccaatttttactacaggttggcaatccctaatccaaaaatctgacataaaaaatgctccaaagttcaaaactttctgagtgctgacatcatgctgcaagtggaaaattccacgcctgacctcatgtgactggtcatagtcaaaacaattaagactttgtttcatgcacaaaattattaaaactgttgtataaaattaccttcagtctatgtgtataaggtgtttgtgagatataaatgaactttatgtttagtcttggatcgcatttctgagtctcattatgtatatgcagatactcaaaaatctgaaaaaaatcaaaaatctgaaatacttctggtcccaagcatttcggataagggatactcagcctgtctctggtcctttaagaaaaagttttcgattcctttgtctagttgacaaaaagtttggaaacataaacttagaccacacaacttgcattttaatatgacaatgttgatcttggtaataagccagtacattaaattttagtgaaagctgtttcatgtattttacagtaaatactgccatattaggtacctacaacaaatggtggtttttggaaacttttacggtgggtttttaaagttattaatagtccatcatttcatcatttgtgtttctgtatttattttgctaagaactaaataagattttgtacatcagattgtgtttgaaccgtaaggcacatctgctttatctaaaagaatcttaaggtggaaatagtgtaaaatttaaaattttttatatttctaataaactttttatatataaatgttacctaaagtggacacatgttacttctgaatttcacatgaaaggaaattaaagatggacaataattatctctcaatattttaagatttgttttactaattgaaaacagtatgtcagtaaatctttggccttagtgcttttttcccccttttacacattaataaaatgttttaaatatggtaatactcttaaaacggtagaatttgccacagttgtttaaagcatttttattttttctttgaattcttaattcatggtgaacagatgttgggttcttaaaatataaaaatgagaaaatatgtattaaaaatacttgatagagggttttctctttaatcacaacttaaaaaaagaaacctttaatacctctgcataagttctctgaaagaacttaaattcttagtttatatgaaaactgatatgtatgtctgtgtaacaaagcctgttgggtacaggtctacaaggagatactttgtttctaaaaaaggagttaaatcgtgtcacctgaattttttttttttgagataagtggacattttggggattttggttaaaacatatttctctattctaaaaattacagaatatgtattcataaaagggaagaaattgttagaaaatttcctgtgtacgtagtttgtttttaaattaaagaatcttgtgacctggtgtaggacattttgcatttgtaacactgcagttttaatatatttgctgttttttttaaaattagaatatgtttaaaatttaatggttatgaggctctgtagccttaaaatgttttatagtagtaaaatgtattattttcatcttaaaaaaaactaaatatttacat

SEQ ID NO: 890 - DNA, 5266 bp, Homo sapiens
atggccgacctggaggagctctcccgcctgagccctctgccccccggcagcccgggttcggcggcgcggggccgggctgagccccccgaggaggaggaggaagaggaggaggaggaagaggaggcggaggccgaggcggtggcggcgctgctgctgaacggcggcagcggtgggggcggcggaggcggcggcggaggagtggggggcggcgaggcagagacgatgtcggagccgagccccgagagcgccagccaggccggggaggacgaagacgaggaggaggacgacgaggaggaggaagatgagagcagcagcagcggcgggggtgaggaggagagtagcgccgagagcctggtgggcagcagcggcgggagcagcagcgacgagacccgctcgttgagccccggcgccgccagcagcagcagcggggatggggacggcaaggagggcctggaggagcccaagggaccgcggggcagccagggcggcggcgggggcggcagcagtagcagcagcgtagtctccagcggcggcgacgagggctacgggactgggggaggcggaagcagcgcgacctccgggggccggcggggcagcttggagatgtcgtcggatggggaacccctgagccgcatggactcggaggacagcataagcagtactataatggatgtagacagcacaatttccagtgggcgttcaactccagcaatgatgaatggacaaggaagcactacttcttcaagcaaaaatattgcctataattgttgttgggaccagtgccaggcttgcttcaactctagcccagatctggcagatcacatccgttccatacatgtagatggtcagcgaggaggggtatttgtttgcttatggaaaggttgtaaagtatataacactccatctaccagtcaaagttggttacaaaggcatatgctgacacacagtggagacaaacctttcaagtgtgttgttggtggctgcaatgccagctttgcttctcagggagggctagctcgtcatgtacccacacacttcagtcagcagaactcctcaaaagtttctagccagccaaaggccaaagaagaatctccttctaaagctggaatgaacaaaaggaggaaattaaagaacaaaagacgacgctcattaccacggccacatgatttcttcgatgcacaaacactggatgcgataagacatcgagccatatgctttaacctctcagctcatatagaaagtttagggaagggacacagtgttgtttttcatagtactgtaatagctaagagaaaagaagattctgggaagatcaaacttttgcttcattggatgcctgaagacattctgcctgatgtgtgggtgaatgaaagtgaacgacatcagttaaaaactaaagtagttcatttatcaaagctacccaaagatactgccttgcttttggacccaaacatatacagaacaatgccgcagaagaggttgaagaggtaaaaaataaataaatacataaaaagcaaacaagcggggacacctgcagtcttagtcactgacaatgggtttagggaaagttgcacattagagtcaaccccttcttttttttttttttttttttaaatccagtatttaggataatatttatgcttagtgtaaacattctggtgaatgaagtagactcttcgggtggaatatattaatatattactgtatatccacattttcatggaatggtactgtgggagactgagcaaacactcttttggcaacttagtagaacagcttcttaaaggctttgcatgcttgctgctttaagctgcttttttttttcttttcttccctttagtgatttcagtagtttatattggaaagaaaaacaattacaacatgtgcccttacaaataccaaaagcactgtaaggatatttgtcttgacagtgtttattgatttgaagtcatattaggaaatatttagacaatgaaaattatcaagagataatttacctttcaattatgataaatagatgtgattggttgccatttgtgttcttttgcagaactctgataagaaaagtgttcaatttgtatttaagcaaacagtgaacgacgtttgcaatcaactaaaaattcgtctatcgaattagggctgaaaattactgttaaagagtgttgcagtatgtctggtggctcccttttcaggactagggctttctcatggagtacagtatgttaatatttacctatataactaatctgttaacggtttttgaaaaacctttcaaattatttgaataatcttcatattttcatttaacctatatgactctaattttttttctgaggaaatcatttggtttttgagttgttttttcttaatgtaagaaaaattgtattttttttacaagtatcttcaaactgaatcttttatgcaccaaagttggtcttgaaaaggaaaataaaatcactttcttgcttggtaagcaagaagccatatcgattttttttaacttacagaaatggaaatatgtgtaacttgttagtattgtattaaacaaatgttgcatagagataatagaacattgcttgtaaataattcagcagatttgtaatatatttttatattttgaaatgtactgtagatgttttctagaggcatgaaagttaaatgtatatattatggtagaaataatattgaaggatattgtacttcactagtgctgccagaggaattgttaataaaagcaccttctttaacaataaatgtctttcacagacttaagggactatgtactactgttaatatctctaagaacaaaacacattgaacatccttccagaaagtctttgagggaggacctatacccataatagaattatggcactcatttctgacagtgatcaagaaatcagttatttccttactgttggaaggacattgtaaagtatgtggttatatgcagtgaaactgcagaaaatactcctggttgaggagttttcactttactacagtgatataaaaaccagcagtttttacactaaattttttaaagaaatattagacaaaaatatagaattaaaacctttggttccaaaatgggaaaggttccacgatacataaatcatttctcatttgctttaaaaaatttaaaagtgtaaaaattatgagagactttattcgttaacaatgggggtaaagagctatatacatgaaaatgagtcttataaaattaagtgaagtgcaaataaaagcactgctactataagacattctggaatggttgtttaataagggtattatccatttgatctatagcaatgtgattttatttttaaaaagaaaagcagtgtgttttctttttttgttgttttcttttgcttaagcacttcatcaattgctttattctgtatctgcgaagtaatctgcaatctcttttgttctttttaaaatttgatttgttataaaattgccaaatagaagtgtttcagatacatagtttgtacctgtatttttattttattgcctcatgttcttgtaagtcattcttaattgaccaatgattgtagaccttgcttgagtattttttctaataaaacaaagcaaatcacatttagcttcaaattgtaacaattcaattgaattttaaaatgacacctgaaaagatacatctgatattttctatatagagcacagtaaataagttttttcattgtgtagaaatacttagatgtcaaaaccagatttcgtgatccttgattaacttctgagtactcaatcaatcataatccttttgctgcttatctgatgttggtttgatactgttaacacaccaaaaagaatatggaattgaaatgagctagctttataacttgtatgtatacatatatacacataacatccaattatgactgggtaataagtgtgaaaattttaatttgtggttttcatttattaatgtctgcccatctgtattgttgctcctaccttcaaatatgacacctgaaataataagtctgttgtccagaatttatgtattgttcagcatcaagcaaactacagctcacaagcatacccatttatatgttgtctatgcctgctttctcctgcagtggcagaattgagtggtgagaccttaggtcctgcaagcccccaatttttactacaggttggcaatccctaatccaaaaatctgacataaaaaatgctccaaagttcaaaactttctgagtgctgacatcatgctgcaagtggaaaattccacgcctgacctcatgtgactggtcatagtcaaaacaattaagactttgtttcatgcacaaaattattaaaactgttgtataaaattaccttcagtctatgtgtataaggtgtttgtgagatataaatgaactttatgtttagtcttggatcgcatttctgagtctcattatgtatatgcagatactcaaaaatctgaaaaaaatcaaaaatctgaaatacttctggtcccaagcatttcggataagggatactcagcctgtctctggtcctttaagaaaaagttttcgattcctttgtctagttgacaaaaagtttggaaacataaacttagaccacacaacttgcattttaatatgacaatgttgatcttggtaataagccagtacattaaattttagtgaaagctgtttcatgtattttacagtaaatactgccatattaggtacctacaacaaatggtggtttttggaaacttttacggtgggtttttaaagttattaatagtccatcatttcatcatttgtgtttctgtatttattttgctaagaactaaataagattttgtacatcagattgtgtttgaaccgtaaggcacatctgctttatctaaaagaatcttaaggtggaaatagtgtaaaatttaaaattttttatatttctaataaactttttatatataaatgttaaaaaaaaaaaaaaaaaaaaaaaaaatttggggggggcttgggccctggaaaggtttctacaacccacttcgcgtgtgggcgccgcggggcgccccagtgtggtataggtgcacaacggcgcccaaaaagggtgttcccctcagggaaaacacccgggcgcaacactagaaaagcggccgggggattctccacccgatataaaaagaagcgcgcgggggggaaaccagggcgcttcttgaagcaaactcccagaatgggagggctcccagaagggcaatagcgggcgctcatctacgcggggggccacgaaagcgcgcaataaaattgca

SEQ ID NO: 891 - DNA, 3609 bp, Homo sapiens
atggccgacctggaggagctctcccgcctgagccctctgccccccggcagcccgggttcggcggcgcggggccgggctgagccccccgaggaggaggaggaagaggaggaggaggaagaggaggcggaggccgaggcggtggcggcgctgctgctgaacggcggcagcggtgggggcggcggaggcggcggcggaggagtggggggcggcgaggcagagacgatgtcggagccgagccccgagagcgccagccaggccggggaggacgaagacgaggaggaggacgacgaggaggaggaagatgagagcagcagcagcggcgggggtgaggaggagagtagcgccgagagcctggtgggcagcagcggcgggagcagcagcgacgagacccgctcgttgagccccggcgccgccagcagcagcagcggggatggggacggcaaggagggcctggaggagcccaagggaccgcggggcagccagggcggcggcgggggcggcagcagtagcagcagcgtagtctccagcggcggcgacgagggctacgggactgggggaggcggaagcagcgcgacctccgggggccggcggggcagcttggagatgtcgtcggatggggaacccctgagccgcatggactcggaggacagcataagcagtactataatggatgtagacagcacaatttccagtgggcgttcaactccagcaatgatgaatggacaaggaagcactacttcttcaagcaaaaatattgcctataattgttgttgggaccagtgccaggcttgcttcaactctagcccagatctggcagatcacatccgttccatacatgtagatggtcagcgaggaggggtatttgtttgcttatggaaaggttgtaaagtatataacactccatctaccagtcaaagttggttacaaaggcatatgctgacacacagtggagacaaacctttcaagtgtgttgttggtggctgcaatgccagctttgcttctcagggagggctagctcgtcatgtacccacacacttcagtcagcagaactcctcaaaagtttctagccagccaaaggccaaagaagaatctccttctaaagctggaatgaacaaaaggaggaaattaaagaacaaaagacgacgctcattaccacggccacatgatttcttcgatgcacaaacactggatgcgataagacatcgagccatatgctttaacctctcagctcatatagaaagtttagggaagggacacagtgttgtttttcatagtactgtaatagctaagagaaaagaagattctgggaagatcaaacttttgcttcattggatgcctgaagacattctgcctgatgtgtgggtgaatgaaagtgaacgacatcagttaaaaactaaagtagttcatttatcaaagctacccaaagatactgccttgcttttggacccaaacatatacagaacaatgccgcagaagaggttgaagaggtaaaaaataaataaatacataaaaagcaaacaagcggggacacctgcagtcttagtcactgacaatgggtttagggaaagttgcacattagagtcaaccccttcttttttttttttttttttttaaatccagtatttaggataatatttatgcttagtgtaaacattctggtgaatgaagtagactcttcgggtggaatatattaatatattactgtatatccacattttcatggaatggtactgtgggagactgagcaaacactcttttggcaacttagtagaacagcttcttaaaggctttgcatgcttgctgctttaagctgcttttttttttcttttcttccctttagtgatttcagtagtttatattggaaagaaaaacaattacaacatgtgcccttacaaataccaaaagcactgtaaggatatttgtcttgacagtgtttattgatttgaagtcatattaggaaatatttagacaatgaaaattatcaagagataatttacctttcaattatgataaatagatgtgattggttgccatttgtgttcttttgcagaactctgataagaaaagtgttcaatttgtatttaagcaaacagtgaacgacgtttgcaatcaactaaaaattcgtctatcgaattagggctgaaaattactgttaaagagtgttgcagtatgtctggtggctcccttttcaggactagggctttctcatggagtacagtatgttaatatttacctatataactaatctgttaacggtttttgaaaaacctttcaaattatttgaataatcttcatattttcatttaacctatatgactctaattttttttctgaggaaatcatttggtttttgagttgttttttcttaatgtaagaaaaattgtattttttttacaagtatcttcaaactgaatcttttatgcaccaaagttggtcttgaaaaggaaaataaaatcactttcttgcttggtaagcaagaagccatatcgattttttttaacttacagaaatggaaatatgtgtaacttgttagtattgtattaaacaaatgttgcatagagataatagaacattgcttgtaaataattcagcagatttgtaatatatttttatattttgaaatgtactgtagatgttttctagaggcatgaaagttaaatgtatatattatggtagaaataatattgaaggatattgtacttcactagtgctgccagaggaattgttaataaaagcaccttctttaacaataaatgtctttcacagacttaagggactatgtactactgttaatatctctaagaacaaaacacattgaacatccttccagaaagtctttgagggaggacctatacccataatagaattatggcactcatttctgacagtgatcaagaaatcagttatttccttactgttggaaggacattgtaaagtatgtggttatatgcagtgaaactgcagaaaatactcctggttgaggagttttcactttactacagtgatataaaaaccagcagtttttacactaaattttttaaagaaatattagacaaaaatatagaattaaaacctttggttccaaaatgggaaaggttccacgatacataaatcatttctcatttgctttaaaaaatttaaaagtgtaaaaattatgagagactttattcgttaacaatgggggtaaagagctatatacatgaaaatgagtcttataaaattaagtgaagtgcaaataaaagcactgctactataagacattctggaatggttgtttaataagggtattatccatttgatctatagcaatgtgattttatttttaaaaagaaaagcagtgtgttttctttttttgttgttttcttttgcttaagcacttcatcaattgctttattctgtatctgcgaagtaatctgcaatctcttttgttctttttaaaatttgatttgttataaaattgccaaatagaagtgtttcagatacatagtttgtacctgtatttttattttattgcctcatgttcttgtaagtcattcttaattgaccaatgattgtagaccttgcttgagtattttttctaataaaacaaagcaaatcacatttagcttc

SEQ ID NO: 892 - DNA, 5170 bp, Homo sapiens
acttcccgctcgaccctcggttctggacaacggagatcgtccccagtcaagcataagcagtactataatggatgtagacagcacaatttccagtgggcgttcaactccagcaatgatgaatggacaaggaagcactacttcttcaagcaaaaatattgcctataattgttgttgggaccagtgccaggcttgcttcaactctagcccagatctggcagatcacatccgttccatacatgtagatggtcagcgaggaggggtatttgtttgcttatggaaaggttgtaaagtatataacactccatctaccagtcaaagttggttacaaaggcatatgctgacacacagtggagacaaacctttcaagtgtgttgttggtggctgcaatgccagctttgcttctcagggagggctagctcgtcatgtacccacacacttcagtcagcagaactcctcaaaagtttctagccagccaaaggccaaagaagaatctccttctaaagctggaatgaacaaaaggaggaaattaaagaacaaaagacgacgctcattaccacggccacatgatttcttcgatgcacaaacactggatgcgataagacatcgagccatatgctttaacctctcagctcatatagaaagtttagggaagggacacagtgttgtttttcatagtactgtaatagctaagagaaaagaagattctgggaagatcaaacttttgcttcattggatgcctgaagacattctgcctgatgtgtgggtgaatgaaagtgaacgacatcagttaaaaactaaagtagttcatttatcaaagctacccaaagatactgccttgcttttggacccaaacatatacagaacaatgccgcagaagaggttgaagaggtaaaaaataaataaatacataaaaagcaaacaagcggggacacctgcagtcttagtcactgacaatgggtttagggaaagttgcacattagagtcaaccccttcttttttttttttttttttttaaatccagtatttaggataatatttatgcttagtgtaaacattctggtgaatgaagtagactcttcgggtggaatatattaatatattactgtatatccacattttcatggaatggtactgtgggagactgagcaaacactcttttggcaacttagtagaacagcttcttaaaggctttgcatgcttgctgctttaagctgcttttttttttcttttcttccctttagtgatttcagtagtttatattggaaagaaaaacaattacaacatgtgcccttacaaataccaaaagcactgtaaggatatttgtcttgacagtgtttattgatttgaagtcatattaggaaatatttagacaatgaaaattatcaagagataatttacctttcaattatgataaatagatgtgattggttgccatttgtgttcttttgcagaactctgataagaaaagtgttcaatttgtatttaagcaaacagtgaacgacgtttgcaatcaactaaaaattcgtctatcgaattagggctgaaaattactgttaaagagtgttgcagtatgtctggtggctcccttttcaggactagggctttctcatggagtacagtatgttaatatttacctatataactaatctgttaacggtttttgaaaaacctttcaaattatttgaataatcttcatattttcatttaacctatatgactctaattttttttctgaggaaatcatttggtttttgagttgttttttcttaatgtaagaaaaattgtattttttttacaagtatcttcaaactgaatcttttatgcaccaaagttggtcttgaaaaggaaaataaaatcactttcttgcttggtaagcaagaagccatatcgattttttttaacttacagaaatggaaatatgtgtaacttgttagtattgtattaaacaaatgttgcatagagataatagaacattgcttgtaaataattcagcagatttgtaatatatttttatattttgaaatgtactgtagatgttttctagaggcatgaaagttaaatgtatatattatggtagaaataatattgaaggatattgtacttcactagtgctgccagaggaattgttaataaaagcaccttctttaacaataaatgtctttcacagacttaagggactatgtactactgttaatatctctaagaacaaaacacattgaacatccttccagaaagtctttgagggaggacctatacccataatagaattatggcactcatttctgacagtgatcaagaaatcagttatttccttactgttggaaggacattgtaaagtatgtggttatatgcagtgaaactgcagaaaatactcctggttgaggagttttcactttactacagtgatataaaaaccagcagtttttacactaaattttttaaagaaatattagacaaaaatatagaattaaaacctttggttccaaaatgggaaaggttccacgatacataaatcatttctcatttgctttaaaaaatttaaaagtgtaaaaattatgagagactttattcgttaacaatgggggtaaagagctatatacatgaaaatgagtcttataaaattaagtgaagtgcaaataaaagcactgctactataagacattctggaatggttgtttaataagggtattatccatttgatctatagcaatgtgattttatttttaaaaagaaaagcagtgtgttttctttttttgttgttttcttttgcttaagcacttcatcaattgctttattctgtatctgcgaagtaatctgcaatctcttttgttctttttaaaatttgatttgttataaaattgccaaatagaagtgtttcagatacatagtttgtacctgtatttttattttattgcctcatgttcttgtaagtcattcttaattgaccaatgattgtagaccttgcttgagtattttttctaataaaacaaagcaaatcacatttagcttcaaattgtaacaattcaattgaattttaaaatgacacctgaaaagatacatctgatattttctatatagagcacagtaaataagttttttcattgtgtagaaatacttagatgtcaaaaccagatttcgtgatccttgattaacttctgagtactcaatcaatcataatccttttgctgcttatctgatgttggtttgatactgttaacacaccaaaaagaatatggaattgaaatgagctagctttataacttgtatgtatacatatatacacataacatccaattatgactgggtaataagtgtgaaaattttaatttgtggttttcatttattaatgtctgcccatctgtattgttgctcctaccttcaaatatgacacctgaaataataagtctgttgtccagaatttatgtattgttcagcatcaagcaaactacagctcacaagcatacccatttatatgttgtctatgcctgctttctcctgcagtggcagaattgagtggtgagaccttaggtcctgcaagcccccaatttttactacaggttggcaatccctaatccaaaaatctgacataaaaaatgctccaaagttcaaaactttctgagtgctgacatcatgctgcaagtggaaaattccacgcctgacctcatgtgactggtcatagtcaaaacaattaagactttgtttcatgcacaaaattattaaaactgttgtataaaattaccttcagtctatgtgtataaggtgtttgtgagatataaatgaactttatgtttagtcttggatcgcatttctgagtctcattatgtatatgcagatactcaaaaatctgaaaaaaatcaaaaatctgaaatacttctggtcccaagcatttcggataagggatactcagcctgtctctggtcctttaagaaaaagttttcgattcctttgtctagttgacaaaaagtttggaaacataaacttagaccacacaacttgcattttaatatgacaatgttgatcttggtaataagccagtacattaaattttagtgaaagctgtttcatgtattttacagtaaatactgccatattaggtacctacaacaaatggtggtttttggaaacttttacggtgggtttttaaagttattaatagtccatcatttcatcatttgtgtttctgtatttattttgctaagaactaaataagattttgtacatcagattgtgtttgaaccgtaaggcacatctgctttatctaaaagaatcttaaggtggaaatagtgtaaaatttaaaattttttatatttctaataaactttttatatataaatgttacctaaagtggacacatgttacttctgaatttcacatgaaaggaaattaaagatggacaataattatctctcaatattttaagatttgttttactaattgaaaacagtatgtcagtaaatctttggccttagtgcttttttcccccttttacacattaataaaatgttttaaatatggtaatactcttaaaacggtagaatttgccacagttgtttaaagcatttttattttttctttgaattcttaattcatggtgaacagatgttgggttcttaaaatataaaaatgagaaaatatgtattaaaaatacttgatagagggttttctctttaatcacaacttaaaaaaagaaacctttaatacctctgcataagttctctgaaagaacttaaattcttagtttatatgaaaactgatatgtatgtctgtgtaacaaagcctgttgggtacaggtctacaaggagatactttgtttctaaaaaaggagttaaatcgtgtcacctgaattttttttttttgagataagtggacattttggggattttggttaaaacatatttctctattctaaaaattacagaatatgtattcataaaagggaagaaattgttagaaaatttcctgtgtacgtagtttgtttttaaattaaagaatcttgtgacctggtgtaggacattttgcatttgtaacactgcagttttaatatatttgctgttttttttaaaattagaatatgtttaaaatttaatggttatgaggctctgtagccttaaaatgttttatagtagtaaaatgtattattttcatcttaaaaaaaactaaatatttacat

SEQ ID NO: 893 - DNA, 5262 bp, Homo sapiens
acttcccgctcgaccctcggttctggacaacggagatcgtccccagtcaaggtgattatatcgcagatctcacttgggagcttctcttaacctgtgaccatcgcctgagttagctggccgacttcccagcggtcctttgtgagcataagcagtactataatggatgtagacagcacaatttccagtgggcgttcaactccagcaatgatgaatggacaaggaagcactacttcttcaagcaaaaatattgcctataattgttgttgggaccagtgccaggcttgcttcaactctagcccagatctggcagatcacatccgttccatacatgtagatggtcagcgaggaggggtatttgtttgcttatggaaaggttgtaaagtatataacactccatctaccagtcaaagttggttacaaaggcatatgctgacacacagtggagacaaacctttcaagtgtgttgttggtggctgcaatgccagctttgcttctcagggagggctagctcgtcatgtacccacacacttcagtcagcagaactcctcaaaagtttctagccagccaaaggccaaagaagaatctccttctaaagctggaatgaacaaaaggaggaaattaaagaacaaaagacgacgctcattaccacggccacatgatttcttcgatgcacaaacactggatgcgataagacatcgagccatatgctttaacctctcagctcatatagaaagtttagggaagggacacagtgttgtttttcatagtactgtaatagctaagagaaaagaagattctgggaagatcaaacttttgcttcattggatgcctgaagacattctgcctgatgtgtgggtgaatgaaagtgaacgacatcagttaaaaactaaagtagttcatttatcaaagctacccaaagatactgccttgcttttggacccaaacatatacagaacaatgccgcagaagaggttgaagaggtaaaaaataaataaatacataaaaagcaaacaagcggggacacctgcagtcttagtcactgacaatgggtttagggaaagttgcacattagagtcaaccccttcttttttttttttttttttttaaatccagtatttaggataatatttatgcttagtgtaaacattctggtgaatgaagtagactcttcgggtggaatatattaatatattactgtatatccacattttcatggaatggtactgtgggagactgagcaaacactcttttggcaacttagtagaacagcttcttaaaggctttgcatgcttgctgctttaagctgcttttttttttcttttcttccctttagtgatttcagtagtttatattggaaagaaaaacaattacaacatgtgcccttacaaataccaaaagcactgtaaggatatttgtcttgacagtgtttattgatttgaagtcatattaggaaatatttagacaatgaaaattatcaagagataatttacctttcaattatgataaatagatgtgattggttgccatttgtgttcttttgcagaactctgataagaaaagtgttcaatttgtatttaagcaaacagtgaacgacgtttgcaatcaactaaaaattcgtctatcgaattagggctgaaaattactgttaaagagtgttgcagtatgtctggtggctcccttttcaggactagggctttctcatggagtacagtatgttaatatttacctatataactaatctgttaacggtttttgaaaaacctttcaaattatttgaataatcttcatattttcatttaacctatatgactctaattttttttctgaggaaatcatttggtttttgagttgttttttcttaatgtaagaaaaattgtattttttttacaagtatcttcaaactgaatcttttatgcaccaaagttggtcttgaaaaggaaaataaaatcactttcttgcttggtaagcaagaagccatatcgattttttttaacttacagaaatggaaatatgtgtaacttgttagtattgtattaaacaaatgttgcatagagataatagaacattgcttgtaaataattcagcagatttgtaatatatttttatattttgaaatgtactgtagatgttttctagaggcatgaaagttaaatgtatatattatggtagaaataatattgaaggatattgtacttcactagtgctgccagaggaattgttaataaaagcaccttctttaacaataaatgtctttcacagacttaagggactatgtactactgttaatatctctaagaacaaaacacattgaacatccttccagaaagtctttgagggaggacctatacccataatagaattatggcactcatttctgacagtgatcaagaaatcagttatttccttactgttggaaggacattgtaaagtatgtggttatatgcagtgaaactgcagaaaatactcctggttgaggagttttcactttactacagtgatataaaaaccagcagtttttacactaaattttttaaagaaatattagacaaaaatatagaattaaaacctttggttccaaaatgggaaaggttccacgatacataaatcatttctcatttgctttaaaaaatttaaaagtgtaaaaattatgagagactttattcgttaacaatgggggtaaagagctatatacatgaaaatgagtcttataaaattaagtgaagtgcaaataaaagcactgctactataagacattctggaatggttgtttaataagggtattatccatttgatctatagcaatgtgattttatttttaaaaagaaaagcagtgtgttttctttttttgttgttttcttttgcttaagcacttcatcaattgctttattctgtatctgcgaagtaatctgcaatctcttttgttctttttaaaatttgatttgttataaaattgccaaatagaagtgtttcagatacatagtttgtacctgtatttttattttattgcctcatgttcttgtaagtcattcttaattgaccaatgattgtagaccttgcttgagtattttttctaataaaacaaagcaaatcacatttagcttcaaattgtaacaattcaattgaattttaaaatgacacctgaaaagatacatctgatattttctatatagagcacagtaaataagttttttcattgtgtagaaatacttagatgtcaaaaccagatttcgtgatccttgattaacttctgagtactcaatcaatcataatccttttgctgcttatctgatgttggtttgatactgttaacacaccaaaaagaatatggaattgaaatgagctagctttataacttgtatgtatacatatatacacataacatccaattatgactgggtaataagtgtgaaaattttaatttgtggttttcatttattaatgtctgcccatctgtattgttgctcctaccttcaaatatgacacctgaaataataagtctgttgtccagaatttatgtattgttcagcatcaagcaaactacagctcacaagcatacccatttatatgttgtctatgcctgctttctcctgcagtggcagaattgagtggtgagaccttaggtcctgcaagcccccaatttttactacaggttggcaatccctaatccaaaaatctgacataaaaaatgctccaaagttcaaaactttctgagtgctgacatcatgctgcaagtggaaaattccacgcctgacctcatgtgactggtcatagtcaaaacaattaagactttgtttcatgcacaaaattattaaaactgttgtataaaattaccttcagtctatgtgtataaggtgtttgtgagatataaatgaactttatgtttagtcttggatcgcatttctgagtctcattatgtatatgcagatactcaaaaatctgaaaaaaatcaaaaatctgaaatacttctggtcccaagcatttcggataagggatactcagcctgtctctggtcctttaagaaaaagttttcgattcctttgtctagttgacaaaaagtttggaaacataaacttagaccacacaacttgcattttaatatgacaatgttgatcttggtaataagccagtacattaaattttagtgaaagctgtttcatgtattttacagtaaatactgccatattaggtacctacaacaaatggtggtttttggaaacttttacggtgggtttttaaagttattaatagtccatcatttcatcatttgtgtttctgtatttattttgctaagaactaaataagattttgtacatcagattgtgtttgaaccgtaaggcacatctgctttatctaaaagaatcttaaggtggaaatagtgtaaaatttaaaattttttatatttctaataaactttttatatataaatgttacctaaagtggacacatgttacttctgaatttcacatgaaaggaaattaaagatggacaataattatctctcaatattttaagatttgttttactaattgaaaacagtatgtcagtaaatctttggccttagtgcttttttcccccttttacacattaataaaatgttttaaatatggtaatactcttaaaacggtagaatttgccacagttgtttaaagcatttttattttttctttgaattcttaattcatggtgaacagatgttgggttcttaaaatataaaaatgagaaaatatgtattaaaaatacttgatagagggttttctctttaatcacaacttaaaaaaagaaacctttaatacctctgcataagttctctgaaagaacttaaattcttagtttatatgaaaactgatatgtatgtctgtgtaacaaagcctgttgggtacaggtctacaaggagatactttgtttctaaaaaaggagttaaatcgtgtcacctgaattttttttttttgagataagtggacattttggggattttggttaaaacatatttctctattctaaaaattacagaatatgtattcataaaagggaagaaattgttagaaaatttcctgtgtacgtagtttgtttttaaattaaagaatcttgtgacctggtgtaggacattttgcatttgtaacactgcagttttaatatatttgctgttttttttaaaattagaatatgtttaaaatttaatggttatgaggctctgtagccttaaaatgttttatagtagtaaaatgtattattttcatcttaaaaaaaactaaatatttacat

SEQ ID NO: 894 - DNA, 5189 bp, Homo sapiens
aaccggcgactttagaggacccccatcggaacccaatgagccgcatggactcggaggacagcatattttgcataagcagtactataatggatgtagacagcacaatttccagtgggcgttcaactccagcaatgatgaatggacaaggaagcactacttcttcaagcaaaaatattgcctataattgttgttgggaccagtgccaggcttgcttcaactctagcccagatctggcagatcacatccgttccatacatgtagatggtcagcgaggaggggtatttgtttgcttatggaaaggttgtaaagtatataacactccatctaccagtcaaagttggttacaaaggcatatgctgacacacagtggagacaaacctttcaagtgtgttgttggtggctgcaatgccagctttgcttctcagggagggctagctcgtcatgtacccacacacttcagtcagcagaactcctcaaaagtttctagccagccaaaggccaaagaagaatctccttctaaagctggaatgaacaaaaggaggaaattaaagaacaaaagacgacgctcattaccacggccacatgatttcttcgatgcacaaacactggatgcgataagacatcgagccatatgctttaacctctcagctcatatagaaagtttagggaagggacacagtgttgtttttcatagtactgtaatagctaagagaaaagaagattctgggaagatcaaacttttgcttcattggatgcctgaagacattctgcctgatgtgtgggtgaatgaaagtgaacgacatcagttaaaaactaaagtagttcatttatcaaagctacccaaagatactgccttgcttttggacccaaacatatacagaacaatgccgcagaagaggttgaagaggtaaaaaataaataaatacataaaaagcaaacaagcggggacacctgcagtcttagtcactgacaatgggtttagggaaagttgcacattagagtcaaccccttcttttttttttttttttttttaaatccagtatttaggataatatttatgcttagtgtaaacattctggtgaatgaagtagactcttcgggtggaatatattaatatattactgtatatccacattttcatggaatggtactgtgggagactgagcaaacactcttttggcaacttagtagaacagcttcttaaaggctttgcatgcttgctgctttaagctgcttttttttttcttttcttccctttagtgatttcagtagtttatattggaaagaaaaacaattacaacatgtgcccttacaaataccaaaagcactgtaaggatatttgtcttgacagtgtttattgatttgaagtcatattaggaaatatttagacaatgaaaattatcaagagataatttacctttcaattatgataaatagatgtgattggttgccatttgtgttcttttgcagaactctgataagaaaagtgttcaatttgtatttaagcaaacagtgaacgacgtttgcaatcaactaaaaattcgtctatcgaattagggctgaaaattactgttaaagagtgttgcagtatgtctggtggctcccttttcaggactagggctttctcatggagtacagtatgttaatatttacctatataactaatctgttaacggtttttgaaaaacctttcaaattatttgaataatcttcatattttcatttaacctatatgactctaattttttttctgaggaaatcatttggtttttgagttgttttttcttaatgtaagaaaaattgtattttttttacaagtatcttcaaactgaatcttttatgcaccaaagttggtcttgaaaaggaaaataaaatcactttcttgcttggtaagcaagaagccatatcgattttttttaacttacagaaatggaaatatgtgtaacttgttagtattgtattaaacaaatgttgcatagagataatagaacattgcttgtaaataattcagcagatttgtaatatatttttatattttgaaatgtactgtagatgttttctagaggcatgaaagttaaatgtatatattatggtagaaataatattgaaggatattgtacttcactagtgctgccagaggaattgttaataaaagcaccttctttaacaataaatgtctttcacagacttaagggactatgtactactgttaatatctctaagaacaaaacacattgaacatccttccagaaagtctttgagggaggacctatacccataatagaattatggcactcatttctgacagtgatcaagaaatcagttatttccttactgttggaaggacattgtaaagtatgtggttatatgcagtgaaactgcagaaaatactcctggttgaggagttttcactttactacagtgatataaaaaccagcagtttttacactaaattttttaaagaaatattagacaaaaatatagaattaaaacctttggttccaaaatgggaaaggttccacgatacataaatcatttctcatttgctttaaaaaatttaaaagtgtaaaaattatgagagactttattcgttaacaatgggggtaaagagctatatacatgaaaatgagtcttataaaattaagtgaagtgcaaataaaagcactgctactataagacattctggaatggttgtttaataagggtattatccatttgatctatagcaatgtgattttatttttaaaaagaaaagcagtgtgttttctttttttgttgttttcttttgcttaagcacttcatcaattgctttattctgtatctgcgaagtaatctgcaatctcttttgttctttttaaaatttgatttgttataaaattgccaaatagaagtgtttcagatacatagtttgtacctgtatttttattttattgcctcatgttcttgtaagtcattcttaattgaccaatgattgtagaccttgcttgagtattttttctaataaaacaaagcaaatcacatttagcttcaaattgtaacaattcaattgaattttaaaatgacacctgaaaagatacatctgatattttctatatagagcacagtaaataagttttttcattgtgtagaaatacttagatgtcaaaaccagatttcgtgatccttgattaacttctgagtactcaatcaatcataatccttttgctgcttatctgatgttggtttgatactgttaacacaccaaaaagaatatggaattgaaatgagctagctttataacttgtatgtatacatatatacacataacatccaattatgactgggtaataagtgtgaaaattttaatttgtggttttcatttattaatgtctgcccatctgtattgttgctcctaccttcaaatatgacacctgaaataataagtctgttgtccagaatttatgtattgttcagcatcaagcaaactacagctcacaagcatacccatttatatgttgtctatgcctgctttctcctgcagtggcagaattgagtggtgagaccttaggtcctgcaagcccccaatttttactacaggttggcaatccctaatccaaaaatctgacataaaaaatgctccaaagttcaaaactttctgagtgctgacatcatgctgcaagtggaaaattccacgcctgacctcatgtgactggtcatagtcaaaacaattaagactttgtttcatgcacaaaattattaaaactgttgtataaaattaccttcagtctatgtgtataaggtgtttgtgagatataaatgaactttatgtttagtcttggatcgcatttctgagtctcattatgtatatgcagatactcaaaaatctgaaaaaaatcaaaaatctgaaatacttctggtcccaagcatttcggataagggatactcagcctgtctctggtcctttaagaaaaagttttcgattcctttgtctagttgacaaaaagtttggaaacataaacttagaccacacaacttgcattttaatatgacaatgttgatcttggtaataagccagtacattaaattttagtgaaagctgtttcatgtattttacagtaaatactgccatattaggtacctacaacaaatggtggtttttggaaacttttacggtgggtttttaaagttattaatagtccatcatttcatcatttgtgtttctgtatttattttgctaagaactaaataagattttgtacatcagattgtgtttgaaccgtaaggcacatctgctttatctaaaagaatcttaaggtggaaatagtgtaaaatttaaaattttttatatttctaataaactttttatatataaatgttacctaaagtggacacatgttacttctgaatttcacatgaaaggaaattaaagatggacaataattatctctcaatattttaagatttgttttactaattgaaaacagtatgtcagtaaatctttggccttagtgcttttttcccccttttacacattaataaaatgttttaaatatggtaatactcttaaaacggtagaatttgccacagttgtttaaagcatttttattttttctttgaattcttaattcatggtgaacagatgttgggttcttaaaatataaaaatgagaaaatatgtattaaaaatacttgatagagggttttctctttaatcacaacttaaaaaaagaaacctttaatacctctgcataagttctctgaaagaacttaaattcttagtttatatgaaaactgatatgtatgtctgtgtaacaaagcctgttgggtacaggtctacaaggagatactttgtttctaaaaaaggagttaaatcgtgtcacctgaattttttttttttgagataagtggacattttggggattttggttaaaacatatttctctattctaaaaattacagaatatgtattcataaaagggaagaaattgttagaaaatttcctgtgtacgtagtttgtttttaaattaaagaatcttgtgacctggtgtaggacattttgcatttgtaacactgcagttttaatatatttgctgttttttttaaaattagaatatgtttaaaatttaatggttatgaggctctgtagccttaaaatgttttatagtagtaaaatgtattattttcatcttaaaaaaaactaaatatttacat

SEQ ID NO: 895 - DNA, 5240 bp, Homo sapiens
cctcggcgcttcgctcctcacggacctcaggacggctctaactcggaaacagtccccaaacgggcccagatcctctggcggagcagaagagggccttgatgtacacacgtcggtactcaagcataagcagtactataatggatgtagacagcacaatttccagtgggcgttcaactccagcaatgatgaatggacaaggaagcactacttcttcaagcaaaaatattgcctataattgttgttgggaccagtgccaggcttgcttcaactctagcccagatctggcagatcacatccgttccatacatgtagatggtcagcgaggaggggtatttgtttgcttatggaaaggttgtaaagtatataacactccatctaccagtcaaagttggttacaaaggcatatgctgacacacagtggagacaaacctttcaagtgtgttgttggtggctgcaatgccagctttgcttctcagggagggctagctcgtcatgtacccacacacttcagtcagcagaactcctcaaaagtttctagccagccaaaggccaaagaagaatctccttctaaagctggaatgaacaaaaggaggaaattaaagaacaaaagacgacgctcattaccacggccacatgatttcttcgatgcacaaacactggatgcgataagacatcgagccatatgctttaacctctcagctcatatagaaagtttagggaagggacacagtgttgtttttcatagtactgtaatagctaagagaaaagaagattctgggaagatcaaacttttgcttcattggatgcctgaagacattctgcctgatgtgtgggtgaatgaaagtgaacgacatcagttaaaaactaaagtagttcatttatcaaagctacccaaagatactgccttgcttttggacccaaacatatacagaacaatgccgcagaagaggttgaagaggtaaaaaataaataaatacataaaaagcaaacaagcggggacacctgcagtcttagtcactgacaatgggtttagggaaagttgcacattagagtcaaccccttcttttttttttttttttttttaaatccagtatttaggataatatttatgcttagtgtaaacattctggtgaatgaagtagactcttcgggtggaatatattaatatattactgtatatccacattttcatggaatggtactgtgggagactgagcaaacactcttttggcaacttagtagaacagcttcttaaaggctttgcatgcttgctgctttaagctgcttttttttttcttttcttccctttagtgatttcagtagtttatattggaaagaaaaacaattacaacatgtgcccttacaaataccaaaagcactgtaaggatatttgtcttgacagtgtttattgatttgaagtcatattaggaaatatttagacaatgaaaattatcaagagataatttacctttcaattatgataaatagatgtgattggttgccatttgtgttcttttgcagaactctgataagaaaagtgttcaatttgtatttaagcaaacagtgaacgacgtttgcaatcaactaaaaattcgtctatcgaattagggctgaaaattactgttaaagagtgttgcagtatgtctggtggctcccttttcaggactagggctttctcatggagtacagtatgttaatatttacctatataactaatctgttaacggtttttgaaaaacctttcaaattatttgaataatcttcatattttcatttaacctatatgactctaattttttttctgaggaaatcatttggtttttgagttgttttttcttaatgtaagaaaaattgtattttttttacaagtatcttcaaactgaatcttttatgcaccaaagttggtcttgaaaaggaaaataaaatcactttcttgcttggtaagcaagaagccatatcgattttttttaacttacagaaatggaaatatgtgtaacttgttagtattgtattaaacaaatgttgcatagagataatagaacattgcttgtaaataattcagcagatttgtaatatatttttatattttgaaatgtactgtagatgttttctagaggcatgaaagttaaatgtatatattatggtagaaataatattgaaggatattgtacttcactagtgctgccagaggaattgttaataaaagcaccttctttaacaataaatgtctttcacagacttaagggactatgtactactgttaatatctctaagaacaaaacacattgaacatccttccagaaagtctttgagggaggacctatacccataatagaattatggcactcatttctgacagtgatcaagaaatcagttatttccttactgttggaaggacattgtaaagtatgtggttatatgcagtgaaactgcagaaaatactcctggttgaggagttttcactttactacagtgatataaaaaccagcagtttttacactaaattttttaaagaaatattagacaaaaatatagaattaaaacctttggttccaaaatgggaaaggttccacgatacataaatcatttctcatttgctttaaaaaatttaaaagtgtaaaaattatgagagactttattcgttaacaatgggggtaaagagctatatacatgaaaatgagtcttataaaattaagtgaagtgcaaataaaagcactgctactataagacattctggaatggttgtttaataagggtattatccatttgatctatagcaatgtgattttatttttaaaaagaaaagcagtgtgttttctttttttgttgttttcttttgcttaagcacttcatcaattgctttattctgtatctgcgaagtaatctgcaatctcttttgttctttttaaaatttgatttgttataaaattgccaaatagaagtgtttcagatacatagtttgtacctgtatttttattttattgcctcatgttcttgtaagtcattcttaattgaccaatgattgtagaccttgcttgagtattttttctaataaaacaaagcaaatcacatttagcttcaaattgtaacaattcaattgaattttaaaatgacacctgaaaagatacatctgatattttctatatagagcacagtaaataagttttttcattgtgtagaaatacttagatgtcaaaaccagatttcgtgatccttgattaacttctgagtactcaatcaatcataatccttttgctgcttatctgatgttggtttgatactgttaacacaccaaaaagaatatggaattgaaatgagctagctttataacttgtatgtatacatatatacacataacatccaattatgactgggtaataagtgtgaaaattttaatttgtggttttcatttattaatgtctgcccatctgtattgttgctcctaccttcaaatatgacacctgaaataataagtctgttgtccagaatttatgtattgttcagcatcaagcaaactacagctcacaagcatacccatttatatgttgtctatgcctgctttctcctgcagtggcagaattgagtggtgagaccttaggtcctgcaagcccccaatttttactacaggttggcaatccctaatccaaaaatctgacataaaaaatgctccaaagttcaaaactttctgagtgctgacatcatgctgcaagtggaaaattccacgcctgacctcatgtgactggtcatagtcaaaacaattaagactttgtttcatgcacaaaattattaaaactgttgtataaaattaccttcagtctatgtgtataaggtgtttgtgagatataaatgaactttatgtttagtcttggatcgcatttctgagtctcattatgtatatgcagatactcaaaaatctgaaaaaaatcaaaaatctgaaatacttctggtcccaagcatttcggataagggatactcagcctgtctctggtcctttaagaaaaagttttcgattcctttgtctagttgacaaaaagtttggaaacataaacttagaccacacaacttgcattttaatatgacaatgttgatcttggtaataagccagtacattaaattttagtgaaagctgtttcatgtattttacagtaaatactgccatattaggtacctacaacaaatggtggtttttggaaacttttacggtgggtttttaaagttattaatagtccatcatttcatcatttgtgtttctgtatttattttgctaagaactaaataagattttgtacatcagattgtgtttgaaccgtaaggcacatctgctttatctaaaagaatcttaaggtggaaatagtgtaaaatttaaaattttttatatttctaataaactttttatatataaatgttacctaaagtggacacatgttacttctgaatttcacatgaaaggaaattaaagatggacaataattatctctcaatattttaagatttgttttactaattgaaaacagtatgtcagtaaatctttggccttagtgcttttttcccccttttacacattaataaaatgttttaaatatggtaatactcttaaaacggtagaatttgccacagttgtttaaagcatttttattttttctttgaattcttaattcatggtgaacagatgttgggttcttaaaatataaaaatgagaaaatatgtattaaaaatacttgatagagggttttctctttaatcacaacttaaaaaaagaaacctttaatacctctgcataagttctctgaaagaacttaaattcttagtttatatgaaaactgatatgtatgtctgtgtaacaaagcctgttgggtacaggtctacaaggagatactttgtttctaaaaaaggagttaaatcgtgtcacctgaattttttttttttgagataagtggacattttggggattttggttaaaacatatttctctattctaaaaattacagaatatgtattcataaaagggaagaaattgttagaaaatttcctgtgtacgtagtttgtttttaaattaaagaatcttgtgacctggtgtaggacattttgcatttgtaacactgcagttttaatatatttgctgttttttttaaaattagaatatgtttaaaatttaatggttatgaggctctgtagccttaaaatgttttatagtagtaaaatgtattattttcatcttaaaaaaaactaaatatttacat

SEQ ID NO: 896 - DNA, 4956 bp, Homo sapiens
cggaccttattccttcttattgcatgtagatgtcagcgaggagcggtatttgtttgcttatggaaaggttgtaaagtatataacactccatctaccagtcaaagttggttacaaaggcatatgctgacacacagtggagacaaacctttcaagtgtgttgttggtggctgcaatgccagctttgcttctcagggagggctagctcgtcatgtacccacacacttcagtcagcagaactcctcaaaagtttctagccagccaaaggccaaagaagaatctccttctaaagctggaatgaacaaaaggaggaaattaaagaacaaaagacgacgctcattaccacggccacatgatttcttcgatgcacaaacactggatgcgataagacatcgagccatatgctttaacctctcagctcatatagaaagtttagggaagggacacagtgttgtttttcatagtactgtaatagctaagagaaaagaagattctgggaagatcaaacttttgcttcattggatgcctgaagacattctgcctgatgtgtgggtgaatgaaagtgaacgacatcagttaaaaactaaagtagttcatttatcaaagctacccaaagatactgccttgcttttggacccaaacatatacagaacaatgccgcagaagaggttgaagaggtaaaaaataaataaatacataaaaagcaaacaagcggggacacctgcagtcttagtcactgacaatgggtttagggaaagttgcacattagagtcaaccccttcttttttttttttttttttttaaatccagtatttaggataatatttatgcttagtgtaaacattctggtgaatgaagtagactcttcgggtggaatatattaatatattactgtatatccacattttcatggaatggtactgtgggagactgagcaaacactcttttggcaacttagtagaacagcttcttaaaggctttgcatgcttgctgctttaagctgcttttttttttcttttcttccctttagtgatttcagtagtttatattggaaagaaaaacaattacaacatgtgcccttacaaataccaaaagcactgtaaggatatttgtcttgacagtgtttattgatttgaagtcatattaggaaatatttagacaatgaaaattatcaagagataatttacctttcaattatgataaatagatgtgattggttgccatttgtgttcttttgcagaactctgataagaaaagtgttcaatttgtatttaagcaaacagtgaacgacgtttgcaatcaactaaaaattcgtctatcgaattagggctgaaaattactgttaaagagtgttgcagtatgtctggtggctcccttttcaggactagggctttctcatggagtacagtatgttaatatttacctatataactaatctgttaacggtttttgaaaaacctttcaaattatttgaataatcttcatattttcatttaacctatatgactctaattttttttctgaggaaatcatttggtttttgagttgttttttcttaatgtaagaaaaattgtattttttttacaagtatcttcaaactgaatcttttatgcaccaaagttggtcttgaaaaggaaaataaaatcactttcttgcttggtaagcaagaagccatatcgattttttttaacttacagaaatggaaatatgtgtaacttgttagtattgtattaaacaaatgttgcatagagataatagaacattgcttgtaaataattcagcagatttgtaatatatttttatattttgaaatgtactgtagatgttttctagaggcatgaaagttaaatgtatatattatggtagaaataatattgaaggatattgtacttcactagtgctgccagaggaattgttaataaaagcaccttctttaacaataaatgtctttcacagacttaagggactatgtactactgttaatatctctaagaacaaaacacattgaacatccttccagaaagtctttgagggaggacctatacccataatagaattatggcactcatttctgacagtgatcaagaaatcagttatttccttactgttggaaggacattgtaaagtatgtggttatatgcagtgaaactgcagaaaatactcctggttgaggagttttcactttactacagtgatataaaaaccagcagtttttacactaaattttttaaagaaatattagacaaaaatatagaattaaaacctttggttccaaaatgggaaaggttccacgatacataaatcatttctcatttgctttaaaaaatttaaaagtgtaaaaattatgagagactttattcgttaacaatgggggtaaagagctatatacatgaaaatgagtcttataaaattaagtgaagtgcaaataaaagcactgctactataagacattctggaatggttgtttaataagggtattatccatttgatctatagcaatgtgattttatttttaaaaagaaaagcagtgtgttttctttttttgttgttttcttttgcttaagcacttcatcaattgctttattctgtatctgcgaagtaatctgcaatctcttttgttctttttaaaatttgatttgttataaaattgccaaatagaagtgtttcagatacatagtttgtacctgtatttttattttattgcctcatgttcttgtaagtcattcttaattgaccaatgattgtagaccttgcttgagtattttttctaataaaacaaagcaaatcacatttagcttcaaattgtaacaattcaattgaattttaaaatgacacctgaaaagatacatctgatattttctatatagagcacagtaaataagttttttcattgtgtagaaatacttagatgtcaaaaccagatttcgtgatccttgattaacttctgagtactcaatcaatcataatccttttgctgcttatctgatgttggtttgatactgttaacacaccaaaaagaatatggaattgaaatgagctagctttataacttgtatgtatacatatatacacataacatccaattatgactgggtaataagtgtgaaaattttaatttgtggttttcatttattaatgtctgcccatctgtattgttgctcctaccttcaaatatgacacctgaaataataagtctgttgtccagaatttatgtattgttcagcatcaagcaaactacagctcacaagcatacccatttatatgttgtctatgcctgctttctcctgcagtggcagaattgagtggtgagaccttaggtcctgcaagcccccaatttttactacaggttggcaatccctaatccaaaaatctgacataaaaaatgctccaaagttcaaaactttctgagtgctgacatcatgctgcaagtggaaaattccacgcctgacctcatgtgactggtcatagtcaaaacaattaagactttgtttcatgcacaaaattattaaaactgttgtataaaattaccttcagtctatgtgtataaggtgtttgtgagatataaatgaactttatgtttagtcttggatcgcatttctgagtctcattatgtatatgcagatactcaaaaatctgaaaaaaatcaaaaatctgaaatacttctggtcccaagcatttcggataagggatactcagcctgtctctggtcctttaagaaaaagttttcgattcctttgtctagttgacaaaaagtttggaaacataaacttagaccacacaacttgcattttaatatgacaatgttgatcttggtaataagccagtacattaaattttagtgaaagctgtttcatgtattttacagtaaatactgccatattaggtacctacaacaaatggtggtttttggaaacttttacggtgggtttttaaagttattaatagtccatcatttcatcatttgtgtttctgtatttattttgctaagaactaaataagattttgtacatcagattgtgtttgaaccgtaaggcacatctgctttatctaaaagaatcttaaggtggaaatagtgtaaaatttaaaattttttatatttctaataaactttttatatataaatgttacctaaagtggacacatgttacttctgaatttcacatgaaaggaaattaaagatggacaataattatctctcaatattttaagatttgttttactaattgaaaacagtatgtcagtaaatctttggccttagtgcttttttcccccttttacacattaataaaatgttttaaatatggtaatactcttaaaacggtagaatttgccacagttgtttaaagcatttttattttttctttgaattcttaattcatggtgaacagatgttgggttcttaaaatataaaaatgagaaaatatgtattaaaaatacttgatagagggttttctctttaatcacaacttaaaaaaagaaacctttaatacctctgcataagttctctgaaagaacttaaattcttagtttatatgaaaactgatatgtatgtctgtgtaacaaagcctgttgggtacaggtctacaaggagatactttgtttctaaaaaaggagttaaatcgtgtcacctgaattttttttttttgagataagtggacattttggggattttggttaaaacatatttctctattctaaaaattacagaatatgtattcataaaagggaagaaattgttagaaaatttcctgtgtacgtagtttgtttttaaattaaagaatcttgtgacctggtgtaggacattttgcatttgtaacactgcagttttaatatatttgctgttttttttaaaattagaatatgtttaaaatttaatggttatgaggctctgtagccttaaaatgttttatagtagtaaaatgtattattttcatcttaaaaaaaactaaatatttacat

SEQ ID NO: 897 - DNA, 5715 bp, Homo sapiens
atggccgacctggaggagctctcccgcctgagccctctgccccccggcagcccgggttcggcggcgcggggccgggctgagccccccgaggaggaggaggaagaggaggaggaggaagaggaggcggaggccgaggcggtggcggcgctgctgctgaacggcggcagcggtgggggcggcggaggcggcggcggaggagtggggggcggcgaggcagagacgatgtcggagccgagccccgagagcgccagccaggccggggaggacgaagacgaggaggaggacgacgaggaggaggaagatgagagcagcagcagcggcgggggtgaggaggagagtagcgccgagagcctggtgggcagcagcggcgggagcagcagcgacgagacccgctcgttgagccccggcgccgccagcagcagcagcggggatggggacggcaaggagggcctggaggagcccaagggaccgcggggcagccagggcggcggcgggggcggcagcagtagcagcagcgtagtctccagcggcggcgacgagggctacgggactgggggaggcggaagcagcgcgacctccgggggccggcggggcagcttggagatgtcgtcggatggggaacccctgagccgcatggactcggaggacagcataagcagtactataatggatgtagacagcacaatttccagtgggcgttcaactccagcaatgatgaatggacaaggaagcactacttcttcaagcaaaaatattgcctataattgttgttgggaccagtgccaggcttgcttcaactctagcccagatctggcagatcacatccgttccatacatgtagatggtcagcgaggaggggtatttgtttgcttatggaaaggttgtaaagtatataacactccatctaccagtcaaagttggttacaaaggcatatgctgacacacagtggagacaaacctttcaagtgtgttgttggtggctgcaatgccagctttgcttctcagggagggctagctcgtcatgtacccacacacttcagtcagcagaactcctcaaaagtttctagccagccaaaggccaaagaagaatctccttctaaagctggaatgaacaaaaggaggaaattaaagaacaaaagacgacgctcattaccacggccacatgatttcttcgatgcacaaacactggatgcgataagacatcgagccatatgctttaacctctcagctcatatagaaagtttagggaagggacacagtgttgtttttcatagtactgtaatagctaagagaaaagaagattctgggaagatcaaacttttgcttcattggatgcctgaagacattctgcctgatgtgtgggtgaatgaaagtgaacgacatcagttaaaaactaaagtagttcatttatcaaagctacccaaagatactgccttgcttttggacccaaacatatacagaacaatgccgcagaagaggttgaagaggtaaaaaataaataaatacataaaaagcaaacaagcggggacacctgcagtcttagtcactgacaatgggtttagggaaagttgcacattagagtcaaccccttcttttttttttttttttttttaaatccagtatttaggataatatttatgcttagtgtaaacattctggtgaatgaagtagactcttcgggtggaatatattaatatattactgtatatccacattttcatggaatggtactgtgggagactgagcaaacactcttttggcaacttagtagaacagcttcttaaaggctttgcatgcttgctgctttaagctgcttttttttttcttttcttccctttagtgatttcagtagtttatattggaaagaaaaacaattacaacatgtgcccttacaaataccaaaagcactgtaaggatatttgtcttgacagtgtttattgatttgaagtcatattaggaaatatttagacaatgaaaattatcaagagataatttacctttcaattatgataaatagatgtgattggttgccatttgtgttcttttgcagaactctgataagaaaagtgttcaatttgtatttaagcaaacagtgaacgacgtttgcaatcaactaaaaattcgtctatcgaattagggctgaaaattactgttaaagagtgttgcagtatgtctggtggctcccttttcaggactagggctttctcatggagtacagtatgttaatatttacctatataactaatctgttaacggtttttgaaaaacctttcaaattatttgaataatcttcatattttcatttaacctatatgactctaattttttttctgaggaaatcatttggtttttgagttgttttttcttaatgtaagaaaaattgtattttttttacaagtatcttcaaactgaatcttttatgcaccaaagttggtcttgaaaaggaaaataaaatcactttcttgcttggtaagcaagaagccatatcgattttttttaacttacagaaatggaaatatgtgtaacttgttagtattgtattaaacaaatgttgcatagagataatagaacattgcttgtaaataattcagcagatttgtaatatatttttatattttgaaatgtactgtagatgttttctagaggcatgaaagttaaatgtatatattatggtagaaataatattgaaggatattgtacttcactagtgctgccagaggaattgttaataaaagcaccttctttaacaataaatgtctttcacagacttaagggactatgtactactgttaatatctctaagaacaaaacacattgaacatccttccagaaagtctttgagggaggacctatacccataatagaattatggcactcatttctgacagtgatcaagaaatcagttatttccttactgttggaaggacattgtaaagtatgtggttatatgcagtgaaactgcagaaaatactcctggttgaggagttttcactttactacagtgatataaaaaccagcagtttttacactaaattttttaaagaaatattagacaaaaatatagaattaaaacctttggttccaaaatgggaaaggttccacgatacataaatcatttctcatttgctttaaaaaatttaaaagtgtaaaaattatgagagactttattcgttaacaatgggggtaaagagctatatacatgaaaatgagtcttataaaattaagtgaagtgcaaataaaagcactgctactataagacattctggaatggttgtttaataagggtattatccatttgatctatagcaatgtgattttatttttaaaaagaaaagcagtgtgttttctttttttgttgttttcttttgcttaagcacttcatcaattgctttattctgtatctgcgaagtaatctgcaatctcttttgttctttttaaaatttgatttgttatttattgcctcatgttcttgtaagtcattcttaattgaccaatgattgtagaccttgcttgagtattttttctaataaaacaaagcaaatcacatttagcttcaaattgtaacaattcaattgaattttaaaatgacacctgaaaagatacatctgatattttctatatagagcacagtaaataagttttttcattgtgtagaaatacttagatgtcaaaaccagatttcgtgatccttgattaacttctgagtactcaatcaatcataatccttttgctgcttatctgatgttggtttgatactgttaacacaccaaaaagaatatggaattgaaatgagctagctttataacttgtatgtatacatatatacacataacatccaattatgactgggtaataagtgtgaaaattttaatttgtggttttcatttattaatgtctgcccatctgtattgttgctcctaccttcaaatatgacacctgaaataataagtctgttgtccagaatttatgtattgttcagcatcaagcaaactacagctcacaagcatacccatttatatgttgtctatgcctgctttctcctgcagtggcagaattgagtggtgagaccttaggtcctgcaagcccccaatttttactacaggttggcaatccctaatccaaaaatctgacataaaaaatgctccaaagttcaaaactttctgagtgctgacatcatgctgcaagtggaaaattccacgcctgacctcatgtgactggtcatagtcaaaacaattaagactttgtttcatgcacaaaattattaaaactgttgtataaaattaccttcagtctatgtgtataaggtgtttgtgagatataaatgaactttatgtttagtcttggatcgcatttctgagtctcattatgtatatgcagatactcaaaaatctgaaaaaaatcaaaaatctgaaatacttctggtcccaagcatttcggataagggatactcagcctgtctctggtcctttaagaaaaagttttcgattcctttgtctagttgacaaaaagtttggaaacataaacttagaccacacaacttgcattttaatatgacaatgttgatcttggtaataagccagtacattaaattttagtgaaagctgtttcatgtattttacagtaaatactgccatattaggtacctacaacaaatggtggtttttggaaacttttacggtgggtttttaaagttattaatagtccatcatttcatcatttgtgtttctgtatttattttgctaagaactaaataagattttgtacatcagattgtgtttgaaccgtaaggcacatctgctttatctaaaagaatcttaaggtggaaatagtgtaaaatttaaaattttttatatttctaataaactttttatatataaatgttacctaaagtggacacatgttacttctgaatttcacatgaaaggaaattaaagatggacaataattatctctcaatattttaagatttgttttactaattgaaaacagtatgtcagtaaatctttggccttagtgcttttttcccccttttacacattaataaaatgttttaaatatggtaatactcttaaaacggtagaatttgccacagttgtttaaagcatttttattttttctttgaattcttaattcatggtgaacagatgttgggttcttaaaatataaaaatgagaaaatatgtattaaaaatacttgatagagggttttctctttaatcacaacttaaaaaaagaaacctttaatacctctgcataagttctctgaaagaacttaaattcttagtttatatgaaaactgatatgtatgtctgtgtaacaaagcctgttgggtacaggtctacaaggagatactttgtttctaaaaaaggagttaaatcgtgtcacctgaattttttttttttgagataagtggacattttggggattttggttaaaacatatttctctattctaaaaattacagaatatgtattcataaaagggaagaaattgttagaaaatttcctgtgtacgtagtttgtttttaaattaaagaatcttgtgacctggtgtaggacattttgcatttgtaacactgcagttttaatatatttgctgttttttttaaaattagaatatgtttaaaatttaatggttatgaggctctgtagccttaaaatgttttatagtagtaaaatgtattattttcatcttaaaaaaaactaaatatttacat

SEQ ID NO: 898 - DNA, 5206 bp, Homo sapiens
atggccgacctggaggagctctcccgcctgagccctctgccccccggcagcccgggttcggcggcgcggggccgggctgagccccccgaggaggaggaggaagaggaggaggaggaagaggaggcggaggccgaggcggtggcggcgctgctgctgaacggcggcagcggtgggggcggcggaggcggcggcggaggagtggggggcggcgaggcagagacgatgtcggagccgagccccgagagcgccagccaggccggggaggacgaagacgaggaggaggacgacgaggaggaggaagatgagagcagcagcagcggcgggggtgaggaggagagtagcgccgagagcctggtgggcagcagcggcgggagcagcagcgacgagacccgctcgttgagccccggcgccgccagcagcagcagcggggatggggacggcaaggagggcctggaggagcccaagggaccgcggggcagccagggcggcggcgggggcggcagcagtagcagcagcgtagtctccagcggcggcgacgagggctacgggactgggggaggcggaagcagcgcgacctccgggggccggcggggcagcttggagatgtcgtcggatggggaacccctgagccgcatggactcggaggacagcataagcagtactataatggatgtagacagcacaatttccagtgggcgttcaactccagcaatgatgaatggacaaggaagcactacttcttcaagcaaaaatattgcctataattgttgttgggaccagtgccaggcttgcttcaactctagcccagatctggcagatcacatccgttccatacatgtagatggtcagcgaggaggggtatttgtttgcttatggaaaggttgtaaagtatataacactccatctaccagtcaaagttggttacaaaggcatatgctgacacacagtggagacaaacctttcaagtgtgttgttggtggctgcaatgccagctttgcttctcagggagggctagctcgtcatgtacccacacacttcagtcagcagaactcctcaaaagtttctagccagccaaaggccaaagaagaatctccttctaaagctggaatgaacaaaaggaggaaattaaagaacaaaagacgacgctcattaccacggccacatgatttcttcgatgcacaaacactggatgcgataagacatcgagccatatgctttaacctctcagctcatatagaaagtttagggaagggacacagtgttgtttttcatagtactgtaatagctaagagaaaagaagattctgggaagatcaaacttttgcttcattggatgcctgaagacattctgcctgatgtgtgggtgaatgaaagtgaacgacatcagttaaaaactaaagtagttcatttatcaaagctacccaaagatactgccttgcttttggacccaaacatatacagaacaatgccgcagaagaggttgaagagaactctgataagaaaagtgttcaatttgtatttaagcaaacagtgaacgacgtttgcaatcaactaaaaattcgtctatcgaattagggctgaaaattactgttaaagagtgttgcagtatgtctggtggctcccttttcaggactagggctttctcatggagtacagtatgttaatatttacctatataactaatctgttaacggtttttgaaaaacctttcaaattatttgaataatcttcatattttcatttaacctatatgactctaattttttttctgaggaaatcatttggtttttgagttgttttttcttaatgtaagaaaaattgtattttttttacaagtatcttcaaactgaatcttttatgcaccaaagttggtcttgaaaaggaaaataaaatcactttcttgcttggtaagcaagaagccatatcgattttttttaacttacagaaatggaaatatgtgtaacttgttagtattgtattaaacaaatgttgcatagagataatagaacattgcttgtaaataattcagcagatttgtaatatatttttatattttgaaatgtactgtagatgttttctagaggcatgaaagttaaatgtatatattatggtagaaataatattgaaggatattgtacttcactagtgctgccagaggaattgttaataaaagcaccttctttaacaataaatgtctttcacagacttaagggactatgtactactgttaatatctctaagaacaaaacacattgaacatccttccagaaagtctttgagggaggacctatacccataatagaattatggcactcatttctgacagtgatcaagaaatcagttatttccttactgttggaaggacattgtaaagtatgtggttatatgcagtgaaactgcagaaaatactcctggttgaggagttttcactttactacagtgatataaaaaccagcagtttttacactaaattttttaaagaaatattagacaaaaatatagaattaaaacctttggttccaaaatgggaaaggttccacgatacataaatcatttctcatttgctttaaaaaatttaaaagtgtaaaaattatgagagactttattcgttaacaatgggggtaaagagctatatacatgaaaatgagtcttataaaattaagtgaagtgcaaataaaagcactgctactataagacattctggaatggttgtttaataagggtattatccatttgatctatagcaatgtgattttatttttaaaaagaaaagcagtgtgttttctttttttgttgttttcttttgcttaagcacttcatcaattgctttattctgtatctgcgaagtaatctgcaatctcttttgttctttttaaaatttgatttgttataaaattgccaaatagaagtgtttcagatacatagtttgtacctgtatttttattttattgcctcatgttcttgtaagtcattcttaattgaccaatgattgtagaccttgcttgagtattttttctaataaaacaaagcaaatcacatttagcttcaaattgtaacaattcaattgaattttaaaatgacacctgaaaagatacatctgatattttctatatagagcacagtaaataagttttttcattgtgtagaaatacttagatgtcaaaaccagatttcgtgatccttgattaacttctgagtactcaatcaatcataatccttttgctgcttatctgatgttggtttgatactgttaacacaccaaaaagaatatggaattgaaatgagctagctttataacttgtatgtatacatatatacacataacatccaattatgactgggtaataagtgtgaaaattttaatttgtggttttcatttattaatgtctgcccatctgtattgttgctcctaccttcaaatatgacacctgaaataataagtctgttgtccagaatttatgtattgttcagcatcaagcaaactacagctcacaagcatacccatttatatgttgtctatgcctgctttctcctgcagtggcagaattgagtggtgagaccttaggtcctgcaagcccccaatttttactacaggttggcaatccctaatccaaaaatctgacataaaaaatgctccaaagttcaaaactttctgagtgctgacatcatgctgcaagtggaaaattccacgcctgacctcatgtgactggtcatagtcaaaacaattaagactttgtttcatgcacaaaattattaaaactgttgtataaaattaccttcagtctatgtgtataaggtgtttgtgagatataaatgaactttatgtttagtcttggatcgcatttctgagtctcattatgtatatgcagatactcaaaaatctgaaaaaaatcaaaaatctgaaatacttctggtcccaagcatttcggataagggatactcagcctgtctctggtcctttaagaaaaagttttcgattcctttgtctagttgacaaaaagtttggaaacataaacttagaccacacaacttgcattttaatatgacaatgttgatcttggtaataagccagtacattaaattttagtgaaagctgtttcatgtattttacagtaaatactgccatattaggtacctacaacaaatggtggtttttggaaacttttacggtgggtttttaaagttattaatagtccatcatttcatcatttgtgtttctgtatttattttgctaagaactaaataagattttgtacatcagattgtgtttgaaccgtaaggcacatctgctttatctaaaagaatcttaaggtggaaatagtgtaaaatttaaaattttttatatttctaataaactttttatatataaatgttacctaaagtggacacatgttacttctgaatttcacatgaaaggaaattaaagatggacaataattatctctcaatattttaagatttgttttactaattgaaaacagtatgtcagtaaatctttggccttagtgcttttttcccccttttacacattaataaaatgttttaaatatggtaatactcttaaaacggtagaatttgccacagttgtttaaagcatttttattttttctttgaattcttaattcatggtgaacagatgttgggttcttaaaatataaaaatgagaaaatatgtattaaaaatacttgatagagggttttctctttaatcacaacttaaaaaaagaaacctttaatacctctgcataagttctctgaaagaacttaaattcttagtttatatgaaaactgatatgtatgtctgtgtaacaaagcctgttgggtacaggtctacaaggagatactttgtttctaaaaaaggagttaaatcgtgtcacctgaattttttttttttgagataagtggacattttggggattttggttaaaacatatttctctattctaaaaattacagaatatgtattcataaaagggaagaaattgttagaaaatttcctgtgtacgtagtttgtttttaaattaaagaatcttgtgacctggtgtaggacattttgcatttgtaacactgcagttttaatatatttgctgttttttttaaaattagaatatgtttaaaatttaatggttatgaggctctgtagccttaaaatgttttatagtagtaaaatgtattattttcatcttaaaaaaaactaaatatttacat

SEQ ID NO: 899 - DNA, 4163 bp, Homo sapiens
ccacgcgtcgcccacgcgtccgataatatttatgcttagtgtaaacattctggtgaatgaagtagactcttcgggtggaatatattaatatattactgtatatccacattttcatggaatggtactgtgggagactgagcaaacactcttttggcaacttagtagaacagcttcttaaaggctttgcatgcttgctgctttaagctgcttttttttttcttttcttccctttagtgatttcagtagtttatattggaaagaaaaacaattacaacatgtgcccttacaaataccaaaagcactgtaaggatatttgtcttgacagtgtttattgatttgaagtcatattaggaaatatttagacaatgaaaattatcaagagataatttacctttcaattatgataaatagatgtgattggttgccatttgtgttcttttgcagaactctgataagaaaagtgttcaatttgtatttaagcaaacagtgaacgacgtttgcaatcaactaaaaattcgtctatcgaattagggctgaaaattactgttaaagagtgttgcagtatgtctggtggctcccttttcaggactagggctttctcatggagtacagtatgttaatatttacctatataactaatctgttaacggtttttgaaaaacctttcaaattatttgaataatcttcatattttcatttaacctatatgactctaattttttttctgaggaaatcatttggtttttgagttgttttttcttaatgtaagaaaaattgtattttttttacaagtatcttcaaactgaatcttttatgcaccaaagttggtcttgaaaaggaaaataaaatcactttcttgcttggtaagcaagaagccatatcgattttttttaacttacagaaatggaaatatgtgtaacttgttagtattgtattaaacaaatgttgcatagagataatagaacattgcttgtaaataattcagcagatttgtaatatatttttatattttgaaatgtactgtagatgttttctagaggcatgaaagttaaatgtatatattatggtagaaataatattgaaggatattgtacttcactagtgctgccagaggaattgttaataaaagcaccttctttaacaataaatgtctttcacagacttaagggactatgtactactgttaatatctctaagaacaaaacacattgaacatccttccagaaagtctttgagggaggacctatacccataatagaattatggcactcatttctgacagtgatcaagaaatcagttatttccttactgttggaaggacattgtaaagtatgtggttatatgcagtgaaactgcagaaaatactcctggttgaggagttttcactttactacagtgatataaaaaccagcagtttttacactaaattttttaaagaaatattagacaaaaatatagaattaaaacctttggttccaaaatgggaaaggttccacgatacataaatcatttctcatttgctttaaaaaatttaaaagtgtaaaaattatgagagactttattcgttaacaatgggggtaaagagctatatacatgaaaatgagtcttataaaattaagtgaagtgcaaataaaagcactgctactataagacattctggaatggttgtttaataagggtattatccatttgatctatagcaatgtgattttatttttaaaaagaaaagcagtgtgttttctttttttgttgttttcttttgcttaagcacttcatcaattgctttattctgtatctgcgaagtaatctgcaatctcttttgttctttttaaaatttgatttgttataaaattgccaaatagaagtgtttcagatacatagtttgtacctgtatttttattttattgcctcatgttcttgtaagtcattcttaattgaccaatgattgtagaccttgcttgagtattttttctaataaaacaaagcaaatcacatttagcttcaaattgtaacaattcaattgaattttaaaatgacacctgaaaagatacatctgatattttctatatagagcacagtaaataagttttttcattgtgtagaaatacttagatgtcaaaaccagatttcgtgatccttgattaacttctgagtactcaatcaatcataatccttttgctgcttatctgatgttggtttgatactgttaacacaccaaaaagaatatggaattgaaatgagctagctttataacttgtatgtatacatatatacacataacatccaattatgactgggtaataagtgtgaaaattttaatttgtggttttcatttattaatgtctgcccatctgtattgttgctcctaccttcaaatatgacacctgaaataataagtctgttgtccagaatttatgtattgttcagcatcaagcaaactacagctcacaagcatacccatttatatgttgtctatgcctgctttctcctgcagtggcagaattgagtggtgagaccttaggtcctgcaagcccccaatttttactacaggttggcaatccctaatccaaaaatctgacataaaaaatgctccaaagttcaaaactttctgagtgctgacatcatgctgcaagtggaaaattccacgcctgacctcatgtgactggtcatagtcaaaacaattaagactttgtttcatgcacaaaattattaaaactgttgtataaaattaccttcagtctatgtgtataaggtgtttgtgagatataaatgaactttatgtttagtcttggatcgcatttctgagtctcattatgtatatgcagatactcaaaaatctgaaaaaaatcaaaaatctgaaatacttctggtcccaagcatttcggataagggatactcagcctgtctctggtcctttaagaaaaagttttcgattcctttgtctagttgacaaaaagtttggaaacataaacttagaccacacaacttgcattttaatatgacaatgttgatcttggtaataagccagtacattaaattttagtgaaagctgtttcatgtattttacagtaaatactgccatattaggtacctacaacaaatggtggtttttggaaacttttacggtgggtttttaaagttattaatagtccatcatttcatcatttgtgtttctgtatttattttgctaagaactaaataagattttgtacatcagattgtgtttgaaccgtaaggcacatctgctttatctaaaagaatcttaaggtggaaatagtgtaaaatttaaaattttttatatttctaataaactttttatatataaatgttacctaaagtggacacatgttacttctgaatttcacatgaaaggaaattaaagatggacaataattatctctcaatattttaagatttgttttactaattgaaaacagtatgtcagtaaatctttggccttagtgcttttttcccccttttacacattaataaaatgttttaaatatggtaatactcttaaaacggtagaatttgccacagttgtttaaagcatttttattttttctttgaattcttaattcatggtgaacagatgttgggttcttaaaatataaaaatgagaaaatatgtattaaaaatacttgatagagggttttctctttaatcacaacttaaaaaaagaaacctttaatacctctgcataagttctctgaaagaacttaaattcttagtttatatgaaaactgatatgtatgtctgtgtaacaaagcctgttgggtacaggtctacaaggagatactttgtttctaaaaaaggagttaaatcgtgtcacctgaattttttttttttgagataagtggacattttggggattttggttaaaacatatttctctattctaaaaattacagaatatgtattcataaaagggaagaaattgttagaaaatttcctgtgtacgtagtttgtttttaaattaaagaatcttgtgacctggtgtaggacattttgcatttgtaacactgcagttttaatatatttgctgttttttttaaaattagaatatgtttaaaatttaatggttatgaggctctgtagccttaaaatgttttatagtagtaaaatgtattattttcatcttaaaaaaaactaaatatttacat

SEQ ID NO: 900 - DNA, 2268 bp, Homo sapiens
atggccgacctggaggagctctcccgcctgagccctctgccccccggcagcccgggttcggcggcgcggggccgggctgagccccccgaggaggaggaggaagaggaggaggaggaagaggaggcggaggccgaggcggtggcggcgctgctgctgaacggcggcagcggtgggggcggcggaggcggcggcggaggagtggggggcggcgaggcagagacgatgtcggagccgagccccgagagcgccagccaggccggggaggacgaagacgaggaggaggacgacgaggaggaggaagatgagagcagcagcagcggcgggggtgaggaggagagtagcgccgagagcctggtgggcagcagcggcgggagcagcagcgacgagacccgctcgttgagccccggcgccgccagcagcagcagcggggatggggacggcaaggagggcctggaggagcccaagggaccgcggggcagccagggcggcggcgggggcggcagcagtagcagcagcgtagtctccagcggcggcgacgagggctacgggactgggggaggcggaagcagcgcgacctccgggggccggcggggcagcttggagatgtcgtcggatggggaacccctgagccgcatggactcggaggacagcataagcagtactataatggatgtagacagcacaatttccagtgggcgttcaactccagcaatgatgaatggacaaggaagcactacttcttcaagcaaaaatattgcctataattgttgttgggaccagtgccaggcttgcttcaactctagcccagatctggcagatcacatccgttccatacatgtagatggtcagcgaggaggggtatttgtttgcttatggaaaggttgtaaagtatataacactccatctaccagtcaaagttggttacaaaggcatatgctgacacacagtggagacaaacctttcaagtgtgttgttggtggctgcaatgccagctttgcttctcagggagggctagctcgtcatgtacccacacacttcagtcagcagaactcctcaaaagtttctagccagccaaaggccaaagaagaatctccttctaaagctggaatgaacaaaaggaggaaattaaagaacaaaagacgacgctcattaccacggccacatgatttcttcgatgcacaaacactggatgcgataagacatcgagccatatgctttaacctctcagctcatatagaaagtttagggaagggacacagtgttgtttttcatagtactgtaatagctaagagaaaagaagattctgggaagatcaaacttttgcttcattggatgcctgaagacattctgcctgatgtgtgggtgaatgaaagtgaacgacatcagttaaaaactaaagtagttcatttatcaaagctacccaaagatactgccttgcttttggacccaaacatatacagaacaatgccgcagaagaggttgaagaggtaaaaaataaataaatacataaaaagcaaacaagcggggacacctgcagtcttagtcactgacaatgggtttagggaaagttgcacattagagtcaaccccttcttttttttttttttttttttaaatccagtatttaggataatatttatgcttagtgtaaacattctggtgaatgaagtagactcttcgggtggaatatattaatatattactgtatatccacattttcatggaatggtactgtgggagactgagcaaacactctttgtagggacaatcttaagttagaaacaggtctttcttaagaggctcttgtggcagtggctgtgcgcggcgctttaaagcgcgtggcttatattatttttctcttttctcttccctcctttagtgtgtatttcacacgataagtttttattattgtggaaaagagaacaaaccaattatacgaagcatgtgtgtcgccctttacaaaattcaccaaaaagagcactgtgtgtagacggattatttgtgctcttgtgcaccgagcgtgtctatacactggcatttgtgaaagtctcattatttgaggaaaactcttgtgtagaacaaagtgcaacaatttttctcacgagaaaggcaatcaaacttaaaccctctttcgcaacatttttgtgacactacaaaatcagacagtggctgaactgcggggttggcccaattgtgggtgataccctatttgcggacaagaaaaacttcgtgtcaattacgacaaaagcggcgtgttcccacactcggg

SEQ ID NO: 901 - DNA, 2237 bp, Homo sapiens
  misc_feature (1523)..(1523): n is a, c, g, or t
  misc_feature (1553)..(1553): n is a, c, g, or t
  misc_feature (1564)..(1564): n is a, c, g, or t
atggccgacctggaggagctctcccgcctgagccctctgccccccggcagcccgggttcggcggcgcggggccgggctgagccccccgaggaggaggaggaagaggaggaggaggaagaggaggcggaggccgaggcggtggcggcgctgctgctgaacggcggcagcggtgggggcggcggaggcggcggcggaggagtggggggcggcgaggcagagacgatgtcggagccgagccccgagagcgccagccaggccggggaggacgaagacgaggaggaggacgacgaggaggaggaagatgagagcagcagcagcggcgggggtgaggaggagagtagcgccgagagcctggtgggcagcagcggcgggagcagcagcgacgagacccgctcgttgagccccggcgccgccagcagcagcagcggggatggggacggcaaggagggcctggaggagcccaagggaccgcggggcagccagggcggcggcgggggcggcagcagtagcagcagcgtagtctccagcggcggcgacgagggctacgggactgggggaggcggaagcagcgcgacctccgggggccggcggggcagcttggagatgtcgtcggatggggaacccctgagccgcatggactcggaggacagcataagcagtactataatggatgtagacagcacaatttccagtgggcgttcaactccagcaatgatgaatggacaaggaagcactacttcttcaagcaaaaatattgcctataattgttgttgggaccagtgccaggcttgcttcaactctagcccagatctggcagatcacatccgttccatacatgtagatggtcagcgaggaggggtatttgtttgcttatggaaaggttgtaaagtatataacactccatctaccagtcaaagttggttacaaaggcatatgctgacacacagtggagacaaacctttcaagtgtgttgttggtggctgcaatgccagctttgcttctcagggagggctagctcgtcatgtacccacacacttcagtcagcagaactcctcaaaagtttctagccagccaaaggccaaagaagaatctccttctaaagctggaatgaacaaaaggaggaaattaaagaacaaaagacgacgctcattaccacggccacatgatttcttcgatgcacaaacactggatgcgataagacatcgagccatatgctttaacctctcagctcatatagaaagtttagggaagggacacagtgttgtttttcatagtactgtaatagctaagagaaaagaagattctgggaagatcaaacttttgcttcattggatgcctgaagacattctgcctgatgtgtgggtgaatgaaagtgaacgacatcagttaaaaactaaagtagttcatttatcaaagctacccaaagatactgccttgcttttggacccaaacatatacagaacaatgccgcagaagagttgaagagatggagtttcactcttgttgcccaggctggtgtgcantggcgcgatcttggctcaccgaacctccgnttccgggtcangcgattcttctgcctcagcttcctgagtagctgggattaaagacacccgccaccacgcccagctaattttgtattttgagtggagacggggtttcgccatattgaccaggctggtctcaaactcccgacctcaggtgatctgcccgcctcggcctcccaaagtgctgagattacaggcgtgagccaccgtgcccagccaagtttaatttttacaccaatgattcatttctgcttttacaggtgattactttatctcactagaaaaacaaacactgctcaaatcctaaacaaaaagtgtccaaaacttacaaataagccttaatctcgaataattaccatgacattgtgttaccttgtgtgcttattgctgtacaagccttcttttggcttctgaacagagcaactgctgagcagaagcactttcaacctcgtctggtcatttgatgaattctgactcactgtggtgcctatgggtgaagtctattccccctgtttataattttaatggggaagaggccctgtgccaggtctgatttcacaacacacaaacacattaacaaaaaacgtcgacgcttccttccgggcggcgaacaaagtgctccaaggcgccatcgctacgctgtctcgaccccttcttgttcaagggtaaaccggtccccaaagaaggcgaatg

SEQ ID NO: 902 - DNA, 2123 bp, Homo sapiens
  misc_feature (1409)..(1409): n is a, c, g, or t
  misc_feature (1439)..(1439): n is a, c, g, or t
  misc_feature (1450)..(1450): n is a, c, g, or t
atggccgacctggaggagctctcccgcctgagccctctgccccccggcagcccgggttcggcggcgcggggccgggctgagccccccgaggaggaggaggaagaggaggaggaggaagaggaggcggaggccgaggcggtggcggcgctgctgctgaacggcggcagcggtgggggcggcggaggcggcggcggaggagtggggggcggcgaggcagagacgatgtcggagccgagccccgagagcgccagccaggccggggaggacgaagacgaggaggaggacgacgaggaggaggaagatgagagcagcagcagcggcgggggtgaggaggagagtagcgccgagagcctggtgggcagcagcggcgggagcagcagcgacgagacccgctcgttgagccccggcgccgccagcagcagcagcggggatggggacggcaaggagggcctggaggagcccaagggaccgcggggcagccagggcggcggcgggggcggcagcagtagcagcagcgtagtctccagcggcggcgacgagggctacgggactgggggaggcggaagcagcgcgacctccgggggccggcggggcagcttggagatgtcgtcggatggggaacccctgagccgcatggactcggaggacagcataagcagtactataatggatgtagacagcacaatttccagtgggcgttcaactccagcaatgatgaatggacaaggaagcactacttcttcaagcaaaaatattgcctataattgttgttgggaccagtgccaggcttgcttcaactctagcccagatctggcagatcacatccgttccatacatgtagatggtcagcgaggaggggtatttgtttgcttatggaaaggttgtaaagtatataacactccatctaccagtcaaagttggttacaaaggcatatgctgacacacagtggagacaaacctttcaagtgtgttgttggtggctgcaatgccagctttgcttctcagggagggctagctcgtcatgtacccacacacttcagtcagcagaactcctcaaaagtttctagccagccaaaggccaaagaagaatctccttctaaagctggaatgaacaaaaggaggaaattaaagaacaaaagacgacgctcattaccacggccacatgatttcttcgatgcacaaacactggatgcgataagacatcgagccatatgctttaacctctcagctcatatagaaagtttagggaagggacacagtgttgtttttcatagtactgtaatagctaagagaaaagaagattctgggaagatcaaacttttgcttcattggatgcctgaagacataacaatgccgcagaagagttgaagagatggagtttcactcttgttgcccaggctggtgtgcantggcgcgatcttggctcaccgaacctccgnttccgggtcangcgattcttctgcctcagcttcctgagtagctgggattaaagacacccgccaccacgcccagctaattttgtattttgagtggagacggggtttcgccatattgaccaggctggtctcaaactcccgacctcaggtgatctgcccgcctcggcctcccaaagtgctgagattacaggcgtgagccaccgtgcccagccaagtttaatttttacaccaatgattcatttctgcttttacaggtgattactttatctcactagaaaaacaaacactgctcaaatcctaaacaaaaagtgtccaaaacttacaaataagccttaatctcgaataattaccatgacattgtgttaccttgtgtgcttattgctgtacaagccttcttttggcttctgaacagagcaactgctgagcagaagcactttcaacctcgtctggtcatttgatgaattctgactcactgtggtgcctatgggtgaagtctattccccctgtttataattttaatggggaagaggccctgtgccaggtctgatttcacaacacacaaacacattaacaaaaaacgtcgacgcttccttccgggcggcgaacaaagtgctccaaggcgccatcgctacgctgtctcgaccccttcttgttcaagggtaaaccggtccccaaagaaggcgaatg

SEQ ID NO: 903 - DNA, 408 bp, Homo sapiens
ctattgatagatatgtatttgttaattgtttccatctttattacttattactgttatgtttttctaaatattctttactttttatgttgacttttagcacggccacatgatttcttcgatgcacaaacactggatgcgataagacatcgagccatatgctttaacctctcagctcatatagaaagtttagggaagggacacagtgttgtttttcatagtactgtaagtattcttttattttttcaaattaaatataaaactttgcaaaaaaatatttccacaatcatttctaaatctctcaaaatctaagaaagtacaatttaacagaaatcacaaaaccttttgttttatcagtatttaaaacattgtattattggttataaagcacacatttcttataattttaca

SEQ ID NO: 904 - DNA, 1035 bp, Homo sapiens
agcgggtattcacgcgccggaagtgcatttgcagagtgagacaaagcggagaacgctggtgggcctgttgtggagtacgctttggactgagaagcatcgaggctataggacgcagctgttgccatgacggcccagggggcctggtggctaaccgaggccggcgcttcaagtgggccattgagctaagcgggcctggaggaggcagcaggggtcgaagtgaccggggcagtggccagggagactcgctctacccagtcggttacttggacaagcaagtgcctgataccagcgtgcaagagacagaccggatcctggtggagaagcgctgctgggacatcgccttgggtcccctcaaacagattcccatgaatctcttcatcatgtacatggcaggcaatactatctccatcttccctactatgatggtgtgtatgatggcctggcgacccattcaggcacttatggccatttcagccactttcaagatgttagaaagttcaagccagaagtttcttcagggtttggtctatctcattgggaacctgatgggtttggcattggctgtttacaagtgccagtccatgggactgttacctacacatgcatcggattggttagccttcattgagccccctgagagaatggagttcagtggtggaggactgcttttgtgaacatgagaaagcagcgcctggtccctatgtatttgggtcttatttacatccttctttaagcccagtggctcctcagcatactcttaaactaatcacttatgttaaaaagaaccaaaagactcttttctccatggtggggtgacaggtcctagaaggacaatgtgcatattacgacaaacacaaagaaactataccataacccaaggctgaaaataatgtagaaaactttatttttgtttccagtacagagcaaaacaacaacaaaaaaacataactatgtaaacaagagaataactgctgctaaatcaagaactgttgcagcatctcctttcaataaattaaatggttgagaacaatgcat

SEQ ID NO: 905 - DNA, 794 bp, Homo sapiens
ttggtggcaaggtctgcaagtgcgtccgggacgcaaataaaaccatggctggagtataaagactcctatatagggcgacaagcgctgctgggacatcgccttgggtcccctcaaacagattcccatgaatctcttcatcatgtacatggcaggcaatactatctccatcttccctactatgatggtgtgtatgatggcctggcgacccattcaggcacttatggccatttcagccactttcaagatgttagaaagttcaagccagaagtttcttcagggtttggtctatctcattgggaacctgatgggtttggcattggctgtttacaagtgccagtccatgggactgttacctacacatgcatcggattggttagccttcattgagccccctgagagaatggagttcagtggtggaggactgcttttgtgaacatgagaaagcagcgcctggtccctatgtatttgggtcttatttacatccttctttaagcccagtggctcctcagcatactcttaaactaatcacttatgttaaaaagaaccaaaagactcttttctccatggtggggtgacaggtcctagaaggacaatgtgcatattacgacaaacacaaagaaactataccataacccaaggctgaaaataatgtagaaaactttatttttgtttccagtacagagcaaaacaacaacaaaaaaacataactatgtaaacaagagaataactgctgctaaatcaagaactgttgcagcatctcctttcaataaattaaatggttgagaacaatgcat

SEQ ID NO: 906 - DNA, 517 bp, Homo sapiens
ggacgcgtgggtcgacccacgcgtctgatgggtttggcattggctgtttacaagtgccagtccatgggactgttacctacacatgcatcggattggttagccttcattgagccccctgagagaatggagttcagtggtggaggactgcttttgtgaacatgagaaagcagcgcctggtccctatgtatttgggtcttatttacatccttctttaagcccagtggctcctcagcatactcttaaactaatcacttatgttaaaaagaaccaaaagactcttttctccatggtggggtgacaggtcctagaaggacaatgtgcatattacgacaaacacaaagaaactataccataacccaaggctgaaaataatgtagaaaactttatttttgtttccagtacagagcaaaacaacaacaaaaaaacataactatgtaaacaagagaataactgctgctaaatcaagaactgttgcagcatctcctttcaataaattaaatggttgagaacaatgcat

SEQ ID NO: 907 - DNA, 874 bp, Homo sapiens
agcgggtattcacgcgccggaagtgcatttgcagagtgagacaaagcggagaacgctggtgggcctgttgtggagtacgctttggactgagaagcatcgaggctataggacgcagctgttgccatgacggcccagggggcctggtggctaaccgaggccggcgcttcaagtgggccattgagctaagcgggcctggaggaggcagcaggggtcgaagtgaccggggcagtggccagggagactcgctctacccagtcggttacttggacaagcaagtgcctgataccagcgtgcaagagacagaccggatcctggtggagaagcgctgctgggacatcgccttgggtcccctcaaacagattcccatgaatctcttcatcatgtacatggcaggcaatactatctccatcttccctactatgatggtgtgtatgatggcctggcgacccattcaggcacttatggccatttcagccaagaatggagttcagtggtggaggactgcttttgtgaacatgagaaagcagcgcctggtccctatgtatttgggtcttatttacatccttctttaagcccagtggctcctcagcatactcttaaactaatcacttatgttaaaaagaaccaaaagactcttttctccatggtggggtgacaggtcctagaaggacaatgtgcatattacgacaaacacaaagaaactataccataacccaaggctgaaaataatgtagaaaactttatttttgtttccagtacagagcaaaacaacaacaaaaaaacataactatgtaaacaagagaataactgctgctaaatcaagaactgttgcagcatctcctttcaataaattaaatggttgagaacaatgcat

SEQ ID NO: 908 - DNA, 594 bp, Homo sapiens
  misc_feature (37)..(37): n is a, c, g, or t
cacacacacatcattcaaaatagcaaaaggaaacaancctttacgctgctgggacatcgccttgggtcccctcaaacagattcccatgaatctcttcatcatgtacatggcaggcaatactatctccatcttccctactatgatggtgtgtatgatggcctggcgacccattcaggcacttatggccatttcagccaagaatggagttcagtggtggaggactgcttttgtgaacatgagaaagcagcgcctggtccctatgtatttgggtcttatttacatccttctttaagcccagtggctcctcagcatactcttaaactaatcacttatgttaaaaagaaccaaaagactcttttctccatggtggggtgacaggtcctagaaggacaatgtgcatattacgacaaacacaaagaaactataccataacccaaggctgaaaataatgtagaaaactttatttttgtttccagtacagagcaaaacaacaacaaaaaaacataactatgtaaacaagagaataactgctgctaaatcaagaactgttgcagcatctcctttcaataaattaaatggttgagaacaatgcat

SEQ ID NO: 909 - DNA, 3052 bp, Homo sapiens
agcgggtattcacgcgccggaagtgcatttgcagagtgagacaaagcggagaacgctggtgggcctgttgtggagtacgctttggactgagaagcatcgaggctataggacgcagctgttgccatgacggcccagggggcctggtggctaaccgaggccggcgcttcaagtgggccattgagctaagcgggcctggaggaggcagcaggggtcgaagtgaccggggcagtggccagggagactcgctctacccagtcggttacttggacaagcaagtgcctgataccagcgtgcaagagacagaccggatcctggtggagaagcgctgctgggacatcgccttgggtcccctcaaacagattcccatgaatctcttcatcatgtacatggcaggcaatactatctccatcttccctactatgatggtgtgtatgatggcctggcgacccattcaggcacttatggccatttcagccactttcaagatgttagaaagttcaagccagaagtttcttcagggtttggtctatctcattgggaacctgatgggtttggcattggctgtttacaagtgccagtccatgggactgttacctacacatgcatcggattggttagccttcattgagccccctgagagaatggagttcagtggtggaggactgcttttgtgaacatgagaaagcagcgcctggtccctatgtatttgggtcttatttacatccttctttaagcccagtggctcctcagcatactcttaaactaatcacttatgttaaaaagaaccaaaagactcttttctccatggtggggtgacaggtcctagaaggacaatgtgcatattacgacaaacacaaagaaactataccataacccaaggctgaaaataatgtagaaaactttatttttgtttccagtacagagcaaaacaacaacaaaaaaacataactatgtaaacaagagaataactgctgctaaatcaagaactgttgcagcatctcctttcaataaattaaatggttgagaacaatgcataaaaaaagttgcacaagttccttattttccttaatatttcacttctatttaatacaagctgggacataaaaattctgttggggatacctgggggaagatgtgagaaactaatgctgaattcagcttatacatgatgaaaagaaaaaccagacaaaaggagcacataaatatgcatacagtgtaactgttattattttaatacccacgataagggatttttgttagcatgtttagggggaacgaggattggtgggatccttgggccacaggaatctgaggcaacggaagatatatagagtgatcgtccccctgccgaaggaacctggcatctgtcaagcagatgctgcagttcaaacttcagcttttaagatagatagctattgaaggcagagggtcagcaggaggatgtgtatttctaatctaccctggtaaagtcataggtaagactcaaaagcgggatcttattcaaaaggcaggtatttcctttgttttctgtcttgaaatagccccttcccctaaggtgcattctctcaagttttcagtattgctttatttgcagtgattaaaagagatgagagactttggagacagacaacgtaagcaacacatacacacatgaaatactctagacagagatgaatataaatctggcctaataaccagttttccatgtaacagtgattttgtgtttcgggctgaagcagtggttatattaaaagccactaattcccttatccctttaaaagatttttacaattctccaaccacaaacagcacttctaaaactaactttactttctgcccataatttgttctacatggaaaaaaaaaatattactttggccaggggtgtgtgtaaatgtggcagaattcctaggcaggctgacctttacagtatgggcctttaagatactggatcctggttgggcacagtggctcacgcctgtaatccagcaccgaggccaagaaaattactcaatttcttaagctatattgaagggttttctctgtccttacaggtcaaatgaataatttgtgacacctaggtcagcttgctccatgtcctatttagtaatcaaagaagagtggcactatttatgactaataaattgaaattcaaaaacagccatgaatacaggcaagaaaagtttctctaaataactattctgtaaaagaaatgaagatttcacatacttgaaattactgctcagccagccacataagtagtttccctatgcttgtaagccagatgtttgatcagtatattagtaaataaaaagctgagcttacacaagtatttccttggcacactgaactttctttttgaaacatatcactctgttacccaggctggagtgcagaggtgcaatcctggctcactgcaacctccgcctcctgggttcaaatgatcctcctgccttagccttccgtgttgctgggatcacaggcatgcaccaccatgcccggctaatttttgtatttttagtatagacaggttttcaccatgttggccaggatggtctcgaactcctgacctcaagtgattcacctgccttggcctcccaaagtgctgggattacaggtgtgagccacggcacccggcctgaagtttctgaaaacaaattagaagactgttggcttggctaatctcgtagttcagggccaagtttctgtagtcagaatgaagaataaaattgaaagaaaaagggggaaatgcttatacttggcattaagttgaatgcctcaagtcttaactatggctttgtagatgaggcaaaagatttcttagtggtaaaatttcttcaacaggtcaatgccaatctgtatgccattttagtaaagtaggtaaggagagtagccgctcagtaactttggcactaaagaaagagtgtggctctagaacttccaattccattgctagatgtgccctttaaaagatggtccagtgctttcagggaaggatgtttagccagttttcctagtatttgttccttaagattttttgacctgtgcttaa

SEQ ID NO: 910 - DNA, 2416 bp, Homo sapiens
agcgggtattcacgcgccggaagtgcatttgcagagtgagacaaagcggagaacgctggtgggcctgttgtggagtacgctttggactgagaagcatcgaggctataggacgcagctgttgccatgacggcccagggggcctggtggctaaccgaggccggcgcttcaagtgggccattgagctaagcgggcctggaggaggcagcaggggtcgaagtgaccggggcagtggccagggagactcgctctacccagtcggttacttggacaagcaagtgcctgataccagcgtgcaagagacagaccggatcctggtggagaagcgctgctgggacatcgccttgggtcccctcaaacagattcccatgaatctcttcatcatgtacatggcaggcaatactatctccatcttccctactatgatggtgtgtatgatggcctggcgacccattcaggcacttatggccatttcagccactttcaagatgttagaaagttcaagccagaagtttcttcagggtttggtctatctcattgggaacctgatgggtttggcattggctgtttacaagtgccagtccatgggactgttacctacacatgcatcggattggttagccttcattgagccccctgagagaatggagttcagtggtggaggactgcttttgtgaacatgagaaagcagcgcctggtccctatgtatttgggtcttatttacatccttctttaagcccagtggctcctcagcatactcttaaactaatcacttatgttaaaaagaaccaaaagactcttttctccatggtggggtgacaggtcctagaaggacaatgtgcatattacgacaaacacaaagaaactataccataacccaaggctgaaaataatgtagaaaactttatttttgtttccagtacagagcaaaacaacaacaaaaaaacataactatgtaaacaagagaataactgctgctaaatcaagaactgttgcagcatctcctttcaataaattaaatggttgagaacaatgcataaaaaaagttgcacaagttccttattttccttaatatttcacttctatttaatacaagctgggacataaaaattctgttggggatacctgggggaagatgtgagaaactaatgctgaattcagcttatacatgatgaaaagaaaaaccagacaaaaggagcacataaatatgcatacagtgtaactgttattattttaatacccacgataagggatttttgttagcatgtttagggggaacgaggattggtgggatccttgggccacaggaatctgaggcaacggaagatatatagagtgatcgtccccctgccgaaggaacctggcatctgtcaagcagatgctgcagttcaaacttcagcttttaagatagatagctattgaaggcagagggtcagcaggaggatgtgtatttctaatctaccctggtaaagtcataggtaagactcaaaagcgggatcttattcaaaaggcaggtatttcctttgttttctgtcttgaaatagccccttcccctaaggtgcattctctcaagttttcagtattgctttatttgcagtgattaaaagagatgagagactttggagacagacaacgtaagcaacacatacacacatgaaatactctagacagagatgaatataaatctggcctaataaccagttttccatgtaacagtgattttgtgtttcgggctgaagcagtggttatattaaaagccactaattcccttatccctttaaaagatttttacaattctccaaccacaaacagcacttctaaaactaactttactttctgcccataatttgttctacatggaaaaaaaaaatattactttggccaggggtgtgtgtaaatgtggcagaattcctaggcaggctgacctttacagtatgggcctttaagatactggatcctggttgggcacagtggctcacgcctgtaatccagcaccgaggccaagctgaagtttctgaaaacaaattagaagactgttggcttggctaatctcgtagttcagggccaagtttctgtagtcagaatgaagaataaaattgaaagaaaaagggggaaatgcttatacttggcattaagttgaatgcctcaagtcttaactatggctttgtagatgaggcaaaagatttcttagtggtaaaatttcttcaacaggtcaatgccaatctgtatgccattttagtaaagtaggtaaggagagtagccgctcagtaactttggcactaaagaaagagtgtggctctagaacttccaattccattgctagatgtgccctttaaaagatggtccagtgctttcagggaaggatgtttagccagttttcctagtatttgttccttaagattttttgacctgtgcttaa

SEQ ID NO: 911 - DNA, 3078 bp, Homo sapiens
ggctgtactggcccggaattttggtgatccaactttcttgtacaaagttgtgcggtcagctcgcgatgaactatgagaacgctggtgggcctgttgtggagtacgctttggactgagaagcatcgaggctataggacgcagctgttgccatgacggcccagggggcctggtggctaaccgaggccggcgcttcaagtgggccattgagctaagcgggcctggaggaggcagcaggggtcgaagtgaccggggcagtggccagggagactcgctctacccagtcggttacttggacaagcaagtgcctgataccagcgtgcaagagacagaccggatcctggtggagaagcgctgctgggacatcgccttgggtcccctcaaacagattcccatgaatctcttcatcatgtacatggcaggcaatactatctccatcttccctactatgatggtgtgtatgatggcctggcgacccattcaggcacttatggccatttcagccactttcaagatgttagaaagttcaagccagaagtttcttcagggtttggtctatctcattgggaacctgatgggtttggcattggctgtttacaagtgccagtccatgggactgttacctacacatgcatcggattggttagccttcattgagccccctgagagaatggagttcagtggtggaggactgcttttgtgaacatgagaaagcagcgcctggtccctatgtatttgggtcttatttacatccttctttaagcccagtggctcctcagcatactcttaaactaatcacttatgttaaaaagaaccaaaagactcttttctccatggtggggtgacaggtcctagaaggacaatgtgcatattacgacaaacacaaagaaactataccataacccaaggctgaaaataatgtagaaaactttatttttgtttccagtacagagcaaaacaacaacaaaaaaacataactatgtaaacaagagaataactgctgctaaatcaagaactgttgcagcatctcctttcaataaattaaatggttgagaacaatgcataaaaaaagttgcacaagttccttattttccttaatatttcacttctatttaatacaagctgggacataaaaattctgttggggatacctgggggaagatgtgagaaactaatgctgaattcagcttatacatgatgaaaagaaaaaccagacaaaaggagcacataaatatgcatacagtgtaactgttattattttaatacccacgataagggatttttgttagcatgtttagggggaacgaggattggtgggatccttgggccacaggaatctgaggcaacggaagatatatagagtgatcgtccccctgccgaaggaacctggcatctgtcaagcagatgctgcagttcaaacttcagcttttaagatagatagctattgaaggcagagggtcagcaggaggatgtgtatttctaatctaccctggtaaagtcataggtaagactcaaaagcgggatcttattcaaaaggcaggtatttcctttgttttctgtcttgaaatagccccttcccctaaggtgcattctctcaagttttcagtattgctttatttgcagtgattaaaagagatgagagactttggagacagacaacgtaagcaacacatacacacatgaaatactctagacagagatgaatataaatctggcctaataaccagttttccatgtaacagtgattttgtgtttcgggctgaagcagtggttatattaaaagccactaattcccttatccctttaaaagatttttacaattctccaaccacaaacagcacttctaaaactaactttactttctgcccataatttgttctacatggaaaaaaaaaatattactttggccaggggtgtgtgtaaatgtggcagaattcctaggcaggctgacctttacagtatgggcctttaagatactggatcctggttgggcacagtggctcacgcctgtaatccagcaccgaggccaagaaaattactcaatttcttaagctatattgaagggttttctctgtccttacaggtcaaatgaataatttgtgacacctaggtcagcttgctccatgtcctatttagtaatcaaagaagagtggcactatttatgactaataaattgaaattcaaaaacagccatgaatacaggcaagaaaagtttctctaaataactattctgtaaaagaaatgaagatttcacatacttgaaattactgctcagccagccacataagtagtttccctatgcttgtaagccagatgtttgatcagtatattagtaaataaaaagctgagcttacacaagtatttccttggcacactgaactttctttttgaaacatatcactctgttacccaggctggagtgcagaggtgcaatcctggctcactgcaacctccgcctcctgggttcaaatgatcctcctgccttagccttccgtgttgctgggatcacaggcatgcaccaccatgcccggctaatttttgtatttttagtatagacaggttttcaccatgttggccaggatggtctcgaactcctgacctcaagtgattcacctgccttggcctcccaaagtgctgggattacaggtgtgagccacggcacccggcctgaagtttctgaaaacaaattagaagactgttggcttggctaatctcgtagttcagggccaagtttctgtagtcagaatgaagaataaaattgaaagaaaaagggggaaatgcttatacttggcattaagttgaatgcctcaagtcttaactatggctttgtagatgaggcaaaagatttcttagtggtaaaatttcttcaacaggtcaatgccaatctgtatgccattttagtaaagtaggtaaggagagtagccgctcagtaactttggcactaaagaaagagtgtggctctagaacttccaattccattgctagatgtgccctttaaaagatggtccagtgctttcagggaaggatgtttagccagttttcctagtatttgttccttaagattttttgacctgtgcttaa

SEQ ID NO: 912 - DNA, 1055 bp, Homo sapiens
agcgggtattcacgcgccggaagtgcatttgcagagtgagacaaagcggagaacgctggtgggcctgttgtggagtacgctttggactgagaagcatcgaggctataggacgcagctgttgccatgacggcccagggggcctggtggctaaccgaggccggcgcttcaagtgggccattgagctaagcgggcctggaggaggcagcaggggtcgaagtgaccggggcagtggccagggagactcgctctacccagtcggttacttggacaagcaagtgcctgataccagcgtgcaagagacagaccggatcctggtggagaagcgctgctgggacatcgccttgggtcccctcaaacagattcccatgaatctcttcatcatgtacatggcaggcaatactatctccatcttccctactatgatggtgtgtatgatggcctggcgacccattcaggcacttatggccatttcagccactttcaagatgttagaaagttcaagccagaagtttcttcagggtttggtctatctcattgggaacctgatgggtttggcattggctgtttacaagtgccagtccatgggactgttacctacacatgcatcggattggttagccttcattgagccccctgagagaatggagttcagtggtggaggactgcttttgtgaacatgagaaagcagcgcctggtccctatgtatttgggtcttatttacatccttctttaagcccagtggctcctcagcatactcttaaactaatcacttatgttaaaaagaaccaaaagactcttttctccatggtggggtgacaggtcctagaaggacaatgtgcatattacgacaaacacaaagaaactataccataacccaaggctgaaaataatgtagaaaactttatttttgtttccagtacagagcaaaacaacaacaaaaaaacataactatgtaaacaagagaataactgctgctaaatcaagaactgttgcagcatctcctttcaataaattaaatggttgagaacaatgcatccaacaaaagggcggccgct

SEQ ID NO: 913 - DNA, 3046 bp, Homo sapiens
agctcggtaccctttcccaacgagaacgctggtgggcctgttgtggagtacgctttggactgagaagcatcgaggctataggacgcagctgttgccatgacggcccagggggcctggtggctaaccgaggccggcgcttcaagtgggccattgagctaagcgggcctggaggaggcagcagtttcttggtttggttttttaggggtcgaagtgaccggggcagtggccagggagactcgctctacccagtcggttacttggacaagcaagtgcctgataccagcgtgcaagagacagaccggatcctggtggagaagcgctgctgggacatcgccttgggtcccctcaaacagattcccatgaatctcttcatcatgtacatggcaggcaatactatctccatcttccctactatgatggtgtgtatgatggcctggcgacccattcaggcacttatggccatttcagccactttcaagatgttagaaagttcaagccagaagtttcttcagggtttggtctatctcattgggaacctgatgggtttggcattggctgtttacaagtgccagtccatgggactgttacctacacatgcatcggattggttagccttcattgagccccctgagagaatggagttcagtggtggaggactgcttttgtgaacatgagaaagcagcgcctggtccctatgtatttgggtcttatttacatccttctttaagcccagtggctcctcagcatactcttaaactaatcacttatgttaaaaagaaccaaaagactcttttctccatggtggggtgacaggtcctagaaggacaatgtgcatattacgacaaacacaaagaaactataccataacccaaggctgaaaataatgtagaaaactttatttttgtttccagtacagagcaaaacaacaacaaaaaaacataactatgtaaacaagagaataactgctgctaaatcaagaactgttgcagcatctcctttcaataaattaaatggttgagaacaatgcataaaaaaagttgcacaagttccttattttccttaatatttcacttctatttaatacaagctgggacataaaaattctgttggggatacctgggggaagatgtgagaaactaatgctgaattcagcttatacatgatgaaaagaaaaaccagacaaaaggagcacataaatatgcatacagtgtaactgttattattttaatacccacgataagggatttttgttagcatgtttagggggaacgaggattggtgggatccttgggccacaggaatctgaggcaacggaagatatatagagtgatcgtccccctgccgaaggaacctggcatctgtcaagcagatgctgcagttcaaacttcagcttttaagatagatagctattgaaggcagagggtcagcaggaggatgtgtatttctaatctaccctggtaaagtcataggtaagactcaaaagcgggatcttattcaaaaggcaggtatttcctttgttttctgtcttgaaatagccccttcccctaaggtgcattctctcaagttttcagtattgctttatttgcagtgattaaaagagatgagagactttggagacagacaacgtaagcaacacatacacacatgaaatactctagacagagatgaatataaatctggcctaataaccagttttccatgtaacagtgattttgtgtttcgggctgaagcagtggttatattaaaagccactaattcccttatccctttaaaagatttttacaattctccaaccacaaacagcacttctaaaactaactttactttctgcccataatttgttctacatggaaaaaaaaaatattactttggccaggggtgtgtgtaaatgtggcagaattcctaggcaggctgacctttacagtatgggcctttaagatactggatcctggttgggcacagtggctcacgcctgtaatccagcaccgaggccaagaaaattactcaatttcttaagctatattgaagggttttctctgtccttacaggtcaaatgaataatttgtgacacctaggtcagcttgctccatgtcctatttagtaatcaaagaagagtggcactatttatgactaataaattgaaattcaaaaacagccatgaatacaggcaagaaaagtttctctaaataactattctgtaaaagaaatgaagatttcacatacttgaaattactgctcagccagccacataagtagtttccctatgcttgtaagccagatgtttgatcagtatattagtaaataaaaagctgagcttacacaagtatttccttggcacactgaactttctttttgaaacatatcactctgttacccaggctggagtgcagaggtgcaatcctggctcactgcaacctccgcctcctgggttcaaatgatcctcctgccttagccttccgtgttgctgggatcacaggcatgcaccaccatgcccggctaatttttgtatttttagtatagacaggttttcaccatgttggccaggatggtctcgaactcctgacctcaagtgattcacctgccttggcctcccaaagtgctgggattacaggtgtgagccacggcacccggcctgaagtttctgaaaacaaattagaagactgttggcttggctaatctcgtagttcagggccaagtttctgtagtcagaatgaagaataaaattgaaagaaaaagggggaaatgcttatacttggcattaagttgaatgcctcaagtcttaactatggctttgtagatgaggcaaaagatttcttagtggtaaaatttcttcaacaggtcaatgccaatctgtatgccattttagtaaagtaggtaaggagagtagccgctcagtaactttggcactaaagaaagagtgtggctctagaacttccaattccattgctagatgtgccctttaaaagatggtccagtgctttcagggaaggatgtttagccagttttcctagtatttgttccttaagattttttgacctgtgcttaa

SEQ ID NO: 914 - DNA, 2769 bp, Homo sapiens
  misc_feature (18)..(18): n is a, c, g, or t
cctctctaacaccctcanatcgaagatgaagtttgctcaacgctgctgggacatcgccttgggtcccctcaaacagattcccatgaatctcttcatcatgtacatggcaggcaatactatctccatcttccctactatgatggtgtgtatgatggcctggcgacccattcaggcacttatggccatttcagccactttcaagatgttagaaagttcaagccagaagtttcttcagggtttggtctatctcattgggaacctgatgggtttggcattggctgtttacaagtgccagtccatgggactgttacctacacatgcatcggattggttagccttcattgagccccctgagagaatggagttcagtggtggaggactgcttttgtgaacatgagaaagcagcgcctggtccctatgtatttgggtcttatttacatccttctttaagcccagtggctcctcagcatactcttaaactaatcacttatgttaaaaagaaccaaaagactcttttctccatggtggggtgacaggtcctagaaggacaatgtgcatattacgacaaacacaaagaaactataccataacccaaggctgaaaataatgtagaaaactttatttttgtttccagtacagagcaaaacaacaacaaaaaaacataactatgtaaacaagagaataactgctgctaaatcaagaactgttgcagcatctcctttcaataaattaaatggttgagaacaatgcataaaaaaagttgcacaagttccttattttccttaatatttcacttctatttaatacaagctgggacataaaaattctgttggggatacctgggggaagatgtgagaaactaatgctgaattcagcttatacatgatgaaaagaaaaaccagacaaaaggagcacataaatatgcatacagtgtaactgttattattttaatacccacgataagggatttttgttagcatgtttagggggaacgaggattggtgggatccttgggccacaggaatctgaggcaacggaagatatatagagtgatcgtccccctgccgaaggaacctggcatctgtcaagcagatgctgcagttcaaacttcagcttttaagatagatagctattgaaggcagagggtcagcaggaggatgtgtatttctaatctaccctggtaaagtcataggtaagactcaaaagcgggatcttattcaaaaggcaggtatttcctttgttttctgtcttgaaatagccccttcccctaaggtgcattctctcaagttttcagtattgctttatttgcagtgattaaaagagatgagagactttggagacagacaacgtaagcaacacatacacacatgaaatactctagacagagatgaatataaatctggcctaataaccagttttccatgtaacagtgattttgtgtttcgggctgaagcagtggttatattaaaagccactaattcccttatccctttaaaagatttttacaattctccaaccacaaacagcacttctaaaactaactttactttctgcccataatttgttctacatggaaaaaaaaaatattactttggccaggggtgtgtgtaaatgtggcagaattcctaggcaggctgacctttacagtatgggcctttaagatactggatcctggttgggcacagtggctcacgcctgtaatccagcaccgaggccaagaaaattactcaatttcttaagctatattgaagggttttctctgtccttacaggtcaaatgaataatttgtgacacctaggtcagcttgctccatgtcctatttagtaatcaaagaagagtggcactatttatgactaataaattgaaattcaaaaacagccatgaatacaggcaagaaaagtttctctaaataactattctgtaaaagaaatgaagatttcacatacttgaaattactgctcagccagccacataagtagtttccctatgcttgtaagccagatgtttgatcagtatattagtaaataaaaagctgagcttacacaagtatttccttggcacactgaactttctttttgaaacatatcactctgttacccaggctggagtgcagaggtgcaatcctggctcactgcaacctccgcctcctgggttcaaatgatcctcctgccttagccttccgtgttgctgggatcacaggcatgcaccaccatgcccggctaatttttgtatttttagtatagacaggttttcaccatgttggccaggatggtctcgaactcctgacctcaagtgattcacctgccttggcctcccaaagtgctgggattacaggtgtgagccacggcacccggcctgaagtttctgaaaacaaattagaagactgttggcttggctaatctcgtagttcagggccaagtttctgtagtcagaatgaagaataaaattgaaagaaaaagggggaaatgcttatacttggcattaagttgaatgcctcaagtcttaactatggctttgtagatgaggcaaaagatttcttagtggtaaaatttcttcaacaggtcaatgccaatctgtatgccattttagtaaagtaggtaaggagagtagccgctcagtaactttggcactaaagaaagagtgtggctctagaacttccaattccattgctagatgtgccctttaaaagatggtccagtgctttcagggaaggatgtttagccagttttcctagtatttgttccttaagattttttgacctgtgcttaa

SEQ ID NO: 915 - DNA, 2770 bp, Homo sapiens
cgtttttctccactccccctccccaaacaaccccccttaagcgctgctgggacatcgccttgggtcccctcaaacagattcccatgaatctcttcatcatgtacatggcaggcaatactatctccatcttccctactatgatggtgtgtatgatggcctggcgacccattcaggcacttatggccatttcagccactttcaagatgttagaaagttcaagccagaagtttcttcagggtttggtctatctcattgggaacctgatgggtttggcattggctgtttacaagtgccagtccatgggactgttacctacacatgcatcggattggttagccttcattgagccccctgagagaatggagttcagtggtggaggactgcttttgtgaacatgagaaagcagcgcctggtccctatgtatttgggtcttatttacatccttctttaagcccagtggctcctcagcatactcttaaactaatcacttatgttaaaaagaaccaaaagactcttttctccatggtggggtgacaggtcctagaaggacaatgtgcatattacgacaaacacaaagaaactataccataacccaaggctgaaaataatgtagaaaactttatttttgtttccagtacagagcaaaacaacaacaaaaaaacataactatgtaaacaagagaataactgctgctaaatcaagaactgttgcagcatctcctttcaataaattaaatggttgagaacaatgcataaaaaaagttgcacaagttccttattttccttaatatttcacttctatttaatacaagctgggacataaaaattctgttggggatacctgggggaagatgtgagaaactaatgctgaattcagcttatacatgatgaaaagaaaaaccagacaaaaggagcacataaatatgcatacagtgtaactgttattattttaatacccacgataagggatttttgttagcatgtttagggggaacgaggattggtgggatccttgggccacaggaatctgaggcaacggaagatatatagagtgatcgtccccctgccgaaggaacctggcatctgtcaagcagatgctgcagttcaaacttcagcttttaagatagatagctattgaaggcagagggtcagcaggaggatgtgtatttctaatctaccctggtaaagtcataggtaagactcaaaagcgggatcttattcaaaaggcaggtatttcctttgttttctgtcttgaaatagccccttcccctaaggtgcattctctcaagttttcagtattgctttatttgcagtgattaaaagagatgagagactttggagacagacaacgtaagcaacacatacacacatgaaatactctagacagagatgaatataaatctggcctaataaccagttttccatgtaacagtgattttgtgtttcgggctgaagcagtggttatattaaaagccactaattcccttatccctttaaaagatttttacaattctccaaccacaaacagcacttctaaaactaactttactttctgcccataatttgttctacatggaaaaaaaaaatattactttggccaggggtgtgtgtaaatgtggcagaattcctaggcaggctgacctttacagtatgggcctttaagatactggatcctggttgggcacagtggctcacgcctgtaatccagcaccgaggccaagaaaattactcaatttcttaagctatattgaagggttttctctgtccttacaggtcaaatgaataatttgtgacacctaggtcagcttgctccatgtcctatttagtaatcaaagaagagtggcactatttatgactaataaattgaaattcaaaaacagccatgaatacaggcaagaaaagtttctctaaataactattctgtaaaagaaatgaagatttcacatacttgaaattactgctcagccagccacataagtagtttccctatgcttgtaagccagatgtttgatcagtatattagtaaataaaaagctgagcttacacaagtatttccttggcacactgaactttctttttgaaacatatcactctgttacccaggctggagtgcagaggtgcaatcctggctcactgcaacctccgcctcctgggttcaaatgatcctcctgccttagccttccgtgttgctgggatcacaggcatgcaccaccatgcccggctaatttttgtatttttagtatagacaggttttcaccatgttggccaggatggtctcgaactcctgacctcaagtgattcacctgccttggcctcccaaagtgctgggattacaggtgtgagccacggcacccggcctgaagtttctgaaaacaaattagaagactgttggcttggctaatctcgtagttcagggccaagtttctgtagtcagaatgaagaataaaattgaaagaaaaagggggaaatgcttatacttggcattaagttgaatgcctcaagtcttaactatggctttgtagatgaggcaaaagatttcttagtggtaaaatttcttcaacaggtcaatgccaatctgtatgccattttagtaaagtaggtaaggagagtagccgctcagtaactttggcactaaagaaagagtgtggctctagaacttccaattccattgctagatgtgccctttaaaagatggtccagtgctttcagggaaggatgtttagccagttttcctagtatttgttccttaagattttttgacctgtgcttaa

SEQ ID NO: 916 - DNA, 3634 bp, Homo sapiens
agcgggtattcacgcgccggaagtgcatttgcagagtgagacaaagcggagaacgctggtgggcctgttgtggagtacgctttggactgagaagcatcgaggctataggacgcagctgttgccatgacggcccagggggcctggtggctaaccgaggccggcgcttcaagtgggccattgagctaagcgggcctggaggaggcagcaggggtcgaagtgaccggggcagtggccagggagactcgctctacccagtcggttacttggacaagcaagtgcctgataccagcgtgcaagagacagaccggatcctggtggagaagcgctgctgggacatcgccttgggtcccctcaaacagattcccatgaatctcttcatcatgtacatggcaggcaatactatctccatcttccctactatgatggtgtgtatgatggcctggcgacccattcaggcacttatggccatttcagccagtaagtattcttgaaacaataacccttccataagtttgaagaattaaaggcaggccgggcatggtggctcacgcctgtaatcccagcactttgggaggcgccaagctgggtggatcatctgagggcaggagttcgagaccagcctggccaacatggtgaaaccttgtctctactaaaaatgcaaaaattagctgggcgtggtggcacacgcctgtaatcccagctgcttgggaggctgagacaggagaatcacttgaacctgggaggcagaggttgcagtgagccgagatcgtgccactgcactccagcctgggtgacagaacgagactccatctcaaaaaaaaggaagaattaaaggtaaattcttagggacagtttttggctaacaggtatataggggagtggggtaatggtggtggcatggaggggagtgtagtgcttaccatggttttctgtttgcctttaatggtcctatttgctgtcttactatgggtctgtctatatgaatttaatatacagttggcttgattcgtattgggggaaagagttcttttggtttgacaacttctgttaccgcaacagctttcaagatgttagaaagttcaagccagaagtttcttcagggtttggtctatctcattgggaacctgatgggtttggcattggctgtttacaagtgccagtccatgggactgttacctacacatgcatcggattggttagccttcattgagccccctgagagaatggagttcagtggtggaggactgcttttgtgaacatgagaaagcagcgcctggtccctatgtatttgggtcttatttacatccttctttaagcccagtggctcctcagcatactcttaaactaatcacttatgttaaaaagaaccaaaagactcttttctccatggtggggtgacaggtcctagaaggacaatgtgcatattacgacaaacacaaagaaactataccataacccaaggctgaaaataatgtagaaaactttatttttgtttccagtacagagcaaaacaacaacaaaaaaacataactatgtaaacaagagaataactgctgctaaatcaagaactgttgcagcatctcctttcaataaattaaatggttgagaacaatgcataaaaaaagttgcacaagttccttattttccttaatatttcacttctatttaatacaagctgggacataaaaattctgttggggatacctgggggaagatgtgagaaactaatgctgaattcagcttatacatgatgaaaagaaaaaccagacaaaaggagcacataaatatgcatacagtgtaactgttattattttaatacccacgataagggatttttgttagcatgtttagggggaacgaggattggtgggatccttgggccacaggaatctgaggcaacggaagatatatagagtgatcgtccccctgccgaaggaacctggcatctgtcaagcagatgctgcagttcaaacttcagcttttaagatagatagctattgaaggcagagggtcagcaggaggatgtgtatttctaatctaccctggtaaagtcataggtaagactcaaaagcgggatcttattcaaaaggcaggtatttcctttgttttctgtcttgaaatagccccttcccctaaggtgcattctctcaagttttcagtattgctttatttgcagtgattaaaagagatgagagactttggagacagacaacgtaagcaacacatacacacatgaaatactctagacagagatgaatataaatctggcctaataaccagttttccatgtaacagtgattttgtgtttcgggctgaagcagtggttatattaaaagccactaattcccttatccctttaaaagatttttacaattctccaaccacaaacagcacttctaaaactaactttactttctgcccataatttgttctacatggaaaaaaaaaatattactttggccaggggtgtgtgtaaatgtggcagaattcctaggcaggctgacctttacagtatgggcctttaagatactggatcctggttgggcacagtggctcacgcctgtaatccagcaccgaggccaagaaaattactcaatttcttaagctatattgaagggttttctctgtccttacaggtcaaatgaataatttgtgacacctaggtcagcttgctccatgtcctatttagtaatcaaagaagagtggcactatttatgactaataaattgaaattcaaaaacagccatgaatacaggcaagaaaagtttctctaaataactattctgtaaaagaaatgaagatttcacatacttgaaattactgctcagccagccacataagtagtttccctatgcttgtaagccagatgtttgatcagtatattagtaaataaaaagctgagcttacacaagtatttccttggcacactgaactttctttttgaaacatatcactctgttacccaggctggagtgcagaggtgcaatcctggctcactgcaacctccgcctcctgggttcaaatgatcctcctgccttagccttccgtgttgctgggatcacaggcatgcaccaccatgcccggctaatttttgtatttttagtatagacaggttttcaccatgttggccaggatggtctcgaactcctgacctcaagtgattcacctgccttggcctcccaaagtgctgggattacaggtgtgagccacggcacccggcctgaagtttctgaaaacaaattagaagactgttggcttggctaatctcgtagttcagggccaagtttctgtagtcagaatgaagaataaaattgaaagaaaaagggggaaatgcttatacttggcattaagttgaatgcctcaagtcttaactatggctttgtagatgaggcaaaagatttcttagtggtaaaatttcttcaacaggtcaatgccaatctgtatgccattttagtaaagtaggtaaggagagtagccgctcagtaactttggcactaaagaaagagtgtggctctagaacttccaattccattgctagatgtgccctttaaaagatggtccagtgctttcagggaaggatgtttagccagttttcctagtatttgttccttaagattttttgacctgtgcttaa

SEQ ID NO: 917 - DNA, 2925 bp, Homo sapiens
agcgggtattcacgcgccggaagtgcatttgcagagtgagacaaagcggagaacgctggtgggcctgttgtggagtacgctttggactgagaagcatcgaggctataggacgcagctgttgccatgacggcccagggggcctggtggctaaccgaggccggcgcttcaagtgggccattgagctaagcgggcctggaggaggcagcaggggtcgaagtgaccggggcagtggccagggagactcgctctacccagtcggttacttggacaagcaagtgcctgataccagcgtgcaagagacagaccggatcctggtggagaagcgctgctgggacatcgccttgggtcccctcaaacagattcccatgaatctcttcatcatgtacatggcaggcaatactatctccatcttccctactatgatggtgtgtatgatggcctggcgacccagtccatgggactgttacctacacatgcatcggattggttagccttcattgagccccctgagagaatggagttcagtggtggaggactgcttttgtgaacatgagaaagcagcgcctggtccctatgtatttgggtcttatttacatccttctttaagcccagtggctcctcagcatactcttaaactaatcacttatgttaaaaagaaccaaaagactcttttctccatggtggggtgacaggtcctagaaggacaatgtgcatattacgacaaacacaaagaaactataccataacccaaggctgaaaataatgtagaaaactttatttttgtttccagtacagagcaaaacaacaacaaaaaaacataactatgtaaacaagagaataactgctgctaaatcaagaactgttgcagcatctcctttcaataaattaaatggttgagaacaatgcataaaaaaagttgcacaagttccttattttccttaatatttcacttctatttaatacaagctgggacataaaaattctgttggggatacctgggggaagatgtgagaaactaatgctgaattcagcttatacatgatgaaaagaaaaaccagacaaaaggagcacataaatatgcatacagtgtaactgttattattttaatacccacgataagggatttttgttagcatgtttagggggaacgaggattggtgggatccttgggccacaggaatctgaggcaacggaagatatatagagtgatcgtccccctgccgaaggaacctggcatctgtcaagcagatgctgcagttcaaacttcagcttttaagatagatagctattgaaggcagagggtcagcaggaggatgtgtatttctaatctaccctggtaaagtcataggtaagactcaaaagcgggatcttattcaaaaggcaggtatttcctttgttttctgtcttgaaatagccccttcccctaaggtgcattctctcaagttttcagtattgctttatttgcagtgattaaaagagatgagagactttggagacagacaacgtaagcaacacatacacacatgaaatactctagacagagatgaatataaatctggcctaataaccagttttccatgtaacagtgattttgtgtttcgggctgaagcagtggttatattaaaagccactaattcccttatccctttaaaagatttttacaattctccaaccacaaacagcacttctaaaactaactttactttctgcccataatttgttctacatggaaaaaaaaaatattactttggccaggggtgtgtgtaaatgtggcagaattcctaggcaggctgacctttacagtatgggcctttaagatactggatcctggttgggcacagtggctcacgcctgtaatccagcaccgaggccaagaaaattactcaatttcttaagctatattgaagggttttctctgtccttacaggtcaaatgaataatttgtgacacctaggtcagcttgctccatgtcctatttagtaatcaaagaagagtggcactatttatgactaataaattgaaattcaaaaacagccatgaatacaggcaagaaaagtttctctaaataactattctgtaaaagaaatgaagatttcacatacttgaaattactgctcagccagccacataagtagtttccctatgcttgtaagccagatgtttgatcagtatattagtaaataaaaagctgagcttacacaagtatttccttggcacactgaactttctttttgaaacatatcactctgttacccaggctggagtgcagaggtgcaatcctggctcactgcaacctccgcctcctgggttcaaatgatcctcctgccttagccttccgtgttgctgggatcacaggcatgcaccaccatgcccggctaatttttgtatttttagtatagacaggttttcaccatgttggccaggatggtctcgaactcctgacctcaagtgattcacctgccttggcctcccaaagtgctgggattacaggtgtgagccacggcacccggcctgaagtttctgaaaacaaattagaagactgttggcttggctaatctcgtagttcagggccaagtttctgtagtcagaatgaagaataaaattgaaagaaaaagggggaaatgcttatacttggcattaagttgaatgcctcaagtcttaactatggctttgtagatgaggcaaaagatttcttagtggtaaaatttcttcaacaggtcaatgccaatctgtatgccattttagtaaagtaggtaaggagagtagccgctcagtaactttggcactaaagaaagagtgtggctctagaacttccaattccattgctagatgtgccctttaaaagatggtccagtgctttcagggaaggatgtttagccagttttcctagtatttgttccttaagattttttgacctgtgcttaa

SEQ ID NO: 918 - DNA, 2864 bp, Homo sapiens
agctcggtaccctttcccaacgagaacgctggtgggcctgttgtggagtacgctttggactgagaagcatcgaggctataggacgcagctgttgccatgacggcccagggggcctggtggctaaccgaggccggcgcttcaagtgggccattgagctaagcgggcctggaggaggcagcaggggtcgaagtgaccggggcagtggccagggagactcgctctacccagtcggttacttggacaagcaagtgcctgataccagcgtgcaagagacagaccggatcctggtggagaagcgctgctgggacatcgccttgggtcccctcaaacagattcccatgaatctcttcatcatgtacatggcaggcaatactatctccatcttccctactatgatggtgtgtatgatggcctggcgacccattcaggcacttatggccatttcagccaagaatggagttcagtggtggaggactgcttttgtgaacatgagaaagcagcgcctggtccctatgtatttgggtcttatttacatccttctttaagcccagtggctcctcagcatactcttaaactaatcacttatgttaaaaagaaccaaaagactcttttctccatggtggggtgacaggtcctagaaggacaatgtgcatattacgacaaacacaaagaaactataccataacccaaggctgaaaataatgtagaaaactttatttttgtttccagtacagagcaaaacaacaacaaaaaaacataactatgtaaacaagagaataactgctgctaaatcaagaactgttgcagcatctcctttcaataaattaaatggttgagaacaatgcataaaaaaagttgcacaagttccttattttccttaatatttcacttctatttaatacaagctgggacataaaaattctgttggggatacctgggggaagatgtgagaaactaatgctgaattcagcttatacatgatgaaaagaaaaaccagacaaaaggagcacataaatatgcatacagtgtaactgttattattttaatacccacgataagggatttttgttagcatgtttagggggaacgaggattggtgggatccttgggccacaggaatctgaggcaacggaagatatatagagtgatcgtccccctgccgaaggaacctggcatctgtcaagcagatgctgcagttcaaacttcagcttttaagatagatagctattgaaggcagagggtcagcaggaggatgtgtatttctaatctaccctggtaaagtcataggtaagactcaaaagcgggatcttattcaaaaggcaggtatttcctttgttttctgtcttgaaatagccccttcccctaaggtgcattctctcaagttttcagtattgctttatttgcagtgattaaaagagatgagagactttggagacagacaacgtaagcaacacatacacacatgaaatactctagacagagatgaatataaatctggcctaataaccagttttccatgtaacagtgattttgtgtttcgggctgaagcagtggttatattaaaagccactaattcccttatccctttaaaagatttttacaattctccaaccacaaacagcacttctaaaactaactttactttctgcccataatttgttctacatggaaaaaaaaaatattactttggccaggggtgtgtgtaaatgtggcagaattcctaggcaggctgacctttacagtatgggcctttaagatactggatcctggttgggcacagtggctcacgcctgtaatccagcaccgaggccaagaaaattactcaatttcttaagctatattgaagggttttctctgtccttacaggtcaaatgaataatttgtgacacctaggtcagcttgctccatgtcctatttagtaatcaaagaagagtggcactatttatgactaataaattgaaattcaaaaacagccatgaatacaggcaagaaaagtttctctaaataactattctgtaaaagaaatgaagatttcacatacttgaaattactgctcagccagccacataagtagtttccctatgcttgtaagccagatgtttgatcagtatattagtaaataaaaagctgagcttacacaagtatttccttggcacactgaactttctttttgaaacatatcactctgttacccaggctggagtgcagaggtgcaatcctggctcactgcaacctccgcctcctgggttcaaatgatcctcctgccttagccttccgtgttgctgggatcacaggcatgcaccaccatgcccggctaatttttgtatttttagtatagacaggttttcaccatgttggccaggatggtctcgaactcctgacctcaagtgattcacctgccttggcctcccaaagtgctgggattacaggtgtgagccacggcacccggcctgaagtttctgaaaacaaattagaagactgttggcttggctaatctcgtagttcagggccaagtttctgtagtcagaatgaagaataaaattgaaagaaaaagggggaaatgcttatacttggcattaagttgaatgcctcaagtcttaactatggctttgtagatgaggcaaaagatttcttagtggtaaaatttcttcaacaggtcaatgccaatctgtatgccattttagtaaagtaggtaaggagagtagccgctcagtaactttggcactaaagaaagagtgtggctctagaacttccaattccattgctagatgtgccctttaaaagatggtccagtgctttcagggaaggatgtttagccagttttcctagtatttgttccttaagattttttgacctgtgcttaa

SEQ ID NO: 919 - DNA, 841 bp, Homo sapiens
agcgggtattcacgcgccggaagtgcatttgcagagtgagacaaagcggagaacgctggtgggcctgttgtggagtacgctttggactgagaagcatcgaggctataggacgcagctgttgccatgacggcccagggggcctggtggctaaccgaggccggcgcttcaagtgggccattgagctaagcgggcctggaggaggcagcaggggtcgaagtgaccggggcagtggccagggagactcgctctacccagtcggttacttggacaagcaagtgcctgataccagcgtgcaagagacagaccggatcctggtggagaagcgctgctgggacatcgccttgggtcccctcaaacagattcccatgaatctcttcatcatgtacatggcaggcaatactatctccatcttccctactatgatggtgtgtatgatggcctggcgacccattcaggcacttatggccatttcagccactttcaagatgttagaaagttcaagccagaagtttcttcagggtttggtctatctcattgggaacctgatgggtttggcattggctgtttacaagtgccagtccatgggactgttacctacacatgcatcggattggttagccttcattgagccccctgagacgcctccggaggcgttgaatggccggggagcgtgacaagttccggaagatgctggacgccaaggagcaggagatgacggagatgcgggacgtgatgcagcagcagctggccgagtaccaggagctgctggacgtgaagctggccctggacatggagatcaacgcctccgggccattcaacgcctccgggccattcaacgcct

SEQ ID NO: 920 - DNA, 1405 bp, Homo sapiens
agcgggtattcacgcgccggaagtgcatttgcagagtgagacaaagcggagaacgctggtgggcctgttgtggagtacgctttggactgagaagcatcgaggctataggacgcagctgttgccatgacggcccagggggcctggtggctaaccgaggccggcgcttcaagtgggccattgagctaagcgggcctggaggaggcagcaggggtcgaagtgaccggggcagtggccagggagactcgctctacccagtcggttacttggacaagcaagtgcctgataccagcgtgcaagagacagaccggatcctggtggagaagcgctgctgggacatcgccttgggtcccctcaaacagattcccatgaatctcttcatcatgtacatggcaggcaatactatctccatcttccctactatgatggtgtgtatgatggcctggcgacccattcaggcacttatggccatttcagccagtaagtattcttgaaacaataacccttccataagtttgaagaattaaaggcaggccgggcatggtggctcacgcctgtaatcccagcactttgggaggcgccaagctgggtggatcatctgagggcaggagttcgagaccagcctggccaacatggtgaaaccttgtctctactaaaaatgcaaaaattagctgggcgtggtggcacacgcctgtaatcccagctgcttgggaggctgagacaggagaatcacttgaacctgggaggcagaggttgcagtgagccgagatcgtgccactgcactccagcctgggtgacagaacgagactccatctcaaaaaaaaggaagaattaaaggtaaattcttagggacagtttttggctaacaggtatataggggagtggggtaatggtggtggcatggaggggagtgtagtgcttaccatggttttctgtttgcctttaatggtcctatttgctgtcttactatgggtctgtctatatgaatttaatatacagttggcttgattcgtattgggggaaagagttcttttggtttgacaacttctgttaccgcaacagctttcaagatgttagaaagttcaagccagaagtttcttcagggtttggtctatctcattgggaacctgatgggtttggcattggctgtttacaagtgccagtccatgggactgttacctacacatgcatcggattggttagccttcattgagccccctgagaggtaaggcaaaagaaaagctgaattttgggtagttgtagtatacagtgaatagctgacctacttgatggtaggaaattggagttggtatttgagtttctttttttttttttttttttttttgagacggagtattgctctgtcgcccaggctggagtgcagtggcatgatctcggcaacctccgc

SEQ ID NO: 921 - DNA, 770 bp, Homo sapiens
agcgggtattcacgcgccggaagtgcatttgcagagtgagacaaagcggagaacgctggtgggcctgttgtggagtacgctttggactgagaagcatcgaggctataggacgcagctgttgccatgacggcccagggggcctggtggctaaccgaggccggcgcttcaagtgggccattgagctaagcgggcctggaggaggcagcaggggtcgaagtgaccggggcagtggccagggagactcgctctacccagtcggttacttggacaagcaagtgcctgataccagcgtgcaagagacagaccggatcctggtggagaaggtacagaggtatagatgttaccgtagcccatgggccagtcctgagttacacactcatcctcttctcctaggtggagttaacgtagatagctcttatcctgaagatttggaaactaaactgcttgaggctggtatttcggtattttatatatcagctacaaaagtgcttaataatttgaaaaatagaagatgtttggaacataaggtataagaaagtaggttgaaaactatcttttggtggcaacatcttccagttgaagtgatcctttttctactctggttcccttacaccacatatccaactgtcaggatactctgttggctttacctactactttttcctgtgttcacctctcatcctaatccaagccaccatccttcatctagatttctgcagtagcccggctaatttttgtatttttagtacagacagggtattgaagctcat

SEQ ID NO: 922 - DNA, 381 bp, Homo sapiens
gagatggagtctccctctgtcgcccaggctggagtgcagtggtgcaatctcggttcactgcaagttccacctcccgggttcacgccattctcccgcctcagcctcccaagtagctgggactacaggcgcccgccaccatgcccgactaatttttttgtatttttgtagagacagggtttcaccgtgttagccaggatggtctcaaatctcctgacctcgtgatccgcctgcctcggcctcccaaagtgctgggattacaggcgtgagtcactgcacccggcccaaaattactcaatttcttaagctatattgaagggttttctctgtccttacaggtcaaatgaataatttgtgacacctaggtcagcttgctccatgtcc

SEQ ID NO: 923 - DNA, 3024 bp, Homo sapiens
agcgggtattcacgcgccggaagtgcatttgcagagtgagacaaagcggagaacgctggtgggcctgttgtggagtacgctttggactgagaagcatcgaggctataggacgcagctgttgccatgacggcccagggggcctggtggctaaccgaggccggcgcttcaagtgggccattgagctaagcgggcctggaggaggcagcagggagactcgctctacccagtcggttacttggacaagcaagtgcctgataccagcgtgcaagagacagaccggatcctggtggagaagcgctgctgggacatcgccttgggtcccctcaaacagattcccatgaatctcttcatcatgtacatggcaggcaatactatctccatcttccctactatgatggtgtgtatgatggcctggcgacccattcaggcacttatggccatttcagccactttcaagatgttagaaagttcaagccagaagtttcttcagggtttggtctatctcattgggaacctgatgggtttggcattggctgtttacaagtgccagtccatgggactgttacctacacatgcatcggattggttagccttcattgagccccctgagagaatggagttcagtggtggaggactgcttttgtgaacatgagaaagcagcgcctggtccctatgtatttgggtcttatttacatccttctttaagcccagtggctcctcagcatactcttaaactaatcacttatgttaaaaagaaccaaaagactcttttctccatggtggggtgacaggtcctagaaggacaatgtgcatattacgacaaacacaaagaaactataccataacccaaggctgaaaataatgtagaaaactttatttttgtttccagtacagagcaaaacaacaacaaaaaaacataactatgtaaacaagagaataactgctgctaaatcaagaactgttgcagcatctcctttcaataaattaaatggttgagaacaatgcataaaaaaagttgcacaagttccttattttccttaatatttcacttctatttaatacaagctgggacataaaaattctgttggggatacctgggggaagatgtgagaaactaatgctgaattcagcttatacatgatgaaaagaaaaaccagacaaaaggagcacataaatatgcatacagtgtaactgttattattttaatacccacgataagggatttttgttagcatgtttagggggaacgaggattggtgggatccttgggccacaggaatctgaggcaacggaagatatatagagtgatcgtccccctgccgaaggaacctggcatctgtcaagcagatgctgcagttcaaacttcagcttttaagatagatagctattgaaggcagagggtcagcaggaggatgtgtatttctaatctaccctggtaaagtcataggtaagactcaaaagcgggatcttattcaaaaggcaggtatttcctttgttttctgtcttgaaatagccccttcccctaaggtgcattctctcaagttttcagtattgctttatttgcagtgattaaaagagatgagagactttggagacagacaacgtaagcaacacatacacacatgaaatactctagacagagatgaatataaatctggcctaataaccagttttccatgtaacagtgattttgtgtttcgggctgaagcagtggttatattaaaagccactaattcccttatccctttaaaagatttttacaattctccaaccacaaacagcacttctaaaactaactttactttctgcccataatttgttctacatggaaaaaaaaaatattactttggccaggggtgtgtgtaaatgtggcagaattcctaggcaggctgacctttacagtatgggcctttaagatactggatcctggttgggcacagtggctcacgcctgtaatccagcaccgaggccaagaaaattactcaatttcttaagctatattgaagggttttctctgtccttacaggtcaaatgaataatttgtgacacctaggtcagcttgctccatgtcctatttagtaatcaaagaagagtggcactatttatgactaataaattgaaattcaaaaacagccatgaatacaggcaagaaaagtttctctaaataactattctgtaaaagaaatgaagatttcacatacttgaaattactgctcagccagccacataagtagtttccctatgcttgtaagccagatgtttgatcagtatattagtaaataaaaagctgagcttacacaagtatttccttggcacactgaactttctttttgaaacatatcactctgttacccaggctggagtgcagaggtgcaatcctggctcactgcaacctccgcctcctgggttcaaatgatcctcctgccttagccttccgtgttgctgggatcacaggcatgcaccaccatgcccggctaatttttgtatttttagtatagacaggttttcaccatgttggccaggatggtctcgaactcctgacctcaagtgattcacctgccttggcctcccaaagtgctgggattacaggtgtgagccacggcacccggcctgaagtttctgaaaacaaattagaagactgttggcttggctaatctcgtagttcagggccaagtttctgtagtcagaatgaagaataaaattgaaagaaaaagggggaaatgcttatacttggcattaagttgaatgcctcaagtcttaactatggctttgtagatgaggcaaaagatttcttagtggtaaaatttcttcaacaggtcaatgccaatctgtatgccattttagtaaagtaggtaaggagagtagccgctcagtaactttggcactaaagaaagagtgtggctctagaacttccaattccattgctagatgtgccctttaaaagatggtccagtgctttcagggaaggatgtttagccagttttcctagtatttgttccttaagattttttgacctgtgcttaa

SEQ ID NO: 924 - DNA, 839 bp, Homo sapiens
agcgggtattcacgcgccggaagtgcatttgcagagtgagacaaagcggagaacgctggtgggcctgttgtggagtacgctttggactgagaagcatcgaggctataggacgcagctgttgccatgacggcccagggggcctggtggctaaccgaggccggcgcttcaagtgggccattgagctaagcgggcctggaggaggcagcaggggtcgaagtgaccggggcagtggccagggagactcgctctacccagtcggttacttggacaagcaagtgcctgataccagcgtgcaagagacagaccggatcctggtggagaagcgctgctgggacatcgccttgggtcccctcaaacagattcccatgaatctcttcatcatgtacatggcaggcaatactatctccatcttccctactatgatggtgtgtatgatggcctggcgacccattcaggcacttatggccatttcagccactttcaagatgttagaaagttcaagccagaagtttcttcagggtttggtctatctcattgggaacctgatgggtttggcattggctgtttacaagtgccagtccatgggactgttacctacacatgcatcggattggttagccttcattgagccccctgagagaatggagttcagtggtggaggactgcttttgtgaacatgagaaagcagcgcctggtccctatgtatttgggtcatctgatatatggaggcacatcctaaagcactagaaattatttttttgtacattatcataatgggagagacaagagtccaacagtataacaaagacattcccacgcgtttgcgcctgggttagctc

SEQ ID NO: 925 - DNA, 2891 bp, Homo sapiens
agcgggtattcacgcgccggaagtgcatttgcagagtgagacaaagcggagaacgctggtgggcctgttgtggagtacgctttggactgagaagcatcgaggctataggacgcagctgttgccatgacggcccagggggcctggtggctaaccgaggccggcgcttcaagtgggccattgagctaagcgggcctggaggaggcagcaggggtcgaagtgaccggggcagtggccagggagactcgctctacccagtcggttacttggacaagcaagtgcctgataccagcgtgcaagagacagaccggatcctggtggagaagcgctgctgggacatcgccttgggtcccctcaaacagattcccatgaatctcttcatcatgtacatggcaggcaatactatctccatcttccctactatgatggtgtgtatgatggcctggcgacccattcaggcacttatggccatttcagccaagaatggagttcagtggtggaggactgcttttgtgaacatgagaaagcagcgcctggtccctatgtatttgggtcttatttacatccttctttaagcccagtggctcctcagcatactcttaaactaatcacttatgttaaaaagaaccaaaagactcttttctccatggtggggtgacaggtcctagaaggacaatgtgcatattacgacaaacacaaagaaactataccataacccaaggctgaaaataatgtagaaaactttatttttgtttccagtacagagcaaaacaacaacaaaaaaacataactatgtaaacaagagaataactgctgctaaatcaagaactgttgcagcatctcctttcaataaattaaatggttgagaacaatgcataaaaaaagttgcacaagttccttattttccttaatatttcacttctatttaatacaagctgggacataaaaattctgttggggatacctgggggaagatgtgagaaactaatgctgaattcagcttatacatgatgaaaagaaaaaccagacaaaaggagcacataaatatgcatacagtgtaactgttattattttaatacccacgataagggatttttgttagcatgtttagggggaacgaggattggtgggatccttgggccacaggaatctgaggcaacggaagatatatagagtgatcgtccccctgccgaaggaacctggcatctgtcaagcagatgctgcagttcaaacttcagcttttaagatagatagctattgaaggcagagggtcagcaggaggatgtgtatttctaatctaccctggtaaagtcataggtaagactcaaaagcgggatcttattcaaaaggcaggtatttcctttgttttctgtcttgaaatagccccttcccctaaggtgcattctctcaagttttcagtattgctttatttgcagtgattaaaagagatgagagactttggagacagacaacgtaagcaacacatacacacatgaaatactctagacagagatgaatataaatctggcctaataaccagttttccatgtaacagtgattttgtgtttcgggctgaagcagtggttatattaaaagccactaattcccttatccctttaaaagatttttacaattctccaaccacaaacagcacttctaaaactaactttactttctgcccataatttgttctacatggaaaaaaaaaatattactttggccaggggtgtgtgtaaatgtggcagaattcctaggcaggctgacctttacagtatgggcctttaagatactggatcctggttgggcacagtggctcacgcctgtaatccagcaccgaggccaagaaaattactcaatttcttaagctatattgaagggttttctctgtccttacaggtcaaatgaataatttgtgacacctaggtcagcttgctccatgtcctatttagtaatcaaagaagagtggcactatttatgactaataaattgaaattcaaaaacagccatgaatacaggcaagaaaagtttctctaaataactattctgtaaaagaaatgaagatttcacatacttgaaattactgctcagccagccacataagtagtttccctatgcttgtaagccagatgtttgatcagtatattagtaaataaaaagctgagcttacacaagtatttccttggcacactgaactttctttttgaaacatatcactctgttacccaggctggagtgcagaggtgcaatcctggctcactgcaacctccgcctcctgggttcaaatgatcctcctgccttagccttccgtgttgctgggatcacaggcatgcaccaccatgcccggctaatttttgtatttttagtatagacaggttttcaccatgttggccaggatggtctcgaactcctgacctcaagtgattcacctgccttggcctcccaaagtgctgggattacaggtgtgagccacggcacccggcctgaagtttctgaaaacaaattagaagactgttggcttggctaatctcgtagttcagggccaagtttctgtagtcagaatgaagaataaaattgaaagaaaaagggggaaatgcttatacttggcattaagttgaatgcctcaagtcttaactatggctttgtagatgaggcaaaagatttcttagtggtaaaatttcttcaacaggtcaatgccaatctgtatgccattttagtaaagtaggtaaggagagtagccgctcagtaactttggcactaaagaaagagtgtggctctagaacttccaattccattgctagatgtgccctttaaaagatggtccagtgctttcagggaaggatgtttagccagttttcctagtatttgttccttaagattttttgacctgtgcttaa

SEQ ID NO: 926 - DNA, 510 bp, Homo sapiens
caaagcagtgaggctgcaaccagctcatgatgtaatgaaaaatacatgaaatattgtggggttcataattgtgcttcttcaaacattccctgcctaatagcagtcaagtgagataggtagcttgtcctctgctcaattccctaataaatctttcccttcttgcccctgatcttgcaatgtggtcaggccccacagctctgtgttggaccatattatcttctctccccctcccttttccctttcccttcccattttcccctccctttatccttcctcctcctccatgcataaccttaaccattctcttggcctcacgtaaccacctcccaattctgtgccaccttcactctagaactataatgtgagccatacacctgaaactctactcagatccccccacaggcccctcacagtcaccctctccagaacctaactttcccttcttcccacttcaaatctgctgcttcttcagtttgacgggagtgttataggccttcccttgtaaaaggg

SEQ ID NO: 927 - DNA, 381 bp, Homo sapiens
aaagcatcagcagggccatgctctctctgaaggctttagagaagtatccttccttgctgcttcctagtttctggtggttgccagcaatccttggcattcctggacttgcagatgcatcactgcaatctctgccttagtatccacatgaaatttttcctgtgtgtctgtctgtgtccagattgtcttctttttatgggggccattcattggattagggtcttccctaatgcagtatggcctcatcttaatgtgattacatctacaaaaatactgtttcaggccgggcctggtggctgaagcctgtaatcccagcgctttgggaggctgagacgggcggatcacgagatcaagagatcgagaccatcctggtcaacatggtga

SEQ ID NO: 928 - DNA, 379 bp, Homo sapiens
caaaaaagtaaataaagatgtgatatcagtttatacctccacctttgttatatgagtgaaatgctgtttgtaacttgtagaaatagtagagatgggcgcctgagagatgagccaacatagtaaatgtctttatggatcagaactgtcatcacttgactttcttcatgagacagtgctaataaactggtattgggataaatgtagtttgacattggaaatactttccggtgttttccaatttgtgtgcattgaaaatttattaattttgaaattagaagggcaattagataatgttaggaaaaaacacaactaccatgtttttgtacacatgtaagtaacatacatatttgactatgtgtattaaccatgtttcaaaata

SEQ ID NO: 929 - DNA, 207 bp, Homo sapiens
gaaccacaggcatgtaccatgatacatggctaattttttaatctttttgtagagatgggggtctcactttgttgccaaggctggtctcaaattcctgacctcaagtgattcttcggccttggcctcccaaaatactgagattacaggcatcagccatcatgcccagcctatattttcttcatattaaataaaatcatgttctcatcc

SEQ ID NO: 930 - DNA, 152 bp, Homo sapiens
gttctcttgtcctggctctgtgtgaccttgggccagtcacttcccctctctgggactcaggagcaaaagacagaagcaagacatacatgccttctgcaagctctggactatgcttctccctacagcacattggaagcatggaggtctccgcc

SEQ ID NO: 931 - DNA, 197 bp, Homo sapiens
cttttttttttcgagacaaaatctcactctgtcgctgggctggagtgcaatggtgtgagactacatctaagaaaaaaaaaatacatacacacacacatacacacacacacctggaaactcaaagagtacgttcatactaaaagtttaacacaaacattcaactctgagacatggtctggttaagcagaagaactatg

SEQ ID NO: 932 - DNA, 526 bp, Homo sapiens
gacaaaaataacatctttactgaactaatcaataagttagaaacagctagaacagtttactgaaatcaaaattaccaacaaataggaaaggcataagataatcagaaaaattcaggccgcgcactgtggctcacacctgtaatcccagcactttgggaggctgagctaagcagatcacctgaggttaggggttcgagaccaccctggccaacatggaaaccccgtctctactaaaaatacaaaaacaaattggcccagtgtggtggcaggcacctgtaatcccagctacctgggaggttgaagcaggcgaatcacttgaacctgggaggtggaggttgcagtgaggtgagatcacaccactgcactccaacctgggcaacagattgagactacatctaagaaaaaaaaaatacatacacacacacatacacacacacacctggaaactcaaagagtacgttcatactaaaagtttaacacaaacattcaactctgagacatggtctggttaagcagaagaactatg

SEQ ID NO: 933 - DNA, 832 bp, Homo sapiens
taggctaggtacgaggctgggtggtggtgacaccgcccggcgtggtcatggggctggcctggaccgcaatgggaggctccacgctgtttgtggagacatccctgagacggccacaggacaaggatgccaagggtgacaaggatggcagcctggaggtgacaggccagctgggggaggtgatgaaggagagcgcccgcatagcctacaccttcgccagagccttcctcatgcagcacgcccccgccaatgactacctggtgacctcacacatccacctgcatgtgcccgagggcgccacccccaaggacggcccaagcgcaggctgcaccatcgtcacggccctgctgtccctggccatgggcaggcctgtccggcagaatctggccatgactggcgaagtctccctcacgggcaagatcctgcctgttggtggcatcaaggagaagaccattgcggccaagcgcgcaggggtgacgtgcatcgtcctgccagccgagaacaagaaggacttctacgacctggcagccttcatcaccgagggcctggaggtgcacttcgtggaacactaccgggagatcttcgacatcgccttcccggacgagcaggcagaggcgctggccgtggaacggtgacggccaccccgggactgcaggcggcggatgtcaggccctgtctgggccagaactgagcgctgtggggagcgcgcccggacctggcagtggagccaccgagcgagcagctcggtccagtgacccagatcccagggacctcagtcggcttaatcagagtgtggcatagaagctatttaatgattaaagtcatttgcagtacg

SEQ ID NO: 934 - DNA, 843 bp, Homo sapiens
ggacgcgtgggtcgacccacgctgtcggcccgaggagccggaggcggagaacaagcacaagccccgcaggaagtcaaagcggggcaagaaggaggcggaggacgagctgagcgccaggcacccggcggagctggcgatggagcccacccctgagctcccggctgaggtgctcatggtggaggtagagaacgttgtccacgaggacttccaggtcacggaggaggtgaaagccctgactgcagagatcgtgaagaccatccgggacatcattgccttgaaccctctctacagggagtcagtgctgcagatgatgcaggctggccagcgggtggtggacaaccccatctacctgagcgacatgggcgccgcgctcaccggggccgagtcccatgagctgcaggacgtcctggaagagaccaatattcctaagcggctgtacaaggccctctccctgctgaagaaggaatttgaactgagcaagctgcagcagcgcctggggcgggaggtggaggagaagatcaagcagacccaccgtaagtacctgctgcaggagcagctaaagatcatcaagaaggagctgggcctggagaaggacgacaaggatgccatcgaggagaagttccgggagcgcctgaaggagctcgtggtccccaagcacgtcatggatgttgtggacgaggagctgagcaagctgggcctgctggacaaccactcctcggagttcaatgtcacccgcaactacctagactgctcggtccagtgacccagatcccagggacctcagtcggcttaatcagagtgtggcatagaagctatttaatgattaaagtcatttgcagtacg

SEQ ID NO: 935 - DNA, 3079 bp, Homo sapiens
  misc_feature (17)..(17): n is a, c, g, or t
gcgagttgtgtgagcgnagtatggccgggctatggcggcgagcactggctacgtgcgactgtggggagcggcgcggtgctgggtgctgcggcggccgatgctggccgccgccggggggcgggttcccactgcagcaggagcgtggttgctccgaggccagcggacctgcgacgcctctcctccttgggcactgtggggccgaggcccggcaattgggggccaatggcgggggttttgggaagcgagcagccgcggcggaggcgcattctcggggggcgaggacgcctccgagggcggcgcggaggaaggagccggcggcgcggggggcagcgcgggcgccggggaaggcccggtcataacggcgctcacgcccatgacgatccccgatgtgtttccgcacctgccgctcatcgccatcacccgcaacccggtgttcccgcgctttatcaagattatcgaggttaaaaataagaagttggttgagctgctgagaaggaaagttcgtctcgcccagccttatgtcggcgtctttctaaagagagatgacagcaatgagtcggatgtggtcgagagcctggatgaaatctaccacacggggacgtttgcccagatccatgagatgcaggaccttggggacaagctgcgcatgatcgtcatgggacacagaagagtccatatcagcagacagctggaggtggagcccgaggagccggaggcggagaacaagcaagaaggaggcggaggacgagctgagcgccaggcacccggcggagctggcgatggagcccacccctgagctcccggctgaggtgctcatggtggaggtagagaacgttgtccacgaggacttccaggtcacggaggaggtgaaagccctgactgcagagatcgtgaagaccatccgggacatcattgccttgaaccctctctacagggagtcagtgctgcagatgatgcaggctggccagcgggtggtggacaaccccatctacctgagcgacatgggcgccgcgctcaccggggccgagtcccatgagctgcaggacgtcctggaagagaccaatattcctaagcggctgtacaaggccctctccctgctgaagaaggaatttgaactgagcaagctgcagcagcgcctggggcgggaggtggaggagaagatcaagcagacccaccgtaagtacctgctgcaggagcagctaaagatcatcaagaaggagctgggcctggagaaggacgacaaggatgccatcgaggagaagttccgggagcgcctgaaggagctcgtggtccccaagcacgtcatggatgttgtggacgaggagctgagcaagctgggcctgctggacaaccactcctcggagttcaatgtcacccgcaactacctagactggctcacgtccatcccttggggcaagtacagcaacgagaacctggacctggcgcgggcacaggcagtgctggaggaagaccactacggcatggaggacgtcaagaaacgcatcctggagttcattgccgttagccagctccgcggctccacccagggcaagatcctctgcttctatggcccccctggcgtgggtaagaccagcattgctcgctccatcgcccgcgccctgaaccgagagtacttccgcttcagcgtcgggggcatgactgacgtggctgagatcaagggccacaggcggacctacgtgggcgccatgcccgggaagatcatccagtgtttgaagaagaccaagacggagaaccccctgatcctcatcgacgaggtggacaagatcggcgaggctaccagggggacccgtcgtcggcactgctggagctgctggaccagagcagaatgccaacttcctggaccactacctggacgtgcccgtggacttgtccaaggtgctgttcatctgcacggcaacgtcacggacaccatccccgagccgctgcgagaccgtatggagatgatcaacgtgtcgggctacgtggcccaggagaagctggccattgcggagcgctacctggtgccccaggctcgcgccctgtgtggcttggatgagagcaaggccaagctgtcatcggacgtgctgacgctgctcatcaagcagtactgccgcgagagcggtgtccgcaacctgcagaagcaagtggagaaggtgttacggaaatcggcctacaagattgtcagcggcgaggccgagtccgtggaggtgacgcccgagaacctgcaggacttcgtggggaagcccgtgttcaccgtggagcgcatgtatgacgtgacaccgcccggcgtggtcatggggctggcctggaccgcaatgggaggctccacgctgtttgtggagacatccctgagacggccacaggacaaggatgccaagggtgacaaggatggcagcctggaggtgacaggccagctgggggaggtgatgaaggagagcgcccgcatagcctacaccttcgccagagccttcctcatgcagcacgcccccgccaatgactacctggtgacctcacacatccacctgcatgtgcccgagggcgccacccccaaggacggcccaagcgcaggctgcaccatcgtcacggccctgctgtccctggccatgggcaggcctgtccggcagaatctggccatgactggcgaagtctccctcacgggcaagatcctgcctgttggtggcatcaaggagaagaccattgcggccaagcgcgcaggggtgacgtgcatcgtcctgccagccgagaacaagaaggacttctacgacctggcagccttcatcaccgagggcctggaggtgcacttcgtggaacactaccgggagatcttcgacatcgccttcccggacgagcaggcagaggcgctggccgtggaacggtgacggccaccccgggactgcaggcggcggatgtcaggccctgtctgggccagaactgagcgctgtggggagcgcgcccggacctggcagtggagccaccgagcgagcagctcggtccagtgacccagatcccagggacctcagtcggcttaatcagagtgtggcatagaagctatttaatgattaaagtcatttgcagtacg

SEQ ID NO: 936 - DNA, 2957 bp, Homo sapiens
  misc_feature (17)..(17): n is a, c, g, or t
gcgagttgtgtgagcgnagtatggccgggctatggcggcgagcactggctacgtgcgactgtggggagcggcgcggtgctgggtgctgcggcggccgatgctggccgccgccggggggcgggttcccactgcagcaggagcgtggttgctccgaggccagcggacctgcgacgcctctcctccttgggcactgtggggccgaggcccggcaattgggggccaatggcgggggttttgggaagcgagcagccgcggcggaggcgcattctcggggggcgaggacgcctccgagggcggcgcggaggaaggagccggcggcgcggggggcagcgcgggcgccggggaaggcccggtcataacggcgctcacgcccatgacgatccccgatgtgtttccgcacctgccgctcatcgccatcacccgcaacccggtgttcccgcgctttatcaagattatcgaggttaaaaataagaagttggttgagctgctgagaaggaaagttcgtctcgcccagccttatgtcggcgtctttctaaagagagatgacagcaatgagtcggatgtggtcgagagcctggatgaaatctaccacacggggacgtttgcccagatccatgagatgcaggaccttggggacaagctgcgcatgatcgtcatgggacacagaagagtccatatcagcagacagctggaggtggagcccgaggagccggaggcggagaacaagcacaagccccgcaggaagtcaaagcggggcaagaaggaggcggaggacgagctgagcgccaggcacccggcggagctggcgatggagcccacccctgagctcccggctgaggtgctcatggtggaggtagagaacgttgtccacgaggacttccaggtcacggaggaggtgaaagccctgactgcagagatcgtgaagaccatccgggacatcattgccttgaaccctctctacagggagtcagtgctgcagatgatgcaggctggccagcgggtggtggacaaccccatctacctgagcgacatgggcgccgcgctcaccggggccgagtcccatgagctgcaggacgtcctggaagagaccaatattcctaagcggctgtacaaggccctctccctgctgaagaaggaatttgaactgagcaagctgcagcagcgcctggggcgggaggtggaggagaagatcaagcagacccaccgtaagtacctgctgcaggagcagctaaagatcatcaagaaggagctgggcctggagaaggacgacaaggatgccatcgaggagaagttccgggagcgcctgaaggagctcgtggtccccaagcacgtcatggatgttgtggacgaggagctgagcaagctgggcctgctggacaaccactcctcggagttcaatgtcacccgcaactacctagactggctcacgtccatcccttggggcaagtacagcaacgagaacctggacctggcgcgggcacaggcagtgctggaggaagaccactacggcatggaggacgtcaagaaacgcatcctggagttcattgccgttagccagctccgcggctccacccagggcaagatcctctgcttctatggcccccctggcgtgggtaagaccagcattgctcgctccatcgcccgcgccctgaaccgagagtacttccgcttcagcgtcgggggcatgactgacgtggctgagatcaagggccacaggcggacctacgtgggcgccatgcccgggaagatcatccagtgtttgaagaagaccaagacggagaaccccctgatcctcatcgacgaggtggacaagatcggcgaggctaccagggggacccgtcgtcggcactgctggagctgctggacccaggagaagctggcattgcggagcgctacctggtgccccaggctcgcgccctgtgtggcttggatgagagcaaggccaagctgtcatcggacgtgctgacgctgctcatcaagcagtactgccgcgagagcggtgtccgcaacctgcagaagcaagtggagaaggtgttacggaaatcggcctacaagattgtcagcggcgaggccgagtccgtggaggtgacgcccgagaacctgcaggacttcgtggggaagcccgtgttcaccgtggagcgcatgtatgacgtgacaccgcccggcgtggtcatggggctggcctggaccgcaatgggaggctccacgctgtttgtggagacatccctgagacggccacaggacaaggatgccaagggtgacaaggatggcagcctggaggtgacaggccagctgggggaggtgatgaaggagagcgcccgcatagcctacaccttcgccagagccttcctcatgcagcacgcccccgccaatgactacctggtgacctcacacatccacctgcatgtgcccgagggcgccacccccaaggacggcccaagcgcaggctgcaccatcgtcacggccctgctgtccctggccatgggcaggcctgtccggcagaatctggccatgactggcgaagtctccctcacgggcaagatcctgcctgttggtggcatcaaggagaagaccattgcggccaagcgcgcaggggtgacgtgcatcgtcctgccagccgagaacaagaaggacttctacgacctggcagccttcatcaccgagggcctggaggtgcacttcgtggaacactaccgggagatcttcgacatcgccttcccggacgagcaggcagaggcgctggccgtggaacggtgacggccaccccgggactgcaggcggcggatgtcaggccctgtctgggccagaactgagcgctgtggggagcgcgcccggacctggcagtggagccaccgagcgagcagctcggtccagtgacccagatcccagggacctcagtcggcttaatcagagtgtggcatagaagctatttaatgattaaagtcatttgcagtacg

SEQ ID NO: 937 - DNA, 2048 bp, Homo sapiens
  misc_feature (17)..(17): n is a, c, g, or t
gcgagttgtgtgagcgnagtatggccgggctatggcggcgagcactggctacgtgcgactgtggggagcggcgcggtgctgggtgctgcggcggccgatgctggccgccgccggggggcgggttcccactgcagcaggagcgtggttgctccgaggccagcggacctgcgacgcctctcctccttgggcactgtggggccgaggcccggcaattgggggccaatggcgggggttttgggaagcgagcagccgcggcggaggcgcattctcggggggcgaggacgcctccgagggcggcgcggaggaaggagccggcggcgcggggggcagcgcgggcgccggggaaggcccggtcataacggcgctcacgcccatgacgatccccgatgtgtttccgcacctgccgctcatcgccatcacccgcaacccggtgttcccgcgctttatcaagattatcgaggttaaaaataagaagttggttgagctgctgagaaggaaagttcgtctcgcccagccttatgtcggcgtctttctaaagagagatgacagcaatgagtcggatgtggtcgagagcctggatgaaatctaccacacggggacgtttgcccagatccatgagatgcaggaccttggggacaagctgcgcatgatcgtcatgggacacagaagagtccatatcagcagacagctggaggtggagcccgaggagccggaggcggagaacaagcacaagccccgcaggaagtcaaagcggggcaagaaggaggcggaggacgagctgagcgccaggcacccggcggagctggcgatggagcccacccctgagctcccggctgaggtgctcatggtggaggtagagaacgttgtccacgaggacttccaggtcacggaggaggtgaaagccctgactgcagagatcgtgaagaccatccgggacatcattgccttgaaccctctctacagggagtcagtgctgcagatgatgcaggctggccagcgggtggtggacaaccccatctacctgagcgacatgggcgccgcgctcaccggggccgagtcccatgagctgcaggacgtcctggaagagaccaatattcctaagcggctgtacaaggccctctccctgctgaagaaggaatttgaactgagcaagctgcagcagcgcctggggcgggaggtggaggagaagatcaagcagacccaccgtaagtacctgctgcaggagcagctaaagatcatcaagaaggagctgggcctggagaaggacgacaaggatgccatcgaggagaagttccgggagcgcctgaaggagctcgtggtccccaagcacgtcatggatgttgtggacgaggagctgagcaagctgggcctgctggacaaccactcctcggagttcaatgtcacccgcaactacctagactggctcacgtccatcccttggggcaagtacagcaacgagaacctggacctggcgcgggcacaggcagtgctggaggaagaccactacggcatggaggacgtcaagaaacgcatcctggagttcattgccgttagccagctccgcggctccacccagggcaagatcctctgcttctatggcccccctggcgtgggtaagaccagcattgctcgctccatcgcccgcgccctgaaccgagagtacttccgcttcagcgtcgggggcatgactgacgtggctgagatcaagggccacaggcggacctacgtgggcgccatgcccgggaagatcatccagtgtttgaagaagaccaagacggagaaccccctgatcctcatcgacgaggtgcgtgcggagaggcccggagagccctaacccggcaatgccgtgtgcaaagatgaagcgagccttccgggtcctagggatccccgaagccaactcaggggggcaatcgccgtgatagctggccctgattggcacggacgggtcccttacaaccaagaggcaacgcacaggaggcttgccagtccaaggagggtgtgggtgcagtcacaatcggggtatcccaaggctgacctgaggtatacca

SEQ ID NO: 938 - DNA, 2217 bp, Homo sapiens
  misc_feature (17)..(17): n is a, c, g, or t
gcgagttgtgtgagcgnagtatggccgggctatggcggcgagcactggctacgtgcgactgtggggagcggcgcggtgctgggtgctgcggcggccgatgctggccgccgccggggggcgggttcccactgcagcaggagcgtggttgctccgaggccagcggacctgcgacgcctctcctccttgggcactgtggggccgaggcccggcaattgggggccaatggcgggggttttgggaagcgagcagccgcggcggaggcgcattctcggggggcgaggacgcctccgagggcggcgcggaggaaggagccggcggcgcggggggcagcgcgggcgccggggaaggcccggtcataacggcgctcacgcccatgacgatccccgatgtgtttccgcacctgccgctcatcgccatcacccgcaacccggtgttcccgcgctttatcaagattatcgaggttaaaaataagaagttggttgagctgctgagaaggaaagttcgtctcgcccagccttatgtcggcgtctttctaaagagagatgacagcaatgagtcggatgtggtcgagagcctggatgaaatctaccacacggggacgtttgcccagatccatgagatgcaggaccttggggacaagctgcgcatgatcgtcatgggacacagaagagtccatatcagcagacagctggaggtggagcccgaggagccggaggcggagaacaagcacaagccccgcaggaagtcaaagcggggcaagaaggaggcggaggacgagctgagcgccaggcacccggcggagctggcgatggagcccacccctgagctcccggctgaggtgctcatggtggaggtagagaacgttgtccacgaggacttccaggtcacggaggaggtgaaagccctgactgcagagatcgtgaagaccatccgggacatcattgccttgaaccctctctacagggagtcagtgctgcagatgatgcaggctggccagcgggtggtggacaaccccatctacctgagcgacatgggcgccgcgctcaccggggccgagtcccatgagctgcaggacgtcctggaagagaccaatattcctaagcggctgtacaaggccctctccctgctgaagaaggaatttgaactgagcaagctgcagcagcgcctggggcgggaggtggaggagaagatcaagcagacccaccgtaagtacctgctgcaggagcagctaaagatcatcaagaaggagctgggcctggagaaggacgacaaggatgccatcgaggagaagttccgggagcgcctgaaggagctcgtggtccccaagcacgtcatggatgttgtggacgaggagctgagcaagctgggcctgctggacaaccactcctcggagttcaatgtcacccgcaactacctagactggctcacgtccatcccttggggcaagtacagcaacgagaacctggacctggcgcgggcacaggcagtgctggaggaagaccactacggcatggaggacgtcaagaaacgcatcctggagttcattgccgttagccagctccgcggctccacccagggcaagatcctctgcttctatggcccccctggcgtgggtaagaccagcattgctcgctccatcgcccgcgccctgaaccgagagtacttccgcttcagcggcgccacccccaaggacggcccaagcgcaggctgcaccatcgtcacggccctgctgtccctggccatgggcaggcctgtccggcagaatctggccatgactggcgaagtctccctcacgggcaagatcctgcctgttggtggcatcaaggagaagaccattgcggccaagcgcgcaggggtgacgtgcatcgtcctgccagccgagaacaagaaggacttctacgacctggcagccttcatcaccgagggcctggaggtgcacttcgtggaacactaccgggagatcttcgacatcgccttcccggacgagcaggcagaggcgctggccgtggaacggtgacggccaccccgggactgcaggcggcggatgtcaggccctgtctgggccagaactgagcgctgtggggagcgcgcccggacctggcagtggagccaccgagcgagcagctcggtccagtgacccagatcccagggacctcagtcggcttaatcagagtgtggcatagaagctatttaatgattaaagtcatttgcagtacg

SEQ ID NO: 939 - DNA, 2410 bp, Homo sapiens
  misc_feature (17)..(17): n is a, c, g, or t
gcgagttgtgtgagcgnagtatggccgggctatggcggcgagcactggctacgtgcgactgtggggagcggcgcggtgctgggtgctgcggcggccgatgctggccgccgccggggggcgggttcccactgcagcaggagcgtggttgctccgaggccagcggacctgcgacgcctctcctccttgggcactgtggggccgaggcccggcaattgggggccaatggcgggggttttgggaagcgagcagccgcggcggaggcgcattctcggggggcgaggacgcctccgagggcggcgcggaggaaggagccggcggcgcggggggcagcgcgggcgccggggaaggcccggtcataacggcgctcacgcccatgacgatccccgatgtgtttccgcacctgccgctcatcgccatcacccgcaacccggtgttcccgcgctttatcaagattatcgaggttaaaaataagaagttggttgagctgctgagaaggaaagttcgtctcgcccagccttatgtcggcgtctttctaaagagagatgacagcaatgagtcggatgtggtcgagagcctggatgaaatctaccacacggggacgtttgcccagatccatgagatgcaggaccttggggacaagctgcgcatgatcgtcatgggacacagaagagtccatatcagcagacagctggaggtggagtgtcacccgcaactacctagactggctcacgtccatcccttggggcaagtacagcaacgagaacctggacctggcgcgggcacaggcagtgctggaggaagaccactacggcatggaggacgtcaagaaacgcatcctggagttcattgccgttagccagctccgcggctccacccagggcaagatcctctgcttctatggcccccctggcgtgggtaagaccagcattgctcgctccatcgcccgcgccctgaaccgagagtacttccgcttcagcgtcgggggcatgactgacgtggctgagatcaagggccacaggcggacctacgtgggcgccatgcccgggaagatcatccagtgtttgaagaagaccaagacggagaaccccctgatcctcatcgacgaggtggacaagatcggcgaggctaccagggggacccgtcgtcggcactgctggagctgctggaccagagcagaatgccaacttcctggaccactacctggacgtgcccgtggacttgtccaaggtgctgttcatctgcacggcaacgtcacggacaccatccccgagccgctgcgagaccgtatggagatgatcaacgtgtcgggctacgtggcccaggagaagctggccattgcggagcgctacctggtgccccaggctcgcgccctgtgtggcttggatgagagcaaggccaagctgtcatcggacgtgctgacgctgctcatcaagcagtactgccgcgagagcggtgtccgcaacctgcagaagcaagtggagaaggtgttacggaaatcggcctacaagattgtcagcggcgaggccgagtccgtggaggtgacgcccgagaacctgcaggacttcgtggggaagcccgtgttcaccgtggagcgcatgtatgacgtgacaccgcccggcgtggtcatggggctggcctggaccgcaatgggaggctccacgctgtttgtggagacatccctgagacggccacaggacaaggatgccaagggtgacaaggatggcagcctggaggtgacaggccagctgggggaggtgatgaaggagagcgcccgcatagcctacaccttcgccagagccttcctcatgcagcacgcccccgccaatgactacctggtgacctcacacatccacctgcatgtgcccgagggcgccacccccaaggacggcccaagcgcaggctgcaccatcgtcacggccctgctgtccctggccatgggcaggcctgtccggcagaatctggccatgactggcgaagtctccctcacgggcaagatcctgcctgttggtggcatcaaggagaagaccattgcggccaagcgcgcaggggtgacgtgcatcgtcctgccagccgagaacaagaaggacttctacgacctggcagccttcatcaccgagggcctggaggtgcacttcgtggaacactaccgggagatcttcgacatcgccttcccggacgagcaggcagaggcgctggccgtggaacggtgacggccaccccgggactgcaggcggcggatgtcaggccctgtctgggccagaactgagcgctgtggggagcgcgcccggacctggcagtggagccaccgagcgagcagctcggtccagtgacccagatcccagggacctcagtcggcttaatcagagtgtggcatagaagctatttaatgattaaagtcatttgcagtacg

SEQ ID NO: 940 - DNA, 3108 bp, Homo sapiens
  misc_feature (17)..(17): n is a, c, g, or t
gcgagttgtgtgagcgnagtatggccgggctatggcggcgagcactggctacgtgcgactgtggggagcggcgcggtgctgggtgctgcggcggccgatgctggccgccgccggggggcgggttcccactgcagcaggagcgtggttgctccgaggccagcggacctgcgacgcctctcctccttgggcactgtggggccgaggcccggcaattgggggccaatggcgggggttttgggaagcgagcagccgcggcggaggcgcattctcggggggcgaggacgcctccgagggcggcgcggaggaaggagccggcggcgcggggggcagcgcgggcgccggggaaggcccggtcataacggcgctcacgcccatgacgatccccgatgtgtttccgcacctgccgctcatcgccatcacccgcaacccggtgttcccgcgctttatcaagattatcgaggttaaaaataagaagttggttgagctgctgagaaggaaagttcgtctcgcccagccttatgtcggcgtctttctaaagagagatgacagcaatgagtcggatgtggtcgagagcctggatgaaatctaccacacggggacgtttgcccagatccatgagatgcaggaccttggggacaagctgcgcatgatcgtcatgggacacagaagagtccatatcagcagacagctggaggtggagcccgaggagccggaggcggagaacaagcacaagccccgcaggaagtcaaagcggggcaagaaggaggcggaggacgagctgagcgccaggcacccggcggagctggcgatggagcccacccctgagctcccggctgaggtgctcatggtggaggtagagaacgttgtccacgaggacttccaggtcacggaggaggtgaaagccctgactgcagagatcgtgaagaccatccgggacatcattgccttgaaccctctctacagggagtcagtgctgcagatgatgcaggctggccagcgggtggtggacaaccccatctacctgagcgacatgggcgccgcgctcaccggggccgagtcccatgagctgcaggacgtcctggaagagaccaatattcctaagcggctgtacaaggccctctccctgctgaagaaggaatttgaactgagcaagctgcagcagcgcctggggcgggaggtggaggagaagatcaagcagacccaccgtaagtacctgctgcaggagcagctaaagatcatcaagaaggagctgggcctggagaaggacgacaaggatgccatcgaggagaagttccgggagcgcctgaaggagctcgtggtccccaagcacgtcatggatgttgtggacgaggagctgagcaagctgggcctgctggacaaccactcctcggagttcaatgtcacccgcaactacctagactggctcacgtccatcccttggggcaagtacagcaacgagaacctggacctggcgcgggcacaggcagtgctggaggaagaccactacggcatggaggacgtcaagaaacgcatcctggagttcattgccgttagccagctccgcggctccacccagggcaagatcctctgcttctatggcccccctggcgtgggtaagaccagcattgctcgctccatcgcccgcgccctgaaccgagagtacttccgcttcagcgtcgggggcatgactgacgtggctgagatcaagggccacaggcggacctacgtgggcgccatgcccgggaagatcatccagtgtttgaagaagaccaagacggagaaccccctgatcctcatcgacgaggtggacaagatcggcgaggctaccagggggacccgtcgtcggcactgctggagctgctggaccagagcagaatgccaacttcctggaccactacctggacgtgcccgtggacttgtccaaggtgctgttcatctgcacggcaacgtcacggacaccatccccgagccgctgcgagaccgtatggagatgatcaacgtgtcgggctacgtggcccaggagaagctggccattgcggagcgctacctggtgccccaggctcgcgccctgtgtggcttggatgagagcaaggccaagctgtcatcggacgtgctgacgctgctcatcaagcagtactgccgcgagagcggtgtccgcaacctgcagaagcaagtggagaaggtgttacggaaatcggcctacaagattgtcagcggcgaggccgagtccgtggaggtgacgcccgagaacctgcaggacttcgtggggaagcccgtgttcaccgtggagcgcatgtatgacgtgacaccgcccggcgtggtcatggggctggcctggaccgcaatgggaggctccacgctgtttgtggagacatccctgagacggccacaggacaaggatgccaagggtgacaaggatggcagcctggaggtgacaggccagctgggggaggtgatgaaggagagcgcccgcatagcctacaccttcgccagagccttcctcatgcagcacgcccccgccaatgactacctggtgacctcacacatccacctgcatgtgcccgagggcgccacccccaaggacggcccaagcgcaggctgcaccatcgtcacggccctgctgtccctggccatgggcaggcctgtccggcagaatctggccatgactggcgaagtctccctcacgggcaagatcctgcctgttggtggcatcaaggagaagaccattgcggccaagcgcgcaggggtgacgtgcatcgtcctgccagccgagaacaagaaggacttctacgacctggcagccttcatcaccgagggcctggaggtgcacttcgtggaacactaccgggagatcttcgacatcgccttcccggacgagcaggcagaggcgctggccgtggaacggtgacggccaccccgggactgcaggcggcggatgtcaggccctgtctgggccagaactgagcgctgtggggagcgcgcccggacctggcagtggagccaccgagcgagcagctcggtccagtgacccagatcccagggacctcagtcggcttaatcagagtgtggcatagaagctatttaatgattaaagtcatttgcagtacg

SEQ ID NO: 941 - DNA, 2846 bp, Homo sapiens
  misc_feature (17)..(17): n is a, c, g, or t
gcgagttgtgtgagcgnagtatggccgggctatggcggcgagcactggctacgtgcgactgtgggcagcgcgggcgccggggaaggcccggtcataacggcgctcacgcccatgacgatccccgatgtgtttccgcacctgccgctcatcgccatcacccgcaacccggtgttcccgcgctttatcaagattatcgaggttaaaaataagaagttggttgagctgctgagaaggaaagttcgtctcgcccagccttatgtcggcgtctttctaaagagagatgacagcaatgagtcggatgtggtcgagagcctggatgaaatctaccacacggggacgtttgcccagatccatgagatgcaggaccttggggacaagctgcgcatgatcgtcatgggacacagaagagtccatatcagcagacagctggaggtggagcccgaggagccggaggcggagaacaagcacaagccccgcaggaagtcaaagcggggcaagaaggaggcggaggacgagctgagcgccaggcacccggcggagctggcgatggagcccacccctgagctcccggctgaggtgctcatggtggaggtagagaacgttgtccacgaggacttccaggtcacggaggaggtgaaagccctgactgcagagatcgtgaagaccatccgggacatcattgccttgaaccctctctacagggagtcagtgctgcagatgatgcaggctggccagcgggtggtggacaaccccatctacctgagcgacatgggcgccgcgctcaccggggccgagtcccatgagctgcaggacgtcctggaagagaccaatattcctaagcggctgtacaaggccctctccctgctgaagaaggaatttgaactgagcaagctgcagcagcgcctggggcgggaggtggaggagaagatcaagcagacccaccgtaagtacctgctgcaggagcagctaaagatcatcaagaaggagctgggcctggagaaggacgacaaggatgccatcgaggagaagttccgggagcgcctgaaggagctcgtggtccccaagcacgtcatggatgttgtggacgaggagctgagcaagctgggcctgctggacaaccactcctcggagttcaatgtcacccgcaactacctagactggctcacgtccatcccttggggcaagtacagcaacgagaacctggacctggcgcgggcacaggcagtgctggaggaagaccactacggcatggaggacgtcaagaaacgcatcctggagttcattgccgttagccagctccgcggctccacccagggcaagatcctctgcttctatggcccccctggcgtgggtaagaccagcattgctcgctccatcgcccgcgccctgaaccgagagtacttccgcttcagcgtcgggggcatgactgacgtggctgagatcaagggccacaggcggacctacgtgggcgccatgcccgggaagatcatccagtgtttgaagaagaccaagacggagaaccccctgatcctcatcgacgaggtggacaagatcggcgaggctaccagggggacccgtcgtcggcactgctggagctgctggaccagagcagaatgccaacttcctggaccactacctggacgtgcccgtggacttgtccaaggtgctgttcatctgcacggcaacgtcacggacaccatccccgagccgctgcgagaccgtatggagatgatcaacgtgtcgggctacgtggcccaggagaagctggccattgcggagcgctacctggtgccccaggctcgcgccctgtgtggcttggatgagagcaaggccaagctgtcatcggacgtgctgacgctgctcatcaagcagtactgccgcgagagcggtgtccgcaacctgcagaagcaagtggagaaggtgttacggaaatcggcctacaagattgtcagcggcgaggccgagtccgtggaggtgacgcccgagaacctgcaggacttcgtggggaagcccgtgttcaccgtggagcgcatgtatgacgtgacaccgcccggcgtggtcatggggctggcctggaccgcaatgggaggctccacgctgtttgtggagacatccctgagacggccacaggacaaggatgccaagggtgacaaggatggcagcctggaggtgacaggccagctgggggaggtgatgaaggagagcgcccgcatagcctacaccttcgccagagccttcctcatgcagcacgcccccgccaatgactacctggtgacctcacacatccacctgcatgtgcccgagggcgccacccccaaggacggcccaagcgcaggctgcaccatcgtcacggccctgctgtccctggccatgggcaggcctgtccggcagaatctggccatgactggcgaagtctccctcacgggcaagatcctgcctgttggtggcatcaaggagaagaccattgcggccaagcgcgcaggggtgacgtgcatcgtcctgccagccgagaacaagaaggacttctacgacctggcagccttcatcaccgagggcctggaggtgcacttcgtggaacactaccgggagatcttcgacatcgccttcccggacgagcaggcagaggcgctggccgtggaacggtgacggccaccccgggactgcaggcggcggatgtcaggccctgtctgggccagaactgagcgctgtggggagcgcgcccggacctggcagtggagccaccgagcgagcagctcggtccagtgacccagatcccagggacctcagtcggcttaatcagagtgtggcatagaagctatttaatgattaaagtcatttgcagtacg

SEQ ID NO: 942 - DNA, 2351 bp, Homo sapiens
tcgtgccgattcggcacgagcaagtacagcaacgagaacctggacctggcgatggagcccacccctgagctcccggctgaggtgctcatggtggaggtagagaacgttgtccacgaggacttccaggtcacggaggaggtgaaagccctgactgcagagatcgtgaagaccatccgggacatcattgccttgaaccctctctacagggagtcagtgctgcagatgatgcaggctggccagcgggtggtggacaaccccatctacctgagcgacatgggcgccgcgctcaccggggccgagtcccatgagctgcaggacgtcctggaagagaccaatattcctaagcggctgtacaaggccctctccctgctgaagaaggaatttgaactgagcaagctgcagcagcgcctggggcgggaggtggaggagaagatcaagcagacccaccgtaagtacctgctgcaggagcagctaaagatcatcaagaaggagctgggcctggagaaggacgacaaggatgccatcgaggagaagttccgggagcgcctgaaggagctcgtggtccccaagcacgtcatggatgttgtggacgaggagctgagcaagctgggcctgctggacaaccactcctcggagttcaatgtcacccgcaactacctagactggctcacgtccatcccttggggcaagtacagcaacgagaacctggacctggcgcgggcacaggcagtgctggaggaagaccactacggcatggaggacgtcaagaaacgcatcctggagttcattgccgttagccagctccgcggctccacccagggcaagatcctctgcttctatggcccccctggcgtgggtaagaccagcattgctcgctccatcgcccgcgccctgaaccgagagtacttccgcttcagcgtcgggggcatgactgacgtggctgagatcaagggccacaggcggacctacgtgggcgccatgcccgggaagatcatccagtgtttgaagaagaccaagacggagaaccccctgatcctcatcgacgaggtggacaagatcggcgaggctaccagggggacccgtcgtcggcactgctggagctgctggaccagagcagaatgccaacttcctggaccactacctggacgtgcccgtggacttgtccaaggtgctgttcatctgcacggcaacgtcacggacaccatccccgagccgctgcgagaccgtatggagatgatcaacgtgtcgggctacgtggcccaggagaagctggccattgcggagcgctacctggtgccccaggctcgcgccctgtgtggcttggatgagagcaaggccaagctgtcatcggacgtgctgacgctgctcatcaagcagtactgccgcgagagcggtgtccgcaacctgcagaagcaagtggagaaggtgttacggaaatcggcctacaagattgtcagcggcgaggccgagtccgtggaggtgacgcccgagaacctgcaggacttcgtggggaagcccgtgttcaccgtggagcgcatgtatgacgtgacaccgcccggcgtggtcatggggctggcctggaccgcaatgggaggctccacgctgtttgtggagacatccctgagacggccacaggacaaggatgccaagggtgacaaggatggcagcctggaggtgacaggccagctgggggaggtgatgaaggagagcgcccgcatagcctacaccttcgccagagccttcctcatgcagcacgcccccgccaatgactacctggtgacctcacacatccacctgcatgtgcccgagggcgccacccccaaggacggcccaagcgcaggctgcaccatcgtcacggccctgctgtccctggccatgggcaggcctgtccggcagaatctggccatgactggcgaagtctccctcacgggcaagatcctgcctgttggtggcatcaaggagaagaccattgcggccaagcgcgcaggggtgacgtgcatcgtcctgccagccgagaacaagaaggacttctacgacctggcagccttcatcaccgagggcctggaggtgcacttcgtggaacactaccgggagatcttcgacatcgccttcccggacgagcaggcagaggcgctggccgtggaacggtgacggccaccccgggactgcaggcggcggatgtcaggccctgtctgggccagaactgagcgctgtggggagcgcgcccggacctggcagtggagccaccgagcgagcagctcggtccagtgacccagatcccagggacctcagtcggcttaatcagagtgtggcatagaagctatttaatgattaaagtcatttgcagtacg

SEQ ID NO: 943 - DNA, 1515 bp, Homo sapiens
  misc_feature (17)..(17): n is a, c, g, or t
gcgagttgtgtgagcgnagtatggccgggctatggcggcgagcactggctacgtgcgactgtggggagcggcgcggtgctgggtgctgcggcggccgatgctggccgccgccggggggcgggttcccactgcagcaggagcgtggttgctccgaggccagcggacctgcgacgcctctcctccttgggcactgtggggccgaggcccggcaattgggggccaatggcgggggttttgggaagcgagcagccgcggcggaggcgcattctcggggggcgaggacgcctccgagggcggcgcggaggaaggagccggcggcgcggggggcagcgcgggcgccggggaaggcccggtcataacggcgctcacgcccatgacgatccccgatgtgtttccgcacctgccgctcatcgccatcacccgcaacccggtgttcccgcgctttatcaagattatcgaggttaaaaataagaagttggttgagctgctgagaaggaaagttcgtctcgcccagccttatgtcggcgtctttctaaagagagatgacagcaatgagtcggatgtggtcgagagcctggatgaaatctaccacacggggacgtttgcccagatccatgagatgcaggaccttggggacaagctgcgcatgatcgtcatgggacacagaagagtccatatcagcagacagctggaggtggagcccgaggagccggaggcggagaacaagcacaagccccgcaggaagtcaaagcggggcaagaaggaggcggaggacgagctgagcgccaggcacccggcggagctggcgatggagcccacccctgagctcccggctgaggtgctcatggtggaggtagagaacgttgtccacgaggacttccaggtcacggaggaggtgaaagccctgactgcagagatcgtgaagaccatccgggacatcattgccttgaaccctctctacagggagtcagtgctgcagatgatgcaggctggccagcgggtggtggacaaccccatctacctgagcgacatgggcgccgcgctcaccggggccgagtcccatgagctgcaggacgtcctggaagagaccaatattcctaagcggctgtacaaggccctctccctgctgaagaaggaatttgaactgagcaagctgcagcagcgcctggggcgggaggtggaggagaagatcaagcagacccaccgtaagtacctgctgcaggagcagctaaagatcatcaagaaggagctgggcctggagaaggacgacaaggatgccatcgaggagaagttccgggagcgcctgaaggagctcgtggtccccaagcacgtcatggatgttgtggacgaggagctgagcaagctgggcctgctggacaaccactcctcggagttcaatgtcacccgcaactacctagactgctcggtccagtgacccagatcccagggacctcagtcggcttaatcagagtgtggcatagaagctatttaatgattaaagtcatttgcagtacg

SEQ ID NO: 944 - DNA, 552 bp, Homo sapiens
  misc_feature (17)..(17): n is a, c, g, or t
gcgagttgtgtgagcgnagtatggccgggctatggcggcgagcactggctacgtgcgactgtgggcagcgcgggcgccggggaaggcccggtcataacggcgctcacgcccatgacgatccccgatgtgtttccgcacctgccgctcatcgccatcacccgcaacccggtgttcccgcgctttatcaagattatcgaggttaaaaataagaagttggttgagctgctgagaaggaaagttcgtctcgcccagccttatgtcggcgtctttctaaagagagatgacagcaatgagtcggatgtggtcgagagcctggatgaaatctaccacacggggactgcaggcggcggatgtcaggccctgtctgggccagaactggatgtcaggccctgtctgggccagaactgagcgctgtggggagcgcgcccggacctggcagtggagccaccgagcgagcagctcggtccagtgacccagatcccagggacctcagtcggcttaatcagagtgtggcatagaagctatttaatgattaaagtcatttgcagtacg

SEQ ID NO: 945 - DNA, 473 bp, Homo sapiens
aaccacctgaatccagtgtcccaagcatatcctcatccccatgataacctcaaccaaaacctgacccaaaccaatttaacacagcccaatccaaccacatcacccacaagcccaacccatcaacccaacacaacttaatctaattcaagacaaccctaatagcctccttcatttaaagatcaaaccaaactaatgcacatcctcgcatgcaatagccagctccatgtattctatctccaaaactaaacctacttcatccccaattcaatccccacacccttcccagccaacataaaaacaaacctatttccatcccaaagccatgccatcccaaaccacctttaaattgccaatccccaaactcatccgaagcagaattttaccccatctgtaactcaactccaacctgaccctccattctaactggtcttcatactccgttttcaatgctatatccagcactttatctggcc

SEQ ID NO: 946 - DNA, 487 bp, Homo sapiens
cccacctgttgagatctctggtctagacacatcttttaaaatgtgggcagagaagaaggaggtagatgaaaatcacgtgacaccatcagaggtaatggtgaatccgtgaggccctagagccatttatacatcgtttttgccctcttagtattttctttagcatgtcctaattttaaaagcatcccattcctgttgtgctagacttaatattttggtttatggccgtcttttttagtaacttgacgtcaaacacttcagccttctcctgacaagaggctcgttctctcagtaatgaatagtgacgtgctaaatttagatcggatgcatgttctgcttttactatctgttctgtatgttgctatttgtcagaatgaaagctcaacgtgccagatggctttgctggcttctcctggaaaaagacttcgttctccatcacttcagttgggtcatggttttttagtactattttgttgttaagcattaatat

SEQ ID NO: 947 - DNA, 278 bp, Homo sapiens
tagagacaaggtgtcactatattgcccaggctagtcttgaattcctgggcccaagagattctcccaccttggcctcccaaagtaaaaactcacattttcttaaaggtgggtaagcaaaagatcagggtgaaggaaaccctctccttttcagacaccaccctacgatgcctgtttgcccttcttcaccaagaagccagctgtccgtggctgggccagcgtgacagactcaggggacattggatacagctctcttttcaatggctcctagagttaagact

SEQ ID NO: 948 - DNA, 513 bp, Homo sapiens
cgctcaggtgtctgttattcggggtcgatgagcaggattggaggctgggggcaggagtgctagctccgatattagcataatataaaaactacacagcactacgttgttctgcataaaacagttgctttcatgacatttattttatatgtcaggtaacaattaatttttagactaacaaataaatataaatagggaataaggaaaagattatgagacaacgtccatagctcatacttcatgtgtcagataatggtaagtgtttagacttacaaatctaaataaggattaagggaaattattacagaaaaatttccatagtggttcactccttggatcctgaagcaagttactaaggaagagactgattcaaaggacacatattaatctatgggttttttggccaggtgtgggtggctcacacctgtaatcccagcactttgggaggcctctggcagatcacttgaggtcaggagtttgaggccagcctggtgaaaccctgtctttactaaaata

SEQ ID NO: 949 - DNA, 429 bp, Homo sapiens
aatcttaatctaaaacagattggtggccatgcctgtggaaaagttagagagaatttgtccagtactgggttttttcagagctatgtagagagagcagtgaccagatattttaaaagacattacccttcaatttagtggcacaggtactggccaagaaaatctaatatggttccttccaacaaatttggagtaaatcttcttcataaaagtagaaaatcaaattttatttttatattattaatattaaagctaaccttaggaaagcattataaacagatgtattcaatctcaatcagctttgaccatacaagatttctgtaaaccttttataaccccttaaaattttatttttctctttctccagctttctatatccattaagtttacctcattttctttatcttttttctctcaattttatgtattttt

SEQ ID NO: 950 - DNA, 387 bp, Homo sapiens
aaataatggaaacaaacacaagatttgcttggccaaaataaacaatatgcaaaatacacacacacacacacacacacccacacacacacacaccccaccagaaaaaaatcaaacttttacactaagtccagacatttttaagagtttacaaaggctatctaagcattatgcaaaaataatgctaggaagaccatttgtaggagtcaaagtaaatgtacccgggaatgaatcctttatgtcttgtttgccttaggaaaaggaattgaaattagtgacattatataaaaaaactgaaaacataagttttgagaagatgagtacttgtacacttgaatactgttcgtgttttaaataaaaaattgttttaatataccatatctagaggaa

SEQ ID NO: 951 - DNA, 780 bp, Homo sapiens
gcttggatttgaacttcagtttgcctggctcaaatgaggctgcagagttgggaaggacttaaaaagtttggagatttttgccataaatattgatttttctgcaaatgaggatgaacatcttaatggcctttaagaaactttgcaaatagttttcaaaaatgatgcaacatggcagagaaaatgcacttggcttccagctccctcaacagccattaacagcctcctaccgtggctcccacctcctatgtctccagagatcaaggcaatggggagggaaagctggcaggaggcagtcccttgtgggcctgaggccctttggctcctaagtgtccacattctgttctcttccaagtcccttcattgttaagctgattctccaacaagatgcaatgaacagatgcaatgtctaccccgcgctgggcgagttcccgaggccatgggctgtttggaatcacacttcattaagagacaaactgttccttcccttattgtgccttaatgcttatgacaaggcagctctgaattgatcccaagctggagcctctgaatgctttaaagagtttgaatatagacggtttgagagcaaaaagggagctttaaatattgctcagtggcccccatctcccctcttcccacatttactgaggcacgagatggggatgggacctgtcctggggtcacagcagcagtcgtcagcgacttgggccctcctggctttgtagggatgctgcttttcctgggcttctggcagtccaggccaggatgggggagccaggaatt

SEQ ID NO: 952 - DNA, 388 bp, Homo sapiens
attcatccagattctgaagagggcgctggggcaggtgttttcttacgtgaggcccagcacaattacagacgctctttgatttacaaaggagtcacatttggataaatctatcataaaacaaaaatatcctactttgaaagtgcattcagtacgctggacctaccaaacataacttagccttgcctgccttagcctagcattctgtctagctcagaatgcttatattagcctacagcaaaatcatctaacaccaagcctgttttataataaagtgattataaatcattttgaatcaaaattaaaaattcaaagtatggcttttactaagtaaatatcacatttgcaccatcctaaagtcaaaaaattataagtcaaaccatcgtaagtc

SEQ ID NO: 953 - DNA, 412 bp, Homo sapiens
gcacgtagcatagagtgcttcatttaattcttctggtaaacgtgtcaataatactgtcctcaacttacagatgaggtagcagagactcagagaatgaagtcacttgtccaacaagtttacgcagctggaaagtagcgggtggtaagtggctggtttccttttcttcacctcatcgttcttagaaggctaacggtagggtgataaggaaggagagaagggaaaatagcagaggaagtgaggggaaggagggagggaggagaagtgcgctcagattaattagaaacagtgagagagggccaggtgcagtggctaatgcctgtaatcccggcactttgggaggccgaggagagtgaatcacataaagccaggagttcgagaccagcctggcccatgtggtgaaaccccatcccta

SEQ ID NO: 954 - DNA, 430 bp, Homo sapiens
tttttttctggaggattacattgattgatatctaatatcgagacagccttgcaatcctggtttacaaaataaacctcactttgttattacatgttattcattttacatcttcatttgatttgctagtattttattgagaatgcttgcattatggtcatgagaaatatttctttgtatttctctctctcgtctgttttgttgtctggttttggtacaagggttactctttggaggccaggattactcttctggcctcgtaaaatgaactgggaagtgttcattcttcacctattttctgaaggaaattttttggaattggcattatttcttccataatagtttggtaaaatacaccaatgaaactacctgggcctggagatttctttggcaaaaggatttttaacaataattcaatttctttaacaggtat

SEQ ID NO: 955 - DNA, 317 bp, Homo sapiens
tgggtgtatatcttcagcttgctttgtgtcattcttgtggtcctcttgggggagagaccataagtcactgttgatggatgacaaagggtttgacccttcccaaaggtccaaagactgtccctgctgaagcctgtcccaccactgctggttactctcactgcctcactgcctcctgttttccttccttttatgattctctatttattaatgttcctctttattatcctcttccccagctagactgtaatgtgtgcatggacagggaccatagcagttttgtcactctctgtccccggggcctagcccacaacacatag

SEQ ID NO: 956 - DNA, 381 bp, Homo sapiens
ctagctgtcatactggtaataataatttcccatagttggaaggacagttctaaaactatctgtgaaagttttacaagtccaaaagccaattttgtatgaaaagaaaaattagtgatttaaaatacacaactcaaacaatacctttgctcatacctgcaactgagtttttcttttttggggggtataatgtaaacagaaacatataggtacagatcttgttaatgctccttaacttcttttttgttttttgagatggagtttcactctgtcacccaggctgaagttgcagtgagccgagatcacgctactgctccccagcctgggtgacagagcaagactccgtcacaaacaaacaaacaaactagataaatctagattcaa

SEQ ID NO: 957 - DNA, 541 bp, Homo sapiens
gggtccttcaaaataatacagaggaaaattaaaaggatagggtgttgcactcatgggtacaaaaggctaaagcactttgacttcagagtaaacccctctttattttgtcaaatggtagccttgtctgcctgttggtctgttcccaggccacctatcttacagggaactctgcctgttgacaagtgtcatgcctttctatgaagcctaccctcttcttcaaaaggattgttagggaaacaggacaaccaaactgcagatgcaactcacacaggaggaaaaagaatagaatggaagagacagatcaagacgaacagacagaacaaccaacacctggatgaaaaagaaacaatttaggtaagagaagagaatttaaaaaaaattaaaattctacttagtgtcttcgggagtattaaggaagttggatccataaaacaaagatgactactaaacaaaaagaagcaattagaagatacaaaagagttcttggaaatttaaatattcagtatacatgctaaatattagaaagaacacagttgaaaaa

SEQ ID NO: 958 - DNA, 859 bp, Homo sapiens
cgtgcagcctgcagtgctgcctggcgtttgggggtctggggttgtcgcccctctttatgtctgatgttagacataggagtgagtgtgttgtcggccggtcaccttttcctgagccgcccccagcgctgcggaggagcagggcgcccctgagcctgacgcagcacccacctcgtggtgctgcttcccccaggaggagtctggatcctcagcactgtctgctcaccatcatggcaggcacaattcggaaacgctcttctggttcctcattctatagcagagtagtaatggccactaaaaacaccctggcagaggcaggatcaagaagcgacgtgcgtttaacaaataactcacagggaaagtaaaaggaggctgagagggaaccacagagtcaaggaaactcgagagacctatggccagctgccatgtacagtaaaccttacttggttctgttgaagttccaaaaatgaatactcataaaacaattagaaattttacaggtgctggatttatgttattcaagaatcattgttcgtttttcttgggtgtggtaactggatcatgtttttataaaagagacctaattttttagagatagacactgaatattcaccaatgaaatcacatgacatatgagccttaatttactgtgcttgggagcggtgcggtggggcggtgggtgcggaaccgctgtcactagctgggtggtgagtacctgggtttggtgtatttaagtattttcatcagataatgttgacaaagagtggtaattgatagtccagcactgaaggacgagagaaaacatccaaaacttggaagaatcattcagcactcaccactgggccattttcactccaggtgc

SEQ ID NO: 959 - DNA, 844 bp, Homo sapiens
atatcatttactgtgaaatactgattcatgaagaaatggatgagtatggtggcattaagacctgtagttttactcacataaggttgaaggggatgagactcctggtttatctagcattgtaaccatattacagaatttttgccttctccagtagtagaatagtagaattattaagaagacatagtagcttctaacacttaatgagtactggctatgtgagagagactaataagtactacgcatgccttctttcatttaaccctcaggttaaaaattttctctggctgggtgcggtggctcatgcctgtgatcccagcactttgagaggcagagtgtgacttgtctgcctttctctccagtattgtgatgtctctgtttttcaggaatggaggttcctctgctggctctatagccagagacccaaagtgacagccatgtttcttgattcaaccctggaaaccttctatgataatttttaaaaattactaaccatttattaagcacctacaatattttagtacctttgatacagtagatccagaccttatgataacggtgtaacacaaatacctatgtggatgaatggtttttaatctttttgagctcacccaaagattaaaaagccttctgtgagatactggtgacagctctggaccttctttccagaaaaattcacttatgcacatatacatagtattgtacacaacttcagaagaggcttctaggacctaccgaagcccatcctctagtagtccacagactccagggtaagaactcttgacttatacaaccctttgtagctgactcttgtatggcattaagggtatagagagtgtggggggca

SEQ ID NO: 960 - DNA, 842 bp, Homo sapiens
ctcccccatccccctcatccctcagcccctgacagccatcattctactttatgaatttgactactactggtacctcatacaagtagactcatgtaatatttgtgcttttgtgactggcttatttcacttagcataatgtcttcgaggtttatccatattgtagcatgtgtcagaatttccttcctttttaaagatgagtaatattcattgtatgcatataccacaatattttgtttatccatctgtccatggacacttgggttgctgccatcctttgactattgtgaataatgctgctatgaacatggatctgttcaagtcccagctctgaattcttttgggtatatgcccagaagtgggattgctggatcatatggtaattcttttattttttgaagaaccaccataccattttccatagcagctgtctcattttacattctttccagcaatgtacaaggattccagtttctctacatccttaacaacactggttattatcagtaaattttttttgacacccataggccaaaagaaatacctaatagttttgttaaatagttatacccaaacaacatgagtattttttataaccgcttagtaactgtttgaaaataaaaaggccaggcgcagtggcgtatgcctgtaatcccagctctggaaggattgcttgagtccataagttcaagaccagcctgggcaacatagtgagaccttgtttatacaaaaaaatttttaaatgaggtgggaggatcacttgggcctgtgaggtcgaggctgcaatgaagctgtaattgtaccactgcactcctgcctcagcaacaggagtgagaccctatata

SEQ ID NO: 961 - DNA, 770 bp, Homo sapiens
aattgactccatagacaaagatctaaatataataactaaaactataaaactcttagaagaaaatgtaggggaaagcttcattacactggattggtttcttggatatgacaccaaggcagcaaaagaaaaaataatttgaggaaagaaatctttcctcaaaacgttttggccagacatggtgactcacgcctgtaatcccagctgtttggaaggtcacagcaggaggatcccttgaggccaggagttgaagaccaacctggacaacatagtgagacctcatctctacaaaaaataaaaattaaaaaaattagctgggcatggtggcgtgcacctatagtcctagctactccagaagctgagatgagaggatgactggagcccaggtttgaggttacattgagctatgaaagcaccactgcactccagcctgggtgacagagcgagaacctgtctcttaaaaaaaaaagaaacaagaaaaaaacttcagtgcatcaaaggacatcaacagagtaaaaaagcaatccaaaaaatggaagaaaatatttgcaaatcatatatcttataaggatttgctatggtttggatgtttgtctccttcaaacctcatgtcaaaatttgatccccattgttagaggtagggcctaatgggatgcattcgggtcatgggggcagatccctcatgaatagattaacagcctcccttagagataagtgaattctcactgcattagttcccgtgagagcttgttgttaaaaaaacaaaaacaaaa

SEQ ID NO: 962 - DNA, 469 bp, Homo sapiens
ggaggctgaggtgggtggattgcttgaggtcaggagttagagaccagcctggctaacgcggtgaaacctcgtctctactaaaatacaaaaattagccggatggggtgcttggtgcctgcaatctcagctactcgggaggctgaggcaagagaattccttgaacctaggaggcagaggatgcagtgagccgggactgtgccactgcaccactccagcctgggtgacagagcaagattccgtctcaaaaagcaaacaaacacaattcctattatacatgagttttgtctctgagttattttttaaattggttactttttctgtcttagcacaacactaccatttttaattgtatggctctaagaatatcttaatacctgagagagcaagaccctctcctttttacagtgagaaataaagctagcccataattttggtgcatatacgtacagatttctctaatgaactgacg

SEQ ID NO: 963 - DNA, 413 bp, Homo sapiens
taaccataattactattagcaatctgaagaaacacatatctaatgatagaagttcaggcatagtgtggcaggcaggcccctgggagggatgaatttgcacaagcaaactgccttctccatggagacctaatgaaattcatccggtccttcttgagagtttgactgagttgggaactgtgtctccaccagaccagcaaatggaagagaagtttcctggggctctagctgaagagtgtgtactgaggggcagtattgcattgtggttgagaacatgggctctagagccaggctgctcaggttcaatgcccagctccatcacttacctgctgggcagcagcctgagttatttaaacctcactaggcacaatgtaaggataacaatattgactatcccataaggttgctggggatgc

SEQ ID NO: 964 - DNA, 376 bp, Homo sapiens
ggtaagatttgacatgggcatacctggttttatgcagtctagacataaaatcttataaacacatacctataaaacacatgttaaaaattggagcctgggccaggcgcggtggctcacgcctgtaatcccagcactttgggaggctgaggtgggcggatcacgaggtcaggagatcaagaccatcctggctaacacggtgaaaccccgtctctactaaaaatacaaaaaaattagcctggtgtggtgggcgcctgtggtcccagctactcgggaggctgagggaggagaatggcatgaacccaggaggcggagcttgcagtgagcagagatcatgccactgcactccagcctgggtgacagagcgagactccatctc

SEQ ID NO: 965 - DNA, 237 bp, Homo sapiens
tggacacccagtcttgttctatctcccagacagagtgcagtggcatgatcatagatcattgtaacttcaaactcttgggctctatcctcccatctcagcctccccagtatcccagctactctggaggctgaggcaggagaatagcatgaacccgggaggcagagcttacagtgagctgagatcgcgccactgcactccagcctgggcgacagggtgagactccgtctcaaaacaaac

SEQ ID NO: 966 - DNA, 598 bp, Homo sapiens
tagagacagattctcactctgtcacccaggctggagtgcagtggtggatcacaactcactgtaacctcaaactcttgggcttaaggaatcctccctcctcagcctccgaaagtgctgggattacatgtgccaccctgcctggtcactcttagctaatttaacccttaactttttttaacccttagactttatccttgcaccgagtatataaaccccttagccaaactcacttaaaaaacccaaatgtgtgctcaaacttgcttgatgataaaaactaaagaacttaaaggaatgaggatgatgaaggccattatgccatgatacacaattatttcaaatacagtgggcaacaccccatgtcattccagaaacccacctttctgtagtttttcaagtctgtgaaaagcattctttttagaatgctatgaatttaaggaataatattttgtaagcatctaaaggtttggtgaagtcaaaatcagtattttttttaaagtctaaatatttatccaaatagtataaggcttgacatcgctttatattattggaccaagaggaagactttttaaaataaacccattaaaaagttttaaacata

SEQ ID NO: 967 - DNA, 325 bp, Homo sapiens
aagcaatctccaggcagtatagtatagtggttaggattgcaggcctccatgccagactggatttaattttcagctttatcattgaccaactgttgatcttggggagttaactaattgctgcctcgattttctcttttatttttattttttgagacagagtcttgctttgttgcccaggctggagggcagtggctcaatcttggctcactgcaacctccacctcccaggttcaagtgattctcctgcctcagcctcccaagtagctgggattacaggtgcaagctaccatgcctggctaatttttatatttttagtagagatgcgg

SEQ ID NO: 968 - DNA, 1372 bp, Homo sapiens
ccctctgttttagtaaccacagggaaacatggcggcacggggtaagtggtagaaatatctattatatttaggaaccatatcacgaacttagcctgtgtttaaaccgtagcctctcccttttaataaacagatcacaaatatggcaagtggcattgcctctcagatcacaaatcgagcacacggctaagctgtgcaatgtgacatttgttagattcaattatacatcctgggcctcatctttttaaatttatttgttgcttatgaaattttaattagctaaagaaaaacaaacactttataggaaacaaggtaacagaggccataaagcacataaaccaccagccccataggaaggcactttaaaaagatagggtaggagatccacatcttggggaagtttacagagtcaaggcagagaaaactgtagaagaaacacaccgaccccactagagttggcactgtgagggcatccgagcagccatggggtagaccaaggacctttccttgtgaagctcttttgtcctcgtgaatcattatatgtggggacagctgggagttataatttggaatattgcaaagcaaatatgtacttctctcactttggggtatattcctgcctgttggtgttagactcggctaggtgacttgctttgggcaatgaggtgttagcagctgtggaatgagcagaggcaatcggtcatgacctcttgcaccaaagacatctcaatgagaaaaacttgccttgagtttctgctgcctggacctagaatgaatacatgagacagacctgacccaatttcctctagaagcagagcctcccagctgagcccagcctggatcaaccgggtctccgcctacctgcggatcctggaacatcagggtcaatgcttcttgtgatatgtcactgaatttgggggtggctgcaacctcattgtgcaacattaactatcacccttgcaatttccaagggcaagagtaacgacacgatgggggcagggagcagctccagggaaaaggctgcacaggtggacctggatctggagtggaggtcaggtccaatgaataaaagggaggaaaagaccttgcatctctgcagtggtgcaatcgcatctctgcagtggtgctgactccaggttcagtgactttcaccttcatagagaaacagcgatgaaccgcctttaagggacttatctgtattccatgctctctgcacattcaggaactgtttctggctcactgagactcattctattttatggcaaattctgtcccattatttctctctgtctctttttttttttttttttctgagacagagttctgtcgcccaggctggagtgaaactccatctcaaaaaaaagacaaaaaaaaa

SEQ ID NO: 969 - DNA, 580 bp, Homo sapiens
caagaaactgaagtggaaattacccttaaaaagtcccaccagctgggttgagtcagaatcatgtcttttcctgttgaaatctattccttctggtggagagtatgattctaaaattaacgttaagctaatttaaagcaactgaatagcttggaatgaacatgccaagccttctcattgttttatttttcagattgttcccagatggggtaaagttatggcttaggcagtggtacaggagacaaccagggcccctttttccaggagccctttgtctgcccgaggcatttgctgggtatagtggcctagtttagcaggatttaagtgtgcattcaccttcattcttatgtgtggtttgcattatttaaggagtagggagaattttttttccaaagcatgaggttccagttagactaatatactgtcaaattgagacctcatggtgttagttacacggcagggtatgaccacgacttgctgaggagccagcctgggtgtcgatcactagtgtggcacataattgctgtggtggttgatctggggcacagcactgcctgtaccctgtctcctgccatctgtctta

SEQ ID NO: 970 - DNA, 353 bp, Homo sapiens
tgttgtaaactcagaaaaataagggaaagcaagagggacagaccaaatgctccatttcttaggccttcttccccacttttttgaaacaaatacaaaatactcctctcattcattttctcctcaaacacaaattaacttttaggcatctattattgtgcaagaaagtgctaagcaagacacaatattatttttaaaatatggttcctaaattcaaacaactgaatctggcaggtaaaaggcacctactcagatttctacaatgcgaagcagaatgcaggggcatgcaaacagttcacacagactgcaaaagtctttaggaatgaagagtcacatctgtatccacatgtgaccta

SEQ ID NO: 971 - DNA, 345 bp, Homo sapiens
ttgcattagagataatcgaaacacattccaacacatacagaattgtattcactttagtgtcacaagagttcaattctaccttaaaagtatgttagcactataaagctgcaaatctgattttaaagttagaattcaagtaaagtttcattttccttttttaaactaaagattactacatactgcttccctgcagatatttggaaatgtgtgtgtacatgcaaagacagttgaaataattttttattgatgtgtgactctgaaaataaaaataatgatataacaaatttagatatacttggaatagattgggccccatccttggtcacaccatctaggctgttggca

SEQ ID NO: 972 - DNA, 327 bp, Homo sapiens
atatttctcggttcagatttatggtttctgtctcctacaggggttctggcttagagcattcttagtttcaattattgtatgtttgagttgttattcttcccagttgtggggtaagattctcagtttgattatgtattttcttgaattattacatttttgttaaagtctctgtctaaaaactgcaaaatctagatcccatggagatctgtttctattgtcttatttttcatgttattctatcttgtctatgggcaggcctggcacatttgtgtcgaatgtctgagatggtgcatggaaagcattagaaggtctggatgaggctgtctt

SEQ ID NO: 973 - DNA, 419 bp, Homo sapiens
ctctcctggcctgagcatcttatgggcagagttaaggtcctaacacccagctcactctcctagggagggcatgggaaaagaatcagccttccaagtaaattcaatgtagggtgtgtcactaacattctattttggccagcacggtagctcatgcctataatccaaccactttgggaggctaaggcaagaggattgcttgagcctaggaatttgagacgagcctggtcatcataacaagaatctttttttttttttttgagatagagtcttactctgtggcccagactggaagcaagactccatctcaaaaaaaaaaaagagagaaggaaggaaggaaggagagagagagagagaaagaaaggaaagaaagaaaaagaaagaaagaaagaaagagaaagaaaagaaagaaagaaagaaac

SEQ ID NO: 974 - DNA, 444 bp, Homo sapiens
atttctaagacttgttgcgcatccagacatagctaaagggtagggactgggaggaaaagagccttagaaaggagatgtgggagaaggaaacaaaagcgggattagaaaggtgctgaaaagaaacccacaggggtgttaaggggagagcaggtatgcagagcagaggagagcacctggcatttctgggatttggattacctgaattttgcttgatagttcatcttatgatttctggtggttgtgaaatgtaagctttgtgtgctctgtaattctgtgcagcaacaagatagaatggcacaggtctactcaggtgacagccaacctttcttttgtagtaaggaattagagtcccagtgttgaacacctaatcctctcttcccttgagggctgtaaaaatggagagagagacctgcacatcttgccatctgccacaaggcatttctt

SEQ ID NO: 975 - DNA, 308 bp, Homo sapiens
cattttagtatttatctctaaaagatatggactctttaaaaaaaaagtgtgaccacatgatcagaacaaaaaaattaaaaccgagtcctggtgctcactgaggtctatttacgctcagagtttaaccctgcagccccacagagctctgttgaacatttggaaactagtcttttaaagggccgggcggtggctcatgcctgcaatcccagctctttgggagaccaaagtgggaggatcacttgagccaagagcttgagaccagcctgggcaacatagcgagacctcatctctacaaaaattcaaaaatt

SEQ ID NO: 976 - DNA, 538 bp, Homo sapiens
tttcggccgggtgcggtggctcacacctgtaatcccggcactttgggaggctgaggcgggcggatcatgaggtcaggagattgagaccatcctggctaacacagtgaaaccccatctctactaaaaaatacaaaaaaattagccaggtgtggtggcgggtgcctgtagtcccagctactcgggaggctgaggcaggagaatggcgtgaacctgggaggcggagctggcagtgagctgagactcgtgccactgcactccagcctgtgtgacaaagtgaagactgtctcaaaaaaataaataaataaaaataaaaataaaataataataataataataataataaatcatccctttccaccagacagcaaatcagggtgtgaaccatgggggacaatgtcacgggatttggaggaacaagccaggcctcagaggagccaggcttctaagtggtcacctgcgcagcaacaggggagtcgactcagtctgctcctgcccccagcaaacaggcctcagagcagtcgcccagaccaagatgatt

SEQ ID NO: 977 - DNA, 424 bp, Homo sapiens
tagtctgcttctctctcctttcttgcactgcttcacacagccatgccctgccagcccgggcaggtgccttcctgtcaatgtacatttgggcttctgctcatgctgccctccctcccctcccctgcctcccaaccccgccccttttgttcctccatggagtacttccatgggtgtgcctcccccagccaagccataataggtggtttccccttcgcttctgtagcccttgcagacatcctctgtttacagtaggtgttgacttacttcccctctccccgctaaagccataaactccttaaggacaggtagcatttcttagtcatcttcgtttccttctcaatgaccagtagaccattaaaacatgttagctaaacaaatgtgaaatgattttgtgatgcacacagctaactaaagtacttccacc

SEQ ID NO: 978 - DNA, 997 bp, Homo sapiens
gggaggggtaacaaacttttgcttcagtgggaggaataaaagcaaaacttatctgcttctggtgaggtgtcaaaaccttcttgcccttcttgaacaggcaaagacccattgctcctgggactagaagcagaaaccccctacccaggggcagaagcaggaaactgtcctgggctgaagattcaagcgaaggtccactctgttgtggggagggcaagaactttggctaatcccagatgaaccacatataaggcagagtttggcttccatagggaagagggacagaaacactgagaaagtcccactgctgaagctcgggtgcctaggacctatttaagactgaagccgggccagggtaacagaatcaaccctgccctgccctgcctgagcctggcaccagatcacaagcaacagaagtcttctgccagctgaaaagctgagtgtgggacagcagcactgaggaagccctgacaccccagtccccactctaagcagcccaccactagaggaatttgaaacctggggtgcactgaaggtaatgagagcacaaccaaacccaaaccctgtccaattcctaacaagactgactcaaccccccagaccaacaggctgacagaagaggcagccccactcccagatacagatactatttacctcagtctctgctgttttatacaccatgggcattcagttaaaaaactgcaaaacataggtcaggcgctatggctcacacttgtaatcctagcactttgggaggccgagacaggtgtatcacctgaggtcaggagtttcagaccagcctggtcaacatggcgaaaccccatctctactaaaaatacaaaaattagccaggtgttggtggtgtgtgcctgtagtcccagctactccacaggctgaggcaggagaatcacttgaacctgggagggtgaggttgcagtgagctgagatggccccactacactccagcctgggcaacagagcaagactgtctcaaaaaaaa

SEQ ID NO: 979 - DNA, 415 bp, Homo sapiens
aaccttagtttcttcttcctgtttttccaactggagagactaagttcacagctgtttccatctctcatttcttcacatgactctgatttatcccattttcacagtaccttcctccctttggtgttgtagtatatgttgttgtggaaacatgtaaacacagtgacaatacagggagaagagaaaaagtggaaaaaactgttacataagatcagccgtgctctttagccagcataaaatgtcttgagcaatgacacaggccttgggctatgagggtgaactaaggcctaggcagtgattctgaagcaaatgtttccattgcgaaaatcccgggcaggcccctggaggcagagccctggttccacgtggcccagccgtctcctgagagcggagcctgccttccatcctcctgacactg

SEQ ID NO: 980 - DNA, 456 bp, Homo sapiens
caccagactgaagctaaaaagtgctggaaaacagcagttgctttaaccacaggctgtgtagaaccacctgaggatgaccctgggggtctgttttgtgcaccttggaacccatcggatccctcccaatgacacatttgtccagagcaagacaagatcacactttgacagccctctgtcaagatccttgctccaaatctccagactagcagccaggagtctccatgctgttctgaagaagcagattcctcacccacccttcaactccttcccaggaggtaatcctcctccaaatctctggaaaagatacacctcctcttctctgataaaggctggggggtgatgcccctcccccagtttcccaataaagctatgcaagacaggagcaagggatctcacggcctgtttttgctacaaaaaccctttttcggaaaaaataataaagaaaggaatcagcca

SEQ ID NO: 981 - DNA, 373 bp, Homo sapiens
taatgcggggtcgtggtgcccctggaccatcgggattccttcatgacacatttgtccagagcaagacaagatcacactttgacagccctctgtcaagatccttgctccaaatctccagactagcagccaggagtctccatgctgttctgaagaagcagattcctcacccacccttcaactccttcccaggaggtaatcctcctccaaatctctggaaaagatacacctcctcttctctgataaaggctggggggtgatgcccctcccccagtttcccaataaagctatgcaagacaggagcaagggatctcacggcctgtttttgctacaaaaaccctttttcggaaaaaataataaagaaaggaatcagcca

SEQ ID NO: 982 - DNA, 466 bp, Homo sapiens
atattacattttaatgtgaattttcattgaaatataacttatgtacaacaagccataaatgtatgccacagtaaattttttcaaagtaaacagcatccagatctattttagacatttccagcacctcagaaactccttcttgcccatttctagtccacccctgacactgacttccagcaccataggttttttgcctatttttgaacttcatataaagggctacggtatgggacaggatgtactcttttgtgtctggtttatttttctcaacattatgattgtgaactgtatacatgttgtaaattgaagttcatttgttcttattactgtatatttcatattttcccattctgctgaggggctcgggttgcttctggttttgaccacttacaaatagtaatgctgtggatatttttgtttacatgtttcaaatattttctaccattactaatgtttgacagtatct

SEQ ID NO: 983 - DNA, 295 bp, Homo sapiens
ctcagctggtgaggagtggagagggccctggagacagacgctgcatgctcttggaactccgtgccgggagtgttccagaaggttccgggtgagccgtcgaggacatggccctgacaggcagcggctgggtctgcagctctgcatggcgctgacccctcccgacctcgccccgcatccccactgcggtgtgggaggtttcacctgggtccttcacctccgcttcccagggaggagctcagctccatgtctggggcaccccggtccgtgcagtgtgggtcccacacatgcaggtgta

SEQ ID NO: 984 - DNA, 823 bp, Homo sapiens
ctttacatacttactttcttgattttctatggaaccttttctattaatttttatacttcgaagaaacctgctttataagagaaggcccggcagtggagggagcatttcatcgttttcccatagatgcagctgagatggagggagacccatccggaagccgtggagagagcgtctcctcagcccgccctgagacgggggtcctcctctctcccccatggtccgggcttggcttctctgggctgtgagatgcacaagtgaaacgcttcaatctccaaggccagagaccttccacccacaggcctcacgctccttcctgccacccgcttcccatcgcagctccttgctcctcagcttggctccaacagccccaagtccctgcctccctttccctgtcatcctcgcctggccgtgtcaggccgtgaagccgggacagaccacactgctctgtgcacaccccgggcaggcaggcgctgggcagcaggttgcagatggatgtggacggcgccaaggacccccactgggtctgtcttcccaatcgtggcctctgctcttcttcccctctgctgagagcctctgctcagcattcagagagggaaggtgtgggtggctgcctcctgccccatgccccccgccggggctccacctcttctctctcctggagcagttggtgttctcagggaaggtcctcgctcagtccacgcctggcaaatcccacggagaggcccggaagcagttccctccatggccactttcctgccagcattcttttcttactcatcatcttatgctgttactgtctccgcaactggaaccaacggtcctc

SEQ ID NO: 985 - DNA, 424 bp, Homo sapiens
cacaaaacacccttttaataatttcctgacgccttcgagaggtccccattgctctggcgactgtcctgacaagcccacctcccatctctcacccaggtccttctaaaaatctcagcctggtgggctgtttgtctctgggcacactggtgcccagggcattcctgcctcttccctcctagacaagtcatctgtgatcatcaggacattctcccactaactcttgcaagctcacttccctttcagatgacatcactgcctcacactcatctctcccaatgataagtctattacgcaaaaatgtattactcatcaccattttttgagatggagttttgctcttgtggcccaggctggagtgcagtggcacgatctcggctcactgcaacctccacctcttgggttcaagtgattttcctgcctcagc

SEQ ID NO: 986 - DNA, 540 bp, Homo sapiens
attcccagaaagctgtgtcagcaatgagatttgtttcattgttttgccttgttttgtcattgagttgttatagttaaagtttattattttttaatgcagaaaaaagtgacttttgggggagtgcagagttctatgaatttttaacacatgtctagttatttgaccacaaccgtaatcaagatacagaacagttttatcatttcaagtgctctcctgctatgcttttataacacacccttccccaccccaactcctggcaattactgctctattctccgtaactgtagttttgccttttcgagaatatcatataaataatcatgtattatgtaacattctgagacaggcttctttcacccagcataatgcctttgagattcatccagatcgttgtgtgtatcagtagtttgtttttattactgggttatagttcattgtatggatataccacagtttctttagccattcacccactgaaagtcatttgggttgtttctaggctttggtgattatgaataaagctgctatcaacatccacgt

SEQ ID NO: 987 - DNA, 192 bp, Homo sapiens
aatgaactattttataaaataagtaaatttgaaggggagtgtgttcttaaaaagtatgtgtactttattaactatttttaaagatgcaaccttaacatttgtacatggtttccttgttcatgatctaactccctcgtcagttgtgtaagctgtaggcttgtgctgaacttgccttgataaaaaggggtgatt

SEQ ID NO: 988 - DNA, 349 bp, Homo sapiens
gaaattacctaattaccataaagacagattctgtaggatgaaccaatgagtgagggcagagcttcacctatccccctatcaaccttctgagaagaggccagagacagcaggcagggtataccttgcaggctaaccccattctgttggaaatgaccagctgcagtgctgtgccatgatgaaagggattctgaggccatgttggagtgcagtggaagagcatgccctgattgattattgatgtccatcatgggaatggtattagggaggagtcagggcacacacttgccctatattcatctccctctgctaggaaataagcaaactgaaattcaagttttaaaacaaggag

SEQ ID NO: 989 - DNA, 348 bp, Homo sapiens
attaaaatatatagaaatatatcaagacaggtaaatgtaaaggctttgcagtctttataacctgtgttaaaagttctctttggaaataaaaactattactgggacaaaaaggaaaacttggtcatttaaaatctatcttctaaggaagggggaaaatcctggttttaaatagcccatctggccttcgaaagcttttccccagggagctgcactaacttctgccacatagatcgtgcttgatgatggacatagcccatggcaaagaggccagagatggaaagcaaatggacttctgtgaaaatacacgagggacaaacagcatcctgcttgcccagtaagtgctagaaa

SEQ ID NO: 990 - DNA, 1161 bp, Homo sapiens
  misc_feature (22)..(22): n is a, c, g, or t
tactgggaatagtggcttttgnccatgacatctgctcattcttcattcatgtaatgggtcaaatccgaagtaattctggagatacggtatggtaagagaagggcctaaagagtctctagagattagaaagcatatgccattgtaaggaaggatggggagagaccgtgcccagattaaatggactcagccatttgacttaatgggatgcactgcccatggtggcaccctcccctgggagttcttccttgatcttgagactttcccaaactggaatccacttagctctgccacatcggtcccagatttggtgggactctcctctggtatcagttttcaacgccacttcttgtttggagtcattcccagtgcagtcatggactctatgaacaaatacggttatttaaatgtatttgtccagtatgagaatcagaatgaactagtagaggctttacagatcagctggtctgacccattttacagatgaggaaacaggcctgagaagatggagggagttacccacaatctgaaggggctctaccatgactagacccaggtcacctgcctcccaggcctggctctttccactccgaggtgctggctcaccacagacttattctttaatggaattttggaaaggcctcactccagtgactctttggatctttcttctctaagtagatgggaagcctgtaagaagagacttggaggcaaagcaaagggaatcagcacttaaccctcacccaaagggcccaagagaatctttagtaactggaggcagagcagactggagcctctacggggcatctccccatattggagaattcagtctttgttttggaaatcttataatgtctttggagaggctttaaataattttgtttttcttagcaatgttatgctctattttgagacatggattttttttttcttctagtgtttctctcctgagcaaagcccaacacacctgtcttttgtccacttctccagcaaattagatttgtctctgggaatgtgtttgtaacataccaacctactgcagaccagcagagggagctcccatgttgaatttgtttgttagctattttcccccctttcacaaaaactatttcttgacgacctttgagagatttcaataaaaattttaatcagagcaaaaatgaa

SEQ ID NO: 991 - DNA, 443 bp, Homo sapiens
gccttgtggctgcctgtgctggagtccagccctctgcaggtggctccaacaccaacgtcacccacaggcactgtgtttataagctgagtcctgcaaactccagttccctaggtgtggccaggatcgtgaacaagcagcagaggatttaaactaaatgcttagcctgtgttcctctgcaaataaaggcttcatgcccccaaaagaaaccttccaagaagaacccttagatgggaacaagctaagtgtctgtgcttgggttctgctaattatgagagcccttgtcctgatatcactctgagatgtggaaagttcttcttacccaaagcacaatcctgtatccctatgtctccccctcttcctccccatccccatcaacactcacacagcagttctcattctcttcttctaccagagctcagccttccccaagaggaagtgaggct

SEQ ID NO: 992 - DNA, 354 bp, Homo sapiens
taacaaaaattagaaaatagcttaaaatatccagcattcagaggataattacattatggtatgctcatatgatttatactattttctaacattattttaatggcatgggaagttgctaagtgaaaaaaaaagatacagcattttatatgtagttgatctaaattttgtaaataaataaatgaacaaatgctaaaggaatttatttcgtcaataaatagtaaactcataactgctttaaaaaattataggggttctctgggtattcaagaaatattaacaggccaagcacagtggctcatgcctgtaatcccagaactttgggaggccaacatgggcagatcacctgaggtcagg

SEQ ID NO: 993 - DNA, 1848 bp, Homo sapiens
agccaccagcgctggaggccgctgctcgctgcgccaccgcctcccgccacccctgcccgcccgacagcgccgccgcctgccccgccatgggtcgacagaaggagctggtgtcccgctgcggggagatgctccacatccgctaccggctgctccgacaggcgctggccgagtgcctggggaccctcatcctcgtgatgtttggctgtggctccgtggcccaggttgtgctcagccggggcacccacggtggtttcctcaccatcaacctggcctttggctttgctgtcactctgggcatcctcatcgctggccaggtctctggggcccacctgaaccctgccgtgacctttgccatgtgcttcctggctcgtgagccctggatcaagctgcccatctacaccctggcacagacgctgggagccttcttgggtgctggaatagtttttgggctgtattatgatgcaatctggcacttcgccgacaaccagctttttgtttcgggccccaatggcacagccggcatctttgctacctacccctctggacacttggatatgatcaatggcttctttgaccagttcataggcacagcctcccttatcgtgtgtgtgctggccattgttgacccctacaacaaccccgtcccccgaggcctggaggccttcaccgtgggcctggtggtcctggtcattggcacctccatgggcttcaactccggctatgccgtcaaccctgcccgggactttggcccccgcctttttacagcccttgcgggctggggctctgcagtcttcacgaccggccagcattggtggtgggtgcccatcgtgtccccactcctgggctccattgcgggtgtcttcgtgtaccagctgatgatcggctgccacctggagcagcccccaccctccaacgaggaagagaatgtgaagctggcccatgtgaagcacaaggagcagatctgagtgggcaggggccatctccccactccgctgccctggccttgagcatccactgactgtccaagggccactcccaagaagcccccttcacgatccaccctttcaggctaaggagctccctatctaccctcaccccacgagacagccccttcaggatttccactggaccttgcccaaatagcaccttaggccactgcccctaagctggggtggaaccggaatttgggtcaatacatccttttgtctcccaagggaagagaatgggcagcaggtatgtgtgtgtgtgcatgtgtgtgcatgtgtgtgcatgtgtgtgcaggggtgtgtgtgtgtggggggggttcccagatattcagggcaagggaccagtcggaagggattctggctattgggggagcccagagacaggggaaggcagcctgtccatctgtgcataaggagaggaaagttccagggtgtgtatgtttcaggggcttcacatggaggagctgcagatagatatgtgtttctgtgtatgtgtatgtctgcctttttttctaagtgggggcttctacaggcttttgggaagtagggtggatgtgggtagggctgggaggagggggccacagcttaggtttggagctctggatgtacatacataagtaggagcagtgggacgtgtttctgtcataatgcaggcatgaagggtggagtgaagtcaggtcataagtttcatgtttgcttttgttttgttttgtttttaatgtatgtagcagatgttacagtcttagggatccgggatgggagaccccactttagaaagggtcgtcactcctttaatcctctactcaacaatgtactcttttacttttatattaaaaaaaataaaataaatatgtgcctaaaa

SEQ ID NO: 994 - DNA, 486 bp, Homo sapiens
cgtttaggactatgacagtgttaaaaacaggtgtacgcccggaattccggatcaggtgtgtatgtttcaggggcttcacatggaggagctgcagatagatatgtgtttctgtgtatgtgtatgtctgcctttttttctaagtgggggcttctacaggcttttgggaagtagggtggatgtgggtagggctgggaggagggggccacagcttaggtttggagctctggatgtacatacataagtaggagcagtgggacgtgtttctgtcataatgcaggcatgaagggtggagtgaagtcaggtcataagtttcatgtttgcttttgttttgttttgtttttaatgtatgtagcagatgttacagtcttagggatccgggatgggagaccccactttagaaagggtcgtcactcctttaatcctctactcaacaatgtactcttttacttttatattaaaaaaaataaaataaatatgtgcctaaaa

SEQ ID NO: 995 - DNA, 2171 bp, Homo sapiens
  misc_feature (2014)..(2014): n is a, c, g, or t
agccaccagcgctggaggccgctgctcgctgcgccaccgcctcccgccacccctgcccgcccgacagcgccgccgcctgccccgccatgggtcgacagaaggagctggtgtcccgctgcggggagatgctccacatccgctaccggctgctccgacaggcgctggccgagtgcctggggaccctcatcctcgtgatgtttggctgtggctccgtggcccaggttgtgctcagccggggcacccacggtggtttcctcaccatcaacctggcctttggctttgctgtcactctgggcatcctcatcgctggccaggtctctggggcccacctgaaccctgccgtgacctttgccatgtgcttcctggctcgtgagccctggatcaagctgcccatctacaccctggcacagacgctgggagccttcttgggtgctggaatagtttttgggctgtattatgatgcaatctggcacttcgccgacaaccagctttttgtttcgggccccaatggcacagccggcatctttgctacctacccctctggacacttggatatgatcaatggcttctttgaccagttcataggcacagcctcccttatcgtgtgtgtgctggccattgttgacccctacaacaaccccgtcccccgaggcctggaggccttcaccgtgggcctggtggtcctggtcattggcacctccatgggcttcaactccggctatgccgtcaaccctgcccgggactttggcccccgcctttttacagcccttgcgggctggggctctgcagtcttcacgaccggccagcattggtggtgggtgcccatcgtgtccccactcctgggctccattgcgggtgtcttcgtgtaccagctgatgatcggctgccacctggagcagcccccaccctccaacgaggaagagaatgtgaagctggcccatgtgaagcacaaggagcagatctgagtgggcaggggccatctccccactccgctgccctggccttgagcatccactgactgtccaagggccactcccaagaagcccccttcacgatccaccctttcaggctaaggagctccctatctaccctcaccccacgagacagccccttcaggatttccactggaccttgcccaaatagcaccttaggccactgcccctaagctggggtggaaccggaatttgggtcaatacatccttttgtctcccaagggaagagaatgggcagcaggtatgtgtgtgtgtgcatgtgtgtgcatgtgtgtgcatgtgtgtgcaggggtgtgtgtgtgtggggggggttcccagatattcagggcaagggaccagtcggaagggattctggctattgggggagcccagagacaggggaaggcagcctgtccatctgtgcataaggagaggaaagttccagggtgtgtatgtttcaggggcttcacatggaggagctgcagatagatatgtgtttctgtgtatgtgtatgtctgcctttttttctaagtgggggcttctacaggcttttgggaagtagggtggatgtgggtagggctgggaggagggggccacagcttaggtttggagctctggatgtacatacataagtaggagcagtgggacgtgtttctgtcataatgcaggcatgaagggtggagtgaagtcaggtcataagtttcatgtttgcttttgttttgttttgtttttaatgtatgtagcagatgttacagtcttagggatccgggatgggagaccccactttagaaagggtcgtcactcctttaatcctctactcaacaatgtactcttttacttttatattaaaaaaaataaaataaatatgtgcctaaaaacaccaaaaaaaaaaaaccccggggccctttttggggggggcggaacaacggggtattagacagggccagggccaaaggtgttcccccgcacccccttttcgttccacgtggggggaaacgcgcggggccccatagggggggcgaaaattgcaaaagcggtacgantctaggaggacacagcaagcaaaaaaactcaaacaacaaaacaaaaaaaaacaaaacaaagagacaacaaacaacacaaagatcaagcaaacatcacaaaaaacaacataaaaaaagaaacaaaaacaacaaacaacaatcagcaaacagacaacaa

SEQ ID NO: 996 - DNA, 1932 bp, Homo sapiens
agccaccagcgctggaggccgctgctcgctgcgccaccgcctcccgccacccctgcccgcccgacagcgccgccgcctgccccgccatgggtcgacagaaggagctggtgtcccgctgcggggagatgctccacatccgctaccggctgctccgacaggcgctggccgagtgcctggggaccctcatcctcgtgatgtttggctgtggctccgtggcccaggttgtgctcagccggggcacccacggtggtttcctcaccatcaacctggcctttggctttgctgtcactctgggcatcctcatcgctggccaggtctctggggcccacctgaaccctgccgtgacctttgccatgtgcttcctggctcgtgagccctggatcaagctgcccatctacaccctggcacagacgctgggagccttcttgggtgctggaatagtttttgggctgtattatgatgcaatctggcacttcgccgacaaccagctttttgtttcgggccccaatggcacagccggcatctttgctacctacccctctggacacttggatatgatcaatggcttctttgaccagttcataggcacagcctcccttatcgtgtgtgtgctggccattgttgacccctacaacaaccccgtcccccgaggcctggaggccttcaccgtgggcctggtggtcctggtcattggcacctccatgggcttcaactccggctatgccgtcaaccctgcccgggactttggcccccgcctttttacagcccttgcgggctggggctctgcagtcttcacgaccggccagcattggtggtgggtgcccatcgtgtccccactcctgggctccattgcgggtgtcttcgtgtaccagctgatgatcggctgccacctggagcagcccccaccctccaacgaggaagagaatgtgaagctggcccatgtgaagcacaaggagcagatctgagtgggcaggggccatctccccactccgctgccctggccttgagcatccactgactgtccaagggccactcccaagaagcccccttcacgatccaccctttcaggctaaggagctccctatctaccctcaccccacgagacagccccttcaggatttccactggaccttgcccaaatagcaccttaggccactgcccctaagctggggtggaaccggaatttgggtcaatacatccttttgtctcccaagggaagagaatgggcagcaggtatgtgtgtgtgtgcatgtgtgtgcatgtgtgtgcatgtgtgtgcaggggtgtgtgtgtgtggggggggttcccagatattcagggcaagggaccagtcggaagggattctggctattgggggagcccagagacaggggaaggcagcctgtccatctgtgcataaggagaggaaagttccagggtgtgtatgtttcaggggcttcacatggaggagctgcagatagatatgtgtttctgtgtatgtgtatgtctgcctttttttctaagtgggggcttctacaggcttttgggaagtagggtggatgtgggtagggctgggaggagggggccacagcttaggtttggagctctggatgtacatacataagtaggagcagtgggacgtgtttctgtcataatgcaggcatgaagggtggagtgaagtcaggtcataagtttcatgtttgcttttgttttgttttgtttttaatgtatgtagcagatgttacagtcttagggatccgggatgggagaccccactttagaaagggtcgtcactcctttaatcctctactcaacaatgtactcttttacttttatattaaaaaaaataaaataaatatgtgcctaaaattaaaaaaacatggctacaaagagggcaaaccgtgcattattataaagctcaaccgagttctaggcttccctgcctcccatggt

SEQ ID NO: 997 - DNA, 1799 bp, Homo sapiens
taggctaggtagaggccgtggtgaatcggccgagggcatgggtcgacagaaggagctggtgtcccgctgcggggagatgctccacatccgctaccggctgctccgacaggcgctggccgagtgcctggggaccctcatcctcgtgatgtttggctgtggctccgtggcccaggttgtgctcagccggggcacccacggtggtttcctcaccatcaacctggcctttggctttgctgtcactctgggcatcctcatcgctggccaggtctctggggcccacctgaaccctgccgtgacctttgccatgtgcttcctggctcgtgagccctggatcaagctgcccatctacaccctggcacagacgctgggagccttcttgggtgctggaatagtttttgggctgtattatgatgcaatctggcacttcgccgacaaccagctttttgtttcgggccccaatggcacagccggcatctttgctacctacccctctggacacttggatatgatcaatggcttctttgaccagttcataggcacagcctcccttatcgtgtgtgtgctggccattgttgacccctacaacaaccccgtcccccgaggcctggaggccttcaccgtgggcctggtggtcctggtcattggcacctccatgggcttcaactccggctatgccgtcaaccctgcccgggactttggcccccgcctttttacagcccttgcgggctggggctctgcagtcttcacgaccggccagcattggtggtgggtgcccatcgtgtccccactcctgggctccattgcgggtgtcttcgtgtaccagctgatgatcggctgccacctggagcagcccccaccctccaacgaggaagagaatgtgaagctggcccatgtgaagcacaaggagcagatctgagtgggcaggggccatctccccactccgctgccctggccttgagcatccactgactgtccaagggccactcccaagaagcccccttcacgatccaccctttcaggctaaggagctccctatctaccctcaccccacgagacagccccttcaggatttccactggaccttgcccaaatagcaccttaggccactgcccctaagctggggtggaaccggaatttgggtcaatacatccttttgtctcccaagggaagagaatgggcagcaggtatgtgtgtgtgtgcatgtgtgtgcatgtgtgtgcatgtgtgtgcaggggtgtgtgtgtgtggggggggttcccagatattcagggcaagggaccagtcggaagggattctggctattgggggagcccagagacaggggaaggcagcctgtccatctgtgcataaggagaggaaagttccagggtgtgtatgtttcaggggcttcacatggaggagctgcagatagatatgtgtttctgtgtatgtgtatgtctgcctttttttctaagtgggggcttctacaggcttttgggaagtagggtggatgtgggtagggctgggaggagggggccacagcttaggtttggagctctggatgtacatacataagtaggagcagtgggacgtgtttctgtcataatgcaggcatgaagggtggagtgaagtcaggtcataagtttcatgtttgcttttgttttgttttgtttttaatgtatgtagcagatgttacagtcttagggatccgggatgggagaccccactttagaaagggtcgtcactcctttaatcctctactcaacaatgtactcttttacttttatattaaaaaaaataaaataaatatgtgcctaaaa

SEQ ID NO: 998 - DNA, 1772 bp, Homo sapiens
aaagcaggctgtactggtcggaggttttctggtgtcccgctgcggggagatgctccacatccgctaccggctgctccgacaggcgctggccgagtgcctggggaccctcatcctcgtgatgtttggctgtggctccgtggcccaggttgtgctcagccggggcacccacggtggtttcctcaccatcaacctggcctttggctttgctgtcactctgggcatcctcatcgctggccaggtctctggggcccacctgaaccctgccgtgacctttgccatgtgcttcctggctcgtgagccctggatcaagctgcccatctacaccctggcacagacgctgggagccttcttgggtgctggaatagtttttgggctgtattatgatgcaatctggcacttcgccgacaaccagctttttgtttcgggccccaatggcacagccggcatctttgctacctacccctctggacacttggatatgatcaatggcttctttgaccagttcataggcacagcctcccttatcgtgtgtgtgctggccattgttgacccctacaacaaccccgtcccccgaggcctggaggccttcaccgtgggcctggtggtcctggtcattggcacctccatgggcttcaactccggctatgccgtcaaccctgcccgggactttggcccccgcctttttacagcccttgcgggctggggctctgcagtcttcacgaccggccagcattggtggtgggtgcccatcgtgtccccactcctgggctccattgcgggtgtcttcgtgtaccagctgatgatcggctgccacctggagcagcccccaccctccaacgaggaagagaatgtgaagctggcccatgtgaagcacaaggagcagatctgagtgggcaggggccatctccccactccgctgccctggccttgagcatccactgactgtccaagggccactcccaagaagcccccttcacgatccaccctttcaggctaaggagctccctatctaccctcaccccacgagacagccccttcaggatttccactggaccttgcccaaatagcaccttaggccactgcccctaagctggggtggaaccggaatttgggtcaatacatccttttgtctcccaagggaagagaatgggcagcaggtatgtgtgtgtgtgcatgtgtgtgcatgtgtgtgcatgtgtgtgcaggggtgtgtgtgtgtggggggggttcccagatattcagggcaagggaccagtcggaagggattctggctattgggggagcccagagacaggggaaggcagcctgtccatctgtgcataaggagaggaaagttccagggtgtgtatgtttcaggggcttcacatggaggagctgcagatagatatgtgtttctgtgtatgtgtatgtctgcctttttttctaagtgggggcttctacaggcttttgggaagtagggtggatgtgggtagggctgggaggagggggccacagcttaggtttggagctctggatgtacatacataagtaggagcagtgggacgtgtttctgtcataatgcaggcatgaagggtggagtgaagtcaggtcataagtttcatgtttgcttttgttttgttttgtttttaatgtatgtagcagatgttacagtcttagggatccgggatgggagaccccactttagaaagggtcgtcactcctttaatcctctactcaacaatgtactcttttacttttatattaaaaaaaataaaataaatatgtgcctaaaa

SEQ ID NO: 999 - DNA, 1774 bp, Homo sapiens
gtcgcggtgtctgggatatagctgccatagtgcgtgagctggctggtccgacatggagctggcggagggccttggcgtgagcgcgacatgcgtggatgatgtccgggtgtggttcctgtagggccatgtgtcgtggacaaggggggcgacgagggcgggtgctccgtcatccatttgaccttggtgcttcggtgtgggcttgatcactactggggcaatacgtgaatcggctggtccagggtctctggggcccacctgaaccctgccgtgacctttgccatgtgcttcctggctcgtgagccctggatcaagctgcccatctacaccctggcacagacgctgggagccttcttgggtgctggaatagtttttgggctgtattatgatgcaatctggcacttcgccgacaaccagctttttgtttcgggccccaatggcacagccggcatctttgctacctacccctctggacacttggatatgatcaatggcttctttgaccagttcataggcacagcctcccttatcgtgtgtgtgctggccattgttgacccctacaacaaccccgtcccccgaggcctggaggccttcaccgtgggcctggtggtcctggtcattggcacctccatgggcttcaactccggctatgccgtcaaccctgcccgggactttggcccccgcctttttacagcccttgcgggctggggctctgcagtcttcacgaccggccagcattggtggtgggtgcccatcgtgtccccactcctgggctccattgcgggtgtcttcgtgtaccagctgatgatcggctgccacctggagcagcccccaccctccaacgaggaagagaatgtgaagctggcccatgtgaagcacaaggagcagatctgagtgggcaggggccatctccccactccgctgccctggccttgagcatccactgactgtccaagggccactcccaagaagcccccttcacgatccaccctttcaggctaaggagctccctatctaccctcaccccacgagacagccccttcaggatttccactggaccttgcccaaatagcaccttaggccactgcccctaagctggggtggaaccggaatttgggtcaatacatccttttgtctcccaagggaagagaatgggcagcaggtatgtgtgtgtgtgcatgtgtgtgcatgtgtgtgcatgtgtgtgcaggggtgtgtgtgtgtggggggggttcccagatattcagggcaagggaccagtcggaagggattctggctattgggggagcccagagacaggggaaggcagcctgtccatctgtgcataaggagaggaaagttccagggtgtgtatgtttcaggggcttcacatggaggagctgcagatagatatgtgtttctgtgtatgtgtatgtctgcctttttttctaagtgggggcttctacaggcttttgggaagtagggtggatgtgggtagggctgggaggagggggccacagcttaggtttggagctctggatgtacatacataagtaggagcagtgggacgtgtttctgtcataatgcaggcatgaagggtggagtgaagtcaggtcataagtttcatgtttgcttttgttttgttttgtttttaatgtatgtagcagatgttacagtcttagggatccgggatgggagaccccactttagaaagggtcgtcactcctttaatcctctactcaacaatgtactcttttacttttatattaaaaaaaataaaataaatatgtgcctaaaa

SEQ ID NO: 1000 - DNA, 1512 bp, Homo sapiens
taggctaagtggaggctgggggtgcatctggtcgtgagccctggatcaagctgcccatctacaccctggcacagacgctgggagccttcttgggtgctggaatagtttttgggctgtattatgatgcaatctggcacttcgccgacaaccagctttttgtttcgggccccaatggcacagccggcatctttgctacctacccctctggacacttggatatgatcaatggcttctttgaccagttcataggcacagcctcccttatcgtgtgtgtgctggccattgttgacccctacaacaaccccgtcccccgaggcctggaggccttcaccgtgggcctggtggtcctggtcattggcacctccatgggcttcaactccggctatgccgtcaaccctgcccgggactttggcccccgcctttttacagcccttgcgggctggggctctgcagtcttcacgaccggccagcattggtggtgggtgcccatcgtgtccccactcctgggctccattgcgggtgtcttcgtgtaccagctgatgatcggctgccacctggagcagcccccaccctccaacgaggaagagaatgtgaagctggcccatgtgaagcacaaggagcagatctgagtgggcaggggccatctccccactccgctgccctggccttgagcatccactgactgtccaagggccactcccaagaagcccccttcacgatccaccctttcaggctaaggagctccctatctaccctcaccccacgagacagccccttcaggatttccactggaccttgcccaaatagcaccttaggccactgcccctaagctggggtggaaccggaatttgggtcaatacatccttttgtctcccaagggaagagaatgggcagcaggtatgtgtgtgtgtgcatgtgtgtgcatgtgtgtgcatgtgtgtgcaggggtgtgtgtgtgtggggggggttcccagatattcagggcaagggaccagtcggaagggattctggctattgggggagcccagagacaggggaaggcagcctgtccatctgtgcataaggagaggaaagttccagggtgtgtatgtttcaggggcttcacatggaggagctgcagatagatatgtgtttctgtgtatgtgtatgtctgcctttttttctaagtgggggcttctacaggcttttgggaagtagggtggatgtgggtagggctgggaggagggggccacagcttaggtttggagctctggatgtacatacataagtaggagcagtgggacgtgtttctgtcataatgcaggcatgaagggtggagtgaagtcaggtcataagtttcatgtttgcttttgttttgttttgtttttaatgtatgtagcagatgttacagtcttagggatccgggatgggagaccccactttagaaagggtcgtcactcctttaatcctctactcaacaatgtactcttttacttttatattaaaaaaaataaaataaatatgtgcctaaaa

SEQ ID NO: 1001 - DNA, 1528 bp, Homo sapiens
gccaccccctctgcctgctgcaatacagcagtattgctacttacccataactcatgggagggtggggagggcacacctgagagggaagtctgggctcaggcctctcccccgactcactgtgtgtctaatctgtcaccagatgcaatctggcacttcgccgacaaccagctttttgtttcgggccccaatggcacagccggcatctttgctacctacccctctggacacttggatatgatcaatggcttctttgaccagttcataggcacagcctcccttatcgtgtgtgtgctggccattgttgacccctacaacaaccccgtcccccgaggcctggaggccttcaccgtgggcctggtggtcctggtcattggcacctccatgggcttcaactccggctatgccgtcaaccctgcccgggactttggcccccgcctttttacagcccttgcgggctggggctctgcagtcttcacgaccggccagcattggtggtgggtgcccatcgtgtccccactcctgggctccattgcgggtgtcttcgtgtaccagctgatgatcggctgccacctggagcagcccccaccctccaacgaggaagagaatgtgaagctggcccatgtgaagcacaaggagcagatctgagtgggcaggggccatctccccactccgctgccctggccttgagcatccactgactgtccaagggccactcccaagaagcccccttcacgatccaccctttcaggctaaggagctccctatctaccctcaccccacgagacagccccttcaggatttccactggaccttgcccaaatagcaccttaggccactgcccctaagctggggtggaaccggaatttgggtcaatacatccttttgtctcccaagggaagagaatgggcagcaggtatgtgtgtgtgtgcatgtgtgtgcatgtgtgtgcatgtgtgtgcaggggtgtgtgtgtgtggggggggttcccagatattcagggcaagggaccagtcggaagggattctggctattgggggagcccagagacaggggaaggcagcctgtccatctgtgcataaggagaggaaagttccagggtgtgtatgtttcaggggcttcacatggaggagctgcagatagatatgtgtttctgtgtatgtgtatgtctgcctttttttctaagtgggggcttctacaggcttttgggaagtagggtggatgtgggtagggctgggaggagggggccacagcttaggtttggagctctggatgtacatacataagtaggagcagtgggacgtgtttctgtcataatgcaggcatgaagggtggagtgaagtcaggtcataagtttcatgtttgcttttgttttgttttgtttttaatgtatgtagcagatgttacagtcttagggatccgggatgggagaccccactttagaaagggtcgtcactcctttaatcctctactcaacaatgtactcttttacttttatattaaaaaaaataaaataaatatgtgcctaaaa

SEQ ID NO: 1002 - DNA, 1327 bp, Homo sapiens
taggctaggtagaggccgtggtgaatcggccgagggatcaatggcttctttgaccagttcataggcacagcctcccttatcgtgtgtgtgctggccattgttgacccctacaacaaccccgtcccccgaggcctggaggccttcaccgtgggcctggtggtcctggtcattggcacctccatgggcttcaactccggctatgccgtcaaccctgcccgggactttggcccccgcctttttacagcccttgcgggctggggctctgcagtcttcacgaccggccagcattggtggtgggtgcccatcgtgtccccactcctgggctccattgcgggtgtcttcgtgtaccagctgatgatcggctgccacctggagcagcccccaccctccaacgaggaagagaatgtgaagctggcccatgtgaagcacaaggagcagatctgagtgggcaggggccatctccccactccgctgccctggccttgagcatccactgactgtccaagggccactcccaagaagcccccttcacgatccaccctttcaggctaaggagctccctatctaccctcaccccacgagacagccccttcaggatttccactggaccttgcccaaatagcaccttaggccactgcccctaagctggggtggaaccggaatttgggtcaatacatccttttgtctcccaagggaagagaatgggcagcaggtatgtgtgtgtgtgcatgtgtgtgcatgtgtgtgcatgtgtgtgcaggggtgtgtgtgtgtggggggggttcccagatattcagggcaagggaccagtcggaagggattctggctattgggggagcccagagacaggggaaggcagcctgtccatctgtgcataaggagaggaaagttccagggtgtgtatgtttcaggggcttcacatggaggagctgcagatagatatgtgtttctgtgtatgtgtatgtctgcctttttttctaagtgggggcttctacaggcttttgggaagtagggtggatgtgggtagggctgggaggagggggccacagcttaggtttggagctctggatgtacatacataagtaggagcagtgggacgtgtttctgtcataatgcaggcatgaagggtggagtgaagtcaggtcataagtttcatgtttgcttttgttttgttttgtttttaatgtatgtagcagatgttacagtcttagggatccgggatgggagaccccactttagaaagggtcgtcactcctttaatcctctactcaacaatgtactcttttacttttatattaaaaaaaataaaataaatatgtgcctaaaa

SEQ ID NO: 1003 - DNA, 1572 bp, Homo sapiens
gggaggggaccgagttgccttggtagctcatgggctggttgggggacaggactcctcgactgtagcagggtttctccaatctgtggggtaacccgcatcagaacatggtggcaagtacttacaaaacatgcggctctccagcgggttcttgtcacgcagacattctagcaccattgctttcaggagaagagcatgggcgggcgctgacaagagtttaagagctagagggaagacgggggatggaaggaggggtcagagaaagggagggagctgcagctcaccctgttctccccactccccagttcataggcacagcctcccttatcgtgtgtgtgctggccattgttgacccctacaacaaccccgtcccccgaggcctggaggccttcaccgtgggcctggtggtcctggtcattggcacctccatgggcttcaactccggctatgccgtcaaccctgcccgggactttggcccccgcctttttacagcccttgcgggctggggctctgcagtcttcacgaccggccagcattggtggtgggtgcccatcgtgtccccactcctgggctccattgcgggtgtcttcgtgtaccagctgatgatcggctgccacctggagcagcccccaccctccaacgaggaagagaatgtgaagctggcccatgtgaagcacaaggagcagatctgagtgggcaggggccatctccccactccgctgccctggccttgagcatccactgactgtccaagggccactcccaagaagcccccttcacgatccaccctttcaggctaaggagctccctatctaccctcaccccacgagacagccccttcaggatttccactggaccttgcccaaatagcaccttaggccactgcccctaagctggggtggaaccggaatttgggtcaatacatccttttgtctcccaagggaagagaatgggcagcaggtatgtgtgtgtgtgcatgtgtgtgcatgtgtgtgcatgtgtgtgcaggggtgtgtgtgtgtggggggggttcccagatattcagggcaagggaccagtcggaagggattctggctattgggggagcccagagacaggggaaggcagcctgtccatctgtgcataaggagaggaaagttccagggtgtgtatgtttcaggggcttcacatggaggagctgcagatagatatgtgtttctgtgtatgtgtatgtctgcctttttttctaagtgggggcttctacaggcttttgggaagtagggtggatgtgggtagggctgggaggagggggccacagcttaggtttggagctctggatgtacatacataagtaggagcagtgggacgtgtttctgtcataatgcaggcatgaagggtggagtgaagtcaggtcataagtttcatgtttgcttttgttttgttttgtttttaatgtatgtagcagatgttacagtcttagggatccgggatgggagaccccactttagaaagggtcgtcactcctttaatcctctactcaacaatgtactcttttacttttatattaaaaaaaataaaataaatatgtgcctaaaa

SEQ ID NO: 1004 - DNA, 1279 bp, Homo sapiens
tcaggctagtagggccctgtggttatcggacgagggtgtgtgctggccattgttgacccctacaacaaccccgtcccccgaggcctggaggccttcaccgtgggcctggtggtcctggtcattggcacctccatgggcttcaactccggctatgccgtcaaccctgcccgggactttggcccccgcctttttacagcccttgcgggctggggctctgcagtcttcacgaccggccagcattggtggtgggtgcccatcgtgtccccactcctgggctccattgcgggtgtcttcgtgtaccagctgatgatcggctgccacctggagcagcccccaccctccaacgaggaagagaatgtgaagctggcccatgtgaagcacaaggagcagatctgagtgggcaggggccatctccccactccgctgccctggccttgagcatccactgactgtccaagggccactcccaagaagcccccttcacgatccaccctttcaggctaaggagctccctatctaccctcaccccacgagacagccccttcaggatttccactggaccttgcccaaatagcaccttaggccactgcccctaagctggggtggaaccggaatttgggtcaatacatccttttgtctcccaagggaagagaatgggcagcaggtatgtgtgtgtgtgcatgtgtgtgcatgtgtgtgcatgtgtgtgcaggggtgtgtgtgtgtggggggggttcccagatattcagggcaagggaccagtcggaagggattctggctattgggggagcccagagacaggggaaggcagcctgtccatctgtgcataaggagaggaaagttccagggtgtgtatgtttcaggggcttcacatggaggagctgcagatagatatgtgtttctgtgtatgtgtatgtctgcctttttttctaagtgggggcttctacaggcttttgggaagtagggtggatgtgggtagggctgggaggagggggccacagcttaggtttggagctctggatgtacatacataagtaggagcagtgggacgtgtttctgtcataatgcaggcatgaagggtggagtgaagtcaggtcataagtttcatgtttgcttttgttttgttttgtttttaatgtatgtagcagatgttacagtcttagggatccgggatgggagaccccactttagaaagggtcgtcactcctttaatcctctactcaacaatgtactcttttacttttatattaaaaaaaataaaataaatatgtgcctaaaa

SEQ ID NO: 1005 - DNA, 1606 bp, Homo sapiens
agccaccagcgctggaggccgctgctcgctgcgccaccgcctcccgccacccctgcccgcccgacagcgccgccgcctgccccgccatgggtcgacagaaggagctggtgtcccgctgcggggagatgctccacatccgctaccggctgctccgacaggcgctggccgagtgcctggggaccctcatcctcgtgatgtttggctgtggctccgtggcccaggttgtgctcagccggggcacccacggtggtttcctcaccatcaacctggcctttggctttgctgtcactctgggcatcctcatcgctggccaggtctctggggcccacctgaaccctgccgtgacctttgccatgtgcttcctggctcgtgagccctggatcaagctgcccatctacaccctggcacagacgctgggagccttcttgggtgctggaatagtttttgggctgtattatgatgcaatctggcacttcgccgacaaccagctttttgtttcgggccccaatggcacagccggcatctttgctacctacccctctggacacttggatatgatcaatggcttctttgaccagttcataggcacagcctcccttatcgtgtgtgtgctggccattgttgacccctacaacaaccccgtcccccgaggcctggaggccttcaccgtgggcctggtggtcctggtcattggcacctccatgggcttcaactccggctatgccgtcaaccctgcccgggactttggcccccgcctttttacagcccttgcgggctggggctctgcagtcttcacgaccggccagcattggtggtgggtgcccatcgtgtccccactcctgggctccattgcgggtgtcttcgtgtaccagctgatgatcggctgccacctggagcagcccccaccctccaacgaggaagagaatgtgaagctggcccatgtgaagcacaaggagcagatctgagtgggcaggggccatctccccactccgctgccctggccttgagcatccactgactgtccaagggccactcccaagaagcccccttcacgatccaccctttcaggctaaggagctccctatctaccctcaccccacgagacagccccttcaggatttccactggaccttgcccaaatagcaccttaggccactgcccctaagctggggtggaaccggaatttgggtcaatacatccttttgtctcccaagggaagagaatgggcagcaggtatgtgtgtgtgtgcatgtgtgtgcatgtgtgtgcatgtgtgtgcaggggtgtgtgtgtgtggggggggttcggctgggaggagggggccacagcttaggtttggagctctggatgtacatacataagtaggagcagtgggacgtgtttctgtcataatgcaggcatgaagggtggagtgaagtcaggtcataagtttcatgtttgcttttgttttgttttgtttttaatgtatgtagcagatgttacagtcttagggatccgggatgggagaccccactttagaaagggtcgtcactcctttaatcctctactcaacaatgtactcttttacttttatattaaaaaaaataaaataaatatgtgcctaaaa

SEQ ID NO: 1006 - DNA, 1507 bp, Homo sapiens
agccaccagcgctggaggccgctgctcgctgcgccaccgcctcccgccacccctgcccgcccgacagcgccgccgcctgccccgccatgggtcgacagaaggagctggtgtcccgctgcggggagatgctccacatccgctaccggctgctccgacaggcgctggccgagtgcctggggaccctcatcctcgtgatgtttggctgtggctccgtggcccaggttgtgctcagccggggcacccacggtggtttcctcaccatcaacctggcctttggctttgctgtcactctgggcatcctcatcgctggccaggtctctggggcccacctgaaccctgccgtgacctttgccatgtgcttcctggctcgtgagccctggatcaagctgcccatctacaccctggcacagacgctgggagccttcttgggtgctggaatagtttttgggctgtattatgatgcaatctggcacttcgccgacaaccagctttttgtttcgggccccaatggcacagccggcatctttgctacctacccctctggacacttggatatgatcaatggcttctttgaccagttcataggcacagcctcccttatcgtgtgtgtgctggccattgttgacccctacaacaaccccgtcccccgaggcctggaggccttcaccgtgggcctggtggtcctggtcattggcacctccatgggcttcaactccggctatgccgtcaaccctgcccgggactttggcccccgcctttttacagcccttgcgggctggggctctgcagtcttcacgaccggccagcattggtggtgggtgcccatcgtgtccccactcctgggctccattgcgggtgtcttcgtgtaccagctgatgatcggctgccacctggagcagcccccaccctccaacgaggaagagaatgtgaagctggcccatgtgaagcacaaggagcagatctgagtgggcaggggccatctccccactccgctgccctggccttgagcatccactgactgtccaagggccactcccaagaagcccccttcacgatccaccctttcaggctaaggagctccctatctaccctcaccccacgagacagccccttcaggatttccactggaccttgcccaaatagcaccttaggccactgcccctaagctggggtggaaccggaatttgggtcaatacatccttttgtctcccaagggaagagaatgggcagcaggtatgtgtgtgtgtgcatgtgtgtgcatgtgtgtgcatgtgtgtgcaggggtgtgtgtgtgtggggggggttcggtggagtgaagtcaggtcataagtttcatgtttgcttttgttttgttttgtttttaatgtatgtagcagatgttacagtcttagggatccgggatgggagaccccactttagaaagggtcgtcactcctttaatcctctactcaacaatgtactcttttacttttatattaaaaaaaataaaataaatatgtgcctaaaa

SEQ ID NO: 1007 - DNA, 1370 bp, Homo sapiens
agccaccagcgctggaggccgctgctcgctgcgccaccgcctcccgccacccctgcccgcccgacagcgccgccgcctgccccgccatgggtcgacagaaggagctggtgtcccgctgcggggagatgctccacatccgctaccggctgctccgacaggcgctggccgagtgcctggggaccctcatcctcgtgatgtttggctgtggctccgtggcccaggttgtgctcagccggggcacccacggtggtttcctcaccatcaacctggcctttggctttgctgtcactctgggcatcctcatcgctggccaggtctctggggcccacctgaaccctgccgtgacctttgccatgtgcttcctggctcgtgagccctggatcaagctgcccatctacaccctggcacagacgctgggagccttcttgggtgctggaatagtttttgggctgtattatgatgcaatctggcacttcgccgacaaccagctttttgtttcgggccccaatggcacagccggcatctttgctacctacccctctggacacttggatatgatcaatggcttctttgaccagttcataggcacagcctcccttatcgtgtgtgtgctggccattgttgacccctacaacaaccccgtcccccgaggcctggaggccttcaccgtgggcctggtggtcctggtcattggcacctccatgggcttcaactccggctatgccgtcaaccctgcccgggactttggcccccgcctttttacagcccttgcgggctggggctctgcagtcttcacgaccggccagcattggtggtgggtgcccatcgtgtccccactcctgggctccattgcgggtgtcttcgtgtaccagctgatgatcggctgccacctggagcagcccccaccctccaacgaggaagagaatgtgaagctggcccatgtgaagcacaaggagcagatctgagtgggcaggggccatctccccactccgctgccctggccttgagcatccactgactgtccaagggccactcccaagaagcccccttcacgatccaccctttcaggctaaggagctccctatctaccctcaccccacgagacagccccttcaggatttccactggaccttgcccaaatagcaccttaggccactgcccctaagctggggtggaaccggaatttgggtcaatacatccttttgtctcccaagggaagagaatgggcagcaggtatgtgtgtgtgtgcatgtgtgtgcatgtgtgtgcatgtgtgtgcaggggtgtgtgtgtgtggggggggttcctaccctaatttttggtctatgtatcgttctgttaggataaagtctatctgatggcccctgtta

SEQ ID NO: 1008 - DNA, 794 bp, Homo sapiens
accacctcatctgccctaccaccttcatctgcagctcccaccccacgagacagccccttcaggatttccactggaccttgcccaaatagcaccttaggccactgcccctaagctggggtggaaccggaatttgggtcaatacatccttttgtctcccaagggaagagaatgggcagcaggtatgtgtgtgtgtgcatgtgtgtgcatgtgtgtgcatgtgtgtgcaggggtgtgtgtgtgtggggggggttcccagatattcagggcaagggaccagtcggaagggattctggctattgggggagcccagagacaggggaaggcagcctgtccatctgtgcataaggagaggaaagttccagggtgtgtatgtttcaggggcttcacatggaggagctgcagatagatatgtgtttctgtgtatgtgtatgtctgcctttttttctaagtgggggcttctacaggcttttgggaagtagggtggatgtgggtagggctgggaggagggggccacagcttaggtttggagctctggatgtacatacataagtaggagcagtgggacgtgtttctgtcataatgcaggcatgaagggtggagtgaagtcaggtcataagtttcatgtttgcttttgttttgttttgtttttaatgtatgtagcagatgttacagtcttagggatccgggatgggagaccccactttagaaagggtcgtcactcctttaatcctctactcaacaatgtactcttttacttttatattaaaaaaaataaaataaatatgtgcctaaaa

SEQ ID NO: 1009 - DNA, 1333 bp, Homo sapiens
  misc_feature (1247)..(1247): n is a, c, g, or t
agccaccagcgctggaggccgctgctcgctgcgccaccgcctcccgccacccctgcccgcccgacagcgccgccgcctgccccgccatgggtcgacagaaggagctggtgtcccgctgcggggagatgctccacatccgctaccggctgctccgacaggcgctggccgagtgcctggggaccctcatcctcgtgatgtttggctgtggctccgtggcccaggttgtgctcagccggggcacccacggtggtttcctcaccatcaacctggcctttggctttgctgtcactctgggcatcctcatcgctggccaggtctctggggcccacctgaaccctgccgtgacctttgccatgtgcttcctggctcgtgagccctggatcaagctgcccatctacaccctggcacagacgctgggagccttcttgggtgctggaatagtttttgggctgtattatgatgcaatctggcacttcgccgacaaccagctttttgtttcgggccccaatggcacagccggcatctttgctacctacccctctggacacttggatatgatcaatggcttctttgaccagttcataggcacagcctcccttatcgtgtgtgtgctggccattgttgacccctacaacaaccccgtcccccgaggcctggaggccttcaccgtgggcctggtggtcctggtcattggcacctccatgggcttcaactccggctatgccgtcaaccctgcccgggactttggcccccgcctttttacagcccttgcgggctggggctctgcagtcttcacgaccggccagcattggtggtgggtgcccatcgtgtccccactcctgggctccattgcgggtgtcttcgtgtaccagctgatgatcggctgccacctggagcagcccccaccctccaacgaggaagagaatgtgaagctggcccatgtgaagcacaaggagcagatctgagtgggcaggggccatctccccactccgctgccctggccttgagcatccactgactgtccaagggccactcccaagaagcccccttcacgatccaccctttcaggctaaggagctccctatctaccctcaccccacgagacagccccttcaggatttccactggaccttgcccaaatagcaccttaggccactgcccctaagctggggtggaaccggaatttgggtcaatacatccttttgtctcccaagggaagagaatgggcagcaggtatgtgtggtganttggtaagtgtgcttctgacttgccatcatctgagtctgctgttcccattcgctattggaggagaccaccagaggcaggtccggct

SEQ ID NO: 1010 - DNA, 1248 bp, Homo sapiens
agccaccagcgctggaggccgctgctcgctgcgccaccgcctcccgccacccctgcccgcccgacagcgccgccgcctgccccgccatgggtcgacagaaggagctggtgtcccgctgcggggagatgctccacatccgctaccggctgctccgacaggcgctggccgagtgcctggggaccctcatcctcgtgatgtttggctgtggctccgtggcccaggttgtgctcagccggggcacccacggtggtttcctcaccatcaacctggcctttggctttgctgtcactctgggcatcctcatcgctggccaggtctctggggcccacctgaaccctgccgtgacctttgccatgtgcttcctggctcgtgagccctggatcaagctgcccatctacaccctggcacagacgctgggagccttcttgggtgctggaatagtttttgggctgtattatgatgcaatctggcacttcgccgacaaccagctttttgtttcgggccccaatggcacagccggcatctttgctacctacccctctggacacttggatatgatcaatggcttctttgaccagttcataggcacagcctcccttatcgtgtgtgtgctggccattgttgacccctacaacaaccccgtcccccgaggcctggaggccttcaccgtgggcctggtggtcctggtcattggcacctccatgggcttcaactccggctatgccgtcaaccctgcccgggactttggcccccgcctttttacagcccttgcgggctggggctctgcagtcttcacgaccggccagcattggtggtgggtgcccatcgtgtccccactcctgggctccattgcgggtgtcttcgtgtaccagctgatgatcggctgccacctggagcagcccccaccctccaacgaggaagagaatgtgaagctggcccatgtgaagcacaaggagcagatctgagtgggcaggggccatctccccactccgctgccctggccttgagcatccactgactgtccaagggccactcccaagaagcccccttcacgatccaccctttcaggctaaggagctccctatctacccttacccagaaagccctcagattcatggactgccaatagacttggcatgcctactgggggaccgaatggcaaatctttgttcccgaaaaagggcgttttttttccttggctttattttcgggttttggggcccacataggggccaagtttttgcccca

SEQ ID NO: 1011 - DNA, 804 bp, Homo sapiens
agccaccagcgctggaggccgctgctcgctgcgccaccgcctcccgccacccctgcccgcccgacagcgccgccgcctgccccgccatgggtcgacagaaggagctggtgtcccgctgcggggagatgctccacatccgctaccggctgctccgacaggcgctggccgagtgcctggggaccctcatcctcgtgatgtttggctgtggctccgtggcccaggttgtgctcagccggggcacccacggtggtttcctcaccatcaacctggcctttggctttgctgtcactctgggcatcctcatcgctggccaggtctctggggcccacctgaaccctgccgtgacctttgccatgtgcttcctggctcgtgagccctggatcaagctgcccatctacaccctggcacagacgctgggagccttcttgggtgctggaatagtttttgggctgtattatgatgcaatctggcacttcgccgacaaccagctttttgtttcgggccccaatggcacagccggcatctttgctacctaccccttctggatgtacatacataagtaggagcagtgggacgtgtttctgtcataatgcaggcatgaagggtggagtgaagtcaggtcataagtttcatgtttgcttttgttttgttttgtttttaatgtatgtagcagatgttacagtcttagggatccgggatgggagaccccactttagaaagggtcgtcactcctttaatcctctactcaacaatgtactcttttacttttatattaaaaaaaataaaataaatatgtgcctaaaa

SEQ ID NO: 1012 - DNA, 2857 bp, Homo sapiens
tgcatttctcctctgtgctcactgccacacacagctcaacctggacagcacagccagaggcgagatgcttctctgctgatctgagtctgcctgcagcatggacctgggtcttccctgaagcatctccagggctggagggacgactgccatgcaccgagggctcatccatccgcagagcagggcagtgggaggagacgccatgacccccatcgtcacagtcctgatctgtctcgggctgagtctgggccccaggacccacgtgcagacagggaccatccccaagcccaccctgtgggctgagccagactctgtgatcacccaggggagtcccgtcaccctcagttgtcaggggagccttgaagcccaggagtaccgtctatatagggagaaaaaatcagcatcttggattacacggatacgaccagagcttgtgaagaacggccagttccacatcccatccatcacctgggaacacacagggcgatatggctgtcagtattacagccgcgctcggtggtctgagctcagtgaccccctggtgctggtgatgacaggagcctacccaaaacccaccctctcagcccagcccagccctgtggtgacctcaggaggaagggtgaccctccagtgtgagtcacaggtggcatttggcggcttcattctgtgtaaggaaggagaagatgaacacccacaatgcctgaactcccagccccatgcccgtgggtcgtcccgcgccatcttctccgtgggccccgtgagcccgaatcgcaggtggtcgcacaggtgctatggttatgacttgaactctccctatgtgtggtcttcacccagtgatctcctggagctcctggtcccaggtgtttctaagaagccatcactctcagtgcagccgggtcctgtcatggcccctggggaaagcctgaccctccagtgtgtctctgatgtcggctatgacagatttgttctgtacaaggagggggaacgtgaccttcgccagctccctggccggcagccccaggctgggctctcccaggccaacttcaccctgggccctgtgagccgctcctacgggggccagtacagatgctacggtgcacacaacctctcctctgagtgctcggcccccagcgaccccctggacatcctgatcacaggacagatccgtggcacacccttcatctcagtgcagccaggccccacagtggcctcaggagagaacgtgaccctgctgtgtcagtcatggcggcagttccacactttccttctgaccaaggcgggagcagctgatgccccactccgtctaagatcaatacacgaatatcctaagtaccaggctgaattccccatgagtcctgtgacctcagcccacgcggggacctacaggtgctacggctcactcaactccgacccctacctgctgtctcaccccagtgagcccctggagctcgtggtctcaggaccctccatgggttccagccccccacccaccggtcccatctccacacctgcaggccctgaggaccagcccctcacccccactgggtcggatccccaaagtggtctgggaaggcacctgggggttgtgatcggcatcttggtggccgtcgtcctactgctcctcctcctcctcctcctcttcctcatcctccgacatcgacgtcagggcaaacactggacatcgacccagagaaaggctgatttccaacatcctgcaggggctgtggggccagagcccacagacagaggcctgcagtggaggtccagcccagctgccgacgcccaggaagaaaacctctatgctgccgtgaaggacacacagcctgaagatggggtggagatggacactcgggctgctgcatctgaagccccccaggatgtgacctacgcccagctgcacagcttgaccctcagacggaaggcaactgagcctcctccatcccaggaaagggaacctccagctgagcccagcatctacgccaccctggccatccactagcccggagggtacgcagactccacactcagtagaaggagactcaggactgctgaaggcacgggagctgcccccagtggacaccaatgaaccccagtcagcctggacccctaacaaagaccatgaggagatgctgggaactttgggactcacttgattctgcagtcgaaataactaatatccctacattttttaattaaagcaacagacttctcaataatcaatgagttaaccgagaaaactaaaatcagaagtaagaatgtgctttaaactgaatcacaatataaatattacacatcacacaatgaaattgaaaaagtacaaaccacaaatgaaaaaagtagaaacgaaaaaaaaaaactaggaaatgaatgacgttggctttcgtataaggaatttagaaaaagaataaccaattattccaaatgaaggtgtaagaaagggaataagaagaagaagagttgctcatgaggaaaaaccaaaacttgaaaattcaacaaagccaatgaagctcattcttgaaaatattaattacagtcataaatcctaactacattgagcaagagaaagaaagagcaggcacgcatttccatatgggagtgagccagcagacagcccagcagatcctacacacattttcacaaactaaccccagaacaggctgcaaacctataccaatatactagaaaatgcagattaaatggatgaaatattcaaaactggagtttacataatgaacgtaagagtaatcagagaatctgactcattttaaatgtgtgtgtatgtgtgtgtatatatatgtgtgtgtgtgtgtgtgtgtgtgtgtgtgaaaaacattgactgtaataaaaatgttcccatcgt

SEQ ID NO: 1013 - DNA, 2212 bp, Homo sapiens
tgcatttctcctctgtgctcactgccacacacagctcaacctggacagcacagccagaggcgagatgcttctctgctgatctgagtctgcctgcagcatggacctgggtcttccctgaagcatctccagggctggagggacgactgccatgcaccgagggctcatccatccgcagagcagggcagtgggaggagacgccatgacccccatcgtcacagtcctgatctgtctcgggctgagtctgggccccaggacccacgtgcagacagggaccatccccaagcccaccctgtgggctgagccagactctgtgatcacccaggggagtcccgtcaccctcagttgtcaggggagccttgaagcccaggagtaccgtctatatagggagaaaaaatcagcatcttggattacacggatacgaccagagcttgtgaagaacggccagttccacatcccatccatcacctgggaacacacagggcgatatggctgtcagtattacagccgcgctcggtggtctgagctcagtgaccccctggtgctggtgatgacaggagcctacccaaaacccaccctctcagcccagcccagccctgtggtgacctcaggaggaagggtgaccctccagtgtgagtcacaggtggcatttggcggcttcattctgtgtaaggaaggagaagatgaacacccacaatgcctgaactcccagccccatgcccgtgggtcgtcccgcgccatcttctccgtgggccccgtgagcccgaatcgcaggtggtcgcacaggtgctatggttatgacttgaactctccctatgtgtggtcttcacccagtgatctcctggagctcctggtcccaggtgtttctaagaagccatcactctcagtgcagccgggtcctgtcatggcccctggggaaagcctgaccctccagtgtgtctctgatgtcggctatgacagatttgttctgtacaaggagggggaacgtgaccttcgccagctccctggccggcagccccaggctgggctctcccaggccaacttcaccctgggccctgtgagccgctcctacgggggccagtacagatgctacggtgcacacaacctctcctctgagtgctcggcccccagcgaccccctggacatcctgatcacaggacagatccgtggcacacccttcatctcagtgcagccaggccccacagtggcctcaggagagaacgtgaccctgctgtgtcagtcatggcggcagttccacactttccttctgaccaaggcgggagcagctgatgccccactccgtctaagatcaatacacgaatatcctaagtaccaggctgaattccccatgagtcctgtgacctcagcccacgcggggacctacaggtgctacggctcactcaactccgacccctacctgctgtctcaccccagtgagcccctggagctcgtggtctcaggaccctccatgggttccagccccccacccaccggtcccatctccacacctgcaggccctgaggaccagcccctcacccccactgggtcggatccccaaagtggtctgggaaggcacctgggggttgtgatcggcatcttggtggccgtcgtcctactgctcctcctcctcctcctcctcttcctcatcctccgacatcgacgtcagggcaaacactggacatcgacccagagaaaggctgatttccaacatcctgcaggggctgtggggccagagcccacagacagaggcctgcagtggaggtccagcccagctgccgacgcccaggaagaaaacctctatgctgccgtgaaggacacacagcctgaagatggggtggagatggacactcgggctgctgcatctgaagccccccaggatgtgacctacgcccagctgcacagcttgaccctcagacggaaggcaactgagcctcctccatcccaggaaagggaacctccagctgagcccagcatctacgccaccctggccatccactagcccggagggtacgcagactccacactcagtagaaggagactcaggactgctgaaggcacgggagctgcccccagtggacaccaatgaaccccagtcagcctggacccctaacaaagaccatgaggagatgctgggaactttgggactcacttgattctgcagtcgaaataactaatatccctacattttttaattaaagcaacagacttctcaata

SEQ ID NO: 1014 - DNA, 1013 bp, Homo sapiens
cctggtacggtccgaagtcgtaagatcaggatgtgacctacgcccagctgcacagcttgaccctcagacggaaggcaactgagcctcctccatcccaggaaagggaacctccagctgagcccagcatctacgccaccctggccatccactagcccggagggtacgcagactccacactcagtagaaggagactcaggactgctgaaggcacgggagctgcccccagtggacaccaatgaaccccagtcagcctggacccctaacaaagaccatgaggagatgctgggaactttgggactcacttgattctgcagtcgaaataactaatatccctacattttttaattaaagcaacagacttctcaataatcaatgagttaaccgagaaaactaaaatcagaagtaagaatgtgctttaaactgaatcacaatataaatattacacatcacacaatgaaattgaaaaagtacaaaccacaaatgaaaaaagtagaaacgaaaaaaaaaaactaggaaatgaatgacgttggctttcgtataaggaatttagaaaaagaataaccaattattccaaatgaaggtgtaagaaagggaataagaagaagaagagttgctcatgaggaaaaaccaaaacttgaaaattcaacaaagccaatgaagctcattcttgaaaatattaattacagtcataaatcctaactacattgagcaagagaaagaaagagcaggcacgcatttccatatgggagtgagccagcagacagcccagcagatcctacacacattttcacaaactaaccccagaacaggctgcaaacctataccaatatactagaaaatgcagattaaatggatgaaatattcaaaactggagtttacataatgaacgtaagagtaatcagagaatctgactcattttaaatgtgtgtgtatgtgtgtgtatatatatgtgtgtgtgtgtgtgtgtgtgtgtgtgtgaaaaacattgactgtaataaaaatgttcccatcgt

SEQ ID NO: 1015 - DNA, 2786 bp, Homo sapiens
ggggaagccactgctaccctcatcaggaagggcagacacaagaagcaccagttctatttgctgctacatcccggctctcgcaccgagggctcatccatccgcagagcagggcagtgggaggagacgccatgacccccatcgtcacagtcctgatctgtctcgggctgagtctgggccccaggacccacgtgcagacagggaccatccccaagcccaccctgtgggctgagccagactctgtgatcacccaggggagtcccgtcaccctcagttgtcaggggagccttgaagcccaggagtaccgtctatatagggagaaaaaatcagcatcttggattacacggatacgaccagagcttgtgaagaacggccagttccacatcccatccatcacctgggaacacacagggcgatatggctgtcagtattacagccgcgctcggtggtctgagctcagtgaccccctggtgctggtgatgacaggagcctacccaaaacccaccctctcagcccagcccagccctgtggtgacctcaggaggaagggtgaccctccagtgtgagtcacaggtggcatttggcggcttcattctgtgtaaggaaggagaagatgaacacccacaatgcctgaactcccagccccatgcccgtgggtcgtcccgcgccatcttctccgtgggccccgtgagcccgaatcgcaggtggtcgcacaggtgctatggttatgacttgaactctccctatgtgtggtcttcacccagtgatctcctggagctcctggtcccaggtgtttctaagaagccatcactctcagtgcagccgggtcctgtcatggcccctggggaaagcctgaccctccagtgtgtctctgatgtcggctatgacagatttgttctgtacaaggagggggaacgtgaccttcgccagctccctggccggcagccccaggctgggctctcccaggccaacttcaccctgggccctgtgagccgctcctacgggggccagtacagatgctacggtgcacacaacctctcctctgagtgctcggcccccagcgaccccctggacatcctgatcacaggacagatccgtggcacacccttcatctcagtgcagccaggccccacagtggcctcaggagagaacgtgaccctgctgtgtcagtcatggcggcagttccacactttccttctgaccaaggcgggagcagctgatgccccactccgtctaagatcaatacacgaatatcctaagtaccaggctgaattccccatgagtcctgtgacctcagcccacgcggggacctacaggtgctacggctcactcaactccgacccctacctgctgtctcaccccagtgagcccctggagctcgtggtctcaggaccctccatgggttccagccccccacccaccggtcccatctccacacctgcaggccctgaggaccagcccctcacccccactgggtcggatccccaaagtggtctgggaaggcacctgggggttgtgatcggcatcttggtggccgtcgtcctactgctcctcctcctcctcctcctcttcctcatcctccgacatcgacgtcagggcaaacactggacatcgacccagagaaaggctgatttccaacatcctgcaggggctgtggggccagagcccacagacagaggcctgcagtggaggtccagcccagctgccgacgcccaggaagaaaacctctatgctgccgtgaaggacacacagcctgaagatggggtggagatggacactcgggctgctgcatctgaagccccccaggatgtgacctacgcccagctgcacagcttgaccctcagacggaaggcaactgagcctcctccatcccaggaaagggaacctccagctgagcccagcatctacgccaccctggccatccactagcccggagggtacgcagactccacactcagtagaaggagactcaggactgctgaaggcacgggagctgcccccagtggacaccaatgaaccccagtcagcctggacccctaacaaagaccatgaggagatgctgggaactttgggactcacttgattctgcagtcgaaataactaatatccctacattttttaattaaagcaacagacttctcaataatcaatgagttaaccgagaaaactaaaatcagaagtaagaatgtgctttaaactgaatcacaatataaatattacacatcacacaatgaaattgaaaaagtacaaaccacaaatgaaaaaagtagaaacgaaaaaaaaaaactaggaaatgaatgacgttggctttcgtataaggaatttagaaaaagaataaccaattattccaaatgaaggtgtaagaaagggaataagaagaagaagagttgctcatgaggaaaaaccaaaacttgaaaattcaacaaagccaatgaagctcattcttgaaaatattaattacagtcataaatcctaactacattgagcaagagaaagaaagagcaggcacgcatttccatatgggagtgagccagcagacagcccagcagatcctacacacattttcacaaactaaccccagaacaggctgcaaacctataccaatatactagaaaatgcagattaaatggatgaaatattcaaaactggagtttacataatgaacgtaagagtaatcagagaatctgactcattttaaatgtgtgtgtatgtgtgtgtatatatatgtgtgtgtgtgtgtgtgtgtgtgtgtgtgaaaaacattgactgtaataaaaatgttcccatcgt

SEQ ID NO: 1016 - DNA, 2839 bp, Homo sapiens
agaggctgtacggccgaatttgggatgacggcaagccagaggcgagatgcttctctgctgatctgagtctgcctgcagcatggacctgggtcttccctgaagcatctccagggctggagggacgactgccatgcaccgagggctcatccatccgcagagcagggcagtgggaggagacgccatgacccccatcgtcacagtcctgatctgtctcgggctgagtctgggccccaggacccacgtgcagacagggaccatccccaagcccaccctgtgggctgagccagactctgtgatcacccaggggagtcccgtcaccctcagttgtcaggggagccttgaagcccaggagtaccgtctatatagggagaaaaaatcagcatcttggattacacggatacgaccagagcttgtgaagaacggccagttccacatcccatccatcacctgggaacacacagggcgatatggctgtcagtattacagccgcgctcggtggtctgagctcagtgaccccctggtgctggtgatgacaggagcctacccaaaacccaccctctcagcccagcccagccctgtggtgacctcaggaggaagggtgaccctccagtgtgagtcacaggtggcatttggcggcttcattctgtgtaaggaaggagaagatgaacacccacaatgcctgaactcccagccccatgcccgtgggtcgtcccgcgccatcttctccgtgggccccgtgagcccgaatcgcaggtggtcgcacaggtgctatggttatgacttgaactctccctatgtgtggtcttcacccagtgatctcctggagctcctggtcccaggtgtttctaagaagccatcactctcagtgcagccgggtcctgtcatggcccctggggaaagcctgaccctccagtgtgtctctgatgtcggctatgacagatttgttctgtacaaggagggggaacgtgaccttcgccagctccctggccggcagccccaggctgggctctcccaggccaacttcaccctgggccctgtgagccgctcctacgggggccagtacagatgctacggtgcacacaacctctcctctgagtgctcggcccccagcgaccccctggacatcctgatcacaggacagatccgtggcacacccttcatctcagtgcagccaggccccacagtggcctcaggagagaacgtgaccctgctgtgtcagtcatggcggcagttccacactttccttctgaccaaggcgggagcagctgatgccccactccgtctaagatcaatacacgaatatcctaagtaccaggctgaattccccatgagtcctgtgacctcagcccacgcggggacctacaggtgctacggctcactcaactccgacccctacctgctgtctcaccccagtgagcccctggagctcgtggtctcaggaccctccatgggttccagccccccacccaccggtcccatctccacacctgcaggccctgaggaccagcccctcacccccactgggtcggatccccaaagtggtctgggaaggcacctgggggttgtgatcggcatcttggtggccgtcgtcctactgctcctcctcctcctcctcctcttcctcatcctccgacatcgacgtcagggcaaacactggacatcgacccagagaaaggctgatttccaacatcctgcaggggctgtggggccagagcccacagacagaggcctgcagtggaggtccagcccagctgccgacgcccaggaagaaaacctctatgctgccgtgaaggacacacagcctgaagatggggtggagatggacactcgggctgctgcatctgaagccccccaggatgtgacctacgcccagctgcacagcttgaccctcagacggaaggcaactgagcctcctccatcccaggaaagggaacctccagctgagcccagcatctacgccaccctggccatccactagcccggagggtacgcagactccacactcagtagaaggagactcaggactgctgaaggcacgggagctgcccccagtggacaccaatgaaccccagtcagcctggacccctaacaaagaccatgaggagatgctgggaactttgggactcacttgattctgcagtcgaaataactaatatccctacattttttaattaaagcaacagacttctcaataatcaatgagttaaccgagaaaactaaaatcagaagtaagaatgtgctttaaactgaatcacaatataaatattacacatcacacaatgaaattgaaaaagtacaaaccacaaatgaaaaaagtagaaacgaaaaaaaaaaactaggaaatgaatgacgttggctttcgtataaggaatttagaaaaagaataaccaattattccaaatgaaggtgtaagaaagggaataagaagaagaagagttgctcatgaggaaaaaccaaaacttgaaaattcaacaaagccaatgaagctcattcttgaaaatattaattacagtcataaatcctaactacattgagcaagagaaagaaagagcaggcacgcatttccatatgggagtgagccagcagacagcccagcagatcctacacacattttcacaaactaaccccagaacaggctgcaaacctataccaatatactagaaaatgcagattaaatggatgaaatattcaaaactggagtttacataatgaacgtaagagtaatcagagaatctgactcattttaaatgtgtgtgtatgtgtgtgtatatatatgtgtgtgtgtgtgtgtgtgtgtgtgtgtgaaaaacattgactgtaataaaaatgttcccatcgt

SEQ ID NO: 1017 - DNA, 2781 bp, Homo sapiens
tgcatttctcctctgtgctcactgccacacacagctcaacctggacagcacagccagaggcgagatgcttctctgctgatctgagtctgcctgcagcatggacctgggtcttccctgaagcatctccagggctggagggacgactgccatgcaccgagggctcatccatccgcagagcagggcagtgggaggagacgccatgacccccatcgtcacagtcctgatctgtctcgggctgagtctgggccccaggacccacgtgcagacagggaccatccccaagcccaccctgtgggctgagccagactctgtgatcacccaggggagtcccgtcaccctcagttgtcaggggagccttgaagcccaggagtaccgtctatatagggagaaaaaatcagcatcttggattacacggatacgaccagagcttgtgaagaacggccagttccacatcccatccatcacctgggaacacacagggcgatatggctgtcagtattacagccgcgctcggtggtctgagctcagtgaccccctggtgctggtgatgacaggagcctacccaaaacccaccctctcagcccagcccagccctgtggtgacctcaggaggaagggtgaccctccagtgtgagtcacaggtggcatttggcggcttcattctgtgtaaggaaggagaagatgaacacccacaatgcctgaactcccagccccatgcccgtgggtcgtcccgcgccatcttctccgtgggccccgtgagcccgaatcgcaggtggtcgcacaggtgctatggttatgacttgaactctccctatgtgtggtcttcacccagtgatctcctggagctcctggtcccaggtgtttctaagaagccatcactctcagtgcagccgggtcctgtcatggcccctggggaaagcctgaccctccagtgtgtctctgatgtcggctatgacagatttgttctgtacaaggagggggaacgtgaccttcgccagctccctggccggcagccccaggctgggctctcccaggccaacttcaccctgggccctgtgagccgctcctacgggggccagtacagatgctacggtgcacacaacctctcctctgagtgctcggcccccagcgaccccctggacatcctgatcacaggacagatccgtggcacacccttcatctcagtgcagccaggccccacagtggcctcaggagagaacgtgaccctgctgtgtcagtcatggcggcagttccacactttccttctgaccaaggcgggagcagctgatgccccactccgtctaagatcaatacacgaatatcctaagtaccaggctgaattccccatgagtcctgtgacctcagcccacgcggggacctacaggtgctacggctcactcaactccgacccctacctgctgtctcaccccagtgagcccctggagctcgtggtctcaggaccctccatgggttccagccccccacccaccggtcccatctccacacctgcaggccctgaggaccagcccctcacccccactgggtcggatccccaaagtggtctgggaaggcacctgggggttgtgatcggcatcttggtggccgtcgtcctactgctcctcctcctcctcctcctcttcctcatcctccgacatcgacgtcagggcaaacactggacatcgagtccagcccagctgccgacgcccaggaagaaaacctctatgctgccgtgaaggacacacagcctgaagatggggtggagatggacactcgggctgctgcatctgaagccccccaggatgtgacctacgcccagctgcacagcttgaccctcagacggaaggcaactgagcctcctccatcccaggaaagggaacctccagctgagcccagcatctacgccaccctggccatccactagcccggagggtacgcagactccacactcagtagaaggagactcaggactgctgaaggcacgggagctgcccccagtggacaccaatgaaccccagtcagcctggacccctaacaaagaccatgaggagatgctgggaactttgggactcacttgattctgcagtcgaaataactaatatccctacattttttaattaaagcaacagacttctcaataatcaatgagttaaccgagaaaactaaaatcagaagtaagaatgtgctttaaactgaatcacaatataaatattacacatcacacaatgaaattgaaaaagtacaaaccacaaatgaaaaaagtagaaacgaaaaaaaaaaactaggaaatgaatgacgttggctttcgtataaggaatttagaaaaagaataaccaattattccaaatgaaggtgtaagaaagggaataagaagaagaagagttgctcatgaggaaaaaccaaaacttgaaaattcaacaaagccaatgaagctcattcttgaaaatattaattacagtcataaatcctaactacattgagcaagagaaagaaagagcaggcacgcatttccatatgggagtgagccagcagacagcccagcagatcctacacacattttcacaaactaaccccagaacaggctgcaaacctataccaatatactagaaaatgcagattaaatggatgaaatattcaaaactggagtttacataatgaacgtaagagtaatcagagaatctgactcattttaaatgtgtgtgtatgtgtgtgtatatatatgtgtgtgtgtgtgtgtgtgtgtgtgtgtgaaaaacattgactgtaataaaaatgttcccatcgt

SEQ ID NO: 1018 - DNA, 358 bp, Homo sapiens
ggttctaggaaaaaggaggctggtattccttcaacttctcaatttaaaaaacacagacaaacgccacagagaaagccccccagcagatgctcacaggcagcacttgctcagcccggcatggccagaaatgaaggaagttgtcgagcagccaagcgctgccggctgcgggagaggagtgcgctcagtagccaaagaggatattaagtgaaacattaaagctgcagatagaaagcggacatcccctgggaacagggattcaacatatcactgccaccaccacggtgcatgccctgtagctggtttctattaagagagaacagagcattcaccgtctctaaagagggatatgttcactacc

SEQ ID NO: 1019 - DNA, 386 bp, Homo sapiens
gccctttcttctcccttcttgtctttgtcctcctcttcacgtcactctggcccttctctgttttttacttggtgtggctctatgtggactgggacacacccaaccaagtatctcattgtccgcaggtggaaggcgttcggagtggataaggaaccgggcaatttggagacaactaagggattatagccttgagccaccgcgcccggcctgggagtggatgatgttcaagagcggggccttggtggggcaccatggctcatgcctgtaatccaagcactttgggaggccgaggtgggaggattgcttgagcccaggagttggaggctgtagtgagccatgattgcgccactgtactccagcctgagcaacagagtgagaccgtctct

SEQ ID NO: 1020 - DNA, 583 bp, Homo sapiens
aaggcctgttgctactgtgtgatgcctgctccctagatgacctcctgggggggtgaagcgagaggaaatctggcaccaagctggttgaggggcagagcgagaatgtctgggcttcccccacccagcttggaatgtgagtgatgcaaatcatctcatcgaaggctcaactgcagccaggagactcctccagtgatgatgagagtgtacaaatgaagtgcaggagcgggggagccttcacacacctccagcccttcctgcttcttgaaatactcatatcctctggcagagactagctacagaaatccatgtccacttactcacagcctgaaagaaacccacacagtggaccaggaaggttgttgcatggtaattagagctactattgaatttctattgtgcatcttctcaattaggcacaattaccacatataagaaatgaggaaattaagactcagaggaattaggtgaattgcccaaggttattacatagcttatacctggccaaccagggtttaaacattgttctatatcctaatccaagacccatgttcctctcactactcaggtttatttctttcgcact

SEQ ID NO: 1021 - DNA, 444 bp, Homo sapiens
gtgaggtcttttttgactgacaagcttgaaaaaatggtcaccagaccaccaccctagcccccttttctgcttaactttttagcatctatcaccatttaatggaaaatacttcattataaatcttttatttccatgaggataggtaattatttgttgttgggggtgtctttgtcagcatctagtacagtgcctggcagatggatgctcaataaatattgatttaatgggttatgagggtgttaatataaaattagcatttattcagcaactactatgagtcagccactgggctaagtggcttacatgttaagaacctcacagaaggccaggtgtggtggctcacgcctgtaatcccagcactttgggaggctgaagcaggcagatcacctgaggtcaggagtttgagtccaggctggccaacgtggtgaaaccccatctctacta

SEQ ID NO: 1022 - DNA, 1330 bp, Homo sapiens
gcctgaagtagaatattttagaaagtaattaaaccttttttcagcataataacccagagatgtacttctgaaggacttaggatctcttcttgaaaggcaagcaacaagggagatagtacctgtaagtcagtaggaaattaaatatttcaaacatcagctatttcaaatttaaagctacagacttttaaataattcggaaccttgagaggaacgtggtcatgcaacctgagtccggtggcatgcaggcgcaacttctacaagttttcctggccaggcatgcaggctcaggcctgtaatcccagcactctgggaggctgaggcgggcggatcgcctgacgtcaggaattagaaaccagcctggccaacatggggaaaccccgtctctactgaaaatacaaagccattagccgggcatggtggcgcacgcctgtattttcagctatttgggaggctgaggcaggagaactgcttgaacccaggacgtggaggtcgtagtgagccgagatcacatcactgcattccagcctgggcgacagagcaggacgccttcccaaaacaaaacaaaacaaaacaaaatgtgctatacaatttagtttcctaatatcaattttaaaaagttttcgtgtaaataattaggaaaactaagcagccccagagataagacctcctggcatcattgtcccttcttatggagtgataatgtaaccttccttgaagtgtatcactccatcaccagtcaagctgccgcagcctatgcactggacttgaatggaaaatgtggtggttctgggaaagcttctctgtatttccttgtgtgtgtgaaatgttaatgtctctacttgggaacgctgaccccattcatttggagttgaggtttccaggtggctattctcatgctttgtgtccaaataaactctataattaataatgtattctaaatttcattatttactgctgacatcagtttctgttggattgtaggagcctcaccagagagggcacctgtccgccatgctgtaaaactcacacttgccaaaaatacatgggttagggtttctccccctccctcaggatgatgctagttagctgacacagatggtcacctccattaccaagtagagccaggatgaattatgtgtgaccaagggtgttgtcaagtcctcttccctgaggactgatcagtgtttatcttgaaaacatgtatttgggttgtatagaacagtgaagtttctttctctcttttcaacctctcaactgtcctctatttcccatcacatgctggtctaaggcctatttattaataaaatagtttttatttctttctctgtta

SEQ ID NO: 1023 - DNA, 1237 bp, Homo sapiens
aagaggctgaggcagaagaattgcttgaacccgggaggcggaagtttcgatgagccgggatcctgccgttgcactccagcctgggcaacaagagcaaacctctgtctaaaacaaacaaacaaaaaggtctagccccctctcctcctttgtctgccatcatggtgtgtgcttgactccacttcttgtcatgtcttctcacaagactttcaggattaagcggtttctggccaacaaccaaaagtaaaatcgtccgatttcccagtggattcgaatgaaaactggcaataaaatcaggtccaactttaaaaggagacattggagaagaaccaagctgggtctataaggaattgcacgtgagatggcacacatatttatgctgtgtgagcatcataatcacgttacttaaccgagatcacatcactgcattccagcctgggcgacagagcaggacgccttcccaaaacaaaacaaaacaaaacaaaatgtgctatacaatttagtttcctaatatcaattttaaaaagttttcgtgtaaataattaggaaaactaagcagccccagagataagacctcctggcatcattgtcccttcttatggagtgataatgtaaccttccttgaagtgtatcactccatcaccagtcaagctgccgcagcctatgcactggacttgaatggaaaatgtggtggttctgggaaagcttctctgtatttccttgtgtgtgtgaaatgttaatgtctctacttgggaacgctgaccccattcatttggagttgaggtttccaggtggctattctcatgctttgtgtccaaataaactctataattaataatgtattctaaatttcattatttactgctgacatcagtttctgttggattgtaggagcctcaccagagagggcacctgtccgccatgctgtaaaactcacacttgccaaaaatacatgggttagggtttctccccctccctcaggatgatgctagttagctgacacagatggtcacctccattaccaagtagagccaggatgaattatgtgtgaccaagggtgttgtcaagtcctcttccctgaggactgatcagtgtttatcttgaaaacatgtatttgggttgtatagaacagtgaagtttctttctctcttttcaacctctcaactgtcctctatttcccatcacatgctggtctaaggcctatttattaataaaatagtttttatttctttctctgtta

SEQ ID NO: 1024 - DNA, 1244 bp, Homo sapiens
cagctgcagtcgatctagagatccccatcagttacacaataggcgacctcaaaaacaaagggactgcctcctcttaaagtttctcttacataggtgcttaggtaaaaactaaggtatgtctacctgccagtgggctgacagtgtaacaaaacttattactatgttgatttaaagctatccttggccggttgcattggctcccgcctgtaatcccagcactctgggaggctgaggcgggcggatcgcctgacgtcaggaattagaaaccagcctggccaacatggggaaaccccgtctctactgaaaatacaaagccattagccgggcatggtggcgcacgcctgtattttcagctatttgggaggctgaggcaggagaactgcttgaacccaggacgtggaggtcgtagtgagccgagatcacatcactgcattccagcctgggcgacagagcaggacgccttcccaaaacaaaacaaaacaaaacaaaatgtgctatacaatttagtttcctaatatcaattttaaaaagttttcgtgtaaataattaggaaaactaagcagccccagagataagacctcctggcatcattgtcccttcttatggagtgataatgtaaccttccttgaagtgtatcactccatcaccagtcaagctgccgcagcctatgcactggacttgaatggaaaatgtggtggttctgggaaagcttctctgtatttccttgtgtgtgtgaaatgttaatgtctctacttgggaacgctgaccccattcatttggagttgaggtttccaggtggctattctcatgctttgtgtccaaataaactctataattaataatgtattctaaatttcattatttactgctgacatcagtttctgttggattgtaggagcctcaccagagagggcacctgtccgccatgctgtaaaactcacacttgccaaaaatacatgggttagggtttctccccctccctcaggatgatgctagttagctgacacagatggtcacctccattaccaagtagagccaggatgaattatgtgtgaccaagggtgttgtcaagtcctcttccctgaggactgatcagtgtttatcttgaaaacatgtatttgggttgtatagaacagtgaagtttctttctctcttttcaacctctcaactgtcctctatttcccatcacatgctggtctaaggcctatttattaataaaatagtttttatttctttctctgtta

SEQ ID NO: 1025 - DNA, 583 bp, Homo sapiens
aagaggctgaggcagaagaattgcttgaacccgggaggcggaagtttcgatgagccgggatcctgccgttgcactccagcctgggcaacaagagcaaacctctgtctaaaacaaacaaacaaaaaggtctagccccctctcctcctttgtctgccatcatggtgtgtgcttgactccacttcttgtcatgtcttctcacaagactttcaggattaagcggtttctggccaacaaccaaaagtaaaatcgtccgatttcccagtggattcgaatgaaaactggcaataaaatcaggtccaactttaaaaggagacattggagaagaaccaagctgggtctataaggaattgcacgtgagatggcacacatatttatgctgtgtgagcatcataatcacgttacttaagctgaaaatgtcactaccatctggagacttggacatgttttattgggaatatatttttttctctctgaatctgttatgaacgcattggttgggtgggttcagtaataaacatgtgagacctttcatttcaaaaaaaaaattttaatgacataatagattacctaaatttctgttttg

SEQ ID NO: 1026 - DNA, 184 bp, Homo sapiens
gacttggacagtgtgaacagagcaatgtcatcaggaataagactgagggagtcagcctcagccaagggaggaatcctaagaggaagaagtggaggctgagagctggtggcctccccgttccagccgcctcaccctaagcatgcgcagccccctcccttgcctgcacggaggagccatttgcagc

SEQ ID NO: 1027 - DNA, 588 bp, Homo sapiens
cctccaaccaaaagtctgaggtgcttccgaggaagcacttcccttgggtgggagcgggtggagcctggtcagcttgcccctgccagcccctgcagtgtcagctcttccaccccttcccattttcttggcctcaacgtgcccactgggctatgaggcagtccctcgcccccctgggtcctcatgaagaagcatttcagggtctctggcaggtagctgcaaagcttacttggggtggggtgtgaaaggcacaccggctgatggagccccaggtcatgttcatgcctgctgcaggcttcctcacagccaggagctgggggatgagtgcagggttgcctccgtgtagtccttatggagaggcgaaggagccagccgcagtctcttcctggccagactgacagagtactgactgtcaggccactcactaccaagaaaggtggagaccctggcagacagaggtattttgggtgataggagcaggctgagtccagggcctgaggacatggtgaggggaacagaggggagggactcagtctgccctctcttcctgggtactgaaggtctccacaacacaccccaaggcagcatgtt

SEQ ID NO: 1028 - DNA, 413 bp, Homo sapiens
aagaaaaggaaaggcgaatgggtttgaaggccatgagcaaaaggatgaggggagtatgggaatgggaagtctgagaagtatagatttttaaggggatcgcatagagacagtgagtctagtgattattccaagagttagtatactggatggagagtgaccaaaaaagaggatacagtgaaaagaaaaaagaagcatgaccttttgcacacattagatctttgcaatatttatgcaggtgtaattttatattttagtatgtaactaaacatactatgaacatcacctcatagttccacgttgctacagtttttataatttttttctttctaatgtttgtttatatgattatataatgattatggtatattaagtgcatatatcacttatcctatcataattcatttagttgttca

SEQ ID NO: 1029 - DNA, 782 bp, Homo sapiens
ccagctgctcgagaggctgaggcatgagaattacttgaacctgggaggtggaggttgcagtgagccgagatcccaccactgcactccagcctgggtgacagagcgagacttcgttcccaaaaaaaaaaaaaaaagctgcaaatttaaacgttgaagtctaggtaaatataccagggaacttctgcttaagaggcttctatgtaatgaaattctcttgaaaacagagaaactatttcctgtttattttctaaattgagacgtcactttttaaaaattggtacctgtaatttagccatttcctactcagcaatgtctcatttaaactattatttgtttagcgtgtttcaaagagcagatgtaagcttgagcccatcctctgtcctatgactaagtcgatattagcaggggttaggactgttagttttccagttcctactggaggcaaattctttgtttaccactgttctctgtatttcaaaagcacctggaaatcaataaaatttgttattcagaacaaaagccttctctatatatcagtatttcccaaaatgtgtttggaaatataggtatgttaatccaaagggatggtacgaggctgtattatttaaggaaatggtcccatagcttagcatgtttgggaaatccatttcttttctgcatttctcagattctttattacattaatataaattgtgaattttcaaatattttttctgaccagaaggcatactttccatccatcatcttgtccatggaacacactgccccacaacacaaattaa

SEQ ID NO: 1030 - DNA, 344 bp, Homo sapiens
aaaaatcaatttccaaattgaaatttgtcaaatagagaatactttctagttttgaagtgaaggtgcaatctattattctcaggcagaaacttggaaaatatctgtatgagagtttagtaaagatgataccagtactgattagaaatatttgtatttatactttactcatttcttgcacacctcagtgaaggaaaaatacagtaactaaaaccacagctctctagactcaactgtaaatttagtagtgatcaaaacaaaagaccctttagcaccagaataactgttgcaaattcccaacattaaggagaaatactttgtcctgttgaagacacagacccttaggc

SEQ ID NO: 1031 - DNA, 357 bp, Homo sapiens
gggagtgttaacattaaaaacatatgcttggtaccaaggagggagaaacacaaaagaggatcgcgatgcacatggtctctgtaaacaagtagtctttgtggaagttccccatgtgagggaaacagctttacagggtggtatgaagaaacttgcctgaataattctgacttcatctgcaagactgtttacctgacatgaattataatagcacattaccaagaaatgacatctgcagagatgatagctaattgagcttgtgtttatttgtttggttttgttttaccaattcattgatgaaataaaagcattagaaaatagtcaccatgatcatgcactcaatctttgtgtttgtagcag

SEQ ID NO: 1032 - DNA, 396 bp, Homo sapiens
cccagaaaacaactcctagttaaccttggctcctcttcactcggcctctgtctttaagtctgagtgacctggtgggattgatcagctttgaagtcctaaggtgctattttaatactgttcttttacgttgcaggcttcgagactgatttaactagattctggagggagcttactttacagcattcttaagagctcgaacaatcttgaaagagttaaactctaattagctcattcctaaggtatttaatgcccttattaaaactcaactgctcgttcacttttttctttagtgaatcagatttcttgaggagctgagccttcgctcctcagatcacaggctcacatgttgaagctggcagtgctagaggctagttcctatctgtgtgacagcatttt

SEQ ID NO: 1033 - DNA, 370 bp, Homo sapiens
agtagaaaattaatttattaaaagaatggttggttatgcctcgcgtgagtgacagagccagggttttgtcttctatcttcagggcagggtacagctgggtattggaattgtaccaagcagtgtttcccaagggggcacagagggagggcccctctccgggcactgtgcgggagccacttccccaaacagtccccgttctgcaagggccccggcgttgctgcccccgagacccgggtgcctgccccggcggtgcgggtcgcgggcctccgctctcgccgtcctccctcagtcccgggcctcctgcatcgcggtcgccaggcgcaggctcagcgcggctgacagcgctccagctcccgcgctcgcggccgca

SEQ ID NO: 1034 - DNA, 410 bp, Homo sapiens
ctgaatgtcttatcattttctttttgtctcagtaacctcacccctaaagaggaggtcctgtacaacaatacaaaggagaaaggcagaaaagggccaggagagaatgtggaggtgggagagaaccctgcatggtggagacattccttgactgttctgtaggcagtaacccaggccagtgtcatccaggatgtttctgaaattctgcttttacaagagagagctgtgtcacatatttggtgctcagtgactagtaggctatgtggccttcacacactatgaagctttgaatgaagctgagcctttataaatgtttagagtcaaaggaattaaaagcctaatgtaacctaaaagatcatccccaatccccttacattatggacttctcctctccctccccattgacgtctttc

SEQ ID NO: 1035 - DNA, 304 bp, Homo sapiens
ccttggctggtactagggtgcactaagtattttgaaaacaattttatattttcccagcttgattttaagctttcttagccaggaccagagaataatcattagtgtatgctaatttggccccgttactggggttatttcttttgaaaaatctgctagctgttccatttgttgaggaggcatttctgctttagctaatggaaacataaaaccatacttggccctctggggtgtctgataattttactgtctgctctctcccggtccttcttttccaggtctcaggtagttttgttacatgcagcct

SEQ ID NO: 1036 - DNA, 638 bp, Homo sapiens
ggctgtgaaagaggacctgaaagacatttgacacaaataacaggatggggtgaaacttcccagaagaggtggtatttttgcaatgtcttgaagtactcctggtgaagacattggagttcatcaggtttagaaaaggggtggaggcttactctagaaaaaggggatgccatctgtcaaaccactgtcaaaacaaggtttagtgctgacgtgttagatcttttaaacaatcagaaccattcattttttttctctgacgcctgccatcatctggtgatgggtttcttttctttccttcaaataaaatttattttccccctttattgtttcttgtcaggctgaattgatacacacacacacacacacacaaacgcacacatgtatatatatatgtatacatacatatacataagcatataaatatgtacacatgcatggatacatgcatatgtttacatgtgtgtatgtgaatagacattttacatatgtaaatatatatatatatttgccttgtatgattctttattacaaaataaatgatagagggacttaatgtaggaaataggaagttttgtcatgtactctaagcttttctactctcagtattttgggatttgcctgtcagatatttaaagaccatt

SEQ ID NO: 1037 - DNA, 463 bp, Homo sapiens
aacttttttacattgaaggtaacactacagcgaacatcctgtgcactcactgttatgccaggtgggagtatttctgtgaatacataactgaaagtggcattgctgcgttggagggcatgtacactttaaattgccctggtgactaccacattgcccgccacaaggcagcgccagttttcagccgcccattggcacatgagcctgcctgtctccttgtatctcggcccacacaggactgtccttgttaatttttgccaattcaatcaattttcaaagcttatcattttaatttacatgcctctgattgctaatgaggctttagcatcctttcatcagtttaatggctgttcatcaactgacatttatggtttttaagaatgcctttcaggccgggcgcggtggctcacgcttgtaatcccagcactttgggaggccgaggcgggtggatcacgaggtcaggaga

SEQ ID NO: 1038 - DNA, 321 bp, Homo sapiens
ggagagatttagctggaggtaaggctagtgcatgccacaaagtcctctatactttgtgaaatgtgagccatggtttgtctctgagcttcctggcaggcaataggaggaagggaatatatttggaacacattttatattcactagacaaaaggaatcccatttgtaagaagaaatgaacccattcctgatactgagggatgggaggattccgcccccaccccaatccttgtgaacattatcagctacaggatcagtcgttttctcaataagctctttgtagcacaggttttacaagctgcagattgtgacctgtggtgtgta

SEQ ID NO: 1039 - DNA, 1689 bp, Homo sapiens
tccatgtgctatactgtcctggttatatcacgtttttcacttcaaatccaaaggtagccacgtttttttaaagtttttatttatactttatcttattccattaaaaatgtatggcaattgataggaaatccactcaataaaatagaaaaataagagaaaaatatttaggataatataaattagaataggtggtattttgggggagggaatagtgtcaatgtcatatagatgagcaggctatgctgtgcagagttgttatattcagatagtttggttttgagcttcctgggtgctaaagtaaaacataacattattttttatgtactgttcattattcatgagtttgattagtgataataatagagtgtcatagtctttaactggagtagattacatttaaaaccaccacaccatatttggttaaaaaaaaatatcaaactagaaatttgttaacttgttaaaagtttatctctagtaatcatcatatacaagggtaaaatgctagaagaattcttttcagggatcaaacaaggataccctctacaacttctcttcaacagtattcttgggtgtcctagccagtgcagtaagacaagtaaaagtaatgagataaattggaaagtaggagcaaatctcattatttgtaagaaatatttacctagaagatgaaaggtagacaactgacaagctatcagaaccaatagagttgaaaaaggtaacagtacaagattaatatactaacatatagcaatattttatgggaaaaatggatatttatttataatagcaattaaaaatcacctagggaaagcctaacaagaaatatgctagagtcttatgttcttttttgaaagatagataagaaaacttcaataatggagcagaatatcatggccatgaatgggaaggttatattgtaaagaattcatttgaatcctgttttaaaactctcaataggacttagagctagtcaaactgattctaaaattcatgtgaaagtgtaaattcaagaatagccactacttaaaatggtacacattagatatgcccccatactatgcttaggaacttatacggacataccttagagatattgtgggtttggtttcagaccacggcaataaagcaaatatcacaataaagcaaatcacagaatttttagtttcctgatgcatatagaagttatactgtactgtagtctatagtgtgtttcaatagcattgtatctttaaaaatatacataccttaattttaaaatattgtcagaaaatgccaaagatcttctgagcccttagcaagttgtaatctttttagtggtagagggtcttgcctcaaagttgatggctgctgactgatcagggtggtagtttctggaaggttgggtggctgtggcagtttcttagcataaggcaatggactttgccacttgattgactcttcctttcacaaaagatttccctgtagcatggaatgctgcttgatagcattttgcccacagtagaacttctttcagagtttgagtcaatcctctcataccctgctactgccttacaactaaatttatggaattttctaaatctttgttgtcatttcaacagtgttcacagcatctccaccataagtagatccaatctcaagaaacctctttctttactcatccataagaagaaaccacttttactcatccat

SEQ ID NO: 1040 - DNA, 358 bp, Homo sapiens
ataacctctctgggtcttgcctacccagcctgtaataagcagcaacagtcacgcctcaccccaggctgccatgaggagtaatgacacagagtgacgatggctgggggcatgctttggaagtgctgtagtaggggtggcagagctccagctggccgagccccatctggtcaccccatcatgggcacgatggatcagtatatagacttgaggtcccttggctaagggtgagcctgggctggggtgcacccagtaacccaagcaaatctttggccaacaacccttggctgtccccagacagtcacctcagaacatcttccagagccaggatgggaacagggtgaggccttcaggacactgg

SEQ ID NO: 1041 - DNA, 519 bp, Homo sapiens
gctcctcagccagccttctctcctgacctctcctcagggctggtcacaagggggccgccccctggcccctcccctctcgacgtgcggcccccaaccccggattctgccctcctgcagtgatgaatggcaccgctgtcccgcgcaggcaggcaaacctcttcctgaaacagactctgctggaggcaacagcagcaacagattctacagaaagcccctgaaatggaggctcaggcctcacctagctccaggcccgcactccacagaaaaaaagattcacccggcgtgggggtgggggcttccagagatggcaaccctctggcaggaatccctcaggatcctgtcagagcctggtctctgggagttgacggagggagggagggagagagagagagagaaagagagagagattatcccagaatgtgcaggggaggaagcataagcaagggctcaggctcagagagacctgagcccaggcacatgcttgctgtgtgacctcggataaaacacttaacttctctg

SEQ ID NO: 1042 - DNA, 321 bp, Homo sapiens
aatcttaactgtttattgatttggagattgtatctcattggtaaagaacagttacttccttcacagtctaaagacaaattgtgtattattctgtgttaaatagcatggcactgttgatcaggagtttacttctgtctcattacaatgtgaacttgttgcccataaaataattctcttaagattgatacatcctgactatgtactaacatgtcatgtcagtttattattttaaatagaatgtgctaataacatatcattttaaggtttatgtgaactatttctctgaaagaataaaaatttgtcactgtataattgaacata

SEQ ID NO: 1043 - DNA, 289 bp, Homo sapiens
tcttaaccacctcatcagactaacctctaacttttgctggctaagaaactgacactatattgaacattacacaacactggtctattcagatataattatgattcccttaacaatatttatttatctcattttgcctctactaaagccttcatacaggcagttatttttgttttgacaattgccttaagatgcatatgttttcatttgcccaaattttgtttaagtttttgttatgaacatacacccacggcaatggcaagagttgcattaaaagagggggaggagggat

SEQ ID NO: 1044 - DNA, 311 bp, Homo sapiens
atgctgccatttactggtttgtgaccctgagtaacttgtttaacttctctgtgcctgttttttaaaatagagataacagtagtaccaactatgtagttccaccatgatggtggaagtgttaaaactaacccaccagcctggagctcagtccctccttccatgggcgagccctcactaactcctaccatctgaggcccaaaaagcactttcccccttgaatggttggaggcctgagcagaagctccagacaggcactggcaggaagcactcactagctctgggccagtgggaagcaccttcctcaggagggt

SEQ ID NO: 1045 - DNA, 2175 bp, Homo sapiens
cctccaggatactccaagcgggcctggacgtggagcgtctctccctcaggaatttcttccatcatttccattccaagcgaggcatgtggagccgtcgccagatgaagacgctgtagccggagggtgtccgcggggcccagcactccccgctctggactagcagtggctccccagggccctgctactgttcagggatggggagtggggtgacggctggaccccaagaggcctcgaagctgacggcccactccacctggagctgtcccctcacagaggcaggttccggggctcctgtctctgcctcctgggccttcagaagggaggactttgagagagaggccaggagggaccacttgctcagtcgagaacgggaagagctcctgagaaggacgggtcaggaaggagagatctgactgagcgacaccatcctcatccatgaaggtgcacgcccacatcccccaagcgctcctcacaccaagcgctgaccaccagaccctcttctagtggacatattttattggggggcggggattttaaaaacagaaaaccgaaactgctgtccagagcgggggtgaggttgtgcactgagggactgtccccacgtgcaggcctcccgcccactcctatgtcccttgggcgttgtccctggccgcgggactggtcccacgtggggcagatctctgctccaccccaggctcgtgccttccagagacacacatctcccagtagccaccaaacagctggccactgattagggcattaacttcctccggatggctcacgtcagaccagaagcacagaacgggctgtttctggtgcttgggcattgggaggtggggagctggcgggcagggggcttgccactccctggcactggacattgaggcctgcagaacaggcagggtgatgaaggcaggggagagaagccctttcccttaccggcgtgcctgtgggtaaggcctcccgagaggacatggagaagaggtaaagaggatgtggacatatctgtcaatttccttaggcaagaagcgggtgggggctggacagaaagggacgaaaagggaagtggaagctgtgagcctcacagtccagctccactgcagacctgcccttctgcagggagagccctggccacccggccttgagtggaagaagaggaaagggtgtacgggggcaaaaccctggacagggagcaggataagaagggggcgggatgagaggtttggggaggtgaggacattgccctgagatatcccctggaggcagggagaggagtgggggcaggaggaactgaagaggggggcagtttcagggaaaatagcccttagcctttttagtcgatgccaccctttctgtcacctggagaccttgtacttctcttgcactaataaccccggtgcttttgtggctgggggtttttctgttgctgctgctgcctccaccactgctgtgaattcacccatggtgcattggacactggatcttgaactccagagtctgtttagggaggtgagcacagggctgggggaggtgcggcggggcccagaagaccaggccactgagcccgcgctccaggctgtgacggtccaaaccacggcactggagctgcagggtctgcctagtgggctctgcattccccgagagcacgagtttggcacatgggagaatggagcccgtggagaaccttctggggggtcggggagaatccctgcctccctttaaggaatcatgaaggacagagacttttgagattgtggcttaggaaggccatacctgctccctgggctgtggctttttctggtccctgctgaggccgactggcccctggagaaggatggtggggcataggctagggctgcagttggccagtggggctgccagtttctttctgggaccactctcgtcctcgggcattgcactggaaggctggaaccagcccaaactgcccacctgcttcacttccaatgactaggagccagcccagcctcctgccctgcccacacccctgcgccctgggccagtgccttgcgtttgatgttacctccacaccatctgccttaagaggaagggccgggcaaggcccctactccctagagaaatgtcttgggtaggagagggtgtgggatggtgggaggggaagcattaaatacagcaacttcttagaaaaaaaaaaag

SEQ ID NO: 1046 - DNA, 771 bp, Homo sapiens
  misc_feature (2)..(2): n is a, c, g, or t
  misc_feature (4)..(4): n is a, c, g, or t
  misc_feature (6)..(8): n is a, c, g, or t
gncncnnngccggaagtgacctctagagcggtggtgaaactggcagttgacggctcctgggactagatcccgcgaggtagcccccgaactatttctctacgttttctcttgatcctcccgaaatcttccagatccgcgtagtgaggaatcgtctccaccgtcatggggggcggagacctgaatctgaagaagagctggcacccgcagaccctcaggaatgtggagaaagtgtggaaggccgagcagaagcatgaggctgagcggaagaagattgaggagcttcagcgggagctgcgagaagagagagcccgggaagagatgcagcgctatgcggaggatgttggggccgtcaagaaaaaagaagaaaagttggactggatgtaccagggtcctggtgggatggtgaaccgtgacgagtacctgctggggcgccccattgacaaatatgtttttgagaagatggaggagaaggaggcaggctgctcttctgaaacaggacttctcccaggctctatctttgccccatcaggtgccaattcccttcttgacatggccagcaagatccgggaggacccactcttcatcatcaggaagaaggaggaggagaaaaaacgagaggtattaaataatccagtgaaaatgaagaaaatcaaagaattgaggcaaagaatttggaaaaaaggagaaaagaaaagtttatacaccaataaaaaaaactcaggggggggccggaacccaattcgccctaaaggaaacgattacaaattaagg

SEQ ID NO: 1047 - DNA, 2676 bp, Homo sapiens
  misc_feature (2)..(2): n is a, c, g, or t
  misc_feature (4)..(4): n is a, c, g, or t
  misc_feature (6)..(8): n is a, c, g, or t
gncncnnngccggaagtgacctctagagcggtggtgaaactggcagttgacggctcctgggactagatcccgcgaggtagcccccgaactatttctctacgttttctcttgatcctcccgaaatcttccagatccgcgtagtgaggaatcgtctccaccgtcatggggggcggagacctgaatctgaagaagagctggcacccgcagaccctcaggaatgtggagaaagtgtggaaggccgagcagaagcatgaggctgagcggaagaagattgaggagcttcagcgggagctgcgagaagagagagcccgggaagagatgcagcgctatgcggaggatgttggggccgtcaagaaaaaagaagaaaagttggactggatgtaccagggtcctggtgggatggtgaaccgtgacgagtacctgctggggcgccccattgacaaatatgtttttgagaagatggaggagaaggaggcaggctgctcttctgaaacaggacttctcccaggctctatctttgccccatcaggtgccaattcccttcttgacatggccagcaagatccgggaggacccactcttcatcatcaggaagaaggaggaggagaaaaaacgagaggtattaaataatccagtgaaaatgaagaaaatcaaagaattgttgcaaatgagtctggaaaaaaaggagaagaagaaaaagaaggagaagaaaaagaagcacaagaaacataagcacagaagctcgagtagtgatcgttccagcagcgaggatgagcacagtgcagggagatcacagaagaagatggcaaattcctcccctgttttgtccaaagtccctggatatggcttacaggtccggaactctgaccgtaaccagggtcttcagggtcctctgacagcagagcaaaagagagggcatgggatgaagaaccattccagatccagaagctcctcccactcacccccaagacatgccagcaagaagagcaccagggaagcagggtcccgggacaggaggtctcgatccctgggcagaaggtcacggtccccaagacccagcaaactgcacaactctaaggtgaacaggagagagacaggccaaactaggagcccatcacctaaaaaagaggtctaccaaaggcgacatgctcccggatacaccagaaaactctctgcagaggaattagagcgaaaacggcaagagatgatggaaaacgccaaatggagggaggaggagagactgaacatcctcaagaggcatgctaaggatgaggaacgggagcagaggctagagaagctggactcccgggatgggaagttcatccaccgcatgaagctggagagtgcatctacttcctccctggaggatcgggtgaagcggaatatctactctttacagagaacttcggtagctctggagaagaactttatgaaaagatgaaaactgtcccctctcttattggttttcctgcattttccagggaagctgctgaccccttaattctctttataagagttcaaatgacttctttcacagatgtcaaaccaccagtgttcaaagtgaccctgcttcattgagtcctgaaacagctcacttcctttgagagctagtgtgacttgctttgtgggacactcagtaactttgggttttgactctttaacgggtgggcactggaccatctcggtgggagtgcttgtgccactctggaaggctgttccctggggttgtgatgtttatcatgccacttccttcttacctgtgccaacagacctatttcactgcctcagcgtacaccagacccttcagaaacctctctggtgtcacccagatagattgtgcttactgagacaaatgaacgtttacttgatttagaagataatgtgacagaatgatgtcaggttaggtcaaagccaagggagtgacagaatctggaaaatcaaacaatacaaaaagccctaaatgaactgttaactatttgatctttggatgtaaaattgtaatgcgtatatgtacaaatgtacaatttttacatgcttttaaaaaaggttagctttgtgaaaataccttgtttggtcaatgactttactgggtaatagaaccacattgaaccttgatggcaagtaatacaataaggcaggccagctcgtttttctctctgaatctggctggtttaggaggagcctgggtttatcgacgagatctggagtatctattcttttccactgcttgcagtctccaatgtaggcagtgtaaaggtatagtaaaatgattttaggagtcagaaccaaattgccaatatgctccatggctcctaaaggaaaataaaatggaagtttttaaaaaaaaaaaaaaaaagaaaaaaaaaaaaaaaaaccaacacaaacaagaaacaagaaagacaacaaggacacaaacagagaagaagagaagagaagaagagaatcacagatacaaacagaaagaaaagaaaaagaagagagaggagaggggggggggagtgcggcggcccggaggacgagagagagaaagagtacagcaccatcgggcccgggaggagcgcgacgccgagcgaggtgcaagagaccagaggcgcgcgaggacgcgcgagatgacacatgcggcgggacaagaggaggagagcggcggccaagcagaggcgggcggtggcgcacagga

SEQ ID NO: 1048 - DNA, 2317 bp, Homo sapiens
agccttttaccatttgaaatgcatgtgttgtgcgcgttggggatgggaggagggacctgaatctgaagaagagctggcacccgcagaccctcaggaatgtggagaaagtgtggaaggccgagcagaagcatgaggctgagcggaagaagattgaggagcttcagcgggagctgcgagaagagagagcccgggaagagatgcagcgctatgcggaggatgttggggccgtcaagaaaaaagaagaaaagttggactggatgtaccagggtcctggtgggatggtgaaccgtgacgagtacctgctggggcgccccattgacaaatatgtttttgagaagatggaggagaaggaggcaggctgctcttctgaaacaggacttctcccaggctctatctttgccccatcaggtgccaattcccttcttgacatggccagcaagatccgggaggacccactcttcatcatcaggaagaaggaggaggagaaaaaacgagaggtattaaataatccagtgaaaatgaagaaaatcaaagaattgttgcaaatgagtctggaaaaaaaggagaagaagaaaaagaaggagaagaaaaagaagcacaagaaacataagcacagaagctcgagtagtgatcgttccagcagcgaggatgagcacagtgcagggagatcacagaagaagatggcaaattcctcccctgttttgtccaaagtccctggatatggcttacaggtccggaactctgaccgtaaccagggtcttcagggtcctctgacagcagagcaaaagagagggcatgggatgaagaaccattccagatccagaagctcctcccactcacccccaagacatgccagcaagaagagcaccagggaagcagggtcccgggacaggaggtctcgatccctgggcagaaggtcacggtccccaagacccagcaaactgcacaactctaaggtgaacaggagagagacaggccaaactaggagcccatcacctaaaaaagaggtctaccaaaggcgacatgctcccggatacaccagaaaactctctgcagaggaattagagcgaaaacggcaagagatgatggaaaacgccaaatggagggaggaggagagactgaacatcctcaagaggcatgctaaggatgaggaacgggagcagaggctagagaagctggactcccgggatgggaagttcatccaccgcatgaagctggagagtgcatctacttcctccctggaggatcgggtgaagcggaatatctactctttacagagaacttcggtagctctggagaagaactttatgaaaagatgaaaactgtcccctctcttattggttttcctgcattttccagggaagctgctgaccccttaattctctttataagagttcaaatgacttctttcacagatgtcaaaccaccagtgttcaaagtgaccctgcttcattgagtcctgaaacagctcacttcctttgagagctagtgtgacttgctttgtgggacactcagtaactttgggttttgactctttaacgggtgggcactggaccatctcggtgggagtgcttgtgccactctggaaggctgttccctggggttgtgatgtttatcatgccacttccttcttacctgtgccaacagacctatttcactgcctcagcgtacaccagacccttcagaaacctctctggtgtcacccagatagattgtgcttactgagacaaatgaacgtttacttgatttagaagataatgtgacagaatgatgtcaggttaggtcaaagccaagggagtgacagaatctggaaaatcaaacaatacaaaaagccctaaatgaactgttaactatttgatctttggatgtaaaattgtaatgcgtatatgtacaaatgtacaatttttacatgcttttaaaaaaggttagctttgtgaaaataccttgtttggtcaatgactttactgggtaatagaaccacattgaaccttgatggcaagtaatacaataaggcaggccagctcgtttttctctctgaatctggctggtttaggaggagcctgggtttatcgacgagatctggagtatctattcttttccactgcttgcagtctccaatgtaggcagtgtaaaggtatagtaaaatgattttaggagtcagaaccaaattgccaatatgctccatggctcctaaaggaaaataaaatggaagtttttattttgcggcttcacttcttaccgtgtagtaaccttactacaattacagattttcaggagttgtttgctagtctctttcagtcaggtactaaaaaaaaaa

SEQ ID NO: 1049 - DNA, 1643 bp, Homo sapiens
tgtgctgatgcatttttcggcatagacagtccaaatagagaaacgtactgccaggtaactgctgggaggcggaaaggtcacattggaggcaagaagcatagttcagcataagatatttaaattggacctatatatattttctttttcaatgagtgtgtgtattttgatctcttagatcacagaagaagatggcaaattcctcccctgttttgtccaaagtccctggatatggcttacaggtccggaactctgaccgtaaccagggtcttcagggtcctctgacagcagagcaaagagacaggccaaactaggagcccatcacctaaaaaagaggtctaccaaaggcgacatgctcccggatacaccagaaaactctctgcagaggaattagagcgaaaacggcaagagatgatggaaaacgccaaatggagggaggaggagagactgaacatcctcaagaggcatgctaaggatgaggaacgggagcagaggctagagaagctggactcccgggatgggaagttcatccaccgcatgaagctggagagtgcatctacttcctccctggaggatcgggtgaagcggaatatctactctttacagagaacttcggtagctctggagaagaactttatgaaaagatgaaaactgtcccctctcttattggttttcctgcattttccagggaagctgctgaccccttaattctctttataagagttcaaatgacttctttcacagatgtcaaaccaccagtgttcaaagtgaccctgcttcattgagtcctgaaacagctcacttcctttgagagctagtgtgacttgctttgtgggacactcagtaactttgggttttgactctttaacgggtgggcactggaccatctcggtgggagtgcttgtgccactctggaaggctgttccctggggttgtgatgtttatcatgccacttccttcttacctgtgccaacagacctatttcactgcctcagcgtacaccagacccttcagaaacctctctggtgtcacccagatagattgtgcttactgagacaaatgaacgtttacttgatttagaagataatgtgacagaatgatgtcaggttaggtcaaagccaagggagtgacagaatctggaaaatcaaacaatacaaaaagccctaaatgaactgttaactatttgatctttggatgtaaaattgtaatgcgtatatgtacaaatgtacaatttttacatgcttttaaaaaaggttagctttgtgaaaataccttgtttggtcaatgactttactgggtaatagaaccacattgaaccttgatggcaagtaatacaataaggcaggccagctcgtttttctctctgaatctggctggtttaggaggagcctgggtttatcgacgagatctggagtatctattcttttccactgcttgcagtctccaatgtaggcagtgtaaaggtatagtaaaatgattttaggagtcagaaccaaattgccaatatgctccatggctcctaaaggaaaataaaatggaagtttttattttgcggcttcacttcttaccgtgtagtaaccttactacaattacagattttcaggagttgtttgctagtctctttcagtcaggtactaaaaaaaaaa

SEQ ID NO: 1050 - DNA, 1071 bp, Homo sapiens
  misc_feature (2)..(2): n is a, c, g, or t
  misc_feature (4)..(4): n is a, c, g, or t
  misc_feature (6)..(8): n is a, c, g, or t
gncncnnngccggaagtgacctctagagcggtggtgaaactggcagttgacggctcctgggactagatcccgcgaggtagcccccgaactatttctctacgttttctcttgatcctcccgaaatcttccagatccgcgtagtgaggaatcgtctccaccgtcatggggggcggagacctgaatctgaagaagagctggcacccgcagaccctcaggaatgtggagaaagtgtggaaggccgagcagaagcatgaggctgagcggaagaagattgaggagcttcagcgggagctgcgagaagagagagcccgggaagagatgcatgcttgtgccactctggaaggctgttccctggggttgtgatgtttatcatgccacttccttcttacctgtgccaacagacctatttcactgcctcagcgtacaccagacccttcagaaacctctctggtgtcacccagatagattgtgcttactgagacaaatgaacgtttacttgatttagaagataatgtgacagaatgatgtcaggttaggtcaaagccaagggagtgacagaatctggaaaatcaaacaatacaaaaagccctaaatgaactgttaactatttgatctttggatgtaaaattgtaatgcgtatatgtacaaatgtacaatttttacatgcttttaaaaaaggttagctttgtgaaaataccttgtttggtcaatgactttactgggtaatagaaccacattgaaccttgatggcaagtaatacaataaggcaggccagctcgtttttctctctgaatctggctggtttaggaggagcctgggtttatcgacgagatctggagtatctattcttttccactgcttgcagtctccaatgtaggcagtgtaaaggtatagtaaaatgattttaggagtcagaaccaaattgccaatatgctccatggctcctaaaggaaaataaaatggaagtttttattttgcggcttcacttcttaccgtgtagtaaccttactacaattacagattttcaggagttgtttgctagtctctttcagtcaggtactaaaaaaaaaa

SEQ ID NO: 1051 - DNA, 2438 bp, Homo sapiens
  misc_feature (2)..(2): n is a, c, g, or t
  misc_feature (4)..(4): n is a, c, g, or t
  misc_feature (6)..(8): n is a, c, g, or t
gncncnnngccggaagtgacctctagagcggtggtgaaactggcagttgacggctcctgggactagatcccgcgaggtagcccccgaactatttctctacgttttctcttgatcctcccgaaatcttccagatccgcgtagtgaggaatcgtctccaccgtcatggggggcggagacctgaatctgaagaagagctggcacccgcagaccctcaggaatgtggagaaagtgtggaaggccgagcagaagcatgaggctgagcggaagaagattgaggagcttcagcgggagctgcgagaagagagagcccgggaagagatgcagcgctatgcggaggatgttggggccgtcaagaaaaaagaagaaaagttggactggatgtaccagggtcctggtgggatggtgaaccgtgacgagtacctgctggggcgccccattgacaaatatgtttttgagaagatggaggagaaggaggcaggctgctcttctgaaacaggacttctcccaggctctatctttgccccatcaggtgccaattcccttcttgacatggccagcaagatccgggaggacccactcttcatcatcaggaagaaggaggaggagaaaaaacgagaggtattaaataatccagtgaaaatgaagaaaatcaaagaattgttgcaaatgagtctggaaaaaaaggagaagaagaaaaagaaggagaagaaaaagaagcacaagaaacataagcacagaagctcgagtagtgatcgttccagcagcgaggatgagcacagtgcagggagatcacagaagaagatggcaaattcctcccctgttttgtccaaagtccctggatatggcttacaggtccggaactctgaccgtaaccagggtcttcagggtcctctgacagcagagcaaaagagagggcatgggatgaagaaccattccagatccagaagctcctcccactcacccccaagacatgccagcaagaagagcaccagggaagcagggtcccgggacaggaggtctcgatccctgggcagaaggtcacggtccccaagacccagcaaactgcacaactctaaggtgaacaggagagagacaggccaaactaggagcccatcacctaaaaaagaggtctaccaaaggcgacatgctcccggatacaccagaaaactctctgcagaggaattagagcgaaaacggcaagagatgatggaaaacgccaaatggagggaggaggagagactgaacatcctcaagaggcatgctaaggatgaggaacgggagcagaggctagagaagctggactcccgggatgggaagttcatccaccgcatgaagctggagagtgcatctacttcctccctggaggatcgggtgaagcggaatatctactctttacagagaacttcggtagctctggagaagaactttatgaaaagatgaaaactgtcccctctcttattggttttcctgcattttccagggaagctgctgaccccttaattctctttataagagttcaaatgacttctttcacagatgtcaaaccaccagtgttcaaagtgaccctgcttcattgagtcctgaaacagctcacttcctttgagagctagtgtgacttgctttgtgggacactcagtaactttgggttttgactctttaacgggtgggcactggaccatctcggtgggagtgcttgtgccactctggaaggctgttccctggggttgtgatgtttatcatgccacttccttcttacctgtgccaacagacctatttcactgcctcagcgtacaccagacccttcagaaacctctctggtgtcacccagatagattgtgcttactgagacaaatgaacgtttacttgatttagaagataatgtgacagaatgatgtcaggttaggtcaaagccaagggagtgacagaatctggaaaatcaaacaatacaaaaagccctaaatgaactgttaactatttgatctttggatgtaaaattgtaatgcgtatatgtacaaatgtacaatttttacatgcttttaaaaaaggttagctttgtgaaaataccttgtttggtcaatgactttactgggtaatagaaccacattgaaccttgatggcaagtaatacaataaggcaggccagctcgtttttctctctgaatctggctggtttaggaggagcctgggtttatcgacgagatctggagtatctattcttttccactgcttgcagtctccaatgtaggcagtgtaaaggtatagtaaaatgattttaggagtcagaaccaaattgccaatatgctccatggctcctaaaggaaaataaaatggaagtttttattttgcggcttcacttcttaccgtgtagtaaccttactacaattacagattttcaggagttgtttgctagtctctttcagtcaggtactaaaaaaaaaa

SEQ ID NO: 1052 - DNA, 2387 bp, Homo sapiens
  misc_feature (2)..(2): n is a, c, g, or t
  misc_feature (4)..(4): n is a, c, g, or t
  misc_feature (6)..(8): n is a, c, g, or t
gncncnnngccggaagtgacctctagagcggtggtgaaactggcagttgacggctcctgggactagatcccgcgaggtagcccccgaactatttctctacgttttctcttgatcctcccgaaatcttccagatccgcgtagtgaggaatcgtctccaccgtcatggggggcggagacctgaatctgaagaagagctggcacccgcagaccctcaggaatgtggagaaagtgtggaaggccgagcagaagcatgaggctgagcggaagaagattgaggagcttcagcgggagctgcgagaagagagagcccgggaagagatgcagcgctatgcggaggatgttggggccgtcaagaaaaaagaagaaaagttggactggatgtaccagggtcctggtgggatggtgaaccgtgacgagtacctgctggggcgccccattgacaaatatgtttttgagaagatggaggagaaggaggcaggctgctcttctgaaacaggacttctcccaggctctatctttgccccatcaggtgccaattcccttcttgacatggccagcaagatccgggaggacccactcttcatcatcaggaagaaggaggaggagaaaaaacgagaggtattaaataatccagtgaaaatgaagaaaatcaaagaattgttgcaaatgagtctggaaaaaaaggagaagaagaaaaagaaggagaagaaaaagaagcacaagaaacataagcacagaagctcgagtagtgatcgttccagcagcgaggatgagcacagtgcagggagatcacagaagaagatggcaaattcctcccctgttttgtccaaagtccctggatatggcttacaggtccggaactctgaccgtaaccagggtcttcagggtcctctgacagcagagcaatcacccccaagacatgccagcaagaagagcaccagggaagcagggtcccgggacaggaggtctcgatccctgggcagaaggtcacggtccccaagacccagcaaactgcacaactctaaggtgaacaggagagagacaggccaaactaggagcccatcacctaaaaaagaggtctaccaaaggcgacatgctcccggatacaccagaaaactctctgcagaggaattagagcgaaaacggcaagagatgatggaaaacgccaaatggagggaggaggagagactgaacatcctcaagaggcatgctaaggatgaggaacgggagcagaggctagagaagctggactcccgggatgggaagttcatccaccgcatgaagctggagagtgcatctacttcctccctggaggatcgggtgaagcggaatatctactctttacagagaacttcggtagctctggagaagaactttatgaaaagatgaaaactgtcccctctcttattggttttcctgcattttccagggaagctgctgaccccttaattctctttataagagttcaaatgacttctttcacagatgtcaaaccaccagtgttcaaagtgaccctgcttcattgagtcctgaaacagctcacttcctttgagagctagtgtgacttgctttgtgggacactcagtaactttgggttttgactctttaacgggtgggcactggaccatctcggtgggagtgcttgtgccactctggaaggctgttccctggggttgtgatgtttatcatgccacttccttcttacctgtgccaacagacctatttcactgcctcagcgtacaccagacccttcagaaacctctctggtgtcacccagatagattgtgcttactgagacaaatgaacgtttacttgatttagaagataatgtgacagaatgatgtcaggttaggtcaaagccaagggagtgacagaatctggaaaatcaaacaatacaaaaagccctaaatgaactgttaactatttgatctttggatgtaaaattgtaatgcgtatatgtacaaatgtacaatttttacatgcttttaaaaaaggttagctttgtgaaaataccttgtttggtcaatgactttactgggtaatagaaccacattgaaccttgatggcaagtaatacaataaggcaggccagctcgtttttctctctgaatctggctggtttaggaggagcctgggtttatcgacgagatctggagtatctattcttttccactgcttgcagtctccaatgtaggcagtgtaaaggtatagtaaaatgattttaggagtcagaaccaaattgccaatatgctccatggctcctaaaggaaaataaaatggaagtttttattttgcggcttcacttcttaccgtgtagtaaccttactacaattacagattttcaggagttgtttgctagtctctttcagtcaggtactaaaaaaaaaa

SEQ ID NO: 1053 - DNA, 1304 bp, Homo sapiens
tgaatttagatctttacattttatttatattctaatggagtgccttagttatctgggctgcataacaaaatatcgtagactcagtggcttataaacaactgaggtttatttctcacagttttggaggctgaaagtccaaggtcaaggtgccagcatgcttgggttctggtgaaggccctcttttgcactgtagactgctgacttcttgctgtaacctcatgtggttgaaagagctagctggctctttggcttcttcttataaaggcagtaattccactcatgaaggctccaccctcatgacctaatttcctcctaaaggccctaccttcaaataccatcaccttgggattcgtgtttcaacataggaattgttacgggaacacaaacattcagcccataacagattttatcaaagaagtacttcatgaaatgtaagtgatgagtggtttttccaaatttgtcatctccattgcatcttcctattaagaaatccactaataataatgttgatgataataaaaacagtaatatccaatattaatccaaagcagtttgggccagatagttgttgctgtattatacatgttggaaacaaccacacttttaggtgtgtttcattttacagctgaggtaccaagaagcaaatattttgtctaatatcacacagatagtagagtagtggaaaggcaatgatgataagtatatgctgttgctagaacacttttccacaactgttacattaacagctttattttctagtgtgaattttcctaaatttaatgagaactaagaggtatttaagactcatacatttattaagttaatatgtgtaaaaaaacatcaacacattgacagaacttctggccataaatattttgatattctataaatagagcatgacatggaaaccttttcttatattaaattacattatgagttttctgatgttgataaagatgtgaatattgtctaaaggcctttctacataccttacactcatagggtttctcaccagtgtgaattctctgatgttcagtaaggtgtgaattaagtctaaaggccttcccacattgtttacactcatagggtttctcaccagtatgaattctttgatgtattctaaggtctacactacgactaaaggccttcccacattctttacatttgtatggttttacacccgtatgaattttctgatgttcagtgaactgcccacgccgactaaaggacttcccacattctttacagtcatagggttttaaaccagaatgaattttcagatgttctttaagattccctctacg

SEQ ID NO: 1054 - DNA, 4992 bp, Homo sapiens
tggggctgggagccgggcgccactgtggccgctgcttttctgagggaaaagagcgcggagtgggccaggttttgcaggccgggccaaggtggagaaaaggttcctgtggagcctcaggccggtgtgctttttttcccgggactgagcttctgcagccctgaggcctggaggcccgggcggtagtaactgtgccggaccaggttcgtgggtgcggcctgtggtgcagttggagaccgaggccccgcgcatcctcgtccgcgcttcagccacttaggcttggccgtagcgaaaaggcccaagagggaagtcagaggtggcggttagttggggccagggaagcgtggagggtgggttccaatcgagtcaagaaaagcctggggtgtcctgaactctgcctgcttccccagccctgccagtttccagagaaggcgcttgagaaggagaaacgaatcgctgctgctcttctaaaagccggttccctctctggtgtctgtggaccctgcttctgaagtacatgaaccttgaggaaaattgaccagttctagcagttctaaaatcatggctcgtgatttggtgatgttcagagatgtggctgtagacttttctcaggaagaatgggaatgcctgaactcatatcagaggaatttgtacagagatgtgatattagagaactatagcaacttggtgtcactggcaggatgttctatttctaagccagatgtgatcaccctattggaacaagggaaagagccctggatggttgtgagggatgagaaaagaagatggactctagatttggaatccagatatgacactaaaaagttatttcaaggaaaggatatttatgaaatgaacttatctcagtggaaggtaatggaaagaattaaaagctgtggacttgaagaacaagaaagtcctcatgaggtgtgtttcaggcaagtgacaaaaaccacctctgaaaaaatgcctacttacagaaaactcacatctcttcctctgtatcagaaaagtcataacagagagaaaccctacgaatgtggggaatgtgggaaggcttttagagtacgacaacaacttactttccatcaaagaattcatactggtgagaaaccctatgaatgtaaagaatgtggaaaagcctttagacagtgtgcccacctcagtcgacatcagagaattcatacttctgacaaactctatgaatgtaaaaaatgtggaaagatcttcacatgtggctcagaccttcgagtacatcagagaattcatattggtgagaagccgtatgaatgtaaagaatgtgggaaagcctttagagttagaggacaacttaatctccatcaaaggattcacacgggtgagaaaccctatgaatgtaaagaatgtgggaaggcctttaggcagtatgcacaccttactcgacatcagagactgaacattgctgagaagtgctatgagtgtaaggaatgtggtcaggcctttctgtgtagtacaggccttcgactacatcacaaacttcatactggagaaaaaccctatgaatgtaaggagtgtggaaaggcctttagagtgcggcagcaacttactctccatcagagaattcacactggtgagaagccttatgattgtaaggaatgtgggaagactttcagtcgtggctatcatctaactctccatcagagaatacatactggtgaaaagccctatgaatgtaaggaatgtcagaagttctttcgtcgttactcagaacttatttcacatcagggtattcacattggagagaaaccttatgaatgtaaggaatgtgggaaggcatttaggctgttctcacagcttactcaacatcagagtattcattttggtgagaaaccctttaagtgtaaggaatgtgagaagacttttagactgctttcacaacttacccaacatcaaagtattcatactggtgaaaagccctatgactgtaaggaatgtggaaaggcctttagacttcattcatcactgattcaacatcagagaattcattctggtgagaaaccatacaaatgtaaggaatgtaaaaaggcatttagacaacattcacatcttacttaccatcagcgaattcataatgtaacttaataattattagaactcttcctttgcgaattttatgttgagcataggaagtacattctagaggaaaggtttttgaacgtgggaatcccttttgcttcatgctcacaactaagcataggaagttttatttaaaggaaagaatatgttaatgaacatatagaagcctttcatcacctttgaaaccatgttaaactttaggaaattcatcctagaaaagaactttattacaggactgaatgtggaaaagcttttgatcttacctattattatctccatattcttccatctgtgtatatacacacgaaggttgctagggaaccacttcattctgaaaatgtgtaaatgaaaggaaagtcatttagtctgcatttcctgtaggaactgtatttcagggcaaccagaagttaaggaggtaaagttcttctttattagaaaattccaggctaatgaatgcagaaagaataatagaaaattatattagaaaaactattgtgtaacacataatgaaataatggatctaggcatgattctctgtacaggttgacaccattcagtgaaggttgtgaactttatagtgaatagatgagactgacaacgtctgaacccactcatcatctcaacttcacaaaaagcaagagagtaaaaattacgtgcctcctaatgtgctacagtaagatatacacatcttgccaaaaatattgaacctgaatttaagcctcaagagccaactcccagtttagagaaaattcaaggaatggaagagtaaattacatgacacaaaaaggagcaattaaatctaaaataagggtaattctacaagaggaatcacctggtttcccaaccaataaaatggcattttaagaaataaggtggaactcctaggtattgacagacttgagacatcagtcaaatgcaatgaaacagtggtttttacttagatcatgagttgaacaaacatgtaaaagaagagatacttaacaataattgggagaatggaatattgacaatattagataatattaagaaactttgttatgtgtgataatagcattgtggttatgtaaaagtgtatttgttagagataatttctgaagtctatacacaggagatgatatatctggaatgtccttttgttcatacaaaagaaaaatgaggatgaataacaagtttggcaaaatgatggtaacctaagtcttggatacatggtttttatttgttttgtttttgctattctacttttgtgtatttaaaattttccatgatgttcttttaaagatcaaattatccatgaaattatagccagtttaaaatgaattattttaaaaaaaatttctggctgggcccggtggctcgtgcctgtagtcccagcactttgggaggccggtgggcagatcatgaggtcaggagtttgagaccagcctgaccatcatggtgaaacctcatctccgctaaaaatgcaaaaattagccaggcgtggtcacatgcgcctgtaatcccagctactcgggcagctgagacaggagaatcacttgggcccgggaggcagaggttgcagtgagccgagatcacgccattgcactccagcctgggcaacaagagcaaaactctatctcaaagaaaaaaagaaaatttctacatattaaaacttgtggatgttgccaaagctctacacattgggattggaatattaattacactataatgacgataatgtattcaggaagttaaaatgtaggtccacattttatttagttgacctctctatctctatattatagtacccatggtatgcacctttttttttttttttttttgagacggagtctcgctctttcgcccaggctggcgtgcagtggcacagtctcggctcactgcaagctctgcctcccgggttcaagccattctcctccctcagacttccgagtggctgggattacaggcgcccgccaccacaccaggttgatttttgtatttttagtggagatggggtttcaccatgttggccaggctggtctcaactcctgacctcaggtgatccacctgcctcggcctcccaaggtgctgggattgcaggcgtgagccaccatgcccggctctcacttcatatgtttaaagaatgagtaaaagaaagcaattactactgctaaatgtgggaaataatggactagacctgtactaatatatggtagtcactagcaacctgttgagcacttgaaattgagttattgagcactgaaatgtggctagtccaaattcaaatggtgtttttttgtaaaacacaagattctgaagacttagttattttaaaaaagttaagtatctcaatttttcatattgagtacatattgaaataatattttagatatattggttcaaataaaatacattaaaatgaataacacttttttgtttttaaaattgttataggaaaatttatatatgtagctcacgtatttctattgtcagcgctggcataaacaataaaaagtagacttggtttttttgtgtgtgtttctttaaaagataccaatatagtcaagacctttgcagttttgatcacagaaatatgaaagattacacagctacagctatatgaatgataaaagtgacagctatggatttttaaagttataagttgctatactacatatatgtaatgtgtgtgtgtatagtgtgtaggtatatatatttatatttatacacacactatacatgtattttaaaatattgaaaatccagaattattttatggtaaaaattactaaaattgacttcacatgctgaatgaagagagcctgagtagaccaacaaacaaatgaaaaattaagacggttagaagatacgctttctaaaagaatacatttagaatctaacttt

SEQ ID NO: 1055 - DNA, 1779 bp, Homo sapiens
tggggctgggagccgggcgccactgtggccgctgcttttctgagggaaaagagcgcggagtgggccaggttttgcaggccgggccaaggtggagaaaaggttcctgtggagcctcaggccggtgtgctttttttcccgggactgagcttctgcagccctgaggcctggaggcccgggcggtagtaactgtgccggaccaggttcgtgggtgcggcctgtggtgcagttggagaccgaggccccgcgcatcctcgtccgcgcttcagccacttaggcttggccgtagcgaaaaggcccaagagggaagtcagaggtggcggttagttggggccagggaagcgtggagggtgggttccaatcgagtcaagaaaagcctggggtgtcctgaactctgcctgcttccccagccctgccagtttccagagaaggcgcttgagaaggagaaacgaatcgctgctgctcttctaaaagccggttccctctctggtgtctgtggaccctgcttctgaagtacatgaaccttgaggaaaattgaccagttctagcagttctaaaatcatggctcgtgatttggtgatgttcagagatgtggctgtagacttttctcaggaagaatgggaatgcctgaactcatatcagaggaatttgtacagagatgtgatattagagaactatagcaacttggtgtcactggcaggatgttctatttctaagccagatgtgatcaccctattggaacaagggaaagagccctggatggttgtgagggatgagaaaagaagatggactctaggccctaccttcaaataccatcaccttgggattcgtgtttcaacataggaattgttacgggaacacaaacattcagcccataacagattttatcaaagaagtacttcatgaaatgtaagtgatgagtggtttttccaaatttgtcatctccattgcatcttcctattaagaaatccactaataataatgttgatgataataaaaacagtaatatccaatattaatccaaagcagtttgggccagatagttgttgctgtattatacatgttggaaacaaccacacttttaggtgtgtttcattttacagctgaggtaccaagaagcaaatattttgtctaatatcacacagatagtagagtagtggaaaggcaatgatgataagtatatgctgttgctagaacacttttccacaactgttacattaacagctttattttctagtgtgaattttcctaaatttaatgagaactaagaggtatttaagactcatacatttattaagttaatatgtgtaaaaaaacatcaacacattgacagaacttctggccataaatattttgatattctataaatagagcatgacatggaaaccttttcttatattaaattacattatgagttttctgatgttgataaagatgtgaatattgtctaaaggcctttctacataccttacactcatagggtttctcaccagtgtgaattctctgatgttcagtaaggtgtgaattaagtctaaaggccttcccacattgtttacactcatagggtttctcaccagtatgaattctttgatgtattctaaggtctacactacgactaaaggccttcccacattctttacatttgtatggttttacacccgtatgaattttctgatgttcagtgaactgcccacgccgactaaaggacttcccacattctttacagtcatagggttttaaaccagaatgaattttcagatgttctttaagattccctctacg

SEQ ID NO: 1056 - DNA, 884 bp, Homo sapiens
tggggctgggagccgggcgccactgtggccgctgcttttctgagggaaaagagcgcggagtgggccaggttttgcaggccgggccaaggtggagaaaaggttcctgtggagcctcaggccggtgtgctttttttcccgggactgagcttctgcagccctgaggcctggaggcccgggcggtagtaactgtgccggaccaggttcgtgggtgcggcctgtggtgcagttggagaccgaggccccgcgcatcctcgtccgcgcttcagccacttaggcttggccgtagcgaaaaggcccaagagggaagtcagaggtggcggttagttggggccagggaagcgtggagggtgggttccaatcgagtcaagaaaagcctggggtgtcctgaactctgcctgcttccccagccctgccagtttccagagaaggcgcttgagaaggagaaacgaatcgctgctgctcttctaaaagccggttccctctctggtgtctgtggaccctgcttctgaagtacatgaaccttgaggaaaattgaccagttctagcagttctaaaatcatggctcgtgatttggtgatgttcagagatgtggctgtagacttttctcaggaagaatgggaatgcctgaactcatatcagaggaatttgtacagagatgtgatattagagaactatagcaacttggtgtcactgggtaagcctagcatatctgtgtcagataatttagacattcacaggactgaatttctgggctgtctttctttttgtttttttccaaagacgaagtctcgctgagtcaccaggctggagttgcagtaagccgagattgcgccattccactccagcttgggcaacaagagcgaaactctgtctttaaaaaaaaa

SEQ ID NO: 1057 - DNA, 526 bp, Homo sapiens
gggtgaggctggggctgggagccgggcgccactgtggccgctgcttttctgagggaaaagagcgcggagtgggccaggttttgcaggccgggccaaggtggagaaaaggttcctgtggagcctcaggccggtgtgctttttttcccgggactgagcttctgcagccctgaggcctggaggcccgggcggtagtaactgtgccggaccaggttcgtgggtgcggcctgtggtgcagttggagaccgaggccccgcgcatcctcgtccgcgcttcagccacttaggcttggccgtagcgaaaaggcccaagagggaagtcagaggtgaacgccccaggatgaaggtcccctgcaaaacgctgggacctagatttggggtgggtgtctggggtctaggaggacacgctggacagttccgaaaagacacagtgggtggtcccgggcgtgggcaaccgggtgcggaactacagcgtacccggagctgcgaacccagacgcgggtgactgctgaccctctgccctgtcgttt

SEQ ID NO: 1058 - DNA, 3545 bp, Homo sapiens
tggtcaccgatttctattataaagttttcgtttgtttattttgtgtagaacaggaaaatatgttttggtcttgttttctttcagatttggaatccagatatgacactaaaaagttatttcaaggaaaggatatttatgaaatgaacttatctcagtggaaggtaatggaaagaattaaaagctgtggacttgaagaacaagaaagtcctcatgaggtgtgtttcaggcaagtgacaaaaaccacctctgaaaaaatgcctacttacagaaaactcacatctcttcctctgtatcagaaaagtcataacagagagaaaccctacgaatgtggggaatgtgggaaggcttttagagtacgacaacaacttactttccatcaaagaattcatactggtgagaaaccctatgaatgtaaagaatgtggaaaagcctttagacagtgtgcccacctcagtcgacatcagagaattcatacttctgacaaactctatgaatgtaaaaaatgtggaaagatcttcacatgtggctcagaccttcgagtacatcagagaattcatattggtgagaagccgtatgaatgtaaagaatgtgggaaagcctttagagttagaggacaacttaatctccatcaaaggattcacacgggtgagaaaccctatgaatgtaaagaatgtgggaaggcctttaggcagtatgcacaccttactcgacatcagagactgaacattgctgagaagtgctatgagtgtaaggaatgtggtcaggcctttctgtgtagtacaggccttcgactacatcacaaacttcatactggagaaaaaccctatgaatgtaaggagtgtggaaaggcctttagagtgcggcagcaacttactctccatcagagaattcacactggtgagaagccttatgattgtaaggaatgtgggaagactttcagtcgtggctatcatctaactctccatcagagaatacatactggtgaaaagccctatgaatgtaaggaatgtcagaagttctttcgtcgttactcagaacttatttcacatcagggtattcacattggagagaaaccttatgaatgtaaggaatgtgggaaggcatttaggctgttctcacagcttactcaacatcagagtattcattttggtgagaaaccctttaagtgtaaggaatgtgagaagacttttagactgctttcacaacttacccaacatcaaagtattcatactggtgaaaagccctatgactgtaaggaatgtggaaaggcctttagacttcattcatcactgattcaacatcagagaattcattctggtgagaaaccatacaaatgtaaggaatgtaaaaaggcatttagacaacattcacatcttacttaccatcagcgaattcataatgtaacttaataattattagaactcttcctttgcgaattttatgttgagcataggaagtacattctagaggaaaggtttttgaacgtgggaatcccttttgcttcatgctcacaactaagcataggaagttttatttaaaggaaagaatatgttaatgaacatatagaagcctttcatcacctttgaaaccatgttaaactttaggaaattcatcctagaaaagaactttattacaggactgaatgtggaaaagcttttgatcttacctattattatctccatattcttccatctgtgtatatacacacgaaggttgctagggaaccacttcattctgaaaatgtgtaaatgaaaggaaagtcatttagtctgcatttcctgtaggaactgtatttcagggcaaccagaagttaaggaggtaaagttcttctttattagaaaattccaggctaatgaatgcagaaagaataatagaaaattatattagaaaaactattgtgtaacacataatgaaataatggatctaggcatgattctctgtacaggttgacaccattcagtgaaggttgtgaactttatagtgaatagatgagactgacaacgtctgaacccactcatcatctcaacttcacaaaaagcaagagagtaaaaattacgtgcctcctaatgtgctacagtaagatatacacatcttgccaaaaatattgaacctgaatttaagcctcaagagccaactcccagtttagagaaaattcaaggaatggaagagtaaattacatgacacaaaaaggagcaattaaatctaaaataagggtaattctacaagaggaatcacctggtttcccaaccaataaaatggcattttaagaaataaggtggaactcctaggtattgacagacttgagacatcagtcaaatgcaatgaaacagtggtttttacttagatcatgagttgaacaaacatgtaaaagaagagatacttaacaataattgggagaatggaatattgacaatattagataatattaagaaactttgttatgtgtgataatagcattgtggttatgtaaaagtgtatttgttagagataatttctgaagtctatacacaggagatgatatatctggaatgtccttttgttcatacaaaagaaaaatgaggatgaataacaagtttggcaaaatgatggtaacctaagtcttggatacatggtttttatttgttttgtttttgctattctacttttgtgtatttaaaattttccatgatgttcttttaaagatcaaattatccatgaaattatagccagtttaaaatgaattattttaaaaaaaatttctggcgtgagccaccatgcccggctctcacttcatatgtttaaagaatgagtaaaagaaagcaattactactgctaaatgtgggaaataatggactagacctgtactaatatatggtagtcactagcaacctgttgagcacttgaaattgagttattgagcactgaaatgtggctagtccaaattcaaatggtgtttttttgtaaaacacaagattctgaagacttagttattttaaaaaagttaagtatctcaatttttcatattgagtacatattgaaataatattttagatatattggttcaaataaaatacattaaaatgaataacacttttttgtttttaaaattgttataggaaaatttatatatgtagctcacgtatttctattgtcagcgctggcataaacaataaaaagtagacttggtttttttgtgtgtgtttctttaaaagataccaatatagtcaagacctttgcagttttgatcacagaaatatgaaagattacacagctacagctatatgaatgataaaagtgacagctatggatttttaaagttataagttgctatactacatatatgtaatgtgtgtgtgtatagtgtgtaggtatatatatttatatttatacacacactatacatgtattttaaaatattgaaaatccagaattattttatggtaaaaattactaaaattgacttcacatgctgaatgaagagagcctgagtagaccaacaaacaaatgaaaaattaagacggttagaagatacgctttctaaaagaatacatttagaatctaacttt

SEQ ID NO: 1059 - DNA, 3330 bp, Homo sapiens
tggtcaccgatttctattataaagttttcgtttgtttattttgtgtagaacaggaaaatatgttttggtcttgttttctttcagatttggaatccagatatgacactaaaaagttatttcaaggaaaggatatttatgaaatgaacttatctcagtggaaggtaatggaaagaattaaaagctgtggacttgaagaacaagaaagtcctcatgaggtgtgtttcaggcaagtgacaaaaaccacctctgaaaaaatgcctacttacagaaaactcacatctcttcctctgtatcagaaaagtcataacagagagaaaccctacgaatgtggggaatgtgggaaggcttttagagtacgacaacaacttactttccatcaaagaattcatactggtgagaaaccctatgaatgtaaagaatgtggaaaagcctttagacagtgtgcccacctcagtcgacatcagagaattcatacttctgacaaactctatgaatgtaaaaaatgtggaaagatcttcacatgtggctcagaccttcgagtacatcagagaattcatattggtgagaagccgtatgaatgtaaagaatgtgggaaagcctttagagttagaggacaacttaatctccatcaaaggattcacacgggtgagaaaccctatgaatgtaaagaatgtgggaaggcctttaggcagtatgcacaccttactcgacatcagagactgaacattgctgagaagtgctatgagtgtaaggaatgtggtcaggcctttctgtgtagtacaggccttcgactacatcacaaacttcatactggagaaaaaccctatgaatgtaaggagtgtggaaaggcctttagagtgcggcagcaacttactctccatcagagaattcacactggtgagaagccttatgattgtaaggaatgtgggaagactttcagtcgtggctatcatctaactctccatcagagaatacatactggtgaaaagccctatgaatgtaaggaatgtcagaagttctttcgtcgttactcagaacttatttcacatcagggtattcacattggagagaaaccttatgaatgtaaggaatgtgggaaggcatttaggctgttctcacagcttactcaacatcagagtattcattttggtgagaaaccctttaagtgtaaggaatgtgagaagacttttagactgctttcacaacttacccaacatcaaagtattcatactggtgaaaagccctatgactgtaaggaatgtggaaaggcctttagacttcattcatcactgattcaacatcagagaattcattctggtgagaaaccatacaaatgtaaggaatgtaaaaaggcatttagacaacattcacatcttacttaccatcagcgaattcataatgtaacttaataattattagaactcttcctttgcgaattttatgttgagcataggaagtacattctagaggaaaggtttttgaacgtgggaatcccttttgcttcatgctcacaactaagcataggaagttttatttaaaggaaagaatatgttaatgaacatatagaagcctttcatcacctttgaaaccatgttaaactttaggaaattcatcctagaaaagaactttattacaggactgaatgtggaaaagcttttgatcttacctattattatctccatattcttccatctgtgtatatacacacgaaggttgctagggaaccacttcattctgaaaatgtgtaaatgaaaggaaagtcatttagtctgcatttcctgtaggaactgtatttcagggcaaccagaagttaaggaggtaaagttcttctttattagaaaattccaggctaatgaatgcagaaagaataatagaaaattatattagaaaaactattgtgtaacacataatgaaataatggatctaggcatgattctctgtacaggttgacaccattcagtgaaggttgtgaactttatagtgaatagatgagactgacaacgtctgaacccactcatcatctcaacttcacaaaaagcaagagagtaaaaattacgtgcctcctaatgtgctacagtaagatatacacatcttgccaaaaatattgaacctgaatttaagcctcaagagccaactcccagtttagagaaaattcaaggaatggaagagtaaattacatgacacaaaaaggagcaattaaatctaaaataagggtaattctacaagaggaatcacctggtttcccaaccaataaaatggcattttaagaaataaggtggaactcctaggtattgacagacttgagacatcagtcaaatgcaatgaaacagtggtttttacttagatcatgagttgaacaaacatgtaaaagaagagatacttaacaataattgggagaatggaatattgacaatattagataatattaagaaactttgttatgtgtgataatagcattgtggttatgtaaaagtgtatttgttagagataatttctgaagtctatacacaggagatgatatatctggaatgtccttttgttcatacaaaagaaaaatgaggatgaataacaagtttggcaaaatgatggtaacctaagtcttggatacatggtttttatttgttttgtttttgctattctacttttgtgtatttaaaattttccatgatgttcttttaaagatcaaattatccatgaaattatagccagtttaaaatgaattattttaaaaaaaatttctggcgtgagccaccatgcccggctctcacttcatatgtttaaagaatgagtaaaagaaagcaattactactgctaaatgtgggaaataatggactagacctgtactaatatatggtagtcactagcaacctgttgagcacttgaaattgagttattgagcactgaaatgtggctagtccaaattcaaatggtgtttttttgtaaaacacaagattctgaagacttagttattttaaaaaagttaagtatctcaatttttcatattgagtacatattgaaataatattttagatatattggttcaaataaaatacattaaaatgaataacacttttttgtttttaaaattgttataggaaaatttatatatgtagctcacgtatttctattgtcagcgctggcataaacaataaaaagtagactggaaaaaaaaaaaataaaaaaaaatttggggcgctgggccggaaagtttttagaacatttgtggggcggggcggggagggacagggcaaggggtcagagaacggcagatggggggtcacaaaaaagccgggacggggtgaaaccagagtgggtggtctaaggcaggca

SEQ ID NO: 1060 - DNA, 376 bp, Homo sapiens
atttcactttgaagattgcgttctgatttgtagctttaagcgattagagaaaattgtgcaatattcccctctacctgtttgaaaataaacattcttaaaaggatgtaatttagataatgaattgctttctctgaaacttatcccttgggacacctcaaatctgattggttttcaaagcttgggggaaggaaattaattcctgtgataagtggttggctgaacagaatgtcttgaaaggttagcctgtagcattaggagaaatacctaatgtaaacgacgagttaatgggtgcagcacaccagcgtggcacatttatacatatgtgacaaacctgcacgttgtgcacatgtaccctagaacttaaagtataataata

SEQ ID NO: 1061 - DNA, 245 bp, Homo sapiens
tttaatccataaaggcatgcctgtattttgttgaatttatttcttgatacatgttattttaatttctattgtacacattaaaaagttatgtttttgattgttgctggtgtaaacatttgcatttgaattttttgcactgattttttgtccccaaattgtttgtgccatcaccaatataaaacttatttgtagatgtctttggattttcttgaagaaaataaaacagtcatgagtaattataagtt

SEQ ID NO: 1062 - DNA, 586 bp, Homo sapiens
tttaaaaatcccatgtttccctttataattaacaaaatccatgaattaaaatgggtctttgtgctaatctttagggcagcaagaaatgaggctcttgagaaatagtaccccattttgctatcaccttagatgttggagagggaaagagagggcgagagagctgaaagaaatccttcgcaagaaaacaaagtaagtggacagagtagttggcggggaacatctgggattataaacactgggggcaaagacaagaccttgtgaaatgcctgacatagtatctcacgaacctgatgaataaaaccatgatatctgggtgaccctggtgacaacgctgggaaaggtgagaggaaacagagagcgctgtgtttgagagtaatgttattggttctttaggaacgagaccgtgggctcttagtgacgctgtgggttcctgagttgtctgggagtacagggactgcagcctcgagtctgtccagctacgatcactttggaaggccttcggtgggatgcgggcagaaagctcccagtgcaaagggcgtgccacgaaaaccaccagccagaaacctgagctgggacaggtgcgctc

SEQ ID NO: 1063 - DNA, 467 bp, Homo sapiens
gtgagctgagatcgtaccactgcactccagcctgggcgatagagccagactgagtctcaaaaaaaaaaaaaaagttacctttttttggtaaggttgtacttcttagataatggtcattgtcactaccaacttgcctgcattgtaatagagtcctattcactttgctcccaaccccactacggagatgactgatgactagttgtatacacagtgggtgtgccctgagaggtctgttgccagcagtggtgatcgatcacggcctccccctgctggctgatgtgatggtccttggtcctcctctgaaggaggtagaaggggcacacggccaccgtgggaagtaggcagaaaagcctccctgggtgcagattctctgagaaaagaactttggcctcatagttaacttactccaaaagctttcgtgtgaaataatttataattttttatataaataaaaagattaaaatgtg

SEQ ID NO: 1064 - DNA, 296 bp, Homo sapiens
tagtaagtgctatacattcttcatttgtttgtttgaagacagggtatcagcactttgggaggccaaggtgggcagatcacttaaagccaggagactgagaccagcctggccaacatggcaaaaccaactctactaaaaatacaaaaattagctgggcatggtggtgcatgcctgtaatcccagctacttgggtggttgagacacaagaatcatttgaacctggaaggaagaggttgcagtgagctgagatcgtatcactgcactccagcctcagcaagagagcgagactctatctc

SEQ ID NO: 1065 - DNA, 1133 bp, Homo sapiens
aatgggcggcaaagcgccgcaggcacagagcctcctttcatctctgcagcaggctgagtttaaaaagcagattttctacacaatgtcgtacgcgagtctcagcagagctcaggccacgacctccagctgcctgcaagcctgcatcttcctctgggaggcttcccccctcaccctgcatcagggcccgggcttgaggggtgatggaggcaggttcccctgcagccggcggttctgggagcaggtgcccgaggcggaggccatggcctctgagcaggtggcagcttcgcccccaccagagcctgcagccctcacagcatcccacattgccccagcctctgcctgggccaatggctcctggtgtcattaaagactctgtttttacctcctctgggcctcgggagaccagcctggcaccagaggaggggctggcagagccccaggctccagtccacacccaccggccccaggtctggccatgggctgggccctggtgtgcagacagcagtggccactgctccagggcctttgcaccagcctgctgcaggtccaggcggtcatggggagtggagccgcagcggcctcttgttttccttcccctcttgggagacggctgctcctcctggctgtttccagaaagtgtgtttgttatttggctcctggaaacaccatctgatgaaacaggctctgttgggctggcctgccaggcggaggctgtgggcgcccaggagtctcaccacgaagcaggtggcagaggcccgatagccccaccctgcaggccgggacctggcacctaaacggggagatggaagaacatggaaaattccctaagagcaaattgatgctcagcttccgcgggcaccaacttgctgcggaatcctgctttgcagatcatcgttcctcgagcattcggacgcctcgggccccagaagttcaagaacaagaaagctctgtttcatgcagacacgctcacgcatgcacacatgctcacacatgcacttatacgtgcacacacacacacacaacacacacacacgcacactcacacaaccatggccatgtagccccagtctcagcatcatgtcctctatttagaaatattggctaaacacctaataaataactaaacagaaatg

SEQ ID NO: 1066 - DNA, 406 bp, Homo sapiens
atctccactattagggtgaaaaataaggagtcttctagaaaaggccttggggtgtgttatgtaagaaatactaagtcagttcactgtttccaggcttttcttacgaaagttaacagccacagctctttttggagcataaatgctgagcttttcctaaactctgaaacacttggcaacctctcagtcttgctaacagctattttttttttattttgttttcttttccaaatccctggcatactgctgaaatctggctgctgccgcccctggagagacgcccgtctgctgggggagtcaggctggggtacctgccagcgctcacgggctgtgccactccaggcaggctcaacaactacttcaaaacagaaagcggctgtaattcacaattcagcccactacaggcacc

SEQ ID NO: 1067 - DNA, 300 bp, Homo sapiens
cagtgatcaaatctaagagttttcgtggtggaatcataaggttattctagacataagattgtaccatcagcaaacaagaataatctgaccttctcttttccaatttggatgactttttttcttttccttacctgattttctctggctaagacttctagtacaatgttgaataggagtggtgaaaattagcatccttatctcattccagtttctaaagggaatgttttcaacatttctccattcagtgttatattggctgtgggtttgtcatatatggcaattattactttgagacacaat

SEQ ID NO: 1068 - DNA, 573 bp, Homo sapiens
gagccttctgctggaaactgtgcttctggcaggtagatgagagaagagagaaacttagaggatcttagagaatctgggtggcaggtatggtgaggaaatggtgacggtcacaggctatcggccagaaacagatcacatggctgcctctcattgcaagggagcttgggatataccgtctagctgagtgcccaggaggaaaagggacaggaggtagggtgagcagcccgacttccttaggcttcagcagtgaggagactcatccaggccacatgaaaggaggaggcacgcctcacctcccatgctcctcctcgtttgaaaattatgtgtgtcctggaccagtaccccagatgggagggtatagtggacccagatggaaagagaggatcaggagggcaaagccatctcatgccagggccatcctgaccctggctgactggaggagctacaggagccagcctgggaaccccttccagcaccaactgcaagactcatctgccagctaccactcccttgccccatgaaacttactcttgctttttatcagcagaggaaagtgggcatggggacaaaacc

SEQ ID NO: 1069 - DNA, 471 bp, Homo sapiens
cattaatataaaaatacatgtttttcgctttttccatgtactcgtagggtttcaagtatttggaaaaccaagaacatcaataacaaaacccaccctgtagcttgagtgtgaccctaaaagctgcttttaaccaggatgagtgatggaaaattttatccttagccctggttttggggggtgtgttttgttttgttttgaagaaaaccctgagtaaatcaaaagggctacagagatgtgtttgggtaacttaaccacgcttaatgactaggaaggcactcttctaaacagtctgacctgtgtttccactgttgcttatccatttatcaactggagcctttatgcacagccatgtgggttcctctggccttttatctgactcctaagtggaaacagtctccatgcatcttgcttcagttgaagggcatcttgcttcagttgaagggtggctctatggtctgttgccactctggc

SEQ ID NO: 1070 - DNA, 424 bp, Homo sapiens
gccagacttgagaggcagctgctcactctctctcacttgtcacactttcatccatacatttcctttatctctaagttttattttatgcatgaacgagtctaaaaccatcatatatcaattcaggtctgttatttctaagccctagttatgctcaacccttgtctgtggctgtaggtcgattatgaatctggttctgggcaccaaaagggcagagagaccacatgttgacatcccccttacccactctcaacaagaaacatcccaggttgagtataaaaatctttaagccaatctgtagagctgagcacatctgggtttgatgcaggctgaaagttgggcctagggtttctactccatgtgtctcctggttctgggacacaggctgaaggaggtagcaccagtggggacctgtggttctctgatg

SEQ ID NO: 1071 - DNA, 470 bp, Homo sapiens
gtaaaatgaccttttctctccagcatgcttcatatgatgacactaagtggtatgcattcccaaaaaactgatttaggtagatgtgggggacactcagggtggattcatgatgccaaaggataacagacaatggaaagcattttacaactgttcacagtaccagcaagtcaagcacgtcacctaacaaaggggctacatcacaagctcaaaacttccgataactttacattcccctaaggtgagagggtgtatttaaataacatcaatccaaccaaagccttgctccaacttccacatcaactattttccttgggcgaaacagagcattgcattgcattaagtgtatttacaaccaactgtctgtgtaaatataagagatgctaacatactagtaacagaacgaaattagccttgctgattttgccctgccttcccagttgcttagcaactgattcaaagtgaaaattaaa

SEQ ID NO: 1072 - DNA, 830 bp, Homo sapiens
aagcaggggagtgagaggacctaattgatattttcaaaaggttgctgtaattgcttcatatagactggactggagcaacaagagtgtaagcagatagactcattagtagaccattatatagcaactcagtcgagagaggaagttgactttggcttcaggtgggggcagtggggatattcagatatacaagatatatttttgagataaaagccattggactgggtgatggtttggatctggtgagtgaaggagaggaaggtgtgaagagtgattcccaagtctccagcttgagccataatgagaggtggtggaagacaggcggggaagcaggattagacttaacactatgcagacacccgtgaactaggtaagttgaatacacagcctgaaacttagggcaggtgtctgggttagggatgtacctttggaagtgctcaggattagaaagcatttgaaatcttgggaatggaagacatcacccgggagagacccttattttttagagtttggtaaatgagaaaaatgagtagtgtgacgacatagaaataggttacaggtttctcccatcctgtgagaaaccatgtgagttttggactagagttcaatgctgtttcagatttggggaaagcaacaggttaatgtgggaaaatcatgttgaggaagaaagtaatacattttattttcaacgttgtattggagactcttagaaatgattgagaaatgtggtggctcatgcctgtgatccaggctggaggattccctgaggccaggagtttgagaccagcctgggcaacatagcatgatcctgtctttacaaaaagtaaaaaaaa

SEQ ID NO: 1073 - DNA, 382 bp, Homo sapiens
taagatgccctacctgataccagactctctgggttcaaatccaggttgtcttccttaccagctctgtaactcttgggcaagccacttgacctttctatctgtagtttccacaattatcaaatgaagatgatcattatagtgcttacctcacttagccatcaagagcatagtaagtgcttgataatcttgtctgttatctatcttgtctggcccacattcatgcctttgcctgtggcttgagccacttgtatacttccctaatcccagaagaaccaacatagtcatgagccctgaggctgagagctcactcttctgattttcttcagtgtccagaataatggtttgcacagagcaagtgctcatttagtacttgcattgaatt

SEQ ID NO: 1074 - DNA, 313 bp, Homo sapiens
gaaaactttaagatacagaagagaagggatggttgatgaaaccagaaccctgagaaagcagacagggttagaccctcaaaataaatagaggacttgcccattacatgaaggtcacctcttccattaacaagaaggaaggcaggaaggatggatgtgaagaaagttaagcttgccggttaagtgctgacagagagttaaaaaggcatctaatttctctgtgaaatgggaagtgatgtcacttgataagggctaagggagggaaagccagggcaggaggggagaaggaggagtaacgtttttggagcatccatta

SEQ ID NO: 1075 - DNA, 375 bp, Homo sapiens
atgcagattaaacacaaaaagtcccagtccctttggaaagtaacttagcattctggtaattacatttgacctgtgtgctgtaaaaggttttggttttggttttagttttaatgtagatatttaacagagctgaatttctgtgccttttatgtgtgagctgctgcactgcctcctctccttgtcctaacagggactcacacacagcattcccctcacacagaccccagaaaatcccatcggtgtccttactggggccaaacactgagcactggttcctagaacctgaggcatgaaataaaccaattcattgttttctgcataatttcacatgcttttaaaataataagtgataatggatacattaccatgttgcct

SEQ ID NO: 1076 - DNA, 412 bp, Homo sapiens
cttacatatgtcattctttttcaattttaaagaaatttttgggccgggcaccgtggctcacgccttcaatcccagcactttgggaggcagaggcaggtggatcacgaggtcaggagttcaagaccagcctggccaagatggtgaaatcccgtctctactaaaaatgccaaaattagctgggcatggtggtgggcgcctgtaatcccagctactcaggaggctgaggcagagaactgcttgaacccaggaggtggaggtcacagtgaaccgagatcgtgctactgcactccagcctggtcaacagagcaagactccgtctcaaaagaaatttttaatagactatttttagaacagttttaagttcacagcaaaattagtggaaagtatagactttccacgaattatcttccac

SEQ ID NO: 1077 - DNA, 440 bp, Homo sapiens
aaaactagaacctttctttgattcatgtaggatattctgactaagtcagagagatgctggtgaatgctttccaagatttcttttattataaagtgaatggaaaggacatttaataatgctatacctgcctgaaaaaaatgccagctttcattaagtcagtggcaattaaatgcaacacttggcaaataaattgaacaaagcatctggctagcctgtaagtatgaatcatcttcaatggaagtaccaaattatagcaaaaaaaaataaagggatataaaaaggaaaataaaattcagacatgattagggccatgagtaaaaataatccaagttgatatgtggcaacttgtaatgcagcataattttagaaaattatttagtgaatgtataaatgtgacatgcctgaaaaatgttaattaaactggtttacgcaatggtgga

SEQ ID NO: 1078 - DNA, 338 bp, Homo sapiens
gtcgtcagaggccacactccaggcctcagggaccccaccctgagaatcagcatctgtgagcagggagcagtcagtcagaaccacacacaaaaaggaaactctcaagtggcactttcccccggagtgaaccctaagcagaggcaggagaggacaacatgagggatgcggacagagtgcgctttctctggaaaggaggagtttataccactgctgggagctttaaaaaatggaaaccctgcctgtgatatcagcactttgaaaggccgaggcaggagtatcacttgagcccatgagtttaagaccagcctgggcaatatagtgagaccttgtctgtatta

SEQ ID NO: 1079 - DNA, 447 bp, Homo sapiens
gaaaaaatgttcacttgctgagtagcagatcacataatattgaaaagatcatatgtgaaaaacataattttgaaaaattatcttgcacataatacgtaaatattcagtcttccaccacaccatacgtacatttatatttataatgataggcattaatcacagaaacttctattaagaaaaggcactcgcataagcaccttgacttcctgcagtggtccagtgtcttgtccttacactggaggactcacagtttccccagcttctaccttcagggaaactgtatactgcttctggacctttattatttgcacgatcatgcccgtgctgttgtttacgacacatactagcaatgagccattcagcctatttatttattcagggcccaaaatctgaacaataacaacttaaaaaaacttattgtaacccaagcaagatgaagactagaat

SEQ ID NO: 1080 - DNA, 446 bp, Homo sapiens
ttctctgtgttttggatttattttttgtggggatgtaaaattgggatgatgttaacatgtcatatggttgtttcaaagaccaaatgagtgaactgggtttatagtaaattcttataattttgtacttgtacacaattaattttctcttcaatgccattttctttaagtaagttagttgaattcagtcacagtattaccatatattataaatagctaaaattcatgattagacttaggtggatgcaaagaatgtatttgtgtgctttgtgaaacttgtaatggcaactttgagcaaaaggagcaaaatgtataaacaaactcatcttcattatagtaagtgccaaatacatctggaacacatcagcaaattagtgtttaacatatttcagtgaactccagcattttatatctgtatttctacagtcagagggctttctcttgggtac

SEQ ID NO: 1081 - DNA, 341 bp, Homo sapiens
aaggaagtcttaccccggtgcagcctctgccacccagctctttgttcatgcaggtgccctttttccttcttctggggtttgcctgtgtgactttatgccaggccctaccctaggctggctaatcagagtggccggggaggactgggggctggaagacaaacaggaacaactcgcaactcacagaaccatccgccccgtggatcccggagtcccacagagagggagcacgtgtactgggcttcccagcactcccgccgcctgggccctgtcagccatcgcggcatttgatgtccaggttgatcacagtcccatgctgtatgcaataaataattctgttttct

SEQ ID NO: 1082 - DNA, 2296 bp, Homo sapiens
gaaagaaaacccacaatccagtgtcaagaaagaagtcaacttttcttcccctacttccctgcatttctcctctgtgctcactgccacacgcagctcagcctggacggcacagccagatgcgagatgcgtctctgctgatctgagtctgcctgcagcatggacctgggtcttccctgaagcatctccagggctggagggacgactgccatgcaccgagggctcatccatccgcagagcagggcagtgggaggagacgccatgacccccatcgtcacagtcctgatctgtctcgggctgagtctgggccccaggacccacgtgcagacagggaccatccccaagcccaccctgtgggctgagccagactctgtgatcacccaggggagtcccgtcaccctcagttgtcaggggagccttgaagcccaggagtaccgtctatatagggagaaaaaatcagcatcttggattacacggatacgaccagagcttgtgaagaacggccagttccacatcccatccatcacctgggaacacacagggcgatatggctgtcagtattacagccgcgctcggtggtctgagctcagtgaccccctggtgctggtgatgacaggagcctacccaaaacccaccctctcagcccagcccagccctgtggtgacctcaggaggaagggtgaccctccagtgtgagtcacaggtggcatttggcggcttcattctgtgtaaggaaggagaagatgaacacccacaatgcctgaactcccagccccatgcccgtgggtcgtcccgcgccatcttctccgtgggccccgtgagcccgaatcgcaggtggtcgcacaggtgctatggttatgacttgaactctccctatgtgtggtcttcacccagtgatctcctggagctcctggtcccaggtgtttctaagaagccatcactctcagtgcagccgggtcctgtcgtggcccctggggaaagcctgaccctccagtgtgtctctgatgtcggctatgacagatttgttctgtacaaggagggggaacgtgaccttcgccagctccctggccggcagccccaggctgggctctcccaggccaacttcaccctgggccctgtgagccgctcctacgggggccagtacagatgctacggtgcatacaacctctcctccgagtggtcggcccccagcgaccccctggacatcctgatcacaggacagatccatggcacacccttcatctcagtgcagccaggccccacagtggcctcaggagagaacgtgaccctgctgtgtcagtcatggcggcagttccacactttccttctgaccaaggcgggagcagctgatgccccactccgtctaagatcaatacacgaatatcctaagtaccaggctgaattccccatgagtcctgtgacctcagcccacgcggggacctacaggtgctacggctcactcaactccgacccctacctgctgtctcaccccagtgagcccctggagctcgtggtctcaggaccctccatgggttccagccccccacccaccggtcccatctccacacctgcaggccctgaggaccagcccctcacccccactgggtcggatccccaaagtggtctgggaaggcacctgggggttgtgatcggcatcttggtggccgtcgtcctactgctcctcctcctcctcctcctcttcctcatcctccgacatcgacgtcagggcaaacactggacatcgacccagagaaaggctgatttccaacatcctgcaggggctgtggggccagagcccacagacagaggcctgcagtggaggtccagcccagctgccgacgcccaggaagaaaacctctatgctgccgtgaaggacacacagcctgaagatggggtggagatggacactcgggctgctgcatctgaagccccccaggatgtgacctacgcccagctgcacagcttgaccctcagacggaaggcaactgagcctcctccatcccaggaaagggaacctccagctgagcccagcatctacgccaccctggccatccactagcccggagggtacgcagactccacactcagtagaaggagactcaggactgctgaaggcacgggagctgcccccagtggacaccaatgaaccccagtcagcctggacccctaacaaagaccatgaggagatgctgggaactttgggactcacttgattctgcagtcgaaataactaatatccctacattttttaattaaagcaacagacttctcaataaaagcaggtcgtctcgttccaatct

SEQ ID NO: 1083 - DNA, 1160 bp, Homo sapiens
  misc_feature (108)..(108): n is a, c, g, or t
ccttcatctcagtgcagccaggccccacagtggcctcaggagagaacgtgaccctgctgtgtcagtcatggcggcagttccacactttccttctgaccaaggcggganaggctgatgccccacagtggcctcaggagagaacgtgaccctgctgtgtcagtcatggcggcagttccacactttccttctgaccaaggcgggagcagctgatgccccactccgtctaagatcaatacacgaatatcctaagtaccaggctgaattccccatgagtcctgtgacctcagcccacgcggggacctacaggtgctacggctcactcaactccgacccctacctgctgtctcaccccagtgagcccctggagctcgtggtctcaggaccctccatgggttccagccccccacccaccggtcccatctccacacctgcaggccctgaggaccagcccctcacccccactgggtcggatccccaaagtggtctgggaaggcacctgggggttgtgatcggcatcttggtggccgtcgtcctactgctcctcctcctcctcctcctcttcctcatcctccgacatcgacgtcagggcaaacactggacatcgacccagagaaaggctgatttccaacatcctgcaggggctgtggggccagagcccacagacagaggcctgcagtggaggtccagcccagctgccgacgcccaggaagaaaacctctatgctgccgtgaaggacacacagcctgaagatggggtggagatggacactcgggctgctgcatctgaagccccccaggatgtgacctacgcccagctgcacagcttgaccctcagacggaaggcaactgagcctcctccatcccaggaaagggaacctccagctgagcccagcatctacgccaccctggccatccactagcccggagggtacgcagactccacactcagtagaaggagactcaggactgctgaaggcacgggagctgcccccagtggacaccaatgaaccccagtcagcctggacccctaacaaagaccatgaggagatgctgggaactttgggactcacttgattctgcagtcgaaataactaatatccctacattttttaattaaagcaacagacttctcaataaaagcaggtcgtctcgttccaatct

SEQ ID NO: 1084 - DNA, 497 bp, Homo sapiens
ctgcagccaacacactgcagagttcctccctgtggtggttacaactgttatttctgtttcatgccagtccaggagaaagcaaagaggaaagtggatgagctataatccgttcacctgaataggcagtgccaggatgtcccccccagcttgcctctcacccgccccgctgctgcccagctgatttgtttgaagtcctctttgatatctatgagagcaccgtggaaggaagaagaagggaggcgaccggagagctatggcctctgtgcagatttttgagttagattaaaattagtaccacctgattaggagcctacctggtgaggaaaaaagccttcttttcaaagtacaaaaaaaagcgatgtgtaccaaggagaaaaccagcagagaaagcttggtggaagaagtgatgttcttgtggaatgtgccagcagcttctccttccagaatgctgacaccagatgaatctttggttagaattaagcctacccctttgtttt

SEQ ID NO: 1085 - DNA, 400 bp, Homo sapiens
taaaactgtctctttgcagatggcatgattttacatacagaaaaccctaaagattccctccagaaaaaaactgttagaagtaataagcaaatttggtaaaacttaagtatacaaaatcaacattaaaaaattagttgtttctatacactaacaaactctctgaaaaagaaattaagaaaaccatcctatttacaatagtatcaaaagaataaactaagaaaatatttaaccaaggaagtaaaagacctataattgaaaactatttgaaaaatgaattgatgaatttgaagtagacacaaaaaacgtgaaagatatctcatgttcattaattagaagaaataatgttgttaaaatgtccatactacccaaaggaacttacaaattcaatgcaatctctatc

SEQ ID NO: 1086 - DNA, 424 bp, Homo sapiens
gtggctgcctcccacatgaagtcctgtctgatgcactccccaggagtctccctctcacaattcccttggactgtgtgcctctggggcagtgccacacctgtcctgccccgcagtgggctctatatttgagtttcctcatccaccgacaaagcacctggcgtgagtgagattctgctaggctggggattctcaggtgagctgaagtccggagttcaagaccagcctggtgaaaccctgtttctattaaaaatacaaaaatcagtggggcgtggtggcacgtgcctgtaaccccagctactcgagaggctgaggcagaattgcttgaacccaggaggcggaggttgcagtgagccaagatcacgccactgcactccagcctgggtgacagagtgagactccatctcaaaaaaagaaaaaaaaagac

SEQ ID NO: 1087 - DNA, 362 bp, Homo sapiens
aaaacctctttctttctcctttttcccataccaccactgatgattccaaggaatttcatatgcatataaatggagaaaacactagtgtgagcctaaggactaggaatgatgaggagtctgtatttctgcaggaaacgttctttcaatgtgcacagtgactaaacttttccattgaaaaaattttccacccggataaatctgccacactttatgagcaaatgcaaaacaggatgatagacactgaacagcctagagacagcctgacctgccttttattgccttcaaggagccaatttgagctctgagcaatgaaatgagtcagtgcttgagaaatgtagaaacaccaggtgaaacttcagaag

SEQ ID NO: 1088 - DNA, 517 bp, Homo sapiens
gttcgtaggtccacagacaggattctctcatgctcaagtaaccctaaaattaaatgcagaattctacaagtatggatctatgcaagatggaaatgtgaagatgcccagagcttccatcagatgtctgaaagggtgcagggcttcaaatgtagcaccacatggatcacggtactaaaatagtatctggatttttatgcttctttgtagtggagcccctgccatgctgagcagagttccagagttaggtgttgaaccatgtccttgccctcctgccaatgagcatgtgtggcatgctcagaggtgctcagggaaccctcagtccctctggtgaagtacaggactgagctgcattctactgactttggtagactcaaggaatctgaattctttctttatgaacccaaaagaaactccagtacacggaaccaccaccttccctctgtccatcactccctcattctctggctctccccaccaggctagacccaaagtcccctgctatcatcccttcttcctg

SEQ ID NO: 1089 - DNA, 679 bp, Homo sapiens
cagtctttagggtacagtagaaccacatgtcatacttaataaaatacagatgttgggcctctccccaaacacctctaaattagagtcttcagtggtagagttcaagcagtgtaaacttttttttcccctcaccaaagttccttaggcaatcctgatgcttatcagaggttgaaaacgactagggtgagattttaggaaagtaaattcaactatagaaaacctcagaatttgtagatttgggtcagtttaaatatttattgtgtgtaaatgttctcttcccaagcaaggttatgttgtaatctcgacatacttagaacaactgccattatatatgtgtttgtatttattcagaatgaaaaaaactaattgactgattgctttcctttatgagccctggggaaaccacttaattttctgcttaacctgtttgagtttccacattcgtgaaattgagttaaatgatgtctcactcattacctcaaaagttgttgtcaggctcaaatgagccaataggctgaatttggaggaccttgattataggctaatattaagttttattaccctgctgcttgtttcttcaaaactatctttgtgtttcctttaaactctccattgccatcagttcttggtttttgatgcttatatatgatattaaatagacttttctcttgctggctta

SEQ ID NO: 1090 - DNA, 350 bp, Homo sapiens
ggacatacaacacagtagttgtgctagagtgatgcataccttttgttacagcattccttagaactgtggcttcctgccctggttagcgatggagtactaataacctcaagcaaaactggcataaaggtttattttgattgctagctctgaacaattgggggtggatgcctggagcactttgggaagcattcagaggttatgaatgatctcaataagaaatagggccaggtgcgatgtaacgcctgtaatccccgcactttggggggccaaggtgggtggatcatttgaggtcaggagttcgaaaccagcctgggacccaacgtggcgaaaccccatctctactaaaaata

SEQ ID NO: 1091 - DNA, 352 bp, Homo sapiens
ggtcgacctaacctgaagcaggtgatgggacaggggtcatcgaatataatgaaagtgccacaaaggtagagtctgggtatattttatttatgcaggtagagtgacttgtccagatcccttcaggttaggataaaaggtataaacaagctgccacctggtgagatggcaggcttccctacaaaaaacaagaaagtaatattctgccatttcctaagaacaagcagcaatgtcctggcttcaaatggtctctagaagtccatgcaccaccgtgcttccactggggcggttgtatcacccaggagcattaggaattgtatggaggtggggtggggcactttctgcttgtcacagc

SEQ ID NO: 1092 - DNA, 416 bp, Homo sapiens
actgattgtttttccacctcctaggagataggtaagtaaagcccctgtgttctaaccaaggaaaccacaaccatagctagtgatgcatcttgaaccacacatcttgaactgtgtgtggtggccaactagtcctagcacttggaaatctgacttccaaacaaaccattatcagactatacttctttacctctagtggagtggatgctgaatgccagtctttcctggaagatacaatcaagaaaaccctaataaaatatcattgttaatttcctgaagaataatttgggaatatttctaagtagataattaacactatacatttcttttcccaaaaataatagtgtataagaacaattcctttaaatctgtttctgatagaagcaattgaatggaccccagatcaggaagtgcgtgta

SEQ ID NO: 1093 - DNA, 328 bp, Homo sapiens
aaaacctaagttgcttttttggttctttgtttgtttgttttgttttgttttttagcaggtaaggccaggtgcagtggcttatgctgaggtgggaggattgcttgagcccaggagtttgagaacagcctgggcaatatagtgggaccctgcctctacaaaacattaaaaaattagctgcgcaaggtgacatgtgcctgtaattccagctactcaggaggctgagatgggaagattgcatttatcccaggaggttgaggctgcactgagccatgaacatgccactgcacttcagcctgggaacagagcaagtccctccttcaccccacca

SEQ ID NO: 1094 - DNA, 182 bp, Homo sapiens
aaagtctgtaattaaagagggaaatgccaattgtggtttaaataaggtgtgactctgggtaaatgaagtcagttttcttgttgtccttaaaagctgtttcataagtttatttccaaagagcatttccaaaaacatttgtagcacagccaatactgatggaaggaagggtgtggcttttttag

SEQ ID NO: 1095 - DNA, 997 bp, Homo sapiens
atttgattggccagaagtctagggtggtaaaaaggttattaaaaacaactcccattccccccaagtcagcttctttctgtcatttttctccttgtagtattcataattcctaaagaatttattcacaaggtattttattgggcagatgccttaaatgtgccaaatgaattattttggttacagactactcaggtacatctaaagaaaattgcccatattcataggtgactcttgtttagcttttttgaaagggaaaggaggatgtgagtatctctgtatcatctcattttatttaatagcagcaagaatattatagtttgtgtttagtttagcttatgattttcatgaatgaaaggaacactgggatcaggccaactatcttactaaaatgcattcctttttaatttagatatcttaaaagcatttatgtgaaaaataactgaacttcattttgacatatcctaaaatgagcagttgaacctcatgcaaaactttctcattctttattagaatagaattttaaaacaaaaaaaccattcaaacagaatatgggcttaaacatcaaggattgaggtgaaaggcctattttttttttaattaatatttttatcttattacccctgccatatggtagctgtttaactttatgaaagccttcgagccttcaactttctaaaactgggaacggtgttgcttgtcatggttctttttgaggatagtgtctatagaggtatgtattaggtgcaattgtcccagttactcttgcaccaacctaatagaataggggctacattcagtattaagtgtcttttttatttttttttaaggttgtgaagaggttgtggtatttgttttataaaatctggtcagtctgaagtttgagacaatatttttaaaatttagctatgagaatcttaaacatgaggtgaggcagggagaaaagatgtaatttgactgagttagtgttgttactcatcacaagtcacataatctattg

SEQ ID NO: 1096 - DNA, 997 bp, Homo sapiens
atttgattggccagaagtctagggtggtaaaaaggttattaaaaacaactcccattccccccaagtcagcttgtgtgtgggaggggtggggggtggtgtgttcgggggggggttgtgggtgggggtggggggggttttgggggggatgccttaaatgtgccaaatgaattattttggttacagactactcaggtacatctaaagaaaattgcccatattcataggtgactcttgtttagcttttttgaaagggaaaggaggatgtgagtatctctgtatcatctcattttatttaatagcagcaagaatattatagtttgtgtttagtttagcttatgattttcatgaatgaaaggaacactgggatcaggccaactatcttactaaaatgcattcctttttaatttagatatcttaaaagcatttatgtgaaaaataactgaacttcattttgacatatcctaaaatgagcagttgaacctcatgcaaaactttctcattctttattagaatagaattttaaaacaaaaaaaccattcaaacagaatatgggcttaaacatcaaggattgaggtgaaaggcctattttttttttaattaatatttttatcttattacccctgccatatggtagctgtttaactttatgaaagccttcgagccttcaactttctaaaactgggaacggtgttgcttgtcatggttctttttgaggatagtgtctatagaggtatgtattaggtgcaattgtcccagttactcttgcaccaacctaatagaataggggctacattcagtattaagtgtcttttttatttttttttaaggttgtgaagaggttgtggtatttgttttataaaatctggtcagtctgaagtttgagacaatatttttaaaatttagctatgagaatcttaaacatgaggtgaggcagggagaaaagatgtaatttgactgagttagtgttgttactcatcacaagtcacataatctattg

SEQ ID NO: 1097 - DNA, 294 bp, Homo sapiens
aactccatcttaaaaaaaacaactactgggatggagttttctctacaggagggttgctgaactgtctggctgtacacctggcattaacagtgaggaccacagggagaataaagccaacacaaaaccaaacaatcacagctgaaatacgcataaaggccatgacggatgatagctctgtttgagaacctagatccagttcttttctggctatttgatttcataggtgtcttgggtcagggcccttagaaacagagcctgtaagacagagccaatgaacaggacttagtgagggag

SEQ ID NO: 1098 - DNA, 325 bp, Homo sapiens
aaagtccctgataatgtgttaatagatagctaatagtttagctttcttaaatcatattatgttttactcagttaaattagccagagttagcaaccttttctgtaatgggaaaaatatagtaaatatttttggctttgtgggccatggagtctgttgcaactaatcaactctgccattgtcatgtgaaagcagccgtagacagtatgtaaatgtgtgggcatgaatgtgttccaatgaaactatttacaaaaataggcatctagccagggccatagtttacctacccctaaattatacatttgaattttattttatttgtttttgt

SEQ ID NO: 1099 - DNA, 635 bp, Homo sapiens
gtccacacggcttttttcacatcgccattcgttggctttctctgctggggctgcttaaattcagcaaaggaaaaaaaacaaaaacaaaaaaacagaacagacactggacgtgagaaatctgaaactggagcatctatgttgttccaaagggtggatctccagagatctccccaccaagaccgcagtccccaccacccatctgtcatgtcagtcgagcagactgacactaagtaagtacgttgaaaatgagctatggatctgggaggacctgggtccttgtgttggttcaagactttctttagacaattcacttcactctggtaacctcagtttcctcaacagtcaaacaaggacaatgatctcaatcatataagagtaaagacatagtatctacgcagggcccggcatatcacttggtatagagtgctgagaaagactatttttgagacgggcccttcctctgttgcccaggctgtagtgcagtggcacaatcatgacttactgcagcctcaacctcctgggctcaggtgatcctcccacctcagcctcctgaggctgggaccacaggcctgcgatccttggttaagttttttattttttgtagcaatgggatttcactacattgcccaggctgg

SEQ ID NO: 1100 - DNA, 412 bp, Homo sapiens
cacttttttatagagatgaggtcttgctttgttgcccaggttgatctcgaattcctgggctcgagcaatcctcctgcctcggcctcccaaagtgctgagattataggtatgagccacctcacctggccttgaatgtgtctctttatggatgaccaggctgtaatatcctactctgcttgcctgcattgacactgatggggcctcagcaagttatgatttacagtgtatgttttgcagatactgttttagctggggcaggaaattcagatagacagaattctgtcctgatcatttcaggcttgctctgtttggctctgttagacttcttggctgaaaataacagagaatcaaagattttggtctcagggatgggaaaaacagggctgcaacatagatttgttaagccattaag

SEQ ID NO: 1101 - DNA, 357 bp, Homo sapiens
attttgaggaatggaaccaacatcagccattaggcctaggaaggccaagatcctgggatggcatcccaaggctcctactttcctcctcacatcgtagcctcaactcatgaccacttatgttgatttggacttctttagttgctctcacttcttccccgtgtcttgatgctcactacctctgtgctgccgtggcacccagcctctgtgccaggctgttgctgtggtctttttgctgcctgtctcttccctcttgcccatctggcctctcctctaggcttccctccattctgccatctataatttgtaatgaaaatttaaccaggcacagtggcacatgcctgtaatcccagctactca

SEQ ID NO: 1102 - DNA, 422 bp, Homo sapiens
agcatttgtggaggctgaggtaggaggactgcttgagcctgggagctcgagaccagcctaggcaacatagtgagaccccatatccacaaaaaatttaaaaaaggagtttgtcttcctgtagtagcagacttgagaggttgaggtggcagtatcacttgagcctgggagttcaaggctaaagtgagctgattgagccattgcactccagcctgagcaacagagagatacgctgtctcaaaggaaatacaaattaaaaaaccagccgggcatgctggcgtgtgcctgtagtctcagctacttgggacactgaagtgggaggatcgcttgagcccaggagttcaaggctgcagtgagctatgattgtgccactgcagtccagcctgggcgacagagaaagaccctgtctcttaaaaaaaaaaaaa

SEQ ID NO: 1103 - DNA, 425 bp, Homo sapiens
atgcacccattccaagttcctccacccacaccccatccccttcctcctgacccccaccgctgcaggagcagagcaccatgggtagtcagggcaacactgggtgcctgccactccacagtggacgataagagccctttgaaatggtgttggcatttggtgtctggtacacacagcgtccccacccaggaatctaggggcacgcagcctatggctcacaggtgctcaggactggcagccgcctaggcgggaaggatccggcggccctctgcctagggtctgatgtcaggtgtcatccgtcagagcagagctgcagactggcagcccctcgcagatctctgcctctgtctcctgcggcatgcaaccataatacgatccaaaatccgcctcaattcattgatggcatttaatcattagcagatttcact

SEQ ID NO: 1104 - DNA, 532 bp, Homo sapiens
ctgcttcctcctcacagcaagccgtctcatctcagaggcttgccttcatatggcatttcctcatttcctccccagtctggctacagcctcacctaactcactggtactgctcttgtccaggtcaccaatgaccttccaattgctaaatccaatggtttgctctcttatcttaccagatcccctccattctacacagtaaactgccacttctcagaggattttcttctctcaggtactgtgacactactctcctggttttccttcttcctctttagccaatcctgtctcctttgctgcctcctccagaatcacaagctctaaagcttggaattccttggggtttggtgctgtgttctcttctttttttcccatccacactggaattctcttcctaggtgatgtcatgcaaactcatggctataaatattatcgatactcatacctgtaatcccagcattttgggaggctgaggtggaagtattgcttgagcccaggagcttgagaccagcctggacaacacagtgagacttcg

SEQ ID NO: 1105 - DNA, 348 bp, Homo sapiens
ttttttttcttggttagtctagctaatggtctgttgattttttttttttcaaaaaagaatctcttagttttgttgaaatttttcttttatttttctagtctgtattccatttattttggctctgatctttgttctttccttccttctggtcactttcagattagcttgttcttctttttattgttccttgaggtgtaacattagattgtttattcatgatatttcttctttcttgatataggcatttattgctataaatttccccctttctgctaattttgctgcatcccataagttttggtatgctgtgtttccatttttctttgtctgaaggcattttaaaatttc

SEQ ID NO: 1106 - DNA, 403 bp, Homo sapiens
gcaggaaagatttggtggtgtacacaagttttctctaaattttctttagtttaaattataaatatgaaatatgttcagggtaaatattcaaaattctgaaatttaaagtcactgctttaagatagatctgggccaggcatgcctataatcctagcactttgggaggccgaggcaggcagatcacctgacgtcaggagttcgagaacagcctgggcaacatggtgagaccaccgtctctacaaaaatacaaaaattagcccagcctggtggcacatgcctgtaatcccagctacttgggaagctgaggcaggagaatcgcttgaacctgggaggcagaggttgcagtgagctgagatctcaccactgcactcttgcctgggtggcagagcaagaatccatctca

SEQ ID NO: 1107 - DNA, 302 bp, Homo sapiens
tcctgccagggccctggcaggagcgtgacaaatatttgttgtggaattaggttcttaagcgatgacgctctgcccagggatcccagggcagctcggcaagtgggcgtgcctcagcaggtgccagttgtccttctgttcccaggaaggggctcttgggttcctaatcagacggcacatggccgggagcagtggctcacgcctgtaatcccagcactttgggaggccgaggcgggcggatcacctgaggtcaggagttcgagaggaacctgtccaacatagagaaaccccatctctactgaaaa

SEQ ID NO: 1108 - DNA, 560 bp, Homo sapiens
ggcttcccccaaaccccttctctgaagtacttgtacctctctgtgtttctacagcaactccctctatgaaaatagccttttaaataacctcctcattcaacctcatgaggttcccatgaagtatgggtgaaggaggaattattatcctctatacacttaacaaaagctcaggagaggaacaccacctatcaaaggtcacgcagcaaagagcagcatgttatgccgagcttcgagcctctcaacagcttccactgtgccagattgggaggcagttcagtggcaacgtggcaaagaatgaagttggtgtgggagacaaattctctggtgaatgagaaatttgagtccccggggtagatagggcagctaagcaacaatgaaagaagcactggcccatgccccaagacctaaaaaccaccgggccaggcctttacaatatcacctacaaaacctctccttaggagacagacaacaggatttttattttttatttattattattattattattttgagacagagttttgcttttgttgcccaggttggagtgcaatggcgcaatc

SEQ ID NO: 1109 - DNA, 720 bp, Homo sapiens
cagtgctgggattgcaggcgtgagccactgtgcctgacccaagatattgcttgcttgataccatgttgaaaattttagatgttttgagttaagtaacattattaaaattaatttcacctctttttactttttaaaaaatacctactaggccgagtgcagttactcatgcctgtaatcctagcactttgggaggccaaggtgggaagattgcatgaagccaggagtccgagaccagcctggtcaacatagtgagaccccatccttaaaaaataaaaacattttttaagtgactgggcatagtggggtgtgcctgtagtcctagctcctggagaggctgaagtgggaggtttgcttgagcccaggagttcaaggctgtagtgagctgtgatggtgccactgcaatccaacctgggtgaaggagggagaccctgtctcttaaaaaaaaaaaatgcctgctagacaatttacagttacatatgtggcttgcatttgtgattcacattatatatttctgttgaacagtactgcctgcacagttggccaggtatggtggctcacacctataattgcagcactttcagaggttaaggagggaggattacttgagcccaggagttacagaccagcccgggcaacaaagtgagaccccatctctacaaaaaaataaaataattagccaggtgtcgtgatacaggcctgtagtcccagctacttgggagg

SEQ ID NO: 1110 - DNA, 544 bp, Homo sapiens
ctattatacaatccacatgtggctgttgaacacttataatgtcgctagtgtgaattcacatgtgatgtgtgaaaaaacacaaaccagattttgaaacctggtatgaaaaacaaaaataatgtaatgtatttatatggatccaaaatgtaatatatatatggatccaaatatatgtatatatatccaaaatatatatccaaaataatgtaatatattgctatatatatatatgtacacacacacatacatatatggatccagttttatactcattattttttctgggtttgtttcacagtgtgtttttgtatgtatttctatcaacttaactaaattagttttctaagtgtcatcatgaatagcataacctgccacgtttatgtaaaacgtgagaaatgtctaaatgaccaacatatataggtaaaatgtttaagctgagagccttatttcaagtctacgttaaatgattacaggcatatatatatatgtgtatacacacacacacacacacacacacacacacacgcatacatatatatagcaa

SEQ ID NO: 1111 - DNA, 578 bp, Homo sapiens
acaccacctgagtccactacaaccattgtgataaaccacagcttgctggtaagctagttttcacttctcattagttgttaatcacttgcttaatatttgagactgcctacaattagtgaaacccccatataagacttatgatgctttcagtatattttttatttacaaatacattaaattcacagcaatgagcagggaggaatagcaaaagacataagatacttacgcatacctgtttcggccttttgactgcagatccactcctgactcagttacgctgttagcagcccagctcttggatataggtcaagctgaccttgaatggtttggtggggaaggtggtaggatttgcagaatggaaactttagaactcaattatgatccatgggttcattaagaattacagtattgtttttggggtgtgtgtttttacaagactggagaagtccagcaaaatgagtgttattttaggtgatatagttggaaaagaaaaaggaaaacgattgttctgtttaccatgtcagttcatttcatagcacagttgaagaccacgtgcagtcttttctattgtgtacaca

SEQ ID NO: 1112 - DNA, 407 bp, Homo sapiens
gttccaggagtacagtagacactcaataaagtatgggcttgttggggctcagaaaacaataccccaaaatgaagacctcagaagtagtttcataagcaaaactttttctctgatcttctcctgccctcctgtctctcaatcccattctttcccaaagctagccatagaaactagaatcactcttccccaaggtgggtcatagaaaccagaactctcattcccagagctagccataaaacctaaaatatgactctaagtttccttccacctttctgtgtaaaaactggccataaataaattacctgagctgtgtgtggtggcctcacacttataaacccagcagtctttgggaggcaaaggtgggaggatcatttgagctcaggagtttgaaagcagcgttgacaaca

SEQ ID NO: 1113 - DNA, 2174 bp, Homo sapiens
tcctcagttctgcatttctgcagagacagaaagaaacgcagctcttgactgcttttttgtaaacattactgtaagagttgtgataactttttattctactatgtatatgtatggaatagtattaataaatgaactagggaaggatgtaataaattagacatctcttcattttagagagaagatggaaacaacattgcttttcttttctcaaataaatatgtgtgaatcaaaagaaaaaacttttttcaagttaatacatggttcaggaaaagaagaaacaagcaaagaagccaaaatcagagctaaggaaaaaagaaatagactaagtcttcttgtgcagaaacctgagtttcatgaagacacccgctccagtagatctgggcacttggccaaagaaacaagagtctcccctgaagaggcagtgaaatggggtgaatcatttgacaaactgctttcccatagagatggactagaggcttttaccagatttcttaaaactgaattcagtgaagaaaatattgaattttggatagcctgtgaagatttcaagaaaagcaagggacctcaacaaattcaccttaaagcaaaagcaatatatgagaaatttatacagactgatgccccaaaagaggttaaccttgattttcacacaaaagaagtcattacaaacagcatcactcaacctaccctccacagttttgatgctgcacaaagcagagtgtatcagctcatggaacaagacagttatacacgttttctgaaatctgacatctatttagacttgatggaaggaagacctcagagaccaacaaatcttaggagacgatcacgctcatttacctgcaatgaattccaagatgtacaatcagatgttgccatttggttataaagaaaattgattttgctcatttttatgacaaacttatacatctgcttctaacatatcgcatgtttatgttaagatttggtcccatcctttaaactgaaatatgtcatgtgaaattattttaaaaatgtaaaaacaaaactttctgctaacaaaatacatacagtatctgccagtatattctgtaaaaccttctatttgatgtcattccatttataatcagaaaaaaaacttatttcttaatcaaaaggcagtacaaaaaaagtaataatgttttataagattgtagagttaagtaaaagttaagcttttgcaaagttgtcaaaagttcaaacaaaagtctagttgggattttttaccaaagcagcataatatgtgttatataaacataataatactcagatatccaaatgttcagatagcatttttcataatgaatgttctcttttttttggtaatagtgtagaagtgatctggttcttacaatgggagatgaagaacatttattattgggttactactaaccctgtcccaagaatagtaatatcacctctagttataagccagcaacaggaacttttgtgaagacacattcatctctacagaacttcagattaaatataatctagattaatgactgagaataagatccacatttgaactcattcctaagtgaacatggacgtacccagttatacaaagtacttctgttggtcacagaaacatgaccagattttgcatatctccaggtagggaactaagtagactaccttatcaccggctaagaaaacttgctactaaactattaggccatcaatggcttgaataaaaaccagagaaggtttttcccaggacgtctcatgtttggccctttagaattggggtagaaatcagaaatgagatgaggggaagaagcaaggagtctaaggccctagcgatttgggcatctgccacattggttcatattcagaaagtgttatctcattgattatattcttgttaagcaaatctccttaagtaattattattcaaataagattatactcatacatctatatgtcactgttttaaagagatatttaatttttaatgtgtgttacatggtctgtaaatatttgtatttaaaaatgccatgcattaggctttggaaatttaatgttagttgaaatgtaaaatgtgaaaactttagatcatttgtagtaataaatatttttaacttcattcatacagttaagtttatctgacaataaaagctctgactgaatgttgattatccttcctattatgt

SEQ ID NO: 1114 - DNA, 2118 bp, Homo sapiens
tcctcagttctgcatttctgcagagacagaaagaaacgcagctcttgactgcttttttgtaaacattactgtaagagttgtgataactttttattctactatgtatatgtatggaatagtattaataaatgaactagggaaggatgtaataaattagacatctcttcattttagagagaagatggaaacaacattgcttttcttttctcaaataaatatgtgtgaatcaaaagaaaaaacttttttcaagttaatacatggttcaggaaaagaagaaacaagcaaagaagccaaaatcagagctaaggaaaaaagaaatagactaagtcttcttgtgcagaaacctgagtttcatgaagacacccgctccagtagatctgggcacttggccaaagaaacaagagtctcccctgaagaggcagtgaaatggggtgaatcatttgacaaactgctttcccatagagatggactagaggcttttaccagatttcttaaaactgaattcagtgaagaaaatattgaattttggatagcctgtgaagatttcaagaaaagcaagggacctcaacaaattcaccttaaagcaaaagcaatatatgagaaatttatacagactgatgccccaaaagagcctccacagttttgatgctgcacaaagcagagtgtatcagctcatggaacaagacagttatacacgttttctgaaatctgacatctatttagacttgatggaaggaagacctcagagaccaacaaatcttaggagacgatcacgctcatttacctgcaatgaattccaagatgtacaatcagatgttgccatttggttataaagaaaattgattttgctcatttttatgacaaacttatacatctgcttctaacatatcgcatgtttatgttaagatttggtcccatcctttaaactgaaatatgtcatgtgaaattattttaaaaatgtaaaaacaaaactttctgctaacaaaatacatacagtatctgccagtatattctgtaaaaccttctatttgatgtcattccatttataatcagaaaaaaaacttatttcttaatcaaaaggcagtacaaaaaaagtaataatgttttataagattgtagagttaagtaaaagttaagcttttgcaaagttgtcaaaagttcaaacaaaagtctagttgggattttttaccaaagcagcataatatgtgttatataaacataataatactcagatatccaaatgttcagatagcatttttcataatgaatgttctcttttttttggtaatagtgtagaagtgatctggttcttacaatgggagatgaagaacatttattattgggttactactaaccctgtcccaagaatagtaatatcacctctagttataagccagcaacaggaacttttgtgaagacacattcatctctacagaacttcagattaaatataatctagattaatgactgagaataagatccacatttgaactcattcctaagtgaacatggacgtacccagttatacaaagtacttctgttggtcacagaaacatgaccagattttgcatatctccaggtagggaactaagtagactaccttatcaccggctaagaaaacttgctactaaactattaggccatcaatggcttgaataaaaaccagagaaggtttttcccaggacgtctcatgtttggccctttagaattggggtagaaatcagaaatgagatgaggggaagaagcaaggagtctaaggccctagcgatttgggcatctgccacattggttcatattcagaaagtgttatctcattgattatattcttgttaagcaaatctccttaagtaattattattcaaataagattatactcatacatctatatgtcactgttttaaagagatatttaatttttaatgtgtgttacatggtctgtaaatatttgtatttaaaaatgccatgcattaggctttggaaatttaatgttagttgaaatgtaaaatgtgaaaactttagatcatttgtagtaataaatatttttaacttcattcatacagttaagtttatctgacaataaaagctctgactgaatgttgattatccttcctattatgt

SEQ ID NO: 1115 - DNA, 772 bp, Homo sapiens
tcctcagttctgcatttctgcagagacagaaagaaacgcagctcttgactgcttttttgtaaacattactagagaagatggaaacaacattgcttttcttttctcaaataaatatgtgtgaatcaaaagaaaaaacttttttcaagttaatacatggttcaggaaaagaagaaacaagcaaagaagccaaaatcagagctaaggaaaaaagaaatagactaagtcttcttgtgcagaaacctgagtttcatgaagacacccgctccagtagatctgggcacttggccaaagaaacaagagtctcccctgaagaggcagtgaaatggggtgaatcatttgacaaactgctttcccatagagatagaaagactcaactgagcaggtgatgcagctagtctagttacaactggatgatgatcaattagagggtgaaaatttcaattgacaataacatatagacaggatttctttcacttaatgaattagtatataataatttcatcatactttcattactcattcaaagcatagaaagatttagcaggatgattagtcctacagaaaatcctcacctagcattctgtaatctttcttctttaaaagtggtaaaaagcaaaaggacaaaatcgaatttgctactctctcttttctctactggtaatattgaagaacagtaaactatctgcaatttaaatcaagaagagacacatttaaagaaatcagcactgacccactggatattatcacttgtcatgattacaatgctaaatat

SEQ ID NO: 1116 - DNA, 2155 bp, Homo sapiens
tcctcagttctgcatttctgcagagacagaaagaaacgcagctcttgactgcttttttgtaaacattactgtaagagttgtgataactttttattctactatgtatatgtatggaatagtattaataaatgaactagggaaggatgtaataaattagacatctcttcattttagagagaagatggaaacaacattgcttttcttttctcaaataaatatgtgtgaatcaaaagaaaaaacttttttcaagttaatacatggttcaggaaaagaagaaacaagcaaagaagccaaaatcagagctaaggaaaaaagaaatagactaagtcttcttgtgcagaaacctgagtttcatgaagacacccgctccagtagatctgggcacttggccaaagaaacaagagtctcccctgaagaggcagtgaaatggggtgaatcatttgacaaactgctttcccatagagatagaaagactcaactgagcaggtgatgcagctagatggactagaggcttttaccagatttcttaaaactgaattcagtgaagaaaatattgaattttggatagcctgtgaagatttcaagaaaagcaagggacctcaacaaattcaccttaaagcaaaagcaatatatgaggaagtcattacaaacagcatcactcaacctaccctccacagttttgatgctgcacaaagcagagtgtatcagctcatggaacaagacagttatacacgttttctgaaatctgacatctatttagacttgatggaaggaagacctcagagaccaacaaatcttaggagacgatcacgctcatttacctgcaatgaattccaagatgtacaatcagatgttgccatttggttataaagaaaattgattttgctcatttttatgacaaacttatacatctgcttctaacatatcgcatgtttatgttaagatttggtcccatcctttaaactgaaatatgtcatgtgaaattattttaaaaatgtaaaaacaaaactttctgctaacaaaatacatacagtatctgccagtatattctgtaaaaccttctatttgatgtcattccatttataatcagaaaaaaaacttatttcttaatcaaaaggcagtacaaaaaaagtaataatgttttataagattgtagagttaagtaaaagttaagcttttgcaaagttgtcaaaagttcaaacaaaagtctagttgggattttttaccaaagcagcataatatgtgttatataaacataataatactcagatatccaaatgttcagatagcatttttcataatgaatgttctcttttttttggtaatagtgtagaagtgatctggttcttacaatgggagatgaagaacatttattattgggttactactaaccctgtcccaagaatagtaatatcacctctagttataagccagcaacaggaacttttgtgaagacacattcatctctacagaacttcagattaaatataatctagattaatgactgagaataagatccacatttgaactcattcctaagtgaacatggacgtacccagttatacaaagtacttctgttggtcacagaaacatgaccagattttgcatatctccaggtagggaactaagtagactaccttatcaccggctaagaaaacttgctactaaactattaggccatcaatggcttgaataaaaaccagagaaggtttttcccaggacgtctcatgtttggccctttagaattggggtagaaatcagaaatgagatgaggggaagaagcaaggagtctaaggccctagcgatttgggcatctgccacattggttcatattcagaaagtgttatctcattgattatattcttgttaagcaaatctccttaagtaattattattcaaataagattatactcatacatctatatgtcactgttttaaagagatatttaatttttaatgtgtgttacatggtctgtaaatatttgtatttaaaaatgccatgcattaggctttggaaatttaatgttagttgaaatgtaaaatgtgaaaactttagatcatttgtagtaataaatatttttaacttcattcatacagttaagtttatctgacaataaaagctctgactgaatgttgattatccttcctattatgt

SEQ ID NO: 1117 - DNA, 392 bp, Homo sapiens
tattctctgggaggcacacacctttcccattttctggtgtgcccagcaataggacgtcgtgttatctttcctgagggtcggacagacgttcgcttgtgagggtaggatcctgctcccttcatagtaagcagaaaatccagtcatattgcactatgggggcccaatctttttctactttggtgaaatgtcctgaatctcacctctgagaatacctttcttgctgtgtcctggcatagcttcctgaaactgtcggaagaggtcttttattccttattgataatctggaaatagggctcttttgaaaacctttttttgtttttccaaaggaaaaaaaaaacccaaagaagataaaacactgaattaaaaagaaatagactctttgtggccgtcta

SEQ ID NO: 1118 - DNA, 295 bp, Homo sapiens
gctcgacagagcaccccacagcagctcagtcatgcacagctcaattacagctccccctgggctggctgatttggtggggatggttcacatggcaacaagtggcctatgccatgttgcctggcctctgaaaaacgtaacttatcatttgtattttcacacaggcactgaaaaggggtcagctatttttttttttttttttttttttggttttcactgcaatgtgaatcaccttgacatttctgtgaaacaggaagtggctggatgatacaacaataaaaataatcacactcaactt

SEQ ID NO: 1119 - DNA, 405 bp, Homo sapiens
ccatctaaacaaatatgggggcaaagaatgggtcagaacatgctttgactacaggcaagcagcggtgcccaggctcccttgagacaagcctccccacgcagtcaccttccactttgttctcagtgatcactccagaagcactaagtcctcttccctcgtctcacaagccttggtaaagctggaaccacatttagggaagaagcctaactcataagcccccagcatcatagggtccagttaagctccacaaagcgctactagcaacaccaaaaccactttcctcaatgctgtgtgacttccacaaagagggggccgacctgggcggagttcaagcttccacaattcaaggaacgaattccacatttaaatgactggattccctcaacagactccctgagtgcccaa

SEQ ID NO: 1120 - DNA, 227 bp, Homo sapiens
aagttgatctgtcacgcttctttctataatttttttatgtgtgtgcttgttttccatcatagccaattagtcttataagctttatgaggctatgttttattaatgtttatttgtccactacctagcacaatgcttgaaatattgaaggtcagcaattcccaattattttctcttttggacacagctttgaatactgaaatttttcatggtacacttgaatgtatttt

SEQ ID NO: 1121 - DNA, 388 bp, Homo sapiens
attaaaaaacatacttaaaatgggggaggagggcacagatctaaggtaaaatctcttgcagttttttcaagttcgcatgcaccgttgaaagttcattagttagggatttaaaagcaaaaatgtttcacacaaccaattaaacgccaagctttacaaacgccttggtctttggttttgggaatctgtaaaagtccgcctccccccacccgagttttgccccttttagagcccctttgttgaattacgtgacttttcccgaagtcatcaaactttgaattgcgtctctaattttttttttcagggcaaaagcaaatcaagaaattaaacttaaaagtaggcgactcggagagaagtgggggaaagctcgccccaaagccaagttccgcag

SEQ ID NO: 1122 - DNA, 1127 bp, Homo sapiens
  misc_feature (1127)..(1127): n is a, c, g, or t
tctcctgcctcagcctcccgagttgctgggactacaggcatgtgccaccacgcccagctaatttttgtatttttagtagagatgaggtttcaccatgttggccaggatggtctcgatctcttgacctcgtgatctgcacacctcagcctctgaaaatgttgggattacaggcgtgagccaccgtgcccagcccaggaacatttttattagagttatccactccctcccagcagtatttatgccttctctcctgaactacaccaaaagctcccagctccctagagggaaaccatgtctaatgcttcctaccaaggagaagccaggagctacactttaaggattcagccattttgtaagctttccctttgcttgcaatcttcttattcttgacttcttcctagcttaaaaagttatagactggtttcaaatccagataattgaagattaacttttcaaatcctcaaacaactttgtagggagaacatttacttggttgattccttcctaccagaatgtacactgagctttagaaaaggaaaaattggtgggtgttgtactcccagctactcgggaggctgaggtgagaagatcacctgaacccgggaggtagaaggtgcagtgacccatgactgcaccactgcactccagcccaggcaacacagtgaggccctatctcaaacaaacaaaccaaacaaacaaaaaaaccccaaaaaccaagcacttctcattctcagaagtggccctacatcacccaaccctttaactctgaccttatctactcccttcttgctctagcttccactaaactccttgcctttcctaaaaaggcagggcatgctcttgtcttaaggtcactgtacttgctcccaaatcccagaattcttttcccccaaatattcacgtctttgtttaaaagattatcttcggccaggatggtctcgatctcttgaccctcgttgatctgcacacctcaagctctgaaaatgtcgggattacaaggcgtgagccaccgtgcccaggccaggaacattctattagagttatccatatccctcgcagccagtatttaattgccttctctcctggctctgtctctgtaaagagtgtgagccacaatgccccaccan

SEQ ID NO: 1123 - DNA, 364 bp, Homo sapiens
aattttcagaccattatatatattttcatgtatatttataataaatagtagtgctaaaagcccttttacatacagtgggttaaattaggtttaatgtatattccagaaacaaggtaataaaatgagttcattccagaccccctataaaatcagtgatatagcatcttacctcacgatcaaacctggcaacagagagcctagccctaaaacacacaaggagattcttttaacaaacaacagtgcttgccttttaaaaatacataatttcaacttttattttagatacagggggttgtgtaggtttgttacatgggtatatgacgtgatgctgaggtttggggtacaaatgatcctgtcacccagg

SEQ ID NO: 1124 - DNA, 319 bp, Homo sapiens
caacattgggtcatctaccgtctaaataaatacggatttcatggtggcatttgaagcacattttgcaaacattatgatgttctattgtcttgctgaattctttattataacactacctcaagacaaatgatagactgttggtaaggtaaattgggttttcaatgtcaggaacaaataaaattttgcaaatagaagtcatcaaataattcaacaggaagaccatactggacacagatgttgtcagttacttctggacaatgtggtaacatggatatttcagtcactggtaacaatgtcagggttaacacccaatgaatta

SEQ ID NO: 1125 - DNA, 390 bp, Homo sapiens
tgttttaaaagtagtaaaagggaccaaaacaatgcttcattttagctcaacatccatctgtaatatgcagtgtaaaatttaattagaatttaataataagaaaagaaaatctgcaggcttggctcagtggctctcgcctataatcccagcattttgtaaggccaatgtaggaggactgcttgaggccaggaattcaagaccagcctggaaaacatagcaagacctcatctctacaaataataataataataataataataataataataataataataataaattagccaggtgcagtggcacacacctataatcctaggtacttaggaggctgaggcaggaggatcacttgagcctaggactttgaggctgtggtgagctatgatagtg

SEQ ID NO: 1126 - DNA, 374 bp, Homo sapiens
gtttgttgcagcactgtttacagtagctagagattcgggagcaagctaagtgttcatcagcagatgaatggataaagaaaatgtggtacctatacacaacagagtaccattcagccataaaaaaaaaaaagggatccaatcatttgcaacaacatggatggaactggagatcattatgctaagtgcaataagccaggcacagaaagacaaacaaatgcatgctcccactcatttgctgaattaaacaaaacaattggccaggtgaagtgtggcttatgcctctaatcccaacactttgagaagccaaggtcaggtggatcacttgagcccaggagttcgagaccagcctgagcaacgtagtgaaaccttgcctc

SEQ ID NO: 1127 - DNA, 143 bp, Homo sapiens
gcaggctttctatttgggcaaggccatctgccattccagtgcacgggcatatgaaacttgccttatcctgaagatatttctgttaaattagaagaagaccattgaggattttcttttaattgtggaagtctgttaaaatagca

SEQ ID NO: 1128 - DNA, 318 bp, Homo sapiens
tgagtgagtgagttgcctttgaaatgaagatgatgtcgggaccccatctaggtgattatcttgttgaatcctcacaaaaactgtgttgatggttactgttgttattcctgatttgtagaggaaagaatcagggtttagcagacaggttaagaaacttgtccaaggtcacatagctagtaaaggcagactctagcttgatttgtggtctgggaaggtctctgacagcacagctgggcgaggggggtgggagggctctgagcttgccccagaggttccgagctggatggcgacccctgagcccccaaagggcttccacct

SEQ ID NO: 1129 - DNA, 463 bp, Homo sapiens
aggaaagtaaattagcaaaacttcctcctggggataattttttaaatatcctttgatctaaacattctttagaaaatttatcttaaggaaataatcatagatgtggttaaatatctagctacagacatgattgttacagtgttgattgcaataatgattaattataagcaacctaaacatcaagaaaagcaaggagtaattaaataatttattgtactgtatgggtatggtatgacttgtgatacagcagttgagaaagatggagaggaccacttaatgacatgaaatgatttttaatattaagagaaacaagattatagtgatggggaatgatccctgtatatttattctaaaaatgtagccagtagttatctctgggtgaagagattatgagcaagtaattttttttatgtgtatttttaatatattctacattgaataggagttacttttgtaatatgta

SEQ ID NO: 1130 - DNA, 566 bp, Homo sapiens
gcccaggatgaccaggggaaaagaggccaaaaagcatatggctttgaactgccaccattgatgtttgggagtagaacaggttctaagatttcccacctccacctgccgggaacttcaattaggaagtaccttccaaggccgtaattctgctatgtcctaggccagaaactaaggaatattagctagaggtagagaaattcaaactttcacaaagtttcctagggcacataatccccccaaaagttattatattgaaccatatgaaaatgccaatatacggctgggtgcggtggctcacgcctgtaatcccagcactttggaaggccgaggcaggcggatcacgaggtcaggagattgaaaccatcctggctaacacggtgaagccccgtctctactaaaaatagaaaaaattagccgggcgaggtggcaggcgcctgtagtcccagctactggggaggctgaggcaggagaatggcgtgaacccccggggcggggcggagcctgcagtgagccgagatcgcaccactgcactccagcctgggtgacagagcaagactctgtctcaa

SEQ ID NO: 1131 - DNA, 420 bp, Homo sapiens
cacattaagccttgggtcattcctgaatttaagcattagttttcgtagtaccttcagtgctgctgcagtacagttctgcctgttacatgcagaccacattaacagtcagctttttatctgtcaactagggcgatgggagaagacccactttacaggatgttaacagttcctatgtatacattcaagaaaaaaaacctggagtcagggttggctccactgtagctttgcctgttaaatcatttctgtcctatgtgccttgagacctcttaaaattgtggccttcatgaaacccccttgtattaagtgttctagtatttataagtaaggaatctgacaaagattcttattatacttttattcatgtaattaaagaagcatgtccatggtaactatgccatacagatgtcaaagaaagataat

SEQ ID NO: 1132 - DNA, 1173 bp, Homo sapiens
tagatggagtctcgctatgtcacccgggctggggtgcagtggtgtgatctcagctcactgcaacctctgcctccaaaattcaagcgattctcctgccttggcctcctgagtagctggaaccataggtgcgtgccaccacgcccagctaagttttgtatttttagtagagatggggtttcaccatgttggccaggctggtctcgaactcctgacctcaggtgatccacccacctcagtctctcaaagtgctgggattacgggcgtgagccagcacacccggcctgatctttcttgcttattgttatatccctatgacaatgacattgcttagtggataataaatactcaataaatatttgctaaaagaatagatgacaatcaaggaggcattgagtacatggacaatgaaacacttgttttctctaacatttggaactttttaaagtgctttaatttttataagcataactattgaacaataatattagatcaaatgtaccaataagtattttgatatttcattggtcattctagggtatttttttaaaagaaaaagtcatgtttctaaaacctaaccaggatctttggtttatgaagtacagtaagtccttaagaagataaatacccctacagaatacagcactcattgaattaacaaggtctagaagatctcttgaagaaattcagaaagaagagatggtggatatacagcagagttaaaccagaactgagtacagttgttggatgatattttcagagagacttcagggtttttcatttaaaatgcggacaaaagaagcttcaatgatggatatttgctcaggcccctactcttatgggcagaatttgccactttactcataaatactatataaaaaagtgatgacacttacaaggagctaggatcctaagaagaaaatatatatttaaaaaattacaaaacagccccttgccacatatgtaatgtgccctattggttcttctttctgatttgtatgtgtatatgtgtatgtttgtttcagaggggaaaaataaggaataccttccatcctatcctaacttgtctttgtatgttaataaggaaaagaccatctctaagccagaaaaatacaaagttcctgaccaagttgaggtcctaaacaagcaaatggaacattggccaacccttatctt

SEQ ID NO: 1133 - DNA, 838 bp, Homo sapiens
  misc_feature (768)..(768): n is a, c, g, or t
  misc_feature (813)..(813): n is a, c, g, or t
  misc_feature (836)..(836): n is a, c, g, or t
agaaagacttagagagtgcactgagattcggaacccccttctggtccaggatgtggaaagctacgatccagttttgaacccggtgctgaaccgtgaagtgcggcgaacaggggggagagtgctgatcactctcggggaccaggacatagacctgtcgccatcgtttgtcatcttcctgtccacccgggatccaactgtcgagttcccaccagatctctgttcccgggttacttttgtaaacttcacagttacccgtagcagtttacaaagccagtgtctaaatgaagtacttaaagcagaaagacctgatgtggacgagaaacgatctgatcttcttaaacttcaaggggaatttcagctccgtttgcgtcagctggaaaaatctctactacaagctctgaacgaggtgaaagggcgcattttggatgacgacacgatcataaccactctggagaacctgaagagagaggctgcagaggtcaccaggaaagttgaggagacggacattgtcatgcaggaggtggagaccgtgtcccagcagtacctcccgctctccaccgcctgcagcagcatctacttcaccatggagtccctcaagcagatacacttcttgtaccagtactccctccagtttttcctggacatttatcacaacgtcctatacgagaacccttgacgcttgcagcttcggagtcacgggtttgaaacttcaaggggccacgtgcaacaacaacaagctgtcactggtccaatgccatctcaaccggnccttcccctggacgccagctggcttggggtcaagcagacaaacancgggaagaagccagtgttggtanct

SEQ ID NO: 1134 - DNA, 391 bp, Homo sapiens
tcgggcaggacctgcctctttttggaacactttcgagatctttgcgtttgttcgtttccagccatttggtggagactctgagagcctgaacttagaagcccgccgagaggggaaatggcggcctccggggagcgggcagcctggccgcagagcgcgcgggacccagggccaccgtcctcccgagactagcggcagcagccgccactcaccgtgcggaattaaaaacggctactctggttgccacggcaaccagccgtctccccccagcgtcagtttgaatttgtgcagaccattcctagccaagattcaagccaacagattcgtgcttaccctgaggtgaagcctcgtttgagaaccaaataataaaattaacaaacctaaaatctcctca

SEQ ID NO: 1135 - DNA, 464 bp, Homo sapiens
gagacagtcttgctttgtcacccaggctggagtgcaatggtgtgatctcagctcactgcagcctccacctcctgggttcaagcgattatcctgcctcagcctcactagtagctgggattacaggcacacgccaccatgcctaatactttgttttgttagtagagacggggtttcaccatgttggccaggctggtcttcaactcctgacctcaggtgatccacctgcctcagccttcaagagtgctgggattacaggtgtgagccaccacgcccagccctaaggattttatattggagacagactctccaaaatgctaagtactacatctgaaccaatcaccgtctactagaattcctccatgttatttcagaggtcatttgtctcctcttggcttggcttttcttttgcactgggtgcctcaacttgggtggtgaggtaaaaagggaagctagaatctgatttg

SEQ ID NO: 1136 - DNA, 1155 bp, Homo sapiens
tcatgaagggcttcttcctcattgtcttcatgttgagtagggctgaggaggaggaagatgaggggttagtcttgctgtcttgcgggtgacagatgtggaagtaaatcctcatgtaggtgggaatgagcagttcaaacctatgttgttcaagggccaactatagttgattaactcatatctctacagttaattttcaaacagatgtgatagctgaatgagaacttttaagatagtactggacagtaaccttattggaactggaatggcctttagactttttgtgtccagtttcttctcacctcctctttctcttcaaatgtgcaactgaaactgagagacctcagtcccatgtccaaggtcaggcagatacttagcggcagagtgaggactccagcccatttctgcagctctgctgtgcagtggaagatttgggacaagtacattatttaaaaatgcccacccactaaatattacattcctaacttttcccaatacacaaatatgcttgaacttttaaaagcttgtttttggtcgtgcttggtttggaatgtgaatgactaaaactacctttagcaatttcccaaagtgtaagttcaaatgtacagagaatttttttcctgaatgcccaacacaatatgcagttttacaacacataccagattcttagattcatttggtgaaggaagcctctgaattaaaacttttaaatatttctgatttgcaaccagacgaaaaagaagaaaattgacaacttttttgatgcaactttgtgaaatcatggtgttcctggtttttctggtctggtttttgttgttgttttgttttgttttgccacagtttagttcctcacctgatctttccttgtatccacttcagagtctctgaaatgttatctgtttgttggttcctgggaaattgagagccttttcaaagactccatctagaagcatatttaaaagtgtgaaagaagacatttatgcgaccaacaaacatatgaaaaaaagcttatcatcatgggtcattagagaaatgcacagcagaaccacaatgagataccatctcatgccagttagaatggtgatcactaaaaagtcaggaaaggccaggggcggtgactcatgcctgtaatcccagcactttgggaggctgaggcgg

SEQ ID NO: 1137 - DNA, 406 bp, Homo sapiens
ctttttctcatccatccaatgctgtgttagggaaatgactcactcaattaaccatgtcagtggttgcaggggtccttaggtgtgtggtgaccacaggtaacagggatgtgtgacagcaggtgctgaaggtcgggtatggaggtaggtgtttcatcaggtgctcagcccgtcaggccaggcagcttccacatacgccactttgtctctttcctcatctgttttctttcacagcacttacaactgcctgaacattgtttatttacttaaatctagtttatcaaccactagaacacgtcttcctgaccacagttttgtgtctttattactactccatctccaacattgagaacagtgctgggaactcaatgactatttttttgaataaataaatggattaaatttttta

SEQ ID NO: 1138 - DNA, 425 bp, Homo sapiens
ataaaattcaaacaatcaaaactcaactatggttttagaagtcaagataaaggttaacccaggttcgactggggacagagccagtgcctggaactgggcatgagggggattcagaggttctttttcttgatctggttgccagttacatagatgtatttactttgtgctatgcacttaacgatttgtgtgcatttctaaaaatgtgttacacttcaggaaaggttttttttttttttgtaagaggctattctcaaagaaaaactgagtaaaattggtttgagaaaaaaaaaatagtgattatattctgtttatttagcttttccaggagtgtaatgatgcatagggttaacctgggaaacaatgtccctaatgaaagtgtcccttcagtgatctcttcatctaaagaaagtctttatgtcagtagg

SEQ ID NO: 1139 - DNA, 389 bp, Homo sapiens
catgaccacaggccgggtgtcaggccactcgtggcattcaacagccgcacccagggtacacagtgtaggcagcccctgcacgtaagcagagacctaggtcctaagacgatgaaaatggcgtgaaaggtaaacctctattccccacactaggaagggaggggtgggccacagggctggacatcctaagctctgacaattgctatcaggaggtggggcaccaaacgccacccagggagggtgaccagctgtcctggtttgagcaggtttgaaggtcacaggtctaaaacctgggcaaaacaagatacctgaacccccagtggtcagcatgtatacacggggcaaaccgaccttggattttatttgaaacaggtggcattaaggggaaaaaa

SEQ ID NO: 1140 - DNA, 386 bp, Homo sapiens
ctttacctggagggagacagcaggtcttgtatacgttttcactgtgcctgaaaagaaagcttaccattgttcaggtataaaggaacagctaataaagctgtgttgcaggtggctttatgacctatgctatctttttcatctttctaagcaacttaatccatattcgagtaggataatgtgtacaggcatagtttgtgggcagttatacttgtgcttgaacacatggatagaaggaccctggaaaggccatgtactgattggaaacttttcttttgacctggtttgagtgttgcctccagtctggtgggttttttgtgcatttttttgttgtttaattccccaaggcatacaacatccaataaagagttgacagcagtttaacgtat

SEQ ID NO: 1141 - DNA, 405 bp, Homo sapiens
atggaggaagcttttgccctagaaatatagaaataattttcggccatgtgggaaagttaagttggtttaaaaaatggagagaaacattgccttgtctgtccatttataagcccccaaaggtcattgtgtgattaaagaagacataggtgaagtgtgtatatataagtatattcatgtctgttttgtaagtgcacaaaaaagacctaaaagaacacagaatgcactgcgagcagaagtcagtcctgggtagagaagggaatcaagagggttgctgatggtggtcctctatgctcttccctacacaatccgtattctttgtttccagtataatataatgtgcatattgaaaattgttactagatgatggcatggatgcttggctcattaaagtgagattacgaagca

SEQ ID NO: 1142 - DNA, 339 bp, Homo sapiens
ggtggcatctagatagcttcatggagaatccagtgcctcagcaggaggagcagaccccctaacgtgccttccatcatgacctggaaggacacagaactgaaattgccacttggacaagaaagaagatcctcttagaaggcacctgggtgaacagatcacatggacgatcacgtgatactctccccacccagcctccagcactacagaagccctcccagacttagacggaagtctagggaaaggacgagaactccgaggaaattcaaaaatcactgagactgaattttttttccatgcttgagtccttgtgccactggcagtggaaaaaaaatgtcgacg

SEQ ID NO: 1143 - DNA, 451 bp, Homo sapiens
tcatatgagaaaactgagcatgatttgttcgttttgaatgccttaaaccaaatattttaatgtgcattactcacaattagattctaaaaatgtaaaacaaacatgatgctacagcactagtacaaaggcagcaaaaatgcattttaaaagcaggaatactacttcagaaaaatgtattaaaattgaacatgagcttgagaaagtaccgctcagtgcaatcatggaaccacaattaaagctgggcaagacatggaaggtttcctgatagccttgttttataattgtagaaactgagggccgagctcagttgctcatgcctgtaatcccagcactttgggaggcggaggtgggtggatcacttgaggccaagactgtgaaactagcctgaccattatggtgaaaccctgtctttactaaaagtaccaaaattaggtgggcgtggtggcgcgtg

SEQ ID NO: 1144 - DNA, 574 bp, Homo sapiens
agaaggagaaggaaaaatagaagttagtgctagaggatatgttaagatgttctgctcctacatctacatttgtgtctaatcagcattaattgatgactacgtcttggtaaacagtagaccatactggagcaatttactctgctttttgggaattagttctcatttgcactcttgcacctcccataaatactgaactcacttgtagtgttcttagaggtcagcaataaaccatcaagagcatatgatctctctttgaattttgtcactactttggagacagacagtttggaagaactgaaggtactcagcctcagggagaaaggtttgaacgttttggcatagtcctgcaagtcagtttggctccttgactgtgaatttttttaatcaaaaaagattaatatttgaaaccacataatttggacagttaatagttctggtaacataaccaagccttttatctttgtagtatttcattaattagtatccagtgcctcacttttagaagaaaaaaagagaatgctgtattaggggttgttcctgggtgcaaattaatatactgtcttttacatttccg

SEQ ID NO: 1145 - DNA, 197 bp, Homo sapiens
atgaagcaagaggccattggtattgccagataatcagataatcagaagggaaggaatgaggaaccaacagtatctgcttcaagtgagaacaccctcttgggtacccagtagaaagtcgcagacctaccagagccacagatgagaacagatgtgcaggtcatggctcctgtggagagggaagtgcatggcctctcagc

SEQ ID NO: 1146 - DNA, 417 bp, Homo sapiens
tagactcctattttactcagttagttataatccattatttttattgtttattttgctgctcagattgtcccagccctggctgttgttccttttgactcctgtgtccttttacagagtcagtggtcttccctctcccagctctggagccagccatttttccacgtatctctatttccttttagtggagaatggtattcagaaaccaaacttactgtctataaatattattctgtacattctgctgaaagtttaaaagtgttgctttttatatttgaatccttaatctccctgggaatttagcgtatggagtagagggagatatcaaattttcatttttttcacacatatataaccaattatttcagcatctcttatattgaggagttgcttctttacccagatagctacaatgctgac

SEQ ID NO: 1147 - DNA, 222 bp, Homo sapiens
cttatcaagggccaacttattgaattgttattgaatttgagatgaatcaataaagagaaaggagagccatgaaattagaaaaactaccctaattaagtcttcccttctaaaagtcaggaaaactagcattacttgaaaatgagtaccaaaaaaactaaggtcaaatcccatacaaagtcattatgaagaaaaaaagagaataaaacataatttctttagaaa

SEQ ID NO: 1148 - DNA, 361 bp, Homo sapiens
agaaagatgcaaaatcaatctggggaaagccttagtgaagaccctttggcttccaaaaacaggccgagctgggagaagaagggaagttttaggtacctaatttcccagcctcagcaggacctgtcacttggctttaccctgtgtttctcaggaagaaaaaatgagggtcctcactgtcagtcgtgggacatatgtgtctctgtgttttgtcctttaggtgggaggtgtggtgtccgtgggacagaagtcattaagagcagagctgctcctgtaaaataaggccttctgtaccctgtctgcccccgggggctggtctgcccacacagccccttccaagtgccaatgcatggatgtgtctgcc

SEQ ID NO: 1149 - DNA, 423 bp, Homo sapiens
ttttttttttatgagccaagctccaccaaataacaagataaactttgtgtaagacttggtaagagtagagtgtctgacaccttatggtgctataacactcaaagcaaaagcaaaatcgcctatgaccagaaaagggagtcacataggaaatctagaagacctattggctgagagacctgcagcctcatagttcattagctctccatagcaactctcacatgaaatgaagtcagtggtgtttcaagtgcttgaaaccctctttactctacttctaaatgtgaattaattaggcaagtttactagcagttactagacctcaaaagcaaaataatcaggcattattctactaaatattggtctccataactcctctattttcttttggaaaagttagttagtctaagacatttggcataaaggcta

SEQ ID NO: 1150 - DNA, 473 bp, Homo sapiens
atttctgtaaaggtattaagcatatgctgtgctctgtgaaataattttccttaagcttttaaccccttgcctcagatgacctaacacaaaatattaagacctctaatgccaggtgatttactatgaccgcctacatgttctttcaagatattttcagttaacatgcctcctcttgaataaaccatagttgatgagcttagtttttttaaagcatttgatgcagccttttttttttttttttaatgttgtcacactctaattctaatctgagtgcttatggaaatatgctgtggtaagtaaacgttactgataagactccagtagagttagtgcactttcctaactgcccacttgctgcccaggaatgacacagaccctgtccagaatggagtctactgttactcacttgaatataattctctttctaatagtttacttaatgccactcttcagaacaaagtctgtttgacttg

SEQ ID NO: 1151 - DNA, 299 bp, Homo sapiens
agacattggagtgacatatttaaagtcatagggagaaatctcaaacaatacttttatagtcagtgaaactgttctttcaaagtaaaggcaaaatgaaaacatttctagataaacagatactgaatttgttgatagcagacctgcacttatatggaatgctaacagagctccttcggggtgaagataaatgactccagaaataatctggatccaaagaaagggatgaaagcacttggaaaatatgtgggttatattttcccctgtcttcttttaatttatttaaacaaatatgactaaag

SEQ ID NO: 1152 - DNA, 188 bp, Homo sapiens
gcaagcagaaagattttttttcattaaaagatacacacacatacaacacattgaactgagctaatctcaattatactattaaatctctactggttattttaagaaaagaaacataaaagtaagttaccaagtatttaaggtagctcgcctggaagaaaattaggttgtctgaatataaagtgaaggtt

SEQ ID NO: 1153 - DNA, 344 bp, Homo sapiens
ctcactgaaaccagagtccagtgggcctaaattcagtactgaccctacttacctccctcaactttatgagccttgggattctcatctgtgcagtggaaataagaatcatgctggaggtggctgacaaaattaagtgacaagaggacctagaagcagccctccttacagggccactgcatctgagtggagataatgtcaggatgggaagagcagtgacagtcctgctgtccttggattcctagggcccatccagcctagtgcctggcatgcgctgtggccactagagggtgtgtatggcggggcccagcagggcagggctatgctatgacctaagtacaccctcc

SEQ ID NO: 1154 - DNA, 499 bp, Homo sapiens
ggattcttaatagagatggggtttcaccatcctggccgagctggtctccaactcctgacctcatgatccacccacctcggcctcccaaagtgctgggattacaggcatgagccaccacgcccagcctatttgttgtaatttttctacccgcctactaacaccaaagaaacataccaatttttttcaaagtaaatgcttttgctttcgggagctttaagtgataactgaagacattttagttctgagatcgtagtccaaggtccatattctgaaattgtatgtaaaattttgggggttattttgtgccatttttttggggagaagtccatagatttaatcggctcctcagaggggtctatgatgcaaaaagattagcaatcactgccttagaggggcaccagaatgcatcaagacactattgtgaaaagattctatgcctcgcttaccttgagtgcatgatgtcatcataatcaacaatgatcaagcatccgttaattaa

SEQ ID NO: 1155 - DNA, 323 bp, Homo sapiens
tctgccacccactccctctgcatctggggcaagtcgctttgcagacacagctttcccacgtgtgaaatgcagagttgcgtcaggcggtctcggcatcttccagcaggaagaaccttctggaatcagcagtagtccctgctgtcctcctgcaggcctggagacccctcctggaatggttttcctgcctgcctcttcctgctgcataaatgagaagaatccacaggagccccccccaggaagaatggccccctttgctgtgtgtcgactcccagctctgtggctggggcacctctcatgcgcaatgccacccgaccaggtccccc

SEQ ID NO: 1156 - DNA, 229 bp, Homo sapiens
aaaaaataaccaattaaaaatgatctaaatttatactttaattttaacgaatagtattatctcttattatttacctctgataaagtccaaatgtttgtaggcctatagctctggttatatacaatgaaatatctttctcatgagtgtagaatatctagattatatttaatgcatttactttttgaggaaaaggaaacccttaataaaatagcttcaaatatttggtttt

SEQ ID NO: 1157 - DNA, 403 bp, Homo sapiens
tagaggagacagcactgattgcagtgacagaagcggtgccagctaactccccaccatcaaaagtatcttctgctgtagcctggcacaaggtgtgaaatttcatttttaaagatttacttctttgatttgtcattgttatggttaaaatgctataatgctgtctgagggttaaaggacataacttgtgaaaaatcattaatttcctggtgctaatttaaattctttgataattatctgggaggggcttaaaaggagtacaaaattgccttttggaagggtttaattgattgacattgcaatagtctgctcaaagtctgtgagagtatgaatgcctatttgtaaatctgtcatacatacatacacacatatatcagaaatgacaataattatatatagtatacac

SEQ ID NO: 1158 - DNA, 496 bp, Homo sapiens
tgcaagggaaagaattcagagtaaataaacagtctttttctgggaagtaaaatatttccctaagatggagaaattgagatgagagctcatccacaagattacccatcaatgagcaccaatagcaaccaaatccactagaagactgggagcttttaagtcaagaaacttacatcagtatcatcattccaagaagcggtatccaagctgttttatcgaaagtgcgcatgggagatggtgctgtgagtggggagtgagtcaaaaactccgctggggtgtacaaaagtctactcaaatgtccacagcatctgtgggggatggagaatagttggaggatctttctccagaatccttctgttctgtagtacaagtattactcattatagactagcacgaaaaatcaagtgaaatgcgaacttaagagtttaaaaagaataaatggtgcttttctggcctattagtaataaattaaataaaaataattttaatttgtaagtaa

SEQ ID NO: 1159 - DNA, 641 bp, Homo sapiens
  misc_feature (22)..(22): n is a, c, g, or t
  misc_feature (55)..(55): n is a, c, g, or t
  misc_feature (66)..(66): n is a, c, g, or t
  misc_feature (79)..(79): n is a, c, g, or t
gcatacatcatccgccctcctnccgcggaccgcagccgccgcgccaatccggcgnaggtggggccnagcctggcgacanccgccgcttccctccgctcccttcgccgcgcctcggtgctagcggtgcccttgtgagccactgcgttctccaaggccagaacgggacagatggagaaattgagatgagagctcatccacaagattacccatcaatgagcaccaatagcaacctcatccacaagattacccatcaatgagcaccaatagcaaccaaatccactagaagactgggagcttttaagtcaagaaacttacatcagtatcatcattccaagaagcggtatccaagctgttttatcgaaagtgcgcatgggagatggtgctgtgagtggggagtgagtcaaaaactccgctggggtgtacaaaagtctactcaaatgtccacagcatctgtgggggatggagaatagttggaggatctttctccagaatccttctgttctgtagtacaagtattactcattatagactagcacgaaaaatcaagtgaaatgcgaacttaagagtttaaaaagaataaatggtgcttttctggcctattagtaataaattaaataaaaataattttaatttgtaagtaa

SEQ ID NO: 1160 - DNA, 488 bp, Homo sapiens
ctgtaaacactaatacttgggtgaacttccctggttggtaatattctgtgtgtactgccacatatcaataccaggagagtaatgaatcctaaggacacgtgtagaattctccaagactctgccctatgcctttcttcctttggataattttaacctgtattcgttccttgtaatacagtagccacaagtataacaacttgctgtgagttctgtgagatcttctagcaaattgctgaacctgaaagtggttttgggaaccctctgcacttgcaggtgttgtcagaagtgaaggtgagcttgtgcagaggactggccctgtaaatcttgcagtttggctaactctgggtatattgccccagctgcgttatttattagttgtctgccctaggaccagtcacctcaaccttccatgcctcagtttactctacacaatacatactcacttgccctgcctacttttttaataatcaaatgagaaaatgcaatgt

SEQ ID NO: 1161 - DNA, 640 bp, Homo sapiens
taaggtcatagtcacaggttctggggttaggatttggacatatcttttggggggacacagttcaacccactacacccagtgagaagcatgttcagcctcctcttgaatcaagggaaaagccagagtgaccaaccactgtcccagtttgcttgggactgaggaggggtttcccaggacatggggttttcagtactttaggaaaaaaaaatgagagtcccaggtaaaatgggacagttggtcactgtaagctaagcagtgggtatttgggaatttgggatcttggcagacactgctgttccctagggtcttcctacagagttgccttcaagcatgttcatgttaatagcttacatttaatggccaggtacggtggctcacgcctgtaatcccaacactttggaagggcaaggcggacggatcacttgaggtcaggagttcgagaccagcctggccaacgtggtgaaaccctgtctctactaaaaatacaaaaattagctggacgtggtggtgtgtgcctgtaatcccagctactcgggaggctaatgcaggagaatcacttgaacccaggaggcggaggttgcagtgagctaagatcatgccactgcactccacccagggtgacagagcgagactctgtctc

SEQ ID NO: 1162 - DNA, 204 bp, Homo sapiens
aggtttgtgtgagctgcacaaaatacattgatgagcaagggaagcatcgggccagtgcctctctgtccttattttgttaaaggagatggacaattgagtaagtgatgtaattcaacctgaaaagtgaaaagacataaaatcaagtgcagtgttctacagaaagctcaaacaagagcatcaagcccagtggaatgcaggcagggc

SEQ ID NO: 1163 - DNA, 176 bp, Homo sapiens
gaagtaaaccgccccgccaatggctgcaggccaggagtgaagccgacaagaagccctatgatggattttgaggagggctgaagcctgtggactctcaaaatagcctctgctagtggcagttatatttccctttcttgcattcaacttcctttcccaaatgacccagccattagtac

SEQ ID NO: 1164 - DNA, 458 bp, Homo sapiens
atggatggatagtgtaagtctgcactagaattgccatgtaaccgtgttcccataaaagcatcttttgagataaaaacactaatttattttaattagcatacactggtttacttttgaaaagaggagtgccatcttacattgacaatagaaggtgagggaaaaaaaaaagcttaggtcttgctgcctggagctctgtgctctggaatagttaacagccttcctcccagtttactgccctggggtgtgggggaatcagaaatagcaacaagcctttctgcatttgcacaaatgtaattgcttctaatgctacttaagtttcgaagaagccttagcattttcacttcactggagcttttaggttcatttttcctttcaaagtctgcatgtatcgaatgttctataaaagaatgaatacagggggagagagggaaaggaggctatggaaactaactgcttta

SEQ ID NO: 1165 - DNA, 629 bp, Homo sapiens
cattaataatgtgaccagtttttaaaagttttcagtattagaggaaatagccaccccatactacttctactactgcaattactattagcatttttattttttcttttgtttgtgcatttttcacttaatttattttgtttttatcatgcattacttataattattttgacagtttttgtaccctacttttccatgtagcatagatattagtatttttgattggttccttttataagaaaggaagcattacttttatttttggtcagtcataaaactttttatactctggtgtattttatatgtgctgacatagtaatatagtggtgtaaattatgtgtatcattaactacgtagtggttatacatggaattggtgtgaaaatcctggccaggcatggtggctcacacctataattccagcactttgggagtccaaggcaagaggatcgtttgagcccaggagtttgagacttgcctgggcaatctagtgagacccagtctctacacaaaatttttaaaaaattagctgggtgtggtggcatgcacctgtagtcccagctactccggtggctgaggtaggaggatcacttgagcccaggagttcaagcttgtggtgagctgtgattgcac

SEQ ID NO: 1166 - DNA, 376 bp, Homo sapiens
tctggcaaggaattgttcttaataggccaggctgtgatgatgagttaggcaggagactagcagaccaccttgtgccatctgctgcagtgttcgtggcctctcaatgactgtggggcgtcctttactgtagagttagaatcagatcggactcttccacacagttggtggttgttattgagctctgggccaggcactggatatataggagttgttgacatcaaataaactgtagagacgaatctctgcaattcagaagttttacttgagaagtaagaacagcaatttgggctgggcacggtggctcacacctgtaatcccagcactttgtgaggccgaggggggaggattgcttgggcccaggaatttgagaccagcc

SEQ ID NO: 1167 - DNA, 433 bp, Homo sapiens
gtggcaactggtgctgggtcagaaccaagccactgcgtgctgtcgtgggtgcagaagcttagctttggggtagaagggacagtgggccaggggccttccctcaagaagctccagctcactgaaagcccaagcagacccctgaaggactatatctctgtgtgccgagatgctcccctccatgagctccaccttcattgtgcataggacgctgattcttagtacacagcagcaacagagcttcagcagatgccttcttgggaccgcgcttgactctagttccttctccccgggagggagaaagggaaggagcctttgaaatttcccctttcgctatgtttcactggtttttaaacaaatagggctaaatagagaccaagaagttaaccatgtaccttaacgtgcggctttaggcaaaatgttattcaaaaaaaaa

SEQ ID NO: 1168 - DNA, 425 bp, Homo sapiens
tctcgctctgttgccaggctggagtgcagtggtgcgatctcggctgactgcagcctctacctcctgggttcaagtgattctcctgcctcagcctctttgagtagctgggactacaggcgcatgccgccacgcgcagccaatttttatatttttagtagagatagggtttcgccacgttggccaggctggtctggaactcttgacctcaagtgagccgcagcctcctaaagtgctgggattacaggtgtgagccaacacacccggcctaaagatttaataggactttacatactttgagtatatgcagaaaggcttaattattttgctaggtttttaatttaatcatttttattaactatatcaaaagctgggtagtaaaaatgtgataaaaggaagtaagatgtcaacatttaaattaagatggg

SEQ ID NO: 1169 - DNA, 436 bp, Homo sapiens
tactgtgatacctaaatcaaaggcaacagagaatttataggtcagtatcactcatgaatatagatacaaaaagtctttaataagatatttgcaaactaaatctcattgtgtttatataaaaataaataaataaatgaacatgctcaccacatgtgtttatttttggaatctaggatgatataatcagaatgtttattatgtaatttaccatgttcataaaaggtcaggagttcgagaccagcctggccaacatggcgaaaccccgtctctactaaaaatgtaaaaattaggtgggcatggtggcaggcacctgtaatcccagctacttgggaggctgaggcaggagaatcacttgaacccgggaggcggaggttgcagtcagctgagagtgcaccactgcactccagcctgggtgacaagagtgaaactccatctc

SEQ ID NO: 1170 - DNA, 356 bp, Homo sapiens
gcatctgactgatggtgggatctaagtcggtgacctgagcctctttcagttttcatttttttttattttaaatattttatagagatggggtctcactgtgttgcccagcctggtctcaaacttttgacctcaagcaatcctcctgcctcagcctcctgaatagccaggattacaggcgtgagccaccacatctggcctcttccagcttcctgagacattcaaaattattacatcagaaaggctgggcgtggtggctcacgcctataatcccagcactttgggaggctgaggccggtggatcacgaggtcaggagatcgagaccatcctggctaacaaggtgaaaccctgtctctac

SEQ ID NO: 1171 - DNA, 188 bp, Homo sapiens
atatactctgaagaacagagaggaaaaaaaaattaaagttgaaaaagcctcataggagaaaagagacagagcagagaaaaagaatcaaagaaatactaacagagaactttccagatttgatgaaaaacaatctacagattcatgaagcttaactaaccacaactaggaaaacacaaagagagccataa

SEQ ID NO: 1172 - DNA, 542 bp, Homo sapiens
aattcacgaaataaaaatttaaaaaaattttgtgggtgcatagtagatgtatatatttatgggttacatgagatattttgatacaggcatgcatgcatattagtcatgtcagggtaaatggggcatccttttatcctttgtgttacaagcatttatcctttgtgttacagacaatccaactatcctcttatggttttttgtaaatgtacacttaaattatttttaactgttggctgggtgtggtggttcacacctgtaatcccagcactttgggaggccgaggcgggcggatcacctggggtcgggagttcgagaccagcctggctaacatggtgaaaccctgtctctactaaaaatacaaatactagccaggcatggtgcaggcatgcctgtagtatcagctatcaggaggctgaggcaggagaatcgcttgaacccaggaggcaggataatcgcttgaacccggtaggcaaaggctgcaatgagccgagattgcaccactgcactccagccagggctggagcgagactctgactaaaaac

SEQ ID NO: 1173 - DNA, 350 bp, Homo sapiens
tggggacacccagggtgttataaaagcccgataaagagcataacctagaataagagcacagaaagtctttaagggaaggtggggcttaatatgagtaagttttagccagggggagggctttgaggtggatgaaaggaaattctaggaggagggaagagttagtgcaaaaataaagtggcctgaaataactctgtcacgtgagaggttgttcccctgttagactataaacccctcgaggacagggaccactcttaaatcacctctatacacttctcactctcttgcttatggtaactgttcaataaatgtttgtggaatggaatcatatttgagggcaatggaaaaaaaaa

SEQ ID NO: 1174 - DNA, 423 bp, Homo sapiens
agcaacatcataaatataatgatttaactcactgaaaacaaaaattcatgtattcagtgtcagttttaattttgataaaaaatttgtttaaagaataacaaaatgttactatttttcaaatgatgataattgtcacttttagattaaatgatgtataatagtatatcatatattaatggaagatatgatttgacatgaaatcaagcttagtccatgaaaatcaaggtttgtttttttttttaaatagtaaaccatgttcaaatagaatttattttgtaaatgtaagaatgtctaggccgggcgcagtggctcacgcctgtaatcccagcactttgggaggccgagacgtgctgatcacgaggtcaggagatcaagaacatcctggctaacatggtaaaaccctgtctctactaaaaaataaaa

SEQ ID NO: 1175 - DNA, 575 bp, Homo sapiens
gagaacccagacgggcagagcctgggtaggagagcctggccccgctgtccccactgggtggagacaccatgtacttggtccacttgtgctcttcagccaggacaccagacatggtccaaaccgctgcagggctggctgcagcaactccctgacactcaggaaggcccaggctgggcaggcaatacctgctcccaacagccatctcccaggaaggaccctgttgctagtgtggagcaaagacgagtcaagtttatgggctggaagtcctacccggaggctgctcactgagctgtgatggctacaaggacagatggggggaagggtgcagggtgcccgagacctggcccgctggagcctgtcacctaatggctggctggaagaccactacacaccagccagccctggtccattctctcatttagaggcctccccggtggaggcagggatacacaaaatgctttggggctggatgggcccgcctttcagtctaaacaagagacctcaacacagctgcccagaaaaggcagataccagaaatggataaagctggctgggtggggactgtccgaagggca

SEQ ID NO: 1176 - DNA, 1903 bp, Homo sapiens
  misc_feature (1507)..(1507): n is a, c, g, or t
gagaacccagacgggcagagcctgggtaggagagcctggccccgctgtccccactgggtggagacaccatgtacttggtccacttgtgctcttcagccaggacaccagacatggtccaaaccgctgcagggctggctgcagcaactccctgacactcaggaaggcccaggctgggcaggcaatacctgctcccaacagccatgcatgccggctgccgctccaggactcccctgtccccaggaccaagatgacgcccaacagcactggcgaggtgcccagccccattcccaagggggctttggggctctccctggccctggcaagcctcatcatcaccgcgaacctgctcctagccctgggcatcgcctgggaccgccgcctgcgcagcccacctgctggctgcttcttcctgagcctactgctggctgggctgctcacgggtctggcattgcccacattgccagggctgtggaaccagagtcgccggggttactggtcctgcctcctcgtctacttggctcccaacttctccttcctctccctgcttgccaacctcttgctggtgcacggggagcgctacatggcagtcctgaggccactccagccccctgggagcattcggctggccctgctcctcacctgggctggtcccctgctctttgccagtctgcccgctctggggtggaaccactggacccctggtgccaactgcagctcccaggctatcttcccagccccctacctgtacctcgaagtctatgggctcctgctgcccgccgtgggtgctgctgccttcctctctgtccgcgtgctggccactgcccaccgccagctgcaggacatctgccggctggagcgggcagtgtgccgcgatgagccctccgcctggcccgggcccttacctggaggcaggcaagggcacaggctggagccatgctgctcttcgggctgtgctgggggccctacgtggccacactgctcctctcagtcctggcctatgagcagcgcccgccactggggcctgggacactgttgtccctcctctccctaggaagtgccagtgcagcggcagtgcccgtagccatggggctgggcgatcagcgctacacagccccctggagggcagccgcccaaaggtgcctgcaggggctgtggggaagagcctcccgggacagtcccggccccagcattgcctaccacccaagcagccaaagcagtgtcgacctggacttgaactaaaggaagggcctctgctgactcctaccagagcatccgtccagctcagccatccagcctgtctctactgggccccacttctctggatcagagaccctgcctctgtttgaccccgcactgactgaataaagctcctctggccgtttaaaaaaaccaaaaaaaaaaacaaaaaaaaaaaacaaaaaaaaaaaaaaaaaaaaaaaaaagggggggggccgaaaaaagaaaatcccccgagaggagggacccaaaaattaagagaagaacaganggttttctttgacacacaagggggcccccaagaggaagagagcctataaaaaacgaacaaggaagagagggcaggcattaaaaaaacggtgaacagagggggaaaaaaagatcctgctcaacgctacgagagaaaaacttggagagaaggagagacaccctaacacggcgcggggggggcgagcgaaaaaattcgtggggcagaacaaaacacccccctaccaaggaagattattaagaccccacgcggggggaaaaaaatttatacagcattgacagggcgataatagtggcttgttaaaacacaacacgcgccacaaatacatcgccggcgtatagaaaaaaatactggcaacacgagaaaatataattttacgaaacaaaattttctccacgg

SEQ ID NO: 1177 - DNA, 1839 bp, Homo sapiens
  misc_feature (1443)..(1443): n is a, c, g, or t
ttaattgaaaaattctgtgtatcagcgaacatgatacagcccacagcctgcgggtctgcgcccctggattaacatgctgccctgccaggaggacacgacctgcagccccatcctaactctggccaccccatcctgcaggcatgccggctgccgctccaggactcccctgtccccaggaccaagatgacgcccaacagcactggcgaggtgcccagccccattcccaagggggctttggggctctccctggccctggcaagcctcatcatcaccgcgaacctgctcctagccctgggcatcgcctgggaccgccgcctgcgcagcccacctgctggctgcttcttcctgagcctactgctggctgggctgctcacgggtctggcattgcccacattgccagggctgtggaaccagagtcgccggggttactggtcctgcctcctcgtctacttggctcccaacttctccttcctctccctgcttgccaacctcttgctggtgcacggggagcgctacatggcagtcctgaggccactccagccccctgggagcattcggctggccctgctcctcacctgggctggtcccctgctctttgccagtctgcccgctctggggtggaaccactggacccctggtgccaactgcagctcccaggctatcttcccagccccctacctgtacctcgaagtctatgggctcctgctgcccgccgtgggtgctgctgccttcctctctgtccgcgtgctggccactgcccaccgccagctgcaggacatctgccggctggagcgggcagtgtgccgcgatgagccctccgcctggcccgggcccttacctggaggcaggcaagggcacaggctggagccatgctgctcttcgggctgtgctgggggccctacgtggccacactgctcctctcagtcctggcctatgagcagcgcccgccactggggcctgggacactgttgtccctcctctccctaggaagtgccagtgcagcggcagtgcccgtagccatggggctgggcgatcagcgctacacagccccctggagggcagccgcccaaaggtgcctgcaggggctgtggggaagagcctcccgggacagtcccggccccagcattgcctaccacccaagcagccaaagcagtgtcgacctggacttgaactaaaggaagggcctctgctgactcctaccagagcatccgtccagctcagccatccagcctgtctctactgggccccacttctctggatcagagaccctgcctctgtttgaccccgcactgactgaataaagctcctctggccgtttaaaaaaaccaaaaaaaaaaacaaaaaaaaaaaacaaaaaaaaaaaaaaaaaaaaaaaaaagggggggggccgaaaaaagaaaatcccccgagaggagggacccaaaaattaagagaagaacaganggttttctttgacacacaagggggcccccaagaggaagagagcctataaaaaacgaacaaggaagagagggcaggcattaaaaaaacggtgaacagagggggaaaaaaagatcctgctcaacgctacgagagaaaaacttggagagaaggagagacaccctaacacggcgcggggggggcgagcgaaaaaattcgtggggcagaacaaaacacccccctaccaaggaagattattaagaccccacgcggggggaaaaaaatttatacagcattgacagggcgataatagtggcttgttaaaacacaacacgcgccacaaatacatcgccggcgtatagaaaaaaatactggcaacacgagaaaatataattttacgaaacaaaattttctccacgg

SEQ ID NO: 1178 - DNA, 2016 bp, Homo sapiens
  misc_feature (1620)..(1620): n is a, c, g, or t
gagaacccagacgggcagagcctgggtaggagagcctggccccgctgtccccactgggtggagacaccatgtacttggtccacttgtgctcttcagccaggacaccagacatggtccaaaccgctgcagggctggctgcagcaactccctgacactcaggaaggcccaggctgggcaggcaatacctgctcccaacagccatcgaacatgatacagcccacagcctgcgggtctgcgcccctggattaacatgctgccctgccaggaggacacgacctgcagccccatcctaactctggccaccccatcctgcaggcatgccggctgccgctccaggactcccctgtccccaggaccaagatgacgcccaacagcactggcgaggtgcccagccccattcccaagggggctttggggctctccctggccctggcaagcctcatcatcaccgcgaacctgctcctagccctgggcatcgcctgggaccgccgcctgcgcagcccacctgctggctgcttcttcctgagcctactgctggctgggctgctcacgggtctggcattgcccacattgccagggctgtggaaccagagtcgccggggttactggtcctgcctcctcgtctacttggctcccaacttctccttcctctccctgcttgccaacctcttgctggtgcacggggagcgctacatggcagtcctgaggccactccagccccctgggagcattcggctggccctgctcctcacctgggctggtcccctgctctttgccagtctgcccgctctggggtggaaccactggacccctggtgccaactgcagctcccaggctatcttcccagccccctacctgtacctcgaagtctatgggctcctgctgcccgccgtgggtgctgctgccttcctctctgtccgcgtgctggccactgcccaccgccagctgcaggacatctgccggctggagcgggcagtgtgccgcgatgagccctccgcctggcccgggcccttacctggaggcaggcaagggcacaggctggagccatgctgctcttcgggctgtgctgggggccctacgtggccacactgctcctctcagtcctggcctatgagcagcgcccgccactggggcctgggacactgttgtccctcctctccctaggaagtgccagtgcagcggcagtgcccgtagccatggggctgggcgatcagcgctacacagccccctggagggcagccgcccaaaggtgcctgcaggggctgtggggaagagcctcccgggacagtcccggccccagcattgcctaccacccaagcagccaaagcagtgtcgacctggacttgaactaaaggaagggcctctgctgactcctaccagagcatccgtccagctcagccatccagcctgtctctactgggccccacttctctggatcagagaccctgcctctgtttgaccccgcactgactgaataaagctcctctggccgtttaaaaaaaccaaaaaaaaaaacaaaaaaaaaaaacaaaaaaaaaaaaaaaaaaaaaaaaaagggggggggccgaaaaaagaaaatcccccgagaggagggacccaaaaattaagagaagaacaganggttttctttgacacacaagggggcccccaagaggaagagagcctataaaaaacgaacaaggaagagagggcaggcattaaaaaaacggtgaacagagggggaaaaaaagatcctgctcaacgctacgagagaaaaacttggagagaaggagagacaccctaacacggcgcggggggggcgagcgaaaaaattcgtggggcagaacaaaacacccccctaccaaggaagattattaagaccccacgcggggggaaaaaaatttatacagcattgacagggcgataatagtggcttgttaaaacacaacacgcgccacaaatacatcgccggcgtatagaaaaaaatactggcaacacgagaaaatataattttacgaaacaaaattttctccacgg

SEQ ID NO: 1179 - DNA, 1153 bp, Homo sapiens
  misc_feature (757)..(757): n is a, c, g, or t
gagaacccagacgggcagagcctgggtaggagagcctggccccgctgtccccactgggtggagacaccatgtacttggtccacttgtgctcttcagccaggacaccagacatggtccaaaccgctgcagggctggctgcagcaactccctgacactcaggaaggcccaggctgggcaggcaatacctgctcccaacagccatgcatgccggctgccgctccaggactcccctgtccccaggaccaagatgaccagcgcccgccactggggcctgggacactgttgtccctcctctccctaggaagtgccagtgcagcggcagtgcccgtagccatggggctgggcgatcagcgctacacagccccctggagggcagccgcccaaaggtgcctgcaggggctgtggggaagagcctcccgggacagtcccggccccagcattgcctaccacccaagcagccaaagcagtgtcgacctggacttgaactaaaggaagggcctctgctgactcctaccagagcatccgtccagctcagccatccagcctgtctctactgggccccacttctctggatcagagaccctgcctctgtttgaccccgcactgactgaataaagctcctctggccgtttaaaaaaaccaaaaaaaaaaacaaaaaaaaaaaacaaaaaaaaaaaaaaaaaaaaaaaaaagggggggggccgaaaaaagaaaatcccccgagaggagggacccaaaaattaagagaagaacaganggttttctttgacacacaagggggcccccaagaggaagagagcctataaaaaacgaacaaggaagagagggcaggcattaaaaaaacggtgaacagagggggaaaaaaagatcctgctcaacgctacgagagaaaaacttggagagaaggagagacaccctaacacggcgcggggggggcgagcgaaaaaattcgtggggcagaacaaaacacccccctaccaaggaagattattaagaccccacgcggggggaaaaaaatttatacagcattgacagggcgataatagtggcttgttaaaacacaacacgcgccacaaatacatcgccggcgtatagaaaaaaatactggcaacacgagaaaatataattttacgaaacaaaattttctccacgg

SEQ ID NO: 1180 - DNA, 952 bp, Homo sapiens
  misc_feature (556)..(556): n is a, c, g, or t
acctgggccccgcttctatagaaggtattttagccaaaactggacccgcggcagcgcccgccactggggcctgggacactgttgtccctcctctccctaggaagtgccagtgcagcggcagtgcccgtagccatggggctgggcgatcagcgctacacagccccctggagggcagccgcccaaaggtgcctgcaggggctgtggggaagagcctcccgggacagtcccggccccagcattgcctaccacccaagcagccaaagcagtgtcgacctggacttgaactaaaggaagggcctctgctgactcctaccagagcatccgtccagctcagccatccagcctgtctctactgggccccacttctctggatcagagaccctgcctctgtttgaccccgcactgactgaataaagctcctctggccgtttaaaaaaaccaaaaaaaaaaacaaaaaaaaaaaacaaaaaaaaaaaaaaaaaaaaaaaaaagggggggggccgaaaaaagaaaatcccccgagaggagggacccaaaaattaagagaagaacaganggttttctttgacacacaagggggcccccaagaggaagagagcctataaaaaacgaacaaggaagagagggcaggcattaaaaaaacggtgaacagagggggaaaaaaagatcctgctcaacgctacgagagaaaaacttggagagaaggagagacaccctaacacggcgcggggggggcgagcgaaaaaattcgtggggcagaacaaaacacccccctaccaaggaagattattaagaccccacgcggggggaaaaaaatttatacagcattgacagggcgataatagtggcttgttaaaacacaacacgcgccacaaatacatcgccggcgtatagaaaaaaatactggcaacacgagaaaatataattttacgaaacaaaattttctccacgg

SEQ ID NO: 1181 - DNA, 546 bp, Homo sapiens
aaaaattttctatttaatctatgaaagaagaataatagaattaaaacagctccatttattgatctctaatttaatcagttttgaaggttatcattccttatgctcttggtttggttcagccaggaaaacagccaattaagtattatagaaataaacagtttaatataagaattagcgcttacatttatgtgcatgtaagcaaaaaaaatgaaagtttttttctgcctacagaaagtcagaaacacaatcacaaatgacatcagctgaaaacactgatataggagcgaaagcagtagctcatcaaggagtccaggaaacttctgtattcaccaggattatgaagtacacgcttgtgtgatgtctatgatgggcctatatctggatactagaattgctgagaagaaccttgttaaaaaaaactctgggctgggtgcagtggctcacgcctgtaatcgcagcactttgggaggccaaagcaggaagatcatgaggtcaggagatcgagaccatcctggctaacatggtgaaaccctgtctctactaaaa

SEQ ID NO: 1182 - DNA, 722 bp, Homo sapiens
ctgggctggaagtcaggaggcctggggtactctcagctctgccgctaacatgctgcatgaccatgggctgactggagaacctgaggtgctgtgcagagaccagaggaaggctttgatcccaagcctgcagccgtaagagaagaacgagcccatgagttccagcctgtgggtccttccacatgctagttcctgtacctggaatgtattctttcctgacccagaaaattccttcagggcttcctcttccaggaagtcttccctgagtctgtcacctcttcaccctcactccttctgcatgctcccaaaatcccctgcacttctctactgtggatgcttacccagtgcactgtggtccactctggcttttgtatctccttaactagcagctctgtctttttcattttggattcccagacctatcagagagcctagtgcttgccaaatgctgggaaaatacttattgaaaggatattgactactcggtgttagccacaaggcccctcggacagtcttgccataggaaacatcaatgggagaaccttttggaatatatagagagatgctgtggggaacttatgggtttgttttttttgttgttgtttgtttgtttggctaaactcacagcaataggtgttagagtcatacaagggttacaatagcacccaagagcccacttatgactagaaatttcttccagaattcccttcaaagcatgactctcc

SEQ ID NO: 1183 - DNA, 527 bp, Homo sapiens
ctgggctggaagtcaggaggcctggggtactctcagctctgccgctaacatgctgcatgaccatgggctgactggagaacctgaggtgctgtgcagagaccagaggaaggctttgatcccaagcctgcagccgtaagagaagaacgagcccatgagttccagcctggtccagctcagcacctggctcacattaggcactcagtgaatgttgatgtgaacaaatgaactgattcaaagaagtgtctcctgaagttgcttctttccaatccagctaacaaatgcagtattctgaatggaggtaccagagatcacgtcatcttcagctttctgctgcagatccacatgaagaatcacacatatccttaatgttagataggactttgcattgaacactttaaaatgtgaagtctggctttgaagagggtgtataacacacataatttactgtgcatcagtctcactaatggaaaataaataccgatgcggccgaacaacaatcgccgcccacgacgttctcgacgggcgga

SEQ ID NO: 1184 - DNA, 395 bp, Homo sapiens
ggcccttttatggaatgggagcatccttcatgcaaaattcatggagtcattcttatgagaagttcagcatgcctactcttttctatggtcttagatttctaagaaaaatgtgcatctctaaagaaaaaaagttacttgccaatatataaagccttttaatttgtaccgatgcttaaaaaaaaaagtttaaacaaaacccagatggaagctgtctaaatgcttgggttagaaagaagattgggtcaaatacaatagcaagtcctaaagcaatagcctgctgcagggagtatacatctatccacatttagtctaaatgtagagtgacctttcactaccaagccttgagcttaaagttggctgcagttattggaaatcatttccaaaggtcacttgta

SEQ ID NO: 1185 - DNA, 585 bp, Homo sapiens
tgagatgttatccaagggaagagaagggcttctgacttgtcttcttttcacaagtgctcccatatgttaagtgagtggtgcattttgcaaggcaaagaaagcagtgtctcaattctcacctcaggcttgctgagctgcagagatgtgcagccaaatctccacataaccctgggatgagaagattctgaaacaaactgacatgtggcccctaaagtttggaggaacgtgtgaacattgagatgactgcttcagtccctcctggagaattcagaatgcataatgttggctgatgcagtctataacagcagaaaacaaggagaggagacagtggactgggaggaactacatcccattattagacatgacaagaatgcctgcgtttccatgggctcagtcatcccacagaaagtaatttgctagctttatgagatcccagtgaaaagaaccaccttccagtaaaaaatgataaaggggatatcaccactgatcccacagaaatagaaactaccatcagagattactacaaacacctctacacaaataaactagaaaatctagaagaaatggataaattcctcgacacat

SEQ ID NO: 1186 - DNA, 486 bp, Homo sapiens
  misc_feature (476)..(476): n is a, c, g, or t
  misc_feature (478)..(478): n is a, c, g, or t
ctaaattatatgttttatatgatgaatttataaaagagccacttctcaaataaaatactgttgcaactcatgtgtcttagattttcaaaagcaagcataccagctttcttatacttcaaagtgctgccaccatgaaataatacatttggctagttttgaccaagtaacccagataattgtttccatttggctttacgctgactttggagtcaatgtaatctaagtcagggatcaacaaactatagtcgcaagccaaatctgacctactgcttgttttgtgaataaaattttgcttgatttttgtttttgttttgtgagatgaggtcttgctctgtcaccgtggtttaagtgcagtggtgcagtcatggctcactgcagcctcaacctcctggaggctcaagcaggagaatcagttgaacccaggaattcaaggctgcagtgagccactgtgctctagcctgagtgatggaataagncnctgccatg

SEQ ID NO: 1187 - DNA, 494 bp, Homo sapiens
ctaaattatatgttttatatgatgaatttataaaagagccacttctcaaataaaatactgttgcaactcatgtgtcttagattttcaaaagcaagcataccagctttcttatacttcaaagtgctgccaccatgaaataatacatttggctagttttgaccaagtaacccagataattgtttccatttggctttacgctgactttggagtcaatgtaatctaagtcagggatcaacaaactatagtcgcaagccaaatctgacctactgcttgttttgtgaataaaattttgcttgatttttgtttttgttttgtgagatgaggtcttgctctgtcaccgtggtttaagtgcagtggtgcagtcatggctcactgcagcctcaacctcctggaggctcaagcaggatcacctgagcctgagaggttgaggctgcaatgggccatggtcatgccactgcactccagcctggtgaccctgcgtcaaaaaaaaaaaa

SEQ ID NO: 1188 - DNA, 443 bp, Homo sapiens
gcggatagaaaccagccacattccactgagttccatcacttatgatggtgacagtgtcatccatgtatagtctatgaactcccactgttactttcagctccaaaccagggaaggccaccacacaaggtttgcacctgaggacacggtaacagaaaactggagctgtaggtgacagtttatgtgtagcaaatggggtgaggttagctaggtttccaggctccttgtggattggctaattggaattattttatggactctggagcataagggctctccctagttgtctggtattattagctcaggtacttagtggcccacagtgtgacagcccaacaagagaactagttgggatgtatacttaactgctcaagaaagggaaccgactggcctacagtcagggccccaagactaggttaagacagtgttccaaaagaaaaataaac

SEQ ID NO: 1189 - DNA, 460 bp, Homo sapiens
cgctctgaaaaaaatgaagcaaagtgctttgaggggagggaagtgcagtggcttctttagaaagatagtatggcaaagatctcttggagaaggtgatacgagaattgtaacctgaatacaagagaaatcctactgcgcacagatccttgtgttgcagtttttcttttatatatatttttttccttatttcacatagtctggctttagtttctatgttgtttgtttctcttccttccccatcttggtggtaaattacctcactatcaactcaactcacattacatttctgggagtctttctgtcctggtgtgtatgtgatcagtaatccttacatagtatgtttgctaaatgtgtcctgtctctgtgctatcttcttcttcattgtcaagacccttggtctactactctcctggactccctcatttgcctctgaacttgtctctctgattttgattttcct

SEQ ID NO: 1190 - DNA, 966 bp, Homo sapiens
ttccggcaggaggaaaagctggggtgtgatagctatgtgaccccatgcaaggcacctcctgctctgggctctgtttccctctgtcataaggaagccgagccctagcatcccttctggctcccagaccttccgaactcccactgacaagtggcttggttcaggctttcaacacaggacagataactgcagctcctcccttggcccactgggctctcaggccaggttgggtctggggtctgcaccctctggtcctttttggcttcaaattctattcaatcgtcagcatttcaagtggccacaagcatctctgttgtttcctgaatgccccaggcctggattcaggatttcttattctggagagtaccaggaccctggggtttccgtctggtgtaatttataatggcaaaactcagccagtgggaggtgcatgggtccttgctgcttattttgctgattgacagactgaggcccaggagagggatggcttcctcgagaccctgactctgtgagttagggacaaagctgagactcagtcctggcttcctccactctctgctgttttctttccatcatcctttcctacctcacttgaaaagcctccagaaggccgtatttccctaagctctgcttcactgttgtctccagaagcccagtaaaacaggtgcctctggaaagcacttggtcttaggacagaagctggtgctggaagtaattgggggtggggtacagaacaccggtgtcaagagaaggagactctgtcttcaggacagcagatgcttgtggcatatccttgaacgcccctcacatctctgctctgtctgccgtgcgggagggcatggccaccttgagactggctctgtgcctggagtaagcatgtcacgtaggatcttccttcaatctttacaaccttcctgtgacctaggaaagataatccctgttttgtagagaacataggctcagagaagg

SEQ ID NO: 1191 - DNA, 617 bp, Homo sapiens
taatttgaaggttcttctttagtgctgattgatgttcctaagtcaccatccctaaagctatttttgattattccccatctctgctatcaggagcataatagaacagtggctggaattagagtcactcatgagggagacaggcaaacctgtgtgggttgggggtgtcttcctatgtaatagaaggtctcgtggtggggcatgctgtctttcgtttgaggggatgatgggcctccagttggtggcgaatcttttgaaacttgtttttagcattcccaaatttttttagagaaaaattcagaaagtacaggtgcctttggcgtttcatagtcaatatacaagcgagacacaagtattctccatggatgatttttgtgttgtcatggaatgaaagaaaaataccagtgggtctttactggccataatattttcgttttctcagttggcacatagctctttcgtcgcggaattcacttctttccatcccctctctctacttttaaatattttatgggcagtaagctcacaatatgtgctagcacggctgctctctccagaggtcaggatgggtttaataatgagatgcgtaacagtgactctgtaaaaacccatttcaggtt

SEQ ID NO: 1192 - DNA, 451 bp, Homo sapiens
taatttgaaggttcttctttagtgctgattgatgttcctaagtcaccatccctaaagctatttttgattattccccatctctgctatcaggagcataatagaacagtggctggaattagagtcactcatgagggagacaggcaaacctgtgtgggttgggggtgtcttcctatgtaatagaaggtctcgtggtggggcatgctgtctttcgtttgaggggatgatgggcctccagttggtggcgaatcttttgaaacttgtttttagcattcccaaatttttttagagaaaaattcagaaagtacaggtgcctttggcgtttcatagtcaatatacaagcgagacacaagtattctccatggatgatttttgtgttgtcatggaatgaaagaaaaataccagtgggtgcagtttgtctagtgggtgcagtttgtcagtgggtgcagtttgt

SEQ ID NO: 1193 - DNA, 312 bp, Homo sapiens
cattttacgatagattaattataagtgatgagaaaaacaaaagtgaatgattacatatttttaaatattggcaatgtgcctagtagctttagttttgtgttttaaaagaaaagcagaaatcctgatcactgggtttaacagctaatgaaaagttggtagagaaaaaattaaagtttttgcattgtgctataggaattagacctaaagatttgattccctgactgtgttgtgtgtcggcttttagtgtaaaatatggttttatgagaccacctgatcccatgaaggatgcattatcagaacctgttaaaaaaa

SEQ ID NO: 1194 - DNA, 329 bp, Homo sapiens
tttagggagagaattgtggctatgttacaaacaatctaccagagacttagagacggcagctgtctattccccatttgacttcatcatttatgagcagacgtttgttgagcacatattgggtagcaaaacatctataatattagcttttaattttttaaaaaacttttatttccagaaagcttagctttatctacaagtacagttggtccttgaacaatgtagattagggggtgctgaccctctgtgaagctgaaaaaccatgtataatttttgactccctgaaaacgtaacaatgaatagcctgttgttcactggaagcattgctgatg

SEQ ID NO: 1195 - DNA, 444 bp, Homo sapiens
  misc_feature (169)..(169): n is a, c, g, or t
agttttctaatctgtgaaatgaagtattcttgggccaggtgggctccacatctctttcagttattagatcctatggttatagaaaactagattctcttttgtcgttgttttttgagacaaggttttgctctgttgccgaggctaaagcgcaggctgcactgcacttcgnacctccctggatcaagccatcctcccacgtcagcttcctgagtagcttggactacaggcatgtaccaccacacctgggctaatgtttgtattttttatagagacagggtttgccttgttgcctcggctggtctcaaactcctagggctcaagcaatcttcggcaccttgggccttccaaagtgctggggattacagggcatggaaccaccacgcctaggcctgaaaactaggattcttaactctgctatcatcattgccattcttgaaccacaga

SEQ ID NO: 1196 - DNA, 367 bp, Homo sapiens
gcactcattgcctagcaaccaccggcccttaccccacactgtctttgaaaagctcctgcttatgagccttggatgagactgatttgagtgttaactccacctcccacgtggcgtggctggcctcctgtctgtgaaactctttctttattgcagtgttgtggtctttatttgcgcagtgggcaggaagaaccccttgggtagttacaaaaggtcacctggaaatgaagtgacaactaattaggtatgaatcaacatggtgagcaaaggtcaggggagaggttcacactgcggtgatggatggtctcaaggggttgggtcggatttgcagtaaaagagattttcctggaatctgagtgatgaagaataa

SEQ ID NO: 1197 - DNA, 347 bp, Homo sapiens
tttttttttctgagatagggtctggctctgtcacccaggctggagtgcagtggtgtgatctcagctcactacaaactccgcttcctgggttcaagtgatcctcccacctcggcctcccaactagctgggactacaggtgtgtgcaaccacactcagataatttttgtatttttagtaaggacaggttttcaccatgttggccaggctggtcttcaactcctgacctcaagcgatctgcctaccttgacttcccaaagtgctgggatgacaggtgtaagccaccatatccagcccaagaccttttgcttttagttactataaatctattaaacttgtcaatttacctc

SEQ ID NO: 1198 - DNA, 419 bp, Homo sapiens
tagcacccacctatttaattccaagttagaacaatctaaccctcattctaaaatcctcaacagaaacaatcccctttaatcctatcatgttacagtgcatcgcaggcaatggaatcctactgcattttgagtcttttggaaataggcagtatcatctttgtcttggtattcttaccgtgcacagagtaaacgcttagcaaattattgaaagaataaacaacttgctccaaaacaccagagaagtgccgaatgaggagctgccatgctcaggcagtcattctgcatgattcttattctacaggaggaaatgaagcaagtgtttgccagttggaagggtagaaggaatctttgggagggaggctgccattaccctagctgaagtgaagccaggttaaaaccctcttctggtttaaaaaaaa

SEQ ID NO: 1199 - DNA, 422 bp, Homo sapiens
aaattaaaaaataaaattgcaattctgcctttactccaagaaggtagtggtcttcagagacaaagggtattgcaggtgtgtttactgacttcttcagtgacagcctaatattaggagaaatccacaagcaaagtataccacatttatcctgccttgcccacagatctgtgactttatttttctttttgcctcttcctcttcttccttgctcctgacttcagtgttaagtcacaccatgtctttctctaaattaaaataaatttttaaagaaaaaataaaaatataaaacttgaaaatgttcttaaatctaatgggaaaatgttctgtgtgtttgtcttgtctctgagtttaaattccttgaaagaataacggtatgttacttcaactccttccttggatttcagattaaaatatttaaaaat

SEQ ID NO: 1200 - DNA, 413 bp, Homo sapiens
actctgtctcaaaaaaaaaaaaaaaaaagaaaaaaaaagaacaactttctcctggagtagcctatgtgcgccacctacctaacctactgaatgaaacccagatcctttcctatttctcccagtgtggcactgttacaaggttcagactatccagaaagaaaaggactggaaatagcaaaggctatgcatttgtggagtttgagtctgaggatgttgctaagatagttgctgaaacaatgaacaactacatgtttggtgaaagactcttggagagtcattttatgccacctgaaaaagtacagaaagaactctttcaagactggaatattccatttaagcagcaatcatatccatcagtgaaatgtataatcagaacctgcacttacacaagagctacggatggaggagtgatt

SEQ ID NO: 1201 - DNA, 2486 bp, Homo sapiens
aggctagaggctgaggcaggagaatggcgtgaacccgggaggtggagcttgcagtgagccaagactgcactactgcactccagcctgggtgacagagcgagactccgtctcaaaaaaaaaaaaaaaaaaaaaagaaagaccacaagtaacattcttagttttaaataaaaccctcaaccttctctttgtttgttggacatactaaagatcacctagaattgaaattctttcttctcaaaacattaaatttagttttgtgtctacattttcattttgactttgacatgcatggtgtcagaagtgggatacaaagctgactcacctcatggagaatcattggcctttggagttatggcatgaggtacccatgttggggccctttgaaccccctacacccccaccactttcacaggtaatcctttctccctccagtaagtatctcttggacagaactctcagatatggttcgagttctgttttatttgggatatgattagggagaggtctttccccctcttgtttggtagatctgttgggtagaattattttccccctgttgacctcagctgcgaggtttggaccttgaggcttggatgagggaatttttccctttctttggagaaggcttatcattcttactggtaagcatgtattttattttctgtcctgtcttgtatttatttggcctttgtgtattcagtgcttgcatttacttggcttttgcatagttgacattaaatcagagcacccacgaaatgagctctcaaagttcaaaggcatgccagaatattttctggaactccagctagtaacatattcaaacattacagggatcatttagtctgtttttcttaaaactgaactaaaagatggaggctataaaatcatacactccaaataagatatgcatatttcattgatatcttgagtctaaaaaaaataaaaacaaaaacaaaacacattcaggatacaaatattgccttgttaaaaaatactgtctcaaaggtggctgaaactttcttttctagacctttcccctccccttcttacagtatcccctctttatccttctctaaacagctattctaacatactacttaaataaaaacacttgaaaaccagcagatataaaacaaagtcattttgaccttcctactgttttttttttaaagcaaagattaaattcccatgtaaaaccttcctccctatacaaaaaagaatagcagcatttttatcttcaatgacaaagaattgagtccaagaaaatactgtataaaccttgttaaaaatcactcttgtcttttggtcctactcacataattcagcacactttcacagttaactattttttgttcaatttagtgcactggtgagtgactcaaactgctttatcccaaatttgatttacagcctttataagattgcctattaaaaaagcttaaagcttatccttagcccattttgtcagaaaaataatttgcatctaatcatttttataaactggtgaatttacgtgttttactatatcatgactaaaattctaaaataaaagttttaatatctttatgtatatgtgtttaaatgtgtttatgtgtatgtacatatattatgttgaatgttgtatctacataaaagctggtgtagtcagccagaaatcccttaacaaattttattctgattggtttaaataaatgagcactcatataaaatgtatagtaattaacccccagttttttttagttgatgtgacttaagtaaatctttgataaattaattggttttaaaattgtggataaaataaaattagaaatgtcttcaaaattgtcagcagacatttttgtctgggtttactggtcagacagttttatatttgcctctgctagatgttttaaagtcataaagcctaaaacaaaatgatctttgtttatatagtttttaaataaatatgattatattgttgttttaataaaaatagctgtaacttttctgagttagcaacagggtggctgtttttaactttaaggttcttacttaaaccttaatatcaagataaatacttcatggtaacagtctataaaactgattaataaaaacaatgactagttctatctcaattttcataaatctaggaataattgagaaataaatcttataaatgaaataaacatttataaatgagcttttcatgtaattttaaaatcttaaaattatgttaaatgatactcattaaatgtctggatcatatccaaattaaaaaaaaattgctaaatacatagacatttgttcttggcttcttaggttttataaaaggactaaaagtatttcggtctattaatcaaaatataaatttaggaaaatacaattgatgtattaaaaattatatggtaaatttttatcctaagataaaataattggttgttaaaaattttattttttatttttattttttgagaccgagttttgctcttattgcccaggctagagtg

SEQ ID NO: 1202 - DNA, 289 bp, Homo sapiens
tctcccctgcatatggaagattgtatatgtgcccttttcccccctgaatcatttcaaagtaagttgccagtatcagcatttcagtgttaagtactttcgcagatatcttctaggaaccaggacgttctcctatataatcacaataccattaatcccaccccaaaaatttaacatcaatacactaatgatacctactgtatagattataatcagctttcttgcagtaatctgtttagaaggcttgcaccctgtcaccatccactgattaaattttgaactctaacttgaa

SEQ ID NO: 1203 - DNA, 6494 bp, Homo sapiens
cgcacaaggtggcagcccctgatgtcgtcgtgccaacgctggacacagtccgccacgaagccctcttgtacacttggctggccgaacacaagcccctggtcttgtgtggccctcctgggtctggcaagaccatgacactcttcagcgccctccgggccttgcctgacatggaggtggtgggtctcaacttctccagtgctactactccagagctgcttctgaagacttttgatcactactgcgagtacaggcgcacacctaatggggtggttttggctcctgttcaacttggaaagtggctggtgttgttctgtgatgaaatcaacttgccagatatggataaatatgggacccagagggtcatatccttcatcagacagatggtggagcacggaggcttttaccgtacctcagatcaaacatgggtgaagctggagagaatccagtttgttggggcttgtaatccccccacagaccctggaagaaagcccctctcacacaggttcctgcgccacgtgcctgtcgtgtatgtggattacccgggccccgcctccctcacacagatctacggcaccttcaaccgcgccatgctgaggctcattccatccctgcggacgtatgcagagccgctcactgctgccatggtggagttctacaccatgtctcaggagagattcacccaggatacacaacctcactatatctattcaccccgtgaaatgactaggtgggtgagaggcatctttgaagcgctgagacctctggagaccctgcctgttgaaggcctcattcggatttgggcacatgaagctctgcgtctcttccaagatagactcgtagaggatgaggagaggcgttggactgatgagaacatcgacacggttgctctgaagcacttccctaacatcgacagagagaaggcaatgagccgacccatcttgtacagcaactggctgtcaaaggattacatcccagtagaccaagaagagttaagagattatgtcaaagctaggctgaaggtcttttatgaagaagaacttgatgttccgctggtgctgtttaatgaagtcctagaccacgtgctgaggattgacagaatattccgtcaacctcaaggccacttgcttctgattggtgttagtggagcaggaaaaactaccctgtctcgtttcgtcgcctggatgaacggtttgagtgtgtaccagattaaggtccataggaagtacacaggggaagactttgatgaagatctacggacagtgttgagacgttctggctgtaaaaatgaaaagatagcatttataatggatgaatctaatgtgttagattctggattcctggagcgaatgaatacccttctggccaatggagaggtgcctggtctctttgaaggagacgagtatgccaccttgatgacgcagtgcaaagagggggcacagaaggaaggcctgatgctggactcgcacgaggagctctacaagtggttcactagccaggttatccgcaacctccacgtcgtgttcaccatgaacccgtcctcggagggactcaaggaccgggcagctacatcaccagcacttttcaacaggtgtgtgttgaattggtttggagactggtccaccgaagcactgtatcaggttggcaaagaattcacaagtaagatggatctggagaagccaaattacatcgtgcctgattacatgccagttgtgtatgataagctgccgcagccaccatcccatcgggaagccattgtgaacagctgtgtgtttgttcatcagactcttcaccaggcgaatgctcggctagcaaagcgaggcggcagaacgatggccatcacccctcgccactacctggacttcatcaatcactatgccaacctgttccacgagaagcggagcgagctggaggagcagcagatgcacttgaacgtggggctcaggaagatcaaagagacagtcgaccaggtagaagaactgcgtcgtgacttgaggataaagagccaagagctggaggtgaagaatgcagcagccaatgacaagctgaaaaagatggtgaaagaccagcaggaggctgaaaagaagaaggttatgagccaagaaatccaggaacagctgcataagcagcaggaggtaattgcagacaaacagatgagtgtcaaagaagatcttgataaggtggaacctgccgtcattgaggcccagaatgctgtgaagtcgatcaagaagcagcacctggtggaggtgaggtccatggccaaccctcctgctgctgtgaagctggcgctggagtccatctgcctgctgctgggggcaagcaccacagactggaagcagatccgctccatcatcatgcgggagaacttcatccccaccatcgtcaacttctctgcagaggagatcagtgacgccataagggagaagatgaagaaaaattacatgtccaatccaagttacaattatgaaattgtgaatcgggcttccctggcttgcggccctatggtgaaatgggcaattgcacagcttaactatgcagacatgttaaagagagtggagcccctacgcaatgagctgcagaagctggaagatgacgccaaggacaaccagcagaaggccaacgaggtggagcagatgatccgagacctggaagccagcatcgcccgctacaaggaggaatacgccgtcctgatctcagaggcccaggccatcaaggcagacctggcagctgtcgaggcaaaagtaaaccggagcactgctcttctgaagagcttgtctgctgaacgtgaacgatgggaaaaaacaagtgaaactttcaaaaaccagatgtccaccattgctggggactgtctcttgtcagctgcgttcattgcctacgcgggttactttgaccagcagatgcgtcagaacttgttcactacctggtcccatcacctacagcaagccaacatccagttccgtacagatattgccaggacggaatacctttccaatgctgatgagcgtcttcgctggcaggccagctccttgcctgctgatgacctttgcacagaaaatgccatcatgctgaaacgattcaataggtatccgctgatcattgacccctctggacaggccacagaattcattatgaatgaatataaggatcgtaagatcacacggaccagcttcctggatgacgccttcagaaagaacttagagagtgcactgagattcggtaacccccttctggtccaggatgtggaaagctacgatccagttttgaacccggtgctgaaccgtgaagtgcggcgaacaggggggagagtgctgatcactctcggggaccaggacatagacctgtcgccatcgtttgtcatcttcctgtccacccgggatccaactgtcgagttcccaccagatctctgttcccgggttacttttgtaaacttcacagttacccgtagcagtttacaaagccagtgtctaaatgaagtacttaaagcagaaagacctgatgtggacgagaaacgatctgatcttcttaaacttcaaggggaatttcagctccgtttgcgtcagctggaaaaatctctactacaagctctgaacgaggtgaaagggcgcattttggatgacgacacgatcataaccactctggagaacctgaagagagaggctgcagaggtcaccaggaaagttgaggagacggacattgtcatgcaggaggtggagaccgtgtcccagcagtacctcccgctctccaccgcctgcagcagcatctacttcaccatggagtccctcaagcagatacacttcttgtaccagtactccctccagtttttcctggacatttatcacaacgtcctatacgagaacccgaacctgaagggtgtcaccgaccacacacagcgcctgtccattataacaaaggacctcttccaggtggcgtttaaccgagtggctcgaggcatgctgcatcaggaccacattacctttgccatgctgctggcaagaatcaaactgaagggcaccgtgggggagcccacctacgatgcagaattccagcacttcttgagaggaaatgagattgtcctgagtgctggctccacccccaggatccagggcctgactgtggagcaggcggaggcggtggtgaggctgagctgccttcccgcgtttaaggacttgattgcaaaggttcaggcagacgagcaatttggcatctggctggacagcagctccccggagcagactgtgccctacctctggagtgaagaaacacctgcaacacccattggccaggccatccaccgcctgctcctgatccaggctttccggcccgatcgcctgttggccatggcccacatgtttgtttcaacaaaccttggggagtctttcatgtccatcatggagcagccgctcgacctgacccacattgtgggcacagaggtgaagcccaacactcctgtcttaatgtgctctgtgcctggttatgatgccagtggacatgtcgaggaccttgcagccgagcagaacacgcagatcacttcaattgcaatcggctctgcagaaggctttaaccaagcagataaggcaataaacaccgctgtaaagtcgggcaggtgggtgatgctgaagaatgtgcatctggccccagggtggctgatgcagctggagaagaagttgcattccctgcagccgcatgcctgcttccgactcttcctcaccatggagatcaaccccaaggtgcctgtgaatctgctccgtgcgggccgcatctttgtgttcgagccaccgccaggggtgaaggccaacatgctgaggacgttcagcagcattcccgtctcacggatatgcaagtctcccaacgagcgtgcccgcttgtacttcctgctggcctggtttcatgcgatcatccaagaacgcttacgatacgcaccactggggtggtcaaagaagtatgaatttggagagtctgacctgcggtcagcttgcgatacggtggacacgtggctggatgacacggccaagggcaggcagaacatctcaccggataagatcccgtggtctgcactaaagaccttaatggcccagtccatttatggcgggcgcgtggacaacgagtttgaccagcgtctgctcaacaccttcctggagcgcctgttcacaaccaggagtttcgacagtgagtttaagctggcatgcaaggtcgacggacataaagacattcaaatgccagatggcatcaggcgagaggagtttgtgcagtgggtggagttgctccccgacacccagacgccctcctggctgggcctgcccaacaacgccgagagagtcctccttaccacacagggtgtggacatgatcagtaaaatgctgaagatgcagatgttggaggatgaggacgacctggcctacgcagagaccgagaagaagacgaggacagactccacgtccgacgggcgccctgcctggatgcggacactgcacaccaccgcgtccaactggctgcacctcatcccccagacgctgagccacctcaagcgcaccgtggagaatatcaaggatcctttgttcaggttctttgagagagaagtgaagatgggcgcaaagctgcttcaggacgttcgccaggaccttgcagatgtcgtccaggtgtgcgaaggaaagaagaagcagaccaactacttgcgcacgctgatcaacgagctagtgaaagggatcttgcctcggagctggtcccactacacggtgcctgccggcatgaccgtcatccagtgggtgtccgacttcagcgagaggatcaaacagctgcagaacatctcactggcagctgcatctggtggcgccaaggagctaaagaacatccacgtgtgcctgggtggcctgttcgtgcctgaggcgtacatcactgccaccaggcagtatgtggcccaggccaacagctggtccctggaggagctctgcctggaagtcaacgtcaccacctcacagggcgccacccttgacgcttgcagcttcggagtcacgggttgaaacttcaaggggccacgtgcaacaacaacaagctgtcactgtccaatgccatctcaaccgcccttcccctgacgcagctgcgctgggtcaagcagacaaacaccgagaagaaggccagtgtggtaaccttacctgtctacctgaacttcacccgtgcagacctcatcttcaccgtggacttcgaaattgctacaaaggaggatcctcgcagcttctacgagcggggtgtcgcagtcttgtgcacagagtaaacttttctagctgcccctttctgtaatagtgaaagttggtatttaacatttattcatttttaaaatatttggaaggtctgagcttgtgaaaagaaagtggttggtctgaggttggaggaagctgaatggaatctgacggttgggagtggtggaaattggaaggataccaggaggtatttgggaaggccagtggcgtggctcctttgaggaaataaaacactaagcatga

SEQ ID NO: 1204 - DNA, 6246 bp, Homo sapiens
cgcacaaggtggcagcccctgatgtcgtcgtgccaacgctggacacagtccgccacgaagccctcttgtacacttggctggccgaacacaagcccctggtcttgtgtggccctcctgggtctggcaagaccatgacactcttcagcgccctccgggccttgcctgacatggaggtggtgggtctcaacttctccagtgctactactccagagctgcttctgaagacttttgatcactactgcgagtacaggcgcacacctaatggggtggttttggctcctgttcaacttggaaagtggctggtgttgttctgtgatgaaatcaacttgccagatatggataaatatgggacccagagggtcatatccttcatcagacagatggtggagcacggaggcttttaccgtacctcagatcaaacatgggtgaagctggagagaatccagtttgttggggcttgtaatccccccacagaccctggaagaaagcccctctcacacaggttcctgcgccacgtgcctgtcgtgtatgtggattacccgggccccgcctccctcacacagatctacggcaccttcaaccgcgccatgctgaggctcattccatccctgcggacgtatgcagagccgctcactgctgccatggtggagttctacaccatgtctcaggagagattcacccaggatacacaacctcactatatctattcaccccgtgaaatgactaggtgggtgagaggcatctttgaagcgctgagacctctggagaccctgcctgttgaaggcctcattcggatttgggcacatgaagctctgcgtctcttccaagatagactcgtagaggatgaggagaggcgttggactgatgagaacatcgacacggttgctctgaagcacttccctaacatcgacagagagaaggcaatgagccgacccatcttgtacagcaactggctgtcaaaggattacatcccagtagaccaagaagagttaagagattatgtcaaagctaggctgaaggtcttttatgaagaagaacttgatgttccgctggtgctgtttaatgaagtcctagaccacgtgctgaggattgacagaatattccgtcaacctcaaggccacttgcttctgattggtgttagtggagcaggaaaaactaccctgtctcgtttcgtcgcctggatgaacggtttgagtgtgtaccagattaaggtccataggaagtacacaggggaagactttgatgaagatctacggacagtgttgagacgttctggctgtaaaaatgaaaagatagcatttataatggatgaatctaatgtgttagattctggattcctggagcgaatgaatacccttctggccaatggagaggtgcctggtctctttgaaggagacgagtatgccaccttgatgacgcagtgcaaagagggggcacagaaggaaggcctgatgctggactcgcacgaggagctctacaagtggttcactagccaggttatccgcaacctccacgtcgtgttcaccatgaacccgtcctcggagggactcaaggaccgggcagctacatcaccagcacttttcaacaggtgtgtgttgaattggtttggagactggtccaccgaagcactgtatcaggttggcaaagaattcacaagtaagatggatctggagaagccaaattacatcgtgcctgattacatgccagttgtgtatgataagctgccgcagccaccatcccatcgggaagccattgtgaacagctgtgtgtttgttcatcagactcttcaccaggcgaatgctcggctagcaaagcgaggcggcagaacgatggccatcacccctcgccactacctggacttcatcaatcactatgccaacctgttccacgagaagcggagcgagctggaggagcagcagatgcacttgaacgtggggctcaggaagatcaaagagacagtcgaccaggtagaagaactgcgtcgtgacttgaggataaagagccaagagctggaggtgaagaatgcagcagccaatgacaagctgaaaaagatggtgaaagaccagcaggaggctgaaaagaagaaggttatgagccaagaaatccaggaacagctgcataagcagcaggaggtaattgcagacaaacagatgagtgtcaaagaagatcttgataaggtggaacctgccgtcattgaggcccagaatgctgtgaagtcgatcaagaagcagcacctggtggaggtgaggtccatggccaaccctcctgctgctgtgaagctggcgctggagtccatctgcctgctgctgggggcaagcaccacagactggaagcagatccgctccatcatcatgcgggagaacttcatccccaccatcgtcaacttctctgcagaggagatcagtgacgccataagggagaagatgaagaaaaattacatgtccaatccaagttacaattatgaaattgtgaatcgggcttccctggcttgcggccctatggtgaaatgggcaattgcacagcttaactatgcagacatgttaaagagagtggagcccctacgcaatgagctgcagaagctggaagatgacgccaaggacaaccagcagaaggccaacgaggtggagcagatgatccgagacctggaagccagcatcgcccgctacaaggaggaatacgccgtcctgatctcagaggcccaggccatcaaggcagacctggcagctgtcgaggcaaaagtaaaccggagcactgctcttctgaagagcttgtctgctgaacgtgaacgatgggaaaaaacaagtgaaactttcaaaaaccagatgtccaccattgctggggactgtctcttgtcagctgcgttcattgcctacgcgggttactttgaccagcagatgcgtcagaacttgttcactacctggtcccatcacctacagcaagccaacatccagttccgtacagatattgccaggacggaatacctttccaatgctgatgagcgtcttcgctggcaggccagctccttgcctgctgatgacctttgcacagaaaatgccatcatgctgaaacgattcaataggtatccgctgatcattgacccctctggacaggccacagaattcattatgaatgaatataaggatcgtaagatcacacggaccagcttcctggatgacgccttcagaaagaacttagagagtgcactgagattcggtaacccccttctggtccaggatgtggaaagctacgatccagttttgaacccggtgctgaaccgtgaagtgcggcgaacaggggggagagtgctgatcactctcggggaccaggacatagacctgtcgccatcgtttgtcatcttcctgtccacccgggatccaactgtcgagttcccaccagatctctgttcccgggttacttttgtaaacttcacagttacccgtagcagtttacaaagccagtgtctaaatgaagtacttaaagcagaaagacctgatgtggacgagaaacgatctgatcttcttaaacttcaaggggaatttcagctccgtttgcgtcagctggaaaaatctctactacaagctctgaacgaggtgaaagggcgcattttggatgacgacacgatcataaccactctggagaacctgaagagagaggctgcagaggtcaccaggaaagttgaggagacggacattgtcatgcaggaggtggagaccgtgtcccagcagtacctcccgctctccaccgcctgcagcagcatctacttcaccatggagtccctcaagcagatacacttcttgtaccagtactccctccagtttttcctggacatttatcacaacgtcctatacgagaacccgaacctgaagggtgtcaccgaccacacacagcgcctgtccattataacaaaggacctcttccaggtggcgtttaaccgagtggctcgaggcatgctgcatcaggaccacattacctttgccatgctgctggcaagaatcaaactgaagggcaccgtgggggagcccacctacgatgcagaattccagcacttcttgagaggaaatgagattgtcctgagtgctggctccacccccaggatccagggcctgactgtggagcaggcggaggcggtggtgaggctgagctgccttcccgcgtttaaggacttgattgcaaaggttcaggcagacgagcaatttggcatctggctggacagcagctccccggagcagactgtgccctacctctggagtgaagaaacacctgcaacacccattggccaggccatccaccgcctgctcctgatccaggctttccggcccgatcgcctgttggccatggcccacatgtttgtttcaacaaaccttggggagtctttcatgtccatcatggagcagccgctcgacctgacccacattgtgggcacagaggtgaagcccaacactcctgtcttaatgtgctctgtgcctggttatgatgccagtggacatgtcgaggaccttgcagccgagcagaacacgcagatcacttcaattgcaatcggctctgcagaaggctttaaccaagcagataaggcaataaacaccgctgtaaagtcgggcaggtgggtgatgctgaagaatgtgcatctggccccagggtggctgatgcagctggagaagaagttgcattccctgcagccgcatgcctgcttccgactcttcctcaccatggagatcaaccccaaggtgcctgtgaatctgctccgtgcgggccgcatctttgtgttcgagccaccgccaggggtgaaggccaacatgctgaggacgttcagcagcattcccgtctcacggatatgcaagtctcccaacgagcgtgcccgcttgtacttcctgctggcctggtttcatgcgatcatccaagaacgcttacgatacgcaccactggggtggtcaaagaagtatgaatttggagagtctgacctgcggtcagcttgcgatacggtggacacgtggctggatgacacggccaagggcaggcagaacatctcaccggataagatcccgtggtctgcactaaagaccttaatggcccagtccatttatggcgggcgcgtggacaacgagtttgaccagcgtctgctcaacaccttcctggagcgcctgttcacaaccaggagtttcgacagtgagtttaagctggcatgcaaggtcgacggacataaagacattcaaatgccagatggcatcaggcgagaggagtttgtgcagtgggtggagttgctccccgacacccagacgccctcctggctgggcctgcccaacaacgccgagagagtcctccttaccacacagggtgtggacatgatcagtaaaatgctgaagatgcagatgttggaggatgaggacgacctggcctacgcagagaccgagaagaagacgaggacagactccacgtccgacgggcgccctgcctggatgcggacactgcacaccaccgcgtccaactggctgcacctcatcccccagacgctgagccacctcaagcgcaccgtggagaatatcaaggatcctttgttcaggttctttgagagagaagtgaagatgggcgcaaagctgcttcaggacgttcgccaggaccttgcagatgtcgtccaggtgtgcgaaggaaagaagaagcagaccaactacttgcgcacgctgatcaacgagctagtgaaagggatcttgcctcggagctggtcccactacacggtgcctgccggcatgaccgtcatccagtgggtgtccgacttcagcgagaggatcaaacagctgcagaacatctcactgtccaatgccatctcaaccgcccttcccctgacgcagctgcgctgggtcaagcagacaaacaccgagaagaaggccagtgtggtaaccttacctgtctacctgaacttcacccgtgcagacctcatcttcaccgtggacttcgaaattgctacaaaggaggatcctcgcagcttctacgagcggggtgtcgcagtcttgtgcacagagtaaacttttctagctgcccctttctgtaatagtgaaagttggtatttaacatttattcatttttaaaatatttggaaggtctgagcttgtgaaaagaaagtggttggtctgaggttggaggaagctgaatggaatctgacggttgggagtggtggaaattggaaggataccaggaggtatttgggaaggccagtggcgtggctcctttgaggaaataaaacactaagcatga

SEQ ID NO: 1205 - DNA, 2245 bp, Homo sapiens
tgtacctgtttcagcacccattggccaggccatccaccgcctgctcctgatccaggctttccggcccgatcgcctgttggccatggcccacatgtttgtttcaacaaaccttggggagtctttcatgtccatcatggagcagccgctcgacctgacccacattgtgggcacagaggtgaagcccaacactcctgtcttaatgtgctctgtgcctggttatgatgccagtggacatgtcgaggaccttgcagccgagcagaacacgcagatcacttcaattgcaatcggctctgcagaaggctttaaccaagcagataaggcaataaacaccgctgtaaagtcgggcaggtgggtgatgctgaagaatgtgcatctggccccagggtggctgatgcagctggagaagaagttgcattccctgcagccgcatgcctgcttccgactcttcctcaccatggagatcaaccccaaggtggtgcctgtgaatctgctccgtgcgggccgcatctttgtgttcgagccaccgccaggggtgaaggccaacatgctgaggacgttcagcagcattcccgtctcacggatatgcaagtctcccaacgagcgtgcccgcttgtacttcctgctggcctggtttcatgcgatcatccaagaacgcttacgatacgcaccactggggtggtcaaagaagtatgaatttggagagtctgacctgcggtcagcttgcgatacggtggacacgtggctggatgacacggccaagggcaggcagaacatctcaccggataagatcccgtggtctgcactaaagaccttaatggcccagtccatttatggcgggcgcgtggacaacgagtttgaccagcgtctgctcaacaccttcctggagcgcctgttcacaaccaggagtttcgacagtgagtttaagctggcatgcaaggtcgacggacataaagacattcaaatgccagatggcatcaggcgagaggagtttgtgcagtgggtggagttgctccccgacacccagacgccctcctggctgggcctgcccaacaacgccgagagagtcctccttaccacacagggtgtggacatgatcagtaaaatgctgaagatgcagatgttggaggatgaggacgacctggcctacgcagagaccgagaagaagacgaggacagactccacgtccgacgggcgccctgcctggatgcggacactgcacaccaccgcgtccaactggctgcacctcatcccccagacgctgagccacctcaagcgcaccgtggagaatatcaaggatcctttgttcaggttctttgagagagaagtgaagatgggcgcaaagctgcttcaggacgttcgccaggaccttgcagatgtcgtccaggtgtgcgaaggaaagaagaagcagaccaactacttgcgcacgctgatcaacgagctagtgaaagggatcttgcctcggagctggtcccactacacggtgcctgccggcatgaccgtcatccagtgggtgtccgacttcagcgagaggatcaaacagctgcagaacatctcactggcagctgcatctggtggcgccaaggagctaaagaacatccacgtgtgcctgggtggcctgttcgtgcctgaggcgtacatcactgccaccaggcagtatgtggcccaggccaacagctggtccctggaggagctctgcctggaagtcaacgtcaccacctcacagggcgccacccttgacgcttgcagcttcggagtcacgggttgaaacttcaaggggccacgtgcaacaacaacaagctgtcactgtccaatgccatctcaaccgcccttcccctgacgcagctgcgctgggtcaagcagacaaacaccgagaagaaggccagtgtggtaaccttacctgtctacctgaacttcacccgtgcagacctcatcttcaccgtggacttcgaaattgctacaaaggaggatcctcgcagcttctacgagcggggtgtcgcagtcttgtgcacagagtaaacttttctagctgcccctttctgtaatagtgaaagttggtatttaacatttattcatttttaaaatatttggaaggtctgagcttgtgaaaagaaagtggttggtctgaggttggaggaagctgaatggaatctgacggttgggagtggtggaaattggaaggataccaggaggtatttgggaaggccagtggcgtggctcctttgaggaaataaaacactaagcatga

SEQ ID NO: 1206 - DNA, 2182 bp, Homo sapiens
tgtacctgtttcagcacccattggccaggccatccaccgcctgctcctgatccaggctttccggcccgatcgcctgttggccatggcccacatgtttgtttcaacaaaccttggggagtctttcatgtccatcatggagcagccgctcgacctgacccacattgtgggcacagaggtgaagcccaacactcctgtcttaatgtgctctgtgcctggttatgatgccagtggacatgtcgaggaccttgcagccgagcagaacacgcagatcacttcaattgcaatcggctctgcagaaggctttaaccaagcagataaggcaataaacaccgctgtaaagtcgggcaggtgggtgatgctgaagaatgtgcatctggccccagggtggctgatgcagctggagaagaagttgcattccctgcagccgcatgcctgcttccgactcttcctcaccatggagatcaaccccaaggtggccaacatgctgaggacgttcagcagcattcccgtctcacggatatgcaagtctcccaacgagcgtgcccgcttgtacttcctgctggcctggtttcatgcgatcatccaagaacgcttacgatacgcaccactggggtggtcaaagaagtatgaatttggagagtctgacctgcggtcagcttgcgatacggtggacacgtggctggatgacacggccaagggcaggcagaacatctcaccggataagatcccgtggtctgcactaaagaccttaatggcccagtccatttatggcgggcgcgtggacaacgagtttgaccagcgtctgctcaacaccttcctggagcgcctgttcacaaccaggagtttcgacagtgagtttaagctggcatgcaaggtcgacggacataaagacattcaaatgccagatggcatcaggcgagaggagtttgtgcagtgggtggagttgctccccgacacccagacgccctcctggctgggcctgcccaacaacgccgagagagtcctccttaccacacagggtgtggacatgatcagtaaaatgctgaagatgcagatgttggaggatgaggacgacctggcctacgcagagaccgagaagaagacgaggacagactccacgtccgacgggcgccctgcctggatgcggacactgcacaccaccgcgtccaactggctgcacctcatcccccagacgctgagccacctcaagcgcaccgtggagaatatcaaggatcctttgttcaggttctttgagagagaagtgaagatgggcgcaaagctgcttcaggacgttcgccaggaccttgcagatgtcgtccaggtgtgcgaaggaaagaagaagcagaccaactacttgcgcacgctgatcaacgagctagtgaaagggatcttgcctcggagctggtcccactacacggtgcctgccggcatgaccgtcatccagtgggtgtccgacttcagcgagaggatcaaacagctgcagaacatctcactggcagctgcatctggtggcgccaaggagctaaagaacatccacgtgtgcctgggtggcctgttcgtgcctgaggcgtacatcactgccaccaggcagtatgtggcccaggccaacagctggtccctggaggagctctgcctggaagtcaacgtcaccacctcacagggcgccacccttgacgcttgcagcttcggagtcacgggttgaaacttcaaggggccacgtgcaacaacaacaagctgtcactgtccaatgccatctcaaccgcccttcccctgacgcagctgcgctgggtcaagcagacaaacaccgagaagaaggccagtgtggtaaccttacctgtctacctgaacttcacccgtgcagacctcatcttcaccgtggacttcgaaattgctacaaaggaggatcctcgcagcttctacgagcggggtgtcgcagtcttgtgcacagagtaaacttttctagctgcccctttctgtaatagtgaaagttggtatttaacatttattcatttttaaaatatttggaaggtctgagcttgtgaaaagaaagtggttggtctgaggttggaggaagctgaatggaatctgacggttgggagtggtggaaattggaaggataccaggaggtatttgggaaggccagtggcgtggctcctttgaggaaataaaacactaagcatga

SEQ ID NO: 1207 - DNA, 5740 bp, Homo sapiens
cgcacaaggtggcagcccctgatgtcgtcgtgccaacgctggacacagtccgccacgaagccctcttgtacacttggctggccgaacacaagcccctggtcttgtgtggccctcctgggtctggcaagaccatgacactcttcagcgccctccgggccttgcctgacatggaggtggtgggtctcaacttctccagtgctactactccagagctgcttctgaagacttttgatcactactgcgagtacaggcgcacacctaatggggtggttttggctcctgttcaacttggaaagtggctggtgttgttctgtgatgaaatcaacttgccagatatggataaatatgggacccagagggtcatatccttcatcagacagatggtggagcacggaggcttttaccgtacctcagatcaaacatgggtgaagctggagagaatccagtttgttggggcttgtaatccccccacagaccctggaagaaagcccctctcacacaggttcctgcgccacgtgcctgtcgtgtatgtggattacccgggccccgcctccctcacacagatctacggcaccttcaaccgcgccatgctgaggctcattccatccctgcggacgtatgcagagccgctcactgctgccatggtggagttctacaccatgtctcaggagagattcacccaggatacacaacctcactatatctattcaccccgtgaaatgactaggtgggtgagaggcatctttgaagcgctgagacctctggagaccctgcctgttgaaggcctcattcggatttgggcacatgaagctctgcgtctcttccaagatagactcgtagaggatgaggagaggcgttggactgatgagaacatcgacacggttgctctgaagcacttccctaacatcgacagagagaaggcaatgagccgacccatcttgtacagcaactggctgtcaaaggattacatcccagtagaccaagaagagttaagagattatgtcaaagctaggctgaaggtcttttatgaagaagaacttgatgttccgctggtgctgtttaatgaagtcctagaccacgtgctgaggattgacagaatattccgtcaacctcaaggccacttgcttctgattggtgttagtggagcaggaaaaactaccctgtctcgtttcgtcgcctggatgaacggtttgagtgtgtaccagattaaggtccataggaagtacacaggggaagactttgatgaagatctacggacagtgttgagacgttctggctgtaaaaatgaaaagatagcatttataatggatgaatctaatgtgttagattctggattcctggagcgaatgaatacccttctggccaatggagaggtgcctggtctctttgaaggagacgagtatgccaccttgatgacgcagtgcaaagagggggcacagaaggaaggcctgatgctggactcgcacgaggagctctacaagtggttcactagccaggttatccgcaacctccacgtcgtgttcaccatgaacccgtcctcggagggactcaaggaccgggcagctacatcaccagcacttttcaacaggtgtgtgttgaattggtttggagactggtccaccgaagcactgtatcaggttggcaaagaattcacaagtaagatggatctggagaagccaaattacatcgtgcctgattacatgccagttgtgtatgataagctgccgcagccaccatcccatcgggaagccattgtgaacagctgtgtgtttgttcatcagactcttcaccaggcgaatgctcggctagcaaagcgaggcggcagaacgatggccatcacccctcgccactacctggacttcatcaatcactatgccaacctgttccacgagaagcggagcgagctggaggagcagcagatgcacttgaacgtggggctcaggaagatcaaagagacagtcgaccaggtagaagaactgcgtcgtgacttgaggataaagagccaagagctggaggtgaagaatgcagcagccaatgacaagctgaaaaagatggtgaaagaccagcaggaggctgaaaagaagaaggttatgagccaagaaatccaggaacagctgcataagcagcaggaggtaattgcagacaaacagatgagtgtcaaagaagatcttgataaggtggaacctgccgtcattgaggcccagaatgctgtgaagtcgatcaagaagcagcacctggtggaggtgaggtccatggccaaccctcctgctgctgtgaagctggcgctggagtccatctgcctgctgctgggggcaagcaccacagactggaagcagatccgctccatcatcatgcgggagaacttcatccccaccatcgtcaacttctctgcagaggagatcagtgacgccataagggagaagatgaagaaaaattacatgtccaatccaagttacaattatgaaattgtgaatcgggcttccctggcttgcggccctatggtgaaatgggcaattgcacagcttaactatgcagacatgttaaagagagtggagcccctacgcaatgagctgcagaagctggaagatgacgccaaggacaaccagcagaaggccaacgaggtggagcagatgatccgagacctggaagccagcatcgcccgctacaaggaggaatacgccgtcctgatctcagaggcccaggccatcaaggcagacctggcagctgtcgaggcaaaagtaaaccggagcactgctcttctgaagagcttgtctgctgaacgtgaacgatgggaaaaaacaagtgaaactttcaaaaaccagatgtccaccattgctggggactgtctcttgtcagctgcgttcattgcctacgcgggttactttgaccagcagatgcgtcagaacttgttcactacctggtcccatcacctacagcaagccaacatccagttccgtacagatattgccaggacggaatacctttccaatgctgatgagcgtcttcgctggcaggccagctccttgcctgctgatgacctttgcacagaaaatgccatcatgctgaaacgattcaataggtatccgctgatcattgacccctctggacaggccacagaattcattatgaatgaatataaggatcgtaagatcacacggaccagcttcctggatgacgccttcagaaagaacttagagagtgcactgagattcggtaacccccttctggtccaggatgtggaaagctacgatccagttttgaacccggtgctgaaccgtgaagtgcggcgaacaggggggagagtgctgatcactctcggggaccaggacatagacctgtcgccatcgtttgtcatcttcctgtccacccgggatccaactgtcgagttcccaccagatctctgttcccgggttacttttgtaaacttcacagttacccgtagcagtttacaaagccagtgtctaaatgaagtacttaaagcagaaagacctgatgtggacgagaaacgatctgatcttcttaaacttcaaggggaatttcagctccgtttgcgtcagctggaaaaatctctactacaagctctgaacgaggtgaaagggcgcattttggatgacgacacgatcataaccactctggagaacctgaagagagaggctgcagaggtcaccaggaaagttgaggagacggacattgtcatgcaggaggtggagaccgtgtcccagcagtacctcccgctctccaccgcctgcagcagcatctacttcaccatggagtccctcaagcagatacacttcttgtaccagtactccctccagtttttcctggacatttatcacaacgtcctatacgagaacccgaacctgaagggtgtcaccgaccacacacagcgcctgtccattataacaaaggacctcttccaggtggcgtttaaccgagtggctcgaggcatgctgcatcaggaccacattacctttgccatgctgctggcaagaatcaaactgaagggcaccgtgggggagcccacctacgatgcagaattccagcacttcttgagaggaaatgagattgtcctgagtgctggctccacccccaggatccagggcctgactgtggagcaggcggaggcggtggtgaggctgagctgccttcccgcgtttaaggacttgattgcaaaggttcaggcagacgagcaatttggcatctggctggacagcagctccccggagcagactgtgccctacctctggagtgaagaaacacctgcaacacccattggccaggccatccaccgcctgctcctgatccaggctttccggcccgatcgcctgttggccatggcccacatgtttgtttcaacaaaccttggggagtctttcatgtccatcatggagcagccgctcgacctgacccacattgtgggcacagaggtgaagcccaacactcctgtcttaatgtgctctgtgcctggttatgatgccagtggacatgtcgaggaccttgcagccgagcagaacacgcagatcacttcaattgcaatcggctctgcagaaggctttaaccaagcagataaggcaataaacaccgctgtaaagtcgggcaggtgggtgatgctgaagaatgtgcatctggccccagggtggctgatgcagctggagaagaagttgcattccctgcagccgcatgcctgcttccgactcttcctcaccatggagatcaaccccaaggtgcctgtgaatctgctccgtgcgggccgcatctttgtgttcgagccaccgccaggggtgaaggccaacatgctgaggacgttcagcagcattcccgtctcacggatatgcaagtctcccaacgagcgtgcccgcttgtacttcctgctggcctggtttcatgcgatcatccaagaacgcttacgatacgcaccactggggtggtcaaagaagtatgaatttggagagtctgacctgcggtcagcttgcgatacggtggacacgtggctggatgacacggccaagggcaggcagaacatctcaccggataagatcccgtggtctgcactaaagaccttaatggcccagtccatttatggcgggcgcgtggacaacgagtttgaccagcgtctgctcaacaccttcctggagcgcctgttcacaaccaggagtttcgacagtgagtttaagctggcatgcaaggtcgacggacataaagacattcaaatgccagatggcatcaggcgagaggagtttgtgcagtgggtggagttgctccccgacacccagacgccctcctggctgggcctgcccaacaacgccgagagagtcctccttaccacacagggtgtggacatgatcagtaaaatgctgaagatgcagatgttggaggatgaggacgacctggcctacgcagagaccgagaagaagacgaggacagactccacgtccgacgggcgccctgcctggatgcggacactgcacaccaccgcgtccaactggctgcacctcatcccccagacgctgagccacctcaagcgcaccgtggagaatatcaaggatcctttgttcaagttcctttcggacccgcaggtccacacggtgctggtggagcgctccacgctcaaagaggacgtcggtgatgaaggagaagaagaaaaagaattcatttcctataacatcaacatagacattcattatggggttaaatccatagcttggcaatcattaaggactcccgtgacgatcataaccgt

SEQ ID NO: 1208 - DNA, 369 bp, Homo sapiens
gctatatttcacagacagcacaggtggggtttgtgtattttcccggaaaccctctgtctggggagatacagcctgacctgaccgggtcccccactgagcaggaggccgggtcgctgggaaggaggacaaacctgtattccatgactgggtctgtctcggagctggtaagcacatgtccgctctgtgatgagccctggtgggctccatccagaccctccttgtgatgtttttgtagattttctgcccttctgggtccaggcccccttcttctgctctggcaaaagtgtcttactcataatgataatgacaacgagaattcccacacctggcatttgtaaagcactttgctatttagaaacaaaaactttt

SEQ ID NO: 1209 - DNA, 472 bp, Homo sapiens
cagtgaatttggttgttcttcctgcctggggtggtcagtttccaagcctttccagatggacttctgcagcccaaagctgcgtgctccccgtgcaggcccttgtcagagcagagaaagatggctgaagttgttgtccatctagatttttatcttcaaaacattgctgaaatcaatctctcttctaccgtctccgatttcctttgtccttatgggtggtctacaactttactatcattttagtggatgcaagaggagtggagataaacacgtgttcagcctgctgtgaatctctgcagtggctatgttgtttcttaaacagatgtaatgaggcatctattccctgtgtgccatgtgccccttgagtaggggacatctgttttgtgttgtctgtgtctccagcattagaatggaacctggcacacaatagaggctcaattagtatttgttgaataaatgaacattaagaaacaga

SEQ ID NO: 1210 - DNA, 422 bp, Homo sapiens
tccaaaagtttactttctagccccgggctgtccactgcagaagccaccaccacctgtgcactaccgggtacttgcaatgtggcatgtgtcactgaggaaacacattttcaatttcattcatttaaattcaatctattttattttattttgagatgaggtttcactccgttgctcaggctggagtgcagtggtacaaccacggctcaccacatccttgacttcccagcctcaggtgattcatgtctgaaatttattaattaaaaaataaatgtattaacaggcatgccaccatgcctactaatttttaaatttgttttgtagagacagggtcttctatgttgcccagactggtctcaaactcctgggctcaagcgatcctcctgccttggctccccaaagtactgggattacaggtgtgagcc

SEQ ID NO: 1211 - DNA, 416 bp, Homo sapiens
aaagtgtaaatctagaactgctaatttagtaggcttctttctataagtagcaacaagcttttaaaaaaattgtttgcaataaaatatccagtggaaacaaatttagtggtttccatttgaaaatgtaacttttaaatatcaaaaacaggaagcagcacagcagcacagcttagaagttacagtgtggatccgctgtgtgaacctgatgagttctttgagaaactctttgagtttctgtttgacctctttaacaacaagactataaaagtgaggcagtgtagccaagtagctaagaaaagaggcattagagaggctgaagcaggaggagaatcgcttgaacccaggaggtggcagaggttgcagtgagctgagatcgtgcatttgcactgcagcctgggcaacaagagggaaactca

SEQ ID NO: 1212 - DNA, 219 bp, Homo sapiens
taatcttttaattttatttcattgagaaataaaaacttctaattgttaaatttcattttctcaagaaatgttaatttcaaacaataatggtataaaaatatccataggatgaattttttctcaaccttgacctgaaacatgtgtttttaggaaattaaaaataactaatagcttcgacaactattcagtaatacttcttcagtattacttcagtattca

SEQ ID NO: 1213 - DNA, 371 bp, Homo sapiens
attatacccttactggtttttttgtttgattgttcagtctatacttatgttttgcttgagatgaaattatttctctggctgcttagagctactttcaatagattcagtcttttacattgattttatcattttagattcctacactcttttgttttgattccttgcttgtgtgactggatttcattgttaaatagttttttcaaaatgtgttttaagaaagtatgatttttgtttaaaaatgtttacctgtggtttttataccacaggtatggtatataccacaggtatgggtagatcttttctttttctcagaatctggtatatgttattccaatgtcttctggaattaaattttctgtggataagtcatc

SEQ ID NO: 1214 - DNA, 667 bp, Homo sapiens
gaattaaaaaaaaagaagaaagcttcacagaatttcctaaagaaacttctgactccctttcccttaccctttcctcttcttaatgctctgttacgaaagaaaaagctgatgttgctgttgagagtctcataccaggactggagcccccagttccccagcgcctcccatctcagacggaatctgtgacctcgaatcgcacagattctctcaccggggaagattccctgcttgattgctctctgctctctaaccctactactgaccttctggaagagtttgcccccacagcaatctctgctccagtccataaagctgcagaagatagtaatctcatctcaggttttgatgtccctgagggctcggacaaggtggctgaagatgagtttgaccctattcctgtattgataaccaaaaacccacaaggtgggcactctagaaacagcagtgggagctctgagtccagtcttcccaacctagccaggtctttactgctggtggatcagctcatagacctgtagccgtgacccagtagcagatgcagttctgtaaccttcataccgtaaaatacattttcattacggagttatgaaaaaaatgatttttttaaaaaaatctgcaaataaggggccctccagcccttttctcctaccccttgccttctcctgta

SEQ ID NO: 1215 - DNA, 329 bp, Homo sapiens
gctgggattacaggcgtgagccaccgcgcctggcctccatttatttgtaaatagataattctcaacagtatgtttactctggataaacatcagtcagtgcgtagaactggtaaatgtcagagaaatgtatcacttatcagagcgtctcacagtctagtcctgtatttcttctgaactcacgctctgcaaagccagggctgaatgtatctaccatacctgcttgtttacctccaaaccttgcaatacatttatacaaaatatttatttcacagcttatcttaaaacaaatgtaaaaggtatcttcaaataaatcagactgaatctctaac

SEQ ID NO: 1216 - DNA, 472 bp, Homo sapiens
caaatgcacccctttgctgcctcgtccttggggtggtagtgcttcctccatgataccttcttagcatctctgacattagtgttaaggggtcccaacccctaacatgagtttcctggactgtggggggccttttgtgcccttctgagccctggggagatcaaaagcagttgtctaacccctcggtggttagtaactgctctactctgagaaagaagggctggcttatccttggagaggccagtaattctgttctcagctcttctctctgcgggcctccacatctcaggaagaaaggacaggtgccatctcagttccagtcatcttagcacacgcctccctctctgcctccctgctgatctgcaccttagctgtggcctggcctggtctcaaaatgctcccaggaggagaggccatggccttctccatgcccaccctccctcaccaagtgtgagcagaactgatggagaagctg

SEQ ID NO: 1217 - DNA, 780 bp, Homo sapiens
ccagtaaactttctaccaagaatggccagtgtaacatgttcatttagattagtgttgccagtctctctgtctccttttctctttgaagtgttgtttgccaaatgatatggtaagttcaaattactctttaggtatttccttttcatttttaaattgccaagcactgtactttccaattaggttctaaaattcaatgttaagtggaaacatttgttaaatttctaaagcataaaatatttgattattctcttcttagatgttagtttacataattaatagtgggtttttatttaatatgtgttatgttttagctctttgatcaggtatacacattatcttgagttttcacatccaaaaaattatatacacactgttcacaggcttaatgtgaagaatgtgatgtaagctatgtttaaattattcttataaaagtgacttttgacctatgatttgatagtattcagctgttaagtcatacatgtaatgtatcatttttgtttttaagtttgaggtctcactatgttggccaggtgggaggatcactcaaggctagaagttcgagaccagcctaagcaacaaagcaagatccctctctctaccaaaaaaaattaaaaattagctgagtgtggtggcatgcacctgtagtctgtagtcctagctactcatgaggttgagacaggaggattgcttgagcccaggagtttaagactgcagtgagttatcactgtaccactgcactccagcgtggttggcagagtaagaccctgtctctttaaaaaa

SEQ ID NO: 1218 - DNA, 571 bp, Homo sapiens
  misc_feature (481)..(481): n is a, c, g, or t
gtttgctgaatgcatagcaaagtccttgtggaaataagtttgtttttataatctttttctttttgtcctctttgtaaatggcctgaacagtacactatataataatagctaacgttggtggggttagggaacactctgttaaaaatatgttgatgtattatctagtaaaaggtgagaaaaatcttcattttaagagtaaaaatatgtcacatgcctggcatggtggctcacacctgtaatcccaacactttgggaggcccaggtgggaggaggggaagcagaggggacgatgagttgacttttgctgatggagcctctctgaagggcaaatttcaaagtacagctgggtgctgcagcactggagtgcgaacttgtgggctgtggttatgaaggagcctcgtcagctatacctttagcccctggtgaagcagtgccagtcacacttttgccagtcaaacggagagggcagcagtagtaagancagaccaaatcaaaccaaaccaagcccacggggaatggaggtccatgtgagcacacagcatggcagctgcccacaagccaggaagaggct

SEQ ID NO: 1219 - DNA, 363 bp, Homo sapiens
tttgataattatggcagttcctcagttaattttttacttttactcctgggctcaagtgatccttctgcctcagcctcccaaagcgctgcaattacaggctgagccaccatgccgggcctttagttcttagtagctccttagttccctgttagttacttagaattcacttcttcatgcataacacatatgattaggtatgtagatggcctctgaaaagaatactcctttattcatatatcctgtaaaagtaagccctatcttaagtaattgtgcaaaaaattctttagaaactaggagcgattagtaccactacccattcaagttgttcaagctagaaattttaagtcatcttgtattcttctt

SEQ ID NO: 1220 - DNA, 2215 bp, Homo sapiens
catcaaaatatgaagtcctgacagttcaagagcctccaaggattgaagatgccgaggaatttcccaacctggcagttgcatctgaaagaagagacagaatagagacaccgaaatttcaatctaagcagcagccacaggataattttaaaaataatgtaaagaagagccagcttccagtgcagttggacttggggggcatgctgacagccctggagaagaagcagcactctcagcatgcaaagcagtcctccaaaccagtggtagtctcagttggagcagtgccagtcctttccaaagaatgtgcatcaggggagagaggccgccgcatgagtcaaatgaagaccccgcacaatcccttggactccagcgccccactgatgaagaaagggaagcagagggagatccccaaggccaagaagccaacctcactgaagaagattattttgaaagaacggcaagagagaaagcagcgtctccaagaaaatgctgtgagtccagcttttaccagtgatgacacacaagatggagagagtggtggtgatgaccagtttcccgagcaggcagagctgtcagggccagaggggatggacgaactgatctccactccttcggttgaggacaagtctgaagagccaccaggcacagagctccagagggacacagaggcctcccaccttgctcccaatcacaccaccttccctaagatccacagccgcagattcagggattactgcagccagatgcttagtaaagaagtggatgcttgtgttaccgacctactcaaagaactggtccgtttccaagaccgtatgtaccagaaagatccagtcaaggccaagactaaacgtcgacttgtgttggggttgagggaggttctcaaacacctgaagctcaaaaaactgaaatgtgtcattatttctcccaactgtgagaagatacagtcaaaaggtgggctggatgacactttgcacacaattattgattatgcctgtgagcagaacattccctttgtgtttgctctcaaccgcaaagctctggggcgcagtttgaataaggcagttcctgtcagtgtggtggggatcttcagctatgatggggcccaggatcagttccacaagatggttgagctgacagtggcggcccgacaggcgtacaagaccatgctggagaatgtgcagcaggagctggtgggagagcccaggcctcaggcacctcccagcctacccacacagggccccagctgccctgcagaagatggccccccagccctgaaagaaaaagaagagccacactacattgaaatctggaaaaaacatctggaagcatacagtggatgtaccctggagctagaagaatccttggaggcttcaacctctcaaatgatgaatttgaatttatgagagttcttgcctgtgtgtctgtattttgggtaaggaggggaggtctgaaaaagactttggggctttttcttctgtttttcatgacaatgtaatttgtgtaactgttgaatctggaaattgatcagcattaaagggcacatgaagcagtgtctgcaggcgttcagtgctgcggagcctgttaaaggtcactcagatgtgcaggtgttaatcttctctaaaagcctggtgatacagctctggctttctgagcacactacggatctggaaaatactggaaaatgtgatacttagaatactttggctgctaaggaaacttcctctccattgcagaatagctgagccaagtgagtgagtttgcagaaagcaggtggtgagctcctgcctgctggaggttgccatggagggccattcctgcccggcaacagcaccgtcctgcagggagccacttggcagaagggtgcagggctgctggtgtcagagcaagagggctacagggaaagggccctttctcaggggatgtagcttttttaaaagatttgggaacacttggaggatttgctaaaatgagcctcagaaggaaaattggttttctaacctgtgactttttgaaatgaattattcctttcagtctttatttttcaaagaaacaatgtgtattgaagtacctagatttgtttgataatcaacaaatctttcctttttcaatgaacatattctgaatgtggtttctgtcttagaccaggaggacagagtttgctttcatattttccctgtaagtaagagggcttatttattttaaataaagagtaattatt

SEQ ID NO: 1221 - DNA, 423 bp, Homo sapiens
gtcaagctgagctctcagaagacccccaagccccagaccaaggagctgaatgcacttgtgcatgcggcaggagcctacctagaggccctctcccacctacagggaaagggccctttctcaggggatgtagcttttttaaaagatttgggaacacttggaggatttgctaaaatgagcctcagaaggaaaattggttttctaacctgtgactttttgaaatgaattattcctttcagtctttatttttcaaagaaacaatgtgtattgaagtacctagatttgtttgataatcaacaaatctttcctttttcaatgaacatattctgaatgtggtttctgtcttagaccaggaggacagagtttgctttcatattttccctgtaagtaagagggcttatttattttaaataaagagtaattatt

SEQ ID NO: 1222 - DNA, 1544 bp, Homo sapiens
catcaaaatatgaagtcctgacagttcaagagcctccaaggattgaagatgccgaggaatttcccaacctggcagttgcatctgaaagaagagacagaatagagacaccgaaatttcaatctaagcagcagccacaggataattttaaaaataatgtaaagaagagccagcttccagtgcagttggacttggggggcatgctgacagccctggagaagaagcagcactctcagcatgcaaagcagtcctccaaaccagtggtagtctcagttggagcagtgccagtcctttccaaagaatgtgcatcaggggagagaggccgccgcatgagtcaaatgaagaccccgcacaatcccttggactccagcgccccactgatgaagaaagggaagcagagggagatccccaaggccaagaagccaacctcactgaagaagattattttgaaagaacggcaagagagaaagcagcgtctccaagaaaatgctgtgagtccagcttttaccagtgatgacacacaagatggagagagtggtggtgatgaccagtttcccgagcaggcagagctgtcagggccagaggggatggacgaactgatctccactccttcggttgaggacaagtctgaagagccaccaggcacagagctccagagggacacagaggcctcccaccttgctcccaatcacaccaccttccctaagatccacagccgcagattcagggattactgcagccagatgcttagtaaagaagtggatgcttgtgttaccgacctactcaaagaactggtccgtttccaagaccgtatgtaccagaaagatccagtcaaggccaagactaaacgtcgacttgtgttggggttgagggaggttctcaaacacctgaagctcaaaaaactgaaatgtgtcattatttctcccaactgtgagaagatacagtcaaaaggtgggctggatgacactttgcacacaattattgattatgcctgtgagcagaacattccctttgtgtttgctctcaaccgcaaagctctggggcgcagtttgaataaggcagttcctgtcagtgtggtggggatcttcagctatgatggggcccaggatcagttccacaagatggttgagctgacagtggcggcccgacaggcgtacaagaccatgctggagaatgtgcagcaggagctggtgggagagcccaggcctcaggcacctcccagcctacccacacagggccccagctgccctgcagaagatggccccccagccctgaaagaaaaagaagagccacactacattgaaatctggaaaattggttttctaacctgtgactttttgaaatgaattattcctttcagtctttatttttcaaagaaacaatgtgtattgaagtacctagatttgtttgataatcaacaaatctttcctttttcaatgaacatattctgaatgtggtttctgtcttagaccaggaggacagagtttgctttcatattttccctgtaagtaagagggcttatttattttaaataaagagtaattatt

SEQ ID NO: 1223 - DNA, 621 bp, Homo sapiens
ttttttttggtggttttcttaaaaaagcctggtgatacagctctggctttctgagcacactacggatctggaaaatactggaaaatgtgatacttagaatactttggctgctaaggaaacttcctctccattgcagaatagctgagccaagtgagtgagtttgcagaaagcaggtggtgagctcctgcctgctggaggttgccatggagggccattcctgcccggcaacagcaccgtcctgcagggagccacttggcagaagggtgcagggctgctggtgtcagagcaagagggctacagggaaagggccctttctcaggggatgtagcttttttaaaagatttgggaacacttggaggatttgctaaaatgagcctcagaaggaaaattggttttctaacctgtgactttttgaaatgaattattcctttcagtctttatttttcaaagaaacaatgtgtattgaagtacctagatttgtttgataatcaacaaatctttcctttttcaatgaacatattctgaatgtggtttctgtcttagaccaggaggacagagtttgctttcatattttccctgtaagtaagagggcttatttattttaaataaagagtaattatt

SEQ ID NO: 1224 - DNA, 2238 bp, Homo sapiens
catcaaaatatgaagtcctgacagttcaagagcctccaaggattgaagatgccgaggaatttcccaacctggcagttgcatctgaaagaagagacagaatagagacaccgaaatttcaatctaagcagcagccacaggataattttaaaaataatgtaaagaagagccagcttccagtgcagttggacttggggggcatgctgacagccctggagaagaagcagcactctcagcatgcaaagcagtcctccaaaccagtggtagtctcagttggagcagtgccagtcctttccaaagaatgtgcatcaggggagagaggccgccgcatgagtcaaatgaagaccccgcacaatcccttggactccagcgccccactgatgaagaaagggaagcagagggagatccccaaggccaagaagccaacctcactgaagaagattattttgaaagaacggcaagagagaaagcagcgtctccaagaaaatgctgtgagtccagcttttaccagtgatgacacacaagatggagagagtggtggtgatgaccagtttcccgagcaggcagagctgtcagggccagaggggatggacgaactgatctccactccttcggttgaggacaagtctgaagagccaccaggcacagagctccagagggacacagaggcctcccaccttgctcccaatcacaccaccttccctaagatccacagccgcagattcagggattactgcagccagatgcttagtaaagaagtggatgcttgtgttaccgacctactcaaagaactggtccgtttccaagaccgtatgtaccagaaagatccagtcaaggccaagactaaacgtcgacttgtgttggggttgagggaggttctcaaacacctgaagctcaaaaaactgaaatgtgtcattatttctcccaactgtgagaagatacagtcaaaaggtgggctggatgacactttgcacacaattattgattatgcctgtgagcagaacattccctttgtgtttgctctcaaccgcaaagctctggggcgcagtttgaataaggcagttcctgtcagtgtggtggggatcttcagctatgatggggcccaggatcagttccacaagatggttgagctgacagtggcggcccgacaggcgtacaagaccatgctggagaatgtgcagcaggagctggtgggagagcccaggcctcaggcacctcccagcctacccacacagggccccagctgccctgcagaagatggccccccagccctgaaagaaaaagaagagccacactacattgaaatctggaaaaaacatctggaagcatacagtggatgtaccctggagctagaagaatccttggaggcttcaacctctcaaatgatgaatttgaatttatgagagttcttgcctgtgtgtctgtattttgggtaaggaggggaggtctgaaaaagactttggggctttttcttctgtttttcatgacaatgtaatttgtgtaactgttgaatctggaaattgatcagcattaaagggcacatgaagcagtgtctgcaggcgttcagtgctgcggagcctgttaaaggtcactcagatgtgcaggtgttaatcttctctaaaagcctggtgatacagctctggctttctgagcacactacggatctggaaaatactggaaaatgtgatacttagaatactttggctgctaaggaaacttcctctccattgcagaatagctgagccaagtgagtgagtttgcagaaagcaggtggtgagctcctgcctgctggaggttgccatggagggccattcctgcccggcaacagcaccgtcctgcagggagccacttggcagaagggtgcagggctgctggtgtcagagcaagagggctacagggaaagggccctttctcaggggatgtagcttttttaaaagatttgggaacacttggaggatttgctaaaatgagcctcagaaggaaaattggttttctaacctgtgactttttgaaatgaattattcctttcagtctttatttttcaaagaaacaatgtgtattgaagtacctagatttgtttgataatcaacaaatctttcctttttcaatgaacatattctgaatgtggtttctgtcttagaccaggaggacagagtttgctttcatattttccctgtaagtaagagggcttatttattttaaataaagagtaattattaaattttgtttcagactctggtg

SEQ ID NO: 1225 - DNA, 458 bp, Homo sapiens
acataaagttgtgcaaatactaattttatcggatgactgaatgcattatcacacagtcatgctcggtttgaacaacaaagtggccaatagtggcagaagggtgcagggctgctggtgtcagagcaagagggctacagggaaagggccctttctcaggggatgtagcttttttaaaagatttgggaacacttggaggatttgctaaaatgagcctcagaaggaaaattggttttctaacctgtgactttttgaaatgaattattcctttcagtctttatttttcaaagaaacaatgtgtattgaagtacctagatttgtttgataatcaacaaatctttcctttttcaatgaacatattctgaatgtggtttctgtcttagaccaggaggacagagtttgctttcatattttccctgtaagtaagagggcttatttattttaaataaagagtaattatt

SEQ ID NO: 1226 - DNA, 1161 bp, Homo sapiens
ttttttttagtgtatttttcgtggttggatcaaaaagacttgagtttttaatttaatttattccctgccgttgtagcggggcggggtccctgtgccctggcctgggggaggggaacgcggaacatggggtcgggaacacagccgctcccctctgctctgcaccccactcgtgggggaacacagccgctcccctctgctctgcaccccactcgtgggggaacacagccgctcccctctgctctgcaccccactcgtgggggaacacagccgctcccctctgctctgcaccccactcgtgggggaacacagctgcagcccaccgcggacccccctggtgctccaggttgggtgagtctgagccggaaggggtacgtggtgggcgcccctcattgtggctggggagacctcataccccatcgcccacccccgtcctcctggtcatttcctcccagacactgttttgccccagcgcccttcggaatcacagtcccgccgtgtcttagaaactgctttggccgatgcaaacagccccctacccgtccccctcgcctcacacggtccctctccgaggccgagaagaccttctgttcctgtaaatacagccagcaagtgcaaactgtgattttattttccacgtattcctgaggacggactggaccgtctatgttttttcagcccttcatagggggtcttttattttggtgggggggtggggtggacttttagagtagaagctgcacttggcaataagctcgtgtcgtctgtcagagcccctctctcaactctgtgacctgataatgtttctaagaaaaagaaaaaaaggacaaaagggagggaaccactaccaaaaaaaaaaaaagaaactcctccccgaagacactttaatgaaggaaacaacacatttatacggatttcatatttctacccgcctttcctgactctgtgttttatatatattatatataaatatatattgtgtacggccgccggccggcggctcgaggcacgcccggtggtggggggtgggcagagggcttttgtagggggtcggcggggcgggccgcgttgccaggcctggagctggcgaccgggcctccctcttcccgtcacaatcaactttggattctgtatttttttataataaaatgagcataaacctca

SEQ ID NO: 1227 - DNA, 748 bp, Homo sapiens
ttttttttagtgtatttttcgtggttggatcaaaaagacttgagtttttaatttaatttattccctgccgttgtagcggggcggggtccctgtgccctggcctgggggaggggaacgcggaacatggggtcgggaacacagccgctcccctctgctctgcaccccactcgtgggggaacacagccgctcccctctgctctgcaccccactcgtgggggaacacagccgctcccctctgctctgcaccccactcgtgggggaacacagccgctcccctctgctctgcaccccactcgtgggggaacacagctgcagcccaccgcggacccccctggtgctccaggttgggtgagtctgagccggaaggggtacgtggtgggcgcccctcattgtggctggggagacctcataccccatcgcccacccccgtcctcctggtcatttcctcccagacactgttttgccccagcgcccttcggaatcacagtcccgccgtgtcttagaaactgctttggccgatgcaaacagccccctacccgtccccctcgcctcacacggtccctctccgaggccgagaagaccttctgttcctgtaaatacagccagcaagtgcaaactgtgattttattttccacgtattcctgaggacggactggaccgtctatgttttttcagcccttcataggggtccgctttttgattcaagccttttactactgcactacgagggggcccttaacatggccta

SEQ ID NO: 1228 - DNA, 235 bp, Homo sapiens
tgtatgaactgaaaagccattggagagttcagagcagaaaagtgacatgatctcatgtatattgtatgaagagctctgactgctattttgaggctaggttgaggagggcaaaggattaaagcagagatgagttagaaggtcttgcaataatccatgtagaagagatagtgacaactcagaacagagtggtagccatggaggtgatgagaagcaactatctcctagaattactttg

SEQ ID NO: 1229 - DNA, 580 bp, Homo sapiens
aaggcatacatactaacttttttgattaattccacccatgtaccctgatttgggcagaattttaatctcactgtgaaatcagagctttgttctagagcctttcttgggggttccatggatcagtgggtcagccgtcacttgtgccctggcccatcctctgtccagcttgggcagcatgcatcattcattctgattccttaatttgccatatgtgaaaacatggtaatctatacattacttgggtgctattattatatataactagctttggagtcagaattagcgtctcatcctggctctaccactttccaactgtgcgactgtggccaagtgactccccttctctgagcctcagttttcctcttctgtaaaatgggggtaaagggataagaactatagggggatctcaggggatggttaagagaaatccatgagataagcaaacacattatctagtttagtaaagctaagcaatgaagacttaacagccccatggtgaaggcttaatacatggtagctataatgattactattaatattgtgaaataaaaggttgtgatgaaccaaccatatcttctca

SEQ ID NO: 1230 - DNA, 335 bp, Homo sapiens
ttttttactatgttcctggaaagaaataggcagcatggttcacaaatctaaatttattcaatgtaaagggctatcatttattctaaaattatttacttcttactttgtgagggtgacacgccttttctttgtatgaaataattgttggtgatagattgtagtatgtttgtaaatataccttacctgttggaataaagtttggaaatactctattgaactctctaatttttattgaaatataataataaaaattgaaatgtaaaaaattaaaaggtcacttatcttagtgatctttaggctcctttcggtcctgagatgctgtaattctaggcact

SEQ ID NO: 1231 - DNA, 403 bp, Homo sapiens
gcacaaggtctggatggagagcatgagttacccagctggaactctgacataggttgacagcagcatcccccattcccaggtgctcatgtcttcccttcttgtgccttcccttgggcactaagtttggcacagtggctaggatgtagcattcctcactggggccatctgtcacatcaagaagggttcattgagtgcctctgggcaggacaccccccgcccactccctagaccatctccctgtctgtaccactgaggcaactggcttagctcagacaaggcaagcctgtttcttctctcttgctgccttgcatggactagcactggtgctgatagtgctggtctgaaaatgcagccagagtcctgagtgcttagtaatgtccttcctgagcgcaggctgggagtg

SEQ ID NO: 1232 - DNA, 593 bp, Homo sapiens
gtctaggcttccatttgcttctcatgaggtctatgatagctcagcgcctggtctctctgggtctacccaaaaagtagagggtttttagttgttgtttgtttgttttaaataggcctaaggtttcaggtctaaaattctgtggtctcgtgttgttgttgtccccattttctgagtgttaatctccatgaaacaagcacagatgttagaaatccagttgtgtttgctgtttgctagcaaagtctgtttcctgagatgatatttccaaaaccggatctcatctctttgaatccttggaggtttatgaataacgcatgttggtgatgatgctggcgtggcagccccaatgaatgtatgaaatttgatgtttcccacgaggaagaaggggagtggctgggattattgaaaggctctctggttctgggtttgaaggaagcatttagaattctgctagatccccttttgctacatccggatgattaattttacatcctaaatccttgctcgtgattgcttgcacccaggaattcaaggttacagtgagctatgatggcaccacttcattccagcctgggtgacagagtgagaccatgtct

SEQ ID NO: 1233 - DNA, 430 bp, Homo sapiens
aggaaacttcctagttagaaatctatgaatattaacttcttgtcttcactaaccagagttgttctcaactcataacacgtggtttggtaaaccatttgcaatgtaaacatagcagattttacttgtagtttcataatttaggcaggttggctctgtattatttctagaatcacaggtatctggatgaagaatcaccattttgtcattagagattacaacaaatgtagtttattctttttaccggtaatatcaatgtaagcaaaaattatactttttagctaagcatgttatcttcccagactggaggagttattatcttccatattttctctatcttccactatacaaagggaaaatagattggaattgtactggccattgctttgtaaagagaatataaatagcaataaaacataaagaaaatgactga

SEQ ID NO: 1234 - DNA, 299 bp, Homo sapiens
ctccatctctggctactcctccacttgtatcaaacttccaaatattagaatatccttgggtataatcctgtctgatcctctcttcctaagtgacttcctcttctcctgtagccttaattattgcaaatatttggaagatcctctaggccttcagcttagacctttctctggaacaccagactcaaacgtactgtaatgacctgtttgacattcatgtgggtgtcacatactgcttatccatccaaacagatttgttctatttcctttgctcagatgctcccccactgtctccttcatct

SEQ ID NO: 1235 - DNA, 340 bp, Homo sapiens
gttttttaagtcaataggattggttcataggatgccaagggctacattggttttaaaattcatctagaatacggccaggccagatggctcacatcggtaatcccagcactttgggaagctgaggtgggtggatcacttgaggtcaggagttcaagaccagcctggccaacatggtgaaaccccatctctattcaaaatacaaaaatcagctgggcgagttgacgtgtacctgtagtcccagttactcaggaggctgaggcaggagaattgcttgaacccgggaggcggtggttgcagtgagctgagattgcaccaccgcgctccagcatggcgacagaac

SEQ ID NO: 1236 - DNA, 401 bp, Homo sapiens
tggatattagtcctttgtcagatgtatagattgtgaaaatttgggttgtctgtttactctgctgactgttccttttgtcatgcaaaagctctttggtttaattaagtcccagctatttatctttgttttaatttgcttttgggttcttggtcacgaaatccttgcctaagccaatgtctaaaggaatttttccaattgtatcatctagaattttaatagtttcaggtcttagatttaagtctttaatccatcttgagttgatttttgtataagatgagagatgaggatccagtttcattctcctacatctggctagccaattatctcagcgctatttgttgaaaagggtgtccttttcccactttatgtttttgtttgctttgtcaaagatcagttgatca

SEQ ID NO: 1237 - DNA, 169 bp, Homo sapiens
ataagggaaagaaaagactccatgaggcagaacaggaaacttcttctaattcattctgtttccagcatgtgagacagtcagtgtgtcgtgggcaagacaatcaaattgaaatatggcccagctaaacacaagcgctgttcacatgggaaggtcaagaaatgcaacgaca

SEQ ID NO: 1238 - DNA, 392 bp, Homo sapiens
ccacgggcagcgtgatattcacctctgtggccccagtgcctaacatggaatctggcatgtgttaggcatttaaggaacattagaggcagggtgtggtggctcacacctgtaatctcagtactttgggaagtggaagtgagaggactgcttgaggccaggagttcgagatcagcctgggcaacaaagtgaaccctcatctctacaaaaaaattaaaaaaaaaattagctgggcacagtggctcacacctgactcagctattcaagtctcagctgttcaagagattgaggtgggaagatcacttgagcccaggagttcaaggctgtagtgagctataatcacgccactgcactttagcctgggtgacagagcaagaccttgtctcaatgtctca

SEQ ID NO: 1239 - DNA, 378 bp, Homo sapiens
gcataatgatcaaatcaaggtaatgttaaatgcttgaggcgatgtatatctccttatttttctaactggacttaaattctaaagagactatatataagttaaaaatgaagaataaataagagctcaattaaacgggaattttaaaagttacaataaatttgggataaaatgtaatgtaaggtgtttcatatggagagccatcactgccttttgatcactgtttccagaaaagcacagacttgtgcacctccctctgtgctttcttatgtttggacagttgaacataccaaaacaggtgatgagcaaacttgcaagcagtttttactgatagtttttacatagcataatgaagtataatgttataaataaagaactgta

SEQ ID NO: 1240 - DNA, 406 bp, Homo sapiens
aatgtgcaaccttggaagagctgatacaatgtatggtaagctgaagtacgtttccaacactgctgctcagagcatacagaagttttgcatcctggaacattgcttcccatgaaacaaagcacttcataaatattttatgtttttcttgagcaccctttcaaggtagggatcaaatagtgccagatcaattttcccaaaaggaaagaggaagtatccagagtttagactgaaggcttagagtcaaaactacaggaaggtcacactgttctctggaacactgttgctcttcagtttgtagagtttatgatggaaaaggcatcagtctgtcaaaagacttgtttaatcctgataatgactttggaattatctctcctgggtctcagttaataaactgaagaatgaccta

SEQ ID NO: 1241 - DNA, 480 bp, Homo sapiens
tcttctaatcatttcatttttcttgaattgttatattctctcccaacttttctttttttaacgacattgagctctcctcttcctgtcttccattagcacctttcctaacaaccttatttgttcttcaattgttatttatgcttgtcttctcagctaaattgtaaggcccttgtagtgaactcagggactgtgctttatattacttctgtatattacagaataggactatacgaatgcaggttgaatagatggaatcattttatatttacaattaagtaagaaaatgggaaacatagccatcaaagcagtcaaggaacaggtagggcacttaccctttctattctcccttgctaccttcttttttgttcttgttttgagacggggtctgggctctgtctgcagggttgggagtacagtgggtacaatctcgggcttcgctggcagcctcaacctccgggggcttcagggcattcctttcat

SEQ ID NO: 1242 - DNA, 436 bp, Homo sapiens
caaactgaagattccagcactgcacatagggatgtatttaatagttaatggaggaaacagaaaggcatcagagttttgttgttgttttgttgttgttgttgttttttaagagacaaggtcctgtggtgttgcccacactggaaacaaactctaaggctcaaacagtcctctccctcagccttccaagtagctgggactacaggcgagctcctgattttttaaaaatcagaactagttattttgaatgatctaccactggttctctagcaccatctgttattttgtatcttaacacagttcctgtattgtaagatgaatgaatcttgataagaattaatggtttatcttcttcaaaatgtaccagccaaagattcagaactatttaaatactatatacagttcatcatctggtagacaaagaagtagctcaaaaaaa

SEQ ID NO: 1243 - DNA, 360 bp, Homo sapiens
ttgcaaactgtctcactgtttttgaaacaagtttttgtttccagacttaattctcaggaaaccatactttaattccatgaagaaagttttaggccaggcacagtggttcacacctgtaatcccaacactttgggagcctgaggtgggacaatcacttgagaccagcctgaacaacatggcaagacccccctctctacagaaattttaaaaattagctgggcattgtgctctacacctggggtcccagctactgaggaggctaaggcgggatgattgcttgagcccaggaagatgcagtgagccatgttcacactgctgtactccagccagcctggcttatagagtgagaccctgtcttaa

SEQ ID NO: 1244 - DNA, 303 bp, Homo sapiens
tactgtgagtgccccaaacgcggaagtgggaaagggagaccctcctctcccgaacacacacacccactggagaaactgaagatgtgtttgcagaagttcccgagtttacctggagctgagtcaagttagagagctcagccgagcgaaatacaagggtagaggaagtagcagaaaggcactgggagcttgctggatccctaagcagcccattcttgcctggcaccacagggatccatcaggagaatggccagaggagcagggggaaaactccacagagagaaggacttctctagcagaagtttg

SEQ ID NO: 1245 - DNA, 441 bp, Homo sapiens
ctgtcagttgatagacatttaggttgtttccatttgttggctgttacgactaatgtgacatttgtgcgtatgttttagtgtattggtatgttcttatttcttttgggtttatacttgagtgagattgctgggtcatgcggtaactatctgacaaatgttaggtaactgtttaaccttaagctttgttttccaaagtagccacaccacttagtactcctatttgcagtgtcacagggttccaattcctccatgtctttgctgacatttgttatctgtctttttgattattgccagcctagtaggtgtaaagtggtatctcattttggttttgatttacaattccctgatggccagtagtgttgagcatctttcatgtactccttggccatttgtatatatcttctttggaaaaatgtctattaaagtccttgctcctatttt

SEQ ID NO: 1246 - DNA, 605 bp, Homo sapiens
aaaggtaaggaaatagcttctaactaagcaaagttgctcaaagtggcacatagagtgaggtctgcggctgttctcttactccaaatgtggggtatctcagaaattgccatcctccagaaggctacagtctagctcagactgtgcaaattgttctccatttgccatgcccccatgcactcaacactattccatgtcttccgtgtgctctgggaagctgacccttgtcatttgcatgactgggactctctgctctctgtgtttgtcttggggtggggcctatggaaggctttagcaggatattgggagggcagggaagagaaagaagtcagggtatttcttcttcatgtcctacttcggccctgtgcgctggccgtgatcatgtcctttcaggatataactcccttcgccctgttctcctctgtacctcttctgatgcagggcttctaaggaaacactgctccttttccttgactgtttatccctaggggtagtattatattctcaccattgctatcctttgggtgccctgccaccttgtttgctccttaagtctgtctacaattaatgcaaataactcctttattaaaatctctttatttgaacac

SEQ ID NO: 1247 - DNA, 304 bp, Homo sapiens
ttttatattattaccacatagcacacttgagaaagcctcagggatgcgaaacaccttgcctgaagtgacatactttgtaaacgggagggcaggactccaagggaggccctctggctcagctctcctgccccttgctatgctgaactctgttggattacctctgcgagtctcacacgtatggtttcacagcccccttttcataaaaatacttggcaaacctcttgactttcttgaaatgaaattaataaattatacaatttatctaaacacctaatttccaataaaatacatatattaaaaaaaa

SEQ ID NO: 1248 - DNA, 458 bp, Homo sapiens
tgggaggctgagctggggggatcatccatgcccagaggtcaaggctgctgtgagctgagcagtgatcgtaccactgcactccagcctgggtaacggagtgcgactctgtctcaaaaataaataagtaaataataaagaagcagttgcatacatagtggtgagtacgcagaaagtgaaaactgagaaaaaaccattttcagagcaagcactgcacgtgaaaggagtatggtgtcataacagaatcacaagtcatagctggagaatttacaatattgtatgtgcgagtgtatatttaatggaatactggaggcccgtgagcaaagaatatgataggatcgaatcagtagaaaaacatctcttgtcctcagagaaattccagataatgttagatatgtctaaggaaaatcaggatgtggtcaatgatcaggaacaatagtcatttacatttggatatgatg

SEQ ID NO: 1249 - DNA, 428 bp, Homo sapiens
agtgcagtcgtatgatcttggctcactgcaacctccatctcccaggttcaagcgattctcctgccccagccacctgagtagagtagatgggactacaggcatgcaccaccatgcctggctaatttttgtattttttgtagaaaccggggtctcaccatgttgcccaggctggtctcgaactcctgggttcaagcaatcctcccacctcaacctcccacagtgctagaattacagttgtgagccaccataccccagccttcatgtgtttatttctgacttgcttctattgacaggcagtagagttcagtggtgtaagctcagtctgcttaggtttgaatctgagctctactacttacttagctgtgtgatcttgggcaagttacttaacttctctggcctcagtttcctcacctgtaaaacggggacaa

SEQ ID NO: 1250 - DNA, 440 bp, Homo sapiens
cttctcttctttataaatcatcacattcactcatgtaaaaggggccatgcctagttaagggaatccttacaatctggtaatgaaattatagaggaaggtgtcaccctcaaatgcaatgaaatttaatttgaaaattacattttcagaactgcaaactggagactctttcctcaaatctatatcaaaagcattaattatgaaaagcgtcatatgttctaaaatttttacttttttaaaaaagataatgtaatgagcttcataaacatttataaacatttatttaatacaaagaattatactttattttgagaatctggcttttctatcatttgtaatgaaacaaaaattcatgatagtggatggtagctatacttcagcaaaacaaatgtcaactcaatgttgatgttttctccagcattccccctcaaaccaaaaaaaaa

SEQ ID NO: 1251 - DNA, 274 bp, Homo sapiens
aaatggaatgcacattacaaaagaaatagctccctggtgggtggtttatgctccctgtttgaattttttccttcatattacagtttaaccacacccttagcatcgcagcttgactctgcccaaaaaagtcataaatgcatacaaggtcttcacaatttttaaaaaatacgcattgtactgaattctcatttaattcactactacgttgttgattgaggtggaaactcaatcaactgtttttactgccaatgaaataaaagtagctaatatttat

SEQ ID NO: 1252 - DNA, 506 bp, Homo sapiens
cttaagtactctaatgaaaatgacagtgtgctctggaggcagaaatgcaccttcctttttgcatgaaagatttacgctatggggccgggcacagtggctcatgcctgtaatcccaaagtgctggaattacaagcgtgagccactgctcccggcccaagtatttcttttttaggggagaaaaaattattggagaaaatttctttcctactcatttcccaaatttttctaggaagtctatgtcagatttcctttcttttttcttttctcccttaaaataatttttaattgttattataaacaggatggacctgtgctgaggagtgtagcaggactgtggttttattcctgcactgtctactgggttgtgtgaagatgggctagaaagaggatctgttgggaaggaagagtctaaaaatgaatgaacgtcaagagtcaacgactcttacagcatcattaccgtctgttcctcttctcagagagtcaggcatgagggccaccaggcaggg

SEQ ID NO: 1253 - DNA, 314 bp, Homo sapiens
acacgttggatgaagatgatatcttcagtttgggattcattggactggagcttctatagacacacccaagtggagatgctggatatgtggatctggatggaaggcaagagagttccagattggggattaagagtcatccaccgccgggcatggtgacttatgcctgtaatcccagcacattaggaggcccaagtgggtgaatcgcttaagccaaggagttcaagaccagcctgggcaacatggcaaaaccccatctctacaaaaataaaagataaataaattcgctaggcatggtgtcatgtgcctgtagtgcc

SEQ ID NO: 1254 - DNA, 398 bp, Homo sapiens
aaactgtaaatgcaagataaatagaagaaaggaaacaaaactttgaagaatacaaataaatgaaagagaaaaagatatgagaaatcaacaaaactaaaagctgtttattttaagactaataaaatgggcttaactctggtaagattgaatgaaaaagaaaagaaatgagtgaaaggtaattagaagtgaaatgaggagtgtaattagtaatacgagaaaatttaggaaatgagaccattatttacaattgtatgcccataaatttgaagacttggatgaagtgcatagtttactagaataacttgccatgaatggtttatgaccattaaagatgttaatccaagacggtagttcatgatcagaggtgattttgcaccccctcccttccctggagacat

SEQ ID NO: 1255 - DNA, 416 bp, Homo sapiens
aaacaatcaaattaaacacaaaaaaccaatgaacatgattaaagccaaaagcatattctagaattatgatttttagtaaaatcattgtatacaaggtatcactgaaaaccaactatttctatctaccagctacaaacagaaaatagaatttactttataaaaggctatttacagtggcagcagaaaatatcaaattccagaatttgatattttcaaattctaggaataatttggcaaaatatgggcaagactttacactgaaaactataagttgtgttgaaagaaattgaagaagaattttttaaatgatggtatatatactattcatgtattagatgactcagtattataagggggttgattcttctgaaattgatctgtagatttgatgtaattccaataaaaattctaacttt

SEQ ID NO: 1256 - DNA, 114 bp, Homo sapiens
gtctgcttctttataactgaggtctttcacaagacttggctcaataagtacgcattaagccagtgaataatattctatcctatctcgtgatgtctagtctactgtgtgaaattt

SEQ ID NO: 1257 - DNA, 554 bp, Homo sapiens
tacatgcatatcaaaaagtatgtgtacatagatacatagatataaagtgtatgtatttttatgctaaattcgctttgactatatcctactatatgcttctaccagtagtgaaagagatttttcatgtttctgagctttttactatctggatacctttttagtatttttataatatattttaccaacagatgttcctcattctgtgcgtctttacacattttttttctttcagtctttttctagtattcattctgctttattcttctaggtagttttttttactgaatctaaagtgtttcccaggcccttagcataataaactactctaaatgagaaaaaaaatggcaatatttgccttaacatcttacatgtatacctgaatttggcaagaattgatgtcatcacaacaatgagaatgtcatctaagaacatgatttttttattaggtaaaatgagtatttttaatttcatccatatattcctagttttaatactctttctgtattcattatcaaatgcctagatgtataattagactagagtcagacagctaa

SEQ ID NO: 1258 - DNA, 443 bp, Homo sapiens
tgtaaccatttcccgtctgcaccgagaggccacggtgtggagggggagctcctgcccacggcacttggaaggtgctggggcagaacccagctccagcgctgatgtgtggcagcatctctggaaacttccatttcctgctctgtctgaggaggcggggccctgctgatgtctctgtgtcttggagctcaggacagtcaaatctgcaccacggctgcctcccctcttgccgtgtgaacgtggcaggacgtccactccaccccacttcctgcatggacatggctccatggctgtgccctacctcccttcctgcatgaatgcagcaccacggctgcaccccccacttctgtggttgtggcatgatggctgcacccccacttcccatttgaatgcggcaccgcagttgcgcctccctgccacttcccctgtggacgcggcatgatggc

SEQ ID NO: 1259 - DNA, 422 bp, Homo sapiens
gatttcttgaggccttttttatctgtcaatatttgagcatttttagtgactcaagttctaaatttggacctttttaatgtctagtttgttaaaagtgaaaaatattgactctcaaagttcagacattagattaagaaataaaaatacatttagataaccccacttcctctgatgtatacgaataaggatactgtatgtctggatgaagtagcgatacggcatactgaaaaagcccagaggaaagagagagaccctgtaagttacacgaaagagccccagaacatccttgggaaagtctgtctttttttttttttttgagacggagtcttgctctgttgcccaggctggagtgcggtggcaggatctcagctcactgcaacctccgtctcccgggttcaagtgattctcctgcttcagcctcc

SEQ ID NO: 1260 - DNA, 717 bp, Homo sapiens
aatcatgtctgattggtacatacactccaggaagtctcaacctagaaacatttccaacctaagcatttaaaggaaaactggctcattcttctgacccaaactcaaaaaatatgagtacttgcgtacctccatttctgcatgaagattttaaaacagatttcatttttttctgtttattttgggaaggtgccgtgggggtgttctttcaagtgattcacatctcaaacccataccactctcaacttttatttgatgtgttcaaagccaaaaaataaaataaaataaagcagggctgaacacttaatttgacatgaagctgaaggactgagcaagccagaggagagaggttgaatgaagcatagccttggcttcataccacactttttgtgccttgtattatcaatgtaaattctgaatgttgtacagtaaacttggatggacttcttagaaaaggctgcactggcttctttttcagcacatgtacatatctataaatatatatacatatatatttggtaatgccaaacagctctgttatattgtattgaacaaaatggacggtttggatgttttatgtcgagtttgcaaaaaaaaaaaaaaaaaaaaaaactggatggttgcagacttttcaagataaatgtacagacgtaaattactgcatatcagttatttatgaataaagagtcttttattgacattttaggatactacatgagt

SEQ ID NO: 1261 - DNA, 447 bp, Homo sapiens
aatcatgtctgattggtacatacactccaggaagtctcaacctagaaacatttccaacctaagcatttaaaggaaaactggctcattcttctgacccaaactcaaaaaatatgagtacttgcgtacctccatttctgcatgaagattttaaaacagatttcatttttttctgtttattttgggaaggtgccgtgggggtgttctttcaagtgattcacatctcaaacccataccactctcaacttttatttgatgtgttcaaagccaaaaaataaaataaaataaagcagggctgaacacttaatttgacatgaagctgaaggactgagcaagccagaggagagaggttgaatgaagcatagccttggcttcataccacactttttgtgccttgtattatcaatgtaaattctgaatgttgtacagtaaacttggatggacttctta

SEQ ID NO: 1262 - DNA, 365 bp, Homo sapiens
cactgggccagacctagtgatgtggggcattatctgtaaatgcacctgaaaaattagataaggctgtgaaaatggaattttagtgatccagggtttgagaaaagtcctcttggctggagtaaggcatgtacgtaggtcatatgattgtttctgaaacatgaaactcagaacccaaaaagttcagcacattttggccccagtaagtagaaaacaccccggacattatctatggatgaaatagtgtgctgcagaggacagtccctggccggaagctggaccattccagtgaattcagcaaaaccagagaactctaccccgtgttttgacagatttaagagaaaatgcagtaaaattcagcttttagg

SEQ ID NO: 1263 - DNA, 327 bp, Homo sapiens
aagactactctttataaattagaaccatcaatttgccctacctttaaattacctgaaagctctcgtaagggtagtagcttttccatgacaagctttaacgctttccataaggtcgtaatgccttacgttttagaaagtgaaagcactctatcattagttactaggtcctttctccttggtcttactcttagttatcgagtagccaaaatgtatgaaggatgttcagtcaaaatagacagcattctccttgaaacctaagagtgttgatcttaatcactttgaaccttcatttctctaaaaccctacttggcatcacatatttaaaaa

SEQ ID NO: 1264 - DNA, 887 bp, Homo sapiens
ggctgaaggctgtggcgcgcggctgtccccattcccacgtgaagcgctacgctagcatcgctcggctggcggctcccagctcgccgcggagcagtcccggcagcagcgggggaccggaagtggctcgcggaggctcagaagctagtcccggagcccggcgtgtggcgcctcggagcacggtgacggcgccatgtccctaatctgctccatctctaacgaagtgccggagcacccatgtgtatcccctgtctctaatcatgtttatgagcggcggctcatcgagaagtacattgcggagaatggtaccgaccccatcaacaaccagcctctctccgaggagcagctcatcgacatcaaagttgctcacccaatccggcccaagcctccctcagccaccagcatcccggccattctgaaagctttgcaggatgagtgggatgcagtcatgctgcacagcttcactctgcgccagcagctgcagacaacccgccaagagctgtcacacgctctgtaccagcacgatgccgcctgccgtgtcattgcccgtctcaccaaggaagtcactgctgcccgagaagctctggctacctgaaacacaggctggctcatgtgcccacgcttgtggcaagttccaaccaagtgtgtgggtgcggtgagccatggttgggtgagctgtgggatgacccagagatattcagagctcagaaaagccgtggtacacggacgcagacagagggaaacggctggggctggaacaagagtcaaacgggggtccccggggccggcacggacggcgaacgcgcggacaaccggggggaacggggcagaaccgacccgacaaaccggtccgaggtccaaagcacggcgggaaggcccgcggagagtgg

SEQ ID NO: 1265 - DNA, 638 bp, Homo sapiens
ggctgaaggctgtggcgcgcggctgtccccattcccacgtgaagcgctacgctagcatcgctcggctggcggctcccagctcgccgcggagcagtcccggcagcagcgggggaccggaagtggctcgcggaggctcagaagctagtcccggagcccggcgtgtggcgcctcggagcacggtgacggcgccatgtccctaatctgctccatctctaacgaagtgccggagcacccatgtgtatcccctgtctctaatcatgtttatgagcggcggctcatcgagaagtacattgcggagaatggtaccgaccccatcaacaaccagcctctctccgaggagcagctcatcgacatcaaagttgctcacccaatccggcccaagcctccctcagccaccagcatcccggccattctgaaagctttgcaggatgagtgggatgcagtcatgctgcacagcttcactctgcgccagcagctgcagacaacccgccaagagctgtcacacgctctgtaccagcacgatgccgcctgccgtgtcattgcccgtctcaccaagggaactgtgaaggggatgggcaggagggcttgtgcagggttttgtaagcagtgatctagtttcattaaaaaaagaaaacaat

SEQ ID NO: 1266 - DNA, 456 bp, Homo sapiens
cagtatgacctcattaaatatacatatattaatataatccccatcttagtgcatgtatataaaaatcagataagtacccagtgcttaacactggtcaccattgacattatctgcaggtgttaggatcctggggggtttcactctcctgcatttgctattttttttgcaatgtttaactttttaaccagaagcatatgttatttaagcagaaaatattatggaaatactttttcaataaatactttttcaattaaaaactaaaatgaaatcatgtgtcccaaacccaccagggatcacatatgaaattaagaacttcattgagtcaggaattgagactgaaaatattgagacacaacaattaaggaaggttaagaatagagagcagaagttgccctgagccctgcatgtggctccaccaaagtcagaggaagctgctccaggctggggattcccaga

SEQ ID NO: 1267 - DNA, 428 bp, Homo sapiens
atgctgccctggtagggtggttgtggtggcaatggggtgagctcctctagcaccacgatttcatcttgcagagcaacagagaggccttggcagtgtctgaaagggcaagtgtgatttggaagtggtaatcacagtgagtcagactacagggaattcctaggtcttagcactgaaaggcaagtcttgcagcccccaggaacatcaagtggtgggtgctgttcccctgacccctgagactgggtgagttccctttgctgggtagtgtgttgatataggtccctgtgtgtcccctgttgcatcagtatttacagtagtgtgttaattgctggtttaattatctgtcttcccttctatattgtaagccccatgaagacagggactgggtctggctcagatctgtaaccacagtgaccagcagagtgcctggc

SEQ ID NO: 1268 - DNA, 232 bp, Homo sapiens
tgcacactcttaaaacttagaggtgtttagtctggtttgcaagctttcctggctttgctaatgctccccataaattacctaagatgctctcaatgtttaggtagattcattttttctcctagaaaaatgcaaagtacagaagtatgttctcctactttccaaatatgatttgctcagccatgtacttctcaatatcctagggaaagctcaaacacttcctctcaccctaggg

SEQ ID NO: 1269 - DNA, 271 bp, Homo sapiens
tttgagttactcatcacacacactgtttgtgttgcagtgtatgagagggcagcatatgatcctgaatgaggacactattctggctttatttattgacatatttccattgtcttctgttttaaaagatggttctatttattgttcaacttaataaaaaacattgttttggttagggaggatagatttttctgttgctgtaatggagccttgctgactgttaagagtctgaaaggcagaactgtgtagacccttattgagtccagccttccca

SEQ ID NO: 1270 - DNA, 351 bp, Homo sapiens
ttcccctctcccatccactttgctggatgcaccccctcttcaagccactctcccctaggcctaaaaaggatccctgctgcattagtgcatcttcagtgccggtgctcagtttggtttctgaggaattaatacagaacaggctcagctctagggaggcctctgggaaagaggctggaaagaggaatggagaataactggttcttactggtgacttacaactcttagctatttacttatttatttagagactgggttatgaggctggctaatttttgtatttttggtagagacggggttttgtcatgttgcccacgctggttttgaactcctgggctcaggtgatccacctgc

SEQ ID NO: 1271 - DNA, 235 bp, Homo sapiens
gatattttaatttgcctataaagtaaaaaagcttaccatttaattcatttattaaatgagcatttattaaatgcaaacctggtattttaaatttcaggatttctatgaccttaagcagcaaatatttctagtacttccaactctccataaggagacactttttaaagtctatcctaaactctccccaatagaatcttgcataccatccccaactctgccctccaccccaacactg

SEQ ID NO: 1272 - DNA, 571 bp, Homo sapiens
ttttttttttttgctaactaattttttgctaacaatttgctaatcaaattgtctgcttgattctgaaaaaaaaaaccctatcaaaatattatgttttaaaacttatttctttatatttgaatcacatgaatctagtttaagatggaaacccactgctgctttgcctactattcccccaagaagaaaacaaaaggataactgagaagctatcacagttagtattcctagaatctagagtcatatttgcagaatgtaatgctgtttactttaactctgttttggagcccagagctcaccctggtgagtgtggatgaactctgggcacgtcatttcaaactgacagagctttgtgtacataactcagttccacatttattcctggtattctctccctgtaatcaattcctctgtgagggatttcagggtgagtagtgttatcagaaaaaaagaaaaagttgttcaaaacaacaacaaaaaaaaggaaaaccccaaatatattttagaatatatggaagggcaaaccaatattgattatttgattttgggttatggatcattcttccccggaccc

SEQ ID NO: 1273 - DNA, 1735 bp, Homo sapiens
gagtgctcagtagaaaatgggtagccttatgtatctaccctaaaggaaaaaaaaaaaaaaaaagacttgattctcaccacagagctgctttcttatacataagaaattgcttgtagtattcatgaacgacacagccaaacagcaggccggttgtagcccacttcgcctgctcacagcccatctgggcccgcctctgcacacccgggataccccagcttctttccctcaagctgttcatatattgagtcctcccactgtcccacagcagccacttgagggcagggctgagtcttggtcacccgtgtccctagtgcctcgagcagtgcccgacacagacatacagcagaagaaacaaactaaatgagtgagcggtaggagtgctttgaagccaaggggctgagcaatctgtgttggaaaagtgtgagatttttcaagttcagaaactccaccaattttagggtgaccgttggaactcctgaagttttagcgctcagaacatggggacccaaactcgaggagaccccaacctcctctcctggaggcaggggctgctccagggcaagtttccagaagcttccctaccctgtcgagttgccaggccggagtgtgattcaggaggggagaagcagtggctgtcagaagaggctgaaaacctctgcagcctcttgcctgggacacctctaggatcccacacggtggagaggggctgcaacaccccctccaggcaggaggggcttctgtactgtccaggaagggagtgccggtcaggaggctgggatcttagcattcacactttgctcccaggcccagtgtgggacttggcacaggctccttctccctcagatgcctctgattccgaggaaagcaatttcctgcctctgagcctccaggactggagagcctggaaatacagcgaaggctgtggagtggatagatccttcagacaaggcactcgttaaaagctgtctatttggagaatgctggaaaaaccatgatattgttccctaagactattagtgagtgcggctaagtccccagccccctctcctcccagcctctgcctgtcccacagatagaaatggggcaggccctctgataaggaagcttgtcccttgaattgttcttttctcaggagattcacccttttcctttgtttcttgctctgttcacaaaagcaaagcatctgaaatgcaggccagagataaagtgcagcctgatgcaattagctgagcgcagcccacaggtcctaatgggatacggctcccgttcctccagcaggcccttacataggcgctgtgtgtcgtctgcactatgcgtcaaagccccaagtgttgcccagcctccgcatccacaccccctttctgtccctggcacagaacccaggagagccactctggtcagaggggctcagcagcaggccctgtctcccaccagctgggttcctgggtcaagtttcatcagaagtcaccgtgaggaccatggtcctcacctgagaggcctgcagatgccctggaggctcctgtgtgcttctgtgactgttcctggcaggcatctgtatccacccctcatcccacacctggttggggtctggctgtgctcctgggagctgtgctgactcttcccggggccacctctactgacacccacacctgtgcatatcccaggtatcctatcccaaccttgccagcatgtatccaggattttttttttcctattacatataatggccatagta

SEQ ID NO: 1274 - DNA, 349 bp, Homo sapiens
tttcaaaaaagcacaaaggagataaatatatcaagatttttttttttagaatagcaatatgataaatttgggcgtgtatgcttgaaatctgaaatctagaagtatcaagtctggggtgcttatattaataaaaataaaattctattgagatcggtaattttaaaacattttcccactttgcttttaagggtacttcatgaattgtaattttttcttgtggaattaggttgtaattcctcagtttttctcccaattaacacaagttttgacatcgatttccatcagggcaaatacagttcaattcaatgagacccttcgctcctcccctccattagaacttgtacaagtg

SEQ ID NO: 1275 - DNA, 723 bp, Homo sapiens
ctctttccctgctttcgggatctccagtgtttattgttttcatctttgtgttcatatgtacccaatgtttagctcccacttataaatgagaacatgctctattttattttctgtttctgtgttagtttgcttaggatagtggcctcaagctgcatccgtgttgctgcaaaggacgtaattttgttctttgttatagctacgatgaccgaatttcttgtttgatttatgggtagatattaagtggtggtattctggagctggttcatatgggctgatttttagcatcttttcccagcttcctatgatttcatgttatagtttgaaattggttgtggtggaaatatttacaccagggaaatcggtaaatatcacaaataatggctcttttgtccagtgattgttagacatttaccagcacaccactggcttttagtgaataatcttttgctttgaatggagtctacacagtcattgactttcctgtaatttccaattcctattaatttcatattctagaaaatccaagtatggcactatataacagcaaataacttctaaagtaatgacagtttcttcaatactactgaagtgatttttagagaaaaaatgggatgatttgaggaaggagaaagaaatgtaaactggaaaaaagcaaataaagtctttatttcaaattttgatcctaaattttttctatgatgtccttgcccctcccgtatttcc

SEQ ID NO: 1276 - DNA, 1077 bp, Homo sapiens
gctgtttcacttacaattctcctttcatatgacaatatcatatggattcagttattggtggccttataatatggtcaggagagcttttccgcttcccaagcccctgcccactgttctttttactgcctttgttggctatcctcagcatttgaagtttgtaataatttaatccaattaggagttaaaattacattaaatttacatattaatttggggaagtttgacccacaatactgtcttcccatctgagaacatcatatcattttctgtttggatcttatttatatctttagtaagatttgagagtttaagttctttgcctttaaaaaatttttaatatgttcttattttggtcactattgtgaccattttcatttataagagcttattacaaataaagagaggagccaggtgcatggctcatgcctgtaatcccagcacattgggaggctgaggtaggaggattgcttgagcccaggagttccagaccagcctgggcaaaatagcaaaaccccatctcttaaaaaaaaaaaaaaaaatttaagaaaatacattttaaaatacacagagaaaatctgtttttgtatgcttatatacaacaaacattgtaaatgcttactaaatctcatgaattatagcaggttttcactagagtctcgagatgtttagaaatacaattgggacattcacaaaaataatttgatcttgtctttttcaatgtttgactgattctttttttgaaatttttgttgtctagaaactccaatgtggtgttgagttataatggtaaaagtaggcctccctgtctattattaactttagtggaaatggttttggtatttagttatttagagtattttacttgttatttggtaaataatctctattttatttaaataggttctttcctgtttttccaggtttaaagaatggctgctgaatttcatcaaatgccttcttagcatcttttgatgtgatcatgagttactcttctttaagctgttgactaaccaattgtgtgtatgaagttgacattaaaacatgcttgcctccttgaaataaaccctatttggtcat

SEQ ID NO: 1277 - DNA, 378 bp, Homo sapiens
aaactctcaaggatttcagtttgcctctgcacttcatatcctatttatgaaacagctttgccaaatttaagtaccttaaaaataaccctattaacagatttttctctggaccaatcaatcacagacttcattccctcatgaaataaagagcagtaccaaggttatagttttccttttatgcctgttactatgtacttctagttaagtgggtaaaggcccaggtctcaggagtgagctctctgaatatattattattttatcaaaaactttttaacacatctgcccttggaccgatacctgtttttcctcccagaaagaaggataatcgttgattaaaggccatttttgataagaaggactgaagggtgtccccaaaga

SEQ ID NO: 1278 - DNA, 356 bp, Homo sapiens
gatacagagttttatttaggagtgatggaaatgttttggaactacagctagtggttgcatgacattgtgaatgtacaaaatgccaccgagcagtttactttaaaatggttaatttgctgagtatgttggctcaggcctgtaatcctagcaactcgagaggctgagacagaaggagagcttgaagccaggagtttgaggccagcctgggcaacatttcaagaccacagataggcatggtggtatacacctgcagccccagctacttgtgagactgagaggggaggattgcttgagcctagtagttcgaggtcacagtgagctatgatcatgccactgcactccagcctgggtgacag

SEQ ID NO: 1279 - DNA, 4045 bp, Homo sapiens
tctggtttgtaacttatgcctaagggacctgctcccattttctttcctagtggaacaaaggtattgaagccacaggttgctgaggcaaagcacttattgattagattcccatcaatattcagctgccgctgagaagattagacttggactctcaggtctgggtagcccaactcctccctctccttgctcctcctcctgcaatgcataactaggcctaggcagagctgcgaataaacaggcaggagctagtcaggtgcatgtgccacactcacacaagacctggaattgacaggactcccaactagtacaatgacagaagataaggtcactgggaccctggttttcactgtcatcactgctgtgctgggttccttccagtttggatatgacattggtgtgatcaatgcacctcaacaggtaataatatctcactatagacatgttttgggtgttccactggatgaccgaaaagctatcaacaactatgttatcaacagtacagatgaactgcccacaatctcatactcaatgaacccaaaaccaaccccttgggctgaggaagagactgtggcagctgctcaactaatcaccatgctctggtccctgtctgtatccagctttgcagttggtggaatgactgcatcattctttggtgggtggcttggggacacacttggaagaatcaaagccatgttagtagcaaacattctgtcattagttggagctctcttgatggggttttcaaaattgggaccatctcatatacttataattgctggaagaagcatatcaggactatattgtgggctaatttcaggcctggttcctatgtatatcggtgaaattgctccaaccgctctcaggggagcacttggcacttttcatcagctggccatcgtcacgggcattcttattagtcagattattggtcttgaatttatcttgggcaattatgatctgtggcacatcctgcttggcctgtctggtgtgcgagccatccttcagtctctgctactctttttctgtccagaaagccccagatacctttacatcaagttagatgaggaagtcaaagcaaaacaaagcttgaaaagactcagaggatatgatgatgtcaccaaagatattaatgaaatgagaaaagaaagagaagaagcatcgagtgagcagaaagtctctataattcagctcttcaccaattccagctaccgacagcctattctagtggcactgatgctgcatgtggctcagcaattttccggaatcaatggcattttttactactcaaccagcatttttcagacggctggtatcagcaaacctgtttatgcaaccattggagttggcgctgtaaacatggttttcactgctgtctctgtattccttgtggagaaggcagggcgacgttctctctttctaattggaatgagtgggatgtttgtttgtgccatcttcatgtcagtgggacttgtgctgctgaataagttctcttggatgagttatgtgagcatgatagccatcttcctctttgtcagcttctttgaaattgggccaggcccgatcccctggttcatggtggctgagtttttcagtcaaggaccacgtcctgctgctttagcaatagctgcattcagcaattggacctgcaatttcattgtagctctgtgtttccagtacattgcggacttctgtggaccttatgtgtttttcctctttgctggagtgctcctggcctttaccctgttcacattttttaaagttccagaaaccaaaggaaagtcttttgaggaaattgctgcagaattccaaaagaagagtggctcagcccacaggccaaaagctgctgtagaaatgaaattcctaggagctacagagactgtgtaaaaaaaaaaccctgctttttgacatgaacagaaacaataagggaaccgtctgtttttaaatgatgattccttgagcattttatatccacatctttaagtattgttttatttttatgtgctctcatcagaaatgtcatcaaatattaccaaaaaagtatttttttaagttagagaatatatttttgatggtaagactgtaattaagtaaaccaaaaaggctagtttattttgttacactaaagggcaggtggttctaatatttttagctctgttctttataacaaggttcttctaaaattgaagagatttcaacatatcatttttttaacacataactagaaacctgaggatgcaacaaatatttatatatttgaatatcattaaattggaattttcttacccatatatcttatgttaaaggagatatggctagtggcaataagttccatgttaaaatagacaactcttccatttattgcactcagcttttttcttgagtactagaatttgtattttgcttaaaattttacttttgttctgtattttcatgtggaatggattatagagtatactaaaaaatgtctatagagaaaaactttcatttttggtaggcttatcaaaatctttcagcactcagaaaagaaaaccattttagttcctttatttaatggccaaatggtttttgcaagatttaacactaaaaaggtttcacctgatcatatagcgtgggttatcagttaacattaacatctattataaaaccatgttgattcccttctggtacaatcctttgagttatagtttgctttgctttttaattgaggacagcctggttttcacatacactcaaacaatcatgagtcagacatttggtatattacctcaaattcctaataagtttgatcaaatctaatgtaagaaaatttgaagtaaaggattgatcactttgttaaaaatattttctgaattattatgtctcaaaataagttgaaaaggtagggtttgaggattcctgagtgtgggcttctgaaacttcataaatgttcagcttcagacttttatcaaaatccctatttaattttcctggaaagactgattgttttatggtgtgttcctaacataaaataatcgtctcctttgacatttccttctttgtcttagctgtatacagattctagccaaactattctatggccattactaacacgcattgtacactatctatctgcctttacctacataggcaaattggaaatacacagatgattaaacagactttagcttacagtcaattttacaattatggaaatatagttctgatgggtcccaaaagcttagcagggtgctaacgtatctctaggctgttttctccaccaactggagcactgatcaatccttcttatgtttgctttaatgtgtattgaagaaaagcactttttaaaaagtactctttaagagtgaaataattaaaaaccactgaacatttgctttgttttctaaagttgttcacatatatgtaatttagcagtccaaagaacaagaaattgtttcttttcagtgtgatttgtttttcatttgggccaatttgggataaactattttcacttgggatttcaggatacagtcaaaataagcttaaataactcaggacatctttgtgctaaactgtgaactctggacaaaaatagagagtctctgaatagggcaggagcaggaaaatggctcctgggtggctcttgtatgcttcttcaggatgctgatggcctttgggaagcccagtgtaaacaatgataaaggagcttaacacttttataggtgatacatgtgatttaatcaaatcactattcctgatctcatttactaacagaataaagtggtaaatatttaaattaaaaattccaaagaccacttttaagtgcttcttcactattttgactggcccacaaacaccagaaattcagaccctgaagttttctgcctcagagaaatttaagtaccttataatgttccccttctacaacttttttcttgcagagatacatgtgagttgacaagaaacattaaagggaaataagaagaagctgataaagctttataggaggaccaaagaactagcttactataataaaaaaattttaagtcttcaagggtatacatcataa

SEQ ID NO: 1280 - DNA, 709 bp, Homo sapiens
tctggtttgtaacttatgcctaagggacctgctcccattttctttcctagtggaacaaaggtattgaagccacaggttgctgaggcaaagcacttattgattagattcccatcaatattcagctgccgctgagaagattagacttggactctcaggtctgggtagcccaactcctccctctccttgctcctcctcctgcaatgcataactaggcctaggcagagctgcgaataaacaggcaggagctagtcaggtgcatgtgccacactcacacaagacctggaattgacaggactcccaactagtacaatgacagaagataaggtcactgggaccctggttttcactgtcatcactgctgtgctgggttccttccagtttggatatgacattggtgtgatcaatgcacctcaacaggcaagtgaaatatgtagaagttctctttttggcaagttctgtcagtgatagatatcatatgttcctcatacacagagataaagggtgtccacgtgggagacacaaggccatcctggcctgtcaggtacgatgtgcactgttccaaagctgataacttggccttgactccctaattaacaatcacgggggaaaaaaaaggaggcaataaataattcttaatctctgactctgctgtttgctgagctcacagaaaactccaggcagaatatcatgtgctgaaggatactttaga

SEQ ID NO: 1281 - DNA, 3657 bp, Homo sapiens
tctggtttgtaacttatgcctaagggacctgctcccattttctttcctagtggaacaaaggtattgaagccacaggttgctgaggcaaagcacttattgattagattcccatcaatattcagctgccgctgagaagattagacttggactctcaggtctgggtagcccaactcctccctctccttgctcctcctcctgcaatgcataactaggcctaggcagagctgcgaataaacaggcaggagctagtcaggtgcatgtgccacactcacacaagacctggaattgacaggactcccaactagtacaatgacagaagataaggtcactgggaccctggttttcactgtcatcactgctgtgctgggttccttccagtttggatatgacattggtgtgatcaatgcacctcaacagggctaatttcaggcctggttcctatgtatatcggtgaaattgctccaaccgctctcaggggagcacttggcacttttcatcagctggccatcgtcacgggcattcttattagtcagattattggtcttgaatttatcttgggcaattatgatctgtggcacatcctgcttggcctgtctggtgtgcgagccatccttcagtctctgctactctttttctgtccagaaagccccagatacctttacatcaagttagatgaggaagtcaaagcaaaacaaagcttgaaaagactcagaggatatgatgatgtcaccaaagatattaatgaaatgagaaaagaaagagaagaagcatcgagtgagcagaaagtctctataattcagctcttcaccaattccagctaccgacagcctattctagtggcactgatgctgcatgtggctcagcaattttccggaatcaatggcattttttactactcaaccagcatttttcagacggctggtatcagcaaacctgtttatgcaaccattggagttggcgctgtaaacatggttttcactgctgtctctgtattccttgtggagaaggcagggcgacgttctctctttctaattggaatgagtgggatgtttgtttgtgccatcttcatgtcagtgggacttgtgctgctgaataagttctcttggatgagttatgtgagcatgatagccatcttcctctttgtcagcttctttgaaattgggccaggcccgatcccctggttcatggtggctgagtttttcagtcaaggaccacgtcctgctgctttagcaatagctgcattcagcaattggacctgcaatttcattgtagctctgtgtttccagtacattgcggacttctgtggaccttatgtgtttttcctctttgctggagtgctcctggcctttaccctgttcacattttttaaagttccagaaaccaaaggaaagtcttttgaggaaattgctgcagaattccaaaagaagagtggctcagcccacaggccaaaagctgctgtagaaatgaaattcctaggagctacagagactgtgtaaaaaaaaaaccctgctttttgacatgaacagaaacaataagggaaccgtctgtttttaaatgatgattccttgagcattttatatccacatctttaagtattgttttatttttatgtgctctcatcagaaatgtcatcaaatattaccaaaaaagtatttttttaagttagagaatatatttttgatggtaagactgtaattaagtaaaccaaaaaggctagtttattttgttacactaaagggcaggtggttctaatatttttagctctgttctttataacaaggttcttctaaaattgaagagatttcaacatatcatttttttaacacataactagaaacctgaggatgcaacaaatatttatatatttgaatatcattaaattggaattttcttacccatatatcttatgttaaaggagatatggctagtggcaataagttccatgttaaaatagacaactcttccatttattgcactcagcttttttcttgagtactagaatttgtattttgcttaaaattttacttttgttctgtattttcatgtggaatggattatagagtatactaaaaaatgtctatagagaaaaactttcatttttggtaggcttatcaaaatctttcagcactcagaaaagaaaaccattttagttcctttatttaatggccaaatggtttttgcaagatttaacactaaaaaggtttcacctgatcatatagcgtgggttatcagttaacattaacatctattataaaaccatgttgattcccttctggtacaatcctttgagttatagtttgctttgctttttaattgaggacagcctggttttcacatacactcaaacaatcatgagtcagacatttggtatattacctcaaattcctaataagtttgatcaaatctaatgtaagaaaatttgaagtaaaggattgatcactttgttaaaaatattttctgaattattatgtctcaaaataagttgaaaaggtagggtttgaggattcctgagtgtgggcttctgaaacttcataaatgttcagcttcagacttttatcaaaatccctatttaattttcctggaaagactgattgttttatggtgtgttcctaacataaaataatcgtctcctttgacatttccttctttgtcttagctgtatacagattctagccaaactattctatggccattactaacacgcattgtacactatctatctgcctttacctacataggcaaattggaaatacacagatgattaaacagactttagcttacagtcaattttacaattatggaaatatagttctgatgggtcccaaaagcttagcagggtgctaacgtatctctaggctgttttctccaccaactggagcactgatcaatccttcttatgtttgctttaatgtgtattgaagaaaagcactttttaaaaagtactctttaagagtgaaataattaaaaaccactgaacatttgctttgttttctaaagttgttcacatatatgtaatttagcagtccaaagaacaagaaattgtttcttttcagtgtgatttgtttttcatttgggccaatttgggataaactattttcacttgggatttcaggatacagtcaaaataagcttaaataactcaggacatctttgtgctaaactgtgaactctggacaaaaatagagagtctctgaatagggcaggagcaggaaaatggctcctgggtggctcttgtatgcttcttcaggatgctgatggcctttgggaagcccagtgtaaacaatgataaaggagcttaacacttttataggtgatacatgtgatttaatcaaatcactattcctgatctcatttactaacagaataaagtggtaaatatttaaattaaaaattccaaagaccacttttaagtgcttcttcactattttgactggcccacaaacaccagaaattcagaccctgaagttttctgcctcagagaaatttaagtaccttataatgttccccttctacaacttttttcttgcagagatacatgtgagttgacaagaaacattaaagggaaataagaagaagctgataaagctttataggaggaccaaagaactagcttactataataaaaaaattttaagtcttcaagggtatacatcataa

SEQ ID NO: 1282 - DNA, 3635 bp, Homo sapiens
tctggtttgtaacttatgcctaagggacctgctcccattttctttcctagtggaacaaaggtattgaagccacaggttgctgaggcaaagcacttattgattagattcccatcaatattcagctgccgctgagaagattagacttggactctcaggtctgggtagcccaactcctccctctccttgctcctcctcctgcaatgcataactaggcctaggcagagctgcgaataaacaggcaggagctagtcaggtgcatgtgccacactcacacaagacctggaattgacaggactcccaactagtacaatgacagaagataaggtcactgggaccctggttttcactgtcatcactgctgtgctgggttccttccagtttggatatgacattggtgtgatcaatgcacctcaacaggtaataatatctcactatagacatgttttgggtgttccactggatgaccgaaaagctatcaacaactatgttatcaacagtacagatgaactgcccacaatctcatactcaatgaacccaaaaccaaccccttgggctgaggaagagactgtggcagctgctcaactaatcaccatgctctggtccctgtctgtatccagctttgcagttggtggaatgactgcatcattctttggtgggtggcttggggacacacttggaagaatcaaagccatgttagtagcaaacattctgtcattagttggagctctcttgatggggttttcaaaattgggaccatctcatatacttataattgctggaagaagcatatcaggactatattgtgggctaatttcaggcctggttcctatgtatatcggtgaaattgctccaaccgctctcaggggagcacttggcacttttcatcagctggccatcgtcacgggcattcttattagtcagattattggtcttgaatttatcttgggcaattatgatctgtggcacatcctgcttggcctgtctggtgtgcgagccatccttcagtctctgctactctttttctgtccagaaagccccagatacctttacatcaagttagatgaggaagtcaaagcaaaacaaagcttgaaaagactcagaggatatgatgatgtcaccaaagatattaatgaaatgagaaaagaaagagaagaagcatcgagtgagcagaaagtctctataattcagctcttcaccaattccagctaccgacagcctattctagtggcactgatgctgcatgtggctcagcaattttccggaatcaatggcgtaagtttaagaacacccagtgtttttcctctttgctggagtgctcctggcctttaccctgttcacattttttaaagttccagaaaccaaaggaaagtcttttgaggaaattgctgcagaattccaaaagaagagtggctcagcccacaggccaaaagctgctgtagaaatgaaattcctaggagctacagagactgtgtaaaaaaaaaaccctgctttttgacatgaacagaaacaataagggaaccgtctgtttttaaatgatgattccttgagcattttatatccacatctttaagtattgttttatttttatgtgctctcatcagaaatgtcatcaaatattaccaaaaaagtatttttttaagttagagaatatatttttgatggtaagactgtaattaagtaaaccaaaaaggctagtttattttgttacactaaagggcaggtggttctaatatttttagctctgttctttataacaaggttcttctaaaattgaagagatttcaacatatcatttttttaacacataactagaaacctgaggatgcaacaaatatttatatatttgaatatcattaaattggaattttcttacccatatatcttatgttaaaggagatatggctagtggcaataagttccatgttaaaatagacaactcttccatttattgcactcagcttttttcttgagtactagaatttgtattttgcttaaaattttacttttgttctgtattttcatgtggaatggattatagagtatactaaaaaatgtctatagagaaaaactttcatttttggtaggcttatcaaaatctttcagcactcagaaaagaaaaccattttagttcctttatttaatggccaaatggtttttgcaagatttaacactaaaaaggtttcacctgatcatatagcgtgggttatcagttaacattaacatctattataaaaccatgttgattcccttctggtacaatcctttgagttatagtttgctttgctttttaattgaggacagcctggttttcacatacactcaaacaatcatgagtcagacatttggtatattacctcaaattcctaataagtttgatcaaatctaatgtaagaaaatttgaagtaaaggattgatcactttgttaaaaatattttctgaattattatgtctcaaaataagttgaaaaggtagggtttgaggattcctgagtgtgggcttctgaaacttcataaatgttcagcttcagacttttatcaaaatccctatttaattttcctggaaagactgattgttttatggtgtgttcctaacataaaataatcgtctcctttgacatttccttctttgtcttagctgtatacagattctagccaaactattctatggccattactaacacgcattgtacactatctatctgcctttacctacataggcaaattggaaatacacagatgattaaacagactttagcttacagtcaattttacaattatggaaatatagttctgatgggtcccaaaagcttagcagggtgctaacgtatctctaggctgttttctccaccaactggagcactgatcaatccttcttatgtttgctttaatgtgtattgaagaaaagcactttttaaaaagtactctttaagagtgaaataattaaaaaccactgaacatttgctttgttttctaaagttgttcacatatatgtaatttagcagtccaaagaacaagaaattgtttcttttcagtgtgatttgtttttcatttgggccaatttgggataaactattttcacttgggatttcaggatacagtcaaaataagcttaaataactcaggacatctttgtgctaaactgtgaactctggacaaaaatagagagtctctgaatagggcaggagcaggaaaatggctcctgggtggctcttgtatgcttcttcaggatgctgatggcctttgggaagcccagtgtaaacaatgataaaggagcttaacacttttataggtgatacatgtgatttaatcaaatcactattcctgatctcatttactaacagaataaagtggtaaatatttaaattaaaaattccaaagaccacttttaagtgcttcttcactattttgactggcccacaaacaccagaaattcagaccctgaagttttctgcctcagagaaatttaagtaccttataatgttccccttctacaacttttttcttgcagagatacatgtgagttgacaagaaacattaaagggaaataagaagaagctgataaagctttataggaggaccaaagaactagcttactataataaaaaaattttaagtcttcaagggtatacatcataa

SEQ ID NO: 1283 - DNA, 3870 bp, Homo sapiens
tctggtttgtaacttatgcctaagggacctgctcccattttctttcctagtggaacaaaggtattgaagccacaggttgctgaggcaaagcacttattgattagattcccatcaatattcagctgccgctgagaagattagacttggactctcaggtctgggtagcccaactcctccctctccttgctcctcctcctgcaatgcataactaggcctaggcagagctgcgaataaacaggcaggagctagtcaggtgcatgtgccacactcacacaagacctggaattgacaggactcccaactagtacaatgacagaagataaggtcactgggaccctggttttcactgtcatcactgctgtgctgggttccttccagtttggatatgacattggtgtgatcaatgcacctcaacaggtaataatatctcactatagacatgttttgggtgttccactggatgaccgaaaagctatcaacaactatgttatcaacagtacagatgaactgcccacaatctcatactcaatgaacccaaaaccaaccccttgggctgaggaagagactgtggcagctgctcaactaatcaccatgctctggtccctgtctgtatccagctttgcagttggtggaatgactgcatcattctttggtgggtggcttggggacacacttggaagaatcaaagccatgttagtagcaaacattctgtcattagttggagctctcttgatggggttttcaaaattgggaccatctcatatacttataattgctggaagaagcatatcaggactatattgtgggctaatttcaggcctggttcctatgtatatcggtgaaattgctccaaccgctctcaggggagcacttggcacttttcatcagctggccatcgtcacgggcattcttattagtcagattattggtcttgaatttatcttgggcaattatgatctgtggcacatcctgcttggcctgtctggtgtgcgagccatccttcagtctctgctactctttttctgtccagaaagccccagatacctttacatcaagttagatgaggaagtcaaagcaaaacaaagcttgaaaagactcagaggatatgatgatgtcaccaaagatattaatgaaatgagaaaagaaagagaagaagcatcgagtgagcagaaagtctctataattcagctcttcaccaattccagctaccgacagcctattctagtggcactgatgctgcatgtggctcagcaattttccggaatcaatggcattttttactactcaaccagcatttttcagacggctggtatcagcaaacctgtttatgcaaccattggagttggcgctgtaaacatggttttcactgctgtctctgtattccttgtggagaaggcagggcgacgttctctctttctaattggaatgagtgggatgtttgtttgtgccatcttcatgtcagtgggacttgtgctgctgaataagttctcttggatgagttatgtgagcatgatagccatcttcctctttgtcagcttctttgaaattgggccaggcccgatcccctggttcatggtggctgagtttttcagtcaaggaccacgtcctgctgctttagcaatagctgcattcagcaattggacctgcaatttcattgtagctctgtgtttccagtacattgcggacttctgtggaccttatgtgtttttcctctttgctggagtgctcctggcctttaccctgttcacattttttaaagttccagaaaccaaaggaaagtcttttgaggaaattgctgcagaattccaaaagaagagtggctcagcccacaggccaaaagctgctgtagaaatgaaattcctaggagctacagagactgtgtaaaaaaaaaaccctgctttttgacatgaacagaaacaataagggaaccgtctgtttttaaatgatgattccttgagcattttatatccacatctttaagtattgttttatttttatgtgctctcatcagaaatgtcatcaaatattaccaaaaaagtatttttttaagttagagaatatatttttgatggtaagactgtaattaagtaaaccaaaaaggctagtttattttgttacactaaagggcaggtggttctaatatttttagctctgttctttataacaaggttcttctaaaattgaagagatttcaacatatcatttttttaacacataactagaaacctgaggatgcaacaaatatttatatatttgaatatcattaaattggaattttcttacccatatatcttatgttaaaggagatatggctagtggcaataagttccatgttaaaatagacaactcttccatttattgcactcagcttttttcttgagtactagaatttgtattttgcttaaaattttacttttgttctgtattttcatgtggaatggattatagagtatactaaaaaatgtctatagagaaaaactttcatttttggtaggcttatcaattatagtttgctttgctttttaattgaggacagcctggttttcacatacactcaaacaatcatgagtcagacatttggtatattacctcaaattcctaataagtttgatcaaatctaatgtaagaaaatttgaagtaaaggattgatcactttgttaaaaatattttctgaattattatgtctcaaaataagttgaaaaggtagggtttgaggattcctgagtgtgggcttctgaaacttcataaatgttcagcttcagacttttatcaaaatccctatttaattttcctggaaagactgattgttttatggtgtgttcctaacataaaataatcgtctcctttgacatttccttctttgtcttagctgtatacagattctagccaaactattctatggccattactaacacgcattgtacactatctatctgcctttacctacataggcaaattggaaatacacagatgattaaacagactttagcttacagtcaattttacaattatggaaatatagttctgatgggtcccaaaagcttagcagggtgctaacgtatctctaggctgttttctccaccaactggagcactgatcaatccttcttatgtttgctttaatgtgtattgaagaaaagcactttttaaaaagtactctttaagagtgaaataattaaaaaccactgaacatttgctttgttttctaaagttgttcacatatatgtaatttagcagtccaaagaacaagaaattgtttcttttcagtgtgatttgtttttcatttgggccaatttgggataaactattttcacttgggatttcaggatacagtcaaaataagcttaaataactcaggacatctttgtgctaaactgtgaactctggacaaaaatagagagtctctgaatagggcaggagcaggaaaatggctcctgggtggctcttgtatgcttcttcaggatgctgatggcctttgggaagcccagtgtaaacaatgataaaggagcttaacacttttataggtgatacatgtgatttaatcaaatcactattcctgatctcatttactaacagaataaagtggtaaatatttaaattaaaaattccaaagaccacttttaagtgcttcttcactattttgactggcccacaaacaccagaaattcagaccctgaagttttctgcctcagagaaatttaagtaccttataatgttccccttctacaacttttttcttgcagagatacatgtgagttgacaagaaacattaaagggaaataagaagaagctgataaagctttataggaggaccaaagaactagcttactataataaaaaaattttaagtcttcaagggtatacatcataa

SEQ ID NO: 1284 - DNA, 3920 bp, Homo sapiens
tctggtttgtaacttatgcctaagggacctgctcccattttctttcctagtggaacaaaggtattgaagccacaggttgctgaggcaaagcacttattgattagattcccatcaatattcagctgccgctgagaagattagacttggactctcaggtctgggtagcccaactcctccctctccttgctcctcctcctgcaatgcataactaggcctaggcagagctgcgaataaacaggcaggagctagtcaggtgcatgtgccacactcacacaagacctggaattgacaggactcccaactagtacaatgacagaagataaggtcactgggaccctggttttcactgtcatcactgctgtgctgggttccttccagtttggatatgacattggtgtgatcaatgcacctcaacaggtaataatatctcactatagacatgttttgggtgttccactggatgaccgaaaagctatcaacaactatgttatcaacagtacagatgaactgcccacaatctcatactcaatgaacccaaaaccaaccccttgggctgaggaagagactgtggcagctgctcaactaatcaccatgctctggtccctgtctgtatccagctttgcagttggtggaatgactgcatcattctttggtgggtggcttggggacacacttggaagggctaatttcaggcctggttcctatgtatatcggtgaaattgctccaaccgctctcaggggagcacttggcacttttcatcagctggccatcgtcacgggcattcttattagtcagattattggtcttgaatttatcttgggcaattatgatctgtggcacatcctgcttggcctgtctggtgtgcgagccatccttcagtctctgctactctttttctgtccagaaagccccagatacctttacatcaagttagatgaggaagtcaaagcaaaacaaagcttgaaaagactcagaggatatgatgatgtcaccaaagatattaatgaaatgagaaaagaaagagaagaagcatcgagtgagcagaaagtctctataattcagctcttcaccaattccagctaccgacagcctattctagtggcactgatgctgcatgtggctcagcaattttccggaatcaatggcattttttactactcaaccagcatttttcagacggctggtatcagcaaacctgtttatgcaaccattggagttggcgctgtaaacatggttttcactgctgtctctgtattccttgtggagaaggcagggcgacgttctctctttctaattggaatgagtgggatgtttgtttgtgccatcttcatgtcagtgggacttgtgctgctgaataagttctcttggatgagttatgtgagcatgatagccatcttcctctttgtcagcttctttgaaattgggccaggcccgatcccctggttcatggtggctgagtttttcagtcaaggaccacgtcctgctgctttagcaatagctgcattcagcaattggacctgcaatttcattgtagctctgtgtttccagtacattgcggacttctgtggaccttatgtgtttttcctctttgctggagtgctcctggcctttaccctgttcacattttttaaagttccagaaaccaaaggaaagtcttttgaggaaattgctgcagaattccaaaagaagagtggctcagcccacaggccaaaagctgctgtagaaatgaaattcctaggagctacagagactgtgtaaaaaaaaaaccctgctttttgacatgaacagaaacaataagggaaccgtctgtttttaaatgatgattccttgagcattttatatccacatctttaagtattgttttatttttatgtgctctcatcagaaatgtcatcaaatattaccaaaaaagtatttttttaagttagagaatatatttttgatggtaagactgtaattaagtaaaccaaaaaggctagtttattttgttacactaaagggcaggtggttctaatatttttagctctgttctttataacaaggttcttctaaaattgaagagatttcaacatatcatttttttaacacataactagaaacctgaggatgcaacaaatatttatatatttgaatatcattaaattggaattttcttacccatatatcttatgttaaaggagatatggctagtggcaataagttccatgttaaaatagacaactcttccatttattgcactcagcttttttcttgagtactagaatttgtattttgcttaaaattttacttttgttctgtattttcatgtggaatggattatagagtatactaaaaaatgtctatagagaaaaactttcatttttggtaggcttatcaaaatctttcagcactcagaaaagaaaaccattttagttcctttatttaatggccaaatggtttttgcaagatttaacactaaaaaggtttcacctgatcatatagcgtgggttatcagttaacattaacatctattataaaaccatgttgattcccttctggtacaatcctttgagttatagtttgctttgctttttaattgaggacagcctggttttcacatacactcaaacaatcatgagtcagacatttggtatattacctcaaattcctaataagtttgatcaaatctaatgtaagaaaatttgaagtaaaggattgatcactttgttaaaaatattttctgaattattatgtctcaaaataagttgaaaaggtagggtttgaggattcctgagtgtgggcttctgaaacttcataaatgttcagcttcagacttttatcaaaatccctatttaattttcctggaaagactgattgttttatggtgtgttcctaacataaaataatcgtctcctttgacatttccttctttgtcttagctgtatacagattctagccaaactattctatggccattactaacacgcattgtacactatctatctgcctttacctacataggcaaattggaaatacacagatgattaaacagactttagcttacagtcaattttacaattatggaaatatagttctgatgggtcccaaaagcttagcagggtgctaacgtatctctaggctgttttctccaccaactggagcactgatcaatccttcttatgtttgctttaatgtgtattgaagaaaagcactttttaaaaagtactctttaagagtgaaataattaaaaaccactgaacatttgctttgttttctaaagttgttcacatatatgtaatttagcagtccaaagaacaagaaattgtttcttttcagtgtgatttgtttttcatttgggccaatttgggataaactattttcacttgggatttcaggatacagtcaaaataagcttaaataactcaggacatctttgtgctaaactgtgaactctggacaaaaatagagagtctctgaatagggcaggagcaggaaaatggctcctgggtggctcttgtatgcttcttcaggatgctgatggcctttgggaagcccagtgtaaacaatgataaaggagcttaacacttttataggtgatacatgtgatttaatcaaatcactattcctgatctcatttactaacagaataaagtggtaaatatttaaattaaaaattccaaagaccacttttaagtgcttcttcactattttgactggcccacaaacaccagaaattcagaccctgaagttttctgcctcagagaaatttaagtaccttataatgttccccttctacaacttttttcttgcagagatacatgtgagttgacaagaaacattaaagggaaataagaagaagctgataaagctttataggaggaccaaagaactagcttactataataaaaaaattttaagtcttcaagggtatacatcataa

SEQ ID NO: 1285 - DNA, 3284 bp, Homo sapiens
ctattcatgtttccaactacaactgcatatgaggtcatatcaaatatctcctgcacaaactatgtctatacctaggaacaagggttcatccttccagtgaattcagggaggggctttcattcaagatatatactgtacttaaaccaaattgttattattgagatagtcctggttgcactttaacatttatgtttatgtttcatgcagggctaatttcaggcctggttcctatgtatatcggtgaaattgctccaaccgctctcaggggagcacttggcacttttcatcagctggccatcgtcacgggcattcttattagtcaggcttgaaaagactcagaggatatgatgatgtcaccaaagatattaatgaaatgagaaaagaaagagaagaagcatcgagtgagcagaaagtctctataattcagctcttcaccaattccagctaccgacagcctattctagtggcactgatgctgcatgtggctcagcaattttccggaatcaatggcattttttactactcaaccagcatttttcagacggctggtatcagcaaacctgtttatgcaaccattggagttggcgctgtaaacatggttttcactgctgtctctgtattccttgtggagaaggcagggcgacgttctctctttctaattggaatgagtgggatgtttgtttgtgccatcttcatgtcagtgggacttgtgctgctgaataagttctcttggatgagttatgtgagcatgatagccatcttcctctttgtcagcttctttgaaattgggccaggcccgatcccctggttcatggtggctgagtttttcagtcaaggaccacgtcctgctgctttagcaatagctgcattcagcaattggacctgcaatttcattgtagctctgtgtttccagtacattgcggacttctgtggaccttatgtgtttttcctctttgctggagtgctcctggcctttaccctgttcacattttttaaagttccagaaaccaaaggaaagtcttttgaggaaattgctgcagaattccaaaagaagagtggctcagcccacaggccaaaagctgctgtagaaatgaaattcctaggagctacagagactgtgtaaaaaaaaaaccctgctttttgacatgaacagaaacaataagggaaccgtctgtttttaaatgatgattccttgagcattttatatccacatctttaagtattgttttatttttatgtgctctcatcagaaatgtcatcaaatattaccaaaaaagtatttttttaagttagagaatatatttttgatggtaagactgtaattaagtaaaccaaaaaggctagtttattttgttacactaaagggcaggtggttctaatatttttagctctgttctttataacaaggttcttctaaaattgaagagatttcaacatatcatttttttaacacataactagaaacctgaggatgcaacaaatatttatatatttgaatatcattaaattggaattttcttacccatatatcttatgttaaaggagatatggctagtggcaataagttccatgttaaaatagacaactcttccatttattgcactcagcttttttcttgagtactagaatttgtattttgcttaaaattttacttttgttctgtattttcatgtggaatggattatagagtatactaaaaaatgtctatagagaaaaactttcatttttggtaggcttatcaaaatctttcagcactcagaaaagaaaaccattttagttcctttatttaatggccaaatggtttttgcaagatttaacactaaaaaggtttcacctgatcatatagcgtgggttatcagttaacattaacatctattataaaaccatgttgattcccttctggtacaatcctttgagttatagtttgctttgctttttaattgaggacagcctggttttcacatacactcaaacaatcatgagtcagacatttggtatattacctcaaattcctaataagtttgatcaaatctaatgtaagaaaatttgaagtaaaggattgatcactttgttaaaaatattttctgaattattatgtctcaaaataagttgaaaaggtagggtttgaggattcctgagtgtgggcttctgaaacttcataaatgttcagcttcagacttttatcaaaatccctatttaattttcctggaaagactgattgttttatggtgtgttcctaacataaaataatcgtctcctttgacatttccttctttgtcttagctgtatacagattctagccaaactattctatggccattactaacacgcattgtacactatctatctgcctttacctacataggcaaattggaaatacacagatgattaaacagactttagcttacagtcaattttacaattatggaaatatagttctgatgggtcccaaaagcttagcagggtgctaacgtatctctaggctgttttctccaccaactggagcactgatcaatccttcttatgtttgctttaatgtgtattgaagaaaagcactttttaaaaagtactctttaagagtgaaataattaaaaaccactgaacatttgctttgttttctaaagttgttcacatatatgtaatttagcagtccaaagaacaagaaattgtttcttttcagtgtgatttgtttttcatttgggccaatttgggataaactattttcacttgggatttcaggatacagtcaaaataagcttaaataactcaggacatctttgtgctaaactgtgaactctggacaaaaatagagagtctctgaatagggcaggagcaggaaaatggctcctgggtggctcttgtatgcttcttcaggatgctgatggcctttgggaagcccagtgtaaacaatgataaaggagcttaacacttttataggtgatacatgtgatttaatcaaatcactattcctgatctcatttactaacagaataaagtggtaaatatttaaattaaaaattccaaagaccacttttaagtgcttcttcactattttgactggcccacaaacaccagaaattcagaccctgaagttttctgcctcagagaaatttaagtaccttataatgttccccttctacaacttttttcttgcagagatacatgtgagttgacaagaaacattaaagggaaataagaagaagctgataaagctttataggaggaccaaagaactagcttactataataaaaaaattttaagtcttcaagggtatacatcataa

SEQ ID NO: 1286 - DNA, 3446 bp, Homo sapiens
ggtattcaaggtgcatgatggcgatattcgactgtagaaacgtggtaattgatggtgattacagagatgtatgtacatttgacatgagatgatagggtcaatagggatgctggttggcagtgttgtaagtgatgatgttgggttctcgtttcagtgttgaatatagagattgggtgtgatctaatgcacgcgtcaagctaggtgcaggctaatttcaggcctggttcctatgtatatcggtgaaattgctccaaccgctctcaggggagcacttggcacttttcatcagctggccatcgtcacgggcattcttattagtcagattattggtcttgaatttatcttgggcaattatgatctgtggcacatcctgcttggcctgtctggtgtgcgagccatccttcagtctctgctactctttttctgtccagaaagccccagatacctttacatcaagttagatgaggaagtcaaagcaaaacaaagcttgaaaagactcagaggatatgatgatgtcaccaaagatattaatgaaatgagaaaagaaagagaagaagcatcgagtgagcagaaagtctctataattcagctcttcaccaattccagctaccgacagcctattctagtggcactgatgctgcatgtggctcagcaattttccggaatcaatggcattttttactactcaaccagcatttttcagacggctggtatcagcaaacctgtttatgcaaccattggagttggcgctgtaaacatggttttcactgctgtctctgtattccttgtggagaaggcagggcgacgttctctctttctaattggaatgagtgggatgtttgtttgtgccatcttcatgtcagtgggacttgtgctgctgaataagttctcttggatgagttatgtgagcatgatagccatcttcctctttgtcagcttctttgaaattgggccaggcccgatcccctggttcatggtggctgagtttttcagtcaaggaccacgtcctgctgctttagcaatagctgcattcagcaattggacctgcaatttcattgtagctctgtgtttccagtacattgcggacttctgtggaccttatgtgtttttcctctttgctggagtgctcctggcctttaccctgttcacattttttaaagttccagaaaccaaaggaaagtcttttgaggaaattgctgcagaattccaaaagaagagtggctcagcccacaggccaaaagctgctgtagaaatgaaattcctaggagctacagagactgtgtaaaaaaaaaaccctgctttttgacatgaacagaaacaataagggaaccgtctgtttttaaatgatgattccttgagcattttatatccacatctttaagtattgttttatttttatgtgctctcatcagaaatgtcatcaaatattaccaaaaaagtatttttttaagttagagaatatatttttgatggtaagactgtaattaagtaaaccaaaaaggctagtttattttgttacactaaagggcaggtggttctaatatttttagctctgttctttataacaaggttcttctaaaattgaagagatttcaacatatcatttttttaacacataactagaaacctgaggatgcaacaaatatttatatatttgaatatcattaaattggaattttcttacccatatatcttatgttaaaggagatatggctagtggcaataagttccatgttaaaatagacaactcttccatttattgcactcagcttttttcttgagtactagaatttgtattttgcttaaaattttacttttgttctgtattttcatgtggaatggattatagagtatactaaaaaatgtctatagagaaaaactttcatttttggtaggcttatcaaaatctttcagcactcagaaaagaaaaccattttagttcctttatttaatggccaaatggtttttgcaagatttaacactaaaaaggtttcacctgatcatatagcgtgggttatcagttaacattaacatctattataaaaccatgttgattcccttctggtacaatcctttgagttatagtttgctttgctttttaattgaggacagcctggttttcacatacactcaaacaatcatgagtcagacatttggtatattacctcaaattcctaataagtttgatcaaatctaatgtaagaaaatttgaagtaaaggattgatcactttgttaaaaatattttctgaattattatgtctcaaaataagttgaaaaggtagggtttgaggattcctgagtgtgggcttctgaaacttcataaatgttcagcttcagacttttatcaaaatccctatttaattttcctggaaagactgattgttttatggtgtgttcctaacataaaataatcgtctcctttgacatttccttctttgtcttagctgtatacagattctagccaaactattctatggccattactaacacgcattgtacactatctatctgcctttacctacataggcaaattggaaatacacagatgattaaacagactttagcttacagtcaattttacaattatggaaatatagttctgatgggtcccaaaagcttagcagggtgctaacgtatctctaggctgttttctccaccaactggagcactgatcaatccttcttatgtttgctttaatgtgtattgaagaaaagcactttttaaaaagtactctttaagagtgaaataattaaaaaccactgaacatttgctttgttttctaaagttgttcacatatatgtaatttagcagtccaaagaacaagaaattgtttcttttcagtgtgatttgtttttcatttgggccaatttgggataaactattttcacttgggatttcaggatacagtcaaaataagcttaaataactcaggacatctttgtgctaaactgtgaactctggacaaaaatagagagtctctgaatagggcaggagcaggaaaatggctcctgggtggctcttgtatgcttcttcaggatgctgatggcctttgggaagcccagtgtaaacaatgataaaggagcttaacacttttataggtgatacatgtgatttaatcaaatcactattcctgatctcatttactaacagaataaagtggtaaatatttaaattaaaaattccaaagaccacttttaagtgcttcttcactattttgactggcccacaaacaccagaaattcagaccctgaagttttctgcctcagagaaatttaagtaccttataatgttccccttctacaacttttttcttgcagagatacatgtgagttgacaagaaacattaaagggaaataagaagaagctgataaagctttataggaggaccaaagaactagcttactataataaaaaaattttaagtcttcaagggtatacatcataa

SEQ ID NO: 1287 - DNA, 3984 bp, Homo sapiens
tctggtttgtaacttatgcctaagggacctgctcccattttctttcctagtggaacaaaggtattgaagccacaggttgctgaggcaaagcacttattgattagattcccatcaatattcagctgccgctgagaagattagacttggactctcaggtctgggtagcccaactcctccctctccttgctcctcctcctgcaatgcataactaggcctaggcagagctgcgaataaacaggcaggagctagtcaggtgcatgtgccacactcacacaagacctggaattgacaggactcccaactagtacaatgacagaagataaggtcactgggaccctggttttcactgtcatcactgctgtgctgggttccttccagtttggatatgacattggtgtgatcaatgcacctcaacaggtaataatatctcactatagacatgttttgggtgttccactggatgaccgaaaagctatcaacaactatgttatcaacagtacagatgaactgcccacaatctcatactcaatgaacccaaaaccaaccccttgggctgaggaagagactgtggcagctgctcaactaatcaccatgctctggtccctgtctgtatccagctttgcagttggtggaatgactgcatcattctttggtgggtggcttggggacacacttggaagaatcaaagccatgttagtagcaaacattctgtcattagttggagctctcttgatggggttttcaaaattgggaccatctcatatacttataattgctggaagaagcatatcaggactatattgtgggctaatttcaggcctggttcctatgtatatcggtgaaattgctccaaccgctctcaggggagcacttggcacttttcatcagctggccatcgtcacgggcattcttattagtcagattattggtcttgaatttatcttgggcaattatgatctgtggcacatcctgcttggcctgtctggtgtgcgagccatccttcagtctctgctactctttttctgtccagaaagccccagatacctttacatcaagttagatgaggaagtcaaagcaaaacaaagcttgaaaagactcagaggatatgatgatgtcaccaaagatattaatgaaatgagaaaagaaagagaagaagcatcgagtgagcagaaagtctctataattcagctcttcaccaattccagctaccgacagcctattctagtggcactgatgctgcatgtggctcagcaattttccggaatcaatggcattttttactactcaaccagcatttttcagacggctggtatcagcaaacctgtttatgcaaccattggagttggcgctgtaaacatggttttcactgctgtctctgtattccttgtggagaaggcagggcgacgttctctctttctaattggaatgagtgggatgtttgtttgtgccatcttcatgtcagtgggacttgtgctgctgaataagttctcttggatgagttatgtgagcatgatagccatcttcctctttgtcagcttctttgaaattgggccaggcccgatcccctggttcatggtggctgagtttttcagtcaaggaccacgtcctgctgctttagcaatagctgcattcagcaattggacctgcaatttcattgtagctctgtgtttccagtacattgcggacttctgtggaccttatgtgtttttcctctttgctggagtgctcctggcctttaccctgttcacattttttaaagttccagaaaccaaaggaaagtcttttgaggaaattgctgcagaattccaaaagaagagtggctcagcccacaggccaaaagctgctgtagaaatgaaattcctaggagctacagagactgtgttgatgattccttgagcattttatatccacatctttaagtattgttttatttttatgtgctctcatcagaaatgtcatcaaatattaccaaaaaagtatttttttaagttagagaatatatttttgatggtaagactgtaattaagtaaaccaaaaaggctagtttattttgttacactaaagggcaggtggttctaatatttttagctctgttctttataacaaggttcttctaaaattgaagagatttcaacatatcatttttttaacacataactagaaacctgaggatgcaacaaatatttatatatttgaatatcattaaattggaattttcttacccatatatcttatgttaaaggagatatggctagtggcaataagttccatgttaaaatagacaactcttccatttattgcactcagcttttttcttgagtactagaatttgtattttgcttaaaattttacttttgttctgtattttcatgtggaatggattatagagtatactaaaaaatgtctatagagaaaaactttcatttttggtaggcttatcaaaatctttcagcactcagaaaagaaaaccattttagttcctttatttaatggccaaatggtttttgcaagatttaacactaaaaaggtttcacctgatcatatagcgtgggttatcagttaacattaacatctattataaaaccatgttgattcccttctggtacaatcctttgagttatagtttgctttgctttttaattgaggacagcctggttttcacatacactcaaacaatcatgagtcagacatttggtatattacctcaaattcctaataagtttgatcaaatctaatgtaagaaaatttgaagtaaaggattgatcactttgttaaaaatattttctgaattattatgtctcaaaataagttgaaaaggtagggtttgaggattcctgagtgtgggcttctgaaacttcataaatgttcagcttcagacttttatcaaaatccctatttaattttcctggaaagactgattgttttatggtgtgttcctaacataaaataatcgtctcctttgacatttccttctttgtcttagctgtatacagattctagccaaactattctatggccattactaacacgcattgtacactatctatctgcctttacctacataggcaaattggaaatacacagatgattaaacagactttagcttacagtcaattttacaattatggaaatatagttctgatgggtcccaaaagcttagcagggtgctaacgtatctctaggctgttttctccaccaactggagcactgatcaatccttcttatgtttgctttaatgtgtattgaagaaaagcactttttaaaaagtactctttaagagtgaaataattaaaaaccactgaacatttgctttgttttctaaagttgttcacatatatgtaatttagcagtccaaagaacaagaaattgtttcttttcagtgtgatttgtttttcatttgggccaatttgggataaactattttcacttgggatttcaggatacagtcaaaataagcttaaataactcaggacatctttgtgctaaactgtgaactctggacaaaaatagagagtctctgaatagggcaggagcaggaaaatggctcctgggtggctcttgtatgcttcttcaggatgctgatggcctttgggaagcccagtgtaaacaatgataaaggagcttaacacttttataggtgatacatgtgatttaatcaaatcactattcctgatctcatttactaacagaataaagtggtaaatatttaaattaaaaattccaaagaccacttttaagtgcttcttcactattttgactggcccacaaacaccagaaattcagaccctgaagttttctgcctcagagaaatttaagtaccttataatgttccccttctacaacttttttcttgcagagatacatgtgagttgacaagaaacattaaagggaaataagaagaagctgataaagctttataggaggaccaaagaactagcttactataataaaaaaattttaagtcttcaagggtatacatcataa

SEQ ID NO: 1288 - DNA, 2524 bp, Homo sapiens
gagagagagagagagagagagagagagagagagagagagagagagagagagagagagagagagagagagagagagagagagagagagagagagagagagagagctgcattcagcaattggacctgcaatttcattgtagctctgtgtttccagtacattgcggacttctgtggaccttatgtgtttttcctctttgctggagtgctcctggcctttaccctgttcacattttttaaagttccagaaaccaaaggaaagtcttttgaggaaattgctgcagaattccaaaagaagagtggctcagcccacaggccaaaagctgctgtagaaatgaaattcctaggagctacagagactgtgtaaaaaaaaaaccctgctttttgacatgaacagaaacaataagggaaccgtctgtttttaaatgatgattccttgagcattttatatccacatctttaagtattgttttatttttatgtgctctcatcagaaatgtcatcaaatattaccaaaaaagtatttttttaagttagagaatatatttttgatggtaagactgtaattaagtaaaccaaaaaggctagtttattttgttacactaaagggcaggtggttctaatatttttagctctgttctttataacaaggttcttctaaaattgaagagatttcaacatatcatttttttaacacataactagaaacctgaggatgcaacaaatatttatatatttgaatatcattaaattggaattttcttacccatatatcttatgttaaaggagatatggctagtggcaataagttccatgttaaaatagacaactcttccatttattgcactcagcttttttcttgagtactagaatttgtattttgcttaaaattttacttttgttctgtattttcatgtggaatggattatagagtatactaaaaaatgtctatagagaaaaactttcatttttggtaggcttatcaaaatctttcagcactcagaaaagaaaaccattttagttcctttatttaatggccaaatggtttttgcaagatttaacactaaaaaggtttcacctgatcatatagcgtgggttatcagttaacattaacatctattataaaaccatgttgattcccttctggtacaatcctttgagttatagtttgctttgctttttaattgaggacagcctggttttcacatacactcaaacaatcatgagtcagacatttggtatattacctcaaattcctaataagtttgatcaaatctaatgtaagaaaatttgaagtaaaggattgatcactttgttaaaaatattttctgaattattatgtctcaaaataagttgaaaaggtagggtttgaggattcctgagtgtgggcttctgaaacttcataaatgttcagcttcagacttttatcaaaatccctatttaattttcctggaaagactgattgttttatggtgtgttcctaacataaaataatcgtctcctttgacatttccttctttgtcttagctgtatacagattctagccaaactattctatggccattactaacacgcattgtacactatctatctgcctttacctacataggcaaattggaaatacacagatgattaaacagactttagcttacagtcaattttacaattatggaaatatagttctgatgggtcccaaaagcttagcagggtgctaacgtatctctaggctgttttctccaccaactggagcactgatcaatccttcttatgtttgctttaatgtgtattgaagaaaagcactttttaaaaagtactctttaagagtgaaataattaaaaaccactgaacatttgctttgttttctaaagttgttcacatatatgtaatttagcagtccaaagaacaagaaattgtttcttttcagtgtgatttgtttttcatttgggccaatttgggataaactattttcacttgggatttcaggatacagtcaaaataagcttaaataactcaggacatctttgtgctaaactgtgaactctggacaaaaatagagagtctctgaatagggcaggagcaggaaaatggctcctgggtggctcttgtatgcttcttcaggatgctgatggcctttgggaagcccagtgtaaacaatgataaaggagcttaacacttttataggtgatacatgtgatttaatcaaatcactattcctgatctcatttactaacagaataaagtggtaaatatttaaattaaaaattccaaagaccacttttaagtgcttcttcactattttgactggcccacaaacaccagaaattcagaccctgaagttttctgcctcagagaaatttaagtaccttataatgttccccttctacaacttttttcttgcagagatacatgtgagttgacaagaaacattaaagggaaataagaagaagctgataaagctttataggaggaccaaagaactagcttactataataaaaaaattttaagtcttcaagggtatacatcataa

SEQ ID NO: 1289 - DNA, 420 bp, Homo sapiens
cattcaatagttccatatttatcagtttgtgtatatgtagagaaaaaaaatcatgaacatactatccagcacttcttcttcaagttatttaaaggctcttaacggtaaaaaagaaataataataagataaaaattaaatcagccggttgcagtggctcatgcctgtaatcccagcactttgagaggccaaggcaggcagatcatgaggtcaggtgattgagaccatcctggctaatacggtgaaaccccatctctactaaaactacaaaaaactagccgggtgtggtggcgggagcctgtactccctgctactaggtaggctgaggtaggagaatggcatgaacccaggaggtggagcttgcagtgagccatggtcgcgctactacactccagcctgggtgaaagagcaagattctgtct

SEQ ID NO: 1290 - DNA, 982 bp, Homo sapiens
gtgacagagagagactccgtctaaaaaaaaaaaaaaaagaaagaaaaagaaattagaaatttcaaactgtgtaaattatttgtcctgtagtaaccatattttgttttattacgtcagtaatttgctaaaattagtcataatctaagatatgatcaggctagcaagacacttgaaaaatgtcaagaccctataaaactgatttgtgttcagaattttcaaaaacatcttgttctcttcccttcactaaatgtcagtattcttgactccttttctaaaactctaataatttcatttttgtgtaacatttttatgaaggccaaacatggtgatccatgtgtgtgatgaagcaaaaaacttgaaagaagattttacttgcccgcgagatcttttgatatcagaaatgaagtactttgctgaatatttatctatggatgcccagcgctgggaagaggtggacatttcagttcattgcgacgttcacattttcaactggttgataaaatacattaaaaggaacactaaggagaataaagattgtgagatgcccactttaggtaaaaaacaatctgttgcttaatttgtagtgaaatttgtgtgtcacctgggtagtttcttcaggccaaaagtgaaatgtggaaaattgtttggacaccggtgtttatgctcatattagtaacagccttttaggaaactgataacctcatcttttttagtaaattatagtaaatttatggcaaatgaacagatctctagatcagcagttcccaatgtatggtgtatggaccagtgggatactagggacccttttagagggtctacaaggtcaaaacagtttgcctaataataccaagatgtcacttgactttctcactgtgttgctcagatggtacaaaagcaatagtgggtaaaactgttgaagctttagacaagatcaaggcaggggcaccaaactgtactagcagtacatagttacatagttaat

SEQ ID NO: 1291 - DNA, 533 bp, Homo sapiens
  misc_feature (1)..(1): n is a, c, g, or t
ncactgcaacctctacctcatgggttccagggattctcctgcttttgtatttttagtagaaatggggtttcaccaggttagccaggctggtctcaaactcctgacctcaggtgatccgcctgccttggcctcccaaagtgctgggattataggcctgagccactgcgcccggcctctcttctttgtttttgttttttgtttttttgttttttttttttgagatggggtctcgctctgttgcccagggctgaggcacaagaattgtttgaacccgggtggcagaggttgcagtgagctgagatcatgccactgcgctcctagcctgggtgacagagcaagactccatctcaatttaaaacaaaaaaagaatgtgtttttaattttgttaatgtttgtctgttatacatagcactggtaccgcaaacattttacttaaactcttaatagcatttctttcgccagatactttaatatttcaccttacattaatcctggattcacatttctttaattgaaataaatgttaatgacaa

SEQ ID NO: 1292 - DNA, 4657 bp, Homo sapiens
  misc_feature (2690)..(2690): n is a, c, g, or t
cccgtcacccgcccggtccatgtccctgcagaccgtcccgcccgcgcacagcggcgggaaccccagcttctgcgcgcccggccgcgccccgggcctctgccccgcctcgctcccgctgcccggcgcctttgtccgctctgcgcccctggagtttctgtgcctccacgggcgggagcggggcgcgaaggtctgggggtgccccgaggacgcgccgcgtagtgagcctccgggcccaagatgaggaaattgaggcacagagattaactaatctgaaccagataatgccataagtagtagaactgcgatgcaaacttggacagtctgactccagagtctgcacacttaaccactccactattctggccttctacaagttccaaaagatgagtcgtggatattcagaaaacaacaatttcctgaacaataataaccaaatggtattggacatgatcctttatccattaattggaatccctcagactatcaactgggaaactatagcaaggctcgtgcctggattaacaccaaaagagtgtgcaaaacaggtttgatgaattaaagagcagtggaagctcgcctgttgacaaccagtataattccctaatggctgctggagagagtcctgttgaaactttagccacatatatcaaatcctcacttcttgacatacatggagaatttcaggagactccagttggacatgatgcagtttccaaaactggaagacatagtatagcttccacaaggaattgttcttcagaaagtgaaaattgtactactcataatggtggagaaatgactgaagaatctgaagggccaaacatggtgatccatgtgtgtgatgaagcaaaaaacttgaaagaagattttacttgcccgcgagatcttttgatatcagaaatgaagtactttgctgaatatttatctatggatgcccagcgctgggaagaggtggacatttcagttcattgcgacgttcacattttcaactggttgataaaatacattaaaaggaacactaaggagaataaagattgtgagatgcccactttagagccaggaaatgtcatttcaattcttatttcttcggagtttttaaaaatggattcactagttgaacagtgtattcagtattgccacaaaaatatgaatgccatagtagctaccccatgcaacatgaactgtattaatgcaaatcttctcacacgtatagctgatctgttctcacacaatgaagttgatgatttaaaggacaaaaaagataaatttaaaagcaaacttttttgtaagaagattgaaagactgtttgatcctgagtacttgaatccagattctcggagtaatgcagcaacattgtatagatgctgtttgtgtaagaaacttttaacaaaagaaacagaaagaagaattccttgcattcctggaaaaatcaatgtggatcgacgtggaaatattgtctatattcacataagagataagacatgggatgttcatgagtatttgaatagtcttttcgaagaattaaaatcttggagagatgtatactggcgattgtggggaacaatcaattggctgacttgttcaagatgttatcaggcctttctctgtattgaattttcacattgtcaataccactcagaaacagtggtttatcctactgcagcaagttcattgaatactgttggcactggaatttatccctgctgtaaccaaaaggttcttcggtttgatcctactcagcttacaaagggctgtaaagtgagggaccacatggttacacttcgtgatcaaggtgaaggcggagatttgccgtcctgtcccactgctagaatgttggacgatttgcacaagtacagagatgtcattgttgtgcctttttcaaaagatacagttagtgatgttggggttggcctctgtgatgaaaagggtatagaatgtgatgttttactggagccaaatacaccatggggtcccaaaactggggagctcaatgctttcttgtcattgaaaaactggactctacaactgaaacaacagtcactgttttcagaagaagaagaatataccactggatctgaggtcactgaagatgaagttggagatgaagaagaagtatccaagaaacaaaggaaaaaggagaagccaaagaagttcactagacaaccaaaaaagcaggtatcttcaccctgtgcccagaggaaagaaaaggcattggagaagtcagcttctagagatgtgtctcctttcgttatgagtatgcagaagaataagtgggatgccacaagatccttgagattcaaccaggatgcacaaagagaagacgatcaacggcgaatgactgaaattacagggcacctaataaaaatgagattgggggatctggaccgagtcaagtcaaaggaagcaaaagaatttgcaggaggtatttattccaggctggaagcacaaatcaaggcctcagtgccagttagtgcacgccaaagcagctcagagaaaaacacaaggtctaaaagtcgttttggtcaagggcgtcctgcataaagtaccttaaaatataagtaaaaagagagaaggcactcttctggacatctgaaattgctcacttcttgaagatcttcagaacaatgacttccaactgttttatgttattattattttaatccacataaatcataattctaaaagaaatncatagttaggttttatgaaaatctaattgtaaatatgaaactttttaaatctgattttcttctaatatcattctaggctatgtagaaagcaattatttacaaatttgcatagttgagactcccagtgttttcctttatttatttgaaaaagaaaggcctaaactgtcaggtagccaagtttttttaagaccttaaaagttaggggaacacaactggtagtgttaccatgcatggcactgattgtagtatgtctttggagctgtaaatcttgagatagcattgagaactgcaggttgtgtgacgaaattcccaatgatgctaattttaagtctgcatgaatattaaggagtgacaggtctcaagactgcattaaatgaagtttcagggtaaggtatttcagtactgtgttgggcagaagggttaatttttttcagcattatatcgtggaaagtacaatgttaatccaacttttttttctttcagtttttaatgcttatctattgatcatctgagctggaattactgattattactctgtcctctgtgaaactagtggcattctgaatttggtaaaataaccattgatagttttaggatagtaaatcatttctgttatatgagacacccactgtacagttctcagggctctaaaacccaaccatatttctgtaaccattcaaataactccttgaaacagttatacttgctagttcggtctaaaattttccaaatacattagataggtgaaaatttgcatatattcaagaaaaatcaaaataaaattctattttataaatcatgtttaaatttttctagccaggcagaaagagtgctcagggaaaatttgttccaaactataaccatataataaattatgtgtttgtaaattatatgtaggtctctgaaaaactttaagatgcactgtttctatttttttaagtcttaatttgccttataactgacatttcttcaaattattcagagaacagactttaataatgtgtgacaaaagagcaatttccattgaaatattgaagtgttacactcagtttacacgtacagaaatcattctttttagtgagtcttttagttgataaatgaagctagatgttatttgataactggctttgccaaggtttttgaactgctgtttagaaattttgttcccatttatatttgtttcaattgtttgatactgtggaaatagacttttattttcgaaagaaaatgtcttgtagtacatattatatgtaagtactctgttaaataccagagttttttttgtagtttactgtgttttctgattaaaggatttggatttgtacatgtaaacagtgctgtaatggtcacgactagataaggaaaaaatatatatgctcttttgatttttaactgatggtaaaaaggcaaactgcttctcccctgggaggcctataccactgaattaatttttacaaaccagagtttatcagaatttgattctcttcagaatgcttttggccaggtgtagtggctcacgccagtaatcccagcactttgggaggccgaggcgggcagatcacctgaggtcaggagtttgagaccagcctggccaacgtggtgaaaccctatctctactaaaaatacaaaaagattagccaggcatggtggcatacacctgtagtcccagctactcgggaggctgaggcacaagaattgtttgaacccgggtggcagaggttgcagtgagctgagatcatgccactgcgctcctagcctgggtgacagagcaagactccatctcaatttaaaacaaaaaaagaatgtgtttttaattttgttaatgtttgtctgttatacatagcactggtaccgcaaacattttacttaaactcttaatagcatttctttcgccagatactttaatatttcaccttacattaatcctggattcacatttctttaattgaaataaatgttaatgacaa

SEQ ID NO: 1293 - DNA, 4573 bp, Homo sapiens
  misc_feature (2606)..(2606): n is a, c, g, or t
tccgcagccgcctgcaagcgggcgggggcggggtgtgaggcgctgcggacggggttgcgggctcggtagcggcagcttcagggcgcgagcgcgggcggtgccgaccactgcaggtaacagaggcgctgcgagggcagccgcggccctgtggagatgaggaaattgaggcacagagattaactaatctgaaccagataatgccataagtagtagaactgcgatgcaaacttggacagtctgactccagagtctgcacacttaaccactccactattctggccttctacaagttccaaaagatgagtcgtggatattcagaaaacaacaatttcctgaacaataataaccaaatggtattggacatgatcctttatccattaattggaatccctcagactatcaactgggaaactatagcaaggctcgtgcctggattaacaccaaaagagtgtgcaaaacaggtttgatgaattaaagagcagtggaagctcgcctgttgacaaccagtataattccctaatggctgctggagagagtcctgttgaaactttagccacatatatcaaatcctcacttcttgacatacatggagaatttcaggagactccagttggacatgatgcagtttccaaaactggaagacatagtatagcttccacaaggaattgttcttcagaaagtgaaaattgtactactcataatggtggagaaatgactgaagaatctgaagggccaaacatggtgatccatgtgtgtgatgaagcaaaaaacttgaaagaagattttacttgcccgcgagatcttttgatatcagaaatgaagtactttgctgaatatttatctatggatgcccagcgctgggaagaggtggacatttcagttcattgcgacgttcacattttcaactggttgataaaatacattaaaaggaacactaaggagaataaagattgtgagatgcccactttagagccaggaaatgtcatttcaattcttatttcttcggagtttttaaaaatggattcactagttgaacagtgtattcagtattgccacaaaaatatgaatgccatagtagctaccccatgcaacatgaactgtattaatgcaaatcttctcacacgtatagctgatctgttctcacacaatgaagttgatgatttaaaggacaaaaaagataaatttaaaagcaaacttttttgtaagaagattgaaagactgtttgatcctgagtacttgaatccagattctcggagtaatgcagcaacattgtatagatgctgtttgtgtaagaaacttttaacaaaagaaacagaaagaagaattccttgcattcctggaaaaatcaatgtggatcgacgtggaaatattgtctatattcacataagagataagacatgggatgttcatgagtatttgaatagtcttttcgaagaattaaaatcttggagagatgtatactggcgattgtggggaacaatcaattggctgacttgttcaagatgttatcaggcctttctctgtattgaattttcacattgtcaataccactcagaaacagtggtttatcctactgcagcaagttcattgaatactgttggcactggaatttatccctgctgtaaccaaaaggttcttcggtttgatcctactcagcttacaaagggctgtaaagtgagggaccacatggttacacttcgtgatcaaggtgaaggcggagatttgccgtcctgtcccactgctagaatgttggacgatttgcacaagtacagagatgtcattgttgtgcctttttcaaaagatacagttagtgatgttggggttggcctctgtgatgaaaagggtatagaatgtgatgttttactggagccaaatacaccatggggtcccaaaactggggagctcaatgctttcttgtcattgaaaaactggactctacaactgaaacaacagtcactgttttcagaagaagaagaatataccactggatctgaggtcactgaagatgaagttggagatgaagaagaagtatccaagaaacaaaggaaaaaggagaagccaaagaagttcactagacaaccaaaaaagcaggtatcttcaccctgtgcccagaggaaagaaaaggcattggagaagtcagcttctagagatgtgtctcctttcgttatgagtatgcagaagaataagtgggatgccacaagatccttgagattcaaccaggatgcacaaagagaagacgatcaacggcgaatgactgaaattacagggcacctaataaaaatgagattgggggatctggaccgagtcaagtcaaaggaagcaaaagaatttgcaggaggtatttattccaggctggaagcacaaatcaaggcctcagtgccagttagtgcacgccaaagcagctcagagaaaaacacaaggtctaaaagtcgttttggtcaagggcgtcctgcataaagtaccttaaaatataagtaaaaagagagaaggcactcttctggacatctgaaattgctcacttcttgaagatcttcagaacaatgacttccaactgttttatgttattattattttaatccacataaatcataattctaaaagaaatncatagttaggttttatgaaaatctaattgtaaatatgaaactttttaaatctgattttcttctaatatcattctaggctatgtagaaagcaattatttacaaatttgcatagttgagactcccagtgttttcctttatttatttgaaaaagaaaggcctaaactgtcaggtagccaagtttttttaagaccttaaaagttaggggaacacaactggtagtgttaccatgcatggcactgattgtagtatgtctttggagctgtaaatcttgagatagcattgagaactgcaggttgtgtgacgaaattcccaatgatgctaattttaagtctgcatgaatattaaggagtgacaggtctcaagactgcattaaatgaagtttcagggtaaggtatttcagtactgtgttgggcagaagggttaatttttttcagcattatatcgtggaaagtacaatgttaatccaacttttttttctttcagtttttaatgcttatctattgatcatctgagctggaattactgattattactctgtcctctgtgaaactagtggcattctgaatttggtaaaataaccattgatagttttaggatagtaaatcatttctgttatatgagacacccactgtacagttctcagggctctaaaacccaaccatatttctgtaaccattcaaataactccttgaaacagttatacttgctagttcggtctaaaattttccaaatacattagataggtgaaaatttgcatatattcaagaaaaatcaaaataaaattctattttataaatcatgtttaaatttttctagccaggcagaaagagtgctcagggaaaatttgttccaaactataaccatataataaattatgtgtttgtaaattatatgtaggtctctgaaaaactttaagatgcactgtttctatttttttaagtcttaatttgccttataactgacatttcttcaaattattcagagaacagactttaataatgtgtgacaaaagagcaatttccattgaaatattgaagtgttacactcagtttacacgtacagaaatcattctttttagtgagtcttttagttgataaatgaagctagatgttatttgataactggctttgccaaggtttttgaactgctgtttagaaattttgttcccatttatatttgtttcaattgtttgatactgtggaaatagacttttattttcgaaagaaaatgtcttgtagtacatattatatgtaagtactctgttaaataccagagttttttttgtagtttactgtgttttctgattaaaggatttggatttgtacatgtaaacagtgctgtaatggtcacgactagataaggaaaaaatatatatgctcttttgatttttaactgatggtaaaaaggcaaactgcttctcccctgggaggcctataccactgaattaatttttacaaaccagagtttatcagaatttgattctcttcagaatgcttttggccaggtgtagtggctcacgccagtaatcccagcactttgggaggccgaggcgggcagatcacctgaggtcaggagtttgagaccagcctggccaacgtggtgaaaccctatctctactaaaaatacaaaaagattagccaggcatggtggcatacacctgtagtcccagctactcgggaggctgaggcacaagaattgtttgaacccgggtggcagaggttgcagtgagctgagatcatgccactgcgctcctagcctgggtgacagagcaagactccatctcaatttaaaacaaaaaaagaatgtgtttttaattttgttaatgtttgtctgttatacatagcactggtaccgcaaacattttacttaaactcttaatagcatttctttcgccagatactttaatatttcaccttacattaatcctggattcacatttctttaattgaaataaatgttaatgacaa

SEQ ID NO: 1294 - DNA, 4479 bp, Homo sapiens
  misc_feature (2512)..(2512): n is a, c, g, or t
tccgcagccgcctgcaagcgggcgggggcggggtgtgaggcgctgcggacggggttgcgggctcggtagcggcagcttcagggcgcgagcgcgggcggtgccgaccactgcaggtaacagaggcgctgcgagggcagccgcggccctgtggagatgaggaaattgaggcacagagattaactaatctgaaccagataatgccataagtagtagaactgcgatgcaaacttggacagtctgactccagagtctgcacacttaaccactccactattctggccttctacaagttccaaaagatgagtcgtggatattcagaaaacaacaatttcctgaacaataataaccaaatggtattggacatgatcctttatccattaattggaatccctcagactatcaactgggaaactatagcaaggctcgtgcctggattaacaccaaaagagtgtgcaaaacaggtttgatgaattaaagagcagtggaagctcgcctgttgacaaccagtataattccctaatggctgctggagagagtcctgttgaaactttagccacatatatcaaatcctcacttcttgacatacatggagaatttcaggagactccagttggacatgatgcagtttccaaaactggccaaacatggtgatccatgtgtgtgatgaagcaaaaaacttgaaagaagattttacttgcccgcgagatcttttgatatcagaaatgaagtactttgctgaatatttatctatggatgcccagcgctgggaagaggtggacatttcagttcattgcgacgttcacattttcaactggttgataaaatacattaaaaggaacactaaggagaataaagattgtgagatgcccactttagagccaggaaatgtcatttcaattcttatttcttcggagtttttaaaaatggattcactagttgaacagtgtattcagtattgccacaaaaatatgaatgccatagtagctaccccatgcaacatgaactgtattaatgcaaatcttctcacacgtatagctgatctgttctcacacaatgaagttgatgatttaaaggacaaaaaagataaatttaaaagcaaacttttttgtaagaagattgaaagactgtttgatcctgagtacttgaatccagattctcggagtaatgcagcaacattgtatagatgctgtttgtgtaagaaacttttaacaaaagaaacagaaagaagaattccttgcattcctggaaaaatcaatgtggatcgacgtggaaatattgtctatattcacataagagataagacatgggatgttcatgagtatttgaatagtcttttcgaagaattaaaatcttggagagatgtatactggcgattgtggggaacaatcaattggctgacttgttcaagatgttatcaggcctttctctgtattgaattttcacattgtcaataccactcagaaacagtggtttatcctactgcagcaagttcattgaatactgttggcactggaatttatccctgctgtaaccaaaaggttcttcggtttgatcctactcagcttacaaagggctgtaaagtgagggaccacatggttacacttcgtgatcaaggtgaaggcggagatttgccgtcctgtcccactgctagaatgttggacgatttgcacaagtacagagatgtcattgttgtgcctttttcaaaagatacagttagtgatgttggggttggcctctgtgatgaaaagggtatagaatgtgatgttttactggagccaaatacaccatggggtcccaaaactggggagctcaatgctttcttgtcattgaaaaactggactctacaactgaaacaacagtcactgttttcagaagaagaagaatataccactggatctgaggtcactgaagatgaagttggagatgaagaagaagtatccaagaaacaaaggaaaaaggagaagccaaagaagttcactagacaaccaaaaaagcaggtatcttcaccctgtgcccagaggaaagaaaaggcattggagaagtcagcttctagagatgtgtctcctttcgttatgagtatgcagaagaataagtgggatgccacaagatccttgagattcaaccaggatgcacaaagagaagacgatcaacggcgaatgactgaaattacagggcacctaataaaaatgagattgggggatctggaccgagtcaagtcaaaggaagcaaaagaatttgcaggaggtatttattccaggctggaagcacaaatcaaggcctcagtgccagttagtgcacgccaaagcagctcagagaaaaacacaaggtctaaaagtcgttttggtcaagggcgtcctgcataaagtaccttaaaatataagtaaaaagagagaaggcactcttctggacatctgaaattgctcacttcttgaagatcttcagaacaatgacttccaactgttttatgttattattattttaatccacataaatcataattctaaaagaaatncatagttaggttttatgaaaatctaattgtaaatatgaaactttttaaatctgattttcttctaatatcattctaggctatgtagaaagcaattatttacaaatttgcatagttgagactcccagtgttttcctttatttatttgaaaaagaaaggcctaaactgtcaggtagccaagtttttttaagaccttaaaagttaggggaacacaactggtagtgttaccatgcatggcactgattgtagtatgtctttggagctgtaaatcttgagatagcattgagaactgcaggttgtgtgacgaaattcccaatgatgctaattttaagtctgcatgaatattaaggagtgacaggtctcaagactgcattaaatgaagtttcagggtaaggtatttcagtactgtgttgggcagaagggttaatttttttcagcattatatcgtggaaagtacaatgttaatccaacttttttttctttcagtttttaatgcttatctattgatcatctgagctggaattactgattattactctgtcctctgtgaaactagtggcattctgaatttggtaaaataaccattgatagttttaggatagtaaatcatttctgttatatgagacacccactgtacagttctcagggctctaaaacccaaccatatttctgtaaccattcaaataactccttgaaacagttatacttgctagttcggtctaaaattttccaaatacattagataggtgaaaatttgcatatattcaagaaaaatcaaaataaaattctattttataaatcatgtttaaatttttctagccaggcagaaagagtgctcagggaaaatttgttccaaactataaccatataataaattatgtgtttgtaaattatatgtaggtctctgaaaaactttaagatgcactgtttctatttttttaagtcttaatttgccttataactgacatttcttcaaattattcagagaacagactttaataatgtgtgacaaaagagcaatttccattgaaatattgaagtgttacactcagtttacacgtacagaaatcattctttttagtgagtcttttagttgataaatgaagctagatgttatttgataactggctttgccaaggtttttgaactgctgtttagaaattttgttcccatttatatttgtttcaattgtttgatactgtggaaatagacttttattttcgaaagaaaatgtcttgtagtacatattatatgtaagtactctgttaaataccagagttttttttgtagtttactgtgttttctgattaaaggatttggatttgtacatgtaaacagtgctgtaatggtcacgactagataaggaaaaaatatatatgctcttttgatttttaactgatggtaaaaaggcaaactgcttctcccctgggaggcctataccactgaattaatttttacaaaccagagtttatcagaatttgattctcttcagaatgcttttggccaggtgtagtggctcacgccagtaatcccagcactttgggaggccgaggcgggcagatcacctgaggtcaggagtttgagaccagcctggccaacgtggtgaaaccctatctctactaaaaatacaaaaagattagccaggcatggtggcatacacctgtagtcccagctactcgggaggctgaggcacaagaattgtttgaacccgggtggcagaggttgcagtgagctgagatcatgccactgcgctcctagcctgggtgacagagcaagactccatctcaatttaaaacaaaaaaagaatgtgtttttaattttgttaatgtttgtctgttatacatagcactggtaccgcaaacattttacttaaactcttaatagcatttctttcgccagatactttaatatttcaccttacattaatcctggattcacatttctttaattgaaataaatgttaatgacaa

SEQ ID NO: 1295 - DNA, 2610 bp, Homo sapiens
  misc_feature (643)..(643): n is a, c, g, or t
cgaatgactgaaattacagggcacctaataaaaatgagattgggggatctggaccgagtcaagtcaaaggaagcaaaagaaggaaaaaggagaagccaaagaagttcactagacaaccaaaaaagcaggtatcttcaccctgtgcccagaggaaagaaaaggcattggagaagtcagcttctagagatgtgtctcctttcgttatgagtatgcagaagaataagtgggatgccacaagatccttgagattcaaccaggatgcacaaagagaagacgatcaacggcgaatgactgaaattacagggcacctaataaaaatgagattgggggatctggaccgagtcaagtcaaaggaagcaaaagaatttgcaggaggtatttattccaggctggaagcacaaatcaaggcctcagtgccagttagtgcacgccaaagcagctcagagaaaaacacaaggtctaaaagtcgttttggtcaagggcgtcctgcataaagtaccttaaaatataagtaaaaagagagaaggcactcttctggacatctgaaattgctcacttcttgaagatcttcagaacaatgacttccaactgttttatgttattattattttaatccacataaatcataattctaaaagaaatncatagttaggttttatgaaaatctaattgtaaatatgaaactttttaaatctgattttcttctaatatcattctaggctatgtagaaagcaattatttacaaatttgcatagttgagactcccagtgttttcctttatttatttgaaaaagaaaggcctaaactgtcaggtagccaagtttttttaagaccttaaaagttaggggaacacaactggtagtgttaccatgcatggcactgattgtagtatgtctttggagctgtaaatcttgagatagcattgagaactgcaggttgtgtgacgaaattcccaatgatgctaattttaagtctgcatgaatattaaggagtgacaggtctcaagactgcattaaatgaagtttcagggtaaggtatttcagtactgtgttgggcagaagggttaatttttttcagcattatatcgtggaaagtacaatgttaatccaacttttttttctttcagtttttaatgcttatctattgatcatctgagctggaattactgattattactctgtcctctgtgaaactagtggcattctgaatttggtaaaataaccattgatagttttaggatagtaaatcatttctgttatatgagacacccactgtacagttctcagggctctaaaacccaaccatatttctgtaaccattcaaataactccttgaaacagttatacttgctagttcggtctaaaattttccaaatacattagataggtgaaaatttgcatatattcaagaaaaatcaaaataaaattctattttataaatcatgtttaaatttttctagccaggcagaaagagtgctcagggaaaatttgttccaaactataaccatataataaattatgtgtttgtaaattatatgtaggtctctgaaaaactttaagatgcactgtttctatttttttaagtcttaatttgccttataactgacatttcttcaaattattcagagaacagactttaataatgtgtgacaaaagagcaatttccattgaaatattgaagtgttacactcagtttacacgtacagaaatcattctttttagtgagtcttttagttgataaatgaagctagatgttatttgataactggctttgccaaggtttttgaactgctgtttagaaattttgttcccatttatatttgtttcaattgtttgatactgtggaaatagacttttattttcgaaagaaaatgtcttgtagtacatattatatgtaagtactctgttaaataccagagttttttttgtagtttactgtgttttctgattaaaggatttggatttgtacatgtaaacagtgctgtaatggtcacgactagataaggaaaaaatatatatgctcttttgatttttaactgatggtaaaaaggcaaactgcttctcccctgggaggcctataccactgaattaatttttacaaaccagagtttatcagaatttgattctcttcagaatgcttttggccaggtgtagtggctcacgccagtaatcccagcactttgggaggccgaggcgggcagatcacctgaggtcaggagtttgagaccagcctggccaacgtggtgaaaccctatctctactaaaaatacaaaaagattagccaggcatggtggcatacacctgtagtcccagctactcgggaggctgaggcacaagaattgtttgaacccgggtggcagaggttgcagtgagctgagatcatgccactgcgctcctagcctgggtgacagagcaagactccatctcaatttaaaacaaaaaaagaatgtgtttttaattttgttaatgtttgtctgttatacatagcactggtaccgcaaacattttacttaaactcttaatagcatttctttcgccagatactttaatatttcaccttacattaatcctggattcacatttctttaattgaaataaatgttaatgacaa

SEQ ID NO: 1296 - DNA, 2618 bp, Homo sapiens
cccgtcacccgcccggtccatgtccctgcagaccgtcccgcccgcgcacagcggcgggaaccccagcttctgcgcgcccggccgcgccccgggcctctgccccgcctcgctcccgctgcccggcgcctttgtccgctctgcgcccctggagtttctgtgcctccacgggcgggagcggggcgcgaaggtctgggggtgccccgaggacgcgccgcgtagtgagcctccgggcccaagatgaggaaattgaggcacagagattaactaatctgaaccagataatgccataagtagtagaactgcgatgcaaacttggacagtctgactccagagtctgcacacttaaccactccactattctggccttctacaagttccaaaagatgagtcgtggatattcagaaaacaacaatttcctgaacaataataaccaaatggtattggacatgatcctttatccattaattggaatccctcagactatcaactgggaaactatagcaaggctcgtgcctggattaacaccaaaagagtgtgcaaaacaggtttgatgaattaaagagcagtggaagctcgcctgttgacaaccagtataattccctaatggctgctggagagagtcctgttgaaactttagccacatatatcaaatcctcacttcttgacatacatggagaatttcaggagactccagttggacatgatgcagtttccaaaactggaagacatagtatagcttccacaaggaattgttcttcagaaagtgaaaattgtactactcataatggtggagaaatgactgaagaatctgaagggccaaacatggtgatccatgtgtgtgatgaagcaaaaaacttgaaagaagattttacttgcccgcgagatcttttgatatcagaaatgaagtactttgctgaatatttatctatggatgcccagcgctgggaagaggtggacatttcagttcattgcgacgttcacattttcaactggttgataaaatacattaaaaggaacactaaggagaataaagattgtgagatgcccactttagagccaggaaatgtcatttcaattcttatttcttcggagtttttaaaaatggattcactagttgaacagtgtattcagtattgccacaaaaatatgaatgccatagtagctaccccatgcaacatgaactgtattaatgcaaatcttctcacacgtatagctgatctgttctcacacaatgaagttgatgatttaaaggacaaaaaagataaatttaaaagcaaacttttttgtaagaagattgaaagactgtttgatcctgagtacttgaatccagattctcggagtaatgcagcaacattgtatagatgctgtttgtgtaagaaacttttaacaaaagaaacagaaagaagaattccttgcattcctggaaaaatcaatgtggatcgacgtggaaatattgtctatattcacataagagataagacatgggatgttcatgagtatttgaatagtcttttcgaagaattaaaatcttggagagatgtatactggcgattgtggggaacaatcaattggctgacttgttcaagatgttatcaggcctttctctgtattgaattttcacattgtcaataccactcagaaacagtggtttatcctactgcagcaagttcattgaatactgttggcactggaatttatccctgctgtaaccaaaaggttcttcggtttgatcctactcagcttacaaagggctgtaaagtgagggaccacatggttacacttcgtgatcaaggtgaaggcggagatttgccgtcctgtcccactgctagaatgttggacgatttgcacaagtacagagatgtcattgttgtgcctttttcaaaagatacagttagtgatgttggggttggcctctgtgatgaaaagggtatagaatgtgatgttttactggagccaaatacaccatggggtcccaaaactggggagctcaatgctttcttgtcattgaaaaactggactctacaactgaaacaacagtcactgttttcagaagaagaagaatataccactggatctgaggtcactgaagatgaagttggagatgaagaagaagtatccaagaaacaaaggaaaaaggagaagccaaagaagttcactagacaaccaaaaaagcaggtatcttcaccctgtgcccagaggaaagaaaaggcattggagaagtcagcttctagagatgtgtctcctttcgttatgagtatgcagaagaataagtgggatgccacaagatccttgagattcaaccaggatgcacaaagagaagacgatcaacggcgaatgactgaaattacagggcacctaataaaaatgagattgggggatctggaccgagtcaagtcaaaggaagcaaaagaaacagacaaactgagacccagagacggcactgtgtctaagagcaacagaaaaagtggtttgagcagtgtgctcttgatgacagtgttgctgtgttaaacgaattaatacatgaaaggacttggaatactgcttgacatatcgtaagtgctcaaaaatgttagctattattagtagaccacatgaaagacttttagaaataactgtat

SEQ ID NO: 1297 - DNA, 1482 bp, Homo sapiens
cccgtcacccgcccggtccatgtccctgcagaccgtcccgcccgcgcacagcggcgggaaccccagcttctgcgcgcccggccgcgccccgggcctctgccccgcctcgctcccgctgcccggcgcctttgtccgctctgcgcccctggagtttctgtgcctccacgggcgggagcggggcgcgaaggtctgggggtgccccgaggacgcgccgcgtagtgagcctccgggcccaagatgaggaaattgaggcacagagattaactaatctgaaccagataatgccataagtagtagaactgcgatgcaaacttggacagtctgactccagagtctgcacacttaaccactccactattctggccttctacaagttccaaaagatgagtcgtggatattcagaaaacaacaatttcctgaacaataataaccaaatggtattggacatgatcctttatccattaattggaatccctcagactatcaactgggaaactatagcaaggctcgtgcctggattaacaccaaaagagtgtgcaaaacaggtttgatgaattaaagagcagtggaagctcgcctgttgacaaccagtataattccctaatggctgctggagagagtcctgttgaaactttagccacatatatcaaatcctcacttcttgacatacatggagaatttcaggagactccagttggacatgatgcagtttccaaaactggaagacatagtatagcttccacaaggaattgttcttcagaaagtgaaaattgtactactcataatggtggagaaatgactgaagaatctgaagggccaaacatggtgatccatgtgtgtgatgaagcaaaaaacttgaaagaagattttacttgcccgcgagatcttttgatatcagaaatgaagtactttgctgaatatttatctatggatgcccagcgctgggaagaggtggacatttcagttcattgcgacgttcacattttcaactggttgataaaatacattaaaaggaacactaaggagaataaagattgtgagatgcccactttaggtaaaaaacaatctgttgcttaatttgtagtgaaatttgtgtgtcacctgggtagtttcttcaggccaaaagtgaaatgtggaaaattgtttggacaccggtgtttatgctcatattagtaacagccttttaggaaactgataacctcatcttttttagtaaattatagtaaatttatggcaaatgaacagatctctagatcagcagttcccaatgtatggtgtatggaccagtgggatactagggacccttttagagggtctacaaggtcaaaacagtttgcctaataataccaagatgtcacttgactttctcactgtgttgctcagatggtacaaaagcaatagtgggtaaaactgttgaagctttagacaagatcaaggcaggggcaccaaactgtactagcagtacatagttacatagttaat

SEQ ID NO: 1298 - DNA, 1521 bp, Homo sapiens
cccgtcacccgcccggtccatgtccctgcagaccgtcccgcccgcgcacagcggcgggaaccccagcttctgcgcgcccggccgcgccccgggcctctgccccgcctcgctcccgctgcccggcgcctttgtccgctctgcgcccctggagtttctgtgcctccacgggcgggagcggggcgcgaaggtctgggggtgccccgaggacgcgccgcgtagtgagcctccgggcccaagatgaggaaattgaggcacagagattaactaatctgaaccagataatgccataagtagtagaactgcgatgcaaacttggacagtctgactccagagtctgcacacttaaccactccactattctggccttctacaagttccaaaagatgagtcgtggatattcagaaaacaacaatttcctgaacaataataaccaaatggtattggacatgatcctttatccattaattggaatccctcagactatcaactgggaaactatagcaaggctcgtgcctggattaacaccaaaagagtgtgcaaaacaggtttgatgaattaaagagcagtggaagctcgcctgttgacaaccagtataattccctaatggctgctggagagagtcctgttgaaactttagccacatatatcaaatcctcacttcttgacatacatggagaatttcaggagactccagttggacatgatgcagtttccaaaactggaagacatagtatagcttccacaaggaattgttcttcagaaagtgaaaattgtactactcataatggtggagaaatgactgaagaatctgaagggccaaacatggtgatccatgtgtgtgatgaagcaaaaaacttgaaagaagattttacttgcccgcgagatcttttgatatcagaaatgaagtactttgctgaatatttatctatggatgcccagcgctgggaagaggtggacatttcagttcattgcgacgttcacattttcaactggttgataaaatacattaaaaggaacactaaggagaataaagattgtgagatgcccactttagagccaggaaatgtcatttcaattcttatttcttcggagtttttaaaaatggattcactagttgaacagtgtattcagtattgccacaaaaatatgaatgccatagtagctaccccatgcaacatgaactgtattaatgcaaatcttctcacacgtatagctgatctgttctcacacaatgaagttgatgatttaaaggacaaaaaagataaatttaaaagcaaacttttttgtaagaagattgaaagactgtttgatcctgagtacttgaatccagattctcggagtaatgcagcaacattgtatagatgctgtttgtgtaagaaacttttaacaaaagaaacagaaagaagaattccttgcattcctggaaaaatcaatgtggatcgacgtggaaatattgtctatattcacataaggtgtcgtgaagataaaatacatacatgtatttttgtatatatatatata

SEQ ID NO: 1299 - DNA, 386 bp, Homo sapiens
gaaagttcaaaaagctgaaagtgttttcatacatttgtagcaattcaaacttgcactgagctgctgtgataccatttatattttttattcatcccacttatatttgattatggggcactgctccagatccattatatacaatgtacataacgtattatctctgagaagtaacaaatctcaattccaaaaatacatctcctgttaagagttttagaaaatggattacggagctgcaagaagatttattaaaccttgatgttgccaagccaacataatctaaaggagcaccaacttcctattgttttagaagcaattctgacctccttttctgtttaaaaaatctaggtctaaaagtcgttttggtcaagggcgtcctgcataaagta

SEQ ID NO: 1300 - DNA, 647 bp, Homo sapiens
gaaaaagaaaatgaacccctgtaaagcaatttcagcttatgaacccctgtaaagcaatttcagctttgcttcatggtatatttgctttctatccagaggttaatttgttagttttcttaaaacaatgtttttcttaatggtcttattgtttagaagtaacaagtggactggaaaagtatatggggcctaagtttataacattgtcttctcattatcagggaaaaaggagaagccaaagaagttcactagacaaccaaaaaagcaggtatcttcaccctgtgcccagaggaaagaaaaggcattggagaaggtaactctgaattatctgttgttaaagttcatatggaaaaataagcatgtgagtatagccagaaaaaaataaaaagagtaatgaagacacatggaatgctagcaatgtaaaaatgaagttttttatagactgagattaaagatctctaagatatattgacaaatgagaaaaggaaggtgcagaaacgtatagtggtatagtatgctaccatttgtgtaaagtagatgggggaaatatataaataacttccttgtatatgcataaaatgtttctggaagggctacataagaactcgataaaattggttgcctctcaggaagggaactgaacgtgtaag

SEQ ID NO: 1301 - DNA, 3688 bp, Homo sapiens
  misc_feature (1721)..(1721): n is a, c, g, or t
ctcagaaacagtggtttatcctactgcagcaagttcattaaaaggaacactaaggagaataaagattgtgagatgcccactttagagccaggaaatgtcatttcaattcttatttcttcggagtttttaaaaatggattcactagttgaacagtgtattcagtattgccacaaaaatatgaatgccatagtagctaccccatgcaacatgaactgtattaatgcaaatcttctcacacgtatagctgatctgttctcacacaatgaagttgatgatttaaaggacaaaaaagataaatttaaaagcaaacttttttgtaagaagattgaaagactgtttgatcctgagtacttgaatccagattctcggagtaatgcagcaacattgtatagatgctgtttgtgtaagaaacttttaacaaaagaaacagaaagaagaattccttgcattcctggaaaaatcaatgtggatcgacgtggaaatattgtctatattcacataagagataagacatgggatgttcatgagtatttgaatagtcttttcgaagaattaaaatcttggagagatgtatactggcgattgtggggaacaatcaattggctgacttgttcaagatgttatcaggcctttctctgtattgaattttcacattgtcaataccactcagaaacagtggtttatcctactgcagcaagttcattgaatactgttggcactggaatttatccctgctgtaaccaaaaggttcttcggtttgatcctactcagcttacaaagggctgtaaagtgagggaccacatggttacacttcgtgatcaaggtgaaggcggagatttgccgtcctgtcccactgctagaatgttggacgatttgcacaagtacagagatgtcattgttgtgcctttttcaaaagatacagttagtgatgttggggttggcctctgtgatgaaaagggtatagaatgtgatgttttactggagccaaatacaccatggggtcccaaaactggggagctcaatgctttcttgtcattgaaaaactggactctacaactgaaacaacagtcactgttttcagaagaagaagaatataccactggatctgaggtcactgaagatgaagttggagatgaagaagaagtatccaagaaacaaaggaaaaaggagaagccaaagaagttcactagacaaccaaaaaagcaggtatcttcaccctgtgcccagaggaaagaaaaggcattggagaagtcagcttctagagatgtgtctcctttcgttatgagtatgcagaagaataagtgggatgccacaagatccttgagattcaaccaggatgcacaaagagaagacgatcaacggcgaatgactgaaattacagggcacctaataaaaatgagattgggggatctggaccgagtcaagtcaaaggaagcaaaagaatttgcaggaggtatttattccaggctggaagcacaaatcaaggcctcagtgccagttagtgcacgccaaagcagctcagagaaaaacacaaggtctaaaagtcgttttggtcaagggcgtcctgcataaagtaccttaaaatataagtaaaaagagagaaggcactcttctggacatctgaaattgctcacttcttgaagatcttcagaacaatgacttccaactgttttatgttattattattttaatccacataaatcataattctaaaagaaatncatagttaggttttatgaaaatctaattgtaaatatgaaactttttaaatctgattttcttctaatatcattctaggctatgtagaaagcaattatttacaaatttgcatagttgagactcccagtgttttcctttatttatttgaaaaagaaaggcctaaactgtcaggtagccaagtttttttaagaccttaaaagttaggggaacacaactggtagtgttaccatgcatggcactgattgtagtatgtctttggagctgtaaatcttgagatagcattgagaactgcaggttgtgtgacgaaattcccaatgatgctaattttaagtctgcatgaatattaaggagtgacaggtctcaagactgcattaaatgaagtttcagggtaaggtatttcagtactgtgttgggcagaagggttaatttttttcagcattatatcgtggaaagtacaatgttaatccaacttttttttctttcagtttttaatgcttatctattgatcatctgagctggaattactgattattactctgtcctctgtgaaactagtggcattctgaatttggtaaaataaccattgatagttttaggatagtaaatcatttctgttatatgagacacccactgtacagttctcagggctctaaaacccaaccatatttctgtaaccattcaaataactccttgaaacagttatacttgctagttcggtctaaaattttccaaatacattagataggtgaaaatttgcatatattcaagaaaaatcaaaataaaattctattttataaatcatgtttaaatttttctagccaggcagaaagagtgctcagggaaaatttgttccaaactataaccatataataaattatgtgtttgtaaattatatgtaggtctctgaaaaactttaagatgcactgtttctatttttttaagtcttaatttgccttataactgacatttcttcaaattattcagagaacagactttaataatgtgtgacaaaagagcaatttccattgaaatattgaagtgttacactcagtttacacgtacagaaatcattctttttagtgagtcttttagttgataaatgaagctagatgttatttgataactggctttgccaaggtttttgaactgctgtttagaaattttgttcccatttatatttgtttcaattgtttgatactgtggaaatagacttttattttcgaaagaaaatgtcttgtagtacatattatatgtaagtactctgttaaataccagagttttttttgtagtttactgtgttttctgattaaaggatttggatttgtacatgtaaacagtgctgtaatggtcacgactagataaggaaaaaatatatatgctcttttgatttttaactgatggtaaaaaggcaaactgcttctcccctgggaggcctataccactgaattaatttttacaaaccagagtttatcagaatttgattctcttcagaatgcttttggccaggtgtagtggctcacgccagtaatcccagcactttgggaggccgaggcgggcagatcacctgaggtcaggagtttgagaccagcctggccaacgtggtgaaaccctatctctactaaaaatacaaaaagattagccaggcatggtggcatacacctgtagtcccagctactcgggaggctgaggcacaagaattgtttgaacccgggtggcagaggttgcagtgagctgagatcatgccactgcgctcctagcctgggtgacagagcaagactccatctcaatttaaaacaaaaaaagaatgtgtttttaattttgttaatgtttgtctgttatacatagcactggtaccgcaaacattttacttaaactcttaatagcatttctttcgccagatactttaatatttcaccttacattaatcctggattcacatttctttaattgaaataaatgttaatgacaa

SEQ ID NO: 1302 - DNA, 1009 bp, Homo sapiens
cccgtcacccgcccggtccatgtccctgcagaccgtcccgcccgcgcacagcggcgggaaccccagcttctgcgcgcccggccgcgccccgggcctctgccccgcctcgctcccgctgcccggcgcctttgtccgctctgcgcccctggagtttctgtgcctccacgggcgggagcggggcgcgaaggtctgggggtgccccgaggacgcgccgcgtagtgagcctccgggcccaagatgaggaaattgaggcacagagattaactaatctgaaccagataatgccataagtagtagaactgcgatgcaaacttggacagtctgactccagagtctgcacacttaaccactccactattctggccttctacaagttccaaaagatgagtcgtggatattcagaaaacaacaatttcctgaacaataataaccaaatggtattggacatgatcctttatccattaattggaatccctcagactatcaactgggaaactatagcaaggctcgtgcctggattaacaccaaaagagtgtgcaaaacaggtttgatgaattaaagagcagtggaagctcgcctgttgacaaccagtataattccctaatggctgctggagagagtcctgttgaaactttagccacatatatcaaatcctcacttcttgacatacatggagaatttcaggagactccagttggacatgatgcagtttccaaaactggaagacatagtatagcttccacaaggaattgttcttcagaaagtgaaaattgtactactcataatggtggagaaatgactgaagaatctgaaggagacgtggtctcactgtgttgcccagtctggtcctgaactcctgggctcaagcagtcctcccacttcagactcccaaggtgctgggattacagttgtgagccaccgtgcctggacctccaataatgtacttttttttgtatcaggaatgtgtgaattaaacacacaattcaattaaattcatgttgtaggacag

SEQ ID NO: 1303 - DNA, 286 bp, Homo sapiens
aggattaaatcagttagcattatttttttctgtttgtaaaaggaaaaacttattaaatttttaaacggagttattaaacagagtttcactcttattgcccaggctggagtgcaaatatattgtggcaaatataaaatttgctagaaaatacatcttagaaattaagttataagagagcaaatggtaagtgaagaattttaaatttaattttctatgatatagcataacatacatttccatgcagaatcttttatttttaaatgtgaaatttaaaggttgcaaaata

SEQ ID NO: 1304 - DNA, 265 bp, Homo sapiens
gcgcctctggagggagggccccgggcagtgccagcaggaacgagcctgcctcagagccccaagtctcagtggagctccttccaggctgacatggggctgacggctcccggggccagcagggcgcccgcccgacaccaccacaacccatttcagtgacagataacttcagacaacttatcagagggccttggagggccggaggcagcaacacacacagcctgattctgggagcagcatttccttccaaaaaccttaaatcggataa

SEQ ID NO: 1305 - DNA, 471 bp, Homo sapiens
gagattttatttcttttgctggtgttggttctgggtgcaagtgatgaatgacgctcttgcgagtgaatgttgagtggtgtgtggataatgactcagttaggactacaggcacatgccaccatgccaggctaattgttttaatttttttttttttttgagacagtctctctctgtctcccaggctggagtgcagtggcacaatctcaattcttctgcctcagcctctggagtagctgagactgcaggtgcacaccaccatgccggctaatttttgtatttttagtagagacagggtttccccgtgttggccaggctggtctggaattcctggcctcaagtgacccgccctgcctcagcctcccaagtgctgggattacaggcatgggccgcccgggcttaatttttttttatttttatttttgcagagatggagtcttcctgtgttgcctagggttgtctcaaactcctggc

SEQ ID NO: 1306 - DNA, 383 bp, Homo sapiens
tctttggaccttaacccaccttcatgcagttgttcagcaccttctttcatctaaaacctgacggaatctggttgaaccttcctgtcctgtcttctggtttctgagtggatttgacccagggcaactgagaagaggcactgctttatctttttgccttctcactagagaatgagaccctactgcagtgtcctctctcttcagtccctgcatcttccatccacaaaacattgtcaagtgtgtcagtgacttacatccctaattaacttaatgatctcaacgtcagagaaaaacacctgtaaaacttttctctctccctgattgtaacaaaaacacaatcccatgatagaaaacttggaaaatgcagaggaagtaaaaagaagaaa

SEQ ID NO: 1307 - DNA, 799 bp, Homo sapiens
gaattaggagtttgtctaaggatataccagttggctgtcctaagaaacaaggagcattcattaccaaggagaatggactttgatcaaaggtctatcagcctcatccaggaactagatttttttaagggaagcagatctatttctgaaagtcagatttataataaagctcaaaaaactgagctataaacctgtaataccagcagactttcaataagagactcttacaactcaattgtggaaaaactaataattaaaaatgggcaaaggacctgagcagacatttctccaaagaagacataagaaatggccagtaggtatagatatgaaaaggtgttcagcatcattaatcataagaataatgtaaattaaaaccactgtgagctatcacctcacatctataagaatggctattaacaagacatgagataaatgttgatgagattgtggagaaaagagaaccctagtacactgtttgtgggcgtgtagactggggcagccgttatggaaaacggtatggaggctcctaaagaaattaaaaatagaactgttatctgaccctcttctgagtaagtatgtacccaaagaagatgaaatcaccagctgggcgcagtgactcacacctgtaatcccagcactttggagtgggtgaatcacctgaggtcaggagttcaagaccagcttgaccaacatggtgaaaccccgtctctactaaaaatacaaaaagtaggcgggcatggtgacgggcacctgtaatcccagctacttgggaggctgaggcagaagaatcacttgaactcgg

SEQ ID NO: 1308 - DNA, 129 bp, Homo sapiens
caagtcctaagccaacttggttatgggctgagctcagcatggcctgcattttgttttctgggctcctccaaactcaacacaaaacaaataactttgaaacagctaacatttcataaagcagcaaagatg

SEQ ID NO: 1309 - DNA, 1026 bp, Homo sapiens
gtagtggtttacccagatgttcaaaacattccatgtgataatgtgttttgtgaagagtgtatgagtgctatctagtgtctctattcccagatggccaggctcacaagcccaccagggaagatcccagctggaggggcttccacattttcctgatgaggagctattttagatttcctcaaaatcttttgattgctgccaaaagggagaagggtttgcagctgctggtcaggcattctcctttccttgccagaaccctgactgactcagggcagtaggtgaggctgcaacatcaaccagtccggtgacgctgacacacagctttggggtcagcctgtcacactacccggctccagttgcttaacggactcccagaggccatgatgctcagaagtaaaaagatgcaagcagcaatctggaattcagtggcccccaactttatagatagagggatagatagaaaatattagaacttccacttgtatttttaaattaaaaatctgactggggtggggggaatggggcattgtttaatatgtatagactttcagtttttgcaagatgaaaataattctggagattggttgcacaacagtatgaatgtatttaacactactgaacgttacacttaaaaatggttatgatggtaaattttgttatatgtattttacaacttaacatttttcaaaaaataaaaataaatttaaaaagtaatttactctcaacattaaaattgaaaatattttccaaattatttttgttacagttttaatttcctctttgatttaagggtaatgtttgaagataaccttttttaaaaaagtcattgttttgagtgtgatgttaattattaatgtcattaaactgcaagctattcaatgtctataatttagaaatttactgaactttatactgtggcatatgaacaattttttacatcttccaaagacatttgaatataatatgtattctccattgataaaatatgtagttcaagctatagctgttaaataaagctatttgaatttg

SEQ ID NO: 1310 - DNA, 501 bp, Homo sapiens
agacagagctctgggtcagcagagaaaaaagtcaatgagttaatatttgaatgcaccaagggaagggacaggcctctgtgtgacacagcgcccaataggccagggtggaagatatggatcatatagaagggaaatgaagagaaagtggagagcacaacatgcacgaagttgcaggaatgaatgtgcatgggagatttggggagcacgagccccagaaaggaaaactgtgtaaaggcctcaggaagagctttctgctggggaagtcagtttcatgtagtaaggccttgtgtggcaggcagaaaactttggactgtattctatgacattataggaagacttcaagagactgtaacttgggaagagacttgactagagctgttttagaagataacaggggtgggccatgcctgtaatcccagcactttgggaggccaaggtgggagggtcgcttgagccgaggagctcaagaccagcctgggcaacaaagggagaccccatttc

SEQ ID NO: 1311 - DNA, 473 bp, Homo sapiens
gcaggagagagaactaagaacagagagcatgttctgagatgtctgctgtgtttgcaggtaacttccctcaatttccctactcattggccatgctagaaagcaggtcttggcgccatatttgtaccatggtacttcccctccctatactcaattggttggccagaagcccaattgtcattctctctctctctctctccctctccctctctccctctccctccctccctctccaagatatccagtaactgactgatcagctggtggtgggttctgctggctgccatgatgggccaccagcaaaaagggaaaattggttgtgagtgagagaagcagagataagaaaggccacagggctgaaaagaaagaccatgggctgccgggcgctgtggctcaagcttgtaatcccagcactttgggaggccaagacgggcggatcatgaggtcaggagatcgagaccatcctggctcacacg

SEQ ID NO: 1312 - DNA, 827 bp, Homo sapiens
taggagcatgccttactggggtttattggagttaatggttcctcagagaacataaataaaagaaggtctatctatggcttcctaaaggtaatggagagaaaagtaagttgaagaatggtgggaaatgtatgcttgactcaaaacagccaggatcatcatcacgttgaatccaagcatagttgtgctagatcatctgatttttccaaaaatctgggtttttatgtgaaatttcccaatttttaaattacttcattttaaaaatcacaagttaaaagaaaaaaacctacaggctgaaaatggccatcaggctgccaaattgcaagcttttttttactatacttaccagcagcaaaagaaacctatttttccccatttactctatgttcttggggaagatggtgaaaaaactatcccattaattcatcagagaaaaggtattattgcatttacaacataaacttaatgcattcagatttactctgtatgttttcagtttactctgggaaacctaccacactcctcttataccacaccctaactgtgaagttggtctatccaagcagggttccccatttgttgggcctcagtcttctacactatactacaaagcaagaggaatacaaaagaagtttcagcatcttaatttacaacctccagtggtttaaaccagaaagttcttttggagcaaaactactatgtcttttcttcctcagagttgctgagaaattataattagaggttttcctgttgtgtaaaggaaaggaattcctttcctttcctgtgtgtacaagacttctgttctcaataaatgtgcttccctgtccaaa

SEQ ID NO: 1313 - DNA, 268 bp, Homo sapiens
ttttagattacaactaaatatgttacagatttaaataacattatacaatggaattattttaaacacttatttttattgatgtgctttcataatttgactaatgataatcaatggtatgatatttgatcttacttcccctaattatgccattcatttgtgctgacaatatcctatgaatacagtatagtaaatgtttattatctatttgaaatttgggaaggagttcatgtatatatttacaaaaacaataataaagccattatttttc

SEQ ID NO: 1314 - DNA, 841 bp, Homo sapiens
gcgctcaattctaccagcaaatactatttattcaacaaatatttaacaagtgcctaccctatgtaaggcactgaactagatattagtgacacaaaaataaattttagaagaggcaataatttagttgaagagtgaaccccagatttacgtaatatagtttgttacatctatctaatctatatttatatagatctatatagatatgttattttttttttttaagacagggtctcattcctgttgctcaggctggagtacagtggcatgatcttggctcactgcagcttcgacctcccgggctcaggtgattctcccacctcagcctcccaagcaactggaactacccagctagtcctaccatgaccggttagttttttgtatttttaatagagacatggtttcaccacattgcccaggctagtcctgaactcccggactcaagcagtccacccacctaggcctcctaaagtgctagaattacaggcgtgagccactgtgcccagcctgttacatctacattagatatatacatatataattatttatatattttatatatgtaattatttcctaatgaaataacagacaacatggtaatcaaacaaggaaagaaagaagtatatgtgaaagtataaaaaccctcagaaaacacatcagatgagtcagtaaaactagttgtgaatagtcacacatgcctgtaatcccagctacttggaaggctgaggtaggaggattgcttgagctcaggagtttgagaccagcctgggcaacacgcatgacaccatctcaagaaaaaaaaaattgttgtggaataccagattaataaatactactttttaag

SEQ ID NO: 1315 - DNA, 385 bp, Homo sapiens
atatatagtttttatatgtagcatttgtctagtttaaaatcctttctaatttttattctaatcaacagattgtagaagattaaataggtaccaggagacatgaaagaatcatcttcaacatttctcaagtagctgctgattatctccttttatggaggcataacaagctcctggaggcttctacagattctaaagggaaagatttcctgggaggtgagaaagccacttgagagaaggctattttgatttactaattaattcagtgtaaaggtagtcctgggcacggtggctcacgcctataatcccagcagtttgagaggcctagacagaggttgctcaggagttccagagcagcctgagcaacttggtaaaaccctgtctctac

SEQ ID NO: 1316 - DNA, 495 bp, Homo sapiens
gtaacaattttttacttaaagtggattttgtctaactatggccaccccacccacttgagcttactgtttgcatggaatatatttttgtatcctgtcactttcagcctgtttgtctccttaaaactaaaatgagtcccctaaagacgcatattgtaagattttgtttttaactcattcagctattttacttttttaaagggttcaatctgttcatatttaaaataataccagaaagaaataaaattactagttgcgttttgttttcgattacgttctgtgcttgtcataaatacgttttccctcatttcctctcttactgcctttgtttttgttttgttaattttgtagtggcatactttgattcctttttcattttcttttgcatatcttctataggtatttttgtgatcaccttgaaaaatgagagtttatgaaacataacaatatgcttaaatctcatctttacttcagttgaatataaaactataccttttt

SEQ ID NO: 1317 - DNA, 548 bp, Homo sapiens
cagaaaacccatttgccaaaaattaacacctattcattatacaaactttctaaactagcaataaagggcaattttctcagcctggtaaagtgaatctgtgaaaaacccacagccaacatcatacttaatggttgagagcaaggcaaggttgtctgccctaaccacctttattcaacattgcactggcaacattactacaaggcagcaagaaaaataaaagactcacacgtttgagaagtagtaaaactgtctttatttctagatgatataactgtgtacctagaaatgcctaagaaatccacactattagaactaataaatttagaatagccagaggatatgaggtgagtgtatacaaagcaattatttatatatactagcaatatacaattggaaactgaagcagtactattcaatagagcatcaaaaagcaggtgggtgcactggcacgtgcatatagtcccagctacactaaaggctgaggtgaggggcttacttgagcccaggagttcaggtgcagctcaggcaacatagtgaaccccgtatct

SEQ ID NO: 1318 - DNA, 859 bp, Homo sapiens
caccagggccacaggaggagatgcagcgatgggccattcctagtgagacacagacacagggctggctggagaagaaaccttttgagctgtggggctgtcttcctagaagctgccaacccctggaaccactaagaggtcaaggctgaagtgtgccacttccacagtctgctaaggagtgcctccccctgagtcagggacaattcttgctctacttttcaggatccttgggcacactgctggcccgagacatttacttcccatttaaaattaagtaatcaaaataccagggtcgattactctgaactcttgcttatgtaaactttagggataaaactgtagtaagacacaaaatgctaacaataaaatataaattagactacattaaaactaagaccttcttttcattaaggacacagtagacttgaacaccaccattaagcaacttagcttgatttacacttgtagaacaccccattcacgagtagcatagaaacagtcaccaaaataaagagcagaaatcaaacgaaaaagcaaaaatagaggaaaatcaatcaaaacctagtttttcgaagagatcaataaaactatcagtcttgcaataagcttatcaaagaaaaaagggaagagaaatgaccaatgtcaggaatgaaaaagtgtatcaccacaaacccttcaagatattccaacaataataataaataatactatgtacatctttatgtacctaaattcaatcaattggatgaaataaaccaattgcttgaaaaccaaaaactaccaaaactcactgaagattaaatagataagctgaagttgaaacccttccaaaaaaggcagtttctgaagccagatgatttca

SEQ ID NO: 1319 - DNA, 884 bp, Homo sapiens
caccagggccacaggaggagatgcagcgatgggccattcctagtgagacacagacacagggctggctggagaagaaaccttttgagctgtggggctgtcttcctagaagctgccaacccctggaaccactaagaggtcaaggctgaagtgtgccacttccacagtctgctaaggagtgcctccccctgagtcagggacaattcttgctctacttttcaggatccttgggcacactgctggcccgagacatttacttcccatttaaaattaagtaatcaaaataccagggtcgattgatatttgcaataacaacaaaaattactctgaactcttgcttatgtaaactttagggataaaactgtagtaagacacaaaatgctaacaataaaatataaattagactacattaaaactaagaccttcttttcattaaggacacagtagacttgaacaccaccattaagcaacttagcttgatttacacttgtagaacaccccattcacgagtagcatagaaacagtcaccaaaataaagagcagaaatcaaacgaaaaagcaaaaatagaggaaaatcaatcaaaacctagtttttcgaagagatcaataaaactatcagtcttgcaataagcttatcaaagaaaaaagggaagagaaatgaccaatgtcaggaatgaaaaagtgtatcaccacaaacccttcaagatattccaacaataataataaataatactatgtacatctttatgtacctaaattcaatcaattggatgaaataaaccaattgcttgaaaaccaaaaactaccaaaactcactgaagattaaatagataagctgaagttgaaacccttccaaaaaaggcagtttctgaagccagatgatttca

SEQ ID NO: 1320 - DNA, 558 bp, Homo sapiens
ctggctggtttgtctaaaaccttctccaaagtggtgcttcctggaggggggtgcccatcgaaggggtgggcaggcagtgagtggcctggactcccaggtcagcatctgtatcgcactgcagtttatctgtaaagttcctgaacctgagccaaaggtggctcaccaccagcctcagagcggctgctggcaccatgcatggtagcaggcggggtccaggcagtacggctgcgctccccaacaccgccagctggttgctggggccgggcgccagtttctccagaggctgccacagtgaaggcccctgtcccactgcagcgaacagcaccctgtgccgcccggcctggggaccgtccttcagcctctcagacgccatgggcttgagatgaacgtcccttccagacagcagcgtgggtcccctcatctgaattcctggcagccttcaaacaagtgactccccacactccccttataaatctttgtaatggtatttacttctaggagaaaaagccgatcaatagcagagctttttaataattaaaagtgtgtacttctgtaatc

SEQ ID NO: 1321 - DNA, 547 bp, Homo sapiens
ctggctggtttgtctaaaaccttctccaaagtggtgcttcctggaggggggtgcccatcgaaggggtgggcaggcagtgagtggcctggactcccaggtcagcatctgtatcgcactgcagtttatctgtaaagttcctgaacctgagccaaaggtggctcaccaccagcctcagagcggctgctggcaccatgcatggtagcaggcggggtccaggcagtacggctgcgctccccaacaccgccagctggttgctggggccgggcgccagtttctccagaggctgccacagtgaaggcccctgtcccactgcagcgaacagcaccctgtgccgcccggcctggggaccgtccttcagcctctcagacgccatgggcttgtatgaccctttcctcccttcctccgcctggtccccccactccagtttccctgccctccccctgctgttttccctctgtctccttctctctatttctttgtaatggtatttacttctaggagaaaaagccgttctatggcgggctttctagtcttaatggtgtgtcct

SEQ ID NO: 1322 - DNA, 452 bp, Homo sapiens
ttttctcagtataaagggtaaacgcatatctctttgccccaaatttcaccaaccttggcctgtacagatgtgtgtttttttttttaaattcccctactaaccagccatttatttgggttaaattctgtagacacaaatcaggtgatcatttagctcttatcagtgggtgtcatttagcgtttcagcctaagtagtcatccatctatcaaagaaatagaaaacagatgggaagcaaggatgctggggaagataggaagactgagcagctgcttctcagggtggtttgacctacagagtgcatgaggtgcggtaggggtaccaagggggtgaggctctgggtagccatttggaaatgtgattctcctggatggtgtgtgcggaatagaaaaagtcacagagcctgagatcaaggaacactgtggataaatgtcaacatgtgttcctgtttggtt

SEQ ID NO: 1323 - DNA, 385 bp, Homo sapiens
  misc_feature (325)..(325): n is a, c, g, or t
cagcccctgccctgcaccaagcagaggggctggacacctctgtcatggcaccagctgcctctccttccccagcacagtctggacctgggcggactttttggaaaagcttctggatgccacggactccacgaccaaccaactaggttgctgctgcttgcaaacatcgcctccattgaaggattcctgcagccaccagctctggaactttctggaaccaaacatttccccagactgcctacaaggaccaattgggcctctggatgtaggtgtggcctgcaggggtccggcagggcttccccagagtcaagtgggacccagccctttnggaccccctgcccggtcctattgacctctgctctctccctgcagcacttcctggaggcgt

SEQ ID NO: 1324 - DNA, 397 bp, Homo sapiens
actagaggatgtagtttagacccacaggtaagtgggctccttaacactaacctcagaattagagacatttcccaccaacatagagtaagaaaacacaggtctccccagtgcgaccagcctcactttgtggcctgataacgctttttgtaggaaggtcatccccaaggagaaaaagggaagagaaagggagtgttgtcatatatggacagatcgtttttcttacaaacatataaatcagattgggccactggttaacactgagtgagagaaggagagaggcctggattgttccatatgaaaaaaaaaatcaagagtggaaaataattcctgccacctccatcttcaactatatattttatttttaaattggataaatggccagtgtaagatgaaaacc

SEQ ID NO: 1325 - DNA, 1151 bp, Homo sapiens
ggaggaaggcacagaccttcctcctcctggaacatccaagggcactggatcctctgtgtccctctgagatggggtgccactccagcaagagcaccacggtggcagctgagtcccagaagcttgaagaagagcgcgagggaagagagccaggtctggagaccggcacccaggcagcagactgcaaggatgccccgctgaaggatggaacccctgagccaaagagctgaaatgcctctctccagagtcggaccctcacctccttcctggaactgcctttggccccagaaccatgagacaatccccaccctgagaagctccgatcactgggaggagagagaaagcctccagctttgggattcaggcttcagaagtttttagcagcctttgctcattggagaggtggggaggataagtctataaggaatcctatttccccagctctcccacagagaggacaaaagaagtcttcacacgttgtggaactttcctgcaacttctggatgcagacaagcctcagagcagactgttctggctccagtgaatatcggctgccaagctgtgagcatccagggatccccgtctgcctggctttcctgaagtcagaaggcgccttggtcatactgtgtggggtgtgtggatctcagtttgctctctttctttctccttttttcaacagctggcggagtagccaacacccctgacagcaatgtgttgcacttggctcactccacaccctatgaataattttaatatttaacttgaaatgttgttaagaaactatggaaaatatcaggatcccactgggatcccgtaaattgaaggcaacaaggtcttggtcctccagtaaggggggcatggagccctggtgggaaggaaagaagagaaatttgtgttcctgattccttaatccccaagaaaggtccctctgctaacattcacatatctcttcctagccaaagtctgtccatttcaaccctctagcatctgagctatctgcatccagctttcaaaaatatttcgctgtttactaacatgtctgtcagcctctcttttctcccccgcatgtgttttgtttttaaatccactcaaaagcgttttcatttgaaatcaaatagacatgtttgcaaataaatgttgacacaacaaagaaa

SEQ ID NO: 1326 - DNA, 720 bp, Homo sapiens
caaaggacccttctttttggccataaaaacctgagaaactgattgagattcttttgagcaataaggcaactgcggtgaggaaaaaataaggaaggaggcacaaaaagcaaagcagttcagcctgaaattgactacagagcttccctttgcttcagcagagcctggaggagcaggagggatgggggccctgtcagctggcccaaagccctgccctgtcccaggggtgctaagcttgctgcaggccaggaaacaggcctgggcttgcagctggggatcaggaagtttggggcctctttgcacagcttactggggataggccaagctctgggaactcctttcaattttttttttttttaagacaactctgtttttctccctcctccctactagtggaaatttaccttgcaaaacaggactgtgcatggtgagagctgcttgcaatgtccacactcaggactctatggaaagagttcgcagctggtggtgaggctttgaggtggggctgcccttatttcactagctcctgaggggcagagctcactcagctttttaccaaatcaaaggaaggaagctttaggtccttcgaagttcagaaccagggtggtttgttttgcttccttttggaatggaataaaatgctcatttaattaaaaacacaaaaaccccgggtcctttttcgggggcggaaaagggttggaatggccatggcaaacggtcccg

SEQ ID NO: 1327 - DNA, 600 bp, Homo sapiens
ggaggaaggcacagaccttcctcctcctggaacatccaagggcactggatcctctgtgtccctctgagatggggtgccactccagcaagagcaccacggtggcagctgagtcccagaagcttgaagaagagcgcgagggaagagagccaggtctggagaccggcacccaggcagcagactgcaaggatgccccgctgaaggatggaacccctgagccaaagagctgaaatgcctctctccagagtcggaccctcacctcctccctactagtggaaatttaccttgcaaaacaggactgtgcatggtgagagctgcttgcaatgtccacactcaggactctatggaaagagttcgcagctggtggtgaggctttgaggtggggctgcccttatttcactagctcctgaggggcagagctcactcagctttttaccaaatcaaaggaaggaagctttaggtccttcgaagttcagaaccagggtggtttgttttgcttccttttggaatggaataaaatgctcatttaattaaaaacacaaaaaccccgggtcctttttcgggggcggaaaagggttggaatggccatggcaaacggtcccg

SEQ ID NO: 1328 - DNA, 344 bp, Homo sapiens
gggttttcagagaccaggttcctcctctgaaacctcagcctgtggctctctgtgccttcatccccgcagctggcatggaaataatgatctgacctcccaggggaggcggccccacgggcgtgatggtgacaccctgtggggggcagcctgggtaacatgcagagtgccgaggggtaggcctgagctcaaatctggcttctgccctcaccgagccatgtgatcccatcctggctactcccatacctgagctggagtttcttcagcagtaggaccagggtgccgaggggacaacagaactccctctgatgagggatcaccctgcagcctcaagaggctcaaatgca

SEQ ID NO: 1329 - DNA, 225 bp, Homo sapiens
ctaagcggggtcatggacagtctcccagctcccctgcaccaatcagtggttccacatcagacttttctgcctcacatttttttttcctttttaaaggtacagttaagggccaggcatggtggctcatgcctataatcctaaccctttgggagacaaggcaggcaaatcatttgagcccaggagtttgagaccagccctggcaacatggcaaaaccccatctctct

SEQ ID NO: 1330 - DNA, 319 bp, Homo sapiens
ttttcttattgctgagttttaagagttctttttacagtttggataacagtcctttatcagatgtgtcttttgcaaacattttatcccagcctggggcttatgttctcatttttttgacttttttttttttaaatcagtcttgctagaggtttatcaatattattagtcttttcagagaaccaatctctgggtttgttgctatcctttttctactttttgagatgcgtacttagactgacttttagccttttttatgcaagttttgatgtcatttaaaaattgccatatagttccaaatattgtctaacatctactgcaa

SEQ ID NO: 1331 - DNA, 425 bp, Homo sapiens
caatatgtggccttttctttctggcttctttcatttagcatgttttcaaggttcatgtatattgtagcatgtattagtacttcattcctttgtaaatattttacctgaagtgttttctaaataaaaccttttaaaaagtgatagtgctgaagggaagcaaggtagaatttttaggagataggtaatctgtattggctctcataaaactagtcacatgtgaagcctgcattgctttagaacagggatttccaaccttttggcttccctgggccacagtggaataagaattgtctcatggctgggcatggtggctcacgcctgtaatcccagccctttgggaggctgaggtgggagaattgcttcaacctgggaagcagaggctgcagtgagccgagatcgtgccactgcactccagtctgggcgac

SEQ ID NO: 1332 - DNA, 270 bp, Homo sapiens
cctattcaagcagaatctgttggggtgggtcctggagcccagatatcttactaatctgttcagcagagtctttgtgtacaagctttgagaggcagtagtctagaacagatttctgccccagcccaccccaccccacaattgcccaagctggagtgcagtggcataatcacgcctcactgcagcatccaactcttgggctgaagcaatcctcccacttcagcctcccaagtagctgggaccacaggcatgtaccacaatgcccagctaatt

SEQ ID NO: 1333 - DNA, 400 bp, Homo sapiens
tcacaaagaccttgctgattgataaaagtctgtggtaaagaagttggccaaatcccaccataaccaagatggtgacgagtgacctctggtcatcctcattgctcattatatactaattataatgtattagcatgctaaaagacactcccaccagcacggtgacagtttacaacttctggaagttaccctttatggtctaaagtggggagggaccctcagtcccaagaaatccatgcccctttcctggaaaactcatgaataatccatcccttgtttaccatataatcaaggaacaactataagtatactcagtcgagcagcccatgccgctgttctgcctatgaagtagacttttttttccattactttcctaataaacagacttttgactttactctat

SEQ ID NO: 1334 - DNA, 441 bp, Homo sapiens
ataaatactccccaaactaacaccttacaggcaatggtagaaaagaaaaattcacaactgttgtattctggtaacatgcctgctttacccagtgtacccactcaatgtcttctctaatttctactgtgtaaacttctgtctctggggtttccctcaccaactaagcatcttgtgccttctttgtcctttgatatttcactgttattctttgagcacttcctttcctgcacaataagatatattagactcatctagtactttctctgcctcagtcaattctccaaggagccttggttcctttcaatggaaaatgcagtatttagaaaccaagagtaggccctgttggggctcattgcaattgggtgggagtgatcactgcatccagtactcttctcattctgtttgggtagcttccatttctaattcaattgaagtgactta

SEQ ID NO: 1335 - DNA, 563 bp, Homo sapiens
agagaccaggaaaagtgtttttctcctcacttgttttaatagggaaatgaaaacatggcttaaattttttctagttgaacctattgtaagctaaacagactttgcaggtcttcatagctgcacactctgaactcgaagatttaacttgaggctaaaattctatttttgtttcttctctcctttggtaacaaagagctgctatgtgaggtggggatgcccaaggcctcctgtcacttgtcctaaaacaggcagaggcagctggcatcagaagagtggtcagctacatggagggcattgtgcagatggagcacatgaaagtctatgcaccatcagtgtgtgggttcttggagactggcgtcagtcttgctgtagagtagacgtgaaaatggaaactggcccatgtgcccatgacctcctgaaaattgggatatggaggatagagaaaacgttagacagttatgaagagcaatattctgtgtccttatcatttaaccatctattctttcattttaggagaaaagtgagtatatttaatataaagagtcttggcattataagcctat

SEQ ID NO: 1336 - DNA, 289 bp, Homo sapiens
ggatatacggctggcatttaggctaagagaggaagggctgtaatggggtgaagctaaacacataagtatagcccagatcacaaagagcctaggattctaggctaaggcactgactggggttttatccagaaggtaatggagagtcactgcagggctttttaaaacaggaaataggcatggtcagatatgcattttagaaacactcttctgactgtagggtgaacactcgattgaggcaagttagagcggaggaaaggaaggacgctttgttagagtagtcctgtacagc

SEQ ID NO: 1337 - DNA, 433 bp, Homo sapiens
agtaatatatgacatacactcttaaaaaggaatgactgattcagtgagaacatttgattgttttccacagaaggcaaccattaaagctggacaaaactgtcaaaacaactgtttgagtactttaccaaacaaactgagaagctttattcatgaaaactaatgaacatagggtaagaatagcacaaattcgtgatctggtgctactccttttctccttttccttgtccctagctctgtcgcatagcatttcagtcaggatgaaaaccagcagctttgcttccacttttgcagagaaatcacttgctatggagaattgtaggttaaaatagtgatctttgtggcaagtaaacagagagggccaacagctttattagtctaagactgtagtccaatttggggccagcagtaggctcatgaactagttgagtttaat

SEQ ID NO: 1338 - DNA, 337 bp, Homo sapiens
tgcccaagatctcactgcttgttaaaggtggtctcaaccccgtctgtcttctaagcttcccactaccccatgtctgagagcaaaaagccctctttgcaacctgagatcacactcaagatggaagactgtcaagcccatccctgccagattctattaatgtggtcctaatgggccacaccagcaaaaacaagctgcgttgtattcctttgaagaaaactaagtctgcctcagaaactagcagaccctgtaatcttcagcggtattattaaaaagcacacctgcctcaaagcccctggttcatccatggaagcatcgcagaagcctctgtattaggggc

SEQ ID NO: 1339 - DNA, 848 bp, Homo sapiens
ttaaatatcttctcccactctgtggcttttcttttcactataatattaaagttttgtttgttttcaatgaacaagacttgttaattttactacagtacaatacaccaacatttttggttggtgccgtctatgccctattttaaaatgttttgccacagtcagccatggggaattcaattgcagctcactgactcttagtcatttcaatttaatcagtatatgctaagaccaagaaaatgcagctggttggtggacccgagccctaatcatatggctgacaccaaagtcatgaaggtaggggaatgattgttgagtaggaaattagtaatgtctgctaaaagctgcatctcgtgagttttgatatataatactaccattaccatttaagtttaaaaactcataaatttccattatacattattttattcatgaattacttagatgttttttggagggtagttttttgctattgatttctaatattatagcactttggttagaatttgtgttaaacatggtatcagttcattagtatttgttgaaaattgctttgtggcctagttcacacttaatttttctaatattgcatgtgtgtttgaaaagcatatgaattttctttctaaagtagagcatccacaaaatcaagcctattaattgtgtcattcaaatattttctaccattactagtgtttgacagtttctgatggagatgtgacagcacttcccactcttttggatatataaagcaaagatggcagtgtttgggcagtgcagtctttcagcatctgctggctgtgggtgggaataagggagggaagagaattaattctatttggaagcattatatc

SEQ ID NO: 1340 - DNA, 408 bp, Homo sapiens
ttgtatagtgtctggtatacagagggcactcctatgcatttttaaaacatgctgagcacatacccatgtgcccaggctttgtgttttatcctaatgttatcctaatggtattggtgcccattatgtaatgttgccctttacaacaacctcatgagggagatttccatctttacaaataggcaaactgaggcccagagagattgaggaactgctccgaggtctgattctggaatgtgcttcctttccactttatcaatctgctcttcgtactcctgtctgaacgatggaaattaatttttgaatgtataaaagacaacagactatgatacagaaatgtcagccccagcccactaagaaagccccagcccatcagtggctaatggctttaataaattggtcatttggcta

SEQ ID NO: 1341 - DNA, 450 bp, Homo sapiens
ttttattaattatttccaagctgataccccaggtactctgaaaagactgttatttcttcctcctttgcttattaactttaaatcatagtttcttcacttacatctgtctctttttcatttgtacatgctgccaagtattaattatcatttttaaagattggaaaaagaggaagttttcttgcacagaatgatgacccacgcttgaaaagtcatatagatacaaacacacggcacaagaaataaaaaactataccttatgaaagtcctcagccaaaccataagcatagaaagaagacatttaataccaagtatactatgaaaaagagccaatgcacagctttcagaactttaattattgcctgtgtcaggaaaaaataactgtttccagcacactgtgtacctactaaagattctagatgaaatcagatatataggcatttctctggtagt

SEQ ID NO: 1342 - DNA, 385 bp, Homo sapiens
gggatgcctctggaagtaaaatcacagcagaaggcgaaggagcagcaggcacctcacatcgccagagcagaagcaagagagagtgggtgccacacttttaaacagctagatctcaccaggactcattcactattgtgaggacagtaccaaggggatgatgtaaaactattaaagagaaatccactcccatgattcaatcacctatcaccaggccccacttccaacattgaggattataattcaacatgagatttgggcagggaaacacatccaaaccatatcgtgtgagtacctaaaatatgagtattttttctttgcaggctctcaggttaaataataaataaaaatttgttgagcttctattacataacagatattattgcat

SEQ ID NO: 1343 - DNA, 537 bp, Homo sapiens
tttttttttaggagacagggtctcgctctgtcacccaggctggagtgcagtggcatgacaatagttcactgcagcttcaaactcctggcccaagcgatccatgtcagcttcctgaatagctgagactacaggtgtgtaccaccacacccaggtaattttttaagttttttatagagacagaatcttgctttatctctcaggccagttttgaacttctggctttaaacaatcctcctacctcagcctcccaaagtgttgggattataggcgtgagccactgcacccaatctactattttttaaatgacatcagcactttaatttttccatttgctctacttttaaaaataaggggaaaatgcaataaagtattctataattgcacaaatgcttttttacaaagatacctaagctgctgaaactgtagtgctaccaggcaataggtcctgttgttcacctgttacctgatattttttaaaaacctaaaattaatccaaaggtcgacgcggccgcgaatttagtagtagtaggcggccgc

SEQ ID NO: 1344 - DNA, 587 bp, Homo sapiens
attgtgcttacatccttaaatcgatccttacatccctgtgataattggcggagtttcagttgatctacttacaaagcccttggttgggatttttcatttccactcccattgtcttaagaatacaaaagaaatagggagctatcctaaagaaaattagcaatcagatgtggagccaaattatacagaaaaaaaaaattgtttagactagttaggaagtacactgtcaaggataaacttaataaagggctaatcagttgtatacattttgaaggaagaaagagaaacactggtgtggaagagaacatcctgggtggataagattatacttgcaaagggaagaatgcgaaagtcattctcaacagtccataagtggctcatctttttttttttgagactgagtcttgctctgtgtcccaggctggagtggcacaatctcggctcagtacaatctccacctcccaggtttaagcactacttgggaggccaaggcagagaattgcttgaatctgggaggtggaggttgcagtgagccgagatcgtgccactgcactccagcctggatgacagaatgagattccatctcaaaa

SEQ ID NO: 1345 - DNA, 483 bp, Homo sapiens
tctatggagtgaggtgaggtatggattcaagttcactttatggatatggacagccaattgttccaacaccgcatgttgaaaaggctatcctttctccactgcattgccatcctgcctttgtcagtcataagctggttgcttatgtgttatctatttctggactgtctgttgaattttattaatttgcaggtgctccccaaattgtgggaaacccagtgtttgagtcaaaagcaatttaatacttcagtaaacccactgtaaagtcagtaagtcaaaccaccttaagttggggattgtctgaatttgactttctttatacaggttgagcattgctgatttaaatatcccaaatctgaaatgctctaaaaccccagactttttgattgccaacatagacagcacagtggaaaaattctacatccgacctcatgtatacaaacattgtttcatgccccaaattattaaaagtattatttaaaatta

SEQ ID NO: 1346 - DNA, 379 bp, Homo sapiens
tattttcagctttcccggctacatataatctttgttgcatattcatttttttaaacaatcatttaaaaatggaaaaaccattctgagcttgagggctgtataaaaacaggctgtaggctggacttggcatacaggctacactgcctgctgattcctagattttgaattattggagctatatacagtaaaggcaggaaccagacaaagcaatcaacaggacaattcctccaattatcaagtttttaatagcttttagttttaagttctgataagcacaagtggatttatactcattaactttcttaaagctattgcttaaaatcaaattttgatctaaatcaggaattctagagagaactctgaagatagaagtacataa

SEQ ID NO: 1347 - DNA, 205 bp, Homo sapiens
gaaagccgcgtgggcagtgagtatctggtatctttgctgaggctgcctcaatagcaaggaaaggaagcagctgtagtaggaggtggggtgccctctagtggtcatgctttggttgctgtcctttctcaagctcttacatcccttgacatcctctgagttgcttgaacatttcctacaacatctcatggtaagaaatacattttgc

SEQ ID NO: 1348 - DNA, 456 bp, Homo sapiens
gctttgctggtgctgttgagatgtctgaagacattctgatcgccagttctttgtgtgtgtgtcttctcttttcctctctggaatctttagtgaagctgtagagggcggtgtgcaggcctggctaccgtggtctgggagttgagtggggagtcttggagtttccactttcactcacaccctctcccaaacactgccctgccttcagctgggcctgagtgccccgtacagcatctcctggttcatttctccagatgtagggttgcctactgataaaacaaaagacccccggttgaatttgaatttcagataagcaacaaagaaagttttagaataagtatgtcccattgcaacatttgggatatacttttactaaaaaaagaaattgttgtttatctgaaattcagatttagttgggcatcctgtttttttttttttttgttttttgttttttgtttt

SEQ ID NO: 1349 - DNA, 379 bp, Homo sapiens
tcatggccctggtgggagtgtagcagtgaggatgatcagagatcactctcatggtcatcttggttttgttcctcagaaaattaaatgtcagaagaccaagaagctcaagaggatgaattgctggccccagtgagtatttacgatggagatgaatttagaaaagcagtctgtccaaggtggagaaaccaggatctatttggatttgccatagaatttcaagatgtttgtgagcgctatctgctctatgggaagaacaccctggcagcgtgatcccgtttgcctggatgcaatttcttaaggaagagaccctagtatacctgaatattgtctctccttttgagctcaagattgattctcagaaaaaaagtgcagagaagga

SEQ ID NO: 1350 - DNA, 840 bp, Homo sapiens
gcactacctgtctgcgggaaagcgggatccaccccaggacgtcgggtcgctgccgacataatgtcaagtggaaactatcagcagtcagaggctcttagcaaacccactttcagtgaggaacaagcctctgcgttagtggagtcagtgtttgggttgaaagtttccaaggtccggccacttcctagctatgatgaccaaaactttcatgtctacgtttcaaaaaccaaagatggcccaactgaatatgtcctcaaaataagcaacaccaaggctagcaaaaatccagacctgattgaagtgcagaatcacatcatcatgtttctgaaagccgctggatttccaacagcctctgtgtgtcacactaaaggagacaacacagcttctctcgtgtctgtagatagtggctctgaaatcaaaagctacttggtgaggctgctgacttacctcccaggaagacccatcgctgagcttcccgtcagcccccagctattgtatgaaattggaaaactagctgccaaattggataagacactgcagagattccatcacccaaagttaagtagtcttcatcgggagaacttcatctggaatctgaaaaatgttcctcttctggagaaatacctgtatgccctgggccagaatcgaaaccgagagattgttgagcatgtcattcatctgttcaaggaggaagtaatgaccaaattaagtcattttcgagaatgacctagcaccgtgccaggcccctagaagacccagtaaagatctgttgaataaactgtaagaatgaacacaccaaaaaaaaagtcgacgcggccgcgaatttagtagtagtaggcgacc

SEQ ID NO: 1351 - DNA, 404 bp, Homo sapiens
gcggccgtctactactactaaattggcggccgcgtcgacccaaggctagcaaaaatccagacctgattgaagtgcagaatcacatcatcatgtttctgaaagccgctggatttccaacagcctctgtgtgtcacactaaaggagacaacacagcttctctcgtgtctgtagatagtggctctgaaatcaaaagctacttggtgaggctgctgacttacctcccaggaagacccatcgctgagcttcccgtcagcccccagctattgtatgaaattggaaaactaggacctagcaccgtgccaggcccctagaagacccagtaaagatctgttgaataaactgtaagaatgaacacaccaaaaaaaaagtcgacgcggccgcgaatttagtagtagtaggcgacc

SEQ ID NO: 1352 - DNA, 426 bp, Homo sapiens
catcttctcttgccctcagatagcaaaactccaggttcttggccttcaaactccaggacttaaccagcggcccctcaggttcttaggtcctcagcctcagactgagttacaccatcatctcctctggttctcaagcctttagactcaaactgaaacacataattggcttcactggttcttcagcttacagacagcaattgtgggacttcctagcctccataatttatttccataataaatcccctcctgtttatctacctatccatccttccatcccattgattcggtttctctggaagaccctaatataatacataaattaaatatttattttactttactttcaggacctgacctagcaccgtgccaggcccctagaagacccagtaaagatctgttgaataaactgtaagaatgaacacacca

SEQ ID NO: 1353 - DNA, 978 bp, Homo sapiens
ccccgggcggcttgtagccggtgcgcggggtggctggggctacgtgcagagctgtcgcggagccggaacagcagcggtgaagcccctcggctcggccgagaccgccgtgcccattgctcgcctcggttgccgccgctttagccgcagccgctgctgccgccgccgggggagaggcagcctattgtctttctccgcggcgaaggtgaggagctgtctcggctcggcccgcgggggagccccgggagccgcacggagatggaggaggacatctggacagtgagcaggaggcgcctcggcccatgccgaacatcccaggggacctggagagccgggaggccatggtggcatttttcaactccgctggagccagtgcccaggaggaacaaagggtgtgctgccagcccctggctcacccagtggcctcgtcccagaaaaagccagaggtagcggccccagccccagagagtgggggtgagtctgtgtttggggagacccaccgggccctgcagggggccatggagaagctgcagcgactttatggaaggagaaggtggacctgaaggagcgggtagagaaactagagcttcaattcatccacctctcaggacagacagacaccatagaaagtacatcagccagggggcagtgtcagagacgcagcactgggagaggaggacatcgtcaggctggcccaggaccaggaggagatgaaggtgaacctgcaggagctgcggggcaggtgttgcagcttgtgggcgaccacaaggaggggcatggcaaattttgaccattgcccagaaccctgctgatgagcccactctaggagccccagtagcccaggagcttgggtgtgctgacgagcagggtggcttttatcctagatcaccactggattgctgacagatagaggaggtgggaccctgactatcacccctaatctgcagtggatttggctctcggcactcccaggctgggagc

SEQ ID NO: 1354 - DNA, 1825 bp, Homo sapiens
ctttgttctttcctgaatgttcatgaccttgacatcttagaagattaaaggttatttaaagttgttgagttaaatatccattaaattaggtttgtcagatatttcctcgaaattagattcagcttatgcattttttggaaggaataccacagaagtgatgttgttttctttctgttgcatccaatcagatgatacaggattttgatttgttccattactgttgacatgaattttgaacatttgataatgccagtatcagccagatttttccattgtaaagtcattcctttgtcctttgtatttaataagtatgtttagggactttgagactatgtcaatgtcctgttcttcatcaaaattccactcactcattcttagtattcattgacgtttactgatcggactaattattattatgatagttgccaaatgtgggtttttctaattcaatcatttctttagtgtttattagcattctactataaggaaaagcactatcttctccccatttattaattcacatatttacatcagcttggagttattgatttctattttattaaatagtttataattgattaccatccttatttattttaatgctcaaattgtcccaaattatggccaaagaaagctccttcaaactggttgctatgtccttttgacatggcccatcattctttaaacacattttacatctggcacaataacgtgctacatacccatcttgtatttttcctgccccatcttttaaatcagccattctcaaggggttccttcttaatctggctgttgttgtgttggaactcctggtaccatcttagaaccttaaggagacaagcgaaccaagccaataagctttccatgatgctgcttagagttaaacagagcccaggtactaagttatgtcatggagacagtgaactaacctctggactgcttgctacatgagacaattgattttcttattttctatgtagggtggtacatttcctcattttgagatatttcttcaacatatagcttttcattagtggggattttgtcaattataaccaaaaacaatgtgacggatacccaagatgtttcatgttgtagcttgggtgaattacacatttctgaagccattacacttcctagtttatttggatttaagttgacaaataaaaattgcatatgtttatggtctataacatggtgtttcgatatatgtatacatcgtggaatggctaaatcaagctaacatatccattacctcacatagttattttttgtggtgagaacattttaaaaatattgtcttagcaattttcaatcaagcctgtcccatggagacacaagcaatagtgacatgagcacttgactcgctgggttatcaggctttggctccaaatgtttggcttcaaatatgaaaaaattacatgaaagatgaaactatgcaatggcatggctgttggtcattcacatctctctctgccaagaatggagatgacgctgttgaaggaagaaatgtgttttctcctttttctcaagtgatatttgccttaggtcagattctactagtttaaagcaaaacgatctcctggtctgattcctttgggtctctaataatggaaactgcaaggatcagcataaagtgttcctttgttctgacgttggtataacattgcttcttgaaaaatgaaagtatttggacatgcagacagaagcaatattattcaggtcttccttgttgcaagtgagggaaatccaattaaaactggtttaaaccagtagaatctgacctaaggcaaatgtcgacgcggccgcgaatttagtagtagta

SEQ ID NO: 1355 - DNA, 1806 bp, Homo sapiens
ctttgttctttcctgaatgttcatgaccttgacatcttagaagattaaaggttatttaaagttgttgagttaaatatccattaaattaggtttgtcagatatttcctcgaaattagattcagcttatgcattttttggaaggaataccacagaagtgatgttgttttctttctgttgcatccaatcagatgatacaggattttgatttgttccattactgttgacatgaattttgaacatttgataatgccagtatcagccagatttttccattgtaaagtcattcctttgtcctttgtatttaataagtatgtttagggactttgagactatgtcaatgtcctgttcttcatcaaaattccactcactcattcttagtattcattgacgtttactgatcggactaattattattatgatagttgccaaatgtgggtttttctaattcaatcatttctttagtgtttattagcattctactataaggaaaagcactatcttctccccatttattaattcacatatttacatcagcttggagttattgatttctattttattaaatagtttataattgattaccatccttatttattttaatgctcaaattgtcccaaattatggccaaagaaagctccttcaaactggttgctatgtccttttgacatggcccatcattctttaaacacattttacatctggcacaataacgtgctacatacccatcttgtatttttcctgccccatcttttaaatcagccattctcaaggggttccttcttaatctggctgttgttgtgttggaactcctggtaccatcttagaaccttaaggagacaagcgaaccaagccaataagctttccatgatgctgcttagagttaaacagagcccaggtactaagttatgtcatggagacagtgaactaacctctggactgcttgctacatgagacaattgattttcttattttctatgtagggtggtacatttcctcattttgagatatttcttcaacatatagcttttcattagtggggattttgtcaattataaccaaaaacaatgtgacggatacccaagatgtttcatgttgtagcttgggtgaattacacttcctagtttatttggatttaagttgacaaataaaaattgcatatgtttatggtctataacatggtgtttcgatatatgtatacatcgtggaatggctaaatcaagctaacatatccattacctcacatagttattttttgtggtgagaacattttaaaaatattgtcttagcaattttcaatcaagcctgtcccatggagacacaagcaatagtgacatgagcacttgactcgctgggttatcaggctttggctccaaatgtttggcttcaaatatgaaaaaattacatgaaagatgaaactatgcaatggcatggctgttggtcattcacatctctctctgccaagaatggagatgacgctgttgaaggaagaaatgtgttttctcctttttctcaagtgatatttgccttaggtcagattctactagtttaaagcaaaacgatctcctggtctgattcctttgggtctctaataatggaaactgcaaggatcagcataaagtgttcctttgttctgacgttggtataacattgcttcttgaaaaatgaaagtatttggacatgcagacagaagcaatattattcaggtcttccttgttgcaagtgagggaaatccaattaaaactggtttaaaccagtagaatctgacctaaggcaaatgtcgacgcggccgcgaatttagtagtagta

SEQ ID NO: 1356 - DNA, 433 bp, Homo sapiens
ttttttttgacagagacttgtgctgtctcaaagcccaggctggagtatagtggcacaatcttagctcactgtaacctcaaactcctgggctcaagtgatcctcttgcctcagcctcctgattaggtggaactataggcatacaccaccatgccgggctagttttttattttttgtagagatggggtctggccctgttgcccaagctggtcttcagctcctggcctcaagtgatcctcccatctcagcctcacagtgttggggttacaggcatgagccactgcgcctggcctttgatttttttattaatagaaaaacaatgaataatgaaagaaaatggaattatcatagaatcatagaagtaaaaatagatcactgtcatgaatacttattcagttttgatatttattactgataatcacataccaccttatg

SEQ ID NO: 1357 - DNA, 495 bp, Homo sapiens
cccccatgatttagttatatcacactgggttcctcccacaacacatgggaattatgggagctacaattcaagatgagatttgggcaggggcacagccaaaccatatcagtcataaaagataaaaagactaaggaagtgttctgattacaggagactaaaaagatatgacaactaaatacaacgtgtgatcctggattggattctgaaccagataagggacaagaataaagtctgtgtattaaatatcagtgttgtatcagagttaacttcctgaatttgataaaatttggaatgatctctcctcactaccttcccacactcctctccagggcctctgcatgtgggcatctgggccctcctctgttaacacccctcttctgtctggactgcccctcacttcatctttcccccatgcacggtctttcctaactgtccttatgtaagagaatgactttggttttaagaaattcacactgaaatatttagaggattaaa

SEQ ID NO: 1358 - DNA, 312 bp, Homo sapiens
gccctaaggaagccagcaagaaaatgaggacattagtctataaccacaaggaaatgagttctgctagcaacctaagggagcttgaaggtgattgaccatccccagtcaagcctctgatgagaccgcagccccactaggcaactagatttcagcatggtaagaccctgggatggagaacccagctcagccatgcccagactcctatcctatggaagctttaagataataaatgtatgtgggctttaagctgttaagcttttgggtaatttgttagatgggcaacagaaaatgtgttacaccctgggatagtag

SEQ ID NO: 1359 - DNA, 206 bp, Homo sapiens
tgccatgtcagagaaggaactagattccagaaaacagaaggtagttctcttttaacttactgcctaatgctagtgtcagaaccacagtaaagccagcaacatttgagaccaaacccgaggacagtcctcaggattttacaggtgaggggcctcggcttcagggaagtggcttgtgaaacacctttttgagggaccattatgtaata

SEQ ID NO: 1360 - DNA, 461 bp, Homo sapiens
tcaggcattcgctcccactgctctactggtgcccttcatccaggtcaccaatggcctccacatggcaagatccatggtcaagtctcagtccttgtcctactgggcttggcacagttgactgcccttgctttgtttgatttcaggcctcatgctctcttggttttcctactacctcactggtctcaccgtctgtcttttctctcctctccccaacctcttaatgttgggatgacccgaggctcagttctccatcctcttctcttatccatctgtgctcactctcttggtaatttcacccagtctcattgcttgcaatatcatttacatgtggctctcacatttacgtctctagcctcgtcctctcacttgaattctgactaataatacaattgtttttatttttattgtttttttgagacggagtctcattctgtcgcccaggctggagtgcaatggcacaa

SEQ ID NO: 1361 - DNA, 571 bp, Homo sapiens
aaaacccagtcatgtagattttctcctatgttatcttctaggagttttatagatttgcatttaacattcagctctatgatccattttgagttaatttttgtgaagagactaaggtctgtgtatagatttgatttgatttatttatttttggcatgttgatgtccagttgttctagcaccatttgtggagagaagtttggaagtttgagcattttttatgatacctttttttttttttcagacggagtctcactgtcatgcaggctggagtgcagtggcacagtctcgactcactgcagcctacacctcccgggttcaggcagttctactgcctcagcctcccaagtagctgggattacaggcgtgcaccaccacacccagctcctttttgcatttttagtagagacagggtttcactatattggctaggctggtctcaaactcctgacctcgggatctgcctgccttggcctcccaaagtgctgggattacaggtgtgagccaccacgcccagccttatgatactgttctatctctgctctgtgcccaccaccacacccagctaatttttg

SEQ ID NO: 1362 - DNA, 411 bp, Homo sapiens
gtgatgcagggtggttttcagatagactaggtttttattttgcctctatactggacaggttgagtgaccacagagctttatatcttagtgactagtggttaaagagattgcatttgcattatcctaagtgaattagcacaggaacagaaaacctaccactgtgtgttttcacttataagtcggagctaaacatttgatacacacgaacataaatatggcaacaatagacactggggactgctggagaggggaagaggggaggagagtaaagattgaaaatgaactgttaggtactatgcttactacctagaggatgggattaatcatacccccaatctcagcattgtgcaatatactcatgtaacaaacctacacatgtcccctctgaatctaaaataaaagttgaaatta

SEQ ID NO: 1363 - DNA, 458 bp, Homo sapiens
attcatctcagacgttgcgttttttttccccttgctctgacctacttgcccctctcttcctcttgaggacaccccattcggtaagtcacttgcacaggaatctattccagtatcagctttcaaggaaggacgtcagcttcagtcagtattaagatagcagcattcaaactatctccaggaaaatatctggcagggcaaacaagtatgggcacaggatacggtggaccaagcacgcaagttgccctaagagattcaagtatcaggctgagtgcagtgactcacgcctgtaatcctaacactgagaggctgaggctggtagactacttgaaccctggagttttgaaccaacctgagtaacatagcaagactttgtctcccccctcataaaaaatcaagatctgccctgtctagttatgcgaccttgagcaagtgacttcacttgattcctttaaaaaaaa

SEQ ID NO: 1364 - DNA, 742 bp, Homo sapiens
gagtttgttagaagcacacctttaactcagaattgaggttgactgataaaactcagctttaagtaaccctctgggcaagttctgagcagagatccagtgagctgaatgtcaggcaccacctccctggagtctgtatcagtcacatcagcattctcctctgattagaatcaggtttcaagggtcttgttcaagagtttattctctcctttaaagatgccacaatacgtataaggaatgtctcttggtcccaactaatctacaataagagaggagcagtatagtcagaggccagaaaacaacgcagtttctagttcaggttatattctcttggaacagactccttgctgaggggcttctagaaaaggaatgcaatggtccacctctttctaagtaggaggggaagaaggggcttgtattggtggatataactcctttcctatcctctcaactgtctaatccccaagtgacaaccatcctctccttctgttgtactttctagcttaagataatcacatatatcacacacaccaatgaagtgctatcagttggaaagggtggagacagaaccagaagatgggaaggaaaaggccttgaacacagcctgtgtgtgtattagaggtgtgtcttaatcttttggactagggactacccagtaaccaccctgagttcagttttgtatcactttgagactaaactgctgtggtaatatttgttagaccctgaaataaattactgacatgac

SEQ ID NO: 1365 - DNA, 350 bp, Homo sapiens
tcagttatcatattttgattttcaccaacaaaaattttatgaacttttctttctggttatagaaatacctaaataaggctgggtagggtggctcacacctgtaatcccagcagtctgggaggccaaggcaggcagatcatgtgaggtcaggagttcaagaccagcatggccaacctggtgaaaccccatctctactaaaaatgcaaaaattagccgggcgtggtggtgcgcacctgtagtcccagctcccctggaggctgaggcaggagaattgcttgagcacgggaggcagaggttgcagtgaaccgagatcacaccactgcactccagcttgggcgagagagagcaag

SEQ ID NO: 1366 - DNA, 219 bp, Homo sapiens
aagaacacacaactggcaaatgattgatccacaattaaaatacagattgcaagtttccactgcttcactgagtcacaaatttcaatcattcagaatccatctttatggtttcactacatctggatatcactttactatcatacacttaacgtttatcttttaattgactaattctttttccttaaaattttttaaaaggaaactatcaccccctaagag

SEQ ID NO: 1367 - DNA, 331 bp, Homo sapiens
tctttttttgcaacagcagtgttttgggtgataattttgaattgataactgttcctttttctgggttttgttggccttttgaaaaattgtctttcgttatcgttggtgggtggcttagaagcaaagtaaaattttttggaaaagagaacagaaaattgaactgcagcttgagaacatattgtttttttcctactttgtcattgaaaattgaagaattgcttttaactgttttaggtgtgtgtgtccagagtgagcaaggactatgtttttggattgtcaaagaggatgcttaatcttaaaaataaaaataaatttaaaaatcatcttgtaa

SEQ ID NO: 1368 - DNA, 410 bp, Homo sapiens
ctggccagccttggcatctcatcctccagttccctgggcctggagctggtcctcttgtgatactgggatggcttctgccagcactcagaacctttcagggcatttccaaaccaaggagaaacaaggtgctttttcttttctttttctttttctttctatcttttttttttttttttttgagacagagtctcgctcttgttgcccaggctggagtgcagtagcgcaatctcggctcactgcaccctccgccttcctgggttcaagcaattctcctgcatcagcaccccgagtagctgggattacaggtgcccaccaccatgctcagctattttttttttttttgtagttttagtagagatggggtttcaccatgttggccatactgatctcaaactcctgacctcgtgatc

SEQ ID NO: 1369 - DNA, 446 bp, Homo sapiens
ctgtctacgggggaagtgccgagtagttgtggccttcgtggagtgttttttggagctctcgcctgtcccccacccccttccttcagctgcttctgtttgttcctgctgtagtgccttcagccatgaacataccgtttaatcagtggtgtattaaaatggacctgtacagtcagcaatagctaggccaaaatcgattggctatttttaaaaggaaaaaaggaagatagaaaattgctcttttaatctaggtaaatcaaatcgtgcctgcttgctttccacctgtagctaagtgtaggcaagagcattctgattgatgacagtgtttctttgtgcttctttattcatgcttatccacttggggtaaaagcaccagggtatcttcagaacggagttttcacattcacgtcagaaagcttgtgctctttttctctcagaaaaaaaaaaaa

SEQ ID NO: 1370 - DNA, 1271 bp, Homo sapiens
tggctcccctcctgtcatcagaggccaggcacgggaatttgttaccactgccctaataaccgtgccctgacctccagctgctagagagaggatgtccccctagtaaagccaagcaggaattgaaggtttttctaaatctgctcggtcctcactcctaaaggatggctcccctcctgtcatcagaggccaccaaggcttcatatgggccagtgtttcccactgctggggctgtcgacatgagtgatgagggagccactgtattgctagaggtgacacttctccaataatcactgcgaccaggaaaaaagccccttcctaaaagcctttctaaacatcctaggcattgttgctaaggaatgccttttccttagcaacaaagatcatggggaccccactggcgcctggaacatctccctagcaaccgtgaagcaccttgttattagggatgataaccacaacttccctggcaactgcagtgtccgacaatttagaagggaccatccttggcggcttctctgaatatactgagcttggttgctaaaggactcatagcttagcaaccatagcccttcaaggcttttcatggctgtggcgggccccattaggtaccaaaagaagaagaaccccattgtcagtgaactgtaccacccagcccacccaccttcctaccctacaggcaccctctgggccaccctcccttgctgccctagcaagtctgacagccagagggccattgcctggccaggatcccttccttagcatccggggctgggacactagcaggcgtcgggagggggcctggctgagctgcatgtctgtcccccacctcatcctccaccccccagtccggagaaggcggcttccttggagtatgactatgagaccatccgcaacatcgactgctacagcacagatttctgcgtgcgggtgcgcgatggcatgcggtactggaacatgacggtgcagtggtggctggcgcagtatatctacaagagcgcactgcccgttcctatgtcctgcggtgcctggacatgctgtgagcgcctaactgcgacggctccacccgggctactacctgaaacttccgagcatcccgcttgtgcctggtgccgagggccgggctggagtcagccagcgaggagcgtgacgcccacgggcaaaaaggctgggacgggcgcgcaggtccgacaagggcgcataaacacgggctgggccgcgggctccaggccaagcgtggaggcacccaatagaacaaacggccgaacgagaaa

SEQ ID NO: 1371 - DNA, 877 bp, Homo sapiens
ggatgataaccacaacttccctaataacaaggtgcttcacggttgctagggatgataaccacaacttccctggcaactgcagtgtccgacaatttagaagggaccatccttggcggcttctctgaatatactgagcttggttgctaaaggactcatagcttagcaaccatagcccttcaaggcttttcatggctgtggcgggccccattaggtaccaaaagaagaagaaccccattgtcagtgaactgtaccacccagcccacccaccttcctaccctacaggcaccctctgggccaccctcccttgctgccctagcaagtctgacagccagagggccattgcctggccaggatcccttccttagcatccggggctgggacactagcaggcgtcgggagggggcctggctgagctgcatgtctgtcccccacctcatcctccaccccccagtccggagaaggcggcttccttggagtatgactatgagaccatccgcaacatcgactgctacagcacagatttctgcgtgcgggtgcgcgatggcatgcggtactggaacatgacggtgcagtggtggctggcgcagtatatctacaagagcgcactgcccgttcctatgtcctgcggtgcctggacatgctgtgagcgcctaactgcgacggctccacccgggctactacctgaaacttccgagcatcccgcttgtgcctggtgccgagggccgggctggagtcagccagcgaggagcgtgacgcccacgggcaaaaaggctgggacgggcgcgcaggtccgacaagggcgcataaacacgggctgggccgcgggctccaggccaagcgtggaggcacccaatagaacaaacggccgaacgagaaa

SEQ ID NO: 1372 - DNA, 796 bp, Homo sapiens
ctctcttgtggctgaggaagtattgcccccgtgttgctagggagatggcacccccggcaaccaggagtagactgcccttgtgttcctgacagctgcagtcagccttcccccaggggcttggactgcggctgggggaacagcctgttgatgtaaatgatgaactactactccctgctagggttgtcccctagtcgtcacaaactgccattctgttgtgggggtagtgacacccccacgggaatttgttaccactgccctaataaccgtgccctgacctccagctgctagagagaggatgtccccctagtaaagccaagcaggaattgaaggtttttctaaatctgctcggtcctcactcctaaaggatggctcccctcctgtcatcagaggccaccaaggcttcatatgggccagtgtttcccactgctggggctgtcgacatgagtgatgagggagccactgtattgctagaggtgacacttctccaataatcactgcgaccaggaaaaaagccccttcctaaaagcctttctaaacatcctaggcattgttgctaaggaatgccttttccttagcaacaaagatcatggggaccccactggcgcctggaacatctccctagcaaccgtgaagcaccttgttattagggatgataaccacaacttccctggcaactgcagtgtccgacaatttagaagggaccatccttggcggcttctctgaatatactgagcttggttgctaaaggactcatagcttagcaaccatagcccttcaaggcttttcatggctgtgg

SEQ ID NO: 1373 - DNA, 496 bp, Homo sapiens
gagatggagttttgctcttgttgccagggctgcagtgcaatggtgcaatctcggttcactgcgacctccgcctctcgggttcaagcgattctcctttctcagcctaccgagtagctgggattacaggcgcgtgccaccaggcccggctaatttttgtgtttttagtagagacggggtttcattatgttgatcaggctggtctggaactcctgacctcaggtgatccacctgccttggcctcccaaagtgctgggattacagacgtgagccaccgccccggcctaaatttaaccatctttaagtatacatttcagtgacattaagcctgttcacgttgtgcatccatcagcagaatttgtcattatcccatactgaaattctgtatacgttaaacgcttacgccctattctcttttccccagcctctggtaaccaccattctactttcaccttttggccactgtgaatgatgcttctgtggacattagtatacaaat

SEQ ID NO: 1374 - DNA, 522 bp, Homo sapiens
acttgaagctcaatcagaatttcccaaggcccagatttgcaactgatatctgggggtgagggtggtcttggggtctgagccctcaatctgtgggatctgatgctacctccagatagatagtgaaggaactgggtggaggtcctggcttgtgtctgcctcttggtggtggggagaagttcccacacatatggtcacaggagtcttctgtgttgatgattgctgttgtggtgtgagagcagaggaaaaacacagtttgagagagttttcccaaaataccatggaattctttggctattcttaggccttttctcatccagataagatactgaatcagcttatcaagggccaacttattgaattgttattgaatttgagatgaatcaataaagagaaaggagagccatgaaattagaaaaactaccctaattaagtcttcccttctaaaagtcaggaaaactagcattacttgaaaatgagtaccaaaaaaactaaggtcaaatcccatacaaagtcattatgaag

SEQ ID NO: 1375 - DNA, 632 bp, Homo sapiens
acttgaagctcaatcagaatttcccaaggcccagatttgcaactgatatctgggggtgagggtggtcttggggtctgagccctcaatctgtgggatctgatgctacctccagatagatagtgaaggaactgggtggaggtcctggcttgtgtctgcctcttggtggtggggagaagttcccacacatatggtcacaggagtcttctgtgttgatgattgctgttgtggtgtgagagcagaggaaaaacacagtttgagagagttttcccaaaataccatgtcttggagcgcttgctctggagaagccagaggtcatgtcgtgaggatactcaagttgccatttggagaggtgcacatggtgaagaaatgaggcctactgccaatgaccatgaattctttggctattcttaggccttttctcatccagataagatactgaatcagcttatcaagggccaacttattgaattgttattgaatttgagatgaatcaataaagagaaaggagagccatgaaattagaaaaactaccctaattaagtcttcccttctaaaagtcaggaaaactagcattacttgaaaatgagtaccaaaaaaactaaggtcaaatcccatacaaagtcattatgaag

SEQ ID NO: 1376 - DNA, 380 bp, Homo sapiens
tttttttcctgggttctccattctgtttcatttgtatgtgtttccataactacactaataacagtgttaaattattaaaactgtataatatgttttgacatctgatagggcaatctttcatttattcttctctttcaggaattctttggctattcttaggccttttctcatccagataagatactgaatcagcttatcaagggccaacttattgaattgttattgaatttgagatgaatcaataaagagaaaggagagccatgaaattagaaaaactaccctaattaagtcttcccttctaaaagtcaggaaaactagcattacttgaaaatgagtaccaaaaaaactaaggtcaaatcccatacaaagtcattatgaag

SEQ ID NO: 1377 - DNA, 757 bp, Homo sapiens
ggaataccacatacatgatgtttacttggttcattggataagaagcccgtgatgtcggtttgtcctattattggtgataccaattttggccacttggttaagtggcatgtgtgaggttttttcattgtaaaactgttatttcctttttgtaattaatatgagacactttgagactacgcggatatcctctccctcatcaaacttttctccaccaactttagcatctggttgccaccctccaaaatggccccagtgatcccatctcctaataagtacatgtctgtgtggtcctctcccacactgcataggaatggcttacgtaaccaataggtagttgaggatgtgatgcagtctgacttttgaggctaagttgtaaagaaagacactgtgtcttcctccttgttgtcttggagcgcttgctctggagaagccagaggtcatgtcgtgaggatactcaagttgccatttggagaggtgcacatggtgaagaaatgaggcctactgccaatgaccatgaattctttggctattcttaggccttttctcatccagataagatactgaatcagcttatcaagggccaacttattgaattgttattgaatttgagatgaatcaataaagagaaaggagagccatgaaattagaaaaactaccctaattaagtcttcccttctaaaagtcaggaaaactagcattacttgaaaatgagtaccaaaaaaactaaggtcaaatcccatacaaagtcattatgaag

SEQ ID NO: 1378 - DNA, 365 bp, Homo sapiens
ggatatcctctccctcatcaaacttttctccaccaactttagcatctggttgccaccctccaaaatggccccagtgatcccatctcctaataagtacatgtctgtgtggtcctctcccacactgcataggaatggcttacgtaaccaataggtagttgaggatgtgatgcagtctgacttttgaggctaagttgtaaagaaagacactgtgtcttcctccttgttgtcttggagcgcttgctctggagaagccagaggtcatgtcgtgaggatactcaagttgccatttggagaggtgcacatggtgaagaaatgaggcctactgccaatgaccatgtaagtgagccaccacggagatactccca

SEQ ID NO: 1379 - DNA, 451 bp, Homo sapiens
tttttttttgagatggagtctcgctctgtcgcccaggctggagtgcagtggcgcgatcttggctcactgcaagctccgcctcccgggttcacaccattctcctgcctcagcctcctgagtagctgggactataggcccccgccaccatgcctagctaatttttttgtatttttagtagagacagggtttcaccgtgttagccaggctggtctcgatctcctgacctcgtgatctgcccgccttggcctcccaaagtgctgggattacaggcatgagccaccacacctggcccatgtccacatattctaaacatcagaaaacagcaaatacattgtagttctgttcaaatttctacttctaaagttatgtgtgcaactagggacacactgagatttatggagaaaaggataaaagcaaagatttaaaattacatgctagacttagtaacata

SEQ ID NO: 1380 - DNA, 1504 bp, Homo sapiens
gctttctgctaaggatgtattgtggcttttgtttggattgcagcatgcagaattacagctgttcagaggagactcattacaactcctgctgaagctcctaatcttcttcccttctcttctaccctttccccctaccctcacttggcctgaagacgttctccccagagtttaccttgctcccctggtgctatgtgtatggtgaacctggcactatggccgcgtctgggactggccagacaactgctgctggctctccttattccaggaaggatttaaaggggaattgcactgcaggcaatgcaccagagcagcagcatcaggagcttggggagtaaggctcctctggcattattacacacatgcaaagctgaccgcaatgacagcagctgcttctttgaactgttggcagcagccaagcggcagcatgaagtgacagatcactcctgagctcaagatgaactccaccttggatggtaatcagagcagccaccctttttgcctcttggcatttggctatttggaaactgtcaatttttgccttttggaagtattgattattgtctttctaactgtattgattatttctggcaacatcattgtgatttttgtatttcactgtgcacctttgttgaaccatcacactacaagttattttatccagactatggcatatgctgacctttttgttggggtgagctgcgtggtcccttctttatcactcctccatcacccccttccagtagaggagtccttgacttgccagatatttggttttgtagtatcagttctgaagagcgtctccatggcttctctggcctgtatcagcattgatagatacattgccattactaaacctttaacctataatactctggttacaccctggagactacgcctgtgtattttcctgatttggctatactcgaccctggtcttcctgccttcctttttccactggggcaaacctggatatcatggagatgtgtttcagtggtgtgcggagtcctggcacaccgactcctacttcaccctgttcatcgtgatgatgttatatgccccagcagcccttattgtctgcttcacctatttcaacatcttccgcatctgccaacagcacacaaaggatatcagcgaaaggcaagcccgcttcagcagccagagtggggagactggggaagtgcaggcctgtcctgataagcgctatgccatggtcctgtttcgaatcactagtgtattttacatcctctggttgccatatatcatctacttcttgttggaaagctccactggccacagcaaccgcttcgcatccttcttgaccacctggcttgctattagtaacagtttctgcaactgtgtaatttatagtctctccaacagtgtattccaaagaggactaaagcgcctctcaggggctatgtgtacttcttgtgcaagtcagactacagccaacgacccttacacagttagaagcaaaggccctcttaatggatgtcatatctga

SEQ ID NO: 1381 - DNA, 499 bp, Homo sapiens
atcagatatgacacaaagggagacatcaaaatgcaacgtaaagttaaatcatagttacctttttttgaagctgttggcaaggtttgaccacttggggcatcttctgctgtgagatgacacttgaaaaacacccatcaaagttttcctggtaggaatctctctttactgcgtgtttttttgaaaagctgacagagaatatgctttggctttgacactaatgaagtcacccatcatcaattacatacagctaattgttgggagctagagctagaatccaagctttctgattctctgcatggaagaggaaatgctctagggcccttcagggcaaatcttaaaaggaagttcttggccgggcgcggtggctcatgcctgtaatcccagcactttgggaggccgaggtgggtggatcacgagatcaggagatcgagaccatcttggctaacacggtgaaaccccatctctactaaaaatacaacaaattagctgggcgcggtgg

SEQ ID NO: 1382 - DNA, 568 bp, Homo sapiens
gcacaacagcagaggaaatattggcactcagcaaattagaagtcctctcccagccctgcccaactgcctgccttcatcctggtctctctagtagtcctccttttacgttagtgaaggagacaactcaagcttgtgcctgtatccagtgggaaggactctcaggacttcatcaggacagacacatcatcctgtctaagaggtgtcatcttcctttggctctgcccaactgccacatagccaaggcacttcatactacagtgatatggtttggctgtgtccccacccaaatctcatcttgaactgtagctcccataattcccttgtgttgtgggagggacccagtgggagataattgaatcatgggggtggtttcccccatactgttctcatggtactgaataagtctcatgagatctgatggctttataagggaaaaccccttccgcctggttctttcattctttcttgtctgctgccatgtaagacgtgccttttaccttctgccatgattgtgaggcctccccagcctcgtggaactgtaagtccattaaacctcttactcttataa

SEQ ID NO: 1383 - DNA, 225 bp, Homo sapiens
attagaatttataaccaaattcagcagtggatgcaaaatcagtgtaaagattaattgcaagtctataatcagcaatcaatatttagaaaatgaaataaaaaatagcattcaaaatagcataagaagtcatgtacctaggtataaatctttaaaaaatgtgcagaacccttgtgaaaattataaaatttaataagaaaaaataaaggcaacttaaataattgaata

SEQ ID NO: 1384 - DNA, 351 bp, Homo sapiens
tgctgggattacaggtgtgagccacctcgcctggccaccctttattctttgtagcattatcactctctgagctctttgatgtttttttgtctcctccactaaaccataagcttcctgagagctgtgctttgtcttgttcatcacttgttcttggcttagaggatggtgctccacaaattctgggatgataaagtgtggctgtgtgaggggccaaggcactgtgctgggtgctggcagtgacaaatgaggcagccctggcccctgtcctcgtggagctcacattctggagggatttgttgaatgaacagaagggggacagagagttgtgctaatgaagacctctaaatattt

SEQ ID NO: 1385 - DNA, 436 bp, Homo sapiens
gagcaggctgaagctgtgccctctggctggcctgacgggggtctgctgggcatggacccctgcgtcaggtttgtggctggcgtgcacgttcccaattaagccgagtaaatatttacagccattacggccattgatcgccttcgatcctgggtgctgctgtgagatgcccctgcttactcatgctttcttaaaaacagctcttccctgcgcgtctttaataattcaactcctaattgtctccaaacgcaaacctgaaaatgccaactcagggccttcgcccccgctctggtccccctctcgtcccctctgccggagacctggtgcccaggagatgctataaatattgatttggcttcacctccacccccagcccttggcaggggaggtctgggctgaggcctgtccagggacccattcagaatcagcctcccctgtc

SEQ ID NO: 1386 - DNA, 410 bp, Homo sapiens
tgacaattttgtagcactggttatgtgttgggtacctttaatctctatagtcatcctatacagtaggttttattatcttcattttagggacagggtaacaaaagtacggagagggtatgtgatttacttaattctacagtcatggcagaaagcttaggacaaatgtgagctaaatctcatgtgtgaattcaaatcccatgttcttctgtgtcatgtcatctcttgagaagatgagctgattaatcatttccttttcaccaaaacttgcctatagtcaatgaaaaggatgccttctttatatgtgaaatgtacaaggtaagatattcagaatagttgaagtcttccttgactgaagtttccacctggctggaaaaatggatcaagattactccagaaagacaatgcagaga

SEQ ID NO: 1387 - DNA, 478 bp, Homo sapiens
tcatacaaatggaacaacagaaatgcagtgatcctggagagtcttaggctgagaaacagttggtctcatcaaatgagtttctctaagagtagatcatttgggggcccatatgttagacagctagttgagtatttctaccccttaaagatatggcagcttacaacccttgaaggacaattaattctgttaatatgttggtactgaccagtgaattcaaactataatttcctcatatgacatatttgtaacagccagcttgtttctcccttctatttccatagcccacaaagctagaacactctaatttgtctaactggtgagtggaactcaaagtttttagtcaggaagaacttgaaacctgaccaagtctccaagcagaatgcataatgcacattggctacagagttatatgggagattgtccctaaaaaaagtgtgaatcataactgtataaattaaaataaatctgtgtgtatact

SEQ ID NO: 1388 - DNA, 1486 bp, Homo sapiens
tgtgttctctctaaaggatcattgttggcttaaatatttccagagcattgtagagatgtgtaaaggtagaaattttggtagtagttaatgaacacatgccaggccaaaattattagaaggaaaagtttaagtttattttaaaattagtgttttgaggatagtgagacattgcttacagctttcgaattatttttgtatcttttgcccacttttctatttagaagtttcttttcttactgacttgtaagaatcctttgttttctgtttgaagagagtagaccctcatatattggcaaatatttactcatattgctgtttggcttttgactttgatgttttctggtatttaagaaataaacatacagaattttaaaaattatatctaaatatattaatatttttcttatcgctactaggcttcatgcttacgattgccatactccaagattaatattccattgcattttcttattttgtgatgtaaattttagtgttttggtatttgtatttaaatatatctgggttttatttaaatagtatttactgtgttaatgcattttatgctatgaaataaacggtacatgttagtttaataggaatttaaaaatatgcaaaatatcccaaagtaaatctggttcgatttttgggaataataataagatatgtataagagaatcccagcatagagaaactaccagaacctattcataaaggagaatgaaaagaagatgatctttgtaagtgagcacaaggtttgagaggaagctagaatagagaaggcttgaatacttagcaaagaaatttacatttattttgatgaacactagtaataattaacagcctggatcataatttacaaaggacttttcatatgtagttggccctttgtatctctaagtttgcatctgtggatttagccaaccttggataaaaaaattccagaaagaaaaagtaaaaaatacgaggacaatacaagagtaaaaaataatacaaataaatacaatataactactatttacataccatttaccttgtattaggtattataagtaattgagagatgatgtaaagtatactggagggtagtgttagttatatgcgtatactacaccagtttatatgagggatttgagcatccttggattttggtatccatgggggtcctggaaccaagcctccttgatataccaagggatgactggattactgtgtgtttgtgtgcttgtttttaagcttcaaaagattatgtgatctaggagttgttagattttattattggtcttaaaagataagcttagatgtgttactttttttggagttttagtttacagtgattcatgaatcgggcagcttcagaccacaggagacatgaagcaggtagaagttcaagaaagcaagacaagcaaaatatttgattggttagaagttaattgtggtttctgattagtaaagttcctagttagaggttagttggaggtttctgatt

SEQ ID NO: 1389 - DNA, 2707 bp, Homo sapiens
cttggctgtcctttacctcatggtgtggggtgtgcagatagcaggttgtggcttggtgagtgctcttcacttcaggtcaaggtgaggcacagttaacatgctaactactttcctcagttctctctgagttgtgtaaagctcccgatgccagacttcctcttaattttgcacattattaaagtccaaagagttaagatttggtgatgtggggcaaagggccagctgtcacagaaatcaatgaaatgatacacagaaatgggtatcatgaaaaggccactggacttgggaaaactgggtgcctgtccttgccctgccatgtacttacctgtgtgactggaggtgagatgttttacctatgggcctcagtttctcattacaaaatgacagagaagactagatacctaagttcctaagtttgtgacatttgtgaatttttcttggccctctgtgagtagagtgctaaatttagaggcttcctgtggttgaactgatgtccaattctcagggaacccagacttctcagttcagaacccagttccagatttttgtgggaatagggaaaggtattaaataactccattgaattctttcctgcataatgccctgctgtggctgagactcaatgaggtcatcacctccaacacacagaacccctcatcatctccttacagccagactggagcttccaaggacatcaggttggcaaggattgtgagtaccctaaacatctaaagagtccctctaataagggacatatttgttcttcaacagtttcctaacttgagaccacaaatgcgtaatctctctaatatcctaaagcttggacaaactgggcagcccctgagcagaccgcacagagcttaaatgtcagtgctttccttccagaaagaaaaagaatggtcctacacctcccaatccatgggctgatacatatgccaagggagccggatgaagaagtgggtgattttaaatagctaagactgcccatgggcaaacgttctttggcttttctcctctgcaataagtataccttcctctctcctggtccttttctcctttcccaggcccctctatcaataataattctggctctcagatgactacagttgattaggtggaactgataggataaaggtgacacccttcccaaggctatctataatgcaaaaagatatccaagaaaaagagaggtagggaacaccttgggaaaccatttctggaagacagccagtccctgctgtagacaagcctcattttccttcccccaaatgttaaagagtaaattcctcctgtagccttagctctcttttctatctttggcttgctttttatgaactatctttagagtgccaaattagaacagggtaggcagaggcaggaatatgcccaaatttgggaagacctgattgggaatagtcgaaagccttgatatgtgcaaagaaagaaccatttgatcaacccagttcttaatacaggatactaacttaaaatttagactcaagttatacgataattcaaacatttattgtatttatactattctatatgtacttttccaggaaccaggaatacaaaactgacatttctctgtacagaggctcagactagtagagaacagttaggtacgccgttaattataaactaatatgtatcatcaattatgggtttttatgggggtttggcaggtggaagggaccagggagagatgatgagtgatgatggttatgtagtctttaggaggatgcaattataacattgctcttcctttcacgcaccacatgatttagcaagtacttcatattggctccaccattaacatggtcaatggcttctggatactcacagttcaggcacagtttctcctgaagattttttacctctcccatctttaagaaattgtctggatgtccatgaaagatgctgacacttgtattaattcattaaaaaacaccaccccctccctgaaataaactaaaaagtaatgaattcatagaaaaaaatttcaccaagattgaaactagagaatatacctagacttgcactttgagctttgagaaatgtgtacctattcaccattccaacgtgaagaagctctgcagtaggaaaaataattaacacacttatagtctactgcccatgtaaggatcagctccggctaagaggccaaagatgggtgacatcgttatgctctgcctttattttttctttcttacccacttagcttcctaattggaggaaggaggcgtggtaaaggtatatgaagactatggtttaattagaccagaaaacactgtcataatctctggggtcatcagaatgtccagttttgtctttgggccaagataagggcagtgggatttatgatgtgttgtttatagtctgaaactactctggtgatcaccagggtcagtttctttaatgatggtttccaactggcctaatacattaagtaagactggctgataacatgaccagacagacataaagaccctgttgggaatgacattgaactctcaaagtcaagatttcttacacaaatctatcagctggagaaaatgaaggcagtgtggtatatgtgtgcaaataaggacattatgaagcttaaatatggaatgtctcttggacccccgatgtcatctgtattctctttttcttcttgtactatatcctttgcctgtaaataaaaggtttatttgaaaaaaaaaag

SEQ ID NO: 1390 - DNA, 2587 bp, Homo sapiens
cttggctgtcctttacctcatggtgtggggtgtgcagatagcaggttgtggcttggtgagtgctcttcacttcaggtcaaggtgaggcacagttaacatgctaactactttcctcagttctctctgagttgtgtaaagctcccgatgccagacttcctcttaattttgcacattattaaagtccaaagagttaagatttggtgatgtggggcaaagggccagctgtcacagaaatcaatgaaatgatacacagaaatgggtatcatgaaaaggccactggacttgggaaaactgggtgcctgtccttgccctgccatgtacttacctgtgtgactggaggtgagatgttttacctatgggcctcagtttctcattacaaaatgacagagaagactagatacctaagttcctaagtttgtgacatttgtgaatttttcttggccctctgtgagtagagtgctaaatttagaggcttcctgtggttgaactgatgtccaattctcagggaacccagacttctcagttcagaacccagttccagatttttgtgggaatagggaaaggtattaaataactccattgaattctttcctgcataatgccctgctgtggctgagactcaatgaggtcatcacctccaacacacagaacccctcatcatctccttacagccagactggagcttccaaggacatcaggttggcaaggattgtgagtaccctaaacatctaaagagtccctctaataagggacatatttgttcttcaacagtttcctaacttgagaccacaaatgcgtaatctctctaatatcctaaagcttggacaaactgggcagcccctgagcagaccgcacagagcttaaatgtcagtgctttccttccagaaagaaaaagaatggtcctacacctcccaatccatgggctgatacatatgccaagggagccggatgaagaagtgggtgattttaaatagctaagactgcccatgggcaaacgttctttggcttttctcctctgcaataagtataccttcctctctcctggtccttttctcctttcccaggcccctctatcaataataattctggctctcagatgactacagttgattaggtggaactgataggataaaggtgacacccttcccaaggctatctataatgcaaaaagatatccaagaaaaagagaggtagggaacaccttgggaaaccatttctggaagacagccagtccctgctgtagacaagcctcattttccttcccccaaatgttaaagagtaaattcctcctgtagccttagctctcttttctatctttggcttgctttttatgaactatctttagagtgccaaattagaacagggtaggcagaggcaggaatatgcccaaatttgggaagacctgattgggaatagtcgaaagccttgatatgtgcaaagaaagaaccatttgatcaacccagttcttaatacaggatactaacttaaaatttagactcaagttatacgataattcaaacatttattgtatttatactattctatatgtacttttccaggaaccaggaatacaaaactgacatttctctgtacagaggctcagactagtagagaacagttaggtacgccgttaattataaactaatatgtatcatcaattatgggtttttatgggggtttggcaggtggaagggaccagggagagatgatgagtgatgatggttatgtagtctttaggaggatgcaattataacattgctcttcctttcacgcaccacatgatttagcaagtacttcatattggctccaccattaacatggtcaatggcttctggatactcacagttcaggcacagtttctcctgaagattttttacctctcccatctttaagaaattgtctggatgtccatgaaagatgctgacacttgtattaattcattaaaaaacaccaccccctccctgaaataaactaaaaagtaatgaattcatagaaaaaaatttcaccaagattgaaactagagaatatacctagacttgcactttgagctttgagaaatgtgtacctattcaccattccaacgtgaagaagctctgcagtaggaaaaataattaacacacttatagtctactgcccatgtaaggatcagctccggctaagaggccaaagatgggtgacatcgttatgctctgcctttattttttctttcttacccacttagcttcctaattggaggaaggaggcgtggtaaaggtatatgaagactatggtttaattagaccagggtcagtttctttaatgatggtttccaactggcctaatacattaagtaagactggctgataacatgaccagacagacataaagaccctgttgggaatgacattgaactctcaaagtcaagatttcttacacaaatctatcagctggagaaaatgaaggcagtgtggtatatgtgtgcaaataaggacattatgaagcttaaatatggaatgtctcttggacccccgatgtcatctgtattctctttttcttcttgtactatatcctttgcctgtaaataaaaggtttatttgaaaaaaaaaag

SEQ ID NO: 1391 - DNA, 717 bp, Homo sapiens
tgagacagtctcgctctgtcacccaggctggagtgcaatggcgcgatctcggctcaccgcaacctctgcctcctgggttcaaacgattctcctgcctcagcctccctactagctgggattacaggcatgcgccactatgcccagctaatttcatatttttagtagagacggggtttctccatgttggtcaggctggtctcaaacacccgacctgaggtgatctacccgcctcagcctcccaaagtgctgggattacaggcatgagccaccgcccccagccaagggccactttttaaagggcaatattttacaccatggaaggagggaagtggagaacagaaaaaaaaggaaggcaaagctaatggccgtcaagggtgtcttcaaggctatgacacagtcgtctgtgagattcagcggttggagggaagtgaggaagaacactgagatcttgatgtgatttcctgagtctgttgactgaggcaggaggtgatcccaatgcctaggggcggagggagggtggagaggggtcacgaagggagttcaggcggttctgaatggctgggcctgcttgtaggtatttgcgattgtctgtacatgtgagtgtgtgtgagcatgtatgacagtgtgagtgagtgtgacagcttgtatgtgtttgagtgtgtataatggggtataaggttgtgttagtgtgtgcctgtgtgtgatgatgtctattat

SEQ ID NO: 1392 - DNA, 450 bp, Homo sapiens
gatgataaacactttacataaagaaatgtatgtagtgtaaattatattaaaatatactcttcatgcttcttaaatgtctttgaaaacttgactagtttaccaacagaacactaataaattaaatgcacatgtctaaaaattaaaaactttgtgtaaaataatacttttcagttgggtgcagtggctcatgcttgtaatcccagcactttgggaggccgaggtgagtggatcacgaggtcaggagtttgagaccagcctggccaacacagtgaaaccctgtctctactaaaaatacaaaaattagttgggcatggtggcacgtgcctgtagtcccagctactcgggaggctgaggcaggagaattgcttgaacctgggaggcagaggtggcagtgagctgaaatcatgccactgcactccagcctgggtgacagagctagactctgtctca

SEQ ID NO: 1393 - DNA, 400 bp, Homo sapiens
tatttcaaaatccagagttgtttactagtgctatatataagttgaataacacatgagtttgtaagtgagctaacaatatactaaagacatttctaaggatagcaataaacaattgttgcagccaggtgcggtggctcacatctgtaatcccagaactttgggaggctgagacgggcagatcacttgaggtcaggagttcgagaccagcctggccaacatagtgaaaccctgtctctactaaaaatagaaaaaaaaaaaattagccaggcacagtggtgcacgcctgaagtcccagctactcgggaggctaaggcaggagaattgcttccttgaacccaggaggcagaggttgcagtgagctgagattatgccactgcactccagcctgggtgacatagca

SEQ ID NO: 1394 - DNA, 1390 bp, Homo sapiens
tttttttaagagacagtcttgctatgttgcccaggctggacttgaactcctagtctcagccaaccccttctgcctcagcctcctgagtagctgggatcataggcatgtgccactgctcctagctcttccatctcagtcttatgatgtagttactattttcattttataaataagaaaatagaagctcaaataaaatgggtagtttccttgaggtcatcctgttagtaagtggtggaatgaagttacaaacctaggttttattggtcagcacacacagtgccgggcactggcagtacagcagtgaacaaaaggtctgttggtttgtctgaagctctcaaccttgattctgcatagactcggtggattgcccaaggccactcaaccagttaatatcagagccagctctgctgtttgaccagtatattattttcaccatgctgtatctgcttctcagtcaccaaaagcaccagctaaaattgtatatagactgattaggggacttccaacctaagattgtcctggaaacttaattcttatcttggctcatctcttcaaaacagatgcctctttcgttggtgacctcagatacactgttcagaagtactcaaagtattccttttttctcacatttgagagtcactctagcattttaatgagttaagcaagccagccctgcatttccaaacccttcccagaagtctaaccttactttgatctgatgacatgggctttttaaaagattactattttttttggaggtggggtctcactatgttgcccaggctggaatataatgggctattcacagggcacagttagggtgcactactgccgtgaactccaggactcaagccatcttcctgccacagcctcctgagtaacctaggactataggtgcatgccaccatgcccagctgacaatggctttatatacataatatttccctcagcaacaatttatgtcttatttggcacctgtaaaaccctcttcactgattatgcctgtttaaaggtttggtatttactccaagtcacctgcctttagccatggagtattcaagtttctttcagaatgagaatttggagggtgctcatagaaatataaaacaaggctgggcatggcggcttacaccttgtaatcccagcactttaggaggctgaggcaggtggatcacgaggtcgggagttcgagaccagcctggccaacacagtgaaacctcatctctactaaaaatacaaaaattagccaggcatggtggtgcatgcctgtgattccagctgctcggaaggctgaggcaggagaatcgcttgaacgcgggaggtggagtttgcagtgagccaggatcacaccactgcactccagcctgggcgacagagagactctgtctca

SEQ ID NO: 1395 - DNA, 1163 bp, Homo sapiens
gtaaaagtatacaatttcagattactgaattttggaaaaattttaatacttacatttacatatcagagtatactatctgagaatttactacaataggaaataatgaagtcattttataaaactcagactgaggaaaatgtaaaaaaaaaatacatattattattattatcatgctcccttccatttttaaatccttgaaatgtatttcatgttgagattatagaggtttttgttttgttttgtcttgtttctttctcaatactattttttcctcctctcatagctttccagaggaaggaaattgagtaagataattgaataaatgaatgaatacatgtacagcattttctgatactaagtaaatacaaagtaaattttattgttgtcattttttattttactgttgagggtatggaagacatcatctgttgccagtacaagagctgtttttttttccttcatacatagtcacataaccctaattttgttccagtggcaatgtgctcagggaagatgagcttattccataacctgaggtaataagtcattgacctaaaccagtttttatgtctttttgccaggaattggtttggaagtggacatgtgacctagttttagccagtgagatgaaagtcccttgtggagcttctgaaaaagtttttctctctgataagaggagagagggcaaaaagaaagccttccccttttcctgctccttgtcattttagaaagtgatgtgtgaagctgctatagccatttttaaactatgattgtagatatcagcacatgagaagattagaagaagagaaacatgaggaaacctttgcaaagtccttaagtgatattattgagctactgaagcaaatctggaactatataccttccaacttaatattaggtgaagtaagaaaatagtcattcacaaccgttgagtgattactaaatgtcaggcaccatttaaggctttgagatacattagtgaataaaatagacagaaatgactattctcacttatttgttgggtgttttattacttgtagcctaagtgtactgataaagagatttaattacatctgtcaggggttcacaaactgtagcttgtgggtcaaatctggcctgccacatctttttataaataaaatttattggatcacatgccactt

SEQ ID NO: 1396 - DNA, 4010 bp, Homo sapiens
gcagggctcacagcagcgttccgcgtcatggggatttggcagcgtctgctgctttttggtggggtgtcgctccgggctggtggcggggccactgccccgcttgggggaagccgagcgatggtttgtgggcgccagttgtctggcgccgggagtgagaccctaaaacaaagaagaacacaaatcatgtcccgaggacttccaaagcagaaaccgatagaaggtgttaaacaagttatagttgtggcttctggaaagggtggagtcggaaaatctactacagcagtgaatcttgcacttgcactagcagcgaacgattcgtccaaggccattggtttgctagatgtggatgtgtatggaccttcagttccaaagatgatgaatctgaaaggaaatccggaattatcacagagcaacctaatgaggcctctcttgaattatggtattgcttgtatgtctatgggctttctggttgaagaaagtgaaccagtagtttggagaggccttatggtaatgtcggccattgagaaattgttgaggcaggtagattggggtcaactggactacttagttgtagacatgccaccaggaactggagatgtgcagttatcagtctcacagaatattcctataacaggtgctgtgattgtctccacgccccaggacatcgcattgatggatgcacacaagggtgctgagatgtttcgcagagtccacgtgcccgtccttggccttgtccaaaacatgagtgttttccagtgtccaaaatgtaaacacaaaactcatatttttggtgctgatggtgcaaggaaactagcacagacccttggtcttgaagttctaggagacattcccttacaccttaatataagggaagcttcagatacaggccagccaattgtgttttcacagcctgaaagtgatgaggccaaagcttacttgaggattgctgtggaagtggtaagaagattgccatcaccttcagaatgattccccaagtgtcctggaaatttgcctggtactgacattaagaggacctttggaaatcagcaatgtggtgatggaacctacagaaataatagaaatcataactgttttatttctaaggaaagaatgtcttcatatttgacttgctaagctaaggttcacaaaactttgatgtatcaatgttaactgctatatttaggaattttttgaaagctggtgtgtaccacctgcaaagaactgcattttattttattgaattacccctttagaaatcatgagtttatgatgttacaagtccattttgggagagaactgtacactttttgcaggaccacagaattagtaatttaaatgatatactaaatttgtgtatgggcataagtattacgccttcccaccaggcaatttggactgtctttgaatcctgtctttggtactgtcttggacatgttcttaatatgaacctctgcttcttcatctggatcacactataccccagacttaatgaatttcagtctccaggagtggagcctgaacatatgtatttttagtaagaccatgatgatgttgatgatgattctggtaatcatggcagtaagaataatagctaacatttaacaagttaattataattgttcttccatttgtgtgagtgggtactattatctccattttacagataagtaatttgagatataatttgaaggcactcaaccttgagtgtcttgctgagggttactgtatctagcaggtgatggagcttggatttgaacttgagtaattcgatattagattcatctttttgtacaccaatgtgcttttgttaattaaaaaaagtcggtggtggctaggcgtggtggctcacgcctgtaatcccagcactttgggaggttgaggtgggtggatcatgaggtcaggagttcaagaccagcctgaccaacatggtgaaaccccgtctctactaaaaatacaaaaattagctgggtgtggtggcatacgcctgtaatcccagctactcgggaggctgaggcaggagaatcatttcaacccgggaggctgaggttgcagtgagtggagattgtaccactgcactccagcctggtcaatggagtgcgactccatctcaaaaaaaaaaaaaaaaaaaaaaaaagtcgggggagatgcaatatttagcatttcctcaaactttttttggccatgaaatccaccacccccctcctttttcagagcatttcatgaagttcacatttcaaataatacattttgaaaaacatttatcttgtctaattgaagctcaaagagatagagtcaatgacttttcaaagtcaggtagcagatagttttaaagctgcaagtactgataagtgtgagccattagttaattcgcatttataaagaagtggtctgtcacttttggcaaatgtcttgacatctgttgctctacagttgtcaactagaaaattaggcatagagtttcacattattataagcatgttttcacacaaaaacatgtacattgatgtttattgcaattttatgtgtaataaccaaaaacaacccagattttcttcattgggtaaatgattaaacaaaccatagtacattcataccgtgagtgctactcagcaataaaaaagaacaaactatgggtacaggcagcaacttataattccagagaattatgctgaatgaaaaaggccaatttaaaaaggttttgtaccaaaagattccatttatataacgttcttgaagtgacataattatagaaatggagaacagattagtggtggctgtgttaaggagggggtgaggatgggagagaattgggcgtggctgtgagaaacatgagggatccttgtgatgatggaaatgttctatatcacagctatcgatgtcagtatcccagttgtgatattgtgctatagttttgcaagatgttaccactgggggaaattgggtgaagggcacatggaatctctgtattatttcaactgcatgtaaatctacaattatctcaaaataaaaataaaagttaaaaaaacacaaactgctatatctgaactgaaatttactggaccaaattatactaattaatatcatgaataaaattatttgtggacacactgtaatcatatcactctgagaagggaaaaaaaaaaaaaaaaaaaaaaaaaaaaaaaaaaaaaaaaaaaaaaaaaaaaaaaaaaaaaaaaaaaaaaaaaacaaaaaaaaaaaaaaaaaaagaggagagagggggggcgcccctcgaaaatataatctctctctcgccgggggcgacccccatctcacccaaccccaccccttttttttctcaaaaaaaggggccgcccccactagaggggcggtctcataaaataacaacaaagaaggaagggggggccccttgcctaaacaaaagcacgtcccggacgggagcacacaaaccaacccaccacgtgcctgaacttcttctagggagggaaaacaacccccctcctgtgcggggggagcacacaccaattgcacgggaaaccacccaccccccaacaacgactaaaccgcctcctcgaggaacagaccacaacccgcccagcctgctcacatggcggcgccaacacccacccgccgaactccatcctcgccgcagcaacaaaacactctgtgcccagagtacgactatcagctccggcacaaccaacctcacagcggccgcgccccgcaccacaaacacaacccggaccgctcgagagcagcacgactcgcgcacccgacaagccaagatgccagcgcacatacccgactggccgaggacgcagccagactagccacatcgaaccagacagataccacgtacagagagcaagcaacagatcgaggcaccaccgacagcccgacagcaagaacctacaacacagcaccaccgacgcacacagcagcgcaccacaacacacccaaacacacgcagacacacccgccacacactaaccctgacaccaagccatacgggcgcacagacacacaacgga

SEQ ID NO: 1397 - DNA, 3019 bp, Homo sapiens
gcagggctcacagcagcgttccgcgtcatggggatttggcagcgtctgctgctttttggtggggtgtcgctccgggctggtggcggggccactgccccgcttgggggaagccgagcgatggtttgtgggcgccagttgtctggcgccgggagtgagaccctaaaacaaagaagaacacaaatcatgtcccgaggacttccaaagcagaaaccgatagaaggtgttaaacaagttatagttgtggcttctggaaagggtggagtcggaaaatctactacagcagtgaatcttgcacttgcactagcagcgaacgattcgtccaaggccattggtttgctagatgtggatgtgtatggaccttcagttccaaagatgatgaatctgaaaggaaatccggaattatcacagagcaacctaatgaggcctctcttgaattatggtattgcttgtatgtctatgggctttctggttgaagaaagtgaaccagtagtttggagaggccttatggtaatgtcggccattgagaaattgttgaggcaggtagattggggtcaactggactacttagttgtagacatgccaccaggaactggagatgtgcagttatcagtctcacagaatattcctataacaggtgctgtgattgtctccacgccccaggacatcgcattgatggatgcacacaagggtgctgagatgtttcgcagagtccacgtgcccgtccttggccttgtccaaaacatgagtgttttccagtgtccaaaatgtaaacacaaaactcatatttttggtgctgatggtgcaaggaaactagcacagacccttggtcttgaagttctaggagacattcccttacaccttaatataagggaagcttcagatacaggccagccaattgtgttttcacagcctgaaagtgatgaggccaaagcttacttgaggattgctgtggaagtggtaagaagattgccatcaccttcagaatgattccccaagtgtcctggaaatttgcctggtactgacattaagaggacctttggaaatcagcaatgtggtgatggaacctacagaaataatagaaatcataactgttttatttctaaggaaagaatgtcttcatatttgacttgctaagctaaggttcacaaaactttgatgtatcaatgttaactgctatatttaggaattttttgaaagctggtgtgtaccacctgcaaagaactgcattttattttattgaattacccctttagaaatcatgagtttatgatgttacaagtccattttgggagagaactgtacactttttgcaggaccacagaattagtaatttaaatgatatactaaatttgtgtatgggcataagtattacgccttcccaccaggcaatttggactgtctttgaatcctgtctttggtactgtcttggacatgttcttaatatgaacctctgcttcttcatctggatcacactataccccagacttaatgaatttcagtctccaggagtggagcctgaacatatgtatttttagtaagaccatgatgatgttgatgatgattctggtaatcatggcagtaagaataatagctaacatttaacaagttaattataattgttcttccatttgtgtgagtgggtactattatctccattttacagataagtaatttgagatataatttgaaggcactcaaccttgagtgtcttgctgagggttactgtatctagcaggtgatggagcttggatttgaacttgagtaattcgatattagattcatctttttgtacaccaatgtgcttttgttaattaaaaaaagtcggtggtggctaggcgtggtggctcacgcctgtaatcccagcactttgggaggttgaggtgggtggatcatgaggtcaggagttcaagaccagcctgaccaacatggtgaaaccccgtctctactaaaaatacaaaaattagctgggtgtggtggcatacgcctgtaatcccagctactcgggaggctgaggcaggagaatcatttcaacccgggaggctgaggttgcagtgagtggagattgtaccactgcactccagcctggtcaatggagtgcgactccatctcaaaaaaaaaaaaaaaaaaaaaaaaagtcgggggagatgcaatatttagcatttcctcaaactttttttggccatgaaatccaccacccccctcctttttcagagcatttcatgaagttcacatttcaaataatacattttgaaaaacatttatcttgtctaattgaagctcaaagagatagagtcaatgacttttcaaagtcaggtagcagatagttttaaagctgcaagtactgataagtgtgagccattagttaattcgcatttataaagaagtggtctgtcacttttggcaaatgtcttgacatctgttgctctacagttgtcaactagaaaattaggcatagagtttcacattattataagcatgttttcacacaaaaacatgtacattgatgtttattgcaattttatgtgtaataaccaaaaacaacccagattttcttcattgggtaaatgattaaacaaaccatagtacattcataccgtgagtgctactcagcaataaaaaagaacaaactatgggtacaggcagcaacttataattccagagaattatgctgaatgaaaaaggccaatttaaaaaggttttgtaccaaaagattccatttatataacgttcttgaagtgacataattatagaaatggagaacagattagtggtggctgtgttaaggagggggtgaggatgggagagaattgggcgtggctgtgagaaacatgagggatccttgtgatgatggaaatgttctatatcacagctatcgatgtcagtatcccagttgtgatattgtgctatagttttgcaagatgttaccactgggggaaattgggtgaagggcacatggaatctctgtattatttcaactgcatgtaaatctacaattatctcaaaataaaaataaaagtta

SEQ ID NO: 1398 - DNA, 3947 bp, Homo sapiens
gcagggctcacagcagcgttccgcgtcatggggatttggcagcgtctgctgctttttggtggggtgtcgctccgggctggtggcggggccactgccccgcttgggggaagccgagcgatggtttgtgggcgccagttgtctggcgccgggagtgagaccctaaaacaaagaagaacacaaatcatgtcccgaggacttccaaagcagaaaccgatagaaggtgttaaacaagttatagttgtggcttctggaaagggtggagtcggaaaatctactacagcagtgaatcttgcacttgcactagcagcgaacgattcgtccaaggccattggtttgctagatgtggatgtgtatggaccttcagttccaaagatgatgaatctgaaaggaaatccggaattatcacagagcaacctaatgaggcctctcttgaattatggtattgcttgtatgtctatgggctttctggttgaagaaagtgaaccagtagtttggagaggccttatggtaatgtcggccattgagaaattgttgaggcaggtagattggggtcaactggactacttagttgtagacatgccaccaggaactggagatgtgcagttatcagtctcacagaatattcctataacaggtgctgtgattgtctccacgccccaggacatcgcattgatggatgcacacaagggtgctgagatgtttcgcagagtccacgtgcccgtccttggccttgtccaaaacatgagtgttttccagtgtccaaaatgtaaacacaaaagagacattcccttacaccttaatataagggaagcttcagatacaggccagccaattgtgttttcacagcctgaaagtgatgaggccaaagcttacttgaggattgctgtggaagtggtaagaagattgccatcaccttcagaatgattccccaagtgtcctggaaatttgcctggtactgacattaagaggacctttggaaatcagcaatgtggtgatggaacctacagaaataatagaaatcataactgttttatttctaaggaaagaatgtcttcatatttgacttgctaagctaaggttcacaaaactttgatgtatcaatgttaactgctatatttaggaattttttgaaagctggtgtgtaccacctgcaaagaactgcattttattttattgaattacccctttagaaatcatgagtttatgatgttacaagtccattttgggagagaactgtacactttttgcaggaccacagaattagtaatttaaatgatatactaaatttgtgtatgggcataagtattacgccttcccaccaggcaatttggactgtctttgaatcctgtctttggtactgtcttggacatgttcttaatatgaacctctgcttcttcatctggatcacactataccccagacttaatgaatttcagtctccaggagtggagcctgaacatatgtatttttagtaagaccatgatgatgttgatgatgattctggtaatcatggcagtaagaataatagctaacatttaacaagttaattataattgttcttccatttgtgtgagtgggtactattatctccattttacagataagtaatttgagatataatttgaaggcactcaaccttgagtgtcttgctgagggttactgtatctagcaggtgatggagcttggatttgaacttgagtaattcgatattagattcatctttttgtacaccaatgtgcttttgttaattaaaaaaagtcggtggtggctaggcgtggtggctcacgcctgtaatcccagcactttgggaggttgaggtgggtggatcatgaggtcaggagttcaagaccagcctgaccaacatggtgaaaccccgtctctactaaaaatacaaaaattagctgggtgtggtggcatacgcctgtaatcccagctactcgggaggctgaggcaggagaatcatttcaacccgggaggctgaggttgcagtgagtggagattgtaccactgcactccagcctggtcaatggagtgcgactccatctcaaaaaaaaaaaaaaaaaaaaaaaaagtcgggggagatgcaatatttagcatttcctcaaactttttttggccatgaaatccaccacccccctcctttttcagagcatttcatgaagttcacatttcaaataatacattttgaaaaacatttatcttgtctaattgaagctcaaagagatagagtcaatgacttttcaaagtcaggtagcagatagttttaaagctgcaagtactgataagtgtgagccattagttaattcgcatttataaagaagtggtctgtcacttttggcaaatgtcttgacatctgttgctctacagttgtcaactagaaaattaggcatagagtttcacattattataagcatgttttcacacaaaaacatgtacattgatgtttattgcaattttatgtgtaataaccaaaaacaacccagattttcttcattgggtaaatgattaaacaaaccatagtacattcataccgtgagtgctactcagcaataaaaaagaacaaactatgggtacaggcagcaacttataattccagagaattatgctgaatgaaaaaggccaatttaaaaaggttttgtaccaaaagattccatttatataacgttcttgaagtgacataattatagaaatggagaacagattagtggtggctgtgttaaggagggggtgaggatgggagagaattgggcgtggctgtgagaaacatgagggatccttgtgatgatggaaatgttctatatcacagctatcgatgtcagtatcccagttgtgatattgtgctatagttttgcaagatgttaccactgggggaaattgggtgaagggcacatggaatctctgtattatttcaactgcatgtaaatctacaattatctcaaaataaaaataaaagttaaaaaaacacaaactgctatatctgaactgaaatttactggaccaaattatactaattaatatcatgaataaaattatttgtggacacactgtaatcatatcactctgagaagggaaaaaaaaaaaaaaaaaaaaaaaaaaaaaaaaaaaaaaaaaaaaaaaaaaaaaaaaaaaaaaaaaaaaaaaaaacaaaaaaaaaaaaaaaaaaagaggagagagggggggcgcccctcgaaaatataatctctctctcgccgggggcgacccccatctcacccaaccccaccccttttttttctcaaaaaaaggggccgcccccactagaggggcggtctcataaaataacaacaaagaaggaagggggggccccttgcctaaacaaaagcacgtcccggacgggagcacacaaaccaacccaccacgtgcctgaacttcttctagggagggaaaacaacccccctcctgtgcggggggagcacacaccaattgcacgggaaaccacccaccccccaacaacgactaaaccgcctcctcgaggaacagaccacaacccgcccagcctgctcacatggcggcgccaacacccacccgccgaactccatcctcgccgcagcaacaaaacactctgtgcccagagtacgactatcagctccggcacaaccaacctcacagcggccgcgccccgcaccacaaacacaacccggaccgctcgagagcagcacgactcgcgcacccgacaagccaagatgccagcgcacatacccgactggccgaggacgcagccagactagccacatcgaaccagacagataccacgtacagagagcaagcaacagatcgaggcaccaccgacagcccgacagcaagaacctacaacacagcaccaccgacgcacacagcagcgcaccacaacacacccaaacacacgcagacacacccgccacacactaaccctgacaccaagccatacgggcgcacagacacacaacgga

SEQ ID NO: 1399 - DNA, 3651 bp, Homo sapiens
gttgcaggtcttgttccagaccaccacaataaagcaagtgtctcaataaagcaacctaatgaggcctctcttgaattatggtattgcttgtatgtctatgggctttctggttgaagaaagtgaaccagtagtttggagaggccttatggtaatgtcggccattgagaaattgttgaggcaggtagattggggtcaactggactacttagttgtagacatgccaccaggaactggagatgtgcagttatcagtctcacagaatattcctataacaggtgctgtgattgtctccacgccccaggacatcgcattgatggatgcacacaagggtgctgagatgtttcgcagagtccacgtgcccgtccttggccttgtccaaaacatgagtgttttccagtgtccaaaatgtaaacacaaaactcatatttttggtgctgatggtgcaaggaaactagcacagacccttggtcttgaagttctaggagacattcccttacaccttaatataagggaagcttcagatacaggccagccaattgtgttttcacagcctgaaagtgatgaggccaaagcttacttgaggattgctgtggaagtggtaagaagattgccatcaccttcagaatgattccccaagtgtcctggaaatttgcctggtactgacattaagaggacctttggaaatcagcaatgtggtgatggaacctacagaaataatagaaatcataactgttttatttctaaggaaagaatgtcttcatatttgacttgctaagctaaggttcacaaaactttgatgtatcaatgttaactgctatatttaggaattttttgaaagctggtgtgtaccacctgcaaagaactgcattttattttattgaattacccctttagaaatcatgagtttatgatgttacaagtccattttgggagagaactgtacactttttgcaggaccacagaattagtaatttaaatgatatactaaatttgtgtatgggcataagtattacgccttcccaccaggcaatttggactgtctttgaatcctgtctttggtactgtcttggacatgttcttaatatgaacctctgcttcttcatctggatcacactataccccagacttaatgaatttcagtctccaggagtggagcctgaacatatgtatttttagtaagaccatgatgatgttgatgatgattctggtaatcatggcagtaagaataatagctaacatttaacaagttaattataattgttcttccatttgtgtgagtgggtactattatctccattttacagataagtaatttgagatataatttgaaggcactcaaccttgagtgtcttgctgagggttactgtatctagcaggtgatggagcttggatttgaacttgagtaattcgatattagattcatctttttgtacaccaatgtgcttttgttaattaaaaaaagtcggtggtggctaggcgtggtggctcacgcctgtaatcccagcactttgggaggttgaggtgggtggatcatgaggtcaggagttcaagaccagcctgaccaacatggtgaaaccccgtctctactaaaaatacaaaaattagctgggtgtggtggcatacgcctgtaatcccagctactcgggaggctgaggcaggagaatcatttcaacccgggaggctgaggttgcagtgagtggagattgtaccactgcactccagcctggtcaatggagtgcgactccatctcaaaaaaaaaaaaaaaaaaaaaaaaagtcgggggagatgcaatatttagcatttcctcaaactttttttggccatgaaatccaccacccccctcctttttcagagcatttcatgaagttcacatttcaaataatacattttgaaaaacatttatcttgtctaattgaagctcaaagagatagagtcaatgacttttcaaagtcaggtagcagatagttttaaagctgcaagtactgataagtgtgagccattagttaattcgcatttataaagaagtggtctgtcacttttggcaaatgtcttgacatctgttgctctacagttgtcaactagaaaattaggcatagagtttcacattattataagcatgttttcacacaaaaacatgtacattgatgtttattgcaattttatgtgtaataaccaaaaacaacccagattttcttcattgggtaaatgattaaacaaaccatagtacattcataccgtgagtgctactcagcaataaaaaagaacaaactatgggtacaggcagcaacttataattccagagaattatgctgaatgaaaaaggccaatttaaaaaggttttgtaccaaaagattccatttatataacgttcttgaagtgacataattatagaaatggagaacagattagtggtggctgtgttaaggagggggtgaggatgggagagaattgggcgtggctgtgagaaacatgagggatccttgtgatgatggaaatgttctatatcacagctatcgatgtcagtatcccagttgtgatattgtgctatagttttgcaagatgttaccactgggggaaattgggtgaagggcacatggaatctctgtattatttcaactgcatgtaaatctacaattatctcaaaataaaaataaaagttaaaaaaacacaaactgctatatctgaactgaaatttactggaccaaattatactaattaatatcatgaataaaattatttgtggacacactgtaatcatatcactctgagaagggaaaaaaaaaaaaaaaaaaaaaaaaaaaaaaaaaaaaaaaaaaaaaaaaaaaaaaaaaaaaaaaaaaaaaaaaaacaaaaaaaaaaaaaaaaaaagaggagagagggggggcgcccctcgaaaatataatctctctctcgccgggggcgacccccatctcacccaaccccaccccttttttttctcaaaaaaaggggccgcccccactagaggggcggtctcataaaataacaacaaagaaggaagggggggccccttgcctaaacaaaagcacgtcccggacgggagcacacaaaccaacccaccacgtgcctgaacttcttctagggagggaaaacaacccccctcctgtgcggggggagcacacaccaattgcacgggaaaccacccaccccccaacaacgactaaaccgcctcctcgaggaacagaccacaacccgcccagcctgctcacatggcggcgccaacacccacccgccgaactccatcctcgccgcagcaacaaaacactctgtgcccagagtacgactatcagctccggcacaaccaacctcacagcggccgcgccccgcaccacaaacacaacccggaccgctcgagagcagcacgactcgcgcacccgacaagccaagatgccagcgcacatacccgactggccgaggacgcagccagactagccacatcgaaccagacagataccacgtacagagagcaagcaacagatcgaggcaccaccgacagcccgacagcaagaacctacaacacagcaccaccgacgcacacagcagcgcaccacaacacacccaaacacacgcagacacacccgccacacactaaccctgacaccaagccatacgggcgcacagacacacaacgga

SEQ ID NO: 1400 - DNA, 332 bp, Homo sapiens
tgacttcccacaacaattgtgtggttagtatctgtctctcctattgactttgtatttcatgggggaagatattatgtctgtttttctttgctactatagcactaacaccaaacttcatacttggtacatacaggtatatctcagagatgttgcaggtcttgttccagaccaccacaataaagcaagtgtctcaataaagtaagcaacatgaattttttggtttcccattgcatataaaagttatgtttacactatactgtagtccatgaagtgtgaaatagcattatgtctaaaaatatgtatgtaccttaattaaaaatattttattactt

SEQ ID NO: 1401 - DNA, 1350 bp, Homo sapiens
  misc_feature (610)..(610): n is a, c, g, or t
  misc_feature (1004)..(1004): n is a, c, g, or t
  misc_feature (1126)..(1126): n is a, c, g, or t
atccacattcaagtgttacatcttggctgtgctaataggagctggagcctgtcccatatttttccctccccgtttcctttggggttaaaataaaatgattgaagttggttgtacactgccattgaattcaagaactttcataagaagtgtataacatcagctgtgaatgctgaaaagcttttcaagccacagtcacaatatgcctgccctcttagcagatgctggtagcggtagtctagcacaactggtactgtccctcacagagcttaggcttctggggagtattgtaccatgaacaccactgtcccagaaagtgcccgggccactaagaatcacaaaccctactgtcctcgccagtgctgtgcgtctttctttaggaggccctgagacagtttatttaacacagctgctactgtcttctgatatttgcatttgttcagcgagttgttgaaccacccagttattactaccccagtagttgctaccaaactttcatagcaacaaagggtattgttttggttagtgtaatataccagttcttctgcatgaatgtcattgaatatatttacgtatatataaaatatatgccatatggtaaattagctagggntgagaagtttgctcccttgaaatatagtttcattggcaagttataagcagcaagcaggagcatttaaaagtttatttaacaaatacttatattcactatgtgtcagggtttgttctaagtacttaaaactgttactcatttactcctaaaattcactttaaggatcctacttgaaacacaggggggttaagtcacgtacttaaggccacacaggtggtaaatagttgaattagattttgaaagcaggcagcttgactgcagagtctaatcactgcactgttgcttgtggaatctagcatgtttctcacagtttgggccctatttgtgtctttgtgtatgcaattttgccaaagaaaaaaattgcacctgttcaaacatatgatcaactccttgntttaccatgtggaggattacaactagattatatatttcaatattgctattgaaagacattgatagactgggtactgtggctcatgcctgtagtcccagcactttgggaggccaaggcgggtngatagcttgagtccaggagtttgagaccagcccaggcaacatgatgcaacccctcctctacaaaaaacacaaaaattagccaggtgtagtggtgcacacctgaagtcccagctatttgggaggcagatgtgggaggtttgctttatcctgggaggctgaggctgcagtgagccaagattgcaccacagcactccagcctgggcgacagagtgagatcctttctc

SEQ ID NO: 1402 - DNA, 419 bp, Homo sapiens
gtcctcaagatagtgagagctgagccaagacttgaaggaggtacgagaattaactacttggttatctgagcaagagtattccaggcagaaggaaaagccatggcaaaggctctaaagcaggagcacagagaaacagcggagtggccagtggaagcagagagaacagagggacaagtagtagaagataaagtcaagagagataatagaggttaccttatgtagggccctgtaaactattgtaaagacattgtacttcattcaaggagaaatgggagcctttggaatgttttgagcacagcaataacctcagctgacctatattctgaaagagtaattgtggctgctgtgttcagacttggttgcagagaaggagaattggaaaccaacaagtagagaattattgaagtaatctaggattt

SEQ ID NO: 1403 - DNA, 452 bp, Homo sapiens
ggaaggtctgtgatgtacttttcctgatattccccctccatctgtctgtctgttctcagtctacctggtcccctccagggaggctgggttaatccctcctattcccctgcctcctccagctgctgaagcattgcagtcctctgccatcctttgctgtgccaaggtgtcaccatgccagcttctgcctgttgaaagggatgctggcggaagtcatggtggctgagtcctggcacagccactgtcgagttgtctgagtggcagcagagggaaaaggcggagtatggagcagagccacctgcccactgctgcctttagagttggaaatcgcaatcctccaaggaccaaactttacacatgaaagtgcatttccaccagctgcaactttctctccatcattacctccaccaccacctccacctccaccatgacctccacctccaccatgactcccg

SEQ ID NO: 1404 - DNA, 408 bp, Homo sapiens
gatagtcaagggaggtctcccttagaagaagcctgccatggtaaattcattcaaagaatgaaacatcgtgacttgttccatgtaaaataatttgtcctctttatttctgttcttagaaatccatggaccaaatattcccaacatttctcagttacagaagtttttttgttttgttttgttttgtttttaaattgaaatccaaaaatacccttctgggaatggctgaaccccctgaaaatgtacgctaaatttattatatagatgtggttgtgtactctttctggtagaggatttccagttttcatcagatttccaaagaaatccatatcccagaataccactactatgtcaatttaatctaatttaatcccaaatttattaaatatccttataacaagcactgaatgg

SEQ ID NO: 1405 - DNA, 285 bp, Homo sapiens
tctgcctaatggacatgtggaggagggggtggaggcggactgaagagctacttatttaagaagagtggagagaaaaaaaaaaaactccacatttaggctggtgataagtatgcacagaggttttttttttgggggtggtttgtttgtttggatggaccagaaacttcccatttttttctcctcttttttagttttcccagctgcaagttataaggttcatgccagcttttgtggcatactgggagtgatgacaaattgattgctttgtactgatagagagagaga

SEQ ID NO: 1406 - DNA, 461 bp, Homo sapiens
tggtaggggtgctggtgaaatggaatggtgatttgggattttggaatcaggaaaaagatctaagttcaaaaccctgctagtccctttctggccgagttacttggacaaggtaatgtctctgtcctactggtaaagtgtatgttgcaggggaattacattctttgttggtaaaatatatgcctcaggggaattaaacagataatttatgtaaagtgcctttcacagagagtctggcacatagtaggtggtcggtcactattaattcttccagctcttgccagaaataactaaaatcagggcactaggacttccaagccgtgctgctactaataaaagaaataatatgatttattttttcacaactgtttggggaaaggcctgtgcttcataaatatgcgttggaaagtacttagcaaatgagtagaaataataaaaatatgtccaagtaaacagctcctata

SEQ ID NO: 1407 - DNA, 447 bp, Homo sapiens
atttatctgcttttaatatctcttagttgaggtgttaagaaatagcagaatgccccaaggattactgataggtggtgagaaggaatttgaggggagtcagagacagggcaggttgacaaaccggacagtcacctgctgagtaattaaataaaggttatgatttattttaatgtagttgcaaaatatctggttagggtgtgtgtgtaaatatatgtgtgtgagagacagacacacacagacacaggcagagatggaagaagccaaaaggtgatgtccacaattaaatttagattaatatttgctgggattttgattggatttactttctgtcttgaaagagattaaactttaacaaaatgctttccagttcttaaacatatataattatctattttttaaaaaaggtatggtaaaggtcttaatttctgccatctcattccctctggt

SEQ ID NO: 1408 - DNA, 1511 bp, Homo sapiens
ggcggccgggccacgtcgtagcgaggcatcgaaggtaattatagagacagtaaaattcttttactctgggaaaaataaaatgctgggtgtctcacaaaatttcagaacctgatttcaaacggatcataacaaagaggagatcaaatttagcatggtggactgctcgacaggatatatttgtcaatggaatgtttccacatattataccaccaacatgagaaaaaaatgatcattgtttatttgaagcttgatgatattctaacgctgccttttctcttctcattttagagaaaaatgagcaggcggaattgttggatttgtaagatgtgcagagatgaatctaagaggcccccttcaaaccttactttggaggaagtattacagtgggcccagtcttttgaaaatttaatggctacaaaatatggtccagtagtctatgcagcatatttaaaaatggagcacagtgacgagaatattcaattctggatggcatgtgaaacctataagaaaattgcctcacggtggagcagaatttctagggcaaagaagctttataagatttacatccagccacagtcccctagagagattaacattgacagttcgacaagagagactatcatcaggaacattcaggaacccactgaaacatgttttgaagaagctcagaaaatagtctatatgcatatggaaagggattcctaccccagatttctaaagtcagaaatgtaccaaaaacttttgaaaactatgcagtccaacaacagtttctgactacaactcaaaagtttaaatagaaaacagtatattgaaagtggtgggtttgatctttttatttagaaacccacaaaatcagaaacacagtacaaataaaacagaaatcaaactataagttgacttttagttcctaaaaagaaacatatttcaaaagcaatggaatctagaattcttataacatgaataacaaaatgtacagcaagcctatgtagttcaattaatatataaggaaaaggaaggtctttcttcatgatacaagcattataaagtttttactgtagtagtcaattaatggatatttccttgttaataaaattttgtgtcataatttacaaattagttctttaaaaattgttgttatatgaattgtgtttctagcatgaatgttctatagagtactctaaataacttgaatttatagacaaatgctactcacagtacaatcaattgtattataccatgagaaaatcaaaaaggtgttcttcagagacattttatctataaaattttcctactattatgttcattaacaaacttctttatcacatgtatcttctacatgtaaaacatttctgatgattttttaacaaaaaatatatgaatttcttcatttgctcttgcatctacattgctataaggatataaaatgtggtttctatattttgagatgttttttccttacaatgtgaactcatcgtgatcttggaaatcaataaagtcaaatatcaactaaa

SEQ ID NO: 1409 - DNA, 1514 bp, Homo sapiens
  misc_feature (18)..(19): n is a, c, g, or t
  misc_feature (26)..(26): n is a, c, g, or t
cggacgcgtgggtcgacnnacgcgtngggcatcgaaggtaattatagagacagtaaaattcttttactctgggaaaaataaaatgctgggtgtctcacaaaatttcagaacctgatttcaaacggatcataacaaagaggagatcaaatttagcatggtggactgctcgacaggatatatttgtcaatggaatgtttccacatattataccaccaacatgagaaaaaaatgatcattgtttatttgaagcttgatgatattctaacgctgccttttctcttctcattttagagaaaaatgagcaggcggaattgttggatttgtaagatgtgcagagatgaatctaagaggcccccttcaaaccttactttggaggaagtattacagtgggcccagtcttttgaaaatttaatggctacaaaatatggtccagtagtctatgcagcatatttaaaaatggagcacagtgacgagaatattcaattctggatggcatgtgaaacctataagaaaattgcctcacggtggagcagaatttctagggcaaagaagctttataagatttacatccagccacagtcccctagagagattaacattgacagttcgacaagagagactatcatcaggaacattcaggaacccactgaaacatgttttgaagaagctcagaaaatagtctatatgcatatggaaagggattcctaccccagatttctaaagtcagaaatgtaccaaaaacttttgaaaactatgcagtccaacaacagtttctgactacaactcaaaagtttaaatagaaaacagtatattgaaagtggtgggtttgatctttttatttagaaacccacaaaatcagaaacacagtacaaataaaacagaaatcaaactataagttgacttttagttcctaaaaagaaacatatttcaaaagcaatggaatctagaattcttataacatgaataacaaaatgtacagcaagcctatgtagttcaattaatatataaggaaaaggaaggtctttcttcatgatacaagcattataaagtttttactgtagtagtcaattaatggatatttccttgttaataaaattttgtgtcataatttacaaattagttctttaaaaattgttgttatatgaattgtgtttctagcatgaatgttctatagagtactctaaataacttgaatttatagacaaatgctactcacagtacaatcaattgtattataccatgagaaaatcaaaaaggtgttcttcagagacattttatctataaaattttcctactattatgttcattaacaaacttctttatcacatgtatcttctacatgtaaaacatttctgatgattttttaacaaaaaatatatgaatttcttcatttgctcttgcatctacattgctataaggatataaaatgtggtttctatattttgagatgttttttccttacaatgtgaactcatcgtgatcttggaaatcaataaagtcaaatatcaactaaa

SEQ ID NO: 1410 - DNA, 1474 bp, Homo sapiens
  misc_feature (18)..(19): n is a, c, g, or t
  misc_feature (26)..(26): n is a, c, g, or t
cggacgcgtgggtcgacnnacgcgtngggcatcgaaggtaattatagagacagtaaaattcttttactctgggaaaaataaaatgctgggtgtctcacaaaatttcagaacctgatttcaaacggatcataacaaagaggagatcaaatttagcatggtggactgctcgacaggatatatttgtcaatggaatgtttccacatattataccaccaacatgagaaaaaaatgatcattgtttatttgaagcttgaaaaatgagcaggcggaattgttggatttgtaagatgtgcagagatgaatctaagaggcccccttcaaaccttactttggaggaagtattacagtgggcccagtcttttgaaaatttaatggctacaaaatatggtccagtagtctatgcagcatatttaaaaatggagcacagtgacgagaatattcaattctggatggcatgtgaaacctataagaaaattgcctcacggtggagcagaatttctagggcaaagaagctttataagatttacatccagccacagtcccctagagagattaacattgacagttcgacaagagagactatcatcaggaacattcaggaacccactgaaacatgttttgaagaagctcagaaaatagtctatatgcatatggaaagggattcctaccccagatttctaaagtcagaaatgtaccaaaaacttttgaaaactatgcagtccaacaacagtttctgactacaactcaaaagtttaaatagaaaacagtatattgaaagtggtgggtttgatctttttatttagaaacccacaaaatcagaaacacagtacaaataaaacagaaatcaaactataagttgacttttagttcctaaaaagaaacatatttcaaaagcaatggaatctagaattcttataacatgaataacaaaatgtacagcaagcctatgtagttcaattaatatataaggaaaaggaaggtctttcttcatgatacaagcattataaagtttttactgtagtagtcaattaatggatatttccttgttaataaaattttgtgtcataatttacaaattagttctttaaaaattgttgttatatgaattgtgtttctagcatgaatgttctatagagtactctaaataacttgaatttatagacaaatgctactcacagtacaatcaattgtattataccatgagaaaatcaaaaaggtgttcttcagagacattttatctataaaattttcctactattatgttcattaacaaacttctttatcacatgtatcttctacatgtaaaacatttctgatgattttttaacaaaaaatatatgaatttcttcatttgctcttgcatctacattgctataaggatataaaatgtggtttctatattttgagatgttttttccttacaatgtgaactcatcgtgatcttggaaatcaataaagtcaaatatcaactaaa

SEQ ID NO: 1411 - DNA, 1856 bp, Homo sapiens
  misc_feature (18)..(19): n is a, c, g, or t
  misc_feature (26)..(26): n is a, c, g, or t
cggacgcgtgggtcgacnnacgcgtngggcatcgaaggtaattatagagacagtaaaattcttttactctgggaaaaataaaatgctgggtgtctcacaaaatttcagaacctgatttcaaacggatcataacaaagaggagatcaaatttagcatggtggactgctcgacaggatatatttgtcaatggaatgtttccacatattataccaccaacatgagaaaaaaatgatcattgtttatttgaagcttgatgatattctaacgctgccttttctcttctcattttagagaaaaatgagcaggcggaattgttggatttgtaagatgtgcagagatgaatctaagaggcccccttcaaaccttactttggaggaagtattacagtgggcccagtcttttgaaaatttaatggctacaaaatatggtccagtagtctatgcagcatatttaaaaatggagcacagtgacgagaatattcaattctggatggcatgtgaaacctataagaaaattgcctcacggtggagcagaatttctagggcaaagaagctttataagatttacatccagccacagtcccctagagagattaacattgacagttcgacaagagagactatcatcaggaacattcaggaacccactgaaacatgttttgaagaagctcagaaaatagtctatatgcatatggaaagggattcctaccccagatttctaaagtcagaaatgtaccaaaaacttttgaaaactatgcagtccaacaacagtttctgactacaactcaaaagtttaaatagaaaacagtatattgaaagtggtgggtttgatctttttatttagaaacccacaaaatcagaaacacagtacaaataaaacagaaatcaaactataagttgacttttagttcctaaaaagaaacatatttcaaaagcaatggaatctagaattcttataacatgaataacaaaatgtacagcaagcctatgtagttcaattaatatataaggaaaaggaaggtctttcttcatgatacaagcattataaagtttttactgtagtagtcaattaatggatatttccttgttaataaaattttgtgtcataatttacaaattagttctttaaaaattgttgttatatgaattgtgtttctagcatgaatgttctatagagtactctaaataacttgaatttatagacaaatgctactcacagtacaatcaattgtattataccatgagaaaatcaaaaaggtgttcttcagagacattttatctataaaattttcctactattatgttcattaacaaacttctttatcacatgtatcttctacatgtaaaacatttctgatgattttttaacaaaaaatatatgaatttcttcatttgctcttgcatctacattgctataaggatataaaatgtggtttctatattttgagatgttttttccttacaatgtgaactcatcgtgatcttggaaatcaataaagtcaaatatcaactaaaaaaaagaaaaaaaaaagaaaacaaaagaaaaaaaaaacaaaaacagaacaaaaagaaaaaaaaaaccggcggtggactctattttacgttcgtgggtgcgggcggacaaaaatagagtgattaatgagacggcggagcacagatggtaattagtgcggtgtgtttcgctgagcaccccgatttcttttggtgaaacaaagctggggtgaaatactatgcgcgcggggctccccccgaattaagtggaggcgcgtgtataaataatcttcgcgatagaaccgcacgcggtgctaccctcgctgttttttatcgtttctcttcccccaaaaacggcgggagaga

SEQ ID NO: 1412 - DNA, 491 bp, Homo sapiens
tggtgattttgacccatgaaaataaactgatttctcctctacttttagatggtccagtagtctatgcagcatatttaaaaatggagcacagtgacgagaatattcaattctggatggcatgtgaaacctataagaaaattgcctcacggtggagcagaatttctagggcaaagaagctttataagatttacatccagccacagtcccctagagaggtaactacctgacaatgacaggaatggaaatcagttcatccctgcaagggcattaatatctgtcaagcatccataagtgccaggcactttacatccagtatctcctaaaatgctataaattcagtattgctaaccttattttacagataagaaacctgagactctgagaacttgtccagtgtcacacagccattaagtggtaaagttaagattcaaaattaaatctatctggctccaaagcttctccccattaaattatcttgatttctaggaaac

SEQ ID NO: 1413 - DNA, 526 bp, Homo sapiens
taacaaaaagactttaaaaaactacatcaaaatactaatagtggtaatttattaatagggagattataggactatggttctgaataatatttattaaattatattttcaagtctacactatttgcacaatttttataatttaaaaaatttaaatagtaaaaataaaatgtaaaatatcacaggaaaataactttccaaccaaagccacacacaaatggaatgtaaatatattttggtgtcattttcaagataatataattttacttagttcaacaaaaaccttgagaatatttagcccaatcagtgctttttgtttcttttcaaagccttactttggaggaagtattacagtgggcccagtcttttgaaaatttaatggctacaaaatgtgagtattgcgtatctgtcatctttgaataactagcgagttccattcttagaggtaaaggtgggggtgccagatgatgaatgtatgctattcttctcacagccttctaactggcaactgacacagttaaaaaaagaa

SEQ ID NO: 1414 - DNA, 305 bp, Homo sapiens
aatagacatggtttaaaacaccttctaatgcaaagtagaagatttacaatgctgcttcattgtcaggttccagtgtcctccttttatccaacaaaatctaaagagttatctcattggaattttcagcttcagtgaaaattctgtgatgatctcaaatgttgctgcataaaatgtataattaatggagtgaagtggtttgtaaagaaacattttattagaacaagtgagggtaaatgaactaatagagttcaattctatgcttcaatttccaatataatatgcaaatatctactctgcaaaaccgt

SEQ ID NO: 1415 - DNA, 247 bp, Homo sapiens
ctataaagaaatattatattaatgaatgtgaaataagaactaatccgaagagcttctgtggactctgagaagagcattatatcttccccctgacctttgcaaacgaatcaggtaaataccgatttaaaaaaatgttatttcagaccttggatgaaaatcatcattatgtacctatcataaactcagagaaaaatgaacaactttggttgttattaaaagcatgtggaaaaaagaactgtaatattct

SEQ ID NO: 1416 - DNA, 326 bp, Homo sapiens
gattctgcatggatactgatagtctattcacaagagaacaaattacattattctttagctacagaattttctgcagttttggacatataaaaagatatctactgattcccatgataaacattaccagtatcactgcaaacatgcagcatctcttttatccaaattagaagctcacatatgagggaaaattaaaattctgttggtattaaaagatgtttaagatttttttcaatacctgtagatgttgattctatatagctttattttattttatttttcattttttgagacagagttttgctcttattgcctaggctggagtgcag

SEQ ID NO: 1417 - DNA, 355 bp, Homo sapiens
gtcgacgtatgacaggcataaacccaggccacactccatttctatggttaggtggaattagctccaatgtctgatgcccagttccctcccacggcaggtacatttgccacatcccaatacactgccagtaaagataaagtaccttctaatatacttataaaagcacagagtcgaggggctagggactatagaagaaggcaggaggcaaggaagcaaagggttttatttttttttaatgtccccaactcctctagcctggtccctttgctttgtttggctggtacgacaggtggtgactcttaagcactgtgtagcctgctcttgtgtccagattatcccaagcagtctgaaactt

SEQ ID NO: 1418 - DNA, 551 bp, Homo sapiens
cacctttgctttcatgcttcattgtacatggtgaaatgtgttacagcatatgtgtatgtgtgtttaatagatccttcttttttcttcagagaagttgaaggtggtaggtagtagaaactgtcttgcagggtttataacaggtgcaggcaagtagaagttcccctgagatagctgccttttaagaatcttatgtttaaaccatgatgatctgatttaaggcccattatcaatagtctgctacttatatctgcatgatcgtggactgattgatactgactttgtagccatgtgctccataatgcgctgtcaggaaatgctgacagatgcaatgaaagaacaataaatgtggggcagccgtaaggtaaaggttccagctaggctgtatgaaaactgatagctaggatattggctcctatgttaccatatacaccagtacctttgagagtttagctggtgagtgaattaaaatggtctcctgatacccaggaggggggaaaataatcttcatttaaggaacttgccgactttgccaaaacattgctttataagaa

SEQ ID NO: 1419 - DNA, 386 bp, Homo sapiens
  misc_feature (15)..(15): n is a, c, g, or t
  misc_feature (36)..(36): n is a, c, g, or t
  misc_feature (297)..(297): n is a, c, g, or t
cccttttcccgaccnatatgccatatgcctaggacngatttttgtatgacaatagattgaagtgaagaagaagatatgaggccctggagccaggtgtcacgccctataatccccagacatgcttcttttaagaggtggctagaatgaggatattatgttctctaggccatacaaagctattttgtgatttttattttctttaggacagtggttctctgttggtccattaactacggggaggtttccaacacccttcaggggttccatgagatgcaaaaaaaagataagttgaactgntgacttcgcatgaatctagacagtggtaccaagttataccaatagtcattgtattcttcactgctacacactcacagattaaaaaaaaa

SEQ ID NO: 1420 - DNA, 445 bp, Homo sapiens
ggcctgtaaccctagctactcgggaggtggaagcgggagaatcgcttgaacccaggaggcggaggttgcagtgagccgagattgtgccactggactccagactgggcaacagaacaaaaactctgtctcaaaataaataaataaataaataaataacttcttaacccaacaaggctacaaatgagttgtccacaggccagactggcctgcttctgctgaccttcattgaattgtaaaagataactcaaagtggtcgccaatatttacagattgggagtttgttgctttcgggagtttttcattttttgagataaggtcttgctctgtcactcaagctggagtgcaggggcatgatcatagctcactccagcctcgaccacctgggctcaagagatcctcctgctccaacctcctgagtagctaggactacaggtgtacaccacca

SEQ ID NO: 1421 - DNA, 495 bp, Homo sapiens
tgtacaaagatgtacttctgaaaacctaagtttaagtcaacttttgtgagttgtataatttcaaatatcttagctaggtgtgttagagaaattctgtgataattttgtagaacaaaggctctgtaattttctaattttattaattatataaatctagagatcttaagttgggtttgcttaaagtgaagcatactttttgttgcctgttttgcatttagggtattaaacttagttgtacagtctgtttaatttaggttactaaatttattccccttattatagcactcttaacttccattgttccaaaggaaaatttaatgctgaggaactttgccttgatgaaaatgtggttttttaaaatacccaggtataggccaggtgtggtggcttatgcctataatcccagtactgtgggaggccaaggcaggaggatcacttgacgctaggagtttgagaccagcctgggcaacatagcaagaccccattactacagaa

SEQ ID NO: 1422 - DNA, 332 bp, Homo sapiens
ttgctttttttcctctctttcattgtcctcagttgctggttgtttctttattttgctcattcatatattttgcttaaaaaactattgtttatttgtttaaaaaacaacttttttattggcataagaaaaacttgaaccatagatgatgtaacaatctttaatttttcatcagtgttagctgttcctctttatttaacatttgtatttcatgtcctgctaatcaattttataagtttagcgatttttcattgtaaacctacctcatgtattatgtattgatattttgtaaaaaatttgctttggagaaatctcacagtttttctgggtcgacg

SEQ ID NO: 1423 - DNA, 294 bp, Homo sapiens
gatcatatcactacctatggatatggatgtgattgaaatgacagacaggggagaattttttttaacttactagccatgtaatgattttttaaaatttattgctagaaaatcttcactattaccaaacttgcctcaataaatgatgttacgtataaatagcaacagcgatgtcagaagacctccttagcatttcttttcctggtatgatatggctgtctgtaagaagagagtaaacatagatagctcttgcttcttacggtatttcagaatccccctagaagttttttatattaa

SEQ ID NO: 1424 - DNA, 405 bp, Homo sapiens
accaaatctaacgatatataaaaatgagtacatcatgaccaagttgggtttattctcagaaataaaaatattggttaacgttaaaagttcaataaattgagtattcatattgctagatatgaggaaagtcatataatcaattgattcagggaaaaatatttgataaaatccaacatctgttcataattaggaaaaacactgttgaaaactgaggaatagaaaagaacctttttaggataaaggatatctaaaacaaaataaacaaaaaacctgaatgggatgttggaagctttctcttttggatcagtgtttattatgttttcattttcagtatcttatgatgtcttgacttcttaaaaatcttgctggccaaggagagactgccctcccagggctagctaattt

SEQ ID NO: 1425 - DNA, 400 bp, Homo sapiens
ctccctgcaacctcaccctcctgggctcaagcgatcctctcgctttggcctttagagtagctgggaccaatggcacgtgccaccacgcccggctaatttttttattttttgtggagacaggggtctcgctatgtttcccagattggtctcgaactcctgggctcaagcaatcctcctgacttagcctctcaaagcgctgggattacaggtatgagccaccacacccagccaagatccttgataatattaaaaatatttagtatataaggtatacccaggcagtgatgagaagggagggtttcaggggtatcaaccttgaagggttaggaggactggagggtcctgatgagagttcaggaagcagcgagtggccccagaccagtgcatgcaggtgacacat

SEQ ID NO: 1426 - DNA, 431 bp, Homo sapiens
actcccaggtacagccctgctggcccccaaaggcagagccggccgggcgcggtgcatgctgggactcggcgctcggaagcggaagccgctccgccccatagcgccccctgcgggcgggaggagcggcgccgccagagggagtcggtcctcagaggaggggcccgggcaccctccgtgcgggccgcagcacgccggtctttgagggacccttggactcccggatctgcatgcgagggatgcggtcgaagacgagatgagggagctgacgggaggggaaacggaggggcaggtgaacatggagagagcaggaacagggagagagtagggacagcgactgggagacgcgctccacagaaacccggactgagaggcagcgagagggtgagagtccggtgctgttccttccaaagctgcccccaagtcagggatga

SEQ ID NO: 1427 - DNA, 392 bp, Homo sapiens
gaaaatcagctattgtaatccaccatgtcaataggctaaagaaacaaattcatatgatcatgtcacttaatgcaaaaaaagcatttgataaaacccaaggcctagtcattataaaaattcttggctgccaggggtggtggcttatacctttaatcctaacactttgggatcatctcactcatggggcgtgcattctactcatttatttctcagaggatccaggcatggtggctcacgcctataatcccagctacttgggaggctgaggcatgagaagcacttgaacctgggaggcagaaagtgcagtgagccaagatcgtgccactgcactccagccttggcgaaagagcaagactccatctcaataaatacatacatacatacataaaaat

SEQ ID NO: 1428 - DNA, 433 bp, Homo sapiens
gtttgcctggggctgttcataaggaactaggagcagaaatctggcatgtgattcttacagacatctcaaacgttgatccttcctgaaggagcctagctggagaagagcagaaacggggcagatgcctctaggcaggccttgactgatttaaagtcccagtcctgggcttcactcgattaagggtttatcagaccttcccacccatattaaagccatgtttctgggaccccgcagtgacagccgtttcttcccaaagacccctctggtgtgttaagatgtgagctggaagtgagcaactcaaaaaccaagtcatggtaaagaactgtaggttttggggccaggctcggtggctggctcatgcctataatcccagcactttgggaggctaaggcaggaggatcgcctgagctcaggagttcaagaccagcctggg

SEQ ID NO: 1429 - DNA, 470 bp, Homo sapiens
tgatatccctcaactgcctgttgtgagcttttgtttttaagtctctgaacctttaagtggaggcttcagaattaaagcagaatttcaggtgtcacaatttctctgagcatgacaaattggaactgacatcatttgaggttaatcaaagctcctgtggtttttaagtgtttcacgaggaaggcaaagagaaagggatggagaggaatgtattctaccagccataagcctagtgcttggtgggtgatggcctagagatagactatttgggagcccctgagtggccacctgtatcttgctgtcaatacatgcttgctctgcagtcagtctgttactatctccttctccattccagtataggatgtaaagaccagtgaagcataattgaaagtgcttggagctaatggccatctatgcacttactctctgctctcaactgtagtttttctgaaattcttgcagttgaatttagt

SEQ ID NO: 1430 - DNA, 269 bp, Homo sapiens
agtaagcaaaagctgttaaatgaaaaaaaaaaaagacctcttttaaaaaagggagggaatataagtttgaaaaaataaatcttcaaaatttgacgtgaggataggaaagagaaaagttgaacctcaggaattaataaaaacgaaaaggagggtcaatcctggaggttgactatctaagcaacagaacttatagtaatatgaattgtaggaattacagacaaaataataaaaaaatctcaaagtgattatcaagagtatatacagtggac

SEQ ID NO: 1431 - DNA, 417 bp, Homo sapiens
  misc_feature (307)..(307): n is a, c, g, or t
  misc_feature (318)..(318): n is a, c, g, or t
  misc_feature (327)..(327): n is a, c, g, or t
  misc_feature (359)..(359): n is a, c, g, or t
  misc_feature (369)..(369): n is a, c, g, or t
  misc_feature (395)..(395): n is a, c, g, or t
caaaaatcaagataggagttgcctctgagtggggtgaaaggggatgggacgagagagggagcgcacgggaattgataatgttctagttgttggattcggcagtatgttttgttttttttccatctccccccaacacacataatgtagttttattcagttttaaacaaactgtaactcttttggggcagtaagttcatgagtgttcattttattgttaggctttagaactcccatctgtattatgtatgtattattatatattacataatacattatatatagagagagagaatgtttcaaatatttnccatggatatngatgggggncccgggaaggaggaggggggggttggcctttncccggtcctnccccccttgggaggggcaagtcttgngcccccggggcccccgggggtt

SEQ ID NO: 1432 - DNA, 427 bp, Homo sapiens
tatttccatttggtctaaggcttgggagagggctctagagttggtttaaaaaagctgcctagtggctggagggagaggcttaggcagagcggggctcttcagatgtcgctgggttcggtaggctcccgtgtgcctgagggtgaacctttttgcccagcccggcctggaggccggctggcctgtgaaggttggtcaggtggtcacctatcttcttgatgagttttactttttcatctaggaagtggctctccaggaagtcacagatatgggggtctgtgcaggtggaacccaaggcatgaagatccaaaagggtccagttcaggttcttctccagggccagagtgacttccatcgcacccagggttttaccccattcatctttacatggcttctggatgtccgggaagacagtgcggccgccacactg

SEQ ID NO: 1433 - DNA, 116 bp, Homo sapiens
gtcttttaggtttcactggtgatacactgccatcacagttccatgcaatggatcctacttagtccatagacttttgaggcagatgtaattgaactaaatcattcaaggtcacttga

SEQ ID NO: 1434 - DNA, 590 bp, Homo sapiens
actactaagctaagcactctacacattactttatttaacacgcacaacagagttgtgttatttagggactgttgttatgccttttatagatgaggagattgaaactcacagaggccacgtatctaagcattttctcaagctcaccttgctattaaggggcacagcctggattttaactcaggcattctgatgctacagctgtgatctattcaacattgtgttatattctctaatttgtcatttcgtggctttctagttcatgaaactgtagtaaatattttaaatctgcttttagaagttctgaattgaatatttttattaggaatacagtgtagccttttattaatatggtctcaaattgtaagaacataaagtaaagccagaaacgtaggttgaaacagaactcccagatccatgagttcagataaattattgtatagttttctaaaatacacaggaatgatttttcttttttttagatgtctaaaaaaatgtgctatctgtagttattaaattgtcattgctaaataaaggttgcctttgttgtccagaattattagctcaattgtattcagtctgaataatcttaa

SEQ ID NO: 1435 - DNA, 383 bp, Homo sapiens
taaattaaggttcataatcaaggagtcacagtttgctccttgaaagcaaactctcagtaatcaaaattactttgtgagccccagatttatacagccaccttctttctgtacttttttatttggaaatgcagcaggcgcctcaatgtaacatgttctaaactgggaagcaacagaatgtagccaacaagcactgcctttgtagtcaggcaatttgaacaccaatgccgccttagccacttacggtttcttgtaccatatcatgcgcagaaatttgacaaattggggtaagaccgtttaactcgaagtctttatgcaaattaaatgggaatatacatgacaaatgaagggaagtagacagatgattacctagcacactagggtac

SEQ ID NO: 1436 - DNA, 372 bp, Homo sapiens
atattttaaatcctatcttacctatccataggttacatatttgactctcaggaacacaggtaactcattgcctggaaccatagctctgagccccaaaggcatcacaaagtgattctagttagtgtcttgaagcttatgagctttgctgataagcagcatcacagtaaaagcaatatttgtttttagatttagtttttttttttttttcatttaactaagagccttcaactgtactatcttcttgggtgtttgatatgggcaggacatctatcattgattcctattagagatgataaagcaaacattcaaagagactgtgaaactaaatgttgcacagagatagagccagggttacaactctgatcttctgtg

SEQ ID NO: 1437 - DNA, 169 bp, Homo sapiens
gttcaagcaatcctcctgcctcagcctcccaagtagctgggactataggcatccaccaccacacccagacccctcttcttttcctggtactacatttacagtctggtctctgaatccatgggttctgcatccatagatttaaccaatcacagattgaaaatatttgggg

SEQ ID NO: 1438 - DNA, 246 bp, Homo sapiens
tcctggttcatagatggccccttcttgctgtgtcctttcatggtgagggtctttctcaagcatcatgttttataacatcactaatcccatgggtgagggaggagcctttatgtcctaatcaccttccaaatacctcacctcctaatatcatcaccttagggttgggatttcaacatatgaattttgatggaacacaagcattccaatcacagcagtcatcctcatataaactttcaaagaaataaa

SEQ ID NO: 1439 - DNA, 742 bp, Homo sapiens
tgccctgtgctggatgtggccctcaccccctaccccagacctcaccctccaccccccacccccagttctgccttgggcctcttctccttttccaagttcagctttttattaagcagaaactatccaagacccagttctgaccgttgagggaagtcaagttggaggggcagtgttgtgtagcctggcttacaggctggctctccttgcgccagctgtgggacacttagcaagttgcataacctctcatctgggaaatgaagataacaatgcttacccccaaagagctattttcatgattagccagaaataaagtaagtgctgtgtaaatgtttattgagcagcctgtgtttgttggatttaaaagaagagagtgagtcttttaaacaaaaagccctcccataaccagcagccctaagtggggctctgggacaaaaaaaaaaaaagttttctggtatcctggcttgggggagggaacaggtagacaatttttgtattttttagtacagacggggtttcaccatgttggccaggctggtctcaaacttgcttccccagaactcaggcgctgcttctgtcttagtggagtgagtgcttgccagctgtggcgggcgtggcactctggtgttcatcttctgtgatggtgccgtggatttaactaagccaaccacaggatatagtgaaatatgtgttgacttctctgcttttttggtgacgggctgtgtggggaggggtggtaaataat

SEQ ID NO: 1440 - DNA, 4411 bp, Homo sapiens
aggagcatgcggagaactgctcccggcccggatcgctatggcagcggcgtcgtcgcgggccgggccccagcaatcccgcccgggcccggctgcctcaacagccgcccccactgccccctctcgggcatgaaccgagcttcttgttgccgcccgctgccctacccgccgctgccgccgcatcccgactctgggccagcgctgggaacatgcccctggccgcctactgctacctgcgggtcgtgggcaaggggagctatggagaggtgacgcttgtgaagcaccggcgggacggcaagcagtatgtcatcaaaaaactgaacctccgaaatgcctctagccgagagcggcgagctgctgaacaggaagcccagctcttgtctcagttgaagcatcccaacattgtcacctacaaggagtcatgggaaggaggagatggtctgctctacattgtcatgggcttctgtgaaggaggtgatttgtaccgaaagctcaaggagcagaaagggcagcttctgcctgagaatcaggtggtagagtggtttgtacagatcgccatggctttgcagtatttacatgaaaaacacatccttcatcgagatctgaaaactcaaaatgtcttcctaacaagaacaaacatcatcaaagtaggggacctaggaattgcccgagtgttagagaaccactgtgacatggctagcaccctcattggcacaccctactacatgagccctgaattgttctcaaacaaaccctacaactataagtctgatgtttgggctctaggatgctgtgtctatgaaatggccaccttgaagcatgctttcaatgcaaaagatatgaattctttagtttatcggattattgaaggaaagctgccagcaatgccaagagattacagcccagagctggcagaactgataagaacaatgctgagcaaaaggcctgaagaaaggccgtctgtgaggagcatcctgaggcagccttatataaagcggcaaatctccttctttttggaggccacaaagataaaaacctccaaaaataacattaaaaatggtgactctcaatccaagccttttgctacagtggtttctggagaggcagaatcaaatcatgaagtaatccacccccaaccactctcttctgagggctcccagacatatataatgggtgaaggcaaatgtttgtcccaggagaaacccagggcctctggtctcttgaagtcacctgccagtctgaaagcccatacctgcaaacaggacttgagcaataccacagaactagccacaatcagtagcgtaaatattgacatcttacctgcaaaagggagggattcagtgagtgatggctttgttcaggagaatcagccaagatatttggatgcctctaatgagttaggaggtatatgcagtatttctcaagtggaagaggagatgctgcaggacaacactaaatccagtgcccagcctgaaaacctgattcccatgtggtcctctgacattgtcactggggaaaagaatgaaccagtgaagcctctgcagcccctaatcaaagaacaaaagccaaaggaccagagtcttgccctgtcgcccaagctggagtgcagtggcacaatcttggctcacagcaacctccgcctcctgggttcaagtgattctccagcctcagcctcccgagtagctgggattacaggcgtgtgccaccacgcccaggatcaagttgctggtgaatgtattatagaaaaacagggcagaatccacccagatttacagccacacaactctgggtctgaaccttccctgtctcgacagcgacggcaaaagaggagagaacagactgagcacagaggggaaaagagacaggtccgcagagatctctttgctttccaagagtcgcctcctcgatttttgccttctcatcccattgttgggaaagtggatgtcacatcaacacaaaaagaggctgaaaaccaacgtagagtggtcactgggtctgtgagcagttcaaggagcagtgagatgtcatcatcaaaggatcgaccattatcagccagagagaggaggcgactaaagcagtcacaggaagaaatgtcctcttcaggcccttcagtgaggaaagcgtctctgagtgtagcagggccaggaaaaccccaggaagaagaccagcccttgcctgcccgacggctctcctctgactgcagcgtcactcaggaaaggaaacagattcattgtctgtctgaggatgagttaagttcttctacaagttcaactgataagtcagatggggattacggggaagggaaaggtcagacaaatgaaattaatgccttggtacaattgatgactcagaccctgaaactggattctaaagagagctgtgaagatgtcccggtagcaaacccagtgtcagaattcaaacttcatcggaaatatcgggacacactgatacttcatgggaaggttgcagaagaggcagaggaaatccattttaaagagctaccttcagctattatgccaggttctgaaaagatcaggagactagttgaagtcttgagaactgatgtaattcgtggcctgggagttcagcttttagagcaggtgtatgatcttttggaggaggaggatgaatttgatagagaggtacgtttgcgggagcacatgggtgaaaagtatacaacttacagtgtgaaagctcgccagttgaaattttttgaagaaaacatgaatttttgagcatttgtcctaatctgctgccagaattaaagacctatttttagaggattttggcttaaaaagcaagggcaaacagtcatttggaagccactcaccactgttttatatctcttttttatatctctttggcgtttccctacagaaaagaaattggacagaacagaataatatgaagcaggatcacaaaagaaaaaaaactttggctttcatattctctttgtgaggacaaatctgttgtttgtttgattactgtttactgagccttaatccaccaagtttatatttagaattttatttttttaaggtactaattaacttaaacacagagctataaaatgctggattgaaaattttatattgtaatgtagagataaaagcagtaggagaaacaaatgacataatatgtcgtcataattcctgctattgttaataaccttaaggagtagttgataaattataaaattttaaaaagtcaattcagttctagaaatagatttaaagaatatgaagttctatctagtacttgagcagctgtatttcttttctacacattgatggacttttaatattttattctcatttaatataaacctcatctagggtatatacaaattaaaactgagacacattggctttgtaaatcagtatgtttttacataatggttttgttagatttatttttccatcagtgaaaacatttcttaaacacaaatttcatttccatttaagcaatttgtaagcaaagtccaggtccatttagtttttggatatatttaatgtttgtctcctgaagtttgtcttcatgtactgtaagatattagttgtctttccatgttttaaatgtatgattatatagcacatattttattagttgtttaataagaggtaatacccatctaggaaagaaattttatgaagttaaatacaagtcttgaatagtacattttcacttctgtattcgagggactctaaaaataaatattgctccagaaaaaaaaaaaaaaaaaaaaaaaaaaaaaaaaaaaaaaaaaaaaaaaaaaaaaaaaaaaaaaaaaaaaaaaaaaaaaaaaaagagagggcaaccagcttaaatctattaccacagagagggggcccaaagagaggacagtcaaactatgaattagaagacaagaagcgccgccatataagaagtcggctgttaacttaaaacaaaagcggagcaggccgggcatatcaagaaaaaggcgcacgtcaaacactgcggggtaagccatcaaataggtcgacaacgacaaccacacattgatttgaggtggccgacacagacaaaggtgacacactccacggagcgtatagagggataaacgaggagcaaaatagatgtagcgggaaaagtcgggtacccgcgagaagtgactcggcacgtcagtatccagtaggtgaggagtagacttgagaaacacttcacagggagggcaggcagaaagcagcagagagcagccgccagcaacgcgagcggagaacggagagtagcgcaaaagcaggtacgtcaggagacacggcgaaggcaacaagacgcagagcaacagaggcgagcggcgagcggcgtaggtcaacgagagaagacgacagcatccacgaggaaggacgcgagcactcaagatccaagtagatctagcgagcctcgtcatattatg

SEQ ID NO: 1441 - DNA, 1574 bp, Homo sapiens
aggagcatgcggagaactgctcccggcccggatcgctatggcagcggcgtcgtcgcgggccgggccccagcaatcccgcccgggcccggctgcctcaacagccgcccccactgccccctctcgggcatgaaccgagcttcttgttgccgcccgctgccctacccgccgctgccgccgcatcccgactctgggccagcgctgggaacatgcccctggccgcctactgctacctgcgggtcgtgggcaaggggagctatggagaggtgacgcttgtgaagcaccggcgggacggcaagcagtatgtcatcaaaaaactgaacctccgaaatgcctctagccgagagcggcgagctgctgaacaggaagcccagctcttgtctcagttgaagcatcccaacattgtcacctacaaggagtcatgggaaggaggagatggtctgctctacattgtcatgggcttctgtgaaggaggtgatttgtaccgaaagctcaaggagcagaaagggcagcttctgcctgagaatcaggtggtagagtggtttgtacagatcgccatggctttgcagtatttacatgaaaaacacatccttcatcgagatctgaaaactcaaaatgtcttcctaacaagaacaaacatcatcaaagtaggggacctaggaattgcccgagtgttagagaaccactgtgacatggctagcaccctcattggcacaccctactacatgagccctgaattgttctcaaacaaaccctacaactataagtctgatgtttgggctctaggatgctgtgtctatgaaatggccaccttgaagcatgctttcaatgcaaaagatatgaattctttagtttatcggattattgaaggaaagctgccagcaatgccaagagattacagcccagagctggcagaactgataagaacaatgctgagcaaaaggcctgaagaaaggccgtctgtgaggagcatcctgaggcagccttatataaagcggcaaatctccttctttttggaggccacaaagataaaaacctccaaaaataacattaaaaatggtgactctcaatccaagccttttgctacagtggtttctggagaggcagaatcaaatcatgaagtaatccacccccaaccactctcttctgagggctcccagacatatataatgggtgaaggcaaatgtttgtcccaggagaaacccagggcctctggtctcttgaagtcacctgccagtctgaaagcccatacctgcaaacaggacttgagcaataccacagaactagccacaatcagtagcgtaaatattgacatcttacctgcaaaagggagggattcagtgagtgatggctttgttcaggagaatcagccaagatatttggatgcctctaatgagttaggaggtatatgcagtatttctcaagtggaagaggagatgctgcaggacaacactaaatccagtgcccagcctgaaaacctgattcccatgtggtcctctgacattgtcactggggaaaagaatgaaccagtgaagcctctgcagcccctaatcaaagaacaaaagccaaaggaccag

SEQ ID NO: 1442 - DNA, 690 bp, Homo sapiens
gcacacctgtagtcccagccactcgggaggctgaggtggaaggatcacttgagcccaagaggttgaggctacagtgagttgtgttcacaccactgtgctttagcctaggtgacagagcaagactctgtctcaaaaatataaataaataaataagtaaataaataacagaactttctaagggcttgcactaggcagcactttgctcaatctgctgtgataccaacatacccatctgtgtcgccagatttgagtctcacttgctaatcattcctcagtttcttatttgtgtcaatgtagtttaccttcttgcctgtagatgatgtagggacaccatctggtggctaaatgggtaattactaggtttctaacccatgttcacctctctgtataatactctgggaattcttcctgttctttgaaagtattggatgtattatttctttaactatatcatttagttatttcactaatagaggctgccttccatatctcagagttgtaaggtttatgtgtatttttaggtgatcctttaaagcactttaacagtctcacattaagagcaagctgaagctgggcatggtggcttgtgggtgttatctcagctacttgggaggccaaggaaggaggattgcttgagcccaggagtttgtggccagcctggacaacatagtgacacccctgtatccaaaa

SEQ ID NO: 1443 - DNA, 659 bp, Homo sapiens
cgagatcgtgccactgcactctagcctggcgacagagcaagactctgtctcaaaaaaacacaaaaatcaaaacaaaaaaaaaacaaacaaaataaaaaacttcatctgatgttcttcagttattcttgtggactttatgagtgaactgggatatcacgggtaaaatcacttcaatgtttttttctttttgccacaaatcatatgggaacaatttttgtatttgttagattctcctgttatattgcacctaggaacgtattgtgtctagttgttgcatctaagactggttcaagtatcacattctggttgtgttgtcatgtagaattttaattcttccaaacatttaagaaaggaaacagattcattgtctgtctgaggatgagttaagttcttctacaagttcaactgataagtcagatggggattacggggaagggtaagttcttgtttttctgtctccctttataaactatttctgttttaatgaatattaaatgtgcattttcagtagtatttagatctctagtattcccactgataaaattataaatggtttgtggcatatgctggagctaaaagtgtctcttcttttttttttttttttttttttgagacggagtttcactctagcctgggtgacagagcaagactctgtctca

SEQ ID NO: 1444 - DNA, 4347 bp, Homo sapiens
aggagcatgcggagaactgctcccggcccggatcgctatggcagcggcgtcgtcgcgggccgggccccagcaatcccgcccgggcccggctgcctcaacagccgcccccactgccccctctcgggcatgaaccgagcttcttgttgccgcccgctgccctacccgccgctgccgccgcatcccgactctgggccagcgctgggaacatgcccctggccgcctactgctacctgcgggtcgtgggcaaggggagctatggagaggtgacgcttgtgaagcaccggcgggacggcaagcagtatgtcatcaaaaaactgaacctccgaaatgcctctagccgagagcggcgagctgctgaacaggaagcccagctcttgtctcagttgaagcatcccaacattgtcacctacaaggagtcatgggaaggaggagatggtctgctctacattgtcatgggcttctgtgaaggaggtgatttgtaccgaaagctcaaggagcagaaagggcagcttctgcctgagaatcaggtggtagagtggtttgtacagatcgccatggctttgcagtatttacatgaaaaacacatccttcatcgagatctgaaaactcaaaatgtcttcctaacaagaacaaacatcatcaaagtaggggacctaggaattgcccgagtgttagagaaccactgtgacatggctagcaccctcattggcacaccctactacatgagccctgaattgttctcaaacaaaccctacaactataagtctgatgtttgggctctaggatgctgtgtctatgaaatggccaccttgaagcatgctttcaatgcaaaagatatgaattctttagtttatcggattattgaaggaaagctgccagcaatgccaagagattacagcccagagctggcagaactgataagaacaatgctgagcaaaaggcctgaagaaaggccgtctgtgaggagcatcctgaggcagccttatataaagcggcaaatctccttctttttggaggccacaaagataaaaacctccaaaaataacattaaaaatggtgactctcaatccaagccttttgctacagtggtttctggagaggcagaatcaaatcatgaagtaatccacccccaaccactctcttctgagggctcccagacatatataatgggtgaaggcaaatgtttgtcccaggagaaacccagggcctctggtctcttgaagtcacctgccagtctgaaagcccatacctgcaaacaggacttgagcaataccacagaactagccacaatcagtagcgtaaatattgacatcttacctgcaaaagggagggattcagtgagtgatggctttgttcaggagaatcagccaagatatttggatgcctctaatgagttaggaggtatatgcagtatttctcaagtggaagaggagatgctgcaggacaacactaaatccagtgcccagcctgaaaacctgattcccatgtggtcctctgacattgtcactggggaaaagaatgaaccagtgaagcctctgcagcccctaatcaaagaacaaaagccaaaggaccagagtcttgccctgtcgcccaagctggagtgcagtggcacaatcttggctcacagcaacctccgcctcctgggttcaagtgattctccagcctcagcctcccgagtagctgggattacaggcgtgtgccaccacgcccaggatcaagttgctggtgaatgtattatagaaaaacagggcagaatccacccagatttacagccacacaactctgggtctgaaccttccctgtctcgacagcgacggcaaaagaggagagaacagactgagcacagaggggaaaagagacaggtccgcagagatctctttgctttccaagagtcgcctcctcgatttttgccttctcatcccattgttgggaaagtggatgtcacatcaacacaaaaagaggctgaaaaccaacgtagagtggtcactgggtctgtgagcagttcaaggagcagtgagatgtcatcatcaaaggatcgaccattatcagccagagagaggaggcgactaaagcagtcacaggaagaaatgtcctcttcaggcccttcagtgaggaaagcgtctctgagtgtagcagggccaggaaagaaaggaaacagattcattgtctgtctgaggatgagttaagttcttctacaagttcaactgataagtcagatggggattacggggaagggaaaggtcagacaaatgaaattaatgccttggtacaattgatgactcagaccctgaaactggattctaaagagagctgtgaagatgtcccggtagcaaacccagtgtcagaattcaaacttcatcggaaatatcgggacacactgatacttcatgggaaggttgcagaagaggcagaggaaatccattttaaagagctaccttcagctattatgccaggttctgaaaagatcaggagactagttgaagtcttgagaactgatgtaattcgtggcctgggagttcagcttttagagcaggtgtatgatcttttggaggaggaggatgaatttgatagagaggtacgtttgcgggagcacatgggtgaaaagtatacaacttacagtgtgaaagctcgccagttgaaattttttgaagaaaacatgaatttttgagcatttgtcctaatctgctgccagaattaaagacctatttttagaggattttggcttaaaaagcaagggcaaacagtcatttggaagccactcaccactgttttatatctcttttttatatctctttggcgtttccctacagaaaagaaattggacagaacagaataatatgaagcaggatcacaaaagaaaaaaaactttggctttcatattctctttgtgaggacaaatctgttgtttgtttgattactgtttactgagccttaatccaccaagtttatatttagaattttatttttttaaggtactaattaacttaaacacagagctataaaatgctggattgaaaattttatattgtaatgtagagataaaagcagtaggagaaacaaatgacataatatgtcgtcataattcctgctattgttaataaccttaaggagtagttgataaattataaaattttaaaaagtcaattcagttctagaaatagatttaaagaatatgaagttctatctagtacttgagcagctgtatttcttttctacacattgatggacttttaatattttattctcatttaatataaacctcatctagggtatatacaaattaaaactgagacacattggctttgtaaatcagtatgtttttacataatggttttgttagatttatttttccatcagtgaaaacatttcttaaacacaaatttcatttccatttaagcaatttgtaagcaaagtccaggtccatttagtttttggatatatttaatgtttgtctcctgaagtttgtcttcatgtactgtaagatattagttgtctttccatgttttaaatgtatgattatatagcacatattttattagttgtttaataagaggtaatacccatctaggaaagaaattttatgaagttaaatacaagtcttgaatagtacattttcacttctgtattcgagggactctaaaaataaatattgctccagaaaaaaaaaaaaaaaaaaaaaaaaaaaaaaaaaaaaaaaaaaaaaaaaaaaaaaaaaaaaaaaaaaaaaaaaaaaaaaaaaagagagggcaaccagcttaaatctattaccacagagagggggcccaaagagaggacagtcaaactatgaattagaagacaagaagcgccgccatataagaagtcggctgttaacttaaaacaaaagcggagcaggccgggcatatcaagaaaaaggcgcacgtcaaacactgcggggtaagccatcaaataggtcgacaacgacaaccacacattgatttgaggtggccgacacagacaaaggtgacacactccacggagcgtatagagggataaacgaggagcaaaatagatgtagcgggaaaagtcgggtacccgcgagaagtgactcggcacgtcagtatccagtaggtgaggagtagacttgagaaacacttcacagggagggcaggcagaaagcagcagagagcagccgccagcaacgcgagcggagaacggagagtagcgcaaaagcaggtacgtcaggagacacggcgaaggcaacaagacgcagagcaacagaggcgagcggcgagcggcgtaggtcaacgagagaagacgacagcatccacgaggaaggacgcgagcactcaagatccaagtagatctagcgagcctcgtcatattatg

SEQ ID NO: 1445 - DNA, 4273 bp, Homo sapiens
aggagcatgcggagaactgctcccggcccggatcgctatggcagcggcgtcgtcgcgggccgggccccagcaatcccgcccgggcccggctgcctcaacagccgcccccactgccccctctcgggcatgaaccgagcttcttgttgccgcccgctgccctacccgccgctgccgccgcatcccgactctgggccagcgctgggaacatgcccctggccgcctactgctacctgcgggtcgtgggcaaggggagctatggagaggtgacgcttgtgaagcaccggcgggacggcaagcagtatgtcatcaaaaaactgaacctccgaaatgcctctagccgagagcggcgagctgctgaacaggaagcccagctcttgtctcagttgaagcatcccaacattgtcacctacaaggagtcatgggaaggaggagatggtctgctctacattgtcatgggcttctgtgaaggaggtgatttgtaccgaaagctcaaggagcagaaagggcagcttctgcctgagaatcaggtggtagagtggtttgtacagatcgccatggctttgcagtatttacatgaaaaacacatccttcatcgagatctgaaaactcaaaatgtcttcctaacaagaacaaacatcatcaaagtaggggacctaggaattgcccgagtgttagagaaccactgtgacatggctagcaccctcattggcacaccctactacatgagccctgaattgttctcaaacaaaccctacaactataagtctgatgtttgggctctaggatgctgtgtctatgaaatggccaccttgaagcatgctttcaatgcaaaagatatgaattctttagtttatcggattattgaaggaaagctgccagcaatgccaagagattacagcccagagctggcagaactgataagaacaatgctgagcaaaaggcctgaagaaaggccgtctgtgaggagcatcctgaggcagccttatataaagcggcaaatctccttctttttggaggccacaaagataaaaacctccaaaaataacattaaaaatggtgactctcaatccaagccttttgctacagtggtttctggagaggcagaatcaaatcatgaagtaatccacccccaaccactctcttctgagggctcccagacatatataatgggtgaaggcaaatgtttgtcccaggagaaacccagggcctctggtctcttgaagtcacctgccagtctgaaagcccatacctgcaaacaggacttgagcaataccacagaactagccacaatcagtagcgtaaatattgacatcttacctgcaaaagggagggattcagtgagtgatggctttgttcaggagaatcagccaagatatttggatgcctctaatgagttaggaggtatatgcagtatttctcaagtggaagaggagatgctgcaggacaacactaaatccagtgcccagcctgaaaacctgattcccatgtggtcctctgacattgtcactggggaaaagaatgaaccagtgaagcctctgcagcccctaatcaaagaacaaaagccaaaggaccaggatcaagttgctggtgaatgtattatagaaaaacagggcagaatccacccagatttacagccacacaactctgggtctgaaccttccctgtctcgacagcgacggcaaaagaggagagaacagactgagcacagaggggaaaagagacaggtccgcagagatctctttgctttccaagagtcgcctcctcgatttttgccttctcatcccattgttgggaaagtggatgtcacatcaacacaaaaagaggctgaaaaccaacgtagagtggtcactgggtctgtgagcagttcaaggagcagtgagatgtcatcatcaaaggatcgaccattatcagccagagagaggaggcgactaaagcagtcacaggaagaaatgtcctcttcaggcccttcagtgaggaaagcgtctctgagtgtagcagggccaggaaaaccccaggaagaagaccagcccttgcctgcccgacggctctcctctgactgcagcgtcactcaggaaaggaaacagattcattgtctgtctgaggatgagttaagttcttctacaagttcaactgataagtcagatggggattacggggaagggaaaggtcagacaaatgaaattaatgccttggtacaattgatgactcagaccctgaaactggattctaaagagagctgtgaagatgtcccggtagcaaacccagtgtcagaattcaaacttcatcggaaatatcgggacacactgatacttcatgggaaggttgcagaagaggcagaggaaatccattttaaagagctaccttcagctattatgccaggttctgaaaagatcaggagactagttgaagtcttgagaactgatgtaattcgtggcctgggagttcagcttttagagcaggtgtatgatcttttggaggaggaggatgaatttgatagagaggtacgtttgcgggagcacatgggtgaaaagtatacaacttacagtgtgaaagctcgccagttgaaattttttgaagaaaacatgaatttttgagcatttgtcctaatctgctgccagaattaaagacctatttttagaggattttggcttaaaaagcaagggcaaacagtcatttggaagccactcaccactgttttatatctcttttttatatctctttggcgtttccctacagaaaagaaattggacagaacagaataatatgaagcaggatcacaaaagaaaaaaaactttggctttcatattctctttgtgaggacaaatctgttgtttgtttgattactgtttactgagccttaatccaccaagtttatatttagaattttatttttttaaggtactaattaacttaaacacagagctataaaatgctggattgaaaattttatattgtaatgtagagataaaagcagtaggagaaacaaatgacataatatgtcgtcataattcctgctattgttaataaccttaaggagtagttgataaattataaaattttaaaaagtcaattcagttctagaaatagatttaaagaatatgaagttctatctagtacttgagcagctgtatttcttttctacacattgatggacttttaatattttattctcatttaatataaacctcatctagggtatatacaaattaaaactgagacacattggctttgtaaatcagtatgtttttacataatggttttgttagatttatttttccatcagtgaaaacatttcttaaacacaaatttcatttccatttaagcaatttgtaagcaaagtccaggtccatttagtttttggatatatttaatgtttgtctcctgaagtttgtcttcatgtactgtaagatattagttgtctttccatgttttaaatgtatgattatatagcacatattttattagttgtttaataagaggtaatacccatctaggaaagaaattttatgaagttaaatacaagtcttgaatagtacattttcacttctgtattcgagggactctaaaaataaatattgctccagaaaaaaaaaaaaaaaaaaaaaaaaaaaaaaaaaaaaaaaaaaaaaaaaaaaaaaaaaaaaaaaaaaaaaaaaaaaaaaaaaagagagggcaaccagcttaaatctattaccacagagagggggcccaaagagaggacagtcaaactatgaattagaagacaagaagcgccgccatataagaagtcggctgttaacttaaaacaaaagcggagcaggccgggcatatcaagaaaaaggcgcacgtcaaacactgcggggtaagccatcaaataggtcgacaacgacaaccacacattgatttgaggtggccgacacagacaaaggtgacacactccacggagcgtatagagggataaacgaggagcaaaatagatgtagcgggaaaagtcgggtacccgcgagaagtgactcggcacgtcagtatccagtaggtgaggagtagacttgagaaacacttcacagggagggcaggcagaaagcagcagagagcagccgccagcaacgcgagcggagaacggagagtagcgcaaaagcaggtacgtcaggagacacggcgaaggcaacaagacgcagagcaacagaggcgagcggcgagcggcgtaggtcaacgagagaagacgacagcatccacgaggaaggacgcgagcactcaagatccaagtagatctagcgagcctcgtcatattatg

SEQ ID NO: 1446 - DNA, 4176 bp, Homo sapiens
aggagcatgcggagaactgctcccggcccggatcgctatggcagcggcgtcgtcgcgggccgggccccagcaatcccgcccgggcccggctgcctcaacagccgcccccactgccccctctcgggcatgaaccgagcttcttgttgccgcccgctgccctacccgccgctgccgccgcatcccgactctgggccagcgctgggaacatgcccctggccgcctactgctacctgcgggtcgtgggcaaggggagctatggagaggtgacgcttgtgaagcaccggcgggacggcaagcagtatgtcatcaaaaaactgaacctccgaaatgcctctagccgagagcggcgagctgctgaacaggaagcccagctcttgtctcagttgaagcatcccaacattgtcacctacaaggagtcatgggaaggaggagatggtctgctctacattgtcatgggcttctgtgaaggaggtgatttgtaccgaaagctcaaggagcagaaagggcagcttctgcctgagaatcaggtggtagagtggtttgtacagatcgccatggctttgcagtatttacatgaaaaacacatccttcatcgagatctgaaaactcaaaatgtcttcctaacaagaacaaacatcatcaaagtaggggacctaggaattgcccgagtgttagagaaccactgtgacatggctagcaccctcattggcacaccctactacatgagccctgaattgttctcaaacaaaccctacaactataagtctgatgtttgggctctaggatgctgtgtctatgaaatggccaccttgaagcatgctttcaatgcaaaagatatgaattctttagtttatcggattattgaaggaaagctgccagcaatgccaagagattacagcccagagctggcagaactgataagaacaatgctgagcaaaaggcctgaagaaaggccgtctgtgaggagcatcctgaggcagccttatataaagcggcaaatctccttctttttggaggccacaaagataaaaacctccaaaaataacattaaaaatggtgactctcaatccaagccttttgctacagtggtttctggagaggcagaatcaaatcatgaagtaatccacccccaaccactctcttctgagggctcccagacatatataatgggtgaaggcaaatgtttgtcccaggagaaacccagggcctctggtctcttgaagtcacctgccagtctgaaagcccatacctgcaaacaggacttgagcaataccacagaactagccacaatcagtagcgtaaatattgacatcttacctgcaaaagggagggattcagtgagtgatggctttgttcaggagaatcagccaagatatttggatgcctctaatgagttaggaggtatatgcagtatttctcaagtggaagaggagatgctgcaggacaacactaaatccagtgcccagcctgaaaacctgattcccatgtggtcctctgacattgtcactggggaaaagaatgaaccagtgaagcctctgcagcccctaatcaaagaacaaaagccaaaggaccagagtcttgccctgtcgcccaagctggagtgcagtggcacaatcttggctcacagcaacctccgcctcctgggttcaagtgattctccagcctcagcctcccgagtagctgggattacaggcgtgtgccaccacgcccaggatcaagttgctggtgaatgtattatagaaaaacagggcagaatccacccagatttacagccacacaactctgggtctgaaccttccctgtctcgacagcgacggcaaaagaggagagaacagactgagcacagaggggaaaagagacaggtccgcagagatctctttgctttccaagagtcgcctcctcgatttttgccttctcatcccattgttgggaaagtggatgtcacatcaacacaaaaagaggctgaaaaccaacgtagagtggtcactgggtctgtgagcagttcaaggagcagtgagatgtcatcatcaaaggatcgaccattatcagccagagagaggaggcgactaaagcagtcacaggaagaaatgtcctcttcaggcccttcagtgaggaaagcgtctctgagtgtagcagggccaggaaaaccccaggaagaagaccagcccttgcctgcccgacggctctcctctgactgcagcgtcactcaggaaaggaaacagattcattgtctgtctgaggatgagttaagttcttctacaagttcaactgataagtcagatggggattacggggaagggaaaggtcagacaaatgaaattaatgccttggtacaattgatgactcagaccctgaaactggattctaaagagagctgtgaagatgtcccggtagcaaacccagtgtcagaattcaaacttcatcggaaatatcgggacacactgatacttcatgggaaggttgcagaagaggcagaggaaatccattttaaagagctaccttcagctattatgccaggttctgaaaagatcaggagactagttgaagtcttgagaactgatgtaattcgtggcctgggagttcagcttttagagcaggtgtatgatcttttggaggaggaggatgaatttgatagagagaaaagaaattggacagaacagaataatatgaagcaggatcacaaaagaaaaaaaactttggctttcatattctctttgtgaggacaaatctgttgtttgtttgattactgtttactgagccttaatccaccaagtttatatttagaattttatttttttaaggtactaattaacttaaacacagagctataaaatgctggattgaaaattttatattgtaatgtagagataaaagcagtaggagaaacaaatgacataatatgtcgtcataattcctgctattgttaataaccttaaggagtagttgataaattataaaattttaaaaagtcaattcagttctagaaatagatttaaagaatatgaagttctatctagtacttgagcagctgtatttcttttctacacattgatggacttttaatattttattctcatttaatataaacctcatctagggtatatacaaattaaaactgagacacattggctttgtaaatcagtatgtttttacataatggttttgttagatttatttttccatcagtgaaaacatttcttaaacacaaatttcatttccatttaagcaatttgtaagcaaagtccaggtccatttagtttttggatatatttaatgtttgtctcctgaagtttgtcttcatgtactgtaagatattagttgtctttccatgttttaaatgtatgattatatagcacatattttattagttgtttaataagaggtaatacccatctaggaaagaaattttatgaagttaaatacaagtcttgaatagtacattttcacttctgtattcgagggactctaaaaataaatattgctccagaaaaaaaaaaaaaaaaaaaaaaaaaaaaaaaaaaaaaaaaaaaaaaaaaaaaaaaaaaaaaaaaaaaaaaaaaaaaaaaaaagagagggcaaccagcttaaatctattaccacagagagggggcccaaagagaggacagtcaaactatgaattagaagacaagaagcgccgccatataagaagtcggctgttaacttaaaacaaaagcggagcaggccgggcatatcaagaaaaaggcgcacgtcaaacactgcggggtaagccatcaaataggtcgacaacgacaaccacacattgatttgaggtggccgacacagacaaaggtgacacactccacggagcgtatagagggataaacgaggagcaaaatagatgtagcgggaaaagtcgggtacccgcgagaagtgactcggcacgtcagtatccagtaggtgaggagtagacttgagaaacacttcacagggagggcaggcagaaagcagcagagagcagccgccagcaacgcgagcggagaacggagagtagcgcaaaagcaggtacgtcaggagacacggcgaaggcaacaagacgcagagcaacagaggcgagcggcgagcggcgtaggtcaacgagagaagacgacagcatccacgaggaaggacgcgagcactcaagatccaagtagatctagcgagcctcgtcatattatg

SEQ ID NO: 1447 - DNA, 3369 bp, Homo sapiens
aggagcatgcggagaactgctcccggcccggatcgctatggcagcggcgtcgtcgcgggccgggccccagcaatcccgcccgggcccggctgcctcaacagccgcccccactgccccctctcgggcatgaaccgagcttcttgttgccgcccgctgccctacccgccgctgccgccgcatcccgactctgggccagcgctgggaacatgcccctggccgcctactgctacctgcgggtcgtgggcaaggggagctatggagaggtgacgcttgtgaagcaccggcgggacggcaagcagtatgtcatcaaaaaactgaacctccgaaatgcctctagccgagagcggcgagctgctgaacaggaagcccagctcttgtctcagttgaagcatcccaacattgtcacctacaaggagtcatgggaaggaggagatggtctgctctacattgtcatgggcttctgtgaaggaggtgatttgtaccgaaagctcaaggagcagaaagggcagcttctgcctgagaatcaggtggtagagtggtttgtacagatcgccatggctttgcagtatttacatgaaaaacacatccttcatcgagatctgaaaactcaaaatgtcttcctaacaagaacaaacatcatcaaagtaggggacctaggaattgcccgagtgttagagaaccactgtgacatggctagcaccctcattggcacaccctactacatgagccctgaattgttctcaaacaaaccctacaactataagtctgatgtttgggctctaggatgctgtgtctatgaaatggccaccttgaagcatgctttcaatgcaaaagatatgaattctttagtttatcggattattgaaggaaagctgccagcaatgccaagagattacagcccagagctggcagaactgataagaacaatgctgagcaaaaggcctgaagaaaggccgtctgtgaggagcatcctgaggcagccttatataaagcggcaaatctccttctttttggaggccacaaagataaaaacctccaaaaataacattaaaaatggtgactctcaatccaagccttttgctacagtggtttctggagaggcagaatcaaatcatgaagtaatccacccccaaccactctcttctgagggctcccagacatatataatgggtgaaggcaaatgtttgtcccaggagaaacccagggcctctggtctcttgaagtcacctgccagtctgaaagcccatacctgcaaacaggacttgagcaataccacagaactagccacaatcagtagcgtaaatattgacatcttacctgcaaaagggagggattcagtgagtgatggctttgttcaggagaatcagccaagatatttggatgcctctaatgagttaggaggtatatgcagtatttctcaagtggaagaggagatgctgcaggacaacactaaatccagtgcccagcctgaaaacctgattcccatgtggtcctctgacattgtcactggggaaaagaatgaaccagtgaagcctctgcagcccctaatcaaagaacaaaagccaaaggaccagagtcttgccctgtcgcccaagctggagtgcagtggcacaatcttggctcacagcaacctccgcctcctgggttcaagtgattctccagcctcagcctcccgagtagctgggattacaggcgtgtgccaccacgcccaggatcaagttgctggtgaatgtattatagaaaaacagggcagaatccacccagatttacagccacacaactctgggtctgaaccttccctgtctcgacagcgacggcaaaagaggagagaacagactgagcacagaggggaaaagagacaggtccgcagagatctctttgctttccaagagtcgcctcctcgatttttgccttctcatcccattgttgggaaagtggatgtcacatcaacacaaaaagaggctgaaaaccaacgtagagtggtcactgggtctgtgagcagttcaaggagcagtgagatgtcatcatcaaaggatcgaccattatcagccagagagaggaggcgactaaagcagtcacaggaagaaatgtcctcttcaggcccttcagtgaggaaagcgtctctgagtgtagcagggccaggaaaaccccaggaagaagaccagcccttgcctgcccgacggctctcctctgactgcagcgtcactcaggaaaggaaacagattcattgtctgtctgaggatgagttaagttcttctacaagttcaactgataagtcagatggggattacggggaagggaaaggtcagacaaatgaaattaatgccttggtacaattgatgactcagaccctgaaactggattctaaagagagctgtgaagatgtcccggtagcaaacccagtgtcagaattcaaacttcatcggaaatatcgggacacactgatacttcatgggaaggttgcagaagaggcagaggaaatccattttaaagagctaccttcagctattatgccaggttctgaaaagatcaggagactagttgaagtcttgagaactgatgtaattcgtggcctgggagttcagcttttagagcaggtgtatgatcttttggaggaggaggatgaatttgatagagaggtacgtttgcgggagcacatgggtgaaaagtatacaacttacagtgtgaaagctcgccagttgaaattttttgaagaaaacatgaatttttgagcatttgtcctaatctgctgccagaattaaagacctatttttagaggattttggcttaaaaagcaagggcaaacagtcatttggaagccactcaccactgttttatatctcttttttatatctctttggcgtttccctacagaaaagaaattggacagaacagaataatatgaagcaggatcacaaaagaaaaaaaactttggctttcatattctctttgtgaggacaaatctgttgtttgtttgattactgtttactgagccttaatccaccaagtttatatttagaattttatttttttaaggtactaattaacttaaacacagagctataaaatgctggattgaaaattttatattgtaatgtagagataaaagcagtaggagaaacaaatgacataatatgtcgtcataattcctgctattgttaataaccttaaggagtagttgataaattataaaattttaaaaagtcaatcggtcttgaaatgaataagaattgaggtctcttggaatgacggggtttttccacaatggggtaattattctaaaacccttggttaatagaacgggggacaggaacggggattccagaattaattcatgacggcgatagtaaggggtgaaaaagaagggaa

SEQ ID NO: 1448 - DNA, 3255 bp, Homo sapiens
aggagcatgcggagaactgctcccggcccggatcgctatggcagcggcgtcgtcgcgggccgggccccagcaatcccgcccgggcccggctgcctcaacagccgcccccactgccccctctcgggcatgaaccgagcttcttgttgccgcccgctgccctacccgccgctgccgccgcatcccgactctgggccagcgctgggaacatgcccctggccgcctactgctacctgcgggtcgtgggcaaggggagctatggagaggtgacgcttgtgaagcaccggcgggacggcaagcagtatgtcatcaaaaaactgaacctccgaaatgcctctagccgagagcggcgagctgctgaacaggaagcccagctcttgtctcagttgaagcatcccaacattgtcacctacaaggagtcatgggaaggaggagatggtctgctctacattgtcatgggcttctgtgaaggaggtgatttgtaccgaaagctcaaggagcagaaagggcagcttctgcctgagaatcaggtggtagagtggtttgtacagatcgccatggctttgcagtatttacatgaaaaacacatccttcatcgagatctgaaaactcaaaatgtcttcctaacaagaacaaacatcatcaaagtaggggacctaggaattgcccgagtgttagagaaccactgtgacatggctagcaccctcattggcacaccctactacatgagccctgaattgttctcaaacaaaccctacaactataagtctgatgtttgggctctaggatgctgtgtctatgaaatggccaccttgaagcatgctttcaatgcaaaagatatgaattctttagtttatcggattattgaaggaaagctgccagcaatgccaagagattacagcccagagctggcagaactgataagaacaatgctgagcaaaaggcctgaagaaaggccgtctgtgaggagcatcctgaggcagccttatataaagcggcaaatctccttctttttggaggccacaaagataaaaacctccaaaaataacattaaaaatggtgactctcaatccaagccttttgctacagtggtttctggagaggcagaatcaaatcatgaagtaatccacccccaaccactctcttctgagggctcccagacatatataatgggtgaaggcaaatgtttgtcccaggagaaacccagggcctctggtctcttgaagtcacctgccagtctgaaagcccatacctgcaaacaggacttgagcaataccacagaactagccacaatcagtagcgtaaatattgacatcttacctgcaaaagggagggattcagtgagtgatggctttgttcaggagaatcagccaagatatttggatgcctctaatgagttaggaggtatatgcagtatttctcaagtggaagaggagatgctgcaggacaacactaaatccagtgcccagcctgaaaacctgattcccatgtggtcctctgacattgtcactggggaaaagaatgaaccagtgaagcctctgcagcccctaatcaaagaacaaaagccaaaggaccagagtcttgccctgtcgcccaagctggagtgcagtggcacaatcttggctcacagcaacctccgcctcctgggttcaagtgattctccagcctcagcctcccgagtagctgggattacaggcgtgtgccaccacgcccaggatcaagttgctggtgaatgtattatagaaaaacagggcagaatccacccagatttacagccacacaactctgggtctgaaccttccctgtctcgacagcgacggcaaaagaggagagaacagactgagcacagaggggaaaagagacaggtccgcagagatctctttgctttccaagagtcgcctcctcgatttttgccttctcatcccattgttgggaaagtggatgtcacatcaacacaaaaagaggctgaaaaccaacgtagagtggtcactgggtctgtgagcagttcaaggagcagtgagatgtcatcatcaaaggatcgaccattatcagccagagagaggaggcgactaaagcagtcacaggaagaaatgtcctcttcaggcccttcagtgaggaaagcgtctctgagtgtagcagggccaggaaaaccccaggaagaagaccagcccttgcctgcccgacggctctcctctgactgcagcgtcactcaggtgcattacgtactcctaagagagaaggtggacagtctacatctggcaggcctaatgcagtaaaccttttaaatgtcagctccatttatttttgggacagggccagcttgttatatcttttcactcttgataaagaaaggaactggtaaataatagtcaaaaggattatgattgacccattaagggaataaatttttcaggtactcttgtaaacaattgatagcctaattaaaaatatttcataggttggtcttaacaggacttcctggcctgatgcagtggctcacgcttataatactagcactttgggaggccaaggtgagaagattgctttagcccaggagtttgagatcaatctgggcaatatagttggaccctgtctctaagaaagtggaaggatcacttgagcccaagaggttgaggctacagtgagttgtgttcacaccactgtgctttagcctaggtgacagagcaagactctgtctcaaaaatataaataaataaataagtaaataaataacagaactttctaagggcttgcactaggcagcactttgctcaatctgctgtgataccaacatacccatctgtgtcgccagatttgagtctcacttgctaatcattcctcagtttcttatttgtgtcaatgtagtttaccttcttgcctgtagatgatgtagggacaccatctggtggctaaatgggtaattactaggtttctaacccatgttcacctctctgtataatactctgggaattcttcctgttctttgaaagtattggatgtattatttctttaactatatcatttagttatttcactaatagaggctgccttccatatctcagagttgtaaggtttatgtgtatttttaggtgatcctttaaagcactttaacagtctcacattaagagcaagctgaagctgggcatggtggcttgtgggtgttatctcagctacttgggaggccaaggaaggaggattgcttgagcccaggagtttgtggccagcctggacaacatagtgacacccctgtatccaaaa

SEQ ID NO: 1449 - DNA, 2548 bp, Homo sapiens
cgagatcgtgccactgcactctagcctggcgacagagcaagactctgtctcaaaaaaacacaaaaatcaaaacaaaaaaaaaacaaacaaaataaaaaacttcatctgatgttcttcagttattcttgtggactttatgagtgaactgggatatcacgggtaaaatcacttcaatgtttttttctttttgccacaaatcatatgggaacaatttttgtatttgttagattctcctgttatattgcacctaggaacgtattgtgtctagttgttgcatctaagactggttcaagtatcacattctggttgtgttgtcatgtagaattttaattcttccaaacatttaagaaaggaaacagattcattgtctgtctgaggatgagttaagttcttctacaagttcaactgataagtcagatggggattacggggaagggaaaggtcagacaaatgaaattaatgccttggtacaattgatgactcagaccctgaaactggattctaaagagagctgtgaagatgtcccggtagcaaacccagtgtcagaattcaaacttcatcggaaatatcgggacacactgatacttcatgggaaggttgcagaagaggcagaggaaatccattttaaagagctaccttcagctattatgccaggttctgaaaagatcaggagactagttgaagtcttgagaactgatgtaattcgtggcctgggagttcagcttttagagcaggtgtatgatcttttggaggaggaggatgaatttgatagagaggtacgtttgcgggagcacatgggtgaaaagtatacaacttacagtgtgaaagctcgccagttgaaattttttgaagaaaacatgaatttttgagcatttgtcctaatctgctgccagaattaaagacctatttttagaggattttggcttaaaaagcaagggcaaacagtcatttggaagccactcaccactgttttatatctcttttttatatctctttggcgtttccctacagaaaagaaattggacagaacagaataatatgaagcaggatcacaaaagaaaaaaaactttggctttcatattctctttgtgaggacaaatctgttgtttgtttgattactgtttactgagccttaatccaccaagtttatatttagaattttatttttttaaggtactaattaacttaaacacagagctataaaatgctggattgaaaattttatattgtaatgtagagataaaagcagtaggagaaacaaatgacataatatgtcgtcataattcctgctattgttaataaccttaaggagtagttgataaattataaaattttaaaaagtcaattcagttctagaaatagatttaaagaatatgaagttctatctagtacttgagcagctgtatttcttttctacacattgatggacttttaatattttattctcatttaatataaacctcatctagggtatatacaaattaaaactgagacacattggctttgtaaatcagtatgtttttacataatggttttgttagatttatttttccatcagtgaaaacatttcttaaacacaaatttcatttccatttaagcaatttgtaagcaaagtccaggtccatttagtttttggatatatttaatgtttgtctcctgaagtttgtcttcatgtactgtaagatattagttgtctttccatgttttaaatgtatgattatatagcacatattttattagttgtttaataagaggtaatacccatctaggaaagaaattttatgaagttaaatacaagtcttgaatagtacattttcacttctgtattcgagggactctaaaaataaatattgctccagaaaaaaaaaaaaaaaaaaaaaaaaaaaaaaaaaaaaaaaaaaaaaaaaaaaaaaaaaaaaaaaaaaaaaaaaaaaaaaaaaagagagggcaaccagcttaaatctattaccacagagagggggcccaaagagaggacagtcaaactatgaattagaagacaagaagcgccgccatataagaagtcggctgttaacttaaaacaaaagcggagcaggccgggcatatcaagaaaaaggcgcacgtcaaacactgcggggtaagccatcaaataggtcgacaacgacaaccacacattgatttgaggtggccgacacagacaaaggtgacacactccacggagcgtatagagggataaacgaggagcaaaatagatgtagcgggaaaagtcgggtacccgcgagaagtgactcggcacgtcagtatccagtaggtgaggagtagacttgagaaacacttcacagggagggcaggcagaaagcagcagagagcagccgccagcaacgcgagcggagaacggagagtagcgcaaaagcaggtacgtcaggagacacggcgaaggcaacaagacgcagagcaacagaggcgagcggcgagcggcgtaggtcaacgagagaagacgacagcatccacgaggaaggacgcgagcactcaagatccaagtagatctagcgagcctcgtcatattatg

SEQ ID NO: 1450 - DNA, 2140 bp, Homo sapiens
atgggatttacatttacatacatatataaatgaatttgctgaattatctatgaaattgattttgttttacctattctaatattgttgggttttattgattcaaagaactctttatatacgaatgctattaatcctttggcatgaatgttgcaaatgttttccctagtttattgtttgtttgctctttaatttcttacgacttttcgaaacatcttgaagtttaaaagttttatgtaaactgaactattagtattttcctgtatggtttccaccttggataccatgcttagaaaagcccttcctctaagattacagaaatattttttcctactacatactgattgattttctttttgtttctcaaataggtacgtttgcgggagcacatgggtgaaaagtatacaacttacagtgtgaaagctcgccagttgaaattttttgaagaaaacatgaatttttgagcatttgtcctaatctgctgccagaattaaagacctatttttagaggattttggcttaaaaagcaagggcaaacagtcatttggaagccactcaccactgttttatatctcttttttatatctctttggcgtttccctacagaaaagaaattggacagaacagaataatatgaagcaggatcacaaaagaaaaaaaactttggctttcatattctctttgtgaggacaaatctgttgtttgtttgattactgtttactgagccttaatccaccaagtttatatttagaattttatttttttaaggtactaattaacttaaacacagagctataaaatgctggattgaaaattttatattgtaatgtagagataaaagcagtaggagaaacaaatgacataatatgtcgtcataattcctgctattgttaataaccttaaggagtagttgataaattataaaattttaaaaagtcaattcagttctagaaatagatttaaagaatatgaagttctatctagtacttgagcagctgtatttcttttctacacattgatggacttttaatattttattctcatttaatataaacctcatctagggtatatacaaattaaaactgagacacattggctttgtaaatcagtatgtttttacataatggttttgttagatttatttttccatcagtgaaaacatttcttaaacacaaatttcatttccatttaagcaatttgtaagcaaagtccaggtccatttagtttttggatatatttaatgtttgtctcctgaagtttgtcttcatgtactgtaagatattagttgtctttccatgttttaaatgtatgattatatagcacatattttattagttgtttaataagaggtaatacccatctaggaaagaaattttatgaagttaaatacaagtcttgaatagtacattttcacttctgtattcgagggactctaaaaataaatattgctccagaaaaaaaaaaaaaaaaaaaaaaaaaaaaaaaaaaaaaaaaaaaaaaaaaaaaaaaaaaaaaaaaaaaaaaaaaaaaaaaaaagagagggcaaccagcttaaatctattaccacagagagggggcccaaagagaggacagtcaaactatgaattagaagacaagaagcgccgccatataagaagtcggctgttaacttaaaacaaaagcggagcaggccgggcatatcaagaaaaaggcgcacgtcaaacactgcggggtaagccatcaaataggtcgacaacgacaaccacacattgatttgaggtggccgacacagacaaaggtgacacactccacggagcgtatagagggataaacgaggagcaaaatagatgtagcgggaaaagtcgggtacccgcgagaagtgactcggcacgtcagtatccagtaggtgaggagtagacttgagaaacacttcacagggagggcaggcagaaagcagcagagagcagccgccagcaacgcgagcggagaacggagagtagcgcaaaagcaggtacgtcaggagacacggcgaaggcaacaagacgcagagcaacagaggcgagcggcgagcggcgtaggtcaacgagagaagacgacagcatccacgaggaaggacgcgagcactcaagatccaagtagatctagcgagcctcgtcatattatg

SEQ ID NO: 1451 - DNA, 454 bp, Homo sapiens
agaacttccatcaaccctaaatttattatggaaaccagtttttaaaactgaggaaagttttcatgctaaaaaacaaaagccactttttatggacaacttactttggattacaatgtaccaggttgctgctatactttaaaatgtcattttattgtttttaaggatcaagttgctggtgaatgtattatagaaaaacagggcagaatccacccagatttacagccacacaactctgggtctgaaccttccctgtctcgacagcgacggcaaaagaggagagaacagactgagcacagaggggaaaagagacaggtccgcagagatctctttgctgtaagtcattttgctttggtttgggaggtggactttgggaaactcaatttctatttagagcaattaacaattgccaaaaaggcatgtaagaaatgccaggaacataataaatttagggtga

SEQ ID NO: 1452 - DNA, 1561 bp, Homo sapiens
gcggtggctgccgggactgagctcctagcacccgatcgggaagtggcgggcggagtcccgggtccagtcgccgcctcagctaccgccgctgccgccgccgccgccgccaccgccagtggtgagaccccgacctggcgggtcagcgctgggcgtgcgtgcgggcaggcgggggcgctgacgagaagcaggaagagggtgcagtgccggcgtgggcggccggccgaggcggaggcgcaggaagggggcggcgagtcgtgcgaggctgcccttctcactcagcattatggatccaagcctgttgagagaaagggagctgttcaaaaaacgagctctttctactcctgtagtagaaaaacgttcagcatcttctgagtcatcatcatcatcgtcaaagaagaagaaaacaaaggtagaacatggaggatcgtcaggctctaaacaaaattctgatcatagcaatggatcatttaacttgaaagctttgtcaggaagctctggatataagtttggtgttcttgctaagattgtgaattacatgaagacacggcatcagcgaggagatacgcatcctctaaccttagatgaaattttggatgaaacacaacatttagatattggactcaagcagaaacaatggctaatgactgaggctttagtcaacaatcccaaaattgaagtaatagatgggaagtatgctttcaagcccaagtacaacgtgagagataagaaggccctacttaggctcttagatcagcatgaccagcgaggattaggaggaattcttttagaagacatagaagaagcactgcccaattcccagaaagctgtcaaggctttgggggaccagatactatttgtaaatcgtcccgataagaagaaaatacttttcttcaatgataagagctgtcagttttctgtggatgaagaatttcagaaactgtggaggagtgtcactgtagattccatggacgaggagaaaattgaagaatatctgaagcgacagggtatttcttccatgcaggaatctggaccaaagaaagtggcccctattcagagaaggaaaaagcctgcttcacagaaaaagcgacgctttaagactcataacgaacacttggctggagtgctgaaggattactctgacattacttccagcaaatagggaacagttttgccctggaacagagttacagatacacaatcaagagtgttcttgctgatgctcggggtctgaagactgtcttcctatctgcttcttgcggctgaggagaggagcagttcagtttacaaaacaagtgcaaattaccaaactcaaagcttatttgagtagaatgggctcatgggcaatgtgatgttccctgttaaccttctgttactccctgggagaaaggcgctgagcgtggcatgcaggtgtctttgctgtgtttttctccacttctaaatggttcctggttcctttcttcctcgtttgttactttagagcaagtttgcccatagtcttgaatgcaatatttgtttattccaaaagaacatatttataataaaatcactgtagaaggatttt

SEQ ID NO: 1453 - DNA, 1520 bp, Homo sapiens
cttaaattacccactacgttgtccagtcgccgcctcagctaccgccgctgccgccgccgccgccgccaccgccagtggtgagaccccgacctggcgggtcagcgctgggcgtgcgtgcgggcaggcgggggcgctgacgagaagcaggaagagggtgcagtgccggcgtgggcggccggccgaggcggaggcgcaggaagggggcggcgagtcgtgcgaggctgcccttctcactcagcattatggatccaagcctgttgagagaaagggagctgttcaaaaaacgagctctttctactcctgtagtagaaaaacgttcagcatcttctgagtcatcatcatcatcgtcaaagaagaagaaaacaaaggtagaacatggaggatcgtcaggctctaaacaaaattctgatcatagcaatggatcatttaacttgaaagctttgtcaggaagctctggatataagtttggtgttcttgctaagattgtgaattacatgaagacacggcatcagcgaggagatacgcatcctctaaccttagatgaaattttggatgaaacacaacatttagatattggactcaagcagaaacaatggctaatgactgaggctttagtcaacaatcccaaaattgaagtaatagatgggaagtatgctttcaagcccaagtacaacgtgagagataagaaggccctacttaggctcttagatcagcatgaccagcgaggattaggaggaattcttttagaagacatagaagaagcactgcccaattcccagaaagctgtcaaggctttgggggaccagatactatttgtaaatcgtcccgataagaagaaaatacttttcttcaatgataagagctgtcagttttctgtggatgaagaatttcagaaactgtggaggagtgtcactgtagattccatggacgaggagaaaattgaagaatatctgaagcgacagggtatttcttccatgcaggaatctggaccaaagaaagtggcccctattcagagaaggaaaaagcctgcttcacagaaaaagcgacgctttaagactcataacgaacacttggctggagtgctgaaggattactctgacattacttccagcaaatagggaacagttttgccctggaacagagttacagatacacaatcaagagtgttcttgctgatgctcggggtctgaagactgtcttcctatctgcttcttgcggctgaggagaggagcagttcagtttacaaaacaagtgcaaattaccaaactcaaagcttatttgagtagaatgggctcatgggcaatgtgatgttccctgttaaccttctgttactccctgggagaaaggcgctgagcgtggcatgcaggtgtctttgctgtgtttttctccacttctaaatggttcctggttcctttcttcctcgtttgttactttagagcaagtttgcccatagtcttgaatgcaatatttgtttattccaaaagaacatatttataataaaatcactgtagaaggatttt

SEQ ID NO: 1454 - DNA, 1542 bp, Homo sapiens
gcggtggctgccgggactgagctcctagcacccgatcgggaagtggcgggcggagtcccgggtccagtcgccgcctcagctaccgccgcaccgccagtggtgagaccccgacctggcgggtcagcgctgggcgtgcgtgcgggcaggcgggggcgctgacgagaagcaggaagagggtgcagtgccggcgtgggcggccggccgaggcggaggcgcaggaagggggcggcgagtcgtgcgaggctgcccttctcactcagcattatggatccaagcctgttgagagaaagggagctgttcaaaaaacgagctctttctactcctgtagtagaaaaacgttcagcatcttctgagtcatcatcatcatcgtcaaagaagaagaaaacaaaggtagaacatggaggatcgtcaggctctaaacaaaattctgatcatagcaatggatcatttaacttgaaagctttgtcaggaagctctggatataagtttggtgttcttgctaagattgtgaattacatgaagacacggcatcagcgaggagatacgcatcctctaaccttagatgaaattttggatgaaacacaacatttagatattggactcaagcagaaacaatggctaatgactgaggctttagtcaacaatcccaaaattgaagtaatagatgggaagtatgctttcaagcccaagtacaacgtgagagataagaaggccctacttaggctcttagatcagcatgaccagcgaggattaggaggaattcttttagaagacatagaagaagcactgcccaattcccagaaagctgtcaaggctttgggggaccagatactatttgtaaatcgtcccgataagaagaaaatacttttcttcaatgataagagctgtcagttttctgtggatgaagaatttcagaaactgtggaggagtgtcactgtagattccatggacgaggagaaaattgaagaatatctgaagcgacagggtatttcttccatgcaggaatctggaccaaagaaagtggcccctattcagagaaggaaaaagcctgcttcacagaaaaagcgacgctttaagactcataacgaacacttggctggagtgctgaaggattactctgacattacttccagcaaatagggaacagttttgccctggaacagagttacagatacacaatcaagagtgttcttgctgatgctcggggtctgaagactgtcttcctatctgcttcttgcggctgaggagaggagcagttcagtttacaaaacaagtgcaaattaccaaactcaaagcttatttgagtagaatgggctcatgggcaatgtgatgttccctgttaaccttctgttactccctgggagaaaggcgctgagcgtggcatgcaggtgtctttgctgtgtttttctccacttctaaatggttcctggttcctttcttcctcgtttgttactttagagcaagtttgcccatagtcttgaatgcaatatttgtttattccaaaagaacatatttataataaaatcactgtagaaggatttt

SEQ ID NO: 1455 - DNA, 1769 bp, Homo sapiens
gcggtggctgccgggactgagctcctagcacccgatcgggaagtggcgggcggagtcccgggtccagtcgccgcctcagctaccgccgctgccgccgccgccgccgccaccgccagtggtgagaccccgacctggcgggtcagcgctgggcgtgcgtgcgggcaggcgggggcgctgacgagaagcaggaagagggtgcagtgccggcgtgggcggccggccgaggcggaggcgcaggaagggggcggcgagtcgtgcgaggctgcccttctcactcagcattatggatccaagcctgttgagagaaagggagctgttcaaaaaacgagctctttctactcctgtagtagaaaaacgttcagcatcttctgagtcatcatcatcatcgtcaaagaagaagaaaacaaaggtagaacatggaggatcgtcaggctctaaacaaaattctgatcatagcaatggatcatttaacttgaaagctttgtcaggaagctctggatataagtttggtgttcttgctaagattgtgaattacatgaagacacggcatcagcgaggagatacgcatcctctaaccttagatgaaattttggatgaaacacaacatttagatattggactcaagcagaaacaatggctaatgactgaggctttagtcaacaatcccaaaattgaagtaatagatgggaagtatgctttcaagcccaagtacaacgtgagagataagaaggccctacttaggctcttagatcagcatgaccagcgaggattaggaggaattcttttagaagacatagaagaagcactgcccaattcccagaaagctgtcaaggctttgggggaccagatactatttgtaaatcgtcccgataagaagaaaatacttttcttcaatgataagagctgtcagttttctgtggatgaagaatttcagaaactgtggaggagtgtcactgtagattccatggacgaggagaaaattgaagaatatctgaagcgacagggtatttcttccatgcaggaatctggaccaaagaaagtggcccctattcagagaaggaaaaagcctgcttcacagaaaaagcgacgctttaagactcataacgaacacttggctggagtgctgaaggattactctgacattacttccagcaaatagggaacagttttgccctggaacagagttacagatacacaatcaagagtgttcttgctgatgctcggggtctgaagactgtcttcctatctgcttcttgcggctgaggagaggagcagttcagtttacaaaacaagtgcaaattaccaaactcaaagcttatttgagtagaatgggctcatgggcaatgtgatgttccctgttaaccttctgttactccctgggagaaaggcgctgagcgtggcatgcaggtgtctttgctgtgtttttctccacttctaaatggttcctggttcctttcttcctcgtttgttactttagagcaagtttgcccatagtcttgaatgcaatatttgtttattccaaaagaacatatttataataaaatcactgtagaaggatttttaagatgttagtgaattctgtttcttttcattctcggaaatggcaggaagcagctccagtctctgatttccatgggtcacgtgctggggatgtgatgaagcctgcagtctgcactgtgttgctgagcacatggatttcaccactggaacacaggtgtgctgcttgttagcaagcagagcaataaagatgtgctggatgtcattgttaa

SEQ ID NO: 1456 - DNA, 1419 bp, Homo sapiens
gtcaggaggtttggttcctggccctggctcttccatctgtgcgaccttaaccagacagcttcacttcagatttcacgtattaaaataggaataacactaatacctgtttgctcctagagttgcgagggtcaaatactcattatggatccaagcctgttgagagaaagggagctgttcaaaaaacgagctctttctactcctgtagtagaaaaacgttcagcatcttctgagtcatcatcatcatcgtcaaagaagaagaaaacaaaggtagaacatggaggatcgtcaggctctaaacaaaattctgatcatagcaatggatcatttaacttgaaagctttgtcaggaagctctggatataagtttggtgttcttgctaagattgtgaattacatgaagacacggcatcagcgaggagatacgcatcctctaaccttagatgaaattttggatgaaacacaacatttagatattggactcaagcagaaacaatggctaatgactgaggctttagtcaacaatcccaaaattgaagtaatagatgggaagtatgctttcaagcccaagtacaacgtgagagataagaaggccctacttaggctcttagatcagcatgaccagcgaggattaggaggaattcttttagaagacatagaagaagcactgcccaattcccagaaagctgtcaaggctttgggggaccagatactatttgtaaatcgtcccgataagaagaaaatacttttcttcaatgataagagctgtcagttttctgtggatgaagaatttcagaaactgtggaggagtgtcactgtagattccatggacgaggagaaaattgaagaatatctgaagcgacagggtatttcttccatgcaggaatctggaccaaagaaagtggcccctattcagagaaggaaaaagcctgcttcacagaaaaagcgacgctttaagactcataacgaacacttggctggagtgctgaaggattactctgacattacttccagcaaatagggaacagttttgccctggaacagagttacagatacacaatcaagagtgttcttgctgatgctcggggtctgaagactgtcttcctatctgcttcttgcggctgaggagaggagcagttcagtttacaaaacaagtgcaaattaccaaactcaaagcttatttgagtagaatgggctcatgggcaatgtgatgttccctgttaaccttctgttactccctgggagaaaggcgctgagcgtggcatgcaggtgtctttgctgtgtttttctccacttctaaatggttcctggttcctttcttcctcgtttgttactttagagcaagtttgcccatagtcttgaatgcaatatttgtttattccaaaagaacatatttataataaaatcactgtagaaggatttt

SEQ ID NO: 1457 - DNA, 1057 bp, Homo sapiens
catcctctaaccttagatgatgcgtatctcctcgctgacacggcatcagcgaggagatacgcatcctctaaccttagatgaaattttggatgaaacacaacatttagatattggactcaagcagaaacaatggctaatgactgaggctttagtcaacaatcccaaaattgaagtaatagatgggaagtatgctttcaagcccaagtacaacgtgagagataagaaggccctacttaggctcttagatcagcatgaccagcgaggattaggaggaattcttttagaagacatagaagaagcactgcccaattcccagaaagctgtcaaggctttgggggaccagatactatttgtaaatcgtcccgataagaagaaaatacttttcttcaatgataagagctgtcagttttctgtggatgaagaatttcagaaactgtggaggagtgtcactgtagattccatggacgaggagaaaattgaagaatatctgaagcgacagggtatttcttccatgcaggaatctggaccaaagaaagtggcccctattcagagaaggaaaaagcctgcttcacagaaaaagcgacgctttaagactcataacgaacacttggctggagtgctgaaggattactctgacattacttccagcaaatagggaacagttttgccctggaacagagttacagatacacaatcaagagtgttcttgctgatgctcggggtctgaagactgtcttcctatctgcttcttgcggctgaggagaggagcagttcagtttacaaaacaagtgcaaattaccaaactcaaagcttatttgagtagaatgggctcatgggcaatgtgatgttccctgttaaccttctgttactccctgggagaaaggcgctgagcgtggcatgcaggtgtctttgctgtgtttttctccacttctaaatggttcctggttcctttcttcctcgtttgttactttagagcaagtttgcccatagtcttgaatgcaatatttgtttattccaaaagaacatatttataataaaatcactgtagaaggatttt

SEQ ID NO: 1458 - DNA, 2210 bp, Homo sapiens
gcggtggctgccgggactgagctcctagcacccgatcgggaagtggcgggcggagtcccgggtccagtcgccgcctcagctaccgccgctgccgccgccgccgccgccaccgccagtggtgagaccccgacctggcgggtcagcgctgggcgtgcgtgcgggcaggcgggggcgctgacgagaagcaggaagagggtgcagtgccggcgtgggcggccggccgaggcggaggcgcaggaagggggcggcgagtcgtgcgaggctgcccttctcactcagcattatggatccaagcctgttgagagaaagggagctgttcaaaaaacgagctctttctactcctgtagtagaaaaacgttcagcatcttctgagtcatcatcatcatcgtcaaagaagaagaaaacaaaggtagaacatggaggatcgtcaggctctaaacaaaattctgatcatagcaatggatcatttaacttgaaagctttgtcaggaagctctggatataagtttggtgttcttgctaagattgtgaattacatgaagacacggcatcagcgaggagatacgcatcctctaaccttagatgaaattttggatgaaacacaacatttagatattggactcaagcagaaacaatggctaatgactgaggctttagtcaacaatcccaaaattgaagtaatagatgggaagtatgctttcaagcccaagtacaacgtgagagataagaaggccctacttaggctcttagatcagcatgaccagcgaggattaggaggaattcttttagaagacatagaagaagcactgcccaattcccagaaagctgtcaaggctttgggggaccagatactatttgtaaatcgtcccgataagaagaaaatacttttcttcaatgataagagctgtcagttttctgtggatgaagaatttcagaaactgtggaggagtgtcactgtagattccatggacgaggagaaaattgaagaatatctgaagcgacagggtatttcttccatgcaggaatctggaccaaagaaagtggcccctattcagagaaggaaaaagcctgcttcacagaaaaagcgacgctttaagactcataacgaacacttggctggagtgctgaaggattactctgacattacttccagcaaatagggaacagttttgccctggaacagagttacagatacacaatcaagagtgttcttgctgatgctcggggtctgaagactgtcttcctatctgcttcttgcggctgaggagaggagcagttcagtttacaaaacaagtgcaaattaccaaactcaaagcttatttgagtagaatgggctcatgggcaatgtgatgttccctgttaaccttctgttactccctgggagaaaggcgctgagcgtggcatgcaggtgtctttgctgtgtttttctccacttctaaatggttcctggttcctttcttcctcgtttgttactttagagcaagtttgcccatagtcttgaatgcaatatttgtttattccaaaagaacatatttataataaaatcactgtagaaggattttaaaaaaaaaaaaaaaaaaaaaaaaaaaaaaaaaaaaaaaaaaaaaaaaaaaaaaaaaaaaaaagagagggcgccgccgccccccaagaaactcccccccggggggcgccccaatgccgcgccccccccttttttgcacaacgggggcgccccacatataggggagcgcgctattatataaaaccagcagagcgagcaagaggggcgcgcgcgcttttataaaaacaacaccgtcgctgcccaggggagcaaaacacagcgcgcaggcacaagcgtggggcaccaccttgtgaggaaaaagagagacacctcactaaacatcgcgaggggggggggaggacacacactagggtgcggagacaacacccatcccccccagccgaagagaaaactatcttataacacgcccctctcacaggggcgcggccccaatctatcacaaccgacacccctctccaccacagagccccctgcctacatcgcagcgtgggcggacacccacaaaaacggagcgacacaattaaacgtcgccgccgccggccgcgaccgaaaaaaccctctctgacggcccctcacgcggcgggacactaccaccgccttgcggcacaaaaattatttataaacaccgcgggggcgctacaggagaaaaa

SEQ ID NO: 1459 - DNA, 1607 bp, Homo sapiens
gcggtggctgccgggactgagctcctagcacccgatcgggaagtggcgggcggagtcccgggtccagtcgccgcctcagctaccgccgctgccgccgccgccgccgccaccgccagtggtgagaccccgacctggcgggtcagcgctgggcgtgcgtgcgggcaggcgggggcgctgacgagaagcaggaagagggtgcagtgccggcgtgggcggccggccgaggcggaggcgcaggaagggggcggcgagtcgtgcgaggctgcccttctcactcagcattatggatccaagcctgttgagagaaagggagctgttcaaaaaacgagctctttctactcctgtagtagaaaaacgttcagcatcttctgagtcatcatcatcatcgtcaaagaagaagaaaacaaaggtagaacatggaggatcgtcaggctctaaacaaaattctgatcatagcaatggatcatttaacttgaaagctttgtcaggaagctctggatataagtttggtgttcttgctaagattgtgaattacatgaagacacggcatcagcgaggagatacgcatcctctaaccttagatgaaattttggatgaaacacaacatttagatattggactcaagcagaaacaatggctaatgactgaggctttagtcaacaatcccaaaattgaagtaatagatgggaagtatgctttcaagcccaagtacaacgtgagagataagaaggccctacttaggctcttagatcagcatgaccagcgaggattaggaggaattcttttagaagacatagaagaagcactgcccaattcccagaaagctgtcaaggctttgggggaccagatactatttgtaaatcgtcccgataagaagaaaatacttttcttcaatgataagagctgtcagttttctgtggatgaagaatttcagaaactgtggaggagtgtcactgtagattccatggacgaggagaaaattgaagaatatctgaagcgacagggtatttcttccatgcaggaatctggaccaaagaaagtggcccctattcagagaaggaaaaagcctgcttcacagaaaaagcgacgctttaagactcataacgaacacttggctggagtgctgaaggattactctgacattacttccagcaaatagggaacagttttgccctggaacagagttacagatacacaatcaagagtgttcttgctgatgctcggggtctgaagactgtcttcctatctgcttcttgcggctgaggagaggagcagttcagtttacaaaacaagtgcaaattaccaaactcaaagcttatttgagtagaatgggctcatgggcaatgtgatgttccctgttaaccttctgttactccctgggagaaaggcgctgagcgtggcatgcaggtgtctttgctgtgtttttctccacttctaaatggttcctggttcctttcttcctcgtttgttactttagagcaagtttgcccatgagcccattctactcaaataagctttgagtttggtaatttgcacttgttttgtaactgcactgctcctctcctcagccgcaagatgcagataggaacgacagtcatcataaccac

SEQ ID NO: 1460 - DNA, 952 bp, Homo sapiens
agataagaaggccctacttaggcttgaaagcatacttcccatctctcacgttgtacttgggcttgaaagcatacttcccatctatgctttcaagcccaagtacaacgtgagagataagaaggccctacttaggctcttagatcagcatgaccagcgaggattaggaggaattcttttagaagacatagaagaagcactgcccaattcccagaaagctgtcaaggctttgggggaccagatactatttgtaaatcgtcccgataagaagaaaatacttttcttcaatgataagagctgtcagttttctgtggatgaagaatttcagaaactgtggaggagtgtcactgtagattccatggacgaggagaaaattgaagaatatctgaagcgacagggtatttcttccatgcaggaatctggaccaaagaaagtggcccctattcagagaaggaaaaagcctgcttcacagaaaaagcgacgctttaagactcataacgaacacttggctggagtgctgaaggattactctgacattacttccagcaaatagggaacagttttgccctggaacagagttacagatacacaatcaagagtgttcttgctgatgctcggggtctgaagactgtcttcctatctgcttcttgcggctgaggagaggagcagttcagtttacaaaacaagtgcaaattaccaaactcaaagcttatttgagtagaatgggctcatgggcaatgtgatgttccctgttaaccttctgttactccctgggagaaaggcgctgagcgtggcatgcaggtgtctttgctgtgtttttctccacttctaaatggttcctggttcctttcttcctcgtttgttactttagagcaagtttgcccatagtcttgaatgcaatatttgtttattccaaaagaacatatttataataaaatcactgtagaaggatttt

SEQ ID NO: 1461 - DNA, 1398 bp, Homo sapiens
gcggtggctgccgggactgagctcctagcacccgatcgggaagtggcgggcggagtcccgggtccagtcgccgcctcagctaccgccgctgccgccgccgccgccgccaccgccagtggtgagaccccgacctggcgggtcagcgctgggcgtgcgtgcgggcaggcgggggcgctgacgagaagcaggaagagggtgcagtgccggcgtgggcggccggccgaggcggaggcgcaggaagggggcggcgagtcgtgcgaggctgcccttctcactcagcattatggatccaagcctgttgagagaaagggagctgttcaaaaaacgagctctttctactcctgtagtagaaaaacgttcagcatcttctgagtcatcatcatcatcgtcaaagaagaagaaaacaaaggtagaacatggaggatcgtcaggctctaaacaaaattctgatcatagcaatggatcatttaacttgaaagctttgtcaggaagctctggatataagtttggtgttcttgctaagattgtgaattacatgaagacacggcatcagcgaggagatacgcatcctctaaccttagatgaaattttggatgaaacacaacatttagatattggactcaagcagaaacaatggctaatgactgaggctttagtcaacaatcccaaaattgaagtaatagatgggaagtatgctttcaagcccaagtacaacgtgagagataagaaggccctacttaggctcttagatcagcatgaccagcgaggattaggaggaattcttttagaagacatagaagaagcactgcccaattcccagaaagctgtcaaggctttgggggaccagatactatttgtaaatcgtcccgataagaagaaaatacttttcttcaatgataagagctgtcagttttctgtggatgaagaatttcagaaactgtggaggagtgtcactgtagattccatggacgaggagaaaattgaagaatatctgaagcgacagggtatttcttccatgcaggaatctggaccaaagaaagtggcccctattcagagaaggaaaaagcctgcttcacagaaaaagcgacgctttaagactcataacgaacacttggctggagtgctgaaggattactctgacattacttccagcaaatagggaacagttttgccctggaacagagttacagatacacaatcaagagtgttcttgctgatgctcggggtctgaagactgtcttcctatctgcttcttgcggctgaggagaggagcagttcagtttacaaaacaagtgcaaattaccaaactcaaagcttatttgagtagaatgggctcatgggcaatgtgatgttccctgttaatgcgaacctatgagggatcctctagatcgcctcccc

SEQ ID NO: 1462 - DNA, 981 bp, Homo sapiens
gcggtggctgccgggactgagctcctagcacccgatcgggaagtggcgggcggagtcccgggtccagtcgccgcctcagctaccgccgctgccgccgccgccgccgccaccgccagtggtgagaccccgacctggcgggtcagcgctgggcgtgcgtgcgggcaggcgggggcgctgacgagaagcaggaagagggtgcagtgccggcgtgggcggccggccgaggcggaggcgcaggaagggggcggcgagtcgtgcgaggctgcccttctcactcagcattatggatccaagcctgttgagagaaagggagctgttcaaaaaacgagctctttctactcctgtagtagaaaaacgttcagcatcttctgagtcatcatcatcatcgtcaaagaagaagaaaacaaaggtagaacatggaggatcgtcaggctctaaacaaaattctgatcatagcaatggatcatttaacttgaaagctttgtcaggaagctctggatataagtttggtgttcttgctaagattgtgaattacatgaagacacggcatcagcgaggagatacgcatcctctaaccttagatgaaattttggatgaaacacaacatttagatattggactcaagcagaaacaatggctaatgactgaggctttagtcaacaatcccaaaattgaagtaatagatgggaagtatgctttcaagcccaagtacaacgtgagagataagaaggccctacttaggctcttagatcagcatgaccagcgaggattaggaggaattcttttagaagacatagaagaagcactgcccaattcccagaaagctgtcaaggctttgggggaccagatactatttgtaaatcgtcccgataagaagaaaatacttttcttcaatgataagagctgtcagttttctgtggatgaaggctggagtgcaatggcgtgatctcggctcaccgcaacctctgccttccggactca

SEQ ID NO: 1463 - DNA, 391 bp, Homo sapiens
acaaggatgccaacttccaccacttttatttaacatagtattagatgtcacagccagagcaaccaggcaaaagaacgaaataaaaggcatctgtgttaggctgttcttacattgctataaagaaatacctgagactaggtaatttataaacaaaagaggttcacttggctcagagttctgcagagtgtcccagcatggctccagcatctgcttctggcgaaagcctcagaacctttacaatcatggcagaatgtaaagcagaagcagacatattattggtgagagtgagagcaagaaagaaggagaagtgtcacactctttaaacaaccagatttcatgagaactcactgtctcaaggaaagcaccaagttattcatgaaagatctgcact

SEQ ID NO: 1464 - DNA, 253 bp, Homo sapiens
tgacagagacagcgccaatggcgaggatgactcttaagcacatagtggggtttagaaatcttatcccattatttctttacctaggcgcttgtctaagatcaaatttttcaccagatcctctcccctagtatcttcagcacatgctcactgttctccccatccttgtccttcccatgttcattaattcatattgccccgcgcctagtcccattttcacttcctttgacgctcctagtagttttgttaagtctta

SEQ ID NO: 1465 - DNA, 791 bp, Homo sapiens
cccgtgtattcattgggaatctcaacactcttgtggtcaagaaatctgatgtggaggcaatcttttcgaagtatggcaaaattgtgggctgctctgttcataagggctttgccttctttcagtatgttaatgagagaaatgcccgggctgctgtagcaggagaggatggcagaatgattgctggccaggttttagatattaacctggctgcagagccaaaatggcttcaattctaagagtggacagcggggatcttccaagtctggaaagttgaaaggagatgaccttcaggccattaagagggagctgacccagataaaacaaaaagtggattctttcctggaaaacctggaaaaaattgaaaaggaacagagcaaacaagcagtagagatgaacaatgataagtcagaagaggagcagagcagcagctccgtgaagaaagatgagactaatgtgaagatggagtctgaggggggtgcagatgactctgctgaggagggggacctactggatgatgatgataatgaagatggggggatgaccagctggagttgatcaaggatgatgactcttaagcacatagtggggtttagaaatcttatcccattatttctttacctaggcgcttgtctaagatcaaatttttcaccagatcctctcccctagtatcttcagcacatgctcactgttctccccatccttgtccttcccatgttcattaattcatattgccccgcgcctagtcccattttcacttcctttgacgctcctagtagttttgttaagtctta

SEQ ID NO: 1466 - DNA, 473 bp, Homo sapiens
atttagatcagtgttctgtgatgggcaaaagatccctgaaaatcctctcatgtgtgattatgtgaaatataaaggctaacaactaaaataattgcctttagatatagtaatatataactttagtcaacaaatatgcactgtgtatcttcttgtgccagatatggtactgggtaatgggtacagtatttcaaacaaatctaatattcttactatgatagagcttaaaatctgatggggttgtaaattatagtccgtacggagatagattgggcacactttggtaactgattagagatgaggggccagggagaaagggttatagaagattatgtagaagttttgctcttgagcaactgagaggatgaggttggcattaacttctttagggaatacaacaagactgtcaaatctggagaaagacacttttcagctgttgaataatttgctgaggggggtacatatggacatttgtt

SEQ ID NO: 1467 - DNA, 350 bp, Homo sapiens
ggaccagggccacccttcaatctctcaccattcatttaaccaagtagtatccctgtgcccaaactgggccagcaagtcctgccaccccattcactacctgcagggacaggagcccacttccatcaagaggactttctgaaatccaaccttggcccctgcctctggctaggccacttggttctcccctcccccagcccagaacctgtgttgagactttgggtgtggctgggaataggaggtggtagggtcagaggtggcttatttccacctctaaggaggagaattcctccacaaccagtgcagacctgaggttgggactcaggcttgcataatgaaggcttagtcacagg

SEQ ID NO: 1468 - DNA, 416 bp, Homo sapiens
aaaaaaaaaaaaaaggaaatgtattgtctggcagttctggaggctggagttcaagatcaaggtgtctgcagggctgtgctccttctgaaggttccagggaaggatgtattcccaaccttgttctaacttctggtggttccttggcagcataactccaacctccatctggtgttctgtgtgtgtgcttgtgtccaaatttcccctttttgtaaggacatcagatatactggattagggacccactctacttcagcagggccccatcttaacggattacatttacgatgaccctatatccaaatgagcagctgggtgcagtggctcatgcctgtaatcccagcactttgggaggtggaggcgggcagatcatgaggtcaggagttcaagaccagcctggccaatatggcgaaaccccg

SEQ ID NO: 1469 - DNA, 858 bp, Homo sapiens
tagcttcaattcattccctggccagtcttgtttgatctcttcccttatctactccctatcatcttggattattttgaaggaaatccaagacatcaatttattcataaatattttagtattaagattaatttttgttgttatttcctaattatcttttagctggcctgtagacttatcattttatttatattgttttttctcagcggcgggatttttcagcctgatcttttcctgagaagcacgtgataaactttccgcaggccctgacatataacatggttctttgaccacaacagaagtatattagaaatcagtagttaaaaaaaacaaaaaaacaaaaactatctggaaaattcccaaatatttggtcattgactaacacacaaaaaataaatcaaaagagaaattagaaagtattttaaactgagtaaaatgaaaacacagcatatcatttgtgaatgcagctaaagaaatagttagaagtttatggcaccaaacacctctactagaaaagaatggcttcagctcctagcctaagaaactaggaaaagaggagcaaatgaaattcagaagagtggaagaaaggagatggtaaagatcagagtggtattcagtgagacagaaatacagaaagtcagtgaaactcaaaactggttctttgaggagactgtaaaattgataaacctttaggggtagaaaaggagacgatacaaattaaaaataacagggccaggcgcggtggctcacgcctgtaatcctagcactttgggaggccgaggcaggcagatcacttgaggtcaggagtttgagaccagcctggccaacatggtgaaaccccgtcctactaaaaatacaaaa

SEQ ID NO: 1470 - DNA, 294 bp, Homo sapiens
gacaaacttattttaaaaataacatggaaaggcaaaggaactataataacccaaaccattttgtaacagaacaaagttggaagatttctactaatttcaaaacttgcagtaaagctatagtaatcaagacattatggtattgatacatggatagatgtatagatcaatggaatagattagagtccagaaatagaccatacctatatggttagttgagttttgactaatgtgtcaaggcaactcagtagagaaaggatttcatcaatggtgctgaaacaattagatatctatatg

SEQ ID NO: 1471 - DNA, 103 bp, Homo sapiens
tcaatttagaggctcagaaaataaagagtatctgagccttgggggtatcctgtggtttgctggcaaatggcaccactagtcagatcactgcagactcagatgg

SEQ ID NO: 1472 - DNA, 934 bp, Homo sapiens
tgactcaagcatggttttggggccagcatcctcagtttctatcttcctatctctctgggtgacggcccaatcttgctgggcatgcaatgtcactatttctgttctcaattccagcagcttcctttcattcaacgaatacaattcttttactctgctcttttctaggttgaagtctaatttagtatctgttcggactttaatcacttcatccattacttgttttaactgatgtagtttgagttttattttctcacgttctgctctgagggctgaaaattcactcttctccaaagtaatcatatcgtttttcacattcacagtctgagacattatttgctgaagagcgatctcctgcttcatcttggtggccatatctttgtagacgatgtccacgttggcctccagtacctggaccaatgcagacacaatgatttctgcttgctgagtagcaaacccatggtcttccagaaagcacactaaggaacgagtgtcaaaggagagcttcctactcccagaagagctgaaatctctcctgtgctccagctgcaggtatccagcagactcctgcaggaagtgcgtatgggcaccatgctgaagcatgggtgaagggcgctggcagcagcagcgatgcccagggcaaggccccacaggcacatccacgcgccgctttgtccagccagtggggcggcatacccaaggcatgagtgctcccagtccccaggctgccggcacggagcggcggcggtcaagtgcagggagggcacgaaatggtaaattttatgttgtgtatattttaccacaattaaaaaaaatcatttcttcaggtagaccagccgcatttcatgtgttcaacagctacatgcggccagtagttaccatactagacggtgtcaagtagaacactttccccactgcagaaagtggtactggacag

SEQ ID NO: 1473 - DNA, 679 bp, Homo sapiens
tgactcaagcatggttttggggccagcatcctcagtttctatcttcctatctctctgggtgacggcccaatcttgctgggcatgcaatgtcactatttctgttctcaattccagcagcttcctttcattcaacgaatacaattcttttactctgctcttttctaggttgaagtctaatttagtatctgttcggactttaatcacttcatccattacttgttttaactgatgtagtttgagttttattttctcacgttctgctctgagggctgaaaattcactcttctccaaagtaatcatatcgtttttcacattcacagtctgagacattatttgctgaagagcgatctcctgcttcatcttggtggccatatctttgtagacgatgtccacgttggcctccagtacctggaccaatgcagacacaatgatttctgcttgctgagtagcaaacccatggtttgaggtcaggagttcgagactagcttgaccaacgtggtgaaaccccgtctctactaaaaatacaaaaattagctgggcgtggtggcgtgcacctgtaggcccagctacttgggagactgagacaggagaatcacttgaacccaggaggtggaggttgcactgagccaagatcgcgccacggcactctagcctgggtgacagagcaagactcaaaaaa

SEQ ID NO: 1474 - DNA, 454 bp, Homo sapiens
gttcccagccacacccgccaacagaggaggaaggtgctggtactgatgtccccacccgagagtctgtcctggccttggttttccacagtgagggctcgttctaatgttgcacaatgtcatactcagatatcactgtgacctgttactatgctttagaacccgagaggcctctgttcacatggcagcatgtgtgagtggatgctcccggagcaggtggagtggtggcgctggatagcggtaagagcgggggctccaaaggcagaacttccagcttcacatctcagctctgcacctgctcgctgtatgactttagcaagcaactggatctttctaagcgtcagcttcgttgtcttaaatggtagttggtaataatagtccatgcttcgtagcatcacttttgtgttcaagcagaatgctgagcacactggcaaataataagagctcgtaaatatta

SEQ ID NO: 1475 - DNA, 1522 bp, Homo sapiens
agagaagtgagaccctgcagctgagggagcatcatggcagtgtttctggaggccaaggatgcccattcggtcctgaaacgattccctcgtgccaatgagttcctggaggagctgcgccagggcaccatcgagcgagagtgcatggaggagatctgcagctacgaggaggtcaaggaagtgtttgagaacaaagagaaaacgatggagttctggaaagggtacccaaatgcagtctactctgtccgagacccctcgcagagctcagatgccatgtatgtggtggtaccccttctgggggtggcactgctgattgtcatcgccttgttcatcatctggaggtgccagctgcagaaagcgacccgtcaccacccctcctatgctcagaaccggtacctagccagtcgcgccgggcacaccctcccccgggtcatggtgtaccggggtactgtgcatagccaaggggagccttctgggcaccgagaggcagcgagcagcccccaggtggtgctggggcccagtcgggggggcaggaccacagtccggctagagagcaccctctacctccctgagctctctctctccagactgtccagcaccacccctcccccctcctacgaggaggtgactgcgccccaagagagcagcagtgaggaggccagcgtgtcttacagtgacccacccccaaagtacgaggagatagtggccgccaaccctggcgctgacaagtagtgggacgtttgtgccctgtcctggatgaacgcctctttccgaggtctcctattttctttttaactttttaaagactgtgccaccacaaaacagccttagcctccttgttgccaaataattccctaactgtggagttttaggaagtcagttgtcagagacaggtggggagggtgggggtagggaccacgcatgagtcgaagcccccgggaagagccaaaggccaaagtgcccaactctttgggatgacccccaagcctccaacatcctgtctttccatcaggaactggcttctcttatgccaaaggaataaccccattgagttgattgtggccagaatgtccacaggcctggcctgggggctgtgggactggctggaggcctgcctgtgtctagagctctgggcctcaggggtaagggaaggaagccagcctttcagcaccccttaccctccacagttctgtgatttctgtccttgcttacatttggaggacagggacaaggactgagcaaaaacaaaatgaaaaaatcatgacaaataaataattaacacaatagaacaaaactctagcacccgggccgttcataggaggccaagggaaatttatcacatggatctgtgatgtccgcctcccctaaaacctgtccccacactcctggaaggaggacagggtgtgtgaaggatgagggccagagggctgggtggcagagtttcctcttccacattgaccaaggggcccacgtggactctgccattcagtttctagtgtgcttgtctctccagacatgtggacca

SEQ ID NO: 1476 - DNA, 1825 bp, Homo sapiens
atcgaaatcctgtccctcccccgcttcccatcgcctccggttttcaaaatgaaagcacaagtgcaagagtggggtgcacaggtgcctggcgtgtacacaccacccacacagctgcgtccagccctggctgagggagacgcagtgctgagcagtcagccccgggaggcctctttttcaacttccaatcccactgccatgaatgtgaattccttagggtgcttccaaaaacaggagtctgcctgatctgttggacattgcctttttggtagcccgaatatgaggaattcaggacaggaaagtgtctttttgtcaagtagtcagagccggatgcttcccctctcccagtgggtggagcatcgcaacccccagccagagttgatcttttgacaacccagtgacatcccatgagaaggaagaaaaaaaattcaacactgcctctagattgttattttgtccaagagagagatcatggagagagtctctctcgctcacggaggctctgtctttctaggagtatgtgtgtgtgctgtctcatgtgtggacactcacagttgaggctgagatggatatcttggcagcagagctgctggtctaggtggcttttcagcttgacaagtaatgaagctccatttcaggacttcatcgattccgaaacaagcacagccccccaccccccgccacggaactctactaatactaatcactataattagctaatttaaaagtacggtaatcagactgcttgcaactattttaaaagcccattaatttgaagcccactacttcagaacttcgagaaaatcacaacttaagacaattcacagtagctgtgattctggctacataaaaatatttgaaatattcttccctttagtcaatgttcagggtcttttgtgtaagagaaatccagtttaaaatgagtacccttttcaaagaaaaggctcaagatattaaggatcccttcaccgtgccttcagctttgcagttcagcacttctcgtatgtacagggtgatctcttgttctctctccatcacagggatgttggatattgcagcctttcactctactccgttatttatcctgtggaataacatagtttgtgaactagactgcaatttaaactaatacacatgatgtatctttctaaatattctgtaaagcagatgcttcgctgtcagactggccgctccatcattcgcctccaaatattcaaacgtgggagcttttcctttcagactgtgggcagcgagtctctctctagcaagaatttatctgacaaacatacccaaatagcacaccctctcaagctcaatgcctcaacagttgtttcactgtactgatatctgactgctgaacagtgcctgcccttcacccacccccagcccgagcattaacacagatcttcaggattgggacaaatcccccagctgcttttgcctctcaatccatctcccctcatcgataccaatttcccaggcctgaacacatctgttattttgctctgacattgtgaatttgtgacagtggaaaccctgatatgtgcaactgagcttatagaaataattactgtgaaatggattaattttgataccactttaaactgtgcttgtattcatgtgttgacccttgtcagctgggaaatctgtacattcagtatatgtcagcatttcattggagcctgggggcaacagacaaacttgcttctgatttctctctctctctctttctttttataattgttgaatttggctgttacattttgtctccttctttacaagaaaacaataataataaagagcaaatggcatccacttgaaaaaagtc

SEQ ID NO: 1477 - DNA, 1053 bp, Homo sapiens
agagaagtgagaccctgcagctgagggagcatcatggcagtgtttctggaggccaaggatgcccattcggtcctgaaacgattccctcgtgccaatgagttcctggaggagctgcgccagggcaccatcgagcgagagtgcatggaggagatctgcagctacgaggaggtcaaggaagtgtttgagaacaaagagaaaacgatggagttctggaaagggtacccaaatgcagtctactctgtccgagacccctcgcagagctcagatgccatgtatgtggtggtaccccttctgggggtggcactgctgattgtcatcgccttgttcatcatctggaggtgccagctgcagaaagcgacccgtcaccacccctcctatgctcagaaccgcagatgcttcgctgtcagactggccgctccatcattcgcctccaaatattcaaacgtgggagcttttcctttcagactgtgggcagcgagtctctctctagcaagaatttatctgacaaacatacccaaatagcacaccctctcaagctcaatgcctcaacagttgtttcactgtactgatatctgactgctgaacagtgcctgcccttcacccacccccagcccgagcattaacacagatcttcaggattgggacaaatcccccagctgcttttgcctctcaatccatctcccctcatcgataccaatttcccaggcctgaacacatctgttattttgctctgacattgtgaatttgtgacagtggaaaccctgatatgtgcaactgagcttatagaaataattactgtgaaatggattaattttgataccactttaaactgtgcttgtattcatgtgttgacccttgtcagctgggaaatctgtacattcagtatatgtcagcatttcattggagcctgggggcaacagacaaacttgcttctgatttctctctctctctctttctttttataattgttgaatttggctgttacattttgtctccttctttacaagaaaacaataataataaagagcaaatggcatccacttgaaaaaagtc

SEQ ID NO: 1478 - DNA, 1007 bp, Homo sapiens
gagtcgcccttgctcccccagcctcagccctcgggaggcgcagcgtcagggcgggcggcagcacagaaaccccccgcgccgctagagggaccctcgcagcagctgcgcgggcgacctcgcggtcacgtgcggcaagggcgggaccaaacgagcgtccggccaatcgactatgccgtcggcgagcgtgatagccaacaggaaccgggagcggggtcccgggactgggaagaaacggcggccgggagggggctccggggaccatggggctcctgaccattctgaagaagatgaagcagaaagagcgggagctgcgactgctcatgcttggcctggacaatgctggaaagacaaccatcctgaagaagttcaatggggaggacatcgacaccatctccccaacgctgggcttcaacatcaagaccctggagcaccgaggattcaagctgaacatctgggatgtgggtggccagaagtccctgcggtcctactggcggaactactttgagagcaccgatggcctcatctgggtagtggacagcgcagaccgccagcgcatgcaggactgccagcgggagctccagagcctgctggtggaggagcgcctggccggagcaaccctcctcatctttgctaataagcaggacctgcctggagcactgtcctctaacgccatccgcgaggccctggagctggactccatccgcagccaccactggtgcatccagggctgcagcgccgtcaccggggagaacctgctgccggccaaactaacactccccctcctccaccccagcctgctgctgctactgctgcccgctgctgctctgtggccacccggctcccatggcgggagggctgtgccctggctgtctctctggctcctgacctggcctttggctaccataccaagaagagagggctgggcggggaggagctgctactgctgctaccgaggctgtgggcctcatccttcactcagttgtgaaataaaccgctccttgccccga

SEQ ID NO: 1479 - DNA, 1207 bp, Homo sapiens
gagtcgcccttgctcccccagcctcagccctcgggaggcgcagcgtcagggcgggcggcagcacagaaaccccccgcgccgctagagggaccctcgcagcagctgcgcgggcgacctcgcggtcacgtgcggcaagggcgggaccaaacgagcgtccggccaatcgactatgccgtcggcgagcgtgatagccaacaggaaccgggagcggggtcccgggactgggaagaaacggcggccgggagggggctccggggaccatggggctcctgaccattctgaagaagatgaagcagaaagagcgggagctgcgactgctcatgcttggcctggacaatgctggaaagacaaccatcctgaagaagttcaatggggaggacatcgacaccatctccccaacgctgggcttcaacatcaagaccctggagcaccgaggattcaagctgaacatctgggatgtgggtggccagaagtccctgcggtcctactggcggaactactttgagagcaccgatggcctcatctgggtagtggacagcgcagaccgccagcgcatgcaggactgccagcgggagctccagagcctgctggtggaggagcgcctggccggagcaaccctcctcatctttgctaataagcaggacctgcctggagcactgtcctctaacgccatccgcgaggccctggagctggactccatccgcagccaccactggtgcatccagggctgcagcgccgtcaccggggagaacctgctgccgggcatcgactggctcctggatgacatttccagccgcattttcacagctgactgaaccactccagatgccccccacctagcagtccaggtccctcaaccttcaccaaacactacccatggggggttgggagtcagccggccaaactaacactccccctcctccaccccagcctgctgctgctactgctgcccgctgctgctctgtggccacccggctcccatggcgggagggctgtgccctggctgtctctctggctcctgacctggcctttggctaccataccaagaagagagggctgggcggggaggagctgctactgctgctaccgaggctgtgggcctcatccttcactcagttgtgaaataaaccgctccttgccccgaaaaaaaaacaaacaacataaaaggcggcaacaaaaaaccacaagagggcaccaaaaagaaccc

SEQ ID NO: 1480 - DNA, 1144 bp, Homo sapiens
gagtcgcccttgctcccccagcctcagccctcgggaggcgcagcgtcagggcgggcggcagcacagaaaccccccgcgccgctagagggaccctcgcagcagctgcgcgggcgacctcgcggtcacgtgcggcaagggcgggaccaaacgagcgtccggccaatcgactatgccgtcggcgagcgtgatagccaacaggaaccgggagcggggtcccgggactgggaagaaacggcggccgggagggggctccggggaccatggggctcctgaccattctgaagaagatgaagcagaaagagcgggagctgcgactgctcatgcttggcctggacaatgctggaaagacaaccatcctgaagaagttcaatggggaggacatcgacaccatctccccaacgctgggcttcaacatcaagaccctggagcaccgaggattcaagctgaacatctgggatgtgggtggccagaagtccctgcggtcctactggcggaactactttgagagcaccgatggcctcatctgggtagtggacagcgcagaccgccagcgcatgcaggactgccagcgggagctccagagcctgctggtggaggagcgcctggccggagcaaccctcctcatctttgctaataagcaggacctgcctggagcactgtcctctaacgccatccgcgaggccctggagctggactccatccgcagccaccactggtgcatccagggctgcagcgccgtcaccggggagaacctgctgccgggcatcgactggctcctggatgacatttccagccgcattttcacagctgactgaaccactccagatgccccccacctagcagtccaggtccctcaaccttcaccaaacactacccatggggggttgggagtcagccggccaaactaacactccccctcctccaccccagcctgctgctgctactgctgcccgctgctgctctgtggccacccggctcccatggcgggagggctgtgccctggctgtctctctggctcctgacctggcctttggctaccataccaagaagagagggctgggcggggaggagctgctactgctgctaccgaggctgtgggcctcatccttcactcagttgtgaaataaaccgctccttgccccga

SEQ ID NO: 1481 - DNA, 1037 bp, Homo sapiens
gagtcgcccttgctcccccagcctcagccctcgggaggcgcagcgtcagggcgggcggcagcacagaaaccccccgcgccgctagagggaccctcgcagcagctgcgcgggcgacctcgcggtcacgtgcggcaagggcgggaccaaacgagcgtccggccaatcgactatgccgtcggcgagcgtgatagccaacaggaaccgggagcggggtcccgggactgggaagaaacggcggccgggagggggctccggggaccatggggctcctgaccattctgaagaagatgaagcagaaagagcgggagctgcgactgctcatgcttggcctggacaatgctggaaagacaaccatcctgaagaagttcaatggggaggacatcgacaccatctccccaacgctgggcttcaacatcaagaccctggagcaccgaggattcaagctgaacatctgggatgtgggtggccagaagtccctgcggtcctactggcggaactactttgagagcaccgatggcctcatctgggtagtggacagcgcagaccgccagcgcatgcaggactgccagcgggagctccagagcctgctggtggaggagcgcctggccggagcaaccctcctcatctttgctaataagcaggacctgcctggagcactgtcctctaacgccatccgcgaggccctggagctggactccatccgcagccaccactggtgcatccagggctgcagcgccgtcaccggggagaacctgctgccgggcatcgactggctcctggatgacatttccagccgcattttcacagctgactgaaccactccagatgccccccacctagcagtccaggtccctcaaccttcaccaaacactacccatggggggttgggagtcagccggccaaactaacactccccctcctccactctcacccagctgtgtgtattgtgccgtgtgtctgggccccgtcctgcgggggttgccgggctctctgccgcggttgtcctccaaaggggggaggcggggacgggggcccac

SEQ ID NO: 1482 - DNA, 1067 bp, Homo sapiens
gagtcgcccttgctcccccagcctcagccctcgggaggcgcagcgtcagggcgggcggcagcacagaaaccccccgcgccgctagagggaccctcgcagcagctgcgcgggcgacctcgcggtcacgtgcggcaagggcgggaccaaacgagcgtccggccaatcgactatgccgtcggcgagcgtgatagccaacaggaaccgggagcggggtcccgggactgggaagaaacggcggccgggagggggctccggggaccatggggctcctgaccattctgaagaagatgaagcagaaagagcgggagctgcgactgctcatgcttggcctggacaatgctggaaagacaaccatcctgaagaagttcaatggggaggacatcgacaccatctccccaacgctgggcttcaacatcaagaccctggagcaccgaggattcaagctgaacatctgggatgtgggtggccagaagtccctgcggtcctactggcggaactactttgagagcaccgatggcctcatctgggtagtggacagcgcagaccgccagcgcatgcaggactgccagcgggagctccagagcctgctggtggaggagcgcctggccggagcaaccctcctcatctttgctaataagcaggacctgcctggagcactgtcctctaacgccatccgcgaggccctggagctggactccatccgcagccaccactggtgcatccagggctgcagcgccgtcaccggggagaacctgctgccgggcatcgactggctcctggatgacatttccagccgcattttcacagctgactgaaccactccagatgccccccacctagcagtccagcccagcctgctgctgctactgctgcccgctgctgctctgtggccacccggctcccatggcgggagggctgtgccctggctgtctctctggctcctgacctggcctttggctaccataccaagaagagagggctgggcggggaggagctgctactgctgctaccgaggctgtgggcctcatccttcactcagttgtgaaataaaccgctccttgccccga

SEQ ID NO: 1483 - DNA, 503 bp, Homo sapiens
  misc_feature (42)..(42): n is a, c, g, or t
  misc_feature (52)..(52): n is a, c, g, or t
  misc_feature (71)..(71): n is a, c, g, or t
tttttctttttaaacgcaattccgggggaggttcttgggagntgggaattcnattcggcaagccaacccanttggtgcatccagggctgcagcgccgtcaccggggagaacctgctgccgggcatcgactggctcctggatgacatttccagccgcattttcacagctgactgaaccactccagatgccccccacctagcagtccaggtccctcaaccttcaccaaacactacccatggggggttgggagtcagccggccaaactaacactccccctcctccaccccagcctgctgctgctactgctgcccgctgctgctctgtggccacccggctcccatggcgggagggctgtgccctggctgtctctctggctcctgacctggcctttggctaccataccaagaagagagggctgggcggggaggagctgctactgctgctaccgaggctgtgggcctcatccttcactcagttgtgaaataaaccgctccttgccccga

SEQ ID NO: 1484 - DNA, 1106 bp, Homo sapiens
gagtcgcccttgctcccccagcctcagccctcgggaggcgcagcgtcagggcgggcggcagcacagaaaccccccgcgccgctagagggaccctcgcagcagctgcgcgggcgacctcgcggtcacgtgcggcaagggcgggaccaaacgagcgtccggccaatcgactatgccgtcggcgagcgtgatagccaacaggaaccgggagcggggtcccgggactgggaagaaacggcggccgggagggggctccggggaccatggggctcctgaccattctgaagaagatgaagcagaaagagcgggagctgcgactgctcatgcttggcctggacaatgctggaaagacaaccatcctgaagaagttcaatggggaggacatcgacaccatctccccaacgctgggcttcaacatcaagaccctggagcaccgaggattcaagctgaacatctgggatgtgggtggccagaagtccctgcggtcctactggcggaactactttgagagcaccgatggcctcatctgggtagtggacagcgcagaccgccagcgcatgcaggactgccagcgggagctccagagcctgctggtggaggaggtgggcagctcctaccctttgtgtacatgtatggacgtgtggctgccttctcagcagatgcccagaggggcccgtggccccagagggaaaccagaggcaggatcccttccttctctgggcccccaccatgggaggcccatggtgccagaggcaggacacatgctgtggactgagattgagttaacgtccctgtggtgttactacgtcactaccctgagcatcagtttctatgccttgaaatggtgatgatgacacccacatcactgggctttagggaggataacccaaggccagtatgaagcttcgagaggccatggagcctggctcaagagtctgactctttgctgtgtgacctcagctgggggtggtggcacgcacctatagtcctagctactctggaggctcagacaggaggatcagttgagcccaggaggttgaggctgcagtgagctgtgatcgtgccactgcactccagcctcctgggcgacagagcaagaccctgtctca

SEQ ID NO: 1485 - DNA, 1575 bp, Homo sapiens
gagtcgcccttgctcccccagcctcagccctcgggaggcgcagcgtcagggcgggcggcagcacagaaaccccccgcgccgctagagggaccctcgcagcagctgcgcgggcgacctcgcggtcacgtgcggcaagggcgggaccaaacgagcgtccggccaatcgactatgccgtcggcgagcgtgatagccaacaggaaccgggagcggggtcccgggactgggaagaaacggcggccgggagggggctccggggaccatggggctcctgaccattctgaagaagatgaagcagaaagagcgggagctgcgactgctcatgcttggcctggacaatgctggaaagacaaccatcctgaagaagttcaatggggaggacatcgacaccatctccccaacgctgggcttcaacatcaagaccctggagcaccgaggattcaagctgaacatctgggatgtgggtggccagaagtccctgcggtcctactggcggaactactttgagagcaccgatggcctcatctgggtagtggacagcgcagaccgccagcgcatgcaggactgccagcgggagctccagagcctgctggtggaggagcgcctggccggagcaaccctcctcatctttgctaataagcaggacctgcctggagcactgtcctctaacgccatccgcgaggccctggagctggactccatccgcagccaccactggtgcatccagggctgcagcgccgtcaccggggagaacctgctgccgggcatcgactggctcctggatgacatttccagccgcattttcacagctgactgaaccactccagatgccccccacctagcagtccaggtccctcaaccttcaccaaacactacccatggggggttgggagtcagccggccaaactaacactccccctcctccaccccagcctgctgctgctactgctgcccgctgctgctctgtggccacccggctcccatggcgggagggctgtgccctggctgtctctctggctcctgacctggcctttggctaccataccaagaagagagggctgggcggggaggagctgctactgctgctaccgaggctgtgggcctcatccttcactcagttgtgaaataaaccgctccttgccccgaaaaaaaaaaaaaaaaaaaaaaaaaaaaaaaaaaaaaaaaaaaaaaaaaaaaaaaaaaaaaaaaaaaaaaaaaaaaaaaacaaaaaaaaaaaaaaaaaaaaaaaagaaaaaaaaaaaaaaacaaaagaggaggcgcggaacataacaaacaaccaacaccacgcgaccacgacaaacaaaaacaccaccacaaccaggcaacaacaaaaagaaacaaagagcgagccaccacaatgaggaggacaagcaaacaaaacagcacgaacgcgccagcacacaataatcagcaaaacacaaccacgcgaaaagaacaaaacaccagcgccaagacgactacaacaaaaaaacacaccaagaagggggaaccaaaaggaaacacctaaccaaaaaacaaccggcacaacagaaaaaaaagacaagatcagcaggaaa

SEQ ID NO: 1486 - DNA, 1052 bp, Homo sapiens
cagacacatacatttaggtgacactattgaactcgaaggaatccacaagtttgtacaacaaaagcaggccttgtaaaccgaccgcccagttaacctataacgggtcctaaggtaccgaaggcctggtcgcggaattcggcacgagggcgggagctgcgactgctcatgcttggcctggacaatgctggaaagacaaccatcctgaagaagttcaatggggaggacatcgacaccatctccccaacgctgggcttcaacatcaagaccctggagcaccgaggattcaagctgaacatctgggatgtgggtggccagaagtccctgcggtcctactggcggaactactttgagagcaccgatggcctcatctgggtagtggacagcgcagaccgccagcgcatgcaggactgccagcgggagctccagagcctgctggtggaggagcgcctggccggagcaaccctcctcatctttgctaataagcaggacctgcctggagcactgtcctctaacgccatccgcgaggccctggagctggactccatccgcagccaccactggtgcatccagggctgcagcgccgtcaccggggagaacctgctgccgggcatcgactggctcctggatgacatttccagccgcattttcacagctgactgaaccactccagatgccccccacctagcagtccaggtccctcaaccttcaccaaacactacccatggggggttgggagtcagccggccaaactaacactccccctcctccaccccagcctgctgctgctactgctgcccgctgctgctctgtggccacccggctcccatggcgggagggctgtgccctggctgtctctctggctcctgacctggcctttggctaccataccaagaagagagggctgggcggggaggagctgctactgctgctaccgaggctgtgggcctcatccttcactcagttgtgaaataaaccgctccttgccccgaaaaaaaaacaaacaacataaaaggcggcaacaaaaaaccacaagagggcaccaaaaagaaccc

SEQ ID NO: 1487 - DNA, 1063 bp, Homo sapiens
gagtcgcccttgctcccccagcctcagccctcgggaggcgcagcgtcagggcgggcggcagcacagaaaccccccgcgccgctagagggaccctcgcagcagctgcgcgggcgacctcgcggtcacgtgcggcaagggcgggaccaaacgagcgtccggccaatcgactatgccgtcggcgagcgtgatagccaacaggaaccgggagcggggtcccgggactgggaagaaacggcggccgggagggggctccggggaccatggggctcctgaccattctgaagaagatgaagcagaaagagcgggagctgcgactgctcatgcttggcctggacaatgctggaaagacaaccatcctgaagaagttcaatggggaggacatcgacaccatctccccaacgctgggcttcaacatcaagaccctggagcaccgaggattcaagctgaacatctgggatgtgggtggccagaagtccctgcggtcctactggcggaactactttgagagcaccgatggcctcatctgggtagtggacagcgcagaccgccagcgcatgcaggactgccagcgggagctccagagcctgctggtggaggaggccctggagctggactccatccgcagccaccactggtgcatccagggctgcagcgccgtcaccggggagaacctgctgccgggcatcgactggctcctggatgacatttccagccgcattttcacagctgactgaaccactccagatgccccccacctagcagtccaggtccctcaaccttcaccaaacactacccatggggggttgggagtcagccggccaaactaacactccccctcctccaccccagcctgctgctgctactgctgcccgctgctgctctgtggccacccggctcccatggcgggagggctgtgccctggctgtctctctggctcctgacctggcctttggctaccataccaagaagagagggctgggcggggaggagctgctactgctgctaccgaggctgtgggcctcatccttcactcagttgtgaaataaaccgctccttgccccga

SEQ ID NO: 1488 - DNA, 600 bp, Homo sapiens
  misc_feature (22)..(22): n is a, c, g, or t
agggtagcagctccgtcccggncccagccctttcttgttggtatggtagccaaagcgcctggccggagcaaccctcctcatctttgctaataagcaggacctgcctggagcactgtcctctaacgccatccgcgaggccctggagctggactccatccgcagccaccactggtgcatccagggctgcagcgccgtcaccggggagaacctgctgccgggcatcgactggctcctggatgacatttccagccgcattttcacagctgactgaaccactccagatgccccccacctagcagtccaggtccctcaaccttcaccaaacactacccatggggggttgggagtcagccggccaaactaacactccccctcctccaccccagcctgctgctgctactgctgcccgctgctgctctgtggccacccggctcccatggcgggagggctgtgccctggctgtctctctggctcctgacctggcctttggctaccataccaagaagagagggctgggcggggaggagctgctactgctgctaccgaggctgtgggcctcatccttcactcagttgtgaaataaaccgctccttgccccga

SEQ ID NO: 1489 - DNA, 1114 bp, Homo sapiens
gagtcgcccttgctcccccagcctcagccctcgggaggcgcagcgtcagggcgggcggcagcacagaaaccccccgcgccgctagagggaccctcgcagcagctgcgcgggcgacctcgcggtcacgtgcggcaagggcgggaccaaacgagcgtccggccaatcgactatgccgtcggcgagcgtgatagccaacaggaaccgggagcggggtcccgggactgggaagaaacggcggccgggagggggctccggggaccatggggctcctgaccattctgaagaagatgaagcagaaagagcgggagctgcgactgctcatgcttggcctggacaatgctggaaagacaaccatcctgaagaagttcaatggggaggacatcgacaccatctccccaacgctgggcttcaacatcaagaccctggagcaccgaggattcaagctgaacatctgggatgtgggtggccagaagtccctgcggtcctactggcggaactactttgagagcaccgatggcctcatctgggtagtggacagcgcagaccgccagcgcatgcaggactgccagcgggagctccagagcctgctggtggaggagcgcctggccggagcaaccctcctcatctttgctaataagcaggacctgcctggagcactgtcctctaacgccatccgcgaggccctggagctggactccatccgcagccaccactggtgcatccagggctgcagcgccgtcaccggggagaacctgctgccgggcatcgactggctcctggatgacatttccagccgcattttcacagctgactgaaccactccagatgccccccacctagcagtccaggtccctcaaccttcaccaaacactacccatggggggttgggagtcagcccagcctgctgctgctactgctgcccgctgctgctctgtggccacccggctcccatggcgggagggctgtgccctggctgtctctctggctcctgacctggcctttggctaccataccaagaagagagggctgggcggggaggagctgctactgctgctaccgaggctgtgggcctcatccttcactcagttgtgaaataaaccgctccttgccccga

SEQ ID NO: 1490 - DNA, 573 bp, Homo sapiens
tctaaacagggtagcagctctccccgcccgcctggccggagcaaccctcctcatctttgctaataagcaggacctgcctggagcactgtcctctaacgccatccgcgaggccctggagctggactccatccgcagccaccactggtgcatccagggctgcagcgccgtcaccggggagaacctgctgccgggcatcgactggctcctggatgacatttccagccgcattttcacagctgactgaaccactccagatgccccccacctagcagtccaggtccctcaaccttcaccaaacactacccatggggggttgggagtcagccggccaaactaacactccccctcctccaccccagcctgctgctgctactgctgcccgctgctgctctgtggccacccggctcccatggcgggagggctgtgccctggctgtctctctggctcctgacctggcctttggctaccataccaagaagagagggctgggcggggaggagctgctactgctgctaccgaggctgtgggcctcatccttcactcagttgtgaaataaaccgctccttgccccga

SEQ ID NO: 1491 - DNA, 721 bp, Homo sapiens
cggaggcgtcgaatggcctcagtggaaaatatgggtggggaggacacacaggaaaacgacggtaagaacacagcagccgggcagggctccatgctaacactccgcagatggcctcagaacgcctccgggaggcgttgaatggccggaggcgttgaatggccggaggcgttgaatggcgcctggccggagcaaccctcctcatctttgctaataagcaggacctgcctggagcactgtcctctaacgccatccgcgaggccctggagctggactccatccgcagccaccactggtgcatccagggctgcagcgccgtcaccggggagaacctgctgccgggcatcgactggctcctggatgacatttccagccgcattttcacagctgactgaaccactccagatgccccccacctagcagtccaggtccctcaaccttcaccaaacactacccatggggggttgggagtcagccggccaaactaacactccccctcctccaccccagcctgctgctgctactgctgcccgctgctgctctgtggccacccggctcccatggcgggagggctgtgccctggctgtctctctggctcctgacctggcctttggctaccataccaagaagagagggctgggcggggaggagctgctactgctgctaccgaggctgtgggcctcatccttcactcagttgtgaaataaaccgctccttgccccga

SEQ ID NO: 1492 - DNA, 355 bp, Homo sapiens
gtacctagaccaggtggcagcagcagtggctggcgtgggtggagagatgcagccaggtctgagagacgctagagggagctgctagagggcagggcacggatatgcccactggggtcggagttgccatagccaagggctgatggctccatagaccccacagagctatcagtgctggcaagacatggagccaagctgtctatagggcagccaagagtctgggcaagggaagtgggttccagcacatagggaggaaagcgggtgatcccgcagagggaagagcacacagccacgcccaaggcatctccacccccacaaaaggccccactgcaagttatctgtcaaaacctccaccaca

SEQ ID NO: 1493 - DNA, 214 bp, Homo sapiens
gctttctgaattggggcaggtagaagcaaaactgttccattcttgtgacttctgggtcccccagaacaatcactgagggcttctgtcactggctcgatggctaaaggaagagtaacataagtgttgttccctctggttaaataagcaggctatcataggtatagaattaaagcccataggtttaggcggggagcagtggctcatgcctgtaatc

SEQ ID NO: 1494 - DNA, 977 bp, Homo sapiens
gaagcttgactttgtattattgtttatatcatagcatcacttacaaaacaagcacatatataaaaagttgtcaagatgttgctgaaattgttgaagttcctctgtgggcttggattctaacaggtttccagtaagagttcaccttcctcttgtttgatttcagcaaatcacataaaaacagacacttcctgtcttagtaccaacaaaggaaggcacaccctcactaaaagtagagcagaggtgagagattcagatttacttgcctttgtaggacttcttggagaagtttattgtttcattacatgtcagcatataacgagtcaagctgcttgcattaacatcaatgcaatgatatgtatttctccaacaatggagaaatacagaaaatctatgaagtggaatgttcagtattagaaaaatcccatagaatcattggtgaattaaaaacagatttgagacagtttaatgttcctcatactgtaacaaagaaaactttatgaaatgtttaagtcataaaactgcaatattagttctgccaaagtaaaaaatatacaatgatgatggcaaggagaaaatcattggacattaatgtgcctatgtgatcttaaaaacaaatggaatggaatgtgagattgcaattcttactggattcaatgaaattactaaaatgcattgatagtatagcactttggtgttaaatgtaaaaattaatgtctaaatatgatacctcaaaataataggtattagactgctataagaattatatttgttttcatgtatgagtctctttcaaactgaaggttctggtatcttaagaaagtatgcgtattttgtttccataccgtatttataaagctataagttaatgaccaatatttctaagtaggatttcatgtaagatgcacacttctattacaagtgaaacctacgccaaatgttaaagacaaatagcataagaataaagatgttttcttgta

SEQ ID NO: 1495 - DNA, 406 bp, Homo sapiens
gctaagaagggggatgggggaagtctatgtgggaagagatctggctcttggcagcattcatgcagtcctctcacaaatattctttccgaagctgtttctgttcctggctgtatatttgagtgctgagttagttcacccagtcgatgtgtgcacactcatctggtggctcaagaatcatgggaaattttcatgttcaagagaattttacagtctggatgcttgatgtgtaccagggcacggtttggagcctgaaacatggtggtagtgagtgccttggacttgtgctcttgccaaacggtggagtctaagccacccttagggcgttccaacccagagctgtcctgataaattttactggcccgagacaagtactccctatgagtacttgtcacagggagtacttgtg

SEQ ID NO: 1496 - DNA, 407 bp, Homo sapiens
gagttcaacatgaatgagcgctgtttcagaacactctcctttggtagcctagatttgtcccaaattattctatcaatggccatctaaccaaggaagtaaggaaaatgtgttagggatcctaggggaccacaagctcagtgaaatagcagcctccttgtatcatgaaggggatgagcactgcagcccattacattctggcccaagccactgtgggggtgctgcgaggaattctggagctcactagtttctaaaatccacatcaggagaatctggaaaagtcccaagaaaagtaaaaagcaaaaaaaggaaaaaagaaagaaagagtgaaagagagatggagggaaggaaggaaggaaagaaagaaggaagaaagaaagcaaggaaggaaggaaagaaagaaagagaaa

SEQ ID NO: 1497 - DNA, 518 bp, Homo sapiens
atacgcatggcttcttttttaaaaacgttcagtcttactagaggtttctcaataattttttcgaagcaacagctcccggcttcattcatattccatttttgttttcaatttcattgatgtctgctttttgtcttcctttgttctgctagttgtgggttcattttacttatcgttttctgttactgtggatgctcagattattgatctgaaaccttcctttcataataaaagcactcaatgcaataaatttccctctaagcactgcattatctgtgcccacgtattttaatatgctataatttcacttttcttccctttaaaatatgttctgatttctcttgagaattcctctttggtgatttatttatgactatgttgtttaacttccaggcaatttcagattctcctgttatccttctattactgaattttagttcaattccattatggtcagaaacatactttgtatgatttcagttattttacattcattaaagtttattttataaaccaggata

SEQ ID NO: 1498 - DNA, 804 bp, Homo sapiens
atgcattttaatttttaaataaaaactagggtttggattgcatggaggtttggtaagtgtctattcaatcagaatagaaagcaacattcactaaattatttccatgccaggtttcactttggggcctgtattccttaggtctcagcccatgcagcacctcattcctgcggttgtccctctgcccttcccttgcccctgttatagctgtcatcatagcacccaccttgctgtccagaagctgagggtggacttgtccatctctcacactagataatgagcctcatgagggcaggaactgtgcctgtgaacagaggttcagcacagagccctagagggtccagtggctgacatggaatagtgcacagcagatgtttgttgaaaaaaaaaaaaaaaggatacatcagctaaataaaagcaaagttaacactttttatgaataaaccagccttagaagaaaccaaacttgtagctagaaaggcatggaggcaaacttggtcttaaattcagcacattcattttgcttcatgtcttttgcttcttggaaaattgtcccaacgccagcaaaactagatttttttcctcttcttttggccctaaattatttctgaaagttacagcatttttagatttgtattgttttattacctgtcatttttattcacgtccgcttttgttgctctctctctctctcactggacctcttcctagtttaacttgactattcctctgttaagctgttcctcatatggaaagttgcctcttcatcagcacaccataaataatccaacctggtcgacagtcttt

SEQ ID NO: 1499 - DNA, 209 bp, Homo sapiens
aggtttgtttgaaattatctgcaaatttcaggtctgtgtttttgattagactatctcagaggtggaacgccactgactcaacagagaaatagccagctcctcctagtggaacttttcttaaaacctcattggttttaggaggaaaaataccatttgtttctttcataagcacttaatgggaacaagaatcttttattgtgactttcaaa

SEQ ID NO: 1500 - DNA, 286 bp, Homo sapiens
gcctgagcgacagagtgagactctgtctcttaaaaaaaaaaaagaaaatctgggacctcctccctctttctcaggtagctgaggcatgagaaccacctctaggaggcagaggttgcagtgagccaaaaaggtgccactgcactccggcctggcaacacagcaagattccgtctcaacaacaacaaaaaagttccgttttaggccagatgcggtggctcacgcctgtaatcccagcaatttgggaggccaaggcaggtcaatcacgaggttaggagattgagaccat

SEQ ID NO: 1501 - DNA, 669 bp, Homo sapiens
ccgggctgcaggaattcggcacgagacaccacaggggacctgggaatctactgaggatacagatttcccacaatccgagactgtgtgtctgcctgattgttacataattttaattgggtgccacacaccgagagaggttgtttactggtgggccattcggtttccagtaaaagcccttccactcactgtggcatggtaaatggagctcatcacatggtcccttcagcctttccttgaatcatttccaccccttccctaattaccctctgtgatccctttcccggcaagggtccttctagccttgctaccttggtaaacctgtggccttaggatcgaggtgtggacattaacttttctgctctggcggcttcctgggctgtcctctccatgttcccagcactcaggggcactgtcctttcctggcagcctagtaaatcccaggcctctgttttgggccctttggcttcttggtgcctgttatgctgaagcgtagaagtgtcttagtcagagccccaaaggacactcaccggcccacgttctcatggagctgggtagctctgaccagacttgccctctggggccctgtcctttgaccacgctgtctctatcccttctgaggctaaggcttcctcacactgcaagatccagccgaggcaggccttggcgctg

SEQ ID NO: 1502 - DNA, 628 bp, Homo sapiens
gcgggtccaatcggctgggagcctcgtggaggctgaggtgagtcctggaggtgcgtggttggggcggagagcattatctgcggctccgattttgcagattctggctgaggcgttcgtgatgtcagcagcagccgagacgggcgtgttaaaggccggttgctagggctgggggaactcaggtaactacgggcgtccccacagcagtacttggaagcccctcagctactcggcgcggttgcgggtgctgagcagagctgcctgaccgtgcgtgtgcacgggctggcctgaggatgatatgaccgtgtgttcggtgtgtggaaccctccgtcaccctcccctgaccgaagactcgtttaggaatgtgtggcaggtctgttgccacggtccaggccttcagtgcatcttggaaacatcgttttgggggctgtaggttaggaagcggagatcatggggtctcggaagaaggtttggtcgtgaactgtcagaaaggaggcgaaagctgtgcacgtggaacaaagtgaacagtgcaagttgtatgggaggtagtttaaatatcgaggcgatgaaaaaaggctgctagaattgggcttactcgaaaggaagtgggcctcagaagataatattagtt

SEQ ID NO: 1503 - DNA, 281 bp, Homo sapiens
tttttttacctgaatgcttgcagttaatttgcgtaaattatatctgcatatgatgctactccactggatttcctttaaaaaacaagcttttggaatccaacagcctcaaggaatagcataggttaaaaaatacatcctcattcatgtaattttatcattgtttaaaatgctttgttaaagtgtcagcagcatattttgatggatattttcaaaaagtctttcataaaatgttctttgattcctactcttatgtatctgggccaaatatgtcacaagtatga

SEQ ID NO: 1504 - DNA, 327 bp, Homo sapiens
ccatatcacacctatggtatgataggcactgtgtgaggttaggatataatgatttatggagaaatgaagtaaatgatcgattccttcttaaggcattaaccagaagtcccttcaaaccccaaagtaactgaactagcatactaatggcattgattgtgtttgggggccttgaactttgacaatactgatggagaatagtttccttcccctttctggaatttaaaagactagcctaaatacacttatgtgtgtatatgtattatatgtatatgtatatgtgtgtgtatatgtccatataattaaataaaatctttaaatagacaaact

SEQ ID NO: 1505 - DNA, 391 bp, Homo sapiens
tggaaaaccagcttcttcttctgctccccctacctgcccattggaaagggaaaggaggaaagggagctttgtgagtaaaaagaagataacatctacctacattaagcattctcttgtgtggatgtgatctatgacttcctcgggttaggttaatctatttttgccattttatcttccttcactgcatttctcttgatgtaggtcttttgctcttgctgatatttcaatgattgactgaggatagaagaaaggagccaaaggcagtatgtgtgcccactctattatgttgaactagtaatttaaaaaaaacgagtatgtctgggaggctaaggcaggtggatctcttgaggtcaggaatttgagaccagcctagccaacatggtgacacccc

SEQ ID NO: 1506 - DNA, 841 bp, Homo sapiens
tttttttttttgagacagggtctcgctctgtcgcctagggtggagtgcagtggcgtgatctcagctcactgcaacttcctcctcctgggttcaagcgattctcctgtctcagcctctcaagtagctgggattacaggcgtgtgccaccatgcctggctaagtttttgtatttttagtagagactgggtttcaccatggtcaggctggtctcgaactcctgacctcaagtgatctgccagcctcagcctcccaaagtgctgggagtactggcatgagaaccaccacgcctggccagaaaatagttaaagtaaaggaaccactggtggatgctaaaattatggaaagtgtaagtggaaaaaggatatttacagtctcgaattaacagacaaagtggcctggtgtgatggctcatgcccgtaatcccagcactttgggaggctgaggtgggaggatcccttgaggccaggagtttgagaccagccagtgcaacacagtgagaccatctccacataaatattaaaaaattggcctggtgtggtgatgcatgcctgtattcctagctacttgggaggctgaagtgagaggatcacctgagcccaggagtgtgaggttacagtaagctatgattccaccactgcactctagcctgtgtttaagagcaagaccctgtctctaaaaaaaacaaaaaatcaggccaggtgtgatggctcatgcctgtaatctcagcactttgggaagctgagttgggaggactgcctgagtccatgaggttgaggctgcagtgagccatgattacacaactgccctccagcctaaacaacagggagaccctttctcaaaa

SEQ ID NO: 1507 - DNA, 1737 bp, Homo sapiens
cctattactactgaagaggtacttttaaaaatgctattttaagtcaggtgctctgtttttatttaaaatagtttaagtctagagagcttattaaaaataaacaactgctagttctatctttagtattatctatgcaacatagttcaggaagtttttacatggtctactatgttttacttttacttcatattcttgctaattaatgcttccagaggaaatccttcttaactactaaagaattaatgagcatgcaaaaatgtcccctctataacgccaactatcaaaaacttctgtcagacctgaaactgaagcttcattagctcccagtaaatggacctctgtacggctgatctgacacaagatgatatgcattgacaagctctttctctatttactgaaggaattgcctgcaataactgaatagacacaaatgaccacttgctatggtctgaatatttgtgtcccccaaaatttcctatgttgaaacccaatccctagtatgatggtactaaaaggttagacttttgagaaataactaggtctcatacataggagagtggcacaaggctctgccctcatgaatgggattggtgccctgataagagacctggctagtcccttccaccatgtgaggacactgtgagaagggcagagagcagccctcgccaggcaccaatctgctgggtgccttgaccttggacttctgggcccccaggactatgagcatacatttatgttatttctaagcctcccagtttatagtattttgttacagctctccaaatggactatgacaccaggcaagtcaaaactgagatgtgtagattttattatatactaaaacaaaaaggattttagtggaaatggattcatgaaatatattaaaattggaggcaaagtctcaggtccaacactgagtcatcccatacagtcacaacaactgataaaatctgaaagtaactctgacatagttaactggtactagacatataatcacagggagtcattaaagggtaccatgaggatcaaacaacttttaaaagtagcaccctctgagaaggcagaacataatctctttctttaactcatgctagttgagaaatcatttcggaactgatgcctgaactgaaatcttgtgaagtaggagttaggaagtacaatgcaaacaacaaaaggcaaagggtaacccatcacacacttagacaactatgcattatgtcattatcccgtaggcaagggcgagtcataaaggcaaaaataaacacacacacatacaccaagatcaaagtcaaaagccaacggggagaaagtatgtccaagaaacatcaccaaggactaatataatacccctaccatacaaaatatcaccaaggactaatataatacccctactatacaaaatatcaccaaggactaacataatacccctaccatacaaaatatcgccaaggactaatataatacccctaccatacaaagtatcgccaaggactaatataatacccctaccatacaaagtatcgccaaggactaatataatacccctaccatacaaagtatcgccaaggactaatataatacccctaccatacaaagtatcgccaaggactaatataatacccctaccatacaaagtatcgccaaggactaatataatacccctaccatacaaagtatcgccaaggactaatataatacccctaccatacaaaatatcgccaaggactaatataattc

SEQ ID NO: 1508 - DNA, 528 bp, Homo sapiens
acagggcagtccgagaagagggtctgtgtgtggggtgggaagaacagtgcctctgttttctccctggctctactgtcaatgacacgtggggccttgagcaggcctcctttcctgcccttagcttacccattttgtttgtgaggtggatgccatggttttctgttcctctgctgggtaagaatacctactcagctttgtctttgcagttcaggagtggagaacctatccaggttcagagagcatctttaggctgagtgtggtggcttacacctgtaatcccaatgctttgggaggccaaggtggaagaattgcttgagcctaggaatttgagaccagcctgggcaacataaggagacacttgtcccaccgccccatctctacaaaaaatcaaaaagttaggcaggtggggtgatgtgcatctgtagtcctagctactcaggaggctgagtggggaggattgcttgaacctgggaggttgaggctacagtgagctgtgatcatgtgactgtactctggcctgggcaagac

SEQ ID NO: 1509 - DNA, 607 bp, Homo sapiens
ccaatggttttgttccagacttgagacccgggagaacggatggtttagttcaagtacagaaccaggaaaatacaaatgtcctagttagaaaacagtcaggcgggataaacttcctcttacttaaggggaggctggcctttgtgttctatttaggcctccaactgattggatcaggcccacccacactggggagaggggtctgctatgtagagtctacctattcaaatgcggattcttcctgtaacactcaacagagtggtacttgaccaaatatctggacagtgtgggccagtcaagttgacatgaaaaattcaccatcatatctgtctattggtagatgaagtcttcattcctaaatattctactttctcattactctgtggattaggactcatatttagaagaattaacttgcctccctaaattttaaaggaaggtgtccactctgtaaccagctgtgttatttctaatgttatagtgtgcccctgagagtagtaactatttctttttcttggtatttaagtatgatgttggtctgctagaccatttgtccctaaggcttgtagatcatttgacttgttcagatttaaattttatttaaattttg

SEQ ID NO: 1510 - DNA, 427 bp, Homo sapiens
accattagatctcccattctcctcaactctagctctttctctctctcccccaactctaactctctctcacccccattcccttgcctactcaagggacttgcgtgctgttctaggccttgtcttctgagtgaagcttctgtgatctagacacatttttctacttttctttgtcctaaatacagtaatgcaattgtctaccctgttaatgccaagactgggtttagacctgaccaacctaacacctgaaatgtcactaagtgatacttcctaccacagacttcatatttttctctgaaattgaagtaactactatttttcattttgaaataattatttttaattgttaacactttttaaaagataaaacttatttcttaagtatattacaggcatttaaacattccagtgtttttcatcctagattcaa

SEQ ID NO: 1511 - DNA, 380 bp, Homo sapiens
ttttttgagatggagtcctgcctgggtgggagtgcaatggcacgatctcggcttactgcaacctctgcctcctgggtcacgcgattctcctgcctcagcctctgagtagctgggattacagggtgcccaccaccatgcctggctaattgtgtgtatttttagtagagatgggggtttcactatgttggccagactggtctcgacctcctgacctcgtgatctgcctgccttggcttcccaaagtgctgggattacaggcatgagccaccacccccagcattcatgtttaaatgtagatgttttggatattctgggatctccctcacttattttataatccagaaacatctggagcttcaactagacatcagatgtatgac

SEQ ID NO: 1512 - DNA, 491 bp, Homo sapiens
ggccctccacagaaaatgtttgctcatctctatgctacactctagaaagatgcagaaatgtatcttgatctaggtggtggttacatagataaacacattggtaaaaattcatcaagcatttaattcattttattgtatgtaagccataactcaatacttctttttttaatgaaatgaagagtaacagcccctgccttctggcaatttaaaatctggtaggaggatatcaaagtaaataattaaaatacaatagtgagcctgcacagtggctcacacctgtaatcctagcactttgggtggctgaggtgagaagatcgcctgaagtcaggagtttgagaccagcctggccaacatgttgaaaccctgtctccactaaaaattagccggatatggtggcatgtgcctgtagtagtcccagttactgaggaggctgaggcaggagaatcacttgaacccaggaggcagaggttgcagtgagccgagatcgtgcc

SEQ ID NO: 1513 - DNA, 1408 bp, Homo sapiens
attttcttgcagggagagtgtaaataatctggaagaaatactgcagtctatcacagatcccaaagatagtttcatcatttgtatttttacaaatacttactggatactattcctttctgtgaggcaagaacaaccagctgtcattctctaaaaattttcagatattaagcacatattcacctctgaactttaatgttttttctacatcagcattattcagaatctcatccaggaactatttgctaacaatctgcaatgagataagaagattatgccaggaagtaaatcaacacactgcttccttcaccacgaaagccttgctacaaaaaatcaaatggcagcagtactgaacagtgcacttactgatgtagttggttaacattttggcttaagctccttatcttgtcatggacaggtaccgaatactctggactgacagaggtcgacaaactatgctctgagtggcactgttctgcagcaaagtggttttacccataagaccattcaattatagaattttagaactgaaagatgtcttagacaccatctagtccaagttcctggtttcacagccgaggatccttagaacctgaaagttttagcaaacttcccaaagccacttagtggttgtgatgcaatatgaagtaaaggccaactgtcctgactctttccaatcaccaccatgccctgaaattcctgaaggaagcagaatttcctctgaggtttctgctgagtcatatgcaggctccatctgatgtagagattcagtagaaggggccaggttgcctcctgatgggggcagcgtgtggaggatgagcctgggcttacttggcagacagatctggtcatgttccagctctatctcctacttgcagaatgtcttcgggaaaattacctacattctcaaagcctcagattcttgctttgtcaacattccttgaagattgctaaactgaagactctggtgttcccttttgtgatagggagaataatagccccccaaagatatctacatcctaatccttggaacctgtgactatgttatgtcacatggcaatgggagacttgaggttccagactgaattaaggttgataatcagctgaccttgagatggtgagactatctgggatcatctgggtgggtccaatgtcatcacaatgttccttataagagagaggcaggagagaaagaatcagaaaggcggcagcatgaggaaggctcagcctgacattgctggcttagaagatggaggagtgaggccatgagcgaaggaatgcaggaagcctctagaagctggaacacacccctgctgacacctggacttgtacctagtgaaacccatttcagacttcagacctccaaaactgtgcagtaataaagctgttttgttttaagccactgatttgt

SEQ ID NO: 1514 - DNA, 325 bp, Homo sapiens
gacacagggcagctcctcacccagcacagagccaaggccttagtggaatgttcacagaaaccacagagggacttggaattgtgcttctctcctgaccacaagggctccacagctgaccttcaattctggtggatcattaaatacaggaaaagaagatgacaggaaaagatgccatcacctgtgagctgtggctcctcttggaggctccctctggaactaacaggaaggaagcatgttccccagtgatcaggtctatgcagcccatcctctaaggccaagggggctgagaggctaaagaaaaaggctgacaaacccagtttctctg

SEQ ID NO: 1515 - DNA, 436 bp, Homo sapiens
gatacagcctaccctctaggaggaaccactaggatagctgactgagaaccctggttcaagaagtagggtaagtgtcttcttctggctgtttcctgtcactagaacaccagcattgctggagcaagctcgggttgcagcctcaagagaagtccgctctatctttgctaatttacattgtgatgaattaggctgagtggcccaggggaaagtgaaagtgagttaaacaaatttgtctctcttgaaaaaggaagcaggactaaggcagagacattcattcaacaaccagtgagaagcaaagcatgccctcaccctgccctcaggtatgatgggaggacacagaccataatcctgcgaatgtgagcatccgcagagaggcctggcagccacatggctctgtgtgacacaggctcaactccaagcatcagagtctgccaac

SEQ ID NO: 1516 - DNA, 845 bp, Homo sapiens
  misc_feature (823)..(823): n is a, c, g, or t
gagagatttaaattttttaaactgtttttgtaataaatctggcatgtattttacactcaagcatatctcaattcagatgtgaaattttcattggaaatacttgatctgtatttagagtttacagaacttacaattgaaaaagtagagtcacaaacccaattttttctagacatacttcaaagttttctaataactgagtatcaattaattaaagtaaaattcagttcctcggttgcactgaccacattttaagtgctcagtagctagtgggtcctgtattacccaggagcagactatcctttttaatagttgcatacgtttatttgctgataatgtttattgagtgcttactatattgttggctactgttaatcaggcttcatgtgttacctctattaatccctacaatgattctaaaagatattattctaaatgtacagaagaaatagaaacttagtgcagctattaaaaagcataactaagtcttaaacctaggtctttgacatgaaagatcatgctgtttccctctcctttaatgtggctctgttatgatttatttaatcattgacctaccagtagatattttggttattgtttattagtggaaattgcaaaccatgcttcagtgaccatctttgtgagcataacttacataattgtttcgtaaaaaattcaatgagaatacacattttaaatattcattgccagtcatgatgggctcatgcctgtaatcctaggactttgggaggccaaagcaggaagatcagttgaattcaggagttcaagaccagcttgggcaacatagtgagacctcaactctacnaaaaaaaacatacaggaataag

SEQ ID NO: 1517 - DNA, 411 bp, Homo sapiens
caggggattggtaatggggtataaatcctctctctcgtcagcacttcatttttagcagtgtctatctaatggctgtcatcgccacttagattcagagaccagcatgggaggaattgatggttgggtatggtttagaatgttgcagtccatatgccaaagagcatcaccatcagaaccttcttcacctttctggtgaagaagttaggggtttaaacacaaaagctaaatctgatattcacctgacccaagccagttagttccaagtttggctgggcaaattgttaattactcttggtagtagacttcgtgatatttgaatttggactgagagaaattcattttcttgtttaaataaatatccacatagttgaactattttgaagaagtttgaaatctgtttcaagcttaagt

SEQ ID NO: 1518 - DNA, 491 bp, Homo sapiens
accaacctggccaacatgttgaaaccccgtctctacaaacacacaaaaattagccgggcatgattgcgggtgcctgtaatcctagctactcaggaggctgaggcaggagaaactgcttgaacccgggaggcggaggttgcagtgagccgagatcacaccgttacactccaacctgtctaaaaacaaaaacaaaaaacagtaggaaatatgattaggtttaggtttttaaaaaatcctcattggggctgggcatggcggctcacgcctgtaattgcagcactctgggaggctgaggtgggaggatcaactgaggttaggagttcaagaccagcctgaccaacatggagaaacccagtctctactaaaaatacaaaattagccaggtgtggtggcacatgcctgtaatcccagctactcaggaggctgaggcaggagaatcgcttaaacccaggaggcagaggttgctgtgagccgagatcgctccattgcac

SEQ ID NO: 1519 - DNA, 330 bp, Homo sapiens
ctccaagatccaactgtgagacaggaatctagtccagctttctcacttttcagaggagaaaacaaaggctgttttagttagattgtgattccaggataatgcctttcttagaataaaaatttggtctgcagtcttggtcttaaagcccaacttaagtccatatgagaaaaacacaaatgacttgactaaaaatcttagctttaccttgtctaattcagtgactttgggccagtgtaaaagaaattgcctcagacaagttagacaggcaagaaaggttttattctggactatttcagtagaggtcaagattattgcaatgggaaagagaaa

SEQ ID NO: 1520 - DNA, 427 bp, Homo sapiens
gtacaggtggcatttatgctccccacaaaagaaaaagccttaagctgtcctctgaggagatgaagtcttcatgaagaggaggccaaaacctttctgctgttcctctctctcccctctgtgtcatagatcccagctggcaaggaatatgctgctgtccttgtgatccaggcttctggtcagacttgaggacagtgagcactcagtgactttgttgaatgaatatatgagtggatgagctgtcaatgaatgggatgtgaaatagatgttatatatattaatataaagaacctaagaaagatcaaatctggaagtggagatgcaagattattgaggaactcacaaaatgtcagaggcagcaggtggatttctgtaaactacatatctagtcctccttaaaagcagaattctgattcattctaggggaggc

SEQ ID NO: 1521 - DNA, 570 bp, Homo sapiens
attctaggttgtcgacaggagattgggtcctgggaattgcctcatgattcagtctgagacagcggatgtctcttctctcccttcttaatcagttttcttaatgtagctgctagtggggcaagtataaccaccaatcctcaggtgaagcctcttagttgttccctgggagtggacgcctcagctcctggctctgcccactaatgtggcctgtgcacacactgcagctgagcagtccaggttggagagaaaaaagaaaaaacaaagcgaatcccaccccactaaccttggagcaggaaacactcctgcagaccctgccttacagagaagagaatacttgaaatatgacactcggggaattggtaacaccaggaggctgtttctactgtttgctgcatgatttgcagcttcaattggactactttttctaacaggaagaaatgagccttgggaataccaggacgaatatatatagtctacagactctgaaacaaagctgttataaaattattggatacaacttaaagtaagggaatagtctgtttttattagaagatgatccttctgtgtaaa

SEQ ID NO: 1522 - DNA, 450 bp, Homo sapiens
cataacacagatcataccaccatcattcattcattaaaacatttcttcatcacctactgtgtgcaagacttgggactaggagcagagaattcttaatccctgcacacggggaacctaagcctcatagaggaaataagcgtaacagtgaatcgttagtgagtgtctgctgtatgccaaggagcatacgtatgttaccttatttaattttatttcatcctcacagcaatcctatgatcatcctcattgtatgaatgagaagactcagatgcagagaagttgagtcagacttctagttaatgaggaagtcagtttaaatgaacaatatgtaagtctgggcacagtgggcatgtgtgtgtagccccagctactccggaaggctgagggcaagagggatccactttgagtttcagggagtttcaagactgtattaggtgcactattaattatgcc

SEQ ID NO: 1523 - DNA, 1414 bp, Homo sapiens
ggatttaattgattatgtagaacaatttgggggccatttgacatcattaaaatattcaattttcctattcattaacatggtatatctcttcactttaagtcttttgtatgtttctcagaactatttttgtggttttcagtaaagtgttcttgcacatccttcaatagatttattcttagacgttttatatttgtttatggctagtatatacagattctgttgctacaaaactatgttgaccttgttatccagtgagtggccttgtgacattcatttaaattataataatttgcagattatttttgtataatcatgtcctctgtgaatgacagttttatttcttcctttcttaatctttatgccttatttagctcttgccaaactgcaggggctgagcaattggacaagataaagaaataaaagtgatccagatcataaagaaagaagtaaaactatatctgcacatgacataatcttgtctatggaaaatcctaaggaatccacacacaaaaaaactactagagctaataagttcagcaaggttgcaagatataaaattggtatacaaattgcagtggctaggacctccagcagaatgctgactataagtagtgatagtgggtattcttgtctcatcctcaatctcaggggtggtgggtgtggcatgtggagagttgtcaatattcaccatgaagtttgatggttgttataggatttttaatgtactcattaacatatattctcaagctgttaaaaagattttttttaattacaaatgaggttaaatttctctcaaatacttattctgcaccttttgaaataattttatttttctcctttattctttggatgtgatgacttatactaattgactgttgaatgtcaaaccaaacttaacattcttgtaatagaaaccagcagggtgtgtacgcgtttgtgtgtgtgcacaggtttatacacataaacacaataatacttggacttatttatttaaaatttagatttattagagggagcatggccataaaataaaataaaataaaatttagatttaagtcaagctcagtggctcacatctattatcccagcactttggaaggccaaggcaggtagattgtctaagctcaggaatttgagaccaacgtggtgaaactcggtctctacaaaaaccacaaaaattaggccaggtatggtgtcacatgcctgttgtcccagctacttggagggctggggcaggagtattgcgtgagcccaggaggttaaggctgaagtgagtcatgttcacgccactgcactacagcctggataacaaagcgagactctgtctccaaaaataaaataagtaaataaataaataaataaaatttagattaatttgctgttatatttttatataaactatgacataagtata

SEQ ID NO: 1524 - DNA, 432 bp, Homo sapiens
tggtctcagcctaatggctttctgaattaatttttttaaaacagtgtagaaactaaagctttataatgtttacataggaagatttttttttaatttttattttataaagcagaggagtgagttaagaatcatttcaaagaaagaattggccttggctgggtgcagtggctcatgcctgtaatcttggcactttggtaggctcaggtgggaggatcgcttgaggccaggagttcgagaccagcctggccaacatggtgaagccccgtctcctaaaagtacaagatttagccaagcatggtggcacacagttttgatcccagctacttgggaggctgaggcgggagactcgcttgaacccgggaggcagaggttgcagtgagccaagattgagccactgcactccatcctgggcaacagagccagcaaaaaaaa

SEQ ID NO: 1525 - DNA, 376 bp, Homo sapiens
ggttgcagtgagccgagatcatgccactgcactccagcctgggagacagaaagagactgtatcttaaaaaaaaaaaaaattatattcagtacagccataaaaagcaagaaacagccaggcgtggtggcttatgcctgtaatcccagcactttgggaggccaaggcaggcagatcacaaggtcaggagatcaagaccaccctggccaacatggtgaaagcccgtctctatttaaaatacaaaaattagccgggtgtggcgatgcacacctgtagtcccagctactcgggaggctgaggcaggaaaattgcttgaacctgggaggcggaggctgtagtgaaccgagtttgtgccactgcactccagcctgggtgacag

SEQ ID NO: 1526 - DNA, 495 bp, Homo sapiens
tttttttttcttttttgtggtttttatgttgacaacacgaaaatacattgcagtgattttggtcctactcaggcctcagtttgggggccagctctaccacaaaccagctttttgaactttttgaccctgagtaagttattttatctctctaaatccctgttttcttataagcttaaaagtctgaaataaaaaataccataagtagttattgggaataaataatatatgcaataacagtatgaataaaaaaataccatgagtagttattgggaagaaataatgtatgcaaggtaccttgtacataattggtgcttattaaatgttagtctccgctcttccgtttaataagcctgttatgcctaataacaactggaagtcagtctttggtaaaaatatgaaaggaacagagaggaatgaaagaatttgaatgggccaggaatgtaaaagatggtaaagtttccttaaattgtggggcaatcatatattgatttttct

SEQ ID NO: 1527 - DNA, 470 bp, Homo sapiens
ttctctaattttatttatatatagtctaccagaagaccaactgtagctttttaaatatatgtgacatatatctggtacagcgaggtgtctcacgcctataattccagcactttgggaggccaaggcggacggatcactggagcccaggagttcaagaccagcctggtcaacatagccaaaccccttctctattaaataaataaatatatatgtgacatatatctaagtagcatagatgatattatttatgattttccctacacattatctttatagatgtcagctggtaagatttttttggctcaagtcagcctcattctaagaccaagtcagtcagtcacattctgagaccattcacagaccttcttgccttgtgttgccacttgtattgtcttatattgccacttacaagaggcatggtaggttaaagttcatttaattgttatcataaatgaaatgtaagtgattgt

SEQ ID NO: 1528 - DNA, 357 bp, Homo sapiens
tttttttttttgagatagagtcttgctctgtcgcagtggcacgatcttggatgtctgtaatctccgcctcccaggttcaagcaattctcctgcctcagcctcctgagtagctgggactcggcgcacatcaccacactcggctaatttttctatttttgctagagacggggtttcaccatactggtctggctggtctcaaactcctgacctcaggtgatccaccagcctcagcctaccaaagtgctgggagtaaaggcatgagccgccatgctcagccacaattttttaatgtaagtaatttttacttctttagaaaaattatatgactagcacaccatgtctaataaaaggataatt

SEQ ID NO: 1529 - DNA, 4246 bp, Homo sapiens
cccagatttggtcatgacagtaatggaagcaatctccattcttttgaatgccaagcctgattggccatcagcaaagcaacttcttggtgactctaactttctaaaaaggcttttagaatatgataaggagaacataaagcctcagatattggcaaagcttcaaaagtatattaataatcctgattttgtgcctgaaaaagtggagaaagtgtccaaagcatgtaaatctatgtgcatgtgggtaagagctatggatttgtactctcgagtggtcaaggtcgtcgaaccaaaaagacaaaagctccgcgccgcacaggctgaacttgacattaccatggctaccctgagagaaaagcaagcattactaagacaagtagaagatcaaatacaggccttacaagatgaatatgacaaaggtgtaaatgaaaaagaaagcctggcaaagaccatggccctgacaaaagcacgtctagtacgtgctggaaagctgacagcagcattagaagatgagcaggttcgatgggaagaaagcatacagaagtttgaggaagaaatatcaaatatcactgggaacgtgttcatagcagcagcttgtgtggcctactatggggctttcacagcccagtacaggcagtcacttatagagtgttggatccaggactgtcagtctctggagatcccaatcgatccttccttcagtctcattaacattcttggagatccctacgagatacggcagtggaacactgatgggctgccccgtgacttgatatcaacagaaaatggcattttggttactcaaggcagaagatggcctttgatgattgatccccaagatcaggcaaaccgttggataaggaacaaggaaagcaaaagtggtttaaagatcattaagcttacagatagtaatttcttacgaatactcgagaattcaatccgacttggtttacctgtcttactggaagagcttaaggaaaccttggatccagctctagaacccattcttttgaaacaaatttttatcagtggtggccgactactcatccgtcttggagactcagacattgattatgacaaaaactttaggttctatatgacaaccaaaatgccaaatccccactatctgcctgaggtatgcattaaagttaccattatcaatttcactgtaacaaaatcaggcctggaggatcagttgttaagtgatgtggtgcgacttgaaaaacccaggttggaagaacaaagaattaagctcatcgtgaggatcaacactgataaaaaccagttgaaaactatcgaagagaaaatcctgagaatgctctttacctctgaaggaaatattctggacaatgaagaacttattgacacactccaggattcaaagatcacttctggtgccattaaaaccaggctggaagaagcagagtccactgagcagatgatcaatgtggctcgtgagaagtatcgtccagtggccactcaaggctctgtaatgtactttgtcattgcaagcctctcagaaatagatcctatgtaccagtactcattaaaatactttaaacagttgttcaataccaccattgaaacttctgtaaagacagaaaatctacaacagcgcctggacgtactactagaacaaactctcctaactgcttatgtcaatgtttcaagaggactttttgagcaacataaactcatctacagctttatgctttgtgttgagatgatgcgtcagcaaggaaccctatctgatgctgaatggaatttctttctccgaggttctgcaggattggaaaaggaacgcccacctaagcctgaagctccctggctacctactgctacatggttcgcatgctgtgacttggaagaatcatttccagtttttcacggacttacccaaaatatattgtcacatcctatttccatacgcttaggatcttttgagacttatattaacccacagaaatgggaaggctattctaaaatgaaacacgaagataaacacatgagacaggaaaaggaggcagcacaccaagatccatggagtgcaggattgagttctttccataagctaattcttattaaatgttgtaaagaagaaaaggtggtttttgctcttacagactttgtgatagaaaatcttggaaaacagtttatagagacaccacctgtggacctgcctaccctgtatcaagacatgtcatgcaacactcccctggtattcatcctaagcacaggctcagatcccatgggtgcatttcagaggtttgccagggaaagtggatattcagaacgggtgcagtcaatttcactggggcaaggacaaggacctattgctgaaaaaatggtcaaggatgcaatgaaatcaggaaactgggtatttttgcaaaattgccatcttgctgtttcttggatgttggcaatggaagagctcattaaaaccttcacagatccagatagtgctatcaaggacacttttcgactttttttaagctccatgcctagtaatacatttcctgttacagttcttcaaaattctgtcaaggtgaccaatgagcctccaaaaggcttacgtgcaaatatcagacgagcatttactgaaatgacaccttcgttttttgaagaaaatatacttggaaaaaaatggagacaaataatatttggcatttgtttcttccatgcaattattcaggagagaaagaagtttggcccccttggttggaatatctgctatgaatttaatgacagtgacagggaatgtgctttactgaatctcaaactctattgtaaagaaggaaagattccctgggatgcactaatttacattactggtgaaattacttatggtggtagagtcacagacagctgggaccaaagatgccttcgtactatcttgaaaagatttttttctcctgaaacattagaagaagattataaatactctgaatcaggcatctattttgcacccatggctgacagcctacaagagtttaaggactacattgaaaatctgcctttgatcgatgacccagaaatttttggaatgcatgaaaatgctaatctagtcttccagtacaaagagaccagcactttaatcaacaccatacttgaggttcagccaaggtcatctactggtggagagggaaaaagcaatgacgaaattgttcaagaacttgttgcttctgtccagaccagagttccagaaaaactggaaatggagggtgcttctgagagcctttttgtcaaggatcttcaaggacgtctgaactccttgaccaccgttcttggacaggaagtggaccggtttaacaacctgctgaagttaattcatacttctctggaaacactcaacaaagccatcgctggatttgtggtgatgtctgaagaaatggaaaaagtgtataacagtttcctcaacaaccaggttcccgctctgtggtccaacacagcctacccatccctgaagccactaggatcatgggtcaaagaccttatcctgaggacctcatttgtggatctgtggctcaaaagaggacagcctaagtcctactggatctctggtttcttctttcctcaaggatttctaacaggaactcttcaaaatcatgctcgaaaatacaatttgcctatagatgagctgagtttcaaatacagcgtaattcccacctatcgggatcaagctgcagtgatagaagctgccaagacagtgcaatttggacaagaactgcccatggacatggagttgccctctcctgaggatggtgttcttgttcatgggatgttcatggatgcttctcgatgggatgataaggagatggtgatagaagatgcattgcccggacagatgaatccagtgctgcctgtggtgcattttgaaccacaacaaaactataagccaagcccaacactttaccactgcccactttataaaacaggagcccgggcaggaacactctcaaccacaggacattcaaccaattttgtggtaaccgtcctgttaccctccaagcggtccaaagactactggattgccaagggatcagctttgctctgccagctgagcgaatgaaaaggtgccacctcagccctgaaaaagaaccaggccagagatctttcctaatgggagcaaaaggtttgaataatttatatgtgagcaaaacggtgttaattctgatttgacttaaacgtattgtgacttttatttctcttatgaccttaaaataaagtgtttgagttctttctgttggca

SEQ ID NO: 1530 - DNA, 2049 bp, Homo sapiens
cactggcagagacataatttagatatctgaactttggttttagtgatgtggtgcgacttgaaaaacccaggttggaagaacaaagaattaagctcatcgtgaggatcaacactgataaaaaccagttgaaaactatcgaagagaaaatcctgagaatgctctttacctctgaaggaaatattctggacaatgaagaacttattgacacactccaggattcaaagatcacttctggtgccattaaaaccaggctggaagaagcagagtccactgagcagatgatcaatgtggctcgtgagaagtatcgtccagtggccactcaaggctctgtaatgtactttgtcattgcaagcctctcagaaatagatcctatgtaccagtactcattaaaatactttaaacagttgttcaataccaccattgaaacttctgtaaagacagaaaatctacaacagcgcctggacgtactactagaacaaactctcctaactgcttatgtcaatgtttcaagaggactttttgagcaacataaactcatctacagctttatgctttgtgttgagatgatgcgtcagcaaggaaccctatctgatgctgaatggaatttctttctccgaggttctgcaggattggaaaaggaacgcccacctaagcctgaagctccctggctacctactgctacatggttcgcatgctgtgacttggaagaatcatttccagtttttcacggacttacccaaaatatattgtcacatcctatttccatacgcttaggatcttttgagacttatattaacccacagaaatgggaaggctattctaaaatgaaacacgaagataaacacatgagacaggaaaaggaggcagcacaccaagatccatggagtgcaggattgagttctttccataagctaattcttattaaatgttgtaaagaagaaaaggtggtttttgctcttacagactttgtgatagaaaatcttggaaaacagtttatagagacaccacctgtggacctgcctaccctgtatcaagacatgtcatgcaacactcccctggtattcatcctaagcacaggctcagatcccatgggtgcatttcagaggtttgccagggaaagtggatattcagaacgggtgcagtcaatttcactggggcaaggacaaggacctattgctgaaaaaatggtcaaggatgcaatgaaatcaggaaactgggtatttttgcaaaattgccatcttgctgtttcttggatgttggcaatggaagagctcattaaaaccttcacagatccagatagtgctatcaaggacacttttcgactttttttaagctccatgcctagtaatacatttcctgttacagttcttcaaaattctgtcaaggtgaccaatgagcctccaaaaggcttacgtgcaaatatcagacgagcatttactgaaatgacaccttcgttttttgaagaaaatatacttggaaaaaaatggagacaaataatatttggcatttgtttcttccatgcaattattcaggagagaaagaagtttggcccccttggttggaatatctgctatgaatttaatgacagtgacagggaatgtgctttactgaatctcaaactctattgtaaagaaggaaagattccctgggatgcactaatttacattactggtgaaattacttatggtggtagagtcacagacagctgggaccaaagatgccttcgtactatcttgaaaagatttttttctcctgaaacattagaagaagattataaatactctgaatcaggcatctattttgcacccatggctgacagcctacaagagtttaaggactacattgaaaatctgcctttgatcgatgacccagaaatttttggaatgcatgaaaatgctaatctagtcttccaggtatgtggcctttcatcttaaaatacatatttatgttgtgtatgtaaactcaaaacatcaataatcacccccactcactctggaaattataatcttcctaaataaacaaataaaataattgtttcaccttgacttc

SEQ ID NO: 1531 - DNA, 652 bp, Homo sapiens
tttcttctaaagctttcgctttctagccatttattatgctctgaagcaaatgttctgctctgtgcttttccaaacaggcaaaccgttggataaggaacaaggaaagcaaaagtggtttaaagatcattaagcttacagatagtaatttcttacgaatactcgagaattcaatccgacttggtttacctgtcttactggaagaggtttgattttcacttccttttctcatgtcagttcccaactttcaaatcatatctggaatcctatataggccacatccccatcatgctaaagacaccagtcaactccattttcaaattggtcaaaccagttcctcttctccttaaacaatacattatcacattgcaagaggggtgggagggaggacctgttgactttcagacattgttttagtgttaagagggctggcctctgtttcctgacactgctgtttcacaggcctcattatggcccttgatggtgagctgcgctgaaaattcacaacagtagtgcagtcaggattatgtacatacaataatgatgcgaagccagtaaaatattctagtggatacaaacattattttttacttgggcataagtcagaattggattaagtgaattagataagaattaacttttgttaaaaaaaaaa

SEQ ID NO: 1532 - DNA, 4612 bp, Homo sapiens
  misc_feature (3952)..(3952): n is a, c, g, or t
acgggctcagctccgcagtcacgtgacgctcgtccgcaacctctgctgtcctccgcggcgcccccttccgcctgacgcgcccccggcggcggccgcgcagccctggctcctcgcgggctcgggcggcggctgcggcggggctatggcgagcggcggtggcgggggtaacactggcgcgggtggggggccggggatgggcctgagcctgggcctgggtctgggtctgagcctaggcatgagtgaggccaccagtgaggcagaggaggaggcggccacggccgaggcggtgggacgcctggccacgacgctgtggctgcggctccgcggctgggaggcggtgctggcggcggcgcagcggttgctggtgtgggagaagccgctgcacagcctggtcacggcggccgcgctcaacggcctcttctggttgctgtcttcctcgtccctccggcccttcttcctactcagcgtctcacttttggcctattttctgctggatctctggcagcctcgctttctccctgacgtttcagcatcatccccagaggagccacactctgacagtgagggtgcggggtcaggcgcccggccgcacctgctgagtgtgcccgagttgtgcagatacctggctgagagctggctcaccttccagattcacctgcaggagctgctgcagtacaagaggcagaatccagctcagttctgcgttcgagtctgctctggctgtgctgtgttggctgtgttgggacactatgttccagggattatgatttcctacattgtcttgttgagtatcctgctgtggcccctggtggtttatcatgagctgatccagaggatgtacactcgcctggagcccctgctcatgcagctggactacagcatgaaggcagaagccaatgccctgcatcacaaacacgacaagaggaagcgtcaggggaagaatgcacccccaggaggtgatgagccactggcagagacagagagtgaaagcgaggcagagctggctggcttctccccagtggtggatgtgaagaaaacagcattggccttggccattacagactcagagctgtcagatgaggaggcttctatcttggagagtggtggcttctccgtatcccgggccacaactccgcagctgactgatgtctccgaggatttggaccagcagagcctgccaagtgaaccagaggagaccctaagccgggacctaggggagggagaggagggagagctggcccctcccgaagacctactaggccgtcctcaagctctgtcaaggcaagccctggactcggaggaagaggaagaggatgtggcagctaaggaaaccttgttgcggctctcatcccccctccactttgtgaacacgcacttcaatggggcagggtcccccccagatggagtgaaatgctcccctggaggaccagtggagacactgagccccgagacagtgagtggtggcctcactgctctgcccggcaccctgtcacctccactttgccttgttggaagtgacccagccccctccccttccattctcccacctgttccccaggactcaccccagcccctgcctgcccctgaggaagaagaggcactcaccactgaggactttgagttgctggatcagggggagctggagcagctgaatgcagagctgggcttggagccagagacaccgccaaaaccccctgatgctccacccctggggcccgacatccattctctggtacagtcagaccaagaagctcaggccgtggcagagccatgagccagccgttgaggaaggagctgcaggcacagtagggcttcctggctaggagtgttgctgtttcctcctttgcctaccactctggggtggggcagtgtgtggggaagctggctgtcggatggtagctattccaccctctgcctgcctgcctgcctgctgtcctgggcatggtgcagtacctgtgcctaggattggttttaaatttgtaaataattttccatttgggttagtggatgtgaacagggctagggaagtccttcccacagcctgcgcttgcctccctgcctcatctctattctcattccactatgccccaagccctggtggtctggccctttctttttcctcctatcctcagggacctgtgctgctctgccctcatgtcccacttggttgtttagttgaggcactttataatttttctcttgtcttgtgttcctttctgctttatttccctgctgtgtcctgtccttagcagctcaaccccatcctttgccagctcctcctatcccgtgggcactggccaagctttagggaggctcctggtctgggaagtaaagagtaaacctggggcagtgggtcaggccagtagttacactcttaggtcactgtagtctgtgtaaccttcactgcatccttgccccattcagcccggcctttcatgatgcaggagagcagggatcccgcagtacatggcgccagcactggagttggtgagcatgtgctctctcttgagattaggagcttccttactgctcctctgggtgatccaagtgtagtgggaccccctactagggtcaggaagtggacactaacatctgtgcaggtgttgacttgaaaaataaagtgttgattggctagaactgctgcctccctgactgtgagctgccttccacaccctgcactgcactgtgttctctcctcacccttaacctgcttcactccagtctgttctggctgtttattaccttgttgcaaaacagggccgaagcaaggattaccttgacaaccctagcttctccttagccatcttccttgacagtgtgatctgtttagtgagatttagcatgtgtgaataaagtatatgcaggaggaaattgctttgtcttcccaatcggtagaaattcgggaccataaaaattgtgttttaccatgtggcctacaaccttaacactgctttcttaagaagtcttcacccatctacatgctaacaactcactcagcctggatttatctttactggggaagccaaacaagcaatagaggacctttacctgtgttagaaatgagttggagccaaggaacactgaagaaatagtatcttaacagttactgagtccattgtatgtgcttggctctgctctgagtgatttatatgtattaagatttttcctcacaggtcagatatatactgttactaacttcattttatagacaggttaagcttcctgaaggccacaggtcccagtaaattgtggagccagaacccaaacccaagaagttttggcttcagcaaatgcatcagacagcccctgtccattaatagggcacaggtaggaagatgcacaaggatgtgggaactatagagaaccaatctgatgccttggcttaacaaagagtggacatggcaagccttcctcttcggggaagaaaagcccagaactgagcagatggcctcctttatgagttcatgtcctccgccttcagctggaggtaccatatggcgatgctacctgtctttctgctggaggtaccatatggtaatgctgcctgtctgtctgctggaggtaccatatggtaatgctgcctgtctttctgaggttgacttttatgccatgtctttcctaagtgtgtaagaatttttctgtttgcttcacatttgactgagaatcattctagggtttgattgagcccctgtcctgtgccactaaaggaactcgaacttttcatcacttagagatttcagaggggaatggaaaaacagttctaatcaataagcaagcaattcaagaaaaatagaattaatcaggcaatggctgcaacatgtcctatctttaatctattttcttattaagcttggacattgacaatagaaccagaagcttgtagctggatcaaaatattctccataggcctggagtttcatgagggtctattcttttgttgttgttgttttgnttttttgttttttgtgggtttttttttttttttttttgagacggagtcttgttctgttgcccaggctggagtgcaatggtgcagtcttggttcactgcaacctctgcctcccaggttcaaacaattctcccgcctcagccgtccaagtagctgggatcacaggtgcatgccacgatgcccggctatcttctgtatttttagtagaggtggggttcaccatgttggccaggctggtctcgaactcctgacctcaggtgattcacccacctcggcctcccaaagtgctgggattacaggtgtgagccacggcgcccagcctcatgagggtctattctttacattcaccatggtctgatggttgctacatgtttgtctatgattttttttttctattatcaggtgtcttggccggttcatgccccacgatgaaagggccagaggttttcatatgagtaaaagaaaaaagcagaaatgtgaaacctacaattaggctaaacaaaaatcaactggaaaagtacaggctgaggggagaagagttggctacatgtttatgttaggggaggagggagtacattttagctatgtattcaaacagctaatagtttaatgttgctgcttataaacttaattttaggctgcattaataaaagtgtagtctcc

SEQ ID NO: 1533 - DNA, 4432 bp, Homo sapiens
  misc_feature (24)..(24): n is a, c, g, or t
  misc_feature (29)..(29): n is a, c, g, or t
  misc_feature (31)..(31): n is a, c, g, or t
  misc_feature (3772)..(3772): n is a, c, g, or t
accctcagggctaggtacgaggcngggtntnctgggtctgggtctgagcctaggcatgagtgaggccaccagtgaggcagaggaggaggcggccacggccgaggcggtgggacgcctggccacgacgctgtggctgcggctccgcggctgggaggcggtgctggcggcggcgcagcggttgctggtgtgggagaagccgctgcacagcctggtcacggcggccgcgctcaacggcctcttctggttgctgtcttcctcgtccctccggcccttcttcctactcagcgtctcacttttggcctattttctgctggatctctggcagcctcgctttctccctgacgtttcagcatcatccccagaggagccacactctgacagtgagggtgcggggtcaggcgcccggccgcacctgctgagtgtgcccgagttgtgcagatacctggctgagagctggctcaccttccagattcacctgcaggagctgctgcagtacaagaggcagaatccagctcagttctgcgttcgagtctgctctggctgtgctgtgttggctgtgttgggacactatgttccagggattatgatttcctacattgtcttgttgagtatcctgctgtggcccctggtggtttatcatgagctgatccagaggatgtacactcgcctggagcccctgctcatgcagctggactacagcatgaaggcagaagccaatgccctgcatcacaaacacgacaagaggaagcgtcaggggaagaatgcacccccaggaggtgatgagccactggcagagacagagagtgaaagcgaggcagagctggctggcttctccccagtggtggatgtgaagaaaacagcattggccttggccattacagactcagagctgtcagatgaggaggcttctatcttggagagtggtggcttctccgtatcccgggccacaactccgcagctgactgatgtctccgaggatttggaccagcagagcctgccaagtgaaccagaggagaccctaagccgggacctaggggagggagaggagggagagctggcccctcccgaagacctactaggccgtcctcaagctctgtcaaggcaagccctggactcggaggaagaggaagaggatgtggcagctaaggaaaccttgttgcggctctcatcccccctccactttgtgaacacgcacttcaatggggcagggtcccccccagatggagtgaaatgctcccctggaggaccagtggagacactgagccccgagacagtgagtggtggcctcactgctctgcccggcaccctgtcacctccactttgccttgttggaagtgacccagccccctccccttccattctcccacctgttccccaggactcaccccagcccctgcctgcccctgaggaagaagaggcactcaccactgaggactttgagttgctggatcagggggagctggagcagctgaatgcagagctgggcttggagccagagacaccgccaaaaccccctgatgctccacccctggggcccgacatccattctctggtacagtcagaccaagaagctcaggccgtggcagagccatgagccagccgttgaggaaggagctgcaggcacagtagggcttcctggctaggagtgttgctgtttcctcctttgcctaccactctggggtggggcagtgtgtggggaagctggctgtcggatggtagctattccaccctctgcctgcctgcctgcctgctgtcctgggcatggtgcagtacctgtgcctaggattggttttaaatttgtaaataattttccatttgggttagtggatgtgaacagggctagggaagtccttcccacagcctgcgcttgcctccctgcctcatctctattctcattccactatgccccaagccctggtggtctggccctttctttttcctcctatcctcagggacctgtgctgctctgccctcatgtcccacttggttgtttagttgaggcactttataatttttctcttgtcttgtgttcctttctgctttatttccctgctgtgtcctgtccttagcagctcaaccccatcctttgccagctcctcctatcccgtgggcactggccaagctttagggaggctcctggtctgggaagtaaagagtaaacctggggcagtgggtcaggccagtagttacactcttaggtcactgtagtctgtgtaaccttcactgcatccttgccccattcagcccggcctttcatgatgcaggagagcagggatcccgcagtacatggcgccagcactggagttggtgagcatgtgctctctcttgagattaggagcttccttactgctcctctgggtgatccaagtgtagtgggaccccctactagggtcaggaagtggacactaacatctgtgcaggtgttgacttgaaaaataaagtgttgattggctagaactgctgcctccctgactgtgagctgccttccacaccctgcactgcactgtgttctctcctcacccttaacctgcttcactccagtctgttctggctgtttattaccttgttgcaaaacagggccgaagcaaggattaccttgacaaccctagcttctccttagccatcttccttgacagtgtgatctgtttagtgagatttagcatgtgtgaataaagtatatgcaggaggaaattgctttgtcttcccaatcggtagaaattcgggaccataaaaattgtgttttaccatgtggcctacaaccttaacactgctttcttaagaagtcttcacccatctacatgctaacaactcactcagcctggatttatctttactggggaagccaaacaagcaatagaggacctttacctgtgttagaaatgagttggagccaaggaacactgaagaaatagtatcttaacagttactgagtccattgtatgtgcttggctctgctctgagtgatttatatgtattaagatttttcctcacaggtcagatatatactgttactaacttcattttatagacaggttaagcttcctgaaggccacaggtcccagtaaattgtggagccagaacccaaacccaagaagttttggcttcagcaaatgcatcagacagcccctgtccattaatagggcacaggtaggaagatgcacaaggatgtgggaactatagagaaccaatctgatgccttggcttaacaaagagtggacatggcaagccttcctcttcggggaagaaaagcccagaactgagcagatggcctcctttatgagttcatgtcctccgccttcagctggaggtaccatatggcgatgctacctgtctttctgctggaggtaccatatggtaatgctgcctgtctgtctgctggaggtaccatatggtaatgctgcctgtctttctgaggttgacttttatgccatgtctttcctaagtgtgtaagaatttttctgtttgcttcacatttgactgagaatcattctagggtttgattgagcccctgtcctgtgccactaaaggaactcgaacttttcatcacttagagatttcagaggggaatggaaaaacagttctaatcaataagcaagcaattcaagaaaaatagaattaatcaggcaatggctgcaacatgtcctatctttaatctattttcttattaagcttggacattgacaatagaaccagaagcttgtagctggatcaaaatattctccataggcctggagtttcatgagggtctattcttttgttgttgttgttttgnttttttgttttttgtgggtttttttttttttttttttgagacggagtcttgttctgttgcccaggctggagtgcaatggtgcagtcttggttcactgcaacctctgcctcccaggttcaaacaattctcccgcctcagccgtccaagtagctgggatcacaggtgcatgccacgatgcccggctatcttctgtatttttagtagaggtggggttcaccatgttggccaggctggtctcgaactcctgacctcaggtgattcacccacctcggcctcccaaagtgctgggattacaggtgtgagccacggcgcccagcctcatgagggtctattctttacattcaccatggtctgatggttgctacatgtttgtctatgattttttttttctattatcaggtgtcttggccggttcatgccccacgatgaaagggccagaggttttcatatgagtaaaagaaaaaagcagaaatgtgaaacctacaattaggctaaacaaaaatcaactggaaaagtacaggctgaggggagaagagttggctacatgtttatgttaggggaggagggagtacattttagctatgtattcaaacagctaatagtttaatgttgctgcttataaacttaattttaggctgcattaataaaagtgtagtctcc

SEQ ID NO: 1534 - DNA, 4658 bp, Homo sapiens
  misc_feature (3952)..(3952): n is a, c, g, or t
acgggctcagctccgcagtcacgtgacgctcgtccgcaacctctgctgtcctccgcggcgcccccttccgcctgacgcgcccccggcggcggccgcgcagccctggctcctcgcgggctcgggcggcggctgcggcggggctatggcgagcggcggtggcgggggtaacactggcgcgggtggggggccggggatgggcctgagcctgggcctgggtctgggtctgagcctaggcatgagtgaggccaccagtgaggcagaggaggaggcggccacggccgaggcggtgggacgcctggccacgacgctgtggctgcggctccgcggctgggaggcggtgctggcggcggcgcagcggttgctggtgtgggagaagccgctgcacagcctggtcacggcggccgcgctcaacggcctcttctggttgctgtcttcctcgtccctccggcccttcttcctactcagcgtctcacttttggcctattttctgctggatctctggcagcctcgctttctccctgacgtttcagcatcatccccagaggagccacactctgacagtgagggtgcggggtcaggcgcccggccgcacctgctgagtgtgcccgagttgtgcagatacctggctgagagctggctcaccttccagattcacctgcaggagctgctgcagtacaagaggcagaatccagctcagttctgcgttcgagtctgctctggctgtgctgtgttggctgtgttgggacactatgttccagggattatgatttcctacattgtcttgttgagtatcctgctgtggcccctggtggtttatcatgagctgatccagaggatgtacactcgcctggagcccctgctcatgcagctggactacagcatgaaggcagaagccaatgccctgcatcacaaacacgacaagaggaagcgtcaggggaagaatgcacccccaggaggtgatgagccactggcagagacagagagtgaaagcgaggcagagctggctggcttctccccagtggtggatgtgaagaaaacagcattggccttggccattacagactcagagctgtcagatgaggaggcttctatcttggagagtggtggcttctccgtatcccgggccacaactccgcagctgactgatgtctccgaggatttggaccagcagagcctgccaagtgaaccagaggagaccctaagccgggacctaggggagggagaggagggagagctggcccctcccgaagacctactaggccgtcctcaagctctgtcaaggcaagccctggactcggaggaagaggaagaggatgtggcagctaaggaaaccttgttgcggctctcatcccccctccactttgtgaacacgcacttcaatggggcagggtcccccccagatggagtgaaatgctcccctggaggaccagtggagacactgagccccgagacagtgagtggtggcctcactgctctgcccggcaccctgtcacctccactttgccttgttggaagtgacccagccccctccccttccattctcccacctgttccccaggactcaccccagcccctgcctgcccctgaggaagaagaggcactcaccactgaggactttgagttgctggatcagggggagctggagcagctgaatgcagagctgggcttggagccagagacaccgccaaaaccccctgatgctccacccctggggcccgacatccattctctggtacagtcagaccaagaagctcaggccgtggcagagccatgagccagccgttgaggaaggagctgcaggcacagtagggcttcctggctaggagtgttgctgtttcctcctttgcctaccactctggggtggggcagtgtgtggggaagctggctgtcggatggtagctattccaccctctgcctgcctgcctgcctgctgtcctgggcatggtgcagtacctgtgcctaggattggttttaaatttgtaaataattttccatttgggttagtggatgtgaacagggctagggaagtccttcccacagcctgcgcttgcctccctgcctcatctctattctcattccactatgccccaagccctggtggtctggccctttctttttcctcctatcctcagggacctgtgctgctctgccctcatgtcccacttggttgtttagttgaggcactttataatttttctcttgtcttgtgttcctttctgctttatttccctgctgtgtcctgtccttagcagctcaaccccatcctttgccagctcctcctatcccgtgggcactggccaagctttagggaggctcctggtctgggaagtaaagagtaaacctggggcagtgggtcaggccagtagttacactcttaggtcactgtagtctgtgtaaccttcactgcatccttgccccattcagcccggcctttcatgatgcaggagagcagggatcccgcagtacatggcgccagcactggagttggtgagcatgtgctctctcttgagattaggagcttccttactgctcctctgggtgatccaagtgtagtgggaccccctactagggtcaggaagtggacactaacatctgtgcaggtgttgacttgaaaaataaagtgttgattggctagaactgctgcctccctgactgtgagctgccttccacaccctgcactgcactgtgttctctcctcacccttaacctgcttcactccagtctgttctggctgtttattaccttgttgcaaaacagggccgaagcaaggattaccttgacaaccctagcttctccttagccatcttccttgacagtgtgatctgtttagtgagatttagcatgtgtgaataaagtatatgcaggaggaaattgctttgtcttcccaatcggtagaaattcgggaccataaaaattgtgttttaccatgtggcctacaaccttaacactgctttcttaagaagtcttcacccatctacatgctaacaactcactcagcctggatttatctttactggggaagccaaacaagcaatagaggacctttacctgtgttagaaatgagttggagccaaggaacactgaagaaatagtatcttaacagttactgagtccattgtatgtgcttggctctgctctgagtgatttatatgtattaagatttttcctcacaggtcagatatatactgttactaacttcattttatagacaggttaagcttcctgaaggccacaggtcccagtaaattgtggagccagaacccaaacccaagaagttttggcttcagcaaatgcatcagacagcccctgtccattaatagggcacaggtaggaagatgcacaaggatgtgggaactatagagaaccaatctgatgccttggcttaacaaagagtggacatggcaagccttcctcttcggggaagaaaagcccagaactgagcagatggcctcctttatgagttcatgtcctccgccttcagctggaggtaccatatggcgatgctacctgtctttctgctggaggtaccatatggtaatgctgcctgtctgtctgctggaggtaccatatggtaatgctgcctgtctttctgaggttgacttttatgccatgtctttcctaagtgtgtaagaatttttctgtttgcttcacatttgactgagaatcattctagggtttgattgagcccctgtcctgtgccactaaaggaactcgaacttttcatcacttagagatttcagaggggaatggaaaaacagttctaatcaataagcaagcaattcaagaaaaatagaattaatcaggcaatggctgcaacatgtcctatctttaatctattttcttattaagcttggacattgacaatagaaccagaagcttgtagctggatcaaaatattctccataggcctggagtttcatgagggtctattcttttgttgttgttgttttgnttttttgttttttgtgggtttttttttttttttttttgagacggagtcttgttctgttgcccaggctggagtgcaatggtgcagtcttggttcactgcaacctctgcctcccaggttcaaacaattctcccgcctcagccgtccaagtagctgggatcacaggtgcatgccacgatgcccggctatcttctgtatttttagtagaggtggggttcaccatgttggccaggctggtctcgaactcctgacctcaggtgattcacccacctcggcctcccaaagtgctgggattacaggtgtgagccacggcgcccagcctcatgagggtctattctttacattcaccatggtctgatggttgctacatgtttgtctatgattttttttttctattatcaggtgtcttggccggttcatgccccacgatgaaagggccagaggttttcatatgagtaaaagaaaaaagcagaaatgtgaaacctacaattaggctaaacaaaaatcaactggaaaagtacaggctgaggggagaagagttggctacatgtttatgttaggggaggagggagtacattttagctatgtattcaaacagctaatagtttaatgttgctgcttataaacttaattttaggctgcattaataaaagtgtagtctccaaaacaagaaatgtgataattctagtgtcctgtgcacgaatatcct

SEQ ID NO: 1535 - DNA, 2870 bp, Homo sapiens
acgggctcagctccgcagtcacgtgacgctcgtccgcaacctctgctgtcctccgcggcgcccccttccgcctgacgcgcccccggcggcggccgcgcagccctggctcctcgcgggctcgggcggcggctgcggcggggctatggcgagcggcggtggcgggggtaacactggcgcgggtggggggccggggatgggcctgagcctgggcctgggtctgggtctgagcctaggcatgagtgaggccaccagtgaggcagaggaggaggcggccacggccgaggcggtgggacgcctggccacgacgctgtggctgcggctccgcggctgggaggcggtgctggcggcggcgcagcggttgctggtgtgggagaagccgctgcacagcctggtcacggcggccgcgctcaacggcctcttctggttgctgtcttcctcgtccctccggcccttcttcctactcagcgtctcacttttggcctattttctgctggatctctggcagcctcgctttctccctgacgtttcagcatcatccccagaggagccacactctgacagtgagggtgcggggtcaggcgcccggccgcacctgctgagtgtgcccgagttgtgcagatacctggctgagagctggctcaccttccagattcacctgcaggagctgctgcagtacaagaggcagaatccagctcagttctgcgttcgagtctgctctggctgtgctgtgttggctgtgttgggacactatgttccagggattatgatttcctacattgtcttgttgagtatcctgctgtggcccctggtggtttatcatgagctgatccagaggatgtacactcgcctggagcccctgctcatgcagctggactacagcatgaaggcagaagccaatgccctgcatcacaaacacgacaagaggaagcgtcaggggaagaatgcacccccaggaggtgatgagccactggcagagacagagagtgaaagcgaggcagagctggctggcttctccccagtggtggatgtgaagaaaacagcattggccttggccattacagactcagagctgtcagatgaggaggcttctatcttggagagtggtggcttctccgtatcccgggccacaactccgcagctgactgatgtctccgaggatttggaccagcagagcctgccaagtgaaccagaggagaccctaagccgggacctaggggagggagaggagggagagctggcccctcccgaagacctactaggccgtcctcaagctctgtcaaggcaagccctggactcggaggaagaggaagaggatgtggcagctaaggaaaccttgttgcggctctcatcccccctccactttgtgaacacgcacttcaatggggcagggtcccccccagatggagtgaaatgctcccctggaggaccagtggagacactgagccccgagacagtgagtggtggcctcactgctctgcccggcaccctgtcacctccactttgccttgttggaagtgacccagccccctccccttccattctcccacctgttccccaggactcaccccagcccctgcctgcccctgaggaagaagaggcactcaccactgaggactttgagttgctggatcagggggagctggagcagctgaatgcagagctgggcttggagccagagacaccgccaaaaccccctgatgctccacccctggggcccgacatccattctctggtacagtcagaccaagaagctcaggccgtggcagagccatgagccagccgttgaggaaggagctgcaggcacagtagggcttcctggctaggagtgttgctgtttcctcctttgcctaccactctggggtggggcagtgtgtggggaagctggctgtcggatggtagctattccaccctctgcctgcctgcctgcctgctgtcctgggcatggtgcagtacctgtgcctaggattggttttaaatttgtaaataattttccatttgggttagtggatgtgaacagggctagggaagtccttcccacagcctgcgcttgcctccctgcctcatctctattctcattccactatgccccaagccctggtggtctggccctttctttttcctcctatcctcagggacctgtgctgctctgccctcatgtcccacttggttgtttagttgaggcactttataatttttctcttgtcttgtgttcctttctgctttatttccctgctgtgtcctgtccttagcagctcaaccccatcctttgccagctcctcctatcccgtgggcactggccaagctttagggaggctcctggtctgggaagtaaagagtaaacctggggcagtgggtcaggccagtagttacactcttaggtcactgtagtctgtgtaaccttcactgcatccttgccccattcagcccggcctttcatgatgcaggagagcagggatcccgcagtacatggcgccagcactggagttggtgagcatgtgctctctcttgagattaggagcttccttactgctcctctgggtgatccaagtgtagtgggaccccctactagggtcaggaagtggacactaacatctgtgcaggtgttgacttgaaaaataaagtgttgattggctagaactgctgcctccctgactgtgagctgccttccacaccctgcactgcactgtgttctctcctcacccttaacctgcttcactccagtctgttctggctgtttattaccttgttgcaaaacagggccgaagcaaggattaccttgacaaccctagcttctccttagccatcttccttgacagtgtgatctgtttagtgagatttagcatgtgtgaataaagtatatgcaggaggaa

SEQ ID NO: 1536 - DNA, 4587 bp, Homo sapiens
  misc_feature (3952)..(3952): n is a, c, g, or t
acgggctcagctccgcagtcacgtgacgctcgtccgcaacctctgctgtcctccgcggcgcccccttccgcctgacgcgcccccggcggcggccgcgcagccctggctcctcgcgggctcgggcggcggctgcggcggggctatggcgagcggcggtggcgggggtaacactggcgcgggtggggggccggggatgggcctgagcctgggcctgggtctgggtctgagcctaggcatgagtgaggccaccagtgaggcagaggaggaggcggccacggccgaggcggtgggacgcctggccacgacgctgtggctgcggctccgcggctgggaggcggtgctggcggcggcgcagcggttgctggtgtgggagaagccgctgcacagcctggtcacggcggccgcgctcaacggcctcttctggttgctgtcttcctcgtccctccggcccttcttcctactcagcgtctcacttttggcctattttctgctggatctctggcagcctcgctttctccctgacgtttcagcatcatccccagaggagccacactctgacagtgagggtgcggggtcaggcgcccggccgcacctgctgagtgtgcccgagttgtgcagatacctggctgagagctggctcaccttccagattcacctgcaggagctgctgcagtacaagaggcagaatccagctcagttctgcgttcgagtctgctctggctgtgctgtgttggctgtgttgggacactatgttccagggattatgatttcctacattgtcttgttgagtatcctgctgtggcccctggtggtttatcatgagctgatccagaggatgtacactcgcctggagcccctgctcatgcagctggactacagcatgaaggcagaagccaatgccctgcatcacaaacacgacaagaggaagcgtcaggggaagaatgcacccccaggaggtgatgagccactggcagagacagagagtgaaagcgaggcagagctggctggcttctccccagtggtggatgtgaagaaaacagcattggccttggccattacagactcagagctgtcagatgaggaggcttctatcttggagagtggtggcttctccgtatcccgggccacaactccgcagctgactgatgtctccgaggatttggaccagcagagcctgccaagtgaaccagaggagaccctaagccgggacctaggggagggagaggagggagagctggcccctcccgaagacctactaggccgtcctcaagctctgtcaaggcaagccctggactcggaggaagaggaagaggatgtggcagctaaggaaaccttgttgcggctctcatcccccctccactttgtgaacacgcacttcaatggggcagggtcccccccagatggagtgaaatgctcccctggaggaccagtggagacactgagccccgagacagtgagtggtggcctcactgctctgcccggcaccctgtcacctccactttgccttgttggaagtgacccagccccctccccttccattctcccacctgttccccaggactcaccccagcccctgcctgcccctgaggaagaagaggcactcaccactgaggactttgagttgctggatcagggggagctggagcagctgaatgcagagctgggcttggagccagagacaccgccaaaaccccctgatgctccacccctggggcccgacatccattctctggtacagtcagaccaagaagctcaggccgtggcagagccatgagccagccgttgaggaaggagctgcaggcacagtagggcttcctggctaggagtgttgctgtttcctcctttgcctaccactctggggtggggcagtgtgtggggaagctggctgtcggatggtagctattccaccctctgcctgcctgcctgcctgctgtcctgggcatggtgcagtacctgtgcctaggattggttttaaatttgtaaataattttccatttgggttagtggatgtgaacagggctagggaagtccttcccacagcctgcgcttgcctccctgcctcatctctattctcattccactatgccccaagccctggtggtctggccctttctttttcctcctatcctcagggacctgtgctgctctgccctcatgtcccacttggttgtttagttgaggcactttataatttttctcttgtcttgtgttcctttctgctttatttccctgctgtgtcctgtccttagcagctcaaccccatcctttgccagctcctcctatcccgtgggcactggccaagctttagggaggctcctggtctgggaagtaaagagtaaacctggggcagtgggtcaggccagtagttacactcttaggtcactgtagtctgtgtaaccttcactgcatccttgccccattcagcccggcctttcatgatgcaggagagcagggatcccgcagtacatggcgccagcactggagttggtgagcatgtgctctctcttgagattaggagcttccttactgctcctctgggtgatccaagtgtagtgggaccccctactagggtcaggaagtggacactaacatctgtgcaggtgttgacttgaaaaataaagtgttgattggctagaactgctgcctccctgactgtgagctgccttccacaccctgcactgcactgtgttctctcctcacccttaacctgcttcactccagtctgttctggctgtttattaccttgttgcaaaacagggccgaagcaaggattaccttgacaaccctagcttctccttagccatcttccttgacagtgtgatctgtttagtgagatttagcatgtgtgaataaagtatatgcaggaggaaattgctttgtcttcccaatcggtagaaattcgggaccataaaaattgtgttttaccatgtggcctacaaccttaacactgctttcttaagaagtcttcacccatctacatgctaacaactcactcagcctggatttatctttactggggaagccaaacaagcaatagaggacctttacctgtgttagaaatgagttggagccaaggaacactgaagaaatagtatcttaacagttactgagtccattgtatgtgcttggctctgctctgagtgatttatatgtattaagatttttcctcacaggtcagatatatactgttactaacttcattttatagacaggttaagcttcctgaaggccacaggtcccagtaaattgtggagccagaacccaaacccaagaagttttggcttcagcaaatgcatcagacagcccctgtccattaatagggcacaggtaggaagatgcacaaggatgtgggaactatagagaaccaatctgatgccttggcttaacaaagagtggacatggcaagccttcctcttcggggaagaaaagcccagaactgagcagatggcctcctttatgagttcatgtcctccgccttcagctggaggtaccatatggcgatgctacctgtctttctgctggaggtaccatatggtaatgctgcctgtctgtctgctggaggtaccatatggtaatgctgcctgtctttctgaggttgacttttatgccatgtctttcctaagtgtgtaagaatttttctgtttgcttcacatttgactgagaatcattctagggtttgattgagcccctgtcctgtgccactaaaggaactcgaacttttcatcacttagagatttcagaggggaatggaaaaacagttctaatcaataagcaagcaattcaagaaaaatagaattaatcaggcaatggctgcaacatgtcctatctttaatctattttcttattaagcttggacattgacaatagaaccagaagcttgtagctggatcaaaatattctccataggcctggagtttcatgagggtctattcttttgttgttgttgttttgnttttttgttttttgtgggtttttttttttttttttttgagacggagtcttgttctgttgcccaggctggagtgcaatggtgcagtcttggttcactgcaacctctgcctcccaggttcaaacaattctcccgcctcagccgtccaagtagctgggatcacaggtgcatgccacgatgcccggctatcttctgtatttttagtagaggtggggttcaccatgttggccaggctggtctcgaactcctgacctcaggtgattcacccacctcggcctcccaaagtgctgggattacaggtgtgagccacggcgcccagcctcatgagggtctattctttacattcaccatggtctgatggttgctacatgtttgtctatgattttttttttctattatcaggtgtcttggccggttcatgccccacgatgaaagggccagaggttttcatatgagtaaaagaaaaaagcagaaatgtgaaacctacaattaggctaaacaaaaatcaactggaaaagtacaggctgaggggagaagagttggctacatgtttatgttaggggaggagggagtacattttagctatgtattcaaacagctaatagtttaatgtgctaacgactacgggatcctctaga

SEQ ID NO: 1537 - DNA, 4510 bp, Homo sapiens
  misc_feature (3952)..(3952): n is a, c, g, or t
acgggctcagctccgcagtcacgtgacgctcgtccgcaacctctgctgtcctccgcggcgcccccttccgcctgacgcgcccccggcggcggccgcgcagccctggctcctcgcgggctcgggcggcggctgcggcggggctatggcgagcggcggtggcgggggtaacactggcgcgggtggggggccggggatgggcctgagcctgggcctgggtctgggtctgagcctaggcatgagtgaggccaccagtgaggcagaggaggaggcggccacggccgaggcggtgggacgcctggccacgacgctgtggctgcggctccgcggctgggaggcggtgctggcggcggcgcagcggttgctggtgtgggagaagccgctgcacagcctggtcacggcggccgcgctcaacggcctcttctggttgctgtcttcctcgtccctccggcccttcttcctactcagcgtctcacttttggcctattttctgctggatctctggcagcctcgctttctccctgacgtttcagcatcatccccagaggagccacactctgacagtgagggtgcggggtcaggcgcccggccgcacctgctgagtgtgcccgagttgtgcagatacctggctgagagctggctcaccttccagattcacctgcaggagctgctgcagtacaagaggcagaatccagctcagttctgcgttcgagtctgctctggctgtgctgtgttggctgtgttgggacactatgttccagggattatgatttcctacattgtcttgttgagtatcctgctgtggcccctggtggtttatcatgagctgatccagaggatgtacactcgcctggagcccctgctcatgcagctggactacagcatgaaggcagaagccaatgccctgcatcacaaacacgacaagaggaagcgtcaggggaagaatgcacccccaggaggtgatgagccactggcagagacagagagtgaaagcgaggcagagctggctggcttctccccagtggtggatgtgaagaaaacagcattggccttggccattacagactcagagctgtcagatgaggaggcttctatcttggagagtggtggcttctccgtatcccgggccacaactccgcagctgactgatgtctccgaggatttggaccagcagagcctgccaagtgaaccagaggagaccctaagccgggacctaggggagggagaggagggagagctggcccctcccgaagacctactaggccgtcctcaagctctgtcaaggcaagccctggactcggaggaagaggaagaggatgtggcagctaaggaaaccttgttgcggctctcatcccccctccactttgtgaacacgcacttcaatggggcagggtcccccccagatggagtgaaatgctcccctggaggaccagtggagacactgagccccgagacagtgagtggtggcctcactgctctgcccggcaccctgtcacctccactttgccttgttggaagtgacccagccccctccccttccattctcccacctgttccccaggactcaccccagcccctgcctgcccctgaggaagaagaggcactcaccactgaggactttgagttgctggatcagggggagctggagcagctgaatgcagagctgggcttggagccagagacaccgccaaaaccccctgatgctccacccctggggcccgacatccattctctggtacagtcagaccaagaagctcaggccgtggcagagccatgagccagccgttgaggaaggagctgcaggcacagtagggcttcctggctaggagtgttgctgtttcctcctttgcctaccactctggggtggggcagtgtgtggggaagctggctgtcggatggtagctattccaccctctgcctgcctgcctgcctgctgtcctgggcatggtgcagtacctgtgcctaggattggttttaaatttgtaaataattttccatttgggttagtggatgtgaacagggctagggaagtccttcccacagcctgcgcttgcctccctgcctcatctctattctcattccactatgccccaagccctggtggtctggccctttctttttcctcctatcctcagggacctgtgctgctctgccctcatgtcccacttggttgtttagttgaggcactttataatttttctcttgtcttgtgttcctttctgctttatttccctgctgtgtcctgtccttagcagctcaaccccatcctttgccagctcctcctatcccgtgggcactggccaagctttagggaggctcctggtctgggaagtaaagagtaaacctggggcagtgggtcaggccagtagttacactcttaggtcactgtagtctgtgtaaccttcactgcatccttgccccattcagcccggcctttcatgatgcaggagagcagggatcccgcagtacatggcgccagcactggagttggtgagcatgtgctctctcttgagattaggagcttccttactgctcctctgggtgatccaagtgtagtgggaccccctactagggtcaggaagtggacactaacatctgtgcaggtgttgacttgaaaaataaagtgttgattggctagaactgctgcctccctgactgtgagctgccttccacaccctgcactgcactgtgttctctcctcacccttaacctgcttcactccagtctgttctggctgtttattaccttgttgcaaaacagggccgaagcaaggattaccttgacaaccctagcttctccttagccatcttccttgacagtgtgatctgtttagtgagatttagcatgtgtgaataaagtatatgcaggaggaaattgctttgtcttcccaatcggtagaaattcgggaccataaaaattgtgttttaccatgtggcctacaaccttaacactgctttcttaagaagtcttcacccatctacatgctaacaactcactcagcctggatttatctttactggggaagccaaacaagcaatagaggacctttacctgtgttagaaatgagttggagccaaggaacactgaagaaatagtatcttaacagttactgagtccattgtatgtgcttggctctgctctgagtgatttatatgtattaagatttttcctcacaggtcagatatatactgttactaacttcattttatagacaggttaagcttcctgaaggccacaggtcccagtaaattgtggagccagaacccaaacccaagaagttttggcttcagcaaatgcatcagacagcccctgtccattaatagggcacaggtaggaagatgcacaaggatgtgggaactatagagaaccaatctgatgccttggcttaacaaagagtggacatggcaagccttcctcttcggggaagaaaagcccagaactgagcagatggcctcctttatgagttcatgtcctccgccttcagctggaggtaccatatggcgatgctacctgtctttctgctggaggtaccatatggtaatgctgcctgtctgtctgctggaggtaccatatggtaatgctgcctgtctttctgaggttgacttttatgccatgtctttcctaagtgtgtaagaatttttctgtttgcttcacatttgactgagaatcattctagggtttgattgagcccctgtcctgtgccactaaaggaactcgaacttttcatcacttagagatttcagaggggaatggaaaaacagttctaatcaataagcaagcaattcaagaaaaatagaattaatcaggcaatggctgcaacatgtcctatctttaatctattttcttattaagcttggacattgacaatagaaccagaagcttgtagctggatcaaaatattctccataggcctggagtttcatgagggtctattcttttgttgttgttgttttgnttttttgttttttgtgggtttttttttttttttttttgagacggagtcttgttctgttgcccaggctggagtgcaatggtgcagtcttggttcactgcaacctctgcctcccaggttcaaacaattctcccgcctcagccgtccaagtagctgggatcacaggtgcatgccacgatgcccggctatcttctgtatttttagtagaggtggggttcaccatgttggccaggctggtctcgaactcctgacctcaggtgattcacccacctcggcctcccaaagtgctgggattacaggtgtgagccacggcgcccagcctcatgagggtctattctttacattcaccatggtctgatggttgctacatgtttgtctatgattttttttttctattatcaggtgtcttggccggttcatgccccacgatgaaagggccagaggttttcatatgagtaaaagaaaaaagcagaaatgtgaaacctacaattaggctaaacaaaaatcaactggaaaagtacgcgtgagggcattgaaagactcgatatggggatcctctag

SEQ ID NO: 1538 - DNA, 2934 bp, Homo sapiens
acgggctcagctccgcagtcacgtgacgctcgtccgcaacctctgctgtcctccgcggcgcccccttccgcctgacgcgcccccggcggcggccgcgcagccctggctcctcgcgggctcgggcggcggctgcggcggggctatggcgagcggcggtggcgggggtaacactggcgcgggtggggggccggggatgggcctgagcctgggcctgggtctgggtctgagcctaggcatgagtgaggccaccagtgaggcagaggaggaggcggccacggccgaggcggtgggacgcctggccacgacgctgtggctgcggctccgcggctgggaggcggtgctggcggcggcgcagcggttgctggtgtgggagaagccgctgcacagcctggtcacggcggccgcgctcaacggcctcttctggttgctgtcttcctcgtccctccggcccttcttcctactcagcgtctcacttttggcctattttctgctggatctctggcagcctcgctttctccctgacgtttcagcatcatccccagaggagccacactctgacagtgagggtgcggggtcaggcgcccggccgcacctgctgagtgtgcccgagttgtgcagatacctggctgagagctggctcaccttccagattcacctgcaggagctgctgcagtacaagaggcagaatccagctcagttctgcgttcgagtctgctctggctgtgctgtgttggctgtgttgggacactatgttccagggattatgatttcctacattgtcttgttgagtatcctgctgtggcccctggtggtttatcatgagctgatccagaggatgtacactcgcctggagcccctgctcatgcagctggactacagcatgaaggcagaagccaatgccctgcatcacaaacacgacaagaggaagcgtcaggggaagaatgcacccccaggaggtgatgagccactggcagagacagagagtgaaagcgaggcagagctggctggcttctccccagtggtggatgtgaagaaaacagcattggccttggccattacagactcagagctgtcagatgaggaggcttctatcttggagagtggtggcttctccgtatcccgggccacaactccgcagctgactgatgtctccgaggatttggaccagcagagcctgccaagtgaaccagaggagaccctaagccgggacctaggggagggagaggagggagagctggcccctcccgaagacctactaggccgtcctcaagctctgtcaaggcaagccctggactcggaggaagaggaagaggatgtggcagctaaggaaaccttgttgcggctctcatcccccctccactttgtgaacacgcacttcaatggggcagggtcccccccagatggagtgaaatgctcccctggaggaccagtggagacactgagccccgagacagtgagtggtggcctcactgctctgcccggcaccctgtcacctccactttgccttgttggaagtgacccagccccctccccttccattctcccacctgttccccaggactcaccccagcccctgcctgcccctgaggaagaagaggcactcaccactgaggactttgagttgctggatcagggggagctggagcagctgaatgcagagctgggcttggagccagagacaccgccaaaaccccctgatgctccacccctggggcccgacatccattctctggtacagtcagaccaagaagctcaggccgtggcagagccatgagccagccgttgaggaaggagctgcaggcacagtagggcttcctggctaggagtgttgctgtttcctcctttgcctaccactctggggtggggcagtgtgtggggaagctggctgtcggatggtagctattccaccctctgcctgcctgcctgcctgctgtcctgggcatggtgcagtacctgtgcctaggattggttttaaatttgtaaataattttccatttgggttagtggatgtgaacagggctagggaagtccttcccacagcctgcgcttgcctccctgcctcatctctattctcattccactatgccccaagccctggtggtctggccctttctttttcctcctatcctcagggacctgtgctgctctgccctcatgtcccacttggttgtttagttgaggcactttataatttttctcttgtcttgtgttcctttctgctttatttccctgctgtgtcctgtccttagcagctcaaccccatcctttgccagctcctcctatcccgtgggcactggccaagctttagggaggctcctggtctgggaagtaaagagtaaacctggggcagtgggtcaggccagtagttacactcttaggtcactgtagtctgtgtaaccttcactgcatccttgccccattcagcccggcctttcatgatgcaggagagcagggatcccgcagtacatggcgccagcactggagttggtgagcatgtgctctctcttgagattaggagcttccttactgctcctctgggtgatccaagtgtagtgggaccccctactagggtcaggaagtggacactaacatctgtgcaggtgttgacttgaaaaataaagtgttgattggctagaactgctgcctccctgactgtgagctgccttccacaccctgcactgcactgtgttctctcctcacccttaacctgcttcactccagtctgttctggctgtttattaccttgttgcaaaacagggccgaagcaaggattaccttgacaaccctagcttctccttagccatcttccttgacagtgtgatctgtttagtgagatttagcatgtgtgaataaagtatatgcaggaggaatgctttcttctctatcggaaataaccggaggataaattactgttctttcttttttttttttttt

SEQ ID NO: 1539 - DNA, 4525 bp, Homo sapiens
  misc_feature (3865)..(3865): n is a, c, g, or t
acgggctcagctccgcagtcacgtgacgctcgtccgcaacctctgctgtcctccgcggcgcccccttccgcctgacgcgcccccggcggcggccgcgcagccctggctcctcgcgggctcgggcggcggctgcggcggggctatggcgagcggcggtggcgggggtaacactggcgcgggtggggggccggggatgggcctgagcctgggcctgggtctgggtctgagcctaggcatgagtgaggccaccagtgaggcagaggaggaggcggccacggccgaggcggtgggacgcctggccacgacgctgtggctgcggctccgcggctgggaggcggtgctggcggcggcgcagcggttgctggtgtgggagaagccgctgcacagcctggtcacggcggccgcgctcaacggcctcttctggttgctgtcttcctcgtccctccggcccttcttcctactcagcgtctcacttttggcctattttctgctggatctctggcagcctcgctttctccctgacgtttcagcatcatccccagaggagccacactctgacaggattcacctgcaggagctgctgcagtacaagaggcagaatccagctcagttctgcgttcgagtctgctctggctgtgctgtgttggctgtgttgggacactatgttccagggattatgatttcctacattgtcttgttgagtatcctgctgtggcccctggtggtttatcatgagctgatccagaggatgtacactcgcctggagcccctgctcatgcagctggactacagcatgaaggcagaagccaatgccctgcatcacaaacacgacaagaggaagcgtcaggggaagaatgcacccccaggaggtgatgagccactggcagagacagagagtgaaagcgaggcagagctggctggcttctccccagtggtggatgtgaagaaaacagcattggccttggccattacagactcagagctgtcagatgaggaggcttctatcttggagagtggtggcttctccgtatcccgggccacaactccgcagctgactgatgtctccgaggatttggaccagcagagcctgccaagtgaaccagaggagaccctaagccgggacctaggggagggagaggagggagagctggcccctcccgaagacctactaggccgtcctcaagctctgtcaaggcaagccctggactcggaggaagaggaagaggatgtggcagctaaggaaaccttgttgcggctctcatcccccctccactttgtgaacacgcacttcaatggggcagggtcccccccagatggagtgaaatgctcccctggaggaccagtggagacactgagccccgagacagtgagtggtggcctcactgctctgcccggcaccctgtcacctccactttgccttgttggaagtgacccagccccctccccttccattctcccacctgttccccaggactcaccccagcccctgcctgcccctgaggaagaagaggcactcaccactgaggactttgagttgctggatcagggggagctggagcagctgaatgcagagctgggcttggagccagagacaccgccaaaaccccctgatgctccacccctggggcccgacatccattctctggtacagtcagaccaagaagctcaggccgtggcagagccatgagccagccgttgaggaaggagctgcaggcacagtagggcttcctggctaggagtgttgctgtttcctcctttgcctaccactctggggtggggcagtgtgtggggaagctggctgtcggatggtagctattccaccctctgcctgcctgcctgcctgctgtcctgggcatggtgcagtacctgtgcctaggattggttttaaatttgtaaataattttccatttgggttagtggatgtgaacagggctagggaagtccttcccacagcctgcgcttgcctccctgcctcatctctattctcattccactatgccccaagccctggtggtctggccctttctttttcctcctatcctcagggacctgtgctgctctgccctcatgtcccacttggttgtttagttgaggcactttataatttttctcttgtcttgtgttcctttctgctttatttccctgctgtgtcctgtccttagcagctcaaccccatcctttgccagctcctcctatcccgtgggcactggccaagctttagggaggctcctggtctgggaagtaaagagtaaacctggggcagtgggtcaggccagtagttacactcttaggtcactgtagtctgtgtaaccttcactgcatccttgccccattcagcccggcctttcatgatgcaggagagcagggatcccgcagtacatggcgccagcactggagttggtgagcatgtgctctctcttgagattaggagcttccttactgctcctctgggtgatccaagtgtagtgggaccccctactagggtcaggaagtggacactaacatctgtgcaggtgttgacttgaaaaataaagtgttgattggctagaactgctgcctccctgactgtgagctgccttccacaccctgcactgcactgtgttctctcctcacccttaacctgcttcactccagtctgttctggctgtttattaccttgttgcaaaacagggccgaagcaaggattaccttgacaaccctagcttctccttagccatcttccttgacagtgtgatctgtttagtgagatttagcatgtgtgaataaagtatatgcaggaggaaattgctttgtcttcccaatcggtagaaattcgggaccataaaaattgtgttttaccatgtggcctacaaccttaacactgctttcttaagaagtcttcacccatctacatgctaacaactcactcagcctggatttatctttactggggaagccaaacaagcaatagaggacctttacctgtgttagaaatgagttggagccaaggaacactgaagaaatagtatcttaacagttactgagtccattgtatgtgcttggctctgctctgagtgatttatatgtattaagatttttcctcacaggtcagatatatactgttactaacttcattttatagacaggttaagcttcctgaaggccacaggtcccagtaaattgtggagccagaacccaaacccaagaagttttggcttcagcaaatgcatcagacagcccctgtccattaatagggcacaggtaggaagatgcacaaggatgtgggaactatagagaaccaatctgatgccttggcttaacaaagagtggacatggcaagccttcctcttcggggaagaaaagcccagaactgagcagatggcctcctttatgagttcatgtcctccgccttcagctggaggtaccatatggcgatgctacctgtctttctgctggaggtaccatatggtaatgctgcctgtctgtctgctggaggtaccatatggtaatgctgcctgtctttctgaggttgacttttatgccatgtctttcctaagtgtgtaagaatttttctgtttgcttcacatttgactgagaatcattctagggtttgattgagcccctgtcctgtgccactaaaggaactcgaacttttcatcacttagagatttcagaggggaatggaaaaacagttctaatcaataagcaagcaattcaagaaaaatagaattaatcaggcaatggctgcaacatgtcctatctttaatctattttcttattaagcttggacattgacaatagaaccagaagcttgtagctggatcaaaatattctccataggcctggagtttcatgagggtctattcttttgttgttgttgttttgnttttttgttttttgtgggtttttttttttttttttttgagacggagtcttgttctgttgcccaggctggagtgcaatggtgcagtcttggttcactgcaacctctgcctcccaggttcaaacaattctcccgcctcagccgtccaagtagctgggatcacaggtgcatgccacgatgcccggctatcttctgtatttttagtagaggtggggttcaccatgttggccaggctggtctcgaactcctgacctcaggtgattcacccacctcggcctcccaaagtgctgggattacaggtgtgagccacggcgcccagcctcatgagggtctattctttacattcaccatggtctgatggttgctacatgtttgtctatgattttttttttctattatcaggtgtcttggccggttcatgccccacgatgaaagggccagaggttttcatatgagtaaaagaaaaaagcagaaatgtgaaacctacaattaggctaaacaaaaatcaactggaaaagtacaggctgaggggagaagagttggctacatgtttatgttaggggaggagggagtacattttagctatgtattcaaacagctaatagtttaatgttgctgcttataaacttaattttaggctgcattaataaaagtgtagtctcc

SEQ ID NO: 1540 - DNA, 4327 bp, Homo sapiens
  misc_feature (16)..(16): n is a, c, g, or t
  misc_feature (19)..(19): n is a, c, g, or t
  misc_feature (27)..(27): n is a, c, g, or t
  misc_feature (3667)..(3667): n is a, c, g, or t
tgcaggctggtaccgnccncgggtatngatggggcatgacccatccccagtttttgcaggctgacatccgcttgaattgcccatttttttctatctctgagtcgtgagtcgcgagttaggcctggaggtgccattaccccatcagtaggcgcctttccaccttctgagatggatgcatgagcctgtctcacccactcactgctgaggtgcctgtctctccctaaggttgctgtcttcctcgtccctccggcccttcttcctactcagcgtctcacttttggcctattttctgctggatctctggcagcctcgctttctccctgacgtttcagcatcatccccagaggagccacactctgacaggattcacctgcaggagctgctgcagtacaagaggcagaatccagctcagttctgcgttcgagtctgctctggctgtgctgtgttggctgtgttgggacactatgttccagggattatgatttcctacattgtcttgttgagtatcctgctgtggcccctggtggtttatcatgagctgatccagaggatgtacactcgcctggagcccctgctcatgcagctggactacagcatgaaggcagaagccaatgccctgcatcacaaacacgacaagaggaagcgtcaggggaagaatgcacccccaggaggtgatgagccactggcagagacagagagtgaaagcgaggcagagctggctggcttctccccagtggtggatgtgaagaaaacagcattggccttggccattacagactcagagctgtcagatgaggaggcttctatcttggagagtggtggcttctccgtatcccgggccacaactccgcagctgactgatgtctccgaggatttggaccagcagagcctgccaagtgaaccagaggagaccctaagccgggacctaggggagggagaggagggagagctggcccctcccgaagacctactaggccgtcctcaagctctgtcaaggcaagccctggactcggaggaagaggaagaggatgtggcagctaaggaaaccttgttgcggctctcatcccccctccactttgtgaacacgcacttcaatggggcagggtcccccccagatggagtgaaatgctcccctggaggaccagtggagacactgagccccgagacagtgagtggtggcctcactgctctgcccggcaccctgtcacctccactttgccttgttggaagtgacccagccccctccccttccattctcccacctgttccccaggactcaccccagcccctgcctgcccctgaggaagaagaggcactcaccactgaggactttgagttgctggatcagggggagctggagcagctgaatgcagagctgggcttggagccagagacaccgccaaaaccccctgatgctccacccctggggcccgacatccattctctggtacagtcagaccaagaagctcaggccgtggcagagccatgagccagccgttgaggaaggagctgcaggcacagtagggcttcctggctaggagtgttgctgtttcctcctttgcctaccactctggggtggggcagtgtgtggggaagctggctgtcggatggtagctattccaccctctgcctgcctgcctgcctgctgtcctgggcatggtgcagtacctgtgcctaggattggttttaaatttgtaaataattttccatttgggttagtggatgtgaacagggctagggaagtccttcccacagcctgcgcttgcctccctgcctcatctctattctcattccactatgccccaagccctggtggtctggccctttctttttcctcctatcctcagggacctgtgctgctctgccctcatgtcccacttggttgtttagttgaggcactttataatttttctcttgtcttgtgttcctttctgctttatttccctgctgtgtcctgtccttagcagctcaaccccatcctttgccagctcctcctatcccgtgggcactggccaagctttagggaggctcctggtctgggaagtaaagagtaaacctggggcagtgggtcaggccagtagttacactcttaggtcactgtagtctgtgtaaccttcactgcatccttgccccattcagcccggcctttcatgatgcaggagagcagggatcccgcagtacatggcgccagcactggagttggtgagcatgtgctctctcttgagattaggagcttccttactgctcctctgggtgatccaagtgtagtgggaccccctactagggtcaggaagtggacactaacatctgtgcaggtgttgacttgaaaaataaagtgttgattggctagaactgctgcctccctgactgtgagctgccttccacaccctgcactgcactgtgttctctcctcacccttaacctgcttcactccagtctgttctggctgtttattaccttgttgcaaaacagggccgaagcaaggattaccttgacaaccctagcttctccttagccatcttccttgacagtgtgatctgtttagtgagatttagcatgtgtgaataaagtatatgcaggaggaaattgctttgtcttcccaatcggtagaaattcgggaccataaaaattgtgttttaccatgtggcctacaaccttaacactgctttcttaagaagtcttcacccatctacatgctaacaactcactcagcctggatttatctttactggggaagccaaacaagcaatagaggacctttacctgtgttagaaatgagttggagccaaggaacactgaagaaatagtatcttaacagttactgagtccattgtatgtgcttggctctgctctgagtgatttatatgtattaagatttttcctcacaggtcagatatatactgttactaacttcattttatagacaggttaagcttcctgaaggccacaggtcccagtaaattgtggagccagaacccaaacccaagaagttttggcttcagcaaatgcatcagacagcccctgtccattaatagggcacaggtaggaagatgcacaaggatgtgggaactatagagaaccaatctgatgccttggcttaacaaagagtggacatggcaagccttcctcttcggggaagaaaagcccagaactgagcagatggcctcctttatgagttcatgtcctccgccttcagctggaggtaccatatggcgatgctacctgtctttctgctggaggtaccatatggtaatgctgcctgtctgtctgctggaggtaccatatggtaatgctgcctgtctttctgaggttgacttttatgccatgtctttcctaagtgtgtaagaatttttctgtttgcttcacatttgactgagaatcattctagggtttgattgagcccctgtcctgtgccactaaaggaactcgaacttttcatcacttagagatttcagaggggaatggaaaaacagttctaatcaataagcaagcaattcaagaaaaatagaattaatcaggcaatggctgcaacatgtcctatctttaatctattttcttattaagcttggacattgacaatagaaccagaagcttgtagctggatcaaaatattctccataggcctggagtttcatgagggtctattcttttgttgttgttgttttgnttttttgttttttgtgggtttttttttttttttttttgagacggagtcttgttctgttgcccaggctggagtgcaatggtgcagtcttggttcactgcaacctctgcctcccaggttcaaacaattctcccgcctcagccgtccaagtagctgggatcacaggtgcatgccacgatgcccggctatcttctgtatttttagtagaggtggggttcaccatgttggccaggctggtctcgaactcctgacctcaggtgattcacccacctcggcctcccaaagtgctgggattacaggtgtgagccacggcgcccagcctcatgagggtctattctttacattcaccatggtctgatggttgctacatgtttgtctatgattttttttttctattatcaggtgtcttggccggttcatgccccacgatgaaagggccagaggttttcatatgagtaaaagaaaaaagcagaaatgtgaaacctacaattaggctaaacaaaaatcaactggaaaagtacaggctgaggggagaagagttggctacatgtttatgttaggggaggagggagtacattttagctatgtattcaaacagctaatagtttaatgttgctgcttataaacttaattttaggctgcattaataaaagtgtagtctcc

SEQ ID NO: 1541 - DNA, 4524 bp, Homo sapiens
  misc_feature (3864)..(3864): n is a, c, g, or t
acgggctcagctccgcagtcacgtgacgctcgtccgcaacctctgctgtcctccgcggcgcccccttccgcctgacgcgcccccggcggcggccgcgcagccctggctcctcgcgggctcgggcggcggctgcggcggggctatggcgagcggcggtggcgggggtaacactggcgcgggtggggggccggggatgggcctgagcctgggcctgggtctgggtctgagcctaggcatgagtgaggccaccagtgaggcagaggaggaggcggccacggccgaggcggtgggacgcctggccacgacgctgtggctgcggctccgcggctgggaggcggtgctggcggcggcgcagcggttgctggtgtgggagaagccgctgcacagcctggtcacggcggccgcgctcaacggcctcttctggttgctgtcttcctcgtccctccggcccttcttcctactcagcgtctcacttttggcctattttctgctggatctctggcagcctcgctttctccctgacgtttcagcatcatccccagaggagccacactctgacagtgagggtgcggggtcaggcgcccggccgcacctgctgagtgtgcccgattctgcgttcgagtctgctctggctgtgctgtgttggctgtgttgggacactatgttccagggattatgatttcctacattgtcttgttgagtatcctgctgtggcccctggtggtttatcatgagctgatccagaggatgtacactcgcctggagcccctgctcatgcagctggactacagcatgaaggcagaagccaatgccctgcatcacaaacacgacaagaggaagcgtcaggggaagaatgcacccccaggaggtgatgagccactggcagagacagagagtgaaagcgaggcagagctggctggcttctccccagtggtggatgtgaagaaaacagcattggccttggccattacagactcagagctgtcagatgaggaggcttctatcttggagagtggtggcttctccgtatcccgggccacaactccgcagctgactgatgtctccgaggatttggaccagcagagcctgccaagtgaaccagaggagaccctaagccgggacctaggggagggagaggagggagagctggcccctcccgaagacctactaggccgtcctcaagctctgtcaaggcaagccctggactcggaggaagaggaagaggatgtggcagctaaggaaaccttgttgcggctctcatcccccctccactttgtgaacacgcacttcaatggggcagggtcccccccagatggagtgaaatgctcccctggaggaccagtggagacactgagccccgagacagtgagtggtggcctcactgctctgcccggcaccctgtcacctccactttgccttgttggaagtgacccagccccctccccttccattctcccacctgttccccaggactcaccccagcccctgcctgcccctgaggaagaagaggcactcaccactgaggactttgagttgctggatcagggggagctggagcagctgaatgcagagctgggcttggagccagagacaccgccaaaaccccctgatgctccacccctggggcccgacatccattctctggtacagtcagaccaagaagctcaggccgtggcagagccatgagccagccgttgaggaaggagctgcaggcacagtagggcttcctggctaggagtgttgctgtttcctcctttgcctaccactctggggtggggcagtgtgtggggaagctggctgtcggatggtagctattccaccctctgcctgcctgcctgcctgctgtcctgggcatggtgcagtacctgtgcctaggattggttttaaatttgtaaataattttccatttgggttagtggatgtgaacagggctagggaagtccttcccacagcctgcgcttgcctccctgcctcatctctattctcattccactatgccccaagccctggtggtctggccctttctttttcctcctatcctcagggacctgtgctgctctgccctcatgtcccacttggttgtttagttgaggcactttataatttttctcttgtcttgtgttcctttctgctttatttccctgctgtgtcctgtccttagcagctcaaccccatcctttgccagctcctcctatcccgtgggcactggccaagctttagggaggctcctggtctgggaagtaaagagtaaacctggggcagtgggtcaggccagtagttacactcttaggtcactgtagtctgtgtaaccttcactgcatccttgccccattcagcccggcctttcatgatgcaggagagcagggatcccgcagtacatggcgccagcactggagttggtgagcatgtgctctctcttgagattaggagcttccttactgctcctctgggtgatccaagtgtagtgggaccccctactagggtcaggaagtggacactaacatctgtgcaggtgttgacttgaaaaataaagtgttgattggctagaactgctgcctccctgactgtgagctgccttccacaccctgcactgcactgtgttctctcctcacccttaacctgcttcactccagtctgttctggctgtttattaccttgttgcaaaacagggccgaagcaaggattaccttgacaaccctagcttctccttagccatcttccttgacagtgtgatctgtttagtgagatttagcatgtgtgaataaagtatatgcaggaggaaattgctttgtcttcccaatcggtagaaattcgggaccataaaaattgtgttttaccatgtggcctacaaccttaacactgctttcttaagaagtcttcacccatctacatgctaacaactcactcagcctggatttatctttactggggaagccaaacaagcaatagaggacctttacctgtgttagaaatgagttggagccaaggaacactgaagaaatagtatcttaacagttactgagtccattgtatgtgcttggctctgctctgagtgatttatatgtattaagatttttcctcacaggtcagatatatactgttactaacttcattttatagacaggttaagcttcctgaaggccacaggtcccagtaaattgtggagccagaacccaaacccaagaagttttggcttcagcaaatgcatcagacagcccctgtccattaatagggcacaggtaggaagatgcacaaggatgtgggaactatagagaaccaatctgatgccttggcttaacaaagagtggacatggcaagccttcctcttcggggaagaaaagcccagaactgagcagatggcctcctttatgagttcatgtcctccgccttcagctggaggtaccatatggcgatgctacctgtctttctgctggaggtaccatatggtaatgctgcctgtctgtctgctggaggtaccatatggtaatgctgcctgtctttctgaggttgacttttatgccatgtctttcctaagtgtgtaagaatttttctgtttgcttcacatttgactgagaatcattctagggtttgattgagcccctgtcctgtgccactaaaggaactcgaacttttcatcacttagagatttcagaggggaatggaaaaacagttctaatcaataagcaagcaattcaagaaaaatagaattaatcaggcaatggctgcaacatgtcctatctttaatctattttcttattaagcttggacattgacaatagaaccagaagcttgtagctggatcaaaatattctccataggcctggagtttcatgagggtctattcttttgttgttgttgttttgnttttttgttttttgtgggtttttttttttttttttttgagacggagtcttgttctgttgcccaggctggagtgcaatggtgcagtcttggttcactgcaacctctgcctcccaggttcaaacaattctcccgcctcagccgtccaagtagctgggatcacaggtgcatgccacgatgcccggctatcttctgtatttttagtagaggtggggttcaccatgttggccaggctggtctcgaactcctgacctcaggtgattcacccacctcggcctcccaaagtgctgggattacaggtgtgagccacggcgcccagcctcatgagggtctattctttacattcaccatggtctgatggttgctacatgtttgtctatgattttttttttctattatcaggtgtcttggccggttcatgccccacgatgaaagggccagaggttttcatatgagtaaaagaaaaaagcagaaatgtgaaacctacaattaggctaaacaaaaatcaactggaaaagtacaggctgaggggagaagagttggctacatgtttatgttaggggaggagggagtacattttagctatgtattcaaacagctaatagtttaatgttgctgcttataaacttaattttaggctgcattaataaaagtgtagtctcc

SEQ ID NO: 1542 - DNA, 4360 bp, Homo sapiens
  misc_feature (3700)..(3700): n is a, c, g, or t
acgggctcagctccgcagtcacgtgacgctcgtccgcaacctctgctgtcctccgcggcgcccccttccgcctgacgcgcccccggcggcggccgcgcagccctggctcctcgcgggctcgggcggcggctgcggcggggctatggcgagcggcggtggcgggggtaacactggcgcgggtggggggccggggatgggcctgagcctgggcctgggtctgggtctgagcctaggcatgagtgaggccaccagtgaggcagaggaggaggcggccacggccgaggcggtgggacgcctggccacgacgctgtggctgcggctccgcggctgggaggcggtgctggcggcggcgcagcggttgctggtgtgggagaagccgctgcacagcctggtcacggcggccgcgctcaacggcctcttctggttgctgtcttcctcgtccctccggcccttcttcctactcagcgtctcacttttggcggctgtgttgggacactatgttccagggattatgatttcctacattgtcttgttgagtatcctgctgtggcccctggtggtttatcatgagctgatccagaggatgtacactcgcctggagcccctgctcatgcagctggactacagcatgaaggcagaagccaatgccctgcatcacaaacacgacaagaggaagcgtcaggggaagaatgcacccccaggaggtgatgagccactggcagagacagagagtgaaagcgaggcagagctggctggcttctccccagtggtggatgtgaagaaaacagcattggccttggccattacagactcagagctgtcagatgaggaggcttctatcttggagagtggtggcttctccgtatcccgggccacaactccgcagctgactgatgtctccgaggatttggaccagcagagcctgccaagtgaaccagaggagaccctaagccgggacctaggggagggagaggagggagagctggcccctcccgaagacctactaggccgtcctcaagctctgtcaaggcaagccctggactcggaggaagaggaagaggatgtggcagctaaggaaaccttgttgcggctctcatcccccctccactttgtgaacacgcacttcaatggggcagggtcccccccagatggagtgaaatgctcccctggaggaccagtggagacactgagccccgagacagtgagtggtggcctcactgctctgcccggcaccctgtcacctccactttgccttgttggaagtgacccagccccctccccttccattctcccacctgttccccaggactcaccccagcccctgcctgcccctgaggaagaagaggcactcaccactgaggactttgagttgctggatcagggggagctggagcagctgaatgcagagctgggcttggagccagagacaccgccaaaaccccctgatgctccacccctggggcccgacatccattctctggtacagtcagaccaagaagctcaggccgtggcagagccatgagccagccgttgaggaaggagctgcaggcacagtagggcttcctggctaggagtgttgctgtttcctcctttgcctaccactctggggtggggcagtgtgtggggaagctggctgtcggatggtagctattccaccctctgcctgcctgcctgcctgctgtcctgggcatggtgcagtacctgtgcctaggattggttttaaatttgtaaataattttccatttgggttagtggatgtgaacagggctagggaagtccttcccacagcctgcgcttgcctccctgcctcatctctattctcattccactatgccccaagccctggtggtctggccctttctttttcctcctatcctcagggacctgtgctgctctgccctcatgtcccacttggttgtttagttgaggcactttataatttttctcttgtcttgtgttcctttctgctttatttccctgctgtgtcctgtccttagcagctcaaccccatcctttgccagctcctcctatcccgtgggcactggccaagctttagggaggctcctggtctgggaagtaaagagtaaacctggggcagtgggtcaggccagtagttacactcttaggtcactgtagtctgtgtaaccttcactgcatccttgccccattcagcccggcctttcatgatgcaggagagcagggatcccgcagtacatggcgccagcactggagttggtgagcatgtgctctctcttgagattaggagcttccttactgctcctctgggtgatccaagtgtagtgggaccccctactagggtcaggaagtggacactaacatctgtgcaggtgttgacttgaaaaataaagtgttgattggctagaactgctgcctccctgactgtgagctgccttccacaccctgcactgcactgtgttctctcctcacccttaacctgcttcactccagtctgttctggctgtttattaccttgttgcaaaacagggccgaagcaaggattaccttgacaaccctagcttctccttagccatcttccttgacagtgtgatctgtttagtgagatttagcatgtgtgaataaagtatatgcaggaggaaattgctttgtcttcccaatcggtagaaattcgggaccataaaaattgtgttttaccatgtggcctacaaccttaacactgctttcttaagaagtcttcacccatctacatgctaacaactcactcagcctggatttatctttactggggaagccaaacaagcaatagaggacctttacctgtgttagaaatgagttggagccaaggaacactgaagaaatagtatcttaacagttactgagtccattgtatgtgcttggctctgctctgagtgatttatatgtattaagatttttcctcacaggtcagatatatactgttactaacttcattttatagacaggttaagcttcctgaaggccacaggtcccagtaaattgtggagccagaacccaaacccaagaagttttggcttcagcaaatgcatcagacagcccctgtccattaatagggcacaggtaggaagatgcacaaggatgtgggaactatagagaaccaatctgatgccttggcttaacaaagagtggacatggcaagccttcctcttcggggaagaaaagcccagaactgagcagatggcctcctttatgagttcatgtcctccgccttcagctggaggtaccatatggcgatgctacctgtctttctgctggaggtaccatatggtaatgctgcctgtctgtctgctggaggtaccatatggtaatgctgcctgtctttctgaggttgacttttatgccatgtctttcctaagtgtgtaagaatttttctgtttgcttcacatttgactgagaatcattctagggtttgattgagcccctgtcctgtgccactaaaggaactcgaacttttcatcacttagagatttcagaggggaatggaaaaacagttctaatcaataagcaagcaattcaagaaaaatagaattaatcaggcaatggctgcaacatgtcctatctttaatctattttcttattaagcttggacattgacaatagaaccagaagcttgtagctggatcaaaatattctccataggcctggagtttcatgagggtctattcttttgttgttgttgttttgnttttttgttttttgtgggtttttttttttttttttttgagacggagtcttgttctgttgcccaggctggagtgcaatggtgcagtcttggttcactgcaacctctgcctcccaggttcaaacaattctcccgcctcagccgtccaagtagctgggatcacaggtgcatgccacgatgcccggctatcttctgtatttttagtagaggtggggttcaccatgttggccaggctggtctcgaactcctgacctcaggtgattcacccacctcggcctcccaaagtgctgggattacaggtgtgagccacggcgcccagcctcatgagggtctattctttacattcaccatggtctgatggttgctacatgtttgtctatgattttttttttctattatcaggtgtcttggccggttcatgccccacgatgaaagggccagaggttttcatatgagtaaaagaaaaaagcagaaatgtgaaacctacaattaggctaaacaaaaatcaactggaaaagtacaggctgaggggagaagagttggctacatgtttatgttaggggaggagggagtacattttagctatgtattcaaacagctaatagtttaatgttgctgcttataaacttaattttaggctgcattaataaaagtgtagtctcc

SEQ ID NO: 1543 - DNA, 4426 bp, Homo sapiens
  misc_feature (3766)..(3766): n is a, c, g, or t
acgggctcagctccgcagtcacgtgacgctcgtccgcaacctctgctgtcctccgcggcgcccccttccgcctgacgcgcccccggcggcggccgcgcagccctggctcctcgcgggctcgggcggcggctgcggcggggctatggcgagcggcggtggcgggggtaacactggcgcgggtggggggccggggatgggcctgagcctgggcctgggtctgggtctgagcctaggcatgagtgaggccaccagtgaggcagaggaggaggcggccacggccgaggcggtgggacgcctggccacgacgctgtggctgcggctccgcggctgggaggcggtgctggcggcggcgcagcggttgctggtgtgggagaagccgctgcacagcctggtcacggcggccgcgctcaacggcctcttctggttgctgtcttcctcgtccctccggcccttcttcctactcagcgtctcacttttggcctattttctgctggatctctggcagcctcgctttctccctgacgtttcagcatcatccccagaggagccacactctgacagtgagggtgcggggtcaggcgcccggccgcacctgctgagtgtgcccgagttgtgcagatacctggctgagagctggctcaccttccagattcacctgcaggagctgctgcagtacaagaggcagaatccagctcagttctgcgttcgagtctgctctggctgtgctgtgttggctgtgttgggacactatgttccagggattatgatttcctacattgtcttgttgagtatcctgctgtggcccctggtggtttatcatgagctgatccagaggatgtacactcgcctggagcccctgctcatgcagctggactacagcatgaaggcagaagccaatgccctgcatcacaaacacgacaagaggaagcgtcaggggaagaatgcacccccaggaggtgatgagccactggcagagacagagagtgaaagcgaggcagagctggctggcttctccccagtggtggatgtgaagaaaacagcattggccttggccattacagactcagagctgtcagatgaggaggcttctatcttggagagtggtggcttctccgtatcccgggccacaactccgcagctgactgatgtctccgaggatttggaccagcagagcctgccaagtgaaccagaggagaccctaagccgggacctaggggagggagaggagggagagctggcccctcccgaagacctactaggccgtcctcaagctctgtcaaggcaagccctggactcggaggaagaggaagaggatgtggcagctaaggaaaccttgttgcggctctcatcccccctccactttgtgaacacgcacttcaatggggcagggtcccccccagatggagtgaaatgctcccctggaggaccagtggagacactgagccccgagacagtgagtggtggcctcactgctctgcccggcaccctgtcacctccactttgccttgttggaagtgacccagccccctccccttccattctcccacctgttccccagcaagaagctcaggccgtggcagagccatgagccagccgttgaggaaggagctgcaggcacagtagggcttcctggctaggagtgttgctgtttcctcctttgcctaccactctggggtggggcagtgtgtggggaagctggctgtcggatggtagctattccaccctctgcctgcctgcctgcctgctgtcctgggcatggtgcagtacctgtgcctaggattggttttaaatttgtaaataattttccatttgggttagtggatgtgaacagggctagggaagtccttcccacagcctgcgcttgcctccctgcctcatctctattctcattccactatgccccaagccctggtggtctggccctttctttttcctcctatcctcagggacctgtgctgctctgccctcatgtcccacttggttgtttagttgaggcactttataatttttctcttgtcttgtgttcctttctgctttatttccctgctgtgtcctgtccttagcagctcaaccccatcctttgccagctcctcctatcccgtgggcactggccaagctttagggaggctcctggtctgggaagtaaagagtaaacctggggcagtgggtcaggccagtagttacactcttaggtcactgtagtctgtgtaaccttcactgcatccttgccccattcagcccggcctttcatgatgcaggagagcagggatcccgcagtacatggcgccagcactggagttggtgagcatgtgctctctcttgagattaggagcttccttactgctcctctgggtgatccaagtgtagtgggaccccctactagggtcaggaagtggacactaacatctgtgcaggtgttgacttgaaaaataaagtgttgattggctagaactgctgcctccctgactgtgagctgccttccacaccctgcactgcactgtgttctctcctcacccttaacctgcttcactccagtctgttctggctgtttattaccttgttgcaaaacagggccgaagcaaggattaccttgacaaccctagcttctccttagccatcttccttgacagtgtgatctgtttagtgagatttagcatgtgtgaataaagtatatgcaggaggaaattgctttgtcttcccaatcggtagaaattcgggaccataaaaattgtgttttaccatgtggcctacaaccttaacactgctttcttaagaagtcttcacccatctacatgctaacaactcactcagcctggatttatctttactggggaagccaaacaagcaatagaggacctttacctgtgttagaaatgagttggagccaaggaacactgaagaaatagtatcttaacagttactgagtccattgtatgtgcttggctctgctctgagtgatttatatgtattaagatttttcctcacaggtcagatatatactgttactaacttcattttatagacaggttaagcttcctgaaggccacaggtcccagtaaattgtggagccagaacccaaacccaagaagttttggcttcagcaaatgcatcagacagcccctgtccattaatagggcacaggtaggaagatgcacaaggatgtgggaactatagagaaccaatctgatgccttggcttaacaaagagtggacatggcaagccttcctcttcggggaagaaaagcccagaactgagcagatggcctcctttatgagttcatgtcctccgccttcagctggaggtaccatatggcgatgctacctgtctttctgctggaggtaccatatggtaatgctgcctgtctgtctgctggaggtaccatatggtaatgctgcctgtctttctgaggttgacttttatgccatgtctttcctaagtgtgtaagaatttttctgtttgcttcacatttgactgagaatcattctagggtttgattgagcccctgtcctgtgccactaaaggaactcgaacttttcatcacttagagatttcagaggggaatggaaaaacagttctaatcaataagcaagcaattcaagaaaaatagaattaatcaggcaatggctgcaacatgtcctatctttaatctattttcttattaagcttggacattgacaatagaaccagaagcttgtagctggatcaaaatattctccataggcctggagtttcatgagggtctattcttttgttgttgttgttttgnttttttgttttttgtgggtttttttttttttttttttgagacggagtcttgttctgttgcccaggctggagtgcaatggtgcagtcttggttcactgcaacctctgcctcccaggttcaaacaattctcccgcctcagccgtccaagtagctgggatcacaggtgcatgccacgatgcccggctatcttctgtatttttagtagaggtggggttcaccatgttggccaggctggtctcgaactcctgacctcaggtgattcacccacctcggcctcccaaagtgctgggattacaggtgtgagccacggcgcccagcctcatgagggtctattctttacattcaccatggtctgatggttgctacatgtttgtctatgattttttttttctattatcaggtgtcttggccggttcatgccccacgatgaaagggccagaggttttcatatgagtaaaagaaaaaagcagaaatgtgaaacctacaattaggctaaacaaaaatcaactggaaaagtacaggctgaggggagaagagttggctacatgtttatgttaggggaggagggagtacattttagctatgtattcaaacagctaatagtttaatgttgctgcttataaacttaattttaggctgcattaataaaagtgtagtctcc

SEQ ID NO: 1544 - DNA, 2668 bp, Homo sapiens
acgggctcagctccgcagtcacgtgacgctcgtccgcaacctctgctgtcctccgcggcgcccccttccgcctgacgcgcccccggcggcggccgcgcagccctggctcctcgcgggctcgggcggcggctgcggcggggctatggcgagcggcggtggcgggggtaacactggcgcgggtggggggccggggatgggcctgagcctgggcctgggtctgggtctgagcctaggcatgagtgaggccaccagtgaggcagaggaggaggcggccacggccgaggcggtgggacgcctggccacgacgctgtggctgcggctccgcggctgggaggcggtgctggcggcggcgcagcggttgctggtgtgggagaagccgctgcacagcctggtcacggcggccgcgctcaacggcctcttctggttgctgtcttcctcgtccctccggcccttcttcctactcagcgtctcacttttggcctattttctgctggatctctggcagcctcgctttctccctgacgtttcagcatcatccccagaggagccacactctgacagtgagggtgcggggtcaggcgcccggccgcacctgctgagtgtgcccgagttgtgcagatacctggctgagagctggctcaccttccagattcacctgcaggagctgctgcagtacaagaggcagaatccagctcagttctgcgttcgagtctgctctggctgtgctgtgttggctgtgttgggacactatgttccagggattatgatttcctacattgtcttgttgagtatcctgctgtggcccctggtggtttatcatgagctgatccagaggatgtacactcgcctggagcccctgctcatgcagctggactacagcatgaaggcagaagccaatgccctgcatcacaaacacgacaagaggaagcgtcaggggaagaatgcacccccaggaggtgatgagccactggcagagacagagagtgaaagcgaggcagagctggctggcttctccccagtggtggatgtgaagaaaacagcattggccttggccattacagactcagagctgtcagatgaggaggcttctatcttggagagtggtggcttctccgtatcccgggccacaactccgcagctgactgatgtctccgaggatttggaccagcagagcctgccaagtgaaccagaggagaccctaagccgggacctaggggagggagaggagggagagctggcccctcccgaagacctactaggccgtcctcaagctctgtcaaggcaagccctggactcggaggaagaggaagaggatgtggcagctaaggaaaccttgttgcggctctcatcccccctccactttgtgaacacgcacttcaatggggcagggtcccccccagatggagtgaaatgctcccctggaggaccagtggagacactgagccccgagacagtgagtggtggcctcactgctctgcccggcaccctgtcacctccactttgccttgttggaagtgacccagccccctccccttccattctcccacctgttccccaggactcaccccagcccctgcctgcccctgaggaagaagaggcactcaccactgaggactttgagttgctggatcagggggagctggagcagctgaatgcagagctgggcttggagccagagacaccgccaaaaccccctgatgctccacccctggggcccgacatccattctctggtacagtcagaccaagaagctcaggccgtggcagagccatgagccagccgttgaggaaggagctgcaggcacagtagggcttcctggctaggagtgttgctgtttcctcctttgcctaccactctggggtggggcagtgtgtggggaagctggctgtcggatggtagctattccaccctctgcctgcctgcctgcctgctgtcctgggcatggtgcagtacctgtgcctaggattggttttaaatttgtaaataattttccatttgggttagtggatgtgaacagggctagggaagtccttcccacagcctgcgcttgcctccctgcctcatctctattctcattccactatgccccaagccctggtggtctggccctttctttttcctcctatcctcagggacctgtgctgctctgccctcatgtcccacttggttgtttagttgaggcactttataatttttctcttgtcttgtgttcctttctgctttatttccctgctgtgtcctgtccttagcagctcaaccccatcctttgccagctcctcctatcccgtgggcactggccaagctttagggaggctcctggtctgggaagtaaagagtaaacctggggcagtgggtcaggccagtagttacactcttaggtcactgtagtctgtgtaaccttcactgcatccttgccccattcagcccggcctttcatgatgcaggagagcagggatcccgcagtacatggcgccagcactggagttggtgagcatgtgctctctcttgagattaggagcttccttactgctcctctgggtgatccaagtgtagtgggaccccctactagggtcaggaagtggacactaacatctgtgcaggtgttgacttgaaaaataaagtgttgattgaaagtttcttttaagatggaattcataaaagggaaaat

SEQ ID NO: 1545 - DNA, 3246 bp, Homo sapiens
  misc_feature (2586)..(2586): n is a, c, g, or t
gctggtacggtcccgagtcttaggtcccccccagatggagtgaaatgctcccctggaggaccagtggagacactgagccccgagacagtgagtggtggcctcactgctctgcccggcaccctgtcacctccactttgccttgttggaagtgacccagccccctccccttccattctcccacctgttccccaggactcaccccagcccctgcctgcccctgaggaagaagaggcactcaccactgaggactttgagttgctggatcagggggagctggagcagctgaatgcagagctgggcttggagccagagacaccgccaaaaccccctgatgctccacccctggggcccgacatccattctctggtacagtcagaccaagaagctcaggccgtggcagagccatgagccagccgttgaggaaggagctgcaggcacagtagggcttcctggctaggagtgttgctgtttcctcctttgcctaccactctggggtggggcagtgtgtggggaagctggctgtcggatggtagctattccaccctctgcctgcctgcctgcctgctgtcctgggcatggtgcagtacctgtgcctaggattggttttaaatttgtaaataattttccatttgggttagtggatgtgaacagggctagggaagtccttcccacagcctgcgcttgcctccctgcctcatctctattctcattccactatgccccaagccctggtggtctggccctttctttttcctcctatcctcagggacctgtgctgctctgccctcatgtcccacttggttgtttagttgaggcactttataatttttctcttgtcttgtgttcctttctgctttatttccctgctgtgtcctgtccttagcagctcaaccccatcctttgccagctcctcctatcccgtgggcactggccaagctttagggaggctcctggtctgggaagtaaagagtaaacctggggcagtgggtcaggccagtagttacactcttaggtcactgtagtctgtgtaaccttcactgcatccttgccccattcagcccggcctttcatgatgcaggagagcagggatcccgcagtacatggcgccagcactggagttggtgagcatgtgctctctcttgagattaggagcttccttactgctcctctgggtgatccaagtgtagtgggaccccctactagggtcaggaagtggacactaacatctgtgcaggtgttgacttgaaaaataaagtgttgattggctagaactgctgcctccctgactgtgagctgccttccacaccctgcactgcactgtgttctctcctcacccttaacctgcttcactccagtctgttctggctgtttattaccttgttgcaaaacagggccgaagcaaggattaccttgacaaccctagcttctccttagccatcttccttgacagtgtgatctgtttagtgagatttagcatgtgtgaataaagtatatgcaggaggaaattgctttgtcttcccaatcggtagaaattcgggaccataaaaattgtgttttaccatgtggcctacaaccttaacactgctttcttaagaagtcttcacccatctacatgctaacaactcactcagcctggatttatctttactggggaagccaaacaagcaatagaggacctttacctgtgttagaaatgagttggagccaaggaacactgaagaaatagtatcttaacagttactgagtccattgtatgtgcttggctctgctctgagtgatttatatgtattaagatttttcctcacaggtcagatatatactgttactaacttcattttatagacaggttaagcttcctgaaggccacaggtcccagtaaattgtggagccagaacccaaacccaagaagttttggcttcagcaaatgcatcagacagcccctgtccattaatagggcacaggtaggaagatgcacaaggatgtgggaactatagagaaccaatctgatgccttggcttaacaaagagtggacatggcaagccttcctcttcggggaagaaaagcccagaactgagcagatggcctcctttatgagttcatgtcctccgccttcagctggaggtaccatatggcgatgctacctgtctttctgctggaggtaccatatggtaatgctgcctgtctgtctgctggaggtaccatatggtaatgctgcctgtctttctgaggttgacttttatgccatgtctttcctaagtgtgtaagaatttttctgtttgcttcacatttgactgagaatcattctagggtttgattgagcccctgtcctgtgccactaaaggaactcgaacttttcatcacttagagatttcagaggggaatggaaaaacagttctaatcaataagcaagcaattcaagaaaaatagaattaatcaggcaatggctgcaacatgtcctatctttaatctattttcttattaagcttggacattgacaatagaaccagaagcttgtagctggatcaaaatattctccataggcctggagtttcatgagggtctattcttttgttgttgttgttttgnttttttgttttttgtgggtttttttttttttttttttgagacggagtcttgttctgttgcccaggctggagtgcaatggtgcagtcttggttcactgcaacctctgcctcccaggttcaaacaattctcccgcctcagccgtccaagtagctgggatcacaggtgcatgccacgatgcccggctatcttctgtatttttagtagaggtggggttcaccatgttggccaggctggtctcgaactcctgacctcaggtgattcacccacctcggcctcccaaagtgctgggattacaggtgtgagccacggcgcccagcctcatgagggtctattctttacattcaccatggtctgatggttgctacatgtttgtctatgattttttttttctattatcaggtgtcttggccggttcatgccccacgatgaaagggccagaggttttcatatgagtaaaagaaaaaagcagaaatgtgaaacctacaattaggctaaacaaaaatcaactggaaaagtacaggctgaggggagaagagttggctacatgtttatgttaggggaggagggagtacattttagctatgtattcaaacagctaatagtttaatgttgctgcttataaacttaattttaggctgcattaataaaagtgtagtctcc

SEQ ID NO: 1546 - DNA, 2639 bp, Homo sapiens
acgggctcagctccgcagtcacgtgacgctcgtccgcaacctctgctgtcctccgcggcgcccccttccgcctgacgcgcccccggcggcggccgcgcagccctggctcctcgcgggctcgggcggcggctgcggcggggctatggcgagcggcggtggcgggggtaacactggcgcgggtggggggccggggatgggcctgagcctgggcctgggtctgggtctgagcctaggcatgagtgaggccaccagtgaggcagaggaggaggcggccacggccgaggcggtgggacgcctggccacgacgctgtggctgcggctccgcggctgggaggcggtgctggcggcggcgcagcggttgctggtgtgggagaagccgctgcacagcctggtcacggcggccgcgctcaacggcctcttctggttgctgtcttcctcgtccctccggcccttcttcctactcagcgtctcacttttggcctattttctgctggatctctggcagcctcgctttctccctgacgtttcagcatcatccccagaggagccacactctgacagtgagggtgcggggtcaggcgcccggccgcacctgctgagtgtgcccgagttgtgcagatacctggctgagagctggctcaccttccagattcacctgcaggagctgctgcagtacaagaggcagaatccagctcagttctgcgttcgagtctgctctggctgtgctgtgttggctgtgttgggacactatgttccagggattatgatttcctacattgtcttgttgagtatcctgctgtggcccctggtggtttatcatgagctgatccagaggatgtacactcgcctggagcccctgctcatgcagctggactacagcatgaaggcagaagccaatgccctgcatcacaaacacgacaagaggaagcgtcaggggaagaatgcacccccaggaggtgatgagccactggcagagacagagagtgaaagcgaggcagagctggctggcttctccccagtggtggatgtgaagaaaacagcattggccttggccattacagactcagagctgtcagatgaggaggcttctatcttggagagtggtggcttctccgtatcccgggccacaactccgcagctgactgatgtctccgaggatttggaccagcagagcctgccaagtgaaccagaggagaccctaagccgggacctaggggagggagaggagggagagctggcccctcccgaagacctactaggccgtcctcaagctctgtcaaggcaagccctggactcggaggaagaggaagaggatgtggcagctaaggaaaccttgttgcggctctcatcccccctccactttgtgaacacgcacttcaatggggcagggtcccccccagatggagtgaaatgctcccctggaggaccagtggagacactgagccccgagacagtgagtggtggcctcactgctctgcccggcaccctgtcacctccactttgccttgttggaagtgacccagccccctccccttccattctcccacctgttccccaggactcaccccagcccctgcctgcccctgaggaagaagaggcactcaccactgaggactttgagttgctggatcagggggagctggagcagctgaatgcagagctgggcttggagccagagacaccgccaaaaccccctgatgctccacccctggggcccgacatccattctctggtacagtcagaccaagaagctcaggccgtggcagagccatgagccagccgttgaggaaggagctgcaggcacagtagggcttcctggctaggagtgttgctgtttcctcctttgcctaccactctggggtggggcagtgtgtggggaagctggctgtcggatggtagctattccaccctctgcctgcctgcctgcctgctgtcctgggcatggtgcagtacctgtgcctaggattggttttaaatttgtaaataattttccatttgggttagtggatgtgaacagggctagggaagtccttcccacagcctgcgcttgcctccctgcctcatctctattctcattccactatgccccaagccctggtggtctggccctttctttttcctcctatcctcagggacctgtgctgctctgccctcatgtcccacttggttgtttagttgaggcactttataatttttctcttgtcttgtgttcctttctgctttatttccctgctgtgtcctgtccttagcagctcaaccccatcctttgccagctcctcctatcccgtgggcactggccaagctttagggaggctcctggtctgggaagtaaagagtaaacctggggcagtgggtcagcccgacgttacattcccacccccagttccgtcggagaagtaatctgtggctgcataggaatctcgggtgtgtgggtaacggggaggcagggagcggaaagcatggatgtaatcagtgggcctgaagttcattcgtgcccgcggtgccaagagacccttcccttcagaagttcccctctaggggttcttagagcaaggttcccccctcccacctcaaccttcccttaaaaaaataaaaaggctggtttcttccgggccagatattggccacttaaaaaaaaa

SEQ ID NO: 1547 - DNA, 3615 bp, Homo sapiens
  misc_feature (2955)..(2955): n is a, c, g, or t
acgggctcagctccgcagtcacgtgacgctcgtccgcaacctctgctgtcctccgcggcgcccccttccgcctgacgcgcccccggcggcggccgcgcagccctggctcctcgcgggctcgggcggcggctgcggcggggctatggcgagcggcggtggcgggggtaacactggcgcgggtggggggccggggatgggcctgagcctgggcctgggtctgggtctgagcctaggcatgagtgaggccaccagtgaggcagaggaggaggcggccacggccgaggcggtgggacgcctggccacgacgctgtggctgcggctccgcggctgggaggcggtgctggcggcggcgcagcggttgctggtgtgggagaagccgctgcacagcctggtcacggcggccgcgctcaacggcctcttctggttgctgtcttcctcgtccctccggcccttcttcctactcagcgtctcacttttggcctattttctgctggatctctggcagcctcgctttctccctgacgtttcagcatcatccccagaggagccacactctgacagtgagggtgcggggtcaggcgcccggccgcacctgctgagtgtgcccgagttgtgcagatacctggctgagagctggctcaccttccacagctgaatgcagagctgggcttggagccagagacaccgccaaaaccccctgatgctccacccctggggcccgacatccattctctggtacagtcagaccaagaagctcaggccgtggcagagccatgagccagccgttgaggaaggagctgcaggcacagtagggcttcctggctaggagtgttgctgtttcctcctttgcctaccactctggggtggggcagtgtgtggggaagctggctgtcggatggtagctattccaccctctgcctgcctgcctgcctgctgtcctgggcatggtgcagtacctgtgcctaggattggttttaaatttgtaaataattttccatttgggttagtggatgtgaacagggctagggaagtccttcccacagcctgcgcttgcctccctgcctcatctctattctcattccactatgccccaagccctggtggtctggccctttctttttcctcctatcctcagggacctgtgctgctctgccctcatgtcccacttggttgtttagttgaggcactttataatttttctcttgtcttgtgttcctttctgctttatttccctgctgtgtcctgtccttagcagctcaaccccatcctttgccagctcctcctatcccgtgggcactggccaagctttagggaggctcctggtctgggaagtaaagagtaaacctggggcagtgggtcaggccagtagttacactcttaggtcactgtagtctgtgtaaccttcactgcatccttgccccattcagcccggcctttcatgatgcaggagagcagggatcccgcagtacatggcgccagcactggagttggtgagcatgtgctctctcttgagattaggagcttccttactgctcctctgggtgatccaagtgtagtgggaccccctactagggtcaggaagtggacactaacatctgtgcaggtgttgacttgaaaaataaagtgttgattggctagaactgctgcctccctgactgtgagctgccttccacaccctgcactgcactgtgttctctcctcacccttaacctgcttcactccagtctgttctggctgtttattaccttgttgcaaaacagggccgaagcaaggattaccttgacaaccctagcttctccttagccatcttccttgacagtgtgatctgtttagtgagatttagcatgtgtgaataaagtatatgcaggaggaaattgctttgtcttcccaatcggtagaaattcgggaccataaaaattgtgttttaccatgtggcctacaaccttaacactgctttcttaagaagtcttcacccatctacatgctaacaactcactcagcctggatttatctttactggggaagccaaacaagcaatagaggacctttacctgtgttagaaatgagttggagccaaggaacactgaagaaatagtatcttaacagttactgagtccattgtatgtgcttggctctgctctgagtgatttatatgtattaagatttttcctcacaggtcagatatatactgttactaacttcattttatagacaggttaagcttcctgaaggccacaggtcccagtaaattgtggagccagaacccaaacccaagaagttttggcttcagcaaatgcatcagacagcccctgtccattaatagggcacaggtaggaagatgcacaaggatgtgggaactatagagaaccaatctgatgccttggcttaacaaagagtggacatggcaagccttcctcttcggggaagaaaagcccagaactgagcagatggcctcctttatgagttcatgtcctccgccttcagctggaggtaccatatggcgatgctacctgtctttctgctggaggtaccatatggtaatgctgcctgtctgtctgctggaggtaccatatggtaatgctgcctgtctttctgaggttgacttttatgccatgtctttcctaagtgtgtaagaatttttctgtttgcttcacatttgactgagaatcattctagggtttgattgagcccctgtcctgtgccactaaaggaactcgaacttttcatcacttagagatttcagaggggaatggaaaaacagttctaatcaataagcaagcaattcaagaaaaatagaattaatcaggcaatggctgcaacatgtcctatctttaatctattttcttattaagcttggacattgacaatagaaccagaagcttgtagctggatcaaaatattctccataggcctggagtttcatgagggtctattcttttgttgttgttgttttgnttttttgttttttgtgggtttttttttttttttttttgagacggagtcttgttctgttgcccaggctggagtgcaatggtgcagtcttggttcactgcaacctctgcctcccaggttcaaacaattctcccgcctcagccgtccaagtagctgggatcacaggtgcatgccacgatgcccggctatcttctgtatttttagtagaggtggggttcaccatgttggccaggctggtctcgaactcctgacctcaggtgattcacccacctcggcctcccaaagtgctgggattacaggtgtgagccacggcgcccagcctcatgagggtctattctttacattcaccatggtctgatggttgctacatgtttgtctatgattttttttttctattatcaggtgtcttggccggttcatgccccacgatgaaagggccagaggttttcatatgagtaaaagaaaaaagcagaaatgtgaaacctacaattaggctaaacaaaaatcaactggaaaagtacaggctgaggggagaagagttggctacatgtttatgttaggggaggagggagtacattttagctatgtattcaaacagctaatagtttaatgttgctgcttataaacttaattttaggctgcattaataaaagtgtagtctcc

SEQ ID NO: 1548 - DNA, 2148 bp, Homo sapiens
acgggctcagctccgcagtcacgtgacgctcgtccgcaacctctgctgtcctccgcggcgcccccttccgcctgacgcgcccccggcggcggccgcgcagccctggctcctcgcgggctcgggcggcggctgcggcggggctatggcgagcggcggtggcgggggtaacactggcgcgggtggggggccggggatgggcctgagcctgggcctgggtctgggtctgagcctaggcatgagtgaggccaccagtgaggcagaggaggaggcggccacggccgaggcggtgggacgcctggccacgacgctgtggctgcggctccgcggctgggaggcggtgctggcggcggcgcagcggttgctggtgtgggagaagccgctgcacagcctggtcacggcggccgcgctcaacggcctcttctggttgctgtcttcctcgtccctccggcccttcttcctactcagcgtctcacttttggcctattttctgctggatctctggcagcctcgctttctccctgacgtttcagcatcatccccagaggagccacactctgacagtgagggtgcggggtcaggcgcccggccgcacctgctgagtgtgcccgagttgtgcagatacctggctgagagctggctcaccttccagattcacctgcaggagctgctgcagtacaagaggcagaatccagctcagttctgcgttcgagtctgctctggctgtgctgtgttggctgtgttgggacactatgttccagggattatgatttcctacattgtcttgttgagtatcctgctgtggcccctggtggtttatcatgagctgatccagaggatgtacactcgcctggagcccctgctcatgcagctggactacagcatgaaggcagaagccaatgccctgcatcacaaacacgacaagaggaagcgtcaggggaagaatgcacccccaggaggtgatgagccactggcagagacagagagtgaaagcgaggcagagctggctggcttctccccagtggtggatgtgaagaaaacagcattggccttggccattacagactcagagctgtcagatgaggaggcttctatcttggagagtggtggcttctccgtatcccgggccacaactccgcagctgactgatgtctccgaggatttggaccagcagagcctgccaagtgaaccagaggagaccctaagccgggacctaggggagggagaggagggagagctggcccctcccgaagacctactaggccgtcctcaagctctgtcaaggcaagccctggactcggaggaagaggaagaggatgtggcagctaaggaaaccttgttgcggctctcatcccccctccactttgtgaacacgcacttcaatggggcagggtcccccccagatggagtgaaatgctcccctggaggaccagtggagacactgagccccgagacagtgagtggtggcctcactgctctgcccggcaccctgtcacctccactttgccttgttggaagtgacccagccccctccccttccattctcccacctgttccccaggactcaccccagcccctgcctgcccctgaggaagaagaggcactcaccactgaggactttgagttgctggatcagggggagctggagcagctgaatgcagagctgggcttggagccagagacaccgccaaaaccccctgatgctccacccctggggcccgacatccattctctggtacagtcagaccaagaagctcaggccgtggcagagccatgagccagccgttgaggaaggagctgcaggcacagtagggcttcctggctaggagtgttgctgtttcctcctttgcctaccactctggggtggggcagtgtgtggggaagctggctgtcggatggtagctattccaccctctgcctgcctgcctgcctgctgtcctgggcatggtgcagtacctgtgcctaggattggttttaaatttgtaaataattttccatttgggttagtggatgtgaacagggctagggaagtccttcccacagcctgcgcttgcctccctgcctcatctctattctcattccactatgccccaagccctggtggtctggccctttctttttcccggacgcgtgggtcgacccacgcgtccg

SEQ ID NO: 1549 - DNA, 2769 bp, Homo sapiens
  misc_feature (2109)..(2109): n is a, c, g, or t
aaccatacggctaggaacgaggcggggggtggaatcggcaccgaggcggatggtagctattccaccctctgcctgcctgcctgcctgctgtcctgggcatggtgcagtacctgtgcctaggattggttttaaatttgtaaataattttccatttgggttagtggatgtgaacagggctagggaagtccttcccacagcctgcgcttgcctccctgcctcatctctattctcattccactatgccccaagccctggtggtctggccctttctttttcctcctatcctcagggacctgtgctgctctgccctcatgtcccacttggttgtttagttgaggcactttataatttttctcttgtcttgtgttcctttctgctttatttccctgctgtgtcctgtccttagcagctcaaccccatcctttgccagctcctcctatcccgtgggcactggccaagctttagggaggctcctggtctgggaagtaaagagtaaacctggggcagtgggtcaggccagtagttacactcttaggtcactgtagtctgtgtaaccttcactgcatccttgccccattcagcccggcctttcatgatgcaggagagcagggatcccgcagtacatggcgccagcactggagttggtgagcatgtgctctctcttgagattaggagcttccttactgctcctctgggtgatccaagtgtagtgggaccccctactagggtcaggaagtggacactaacatctgtgcaggtgttgacttgaaaaataaagtgttgattggctagaactgctgcctccctgactgtgagctgccttccacaccctgcactgcactgtgttctctcctcacccttaacctgcttcactccagtctgttctggctgtttattaccttgttgcaaaacagggccgaagcaaggattaccttgacaaccctagcttctccttagccatcttccttgacagtgtgatctgtttagtgagatttagcatgtgtgaataaagtatatgcaggaggaaattgctttgtcttcccaatcggtagaaattcgggaccataaaaattgtgttttaccatgtggcctacaaccttaacactgctttcttaagaagtcttcacccatctacatgctaacaactcactcagcctggatttatctttactggggaagccaaacaagcaatagaggacctttacctgtgttagaaatgagttggagccaaggaacactgaagaaatagtatcttaacagttactgagtccattgtatgtgcttggctctgctctgagtgatttatatgtattaagatttttcctcacaggtcagatatatactgttactaacttcattttatagacaggttaagcttcctgaaggccacaggtcccagtaaattgtggagccagaacccaaacccaagaagttttggcttcagcaaatgcatcagacagcccctgtccattaatagggcacaggtaggaagatgcacaaggatgtgggaactatagagaaccaatctgatgccttggcttaacaaagagtggacatggcaagccttcctcttcggggaagaaaagcccagaactgagcagatggcctcctttatgagttcatgtcctccgccttcagctggaggtaccatatggcgatgctacctgtctttctgctggaggtaccatatggtaatgctgcctgtctgtctgctggaggtaccatatggtaatgctgcctgtctttctgaggttgacttttatgccatgtctttcctaagtgtgtaagaatttttctgtttgcttcacatttgactgagaatcattctagggtttgattgagcccctgtcctgtgccactaaaggaactcgaacttttcatcacttagagatttcagaggggaatggaaaaacagttctaatcaataagcaagcaattcaagaaaaatagaattaatcaggcaatggctgcaacatgtcctatctttaatctattttcttattaagcttggacattgacaatagaaccagaagcttgtagctggatcaaaatattctccataggcctggagtttcatgagggtctattcttttgttgttgttgttttgnttttttgttttttgtgggtttttttttttttttttttgagacggagtcttgttctgttgcccaggctggagtgcaatggtgcagtcttggttcactgcaacctctgcctcccaggttcaaacaattctcccgcctcagccgtccaagtagctgggatcacaggtgcatgccacgatgcccggctatcttctgtatttttagtagaggtggggttcaccatgttggccaggctggtctcgaactcctgacctcaggtgattcacccacctcggcctcccaaagtgctgggattacaggtgtgagccacggcgcccagcctcatgagggtctattctttacattcaccatggtctgatggttgctacatgtttgtctatgattttttttttctattatcaggtgtcttggccggttcatgccccacgatgaaagggccagaggttttcatatgagtaaaagaaaaaagcagaaatgtgaaacctacaattaggctaaacaaaaatcaactggaaaagtacaggctgaggggagaagagttggctacatgtttatgttaggggaggagggagtacattttagctatgtattcaaacagctaatagtttaatgttgctgcttataaacttaattttaggctgcattaataaaagtgtagtctcc

SEQ ID NO: 1550 - DNA, 2637 bp, Homo sapiens
  misc_feature (1977)..(1977): n is a, c, g, or t
ggacggccgtgggtcgacccacgcgtcggtggatgtgaacagggctagggaagtccttcccacagcctgcgcttgcctccctgcctcatctctattctcattccactatgccccaagccctggtggtctggccctttctttttcctcctatcctcagggacctgtgctgctctgccctcatgtcccacttggttgtttagttgaggcactttataatttttctcttgtcttgtgttcctttctgctttatttccctgctgtgtcctgtccttagcagctcaaccccatcctttgccagctcctcctatcccgtgggcactggccaagctttagggaggctcctggtctgggaagtaaagagtaaacctggggcagtgggtcaggccagtagttacactcttaggtcactgtagtctgtgtaaccttcactgcatccttgccccattcagcccggcctttcatgatgcaggagagcagggatcccgcagtacatggcgccagcactggagttggtgagcatgtgctctctcttgagattaggagcttccttactgctcctctgggtgatccaagtgtagtgggaccccctactagggtcaggaagtggacactaacatctgtgcaggtgttgacttgaaaaataaagtgttgattggctagaactgctgcctccctgactgtgagctgccttccacaccctgcactgcactgtgttctctcctcacccttaacctgcttcactccagtctgttctggctgtttattaccttgttgcaaaacagggccgaagcaaggattaccttgacaaccctagcttctccttagccatcttccttgacagtgtgatctgtttagtgagatttagcatgtgtgaataaagtatatgcaggaggaaattgctttgtcttcccaatcggtagaaattcgggaccataaaaattgtgttttaccatgtggcctacaaccttaacactgctttcttaagaagtcttcacccatctacatgctaacaactcactcagcctggatttatctttactggggaagccaaacaagcaatagaggacctttacctgtgttagaaatgagttggagccaaggaacactgaagaaatagtatcttaacagttactgagtccattgtatgtgcttggctctgctctgagtgatttatatgtattaagatttttcctcacaggtcagatatatactgttactaacttcattttatagacaggttaagcttcctgaaggccacaggtcccagtaaattgtggagccagaacccaaacccaagaagttttggcttcagcaaatgcatcagacagcccctgtccattaatagggcacaggtaggaagatgcacaaggatgtgggaactatagagaaccaatctgatgccttggcttaacaaagagtggacatggcaagccttcctcttcggggaagaaaagcccagaactgagcagatggcctcctttatgagttcatgtcctccgccttcagctggaggtaccatatggcgatgctacctgtctttctgctggaggtaccatatggtaatgctgcctgtctgtctgctggaggtaccatatggtaatgctgcctgtctttctgaggttgacttttatgccatgtctttcctaagtgtgtaagaatttttctgtttgcttcacatttgactgagaatcattctagggtttgattgagcccctgtcctgtgccactaaaggaactcgaacttttcatcacttagagatttcagaggggaatggaaaaacagttctaatcaataagcaagcaattcaagaaaaatagaattaatcaggcaatggctgcaacatgtcctatctttaatctattttcttattaagcttggacattgacaatagaaccagaagcttgtagctggatcaaaatattctccataggcctggagtttcatgagggtctattcttttgttgttgttgttttgnttttttgttttttgtgggtttttttttttttttttttgagacggagtcttgttctgttgcccaggctggagtgcaatggtgcagtcttggttcactgcaacctctgcctcccaggttcaaacaattctcccgcctcagccgtccaagtagctgggatcacaggtgcatgccacgatgcccggctatcttctgtatttttagtagaggtggggttcaccatgttggccaggctggtctcgaactcctgacctcaggtgattcacccacctcggcctcccaaagtgctgggattacaggtgtgagccacggcgcccagcctcatgagggtctattctttacattcaccatggtctgatggttgctacatgtttgtctatgattttttttttctattatcaggtgtcttggccggttcatgccccacgatgaaagggccagaggttttcatatgagtaaaagaaaaaagcagaaatgtgaaacctacaattaggctaaacaaaaatcaactggaaaagtacaggctgaggggagaagagttggctacatgtttatgttaggggaggagggagtacattttagctatgtattcaaacagctaatagtttaatgttgctgcttataaacttaattttaggctgcattaataaaagtgtagtctcc

SEQ ID NO: 1551 - DNA, 3156 bp, Homo sapiens
  misc_feature (2496)..(2496): n is a, c, g, or t
acgggctcagctccgcagtcacgtgacgctcgtccgcaacctctgctgtcctccgcggcgcccccttccgcctgacgcgcccccggcggcggccgcgcagccctggctcctcgcgggctcgggcggcggctgcggcggggctatggcgagcggcggtggcgggggtaacactggcgcgggtggggggccggggatgggcctgagcctgggcctgggtctgggtctgagcctaggcatgagtgaggccaccagtgaggcagaggaggaggcggccacggccgaggcggtgggacgcctggccacgacgctgtggctgcggctccgcggctgggaggcggtgctggcggcggcgcagcggttgctggtgtgggagaagccgctgcacagcctggtcacggcggccgcgctcaacggcctcttctggttgctgtcttcctcgtccctccggcccttcttcctactcagcgtctcacttttggcctattttctgctggatctctggcagcctcgctttctccctgacgtttcagcatcatccccagaggagccacactctgacagtgagggtgcggggtcaggcgcccggccgcacctgctgagtgtgcccgagttgtgcagatacctggctgagagctggctcaccttccagattcacctgcaggagctgctgcagtacaagaggcagaatccagctcagttctgcgttcgagtctgctctggctgtgctgtgttggctgtgttgggacactatgttccagggattatgatttcctacattgtctcctgtccttagcagctcaaccccatcctttgccagctcctcctatcccgtgggcactggccaagctttagggaggctcctggtctgggaagtaaagagtaaacctggggcagtgggtcaggccagtagttacactcttaggtcactgtagtctgtgtaaccttcactgcatccttgccccattcagcccggcctttcatgatgcaggagagcagggatcccgcagtacatggcgccagcactggagttggtgagcatgtgctctctcttgagattaggagcttccttactgctcctctgggtgatccaagtgtagtgggaccccctactagggtcaggaagtggacactaacatctgtgcaggtgttgacttgaaaaataaagtgttgattggctagaactgctgcctccctgactgtgagctgccttccacaccctgcactgcactgtgttctctcctcacccttaacctgcttcactccagtctgttctggctgtttattaccttgttgcaaaacagggccgaagcaaggattaccttgacaaccctagcttctccttagccatcttccttgacagtgtgatctgtttagtgagatttagcatgtgtgaataaagtatatgcaggaggaaattgctttgtcttcccaatcggtagaaattcgggaccataaaaattgtgttttaccatgtggcctacaaccttaacactgctttcttaagaagtcttcacccatctacatgctaacaactcactcagcctggatttatctttactggggaagccaaacaagcaatagaggacctttacctgtgttagaaatgagttggagccaaggaacactgaagaaatagtatcttaacagttactgagtccattgtatgtgcttggctctgctctgagtgatttatatgtattaagatttttcctcacaggtcagatatatactgttactaacttcattttatagacaggttaagcttcctgaaggccacaggtcccagtaaattgtggagccagaacccaaacccaagaagttttggcttcagcaaatgcatcagacagcccctgtccattaatagggcacaggtaggaagatgcacaaggatgtgggaactatagagaaccaatctgatgccttggcttaacaaagagtggacatggcaagccttcctcttcggggaagaaaagcccagaactgagcagatggcctcctttatgagttcatgtcctccgccttcagctggaggtaccatatggcgatgctacctgtctttctgctggaggtaccatatggtaatgctgcctgtctgtctgctggaggtaccatatggtaatgctgcctgtctttctgaggttgacttttatgccatgtctttcctaagtgtgtaagaatttttctgtttgcttcacatttgactgagaatcattctagggtttgattgagcccctgtcctgtgccactaaaggaactcgaacttttcatcacttagagatttcagaggggaatggaaaaacagttctaatcaataagcaagcaattcaagaaaaatagaattaatcaggcaatggctgcaacatgtcctatctttaatctattttcttattaagcttggacattgacaatagaaccagaagcttgtagctggatcaaaatattctccataggcctggagtttcatgagggtctattcttttgttgttgttgttttgnttttttgttttttgtgggtttttttttttttttttttgagacggagtcttgttctgttgcccaggctggagtgcaatggtgcagtcttggttcactgcaacctctgcctcccaggttcaaacaattctcccgcctcagccgtccaagtagctgggatcacaggtgcatgccacgatgcccggctatcttctgtatttttagtagaggtggggttcaccatgttggccaggctggtctcgaactcctgacctcaggtgattcacccacctcggcctcccaaagtgctgggattacaggtgtgagccacggcgcccagcctcatgagggtctattctttacattcaccatggtctgatggttgctacatgtttgtctatgattttttttttctattatcaggtgtcttggccggttcatgccccacgatgaaagggccagaggttttcatatgagtaaaagaaaaaagcagaaatgtgaaacctacaattaggctaaacaaaaatcaactggaaaagtacaggctgaggggagaagagttggctacatgtttatgttaggggaggagggagtacattttagctatgtattcaaacagctaatagtttaatgttgctgcttataaacttaattttaggctgcattaataaaagtgtagtctcc

SEQ ID NO: 1552 - DNA, 2768 bp, Homo sapiens
  misc_feature (2108)..(2108): n is a, c, g, or t
acgggctcagctccgcagtcacgtgacgctcgtccgcaacctctgctgtcctccgcggcgcccccttccgcctgacgcgcccccggcggcggccgcgcagccctggctcctcgcgggctcgggcggcggctgcggcggggctatggcgagcggcggtggcgggggtaacactggcgcgggtggggggccggggatgggcctgagcctgggcctgggtctgggtctgagcctaggcatgagtgaggccaccagtgaggcagaggaggaggcggccacggccgaggcggtgggacgcctggccacgacgctgtggctgcggctccgcggctgggaggcggtgctggcggcggcgcagcggttgctggtgtgggagaagccgctgcacagcctggtcacggcggccgcgctcaacggcctcttctggttgctgtcttcctcgtccctccggcccttcttcctactcagcgtctcacttttggcctattttctgctggatctctggcagcctcgctttctccctgacgtttcagcatcatccccagaggagccacactctgacagtgagggtgcggggtcaggcgcccggccgcacctgctgagtgtgcccgagttgtgcagatacctggctgagagctggctcaccttccacatgtgctctctcttgagattaggagcttccttactgctcctctgggtgatccaagtgtagtgggaccccctactagggtcaggaagtggacactaacatctgtgcaggtgttgacttgaaaaataaagtgttgattggctagaactgctgcctccctgactgtgagctgccttccacaccctgcactgcactgtgttctctcctcacccttaacctgcttcactccagtctgttctggctgtttattaccttgttgcaaaacagggccgaagcaaggattaccttgacaaccctagcttctccttagccatcttccttgacagtgtgatctgtttagtgagatttagcatgtgtgaataaagtatatgcaggaggaaattgctttgtcttcccaatcggtagaaattcgggaccataaaaattgtgttttaccatgtggcctacaaccttaacactgctttcttaagaagtcttcacccatctacatgctaacaactcactcagcctggatttatctttactggggaagccaaacaagcaatagaggacctttacctgtgttagaaatgagttggagccaaggaacactgaagaaatagtatcttaacagttactgagtccattgtatgtgcttggctctgctctgagtgatttatatgtattaagatttttcctcacaggtcagatatatactgttactaacttcattttatagacaggttaagcttcctgaaggccacaggtcccagtaaattgtggagccagaacccaaacccaagaagttttggcttcagcaaatgcatcagacagcccctgtccattaatagggcacaggtaggaagatgcacaaggatgtgggaactatagagaaccaatctgatgccttggcttaacaaagagtggacatggcaagccttcctcttcggggaagaaaagcccagaactgagcagatggcctcctttatgagttcatgtcctccgccttcagctggaggtaccatatggcgatgctacctgtctttctgctggaggtaccatatggtaatgctgcctgtctgtctgctggaggtaccatatggtaatgctgcctgtctttctgaggttgacttttatgccatgtctttcctaagtgtgtaagaatttttctgtttgcttcacatttgactgagaatcattctagggtttgattgagcccctgtcctgtgccactaaaggaactcgaacttttcatcacttagagatttcagaggggaatggaaaaacagttctaatcaataagcaagcaattcaagaaaaatagaattaatcaggcaatggctgcaacatgtcctatctttaatctattttcttattaagcttggacattgacaatagaaccagaagcttgtagctggatcaaaatattctccataggcctggagtttcatgagggtctattcttttgttgttgttgttttgnttttttgttttttgtgggtttttttttttttttttttgagacggagtcttgttctgttgcccaggctggagtgcaatggtgcagtcttggttcactgcaacctctgcctcccaggttcaaacaattctcccgcctcagccgtccaagtagctgggatcacaggtgcatgccacgatgcccggctatcttctgtatttttagtagaggtggggttcaccatgttggccaggctggtctcgaactcctgacctcaggtgattcacccacctcggcctcccaaagtgctgggattacaggtgtgagccacggcgcccagcctcatgagggtctattctttacattcaccatggtctgatggttgctacatgtttgtctatgattttttttttctattatcaggtgtcttggccggttcatgccccacgatgaaagggccagaggttttcatatgagtaaaagaaaaaagcagaaatgtgaaacctacaattaggctaaacaaaaatcaactggaaaagtacaggctgaggggagaagagttggctacatgtttatgttaggggaggagggagtacattttagctatgtattcaaacagctaatagtttaatgttgctgcttataaacttaattttaggctgcattaataaaagtgtagtctcc

SEQ ID NO: 1553 - DNA, 726 bp, Homo sapiens
acctctgctgtcctccgcggcgcccccttccgcctgacgcgcccccggcggcggccgcgcagccctggctcctcgcgggctcgggcggcggctgcggcggggctatggcgagcggcggtggcgggggtaacactggcgcgggtggggggccggggatgggcctgagcctgggcctgggtctgggtctgagcctaggcatgagtgaggccaccagtgaggcagaggaggaggcggccacggccgaggcggtgggacgcctggccacgacgctgtggctgcggctccgcggctgggaggcggtgctggcggcggcgcagcggttgctggtgtgggagaagccgctgcacagcctggtcacggcggccgcgctcaacggcctcttctggtaacggccgcggaggagggggcggggccgggatgagcgggggagggaggggtcgagagcaccattcccctttctgggttatcacttggcctgggggcatgacccatccccagtttttgcaggctgacatccgcttgaattgcccatttttttctatctctgagtcgtgagtcgcgagttaggcctggaggtgccattaccccatcagtaggcgcctttccaccttctgagatggatgcatgagcctgtctcacccactcactgctgaggtgcctgtctctccctaaggttgctgtcttcctcgtccctccggcccttcttcctactcagcgtctcacttt

SEQ ID NO: 1554 - DNA, 4576 bp, Homo sapiens
  misc_feature (3916)..(3916): n is a, c, g, or t
acgggctcagctccgcagtcacgtgacgctcgtccgcaacctctgctgtcctccgcggcgcccccttccgcctgacgcgcccccggcggcggccgcgcagccctggctcctcgcgggctcgggcggcggctgcggcggggctatggcgagcggcggtggcgggggtaacactggcgcgggtggggggccggggatgggcctgagcctgggcctgggtctgggtctgagcctaggcatgagtgaggccaccagtgaggcagaggaggaggcggccacggccgaggcggtgggacgcctggccacgacgctgtggctgcggctccgcggctgggaggcggtgctggcggcggcgcagcggttgctggtgtgggagaagccgctgcacagcctggtcacggcggccgcgctcaacggcctcttctggttgctgtcttcctcgtccctccggcccttcttcctactcagcgtctcacttttggcctattttctgctggatctctggcagcctcgctttctccctgacgtttcagcatcatccccagaggagccacactctgacagtgagggtgcggggtcaggcgcccggccgcacctgctgagtgtgcccgagttgtgcagatacctggctgagagctggctcaccttccagattcacctgcaggagctgctgcagtacaagaggcagaatccagctcagttctgcgttcgagtctgctctggctgtgctgtgttggctgtgttgggacactatgttccagggattatgatttcctacattgtcttgttgagtatcctgctgtggcccctggtggtttatcatgagctgatccagaggatgtacactcgcctggagcccctgctcatgcagctggactacagcatgaaggcagaagccaatgccctgcatcacaaacacgacaagaggaagcgtcaggggaagaatgcacccccaggaggtgatgagccactggcagagacagagagtgaaagcgaggcagagctggctggcttctccccagtggtggatgtgaagaaaacagcattggccttggccattacagactcagagctgtcagatgaggaggcttctatcttggagagtggtggcttctccgtatcccgggccacaactccgcagctgactgatgtctccgaggatttggaccagcagagcctgccaagtgaaccagaggagaccctaagccgggacctaggggagggagaggagggagagctggcccctcccgaagacctactaggccgtcctcaagctctgtcaaggcaagccctggactcggaggaagaggaagaggatgtggcagctaaggaaaccttgttgcggctctcatcccccctccactttgtgaacacgcacttcaatggggcagggtcccccccagatggagtgaaatgctcccctggaggaccagtggagacactgagccccgagacagtgagtggtggcctcactgctctgcccggcaccctgtcacctccactttgccttgttggaagtgacccagccccctccccttccattctcccacctgttccccaggaggcactcaccactgaggactttgagttgctggatcagggggagctggagcagctgaatgcagagctgggcttggagccagagacaccgccaaaaccccctgatgctccacccctggggcccgacatccattctctggtacagtcagaccaagaagctcaggccgtggcagagccatgagccagccgttgaggaaggagctgcaggcacagtagggcttcctggctaggagtgttgctgtttcctcctttgcctaccactctggggtggggcagtgtgtggggaagctggctgtcggatggtagctattccaccctctgcctgcctgcctgcctgctgtcctgggcatggtgcagtacctgtgcctaggattggttttaaatttgtaaataattttccatttgggttagtggatgtgaacagggctagggaagtccttcccacagcctgcgcttgcctccctgcctcatctctattctcattccactatgccccaagccctggtggtctggccctttctttttcctcctatcctcagggacctgtgctgctctgccctcatgtcccacttggttgtttagttgaggcactttataatttttctcttgtcttgtgttcctttctgctttatttccctgctgtgtcctgtccttagcagctcaaccccatcctttgccagctcctcctatcccgtgggcactggccaagctttagggaggctcctggtctgggaagtaaagagtaaacctggggcagtgggtcaggccagtagttacactcttaggtcactgtagtctgtgtaaccttcactgcatccttgccccattcagcccggcctttcatgatgcaggagagcagggatcccgcagtacatggcgccagcactggagttggtgagcatgtgctctctcttgagattaggagcttccttactgctcctctgggtgatccaagtgtagtgggaccccctactagggtcaggaagtggacactaacatctgtgcaggtgttgacttgaaaaataaagtgttgattggctagaactgctgcctccctgactgtgagctgccttccacaccctgcactgcactgtgttctctcctcacccttaacctgcttcactccagtctgttctggctgtttattaccttgttgcaaaacagggccgaagcaaggattaccttgacaaccctagcttctccttagccatcttccttgacagtgtgatctgtttagtgagatttagcatgtgtgaataaagtatatgcaggaggaaattgctttgtcttcccaatcggtagaaattcgggaccataaaaattgtgttttaccatgtggcctacaaccttaacactgctttcttaagaagtcttcacccatctacatgctaacaactcactcagcctggatttatctttactggggaagccaaacaagcaatagaggacctttacctgtgttagaaatgagttggagccaaggaacactgaagaaatagtatcttaacagttactgagtccattgtatgtgcttggctctgctctgagtgatttatatgtattaagatttttcctcacaggtcagatatatactgttactaacttcattttatagacaggttaagcttcctgaaggccacaggtcccagtaaattgtggagccagaacccaaacccaagaagttttggcttcagcaaatgcatcagacagcccctgtccattaatagggcacaggtaggaagatgcacaaggatgtgggaactatagagaaccaatctgatgccttggcttaacaaagagtggacatggcaagccttcctcttcggggaagaaaagcccagaactgagcagatggcctcctttatgagttcatgtcctccgccttcagctggaggtaccatatggcgatgctacctgtctttctgctggaggtaccatatggtaatgctgcctgtctgtctgctggaggtaccatatggtaatgctgcctgtctttctgaggttgacttttatgccatgtctttcctaagtgtgtaagaatttttctgtttgcttcacatttgactgagaatcattctagggtttgattgagcccctgtcctgtgccactaaaggaactcgaacttttcatcacttagagatttcagaggggaatggaaaaacagttctaatcaataagcaagcaattcaagaaaaatagaattaatcaggcaatggctgcaacatgtcctatctttaatctattttcttattaagcttggacattgacaatagaaccagaagcttgtagctggatcaaaatattctccataggcctggagtttcatgagggtctattcttttgttgttgttgttttgnttttttgttttttgtgggtttttttttttttttttttgagacggagtcttgttctgttgcccaggctggagtgcaatggtgcagtcttggttcactgcaacctctgcctcccaggttcaaacaattctcccgcctcagccgtccaagtagctgggatcacaggtgcatgccacgatgcccggctatcttctgtatttttagtagaggtggggttcaccatgttggccaggctggtctcgaactcctgacctcaggtgattcacccacctcggcctcccaaagtgctgggattacaggtgtgagccacggcgcccagcctcatgagggtctattctttacattcaccatggtctgatggttgctacatgtttgtctatgattttttttttctattatcaggtgtcttggccggttcatgccccacgatgaaagggccagaggttttcatatgagtaaaagaaaaaagcagaaatgtgaaacctacaattaggctaaacaaaaatcaactggaaaagtacaggctgaggggagaagagttggctacatgtttatgttaggggaggagggagtacattttagctatgtattcaaacagctaatagtttaatgttgctgcttataaacttaattttaggctgcattaataaaagtgtagtctcc

SEQ ID NO: 1555 - DNA, 3049 bp, Homo sapiens
acgggctcagctccgcagtcacgtgacgctcgtccgcaacctctgctgtcctccgcggcgcccccttccgcctgacgcgcccccggcggcggccgcgcagccctggctcctcgcgggctcgggcggcggctgcggcggggctatggcgagcggcggtggcgggggtaacactggcgcgggtggggggccggggatgggcctgagcctgggcctgggtctgggtctgagcctaggcatgagtgaggccaccagtgaggcagaggaggaggcggccacggccgaggcggtgggacgcctggccacgacgctgtggctgcggctccgcggctgggaggcggtgctggcggcggcgcagcggttgctggtgtgggagaagccgctgcacagcctggtcacggcggccgcgctcaacggcctcttctggttgctgtcttcctcgtccctccggcccttcttcctactcagcgtctcacttttggcctattttctgctggatctctggcagcctcgctttctccctgacgtttcagcatcatccccagaggagccacactctgacagtgagggtgcggggtcaggcgcccggccgcacctgctgagtgtgcccgagttgtgcagatacctggctgagagctggctcaccttccagattcacctgcaggagctgctgcagtacaagaggcagaatccagctcagttctgcgttcgagtctgctctggctgtgctgtgttggctgtgttgggacactatgttccagggattatgatttcctacattgtcttgttgagtatcctgctgtggcccctggtggtttatcatgagctgatccagaggatgtacactcgcctggagcccctgctcatgcagctggactacagcatgaaggcagaagccaatgccctgcatcacaaacacgacaagaggaagcgtcaggggaagaatgcacccccaggaggtgatgagccactggcagagacagagagtgaaagcgaggcagagctggctggcttctccccagtggtggatgtgaagaaaacagcattggccttggccattacagactcagagctgtcagatgaggaggcttctatcttggagagtggtggcttctccgtatcccgggccacaactccgcagctgactgatgtctccgaggatttggaccagcagagcctgccaagtgaaccagaggagaccctaagccgggacctaggggagggagaggagggagagctggcccctcccgaagacctactaggccgtcctcaagctctgtcaaggcaagccctggactcggaggaagaggaagaggatgtggcagctaaggaaaccttgttgcggctctcatcccccctccactttgtgaacacgcacttcaatggggcagggtcccccccagatggagtgaaatgctcccctggaggaccagtggagacactgagccccgagacagtgagtggtggcctcactgctctgcccggcaccctgtcacctccactttgccttgttggaagtgacccagccccctccccttccattctcccacctgttccccaggactcaccccagcccctgcctgcccctgaggaagaagaggcactcaccactgaggactttgagttgctggatcagggggagctggagcagctgaatgcagagctgggcttggagccagagacaccgccaaaaccccctgatgctccacccctggggcccgacatccattctctggtacagtcagaccaagaagctcaggccgtggcagagccatgagccagccgttgaggaaggagctgcaggcacagtagggcttcctggctaggagtgttgctgtttcctcctttgcctaccactctggggtggggcagtgtgtggggaagctggctgtcggatggtagctattccaccctctgcctgcctgcctgcctgctgtcctgggcatggtgcagtacctgtgcctaggattggttttaaatttgtaaataattttccatttgggttagtggatgtgaacagggctagggaagtccttcccacagcctgcgcttgcctccctgcctcatctctattctcattccactatgccccaagccctggtggtctggccctttctttttcctcctatcctcagggacctgtgctgctctgccctcatgtcccacttggttgtttagttgaggcactttataatttttctcttgtcttgtgttcctttctgctttatttccctgctgtgtcctgtccttagcagctcaaccccatcctttgccagctcctcctatcccgtgggcactggccaagctttagggaggctcctggtctgggaagtaaagagtaaacctggggcagtgggtcaggccagtagttacactcttaggtcactgtagtctgtgtaaccttcactgcatccttgccccattcagcccggcctttcatgatgcaggagagcagggatcccgcagtacatggcgccagcactggagttggtgagcatgtgctctctcttgagattaggagcttccttactgctcctctgggtgatccaagtgtagtgggaccccctactagggtcaggaagtggacactaacatctgtgcaggtgttgacttgaaaaataaagtgttgattgaaaaaaaaaaaaaaaaaaaaaaaagagggggggcgcggctctaataaaggtatttccctcttgggggggcccaaggttttaggcgttaccacggtttttttgtacaaggggggctccctatatataggggaggtcggtattataaaaggcaagggcaggggccggcggtttaaaaaggtggggagtgggggaaacacggtggctaggctggggagatctgggggaagggagcccttacttcgtgggggtgggtgacattattggggcgcaaactacctacaggagattaaaaggctcaaaggtaaaatataaaatttttcacggtggtattagtggtgtacacctagctgaatatgctggcggctaggaaaagtttggtaacggggtatgactttctggaatttttttccccaggactg

SEQ ID NO: 1556 - DNA, 3549 bp, Homo sapiens
  misc_feature (2889)..(2889): n is a, c, g, or t
ttagcagtagcagcagcatgtccctggccaagggagtagatttctccagactactaaagccatgtatatagccattcccacttcccatattctgtggatatgtacatgtgcatggtagctagagtccctccaccagagtatctctctcatgatggtttcttcaggggagagctggcccctcccgaagacctactaggccgtcctcaagctctgtcaaggcaagccctggactcggaggaagaggaagaggatgtggcagctaaggaaaccttgttgcggctctcatcccccctccactttgtgaacacgcacttcaatggggcagggtcccccccagatggagtgaaatgctcccctggaggaccagtggagacactgagccccgagacagtgagtggtggcctcactgctctgcccggcaccctgtcacctccactttgccttgttggaagtgacccagccccctccccttccattctcccacctgttccccaggactcaccccagcccctgcctgcccctgaggaagaagaggcactcaccactgaggactttgagttgctggatcagggggagctggagcagctgaatgcagagctgggcttggagccagagacaccgccaaaaccccctgatgctccacccctggggcccgacatccattctctggtacagtcagaccaagaagctcaggccgtggcagagccatgagccagccgttgaggaaggagctgcaggcacagtagggcttcctggctaggagtgttgctgtttcctcctttgcctaccactctggggtggggcagtgtgtggggaagctggctgtcggatggtagctattccaccctctgcctgcctgcctgcctgctgtcctgggcatggtgcagtacctgtgcctaggattggttttaaatttgtaaataattttccatttgggttagtggatgtgaacagggctagggaagtccttcccacagcctgcgcttgcctccctgcctcatctctattctcattccactatgccccaagccctggtggtctggccctttctttttcctcctatcctcagggacctgtgctgctctgccctcatgtcccacttggttgtttagttgaggcactttataatttttctcttgtcttgtgttcctttctgctttatttccctgctgtgtcctgtccttagcagctcaaccccatcctttgccagctcctcctatcccgtgggcactggccaagctttagggaggctcctggtctgggaagtaaagagtaaacctggggcagtgggtcaggccagtagttacactcttaggtcactgtagtctgtgtaaccttcactgcatccttgccccattcagcccggcctttcatgatgcaggagagcagggatcccgcagtacatggcgccagcactggagttggtgagcatgtgctctctcttgagattaggagcttccttactgctcctctgggtgatccaagtgtagtgggaccccctactagggtcaggaagtggacactaacatctgtgcaggtgttgacttgaaaaataaagtgttgattggctagaactgctgcctccctgactgtgagctgccttccacaccctgcactgcactgtgttctctcctcacccttaacctgcttcactccagtctgttctggctgtttattaccttgttgcaaaacagggccgaagcaaggattaccttgacaaccctagcttctccttagccatcttccttgacagtgtgatctgtttagtgagatttagcatgtgtgaataaagtatatgcaggaggaaattgctttgtcttcccaatcggtagaaattcgggaccataaaaattgtgttttaccatgtggcctacaaccttaacactgctttcttaagaagtcttcacccatctacatgctaacaactcactcagcctggatttatctttactggggaagccaaacaagcaatagaggacctttacctgtgttagaaatgagttggagccaaggaacactgaagaaatagtatcttaacagttactgagtccattgtatgtgcttggctctgctctgagtgatttatatgtattaagatttttcctcacaggtcagatatatactgttactaacttcattttatagacaggttaagcttcctgaaggccacaggtcccagtaaattgtggagccagaacccaaacccaagaagttttggcttcagcaaatgcatcagacagcccctgtccattaatagggcacaggtaggaagatgcacaaggatgtgggaactatagagaaccaatctgatgccttggcttaacaaagagtggacatggcaagccttcctcttcggggaagaaaagcccagaactgagcagatggcctcctttatgagttcatgtcctccgccttcagctggaggtaccatatggcgatgctacctgtctttctgctggaggtaccatatggtaatgctgcctgtctgtctgctggaggtaccatatggtaatgctgcctgtctttctgaggttgacttttatgccatgtctttcctaagtgtgtaagaatttttctgtttgcttcacatttgactgagaatcattctagggtttgattgagcccctgtcctgtgccactaaaggaactcgaacttttcatcacttagagatttcagaggggaatggaaaaacagttctaatcaataagcaagcaattcaagaaaaatagaattaatcaggcaatggctgcaacatgtcctatctttaatctattttcttattaagcttggacattgacaatagaaccagaagcttgtagctggatcaaaatattctccataggcctggagtttcatgagggtctattcttttgttgttgttgttttgnttttttgttttttgtgggtttttttttttttttttttgagacggagtcttgttctgttgcccaggctggagtgcaatggtgcagtcttggttcactgcaacctctgcctcccaggttcaaacaattctcccgcctcagccgtccaagtagctgggatcacaggtgcatgccacgatgcccggctatcttctgtatttttagtagaggtggggttcaccatgttggccaggctggtctcgaactcctgacctcaggtgattcacccacctcggcctcccaaagtgctgggattacaggtgtgagccacggcgcccagcctcatgagggtctattctttacattcaccatggtctgatggttgctacatgtttgtctatgattttttttttctattatcaggtgtcttggccggttcatgccccacgatgaaagggccagaggttttcatatgagtaaaagaaaaaagcagaaatgtgaaacctacaattaggctaaacaaaaatcaactggaaaagtacaggctgaggggagaagagttggctacatgtttatgttaggggaggagggagtacattttagctatgtattcaaacagctaatagtttaatgttgctgcttataaacttaattttaggctgcattaataaaagtgtagtctcc

SEQ ID NO: 1557 - DNA, 3837 bp, Homo sapiens
  misc_feature (3177)..(3177): n is a, c, g, or t
acgggctcagctccgcagtcacgtgacgctcgtccgcaacctctgctgtcctccgcggcgcccccttccgcctgacgcgcccccggcggcggccgcgcagccctggctcctcgcgggctcgggcggcggctgcggcggggctatggcgagcggcggtggcgggggtaacactggcgcgggtggggggccggggatgggcctgagcctgggcctgggtctgggtctgagcctaggcatgagtgaggccaccagtgaggcagaggaggaggcggccacggccgaggcggtgggacgcctggccacgacgctgtggctgcggctccgcggctgggaggcggtgctggcggcggcgcagcggttgctggtgtgggagaagccgctgcacagcctggtcacggcggccgcgctcaacggcctcttctggttgctgtcttcctcgtccctccggcccttcttcctactcagcgtctcacttttggcctattttctgctggatctctggcagcctcgctttctccctgacgtttcagcatcatccccagaggagccacactctgacagtgagggtgcggggtcaggcgcccggccgcacctgctgagtgtgcccgagttgtgcagatacctggctgagagctggctcaccttccagattcacctgcaggagctgctgcagtacaagaggcagaatccagctcagttctgcgttcgagtctgctctggctgtgctgtgttgttggaagtgacccagccccctccccttccattctcccacctgttccccaggactcaccccagcccctgcctgcccctgaggaagaagaggcactcaccactgaggactttgagttgctggatcagggggagctggagcagctgaatgcagagctgggcttggagccagagacaccgccaaaaccccctgatgctccacccctggggcccgacatccattctctggtacagtcagaccaagaagctcaggccgtggcagagccatgagccagccgttgaggaaggagctgcaggcacagtagggcttcctggctaggagtgttgctgtttcctcctttgcctaccactctggggtggggcagtgtgtggggaagctggctgtcggatggtagctattccaccctctgcctgcctgcctgcctgctgtcctgggcatggtgcagtacctgtgcctaggattggttttaaatttgtaaataattttccatttgggttagtggatgtgaacagggctagggaagtccttcccacagcctgcgcttgcctccctgcctcatctctattctcattccactatgccccaagccctggtggtctggccctttctttttcctcctatcctcagggacctgtgctgctctgccctcatgtcccacttggttgtttagttgaggcactttataatttttctcttgtcttgtgttcctttctgctttatttccctgctgtgtcctgtccttagcagctcaaccccatcctttgccagctcctcctatcccgtgggcactggccaagctttagggaggctcctggtctgggaagtaaagagtaaacctggggcagtgggtcaggccagtagttacactcttaggtcactgtagtctgtgtaaccttcactgcatccttgccccattcagcccggcctttcatgatgcaggagagcagggatcccgcagtacatggcgccagcactggagttggtgagcatgtgctctctcttgagattaggagcttccttactgctcctctgggtgatccaagtgtagtgggaccccctactagggtcaggaagtggacactaacatctgtgcaggtgttgacttgaaaaataaagtgttgattggctagaactgctgcctccctgactgtgagctgccttccacaccctgcactgcactgtgttctctcctcacccttaacctgcttcactccagtctgttctggctgtttattaccttgttgcaaaacagggccgaagcaaggattaccttgacaaccctagcttctccttagccatcttccttgacagtgtgatctgtttagtgagatttagcatgtgtgaataaagtatatgcaggaggaaattgctttgtcttcccaatcggtagaaattcgggaccataaaaattgtgttttaccatgtggcctacaaccttaacactgctttcttaagaagtcttcacccatctacatgctaacaactcactcagcctggatttatctttactggggaagccaaacaagcaatagaggacctttacctgtgttagaaatgagttggagccaaggaacactgaagaaatagtatcttaacagttactgagtccattgtatgtgcttggctctgctctgagtgatttatatgtattaagatttttcctcacaggtcagatatatactgttactaacttcattttatagacaggttaagcttcctgaaggccacaggtcccagtaaattgtggagccagaacccaaacccaagaagttttggcttcagcaaatgcatcagacagcccctgtccattaatagggcacaggtaggaagatgcacaaggatgtgggaactatagagaaccaatctgatgccttggcttaacaaagagtggacatggcaagccttcctcttcggggaagaaaagcccagaactgagcagatggcctcctttatgagttcatgtcctccgccttcagctggaggtaccatatggcgatgctacctgtctttctgctggaggtaccatatggtaatgctgcctgtctgtctgctggaggtaccatatggtaatgctgcctgtctttctgaggttgacttttatgccatgtctttcctaagtgtgtaagaatttttctgtttgcttcacatttgactgagaatcattctagggtttgattgagcccctgtcctgtgccactaaaggaactcgaacttttcatcacttagagatttcagaggggaatggaaaaacagttctaatcaataagcaagcaattcaagaaaaatagaattaatcaggcaatggctgcaacatgtcctatctttaatctattttcttattaagcttggacattgacaatagaaccagaagcttgtagctggatcaaaatattctccataggcctggagtttcatgagggtctattcttttgttgttgttgttttgnttttttgttttttgtgggtttttttttttttttttttgagacggagtcttgttctgttgcccaggctggagtgcaatggtgcagtcttggttcactgcaacctctgcctcccaggttcaaacaattctcccgcctcagccgtccaagtagctgggatcacaggtgcatgccacgatgcccggctatcttctgtatttttagtagaggtggggttcaccatgttggccaggctggtctcgaactcctgacctcaggtgattcacccacctcggcctcccaaagtgctgggattacaggtgtgagccacggcgcccagcctcatgagggtctattctttacattcaccatggtctgatggttgctacatgtttgtctatgattttttttttctattatcaggtgtcttggccggttcatgccccacgatgaaagggccagaggttttcatatgagtaaaagaaaaaagcagaaatgtgaaacctacaattaggctaaacaaaaatcaactggaaaagtacaggctgaggggagaagagttggctacatgtttatgttaggggaggagggagtacattttagctatgtattcaaacagctaatagtttaatgttgctgcttataaacttaattttaggctgcattaataaaagtgtagtctcc

SEQ ID NO: 1558 - DNA, 3280 bp, Homo sapiens
  misc_feature (2620)..(2620): n is a, c, g, or t
tccatcttggggggaccctgccccattgaagtgcgtgttcacaaagtggagtgaaatgctccactggtcctccaggggagcatttcactccatcttggggggaccctgccccattgagacagtgagtggtggcctcactgctctgcccggcaccctgtcacctccactttgccttgttggaagtgacccagccccctccccttccattctcccacctgttccccaggactcaccccagcccctgcctgcccctgaggaagaagaggcactcaccactgaggactttgagttgctggatcagggggagctggagcagctgaatgcagagctgggcttggagccagagacaccgccaaaaccccctgatgctccacccctggggcccgacatccattctctggtacagtcagaccaagaagctcaggccgtggcagagccatgagccagccgttgaggaaggagctgcaggcacagtagggcttcctggctaggagtgttgctgtttcctcctttgcctaccactctggggtggggcagtgtgtggggaagctggctgtcggatggtagctattccaccctctgcctgcctgcctgcctgctgtcctgggcatggtgcagtacctgtgcctaggattggttttaaatttgtaaataattttccatttgggttagtggatgtgaacagggctagggaagtccttcccacagcctgcgcttgcctccctgcctcatctctattctcattccactatgccccaagccctggtggtctggccctttctttttcctcctatcctcagggacctgtgctgctctgccctcatgtcccacttggttgtttagttgaggcactttataatttttctcttgtcttgtgttcctttctgctttatttccctgctgtgtcctgtccttagcagctcaaccccatcctttgccagctcctcctatcccgtgggcactggccaagctttagggaggctcctggtctgggaagtaaagagtaaacctggggcagtgggtcaggccagtagttacactcttaggtcactgtagtctgtgtaaccttcactgcatccttgccccattcagcccggcctttcatgatgcaggagagcagggatcccgcagtacatggcgccagcactggagttggtgagcatgtgctctctcttgagattaggagcttccttactgctcctctgggtgatccaagtgtagtgggaccccctactagggtcaggaagtggacactaacatctgtgcaggtgttgacttgaaaaataaagtgttgattggctagaactgctgcctccctgactgtgagctgccttccacaccctgcactgcactgtgttctctcctcacccttaacctgcttcactccagtctgttctggctgtttattaccttgttgcaaaacagggccgaagcaaggattaccttgacaaccctagcttctccttagccatcttccttgacagtgtgatctgtttagtgagatttagcatgtgtgaataaagtatatgcaggaggaaattgctttgtcttcccaatcggtagaaattcgggaccataaaaattgtgttttaccatgtggcctacaaccttaacactgctttcttaagaagtcttcacccatctacatgctaacaactcactcagcctggatttatctttactggggaagccaaacaagcaatagaggacctttacctgtgttagaaatgagttggagccaaggaacactgaagaaatagtatcttaacagttactgagtccattgtatgtgcttggctctgctctgagtgatttatatgtattaagatttttcctcacaggtcagatatatactgttactaacttcattttatagacaggttaagcttcctgaaggccacaggtcccagtaaattgtggagccagaacccaaacccaagaagttttggcttcagcaaatgcatcagacagcccctgtccattaatagggcacaggtaggaagatgcacaaggatgtgggaactatagagaaccaatctgatgccttggcttaacaaagagtggacatggcaagccttcctcttcggggaagaaaagcccagaactgagcagatggcctcctttatgagttcatgtcctccgccttcagctggaggtaccatatggcgatgctacctgtctttctgctggaggtaccatatggtaatgctgcctgtctgtctgctggaggtaccatatggtaatgctgcctgtctttctgaggttgacttttatgccatgtctttcctaagtgtgtaagaatttttctgtttgcttcacatttgactgagaatcattctagggtttgattgagcccctgtcctgtgccactaaaggaactcgaacttttcatcacttagagatttcagaggggaatggaaaaacagttctaatcaataagcaagcaattcaagaaaaatagaattaatcaggcaatggctgcaacatgtcctatctttaatctattttcttattaagcttggacattgacaatagaaccagaagcttgtagctggatcaaaatattctccataggcctggagtttcatgagggtctattcttttgttgttgttgttttgnttttttgttttttgtgggtttttttttttttttttttgagacggagtcttgttctgttgcccaggctggagtgcaatggtgcagtcttggttcactgcaacctctgcctcccaggttcaaacaattctcccgcctcagccgtccaagtagctgggatcacaggtgcatgccacgatgcccggctatcttctgtatttttagtagaggtggggttcaccatgttggccaggctggtctcgaactcctgacctcaggtgattcacccacctcggcctcccaaagtgctgggattacaggtgtgagccacggcgcccagcctcatgagggtctattctttacattcaccatggtctgatggttgctacatgtttgtctatgattttttttttctattatcaggtgtcttggccggttcatgccccacgatgaaagggccagaggttttcatatgagtaaaagaaaaaagcagaaatgtgaaacctacaattaggctaaacaaaaatcaactggaaaagtacaggctgaggggagaagagttggctacatgtttatgttaggggaggagggagtacattttagctatgtattcaaacagctaatagtttaatgttgctgcttataaacttaattttaggctgcattaataaaagtgtagtctcc

SEQ ID NO: 1559 - DNA, 3062 bp, Homo sapiens
  misc_feature (2402)..(2402): n is a, c, g, or t
acgggctcagctccgcagtcacgtgacgctcgtccgcaacctctgctgtcctccgcggcgcccccttccgcctgacgcgcccccggcggcggccgcgcagccctggctcctcgcgggctcgggcggcggctgcggcggggctatggcgagcggcggtggcgggggtaacactggcgcgggtggggggccggggatgggcctgagcctgggcctgggtctgggtctgagcctaggcatgagtgaggccaccagtgaggcagaggaggaggcggccacggccgaggcggtgggacgcctggccacgacgctgtggctgcggctccgcggctgggaggcggtgctggcggcggcgcagcggttgctggtgtgggagaagccgctgcacagcctggtcacggcggccgcgctcaacggcctcttctggttgctgtcttcctcgtccctccggcccttcttcctactcagcgtctcacttttggcctattttctgctggatctctggcagcctcgctttctccctgacgtttcagcatcatccccagaggagccacactctgacagtgagggtgcggggtcaggcgcccggccgcacctgctgagtgtgcccgagttgtgcagatacctggctgagagctggctcaccttccagattcacctgcaggagctgctgcagtacaagaggcagaatccagctcagttctgcgttcgagtctgctctggctgtgctgtgttggctgtgttgggacactatgttccagggaggctcctggtctgggaagtaaagagtaaacctggggcagtgggtcaggccagtagttacactcttaggtcactgtagtctgtgtaaccttcactgcatccttgccccattcagcccggcctttcatgatgcaggagagcagggatcccgcagtacatggcgccagcactggagttggtgagcatgtgctctctcttgagattaggagcttccttactgctcctctgggtgatccaagtgtagtgggaccccctactagggtcaggaagtggacactaacatctgtgcaggtgttgacttgaaaaataaagtgttgattggctagaactgctgcctccctgactgtgagctgccttccacaccctgcactgcactgtgttctctcctcacccttaacctgcttcactccagtctgttctggctgtttattaccttgttgcaaaacagggccgaagcaaggattaccttgacaaccctagcttctccttagccatcttccttgacagtgtgatctgtttagtgagatttagcatgtgtgaataaagtatatgcaggaggaaattgctttgtcttcccaatcggtagaaattcgggaccataaaaattgtgttttaccatgtggcctacaaccttaacactgctttcttaagaagtcttcacccatctacatgctaacaactcactcagcctggatttatctttactggggaagccaaacaagcaatagaggacctttacctgtgttagaaatgagttggagccaaggaacactgaagaaatagtatcttaacagttactgagtccattgtatgtgcttggctctgctctgagtgatttatatgtattaagatttttcctcacaggtcagatatatactgttactaacttcattttatagacaggttaagcttcctgaaggccacaggtcccagtaaattgtggagccagaacccaaacccaagaagttttggcttcagcaaatgcatcagacagcccctgtccattaatagggcacaggtaggaagatgcacaaggatgtgggaactatagagaaccaatctgatgccttggcttaacaaagagtggacatggcaagccttcctcttcggggaagaaaagcccagaactgagcagatggcctcctttatgagttcatgtcctccgccttcagctggaggtaccatatggcgatgctacctgtctttctgctggaggtaccatatggtaatgctgcctgtctgtctgctggaggtaccatatggtaatgctgcctgtctttctgaggttgacttttatgccatgtctttcctaagtgtgtaagaatttttctgtttgcttcacatttgactgagaatcattctagggtttgattgagcccctgtcctgtgccactaaaggaactcgaacttttcatcacttagagatttcagaggggaatggaaaaacagttctaatcaataagcaagcaattcaagaaaaatagaattaatcaggcaatggctgcaacatgtcctatctttaatctattttcttattaagcttggacattgacaatagaaccagaagcttgtagctggatcaaaatattctccataggcctggagtttcatgagggtctattcttttgttgttgttgttttgnttttttgttttttgtgggtttttttttttttttttttgagacggagtcttgttctgttgcccaggctggagtgcaatggtgcagtcttggttcactgcaacctctgcctcccaggttcaaacaattctcccgcctcagccgtccaagtagctgggatcacaggtgcatgccacgatgcccggctatcttctgtatttttagtagaggtggggttcaccatgttggccaggctggtctcgaactcctgacctcaggtgattcacccacctcggcctcccaaagtgctgggattacaggtgtgagccacggcgcccagcctcatgagggtctattctttacattcaccatggtctgatggttgctacatgtttgtctatgattttttttttctattatcaggtgtcttggccggttcatgccccacgatgaaagggccagaggttttcatatgagtaaaagaaaaaagcagaaatgtgaaacctacaattaggctaaacaaaaatcaactggaaaagtacaggctgaggggagaagagttggctacatgtttatgttaggggaggagggagtacattttagctatgtattcaaacagctaatagtttaatgttgctgcttataaacttaattttaggctgcattaataaaagtgtagtctcc

SEQ ID NO: 1560 - DNA, 1264 bp, Homo sapiens
acgggctcagctccgcagtcacgtgacgctcgtccgcaacctctgctgtcctccgcggcgcccccttccgcctgacgcgcccccggcggcggccgcgcagccctggctcctcgcgggctcgggcggcggctgcggcggggctatggcgagcggcggtggcgggggtaacactggcgcgggtggggggccggggatgggcctgagcctgggcctgggtctgggtctgagcctaggcatgagtgaggccaccagtgaggcagaggaggaggcggccacggccgaggcggtgggacgcctggccacgacgctgtggctgcggctccgcggctgggaggcggtgctggcggcggcgcagcggttgctggtgtgggagaagccgctgcacagcctggtcacggcggccgcgctcaacggcctcttctggttgctgtcttcctcgtccctccggcccttcttcctactcagcgtctcacttttggcctattttctgctggatctctggcagcctcgctttctccctgacgtttcagcatcatccccagaggagccacactctgacagtgagggtgcggggtcaggcgcccggccgcacctgctgagtgtgcccgagttgtgcagatacctggctgagagctggctcaccttccagattcacctgcaggagctgctgcagtacaagaggcagaatccagctcagttctgcgttcgagtctgctctggctgtgctgtgttggctgtgttgggacactatgttccagggattatgatttcctacattgtcttgttgagtatcctgctgtggcccctggtggtttatcatgagctgatccagaggatgtacactcgcctggagcccctgctcatgcagctggactacagcatgaaggcagaagccaatgccctgcatcacaaacacgacaagaggaagcgtcaggggaagaatgcacccccaggaggtgatgagccactggcagagacagagagtgaaagcgaggcagagctggctggcttctccccagtggtggatgtgaagaaaacagcattggccttggccattacagactcagagctgtcagatgaggaggcttctatcttggagagtggtggcttctccgtatcccgggccacaactccgcagctgactgatgtctccgaggatttggaccagcagagcctgccaagtgaaccagaggagaccctaagccgggacctaggggagggagaggaagaaggtcacgcgggatcctcagagtcaccgcaagca

SEQ ID NO: 1561 - DNA, 774 bp, Homo sapiens
  misc_feature (24)..(24): n is a, c, g, or t
tcaaagctgtttccgtgagaaagngctcctcctgctcattttagtgccctgaaatgtcacttccttgaggaagtcttccttgaccctccacaccaaaccaggccccctgccacacccctcagagctctccttggaaggcactggcatggctgtttgcgtgattccttgaacgttgtctgtctctcctcctcaccaggctgtgggtcctgtctgtttctggtgaccgttgtctgtctaacccctagaggagagtttgtcacatggtaggagcttaataaatatgtgttggatgaatgatcagagaaaagagagtgcagagagtggccaaaacagatgctttcagcagtgtatctgccaataaacctaaaggcatgatttgccctggtgatccccccagaggtgcttagtctcttggctgaattccttctggaatccccagaatccccctccttggaagttttcccaggagtctgaggcaggcaggtctctcagtcacggccacatgacctcaagtgaaaacaaaccagtctggctgttcacagactcagctggtcagagctctggcccgaggggcccacgcaccacccgccactgcagaagacgcctccacgtctgtctctgggctgcctccaccttctgcaggcctcctggagcctctgctggctgcagaagtggggtgcatgctgcctggaggaggaacatctgtggtgggaccccaaatccatgtttgtgttaccatcgtgttccaataaaactatcgaaacagaaaatgcc

SEQ ID NO: 1562 - DNA, 508 bp, Homo sapiens
aagagaccacaggacatgaaagaactacttttctttctgtagccaacacacattaaaggtcactattctgcgttaacttgaaaagagcaaaagcactgtttaacacaggctgtccagactcaattttagaggcaggaaacagaaattagtcaagtcctctaatttatagatggaaaaactattgtccaaaagtttctttcaatgaatctgttttgaacatttattgtgagatattaccaagatgcatgattgtatgtctcttcaagccagcagaatatttatcacacactatatttcctcaagaaattcttaataagtaaacaaatgaatgaattcacagacttgccccatgttagaaattagtaactagaagaactagagctagaacacccatctcctgacttcctgtttactacttctgggtgagaccaaaaatgcttgaaaatagctaggaaaactcaagcagttttcttagattagcttctgaatcactgatttaagcccatgc

SEQ ID NO: 1563 - DNA, 700 bp, Homo sapiens
ggccacccctcacctcctctaggaggtgtgcagccctagacaaggccatggactggtactgggggtcaaggacccctgctttagggcatgaaacagactgatagctactggtagctgccaacggtatgaatgaagatgttcaattcttctacagaaaaattcttcaccttcacaattgatggaatgtagtagaaatttctgtttgactcttccatggtatatttcagactcactgatttatctaaatatatatattttttatggaactcgtcagctatacccatcttcaatcttataagcaaagaaataaattctaaagaatttgtatgatgaagacatatttttgagctgagtggctcctaatcgcccatttttccttgagggagcatttattgagtgtttgttgtatgctggcagtggattccagactgaacaaagcagacactgcccctgctcccggagagcttgcaccgcctccatgcacacaccatcctgctctactgcagctgtcctgatcacctaagaagtgatcatcagattctaagttgtatagcccataacatttcctcattaattcattgaagtttaaacttctcatccatgtgtgtagcaagcttagttctgcaaaaatgtttgaaatttgccacttcctctaaaaaagatattttcttctgtgatcattaattataataaaatgtgt

SEQ ID NO: 1564 - DNA, 344 bp, Homo sapiens
atgaaagtcaaagatgtcatatataattggtctctttacttgtcagtgtattaggttagcttatttactgtgaaaagcatttgatctcaaggaatattttgtgccaaatgaagtgtgtacctggaaacagaaccaggaacaggatttgaagatctaggaggtttactgtagttcagagcgcaccagctctggtctgctcaaagcccctctcaggggtcccaggggtttgtatcacactccaaagcaacatcttatcagattctgcaccaggatgactcagttattaccataatttaggaaaaacagatctagaaacttaaagacgggcaggtcgtagtgattca

SEQ ID NO: 1565 - DNA, 772 bp, Homo sapiens
taaagaaaataagtaaagtttatttctgtttaaagcacagtaagtttcaccatgaaaagttaacatacacatacaacaaacagtaagaacaaagtttcctttaatattcttacatttttggcatttagttgcacaaagttaggatggaacccactgtaggggacagaactcttaatagtgtcttaggatttttctcacattttgttaatctaactgggtgtgttgttatgatagaaagcagtgagctccatggtaatacttgttccctgtgacagaagaaagggacaaagatgtgacatggtcataacccctgcaacctccgaagatgctgctgtgtcctgtcccaggagggctccactctttttagggaatggctatatttacccagtttacagcttacgagaaacacgttgagggcaagactcaaatgaaactaatggggggccgtgaaaggctattttaagaatgcagaaagcagggaaaaaaggtaaaaaaaaaaaaaattaaaagaacagcaacaacaacaacaacaatgaacagtagagaacacaggttagcacactttttctgttaagagccacacagtctctgtcataccacccaactctgaatgtgaaaacagccacagataactgtaagtgaatgtgtgcggctatgttccacatttacaaaaacaggtgggcgggcctgatttggcccatagtttacaatccttggtatagaggattaaaaaatgcccacccctccatccataacacatttcaacggaaag

SEQ ID NO: 1566 - DNA, 418 bp, Homo sapiens
gttggcccttaccagtactacttgttgaataaagaaggaataccgagaagatattaattgtacgacattaagctaatagccagcaacccacatcccatcctcaagagaggtcatcaataaaaatttgttaaggaataattgagtgggctgaattacttaaaaaggtattgaaaatgataaaataaaatcagtgcggaaggataaaaaaaaatggcactgatgaaaaagtgaaatggtgacctcggcctacccgttttgctttctactcaaactgaaagcttttctacccaggaacttttttgcttttaatcataaatggaaatgttttaattggcctctctcactttgattctgaaagagttaccaacaaccaaagaataggagaaataaaatgcaaagataaatttatttttttggc

SEQ ID NO: 1567 - DNA, 427 bp, Homo sapiens
ttggcatcaggacccatcacaaaacacagagccctgagtgttcttcattttttaaataatattttccagatcaatatgctattgaacttttttgctaagaagaaaagattgaaaatgatttataatcatttaatttcactgtcagtctcacaaacaactgattccttatggtaaaagtgttggaaacattatattcaaatagtagtgttaaagattttgcagcaagattgtgggtaaaaaaggctgaaagtgttttgagaggaaaatgaactgcagagtaacaaagaaaaatggtgagcgtcagaattccttagctcttaattattttcatggaaaagtacctagttctcaaatgctggtaactggaacatcctattggttaaaaataaacagcataaagtttcaggaaaccaactaaacagcaaaa

SEQ ID NO: 1568 - DNA, 345 bp, Homo sapiens
tttgagatggagtcttgctctgtcgcccaggctggagtgcaatggcatgatctcagctcactgcaacctctgcctcccaggttcaagtgattctcctgcttcagcctcctgagtagctgggattacaggcacgcaccaccatacccgactaatttttgtatttttagtagagacggggtttcaccatgttggtcaggctggtcttgaactcctgacctcgtgatctgcccacctcagcctcccaaagtgctgggattacaggtgtgagccactgcacccagcctatgatttttcataatattaacttataatcctttttagttctgccaggtctgtaatcatgtc

SEQ ID NO: 1569 - DNA, 443 bp, Homo sapiens
gggattacaggcgtgcgccaccacgcctggctaattttgtatttttttagtagagacaaggtttctccatgttggccaggctggtcttgaactcccgacctcaggtgatctgcccgccttggcctcccaaagtcttgggattacaggcatgagccaccgcacctggccaaacatatttttctttaactgaggaaattagattcattgtccaaagcttaaaaggaagattttctactttgagtttttattaactctgatactttactatgacagtacttccagcctctgagacatgagaaatagcgtgagattgtagtaatcaaaatgaccttaccagaaatcaccaccaggttggtgaaaaacagtacatctacacagaaggatggacttgatgttgattctttcaagattaaagatgaagatgcccgaacttgaagcaagtc

SEQ ID NO: 1570 - DNA, 724 bp, Homo sapiens
tctgtccttttcgtacttggacgtctagttcgccatgttgcctaaagtggaagttccatagctttaaattcaacttagtggtacacttttgtgatgttaaggcacagagaacacaggaaattattccattccaatttcggcttattttataactggaaatgtgtacaggaatttagaaatggaaagtaaggataaatgaaatggttgagaaaagatgacataaaaggaatgaatagtagaaccaaaacaaaacattgagaatcttgtgacagtcttaaatccagtaactaaatagtatttacaaatagaaaaacatgtcctggacaaatcagttaaaagatgcagattctggctgtgacataactggcttattattaaacaatttccgtctcagagcttcaacgtcctcatttgaaaaataaaataataaggccctttgacatcagagttcattgtaacgattaaacacagtaacgtgtatggatttatggtataatgcaatataccaatgcaaagtttaatgaagatacttcaacagtgttgtgcctttaaaaaattgctcttgtgtattgttcaagggaatcgttttttatagtcatttgttaattcattgttcatttattcaaccaaacattcattgagcattttctctgttctagatatgattgatgctagacactggattccccttccccttcaagaacatactatttgttagggaaaa

SEQ ID NO: 1571 - DNA, 2033 bp, Homo sapiens
  misc_feature (143)..(143): n is a, c, g, or t
  misc_feature (223)..(223): n is a, c, g, or t
  misc_feature (393)..(393): n is a, c, g, or t
  misc_feature (456)..(456): n is a, c, g, or t
  misc_feature (1095)..(1095): n is a, c, g, or t
tactcatctcacaccatcagataagatagtgatatgaaaggctgtggaaaactctgaaggaccattacactatattattattatgacagcaattacagggtacttcaaatgtttgtgggaaatagaattaaaggttaaaattnaaatataaactttatttctcaacatacgatttgtcaagttcaagatgataagcaatgataccagccatttagttcatccntaaagaaccgagggtcctgggaattcatgtcaatgcagtcttttttacagtaataatgtaatgttaataacagaagaaaaatgcatgccttttaaagaattgttaagattaggaaacaaaaataagtcagaaggagccaaattaggagtatgaggtggatgcctaacggntttccatcaaaatcctaacaaaattgcctttgtttgatgagaggaatgagcaggagcattatnttggagaaggactctctagtgaagctttattgaacattttcctgctaaagcttttactaactttctcaaaaatactttcataataagcagatgttatcattcattgtccctccagaaagtcaagcaaaatctcttgaacatcccaaaagactgttgccaagacctttgttcttgactgatttgcttttgctttggctggacccttccacctgttggtagccattgctttgattgtgctttgtcttcaggatcataatagtaaggccatgtttcatctgttagaattctttgaagaagtgtacgagtgttttagggtcttgaccctacttgtttaaaatttctattgacagcctttctcttgcctgaaactgatctgggcccaatggtttgggcacccattgagttgaaagtttgctcaactttaatttttcagtcagaattatgtaagcttaaccaattgagatgtctgtggtgttggctcttgtttgtgcggttaatcgtcagtcttcttcaattaggatacaaacaagatattttcctcacaaattgatgtggatggtctgccactgtgggctttatgtttgacatcgtcttgtcccttcttcaaatgagttatccatttgtaaactgcttattttngggggcagggggcattgtccccataaactattcataaagcatcaatgatttcaccattcttccacccaagcttcaccataaacttgaggtttgttcttgcctcaattttaacagaattcatgttgttctgatacgggctcttttcaaactgacgtcttatccttcttagtgctgcaaactgtatcctgttcagatacattataacaagttaatataagtttatgttggtgaaaaaaattgaaatccagcgagacacagtggctcatggctgtaatcccagcactttgggaggccaagacaggtggatcacttgagcccaggaatttgagaccagcctgccaatgtggccaaagcctgtttctactaaaaatacaaaaattagccagatgtggtggtgcgtgcctgtaataccaataatttgggtggctgaggcacaagaatcacttcagcctgggaggcagaagttgcagtgagccaagatggcactccagcctggacaatggagtcaagactctgtctcaaaaagaaaaaaaaaggaaaaattaaaatccatgcatattttttcataatatgcattttccatgaactttttgaagatgccttgtacattttcatagctgctgaaaaaaataggaaaaaaaagtctatacggccaggtgcagtagctcatgtctgtgattccagcactttgggaggccaaggtgggcagataacttgaggccaggagtttgagaccagcctggccaacatggcgaaaccctgtctctactaaaaatacaaaaatgagctgggtgtggtggcgcatgcctgtaatcccagctactcaggaggctgaggcacgagaattgcttgaacctgggaggcagaggctgtagtgagctgagatcgtgccactgcactctagcctgtgtgacacagtgagactctgtctcaaaaaa

SEQ ID NO: 1572 - DNA, 445 bp, Homo sapiens
gattccaattcaactggattggggcggtgcctcagagtctgcatttctaaccaactccagcaagcttgatgctgctgccagtccatggaccaccctgcagacagcaaaggcacaggagatgatgtggaaggttccaggggagaccaacactaagagctgatgaatggggaagagggtggaagacaacagtcaagtgagatggccaacaggagtctttataatgttccagaccagcccgggtaacagtgagacccatctctaaactaaataaattaatttagtatttgttaaagaagagagaggccaggggtggtggctcatgcctgtaatcccagagctttggaaaggcagggcaggaagatcactcgaggccaagagtttgaggctgcagtgagctataatggcaccactgcattatggcctggatgacagagaccctgtctca

SEQ ID NO: 1573 - DNA, 198 bp, Homo sapiens
tttaggaagtgtgtgatatatatcaccatctgtattctcatccacatgttacactattatttctaaatttccaagaataatctgtaaaataactattttgcagtatttaatatctctattttcagtaacatgttattatattgtgttgagataaataacactgattaataaattggaatattatgaatgttttaattt

SEQ ID NO: 1574 - DNA, 277 bp, Homo sapiens
ctcatcaatgttcaattactggaccattctaaccctactcgctcctactcagtgtcaatgaaaagtctcattttcactgcatcatctggatgttcattgtctcaccactaaattgcacctttcttctcacaaactccttcaatttcctagtgttaaccaaaaccaggtttcttcaaaaccatatcaaagccttcttcaacggagaacattcctgctgtcatccgctgcccaacccagcatcctgctctgtgtttttgccatttactaatcatgggaa

SEQ ID NO: 1575 - DNA, 413 bp, Homo sapiens
tacttcacactaagggtggccgactacacaccacagcactctccttggcatgataacatctatgtccaatgttttcctagtcgccagttcttattaaggatatctattctttgatgccactttggtcagagaaaatcctccagagaagaatgtctattttctgttcctgaaaaattgcctataatccatggagaaacttcttgtctcgctggaatagaaaagcacatttggtgaaatgctttataaaagtgaaaggtgatcttcagctagcaaaatactgctttttagtataagaaactcatgaggaaaacattggacatagatgttatcatgccaaggagagtgctgtggtgtgtagtcggcgacccttagtgtgaagtactagtaagcctctacctgcacgacaacacata

SEQ ID NO: 1576 - DNA, 413 bp, Homo sapiens
gacagggcgttaggatgggaggtggcccagggaccccgcctcccccagggccaggtctgggggctcctggctgggatggtgttttattttcttctatttttaacttaaaaaatgacgatataagcactgcatgtggtggctcacacttggaatctcaacacttggggaggccaaggtagacaaattgcttgagcctaggagatcaataccagcctgggcaacattgcaagaccctgtctctacaaaaaatttaaaaattagcctggtgtggtgtcatgctcctgtggtcccagctactagggaggctgaggcatgagaatcgcttgggcccaggaggttgaggctgcagcgagctatgattgcaccgctgcaccccagcctgggtgacagagccagacagactgtgtctctta

SEQ ID NO: 1577 - DNA, 476 bp, Homo sapiens
tttcctgacctctgtatacatacagttctagatggctcatctggaaataacctgatcagctattagaaggactttcatatccagctgagccactgataaaaatgtccagcagcaaaaccaaccctaatatcctctacaaatttacaatcagactgggtcctctgccttccctcttaaaatctacatgggatttagagaaaagagtaggattagtggggcaaatttgaccaagatacctcacctctttgagcccctataattcttcccacctataaagtatgccgtcaatgggttaatccttgggaaattgtccatcacagtgcctggcatgcaataagtgatcaataaatgctaatatttttcagcctaaattaaaatgatggtgctattaggaaagaatgattgtttgggccacacatccactaccctgcctcttgtctggagcatgttggttcataattcagtaggtaatgagg

SEQ ID NO: 1578 - DNA, 579 bp, Homo sapiens
atgcacagcacaggtgagggaagtaggagaagccctgggtcaggccaggaacggtgttactagtcagggttctccacagaaacagaatcgataggatggatggacagacagactagaaagagagatgactcatggttgtgtgggctgcaaggcagggtagcaggctcagagacccagggaagaattgatgtcgcagtcctgggggcagaatcctttctcaggacacctcaggcttttctcttaaggccttcaattggttggatgaaatccacccacattatggaggggtaatatgctttactcaaagtctactgatttaaatgttaaccacgtctaaaataccttcacagcaacatctggaatagcatatgacgaaacaactggacaactatggcctgaaagttattggggattccttggtcagaggatggggtttaaggaatatggaagatatccctgggtccttctgagaattctccttggaagccaaaatggggggttaatgggggtttagggcagtttaaggaacaattggatagcctgggcaacacaggaagaatctgtcttaaaaaaaaaaga

SEQ ID NO: 1579 - DNA, 814 bp, Homo sapiens
atgcacagcacaggtgagggaagtaggagaagccctgggtcaggccaggaacggtgttactagtcagggttctccacagaaacagaatcgataggatggatggacagacagactagaaagagagatgactcatggttgtgtgggctgcaaggcagggtagcaggctcagagacccagggaagaattgatgtcgcagtcctgggggcagaatcctttctcaggacacctcaggcttttctcttaaggccttcaattggttggatgaaatccacccacattatggaggggtaatatgctttactcaaagtctactgatttaaatgttaaccacgtctaaaataccttcacagcaacatctggaatagcatatgacgaaacaactggacaactatggcctgaaagttattggggattccttggtcagaggatggggtttaaggaatatggaagatatccctgggtccttctgagaattctccttggaagccaaaatggggggttaatgggggtttagggcagtttaaggaacaattggatagcctgggctctttaaataagtatttttcgagcaaccttaatgaatggagtggtaggtagaatagaaagctatggcgaaatcccatctctactaaaaatacaaaaattaggtgtggtggcgcacacctgtaatcccagttactcaggaggctgaggcatgagaatcacttgaacccgggaggtagaggttgcaggttgcaggttgcagtgagccaagatttcatcactgcactccagcctgggcaacacaggaagaatctgtcttaaaaaaaaaaga

SEQ ID NO: 1580 - DNA, 362 bp, Homo sapiens
ttttttattttttgtagagacaaggtttccctatgttgtccaggctggtctccaactcctgggctcaagcaagcctcctgccttagcctcccaaagtgataggcatgagccaccgtgctcggcacaccgagttttattcagatgctatgtattaattatgcatatagtaaatttaactgtgctacataatttatagtttgttatcaagtggttcttataatgaaacattactaactttgggtcatctgtgttataggtgcctatgtttatacgcaaaaataaagtaaaatctaactaaaggctctactccagcttatggcaaacattttactgagctggtctttaatcattgttattattac

SEQ ID NO: 1581 - DNA, 1994 bp, Homo sapiens
gttgagctgtaccatggagcatcctcctgtgtcctgccaacccctgccattatagtcaccggagactcctttacctatccctatctgttagggttttcagatgtcctctcgctgggtttatatttgaaggtatagaatctgggaaagggtggggtgcaagctaaccaaatagggatgctagggttgggtggggaattgaggactcttctgtgcttttattgtagggctggggatcgaggatctgggcaaaaaaaatatgacatttccaaccagggacaaaatggaggcttgggcttagtgatgggtaaatggaagactggttgagtgggatgataatgggagaacttactgatgctcttttgggaaaaggtgctttaaagactcgatttgggagcctactggggcaaggcgactggggaggtgtacgtgttagtcaagtggaggtcaggtgggttatcttctgcctccttcactggcttcatgtgaacttgcctgtgacagaatatcttgccctagatgtcctcttccctcttgccatcgtgcaaaagcattcgatcttatgaccgtgagttcttatttgtggatgctaataactggggtaatctcagggagtactggggccatggctctttcccttgcttctctttctgctcactgctttgctttcaggtgcttagctgctcctttttatttctttgcaggactgggaaagcatgggaggaggattttgataagtttcttgttctctgcgtggtgatggggtggtctgagggccaagttaataagcctacctttggttattaccctggaaaattgagggttgatggtagggttatgattgtggcctgtgtatttgcaatttttctttgtcagtgtggctttctgtcatcttcctttttctccagtgagggttctgccactgtctcaatcccttggttcctgcaaaaaacagctaaatgtgctctcagggccagtggtgatgttctgtgttgcagccccagctcttgaaagtgacctggcccagatgagctctgcctgcttgtcatctttaggtcctgctgcccctgctgcctcagccctcaggctcctaactgctcaagccagaaggagctacaaagccaaatcatttgtcatttttctctggcagattgttttaaaatctccctcccctcttttattttaattatgccacctgtgttaatcctatagcctgcttctttgctttgtggattactgatttcaagttctataacttggggaaagttaggttgagtgaatgggaggacagacactgaatgtgtgttttggaaaaatggactctatcttcagattattcagcttctccacctatcacctctacaacttggccttcattggagaagttttagttggcttattcctggaacaagaccacctagaggcttttagccttgtcagcctgccctcttctgaggtttggaccttgttttaaattgtgtgcatggtgggcttgagactctcttgtaatggaggtaatgggactatcactgaggggttcagcctatccaggtaggctaccgttctagtcatacccatcacttaaattctgccacagtctgcacagacggttggtcctccaggcatattgtcctattaagccaaataggtggacatcatgggatggatgaggtcatcatgaaaacagatttactggatttatggacctagtatatactatgtaacagatggaaaactgaattttacaatctataggtacctttgaaaggtcataaagggtaaaagtctatagttttccagaaaataattcttaaaactgggttttatgtctagatttaaatcatgtatctgtctgtagtgcttcaaatgtggccaggtgtggtagctcacacctgtaattcccagcgctttgggaatttgaggcaagaggattgctagaggccaggattttgagaccagcttcggcaatacggtgagaccttgtctctaccaaaaga

SEQ ID NO: 1582 - DNA, 401 bp, Homo sapiens
ccttattaatattctgccaattgtcccaccgatgtcctttttctggtctaggatccaatccaggatcccatgtggcattctattgtcatgtctccttagtcttttaatcctcagtctttttttgtcttttatgactttggtactgttgagaagtacaggctagttattttgtagaatgtccctcaatttggatttgtctaatgcttcctcatgatcaaattcaggttacatattactgtggcaaaagtaccaaaaatacctgtatggtacctatcaacagggcacctgacacaacttgaaggggatctcagaagccgaatctgggcaatttgagcaagaacataaaaattgatagccatggatttcaccaatagaataagaatccatggttcttcctgaga

SEQ ID NO: 1583 - DNA, 597 bp, Homo sapiens
gcggaggagtcagctggcttctccagtgaggcggctgagagtgaagactccaagggcagaacaaacagcaaatgggagacaggcaggggcacgttccacagcacagacgtgggccagcccgctgggggcagtgtggagcaggcagtgccctcatccaggacctcagcattgaaggaagcgagggttctgtgaaccgtggtctcttagaggtcactgccctctgagggaagagctcacagtgagcaagatctgggtgggggctggcgggagggtgagcggaagctggctgaatgcagacacgatggccagagctccagcagccttctggggccatgaggatgaggcacccgccgggtgtggtggagtgggaggtgacaggctctttagggccccgccctccagagtcctttcttatgtgagaagggaatactgtgtgttaaagccactgttattttgggtgccaaccaattttaacctaaaattggttaaatatgcagccaaccaattttcatggaatcactagacaacccagaaccatcaaatgtttgaggaaaaccaatcactaccaaaaaggggcccccaaagtcagcaggtatc

SEQ ID NO: 1584 - DNA, 274 bp, Homo sapiens
tggaagatgaatctctggtttctcccggggatgatgtttgttttttctgtttggctgctatggccaaagtggatgcagtagccgcaggttccaaagggtcttgggcaggaggtcagggttctttggtgattctgtgctgatcctgaactttggggaaaaagtccctaatggcagtcagtactatccaggttgctgagaaaggaaagggaatgcctcaggccctggctggagcagcctctcagatacaaaggagaatagtctcgggtggtccgtg

SEQ ID NO: 1585 - DNA, 577 bp, Homo sapiens
cggactcttgaatattctttattatgatgttcattatgttactaaaaccagtagcatcaacaatgtgtcagaattcacatttattaccagattggtaataggattattaaagctacagagtgtcaggacaaggatttgtattaaagagtttttattaatatgataagctagttaataagttagccagttcaccccccaaccctaacaaatgaccatcgggtcagctcgcacactcagcctgctggcctccagcctaagctgaactgcttctatggcctctataggttagatatggctgaaccacactgggctgacagtcttggttgggaactcacacggaatgaaataaccagcaaaacgttctctgactgctttcttaccaccaaaaataaattggtagagattccagtatatcatcagtattgcagatgtcgagataaaaatcatcaggcccaattaagtggagaggcattggattaagtaattatgtgcataaaaaatacaaatacacatctcatgtttttcctggcacaccgtttacaatagagaaatattttgtaacattcaaaataaagaa

SEQ ID NO: 1586 - DNA, 1029 bp, Homo sapiens
cctatacatatccaaaactagcatcgattggggttgttttgaactaatgggtcttgtcctcaagcagcactattttgttcaaaataaaatagttgagagcatgcccctaagaagagatacatctcaaggactcaagtgcagggtgacgcctccttttggaaatgagcctctcctggtatcaggcctagatggtacttctccagccttccgtttcttgttctataaaacaggggtgatcacagcacctacctccgaaggttatcacgaggactgccatcgtggctgcagagtgccaggaccaccggcctggtatggaggtacacactcagtgaaggccatctgctgtcattgtcattgtcatagttattgccgtcattctgtggcttgtcaattccagaactggggatagaccccaggcctcctgaccaccagtctcatctttctcttatgcgatgacttaaatggtgtttctgttttttgcatgcaaatggtccgttcatctcctttgactagttatcaacttaccttcggatatattaactttatgtagcagttctttctatattgatggtgatgttctcttttccaattttattgctttgctttttgtagcagttttattacgtttttgttgtgaaagcttttaatttttacatatccaagcattcattttttgtccactcagtcataactttcattgcttctgtagctagatatgatgacattttctctagaattttaattacaaacaaaaagctgcaaccccagcccatcagaaggtgagtacaccaggtgggcaggctggatggaaatgggccagagaagcaggctctttcctcatccgagatgcggactccctgtctatctgtgggcaccacttgactatccaacctgaccactgcggcacactggagatgctcccatcatagattagccagaactctgtgactgctcatcattatagacccgccagcagcagtggggcttggcctcacctagatcaatggagtggtccaaacttggtctggg

SEQ ID NO: 1587 - DNA, 363 bp, Homo sapiens
tttttggctaaaagaaactcccacacctatttaaactgatacagaagaaatcttcgatttgggaagtcaggagctgttagatgtatgactactgctatctgtgactcaagattttatcaggaatgggcaaccaaaagcaaaatgatgaaaacgggaagcaaaatttaatcctggtgtattttaactggtcttgtttgtggactttattgtaacttttctataacgctgaatgtagaaatgagtactaataaaacatatatctgtttcagacattggcctccccttttaatattccatttgaataaaaggcctctgctatctaaagcagtaacaatgtcagttgaagactatgacatcgtagta

SEQ ID NO: 1588 - DNA, 529 bp, Homo sapiens
tttttttttggagatatgaggtgttgctatgttgcccaggataaaatgccattttttttttttttgagagtctcctctcactctgtcacccaagctggagtgtagctgcacaatctcggctcattgcaacctctgcctcccgagttcaagtgattcttgtgccttagcctcctgagtagctgggacaacagacacatgccaccatgcccagataattttttgtatttttagtagagacagggtttcgccatgttagccagactggtctcgaactcctggcctcaagtgatccacccatcttaatgccattttaaaaggactcacagaagtggccattgagatattccttaaaagatcacagggttttaacaggaagaaaaatgtggtagggggtgagaagagtgaaaagaatttcaggcataaagaacagttgaagtaatggttcatgggaagacagtgtgagaggtgcagaaacaaggtaagaatttgttgggttggatgatgagggagatgaggttacaggagatac

SEQ ID NO: 1589 - DNA, 337 bp, Homo sapiens
tgaggcggagtctcactctgtcacccagactggaatgcagtggcacgatctcagcttactgcaacctctgcctcctgggttcaagtgattctcctgcttcagcctcccaagtagctgggattacaggcacgcgccaccatacctggctaattttttgtatttttagtagagacggggttttgccatgttggccaggctggtctcaaacccctgagctcaggagatccacccgcctcagcctcccaaagtgctaggattaacagacttgagccaccacgcaggccattacctcccttattcttcattgcaatcctcagaggaagcacatagtagggac

SEQ ID NO: 1590 - DNA, 390 bp, Homo sapiens
tatgtgaagggacacattaagatcaaatctagaggactctcttgaactgggaaccatagccaccagttgtctatgaaaaaaaatgtatcaaacaaattccattcataagtactataagaagaaaacagaggttgggaatcaaaactttcattttatatttgcccctggactaaaatcttgggtcagactgacctcattatgaaaattctctcctcaaagaacttttataagaaaaaaaatccctagccgggcatagtggcgggcacctgtagtcccagctactcgggaggctgaggcagaagaatggcgtgaacccaggagacggagtttgcagtgagccaagatcgtgccactgcactccagcctgggtgacagagcgagacaacatca

SEQ ID NO: 1591 - DNA, 591 bp, Homo sapiens
gtcagctgggattttgatagaactgcattgaatttgtagaccaattttgatatactgccatcttaataatattgtcttctgatccataaaaatagaacatctttttatttatttagttctttgatttctgtaaaaatattgtcggtttttttgtagtataaatttcgtacttcttttattacatttatttctaagtattttatttttccctagctttattgaagcataattgacaaacaagaattatatacattcaagttgtacaacatgatttttaaaatgcatatatattgtgaaatgattaccacaatcaagctaattaacatatctatgacacatagttaatatttttgtgtgtggtgagaatacttaagatctattctcttagtaaatttcaagtataccaatagttgccatcctgttgtaagcccaaatcactttggcttagtgattttggggacctgagattatttttcctttcacactgtacattaggtttccagaacttattcaccctataactgcaagttggtaaacttttaccaacatctccccatttcccctaaccatgactcctagtaacccctaaaa

SEQ ID NO: 1592 - DNA, 559 bp, Homo sapiens
ctccacacctccctgcaagctaaggaagccggctccggccttgggcagcccagaaaggggctcccacagtgcagcggcgggctgaagggctcctcaagcgcggccagagtgggcgccaaggcggaggaggcgctgacatcgagcgggggctgtgagggctgccagcatgctgtcacctctcagtcccactagatcccaagaggcagcagaggcagcttctgaaaaataaaataaattggagacccacagttggtgatctgtatggactgctcggcagacaccatgaccaaccgccttctccaaaggagccggagcagcctgcctgtggacgacaccaccaagaccatcgccaagcgcctagaagcctactaccgagcgtccatccccgtgatcgcctactacgagacaaaaacacagctacacaagataaatgcagagggaacaccagaggacgtttttcttcaactctgcacagctattgactctattattttctgaaggcaaaaatgcatgtttgttagaatggaaacagaaaaacattaaaaagttcattccttaa

SEQ ID NO: 1593 - DNA, 2133 bp, Homo sapiens
tcactaccctgtcacctttggaaagttaacttttagaattctcagtgtctttgtctgtaaaatattgtccctcataaaattgtttggaggtgcctccctcttacagttgttaggaagttcaagtaggccagtgttgccaaggagttcagcaaaatacctgctgttattattatctaatattgtgatttttttaacagggtgatgaccagttaaatgtatttggagaggacactatgggaggtttcatggaagatttgagaaagtgtaaaattattttcataattggtggtcctggctctggcaaaggcacacagtgtgaaaagctggtggaaaaatatggatttacacatctctcaactggcgagctcctgcgtgaggaactggcatcagaatctgaaagaagcaaattgatcagagacattatggaacgtggagacctggtgccctcaggcatcgttttggagctcctgaaggaggccatggtggccagcctcggggacaccaggggcttcctgattgacggctatcctcgggaggtgaagcaaggggaagagttcggacgcaggattggagacccacagttggtgatctgtatggactgctcggcagacaccatgaccaaccgccttctccaaaggagccggagcagcctgcctgtggacgacaccaccaagaccatcgccaagcgcctagaagcctactaccgagcgtccatccccgtgatcgcctactacgagacaaaaacacagctacacaagataaatgcagagggaacaccagaggacgtttttcttcaactctgcacagctattgactctattattttctgaaggcaaaaatgcatgtttgttagaatggaaacagaaaaacattaaaaagttcattccttaacacaatgtttcaagttaaaccttttgtgtcaccgcccccaccaaccaccacctcctaaatcctgacagcactgtttgcttcccagctagacctgtgtgagaggtgtctggaaatcatgcatggtgtatttgggactatatcaacctattctccacacttcagacaactgtctgcactcacggcacgcacactttgtatcatgcaggccacactcagagctagtcagtacatgaacagtggtgcggtgccagtctgtgtccgttgtgatcacaggccttgctagaccctgatcatctggttctcctctcattaagcatccctaacccccagtcacaccttcctcttacatactgttccccaatggaggcccctggcataggggacagccctgggcatcttcctttggtgtctggctgttttgtcaactctcatccactggtggctcagagccataaggtgggttgattacacaatgccttgtacatgatatagaggcatcaagcaagtaaaatttgacagaaattttaaaatatgaagatgtatagctttcccaagatgatggtaaaacccaggttagtcatcagtaaccttctctattattattattttttagaaacttggaatactgtcattatggctaagagaacaaatctgataaattgtgtaacctagtctcttctctacatggtgatgcatttcagcaattataaattaatataaatgaccaaaagtaacttaaaagcatgagatatttgctatttcattcattgggcacatatcaaattataattttgattttaaatggtcacccatgtatttgttgccaagcaagtaaaaaaataccctaacaaacctgatgtgggtgggaggggcatgtcagtaagtggtgtgttcaatgtgtttgtttcatatgggccctttccaggagtttgcaaaccttgtcatacccatatgcaaaactgtgtttccttgcattaaaccagtgaagtttgggttctcttttgtgctatcaatcagttgtaaaatcagagcttcttatatattctactggaataactgcatcttccactcagtcactacaaaaaagcatagtttcagtttgcatgaatttttttttttttcttcaatggttgtgcagataaggatccatttctgggatagaattgtattttttaagtcatttttttttcttgaaatggatatgtacaaataaaataaatggaagacaggataaaaaaattt

SEQ ID NO: 1594 - DNA, 1098 bp, Homo sapiens
gtccgcccacgcgtccggcccaggctctatcttttgaggaccaaatctgtacccccgatttggtggtattcctggcttgtgctaatcagagactcaaagaaagattactgaagcgtgcagaacagcagggccgaccagacgacaatgtaaaagctacccaaaggagactaatgaacttcaagcagaatgctgctccattggttaaatacttccaggaaaaggggctcatcatgacatttgatgccgaccgcgatgaggatgaggtgttctatgacatcagcatggcagttgacaacaagttatttccaaacaaagaggctgcagcaggttcaagtgaccttgatccttcgatgatattggacactggagagatcattgatacaggatctgattatgaagatcagggtgatgaccagttaaatgtatttggagaggacactatgggaggtttcatggaagatttgagaaagtgtaaaattattttcataattggtggtcctggctctggcaaaggcacacagtgtgaaaagctggtggaaaaatatggatttacacatctctcaactggcgagctcctgcgtgaggaactggcatcagaatctgaaagaagcaaattgatcagagacattatggaacgtggagacctggtgccctcaggcatcgttttggagctcctgaaggaggccatggtggccagcctcggggacaccaggggcttcctgattgacggctatcctcgggaggtgaagcaaggggaagagttcggacgcaggattggagacccacagttggtgatctgtatggactgctcggcagacaccatgaccaaccgccttctccaaaggagccggagcagcctgcctgtggacgacaccaccaagaccatcgccaagcgcctagaagcctactaccgagcgtccatccccgtgatcgcctactacgagacaaaaacacagctacacaagataaatgcagagggaacaccagaggacgtttttcttcaactctgcacagctattgactctattattttctgaaggcaaaaatgcatgtttgttagaatggaaacagaaaaacattaaaaagttcattccttaa

SEQ ID NO: 1595 - DNA, 441 bp, Homo sapiens
gaccttgaagggaaccagaaggccaagaaaggaaaaaaccagaggccctgggcctttcccagaacatcagcagggtgaggtttctgactgtgttgtgctcccactcccatctccagattggagacccacagttggtgatctgtatggactgctcggcagacaccatgaccaaccgccttctccaaaggagccggagcagcctgcctgtggacgacaccaccaagaccatcgccaagcgcctagaagcctactaccgagcgtccatccccgtgatcgcctactacgagacaaaaacacagctacacaagataaatgcagagggaacaccagaggacgtttttcttcaactctgcacagctattgactctattattttctgaaggcaaaaatgcatgtttgttagaatggaaacagaaaaacattaaaaagttcattccttaa

SEQ ID NO: 1596 - DNA, 548 bp, Homo sapiens
tcactaccctgtcacctttggaaagttaacttttagaattctcagtgtctttgtctgtaaaatattgtccctcataaaattgtttggaggtgcctccctcttacagttgttaggaagttcaagtaggccagtgttgccaaggagttcagcaaaatacctgctgttattattatctaatattgtgatttttttaacagggtgatgaccagttaaatgtatttggagaggacactatgggaggtttcatggaagatttgagaaagtgtaaaattattttcataattgtctccaaaggagccggagcagcctgcctgtggacgacaccaccaagaccatcgccaagcgcctagaagcctactaccgagcgtccatccccgtgatcgcctactacgagacaaaaacacagctacacaagataaatgcagagggaacaccagaggacgtttttcttcaactctgcacagctattgactctattattttctgaaggcaaaaatgcatgtttgttagaatggaaacagaaaaacattaaaaagttcattccttaa

SEQ ID NO: 1597 - DNA, 1075 bp, Homo sapiens
tgcgttcgccacgctgtcctccctcctccgctccctgcgccccacccctggcggccgcgctgcctggcagcccgggaagccgcggcacagctgctcggcgcctgcagctccggctcgggggctgggaggcggagggggtccctggcctgggcggagaggctgagctgagtgcgcgtgagaaagagggctgcaccgctgctcggcgcggactctgccagccccagcttcagccccggctcaggtcgccgcagcccgggagcctccccgcttgcgccccaaggcacgcgcggcacagccatgaacaccaacgatgccaaggagtatctggcccggagggaaatccctcagctttttgagagccttttgaatggactgatgtgttctaagcccgaagatccagtagaatacttggaaagttgtttacaaaaagtaaaggaactgggtggctgtgacaaggtgaaatgggatacatttgtaagccaggaaaagaagaccttacctccactaaatggaggacagtcacggagatcctttctaagaaatgtaatgcctgaaaactcaaactttccatatcggcggtatgaccggctccctccaatccatcaattctccatagaaagtgacacggatctctctgagactgcagagttgattgaggagtatgaggtttttgatcctaccagacctcgaccaaaaatcattcttgttataggtggtccaggaagtggaaagggtactcagagtttgaaaattgcagaacgatatggattccaatacatttctgtgggagaattattaagaacagaagatccacagtaccagcagcaataggaaatggagtcttattgccaagataattacaactggagaattggccccacaggaaacaacaattacagagataaaacaaaaattgatgcaaatacctgatgaagagggcattgttattgatggatttccaagagatgttgcccaggctctatcttttgaggaccaagtaagaatatctccttatattttaaatgaactactttttgcttaaaattttgggaataaaaacaaaaagacttcttgg

SEQ ID NO: 1598 - DNA, 1306 bp, Homo sapiens
agtttcagtcttccagcagggttctgaaagcagcctgctcccatcgcgcccctcggatgtggacacccagggtgggctgcagaccgcggccgggccgcactctctgggggcgagggccaggtcaggtggctgcactgtcgcccagcagcgagtaaagactcgaaactgagggagccagagccctagtcactctgctggtcgagggtcggaacccctgggggaaagaggaaatgtggacgaaggcagcccttcctggagacagcttggaagagagggatgaagatgcaaaaagcaaaacccaacctatcaagtgccacctccccggtgacaggcccccagccttgctctgcgctttcgctgaatgaactcctgagcacgtttttcccgttgcctaggaagggttgggccgcaggtttcgccagtgctcgacaacccacctggagatagcgggtcggggagggagctgcgaggggggcggactcctgttgctcagtcttcagaccgcagcacagcatcatctgcaccgggacccgggaatggggggacacttggagactgagagagaggaggctcgaggaatgaaccttgagccttttgaatggactgatgtgttctaagcccgaagatccagtagaatacttggaaagttgtttacaaaaagtaaaggaactgggtggctgtgacaaggtgaaatgggatacatttgtaagccaggaaaagaagaccttacctccactaaatggaggacagtcacggagatcctttctaagaaatgtaatgcctgaaaactcaaactttccatatcggcggtatgaccggctccctccaatccatcaattctccatagaaagtgacacggatctctctgagactgcagagttgattgaggagtatgaggtttttgatcctaccagacctcgaccaaaaatcattcttgttataggtggtccaggaagtggaaagggtactcagagtttgaaaattgcagaacgatatggattccaatacatttctgtgggagaattattaagaacagaagatccacagtaccagcagcaataggaaatggagtcttattgccaagataattacaactggagaattggccccacaggaaacaacaattacagagataaaacaaaaattgatgcaaatacctgatgaagagggcattgttattgatggatttccaagagatgttgcccaggctctatcttttgaggaccaagtaagaatatctccttatattttaaatgaactactttttgcttaaaattttgggaataaaaacaaaaagacttcttgg

SEQ ID NO: 1599 - DNA, 1036 bp, Homo sapiens
agtttcagtcttccagcagggttctgaaagcagcctgctcccatcgcgcccctcggatgtggacacccagggtgggctgcagaccgcggccgggccgcactctctgggggcgagggccaggtcaggtggctgcactgtcgcccagcagcgagtaaagactcgaaactgagggagccagagccctagtcactctgctggtcgagggtcggaacccctgggggaaagaggaaatgtggacgaaggcagcccttcctggagacagcttggaagagagggatgaagatgcaaaaagcaaaacccaacctatcaagtgccacctccccggtgacaggcccccagccttgctctgcgctttcgctgaatgaactcctgagcacgtttttcccgttgcctaggaagggttgggccgcaggtttcgccagtgctcgacaacccacctggagatagcgggtcggggagggagctgcgaggggggcggactcctgttgctcagtcttcagaccgcagcacagcatcatctgcaccgggacccgggaatggggggacacttggagactgagagagaggaggctcgaggaatgaaccttggtctgttctaagccacaacccctgtctcaggtcgtttggcttcctttccttctctttgtatttgaatttaaaaacattcctgaatctcaagtgcttttgcttgaagtaggggggaggaggagaaaagaatagaagcaagccaggcttcctaagcgagctctgaaaggagaaatccattcactgcaaacctcgttccccatttctgaaaacggatagactgatatcgtaaactaaaggtcatgagggtttttccccccggtttgggggatttgttctgttaaaaggaattttaaagcaccacttgagaaaataattttgcctcagtttccctaaactatctttaaaatgggttgccataattacaggtcttcttttctctcacctctataagccaccgttttcaggtcatctgaagtcaagatttccaggtaaaccactcactgaactc

SEQ ID NO: 1600 - DNA, 327 bp, Homo sapiens
caactgactagaattagcctacaagaagaagttttctttcaccttagtgagataatttattatggccataagtaactgaaatgtagcatttggggatgaaaagcacagttaccagccaaagactccctgggggatggcggggggaatatgggcctgtgcatcagaaagccccaggcacactttcatcaacttcgataaatgcagagggaacaccagaggacgtttttcttcaactctgcacagctattgactctattattttctgaaggcaaaaatgcatgtttgttagaatggaaacagaaaaacattaaaaagttcattccttaa

SEQ ID NO: 1601 - DNA, 225 bp, Homo sapiens
tcagcgtgtgattactcatgtctcctgactgaccaaggtccacatttgtcaaggtcaagagttgggcagaagctctggtttctctttaagagataaatgcagagggaacaccagaggacgtttttcttcaactctgcacagctattgactctattattttctgaaggcaaaaatgcatgtttgttagaatggaaacagaaaaacattaaaaagttcattccttaa

SEQ ID NO: 1602 - DNA, 2340 bp, Homo sapiens
gtccgcccacgcgtccggcccaggctctatcttttgaggaccaaatctgtacccccgatttggtggtattcctggcttgtgctaatcagagactcaaagaaagattactgaagcgtgcagaacagcagggccgaccagacgacaatgtaaaagctacccaaaggagactaatgaacttcaagcagaatgctgctccattggttaaatacttccaggaaaaggggctcatcatgacatttgatgccgaccgcgatgaggatgaggtgttctatgacatcagcatggcagttgacaacaagttatttccaaacaaagaggctgcagcaggttcaagtgaccttgatccttcgatgatattggacactggagagatcattgatacaggatctgattatgaagatcagggtgatgaccagttaaatgtatttggagaggacactatgggaggtttcatggaagatttgagaaagtgtaaaattattttcataattggtggtcctggctctggcaaaggcacacagtgtgaaaagctggtggaaaaatatggatttacacatctctcaactggcgagctcctgcgtgaggaactggcatcagaatctgaaagaagcaaattgatcagagacattatggaacgtggagacctggtgccctcaggcatcgttttggagctcctgaaggaggccatggtggccagcctcggggacaccaggggcttcctgattgacggctatcctcgggaggtgaagcaaggggaagagttcggacgcaggattggagacccacagttggtgatctgtatggactgctcggcagacaccatgaccaaccgccttctccaaaggagccggagcagcctgcctgtggacgacaccaccaagaccatcgccaagcgcctagaagcctactaccgagcgtccatccccgtgatcgcctactacgagacaaaaacacagctacacaagataaatgcagagggaacaccagaggacgtttttcttcaactctgcacagctattgactctattattttctgaaggcaaaaatgcatgtttgttagaatggaaacagaaaaacattaaaaagttcattccttaacacaatgtttcaagttaaaccttttgtgtcaccgcccccaccaaccaccacctcctaaatcctgacagcactgtttgcttcccagctagacctgtgtgagaggtgtctggaaatcatgcatggtgtatttgggactatatcaacctattctccacacttcagacaactgtctgcactcacggcacgcacactttgtatcatgcaggccacactcagagctagtcagtacatgaacagtggtgcggtgccagtctgtgtccgttgtgatcacaggccttgctagaccctgatcatctggttctcctctcattaagcatccctaacccccagtcacaccttcctcttacatactgttccccaatggaggcccctggcataggggacagccctgggcatcttcctttggtgtctggctgttttgtcaactctcatccactggtggctcagagccataaggtgggttgattacacaatgccttgtacatgatatagaggcatcaagcaagtaaaatttgacagaaattttaaaatatgaagatgtatagctttcccaagatgatggtaaaacccaggttagtcatcagtaaccttctctattattattattttttagaaacttggaatactgtcattatggctaagagaacaaatctgataaattgtgtaacctagtctcttctctacatggtgatgcatttcagcaattataaattaatataaatgaccaaaagtaacttaaaagcatgagatatttgctatttcattcattgggcacatatcaaattataattttgattttaaatggtcacccatgtatttgttgccaagcaagtaaaaaaataccctaacaaacctgatgtgggtgggaggggcatgtcagtaagtggtgtgttcaatgtgtttgtttcatatgggccctttccaggagtttgcaaaccttgtcatacccatatgcaaaactgtgtttccttgcattaaaccagtgaagtttgggttctcttttgtgctatcaatcagttgtaaaatcagagcttcttatatattctactggaataactgcatcttccactcagtcactacaaaaaagcatagtttcagtttgcatgaatttttttttttttcttcaatggttgtgcagataaggatccatttctgggatagaattgtattttttaagtcatttttttttcttgaaatggatatgtacaaataaaataaatggaagacaggataaaaaaattt

SEQ ID NO: 1603 - DNA, 1710 bp, Homo sapiens
tcctgaccactctcgctttgctccagggcatcgttttggagctcctgaaggaggccatggtggccagcctcggggacaccaggggcttcctgattgacggctatcctcgggaggtgaagcaaggggaagagttcggacgcaggattggagacccacagttggtgatctgtatggactgctcggcagacaccatgaccaaccgccttctccaaaggagccggagcagcctgcctgtggacgacaccaccaagaccatcgccaagcgcctagaagcctactaccgagcgtccatccccgtgatcgcctactacgagacaaaaacacagctacacaagataaatgcagagggaacaccagaggacgtttttcttcaactctgcacagctattgactctattattttctgaaggcaaaaatgcatgtttgttagaatggaaacagaaaaacattaaaaagttcattccttaacacaatgtttcaagttaaaccttttgtgtcaccgcccccaccaaccaccacctcctaaatcctgacagcactgtttgcttcccagctagacctgtgtgagaggtgtctggaaatcatgcatggtgtatttgggactatatcaacctattctccacacttcagacaactgtctgcactcacggcacgcacactttgtatcatgcaggccacactcagagctagtcagtacatgaacagtggtgcggtgccagtctgtgtccgttgtgatcacaggccttgctagaccctgatcatctggttctcctctcattaagcatccctaacccccagtcacaccttcctcttacatactgttccccaatggaggcccctggcataggggacagccctgggcatcttcctttggtgtctggctgttttgtcaactctcatccactggtggctcagagccataaggtgggttgattacacaatgccttgtacatgatatagaggcatcaagcaagtaaaatttgacagaaattttaaaatatgaagatgtatagctttcccaagatgatggtaaaacccaggttagtcatcagtaaccttctctattattattattttttagaaacttggaatactgtcattatggctaagagaacaaatctgataaattgtgtaacctagtctcttctctacatggtgatgcatttcagcaattataaattaatataaatgaccaaaagtaacttaaaagcatgagatatttgctatttcattcattgggcacatatcaaattataattttgattttaaatggtcacccatgtatttgttgccaagcaagtaaaaaaataccctaacaaacctgatgtgggtgggaggggcatgtcagtaagtggtgtgttcaatgtgtttgtttcatatgggccctttccaggagtttgcaaaccttgtcatacccatatgcaaaactgtgtttccttgcattaaaccagtgaagtttgggttctcttttgtgctatcaatcagttgtaaaatcagagcttcttatatattctactggaataactgcatcttccactcagtcactacaaaaaagcatagtttcagtttgcatgaatttttttttttttcttcaatggttgtgcagataaggatccatttctgggatagaattgtattttttaagtcatttttttttcttgaaatggatatgtacaaataaaataaatggaagacaggataaaaaaattt

SEQ ID NO: 1604 - DNA, 1744 bp, Homo sapiens
tgcgttcgccacgctgtcctccctcctccgctccctgcgccccacccctggcggccgcgctgcctggcagcccgggaagccgcggcacagctgctcggcgcctgcagctccggctcgggggctggaaccgaagcgggggcggcgggagtgaagcaaggggaagagttcggacgcaggattggagacccacagttggtgatctgtatggactgctcggcagacaccatgaccaaccgccttctccaaaggagccggagcagcctgcctgtggacgacaccaccaagaccatcgccaagcgcctagaagcctactaccgagcgtccatccccgtgatcgcctactacgagacaaaaacacagctacacaagataaatgcagagggaacaccagaggacgtttttcttcaactctgcacagctattgactctattattttctgaaggcaaaaatgcatgtttgttagaatggaaacagaaaaacattaaaaagttcattccttaacacaatgtttcaagttaaaccttttgtgtcaccgcccccaccaaccaccacctcctaaatcctgacagcactgtttgcttcccagctagacctgtgtgagaggtgtctggaaatcatgcatggtgtatttgggactatatcaacctattctccacacttcagacaactgtctgcactcacggcacgcacactttgtatcatgcaggccacactcagagctagtcagtacatgaacagtggtgcggtgccagtctgtgtccgttgtgatcacaggccttgctagaccctgatcatctggttctcctctcattaagcatccctaacccccagtcacaccttcctcttacatactgttccccaatggaggcccctggcataggggacagccctgggcatcttcctttggtgtctggctgttttgtcaactctcatccactggtggctcagagccataaggtgggttgattacacaatgccttgtacatgatatagaggcatcaagcaagtaaaatttgacagaaattttaaaatatgaagatgtatagctttcccaagatgatggtaaaacccaggttagtcatcagtaaccttctctattattattattttttagaaacttggaatactgtcattatggctaagagaacaaatctgataaattgtgtaacctagtctcttctctacatggtgatgcatttcagcaattataaattaatataaatgaccaaaagtaacttaaaagcatgagatatttgctatttcattcattgggcacatatcaaattataattttgattttaaatggtcacccatgtatttgttgccaagcaagtaaaaaaataccctaacaaacctgatgtgggtgggaggggcatgtcagtaagtggtgtgttcaatgtgtttgtttcatatgggccctttccaggagtttgcaaaccttgtcatacccatatgcaaaactgtgtttccttgcattaaaccagtgaagtttgggttctcttttgtgctatcaatcagttgtaaaatcagagcttcttatatattctactggaataactgcatcttccactcagtcactacaaaaaagcatagtttcagtttgcatgaatttttttttttttcttcaatggttgtgcagataaggatccatttctgggatagaattgtattttttaagtcatttttttttcttgaaatggatatgtacaaataaaataaatggaagacaggataaaaaaattt

SEQ ID NO: 1605 - DNA, 1801 bp, Homo sapiens
ctccacacctccctgcaagctaaggaagccggctccggccttgggcagcccagaaaggggctcccacagtgcagcggcgggctgaagggctcctcaagcgcggccagagtgggcgccaaggcggaggaggcgctgacatcgagcgggggctgtgagggctgccagcatgctgtcacctctcagtcccactagatcccaagaggcagcagaggcagcttctgaaaaataaaataaattggagacccacagttggtgatctgtatggactgctcggcagacaccatgaccaaccgccttctccaaaggagccggagcagcctgcctgtggacgacaccaccaagaccatcgccaagcgcctagaagcctactaccgagcgtccatccccgtgatcgcctactacgagacaaaaacacagctacacaagataaatgcagagggaacaccagaggacgtttttcttcaactctgcacagctattgactctattattttctgaaggcaaaaatgcatgtttgttagaatggaaacagaaaaacattaaaaagttcattccttaacacaatgtttcaagttaaaccttttgtgtcaccgcccccaccaaccaccacctcctaaatcctgacagcactgtttgcttcccagctagacctgtgtgagaggtgtctggaaatcatgcatggtgtatttgggactatatcaacctattctccacacttcagacaactgtctgcactcacggcacgcacactttgtatcatgcaggccacactcagagctagtcagtacatgaacagtggtgcggtgccagtctgtgtccgttgtgatcacaggccttgctagaccctgatcatctggttctcctctcattaagcatccctaacccccagtcacaccttcctcttacatactgttccccaatggaggcccctggcataggggacagccctgggcatcttcctttggtgtctggctgttttgtcaactctcatccactggtggctcagagccataaggtgggttgattacacaatgccttgtacatgatatagaggcatcaagcaagtaaaatttgacagaaattttaaaatatgaagatgtatagctttcccaagatgatggtaaaacccaggttagtcatcagtaaccttctctattattattattttttagaaacttggaatactgtcattatggctaagagaacaaatctgataaattgtgtaacctagtctcttctctacatggtgatgcatttcagcaattataaattaatataaatgaccaaaagtaacttaaaagcatgagatatttgctatttcattcattgggcacatatcaaattataattttgattttaaatggtcacccatgtatttgttgccaagcaagtaaaaaaataccctaacaaacctgatgtgggtgggaggggcatgtcagtaagtggtgtgttcaatgtgtttgtttcatatgggccctttccaggagtttgcaaaccttgtcatacccatatgcaaaactgtgtttccttgcattaaaccagtgaagtttgggttctcttttgtgctatcaatcagttgtaaaatcagagcttcttatatattctactggaataactgcatcttccactcagtcactacaaaaaagcatagtttcagtttgcatgaatttttttttttttcttcaatggttgtgcagataaggatccatttctgggatagaattgtattttttaagtcatttttttttcttgaaatggatatgtacaaataaaataaatggaagacaggataaaaaaattt

SEQ ID NO: 1606 - DNA, 1532 bp, Homo sapiens
gtccgcccacgcgtccggcccaggctctatcttttgaggaccaaatctgtacccccgatttggtggtattcctggcttgtgctaatcagagactcaaagaaagattactgaagcgtgcagaacagcagggccgaccagacgacaatgtaaaagctacccaaaggagactaatgaacttcaagcagaatgctgctccattggttaaatacttccaggaaaaggggctcatcatgacatttgatgccgaccgcgatgaggatgaggtgttctatgacatcagcatggcagttgacaacaagttatttccaaacaaagaggctgcagcaggttcaagtgaccttgatccttcgatgatattggacactggagagatcattgatacaggatctgattatgaagatcagggtgatgaccagttaaatgtatttggagaggacactatgggaggtttcatggaagatttgagaaagtgtaaaattattttcataattggtggtcctggctctggcaaaggcacacagtgtgaaaagctggtggaaaaatatggatttacacatctctcaactggcgagctcctgcgtgaggaactggcatcagaatctgaaagaagcaaattgatcagagacattatggaacgtggagacctggtgccctcaggcatcgttttggagctcctgaaggaggccatggtggccagcctcggggacaccaggggcttcctgattgacggctatcctcgggaggtgaagcaaggggaagagttcggacgcaggattggagacccacagttggtgatctgtatggactgctcggcagacaccatgaccaaccgccttctccaaaggagccggagcagcctgcctgtggacgacaccaccaagaccatcgccaagcgcctagaagcctactaccgagcgtccatccccgtgatcgcctactacgagacaaaaacacagctacacaagataaatgcagagggaacaccagaggacgtttttcttcaactctgcacagctattgactctattattttctgaaggcaaaaatgcatgtttgttagaatggaaacagaaaaacattaaaaagttcattccttaacacaatgtttcaagttaaaccttttgtgtcaccgcccccaccaaccaccacctcctaaatcctgacagcactgtttgcttcccagctagacctgtgtgagaggtgtctggaaatcatgcatggtgtatttgggactatatcaacctattctccacacttcagacaactgtctgcactcacggcacgcacactttgtatcatgcaggccacactcagagctagtcagtacatgaacagtggtgcggtgccagtctgtgtccgttgtgatcacaggccttgctagaccctgatcatctggttctcctctcgatgggtgtcgttgatcttagccggaaaacagctggaagatggtcgtaccctgtctgactacaacatccagaaagagtccaccttgcacctggtgctccgtcttagaggtgggatgcaaatcttcg

SEQ ID NO: 1607 - DNA, 1689 bp, Homo sapiens
gtccgcccacgcgtccggcccaggctctatcttttgaggaccaaatctgtacccccgatttggtggtattcctggcttgtgctaatcagagactcaaagaaagattactgaagcgtgcagaacagcagggccgaccagacgacaatgtaaaagctacccaaaggagactaatgaacttcaagcagaatgctgctccattggttaaatacttccaggaaaaggggctcatcatgacatttgatgccgaccgcgatgaggatgaggtgttctatgacatcagcatggcagttgacaacaagttatttccaaacaaagaggctgcagcaggttcaagtgaccttgatccttcgatgatattggacactggagagatcattgatacaggatctgattatgaagatcagggtgatgaccagttaaatgtatttggagaggacactatgggaggtttcatggaagatttgagaaagtgtaaaattattttcataattggtggtcctggctctggcaaaggcacacagtgtgaaaagctggtggaaaaatatggatttacacatctctcaactggcgagctcctgcgtgaggaactggcatcagaatctgaaagaagcaaattgatcagagacattatggaacgtggagacctggtgccctcaggcatcgttttggagctcctgaaggaggccatggtggccagcctcggggacaccaggggcttcctgattgacggctatcctcgggaggtgaagcaaggggaagagttcggacgcaggattggagacccacagttggtgatctgtatggactgctcggcagacaccatgaccaaccgccttctccaaaggagccggagcagcctgcctgtggacgacaccaccaagaccatcgccaagcgcctagaagcctactaccgagcgtccatccccgtgatcgcctactacgagacaaaaacacagctacacaagataaatgcagagggaacaccagaggacgtttttcttcaactctgcacagctattgactctattattttctgaaggcaaaaatgcatgtttgttagaaacttggaatactgtcattatggctaagagaacaaatctgataaattgtgtaacctagtctcttctctacatggtgatgcatttcagcaattataaattaatataaatgaccaaaagtaacttaaaagcatgagatatttgctatttcattcattgggcacatatcaaattataattttgattttaaatggtcacccatgtatttgttgccaagcaagtaaaaaaataccctaacaaacctgatgtgggtgggaggggcatgtcagtaagtggtgtgttcaatgtgtttgtttcatatgggccctttccaggagtttgcaaaccttgtcatacccatatgcaaaactgtgtttccttgcattaaaccagtgaagtttgggttctcttttgtgctatcaatcagttgtaaaatcagagcttcttatatattctactggaataactgcatcttccactcagtcactacaaaaaagcatagtttcagtttgcatgaatttttttttttttcttcaatggttgtgcagataaggatccatttctgggatagaattgtattttttaagtcatttttttttcttgaaatggatatgtacaaataaaataaatggaagacaggataaaaaaattt

SEQ ID NO: 1608 - DNA, 1122 bp, Homo sapiens
tgcgttcgccacgctgtcctccctcctccgctccctgcgccccacccctggcggccgcgctgcctggcagcccgggaagccgcggcacagctgctcggcgcctgcagctccggctcgggggctggaaccgaagcgggggcggcgggagcgcggagaccacagcccccggggagaggcggagggggtccctggcctgggcggagaggctgagctgagtgcgcgtgagaaagagggctgcaccgctgctcggcgcggactctgccagccccagcttcagccccggctcaggtcgccgcagcccgggagcctccccgcttgcgccccaaggcacgcgcggcacagccatgaacaccaacgatgccaaggagtatctggcccggagggaaatccctcagctttttgagagccttttgaatggactgatgtgttctaagcccgaagatccagtagaatacttggaaagttgtttacaaaaagtaaaggaactgggtggctgtgacaaggtgaaatgggatacatttgtaagccaggaaaagaagaccttacctccactaaatggaggacagtcacggagatcctttctaagaaatgtaatgcctgaaaactcaaactttccatatcggcggtatgaccggctccctccaatccatcaattctccatagaaagtgacacggatctctctgagactgcagagttgattgaggagtatgaggtttttgatcctaccagacctcgaccaaaaatcattcttgttataggtggtccaggaagtggaaagggtactcagagtttgaaaattgcagaacgatatggattccaatacatttctgtgggagaattattaagaacagaagatccacagtaccagcagcaataggaaatggagtcttattgccaagataattacaactggagaattggccccacaggaaacaacaattacagagataaaacaaaaattgatgcaaatacctgatgaagagggcattgttattgatggatttccaagagatgttgcccaggctctatcttttgaggaccaagtaagaatatctccttatattttaaatgaactactttttgcttaaaattttgggaataaaaacaaaaagacttcttgg

SEQ ID NO: 1609 - DNA, 1155 bp, Homo sapiens
gtccgcccacgcgtccggcccaggctctatcttttgaggaccaaatctgtacccccgatttggtggtattcctggcttgtgctaatcagagactcaaagaaagattactgaagcgtgcagaacagcagggccgaccagacgacaatgtaaaagctacccaaaggagactaatgaacttcaagcagaatgctgctccattggttaaatacttccaggaaaaggggctcatcatgacatttgatgccgaccgcgatgaggatgaggtgttctatgacatcagcatggcagttgacaacaagttatttccaaacaaagaggctgcagcaggttcaagtgaccttgatccttcgatgatattggacactggagagatcattgatacaggatctgattatgaagatcagggtgatgaccagttaaatgtatttggagaggacactatgggaggtttcatggaagatttgagaaagtgtaaaattattttcataattggtggtcctggctctggcaaaggcacacagtgtgaaaagctggtggaaaaatatggatttacacatctctcaactggcgagctcctgcgtgaggaactggcatcagaatctgaaagaagcaaattgatcagagacattatggaacgtggagacctggtgccctcaggcatcgttttggagctcctgaaggaggccatggtggccagcctcggggacaccaggggcttcctgattgacggctatcctcgggaggtgaagcaaggggaagagttcggacgcaggattggagacccacagttggtgatctgtatggactgctcggcagacaccatgaccaaccgccttctccaaaggagccggagcagcctgcctgtggacgacaccaccaagaccatcgccaagcgcctagaagcctactaccgagcgtccatccccgtgatcgcctactacgagacaaaaacacagctacacaagataaatgcagagggaacaccagaggacgtttttcttcaactctgcacagctattgactctattattttctgaaggcaaaaatgcatgtttgttagaatggaaacagaaaaacattaaaaagttcattccttaagaaaaaaaaaacagaacacagtgtaaagaaaaaaaaacttatgatctcgtttgtgct

SEQ ID NO: 1610 - DNA, 1050 bp, Homo sapiens
tgcgttcgccacgctgtcctccctcctccgctccctgcgccccacccctggcggccgcgctgcctggcagcccgggaagccgcggcacagctgctcggcgcctgcagctccggctcgggggctggaaccgaagcgggggcggcgggagcgcggagaccacagcccccggggagaggcggagggggtccctggcctgggcggagaggctgagctgagtgcgcgtgagaaagagggctgcaccgctgctcggcgcggactctgccagccccagcttcagccccggctcaggtcgccgcagcccgggagcctccccgcttgcgccccaaggcacgcgcggcacagccatgaacaccaacgatgccaaggagtatctggcccggagggaaatccctcagctttttgagagccttttgaatggactgatgtgttctaagcccgaagatccagtagaatacttggaaagttgtttacaaaaagtaaaggaactgggtggctgtgacaaggtgaaatgggatacatttgtaagccaggaaaagaagaccttacctccactaaatggaggacagtcacggagatcctttctaagaaatgaaagtgacacggatctctctgagactgcagagttgattgaggagtatgaggtttttgatcctaccagacctcgaccaaaaatcattcttgttataggtggtccaggaagtggaaagggtactcagagtttgaaaattgcagaacgatatggattccaatacatttctgtgggagaattattaagaacagaagatccacagtaccagcagcaataggaaatggagtcttattgccaagataattacaactggagaattggccccacaggaaacaacaattacagagataaaacaaaaattgatgcaaatacctgatgaagagggcattgttattgatggatttccaagagatgttgcccaggctctatcttttgaggaccaagtaagaatatctccttatattttaaatgaactactttttgcttaaaattttgggaataaaaacaaaaagacttcttgg

SEQ ID NO: 1611 - DNA, 538 bp, Homo sapiens
gtccgcccacgcgtccggcccaggctctatcttttgaggaccaaatctgtacccccgatttggtggtattcctggcttgtgctaatcagagactcaaagaaagattactgaagcgtgcagaacagcagggccgaccagacgacaatgtaaaagctacccaaaggagactaatgaacttcaagcagaatgctgctccattggttaaatacttccaggaaaaggggctcatcatgacatttgatgccgaccgcgatgaggatgaggtgttctatgacatcagcatggcagttgacaacaagttatttccaaacaaagaggctgcagcaggttcaagtgaccttgatccttcgatgatattggacactggagagatcattgatacaggatctgattatgaagatcaggtaattaaaatctgaaaatagttctctatttaaatgtttttaagttgaacctttgtaaatgttttatgaaaatttgaattataaaaactcattttgtgaaatatatacagataactaataacatattacatgat

SEQ ID NO: 1612 - DNA, 507 bp, Homo sapiens
gtccgcccacgcgtccggcccaggctctatcttttgaggaccaaatctgtacccccgatttggtggtattcctggcttgtgctaatcagagactcaaagaaagattactgaagcgtgcagaacagcagggccgaccagacgacaatgtaaaagctacccaaaggagactaatgaacttcaagcagaatgctgctccattggttaaatacttccaggaaaaggggctcatcatgacatttgatgccgaccgcgatgaggatgaggtgttctatgacatcagcatggcagttgacaacaagttatttccaaacaaagaggctgcagcaggttcaagtgaccttgatccttcgatgatattggacactggagagatcattgatacaggatctgattatgaagatcagggtgatgaccagttaaatgtatttggagaggacactatgggaggtttcacgccggtcctcccatttatgctgaaaacccagttgaaagaatcatcaaaagact

SEQ ID NO: 1613 - DNA, 475 bp, Homo sapiens
  misc_feature (453)..(453): n is a, c, g, or t
agaagatcaaggatagaaaaataaatgatggacaaagaaaactgtaaaaatatagggaaatttaaacaaacattgcttttataaaacaagaatggcaatgtctgatttacgcacagtaaacggtacggcaagcgtggtgggaggaactgactgaattaaagcattttttagggcctttaattgtttcagaagagaatggaaattgactaactttaaactcttaagtattcacattcaaagcttgagagtaaactaagaaaataaaagttgaatgtctatctttcgaatgcatagtttagaaaaatggaatgaggccgggcgcggtggctcaagcctgtaatcccagcactttgggctgcaaaacacatttattatctcacagtttctgtgtgtcagagattcagaagcagctggggctagggtgggtcctagcttcagggatctcttgttganggttgcccatcccagtttggtt

SEQ ID NO: 1614 - DNA, 312 bp, Homo sapiens
ctaccctatcaagagggtattgaagcctcaagcatctgggccttctttgaatctcacattttcaggactgtcatgtttacatatacgtaaataaatttttaagcctttttctcctattaatctgtctactgtcagtcatttcagcaaaacatcagagaagacagaaagaagctttccttctgtcccatgacttcatgccaggtaataagcatatgctatctcatttaaccctctcacaggctctttggattgcccctattgtacaattggtacaattgtaggaaaagatgtgaaggtttttgaaatgggaaa

SEQ ID NO: 1615 - DNA, 471 bp, Homo sapiens
acggaatagtctgtacatgacaggttttgggtatcagccccacaggataaaactaaatgttcctccttccacttttctcagtgagaccaacatcatggctcagctcctttgaagatgtttagatttactctgctccaggaccctcgctatgcctctgatcacagttgccatttcataggtgtgtgtctcatgccaggggaacctggaaacacaccagtgactacgtgcaggtgctttgctacctctgtgaacagggcgagggtgtgcagtggtgcaaggcctttcatgaggggcccagccaagggggttagtcgagggcagaaactggccattgactgagttgccaggctctgtgccctgaggtccctgggcagaaaaggccccatttccaatttgcaccaagctgccatgtgggttggcagaggactcgtctttgcttgtgttgtagtgcaaagactatgggttttgtag

SEQ ID NO: 1616 - DNA, 796 bp, Homo sapiens
  misc_feature (10)..(10): n is a, c, g, or t
  misc_feature (12)..(12): n is a, c, g, or t
cattatggcngngggacatgggttggaagatggcgtctcccacagacgggacagatctggaagcatctttgctaagttttgaaaaacttgaccgtgcctcaccagatctttggccagaacaattaccaggtgttgctgaatttgcagcttccttcaaaagtcctattactagttctccacccaaatggatggctgagatagaacgtgatgacatcgacatgttgaaagaactggggagtctcaccacggctaatttgatggagaaggttcgaggcctacagaacctagcctatcagctggggctggatgagtagatggggtctccctgtgttgcccaggctggccacatcctcctaggctcaagcaatcctcccgcctcagcctcccaaagcactgggattataggtgtgagccaccatgccctgcccctgggtctccctctgtcacccaggctggagtgcaatggtgtgatcttggctcactgcaacccctacctcccgggctcaagcaagtcccccacctcagcttcccaagtagctgggactacaggtgtgagccacagcgcccggccagaaatgcttttttaatataactgagattagtgtgtgtgtgtgtgtgtgtgtgtgtgtgtgtgtgtgtagttataacgttgtgctttaaaaaattttattctatcttaagcattttcctgtgtcattaaagagttctaccagctgaagatttggaataggaaagatacacacctttagggaggcattggtgcacaggatagagtaggatggtagagagaggaggc

SEQ ID NO: 1617 - DNA, 2927 bp, Homo sapiens
  misc_feature (10)..(10): n is a, c, g, or t
  misc_feature (12)..(12): n is a, c, g, or t
cattatggcngngggacatgggttggaagatggcgtctcccacagacgggacagatctggaagcatctttgctaagttttgaaaaacttgaccgtgcctcaccagatctttggccagaacaattaccaggtgttgctgaatttgcagcttccttcaaaagtcctattactagttctccacccaaatggatggctgagatagaacgtgatgacatcgacatgttgaaagaactggggagtctcaccacggctaatttgatggagaaggttcgaggcctacagaacctagcctatcagctggggctggatgagtccagagagatgacacgggggaaattcctcaatattctagagaagcccaagaagtagcagctgcttgcggacaggatgtcctggggtccgaaaccaagctcccttcccggtgcacctctaacaatgcacacctcactgcttgcttgggagaggccagagggtgtacctccaggactgccctctcccctgctcctggcactctacacgtctgaggacattcagcagcaagagaagaatctgctctacccaaggatcattgcagttactcaatcaactttcagacttgaaccttcttagcctcggatattggtaacagctgagggcatatcattcttaaaggtcgaagtcctgctttctcatttctggaagtgattcaggagccccaggatcttacggttgatttgactcagtcatggcagtcagttgtgacatgttgattggatgggttcttttgaattgttcttgatctcttagaaagtgtttacgatgtgaggagaccagagaccaagtagattctggaccagaccatgcagcctgacctgtgaactctccagtatatactaagttcccagaatccccagctgaagaaaccagaatcttctcgaaatgtatatctgttttttaaaacttctatacctcttatgatagtcccatttgcttttcattccttacttcccagccccaccttctagttctgacttcgggcagagggatccctgagtccctcctggaattagcttgtatagtgaaaggcccatccaaggttgtctaaagaccaatgtgaaggtgacagaaaggacttttgagttctaattaatctgttacagcttcaagcaagaaagtcagtatagcctgaaagacaagagaaacgggatggtttataggagttcccatttggttgaaagctagaagccctaattgaccttaaagtaacatgctatgggatggtgggattgtcccctctgacagcacatatgaaatagttcatctatataatagaaacgcacacacacgaaagagaatcttctgacttaaatacaactttcatggagttcttcaccacttatctgtctctgttaaaatctgaaaatctagcccatggctaaaatctattatatgtgttctccatatttcttgtataagccagtccccagcatctgatgttttgagaagtgcatggagtttcctaaactttgcacagaagaatatcctggggccgggcatggtggctcacgcctgtaatcccagcactttgggaggccgaggcaggtggatcataggtcaaaagatcgagaccatcctggccaatatggtgaaaccctgtctctactaaaatacaaaaattagctgggcatgatggtgcatgcctatagtcccagctacttgggggcctgaggcacgagaatcgcttgaattcgggaggtggaggttgcagtgagccgaaattatgcccctgcactccagcctgggcaacagagtgagactctgtctcagaaaaaaaaaaaaaaaaaagaatatccctgtggcaatagtctgatggtgtttggacacaagaaaagttatggttttgagtcgtgagtgtttgctagggcatggcactcttcagtttaacagctgatccattaaaccttttctgacatttgtgccttgttctcatgctagaattaatgctggatttttctctcatttgaccatcaatgtagttttacttattgaaaggaaaaaagacttaacacaagataggaaagatgagtatgagaagtaaaacattctgctggggtgctacatagaaggttaggttgtaggggctttgattttaatttaaacttattatcgattgatatttctgtatctcactaaatgcggttgaagagtgtgtgtgtgtgtgtgtgcgcgcgcgcgcatgtggccaaaaaatagtgccataatgtcaaattcttcctttgctctgtttttgagagttgatgacatcaggcacttttcagtgtttggggaaattgattgggatacctcccccaaaccaactcaagtctgtaactggaagccaggtggttggttttctggtccgctttgtcctctttcttttaccgtcatcctattcaccagcacttaatgtaagtagatgttttagaattgcaatatttattggtttagtatttgtcatccttagaaatgttaatgatgtatttttatattgataatataaatttatgtacagtatgtgtgtatatgtatttcaggatgttatagtattgtactttgtatgtgatggtttttgtgtcttcataataaatatgtcccttttaaaaaaaaacacaaccgcccgccaccacacccccccccccccaacacaacccttaagcaacggacaccccaagccaaaactggaagaaggcaaacagcccgcagcaccgcacgccccgcgcgcacaaaagcgaataataccctagagagaggcggccgtacaccaagcgcaggcacaacccgcaccccctctggaagacagccccaccaggacataagagcagaggggcccacacgagagcaacaacgatacagcgcaccaccggtgtgagacagccacccaatcgcgacgaacaagggtagcaacaccgg

SEQ ID NO: 1618 - DNA, 2617 bp, Homo sapiens
  misc_feature (10)..(10): n is a, c, g, or t
  misc_feature (12)..(12): n is a, c, g, or t
cattatggcngngggacatgggttggaagatggcgtctcccacagacgggacagatctggaagcatctttgctaagttttgaaaaacttgaccgtgcctcaccagatctttggccagaacaattaccaggtgttgctgaatttgcagcttccttcaaaagtcctattactagttctccacccaaatggatggctgagatagaacgtgatgacatcgacatgttgaaagaactggggagtctcaccacggctaatttgatggagaaggttcgaggcctacagaacctagcctatcagctggggctggatgagtccagagagatgacacgggggaaattcctcaatattctagagaagcccaagaagtagcagctgcttgcggacaggatgtcctggggtccgaaaccaagctcccttcccggtgcacctctaacaatgcacacctcactgcttgcttgggagaggccagagggtgtacctccaggactgccctctcccctgctcctggcactctacacgtctgaggacattcagcagcaagagaagaatctgctctacccaaggatcattgcagttactcaatcaactttcagacttgaaccttcttagcctcggatattggtaacagctgagggcatatcattcttaaaggtcgaagtcctgctttctcatttctggaagtgattcaggagccccaggatcttacggttgatttgactcagtcatggcagtcagttgtgacatgttgattggatgggttcttttgaattgttcttgatctcttagaaagtgtttacgatgtgaggagaccagagaccaagtagattctggaccagaccatgcagcctgacctgtgaactctccagtatatactaagttcccagaatccccagctgaagaaaccagaatcttctcgaaatgtatatctgttttttaaaacttctatacctcttatgatagtcccatttgcttttcattccttacttcccagccccaccttctagttctgacttcgggcagagggatccctgagtccctcctggaattagcttgtatagtgaaaggcccatccaaggttgtctaaagaccaatgtgaaggtgacagaaaggacttttgagttctaattaatctgttacagcttcaagcaagaaagtcagtatagcctgaaagacaagagaaacgggatggtttataggagttcccatttggttgaaagctagaagccctaattgaccttaaagtaacatgctatgggatggtgggattgtcccctctgacagcacatatgaaatagttcatctatataatagaaacgcacacacacgaaagagaatcttctgacttaaatacaactttcatggagttcttcaccacttatctgtctctgttaaaatctgaaaatctagcccatggctaaaatctattatatgtgttctccatatttcttgtataagccagtccccagcatctgatgttttgagaagtgcatggagtttcctaaactttgcacagaagaatatcctggggccgggcatggtggctcacgcctgtaatcccagcactttgggaggccgaggcaggtggatcataggtcaaaagatcgagaccatcctggccaatatggtgaaaccctgtctctactaaaatacaaaaattagctgggcatgatggtgcatgcctatagtcccagctacttgggggcctgaggcacgagaatcgcttgaattcgggaggtggaggttgcagtgagccgaaattatgcccctgcactccagcctgggcaacagagtgagactctgtctcagaaaaaaaaaaaaaaaaaagaatatccctgtggcaatagtctgatggtgtttggacacaagaaaagttatggttttgagtcgtgagtgtttgctagggcatggcactcttcagtttaacagctgatccattaaaccttttctgacatttgtgccttgttctcatgctagaattaatgctggatttttctctcatttgaccatcaatgtagttttacttattgaaaggaaaaaagacttaacacaagataggaaagatgagtatgagaagtaaaacattctgctggggtgctacatagaaggttaggttgtaggggctttgattttaatttaaacttattatcgattgatatttctgtatctcactaaatgcggttgaagagtgtgtgtgtgtgtgtgtgcgcgcgcgcgcatgtggccaaaaaatagtgccataatgtcaaattcttcctttgctctgtttttgagagttgatgacatcaggcacttttcagtgtttggggaaattgattgggatacctcccccaaaccaactcaagtctgtaactggaagccaggtggttggttttctggtccgctttgtcctctttcttttaccgtcatcctattcaccagcacttaatgtaagtagatgttttagaattgcaatatttattggtttagtatttgtcatccttagaaatgttaatgatgtatttttatattgataatataaatttatgtacagtatgtgtgtatatgtatttcaggatgttatagtattgtactttgtatgtgatggtttttgtgtcttcataataaatatgtccctttta

SEQ ID NO: 1619 - DNA, 2647 bp, Homo sapiens
  misc_feature (10)..(10): n is a, c, g, or t
  misc_feature (12)..(12): n is a, c, g, or t
cattatggcngngggacatgggttggaagatggcgtctcccacagacgggacagatctggaagcatctttgctaagttttgaaaaacttgaccgtgcctcaccagatctttggccagaacaattaccaggtgttgctgaatttgcagcttccttcaaaagtcctattactagttctccacccaaatggatggctgagatagaacgtgatgacatcgacatgttgaaagaactggggagtctcaccacggctaatttgatggagaaggttcgaggcctacagaacctagcctatcagctggggctggatgagtccagagagatgacacgggggaaattcctcaatattctagagaagcccaagaagtagcagctgcttgcggacaggatgtcctggggtccgaaaccaagctcccttcccggtgcacctctaacaatgcacacctcactgcttgcttgggagaggccagagggtgtacctccaggactgccctctcccctgctcctggcactctacacgtctgaggacattcagcagcaagagaagaatctgctctacccaaggatcattgcagttactcaatcaactttcagacttgaaccttcttagcctcggatattggtaacagctgagggcatatcattcttaaaggtcgaagtcctgctttctcatttctggaagtgattcaggagccccaggatcttacggttgatttgactcagtcatggcagtcagttgtgacatgttgattggatgggttcttttgaattgttcttgatctcttagaaagtgtttacgatgtgaggagaccagagaccaagtagattctggaccagaccatgcagcctgacctgtgaactctccagtatatactaagttcccagaatccccagctgaagaaaccagaatcttctcgaaatgtatatctgttttttaaaacttctatacctcttatgatagtcccatttgcttttcattccttacttcccagccccaccttctagttctgacttcgggcagagggatccctgagtccctcctggaattagcttgtatagtgaaaggcccatccaaggttgtctaaagaccaatgtgaaggtgacagaaaggacttttgagttctaattaatctgttacagcttcaagcaagaaagtcagtatagcctgaaagacaagagaaacgggatggtttataggagttcccatttggttgaaagctagaagccctaattgaccttaaagtaacatgctatgggatggtgggattgtcccctctgacacactttgggaggccgaggcaggtggatcataggtcaaaagatcgagaccatcctggccaatatggtgaaaccctgtctctactaaaatacaaaaattagctgggcatgatggtgcatgcctatagtcccagctacttgggggcctgaggcacgagaatcgcttgaattcgggaggtggaggttgcagtgagccgaaattatgcccctgcactccagcctgggcaacagagtgagactctgtctcagaaaaaaaaaaaaaaaaaagaatatccctgtggcaatagtctgatggtgtttggacacaagaaaagttatggttttgagtcgtgagtgtttgctagggcatggcactcttcagtttaacagctgatccattaaaccttttctgacatttgtgccttgttctcatgctagaattaatgctggatttttctctcatttgaccatcaatgtagttttacttattgaaaggaaaaaagacttaacacaagataggaaagatgagtatgagaagtaaaacattctgctggggtgctacatagaaggttaggttgtaggggctttgattttaatttaaacttattatcgattgatatttctgtatctcactaaatgcggttgaagagtgtgtgtgtgtgtgtgtgcgcgcgcgcgcatgtggccaaaaaatagtgccataatgtcaaattcttcctttgctctgtttttgagagttgatgacatcaggcacttttcagtgtttggggaaattgattgggatacctcccccaaaccaactcaagtctgtaactggaagccaggtggttggttttctggtccgctttgtcctctttcttttaccgtcatcctattcaccagcacttaatgtaagtagatgttttagaattgcaatatttattggtttagtatttgtcatccttagaaatgttaatgatgtatttttatattgataatataaatttatgtacagtatgtgtgtatatgtatttcaggatgttatagtattgtactttgtatgtgatggtttttgtgtcttcataataaatatgtcccttttaaaaaaaaacacaaccgcccgccaccacacccccccccccccaacacaacccttaagcaacggacaccccaagccaaaactggaagaaggcaaacagcccgcagcaccgcacgccccgcgcgcacaaaagcgaataataccctagagagaggcggccgtacaccaagcgcaggcacaacccgcaccccctctggaagacagccccaccaggacataagagcagaggggcccacacgagagcaacaacgatacagcgcaccaccggtgtgagacagccacccaatcgcgacgaacaagggtagcaacaccgg

SEQ ID NO: 1620 - DNA, 2860 bp, Homo sapiens
  misc_feature (10)..(10): n is a, c, g, or t
  misc_feature (12)..(12): n is a, c, g, or t
cattatggcngngggacatgggttggaagatggcgtctcccacagacgggacagatctggaagcatctttgctaagttttgaaaaacttgaccgtgcctcaccagatctttggccagaacaattaccaggtgttgctgaatttgcagcttccttcaaaagtaactggggagtctcaccacggctaatttgatggagaaggttcgaggcctacagaacctagcctatcagctggggctggatgagtccagagagatgacacgggggaaattcctcaatattctagagaagcccaagaagtagcagctgcttgcggacaggatgtcctggggtccgaaaccaagctcccttcccggtgcacctctaacaatgcacacctcactgcttgcttgggagaggccagagggtgtacctccaggactgccctctcccctgctcctggcactctacacgtctgaggacattcagcagcaagagaagaatctgctctacccaaggatcattgcagttactcaatcaactttcagacttgaaccttcttagcctcggatattggtaacagctgagggcatatcattcttaaaggtcgaagtcctgctttctcatttctggaagtgattcaggagccccaggatcttacggttgatttgactcagtcatggcagtcagttgtgacatgttgattggatgggttcttttgaattgttcttgatctcttagaaagtgtttacgatgtgaggagaccagagaccaagtagattctggaccagaccatgcagcctgacctgtgaactctccagtatatactaagttcccagaatccccagctgaagaaaccagaatcttctcgaaatgtatatctgttttttaaaacttctatacctcttatgatagtcccatttgcttttcattccttacttcccagccccaccttctagttctgacttcgggcagagggatccctgagtccctcctggaattagcttgtatagtgaaaggcccatccaaggttgtctaaagaccaatgtgaaggtgacagaaaggacttttgagttctaattaatctgttacagcttcaagcaagaaagtcagtatagcctgaaagacaagagaaacgggatggtttataggagttcccatttggttgaaagctagaagccctaattgaccttaaagtaacatgctatgggatggtgggattgtcccctctgacagcacatatgaaatagttcatctatataatagaaacgcacacacacgaaagagaatcttctgacttaaatacaactttcatggagttcttcaccacttatctgtctctgttaaaatctgaaaatctagcccatggctaaaatctattatatgtgttctccatatttcttgtataagccagtccccagcatctgatgttttgagaagtgcatggagtttcctaaactttgcacagaagaatatcctggggccgggcatggtggctcacgcctgtaatcccagcactttgggaggccgaggcaggtggatcataggtcaaaagatcgagaccatcctggccaatatggtgaaaccctgtctctactaaaatacaaaaattagctgggcatgatggtgcatgcctatagtcccagctacttgggggcctgaggcacgagaatcgcttgaattcgggaggtggaggttgcagtgagccgaaattatgcccctgcactccagcctgggcaacagagtgagactctgtctcagaaaaaaaaaaaaaaaaaagaatatccctgtggcaatagtctgatggtgtttggacacaagaaaagttatggttttgagtcgtgagtgtttgctagggcatggcactcttcagtttaacagctgatccattaaaccttttctgacatttgtgccttgttctcatgctagaattaatgctggatttttctctcatttgaccatcaatgtagttttacttattgaaaggaaaaaagacttaacacaagataggaaagatgagtatgagaagtaaaacattctgctggggtgctacatagaaggttaggttgtaggggctttgattttaatttaaacttattatcgattgatatttctgtatctcactaaatgcggttgaagagtgtgtgtgtgtgtgtgtgcgcgcgcgcgcatgtggccaaaaaatagtgccataatgtcaaattcttcctttgctctgtttttgagagttgatgacatcaggcacttttcagtgtttggggaaattgattgggatacctcccccaaaccaactcaagtctgtaactggaagccaggtggttggttttctggtccgctttgtcctctttcttttaccgtcatcctattcaccagcacttaatgtaagtagatgttttagaattgcaatatttattggtttagtatttgtcatccttagaaatgttaatgatgtatttttatattgataatataaatttatgtacagtatgtgtgtatatgtatttcaggatgttatagtattgtactttgtatgtgatggtttttgtgtcttcataataaatatgtcccttttaaaaaaaaacacaaccgcccgccaccacacccccccccccccaacacaacccttaagcaacggacaccccaagccaaaactggaagaaggcaaacagcccgcagcaccgcacgccccgcgcgcacaaaagcgaataataccctagagagaggcggccgtacaccaagcgcaggcacaacccgcaccccctctggaagacagccccaccaggacataagagcagaggggcccacacgagagcaacaacgatacagcgcaccaccggtgtgagacagccacccaatcgcgacgaacaagggtagcaacaccgg

SEQ ID NO: 1621 - DNA, 1455 bp, Homo sapiens
  misc_feature (10)..(10): n is a, c, g, or t
  misc_feature (12)..(12): n is a, c, g, or t
cattatggcngngggacatgggttggaagatggcgtctcccacagacgggacagatctggaagcatctttgctaagttttgaaaaacttgaccgtgcctcaccagatctttggccagaacaattaccaggtgttgctgaatttgcagcttccttcaaaagtcctattactagttctccacccaaatggatggctgagatagaacgtgatgacatcgacatgttgaaagaactggggagtctcaccacggctaatttgatggagaaggttcgaggcctacagaacctagcctatcagctggggctggatgagtccagagagatgacacgggggaaattcctcaatattctagagaagcccaagaagtagcagctgcttgcggacaggatgtcctggggtccgaaaccaagctcccttcccggtgcacctctaacaatgcacacctcactgcttgcttgggagaggccagagggtgtacctccaggactgccctctcccctgctcctggcactctacacgtctgaggacattcagcagcaagagaagaatctgctctacccaaggatcattgcagttactcaatcaactttcagacttgaaccttcttagcctcggatattggtaacagctgagggcatatcattcttaaaggtcgaagtcctgctttctcatttctggaagtgattcaggagccccaggatcttacggttgatttgactcagtcatggcagtcagttgtgacatgttgattggatgggttcttttgaattgttcttgatctcttagaaagtgtttacgatgtgaggagaccagagaccaagtagattctggaccagaccatgcagcctgacctgtgaactctccagtatatactaagttcccagaatccccagctgaagaaaccagaatcttctcgaaatgtatatctgttttttaaaacttctatacctcttatgatagtcccatttgcttttcattccttacttcccagccccaccttctagttctgacttcgggcagagggatccctgagtccctcctggaattagcttgtatagtgaaaggcccatccaaggttgtctaaagaccaatgtgaaggtgacagaaaggacttttgagttctaattaatctgttacagcttcaagcaagaaagtcagtatagcctgaaagacaagagaaacgggatggtttataggagttcccatttggttgaaagctagaagccctaattgaccttaaagtaacatgctatgggatggtgggattgtcccctctgacagcacatatgaaatagttcatctatataatagaaacgcacacacacgaaagagaatcttctgacttaaatacaactttcatggagttcttcaccacttatctgtctctgttaaaatctgcagtcccagcatctgtgttttgagagtgcatgaagtttctaactttgacagaagatat

SEQ ID NO: 1622 - DNA, 677 bp, Homo sapiens
  misc_feature (10)..(10): n is a, c, g, or t
  misc_feature (12)..(12): n is a, c, g, or t
cattatggcngngggacatgggttggaagatggcgtctcccacagacgggacagatctggaagcatctttgctaagttttgaaaaacttgaccgtgcctcaccagatctttggccagaacaattaccaggtgttgctgaatttgcagcttccttcaaaagtcctattactagttctccacccaaatggatggctgagatagaacgtgatgacatcgacatgttgaaagaactggggagtctcaccacggctaatttgatggagaaggttcgaggcctacagaacctagcctatcagctggggctggatgagtggtctccctctgtcacccaggctggagtgcaatggtgtgatcttggctcactgcaacccctacctcccgggctcaagcaagtcccccacctcagcttcccaagtagctgggactacaggtgtgagccacagcgcccggccagaaatgcttttttaatataactgagattagtgtgtgtgtgtgtgtgtgtgtgtgtgtgtgtgtgtgtagttataacgttgtgctttaaaaaattttattctatcttaagcattttcctgtgtcattaaagagttctaccagctgaagatttggaataggaaagatacacacctttagggaggcattggtgcacaggatagagtaggatggtagagagaggaggc

SEQ ID NO: 1623 - DNA, 430 bp, Homo sapiens
tatttttagtggagacgaggtttcatcatgttggccaggctggtctcaaactcttgacctcaactgatccacccaccttagcctcccagagttctgggactacaggtgtgagctacagtgcccggcttccattgcctttttattttttggttttgaacatatttgtgaaacctagaagtgaattgttgaccagcaaaagtttactctgttgacttttaataaccttaccctgctcatcctgatgatagggtattgacataatcagaaggcacagaggtgagctgcaaggttatgtataatctgcaaagtagataatctctctgtggatgattgtaatctggcatcttatttagccttagatgtgatatataagcaggttctgtaagtcttaaaattatttgtttcattgactagaaaaaggattactaga

SEQ ID NO: 1624 - DNA, 595 bp, Homo sapiens
actgatggaaaggcccttgtcttcctgaagctcaaagacattccaacgtcctttcatctcccaaaatattttcactctaccaaggaacaaactgcattagagtatccatctgcctttttatgattatcaaccaccaatatttgttgtctagtagtctgaggcatattagtgtagcaggaaaaataatgctggagtgaaaagggaagaacagcataggtctattagccaacctgagaaaatgccttaccatacctttcacaaatcctaaatgaccctgtaaatgtaactattgggctttttgtttctagaatcctagaaagatcatggtctttggagtcagatagacctggattcaaattctacctctgctgcttaaaactctagaactagttccttagccccagcctcagttctgtagaaacctgttttttggctcatacctaacagaattgttgtaaaaattaaagtaacaatgcacatcaaggccaggtatggtggctcaagcctgtaatcccaacactttgggaggccaaggtgggcagatttgcttaagctcgggagtatgagaccagcctgggaaacatggcgaaacctc

SEQ ID NO: 1625 - DNA, 313 bp, Homo sapiens
ttcttattgcctgtttgcttaaaatttggctttattctttaaagagtttttagctctaccatattgatttcttcattcaagcagttactaggtatgtagcagaagaatgatgatgatgacaatagtgatggagaaggaggaggaggaggagaaagacaatttgcttcatgaagacaggaacattttatgtatcgcaggtgcctaacacaagacctgggacatagttaattactctaattaatatttactaaatgggctgggagtggtggctcatgcctgtaatcacaggactttgggaggttgaggtgggagg

SEQ ID NO: 1626 - DNA, 601 bp, Homo sapiens
gaaagaaaacttaaagggtaactgatggggttatccttagcaaaattctatccctatgagatgaccctaagtggagccatctctatgaggattaatccagagattgttgcacacctggcagtgtcaggtctgggaaaacagttgctgatgttttcatggagtgtgaaatactgaaagctgcgggcatcccttggggaccactgacccacactttgaagaaccctcaatgagtctgaaagaggttcagtatctcttgggaaggatgtgttccaggctccaggcctagtcttacatggccagtggggttgaaagactgtgcccctgcaatggtcttttcctaagacagttgaacaaagttccaagtctgtctgtcctattttaaccatctttaagaagcacaaaggggatatgagaaaaacagatgctgaaatgaaaattttaactgatatcttacttatctcacaagtcgtgtaaagaaagaaatgatatggtcgaatattagattagatggtttaatgatgttttgagtgttatatatgagctatgatgagacctagaaaataaagtaaaaataaaaaatatataagccatgaaaaaaaaa

SEQ ID NO: 1627 - DNA, 328 bp, Homo sapiens
tatccagagtaagttccccaggtaggagaaacctaacatctatttaagcatttgtgcccattagaataacccttggactattctgtgcttcctggaaacctggatggggctccatggatgtgattcttcccattgctagggaaggatgatcacaccatggagacagagccaatgagagccctgggcaggggcatgtttatcagcattcaaaccctgctcccaccctggcagccctatcccacatccccaccttattgctcaccagtttttactactaacttgtattatccccagagcctacaggagggcctgccacagagtaggtgct

SEQ ID NO: 1628 - DNA, 209 bp, Homo sapiens
acgcccagccctaattacttctattacgccaaattccttgtgtggaattcctgtgctttgcacacaaattgccaggttggccccaaaggggaaaaaagtggatcccattttcccatcttctatgcctacgtggctgacaaatctcccgaatcccacaggagctgtcgctgatctttgtcctctattcgctgaaataaagttcaccatgg

SEQ ID NO: 1629 - DNA, 538 bp, Homo sapiens
aagaatttattgccctggtggcttcctttttttctttgtttaatttgcttgtgctgatgggtgagggagagttaaagaaatttaatggcctcctaactctctttccccgtgaaacccatttatctaagagatgccattggccttttaaaaatatccaactgattttatgcttttcctttcttttcatcttctgatctcggcactaaagggcggtggcatggctgagaggttggcatcagagcaggaaaacaaagttcaaggggaaaccaaaaattgggtaattttctctgaatgaccaagtgcttacttttttcaggcatgtgacattgctgttatcaagaaaccagttatgacatgaaaatcctgaaaatggaaaaggaaaaaagaaaaaaaaagggaatggggtgggggatggaaatagcaccagggttgactgacctttaccgaggagggaaggcgtactgttttcagcctggtgtcccccgtgtcccgattgcagccccctgtacttctctcttcatgcaccctcctgcatccc

SEQ ID NO: 1630 - DNA, 195 bp, Homo sapiens
tttaccataatgagtccacagcctcgggggacgattgttcctgtttctgtagaattgatttgaaacttgaataatgtcccactgggaggcaaggtgatcataaatgaagaaacaatagaagtctggggtcactagatcagaagatactattttaaatatctcaaagggcaaaaaatggctatagtagatgtctgg

SEQ ID NO: 1631 - DNA, 219 bp, Homo sapiens
gctggccggtggatagtactttgaacatcattagcattttctccaacagtatgatagatgttgtagaactaaatggcagtttatttaatgcttaaagaactatagtgcatttcagaatatgtagggattatgtgttcacagctaacataatatttattgtttctgagaaagtgaagattaagtcaaaggaggccgggcgatagagtgagactccttcac

SEQ ID NO: 1632 - DNA, 209 bp, Homo sapiens
gctgtattcatcctacccatctaagtaatcttttgataatcagatatttaaatgtaaaaattaaaaaattctaaaatgagtaagagaagatatgaatgaatatatcagtatggtgggagttgctctgaaccatttgtggttcaggatgctgcctgatttgccagaagaaaaaaagtaaaaatattagcatggtgataagttatgaagcc

SEQ ID NO: 1633 - DNA, 324 bp, Homo sapiens
tgcttatccaagtgctaatgagcagaaacactccaaagctgccctcaagtccagccctcaattcaaactgctcactggggagggctcagatgttatctactcagggagctaccaaattcttactatctaccagagggcctggtacatgggagctgttaataaatatttatagaatgctaagtgaataatcctaaggggtacacagtattataaatcccaactgacaaatgaggaaaattaggctctgagattttgcccaaaagcttgatccagaagctggactttatgtttcactttcttttcattatgtctcactaccttctc

SEQ ID NO: 1634 - DNA, 259 bp, Homo sapiens
gagatgcttagggcgaagtatggggatatgggtgcagtgctccatgcccttcccagatgcatcaccctccaaaagctttcacgtgttcagctacccagaagctctctggacccagtcctcttggcttttcatggaagcttcatgatcttagtattccttcccccaggaaactggggaggctgtcgctggggagggtcttaagaaccacaatcaggccgggcgcggtggctcatgtctgtaatcccagcactttgggagg

SEQ ID NO: 1635 - DNA, 1107 bp, Homo sapiens
tgagacgagcctggttaacatagtaagacctcatctatactaagaaaacttaaaaaattagcatggcatggtggtgtgcacctgtggtcccagctgcttgggaggctgaagtggggagtgtcacttgagcctggcaggttgaggatgcagtgagctatgattttgccactgcactccaacctgggcaacagagcaaggcgtgcctgaaaaaaaaaaataatgcacacaaacatccatataacatcaaccctagccaaaaaataagagagtaccaccagaagcacgactaaccaactgtaaatagagaaactgtaaagagggtcaacaaaatttataagttgttatttgaaaacactagtaaaatcgttaagcttcttatgagatcatcaagggaaggtgagaacgtgaataattggttccaggaaggagaaaaggaatattgatatggatcatatagatattaggagattataagataagctggtcttgaactcctgacctcaaatgatccactcaccttggcctcccaaagtgatgggattataggcgtaagccaccgtgccccaccttcttttctttctttctctttttttttttttaaagagagagcatctcactctgttgtccaggctggagtgcagtagtgtgatcatagctcactgtagccttgaaccattgggttcaagccatcccaccttaatctccctagtacttactgctggaactatggcacacaccactgcactgggtgaattttaaagttttttgtagagataagattttgcattgttgtggaagctggtcttaaactcctggcttcaaagatcctcccacccagccagtgctaggattattgacatgagccaccatgcccagcttagtttgtttaacttttaaaaaacaagtcaaatcaactcctagatgcatacccaaaagaaaggaaaatataggttcacataaaatcttgtacaaaaagattgatagcaacataattcatcattataaaaaagtagaaacaacccatacttcctgttgaacaggtctgtctggggggaaaaaacctcaaatgtttatcaatggatgaatgtataagcaaaatatagaata

SEQ ID NO: 1636 - DNA, 514 bp, Homo sapiens
tgagacgagcctggttaacatagtaagacctcatctatactaagaaaacttaaaaaattagcatggcatggtggtgtgcacctgtggtcccagctgcttgggaggctgaagtggggagtgtcacttgagcctggcaggttgaggatgcagtgagctatgattttgccactgcactccaacctgggcaacagagcaaggcgtgcctgaaaaaaaaaaataatgcacacaaacatccatataacatcaaccctagccaaaaaataagagagtaccaccagaagcacgactaaccaactgtaaatagagaaactgtaaagagggtcaacaaaatttataagttgttatttgaaaacactagtaaaatcgttaagcttcttatgagatcatcaagggaaggtgagaacgtgaataattggttccaggaaggagaaaaggaatattgatatggatcatatagatattaggagattataagataactcagcttgagctcaggagtttgagaccagcctgg

SEQ ID NO: 1637 - DNA, 264 bp, Homo sapiens
aaacaaatattcctgtacattgattgtttcacctacaataatgaccttctaattcctaatgattgttttctttttagtttcatgtacctcctaacatctctgcagcattttaacactgttgaccaatcagttttcttcaaactctcttctcctttggcttttgaaacattgtagtttcctaatattcttcttatttcttacgagttttactgttccccttttaccacctacttttaaaataaaagttatttccagtggatcagc

SEQ ID NO: 1638 - DNA, 225 bp, Homo sapiens
gagcagaacagttttcagcagtacaagggcttaaccaaaggcagccaagaagaaagaaaaggggccagatccggaagcgaactctgtagtacaattaacaccagggggcttatggacatagggatggtgggaaagggaaaagttaaagatgactcagatatattctccactgtgttcctagaataaaacctgaccacattaatgctcagttaacatctgtaaaat

SEQ ID NO: 1639 - DNA, 418 bp, Homo sapiens
ccagactggtagtagtggttgtctttgtatgattgtgggtaaatttaaattcccttccacctttatgattttcattttttttttttttctgagacagagtcccacactgttgagtgcagtggcatgaatctcggctcactgcaacctctgcctcctgggctcaaacaatcgtcctatctcagcctcccaagtagctggaactataggcatgtgccaccgcacccagctaatttttgtatttttttgtagagatggagtttccctatattgcccaggctggtctcgaaccttctggactcaagctattgttcacctcagcctcccttttgtgatttctaatttatttttagtaattaacaaatatgtattgcttgtataaattttttcaagctaaaataaattccaaattggctttcat

SEQ ID NO: 1640 - DNA, 494 bp, Homo sapiens
tgatgacttaaggggacaagccagttctgtggccattggtcatgttttaaagcagagaatgtgccttccacatgcctctgtagtctcatccccagtcactcagtccttaaattcattcacatctttatcatcatcaccaccatcaataagtgatgacgttacatttatctaaccatttcaacacttttttaatagattatacctgatagaatagtagactaaaagttttgtatcctacaggttttaaatttaagttgaaggtctactttttctataagtacttcaccatgaagcccacctgttttataaagtaatatattttattttctcaccccaatgtacctatgtaattttatttgtttttgtttttgctttttttgagatggggtcttgctctgtctcccaggctaaactgcagcggcatgatcatatctcactgcagtctcgacctcccaagcgatcctcccacttcagtttcccaagtagctaggact

SEQ ID NO: 1641 - DNA, 454 bp, Homo sapiens
aggtacttaccccagacaacgacgccgcttcaccatgatgatggacaacaggcaactttttttttggagtttcagcttgcttccaacagggacggtgagtgtgaggtttattcccatttctaagacgatagaagttttcagcctaagccgtattcctaggtaagcagctggattgcagttttgtcttggaaattctcctgaatgactaaaagttaagattaacaactagctggtcttaatttctccttaccattagagtacccagtaatcacataaattctgcaatcatctgtttatttagcttaactgtttttttttatttgttgaagttgttgttgttatttcagtctttttcttattgggttgaccagacttggtaaaatctgtaagaaagttccataattatggggaagatttcctctgaattggctaaattcctgtagctgaaaaaaaa

SEQ ID NO: 1642 - DNA, 654 bp, Homo sapiens
ttgatattaaggagatgccaagaggcccaactgggggatgtataggagtggaggaacaggccagtgccttaaagttctcagtaacaccagcttcctgtcagctgcaacctggtgtaaaaaaggcagagagtagtgaagaacatgttacaccaggagagccacctggaaaacaaaatggatcatttcttgactttcatgtgggtaaccagttccccaccctcattcgaagtttccaggtagtaatttattcaatgatgcaggtctaatgactgtctttggaagagggccagaatctgtcctgtggaggaggtggtggtggtatggtgagggtagtggcctccctgctgttttcaaaatcacagactaaaagcctttgattgtgccaaagaaattcattcagagcaattaactgcatggctagaaatgctttcttctctgataacttaacaaaactccagctgtcagtctttatgaagctggttaagtgtgttcatcttttccttgctcaagtgtgggctatggaaagaggtgaattgcggtgacttctgtggtgaggaggcttcagtgttctgagaccatgcttaaaaaattcaaatactcttaattaaaggggcaactcatcttcttatgagatttcaggccccaaataattta

SEQ ID NO: 1643 - DNA, 1011 bp, Homo sapiens
atatatgtgtgcatatgctgtgtgtgtgtgtgtgtgtgtgtgtgtgtgtgtgtgtgtgtatcaaacttaataaaacattgttacaagagcctggcagtaggagatttgataatcatgttacatttgccactcctccaagatgccaaattctaagtgtctctatgaggacttaacatttacttccttgtaataaatgtattgcttttgcagtgggataacaggaaatagtttgactgtcactcctgagcacatgcgtgtactatatgggttaggtgtttgtgtgtctatgtgcccatcccacatatcccatatacaaatgtagatttttttataagccatgtgagagtaaagttctgttaatttatagtcaaaacatataatttgcccatacatacaattcctttattgaaattctgaccacatttaaccttattgaaagcttctagcttgaatgagttttgctacattgaataaatactatgctgtatagttatttatgtgcttaagaagctgaactttcattccatcccagtaagttcccatgggataagttattttagtaaatcagaaaatttctctgaaagcaaagtaattcttaatttttggaggcttgaaaatggagaaaatagccatacgagttagcgggaagaagttctcattgattcatatcgctaaaaaataatttaaaatacttgtactcttaaattatcgtgagggggaagaacccaccacagtgctgctgaattgttttacttctgggattatatctttgtgtgtttataggagtgggaacattttatcttctgtgtttctgttgaggttgtttttcagcagtgccccaagaaaagtcctggagtctagctttgaagcccggtggacaagctggatatcaaagagccagaggaattcagcagtaattgttttatgactggccagaaatcagacctatttgtataggtagcacacaaaatagctgtgatttgacaatttggtgctatttatacccaccat

SEQ ID NO: 1644 - DNA, 479 bp, Homo sapiens
ttagggcaagggaagccagtcctcttagctcgcactgtcctggtggctgagagagttcttggaatgaaagaccttcctgtgaaccccagaattgctgagagggagggctgctgctgccccaccccacctgcatgcagccttgttcaccgagctctgtggctggttgcaggaaaggagggtttactgcacagacgaggggtggcccatgggctgagggcaggagacaaagctcagccaggtgcctaggacctggacagcagaggccactcctggctgccctggaactgcactctcttcttgctttcccttgggcatcttttctaggcacccgcctcctccccatggtggagcaccagggctcagttaggcttccagtcagcccaacccattcagcctccagggttccagttcccacatccgaaccctggttttgtctgcactgacagcagagccctgccctgagcagagccccctgggaa

SEQ ID NO: 1645 - DNA, 423 bp, Homo sapiens
cattgacaatttattgtctgatgcaatgtttcttaatctttttgggtcttggattcccttgagaatcttttgaagtttatggactcttttcccagaagaacacactcatgtgtatgtaacacaattttgcattcaatcttagggactgcaggtgtctacattagttatatattggtgtaaaaaaaaaaagccccaaacttaaggcttaaaggaacaatagatgcttattatctcacagtttctgtggttcagaaagtcagtaacatcttaactggatacttctgactcagagtctcccaggaggttgcagtcaagatgttgttggggggaaaggggcaggttcagtggctcatgcctgtaatctctacactctgggaagcaaagccaggaggattacttgagcccaggagtttgagaccagcc

SEQ ID NO: 1646 - DNA, 391 bp, Homo sapiens
atcccattccaaaagggaaaaactggcaagaagaggggagtaacagtccctgggcaagtctgaaatgcatcagggcaggcattaaatcttaaagctcccaaataatttaatttgactctatatcccacttcctgggtgcactggtaaaagaggtagaccaccaaagcctcaggaagccctctcccaaaggctttgctggctgaagccccatatggcttctctcaccacttgaatcaaatgtctgtgatttttccaggctaagggtacacactgtcagtggctctaccattctggggtctggatggtggtggccctccttccacagctccactaggcagtgccccaatggatactctctctggggactccatctctacataccctctcagcc

SEQ ID NO: 1647 - DNA, 446 bp, Homo sapiens
tgtagcttttgtaaaagttttggaaatggcctcagataatttcagaggtttttaaataaagaacgctcaaaatggagcaaaatggagagcccctgataggcctcctgcgtggaggtttgcagtaagccagaggcacctgtgggtcccagggagagacgggctgctccatggatgctcctgggacctggggcactgggtgggcctcaggcagataggagctggtccgtatctcttgccaagcccaggccaactcctgatgaagcagattcctgtgggtgacaagtgtcagaagatagaataggaccttagggtcaggaaggatttcttgaacaaaaaaggggaaaaacagattgagagattcagaaagctgtaatatattctgtgacctcaaaggtgacttggaggagggctgttgttcagcgacgggcgtgtagtgaacactgggg

SEQ ID NO: 1648 - DNA, 512 bp, Homo sapiens
tagtgcatacattttaagttggggttattcaattaaagcagagtgggtgttccactgcaagccccctccaccagcactcatttgcttttggctggaagaccgggtgtgtgctgtgcatggcccagtctcttctacaaaacacacctgtctcaagtgggttgggggtggggggcactcttgccgagaagtcgctgtcacagtcgtgagctgaggacatctgcactgtggacatccctccaccagagccgtaagagccttctagctgcagagtggttgtttccacatggccacaattctgattgggggtcctgggtcacttccttcaagttgagagcctgggtggtgcacagtgtgaagtacacgtgtgggcggggaggggaggttacagcatagatgtgtaaacttaatttttttaaaaaaggaaaaatacctaagtttaaaaaatgactttctttgaataataagattgggttaaaaattttggagaataaagtcaatatttagtactatca

SEQ ID NO: 1649 - DNA, 534 bp, Homo sapiens
tagtgcatacattttaagttggggttattcaattaaagcagagtgggtgttccactgcaagccccctccaccagcactcatttgcttttggctggaagaccgggtgtgtgctgtgcatggcccagtctcttctacaaaacacacctgtctcaagtgggttgggggtggggggcactcttgccgagaagtcgctgtcacagtcgtgagctgaggacatctgcactgtggacatccctccaccagagccgtaagagccttctagctgcagagtggttgtttccacatggccacaattctgattgggggtcctgggtcacttccttcaagttgagagcctgggtggtgcacagtgtgaagtacacgtgtgggcggggaggggaggttacagcatagatgtgtaaacttaatttttttaaaaaaggaaaaatacctaagtttaaaaaatgactttctttgaataataagattgggttaaaaatgtatattgagaataagatggccttttgaccttttagggtctagggctgtaaacgt

SEQ ID NO: 1650 - DNA, 369 bp, Homo sapiens
ggagacaggaaggagaatgccaggtcagatgttgggctggaccccgcgggtggatgggaggtggcgtgtgtcatccaccaccctcacccatccttgttctttgtgcaactctcacttctcttttcttttcactgttgctttctggcctgacccaggtccctgagttcccctatggcctgcctgcctcctgttcctgtgttgtgaagagtggggagcaccccctcaaaagcagtgcctgccagacgccagcacattctgtgtgccagtggggcctcatgcgacagtgggaatgagaaaaattcactctttcaaaactcactgtcagtcctttaattttcctcaaaataaaagttttcttctggtgtccgt

SEQ ID NO: 1651 - DNA, 646 bp, Homo sapiens
ggagacaggaaggagaatgccaggtcagatgttgcagggttagactgggcctggtttttgggcctcgttctccctggcccctgagggctgtctgtagctgtggcccctgcagggctggaccgggccttgctcaactcccttcaccaggcccgcagcagggaagtgccaggaagtgtctgtggacctgggttgacttgggccttgggtgattttcttcctgcttcctttgtgggtcccccactctgcctgagctctgtcagccccacgaggtggcttccgctctgtagacactgcctttgggcaccgttaggggctggaccccgcgggtggatgggaggtggcgtgtgtcatccaccaccctcacccatccttgttctttgtgcaactctcacttctcttttcttttcactgttgctttctggcctgacccaggtccctgagttcccctatggcctgcctgcctcctgttcctgtgttgtgaagagtggggagcaccccctcaaaagcagtgcctgccagacgccagcacattctgtgtgccagtggggcctcatgcgacagtgggaatgagaaaaattcactctttcaaaactcactgtcagtcctttaattttcctcaaaataaaagttttcttctggtgtccgt

SEQ ID NO: 1652 - DNA, 319 bp, Homo sapiens
agccactgcgcccagcctcaagaccagactactctttaaccaggtcatttctcaaggttggatttgcagtgagcagccctgaaagataaggtaaaatctttctctgagacaaagagtcggctttttactgcttgttataaaagtggtgaattccccaaacttagtgttcctcagctatacaaacccactgtgcacatagcaaccatccaagctatatcacaccaccatatcacacagaactgtggacaaagggaatcaatgcagatatgttgatgctcatgctgtttgctgtgccatgagaaataaatacttttgcctg

SEQ ID NO: 1653 - DNA, 287 bp, Homo sapiens
gtttgaccatttgctcagctgagcttgtcttaataattggattcgtggttaatgagccccacatgggcgagagagcggccttcattctgaacccatttaggcagcacgggcagccctcctcgccgtgggcggcattagagcccaccctgcccagtcttggggttgctccttgatgctgtctgggaggcttgctcatggtgacatccttatctctccgtgcacgttaccgcattcagagcttgggtcacgtggacactgaactcaggcgaattttctctgagatcccg

SEQ ID NO: 1654 - DNA, 364 bp, Homo sapiens
agaattatcaaaggatggctgtacagaccacctagaaaataattcagtatttcaggtttttcttttctgggagtgtgataactgaaattgttagattttggctcagttaagaaaagaaagatctgttgcctttcttctgagtgaacagtggtgagaaaaaattttgcaaggccccgcttttcctttcttcacaggccagcagtagccatatctgatcaaaaaagatacctgaaggaatattgatcacattttcctgaggccctagcaagcacaggaattgagaagttaggactggaacaactttgtcatttgtcacaattgccaaacattagaatacacaggaaccgttttttcaggtaactct

SEQ ID NO: 1655 - DNA, 156 bp, Homo sapiens
cataagattcacctagaataagactagaaagttataccagatatataataatcaaaagaaagctggaatagataatattagacaaaatagaattactagagagagaatcatcaggaagaaaattctagacctatataaacttaataaaatgtctta

SEQ ID NO: 1656 - DNA, 2516 bp, Homo sapiens
cctgtgtctgtgggccttcctcctggtgtgacagacttggggatttcttgtaaacttcctaactagtctgaacctttttatttcttattgggaactgacacttccctatactttaaaactcacatatgtatatttttgtacatctatctcctaattcaaaagtaattgagattgtcatttcattataattccgtgagtatctttaaattactatcaaatatgttactaaataatttaataagaatatagaaatgaagccactgagatccttaaagttgaaacctgattgttattatattttcagtaaggatttggagatttttggacatttttactctcataatctatgcagtactgaaatgaggtctaataaatataaccaatacatgttaggccataggttcttaaatttagctacctgttcacctcaacttgagagctcttaaaaccctcagtgtccaggttgcagcccagactagttaaataacgttttatccctagaaatgttttttttaaagctacccagatgattccaataggcgtcaaggctaatagccactgattcaggccttgctattcaaaagtatggtccgtaaaccagcagcatccctgagagcttgttggaaactagaattcagggatcttttgtagacctactgagacaggcgctacctgtaccaacatctctagatgattcctgtgcataataaaatctgataaacaaaggcaataggttattcttcctgtgctggtaaatctctggcaggggtccccagtcaggaaaaagatttgagtattaaggtctttcaaaaaagttaactggccatactcaactgtctataaaacctctataaatttctgtttttatgtctatgaattattaaataaaatttaactcatttttaagaaattacattttctgttatcaagaatacaattcttactagatcataggtgaaaatgtcaataatgataggagcaaattaaaaattcagataattatttttgacttttctagaagacataattatctctggaaagcatatacagtagtctaattccaactgctactcattaagtattggatatgtgataaaaactctatcgataactccaatgtaccttctctaatgtactgtaaatttccatttcctatcatgtgcttgcaaacaaagatttcctatgccactaaactcaataagtgagaagcttgcacattatttcattttgctatagctacgatacatatcaaatgacagctactcctggtccctcatttgtatgttaaattccttgttaattttatgacaagattgttgatcttggatttcactttcattaccgtcttagaaacaaattggatttttctgctcccagatgccactagagtagctttgtaaagctcattttcttatctttacttagtttctgtctctaactttagtttcctttttcagcttccctgactaattctcttaacctccaattatctttaacagaagttactaattctgcaattcatatattctggaactggaattatctttgttcctaagcaaccaagtatacatatgaaacggtctgtacattaatgcctcataatagcagctcttatttgggaaagggttatagtacatttaaaccatgtggttttccaagcaagttaagactggctatttgtgtttagtgtcagaatatgttgaattagaagttgaagagtttctaaagtgattttaagggcttgaggagagatgaacccttttgcttagagccagaacttagatatggggtgtaaatatttatattacactaatcattaagagtaatatatttaattttatccatttttttagtgccttttttgaaccaatcactgggctagatgtggggaggacaaacatgtaagcaaatcactgttagaagtaacttgtacaaagtgtgtaaaaggacacagtggtgaaaggggtgacttttaggagaaactttatagagcaaggaccagtaagtttacctaaaaggggaagaagaaatatggagaaattaagtgggaagatggggaggggaagtgtgctaatcacctaagaacctccgtgctacaagaaggagtttgggtttgaccattaggagaaacaattacaaagctgaagcagcatgctaaactgcatttcacaaataccactttggcagcatcaaggatcgattggaggaggcaagactggaggcaggaagactggttaaaaaaatgcatattaggaagatatgagagaaaaatgataatggccttatcaaaggcagcaataatgttccttgcaataggaatgaacagaagtcaacaggaaatattaagagatgggatcaaaaggacatgactgcagattgctgtttagagttatggaaaaaagtagaatccaaaggtaaatctcagatttcttgagtggtgggagagatgatgacacaaaatgtaactttaaaaatggtaattaaaaaaaaatgttttatgcaaaaaataaaaaaaa

SEQ ID NO: 1657 - DNA, 295 bp, Homo sapiens
cttgatgtggatgcttggatggagagaagagagttctgcacatgaggtgccctcagccacgattactgtggcagtcaggagggatgaggagaatgtgtgagaaagactgtaaaggaagagtggacatgacttgagggaataggttccccgtagctgagtgaaagcatgaaggagaggtaaaggagaaaggatttgaagattgcttcactttgaacaggatgcagtcaagaaccatggcactaatggtgttaaggaagttaaggagttaagggcttagagagaagacagcagtttg

SEQ ID NO: 1658 - DNA, 512 bp, Homo sapiens
tggtcaaggaaggccttaccaaaaaaatgtcatttgagtgaaaacttgaaggagatgaattcagctgtacaaatccagaaggaaaattaaggcacagcaaacagcaaatgtagagccctaaggcaggacctgcttttactagaatagcaggcaaatacctggaatagaattagttagcaaatttggcagggaaaggtagcagtggtaggatagtaacaggaggcagtgtcagactttctttgacttagatgaaaagccaatcgaaggtttgaatggaggagtgacatgatttgagcctgctttttaactggatcagtctggctctcctaatggtaataggccaaaagaaggcgagacaaaacaggacacaatttaggagatagcggtaatcaggcaagggaagatggtgacagcttggtgtctagggtgcaagcagttgaagtgatgagaagtggctggactctggctatattgtgtacattgtggaggaaaagacctcaggagttgctttt

SEQ ID NO: 1659 - DNA, 449 bp, Homo sapiens
cagagtggggcttccaatccgcagatccagagctgactctcttaaatatctgtggtatcctccctctttaggttgggtgctttccctcaaggattttaatatctaataggggaaataacccatataagttacattaaacatacatatgaaagcaatgcttaaaaagttgtgcttttgggccgggcgcggtggctcacgcctgtaatcccagcactttgggaggccgaggcgggtggatcatgaggtcaggagatcgagaccatcctggctaacaaggtgaaaccccgtctctactaaaaatacaaaaaattagccgggcgcggtggcgggcgcctgtagtcccagctactcgggaggctgaggcaggagaatggcgtgaacccgggaagcggagcttgcagtgagccgagattgcgccactgcagtccgcagtccggcctgggcgacag

SEQ ID NO: 1660 - DNA, 406 bp, Homo sapiens
atataatctgagaagagacatttatttgagtttttccttctaagagaatatgtacatctcccttttctttaaaaattttttattgtgaaatatgtcattaatatgtactgacaaagcgtatctgtgtaataaatatgctttttgtcagtacatgttaatggtatatttcataacaaaaattaataaaagctttagaaactttagttagtttggaaaccttttgtgtgtttctaccccaggaggaatgcgttccctgccccccgttaccctggccattattaattttgtgttaattattcccttgcctttttaaacagttttatcacctatatagatatccttaactagcattgtttactcttacctgtttttgaactttatttaaataaagtcattctgtattcta

SEQ ID NO: 1661 - DNA, 510 bp, Homo sapiens
taaaggacagggaaatggaccaccccaaactgatgtacattggttctgctcatcacacttgggggtctcaacaggctgatctgtgttatcagcaagtctgctgatacttatcagggacttgctacagagacctggtgcttgactctggaagaaaatcagcatcagcaatgtcttcagtgcctgtggaggataaattatatgtgtacaccttaatagataatctccacatccctgtgacacactgcaacctccagggaccttagcaatgccgatgttctacccaggttttgcaggatggctgcctggtcctcagagtttgcttacataggaggtgaactcaactcagcacgcacagttatgtggggcgagcatcttacaggatgcaggctacgcaagcctttttttctaccagccaaccaattaaacgctgacaatactgattcaatgtttcctttcccaaagttctcccatttccttttttgaaaataaatctgttattgaaaattgaat

SEQ ID NO: 1662 - DNA, 267 bp, Homo sapiens
ctttttttttacattgagcatatagtatttttataatgtaaagatataaggctgtattcgaaataaatttaaaaacaaggggaagatggaaacataaccagaaattttcctttgttaggtattaacagataattcaaccttggatctaagttttgtaactccagatttatgcaaaaatattctttttttttttgagaccgtgtctcactctgctgccaggctggagtacagtggcacgatcttggctcactgcaacctcctcctccc

SEQ ID NO: 1663 - DNA, 296 bp, Homo sapiens
tagaacacgtgctaagccatacaacaaattttattgaatttaaaaagattcaagtcatataaagtatattctttgaacaatggcagaaagttttttagtaatatccaactattgaaaactaaatagcaaacatataaataactaaatgaaaatgaaaaacaaggtgtcacaatgggtaaaatgccagtacttaggaatggagttatagcactgagtacattcgttaaaacataagaaaggtctcaaatcaatgacatcattcatattaagaaactagaaaaagaagaaaaaattat

SEQ ID NO: 1664 - DNA, 372 bp, Homo sapiens
actacagcaacagattagaacacagtatccacaaattgacccatgattttactgaaattgaaaatatgcaaaaggtgccatttaaaatcatggattatttaataaatggcagggtgattgtctttttttttaaagtaaactgtgacacatacataaagggcccactggaagcctgagcaatatagcaagaccccatctccacacacaaaaattttttttaattagctgggtgtggtggcgtgtacctgtagttctaactactctggaggctgaagtagggggatcgcttgagcccaggagattgagaccatagtgagctatgatcacaccactgcactctagcctgagtgacagaactagacctggtctctt

SEQ ID NO: 1665 - DNA, 343 bp, Homo sapiens
caaacaacaatgaaaataacagcaacaaacttatctccagcttcagccttccatgttgcatagtgtctggcatatatccggtagatgttcagtacgtgggagctgtgttttacataagttttctcattccaatgctgaaaacagagaaaaagattgaatgtcatgcctgcatcgacagcacatatactaaaattggaatgatacagagaagattagtatggcccctgcgcaaggatgacacgcaaatttgtgaagtgttccatatttttccgctgccaccaccacaccgcactacctcccacccccttttgtgtacaaaacacaaggaaaaatatttttgttt

SEQ ID NO: 1666 - DNA, 404 bp, Homo sapiens
gggaaaaagtgaaacatgatgaaatattgatagtaaaaggatagatgtctacatttaaccttgaaggataagtagttttttggatggataagaagaatcatgggccgggtgccgctggctcacgcctttaatcccagcactttgggaggtcgaggcgagtagatcacgaggtcaggagttcaagaccagcctagccaagatggtgaaaccttgtctctactaaaactacaaaaattagctgggtgcggtggcaggcgtctgtaatcccagctactcaggaggcagaagcaggaaaatctcttgatcctgggcggcagaggttgcagtgagccgagatcgtgccactgcactccagcctaggtgacagagtgagactccatctcaaaaaaaagagagagagaaaa

SEQ ID NO: 1667 - DNA, 212 bp, Homo sapiens
agaagggtcaatttctgttgaaacaaaaaaaactatgggactattgggttcatttcaaaataagggtctaacttaattcttttgcatgtggctatccagttgtcccagcaccatttgttttctttcctcaccgaattttcttggtaccctagtttaaaattacttggtcatagatacatgggtttatttctggactctcaattttttttttt

SEQ ID NO: 1668 - DNA, 337 bp, Homo sapiens
agaaatttatccatctcttctaggttttctagtttatgcttgtaaaggtgttcattgcagccttggatgatctcttatatttctgcggaatcagttgtaatatctcctatttcatttcttattgaggttatttcgattttctctcttcttttcttggttaatattgctaatggtctatcaattttatttatcgtttcaaataaccagatttttgtttcatttatcttttgtattgttctgtttttcattttaatttcatttaattctgctccgatcacggttacttcctttctcctgctgggtttgggttttggtttgttctggtttctctagttcc

SEQ ID NO: 1669 - DNA, 362 bp, Homo sapiens
aatttaaaaaaatacatacacatatatattctaccagtgtaatcaagaaatagaagaaaacacaacattagataataaatgatttatcctacccaaattctgcaaataaatttgaaaattggatggaatagatgattttcttggaaaatgtgctagtagattgactctagaatagaaagaaaactcaaaaagtctctcaaaagtggaaaaaaaaaaagacaactgttatttgtgaccagttgctactgttcttcctggagtccctttgccattgctgttttgcaaagtgttagaagtgaatttctggtgaggaacctcggagtgtgaggcagggtgagcatcctgcttggtgagctctctgc

SEQ ID NO: 1670 - DNA, 267 bp, Homo sapiens
gcctggattaaaggtggtgcctcttgaactgaaaagatagagctcagaggacgcatgaaccaactctttaaaattcatgactgacgtggccaacttttctgctaatttccaaaatagcagagaaagtgggactgttaaaacgtggagaagtcctacagtcatcgttcacacctgtaatcccaacactttgggagacctaggtgggaggggccacttgaggccaggagtttgagatcagcctgggcaacatggtgagacctcctctct

SEQ ID NO: 1671 - DNA, 814 bp, Homo sapiens
gaaacaggagacattacaactaatgccagagaaataaaaagcaagaccataagggactattatgaacaaatttgacaacctagaagaagtggataaattcctaaaaacatacaacctataaagacagaattaagaagaaatagaaaacctgaaaagaccaataacaaataaggagattgagtcagtaataaaaaaccaacccaaacaggaaagcctacgaccaggtggcttcacaggttaattttactgtacatttaaagaagaattaatatcctttcttcctaaaggcttgtaaaaagtagaagagtaaatacttccatactcattttatgaggccagcatcacactgttaccaaatccagacaaagacaccacaaacaaagaaaatgacaggccaatatccctgatgaatatggatgcaaaaactttcaatgaaatattagcaaaccaaattcaacagtacattaaaaagatcatattctatgacctataaatctctataaagcaagacttattcctaggatgcaaagatggttcaacatacacaaatcaataaatgtgataacaccgcattaacagaatgatgggcaaaaaccatatgccaaaccaaagaaataaaaggcatccatatcagaaaacaagaagaaaaattaactatttgcagaggacatgatcttatacatacaaaaccctgaaaactgcacacacacacacaaaaactggagatctaataaacaaattcagtaaagttgcaggattcaaatcaacatacaaaaagcagttgtgtttctgtatgccaacaataaactatcca

SEQ ID NO: 1672 - DNA, 407 bp, Homo sapiens
acagcagcatgtgcatcccccaaaggcctccagtttgtttgtaaagtctcaggcaggaatctgcccttgtgatcctgaggcctcatgtttcagggctcaaagctggccctggggacaggaggtggcaactggtgtctgaccccctaaacctggtgcctccactgatcaacagaccagataagggacaggtcaccccctgaccttagggccttgaggcccagggcggggagtgggtggtggtgctgcagttagaggatcccattctcaggacagtaaaccctcgaaagaacttctcacccactattttccaagctttagtcacttgcattctgctttcataatgttgaccatttccaagttcccttgtatttttaaacttaaaataaagtgcatgtatcttaagtgta

SEQ ID NO: 1673 - DNA, 464 bp, Homo sapiens
gttttgccacgttggccaggctggtctcaaactcctggcctcaagtgatccgcatgccttgccctccaaaagttttgggattacaggcgtgagccaccgtacccaatccatcacttatatctaagtgtatatttgtacctgttaatcaaactctcttcatcccctcctctccactacccttcctggcctctggtaaccaccaatgtaccctctgtcttcatgagaagggatcagtctttactcagaagctttggccatggcttgagcagagtagctgtcagccatctcccagcaataccagccattggacaagaaacatgaaggtttgggatgactcatcctagaagtcattgttttctcagctccatagtacacatctacttggagatttataaggcatgcaagctccttttctggcctgtatgaaaaactggaagaggtagaatgagttccttgtaacccag

SEQ ID NO: 1674 - DNA, 1158 bp, Homo sapiens
actttttgtcctgaagcaacagttttctctagtttattattaatgagtagaccatgatatgtaataacatgtgactgataatgtgaggcattttggagatggtgctgttttgcaattaccaaaagaattaaatgctctgagaattggtctgttacttagtagctttaactacattttttatacaagtgctggtatttatagattgttcttctagctgcactctgaactttttgggagaagagaatagatcttcttgatcattttatttttaagaatgatagagaagtttatactgaaatgttgagtaaatcaaggaatgaaaaaatatacatgtgtgtcctaaaattaccttctgttctttcctttgacatagtgagtctagaggcttacctcccttgtaatgagagtggacttcccttagccctaaaccactggaactggcttttatgaagtggggcaaaggtttttggaaaagctagggctttgagggctacaaatagtgatcttaaaagctctcagtgttagccaggcgtggtggctcacgctgtaatcccagcactttgggaggccacgccgggtggatcatgaagtcaggagttcaagaccagcctggccaacatggtgaaacctcatctctactcaaaatacaaaaattagccagatgtggtggtgggtgcctgtaatcccagccactttgggaggctgaggtgggcagatcacttgaggccaggagtttgagaccaacttggccaacatgatgaaacattgcctctaccaaaaatataaaaattagccaggcttggtgacacacacctgtaatccctgctactagggtgactgaggcaggacaatcacttgaacctgcgaggcggaagttgcagtgagtgaaggttgtgccactgcactccagcctggcaacagagtgagattctgtctcaaaaaacaaaaaaaaaacaaaaaaaaaattgtggggtaaatttgagtgtatgagaatcttagactattgaatgaacattaatttttttaaaatgtccacttagaactatttaaaatataaacgtaaattagggttttaattatgaatataaatgagtgcatatctgtatattttacagaaaccaaaaatttaatattatagagaaatatctgtctttagga

SEQ ID NO: 1675 - DNA, 742 bp, Homo sapiens
actttttgtcctgaagcaacagttttctctagtttattattaatgagtagaccatgatatgtaataacatgtgactgataatgtgaggcattttggagatggtgctgttttgcaattaccaaaagaattaaatgctctgagaattggtctgttacttagtagctttaactacattttttatacaagtgctggtatttatagattgttcttctagctgcactctgaactttttgggagaagagaatagatcttcttgatcattttatttttaagaatgatagagaagtttatactgaaatgttgagtaaatcaaggaatgaaaaaatatacatgtgtgtcctaaaattaccttctgttctttcctttgacatagtgagtctagaggcttacctcccttgtaatgagagtggacttcccttagccctaaaccactggaactggcttttatgaagtggggcaaaggtttttggaaaagctagggctttgagggctacaaatagtgatcttaaaagctctcagtgttagccaggcgtggtggctcacgctgtaatcccagcactttgggaggccacgccgggtggatcatgaagtcaggagttcaagaccagcctggccaacatggtgaaacctcatctctactcaaaatacaaaaattagccagatggtcatttttaggacccacatgtatattttttcattccttgatttactcaacatttcagtataaacttctctagtcgac

SEQ ID NO: 1676 - DNA, 433 bp, Homo sapiens
agtatggcacgttacacatttcccacttccttcttttttagtttccttttagccattctcagaaatgtaagcaggaagaaaatagcaatcaattatgtttggaaacaactgaagttaaatctgactgatatttgtttataaaactatgcatcattttattttcagtacattttcagttcctcttttgcccctaacattctcctaattcccatggtgaatatatttcctttaatccaggcctgaacactgagatagttaacagccctggttgttatttcttgatgaagtctctcgtagtcagctccttttttcttcccattgccttcctttagtccaagttttcataacctctaggccctccactttgcagttcaatctgtgaggttaatgacttcacacctttttcattatattcatgccttcattcactgga

SEQ ID NO: 1677 - DNA, 877 bp, Homo sapiens
ttactcactagcgtttgtcattaactttgacgtatactgagctcttactatactgacgatgccctggactatttgattcgatactcacaattcataaagtaggtattattggtgttctcattttgcaggtgaggaaagtgaaatccaaaaaggttagatagcttgcctaagtgccaaagctgggtctcaaaaagtcagcccattgggctccagggcctgttctgagaaccttgacactagattgtttccctttagaggagaacagcttccatccctgtcttctaactctaccaaattaacttggcatttcagaacttgatttcccacatacagatacacttttcatgaacatttcccaactctcagagttagtttcttttaaaaggtgggaatgaaaaaacaaaacttggaaaatcatcctcttctggcaaagtagaaaggtggatccaggaaccttttaatttacaaatggaattcccagtttggccattatccagagaccatggatgggcaaattaaggccattgggctaaatccaaccaattgttggtttttttatagctcaatatctaagaatgattttttacatttttaaagggttgaaaaagaaaaaccagtcacaacgtgatatgtgaaaattatatgaaattcaccaagagtgagccctaatatattaactatggatgttgggtgataatatgtcaatgtgggttcattgattgtaataaatgtacctctctgattggaatattgatagtggaagagactgtgcatgtgcgggggcacagggtatatgggaaatgtgtattttctgctcaattttgctgtgaatctaaaacttttttttaaaaaaaggctattaaaatacatatatgca

SEQ ID NO: 1678 - DNA, 337 bp, Homo sapiens
ctgctgtgttctcaatctccagacggtccatgaaaatttaatgtataagaacaaagaggctgggcgcagtggctaacgcctgtaatacctgcactttgggaggctgaggtgggtggatcacctgaggtcagaagttcgagagcagcctagccaacatggcgaaaccctgtctctactaaaaatacaaaaattagctgaacgtgatggtgggcgcctgtaatcccagctacttgggaggctgaggcaggagaatcgcttgaactcgggaggcagaggttgcagtgagccaagattgcgccactgcactccagcctgggcgacagagcgagactgtctc

SEQ ID NO: 1679 - DNA, 553 bp, Homo sapiens
tcatggcagaaagcaaaggggaagcaagccaggtcttacacggcagctggcaagagagagcatgtgcagaggaactcccctttatcaactggcagatctcatgagacttactcactatcaccagaacagcccggcaaaaaccatccaccatgattcaattacctcattacctcccaccagggtccctcccatgacacatgggaattaggggagctacaattcaagatgagatggggacacagccaaaccatattattgcttaaacaaaaatcaagctgagggcactggaaataaagacatggaaatatctcagaatttagaacagagagataaagtagtaagacataaaaaagaaaaacaaaaacagaaattatcatttcaataagtaggagttctagaaacactaatctaactaaaaagttttagaaatatcagttagccattctagattgttaaaccatagtttttcaaatgtcaactaataagatacgtataaagattaacttctgggagttctagaaatctacttctgttagttaacagaagatctaac

SEQ ID NO: 1680 - DNA, 476 bp, Homo sapiens
aaagctggccataaagaaattaaatcccttattcctgaggggtcccaccccataccaggaaggaagaaatgctgcacaaagagaccaagaagaatctaaacaggcgggccttgccgaatttccccactttgtctcttcacgttagattgtacccctgtgttcagtcgcatttctacacaactgtccatacttctttgaaactaagcataaaaatagatagttttccctgtatctttgggtcttcattctgaaggctcctgtgtcaatgcaaagctatactccaataaatttgtcatgcttttttttgttaacctgccttttgttacagaggtgttcgccgtgaccgttacaatgaagaggaaagagatcatcccctttctactcctacatccccaagtgaagaggacatggagtacagccacagccacacttaaagggcatgtaacatgaacaaaaataaatgtttgttgtaagca

SEQ ID NO: 1681 - DNA, 686 bp, Homo sapiens
ataaattgtattcaaggctgactttgtagtgatgtattccatgaattatttcattcaaaataattttgaaaggacttctggtccagacaaaatagcatagatccatttctgtcttctctcctctcagttaaatgcaattataaagtctagaaataatgcaagaggtaaccaaaggagaactctgaaagatggaaacagaaagaggaattagttagggaccctaagactggaggaacaatagaggtaggatgtcttaccatcaccgcatccaacaagagaaggtgacctaggcctggtattacctgatcccaacttggcaccaaaagacagccaacatagactcattcctcctgcttcctggtgagcctggtattctcctccacttccactgacagacatgtagggtgactgggtggtatcaacaataggaaccacatcataacaggcagcctagtttgggaagcactcttggtctccgtaggcctgagactccttttgcccatctagaggcaccaggtggcccagcccatggaaattccctcagccccagaaaggggcaccagaaaggaccagtgggagctccagtaggctataatagtatgaaggctctgaaatgaagttgccactggacctacagcccactaaactaggctaggaccttaggtgatagcctgaaaaaaaaaaaa

SEQ ID NO: 1682 - DNA, 1321 bp, Homo sapiens
taactgggtatgtcctatatattttttcctaaatctcacaattctatccacactgcctttctatctttttcagctgggctatctataaggggcgagatctacctccctccatacccttgtgttcagacaccttatgaatatctgcagtcataatgtccttcaagaaagaaaacattggtcagctctaggtcctgcaaatgcgttttgaaggacgaactcaaatacagatgggataatcaagtaaatatcttcataggatcaatgccaccatgttcaacacttccctttgccagcctgttgtgaggtccaagtttccccattaatcccttatatagcatttcccagtaactgggacaaccaaaaacacaccgacatattagaaatgctcctgaaaagtggcaacaccgcctaactcagtaccaggacctcttttaaattcaatttcttttttctttcagagagataacaaacgaattcattatttcccccattcacatcttaccacaaattatttttatcaggttaaaactggtcatctacggaattgtagaaaggtgacataggaactgtcttcactgctggaagaataaaagagtctgaggtatagacactgccctggtgacaccttctcagaacattgttgggggacaggggaggcaggcgcaagtaggggatagaatctgaccctgacatgcagctatcacctggcagagagactcgtcaaagcaaattataacgaccagtactatttttttttggaattgaaaacccaagaagccctaaaataagaacagtgagatcaaaggctggtttctaaaacaatgcagaaaatagaaccatgttggaattcctaaattctagctttcaaatactactgtttccaacagtgaatccttgacagagactgaatgcagatggaattttgaaacattttcagtagctacctcctctcctgaaattcctataagtggcagaggaaaatccaaatcctttaatataacatgtccatctcatgactcctgcttacacacatttgtgttgatttgcttcatttctggaggatgggaatttgcagagctggtgacatttccttcattagacaccagaaattcaccagagagagacagatctgtgccttctctttttaggatctggttattgatactttaataaatgtggtgtaaagaaaatccatggctacagtctgtatagaaaatgtgaattttttaaataagattgtgttcttaatgtaaaaaataaaagtttatttgtattcagtgaaatgcctaataaagtcctggtaccaattaactttattttt

SEQ ID NO: 1683 - DNA, 631 bp, Homo sapiens
  misc_feature (10)..(10): n is a, c, g, or t
  misc_feature (44)..(45): n is a, c, g, or t
  misc_feature (57)..(58): n is a, c, g, or t
ccccctgggnaaaaaaagaccttcggtcaaaagccaaatttatnnccgacccggganntttttttttggaattgaaaacccaagaagccctaaaataagaacagtgagatcaaaggctggtttctaaaacaatgcagaaaatagaaccatgttggaattcctaaattctagctttcaaatactactgtttccaacagtgaatccttgacagagactgaatgcagatggaattttgaaacattttcagtagctacctcctctcctgaaattcctataagtggcagaggaaaatccaaatcctttaatataacatgtccatctcatgactcctgcttacacacatttgtgttgatttgcttcatttctggaggatgggaatttgcagagctggtgacatttccttcattagacaccagaaattcaccagagagagacagatctgtgccttctctttttaggatctggttattgatactttaataaatgtggtgtaaagaaaatccatggctacagtctgtatagaaaatgtgaattttttaaataagattgtgttcttaatgtaaaaaataaaagtttatttgtattcagtgaaatgcctaataaagtcctggtaccaattaactttattttt

SEQ ID NO: 1684 - DNA, 860 bp, Homo sapiens
  misc_feature (751)..(751): n is a, c, g, or t
  misc_feature (766)..(766): n is a, c, g, or t
  misc_feature (769)..(769): n is a, c, g, or t
taactgggtatgtcctatatattttttcctaaatctcacaattctatccacactgcctttctatctttttcagctgggctatctataaggggcgagatctacctccctccatacccttgtgttcagacaccttatgaatatctgcagtcataatgtccttcaagaaagaaaacattggtcagctctaggtcctgcaaatgcgttttgaaggacgaactcaaatacagatgggataatcaagtaaatatcttcataggatcaatgccaccatgttcaacacttccctttgccagcctgttgtgaggtccaagtttccccattaatcccttatatagcatttcccagtaactgggacaaccaaaaacacaccgacatattagaaatgctcctgaaaagtggcaacaccgcctaactcagtaccaggacctcttttaaattcaatttcttttttctttcagagagataacaaacgaattcattatttcccccattcacatcttaccacaaattatttttatcaggttaaaactggtcatctacggaattgtagaaaggtgacataggaactgtcttcactgctggaagaataaaagagtctgaggtatagacactgccctggtgacaccttctcagaacattgttgggggacaggggaggcaggcgcaagtaggggatagaatctgaccctgacatgcagctatcacctggcagagagactcgtcaaagcaaattataacgaccagtactaggntgaaacccaaagccnaanaagacgggcaacgggtggcctaacctgcaataaccgggttccattgctcaaacggcccgagctaaagagcacggggtcagccctccaaagg

SEQ ID NO: 1685 - DNA, 317 bp, Homo sapiens
tgtgtgtgtgtgtattttaagttctttacactgtactgccaacttttctataagattctagttcctggaaaaatatttttttaaaatcattcattaaataccaatttctctgaccttccttttaccaagactttctcacaggaatgacatgtggttctatggaaagaaccccaaactaaacatcaggaggcttgggttcaaatcccaggtagatcccttacttgttatgggattaggacaagccatttaacctttcggcttcctcctctgtcaagatatatacctgccctgctcatctcaaaagttgtttcagggat

SEQ ID NO: 1686 - DNA, 486 bp, Homo sapiens
gattatattgaaagttcttttctgtttagcctgagctgcatctgactaatctgcttctctttcctcttaccagtaaaggccatcatgatgcctctcatgttgactaaaaataatgatgacctccaatgggtcatccttctccaggccccagagcactttccaaggcttccctgtgctgctgagtacagcacctttcctccaattcccatctctgctgagtcatcttccagctttccagatggaaaggggccaggcaggctgcaggccagaagtcaggacttaaagcaggaagccatgggagcactgcaaccttctgcaagtgtgcctggagaagagctgccacctttgtggcacatggccttcagagggagagactgcaaccctgaccctcttatagcaggactttagactagtgccatccagtggaaatataacacaagttatgtatacagttttaaattcttcagtaactgtattttaaaaagt

SEQ ID NO: 1687 - DNA, 1130 bp, Homo sapiens
gcacgagagttgcttcccacatactctgtctcaaagtgcctgatagagtggtgggggataggggcctgttaacagcagaattctccatcgttattgtgttcagttgagtctactctcatcttctgtgaatatgaaggaccttggtaggggtctgctgggtatgcacttgtttgtgtttgcaaaaacacacactcttgtaatgcagtcgacccttggactgagcagggattgttagtatggcagagttctcaaggtatagtgaatttaaatcatttctgtgaataaatggttgaatagggtgaacgtgatttttttgttatttttaaaaagttactattacacaacactgaggaacttggaaatggcacaggcactgttgcagattttttggactggagagagagatagtaatttaaaaaaaaaagaaaagaaaactttcaaaatgttcttattgaaacctggcacccatttttcttaataggagcatccttagatgggtgagtataagaggaatgggagcttttatattgtttgttttcacatcattagcagcttaccttcttgtgaagataattaaatgccgtgctcctacggaagcactcatacataatgcagcaaggagagcgggagtcccactagcttcccaccagtttccccagttcagaagttatacacttgatattttccgctgttgacaagttttctggtttgcccacacggagttatctgtagaattatctgtattatgtttctaattaagtattgagaccctgaaattacattttgatttgttctttattgagccagaaggatctagtcagaacttctgagtgatggcagcagagactgtaaagccatttccagcattgtgcagaagtacaagctttagggtgtatctattcatctattcctagtacataaaatttagccttacaaaaagatgacattgttttatgtattttttaatgtgtgcctttaaaaagatttaaaaagtagagataatttaagggtgtttataaattatggggtgctgtctggagaaggacaaatcaataaatgcttattgaacacctattgatgttgatgacgtttgttatcttgtggggtggcagcatgctggtgtgttttgt

SEQ ID NO: 1688 - DNA, 365 bp, Homo sapiens
tcaacatgtttctacttaagaaggcagggaagtgtataataaattctagaaacatttccacccaataatggtcaaagagaagagattcttagtgtttaaatctgtgaactcatacctgtctataaaacataccagtttttagtattttgaaggtttggggtttttttttaactataaatttgttattatctatgcctattttatagcccctggaagatactgctactattatcaataacgtggaagaaatgatgtctttccttttatgacataactgtgagtcctatcaaggacagaatctttgattgaaccagtatcctaagggaactctggtgctctcagaacaagctattttatgacattgc

SEQ ID NO: 1689 - DNA, 492 bp, Homo sapiens
aaattcctgttgaatttcaataggaatgaagagattaccaaatcattttcactctggattctatttttgtttttattggcaatgtctcccagctttgtgtcatctgcatccttcatatgttttgatctccggcattgatgcaatctgaataaaaaggaaagccaacagaaaaaaaattacatcaatttacttctgccctcccatcagtttgatagtaagttattaacaaaaattcattgagtattctgataccactagttttgcatgcaaacaaaatgtcaccatcttatctcaaaggaggtcatttgaattacttttttgaaagtaaaatatacctttattatgttctcacctgatataccaggctttctgctatttaaaaagtatatgttcacacattcttagataatatatgttgattcttagtgcctatagtttctaaattttcttaaaaatcattaaataaaaaatgtctatttttttccatggtta

SEQ ID NO: 1690 - DNA, 3681 bp, Homo sapiens
  misc_feature (1310)..(1310): n is a, c, g, or t
gcagcgggccagcgcccgcagacacactggcatctcaagagggagtgaggagaggattgcagggacttttccctgcgaaacaaatgagacaatgacataaacggctcttttatttatgaaggccctgggagcagcgttaagggctccaggatccagctctctttgcatttggtctgtcggaagctgtcctcgtgctttcctggaccgggagagtcccggtcccctcgggagggactccaccgcctctcacactccgatttctgctgctctgctgccccgcagtcttttccctttatttgcttccccctcctcccctcggcctccaggaagccaccgtggccggccaagcacaagctcacccactttggagcagcatttctcctccccagaggacctcgaaggctgcaacggccctgccccaagccccagaaaaagaaactcttggagggagtctgcgggcttctctgagaaggggcgcagcctgacacctgtgctgtccctgcagtctctaggcctgtctgagctgctcccgtgaccgtgtcctgagtggccacctcctccttgggagggaggccgcggcaggtactctccctttgctgcttgctggcggccttgctagggctagaaagttttctcagcgttgggggaggggctagcgttcttgtccaaagcactcatcctgctgcagggaagggagctgtacggaggctggaagctgcagggttaggcccgagagagcttttgacaagcctggctcttcctgcttcccacctttttggctgaatacctttgggtcctggaggctgccaagggcgcttcgccttgagcaggtcccggagaggctcagcctgcccctcctgggggccagcctccttgcctctgctctgacctcagcagctacacctaaccccaccgcaccctacccagtgtcgatatccacaacccagcccccaggcctgcacgttggagatttctggatccttccctgggagggagaggtctcctaactcgattggacaggagccttcattccttgactcgtgtcatttgggagctatttatttattcttagtatttaatttttaacatcctctcagggaccaggggcctcctgcttttcagaggcccgagtgcatttatcccaaaacgaggcatcttgacatcccctatccccaccccctaaattcccaaggccctaaggtccctcacctggttgctctggaagctcttgctgataggaatgatagcaacactgaaagagcgtgggaaggtggagggtgtcaccagacccacacagagcaagggagatnaaggcagttcttgctgccccttctctggctgtgctttgcctgagggaagagttggcaagaggccagaattctagtttggtttatggggcctggattctggcttgaagaagccatatttggcatgggtgaagtgaaagggccaggaggttctggaggccccttcacttccagtcccatagcggggctcagctatttttctgatcttattcaactttagttgtgcaaaagaaattctaagtgaatgcgcgtatgacaggtcaacgtattaggaaggagccagaaagtattcatactgctactccttatgagatagccaagaagcatcatgtcagtaactgggagtggagagggagttttgttttgaaactatgcaggtatttttcagcatccatttgtacattagtatggttctacaggaccccagctgtggaagtaacaaatttcttctccctccagactcttggatgactacctagatccccagcttaccggttagtttcctccacaggcttccatgagctcagtgtcccaagacagcaaaaatctggtataccctgtagaagcaggggggtagcaaatttaggctctcttcgaaattacttgtacaatacgagtgccttcgcagcttagccccaaagtgctacttatgtttcccaaggtcttttctattcaaatcatatttggtttcaggcccctttatgggcatacggtaacagaaacctccatcattcatatgagacccttttgtcagtggtaacatcttgtacttggaaaaaaaatttttttttttttttttttttttttttgagacagagtctcattctgtcgcccaggctggagtgcagtggtgtgatcttggctcactgcaacctccgcctcttgggttaaaagaattctcctgcctcagcctcctgagtagctgggattataggcacacaccaccacacccagctaatctttttgtattttttttttagtagagacagggtttcgccatgtcggccaggctggtcttgaactcctgacctcaggtggtccacccgcctcggcctcccaaagtgctggcattacaggcgtgaaccaccgtgcctggccggaagtctttaaaaaataaagtgattctactcttctaagcttacagagaccagaccaggtgaatgtaactggggaaaatcaagatggtacctctctgcattatcccgccagacactgtattttatgcattcatgtctaggatacagtgtgaaaattaaaaagtttagagggcagatgcaattgtggcaagtgacctgccaataaagcaggtgcagctatagaagctggcataggtatatccttaatggtgctttctccctgggcttgtctttttgttgtttttttccccctatattcagagctccttgagaagtgataaacacctccagctttctaacatcctccccacaccatctcaccatatccatctcccagcatccatctgcattcagctaagggcgggaaactgacctagtgcctgtgttgcagaccatttctgaggtctccaccatccaaggaggcacagccgtcattactgtcctccatgccttcagcagcccccctcacagctaaggtacataccaccccttctgccgcgcctccacccctggcaccaaggtcttctgctgcttatgtctaaagggatcacctatatttaactgcctcagtgacctaacctctttcttctcatgtgccagatgttaagatgaaggaggaatacaacacatactcaagcctcagcctgtttagttgttttcactggggctcgcttttctgggacggtatttattatcagactggcaagcctaactccataggtttacaggaagtagggatatttttataaaacaattgtgtcctccccacattttgctatgttaatatttgcttctaacaatttgcagctgtttcactttttcctcatttgtctctaagttgaaggctttgttggaggggacagagcacaggaacagccttgacagtctgtaattattgtacagatattttaatagcatataaataagtatattccttttattttgaaacaaaaatgatcagacactgccttttgtgtgtttgctgcctgtggcatccttttttaaaaagactgttacatattaaaatagtgtacatatataaatattacctcttttgctgtacagttgtgatagagactgaagattttattttttgtgtgctttttataagaaaaaaattaatacactaaagaatcttgctgatgtgattgtaatgtacctatgtaacttatttacttttgaatgttcttctgtatctttaaaccttttattaaataaggttttaaaaattcaaaaat

SEQ ID NO: 1691 - DNA, 430 bp, Homo sapiens
tcccttcttttactcttcttctccttctccttcttctcttctctcttattcttctccttctcctccttcttctttttttctttttttccagacacagtcttgtcttcctctgtcacccaggctggactgcagtggcatgatcgtagctcactgcaaccctgaactcccaggctcaaccaatcctcctacctctccagagtagctgggactaaaggcatgtgccaccatgcccagctatttttttggatttttagtaaggacaaggtctcactatgttgccaaggcaggtcttctttgtccttcctaaagaatacagttctggtatttactacttttccaaggatagcctccttactttggctcatgatcatgtttttgtcagcaactacagctccatctttaaaccctctttccccttgaatttttagtc

SEQ ID NO: 1692 - DNA, 305 bp, Homo sapiens
ttttttcagttaaatgtttctacttattacaatgaattatagttacaacttctatctggctttggatatatccacttctgaactctaagttatgttttgttatgcagtaactttattaaccaaaaacaggaaaaaaaaaagtctgatacataataatctgccccattcattagaaattgaggacttgttttggaaacagcttttgaggttcacctaggtagctaattagtcatcagccttgtactatgatcgataggcagggctatgaaacttcttcccctaagagcactgacttcgggggttac

SEQ ID NO: 1693 - DNA, 341 bp, Homo sapiens
ctgacccaaggtagtctaatgatagagacacctggatggccccaggcatactaatggaagagactcctggctgacaccaagcattctaatgatagagacaactgatcaaccctaggcattgaaatggaagagactccttctcgaacccaagcattctaataatagagacagctaatcaactacaggcattttggagaaactcccgatcaaccacagacattctaataatagagacacctgggcgaccacaggcattccaatgggagagactcctggccaacaccaggtggtctaattatagagacacctgggtgaccccacgcattcaaatgggagagact

SEQ ID NO: 1694 - DNA, 190 bp, Homo sapiens
tttaaccaaattcacctttaccaagggctattcaatccatatctgggatgttttaaataaaactatccaggactgtgggcaatattcaaagttaatatttgttgccaatatgtttggagtgcaagataaagcattataatgtctagacatttttgaaataaaaaagtcttctggttaccaaaaggcatta

SEQ ID NO: 1695 - DNA, 409 bp, Homo sapiens
gtgtgggatgctcttccgtgaaactttgtcctgttttgtaaggaaagtcattttgagtttgaaatgctcttaaactatagtttataattggaacacttaatcattctggggaattctttcctggctaataatctctcaagatggttgagaagtggaaaaaccataagacttaggcctaactcattattttgatggtggtggttcacgtggaagcctgtagcttcccttggttgtttgtgtggaatccatgtacattccccaaggtggttctgtgctgtctagttattgctcctgcttggtattgtgtgtctcctatgtgtgtgttattaataacattgattaaaacatataatggctttcttgtgaataagcacagtcaaatctaaaattgtaaaccatttgaagattt

SEQ ID NO: 1696 - DNA, 861 bp, Homo sapiens
tagaacatttgctgtcagccacatattgagatgacactaggtgcaatagcagggatagattttgttggtgagtggtctcatgccttgagatctgtggtggtctttaaaatggtggccagccagatcaaggatgtagtatctcatagttccggactaaatactggctttccactttaggtgatatttttcttattagaaaaatattataactcatttattgtttgacaattatagattgaaatttcctaattctaaattttaagtggttcttcagtttcagtgctttatgttgtttgttgttggtttggcatggcattacatattatatgttctagaaacatgtaatcctaaatttaccctcttgaatatgatccctggatgatatttttatcataaatgcagaataatcaaatatattttaagcaagtaagtgtcctccatcagttctgtattccagacatgggaagatgtacagttgctgttgtgtgatcaagcatgtctctgtgtagttccagcaaatcaagctgagctttgaaaaagtttgagtcttagttttgtgaaagtggtttattctcaaaaaaaaaaaaaaagaaaaagaaaaagaaaaaagataagaagaaggagtaaagggactactcctccttgccaaatgtgctaaatatcattttaggagaagaaagtggatttattgtatttcccttaagattgtgagggagtgtggatacagtagaacgagccaacagtttctttataataaatacggtctgcaataaattatttcactagctgtaaaacctttccctagattttagtagggagttggtttctgttaatatctttggtgctgtggtggtaaatgct

SEQ ID NO: 1697 - DNA, 603 bp, Homo sapiens
  misc_feature (556)..(556): n is a, c, g, or t
  misc_feature (561)..(561): n is a, c, g, or t
tagaacatttgctgtcagccacatattgagatgacactaggtgcaatagcagggatagattttgttggtgagtggtctcatgccttgagatctgtggtggtctttaaaatggtggccagccagatcaaggatgtagtatctcatagttccggactaaatactggctttccactttaggtgatatttttcttattagaaaaatattataactcatttattgtttgacaattatagattgaaatttcctaattctaaattttaagtggttcttcagtttcagtgctttatgttgtttgttgttggtttggcatggcattacatattatatgttctagaaacatgtaatcctaaatttaccctcttgaatatgatccctggatgatatttttatcataaatgcagaataatcaaatatattttaagcaagtaagtgtcctccatcagttctgtattccagacatgggaagatgtacagttgctgttgtgtgatcaagcatgtctctgtgtagttccagcaaaactaagactcaaactttttcaaagctcagcttgattngctgncgacgcggccgcgaatttagtaatagtagtcgacccgggaat

SEQ ID NO: 1698 - DNA, 1819 bp, Homo sapiens
aatctcgctctgtcactcaggctggagtacagtggcgtgatcatagctcactgcagcctcggtctcctagggtcaggtgatcctcccatcttagcctcctgagtagctgggcatgtgccaccacacctggctactttttaaatttttttttttctgtagagacgaggtctttctatgctgttcaggctgaacttcatgggtttattggggatggctaatggatgacattggcggtggtccttgataccagataagccctcagtgtgaagcagctcttatttttccttgtcttgagattgctctggaatggaaattaggcttttttgaaggtgtgaccctttttgttcatttcttcagcagttactttttattttttaaatgtttgacacacagtctctgataaatgatcattcaccaatcaccgattactctccttgctctgttaagtgtgacactgtccctttgagaatctggcgacagctatgtatcccatcaccacacaccccaaaaaaaaaatttatgtctggttccaggagttaccttttatgagaagtccatctgtgaagaccctggatgttcagagaacttcctgggaaaacactgaaagaaaataaagaggccgggcccggtggctcatgcttgtaatcccagcactttgggaggctgaggtgggcagataagctgaggtcaggagttccagaccagcctggccaacgtggcgaaaccccatctactaaaaatacaaaaattagctgggcgtcgtggcgcatgcctgtagttgcagctacttgggaggctgaggcaggagaattgcttgaacccgggaggcagaggttgcagtgaaccaagatcatgctagtacactccagcctgggcaacagagtgagactccatctcaaaaataacaataaataaaacaaaataaaataaatacaatttctgtttctagcccctaagtggtagcactgggtcttgttccctgaaaaaaactaggctcagaatccactctcatttcatctcccctgatttgatctgaaaagattttgtttagagtactacatgaatatattataaaacatgggacaatcagaattgatagtaagaaggcaagtggctctatttgtacttcctctcaatagctcctaaaggtaatgctaccattttctgtttgtacatagtcttccagactttaaatttttgaacatataaatattatcatcttaaagacgtatggaaaaaaccattttgaataggttattccaaaatgtaatttaacagattgctctggaggattgtttgtttgtttgtttgttttggagacagagtcccgcttggttgctcaggctgcagtgcagtggcacaaacacagctcactgcaacctctaactcctgcaaacacagctcactgcaacctctaactcctgcaaacacagctcactgcaacctctaactcctgcaaacacagctcactgcaacctctaactcctgcaaacacagctcactgcaacctctaactcctgggctcaagcagtcctttcacctcagcctcctgagtagctggaccatgacacctacctaactttttattttttgtaaagaggggaatcactatgttgcccaggctggtctcaaactcctgggctcaagcaatccttcctcagcctctcaaagagttgggtttacaggcgtgagccaccgcacctggctcctggagcatttctgatgtgaacatgtgctgatctaacaccactccttttaccagctgcctgttctagagcaaaccatcttttttgagcattccactttggctaggccctta

SEQ ID NO: 1699 - DNA, 1934 bp, Homo sapiens
tgcatttctaacagcaatgaatgagagttcctgttgctccacatccccaccagcatttggtggtgtagtgttttgaattttggctattctaataggtgtgtagtgctaccgcattgttttaatttgctgtccctaatggtatatgatgttggtcatcttttcctatgcatatttgctatctgtatatattttttggtaaggtgtctgttaagattttttccctttttaaaataggatttttttttattgttgaatttaaagagttctttgtatattttggatacatgtcctctatcagatatatgttatgcagtattttttcccagtgtgtggcttgtcttttcattctcttaacaatgtcttttgcagagcagaagtttttaattttaatgatgtccagcttatcagttttttctttcatgagtcatgcctttggtgttgtatctaaaaactcaatgctagaccatggtcacttagattttcttgtatgttatcttctagaagttttatgttttgcattttacatttatgtctgtgatccattttgaggtaatttttgtaaaagatgtgaggtccatgtctagatttttatattttattttattttgttttgcacgtcaatgtacagttgttccagtactatttgttgaaaagaccgtccttttcccattggatcgcctttgcttctttgtgaaagattagttgaatatatttgtgtgggtctgtttctggactcttgtgttaatttgctatagcttctattagaaagtaccacagactaggtggcttatacagtggaaatttattttctcggttctggaggctagaagtctgagatcaaggtctcaatagatttggttcttctgaggcctcactctttggcttatagttggctgttttctcctggtgtctatacatggtctttcctctgtttccaaacatgaggagtttgggattgtaatttggagtcagatatatagcagagaactaggggagataaggactgggagaagactatcgagtctagttaggagggtataattgctgttcagaaagagtagttggtaaagcatcctaattagaaatgattgagaaggcaggaggaaatggtgacattgtctgtggtctcttttcaaggagtttgatcatgctgctttcttctagtaccatagcatttctatcttagtgtttttctcaggagtatttattgagcacccatgctgagctgtgtaccatggctgacagaggatgaacagaatgtaatccctcttctcaagttggtggcagactagatacgggaatagtatggagtaattatagcgttaagtaatatggggtattttgtgattaagtattgtgtaattcccaataaaagttcagaagatcagaaaaaatgcagcccatggccaaataaaggctttttagaagagatagaatgaaagtttggctttaatgtgttgtttagatttaaatggataaagtggaagggcactgtagttgaggtgaaaatcgaagaatgaagtcctggtagggggaggaataagcaagaagagatcatgcaggaaacgggccaaactacatcaaatgatttgtattggagaataatagagaacattagatattaataacaatagttataatcatagcagatgccatttatagagtatatactatgtactaggccttattttatttaagtgctttataggtattctcattttaattctcttcacaaccttacgaggtaggtattgttatttccattttacagatacagaaactgagacacaaaaagaaaggtcaagaataggcccaggtcaggtgcagtggctcacctctggaataccagcactttgggaggcccatgtgggtggatcgcttgaaaccaggaattcaagaccagggtgggcaacatggcaaaaccctgtctctac

SEQ ID NO: 1700 - DNA, 464 bp, Homo sapiens
tctcccctatctcatgatggcatagacgatttttccatttctaaaacaatctgacatttcttttctagtgtaaggacgttatcatgttaaaataaacttttacaaacacccccaaacctgcccattgccccagtctgatttaatctaaccacttccttcatccccttgcagcttgcataactaaacaccatcacttccccttttttacacattttactcccttgaccttccccttctccattcatctcttcctagcttatttttctttgccattcataatacctactgtcaatctgtctttttgcaaacattctttttgcccctttgtcttttggttgtacccatctggaaatccacagtcctataacaaattcagatatccattatctctacgatcagatcatcatagcaactgcctggctggaattgaggatccagttgaagcagtaggttgagaacataca

SEQ ID NO: 1701 - DNA, 344 bp, Homo sapiens
acaggactctcttggagaggagctaactactttcctctctcttaatacccagaccctctccctcagccctgacagcacgttacagaatgcattcacttagtgtgtgaagagctcaccacctccctttaagatctattcttgttattcatacattgcaaatttgtacttttgtatccacaaggaagacattactaacttcaagaaaggcagtgtcaatgaggagcaggaaaatacagtatgatacaagcctgccaatgaaagaattatactcagactctatgcgctctaactgttaaacaaaatttgaacctttgaggaaaaaatattggggattctgatgagtg

SEQ ID NO: 1702 - DNA, 365 bp, Homo sapiens
taacctgagttgcaagatgaatttaccacacagtgacagactttaaatttttggttttaatacacatttgcgtattttaaaagcaaatgtaccttcagcctgtgaaataatatgctagataattacaggtactttgacttcagttatgtcttagatttattataactacagtgttgattactacgaagacattgctttgcagagggagatgtctcaaaatgtcacaattcagtgttttattatcagacagttgctaaagtggatagttaaaaattgaggcctggcatggtggctcacacttgtaatccctgtactttgggaggatgaggcaggcggatcacttgaggtcaggagttcaataccag

SEQ ID NO: 1703 - DNA, 353 bp, Homo sapiens
ccattgcactccagcctgggggacagagcaagactccatcttggaaaaaaaaaattcagatttctagcacctaccctctgagattcagattcagctggtttggcttgatgctagaaagccgcatttttaggaagcaccgcagatactggtgctccacgagactcactggttggttagaagtatagattctggagtcatgaagcctggttaagttcagtatttgctttgccacttatccactgtaaatccttggccaagttatttagcatctcttaatttcttcctctggcttgtatcttgtgagaactaaccaagataattcaaataaacatgtggtacacttatttgtgata

SEQ ID NO: 1704 - DNA, 220 bp, Homo sapiens
ttggagacatgattaagaagtaagaagagatgctataatcatgacatttctgtgaccatcagagaaagagaggaagtggggagaagtttgggggaagcctgggtgacgggcaggaatgctgagctgtgggctggaggctgcttggggcatcagacacctctctcctttctccctgatgcggcactttccttaatgtgcctctgaaaccatcaagagccat

SEQ ID NO: 1705 - DNA, 469 bp, Homo sapiens
ttttgaagtgatcaaactaaaagagaaaacaaagctcatggctgaagtcatcacacctgaataccatcttgtgatgtcatggttttattggtatgaattctaaccaagctgtgggcatttaagtcatatttgtggatcagaagccatagatatttgcgcttctcataggctgtgcttttctgatactttgatcattattatatggtaactaacatatattaatatattaatgtattatatcatatttatttagaccccagtatggatactaaatgggataaagcatatgccaagattttttaggtcttgggattatttaatttttttagaactggcgttcattgattgtcattcacgtttctcttcacttccttatgaaaagtttctcaactcttctctcagtattttcttttcccctgtgagatatgtttccttttacactttttcattcctctaccaaatagtaata

SEQ ID NO: 1706 - DNA, 1508 bp, Homo sapiens
caggcctggaggagaaatgacatctctcagccctctcagctgcaccggaccaccaacagttgtgattcaatgggcatgaattgctgtgtgatgctggggaggtgtttgtgattcttgacaaagtcatttgaatccatcacttcaagagagtgaaaggagccccgtctgatctgttggtgttgtaggaagaaacatgagtcagcaaaacaccagtggggactgcctgtttgacggtgtcaacgagctgatgaaaaccctacagtttgcagtccacatccccaccttcgtcctgggcctgctcctcaacctgctggccatccatggcttcagcaccttccttaagaacaggtggcccgattatgctgccacctccatctacatgatcaacctggcagtctttgacctgctgctggtgctctccctcccattcaagatggtcctgtcccaggtacagtcccccttcccgtccctgtgcaccctggtggagtgcctttacttcgtcagcatgtacggaagcgtcttcaccatctgcttcatcagcatggaccggttcttggccatccgttacccgctactggtgagccacctccggtcccccaggaagatctttgggatctgctgcaccatctgggtcctggtgtggaccggaagcatccctatctacagtttccatgggaaagtggaaaaatacatgtgcttccacaacatgtctgatgatacctggagcgccaaggtcttcttcccgctggaggtgtttggcttcctccttcccatgggcatcatgggcttctgctgctccaggagcatccacatcctgctgggccgccgagaccacacccaggactgggtgcagcagaaagcctgcatctacagcatcgcagccagcctggctgtcttcgtggtctccttcctcccagtccacctggggttcttcctgcagttcctggtgagaaacagctttatcgtagagtgcagagccaagcagagcatcagcttcttcttgcaattgtccatgtgtttctccaatgtcaactgctgcctggatgttttctgctactactttgtcatcaaagaattccgcatgaacatcagggcccaccggccttccagggtccagctggtcctgcaggacaccacgatctcccggggctaacggaaggacatcctgttcaggggaagaaagccctggccctgaattctggtaacggatatcgcgttccagggttttgatgtggtgggatgatccgcaccatcttcactgatgtgcttccctttgatgcccattgagtgccagctttgctcattataccccaaagaccttttttccactgcccagacagcttataccacccagtgttcagggatctctgaagaacccacagaccaggtgaattactgatttctaagtccaaaaactatagagcagaagaattgagaaagagaatgagaccatgtcaacaaggctgtttccaactctccccattttcctgttctactgggaggttctg

SEQ ID NO: 1707 - DNA, 360 bp, Homo sapiens
gagtctcttttttttcattttgacactttcaaaattgagatgtatcttacggttgctgtgatcatttgaagaagtacttactgttttgctccctataaagctattattaaattgatggtatatcttaaaattattggtgtccttgaataaaggaactatggtaagccatgtgttttatttaaaaaatatagctacatagtttatagaaatatcatagtaaatcacagctttaacatggggtatacaaacaatcccaatttatttatgaagtgggaaaaatgtaaattaagattatattaacaatctatatgaacactgatattgcttaggtaatgatctaaatgtgagaagagaataaat

SEQ ID NO: 1708 - DNA, 1045 bp, Homo sapiens
gggagggaaggaggaaagagacagaaagaaaatggggagagaatagcaattacaacaatgagagagaattggataagggagaaaaagaaatgatcaaaaataaaaggacagaaaaaggttctactgaagtagagtcattgactgcattgggatacttgaaaattatttagtgcttattgcttagttcgagttcaatctgatttaaaaagtttatgagattctggatgagttgggaagagctattttgcactttgacttgatagtgatgagtgcccagaaacgttgagatgtgggccccaaaaggaaatgattctacttatgaaaaagaaacatcccgttgttttgtttcataggtcttaaccttatttttaatactctcaacatacctgtatagaatgtttatagatttttctctctaaaatttctcatatgattccagtacattatttttagttttaagttgaattctgagggtagcaccctaggatttttgcctcattttgaacctggaagtctacttgattgagcagataaatagggggaaataggaattcatccttagtgaatgaatgtgtagacagctgatatttaaaatttagctttaggttcatgtcatatgctaactctagaaaatggagcctggcaaagttttggattctgtctgctaagagggttctgggctcaaaggtccctgctgtcagtctgtagtctgaaaaggatacgtgttgccatgtaaactggctgggcagtatggattgccctctggggatcctgactcattggctctaattcacgtggtgcatgtcaatcagctgctccctgtggttgtggccagagggccgccataatttctccgggtcaatggtagaaaattgattttcttatgtatactgctaccagaaaatgaaacatttgctttccatgtaatgcaatattttatctgtacctggtttggttcaggagtcaatgtatatacatgcttaaatgaaaacaactcttcgtcttcccctgtcactttttattgtgaaaattttcatacatgaaa

SEQ ID NO: 1709 - DNA, 452 bp, Homo sapiens
gatccgccaggcaaaactgaaatgacattttaacactaccacctataaaataaaagcaggaaggtaaatctgactgaaatcaaatctagtaattattttaaaggtaatattccaaagccaaaacaaaactgtggggaatgggagaggtctttgtttctttctgatagatgatttaaaatgatctgctattagggacacttcatcccttagatgacctatggggtcccctgcgttactaacaaacagcagcaagcgatcagtatctaactccgtgtcactctctgagagcactgtggcatcaagaaaggtgtcccaggagacctggcctaggcgccctctctgtcgccaagttaattgcatggccttgggcaagtcactccaccccgaaagcctcagtgtgtccatctgcagaatggggctgccacctcctctcacctgatgttatggagatg

SEQ ID NO: 1710 - DNA, 442 bp, Homo sapiens
atacagccttggaaaccaaataaaccacctgctatgtcttctccagattccctttctcactccccacctctccagactattcatttatatggacaaaccccttctctcctcactttctggtgaataattacttattaacacctgcaaatagttccaaataactggtagagaatcctaggatccaaatatctgtagtgaaatatctatctcgggttgatttccctgcctccaatgaggtctacctataagctgagcccatataatgaaagaagctttaataattcttcaggataaaggtgtgtgtgcacccatggatttaaatttaatagtttttttgtttggtgttctatctatgcttaggaaataaggacaatccttagtattattccttttgttactgagattttttggtctaactttaaaagaggggctgccatatgca

SEQ ID NO: 1711 - DNA, 431 bp, Homo sapiens
gctaggataccatggtaccttgataagaattccagattcaaacaacagaaacaaaagtgacacagtagtccccctcttgggcagtcttcaagcacatcttgaagagttatatagttggtctttgaatatcactgccttttggctgtttcttcgatttatataaaagaggccaatttgaagccattcactcagtactgtatcactcacatctgttgtaaaaggcattagaatctgtggagtgaggaaaaaacagagcctttatgaaatgtgcgcttgaaatgagagatgtttgtcttaaatttggacaggataaataagagacttacatggaaactttggaagctgttttagtgaaatttgcccttaaggtcttgtcttattccaaaatgatgaggcagaatgcccaaatgttagcatttgacatgtgaaga

SEQ ID NO: 1712 - DNA, 361 bp, Homo sapiens
taaaaaacgggtttcgactctccagctcttccaggccaatgtggatttctagcttcttgagaatggttgatttagcttcccaagacctcagtggttttatgaaataccgcctcatttctccagaatgatttctacttaacaaaacacctccatgcactgtttaccgtgctcattgtgggaactgctctgatggggggatcagtccccatgatgtcacctcatgactcctgggtcacacagccgctatagatggtggcttgtctgcagaaagggtcccagttgagttttgttttgttcaatttcagtaaccatgcttgtatcacagtggggcccagtggctcctaaggtgagccttctcatt

SEQ ID NO: 1713 - DNA, 501 bp, Homo sapiens
aagacagagtctcacggccacccaggctggagtgcaatggcgtaatcttagctcactgcaacctccgcctcctgggtcaagcgattctcaggcctcagcctcctgagtagctgggattataggcacctgaaaccacacatggctaaattttgttttgtatttttagtagagatggagtttcaccattttggccaggctggtctcgaactcctggcctctagttacctacctgcctcctaaagtgctgggattacaggtgctctactaaacatcagaagcttcttgttcttgggtttggtttactcatcaaagaaggggtggcatgcattatatgttgtgaaattttctaagttctaatatcatattctaaaaatatatagaaactatttcagaatgttaagactataatactaaaatgacccctaatcctgccactcaaatgcacaactacttccattgttgaactaatgcctttaaggcgcttgcttttctgtagcacac

SEQ ID NO: 1714 - DNA, 363 bp, Homo sapiens
gccaaaaagcatttgaatagatgctgtactatactaataatcaaagaaacacacattgaaataagaatgcaagttcctttttttgctatacaaaatgcaaagttatctagtattgataactatggggatcaaacattcatatactgctaaggttaaatgggtataattttcttgagataaatttggcaatgtatttcaaaattttaaacgtgcatgctcttagggttatgctcccaagtgtgtaggtacaaatgatgcatggtgcatcaattattttgtcttggaatttttcctatgcaaatagttagatcagtaactcaagatatatgaacaggaatattcattgatgctttatttataagt

SEQ ID NO: 1715 - DNA, 334 bp, Homo sapiens
attttagtcattgtccattattttggtaaattggattcctcaaaagtgaagaccttttgaaactatgagcctggaaaagaggaccttttaattaagagcattctgctttgatgacattttcttctaaatgaacaataaggcctatggttagcttggagatagcaagtactcgaaattttttgctattttgaataaagcactatcaacttaatgaggttttactgcacatactgttttgtcatttgaaaatctgaaagcacacaaaaaaagtcatcattagcctcacagatcctcatgtgcaatagctttccctgaatgtttttaaaggatgtat

SEQ ID NO: 1716 - DNA, 589 bp, Homo sapiens
atgcccctttcttctaagttaattgcagaagaaagttgtttaaataataaaaaggtcaaacacaattagtaaatattctattgctcaaattccatgatctaattatatacagtacctaattaaggttattatgagaactatgttacacacttattcttaagagatgcatttctgttagatattcccaggagagtttccaaggtggcagttctagaaagagaacagtatgagaatgaaaacaaaagggctagacacatttctaaaaagtagtggaaaatggcagtctatcattcttccattccattgttattccttccccaaagacttacctatcccttgaggaatttaacaagggttgccaagggtgagaaaagtatgtacattccagttaatactataacttatacaagaatatttataactttatatattctaaaaccattgaattttaaagctgagagagtgctcattgtttatctggagttacttccagttactgtagaaatctgtttaatcaaaggaatggctgttactttgtgatacgatttatttcattttttgacagctgtagttgttacaaagtgcttct

SEQ ID NO: 1717 - DNA, 602 bp, Homo sapiens
acgtgactcagttctggtcaccaaggtggtggaagagaagttctcttgaggggcatctgggaaagattcttctgcctgataaaacaggaggtaagcaagggttctgctcccccatttgtttctgcctttgaacgtggctgtgggaagacatgatgcttagtgttgctgcagctatctcatgaccttgggcaaaacatcccaacacacaggagggccaaacaagcagtcagaagaagcctgagtcttgtgggtgttgttgagcagctgaacaaaccctaggatggcttccttccagacttcttaggattgcgaacaatgaagctctattgtttaagcaaggtatcgatggctattttcacttgccactgaaagcaccaggacagagaatcgtctttctaggaatacagccacaaaagccttcattatggtatatgcacataaagaatataaaagtttcctttatgtttctctttaaaatatagctgaagtctgcctcaggcaaaaagacaaacagaaaacataaatgcatacataattcaagaacaataaatatttattttaaaatgaataaatgttctgcaggatattgtaaagttttctca

SEQ ID NO: 1718 - DNA, 344 bp, Homo sapiens
cacttgccctgttatgctttcatctcccttgggaagggtttgtttttgaccagtgttgtggctttctagatggacccgttattatgaatgtgagtcctgtttcttttacttttcatattacgtgtacaatgtagttgagaattttcattgataaagcttttcagacaaaccattcagcatacatgtttttctcatttacattttcattcatgataagccagaaaatcaggctggggtggtggctaacacctgtaatcccagaactttgggaggttgaggtgggcagatccattgagccaaggagttcaagaccagcctgggcaacatggggaaacctcgtgtct

SEQ ID NO: 1719 - DNA, 449 bp, Homo sapiens
cacaaacttccagggtggagaagggaaggtgaggggagcctctgagcctctcctaaaagtgcttcctattttcctttctcacaaaagatataatagaaagaaacttcaaccccaaagcaggcaattagtgatgaggaagtactttccaacagccaggagcgtgaggctgagaagctggagttaagttggtggagtgctgcagggcagaggggctgctccaggagacctccagagccctggggtctctgtggggctcgattgcccccctgtctacccattggctcacatccaggtggctgggggctcccaggaggtaagaaggcggactagagcccccagcaggccagctgagttgggggcggatgctggcttcctgtctgatcggctactgttttactccattcttcagactgctcaaggaaaattgcctccctaattggctcttctct

SEQ ID NO: 1720 - DNA, 424 bp, Homo sapiens
aaatattcagtaaatgttaactactattattaaggcaaaatacagaaaagcaattagtaggctaaatttactactcagtagttagggacaaccataaacttaatgtactaaaaagtctttaaaatttaggtatatcagaaagaaaagttagaccttaaaacatgagggcttatgctgctgcaatgcctcctggtagaacatagaactatcaagagctagacatatgctccttatggtcccaggatcataatattatataacaatgaatgaacgcccaaactggcacacttggctatatttagccacaattattgcatttccatttattgaggctagccgtatcagaaaggccagtgaagtccttgaggtctcagccccctattaggcttcaagtaaagatcaggtgctctattgagttatttaa

SEQ ID NO: 1721 - DNA, 384 bp, Homo sapiens
tccaaaacacaaagcactgatttgtagttttctctgatttacatgttgtcagtactactgccttggctaatttcaagctaccaaggctttaacaactggtttgcaaaattctcaaggatttgacagttgattctcaggagccagtatgagctggttgcctcacactttgcttctaactcttgggggcaatgctttccctccactgttgtttctttccctttggaggggagtaagtgatgtaacacctgcttctttccacccctttattatttgctatcccaggggagctaatagtcatacccaagctcttccttttttcatcataggagttaggccaggtgcagtggctcatgtctgtaatcccagtgctacattgtaggtggt

SEQ ID NO: 1722 - DNA, 464 bp, Homo sapiens
gattttcaattggttcctcgagcatccccatgcgtgttggcagtatgtctctctgcaggccttcccttcctgaatgttccaggattaggcaatcctgcttccacacctttcccttgggtgcctgagaagaacgtactggctgctgctctgcttgctgccacagggggtcattgttgaatagggtctggtgcaatcttgtggccttttgtgccctgaagtttcattttgaggagttaccttcttacaaatggaggcagcaccatcccgtccatgtttagggctagacagtcttaatccagccgtgcccagctaccttgcagacgttcagtcataacagtcaatttgggtggctcctcctacaattttaaaatttattttatttattattattattttttgagacagaatcttgcttcattgcactccagcctgggcaacaacagcgaaactccatctcaaaaaaa

SEQ ID NO: 1723 - DNA, 635 bp, Homo sapiens
ccatgatcatgaggcttccttagccatgtggaactgcaagtctaattagacctctttcttttgtaaattgcccagtctcacgtacatcttttccagcagcgtgaaaatgaactaatacacctgccacaagggctgcccctgaaccccgaaccccaagtccactttcttgacaagtaagaatgcttcaacttttacctcaatgctgctgatgaggtcttgtactctgatgaaagcctgtggggaataataaaatcagctgccttcttggcttcaaaagtgggtgactgggtgggggtgggaagtcaagctcacctagacagtgagccacagaggagaggaagggagcaagcacaaattaatcatcgtgcgtgcaggaggttataccacccagtgaggcgcggctttatccccaaaattggatcatgcaaagaacagcaaagacatcccggttgcatcagtcattttgggatcaggtaaaacaaaaccgcgatgccacagtctgtggcggtgcctccttgggagactctcgagccaaagaagaagccagtttgaccctcggcggggggcggggggggcgggcaggcagcatcacagcaagagagagagagatgcatggactgatgagagactgccta

SEQ ID NO: 1724 - DNA, 474 bp, Homo sapiens
atcagttcaatccagtaaacaattctctctctccctcttactcccctcgcacacatgcacacacaccccacagatataatggattttagtttttaggcatcaaatgacttttgtgccttattaatattatccactgaatcaaaaacagcaagctgaaaaattcatctcaaggaagagaaaataagattgttgggaatggtgagaaaggaaacatggtttttgaaaattgattccagggaagataggctagtttgaatgccagtagggagccatcagaagaagtagttttacactgatttttaacaatattggagttgcttaaggcaatgcaatagagaggcagtttctgcccttttaaagcctgacttcactttctgaatgtgtgttctgatctagcagggttttttttttttttcttttaagatggtcccagcttgactgcattctcagatccatcagataaacgttagggct

SEQ ID NO: 1725 - DNA, 373 bp, Homo sapiens
caacatctcatatctcctaccaacagtctatccccttccagcatctcatttctccttccaacatctcaaggaagagaaaataagattgttgggaatggtgagaaaggaaacatggtttttgaaaattgattccagggaagataggctagtttgaatgccagtagggagccatcagaagaagtagttttacactgatttttaacaatattggagttgcttaaggcaatgcaatagagaggcagtttctgcccttttaaagcctgacttcactttctgaatgtgtgttctgatctagcagggttttttttttttttcttttaagatggtcccagcttgactgcattctcagatccatcagataaacgttagggct

SEQ ID NO: 1726 - DNA, 434 bp, Homo sapiens
ctcaccgtcctatggcagggcaggtaatgtccttaatgagatgggcttattccagtggagcagtggtggggaagcaaaagcttggtgttctctcctcatggttgcgaaaatattcacataaaagattcactagctactgttaataattgaaggactttcctcaaaatccatgtattataacggtttaatatactaaaatgatttggaggaaatcggcctcagcattggtgaatgtgttgacatatgaagctattatttttataattcttattttagagatggagtctcactgtctcacccagcctagagtgtgttggcaagatcatagctcactgtaacctggaactcctgggctcaagtggtccttctgcttcagcctcctgattagctgggactgtagtcacatgctaccacccatggctaattaaaaaaaa

SEQ ID NO: 1727 - DNA, 251 bp, Homo sapiens
ttcctgacttgatcctcttgcataatacggtgtgatttcctgtggtgaagcaggctgggaggggaggtccagggaccccacacaacattgaggtcccatctttgtcttgatgataaccccctaaccctcccaaggcatttgatttgaaatgtaatttgggatcactttcttggcctcctccagtgaaagagatttgaagatgatttctaaactgtggcattcttgttactaaaaaccctcctccaaggaag

SEQ ID NO: 1728 - DNA, 331 bp, Homo sapiens
ttttccggtcacttttggttaaatatgtagccaagtatttttttccacagtggcccatgatcctatttaatcaaatgttcaaacctcctaaatgatgccttttgtaccaacaactgtctttgagatttcccctaaggggccctagaaaatcaaaattccctttaccttgtaaaagagagatgttaaaaataatagtttatttgatcaaacgttatgggtcatatggaaagcactgtcaaagccagagaggcttaccctccctaagtttaagttaaatttgtataggtaaaatgttattaatagggatattttggaagttctatgaaggtat

SEQ ID NO: 1729 - DNA, 428 bp, Homo sapiens
gaaaatggaggtgatctcagatgtcaaaacacttccctgtgaatattactattttggacactggccattttaaaaatttcaatattcatttttttcctcaactgctatttcgtattcctgtggtatttattcaccaaacatgatgttaagattatgaaaacgatgaggagtcaaggtcttaattttgctctgacacggaatctattcctatttcatatacaggttggctgttattttctagcagatgctttcaggttgatgcatataaaattcacacactgtgtagaattaagtagagggggaaaggggaataggaaaaaaggatgaagggagaagtgagatgcttatttttttttgacaccaaaattgaatctttcagtgtaaggatttcaaagtactgacaaccattctcccatttgctgggtgag

SEQ ID NO: 1730 - DNA, 3746 bp, Homo sapiens
  misc_feature (1890)..(1890): n is a, c, g, or t
  misc_feature (3476)..(3476): n is a, c, g, or t
  misc_feature (3738)..(3738): n is a, c, g, or t
ggttggcagtggtcacgtcgcttgtcaaggcacccaggagtggggcccgagtggggatttcaggacgtgggctctcagggggagggaaagtggctaaccaggacttttgcaataccaaaatcagccacgcggtgtcatcctcctcccaagaggtctggctggggcttgcgggcagtttagggttggagccaggggagaagtcacagaagaattgctagaggtgaagttttgcattttgtttgcgtaacagccccacaccctgccctgcgaagatgcataaattagcccctggcccttccccacggttccttccttccctagtgtcttcccgtcactccagggactcccaatatggtgatacgaggcagcctgggggtgggggcagaaggaagtcctgccaacattcactgtgtgaccttgggcatttctctggctgcagtctccggtggccctcacattcgatggctctaggttccccagctgacctggcctgagggcttgggttgaggagaggatttgaccccatgtgaacagaaggctcccagggtgagtaagacatggccctggtttcacctagatctcagcctggccctgctggtgtgaaccggaggggagggtgagtggacagactggtttggcagctctggctgggctctggagggtggggagtttggtgggaagaaagccagggctacactgtagcaggaccagcaggtgtcaggactgggacatggaaggtgcaggggccaggcccagatagggagaagggaggaagactcctgactctataggtcatgtgtgcagcctcagcaaagggactgggatctccaggcctgggaggaggctggggctactgggttcactggtgggagatgcaggagtgaagccactgtctgtgctttggagtcaggagctcatgatggcatgaggttgatagttcccctcatccatccattcacccacccaaccagggccacccgatatggttgtatgggtttttccctggctgagggggcatgtgtggaccaaactccagctcatgtctgttcactgagcctgactcagtgggtttactctgctcccagccttcaagtcttggctacaacatggcaactctcttgatgagtggctctgggtgataggtggggtggggcgcatggaatgtcaaggccctggattcccagtctccatgggacttgcaacattgaagaaagttctgctggaggcagggggcagtgaggaagctcttttagatctggagacactggggcgtttggcctgtctccccttggttgcctggacctatagcttgggccgcccttccgttttcctccctcttgcatttcccatttgatgtaatatggccaaaagaggtgggaaagagaggaaaggaacctggggtctggtcctggttttggaagactcaaagatgaataaggcagataggaaactaagagggtggacatgcgggcgtcatagatgtacaggcaaaggggttcctccggacctgtgaactcctgtgaactcctgcatatgaaccctgtcctgggtctctggggggctgctgtgaggagcattgaggttctgtgtgcctgtaagatgggtcctcatgctagggatgaaggctctgtgtgaaagatgcagagacagatgagacaatggcaggagaacaggtgcaggggcgttgttagtggcccaggctctacttctggccctgcttctcacaacctctgtgatcttggataaatcaattaataactcaggcctcagtttcctcatctatgattaacagggctggaccaagaatacttgctgaggccctgacagtggggagggcctggaaaactccctggttggagtctgcagaggtaggatagcttcccccacgcnggctgctgctcacctcctccgcgctgcgtgcagccatctggcaatcatgaactgagctgtcctctgggtcagatgctgtgccaggtcctggtgctgagagccagccccttacctgggaagacagacacagtcagacaatcatggagcacggtaccaaagctgacacaggtacgtgcgtgcgtgcgtgtgtgtgtgtgtgtgtgtgtgtatgtggagggccgtttctgactcagtagagatgttcttgtcaggcttcagcagggaaggcatgtgcaggttgggtcttgagggatgtgtaggagttcctcagtccaaatagtcggcttcccacaggtctctagggaagtgctctatgggagtccatgtgcacaggaggccccagagggaggctatgtggactcagagctttgctcaagggctctacctcccaccaggccgaaacccacaggaagataccaggatggcagctcagcagcccgagggctgccatcagggcctgatctggggcccagacttggataaaacttcacttctcaatgcctctggtgagcctggaatgggggacagtcacctgcagtttccttagggcaggatgcacctggaaagacgatccgtcctttaacaggacaagcctgtgcagaagccggcacccactggatttggggaaaccttgtttctaggaactctttccccctgttacttcactggggaacctagcttctgccctgtgtctgagggcctccttggagccaccagaggtagcctggtagggtgggaagaccctgggtttctagccctagcttgctattaatacaacctggctgtgtgaccccaggtgagatgcttaacctctctgggtctggctttcccttttccctaaatgaggaggtgggattatttaatgagattagaggctctaaactgtgttctgaaggagctgtaaggtttttggaggagctttaggggccaaagagggtaagaaagagatgaatccaagggaatcttaaggggtcagggctctgggacccctgcccacctcagtcagaggagctgtggttttaggagttaaatccatcaggaggcaggatcctgtggtgatcccgtccttgacttagatgttctgattcaaatccccactctgacccttactagtaagaacttgggctgattgcttccccctctaagcctcagtttccttaattttaagatgggacaaaagccgggcacagtggctcccgtctgtaatcccagcacttcgggaggctgaggtgggcggatcatctgaggttgggaatttgagaccagcctgaccaacatggagaaaccccatctctactaaaaaagaataccaaattacccgggcatggtggtgcgtgcctgtaatcccagctacttgggaggctgaggcaggagaattgcttgaacctgggaggcggaggttgtggtgagccgagattgcgccattgcaccccagcctgggcaacaagagtgaaactccatctcaaaaaaaataaaataaaataaataaataaaaaataaatgggacaaacagcagtacctccctcatcaggtactgtgggattaantgagattatatatatatatatgctgggctccaaacagagcctgatatatagcaagcattcagtgaatcttaaccagcatcattgtgattccacacaggagcccatctgcttgaggaatttagctgtaaaaataaaagtttgaacactactggatgggatgatctagaacagggtgtccaatcttttggcttccctgtggcaccttgggaaaagaagaattgtcttgggtcacacataaagtacactaacactaaccatagcngatgagct

SEQ ID NO: 1731 - DNA, 201 bp, Homo sapiens
cagcatcaccacaaacatgtaatgtgttgtgcagcaatgttagtgtctgtgatgtagacatcactgggtaataggaaattttcatctccatgataatcttatgggaccaccatcatttatgcagtccatcgttgaccaaaatgtcattgtgtagtgcctgactataaaacctttttctacatttataatctcagcaaagtt

SEQ ID NO: 1732 - DNA, 520 bp, Homo sapiens
ctttcagagcccagccttcggaggtttccgcatgagccttctcgggcgacttctaggaggatttattcccctggcagtgccaagggcagcctgcaccaagctcacaactcttcctccaagaggatgttcaaagggcctgtcatttcagcatctgctggacagcagaacttcgcatgcaggatcctggagctgcgtcgggttttgaatcagggacaatggaggaagtgggaaactgtgaagagagtcagagggctgtgccagctgccccctttcccacccccagcaattcacttaactttcctgagtctcacctttgtcattatgagaatgtgtatatttataaataatcatctgtttctccaatgtaagatattgttattgcagaagtgatactaggacctcgttatacgatggcctcatgatgtagatttatagcaggcttcagattctggcatagaataaacagatatttatccaagggttcactgattcccgaataaatgccaggaacattcatgta

SEQ ID NO: 1733 - DNA, 1134 bp, Homo sapiens
aagggtgctgtgcagcaaggagcccaggagtggtatgaaccgtaacagtgcccttagagtaaatgtgcggcccctaagaccctgccctcaggaaggcggccttcccctgcagtcctgtgtcccacccctgggtctctgtagggtgccatccagggcaagcaacccaagcactgcttcccaccgggtgatgagccatgcaggcctccaaactgcacgtcatgattcatccctaaagtgagtttggccttgagagtccccagggtcctcccccactgggcaggggtcctcaaagccaaggaagcctggtgacacaggcacccatgggaggtgggcccagaaaggggcttcccatagataggccctgtgagtagggagcttgtacactgggccatgggcagcgccagttcccttgagcagtaaaggcccttttccccctacggtgggacccaggagtctctctgacagcttttctgccaggcacagtggctcatgcctgtaatcccaacactctgggaggccgaggcgggaagatcacttgaggtcaggagttcaagaccagcctggccaacatggtgaaacgtcgtctctgctaaaaatacaaaaattagctgggtgtggtgacaggcgcctataaccccagctatttgggaggctgaggcagtagaatcgcttgaacccagatagcagaggttgcagtgagctgagagtgtgccattgcagagagactccatcccaaaaaaagacagctgtcccaggccaagggtacttgggagagcccctcatggagaacctagtttagaccaagtagcagaagctgtggtcataacaaaacaatttgaggaagaaatcttacaaatcaccactgccctttctccttttccataaaactgtccatcttttcggtgctccctaatccaagcagcttgactttagagaagttgcagaagcagtgaagccactaacatgctgtgtgactttatgcaagtcactcacctcactgagccacctccatttcttcatctgtgaaatgggcataacagtaatacataaccctacctacctcacagggctgttgtgaggatcaaatgaaataatgtaacgtgagaatacagtataaatgataaaggattgtta

SEQ ID NO: 1734 - DNA, 227 bp, Homo sapiens
gcggccgcctactactactactgctcgaattcaagcttctaacgatgtacggggacatgctgtgtgactttatgcaagtcactcacctcactgagccacctccatttcttcatctgtgaaatgggcataacagtaatacataaccctacctacctcacagggctgttgtgaggatcaaatgaaataatgtaacgtgagaatacagtataaatgataaaggattgtta

SEQ ID NO: 1735 - DNA, 933 bp, Homo sapiens
agcggggcttttcgaggcagttagtgggtcccaacggctgcaggcggggccggcgggggcgcagcggcccgggaggaagcagtaccttgaagagaaattggagagggagtcaattcctaggatagcagagagatggacaacagacagaatgtcaccccagctctgatctttgccatcacagttgctacaatcggctctttccagtttggctacaacactggggtcatcaatgctcctgagacgatcataaaggaatttatcaataaaactttgacggacaaggcaaatgcccctccctctgaggtgctgctcacgaatctctggtccttgtctgtggccatattttccgtcgggggtatgatcggctccttttccgtcggactctttgttaaccgctttggcaggcgcaattcaatgctgattgtcaacctgttggctgccactggtggctgccttatgggactgtgtaaaatagctgagtcagttgaaatgctgatcctgggccgcttggttattggcctcttctgcggactctgcacaggttttgtgcccatgtacattggagagatctcgcctactgccctgaggggtgcctttggcactctcaaccagctgggcatagttattggaattctggtggcccagatctttggtctggaactcatccttgggtctgaagagctatggccggtgctattaggctttaccatccttccagctatcctgcaaagtgcagcccttccatgttgccctgaaagtcccagattttgctcattaacagaaacaaagaggagaatgctacgcggatcctccagcggttgtggggcacccaggatgtttcccaagacatccaggagatgaacgatgagagtgcaaggatgtcacaagaaaagcaagtcaccgtgctggagctctttagagtgtccagctacc

SEQ ID NO: 1736 - DNA, 754 bp, Homo sapiens
agcggggggggggccggacaaccccgaccgcgagccggacccctgctctgacgggaggaagcagtaccttgaagagaaattggagagggagtcaattcctaggatagcagagagatggacaacagacagaatgtcaccccagctctgatctttgccatcacagttgctacaatcggctctttccagtttggctacaacactggggtcatcaatgctcctgagacggcgcaattcaatgctgattgtcaacctgttggctgccactggtggctgccttatgggactgtgtaaaatagctgagtcagttgaaatgctgatcctgggccgcttggttattggcctcttctgcggactctgcacaggttttgtgcccatgtacattggagagatctcgcctactgccctgaggggtgcctttggcactctcaaccagctgggcatagttattggaattctggtggcccagatctttggtctggaactcatccttgggtctgaagagctatggccggtgctattaggctttaccatccttccagctatcctgcaaagtgcagcccttccatgttgccctgaaagtcccagattttgctcattaacagaaacaaagaggagaatgctacgcggatcctccagcggttgtggggcacccaggatgtttcccaagacatccaggagatgaacgatgagagtgcaaggatgtcacaagaaaagcaagtcaccgtgctggagctctttagagtgtccagctacc

SEQ ID NO: 1737 - DNA, 735 bp, Homo sapiens
agcgggccggcggggtgcgcagcggcccgggagggggaggaagcagtaccttgaagagaaattggagagggagtcaattcctaggatagcagagagatggacaacagacagaatgtcaccccagctctgatctttgccatcacagttgctacaatcggctctttccagtttggctacaacactggggtcatcaatgctcctgagacgatcataaaggaatttatcaataaaactttgacggacaaggcaaatgcccctccctctgaggtgctgctcacgaatctctggtccttgtctgtggccatattttccgtcgggggtatgatcggctccttttccgtcggactctttgttaaccgctttggcaggcgcaattcaatgctgattgtcaacctgttggctgccactggtggctgccttatgggactgtgtaaaatagctgagtcagttgaaatgctgatcctgggccgcttggttattggcctcttctgcggactctgcacaggttttgtgcccatgtacattggagagatctcgcctactgccctgaggggtgcctttggcactctcaaccagctgggcatagttattggaattctggtggcccagtcctccagcggttgtggggcacccaggatgtttcccaagacatccaggagatgaacgatgagagtgcaaggatgtcacaagaaaagcaagtcaccgtgctggagctctttagagtgtccagctacc

SEQ ID NO: 1738 - DNA, 723 bp, Homo sapiens
caccttactacatgaattatatggttgtggttgttttagggatgattgtactggacctactttctgttacactctttccctgcctctcagaatccaagtgaggagggttctgattactcctgagtaaaattttcagcccctaaagaatgaggtgaaaaggcgggtttaggaatggatgctatcaggcagggtgtgtggctcacgcctgtaatcccagcactttgagagaccgaggtgggtggatcacttgtggtctggagtttgagaccagcccgaccaacatggagaaaccccgtctctactaaaaataaaaaattagctgggcatggtggtgcatgcctctaatcctagctactcgggaggctgaggcaggagaatcgcttgaacccaggaggcagaggttgcagtgagctgagattgcgccattgcacttcagcctgggccacaagagtgaaactctgtctcaggaaaaaaaaaaaaagaatggatgctacccatcacctcacctcgtgcggccctttcctggctgccttacaggaagaatgaatttggggcagcacattctctttatcctttcctctttcttcttttcaccagtcctccagcggttgtggggcacccaggatgtttcccaagacatccaggagatgaacgatgagagtgcaaggatgtcacaagaaaagcaagtcaccgtgctggagctctttagagtgtccagctacc

SEQ ID NO: 1739 - DNA, 944 bp, Homo sapiens
agcgggccggcggggtgcgcagcggcccgggaggtgcgtggttgagcgaagccgcggggcccaaccgcagtcgcggggtctgggaggaagcagtaccttgaagagaaattggagagggagtcaattcctaggatagcagagagatggacaacagacagaatgtcaccccagctctgatctttgccatcacagttgctacaatcggctctttccagtttggctacaacactggggtcatcaatgctcctgagacgatcataaaggaatttatcaataaaactttgacggacaaggcaaatgcccctccctctgaggtgctgctcacgaatctctggtccttgtctgtggccatattttccgtcgggggtatgatcggctccttttccgtcggactctttgttaaccgctttggcaggcgcaattcaatgctgattgtcaacctgttggctgccactggtggctgccttatgggactgtgtaaaatagctgagtcagttgaaatgctgatcctgggccgcttggttattggcctcttctgcggactctgcacaggttttgtgcccatgtacattggagagatctcgcctactgccctgaggggtgcctttggcactctcaaccagctgggcatagttattggaattctggtggcccagatctttggtctggaactcatccttgggtctgaagagctatggccggtgctattaggctttaccatccttccagctatcctgcaaagtgcagcccttccatgttgccctgaaagtcccagattttgctcattaacagaaacaaagaggagaatgctacgcggatcctccagcggttgtggggcacccaggatgtttcccaagacatccaggagatgaacgatgagagtgcaaggatgtcacaagaaaagcaagtcaccgtgctggagctctttagagtgtccagctacc

SEQ ID NO: 1740 - DNA, 1022 bp, Homo sapiens
agcggggcttttcgaggcagttagtgggtcccaacggctgcaggcggggccggcgggggcgcagcggcccgggaggaagcagtaccttgaagagaaattggagagggagtcaattcctaggatagcagagagatggacaacagacagaatagatggagtttcacaatggtggccatgtgtctggaattggtgggttcttggtctcactgacttcaagaatgaagccgcacaccctcgcagtcaccccagctctgatctttgccatcacagttgctacaatcggctctttccagtttggctacaacactggggtcatcaatgctcctgagacgatcataaaggaatttatcaataaaactttgacggacaaggcaaatgcccctccctctgaggtgctgctcacgaatctctggtccttgtctgtggccatattttccgtcgggggtatgatcggctccttttccgtcggactctttgttaaccgctttggcaggcgcaattcaatgctgattgtcaacctgttggctgccactggtggctgccttatgggactgtgtaaaatagctgagtcagttgaaatgctgatcctgggccgcttggttattggcctcttctgcggactctgcacaggttttgtgcccatgtacattggagagatctcgcctactgccctgaggggtgcctttggcactctcaaccagctgggcatagttattggaattctggtggcccagatctttggtctggaactcatccttgggtctgaagagctatggccggtgctattaggctttaccatccttccagctatcctgcaaagtgcagcccttccatgttgccctgaaagtcccagattttgctcattaacagaaacaaagaggagaatgctacgcggatcctccagcggttgtggggcacccaggatgtttcccaagacatccaggagatgaacgatgagagtgcaaggatgtcacaagaaaagcaagtcaccgtgctggagctctttagagtgtccagctacc

SEQ ID NO: 1741 - DNA, 1166 bp, Homo sapiens
  misc_feature (147)..(147): n is a, c, g, or t
  misc_feature (215)..(215): n is a, c, g, or t
  misc_feature (231)..(231): n is a, c, g, or t
  misc_feature (245)..(245): n is a, c, g, or t
agcgggccggcggggtgcgcagcggcccgggaggtgcgtggttgagcgaagccgcggggcccaaccgcagtcgcggggtctgggaggtattcatccatggggttcttccgcggtgaagccagcttgtcgtgctgtcccccttgtcantgaagccatcatggttctggtcaatcatgttgaaagcctccttaaactcctggatgtggaactggtcnaacatcacgaagacantggatgtggccccntgtgctgtggtcgcttcttggtcttggctttggtccacttgctgaacattttggcttcgggaggaagcagtaccttgaagagaaattggagagggagtcaattcctaggatagcagagagatggacaacagacagaatgtcaccccagctctgatctttgccatcacagttgctacaatcggctctttccagtttggctacaacactggggtcatcaatgctcctgagacgatcataaaggaatttatcaataaaactttgacggacaaggcaaatgcccctccctctgaggtgctgctcacgaatctctggtccttgtctgtggccatattttccgtcgggggtatgatcggctccttttccgtcggactctttgttaaccgctttggcaggcgcaattcaatgctgattgtcaacctgttggctgccactggtggctgccttatgggactgtgtaaaatagctgagtcagttgaaatgctgatcctgggccgcttggttattggcctcttctgcggactctgcacaggttttgtgcccatgtacattggagagatctcgcctactgccctgaggggtgcctttggcactctcaaccagctgggcatagttattggaattctggtggcccagatctttggtctggaactcatccttgggtctgaagagctatggccggtgctattaggctttaccatccttccagctatcctgcaaagtgcagcccttccatgttgccctgaaagtcccagattttgctcattaacagaaacaaagaggagaatgctacgcggatcctccagcggttgtggggcacccaggatgtttcccaagacatccaggagatgaacgatgagagtgcaaggatgtcacaagaaaagcaagtcaccgtgctggagctctttagagtgtccagctacc

SEQ ID NO: 1742 - DNA, 1033 bp, Homo sapiens
agcgggccggcggggtgcgcagcggcccgggaggtgcgtggttgagcgaagccgcggggcccaaccgcagtcgcggggtctgggaggaagcagtaccttgaagagaaattggagagggagtcaattcctaggatagcagagagatggacaacagacagaatagatggagtttcacaatggtggccatgtgtctggaattggtgggttcttggtctcactgacttcaagaatgaagccgcacaccctcgcagtcaccccagctctgatctttgccatcacagttgctacaatcggctctttccagtttggctacaacactggggtcatcaatgctcctgagacgatcataaaggaatttatcaataaaactttgacggacaaggcaaatgcccctccctctgaggtgctgctcacgaatctctggtccttgtctgtggccatattttccgtcgggggtatgatcggctccttttccgtcggactctttgttaaccgctttggcaggcgcaattcaatgctgattgtcaacctgttggctgccactggtggctgccttatgggactgtgtaaaatagctgagtcagttgaaatgctgatcctgggccgcttggttattggcctcttctgcggactctgcacaggttttgtgcccatgtacattggagagatctcgcctactgccctgaggggtgcctttggcactctcaaccagctgggcatagttattggaattctggtggcccagatctttggtctggaactcatccttgggtctgaagagctatggccggtgctattaggctttaccatccttccagctatcctgcaaagtgcagcccttccatgttgccctgaaagtcccagattttgctcattaacagaaacaaagaggagaatgctacgcggatcctccagcggttgtggggcacccaggatgtttcccaagacatccaggagatgaacgatgagagtgcaaggatgtcacaagaaaagcaagtcaccgtgctggagctctttagagtgtccagctacc

SEQ ID NO: 1743 - DNA, 744 bp, Homo sapiens
agcggggcttttcgaggcagttagtgggtcccaacggctgcaggcggggccggcgggggcgcagcggcccgggaggaagcagtaccttgaagagaaattggagagggagtcaattcctaggatagcagagagatggacaacagacagaatgtcaccccagctctgatctttgccatcacagttgctacaatcggctctttccagtttggctacaacactggggtcatcaatgctcctgagacgatcataaaggaatttatcaataaaactttgacggacaaggcaaatgcccctccctctgaggtgctgctcacgaatctctggtccttgtctgtggccatattttccgtcgggggtatgatcggctccttttccgtcggactctttgttaaccgctttggcaggtattgactagaaactgggcaaggaagtgggctctaccagatgcattggggacaagtgtggagagttagggcagggaggtgatgatgcctttgaataagaacaccttgaattctaatcaagggaaactagcccaactggccccgaatatgactgcccttgcttggagctctactaccctggatagctcccacccagctgtgcaagagatgaactgtgtgagtgattggcctttgcagtccagttagggatagttcagaattattccctagtaagctcaactatggggtttccaggaacatacttaatttacaaggtccaaagttgattacttttctcaaa

SEQ ID NO: 1744 - DNA, 383 bp, Homo sapiens
ggtttttaaatatttccaaactgaccaacccagtttctcttaacttcttccttctccaattttcttttccacttttaccaagttaacttcacattcttatctccagataagttctttagtataatctattactttgtcttcccgattaattacctaaatctcgtttgatgtttgtccttttcataccactcataggtcagattctcctaatacagctccataattaataagaaacagtcatcaattacaagttttaaggactattctctcctccctgtcctctgtctctccaggtcaccccagctctgatctttgccatcacagttgctacaatcggctctttccagtttggctacaacactggggtcatcaatgctcctgag

SEQ ID NO: 1745 - DNA, 460 bp, Homo sapiens
aaggcaaatgcccctccctctgaggtgctgctcacgaatctctggtccttgtctgtggccatattttccgtcgggggtatgatcggctccttttccgtcggactctttgttaaccgctttggcaggtattgactagaaactgggcaaggaagtgggctctaccagatgcattggggacaagtgtggagagttagggcagggaggtgatgatgcctttgaataagaacaccttgaattctaatcaagggaaactagcccaactggccccgaatatgactgcccttgcttggagctctactaccctggatagctcccacccagctgtgcaagagatgaactgtgtgagtgattggcctttgcagtccagttagggatagttcagaattattccctagtaagctcaactatggggtttccaggaacatacttaatttacaaggtccaaagttgattacttttc

SEQ ID NO: 1746 - DNA, 327 bp, Homo sapiens
caaagacataagatttggggtaaacatctgggttatagctgcatgaatagcaactatagaaaaacacacacacaaatgtgtatgctaacaaaggagagacctgatatggcaatcttaatgtcagaaaaagtgtaattagaacccaaaagagcagatcgagctgtgaacagtggttagttagatcaccacaggtcctttcaaaggatggagatagccagtaacttactctgaatgaacatgacaaagatatcttcccaggtaaactctcctcaaaacatgccaaggtattgctctcccccacccttccaaattcatatctcctccttc

SEQ ID NO: 1747 - DNA, 178 bp, Homo sapiens
ttcatgctgaagaggaagatgtaaaggtgcacttgtgtagaaaaggtgaggaagcaagtgtcctatagagatacccaaacaccagcatttgttttattataaaccatcatatagattaaaataatctttaattgtggtcttgtgctattttaattatgtaataagtaatgtcttaagt

SEQ ID NO: 1748 - DNA, 563 bp, Homo sapiens
tgctaggattacaggcatgagctacagtgctcagcctttcatgttctttttggactttactacctttgttttctcggcctagaatgttctttgtcttatttgcctgatttttcttctcttacttttcctacttagcatcaccttttacatggttgagttagatttctctttcctgtatttctgttagagcctttcttatatgagtcattcatttaaaaatggacaattaactttctaagcttcaatagcctcgtctggaaaatggagttaataactcagtcaaagctcccttatctgatttccacttacctgagtcttcagatggatcctcccagttccctgtgaaaagcttgatgaccagcatccacatcacgctgaatgctctcaaccatgcttgtgcacaactcttgccagtcaattgtgtaacataatttatcttacttgttattgtaattaaatgcatggactaaatatgttaaattatgaaatatgaatacaaaagaaggattacttctgtgaaaattaaactgaatgacttggaataacaataaaaaaagttgcta

SEQ ID NO: 1749 - DNA, 419 bp, Homo sapiens
gataattcatggagagatgtgatgcccatttgagaatctggattcttttgagtttggtgatatgaaagtctcttttgtgaccttgagaaagtgggaggttttgttatttgttctgttgtcctttaaaatttaaaactggctgggcgtggtggctcgtgactgtaatcccagcactttgggaggctgaggtgtgaggatcacttgaggcctgaggtttgagacaccctggaaacatagggagaacctgtctctagaaaaaaaatttaaaaattagctggatgtaatggcatgtgcctctagtctcagctacttgggaggctgaggcaggaggattgcttaaacccaggagtttgaagttacagtgagccataactgtgctgttgcacttcagcctgggtgacagaaagaggccctgtctc

SEQ ID NO: 1750 - DNA, 331 bp, Homo sapiens
attttacttttatcaaattaccatcttggagggctactgagagcaacatttcgagggcttatcatgtaacaggccctgggctatcttcacatataagtcctcacaacaatcctatgaggtaggattcatcagccccattatacagataaggaaatcagtcttagaacaatcagttacttgctcaaatgtacaaagctagaggtagcagagctggggactgagtctaggtttatctgatttctgagtgtgtaatgggtttacaccaagagtgctgtgggaaaatcttgcatgtaactgcaagtatgcgtttgacttttggcacccttatctc

SEQ ID NO: 1751 - DNA, 497 bp, Homo sapiens
cagtgttttcagtctcctttgggaagaaacccattctctgtcttggtaagtaatgaaataatagtacttttaacctctttttggagagaacatagactttgggtcagacagacttggattctaattctggaaattcggtaactagctaagtgacctgagacaagtgcttaatttctttaagcttcagttgtaatcagaaaatggagatcctggctgggctcggaggctcacacctgtagtcccagcactttgggaagccgaggtgagagaatcacttgagcccaggagttcgagaccatcctgggcaacatggcaaaactctgtgtctacagaaaatacaaaaattagctgagcatggtggtacacgcctgtagtcccagctaatcggatgctgaggtgggaggattgcttgagcctggaaggttgaggctgcagtgagccatgatcgagcagctgtactccatcctgggtgacagagcaagattatgtctcaaaaa

SEQ ID NO: 1752 - DNA, 587 bp, Homo sapiens
actctcttagactccagtacacttgtcatgtggtgggggatctgaatagtcaattcttgattctgtaatcttctcagcttcctggataagcatacaaatggcagccactgccccatgcaaggggagacaacctcttgccacactatcacattatttagtaagttgtgcagcacccttttcatgggtcctagcatctgggtcagcattccaagagctattctctgtcgttcatggatgtagatgtcaaaaggctcagttatgttggggagctgtagggccagagtctccagtaacagcttttgaagcttctggaaagcctgatcaaatttcccatcccattcaaaaaggtgggtgtggccaggcgcagtggctcacgtctgtaatcccagcactttgggaggccgaggtgggcaggttgcctgagaccaggagtttgagaccagcttgggcaatgcagtgtaaccgtctctactaaaattacaaaaattaaccaggcatggtggcacatgcctgcaatcccagttacttggaggctgaggcaggagaatctcttgaacccaggagatagaggttgcagtgagattatg

SEQ ID NO: 1753 - DNA, 913 bp, Homo sapiens
gtgacgtatcaggaaacatattttattggagatttggaagctatagtaaaacataatggcaataagccaacttcccagtggtaaacccacagtggtggtttagttactaacctcttgatgaccgaggaggttaataattggatattgcagagcagcaatatgtaacctgtgtgtaatctcagggcctcaggttaacagtttcagtcagaagctaagagaaacactgacaaaatttagcttaccatgactagctgccagtttatgtggtctgtgttcgtttgttttaaagaaactaatactgtacagagatctttgacaccaacttcaaggcaccagtgtttagtgcaagcaggtagagaggacctatgaactaggtttctaattggcagtcagtgctaattcagccattagtaagtaaagtcacttttccactaaaatagtgtcccgactaaccacctccttccgtgtcttttccaaccacaaaaccacacacatagaccatctcatcttactttatttcttgcatttattgtatccaaaaaaattggtttagttttttaatgtaattgacaagactcaagcttttgaaatacttacgactgttctcttgattccaggacaccctcccctgtgtctaaacatgtgtggtatactttttaaataaattaaagcttattttacttggcattttgtggagggaattttacaacacctcgggagatatctgcagacaccctggggtgtcacaaatttaagactagaagtcattgccctaatcaaagacgactgttacactggtctagacatcttaggggaactccaaaatgtttatacttcaactctcagtaaaagctcaagcttgtcttttgccttaccaaattccatatctcaaaataaacttttctccctctgg

SEQ ID NO: 1754 - DNA, 172 bp, Homo sapiens
atgtctctaaagaagaaaccagaggctacattaagcttgtcagaacaggctgattttgaggtaaaattggagcagacattaggggtcatagcctagaataaggtgatggtcaaggtgggaccagcaactctctgggtgttcaaacacctcaaccatcccctaaatgttagct

SEQ ID NO: 1755 - DNA, 300 bp, Homo sapiens
gttatgtttaaggaatgagaagacactcaaagtaggtagccttttgaatgaaaatgaatgaataaactaattccttaataagggaaattataaatgttctttgatttgcaagtaacttctagaaaattgtccaaccctttgttcacagtataattaaaaataagaaattataaatattctttgatttgcaagtaacttctagaaaattgtccaaccctttgttcacagtataattaaaaataagaaagtattaggttctttttctgactttcctccaaactgaaagttaaatgtctctaa

SEQ ID NO: 1756 - DNA, 459 bp, Homo sapiens
agctcatttatccaacaaacagggtacagtaattgagagcctgggctctagagccacacagaccctggtttgaagccagttctgccacttcctagctatgtaatcttactaagtgctgtattactatcaaaaggaaagaatttaagtgattcaaataggggttaaaagcattattcatctgggcgcagtagctcttgcctgtaatcccagcactttgggaggccaaggtgggcggatcacctgaggtctggagttcaaaactagcctggccaaaatggtgaaaccctgtttctactgaaaatacaaaaattagccaggtgtagtggcatgcacctgtagtcccaggtacttgggaggctgaggcaggagaactgcttgaacccaggagatggaggttgcagtgagccgagattgtgccactgcactccagcctggatgacagagcgagacttcatctca

SEQ ID NO: 1757 - DNA, 493 bp, Homo sapiens
cctactagaaagcagtttcatctacattggaaatctgttgtttaatgtagccactttcatcaatgatcttagctagatcttctggataatttgccacaaacttcagtttgtttaaaaaacaaaaacaaaatgcaaatctgcaatgcacaatacagcaaagtgcaatgaaacaaggtatgcctgtaatcaaaaaaacaaagcaaactaaaataataaggactataacttcattcaactcttccagatattttgaacttggatttgaagtggattggctttctaagaaagtattatttattaaaactgatcctagaagagatagagtatccccaaaaaaacccattcccatagaaggggaaaaaagtttttcaaaaatctcccacaccttacattaacacttaaagcaatgggccctgatagtttcacgatagaattttaccaaacctttaaggggccggtaattctaattttatttaaactgttcttgagagtt

SEQ ID NO: 1758 - DNA, 243 bp, Homo sapiens
gatactcacagatctgaagcagcagtgtccagtagaactttctatagtgatggaattgttttatgtctgcattgtctaatgctgtagccattagctacatgtggctagcaagtacttgaagtatagctattgtaactgaggaactaaattttaaattttatttaaatagccatatggtgttttttgtattggacagattcagagcctcattctctagatgcttctatgcttcttgagcttcat

SEQ ID NO: 1759 - DNA, 284 bp, Homo sapiens
cagatattttatatagaacagtgttttaaggacagagaaagatgataggttttcaaggattccgttgtcactggatataggcatttgccttttgtatgtatttaagaatttgcattcttattctgttctgagcagaagatctttttctagcgcaatgatagcatgtggtgtgttgtggtcccgaaatgtgtgcagtgaggtcattatcaaccccagactagtttctgtctttaatgcacattaattcacatgtcatcagacatgaaaactaaagtgtttagaac

SEQ ID NO: 1760 - DNA, 402 bp, Homo sapiens
catttttttcaactataactaagttacttttgttttaaaccaaaagtaacttagttatagttgaaaaaaaagagtttccctcacagaaaaagcatgtttatctgtaaaactgttagctgagcaaaataactagtgttgccagataaaagcaagctaccgataggggtatataaaataggacatcagaaatgccattgcaatattttatcaattctgtgatgcatgtaattttacattaagttatgtaaaattaagtgatgctatagttaaattgacagcattttttttcctagtggtaaatgaggtatgtcttgtaatgaatagtatcttagattttatgaaacacaatattactgaatttagactggaaacgtgttttaatctcctaaagttattacaaaa

SEQ ID NO: 1761 - DNA, 587 bp, Homo sapiens
atgcctcccagagaaagtaggctagagagggcaggaatagcttgacttagagatcacttccactggcacggtgggtacaatctgatgtgggaggctctgggtgcagcctgtgatggcagagtggaggagccaggagtcattcttggcctcattgtcactgccttcaaactaacaagttgcctgagagctaaggttccatttgataggacaccgggtgggatgtgcatcagaatatccatttccttgaaggatccaatgattaggctgaggcaaaatgttttagaccattcccaggtctaaaaataactccatcatcacctctaataaggactcagtctggagtgacatcactccttcaggtgcagaaaaggaaagcatgactgtgtgtcactgacttaaaataggagtgaggtgagaggggcagctgggctcatggacgtcaagtggacagtttctcagctggtatttcctatatttcctgttttggacagcaggttcctgcccttctaagctgggggtaggggtgagggagtgtatgttaaaaagctctgtggacttgctttttctcttctccatgtgtgttcttt

SEQ ID NO: 1762 - DNA, 471 bp, Homo sapiens
gcaagtgatactcagttttggatctgtggattttgagttacagtgggatattctcttggttgtattgtatgatgcatcttgggaaattgatgtcagtttaggagtgacattagggctagagattgagatttgggattctccatagaaggagcagctaaagctcaggtccatgggtaagatgttaagaaaaactgtggaatggagaaggacaagaaaactagggacagaatttggagaataagtcgatacttttttcttttaagccagaatctaaataaggaattttaggttagtttcacccacgtcccccaccccttattccccaccccccaccccaccattctatttcaaggagagaaaaggataaataagaaggacataaacatttgttagtagttgattatcgaaatcccaagggactgaaagactgcctagggtcttatagcaatgcaaaatcaacaacaacaacaa

SEQ ID NO: 1763 - DNA, 592 bp, Homo sapiens
gccaggccctggctgccagccgaccgctctcggagcctcatgcgttcctttctctttgaaggtgccactcctgggctgatcctactatgtgccagctgctagagaaaccaagtgcatttgtgatttccaacctcgcttaggccccagattctgggcaacaaccctttgctgggatctcagccgcttgtcacagccactcctcacagggcacctgcctgaggcctcagcctccaccattcctcccccctgctgaccccttcttctcagggcaccccgggaaactagaccctcccttatagggaggtctcttgggaaagggagaacattcatttgaacacacatcaagagcttgggaaaaactcaaacttgctagactgaaaaacagtggagtcaaactgctcctggtctagcaactttccacattggagataaccctgagaccatggcactggacccaagagaaggaaatgcaaacctccttccttctgaagccaatgttggctgctgcgtgctggctggaagcctggggatgcttggagacagtaagtacacagtaaggatctcatcaaccttggtgatggaaaagtaatca

SEQ ID NO: 1764 - DNA, 377 bp, Homo sapiens
aatcaaggtgaaaacgactggagagagtagcaagatggtccagtctgggaggggtcaaagaaagggcagagccgggtgtggtggttcactcctgtaatcccagtactttgggaggccaaggcaggtgggtcccctgaggtcaggagttccagaccagcctgaccaatatggtgaaacctggtctctactaaaattacaaaaattagcggggtgtggtggtgtgtgtctatagtcccagctactctggaggctaaggcaggagaatcgcttggaccctagaggcagaggttgcagtgagctgagatcacgccactgcacttcagcctgggcgacagagtgagactccgtctcagaataaataaataaatgaataataa

SEQ ID NO: 1765 - DNA, 400 bp, Homo sapiens
atttcaaaggagcccaattaattgataaggtattagcaccaacaatgtatgaagttcccaggatttttctcaaagagaaaacataaagccttgagttcgtgtccggcataccccgtatatctaattataatgaaagatttaaagccttgcacctggtaccgttgctcttcttgtaaccgtttgtcttttaaattgtttatcactttgtaaccatttgttttttgattttggcatgtttttacttctgtagaattattgcatttgagttcccctccccttcctaaacctagatataaaagttaatcaactcccttcctcggggccgaaagaattttgagctttagccgtctctttggccgccggcttaataaaggactcttaattcgtgtcaaagtatggc

SEQ ID NO: 1766 - DNA, 508 bp, Homo sapiens
catattggctaaatggataaaaaaaataaaaataggatccagtgatatgctgcatagaagcactttagatctaacaccacataaaggctgaacttgaaggatgaaaaaagatatgctatgcagacaataaccaaaagacagcagggatatctatactaatatgaggcagaatagactttaagtcaaaaactgtcacaagagactaagaaggatactatataatgattaaagggtcaattcaccaggatgatatagtaattataaatatttatgcactaaatatcagagctcttaaatatgtgaagcaaacattgacagaattgaagggataaatacatatcaacacagtaatagtaggagatttcaatagcccactttcaataatggataggaccaccagatataagataagatcaataaagaaataaaggacttctcttttttttcccccaaggcggcagatcagagactcttttagcatgcttcacctatttggaagcaaaaaaaa

SEQ ID NO: 1767 - DNA, 1449 bp, Homo sapiens
agaactcaccctcctgagtaaaccccatccccctagctagacttcatcctcctggacagatcccatccccccagctagacctcaccctcttgggtagatgcatctccccaaccagaactctcctgggtagaccccttctacccagctagacctgatcctctggacagaccccatcatcccagctagacttctccctcctggactgtccccatcccccctcacagccagacctcacccctctgggtagaccccatccccccaactagacctcaccctcctggatggactctaccctcctggagataccttcccctcctgggtacatcccacgtggctacacactccttcccctgtcagctttctcccccagggttctgggcagcagagtctgtgataaaggatactaagtgattccccaatacttcccgtttccagcctccagtgggctctccctggggctaacggttctttttgctatttctccaggctttgcctgatgacaagtatactctgagagtgtcctaatgatacagattttggaccctatcccagttctactgaatccaagtctctgggggaggagttggggctctgcatctggacaccttcctgcagggtccccatcctagaccttcagcagctagcagaggatgtccccaccatccctcagcccacactcccactgtcgccccagccaggcttggcactgcctcctttctcagaagattaagaccatctgctgtttcccaagtttcccaccctccaccctaaaaatttctccgtttcccagtctttcctcgtctctcagaaaataaacatcttcccaggctgcctccccagtgggtctgcactccttgctgtcttcccagcacctgcccttccagcccgccctctgtgtgtccagtgtttccctcaccaaaggactcgctttgtttttcaaattggaggttttgtctttctccctaaaaaccaaaacatctccctgagaagtaactccctcaagctactgatacggaaggggggcggggaagtgctgggaagggaagggtgtggtccctggctagggctccacccccgggcctgtgcccacagacctaggtgaggacaggcatttctgttttcgtgcttaaatgttggatttcccaagactaccctggcctaccacaccctcattctgtgcctgtaaaaaaacctgagagcttagcaggcacgcacacaagcctctggacgtcaagaggaacacaccggtgtaagagcagactgatagtggcccacggcaggctggcaggccatcgacaggcagaaccactcagtgcagctggaggacagcctggccacggagcggtccgacttcagaggggaaaaccacctccccactccgtctcccttctggctcccccatctgagagctacttccactcaataaaaccttgcactcattctccaagc

SEQ ID NO: 1768 - DNA, 542 bp, Homo sapiens
atcctctggacagaccccatcatcccagctagacttctccctcctggactgtccccatcccccctcacagccagacctcacccctctgggtagaccccatccccccaactagacctcaccctcctggatggactctaccctcctggagataccttcccctcctgggtacatcccacgtggctacacactccttcccctgtcagctttctcccccagggttctgggcagcagagtctgtgataaaggatactaagtgattccccaatacttcccgtttccagcctccagtgggctctccctggggctaacggttctttttgctatttctccaggctttgcctgatgacaagtatactctgagagtgtcctaatgatacagattttggaccctatcccagttctactgaatccaagtctctgggggaggagttggggctctgcatctggacaccttcctgcagggtccctcctgggaggcaagcccggggagcaccgctgaggctcgcctcagtgcccatcctagaccttcagcagctagcaga

SEQ ID NO: 1769 - DNA, 417 bp, Homo sapiens
agcaccatatttataattatacatgagtgccaaacaatctcagttttaacgtttgtggtttttactgttcagactattcagaagttccatgacgtggcatccattgatgatggttttgctgaggttgaaatgtgagggttttgtggcaggtgtgtggaagcagatcccttagctaagagagcgcctgctcaacctgccaggcgtgtgctgggaacttccaggagttgcctcgtttaattctcacagccatcctgggaggtaggcgctgtctgccccaggtgggaggccaggaactgtggctgagagaggttaagtaccgagctcaagtcattcatagagtcgccagtggagccgcaattttaaggctgactcaaagcctctgagccagttacctcggctgtcaaatggagataataa

SEQ ID NO: 1770 - DNA, 557 bp, Homo sapiens
aatgtttaatattatgagacaatcaggaaaatctgaacactgaatagttgataatataaaaaactcggggggctaggtctgatatatttggtttgtagttttataaatggaggttttgttagatatacatactaaaatacttagtgatatttatcttctaaagatgtatactaaaatattaactgatgaaataatatgatgtccagaaactgcatcaaaataatccagggagaaagaactaataatctggtgtggcaatagaccgaataatattaaccatagttgaaaattgttgaagttggatgatgggtccatacagttctctcaacttaattctaggttaaatacaatgattgtaacaatatgcgagagccaagaagaggtgtatgaaaccttctctacatcatggtctatgaaccacaggagttcagtagggcagccatcctgttgtccacctttttcccaagcaggagcacccagttccaagggagctctcctggctgaagcaaagaatgcacaccagcctgggcaacatggagaaagctgtctctgtaaaa

SEQ ID NO: 1771 - DNA, 2070 bp, Homo sapiens
ggctggtaccgtccgggagtttgggatccagtgcctggctatggcccgactgctcaggtctgcaacctgggagctgttcccctggaggggctactgctcccagaaggcaaagggagagctctgcagggacttcgtagaggctctgaaggccgtggtgggcggctcccacgtgtccactgccgcggtggtccgagagcagcacgggcgcgatgagtcggtgcacaggtgcgaacctcctgatgctgtggtgtggccccagaacgtggagcaggtcagccggctggcagccctgtgctatcgccaaggtgtgcccatcatcccattcggcaccggcaccgggcttgagggtggcgtctgtgctgtgcagggcggcgtctgcgttaacctgacgcatatggaccgaatcctggagctgaaccaggaggacttctctgtggtggtggagccaggtgtcacccgcaaagccctcaacgcccacctgcgggacagcggcctctggtttcccgtggacccaggcgcggacgcctctctctgtggcatggcggccaccggggcgtcggggaccaacgcggtccgctacggcaccatgcgggacaacgtgctcaacctggaggtggtgctgcccgacgggcggctgctgcacacggcgggccgaggccggcatttccgcttcggcttctggccagaaatccctcatcacacagcctggtactcaccttgtgtgtccctgggacgtaggaagagtgcagccggctacaacctcacggggctcttcgtgggctccgaggggacgctgggcctcatcacagcaccaccctgcgcctgcaccctgcccctgaggccacagtggccgccacgtgtgcgttccccagtgtccaggctgctgtggacagcactgtacacatcctccaggctgcagtgcccgtagcccgcattgagttcctggatgaagtcatgatggatgcctgcaacaggtacagcaagctgaattgcttagtggcgcccacactcttcctggagttccatggctcccagcaggcactggaggagcagctgcagcgcacagaggagatagtccagcagaacggagcctctgacttctcctgggccaaggaggccgaggagcgcagccggctttggacagcacggcacaatgcctggtacgcagccctggccacgcggccaggctgcaagggctactccacggatgtgtgtgtgcccatctcccggctgccggagatcgtggtgcagaccaaggaggatctgaatgcctcaggactcacaggaagcattgtcgggcatgtgggtgacggcaacttccactgcatcctgctggtcaaccctgatgacgccgaggaactgggcagggtcaaggcttttgcagaacagctgggcaggcgggcactggctctccacggaacgtgcacgggggagcatggcatcggaatgggcaagcggcagctgctgcaggaggaggtgggcgccgtgggcgtggagaccatgcggcagctcaaggccgtgctagacccccaaggcctcatgaatccaggcaaagtgctgtgaagggggtctgagcacttagcccacaagttccctgactacggagccggttctggaacttttcttcatgccacggcccctgcaaggaaatagatgctgaggcagtcttcctgccagcgagcccactgtatctgggcccaaggccagagggcccagagagaagcctgagcaccgtgttacctccctggccctctggctggccccaggagcctttggttcagtaaacgacccagggtggttcccagcaaagctgcttcctctctgctcctacgcatcctgtcctggcgggaagagagcgtctgggtccattcaagactctgatgacacccctccccgaggcctcccactgccggggtcccaggacccttcccccttcacctggtgacaggaacactcctttcctggtatggaacgtgagctcccgtgacatgatgataggtcttctccttggggcctcccccaataaatctgtaataaacctgaaacccacctacagctacctggaagtca

SEQ ID NO: 1772 - DNA, 2007 bp, Homo sapiens
gtcaccctgccacccagtgctcacaccctctggccagtgcctggctatggcccgactgctcaggtctgcaacctgggagctgttcccctggaggggctactgctcccagaaggcaaagggagagctctgcagggacttcgtagaggctctgaaggccgtggtgggcggctcccacgtgtccactgccgcggtggtccgagagcagcacgggcgcgatgagtcggtgcacaggtgcgaacctcctgatgctgtggtgtggccccagaacgtggagcaggtcagccggctggcagccctgtgctatcgccaaggtgtgcccatcatcccattcggcaccggcaccgggcttgagggtggcgtctgtgctgtgcagggcggcgtctgcgttaacctgacgcatatggaccgaatcctggagctgaaccaggaggacttctctgtggtggtggagccaggtgtcacccgcaaagccctcaacgcccacctgcgggacagcggcctctggtttcccgtggacccaggcgcggacgcctctctctgtggcatggcggccaccggggcgtcggggaccaacgcggtccgctacggcaccatgcgggacaacgtgctcaacctggaggtggtgctgcccgacgggcggctgctgcacacggcgggccgaggccggcatttccggaagagtgcagccggctacaacctcacggggctcttcgtgggctccgaggggacgctgggcctcatcacagcaccaccctgcgcctgcaccctgcccctgaggccacagtggccgccacgtgtgcgttccccagtgtccaggctgctgtggacagcactgtacacatcctccaggctgcagtgcccgtagcccgcattgagttcctggatgaagtcatgatggatgcctgcaacaggtacagcaagctgaattgcttagtggcgcccacactcttcctggagttccatggctcccagcaggcactggaggagcagctgcagcgcacagaggagatagtccagcagaacggagcctctgacttctcctgggccaaggaggccgaggagcgcagccggctttggacagcacggcacaatgcctggtacgcagccctggccacgcggccaggctgcaagggctactccacggatgtgtgtgtgcccatctcccggctgccggagatcgtggtgcagaccaaggaggatctgaatgcctcaggactcacaggaagcattgtcgggcatgtgggtgacggcaacttccactgcatcctgctggtcaaccctgatgacgccgaggaactgggcagggtcaaggcttttgcagaacagctgggcaggcgggcactggctctccacggaacgtgcacgggggagcatggcatcggaatgggcaagcggcagctgctgcaggaggaggtgggcgccgtgggcgtggagaccatgcggcagctcaaggccgtgctagacccccaaggcctcatgaatccaggcaaagtgctgtgaagggggtctgagcacttagcccacaagttccctgactacggagccggttctggaacttttcttcatgccacggcccctgcaaggaaatagatgctgaggcagtcttcctgccagcgagcccactgtatctgggcccaaggccagagggcccagagagaagcctgagcaccgtgttacctccctggccctctggctggccccaggagcctttggttcagtaaacgacccagggtggttcccagcaaagctgcttcctctctgctcctacgcatcctgtcctggcgggaagagagcgtctgggtccattcaagactctgatgacacccctccccgaggcctcccactgccggggtcccaggacccttcccccttcacctggtgacaggaacactcctttcctggtatggaacgtgagctcccgtgacatgatgataggtcttctccttggggcctcccccaataaatctgtaataaacctgaaacccacctacagctacctggaagtca

SEQ ID NO: 1773 - DNA, 2076 bp, Homo sapiens
gtcaccctgccacccagtgctcacaccctctggccagtgcctggctatggcccgactgctcaggtctgcaacctgggagctgttcccctggaggggctactgctcccagaaggcaaagggagagctctgcagggacttcgtagaggctctgaaggccgtggtgggcggctcccacgtgtccactgccgcggtggtccgagagcagcacgggcgcgatgagtcggtgcacaggtgcgaacctcctgatgctgtggtgtggccccagaacgtggagcaggtcagccggctggcagccctgtgctatcgccaaggtgtgcccatcatcccattcggcaccggcaccgggcttgagggtggcgtctgtgctgtgcagggcggcgtctgcgttaacctgacgcatatggaccgaatcctggagctgaaccaggaggacttctctgtggtggtggagccaggtgtcacccgcaaagccctcaacgcccacctgcgggacagcggcctctggtttcccgtggacccaggcgcggacgcctctctctgtggcatggcggccaccggggcgtcggggaccaacgcggtccgctacggcaccatgcgggacaacgtgctcaacctggaggtggtgctgcccgacgggcggctgctgcacacggcgggccgaggccggcatttccgcttcggcttctggccagaaatccctcatcacacagcctggtactcaccttgtgtgtccctgggacgtaggaagagtgcagccggctacaacctcacggggctcttcgtgggctccgaggggacgctgggcctcatcacagcaccaccctgcgcctgcaccctgcccctgaggccacagtggccgccacgtgtgcgttccccagtgtccaggctgctgtggacagcactgtacacatcctccaggctgcagtgcccgtagcccgcattgagttcctggatgaagtcatgatggatgcctgcaacaggtacagcaagctgaattgcttagtggcgcccacactcttcctggagttccatggctcccagcaggcactggaggagcagctgcagcgcacagaggagatagtccagcagaacggagcctctgacttctcctgggccaaggaggccgaggagcgcagccggctttggacagcacggcacaatgcctggtacgcagccctggccacgcggccaggctgcaagggctactccacggatgtgtgtgtgcccatctcccggctgccggagatcgtggtgcagaccaaggaggatctgaatgcctcaggactcacaggaagcattgtcgggcatgtgggtgacggcaacttccactgcatcctgctggtcaaccctgatgacgccgaggaactgggcagggtcaaggcttttgcagaacagctgggcaggcgggcactggctctccacggaacgtgcacgggggagcatggcatcggaatgggcaagcggcagctgctgcaggaggaggtgggcgccgtgggcgtggagaccatgcggcagctcaaggccgtgctagacccccaaggcctcatgaatccaggcaaagtgctgtgaagggggtctgagcacttagcccacaagttccctgactacggagccggttctggaacttttcttcatgccacggcccctgcaaggaaatagatgctgaggcagtcttcctgccagcgagcccactgtatctgggcccaaggccagagggcccagagagaagcctgagcaccgtgttacctccctggccctctggctggccccaggagcctttggttcagtaaacgacccagggtggttcccagcaaagctgcttcctctctgctcctacgcatcctgtcctggcgggaagagagcgtctgggtccattcaagactctgatgacacccctccccgaggcctcccactgccggggtcccaggacccttcccccttcacctggtgacaggaacactcctttcctggtatggaacgtgagctcccgtgacatgatgataggtcttctccttggggcctcccccaataaatctgtaataaacctgaaacccacctacagctacctggaagtca

SEQ ID NO: 1774 - DNA, 920 bp, Homo sapiens
ggctggtaccgtccgggagtttgggatccagtgcctggctatggcccgactgctcaggtctgcaacctgggagctgttcccctggaggggctactgctcccagaaggcaaagggagagctctgcagggacttcgtagaggctctgaaggccgtggtgggcggctcccacgtgtccactgccgcggtggtccgagagcagcacgggcgcgatgagtcggtgcacaggtgcgaacctcctgatgctgtggtgtggccccagaacgtggagcaggtcagccggctggcagccctgtgctatcgccaaggtgtgcccatcatcccattcggcaccggcaccgggcttgagggtggcgtctgtgctgtgcaggtacagtggggctccctcgcccggcccgaggatggtcccagcacaccttggcacacctgtggctgcctcccccgccacacacggcaccttgggtctgctcccgcccgtgggctgcctgcctctgggggtctggtctggctgctggggggacacccgcggggtgtggtccggggacgtggccaggtcagagacccaggtctgcagtggtcttagcacctgccccaaccagggcggcgtctgcgttaacctgacgcatatggaccgaatcctggagctgaaccaggaggacttctctgtggtggtggagccaggtgtcacccgcaaagccctcaacgcccacctgcgggacagcggcctctggtttcccgtggacccaggcgcggacgcctctctctgtggcatggcggccaccggggcgtcggggaccaacgcggtccgctacggcaccatgcgggacaacgtgctcaacctggaggtggtgctgcccgacgggcggctgctgcacacggcgggccgaggccggcatttccggtgagcgccctctgcggggggc

SEQ ID NO: 1775 - DNA, 375 bp, Homo sapiens
ggaagaaaagactcaaggcagtcactggatcaagccacagggaggttttagtaaccttgctaagactgactccgaggagtgctgggtggatgcagaaaggaagggaggaagacagcgtcacagagacagtgaatgcgagctactctccaaagactgcagctgagaaagaaggacagatggaggggcaggtgaggtcaaggaaagttcttaattacgctgccatctttaaaaattgaagtaaattgtatttgtttatatggtgatgggtaggaggctatagaagaaaggctgaaggaacagggagagtgaataactgataagagtggagtttctgaaaaggcaagataccatggaaggcattggccttggacagaa

SEQ ID NO: 1776 - DNA, 461 bp, Homo sapiens
ggtcaggaaagatggtttggtttctttcaacctactgctttttgaaggctcagggccaaaagaaaaggaaagtagaatgatagggattttgttatttactatacttaactgaataagtctgcagatgtctggaactatcctgtataaaacatcctattcaccagttcctaagagaccctcaaagagacaattcgagtttaacgcataaaatatcaaagtgggccagacgcagtggctcacgcctataatcccagcactttgggaggcagaggcagatggatcacttgaggttaggagtttgagaccagcctggccaacatggtgaaaccctgtctctactaaaaatacaaaaattagctgtgcatggtggtgggtgcctgtaacccgagctacttgggaggctgagccaggaaaatggcttgaacccaagaggcagaggttgcagtgagccaagattgtgc

SEQ ID NO: 1777 - DNA, 463 bp, Homo sapiens
gttttgaaatatttgaattataaacttagccattgagcatcctaatccaaaaattctaaatctgaaatgcgccaatgaacatttcctttgaatgtcatgtgggggcttgaagttttgggttttggagtgtttctgattctcagatttagggatactcaacctgtacttagatatggatctaggcagggcgcagtggttcacacctatactcccagcactttgggaggccaaggtgggagattgcttgaggccaggagttcaataccagcctggccaacatggggaaaccttgtctctactaaaaatacaaaaattagctgggtgcggtagtgcatgcctgtaatcccagcttcttgggaggctgggacacgagaattgcttggacccaggaggcagaggttgcagtgagccgagatcactccactgcactccagcctgggtgatagagcaagattctatctcc

SEQ ID NO: 1778 - DNA, 476 bp, Homo sapiens
ggctcccaataggcagtgtgcccagagtagcagctcggaagcagtactgcaatcacatttatacccactttcaactatatgcaaatttaggggtggattatgccaaaatttctagaaaaaaggtcgtaacttccaggtcgtgggattgttgctatggaaaggagccaaaacttccagctgttgccttagcaatggtaacctgacgtggcactggtgagtgtgttttatggagagactctttcacctcttccctttcagcttgtcttcagtgtggtctggagcccaatccccacctccagagtctagtcctgcctcctacctcagtaataaaaagtagtagtatatggttaattgtcaaatacatttgcaaagtgtaatcaaagatacattaccaatctgaatctcaaaatgtgctatcatctttgaatttgaataatgtattattaaagaagttacagttttcctttacattcaat

SEQ ID NO: 1779 - DNA, 417 bp, Homo sapiens
tattcttatatattttcttagctaatgattatagtcttcataattacctactaaacaagcttgtttataaaatctatcactctagatgataaatctacattaaatggtacttgctcataattaaaatatctagtgagtgcatatgttgaacagtggtagttttgaagatgtggttgcaatctgtagattctgaacttcttcactatctcttctccaatagatgaattctgctaatagcccctaggatagtaagtgttactgtattagcaaagcagcctagcatattccccttgatttggtcatctcttaaaaaacactggatgcttgtaagaaattaaacttttgtgtaccatatgaagggcctcataaagtatctgaaggagtaaaaatgaaagccaaactccaggcttttttttt

SEQ ID NO: 1780 - DNA, 446 bp, Homo sapiens
tgtacaagaaagcaagcaatatggtttaaaagaacaattttagcatcaataagaataactgcaatgggctggttgcagtggctcaccattatcccggcactttgggaggccgaggcgggcggatcacttgaggtcaggagttcgagaccagcccagccaacatggtgaaaccccatcttgacaaaaataccaaaattagccaggcatggtggcacatgcctgtaatcccagctactccagaggctgaggcatgagaattgcttggacccaggaggcagaggttgcagtgagccaggatcgcaccattgcactccagcctgggcgacaaggagagacttcatcttaaaaaataaaacaatataactgcaacggatcaaaatgcaccaaatatgtttaaattcatgagttcataatgaagctaaaaaaaactttccgtcattggatac

SEQ ID NO: 1781 - DNA, 414 bp, Homo sapiens
cagaagaatgaagggttatgtgatatcctattcccagagggtgaggaaggcagaccacctaatgacctggccccgtggaatttggcctccctgcttcgtggcacttattcagcagtgctccactgtggaagcagggtgtggctgggtctggcattaagtagtgacagccctctggggcagaaccacacatctaagaatggactaagccagtcacaagtctcacttctttggaactccattccagggttcccagagcagttgggaacaccgttctgtaatcaaactgagttcacctttgggcaccagctgctcccacagaccaagggcaggacaaagtacagaaaatagattgaagcaaagtacagaaaagagattgaagcaggtgctgctttctgtgaatttgatccagactgg

SEQ ID NO: 1782 - DNA, 424 bp, Homo sapiens
ggctggtctcaaactcctgacttcaagtgatccaccctccttggcctcccaaagtgctgggattacaggcgtgagccactgtgccctgcccccattgttgtttttacccatgtgaaaacaagtactggggaccaggagctataaataattggatctctgctgacaaccaggcactgttcatggatgggtgggtggatggatggatggatggatggatggatggatggatggatgaataaatagatagaatttaatcttcacaataacccattgagattaagtttcattgtctccatttcacagattaaaaaacaaaacaaaaatgcaaaaccttgaggcccagaaactcaagtgtatctaattccaaagtacctaaaaccatgactaaacagaatgcaggtacccagtgagtgtctgtggaatg

SEQ ID NO: 1783 - DNA, 323 bp, Homo sapiens
ccttcaactgattggatgaagctcacccacattatagagggaaatctgctttacccaaaactactgagttaaatgttaatcccatttataaaaaccttcacataaacatcaagaatgatgttttaccaaatatctgtgtactgtgacctagccaagttgatacataaaattaatcatcattgtagattttaaaagtttccttatactactagttcattaaaaggtgtttgttttaataattagtgaatgttaaaattatgtgaaatactttctggacatctgttgagatgatcatatgtttttctcttttatttgattaatat

SEQ ID NO: 1784 - DNA, 1168 bp, Homo sapiens
tgctccatgacagacgtcccaatgaccttgagcaagtcccttggcccctgagtctcagttttctgggtggggtgagtgaggagaactgggagatctttagggtcccttagattcaagtagaatgtgacacagatcccgtgggaaaccactgtgctgtgctgtctcaccttctgaggagagaagaaagagggagaaaaggcagggcatggtggctcacgcctgtaatcccagcactttgtgaggccaaggtgggcagatcacttgagatcaggagtttgagaccagcctggccaacatggtgaaaccctgtctctactaaaaatacaaaaattagctgggcgtggtggtaggcgtctgtaatcccagctactcgggaggctgaggcaggagaatggcttgaacccaggagacggaggttgcagtgagctgggagcgtgcaccactgcactctagcctgggtgataagaacaaaactcagtccaaaaaaaaaaaaaaaaaaaaagagggaaagagggagaaaggattgggaggagaaaaggagagcaaagaagaagagaagaatagagagagtgagctgagaatttgagcttgctcagagttgactttcgggagggtttttgtcctataatatgtggcatcctgtgggtgacagggaggtgagttaggtggacacgtataggacgtgccctttcataaggcttgggcagtcatttggcgagtgagctgaaatccatgtcttgttagagatagggatggggtaggcagaaaggagctccaaactatgggtttgggattggcacccctatcctatcatcacccagagtcttcattgttgagatgctgcccatggaaaacagattgggacatagattttggaatcaaggtctctgctcctggcatctcctctgtgcgtctccctctgcctttgctccctggggactgtgggcaggaggagcttcttcggaggaccgggagtgggcctccagtccccctgcccctgtagaggaataatgagggaggacatggggaagtcactgtcaaaggctggcacagctgtgagcccaatgcctctgagcgaaaaggagagagagggagttcacgcccctgagagtagccccctgagccggctgggacctggactgcctgctttcctcctgcctcttcccct

SEQ ID NO: 1785 - DNA, 1148 bp, Homo sapiens
ccatttttcatatattatcttacgttttaaatttaattttaatgtgttttctgttcacaaaaatagtgtgtgattacagtcaattcatttttatcaagagagccaagacaattcaagaggaaaagaatagtctttgcaacaaatggtactggaaaaactgtatatgcagttcgatgaaagaatgaaattagactcttgattcatagcctgtgcagaaattaactcaaaatttgattttaaatgttaagagctaaactacaaaactcaaaacatacagataaatctttacgacttagattaggcagtagtttcttagatatgacaccaacagcataagcaacaaaggaaaaaatagatataggttgactatcccttatccaaaatgcttgggaccagaagtatttcagatttcagattttttcagattttggaatatttgcattatacttaacagttgagcacctctaatctgaaaatccaaagtccacagtgcttcagtgagcatttcctttaagtgtcatctcagggcttaaaaagttttggattttggagcattttgctcttcagatttttggattaaagatagtcagcctgtaattgaatatgtcatcaaaaggattaaatgaatctttgctgttccatttaaaattttttgtacacagttatttccaacagataatatatagctggttggcatctcttaattctgaatattcacttttctataccatattagtataatacctttcatatagtagaggcttttaaaatgttattaatgagtttaaagaaatgtgtttgttccatttttgcctattaaactatttaaaattcaggccatcttagaaaagtaattgttgggctgggcatggtggctcaagcttgtaatcccagcactttgggaggtctaggcaggcagatcacttgaggtcaggagttcgagaccagcctggccaacatggcaaaaccccatctctactaaaaatacaaaaaaaatttatctgggcatggtggtgcacgccagtaatcccagctacttggaaggctgaggcatgagaattgtttgaacctgagagacagaggttggagtgagccaagattgtgccactatactccagcccggacaacagagcaagactcggtctcaa

SEQ ID NO: 1786 - DNA, 453 bp, Homo sapiens
ataaatgaaaattcatcttagtttcattagtttcatcagctctaatcttataataccttatatgatcatataatactatatctcctcactaaaatacaaggaaagttatagtttgatatttactttaagcttctttgaggaaaagtattgtacatgtacaaaggagtatcaagatagagatgcaatcatggtatctatcctctagttgcctgttatgttatgttatgttatgttatgttatgttatgttatgttatgttatgttatgttattttgatggagtctcactgtcgctcaggctggagtgcagtgacatgatctaggctcactgcaacctctgcctcccggcatcaagtgattctcctgcctcagctacctgggaggctgaggcagagaatcgcttgaacccgggaggcagaggctgcagtgagccgagattgtgccactgcactcc

SEQ ID NO: 1787 - DNA, 422 bp, Homo sapiens
taaatgaataaaaaagacagatccaaatgaatccaaattgagatagattgcaatcaaactttgaaaatatagacaaagaaaatcttgaaaatagccagggaaagataatgtattgcccactgcattccagcactctggggggccaaggcgggcggatgacgaggtcaggagttcgagaccagcctgactaacttggtgaaaccccatctctactaaaaagaccagcctgactaacatggtgaaacctcatctctactaaaaatacaaaaattagccaggcatggtggcacacacctctagtcccagctactagggaggctgaggcaggaaaatcgcttgaacccgggaggtggaggttgcagtgagccgagatcactccactgcacttcagcctgggtgacagagcaagactccgtctccaa

SEQ ID NO: 1788 - DNA, 477 bp, Homo sapiens
tgaccccatgacctagatgatgtgaccctctttttctgcctcagccttcacaataggaggattttgacacaatgctgagcccagcactcagaatatgttactctcctctttttgctgaaccatgcccacaaaaaaggaatttggacctattgcagggcccagcatcgagatgatgttactcttctgcctgggttctgcaaaagaggaaattgtggcatattgcatatttcttggcccagcattcttatgatgtgactctcctgcctgtgctgggagccaccgaatgtattttgacatatcttgggacccattatgtaggtgttttgggctcttataacttgggctggggttttttccacgtgagatgggtgttcatatttgctggggtccagcacccagttattgtgggcccaattttcctataccctggcctaggagaaagcattgtgttcatgttgcttgggcccagcacctaag

SEQ ID NO: 1789 - DNA, 306 bp, Homo sapiens
atttggtatcaatacatccactattgtcaatttcaagctaccagcataatgtattgtaatggcaaaaactgcaattacttttgcaccaaccgaataatggcactgaacaggaagttgaaaagatgtgcggtagtccctcaatagatagtatttccaccataaggattgaatcggggaaaataacttcaagagaataaatcgtagtaaacactatgacaataaacaggaaatgaattagagcatttattatgttttgagaatataatttgttttttaaaataatagctatgtttaacaaacagatgg

SEQ ID NO: 1790 - DNA, 435 bp, Homo sapiens
tgattagttggtgaaaaaaataacttaaagtgtattataggtaataaaattctgtaaataccatttttaataatcactgcaaaatgaagtaaagtttatttagcataaaagcagtaggaaataaatgttatgtttaaggaatgagaagacactcaaagtaggtagccttttgaatgaaaatgaatgaataaactaattccttaataagggaaattataaatgttctttgatttgcaagtaacttctagaaaattgtccaaccctttgttcacagtataattaaaaataagaaattataaatattctttgatttgcaagtaacttctagaaaattgtccaaccctttgttcacagtataattaaaaataagaaagtattaggttctttttctgactttcctccaaactgaaagttaaatgtctctaaaaaatagaa

SEQ ID NO: 1791 - DNA, 335 bp, Homo sapiens
ggaagggaagggaattttccaggatataaactttgttggggcacagagaacaataccacaacgcatgactttttggcatgctgagcactttgaagtaagaaaaattggaaggccttaatagctgcttaactttctaaccttctcttgtttctcttcccacaaccccagtgcagagggaggctgtttctgaaattttcttatctgactaaggaaacttatttccaaaagaaatgcaattgtcttaagaccccctcctcaggaatctcatcaaataaccaggaaaggttaaccactggagaagaaactaaaagtcatcaccatgcccaaacaggatt

SEQ ID NO: 1792 - DNA, 390 bp, Homo sapiens
gggaagctagggagttgggaggtgatagctaaggggcacaaggtttctttttgagatgatgaaactgttctagaaggtgatggatgattgtacaactctgtgcttgtctgggatgattagcagtattctgaactcttgcaccactttttgctgttgctcctcacatcactctatacatttgcccactgtggacattccatataaacagaatcatataacacatggaattttgtgactggcttctttcgtttagtttgtttttaaggttcattcatacatgtagcgtatatcagtacttcattcctttttatggccaaataatattccattatatggatataccatattttgtttacccattcatcaactgatggccatttgggttgttcc

SEQ ID NO: 1793 - DNA, 1637 bp, Homo sapiens
aatgtgttgggaaaaaggcctctgtcccggaagagtcatgggaggtgaaaggggcacgtttgaagatgcgagcgctatcttcacatagttctccagttgtatggagcctcttctgccaagagagggccatgcaattcatcccagaggaacctgaggcctgaaggaggtgagagaagacctctgtgaggaaagcacacagtcaccttctcggcaactaagcagtccctgagaccatttaacatgcaacccgaaggttatggtcaatcccaaaagtcaccactccattcccaactaggacattaccaaagtgacctacccagagattgcttctcatccccagtcccaatgcacatccattcccaagaaatgctttgtcttcagcctctccaggcaccatctcccttcctgtgggagcagagagcttagcctggagcacctttccttcaagccagcaacacagagcactaggttcaattccctgaaggtggccactttaagagagaaatctgaaaaccccatttgctttcttttctcccatattggcatggatttctgtcttctctaacaccttgtgaccttctctatatcatgctttaaagtgtaataatatgattttttaaaagaaatttattacttgttgcaaaggtctttttaaaccagtttagatttcaagaaaaaataaatggaaatcatcgaaaattcatttcacattaatggtctaaaaataaaccaaaggacattatgtgtgcatgtgtgtataagtgcacacagaaatatatatacatatgtagactatatacatgtgtgtatatatgtgtatatatacatacacttgtataaatgtatatacacatatacctataatgtgtgtatgtgtatttattgaagaaacagataccatactcatttctaaaagaatattcagagaatatcaagatgattctggctgaaaaaggccagtggaaattcaggtgaaaatgttcatcaattcccattgcatcacctctgtaatttttcagctctctgtataaacattaaatgtcttatatagcagcaaaaatataaaatagttgtccatattttcacaggtgtggtgtaatttataaaattagaaagcaacttatcagctacttaagagaaatggcaagttttgatatgagtatacaatatataaaaatatatatagtgctatatatataaatatttggtctctatttcattttttgcatcagtattaatactaaaatatgtctcgctagtgatgtttttatgatatccctgatcctaactgaagagacagttatttatagtcatttattttaaaaaatgaaaataagtgaataataattaggttaacattgttgctccctgtgacaaaattttataagcaaatttcaaaagacatgttgtaaattaggaggctcaacaataaaacattatgctccagaaaaaaaaaaaaaacgcataccacccgggccccttgggctcacaggagcagctgattcgcgttgttggtaggctgggccctgggggcactcattaggcatcacaggttgcaagcaatccctgcttgctaacacaaggcccgttggcactttgggcctccaactttaagccaagggctcaacttgaacaaa

SEQ ID NO: 1794 - DNA, 598 bp, Homo sapiens
ccttccatgagagggaaaaatagtccctttgtatgtcttaattatgtagaaaatagtcatgtctttttaaataaaatgaaataatttatcttgctttctggaaaaaatatgaaacaggtaattctgtatgtttcaatatatctcatcaattgcatatatttaatttattgctaattagtacttggtccctcagtattccccattgtcattgacatatacaacatattagcttgaacattgagctatgaggtcaggagcttttgtgggccaggtagtttgttcttagtctctagctccagcccactgcctttcacgttcacactgagagtggggagatcatcactacccaaaagaagttcaaataaataagttaaacaaaggagagccactgtctcgtcatcactatggaccttgggatgccacatctgcacaaacaaagcaatttaaatttttaatgtgactgttttccctgaagtaaactggcataggcaaaatccagtaaattcttattgaacttacttagctacagttgatgtcctcttatatttgtgaaaatctgaaacacaagataaatgtgaaatacaagaatcgtatgggg

SEQ ID NO: 1795 - DNA, 558 bp, Homo sapiens
gaccagatggattcacagctgaattctatcagacattcaaagaagaattggtacaaatcctactgaaacaattccaaaagataaagagggaatcctccttaaatcattatgtgaaaccagtatcaccctaataccaaaaccaggaaagggacataacaaagaaactgttgactcgctctttctgtgtttctctctgccccgtgctgtctcccctgcagtctctgcagtccaggccctcttctctctctatgatctctttgcactctgtctgtttctctgttctgtctgcctctgctcacccacacgtgcacttgtgccccacatgccccaccctcgttctctctggttcccactgtgtctgttgtgtgtctctattcttcttctgattactctttcctcccccacccttatctctttaatgttattgctatgtttgtctctgtgctttctctgtgtgttttcactctttttctttcctgtctcccttctgcagttctgtttcttggtgtctggttgtcttctggtgggggagaagggatagtttactattgtcagtac

SEQ ID NO: 1796 - DNA, 740 bp, Homo sapiens
atttacaaatcccagaaactaagtgaaaccaagcaggataaatacaaaaaataaaaaaatcacaactagaaataccatagtccagttgctggaaacaaaatatgcagagaaaaataaaagcagcctaagaaaaaaggcacagtgcataaagggaaactatgatagctgagtccttatcagaaacagtgaggacctgaagacaatggaacttctttcagggtactaaaaaaaaaaaaaaaaattagcctaaaattctgtaagcaaagaaaaagatcctttaaaaactaggattaaataaagacaatttcatataaacaaatatgaaaagaattcatctctagaaagcactctagaagaaatgctaatgagtgttcttcaagctgaagggaaatgaatccagatgggagcatgaatctacaggaaggaatgaagaacaccagacatgggccgggcactgtggctcatgcctgtaatctcaacgctttgagaggccaaggtgggaggatcacttgagtccaggagtctgagaccagcctagacaacatgacgaaaccctgtttctacaaaaaaaaaaaaaaaaaaaaaaaattagctgaggatggtggctcatactcttgttccaattacttgggaggctgagactgaggattcctgggcccaggacacggaggctgtagtaagccaagatcacaccactgcactccagcctgggtgatagagtgagactctgtccccctgcc

SEQ ID NO: 1797 - DNA, 343 bp, Homo sapiens
atgtgagattgtgactctaatatacacactcagcctaaaagttaaaggtgtcaccctcaaagatgatgagattgtgtcatatcactgggcctagtaccccaggtgttgagactttaatccttaaaatcctttccatgggtgcattgttacatatcactgcgtcagaatcatatgaatgtgactcttctgcctgggccctgtcaacaggggatattatcacatatctctgggcctatgagctagatgatgtgtctctccagcttgtgccctgggttgtatgtatctcctttctattctggactctgccaagagaggggattattacatatttatgagcccagca

SEQ ID NO: 1798 - DNA, 417 bp, Homo sapiens
tgagagtatctttgattatccagatgggcctaatgtaatcacatgaatccttaaaacagaaggcagaagcagaaatcagagtcaaagcacaaggattaccaaggcaccattgttggcttgaagagaaagaggaccatgcagcaaggaaatagggaccacagtcccacaaccatgaggcactgaattctgccaatacccagtgagtgtggaagaagaccatacgtcccagatgagagctgcagccctggatactacctggattttagcctaatgagaccctgaaaagataaaccaaccacactgtgccagatttctaacctatagaaatagtgagataaatttgtgctttttaaaagtgctacatttttacagcacagtaatttgttacacagcaatagaaaactaataacaactagt

SEQ ID NO: 1799 - DNA, 382 bp, Homo sapiens
caattagaagatgcaagtagccttgtgtgacacccaaggcacctagcatctgatttatacaagcagtgggacagttaacaaatgattcattaagattttctccaggccgggtacagtggcttatgcctgtaatcccagcactttgggaggctgtggcagatggatcgattgaggccaggagttcgagaccagcctggccaacatggcgaaaccacatttctactaaaaatgcaaaaactaaccagtcacaatggcacacacctgtagttccagctacttgggaggctgatgcaggagaattgcttgaacctgggaggctgaggttgtgccactgcactccaacctaggtgacagagccagactttgtctcaaaacaaaaaac

SEQ ID NO: 1800 - DNA, 2026 bp, Homo sapiens
  misc_feature (404)..(404): n is a, c, g, or t
  misc_feature (569)..(569): n is a, c, g, or t
  misc_feature (1480)..(1480): n is a, c, g, or t
acaccctcggattgacgtgcgcacgcgcaccggttaccttcaggagcgccgaagaaggaaagaagaacacagagcccgaggcaaagcttaagtgcttacgcttttgtcgggaggtacagacccagctctgcgagagccaggggaaaaggaagagaggcagggaaggaaaggcagcaagtacaaggtgatgaatgactgcactggccattgcttcatgaagagccacgaaaaaacagagccggtttctcagcaggtagctggctgctcagtcacaaaggacctctttggacaggctttatggaaatactgtgcctaggacagtcgctcaaaggcaggagggagagaaaatgcatccgcaagctcactttgtcttctttcttctgctggtcaaaatttgctggctngggcagttaacgccctcacacatccgagttgtgtcacctggcccctttggtagccactggggaagccagatctaggcatgtggcctgatggctcctgcggtggaaccacatgctcacactcagtcagtcaccactgggatgccctgggcagggcaggctgagtgnctgggagatagctgagcctaagatatctaagcaagcacctgtgatgtatgcactgcagtgtccaaatgtgaaaaagcaagaaagggagatagaagcatatttttttctggagagaaggaggaaaccaccaggagaatacaaacagaaaaaagacatgctcatcatgccctgcaaactcctatgaactggaactacagcagctgttctgccagggacaggttcttctctaaagttccagctctctggagggagaaagccctgactttggatggagttgagctctgtcgcccaggctggagtgcagtggcaccatctcagctgactgtgacctccgcctcctgggttcaagtgattctcctgcatcagcctcccgagtagctgggactacaggtgcacaccaccatgcccggctaatttttgtatttttagtagagacggggttttgccatgatggccaggtttggtctcaaactcctaacctcaagtgatccaccctcctcagcctcccaaagtgctgggattacaggcgtgagccactgcgccccgcctacttgaatttttttttttttttttttttttgagacagagttttgctcctgttgcccaggctggagtgcaacggcatgatctcgactcactgcaacctctgcctcctgggttcaagtgattctcctgcctcagcctcccaaatagctgggattacaggtgcccaccactgtgcctggctgattgtatttttagtagagatggggtttcatcatgttggtcaggctggtcttgaactccagacctcaggtgatcggactgcctcggcctcccaaagtgctgggattacaggcatgacccactgtgcccggacctgcttgaatttttatgatgagcatgttggcagatcacgactgccagctccntgacagcaagaaccttgtatgactttttcatgatggatgttcatctgtgccatctgtaaatattgaataaatatttgtggaatacatgaatccaaaagtgaatggaatgataaagagggaaaggatcatgacatctactacagcatttggcacagacccagctgtctgcagtactatcaagagatgacatggacttcaaggatcaaacaggggagaaaaaggcttaaaagaaaaacaagtctccatcaaaggtaataaccacaatgagaactatacatagctatgtgcttataggtcttagttcacattcccctcattaaaattatagctcaagaaataaagggctgtttaatgacttgggtatataaatatacttcatttgtatattttttacttgctaaaatctatccaaattggtattacctcaaaccataatcttctactgtattttataattttactttattgccatgtatttttcccactgatgttcacaaattcacaggaaacatcagccatgtactaaataaaatatgaattgaatcg

SEQ ID NO: 1801 - DNA, 412 bp, Homo sapiens
actattacaaagtgatagacgtggggctttaggcattatcaatcggacaaattcctaggaactgcggatattgctcgccacagtatcttatcagttaattgcactcttagaggtgctaagagtcagcttgcacaagttaagtccttgaggaaggggctgccagtgaaaaagccaagataaagtctgtctagctctcttagctaaaagaaagtcaattcaggtagaaacaaggctaagtgattaaaagaaaaggaaagtctaagaacaaagttaataaaaacaaggttaggcattacagatggggttatccttatattcagcacagtgtttgttctgaaacttcgatggagtgctcctagtttgataacttggaccatgccaaataaattgaatttatctttcttaacaacag

SEQ ID NO: 1802 - DNA, 388 bp, Homo sapiens
cagtttgcttgtattgcgttaatggatacctcgacccaaatacatcgaatgtgtggattcaacactgtgaactgtgtaaacccctttcaggtactgaataattagaaatgtcactttatcaccaatttgtcagcaaagggaatagtgaagagactgctgtttgagagaatagtgtaaacgctgatgattgctcctctccgtggctgcagagagtacagagaagagattattctgttttctgttcaagtggctgtattttaatttgcctttctaaaaggaacaaatggattcagactaggatattgaagaaaattactgtagcttttagagtcatatttcagagagctgtttgaaggcaatttaattatctattatcttctcttaatat

SEQ ID NO: 1803 - DNA, 906 bp, Homo sapiens
gccctgttcaaatggttacaaagttcagctagagaattccttctccctgtagagttttaccccctgctcctctggccgccctccggatggatctttgtgttgccaggcaggaatgggctgcttggggacccagtgagctccgagggcctttctgctgcttcctgtacccctgtatttcgctcagctctctgacttgactcagctccagacatctacccctggagaaagagcccaatgagaagtaatctctgaagcccagatttcctaaggatgaagcttcaggagaggccttatcaatcctgacaacaaacttttctcgtcaatttagtttcatttaatggaagttttaaatgtgtaaagttcagaaggctattaaaattggttccagctatctaagatacacacacaaccacacacgcgcacacacggtagagataaatatgttcgaaaatccagctcaatgttactagaaaatttgatcagaatctggtgaaataaatagtaaacttactaaaaatgccaaatatcccagaagctgcttaacatttgatcaaaagctctgtccagtcaattcctgcttctttcaaaaatactctgctgaaaagccaaaggagaaatggggctggtaccttcaatatagagaattccaagtaagattagatcccagaaggcttagtgtggctttctaggactctcactattaggcagtaacctaccattcacctctgtttcccagattcaccttgttataccttataacttaaaatataaattccaacaatgtactgcactcaaaaaaattatttctcaatttgtttgctcatactattgatttttttctagaatctaaataattgtgaattaactatgatagcagtatgcacaaacagtaagtgaaatcagacc

SEQ ID NO: 1804 - DNA, 793 bp, Homo sapiens
agctctctttttgcctgctgccatccacgtaagatgtgacttgcacctccttgtcttctgccacgattgtgaggcttccccagccatgtggaactacatctacccctggagaaagagcccaatgagaagtaatctctgaagcccagatttcctaaggatgaagcttcaggagaggccttatcaatcctgacaacaaacttttctcgtcaatttagtttcatttaatggaagttttaaatgtgtaaagttcagaaggctattaaaattggttccagctatctaagatacacacacaaccacacacgcgcacacacggtagagataaatatgttcgaaaatccagctcaatgttactagaaaatttgatcagaatctggtgaaataaatagtaaacttactaaaaatgccaaatatcccagaagctgcttaacatttgatcaaaagctctgtccagtcaattcctgcttctttcaaaaatactctgctgaaaagccaaaggagaaatggggctggtaccttcaatatagagaattccaagtaagattagatcccagaaggcttagtgtggctttctaggactctcactattaggcagtaacctaccattcacctctgtttcccagattcaccttgttataccttataacttaaaatataaattccaacaatgtactgcactcaaaaaaattatttctcaatttgtttgctcatactattgatttttttctagaatctaaataattgtgaattaactatgatagcagtatgcacaaacagtaagtgaaatcagacc

SEQ ID NO: 1805 - DNA, 816 bp, Homo sapiens
  misc_feature (76)..(76): n is a, c, g, or t
agcggatgctggcgccgtacctggaactcggaggctgggatcgtgattttgcgggctccgcgtctgtgtaccgganggtactaagttcagggcttcccccaggccactgctgtgaactacatctacccctggagaaagagcccaatgagaagtaatctctgaagcccagatttcctaaggatgaagcttcaggagaggccttatcaatcctgacaacaaacttttctcgtcaatttagtttcatttaatggaagttttaaatgtgtaaagttcagaaggctattaaaattggttccagctatctaagatacacacacaaccacacacgcgcacacacggtagagataaatatgttcgaaaatccagctcaatgttactagaaaatttgatcagaatctggtgaaataaatagtaaacttactaaaaatgccaaatatcccagaagctgcttaacatttgatcaaaagctctgtccagtcaattcctgcttctttcaaaaatactctgctgaaaagccaaaggagaaatggggctggtaccttcaatatagagaattccaagtaagattagatcccagaaggcttagtgtggctttctaggactctcactattaggcagtaacctaccattcacctctgtttcccagattcaccttgttataccttataacttaaaatataaattccaacaatgtactgcactcaaaaaaattatttctcaatttgtttgctcatactattgatttttttctagaatctaaataattgtgaattaactatgatagcagtatgcacaaacagtaagtgaaatcagacc

SEQ ID NO: 1806 - DNA, 960 bp, Homo sapiens
gccctgttcaaatggttacaaagttcagctagagaattccttctccctgtagagttttaccccctgctcctctggccgccctccggatggatctttgtgttgccaggcaggaatgggctgcttggggacccagtgagctccgagggcctttctgctgcttcctgtacccctgtatttcgctcagctctctgacttgactcagctccagaaatattctttcattaatattacatgcttatggaactttacctattgattaaagacatctacccctggagaaagagcccaatgagaagtaatctctgaagcccagatttcctaaggatgaagcttcaggagaggccttatcaatcctgacaacaaacttttctcgtcaatttagtttcatttaatggaagttttaaatgtgtaaagttcagaaggctattaaaattggttccagctatctaagatacacacacaaccacacacgcgcacacacggtagagataaatatgttcgaaaatccagctcaatgttactagaaaatttgatcagaatctggtgaaataaatagtaaacttactaaaaatgccaaatatcccagaagctgcttaacatttgatcaaaagctctgtccagtcaattcctgcttctttcaaaaatactctgctgaaaagccaaaggagaaatggggctggtaccttcaatatagagaattccaagtaagattagatcccagaaggcttagtgtggctttctaggactctcactattaggcagtaacctaccattcacctctgtttcccagattcaccttgttataccttataacttaaaatataaattccaacaatgtactgcactcaaaaaaattatttctcaatttgtttgctcatactattgatttttttctagaatctaaataattgtgaattaactatgatagcagtatgcacaaacagtaagtgaaatcagacc

SEQ ID NO: 1807 - DNA, 231 bp, Homo sapiens
ttataaaagtgttacaataaaggatgctgaaaagaaattttcttccttcttttagacatctacccctggagaaagagcccaatgagaagtaatctctgaagcccagatttcctaaggatgaagcttcaggagaggccttatcaatcctgacaacaaacttttctcgtcaatttagtttcatttaatggaagttttaaatgtgtaaagttcagaaggctattaaaattggtt

SEQ ID NO: 1808 - DNA, 396 bp, Homo sapiens
acatgggagtgtttttaatttgctaccgtctgcttgatcccagatcagagtctaactttttgcattagctcctctgactgggattgaccaactttgtgaaataaaagcctgcccgctgctgcctctgagactcagttattagtacccatggaagggctttaggcagaaagctctcagggaactcagagagagtcggtgaaatcatggctgatgcattcagaggacagaaagccaggcacagagtgttaaatacaacattttctcacccatatgtggaagctaaaaaaagttaatctcaaacagtttttctaatgcactaacttctgggattatcttttcaaaaagaaacaatggaagataatgaaaacaaatggaaatggttagcaagaaaaaaaa

SEQ ID NO: 1809 - DNA, 959 bp, Homo sapiens
gccggaggctggctacactgtcatccttcagatgggcctgtgtgaatggattagggaaccttcaaaaaggtctctcttctggcccaaactgctcaacctggtctgaaaatgtatgtgtgcaatattgcacttcatgatgagatgtgatgttcagggcttctttaataatgcctagaaaaaccttaaaatgggcttggcagatttctttcatttggaggctgtggtactcaactttggtgtttttcattccagactgtaccacattctgtgcccatagtttgaaaaacattttggaagccaatacctgcttgtgtgtagctgcagtcagtttttaaaggttttgctgatgtatattttattttcccctaacctttattaagatcttcaaagttgaaatgactttgcagtggccatctttatccccatcatcaacaggctgccattaatagcattttattctacctgttttattactatctatccatccctccatccatcagtctatcttatttttggatgcatttcaaagtgaatgtagcagatttcaccagttaacttcataatattttatacacttgaagtctagctttttgaacagtacacaaatgtgactaaattgctatagaatgctgttaaagaaggtataaaataaatgccccagttttggaaaaaatttaggagccttattttaaaagtaacaggtattctggaatcctggcatggagttggaaaaaaatatactaatttttaaattggaacttttttgtaactcagacattgctgacccctaaaaaagaggggatacacttgtaaattttattttcatcccaggcaggagttaagtaacttcccgttcttatagagaggcaagatcatcttgaaaagtgttatagacatagaatgttggttacgcccacagaatcaattgcatttggaaggcagaggaacagttaactgag

SEQ ID NO: 1810 - DNA, 822 bp, Homo sapiens
tcccagagaaggaagactcaatgtacatttctctcagaaatatgacaggtctgtgtttttgttggtctggcatatgtttgtctatcttgaacagtctgacaggtaattatttataaaatctggttttgcccagtaagttcatataaaacctttcatttttcatcataagccagtaagctgaatttagaataaagcaaggtcatttatgtctgtcctgaaccagcctacatgtccccataattgctcaatatttttaattcccttttctattttttatacttaggttctttctctgactctttgcacaatactaaatttgaagtgaaataaaacttccttcagcagtgactatagaaacaaaagaaaatttacagaaggaatgtttaagaaaacttcagtaaattattttctcaataatcataatgttagagcagaagatagtcttagagatcattaagaacagctgctcatcttgcaaatgaaaaaaccatggcctagagagggaaagtgagtttcctaagatcactcaataatgtagtgacagaccagagatgagaatcgatggtccctaattttcagtcggtattatacagtattttctaccatactgggttagcataagaatattactaagacatgttggggttttatggcatatttatcctagacaacgatgtaaatttatttaaaaactgtactaattatggatacatcctaaagcatacgtgttatatagtaaaatcttcagtgtgactgtggtattaagtaaacagtctgttatcttacacatcaggcttaactctaagtcaaatggaaatatac

SEQ ID NO: 1811 - DNA, 751 bp, Homo sapiens
cccacatgggtgtgaactacagtaggagttacaaatgccagccatcctaaggacttagccttcatcccagagccagaagcatttcaggatttccaccacctggaaagatattgttattccacttgaaatgggctcttagctgttgcccctttaataatgccagctatgacatggacatgggctgattcgttagtaagataacatactgtcattgctggtgaaaagaccgaaaaagattatgcagattctcctggagtgttacaaagtatgggcctgtctcaataacctgtgctttctgatcctacattgtgaccaagtcccacgaaggctgactgtcaataacaagggaggaaaataggcaggcccaggggtggaagaaaaagagcatcctgccgaaagaaaaaaaaagataggccagaatcactagggaagctttttgtttcataaaggagcatttggttactcttgtttacagatcatttcgtatgtaaagtgtcttaaaaattgcaataacttttattccttagcaaatattctttttgcaaatgcatggctagacattaattcatatattttttaatatttaagaaattcaacacaacatgtattattgatgcaaacccacttgatactagtaaatgctaaacacctaataatatttaataattgaaaataaatttatgggcaaatttatgaacaatttattttaagttgagaaactccagtatctttaaactatgtctatatgtct

SEQ ID NO: 1812 - DNA, 312 bp, Homo sapiens
aatcaggaaagctttcgacaatgaattttatgtatgacttggctgttgacatacaggtgatgtttagggaatgaagtattagactgcatttaccttgttaagtactgaatcttattttaatcacatcacatttcctcttttttttttctaagagatagtgtattgctatgttgctcaggctggaattgaactcagtgggctttagtgatcctcctgcctcagcctcctgagtagctagaactgcaggtgcatgccaccacacccagcttactctttttttgattagcaaactaatgcatattcattaaggaa

SEQ ID NO: 1813 - DNA, 6851 bp, Homo sapiens
gccggagggcgcccgaggggccccgggccgcggcgctcagggcccgggcggccggcggcggccccggggctggggggagtccagcccggatattgagtgcagccattgagaaaagccaaactcttgtgtgtgcgcgtctcgatagcccccaagatggccgccaatgtgggatcgatgtttcaatattggaagcgatttgatctacggcgactccagaaggagcttaattccgtcgcttctgagctgtctgcacggcaggaggagagtgaacattctcataaacatttaattgaactccgccgggaatttaagaaaaatgtacctgaggaaatcagagagatggtggctcctgtattaaaaagcttccaagccgaggtggtggcccttagtaagagaagtcaggaggcggaggctgcttttctgagtgtttacaagcaattaattgaagcaccagaccccgtgcctgtgtttgaggcggcacgcagcctagacgacagactgcagccccccagctttgaccccagtgggcagccccggcgagacctccacacttcgtggaagaggaaccccgagctcctcagccccaaagagcagagagaggggacgtcgcctgccgggcccacgctgaccgagggaagccgcctcccaggcattcccgggaaagccctcctgacagaaaccttgctgcagagaaatgaggcggaaaaacaaaagggccttcaagaagtacagatcactttggcggccagactgggggaggcagaggagaaaatcaaagtcctacattcagcgctaaaggctacgcaggcagagctgctagagctgcggcggaagtacgacgaggaggcagcatccaaggcagatgaagtcggcctgatcatgaccaacctggagaaagctaatcagcgagctgaggctgcccagcgggaggtggaaagtctccgggaacagctggcctctgtcaacagctccatccgcctggcttgctgctctccccaggggcccagtggggataaggtgaacttcactctgtgctcgggccctcggctggaggccgcgctggcctccaaggacagggagatcctgcggctgctgaaggacgtgcagcacctccagagctcactgcaggagctggaggaggcatccgccaaccagatcgccgacctggagcggcagctcacggccaagtccgaggccatagaaaagctggaagagaagctccaggcccagtctgactatgaggaaattaaaacggagctgagcatcctgaaagccatgaagctggcctccagcacctgcagcctcccccagggcatggccaagcctgaagactcactgcttattgcaaaggaggccttcttccccacgcagaaattccttctggagaagcccagcctcctggccagccctgaggaagacccatcagaggacgattccatcaaggattcactgggcacggagcagtcctacccctcccctcagcagctcccacctccaccagggccagaagaccccctgtctcccagccccgggcagcccctgctgggccccagcttggggcctgacggcactcggactttctcgctgtcccccttccccagcctggcatcaggggagagactgatgatgcccccagccgccttcaagggagaggcgggcggcctgctggtgttccccccagccttctatggcgccaagccccccacagcccctgccaccccggcccctggccctgagccactgggcggtcctgagcccgcggatggtggtgggggcggagcggcggggcccggggcagaggaggagcagctggacacggcagagatcgccttccaggtgaaggagcagctgctgaaacacaacatcgggcagcgggtgtttgggcattacgtgctggggctgtcgcagggctcggtcagcgagatcctagcccggcccaagccctggcgcaagctcacggtgaagggcaaggagcccttcatcaagatgaagcagttcctgtcggatgagcagaatgtactggcgctcaggaccatccaagtgcggcagcgaggcagcatcaccccgagaatccgcacgcctgagacaggctcagacgacgccatcaagagcattctagagcaggccaagaaggagatcgagtcgcagaagggcggcgagcccaagacctcggtggccccgctgagcatcgccaacggcacgacccccgccagcacctcggaggacgccatcaagagcatcctggagcaggcacgccgtgagatgcaggcgcaacagcaggcgctgctggagatggaggtggcgcccaggggccgctcggtgcccccctcgcccccggagcggccatcactggccaccgcgagccagaacggggccccggccttggtgaagcaggaggagggcagcgggggccccgcgcaggcgccgctcccggtcctgtcccccgccgccttcgtgcagagcatcatccgcaaggtcaagtccgagatcggcgacgccggctacttcgaccaccactgggcctccgaccgcggcctgctcagccgcccctacgcctccgtgtcgccctcgctgtcctcctcctcctcctctggctactctggccagcccaacggccgcgcctggccccgcggggacgaggcccctgtgccccccgaggacgaggcggcggcaggggcggaggacgaaccccccaggacgggcgagctcaaggctgagggcgcgacggccgaggcgggcgcgcggctgccctactacccggcctacgtgccgcgcaccctgaagcccaccgtgccgccgctgacccccgagcagtacgagctgtacatgtaccgtgaggtagacacgctggagctcacccgccaggtcaaggagaagctggccaagaacggcatctgccagaggatcttcggggagaaggtgctgggcctgtcacagggcagcgtgagcgacatgctgtcccggccgaagccatggagcaagctgacgcagaaggggcgggagcccttcatccgcatgcagctgtggctctctgaccagctcggccaggcagtgggccagcagcctggtgcctcccaggccagtcccacagaaccaaggtcctcaccatccccaccccccagccccacagagcctgagaagagctcccaggagccgttgagcctgtccctggagagcagcaaggagaaccagcagccagagggccgctccagctcctcgttgagcgggaagatgtactcaggcagccaggccccagggggcatccaggagatcgtggccatgtcccccgagctggacacgtactccatcaccaagagggtgaaggaggtcctcacagacaacaatctagggcagcggctgtttggggaaagcatcctgggtctgacacagggctccgtgtctgacctgctgtcccggcccaaaccctggcacaagctgagcctgaaggggcgggagccttttgtccgcatgcagctgtggctcaatgacccccataacgtggagaagctgagggatatgaagaagctggagaagaaagcctacctgaaacgtcgctatggcctcatcagcaccggctcagacagtgagtccccggccacccgctcagagtgccccagcccctgcctgcagccccaggacctgagcctcctgcagatcaagaagccccgggtggtgctggcacccgaggagaaggaggcactgcggaaggcctatcagctggaaccctacccctcgcagcagaccatcgagctcctctccttccagctcaacctcaagaccaacaccgtcatcaactggttccacaactacaggtcccggatgcgccgggagatgttggtggaggggacccaggatgagccagaccttgatccaagcgggggtcctggaatcctaccgccaggccactcccacccagaccccaccccgcagagccctgactctgagactgaggaccagaagccaaccgtgaaggaactggagcttcaggagggccctgaggagaacagcacacccctgaccacccaggacaaggcccaagtgaggatcaagcaggaacagatggaggaggatgctgaggaagaggcaggcagccagccccaggactcaggggagctggacaaaggccaaggtccccccaaagaggagcatcccgaccctccgggtaatgatggactcccaaaagtggctcccgggcccctccttccaggtggatccaccccagactgtccctcacttcatccccaacaggagagtgaggccggggagcgacttcacccggaccctttaagttttaagtcagcctcagagtcctcacgctgcagcctggaggtgtcactgaactcgccctcggccgcctcctcaccaggcctcatgatgtctgtgtcacctgtcccctcctcctcagctcccatctccccatccccacctggcgccccccctgccaaagtgccgagtgccagccccactgctgacatggctggagccttgcaccccagtgccaaggtgaaccccaacttgcagcggcggcatgagaagatggccaatctgaacaacatcatttaccgactagagcgggctgccaatcgggaggaggccctggagtgggagttctgaaggcagggtgagggggcaagggacataccctggtaactaccttccttctcgcacttactctcctcaacaggatggggtaagggagggaggaactcaaccatcaaaatgtggacagcaatgttatgccgtttacgttttttgttgtaatcctagttctatgaagctgtgtgagcaggtgggtcaaatgccattgcctccacttttctgcacccccctgctcctcttcaccctgacccctctgcaggaggcagaagcaaaatggcaccacatattcacctgaaaactccaaactcttttagaaaaataaataaatatttatagacctcttttagatattttaataaaggatcctttggaatttatcccagctgatgctgttttgatattacagagagttataaaatcaggatgctgtcacaactgttgcgaagtatacactgaagttgtgtcgtttttgccactagatgagattaaaagaagacaattattcaaagccatcacaaaacactataagactgaccaaaatttagataacctttgaaccacgatttttttccacatctgtctgtgagacacagcgcaatgctactgcccttccagaaactgtgctaaaaagagaaagtccaaaagactctaaacaaaaacctcgacgccgttgaggatgtgtttcattctggtggtctgttttgcaagcttgataacagaatgtccgtgccattgtaaatgttgtagagatgtgggccgtggcccaaccgtcctatatgagatgtagcatggtacagaacaaactgcttacacaggtctcactagttagaaacctgtgggccatggaggtcagacatccatcttgtccatctataggcaagaagtgtttccagatcctttggaaaggtgggcatggggcaggtgcttggagagtggcgtttgagccagagcgaccccatttcccgtgtgaaccataggcacaacccaggaagtttccccacttgtaggagtgtgggtattccagagcaagactgtggccaccatcttcccctcttggtgttttccgaaagtgacagtgttggtcatcccatgaccactgaagcttagtaaccagcgccaaaaagtagattcatcaaactagagaccccagctccccttctcgccatcttctttctcaagttgaccgtggtgctgtttctggaaggcatctgcaactccaagtccatgcagaactctggaaggccaagttcatcgcagcatgttcaccatatcccagcctccaaatctatcctcctaccttccaacgcatgacctgttggggagcagagacttaacccccaactcagaggaacccttcctccagcgtctttggcatggtttctagggtgagagttcccaatttggatagaacggccaccatattggttactgaatctctctcccttgtttttattacgtttcctttttcaaactgtccatgggaaggctgaattgagtgactccccagaatgaagatgagaaggtgaatataatcaatgccaatgtaatgccagcgggtgagatggccgatggaggtttcaaagatgtagctagcattttgaaaccatatgggcaaaacccggcaaccagaaggggacagataaggaccgttccagaaatcccaactctcacacccagcccaggctgcagtctccacaccaaacagtcaacaaaacacaaaccctgaaggaaaaccttttccatacacccaggctatgcattgaagagttttccactgtatacatttttatccagatgaaggtatttttatattttgacaataggaaacagtgaccattttcagagtaatcaaatctggaacaaatgaaacatcttttagccaccaccaccctgttgcaattaagacaaccgtgggggaacacaccactttttactgttgaaaccaacacaacgttgaaatccaggcttatacgcagactccgattcctagagaactaaatttggctttagtgtgacgggatttgattaagcacttagtatagtcttttgaacacggaaatcctgttgtacttaaagctagcggacccgtgaacaactttgtcaggttcacgtcctataacggttaaaaaacacacacacacatacacaaaccgtttctatgagagattgatgaactttgtttaaaattttaaaaaaaggaacacgttctgtaaacgagtcgctaaatacagaattgtataataaaaaaaagt

SEQ ID NO: 1814 - DNA, 2908 bp, Homo sapiens
  misc_feature (178)..(178): n is a, c, g, or t
  misc_feature (180)..(180): n is a, c, g, or t
  misc_feature (299)..(299): n is a, c, g, or t
  misc_feature (326)..(326): n is a, c, g, or t
  misc_feature (334)..(334): n is a, c, g, or t
  misc_feature (344)..(344): n is a, c, g, or t
  misc_feature (348)..(348): n is a, c, g, or t
  misc_feature (381)..(381): n is a, c, g, or t
  misc_feature (1328)..(1328): n is a, c, g, or t
  misc_feature (2007)..(2007): n is a, c, g, or t
  misc_feature (2203)..(2203): n is a, c, g, or t
  misc_feature (2205)..(2205): n is a, c, g, or t
agctcagtacctcccacccagaccccaaagcacccctgagtggtcaacaggagcccctccccctctggtacatctgagcaagtctcggccctgcttcatggcttccaggggttctcatcgctcctctccacggcccatcggcccctactcactgcaacctcagacttctgggctcaancnatcttcctgcctcagcctcccaagcccagctaattttttaaatttattttttgtagtcccaaagtctcactatgttacccagactggtctcaaactcctggcctcaagtgatcctcccncctctgcctcctgaatagctgggattncaggtgtnagccactgtncccnacctcctttctcttataatgacacttgtcattngattttggggccacctggataatccaggttgatttcatctcaagatccttaattatatcggcaaagacactttggtttttgtttgttttttgttttttgttttttgttttttttaagagacagggtcttgctctgtttcccaggttgaagtacagtggtgcaatcttggctcactgcagccttgacctcctgagctcaagtgatcctcccacctcagcctcccgaatggctgggtctgcaggtgcagccaccatgcccagctcaaagacactttgaataaagtcacattcacaggttccaggcgttaggacacagaggtatccttttggggcggacgttcagccagtacacatgtgcctgctgcctggtcccatgctccaccccatcccgcgctcacaggaacagtccagccacgtgagttttcccagtgatgagagtggaaggaatggcaagagctgatggcacagctgcaggctgtggtccctgcgaggacatggcgctatggcacgaggccgagacagcccatgtgtctgcagctggggtcattatcaccctcactgccggccataacgtactcatggccaagaggcccagtggcaccattccttgccgcctttttgcttataatgtctccgctctcatcagtgatatctagaaaaagacaccctcttatttcccacccttttcgatcctttgggtcccactgtgtcagcgacaaatgacactggaggatgaccctgtacagaccccagagatgcctcccaggggtccccaggcagcgctctcccacggcaccccgtagtacctcagttgtaacacgagggggcagcgctgagatatgcgtgtgctttcaggctcaaagacccagattcaaatcctgtttgtgtcacttactgcgtgactgcagaggaattaattcaccttcctgagctgcagtctcctcttcnataaattgagaataatattagaacctgcctcgtgctgttatttggaggcatcaaggttcacagtatacagcaggtgcttactaagtgttaactattctccttatcatatatgtgtccagctttcctaggagatgtgaaatgcaccaggcctcggactaaatcatactaaattcgtatacccagaacctggtacacagtaggcacctaataattgttgaatattagaaataagactcagcagcaaaaacgggaggaaaggttattggagcaaaaagatacttcatcagtgagaccccccttccatgcacatcttgtgttgtttactcagatagcatttattgagtgcctactgtgtgcccggcacttgctggacactgggaacacagctgtgaccctacaaacacagacatgggcccagccctcagaagcttacctttgagtggcagaagtgaccagatcatcggtcacatagcctgtcatcacagtcacagggggacaccagcatgtctagtgcttgggggtacagacaggcaggaagacaaagggaaacagaagggtcttacggccccccacttggaaacgagccctcattttggggggtgttcttatgggaccctcatctttctggagagaagactgttaaaacagtcacaggccaggggccactcaaggtcccaanattgctgtggaaccttctggaaggtccatataccctctctcctctttccccaaagcccgggagcaggaaggtcattccaagcccagtgctgactccaggagtctgatttcccaactctcctccccagaaatgcaggggcgggagagctgtccccagctgtcaccgacttagagaacaaggagccttaactgatggngncgtaccatacgaacagcccctttagggcctctaattcattttcgagacatttaagcataacaaaatgttttaatgatttcttaggggaattaggaagacatatttttgttctcattaaattttatcctcagacacaagaaccaaatgtcaaatgtgtgttgggcgcttccagcttccccgctcactgccggccccccagctccaaccccctccataaaaataacactcctggaaaattcgctgggacgcgcacactcctgtttttatatttcttgacaggcaaattatttgtcgaaatactcctccccgccacccgaagccacacaagtcctgattcaacatttttgttttgagtgactgctgccaacacagatctttggcagagaatacgacagagcctgatggctcagcaagtattttgataagtgtgcagcctggatgtctgtaattacgaaagaaaaccgtaaatcttttggatattgttcacacagatgtggcgtgaagtgagaaaaaaaaagcagtaaaacgtgttaaaagcataattaatgtcattgttgtgggtgatgatgtgatttaaacctctctgacttctgtattggtgatggctgattcctttatcgcactcgtagagtcactaggtacggacccaagcttcagaaggctaacttgttaactgagtgattagttaaaaggaaaaaaaaaa

SEQ ID NO: 1815 - DNA, 459 bp, Homo sapiens
tactactactaaattcgcggccgcgtcgacgaaacagtgaccattttcagagtaatcaaatctggaacaaatgaaacatcttttagccaccaccaccctgttgcaattaagacaaccgtgggggaacacaccactttttactgttgaaaccaacacaacgttgaaatccaggcttatacgcagactccgattcctagagaactaaatttggctttagtgtgacgggatttgattaagcacttagtatagtcttttgaacacggaaatcctgttgtacttaaagctagcggacccgtgaacaactttgtcaggttcacgtcctataacggttaaaaaacacacacacacatacacaaaccgtttctatgagagattgatgaactttgtttaaaattttaaaaaaaggaacacgttctgtaaacgagtcgctaaatacagaattgtataataaaaaaaagt

SEQ ID NO: 1816 - DNA, 7012 bp, Homo sapiens
  misc_feature (293)..(294): n is a, c, g, or t
  misc_feature (337)..(337): n is a, c, g, or t
cccggaaagccaggttgggtcactgctgggaggtatgaggtgagactcgggtttgcaggcagggcaagttgtggggaggtgggggtggcccctatttgttgggggcagacctgccatttgaaagccaccatcctcatgtgtagccctcacatgggagacaggattggacctgcagggatcctggctgggagcagaacctgcgtcagctcagagtcctgtgggaagggaacggctttatcgcagcctttcgcttttatttttgcacattcgctttttatttgccggtggtgctnntgacgggccctcggagcggggctgtgtctggacacttctgggngccttggacggctctggagaggaggcaggagctgcccaggaaggagcttaattccgtcgcttctgagctgtctgcacggcaggaggagagtgaacattctcataaacatttaattgaactccgccgggaatttaagaaaaatgtacctgaggaaatcagagagatggtggctcctgtattaaaaagcttccaagccgaggtggtggcccttagtaagagaagtcaggaggcggaggctgcttttctgagtgtttacaagcaattaattgaagcaccagaccccgtgcctgtgtttgaggcggcacgcagcctagacgacagactgcagccccccagctttgaccccagtgggcagccccggcgagacctccacacttcgtggaagaggaaccccgagctcctcagccccaaagagcagagagaggggacgtcgcctgccgggcccacgctgaccgagggaagccgcctcccaggcattcccgggaaagccctcctgacagaaaccttgctgcagagaaatgaggcggaaaaacaaaagggccttcaagaagtacagatcactttggcggccagactgggggaggcagaggagaaaatcaaagtcctacattcagcgctaaaggctacgcaggcagagctgctagagctgcggcggaagtacgacgaggaggcagcatccaaggcagatgaagtcggcctgatcatgaccaacctggagaaagctaatcagcgagctgaggctgcccagcgggaggtggaaagtctccgggaacagctggcctctgtcaacagctccatccgcctggcttgctgctctccccaggggcccagtggggataaggtgaacttcactctgtgctcgggccctcggctggaggccgcgctggcctccaaggacagggagatcctgcggctgctgaaggacgtgcagcacctccagagctcactgcaggagctggaggaggcatccgccaaccagatcgccgacctggagcggcagctcacggccaagtccgaggccatagaaaagctggaagagaagctccaggcccagtctgactatgaggaaattaaaacggagctgagcatcctgaaagccatgaagctggcctccagcacctgcagcctcccccagggcatggccaagcctgaagactcactgcttattgcaaaggaggccttcttccccacgcagaaattccttctggagaagcccagcctcctggccagccctgaggaagacccatcagaggacgattccatcaaggattcactgggcacggagcagtcctacccctcccctcagcagctcccacctccaccagggccagaagaccccctgtctcccagccccgggcagcccctgctgggccccagcttggggcctgacggcactcggactttctcgctgtcccccttccccagcctggcatcaggggagagactgatgatgcccccagccgccttcaagggagaggcgggcggcctgctggtgttccccccagccttctatggcgccaagccccccacagcccctgccaccccggcccctggccctgagccactgggcggtcctgagcccgcggatggtggtgggggcggagcggcggggcccggggcagaggaggagcagctggacacggcagagatcgccttccaggtgaaggagcagctgctgaaacacaacatcgggcagcgggtgtttgggcattacgtgctggggctgtcgcagggctcggtcagcgagatcctagcccggcccaagccctggcgcaagctcacggtgaagggcaaggagcccttcatcaagatgaagcagttcctgtcggatgagcagaatgtactggcgctcaggaccatccaagtgcggcagcgaggcagcatcaccccgagaatccgcacgcctgagacaggctcagacgacgccatcaagagcattctagagcaggccaagaaggagatcgagtcgcagaagggcggcgagcccaagacctcggtggccccgctgagcatcgccaacggcacgacccccgccagcacctcggaggacgccatcaagagcatcctggagcaggcacgccgtgagatgcaggcgcaacagcaggcgctgctggagatggaggtggcgcccaggggccgctcggtgcccccctcgcccccggagcggccatcactggccaccgcgagccagaacggggccccggccttggtgaagcaggaggagggcagcgggggccccgcgcaggcgccgctcccggtcctgtcccccgccgccttcgtgcagagcatcatccgcaaggtcaagtccgagatcggcgacgccggctacttcgaccaccactgggcctccgaccgcggcctgctcagccgcccctacgcctccgtgtcgccctcgctgtcctcctcctcctcctctggctactctggccagcccaacggccgcgcctggccccgcggggacgaggcccctgtgccccccgaggacgaggcggcggcaggggcggaggacgaaccccccaggacgggcgagctcaaggctgagggcgcgacggccgaggcgggcgcgcggctgccctactacccggcctacgtgccgcgcaccctgaagcccaccgtgccgccgctgacccccgagcagtacgagctgtacatgtaccgtgaggtagacacgctggagctcacccgccaggtcaaggagaagctggccaagaacggcatctgccagaggatcttcggggagaaggtgctgggcctgtcacagggcagcgtgagcgacatgctgtcccggccgaagccatggagcaagctgacgcagaaggggcgggagcccttcatccgcatgcagctgtggctctctgaccagctcggccaggcagtgggccagcagcctggtgcctcccaggccagtcccacagaaccaaggtcctcaccatccccaccccccagccccacagagcctgagaagagctcccaggagccgttgagcctgtccctggagagcagcaaggagaaccagcagccagagggccgctccagctcctcgttgagcgggaagatgtactcaggcagccaggccccagggggcatccaggagatcgtggccatgtcccccgagctggacacgtactccatcaccaagagggtgaaggaggtcctcacagacaacaatctagggcagcggctgtttggggaaagcatcctgggtctgacacagggctccgtgtctgacctgctgtcccggcccaaaccctggcacaagctgagcctgaaggggcgggagccttttgtccgcatgcagctgtggctcaatgacccccataacgtggagaagctgagggatatgaagaagctggagaagaaagcctacctgaaacgtcgctatggcctcatcagcaccggctcagacagtgagtccccggccacccgctcagagtgccccagcccctgcctgcagccccaggacctgagcctcctgcagatcaagaagccccgggtggtgctggcacccgaggagaaggaggcactgcggaaggcctatcagctggaaccctacccctcgcagcagaccatcgagctcctctccttccagctcaacctcaagaccaacaccgtcatcaactggttccacaactacaggtcccggatgcgccgggagatgttggtggaggggacccaggatgagccagaccttgatccaagcgggggtcctggaatcctaccgccaggccactcccacccagaccccaccccgcagagccctgactctgagactgaggaccagaagccaaccgtgaaggaactggagcttcaggagggccctgaggagaacagcacacccctgaccacccaggacaaggcccaagtgaggatcaagcaggaacagatggaggaggatgctgaggaagaggcaggcagccagccccaggactcaggggagctggacaaaggccaaggtccccccaaagaggagcatcccgaccctccgggtaatgatggactcccaaaagtggctcccgggcccctccttccaggtggatccaccccagactgtccctcacttcatccccaacaggagagtgaggccggggagcgacttcacccggaccctttaagttttaagtcagcctcagagtcctcacgctgcagcctggaggtgtcactgaactcgccctcggccgcctcctcaccaggcctcatgatgtctgtgtcacctgtcccctcctcctcagctcccatctccccatccccacctggcgccccccctgccaaagtgccgagtgccagccccactgctgacatggctggagccttgcaccccagtgccaaggtgaaccccaacttgcagcggcggcatgagaagatggccaatctgaacaacatcatttaccgactagagcgggctgccaatcgggaggaggccctggagtgggagttctgaaggcagggtgagggggcaagggacataccctggtaactaccttccttctcgcacttactctcctcaacaggatggggtaagggagggaggaactcaaccatcaaaatgtggacagcaatgttatgccgtttacgttttttgttgtaatcctagttctatgaagctgtgtgagcaggtgggtcaaatgccattgcctccacttttctgcacccccctgctcctcttcaccctgacccctctgcaggaggcagaagcaaaatggcaccacatattcacctgaaaactccaaactcttttagaaaaataaataaatatttatagacctcttttagatattttaataaaggatcctttggaatttatcccagctgatgctgttttgatattacagagagttataaaatcaggatgctgtcacaactgttgcgaagtatacactgaagttgtgtcgtttttgccactagatgagattaaaagaagacaattattcaaagccatcacaaaacactataagactgaccaaaatttagataacctttgaaccacgatttttttccacatctgtctgtgagacacagcgcaatgctactgcccttccagaaactgtgctaaaaagagaaagtccaaaagactctaaacaaaaacctcgacgccgttgaggatgtgtttcattctggtggtctgttttgcaagcttgataacagaatgtccgtgccattgtaaatgttgtagagatgtgggccgtggcccaaccgtcctatatgagatgtagcatggtacagaacaaactgcttacacaggtctcactagttagaaacctgtgggccatggaggtcagacatccatcttgtccatctataggcaagaagtgtttccagatcctttggaaaggtgggcatggggcaggtgcttggagagtggcgtttgagccagagcgaccccatttcccgtgtgaaccataggcacaacccaggaagtttccccacttgtaggagtgtgggtattccagagcaagactgtggccaccatcttcccctcttggtgttttccgaaagtgacagtgttggtcatcccatgaccactgaagcttagtaaccagcgccaaaaagtagattcatcaaactagagaccccagctccccttctcgccatcttctttctcaagttgaccgtggtgctgtttctggaaggcatctgcaactccaagtccatgcagaactctggaaggccaagttcatcgcagcatgttcaccatatcccagcctccaaatctatcctcctaccttccaacgcatgacctgttggggagcagagacttaacccccaactcagaggaacccttcctccagcgtctttggcatggtttctagggtgagagttcccaatttggatagaacggccaccatattggttactgaatctctctcccttgtttttattacgtttcctttttcaaactgtccatgggaaggctgaattgagtgactccccagaatgaagatgagaaggtgaatataatcaatgccaatgtaatgccagcgggtgagatggccgatggaggtttcaaagatgtagctagcattttgaaaccatatgggcaaaacccggcaaccagaaggggacagataaggaccgttccagaaatcccaactctcacacccagcccaggctgcagtctccacaccaaacagtcaacaaaacacaaaccctgaaggaaaaccttttccatacacccaggctatgcattgaagagttttccactgtatacatttttatccagatgaaggtatttttatattttgacaataggaaacagtgaccattttcagagtaatcaaatctggaacaaatgaaacatcttttagccaccaccaccctgttgcaattaagacaaccgtgggggaacacaccactttttactgttgaaaccaacacaacgttgaaatccaggcttatacgcagactccgattcctagagaactaaatttggctttagtgtgacgggatttgattaagcacttagtatagtcttttgaacacggaaatcctgttgtacttaaagctagcggacccgtgaacaactttgtcaggttcacgtcctataacggttaaaaaacacacacacacatacacaaaccgtttctatgagagattgatgaactttgtttaaaattttaaaaaaaggaacacgttctgtaaacgagtcgctaaatacagaattgtataataaaaaaaagt

SEQ ID NO: 1817 - DNA, 5960 bp, Homo sapiens
ggcagagatcgtgcagtgcactccagcctgggtgacagagtgagactccatctcaaagaaaaaaagaagctgcctgtagaccatacaagggaacttattataggcatggtaactggaaggtgattcattaaccagctaaactcaagctggccagaatgggtcagttcaggcagcacccctccaggtaacatcgccacctgttaatgagcctgctacttcaggcctggggttgcaatgactctggaattaatggggttctggggaatggagcagtcattgtcagggaggtaagccgggtcagtgcctcttgaaagacctctcctccagcccgggggctggctgacctcagaccctctccacttgcactgcagcatcctgaaagccatgaagctggcctccagcacctgcagcctcccccagggcatggccaagcctgaagactcactgcttattgcaaaggaggccttcttccccacgcagaaattccttctggagaagcccagcctcctggccagccctgaggaagacccatcagaggacgattccatcaaggattcactgggcacggagcagtcctacccctcccctcagcagctcccacctccaccagggccagaagaccccctgtctcccagccccgggcagcccctgctgggccccagcttggggcctgacggcactcggactttctcgctgtcccccttccccagcctggcatcaggggagagactgatgatgcccccagccgccttcaagggagaggcgggcggcctgctggtgttccccccagccttctatggcgccaagccccccacagcccctgccaccccggcccctggccctgagccactgggcggtcctgagcccgcggatggtggtgggggcggagcggcggggcccggggcagaggaggagcagctggacacggcagagatcgccttccaggtgaaggagcagctgctgaaacacaacatcgggcagcgggtgtttgggcattacgtgctggggctgtcgcagggctcggtcagcgagatcctagcccggcccaagccctggcgcaagctcacggtgaagggcaaggagcccttcatcaagatgaagcagttcctgtcggatgagcagaatgtactggcgctcaggaccatccaagtgcggcagcgaggcagcatcaccccgagaatccgcacgcctgagacaggctcagacgacgccatcaagagcattctagagcaggccaagaaggagatcgagtcgcagaagggcggcgagcccaagacctcggtggccccgctgagcatcgccaacggcacgacccccgccagcacctcggaggacgccatcaagagcatcctggagcaggcacgccgtgagatgcaggcgcaacagcaggcgctgctggagatggaggtggcgcccaggggccgctcggtgcccccctcgcccccggagcggccatcactggccaccgcgagccagaacggggccccggccttggtgaagcaggaggagggcagcgggggccccgcgcaggcgccgctcccggtcctgtcccccgccgccttcgtgcagagcatcatccgcaaggtcaagtccgagatcggcgacgccggctacttcgaccaccactgggcctccgaccgcggcctgctcagccgcccctacgcctccgtgtcgccctcgctgtcctcctcctcctcctctggctactctggccagcccaacggccgcgcctggccccgcggggacgaggcccctgtgccccccgaggacgaggcggcggcaggggcggaggacgaaccccccaggacgggcgagctcaaggctgagggcgcgacggccgaggcgggcgcgcggctgccctactacccggcctacgtgccgcgcaccctgaagcccaccgtgccgccgctgacccccgagcagtacgagctgtacatgtaccgtgaggtagacacgctggagctcacccgccaggtcaaggagaagctggccaagaacggcatctgccagaggatcttcggggagaaggtgctgggcctgtcacagggcagcgtgagcgacatgctgtcccggccgaagccatggagcaagctgacgcagaaggggcgggagcccttcatccgcatgcagctgtggctctctgaccagctcggccaggcagtgggccagcagcctggtgcctcccaggccagtcccacagaaccaaggtcctcaccatccccaccccccagccccacagagcctgagaagagctcccaggagccgttgagcctgtccctggagagcagcaaggagaaccagcagccagagggccgctccagctcctcgttgagcgggaagatgtactcaggcagccaggccccagggggcatccaggagatcgtggccatgtcccccgagctggacacgtactccatcaccaagagggtgaaggaggtcctcacagacaacaatctagggcagcggctgtttggggaaagcatcctgggtctgacacagggctccgtgtctgacctgctgtcccggcccaaaccctggcacaagctgagcctgaaggggcgggagccttttgtccgcatgcagctgtggctcaatgacccccataacgtggagaagctgagggatatgaagaagctggagaagaaagcctacctgaaacgtcgctatggcctcatcagcaccggctcagacagtgagtccccggccacccgctcagagtgccccagcccctgcctgcagccccaggacctgagcctcctgcagatcaagaagccccgggtggtgctggcacccgaggagaaggaggcactgcggaaggcctatcagctggaaccctacccctcgcagcagaccatcgagctcctctccttccagctcaacctcaagaccaacaccgtcatcaactggttccacaactacaggtcccggatgcgccgggagatgttggtggaggggacccaggatgagccagaccttgatccaagcgggggtcctggaatcctaccgccaggccactcccacccagaccccaccccgcagagccctgactctgagactgaggaccagaagccaaccgtgaaggaactggagcttcaggagggccctgaggagaacagcacacccctgaccacccaggacaaggcccaagtgaggatcaagcaggaacagatggaggaggatgctgaggaagaggcaggcagccagccccaggactcaggggagctggacaaaggccaaggtccccccaaagaggagcatcccgaccctccgggtaatgatggactcccaaaagtggctcccgggcccctccttccaggtggatccaccccagactgtccctcacttcatccccaacaggagagtgaggccggggagcgacttcacccggaccctttaagttttaagtcagcctcagagtcctcacgctgcagcctggaggtgtcactgaactcgccctcggccgcctcctcaccaggcctcatgatgtctgtgtcacctgtcccctcctcctcagctcccatctccccatccccacctggcgccccccctgccaaagtgccgagtgccagccccactgctgacatggctggagccttgcaccccagtgccaaggtgaaccccaacttgcagcggcggcatgagaagatggccaatctgaacaacatcatttaccgactagagcgggctgccaatcgggaggaggccctggagtgggagttctgaaggcagggtgagggggcaagggacataccctggtaactaccttccttctcgcacttactctcctcaacaggatggggtaagggagggaggaactcaaccatcaaaatgtggacagcaatgttatgccgtttacgttttttgttgtaatcctagttctatgaagctgtgtgagcaggtgggtcaaatgccattgcctccacttttctgcacccccctgctcctcttcaccctgacccctctgcaggaggcagaagcaaaatggcaccacatattcacctgaaaactccaaactcttttagaaaaataaataaatatttatagacctcttttagatattttaataaaggatcctttggaatttatcccagctgatgctgttttgatattacagagagttataaaatcaggatgctgtcacaactgttgcgaagtatacactgaagttgtgtcgtttttgccactagatgagattaaaagaagacaattattcaaagccatcacaaaacactataagactgaccaaaatttagataacctttgaaccacgatttttttccacatctgtctgtgagacacagcgcaatgctactgcccttccagaaactgtgctaaaaagagaaagtccaaaagactctaaacaaaaacctcgacgccgttgaggatgtgtttcattctggtggtctgttttgcaagcttgataacagaatgtccgtgccattgtaaatgttgtagagatgtgggccgtggcccaaccgtcctatatgagatgtagcatggtacagaacaaactgcttacacaggtctcactagttagaaacctgtgggccatggaggtcagacatccatcttgtccatctataggcaagaagtgtttccagatcctttggaaaggtgggcatggggcaggtgcttggagagtggcgtttgagccagagcgaccccatttcccgtgtgaaccataggcacaacccaggaagtttccccacttgtaggagtgtgggtattccagagcaagactgtggccaccatcttcccctcttggtgttttccgaaagtgacagtgttggtcatcccatgaccactgaagcttagtaaccagcgccaaaaagtagattcatcaaactagagaccccagctccccttctcgccatcttctttctcaagttgaccgtggtgctgtttctggaaggcatctgcaactccaagtccatgcagaactctggaaggccaagttcatcgcagcatgttcaccatatcccagcctccaaatctatcctcctaccttccaacgcatgacctgttggggagcagagacttaacccccaactcagaggaacccttcctccagcgtctttggcatggtttctagggtgagagttcccaatttggatagaacggccaccatattggttactgaatctctctcccttgtttttattacgtttcctttttcaaactgtccatgggaaggctgaattgagtgactccccagaatgaagatgagaaggtgaatataatcaatgccaatgtaatgccagcgggtgagatggccgatggaggtttcaaagatgtagctagcattttgaaaccatatgggcaaaacccggcaaccagaaggggacagataaggaccgttccagaaatcccaactctcacacccagcccaggctgcagtctccacaccaaacagtcaacaaaacacaaaccctgaaggaaaaccttttccatacacccaggctatgcattgaagagttttccactgtatacatttttatccagatgaaggtatttttatattttgacaataggaaacagtgaccattttcagagtaatcaaatctggaacaaatgaaacatcttttagccaccaccaccctgttgcaattaagacaaccgtgggggaacacaccactttttactgttgaaaccaacacaacgttgaaatccaggcttatacgcagactccgattcctagagaactaaatttggctttagtgtgacgggatttgattaagcacttagtatagtcttttgaacacggaaatcctgttgtacttaaagctagcggacccgtgaacaactttgtcaggttcacgtcctataacggttaaaaaacacacacacacatacacaaaccgtttctatgagagattgatgaactttgtttaaaattttaaaaaaaggaacacgttctgtaaacgagtcgctaaatacagaattgtataataaaaaaaagt

SEQ ID NO: 1818 - DNA, 5949 bp, Homo sapiens
ccaggtggtgctacatgctgggccaagggcgctgaggacagatgggctgacatagaagccatggttaggatctggtgtgtactcggtccacttcagcagcgcccgctcaaactggatggaaaccttggtgactgagttggccggcagctgaatcagcatctccaggaggtggggttgcagccggtcctgggcaggctggtagtggatgtaacttggtttgttctccttgcccttggaggtgatggtgagggtgtgcacatacagccgcagataccagggtacggtgtccgaggccatagaaaagctggaagagaagctccaggcccagtctgactatgaggaaattaaaacggagctgagcatcctgaaagccatgaagctggcctccagcacctgcagcctcccccagggcatggccaagcctgaagactcactgcttattgcaaaggaggccttcttccccacgcagaaattccttctggagaagcccagcctcctggccagccctgaggaagacccatcagaggacgattccatcaaggattcactgggcacggagcagtcctacccctcccctcagcagctcccacctccaccagggccagaagaccccctgtctcccagccccgggcagcccctgctgggccccagcttggggcctgacggcactcggactttctcgctgtcccccttccccagcctggcatcaggggagagactgatgatgcccccagccgccttcaagggagaggcgggcggcctgctggtgttccccccagccttctatggcgccaagccccccacagcccctgccaccccggcccctggccctgagccactgggcggtcctgagcccgcggatggtggtgggggcggagcggcggggcccggggcagaggaggagcagctggacacggcagagatcgccttccaggtgaaggagcagctgctgaaacacaacatcgggcagcgggtgtttgggcattacgtgctggggctgtcgcagggctcggtcagcgagatcctagcccggcccaagccctggcgcaagctcacggtgaagggcaaggagcccttcatcaagatgaagcagttcctgtcggatgagcagaatgtactggcgctcaggaccatccaagtgcggcagcgaggcagcatcaccccgagaatccgcacgcctgagacaggctcagacgacgccatcaagagcattctagagcaggccaagaaggagatcgagtcgcagaagggcggcgagcccaagacctcggtggccccgctgagcatcgccaacggcacgacccccgccagcacctcggaggacgccatcaagagcatcctggagcaggcacgccgtgagatgcaggcgcaacagcaggcgctgctggagatggaggtggcgcccaggggccgctcggtgcccccctcgcccccggagcggccatcactggccaccgcgagccagaacggggccccggccttggtgaagcaggaggagggcagcgggggccccgcgcaggcgccgctcccggtcctgtcccccgccgccttcgtgcagagcatcatccgcaaggtcaagtccgagatcggcgacgccggctacttcgaccaccactgggcctccgaccgcggcctgctcagccgcccctacgcctccgtgtcgccctcgctgtcctcctcctcctcctctggctactctggccagcccaacggccgcgcctggccccgcggggacgaggcccctgtgccccccgaggacgaggcggcggcaggggcggaggacgaaccccccaggacgggcgagctcaaggctgagggcgcgacggccgaggcgggcgcgcggctgccctactacccggcctacgtgccgcgcaccctgaagcccaccgtgccgccgctgacccccgagcagtacgagctgtacatgtaccgtgaggtagacacgctggagctcacccgccaggtcaaggagaagctggccaagaacggcatctgccagaggatcttcggggagaaggtgctgggcctgtcacagggcagcgtgagcgacatgctgtcccggccgaagccatggagcaagctgacgcagaaggggcgggagcccttcatccgcatgcagctgtggctctctgaccagctcggccaggcagtgggccagcagcctggtgcctcccaggccagtcccacagaaccaaggtcctcaccatccccaccccccagccccacagagcctgagaagagctcccaggagccgttgagcctgtccctggagagcagcaaggagaaccagcagccagagggccgctccagctcctcgttgagcgggaagatgtactcaggcagccaggccccagggggcatccaggagatcgtggccatgtcccccgagctggacacgtactccatcaccaagagggtgaaggaggtcctcacagacaacaatctagggcagcggctgtttggggaaagcatcctgggtctgacacagggctccgtgtctgacctgctgtcccggcccaaaccctggcacaagctgagcctgaaggggcgggagccttttgtccgcatgcagctgtggctcaatgacccccataacgtggagaagctgagggatatgaagaagctggagaagaaagcctacctgaaacgtcgctatggcctcatcagcaccggctcagacagtgagtccccggccacccgctcagagtgccccagcccctgcctgcagccccaggacctgagcctcctgcagatcaagaagccccgggtggtgctggcacccgaggagaaggaggcactgcggaaggcctatcagctggaaccctacccctcgcagcagaccatcgagctcctctccttccagctcaacctcaagaccaacaccgtcatcaactggttccacaactacaggtcccggatgcgccgggagatgttggtggaggggacccaggatgagccagaccttgatccaagcgggggtcctggaatcctaccgccaggccactcccacccagaccccaccccgcagagccctgactctgagactgaggaccagaagccaaccgtgaaggaactggagcttcaggagggccctgaggagaacagcacacccctgaccacccaggacaaggcccaagtgaggatcaagcaggaacagatggaggaggatgctgaggaagaggcaggcagccagccccaggactcaggggagctggacaaaggccaaggtccccccaaagaggagcatcccgaccctccgggtaatgatggactcccaaaagtggctcccgggcccctccttccaggtggatccaccccagactgtccctcacttcatccccaacaggagagtgaggccggggagcgacttcacccggaccctttaagttttaagtcagcctcagagtcctcacgctgcagcctggaggtgtcactgaactcgccctcggccgcctcctcaccaggcctcatgatgtctgtgtcacctgtcccctcctcctcagctcccatctccccatccccacctggcgccccccctgccaaagtgccgagtgccagccccactgctgacatggctggagccttgcaccccagtgccaaggtgaaccccaacttgcagcggcggcatgagaagatggccaatctgaacaacatcatttaccgactagagcgggctgccaatcgggaggaggccctggagtgggagttctgaaggcagggtgagggggcaagggacataccctggtaactaccttccttctcgcacttactctcctcaacaggatggggtaagggagggaggaactcaaccatcaaaatgtggacagcaatgttatgccgtttacgttttttgttgtaatcctagttctatgaagctgtgtgagcaggtgggtcaaatgccattgcctccacttttctgcacccccctgctcctcttcaccctgacccctctgcaggaggcagaagcaaaatggcaccacatattcacctgaaaactccaaactcttttagaaaaataaataaatatttatagacctcttttagatattttaataaaggatcctttggaatttatcccagctgatgctgttttgatattacagagagttataaaatcaggatgctgtcacaactgttgcgaagtatacactgaagttgtgtcgtttttgccactagatgagattaaaagaagacaattattcaaagccatcacaaaacactataagactgaccaaaatttagataacctttgaaccacgatttttttccacatctgtctgtgagacacagcgcaatgctactgcccttccagaaactgtgctaaaaagagaaagtccaaaagactctaaacaaaaacctcgacgccgttgaggatgtgtttcattctggtggtctgttttgcaagcttgataacagaatgtccgtgccattgtaaatgttgtagagatgtgggccgtggcccaaccgtcctatatgagatgtagcatggtacagaacaaactgcttacacaggtctcactagttagaaacctgtgggccatggaggtcagacatccatcttgtccatctataggcaagaagtgtttccagatcctttggaaaggtgggcatggggcaggtgcttggagagtggcgtttgagccagagcgaccccatttcccgtgtgaaccataggcacaacccaggaagtttccccacttgtaggagtgtgggtattccagagcaagactgtggccaccatcttcccctcttggtgttttccgaaagtgacagtgttggtcatcccatgaccactgaagcttagtaaccagcgccaaaaagtagattcatcaaactagagaccccagctccccttctcgccatcttctttctcaagttgaccgtggtgctgtttctggaaggcatctgcaactccaagtccatgcagaactctggaaggccaagttcatcgcagcatgttcaccatatcccagcctccaaatctatcctcctaccttccaacgcatgacctgttggggagcagagacttaacccccaactcagaggaacccttcctccagcgtctttggcatggtttctagggtgagagttcccaatttggatagaacggccaccatattggttactgaatctctctcccttgtttttattacgtttcctttttcaaactgtccatgggaaggctgaattgagtgactccccagaatgaagatgagaaggtgaatataatcaatgccaatgtaatgccagcgggtgagatggccgatggaggtttcaaagatgtagctagcattttgaaaccatatgggcaaaacccggcaaccagaaggggacagataaggaccgttccagaaatcccaactctcacacccagcccaggctgcagtctccacaccaaacagtcaacaaaacacaaaccctgaaggaaaaccttttccatacacccaggctatgcattgaagagttttccactgtatacatttttatccagatgaaggtatttttatattttgacaataggaaacagtgaccattttcagagtaatcaaatctggaacaaatgaaacatcttttagccaccaccaccctgttgcaattaagacaaccgtgggggaacacaccactttttactgttgaaaccaacacaacgttgaaatccaggcttatacgcagactccgattcctagagaactaaatttggctttagtgtgacgggatttgattaagcacttagtatagtcttttgaacacggaaatcctgttgtacttaaagctagcggacccgtgaacaactttgtcaggttcacgtcctataacggttaaaaaacacacacacacatacacaaaccgtttctatgagagattgatgaactttgtttaaaattttaaaaaaaggaacacgttctgtaaacgagtcgctaaatacagaattgtataataaaaaaaagt

SEQ ID NO: 1819 - DNA, 2430 bp, Homo sapiens
agagagagagagagagagagacaaagtgccgagtgccagccccactgctgacatggctggagccttgcaccccagtgccaaggtgaaccccaacttgcagcggcggcatgagaagatggccaatctgaacaacatcatttaccgactagagcgggctgccaatcgggaggaggccctggagtgggagttctgaaggcagggtgagggggcaagggacataccctggtaactaccttccttctcgcacttactctcctcaacaggatggggtaagggagggaggaactcaaccatcaaaatgtggacagcaatgttatgccgtttacgttttttgttgtaatcctagttctatgaagctgtgtgagcaggtgggtcaaatgccattgcctccacttttctgcacccccctgctcctcttcaccctgacccctctgcaggaggcagaagcaaaatggcaccacatattcacctgaaaactccaaactcttttagaaaaataaataaatatttatagacctcttttagatattttaataaaggatcctttggaatttatcccagctgatgctgttttgatattacagagagttataaaatcaggatgctgtcacaactgttgcgaagtatacactgaagttgtgtcgtttttgccactagatgagattaaaagaagacaattattcaaagccatcacaaaacactataagactgaccaaaatttagataacctttgaaccacgatttttttccacatctgtctgtgagacacagcgcaatgctactgcccttccagaaactgtgctaaaaagagaaagtccaaaagactctaaacaaaaacctcgacgccgttgaggatgtgtttcattctggtggtctgttttgcaagcttgataacagaatgtccgtgccattgtaaatgttgtagagatgtgggccgtggcccaaccgtcctatatgagatgtagcatggtacagaacaaactgcttacacaggtctcactagttagaaacctgtgggccatggaggtcagacatccatcttgtccatctataggcaagaagtgtttccagatcctttggaaaggtgggcatggggcaggtgcttggagagtggcgtttgagccagagcgaccccatttcccgtgtgaaccataggcacaacccaggaagtttccccacttgtaggagtgtgggtattccagagcaagactgtggccaccatcttcccctcttggtgttttccgaaagtgacagtgttggtcatcccatgaccactgaagcttagtaaccagcgccaaaaagtagattcatcaaactagagaccccagctccccttctcgccatcttctttctcaagttgaccgtggtgctgtttctggaaggcatctgcaactccaagtccatgcagaactctggaaggccaagttcatcgcagcatgttcaccatatcccagcctccaaatctatcctcctaccttccaacgcatgacctgttggggagcagagacttaacccccaactcagaggaacccttcctccagcgtctttggcatggtttctagggtgagagttcccaatttggatagaacggccaccatattggttactgaatctctctcccttgtttttattacgtttcctttttcaaactgtccatgggaaggctgaattgagtgactccccagaatgaagatgagaaggtgaatataatcaatgccaatgtaatgccagcgggtgagatggccgatggaggtttcaaagatgtagctagcattttgaaaccatatgggcaaaacccggcaaccagaaggggacagataaggaccgttccagaaatcccaactctcacacccagcccaggctgcagtctccacaccaaacagtcaacaaaacacaaaccctgaaggaaaaccttttccatacacccaggctatgcattgaagagttttccactgtatacatttttatccagatgaaggtatttttatattttgacaataggaaacagtgaccattttcagagtaatcaaatctggaacaaatgaaacatcttttagccaccaccaccctgttgcaattaagacaaccgtgggggaacacaccactttttactgttgaaaccaacacaacgttgaaatccaggcttatacgcagactccgattcctagagaactaaatttggctttagtgtgacgggatttgattaagcacttagtatagtcttttgaacacggaaatcctgttgtacttaaagctagcggacccgtgaacaactttgtcaggttcacgtcctataacggttaaaaaacacacacacacatacacaaaccgtttctatgagagattgatgaactttgtttaaaattttaaaaaaaggaacacgttctgtaaacgagtcgctaaatacagaattgtataataaaaaaaagt

SEQ ID NO: 1820 - DNA, 878 bp, Homo sapiens
gccggagggcgcccgaggggccccgggccgcggcgctcagggcccgggcggccggcggcggccccggggctggggggagtccagcccggatattgagtgcagccattgagaaaagccaaactcttgtgtgtgcgcgtctcgatagcccccaagatggccgccaatgtgggatcgatgtttcaatattggaagcgatttgatctacggcgactccagaaggagcttaattccgtcgcttctgagctgtctgcacggcaggaggagagtgaacattctcataaacatttaattgaactccgccgggaatttaagaaaaatgtacctgaggaaatcagagagatggtggctcctgtattaaaaagcttccaagccgaggtggtggcccttagtaagagaagtcaggaggcggaggctgcttttctgagtgtttacaagcaattaattgaagcaccaggcaaattatttgtcgaaatactcctccccgccacccgaagccacacaagtcctgattcaacatttttgttttgagtgactgctgccaacacagatctttggcagagaatacgacagagcctgatggctcagcaagtattttgataagtgtgcagcctggatgtctgtaattacgaaagaaaaccgtaaatcttttggatattgttcacacagatgtggcgtgaagtgagaaaaaaaaagcagtaaaacgtgttaaaagcataattaatgtcattgttgtgggtgatgatgtgatttaaacctctctgacttctgtattggtgatggctgattcctttatcgcactcgtagagtcactaggtacggacccaagcttcagaaggctaacttgttaactgagtgattagttaaaaggaaaaaaaaaa

SEQ ID NO: 1821 - DNA, 657 bp, Homo sapiens
aaagaaactgagacccagggagaggaagtgacttgcccaggggctgcaataacctgtggcctgggaaagcacctttgcagatgccgtgtctgggactcattccataccaggtggcatgagagttggaacagctcttgccttcagactagccaggcctgaagttaatgtggcagacagaagtatctagaaatgtgtgaaaacctgccagtcccacccagagagcctctctcatcctgccttcatagagcaggaatgttctgactcctctgggggtcccaggcaccccacgagaacccagaacctcctcagaggggcatttcttcctgtcctctcagctcaggagtaaccccagaggctgctatttcttgtccccagcccagacagggctctgtgactggtcttcatagctccaggacagggtccgggactaggaaggcaggacctgaggccctcggaggtctgcctccccaacccctgcctgaaacagtgcagggagaaggtggaagtgcagagtgggctcacctctcgcccacactgtccccttctccccagcgagctgaggctgcccagcgggaggtggaaagtctccgggaacagctggcctctgtcaacagctccatccgcctggcttgctgctctccccaggggcccagtggg

SEQ ID NO: 1822 - DNA, 548 bp, Homo sapiens
taccgagcgcctcccctgggatgggcggtctcacacacccaacgtgcacaccacagccgtgtatactctcagccttcacggctctgtatgaggctggtgttgtgcccattttgcagatgagagaatggagactagaggaggcgaagtcacttgcccacggtcataagcgggggagcgcagagccagttttcaattcaggagtgtctactctgaagccctcgcttcactccggagcccgctggctctatcctcgcaccgagcctttgcgacaagtgcacagggaacgctaaccccagccctcaacgctgcacagaacccggggtgaaacccgcgcagcacgacgcgcagggagtgggggagaagggagccccgatgccagcgccgcaggtgccgcactgttaaatggtgtgccacgggcccgggggtctagggaccgcctggcgagcggcacgtctggctgaggcgaccctcgaggaggccgccgcattcccagcgtgggggtcctcccgggcttgggtgcggggggtcagcaggagagacccttccgc

SEQ ID NO: 1823 - DNA, 248 bp, Homo sapiens
tttttttgtatttttataaaagatggggtttcagcatgttaaccaggatggtctcgatttgctgacctcctgatctgcctgccttggcctcccaaagtgttggtattacaggtggaatcactttttttgtagaatctgtgcaggcacatttctgaggcctacagtgaaaaattgtaggcctcattgaggcctacagtgaaaaattgaatatccctcaataaaaattacaaacaagctatctgtggaaa

SEQ ID NO: 1824 - DNA, 1883 bp, Homo sapiens
ctccttttctcctcctttctcctccccctcccttttttcctccctccctctccccctttccctcgctcccctcctccctccctccccgtctttcttaccccctccctttctctctctctctctctctcactcgttccctaacattaaagagaaaatgctgctatccgtgacttccaggcccgggatttcgacttttggctacaatagaaacaacaagaagccatatgtgtcactggctcagcagatggcaccacctagcccaagcaacagtacacctaacagcagtagtggaagcaatggaaatgaccagctgagcaaaaccaacctatacatccgaggattgcaaccaggcactactgaccaagatcttgtcaagctgtgtcagccatatggcaagattgtttccactaaggccatactggacaagaccacaaacaaatgtaaaggctatggctttgtagattttgacagcccttcagcagcacagaaagctgtaacagcactgaaggccagcggtgtacaggcacagatggcaaagcaacaggaacaggaccccacaaatttatacatctcaaacctcccactgtcaatggatgagcaggaactggaggggatgctgaagccctttggccaggttatctccacccgtatccttcgagataccagtgggaccagcagaggtgttggctttgcaaggatggagtccacagagaagtgtgaagccatcatcacccactttaatggaaaatatattaagacaccccctggagtaccagccccatccgatcccttgctttgcaaatttgctgatggcgggccaaagaaacgacagaaccaaggaaaatttgtgcaaaatggacgggcttggccaaggaatgcagacatgggcgtcatggccttgacctatgaccccaccacagctcttcagaatgggttttacccagccccctataacatcacccccaacaggatgcttgctcagtctgcactctccccatacctttcctctcctgtgtcttcgtatcagagagtgactcagacatctcctctacaagtacctaacccatcctggatgcaccaccattcatacctcatgcagccttcaggttcagttctgacaccagggatggaccatcccatttctctccagcctgcctccatgatgggaccccttacccagcaactgggccatctctccctcagcagcacaggcacgtatatgccgacggctgcagctatgcaaggagcttacatctcccagtacacccctgtgccttcttccagtgtttcagtcgaggagagcagcggccaacagaaccaagtggcagtggacgcaccctcagagcatggggtctattctttccagttcaacaagtaacagtgggattcccctccccatctttactgaatagaaatgaattcttggagatactcatgctcccagattccagagggttaaccaggaatggagaccatccgtcggccctgctaaggactaacacttagccatcgtttttcacaggcctgggcctggaaaaagaaatctctacgttcctgccctttactattgctgatggagcctgggggaaccatcactttttttgtgtgctacattcaaggagatcaaaaaaacttttcttcttttgcaaagaaagctttttgtttttaactgcaacgtacttttcccctaccttgaagagacatggtggtcgtagcttctcatctatatgaaaaagttttcgatgtattggaattatttgggaatgcttttaaaacaatttgtaattatttctttacaaaccaaaacagaacagaaaggtgtggtgctggaacatcgatgaaggagccctaattactgagcttagttatggacttttttgatg

SEQ ID NO: 1825 - DNA, 678 bp, Homo sapiens
gcctgtgcccttccccacctttgccctcccagaggttggtatgtgggaagcccatctcagttcctgtgccttcttccagcgtttcagtcgaggagagcagcggccaacagaaccaagtggcagtggacgcaccctcagagcatggggtctattctttccagttcaacaagtaacagtgggattcccctccccatctttactgaatagaaatgaattcttggagatactcatgctcccagattccagagggttaaccaggaatggagaccatccgtcggccctgctaaggactaacacttagccatcgtttttcacaggcctgggcctggaaaaagaaatctctacgttcctgccctttactattgctgatggagcctgggggaaccatcactttttttgtgtgctacattcaaggagatcaaaaaaacttttcttcttttgcaaagaaagctttttgtttttaactgcaacgtacttttcccctaccttgaagagacatggtggtcgtagcttctcatctatatgaaaaagttttcgatgtattggaattatttgggaatgcttttaaaacaatttgtaattatttctttacaaaccaaaacagaacagaaaggtgtggtgctggaacatcgatgaaggagccctaattactgagcttagttatggacttttttgatg

SEQ ID NO: 1826 - DNA, 504 bp, Homo sapiens
tagatgttgccagattgcgtcgaccaaaggctgtgtcacctcacatttctaccagccatgtatgaaagtacccatttccttccaggcataggtgctactgctcttttaaaattgttcctgtcttgctgggcacggtagctcatacctgtaatcccagcactttgggaggccgaggcaggtggatcacctgaggtcaggagttcgagaccagcctggccaacatggtgaaacctagtctttactaaaaacacagaaattagctgggcatggtggcgggcgcctgtaatcccagctacttgggaggctgaggccagagaattgcttgaacccagcaggcagaggttgtggtgagccgagatcgcgccactacactccagcctgggcgacaagagtgaaactctgtctcaaaaaaaaaacaaaaaaattgttcctgtcttgatgaatgtaaagtacatcgttattttaatttgcatgtcccttactataggtgaatttaaccatttc

SEQ ID NO: 1827 - DNA, 827 bp, Homo sapiens
ggggttttgagcagttctagatagagctggaagagtggaaggaagagaaagggctataagttggggtggtgagggtcttcttccagcaggtggctggtggtctgctctggagaggctgcattccctacatgcctagcatttctggggtatatcaagaaaagaggggagtgaattcttttagaggtataggggggctttgggttattagcagagcctagttcctgaaacctcaaatttcttaagggggagggagaagggcagggacaccagagtagctcattgccttggcattcttagccacaaagtagatcacatctcagggtttgaggagcatgtggataactacctgaaacctctcaatagctctttctccctcccatttctgttacatggatcaaaaaaaaaaagtgtgatctaccatgcattgtctcagaaagaggcgaatgactccgatgtgcagccttcaggagcacagcgggccgaggccttcgtgagggccttcctgaagcgcagcacgccccgcatgagcccgcaggcccgcgaggaccagatgcagcgcaagggcggggtcctcgagtactttacccgccacaagcgcaaggagaagaagaaggccaaggcctctctggcacgccaaggagaggaggtgcggctcttttgcatttaacccgagccgccgagagtacaggctttttctctctcttcatggactcttgagaacagtcatataaggacctgtgcagaggggctcaaggccgaaaccccggcccacgatgagttacgcgccagctcttttggcgaactttacggggctatttatttggggc

SEQ ID NO: 1828 - DNA, 1921 bp, Homo sapiens
ggggttttgagcagttctagatagagctggaagagtggaaggaagagaaagggctataagttggggtggtgagggtcttcttccagcaggtggctggtggtctgctctggagaggctgcattccctacatgcctagcatttctggggtatatcaagaaaagaggggagtgaattcttttagaggtataggggggctttgggttattagcagagcctagttcctgaaacctcaaatttcttaagggggagggagaagggcagggacaccagagtagctcattgccttggcattcttagccacaaagtagatcacatctcagggtttgaggagcatgtggataactacctgaaacctctcaatagctctttctccctcccatttctgttacatggatcataactcttcctctgtctcctgaaaagcctggacctctctgttccttacacctcccacttcctagtgatgctgtttcctctgttccaggctatggctttgtagattttgacagcccttcagcagcacagaaagctgtaacagcactgaaggccagcggtgtacaggcacagatggcaaagcaacaggaacaggaccccacaaatttatacatctcaaacctcccactgtcaatggatgagcaggaactggaggggatgctgaagccctttggccaggttatctccacccgtatccttcgagataccagtgggaccagcagaggtgttggctttgcaaggatggagtccacagagaagtgtgaagccatcatcacccactttaatggaaaatatattaagacaccccctggagtaccagccccatccgatcccttgctttgcaaatttgctgatggcgggccaaagaaacgacagaaccaaggaaaatttgtgcaaaatggacgggcttggccaaggaatgcagacatgggcgtcatggccttgacctatgaccccaccacagctcttcagaatgggttttacccagccccctataacatcacccccaacaggatgcttgctcagtctgcactctccccatacctttcctctcctgtgtcttcgtatcagagagtgactcagacatctcctctacaagtacctaacccatcctggatgcaccaccattcatacctcatgcagccttcaggttcagttctgacaccagggatggaccatcccatttctctccagcctgcctccatgatgggaccccttacccagcaactgggccatctctccctcagcagcacaggcacgtatatgccgacggctgcagctatgcaaggagcttacatctcccagtacacccctgtgccttcttccagtgtttcagtcgaggagagcagcggccaacagaaccaagtggcagtggacgcaccctcagagcatggggtctattctttccagttcaacaagtaacagtgggattcccctccccatctttactgaatagaaatgaattcttggagatactcatgctcccagattccagagggttaaccaggaatggagaccatccgtcggccctgctaaggactaacacttagccatcgtttttcacaggcctgggcctggaaaaagaaatctctacgttcctgccctttactattgctgatggagcctgggggaaccatcactttttttgtgtgctacattcaaggagatcaaaaaaacttttcttcttttgcaaagaaagctttttgtttttaactgcaacgtacttttcccctaccttgaagagacatggtggtcgtagcttctcatctatatgaaaaagttttcgatgtattggaattatttgggaatgcttttaaaacaatttgtaattatttctttacaaaccaaaacagaacagaaaggtgtggtgctggaacatcgatgaaggagccctaattactgagcttagttatggacttttttgatg

SEQ ID NO: 1829 - DNA, 2039 bp, Homo sapiens
ggggttttgagcagttctagatagagctggaagagtggaaggaagagaaagggctataagttggggtggtgagggtcttcttccagcaggtggctggtggtctgctctggagaggctgcattccctacatgcctagcatttctggggtatatcaagaaaagaggggagtgaattcttttagaggtataggggggctttgggttattagcagagcctagttcctgaaacctcaaatttcttaagggggagggagaagggcagggacaccagagtagctcattgccttggcattcttagccacaaagtagatcacatctcagggtttgaggagcatgtggataactacctgaaacctctcaatagctctttctccctcccatttctgttacatggatcataactcttcctctgtctcctgaaaagcctggacctctctgttccttacacctcccacttcctagtgatgctgtttcctctgttccaggctatggctttgtagattttgacagcccttcagcagcacagaaagctgtaacagcactgaaggccagcggtgtacaggcacagatggcaaagcaacaggaacaggaccccacaaatttatacatctcaaacctcccactgtcaatggatgagcaggaactggaggggatgctgaagccctttggccaggttatctccacccgtatccttcgagataccagtgggaccagcagaggtgttggctttgcaagattctcgccctgttgcccaggctggagtgcaatggcgtgatctcgactcactacaacctctgcctcccaggttcaagcgattctctcacctctgcctcctgagtagctgggactacaggatggagtccacagagaagtgtgaagccatcatcacccactttaatggaaaatatattaagacaccccctggagtaccagccccatccgatcccttgctttgcaaatttgctgatggcgggccaaagaaacgacagaaccaaggaaaatttgtgcaaaatggacgggcttggccaaggaatgcagacatgggcgtcatggccttgacctatgaccccaccacagctcttcagaatgggttttacccagccccctataacatcacccccaacaggatgcttgctcagtctgcactctccccatacctttcctctcctgtgtcttcgtatcagagagtgactcagacatctcctctacaagtacctaacccatcctggatgcaccaccattcatacctcatgcagccttcaggttcagttctgacaccagggatggaccatcccatttctctccagcctgcctccatgatgggaccccttacccagcaactgggccatctctccctcagcagcacaggcacgtatatgccgacggctgcagctatgcaaggagcttacatctcccagtacacccctgtgccttcttccagtgtttcagtcgaggagagcagcggccaacagaaccaagtggcagtggacgcaccctcagagcatggggtctattctttccagttcaacaagtaacagtgggattcccctccccatctttactgaatagaaatgaattcttggagatactcatgctcccagattccagagggttaaccaggaatggagaccatccgtcggccctgctaaggactaacacttagccatcgtttttcacaggcctgggcctggaaaaagaaatctctacgttcctgccctttactattgctgatggagcctgggggaaccatcactttttttgtgtgctacattcaaggagatcaaaaaaacttttcttcttttgcaaagaaagctttttgtttttaactgcaacgtacttttcccctaccttgaagagacatggtggtcgtagcttctcatctatatgaaaaagttttcgatgtattggaattatttgggaatgcttttaaaacaatttgtaattatttctttacaaaccaaaacagaacagaaaggtgtggtgctggaacatcgatgaaggagccctaattactgagcttagttatggacttttttgatg

SEQ ID NO: 1830 - DNA, 1839 bp, Homo sapiens
ctccttttctcctcctttctcctccccctcccttttttcctccctccctctccccctttccctcgctcccctcctccctccctccccgtctttcttaccccctccctttctctctctctctctctctcactcgttccctaacattaaagagaaaatgctgctatccgtgacttccaggcccgggatttcgacttttggctacaatagaaacaacaagaagcaacagtacacctaacagcagtagtggaagcaatggaaatgaccagctgagcaaaaccaacctatacatccgaggattgcaaccaggcactactgaccaagatcttgtcaagctgtgtcagccatatggcaagattgtttccactaaggccatactggacaagaccacaaacaaatgtaaaggctatggctttgtagattttgacagcccttcagcagcacagaaagctgtaacagcactgaaggccagcggtgtacaggcacagatggcaaagcaacaggaacaggaccccacaaatttatacatctcaaacctcccactgtcaatggatgagcaggaactggaggggatgctgaagccctttggccaggttatctccacccgtatccttcgagataccagtgggaccagcagaggtgttggctttgcaaggatggagtccacagagaagtgtgaagccatcatcacccactttaatggaaaatatattaagacaccccctggagtaccagccccatccgatcccttgctttgcaaatttgctgatggcgggccaaagaaacgacagaaccaaggaaaatttgtgcaaaatggacgggcttggccaaggaatgcagacatgggcgtcatggccttgacctatgaccccaccacagctcttcagaatgggttttacccagccccctataacatcacccccaacaggatgcttgctcagtctgcactctccccatacctttcctctcctgtgtcttcgtatcagagagtgactcagacatctcctctacaagtacctaacccatcctggatgcaccaccattcatacctcatgcagccttcaggttcagttctgacaccagggatggaccatcccatttctctccagcctgcctccatgatgggaccccttacccagcaactgggccatctctccctcagcagcacaggcacgtatatgccgacggctgcagctatgcaaggagcttacatctcccagtacacccctgtgccttcttccagtgtttcagtcgaggagagcagcggccaacagaaccaagtggcagtggacgcaccctcagagcatggggtctattctttccagttcaacaagtaacagtgggattcccctccccatctttactgaatagaaatgaattcttggagatactcatgctcccagattccagagggttaaccaggaatggagaccatccgtcggccctgctaaggactaacacttagccatcgtttttcacaggcctgggcctggaaaaagaaatctctacgttcctgccctttactattgctgatggagcctgggggaaccatcactttttttgtgtgctacattcaaggagatcaaaaaaacttttcttcttttgcaaagaaagctttttgtttttaactgcaacgtacttttcccctaccttgaagagacatggtggtcgtagcttctcatctatatgaaaaagttttcgatgtattggaattatttgggaatgcttttaaaacaatttgtaattatttctttacaaaccaaaacagaacagaaaggtgtggtgctggaacatcgatgaaggagccctaattactgagcttagttatggacttttttgatg

SEQ ID NO: 1831 - DNA, 2218 bp, Homo sapiens
ggggttttgagcagttctagatagagctggaagagtggaaggaagagaaagggctataagttggggtggtgagggtcttcttccagcaggtggctggtggtctgctctggagaggctgcattccctacatgcctagcatttctggggtatatcaagaaaagaggggagtgaattcttttagaggtataggggggctttgggttattagcagagcctagttcctgaaacctcaaatttcttaagggggagggagaagggcagggacaccagagtagctcattgccttggcattcttagccacaaagtagatcacatctcagggtttgaggagcatgtggataactacctgaaacctctcaatagctctttctccctcccatttctgttacatggatcataactcttcctctgtctcctgaaaagcctggacctctctgttccttacacctcccacttcctagtgatgctgtttcctctgttccaggctatggctttgtagattttgacagcccttcagcagcacagaaagctgtaacagcactgaaggccagcggtgtacaggcacagatggcaaagcaacaggaacaggaccccacaaatttatacatctcaaacctcccactgtcaatggatgagcaggaactggaggggatgctgaagccctttggccaggttatctccacccgtatccttcgagataccagtgggaccagcagaggtgttggctttgcaagattctcgccctgttgcccaggctggagtgcaatggcgtgatctcgactcactacaacctctgcctcccaggttcaagcgattctctcacctctgcctcctgagtagctgggactacaggatggagtccacagagaagtgtgaagccatcatcacccactttaatggaaaatatattaagacaccccctggagtaccagccccatccgatcccttgctttgcaaatttgctgatggcgggccaaagaaacgacagaaccaaggaaaatttgtgcaaaatggacgggcttggccaaggaatgcagacatgggcgtcatggccttgacctatgaccccaccacagctcttcagaatgggtaaggttttatataatcaagccacctgaaaatgataatggcctgtgtccagacactcaaatgattcatcttgattctctctatttgaaagtcaagggaacgttggctgtgcctatcagttgggacccttcccttgtggtttcctgtgactcagtactgattgaggttccttcccacaggttttacccagccccctataacatcacccccaacaggatgcttgctcagtctgcactctccccatacctttcctctcctgtgtcttcgtatcagagagtgactcagacatctcctctacaagtacctaacccatcctggatgcaccaccattcatacctcatgcagccttcaggttcagttctgacaccagggatggaccatcccatttctctccagcctgcctccatgatgggaccccttacccagcaactgggccatctctccctcagcagcacaggcacgtatatgccgacggctgcagctatgcaaggagcttacatctcccagtacacccctgtgccttcttccagtgtttcagtcgaggagagcagcggccaacagaaccaagtggcagtggacgcaccctcagagcatggggtctattctttccagttcaacaagtaacagtgggattcccctccccatctttactgaatagaaatgaattcttggagatactcatgctcccagattccagagggttaaccaggaatggagaccatccgtcggccctgctaaggactaacacttagccatcgtttttcacaggcctgggcctggaaaaagaaatctctacgttcctgccctttactattgctgatggagcctgggggaaccatcactttttttgtgtgctacattcaaggagatcaaaaaaacttttcttcttttgcaaagaaagctttttgtttttaactgcaacgtacttttcccctaccttgaagagacatggtggtcgtagcttctcatctatatgaaaaagttttcgatgtattggaattatttgggaatgcttttaaaacaatttgtaattatttctttacaaaccaaaacagaacagaaaggtgtggtgctggaacatcgatgaaggagccctaattactgagcttagttatggacttttttgatg

SEQ ID NO: 1832 - DNA, 1514 bp, Homo sapiens
ctccttttctcctcctttctcctccccctcccttttttcctccctccctctccccctttccctcgctcccctcctccctccctccccgtctttcttaccccctccctttctctctctctctctctctcactcgttccctaacattaaagagaaaatgctgctatccgtgacttccaggcccgggatttcgacttttggctacaatagaaacaacaagaagccatatgtgtcactggctcagcagatggcaccacctagcccaagcaacagtacacctaacagcagtagtggaagcaatggaaatgaccagctgagcaaaaccaacctatacatccgaggattgcaaccaggcactactgaccaagatcttgtcaagctgtgtcagccatatggcaagattgtttccactaaggccatactggacaagaccacaaacaaatgtaaaggctatggctttgtagattttgacagcccttcagcagcacagaaagctgtaacagcactgaaggccagcggtgtacaggcacagatggcaaagcaacaggaacaggaccccacaaatttatacatctcaaacctcccactgtcaatggatgagcaggaactggaggggatgctgaagccctttggccaggttatctccacccgtatccttcgagataccagtgggaccagcagaggtgttggctttgcaaggatggagtccacagagaagtgtgaagccatcatcacccactttaatggaaaatatattaagacaccccctggagtaccagccccatccgatcccttgctttgcaaatttgctgatggcgggccaaagaaacgacagaaccaaggaaaatttgtgcaaaatggacgggcttggccaaggaatgcagacatgggcgtcatggccttgacctatgaccccaccacagctcttcagaatgggttttacccagccccctataacatcacccccaacaggatgcttgctcagtctgcactctccccatacctttcctctcctgtgtcttcgtatcagagagtgactcagacatctcctctacaagtacctaacccatcctggatgcaccaccattcatacctcatgcagccttcaggttcagttctgacaccagggatggaccatcccatttctctccagcctgcctccatgatgggaccccttacccagcaactgggccatctctccctcagcagcacaggcacgtatatgccgacggctgcagctatgcaaggagcttacatctcccagtacacccctgtgccttcttccagtgtttcagtcgaggagagcagcggccaacagaaccaagtggcagtggacgcaccctcagagcatggggtctattctttccagttcaacaagtaacagtgggattcccctccccatctttactgaatagaaatgaattcttggagatactcatgctcccagattccagagggttaaccaggaatggagaccatccgtcggcccacaacccacgcgcccacgcgcccaccaa

SEQ ID NO: 1833 - DNA, 1621 bp, Homo sapiens
ctccttttctcctcctttctcctccccctcccttttttcctccctccctctccccctttccctcgctcccctcctccctccctccccgtctttcttaccccctccctttctctctctctctctctctcactcgttccctaacattaaagagaaaatgctgctatccgtgacttccaggcccgggatttcgacttttggctacaatagaaacaacaagaagccatatgtgtcactggctcagcagatggcaccacctagcccaagcaacagtacacctaacagcagtagtggaagcaatggaaatgaccagctgagcaaaaccaacctatacatccgaggattgcaaccaggcactactgaccaagatcttgtcaagctgtgtcagccatatggcaagattgtttccactaaggccatactggacaagaccacaaacaaatgtaaaggctatggctttgtagattttgacagcccttcagcagcacagaaagctgtaacagcactgaaggccagcggtgtacaggcacagatggcaaagcaacaggaacaggaccccacaaatttatacatctcaaacctcccactgtcaatggatgagcaggaactggaggggatgctgaagccctttggccaggttatctccacccgtatccttcgagataccagtgggaccagcagaggtgttggctttgcaaggatggagtccacagagaagtgtgaagccatcatcacccactttaatggaaaatatattaagacaccccctggagtaccagccccatccgatcccttgctttgcaaatttgctgatggcgggccaaagaaacgacagaaccaaggaaaatttgtgcaaaatggacgggcttggccaaggaatgcagacatgggcgtcatggccttgacctatgaccccaccacagctcttcagaatgggttttacccagccccctataacatcacccccaacaggatgcttgctcagtctgcactctccccatacctttcctctcctgtgtcttcgtatcagagagtgactcagacatctcctctacaagtacctaacccatcctggatgcaccaccattcatacctcatgcagccttcaggttcagttctgacaccagggatggaccatcccatttctctccagcctgcctccatgatgggaccccttacccagcaactgggccatctctccctcagcagcacaggcacgtatatgccgacggctgcagctatgcaaggagcttacatctcccagtacacccctgtgccttcttccagtgtttcagtcgaggtaagggtgttatcatttctttggattgagattaggaaaatgaacggaggcaggtttccccctgatcaagatctttctctcacaatgatgctgattctgtgttcacaaatagctggtaggtatacgaagaatgtaggaaggatgtgctcgcttcggcagcatgcatactaaaattggaacaatacagagaagattatggcccctgtgcaaggatgacatgcaaatttgtgaagcgttccatatttaaaaaaaaaacaacagcagatgtaggaaagaaggacttggtctgagttcatgaatgaggcccttccttacatttggcca

SEQ ID NO: 1834 - DNA, 2019 bp, Homo sapiens
ggggttttgagcagttctagatagagctggaagagtggaaggaagagaaagggctataagttggggtggtgagggtcttcttccagcaggtggctggtggtctgctctggagaggctgcattccctacatgcctagcatttctggggtatatcaagaaaagaggggagtgaattcttttagaggtataggggggctttgggttattagcagagcctagttcctgaaacctcaaatttcttaagggggagggagaagggcagggacaccagagtagctcattgccttggcattcttagccacaaagtagatcacatctcagggtttgaggagcatgtggataactacctgaaacctctcaatagctctttctccctcccatttctgttacatggatcataactcttcctctgtctcctgaaaagcctggacctctctgttccttacacctcccacttcctagtgatgctgtttcctctgttccaggctatggctttgtagattttgacagcccttcagcagcacagaaagctgtaacagcactgaaggccagcggtgtacaggcacagatggcaaagcaacaggaacaggaccccacaaatttatacatctcaaacctcccactgtcaatggatgagcaggaactggaggggatgctgaagccctttggccaggttatctccacccgtatccttcgagataccagtgggaccagcagaggtgttggctttgcaagattctcgccctgttgcccaggctggagtgcaatggcgtgatctcgactcactacaacctctgcctcccaggttcaagcgattctctcacctctgcctcctgagtagctgggactacaggatggagtccacagagaagtgtgaagccatcatcacccactttaatggaaaatatattaagacaccccctggagtaccagccccatccgatcccttgctttgcaaatttgctgatggcgggccaaagaaacgacagaaccaaggaaaatttgtgcaaaatggacgggcttggccaaggaatgcagacatgggcgtcatggccttgacctatgaccccaccacagctcttcagaatgggtaaggttttatataatcaagccacctgaaaatgataatggcctgtgtccagacactcaaatgattcatcttgattctctctatttgaaagtcaagggaacgttggctgtgcctatcagttgggacccttcccttgtggtttcctgtgactcagtactgattgaggttccttcccacaggttttacccagccccctataacatcacccccaacaggatgcttgctcagtctgcactctccccatacctttcctctcctgtgtcttcgtatcaggtatgttcatgcctgaaaaatggtgtggtggttttccctactactgtgctttaagtgaagtaatataaggctaggaactacttgttttttgtttttccttttaatcatattacacacaattttacataacagcgtaaaagatgatctgtgcatgtggtcatatatatggtatacagttttaatggtgtcctcttactccccctccaccacctccacaagtaaactcatgttaatgtcctactgtgtagcatttgtcatattttttcatatgaatacacatatgtatagcatttggggagttgtttattttacaaaaattggaccagattaaatatatttttacattcactcatctcacttaacagtatcctacaccagtgaaacctagtctttactaaaaacacagaaattagctgggcatggtggcgggcgcctgtaatcccagctacttgggaggctgaggccagagaattgcttgaacccagcaggcagaggttgtggtgagccgagatcgcgccactacactccagcctgggcgacaagagtgaaactctgtctcaaaaaaaaaacaaaaaaattgttcctgtcttgatgaatgtaaagtacatcgttattttaatttgcatgtcccttactataggtgaatttaaccatttc

SEQ ID NO: 1835 - DNA, 770 bp, Homo sapiens
ggggttttgagcagttctagatagagctggaagagtggaaggaagagaaagggctataagttggggtggtgagggtcttcttccagcaggtggctggtggtctgctctggagaggctgcattccctacatgcctagcatttctggggtatatcaagaaaagaggggagtgaattcttttagaggtataggggggctttgggttattagcagagcctagttcctgaaacctcaaatttcttaagggggagggagaagggcagggacaccagagtagctcattgccttggcattcttagccacaaagtagatcacatctcagggtttgaggagcatgtggataactacctgaaacctctcaatagctctttctccctcccatttctgttacatggatcataactcttcctctgtctcctgaaaagcctggacctctctgttccttacacctcccacttcctagtgatgctgtttcctctgttccaggctatggctttgtagattttgacagcccttcagcagcacagaaagctgtaacagcactgaaggccagcggtgtacaggcacagatggcaaagcaacaggaacaggaccccacaaatttatacatctcaaacctcccactgtcaatggatgagcaggaactggaggggatgctgaagccctttggccaggttatctccacccgtatccttcgagataccagtgggaccagcagaggtgttggctttgcaagactccagcctgggcgacaagagcaaaactccatctc

SEQ ID NO: 1836 - DNA, 363 bp, Homo sapiens
  misc_feature (15)..(15): n is a, c, g, or t
  misc_feature (19)..(19): n is a, c, g, or t
  misc_feature (25)..(25): n is a, c, g, or t
ctcgtgcacattcgngcancgcggncacgagattgactctataaatagtgtgacccatttttaactagattgctgatatgtttttcagcaggactttgtggtttagttaatgaaatcttttcagggatgatcctctgagccttctgtctagttactatcactgctgttgcttttatgacttaattgcctttgtggtttaattcacttcatgacacatctatcaccatgaagtttagactcttcacccctatctttccgagtatttgcttgatgactcctggggtcaaggagaggttgataggtggttttatgctgttaaaaataagtggtcttggctaacttatcacttagttaaaacagtcc

SEQ ID NO: 1837 - DNA, 467 bp, Homo sapiens
aaattttctgtcaagtttgggcagaatttaaagactatttcctttggtgggcatgaagtagtactgtttaacatgcttgctcaataaagttttcagactttttttttttttaactagagaatatgtgatttggtgattgactctataaatagtgtgacccatttttaactagattgctgatatgtttttcagcaggactttgtggtttagttaatgaaatcttttcagggatgatcctctgagccttctgtctagttactatcactgctgttgcttttatgacttaattgcctttgtggtttaattcacttcatgacacatctatcaccatgaagtttagactcttcacccctatctttccgagtatttgcttgatgactcctggggtcaaggagaggttgataggtggttttatgctgttaaaaataagtggtcttggctaacttatcacttagttaaaacagtcc

SEQ ID NO: 1838 - DNA, 476 bp, Homo sapiens
ttcatttttgggagcctctcttaaaatgcaaataacctttaagaagggttactgttgatgccttggtgggaattaatttttagattctttcttgaaattttactggataagtagggcacagagactgcccttcccttacctccttctctctctctctccttctctttccttccttccttcctttcccttttcctttccctttcgctttcctttcctgtctcactctgttacccaggctggagtgcagtggctctatcttggctcactacaatctctgcctccggggttcaagcaattctcctgcctcagcctccagagtagctgggactacaggcgtggtggcgctggcctgtaatcccaactactcagaggctgagacaggaggattgcttgaactcaagaggcggaggttgcagtgagctgagatcgcgccactgcactccaacctaggcaacagagacaaattcgtctcagag

SEQ ID NO: 1839 - DNA, 355 bp, Homo sapiens
atttctgacacccgtgggaatgaggccctttttattcatagctgcatcccctgtgtctaagagggcatacttaatacatagcagagattcaataaatgttcgctgagggagtggatgaatgagtggggctgatgattgagaactcccagtatatcctacatatggacttgtgttttctccattccttcctccccaaaatatctggggcagcatgtgagagtctcttcattttctattggaaattggagtacttgaatccagaagtttaaatctatgaaggtgaaatgcggttaggctaagtggatggacccttagttagatcctctctgggtgatttgtttccccagtggtactt

SEQ ID NO: 1840 - DNA, 407 bp, Homo sapiens
gcttcattctgtcctttctcctcctttttcttatgggccatcacataaaagagaaccttttttaaatgatagaaatatttttattttaaaaggacaatttgcaactttctagaacatcagtagcttgaactgtataccaattcaaaaccaaaagcatctgtatggcactgtgaaaaaaaactaacaaactggagaaaatgttactatctatgttagtcaataagacttagagcttttatgagtcaataagaaaaatagatgaacaagccctatagaaaaatgagcagaggctgggtgtgatggctcaggcctgtagtcccagcactttgggaggccaaggagggaggatcacttgagcctaggagtttgagaccagtctgggcaacatagtgagaccctcatctctc

SEQ ID NO: 1841 - DNA, 402 bp, Homo sapiens
aggaaaataatgtgaccaaataatttatcatccatccaagaacatttttgagtactcttaaaaattacaccagaaccacaggaataaaccacagctgctctggaagggtcctgggcaagctggacctaagagcaccccagaaatgaaagtctttgtttctttttaaaaaattgttgacatcactgaacaggtgaaaagggctctctgattctttccaaaggggagagtaatgagaaaggatgaaaaggagcagagatgtatcagttaagatgctttcaattgcacataactgagtagccagagataatgggcttaaattaaagggatttctttgtctcacataacagtggtccagtgacaggtggatcaatggctcaaccatagcaggtgtattagtccatt

SEQ ID NO: 1842 - DNA, 433 bp, Homo sapiens
aaagaggggttcagctaaatgcaagcttcagctagaaacatacactgttctggaagggatttagctaaccacattttactgttggaggcatttctaggtttggaaatgatttgtccaaggtcatttggtcagtcagtgtgtggtttatggccccattctcctgacttcggtgtttattcccctacagcacaaatcttgctgctttcccccacattagatgtttgccagctgggccatgttggtggggttaggggccattgagattcattgagaagaaaggagaaggaaaagctgaccatcagcatctacgagtccctggcctggccctttagttgggaacaattattgttacccagtgtgtagaacaaagagcgtaatcttggaacaaatagacatcagtgtcttctacctctttccttctaattaaaaaaaa

SEQ ID NO: 1843 - DNA, 734 bp, Homo sapiens
gtagagacagggtttctccatgctggtcaggcttgtctcgaacttccaacctcaggtgatcctcccgccttggcctcccaaagtgctgggattacaggcgtgagccaccacactggaccctattttgccctttttaagtactggcttaacgagtgaaaaagatgcatgtgcactgaaaaaagactaggaaaagatagaatacaatgccagtagagattgtctctatgagacagcataggctattgttattttagacgtaaatttctctacttttcaaaattaccacctatttggataccttttcttagttttataaaatatggccattggggaaaacttgaaaattgagcaaaatacagagaagagaattttaaaatgacccatgattccaccactcagataactacagatggcattttggtgcattgcacttgtcacttgtagtcagaacagcaaatgtgcttcattttccaggcctgcaatttgttccttttgcacacatttctgacaacctgccctggactgcgttctcatagaatggctgtcctccccactgtgggagcccttgctgagcctaacaaataaagcctccttcacaatagagctaaagaggagcttcatcagagaaacactgccgccttagtagatactggcccaggttggtcttgagtcccaaacttgtacagtgggttctcaaagtgtaacttaaacattatgttggcatcatgttaagc

SEQ ID NO: 1844 - DNA, 537 bp, Homo sapiens
gttttttgttttcttttcccttagccagaacatgtgggctaacagggtgtgttttctttcaggaatggctacaagtttctgtactgctcggctcgtgccatcggcatggccgacatgacccgtggctacctgcactgggtcaatgacaagggcacaatcttgccccggggccccctgatgctgtcccccagcagcttgttctccgccttccacaggtacctctccggcaggcagccctctgcccaccgccccagcatgtgggcggggctgggcccaaggtggggggatgtgtgggaacagaagtcagatgttggagccgccacgcctctcccagttctttggtccctggtggtgtcctaccacatactgctcacttgccatgtggcgggcctggtgaagaaaggcaggttctaggaaccgtcaagttttctccttccctaaacttcatcactcaaattttcttagttatcagactggcaaagaaggagaaggaaagattccagttacaaagggttgaagaaattgggtggttgtgag

SEQ ID NO: 1845 - DNA, 227 bp, Homo sapiens
tcagctgattttctttattcttatgcttttttaaaaggcaaaactgaagctccacgatggcccaaatgatgttgtgtttagtattacaacccagtatcaaggcacctgtcgctgtgcagggaccatttacctgtggaactggaatgacaagatcatcatttctgatattgatgggacaataaccaagtaagctcaatccttcaggtgggtggcaaggaacagccccg

SEQ ID NO: 1846 - DNA, 6239 bp, Homo sapiens
gagaagaagtggcaggtgatgctgaagcgggggagaagcggcagagccggccacacagtgcaggggatggagacaggtgctgggctggtcctcctgcagcatcctcagttgttggagggcagtcatcctcaggccgtacccagccagagaagaaaaagaacagtgtgaagccacgtgtgatagccgtccaacatcggctcttccctccaattacattgtagttgattgtgtctcaaaccatgaattatgtgggacagctggctgggcaggtgattgtcactgtgaaggaactctacaagggcattaaccaggccaccctctctgggtgcattgatgtcatcgtggtacagcagcaggatggcagctatcagtgttcaccttttcacgttcggtttggaaagctgggagtcctgagatccaaagagaaagtgattgatatagaaatcaacggcagtgcagtggatcttcacatgaagttgggtgataacggagaagctttctttgttgaggagactgaagaagaatatgaaaagcttcctgcttaccttgccacctcaccaattcctactgaagatcagttctttaaagatattgacacccctttggtgaaatcgggtggagatgaaacaccatctcagagttcagacatctcacacgtcttggaaacagagacaatttttactccaagttctgtgaaaaagaaaaaacgaaggagaaagaaatacaaacaggacagtaagaaggaagagcaggccgcatctgctgctgcagaagacacatgtgatgtaggcgtgagctccgatgatgacaagggggcccaggcagcacgaggatcttcaaatgcttccttgaaagaagaagaatgtaaagagcctttgctcttccattctggggatcattaccccttatctgatggagattggtcccctttagagaccacctatccccagacagcgtgtcctaagagtgattcagagctggaggtgaaacctgcggagagcctgctcagatcagagtctcacatggagtggacgtggggcggattcccagagtccaccaaggtcagcaaaagagaacgatctgaccatcatcctaggacagctacaattacaccatcagaaaatactcattttcgggtaattcccagtgaggacaacctcatcagtgaagttgagaaggatgcttccatggaagacactgtctgtaccatagtgaagcccaaacccagagccctgggtacacagatgagcgacccaacatctgtggcagagcttctcgaacctcctcttgagagtactcagatttcatctatgttagatgctgaccaccttcccaacgcagccttagcggaggcgccctcagaatccaaaccggcagctaaagtagactcgccgtcaaagaagaaaggtgttcacaaaagaagccaacaccagggacctgatgatatttaccttgatgacttaaagggtctagaacctgaagttgcagctctttatttccctaaaagtgaatcggagcccggttccaggcagtggcccgagtctgacacactctctggctcccagtccccacagtccgtgggaagcgcagctgcagatagcggcaccgagtgcctctcagattctgccatggacttgcctgacgttaccctctccctttgcgggggcctcagtgaaaatggagaaatttcaaaagaaaaattcatggagcatatcattacttatcacgaatttgcagaaaaccctggacttatagacaatcctaaccttgtaataaggatatataatcgttactataactgggctttggcagctcccatgatccttagcttgcaagtattccagaagagcttgcctaaggccacagttgagtcctgggtgaaagacaagatgccaaagaaatctggtcgctggtggttttggcgaaagagagaaagcatgaccaaacagctgccagaatccaaggagggaaaatctgaggcaccgccagccagtgacctgccatccagctccaaggagccggccggtgccaggccggccgagaatgactcctcgagtgacgagggatcacaggagctcgaagaatccatcacagtggaccccatccccacagagcccctgagccacggcagcacaacttcatataagaagtctctccgcctctcctcagaccagatcgcaaaactgaagctccacgatggcccaaatgatgttgtgtttagtattacaacccagtatcaaggcacctgtcgctgtgcagggaccatttacctgtggaactggaatgacaagatcatcatttctgatattgatgggacaataaccaagtcggatgctttgggacagattctcccacagctgggcaaagactggacccaccagggtatagcaaagctctaccattccatcaatgagaatggctacaagtttctgtactgctcggctcgtgccatcggcatggccgacatgacccgtggctacctgcactgggtcaatgacaagggcacaatcttgccccggggccccctgatgctgtcccccagcagcttgttctccgccttccacagagaagtgatagaaaagaaaccagagaagttcaaaattgagtgtctaaatgatatcaagaatctgtttgccccgtctaagcagcccttctatgctgcctttggaaaccgtccaaatgatgtctatgcctacacacaagttggagttccagactgtagaatattcaccgtgaaccccaagggtgaattaatacaagaaagaaccaaaggaaacaagtcatcgtatcacaggctgagtgagctcgtggagcatgtgttcccccttctcagtaaggagcagaattccgcttttccctgcccggagttcagctccttctgctactggcgagacccgatccctgaagtggacctggatgacctgtcttgaggcggcacctcagtgggtgggcagggcttggtccccctccccacagcaagggaaggcagctggctcttctgctgacctcagataccagccttccccagcggggacgggtgcttctggagctggtcccgccatcctcctttgccttcccaggccagctgctcaggctcggcaggtctgcagctcagctcctggaaggagaagggaggaactgggcctggggctggaggcctgggatccctcctttgtgggtcgcacacatgtttcctgctgtgagctggggcctccttccattgcatcattttaaaggaagaaaaaagcagctaaaaaagagtggaccaaaacactgcacacagtgaagtgttccagtttccactgggcagttgaggtggcttctgtaaccagggctgtcttcagatgtcagggtccctgaactgctgcgggcccagtcagtgatgctggctgaagctgcctgtgcacgtttcttctctggtcgcctcatttcctgctacactgaaggggtcagctgctccagtgggccaagttgggcaggacccccgcccctgcagggcccatgcaccagagccactgagcccagtcccataaacctggccctctttggggaaagatccccacagagcatcctcctctcatctgtgacaactccacgagcccttaatttcttagtcctcaccagaagaacaggtctcacaagtatatatttgatgtctgtaataaaagtgggaaggtgggtcttaaaacagaccaaaccccgccccgcccccaacaactctgcttttagggaggcctccgaaatgcagataggcggttgagtggggtcctgggaagagcgctgaatccctctgcttgctgcctggtgtgggcctttggaaagcatcttgccttgggacaggatttctaaaattctgtgattcagatttgtcagggaagcacagtgaagcttgcttaaaggcactggccagcagtgtgtgactttggcttttgggatcacaccctgtaatcgggcccgtggaagcagcgtcaaagaggggtcttggagctcctatggagcagactgccccccgagcagtgtccccagcctagccctgtgagaccccatggggacacgggtgcctatgtattttcactaaaatatacatggtagctccatttactgatgcggttgtaatgagctcacatcgtgtctgaagagatggcaccagggaaaggtgtgccataagctgctccagagcttttggtatgctgagtgttgacagagctgcactcttaacatcaagagaactgtcaggagcccagaaccaaccccaggtcttggtctccattggcgagaacacaggacgtggtggttcctgagcagagagggatctgcagatacaggcttggcgctcggggtggtctcgtggccaactcttcatgcccctgccgttgtagtggaacctctacatgttttagtttgcttcacctaaaataatgctgatctagagatagagaaataggggtggttatttttccagattggagagttgaaagtccctgactgatttcagccattttcctagtgcttgtcggatgcagagacaatgttgaaatcccctaaacacagttctcagtggcaaaacctaggaaggctcatgttcccagagaagggaccacatgagccttctcccatgcaaagcttcccccagcttaaatagttgataaggactaattgtttaatgagtttatttatctacagtaggttagggatcctgggttctgtttatatgaagttcttcccagtttgtgaattctagtacagcagccatgcagccaccttatttcatagatgccatctgtgtgtcctcttgactaccttctatttagaggaagaatgagagctttgtgtgtttaactgagcttatagtaggacttctttgcatatgtatggtactgaaaaatcttaatatacatctttaatcctttttaggttgtcctttaaagagtttttgactagtttctttttcttgacagctcttctctttggacacatgggccttcttagagggttcagtctaggacccggctctcctggccctgtgttgagggtagctggtccctctgtccctgtgtctgctagcactagactttgttgctgcagattgatccagtgggtacataggctaattaatgtgagtctttttccttgtttaaaggagtccctcttgctgaaagtagatgattactattgctgtagtgttaggaaagtattaagtttgtgctgaaaatccattgccatttggtacaaatgacatttgttctttctgtgaaagagatgccctcgagtgtgtttgtacacaaacccttaggatggtgagttgaagcatcaccctcgcgctatcttcagtgacgggtgacggctcagggagatggcaggcagattgggctctaagtcattattctctcagttactccattggtgaaatggccctttccctctttgcagttcagtctaagtctcgtatttgctttgctgtctgtgtgctgaagctcgtcccgtgtgagttgctgtctgccccttgtcaggctgtgaggtgctcgtgtagacctggagcatgcaggctgcctccgtttttgggtactgtgttgtgttttgctctgtctaaaaacatctgcatagttttcaactggaaaaagaaaaaacttaaaaatgggatgtcctaaaatgaaagctgctcaaagtcacagaacaaccgagggacaaaggagattggatgactgggaagcgctggcccggaacagcccctgcaactgtggggcctgcacacagcccttccacagttggcactgcaggtgcaggccaaccctttaaagaataaacaaggaagtcagctctttcactttttacaagttggcaaaaacagacttccggggaattttgatgttttcccgtgttgtagagcttccagggtttaataaaactggttaaaaattgagtctttccctgaagtaagtgctctttccagatgaaaactactcttttggttttgtttgaaagtaagaaagggaggggaaactttgctcttttaataattatgttcagcctatgatgaagtatttgattattagacagcaatgtcactaataagttttaagttgtccaaagttaattgtaaacatcatcagtacagtactcttagttacagtaaagcaattgttgcaagatgaatggctaatattttggtgcagtgtttgatgttcaaaacaaaatgttacaacaataaacgaacataacataaactgaaaaaaaaaaac

SEQ ID NO: 1847 - DNA, 418 bp, Homo sapiens
actgtgtctgcaagcagtttgtactcagtttgtcaagagagcagctttctgttttgattatataccttcatctctgaaaaaagacatgctagttaaatttcaagatgttttacttagaagatgacaaggaagatgaggtggtttgtaaaggctcattaagtaaaactcaagatgtttaccatgacaagtcccctcctggtatcttggtctcactgccacccagtctggagtgcagtgtaggaggcaacctctgcctcccaggctcaagcagtcctttcgcctcagccttctaaggagctaggacctcagttacgggcacccttgcccctgcctcggctgactttcacactggacttcctctggatggaccagcagtcttttgccgcggagtttgctgctgcgctgctcagtattctcc

SEQ ID NO: 1848 - DNA, 514 bp, Homo sapiens
atggaggagatggtgagggtgcataacaaatgtcaaaaatcacttttggaaagattagttatttggtttcaattctgatatgaaaacaagccccttgacattggggcggaggaaaagagaaagtgtggcagtcagttacctccgaacacacacatctggcgctcgtgagactccgctttcagaagcacctcagtgggtgcgtttgcatgggatggccttgcagttgcttgaagctgtgattaaatcccctttcaagagtgtcccgccaccaattagttattggcagctgatagtcaaccaaataggaaaacgctgtatgtgtttgattcctgatagcttttcctgtttctaccgtcttcttaggtcggatgctttgggacagattctcccacagctgggcaaagactggacccaccagggtatagcaaagctctaccattccatcaatgagtaggtaccctccccacgttaactcgctctggtgagctggaagcttgctttaagaactatagaa

SEQ ID NO: 1849 - DNA, 6067 bp, Homo sapiens
gcagtccagccgccgcctgccctcagccgcccgctggccgggagcggagcccctgtggtctcaaaccatgaattatgtgggacagctggctgggcaggtgattgtcactgtgaaggaactctacaagggcattaaccaggccaccctctctgggtgcattgatgtcatcgtggtacagcagcaggatggcagctatcagtgttcaccttttcacgttcggtttggaaagctgggagtcctgagatccaaagagaaagtgattgatatagaaatcaacggcagtgcagtggatcttcacatgaagttgggtgataacggagaagctttctttgttgaggagactgaagaagaatatgaaaagcttcctgcttaccttgccacctcaccaattcctactgaagatcagttctttaaagatattgacacccctttggtgaaatcgggtggagatgaaacaccatctcagagttcagacatctcacacgtcttggaaacagagacaatttttactccaagttctgtgaaaaagaaaaaacgaaggagaaagaaatacaaacaggacagtaagaaggaagagcaggccgcatctgctgctgcagaagacacatgtgatgtaggcgtgagctccgatgatgacaagggggcccaggcagcacgaggatcttcaaatgcttccttgaaagaagaagaatgtaaagagcctttgctcttccattctggggatcattaccccttatctgatggagattggtcccctttagagaccacctatccccagacagcgtgtcctaagagtgattcagagctggaggtgaaacctgcggagagcctgctcagatcagagtctcacatggagtggacgtggggcggattcccagagtccaccaaggtcagcaaaagagaacgatctgaccatcatcctaggacagctacaattacaccatcagaaaatactcattttcgggtaattcccagtgaggacaacctcatcagtgaagttgagaaggatgcttccatggaagacactgtctgtaccatagtgaagcccaaacccagagccctgggtacacagatgagcgacccaacatctgtggcagagcttctcgaacctcctcttgagagtactcagatttcatctatgttagatgctgaccaccttcccaacgcagccttagcggaggcgccctcagaatccaaaccggcagctaaagtagactcgccgtcaaagaagaaaggtgttcacaaaagaagccaacaccagggacctgatgatatttaccttgatgacttaaagggtctagaacctgaagttgcagctctttatttccctaaaagtgaatcggagcccggttccaggcagtggcccgagtctgacacactctctggctcccagtccccacagtccgtgggaagcgcagctgcagatagcggcaccgagtgcctctcagattctgccatggacttgcctgacgttaccctctccctttgcgggggcctcagtgaaaatggagaaatttcaaaagaaaaattcatggagcatatcattacttatcacgaatttgcagaaaaccctggacttatagacaatcctaaccttgtaataaggatatataatcgttactataactgggctttggcagctcccatgatccttagcttgcaagtattccagaagagcttgcctaaggccacagttgagtcctgggtgaaagacaagatgccaaagaaatctggtcgctggtggttttggcgaaagagagaaagcatgaccaaacagctgccagaatccaaggagggaaaatctgaggcaccgccagccagtgacctgccatccagctccaaggagccggccggtgccaggccggccgagaatgactcctcgagtgacgagggatcacaggagctcgaagaatccatcacagtggaccccatccccacagagcccctgagccacggcagcacaacttcatataagaagtctctccgcctctcctcagaccagatcgcaaaactgaagctccacgatggcccaaatgatgttgtgtttagtattacaacccagtatcaaggcacctgtcgctgtgcagggaccatttacctgtggaactggaatgacaagatcatcatttctgatattgatgggacaataaccaagtcggatgctttgggacagattctcccacagctgggcaaagactggacccaccagggtatagcaaagctctaccattccatcaatgagaatggctacaagtttctgtactgctcggctcgtgccatcggcatggccgacatgacccgtggctacctgcactgggtcaatgacaagggcacaatcttgccccggggccccctgatgctgtcccccagcagcttgttctccgccttccacagagaagtgatagaaaagaaaccagagaagttcaaaattgagtgtctaaatgatatcaagaatctgtttgccccgtctaagcagcccttctatgctgcctttggaaaccgtccaaatgatgtctatgcctacacacaagttggagttccagactgtagaatattcaccgtgaaccccaagggtgaattaatacaagaaagaaccaaaggaaacaagtcatcgtatcacaggctgagtgagctcgtggagcatgtgttcccccttctcagtaaggagcagaattccgcttttccctgcccggagttcagctccttctgctactggcgagacccgatccctgaagtggacctggatgacctgtcttgaggcggcacctcagtgggtgggcagggcttggtccccctccccacagcaagggaaggcagctggctcttctgctgacctcagataccagccttccccagcggggacgggtgcttctggagctggtcccgccatcctcctttgccttcccaggccagctgctcaggctcggcaggtctgcagctcagctcctggaaggagaagggaggaactgggcctggggctggaggcctgggatccctcctttgtgggtcgcacacatgtttcctgctgtgagctggggcctccttccattgcatcattttaaaggaagaaaaaagcagctaaaaaagagtggaccaaaacactgcacacagtgaagtgttccagtttccactgggcagttgaggtggcttctgtaaccagggctgtcttcagatgtcagggtccctgaactgctgcgggcccagtcagtgatgctggctgaagctgcctgtgcacgtttcttctctggtcgcctcatttcctgctacactgaaggggtcagctgctccagtgggccaagttgggcaggacccccgcccctgcagggcccatgcaccagagccactgagcccagtcccataaacctggccctctttggggaaagatccccacagagcatcctcctctcatctgtgacaactccacgagcccttaatttcttagtcctcaccagaagaacaggtctcacaagtatatatttgatgtctgtaataaaagtgggaaggtgggtcttaaaacagaccaaaccccgccccgcccccaacaactctgcttttagggaggcctccgaaatgcagataggcggttgagtggggtcctgggaagagcgctgaatccctctgcttgctgcctggtgtgggcctttggaaagcatcttgccttgggacaggatttctaaaattctgtgattcagatttgtcagggaagcacagtgaagcttgcttaaaggcactggccagcagtgtgtgactttggcttttgggatcacaccctgtaatcgggcccgtggaagcagcgtcaaagaggggtcttggagctcctatggagcagactgccccccgagcagtgtccccagcctagccctgtgagaccccatggggacacgggtgcctatgtattttcactaaaatatacatggtagctccatttactgatgcggttgtaatgagctcacatcgtgtctgaagagatggcaccagggaaaggtgtgccataagctgctccagagcttttggtatgctgagtgttgacagagctgcactcttaacatcaagagaactgtcaggagcccagaaccaaccccaggtcttggtctccattggcgagaacacaggacgtggtggttcctgagcagagagggatctgcagatacaggcttggcgctcggggtggtctcgtggccaactcttcatgcccctgccgttgtagtggaacctctacatgttttagtttgcttcacctaaaataatgctgatctagagatagagaaataggggtggttatttttccagattggagagttgaaagtccctgactgatttcagccattttcctagtgcttgtcggatgcagagacaatgttgaaatcccctaaacacagttctcagtggcaaaacctaggaaggctcatgttcccagagaagggaccacatgagccttctcccatgcaaagcttcccccagcttaaatagttgataaggactaattgtttaatgagtttatttatctacagtaggttagggatcctgggttctgtttatatgaagttcttcccagtttgtgaattctagtacagcagccatgcagccaccttatttcatagatgccatctgtgtgtcctcttgactaccttctatttagaggaagaatgagagctttgtgtgtttaactgagcttatagtaggacttctttgcatatgtatggtactgaaaaatcttaatatacatctttaatcctttttaggttgtcctttaaagagtttttgactagtttctttttcttgacagctcttctctttggacacatgggccttcttagagggttcagtctaggacccggctctcctggccctgtgttgagggtagctggtccctctgtccctgtgtctgctagcactagactttgttgctgcagattgatccagtgggtacataggctaattaatgtgagtctttttccttgtttaaaggagtccctcttgctgaaagtagatgattactattgctgtagtgttaggaaagtattaagtttgtgctgaaaatccattgccatttggtacaaatgacatttgttctttctgtgaaagagatgccctcgagtgtgtttgtacacaaacccttaggatggtgagttgaagcatcaccctcgcgctatcttcagtgacgggtgacggctcagggagatggcaggcagattgggctctaagtcattattctctcagttactccattggtgaaatggccctttccctctttgcagttcagtctaagtctcgtatttgctttgctgtctgtgtgctgaagctcgtcccgtgtgagttgctgtctgccccttgtcaggctgtgaggtgctcgtgtagacctggagcatgcaggctgcctccgtttttgggtactgtgttgtgttttgctctgtctaaaaacatctgcatagttttcaactggaaaaagaaaaaacttaaaaatgggatgtcctaaaatgaaagctgctcaaagtcacagaacaaccgagggacaaaggagattggatgactgggaagcgctggcccggaacagcccctgcaactgtggggcctgcacacagcccttccacagttggcactgcaggtgcaggccaaccctttaaagaataaacaaggaagtcagctctttcactttttacaagttggcaaaaacagacttccggggaattttgatgttttcccgtgttgtagagcttccagggtttaataaaactggttaaaaattgagtctttccctgaagtaagtgctctttccagatgaaaactactcttttggttttgtttgaaagtaagaaagggaggggaaactttgctcttttaataattatgttcagcctatgatgaagtatttgattattagacagcaatgtcactaataagttttaagttgtccaaagttaattgtaaacatcatcagtacagtactcttagttacagtaaagcaattgttgcaagatgaatggctaatattttggtgcagtgtttgatgttcaaaacaaaatgttacaacaataaacgaacataacataaactgaaaaaaaaaaac

SEQ ID NO: 1850 - DNA, 6215 bp, Homo sapiens
actgtgtctgcaagcagtttgtactcagtttgtcaagagagcagctttctgttttgattatataccttcatctctgaaaaaagacatgctagttaaatttcaagatgttttacttagaagatgacaaggaagatgaggtggtttgtaaaggctcattaagtaaaactcaagatgtttaccatgacaagtcccctcctggtatcttgtctcaaaccatgaattatgtgggacagctggctgggcaggtgattgtcactgtgaaggaactctacaagggcattaaccaggccaccctctctgggtgcattgatgtcatcgtggtacagcagcaggatggcagctatcagtgttcaccttttcacgttcggtttggaaagctgggagtcctgagatccaaagagaaagtgattgatatagaaatcaacggcagtgcagtggatcttcacatgaagttgggtgataacggagaagctttctttgttgaggagactgaagaagaatatgaaaagcttcctgcttaccttgccacctcaccaattcctactgaagatcagttctttaaagatattgacacccctttggtgaaatcgggtggagatgaaacaccatctcagagttcagacatctcacacgtcttggaaacagagacaatttttactccaagttctgtgaaaaagaaaaaacgaaggagaaagaaatacaaacaggacagtaagaaggaagagcaggccgcatctgctgctgcagaagacacatgtgatgtaggcgtgagctccgatgatgacaagggggcccaggcagcacgaggatcttcaaatgcttccttgaaagaagaagaatgtaaagagcctttgctcttccattctggggatcattaccccttatctgatggagattggtcccctttagagaccacctatccccagacagcgtgtcctaagagtgattcagagctggaggtgaaacctgcggagagcctgctcagatcagagtctcacatggagtggacgtggggcggattcccagagtccaccaaggtcagcaaaagagaacgatctgaccatcatcctaggacagctacaattacaccatcagaaaatactcattttcgggtaattcccagtgaggacaacctcatcagtgaagttgagaaggatgcttccatggaagacactgtctgtaccatagtgaagcccaaacccagagccctgggtacacagatgagcgacccaacatctgtggcagagcttctcgaacctcctcttgagagtactcagatttcatctatgttagatgctgaccaccttcccaacgcagccttagcggaggcgccctcagaatccaaaccggcagctaaagtagactcgccgtcaaagaagaaaggtgttcacaaaagaagccaacaccagggacctgatgatatttaccttgatgacttaaagggtctagaacctgaagttgcagctctttatttccctaaaagtgaatcggagcccggttccaggcagtggcccgagtctgacacactctctggctcccagtccccacagtccgtgggaagcgcagctgcagatagcggcaccgagtgcctctcagattctgccatggacttgcctgacgttaccctctccctttgcgggggcctcagtgaaaatggagaaatttcaaaagaaaaattcatggagcatatcattacttatcacgaatttgcagaaaaccctggacttatagacaatcctaaccttgtaataaggatatataatcgttactataactgggctttggcagctcccatgatccttagcttgcaagtattccagaagagcttgcctaaggccacagttgagtcctgggtgaaagacaagatgccaaagaaatctggtcgctggtggttttggcgaaagagagaaagcatgaccaaacagctgccagaatccaaggagggaaaatctgaggcaccgccagccagtgacctgccatccagctccaaggagccggccggtgccaggccggccgagaatgactcctcgagtgacgagggatcacaggagctcgaagaatccatcacagtggaccccatccccacagagcccctgagccacggcagcacaacttcatataagaagtctctccgcctctcctcagaccagatcgcaaaactgaagctccacgatggcccaaatgatgttgtgtttagtattacaacccagtatcaaggcacctgtcgctgtgcagggaccatttacctgtggaactggaatgacaagatcatcatttctgatattgatgggacaataaccaagtcggatgctttgggacagattctcccacagctgggcaaagactggacccaccagggtatagcaaagctctaccattccatcaatgagaatggctacaagtttctgtactgctcggctcgtgccatcggcatggccgacatgacccgtggctacctgcactgggtcaatgacaagggcacaatcttgccccggggccccctgatgctgtcccccagcagcttgttctccgccttccacagagaagtgatagaaaagaaaccagagaagttcaaaattgagtgtctaaatgatatcaagaatctgtttgccccgtctaagcagcccttctatgctgcctttggaaaccgtccaaatgatgtctatgcctacacacaagttggagttccagactgtagaatattcaccgtgaaccccaagggtgaattaatacaagaaagaaccaaaggaaacaagtcatcgtatcacaggctgagtgagctcgtggagcatgtgttcccccttctcagtaaggagcagaattccgcttttccctgcccggagttcagctccttctgctactggcgagacccgatccctgaagtggacctggatgacctgtcttgaggcggcacctcagtgggtgggcagggcttggtccccctccccacagcaagggaaggcagctggctcttctgctgacctcagataccagccttccccagcggggacgggtgcttctggagctggtcccgccatcctcctttgccttcccaggccagctgctcaggctcggcaggtctgcagctcagctcctggaaggagaagggaggaactgggcctggggctggaggcctgggatccctcctttgtgggtcgcacacatgtttcctgctgtgagctggggcctccttccattgcatcattttaaaggaagaaaaaagcagctaaaaaagagtggaccaaaacactgcacacagtgaagtgttccagtttccactgggcagttgaggtggcttctgtaaccagggctgtcttcagatgtcagggtccctgaactgctgcgggcccagtcagtgatgctggctgaagctgcctgtgcacgtttcttctctggtcgcctcatttcctgctacactgaaggggtcagctgctccagtgggccaagttgggcaggacccccgcccctgcagggcccatgcaccagagccactgagcccagtcccataaacctggccctctttggggaaagatccccacagagcatcctcctctcatctgtgacaactccacgagcccttaatttcttagtcctcaccagaagaacaggtctcacaagtatatatttgatgtctgtaataaaagtgggaaggtgggtcttaaaacagaccaaaccccgccccgcccccaacaactctgcttttagggaggcctccgaaatgcagataggcggttgagtggggtcctgggaagagcgctgaatccctctgcttgctgcctggtgtgggcctttggaaagcatcttgccttgggacaggatttctaaaattctgtgattcagatttgtcagggaagcacagtgaagcttgcttaaaggcactggccagcagtgtgtgactttggcttttgggatcacaccctgtaatcgggcccgtggaagcagcgtcaaagaggggtcttggagctcctatggagcagactgccccccgagcagtgtccccagcctagccctgtgagaccccatggggacacgggtgcctatgtattttcactaaaatatacatggtagctccatttactgatgcggttgtaatgagctcacatcgtgtctgaagagatggcaccagggaaaggtgtgccataagctgctccagagcttttggtatgctgagtgttgacagagctgcactcttaacatcaagagaactgtcaggagcccagaaccaaccccaggtcttggtctccattggcgagaacacaggacgtggtggttcctgagcagagagggatctgcagatacaggcttggcgctcggggtggtctcgtggccaactcttcatgcccctgccgttgtagtggaacctctacatgttttagtttgcttcacctaaaataatgctgatctagagatagagaaataggggtggttatttttccagattggagagttgaaagtccctgactgatttcagccattttcctagtgcttgtcggatgcagagacaatgttgaaatcccctaaacacagttctcagtggcaaaacctaggaaggctcatgttcccagagaagggaccacatgagccttctcccatgcaaagcttcccccagcttaaatagttgataaggactaattgtttaatgagtttatttatctacagtaggttagggatcctgggttctgtttatatgaagttcttcccagtttgtgaattctagtacagcagccatgcagccaccttatttcatagatgccatctgtgtgtcctcttgactaccttctatttagaggaagaatgagagctttgtgtgtttaactgagcttatagtaggacttctttgcatatgtatggtactgaaaaatcttaatatacatctttaatcctttttaggttgtcctttaaagagtttttgactagtttctttttcttgacagctcttctctttggacacatgggccttcttagagggttcagtctaggacccggctctcctggccctgtgttgagggtagctggtccctctgtccctgtgtctgctagcactagactttgttgctgcagattgatccagtgggtacataggctaattaatgtgagtctttttccttgtttaaaggagtccctcttgctgaaagtagatgattactattgctgtagtgttaggaaagtattaagtttgtgctgaaaatccattgccatttggtacaaatgacatttgttctttctgtgaaagagatgccctcgagtgtgtttgtacacaaacccttaggatggtgagttgaagcatcaccctcgcgctatcttcagtgacgggtgacggctcagggagatggcaggcagattgggctctaagtcattattctctcagttactccattggtgaaatggccctttccctctttgcagttcagtctaagtctcgtatttgctttgctgtctgtgtgctgaagctcgtcccgtgtgagttgctgtctgccccttgtcaggctgtgaggtgctcgtgtagacctggagcatgcaggctgcctccgtttttgggtactgtgttgtgttttgctctgtctaaaaacatctgcatagttttcaactggaaaaagaaaaaacttaaaaatgggatgtcctaaaatgaaagctgctcaaagtcacagaacaaccgagggacaaaggagattggatgactgggaagcgctggcccggaacagcccctgcaactgtggggcctgcacacagcccttccacagttggcactgcaggtgcaggccaaccctttaaagaataaacaaggaagtcagctctttcactttttacaagttggcaaaaacagacttccggggaattttgatgttttcccgtgttgtagagcttccagggtttaataaaactggttaaaaattgagtctttccctgaagtaagtgctctttccagatgaaaactactcttttggttttgtttgaaagtaagaaagggaggggaaactttgctcttttaataattatgttcagcctatgatgaagtatttgattattagacagcaatgtcactaataagttttaagttgtccaaagttaattgtaaacatcatcagtacagtactcttagttacagtaaagcaattgttgcaagatgaatggctaatattttggtgcagtgtttgatgttcaaaacaaaatgttacaacaataaacgaacataacataaactgaaaaaaaaaaac

SEQ ID NO: 1851 - DNA, 5342 bp, Homo sapiens
ttttagtttttctcactttattatggaatttttacatgtacaaactaagatatttaatgaatgtgttaagttaaaaatagaatgaacacattgccagcttaggaaatagattataacaaatactctgaaagtagtttaatttttaaacaatttaacttttttaggtcagcaaaagagaacgatctgaccatcatcctaggacagctacaattacaccatcagaaaatactcattttcgggtaattcccagtgaggacaacctcatcagtgaagttgagaaggatgcttccatggaagacactgtctgtaccatagtgaagcccaaacccagagccctgggtacacagatgagcgacccaacatctgtggcagagcttctcgaacctcctcttgagagtactcagatttcatctatgttagatgctgaccaccttcccaacgcagccttagcggaggcgccctcagaatccaaaccggcagctaaagtagactcgccgtcaaagaagaaaggtgttcacaaaagaagccaacaccagggacctgatgatatttaccttgatgacttaaagggtctagaacctgaagttgcagctctttatttccctaaaagtgaatcggagcccggttccaggcagtggcccgagtctgacacactctctggctcccagtccccacagtccgtgggaagcgcagctgcagatagcggcaccgagtgcctctcagattctgccatggacttgcctgacgttaccctctccctttgcgggggcctcagtgaaaatggagaaatttcaaaagaaaaattcatggagcatatcattacttatcacgaatttgcagaaaaccctggacttatagacaatcctaaccttgtaataaggatatataatcgttactataactgggctttggcagctcccatgatccttagcttgcaagtattccagaagagcttgcctaaggccacagttgagtcctgggtgaaagacaagatgccaaagaaatctggtcgctggtggttttggcgaaagagagaaagcatgaccaaacagctgccagaatccaaggagggaaaatctgaggcaccgccagccagtgacctgccatccagctccaaggagccggccggtgccaggccggccgagaatgactcctcgagtgacgagggatcacaggagctcgaagaatccatcacagtggaccccatccccacagagcccctgagccacggcagcacaacttcatataagaagtctctccgcctctcctcagaccagatcgcaaaactgaagctccacgatggcccaaatgatgttgtgtttagtattacaacccagtatcaaggcacctgtcgctgtgcagggaccatttacctgtggaactggaatgacaagatcatcatttctgatattgatgggacaataaccaagtcggatgctttgggacagattctcccacagctgggcaaagactggacccaccagggtatagcaaagctctaccattccatcaatgagaatggctacaagtttctgtactgctcggctcgtgccatcggcatggccgacatgacccgtggctacctgcactgggtcaatgacaagggcacaatcttgccccggggccccctgatgctgtcccccagcagcttgttctccgccttccacagagaagtgatagaaaagaaaccagagaagttcaaaattgagtgtctaaatgatatcaagaatctgtttgccccgtctaagcagcccttctatgctgcctttggaaaccgtccaaatgatgtctatgcctacacacaagttggagttccagactgtagaatattcaccgtgaaccccaagggtgaattaatacaagaaagaaccaaaggaaacaagtcatcgtatcacaggctgagtgagctcgtggagcatgtgttcccccttctcagtaaggagcagaattccgcttttccctgcccggagttcagctccttctgctactggcgagacccgatccctgaagtggacctggatgacctgtcttgaggcggcacctcagtgggtgggcagggcttggtccccctccccacagcaagggaaggcagctggctcttctgctgacctcagataccagccttccccagcggggacgggtgcttctggagctggtcccgccatcctcctttgccttcccaggccagctgctcaggctcggcaggtctgcagctcagctcctggaaggagaagggaggaactgggcctggggctggaggcctgggatccctcctttgtgggtcgcacacatgtttcctgctgtgagctggggcctccttccattgcatcattttaaaggaagaaaaaagcagctaaaaaagagtggaccaaaacactgcacacagtgaagtgttccagtttccactgggcagttgaggtggcttctgtaaccagggctgtcttcagatgtcagggtccctgaactgctgcgggcccagtcagtgatgctggctgaagctgcctgtgcacgtttcttctctggtcgcctcatttcctgctacactgaaggggtcagctgctccagtgggccaagttgggcaggacccccgcccctgcagggcccatgcaccagagccactgagcccagtcccataaacctggccctctttggggaaagatccccacagagcatcctcctctcatctgtgacaactccacgagcccttaatttcttagtcctcaccagaagaacaggtctcacaagtatatatttgatgtctgtaataaaagtgggaaggtgggtcttaaaacagaccaaaccccgccccgcccccaacaactctgcttttagggaggcctccgaaatgcagataggcggttgagtggggtcctgggaagagcgctgaatccctctgcttgctgcctggtgtgggcctttggaaagcatcttgccttgggacaggatttctaaaattctgtgattcagatttgtcagggaagcacagtgaagcttgcttaaaggcactggccagcagtgtgtgactttggcttttgggatcacaccctgtaatcgggcccgtggaagcagcgtcaaagaggggtcttggagctcctatggagcagactgccccccgagcagtgtccccagcctagccctgtgagaccccatggggacacgggtgcctatgtattttcactaaaatatacatggtagctccatttactgatgcggttgtaatgagctcacatcgtgtctgaagagatggcaccagggaaaggtgtgccataagctgctccagagcttttggtatgctgagtgttgacagagctgcactcttaacatcaagagaactgtcaggagcccagaaccaaccccaggtcttggtctccattggcgagaacacaggacgtggtggttcctgagcagagagggatctgcagatacaggcttggcgctcggggtggtctcgtggccaactcttcatgcccctgccgttgtagtggaacctctacatgttttagtttgcttcacctaaaataatgctgatctagagatagagaaataggggtggttatttttccagattggagagttgaaagtccctgactgatttcagccattttcctagtgcttgtcggatgcagagacaatgttgaaatcccctaaacacagttctcagtggcaaaacctaggaaggctcatgttcccagagaagggaccacatgagccttctcccatgcaaagcttcccccagcttaaatagttgataaggactaattgtttaatgagtttatttatctacagtaggttagggatcctgggttctgtttatatgaagttcttcccagtttgtgaattctagtacagcagccatgcagccaccttatttcatagatgccatctgtgtgtcctcttgactaccttctatttagaggaagaatgagagctttgtgtgtttaactgagcttatagtaggacttctttgcatatgtatggtactgaaaaatcttaatatacatctttaatcctttttaggttgtcctttaaagagtttttgactagtttctttttcttgacagctcttctctttggacacatgggccttcttagagggttcagtctaggacccggctctcctggccctgtgttgagggtagctggtccctctgtccctgtgtctgctagcactagactttgttgctgcagattgatccagtgggtacataggctaattaatgtgagtctttttccttgtttaaaggagtccctcttgctgaaagtagatgattactattgctgtagtgttaggaaagtattaagtttgtgctgaaaatccattgccatttggtacaaatgacatttgttctttctgtgaaagagatgccctcgagtgtgtttgtacacaaacccttaggatggtgagttgaagcatcaccctcgcgctatcttcagtgacgggtgacggctcagggagatggcaggcagattgggctctaagtcattattctctcagttactccattggtgaaatggccctttccctctttgcagttcagtctaagtctcgtatttgctttgctgtctgtgtgctgaagctcgtcccgtgtgagttgctgtctgccccttgtcaggctgtgaggtgctcgtgtagacctggagcatgcaggctgcctccgtttttgggtactgtgttgtgttttgctctgtctaaaaacatctgcatagttttcaactggaaaaagaaaaaacttaaaaatgggatgtcctaaaatgaaagctgctcaaagtcacagaacaaccgagggacaaaggagattggatgactgggaagcgctggcccggaacagcccctgcaactgtggggcctgcacacagcccttccacagttggcactgcaggtgcaggccaaccctttaaagaataaacaaggaagtcagctctttcactttttacaagttggcaaaaacagacttccggggaattttgatgttttcccgtgttgtagagcttccagggtttaataaaactggttaaaaattgagtctttccctgaagtaagtgctctttccagatgaaaactactcttttggttttgtttgaaagtaagaaagggaggggaaactttgctcttttaataattatgttcagcctatgatgaagtatttgattattagacagcaatgtcactaataagttttaagttgtccaaagttaattgtaaacatcatcagtacagtactcttagttacagtaaagcaattgttgcaagatgaatggctaatattttggtgcagtgtttgatgttcaaaacaaaatgttacaacaataaacgaacataacataaactgaaaaaaaaaaac

SEQ ID NO: 1852 - DNA, 6014 bp, Homo sapiens
gcagtccagccgccgcctgccctcagccgcccgctggccgggagcggagcccctgtggtctcaaaccatgaattatgtgggacagctggctgggcaggtgattgtcactgtgaaggaactctacaagggcattaaccaggccaccctctctgggtgcattgatgtcatcgtggtacagcagcaggatggcagctatcagtgttcaccttttcacgttcggtttggaaagctgggagtcctgagatccaaagagaaagtgattgatatagaaatcaacggcagtgcagtggatcttcacatgaagttgggtgataacggagaagctttctttgttgaggagactgaagaagaatatgaaaagcttcctgcttaccttgccacctcaccaattcctactgaagatcagttctttaaagatattgacacccctttggtgaaatcgggtggagatgaaacaccatctcagagttcagacatctcacacgtcttggaaacagagacaatttttactccaagttctgtgaaaaagaaaaaacgaaggagaaagaaatacaaacaggacagtaagaaggaagagcaggccgcatctgctgctgcagaagacacatgtgatgtaggcgtgagctccgatgatgacaagggggcccaggcagcacgaggatcttcaaatgcttccttgaaagaagaagaatgtaaagagcctttgctcttccattctggggatcattaccccttatctgatggagattggtcccctttagagaccacctatccccagacagcgtgtcctaagagtgattcagagctggaggtgaaacctgcggagagcctgctcagatcagagtctcacatggagtggacgtggggcggattcccagagtccaccaaggtcagcaaaagagaacgatctgaccatcatcctaggacagctacaattacaccatcagaaaatactcattttcgggtaattcccagtgaggacaacctcatcagtgaagttgagaaggatgcttccatggaagacactgtctgtaccatagtgaagcccaaacccagagccctgggtacacagatgagcgacccaacatctgtggcagagcttctcgaacctcctcttgagagtactcagatttcatctatgttagatgctgaccaccttcccaacgcagccttagcggaggcgccctcagaatccaaaccggcagctaaagtagactcgccgtcaaagaagaaaggtgttcacaaaagaagccaacaccagggacctgatgatatttaccttgatgacttaaagggtctagaacctgaagttgcagctctttatttccctaaaagtgaatcggagcccggttccaggcagtggcccgagtctgacacactctctggctcccagtccccacagtccgtgggaagcgcagctgcagatagcggcaccgagtgcctctcagattctgccatggacttgcctgacgttaccctctccctttgcgggggcctcagtgaaaatggagaaatttcaaaagaaaaattcatggagcatatcattacttatcacgaatttgcagaaaaccctggacttatagacaatcctaaccttgtaataaggatatataatcgttactataactgggctttggcagctcccatgatccttagcttgcaagtattccagaagagcttgcctaaggccacagttgagtcctgggtgaaagacaagatgccaaagaaatctggtcgctggtggttttggcgaaagagagaaagcatgaccaaacagctgccagaatccaaggagggaaaatctgaggcaccgccagccagtgacctgccatccagctccaaggagccggccggtgccaggccggccgagaatgactcctcgagtgacgagggatcacaggagctcgaagaatccatcacagtggaccccatccccacagagcccctgagccacggcagcacaacttcatataagaagtctctccgcctctcctcagaccagatcgcaaaactgaagctccacgatggcccaaatgatgttgtgtttagtattacaacccagtatcaaggcacctgtcgctgtgcagggaccatttacctgtggaactggaatgacaagatcatcatttctgatattgatgggacaataaccaagtcggatgctttgggacagattctcccacagctgggcaaagactggacccaccagggtatagcaaagctctaccattccatcaatgagaatggctacaagtttctgtactgctcggctcgtgccatcggcatggccgacatgacccgtggctacctgcactgggtcaatgacaagggcacaatcttgccccggggccccctgatgctgtcccccagcagcttgttctccgccttccacagagaagtgatagaaaagaaaccagagaagttcaaaattgagtgtctaaatgatatcaagaatctgtttgccccgtctaagcagcccttctatgctgcctttggaaaccgtccaaatgatgtctatgcctacacacaagttggagttccagactgtagaatattcaccgtgaaccccaagggtgaattaatacaagaaagaaccaaaggaaacaagtcatcgtatcacaggctgagtgagctcgtggagcatgtgttcccccttctcagtaaggagcagaattccgcttttccctgcccggagttcagctccttctgctactggcgagacccgatccctgaagtggacctggatgacctgtcttgaggcggcacctcagtgggtgggcagggcttggtccccctccccacagcaagggaaggcagctggctcttctgctgacctcagataccagccttccccagcggggacgggtgcttctggagctggtcccgccatcctcctttgccttcccaggccagctgctcaggctcggcaggtctgcagctcagctcctggaaggagaagggaggaactgggcctggggctggaggcctgggatccctcctttgtgggtcgcacacatgtttcctgctgtgagctggggcctccttccattgcatcattttaaaggaagaaaaaagcagctaaaaaagagtggaccaaaacactgcacacagtgaagtgttccagtttccactgggcagttgaggtggcttctgtaaccagggctgtcttcagatgtcagggtccctgaactgctgcgggcccagtcagtgatgctggctgaagctgcctgtgcacgtttcttctctggtcgcctcatttcctgctacactgaaggggtcagctgctccagtgggccaagttgggcaggacccccgcccctgcagggcccatgcaccagagccactgagcccagtcccataaacctggccctctttggggaaagatccccacagagcatcctcctctcatctgtgacaactccacgagcccttaatttcttagtcctcaccagaagaacaggtctcacaagtatatatttgatgtctgtaataaaagtgggaaggtgggtcttaaaacagaccaaaccccgccccgcccccaacaactctgcttttagggaggcctccgaaatgcagataggcggttgagtggggtcctgggaagagcgctgaatccctctgcttgctgcctggtgtgggcctttggaaagcatcttgccttgggacaggatttctaaaattctgtgattcagatttgtcagggaagcacagtgaagcttgcttaaaggcactggccagcagtgtgtgactttggcttttgggatcacaccctgtaatcgggcccgtggaagcagcgtcaaagaggggtcttggagctcctatggagcagactgccccccgagcagtgtccccagcctagccctgtgagaccccatggggacacgggtgcctatgtattttcacgtgtctgaagagatggcaccagggaaaggtgtgccataagctgctccagagcttttggtatgctgagtgttgacagagctgcactcttaacatcaagagaactgtcaggagcccagaaccaaccccaggtcttggtctccattggcgagaacacaggacgtggtggttcctgagcagagagggatctgcagatacaggcttggcgctcggggtggtctcgtggccaactcttcatgcccctgccgttgtagtggaacctctacatgttttagtttgcttcacctaaaataatgctgatctagagatagagaaataggggtggttatttttccagattggagagttgaaagtccctgactgatttcagccattttcctagtgcttgtcggatgcagagacaatgttgaaatcccctaaacacagttctcagtggcaaaacctaggaaggctcatgttcccagagaagggaccacatgagccttctcccatgcaaagcttcccccagcttaaatagttgataaggactaattgtttaatgagtttatttatctacagtaggttagggatcctgggttctgtttatatgaagttcttcccagtttgtgaattctagtacagcagccatgcagccaccttatttcatagatgccatctgtgtgtcctcttgactaccttctatttagaggaagaatgagagctttgtgtgtttaactgagcttatagtaggacttctttgcatatgtatggtactgaaaaatcttaatatacatctttaatcctttttaggttgtcctttaaagagtttttgactagtttctttttcttgacagctcttctctttggacacatgggccttcttagagggttcagtctaggacccggctctcctggccctgtgttgagggtagctggtccctctgtccctgtgtctgctagcactagactttgttgctgcagattgatccagtgggtacataggctaattaatgtgagtctttttccttgtttaaaggagtccctcttgctgaaagtagatgattactattgctgtagtgttaggaaagtattaagtttgtgctgaaaatccattgccatttggtacaaatgacatttgttctttctgtgaaagagatgccctcgagtgtgtttgtacacaaacccttaggatggtgagttgaagcatcaccctcgcgctatcttcagtgacgggtgacggctcagggagatggcaggcagattgggctctaagtcattattctctcagttactccattggtgaaatggccctttccctctttgcagttcagtctaagtctcgtatttgctttgctgtctgtgtgctgaagctcgtcccgtgtgagttgctgtctgccccttgtcaggctgtgaggtgctcgtgtagacctggagcatgcaggctgcctccgtttttgggtactgtgttgtgttttgctctgtctaaaaacatctgcatagttttcaactggaaaaagaaaaaacttaaaaatgggatgtcctaaaatgaaagctgctcaaagtcacagaacaaccgagggacaaaggagattggatgactgggaagcgctggcccggaacagcccctgcaactgtggggcctgcacacagcccttccacagttggcactgcaggtgcaggccaaccctttaaagaataaacaaggaagtcagctctttcactttttacaagttggcaaaaacagacttccggggaattttgatgttttcccgtgttgtagagcttccagggtttaataaaactggttaaaaattgagtctttccctgaagtaagtgctctttccagatgaaaactactcttttggttttgtttgaaagtaagaaagggaggggaaactttgctcttttaataattatgttcagcctatgatgaagtatttgattattagacagcaatgtcactaataagttttaagttgtccaaagttaattgtaaacatcatcagtacagtactcttagttacagtaaagcaattgttgcaagatgaatggctaatattttggtgcagtgtttgatgttcaaaacaaaatgttacaacaataaacgaacataacataaactgaaaaaaaaaaac

SEQ ID NO: 1853 - DNA, 4276 bp, Homo sapiens
atggaggagatggtgagggtgcataacaaatgtcaaaaatcacttttggaaagattagttatttggtttcaattctgatatgaaaacaagccccttgacattggggcggaggaaaagagaaagtgtggcagtcagttacctccgaacacacacatctggcgctcgtgagactccgctttcagaagcacctcagtgggtgcgtttgcatgggatggccttgcagttgcttgaagctgtgattaaatcccctttcaagagtgtcccgccaccaattagttattggcagctgatagtcaaccaaataggaaaacgctgtatgtgtttgattcctgatagcttttcctgtttctaccgtcttcttaggtcggatgctttgggacagattctcccacagctgggcaaagactggacccaccagggtatagcaaagctctaccattccatcaatgagaatggctacaagtttctgtactgctcggctcgtgccatcggcatggccgacatgacccgtggctacctgcactgggtcaatgacaagggcacaatcttgccccggggccccctgatgctgtcccccagcagcttgttctccgccttccacagagaagtgatagaaaagaaaccagagaagttcaaaattgagtgtctaaatgatatcaagaatctgtttgccccgtctaagcagcccttctatgctgcctttggaaaccgtccaaatgatgtctatgcctacacacaagttggagttccagactgtagaatattcaccgtgaaccccaagggtgaattaatacaagaaagaaccaaaggaaacaagtcatcgtatcacaggctgagtgagctcgtggagcatgtgttcccccttctcagtaaggagcagaattccgcttttccctgcccggagttcagctccttctgctactggcgagacccgatccctgaagtggacctggatgacctgtcttgaggcggcacctcagtgggtgggcagggcttggtccccctccccacagcaagggaaggcagctggctcttctgctgacctcagataccagccttccccagcggggacgggtgcttctggagctggtcccgccatcctcctttgccttcccaggccagctgctcaggctcggcaggtctgcagctcagctcctggaaggagaagggaggaactgggcctggggctggaggcctgggatccctcctttgtgggtcgcacacatgtttcctgctgtgagctggggcctccttccattgcatcattttaaaggaagaaaaaagcagctaaaaaagagtggaccaaaacactgcacacagtgaagtgttccagtttccactgggcagttgaggtggcttctgtaaccagggctgtcttcagatgtcagggtccctgaactgctgcgggcccagtcagtgatgctggctgaagctgcctgtgcacgtttcttctctggtcgcctcatttcctgctacactgaaggggtcagctgctccagtgggccaagttgggcaggacccccgcccctgcagggcccatgcaccagagccactgagcccagtcccataaacctggccctctttggggaaagatccccacagagcatcctcctctcatctgtgacaactccacgagcccttaatttcttagtcctcaccagaagaacaggtctcacaagtatatatttgatgtctgtaataaaagtgggaaggtgggtcttaaaacagaccaaaccccgccccgcccccaacaactctgcttttagggaggcctccgaaatgcagataggcggttgagtggggtcctgggaagagcgctgaatccctctgcttgctgcctggtgtgggcctttggaaagcatcttgccttgggacaggatttctaaaattctgtgattcagatttgtcagggaagcacagtgaagcttgcttaaaggcactggccagcagtgtgtgactttggcttttgggatcacaccctgtaatcgggcccgtggaagcagcgtcaaagaggggtcttggagctcctatggagcagactgccccccgagcagtgtccccagcctagccctgtgagaccccatggggacacgggtgcctatgtattttcactaaaatatacatggtagctccatttactgatgcggttgtaatgagctcacatcgtgtctgaagagatggcaccagggaaaggtgtgccataagctgctccagagcttttggtatgctgagtgttgacagagctgcactcttaacatcaagagaactgtcaggagcccagaaccaaccccaggtcttggtctccattggcgagaacacaggacgtggtggttcctgagcagagagggatctgcagatacaggcttggcgctcggggtggtctcgtggccaactcttcatgcccctgccgttgtagtggaacctctacatgttttagtttgcttcacctaaaataatgctgatctagagatagagaaataggggtggttatttttccagattggagagttgaaagtccctgactgatttcagccattttcctagtgcttgtcggatgcagagacaatgttgaaatcccctaaacacagttctcagtggcaaaacctaggaaggctcatgttcccagagaagggaccacatgagccttctcccatgcaaagcttcccccagcttaaatagttgataaggactaattgtttaatgagtttatttatctacagtaggttagggatcctgggttctgtttatatgaagttcttcccagtttgtgaattctagtacagcagccatgcagccaccttatttcatagatgccatctgtgtgtcctcttgactaccttctatttagaggaagaatgagagctttgtgtgtttaactgagcttatagtaggacttctttgcatatgtatggtactgaaaaatcttaatatacatctttaatcctttttaggttgtcctttaaagagtttttgactagtttctttttcttgacagctcttctctttggacacatgggccttcttagagggttcagtctaggacccggctctcctggccctgtgttgagggtagctggtccctctgtccctgtgtctgctagcactagactttgttgctgcagattgatccagtgggtacataggctaattaatgtgagtctttttccttgtttaaaggagtccctcttgctgaaagtagatgattactattgctgtagtgttaggaaagtattaagtttgtgctgaaaatccattgccatttggtacaaatgacatttgttctttctgtgaaagagatgccctcgagtgtgtttgtacacaaacccttaggatggtgagttgaagcatcaccctcgcgctatcttcagtgacgggtgacggctcagggagatggcaggcagattgggctctaagtcattattctctcagttactccattggtgaaatggccctttccctctttgcagttcagtctaagtctcgtatttgctttgctgtctgtgtgctgaagctcgtcccgtgtgagttgctgtctgccccttgtcaggctgtgaggtgctcgtgtagacctggagcatgcaggctgcctccgtttttgggtactgtgttgtgttttgctctgtctaaaaacatctgcatagttttcaactggaaaaagaaaaaacttaaaaatgggatgtcctaaaatgaaagctgctcaaagtcacagaacaaccgagggacaaaggagattggatgactgggaagcgctggcccggaacagcccctgcaactgtggggcctgcacacagcccttccacagttggcactgcaggtgcaggccaaccctttaaagaataaacaaggaagtcagctctttcactttttacaagttggcaaaaacagacttccggggaattttgatgttttcccgtgttgtagagcttccagggtttaataaaactggttaaaaattgagtctttccctgaagtaagtgctctttccagatgaaaactactcttttggttttgtttgaaagtaagaaagggaggggaaactttgctcttttaataattatgttcagcctatgatgaagtatttgattattagacagcaatgtcactaataagttttaagttgtccaaagttaattgtaaacatcatcagtacagtactcttagttacagtaaagcaattgttgcaagatgaatggctaatattttggtgcagtgtttgatgttcaaaacaaaatgttacaacaataaacgaacataacataaactgaaaaaaaaaaac

SEQ ID NO: 1854 - DNA, 3888 bp, Homo sapiens
gttttttgttttcttttcccttagccagaacatgtgggctaacagggtgtgttttctttcaggaatggctacaagtttctgtactgctcggctcgtgccatcggcatggccgacatgacccgtggctacctgcactgggtcaatgacaagggcacaatcttgccccggggccccctgatgctgtcccccagcagcttgttctccgccttccacagagaagtgatagaaaagaaaccagagaagttcaaaattgagtgtctaaatgatatcaagaatctgtttgccccgtctaagcagcccttctatgctgcctttggaaaccgtccaaatgatgtctatgcctacacacaagttggagttccagactgtagaatattcaccgtgaaccccaagggtgaattaatacaagaaagaaccaaaggaaacaagtcatcgtatcacaggctgagtgagctcgtggagcatgtgttcccccttctcagtaaggagcagaattccgcttttccctgcccggagttcagctccttctgctactggcgagacccgatccctgaagtggacctggatgacctgtcttgaggcggcacctcagtgggtgggcagggcttggtccccctccccacagcaagggaaggcagctggctcttctgctgacctcagataccagccttccccagcggggacgggtgcttctggagctggtcccgccatcctcctttgccttcccaggccagctgctcaggctcggcaggtctgcagctcagctcctggaaggagaagggaggaactgggcctggggctggaggcctgggatccctcctttgtgggtcgcacacatgtttcctgctgtgagctggggcctccttccattgcatcattttaaaggaagaaaaaagcagctaaaaaagagtggaccaaaacactgcacacagtgaagtgttccagtttccactgggcagttgaggtggcttctgtaaccagggctgtcttcagatgtcagggtccctgaactgctgcgggcccagtcagtgatgctggctgaagctgcctgtgcacgtttcttctctggtcgcctcatttcctgctacactgaaggggtcagctgctccagtgggccaagttgggcaggacccccgcccctgcagggcccatgcaccagagccactgagcccagtcccataaacctggccctctttggggaaagatccccacagagcatcctcctctcatctgtgacaactccacgagcccttaatttcttagtcctcaccagaagaacaggtctcacaagtatatatttgatgtctgtaataaaagtgggaaggtgggtcttaaaacagaccaaaccccgccccgcccccaacaactctgcttttagggaggcctccgaaatgcagataggcggttgagtggggtcctgggaagagcgctgaatccctctgcttgctgcctggtgtgggcctttggaaagcatcttgccttgggacaggatttctaaaattctgtgattcagatttgtcagggaagcacagtgaagcttgcttaaaggcactggccagcagtgtgtgactttggcttttgggatcacaccctgtaatcgggcccgtggaagcagcgtcaaagaggggtcttggagctcctatggagcagactgccccccgagcagtgtccccagcctagccctgtgagaccccatggggacacgggtgcctatgtattttcactaaaatatacatggtagctccatttactgatgcggttgtaatgagctcacatcgtgtctgaagagatggcaccagggaaaggtgtgccataagctgctccagagcttttggtatgctgagtgttgacagagctgcactcttaacatcaagagaactgtcaggagcccagaaccaaccccaggtcttggtctccattggcgagaacacaggacgtggtggttcctgagcagagagggatctgcagatacaggcttggcgctcggggtggtctcgtggccaactcttcatgcccctgccgttgtagtggaacctctacatgttttagtttgcttcacctaaaataatgctgatctagagatagagaaataggggtggttatttttccagattggagagttgaaagtccctgactgatttcagccattttcctagtgcttgtcggatgcagagacaatgttgaaatcccctaaacacagttctcagtggcaaaacctaggaaggctcatgttcccagagaagggaccacatgagccttctcccatgcaaagcttcccccagcttaaatagttgataaggactaattgtttaatgagtttatttatctacagtaggttagggatcctgggttctgtttatatgaagttcttcccagtttgtgaattctagtacagcagccatgcagccaccttatttcatagatgccatctgtgtgtcctcttgactaccttctatttagaggaagaatgagagctttgtgtgtttaactgagcttatagtaggacttctttgcatatgtatggtactgaaaaatcttaatatacatctttaatcctttttaggttgtcctttaaagagtttttgactagtttctttttcttgacagctcttctctttggacacatgggccttcttagagggttcagtctaggacccggctctcctggccctgtgttgagggtagctggtccctctgtccctgtgtctgctagcactagactttgttgctgcagattgatccagtgggtacataggctaattaatgtgagtctttttccttgtttaaaggagtccctcttgctgaaagtagatgattactattgctgtagtgttaggaaagtattaagtttgtgctgaaaatccattgccatttggtacaaatgacatttgttctttctgtgaaagagatgccctcgagtgtgtttgtacacaaacccttaggatggtgagttgaagcatcaccctcgcgctatcttcagtgacgggtgacggctcagggagatggcaggcagattgggctctaagtcattattctctcagttactccattggtgaaatggccctttccctctttgcagttcagtctaagtctcgtatttgctttgctgtctgtgtgctgaagctcgtcccgtgtgagttgctgtctgccccttgtcaggctgtgaggtgctcgtgtagacctggagcatgcaggctgcctccgtttttgggtactgtgttgtgttttgctctgtctaaaaacatctgcatagttttcaactggaaaaagaaaaaacttaaaaatgggatgtcctaaaatgaaagctgctcaaagtcacagaacaaccgagggacaaaggagattggatgactgggaagcgctggcccggaacagcccctgcaactgtggggcctgcacacagcccttccacagttggcactgcaggtgcaggccaaccctttaaagaataaacaaggaagtcagctctttcactttttacaagttggcaaaaacagacttccggggaattttgatgttttcccgtgttgtagagcttccagggtttaataaaactggttaaaaattgagtctttccctgaagtaagtgctctttccagatgaaaactactcttttggttttgtttgaaagtaagaaagggaggggaaactttgctcttttaataattatgttcagcctatgatgaagtatttgattattagacagcaatgtcactaataagttttaagttgtccaaagttaattgtaaacatcatcagtacagtactcttagttacagtaaagcaattgttgcaagatgaatggctaatattttggtgcagtgtttgatgttcaaaacaaaatgttacaacaataaacgaacataacataaactgaaaaaaaaaaac

SEQ ID NO: 1855 - DNA, 6014 bp, Homo sapiens
gcagtccagccgccgcctgccctcagccgcccgctggccgggagcggagcccctgtggtctcaaaccatgaattatgtgggacagctggctgggcaggtgattgtcactgtgaaggaactctacaagggcattaaccaggccaccctctctgggtgcattgatgtcatcgtggtacagcagcaggatggcagctatcagtgttcaccttttcacgttcggtttggaaagctgggagtcctgagatccaaagagaaagtgattgatatagaaatcaacggcagtgcagtggatcttcacatgaagttgggtgataacggagaagctttctttgttgaggagactgaagaagaatatgaaaagcttcctgcttaccttgccacctcaccaattcctactgaagatcagttctttaaagatattgacacccctttggtgaaatcgggtggagatgaaacaccatctcagagttcagacatctcacacgtcttggaaacagagacaatttttactccaagttctgtgaaaaagaaaaaacgaaggagaaagaaatacaaacaggacagtaagaaggaagagcaggccgcatctgctgctgcagaagacacatgtgatgtaggcgtgagctccgatgatgacaagggggcccaggcagcacgaggatcttcaaatgcttccttgaaagaagaagaatgtaaagagcctttgctcttccattctggggatcattaccccttatctgatggagattggtcccctttagagaccacctatccccagacagcgtgtcctaagagtgattcagagctggaggtgaaacctgcggagagcctgctcagatcagagtctcacatggagtggacgtggggcggattcccagagtccaccaaggtcagcaaaagagaacgatctgaccatcatcctaggacagctacaattacaccatcagaaaatactcattttcgggtaattcccagtgaggacaacctcatcagtgaagttgagaaggatgcttccatggaagacactgtctgtaccatagtgaagcccaaacccagagccctgggtacacagatgagcgacccaacatctgtggcagagcttctcgaacctcctcttgagagtactcagatttcatctatgttagatgctgaccaccttcccaacgcagccttagcggaggcgccctcagaatccaaaccggcagctaaagtagactcgccgtcaaagaagaaaggtgttcacaaaagaagccaacaccagggacctgatgatatttaccttgatgacttaaagggtctagaacctgaagttgcagctctttatttccctaaaagtgaatcggagcccggttccaggcagtggcccgagtctgacacactctctggctcccagtccccacagtccgtgggaagcgcagctgcagatagcggcaccgagtgcctctcagattctgccatggacttgcctgacgttaccctctccctttgcgggggcctcagtgaaaatggagaaatttcaaaagaaaaattcatggagcatatcattacttatcacgaatttgcagaaaaccctggacttatagacaatcctaaccttgtaataaggatatataatcgttactataactgggctttggcagctcccatgatccttagcttgcaagtattccagaagagcttgcctaaggccacagttgagtcctgggtgaaagacaagatgccaaagaaatctggtcgctggtggttttggcgaaagagagaaagcatgaccaaacagctgccagaatccaaggagggaaaatctgaggcaccgccagccagtgacctgccatccagctccaaggagccggccggtgccaggccggccgagaatgactcctcgagtgacgagggatcacaggagctcgaagaatccatcacagtggaccccatccccacagagcccctgagccacggcagcacaacttcatataagaagtctctccgcctctcctcagaccagatcgcaaaactgaagctccacgatggcccaaatgatgttgtgtttagtattacaacccagtatcaaggcacctgtcgctgtgcagggaccatttacctgtggaactggaatgacaagatcatcatttctgatattgatgggacaataaccaagtcggatgctttgggacagattctcccacagctgggcaaagactggacccaccagggtatagcaaagctctaccattccatcaatgagaatggctacaagtttctgtactgctcggctcgtgccatcggcatggccgacatgacccgtggctacctgcactgggtcaatgacaagggcacaatcttgccccggggccccctgatgctgtcccccagcagcttgttctccgccttccacagagaagtgatagaaaagaaaccagagaagttcaaaattgagtgtctaaatgatatcaagaatctgtttgccccgtctaagcagcccttctatgctgcctttggaaaccgtccaaatgatgtctatgcctacacacaagttggagttccagactgtagaatattcaccgtgaaccccaagggtgaattaatacaagaaagaaccaaaggaaacaagtcatcgtatcacaggctgagtgagctcgtggagcatgtgttcccccttctcagtaaggagcagaattccgcttttccctgcccggagttcagctccttctgctactggcgagacccgatccctgaagtggacctggatgacctgtcttgaggcggcacctcagtgggtgggcagggcttggtccccctccccacagcaagggaaggcagctggctcttctgctgacctcagataccagccttccccagcggggacgggtgcttctggagctggtcccgccatcctcctttgccttcccaggccagctgctcaggctcggcaggtctgcagctcagctcctggaaggagaagggaggaactgggcctggggctggaggcctgggatccctcctttgtgggtcgcacacatgtttcctgctgtgagctggggcctccttccattgcatcattttaaaggaagaaaaaagcagctaaaaaagagtggaccaaaacactgcacacagtgaagtgttccagtttccactgggcagttgaggtggcttctgtaaccagggctgtcttcagatgtcagggtccctgaactgctgcgggcccagtcagtgatgctggctgaagctgcctgtgcacgtttcttctctggtcgcctcatttcctgctacactgaaggggtcagctgctccagtgggccaagttgggcaggacccccgcccctgcagggcccatgcaccagagccactgagcccagtcccataaacctggccctctttggggaaagatccccacagagcatcctcctctcatctgtgacaactccacgagcccttaatttcttagtcctcaccagaagaacaggtctcacaagtatatatttgatgtctgtaataaaagtgggaaggtgggtcttaaaacagaccaaaccccgccccgcccccaacaactctgcttttagggaggcctccgaaatgcagataggcggttgagtggggtcctgggaagagcgctgaatccctctgcttgctgcctggtgtgggcctttggaaagcatcttgccttgggacaggatttctaaaattctgtgattcagatttgtcagggaagcacagtgaagcttgcttaaaggcactggccagcagtgtgtgactttggcttttgggatcacaccctgtaatcgggcccgtggaagcagcgtcaaagaggggtcttggagctcctatggagcagactgccccccgagcagtgtccccagcctagccctgtgagaccccatggggacacgggtgcctatgtattttcactaaaatatacatggtagctccatttactgatgcggttgtaatgagctcacatcgtgtctgaagagatggcaccagggaaaggtgtgccataagctgctccagagcttttggtatgctgagtgttgacagagctgcactcttaacatcaagagaactgtcaggagcccagaaccaaccccaggtcttggtctccattggcgagaacacaggacgtggtggttcctgagcagagagggatctgcagatacaggcttggcgctcggggtggtctcgtggccaactcttcatgcccctgccgttgtagtggaacctctacatgttttagtttgcttcacctaaaataatgctgatctagagatagagaaataggggtggttatttttccagattggagagttgaaagtccctgactgatttcagccattttcctagtgcttgtcggatgcagagacaatgttgaaatcccctaaacacagttctcagtggcaaaacctaggaaggctcatgttcccagagaagggaccacatgagccttctcccatgcaaagcttcccccagcttaaatagttgataaggactaattgtttaatgagtttatttatctacagtaggttagggatcctgggttctgtttatatgaagttcttcccagtttgtgaattctagtacagcagccatgcagccaccttatttcatagatgccatctgtgtgtcctcttgactaccttctatttagaggaagaatgagagctttgtgtgtttaactgagcttatagtaggacttctttgcatatgtatggtactgaaaaatcttaatatacatctttaatcctttttaggttgtcctttaaagagtttttgactagtttctttttcttgacagctcttctctttggacacatgggccttcttagagggttcagtctaggacccggctctcctggccctgtgttgagggtagctggtccctctgtccctgtgtctgctagcactagactttgttgctgcagattgatccagtgggtacataggctaattaatgtgagtctttttccttgtttaaaggagtccctcttgctgaaagtagatgattactattgctgtagtgttaggaaagtattaagtttgtgcatgccctcgagtgtgtttgtacacaaacccttaggatggtgagttgaagcatcaccctcgcgctatcttcagtgacgggtgacggctcagggagatggcaggcagattgggctctaagtcattattctctcagttactccattggtgaaatggccctttccctctttgcagttcagtctaagtctcgtatttgctttgctgtctgtgtgctgaagctcgtcccgtgtgagttgctgtctgccccttgtcaggctgtgaggtgctcgtgtagacctggagcatgcaggctgcctccgtttttgggtactgtgttgtgttttgctctgtctaaaaacatctgcatagttttcaactggaaaaagaaaaaacttaaaaatgggatgtcctaaaatgaaagctgctcaaagtcacagaacaaccgagggacaaaggagattggatgactgggaagcgctggcccggaacagcccctgcaactgtggggcctgcacacagcccttccacagttggcactgcaggtgcaggccaaccctttaaagaataaacaaggaagtcagctctttcactttttacaagttggcaaaaacagacttccggggaattttgatgttttcccgtgttgtagagcttccagggtttaataaaactggttaaaaattgagtctttccctgaagtaagtgctctttccagatgaaaactactcttttggttttgtttgaaagtaagaaagggaggggaaactttgctcttttaataattatgttcagcctatgatgaagtatttgattattagacagcaatgtcactaataagttttaagttgtccaaagttaattgtaaacatcatcagtacagtactcttagttacagtaaagcaattgttgcaagatgaatggctaatattttggtgcagtgtttgatgttcaaaacaaaatgttacaacaataaacgaacataacataaactgaaaaaaaaaaac

SEQ ID NO: 1856 - DNA, 1875 bp, Homo sapiens
ggtgactagagttcccgactagtccaacatatagtccctacatacactaaaataatgctgatctagagatagagaaataggggtggttatttttccagattggagagttgaaagtccctgactgatttcagccattttcctagtgcttgtcggatgcagagacaatgttgaaatcccctaaacacagttctcagtggcaaaacctaggaaggctcatgttcccagagaagggaccacatgagccttctcccatgcaaagcttcccccagcttaaatagttgataaggactaattgtttaatgagtttatttatctacagtaggttagggatcctgggttctgtttatatgaagttcttcccagtttgtgaattctagtacagcagccatgcagccaccttatttcatagatgccatctgtgtgtcctcttgactaccttctatttagaggaagaatgagagctttgtgtgtttaactgagcttatagtaggacttctttgcatatgtatggtactgaaaaatcttaatatacatctttaatcctttttaggttgtcctttaaagagtttttgactagtttctttttcttgacagctcttctctttggacacatgggccttcttagagggttcagtctaggacccggctctcctggccctgtgttgagggtagctggtccctctgtccctgtgtctgctagcactagactttgttgctgcagattgatccagtgggtacataggctaattaatgtgagtctttttccttgtttaaaggagtccctcttgctgaaagtagatgattactattgctgtagtgttaggaaagtattaagtttgtgctgaaaatccattgccatttggtacaaatgacatttgttctttctgtgaaagagatgccctcgagtgtgtttgtacacaaacccttaggatggtgagttgaagcatcaccctcgcgctatcttcagtgacgggtgacggctcagggagatggcaggcagattgggctctaagtcattattctctcagttactccattggtgaaatggccctttccctctttgcagttcagtctaagtctcgtatttgctttgctgtctgtgtgctgaagctcgtcccgtgtgagttgctgtctgccccttgtcaggctgtgaggtgctcgtgtagacctggagcatgcaggctgcctccgtttttgggtactgtgttgtgttttgctctgtctaaaaacatctgcatagttttcaactggaaaaagaaaaaacttaaaaatgggatgtcctaaaatgaaagctgctcaaagtcacagaacaaccgagggacaaaggagattggatgactgggaagcgctggcccggaacagcccctgcaactgtggggcctgcacacagcccttccacagttggcactgcaggtgcaggccaaccctttaaagaataaacaaggaagtcagctctttcactttttacaagttggcaaaaacagacttccggggaattttgatgttttcccgtgttgtagagcttccagggtttaataaaactggttaaaaattgagtctttccctgaagtaagtgctctttccagatgaaaactactcttttggttttgtttgaaagtaagaaagggaggggaaactttgctcttttaataattatgttcagcctatgatgaagtatttgattattagacagcaatgtcactaataagttttaagttgtccaaagttaattgtaaacatcatcagtacagtactcttagttacagtaaagcaattgttgcaagatgaatggctaatattttggtgcagtgtttgatgttcaaaacaaaatgttacaacaataaacgaacataacataaactgaaaaaaaaaaac

SEQ ID NO: 1857 - DNA, 3958 bp, Homo sapiens
gcagtccagccgccgcctgccctcagccgcccgctggccgggagcggagcccctgtggtctcaaaccatgaattatgtgggacagctggctgggcaggtgattgtcactgtgaaggaactctacaagggcattaaccaggccaccctctctgggtgcattgatgtcatcgtggtacagcagcaggatggcagctatcagtgttcaccttttcacgttcggtttggaaagctgggagtcctgagatccaaagagaaagtgattgatatagaaatcaacggcagtgcagtggatcttcacatgaagttgggtgataacggagaagctttctttgttgaggagactgaagaagaatatgaaaagcttcctgcttaccttgccacctcaccaattcctactgaagatcagttctttaaagatattgacacccctttggtgaaatcgggtggagatgaaacaccatctcagagttcagacatctcacacgtcttggaaacagagacaatttttactccaagttctgtgaaaaagaaaaaacgaaggagaaagaaatacaaacaggacagtaagaaggaagagcaggccgcatctgctgctgcagaagacacatgtgatgtaggcgtgagctccgatgatgacaagggggcccaggcagcacgaggatcttcaaatgcttccttgaaagaagaagaatgtaaagagcctttgctcttccattctggggatcattaccccttatctgatggagattggtcccctttagagaccacctatccccagacagcgtgtcctaagagtgattcagagctggaggtgaaacctgcggagagcctgctcagatcagagtctcacatggagtggacgtggggcggattcccagagtccaccaaggtcagcaaaagagaacgatctgaccatcatcctaggacagctacaattacaccatcagaaaatactcattttcgggtaattcccagtgaggacaacctcatcagtgaagttgagaaggatgcttccatggaagacactgtctgtaccatagtgaagcccaaacccagagccctgggtacacagatgagcgacccaacatctgtggcagagcttctcgaacctcctcttgagagtactcagatttcatctatgttagatgctgaccaccttcccaacgcagccttagcggaggcgccctcagaatccaaaccggcagctaaagtagactcgccgtcaaagaagaaaggtgttcacaaaagaagccaacaccagggacctgatgatatttaccttgatgacttaaagggtctagaacctgaagttgcagctctttatttccctaaaagtgaatcggagcccggttccaggcagtggcccgagtctgacacactctctggctcccagtccccacagtccgtgggaagcgcagctgcagatagcggcaccgagtgcctctcagattctgccatggacttgcctgacgttaccctctccctttgcgggggcctcagtgaaaatggagaaatttcaaaagaaaaattcatggagcatatcattacttatcacgaatttgcagaaaaccctggacttatagacaatcctaaccttgtaataaggatatataatcgttactataactgggctttggcagctcccatgatccttagcttgcaagtattccagaagagcttgcctaaggccacagttgagtcctgggtgaaagacaagatgccaaagaaatctggtcgctggtggttttggcgaaagagagaaagcatgaccaaacagctgccagaatccaaggagggaaaatctgaggcaccgccagccagtgacctgccatccagctccaaggagccggccggtgccaggccggccgagaatgactcctcgagtgacgagggatcacaggagctcgaagaatccatcacagtggaccccatccccacagagcccctgagccacggcagcacaacttcatataagaagtctctccgcctctcctcagaccagatcgcaaaactgaagctccacgatggcccaaatgatgttgtgtttagtattacaacccagtatcaaggcacctgtcgctgtgcagggaccatttacctgtggaactggaatgacaagatcatcatttctgatattgatgggacaataaccaagtcggatgctttgggacagattctcccacagctgggcaaagactggacccaccagggtatagcaaagctctaccattccatcaatgagaatggctacaagtttctgtactgctcggctcgtgccatcggcatggccgacatgacccgtggctacctgcactgggtcaatgacaagggcacaatcttgccccggggccccctgatgctgtcccccagcagcttgttctccgccttccacagagaagtgatagaaaagaaaccagagaagttcaaaattgagtgtctaaatgatatcaagaatctgtttgccccgtctaagcagcccttctatgctgcctttggaaaccgtccaaatgatgtctatgcctacacacaagttggagttccagactgtagaatattcaccgtgaaccccaagggtgaattaatacaagaaagaaccaaaggaaacaagtcatcgtatcacaggctgagtgagctcgtggagcatgtgttcccccttctcagtaaggagcagaattccgcttttccctgcccggagttcagctccttctgctactggcgagacccgatccctgaagtggacctggatgacctgtcttgaggcggcacctcagtgggtgggcagggcttggtccccctccccacagcaagggaaggcagctggctcttctgctgacctcagataccagccttccccagcggggacgggtgcttctggagctggtcccgccatcctcctttgccttcccaggccagctgctcaggctcggcaggtctgcagctcagctcctggaaggagaagggaggaactgggcctggggctggaggcctgggatccctcctttgtgggtcgcacacatgtttcctgctgtgagctggggcctccttccattgcatcattttaaaggaagaaaaaagcagctaaaaaagagtggaccaaaacactgcacacagtgaagtgttccagtttccactgggcagttgaggtggcttctgtaaccagggctgtcttcagatgtcagggtccctgaactgctgcgggcccagtcagtgatgctggctgaagctgcctgtgcacgtttcttctctggtcgcctcatttcctgctacactgaaggggtcagctgctccagtgggccaagttgggcaggacccccgcccctgcagggcccatgcaccagagccactgagcccagtcccataaacctggccctctttggggaaagatccccacagagcatcctcctctcatctgtgacaactccacgagcccttaatttcttagtcctcaccagaagaacaggtctcacaagtatatatttgatgtctgtaataaaagtgggaaggtgggtcttaaaacagaccaaaccccgccccgcccccaacaactctgcttttagggaggcctccgaaatgcagataggcggttgagtggggtcctgggaagagcgctgaatccctctgcttgctgcctggtgtgggcctttggaaagcatcttgccttgggacaggatttctaaaattctgtgattcagatttgtcagggaagcacagtgaagcttgcttaaaggcactggccagcagtgtgtgactttggcttttgggatcacaccctgtaatcgggcccgtggaagcagcgtcaaagaggggtcttggagctcctatggagcagactgccccccgagcagtgtccccagcctagccctgtgagaccatgggaccggtgctatgttttccttaatttctggagtccttatgttgggtgtatggtcctcgttgaagatggccgggaggtgccaag

SEQ ID NO: 1858 - DNA, 2716 bp, Homo sapiens
gcagtccagccgccgcctgccctcagccgcccgctggccgggagcggagcccctgtggtctcaaaccatgaattatgtgggacagctggctgggcaggtgattgtcactgtgaaggaactctacaagggcattaaccaggccaccctctctgggtgcattgatgtcatcgtggtacagcagcaggatggcagctatcagtgttcaccttttcacgttcggtttggaaagctgggagtcctgagatccaaagagaaagtgattgatatagaaatcaacggcagtgcagtggatcttcacatgaagttgggtgataacggagaagctttctttgttgaggagactgaagaagaatatgaaaagcttcctgcttaccttgccacctcaccaattcctactgaagatcagttctttaaagatattgacacccctttggtgaaatcgggtggagatgaaacaccatctcagagttcagacatctcacacgtcttggaaacagagacaatttttactccaagttctgtgaaaaagaaaaaacgaaggagaaagaaatacaaacaggacagtaagaaggaagagcaggccgcatctgctgctgcagaagacacatgtgatgtaggcgtgagctccgatgatgacaagggggcccaggcagcacgaggatcttcaaatgcttccttgaaagaagaagaatgtaaagagcctttgctcttccattctggggatcattaccccttatctgatggagattggtcccctttagagaccacctatccccagacagcgtgtcctaagagtgattcagagctggaggtgaaacctgcggagagcctgctcagatcagagtctcacatggagtggacgtggggcggattcccagagtccaccaaggtcagcaaaagagaacgatctgaccatcatcctaggacagctacaattacaccatcagaaaatactcattttcgggtaattcccagtgaggacaacctcatcagtgaagttgagaaggatgcttccatggaagacactgtctgtaccatagtgaagcccaaacccagagccctgggtacacagatgagcgacccaacatctgtggcagagcttctcgaacctcctcttgagagtactcagatttcatctatgttagatgctgaccaccttcccaacgcagccttagcggaggcgccctcagaatccaaaccggcagctaaagtagactcgccgtcaaagaagaaaggtgttcacaaaagaagccaacaccagggacctgatgatatttaccttgatgacttaaagggtctagaacctgaagttgcagctctttatttccctaaaagtgaatcggagcccggttccaggcagtggcccgagtctgacacactctctggctcccagtccccacagtccgtgggaagcgcagctgcagatagcggcaccgagtgcctctcagattctgccatggacttgcctgacgttaccctctccctttgcgggggcctcagtgaaaatggagaaatttcaaaagaaaaattcatggagcatatcattacttatcacgaatttgcagaaaaccctggacttatagacaatcctaaccttgtaataaggatatataatcgttactataactgggctttggcagctcccatgatccttagcttgcaagtattccagaagagcttgcctaaggccacagttgagtcctgggtgaaagacaagatgccaaagaaatctggtcgctggtggttttggcgaaagagagaaagcatgaccaaacagctgccagaatccaaggagggaaaatctgaggcaccgccagccagtgacctgccatccagctccaaggagccggccggtgccaggccggccgagaatgactcctcgagtgacgagggatcacaggagctcgaagaatccatcacagtggaccccatccccacagagcccctgagccacggcagcacaacttcatataagaagtctctccgcctctcctcagaccagatcgcaaaactgaagctccacgatggcccaaatgatgttgtgtttagtattacaacccagtatcaaggcacctgtcgctgtgcagggaccatttacctgtggaactggaatgacaagatcatcatttctgatattgatgggacaataaccaagtcggatgctttgggacagattctcccacagctgggcaaagactggacccaccagggtatagcaaagctctaccattccatcaatgagaatggctacaagtttctgtactgctcggctcgtgccatcggcatggccgacatgacccgtggctacctgcactgggtcaatgacaagggcacaatcttgccccggggccccctgatgctgtcccccagcagcttgttctccgccttccacaggtacctctccggcaggcagccctctgcccaccgccccagcatgtgggcggggctgggcccaaggtggggggatgtgtgggaacagaagtcagatgttggagccgccacgcctctcccagttctttggtccctggtggtgtcctaccacatactgctcacttgccatgtggcgggcctggtgaagaaaggcaggttctaggaaccgtcaagttttctccttccctaaacttcatcactcaaattttcttagttatcagactggcaaagaaggagaaggaaagattccagttacaaagggttgaagaaattgggtggttgtgag

SEQ ID NO: 1859 - DNA, 1282 bp, Homo sapiens
  misc_feature (1236)..(1236): n is a, c, g, or t
  misc_feature (1261)..(1261): n is a, c, g, or t
  misc_feature (1280)..(1280): n is a, c, g, or t
gcagtccagccgccgcctgccctcagccgcccgctggccgggagcggagcccctgtggtctcaaaccatgaattatgtgggacagctggctgggcaggtgattgtcactgtgaaggaactctacaagggcattaaccaggccaccctctctgggtgcattgatgtcatcgtggtacagcagcaggatggcagctatcagtgttcaccttttcacgttcggtttggaaagctgggagtcctgagatccaaagagaaagtgattgatatagaaatcaacggcagtgcagtggatcttcacatgaagttgggtgataacggagaagctttctttgttgaggagactgaagaagaatatgaaaagcttcctgcttaccttgccacctcaccaattcctactgaagatcagttctttaaagatattgacacccctttggtgaaatcgggtggagatgaaacaccatctcagagttcagacatctcacacgtcttggaaacagagacaatttttactccaagttctgtgaaaaagaaaaaacgaaggagaaagaaatacaaacaggacagtaagaaggaagagcaggccgcatctgctgctgcagaagacacatgtgatgtaggcgtgagctccgatgatgacaagggggcccaggcagcacgaggatcttcaaatgcttccttgaaagaagaagaatgtaaagagcctttgctcttccattctggggatcattaccccttatctgatggagattggtcccctttagagaccacctatccccagacagcgtgtcctaagagtgattcagagctggaggtgaaacctgcggagagcctgctcagatcagagtctcacatggagtggacgtggggcggattcccagagtccaccaaggtcagcaaaagagaacgatctgaccatcatcctaggacagctacaattacaccatcagaaaatactcattttcgggtaattcccagtgaggacaacctcatcagtgaagttgagaaggatgcttccatggaagacactgtctgtaccatagtgaagcccaaacccagagccctgggtacacagatgagcgacccaacatctgtggcagagcttctcgaacctcctcttgagagtactcagatttcatctatgttagatgctgaccaccttcccaacgcagccttagcggaggcgccctcagaatccaaaccggcagctaaagtagactcgccgtcaaagaagaaagngtcacaaagaaccacacaggactgngaattacctgtgctaaggnta

SEQ ID NO: 1860 - DNA, 844 bp, Homo sapiens
actgtgtctgcaagcagtttgtactcagtttgtcaagagagcagctttctgttttgattatataccttcatctctgaaaaaagacatgctagttaaatttcaagatgttttacttagaagatgacaaggaagatgaggtggtttgtaaaggctcattaagtaaaactcaagatgtttaccatgacaagtcccctcctggtatcttgtctcaaaccatgaattatgtgggacagctggctgggcaggtgattgtcactgtgaaggaactctacaagggcattaaccaggccaccctctctgggtgcattgatgtcatcgtggtacagcagcaggatggcagctatcagtgttcaccttttcacgttcggtttggaaagctgggagtcctgagatccaaagagaaagtggtgagtgtcctcaaggagaggaaaagtcatccctgagattcaaagagaaagtgagtgagtgtcctcaaggagtagaaaagtcatccctctatgaataaatcgctattgtgagttttctaggcctttttttttttttaacctgaatgatgttgagacaatgttacgagaagtcaacctttatgtattgcttttgaagttactttgaaaaccacaaagctcgactgcagaagtctcttcaagggaaagggaaactgaaaattattataataatcttacatgttgcaactcagaaaagcaaaacagaaactagatgggggaacttagacatatttagaaaaagaaaaatttcctttaccttatatagtatttttaaatacttaggctaataccttcatactaattgtaaatggaataggtgggtataatcaagaacacac

SEQ ID NO: 1861 - DNA, 814 bp, Homo sapiens
actgtgtctgcaagcagtttgtactcagtttgtcaagagagcagctttctgttttgattatataccttcatctctgaaaaaagacatgctagttaaatttcaagatgttttacttagaagatgacaaggaagatgaggtggtttgtaaaggctcattaagtaaaactcaagatgtttaccatgacaagtcccctcctggtatcttggtctcactgccacccagtctggagtgcagtgtaggaggcaacctctgcctcccaggctcaagcagtcctttcgcctcagccttctaaggagctaggacctcaggtacgtgccaccacacctggctaatttttgtatttttttgtggagactgtgtttctccatgttgcccaggctggtcttgaactcctgggctcaagtgatctgcccaccttggcctcccaaagtgctgggaatacagacatgagccaccacacccagccccagctgtttgtgattaattagtcttggggaacgatgacttttggatgtatatctgtggatccaaaggctcttacggcttagttaagtactctttgttaatgaacagtctgttccatggtgaagtatcattttccataactgggttaatcatcatttcttcttatactaaaaagaatttttatgtcactcctagctagctctcattagtaaagtaagtcccctgttttgcgtgggaagtggtacagtttcatggccagtatgcttataaacatttgtcagagaaattgagcacacctcaggaaatgtttagtgggttgaatgcccagggaagctgttaaacatttta

SEQ ID NO: 1862 - DNA, 943 bp, Homo sapiens
agggtgtgttttctttcaggaatggctacaagtttctgtactgctcggctcgtgccatcggcatggccgacatgacccgtggctacctgcactgggtcaatgacaagggcacaatcttgccccggggccccctgatgctgtcccccagcagcttgttctccgccttccacaggtacctctccggcaggcagccctctgcccaccgccccagcatgtgggcggggctgggcccaaggtggggggatgtgtgggaacagaagtcagatgttggagccgccacgcctctcccagttctttggtccctggtggtgtcctaccacatactgctcacttgccatgtggcgggcctggtgaagaaaggcaggttctaggaaccgtcaagttttctccttccctaaacttcatcactcaaattttcttagttatcagactggcaaagaaggagaaggaaagattccagttacaaagggttgaagaaattgggtggttgtgagcactaaaattttaggaccactcactggggaaaacgaccattttgagattggtgattgtatttgtatttttttcttagagaagtgatagaaaagaaaccagagaagttcaaaattgagtgtctaaatgatatcaagaatctgtttgccccgtctaagcagcccttctatgctgcctttggaaaccgtccaaatgtgagtatctcctgggctctgggttctgatgtgggtgaaattcagagggatgtacttcgtggggtgtagccacgtcccaattctcaaagcagttttgtaagcaaaatgaggcatctgttctgcttgttcggttttcacttgatctattccaaatatctatagcaactggggaggtcctgcaggtgcagatctgccccagaatttatacgaaggacgcttttccatcgtttctgtggctgccattccatttcctcagg

SEQ ID NO: 1863 - DNA, 208 bp, Homo sapiens
attcagctgatcatctttattgaaaagaataagcaattttatatgtcacttccctcctccctccctccctgattccctcccctctctcttgctcactttcactgtgtaatggttttgcacaatttttgtttctcacagttactataactgggctttggcagctcccatgatccttagcttgcaagtattccagaagagcttgcctaag

SEQ ID NO: 1864 - DNA, 371 bp, Homo sapiens
tttgggggatattttaaagctgacaagaatgtcatcgttcctgcctttctttggtttctccttcacagaggatcttcaaatgcttccttgaaagaagaagaatgtaaagagcctttgctcttccattctggggatcattaccccttatctgatggagattggtcccctttagagacgtaagtatctttgaaatttcttggtttcttgaaagaggaaggagatgtattaattagcttttctgttaatctgtagtaatgatatttcccatttctctcacacagccaaggaactgaatgtttacttgtaacataaatatgaatcttttctctcaataattattttgtttctaaatttgatctgacttactctaa

SEQ ID NO: 1865 - DNA, 453 bp, Homo sapiens
cccctgtgcttgctcactggcttccccactccttggggcctcagctgggaaccctgccctgacacccccaggcaagctgtccctgccctgcaggtaaccacactgtccaataagagcctattgattcctctgtttcccgaggcatgtgaactccgcaacccccactatggctgatttggtcatctttgtgcctcctgcatctggcagtgggcctggtaggtcagagctccacacatatttgttgtctgaaggaggagaagccccccactgccccaccacacgcacgcgcacacacacccacacacacacaccctgccgctgtaaacatgcaatcgaaacacgggacacaggccaggcgcagtggctcacacctgtaatcccagcacattgggaaatagcttgagcccaggagttagagaccagcctgagcgagatagcgagaccctgtattta

SEQ ID NO: 1866 - DNA, 514 bp, Homo sapiens
ggccgagaaggcgacgcccctggcgcccaaaggggccgctccgggagctgtccagcctgtggctggtgctgaagcggcccccgccgcgaccctggccgctttgggcggcaggaggcccggaccgcccgaggagccgcctcgggagctagagtccgtgccctcgaaactcggggaaccccctccgctcggagaagggggaggagggggcggggaaggaggaggagccggcggcggctccggggaaagggaggggggcgctccgcagccgccgccgcccaggggctggcgagggaaaggcgtacgcgctcagcagaggggcggcagcggcggggagggggcctccccttctccatcctcctcttctgcgggcaaaaccccaggaaccggcagcagaaactccggaagcggcgttgcggggggcggcagcggtggtggagggagctactggaaagaaggatgtctgcagtctgagctcatccagttccatctcaagaaggagcgggcggcagcggcg

SEQ ID NO: 1867 - DNA, 955 bp, Homo sapiens
ctgcaacctctgcctcctgggttcaagcgattctccatctcagcctcctgagtagctggaactacaggtgtgtgccacaaggcctggctaatttttgtattttttgtggagacagggtttcatcatgttcaccaggctggtctcgaactcctgaactcaagccatccaccctcctcagcttctcaaagtgctgggattacaggcatgagctatcatgcctgacctctttgcacattctcttgatctgttatgctgtttgttgccatctactgttgtcaaattctacctacccttcagggtccaactgaaatgccacattaccaggaaaggtttttctcattgtccctgccatacttcatttctcttctgcccttctgtagctcaggaccctctttaggtgtcactcccattagattgtaagtttcctaacaagacgcacgtcatcgtctccaaatcctttgggtcagcacagcctcttttatattaccagtctaagcccctttgtgtgacatttaaagtccgcctggactgactgttcagcctcatcctctgcccttcccttgtgtcctgggctctggccaaatcaaaccaccgttccccaaatgtactatgtagttaacttttaatattgcttctttttattgccttggttctctcaaaaatcagaattaatggaatgttggctattacaattacgtggacatggttatataatggccttggcgatgcccttaataaatgaaatctaaaatgttacattttttttggaacccagaaactcattctaattttattctgcctgaggctttatagcattttctgaagatcatgttgtactcttctttcgtctagatgatttggtcaacagtgataaagttccaacttagacttgataaatatgcaagagtcatgaaatatgaatgaaaacagtgacttttgaaaatcacgcttacct

SEQ ID NO: 1868 - DNA, 491 bp, Homo sapiens
gccaagttacagagcagactttctgggctagtcctgcttccccactttggctgttctcagggatatttctcccttctggcactcccaatgcttcccatggtttgagatgacagatgagtcttttgcctgtgaatagccactgcactccagccttatggtaaaatgtgcataacatttaatctttttttttttttgtctcactctgtcacccaggctgcagtgcactggcatgatctcggctcactgcaaccttagcctcccgggttcaagtgattctcctgcctcagtctcccaagtagctggattacaggcatgtgccaccatgcctggctaatttttgtatttttagtagagacagggttttgccatgttggccaggctggtctcgaactcctgacctcaagtgatctacctgcctcagcctcccaaagtgctggaattaccatgagctacctccagccttggggggcacaggaagcccttgtctcagg

SEQ ID NO: 1869 - DNA, 461 bp, Homo sapiens
ctgtgttctgattgtaggattgagcaaatgtgtaaatatattgaagatgtcaggagtcaggttgctcactgtcagaaagaagacacaatataggaagaaagaaaactggcaggaaccctgtggtattgaattgaaataatggaacttgagttattagtatgaactcatggtttttaataaatacatagaaatagatgtaaatatatttgtgtatctgtacacttcagggcctagaacttcttttctggctaaaaagtaagaaagtgcttaaaaacagaataaggatgtaaacaaacctaacaaaaaaacacacaggcaggcctgttttgtgaggctacaacaactcaaacctgggacaattttagcattaaaataaatatgatagttcttgcagtgaaaaaaaagtcgacgcggccgcgaatttagtagtagtagtcgaaccgggaattcccgaccggtac

SEQ ID NO: 1870 - DNA, 503 bp, Homo sapiens
gtggaatgtgtccatcagttcccaactctcagttcaaccacttcacctgggcagctccaatgtggcaggagtattttcaccaaagaaattaaatgctacaaatcctaccaccacaccactggtttgggctcatagaaagtttgttaagagtctgtgacatgaggtggcctctaatacagtgagttcaatatttgaacttctgtaaagaaaaggattagatttattcagtatgatcttaaagagggatgctaggggcagcaggtaaaaatttcagggagacagattttcgttcagtgttgggaaactcctgaggtaagaagtgcccattaggctgggtggccactcaccttagaagagagatactacagagaaggctgaaacatggaagattgtaggggttgagtggctcattagtttggccaccaaatctagcaaataaaagtacaggatgccgagataaatttgacaaaaggctgtaactgccaagtttttgtaattcattg

SEQ ID NO: 1871 - DNA, 366 bp, Homo sapiens
gcaggaggaacattagctgttcccaaatcgaagggaaaaggtacctaaatatatatctcaaatttgttttttgattctagaattgacataagattggctgggcgcagtggcttatgcttgtaatcccaacactttgggaggctgagacaggtgaattgcttgagtccaggactttgagaccagcctgggcaacatggtgaaactctgtctctacaaaaaatatgaagatatttttgtattttttagctgggtgtggtggcgcacacctgtgtcccagctatggggaagggtgcggctgaggcaggaggatcccttaagccccagaggtcaaggctgcagtgagccctgatcatgagaccttgtctt

SEQ ID NO: 1872 - DNA, 532 bp, Homo sapiens
ctgggtgtggtgacaggcgcctataaccccagctatttgggaggctgaggcagtagaatcgcttgaacccagatagcagaggttgcagtgagctgagagtgtgccattgcagagagactccatcccaaaaaaagacagctgtcccaggccaagggtacttgggagagcccctcatggagaacctagtttagaccaagtagcagaagctgtggtcataacaaaacaatttgaggaagaaatcttacaaatcaccactgccctttctccttttccataaaactgtccatcttttcggtgctccctaatccaagcagcttgactttagagaagttgcagaagcagtgaagccactaacatgctgtgtgactttatgcaagtcactcacctcactgagccacctccatttcttcatctgtgaaataggcataacagtaatacataaccctacctacctcacagggctgttgtgaggatcaaatgaaataatgtaacgtgagaatacagtataaatgataaaggattgttattcttt

SEQ ID NO: 1873 - DNA, 402 bp, Homo sapiens
  misc_feature (18)..(18): n is a, c, g, or t
  misc_feature (38)..(38): n is a, c, g, or t
acctagttatgaccacancttctgctacttggtctaanctaggttctccatgaggggctctcccaagtagcagaagctgtggtcataacaaaacaatttgaggaagaaatcttacaaatcaccactgccctttctccttttccataaaactgtccatcttttcggtgctccctaatccaagcagcttgactttagagaagttgcagaagcagtgaagccactaacatgctgtgtgactttatgcaagtcactcacctcactgagccacctccatttcttcatctgtgaaataggcataacagtaatacataaccctacctacctcacagggctgttgtgaggatcaaatgaaataatgtaacgtgagaatacagtataaatgataaaggattgttattcttt

SEQ ID NO: 1874 - DNA, 324 bp, Homo sapiens
tggagggatggttgacttgattgaagtgcattgccatggccacttttttttacttacacgtagacatcaaagagagaatctacttgtttcgttccatcttaatcatctatattttccccttttgatgatgcattgttatactattattgtctgtgctacatttttgccattcacaaattgctcctagttggtggaatgtagttacatcaagatgtggtcctgtgccagctttgtcctttttgggccaaggttttaatacaagtatccttataagccatgtgctggagtgctgagcttgctggctggtagagaggaaaattttgc

SEQ ID NO: 1875 - DNA, 386 bp, Homo sapiens
tttttttgagacagagtcttgctctgtcgcccaggctggagtgcagtggctcgatctcggctcacagcaagctccgccccacgggttcacacctttctcctgcctcagccttccgagtagctgggactacaggcgcccgccaccacgcccggctaatgttttgtattttagtagagacggggtttcaccatgtcagccaggatggtctcgatctcctgacctcatgatctgcctgcctcggcctcccaaagtgctgggattacaggcatgagccaccgcgcccggcccctgattgattcttgcattggtgattgcttcatgcatgacttactgagttttggaaagaaacagtcctgtgtaaagccaatgaaacagcactagtactt

SEQ ID NO: 1876 - DNA, 575 bp, Homo sapiens
cctgggttcaagtgattctcctgtctcagcctcccgagtagctgggactataggcatgcaccagcacgcccagctaatttttgtatttttagtagagacggggtttcaccattttggccaggttggtctcagactcctgacctcaagtgatccacccacctcagcctcccaaagtgctgagattacaggtgtgagccacctagcctaacctcgagttgatttttatataaaataagagagagagtggttcagtttcattctttctgcagatggctatccaattttctcagcaccatttactgaataggttgtcctttcccagtgtacgtttttgtctactttgccaaagatcagttggctgtagatttgtggctttatttctagtttctgcattctgttccattgatctatgtgtctatttttataccagtaccatgctgttttggttactatagctttgtttcccaatgttggaggagggacctactgggagatgtttgggtcacaggggcagatccctgataaatggcttggtgccttccccatggtaatgagttcacatgacagctggttgt

SEQ ID NO: 1877 - DNA, 125 bp, Homo sapiens
tccattttcaatgctagacagatccttagaaaatatgtcagatcatgtcactctgatgcttaaaaccctccaaagtctgcctgtctcatctgaagtaaaagtcaaagtccttctgatggccctcc

SEQ ID NO: 1878 - DNA, 285 bp, Homo sapiens
agctgagatcacgccactgtactccagcccgggtgacagagtgagaccctgtctcaaaaaaaaaaaaaaaaaaaatgaaagtaagtaaacatatctatatggcacagtggggtaaatttgagggattttagggacatcttacatgggcctaggctaaaatagtcattgtgttttctttatattatataattactataaaactaccaagagaaagacagtaaatgttaaatttctataaaacttccaaaataaaatgttttaacatgttttaatgaggaacttggt

SEQ ID NO: 1879 - DNA, 408 bp, Homo sapiens
cagcctgctgagtagctgggactacaggctcacaccaccatgccagctaatttttctttttttaaatttgaaattatattcctgttgcttaagattactaaggcagacttttttttaaaccaaaatattcagtctccatagagactgtcagaaatggtcagtgctggctgggcacggtggctcatgcctgtaatcccagccctttgggaggctgaggcgggtggatcatttgaggtcaggagtttgagaccagcctagccaacatggtgaaaccttgtttctactaaaaatacaaaaatcagccgggcgtggtggcaggcagctgtaatcccagctacttaggaggctgaggcaggagaatcgcttgaacccaggaggcagaggttgtagagagccgaggtcatgcca

SEQ ID NO: 1880 - DNA, 1218 bp, Homo sapiens
gaaataaactctagattccactttttgatggaaaaatggccaggtcatcattgcaaacgagcgtgaagaatggaatatactggtgtggtcttttttggaaatacaacctaccacagccagagtgtatgtctacgtatgtaatttaaaataagatggtcaggggaggccttcagagacagtgacatttgagcaaagacctgaagaagaagagaggaagccttgcagatatttgggatgaaagcgttacacactgaaataattgtaaatacaaaaactctgatgtggtaatgagcctggtctacccaagggatgataaggaggccactgtgactgaagtagagggccaagaaggaaggaataagtagttagaggtgaggtcaaagaagtcatgaaagccagatcatgtagggcttagaggaacctagagaaaggaatgtttggttaaaaggataaataattgtgtttccaacaggtgtccatagaataggcccttcctatgtggtagtaacaaaaataagtaaaaacttgagaaagaatctcctcactccccccccccaaattcctgccagataattccataactagttcctgtccacgggcaactctattccacttcctgaagtatagttttcacagggaggcggcacagcctgttagaaaagtttgcctctactcctcaaaccctgctctatgtgaatgaattatcacatacatatgaatctaattttcatttcagatactgtccaacttcccaccttaccaacttaggaaaacttcatctttcttttcagttttatagatgatgtcattgttgattttaaattataaaatggaatgcttccaaaggaggttacagttcctgctgcaatatatcagtcttagaacatgaacaacttgtaattgttaagtgcatgttcaaagctaattgtgtggcatttggttgctgcttttcaggaaaacttttaaaagcagagtatattctgagcagtctaataagcaacaatggagcaacgggtgagtactttcatatcttcacaatgacttttacctcagccccgaacagagcactcatttaataacaacttagtgacttaatagttactataccttagatgtttccagagctatctggggctgctctgccactgatgaatgaagaagctttgatcaagcagcttacatctctgtgtctctgttttctctaagttaaaaaaaaaa

SEQ ID NO: 1881 - DNA, 1633 bp, Homo sapiens
taattcctacttcctgaaactgaagccgttttatgagaaacagtgtgtttcagagaggctgtaccagaattaactctgctcagagttagatttgctggtcttaaagtacttttcctctttaagataaaagaagttcttctaaatcaggaatggattgaaatctaatgaaccgaaactttgggtacttcggccttcaaggggctcctttattgagaatcaatgtcttctcctaggtaattgatcaccctagacccagggacacccaattcatcgtaatcatcatgaataatcaaaaagtggtagctgtgctactgcaagagtgcaagctttactccccagcgagttaaggaccctgatccaggaggcaaaggaaatgaagtggcccttcgtgcctgaaaagtggcagtacaaacaagccgtgggcccagaggacaaaacaaacctgaaggatgtgattggcgccgggttgcagcagttactggcgtccctgagggcctccatcctcgctcgggactgtgcggctgcggcggctattgtgttcttggtggaccggttcctgtatgggctcgacgtctctggaaaacttctgcaggtcgccaaaggtctccacaagttgcagccagccacgccaattgccccgcaggtggttattcgccaagcccgaatctccgtgaactcaggatcccatccagccaaacactcaatgtagtgggatgtcagaagcaagagaagacccacaaggccaggcactatggctcatgcctgtaatcccagcactttgggaggccgaagcgtgtggatcacctgaagtcaggagttcgagaccagcctggacaacatgatgaaaccccatctctactgaaaactacaaaaattagccaggcgtggtggcagccgcctgtaatcccagctacttaggaggctgaggcaggagaatcacttgaactccggaggtggaagttgcagtgaggtgagatcaaatgcaaaactatactctagagaagtatccacacccagggccatgggaatctcacaggaaaatattcttggcaaaagatgaccttacattaaaattataagcaacaggctgggcagcggctcacgcctgtaaacccagcattttgggaggccaaggcgggtggattacctgaagtcaggagttcgagaccagcctggctaacatggtgaaaccccatctctattaaaaatacaaaaaattagcctggtgtggtggcaggcgcacgaaatcccagctacttgggaggctgaggcgggagaattgcttgaacccagaaggcagaggttgcagtgagctgagattatgccattgcactccagcctgggttacagtgagactctgtctcaaaaaaaaaaagaaagaaagaaaacaaaaaagaaaaaaaaagagaaagtaatagtaattgatggggaattccccacagaacaggcagcgcatgcaagtttgtttttatatagacaggatacaagaattcaactacaaaaccatggctgaagagcacagaacaccctcccggttggtgagataagcttttggcatttcacctgctagtaagggtgcccaactgccaaccagactgcttcaatggggtgaatgagataaaataaatcctta

SEQ ID NO: 1882 - DNA, 1490 bp, Homo sapiens
gaaataaactctagattccactttttgatggaaaaatggccaggtcatcattgcaaacgagcgtgaagaatggaatatactggtgtggtcttttttggaaatacaacctaccacagccagagtgtatgtctacgtatgtaatttaaaataagatggtcaggggaggccttcagagacagtgacatttgagcaaagacctgaagaagaagagaggaagccttgcagatatttgggatgaaagcgttacacactgaaataattgtaaatacaaaaactctgatgtggtaatgagcctggtctacccaagggatgataaggaggccactgtgactgaagtagagggccaagaaggaaggaataagtagttagaggtgaggtcaaagaagtcatgaaagccagatcatgtagggcttagaggaacctagagaaaggaatgtttggttaaaaggataaataattgtgtttccaacaggtgtccatagaataggcccttcctatgtggtagtaacaaaaataagtaaaaacttgagaaagaatctcctcactccccccccccaaattcctgccagataattccataactagttcctgtccacgggcaactctattccacttcctgaagtatagttttcacagggaggcggcacagcctgttagaaaagtttgcctctactcctcaaaccctgctctatgtgaatgaattatcacatacatatgaatctaattttcatttcagatactgtccaacttcccaccttaccaacttaggaaaacttcatctttcttttcagttttatagatgatgtcattgttgattttaaattataaaatggaatgcttccaaaggaggttacagttcctgctgcaatatatcagtcttagaacatgaacaacttgtaattgttaagtgcatgttcaaagctaattgtgtggcatttggttgctgcttttcaggaaaacttttaaaagcagagtatattctgagcagtctaataagcaacaatggagcaacgggtacctggctgtacagaaatgaaagtgacaaggtcctggtgcagtcggtctgtatacagatcagagggcagattctgcaaaagctgggtacaatcatgtaaaacttgcatttctcaaggctcatttacaaagcctggctgcatggtttcactgtggaattttcttcttttatcaggctaaaattgttaatttccacttgccttagtttcctcatcgaaaagagaatggcatttaagatcctaggagtgtcacaaatattaataaaatgtgtttttttctagtgagttttgttagagaggttcacggttgtatattgtaatgttaactgtagggttcccagtgttatttctagcatctgactcagttcagcaggactccatgtgatatggtgacaccttatactatacccaccgtgacactgttttcgttcattccttaaggtatacatgacactttgttcatgtatacatgatgct

SEQ ID NO: 1883 - DNA, 1366 bp, Homo sapiens
aagcagagtgtcatgaactaatgtggaagttctcccagatgatgatgattgaaagaagaaaacagcagaacaatatgtttagtgtgacgtcatttacgtatgagagagaaagagataggaaggctgtgggttttgttgtattaatgaaaatgcctcccacgctaagcctggccctcagcctgccagcgtttccgcctggctcacgatgttccacgctgttcctccaggcgtccctgagggcctccatcctcgctcgggactgtgcggctgcggcggctattgtgttcttggtggaccggttcctgtatgggctcgacgtctctggaaaacttctgcaggtcgccaaaggtctccacaagttgcagccagccacgccaattgccccgcaggtggttattcgccaagcccgaatctccgtgaactcaggatcccatccagccaaacactcaatgtagtgggatgtcagaagcaagagaagacccacaaggccaggcactatggctcatgcctgtaatcccagcactttgggaggccgaagcgtgtggatcacctgaagtcaggagttcgagaccagcctggacaacatgatgaaaccccatctctactgaaaactacaaaaattagccaggcgtggtggcagccgcctgtaatcccagctacttaggaggctgaggcaggagaatcacttgaactccggaggtggaagttgcagtgaggtgagatcacaccattgtactccagcctggggcacaagatcaagacttcgtctcaaaaaaaaaaaaagagagacgactcacaaggcctgctcacctcactcttgcctgaaattgggagacaaaacctttcaaaccacagttacagataaaggctcagatttccaattccatcaacatggaggactgagcacgtgcagaatcttctcccattacacatacataaatatggtgaattaaagatttgtaggtacctgaaacataaaaggtatttaaaatcacagcaatagactactgcttacgacacatagccaaaggaacttacacttgagcaaagtcctcaagggaaggggctgtcattttaatccctgggcagagatgagagacaattgccttgtgcccatgtgagaagtaaaatatttgcatcaagctggaattcttaaaggtttgcacaggctacaaaaggagactgaacaatcccaccagcctgcccagagaagttacaaggacgcttgctctccgcccaagctctgggatggaggggaaaaaaactctcatctaaaataaaggtctcaactctgtgccgaatttgagtgtggagtctgaatttactctgcccacaaagcaggaaacctgccatcaaataattaaga

SEQ ID NO: 1884 - DNA, 757 bp, Homo sapiens
taattcctacttcctgaaactgaagccgttttatgagaaacagtgtgtttcagagaggctgtaccagaattaactctgctcagagttagatttgctggtcttaaagtacttttcctctttaagataaaagaagttcttctaaatcaggaatggattgaaatctaatgaaccgaaactttgggtaattgatcaccctagacccagggacacccaattcatcgtaatcatcatgaataatcaaaaagtggtagctgtgctactgcaagagtgcaagcaagtgctggatcagctcttgttggaagcgccagatgtgtcggaagaggacaagagcgaggaccagcgctgcagagctttactccccagcgagttaaggaccctgatccaggaggcaaaggaaatgaagtggcccttcgtgcctgaaaagtggcagtacaaacaagccgtgggcccagaggacaaaacaaacctgaaggatgtgattggcgccgggttgcagcagttactggtaggaagagccacaccacctgttcctctgatatccccaagtgaggcatttagactctaagtggtctaatagattaaatttctttgaagcacaagacagccccctacccttatgctcagctctgccagattgactaatgtgagggaaatagctgtttgaaaaacattacttgcccataagatcttgtgttgtaaagccaaatccagtaaaagtgaagagtggtcagtgagtctaacatgaaccctgtcatct

SEQ ID NO: 1885 - DNA, 398 bp, Homo sapiens
tttggatttgtcctctgaatcatccttccttgtctataaaatgcatgtatatactcatacatacatagagagaaagagagagagagagagagagagactccagcctgggttacagtgagactctgtctcaaaaaaaaaaagaaagaaagaaaacaaaaaagaaaaaaaaagagaaagtaatagtaattgatggggaattccccacagaacaggcagcgcatgcaagtttgtttttatatagacaggatacaagaattcaactacaaaaccatggctgaagagcacagaacaccctcccggttggtgagataagcttttggcatttcacctgctagtaagggtgcccaactgccaaccagactgcttcaatggggtgaatgagataaaataaatcctta

SEQ ID NO: 1886 - DNA, 237 bp, Homo sapiens
taattcctacttcctgaaactgaagccgttttatgagaaacagtgtgtttcagagaggctgtaccagaattaactctgctcagagttagatttgctggtcttaaagtacttttcctctttaagataaaagaagttcttctaaatcaggaatggattgaaatctaatgaaccgaaactttggctccccagtcctggtctcctgccctacacagtccaagcaagtgggccaagagattg

SEQ ID NO: 1887 - DNA, 4479 bp, Homo sapiens
  misc_feature (905)..(905): n is a, c, g, or t
taattcctacttcctgaaactgaagccgttttatgagaaacagtgtgtttcagagaggctgtaccagaattaactctgctcagagttagatttgctggtcttaaagtacttttcctctttaagataaaagaagttcttctaaatcaggaatggattgaaatctaatgaaccgaaactttgggtacttcggccttcaaggggctcctttattgagaatcaatgtcttctcctaggtaattgatcaccctagacccagggacacccaattcatcgtaatcatcatgaataatcaaaaagtggtagctgtgctactgcaagagtgcaagcaagtgctggatcagctcttgttggaagcgccagatgtgtcggaagaggacaagagcgaggaccagcgctgcagagctttactccccagcgagttaaggaccctgatccaggaggcaaaggaaatgaagtggcccttcgtgcctgaaaagtggcagtacaaacaagccgtgggcccagaggacaaaacaaacctgaaggatgtgattggcgccgggttgcagcagttactggcgtccctgagggcctccatcctcgctcgggactgtgcggctgcggcggctattgtgttcttggtggaccggttcctgtatgggctcgacgtctctggaaaacttctgcaggtcgccaaaggtctccacaagttgcagccagccacgccaattgccccgcaggtggttattcgccaagcccgaatctccgtgaactcaggaaaacttttaaaagcagagtatattctgagcagtctaataagcaacaatggagcaacgggtacctggctgtacagaaatgaaagtgacaaggtcctggtgcagtcggtctgtatacagatcagagggcagattctgcaaaagctgggnatgtggtacgaagcagcagagttaatatgggcctccattgtaggatatttggcacttcctcagccggataaaaagggcctctccacgtcgctaggtatactggcagacatctttgtttccatgagcaagaacgattatgaaaagtttaaaaacaatccacaaattaatttgagcctgctgaaggagtttgaccaccatttgctgtccgctgcagaagcctgcaagctggcagctgccttcagtgcctatacgccgctcttcgtgctcacagctgtgaatatccgtggcacgtgtttattgtcctacagtagttcaaatgactgtcctccagaattgaaaaacttacatctgtgtgaagccaaagaggcctttgagattggcctcctcaccaagagagatgatgagcctgttactggaaaacaggagcttcacagctttgtcaaagctgctttcggtctcaccacagtgcacagaaggctccatggggagacagggacggtccatgcagcaagtcagctctgtaaggaagcaatggggaagctgtacaatttcagcacttcctccagaagtcaggacagagaagctctgtctcaagaagttatgtctgtgattgcccaggtgaaggaacatttacaagttcaaagcttctcaaatgtagatgacagatcttatgttcccgagagtttcgagtgcaggttggataaacttatcttgcatgggcaaggggatttccaaaaaatccttgacacctattcacagcaccatacttcggtgtgtgaagtatttgaaagtgattgtggaaacaacaaaaatgaacagaaagatgcaaaaacaggagtctgcatcactgctctaaaaacagaaataaaaaacatagatactgtgagtactactcaagaaaagccacattgtcaaagagacacaggaatatcttcctccctaatgggtaagaatgttcagagggaactcagaaggggaggaaggagaaactggacccattctgatgcatttcgagtctccttggatcaagatgtggagactgagactgagccatcggactacagcaatgatgagggagctgttttcaacaagtctctgagtggcagccagacttccagtgcttggagcaacttatcagggtttagttcctctgcaagctgggaggaagtgaattatcacgttgacgacaggtcagccagaaaagagcctggcaaagaacatctggtggacactcagtgttccactgccttgtctgaggagctagagaatgacagggaaggcagagctatgcattcattgcgttcacagcttcatgatctctctcttcaggaacccaacaatgacaatttggagccttctcaaaatcagccacagcaacagatgcccttgacacccttctcgcctcataataccccaggcattttcttggcccctggtgcagggcttctagaaggagctccagaaggtatccaggaagtcagaaatatgggacccagaaatacttctgctcactccagaccctcatatcgttctgcttcttggtcttctgattctggtaggcccaagaatataggcacacatccttcagtccaaaaagaagaagcctttgaaataattgttgagtttccagaaaccaactgcgatgtcaaagacaggcaggggaaagagcagggagaagaaattagtgaaagaggcgcaggccctacatttaaagctagtccctcctgggttgacccagaaggagaaacagcagaaagcactgaagatgcacccttagactttcacagggtcctgcacaattctctgggaaacatttccatgctgccatgtagctccttcacccctaattggcctgttcaaaatcctgactccagaaaaagtggtggcccagtcgcagagcagggcatcgaccctgatgcctccacagtggatgaggaggggcaactgctcgacagcacggatgttccctgcacaaatgggcacggctctcatagactgtgcattctgagacagccgcctggtcagagggcggagacccccaattcctctgtaagcggtaacatcctcttccctgtcctcagcgaggactgcactaccacagaggaaggaaatcagcctggaaacatgctaaactgcagccagaactccagctcatcctcagtgtggtggctgaaatcacctgcattttccagtggttcttctgagggggacagcccttggtcctatctgaattccagtgggagttcttgggtttcattgccgggaaagatgaggaaagagatccttgaggctcgcaccttgcaacctgatgactttgaaaagctgttggcaggagtgaggcatgattggctgtttcagagactagagaatacgggggtttttaagcccagtcaactccaccgagcacatagtgctcttttgttaaaatattcaaaaaaatctgaactgtggacggcccaggaaactattgtctatttgggggactacttgactgtgaagaaaaaaggcagacaaagaaatgctttttgggttcatcatcttcatcaagaagaaattctggggaggtatgttgggaaagactataaggagcagaaggggctctggcaccacttcactgatgtggagcggcagatgaccgcacagcactatgtgacagaatttaacaagagactctatgaacaaaacattcccacccagatattctacatcccatccacaatactactgattttagaggacaagacaataaagggatgtatcagtgtggagccttacatactgggagaatttgtaaaattgtcaaataacacgaaagtggtgaaaacagaatacaaagccacagaatatggcttggcctatggccatttttcttatgagttttctaatcatagagatgttgtggtcgatttacaaggttgggtaaccggtaatggaaaaggactcatctacctcacagatccccagattcactccgttgatcagaaagttttcactaccaattttggaaagagaggaattttttacttctttaataaccagcatgtggaatgtaatgaaatctgccatcgtctttctttgactagaccttcaatggagaaaccatgcacatagaatacggcacagtctggtcctttggggcttgggcagggccgtgacacaggttctggccaatgatttgcaagaggaattgatcagtatcactttaagtcctgcatttaattggcagcacaagatcctgcagagcctctttccctctgccacagttatcaagaatgggtcaggagaccgctgcttctgggcataagtcctgcaaggaaagcaacatggaaaacagccccaactcacccatgagggatgaaaagcactcttgagaaaggcatgtgttgtttaagccattgagattttagagctttttgtcactatctgtcaagactgatactactggggcttttcctattgatttgggagttctttacatattaaaaaaatgtgagcctttgtgatacgaattcaatttgttttcctgtcttttgacatttgactttgcataaaagtttatctgtgcataatttta

SEQ ID NO: 1888 - DNA, 4609 bp, Homo sapiens
  misc_feature (233)..(233): n is a, c, g, or t
  misc_feature (1035)..(1035): n is a, c, g, or t
cacgaggagcaggagcagcgggggatgacttccgatccgacacccccaaaatctcctggacaaagctgctgtctttgcgggataaacagaaaagggccagtccccacctcacccccagcccgccgccccgcaagtacctggggctggggagtcagtgaactctcttcagctgttcggctctcccggctcagagcgaggggaatcgaggagactgggcgcaggatgggggtggncacccggccgctgctcctccgcgcgggaagttcttctaaatcaggaatggattgaaatctaatgaaccgaaactttgggtacttcggccttcaaggggctcctttattgagaatcaatgtcttctcctaggtaattgatcaccctagacccagggacacccaattcatcgtaatcatcatgaataatcaaaaagtggtagctgtgctactgcaagagtgcaagcaagtgctggatcagctcttgttggaagcgccagatgtgtcggaagaggacaagagcgaggaccagcgctgcagagctttactccccagcgagttaaggaccctgatccaggaggcaaaggaaatgaagtggcccttcgtgcctgaaaagtggcagtacaaacaagccgtgggcccagaggacaaaacaaacctgaaggatgtgattggcgccgggttgcagcagttactggcgtccctgagggcctccatcctcgctcgggactgtgcggctgcggcggctattgtgttcttggtggaccggttcctgtatgggctcgacgtctctggaaaacttctgcaggtcgccaaaggtctccacaagttgcagccagccacgccaattgccccgcaggtggttattcgccaagcccgaatctccgtgaactcaggaaaacttttaaaagcagagtatattctgagcagtctaataagcaacaatggagcaacgggtacctggctgtacagaaatgaaagtgacaaggtcctggtgcagtcggtctgtatacagatcagagggcagattctgcaaaagctgggnatgtggtacgaagcagcagagttaatatgggcctccattgtaggatatttggcacttcctcagccggataaaaagggcctctccacgtcgctaggtatactggcagacatctttgtttccatgagcaagaacgattatgaaaagtttaaaaacaatccacaaattaatttgagcctgctgaaggagtttgaccaccatttgctgtccgctgcagaagcctgcaagctggcagctgccttcagtgcctatacgccgctcttcgtgctcacagctgtgaatatccgtggcacgtgtttattgtcctacagtagttcaaatgactgtcctccagaattgaaaaacttacatctgtgtgaagccaaagaggcctttgagattggcctcctcaccaagagagatgatgagcctgttactggaaaacaggagcttcacagctttgtcaaagctgctttcggtctcaccacagtgcacagaaggctccatggggagacagggacggtccatgcagcaagtcagctctgtaaggaagcaatggggaagctgtacaatttcagcacttcctccagaagtcaggacagagaagctctgtctcaagaagttatgtctgtgattgcccaggtgaaggaacatttacaagttcaaagcttctcaaatgtagatgacagatcttatgttcccgagagtttcgagtgcaggttggataaacttatcttgcatgggcaaggggatttccaaaaaatccttgacacctattcacagcaccatacttcggtgtgtgaagtatttgaaagtgattgtggaaacaacaaaaatgaacagaaagatgcaaaaacaggagtctgcatcactgctctaaaaacagaaataaaaaacatagatactgtgagtactactcaagaaaagccacattgtcaaagagacacaggaatatcttcctccctaatgggtaagaatgttcagagggaactcagaaggggaggaaggagaaactggacccattctgatgcatttcgagtctccttggatcaagatgtggagactgagactgagccatcggactacagcaatgatgagggagctgttttcaacaagtctctgagtggcagccagacttccagtgcttggagcaacttatcagggtttagttcctctgcaagctgggaggaagtgaattatcacgttgacgacaggtcagccagaaaagagcctggcaaagaacatctggtggacactcagtgttccactgccttgtctgaggagctagagaatgacagggaaggcagagctatgcattcattgcgttcacagcttcatgatctctctcttcaggaacccaacaatgacaatttggagccttctcaaaatcagccacagcaacagatgcccttgacacccttctcgcctcataataccccaggcattttcttggcccctggtgcagggcttctagaaggagctccagaaggtatccaggaagtcagaaatatgggacccagaaatacttctgctcactccagaccctcatatcgttctgcttcttggtcttctgattctggtaggcccaagaatataggcacacatccttcagtccaaaaagaagaagcctttgaaataattgttgagtttccagaaaccaactgcgatgtcaaagacaggcaggggaaagagcagggagaagaaattagtgaaagaggcgcaggccctacatttaaagctagtccctcctgggttgacccagaaggagaaacagcagaaagcactgaagatgcacccttagactttcacagggtcctgcacaattctctgggaaacatttccatgctgccatgtagctccttcacccctaattggcctgttcaaaatcctgactccagaaaaagtggtggcccagtcgcagagcagggcatcgaccctgatgcctccacagtggatgaggaggggcaactgctcgacagcacggatgttccctgcacaaatgggcacggctctcatagactgtgcattctgagacagccgcctggtcagagggcggagacccccaattcctctgtaagcggtaacatcctcttccctgtcctcagcgaggactgcactaccacagaggaaggaaatcagcctggaaacatgctaaactgcagccagaactccagctcatcctcagtgtggtggctgaaatcacctgcattttccagtggttcttctgagggggacagcccttggtcctatctgaattccagtgggagttcttgggtttcattgccgggaaagatgaggaaagagatccttgaggctcgcaccttgcaacctgatgactttgaaaagctgttggcaggagtgaggcatgattggctgtttcagagactagagaatacgggggtttttaagcccagtcaactccaccgagcacatagtgctcttttgttaaaatattcaaaaaaatctgaactgtggacggcccaggaaactattgtctatttgggggactacttgactgtgaagaaaaaaggcagacaaagaaatgctttttgggttcatcatcttcatcaagaagaaattctggggaggtatgttgggaaagactataaggagcagaaggggctctggcaccacttcactgatgtggagcggcagatgaccgcacagcactatgtgacagaatttaacaagagactctatgaacaaaacattcccacccagatattctacatcccatccacaatactactgattttagaggacaagacaataaagggatgtatcagtgtggagccttacatactgggagaatttgtaaaattgtcaaataacacgaaagtggtgaaaacagaatacaaagccacagaatatggcttggcctatggccatttttcttatgagttttctaatcatagagatgttgtggtcgatttacaaggttgggtaaccggtaatggaaaaggactcatctacctcacagatccccagattcactccgttgatcagaaagttttcactaccaattttggaaagagaggaattttttacttctttaataaccagcatgtggaatgtaatgaaatctgccatcgtctttctttgactagaccttcaatggagaaaccatgcacatagaatacggcacagtctggtcctttggggcttgggcagggccgtgacacaggttctggccaatgatttgcaagaggaattgatcagtatcactttaagtcctgcatttaattggcagcacaagatcctgcagagcctctttccctctgccacagttatcaagaatgggtcaggagaccgctgcttctgggcataagtcctgcaaggaaagcaacatggaaaacagccccaactcacccatgagggatgaaaagcactcttgagaaaggcatgtgttgtttaagccattgagattttagagctttttgtcactatctgtcaagactgatactactggggcttttcctattgatttgggagttctttacatattaaaaaaatgtgagcctttgtgatacgaattcaatttgttttcctgtcttttgacatttgactttgcataaaagtttatctgtgcataatttta

SEQ ID NO: 1889 - DNA, 5610 bp, Homo sapiens
  misc_feature (1103)..(1103): n is a, c, g, or t
  misc_feature (4896)..(4896): n is a, c, g, or t
  misc_feature (5229)..(5229): n is a, c, g, or t
gaaataaactctagattccactttttgatggaaaaatggccaggtcatcattgcaaacgagcgtgaagaatggaatatactggtgtggtcttttttggaaatacaacctaccacagccagagtgtatgtctacgtatgtaatttaaaataagatggtcaggggaggccttcagagacagtgacatttgagcaaagacctgaagaagaagagaggaagccttgcagatatttgggatgaaagcgttacacactgaaataattgtaaatacaaaaactctgatgtggtaatgagcctggtctacccaagggatgataaggaggccactgtgactgaagtagagggccaagaaggaaggaataagtagttagaggtgaggtcaaagaagtcatgaaagccagatcatgtagggcttagaggaacctagagaaaggaatgtttggttaaaaggataaataattgtgtttccaacaggtgtccatagaataggcccttcctatgtggtagtaacaaaaataagtaaaaacttgagaaagaatctcctcactccccccccccaaattcctgccagataattccataactagttcctgtccacgggcaactctattccacttcctgaagtatagttttcacagggaggcggcacagcctgttagaaaagtttgcctctactcctcaaaccctgctctatgtgaatgaattatcacatacatatgaatctaattttcatttcagatactgtccaacttcccaccttaccaacttaggaaaacttcatctttcttttcagttttatagatgatgtcattgttgattttaaattataaaatggaatgcttccaaaggaggttacagttcctgctgcaatatatcagtcttagaacatgaacaacttgtaattgttaagtgcatgttcaaagctaattgtgtggcatttggttgctgcttttcaggaaaacttttaaaagcagagtatattctgagcagtctaataagcaacaatggagcaacgggtacctggctgtacagaaatgaaagtgacaaggtcctggtgcagtcggtctgtatacagatcagagggcagattctgcaaaagctgggnatgtggtacgaagcagcagagttaatatgggcctccattgtaggatatttggcacttcctcagccggataaaaagggcctctccacgtcgctaggtatactggcagacatctttgtttccatgagcaagaacgattatgaaaagtttaaaaacaatccacaaattaatttgagcctgctgaaggagtttgaccaccatttgctgtccgctgcagaagcctgcaagctggcagctgccttcagtgcctatacgccgctcttcgtgctcacagctgtgaatatccgtggcacgtgtttattgtcctacagtagttcaaatgactgtcctccagaattgaaaaacttacatctgtgtgaagccaaagaggcctttgagattggcctcctcaccaagagagatgatgagcctgttactggaaaacaggagcttcacagctttgtcaaagctgctttcggtctcaccacagtgcacagaaggctccatggggagacagggacggtccatgcagcaagtcagctctgtaaggaagcaatggggaagctgtacaatttcagcacttcctccagaagtcaggacagagaagctctgtctcaagaagttatgtctgtgattgcccaggtgaaggaacatttacaagttcaaagcttctcaaatgtagatgacagatcttatgttcccgagagtttcgagtgcaggttggataaacttatcttgcatgggcaaggggatttccaaaaaatccttgacacctattcacagcaccatacttcggtgtgtgaagtatttgaaagtgattgtggaaacaacaaaaatgaacagaaagatgcaaaaacaggagtctgcatcactgctctaaaaacagaaataaaaaacatagatactgtgagtactactcaagaaaagccacattgtcaaagagacacaggaatatcttcctccctaatgggtaagaatgttcagagggaactcagaaggggaggaaggagaaactggacccattctgatgcatttcgagtctccttggatcaagatgtggagactgagactgagccatcggactacagcaatgatgagggagctgttttcaacaagtctctgagtggcagccagacttccagtgcttggagcaacttatcagggtttagttcctctgcaagctgggaggaagtgaattatcacgttgacgacaggtcagccagaaaagagcctggcaaagaacatctggtggacactcagtgttccactgccttgtctgaggagctagagaatgacagggaaggcagagctatgcattcattgcgttcacagcttcatgatctctctcttcaggaacccaacaatgacaatttggagccttctcaaaatcagccacagcaacagatgcccttgacacccttctcgcctcataataccccaggcattttcttggcccctggtgcagggcttctagaaggagctccagaaggtatccaggaagtcagaaatatgggacccagaaatacttctgctcactccagaccctcatatcgttctgcttcttggtcttctgattctggtaggcccaagaatataggcacacatccttcagtccaaaaagaagaagcctttgaaataattgttgagtttccagaaaccaactgcgatgtcaaagacaggcaggggaaagagcagggagaagaaattagtgaaagaggcgcaggccctacatttaaagctagtccctcctgggttgacccagaaggagaaacagcagaaagcactgaagatgcacccttagactttcacagggtcctgcacaattctctgggaaacatttccatgctgccatgtagctccttcacccctaattggcctgttcaaaatcctgactccagaaaaagtggtggcccagtcgcagagcagggcatcgaccctgatgcctccacagtggatgaggaggggcaactgctcgacagcacggatgttccctgcacaaatgggcacggctctcatagactgtgcattctgagacagccgcctggtcagagggcggagacccccaattcctctgtaagcggtaacatcctcttccctgtcctcagcgaggactgcactaccacagaggaaggaaatcagcctggaaacatgctaaactgcagccagaactccagctcatcctcagtgtggtggctgaaatcacctgcattttccagtggttcttctgagggggacagcccttggtcctatctgaattccagtgggagttcttgggtttcattgccgggaaagatgaggaaagagatccttgaggctcgcaccttgcaacctgatgactttgaaaagctgttggcaggagtgaggcatgattggctgtttcagagactagagaatacgggggtttttaagcccagtcaactccaccgagcacatagtgctcttttgttaaaatattcaaaaaaatctgaactgtggacggcccaggaaactattgtctatttgggggactacttgactgtgaagaaaaaaggcagacaaagaaatgctttttgggttcatcatcttcatcaagaagaaattctggggaggtatgttgggaaagactataaggagcagaaggggctctggcaccacttcactgatgtggagcggcagatgaccgcacagcactatgtgacagaatttaacaagagactctatgaacaaaacattcccacccagatattctacatcccatccacaatactactgattttagaggacaagacaataaagggatgtatcagtgtggagccttacatactgggagaatttgtaaaattgtcaaataacacgaaagtggtgaaaacagaatacaaagccacagaatatggcttggcctatggccatttttcttatgagttttctaatcatagagatgttgtggtcgatttacaaggttgggtaaccggtaatggaaaaggactcatctacctcacagatccccagattcactccgttgatcagaaagttttcactaccaattttggaaagagaggaattttttacttctttaataaccagcatgtggaatgtaatgaaatctgccatcgtctttctttgactagaccttcaatggagaaaccatgcacatagaatacggcacagtctggtcctttggggcttgggcagggccgtgacacaggttctggccaatgatttgcaagaggaattgatcagtatcactttaagtcctgcatttaattggcagcacaagatcctgcagagcctctttccctctgccacagttatcaagaatgggtcaggagaccgctgcttctgggcataagtcctgcaaggaaagcaacatggaaaacagccccaactcacccatgagggatgaaaagcactcttgagaaaggcatgtgttgtttaagccattgagattttagagctttttgtcactatctgtcaagactgatactactggggcttttcctattgatttgggagttctttacatattaaaaaaatgtgagcctttgtgatacgaattcaatttgttttcctgtcttttgacatttgactttgcataaaagtttatctgtgcataattttatatgtagttgaattcatcaatcttttattttgtatggctttttggttatgtataatacttagatcctccttatactctgagtttctttctttttaattctcctgtatttccttctagtataattaaatctgtaaaaagtaagatggaagagtggtacagttttctttatccagtctgtccttgatgggcatttaggtagactggataaagaaaatgtgntacatatacaccatggaacactatgtgtattaatccactctcacactgctatgaagagatacctgagactgggtaatttagaaagaaaagaggtttaattaactcacagttccacatggctggggagacctcaggaaacttacaatcatggcagaaggcacctcttcatagggtagcaggagagagaatgagtgccagcaggggaaatgccagatgcttataaagccatcagatcttgtgagaattcattcactctcacgagaacagcatgggaaaaactgcctcaattacctcctaccaggtccttcccatgacacatgggaattatgggantacaattcgagatgagatttgggtggggacacaaagccaaaccatatcacaatgtaaccataaaaaagaatgagatcatgtcctttgcagggacatggatagagctggaggccattatttttagcaaactaatgcaagaacagaaaactaaataccacttgttctcacttataggtgagagctaagtgatgagagtaggtggacacatagagggaacaacacacaccagggcttatcagagggtggacagtgggaggagggagaggatcaggaaaaataactaatgggtactaggctgaatacctgggtgatgaagtaattcgcacaacaaacccccatgacacaaacctgcacatgtacccctgaacttaaaataaaagt

SEQ ID NO: 1890 - DNA, 5358 bp, Homo sapiens
  misc_feature (851)..(851): n is a, c, g, or t
  misc_feature (4644)..(4644): n is a, c, g, or t
  misc_feature (4977)..(4977): n is a, c, g, or t
taattcctacttcctgaaactgaagccgttttatgagaaacagtgtgtttcagagaggctgtaccagaattaactctgctcagagttagatttgctggtcttaaagtacttttcctctttaagataaaagaagttcttctaaatcaggaatggattgaaatctaatgaaccgaaactttgggtacttcggccttcaaggggctcctttattgagaatcaatgtcttctcctaggtaattgatcaccctagacccagggacacccaattcatcgtaatcatcatgaataatcagttggaagcgccagatgtgtcggaagaggacaagagcgaggaccagcgctgcagagctttactccccagcgagttaaggaccctgatccaggaggcaaaggaaatgaagtggcccttcgtgcctgaaaagtggcagtacaaacaagccgtgggcccagaggacaaaacaaacctgaaggatgtgattggcgccgggttgcagcagttactggcgtccctgagggcctccatcctcgctcgggactgtgcggctgcggcggctattgtgttcttggtggaccggttcctgtatgggctcgacgtctctggaaaacttctgcaggtcgccaaaggtctccacaagttgcagccagccacgccaattgccccgcaggtggttattcgccaagcccgaatctccgtgaactcaggaaaacttttaaaagcagagtatattctgagcagtctaataagcaacaatggagcaacgggtacctggctgtacagaaatgaaagtgacaaggtcctggtgcagtcggtctgtatacagatcagagggcagattctgcaaaagctgggnatgtggtacgaagcagcagagttaatatgggcctccattgtaggatatttggcacttcctcagccggataaaaagggcctctccacgtcgctaggtatactggcagacatctttgtttccatgagcaagaacgattatgaaaagtttaaaaacaatccacaaattaatttgagcctgctgaaggagtttgaccaccatttgctgtccgctgcagaagcctgcaagctggcagctgccttcagtgcctatacgccgctcttcgtgctcacagctgtgaatatccgtggcacgtgtttattgtcctacagtagttcaaatgactgtcctccagaattgaaaaacttacatctgtgtgaagccaaagaggcctttgagattggcctcctcaccaagagagatgatgagcctgttactggaaaacaggagcttcacagctttgtcaaagctgctttcggtctcaccacagtgcacagaaggctccatggggagacagggacggtccatgcagcaagtcagctctgtaaggaagcaatggggaagctgtacaatttcagcacttcctccagaagtcaggacagagaagctctgtctcaagaagttatgtctgtgattgcccaggtgaaggaacatttacaagttcaaagcttctcaaatgtagatgacagatcttatgttcccgagagtttcgagtgcaggttggataaacttatcttgcatgggcaaggggatttccaaaaaatccttgacacctattcacagcaccatacttcggtgtgtgaagtatttgaaagtgattgtggaaacaacaaaaatgaacagaaagatgcaaaaacaggagtctgcatcactgctctaaaaacagaaataaaaaacatagatactgtgagtactactcaagaaaagccacattgtcaaagagacacaggaatatcttcctccctaatgggtaagaatgttcagagggaactcagaaggggaggaaggagaaactggacccattctgatgcatttcgagtctccttggatcaagatgtggagactgagactgagccatcggactacagcaatgatgagggagctgttttcaacaagtctctgagtggcagccagacttccagtgcttggagcaacttatcagggtttagttcctctgcaagctgggaggaagtgaattatcacgttgacgacaggtcagccagaaaagagcctggcaaagaacatctggtggacactcagtgttccactgccttgtctgaggagctagagaatgacagggaaggcagagctatgcattcattgcgttcacagcttcatgatctctctcttcaggaacccaacaatgacaatttggagccttctcaaaatcagccacagcaacagatgcccttgacacccttctcgcctcataataccccaggcattttcttggcccctggtgcagggcttctagaaggagctccagaaggtatccaggaagtcagaaatatgggacccagaaatacttctgctcactccagaccctcatatcgttctgcttcttggtcttctgattctggtaggcccaagaatataggcacacatccttcagtccaaaaagaagaagcctttgaaataattgttgagtttccagaaaccaactgcgatgtcaaagacaggcaggggaaagagcagggagaagaaattagtgaaagaggcgcaggccctacatttaaagctagtccctcctgggttgacccagaaggagaaacagcagaaagcactgaagatgcacccttagactttcacagggtcctgcacaattctctgggaaacatttccatgctgccatgtagctccttcacccctaattggcctgttcaaaatcctgactccagaaaaagtggtggcccagtcgcagagcagggcatcgaccctgatgcctccacagtggatgaggaggggcaactgctcgacagcacggatgttccctgcacaaatgggcacggctctcatagactgtgcattctgagacagccgcctggtcagagggcggagacccccaattcctctgtaagcggtaacatcctcttccctgtcctcagcgaggactgcactaccacagaggaaggaaatcagcctggaaacatgctaaactgcagccagaactccagctcatcctcagtgtggtggctgaaatcacctgcattttccagtggttcttctgagggggacagcccttggtcctatctgaattccagtgggagttcttgggtttcattgccgggaaagatgaggaaagagatccttgaggctcgcaccttgcaacctgatgactttgaaaagctgttggcaggagtgaggcatgattggctgtttcagagactagagaatacgggggtttttaagcccagtcaactccaccgagcacatagtgctcttttgttaaaatattcaaaaaaatctgaactgtggacggcccaggaaactattgtctatttgggggactacttgactgtgaagaaaaaaggcagacaaagaaatgctttttgggttcatcatcttcatcaagaagaaattctggggaggtatgttgggaaagactataaggagcagaaggggctctggcaccacttcactgatgtggagcggcagatgaccgcacagcactatgtgacagaatttaacaagagactctatgaacaaaacattcccacccagatattctacatcccatccacaatactactgattttagaggacaagacaataaagggatgtatcagtgtggagccttacatactgggagaatttgtaaaattgtcaaataacacgaaagtggtgaaaacagaatacaaagccacagaatatggcttggcctatggccatttttcttatgagttttctaatcatagagatgttgtggtcgatttacaaggttgggtaaccggtaatggaaaaggactcatctacctcacagatccccagattcactccgttgatcagaaagttttcactaccaattttggaaagagaggaattttttacttctttaataaccagcatgtggaatgtaatgaaatctgccatcgtctttctttgactagaccttcaatggagaaaccatgcacatagaatacggcacagtctggtcctttggggcttgggcagggccgtgacacaggttctggccaatgatttgcaagaggaattgatcagtatcactttaagtcctgcatttaattggcagcacaagatcctgcagagcctctttccctctgccacagttatcaagaatgggtcaggagaccgctgcttctgggcataagtcctgcaaggaaagcaacatggaaaacagccccaactcacccatgagggatgaaaagcactcttgagaaaggcatgtgttgtttaagccattgagattttagagctttttgtcactatctgtcaagactgatactactggggcttttcctattgatttgggagttctttacatattaaaaaaatgtgagcctttgtgatacgaattcaatttgttttcctgtcttttgacatttgactttgcataaaagtttatctgtgcataattttatatgtagttgaattcatcaatcttttattttgtatggctttttggttatgtataatacttagatcctccttatactctgagtttctttctttttaattctcctgtatttccttctagtataattaaatctgtaaaaagtaagatggaagagtggtacagttttctttatccagtctgtccttgatgggcatttaggtagactggataaagaaaatgtgntacatatacaccatggaacactatgtgtattaatccactctcacactgctatgaagagatacctgagactgggtaatttagaaagaaaagaggtttaattaactcacagttccacatggctggggagacctcaggaaacttacaatcatggcagaaggcacctcttcatagggtagcaggagagagaatgagtgccagcaggggaaatgccagatgcttataaagccatcagatcttgtgagaattcattcactctcacgagaacagcatgggaaaaactgcctcaattacctcctaccaggtccttcccatgacacatgggaattatgggantacaattcgagatgagatttgggtggggacacaaagccaaaccatatcacaatgtaaccataaaaaagaatgagatcatgtcctttgcagggacatggatagagctggaggccattatttttagcaaactaatgcaagaacagaaaactaaataccacttgttctcacttataggtgagagctaagtgatgagagtaggtggacacatagagggaacaacacacaccagggcttatcagagggtggacagtgggaggagggagaggatcaggaaaaataactaatgggtactaggctgaatacctgggtgatgaagtaattcgcacaacaaacccccatgacacaaacctgcacatgtacccctgaacttaaaataaaagt

SEQ ID NO: 1891 - DNA, 956 bp, Homo sapiens
  misc_feature (10)..(10): n is a, c, g, or t
atgatctcgnacccgtcagacgctgaactatgtgacagaatttaacaagagactctatgaacaaaacattcccacccagatattctacatcccatccacaatactactgattttagaggacaagacaataaagggatgtatcagtgtggagccttacatactgggagaatttgtaaaattgtcaaataacacgaaagtggtgaaaacagaatacaaagccacagaatatggcttggcctatggccatttttcttatgagttttctaatcatagagatgttgtggtcgatttacaaggttgggtaaccggtaatggaaaaggactcatctacctcacagatccccagattcactccgttgatcagaaagttttcactaccaattttggaaagagaggaattttttacttctttaataaccagcatgtggaatgtaatgaaatctgccatcgtctttctttgactagaccttcaatggagaaaccatgcacatagaatacggcacagtctggtcctttggggcttgggcagggccgtgacacaggttctggccaatgatttgcaagaggaattgatcagtatcactttaagtcctgcatttaattggcagcacaagatcctgcagagcctctttccctctgccacagttatcaagaatgggtcaggagaccgctgcttctgggcataagtcctgcaaggaaagcaacatggaaaacagccccaactcacccatgagggatgaaaagcactcttgagaaaggcatgtgttgtttaagccattgagattttagagctttttgtcactatctgtcaagactgatactactggggcttttcctattgatttgggagttctttacatattaaaaaaatgtgagcctttgtgatacgaattcaatttgttttcctgtcttttgacatttgactttgcataaaagtttatctgtgcataatttta

SEQ ID NO: 1892 - DNA, 1292 bp, Homo sapiens
taattcctacttcctgaaactgaagccgttttatgagaaacagtgtgtttcagagaggctgtaccagaattaactctgctcagagttagatttgctggtcttaaagtacttttcctctttaagataaaagaagttcttctaaatcaggaatggattgaaatctaatgaaccgaaactttgggtacttcggccttcaaggggctcctttattgagaatcaatgtcttctcctaggtaattgatcaccctagacccagggacacccaattcatcgtaatcatcatgaataatcaaaaagtggtagctgtgctactgcaagagtgcaagcaagtgctggatcagctcttgttggaagcgccagatgtgtcggaagaggacaagagcgaggaccagcgctgcagagctttactccccagcgagttaaggaccctgatccaggaggcaaaggaaatgaagtggcccttcgtgcctgaaaagtggcagtacaaacaagccgtgggcccagaggacaaaacaaacctgaaggatgtgattggcgccgggttgcagcagttactggcgtccctgagggcctccatcctcgctcgggactgtgcggctgcggcggctattgtgttcttggtggaccggttcctgtatgggctcgacgtctctggaaaacttctgcaggtcgccaaaggtctccacaagttgcagccagccacgccaattgccccgcaggtggttattcgccaagcccgaatctccgtgaactcaggaaaacttttaaaagcagagtatattctgagcagtctaataagcaacaatggagcaacgggtacctggctgtacagaaatgaaagtgacaaggtcctggtgcagtcggtctgtatacagatcagagggcagattctgcaaaagctgggtacaatcatgtaaaacttgcatttctcaaggctcatttacaaagcctggctgcatggtttcactgtggaattttcttcttttatcaggctaaaattgttaatttccacttgccttagtttcctcatcgaaaagagaatggcatttaagatcctaggagtgtcacaaatattaataaaatgtgtttttttctagtgagttttgttagagaggttcacggttgtatattgtaatgttaactgtagggttcccagtgttatttctagcatctgactcagttcagcaggactccatgtgatatggtgacaccttatactatacccaccgtgacactgttttcgttcattccttaaggtatacatgacactttgttcatgtatacatgatgct

SEQ ID NO: 1893 - DNA, 1696 bp, Homo sapiens
taattcctacttcctgaaactgaagccgttttatgagaaacagtgtgtttcagagaggctgtaccagaattaactctgctcagagttagatttgctggtcttaaagtacttttcctctttaagataaaagaagttcttctaaatcaggaatggattgaaatctaatgaaccgaaactttgggtacttcggccttcaaggggctcctttattgagaatcaatgtcttctcctaggtaattgatcaccctagacccagggacacccaattcatcgtaatcatcatgaataatcaaaaagtggtagctgtgctactgcaagagtgcaagcaagtgctggatcagctcttgttggaagcgccagatgtgtcggaagaggacaagagcgaggaccagcgctgcagagctttactccccagcgagttaaggaccctgatccaggaggcaaaggaaatgaagtggcccttcgtgcctgaaaagtggcagtacaaacaagccgtgggcccagaggacaaaacaaacctgaaggatgtgattggcgccgggttgcagcagttactggcgtccctgagggcctccatcctcgctcgggactgtgcggctgcggcggctattgtgttcttggtggaccggttcctgtatgggctcgacgtctctggaaaacttctgcaggtcgccaaaggtctccacaagttgcagccagccacgccaattgccccgcaggtggttattcgccaagcccgaatctccgtgaactcaggatcccatccagccaaacactcaatgtagtgggatgtcagaagcaagagaagacccacaaggccaggcactatggctcatgcctgtaatcccagcactttgggaggccgaagcgtgtggatcacctgaagtcaggagttcgagaccagcctggacaacatgatgaaaccccatctctactgaaaactacaaaaattagccaggcgtggtggcagccgcctgtaatcccagctacttaggaggctgaggcaggagaatcacttgaactccggaggtggaagttgcagtgaggtgagatcacaccattgtactccagcctggggcacaagatcaagacttcgtctcaaaaaaaaaaaaagagagacgactcacaaggcctgctcacctcactcttgcctgaaattgggagacaaaacctttcaaaccacagttacagataaaggctcagatttccaattccatcaacatggaggactgagcacgtgcagaatcttctcccattacacatacataaatatggtgaattaaagatttgtaggtacctgaaacataaaaggtatttaaaatcacagcaatagactactgcttacgacacatagccaaaggaacttacacttgagcaaagtcctcaagggaaggggctgtcattttaatccctgggcagagatgagagacaattgccttgtgcccatgtgagaagtaaaatatttgcatcaagctggaattcttaaaggtttgcacaggctacaaaaggagactgaacaatcccaccagcctgcccagagaagttacaaggacgcttgctctccgcccaagctctgggatggaggggaaaaaaactctcatctaaaataaaggtctcaactctgtgccgaatttgagtgtggagtctgaatttactctgcccacaaagcaggaaacctgccatcaaataattaaga

SEQ ID NO: 1894 - DNA, 612 bp, Homo sapiens
taattcctacttcctgaaactgaagccgttttatgagaaacagtgtgtttcagagaggctgtaccagaattaactctgctcagagttagatttgctggtcttaaagtacttttcctctttaagataaaagaagttcttctaaatcaggaatggattgaaatctaatgaaccgaaactttgggtacttcggccttcaaggggctcctttattgagaatcaatgtcttctcctaggtaattgatcaccctagacccagggacacccaattcatcgtaatcatcatgaataatcaaaaagtggtagctgtgctactgcaagagtgcaagcaagtgctggatcagctcttgttggaagcgccagatgtgtcggaagaggacaagagcgaggaccagcgctgcagagctttactccccagcgagttaaggaccctgatccaggaggcaaaggaaatgaagtggcccttcgtgcctgaaaagtggcagtacaaacaagccgtgggcccagaggacaaaacaaacctgaaggatgtgattggcgccgggttgcagcagttactggcgtacctgaggctccatcctcgctcgggactgggaacggtacacgagctcgatt

SEQ ID NO: 1895 - DNA, 215 bp, Homo sapiens
agaaagttttcactaccaattttggaaagagaggaattttttacttctttaataaccagcatgtggaatgtaatgaaatctgccatcgtctttctttgactagaccttcaatggagaaaccatgtaagtcataggctgtatggattggtaatgtgacagaccttagtgatgctctcaaatatctggtgatgctcgcaaatatctggttctctcct

SEQ ID NO: 1896 - DNA, 855 bp, Homo sapiens
ccagtatatatatctgacaactgtctgatatatagactgtataaagcttacaactcagttgtaagacaactcagtaaaaactgggcaagagatttgaacaggcacttaatgaaagaagatatatgaatggctaatatgcaaattaaagccacagaaaataccacttcacatcaagaatggctaaaatgaaaagattgacaataagaagtgttggtgagaatgtggaacagttggaactctcacagtccttatgagaatgtaaaattgcacaaccacttggaaagcagtttggcagttgcttataaacataaacgtggcatgtgacccagcaatttctcttctaggtattcatccaagagaaatgaaaatatgcatcacaaaaacacttgcacattaatgttcatagcatctttagtcatgatagcctcaaactgaagcatcaagagataaatggataaacaaactgtggtatatctatacagtggaatactgtgcagccattaaaaaataatttctgaacttctgaaacacaaaacatggattcatttcagaaacatactaagtgaaaagtcagacaatgaagagtgtatattggctggttccatttgtatgaagttctacaaccagcagaactgatctacagtgatagaaatcatgagtagggtgtggtggagattgactgtagagggttgtgaagaaacgtcctgggccagtggaaatggtctttatctttagggaatctggttacatgagtgtatacatttgtcaaaactcatcaaactgtacatttaaagtgagtgcattgtatattaattatatttcaataaagtttattttttaaaaatgcaaaaaatg

SEQ ID NO: 1897 - DNA, 1322 bp, Homo sapiens
gaaaaacagaatatatggcttttccaaaaccttttgaaagcagttcctctattggagcagagaaaccaaggaataaaaaactgcctgaagaggaggtggaaagcagtaggacaccatggttatatgaacaagaaggtgaagtagagaaaccatttatcaagactggattttcagtgtctgtagaaaaatctacaagtagtaaccgcaaaaatcaattagatacaaacggaagaagacgccagtttgatgaagaatcactggaaagctttagcagtatgcctgatccagtagatccaacaacagtgactaaaacattcaagacaagaaaagcgtctgcacaggccagcctggcatctaaagataaaactcccaagtcaaaaagtaagaagaggaattctactcagctgaaaagcagagttaaaaacatcaaaactgggagtgatttttccatgtttgaagctttgcgagatactatttattctgaagtagctacattaatttctcaaaatgaatctcgtccacattttcttattgaactcttccatgagctgcagctactaaacacagactacttgagacagagggctttatatgcattgcaggacatagtatccagacatatttctgagagccatgaaaaaggagaaaatgtaaagtcagtaaactctggtacttggatagcatcaaactcagaacttactcctagtgagagccttgctactactgatgatgaaacttttgagaagaactttgaaagagaaacccataaaataagtgagcaaaatgatgctgataatgctagtgtcctgtctgtatcatcaaattttgagccttttgcaacagatgatctaggtaacaccgtgattcacttagatcaagcattagccagaatgagagaatatgagcgtatgaagactgaggctgaaagtaactcaaatatgagatgcacctgcaggattattgaggatggagatggtgctggtgcaggtactacagttaataatttagaagaaactcccgttattgaaaatcgtagttcacaacaacctgtaagtgaagtttctaccatcccatgtcctagaattgatactcagcagctggaccggcaaattaaagcaattatgaaagaagtcattccttttttgaaggaggatccaaagtgggaattccctcggaagaacttggttcttggaaaaactctaggagaaggcgaatttggaaaagtggtcaaggcaacggccttccatctgaaaggcagagcagggtacaccacggtggccgtgaagatgctgaaagagaacgcctccccgagtgagcttcga

SEQ ID NO: 1898 - DNA, 1544 bp, Homo sapiens
gaaaaacagaatatatggcttttccaaaaccttttgaaagcagttcctctattggagcagagaaaccaaggaataaaaaactgcctgaagaggaggtggaaagcagtaggacaccatggttatatgaacaagaaggtgaagtagagaaaccatttatcaagactggattttcagtgtctgtagaaaaatctacaagtagtaaccgcaaaaatcaattagatacaaacggaagaagacgccagtttgatgaagaatcactggaaagctttagcagtatgcctgatccagtagatccaacaacagtgactaaaacattcaagacaagaaaagcgtctgcacaggccagcctggcatctaaagataaaactcccaagtcaaaaagtaagaagaggaattctactcagctgaaaagcagagttaaaaacatcaggtatgaaagtgccagtatgtctagcacatgtgaaccttgcaaaagtaggaacagacattcagcccagactgaagagcctgttcaagcaaaagtattcagcagaaagaatcatgagcaactggaaaaaataataaaatgtaataggtctacagaaatatcttcagcacatgctaggagaatactacagcagtctaacagaaatgcatgcaatgaagcgccagaaactgggagtgatttttccatgtttgaagctttgcgagatactatttattctgaagtagctacattaatttctcaaaatgaatctcgtccacattttcttattgaactcttccatgagctgcagctactaaacacagactacttgagacagagggctttatatgcattgcaggacatagtatccagacatatttctgagagccatgaaaaaggagaaaatgtaaagtcagtaaactctggtacttggatagcatcaaactcagaacttactcctagtgagagccttgctactactgatgatgaaacttttgagaagaactttgaaagagaaacccataaaataagtgagcaaaatgatgctgataatgctagtgtcctgtctgtatcatcaaattttgagccttttgcaacagatgatctaggtaacaccgtgattcacttagatcaagcattagccagaatgagagaatatgagcgtatgaagactgaggctgaaagtaactcaaatatgagatgcacctgcaggattattgaggatggagatggtgctggtgcaggtactacagttaataatttagaagaaactcccgttattgaaaatcgtagttcacaacaacctgtaagtgaagtttctaccatcccatgtcctagaattgatactcagcagctggaccggcaaattaaagcaattatgaaagaagtcattccttttttgaaggaggatccaaagtgggaattccctcggaagaacttggttcttggaaaaactctaggagaaggcgaatttggaaaagtggtcaaggcaacggccttccatctgaaaggcagagcagggtacaccacggtggccgtgaagatgctgaaagagaacgcctccccgagtgagcttcga

SEQ ID NO: 1899 - DNA, 1408 bp, Homo sapiens
  misc_feature (1220)..(1220): n is a, c, g, or t
gaaaaacagaatatatggcttttccaaaaccttttgaaagcagttcctctattggagcagagaaaccaaggaataaaaaactgcctgaagaggaggtggaaagcagtaggacaccatggttatatgaacaagaaggtgaagtagagaaaccatttatcaagactggattttcagtgtctgtagaaaaatctacaagtagtaaccgcaaaaatcaattagatacaaacggaagaagacgccagtttgatgaagaatcactggaaagctttagcagtatgcctgatccagtagatccaacaacagtgactaaaacattcaagacaagaaaagcgtctgcacaggccagcctggcatctaaagataaaactcccaagtcaaaaagtaagaagaggaattctactcagctgaaaagcagagttaaaaacatcaaaactgggagtgatttttccatgtttgaagctttgcgagatactatttattctgaagtagctacattaatttctcaaaatgaatctcgtccacattttcttattgaactcttccatgagctgcagctactaaacacagactacttgagacagagggctttatatgcattgcaggacatagtatccagacatatttctgagagccatgaaaaaggagaaaatgtaaagtcagtaaactctggtacttggatagcatcaaactcagaacttactcctagtgagagccttgctactactgatgatgaaacttttgagaagaactttgaaagagaaacccataaaataagtgagcaaaatgatgctgataatgctagtgtcctgtctgtatcatcaaattttgagccttttgcaacagatgatctaggtaacaccgtgattcacttagatcaagcattagccagaatgagagaatatgagcgtatgaagactgaggctgaaagtaactcaaatatgagatgcacctgcaggattattgaggatggagatggtgctggtgcagaaactcccgttattgaaaatcgtagttcacaacaacctgtaagtgaagtttctaccatcccatgtcctagaattgatactcagcagctggaccggcaaattaaagcaattatgaaagaagtcattccttttttgaaggagcacatggatgaagtatgctcctcgcagcttctaacttcagtaaggcgcatggttttgacccttacccagcaaaatgatgagagcaaagagttngtaaagttctttcataaacaacttggaagtatattacaggattcactggcaaaatttgctggcagaaaactgaaagactgtggagaagatcttcttgtagagatatctgaagtgtgttcaatgaattggctttctttaagcttatgcaagatttggataataatagtataactgttaaacagagatgc

SEQ ID NO: 1900 - DNA, 1432 bp, Homo sapiens
  misc_feature (1244)..(1244): n is a, c, g, or t
gaaaaacagaatatatggcttttccaaaaccttttgaaagcagttcctctattggagcagagaaaccaaggaataaaaaactgcctgaagaggaggtggaaagcagtaggacaccatggttatatgaacaagaaggtgaagtagagaaaccatttatcaagactggattttcagtgtctgtagaaaaatctacaagtagtaaccgcaaaaatcaattagatacaaacggaagaagacgccagtttgatgaagaatcactggaaagctttagcagtatgcctgatccagtagatccaacaacagtgactaaaacattcaagacaagaaaagcgtctgcacaggccagcctggcatctaaagataaaactcccaagtcaaaaagtaagaagaggaattctactcagctgaaaagcagagttaaaaacatcaaaactgggagtgatttttccatgtttgaagctttgcgagatactatttattctgaagtagctacattaatttctcaaaatgaatctcgtccacattttcttattgaactcttccatgagctgcagctactaaacacagactacttgagacagagggctttatatgcattgcaggacatagtatccagacatatttctgagagccatgaaaaaggagaaaatgtaaagtcagtaaactctggtacttggatagcatcaaactcagaacttactcctagtgagagccttgctactactgatgatgaaacttttgagaagaactttgaaagagaaacccataaaataagtgagcaaaatgatgctgataatgctagtgtcctgtctgtatcatcaaattttgagccttttgcaacagatgatctaggtaacaccgtgattcacttagatcaagcattagccagaatgagagaatatgagcgtatgaagactgaggctgaaagtaactcaaatatgagatgcacctgcaggattattgaggatggagatggtgctggtgcaggtactacagttaataatttagaagaaactcccgttattgaaaatcgtagttcacaacaacctgtaagtgaagtttctaccatcccatgtcctagaattgatactcagcagctggaccggcaaattaaagcaattatgaaagaagtcattccttttttgaaggagcacatggatgaagtatgctcctcgcagcttctaacttcagtaaggcgcatggttttgacccttacccagcaaaatgatgagagcaaagagttngtaaagttctttcataaacaacttggaagtatattacaggattcactggcaaaatttgctggcagaaaactgaaagactgtggagaagatcttcttgtagagatatctgaagtgtgttcaatgaattggctttctttaagcttatgcaagatttggataataatagtataactgttaaacagagatgc

SEQ ID NO: 1901 - DNA, 809 bp, Homo sapiens
tgatgctgagcgcctccttcagcgcgtggtgcatgtgcagcatctcgtcgtgctgctgtgcctgctctgccaactcctccatcagtgtgttctggttcccacatgagtacatactggccagcggctccgagatgatgaactccggggtctgagagtgggcaaacagggaagaaggttgggacctggtgcctgtgccgccctggctgccttgctgggcccttctgggactgtgcgctggacttggagccccttggagtatggcttttcacacgggcttctataccgcttcgactggaagatccacctccccactgccttttctcactcagatggggacaccgaggtccagaggaaaagacacctgtcaaatgtcacagatctgggaggggacttaagacctatcatgccaagaggacacctgtctactcagtttttttttggtggggcggggggcggtgatagggtctcgctctgtcaccaggctggagtacagtgatgactgctcactgcagcctccacctcctgggctcaaagtgatcctccaacgtcagcctctcgagtagctaggactacaggcacatgccaccaccaagcccagctatttttaaaatttttgtgtggagacaaggtctcactatgtggcccaggctggtctcgaactcctgggctcaagtgatcctcctgcctcggcctccaggagtgggagttggagttgatgcctggatacaggagctctgtgggtgggagtgagacaaaacacagggtcctgagctctggggaccaagcaatgtcctctggtgaaaaaaatc

SEQ ID NO: 1902 - DNA, 542 bp, Homo sapiens
gcaacctctgcctcccaggtagcttggattctcctgcctcagcctcctgagtagctgggattacaggcacatgccaccacacctggctaatttttttttgtatttttagtagaaaatacaaaaggttgttttgccacattggctggccaggctggtctcgaactcctgaccttaggtgatccacccgcctcagcctcccaaagtgctgggattacaagtgtgaaacaccataaaattatattttgatgaagcattagaatttggaattaaaaaaatttacattagtatcatgatctttttattgtagaaaattagaaagtgaaataatctttttatagactcaaggaaatcagtagtgctcttgtaggcagatttttgatgggaacctttactgtggtctgcatcatttgttaacacactgggggctgggcgtggtggctcatgcctgtaatcccagtattttgggaggccgacgggggcagatcatgaggtcaagagatcaagaccatcctggccaacatggtgaaaccctgtctctacta

SEQ ID NO: 1903 - DNA, 638 bp, Homo sapiens
tcattaaaagtatactttatttgtgctagtgatttcttctcatcacttcaacagagaaaaagaacattctagaatcctaacaatggtgacaaggggtgtggacacagcgttgttaggagggggagacaccagagcaccaacttctctcacttaaaccttatgacaaccttaagaagtaggcagcatgatccccttcttggaaatgcagaaagagagaatgggggagattgagaggcttgcagaatgtgacatcattagggagaacagtggttgaggtccagcagctcctgcagatgggtggtggtggaaggaggagagaatgggccacaggcaggccaagggcaagcttagcagcactcaacatcctccatgaactcaacagaagtcaagaatgcaggcagctcatgatgaagacctgcagcggcccaggtttaccaagctcattcacaattgcagttggagaattcgtctttggtcattttctactttggaaatacgagacaggatctccctctgttgtgcaggctggtctcaaactcctgccttcaagcgatcttcctgcctggcctcccaaagtgttggaattacaggcatgagccactgcacccgcccagtaaatcctttctgatacaccctta

SEQ ID NO: 1904 - DNA, 198 bp, Homo sapiens
cttctcagcctgcctcctgagcataaagaggcctgtttccacaccgagccgcctctctctgacggcacttccacaacagagctctctgcagaaaccctgtgtgtctcctgcgggcgtgactgagttaacccacacctgctcgctggggcaagctcttgtctccttgggctgagacccaggaggctgcggaagggcgcc

SEQ ID NO: 1905 - DNA, 233 bp, Homo sapiens
tgagcacttatttctcttgctctattcactttagagtactcagaggcctggtgggtgcctgggcctcctcaccaggggtagggtacatgttcctgctgcaagcaggattctgccaagaacagaatcagtgataggatgtacagaaaaagggtgcgttctcagggtctggagtggttaggtcagccccagtggggcagcataaagaaggcatgaagtgtaaggaggtgctttta

SEQ ID NO: 1906 - DNA, 366 bp, Homo sapiens
ctctctggctgctgcttctcagttggcttcaggtgttcatcttctttctctggccccttaaaagttaagtcctcagggccaggcacggtggctcatggctgtaatcccagcactttgggaggctgaggggggtggatcacgaggtcaagagatcgagaccatcctggccaacagggtaaaccccatctctactgaaaatacaaaaaaattagctgggtgtggtggtgcgtgcctgtagtcccagctactcaggaagctgaggcaggagaatcacttgaacctgggagatggaggttacagtgagccaagattgcaccactgcactccagcctggtgacagagtgagacttcgtctcaaaaaaaaaa

SEQ ID NO: 1907 - DNA, 612 bp, Homo sapiens
tttttcaagattgttttggttatttgaggtcccttgcaatcccgtatgaattttagaatcagcttgtgttgatgtctacaaagaagtcagttgggattctgatagggattgcattgaacttgtagatcattttggagagggttgtgagttgaattgtgtcccccaaaataatatgtgaaattctaactgtcagtacctgtatgtgtgatctcctgtggagatgggatctctgcagatgtcatcaaattaagatgaggtcatactggattaaagagagtcctaaatccaatgaatgggatccttataaggagagagagatttcgagacagagacacacagaatctggagacagagatacaagggggaaggccatatgaagacagatgcagggattggagttatgctgccacaggcaagtaacacctagggccaacagaagctggaagaggcaagaaagaattctcccttagggcctttggggagagtgtgaccctgccaacaccttgattttggacttctggcctctagaactgtgagaaaataaatttctgttgtgttaagccaccttgtttgtggtacttcattacagcagcactaggaaattaatacagg

SEQ ID NO: 1908 - DNA, 301 bp, Homo sapiens
cattctggcttccccgtgctgctgaccaagcgtggacagtttttggtttgctgttttaaagccaaggaaaggcccatgcttcctgtcttgagaaatttaaagtatggaatttggccaggtgtggtggctcacacctgtaatctcagcactttgggaggccagggtgggcagatcgcttgagctcaggagttcgagaccagcctgggtaacatgttgaaacttttggtacgaaaagtacaaaaattagccgtgatcatgccactgcactccagcctgggtgacagcgtgagaccctgcctca

SEQ ID NO: 1909 - DNA, 204 bp, Homo sapiens
ttttgttgttttctccccaaattttatattctcttttttccaggatagtcaaggtacatgtaagttttttaaagtacagattttgaattccaaccacaaataaaatgcaatcaacaaatactcactgagttcacatgatgaatgtgaattactatgaaatatataaactggccagtctggctgatttttagtatactgttcaca

SEQ ID NO: 1910 - DNA, 973 bp, Homo sapiens
gatttttgtttcactttcttggatttcaacaatatctctatatctcattgggccatgaccgtgggttgatgttttatataggctttgcttaggctgttgtgttccttcatagtctagccaagaattcagccatcgtaaagggacagcatagtacgtgcttgcttatgctaaacgttgggtcaaatacacttcattctcagaaggtttgactgagagcccttattactgcaagcttgaggtttggcacaatctcgaaggtgtcaagtttctcgcaacttttgaccttgtgatgtacacttagattttccattgatgagaaaattatgcatctgctattagagaaatgactgcactctcttggattgggtggtatggtaaactataactggtgatgaacacatttggaatggtttgagaacacagatttggttttaggccccatctaaaggtttgcatggtcatctgaacttgactcatctgatctcaatccggaccattgagtcagaaacacaaagcttgaaacctcgagagggaagactcctgacatttctagtcatgccagcttcccatcaagccagccacattcgatgaagtgtcctcaggcattttggcacgtccagttctgttcccggtccaggttgtggtttctttgaaagcagcaggtgtaggtggtaggtgcatggaaagaggccactgaacttcaaggagtttatgtcagggatcggctgcagggctgaggagagagggttgcagcattcaccttcctcagctcgtttgctatgtcctcctggaggagagagaaattcagcaggaataactggatttcatcgggtaaattccacaaatattgattaagtattccccaccccaccctgttctggtgagtcttcagtgtggccacaaatcacataagaaacttgttaaactgaaaatttacagcctagacaagaaagtgagacccccatctctaaaa

SEQ ID NO: 1911 - DNA, 567 bp, Homo sapiens
catttatttgcagagctctttggagtcactgtgcccaatttggttgtgacctggtgggcattcacagctgataggaagaaaaaaatgtggtaatcttagccatttcctgctgtaagaattgtgtttggaaaatgacctgcattcttaagtcaagaaaaagtgagacacaaggtacagctggaatgggacacaggactgagggagagtctggcggaactgaaacctgaatagctaggaaggtatgagcgtgttaagggagtgtgtgtcaagggcatagatgaggtgactgagctgagagatgacctaggagaatcagagcaatggtaagaactagcactgaccatccctactcatgctttaacaaataaagcttcaagatgttctaggatattctatctgctggttagaaatacatcttcagagtcagagctttagttttttccactattataaggaaatttctgtccatgtgagcttcatgtaatattggtattgacaatgatgatgatgattatagctactgtcttagtccattcaggttgctacataacaaaataatatagactt

SEQ ID NO: 1912 - DNA, 349 bp, Homo sapiens
ctttctgccctcatgaagctgacatatgcagaattagaaagaaaagggctctactgagtaaaattggttaagtgattttactggacagagttgttattatgtatattggccagaagaggccaggtaacaaatatgcacagacggtacagaagtgggacatgtgtaggatgtcatggatcttgtctaataagagccaagaaacctcagcagaaaaaaacgaagatagcagccaggtgcagtggtttacacctgggatccagtgcgttgggaggccaaggcaggaggattgcttgaggctaggagttcaaggcctgcctgggcaacacagcaagtccctctttctacaaaa

SEQ ID NO: 1913 - DNA, 353 bp, Homo sapiens
atttttagtagagatggggtttcaccatgttggtcaggctagtctcaaactcctgacctcaggtgatccacccgcctcggcctcccaaagtgctgggattacaggcatgagccaccgcaccaggccaagtttaggttctttagagtgaaacacctatacagtatttaaggaagcacttttccccagcaccaaccctggcttacaacattcagggagtaacttaaggttttggggtacttcactccctttacaccagtcctggccttgcctgcaagacagacacaccttccttttgcttttaccaaccctctctgaaaacctcttttttttttcttttttttttttttttgaga

SEQ ID NO: 1914 - DNA, 209 bp, Homo sapiens
gcccatctgacccacagcacgtgtgacccctagacagggcttctcctggcttgcagcacttggaaatcggtgctgccttacggaagtctgtgttggctcattttggctcctgagaacaacttcagctccttaacagcatctattttaggtataaatcccccccccgctcacttttggggctgtgtcatggcaaccattagtgtgagcaa

SEQ ID NO: 1915 - DNA, 277 bp, Homo sapiens
tccttctctgcaatcagatttctcagcctggtacattatgaacagcttagtgctgttgagtaatttatatcaggatgattaggaaagcttttctctgcagattttaatttttcttaaattaaaccactggctcaaacagaattttccttgaacccaagttttcacattagagatttgcataacttttaataattcttatccattttccttttctatcccctcttacctataattctcagtctttattctttcaaaaaaggaatgaatctcatcttta

SEQ ID NO: 1916 - DNA, 133 bp, Homo sapiens
ggggtttgtttaaacacataaaagtaataacgatagaggttttatgcccgtaggtatataaatctggtgagtgtgatttttaatttcagtgaatgtttcactccccacaataaatacgtttttatacctttca

SEQ ID NO: 1917 - DNA, 381 bp, Homo sapiens
ttaactaatattcaccataacaagagcagcctcaccacaattaatgtagatatactattgaaattgaaatacaatgtctaatatcccaagttcatgattttacttttagaataatatattcatgtcagggagccacctgtagttaagaattttataaactggaatactgcctcagtgttttgtttgctgctcagtattttgtttgttattattgtttgctggctgctgtaaccagaataccttagacttgctaatttatagacaacataactttagctctggaggctgggaagcccaagaaaaggcaccagcagatttggtgtctggtgggggctctctgcttcatacgttgtgccttgttactgtgtcactggtacaagg

SEQ ID NO: 1918 - DNA, 467 bp, Homo sapiens
ggttttttttgtttgttttgtgttttgagatggagtctcattctgtcaccaggctggagtacagtggtgcaatctcggctcactgcaacctccacctcttgggttcaagcgattctcctgcctcagcctccctagtagtagctgggattacaggtgcccaccaccacgtccagctaatctttgtatttttagtagagatggggtttcaccatgttgcccaggcttgtctggaattcctgacctcaggtgatccgcccgcctcagcctcccaaagttctgagattacaggtgtaagccactacaattgtgtttttttttgttgttgttaaatcttaggagttccctatatattctagatattaatcccttattagatacatgattttcaaatattttcatccattctgtaggttgccttttaattttgttggtagtgacttttgatgcataaaaattttaaattttca

SEQ ID NO: 1919 - DNA, 328 bp, Homo sapiens
ctgtctgtgggtcagtgggaattcccatagcattcagctgaagtgggacttcgcaataatctgcacgtgtagatcttcaaagaggggctgttgggagtatggtagcccctgagagaaagcccagaaggaggcatattaagtggccattcattctgctcatatagatgtatcttttctgaagatgaattttggattggacgcaatggctcatgcctgtaaaatcctagcactttggtaggccaagaagggcagattgcttgagcccaggaattttgagaccagcctgggcaacatgacaaaccccatctctacaaaaaatacaaaaaac

SEQ ID NO: 1920 - DNA, 287 bp, Homo sapiens
ttgctgaaaactactaatagttggtactttgttttcaattaactgtttttaaccaagataatgactttggtattaaaaccccttttttttttaaacccgtgtagtacaggaagaaaagtgaattggatatgattttgaggatatgggcatctcaaaataagctccagtggaacaaacaatacccttaaattctgattttgtttcctttatgtattttgatagttacttgttctgtagcagtatagcatagtggttaatagcaagggctctggagcatactaggttga

SEQ ID NO: 1921 - DNA, 268 bp, Homo sapiens
agaccgtgagggcgccaggagatctgcggctctctccccaacccaactgacgagtactccctcaaatacaactgtatcttttctgtcctacaacccacctgcctctgatgactacatgaaggctggagaaggcaaagagcctggagcacttcagaggcccaagccaatgggaaaagcggaaaagctacagcattcacacctgctagtgatccagtaaaccacacttgctctctgttatttatggggcagctggctgaaagaaggtaaa

SEQ ID NO: 1922 - DNA, 366 bp, Homo sapiens
cctcccaaggtgctggaattacagatgtgagccatctctcctgacctacacatactaatgtaaaagttgggaactacatggtatctactataacacatctcaaaatttcagtggcctattgtgactctgacctaaaagctcagcatagatgttcttggcaggtgggttgcatatttctctctttttgtgccttactattccctggggctttggagtcctctgaatctagctggcctatgaaaaagagaggatgaaaactctccattttgccacctttgcctggaagtgacgtatatcacttcctccagtgtttctggtagtgagaaatagtctcagtaacccatctagtaattgatagaaatggcc

SEQ ID NO: 1923 - DNA, 171 bp, Homo sapiens
tcatgggaaacggagagggagcagatgagagaccttgaaaccttccagcaaccttacccccacttccaaactcccgcgactaccccaagaccatttcggccaaatctcagtaactggcaccatcttgtactttgacctcaccaggcaaggcatcctctggggagaggggtt

SEQ ID NO: 1924 - DNA, 352 bp, Homo sapiens
agcgagaaggaagaagtaagccagccagcagctgtggcatgcactcccacatagcccttctctgacagttccctcagcacacagccctcagggaatgtaggctgcaaaatgtcaggaggtagaaatgtctgcaccggcaattgtaccaacagtgcgtatgtgtgctcactcccctgcagaaatgtgctgctgtgcagtgcaggctgacactgaacaaaactacatgcacacatacaaaaactgcaacttaggaaggtgtctccaaatgtgcagcaactctggtggaataaaattattagtatatttcatgccggagcaatgaatctcaattatctgttcacaagtaattcct

SEQ ID NO: 1925 - DNA, 362 bp, Homo sapiens
tgtatgaatataagcctataagggatgtgaatgaatgacacctattcagggatggtcttgatagatagttgtgagggaaatttatcccactgagcagagatttgggtggtgtcttatgccattcttgtgtcactagaaagaaatacttgagactgtgtaatttataaagaaaagaggtttaattggctcacggttctgcagactgtatggaaagcatgatgctgacatctgctccatttctggggaggcctcaggaaagttacaatcaaggcagaaggggaaggggaagcaggcatatcacatcgccagagcaggagcaagagggcgagtggagaggtgctatacactttttttcttttttt

SEQ ID NO: 1926 - DNA, 613 bp, Homo sapiens
tgagaaacgtgtttagtatttggtttagagtgacctcaaactttgcttccaagcacttcaacacacacctggcatagccacttttcagacctgttactagtattattttatattatggcagcctaataattagaatacatacaagagatattggctaaaactacaaccttaattcaaaatttctcaaagtgcattccatgaaatcttaataagttttacatacacatacaccaatggttttttggccaaatatgcttgagaaataatgactaaaaatcaaatgtttctttattgaaagacttcacagaaaccttaaaatcagactgcattgtgaatctccaagagatgagtaatgtctacatatttctcagacttatttgaccatagaacatctcacagatctagtgtcctgaggcacatgccttaggaaactgcttcagtggctttaagccaaaggaaaagacattgagtgtgatttcctcagtacagactctcactaacaaaaagttggatgataaaatcaaatgtactactcaggaggctgaggcaggaggatcagttcagcccaagagtttgagaccagattggcaacacagcaagacctcatctctaa

SEQ ID NO: 1927 - DNA, 497 bp, Homo sapiens
attggtaatgctgattcccaaccaccttgttccttccactggagggggctctctcaaccccttctctgaggatgtgaaaacaaacccagatgggtgtgcctatctcccatccttttggccctttagccagagtcctctggaacaaagcagggccagcagggccttccttgaagacttgccttggagagagagagagaggctggatggaatcttgaataaaaatgataggttatgctttaagctgaataaaaataagccatctgaagaatatatagaagtggcatgcatgctgcctctggaaagattcatttttatttgtctatctatgtataaaggaggaagatagataaatggaaagggaagtgccgtttctgtaatgttcactctggtgaagggtttgcaaacagtataaaaatagtggctcttccaaaatgacggctttacttgaagtttatccacctctctcccccttgctcatacccctcaccaaaaaaaaa

SEQ ID NO: 1928 - DNA, 170 bp, Homo sapiens
ataataataagtgctataaagggtggacagatatttaaactggggagtcagtgatgatggctgaattttatgtggaagcgcctggaggggcatttagttggaaagtgggaccagaggatttgtctcaaagaggtttttgcttaagttggcagtttattgggaagtggctt

SEQ ID NO: 1929 - DNA, 526 bp, Homo sapiens
cacaggggccctggtagagtgaccttgcacatctaggtaccagcgagccccaagtacacacttgctctgggcttgggtgcgtagatgggcaaggatggattgtctctaccattcctcaaccagctgaggccctgaaatcttcccttagccagatttcgggacaaaggagcactagatattattaaaaggactccttttgctagtcctttgaagcccgaattgggattgaaagtgagaggaacagggcctgggctcagaagggggatataaggaaagcagaacccagtgtgcctgtgtcagtgtcgtctggagaaaaagctcttgatgatatctaatagctgttattcacatcaaaactctctaaggccctccacctattttctcgtttatgggaaatgaaacattcagagaaaggacttgcccagtcacctcagatggctcagctggaaactagaagtgagatccgacatagtggaaatgtgtagcatacggtgagccactttccaacttagccattaaaaaaaaa

SEQ ID NO: 1930 - DNA, 433 bp, Homo sapiens
ttttttaagagacagagtcttgctctattgaccaggctggagtgcagtggcatgatcataactcactgcacttgggctcaggcaatcgtcctgcctcagcctcccaaagcgctgggatcacaagtgtgagccactgctcaataatattccatactacagatacactacattttgtttatccattcatccactcacctactattatttaattatccattcacccgacctattatttaattttaaaaaaatttacagactttattttttggagcagttttgcgtttagaaagaaattaagtgggaagtaacaaatcctcagtgctctgctctacctgatccccttcctctccgataacctctggccaccactgatcctttctgcatctctacagttttgcagaatgtcatgcagttggaatccttctgtatggag

SEQ ID NO: 1931 - DNA, 201 bp, Homo sapiens
ggaggttgcagtgagtggagatcatgccactttactccagcctgggcaacacagtgagactacgtttcaaaaaaaaaaaaatgcatcgagctatatacagacacacacagatgcgtgtgtataaagctggtgaaatctgaatgaggtttgtgaattgtgccaatgccagtgttctggtttggctattgttactatagttat

SEQ ID NO: 1932 - DNA, 445 bp, Homo sapiens
tttggatttggcctctaatgtttaggcacgagtcagcacacacagatgaatagattaactgagctaatttaagggagccctcccgtggaaggattcttttttagccttctatatttaggctaaggtttgtgcctgtgcaagacactgactgaagaactgagttttccaaacctcacgagcaaggactctctaccgtgagatcttcctaacaaacctctcacttgttcatgggagctctgatgtccccataaccacagagtattaaaacaggccaattatggcaagctcatttgtactgcagggtgactctcgcctcactttcaaaaatgtggtgagcacatactgtgttggtattcaggctagtgaatatccctatctggtgaaactcgataaaacttaatttgatatgacaactctattgaattctaccagaagcaatcacttc

SEQ ID NO: 1933 - DNA, 437 bp, Homo sapiens
tgtggaatattcatgaaagttattggaaaaaaagtgtcactgtggtgccacccatttttatgccaaatatgggtattcttggaactgttagggctctggtggctgtgtgatttgcataatgaggttctaggcgaagcctaggtcaaatccaatgtcatgttgagtccagttggtttaaccagcttcacatcctggtttttcaggatcttatcagcacataatttctgcagctatttcaacaagctattttactagtcatgtgaaactgctgcctggaattttctaatctcctgcaaccaccctgtattattcctgtctcagtaacatagtaagggatcataataaaagcatggataattagcctctttcaatgtatattctggaagagattcacaggtcttgatgactgcttaaatctaggatcacaggatctctgg

SEQ ID NO: 1934 - DNA, 294 bp, Homo sapiens
gatgccaggccagggagctacagaggttttccctgggcaccatgggcagccagagaagtacattatgttgggatcagtgtgatagaagatgggggcagaggaggaactgcaaggccaggggcactcgcagccttaaccaggcaagagctggcgagactgggcagggcgaggtcgagaggaagaggagagggtgggtcttccttcctgcagtgctgcctgaagccccttgcccagaagaggctggctatgagggcagcagggggactacagggagaggaagaggctggaccaaca

SEQ ID NO: 1935 - DNA, 530 bp, Homo sapiens
tctatttagcaatggaggcccccactgcacctgtcattcttttttcatatcctacaagtaaaaacaaattcaacaaggcactctggtgcaatgcagtctggatttgccagctgtttatagaagttgtctgaaagtgccaactgcctggcccttggagcccacaggacagaagagaccttcttgtcaggggaagaactgctaaggccatgggctaggttcagatgcagcttctccaatagagaggagataggaatctcccatccagcccaagcaacctagggaaagcccctggggtcactttagacaattctgctccttccaccaagcgagcaaactgaggctcggagcttaaggcaggtgggaaagatcacatacctcagaggtggtggagtccagattctagatcaggctcttcctaccatgctgtatgtcacaatcaccctcattatccaatccagggtcctctgcagctgtgtgcaggcctcattctctcatggaggggccccccggagtcagcccacccataggta

SEQ ID NO: 1936 - DNA, 92 bp, Homo sapiens
ttatacacaaatatgcatgacagctttattttaatagcaaaaaaagaaactacaaacaactcaagtatacatcaacaggtgaatagatttaa

SEQ ID NO: 1937 - DNA, 638 bp, Homo sapiens
ttaaacaaaataagatttcaaattcagtacaaactacataatccagtgatttctcaaagagcactctttgctagcttcttcctaaacaaaatctactctaggaagatggcccacctggatgatggttccaggagggccagctcccttattgctttgctttctcttcctcctcttctggtaccttggggaactgatcacaaagagccttttgagggtgatggaaagctacccctccattcctcaggcagttttccaaagatgacacttggctaaatgctcagggtatttacagtcataggagataaactatcaacttgttactgttaaaaaaatcttgagatctgggatcttgatgcctgaaaatcccaagattggtacttggcaaactgaaagaaatctagaaaaccctagagatcaggcatctgtggccagctaactggtcatacaaatggattgttgtggtgaacttgtatagtattaatcctgagatgctgtccccctccacccccacccccacaaaaaaaataaataaagtagtattaagttagcctcatacaaatgctggcaccatgctcctggacttctcagcctccataactgtgagccaaataaacttcctttctttataaattacccag

SEQ ID NO: 1938 - DNA, 330 bp, Homo sapiens
gttttactgcttgtttttgttttgttttgttttttgctgttgctggtggtgggggtgtgtgtgccagctcttccactgaagtatcttcaacacggttgttttttaaagttgtgaatacattttaggttgggcccatcataaaatataaaggacataaacttgagtttgaaacctttcattgaagatagagatgattataggattacacataaaacctaggtcttaaactgctctacctttagagagacgttttcaactgaacccttagagcagttaatatatggtttttaaaaaaacagacttttcttgtcatgagaatgaaacaacagt

SEQ ID NO: 1939 - DNA, 117 bp, Homo sapiens
gaggtgtggtttctctctgctggcttagttacaggtggtggcctgtctctccggggtctggctgtagccatgtccctgcacccaccttgccagccagggacaggccccatcaagacc

SEQ ID NO: 1940 - DNA, 448 bp, Homo sapiens
atccaaaagttttaatcaatgctatcttagcttttacctagccttttgttttgctatgtcattttgctttatccagtggggttttataagaactacctttatttaggacatagggagtatttaagtgctttttggagaaccatttttacctacttgttggctaagtagagaagactattaactcccagacaagtaagatcataaacatttgctgctcaaatatttttttttttttgagacggcgtctccctcagtcgcccaggctagagtgcagtggcgcgatctcggctcactgcaagctcggcctcctgggttcacgccattctcctgcctcagctacttgggaggctgaggcaggagaatcacttgaacctgggaggcggaggttgcagtaagctgagaccacgccactgcactccaacctggcaacagagtgagactccatttc

SEQ ID NO: 1941 - DNA, 506 bp, Homo sapiens
tctaaggtgacgtttatatttgtgtggaattttgttctaccatgtaagaatgtcaagcattttcctcgttaaaattatcagggacttatttcagtgaacataatgtcctctgccgtcatccattttgtcgcagtgatctcacttatatgtggaatccaaaaaagtcaaactcatagaagtagagagtagaatggtgattaccagaggctaaggtagatggagaaaggagaaacattggccaatgggtgcaaagttacagttagataggaggaataatttctgttttattgcacagtaaggtgattatagttcataataatgtatatttcaaaatagctaagagtattttaaatgttcttaccagaaagaagtgataagggcctggtgcagtggctcatgcctgtaatcccagcactctgggaggccgaagtgggtggaccacttgatgccagaagttcaagactagcctggccaacatgacaaaaccccatctcttctaaaaatac

SEQ ID NO: 1942 - DNA, 467 bp, Homo sapiens
tacaaatgtgcaaaatgttttgcaatatagaccaatagcctcaatcattgttacagaccttcctttttatccagaccatgctatccctaggtttctaagccagtattctaagatcaaactaaagccacatgagatacagaactgttcgagacaactcatcttagatagatgacggacaaaatattaattattccggcaagtgttaaggccccttacatttctcaataatgtaatcctcttgggagaaaaaaaatgtctgtgagagtttttaatatcgttgtaagggagagtaactgtacatagatctgaaaaggacaaattatatttagtaaatttgtctttagatttgtgttcagtttaaaacaagtttcctctcattcatcatcaaagccattaaataaatggcatcttgttcgactgtctttcctttgtaatatgctcacaggcaaacaaccagaaaaatcttc

SEQ ID NO: 1943 - DNA, 390 bp, Homo sapiens
  misc_feature (307)..(309): n is a, c, g, or t
ctggctcaacgtgtcagcagatggtgacaacgtgcatctggttctgaatgtctctgaggagcagcacttcggcctctccctgtactggaatcaggtccagggccccccaaaaccccggtggcacaaaaacctgactggaccgcagatcattaccttgaaccacacagacctggttccctgccagacttcctgggggccctgcagcagcctcgcgccccgcgttccgggcggctccaagagagagcggagcaagtgtcccgggcccttcagccagccctggatagctacttccatcccccggggatcnnncgccgggacgcggggtgggaccaggggcgggacctggggcgggggacgggacttaaataaaggcagacgctgtttttctaa

SEQ ID NO: 1944 - DNA, 516 bp, Homo sapiens
tgtatataattaaaaataagtatgactgcagccctgcctctgagctgctactctgggcccactgcctatggggtagccctgctctgcaaggaccaggacctctgctgctgctgtgtgtgccctgctgcctcaaaagttgctgcctagcactaccggctcctccttgaatttttttctgggcaaagccaagaactctcccaggctaaaccccaattttgaggctcgcttgccctgcatcgatttcattcctaataacttgccccttgcaacacacagagggccctgtgcagcatcaaaagggctacctttaattgaacatcagccaagactggaaggtaaatcatctatttttcccccatcaccatgatggcctcttttaacccttcccggggcaaagaatacaaaaccctgcatgtggctaaactaacagaggaaggcttcggaggtcccttattcttcaacccagtctcctaacagccattcaacatgttggcggggagggaaaaggaaaaaaaa

SEQ ID NO: 1945 - DNA, 393 bp, Homo sapiens
tttaatcaagaatctttaatagttttccaaaagcttcagggcttgtctttaagtaggcactgcactctgtaaccctatgttcatccacatgtagcccctttgaaggactttacctccaacaaaaccctgctatttttaaaggttcagttgtgtcatctcatctgtgaaagatgtcatcatctctttctctcatccttgtcccttccccactttggaaaagtaatcaccacctccttctcataacacttggtttcccattgccagtataagctatactatggagttgagggactccacaaagttccattaatacataactgtgttgaaggcaagaaaatgaaagctcttgggagaattaaaaagtaatatgttcacttggggttttttccccct

SEQ ID NO: 1946 - DNA, 667 bp, Homo sapiens
acaggcccttggagctgtctgttttactacttttgcttacattctattaatattgagccccatggaacctcagtttattcatctgtaaaatgtggtagtgcgcagggcttctacttcacaaactctggggctgcaatgaaaagggagtccaggccgggtgcagtggctcatgcctgtaatcccaacactttgggaggccaagacgggcagatcacttgaggtcaggagttcaagaccagcctggccaacatggtgaaaccccatctctactaaaaatacaaaaaaattagccgggcatcatggcacgtatctgtaatcccagttactcaggaggctgaggaataacttgaacccaggaggcggaggtggcagtgagccgagatcgcacctctgcactcaagcctgggtgatggagcaagactcttatctcaaaaaaaataaataaataagggggagtctagccaggtgacctcagtcaacagtagtttgttcaagaaaccttgagaagaaagaaagagagcaagaagaacaaggatgccacctggctccatctaggatatcatgatgactctagtgaccacaaagcaattccccattctattatgttgttgaccctgcctgtgaccttgaccctgcctatgacctattccttctaatgtgccagtaa

SEQ ID NO: 1947 - DNA, 409 bp, Homo sapiens
aatctctatttgtaagagtgtctccctttctggggaagagaaggatgaccaaattgcaagagactcctatcaacagagataacaacataaatctgcaaaacaatcgtttctcttatttaccatgctttttgtggtaaccttccttcacatcctttcgagttgaagttgctatgtaagctggagttttaggctccctcttggagagtttttatttctccctggataatcttctgtgtatacatgaggtatacatgttaataaactgtttttctcttgttggtctgtcttgttggagcagtcccagctaagaactcagaaaggtaaagggaaaattcccccaccacacacaatgaataatagaaaattaagttttaaagtgtattttagaaagagcatgttgtcatgacta

SEQ ID NO: 1948 - DNA, 484 bp, Homo sapiens
gcagaagagatagtgctgtcagtttaatccaagtgcagagaaggagttgcaggtgtatccctcaactcaaaaccaagcagaggccctgggtggagagggaacacagtgaatagagatgccatcgagctctacaggacaagccactgtgattttgcagtaactcttgtcctccaggtcagggatcctttttgtgaccacaagaaagatttcttccctggtgtttgggaggtgtaagcgaagtcaggatgcctggatttgccatcacagaggaatgcaaagaatgatagtaaagtttttcatttcacaagagagacttttggtcttctatttttgatatgaaaatagtaatttgaaaataccctttcctttgctgtgctttctgtcaaatttggtaccaccacgacctgatgaactttacttggcaggctgccaaactaaatacatcttggccaagtgcctaataataatgatggctaacgtggtg

SEQ ID NO: 1949 - DNA, 505 bp, Homo sapiens
ttgagcctcaaagggattaggcaaattgtccatggtctcaccagagtgtgtagtgtggcccaccactctcagttttactcagctgtaaattttgtgctccttcttttttcacactgtaaacaacctgtttgcagcctgtttacactagaatagttgtcttgaaccaggtggcagtgagtggtttcatacccagctccattcttgagtctggagttttctgtgatccattttagaggattggtccagatgggacagcccataggtgctgactggggcgctgccccaccccttggtaccaagatcttccaggggagtctagaggctgtacaggggaagttcctggtctgggatgtggagggcttcatctcactgaaaaatcagccatttctgacttgatttccttccctgcctttctctgttagaggagtgctagcatgtttagcccttgctggtctttcacctgagggtacagctgagtagttcacacagcatggcctccctcaca

SEQ ID NO: 1950 - DNA, 166 bp, Homo sapiens
actgatttgtacactttaaaaaggccagttttatggtatgtgaattacatctcagtgcaactgttgtaaaattaaaagaacaaaagaatatctgaaatgctgtgaacagatgaaataaacttcaactggcccaaaatgctatattccagtaagcattactagaccc

SEQ ID NO: 1951 - DNA, 589 bp, Homo sapiens
gggagaaaaatcttttccagaatcttccctgccacaggaacccccgcgtgtctcttagaacaggattgggtcacacagactggttgcaaaatggaatttttagctttttccgctcctctggtaggaggtggacaaggaagaagaagttggaagtggttttcggatgggcattcatcagcattggttaccaggttcacaaaaataaaacacaggctgcaaactgaagagaaccatacagcgagtgttaagttgccatcgcttagtagctagaaatactgcagaatgtcccctcctttgatttccagtgtcatgtggtaattttggttcattctgtttcacataattttaccagctctctaccgaatcttaaattactttttttaatgttatggctagtttctaggaccccactatagttctggattaactcagatgcttgaggggaaaaaaaaaaaagttaaccaaaaaatccacggccagcacggtggcttacgcctgtaatcccagcactttgggaaggcaaggggtggatcacctgaggtcaggagttcgacaccagcctgttcaacatggagaaaccccgtctcta

SEQ ID NO: 1952 - DNA, 2040 bp, Homo sapiens
ggcttctctctgggtttgtggaatttggttctgctgtggtgtatgtatacaggtcagctgctcccccaagccttcaaagcaaggttcccacgcatctttccatgaagtctgtaccaccctttttggtaaaagatccagccacaaaatggatgattttataagccaaaatttgaatactggcaattattcaagtagcccaggctcagccacgtgccgtctgcgtccgtgggctacacacaccccctcttttctcactgcctcctgggcggtgtggatcagctgcagagtgtgatctgcggtcagggagtgccttcccggagttttcgctttcagacccctggtgttaaagacgttctgtgagcgggtggggccgggcgccccagtcacggcggccgccgcctcctcttcccgcaggacgggacagcgcccctgtggatcgcgtcccagatgggccacagcgaggtggtgcgggtgatgctgctgcgcggagccgaccgcgacgctgcgcggaacgatggcacaacagcattattgaaagcagccaacaaagggtataatgatgtcataaaagagttgcttaaattctcacccactcttggtattttgaagaatgggacatcagcgctccatgcagcagtgctcagtggaaacattaaaacagttgcgctgctcctagaagcaggggcagacccatccctgagaaacaaggtgcgatggcagaactgattgggccagattactggtctgggtggtgtcgctgatccatcaagtgcaaggccaatgaacttccggcagaactaaccaaaaatgaacgtatattgcgtctcctgagaagtaaagaaggtcccagaaagagctaacttagctccatatttgacagaaagatagaaagcttaaccacattgtccaaaaagaaattgcatttcaagcagtgttggaaattcttttatgaaaaaaaaagatgcccagaatgcccatcctgtgggtccctgacaaagaagagctacgctctgtgcacgaagtcaagaaccaaacagctcagggaccctcttgccccttcaccatggacttctcatggtgtcctgtaactcatctcccggggggcctggcatgttcacagattccacagaaactcattttcaacaatgctaacttggacctgtcagttaaactctaaggtggacagggttctcagtactaagcaaggagacagaatgctttgttcctttaaaagactgaaaagctgaccttcaatggattgaggcacttttgcttttgtgttaaatgtagatgtgctaaaatatatagatctatcatattttacctacatatgtatgtcattccagtataaaacattctcctctacccaagaaccatagccatgattgttataaatcaatgaagtgtaaacatacattattaaaaaaccacttctgacattccattatgtgctattcaaagatggactattgaactatagaaaagacagactgtgcatttgttcgttgatcctcatcttattcctgacatgtaaaaatcaattttacgtagagtcaacattgtaggtaggttaaaataccagtggcaaatttggaaattcagaaacttataaaccacgagaaatatataggcttgtctctttggtcttttattttggctctattgttgggaatctatttcctattccataagtaagtatacctaacatgctgtggaatcttgagtttccaacaccgtgctgcttgatagaatgactttgaggtccttggataaaatgtgatatatgcaagtacagtatgttgctattactattgcaggaatataaataataaaagactgttattagcacttagtaagtcttcatctatgcatgtttttgagttgactgattccaagaatgaaatatgaggtttattgaattattcctttgaaagggatcaaaacttatattcaatgcactttataattaatggtgtctaaatgcctcagtcagtgcctaactgcacatacaaaaataaaaccttctttctgtaatctacc

SEQ ID NO: 1953 - DNA, 964 bp, Homo sapiens
gagcgggtgcggcggctgctgccgggccgggcggcgggagcgcgcggcgtcggaggccgcccctctgcggaacgccgagagccccgggagagtgaagggccggggaggacaaggcgccccgggcccaaagcgcgccggctcccgctcgggcggccgcggacatgtgcaggatgtccttcaagaaggaaactccacttgccaatgctgcattctgggcagccaggagaggaaacctggcgctgctgaagctgctgttgaacagcggccgggtggacgtggactgcagagacagcgtacggtggttcggtagatgcatgcccagcatgcaccattgccctctgtgggcacaggagcacctcaggaatacattcccctttacaatgcttatttactttttcatgtgtttgcttgctttatcctttttaaaacatccaaggtactgtggtgaacttaaaaacatgctgggggaagtcagaaagaaaaggaaacaatgaaatgcataaaacagaaggcaaccacaatagggaaagaggcacttcactgggaatcagaattggcagattacaagaagaaaagcctgtttagtgaaagaattcaagccaaccacttccatgaaaagatggagataatttagagcacaagtgggctgccatggatgtgggcgttatgtttcttctacaaggatgagaaaacaaaaattgaagcctcccccaggattttatcctttcattacctcttgaaaacataaatacactaattggcaatttaaaaagggaaacaaaaatagatactactgcccactggcagataccacttagagagcttttccatccccagctagaggcaatcgtttttctgtcctcagcaagacttctcatctctgggaccaagaggacctccaatgaggaaagggagcgagcaatgatgttttgattttaggatttgaataaaaatgtttcaaagg

SEQ ID NO: 1954 - DNA, 2316 bp, Homo sapiens
gagcgggtgcggcggctgctgccgggccgggcggcgggagcgcgcggcgtcggaggccgcccctctgcggaacgccgagagccccgggagagtgaagggccggggaggacaaggcgccccgggcccaaagcgcgccggctcccgctcgggcggccgcggacatgtgcaggatgtccttcaagaaggaaactccacttgccaatgctgcattctgggcagccaggagaggaaacctggcgctgctgaagctgctgttgaacagcggccgggtggacgtggactgcagagacagccatggcaccacactcctgatggttgctgcctacgctggccacatagactgtgtgagggaactggttctgcaaggagcagacatcaatctccagagagagtcaggtacaactgccctattctttgccgcccagcaaggccataatgatgtcgtgagatttctctttggatttggagcatccactgaatttaggaccaaagacgggggcaccgccctgtttggctgccagtcagtacgggcacatgcaggtggtggagaccttgctgaagcacggagcaaacatccatgaccaactttatgatggagccactgccctcttcctagctgcccaaggtggttacttggatgttattcgattactgctggcttcaggagcaaaagtcaaccagccaaggcaggacgggacagcgcccctgtggatcgcgtcccagatgggccacagcgaggtggtgcgggtgatgctgctgcgcggagccgaccgcgacgctgcgcggaacgatggcacaacagcattattgaaagcagccaacaaagggtataatgatgtcataaaagagttgcttaaattctcacccactcttggtattttgaagaatgggacatcagcgctccatgcagcagtgctcagtggaaacattaaaacagttgcgctgctcctagaagcaggggcagacccatccctgagaaacaaggtgcgatggcagaactgattgggccagattactggtctgggtggtgtcgctgatccatcaagtgcaaggccaatgaacttccggcagaactaaccaaaaatgaacgtatattgcgtctcctgagaagtaaagaaggtcccagaaagagctaacttagctccatatttgacagaaagatagaaagcttaaccacattgtccaaaaagaaattgcatttcaagcagtgttggaaattcttttatgaaaaaaaaagatgcccagaatgcccatcctgtgggtccctgacaaagaagagctacgctctgtgcacgaagtcaagaaccaaacagctcagggaccctcttgccccttcaccatggacttctcatggtgtcctgtaactcatctcccggggggcctggcatgttcacagattccacagaaactcattttcaacaatgctaacttggacctgtcagttaaactctaaggtggacagggttctcagtactaagcaaggagacagaatgctttgttcctttaaaagactgaaaagctgaccttcaatggattgaggcacttttgcttttgtgttaaatgtagatgtgctaaaatatatagatctatcatattttacctacatatgtatgtcattccagtataaaacattctcctctacccaagaaccatagccatgattgttataaatcaatgaagtgtaaacatacattattaaaaaaccacttctgacattccattatgtgctattcaaagatggactattgaactatagaaaagacagactgtgcatttgttcgttgatcctcatcttattcctgacatgtaaaaatcaattttacgtagagtcaacattgtaggtaggttaaaataccagtggcaaatttggaaattcagaaacttataaaccacgagaaatatataggcttgtctctttggtcttttattttggctctattgttgggaatctatttcctattccataagtaagtatacctaacatgctgtggaatcttgagtttccaacaccgtgctgcttgatagaatgactttgaggtccttggataaaatgtgatatatgcaagtacagtatgttgctattactattgcaggaatataaataataaaagactgttattagcacttagtaagtcttcatctatgcatgtttttgagttgactgattccaagaatgaaatatgaggtttattgaattattcctttgaaagggatcaaaacttatattcaatgcactttataattaatggtgtctaaatgcctcagtcagtgcctaactgcacatacaaaaataaaaccttctttctgtaatctacc

SEQ ID NO: 1955 - DNA, 2384 bp, Homo sapiens
gagcgggtgcggcggctgctgccgggccgggcggcgggagcgcgcggcgtcggaggccgcccctctgcggaacgccgagagccccgggagagtgaagggccggggaggacaaggcgccccgggcccaaagcgcgccggctcccgctcgggcggccgcggacatgtgcaggatgtccttcaagaaggaaactccacttgccaatgctgcattctgggcagccaggagaggaaacctggcgctgctgaagctgctgttgaacagcggccgggtggacgtggactgcagagacagccatggcaccacactcctgatggttgctgcctacgctggccacatagactgtgtgagggaactggttctgcaaggagcagacatcaatctccagagagagtcaggtacaactgccctattctttgccgcccagcaaggccataatgatgtcgtgagatttctctttggatttggagcatccactgaatttaggaccaaagacgggggcaccgccctgtttggctgccagtcagtacgggcacatgcaggtggtggagaccttgctgaagcacggagcaaacatccatgaccaactttatgatggagccactgccctcttcctagctgcccaaggtggttacttggatgttattcgattactgctggcttcaggagcaaaagtcaaccagccaaggcaggacgggacagcgcccctgtggatcgcgtcccagatgggccacagcgaggtggtgcgggtgatgctgctgcgcggagccgaccgcgacgctgcgcggaacgtgagtgcccgagtcgcgcggccaaagagcgaagcctcccggcgcgcctgtgtggagaaaacgggtcttgactgagtctgcagcccacatgggtttcctcccaacctccttccttgagcaggaaaacaaagtcaaggatggcacaacagcattattgaaagcagccaacaaagggtataatgatgtcataaaagagttgcttaaattctcacccactcttggtattttgaagaatgggacatcagcgctccatgcagcagtgctcagtggaaacattaaaacagttgcgctgctcctagaagcaggggcagacccatccctgagaaacaaggccaatgaacttccggcagaactaaccaaaaatgaacgtatattgcgtctcctgagaagtaaagaaggtcccagaaagagctaacttagctccatatttgacagaaagatagaaagcttaaccacattgtccaaaaagaaattgcatttcaagcagtgttggaaattcttttatgaaaaaaaaagatgcccagaatgcccatcctgtgggtccctgacaaagaagagctacgctctgtgcacgaagtcaagaaccaaacagctcagggaccctcttgccccttcaccatggacttctcatggtgtcctgtaactcatctcccggggggcctggcatgttcacagattccacagaaactcattttcaacaatgctaacttggacctgtcagttaaactctaaggtggacagggttctcagtactaagcaaggagacagaatgctttgttcctttaaaagactgaaaagctgaccttcaatggattgaggcacttttgcttttgtgttaaatgtagatgtgctaaaatatatagatctatcatattttacctacatatgtatgtcattccagtataaaacattctcctctacccaagaaccatagccatgattgttataaatcaatgaagtgtaaacatacattattaaaaaaccacttctgacattccattatgtgctattcaaagatggactattgaactatagaaaagacagactgtgcatttgttcgttgatcctcatcttattcctgacatgtaaaaatcaattttacgtagagtcaacattgtaggtaggttaaaataccagtggcaaatttggaaattcagaaacttataaaccacgagaaatatataggcttgtctctttggtcttttattttggctctattgttgggaatctatttcctattccataagtaagtatacctaacatgctgtggaatcttgagtttccaacaccgtgctgcttgatagaatgactttgaggtccttggataaaatgtgatatatgcaagtacagtatgttgctattactattgcaggaatataaataataaaagactgttattagcacttagtaagtcttcatctatgcatgtttttgagttgactgattccaagaatgaaatatgaggtttattgaattattcctttgaaagggatcaaaacttatattcaatgcactttataattaatggtgtctaaatgcctcagtcagtgcctaactgcacatacaaaaataaaaccttctttctgtaatctacc

SEQ ID NO: 1956 - DNA, 2353 bp, Homo sapiens
gagcgggtgcggcggctgctgccgggccgggcggcgggagcgcgcggcgtcggaggccgcccctctgcggaacgccgagagccccgggagagtgaagggccggggaggacaaggcgccccgggcccaaagcgcgccggctcccgctcgggcggccgcggacatgtgcaggatgtccttcaagaaggaaactccacttgccaatgctgcattctgggcagccaggagaggaaacctggcgctgctgaagctgctgttgaacagcggccgggtggacgtggactgcagagacagccatggcaccacactcctgatggttgctgcctacgctggccacatagactgtgtgagggaactggttctgcaaggagcagacatcaatctccagagagaggacgggggcaccgccctgtttggctgccagtcagtacgggcacatgcaggtggtggagaccttgctgaagcacggagcaaacatccatgaccaactttatgatggagccactgccctcttcctagctgcccaaggtggttacttggatgttattcgattactgctggcttcaggagcaaaagtcaaccagccaaggcaggacgggacagcgcccctgtggatcgcgtcccagatgggccacagcgaggtggtgcgggtgatgctgctgcgcggagccgaccgcgacgctgcgcggaacgtgagtgcccgagtcgcgcggccaaagagcgaagcctcccggcgcgcctgtgtggagaaaacgggtcttgactgagtctgcagcccacatgggtttcctcccaacctccttccttgagcaggaaaacaaagtcaaggatggcacaacagcattattgaaagcagccaacaaagggtataatgatgtcataaaagagttgcttaaattctcacccactcttggtattttgaagaatgggacatcagcgctccatgcagcagtgctcagtggaaacattaaaacagttgcgctgctcctagaagcaggggcagacccatccctgagaaacaaggtgcgatggcagaactgattgggccagattactggtctgggtggtgtcgctgatccatcaagtgcaaggccaatgaacttccggcagaactaaccaaaaatgaacgtatattgcgtctcctgagaagtaaagaaggtcccagaaagagctaacttagctccatatttgacagaaagatagaaagcttaaccacattgtccaaaaagaaattgcatttcaagcagtgttggaaattcttttatgaaaaaaaaagatgcccagaatgcccatcctgtgggtccctgacaaagaagagctacgctctgtgcacgaagtcaagaaccaaacagctcagggaccctcttgccccttcaccatggacttctcatggtgtcctgtaactcatctcccggggggcctggcatgttcacagattccacagaaactcattttcaacaatgctaacttggacctgtcagttaaactctaaggtggacagggttctcagtactaagcaaggagacagaatgctttgttcctttaaaagactgaaaagctgaccttcaatggattgaggcacttttgcttttgtgttaaatgtagatgtgctaaaatatatagatctatcatattttacctacatatgtatgtcattccagtataaaacattctcctctacccaagaaccatagccatgattgttataaatcaatgaagtgtaaacatacattattaaaaaaccacttctgacattccattatgtgctattcaaagatggactattgaactatagaaaagacagactgtgcatttgttcgttgatcctcatcttattcctgacatgtaaaaatcaattttacgtagagtcaacattgtaggtaggttaaaataccagtggcaaatttggaaattcagaaacttataaaccacgagaaatatataggcttgtctctttggtcttttattttggctctattgttgggaatctatttcctattccataagtaagtatacctaacatgctgtggaatcttgagtttccaacaccgtgctgcttgatagaatgactttgaggtccttggataaaatgtgatatatgcaagtacagtatgttgctattactattgcaggaatataaataataaaagactgttattagcacttagtaagtcttcatctatgcatgtttttgagttgactgattccaagaatgaaatatgaggtttattgaattattcctttgaaagggatcaaaacttatattcaatgcactttataattaatggtgtctaaatgcctcagtcagtgcctaactgcacatacaaaaataaaaccttctttctgtaatctacc

SEQ ID NO: 1957 - DNA, 1972 bp, Homo sapiens
ggcttctctctgggtttgtggaatttggttctgctgtggtgtatgtatacaggtcagctgctcccccaagccttcaaagcaaggttcccacgcatctttccatgaagtctgtaccaccctttttggtaaaagatccagccacaaaatggatgattttataagccaaaatttgaatactggcaattattcaagtagcccaggctcagccacgtgccgtctgcgtccgtgggctacacacaccccctcttttctcactgcctcctgggcggtgtggatcagctgcagagtgtgatctgcggtcagggagtgccttcccggagttttcgctttcagacccctggtgttaaagacgttctgtgagcgggtggggccgggcgccccagtcacggcggccgccgcctcctcttcccgcaggacgggacagcgcccctgtggatcgcgtcccagatgggccacagcgaggtggtgcgggtgatgctgctgcgcggagccgaccgcgacgctgcgcggaacgatggcacaacagcattattgaaagcagccaacaaagggtataatgatgtcataaaagagttgcttaaattctcacccactcttggtattttgaagaatgggacatcagcgctccatgcagcagtgctcagtggaaacattaaaacagttgcgctgctcctagaagcaggggcagacccatccctgagaaacaaggccaatgaacttccggcagaactaaccaaaaatgaacgtatattgcgtctcctgagaagtaaagaaggtcccagaaagagctaacttagctccatatttgacagaaagatagaaagcttaaccacattgtccaaaaagaaattgcatttcaagcagtgttggaaattcttttatgaaaaaaaaagatgcccagaatgcccatcctgtgggtccctgacaaagaagagctacgctctgtgcacgaagtcaagaaccaaacagctcagggaccctcttgccccttcaccatggacttctcatggtgtcctgtaactcatctcccggggggcctggcatgttcacagattccacagaaactcattttcaacaatgctaacttggacctgtcagttaaactctaaggtggacagggttctcagtactaagcaaggagacagaatgctttgttcctttaaaagactgaaaagctgaccttcaatggattgaggcacttttgcttttgtgttaaatgtagatgtgctaaaatatatagatctatcatattttacctacatatgtatgtcattccagtataaaacattctcctctacccaagaaccatagccatgattgttataaatcaatgaagtgtaaacatacattattaaaaaaccacttctgacattccattatgtgctattcaaagatggactattgaactatagaaaagacagactgtgcatttgttcgttgatcctcatcttattcctgacatgtaaaaatcaattttacgtagagtcaacattgtaggtaggttaaaataccagtggcaaatttggaaattcagaaacttataaaccacgagaaatatataggcttgtctctttggtcttttattttggctctattgttgggaatctatttcctattccataagtaagtatacctaacatgctgtggaatcttgagtttccaacaccgtgctgcttgatagaatgactttgaggtccttggataaaatgtgatatatgcaagtacagtatgttgctattactattgcaggaatataaataataaaagactgttattagcacttagtaagtcttcatctatgcatgtttttgagttgactgattccaagaatgaaatatgaggtttattgaattattcctttgaaagggatcaaaacttatattcaatgcactttataattaatggtgtctaaatgcctcagtcagtgcctaactgcacatacaaaaataaaaccttctttctgtaatctacc

SEQ ID NO: 1958 - DNA, 2176 bp, Homo sapiens
ggcttctctctgggtttgtggaatttggttctgctgtggtgtatgtatacaggtcagctgctcccccaagccttcaaagcaaggttcccacgcatctttccatgaagtctgtaccaccctttttggtaaaagatccagccacaaaatggatgattttataagccaaaatttgaatactggcaattattcaagtagcccaggctcagccacgtgccgtctgcgtccgtgggctacacacaccccctcttttctcactgcctcctgggcggtgtggatcagctgcagagtgtgatctgcggtcagggagtgccttcccggagttttcgctttcagacccctggtgttaaagacgttctgtgagcgggtggggccgggcgccccagtcacggcggccgccgcctcctcttcccgcaggacgggacagcgcccctgtggatcgcgtcccagatgggccacagcgaggtggtgcgggtgatgctgctgcgcggagccgaccgcgacgctgcgcggaacgtgagtgcccgagtcgcgcggccaaagagcgaagcctcccggcgcgcctgtgtggagaaaacgggtcttgactgagtctgcagcccacatgggtttcctcccaacctccttccttgagcaggaaaacaaagtcaaggatggcacaacagcattattgaaagcagccaacaaagggtataatgatgtcataaaagagttgcttaaattctcacccactcttggtattttgaagaatgggacatcagcgctccatgcagcagtgctcagtggaaacattaaaacagttgcgctgctcctagaagcaggggcagacccatccctgagaaacaaggtgcgatggcagaactgattgggccagattactggtctgggtggtgtcgctgatccatcaagtgcaaggccaatgaacttccggcagaactaaccaaaaatgaacgtatattgcgtctcctgagaagtaaagaaggtcccagaaagagctaacttagctccatatttgacagaaagatagaaagcttaaccacattgtccaaaaagaaattgcatttcaagcagtgttggaaattcttttatgaaaaaaaaagatgcccagaatgcccatcctgtgggtccctgacaaagaagagctacgctctgtgcacgaagtcaagaaccaaacagctcagggaccctcttgccccttcaccatggacttctcatggtgtcctgtaactcatctcccggggggcctggcatgttcacagattccacagaaactcattttcaacaatgctaacttggacctgtcagttaaactctaaggtggacagggttctcagtactaagcaaggagacagaatgctttgttcctttaaaagactgaaaagctgaccttcaatggattgaggcacttttgcttttgtgttaaatgtagatgtgctaaaatatatagatctatcatattttacctacatatgtatgtcattccagtataaaacattctcctctacccaagaaccatagccatgattgttataaatcaatgaagtgtaaacatacattattaaaaaaccacttctgacattccattatgtgctattcaaagatggactattgaactatagaaaagacagactgtgcatttgttcgttgatcctcatcttattcctgacatgtaaaaatcaattttacgtagagtcaacattgtaggtaggttaaaataccagtggcaaatttggaaattcagaaacttataaaccacgagaaatatataggcttgtctctttggtcttttattttggctctattgttgggaatctatttcctattccataagtaagtatacctaacatgctgtggaatcttgagtttccaacaccgtgctgcttgatagaatgactttgaggtccttggataaaatgtgatatatgcaagtacagtatgttgctattactattgcaggaatataaataataaaagactgttattagcacttagtaagtcttcatctatgcatgtttttgagttgactgattccaagaatgaaatatgaggtttattgaattattcctttgaaagggatcaaaacttatattcaatgcactttataattaatggtgtctaaatgcctcagtcagtgcctaactgcacatacaaaaataaaaccttctttctgtaatctacc

SEQ ID NO: 1959 - DNA, 968 bp, Homo sapiens
agactcaggaggctcagtgggtgagaaaatgcaaagtggcttcacagacacagggctgtgggagcagatcgacggggaacttgggagatgaacttcagggccttccgacgccttgtctcaggaacatgctttgagaaaaatggtagcatcctttccataactcagtctctcttccctagtttccctgaagtgtgacgttttagtatctggagctcagtgatccccatgaatgagggataaagtttcactcttggtattttctaactagtgctagggaaagtcctgagacacgatcacagccactgcttggcatacagggcctccacccaataagcaaactggagattcctcagcctctcgtggacacccacatctcattcttctcacagcagagaagctctcccttcagcctgagctgtcttctttctgctgcagtgcagcctgctccctcctaccctggcctcaaggaaggtgggaaacatcttctgcatttcaaagtcctcactttgacttatttggccttcatcttggcatggaaggtggcaggcagaatggaaatactccccccaaacaaaacagatattcttgcgtgtgtaagggcagaagggacaagctctctatcccatgagactaggggccggagcccacctgcctttccccacaacttttcctgctcaaacccactcctcttgacacactggaatctgtattatatatatttttaagaaaatacaatgatggttgtctggttttgttgtttttacaggtgttgtggaataaaaactgtaagaaaattaagtatttaaaatgttccaataaagtggggttttttgttattctaatatattattgtgtacctattgtaaatatgaaacactcctattttgcaagctgaggacacaatttgtactgttgttatatataaataaagtttactgaattaaaaaaaccttaaatctttaaataaa

SEQ ID NO: 1960 - DNA, 294 bp, Homo sapiens
gactagtgaagcattaacagaaatataatgtgcataaagcatttaagaagtcaaattaacttgatttaacttgacattctcagtcatttaagaaaaagtgttcatcccaaaatacactcgtaaatgtgactagcaaagagacctatttctatcaactcaactgtgttacagtcggatacaacttttactacaaaacatgtaaactggatacagtttccaaaggaatcacgttccacctacaggggaatttagctttaaaagtacagaatgaatgtttaataaatgccccataat

SEQ ID NO: 1961 - DNA, 258 bp, Homo sapiens
acagaggattaagcataatagaagtgtcttgctctcatgttaaaggagtgtaaaggtggacagcctagggatgtatgtcagtgatatggtagagtgaaggatgtttttatctttctgctccatcattctaatgcatggcctccacagttaaggttgctttatggttcaaaatatttattggatttccactgatcacactttatggcaggcaaaaaagggagagcagggggagcagaagggtacaaatgagccccttcc

SEQ ID NO: 1962 - DNA, 1158 bp, Homo sapiens
acagtctccactgaaaggctaaatgggaggatcttcccccgtgacctcaaaagctattgtggatgctgatggaagaatttatattcggaactggcagggtggcatcctgtctgggggctttgagaagaacccgaaaccaattttcactgagggcaagaaccagctggagattcagaatctacaggaagactgggatcactttgagcctctgttgagttcccttctgaggaggatgccagaattagagactctggagatcatgaagttggtgaactgcccagagaccttcacaccagacatgaggtgcatcatgggcgagtctcctgcagtgcagggctactttgtcctggcaggaatgaactctgctggcctttcatttggtggaggagccggaaagtaccttgccgaatggatggtacatggttatccctcagaaaacgtttgggaattggacctgaaacgttttggagccctccagagcagccgcacctttctgcgccaccgggtcatggaagtcatgcctttgatgtatgatctgaaggttccccgctgggacttccagaccggtaggcagttacgcacctctcctctctacgaccggctggatgcacagggagccaggtggatggagaaacatggatttgagaggccaaagtactttgttccccccgacaaggacctcctggcattggagcagagcaagactttctataagccagattggtttgacatcgtggagtctgaagtcaagtgctgtaaggaagctgtgtgtgtcattgacatgtcctctttcacaaagtttgagataacagtaagtatttgggaaccaaaaagtaatagattaggaaactttacatatttattgaatgccttttgtttttcatcttcaaaactgattcctgactgggtgcagtgggtcatgcctgtattcccagcactttgggaggccaagggggcgtggatcacctgaggtcagagttccagaccagcctggccaagatggtgaaaccccgtttctactaaaaatacaaaaattaaggccaggagtggtggctcatgcctgtaatcccagcagtttgggaggccgagacgggtggatcacctgagatcaggagttcaagaccagcctggccaacatggcgaaaccgtctctaccaa

SEQ ID NO: 1963 - DNA, 595 bp, Homo sapiens
ctgagtccaggcgttttatcaaaaggacctcctttggttcccatgagctcctttgactagctggtaaatatctcttcctttgatctcaaagtaatttttatgtcttaaaaaatgtagtattgctccccatccaaataattgaactaaagcaggctgacttcccacacctgacactgtagcaagagcacacataagccacttggaattaatctcaagaggctgaacttgctcatttttatttctgttcctcttcccacccacaaatcaacctgtccatttgtagtgggcatacgagctgggtctgtccaacgaggagccggttagtatcccgctacatgcctgcgaacacttctacctcctgactcgccccttggagacccctctgcagagcagcacaccaagtgaggacttgcacttttttaaaaaatcttgtttctttgccagtatcctgtcctctgaaaaggaaaactttctgctaaggacagcctgtgtctgaaagagtctttcatttctagagcatgttacagggaggtggacccaattctgacttttctttattaactctttatgaaaggatggccaaaatttccattaa

SEQ ID NO: 1964 - DNA, 596 bp, Homo sapiens
aagtgctaacctgctcataccatggatatgataccctggacactagttaagtcttcccctcattcaatgcaactgggctcatgatttcaggtgtggattaaacttccaaggtgtgttttcaccttgagcttctcaagtcctgtggcggaaaatattaccttaagtccaaagggcattaattggccgggcatggtggtgcatgcctgtaatcccagctacttgagaggctgaggcaggagaattgcttgaacccaggaggcagagagcgagccaagatcgcacgactacactccacccttggcgacaaagcaagactccatctcaaaaataaaataaaaaaataaattaaagcattgacttgactttgtcagtgtttcttctgggtggagaacctgctgcacatgccttcattctggaacatcagatgaaacaccaactctttctttaccttggaacaggtgttcagatctatgaccggacatctgttcttcatgtaatggtcaaaaaaggtcaagttactggagtggagaccgataaaggacagattgaatgccagtattttgtcaactgtgctggccaggtaggtcagcaccaac

SEQ ID NO: 1965 - DNA, 403 bp, Homo sapiens
gggctcatttttcttacaggttacacaaggacaggctcaatctttctggcccaaactcaggaccgactgatctccctgaagcgcatcaacgcagggctgaatgttataggtatcccttctgagatcatctcccccaagaaagtggccgagcttcaccatctcctcaacgtgcacgacctggtgggggccatgcatgttcccgaggatgcagtggtgtcttccgctgacgtggctcttgccctggcaagtgctgcctcccaaaatggtgttcagatctatgaccggacatctgttcttcatgtaatggtcaaaaaaggtcaagttactggagtggagaccgataaaggacagattgaatgccagtattttgtcaactgtgctggccaggtaggtcagcaccaac

SEQ ID NO: 1966 - DNA, 1570 bp, Homo sapiens
gggctcatttttcttacaggttacacaaggacaggctcaatctttctggcccaaactcaggaccgactgatctccctgaagcgcatcaacgcagggctgaatgttataggtatcccttctgagatcatctcccccaagaaagtggccgagcttcaccatctcctcaacgtgcacgacctggtgggggccatgcatgttcccgaggatgcagtggtgtcttccgctgacgtggctcttgccctggcaagtgctgcctcccaaaatgtgggcatacgagctgggtctgtccaacgaggagccggttagtatcccgctacatgcctgcgaacacttctacctcctgactcgccccttggagacccctctgcagagcagcacaccaactattgtggatgctgatggaagaatttatattcggaactggcagggtggcatcctgtctgggggctttgagaagaacccgaaaccaattttcactgagggcaagaaccagctggagattcagaatctacaggaagactgggatcactttgagcctctgttgagttcccttctgaggaggatgccagaattagagactctggagatcatgaagttggtgaactgcccagagaccttcacaccagacatgaggtgcatcatgggcgagtctcctgcagtgcagggctactttgtcctggcaggaatgaactctgctggcctttcatttggtggaggagccggaaagtaccttgccgaatggatggtacatggttatccctcagaaaacgtttgggaattggacctgaaacgttttggagccctccagagcagccgcacctttctgcgccaccgggtcatggaagtcatgcctttgatgtatgatctgaaggttccccgctgggacttccagaccggtaggcagttacgcacctctcctctctacgaccggctggatgcacagggagccaggtggatggagaaacatggatttgagaggccaaagtactttgttccccccgacaagggctagaatgtgttcacagaagaaaaagaaccacgtggactacactaaactctacagggccttgtgatttttccattccgtagacctcctggcattggagcagagcaagactttctataagccagattggtttgacatcgtggagtctgaagtcaagtgctgtaaggaagctgtgtgtgtcattgacatgtcctctttcacaaagtttgagataacagtaagtatttgggaaccaaaaagtaatagattaggaaactttacatatttattgaatgccttttgtttttcatcttcaaaactgattcctgactgggtgcagtgggtcatgcctgtattcccagcactttgggaggccaagggggcgtggatcacctgaggtcagagttccagaccagcctggccaagatggtgaaaccccgtttctactaaaaatacaaaaattaaggccaggagtggtggctcatgcctgtaatcccagcagtttgggaggccgagacgggtggatcacctgagatcaggagttcaagaccagcctggccaacatggcgaaaccgtctctaccaa

SEQ ID NO: 1967 - DNA, 387 bp, Homo sapiens
ttcaagtgattctcccacctcaggctcccaagcagctgggactacagacatgtgccaccacgcccagctaatttcttgtgtttttaatagagatggggtttcaccatgttggccagtctggttttgaactcctgacctcaagtgatccatctaccttggcctcccaaaatgctgggattacaggcgtgagccaccatgcctgtccctatatattttctttttataatgcatagacataatagttgtcttgtaagtttttgtactgggttggagaagagtaaaataattttaagaaggtattttactattaatattgttggtgtggcagattggaagtatgatatatagactctggttactctacgtaggatagaagctacaatcttc

SEQ ID NO: 1968 - DNA, 471 bp, Homo sapiens
caatgcatgctcacagtccaagggagagggaaagctgtctaacaggattggttttcccgtgtgctttataagcagatgagtagaggagacagctcttattgtcctagtggcaattgggataggctgcaaagtttgttagggtggaggcttattccgggaccaagggagcccaaagaaacaagctcctgccaggcgcggtggctcacgcctgtaatcccagcactttgggaggctgaggcaggtggatcacctgaggtcaggagtttgagaccagcctggccaacatggtgaaaccccgtctccatgaaaaatacaaaaattacccgggcatggtggcgggcacctgtaatcccagctactagggaggctgaggcaggaaaatggcttgaacctcggaagtggaggtggccgttagccgagatcacgccactgcactccagcctgggcaacagagcaagactctgccttaaa

SEQ ID NO: 1969 - DNA, 343 bp, Homo sapiens
gtttgagaccaggctggccaatatggtgaaacccagtatctactaaaaacaaaaacaaaaatcagctgggtatggtggcacatgcccgtgtcccaggtactcaggaggctgaagcaggagaatcgcttgaacccaggaagcagaggtggcagtgagctaagatggcaccattgcattccagcctgggtgacagagcaagactccatctcaaaaaaaaaaaaaaaaaaaaaaaaagtggccgggagctgaagagcagctccaggagaggctcaggagggccaggcacaacccaggttcaccttgcaaaactgctctggttatgtttcttgtttctttttctttt

SEQ ID NO: 1970 - DNA, 380 bp, Homo sapiens
cttcttccttttcttgggtgtatttttttttcctgactctaatcaacagagataaatatcactataaagacttccttttctggccaagtatagtggccaatgcctataatcccagcactttgggaggccaaggcagaagaatcacttgagcccaggagatcaagaccagcctgggcaacataggaagaccctgtctctacaaaaataataataaattagccaggcatggtgggtgcacgctggtggtcccagctactcaggaggctgaggtaggaggatccgtctgagcctgggagatggaggctgcagtgagccctgattataccactgcaacgccagcgtgggtaagagaattagaccctgagataaaaaaaaaaaag

SEQ ID NO: 1971 - DNA, 548 bp, Homo sapiens
tgagggaaaaaatatttcttcttttattctaataatttttaaaaattttttgccaaaaatttttccactaaatagatgcattcaaattctatgtggtaatgtccttgaaataagtgctcccgtaaggctctcccaccaactcactgcacagttaggttaagtggtttcattttggcttttaatttttagggattgcttttacttataaaacagaattgaatatagttatctaagatagtaacctgatgccaaaacaaagcatttgggtagtttagcttttgttgctctctgtgtcctagtctcccttgtaaacgtggattgggaaatccacagtattatcacactgatagatcaacatgataatgtgttacaaacaagtttcagcttattccaagaatagaaccctccctgttatcattctaataaagatattgtaattcatgtttataaactgaaggggaaaaattatatgatcatctcaatagatggaaaatatcatttaataccaagtaaaacccattaaaaaggtttgcatgaaaaattttata

SEQ ID NO: 1972 - DNA, 1897 bp, Homo sapiens
ggaacatattgggaaggagggatccgggctgtaggctttgtgcatagcccacttctgaaaaacaagggaacagtgtgtaaggaacttgtgcacatcactgactggtaccccactctcatttcactggctgaaggacagattgatgaggacattcaactagatggctatgatatctgggagaccataagtgagggtcttcgctcaccccgagtagatattttgcataacattgaccccatatacaccaaggcaaaaaatggctcctgggcagcaggctatgggatctggaacactgcaatccagtcagccatcagagtgcagcactggaaattgcttacaggaaatcctggctacagcgactgggtcccccctcagtctttcagcaacctgggaccgaaccggtggcacaatgaacggatcaccttgtcaactggcaaaagtgtatggcttttcaacatcacagccgacccatatgagagggtggacctatctaacaggtatccaggaatcgtgaagaagctcctacggaggctctcacagttcaacaaaactgcagtgccggtcaggtatccccccaaagaccccagaagtaaccctaggctcaatggaggggtctggggaccatggtataaagaggaaaccaagaaaaagaagccaagcaaaaatcaggctgagaaaaagcaaaagaaaagcaaaaaaaagaagaagaaacagcagaaagcagtctcaggttcaacttgccattcaggtgttacttgtggataagcacaaatatttcctgtttggttaaactttaatcagttcttatctttcatctgtttcctaggtaaaccagcaaatttggctcgataatatcgctggcctaagcgtcaggcttgttttcatgctgtgccactccagagacttctgccacctggccgccacactgaaaactgtcctgctcagtgccaaggtgctactcttgcaagccacacttagagagagtggagatgtttatttctctcgctcctttagaaaacgtggtgagtcctgagttccactgctgtgcttcagtcaactgaccaaacactgctttgaattataggaggagaacaataacctaccatccgcaagcatgctaatttgatggaagttacagggtagcatgattaaaactacctttgataaattacagtcaaagattgtgtcacctcaaaggccttgaagaatatattttcttggtgaatttttgtatgtctgtcatatgacacttgggttttttaattaattctattttatatatataaatatatgtttcttttcctgtgaaaagctgtttttctcacatgtgaacagcttgcacctcattttaccatgcgtgagggaatggcaaataagaatgtttgagcacactgcccacaatgaatgtaactattttctaaacactttactagaagaacatttcagtataaaaaacctaatttatttttacagaaaaatattttgttgtttttataaaaagttatgcaaatgacttttatttttatttcctgcataccattagaagaattttatttcatttcttcaaattatcaagcactgtaatactataaattaatgtaatactgtgtgaattcagactataaaaaacatcattcagaaaactttataatcgtcattgttcaatcaagattttgaatgtaataagatgaatatattccttacaaattacttggaaattcaatgtttgtgcagagttgagacaactttattgtttctatcataaactatttatgtatcttaattattaaaatgatttactttatggcactagaaaatttactgtggcttttctgatctaacttctagctaaaattgtatcattggccctaaaaaataaaaatctttactaataggc

SEQ ID NO: 1973 - DNA, 1801 bp, Homo sapiens
ggaacatattgggaaggagggatccgggctgtaggctttgtgcatagcccacttctgaaaaacaagggaacagtgtgtaaggaacttgtgcacatcactgactggtaccccactctcatttcactggctgaaggacagattgatgaggacattcaactagatggctatgatatctgggagaccataagtgagggtcttcgctcaccccgagtagatattttgcataacattgaccccatatacaccaaggcaaaaaatggctcctgggcagcaggctatgggatctggaacactgcaatccagtcagccatcagagtgcagcactggaaattgcttacaggaaatcctggctacagcgactgggtcccccctcagtctttcagcaacctgggaccgaaccggtggcacaatgaacggatcaccttgtcaactggcaaaagtgtatggcttttcaacatcacagccgacccatatgagagggtggacctatctaacaggtatccaggaatcgtgaagaagctcctacggaggctctcacagttcaacaaaactgcagtgccggtcaggtatccccccaaagaccccagaagtaaccctaggctcaatggaggggtctggggaccatggtataaagaggaaaccaagaaaaagaagccaagcaaaaatcaggctgagaaaaagcaaaagaaaagcaaaaaaaagaagaagaaacagcagaaagcagtctcaggtaaaccagcaaatttggctcgataatatcgctggcctaagcgtcaggcttgttttcatgctgtgccactccagagacttctgccacctggccgccacactgaaaactgtcctgctcagtgccaaggtgctactcttgcaagccacacttagagagagtggagatgtttatttctctcgctcctttagaaaacgtggtgagtcctgagttccactgctgtgcttcagtcaactgaccaaacactgctttgaattataggaggagaacaataacctaccatccgcaagcatgctaatttgatggaagttacagggtagcatgattaaaactacctttgataaattacagtcaaagattgtgtcacctcaaaggccttgaagaatatattttcttggtgaatttttgtatgtctgtcatatgacacttgggttttttaattaattctattttatatatataaatatatgtttcttttcctgtgaaaagctgtttttctcacatgtgaacagcttgcacctcattttaccatgcgtgagggaatggcaaataagaatgtttgagcacactgcccacaatgaatgtaactattttctaaacactttactagaagaacatttcagtataaaaaacctaatttatttttacagaaaaatattttgttgtttttataaaaagttatgcaaatgacttttatttttatttcctgcataccattagaagaattttatttcatttcttcaaattatcaagcactgtaatactataaattaatgtaatactgtgtgaattcagactataaaaaacatcattcagaaaactttataatcgtcattgttcaatcaagattttgaatgtaataagatgaatatattccttacaaattacttggaaattcaatgtttgtgcagagttgagacaactttattgtttctatcataaactatttatgtatcttaattattaaaatgatttactttatggcactagaaaatttactgtggcttttctgatctaacttctagctaaaattgtatcattggccctaaaaaataaaaatctttactaataggc

SEQ ID NO: 1974 - DNA, 401 bp, Homo sapiens
gagagtttaactggctaagaccaggccagtacatgagcgcaggcccaagatccgaaagggaaagtcctgaacgcccccttccccctgtcttttcggcggggctttgggagtttgcagggtgttctgagtgtttgggcctcagggattctcacctccgggagattccaggagctgtagggggtggaatgcgagtaggaggagagttgcagatggatatcgtggcctgctgatggttttggagcccaggtccagacatttcttgattgaagtagacattcaagaagtgtgaaatgcacagtcagaaaatctgggacttctctttttccttgtcagaatcaggattgaaaaatgattcagcggggaatagcttctttacagtgagagcccgtgttattgatttt

SEQ ID NO: 1975 - DNA, 326 bp, Homo sapiens
tcttttacgttcctggataacctgtaattttacaatactgatctagaaaccagaagctgccacaaatgatggtgctaaatctgtgcttgaaatggtgggacagaaatgcaaggtgactttacaaaggatggatgatttgagtctctgttcctatatccatgatttgactgtgcaaaagaagtccttactacttctccacccaccaattctggtgacagttagggggtttgtggccctagcctacatcattctcccctgctggatgcttcctgctcttgaacatcggactccaggttcttcagttttgggactcggactggctctcc

SEQ ID NO: 1976 - DNA, 511 bp, Homo sapiens
tatgcctccacatatgcacagcctcccccattatcagcagttcttcaccagagtggtacgtttgttacaatcgaagaacctacgttggtacatcataatcgcccaaagactctagtttagactagggttcactcttagtattgtattttgtgttgttttagacaaacctgtaatgacgggtatcattatagtatcatacagaatagtttcactgccccgaaatttccctgtgcttctccatctgtctcccacaccaacccctggcaaccactgacctttgtattttgtttgttggttcattttttttagatacctcatctactatttgatgatctttttactgtctccatagttttaccttttccagaatgtcatatggttggaatcatacactgtgttgccttttcaggttgccttcttccacttagtatagtgctaaatgatacaattggccctccatatctataagtgccatgtctgtggattcagccaactgtggattggagatatt

SEQ ID NO: 1977 - DNA, 254 bp, Homo sapiens
tacatctgaaaaatgaattaggatacccaagttttagtctcaattcagtcaaaactcatttgttgagtttctcctttaagccaagcaccaggctgcaaatatcaagtcttggctctataactgaaaaggaacattatgtagagaggcactggccaatacagcagccacagggcctcatggggcaagtgagcacttgaaacatgcacagaataaatgaaatttttaacattattaaatttaaatatcaaagtgat

SEQ ID NO: 1978 - DNA, 416 bp, Homo sapiens
ccaaattctgacagcatgcttatacgttatctcaacaggaaagaaaagagagtggacttgtcatgtggctctatatttgactctggcttattttatcaatgccataaaggcatagaagacttatcatatttacagacagcacaaggctggtagggataacaagtaaaggataaatcccatataggctgaatattgtgtcaaaactaacttaattgtgatgaaagtaaagccttatatctaggttcatttggtataggactaggtctcttacatgtgattgatctaagggttttagttgtctgcactttaaccaagtcatgtgatgtagcagccaaagaatgctttgcttgcaggagctaggaaaaagaggatttaaaatatatataaaaaagaaaataaaaaagaaaaagaaatag

SEQ ID NO: 1979 - DNA, 491 bp, Homo sapiens
agccctctttactctctgaaacttagatatcttcagatttcccttggaagttcaatgcccttctatcatatctgctaatatcttggtgttctcccactcttctgtgccaggctccttaactcatatatgtgagtcttcaaagattcacggaagatgtttattaagaaaaaaactgtgcatggacttcaaaacttttttgcaccaaaataaactcatactaacctgttataatgtatctgaacaggatatagtttgagatactaagaaggataagacattagtttacaaagagtctctatcagagcaacatgagttctgctaaaattaagaacaaacatctattgatggtaaagcttgggtggaagaacagtgaaatcactgatgctttttgaaaagtttctggggacaaagccccaaagaaaccagcaatttacaaatagactgcttgttttaagaagggaatagtgatgttgaagatgaagcgtgcagca

SEQ ID NO: 1980 - DNA, 439 bp, Homo sapiens
tgaatgttgtatacgttatttcattcactccccatatataaactgccaggctggtattggtatctgcatctcacagatgaggcaaatgaaacttggagaaatgaagtaacttatttaaaaacacacagcttggctgggtgaggtggttcacgcctgtaatcccagcaactttgggaggccgaggtgggtggatcccttgaggtcaggagttcaagaccagtctggccaacatggtgaaaccctgtctgtactaaaaatacaaaaatgagccagcatggtggcaggcacctgtaatcccagctacttgggaagctgaggcaggagaatgacttgaaccagggaggcggaggttgcagtgagccaagatcacaccactgcactccagcatgggtgacaagagtgaaactctgtctcaaaaaacaaaacaacaaaacaaaac

SEQ ID NO: 1981 - DNA, 266 bp, Homo sapiens
cagagctgagacaagaaatttcacagctttttcctattgtggaacaaacaatctgagtttaaaacatattgacttactgaattaaagtaagtcactccacctcttaaagactcagtcacacatccaattttccaggggcctgtggccactgagtgtcacagagtgtggaaggctgtaggggccagtccagaggagagaccacatggcctgattgcccagtagaaattgatattcacaaaagaatgctggctcaaaaaaataaattg

SEQ ID NO: 1982 - DNA, 948 bp, Homo sapiens
aatgagtcatagtcgaggccggtgttaatcaggcgagggcatgcttattgggaagcacaggtgggcaattcctcttggtacctctatgatggagaagacgatacaccctcctaccgtggattcctcattttctggggctatatcattgttctcaacaccatggtacccatctctctctatgtcagcgtggaagtgattcgtcttggacagagtcacttcatcaactgggacctgcaaatgtactatgctgagaaggacacacccgcaaaagctagaaccaccacactcaatgaacagctcgggcagatccattatatcttctctgataagacggggacactcacacaaaatatcatgacctttaaaaagtgctgtatcaacgggcagatatatggggaccatcgggatgcctctcaacacaaccacaacaaaatagagcaagttgattttagctggaatacatatgctgatgggaagcttgcattttatgaccactatcttattgagcaaatccagtcagggaaagagccagaagtacgacagttcttcttcttgctcgcagtttgccacacagtcatggtggataggactgatggtcagctcaactaccaggcagcctctcccgatgaaggtgccctggtaaacgctgccaggaactttggctttgccttcctcgccaggacccagaacaccatcaccatcagtgaactgggcactgaaaggacttacaatgttcttgccattttggacttcaacagtgaccggaagcgaatgtctatcattgtaagaaccccagaaggcaatatcaagctttactgtaaaggtgctgacactgttatttatgaacggttacatcgaatgaatcctactaagcaagaaacacaggatgccctggatatctttgcaaatgaaactcttagaaccctatgcctttgctacaaggaaatt

SEQ ID NO: 1983 - DNA, 631 bp, Homo sapiens
ggctcggtcctgcatttactccatggcgcagcccatctgacccccacaggagcctcagcagaggcctcaacaatgagctctgcatttgtttttacagcttttctgggatttctctcgcttccttgttaggtcagctcaactaccaggcagcctctcccgatgaaggtgccctggtaaacgctgccaggaactttggctttgccttcctcgccaggacccagaacaccatcaccatcagtgaactgggcactgaaaggacttacaatgttcttgccattttggacttcaacagtgaccggaagcgaatgtctatcattggtaagtccccctcagagtctgtctatgaatcgctcatttagatgttgcttgtgcccattgtattgagtggcatcaggataaagcagccagtgaaagagctacttggctcctgggagatttctgcagctttactgaaactggtattgttggctgggcgtggtggctcacgcctgtaatcccagcactttgggaggccgaggcgggtggatcacgaggtcaggagatcgagaccatcctggctaacacggtgaaaccccgtctctactaaaaatacaaaaaaaattagccatggagtaaatgctggtaccgtgta

SEQ ID NO: 1984 - DNA, 892 bp, Homo sapiens
gggaaatctcactgagcaattttgagtggaaattacttgtctaaaatcagcttgaccctgaagcctgagaatgatgcatgtggttaggagaaaccagaggctgagtgcatgggcttgtctccttgtagagggcttagtttgggctgatataacaaaagaccttcgaaatttattgctcagagttctggaggctgggaagtctcaaatcaaagcatcggcagattcagggtctggcaaaggctcactttctgctttataggcacagccggtgccttctagctatgtcctcgcatggcagaaggggcaagcaagctcctttgagccactttaataagggcactaatcccattcataagggtggagccctcatgacctaatgaccttctaaaggccccacctcaatactgttgaattggggattgggtttcaacatatgaatttggagggggattctaacattcagaccatagcagtaaataagcagcttgctctcgtctgtacaatgagaataaaatctctactacttgccactcgtatccgagctctctacggaaaataatcttctgtcttcctagcgtggaagtgattcgtcttggacagagtcacttcatcaactgggacctgcaaatgtactatgctgagaaggacacacccgcaaaagctagaaccaccacactcaatgaacagctcgggcagatccattatatcttctctgataagacggggacactcacacaaaatatcatgacctttaaaaagtgctgtatcaacgggcagatatatggtaagtggaagccgtcactcattttctgggtgagtggggctgcctgccgtgtgcaggtcattacttggactatagcctgtctcctggcattgctggtgccctctcgat

SEQ ID NO: 1985 - DNA, 1062 bp, Homo sapiens
ttgaattttccattttcaggtgctgacactaaaataatgaagaatagtgggaaaaccagatttaaaagaactaaaattgattacttgatgaactacatggtttacacgatctttgttgttcttattctgctttctgctggtcttgccatcggccatgcttattgggaagcacaggtgggcaattcctcttggtacctctatgatggagaagacgatacaccctcctaccgtggattcctcattttctggggctatatcattgttctcaacaccatggtacccatctctctctatgtcagcgtggaagtgattcgtcttggacagagtcacttcatcaactgggacctgcaaatgtactatgctgagaaggacacacccgcaaaagctagaaccaccacactcaatgaacagctcgggcagatccattatatcttctctgataagacggggacactcacacaaaatatcatgacctttaaaaagtgctgtatcaacgggcagatatatggggaccatcgggatgcctctcaacacaaccacaacaaaatagagcaagttgattttagctggaatacatatgctgatgggaagcttgcattttatgaccactatcttattgagcaaatccagtcagggaaagagccagaagtacgacagttcttcttcttgctcgcagtttgccacacagtcatggtggataggactgatggtcagctcaactaccaggcagcctctcccgatgaaggtgccctggtaaacgctgccaggaactttggctttgccttcctcgccaggacccagaacaccatcaccatcagtgaactgggcactgaaaggacttacaatgttcttgccattttggacttcaacagtgaccggaagcgaatgtctatcattgtaagaaccccagaaggcaatatcaagctttactgtaaaggtgctgacactgttatttatgaacggttacatcgaatgaatcctactaagcaagaaacacaggatgccctggatatctttgcaaatgaaactcttagaaccctatgcctttgctacaaggaaatt

SEQ ID NO: 1986 - DNA, 2255 bp, Homo sapiens
cttgagacaggtgggacatgtcatttctcacatgaggtcccggcgagaaggacctgcttccatcagattcacacttgggagaggggcccggcctccaggagcgccaggcagaaagggcacccattaggaagaagaacacagaggccatgggagtgaaaagtttgatgctggaaagcaacagtagcacattctgctacagagcggaatgaaaaaccctggggagcaaattcctgagccagagaatggagcggaggaaccagccaaggaggataaagagacctgcgtgctctgaggctgcccgaccctgagctccagaacagaccatcgagttcaggagacaagcatgtcagccatgacacaaggcagatgagagggacccccagcgtccacacgtggaggcagcgggggcagccgtgacttccttctgcagtgttgattcagctccctttgaaggcggatccatacaaacaggctgaccatcagggctggtcccaggccacacaggctgggtgcaatgcagaaatggacgatctgccccggggaaggcaggtgagtgtaggaaggagggagggctgcgagaagctgggggcagcctccatccccctgtggcctgggtgggcctgtgcccccccaaccccccgacgcagcttcccacactgggagcacagttcctccctcctctgccttcctctgcgtggtgtggctcctccttgagggagagagctgaggaggtggcattcttgcttccctgactcacccaaaggaagatttcacagcccctggcaagggctgccagacaggctcacctgtcaccccctgtccagggacagactgaccggtagccttggctgggtggggagttatgctgggaagtcttccaggccccctgggggtgggaagatgctcaatgttcaaaggagatggaacgaggaaaacagttaagcaacgatggactccagggggaaaaccggagaagaagaaactgtaattccagtccgtccacatggcccagcagtgaacgacaattgcatggtcagagagagcaaaagcaccacgccgactgaaagcagctcgaatgtggtggggcagtgggagataatgccctcatctaccaaaacaagatctgccaccttcgcagaccactaaacctcattcctccacccacctccccacccccatgaaggccaactgaccagagagcagggctcccgagggtcgggtcgggtcgggtcgggttgggtcgggtgggtgcctcttaccctaactgaggctctgccctggactcggagtccacttgctgtcaaagcatgccactcttctttctgatacttgacatatttcttttcccgttcaattcatggtttctgcccaaacggagccacgtgaggacgtctttggggatgtgtctccaagaaaagtgtgggctgccttcctcaccctggatgcctgtgggcagccttcctcaccctggatgcctgtgggctgccttcctcaccctggatgcctgtgggcagccttcctcaccctggatgcctgtgggctgccttcctcaccctggatgcctgtgggcagccttcctcaccctggatgcctgtgggcagccttcctcaccctggatgcctgtgacttggtttccatgggggcttcctaagctcagggaccccaagcctccatcaaatctaatgacccgccttgtctctgaacacacctgtgttgtccccgagcccctcaccaaccccctctgcaacccggcccacgcatttcccatcctgaagggtccagctcataggccggcccatgtgttccctttacccctgctttgtccctacctggtggggagctgtcccttctgggccctagtgtggcacttcacacacaaatgtgtcctgtgggtggtatctgggcctccccctgcagtgaggggatgaccaatgtgcagagctcactgggcctggatatgggctcgggtggcacagaacagagagaaagtgctccgtaaaagtgagctgcgatgcggaggtgggcaagctcttccctggagggggaagagctctcaacccagagggatctgaccaggaaggttcaccccccctccacccaggaagcccctgcagacagtatgtgttttaggctttgctggccaaatggtctctgccgcgactactcagctctgccattgtggctgcagagtgaccatagaccttctgaaagtgaatgagtatgactgtgttccaataaaactttattgacaaaaa

SEQ ID NO: 1987 - DNA, 2236 bp, Homo sapiens
cttgagacaggtgggacatgtcatttctcacatgaggtcccggcgagaaggacctgcttccatcagattcacacttgggagaggggcccggcctccaggagcgccaggcagaaagggcacccattaggaagaagaacacagaggccatgggagtgaaaagtttgatgctggaaagcaacagtagcacattctgctacagagcggaatgaaaaaccctggggagcaaattcctgagccagagaatggagcggaggaaccagccaaggaggataaagaggtgggaacaggcaagaaaacctggacctgcgtgctctgaggctgcccgaccctgagctccagaacagaccatcgagttcaggagacaagcatgtcagccatgacacaaggcagatgagagggacccccagcgtccacacgtggaggcagcgggggcagccgatccatacaaacaggctgaccatcagggctggtcccaggccacacaggctgggtgcaatgcagaaatggacgatctgccccggggaaggcaggtgagtgtaggaaggagggagggctgcgagaagctgggggcagcctccatccccctgtggcctgggtgggcctgtgcccccccaaccccccgacgcagcttcccacactgggagcacagttcctccctcctctgccttcctctgcgtggtgtggctcctccttgagggagagagctgaggaggtggcattcttgcttccctgactcacccaaaggaagatttcacagcccctggcaagggctgccagacaggctcacctgtcaccccctgtccagggacagactgaccggtagccttggctgggtggggagttatgctgggaagtcttccaggccccctgggggtgggaagatgctcaatgttcaaaggagatggaacgaggaaaacagttaagcaacgatggactccagggggaaaaccggagaagaagaaactgtaattccagtccgtccacatggcccagcagtgaacgacaattgcatggtcagagagagcaaaagcaccacgccgactgaaagcagctcgaatgtggtggggcagtgggagataatgccctcatctaccaaaacaagatctgccaccttcgcagaccactaaacctcattcctccacccacctccccacccccatgaaggccaactgaccagagagcagggctcccgagggtcgggtcgggtcgggtcgggttgggtcgggtgggtgcctcttaccctaactgaggctctgccctggactcggagtccacttgctgtcaaagcatgccactcttctttctgatacttgacatatttcttttcccgttcaattcatggtttctgcccaaacggagccacgtgaggacgtctttggggatgtgtctccaagaaaagtgtgggctgccttcctcaccctggatgcctgtgggcagccttcctcaccctggatgcctgtgggctgccttcctcaccctggatgcctgtgggcagccttcctcaccctggatgcctgtgggctgccttcctcaccctggatgcctgtgggcagccttcctcaccctggatgcctgtgggcagccttcctcaccctggatgcctgtgacttggtttccatgggggcttcctaagctcagggaccccaagcctccatcaaatctaatgacccgccttgtctctgaacacacctgtgttgtccccgagcccctcaccaaccccctctgcaacccggcccacgcatttcccatcctgaagggtccagctcataggccggcccatgtgttccctttacccctgctttgtccctacctggtggggagctgtcccttctgggccctagtgtggcacttcacacacaaatgtgtcctgtgggtggtatctgggcctccccctgcagtgaggggatgaccaatgtgcagagctcactgggcctggatatgggctcgggtggcacagaacagagagaaagtgctccgtaaaagtgagctgcgatgcggaggtgggcaagctcttccctggagggggaagagctctcaacccagagggatctgaccaggaaggttcaccccccctccacccaggaagcccctgcagacagtatgtgttttaggctttgctggccaaatggtctctgccgcgactactcagctctgccattgtggctgcagagtgaccatagaccttctgaaagtgaatgagtatgactgtgttccaataaaactttattgacaaaaa

SEQ ID NO: 1988 - DNA, 2226 bp, Homo sapiens
cttgagacaggtgggacatgtcatttctcacatgaggtcccggcgagaaggacctgcttccatcagattcacacttgggagaggggcccggcctccaggagcgccaggcagaaagggcacccattaggaagaagaacacagaggccatgggagtgaaaagtttgatgctggaaagcaacagtagcacattctgctacagagcggaatgaaaaaccctggggagcaaattcctgagccagagaatggagcggaggaaccagccaaggaggataaagagacctgcgtgctctgaggctgcccgaccctgagctccagaacagaccatcgagttcaggagacaagcatgtcagccatgacacaaggcagatgagagggacccccagcgtccacacgtggaggcagcgggggcagccgtgacttccttctgcagtgttgattcagctccctttgaaggcggatccatacaaacaggctgaccatcagggctggtcccaggccacacaggctgggtgcaatgcagaaatggacgatctgccccggggaaggcaggtgagtgtaggaaggagggagggctgcgagaagctgggggcagcctccatccccctgtggcctgggtgggcctgtgcccccccaaccccccgacgcagcttcccacactgggagcacagttcctccctcctctgccttcctctgcgtggtgtggctcctccttgagggagagagctgaggaggtggcattcttgcttccctgactcacccaaaggaagatttcacagcccctggcaagggctgccagacaggctcacctgtcaccccctgtccagggacagactgaccggtagccttggctgggtggggagttatgctgggaagtcttccaggccccctgggggtgggaagatgctcaatgttcaaaggagatggaacgaggaaaacagttaagcaacgatggactccagggggaaaaccggagaagaagaaactgtaattccagtccgtccacatggcccagcagtgaacgacaattgcatggtcagagagagcaaaagcaccacgccgactgaaagcagctcgaatgtggtggggcagtgggagataatgccctcatctaccaaaacaagatctgccaccttcgcagaccactaaacctcattcctccacccacctccccacccccatgaaggccaactgaccagagagcagggctcccgagggtcgggtcgggtcgggtcgggttgggtcgggtgggtgcctcttaccctaactgaggctctgccctggactcggagtccacttgctgtcaaagcatgccactcttctttctgatacttgacatatttcttttcccgttcaattcatggtttctgcccaaacggagccacgtgaggacgtctttggggatgtgtctccaagaaaagtgtgggctgccttcctcaccctggatgcctgtgggcagccttcctcaccctggatgcctgtgggcagccttcctcaccctggatgcctgtgggctgccttcctcaccctggatgcctgtgggcagccttcctcaccctggatgcctgtgggcagccttcctcaccctggatgcctgtgacttggtttccatgggggcttcctaagctcagggaccccaagcctccatcaaatctaatgacccgccttgtctctgaacacacctgtgttgtccccgagcccctcaccaaccccctctgcaacccggcccacgcatttcccatcctgaagggtccagctcataggccggcccatgtgttccctttacccctgctttgtccctacctggtggggagctgtcccttctgggccctagtgtggcacttcacacacaaatgtgtcctgtgggtggtatctgggcctccccctgcagtgaggggatgaccaatgtgcagagctcactgggcctggatatgggctcgggtggcacagaacagagagaaagtgctccgtaaaagtgagctgcgatgcggaggtgggcaagctcttccctggagggggaagagctctcaacccagagggatctgaccaggaaggttcaccccccctccacccaggaagcccctgcagacagtatgtgttttaggctttgctggccaaatggtctctgccgcgactactcagctctgccattgtggctgcagagtgaccatagaccttctgaaagtgaatgagtatgactgtgttccaataaaactttattgacaaaaa

SEQ ID NO: 1989 - DNA, 2659 bp, Homo sapiens
cttgagacaggtgggacatgtcatttctcacatgaggtcccggcgagaaggacctgcttccatcagattcacacttgggagaggggcccggcctccaggagcgccaggcagaaagggcacccattaggaagaagaacacagaggccatgggagtgaaaagtttgatgctggaaagcaacagtagcacattctgctacagagcggaatgaaaaaccctggggagcaaattcctgagccagagaatggagcggaggaaccagccaaggaggataaagagacctgcgtgctctgaggctgcccgaccctgagctccagaacagaccatcgagttcaggagacaagcatgtcagccatgacacaaggcagatgagagggacccccagcgtccacacgtggaggcagcgggggcagccgtgacttccttctgcagtgttgattcagctccctttgaaggcggatccatacaaacaggctgaccatcagggctggtcccaggccacacaggctgggtgcaatgcagaaatggacgatctgccccggggaaggcaggtgagtgtaggaaggagggagggctgcgagaagctgggggcagcctccatccccctgtggcctgggtgggcctgtgcccccccaaccccccgacgcagcttcccacactgggagcacagttcctccctcctctgccttcctctgcgtggtgtggctcctccttgagggagagagctgaggaggtggcattcttgcttccctgactcacccaaaggaagatttcacagcccctggcaagggctgccagacaggctcacctgtcaccccctgtccagggacagactgaccggtagccttggctgggtggggagttatgctgggaagtcttccaggccccctgggggtgggaagatgctcaatgttcaaaggagatggaacgaggaaaacagttaagcaacgatggactccagggggaaaaccggagaagaagaaactgtaattccagtccgtccacatggcccagcagtgaacgacaattgcatggtcagagagagcaaaagcaccacgccgactgaaagcagctcgaatgtggtggggcagtgggagataatgccctcatctaccaaaacaagatctgccaccttcgcagaccactaaacctcattcctccacccacctccccacccccatgaaggccaactgaccagagagcagggctcccgagggtcgggtcgggtcgggtcgggttgggtcgggtgggtgcctcttaccctaactgaggctctgccctggactcggagtccacttgctgtcaaagcatgccactcttctttctgatacttgacatatttcttttcccgttcaattcatggtttctgcccaaacggagccacgtgaggacgtctttggggatgtgtctccaagaaaagtgtgggctgccttcctcaccctggatgcctgtgggcagccttcctcaccctggatgcctgtgggctgccttcctcaccctggatgcctgtgggcagccttcctcaccctggatgcctgtgggctgccttcctcaccctggatgcctgtgggcagccttcctcaccctggatgcctgtgggcagccttcctcaccctggatgcctgtgacttggtttccatgggggcttcctaagctcagggaccccaagcctccatcaaatctaatgacccgccttgtctctgaacacacctgtgttgtccccgagcccctcaccaaccccctctgcaacccggcccacgcatttcccatcctgaagggtccagctcataggccggcccatgtgttccctttacccctgctttgtccctacctggtggggagctgtcccttctgggccctagtgtggcacttcacacacaaatgtgtcctgtgggtggtatctgggcctccccctgcagtgaggggatgaccaatgtgcagagctcactgggcctggatatgggctcgggtggcacagaacagagagaaagtgctccgtaaaagtgagctgcgatgcggaggtgggcaagctcttccctggagggggaagagctctcaacccagagggatctgaccaggaaggttcaccccccctccacccaggaagcccctgcagacagtatgtgttttaggctttgctggccaaatggtctctgccgcgactactcagctctgccattgtggctgcagagtgaccatagaccttctgaaagtgaatgagtatgactgtgttccaataaaactttattgacaaaaacaggtggagggccagcctaagggcccaagtttgtaggtctctattctagaccagtgattctctggagaggaatggggcatggggagtggggacagtgtgtgggagaagaggtgggacacaggcacgtgggaatggtgcggacatggaggacattggaggtggggaagagctagagaacctaaacactgacgctggaccctggtcaacactaggtctctccacagcctcctcttttagcctctccctccagtttcaaaatgactcctcctctgaggggactcaggctccccaccctgctccccagttcccaccagaaaccccaagtgggtgttccagcctctgccccacaaggcccccatggaaggcagcaccgccaggcagggacctttcctcgctgcccctcc

SEQ ID NO: 1990 - DNA, 2914 bp, Homo sapiens
cttgagacaggtgggacatgtcatttctcacatgaggtcccggcgagaaggacctgcttccatcagattcacacttgggagaggggcccggcctccaggagcgccaggcagaaagggcacccattaggaagaagaacacagaggccatgggagtgaaaagtttgatgctggaaagcaacagtagcacattctgctacagagcggaatgaaaaaccctggggagcaaattcctgagccagagaatggagcggaggaaccagccaaggaggataaagagacctgcgtgctctgaggctgcccgaccctgagctccagaacagaccatcgagttcaggagacaagcatgtcagccatgacacaaggcagatgagagggacccccagcgtccacacgtggaggcagcgggggcagccgtgacttccttctgcagtgttgattcagctccctttgaaggcggatccatacaaacaggctgaccatcagggctggtcccaggccacacaggctgggtgcaatgcagaaatggacgatctgccccggggaaggcaggtgagtgtaggaaggagggagggctgcgagaagctgggggcagcctccatccccctgtggcctgggtgggcctgtgcccccccaaccccccgacgcagcttcccacactgggagcacagttcctccctcctctgccttcctctgcgtggtgtggctcctccttgagggagagagctgaggaggtggcattcttgcttccctgactcacccaaaggaagatttcacagcccctggcaagggctgccagacaggctcacctgtcaccccctgtccagggacagactgaccggtagccttggctgggtggggagttatgctgggaagtcttccaggccccctgggggtgggaagatgctcaatgttcaaaggagatggaacgaggaaaacagttaagcaacgatggactccagggggaaaaccggagaagaagaaactgtaattccagtccgtccacatggcccagcagtgaacgacaattgcatggtcagagagagcaaaagcaccacgccgactgaaagcagctcgaatgtggtggggcagtgggagataatgccctcatctaccaaaacaagatctgccaccttcgcagaccactaaacctcattcctccacccacctccccacccccatgaaggccaactgaccagagagcagggctcccgagggtcgggtcgggtcgggtcgggttgggtcgggtgggtgcctcttaccctaactgaggctctgccctggactcggagtccacttgctgtcaaagcatgccactcttctttctgatacttgacatatttcttttcccgttcaattcatggtttctgcccaaacggagccacgtgaggacgtctttggggatgtgtctccaagaaaagtgtgggctgccttcctcaccctggatgcctgtgggcagccttcctcaccctggatgcctgtgggctgccttcctcaccctggatgcctgtgggcagccttcctcaccctggatgcctgtgggctgccttcctcaccctggatgcctgtgggcagccttcctcaccctggatgcctgtgggcagccttcctcaccctggatgcctgtgacttggtttccatgggggcttcctaagctcagggaccccaagcctccatcaaatctaatgacccgccttgtctctgaacacacctgtgttgtccccgagcccctcaccaaccccctctgcaacccggcccacgcatttcccatcctgaagggtccagctcataggccggcccatgtgttccctttacccctgctttgtccctacctggtggggagctgtcccttctgggccctagtgtggcacttcacacacaaatgtgtcctgtgggtggtatctgggcctccccctgcagtgaggggatgaccaatgtgcagagctcactgggcctggatatgggctcgggtggcacagaacagagagaaagtgctccgtaaaagtgagctgcgatgcggaggtgggcaagctcttccctggagggggaagagctctcaacccagagggatctgaccaggaaggttcaccccccctccacccaggaagcccctgcagacagtatgtgttttaggctttgctggccaaatggtctctgccgcgactactcagctctgccattgtggctgcagagtgaccatagaccttctgaaagtgaatgagtatgactgtgttccaataaaactttattgacaaaaaaaaaaaaaaaaaaaaaaaaaaaaaaaaaaaaaaaaaaaaaaaaaaaaaaaaagaaagaaaaaaaaaaaaaaaaaaaaaaaaaaaaataaaaacaagaacaaaaagaacaaaaaaaaaaaataaaacaaaggagcgggcgcgcgcatcactacgctcacccccgagagggcacagcgcaccaagctgcacagccccattgttatatataaacagaagaggcggcacaaatgatgtaagtagaattattaataaagagtacagaagacgagcgcgcaggcagagtcagttgttttaaacatagcgaataacagatgtagcagaagaagttagctattaaggtaatagtagtttaatgtgtgcagaaacagatcgcacttatttcggggtggaggtgcagaaaagtattagtaagatgtcacaacacgaacgactaggaatagagtaaggacccaccggacggcgagacgagagacattaaacaaccctaatcgagaggagactgtgcagactcaagtggagggggagaaacaaaaagcaggagtacgagtcagctgtgtgccactcgagagaactaaaaccgagatgcacagagtataaggacacgaaagaaaaagtatcacaaacgccgaggagagtaattagacaaaaggggggggggg

SEQ ID NO: 1991 - DNA, 351 bp, Homo sapiens
catgtgcggcagggctcggaggcctcagaatcaataaggaccctttagatttaaaactaatgattttctgtgttcagcaaaagtcaaaatctctcaaagttgccattgttgtctctgagtttttccccagagaacaagagatggtgtgataaatcatcatgcttgcaacacgcacgtcagaagagacttgaactagaccagagatggatagcgcgagccccaaacatcttaattatttcagtcttgaattgagcaaaacccttaaactagaactgtgggaacagtgatcctaacagcagtagacacaccatctaatagggtcatcatgccccccaagagtacaagtgtgac

SEQ ID NO: 1992 - DNA, 396 bp, Homo sapiens
agatttgctcatgttttagatggggctagaatcatacatggcaaacagtgctgttgagagtaaggcacatatgttaaaacactgaatatttattcattctcaaatatttatggagtacctgtccatagatacagtaatatatgagatacactccttgccctccaggaactcactgctgagttaatgagatagaggagaaaaagggcaatgacaatacagtgtattaaggaagaagctatgaggcatatacaaattgcttggagatcacacaggaggagatagtttactaaaatctggctgatcaagagcagtctcagggtctgctatcctggtgtgcagccaagagcctctttgccacagcctaccatgaggccaagagcccagctacagctatat

SEQ ID NO: 1993 - DNA, 694 bp, Homo sapiens
ttttctgctcctatagcctggcaaccttgtggtacatgggactacgtcctttaaactacccaggagcaaagttggacttccatgaaaaaggtttgtgcagatctaaaacctctcatctatttcactaaaaggacttccccttctaactgtcacccttaccaatgtaaccctgtcctctctatcaccacctccacctgtctttaactaactctagacctgtccttaattgcttttatggtattggaataggaattaaaagaaattaaagaatgtgtaaggagaaactcagttgtatgtaagaaaacccaattccccctgagaaagagaaagagttggagtcctttaaaaattaactgcctgtttttctgtggctagtgagccttatctctcctcctttcccagacattgtgaagaccctgtttctctagctgtgcagctgcaaggtcactagacagataaactcaagttgtaaaacatgtttttccttgaaaagtaagaaatgctgtaatgcatttctcaattaattaaataactgtctttgtttctcgcttctgtaatatgcttccccctgcacagatctccacccaccctacaaaatgcttaaaaggtaacttaactctttgttctgggctcagtcctttgggctgagtactgggccggtgcacctaaataataaatatcttcctgaacccca

SEQ ID NO: 1994 - DNA, 464 bp, Homo sapiens
acagatcaaaccagccacaacattcccttaagccaaagcctaatacagagcgaggtcccaactctcttcaattctgtgaaggctgaatgatgtgaggaagctgtgaacataagtttgaagctagcagaggttggcccacaaggcttaaggaaagaagccgtctccgtaatatgagtgtgaggtgaggcagcaggctctccagaagatcctgctacggtcacaatggaggtggccgcactcaaccacagatcttcagtgtagaggaagcaaccttgaactggaagaagacaccatgcaggcctttcataggtagggagaagtcaatgcctggcttcagagcttcaaaagacagtctgactctttgccgtgactttaaaacccatctatgcctagtgttccattattggaacgctaagcatgtgcaagtttatattctgcttaaggtcactgccaagatctgattg

SEQ ID NO: 1995 - DNA, 539 bp, Homo sapiens
agttgtcagaaaatataatctacatttttcttttcatggaaggcatgcttgggataatgtcgtttacaattcagtttcaactctgggacccactggccaaaggctgaagctggatggtagatgcatcttctgtctgtccagcagggctactatgctggagcgccttatacagggagagatactgtggtgatcatgctacaggtgtatattttttaactgactcattaatttgggggagaaaacccagcctttcactcaaaaacatgaccccacttataactggggaatcaaagaaagccctcctttaattctagctttgcaaacttagtaatatctacttaggaaaacattatttttcaatttagactatgagttaaaatcactttgaaaatgaaaatgactgggtttttcactagatttactgaaaataaaaaataaactaggatctctgggtgggggctagctgagagggcttcaagttcatagagagacatataccaggaaacaacaaaacacagtaggttaccggtgctgcaata

SEQ ID NO: 1996 - DNA, 504 bp, Homo sapiens
aggctggtctcgaactcccgacctcaggtattattattatcctcactttacagatgaagaaatggaggcagaaaaattaagatgtttgcaccactttgtgcaggaaatgtggtaactgaggtcacagccaggccatctggctctgaggcctgcaccacactgttgtgctacttttgcatttacgggaaagggctaagcacagacaaaatgtgagtgcgttatttgggaattttaagcaaagcctcattggtaagttggctcattttcttcccttctatggcagttacacagttttttattcttaactcatgtgggacaaggaagggtcttttgaaatgaaaggatcaaatctgagcttttaaattctagtctgttttctcctcttttctgctaagagagtagatttctaaatcagttctgattttatttacccttacagtttagagtgtgcctgactttcatgatacttggctgtcttctgccataataaagtgtctgccttta

SEQ ID NO: 1997 - DNA, 307 bp, Homo sapiens
ccagctgcttgctttcaggctataatgtccttcttgggtcttcagactgcagttaccttttcttgatgaagcatgtggcagccacttctcttgaacagctgggagtctggtccctgatgagcttcatttgtgttcctccttccacagtggctgactcctggtttagtaaccttggtttcttccattactttgtaacttacaactgggttagaaaaaccaatttttaatttgtcagtaagatctcttctggttttgcaccctgttgtatgctgtgtgccaagtgcttaggtggttttctcctcgctgc

SEQ ID NO: 1998 - DNA, 360 bp, Homo sapiens
gtatgccataggtgctcaaatagtcactgaataaaatagtgaaatgatgaatataagccttgctccacttaatctaatacctctctttacctcaaaaaatactgagcatgctaatttgaaaaagagttaagactcagtagatgggagttggatgcgtgttgatttaaaaccagccttaggtaagaaaggtgctagttggtggaattagtcagtgatgagacaatatattcatttctctctactcaatggttttagcaacttaatatttcaataattagctcatagcataaaatttgtctcagcaattagaataatattttctgagagttggccaaggctttgcattttcttaaaaaaaaa

SEQ ID NO: 1999 - DNA, 483 bp, Homo sapiens
tgtgccccagccacagtgagctgcttacatgttttcaaatgggttgtgttcctttccctcccagcggctttgtccacactgttccctttgcttagaatgttttctccaaggctctctagaacctgtttttacctgatttataccagaaaaccttagcccccagcccagaaccattcttcctcatggaagctcttccagatccttcagggtgtattgggttcttctaagttgctgtgatcttgcagttttcctttttagcttacctcaacttaaaataatgaagaatctctgataatgtgggtgtgggtgtctctctcttccttaaattggaagctccttgagggcagggactgcgtccgttttgttatcgatgattatattgatagtgcctagcaaaagtaggcacaaaataaatatttttttgaatgatatataaaaagagtaaattagaataacccttttggaggatgaattggcaatatg

SEQ ID NO: 2000 - DNA, 400 bp, Homo sapiens
agtacttcattcctttttatagctgaataatatttgattatgcatctaccataattttttttccttcaacttttactttaagttcaggggtacatgtgcatgatgtgtaggtttgttacataggtaagcttgtgccacgatggtttgctgcacaaatcatcccatcacctaggtattaagcccagcatccattagctattcttcctgatattctccgtcctccactcaccctgtgacaggttccagtgtgtgttgtcccccagttgtatccatgtgtactcatcattcggctcctacttataagtgagaacatgcagtgtttggttttctattcctgcattagtttgcagaggacactggctttcaactccatccatgtccctccagaggacatgatctc

SEQ ID NO: 2001 - DNA, 433 bp, Homo sapiens
ccaccaaacttaccatgtgaaggacagcacatgggcattctttctgagacctgcaaagaaaacaaagggagaggctaagcagacaaaggaaaactctttcttctcaaatcaatcagataatgaactcctgttccctttaggagaaatgagtgggtggggagagaaaagcaagcagttgacctctggaggtccttagacttaaaaacataaagcccaaggaagaaaattcctccccagcattaacttggaccagtaatgtttttctatttatattccatatgtaaatatgcctgtgaggtattatgtattgtctttgtgcctttaagtgcatttctttaaaaaatctgtaactttaaacttaaatagaaaggcacaaaatggattgttattttatacaatggagttctgatattaattattgttacttctcaca

SEQ ID NO: 2002 - DNA, 448 bp, Homo sapiens
aggtttttgaaagtttaaactatacctgctgacagctcccttattaagtcctactcaactgttatctctcacaggggttaggctgtctttccaaactcttccctttgttgaaactgaccgatctgattgtcaacataaagtaagtacctcctcttgatgatagccctatgctcttttagggatttgggtcctgagaagggatcaacactggcaaacctaccaaaggccaaaaacctgacattttctttcctgaatttcaaaaattcctttggaattcccagggtagatgcattcaactctagaattccatgtacattcaatattgagttaagcctgattgcacatctgcaactccatgagccaggaaagcacttaccacagtgctccacggagttattaagttcttaagggaaaaacgtatgcagagaagaggaagaaagtctaaggt

SEQ ID NO: 2003 - DNA, 517 bp, Homo sapiens
taatcttgagctctattagttcctgtgtatttttaacatgatatatggattttccttttctattgttcaaacatgaaaatgttttaaaaagaaaaacatgcctttattgccattttttaaagtattgaaggggataaaaaggaaagtgtaataagagcagtatatttttatgtcaaaagtaacctttctatagtactctttagataaaactgaatattggaaaagaaaaggaaagataagtagctcccttattcatcttagtccaaaatctattttgctcactgctggttgttggcattgtgtgatgatgtgacatagtaccagaggatcagattatcagaaaagaaaaggagattcccaatttaatagttactcactgaaattttccccttatctctatatcacagaaaaataagtagttgttaaatttcaaatcctgcagtctttctgatttatcatcaaatcgtggatgcacttagctgcctagcgtcagggaatccaataagtcctgtcacgt

SEQ ID NO: 2004 - DNA, 429 bp, Homo sapiens
attatatactattataatcatatattaatattaacatataattgtgtgtgttcaaaaatttttaatggcacaatcaaaaaactttaaagaccactggattaaaagatggtatttagggcccagcacaatgactcaagtctgtagtctcagcactttgggaagctgaggtgaggggatcgcttgagcccaggagatcaagaccagccatgggcaatatggcaaaaccccatctctacaaaaaatacaaaaattagccagatgtgttgcaactgtagtcccagctattcaagaaactgaagtgggaagatcacttgagcctgcaaggtcgacgctgcagtgagccatgattgcaccactccagcctgggagacagagcaaggccttgcttcaaaaaataaaaataaaagatgacattaagaagaaatctga

SEQ ID NO: 2005 - DNA, 364 bp, Homo sapiens
ctaaacatattgtatatgctttgttgaccatgtgtgtaccttttattcttatgtatctgttcaagtcttttacccatctagcatacttgggttgattggtttgttgttgttttgttgttgttgttgttgttgttgtccttgttgttttaattaccaggtaagaagatctcagcatactttatagttacagggtttgggggtcagataagtttcgtgactattttctccctgtctgaggctgtctcatttcttcactttctttgttgcctcttttgatgagaagatatggctaatatttgatgaagtctaatgtatcaagcctttcctttatacatttttttctgtgccctatttaataaatctc

SEQ ID NO: 2006 - DNA, 677 bp, Homo sapiens
aactgatcataatgtgtaaaaaggtgtaacgtataattagaaagacataagtaaaactcaattattgagccacaattctcatgaattaaactttaccatccacagttaagtccttattgcttgttaatcttgggtgcctgcactacacttgattttaaaattgttggtcttctataaattttcaagattttcctgagcagatacaaattcaggttttgatgtgcttcaaactaaggaacatcacctttcatgaaatgtttccagtagatgtgatgtgagtgaaaactttaaaaaatgtcatacttattgctacatttgaatagaaaataaaaggaataaagtatttttcctttgctacaaattaataatacgatcacatgcagagagaatgtgaggaaccttcaacactaaactttgatagtcacattatgtgaaatttgaaattttctgggtgacagtatacttattggtaggttttctggttcatgaaaataactcaagaactaatatttgtaattgtgaccttgttgtaattgggaaaggccactagttgatcatatgacctttattgaatatgtcatgcttgctgtttaaaaaattcctaactaatcacatgcaaattaatgctaaacaacttttttgtatttattaaaaatgatttaaatataaaaaaaaaa

SEQ ID NO: 2007 - DNA, 417 bp, Homo sapiens
cagagcagtgaaaacatcatttaaaaccctgcctaattttctgattgacccatgaactacaaacgtgggtcagattccaagcagtatctaggtgcatagagcatgagggaagcaaattgaataagtgaagaaagatgaacacctgcttggggctggggaggcatcccagtggcctttccagaggaaagtgtgaaggggcagtgggagaaaaggtgagatgcaaccacagcaacacccaagccaggcttgggagctgggtctgtctgctctgagaagccactgggggatctgggatggaggagtgtagaaggaaaccaagttttagaatgcagatccctctaagagtgggacttgttatcctgcctctaatttatcatttgtgcattttattgtaaaataaaatactaacttattgta

SEQ ID NO: 2008 - DNA, 264 bp, Homo sapiens
gaggtaacccccaagttatgcaacttttctgccaggaacaggcctatatggagaatattggaaaatttcaggctcagcatttatgttatttagctgtcgtgcctgtttcattactgtagagtaaattgtgacatacacctaggcacagttcacaggcatgataatgactctcatatgtggatcccacaaataggattaattttgactctcataactttctttagaaacacaagtgattaaatctctttctgttaaaaaaaaaaa

SEQ ID NO: 2009 - DNA, 255 bp, Homo sapiens
tgagacggagtctcgctctgtcgcccaggctggagcgcactggtgcaatctcagcttgctacaccctctacctcccgggtgtcaccatgttggccaggctggttttgaacttctgactcaagtgatctgcacacctcagcctttaaagtgctaggattacaagcatgagccaccacacctgctccttctatttcattttaacataaataagtaatagtagctaagacttactaagcactatgtattagacagttt

SEQ ID NO: 2010 - DNA, 1313 bp, Homo sapiens
tactaaaaatataagaatcggctgggcatggtggcgcacgcctgtggtcccagctgctcgggaggttgaggcaggagaatcatttgaacccgggaggcggaggttgcggtgagctgagatcgcgccactgcactccagcccggcgacagagcgagaatctgtctcaaaaaaaaaaaaaaaaaaaaagcattttccttccccaatttttctgtcattttcccatcctcattcaggcagagagaagaataacatgcccccttccaaaaaagacaaaacacaaggtagccacaaattccctagacacattagaaaaatagggagtggagaggggcattggaatgaaagttctctatctcattagctgttaggctttaggcatttatttggatggatccctttggcaccttggaagcaccactgaagtgctctgagaaaggggtcagctgtctgagggaatagttctggatagaggccacaggaagcactggccagttgctttagttctagatagctttgtattcccgccttgttgcccttagcggaggctggcccaaagcacacttgatcttgtccccactccctgcccccatctcagatcaaccttcagaaagtcccggcttgttggcaaaggcacacattctgtgttactcttaagtttcattagaaattcaagtcctctggggccctgttcccttgtgggcttgtgcaactgactttgtttcttgtctgcctttctggaaccaaatccaaggaaattcatgggtttggggagacagcgatgggaacccagcagggcacaggatgctaggataaagctgtggcgccccaaaagtggcctgctctgccaacatacataaatacatacagtctgagcttgacactgtataatttggcccagaacaatatgtattttgagctcatttaggtgaatgactttggcattccatgtacccactaggggaagctttatcaggctgcatttgccttatgcagaagtatgcctttgttctgagaaatggcctcagaacacactgttgagctgtctcctttagtgagtgtcatcctctcatccatttcaaaagattgcagatgccgtcttgaagtcctgcttgtaagaaatgcaggggttgggaatggaggagatgacgatgtagttttgcttttagttttcccaaacctgtttacattttttaaaaatgtaaccaacccataattgcattttacttgtcgtggttcgatctgattgtattgtcgaaggactatttttgaacctgtccaaataaactctgcaaagtatttccacaaaaaaaaaa

SEQ ID NO: 2011 - DNA, 415 bp, Homo sapiens
cacaacctttcagacttgaacggggccctcccctgctccgtgagcctcgccgtcctggtgcctggttctgccatagtaactttcaggtcctctaggaaccagatatttttgtccgtatagtctctaaatcctgctcacaggggatgttagtaattaaatgatgacttttacattgccttgcaccagcaaataaaatctgtagtctaagaacaaagcccggggggatgattcaccagcacccttgttagcagtgctgtgctcctcccccctttccttatccaccgtcatgcttcatagcttgtcacctgtgtctttctggggtgtggggtgggcatgtgtgtttggtgaatttttaggactcacctaaagggaagctttattgtcaatctctttccacaaatgagtgtaattgcag

SEQ ID NO: 2012 - DNA, 1659 bp, Homo sapiens
gcaggctggtactggtcccgaaggtccttatgatcaagcggccggtccgaggggacatggcggcaacctctgcagcgtcagtgctgctggcgggtgcaagaaactggtggcgacactgcctgagcccgctgctgttgccaaggtgacgaggcataaagccgcggtggatcggtgcgtgggggcgcggggtgggtggtgaagggagaacgaagctcgagcggaaagacaggaccgcgaccgcttgtcaggggattcggcttccagtcccccttccagagggcgtccttctgcagccaggcctctgtcttcccccgcccccacacgagtctcacttcatcaccatgctggagtgcagtggcactatctgagatcactgcaatctccgcctctcggattcaagcgattctcgtgcctcagcctcccgagtagtagctgggagtacaggcatgtgccaccatgcccagctaatttttgtatttttggtacagacctggtttcgccttgttggccaggctggtctcgagcttctgacctcaagtgatccgcctgcctcggccttccaaagtgctgggattacaggcgtgaaccactgagactggtcagttattggctctttttaaagattgtgttgctttctgcctcaatattaatatgttggaagttaccaagaagttcatgacagatctatttcaaattctggtgaagaaggaagaattggcccttgaaagaatcagtgttttacaataattttgaaagagggtagcgacagaaggaagaaaacattatcaggagggaattcagataaaggacaaaccatattttgactgctactgacttgttgaactggcagtcggggtcaacttgggaagacagctgtgaccataaatattaaagaagacaaaaggattctttgtgacactgagaccttctgcagtaccacagtggaggaaatgccagtgtacacaactggcctcatttaattcctgggaggagatagtttgggatgcagtgcttgttgttgctgagcaggcgatcacagcatgcactgtgtttctttctttgagaatatttgaatcctgcctgaatactcgtaacagatgagagacgcaggttttgatagcatagatttacgctgtcattagtcatgagctcttgggacgaaagtaattggttttatcctctttagagttagaccctgtggttgggtatgaaagatgagtgtctgtaaaaatccttcttagaaatgtatttcctcaagactctgtctcaaaaaaaaaaaaagaaatttatttcctagttctgtaaaaatcgctatattgagtgttctctatcacttaataatatacttattattaagtggacttaaagatatgcagtgtataaaatcagctaattacgttaaaccatggtatctccctttattgtgttagactgaatagaacaaactttaaaataattttttaaagaatatatttgaattcattttgtttgataatatgtttttattcagaaaagcattttattagcgctaggtgtgaacccgagccttttgctaaataccagcagcaatcatgtcctagagttaaatcccagaaaaattgccatattatatattaaaggttcaataaattacaataaagtattttttctttaaaatga

SEQ ID NO: 2013 - DNA, 915 bp, Homo sapiens
aacagccactgatgattaactagtagctcagattgttcagtggttcacgtagtacttgctgaataatattctgattcatatgttttcttttgttcagaactggcagtcggggtcaacttgggaagacagctgtgaccataaatattaaagaagacaaaaggattctttgtgacactgagaccttctgcagtaccacagtggaggaaatgccagtgtacacaactggcctcatttaattcctgggaggagatagtttgggatgcagtgcttgttgttgctgagcaggcgatcacagcatgcactgtgtttctttctttgagaatatttgaatcctgcctgaatactcgtaacagatgagagacgcaggttttgatagcatagatttacgctgtcattagtcatgagctcttgggacgaaagtaattggttttatcctctttagagttagaccctgtggttgggtatgaaagatgagtgtctgtaaaaatccttcttagaaatgtatttcctcaagactctgtctcaaaaaaaaaaaaagaaatttatttcctagttctgtaaaaatcgctatattgagtgttctctatcacttaataatatacttattattaagtggacttaaagatatgcagtgtataaaatcagctaattacgttaaaccatggtatctccctttattgtgttagactgaatagaacaaactttaaaataattttttaaagaatatatttgaattcattttgtttgataatatgtttttattcagaaaagcattttattagcgctaggtgtgaacccgagccttttgctaaataccagcagcaatcatgtcctagagttaaatcccagaaaaattgccatattatatattaaaggttcaataaattacaataaagtattttttctttaaaatga

SEQ ID NO: 2014 - DNA, 1602 bp, Homo sapiens
gcaggctggtactggtcccgaaggtccttatgatcaagcggccggtccgaggggacatggcggcaacctctgcagcgtcagtgctgctggcgggtgcaagaaactggtggcgacactgcctgagcccgctgctgttgccaaggtgacgaggcataaagccgcggtggatcggtgcgtgggggcgcggggtgggtggtgaagggagaacgaagctcgagcggaaagacaggaccgcgaccgcttgtcaggggattcggcttccagtcccccttccagagggcgtccttctgcagccaggcctctgtcttcccccgcccccacacgagtctcacttcatcaccatgctggagtgcagtggcactatctgagatcactgcaatctccgcctctcggattcaagcgattctcgtgcctcagcctcccgagtagtagctgggagtacaggcatgtgccaccatgcccagctaatttttgtatttttggtacagacctggtttcgccttgttggccaggctggtctcgagcttctgacctcaagtgatccgcctgcctcggccttccaaagtgctgggattacaggcgtgaaccactgagactggtcagttattggctctttttaaagattgtgttgctttctgcctcaatattaatatgttggaagttaccaagaagttcatgacagatctatttcaaattctggtgaagaaggaagaattggcccttgaaagaatcagtgttttacaataattttgaaagagggcgacagaaggaagctgacttgttgaactggcagtcggggtcaacttgggaagacagctgtgaccataaatattaaagaagacaaaaggattctttgtgacactgagaccttctgcagtaccacagtggaggaaatgccagtgtacacaactggcctcatttaattcctgggaggagatagtttgggatgcagtgcttgttgttgctgagcaggcgatcacagcatgcactgtgtttctttctttgagaatatttgaatcctgcctgaatactcgtaacagatgagagacgcaggttttgatagcatagatttacgctgtcattagtcatgagctcttgggacgaaagtaattggttttatcctctttagagttagaccctgtggttgggtatgaaagatgagtgtctgtaaaaatccttcttagaaatgtatttcctcaagactctgtctcaaaaaaaaaaaaagaaatttatttcctagttctgtaaaaatcgctatattgagtgttctctatcacttaataatatacttattattaagtggacttaaagatatgcagtgtataaaatcagctaattacgttaaaccatggtatctccctttattgtgttagactgaatagaacaaactttaaaataattttttaaagaatatatttgaattcattttgtttgataatatgtttttattcagaaaagcattttattagcgctaggtgtgaacccgagccttttgctaaataccagcagcaatcatgtcctagagttaaatcccagaaaaattgccatattatatattaaaggttcaataaattacaataaagtattttttctttaaaatga

SEQ ID NO: 2015 - DNA, 458 bp, Homo sapiens
gtttgccctgatggcgggctggccactatacctccctaggtaccttcaacttgacagccaaggacaagccaagaatgtacatcatttaccacgtgtacttgtatagcaaagcttatgaaatgcaacattttctacccaggacacttggtggaagtgaatctccagcactccacagtgaaaagaatctaggatgcagccagcagtgcttagtagagcccagagtcacacaccagccatccactcatgcatgccgggctggaaggcagacggctttaggtgggcacctgcccaggcccaccactccttgaccaccttcccaggggtggatttgagccccagataatccaaccctctcattttgcaaatgaggaaactaaggaaccacaagggagagagatttttcagaatctcacagcgagtttgcaacaaagccaggaccctggctcaggccttcagcc

SEQ ID NO: 2016 - DNA, 378 bp, Homo sapiens
ttttttgtagagatggggtctttccatgttgcccaggctggtctcaaacttctggcttcaagcattcctcctacctcagcctcctaaagtactgggattacagggatgagccactgtgcctagccttatattttagatcagtatgttattactattctactggttttgaaaactatagaaatacaaaatagtatggtttagtgaagggtttctttatcttggcactgttaacattttggcttgatgattctttgttgtggggggctgtcctgtgccttgtaggatgcttagcagcattcctgtcctctgcccattagatgtcagtagcgagcccccatcccccaccagctagggacaaacaaaaatgtctccagacat

SEQ ID NO: 2017 - DNA, 295 bp, Homo sapiens
aactatattcagtgagagcctcagtggtaagagtgaaagcatttccccccagtccaggggcttcatccttccttcagtgccttggccaggccctcagggaatgaggagacctttgctcttccctccaccttgtcctgactcctcaagcctccagccttgaggaggcttctctagatgaaagctcctcagtaattgtattagtctgttctcacaccgctatgaagaaaaacccaagactggggaatttataaaggaaagagatttaattgactcacagttccgcattgctggggag

SEQ ID NO: 2018 - DNA, 369 bp, Homo sapiens
gaacattttcattacgccccaagaaggcctgcacctgttagcagtccctccccatggtccgcactgccaaatctgaagtcataaagatttatttttatattttcttctaagagtttttttggtttcagcccttttaggtcttggacacttttttttttttaaggaaaatttaaactttagcttgggcatggtggctcacgcctgtaatcacagcactttaggaggctgaggtgggtggatcacctgaggtcaggagtaccagaccagcctggccaacgtggtgagtggtgaaaactcatctctactaaaaatataaaaattagctgggcatggtgccacgcacctgtaatcccagcggcaggggaggct

SEQ ID NO: 2019 - DNA, 154 bp, Homo sapiens
aaattaaaaaataacaaaaaatgagacagaaaacaaatattttgtttcattattgcttgttagttgattaaagtaattctgcttccactttattttcaaagacactaattgctacactgaataaaaccttaatggagtttcattataagtatct

SEQ ID NO: 2020 - DNA, 266 bp, Homo sapiens
tttttttttttttgaccgagtctcactctgttggtcaggctggagtaaagtgacacaatcccagttcactgcagcctcgacctcccaggctcaaatgatcctcccacctcagcctcccgagtacagggactactcacatgtgccaccacctccagctaatttttctctattttttgtggagacagggtctcactacattgcccaggctggtcctgaactctggggctcaagtgatcctcccgcctcaatgtcccaaagtgctggga

SEQ ID NO: 2021 - DNA, 402 bp, Homo sapiens
tgcaaaattgtgtagattaagtgatgtgcaaataaagcttttacaatagctaaaagcctggctcaacgtaaggacacaagaaaattgacagcagttctttgtgcagcgtgataccgttgacgtcctccttgtccaggccattctcttcctcacttaccctggagaggccggcactgactagtatcctacctggctgtcttcgcagcaggactaattggagaattatggacggagatcaaatatgctaggttctttaaatccagagcgcttacacgagtactgtacagattgagaccgtcatctcgcgctgtggtctgtctttgctttcatcccttctgtctaccacaccccctgctaataaccatcgccttatttagacaggatataaaacttttgatatgg

SEQ ID NO: 2022 - DNA, 387 bp, Homo sapiens
gactgctaaaatgtaaacatgtctgataagaatcttccaattgttcataagtttttcccttttctcttgtgtttactttttaattttaaaataacgatagcattgtgtatctactgacattgccgtgtaacaaatcatcccaacctaagtggcttaaaccaagaaccatttatgatttctcatgagtcagagtcagctggggatcagttgattaaatcttggcttaactggcagtgactctgctccatgtatttctcatcgtcctgctgtcagtctggataagtccttctcatggtgatggcagacagcaagttgagacacaacaaggcctcttgaagtctagcttgggactcgcataccatcatgtctaactcattttattggcca

SEQ ID NO: 2023 - DNA, 467 bp, Homo sapiens
atgggggcagatctatgatagatggcttggtgccattctggcaggatccagtgagttctcactcttagttcttgagagatctggctgtaaaaaagaacctggcaccttcctctcctctctttcttcctttctgtctggccatatgatgcctgctaccctttaccttccaccatgagtagaagtttcctggccgggcacggtggtcacgcctgtaatcctaacacttagaggccgaggcaggtggatcacctgaggtcacgagttcaagaccagcttggccaacctggtgaaaccctgtctgtactaaaaatacaaaaattagttgggcatggtggcgggcacctgtaatcccagctactcaggaggctgaggcaggagaattacttgaacccgggaggcagaggttgcagtgagccgagattgtgccattgcactccagcctgagcaacagagcgagactccatctg

SEQ ID NO: 2024 - DNA, 425 bp, Homo sapiens
gactgcaaacacccccagctcccagggcccagcagcctggagatcctgcgcacagaagcccagctgattttgaaaagccagccaagtggcttggcttcctgtttttgcagagtctttctcaatgtcttaaaatctaaaagttctccaaatgcagggatgccaggaggaggtgaacagagaggtatcgtggtaggttttatttttagatgctgaagtgtaaagtgtccagtttggcttcgttctggtccccagccaccacttcctcccccaagccaccacctaaatgaacagcatacatgtctagaaagatttcgcaatgcttcttctgccccggacattctgacacaatggctccagtctcctgttcctcccacagaccgagcggattaaagattttagtctaaatcttcccagaatgccacata

SEQ ID NO: 2025 - DNA, 485 bp, Homo sapiens
gtaagtagtcttgtgacggctcatattaactctcttatgcacaccagatagtaagactttgatatgatatgtactgcaggtatatgctataaagaaaaatcataacagcaaatattactccctggacccaccaacaagaagggtgttccttctctgctgctgccttgctgaacagttcaactttagcataagaactgctggctgagcgcggtggctcacgcctgttatcccagcactttgggaggccaagacaggcagatcacgaggtcaagagatcgaggccatcctggccaacatggtgaaatcctgtctctactaaaaatacaaaaattagctgggcgtggtgacatgtgcctgtagtcccagctacttgagaggcagaggcaggagaatcacttgagcctgcgaggcgaagattgcagtgagctgagacggtgccactgcactccagcctggcaacagagtgagactccgtctcaaaaaaa

SEQ ID NO: 2026 - DNA, 323 bp, Homo sapiens
gaatttaaattgtttgtgttgtaacagtgatacaaaaatgttcaatagctctttgaatgccactttttttaaagaaaatactttaaaagtcattcttagctaacctcaaaactcctttacattactttcattttagctcactcttaaagctgatactgttatatagggatgaagggagagttttcttaaagaaggtcccaaagttgaagatcgtttgtcattgatactctggccaagtccaggttttaggacaatttaatttactcttatttggatctgtaattatgggagtttatcacttttcctcttcaaagcacttcaac

SEQ ID NO: 2027 - DNA, 677 bp, Homo sapiens
gatgactagtgaatatgaggttttccattaggctggtaggaaacaggagctatttccagccccatgtgagctccaaggttctggttcctagccttggctactttccttacccatgtgtggttatcagtactcagttgaagacatgagtgggctctgcaggtctctgccatgctctttctgggcagctctttcctctctgccactctgccctgttgtaaactctagtcttcttggcctccctgggttgccaggtctgcctcttcaactaatggagaacacctcttctggctggctcccccgtcctggtgctgtggcctagcaagaaggtagggtaattatgaagtttccctcatttgtttccttctctcagggatcactgtcctgtactgcctgaagtccactgtttcaaagtcattgttttggccaggcacggtggctcacacctgtaatcccagcacaagttgggcagatcgcttgagcccaggagtttgagaccagcctgagcaagatggcaaaaccccatctctactaaaaatacaaaaatcggcctggcatggtggcacacacctgtgggaaacccagctacccaggaggctaaggaggatcttagctacccaggaggatcgattaagtccaggaagttgagtcggcagtgagctgtgatctcaccactgcac

SEQ ID NO: 2028 - DNA, 302 bp, Homo sapiens
gtataatgccctacaaaaaagcaggaagacctaatgattacaagttcactagttctaaccttattctttcctatacatatagtggtagtgaccaaggtagaatcttatatttttcttcatcttcaaatgttatcatttaaacccttgacattattgacttgagaataaatgtgaaaatcatggactgagcactctatactgtctgagtagtttatattttaagagtttcttaaagagtaacttgggaaatcagtccattaactactattgcagtgactgtggcacaagggtatattggtttt

SEQ ID NO: 2029 - DNA, 407 bp, Homo sapiens
attgaaaaaagtataacttttaatagaaaaataatctccttatttaatatgtatatttttaaatgttaatgaaataaaatgcttttctacttttggccttttatattaccagtcgacctctcttttccacggtcttctcatgtgtttaatgatgtcagtaactatcaaccttattgtgtgtttcaaggattgagttaatacagatgatgcgtttagaataatgcttgatgtaaacattcaatacattttagatcttatgtttggctaatctttttgatttactgatatattttcttatttcattttaaagttatttaaatttataatttatttattagagtcctttaggaatgttaacccttctcagtcacccgatgcaaatatttttcttgttggttatttgcctt

SEQ ID NO: 2030 - DNA, 444 bp, Homo sapiens
tctttctctttcttcctttctctctgtctctctctctctctctctatctctctttctttctttctttttcttcagggtctctgttgcccaggctgcatgcagtcatagttcactacagccttgaactcctgggctcaagcgatcttcctgcctcagcctcccgagtagctgggagtacaaagcatgtgccaccatgcctggctaactttttaaaaattattattatttgtagagatgggatcttgctatgttgcccaggctggtcttgaacacctggccacggcctccccaagtactggggttacagatgtgagccactgtgcctggacagttcttactttttaatgcattttttaattgattgtggtaaaaacaaaaaacccacaatatattctttttgattctgcgaagtgcagggtctctatcacagcaacaattagactc

SEQ ID NO: 2031 - DNA, 363 bp, Homo sapiens
taactaattatgaacatatggtttggcagacaccttgttagcttgctgctgcgtaggtgtttggaaggaggtgaaggggaaagtttgaggtagaaggtgtggctaaaagtcccactgataagcctgggggagatttgattgatcctaatctttttgtcaagaatcagcatgcttctggcagcaacagcttggtaataacagagatttgtggcccttaagctctggtgtgatagacggcacacataaccagatcagtcaactggctccttataaggccctcatttaattggccacaatagtgggaacagaaatgagatgttaggtcaaggtacaacacatggcctacctgaaatggctcaaaat

SEQ ID NO: 2032 - DNA, 349 bp, Homo sapiens
tttttttttagtagagacggggtttcactgtgttagccaggatggtctctatctcctgacctcgtgatccacctgactcggcctcccaaagtgctgggattacaggcgtgaccaccgtgcccggccaaatgcaatgagttcttgttctacttttagatcacttcaaaactctgtatttcatcctcacattgccttgtaagacagtaattataacactgaaaaattcctttttaaaccttattactctcccttacttatctcctggtaggcttcaagtacgaggagttcttaatctgtgatccatggaccatggtcccaaaggtctagggataaagctctgcttcagtag

SEQ ID NO: 2033 - DNA, 196 bp, Homo sapiens
acctatctgattggcaaaaattcaaaagcttgatagggagtctatctgagcctgggcaggttctggaagctgcccaatttaaaaaaaacaatggcgcctggtgcggcggctcacgcctgtaatctcagcactttgggaggccgaggcaggtggatcacgaggttaggagttcaagaccagcctgaccaacatggta

SEQ ID NO: 2034 - DNA, 881 bp, Homo sapiens
gtgagaagttaaaaatgtttcagatcgctgcctggggacacagtggaagattgccagaataaatgaccacctgtatatgggtaaaattgctatttaagagtgaaaaatgaaatagaaaacaacctattttaataagtgggaaaaggatgtgaatagacatgtcttcaaagatgatatacaagtggccaataataggaaaaaatgctcaacttcactaattatgtgggaaatgcaaatcaaaaccactgggtgatatccctttacatccattagaatggctacaattaaaaaaacagaataacaagtgttggcaaggatatagagaaactggaatccttgtgtattactagtgggaatgtaaaatggtgtagtcctatggaaaacaggatgatgatttctcaaaaattaaacataaaattaccatatgatccagcaactccacttctgggtagatacccacaagaattgaaagcaaggacccaaacagctgtttgtacactcttgttcatagcagcactattcacaatatccaaaaagtggaattgtccattgaccaatgaattggtaaacaaaatgtggtctatacatacaatgaaatattattcagccttaaaaaggaagaggaattatgaaacatgttgcagtgcggatgaatcttatcatgatgctaagtgaataagccagacacaaaaaatccaaatgtatcattctacctgtatgaggtactttaagtagtcaattcatagagacagaataagattgtggctgccagagaatgagggatgggggaaaagggaaattgtttaatggatacagcatttcagttttgcaagatgtaaaagttttggagatccattgcacaacagggtgaatacaggtag

SEQ ID NO: 2035 - DNA, 365 bp, Homo sapiens
gtaactttatacatgcgaaattttggtaaaattgacaaatccatagaaaaattcgacttgcaataataaaaaacaaacccctgaagtgtcttaaaactgttaaaaaggaattgaacctccaaattaaaatattttcattatgtaatctccaggcccagatagcttcactactaaattctaccagtcaatcacttaataaatggacagtgtcacgattccagagaatacaggagaaagcttactcagcttattttgtgacaccagcagtagtcttgatactaaaattcaacaaggacattagaaaaatgaaaattatataatgattcttgtgttacctttcaaaaataaaggaaaaatcagccggg

SEQ ID NO: 2036 - DNA, 442 bp, Homo sapiens
ccactcgatttctctcagtctcacctgtccttgggacctacgaccacttgggctgctccagtggacattttctcaaggactccagtcaacttcagaagagcacaattccataaccccttggcctctcgtcctactgcacttcttccaccccctccccggggcattcctaatgatggggagccacaactctactgtgagatattctagggtgcctagcacagccccaaagtgtggaagttcatgccctgtgagtgaatctgtgaccaataagagatgtcccctttcttccagggacagactgccttgggatgccatatacagcacccctctgaagttaagcctttgagattaagcagtcagctgtgcttgacaccaagcatccctccttttctgcctcacccctctttttgctcactcttacttccctgggattgtactcctt

SEQ ID NO: 2037 - DNA, 489 bp, Homo sapiens
ttcttttccaggtgaagcccttggactactgtggccaagtgaacagtgccctgtttagacaacccaggcccatttctggcttttccaccaaataattatgtgacacaaggcaatctgttcgcttccctggaccttagttcctcctctgtaaaatgggggaaatgatgtcataagtccctctgagctctaacttcctccatgtcttccccacatagccagttctcactttttttccgtatgtgtattatatggtcagttttaaatctggaacagtcttcttttcatgtggctgttttttacaagtagatctttaagaagacaactcagctgccaagaatcatgttgtctcctaacaaacaatatccattattctgggaatattgattatccatcatttcaacaacccagtatctctttccatcattagtgctgatgactgggtgctgcctgaattacacaaccactttcctatccctccagcctcctcta

SEQ ID NO: 2038 - DNA, 502 bp, Homo sapiens
gccactgcatctggccccaaatttttaaaaatcctctttaggatgaaaaatgatcccctctgaaataagtttcctatttagctaatgaatgttgagtgctattccagataaaagcatggagaaaaacagtttccataaggtagtaaacactaacggtccctacggcctcgagggagggggagtacgctacgaacattcatagaaatatgtttctttaatagatctcaaacaacactttcagggtggtccatctaaacataggttgtgtttaatataaaatgactgcaagcagagcctgtcaatgcaagacacattgctacatctgtcacataaaatagaaaaacaagctgtacagcagaggacctgtccatggacctcccaggctcaagcgatcctcccggcttagcctcctgagtagctgggactacaggcacataccaccgtgcctggttaattttttaagttttgttgttgttgttgttgctgttgtttagacagagtc

SEQ ID NO: 2039 - DNA, 316 bp, Homo sapiens
tccctttattcttaccctccagggttaactactataactgtctgctgaatggtatgtcagattttacttacatatgtattaatatgtaactgaagaagagttttgttttaacaaagttcagtgtcctattagacattaatgtgtgtattagttttctgtgactgttgtaacaaatcaccacaaactgggtggtttaaaacaacagaaatgtattctgcaagccagaagttcaaaatcaaggtgtcggcagggtcatgcctctgaggttttaagagggaatgtgttccagccctcttttctagtttctaatggcttc

SEQ ID NO: 2040 - DNA, 304 bp, Homo sapiens
gaatttgctttctcaagctcagtcagtggcagaagtggggcatgagacaggccttaacttctcctttcattgcagagccatatgtgatttaatatggcagggcattcaaggaaacccaagtgacttggattccaagttatttggaatatttctgtcctgttgtttttggtctgctttctaaaccacacggttgtgatcttcttccttcgatagtacattttaactcttcttattgaaattgaaggacacatggattccttgctccccccatgtcatgtgcatgtcagatttaatcaggttatct

SEQ ID NO: 2041 - DNA, 391 bp, Homo sapiens
acactcgacccagtctaaagtgggtgccattcacggaggaagagggaggttggagacttcaaccgggcaaaggagcacaaggaaaccaagcagcagaggccccatcagcacagagggcctcgttccacgaacgtagagtttgactgcctaagggacagcacgaatgactcacatgtttcagacaggcctccacggctatggagagaaggctggaggagacacaatggatggttcatgttctggcttagcaagagccaccaagaactttgggtgaagcaagcagatgacaatgaagaggagtaatgttccgaatcatgtttttgaaaaatcaagacctcctgttaagggcccacttgaccctagaataaggcaggagagtgtctaaaatcta

SEQ ID NO: 2042 - DNA, 443 bp, Homo sapiens
gtccaaacagattgttttttccttctgtttggcaacctcaatggctctacctgtttctggctgtcatacttcggcttgtgaacagccttcctccctaattttcaggaaactaacaaattaaaggtgcaaatgtcaggtggttactacatatctactggctcacataattcaaaacagagtcatgcagctcctatctaaagctagttccttgccccttctcagtcactaccacatcaagcacaaatgtagatgaaagggtagtgtgtcaaggtgagagctgcccactgggtagtgttactcggtcacttgctataggggacagattagctgccaatcagtatctcatcactgtcattggcgtttataatccaggttcctagccccactggtgatctatttctgtgcctccgcagtgacgccagttgtcctagcaacgtgctggc

SEQ ID NO: 2043 - DNA, 434 bp, Homo sapiens
ccctctctctaaaataaatgaatgagtaaatgaagatgtattctgatttaaccaagctggtacctcctagtgactgtatttggtagagaattacagttttgagaaggttgggctctattgtgtgtgagtcatcagcaccttaaaagtgataagaaaggatagccaggcatggtggctcatgcctgtaattccagcattttgggaggccaaggcaggcagatcccttgagccatggagttcgagaccagcctgggcaacacggcgaaaccccgtctctaaaaaatacaaaaattagctggacatggtggtgtgtgcctgtagtcccagctacctgggaggctgaggtgggaggatcacttgagcccaggaggtcaaggctgaaatgagccataattgtgccactgcactgcagcatgggcaacagagcctgtctc

SEQ ID NO: 2044 - DNA, 179 bp, Homo sapiens
ggtgattaaaacttcagaactgtttttgaatactaatttggtttttggaaacagcccaactccattcgggaaaatctggggaagagggaatcaaatctgggcaagctgggtgacagtattttagtttaaaaaacaaaacaacaaccttcctctctcccccacctcaaaaaaacacaaca

SEQ ID NO: 2045 - DNA, 299 bp, Homo sapiens
ccccatcattttttgagaattttctttctttcttgtgaaacaagatgtttcaggttcatcttatcctttctttgcctggaatcagccttttttccaaggaatctgggtcccttttaatggagaaaggtatttagaaattataatctgggttctgttcacacttagtgctactggtatattattgtttctaggctttcttggagacagagatagattatgtacatatataatagaaagatgattaatatatacgtagtaaaatcatgtgttctagagggcacacttttttctcccctttt

SEQ ID NO: 2046 - DNA, 471 bp, Homo sapiens
aaaagttaataaacttctgggctgtacatggttattaaatacatgtacaagagtattaattctagcccttgaaaaatttaaggaaggatatgatcccatttagggtgggaatgaaacaagagagactctgtatcccttcaaatattgtagctacatagcttgcatctggttctgttatcatactgatcggattctgatttcttgtgaagtagaaatagtggtagcagcagcagcaaccatgtttcaagtacttgccatgtacttatgcaatgtaacctacccacacagtaagcacttaaaacttttcatgtattagctcatttaatatgcacagcaacctgatgaaatatacactgttgtgacaaatctgagcctcagtttccttatttgtaaaatgaggaaatactccttggaagaaacttactgtaaggaaaacattccttgtgtacggataacgagtgaacctctaga

SEQ ID NO: 2047 - DNA, 374 bp, Homo sapiens
tcgcttgaacctgagaggtggaggttgcagtttgcaatgagccgaggtcatgccactgcactccagctgggcgacagagtgagactccatcttgaaaaaaaaaatgactttcttaaagtcctcaataatcaaggaatagaagcaaagtagaatatagacatacacagtgaagtgactataagatgatgtcttcaggagaaaacagagaattaagccaaaatggaaagtatttctgggaatagctgcagctgaatccctaagaaattgtgccattttaaagctagaaggcaaattgggaagacactgaggccaaatccatcattttctattagggaagtgaggaacccaagtcacaaagctagtgatggcagaga

SEQ ID NO: 2048 - DNA, 405 bp, Homo sapiens
ttgtatttagtagagacatcgtttcattatgtaggccaggctgttctcgaactcctgacctcaagtgatctgcctgccttggtgtccagcagtgttgggattacagacatgagccacagcacctggtccatttctggtagaaaattttcaaaataaaaaataatggcatcgattttagggagtccctttagtgttcccccagcacgtttatggtgtgaactgagaatggaggctgtctggggccacaggacactctcattctcattgctttagggtggtaagtgacaagaaatttttcctcaaagaggtagagcttggctttcaggatcctcagtggcagtgtccggtggttctgggattcagtggaatgaaggatgaaaattaataagccagtggtctccttga

SEQ ID NO: 2049 - DNA, 383 bp, Homo sapiens
caactcctgctccctgctctattccaactgcttcccccaggaaggggggacgaggcggaggaagtcgttctcttgacacccctagaacataaggcatcttggccaggcacagtggctcacgcctgtcatcccagcactttgggaggctgaggagggtggatcacctggggtcaggagttcaagaccagcctggccaacgtggtgaaaccccatctctactaaaaatgcaaaacttagccgggcgcggtggcacgtgcctgtaatcccagctactcgggaggctgagggaggagaatcgcttgaacctgggaggtggaggttgcagtgagctgagatcacgccactgcactccagcctgcacaatggagtgagactctgtctca

SEQ ID NO: 2050 - DNA, 470 bp, Homo sapiens
gtcactacttctcttctgcttgtttgtgggtgaggggctgaattatattttactgtatgtctctaccataatttggtcatcctttcatccattgatggacaaggatgggctgtttctaccttctctggctattttgaatagtgctgctgtggacctgcgtgtacgtgcatttgtttgagtacctgtttttttaagaatataatcttagagcattgcttaaggatggacttggggttatctgtatctgggtccttgctactcagagagcgatctggagagcagctgcatgagcatcgccaagcagctggttagaaatgaccattgcagacccaccccagacctattgagttagactctgcacaggtgaatcagatgcatattaaaatttgaggagtagtgatctagtcagtctttggactggctgttttttaatgtatttattttaattaggaaatgtaattttcatatat

SEQ ID NO: 2051 - DNA, 454 bp, Homo sapiens
gaaatgttgtctaaagagtgaaagcagaagaacaatgttccaccaaatagagaatatcaatagataccaaaatcaggtatctctattagaggctgggtgcagttgctcacacctataatcccaacactttgggaggctgaggtgggaggattgcttaagctcaggactttgggacaagcctgagcaacatatacccccatctctacaaaagttttaaaaattagttgggcatggtggcacattcctgtagtcccaactactcaggaagcacttgagcccagagactgaagctacagtgagctatgatcatgtcactgcactgtagactgggtgacagagtgagaccctgtctcaaaaaatcaaaaacagaaatccagtaacagcaaaaaacactaaatagaagttttgagttagaacttcactagaggggctcagcagcagatgtgaactggca

SEQ ID NO: 2052 - DNA, 426 bp, Homo sapiens
gcatgcgccaccatgcctggctaatgtcgtatttttggtagagatgggatttctccatgttggtcaggctggtctccaactcccaacctcaggtgatctgcctgcctcggtctcccaaagtgctgagattacaggcatgagccactgcactgggcctgcttctatttttctcactgacttggttgcattcagtgccagtaattccagtggtcacatatccatgttgtctttcgtgcctgttctaccagttggcattgctccctggaagggacttggtctacaactggcagaactccttctcctaaggccttgtgtaaggtcactgggatagaccatggccctgatggttgatattgcctccccttgccataccttacctgggaaagtgaggcccaggagaagggaaaatgggtgtagaacagatgt

SEQ ID NO: 2053 - DNA, 625 bp, Homo sapiens
cgtggtcattacaaggcaaatgtattccattaaagtacatgcatacatatattttagagaactcaatctggtatgcgttatattcagagtagagggtatatgtcaccactgtgagcctcatgcctcctagagatcacatcttggttcaataaccactggtgtcctggcaccccattttatctcattatagttgacagtgcgctccctgcaaagatctcatgtagttccaaaatctctgaacagcaacaacaatattcagattaggaaatgtaaggaaacaggccagggtgtggtggctcacgcaaataaatcccaacacgttgggagggccgaggtggaagaacttgcttgaggaccaggagttggagaccagtgtgggtaacaagacaagacactatctctacaaaaaatacaaaaattagctgggtggggtattgcgcacctgtagtctcagctactccagaggctgaggtaggagaatcgcctgagcccaggagatggaggctgcaatgggccaagatcgcaccactgtgctccagtctgggcaacagagcaagaccctgtctcaaaaaaaaagatgaaatgttaaatatatataaaaagaatgtaggccaggcacggtggc

SEQ ID NO: 2054 - DNA, 532 bp, Homo sapiens
tgtatgtactatgttttttcctttgcagtcatttcatatagggcaggtagcgagaccatgtagatatgctggaccaagggctgactcatgtcccagatcaaacagagtgggagggtgagagatttcaccatgctactcagaatggcatgcaattgagcacttatgaattgtttgtggaattttccatctaatattttcagaccatgtggttgactgtggataaggagggactgctgtagtgtctttgcagatgttatcaagtaaggatgaggtcctactgggtcagagtgggccttcaatccaatggctggtgtccttacaaggggcaagaaatttggagatacctacacatgcacgaagggaagaaggccattaacagtggagacagagatggaagtgatgcagctacaagccaaggacaccagggctcaccagcaccactggaagctggaagagttgagagctgattcttcccctggggctcagagggaacatggcccccgcgcttccagtctccacaacagggagagaa

SEQ ID NO: 2055 - DNA, 244 bp, Homo sapiens
cctcttaccccactcccagaatagacaaatgctgagggaaaagcagctgcagaatgctggctcacctccttgtgcagttccctttctccctggttttatctcctggagtccttgtctcagcagctctctagtgatttcaaacttttttttacttttattaagcgtttctagttgttcttgttggaaatgttggtcatcctcaagctacttcatcatgactgaaagaatacttttatagttcttt

SEQ ID NO: 2056 - DNA, 275 bp, Homo sapiens
ggaagacagttattttgaaaaagcaacactcaaatgtctgtctgctacacattcacagttgacaggagggagaaatgtttctacgtagatatattgagtgattaaaaaatatatttacatgttaaaaactggatattaaccttaagtctaaatatgcacattatcatacatatgtattataaatcttacaggtaacctctaagaaatagttgtaaatgaggaacaatgcaattgactacaattctataatatcctccacataatgcatacattta

SEQ ID NO: 2057 - DNA, 453 bp, Homo sapiens
agcgatctcagctcactgcaacctctgcctcctgggttcaagtgattctcctgccttagcctcccgagtagctgggattacagatgcatgccaccacgccctttgtatttttagtagatatggggtttctccatgttgatcaggctgggttcgaactactgacctcgtgaaccgccctcctcgacctcccaaagtgctgggattataggcgtgagccaccgtgcccagaccaaagtttgctttcttttgcttgcatagcagtggtgctgtttcaccttgcatggtggcccagttaagggttacttgtcccagccttcattgtagccaggtgtagccatggagggcaccgtccgtccagtgaaaaatgaacagtgatgaggcatggcatttctgggtacgggccttctaacaccaagtgtgggctactctgtgctctttctcctccatggagta

SEQ ID NO: 2058 - DNA, 403 bp, Homo sapiens
agattctgtccagaagtaacatttagagcataggcttccatttcattggccaaagcaaaccatacttacttttgagaagtggaggtggagaaacacaacctcataacatgtgtgaaagaaataggaaaactggcatatttgtaaataaatctaacgacttccacaactgttctgctatagtgcctttcttattaccttgcctttctctgaagccactacagaaacatcaaaaagaattatggaaaaggtcttgagtatacaaagaatgtagaataaaagactgtgaaataaagtattgacagatatcatacattagatggaaaagagatctaaaatacagatgaattgcttatggtaaacttataaaagaaatcacaaattattgaagattttttttaatcta

SEQ ID NO: 2059 - DNA, 7557 bp, Homo sapiens
  misc_feature (2152)..(2152): n is a, c, g, or t
  misc_feature (2303)..(2303): n is a, c, g, or t
  misc_feature (2530)..(2530): n is a, c, g, or t
  misc_feature (4348)..(4348): n is a, c, g, or t
  misc_feature (4592)..(4592): n is a, c, g, or t
  misc_feature (4679)..(4679): n is a, c, g, or t
  misc_feature (4685)..(4685): n is a, c, g, or t
  misc_feature (5029)..(5029): n is a, c, g, or t
ttctgcttatcatggttaccaacaaaatgactgctgcctttagaaaccctagtgggaaacaggtggcgacagacaaagttgcagaaaagctgagctctactctctcatgggtgaagaacacagtatcgcatacagtcagtcagatggccagtcaggtggcaagtccatctacttcattacataccacatcctcatctaccacactatcaacaccagccctttcaccatcttccccatcacagttgagtccagacgtcttagaactcctggctaaactggaagaacagaatatattgttagaaacggatagtaagtctttaagatctgtaaatgggtcaagaagaaacagtggctcttctcttgtgtcgagttcatcagcctctagcaacctcagtcaccttgaagaagattcttggattctttggggaagaattgttaatgaatgggaagatgtacgcaaaaagaaggaaaagcaagttaaggaacttgttcataaagggataccccatcactttagagcaatagtttggcaacttttatgcagtgcacaaagtatgccaattaaggatcagtattcagaactcctgaaaatgacctcgccttgtgaaaaattgatccgaagggacattgctagaacttaccctgaacacaacttttttaaggaaaaagatagccttggacaggaggttttatttaatgtaatgaaggcttactctttagtagatcgtgaggttggttactgtcaaggaagtgcttttatagttggattgttgcttatgcagatgccagaagaagaagctttctgtgtatttgttaaattaatgcaagattatagacttcgtgaactttttaaaccaagtatggcagaattgggcctttgtatgtaccagtttgaatgtatgatacaggagcatcttccagagctctttgtacattttcaatctcagagttttcatacctcaatgtatgcatcatcctggtttctgactatctttcttacaacttttccactaccagttgcaacaaggatatttgatatctttatgtctgagggtttagaaatagtgtttcgtgtaggattagcacttcttcagatgaatcaggcagaactgatgcaacttgacatggaagggatgttacagcactttcaaaaggtcattccacatcagtttgatggtgtcccagacaagctaatccaagcagcttaccaagtccaatacaattcaaaaaaaatgaaaaagcttgaaaaggaatacactacaataaaaacgaaagaaatggaagagcaagttgaaattaaaaggttacgcacagaaaatagacttttaaaacagcgcatcgagacattagaaaaacataaatgcagttccaactacaacgaagattttgtgctacagctagagaaggaattggtccaagcccgactgagtgaagctgagtctcagtgtgcattaaaagagatgcaggataaagtcttggatatagagaagaggaataactcccttcctgatgagaataatattgcaaggcttcaggaagaactcattgctgtgaaacttagagaagcagaagccattatgggtttgaaagaacttagacagcaagtcaaggatttagaggaacactggcagcgccacttagctcgtactactgggagatggaaagacccacccaagaaaaatgctatgaatgagttacaggatgaactgatgaccattcgacttagagaagctgaaacacaagcagaaataagagaaataaaacaaaggatgatggaaatggaaacacagaaccagatcaatagtaaccatcttcgaagagcagaacaagaggtgattagcctacaggagaaagtgcagtatctttctgcacagaacaaaggactccttactcaattaagtgaagcaaagcgtaaacaagcagagattgaatgcaagaataaggaagaagtgatggctgtgaggcttcgggaagcagatagcatagctgctgtggctgaactacgacaacacattgctgagcttgaaatccagaaagaagaaggaaagcttcaaggacagcttaacaagtctgattctaaccagtatattggggaactgaaagatcagatagcagagctgaatcatgagctcaggtgcctaaaaggccagangggcttctcaggccaacctccttttgatggaatccacattgtcaaccatttaataggagatgatgaatcattccattcctccgatgaagattttatagataattccttacaggaaactggtgttggttttcctttgcacggaaaatctggntcgatgtctttggaccccgcagtggcagatggtagtgagagcgaaacagaagacagtgtgctggagaccagagagagcaaccaagtggttcaaaaggagcggcccccgagaagaagagagtcgtattcaaccactgtctgaccatcactgtgacctagactatggatttatttaagggatcagttatcatatgattagggctttttggaaataatttgtttcatatntatatatatatatatatatatatattttacagtcttatctgcctttttatctttgccaaatctttaccactgatttaccattgccataaagtagactggtatatggttaatgtgtaaaacaaggttctaacagtattactgaatattaatgtttcttgtttagaaaatgcaactatatctatatgtgggaaccattctgaagttcaaaactatggaaaattgaattttcttcagacaaaactgctcttgtgcaatattttatgctcagtgagcaaattgtgtatttatgtttatcaatttgttctcaaggtggctgtctacagacatttgaccaagacatacatctgatttaccttgtgtttttttttttattggtgtttttttttttaagacagagattcagtctgtcacccaggctggagtgctgtggtgtgatcttagctcactgcaacctccgcctcccaggttcaagcaattttcctgcctcagcctcccgagtacctgggactatatgtgcgcaccaccacgcctggctaattttttgtatttttagtagagatggggtttcaccatgttggctgggctggtctcgaactcctaacctcaagtgatccacccgcctcagcctcccaaagtgctgggattacaggtgtgagccactgcacccagcctaccttgtctgtttgtgtctgggaggttttttttttctatttttattttttcatgaaaattattggtgggccactgaaagtccccacacacaaagcctttattctatataattttataaacacaaattcatgattatctgttttgagagttttaagttttgttttaatgtttaacttttatgtgcatatgatgcttccatgtgttggttactagagtagtaggttaactacagacatactgttttgtttgtacatatttataaatctgtaccacctaacattgaacatcattttatatgaagaacatacatgttgcaaaatgactgctttcagcatctaacaggacttctgtaaataataggttaaaagttaaaaataaaacactaatgttttaagagctttagtattttgcttagcattcaatactagcagattcataactgatgcctgttcaaaaacactgttggtggaatcttttatttcatgtgtatgtaactactaaatttttcatgactgaagaggttatagcacatattagttagtgctaatattctactgaatataatttaagcaatgggctaaggtccaagaaacatagcaattatatctacaaataatctattaacatgatcttcagaatctctagtttttgttctatagataaagccataagaatcctttcctaccagtttttcctatatcatttagatattatttcctagaaaacaggatgcctgtcactgataagttagagaaaacacccaaattatacttgcactatggaaagacgacatgaatatgttgactgggtactttctactctcatttttgttagcctatgaaaaaaaaaacattttgttaacctatggaaaaagccttggaagagaaaagtagaattcagtatgtatggaggcacagttttgcacagtatgttgcatgcggcaaaaaaaaaaatatgaaatagagtagaagagataaaagtagttttctgtcaaaaactaggagttaagccttcaggtacgttgtggactaggctttccagcaaggtttttgtagctatttgcttgcctgagaaatgaaattgaaaacatacccctgcgtgtctgtccttaacaccaggctaaattctggtggttaaataacttanctgtggttacaagctagtaagtagcagagccaagattttttttaatatagagacaggtgtctcactgtgttgtccaggctggtcttgaactcctggcctcaagtggtcctcctgcctcagcctcccaaagtgtggggattacaggtgcgagctactgctcccagcaagagccaagattttaacctagatctccctaacaccaaagcttttgaaagggttcagctgaagaatttctcaattcttntgttttgtttttatttttgttttttgagatgaagtctcactgcactcaggctggagtgcagtggtacgatcttggctcactgcaacntccacntcccgggttcaagcgattctcctgcctcagctcccaagtagctgggactacaggtgcacgccaccacaactggctaatttttgtatttttagtagagatggggtttcgctatgttggccaggctgatctcaaacttctgacctcaggtgatccacccactttgacctcccaaagtgctgggattactagacgtaagccaccacacctggcaattccctgcttttttgacaacataatttaaatgaatttgatttaaatgtttcctgaatatatatacagatagatagatgagtatcaacacttacaagctctacacagtctgtgagtgtagatactacttactngtaggattgtcttgtgctttggggatttttgttcggagttctatactatcagcccagaaagctatcaatgtccaagtgaagtgagatgatgcatggccacattattgctttgaccctcacatcaagaaatctgaatgatctggaccaggggtcagcaaagtgcagcctacaagctattgcagtcagctgccagtttttacttttttaaatagttgggaaaaaaattccaaagactgatattttgtgtcacatgaaaattatatgaaattcaaattgcagtgtccataagtaaagttttattggggcacacccatgctcacccttttaaatattgtgtatggccgctttgtgctacagtagcagagttgagtcattgcaagggagaccatatggcccaggtagcctaaaatatttatctgatcctttacagaaaaagtttgctaacccttgataacagatactctaaaatgcaggtttttcttcttcaatttagctcagtggtaggtcaaattgtttgcttttgctattaagcttatgatttggaaacgtaaaatttcatggtggatcttataatcagaactattcaaaagggaaaacatgccagccattttatatgatgaagtctcttattccatagaaaactgtagaaagatatctgtatctttggagaaggagaaagaaaggaaagaactccagaatcccatcactgttctttaaagcatgcatcacagacctttaagagtatgctttattgagtaaaggttatagtttgactttaagataagaaattttctagaatcatgtttgaattctaaacgttgatattcttaagtaccatttctgattaggaattaggtgttaaaagaatcatggtaaggaaaccttaatccgttgaaactcttgtaatttggacaacaaaaaactagaaataacactcttttctttgaagatctgattcaaatacaccttagaagagtttaaaatctcccaggcctttaggatgcaataggatattatgccttggtttgactccttttcattcaaattaatgtaagtatgttgttcaagactttgaagcattgaacaatgttctcgacgaattttatttaattactgacattttgtgatatttgaatgttattaagttaaacacttagagttgagtatattcaggggagaaaagtgaatgaaatgactcataataagaaagcttgctcccttgggacagttaccttcctggtgtcattgccatcctgggttgacaagctgagagtagaggatacaagtgatgtgaataaaatggaaattgcattgagttaatgaaacagacacttttagatcaagaaaacacttcaacagcctttttagaaattggcacactcctatagtcccacctactcaagaggctgaggcaggaggatcactagagtacaggagtttggggctgtagtgtgtaatgatcacacctgtgaaagaataaccactgcactccaacctgggcaacatggcaagaccctgtctctttaaaaaaaaaaaaaaatcctgggaaaagaagtcaaagatgtaattttacacaatttctgcccccaccgtcttttttgtttgtttgtttgtttgtttgttttttggctagatactaggtattcagtgtttgctgagatgacaggtttctactaatcagccagttatttgggaaggagaaaaactttttctcaattctgaacatgatgcagcttgttaactctccagatagtgcctttgattgaaaataaggtctacacctttttaagtatattatttctgacatcgtaagaaataatttagttccttattctcatttatcttttatataatgtactgtaatattcaggtttaaagtaaaataagtatatgaattatattttggtaaaactgtttcatgaccagcttgattaatgtatattaacataccagacattgacagcgaacatttcatgaaatcagttatttacttactaaaacaatgagttttagcttgaaagttactgctgctctattattaacaaaactaagttttaaaaattaattttaattctactgaagtttaatttctggttaaaggtatagtggatgctatttatgatccaagtttttacatcacatccattgatctgcctatcccttctttttactccaaagaggagatgatagaataatacattcagtatactaccaagaagcaaagttataatgtgtttcattttgctattggaattttttattgtaacattgtatgataacctgaaatgtttacttgtgccttttctttaaacaattaaagttttccattttataagaaaaaaaaaaaaaaacaaaaaccccgacaaaaacaacaaccagcaacaccacacaaaaaacacacgccagcacacaagacgacacaccacacaaacaaaaaagggggggccaaaaccacgaggaaccacacaccctttatggggccaagagtaataaaaggggggaaaccagagaagacgctggagacctgt

SEQ ID NO: 2060 - DNA, 7503 bp, Homo sapiens
  misc_feature (2152)..(2152): n is a, c, g, or t
  misc_feature (2303)..(2303): n is a, c, g, or t
  misc_feature (2530)..(2530): n is a, c, g, or t
  misc_feature (4348)..(4348): n is a, c, g, or t
  misc_feature (4592)..(4592): n is a, c, g, or t
  misc_feature (4679)..(4679): n is a, c, g, or t
  misc_feature (4685)..(4685): n is a, c, g, or t
  misc_feature (5029)..(5029): n is a, c, g, or t
ttctgcttatcatggttaccaacaaaatgactgctgcctttagaaaccctagtgggaaacaggtggcgacagacaaagttgcagaaaagctgagctctactctctcatgggtgaagaacacagtatcgcatacagtcagtcagatggccagtcaggtggcaagtccatctacttcattacataccacatcctcatctaccacactatcaacaccagccctttcaccatcttccccatcacagttgagtccagacgtcttagaactcctggctaaactggaagaacagaatatattgttagaaacggatagtaagtctttaagatctgtaaatgggtcaagaagaaacagtggctcttctcttgtgtcgagttcatcagcctctagcaacctcagtcaccttgaagaagattcttggattctttggggaagaattgttaatgaatgggaagatgtacgcaaaaagaaggaaaagcaagttaaggaacttgttcataaagggataccccatcactttagagcaatagtttggcaacttttatgcagtgcacaaagtatgccaattaaggatcagtattcagaactcctgaaaatgacctcgccttgtgaaaaattgatccgaagggacattgctagaacttaccctgaacacaacttttttaaggaaaaagatagccttggacaggaggttttatttaatgtaatgaaggcttactctttagtagatcgtgaggttggttactgtcaaggaagtgcttttatagttggattgttgcttatgcagatgccagaagaagaagctttctgtgtatttgttaaattaatgcaagattatagacttcgtgaactttttaaaccaagtatggcagaattgggcctttgtatgtaccagtttgaatgtatgatacaggagcatcttccagagctctttgtacattttcaatctcagagttttcatacctcaatgtatgcatcatcctggtttctgactatctttcttacaacttttccactaccagttgcaacaaggatatttgatatctttatgtctgagggtttagaaatagtgtttcgtgtaggattagcacttcttcagatgaatcaggcagaactgatgcaacttgacatggaagggatgttacagcactttcaaaaggtcattccacatcagtttgatggtgtcccagacaagctaatccaagcagcttaccaagtccaatacaattcaaaaaaaatgaaaaagcttgaaaaggaatacactacaataaaaacgaaagaaatggaagagcaagttgaaattaaaaggttacgcacagaaaatagacttttaaaacagcgcatcgagacattagaaaaacataaatgcagttccaactacaacgaagattttgtgctacagctagagaaggaattggtccaagcccgactgagtgaagctgagtctcagtgtgcattaaaagagatgcaggataaagtcttggatatagagaagaggaataactcccttcctgatgagaataatattgcaaggcttcaggaagaactcattgctgtgaaacttagagaagcagaagccattatgggtttgaaagaacttagacagcaagtcaaggatttagaggaacactggcagcgccacttagctcgtactactgggagatggaaagacccacccaagaaaaatgctatgaatgagttacaggatgaactgatgaccattcgacttagagaagctgaaacacaagcagaaataagagaaataaaacaaaggatgatggaaatggaaacacagaaccagatcaatagtaaccatcttcgaagagcagaacaagaggtgattagcctacaggagaaagtgcagtatctttctgcacagaacaaaggactccttactcaattaagtgaagcaaagcgtaaacaagcagagattgaatgcaagaataaggaagaagtgatggctgtgaggcttcgggaagcagatagcatagctgctgtggctgaactacgacaacacattgctgagcttgaaatccagaaagaagaaggaaagcttcaaggacagcttaacaagtctgattctaaccagtatattggggaactgaaagatcagatagcagagctgaatcatgagctcaggtgcctaaaaggccagangggcttctcaggccaacctccttttgatggaatccacattgtcaaccatttaataggagatgatgaatcattccattcctccgatgaagattttatagataattccttacaggaaactggtgttggttttcctttgcacggaaaatctggntcgatgtctttggaccccgcagtggcagatggtagtgagagcgaaacagaagacagtgtgctggagaccagagagagcaaccaagtggttcaaaaggagcggcccccgagaagaagagagtcgtattcaaccactgtctgaccatcactgtgacctagactatggatttatttaagggatcagttatcatatgattagggctttttggaaataatttgtttcatatntatatatatatatatatatatatattttacagtcttatctgcctttttatctttgccaaatctttaccactgatttaccattgccataaagtagactggtatatggttaatgtgtaaaacaaggttctaacagtattactgaatattaatgtttcttgtttagaaaatgcaactatatctatatgtgggaaccattctgaagttcaaaactatggaaaattgaattttcttcagacaaaactgctcttgtgcaatattttatgctcagtgagcaaattgtgtatttatgtttatcaatttgttctcaaggtggctgtctacagacatttgaccaagacatacatctgatttaccttgtgtttttttttttattggtgtttttttttttaagacagagattcagtctgtcacccaggctggagtgctgtggtgtgatcttagctcactgcaacctccgcctcccaggttcaagcaattttcctgcctcagcctcccgagtacctgggactatatgtgcgcaccaccacgcctggctaattttttgtatttttagtagagatggggtttcaccatgttggctgggctggtctcgaactcctaacctcaagtgatccacccgcctcagcctcccaaagtgctgggattacaggtgtgagccactgcacccagcctaccttgtctgtttgtgtctgggaggttttttttttctatttttattttttcatgaaaattattggtgggccactgaaagtccccacacacaaagcctttattctatataattttataaacacaaattcatgattatctgttttgagagttttaagttttgttttaatgtttaacttttatgtgcatatgatgcttccatgtgttggttactagagtagtaggttaactacagacatactgttttgtttgtacatatttataaatctgtaccacctaacattgaacatcattttatatgaagaacatacatgttgcaaaatgactgctttcagcatctaacaggacttctgtaaataataggttaaaagttaaaaataaaacactaatgttttaagagctttagtattttgcttagcattcaatactagcagattcataactgatgcctgttcaaaaacactgttggtggaatcttttatttcatgtgtatgtaactactaaatttttcatgactgaagaggttatagcacatattagttagtgctaatattctactgaatataatttaagcaatgggctaaggtccaagaaacatagcaattatatctacaaataatctattaacatgatcttcagaatctctagtttttgttctatagataaagccataagaatcctttcctaccagtttttcctatatcatttagatattatttcctagaaaacaggatgcctgtcactgataagttagagaaaacacccaaattatacttgcactatggaaagacgacatgaatatgttgactgggtactttctactctcatttttgttagcctatgaaaaaaaaaacattttgttaacctatggaaaaagccttggaagagaaaagtagaattcagtatgtatggaggcacagttttgcacagtatgttgcatgcggcaaaaaaaaaaatatgaaatagagtagaagagataaaagtagttttctgtcaaaaactaggagttaagccttcaggtacgttgtggactaggctttccagcaaggtttttgtagctatttgcttgcctgagaaatgaaattgaaaacatacccctgcgtgtctgtccttaacaccaggctaaattctggtggttaaataacttanctgtggttacaagctagtaagtagcagagccaagattttttttaatatagagacaggtgtctcactgtgttgtccaggctggtcttgaactcctggcctcaagtggtcctcctgcctcagcctcccaaagtgtggggattacaggtgcgagctactgctcccagcaagagccaagattttaacctagatctccctaacaccaaagcttttgaaagggttcagctgaagaatttctcaattcttntgttttgtttttatttttgttttttgagatgaagtctcactgcactcaggctggagtgcagtggtacgatcttggctcactgcaacntccacntcccgggttcaagcgattctcctgcctcagctcccaagtagctgggactacaggtgcacgccaccacaactggctaatttttgtatttttagtagagatggggtttcgctatgttggccaggctgatctcaaacttctgacctcaggtgatccacccactttgacctcccaaagtgctgggattactagacgtaagccaccacacctggcaattccctgcttttttgacaacataatttaaatgaatttgatttaaatgtttcctgaatatatatacagatagatagatgagtatcaacacttacaagctctacacagtctgtgagtgtagatactacttactngtaggattgtcttgtgctttggggatttttgttcggagttctatactatcagcccagaaagctatcaatgtccaagtgaagtgagatgatgcatggccacattattgctttgaccctcacatcaagaaatctgaatgatctggaccaggggtcagcaaagtgcagcctacaagctattgcagtcagctgccagtttttacttttttaaatagttgggaaaaaaattccaaagactgatattttgtgtcacatgaaaattatatgaaattcaaattgcagtgtccataagtaaagttttattggggcacacccatgctcacccttttaaatattgtgtatggccgctttgtgctacagtagcagagttgagtcattgcaagggagaccatatggcccaggtagcctaaaatatttatctgatcctttacagaaaaagtttgctaacccttgataacagatactctaaaatgcaggtttttcttcttcaatttagctcagtggtaggtcaaattgtttgcttttgctattaagcttatgatttggaaacgtaaaatttcatggtggatcttataatcagaactattcaaaagggaaaacatgccagccattttatatgatgaagtctcttattccatagaaaactgtagaaagatatctgtatctttggagaaggagaaagaaaggaaagaactccagaatcccatcactgttctttaaagcatgcatcacagacctttaagagtatgctttattgagtaaaggttatagtttgactttaagataagaaattttctagaatcatgtttgaattctaaacgttgatattcttaagtaccatttctgattaggaattaggtgttaaaagaatcatggtaaggaaaccttaatccgttgaaactcttgtaatttggacaacaaaaaactagaaataacactcttttctttgaagatctgattcaaatacaccttagaagagtttaaaatctcccaggcctttaggatgcaataggatattatgccttggtttgactccttttcattcaaattaatgtaagtatgttgttcaagactttgaagcattgaacaatgttctcgacgaattttatttaattactgacattttgtgatatttgaatgttattaagttaaacacttagagttgagtatattcaggggagaaaagtgaatgaaatgactcataataagaaagcttgctcccttgggacagttaccttcctggtgtcattgccatcctgggttgacaagctgagagtagaggatacaagtgatgtgaataaaatggaaattgcattgagttaatgaaacagacacttttagatcaagaaaacacttcaacagcctttttagaaattggcacactcctatagtcccacctactcaagaggctgaggcaggaggatcactagagtacaggagtttggggctgtagtgtgtaatgatcacacctgtgaaagaataaccactgcactccaacctgggcaacatggcaagaccctgtctctttaaaaaaaaaaaaaaatcctgggaaaagaagtcaaagatgtaattttacacaatttctgcccccaccgtcttttttgtttgtttgtttgtttgtttgttttttggctagatactaggtattcagtgtttgctgagatgacaggtttctactaatcagccagttatttgggaaggagaaaaactttttctcaattctgaacatgatgcagcttgttaactctccagatagtgcctttgattgaaaataaggtctacacctttttaagtatattatttctgacatcgtaagaaataatttagttccttattctcatttatcttttatataatgtactgtaatattcaggtttaaagtaaaataagtatatgaattatattttggtaaaactgtttcatgaccagcttgattaatgtatattaacataccagacattgacagcgaacatttcatgaaatcagttatttacttactaaaacaatgagttttagcttgaaagttactgctgctctattattaacaaaactaagttttagctatttatgatccaagtttttacatcacatccattgatctgcctatcccttctttttactccaaagaggagatgatagaataatacattcagtatactaccaagaagcaaagttataatgtgtttcattttgctattggaattttttattgtaacattgtatgataacctgaaatgtttacttgtgccttttctttaaacaattaaagttttccattttataagaaaaaaaaaaaaaaacaaaaaccccgacaaaaacaacaaccagcaacaccacacaaaaaacacacgccagcacacaagacgacacaccacacaaacaaaaaagggggggccaaaaccacgaggaaccacacaccctttatggggccaagagtaataaaaggggggaaaccagagaagacgctggagacctgt

SEQ ID NO: 2061 - DNA, 3667 bp, Homo sapiens
  misc_feature (458)..(458): n is a, c, g, or t
  misc_feature (702)..(702): n is a, c, g, or t
  misc_feature (789)..(789): n is a, c, g, or t
  misc_feature (795)..(795): n is a, c, g, or t
  misc_feature (1139)..(1139): n is a, c, g, or t
ctctacggatccttattttacgcaggctcctagaaaacaggatgcctgtcactgataagttagagaaaacacccaaattatacttgcactatggaaagacgacatgaatatgttgactgggtactttctactctcatttttgttagcctatgaaaaaaaaaacattttgttaacctatggaaaaagccttggaagagaaaagtagaattcagtatgtatggaggcacagttttgcacagtatgttgcatgcggcaaaaaaaaaaatatgaaatagagtagaagagataaaagtagttttctgtcaaaaactaggagttaagccttcaggtacgttgtggactaggctttccagcaaggtttttgtagctatttgcttgcctgagaaatgaaattgaaaacatacccctgcgtgtctgtccttaacaccaggctaaattctggtggttaaataacttanctgtggttacaagctagtaagtagcagagccaagattttttttaatatagagacaggtgtctcactgtgttgtccaggctggtcttgaactcctggcctcaagtggtcctcctgcctcagcctcccaaagtgtggggattacaggtgcgagctactgctcccagcaagagccaagattttaacctagatctccctaacaccaaagcttttgaaagggttcagctgaagaatttctcaattcttntgttttgtttttatttttgttttttgagatgaagtctcactgcactcaggctggagtgcagtggtacgatcttggctcactgcaacntccacntcccgggttcaagcgattctcctgcctcagctcccaagtagctgggactacaggtgcacgccaccacaactggctaatttttgtatttttagtagagatggggtttcgctatgttggccaggctgatctcaaacttctgacctcaggtgatccacccactttgacctcccaaagtgctgggattactagacgtaagccaccacacctggcaattccctgcttttttgacaacataatttaaatgaatttgatttaaatgtttcctgaatatatatacagatagatagatgagtatcaacacttacaagctctacacagtctgtgagtgtagatactacttactngtaggattgtcttgtgctttggggatttttgttcggagttctatactatcagcccagaaagctatcaatgtccaagtgaagtgagatgatgcatggccacattattgctttgaccctcacatcaagaaatctgaatgatctggaccaggggtcagcaaagtgcagcctacaagctattgcagtcagctgccagtttttacttttttaaatagttgggaaaaaaattccaaagactgatattttgtgtcacatgaaaattatatgaaattcaaattgcagtgtccataagtaaagttttattggggcacacccatgctcacccttttaaatattgtgtatggccgctttgtgctacagtagcagagttgagtcattgcaagggagaccatatggcccaggtagcctaaaatatttatctgatcctttacagaaaaagtttgctaacccttgataacagatactctaaaatgcaggtttttcttcttcaatttagctcagtggtaggtcaaattgtttgcttttgctattaagcttatgatttggaaacgtaaaatttcatggtggatcttataatcagaactattcaaaagggaaaacatgccagccattttatatgatgaagtctcttattccatagaaaactgtagaaagatatctgtatctttggagaaggagaaagaaaggaaagaactccagaatcccatcactgttctttaaagcatgcatcacagacctttaagagtatgctttattgagtaaaggttatagtttgactttaagataagaaattttctagaatcatgtttgaattctaaacgttgatattcttaagtaccatttctgattaggaattaggtgttaaaagaatcatggtaaggaaaccttaatccgttgaaactcttgtaatttggacaacaaaaaactagaaataacactcttttctttgaagatctgattcaaatacaccttagaagagtttaaaatctcccaggcctttaggatgcaataggatattatgccttggtttgactccttttcattcaaattaatgtaagtatgttgttcaagactttgaagcattgaacaatgttctcgacgaattttatttaattactgacattttgtgatatttgaatgttattaagttaaacacttagagttgagtatattcaggggagaaaagtgaatgaaatgactcataataagaaagcttgctcccttgggacagttaccttcctggtgtcattgccatcctgggttgacaagctgagagtagaggatacaagtgatgtgaataaaatggaaattgcattgagttaatgaaacagacacttttagatcaagaaaacacttcaacagcctttttagaaattggcacactcctatagtcccacctactcaagaggctgaggcaggaggatcactagagtacaggagtttggggctgtagtgtgtaatgatcacacctgtgaaagaataaccactgcactccaacctgggcaacatggcaagaccctgtctctttaaaaaaaaaaaaaaatcctgggaaaagaagtcaaagatgtaattttacacaatttctgcccccaccgtcttttttgtttgtttgtttgtttgtttgttttttggctagatactaggtattcagtgtttgctgagatgacaggtttctactaatcagccagttatttgggaaggagaaaaactttttctcaattctgaacatgatgcagcttgttaactctccagatagtgcctttgattgaaaataaggtctacacctttttaagtatattatttctgacatcgtaagaaataatttagttccttattctcatttatcttttatataatgtactgtaatattcaggtttaaagtaaaataagtatatgaattatattttggtaaaactgtttcatgaccagcttgattaatgtatattaacataccagacattgacagcgaacatttcatgaaatcagttatttacttactaaaacaatgagttttagcttgaaagttactgctgctctattattaacaaaactaagttttaaaaattaattttaattctactgaagtttaatttctggttaaaggtatagtggatgctatttatgatccaagtttttacatcacatccattgatctgcctatcccttctttttactccaaagaggagatgatagaataatacattcagtatactaccaagaagcaaagttataatgtgtttcattttgctattggaattttttattgtaacattgtatgataacctgaaatgtttacttgtgccttttctttaaacaattaaagttttccattttataagaaaaaaaaaaaaaaacaaaaaccccgacaaaaacaacaaccagcaacaccacacaaaaaacacacgccagcacacaagacgacacaccacacaaacaaaaaagggggggccaaaaccacgaggaaccacacaccctttatggggccaagagtaataaaaggggggaaaccagagaagacgctggagacctgt

SEQ ID NO: 2062 - DNA, 1307 bp, Homo sapiens
ctttttttttaaagagacagggtattgccatcctgggttgacaagctgagagtagaggatacaagtgatgtgaataaaatggaaattgcattgagttaatgaaacagacacttttagatcaagaaaacacttcaacagcctttttagaaattggcacactcctatagtcccacctactcaagaggctgaggcaggaggatcactagagtacaggagtttggggctgtagtgtgtaatgatcacacctgtgaaagaataaccactgcactccaacctgggcaacatggcaagaccctgtctctttaaaaaaaaaaaaaaatcctgggaaaagaagtcaaagatgtaattttacacaatttctgcccccaccgtcttttttgtttgtttgtttgtttgtttgttttttggctagatactaggtattcagtgtttgctgagatgacaggtttctactaatcagccagttatttgggaaggagaaaaactttttctcaattctgaacatgatgcagcttgttaactctccagatagtgcctttgattgaaaataaggtctacacctttttaagtatattatttctgacatcgtaagaaataatttagttccttattctcatttatcttttatataatgtactgtaatattcaggtttaaagtaaaataagtatatgaattatattttggtaaaactgtttcatgaccagcttgattaatgtatattaacataccagacattgacagcgaacatttcatgaaatcagttatttacttactaaaacaatgagttttagcttgaaagttactgctgctctattattaacaaaactaagttttaaaaattaattttaattctactgaagtttaatttctggttaaaggtatagtggatgctatttatgatccaagtttttacatcacatccattgatctgcctatcccttctttttactccaaagaggagatgatagaataatacattcagtatactaccaagaagcaaagttataatgtgtttcattttgctattggaattttttattgtaacattgtatgataacctgaaatgtttacttgtgccttttctttaaacaattaaagttttccattttataagaaaaaaaaaaaaaaacaaaaaccccgacaaaaacaacaaccagcaacaccacacaaaaaacacacgccagcacacaagacgacacaccacacaaacaaaaaagggggggccaaaaccacgaggaaccacacaccctttatggggccaagagtaataaaaggggggaaaccagagaagacgctggagacctgt

SEQ ID NO: 2063 - DNA, 2037 bp, Homo sapiens
ggccagatgtatttaaggggtattcagatgccacctacatgcttattttgtctagaacagtgctgtctaatagaactttctgtgacgatggatattttgtagacttttgctgtccagtgtggtagccactaaccacatgtggctgttaagcccttgaaatatagctagtgtgactagaaagtattttattttaaatttacataggcacaagtggctagtggctactgtattgacattctgggtctaggactagaaccagtggtctgtaacaaaagtactttctctttactctattaaatctagaattagccgggcatggtcgctcatgcctgtaatcccagcactttgggaggccaaggcaggcagatcacttgaggtcaggcgtttgagaccagcctggtcaacatggcgaaaccctgtctctacaaaaaacataaaaattagccaggtgtggtggtgggcacctgtaatctcagctacttgggaggctgaggcacaagaatcacttgaacttgggaggtggaggttgcagtgagccaagattgtgccactgcactcaagcctgggtgacgagtgaaactgtctccaaaaaaaaaaaaaaatctagaattcttggaagtacattatattgcccttcagaatagattccagttcctgttgtgctcacctttataattttaccataagttttacctattcgtaagttggcagttttagatagataacattctggtggtagctagggatttaccttttgtcatccttttcctgcacttctcttgaattcctttatagatgtacagttttgctttaaccactgaagattgctgtaaattataaagggtgtgatagaatccacatggctgtcaagaaggagatcttaccaaggacagttgactgactagtctcagattgtttcatatcatttatacttgggtaagagtaaactagataactgggcgtcgtggtgcacacctgtagtcccagccactctgaggcaggaggactgcttgtgcccagaagttcgaggctgcagtgtagctgtgattgtgctactgcactccagcctgggcaacagataaaggaaactccatctcttttaaaaaaaaaaaaagtggtctgggtgcagtaggtcatgcctgcaatcccagcactttgggaggccaaggcaggcagatcacctgaggtcaggagcttgagaccagcctggccaacatggtgaaaccccatctctaccaaaaatataaaaactagctgggcgtggtggcggcacctgtaattgcagctatttgagaggctgaggcaggagaatcgcttgaacctgggagatgggggttgcagtgagccaagaccgccccatcgcactccagcctgggcaacaatagtgaaactccgtctcaaaaagaaaaaaagtttccttagaatggaaaatattcattcatgagctcttttggcaatccgtcatcagtatattctgaaaaccaataagatgttgccaagttgggggcgagagctatgtaatgcaaggcatatgcctgatgaagtatacaaatacacctgaccagaaactttgtctcccacataagtctcttctaggcactgtcggggtacatactgagctgctgctttggctgtattttctgtgcctcagaataaccattgtcctggtgttcatatccttagagttcagtacaaaatgttggatatccatttaataggttccaggttatcttagttggagtttggggtatttgaaaacgtcatgccttcaggctatcatttccctcagaaagctaagtaaatttactgcattcatttctcaaagagtaaaagtgcaggttgtatgtgtctatgaacatttaaacatgttaaaatgttaaatttaacattttaaatttaaacatttaaatatgtctgtaacttgaacagtgtagtttcagaaaggaccactgggctagtgtaatgcagaaaatgctgggtctaggattaggagaaaattgtgtttagtgtgtatcaataaacagcccgtggacccaa

SEQ ID NO: 2064 - DNA, 2362 bp, Homo sapiens
ggccagatgtatttaaggggtattcagatgccacctacatgcttattttgtctagaacagtgctgtctaatagaactttctgtgacgatggatattttgtagacttttgctgtccagtgtggtagccactaaccacatgtggctgttaagcccttgaaatatagctagtgtgactagaaagtattttattttaaatttacataggcacaagtggctagtggctactgtattgacattctgggtctaggactagaaccagtggtctgtaacaaaagtactttctctttactctattaaatctagaattagccgggcatggtcgctcatgcctgtaatcccagcactttgggaggccaaggcaggcagatcacttgaggtcaggcgtttgagaccagcctggtcaacatggcgaaaccctgtctctacaaaaaacataaaaattagccaggtgtggtggtgggcacctgtaatctcagctacttgggaggctgaggcacaagaatcacttgaacttgggaggtggaggttgcagtgagccaagattgtgccactgcactcaagcctgggtgacgagtgaaactgtctccaaaaaaaaaaaaaaatctagaattcttggaagtacattatattgcccttcagaatagattccagttcctgttgtgctcacctttataattttaccataagttttacctattcgtaagttggcagttttagatagataacattctggtggtagctagggatttaccttttgtcatccttttcctgcacttctcttgaattcctttatagatgtacagttttgctttaaccactgaagattgctgtaaattataaagggtgtgatagaatccacatggctgtcaagaaggagatcttaccaaggacagttgactgactagtctcagattgtttcatatcatttatacttgggtaagagtaaactagataactgggcgtcgtggtgcacacctgtagtcccagccactctgaggcaggaggactgcttgtgcccagaagttcgaggctgcagtgtagctgtgattgtgctactgcactccagcctgggcaacagataaaggaaactccatctcttttaaaaaaaaaaaaagtggtctgggtgcagtaggtcatgcctgcaatcccagcactttgggaggccaaggcaggcagatcacctgaggtcaggagcttgagaccagcctggccaacatggtgaaaccccatctctaccaaaaatataaaaactagctgggcgtggtggcggcacctgtaattgcagctatttgagaggctgaggcaggagaatcgcttgaacctgggagatgggggttgcagtgagccaagaccgccccatcgcactccagcctgggcaacaatagtgaaactccgtctcaaaaagaaaaaaagtttccttagaatggaaaatattcattcatgagctcttttggcaatccgtcatcagtatattctgaaaaccaataagatgttgccaagttgggggcgagagctatgtaatgcaaggcatatgcctgatgaagtatacaaatacacctgaccagaaactttgtctcccacataagtctcttctaggcactgtcggggtacatactgagctgctgctttggctgtattttctgtgcctcagaataaccattgtcctggtgttcatatccttagagttcagtacaaaatgttggatatccatttaataggttccaggttatcttagttggagtttggggtatttgaaaacgtcatgccttcaggctatcatttccctcagaaagctaagtaaatttactgcattcatttctcaaagagtaaaagtgcaggttgtatgtgtctatgaacatttaaacatgttaaaatgttaaatttaacattttaaatttaaacatttaaatatgtctgtaacttgaacagtgtagtttcagaaaggaccactgggctagtgtaatgcagaaaatgctgggtctaggattaggagaaaattgtgtttagtgtgtatcaataaacagcccgtggacccaaaaaaaaaaaaaaaaaacataaaaataacaactaatactgaaaaatagaaaaaacaaaaaaaaaagaaggcacaactgagactacggagaaccaggaacagaacagcaagaagaacagaaagaagaaagaaccgaggaacggaagagcggagcgagaatgaaaaacgagaacaggcaaagaaaaaaacgaaaaggaacgccgcgccagaaaccgacgagagagacaagggcgcccgagcgacgtgcagaacacgaccagggctaataggaacacacaagtaaaggacgcacaacacacaacatcggaacaaacagaaacagcaaaa

SEQ ID NO: 2065 - DNA, 1902 bp, Homo sapiens
aaatgatacaggaaacatattaagatagatacagaaatgtgttcaaccttccatcttggctagttgtggcgtttagtttgttttttgagacatggtcacgctgtgtcgccaaggctggagtgcagtggtgcgatctcggctggctgcaacctctatttcctgagctcaagcaatccgtccacttgccttggctccccaaagtgctgggattacaggcgtgagccaccaggccctgcctggttttcaaattcagaaatcttattatttaacccagaagtaatcagcccagtagtaacttaggtttaattttttttcaggtttaaaatttttctcatttattttttctgagacggagtttcgcccttttcgcccaggctgagtacagtggaggttgcagtgagccaagattgtgccactgcactcaagcctgggtgacgagtgaaactgtctccaaaaaaaaaaaaaaatctagaattcttggaagtacattatattgcccttcagaatagattccagttcctgttgtgctcacctttataattttaccataagttttacctattcgtaagttggcagttttagatagataacattctggtggtagctagggatttaccttttgtcatccttttcctgcacttctcttgaattcctttatagatgtacagttttgctttaaccactgaagattgctgtaaattataaagggtgtgatagaatccacatggctgtcaagaaggagatcttaccaaggacagttgactgactagtctcagattgtttcatatcatttatacttgggtaagagtaaactagataactgggcgtcgtggtgcacacctgtagtcccagccactctgaggcaggaggactgcttgtgcccagaagttcgaggctgcagtgtagctgtgattgtgctactgcactccagcctgggcaacagataaaggaaactccatctcttttaaaaaaaaaaaaagtggtctgggtgcagtaggtcatgcctgcaatcccagcactttgggaggccaaggcaggcagatcacctgaggtcaggagcttgagaccagcctggccaacatggtgaaaccccatctctaccaaaaatataaaaactagctgggcgtggtggcggcacctgtaattgcagctatttgagaggctgaggcaggagaatcgcttgaacctgggagatgggggttgcagtgagccaagaccgccccatcgcactccagcctgggcaacaatagtgaaactccgtctcaaaaagaaaaaaagtttccttagaatggaaaatattcattcatgagctcttttggcaatccgtcatcagtatattctgaaaaccaataagatgttgccaagttgggggcgagagctatgtaatgcaaggcatatgcctgatgaagtatacaaatacacctgaccagaaactttgtctcccacataagtctcttctaggcactgtcggggtacatactgagctgctgctttggctgtattttctgtgcctcagaataaccattgtcctggtgttcatatccttagagttcagtacaaaatgttggatatccatttaataggttccaggttatcttagttggagtttggggtatttgaaaacgtcatgccttcaggctatcatttccctcagaaagctaagtaaatttactgcattcatttctcaaagagtaaaagtgcaggttgtatgtgtctatgaacatttaaacatgttaaaatgttaaatttaacattttaaatttaaacatttaaatatgtctgtaacttgaacagtgtagtttcagaaaggaccactgggctagtgtaatgcagaaaatgctgggtctaggattaggagaaaattgtgtttagtgtgtatcaataaacagcccgtggacccaa

SEQ ID NO: 2066 - DNA, 388 bp, Homo sapiens
ttttttttgagacggagtcttgccctgtcacccaggcaggagtgcagtggcacaatcttggctcactgcaacctctgcctcccaggttcaagagattctcctgccttagcctcctgagtagctgggactacaggtgtgtgccaccatgtccggctaattttgcccagctaatttcaccatgttggccacgctagcctcgaactcctgacctcaagtgatctgcccgtctgggcctcccaaggtgttgggattacaggcatgagccaccatgcccagccccaaaaatcttaaggggaagatttgggaaatggatgtccacagtggaatttgaaaagctccaacatattcctgggatacatgtgtaagactgtgtgcatgtgcagaaaag

SEQ ID NO: 2067 - DNA, 501 bp, Homo sapiens
tagctattcctgctgctctcagcttttatcttattcactgatgctggaaaatctggattaatttatacccttgagtattattagaggcacagcctctatccagaggagcagaactaacatgacctgcagacatcccctgagtttgtatctctgtacccgtaaaactcactgaggaacatggctttgaatgtgggcccaggtatgaaggtaaacaggctctgcaagtgtttatgacaatgcaagattaactttaatatttaaggaaaaattgactttaggaaaagcaagctaagacaaaaatagtaacacaaaatattttctcctgatattaaaaaacaaccctcaagagtttttaacatttatccatctatgtaactttgctacaacctgtctaaattcatcctttgtctctaatattgaaattcctctggtcaacaattttgttgatttttaaaatattattttatccacaaatcttcattgtatcttcttctttaaatt

SEQ ID NO: 2068 - DNA, 429 bp, Homo sapiens
gcacatctgtattcccagctacccaggaggcttagctgggaggattgcttgagcctgggaggttgagactacagtgagccttgatcgtgccactgcactccagcctgggcaacagagtaagaccttgcctcaaaaaagaaaagaaaaagaaaatctactaagtgaggaagagcaaatttatagaatgctgttacaacatgattttgtcctggtgtggtcgctcacgcctataatatacatacacacttagttgggcatggtagtacttgcctgcagtcctagctactcaggaggctgaggtgggaggattgcttgagcccaggagtttgaggctgcaatgagctgtgagcatgccactgcactccagcctggtcaacaaagcaagaccctgtttctggaaaaaataaaaataaaaaagaagaagaaaga

SEQ ID NO: 2069 - DNA, 354 bp, Homo sapiens
tcctcccctttcgcttccttccacacagtccagtgctttgttaggtacctgcatcccagcaggactggggacctggctggatgtgggcttgggtagagttggccagatgaaatgtggttggcaagaaggtcctgagtgtgctgagacaggcaagagtcagtaataagatcagagagtagaagactagggccaggagcgtgggacaggctaaggatgccggctagcccccaatcccagagagcatgcagctgagtctaagagaggcttcactgatacccataaggaggcggaatatgcaaaccctctttgcttaggagaacctgagctcacctgccaaaatcatcctttgacatt

SEQ ID NO: 2070 - DNA, 399 bp, Homo sapiens
tcagaagtatgggaggccctggacttgcgactggcatcgaaaaatgagagcagtcttatgggattgagactttaacctgtgttgtctgcaataagtccaggtgtttagtaagtatcagaattgaatagaattgttgaacacacagttggtatctggagaatcagttgactgccagtattaggaacccttccccagcccataccaaggcacccaaatgtgtgatcacagttgggtacctgagctttggcaggcaggcagtcatgtcaccaggtgcacatgacaaatgtcatgcatgttttaactaaatacaaggtgagagtcagaaattctcttctggtgtttagtagcaatgaagactgcacctgaccaaaaaataaaaattcacgaaacttaaatgct

SEQ ID NO: 2071 - DNA, 265 bp, Homo sapiens
tattaacttcaaaggaaatttctccaagtaattgtggaaagatgtaagtaaatccaatataagaggtgtgattatataggaagctcagaaactgttagggataaacatggaattgattttaggcatagaaagttaattgcactggtgtagaatagggtgacttgacctgacaatagttgccagctgaagaatttctccagaattcatcacataaagagaagttatggaaagtattgacaaggtttaaaaacatgggggaaatact

SEQ ID NO: 2072 - DNA, 465 bp, Homo sapiens
atcatctggcaaacttcctaaaaatatagaagcagcctatgtttcttcaacaagattgcatctttgtattttcttttagttttccatgtgattgtgatacaacactaagccagtggagaaccactgccttagaggaaggaagaaaaggtttggagaaacaaattagtacaggtagaagggccagacatggtagctcacgcctgtaatcccagcactttgggaggccaaggtggtgggcagatcacttgaggtcaggagttcgagaccagcctggccaacgtggtgaaaccccatctctactaaaaatacaaaaattattcgggtgtggtggcgcgtgcctgtaatcccagctactcaggaggctgaggtaggagaattgcttgaacccaggaagtgcaggttgcagtgagctaaggtcgcgccacctacactccagcttaggcggcaaaggaagacactgtctca

SEQ ID NO: 2073 - DNA, 423 bp, Homo sapiens
aagtgcttgccaattaaatataactaggagcaatgaatacaacttttgccttactttgttaaaggaagatggcttgccttggactgctttctttctctttcatggacatgtctgtgaccagctgtgatgatgaagatggggaagacatcctagaagagggtggaacaacaagatggaaggaacctggatcctctatgacctgaattttagaaaggcaaacctagaacagagctgctcttttattctaggcctggctgttaggtctacactgcttttatgagctgtaacactcaccgcgaaggtctgcagcttcactcctgaagccagcaagaccacgaacctaccagaaggaagaaactctgaacacatccgaacatcagaaggaacaaactccagacgcgccaccttaagagctgtaacact

SEQ ID NO: 2074 - DNA, 350 bp, Homo sapiens
gcctcctttccttcctggaagccccagggcctttgtacctgacagtctcccagtcagaaatgccccccagtcagggcgcggtggctcacacctgtaatcccagcactttgggaggctgaagtaggtggatcacgaggtcaggagatagagaccatcctggctaacacggtgaaaccccgtctctaataaaaatgcaaaaattagctgggcgtggtggctggcgcctgtaatcccagctactcaggaagctgaggcaggagaattgcctgaacctgggaggcggaggttgcagtgagccgagactgcgccactgcactccagcctgggcaacagagagagactccgtctca

SEQ ID NO: 2075 - DNA, 350 bp, Homo sapiens
gcctccgcaggggccctgaaggggaagatgtgttctgcaagcatcacagatattgtgagaagcaagaggctgcaatggatgtggaaggctttgagccaggcagatgtgggttcaaatcccagtttcctggctgggagatttgaagcaagtcactcagactctctcaacctcaaaaatagaatatctgcctgatacattgtaggcttatgactccttaccctactctctttccaatgaaagatactattgaaaatttcgctgggcacggtggctcacgcctgtaatcccagcactttaggaggctgaggcgggcggatcacaaggtcaggagatcgaaaccatcctggcta

SEQ ID NO: 2076 - DNA, 1733 bp, Homo sapiens
tgtcatatgactgaggcgcccatgggggtggcggggcggctgtaggagcaggggcctagcaagcgcccagcggagcgacccctgcctggccgtggctagcatggcccctacgctgttccagaagctcttcagcaagaggaccgggctgggcgcgcccggccgcgacgcccgggacccagattgcgggttcagttggcctttaccagagtttgatccaagccagattcgactgattgtatatcaagactgtgaaagacgagggagaaatgttttgtttgactccagtgttaagagaagaaatgaggacatatcagtatcgaaactctgcagtgatgctcaagttaaagtctttgggaaatgctgccaactgaaacctggaggagacagttcttcctctttagatagttctgtgacttcatcttctgatataaaagaccagtgtcttaagtaccagggttctcggtgctcttctgatgccaatatgcttggagagatgatgtttggctcagtagcaatgagctacaaaggatccaccttaaaaattcatcagattcgttcccctccacagctcatgctcagcaaagtgtttactgctcggactggcagcagtatttgtgggagtctcaatacgctacaagatagtcttgaattcatcaatcaggacaacaatacattaaaggctgataataacacagttattaatggactgcttggaaatataggtctttcacagttctgcagccccaggcgggcattctctgagcagggtccgctccgcctgatcaggagcgcctctttctttgcagttcacagcaacccaatggacatgcctggaagagagctcaatgaggacagagacagtggcatagcacggtctgcatctctcagcagcttgctgatcactccatttccttccccaaactcctcacttacccgaagttgtgccagcagctaccagcgacgttggcgacgcagccaaacaacaagtttggaaaatggggtatttcctagatggtctatagaagaaagctttaatctctcagatgaaagctgtggccctaacccaggaattgtgcggaaaaagaagattgcaattggggtaatcttttcattgtccaaagatgaagatgaaaataacaaatttaatgaattctttttttcacattttcctctctttgaaagccacatgaacaaattaaagagtgcaatagaacaggctatgaaaatgagccggagatcagctgatgccagtcagagaagtttggcatataatcgaatagttgatgccctaaatgaattcagaacaacaatttgtaatctttacacgatgccacgaattggagaacctgtctggcttacaatgatgtcggggactccagaaaagaaccacctttgctatcgtttcatgaaggagttcacctttctaatggaaaatgcttccaaaaatcaattcttgccagctctcattactgcagttctgaccaatcatcttgcctgggttccaacagtcatgccaaatggacaaccacctataaaaatatttttagaaaagcattcctctcagagtgtggacatgttggcaaagactcatccatataacccactttgggcacaactgggtatgtaatctgacaactgttacactatgtattagacttttttgtagctatctgtaattattttatagcaaaaccaaaaataaataaaatgcttttacctcctgcattctaaag

SEQ ID NO: 2077 - DNA, 1125 bp, Homo sapiens
tgtcatatgactgaggcgcccatgggggtggcggggcggctgtaggagcaggggcctagcaagcgcccagcggagcgacccctgcctggccgtggctagcatggcccctacgctgttccagaagctcttcagcaagaggaccgggctgggcgcgcccggccgcgacgcccgggacccagattgcgggttcagttggcctttaccagagtttgatccaagccagattcgactgattgtatatcaagactgtgaaagacgagggagaaatgttttgtttgactccagtgttaagagaagaaatgaggacatatcagtatcgaaactctgcagtgatgctcaagttaaagtctttgggaaatgctgccaactgaaacctggaggagacagttcttcctctttagatagttctgtgacttcatcttctgatataaaagaccagtgtcttaagtaccagggttctcggtgctcttctgatgccaatatgcttggagagatgatgtttggctcagtagcaatgagctacaaaggatccaccttaaaaattcatcagattcgttcccctccacagctcatgctcagcaaagtgtttactgctcggactggcagcagtatttgtgggagtctcaatacgctacaagatagtcttgaattcatcaatcaggacaacaatacattaaaggctgataataacacagttattaatggactgcttggaaatatagacagctcaactgaactgctgctgtattgcgatacttctggtgcataaaaagctatgtagtagccaagggaatgggatagcaattagaatagtattaatatttcttccattttctgtttagtaagaacttttatttataattaattttaataaatatttgttatatattagtagaaaagttttttcttccaacttgaactgtatgacatcctattatttattttttataatttgtgtttattcaaatgagcaatcacttataaaacacctattactgtgggctagtcatagtgttaggcatatactttataatgtgtgtgtgttatagaaaaatagaagttctgcattttcttaactcgcttgattacttcattgattttaataaaggaaaaatgtgacaaaga

SEQ ID NO: 2078 - DNA, 748 bp, Homo sapiens
aactattcaagtctttggaatccagatgaataattcagttgtttttattctctttgatgatagacagagtttgcttaatactttgcctcgttttcccattcagtaatttggaaatgtaaggacctgctggttgattcagtaattaattgtgtgattaaacactgaaaataatccataatttttgaagtaaaatggcatttctgttttgtacttatgatctgcaatagctcttatgaatgtgttatctttatttcaagtagtttttaactcctcctcaaccagaaactattaactttcattttaatcttggtgttatatactcatcctttcctctctcttctcctttttttggtgccatttggccacatgaacatatatactccccttgcttactttttcactacattttacctaaggtttcatgaagactgattggaatctgatcagatgtattttgttttcagattcttgccagctctcattactgcagttctgaccaatcatcttgcctgggttccaacagtcatgccaaatggacaaccacctataaaaatatttttagaaaagcattcctctcagagtgtggacatgttggcaaagactcatccatataacccactttgggcacaactgggtatgtaatctgacaactgttacactatgtattagacttttttgtagctatctgtaattattttatagcaaaaccaaaaataaataaaatgcttttacctcctgcattctaaag

SEQ ID NO: 2079 - DNA, 203 bp, Homo sapiens
ccctgacgcattgtggcttctctaacagtcctctttcatgtgtattttacgtttttgccatgtaggtctttcacagttctgcagccccaggcgggcattctctgagcagggtccgctccgcctgatcaggagcgcctctttctttgcaggtttgcgatgtgctgtgtgggtagactagttggtgtgccccaacggctagaatc

SEQ ID NO: 2080 - DNA, 569 bp, Homo sapiens
gtttttgtgacctgtaactcagatgagcagatgttcaaatttgatgtttcttaaaagatttattagaataacaatttatttagtactttggttagctgattgttgttatttaagtaccacattttaaagtgacagactttctaaaatttctggtcattttttctagacagctcaactgaactgctgctgtattgcgatacttctggtgcataaaaagctatgtagtagccaagggaatgggatagcaattagaatagtattaatatttcttccattttctgtttagtaagaacttttatttataattaattttaataaatatttgttatatattagtagaaaagttttttcttccaacttgaactgtatgacatcctattatttattttttataatttgtgtttattcaaatgagcaatcacttataaaacacctattactgtgggctagtcatagtgttaggcatatactttataatgtgtgtgtgttatagaaaaatagaagttctgcattttcttaactcgcttgattacttcattgattttaataaaggaaaaatgtgacaaaga

SEQ ID NO: 2081 - DNA, 344 bp, Homo sapiens
ggttctcggtgctcttctgatgccaatatgcttggagagatgatgtttggctcagtagcaatgagctacaaaggatccaccttaaaaattcatcagattcggtgagaggttttctgatttttttttaacgagtcccatttttagatattttcgtttttttagagagaattttatatgatcttcactcagattgagcttgtcatactccatttaacatgttctatggttttaatgctacttcatggctcttgcagctatgctgtgaaacctctgtgacttacacatttttatttataataaatccaaaaggtcattatattttagttttggtctctctctttctc

SEQ ID NO: 2082 - DNA, 437 bp, Homo sapiens
gagctgttcatccacctgaatagcaatatattttataactgacagtttcatctttatttatagttcacagcaacccaatggacatgcctggaagagagctcaatgaggacagagacagtggcatagcacggtctggtaatgtcacgttcttgtattcagttttttatgagattactgttggcattgattttcttttttatccctccctttattatcaaatttgttcatattgatattagccttacaagagaactgtgaaaagaccagagcaaagtcttataaatttaatatttttcatgtttacttttaagtgtgctaagtaggataaagccaggatgaagtaaagccagagtaaagtacactggttgaagcttagtgaatataagaagaaaagcattggtcagaaaaactgcttagaaactgtagtaaaaaaaaaa

SEQ ID NO: 2083 - DNA, 507 bp, Homo sapiens
ggagcaggggcctagcaagcgcccagcggagcgacccctgcctggccgtggctagcatggcccctacgctgttccagaagctcttcagcaagaggaccgggctgggcgcgcccggccgcgacgcccgggacccagattgcgggttcaggtagggcgctgtggggcgggggtcgcggagccgatggccttgtgggctccgggctccaggggtgttggggccttcggtgttccgacccgagcggaagcgccgcgccgagagcagcatctggtcctcggtggggtggagccggctgcgggctagcgccgaagggttggagcgaggtcctaccttttattttaccccacccgcctcgccgttgccccttccccctcctcccgtcggtttgtttacgacctgcccccagccacgcgcgactctgctcctccggacctagcaccgcggcctgagactttgggtccacacgccttcctggcaccgagtagagttgggcgcgggctggattggac

SEQ ID NO: 2084 - DNA, 530 bp, Homo sapiens
cccacctcattctgtttttcacttttttcttcttcatttctttctttctccctccctcctttccttccttcctaccttcttttctctccctccttctctccctttcttcctttcttccttctctttttcccacctgcctgccataacgatcatgtcttgcctgaaaggacaatgattaatagcatttccttacatttgtatagttttttttaagtactgtcctctatccatttcaacgatttcctttgtcgtctcacttgatccttcataccagcccccatgaaatgaagcagagcagccatttctaaaattattgaaaaggaggtcacgcaatgagttagtaacaaagccaggacaatgagccatgccactcatttgtttattcattcattcatttattcatattgagttctgcactgtaaaattcattacaggttcttacagggagtcagacttcatgcatgccagagttctgtaccagagggcctcatcagtggcaggtgctcccgcccagcacggagaagtcagtc

SEQ ID NO: 2085 - DNA, 490 bp, Homo sapiens
caagcaaccactccttgtgagtttgtggaggacaatagattcatgaggaacttggaaacaatcttagggattggcctgctaagaaaccaaatatgacatcctagcctagagaaagccaaggagtcacctgcagaaagatcagcagagcacaatggtctctcttctgtgagtgaaagctcataatttttcatgaaaaactggtgacggggttaccccataaagaatacatttatatggtggcaaggaaatgactccttgtgtcactataatagaataagcggacaattgcttaactctacactgtcagttacatacaactggcctacttttcttccatacctatgccctctttgggttctaagagggactcatgaggactcttatttaatatttaatctcttacagtgtaatcatgaggcttaaagtattcagcaattcagaatctccttttctctttactttcttttgttttgatgtttgttctctctct

SEQ ID NO: 2086 - DNA, 513 bp, Homo sapiens
atagtgattactaatgcagtttggccactgtcttgatttgtgctacagggccattagtttaatgcaccactgttttttgcaccatcagtgcaaatgtcaactggtgttcacatcagttacatagaaaatgagaacttggtaatattctgaaatagtttcaacctggtagacctcctgaacacttggaagagctacctcaagagtcaacagaccacactctgagaaccactactctggatgcacatataaaatacaggaggaaagagatacatcttcagagaaaagacttgggtcataggaagataagaatggcaaggagccttgttttttttccctgtacattctttgtaccttataaatttggtacactttgtatatattacttttctctgaaaaaattaacttaaaaaaagacacttaaactgacatgaaaactaagtaaaaattaagcatattagtagaaatataagtacacaagtaaatacaaacaaatataagcatactacttataaa

SEQ ID NO: 2087 - DNA, 334 bp, Homo sapiens
aggtgcgcgccaccatgcctggctaatttttgtatttttagtagagacagggtttcaccatgttgcccaggctggtcttgaactcctgacctctggtgatctgcccaccttggcatccccaagtgctgggattacaggtgtgagccaccatgcctggccaagagagtaactttcacctcctttcctacaaaagaaaaaattaaaaaccgctcacatgctaggggcagagacaaactggctctaactcagcacattcctaagaaagctgcatttttggttaaattcatgctgctttttaaaccctttttgtttaggtgtacatagctgtcagatc

SEQ ID NO: 2088 - DNA, 367 bp, Homo sapiens
taatcttttaaattagtttttcatggattctcaacatactttctctgaggatccttcaacagcgagggcggggtacaagcctgggcttttagtcttttggggccatgggagaatatgcagatctatgcagagtacccttaccaggagggttctttgaggcttcaaagaacccagatctttggctaaagttgttagaaatgtcttttccttttcaggagtggtctctgaactaaagctaggtaatttcagccagtgctaagttacccacttgggtggtctagtctactttcatctcctaacttgtttaactttaatactgaatgtggcttttcgtttcttttgattaaaattgacaagctgtaaagta

SEQ ID NO: 2089 - DNA, 309 bp, Homo sapiens
aagtacttacactttgaactttaaaaccgagcagttgagtcattcagtaccaagccaaaacacagaaaaacaaaaaagcagatgaggtttattcttgagaaatgaaaaagagaagaatatatatttcgccttggtgagccaaacatacagagaagaaaaggctttttaaaatcttactagtatgagaggcccagagtaaaaagaaataagcaaaagaatatagacacaatcctaagatgacattcacagaacaaagctgaatcttcaaataatactgtatgagtgaatcttaggaaacctagtgatgat

SEQ ID NO: 2090 - DNA, 338 bp, Homo sapiens
ggagtttacattaaaaggtcttactaagtgattgaaatattcttaaactggctgggcacagcggctcatgcctttcatcccaatactttgggaggccgaggcaggcagatcacttgaggtcaggagttcgagaccagcctggccaacatggtgaaaccctgtctctacgaaaaatacaaaaattatccaggcgtggtggcaggcgcctgtaatccagctacgttagaggctgaggcaggagaatcgctggaacccgggaggcggaggttgtagtgagccaagatcacgccactgcactccagcctagttgacaagagtgagagagagagaccccgtct

SEQ ID NO: 2091 - DNA, 396 bp, Homo sapiens
atatttaataaaatatttaggaagcatttttgtgataatgtagttacaaacataggatacaaaatggtatagcacagtctcagtttaggaaacaatgtgtaagactgggtgtagtggccaacacctgtaatccctaagtccttcgggaggccaaggcaggaggatcatctgagtcccaggagttagagaccagcctgggcaatagggtgagaccacatatttacaaaaaattaaaaggaaatagccgggtggtggtgcatgcttctagtctcagctattttaggggctgaggtggaaggattgcttggagccaggagtttgaggctgcagcgcgctacgactgcttcaactgccctccaggctgagtgacacagcaagcaagaccctgtatctgga

SEQ ID NO: 2092 - DNA, 458 bp, Homo sapiens
aactcctaatacttctacttgctaagaagttaggtccaaacaacttagtagttgttcatatggtgttcaacagatgtcactgtattttcctcaaaaatgtaaaatattctgtgagtaaagccatagtttggggactgtggctctttggaatcaagagtgattaatggccaggcgcagtggctcaacgcctgtaataccagcactttaggaggccgaggcgggtggatcacaaggtcgggagttcaagatcagcctggccaagatggtgaaaccccatctctacgaaaaatacaaaaattagctggacgtggtggcaggtgcctgtaatcccagctactcaagagggtgaggcagagaattgcttgaacttgggaggtggaggttgcagtgagctgagatggtgccactgcactccagcctgggtgatagagagtgagactctgtctcaaaaaaaaaaa

SEQ ID NO: 2093 - DNA, 446 bp, Homo sapiens
agtgaaaaggcagacacccgaaggaactttccagtcactggggacggttgtgccgcattcctttagggggaggcagggcagacccaaatgccctttggtagccatggacaggcagagctgagtaaggccagtacatggcgtctgctgctgtgtacggagcctctgctatgtgccagggactgtgccaggcgctagagatacagaacttgacaaagccaactttccactttcatggggcatacattctagtgtggagagacaccgctaataatgatttttaaaaagaatttaaaaatgtacagggtagacatatatggagattgtgtggggatgaaaagggggaccccccacacacataaggaggagaattcagatgatggtcagagggttctagagacttaggacctcagccatctgaagccacatcaattgagctttccttcagg

SEQ ID NO: 2094 - DNA, 357 bp, Homo sapiens
  misc_feature (13)..(13): n is a, c, g, or t
tacaacccctgancctcctgtgccgaggtgatcttatttgggcacaatttagcaaatttagttttgttgttgttctttgtttttaacgtgtaatggatttgatttattacattagaaagggaaatggacttttaggcacgtggtcaaagcagaaattactgcagctaagagtagaaagggcaactaatcgacatgcagagggctgcacatagacacagggaaacacacacacggagatgcacagaaacacgcagaccccatgcagggacctgctttcccgccacagaggaaagcaatctgatcaaacagacccactgtgcacccagccctccatgcttggggacaacacacctacaa

SEQ ID NO: 2095 - DNA, 448 bp, Homo sapiens
gagtctgagttaggtgccctgacttcagggctccgcttcctgctcccacctgtctttcccagaccagatgggtttggggtgctctgcagaggactagctctgcctggttttggcttgtcctctggtgtttctttatttacactcctctgccgccaaagacgccggccaggggttgcaggcactgagctagatccacttaaaatgctggaaggctttgatgtacagataccaggagatggctttgagcgactgagcctgatctttctgggcaacaggtgtttgtccacagaggggtacaagctgggtggggagagcactgtaggatcaagggcagtgtcattcttgttctctctaggctcttgactatggcttgatggtgaagagtttttttcttgtggagttgggcaggctctggccttcctcttgagcagaagagtgccagacaaat

SEQ ID NO: 2096 - DNA, 619 bp, Homo sapiens
acagggtcttgctctgtcaccctggctggagtgcagcgatatgatgactgctctctgcagccttgacctcccatcctcaagtgatcctctcacctcagccccatgagtagctggaactataggcgtgtgccaccatgcgccgctgatttttctgtttttttgtagagacagcatttcacgttgtgcccaggcttgtgtttgtatctctaatgaccttttttttttttttgcattttttctatacatatatatatatatatatatatatatagatttgggtgtgtgtgatcatgattaatttttagatttttggtggaaccttagacattgcctagcaccccttttccatccctttcccattttgtaaatgaggaaacaagtctaaatggtcaagtggcatacccaagttattggagctggctagtgatacaaccaggactacaccccaggtctttggactcccatgccagtattcatcctactaaagtagatgatagtcttaagaaagtacaaattgttgggaggaacaaaactagtttgcttagttgcataatttttttttctttgaagatttctttggtgtgcttgactcagaaaatccaactttctggtattacaa

SEQ ID NO: 2097 - DNA, 349 bp, Homo sapiens
cttgaactcctgacctcaggtgatctgcccacctcagcctcccagagtgctgggattacaggtgtgagtcaccacacttggccttgtactaagtttttgaagaaattctattgctaaagaaaccacaaatctgacttggaaatgccagtcattgttcatatcctaaggcagtctctaggaaaacatattctccaacatccacttcaatttttaacctgaagaataatgcacaaggaagaacctcccagagggtgaacccaggggcccagatgaggctaatcaaggaatttctttcatggccagtggagagatttctgcttggaaagaaaacaaacgaacaagcaattaa

SEQ ID NO: 2098 - DNA, 305 bp, Homo sapiens
cattttagtgtgagccggctgggagccaaagagtttccccgccctcccctgagtctttcctccttgccttccccttgggtgaggaagggtcacaggtatgatgttcaccctgcaactgaagaaagggcctgtcagcagccccatcggggacacccagcatctaagggggaatgcaggggtgggctggctgtgcttgaagcaatgagtgaaacaaggaggaactagtatctttcctaaatatgtctatatatgggaaactttcttctaaacgtgtctgtatatgggaaacttaacccacgtgagtt

SEQ ID NO: 2099 - DNA, 448 bp, Homo sapiens
ggtggtggggtccaggcatgggggtgtttaaaaactccgcgggtgattctaaagtgcacgcagggctgagaaccattgctcgcgcgcacaggctttgtgagatccacatttactactgagaggtttttccctctggttctctccccaaagtgtgcccccaagttggggtagcagctctgtggaagccaaaggcccagatggtggaggtgtcagcgatgtttaggctgctgctgtgcttgctaaagtgagcggccccaacactcaggtctgtgtaagagcacgttcctcagggctttcggagatgatgtcagtttctctttaagatggagctgttttagtccccgtcctgatgcagcttcccctgcctctaggggcttcctgggaccatgctgactttgactcctgaggagagtggaagataatgagaaataaatcttgagaaaacacc

SEQ ID NO: 2100 - DNA, 180 bp, Homo sapiens
aatcccaactacttgggaggctgaggcaggagaatcgctggagcctgggaagtcaagcctgcagcgaaccatgatcctaacactgcattctagcctgggcaacagagtgagactctgtctcaaaaaaaatcttcatataaaaatatttatttccccccaagtatttaaaaagtgatgttc

SEQ ID NO: 2101 - DNA, 449 bp, Homo sapiens
cttctagtaataataaaatgagtgatttggaacaaacatgtagcagaggaaaggtgagcaaactttttaaatgtcaaaagacatcaaaagacaagataatggagaaatggtgggccaaaattcagaaacagttgggagagtcatgcatttggggctacttttctcctggggatgatggtctagtctaggatctgaaaagcctagaatctctgcagcacttttgacacctatatgaagctgggggaaagaaagattctagcaaaaattaaaatgcacatcttttcaggcgcacataagatttgtacaaatgagtaaaatgatatgggatttcaaaatactgaaatactatgttttcgaatacagtgaaatttggctagaaatcaataaaaatacaactaaatgattcatgtgtgcatttaataaatattgtctcatctccaaacccacca

SEQ ID NO: 2102 - DNA, 407 bp, Homo sapiens
gagcaatggtatgatcatggctcactgtagactttacctactggctgaagctgtcctctcacctcagtttcccacccttacccacccagtagctgggattacagacactcaccaacacgcctggctaatttttattatttgtagaaatgaggtctcactgtattgcccaggctggtctcgagctcctggcctcagacatcctgggattacaggtgggagtcactgtgcctgaccagcattgtttttttgtttttgtttgtttttttaaagataaattaattggccatgtgtggtggctcacgcctgtaatcccagcactttgcgggggctgaggctggtggatcacttgagataggagttcgagaccagcctggccaataaggcaaaaccctgtctctactaaaaat

SEQ ID NO: 2103 - DNA, 186 bp, Homo sapiens
tgatctgcctcttccatagtaggaaatatcacaagtcaaaattgtcctggcttatacgtcacaccctcgacaaaaattaactcaaactgtatcatagaccaacatgtgaaacctaaacctataaaacttccagaagaaaatataggagaaaatctttgtggccttgggtaggcaaaggtttcctag

SEQ ID NO: 2104 - DNA, 290 bp, Homo sapiens
gagtggagagtgtctgggacccagctgggtacaggaccagggaggaggggacgctggggaaggtccctgacagcccctagcctggcctgcttcctcatctttgcctgctccatctttctgcctgcactttcttgccccatccttccctcccctcccctcatgtccattaaggtgaggatggacagtcacctccctatattgtcccaactaacccttgccccttgttgctaggccatcaggttacagagcagggccttccccctctattttgctaaagggcaggtacaggg

SEQ ID NO: 2105 - DNA, 224 bp, Homo sapiens
gaaatgagagaccagaatggaggctttttgactctatatgctggtagagcgggtattgatggaataatccttattctttctaataggtccccgtggccgggtgcggtggctaacacctgtaatcccaacactgtgggaggctgaggcgggcagatcacctgaggtcaggagttcgagaccaacctggccaacatggtgaaacgccatctctaccaaaaatacaa

SEQ ID NO: 2106 - DNA, 431 bp, Homo sapiens
tatcttaaattatgagctctttgagaggaggaagaatcaaagatacaaagatactcatctttgtgaccacagagcccagcaatgttaaaacaaaacaaaaacagttaatcttttcaactatctttagctcttccatcagctgcaaccaggccaaccccaggcatcgaccttagaaagactgtaccattactttcttatctgttctcattgctggtcatcttggaagaactacagtcagacttggtggctttaagaatagaatggagggctgggcgcagtggctcacgcctgtaatcccagcactttgggagaccaaggcgggtggatcatgaggtcaggagatcgagaccatcctggctaacatggtgaaatcccatctctactaaaaaatacaaaaaattagccaagcatggtggcgggtgcctgtagtc

SEQ ID NO: 2107 - DNA, 357 bp, Homo sapiens
aataatcacaataaacacaaattcttatcattatagagcaacaatgaaacaaaatttctgcctggataatcaaaagcaatctaagaaatagattttattttaaatacaatctaatgttttcgatccttttgctaagcctacttaaaatattttaatgccttttcaagagtacacagcaaaaatctgactcgaaaggattcactggacatcaaaggcatgttaataattttctgttgtcctggggatttttctaagatgtctgtctgctgtacatgaaagctaaaagaccaaagtcttccattcagcccagaagttgattattcaatataaatagacatagaatgaatgagtcacaca

SEQ ID NO: 2108 - DNA, 380 bp, Homo sapiens
gctgcaggcggaacaccccagcacctgctcaaacccagctggggaggcccagagttcccacttgcttttgggcattaggcaatggcaaagttaaaagtgaaaataaacctggttggaagttctatgaggaaaacaaggattctaatgattcactcactggttcaacacaaagtgccacaccaggctgagcctccctgggaaagaataagtattaggaccgagaagttactgttccctgagcagccttgttgtaacaggaggctccatttgactgggtgtggcggctgccacctgaaatcccagcacttgggaggccaagacggatcacgtgagccagagtttaagaccagcctagacaatatagtgagaccccatgtctg

SEQ ID NO: 2109 - DNA, 560 bp, Homo sapiens
ttagacccacgcgtccggaataatcagaaaggggctcagctctgtagaaaacaataataataattaaagtttgcttctttagtgtctggaattccaactgggacaagctcaaagctttggtttatcatcacaaaagagccacagagccctcaagagccctttctgagtttccaaagaaaatctaccaaggcagaaactctttcttcaagattttttttttaattaaaaacaaataaaggcaaacacaaacacattccaatacagaagcatatctgaagagccacaaatccacaaggtttcaagcctttggccagtccaatccactagtgtaaaatgctagacataatttcagccagcatgaggctctcttctacattacgacttacctttatttatgtcctcaaagtttgtattatatttttctctctctctaaaattttacagtttatgtagcttctcatttgatttttaagttcacatgcaaattctatcttcagctctaaactaatagcacatatgttttgtttatctgtatggcggcaagacaatttcatgatctg

SEQ ID NO: 2110 - DNA, 424 bp, Homo sapiens
tctgtttctgttgggtgatgggagcttggagctgtctactctgcccttttgctgatatcagtcctcaattatattttaaagagatttaaataataaggaaaaacaggcacatataaatatatgtagttaccattttcaatgcctttcattcctttgtatagatcccgatttccatttggtatttttcttctgcctgaaggacatccgctaacatttcttactgtgtttgttggtgatgaattctttcagctttttatttatttgtttgagacagagtctcgctctgttacccaggctggaatgcagtggcacaattatggctcactggagcctcgacctcccaggctcaaggaaaccccccaggctcaagtgaacctcccagctcagcctcccgagtaactgagactccaggcatgtgccacta

SEQ ID NO: 2111 - DNA, 376 bp, Homo sapiens
gacagaagccgttcacaggcccagcggattctggcgcagagctccctgaaggccacagaaccacagaatcgagctcagggtcttgtgagacatctttgtggtgtggcaacggaaaaccagcccacctcttaacccaaggtgttacgtcctgcatctctctggggtgggtggcttcttctagaggtagcattttggaattctctgaaagcccgcagagacaggtgttgcatgagcagcaagcattagtcccaattttaataaagcccagagcttcctaccacaagctgcgtggcacagacaaccaccaatgctacagtgatacagcccctccctaaaagcatttatgttaatgaaaaaataaatactgtttggtaaa

SEQ ID NO: 2112 - DNA, 150 bp, Homo sapiens
acctcctcttgctcacacatgaaatgaagttaataatagtacctacctcatagatagggttatagtaaggatcaaagaaaatacatgtaaaatgatttgcaccagatgctggaaataaaaagcaaatgaagtccttctgttagattgtca

SEQ ID NO: 2113 - DNA, 465 bp, Homo sapiens
cgggttagagagcacgggtttggctgtgtgctggttattctctgtgtgccccccagacacccccacccagccttacccgtatcccgtatggctgtgtcaaggggcgcccctgcccaccagctgctcatcgtgtatggctaagaggaagctcacagaaaataatggggtggggcgagagagatcggggttttatccccagaccccttctcccggtcctgggcaggagcgcctgcgtctccctgccatggactgctgggcggcccgggccctcctctggggtctgcctgcgtccctcctgtcctcaggcgtggggtcagccctggctccccggctacctaaccccaggttcttgctctgtccttttcctagtttcccctgactctaacccataaccttagagaacgggcccctttcttttaaaacccttttggggttcattcttgcttgggtgttgcgccctctgct

SEQ ID NO: 2114 - DNA, 488 bp, Homo sapiens
gttgaccaatagtaactaacatcttgaacttgggagtttgttcacctatagagttaaatcatatatttttgtgtgtagtctattctgagtaaacagaatgtagagaaattagaagtagtaaggaaagaaacaagggctctaaaataaatactaagcaaatatcaattccatgtggaacaacagggcaccaattccaatcagcttcaagagataagaagaagttggagatgggaaaggagatagtcatcttccaggagcaggaaaagaccagtgtaatagagaaaatgggaatgattgtccacaggacgttatagacttgacttagggaaactgatttagcaagaatatggaagccagcaccatcctgaactctggctgaagtatccagtccatctctgtctgactcctacatactagagattcatagaggggcatacaaattgaatgtatccagcgagcttagagagaaatgggttagaatgatttct

SEQ ID NO: 2115 - DNA, 396 bp, Homo sapiens
aactcgaatggaatcatcattgaatggaatcgaatggaatcatcgagtggaatcgaatggaattatgatcaaatggaatcgaatgtaatcatcatcaaatggaatcaaaaataaccatcatcaattggtattgaatggaattgtcatcaaatggaattcaaaggaatcatcatcaaatggaaccgaatggaatcctcattgaatggaaatgaaaggggtcatcatcaaatggaatcgaatggaatcatcatcaaatggaatctaatggaatcattgaacagaattgaatggaatcgtcatcgaatgaattgaatgcaatcatcgaatggtctcgaatggaatcatcttctaatggaaaggaatggaatcatcgcatagaatcgaatggaattatca

SEQ ID NO: 2116 - DNA, 2137 bp, Homo sapiens
  misc_feature (574)..(574): n is a, c, g, or t
  misc_feature (754)..(754): n is a, c, g, or t
  misc_feature (903)..(903): n is a, c, g, or t
  misc_feature (1397)..(1397): n is a, c, g, or t
  misc_feature (1834)..(1834): n is a, c, g, or t
  misc_feature (2137)..(2137): n is a, c, g, or t
taattttttatagaggtggggtcttgctatgttgtccaagctggtctcgaacttctggcttcaagcagtccttctgccttggcctcccaaagtgctgggattacaggtgtgagccactttacctggcccataaatatattataactaaaatttgctctttaactgtttactgaaagtacgggttgtcatccttttattttctataggccaacacgtttagtgctactaggagacaaaaataataaagtaatactgataggtaaaaatgctatatttaaaattcctaaaaatttgcatatcaaaatttaagttgttcatataatttcttaggggaaaatgaagcagaaagaagtttatttaaaagttatacccttgtgattgaaaatctgtctaaaatatatcagtttcttttcttgttctagttcaaggtggtaaacataattaagctttattgagtatcttgccacagaatgaatcatgaatggttacgtttactatgattttatcaatgatctatgtggaaggtgggagattaaattaaatgtgtgcaggcatcagccaaaaatttattaantattttaatgctttacattttttctttcaggtagaactatgagagatagtatattgcaggctctaatttctttggtttctaatgtttgactatataagaatataatcatcataagatggcaatattcattattaaatttaatttatgctaccactcaaatggttaggttgtgaaataagnttgtttaatagtgtttgaaagatttgtatacccctgagactctagctagcaccctgactgatgccctgacagaaaaagatgattggagcattcagaagttatgcctcactcggggaggggcagttgagatttgttccctgataccaganccattccttgaatactttgtgactgatgagattgactttggagtgggagacagagaaagaatttggggtgcggtagtatcttggaggcttaagggagagcaccaagaagcagatcacagggcagaagagggatgagtgcctttcaagagaaggtggggaggtttgagaggagtgagtcaatagtgtagagtcctcacacaatcctgcctcccagctgttccctttgccatcagatgctgagtgatttgacattacagatgaccatggagggcagtgtgggtgatgaggaaggctgcaccgcactgtgggattcacattaggcagtccaatataaaccagacttacaccagactcatgcaacaaatttgcccactagccattattcacaaattactgaagttatcactgactgataaacacagaataccagcaggtgggaggaaatgttgtctagtttctattattagcttgtgctccatctgctgattataaangtttcactggttcatttattttaacctctcaattgaatcttactgcaggaaaacaaattgtagaatacatcttactagttgtgggaaatcaaatttaatttgaatagcaaaaagtaaatagaatgatattttatgctgaatctaagtagccacatccgtagtcttctttattaaaggaatgttgggttagctcaattgtggataattttattattttcatttaggaaacaattacaacatattagataaatggtaaatcattttttaccctttcttctccatgatttaaaaaataagaatggaaaacatgaattttacatttttttcccactgcattaagttttattattactgtggtttgtttttatttcaaacttttcatgtttcatgtctctcaacgctttttgtcctcaaactttattgctggagtatttaanagcaaatataaacgattcctatagacttttgtatttttgagaaaaaagtagcacactttgggaggctgaggtgggccaatcacctgaggtcaggcattcaagaccagcctggccaacatgtccaaacccctcctgtactaaaaatacaaaaattagccaggtgtggtggcacatgcctgtaatcccagctcctcgggaggctgagtcaggagaatcgcttgaacccgggaggtggaggttgcagtgagctgagatcataccatcgcgctccggcctgggtgacagagcaagactccatctcan

SEQ ID NO: 2117 - DNA, 436 bp, Homo sapiens
  misc_feature (436)..(436): n is a, c, g, or t
ttccatgtcatcattctgctaataatgctcagattattccttaaatataaaaattaaatagatgaatgaaaaaacaaaaaatagaaatggtagtagatattaaggaattagaaattggctttagtttctctcttaataattattatgtggacggctgggtgtggtggctcacgcctgtaatcccagcactttgggaggctgaggtgggccaatcacctgaggtcaggcattcaagaccagcctggccaacatgtccaaacccctcctgtactaaaaatacaaaaattagccaggtgtggtggcacatgcctgtaatcccagctcctcgggaggctgagtcaggagaatcgcttgaacccgggaggtggaggttgcagtgagctgagatcataccatcgcgctccggcctgggtgacagagcaagactccatctcan

SEQ ID NO: 2118 - DNA, 5458 bp, Homo sapiens
  misc_feature (185)..(185): n is a, c, g, or t
  misc_feature (246)..(246): n is a, c, g, or t
  misc_feature (294)..(294): n is a, c, g, or t
ggtggacgaggacgctcagagcccagctctcgagagttcaagcaaccgacggttccccactgctcccaggagcggttacctgggcactctgtgcccctccttcctgttcgggcccaggccgaggacctgccagtagggctcagttgcctggagcccgttcagcccatcccccagttcactttgcntgtgggatctccccgttgctcctgcccgtggactgagtggcaggccatcctacaagcaccnggacacttgacatcagtggtgtcaagacaactctaagaaggttttccntgatcctgcaagccctgccttccttcctgggatcctgccttcaatttgattgcacaggtaccacagcaagccagtgctgtgtgctccgagttccagggcgtcctccagctcagccactgcactgagaacatggactctctgtggggcccaggagccgggagtcacccctttggggtccacaacacccggctgtccccagacttgtgtccagggaagatagtgttgagggccctcaaggagagcggggcagggatgcctgagcaggacaaggaccctagagtccaagagaatcctggtgatcagagaagggtccccgaggtcaccggggatgcacggcctgcatttcggcccctgcgggacaatggaggcctctctccctttgtgcccgggcccgggcctctgcagacagacctccatgcccagaggtcagaaatcagatataaccagacatcccagacctcctggacgagctcctgcaccaaccgaaatgccatctccagctcctacagctccacgggaggcttgccggggctaaagcggaggagggggccagcctcatcccactgccagctgaccctcagttcctcaaagacagtgagtgaggacaggcctcaggctgtctcttcaggtcacacccagtgtgaaaaggcagcagatatagcaccagggcagacactcaccctcaggaatgactcctccacatccgaggcctctaggcccagtacacacaagtttcccctgctgccacgcaggcgaggggagcctttgatgctgccacctcccttagagctggggtaccgggtcactgttgaagacctggaccgggagaaggaggcggccttccagcgcatcaacagtgcactgcaggttgaggacaaggccatctcggactgcagaccctcacggccttcccacactttgtcctcacttgcaacaggggcttctggtctgcctgccgtttctaaagcacccagtatggatgcacagcaggagacacacaagtcccaagactgcctgggcctactggaccccttagcatctgctgcaggggtcccctctacagctcccatgtctgggaagaagcacagaccaccaggccccctgttctcctcctcagatccccttcctgccacctcttctgattcccaggactcagcccaggtcacctcgctgattcctgcccccttcccagctgcaagcatggatgcgggcatgagaagaacaaggcatggcacttctgctcctgcagctgccgcagcagcccctccccgctccacattgaaccccacgttggggtcactactggagtggatggaggcccttcacatttctgggcctcagccacagctgcagcaggtgcccagaggtcagaaccagagatcccagacctcctggaccagctcgtgccccaaatgaaatgccatctcgagcccctacagctctacgggaggcctcccggaacaaaagcggaagaggggccagcctcatcccactgccagctgaccctcagttcctcaaacacagacccagggtgcatgcccatctccagcccagggcagctcccctgtaagctgggtgagctactgaagccaaggtgggaggcagctgacaacaccacccacggcccatgcagaggtggtagaaaggctggactcagcaggaacaccaaatcccggaccaggcagaaaccacccaagactgaggggctcgtgccagagcggtggccacagggctgaatggtcgctgagacagagatggaagccaggacaagggagcccaccgggcccagatagagacttcagaacccactcctgagaacagcggagccaggcgcttagaggaagaccaaatgctgccaggacacggattgtccagggattacattccagcatcttattagaggacggaagcagagggtgctgtttcaacgccaccaccaggagagaggcagaggggctgtgccgtgctagagtcctcagggagggagtgacctcgaccctggctgtgctgcaagctgactccagccttgggctcagcagcacccggtgaacagcagcaggaggagccgctagagcagctgctcatgggcagagcagcccttgggcaactcctgccaccaccccctccccagggagcccaaggcaggggaggctcagcatggaatgaaacaggggagtgagggacacaaggaggtgggaagtgggagggtcccagccccaccaagtacgcagagaccccctcgtcgtcctggacaccacaggggcacctgcaggctgggagaccaggtcctctgtgcatgggcccgggaggcagacctgccccaagggtgatgcagaggccacaggtgctgcacgctccagcgcccactctagacatcagcctccaggttgactaagggtcaggtcatgtttgaaaccatgcttggctggaccgggacccatggcaagagcacctgggcaccagtgtttagccctggtctgcaggaaggaggacagcagactttaggaccccacagcatggcagtgctgaccatttcacccacttggcctccttgaggaatagggatggggagccctctggggatgagcaaggccttccaggacaggctcggttctggtcccctgctttttgaggttgggttaaaatgccgaccatggcagaggggtcacagctcaggttcccacacctcacttttcacagcctccaagggcagcagtgcacatggaggagacgtctcccacgaggccaaggcctccaatgctcaccgatgccctctgcgaagctggggtagaactcgtcagtgaagaggggctcaggcagctcacggaagtacagcttcagcgtgcctgcgatggcgttcatgtccgtctcgctcatcatcaccgacatgtccttcttatctggaaagagcacggaaatgcagcggcctccttgaagatcctgataaatgaagaaaagacacagagaaggatgtgacatgcctgggccatggagcactctgagatctcatcgcggacaccactgcccacacctccatcccgtcctgcgcaggccaacactcactgacatcgaaggctgccttcagtgcctggatgtctgcggccacaccggccggacacgtggtagatgcccacctcctccatgcctcggcgctcgatctcctccacgcactggcgcacgatgtagggcaccttggacctctctctcctgtgggaggggggaatgttctcagtgtcctaacagccctgcttgggccataacacaggagacctgctccctatctgcgcacccggaggtggggtgaggacggtgacgaaggtacccaggtctggggctgcacacagagccttctgcatgcctgtcctccctctgcaagctctgtcttcacggcatgtgctttctcaggaacctttcaagcggccagaacccctgcgaatcacacatgacctttgcgggaaggtcaggaggcctgtctaagtcaagtcagcacgggaagggcatctgacagattccaggcctggggttagcagcctgtgcccccggctgggaggtcagacccggtgttggtcctgccacccacgtgctgtgtgagaggagaatccctgacccctgccctgggccttaacacacatccgacgaatgaatgaagggttgcctcagtaccggtgctccaagtcctgcgatgctaagtgcttttctcctctgagtcttagcaatggacaattccaatacctccacacaggacactagagtaagaaaccttcacagttagaacgcagtgctgtgcggaggccttaacttgagttctgttttgcacctggatttaccagcacatcaaagctgcttcgcaagccccctcattagcagggcttatctgggggagctgctgatggagtcctcgctgctcatgcccacagccctcccagagtgctatgcgagtggctgccgtgcagttgggggtggggcgtggtgtttagacacagataggagtccagggtatgactgatggaggccccggcccacgtgaccagcaaggtcagaggcccagccagattccatcctggggaagcaaatgaattctcagaggaagtggtctgtgtctgcatgaactgctctcaaaccaacaaacaggcttctcttggcaacagactcatgacaaaggattcaagattgtttgaaaaaaaaaaaaggggagcagggaggcagaaagtcctggaaaagtaaattgtttattttacaataagaaagtgattacatattttttttttttacaatggtggaaaattagaagtcattgtgaaaatgatgtctacctgccttgctgatgagtaggatgtgatttggctctttaggaaactgaatttgcagaacttaagaatattgatttataaagggcatggccattgacccagtccatcttatgcaaatctggatgccataaataatatttaaaaatgaaagtattggggtggaggttgcagtgagcagagattgcccccgctacactccagcctggtcgacagagtgaactctgtctcaaaaaaaaaaaaaaaagaaaagaaagaagaagccattcccaacgttgctcatcaaattatgaccataaatttccaggatcagactaacggctaaagagactgatgcatcaacaccaggcagagaataaagcagatttttttgttgttgttctggagagcttctaggaacttgaaaaatacatatgccacactcttaagacccggtggttcttaatcagggatgttcattaaaatgctggaaaactgtaaagacttccaggtcccatccaaggagattttgcttctgattgactggctagtggcctggccattggtattttgaaaaatccctccaagtgattcttttacatcccagatagaaaaccctaaattaaaggtgaaaaaaccagacaccaagtggcatttaaataaatgtcaactttaactccacaaagcatctggttgcatgtggacagaaagagaaggaaagagggccctatatttggataacttagaaatgtgctccccctagcaagatatctaccaaaattaaaaccatatttgaggatgctggcactgcgagtaatatataaatgatgcatgtaacgtcatttaatatgatcttatttttaaaaatgaaaaaaaaa

SEQ ID NO: 2119 - DNA, 3615 bp, Homo sapiens
  misc_feature (185)..(185): n is a, c, g, or t
  misc_feature (246)..(246): n is a, c, g, or t
  misc_feature (294)..(294): n is a, c, g, or t
ggtggacgaggacgctcagagcccagctctcgagagttcaagcaaccgacggttccccactgctcccaggagcggttacctgggcactctgtgcccctccttcctgttcgggcccaggccgaggacctgccagtagggctcagttgcctggagcccgttcagcccatcccccagttcactttgcntgtgggatctccccgttgctcctgcccgtggactgagtggcaggccatcctacaagcaccnggacacttgacatcagtggtgtcaagacaactctaagaaggttttccntgatcctgcaagccctgccttccttcctgggatcctgccttcaatttgattgcacagaggacggaagcagagggtgctgtttcaacgccaccaccaggagagaggcagaggggctgtgccgtgctagagtcctcagggagggagtgacctcgaccctggctgtgctgcaagctgactccagccttgggctcagcagcacccggtgaacagcagcaggaggagccgctagagcagctgctcatgggcagagcagcccttgggcaactcctgccaccaccccctccccagggagcccaaggcaggggaggctcagcatggaatgaaacaggggagtgagggacacaaggaggtgggaagtgggagggtcccagccccaccaagtacgcagagaccccctcgtcgtcctggacaccacaggggcacctgcaggctgggagaccaggtcctctgtgcatgggcccgggaggcagacctgccccaagggtgatgcagaggccacaggtgctgcacgctccagcgcccactctagacatcagcctccaggttgactaagggtcaggtcatgtttgaaaccatgcttggctggaccgggacccatggcaagagcacctgggcaccagtgtttagccctggtctgcaggaaggaggacagcagactttaggaccccacagcatggcagtgctgaccatttcacccacttggcctccttgaggaatagggatggggagccctctggggatgagcaaggccttccaggacaggctcggttctggtcccctgctttttgaggttgggttaaaatgccgaccatggcagaggggtcacagctcaggttcccacacctcacttttcacagcctccaagggcagcagtgcacatggaggagacgtctcccacgaggccaaggcctccaatgctcaccgatgccctctgcgaagctggggtagaactcgtcagtgaagaggggctcaggcagctcacggaagtacagcttcagcgtgcctgcgatggcgttcatgtccgtctcgctcatcatcaccgacatgtccttcttatctggaaagagcacggaaatgcagcggcctccttgaagatcctgataaatgaagaaaagacacagagaaggatgtgacatgcctgggccatggagcactctgagatctcatcgcggacaccactgcccacacctccatcccgtcctgcgcaggccaacactcactgacatcgaaggctgccttcagtgcctggatgtctgcggccacaccggccggacacgtggtagatgcccacctcctccatgcctcggcgctcgatctcctccacgcactggcgcacgatgtagggcaccttggacctctctctcctgtgggaggggggaatgttctcagtgtcctaacagccctgcttgggccataacacaggagacctgctccctatctgcgcacccggaggtggggtgaggacggtgacgaaggtacccaggtctggggctgcacacagagccttctgcatgcctgtcctccctctgcaagctctgtcttcacggcatgtgctttctcaggaacctttcaagcggccagaacccctgcgaatcacacatgacctttgcgggaaggtcaggaggcctgtctaagtcaagtcagcacgggaagggcatctgacagattccaggcctggggttagcagcctgtgcccccggctgggaggtcagacccggtgttggtcctgccacccacgtgctgtgtgagaggagaatccctgacccctgccctgggccttaacacacatccgacgaatgaatgaagggttgcctcagtaccggtgctccaagtcctgcgatgctaagtgcttttctcctctgagtcttagcaatggacaattccaatacctccacacaggacactagagtaagaaaccttcacagttagaacgcagtgctgtgcggaggccttaacttgagttctgttttgcacctggatttaccagcacatcaaagctgcttcgcaagccccctcattagcagggcttatctgggggagctgctgatggagtcctcgctgctcatgcccacagccctcccagagtgctatgcgagtggctgccgtgcagttgggggtggggcgtggtgtttagacacagataggagtccagggtatgactgatggaggccccggcccacgtgaccagcaaggtcagaggcccagccagattccatcctggggaagcaaatgaattctcagaggaagtggtctgtgtctgcatgaactgctctcaaaccaacaaacaggcttctcttggcaacagactcatgacaaaggattcaagattgtttgaaaaaaaaaaaaggggagcagggaggcagaaagtcctggaaaagtaaattgtttattttacaataagaaagtgattacatattttttttttttacaatggtggaaaattagaagtcattgtgaaaatgatgtctacctgccttgctgatgagtaggatgtgatttggctctttaggaaactgaatttgcagaacttaagaatattgatttataaagggcatggccattgacccagtccatcttatgcaaatctggatgccataaataatatttaaaaatgaaagtattggggtggaggttgcagtgagcagagattgcccccgctacactccagcctggtcgacagagtgaactctgtctcaaaaaaaaaaaaaaaagaaaagaaagaagaagccattcccaacgttgctcatcaaattatgaccataaatttccaggatcagactaacggctaaagagactgatgcatcaacaccaggcagagaataaagcagatttttttgttgttgttctggagagcttctaggaacttgaaaaatacatatgccacactcttaagacccggtggttcttaatcagggatgttcattaaaatgctggaaaactgtaaagacttccaggtcccatccaaggagattttgcttctgattgactggctagtggcctggccattggtattttgaaaaatccctccaagtgattcttttacatcccagatagaaaaccctaaattaaaggtgaaaaaaccagacaccaagtggcatttaaataaatgtcaactttaactccacaaagcatctggttgcatgtggacagaaagagaaggaaagagggccctatatttggataacttagaaatgtgctccccctagcaagatatctaccaaaattaaaaccatatttgaggatgctggcactgcgagtaatatataaatgatgcatgtaacgtcatttaatatgatcttatttttaaaaatgaaaaaaaaa

SEQ ID NO: 2120 - DNA, 3700 bp, Homo sapiens
tgtcgtgtgagccttgctctcctggggaggctcaggctgacggctgatgtgggcattgccgagggtaacctgtggcccagtgtatatggccgggtctcctcaagctgcattcattcaagtaggacccagggtgcatgcccatctccagcccagggcagctcccctgtaagctgggtgagctactgaagccaaggtgggaggcagctgacaacaccacccacggcccatgcagaggtggtagaaaggctggactcagcaggaacaccaaatcccggaccaggcagaaaccacccaagactgaggggctcgtgccagagcggtggccacagagacttcagaacccactcctgagaacagcggagccaggcgcttagaggaagaccaaatgctgccaggacacggattgtccagggattacattccagcatcttattagaggacggaagcagagggtgctgtttcaacgccaccaccaggagagaggcagaggggctgtgccgtgctagagtcctcagggagggagtgacctcgaccctggctgtgctgcaagctgactccagccttgggctcagcagcacccggtgaacagcagcaggaggagccgctagagcagctgctcatgggcagagcagcccttgggcaactcctgccaccaccccctccccagggagcccaaggcaggggaggctcagcatggaatgaaacaggggagtgagggacacaaggaggtgggaagtgggagggtcccagccccaccaagtacgcagagaccccctcgtcgtcctggacaccacaggggcacctgcaggctgggagaccaggtcctctgtgcatgggcccgggaggcagacctgccccaagggtgatgcagaggccacaggtgctgcacgctccagcgcccactctagacatcagcctccaggttgactaagggtcaggtcatgtttgaaaccatgcttggctggaccgggacccatggcaagagcacctgggcaccagtgtttagccctggtctgcaggaaggaggacagcagactttaggaccccacagcatggcagtgctgaccatttcacccacttggcctccttgaggaatagggatggggagccctctggggatgagcaaggccttccaggacaggctcggttctggtcccctgctttttgaggttgggttaaaatgccgaccatggcagaggggtcacagctcaggttcccacacctcacttttcacagcctccaagggcagcagtgcacatggaggagacgtctcccacgaggccaaggcctccaatgctcaccgatgccctctgcgaagctggggtagaactcgtcagtgaagaggggctcaggcagctcacggaagtacagcttcagcgtgcctgcgatggcgttcatgtccgtctcgctcatcatcaccgacatgtccttcttatctggaaagagcacggaaatgcagcggcctccttgaagatcctgataaatgaagaaaagacacagagaaggatgtgacatgcctgggccatggagcactctgagatctcatcgcggacaccactgcccacacctccatcccgtcctgcgcaggccaacactcactgacatcgaaggctgccttcagtgcctggatgtctgcggccacaccggccggacacgtggtagatgcccacctcctccatgcctcggcgctcgatctcctccacgcactggcgcacgatgtagggcaccttggacctctctctcctgtgggaggggggaatgttctcagtgtcctaacagccctgcttgggccataacacaggagacctgctccctatctgcgcacccggaggtggggtgaggacggtgacgaaggtacccaggtctggggctgcacacagagccttctgcatgcctgtcctccctctgcaagctctgtcttcacggcatgtgctttctcaggaacctttcaagcggccagaacccctgcgaatcacacatgacctttgcgggaaggtcaggaggcctgtctaagtcaagtcagcacgggaagggcatctgacagattccaggcctggggttagcagcctgtgcccccggctgggaggtcagacccggtgttggtcctgccacccacgtgctgtgtgagaggagaatccctgacccctgccctgggccttaacacacatccgacgaatgaatgaagggttgcctcagtaccggtgctccaagtcctgcgatgctaagtgcttttctcctctgagtcttagcaatggacaattccaatacctccacacaggacactagagtaagaaaccttcacagttagaacgcagtgctgtgcggaggccttaacttgagttctgttttgcacctggatttaccagcacatcaaagctgcttcgcaagccccctcattagcagggcttatctgggggagctgctgatggagtcctcgctgctcatgcccacagccctcccagagtgctatgcgagtggctgccgtgcagttgggggtggggcgtggtgtttagacacagataggagtccagggtatgactgatggaggccccggcccacgtgaccagcaaggtcagaggcccagccagattccatcctggggaagcaaatgaattctcagaggaagtggtctgtgtctgcatgaactgctctcaaaccaacaaacaggcttctcttggcaacagactcatgacaaaggattcaagattgtttgaaaaaaaaaaaaggggagcagggaggcagaaagtcctggaaaagtaaattgtttattttacaataagaaagtgattacatattttttttttttacaatggtggaaaattagaagtcattgtgaaaatgatgtctacctgccttgctgatgagtaggatgtgatttggctctttaggaaactgaatttgcagaacttaagaatattgatttataaagggcatggccattgacccagtccatcttatgcaaatctggatgccataaataatatttaaaaatgaaagtattggggtggaggttgcagtgagcagagattgcccccgctacactccagcctggtcgacagagtgaactctgtctcaaaaaaaaaaaaaaaagaaaagaaagaagaagccattcccaacgttgctcatcaaattatgaccataaatttccaggatcagactaacggctaaagagactgatgcatcaacaccaggcagagaataaagcagatttttttgttgttgttctggagagcttctaggaacttgaaaaatacatatgccacactcttaagacccggtggttcttaatcagggatgttcattaaaatgctggaaaactgtaaagacttccaggtcccatccaaggagattttgcttctgattgactggctagtggcctggccattggtattttgaaaaatccctccaagtgattcttttacatcccagatagaaaaccctaaattaaaggtgaaaaaaccagacaccaagtggcatttaaataaatgtcaactttaactccacaaagcatctggttgcatgtggacagaaagagaaggaaagagggccctatatttggataacttagaaatgtgctccccctagcaagatatctaccaaaattaaaaccatatttgaggatgctggcactgcgagtaatatataaatgatgcatgtaacgtcatttaatatgatcttatttttaaaaatgaaaaaaaaa

SEQ ID NO: 2121 - DNA, 3685 bp, Homo sapiens
tgtcgtgtgagccttgctctcctggggaggctcaggctgacggctgatgtgggcattgccgagggtaacctgtggcccagtgtatatggccgggtctcctcaagctgcattcattcaagtaggacccagggtgcatgcccatctccagcccagggcagctcccctgtaagctgggtgagctactgaagccaaggtgggaggcagctgacaacaccacccacggcccatgcagaggtggtagaaaggctggactcagcaggaacaccaaatcccggaccaggcagaaaccacccaagactgaggggctcgtgccagagcggtggccacagagacttcagaacccactcctgagaacagcggagccaggcgcttagaggaagaccaaatgctgccaggacacggattgtccagggattacattccagcatcttattagaggacggaagcagagggtgctgtttcaacgccaccaccaggagagaggcagaggggctgtgccgtgctagagtcctcagggagggagtgacctcgaccctggctgtgctgcaagctgactccagccttgggctcagcagcacccggtgaacagcagcaggaggagccgctagagcagctgctcatgggcagagcagcccttgggcaactcctgccaccaccccctccccagggagcccaaggcaggggaggctcagcatggaatgaaacaggggagtgagggacacaaggaggtgggaagtgggagggtcccagccccaccaagtacgcagagaccccctcgtcgtcctggacaccacaggggcacctgcaggctgggagaccaggtcctctgtgcatgggcccgggaggcagacctgccccaagggtgatgcagaggccacaggtgctgcacgctccagcgcccactctagacatcagcctccaggttgactaagggtcaggtcatgtttgaaaccatgcttggctggaccgggacccatggcaagagcacctgggcaccagtgtttagccctggtctgcaggaaggaggacagcagactttaggaccccacagcatggcagtgctgaccatttcacccacttggcctccttgaggaatagggatggggagccctctggggatgagcaaggccttccaggacaggctcggttctggtcccctgctttttgaggttgggttaaaatgccgaccatggcagaggggtcacagctcaggttcccacacctcacttttcacagcctccaagggcagcagtgcacatggaggagacgtctcccacgaggccaaggcctccaatgctcaccgatgccctctgcgaagctggggtagaactcgtcagtgaagaggggctcaggcagctcacggaagtacagcttcagcgtgcctgcgatggcgttcatgtccgtctcgctcatcatcaccgacatgtccttcttatctggaaagagcacggaaatgcagcggcctccttgaagatcctgataaatgaagaaaagacacagagaaggatgtgacatgcctgggccatggagcactctgagatctcatcgcggacaccactgcccacacctccatcccgtcctgcgcaggccaacactcactgacatcgaaggctgccttcagtgcctggatgtctgcggccacaccggccggacacgtggtagatgcccacctcctccatgcctcggcgctcgatctcctccacgcactggcgcacgatgtagggcaccttggacctctctctcctgtgggaggggggaatgttctcagtgtcctaacagccctgcttgggccataacacaggagacctgctccctatctgcgcacccggaggtggggtgaggacggtgacgaaggtacccaggtctggggctgcacacagagccttctgcatgcctgtcctccctctgcaagctctgtcttcacggcatgtgctttctcaggaacctttcaagcggccagaacccctgcgaatcacacatgacctttgcgggaaggtcaggaggcctgtctaagtcaagtcagcacgggaagggcatctgacagattccaggcctggggttagcagcctgtgcccccggctgggaggtcagacccggtgttggtcctgccacccacgtgctgtgtgagaggagaatccctgacccctgccctgggccttaacacacatccgacgaatgaatgaagggttgcctcagtaccggtgctccaagtcctgcgatgctaagtgcttttctcctctgagtcttagcaatggacaattccaatacctccacacaggacactagagtaagaaaccttcacagttagaacgcagtgctgtgcggaggccttaacttgagttctgttttgcacctggatttaccagcacatcaaagctgcttcgcaagccccctcattagcagggcttatctgggggagctgctgatggagtcctcgctgctcatgcccacagccctcccagagtgctatgcgattgggggtggggcgtggtgtttagacacagataggagtccagggtatgactgatggaggccccggcccacgtgaccagcaaggtcagaggcccagccagattccatcctggggaagcaaatgaattctcagaggaagtggtctgtgtctgcatgaactgctctcaaaccaacaaacaggcttctcttggcaacagactcatgacaaaggattcaagattgtttgaaaaaaaaaaaaggggagcagggaggcagaaagtcctggaaaagtaaattgtttattttacaataagaaagtgattacatattttttttttttacaatggtggaaaattagaagtcattgtgaaaatgatgtctacctgccttgctgatgagtaggatgtgatttggctctttaggaaactgaatttgcagaacttaagaatattgatttataaagggcatggccattgacccagtccatcttatgcaaatctggatgccataaataatatttaaaaatgaaagtattggggtggaggttgcagtgagcagagattgcccccgctacactccagcctggtcgacagagtgaactctgtctcaaaaaaaaaaaaaaaagaaaagaaagaagaagccattcccaacgttgctcatcaaattatgaccataaatttccaggatcagactaacggctaaagagactgatgcatcaacaccaggcagagaataaagcagatttttttgttgttgttctggagagcttctaggaacttgaaaaatacatatgccacactcttaagacccggtggttcttaatcagggatgttcattaaaatgctggaaaactgtaaagacttccaggtcccatccaaggagattttgcttctgattgactggctagtggcctggccattggtattttgaaaaatccctccaagtgattcttttacatcccagatagaaaaccctaaattaaaggtgaaaaaaccagacaccaagtggcatttaaataaatgtcaactttaactccacaaagcatctggttgcatgtggacagaaagagaaggaaagagggccctatatttggataacttagaaatgtgctccccctagcaagatatctaccaaaattaaaaccatatttgaggatgctggcactgcgagtaatatataaatgatgcatgtaacgtcatttaatatgatcttatttttaaaaatgaaaaaaaaa

SEQ ID NO: 2122 - DNA, 3642 bp, Homo sapiens
tgtcgtgtgagccttgctctcctggggaggctcaggctgacggctgatgtgggcattgccgagggtaacctgtggcccagtgtatatggccgggtctcctcaagctgcattcattcaagtaggacccagggtgcatgcccatctccagcccagggcagctcccctgtaagctgggtgagctactgaagccaaggtgggaggcagctgacaacaccacccacggcccatgcagaggtggtagaaaggctggactcagcaggaacaccaaatcccggaccaggcagaaaccacccaagactgaggggctcgtgccagagcggtggccacagagacttcagaacccactcctgagaacagcggagccaggcgcttagaggaagaccaaatgctgccaggacacggattgtccagggattacattccagcatcttattagaggacggaagcagagggtgctgtttcaacgccaccaccaggagagaggcagaggggctgtgccgtgctagagtcctcagggagggagtgacctcgaccctggctgtgctgcaagctgactccagccttgggctcagcagcacccggtgaacagcagcaggaggagccgctagagcagctgctcatgggcagagcagcccttgggcaactcctgccaccaccccctccccagggagcccaaggcaggggaggctcagcatggaatgaaacaggggagtgagggacacaaggaggtgggaagtgggagggtcccagccccaccaagtacgcagagaccccctcgtcgtcctggacaccacaggggcacctgcaggctgggagaccaggtcctctgtgcatgggcccgggaggcagacctgccccaagggtgatgcagaggccacaggtgctgcacgctccagcgcccactctagacatcagcctccaggttgactaagggtcaggtcatgtttgaaaccatgcttggctggaccgggacccatggcaagagcacctgggcaccagtgtttagccctggtctgcaggaaggaggacagcagactttaggaccccacagcatggcagtgctgaccatttcacccacttggcctccttgaggaatagggatggggagccctctggggatgagcaaggccttccaggacaggctcggttctggtcccctgctttttgaggttgggttaaaatgccgaccatggcagaggggtcacagctcaggttcccacacctcacttttcacagcctccaagggcagcagtgcacatggaggagacgtctcccacgaggccaaggcctccaatgctcaccgatgccctctgcgaagctggggtagaactcgtcagtgaagaggggctcaggcagctcacggaagtacagcttcagcgtgcctgcgatggcgttcatgtccgtctcgctcatcatcaccgacatgtccttcttatctggaaagagcacggaaatgcagcggcctccttgaagatcctgataaatgaagaaaagacacagagaaggatgtgacatgcctgggccatggagcactctgagatctcatcgcggacaccactgcccacacctccatcccgtcctgcgcaggccaacactcactgacatcgaaggctgccttcagtgcctggatgtctgcggccacaccggccggacacgtggtagatgcccacctcctccatgcctcggcgctcgatctcctccacgcactggcgcacgatgtagggcaccttggacctctctctcctgtgggaggggggaatgttctcagtgtcctaacagccctgcttgggccataacacaggagacctgctccctatctgcgcacccggaggtggggtgaggacggtgacgaaggtacccaggtctggggctgcacacagagccttctgcatgcctgtcctccctctgcaagctctgtcttcacggcatgtgctttctcaggaacctttcaagcggccagaacccctgcgaatcacacatgacctttgcgggaaggtcaggaggcctgtctaagtcaagtcagcacgggaagggcatctgacagattccaggcctggggttagcagcctgtgcccccggctgggaggtcagacccggtgttggtcctgccacccacgtgctgtgtgagaggagaatccctgacccctgccctgggccttaacacacatccgacgaatgaatgaagggttgcctcagtaccggtgctccaagtcctgcgatgctaagtgcttttctcctctgagtcttagcaatggacaattccaatacctccacacaggacactagagtaagaaaccttcacagttagaacgcagtgctgtgcggaggccttaacttgagttctgttttgcacctggatttaccagcacatcaaagctgcttcgcaagccccctcattagcagggcttatctgggggagctgctgatggagtcctcgctgctcatgcccacagccctcccagagtgctatgcgagtggctgccgtgcagttgggggtggggcgtggtgtttagacacagataggagtccagggtatgactgatggaggccccggcccacgtgaccagcaaggtcagaggcccagccagattccatcctggggaagcaaatgaattctcagaggaagtggtctgtgtctgcatgaactgctctcaaaccaacaaacaggcttctcttggcaacagactcatgacaaaggattcaagattgtttgtacaataagaaagtgattacatattttttttttttacaatggtggaaaattagaagtcattgtgaaaatgatgtctacctgccttgctgatgagtaggatgtgatttggctctttaggaaactgaatttgcagaacttaagaatattgatttataaagggcatggccattgacccagtccatcttatgcaaatctggatgccataaataatatttaaaaatgaaagtattggggtggaggttgcagtgagcagagattgcccccgctacactccagcctggtcgacagagtgaactctgtctcaaaaaaaaaaaaaaaagaaaagaaagaagaagccattcccaacgttgctcatcaaattatgaccataaatttccaggatcagactaacggctaaagagactgatgcatcaacaccaggcagagaataaagcagatttttttgttgttgttctggagagcttctaggaacttgaaaaatacatatgccacactcttaagacccggtggttcttaatcagggatgttcattaaaatgctggaaaactgtaaagacttccaggtcccatccaaggagattttgcttctgattgactggctagtggcctggccattggtattttgaaaaatccctccaagtgattcttttacatcccagatagaaaaccctaaattaaaggtgaaaaaaccagacaccaagtggcatttaaataaatgtcaactttaactccacaaagcatctggttgcatgtggacagaaagagaaggaaagagggccctatatttggataacttagaaatgtgctccccctagcaagatatctaccaaaattaaaaccatatttgaggatgctggcactgcgagtaatatataaatgatgcatgtaacgtcatttaatatgatcttatttttaaaaatgaaaaaaaaa

SEQ ID NO: 2123 - DNA, 470 bp, Homo sapiens
agcccggatgtaccctcatgcgcccttttctggttggctggccggcagagtcccagcatccaccgagtgctcagggcgggtgggaggtagagcagcatgtggctgtgtgcccacatccctgggagacaaggattgtcaggcagcatcagggaaaatggtatgtggggagatgattctgttgtaaaaggcggttctataaaacaatcacaatttggattgttatcaaggagagaaaggagcctctggttgaaccagagaggtgggtctgactcagaagtgtttcccagcctgccttcacacacctgcggctgttcggggcccgtgatggaaccaggagcagggagcgtggatagcatccttaaaagtccgccagttgggaggctgaggcgggcggatcacgaggtcaggagatcgagaccatcctggctaacacggtaaaaccccgtctctactaaaaatacaaaaaaaaa

SEQ ID NO: 2124 - DNA, 508 bp, Homo sapiens
acaacagcgtatgcaactagaggacacgacgatgccaccctctttgtcccagggccacagggcatagatgagatcaccatgacacaacgacaccaccttctctggcctcctaggtaaagagtctgttggctcaagccggactctcccttcctcttaaagcccactcctgccctttgtcaggaagcctccccgagttctccagccaggtggtggcagccctatgaccacagccctggtctgtgcactctcagctaaagcttgctgcccccaccctggtctccaccaaactcacagagaaacctacagggcagtccagctgtgcaaatatctccccaatgtgtctcttctatggaagcagagaaggcttgacagccatttgttatttacttgcgtatgagattcctgtggctgctgtgacagattaccacacgcttagtggctgaaaacaacacaaataaattctcttctagttctgaaggtcagaagtctgaatgggttttaccagcta

SEQ ID NO: 2125 - DNA, 354 bp, Homo sapiens
tatacactgtccataagatactcactttaacttaaggacacacataaactgcactgaaaggatggaaagagatatgccatgctaactgggcacagtggctcatgcttgtaatcctagcactttgggagaccgaagcaggcagatcagttgaggccaggagtttgagaccagcctggccaacatggtgaaatcctgtctctactaaaaatacaaaaattagctgggcatggtggcagatgcctgtaatctcagctactcaggaggctgaggcaggagaattgcttgaacctgggaggcagaggttgcaggagcactgcactctagcctgggcaatagagtgagactccatctcaa

SEQ ID NO: 2126 - DNA, 748 bp, Homo sapiens
aacctgcacgttgtgcacatgtaccctagaacttataataaaaataagagcaaacaaaattacttgaatcaatgagaaaacattagaaagaataatagatagccagggtcatcagatatttgaggaaaatataagagaaagagaaaaaataagtaaagagaccacagataggcaggcttctaatgaatatataatagaacagataagagattaaacttagaaatacagaggtaaatagacagatcaaaaagatttaaaagttgttgcttttgggcagcagggctgaggtgaatagaaatggaaagggaattgctgggttttgtcataaccttttactactatttgattgtttaactgattttatttattagattaataaaaatattaaagagtaaaggccatggatttttaagccctcaaaacattttaattgtgcatatttttatcatatagatgcttcttattagaaaaaactttccattctgttacattaatttttatcatgtgttgccattacattaccgctgttcttaaagacctcttcctgtttttgacctcactgttgagctgaattaaatacacgttatcatctaactagttttaactttaagaagtaagatatgttctgagaaaagtattctttaacaggttccaatcgttcttaaagattcatagaactttatacatggtgcccaaatgtcttttctgtctatgttaataataagtaaaactattgtttataaaatgc

SEQ ID NO: 2127 - DNA, 819 bp, Homo sapiens
aaaacaaaaaaaaaaaaaaaagaaaaagaaatgcaaagctttattttatgagtcagaggacttgatactaagtcttaagattgtaatactgcccctgccaagttaatctgcaaattcaacaaattcaaaaaaacaaaaacctccactcccagatacctttttgcaaaaattgacaagttgatcttaaaatttatgtggacccagagtagccaaaataatcttgataaataacatatttggagtactcactcggatatcaaaacttagggcaaaactacaattataagacaggcataaagataagcgaaataaaagtccagaaataaacccttgtgttttgtagtcagttgatgtttggcaaaagttccaagacaattcaaatgggaaagaatagtctcttcaacaaatggttttgggacaagtaaatattgacccctcctttatgcgatatacaaaagttaaactcgaaatgtaacaaacacctaaatataagaattaaaactataaaactctaagaggaatatctaagggtaaatcttcacgactttgggttacacaaagccttgttgatgtgacaagtcacaaaagaaaaatagatgaacaccaaatataaaaacacttgctgcaattgataccaacagattagaataacaactcagaattggaaaaatatttgcaaatcatatatctgataaaatgtatccggaatgtgtagagaattctttcaacccaataaaaagaatataaatacccaatttaaaaaatgagtaaaggggccgggcgcggtggctcatgcctgtaattccagcactttgggag

SEQ ID NO: 2128 - DNA, 381 bp, Homo sapiens
acagagcgagtcgaccttctcaaaaaaaaaaaaaaagtccccatttcacagatgtaaaaattaaaacttggagagatgaattgacttgctaaagacacacagggctgggtatggtggttcacacctgtaatcccagcattttggaaggccaaggctggtggatcacctgaggtcaggagttcaccagcctagccaacatggtgaaaccccatctctactaaaaatacaaaataagccgggcatggtggcgggtgcctgtaatcccagttacccaggaggctggggcaggagaatcgtttgaacctgggaggcagaggttgcagtgagccgagattgcccctttgcactctagcctaggcaacaagaacgaaagtccgtctc

SEQ ID NO: 2129 - DNA, 452 bp, Homo sapiens
gtcttttttagttccatatgaattttagaatagttttttcctaattatgtgaagaatgtcattggtagtttgatagcaatagcattaaatctgtaaattgctttgggaagtatggccattttaatgatattgattctttctatccatgagaaaattgcctagtttttaaaatggtactcagcacaaagatttcaaaagtattttgcaaaggaaggtgaggctgatgactacccttagagatctacagctattcaccatctcttactcaatgtagtttgtggacagttgcatatatcagtggcatggttgcatggatgcagtaggccataagtgaaacagaagaaacattttgtgtaaaataataatgaataagaaacatcacttccttcattctaggtctctaatcaacacagtcatcctgatctttgtagtcctatattggttcttcttag

SEQ ID NO: 2130 - DNA, 493 bp, Homo sapiens
atcctcttgcttcagcctcccaagtaactggggctacaggcgtgagccactgcacagtagttaagatcgcagctctggagggagttactagcagttgtaactttgacagctcgtttaaccttcctaagattgtgtttcctgtctcttgagtaaaatgaggacaaatttgtctcactgtcacagaggatagaatggagacagtggaactaagagaaggtggcacatgctagctatgctcaacaaatgtcagcaaattttgttgaaatgtggaagatactgacaagagcaaagttttcagatcagcaccagtaacttgtcttacttaaaccgttaaaatcacatctgttttgatttttcccctttttctcttttgagccttttattggaagagcagatgcagtctgtgcgggtatgcagtgctgcagtacgaagtgaatggcaccccctgggagttggggcagtgcacaacgcttcagtgccttacgtagggagg

SEQ ID NO: 2131 - DNA, 356 bp, Homo sapiens
attgagttgtgatctcgttttatagtaccaaacatatgaccacttcctcatcattctttaaaaagtatgctattttaatatttttaaagagcctttgtgtgctcactggtttcaaaaataaaatctgcatgattccatttaagaagtgtttgtgtttggagtgctatttttagagaatttttgtctctgctgattctgacaggttggcccttcctgaacgtggggccattgcctggaagtcaggaggcccgggacttggtgctgggtctgctgtcatttgccatatgaccttccttgggcaaatcccttcccttattctggcctctaattccttatatgtgaaatgagtgggttgt

SEQ ID NO: 2132 - DNA, 742 bp, Homo sapiens
aggctgcaggcagttgcgggttgcaggagttcaggaaaggaggtgggactagagtcaacctggaatagctctacagtaacaatggcagcctttttgttgctgggacatccatacaggcaacttagctggtgaaaggactctggattggttggcagtctgcttttttttttccaaggtgatcactttactgtagaagaaatgaggttaacagaaaagagtgagggagaacaacaactcaagcccaacaactctaatgcacccaatgaagatcaagaagaagaaatccaacagtcagaacagcatactccagcaaggcagcgaacacaaagagcagacacacagccatccagatgtcgattgccttcacgtaggacacctacaacatccagcgacagaacgatcaaccttcttgaagtccttccgtggcctactgagtggattttcaacccctatcgattgcctgctctttttgagctttatcctgaatttcttctggtgtttaaagaagccttccatgacatatcccattgtctgaaagcccagatggaaaagatcggactgcccatcatactccacctcttcgcactctccaccctctacttctacaagtttttccttcctacaattctttccctttctttctttattcttcttgtacttctgcttctgctttttattattgtcttcattctgatcttcttctgattcttttgtttcaataaacagcaatgagcatgaacac

SEQ ID NO: 2133 - DNA, 470 bp, Homo sapiens
ctagaaaagtaatacacctaaaaaaatgtctgattctaaatactggttttaacctcactactatgctgccattctatacttattttgaaactttaaaaagaaattgtaatgacaagagtattcagttatttaagaaactattgttttctttaattggtctgtgattacatgcatggaagtttcaaaacatctgaaaagcttcagtgtggacaaagcacaactgatgcttttgacattttgtccattttgttagaattcagcagccagctaaacataataggaaatccaatagagcttgagctgtagctgcaaaagccttttttttttttttttttttttttaatcatcttgtgaaattctactgcaggccatcaggggattgccaggcagtccttgcaatagcaagataatgaggcaaggccagagtgtgtctataatcccagctactctgaaagcagaggcaggattgc

SEQ ID NO: 2134 - DNA, 348 bp, Homo sapiens
gcatctgaaagggttaataaggtgcccctatgcccgcccaggccatttccctgatggttcctgggaaggttttctgtgtcccctcctcgtgacccggcgggtaaacaaacacagttcccactgacattagtaggatgaagcagatggtttcctctccaagtgtttattcagtttatgtattttcattagcagtgtttctataggaagagcagaggaaataagacacagccatttttattttttatttttatttttattttttgcttcttttgagcagccctggtaaaaaaaaatgcttggggaagatgctcacaggtgacaaaaaagacacctagtgcctgtcgaagg

SEQ ID NO: 2135 - DNA, 468 bp, Homo sapiens
ccaggttgaaccattatttcctcatttgctttaaaaacggatacattgttggtgtggctgctaaaaagagagcaggcagctggggctccgggaagtacctgtgcagggcagttccgcctccccctcttggctggctcccgacttctctgattcttgccaaccaagtcctgctaactaaactcctaagagactgactgataaatcatttattcattcaacaaatacttgagcacctgtttggttgcaggcaccattccaggccctgagaatgtggcaaggcactgaaacaaacccctcctgtatcttacattctagtgggggttggggggacagatgataataaaaataagaacattcagtggcttatgcctgttatcccgcactttgggaggctgtagccaaaggatcagttgagcccaggagttcaagaccagcctgaccgacacagtgagacccccatctcttaaa

SEQ ID NO: 2136 - DNA, 398 bp, Homo sapiens
aaagccagaaacttggagttgaaagagatgcttctgaaatgccatgtttctccataagagtgggcaagggagccatctggtggaggaagcatgcttagacattcccttctctcttccctgatttctccagcctgttctcctcagcatttccacctagtatttctccaagggccacagtgaggtttatgagtcaagtatgtgggccataaacacacttgcttattgaagcaaatactaacctctgcaaaatgtcaaggtaagatattatcttcagtgattatttaattttctcccttagtctcttctacctgtctgctaccgaggggaaaacatcagcagcaccaggagttgaggcagaatgctgcaggagggaaagaaggaactagaacttgattatg

SEQ ID NO: 2137 - DNA, 159 bp, Homo sapiens
gttagttacaccagtggaatttgggaagagaaactcaaatcgtaatcttacaatcagagtcttcctgccacatgtgaccatttgattcattgtcaaagtgtatagagaatgcaagctatttccatatgctaacccaattttctcctcccccaaccccaa

SEQ ID NO: 2138 - DNA, 436 bp, Homo sapiens
tgcaagttgaagtttatcaactacatatgttatgtaattgtattatatttcacaatatatttagttactggtttatagatttggaatggtttcattgaaatgtcctgaaaagcaaaatgggtttgtttgtttattgattgattgattgattgattaagacagagtcttgctctgtcacccaggccagagtgcagtggcatgatctcggctcactgcaacctccacccacccagttcaagtgattatcctgcctcagtctcccaagtagctgggattacaggtgtgcaccaccacacctggctaatttttgtagttttagtagagacagggtttcaccatgttggccaggcttgtctcaaactcttgacctcaagtgatctgcccaccttgacatcccaaaatgctgggattacaggcgtgagccaccgtgcctggc

SEQ ID NO: 2139 - DNA, 240 bp, Homo sapiens
gacaatgaaggagggaggtgaccagtatcaatcacagccctgaaggacacactggagctgaagccttctagctccagtgtgtcctctaactttcatcttacagcttcccctcaataggagaggccaccagaattctggcggaactgttccctgaatgcacgtggatagatgaatatggatgttcacagtagagttctgcagtgggcctggagacgcactgctcagatccccttcattaag

SEQ ID NO: 2140 - DNA, 429 bp, Homo sapiens
  misc_feature (39)..(39): n is a, c, g, or t
ttttggagagagccccttgggaaacccaccctcttcccnactcactgtcccttgccttgcaaggaacagatccctccccagctccttaaaggcagccgcatcaggagcggcactcacagcagaccatcccctaggcccagaggggtctagggttggtgcacggccccaggcaactcggggagcttccatgcggggctttatccagaactcccgaaaagaaggcatttctcctcaccctagagggcaggagccgggctgttcttaccaccggaaagcacaagcctccctcagactaaagcagaactgcaagaagaggagactccatcccaagaacggggttcggctcctggattccaccacgcccagagcccgggattaacctccaggcttttccatcacataagccaataaagtcacttttttgtttca

SEQ ID NO: 2141 - DNA, 401 bp, Homo sapiens
cctccttgtttgctgcaatggatttgggctgtgttttgtggagttttgtgttttgtggagttctctgcattttctgattgattgcatctccttgttgtcattggggctttctggaagctggtggttgcatctagacccagagagggtcagttcccactggtctgctgtgctgctcctgcaccaggctcggcattggctgttgctggatccctgtcacgtgagtgtgagctgggtaggcctcgagccagccctcaggacatgagcctctgccagcttccttgatttgggccgcgccgtgctcctgggactgcaggcgtgagcgctcgcgcccggcccctgccagcttccctgatgtgggctgcgccgtgctgtcccatcttcatctctgcatttcccacctg

SEQ ID NO: 2142 - DNA, 302 bp, Homo sapiens
gccacaacatgtacagtaagcatgtcttacttttatactataccgcaaaattatttttaaaaggttaagctataatgtgtcacgtcaggcctgcagaattttgttcattttaagaaaggatatgtttttaagatgacaagcaaagaaacaggagaattcattataaagtatctggactcaaggcaatacttgcattaaagaagaatcatcgaccaggcatggtggctgatgtgtgtaatctcagcactttgggagaccgaggtgggtggaccacttgaggttaggagtctgagaccagcctg

SEQ ID NO: 2143 - DNA, 518 bp, Homo sapiens
gcgtcgacagcctccggggttgggggtaagtagaagggggtgaggggccagcactagttgactcaaggcaccctggtggggacggagaggttttttcgctcagtggtgcaggccatcaggcaggggtgtccaggcagggcccgggtgcaagaaaacattctgtgtgcgctagtgcgagaggatcttctacagtcacctgccttcatgccattacagacagacgggaagtcactgggttctaggacataaaaagacctacatgttggctagcctaaatcgaacccttttgtagtaataaagattcatcaatgttttaaactgtcccctgtcagccccctgggactcaggtgaaccaactctctttgggaatctatcttagaagatgaaaccataaagccttcagtttcagtgtcagggatgcacactctatatctggtgaaattatggaggggtgaaaacttctgtacagcaaactgtacctccaaatctttaatgtcgaaataaagggctttttgcca

SEQ ID NO: 2144 - DNA, 504 bp, Homo sapiens
gcgtcgacagcctccggggttgggggtaagtagaagggggtgaggggccagcactagttgactcaaggcaccctggtggggacggagaggttttttcgctcagtggtgcaggccatcaggcagggcccgggtgcaagaaaacattctgtgtgcgctagtgcgagaggatcttctacagtcacctgccttcatgccattacagacagacgggaagtcactgggttctaggacataaaaagacctacatgttggctagcctaaatcgaacccttttgtagtaataaagattcatcaatgttttaaactgtcccctgtcagccccctgggactcaggtgaaccaactctctttgggaatctatcttagaagatgaaaccataaagccttcagtttcagtgtcagggatgcacactctatatctggtgaaattatggaggggtgaaaacttctgtacagcaaactgtacctccaaatctttaatgtcgaaataaagggctttttgcca

SEQ ID NO: 2145 - DNA, 537 bp, Homo sapiens
gcgtcgacagcctccggggttgggggtaagtagaagggggtgaggggccagcactagttgactcaaggcaccctggtggggacggagaggttttttcgctcagtggtgcaggccatcaggcagggcccgggtgcaagaaaacattctgtgtgcgctagtgcgagaggatcttctacagtcacctgccttcatgccattacagacagacgggaagtcactgggttctaggacataaaaagacctacatgttggctagcctaaatcgaacccttttgtagtaataaagattcatcaatgttttaaactgtcccctgtcagccccctgggactcaggtgaaccaactctctttgggaatctatcttagaagatgaaaccataaagccttcagtttcagtgtcagggatgcacactctatatctggtgaaattatggaggggtgaaaacttctgtacagcaaactgtacctccaaatctttaatgtcgaaataaagggctttttgccatttctgttttcagttcaaaaatacttgttgctg

SEQ ID NO: 2146 - DNA, 407 bp, Homo sapiens
taaaagtgtggagaaggggccaggagaggaaacaacatgacaaggagtttataaatctaaaggatgactttcttgctgcatgtaactagtatgtgactgcttctgcattcccttcgatctatccttggctttctcaatgtgaatatttttgttctaaaaattgggaccaaatctggtcctctcaaggagaagtaagaagaaccccaatgtctttcttcttccagctaatttaaaataattggatttagccaggtgtggtagtgcatggctgtagtcctagttattcaggaagctagggcaggaggatgcttgagcccaggaactccaggctagtgcactataactgcacctatgaatagccactgcactccagcctgggcgacagaggcgatccgtctcaaaaaaaa

SEQ ID NO: 2147 - DNA, 295 bp, Homo sapiens
taaacaaactcttggcaatctgtggtttatttaagtggtattagtcaatgtggtttcgtgttcttttccagttcagttcagcagaggcgctatcactgaataagtacagaattcagtttaactaaaggtgagatttctctaggtgaataaaacagtcagtgatgagatgttcatacatttaggagaatgattataaaagagggatatggaaagtaatctgggttaaggagtgaagtgagaaaataaagaaggttgagacagtggaaaatggtatcatcaattgtagattgcagtg

SEQ ID NO: 2148 - DNA, 204 bp, Homo sapiens
cctctatatcactctgtgatgctcacaaatatgttttcttaaatcctcacacaccataggagcttttcaatgatatttgctcctgttcttctgaataacagtagaaatgattgaaattcaacttgttaaaaatataccttagaaagtagaggatgcctttgggcgtattttacttcctgcacaatagcatttattttatgattc

SEQ ID NO: 2149 - DNA, 335 bp, Homo sapiens
tttttgacggagtctcgctcagttgcccaggctggagtgcagtggcgcgatctcggctcacggcaagctccgcctccccggttcacgccattctcctgcctcagcctccccagtagctgggactacaggcgtccaccactacgcccagctaatttttttgtatttttagtagagacggggtttcaccgtgttagccaggatggtcttgatctcctgacctcgtgatctgcccgtcctggcctcccaaagtgctgggattacaggcgtgagccactgtgcctggcccaagaatgactagctttaagaaattctgccctagcctttaacaagctatg

SEQ ID NO: 2150 - DNA, 1005 bp, Homo sapiens
gtgatcctcctgcttcagcattctaaagcactgggattataggtttgagctaccatggctggcctaatcatattaattttaagtaaaatgttctaacttgattaagactggatgcctgagtaaacaatggttttgaatttccacacctgcatttcacaacaggaatccaagctcagccaattttattccattcttcaaggcacaagatatttctgaattataaacattagatataataggtgtataaggagaagtcatcttacatactaattctataatcatttaagctatagtcaaagcgaaattatacaaatgcagaagctctctttctctacccaactcaccaaatcttggattcagaggcaaaagagaaaaggaaagcacaaaaagaattgcgaaagaggaaaagcagaatgggcaaagacagtgtaaggaaaatggaggtgtgggaaatgtggagcttcactgttgcaaagcatgctacacataaagtatgaatggctgcctgaggagccactgctctagaaggctggctattactgttatgagaacaagcaccataccccatccaccttgtgtgtttggtacgtttctttcttccctgtacttggagttgctgggatgctgctgatgacctctccacctgccacgttaagtccttccaacaaatcaactaaactggaaatgttttaggccgagttcatactccaggatggctaaccctctcttctaccatcttgtactagaccagaagaatctttccaaatattcagaaaacactactctgcatggttacaactctcatcttgggcatttataatgcctaatagaactgggccccaaacactgcatcctgtcactgtgtgcaaacctctttggttactccaacttgagtccataaaataaatacttcatgttctgtaaaatgaatagagtgactgcctttatcaattttatggaattaaaattgtagaacagaataaagcctgttgtattagaactggg

SEQ ID NO: 2151 - DNA, 2882 bp, Homo sapiens
tgttttactccatttcccatcataaggcccattacaggcagctttgcagccttcttcaaattcctcatgccgcagaaccttcatccccaggacgtcccgatagaaacgcgccgtctggaagcggtttcccactttgaatacgaagtgcagacgtctgcgagcagccatgattcccaggcttaagtgatcctttttaagaagatttattcctctatgatggagaagtatgaaaaaattgggaaaattggagaaggatcctatggagttgttttcaaatgtagaaacagggacacgggtcagattgtggccatcaagaagtttctggaatcagaagatgaccctgtcataaagaaaattgcccttcgggaaatccgaatgctcaagcaactcaagcatcccaaccttgttaacctcctggaagtcttcaggaggaaacggaggcttcacctggtgtttgaatattgtgaccacacagttctccatgagttggacagataccaaagaggggtaccagaacatctcgtgaagagcataacttggcagacactgcaagctgtaaatttttgccataaacacaattgcatacatagagacgtgaagccagaaaatatcctcatcacgaaacattccgtgattaagctttgtgactttggatttgctcggcttttgactggaccgagtgactactatacagactacgtggctaccaggtggtaccgctcccctgagctgctggtgggggacacgcagtacggccccccggtggatgtttgggcaattggctgtgtctttgctgagctgctgtcaggagtgcctctgtggccaggaaaatcggatgtggatcagctgtatctgattaggaagaccttgggggatctcattcctaggcaccagcaagtgtttagcacgaatcagtacttcagtggagtgaaaattccagaccctgaagatatggaaccacttgaattaaaattcccaaacatctcttatcctgccctggggctcctaaagggctgtctccacatggaccctactgaaaggctgacatgtgaacagctgttgcatcacccatattttgaaaacatcagagaaatagaggatttggcaaaagaacacaacaaaccaacaaggaagaccctaagaaagagccgaaagcaccactgctttacagaaacatccaagttgcagtacctaccccagctaactggcagcagcatccttccagctttggataataagaagtactactgtgataccaagaaacttaactaccgttttccaaacatttaaaggagctaggagacatgattttaaaaaaggaatcaatagatgctttgaagaaaataaaacttatacagttgattgaaaacaattacaatgttgaaaacacaccaggagaaaacataagcaagaaactgggaggccaactggcaagatatgaagggaaattccagatccagtcttccatgcttgatgatggtgtccagaaaagaaaaaacctgtttggagttgcacttgtatttcagtttatgtaagtagccgaacttatggacagaatatgaactgtcccatacctctggcaaaactagatgatatcaaaaagatttatgcttcagttgtaccacatgccacacaagaaaaatgaaccacaaaatgcccatatatatttcctcggatctctgttgcctgagtcctatctcctgcctctcagattgtttcagcatcatatttaagatagttctatttcttgaaatcaaaatgtttaaaatcccatttcctgcttgctctatttcttgatttttatattttaaaacattttgagggtaacacttaggttcaaaatatttaaaagcatatgaattatcacaaaagcttggtaatttataatttaattatatgtttccacatttcatccttactttatcagtaaaggatacaccttagtcacttttgcaggcaacgtggatttactgtaatctgtctacatttattcacccaattccccttgtaaacaatggcatgaagctcggcagctgattaaggcagtcaaagggtagagcaagacctacaggctttgcaggaactgaacctatcagcctgaaaataattagtatttcattctctctggcacagcctttgacctggtacatctataggcaaacctgtaattcagtgatctgggtttcagaagaaattacttgtgagcttttacttgagtcatgaaagacattatgttgtaaactgatgttttccctgaaacatctttttgcactatgtttgtatgtgtatgtatgtgtatgtatatatatatatatatatatatatatgctattctaacaactaatatattacactaagtagtccaaagtattgaggactcatagctttgcacagtgagacttaaaatgatgacacacacacacatatatatatatgtgttttttatatatatatataaaacctgccacctcagcctcccaagtagctgggactgcaggcatgtgccactatactggctaatttttttgtattttttggtagaggcagggttttgccatgttccccaggctggtcttgaactcctgggctcacgtgatctgagcgccttggccttccaaagtgctggcattacaggcatgagccactgcgcctggccaaaatgacataattagctttgatttggtctactgctcttaatcaaaaagctttttcatccttgtcccctggacacaagggcaatatgaagcctgacgtctgtttcttacagctcaacaccatttctggttgatgtgctgccactattcctagcacttctcagccatggtcttcaaagttgtatttcactctattttcaaaacatttcttctgtactctcattttct

SEQ ID NO: 2152 - DNA, 2407 bp, Homo sapiens
gaggacaatggctgaaaaatttttttctagaaagtaaaagtactaaacagttccctttttagggataccgaaggacatatagtgcaatacaaaaaatacaggtgtgttctttcatttgacattgacaataaattcaaacattttcaggaagcttgaaggaagcagtttgtcttttttctttagagatggggatcttgctatgttgcccaggctgctctcctgggctcaagggatgctcccactcagcctcccttgtagctggaactacaagtgtacactgtgccatgcttgatttgcctttttaactaagggaagagagtgagtaggcaaattgcctaggtgctctgtttatcagttttctccgctataagacaaggcattggcttaaatgatccctaagatctcagcaagctctcaactcctgtaaatctatgttttcttcccaataatgttaacatgtagattttccccttttcatattctctaaatcttctttaatgtgaatgtttttcctttttaatataaacatttaaaaggaaaagccaagacgaaattgaaacatttaatcctctctcaagtcctggattgtgtgcaaaaaaagtacttctatactaaaaagcttaattacctcttttgtgatatattctaaataatgaaaaaaatgcatggcacagttttgaacctaattctgtgttttgcatttttagttgcagtacctaccccagctaactggcagcagcatccttccagctttggataataagaagtactactgtgataccaagaaacttaactaccgttttccaaacatttaaaggagctaggagacatgattttaaaaaaggaatcaatagatgctttgaagaaaataaaacttatacagttgattgaaaacaattacaatgttgaaaacacaccaggagaaaacataagcaagaaactgggaggccaactggcaagatatgaagggaaattccagatccagtcttccatgcttgatgatggtgtccagaaaagaaaaaacctgtttggagttgcacttgtatttcagtttatgtaagtagccgaacttatggacagaatatgaactgtcccatacctctggcaaaactagatgatatcaaaaagatttatgcttcagttgtaccacatgccacacaagaaaaatgaaccacaaaatgcccatatatatttcctcggatctctgttgcctgagtcctatctcctgcctctcagattgtttcagcatcatatttaagatagttctatttcttgaaatcaaaatgtttaaaatcccatttcctgcttgctctatttcttgatttttatattttaaaacattttgagggtaacacttaggttcaaaatatttaaaagcatatgaattatcacaaaagcttggtaatttataatttaattatatgtttccacatttcatccttactttatcagtaaaggatacaccttagtcacttttgcaggcaacgtggatttactgtaatctgtctacatttattcacccaattccccttgtaaacaatggcatgaagctcggcagctgattaaggcagtcaaagggtagagcaagacctacaggctttgcaggaactgaacctatcagcctgaaaataattagtatttcattctctctggcacagcctttgacctggtacatctataggcaaacctgtaattcagtgatctgggtttcagaagaaattacttgtgagcttttacttgagtcatgaaagacattatgttgtaaactgatgttttccctgaaacatctttttgcactatgtttgtatgtgtatgtatgtgtatgtatatatatatatatatatatatatatgctattctaacaactaatatattacactaagtagtccaaagtattgaggactcatagctttgcacagtgagacttaaaatgatgacacacacacacatatatatatatgtgttttttatatatatatataaaacctgccacctcagcctcccaagtagctgggactgcaggcatgtgccactatactggctaatttttttgtattttttggtagaggcagggttttgccatgttccccaggctggtcttgaactcctgggctcacgtgatctgagcgccttggccttccaaagtgctggcattacaggcatgagccactgcgcctggccaaaatgacataattagctttgatttggtctactgctcttaatcaaaaagctttttcatccttgtcccctggacacaagggcaatatgaagcctgacgtctgtttcttacagctcaacaccatttctggttgatgtgctgccactattcctagcacttctcagccatggtcttcaaagttgtatttcactctattttcaaaacatttcttctgtactctcattttct

SEQ ID NO: 2153 - DNA, 684 bp, Homo sapiens
agccatcagacttggcctgagtggattataggcatgagccaccgcacccagccagctacctttttataaatcacactataaatgccaaaaattattctcaggaaaggcaagttatataacttgagcccccccaccccctcaaaaaaaaaactgctcagaaaagttttttttcattagtatttttatttataatttgctatctccattggtatcagagcaggaagttaagggagtagttacgaagcaaatttggaaaagcgatttggaggtggggagagaaagcttgtgaaaaaggcaaagggagactgttttgggcaggaggttgggtgggcaaagggtggaggacgtgaggaaggtgccaggaaaatgtttctatcaaaagatttaatttgaggtaaccttaatttgaatacatgctgtaaattaaaaacctcttttcttttcaacaggaaccacttgaattaaaattcccaaacatctcttatcctgccctggggctcctaaaggtaaaaatcatggcttccaacagaccaggaagcacacagcagttgtcatcactggggaatctgaattacttatgtcaatccatgcaatgaaaagtgttccttttagaattcttctcctggctgggcagtggctcacacctgtaatcctagcactttgggaggccaaggcaggcagatc

SEQ ID NO: 2154 - DNA, 603 bp, Homo sapiens
actgaagtttcatctttcaaagaagaaaaaaatgacattaataagttaatacaattttgaagaagtaagaagaaggaattttctgttcttttagggctgtctccacatggaccctactgaaaggctgacatgtgaacagctgttgcatcacccatattttgaaaacatcagagaaatagaggatttggcaaaagaacacaacaaaccaacaaggaagaccctaagaaagagccgaaagcaccactgctttacagaaacatccaaggttataatttgaaatgatctcctacctgccacctggtacagagagttggaatctagacttgaggatggcagttgtggctttcagctccagcatcctcattccagcactaggagacaggtcataggatctatcaaccagggccccagggacatctgtctcctgaagccccctctccctgaatcctaaaggtgcccttgtcctgctgcttcctgatgccacacaggggccagggtttctagcctgcatgagcacaggtctcaacaaggtacatgagtatgagtccagctaaggagactttttgggctttggaaaataaaatcagattttccccatgcagt

SEQ ID NO: 2155 - DNA, 2690 bp, Homo sapiens
atttgaatttcagataaacaagcataacttttagtataagtacatcccaagtgcttcatgggatgtattatcctaaaaaaattatttgtttatctgaaattcaaatttaactgggtgtcctgtatttttctctgctaagaccggctaccctactttcattttcctttcactcttcttggctcttttgggccttttaggaatttgggatgattcaggctctgacaggcatggtactagatttattttaggctgctcttttgctgttgtccaacaggccaaggagagatttaaatgatttatccaatatttgctaaatagtcatgtgtttcatttatcccatatatagttcagccttaatattgtttttgttttgatttgttacactagtgcatacatagagacgtgaagccagaaaatatcctcatcacgaaacattccgtgattaagctttgtgactttggatttgctcggcttttgactggaccgagtgactactatacagactacgtggctaccaggtggtaccgctcccctgagctgctggtgggggacacgcagtacggccccccggtggatgtttgggcaattggctgtgtctttgctgagctgctgtcaggagtgcctctgtggccaggaaaatcggatgtggatcagctgtatctgattaggaagaccttgggggatctcattcctaggcaccagcaagtgtttagcacgaatcagtacttcagtggagtgaaaattccagaccctgaagatatggaaccacttgaattaaaattcccaaacatctcttatcctgccctggggctcctaaagggctgtctccacatggaccctactgaaaggctgacatgtgaacagctgttgcatcacccatattttgaaaacatcagagaaatagaggatttggcaaaagaacacaacaaaccaacaaggaagaccctaagaaagagccgaaagcaccactgctttacagaaacatccaagttgcagtacctaccccagctaactggcagcagcatccttccagctttggataataagaagtactactgtgataccaagaaacttaactaccgttttccaaacatttaaaggagctaggagacatgattttaaaaaaggaatcaatagatgctttgaagaaaataaaacttatacagttgattgaaaacaattacaatgttgaaaacacaccaggagaaaacataagcaagaaactgggaggccaactggcaagatatgaagggaaattccagatccagtcttccatgcttgatgatggtgtccagaaaagaaaaaacctgtttggagttgcacttgtatttcagtttatgtaagtagccgaacttatggacagaatatgaactgtcccatacctctggcaaaactagatgatatcaaaaagatttatgcttcagttgtaccacatgccacacaagaaaaatgaaccacaaaatgcccatatatatttcctcggatctctgttgcctgagtcctatctcctgcctctcagattgtttcagcatcatatttaagatagttctatttcttgaaatcaaaatgtttaaaatcccatttcctgcttgctctatttcttgatttttatattttaaaacattttgagggtaacacttaggttcaaaatatttaaaagcatatgaattatcacaaaagcttggtaatttataatttaattatatgtttccacatttcatccttactttatcagtaaaggatacaccttagtcacttttgcaggcaacgtggatttactgtaatctgtctacatttattcacccaattccccttgtaaacaatggcatgaagctcggcagctgattaaggcagtcaaagggtagagcaagacctacaggctttgcaggaactgaacctatcagcctgaaaataattagtatttcattctctctggcacagcctttgacctggtacatctataggcaaacctgtaattcagtgatctgggtttcagaagaaattacttgtgagcttttacttgagtcatgaaagacattatgttgtaaactgatgttttccctgaaacatctttttgcactatgtttgtatgtgtatgtatgtgtatgtatatatatatatatatatatatatatgctattctaacaactaatatattacactaagtagtccaaagtattgaggactcatagctttgcacagtgagacttaaaatgatgacacacacacacatatatatatatgtgttttttatatatatatataaaacctgccacctcagcctcccaagtagctgggactgcaggcatgtgccactatactggctaatttttttgtattttttggtagaggcagggttttgccatgttccccaggctggtcttgaactcctgggctcacgtgatctgagcgccttggccttccaaagtgctggcattacaggcatgagccactgcgcctggccaaaatgacataattagctttgatttggtctactgctcttaatcaaaaagctttttcatccttgtcccctggacacaagggcaatatgaagcctgacgtctgtttcttacagctcaacaccatttctggttgatgtgctgccactattcctagcacttctcagccatggtcttcaaagttgtatttcactctattttcaaaacatttcttctgtactctcattttct

SEQ ID NO: 2156 - DNA, 2377 bp, Homo sapiens
agccatcagacttggcctgagtggattataggcatgagccaccgcacccagccagctacctttttataaatcacactataaatgccaaaaattattctcaggaaaggcaagttatataacttgagcccccccaccccctcaaaaaaaaaactgctcagaaaagttttttttcattagtatttttatttataatttgctatctccattggtatcagagcaggaagttaagggagtagttacgaagcaaatttggaaaagcgatttggaggtggggagagaaagcttgtgaaaaaggcaaagggagactgttttgggcaggaggttgggtgggcaaagggtggaggacgtgaggaaggtgccaggaaaatgtttctatcaaaagatttaatttgaggtaaccttaatttgaatacatgctgtaaattaaaaacctcttttcttttcaacaggaaccacttgaattaaaattcccaaacatctcttatcctgccctggggctcctaaagggctgtctccacatggaccctactgaaaggctgacatgtgaacagctgttgcatcacccatattttgaaaacatcagagaaatagaggatttggcaaaagaacacaacaaaccaacaaggaagaccctaagaaagagccgaaagcaccactgctttacagaaacatccaagttgcagtacctaccccagctaactggcagcagcatccttccagctttggataataagaagtactactgtgataccaagaaacttaactaccgttttccaaacatttaaaggagctaggagacatgattttaaaaaaggaatcaatagatgctttgaagaaaataaaacttatacagttgattgaaaacaattacaatgttgaaaacacaccaggagaaaacataagcaagaaactgggaggccaactggcaagatatgaagggaaattccagatccagtcttccatgcttgatgatggtgtccagaaaagaaaaaacctgtttggagttgcacttgtatttcagtttatgtaagtagccgaacttatggacagaatatgaactgtcccatacctctggcaaaactagatgatatcaaaaagatttatgcttcagttgtaccacatgccacacaagaaaaatgaaccacaaaatgcccatatatatttcctcggatctctgttgcctgagtcctatctcctgcctctcagattgtttcagcatcatatttaagatagttctatttcttgaaatcaaaatgtttaaaatcccatttcctgcttgctctatttcttgatttttatattttaaaacattttgagggtaacacttaggttcaaaatatttaaaagcatatgaattatcacaaaagcttggtaatttataatttaattatatgtttccacatttcatccttactttatcagtaaaggatacaccttagtcacttttgcaggcaacgtggatttactgtaatctgtctacatttattcacccaattccccttgtaaacaatggcatgaagctcggcagctgattaaggcagtcaaagggtagagcaagacctacaggctttgcaggaactgaacctatcagcctgaaaataattagtatttcattctctctggcacagcctttgacctggtacatctataggcaaacctgtaattcagtgatctgggtttcagaagaaattacttgtgagcttttacttgagtcatgaaagacattatgttgtaaactgatgttttccctgaaacatctttttgcactatgtttgtatgtgtatgtatgtgtatgtatatatatatatatatatatatatatgctattctaacaactaatatattacactaagtagtccaaagtattgaggactcatagctttgcacagtgagacttaaaatgatgacacacacacacatatatatatatgtgttttttatatatatatataaaacctgccacctcagcctcccaagtagctgggactgcaggcatgtgccactatactggctaatttttttgtattttttggtagaggcagggttttgccatgttccccaggctggtcttgaactcctgggctcacgtgatctgagcgccttggccttccaaagtgctggcattacaggcatgagccactgcgcctggccaaaatgacataattagctttgatttggtctactgctcttaatcaaaaagctttttcatccttgtcccctggacacaagggcaatatgaagcctgacgtctgtttcttacagctcaacaccatttctggttgatgtgctgccactattcctagcacttctcagccatggtcttcaaagttgtatttcactctattttcaaaacatttcttctgtactctcattttct

SEQ ID NO: 2157 - DNA, 1328 bp, Homo sapiens
atttgaatttcagataaacaagcataacttttagtataagtacatcccaagtgcttcatgggatgtattatcctaaaaaaattatttgtttatctgaaattcaaatttaactgggtgtcctgtatttttctctgctaagaccggctaccctactttcattttcctttcactcttcttggctcttttgggccttttaggaatttgggatgattcaggctctgacaggcatggtactagatttattttaggctgctcttttgctgttgtccaacaggccaaggagagatttaaatgatttatccaatatttgctaaatagtcatgtgtttcatttatcccatatatagttcagccttaatattgtttttgttttgatttgttacactagtgcatacatagagacgtgaagccagaaaatatcctcatcacgaaacattccgtgattaagctttgtgactttggatttgctcggcttttgactggaccgagtgactactatacagactacgtggctaccaggtggtaccgctcccctgagctgctggtgggggacacgcagtacggccccccggtggatgtttgggcaattggctgtgtctttgctgagctgctgtcaggagtgcctctgtggccaggaaaatcggatgtggatcagctgtatctgattaggaagaccttgggggatctcattcctaggcaccagcaagtgtttagcacgaatcagtacttcagtggagtgaaaattccagaccctgaagatatggaaccacttgaattaaaattcccaaacatctcttatcctgccctggggctcctaaagggctgtctccacatggaccctactgaaaggctgacatgtgaacagctgttgcatcacccatattttgaaaacatcagagaaatagaggatttggcaaaagaacacaacaaaccaacaaggaagaccctaagaaagagccgaaagcaccactgctttacagaaacatccaaggttataatttgaaatgatctcctacctgccacctggtacagagagttggaatctagacttgaggatggcagttgtggctttcagctccagcatcctcattccagcactaggagacaggtcataggatctatcaaccagggccccagggacatctgtctcctgaagccccctctccctgaatcctaaaggtgcccttgtcctgctgcttcctgatgccacacaggggccagggtttctagcctgcatgagcacaggtctcaacaaggtacatgagtatgagtccagctaaggagactttttgggctttggaaaataaaatcagattttccccatgcagt

SEQ ID NO: 2158 - DNA, 2530 bp, Homo sapiens
ggctggtacgccccggaattagggatagagaacctgactacctccaggtctagagggagcagccccttcactatataaccaatttccctgactgcacatatggtaattccatctatggtgaataatgaatccattctaggccaaatagatactcttatgcagagcccagctgggacagtcacgtgcaaggagaaaagagaaagccagactgcagacatagctaatgcaaaggcacggagatacagactacacaaactagaagaaacgtagagtaagctgctttgtctcttgctaaatttctaattcctagcccttgggttttacaagttactcctgtaataatcaaatattttcattttctacttttcttaatttgagtggatttcaaataaccacagaccttaaaaaaaaaagacagccaagctcaaggccagatgggtaaaacctctaggtgaaagaaactataatgaaattcatataaagatatccaacagtcataaaaactgtatgtgggattttagggcaaggattttcaacagtcaacagtactggaagctgaggcttcagaacccaggtatggaaggcagggagtttgaactatgctccttgcacagaatgggaagccaggaaaatgcaaatgtcaaactatcctacagggaagtctctataaacctccacagaactcccacaaaagacacacttagggaaaaggtatgcagcccaaaatatacaagtctgttcaacttgctccctaaaataagggagaatgccgacaccgcaggaaaaaggagctaatggaactaacaagaactttaaagaaacaccaataaaccaagaacacgcgaaaatgacaaaataccaaataaaaatccaaaatagaaacaaatccaaaagaaaacaaaagttgatgaaataaaatctcagtaggaggattaagtaaaagaattagcaaattgaaagatttttaagagacgaagacagaataaaaagctccctatgtttaaaaggagtttttagaagaaaatagaaacaatgggggaagatggttaaaaattaataataactttccagacttgaagaaaaaaaactgaatcttcacattacagaagcacactatgtctagggcaggataaataacaaatctacactaggacacatcctgatctgcaacacactgaagataaagagagaacagtaaaaatatagattactacctgtaagattactacctacaaactaagagggctcagactaacagcagattttttcattagttaacactgaggcaaggagacaatagaacagtatcttcaaggcacagcagacagtactaaacaactcaactcggtcaaacctaactttctggccagcacttgtgaaatcaaaggctccccagtaatttgattagcattttcatcattttgtaatcttataaacaccttctccagtggggaagaaatagcccaaatgggaattttaggtacctaagacttcggctgccaactgtgcctaatatcctagtaatgttaacctttccagtacccagtatagaatacccctacaactgggcattttaaacaggcaaacaagtattacacacacttaattttgttcattccagccacatgaagtcaaaggatgtttctctataagaaactacaatagatctttgaaactttgcatgaagttgttttaggggccatacttcaagtgacaggaaataacaaatagcaatacacacacatttcattaagtggggatcttataaaatctctagaaccctgagaagttccttgctacttataaagccttttcttgacctgtcagacctaatgtttgatgatgtataagaaaactatcgtcgaatttatgttatgcataaattttatagtatatttaaagtgaaatacacaatttttttctatgcacatactcttactggaaaaaatttgaatgctgacaataaaatggctaagttatggtacatgcatgtaacagaatactatagagcagactgagcaaacttatgccacaggccaaatccagcccatggtaagtatttgtaaatagttttactggaacacaattatactcatttatttacatattatctattgatgctttcacactaccgtggtagtgctgagtagccatgacagagacctaatggtctgcaaaacctaaaatatttactaactaaccctttatagaaagaactttgctgaaccctggtatggagaaataaaaacgaatgaaatacagctgaatgagtcaacttcaatcaatctcaaaagcaatgctgagagaatcaaatcacaaaaaatacatgcagtataattcccattacaaaaaatccacaaatatgcaaaacaaacctgatactgttcacaaatgcacataaaaccatttttttttttaaggtaatgaagttgatcaacaccaagtgatctggggcagaggggtacgtagaagacatttaactgtgcagggtacattaacagtatatgtgctgatgatattctatatccga

SEQ ID NO: 2159 - DNA, 2815 bp, Homo sapiens
ccagtctcaagcttgcaaacaaaatgacagtggcctattaacttaggacagggaacttccaccataaactggtgcactaacatttaggctaagagccaaatcaagaacatcattctctcggtatctttatggagcaaaatgtttatggtagagacaggtgaccttgcagctagcctaaccacattctccaagtgttaattagatggtgcaatattcacatagacctagagtccactgactatggaaggctctgacctttttgcagcttctttaccaggagtgtataatcttcctagttcctaatctttctaagagaacctgactacctccaggtctagagggagcagccccttcactatataaccaatttccctgactgcacatatggtaattccatctatggtgaataatgaatccattctaggccaaatagatactcttatgcagagcccagctgggacagtcacgtgcaaggagaaaagagaaagccagactgcagacatagctaatgcaaaggcacggagatacagactacacaaactagaagaaacgtagagtaagctgctttgtctcttgctaaatttctaattcctagcccttgggttttacaagttactcctgtaataatcaaatattttcattttctacttttcttaatttgagtggatttcaaataaccacagaccttaaaaaaaaaagacagccaagctcaaggccagatgggtaaaacctctaggtgaaagaaactataatgaaattcatataaagatatccaacagtcataaaaactgtatgtgggattttagggcaaggattttcaacagtcaacagtactggaagctgaggcttcagaacccaggtatggaaggcagggagtttgaactatgctccttgcacagaatgggaagccaggaaaatgcaaatgtcaaactatcctacagggaagtctctataaacctccacagaactcccacaaaagacacacttagggaaaaggtatgcagcccaaaatatacaagtctgttcaacttgctccctaaaataagggagaatgccgacaccgcaggaaaaaggagctaatggaactaacaagaactttaaagaaacaccaataaaccaagaacacgcgaaaatgacaaaataccaaataaaaatccaaaatagaaacaaatccaaaagaaaacaaaagttgatgaaataaaatctcagtaggaggattaagtaaaagaattagcaaattgaaagatttttaagagacgaagacagaataaaaagctccctatgtttaaaaggagtttttagaagaaaatagaaacaatgggggaagatggttaaaaattaataataactttccagacttgaagaaaaaaaactgaatcttcacattacagaagcacactatgtctagggcaggataaataacaaatctacactaggacacatcctgatctgcaacacactgaagataaagagagaacagtaaaaatatagattactacctgtaagattactacctacaaactaagagggctcagactaacagcagattttttcattagttaacactgaggcaaggagacaatagaacagtatcttcaaggcacagcagacagtactaaacaactcaactcggtcaaacctaactttctggccagcacttgtgaaatcaaaggctccccagtaatttgattagcattttcatcattttgtaatcttataaacaccttctccagtggggaagaaatagcccaaatgggaattttaggtacctaagacttcggctgccaactgtgcctaatatcctagtaatgttaacctttccagtacccagtatagaatacccctacaactgggcattttaaacaggcaaacaagtattacacacacttaattttgttcattccagccacatgaagtcaaaggatgtttctctataagaaactacaatagatctttgaaactttgcatgaagttgttttaggggccatacttcaagtgacaggaaataacaaatagcaatacacacacatttcattaagtggggatcttataaaatctctagaaccctgagaagttccttgctacttataaagccttttcttgacctgtcagacctaatgtttgatgatgtataagaaaactatcgtcgaatttatgttatgcataaattttatagtatatttaaagtgaaatacacaatttttttctatgcacatactcttactggaaaaaatttgaatgctgacaataaaatggctaagttatggtacatgcatgtaacagaatactatagagcagactgagcaaacttatgccacaggccaaatccagcccatggtaagtatttgtaaatagttttactggaacacaattatactcatttatttacatattatctattgatgctttcacactaccgtggtagtgctgagtagccatgacagagacctaatggtctgcaaaacctaaaatatttactaactaaccctttatagaaagaactttgctgaaccctggtatggagaaataaaaacgaatgaaatacagctgaatgagtcaacttcaatcaatctcaaaagcaatgctgagagaatcaaatcacaaaaaatacatgcagtataattcccattacaaaaaatccacaaatatgcaaaacaaacctgatactgttcacaaatgcacataaaaccatttttttttttaaggtaatgaagttgatcaacaccaagtgatctggggcagaggggtacgtagaagacatttaactgtgcagggtacattaacagtatatgtgctgatgatattctatatccga

SEQ ID NO: 2160 - DNA, 3340 bp, Homo sapiens
aaaaaagccagaatggccaaagcaatcctaagcaaaaacaacctgacttcacagtacactacaaggctacagtagccaaaacagcatggtaatgatagagaacaacagacagataaaccaatggaacagaaaagagaacccagaaataaagccacatacctacaactatctcatcttcaactaaggtgacaaaaacaagcaacagggcaaggattccctattcaataaatggtgctgggacaattggctatccttttgtagaagaataaaaatggatccctatctttcatcatatacaaaaaattaactcggccaggcgcggtggctcacgcctgtaatcccactactcgggaggctgaggcaggagaattgcttgaatccgggaggtggaggttgtagtgagccgagatcacaccactgcattccagcctggcaaaagaatgagactccgtctcaaaaaaaaaaattaactcaagatagattaagaattcattactaagtcctcaaaagcaattgcaaaaacaaaaaatgacaagtgggccctaattaaacttaagaacaagagaaactatccacatttcaataaacatggtgtttttcactaacatttaggctaagagccaaatcaagaacatcattctctcggtatctttatggagcaaaatgtttatggtagagacaggtgaccttgcagctagcctaaccacattctccaagtgttaattagatggtgcaatattcacatagacctagagtccactgactatggaaggctctgacctttttgcagcttctttaccaggagtgtataatcttcctagttcctaatctttctaagagaacctgactacctccaggtctagagggagcagccccttcactatataaccaatttccctgactgcacatatggtaattccatctatggtgaataatgaatccattctaggccaaatagatactcttatgcagagcccagctgggacagtcacgtgcaaggagaaaagagaaagccagactgcagacatagctaatgcaaaggcacggagatacagactacacaaactagaagaaacgtagagtaagctgctttgtctcttgctaaatttctaattcctagcccttgggttttacaagttactcctgtaataatcaaatattttcattttctacttttcttaatttgagtggatttcaaataaccacagaccttaaaaaaaaaagacagccaagctcaaggccagatgggtaaaacctctaggtgaaagaaactataatgaaattcatataaagatatccaacagtcataaaaactgtatgtgggattttagggcaaggattttcaacagtcaacagtactggaagctgaggcttcagaacccaggtatggaaggcagggagtttgaactatgctccttgcacagaatgggaagccaggaaaatgcaaatgtcaaactatcctacagggaagtctctataaacctccacagaactcccacaaaagacacacttagggaaaaggtatgcagcccaaaatatacaagtctgttcaacttgctccctaaaataagggagaatgccgacaccgcaggaaaaaggagctaatggaactaacaagaactttaaagaaacaccaataaaccaagaacacgcgaaaatgacaaaataccaaataaaaatccaaaatagaaacaaatccaaaagaaaacaaaagttgatgaaataaaatctcagtaggaggattaagtaaaagaattagcaaattgaaagatttttaagagacgaagacagaataaaaagctccctatgtttaaaaggagtttttagaagaaaatagaaacaatgggggaagatggttaaaaattaataataactttccagacttgaagaaaaaaaactgaatcttcacattacagaagcacactatgtctagggcaggataaataacaaatctacactaggacacatcctgatctgcaacacactgaagataaagagagaacagtaaaaatatagattactacctgtaagattactacctacaaactaagagggctcagactaacagcagattttttcattagttaacactgaggcaaggagacaatagaacagtatcttcaaggcacagcagacagtactaaacaactcaactcggtcaaacctaactttctggccagcacttgtgaaatcaaaggctccccagtaatttgattagcattttcatcattttgtaatcttataaacaccttctccagtggggaagaaatagcccaaatgggaattttaggtacctaagacttcggctgccaactgtgcctaatatcctagtaatgttaacctttccagtacccagtatagaatacccctacaactgggcattttaaacaggcaaacaagtattacacacacttaattttgttcattccagccacatgaagtcaaaggatgtttctctataagaaactacaatagatctttgaaactttgcatgaagttgttttaggggccatacttcaagtgacaggaaataacaaatagcaatacacacacatttcattaagtggggatcttataaaatctctagaaccctgagaagttccttgctacttataaagccttttcttgacctgtcagacctaatgtttgatgatgtataagaaaactatcgtcgaatttatgttatgcataaattttatagtatatttaaagtgaaatacacaatttttttctatgcacatactcttactggaaaaaatttgaatgctgacaataaaatggctaagttatggtacatgcatgtaacagaatactatagagcagactgagcaaacttatgccacaggccaaatccagcccatggtaagtatttgtaaatagttttactggaacacaattatactcatttatttacatattatctattgatgctttcacactaccgtggtagtgctgagtagccatgacagagacctaatggtctgcaaaacctaaaatatttactaactaaccctttatagaaagaactttgctgaaccctggtatggagaaataaaaacgaatgaaatacagctgaatgagtcaacttcaatcaatctcaaaagcaatgctgagagaatcaaatcacaaaaaatacatgcagtataattcccattacaaaaaatccacaaatatgcaaaacaaacctgatactgttcacaaatgcacataaaaccatttttttttttaaggtaatgaagttgatcaacaccaagtgatctggggcagaggggtacgtagaagacatttaactgtgcagggtacattaacagtatatgtgctgatgatattctatatccga

SEQ ID NO: 2161 - DNA, 805 bp, Homo sapiens
cccattctgccagggaggacccaccagagatggctcccaatgcttcctgcctctgtgtgcatgtccgttccgaggaatgggatttaatgacctttgatgccaacccatatgacagcgtgaaaaaaatcaaagaacatgtccggtctaagaccaaggttcctgtgcaggaccaggttcttttgctgggctccaagatcttaaagccacggagaagcctctcatcttatggcattgacaaagagaagaccatccaccttaccctgaaagtggtgaagcccagtgatgaggagctgcccttgtttcttgtggagtcaggtgatgaggcaaagaggcacctcctccaggtgcgaaggtccagctcagtggcacaagtgaaagcaatgatcgagactaagacgggtataatccctgagacccagattgtgacttgcaatggaaagagactggaagatgggaagatgatggcagattacggcatcagaaagggcaacttactcttcctggcatcttattgtattggagggtgaccaccctggggatggggtgttggcaggggtcaaaaagcttatttcttttaatctcttactcaacgaacacatcttctgatgatttcccaaaattaatgagaatgagatgagtagagtaagatttgggtgggatgggtaggatgaagtatattgcccaactctatgtttctttgattctaacacaattaattaagtgacatgatttttactaatgtattactgagactagtaaataaatttttaaggcaaaatagagcattcaaagccagcttggaatt

SEQ ID NO: 2162 - DNA, 976 bp, Homo sapiens
cgtcagtccatctccaaagccgtgtggccctattaccagaaatatgtggatgaggcttccaagaaggagatcaaagacatcctcatccagtatgaccggaccctgctggtagctgaccctcgtcgctgcgagtccaaaaagtttggaggccctggtgcccgcgctcgctaccagaaatccctggccccttgtctgcagagatggctcccaatgcttcctgcctctgtgtgcatgtccgttccgaggaatgggatttaatgacctttgatgccaacccatatgacagcgtgaaaaaaatcaaagaacatgtccggtctaagaccaaggttcctgtgcaggaccaggttcttttgctgggctccaagatcttaaagccacggagaagcctctcatcttatggcattgacaaagagaagaccatccaccttaccctgaaagtggtgaagcccagtgatgaggagctgcccttgtttcttgtggagtcaggtgatgaggcaaagaggcacctcctccaggtgcgaaggtccagctcagtggcacaagtgaaagcaatgatcgagactaagacgggtataatccctgagacccagattgtgacttgcaatggaaagagactggaagatgggaagatgatggcagattacggcatcagaaagggcaacttactcttcctggcatcttattgtattggagggtgaccaccctggggatggggtgttggcaggggtcaaaaagcttatttcttttaatctcttactcaacgaacacatcttctgatgatttcccaaaattaatgagaatgagatgagtagagtaagatttgggtgggatgggtaggatgaagtatattgcccaactctatgtttctttgattctaacacaattaattaagtgacatgatttttactaatgtattactgagactagtaaataaatttttaaggcaaaatagagcattcaaagccagcttggaatt

SEQ ID NO: 2163 - DNA, 751 bp, Homo sapiens
cccattctgccagggaggacccaccagagatggctcccaatgcttcctgcctctgtgtgcatgtccgttccgaggaatgggatttaatgacctttgatgccaacccatatgacagcgtgaaacttttgctgggctccaagatcttaaagccacggagaagcctctcatcttatggcattgacaaagagaagaccatccaccttaccctgaaagtggtgaagcccagtgatgaggagctgcccttgtttcttgtggagtcaggtgatgaggcaaagaggcacctcctccaggtgcgaaggtccagctcagtggcacaagtgaaagcaatgatcgagactaagacgggtataatccctgagacccagattgtgacttgcaatggaaagagactggaagatgggaagatgatggcagattacggcatcagaaagggcaacttactcttcctggcatcttattgtattggagggtgaccaccctggggatggggtgttggcaggggtcaaaaagcttatttcttttaatctcttactcaacgaacacatcttctgatgatttcccaaaattaatgagaatgagatgagtagagtaagatttgggtgggatgggtaggatgaagtatattgcccaactctatgtttctttgattctaacacaattaattaagtgacatgatttttactaatgtattactgagactagtaaataaatttttaaggcaaaatagagcattcaaagccagcttggaatt

SEQ ID NO: 2164 - DNA, 597 bp, Homo sapiens
gcggccgccaactactactaaattcgcggccgcgtcgaccatccaccttaccctgaaagtggtgaagcccagtgatgaggagctgcccttgtttcttgtggagtcaggtgatgaggcaaagaggcacctcctccaggtgcgaaggtccagctcagtggcacaagtgaaagcaatgatcgagactaagacgggtataatccctgagacccagattgtgacttgcaatggaaagagactggaagatgggaagatgatggcagattacggcatcagaaagggcaacttactcttcctggcatcttattgtattggagggtgaccaccctggggatggggtgttggcaggggtcaaaaagcttatttcttttaatctcttactcaacgaacacatcttctgatgatttcccaaaattaatgagaatgagatgagtagagtaagatttgggtgggatgggtaggatgaagtatattgcccaactctatgtttctttgattctaacacaattaattaagtgacatgatttttactaatgtattactgagactagtaaataaatttttaaggcaaaatagagcattcaaagccagcttggaatt

SEQ ID NO: 2165 - DNA, 529 bp, Homo sapiens
cacatttcataattagggtctttaatgattaaaatacatctaattataaccaaacatgtatagatttgattataaaatatccactttcttacaggatttgtgtgtatacatgtggagagaagtaaataggaatactatttactggtttatatttttttttttttttttttttcactaaactcaaccactcccccaacagagatgttgagtttagtggttggggtaactttacaaagtaaggtacattgatataattcatttaacaaatatgtattgattacccactttgcgcaaggtaatatgctaagtgctcgaggtagaagagtaaaagtaatagaaaatcttcatcttcattgaggtaaaatttcagcagatagtttaaaataatttgagtttaaattttatttcattgtatacctgtaaaacccaaaagaatccacaaaaaaattataaacagtaagagaattcaataaagtagctgcttacaaaacaggcaaaaataaatagacttccaatgagaaaatgtaag

SEQ ID NO: 2166 - DNA, 433 bp, Homo sapiens
gcaagttgttgactgggggcctgggctctggagacagacagcctggattgctggcctggcaagtggctgcccctctgagctccacgtgcacaatgcggataacataagtacctccctcccagggttggaggccagggctcagaggttaggcacagaggttactacgttgttggcaggggagtgggggcaggcagagcagctgacacctcctctgtgtttcctcagaccccacagcaatgggggcttcacaagaggtccatggacctgggaaccaattcctttccctccttgcccttcagtctcttctctggtaatcccagcaacttgggaggctgaggtgggagaattgcttgaacccgggaggtggaggttgcagtgagccgacatcgcgccactgcactccagcctggacgacagagcaagactctgtctc

SEQ ID NO: 2167 - DNA, 401 bp, Homo sapiens
gcttagacattggagcagttcttaggatgcttgctgcagccaacagacaaaaggaaaagtgacttctctacactttatgatttacatcaattttatgtaattaaagtaatttagagctgagtttctgagcttataattagggttttaaagcttatgtaaagctgctctttcaaggagaattacttcttagatataagagcagatttggacagaagcatttggattctgtcaaaagacattattttgtgtgtatctgcctactgtgaataccgacataacttccacactaaattatgactatggcttcttgaaatgtcaccaaaaacaatgtgataaaaacgcaagaatatgtcctgtttagtgataacctctatagtgaatttcattgggtaaaattaaaa

SEQ ID NO: 2168 - DNA, 414 bp, Homo sapiens
tccaattgtaacaaaatagaattggactaaatcaccaaagtttctcccggcccaaatactatgactggagaggggtgggagaggtgatatttttatgttctaattctcaatttgcttgtggggcagaagtatcccatagctgagtataatgtcataaaataggatatgtgtataaacaatggaatagttagttctggcctcttctggaggtggcttcacaccacactaccattttcttctcctaacacaagttcactggcaggtgagcattttgggaagtagagaagttttttggtttggggcttaatttgggtctttaaaaatgtcttttagatcaaattttagattctacatatgtgtaagatcaggcagttattagtcttttctttccctgacttatttcacttaatcctc

SEQ ID NO: 2169 - DNA, 366 bp, Homo sapiens
aacccaggaggtctaggttgcagtgagccgagattgcaccactgcactccatccagcctgggccacagagcgagactgtgtctcagcctcccaagtagctgggactacaggcacatgccaccacacctggctaatttttgtatttttagtagagatggggtttccccgtgttggttaggcttgcctcgaactcctgacctcaggtgatccacctgccttggcctcccaaagagctgggattacaggcatgagccacagcacccagcccaaagttactaaaattaaatgagtccattatgaataattcaaatataatcaaatgaactggttaatgaaaactcaattttgacttctgtacttctgaca

SEQ ID NO: 2170 - DNA, 438 bp, Homo sapiens
atatattcttctctaaacacaataacattttatttatttttatttatttatttaatttatttttgaagatggagtcttgttttgtcacccaggctggagtgcagtggcatgatctcggctcactgcaacctctgcctcccgggttcaagctattcttctgcctcagcctcctgagtagctgggactacaggtgtgcaccaccacgcccagctaatttttgtatttttagtagagatggggttgcaccctgttggcccaggatgctctcaatctcttgacctcgtgatctacccacctcaccctcccaaagtgctgggattacaggcaggagccaccactcccggatacaacactattattatatataacaaacttaagtttaagtttaacatgtaatactgaatttatatttaagttttccagattggcaaaaaaaaa

SEQ ID NO: 2171 - DNA, 504 bp, Homo sapiens
ggaggatgtaaagttttaattcacttttccaaactttctcattcaactaacttttttcatatcactttacaaagttccagatgatttccaggctgccgattttaatattaagctctatttgagcagggtcccagagggataattagcaatacaagaaaatattttttattctacccaagtaaatatctttattatctaaaaatgacaatagatgatggaaaacacacgggggagaaaaccttgattccaaattctaaattatgatctgtcggaaatgatgctagtacttgcaataatgtagtgaagtccaagaatctcttgtattaccaacagatgcatccacaagaaacacttctgagggtggcctcttgccttgtggccagaattgcaatttgcatagtttgccattgtttgtaacttcgcttcactgactcctagtgaacttgaagctttggcacaaaatgaccctagcccttgaatttatattcactcaccttgtttctt

SEQ ID NO: 2172 - DNA, 381 bp, Homo sapiens
caagatccgaggagtgaggggcaggaaaaagagtgaggccctgagacaggttgacctgccttctaattctgactctgctctttatagctgtgtgcctctgggcaagttgcttaacctctctgatttccagttttattttaaagttgaagaggtgctaatctatctggtgaggttgtgggaaaaattaatgaaacacatgaaagtcccttaaacttgctaggacttactaaatgccagttctgtctccttcctaacaccttcccccaacccccaatctcttcacgctcactcttgtacatttccaccctgctggaaaacaaagatgagaacaaaatgtgcattgctgagacttactgttagactgttttttaaggtgtcctt

SEQ ID NO: 2173 - DNA, 383 bp, Homo sapiens
catactattttgacacccagggtatttcttttccatcgatctgcctaatttctagtgctttttgtttgtttgttttgttttgagacagagtctcgtactgtcaccctggctagagtgcagtggcgcgatctcggctcactgcaacctccgcctcccaggttcaagtgattctcctgcctcagcctcccgagtagctgagattacaggcacctgccaccatgcccagctaattgttttttggtgtctatatttttaatagacagggtttcactgtgttggtcaggctggtctcaaactcctgacctcatgatctgcccgcctccgcctcccaaagtgctgggattacaggcgtgagccaccgtgcccagccacttctagtgttt

SEQ ID NO: 2174 - DNA, 295 bp, Homo sapiens
ctacgtaaaccagcttttcctgacggtgtgcccagggcccatttttcaagtcacaccaatcaattctcaatgagctgcctttgggagggacatgcccagcaaccctggatgagactctccagccttggaggccccagccctgcccgaaggactcttgggtgttccctccttctgcctggttagagagccccttaccctactctgtccttgcccgccttgcgcgggtggaggtggccctcggaacccagggtgcggaacccacagtgcggatccactttggcccagcgccacaccc

SEQ ID NO: 2175 - DNA, 398 bp, Homo sapiens
ctcaatgcattttatttccattagaaatcattttgggtaaagtatctctaagtttaaaacagtgagtacaattgtcaatataccatagagtgtcccaaaaaatctggaaacatgaagggaactacaaacttatattacttttttttccgatcaacgattgttcagaccttgagtacattcaatgtctttccttgttcagtgaaagaaaaattgtgtgagtgatcatactttttgtctcagaaggaaaattataccatccaaatttaaaatttggccagatgcagtggctcatgcctgtaatcccagcattttgggaggctgaggcatgctgatcacttgagcacaggagtttgagaccagccttggcaacatggcaaaacctcatctctacaaaaaaa

SEQ ID NO: 2176 - DNA, 920 bp, Homo sapiens
taacggcatctgtccatcccgggaagctggagcggggagggacagagggaaatgcaggcctcatcctcactctgccctgcagtgtggcctgggaactcctgaagaagccagcatgacaagggagcaaaaccaatgtcaccaaaccctcactacacaccacttgctgggataactcttcttcacacttgatctctttcaatccccagattctcatgagataggaattatttttgcccatcttacagatgagaaacctcaaaaagtttaaagcgattgcttgcgatcatccaatttatgtgtggcagggccaggattcaaaactacatccatctgatttcgaagcccattgcctctctttataaaagaatttctcctctgtctccctgctccccgtgagacacagctcatttgttttcctataatgagggaggggccttcgatttcctaatagattgctcacctgccgtcctagtggagctggcatttactgtggcatttactgtgtagctgcagagccttccccaccagacacatttgtactttgtgacagcaagaacacatggacagctgctggggcatttctaacacagcccttctcaggcagagatcttggctggggacagcatgactccatcctccaggagaggacaagccatgcggcatctctaattagaacccaggctggaacattcagcttaatgagctgggagttggaaacgctcagctggaaacgagttggtctggcagaaaggacataggactgagggacacattttctaaactctgtcctcatctcagttgttaatcatcttctgcttctgtctatccatcagttggttattagactgtgttattgtgcatttgcctcaagttcagagtgaacatgcgttaaatatattggacgatggcttaaatggatg

SEQ ID NO: 2177 - DNA, 344 bp, Homo sapiens
caaggctattgcagtattctagccaaataattatggcggcttggaacaagatgacagtggtggaggtggtaagagttcatgggactctggatgtattttgaggccagggctgatggaattgaaagaggaatgtgaaagaaagaaaagtctagaatgactcctatctttatgcccatgcaaatggccatttactgagatggagaatgctggaagaatagtatgctgggagggtgatatctcacccacccttatgggatatgccatatcatgggagggtgagataccctgccatatcatgggagggtgagatatcaagaacccaattttaggctgggcacagtggt

SEQ ID NO: 2178 - DNA, 373 bp, Homo sapiens
gtggtatacaagaagtggtgagaagggtttagattctagaaatatttttaaaataatatcaacagatattgttgatacttcaatgtggggtatgagagaaagagaggattcaaggatgatgccaagatttttggcttgaactattggaagggtggagttagtggctgggcacggtgcccacacctggtaatctcagcactttgggagaccaaggtgggagaaacacttgtagccagaagtttgagaccagcctgggcaacatggcaaaaccctgtctctacaaaaaatacaaaaattagctgagcgtggtgtaatgtgcctatagtcccaggtacttgggaggctgaggtgggaggatcgcttgagcccaaga

SEQ ID NO: 2179 - DNA, 342 bp, Homo sapiens
gagtggcagcagggactgctgaggaagctgccgggctccctgtgtaccactggccttcatgaacaaagctgacaccatcatgctccttcggacatattctgctagcataaagggacccccatctccccaaccgaattaggcagagctggccttccttctagcggagttcctaggagtgagttggtgccaccccttgtgaggcttgatccaaaaaccagaacctctccagaccagggatccatgtcctctaacacaagaggggcagacctaacctctaaaatccctcccactctaaccttcagcatccacagctcaaaacaaccaggatgcctcagaaacagc

SEQ ID NO: 2180 - DNA, 393 bp, Homo sapiens
ggttagcctggtcttttctctgtgatctctctcatgagttctttactccagtctttattctgctttaaggagagttttgggcattcttagttaagtgtggtgtttggctgatgttgaaataactcattcattatgagcctccccatccccattaaatgccttaatttcataggagacaaaaaatttaagaaataatgccattgtatacctcctaccccattgcatatattaagtaaaaggaaatgagtcttgagaacattgagaatgaaaacgtttgagtaggccaggtgcggtggctcatgtctgtaatcccatcatgttgggaggcccaggtgggaggattgcttcagcccaggagttccagaccagcctgggcaacatagtgagacctcg

SEQ ID NO: 2181 - DNA, 351 bp, Homo sapiens
cagttgggaatagggcgtggcaacaggactttgaattgcctgagattaccctgaatcagcataacaggacacacaccggggtggaccactagtcaaaacggggcttgaaaaggaatgtaaatgttactatagaaaatcaaagaaagttacgtttttgctgcaactgagtatgtactctaagattcgtacttgctacaattatataaaatgttttccatgtctgagaactcattattattttagttgacaatatctccatcaagtgacaacactgtattttatttagtcattctcctattgttgaaaattaagattgtttcaattgttaagtataatataaatactacaaca

SEQ ID NO: 2182 - DNA, 445 bp, Homo sapiens
  misc_feature (289)..(289): n is a, c, g, or t
gtgctcttctccctgaccctcctttcatattcatcctaaatgacaagacctttccttaaaaacaagcatcttctcctcccatggcaagacaaggctgccctttgtgtgttgttttcattaatttgttgatacttgttttcaagctacattttattggacttgtgcttactttgctgaagcacaaaggttgtttaagcagaagggcacaagaaagtggaaaactcctgacctcaagtgatccacccacctcggcctcccaaagtgctgagattacaggcgtgagccaccnacacccgatcacgggtcttcctgcttctgtgatcaccttctcataaccttgagaccactgcacattgatgaagttcagttaatctacaatgactgtagccatctgagtgaccccaggtgagaccaatagaactgtcgaactagccaacgcacagca

SEQ ID NO: 2183 - DNA, 1055 bp, Homo sapiens
gtttctgattagaattttaaaaaagaatgtaagagtgaataaagcatttgggtcccatactgcatagtaaacagtaagaatgtacgtattttagggggttcatgagagagaaaattttaaaaattgtttaaagatataatgtcttaaatttctaccaatcttggaagaaatatagacattaaattgaaaagctcaaaatgtctgtagcaagaagaatctaacaaaaattgtccataacacgttgtaattatgccaaaattcaaagacaaggagagatccttaaaagaaggaagagaaaagagattcttcacatacaagggaacttctataaggttatcagcagattgcccagcaaaaaccatgcaagccacatggaagtgaaaccgtatatttaaagtgcaaatgaagagagaaaaagaaaaaaccttgacaactaagaatacacctgacaaagctgttctttagaaatgatgtatcaatcaaaatctcagatttaaaaaaagttgaggaaatttttcatcactagacctgacttacaaaaaatgctaatgagaatttttcgagttgtaatggaatcctaacttacaacaataaagtaaatattactgaaagtcatatatacatagtcaaatttagaaggctataaacctgtaattatggtcaaaaatcacttttaactatggtataaaaactataagaaaaaattactaaaaatagcttcaataaattgttaatgggtatacgatataaaaagatgtagcgtgtgaggctgggcgcagtggctcacgcctgtaatctgagcactttgggaggccgaggtgggtggatcatgaggtcaggagatcgagaccatcctggctaacacagtgacccccgtctctactaaaaatacaaaaaattagctggttacagtggcaggcgcctgtagtcccagctagtaggaaggctgaggcaggagaatgccatgaacctgggagcagagctagcagtgagccgagatttcgccactgcactccagcctgggtgacagagcaagactccatctcaaaaaaaaa

SEQ ID NO: 2184 - DNA, 1278 bp, Homo sapiens
gcgggagccctaggccgcagccgccgcctgtcggcccggcccgggtcccagctgcttcggtgtctgggtgaagtttccagccaacccaagaaggaaaccgaaagggaagaggccgagagagaggttaattcctagtgctttggttaccgaaaacagcccggctgggactgctgggctgggaacttagctaagcagtgcggaggctgaaccccaccatctctgggatccgcagcaaatcagaagcccccacccacgataaggggaaaatggggcgcagagggcagggaggaagggaagagaatggaaggaaagcgcgtctggactttgaactgcagccctctccctctttcccttgcctcggaagctccaggcccactcagcaccagttctgtctcctcttttcagccgccttctctctagctactgaggggaaaagtcaggatgaagcgggtccctcggcctccagaaggtgttttattacagtcgcaaacaggtagagcggcagccaccccagtgatgactccctgctccttagattgtagggacgctggcacctcactcatgctcctaagtggccattttgcgccctggctgggcgagttaggcagacaaaatgagcccccaaaagtttaaaggcctccaccaaaggagtatttcttttctgaggtgtcattgtattccatccacgaacttcagttcccccgggtgctctggatctgacatggagtaggatgctaacatctaatcccttctttccctttggaaagatgcatgttttttctcggagtcctagggaataccttagaatactttcatggttgtcattggtacacccatcccttgaggagccctgccacccgtaagtaggactgcaaggaaatacaaaattaagagaagtatgaaccctgatacccaggaacttaaaatcaggtgtataaattttgtacacctaaaaaatatggtacctaaagaggcgaacagcaaaacaagcaagaatgtgaatctttaaaatgtttctattcttcagcgcagcccaggaattctacctaaagtaacatatcctaaggcaacaaccaagaagtgtggaagaatgcatgtaagaagacacagtgatgtttagaatcctggggaaacggaacagccaaaaagtctcacagaggttaagtaaataatagcattttcatacgagtactatgtagtcatttaaaattatgtctttcagtacctagtaatggggaaaatgtattcattatatattattaaagaaaatacagggta

SEQ ID NO: 2185 - DNA, 401 bp, Homo sapiens
tggctaagatcaagtgaagaaacaatctacagtctgttttctgatacaaaactgagactcttgaggatgatcatccgaaaagcagtttcatggtctttttcctaagtgcacactgccttaggcagattccccataccataactcagcagacatttttcagttcattctcatggctttgtgagctctcctgttatcaatcgaattcatttacttagttcagtagaaagaacaagggccacagactcagacctgctttgaatcctgggctctaacagtgacttgctttgtgatcttaggataagtaattagtacaaagcctcactttttccactggtccatgggggataatatcattggcttttcactgggattgagaacattaaaagagaggtgggagtagt

SEQ ID NO: 2186 - DNA, 434 bp, Homo sapiens
ttatagaaactatagtttatagaaactatagaaacagaactataggtcacaaaagacaattctaataaatagaagatgcaacctgggtaatctatgagtttaattcacctttagggcacattatattgtagagctatggatgcaagatgaagaagacgtggtttctatctgtaagatgcccaaggttgtatggttgggacagggcctctaggactattaagtcaaaccaggctgagcacagtaacttatgcctgtgatcccagcactttgggaggccaaggcaggaggatcacttgagcccaggagttccaagactggactgggcaagaaagtgagacacccgtccctaccaaaaagaaaacattagccaggtatggtcgcacatgccgatagtcccagctacttgggactgagggaggaggatcccttgagcc

SEQ ID NO: 2187 - DNA, 413 bp, Homo sapiens
gactaagttttaatacaatttagtattatctcaaaggaatgtaaaaatattttggtcaattattacattatgcagtattactaaaacatctaagttttgtcatatctccccattgaattcttcttttaaagtttgctggccgggcgcggtggctcacgcctgcaatcccagcactttgggaggccgacgcgggcagatcacaaggtcagtagatcgagaccatcctggctaacacggtgaaaccgcgtctctactaagaatacaaaaaaaaaaaaaattagtccggcctgtggtggtgggaggcttgtagtcccagctactccggaggctgaggcaggagaatggcgtgaaccagggaggcggagctttcagtgagccgagatcgcaccactgcactccagcctgggtgacag

SEQ ID NO: 2188 - DNA, 401 bp, Homo sapiens
ctcacggggtctgtagtgaacctcgtcttcatcctcatcctctccaagatctatgtatccctggcccacgtcctgacacgatggggtgagtgggctgaggccggccaggcactgaccaggggcccaccctgccggccgccagccagaacgtgactttctcactcactgacacacatggccctcatttctatttctttcttcttttttcttttgagacaggatctcactctgttgcccaagctggagtgcactggcacgatcatggctcactgtagccttgacctcccaggctcaagggatcctcctgcctcagcctcctcagtacctggaccactgtgcccagctgaaattttttttttttttgatagagacaggggtctcactgtgtggctcaggctggt

SEQ ID NO: 2189 - DNA, 482 bp, Homo sapiens
agcaaagagattcacagtgtgagcgagattcaacgtgaggggcttcctccgctgtgagctttgaaaatgaaggggccatgtggcaaaggatatggcgggctccaggaattgagagcagctccaccccacctccacctgacagctgcccaggaacaaggactacaatctcacaactgcctgaaactgaattctgccaccaagctctgtataagcttgaaggaggaccccagcctcaagatgaggacacagcttcgtgaaatcctgaactgagaatcattcacaccaggcctggatttctcattaaggaaatgtagagaaataaatgggtgctgtgtagagccagtgagttagtggtaatatgttatgcagtaacagaaaattcatacataggccaacagataagcatataacattttctctattggaataaactagtgaattgaaatgtacactccttgtataagataaaatctttcctaatt

SEQ ID NO: 2190 - DNA, 1933 bp, Homo sapiens
aggggaggctcaggccttggattttaatgtcagggatggaaaaacttcagaatgcttcctggatctaccagcagaaactagaagatccattccagaaacacctgaacagcaccgaggagtatctggccttcctctgcggacctcggcgcagccacttcttcctccccgtgtctgtggtgtatgtgccaatttttgtggtgggggtcattggcaatgtcctggtgtgcctggtgattctgcagcaccaggctatgaagacgcccaccaactactacctcttcagcctggcggtctctgacctcctggtcctgctccttggaatgcccctggaggtctatgagatgtggcgcaactaccctttcttgttcgggcccgtgggctgctacttcaagacggccctctttgagaccgtgtgcttcgcctccatcctcagcatcaccaccgtcagcgtggagcgctacgtggccatcctacacccgttccgcgccaaactgcagagcacccggcgccgggccctcaggatcctcggcatcgtctggggcttctccgtgctcttctccctgcccaacaccagcatccatggcatcaagttccactacttccccaatgggtccctggtcccaggttcggccacctgtacggtcatcaagcccatgtggatctacaatttcatcatccaggtcacctccttcctattctacctcctccccatgactgtcatcagtgtcctctactacctcatggcactcagactaaagaaagacaaatctcttgaggcagatgaagggaatgcaaatattcaaagaccctgcagaaaatcagtcaacaagatgctgtttgtcttggtcttagtgtttgctatctgttgggccccgttccacattgaccgactcttcttcagctttgtggaggagtggagtgaatccctggctgctgtgttcaacctcgtccatgtggtgtcaggtgtcttcttctacctgagctcagctgtcaaccccattatctataacctactgtctcgccgcttccaggcagcattccagaatgtgatctcttctttccacaaacagtggcactcccagcatgacccacagttgccacctgcccagcggaacatcttcctgacagaatgccactttgtggagctgaccgaagatataggtccccaattcccatgtcagtcatccatgcacaactctcacctcccaacagccctctctagtgaacagatgtcaagaacaaactatcaaagcttccactttaacaaaacctgaattctttcagagctgactctcctctatgcctcaaaacttcagagaggaacatcccataatgtatgccttctcatatgatattagagaggtagaatggctcttacaactcatgtacccattgctagtttttttttttttaataaacgtgaaaactgagagttagatctggtttcaaaacccaagactgcctgatttttagttatctttccactatcctaactgcctcatgccccttcactagttcatgccaagaacgtgactggaaaggcatggcacctataccttgattaatttccattaatggaaatggttcgtcctgagtcatctacgttccgagtcaggctgtcactcctactaccaatggccactgtgagccacagaaggaagacatgtacgtgctgttctactttatatgatgtgagaagccaacatcagtgtcccttggcagcagtctacaggcataacttgttttattgtgctgaattttattgtgcttctcaaatattgcacttttaaaaaaattgaaagtttgtggcaatgctgttgagcaaatctgctggcatctttcttcccaaaggcatgtgctcacttcatgtctctgtatcaattgtcataattttcgcaataaacttgattattattatatgtgcttatggtga

SEQ ID NO: 2191 - DNA, 1454 bp, Homo sapiens
cattggtgcatatatcaataattaatttccttttattgctgagtagtatttactatatggatgtaccacattttgtttatcctttcaactgttgctggacatttgggttgtttccagttttgagctatataaacaaagacacaaagatttgtatgtaaagcatcgtatggacagccaccttatttctcttggagcagaaagggaccttaaagatgacagaccaaacatcaacttcacagatgatgacacagaaggtgaatctactgaaaagagctaaagaaagacaaatctcttgaggcagatgaagggaatgcaaatattcaaagaccctgcagaaaatcagtcaacaagatgctgtttgtcttggtcttagtgtttgctatctgttgggccccgttccacattgaccgactcttcttcagctttgtggaggagtggagtgaatccctggctgctgtgttcaacctcgtccatgtggtgtcaggtgtcttcttctacctgagctcagctgtcaaccccattatctataacctactgtctcgccgcttccaggcagcattccagaatgtgatctcttctttccacaaacagtggcactcccagcatgacccacagttgccacctgcccagcggaacatcttcctgacagaatgccactttgtggagctgaccgaagatataggtccccaattcccatgtcagtcatccatgcacaactctcacctcccaacagccctctctagtgaacagatgtcaagaacaaactatcaaagcttccactttaacaaaacctgaattctttcagagctgactctcctctatgcctcaaaacttcagagaggaacatcccataatgtatgccttctcatatgatattagagaggtagaatggctcttacaactcatgtacccattgctagtttttttttttttaataaacgtgaaaactgagagttagatctggtttcaaaacccaagactgcctgatttttagttatctttccactatcctaactgcctcatgccccttcactagttcatgccaagaacgtgactggaaaggcatggcacctataccttgattaatttccattaatggaaatggttcgtcctgagtcatctacgttccgagtcaggctgtcactcctactaccaatggccactgtgagccacagaaggaagacatgtacgtgctgttctactttatatgatgtgagaagccaacatcagtgtcccttggcagcagtctacaggcataacttgttttattgtgctgaattttattgtgcttctcaaatattgcacttttaaaaaaattgaaagtttgtggcaatgctgttgagcaaatctgctggcatctttcttcccaaaggcatgtgctcacttcatgtctctgtatcaattgtcataattttcgcaataaacttgattattattatatgtgcttatggtga

SEQ ID NO: 2192 - DNA, 533 bp, Homo sapiens
atttttctcagcgtcgacagatgaatggctcaacaaaagtgtatctcttaatttagaaatcttatcttaggcctctgtaatcaatcaactgccgtgcacagttccctaaatgtttctttttcttgcctgagtagatatttaaatttccttttagaaatcactagggtaaaaagctagcaagtatcttagcaatttcaggaggttacatgaataacattttaatattttgaaaatgtagaataaagacaggatagttaaccagaaagttactttttgtggtgtaaaacttggaactttgaaattggaaatggaaaatagctttaaagccagcattcctatttttcttgcccctaggagaaaagagctcagccttattttaaattaattctgtgatactatttcccattagaaattttaagtttgacttattctaaaactttctctcagctctagtggtcatattttcttaatcatgatgggaaaaatatatttccataaggtgctttaatgtttgagctgaggtcttaaactga

SEQ ID NO: 2193 - DNA, 552 bp, Homo sapiens
tgaagaaggaagccaggtaaaaatgtgattgaatttcattctaaggaaaatgaggggctgttaaagaatgatattaatgtaattagatttgagttattgaaaacttcctctacctgcatttggaggctcttcacggacaacacatgcctacttcactgactataaattgaagctaattaacttagaattatcggagcttaacccgaaatctgagatagtaaagaaaaaaaagaatgtctgtatgtgtaggcagaagatcaaaaaagcaattctgaaaagaatttgattacaggctgttcaagatattgatcaatatttggatgaagactctttcatctggtgaatacccaggtgagcctaaacttacacaagaggatttactggtttatgtaagtgaaaattccaaaggtactcccttaggtatagcagagtccagaggctcaaatgatgccattgctgctctcctctgcattgacttcatcatcggttggggtggactcttcccttgtggagctaagatgtcagcaacagctgtgggctgttaccctcctg

SEQ ID NO: 2194 - DNA, 337 bp, Homo sapiens
atagggtgggttaggggctaattaacattccccagcccagagccttccccttaattttttttacatcttgatagaatgatttcaatttgttctgtaaatcacactggactcccctgtaatgattacagaaagaaaaatgttttttatatggatatatgggtataccccaatttgaaggcataaaggcacaatagcggactctaaagtaggaatgaggaaagctggaaaggagggggctatgctgatatagaccatcaagaaaagcttgaagagatgtcccaaataccctgatgacttacttttcactgaaatgcaaagaaattggcatcttagatat

SEQ ID NO: 2195 - DNA, 429 bp, Homo sapiens
atcactttgagcatctgataaaatctgtagccactcttctcagaaaaaaaaaaagtagtcccatgggggctggcgggaaggtatggatctcctaagtcctccgtgaccagctaagaatgccttttctgcaagtgggatggggctgctttggagcctgcagatgtccctgcatggacttcacaaagtgattgtattctctggtgaaaactaaaacagcaggtcttctgagtattagtgagacagggtcatgtaaatgaaaatcgcaacctttagagtgaggcagactttggtttgaatccaagttctgattagagtaatcaacttgtaccattttgagagggactgttccagtttgaaaactggcacatgtatacatatgtaacaaaccggcacgttgtgcacatgtaccctagaacttaaagtataatt

SEQ ID NO: 2196 - DNA, 442 bp, Homo sapiens
cgacttcttctcaaacaaaaattaccttgccttcttctaaatttttaggacatttgtctgtgctaatcatagtttattcccatgcattataataatttctagaaagcagtgtaatgttgtgtttaaaagcttgggctgcagagtcaagcagggttcaagaccttccatcacttgctgtgtgacctggagcaaattgcttaatcagtatgcatttttttctctgttgtaaaatgaaggtgataatagctggacctatctaataagctgttatggagatgaaaagagataatggatgtacagctgctggaaatcagtaaaatctcaggaaatgtttcctattatttttactgagtactatctactctagcagataataggttcctgaagaacatggaacatgactcagagaagttacagtgaataaactcattacagacatctc

SEQ ID NO: 2197 - DNA, 410 bp, Homo sapiens
agtcttatttgttattttgaaacattttctggagatgtgtctaaggaacatacactgacaccagcaggtttattgaaaaggatatggatatttgaactgaaagctgagtgttgatgaaaaatatccagaataagtggaattctaaaatatgtggattttttcttttgctcttgaggatggtttaaattttagggaataaagtgaaaagcaagagaaatagcaaaacgtgatgaaatggaactcaaaacatttatattttaattttcatggtgccctgtatttatgaatctttttccccaagccatctgcttgcttttaagtcatttctaggccctttttccctccaaaatgcattactgagggctcttttttgagttggaatggagagggggtttgtgagaagactgggt

SEQ ID NO: 2198 - DNA, 533 bp, Homo sapiens
ctgggcgacagaccaagactccatcaaaaaaaaaaaaaaaaaaactttccccaggtaccatggctcatgcctgtaatcccagcactttgggaagccaaggcaggaggatctctcaagcccaggaattcaagaccatcctggacacgcagctcaggctctgtggactaggatgttaaacccaggcctgtctgactccagcacgctctcaagctctgctctcctgcaaggctggcacagaggggcagggatcttggctctgtctgagggcgcagccaggtgggtgtctgggaaggcgggctgagggcagggtcagagctcttcagattgcctgcttttcgttacatgcccttctgtcttgggtttatggccatgggctggggaactcatggctgttggctcagagcagcaatcaacagagtgaactctaacaagctgggttctgaaacgtcagggtgggagcagccggccagggaggaatggggtaaagagcacggaggagaggaggagggaggaagctgatgagggttcaacca

SEQ ID NO: 2199 - DNA, 1375 bp, Homo sapiens
gtagggttattcttggactaacatctttaagcagttttcacttgcagtggaaatgatgttcaggctttaagagaaagtattgtgaattgttaatggcactaacttctgttactagacagcagaccaagctatttttttgttgtagtctttttttcactaaaccaaaactacttctggttgtaactcagctgccactttaaaccatagtagagattcaaaacgttcctatttgaaactacatttgatttttgctaaaatgtgctgtttcggttatttatctcttgggcatttagactaaattgtgcctgtattcctgaaatcaataatactttggcttatcctgatctaagtaacatagttacttaaattcctggatatacccaaatatggatcacatgtatcattttagtttgaaattttttgttgacattcttctatgaagagctgacctcttgaaatgtagaagaattgacatttgtgtgattttggctatctggagctttatttataatttattttgaaaaataaaaatgccacatttatttcccaaatgtcaagattttctagaattagataattagaataataaggctgaagacattttaaagcatattttatatgtagtgaaatactgtgaaaatattagtgaacagcattttgctgtaatgtttatttcagttattaagatttaaagagttagtcatcagggtatgttagataaacatagttatcatttattaaacaaacagataattttctgtttgcatgcaaattattttaataagtgtgaaaataaaagtttggaagatagtatttttacttttatatctggacttttttttcccccaatttacactttgctttcttgtaataccacctcctgtgaatgtgttgtaattagtatcacattgattactttatcattttaatttctttgaggccctttaaacctacgtaaaatctgggtccagccatagcaaagcaagtacaaaatgaacaaagaattttgaagaaaagcctaaatcttaaattgctaagaaaaaacactgttatatttaggcccgtgagagcatatacatgtataaacctaatcctatgctagatatgaatagtcagtgagctgtaatatttctcataaatgctaataatgtttaaattcccagctttaagatcttagtgtgtgtatatatttataaaatctgaattgtgtgtttcttctatggcttactgtgtgtttctctttcagcaataggatgctctctaaaacattcactagcctactagcctacttactaaatttttgtatatgtgtgtttgtgcacttgtatgtgtgtaaagttttttccccaacttgacacaccttatctcagacatt

SEQ ID NO: 2200 - DNA, 629 bp, Homo sapiens
ccagcaacgcggcacgaggcggcacgagggtggccagctgcatctgtctgaatggtgcgtgaaggctctcagaccttacacaccattttgtaagttatgttttacatgccccgtttttgagactgatctcgatgcaggtggatctccttgagatcctgatagcctgttacaggaatgaagtaaaggtcagttttttttgtattgattttcacagctttgaggaacatgcataagaaatgtagctgaagtagagggggcgtgagagaagggccaggccggcaggccaaccctcctccaatggaaattcccgtgttgcttcaaactgagacagatgggacttaacaggcaatggggtccacttccccctcttcagcatcccccgtaccccactttctgctgaaagaactgccagcaggtaggaccccagaggcccccaaatgaaagcttgaatttcccctactggctctgcgttttgctgagatctgtaggaaaggatgcttcacaaactgaggtagataatgctatgctgtcgttggtatacatcatgaatttttatgtaaattgctctgcaaagcaaattgatatgtttgataaatttatgtttttaggtaaataaaaacttttaaaaa

SEQ ID NO: 2201 - DNA, 3391 bp, Homo sapiens
catttactgaaatgcgctctttaatttgttgtagattaggtcttgctggaagacagagaaaacttgcctttcagtattgacactgactagagtgatgactgcttgtaggtatgtctgtgccatttctcagggaagtaagatgtaaattgaagaagcctcacacgtaaaagaaatgtattaatgtatgtaggagctgcagttcttgtggaagacacttgctgagtgaaggaaatgaatctttgactgaagccgtgcctgtagccttggggaggcccatcccccacctgccagcggtttcctggtgtgggtccctctgccccaccctccttcccattggctttctctccttggcctttcctggaagccagttagtaaacttcctattttcttgagtcaaaaaacatgagcgctactcttggatgggacatttttgtctgtcctacaatctagtaatgtctaagtaatggttaagttttcttgtttctgcatctttttgaccctcattctttagagatgctaaaattcttcgcataaagaagaagaaattaaggaacataaatcttaatacttgaactgttgcccttctgtccaagtacttaactatctgttcccttcctctgtgccacgctcctctgtttgtttggctgtccagcgatcagccatggcgacactaaaggaggaggagccggggactcccaggctggagagcactgccaggacccaccactggaagcaggatggagctgactacggaactgcacactcagtgggctgtttctgcttatttcatctgttctatgcttcctcgtgccaattatagtttgacagggccttaaaattacttggctttttccaaatgcttctatttatagaatcccaaagacctccacttgcttaagtatacctatcacttacatttttgtggttttgagaaagtacagcagtagactggggcgtcacctccaggccgtttctcatactacaggatatttactattactcccaggatcagcagaagattgcgtagctctcaaatgtgtgttcctgcttttctaatggatattttaaattcattcaacaagcacctagtaagtgcctgctgtatccctacattacacagttcagcctttatcaagcttagtgagcagtgagcactgaaacattattttttaatgtttaaaaagtttctaatattaaagtcagaatattaatacaattaatattaatattaactacagaaaagacaaacagtagagaacagcaaaaaaataaaaaggatctccttttttcccagcccaaattctcctctctaaaagtgtccacaagaaggggtgtttattcttccaacacatttcacttttctgtaaatatacataaacttaaaaagaaaacctcatggagtcatcttgcacacactttcatgcagtgctctttgtagctaacagtgaagatttacctcgttctgctcagaggccttgctgtggagctccactgccatgtacccagtagggtttgacatttcattagccatgcaacatggatatgtattgggcagcagactgtgtttcgtgaactgcagtgatgtatacatcttatagatgcaaagtattttggggtatattatcctaagggaagataaagatgatattaagaactgctgtttcacggggcccttacctgtgaccctctttgctgaagaatatttaaccccacacagcacttcaaagaagctgtcttggaagtctgtctcaggagcaccctgtcttcttaattctccaagcggatgctccatttcaattgctttgtgacttcttcttctttgtttttttaaatattatgctgctttaacagtggagctgaattttctggaaaatgcttcttggctggggccactacctcctttcctatctttacatctatgtgtatgttgactttttaaaattctgagtgatccagggtatgacctagggaatgaactagctatgaaatactcagggttaggaatcctagcacttgtctcaggactctgaaaaggaacggcttcctcattccttgtcttgataaagtggaattggcaaactagaatttagtttgtactcagtggacagtgctgttgaagatttgaggacttgttaaagagcactgggtcatatggaaaaaatgtatgtgtctcccaggtgcatttcttggtttatgtcttgttcttgagattttgtatatttaggaaaacctcaagcagtaattaatatctcctggaacactatagagaaccaagtgaccgactcatttacaactgaaacctaggaagcccctgagtcctgagcgaaaacaggagagttagtcgccctacagaaaacccagctagactattgggtatgaactaaaaagagactgtgccatggtgagaaaaatgtaaaatcctacagtggaatgagcagcccttacagtgttgttaccaccaagggcaggtaggtattagtgtttgaaaaagctggtctttgagcgagggcataaatacagctagccccaggggtggaacaactctgggagtcttgggtactcgcacctcttggctttgttgatgctccgccaggaaggccacttgtgtgtgcgtgtcagttacttttttagtaacaattcagatccagtgtaaacttccgttcattgctctccagtcacatgcccccacttccccacaggtgaaagtttttctgaaagtgttgggattggttaaggtctttatttgtattacgtatctccccaagtcctctgtggccagctgcatctgtctgaatggtgcgtgaaggctctcagaccttacacaccattttgtaagttatgttttacatgccccgtttttgagactgatctcgatgcaggtggatctccttgagatcctgatagcctgttacaggaatgaagtaaaggtcagttttttttgtattgattttcacagctttgaggaacatgcataagaaatgtagctgaagtagagggggcgtgagagaagggccaggccggcaggccaaccctcctccaatggaaattcccgtgttgcttcaaactgagacagatgggacttaacaggcaatggggtccacttccccctcttcagcatcccccgtaccccactttctgctgaaagaactgccagcaggtaggaccccagaggcccccaaatgaaagcttgaatttcccctactggctctgcgttttgctgagatctgtaggaaaggatgcttcacaaactgaggtagataatgctatgctgtcgttggtatacatcatgaatttttatgtaaattgctctgcaaagcaaattgatatgtttgataaatttatgtttttaggtaaataaaaacttttaaaaagttaaaaaaaaaaaaggagg

SEQ ID NO: 2202 - DNA, 3337 bp, Homo sapiens
catttactgaaatgcgctctttaatttgttgtagattaggtcttgctggaagacagagaaaacttgcctttcagtattgacactgactagagtgatgactgcttgtaggtatgtctgtgccatttctcagggaagtaagatgtaaattgaagaagcctcacacgtaaaagaaatgtattaatgtatgtaggagctgcagttcttgtggaagacacttgctgagtgaaggaaatgaatctttgactgaagccgtgcctgtagccttggggaggcccatcccccacctgccagcggtttcctggtgtgggtccctctgccccaccctccttcccattggctttctctccttggcctttcctggaagccagttagtaaacttcctattttcttgagtcaaaaaacatgagcgctactcttggatgggacatttttgtctgtcctacaatctagtaatgtctaagtaatggttaagttttcttgtttctgcatctttttgaccctcattctttagagatgctaaaattcttcgcataaagaagaagaaattaaggaacataaatcttaatacttgaactgttgcccttctgtccaagtacttaactatctgttcccttcctctgtgccacgctcctctgtttgtttggctgtccagcgatcagccatggcgacactaaaggaggaggagccggggactcccaggctggagagcactgccaggacccaccactggaagcaggatggagctgactacggaactgcacactcagtgggctgtttctgcttatttcatctgttctatgcttcctcgtgccaattatagtttgacagggccttaaaattacttggctttttccaaatgcttctatttatagaatcccaaagacctccacttgcttaagtatacctatcacttacatttttgtggttttgagaaagtacagcagtagactggggcgtcacctccaggccgtttctcatactacaggatatttactattactcccaggatcagcagaagattgcgtagctctcaaatgtgtgttcctgcttttctaatggatattttaaattcattcaacaagcacctagtaagtgcctgctgtatccctacattacacagttcagcctttatcaagcttagtgagcagtgagcactgaaacattattttttaatgtttaaaaagtttctaatattaaagtcagaatattaatacaattaatattaatattaactacagaaaagacaaacagtagagaacagcaaaaaaataaaaaggatctccttttttcccagcccaaattctcctctctaaaagtgtccacaagaaggggtgtttattcttccaacacatttcacttttctgtaaatatacataaacttaaaaagaaaacctcatggagtcatcttgcacacactttcatgcagtgctctttgtagctaacagtgaagatttacctcgttctgctcagaggccttgctgtggagctccactgccatgtacccagtagggtttgacatttcattagccatgcaacatggatatgtattgggcagcagactgtgtttcgtgaactgcagtgatgtatacatcttatagatgcaaagtattttggggtatattatcctaagggaagataaagatgatattaagaactgctgtttcacggggcccttacctgtgaccctctttgctgaagaatatttaaccccacacagcacttcaaagaagctgtcttggaagtctgtctcaggagcaccctgtcttcttaattctccaagcggatgctccatttcaattgctttgtgacttcttcttctttgtttttttaaatattatgctgctttaacagtggagctgaattttctggaaaatgcttcttggctggggccactacctcctttcctatctttacatctatgtgtatgttgactttttaaaattctgagtgatccagggtatgacctagggaatgaactagctatgaaatactcagggttaggaatcctagcacttgtctcaggactctgaaaaggaacggcttcctcattccttgtcttgataaagtggaattggcaaactagaatttagtttgtactcagtggacagtgctgttgaagatttgaggacttgttaaagagcactgggtcatatggaaaaaatgtatgtgtctcccaggtgcatttcttggtttatgtcttgttcttgagattttgtatatttaggaaaacctcaagcagtaattaatatctcctggaacactatagagaaccaagtgaccgactcatttacaactgaaacctaggaagcccctgagtcctgagcgaaaacaggagagttagtcgccctacagaaaacccagctagactattgggtatgaactaaaaagagactgtgccatggtgagaaaaatgtaaaatcctacagtggaatgagcagcccttacagtgttgttaccaccaagggcaggtaggtattagtgtttgaactctgggagtcttgggtactcgcacctcttggctttgttgatgctccgccaggaaggccacttgtgtgtgcgtgtcagttacttttttagtaacaattcagatccagtgtaaacttccgttcattgctctccagtcacatgcccccacttccccacaggtgaaagtttttctgaaagtgttgggattggttaaggtctttatttgtattacgtatctccccaagtcctctgtggccagctgcatctgtctgaatggtgcgtgaaggctctcagaccttacacaccattttgtaagttatgttttacatgccccgtttttgagactgatctcgatgcaggtggatctccttgagatcctgatagcctgttacaggaatgaagtaaaggtcagttttttttgtattgattttcacagctttgaggaacatgcataagaaatgtagctgaagtagagggggcgtgagagaagggccaggccggcaggccaaccctcctccaatggaaattcccgtgttgcttcaaactgagacagatgggacttaacaggcaatggggtccacttccccctcttcagcatcccccgtaccccactttctgctgaaagaactgccagcaggtaggaccccagaggcccccaaatgaaagcttgaatttcccctactggctctgcgttttgctgagatctgtaggaaaggatgcttcacaaactgaggtagataatgctatgctgtcgttggtatacatcatgaatttttatgtaaattgctctgcaaagcaaattgatatgtttgataaatttatgtttttaggtaaataaaaacttttaaaaagttaaaaaaaaaaaaggagg

SEQ ID NO: 2203 - DNA, 2472 bp, Homo sapiens
aatcgagctggaccggaaaggtagctgtactggggcgtcacctccaggccgtttctcatactacaggatatttactattactcccaggatcagcagaagattgcgtagctctcaaatgtgtgttcctgcttttctaatggatattttaaattcattcaacaagcacctagtaagtgcctgctgtatccctacattacacagttcagcctttatcaagcttagtgagcagtgagcactgaaacattattttttaatgtttaaaaagtttctaatattaaagtcagaatattaatacaattaatattaatattaactacagaaaagacaaacagtagagaacagcaaaaaaataaaaaggatctccttttttcccagcccaaattctcctctctaaaagtgtccacaagaaggggtgtttattcttccaacacatttcacttttctgtaaatatacataaacttaaaaagaaaacctcatggagtcatcttgcacacactttcatgcagtgctctttgtagctaacagtgaagatttacctcgttctgctcagaggccttgctgtggagctccactgccatgtacccagtagggtttgacatttcattagccatgcaacatggatatgtattgggcagcagactgtgtttcgtgaactgcagtgatgtatacatcttatagatgcaaagtattttggggtatattatcctaagggaagataaagatgatattaagaactgctgtttcacggggcccttacctgtgaccctctttgctgaagaatatttaaccccacacagcacttcaaagaagctgtcttggaagtctgtctcaggagcaccctgtcttcttaattctccaagcggatgctccatttcaattgctttgtgacttcttcttctttgtttttttaaatattatgctgctttaacagtggagctgaattttctggaaaatgcttcttggctggggccactacctcctttcctatctttacatctatgtgtatgttgactttttaaaattctgagtgatccagggtatgacctagggaatgaactagctatgaaatactcagggttaggaatcctagcacttgtctcaggactctgaaaaggaacggcttcctcattccttgtcttgataaagtggaattggcaaactagaatttagtttgtactcagtggacagtgctgttgaagatttgaggacttgttaaagagcactgggtcatatggaaaaaatgtatgtgtctcccaggtgcatttcttggtttatgtcttgttcttgagattttgtatatttaggaaaacctcaagcagtaattaatatctcctggaacactatagagaaccaagtgaccgactcatttacaactgaaacctaggaagcccctgagtcctgagcgaaaacaggagagttagtcgccctacagaaaacccagctagactattgggtatgaactaaaaagagactgtgccatggtgagaaaaatgtaaaatcctacagtggaatgagcagcccttacagtgttgttaccaccaagggcaggtaggtattagtgtttgaaaaagctggtctttgagcgagggcataaatacagctagccccaggggtggaacaactctgggagtcttgggtactcgcacctcttggctttgttgatgctccgccaggaaggccacttgtgtgtgcgtgtcagttacttttttagtaacaattcagatccagtgtaaacttccgttcattgctctccagtcacatgcccccacttccccacaggtgaaagtttttctgaaagtgttgggattggttaaggtctttatttgtattacgtatctccccaagtcctctgtggccagctgcatctgtctgaatggtgcgtgaaggctctcagaccttacacaccattttgtaagttatgttttacatgccccgtttttgagactgatctcgatgcaggtggatctccttgagatcctgatagcctgttacaggaatgaagtaaaggtcagttttttttgtattgattttcacagctttgaggaacatgcataagaaatgtagctgaagtagagggggcgtgagagaagggccaggccggcaggccaaccctcctccaatggaaattcccgtgttgcttcaaactgagacagatgggacttaacaggcaatggggtccacttccccctcttcagcatcccccgtaccccactttctgctgaaagaactgccagcaggtaggaccccagaggcccccaaatgaaagcttgaatttcccctactggctctgcgttttgctgagatctgtaggaaaggatgcttcacaaactgaggtagataatgctatgctgtcgttggtatacatcatgaatttttatgtaaattgctctgcaaagcaaattgatatgtttgataaatttatgtttttaggtaaataaaaacttttaaaaagttaaaaaaaaaaaaggagg

SEQ ID NO: 2204 - DNA, 3371 bp, Homo sapiens
catttactgaaatgcgctctttaatttgttgtagattaggtcttgctggaagacagagaaaacttgcctttcagtattgacactgactagagtgatgactgcttgtaggtatgtctgtgccatttctcagggaagtaagatgtaaattgaagaagcctcacacgtaaaagaaatgtattaatgtatgtaggagctgcagttcttgtggaagacacttgctgagtgaaggaaatgaatctttgactgaagccgtgcctgtagccttggggaggcccatcccccacctgccagcggtttcctggtgtgggtccctctgccccaccctccttcccattggctttctctccttggcctttcctggaagccagttagtaaacttcctattttcttgagtcaaaaaacatgagcgctactcttggatgggacatttttgtctgtcctacaatctagtaatgtctaagtaatggttaagttttcttgtttctgcatctttttgaccctcattctttagagatgctaaaattcttcgcataaagaagaagaaattaaggaacataaatcttaatacttgaactgttgcccttctgtccaagtacttaactatctgttcccttcctctgtgccacgctcctctgtttgtttggctgtccagcgatcagccatggcgacactaaaggaggaggagccggggactcccaggctggagagcactgccaggacccaccactggaagcaggatggagctgactacggaactgcacactcagtgggctgtttctgcttatttcatctgttctatgcttcctcgtgccaattatagtttgacagggccttaaaattacttggctttttccaaatgcttctatttatagaatcccaaagacctccacttgcttaagtatacctatcacttacatttttgtggttttgagaaagtacagcagtagactggggcgtcacctccaggccgtttctcatactacaggatatttactattactcccaggatcagcagaagattgcgtagctctcaaatgtgtgttcctgcttttctaatggatattttaaattcattcaacaagcacctagtaagtgcctgctgtatccctacattacacagttcagcctttatcaagcttagtgagcagtgagcactgaaacattattttttaatgtttaaaaagtttctaatattaaagtcagaatattaatacaattaatattaatattaactacagaaaagacaaacagtagagaacagcaaaaaaataaaaaggatctccttttttcccagcccaaattctcctctctaaaagtgtccacaagaaggggtgtttattcttccaacacatttcacttttctgtaaatatacataaacttaaaaagaaaacctcatggagtcatcttgcacacactttcatgcagtgctctttgtagctaacagtgaagatttacctcgttctgctcagaggccttgctgtggagctccactgccatgtacccagtagggtttgacatttcattagccatgcaacatggatatgtattgggcagcagactgtgtttcgtgaactgcagtgatgtatacatcttatagatgcaaagtattttggggtatattatcctaagggaagataaagatgatattaagaactgctgtttcacggggcccttacctgtgaccctctttgctgaagaatatttaaccccacacagcacttcaaagaagctgtcttggaagtctgtctcaggagcaccctgtcttcttaattctccaagcggatgctccatttcaattgctttgtgacttcttcttctttgtttttttaaatattatgctgctttaacagtggagctgaattttctggaaaatgcttcttggctggggccactacctcctttcctatctttacatctatgtgtatgttgactttttaaaattctgagtgatccagggtatgacctagggaatgaactagctatgaaatactcagggttaggaatcctagcacttgtctcaggactctgaaaaggaacggcttcctcattccttgtcttgataaagtggaattggcaaactagaatttagtttgtactcagtggacagtgctgttgaagatttgaggacttgttaaagagcactgggtcatatggaaaaaatgtatgtgtctcccaggtgcatttcttggtttatgtcttgttcttgagattttgtatatttaggaaaacctcaagcagtaattaatatctcctggaacactatagagaaccaagtgaccgactcatttacaactgaaacctaggaagcccctgagtcctgagcgaaaacaggagagttagtcgccctacagaaaacccagctagactattgggtatgaactaaaaagagactgtgccatggtgagaaaaatgtaaaatcctacagtggaatgagcagcccttacagtgttgttaccaccaagggcaggtaggtattagtgtttgaaaaagctggtctttgagcgagggcataaatacagctagccccaggggtggaacaactctgggagtcttgggtactcgcacctcttggctttgttgatgctccgccaggaaggccacttgtgtgtgcgtgtcagttacttttttagtaacaattcagatccagtgtaaacttccgttcattgctctccagtcacatgcccccacttccccacaggtgaaagtttttctgaaagtgttgggattggttaaggtctttatttgtattacgtatctccccaagtcctctgtggccagctgcatctgtctgaatggtgcgtgaaggctctcagaccttacacaccattttgtaagttatgttttacatgccccgtttttgagactgatctcgatgcaggtggatctccttgagatcctgatagcctgttacaggaatgaagtaaaggtcagttttttttgtattgattttcacagctttgaggaacatgcataagaaatgtagctgaagtagagggggcgtgagagaagggccaggccggcaggccaaccctcctccaatggaaattcccgtgttgcttcaaactgagacagatgggacttaacaggcaatggggtccacttccccctcttcagcatcccccgtaccccactttctgctgaaagaactgccagcaggtaggaccccagaggcccccaaatgaaagcttgaatttcccctactggctctgcgttttgctgagatctgtaggaaaggatgcttcacaaactgaggtagataatgctatgctgtcgttggtatacatcatgaatttttatgtaaattgctctgcaaagcaaattgatatgtttgataaatttatgtttttaggtaaataaaaacttttaaaaa

SEQ ID NO: 2205 - DNA, 2865 bp, Homo sapiens
catttactgaaatgcgctctttaatttgttgtagattaggtcttgctggaagacagagaaaacttgcctttcagtattgacactgactagagtgatgactgcttgtaggtatgtctgtgccatttctcagggaagtaagatgtaaattgaagaagcctcacacgtaaaagaaatgtattaatgtatgtaggagctgcagttcttgtggaagacacttgctgagtgaaggaaatgaatctttgactgaagccgtgcctgtagccttggggaggcccatcccccacctgccagcggtttcctggtgtgggtccctctgccccaccctccttcccattggctttctctccttggcctttcctggaagccagttagtaaacttcctattttcttgagtcaaaaaacatgagcgctactcttggatgggacatttttgtctgtcctacaatctagtaatgtctaagtaatggttaagttttcttgtttctgcatctttttgaccctcattctttagagatgctaaaattcttcgcataaagaagaagaaattaaggaacataaatcttaatacttgaactgttgcccttctgtccaagtacttaactatctgttcccttcctctgtgccacgctcctctgtttgtttggctgtccagcgatcagccatggcgacactaaaggaggaggagccggggactcccaggctggagagcactgccaggacccaccactggaagcaggatggagctgactacggaactgcacactcagtgggctgtttctgcttatttcatctgttctatgcttcctcgtgccaattatagtttgacagggccttaaaattacttggctttttccaaatgcttctatttatagaatcccaaagacctccacttgcttaagtatacctatcacttacatttttgtggttttgagaaagtacagcagtagactggggcgtcacctccaggccgtttctcatactacaggatatttactattactcccaggatcagcagaagattgcgtagctctcaaatgtgtgttcctgcttttctaatggatattttaaattcattcaacaagcacctagtaagtgcctgctgtatccctacattacacagttcagcctttatcaagcttagtgagcagtgagcactgaaacattattttttaatgtttaaaaagtttctaatattaaagtcagaatattaatacaattaatattaatattaactacagaaaagacaaacagtagagaacagcaaaaaaataaaaaggatctccttttttcccagcccaaattctcctctctaaaagtgtccacaagaaggggtgtttattcttccaacacatttcacttttctgtaaatatacataaacttaaaaagaaaacctcatggagtcatcttgcacacactttcatgcagtgctctttgtagctaacagtgaagatttacctcgttctgctcagaggccttgctgtggagctccactgccatgtacccagtagggtttgacatttcattagccatgcaacatggatatgtattgggcagcagactgtgtttcgtgaactgcagtgatgtatacatcttatagatgcaaagtattttggggtatattatcctaagggaagataaagatgatattaagaactgctgtttcacggggcccttacctgtgaccctctttgctgaagaatatttaaccccacacagcacttcaaagaagctgtcttggaagtctgtctcaggagcaccctgtcttcttaattctccaagcggatgctccatttcaattgctttgtgacttcttcttctttgtttttttaaatattatgctgctttaacagtggagctgaattttctggaaaatgcttcttggctggggccactacctcctttcctatctttacatctatgtgtatgttgactttttaaaattctgagtgatccagggtatgacctagggaatgaactagctatgaaatactcagggttaggaatcctagcacttgtctcaggactctgaaaaggaacggcttcctcattccttgtcttgataaagtggaattggcaaactagaatttagtttgtactcagtggacagtgctgttgaagatttgaggacttgttaaagagcactgggtcatatggaaaaaatgtatgtgtctcccaggtgcatttcttggtttatgtcttgttcttgagattttgtatatttaggaaaacctcaagcagtaattaatatctcctggaacactatagagaaccaagtgaccgactcatttacaactgaaacctaggaagcccctgagtcctgagcgaaaacaggagagttagtcgccctacagaaaacccagctagactattgggtatgaactaaaaagagactgtgccatggtgagaaaaatgtaaaatcctacagtggaatgagcagcccttacagtgttgttaccaccaagggcaggtaggtattagtgtttgaaaaagctggtctttgagcgagggcataaatacagctagccccaggggtggaacaactctgggagtcttgggtactcgcacctcttggctttgttgatgctccgccaggaaggccacttgtgtgtgcgtgtcagttacttttttagtaacaattcagatccagtgtaaacttccgttcattgctctccagtcacatgcccagtccacggtgaagttctgacgtgggatggtagctaattgatacgatccccaagcctggcagtgctgctatggggaggtcaaactcaccattgggtttaacccggaagagcagggctgacaccgcgcagagagtgcggaaaaggggggatttactaggaggggcggacaataggaataaa

SEQ ID NO: 2206 - DNA, 635 bp, Homo sapiens
cactaatgtctcgctctgtcacccatgctggaatatagtggcacaatcatggctcactgctccctcaacctcccaggctcaagcaatcctcccacctcagccttccgagtggctaggacttgggattacaggcatgagccaccgtgtcctgctctgattttctaccatactgataacaatggttaatgttttgatagatattccaaaattttttctgtgcttattatagaactgagattataaaaaacattcagttttataatttttgtccaaaaaattcaatcttacagcatttaccattgcataaatgtgccatcattttaaaccattctcatattgctagactttatttcttccatacttattttgctattttcactgtgatgaatatgtttgttcctaaatctttgtccaatattgctttactatttccttcaagtaaatgcatagatggagaatacatgtgtcatagatggaaaatgctatgtcaaaattcatgggcatttttatgactcttgctgtattgtccaacagcttttcagaaaggtaccaatttacaatccttcatgaaggattcactacatgttctcccctactgagtgttagcttcattcacttcacatatttgagagata

SEQ ID NO: 2207 - DNA, 325 bp, Homo sapiens
gaaggaaatagtaaagcaatattggacaaagatttaggaacaaacatattcatcacagtgaaaatagcaaaataagtatggaagaaataaagtctagcaatatgagaatggtttactatttccttcaagtaaatgcatagatggagaatacatgtgtcatagatggaaaatgctatgtcaaaattcatgggcatttttatgactcttgctgtattgtccaacagcttttcagaaaggtaccaatttacaatccttcatgaaggattcactacatgttctcccctactgagtgttagcttcattcacttcacatatttgagagata

SEQ ID NO: 2208 - DNA, 770 bp, Homo sapiens
cactaatgtctcgctctgtcacccatgctggaatatagtggcacaatcatggctcactgctccctcaacctcccaggctcaagcaatcctcccacctcagccttccgagtggctaggacttgggactacagacatgtaccaccatccccagctaatgtttttattttttgtagagatggggtttcatcatgttgcccaggctggtctcgaactcctgggctcaagcgatccgcccaccttggcctcccaaagggctgggattacaggcatgagccaccgtgtcctgctctgattttctaccatactgataacaatggttaatgttttgatagatattccaaaattttttctgtgcttattatagaactgagattataaaaaacattcagttttataatttttgtccaaaaaattcaatcttacagcatttaccattgcataaatgtgccatcattttaaaccattctcatattgctagactttatttcttccatacttattttgctattttcactgtgatgaatatgtttgttcctaaatctttgtccaatattgctttactatttccttcaagtaaatgcatagatggagaatacatgtgtcatagatggaaaatgctatgtcaaaattcatgggcatttttatgactcttgctgtattgtccaacagcttttcagaaaggtaccaatttacaatccttcatgaaggattcactacatgttctcccctactgagtgttagcttcattcacttcacatatttgagagata

SEQ ID NO: 2209 - DNA, 386 bp, Homo sapiens
atgttgaacaaatgcccttttcctgagcttttggttgagattgttgccttgaggagaggcttagggtgcaagacaaatggatcttctgggaaatggaggctcccggtgaacccgcagcatccgtgtcctgtgtatctggagtcgtcctggcagcgacaggaagtcataacatcctctcttcaaataaatctccctctggctgcctcccggctgggcagcgcatgaagcattgaagctccaatcaagctgcttgcatcccacgggaggaagcaactggctcggccccagaagaaacaggccagcctttgaagtgccagggaaagagctgcccgcaggccttgccttccccttcagaaactcgggcgtgtgccactgtgaacgggggc

SEQ ID NO: 2210 - DNA, 497 bp, Homo sapiens
tgcagtgtgcttctttcagccctgtggacacaaatttaaacagaggctttatataagtagagcaagaagaaatagttgagtcgtttgtccaaagacctccttaaagtctagtggaattagtctactgtcattttgtgttcacttaaaaaaaaagttgtgatccctatttagctgctaatcagtgataaagcatcagtgtattcaccaggtccaacccttgaggccaaagactgcaaaaggaaggtgtcagggaaaagacacagacttgttttgtgactggcatatttcaatgcttccagcatcttgacatgctcttccacttaatgctgatgccacgtggatcaataatctggctgaggtcttctttcccatgcctgatggcccaggattcctctgccctcttatgtttcaaccgagttcttactttgataagggaggctccagtaatggccttcttagccaggttgtttcctgaataagaaatcatttgggtaaaa

SEQ ID NO: 2211 - DNA, 354 bp, Homo sapiens
aaatgtttgtataaacaacaaaccaatcatccaggacttccagggcgaggcccgaggagcacacactcagaggactgctggcttctgcagggccacatcctgccccgggaccctcctcctcccctttctcctcctttctccctcccctcctcttggcacccacacaccaacattccaaacctacaagaaattccttttaatgggaagctaccccttccctaagtagcttctcagtgctgagctccaaggtagcctgggctaatgggtgtgtgaggccaagaaaaagggagctggaagctgaatcagccaaggcctgtgcccagccaggagccctgatctccaaggggaaaagcg

SEQ ID NO: 2212 - DNA, 340 bp, Homo sapiens
aaaactcagccagcctcatgtccaacatctcatgggcttgcctccagttctctgcactttccaaagtgatagctgactaatcaaagatattgtgataatgaattgcctaactacgcagcctgccttcttctcttctagcatgtatttgattaggggcctgctgaaaccaattaagtaaataattcagtatgactttatgaactacctactacatgcatggcttaacacaggcagcctcaagaggctgagaaccaaagacggaaaaagcacaacttatagtccagctatagagacagacttttaggtaagtaatcataccttgaggtgagaaaaaaaaaaa

SEQ ID NO: 2213 - DNA, 870 bp, Homo sapiens
gccagtcttctaaggatggactcttgggtgttgtcaattcttctaagcaaagcatcagtgaacactttgatgaaaggagaatgccttccttagatacctatgtaactgtcttctctttgccaagtgggtctctgctcaaatgttaccttcttagagtggccctctctgaccactgaagttgaggcggcctccccttcactctccatttcatcccattctctgatcatgcccagaaattaggagtggtggttccatatggtaaaagactttggtttgttcattgctcggttcccagaccctgcaacagtgcctggcacagaataggtgctcagatgtttattgaatgaacgacaccccgttcacccccaaagcttcttgtttcttggggttcctacttatcagagggtgcagaagttctgagtatttatatattaggcattcactctcttatttccttttttccactttctttttccttaaaacagctactcacccaccactgagagaaaaaaatagctcaggttccttcctgacccaaatttctcctcctcctttccacatgcatctgctcacaccaacgtctgtgtgctacattggatcaacaatgaaaaatgccaacttcactcctacctcttccttccctccatttctttccacctctcaacctctctgtaaaacaggtgataagctataaatgaacatttacctccctgtaggcatctcttacaagaaatttgggccaaaaagatccccctatgaattttcatgctttgaaaaagatttattgggcaaatgagtacgtatcacgaaggaaatggaaaatctactgagcctcatggggtggtgctggggaggagggagtagatggat

SEQ ID NO: 2214 - DNA, 413 bp, Homo sapiens
ccacaagaaaagggggtgagccccggaacacatatttaggaacttctttcctgtcctgactatgagctttctgagaatacggcgaatacttcaccattacacaacagagatgactgagcaagtgtggggagcatggccagctggactcgacaggattctttacccaatattaaaaacaggtcagtttttggccaggcgcggtggctcacgcctgtaatcccagcactgtgggaggccgaggtgggtggatcacctgaggtctggagttcgagaccagcctggcctacatggtgaaaccccatctctactaaaaatacaaaaaattagccgggtatggtgggaggcgcctgtaatcccagctacgtgggaggctgaagcaggggaattgcttgaacccgggggacggaggttgt

SEQ ID NO: 2215 - DNA, 787 bp, Homo sapiens
ccttcccctgtgcctaaggagaattacagatgaccacgtgtgtgttccttgccatctgggaaccagtgcatagtcatggtagcaatagcaaacacttactgggcactttttgagtggtttacatgtatcagctcacttggtccttgctacggtctgcatgtttgtgtagcctcaaaagtcatatgttgaaacctaatcaccagtgggatggtgttagaaagtggggcctttgggaagtaattaagtcatgaaagacctaccctcataaatgggacttatgcccttattttttataaaaggccccaaagacctcctttcaacacatgaagacacagtgagaagatggccatctatgaatggggaagcaggccctcgccaggcatcaaatctgctggcaccttgatcttactttccagcctccaaaactgtaaaataaatttctgttgttcataatctatgcagtttttggtattttattatagtagctcaaatggattaagacagtcctcacaacaattattcacctcattttacagatggataaactgagaggcagagaggttatgaaatatgtgaagcaaatagtaagtggcacagtagccctaggcagtgaagcgccaaagcccactctcttaaccaccgtgctggcacattgctcatatattttttacatttgtctatctgatggagagtttgtttgccctattgatttttatatcccaggactctacatgatgactgctatagtatgtgctcaataaaattatgatgaattaattagtgacaa

SEQ ID NO: 2216 - DNA, 316 bp, Homo sapiens
gatctagctttagaagaaaattgtcttcataaaatgaataatgaaaatacagatagaaaggtgaaatgattaggatgacctctagaaaaaattttgaacttccatagggatgacttgaaaactgatagcaggacaggactttatgagtctgtagtgaaggaacaaaggcataatcagtgagaatcaaaagatcagaagatctgggtgttttggaggcattataggaggaattgaaattttaaatcaggaatccaggtttaatttaaaaaatatagtagggaatagtgtagtgggctttatttaataagtgagggga

SEQ ID NO: 2217 - DNA, 388 bp, Homo sapiens
aataggatagtaatggattttttagaacattggtgttcatgtgtgttaaaaccatacatgtgagcaacaaacctagagcatgctgtggggttctaggaaaatttaaatccacagtatacatggtatattatgtatgatttcgatagttttccatgggtccctttggaaagggagacacctagcctacaggttcttcctttaaaatcaggacctgcaagggaagatgtcttttcatcgtaactgtttaataatcttgaagtaaatatgttaaggcatgaaacataaagatatgatagcttttttcaataggtatttgtccatatttgttgcatagcaggcaccataataagtgctttacatgtattaactcatctaattctcacatgca

SEQ ID NO: 2218 - DNA, 240 bp, Homo sapiens
ccgcagttccttctaatccatcaaatagtaaaacacacaaacacacaaatttattctattaaagtagataaaattgttaggtaagtataatacgtaggccatgaagggggaatagcatctatttaacaattctttattattcagaggatcatagaagtactgttgcctgcctgttgcattcaatcaagttggataaaatactgatttggaggaaactatgaaagtatttgcttacacctt

SEQ ID NO: 2219 - DNA, 346 bp, Homo sapiens
agccctgagagaagctgagggcttcaagcaatgagatttgagcctacctcccttcatcaaaagtgcagctagaaaaacttggagaagcaaccagaacgggagttgggagggtaatacttttacatcaaaacaacactagctttattggctgtaataagagcaaagtatgtaagtagaaatgatattaatctgtcatgcatatcacttctcaagtggttcctcaacaatagtgttaatcaagctttgccctacttttatcggaaacctggtgaagaatagctttgacatttatcagacataggacactaagaaaattgccatatgtataaataaatttatgccttga

SEQ ID NO: 2220 - DNA, 379 bp, Homo sapiens
ccagcctccttcatcacctccttgatccccttatcctcccctcggccctgcacctcctctctttcctgactcccacaccagagctaggcctgccctgggcacttttgcctccaggaatgaatgaggctcacagcccgaaggtgctccaagtcttggctaccttccctcagtggctgccctggcaaaggtcctgccgcagggaatcacacaaagtccagcaaagcaactggtctttcctgtccattctcacccttcccaagaaagtgtgaagagttacaatactcaggcagagctggaaaaatcatacccttttagagaatccacaagaattattggaggtgctttcactgacctgccctgccttgggtttttcaagcta

SEQ ID NO: 2221 - DNA, 747 bp, Homo sapiens
tcagcttggaaggttcactatggaagaaaatgtacccaggcaaacatccagtgacttaccacctcgccagaatagtcctcctcctgatgtgtgttttggactccattctttttataccaaacacagccctgcctcaccctcaaattctttctagtaaattatgctttggtagcatgacttcaatctacaacaaggaaatattaaaagaaccacatggcattcatatttatcataagaatgttgtagaggatgttggtcactgcacaatacgatgtctcctactagacagtagaaattatctttggtttcagccccagggatagttgtacttccccttagcagcctgtttatttttagatacacaccatgaaccatagattcttggcatttgcagatttgatctttgcatgttcagctattcaaaagagacatgtcagttgcttaactcacaaccactgtaaagccaggatgtgatatgaaactcttgctaatgagtgaacctgacatctcagtgcacgttaggacagctttgctgttcatcaacacgtgctgagggactgtcactgttcttcgccacactgtcctgtctgattccaccatcctcctcgggctggttgctaaaaagctcaaagagagttttatgccccgcttctgactgtatattctgggctctaacctcatccttcgtaacgattccatcccaatgcaaataagttagagtttctaggtgcccttcccaagggccca

SEQ ID NO: 2222 - DNA, 1451 bp, Homo sapiens
acggtctgcgcatgctcgccaggatacccctcgttaaaggcaaggcggcttctggctcttccgcaggctcagttatgggttcctgtgtgcttagtcatcgggtccgacacaggctggactgatctggggagccgcgaagggcctgccttcacaaagggacgtaacgcaagtactgcgggcagtgtttgaatatggccctgaacaatgtgtccctgtcctccggtgatcagaggagcagggtggcctaccgctcttcccatggcgacctcagaccgcgggcgtcagcgttggcgatggtctccggagacggcttcctcgtttccaggcctgaagcgattcatctaggacctcggcaggcggtgcgaccaagcgttcgggccgagagccgtcgagtggatggtggcggccggagcccaagggaaccagatggccggggccggagccgccaagccagattctcaccttacccaatccctgccgttgaacccgatctcctaagaagtgtgctgcaacagcgtttgattgcattaggaggtgttatcgcagctcgaatttcagtttaaacgaacacctttcctctggccctcacttagcttgtgaacaggcctttttaaaatcctttcttggtgtagcagcaatcgtgttgttttatttttagatggatgtattttcatttaatacgtgggagttatatgaatatgtcctagcactaagggaagtgtaacagttgattgatttaggtggttttatgcagccagaacgattggatcaggaaaggtgtggaagggatattcttaggtcgtcacaaagctgagctgatgggagcaccctccccagaggtcaacaatccattcgttaactcagacacttaacctttacctttacttctgttggcgaaaaagaagtgctcctttttattacactgatttatccttccatcttttccttggcatttaccatcttccatctcccccttcacttttttcagatatgtctacaaacagactccaatctcagtcgcactaaaaataagaacaaaacctaaaccttacagttctttcaaattattaaatcaatttattattcctttctttggcaaaggttccaaatttttactttatatttgtaattttactatttgcattcagtcccagcgcattaatctgaatctgctgtcctaaaatacactggtgaaaacattacttgtacaatctcctatcagaaaactgttcatctactcactgtagtgccctccttgaaatgtgtgtttgttcattcaactaacaatatttggggatccctgtagtaaacactgtatgaattttacacagtctggccatcaagaaagatcacggagtatattctagatggggaggctactaagtgaataggaatcaccacgctgggctgtttattaggtacagtaataaacataagtactggttgcagtg

SEQ ID NO: 2223 - DNA, 700 bp, Homo sapiens
  misc_feature (700)..(700): n is a, c, g, or t
acggtctgcgcatgctcgccaggatacccctcgttaaaggcaaggcggcttctggctcttccgcaggctcagttatgggttcctgtgtgcttagtcatcgggtccgacacaggctggactgatctggggagccgcgaagggcctgccttcacaaagggacgtaacgcaagtactgcgggcagtgtttgaatatggccctgaacaatgtgtccctgtcctccggtgatcagaggagcagggtggcctaccgctcttcccatggcgacctcagaccgcgggcgtcagcgttggcgatggtctccggagacggcttcctcgtttccaggcctgaagcgattcatctaggacctcggcaggcggtgcgaccaagcgttcgggccgagagccgtcgagtggatggtggcggccggagcccaagggaaccagatggccggggccggagccgccaagccagattctcaccttacccaatccctgccgttgaacccgatctcctaagaagtgtgctgcaacagcgtttgattgcattaggaggtgttatcgcagctcgaatttcagtttaaacgaacacctttcctctggccctcacttagcttgtgaacaggcctttttaaaatcctttcttggtgtagcaaaaaaattcactggccgtcgtttacaactgtgtgactggcccctgcgttacccactttcgctttgn

SEQ ID NO: 2224 - DNA, 1986 bp, Homo sapiens
acggtctgcgcatgctcgccaggatacccctcgttaaaggcaaggcggcttctggctcttccgcaggctcagttatgggttcctgtgtgcttagtcatcgggtccgacacaggctggactgatctggggagccgcgaagggcctgccttcacaaagggacgtaacgcaagtactgcgggcagtgtttgaatatggccctgaacaatgtgtccctgtcctccggtgatcagaggagcagggtggcctaccgctcttcccatggcgacctcagaccgcgggcgtcagcgttggcgatggtctccggagacggcttcctcgtttccaggcctgaagcgattcatctaggacctcggcaggcggtgcgaccaagcgttcgggccgagagccgtcgagtggatggtggcggccggagcccaagggaaccagatggccggggccggagccgccaagccagattctcaccttacccaatccctgccgttgaacccgatctcctaagaagtgtgctgcaacagcgtttgattgcattaggaggtgttatcgcagctcgaatttcagtttaaacgaacacctttcctctggccctcacttagcttgtgaacaggcctttttaaaatcctttcttggtgtagcagcaatcgtgttgttttatttttagatggatgtattttcatttaatacgtgggagttatatgaatatgtcctagcactaagggaagtgtaacagttgattgatttaggtggttttatgcagccagaacgattggatcaggaaaggtgtggaagggatattcttaggtcgtcacaaagctgagctgatgggagcaccctccccagaggtcaacaatccattcgttaactcagacacttaacctttacctttacttctgttggcgaaaaagaagtgctcctttttattacactgatttatccttccatcttttccttggcatttaccatcttccatctcccccttcacttttttcagatatgtctacaaacagactccaatctcagtcgcactaaaaataagaacaaaacctaaaccttacagttctttcaaattattaaatcaatttattattcctttctttggcaaaggttccaaatttttactttatatttgtaattttactatttgcattcagtcccagcgcattaatctgaatctgctgtcctaaaatacactggtgaaaacattacttgtacaatctcctatcagaaaactgttcatctactcactgtagtgccctccttgaaatgtgtgtttgttcattcaactaacaatatttggggatccctgtagtaaacactgtatgaattttacacagtctggccatcaagaaagatcacggagtatattctagatggggaggctactaagtgaataggaatcaccacgctgggctgtttattaggtacagtaataaacataagtactggttgcagtgactttttttttttttttttcatcataatactgcactatcctggttcttctcttacctggctgatcactccttatttgctgttatttttgttctcttaaccatacatttcccaatgtttaaagggtggtattttgagaaagttaatgggttttgtaagtgccagctctttatataagcaggtagactagctttttcccagcagacgcttgtctgtttagacttccttaaaataattatcttcaaataaagcaaaatctccatacaccacatagtattgaattgttataactacgtgttaagaagaatgttgagtaaacaagatagcttccataagagggtgattaatatagtgagaattctagaaaccagatcataggaagaatgattgaaagaatagtaatagctaccttttattgagtgctatgtgcaagtcagtgtgctaggacttttattgtttatagagatatttattgagaacttactctgtacctgctactgcctgcggtaagcacttagaataaagtggtgaacatga

SEQ ID NO: 2225 - DNA, 2265 bp, Homo sapiens
acggtctgcgcatgctcgccaggatacccctcgttaaaggcaaggcggcttctggctcttccgcaggctcagttatgggttcctgtgtgcttagtcatcgggtccgacacaggctggactgatctggggagccgcgaagggcctgccttcacaaagggacgtaacgcaagtactgcgggcagtgtttgaatatggccctgaacaatgtgtccctgtcctccggtgatcagaggagcagggtggcctaccgctcttcccatggcgacctcagaccgcgggcgtcagcgttggcgatggtctccggagacggcttcctcgtttccaggcctgaagcgattcatctaggacctcggcaggcggtgcgaccaagcgttcgggccgagagccgtcgagtggatggtggcggccggagcccaagggaaccagatggccggggccggagccgccaagccagattctcaccttacccaatccctgccgttgaacccgatctcctaagaagtgtgctgcaacagcgtttgattgcattaggaggtgttatcgcagctcgaatttcagtttaaacgaacacctttcctctggccctcacttagcttgtgaacaggcctttttaaaatcctttcttggtgtagcagcaatcgtgttgttttatttttagatggatgtattttcatttaatacgtgggagttatatgaatatgtcctagcactaagggaagtgtaacagttgattgatttaggtggttttatgcagccagaacgattggatcaggaaaggtgtggaagggatattcttaggtcgtcacaaagctgagctgatgggagcaccctccccagaggtcaacaatccattcgttaactcagacacttaacctttacctttacttctgttggcgaaaaagaagtgctcctttttattacactgatttatccttccatcttttccttggcatttaccatcttccatctcccccttcacttttttcagatatgtctacaaacagactccaatctcagtcgcactaaaaataagaacaaaacctaaaccttacagttctttcaaattattaaatcaatttattattcctttctttggcaaaggttccaaatttttactttatatttgtaattttactatttgcattcagtcccagcgcattaatctgaatctgctgtcctaaaatacactggtgaaaacattacttgtacaatctcctatcagaaaactgttcatctactcactgtagtgccctccttgaaatgtgtgtttgttcattcaactaacaatatttggggatccctgtagtaaacactgtatgaattttacacagtctggccatcaagaaagatcacggagtatattctagatggggaggctactaagtgaataggaatcaccacgctgggctgtttattaggtacagtaataaacataagtactggttgcagtgactttttttttttttttttcatcataatactgcactatcctggttcttctcttacctggctgatcactccttatttgctgttatttttgttctcttaaccatacatttcccaatgtttaaagggtggtattttgagaaagttaatgggttttgtaagtgccagctctttatataagcaggtagactagctttttcccagcagacgcttgtctgtttagacttccttaaaataattatcttcaaataaagcaaaatctccatacaccacatagtattgaattgttataactacgtgttaagaagaatgttgagtaaacaagatagcttccataagagggtgattaatatagtgagaattctagaaaccagatcataggaagaatgattgaaagaatagtaatagctaccttttattgagtgctatgtgcaagtcagtgtgctaggacttttattgtttatagagatatttattgagaacttactctgtacctgctactgcctgcggtaagcacttagaataaagtggtgaacatgaaaaaagtatgtgttcctaaggaactttatatgttatttgattctcacagcagcccataagaggggtactctactttcattttgttactgaaaaacagcgtgaaggagataaactttccaaggtcatatagctagtaaatgatagagccctgcagcctttcaaatgaggttcctcatctgaatgcaaaaaaaatgacttgagtaactattttctcaattttcccaaggataatatataactaattttttttcagataactaaaaagaagttagtttgtaa

SEQ ID NO: 2226 - DNA, 1713 bp, Homo sapiens
acggtctgcgcatgctcgccaggatacccctcgttaaaggcaaggcggcttctggctcttccgcaggctcagttatgggttcctgtgtgcttagtcatcgggtccgacacaggctggactgatctggggagccgcgaagggcctgccttcacaaagggacgtaacgcaagtactgcgggcagtgtttgaatatggccctgaacaatgtgtccctgtcctccggtgatcagaggagcagggtggcctaccgctcttcccatggcgacctcagaccgcgggcgtcagcgttggcgatggtctccggagacggcttcctcgtttccaggcctgaagcgattcatctaggacctcggcaggcggtgcgaccaagcgttcgggccgagagccgtcgagtggatggtggcggccggagcccaagggaaccagatggccggggccggagccgccaagccagattctcaccttacccaatccctgccgttgaacccgatctcctaagaagtgtgctgcaacagcgtttgattgcattaggaggtgttatcgcagctcgaatttcagtttaaacgaacacctttcctctggccctcacttagcttgtgaacaggcctttttaaaatcctttcttggtgtagcagcaatcgtgttgttttatttttagatggatgtattttcatttaatacgtgggagttatatgaatatgtcctagcactaagggaagtgtaacagttgattgatttaggtggttttatgcagccagaacgattggatcaggaaaggtgtggaagggatattcttaggtcgtcacaaagctgagctgatgggagcaccctccccagaggtcaacaatccattcgttaactcagacacttaacctttacctttacttctgttggcgaaaaagaagtgctcctttttattacactgatttatccttccatcttttccttggcatttaccatcttccatctcccccttcacttttttcagatatgtctacaaacagactccaatctcagtcgcactaaaaataagaacaaaacctaaaccttacagttctttcaaattattaaatcaatttattattcctttctttggcaaaggttccaaatttttactttatatttgtaattttactatttgcattcagtcccagcgcattaatctgaatctgctgtcctaaaatacactggtgaaaacattacttgtacaatctcctatcagaaaactgttcatctactcactgtagtgccctccttgaaatgtgtgtttgttcattcaactaacaatatttggggatccctgtagtaaacactgtatgaattttacacagtctggccatcaagaaagatcacggagtatattctagatggggaggctactaagtgaataggaatcaccacgctgggctgtttattaggtacagtaataaacataagtactggttgcagtgactttttttttttttttttcatcataatactgcactatcctggttcttctcttacctggctgatcactccttatttgctgttatttttgttctcttaaccatacatttcccaatgtttaaagggtggtattttgagaaagttaatgggttttgtaagtgccagctctttatataagcaggtagactagctttttcccagcagacgcttgtctgtttagacttccttaaaataattatcttcaaataaagcaaaatctccata

SEQ ID NO: 2227 - DNA, 1065 bp, Homo sapiens
cggggcgacctacaggacctcgttactggcatttaccatcttccatctcccccttcacttttttcagatatgtctacaaacagactccaatctcagtcgcactaaaaataagaacaaaacctaaaccttacagttctttcaaattattaaatcaatttattattcctttctttggcaaaggttccaaatttttactttatatttgtaattttactatttgcattcagtcccagcgcattaatctgaatctgctgtcctaaaatacactggtgaaaacattacttgtacaatctcctatcagaaaactgttcatctactcactgtagtgccctccttgaaatgtgtgtttgttcattcaactaacaatatttggggatccctgtagtaaacactgtatgaattttacacagtctggccatcaagaaagatcacggagtatattctagatggggaggctactaagtgaataggaatcaccacgctgggctgtttattaggtacagtaataaacataagtactggttgcagtgactttttttttttttttttcatcataatactgcactatcctggttcttctcttacctggctgatcactccttatttgctgttatttttgttctcttaaccatacatttcccaatgtttaaagggtggtattttgagaaagttaatgggttttgtaagtgccagctctttatataagcaggtagactagctttttcccagcagacgcttgtctgtttagacttccttaaaataattatcttcaaataaagcaaaatctccatacaccacatagtattgaattgttataactacgtgttaagaagaatgttgagtaaacaagatagcttccataagagggtgattaatatagtgagaattctagaaaccagatcataggaagaatgattgaaagaatagtaatagctaccttttattgagtgctatgtgcaagtcagtgtgctaggacttttattgtttatagagatatttattgagaacttactctgtacctgctactgcctgcggtaagcacttagaataaagtggtgaacatga

SEQ ID NO: 2228 - DNA, 2086 bp, Homo sapiens
tatactataacacttggctatatgtaggcaatgtcactactgggcaaatacacttactgtgttctagaggcagccctttcttatgcagaaaatacaatacgcactgcatgagaagcttgagagtggattctaatccaggtctgtcgaccttggatatcatgcatgtgggaaggtgggtgtggtgagaaaagttttaaggcaagagtagatggccatgttcaactttacaaaatttcttggaaaactggcagtattttgaactgcatcttctttggtaccggaacctgcagaaacagtgtgagaaattaagtcctggttcactgcgcagtagcaaagatggtcaaggccatggaaaaagcagaaatttaccaagaaagctgatacccatgtatagttcccactcatctcaaatacatctgctatctttttaagctaagtcctagacatatcggggataacatgggggttgattagtgaccacagttatcagaagcagagaaatgtaattccatattttatttgaaacttattccatattttaattggatattgagtgattgggttatcaaacacccacaaactttaattttgttaaatttatatggctttgaaatagaagtataagttgctaccattttttgataacattgaaagatagtattttaccatctttaatcatcttggaaaatacaagtcctgtgaacaaccactctttcacctagcagcatgaggccaaaagtaaaggctttaaattataacatatgggattcttagtagtatgtttttttcttgaaactcagtggctctatctaaccttactatctcctcactctttctctaagactaaactctaggctcttaaaaatctgcccacaccaatcttagaagctctgaaaagaatttgtctttaaatatcttttaatagtaacatgtattttatggaccaaattgacattttcgactattttttccaaaaaagtcaggtgaatttcagcacactgagttgggaatttcttatcccagaagaccaaccaatttcatatttatttaagattgattccatactccgttttcaaggagaatccctgcagtctccttaaaggtagaacaaatactttctatttttttttcaccattgtgggattggactttaagaggtgactctaaaaaaacagagaacaaatatgtctcagttgtattaagcacggacccatattatcatattcacttaaaaaaatgatttcctgtgcaccttttggcaacttctcttttcaatgtagggaaaaacttagtcaccctgaaaacccacaaaataaataaaacttgtagatgtgggcagaaggtttgggggtggacattgtatgtgtttaaattaaaccctgtatcactgagaagctgttgtatgggtcagagaaaatgaatgcttagaagctgttcacatcttcaagagcagaagcaaaccacatgtctcagctatattattatttattttttatgcataaagtgaatcatttcttctgtattaatttccaaagggttttaccctctatttaaatgctttgaaaaacagtgcattgacaatgggttgatatttttctttaaaagaaaaatataattatgaaagccaagataatctgaagcctgttttattttaaaactttttatgttctgtggttgatgttgtttgtttgtttgtttctattttgttggttttttactttgttttttgttttgttttgttttgttttgcatactacatgcagttctttaaccaatgtctgtttggctaatgtaattaaagttgttaatttatatgagtgcatttcaactatgtcaatggtttcttaatatttattgtgtagaagtactggtaatttttttatttacaatatgtttaaagagataacagtttgatatgttttcatgtgtttatagcagaagttatttatttctatggcattccagcggatattttggtgtttgcgaggcatgcagtcaatattttgtacagttagtggacagtattcagcaacgcctgatagcttctttggccttatgttaaataaaaagacctgtttgggatgta

SEQ ID NO: 2229 - DNA, 2372 bp, Homo sapiens
tatactataacacttggctatatgtaggcaatgtcactactgggcaaatacacttactgtgttctagaggcagccctttcttatgcagaaaatacaatacgcactgcatgagaagcttgagagtggattctaatccaggtctgtcgaccttggatatcatgcatgtgggaaggtgggtgtggtgagaaaagttttaaggcaagagtagatggccatgttcaactttacaaaatttcttggaaaactggcagtattttgaactgcatcttctttggtaccggaacctgcagaaacagtgtgagaaattaagtcctggttcactgcgcagtagcaaagatggtcaaggccatggaaaaagcagaaatttaccaagaaagctgatacccatgtatagttcccactcatctcaaatacatctgctatctttttaagctaagtcctagacatatcggggataacatgggggttgattagtgaccacagttatcagaagcagagaaatgtaattccatattttatttgaaacttattccatattttaattggatattgagtgattgggttatcaaacacccacaaactttaattttgttaaatttatatggctttgaaatagaagtataagttgctaccattttttgataacattgaaagatagtattttaccatctttaatcatcttggaaaatacaagtcctgtgaacaaccactctttcacctagcagcatgaggccaaaagtaaaggctttaaattataacatatgggattcttagtagtatgtttttttcttgaaactcagtggctctatctaaccttactatctcctcactctttctctaagactaaactctaggctcttaaaaatctgcccacaccaatcttagaagctctgaaaagaatttgtctttaaatatcttttaatagtaacatgtattttatggaccaaattgacattttcgactattttttccaaaaaagtcaggtgaatttcagcacactgagttgggaatttcttatcccagaagaccaaccaatttcatatttatttaagattgattccatactccgttttcaaggagaatccctgcagtctccttaaaggtagaacaaatactttctatttttttttcaccattgtgggattggactttaagaggtgactctaaaaaaacagagaacaaatatgtctcagttgtattaagcacggacccatattatcatattcacttaaaaaaatgatttcctgtgcaccttttggcaacttctcttttcaatgtagggaaaaacttagtcaccctgaaaacccacaaaataaataaaacttgtagatgtgggcagaaggtttgggggtggacattgtatgtgtttaaattaaaccctgtatcactgagaagctgttgtatgggtcagagaaaatgaatgcttagaagctgttcacatcttcaagagcagaagcaaaccacatgtctcagctatattattatttattttttatgcataaagtgaatcatttcttctgtattaatttccaaagggttttaccctctatttaaatgctttgaaaaacagtgcattgacaatgggttgatatttttctttaaaagaaaaatataattatgaaagccaagataatctgaagcctgttttattttaaaactttttatgttctgtggttgatgttgtttgtttgtttgtttctattttgttggttttttactttgttttttgttttgttttgttttgttttgcatactacatgcagttctttaaccaatgtctgtttggctaatgtaattaaagttgttaatttatatgagtgcatttcaactatgtcaatggtttcttaatatttattgtgtagaagtactggtaatttttttatttacaatatgtttaaagagataacagtttgatatgttttcatgtgtttatagcagaagttatttatttctatggcattccagcggatattttggtgtttgcgaggcatgcagtcaatattttgtacagttagtggacagtattcagcaacgcctgatagcttctttggccttatgttaaataaaaagacctgtttgggatgtaaaaaaaaaaaaaaaaaaaaaaaaggagagcgaggacgggcaaaaacagcagagaggagaaaggaagagcaacagaaagagagaacgagagaggaggagcaggccagcgaggcggaggagagggaagcaagcagcgggcgcgcggcgaagacagggcgcggcgcagcagcaggagagggggggaggcgggcgggacgggagggggggacccgagaggagcgggaagaggaggggcgggcaggaagggccgcggaggaggggaggaacgaagcgaagcggggaggaga

SEQ ID NO: 2230 - DNA, 467 bp, Homo sapiens
attattagaagactagattattgctcagcagtaaccactcctttcccacaaactcccctctctaggaggaatgtacctccccacccattcctgttaggcttggccaggtgaatcgctttggccaatagaatgtaactgacaaggtgagcagagatttgcagtgggcttgtgcttggtgctggtcctccggggctcctgcctttagccaggggaagcacactccccagcccctccttagccctctggccctggggagaatgagaggcatgtggcacagtcctggacccagccgtggctgggagcaagcctggaagcttgagcgagagataaatgcttggtctttttgtttgagactaagtctcgctctatcgcccaggctggagtgcagtgagccgagactgcagcattgcactccagcctgcgcaacaagagtgaaactgtctcataaaacaaaacaaaacaataca

SEQ ID NO: 2231 - DNA, 659 bp, Homo sapiens
gggtttcaccgtattggtcagacttgtcttgaactcatgacctcttgatccacctgccttggcctcccaaggtgctgggattacaggcgtgagccactgtgcccagctgatttatgtttttcaaagatctcttcagctgctgtggtgagagtggaagcagcgagatcagttgggggctttactgtggcccagatgagaaatgaggatagtctcctttggtttaatttttttttttttgagacgggatctcactctgttgcccagtctagagtgcaatggagcaatcatggctcactgcagcctctaccttccagcctcaaggaccctcctgcctcagcctcctgaggaggatagtcttcttattctgaaatggttaggatgagcacagcagaaagaaaggaggagtgggtccaaacctcatacctgtctccttctgtctcatcccatctgctgccaggattcccatggtgagggatttcctagtggagtcaggagatataggtgaatgggtgggtgtcagattcactacagtggcagaaaggaggaggagatgaaggtacccagtactgtggccacccaagtccccttttacaccaccaatcttctaacctttcctgaacacgaatgatgaggatgcagattaaaaacaacaaatatgc

SEQ ID NO: 2232 - DNA, 393 bp, Homo sapiens
taaaaaataaatttaaaaaagaggtaaatgtggactattatacagcctccttgatgatttgtatgcacaaaggcctaagaaaggctctgagaagtcctgtaattagatttaaaaaataaacaaacagaaacctgtaaaacctagcattttccaaacttacttgaccaaagaccccttttttctcttagcacctgttgatagcttatggccatcctatggaacttatggctacatgttcttgtttacttattatgtcactggaatataagctgtgtgtaagcagtaatactgtcttgttcagtacagtatccttgacacctagaacagtatctgacatggtgtttgatccatatttgatgaatgaaaataaactgaacaagtgaatgaactctg

SEQ ID NO: 2233 - DNA, 255 bp, Homo sapiens
gattcgatggattcatagatgtatgtatgcttaggtaggtaaatgaattggtacctatataccttctttatcctattttaccctctcagaagtcattatcttatgaaagcatcaggctttctccagaaaatgtctcacatgcatgtttgatcagtatttctttctgttatataaagctttgtcttctattcccattgtaaatagacatgcttaggaaaataatactttggaaatgttgacatatcccataaaaat

SEQ ID NO: 2234 - DNA, 419 bp, Homo sapiens
gttaatttttgctacatttacaagattttaatattgcttcctatcacaatatattttttaactagttacttttcacatttcaaaaaatcgtttcaaaaatgatacctaattttaaggatgtattgccaaagcttcaagaaatcgaataaaattaaagacatatatcaaccagttggttttctagatatagaggttgtgaaaatcaatttacactgcagaaaaacatgcataatgggccaatttgtaacatagattcaggaaacaaaatagtaaaaaacatgagcctatacaaataaaaggaaaatatttttccaagaatgaattctatggattataaatttacttgtatccaagaaagttataaagaagatatttcagaggattaagattaaaaattaaagataattcaaaatcagaat

SEQ ID NO: 2235 - DNA, 424 bp, Homo sapiens
atcaattgaagaagggatgaatcagaagcattagctaaagtagtggctttctttgatggtgttttaccaagaggaggaatcagatcaggtcccaccacagtatgcaggctgagatgattcatcttttccaaaaactgagactatcaggagaacaaagtaattcttctttttctgcatatggctatgctgtattcttcattacttcatgagtgtatgaatttgctaggactgctgttacaaagtgctacagactgggtggcttcactatggaaatttactttctcacagtcccggaggtcagaattccaagatcaaggtgtcagcagagttgattccttttgaggcctccctccttgacttatagatggtcaaggagatgtaccttattatgtttcctctgtaggtgtttgtgttcagagttgat

SEQ ID NO: 2236 - DNA, 596 bp, Homo sapiens
cttttgatttgttttaaatttgttttcagaaccatggcctgtggtcacttaatcagcaaccctggttcggtaagtggtatgttttctatagcattattataggtctacctgcaaggtggtgcgctatgggcagtaaacgtttctggaaaaacaactagtatagtagtgtgggaagtcgactttgaaaaattcactcaacctctattgcctcaatttccttatttgtgaagaggagggaatccagatatctctgagggtgtacttaaaataaaaatctgtggaaccaaatatattttttgttctttctctatttttttaagcatctgtctgacctatgtagcccaaaggaggtctctgctctgtggttacttttgaggactatcttgccaagtggtacttatttttccaaaaagacattagcagaagctcaacgaagtgatctgcaaataatttaaaatgcagtaatttttagcactggaagattagccatttgccattgggtcttttcaatgcaagcaggagtgttagagtaatgttaaaaacaccataaagcccatgagaacacagagaatgctctccagccatacagtttcagc

SEQ ID NO: 2237 - DNA, 895 bp, Homo sapiens
cagacactggggtctacttgagggtggagggtgagaaaaggaagagaaacagaaaagataactattgggtactaggtttaatacctgggtgatgaaataatctgtacaataaccccctgtgacaccagtttacctatgtaacaaatgcccctaaacttaaaataaaataaaaaataaaaaaaattataaatgtcagtctaccaaaatagattaaaagtgtaggtgggaattaaatggggataaacactcaataaatgttagctatatatgaatattgccaatactgaaaagattccattgttcaaaaaagtttgagaagcaatgggttaaacaaaatggaacctgctctgcagaatctgtgtgttcctttacatcatactctccatggtagagtgtaggggatgggcgccatgtctccctagtacgtttgaccttgggattctttgtctgtgaacatctttgggttctagtgttcagcagcacttagggaggcactgaattcagtgtacctttggtctagcctcagccctgattctgttctgcggtgggccctggccttcaagagaacagatatctaaaagttgaaagaaaagatcggccgggcgcggtggctcacgcctgtaatcccagcactttgggaggccaaggcgggtggatcacaaggtcaggagatcgagaccatcctggctaacacggtgaaaccccgtctctactaaaaatacaaaaaattagccgggcgtggtggcgggtgcctgtagtcccagctactcgggaggctgaggcaggagaatggcgtgaacccgggaggcagagcttgcagtgagccgagattgcgccactgcactccagcctgggtgacagagtgagactccgtctcaaaaaaaaaaaaaaaaaa

SEQ ID NO: 2238 - DNA, 333 bp, Homo sapiens
cactaccccaataatttagttttattctcacaaattacctgtcactttcttcagaccgtttggttttacaaagtacttcctagtacatttaaaaacttatgttttgatagtgtctttgccacctatgatgtgcaaaatctaagaaaactatcatacctattcttcgtttcagacaatctcatcctgctgacaatgaagaaaaatctgtattatttcagtgctttgtaaaaagaattttgcatcagttggaataacaagaccaaaatttaacaacaaataacaaagagtatacatcttatagaagggattacattcctcatttcatagtttaaa

SEQ ID NO: 2239 - DNA, 422 bp, Homo sapiens
ccgggaagggggtgggtgttggggggcaaaagcctgatttttgtgttcaaaaaaaaaatgtttttgcagctgaccagctgtatgccaaacagtaacagtaccattaccaatgaacacccttaaaatatgaggaatcaagactgttgacctttgggtgaaaagcgagtgattcaggacccaagtgattgagtagctccgatcaggtctggttttatctcttcctgataacacagcattggttgttacagggacaaaagcaggagtgatgtatttggctaaatctttaatcaataaaatagattaaggatcatgaatatggagttttcttttccccttaggatactttacttatactgtgctacaatttagtcccaaatgcactttcagtgaattaggaaaagctgtcacttccttaatcttgt

SEQ ID NO: 2240 - DNA, 82 bp, Homo sapiens
ctacaatgaggatggcaagtctggacaacagccagcttagaagattcttatctcttgggcactgcagccagacttcacacat

SEQ ID NO: 2241 - DNA, 803 bp, Homo sapiens
  misc_feature (16)..(16): n is a, c, g, or t
  misc_feature (24)..(24): n is a, c, g, or t
  misc_feature (42)..(42): n is a, c, g, or t
tactgcagtaaacccncgatttantgtagcgaggctggtggngccacccactgccaccccataggccatggcacagacagggctggggatgctccctggcacggaccaccataggaagtcagccctggaacccgtgggctgtggaggcctggtcttagaaccagtaggtcctggagggtcagtaagtctgggccctaggatcctatcttgctagaggccagatctgatccagccccctcattttgcagaggcagaaactgaggctggaaagaaaaatcataaccctcacacctgctcttttctgacagccagtcataggcagggcttggcacgtggttgttttcgtttctcattcctagcctgatgcagtggctcacgcctgtaatcccagcactttgggaggctgaggcgggcaaatcaattgaggtcaggagtttgagaccagcctggccaacacggtgaaaccctgtctctactaaaaatacaaaaattagctgggcgttgtggtgcacgcctgtagtcccagctagttgggaggctgaggcaggagaatcacttgaactggggaggcaaaggttgcagtgagccgagatcgcgcaactgcactagagactccatctcaaaaaaaaattaaaaattagctgggcttggtggcatgcgcctcccgtcccagttactcaggaggctaaggtgggaggattgattgcttgcgtccaggaggtagaggctgcagtgagccaagatcgaaccactgcactccagcctgggtgacagagtgagaccctattccaaaaaaaaaaaaa

SEQ ID NO: 2242 - DNA, 253 bp, Homo sapiens
gcccagcccctggctggtaggggaggctattggaagagagcaaagacctcttccaggcagtgctacagaggtcaggaggcagaactaatggtgggatattctgggaagccaggaagggctggggatgaaggtctgaccaggtgcttacaaaggggccctgaatctctgtgctaccagcttaatttcctgaaatgtcactaaagaaccaacattattggcagccagcccagcccatgtgacccaatgttattta

SEQ ID NO: 2243 - DNA, 894 bp, Homo sapiens
tttatggatgaggctgcactagggcagaggcagagttgcctgagtgcctggaacgcagctcgcttcctcagcagggtgtgggcaatgccaccagatggttaggggaaaaaagaggccatctctcagggaatgcgtgttcctgctgagcatggaggaaaggaaggtgaggcagctttggaactcaacaaattttattaaacctgtcagttagagagccattgttggtacaacagcaccatctgctgttagtttagagcaactgctaggagctactagcatacctgcataattgctgggagggattttattaatttatatttttgttattcaagcaatatctcttgagaacctactgctgtggagcacagggaagcagacgaggacaaggtaaaaacagtcctcatccatatggagttgtagtctacaagtctggttcttgggtctgaaacctgactgcacatcccagtcacctgaggaactttctgcacatcccagtcacctgaggaactttttctgactcctgaccagtgtggaatctgtctttcaaaaagcttcccagtcgattgagatgcagcctgcccatggagtggagaagtctgtggtccatgtgaactactgatctagtacaactctttccctttacaaatagggaaactgaggcccagaaaggggaagggtcacccagtgagcaagtcagagagacaggtccagaacacaggtgtcctagctaccaggtcagttgcactttctagatactgtgctgtcttccttctttatggctttcatcttcttgtgtataaaaggattttaaaagattatactaaaacttgtaaacgaagcaattctagcactcagctcaggctgatcaacacggtgagtgatctgataatgccc

SEQ ID NO: 2244 - DNA, 1010 bp, Homo sapiens
  misc_feature (249)..(249): n is a, c, g, or t
  misc_feature (291)..(291): n is a, c, g, or t
tttatggatgaggctgcactagggcagaggcagagttgcctgagtgcctggaacgcagctcgcttcctcagcagggtgtgggcaatgccaccagatggttaggggaaaaaagaggccatctctcagggaatgcgtgttcctgctgagcatggaggaaaggaaggtgaggcagctttggaactcaacaaattttattaaacctgtcagttagagagccattgttggtacaacagcaccatctgctggganaggttatacgaagtcaacatgacatagtgacgctaacgtaanccatagcgctgacagtacatttgcttgggaggggactttgtacttaagtttactaatttgtatgtatactctcaatggcatagtactcgtcgttgaatgaacccttacactgactgttgcgtagccaccaggaggaacgtcatgaccgaaaggatcaagggttacatagaaccagtgtcctcactccactatggaggctgtgtacgctcttaccacatgctcctggggttcctttgcgggtcatcgacaagcacttcgacgtgggcagcactcccaggtgcaaccatgagggaacttgctggcacaatcgcacagtcaagcgcgtgagggaactttttctgactcctgaccagtgtggaatctgtctttcaaaaagcttcccagtcgattgagatgcagcctgcccatggagtggagaagtctgtggtccatgtgaactactgatctagtacaactctttccctttacaaatagggaaactgaggcccagaaaggggaagggtcacccagtgagcaagtcagagagacaggtccagaacacaggtgtcctagctaccaggtcagttgcactttctagatactgtgctgtcttccttctttatggctttcatcttcttgtgtataaaaggattttaaaagattatactaaaacttgtaaacgaagcaattctagcactcagctcaggctgatcaacacggtgagtgatctgataatgccc

SEQ ID NO: 2245 - DNA, 394 bp, Homo sapiens
tgttttctttgggtccatttgttcttctgtttttctgctcgatccaagtgctcagatgtgctttgttcgaccctctccatccaggtgttcacccttctctgtccaggtcacctgcaaactcagggtgagatttgcaatgccagcttgagacagtttccatggcgtgaagtgggatttgtcatgaaattctcagcacaaccaatacgttttctctttttatctaatgtcaaaatatagctgtttgcaatttttgtctcctatttgagttttgtgtttgactttgttatttagggaccaagagtttataaaaagtctggcttgaagcagcctggaggtaactgcctggaggcccctggctcagtggagggagcacagaccaggtcttttcttgtgt

SEQ ID NO: 2246 - DNA, 421 bp, Homo sapiens
tggggggagcgggcaagcatggggagatgagatgtgtatatgtgagagagagtgtgggggccccaggcagggcaggaggtggtggaaacggggtgaactccgtgggctgtgtgaggactgtccatagtgggtcccaaccccctccctctgctggagtttcctagcccttccccctccccaagactgtggcagcaggcaggagcccctgccctccctccctgtcctgtgccacacttctggggccaaacccagcccccttgagccaggccctgccagactccaagcccaccctagaaccctcctcctgtgtggagactctgttgccccactttggacacagattggcaacctgcctcaccccgccccccttcgctggggcttccatcttaatttattctcaataataaagacttcatgatga

SEQ ID NO: 2247 - DNA, 270 bp, Homo sapiens
ggaggacccttgctgtctctcaccggccaaggaaggttagatgtgggtgtccccaggggcccaggggtgacgatgtgggtatagtgacaacagttagagttgctttcacatgtggcgtgattcctatgtgcctgatggtattaccagttgttacctacattaaccttatcataatggaatgaggaagccagaggaaccaaggctttgattcttttatttatccattttcataataatgagttggttcctttccctcctccagagaggacc

SEQ ID NO: 2248 - DNA, 1137 bp, Homo sapiens
acaaaatgcttaatttaaatggaattttaatttataaaattttaaactctccacaagtactggccgtgggcaaatacagaaaatcagattaaaaaaataaatggataagggaaaattaaaattgcatgactgtcttttagtctaagagggatcttatgaggatgctcaacagttaacagtacatgtttagagagaaccaaacaagaggctacgtcttaaagcagaatagattgtggttgggcataaggagactattgattgcttgaagacacagacagctcaaggaaaattggacatagagctgaaaagtgatgtttttgacaaagaattgttctgcacatccagctgtggaggaatccttaaggctcacagaggaacaaacaagaagcagtcttcagagatcaggggcggaatccccaatgtcaggagcaaggttgctgtggggaaattctactcttcctatctttcctgaactggaattaaaaagcacctaaatccagaaggtaaaggatgagacagcaagagagggggaagaattccggagttttattaaagtaggaaggaacttctcatctatttggaaatgattctctgaggtcccgctggaaagagttttaaaaaatttactctggccaaaatgccttccttgttgtcaaatcagcacaaagttaaggttaaacatagcttaagacctgttctctttagttttctcacaaccacttaaaactgtcataacgtaccaccagtttatatacaatcatatttacaaaaaaaacacgcaaaatattaatccaaaatagttttttttaatcctttgaagttataccatcaaacttgatggtagttattttaataggtattcttgtgcatacttcttaagtgtacttttatctttaatgcataacttttgaaattaagaggaaaaacagcaagcaggaaggatacaatgcaataagcatttgattttgttctaaatgagcagctttaaaaaaaaaaggtaaaatacattaaacaaagtgcatcagttccaacaagttagtattaaaaagaggcctaaggacagtgctggaaccagccaggagtccctccctggcaggcctctgattgtcttcagagaatattcaatgaaaaaaaaaa

SEQ ID NO: 2249 - DNA, 1024 bp, Homo sapiens
tgatacggagtcttgctctgttacccaggcagtgcagtggtatgatctcagcttattgccacctccacttcctgggttcaaccgattctcctgcttcagcctcccaggtagctgggactacaggctgctgccaccacatccagctaatttttgtatttttagtagagaccgggtttctccgtgttggccaggctggtcatgaactcctgacctcaaatgatcgggtcgccttggcctcccaaagtgctgcagttacaggcatgagccacatgcctggccggcaaagagattttacgtgggaaactgatcaaataattacaatatacagaaactgtaattgtatttagattattgtgatgtaaaggggatacaggcttttttcctttgggtacaaatagagatggactgttttctatttaaataccattaaaaattgttatacttttctactttgcctgtgacatgtagtggtttttcaggcttatattctctcttccagctcaaagctctcatttaatgaaataatttgaaataaaacttgatttaaaacttgtttttcttatttgatttaatattgtctcctgccgtatttttttggtcttgttttctcttgtatagggtagagggcagtggtgagatcatggctcacagcagcctcaacctcctagactcaagcagtcttcctacctaagccactgcccacctccccctaatcccccaggagctgggactataggtgtgtaccatatggcccgactatatatatattttattttttgttgcctaggctgtgtactaacatttttattctgaagttaaatacatcccatctgtgaacttgtcaaacatcatgcactgaactattttaaattctactcaggagacatttcttaaaaacctattataaggctaagtgtggtagctcacacctgtaatctcacaaggccaaggtaggattgcatgtgtccaggaatttgagaccatcctgggcaacatagcaagacttcatctctaccaaaaaaaa

SEQ ID NO: 2250 - DNA, 180 bp, Homo sapiens
gaattgcattttgtatgaagttgggaaagaagtcatgtacatggggcattctcataactacatgtttagtatttgagtggctgtgctttctagagaattttgttaatatttagaaagaaattaatattttaagccaacatttcctttttcgatatatgtgccactagatgagaaaaaaaa

SEQ ID NO: 2251 - DNA, 605 bp, Homo sapiens
taaagaacaacaatctttaggtcatgcagacctccctgatggcatccagaagtttcaccgaggggtgcagacagtgttgatcattggggatgtcacctcccggatacccacctcactcatgaaagcccccagttatgtgagagttcaagtcagtcggttgtgagagttcaggtctcccgccttcttgctttggccaaattgaatgtatctttctctgctcctaagcgctgatgtgtcaatgtttgccttactgtgaatcgggtacacggacctaaatactggggttctacaatgctgagacctgccgccacctgcttcttaaagcaggttgatccagcactgtattaggggttatggcaacattattgaattttttatgtacataaagccatatgtttagggtggtttctgtcttgtttttgacttatataacactgtgaacttctaaagagagagaataaaagaagcatgaatgaaaagaatggcacttcaaaaaagatggttcagtgaaaaactatagctaaaatatgtaaacctttctaagtaaaccgcttgccttcatcttgagttggaatatatttaaataaattgtgttatctcttggc

SEQ ID NO: 2252 - DNA, 349 bp, Homo sapiens
gcaattacactccagcctgggtgacaaaagcaaaactctgtctcaaaaaatgaataacatctgtagtactctatactacataacttataaaagcatcatttcactatgtttcagaataagacatggaatgggagtaggagaagcaaatttgattcatgaatgtttaataattgcacttaaataatttttaatatagtatcaaatatttaacatacaagcagcataaagaataatataataggggaggctgaggtgggagtatcactcgagcccaggagatggaggctgcagttagtcatgatcgtgccactgcactctagcctgggtgacagcgagaccttgtctcaaa

SEQ ID NO: 2253 - DNA, 338 bp, Homo sapiens
cacttgataaggaccgtaagcttcacttgggaccatgtggggttctgtcttaggttctgtctctaagaggccacttggaatcacatgaccagctttagtgacaccacctagcataagctgctcagactatgggtatgtttgcacccaaataaaccacaaatgcctcctgaggtgggagtgtgtgttgcaatattcacaaggtgaatattcacaatgccctgctctgggcactctcagagctggcactccataaacacctcctgtccaattaatgaactcactgaatatccaccagggacccaggcatgcccccaaggactctgatttggctcttcatc

SEQ ID NO: 2254 - DNA, 359 bp, Homo sapiens
tatacttttttttttctttgtagagggggtgttgctgttgcacagactggtcttgaactcctagcctcaagtgatcatcctgccttggcctcccaaagtactggaattacaggcatgaaccactgagcctggccttacatttatcctttttttaaaaaaaatattttctgaacacttaatagtcattatagcacagtgattaagagtatggactctgaactggacttttgggcccaagtctgttctgcaccacttattactgtgtgagtctgagcaagtgacttattatctacttacctccattttgtcacatgaggataaaaaaattcttttcttatagggttgttgtgaagaataca

SEQ ID NO: 2255 - DNA, 174 bp, Homo sapiens
aaaggtcctggatgccactagaacctttagttaggactgagatgtatatgcaagagtggcacatatcaaaatatctgctcattggttcagatccaacgtaagttttccttgaaccagaacctcatattaacttacagtactcaatggcacagcatcctctaatttaaagatttt

SEQ ID NO: 2256 - DNA, 459 bp, Homo sapiens
actttttttgtctgctagagttatttatttatttttctgagacagagtctggctctgtcagccaggctggagtgcagtggcgcgatctcggctcactacaacctctgtctcctgggctcaagcaattctcctgcctcagcctcccgagtagctgggattacaggtgtgcgccaccacgcctggctaacttttgtatttttagtagagacgggttttcaccatgttggccaggctggtctcaaactcctgaccttgggtaattgcccacctcagcctcccaaagtgctgagattacaggcgtgagccactgtgcccagcctagagttattttttaattgagatataatttacatgacagacaacttacccatttgtaaagtataattcaatagtttttcatctatttagtgcaaccaccaccaccatcatcaattttagaacatctcatcacctcaaaaa

SEQ ID NO: 2257 - DNA, 434 bp, Homo sapiens
attcacaattgtaggccatttttagtaaatgctgtactaagaaaggtaggggcctaactcaggtgttggctaaaacaaatagtaaaaatttttgacagctctgagcttttccagacaaaaacccaaaaaggggctagattgtcccagggacactgacttaggctgccagaagccatgttaaagtttggtcaagtcccgtagtgcaggggtttgaatggagtgtttgtgccaagagttttatgcagtcctcagttcccaaatgaggaatcccacctcctcaatgcagaagtcagaactcacatctccatactcccttgtaggtaggatgcaggcatttggccaggttttctctatattcctggaaaaggataccaggctcagggaaaatgatctttaggaaggcctggtggtgaagatataggtatgtgggggca

SEQ ID NO: 2258 - DNA, 490 bp, Homo sapiens
actcactgaatcttgttaactgatatccttgatgtattcttggtatattctaactatatgcatggtatattcatggcatattatgtcttgggaatattatacctgaaaattttttgttcatccatttttttataaattagatgtaatatatacttttctttaaaaatacagttatcattatttttatagatatataaaaaatagcccgtgcgtagtggctcacgcctgtaatcccagcactttgggaggccaaggcgggcggatcacgaggtcaggagatcgagaccatcctggctaacacggtgaaaccccgtctctactaaaaatgcaaaaaaaaaattagccgggcgcagcggtgggcgcttgtagtcccagctactcgggaggctgaggcaggagaatggcgtgaacccgggaggtggagcttgcagtgagccgagatcgcgccactgcactccagcctgggcggcagagcgagactccgtctcaa

SEQ ID NO: 2259 - DNA, 235 bp, Homo sapiens
ttttttaaataattgacttttaaaacttctttttacacaggtcacaacatcaacttcaaaagacaagagcttgattccatactctaatactgtgtcatctaaactctgtggtaatatgtttgtttgtggtgacaaatgaaagcacccaacacccatacctaaaatcactacaaagtacataaatgcctttgacaattttatatagcctactgatatataaagcattccaggtata

SEQ ID NO: 2260 - DNA, 1422 bp, Homo sapiens
caagggcaaggaacgtttgttttctacctcagtattgctgacatcagcccaactcctggcacagagttgcagaataaaacaggaggcatcatggttacttccattcagacagccacaagccccaacaccaaagggacttggtcctaaaattcacatcctcctgccccactgacccctgccaggccttggtggaagttctgtccacagagtgcacacgtgggtgtctgaatctttgtgtatcatccagctccctttcttgcccagcaggtgctggatgtgtctggggcagacatgttggccaagtcaattgccaactgccaggtggagcttctggaaaactgtgggcactcagtagtgatggaaagacccaggaagacagccaagctcataatcgactttttagcttctgtgcacaacacagacaacaacaagaagctggactgaggccccgactgcagcctgcattctgcacacagcatctgctcccatcccccaagtctgacgcagccaccactctcagggatcctgccccaaatgcggtcggagcgccagtgaccctgaggaagcccgtcccttatccctggtatccacggttccccagagctttggggaccacgcgaaaacctccaagatatttttcacaaaatagaaactcatatggaacaaaataagaaaccccagccatgaaatctaccatgaagtcttcaagttcatgtcactgacaagcttgtgcaaagcagccaccttggaccataattaaatcaaggacattttctttgagacattccttatagttggagactcaagatatttttgttgcatcaggtgtattcccttgcatgggcagtggcttttataggagcattagtcctcattcgctgaaccctgttgtttaggtctaatttaagttttacatagagacccatgtatgactgcagcccattggctgcaagaccagggaggaaagtggcaagctgtagaaaatgtttacacgcatggaggggcattgctccagccctcagagcgtccggagcagcaggatacatgggtgggaggttcattcagcacccaccagtcaggtatgttctgagtgaacccacagcagtcgcagaatgagcacctggcagggtgggtttcctaggaataatttattatttttaaaaataggcctaataaagcaataatgttctagacatctgtctaagtaatcagactcaggttccacacacaagcaacaactcgtgggcctcttttctatttcaatgtgctactaagaacccttggatgtaacatactagttagttaatgaattctgtgaattctgtgaagagtaatgtgattgaaaataagtctaaacagctgtaaaagtgaccacaatgacatgaaataaatttaataagtctagatcagcaaaaaaaaaaa

SEQ ID NO: 2261 - DNA, 2380 bp, Homo sapiens
tcgccgtggctttcgggtgctaggagacagttgccggcgttgggttgtgcgagacgctaactgtaccctccgggtttaacgctgtgaggcagcgcgcggaggaactggggataagcgccccggagcccccaaacagagcgcggccgctgggggacagcgcgcggcgccgggtcggggcggggcggcttttctgtcggaggacgcgaaccggcacgctgcgcctttaaggagtccggctgggctgggcgccggagctgggagccgcgcgggtaggagcccggcggcaggtcccagcccggggctagagaccgagggccggggtccgggcccggcggcgggacccaggcggttgaggctggtcaggagtcagccagcctgaaagagcaggatggatcttgatgtggttaacatgtttgtgattgcgggcggcacgctggccatcccaatcctggcatttgtggcttcatttcttctgtggccttcagcactgataagaatctattattggtactggcggaggacattgggcatgcaagtccgctatgttcaccatgaagactatcagttctgttattccttccggggcaggcctgggcacaaaccctccatcctcatgctccacggattctctgcccacaaggatatgtggctcagtgtggtcaagttccttccaaagaacctgcacttggtctgcgtggacatgccaggacatgagggcaccacccgctcctccctggatgacctgtccatagatgggcaagttaagaggatacaccagtttgtagaatgcctgaagctgaacaaaaaacctttccacctggtaggcacctccatgggtggccaggtggctggggtgtatgctgcttactacccatcggatgtctccagcctgtgtctcgtgtgtcctgctggcctgcagtactcaactgacaatcaatttgtacaacggctcaaagaactgcagggctctgccgccgtggagaagattcccttgatcccgtctaccccagaagagatgagtgaaatgcttcagctctgctcctatgtccgcttcaaggtgccccagcagatcctgcaaggccttgtcgatgtccgcatccctcataacaacttctaccgaaagttgtttttggaaatcgtcagtgagaagtccagatactctctccatcagaacatggacaagatcaaggttccgacgcagatcatctgggggaaacaagaccaggtgctggatgtgtctggggcagacatgttggccaagtcaattgccaactgccaggtggagcttctggaaaactgtgggcactcagtagtgatggaaagacccaggaagacagccaagctcataatcgactttttagcttctgtgcacaacacagacaacaacaagaagctggactgaggccccgactgcagcctgcattctgcacacagcatctgctcccatcccccaagtctgacgcagccaccactctcagggatcctgccccaaatgcggtcggagcgccagtgaccctgaggaagcccgtcccttatccctggtatccacggttccccagagctttggggaccacgcgaaaacctccaagatatttttcacaaaatagaaactcatatggaacaaaataagaaaccccagccatgaaatctaccatgaagtcttcaagttcatgtcactgacaagcttgtgcaaagcagccaccttggaccataattaaatcaaggacattttctttgagacattccttatagttggagactcaagatatttttgttgcatcaggtgtattcccttgcatgggcagtggcttttataggagcattagtcctcattcgctgaaccctgttgtttaggtctaatttaagttttacatagagacccatgtatgactgcagcccattggctgcaagaccagggaggaaagtggcaagctgtagaaaatgtttacacgcatggaggggcattgctccagccctcagagcgtccggagcagcaggatacatgggtgggaggttcattcagcacccaccagtcaggtatgttctgagtgaacccacagcagtcgcagaatgagcacctggcagggtgggtttcctaggaataatttattatttttaaaaataggcctaataaagcaataatgttctagacatctgtctaagtaatcagactcaggttccacacacaagcaacaactcgtgggcctcttttctatttcaatgtgctactaagaacccttggatgtaacatactagttagttaatgaattctgtgaattctgtgaagagtaatgtgattgaaaataagtctaaacagctgtaaaagtgaccacaatgacatgaaataaatttaataagtctagatcagcaaaaaaaaaaa

SEQ ID NO: 2262 - DNA, 2445 bp, Homo sapiens
tcgccgtggctttcgggtgctaggagacagttgccggcgttgggttgtgcgagacgctaactgtaccctccgggtttaacgctgtgaggcagcgcgcggaggaactggggataagcgccccggagcccccaaacagagcgcggccgctgggggacagcgcgcggcgccgggtcggggcggggcggcttttctgtcggaggacgcgaaccggcacgctgcgcctttaaggagtccggctgggctgggcgccggagctgggagccgcgcgggtaggagcccggcggcaggtcccagcccggggctagagaccgagggccggggtccgggcccggcggcgggacccaggcggttgaggctggtcagaatctcattttcagcttctgccagagccagtagcagttgggaaagaaggctgtgctctttgaagagagtcagccagcctgaaagagcaggatggatcttgatgtggttaacatgtttgtgattgcgggcggcacgctggccatcccaatcctggcatttgtggcttcatttcttctgtggccttcagcactgataagaatctattattggtactggcggaggacattgggcatgcaagtccgctatgttcaccatgaagactatcagttctgttattccttccggggcaggcctgggcacaaaccctccatcctcatgctccacggattctctgcccacaaggatatgtggctcagtgtggtcaagttccttccaaagaacctgcacttggtctgcgtggacatgccaggacatgagggcaccacccgctcctccctggatgacctgtccatagatgggcaagttaagaggatacaccagtttgtagaatgcctgaagctgaacaaaaaacctttccacctggtaggcacctccatgggtggccaggtggctggggtgtatgctgcttactacccatcggatgtctccagcctgtgtctcgtgtgtcctgctggcctgcagtactcaactgacaatcaatttgtacaacggctcaaagaactgcagggctctgccgccgtggagaagattcccttgatcccgtctaccccagaagagatgagtgaaatgcttcagctctgctcctatgtccgcttcaaggtgccccagcagatcctgcaaggccttgtcgatgtccgcatccctcataacaacttctaccgaaagttgtttttggaaatcgtcagtgagaagtccagatactctctccatcagaacatggacaagatcaaggttccgacgcagatcatctgggggaaacaagaccaggtgctggatgtgtctggggcagacatgttggccaagtcaattgccaactgccaggtggagcttctggaaaactgtgggcactcagtagtgatggaaagacccaggaagacagccaagctcataatcgactttttagcttctgtgcacaacacagacaacaacaagaagctggactgaggccccgactgcagcctgcattctgcacacagcatctgctcccatcccccaagtctgacgcagccaccactctcagggatcctgccccaaatgcggtcggagcgccagtgaccctgaggaagcccgtcccttatccctggtatccacggttccccagagctttggggaccacgcgaaaacctccaagatatttttcacaaaatagaaactcatatggaacaaaataagaaaccccagccatgaaatctaccatgaagtcttcaagttcatgtcactgacaagcttgtgcaaagcagccaccttggaccataattaaatcaaggacattttctttgagacattccttatagttggagactcaagatatttttgttgcatcaggtgtattcccttgcatgggcagtggcttttataggagcattagtcctcattcgctgaaccctgttgtttaggtctaatttaagttttacatagagacccatgtatgactgcagcccattggctgcaagaccagggaggaaagtggcaagctgtagaaaatgtttacacgcatggaggggcattgctccagccctcagagcgtccggagcagcaggatacatgggtgggaggttcattcagcacccaccagtcaggtatgttctgagtgaacccacagcagtcgcagaatgagcacctggcagggtgggtttcctaggaataatttattatttttaaaaataggcctaataaagcaataatgttctagacatctgtctaagtaatcagactcaggttccacacacaagcaacaactcgtgggcctcttttctatttcaatgtgctactaagaacccttggatgtaacatactagttagttaatgaattctgtgaattctgtgaagagtaatgtgattgaaaataagtctaaacagctgtaaaagtgaccacaatgacatgaaataaatttaataagtctagatcagcaaaaaaaaaaa

SEQ ID NO: 2263 - DNA, 2193 bp, Homo sapiens
ggcgctgcccccacctcccgctgcctggataggtttgagatgcccgaaacccggcgccccatttcctgggtccagccagcctcttgaagccgggggacagagtgaggacggaatctcattttcagcttctgccagagccagtagcagttgggaaagaaggctgtgctctttgaagagagtcagccagcctgaaagagcaggatggatcttgatgtggttaacatgtttgtgattgcgggcggcacgctggccatcccaatcctggcatttgtggcttcatttcttctgtggccttcagcactgataagaatctattattggtactggcggaggacattgggcatgcaagtccgctatgttcaccatgaagactatcagttctgttattccttccggggcaggcctgggcacaaaccctccatcctcatgctccacggattctctgcccacaaggatatgtggctcagtgtggtcaagttccttccaaagaacctgcacttggtctgcgtggacatgccaggacatgagggcaccacccgctcctccctggatgacctgtccatagatgggcaagttaagaggatacaccagtttgtagaatgcctgaagctgaacaaaaaacctttccacctggtaggcacctccatgggtggccaggtggctggggtgtatgctgcttactacccatcggatgtctccagcctgtgtctcgtgtgtcctgctggcctgcagtactcaactgacaatcaatttgtacaacggctcaaagaactgcagggctctgccgccgtggagaagattcccttgatcccgtctaccccagaagagatgagtgaaatgcttcagctctgctcctatgtccgcttcaaggtgccccagcagatcctgcaaggccttgtcgatgtccgcatccctcataacaacttctaccgaaagttgtttttggaaatcgtcagtgagaagtccagatactctctccatcagaacatggacaagatcaaggttccgacgcagatcatctgggggaaacaagaccaggtgctggatgtgtctggggcagacatgttggccaagtcaattgccaactgccaggtggagcttctggaaaactgtgggcactcagtagtgatggaaagacccaggaagacagccaagctcataatcgactttttagcttctgtgcacaacacagacaacaacaagaagctggactgaggccccgactgcagcctgcattctgcacacagcatctgctcccatcccccaagtctgacgcagccaccactctcagggatcctgccccaaatgcggtcggagcgccagtgaccctgaggaagcccgtcccttatccctggtatccacggttccccagagctttggggaccacgcgaaaacctccaagatatttttcacaaaatagaaactcatatggaacaaaataagaaaccccagccatgaaatctaccatgaagtcttcaagttcatgtcactgacaagcttgtgcaaagcagccaccttggaccataattaaatcaaggacattttctttgagacattccttatagttggagactcaagatatttttgttgcatcaggtgtattcccttgcatgggcagtggcttttataggagcattagtcctcattcgctgaaccctgttgtttaggtctaatttaagttttacatagagacccatgtatgactgcagcccattggctgcaagaccagggaggaaagtggcaagctgtagaaaatgtttacacgcatggaggggcattgctccagccctcagagcgtccggagcagcaggatacatgggtgggaggttcattcagcacccaccagtcaggtatgttctgagtgaacccacagcagtcgcagaatgagcacctggcagggtgggtttcctaggaataatttattatttttaaaaataggcctaataaagcaataatgttctagacatctgtctaagtaatcagactcaggttccacacacaagcaacaactcgtgggcctcttttctatttcaatgtgctactaagaacccttggatgtaacatactagttagttaatgaattctgtgaattctgtgaagagtaatgtgattgaaaataagtctaaacagctgtaaaagtgaccacaatgacatgaaataaatttaataagtctagatcagcaaaaaaaaaaa

SEQ ID NO: 2264 - DNA, 2240 bp, Homo sapiens
ttccctttccccagcctgccccggctcccgtgcccttgcgccccttccgtgtcgaaacacttgaatcaggatgctgtccagccaggtacccgccggcaacttgcggtcccccgcctacagcgacacaggtttcacggctgccttagaaatgcggattgtgtaacgccggctgcagggcagtgcacgtgcagggtttgcgcccctgagcccacagcgaggccaggagtcagccagcctgaaagagcaggatggatcttgatgtggttaacatgtttgtgattgcgggcggcacgctggccatcccaatcctggcatttgtggcttcatttcttctgtggccttcagcactgataagaatctattattggtactggcggaggacattgggcatgcaagtccgctatgttcaccatgaagactatcagttctgttattccttccggggcaggcctgggcacaaaccctccatcctcatgctccacggattctctgcccacaaggatatgtggctcagtgtggtcaagttccttccaaagaacctgcacttggtctgcgtggacatgccaggacatgagggcaccacccgctcctccctggatgacctgtccatagatgggcaagttaagaggatacaccagtttgtagaatgcctgaagctgaacaaaaaacctttccacctggtaggcacctccatgggtggccaggtggctggggtgtatgctgcttactacccatcggatgtctccagcctgtgtctcgtgtgtcctgctggcctgcagtactcaactgacaatcaatttgtacaacggctcaaagaactgcagggctctgccgccgtggagaagattcccttgatcccgtctaccccagaagagatgagtgaaatgcttcagctctgctcctatgtccgcttcaaggtgccccagcagatcctgcaaggccttgtcgatgtccgcatccctcataacaacttctaccgaaagttgtttttggaaatcgtcagtgagaagtccagatactctctccatcagaacatggacaagatcaaggttccgacgcagatcatctgggggaaacaagaccaggtgctggatgtgtctggggcagacatgttggccaagtcaattgccaactgccaggtggagcttctggaaaactgtgggcactcagtagtgatggaaagacccaggaagacagccaagctcataatcgactttttagcttctgtgcacaacacagacaacaacaagaagctggactgaggccccgactgcagcctgcattctgcacacagcatctgctcccatcccccaagtctgacgcagccaccactctcagggatcctgccccaaatgcggtcggagcgccagtgaccctgaggaagcccgtcccttatccctggtatccacggttccccagagctttggggaccacgcgaaaacctccaagatatttttcacaaaatagaaactcatatggaacaaaataagaaaccccagccatgaaatctaccatgaagtcttcaagttcatgtcactgacaagcttgtgcaaagcagccaccttggaccataattaaatcaaggacattttctttgagacattccttatagttggagactcaagatatttttgttgcatcaggtgtattcccttgcatgggcagtggcttttataggagcattagtcctcattcgctgaaccctgttgtttaggtctaatttaagttttacatagagacccatgtatgactgcagcccattggctgcaagaccagggaggaaagtggcaagctgtagaaaatgtttacacgcatggaggggcattgctccagccctcagagcgtccggagcagcaggatacatgggtgggaggttcattcagcacccaccagtcaggtatgttctgagtgaacccacagcagtcgcagaatgagcacctggcagggtgggtttcctaggaataatttattatttttaaaaataggcctaataaagcaataatgttctagacatctgtctaagtaatcagactcaggttccacacacaagcaacaactcgtgggcctcttttctatttcaatgtgctactaagaacccttggatgtaacatactagttagttaatgaattctgtgaattctgtgaagagtaatgtgattgaaaataagtctaaacagctgtaaaagtgaccacaatgacatgaaataaatttaataagtctagatcagcaaaaaaaaaaa

SEQ ID NO: 2265 - DNA, 2236 bp, Homo sapiens
tcgccgtggctttcgggtgctaggagacagttgccggcgttgggttgtgcgagacgctaactgtaccctccgggtttaacgctgtgaggcagcgcgcggaggaactggggataagcgccccggagcccccaaacagagcgcggccgctgggggacagcgcgcggcgccgggtcggggcggggcggcttttctgtcggaggacgcgaaccggcacgctgcgcctttaaggagtccggctgggctgggcgccggagctgggagccgcgcgggtaggagcccggcggcaggtcccagcccggggctagagaccgagggccggggtccgggcccggcggcgggacccaggcggttgaggctggtcaggtactggcggaggacattgggcatgcaagtccgctatgttcaccatgaagactatcagttctgttattccttccggggcaggcctgggcacaaaccctccatcctcatgctccacggattctctgcccacaaggatatgtggctcagtgtggtcaagttccttccaaagaacctgcacttggtctgcgtggacatgccaggacatgagggcaccacccgctcctccctggatgacctgtccatagatgggcaagttaagaggatacaccagtttgtagaatgcctgaagctgaacaaaaaacctttccacctggtaggcacctccatgggtggccaggtggctggggtgtatgctgcttactacccatcggatgtctccagcctgtgtctcgtgtgtcctgctggcctgcagtactcaactgacaatcaatttgtacaacggctcaaagaactgcagggctctgccgccgtggagaagattcccttgatcccgtctaccccagaagagatgagtgaaatgcttcagctctgctcctatgtccgcttcaaggtgccccagcagatcctgcaaggccttgtcgatgtccgcatccctcataacaacttctaccgaaagttgtttttggaaatcgtcagtgagaagtccagatactctctccatcagaacatggacaagatcaaggttccgacgcagatcatctgggggaaacaagaccaggtgctggatgtgtctggggcagacatgttggccaagtcaattgccaactgccaggtggagcttctggaaaactgtgggcactcagtagtgatggaaagacccaggaagacagccaagctcataatcgactttttagcttctgtgcacaacacagacaacaacaagaagctggactgaggccccgactgcagcctgcattctgcacacagcatctgctcccatcccccaagtctgacgcagccaccactctcagggatcctgccccaaatgcggtcggagcgccagtgaccctgaggaagcccgtcccttatccctggtatccacggttccccagagctttggggaccacgcgaaaacctccaagatatttttcacaaaatagaaactcatatggaacaaaataagaaaccccagccatgaaatctaccatgaagtcttcaagttcatgtcactgacaagcttgtgcaaagcagccaccttggaccataattaaatcaaggacattttctttgagacattccttatagttggagactcaagatatttttgttgcatcaggtgtattcccttgcatgggcagtggcttttataggagcattagtcctcattcgctgaaccctgttgtttaggtctaatttaagttttacatagagacccatgtatgactgcagcccattggctgcaagaccagggaggaaagtggcaagctgtagaaaatgtttacacgcatggaggggcattgctccagccctcagagcgtccggagcagcaggatacatgggtgggaggttcattcagcacccaccagtcaggtatgttctgagtgaacccacagcagtcgcagaatgagcacctggcagggtgggtttcctaggaataatttattatttttaaaaataggcctaataaagcaataatgttctagacatctgtctaagtaatcagactcaggttccacacacaagcaacaactcgtgggcctcttttctatttcaatgtgctactaagaacccttggatgtaacatactagttagttaatgaattctgtgaattctgtgaagagtaatgtgattgaaaataagtctaaacagctgtaaaagtgaccacaatgacatgaaataaatttaataagtctagatcagcaaaaaaaaaaa

SEQ ID NO: 2266 - DNA, 2379 bp, Homo sapiens
tcgccgtggctttcgggtgctaggagacagttgccggcgttgggttgtgcgagacgctaactgtaccctccgggtttaacgctgtgaggcagcgcgcggaggaactggggataagcgccccggagcccccaaacagagcgcggccgctgggggacagcgcgcggcgccgggtcggggcggggcggcttttctgtcggaggacgcgaaccggcacgctgcgcctttaaggagtccggctgggctgggcgccggagctgggagccgcgcgggtaggagcccggcggcaggtcccagcccggggctagagaccgagggccggggtccgggcccggcggcgggacccaggcggttgaggctggtcagaatctcattttcagcttctgccagagccagtagcagttgggaaagaaggctgtgctctttgaagagagtcagccagcctgaaagagcaggatggatcttgatgtggttaacatgtttgtgattgcgggcggcacgctggccatcccaatcctggcatttgtggcttcatttcttctgtggccttcagcactgataagaatctattattggtactggcggaggacattgggcatgcaagtccgctatgttcaccatgaagactatcagttctgttattccttccggggcaggcctgggcacaaaccctccatcctcatgctccacggattctctgcccacaaggatatgtggctcagtgtggtcaagttccttccaaagaacctgcacttggtctgcgtggacatgccaggacatgagggcaccacccgctcctccctggatgacctgtccatagatgggcaagttaagaggatacaccaggtggctggggtgtatgctgcttactacccatcggatgtctccagcctgtgtctcgtgtgtcctgctggcctgcagtactcaactgacaatcaatttgtacaacggctcaaagaactgcagggctctgccgccgtggagaagattcccttgatcccgtctaccccagaagagatgagtgaaatgcttcagctctgctcctatgtccgcttcaaggtgccccagcagatcctgcaaggccttgtcgatgtccgcatccctcataacaacttctaccgaaagttgtttttggaaatcgtcagtgagaagtccagatactctctccatcagaacatggacaagatcaaggttccgacgcagatcatctgggggaaacaagaccaggtgctggatgtgtctggggcagacatgttggccaagtcaattgccaactgccaggtggagcttctggaaaactgtgggcactcagtagtgatggaaagacccaggaagacagccaagctcataatcgactttttagcttctgtgcacaacacagacaacaacaagaagctggactgaggccccgactgcagcctgcattctgcacacagcatctgctcccatcccccaagtctgacgcagccaccactctcagggatcctgccccaaatgcggtcggagcgccagtgaccctgaggaagcccgtcccttatccctggtatccacggttccccagagctttggggaccacgcgaaaacctccaagatatttttcacaaaatagaaactcatatggaacaaaataagaaaccccagccatgaaatctaccatgaagtcttcaagttcatgtcactgacaagcttgtgcaaagcagccaccttggaccataattaaatcaaggacattttctttgagacattccttatagttggagactcaagatatttttgttgcatcaggtgtattcccttgcatgggcagtggcttttataggagcattagtcctcattcgctgaaccctgttgtttaggtctaatttaagttttacatagagacccatgtatgactgcagcccattggctgcaagaccagggaggaaagtggcaagctgtagaaaatgtttacacgcatggaggggcattgctccagccctcagagcgtccggagcagcaggatacatgggtgggaggttcattcagcacccaccagtcaggtatgttctgagtgaacccacagcagtcgcagaatgagcacctggcagggtgggtttcctaggaataatttattatttttaaaaataggcctaataaagcaataatgttctagacatctgtctaagtaatcagactcaggttccacacacaagcaacaactcgtgggcctcttttctatttcaatgtgctactaagaacccttggatgtaacatactagttagttaatgaattctgtgaattctgtgaagagtaatgtgattgaaaataagtctaaacagctgtaaaagtgaccacaatgacatgaaataaatttaataagtctagatcagcaaaaaaaaaaa

SEQ ID NO: 2267 - DNA, 1514 bp, Homo sapiens
gttagttttaccctactgatgatgtgttgttgccatggtaatcctgcctgcagtactcaactgacaatcaatttgtacaacggctcaaagaactgcagggctctgccgccgtggagaagattcccttgatcccgtctaccccagaagagatgagtgaaatgcttcagctctgctcctatgtccgcttcaaggtgccccagcagatcctgcaaggccttgtcgatgtccgcatccctcataacaacttctaccgaaagttgtttttggaaatcgtcagtgagaagtccagatactctctccatcagaacatggacaagatcaaggttccgacgcagatcatctgggggaaacaagaccaggtgctggatgtgtctggggcagacatgttggccaagtcaattgccaactgccaggtggagcttctggaaaactgtgggcactcagtagtgatggaaagacccaggaagacagccaagctcataatcgactttttagcttctgtgcacaacacagacaacaacaagaagctggactgaggccccgactgcagcctgcattctgcacacagcatctgctcccatcccccaagtctgacgcagccaccactctcagggatcctgccccaaatgcggtcggagcgccagtgaccctgaggaagcccgtcccttatccctggtatccacggttccccagagctttggggaccacgcgaaaacctccaagatatttttcacaaaatagaaactcatatggaacaaaataagaaaccccagccatgaaatctaccatgaagtcttcaagttcatgtcactgacaagcttgtgcaaagcagccaccttggaccataattaaatcaaggacattttctttgagacattccttatagttggagactcaagatatttttgttgcatcaggtgtattcccttgcatgggcagtggcttttataggagcattagtcctcattcgctgaaccctgttgtttaggtctaatttaagttttacatagagacccatgtatgactgcagcccattggctgcaagaccagggaggaaagtggcaagctgtagaaaatgtttacacgcatggaggggcattgctccagccctcagagcgtccggagcagcaggatacatgggtgggaggttcattcagcacccaccagtcaggtatgttctgagtgaacccacagcagtcgcagaatgagcacctggcagggtgggtttcctaggaataatttattatttttaaaaataggcctaataaagcaataatgttctagacatctgtctaagtaatcagactcaggttccacacacaagcaacaactcgtgggcctcttttctatttcaatgtgctactaagaacccttggatgtaacatactagttagttaatgaattctgtgaattctgtgaagagtaatgtgattgaaaataagtctaaacagctgtaaaagtgaccacaatgacatgaaataaatttaataagtctagatcagcaaaaaaaaaaa

SEQ ID NO: 2268 - DNA, 2366 bp, Homo sapiens
tcgccgtggctttcgggtgctaggagacagttgccggcgttgggttgtgcgagacgctaactgtaccctccgggtttaacgctgtgaggcagcgcgcggaggaactggggataagcgccccggagcccccaaacagagcgcggccgctgggggacagcgcgcggcgccgggtcggggcggggcggcttttctgtcggaggacgcgaaccggcacgctgcgcctttaaggagtccggctgggctgggcgccggagctgggagccgcgcgggtaggagcccggcggcaggtcccagcccggggctagagaccgagggccggggtccgggcccggcggcgggacccaggcggttgaggctggtcaggagtcagccagcctgaaagagcaggatggatcttgatgtggttaacatgtttgtgattgcgggcggcacgctggccatcccaatcctggcatttgtggcttcatttcttctgtggccttcagcactgataagaatctattattggtactggcggaggacattgggcatgcaagtccgctatgttcaccatgaagactatcagttctgttattccttccggggcaggcctgggcacaaaccctccatcctcatgctccacggattctctgcccacaaggatatgtggctcagtgtggtcaagttccttccaaagaacctgcacttggtctgcgtggacatgccaggacatgagggcaccacccgctcctccctggatgacctgtccatagatgggcaagttaagaggatacaccagtttgtagaatgcctgaagctgaacaaaaaacctttccacctggtaggcacctccatgggtggccaggtggctggggtgtatgctgcttactacccatcggatgtctccagcctgtgtctcgtgtgtcctgctggcctgcagtactcaactgacaatcaatttgtacaacggctcaaagaactgcagggctctgccgccgtggagaagattcccttgatcccgtctaccccagaagagatgagtgaaatgcttcagctctgctcctatgtccgcttcaaggtgccccagcagatcctgcaaggccttgtcgatgtccgcatccctcataacaacttctaccgaaagttgtttttggaaatcgtcagtgagaagtccagatactctctccatcagaacatggacaagatcaaggttccgacgcagatcatctgggggaaacaagaccaggtgctggatgtgtctggggcagacatgttggccaagtcaattgccaactgccaggtggagcttctggaaaactgtgggcactcagtagtgatggaaagacccaggaagacagccaagctcataatcgactttttagcttctgtgcacaacacagacaacaacaagaagctggactgaggccccgactgcagcctgcattctgcacacagcatctgctcccatcccccaagtctgacgcagccaccactctcagggatcctgccccaaatgcggtcggagcgccagtgaccctgaggaagcccgtcccttatccctggtatccacggttccccagagctttggggaccacgcgaaaacctccaagatatttttcacaaaatagaaactcatatggaacaaaataagaaaccccagccatgaaatctaccatgaagtcttcaagttcatgtcactgacaagcttgtgcaaagcagccaccttggaccataattaaatcaaggacattttctttgagacattccttatagttggagactcaagatatttttgttgcatcaggtgtattcccttgcatgggcagtggcttttataggagcattagtcctcattcgctgaaccctgttgtttaggtctaatttaagttttacatagagacccatgtatgactgcagcccattggctgcaagaccagggaggaaagtggcaagctgtagaaaatgtttacacgcatggaggggcattgctccagccctcagagcgtccggagcagcaggatacatgggtgggaggttcattcagcacccaccagtcaggtatgttctgagtgaacccacagcagtcgcagaatgagcacctggcagggtgggtttcctaggaataatttattatttttaaaaataggcctaataaagcaataatgttctagacatctgtctaagtaatcagactcaggttccacacacaagcaacaactcgtgggcctcttttctatttcaatgtgctactaagaacccttggatgtaacatactagttagttaatgaattctgtgaattctgtgaagagtaatgtgattgaaaataagtctaaacagctgtaaaagtgaccgatatcgtgggtaccagctcggttcgtatcatgta

SEQ ID NO: 2269 - DNA, 1430 bp, Homo sapiens
gctcctatgtccgcttcaaggtgcagagctgaagcatttcactcatctcttctggggtagacgggatgagtgaaatgcttcagctctgctcctatgtccgcttcaaggtgccccagcagatcctgcaaggccttgtcgatgtccgcatccctcataacaacttctaccgaaagttgtttttggaaatcgtcagtgagaagtccagatactctctccatcagaacatggacaagatcaaggttccgacgcagatcatctgggggaaacaagaccaggtgctggatgtgtctggggcagacatgttggccaagtcaattgccaactgccaggtggagcttctggaaaactgtgggcactcagtagtgatggaaagacccaggaagacagccaagctcataatcgactttttagcttctgtgcacaacacagacaacaacaagaagctggactgaggccccgactgcagcctgcattctgcacacagcatctgctcccatcccccaagtctgacgcagccaccactctcagggatcctgccccaaatgcggtcggagcgccagtgaccctgaggaagcccgtcccttatccctggtatccacggttccccagagctttggggaccacgcgaaaacctccaagatatttttcacaaaatagaaactcatatggaacaaaataagaaaccccagccatgaaatctaccatgaagtcttcaagttcatgtcactgacaagcttgtgcaaagcagccaccttggaccataattaaatcaaggacattttctttgagacattccttatagttggagactcaagatatttttgttgcatcaggtgtattcccttgcatgggcagtggcttttataggagcattagtcctcattcgctgaaccctgttgtttaggtctaatttaagttttacatagagacccatgtatgactgcagcccattggctgcaagaccagggaggaaagtggcaagctgtagaaaatgtttacacgcatggaggggcattgctccagccctcagagcgtccggagcagcaggatacatgggtgggaggttcattcagcacccaccagtcaggtatgttctgagtgaacccacagcagtcgcagaatgagcacctggcagggtgggtttcctaggaataatttattatttttaaaaataggcctaataaagcaataatgttctagacatctgtctaagtaatcagactcaggttccacacacaagcaacaactcgtgggcctcttttctatttcaatgtgctactaagaacccttggatgtaacatactagttagttaatgaattctgtgaattctgtgaagagtaatgtgattgaaaataagtctaaacagctgtaaaagtgaccacaatgacatgaaataaatttaataagtctagatcagcaaaaaaaaaaa

SEQ ID NO: 2270 - DNA, 1357 bp, Homo sapiens
ggcttttatttcttaaatctctgacactttgaatgtctctttgggcccctgaagagaggaagtggtggcctggatctggtgactatcccttgattctgcggtggtgccacaggcacagtccagcacatactcactttgttttccttttctgacaagtgtttttggaaatcgtcagtgagaagtccagatactctctccatcagaacatggacaagatcaaggttccgacgcagatcatctgggggaaacaagaccaggtgctggatgtgtctggggcagacatgttggccaagtcaattgccaactgccaggtggagctttcataatcgactttttagcttctgtgcacaacacagacaacaacaagaagctggactgaggccccgactgcagcctgcattctgcacacagcatctgctcccatcccccaagtctgacgcagccaccactctcagggatcctgccccaaatgcggtcggagcgccagtgaccctgaggaagcccgtcccttatccctggtatccacggttccccagagctttggggaccacgcgaaaacctccaagatatttttcacaaaatagaaactcatatggaacaaaataagaaaccccagccatgaaatctaccatgaagtcttcaagttcatgtcactgacaagcttgtgcaaagcagccaccttggaccataattaaatcaaggacattttctttgagacattccttatagttggagactcaagatatttttgttgcatcaggtgtattcccttgcatgggcagtggcttttataggagcattagtcctcattcgctgaaccctgttgtttaggtctaatttaagttttacatagagacccatgtatgactgcagcccattggctgcaagaccagggaggaaagtggcaagctgtagaaaatgtttacacgcatggaggggcattgctccagccctcagagcgtccggagcagcaggatacatgggtgggaggttcattcagcacccaccagtcaggtatgttctgagtgaacccacagcagtcgcagaatgagcacctggcagggtgggtttcctaggaataatttattatttttaaaaataggcctaataaagcaataatgttctagacatctgtctaagtaatcagactcaggttccacacacaagcaacaactcgtgggcctcttttctatttcaatgtgctactaagaacccttggatgtaacatactagttagttaatgaattctgtgaattctgtgaagagtaatgtgattgaaaataagtctaaacagctgtaaaagtgaccacaatgacatgaaataaatttaataagtctagatcagcaaaaaaaaaaa

SEQ ID NO: 2271 - DNA, 570 bp, Homo sapiens
tgaagactatcagttctgttattccttccggggcaggcctgggcacaaaccctccatcctcatgctccacggattctctgcccacaaggatatgtggctcagtgtggtcaaggtgcaattctcgattcttctctcttataagaaaagggagttgggtgctgtggctcatgcctataatcccagcactttgggagcctgaggcaggaggattgcttgagtccaggagttcaaaaccagcctggacaacataaagaaaccctgtctctacaaaaaattaaaaaattagccaggtgtggtggtgcatgcctgtagtcctggctactcaggagactgaggtgggaagattgcttgagcctggggggtcaagtcttcagtgagcaatgatcatgccactgcacttagcctgggcaacagaataagactctgtctcaaaaaaaataaaaataaaaaaaggaagaagaagaaaagggtttccactaggacatgatgtcatcaacaatggtagaaagcaaagggaactcagaactgtggtggttcaagtcatattagaactaatgcagtgtggcctgg

SEQ ID NO: 2272 - DNA, 333 bp, Homo sapiens
ttgttttctatggtcttcggaataaaggagataagagattttgttgaatgtacagagaaataaagtccccttttaaagtcccttttttacttgtcagatcactttatctggtatttctttagcgccagtatagaaggcactaccgtagatggtagaattatcagtaatttttaatggcagagaagcagccagtgataatagggagaaatttggaggctcaggaggcaccagtaggtgaacaaatttgccttttttttttttacttataatgtctatccttttatgaaaataagaattgtgctttagttaaatagaattcaattatatttttcc

SEQ ID NO: 2273 - DNA, 1415 bp, Homo sapiens
ccaagaataaactagtaaaagaaacttagatttccctaatttaatcttgactccgattttgatagtgctatataaaaaggtatttaaacccatatgcttccttttacataaaagaaagatatcaactttcctagtttgcatttacactggctaataggataataaaatgctgtgtaaatgttaaactggaagtttctctgagttatttttactttaaaatttcatgtgattatgccattttgaatatgtatattacatgtaattgtataatgttaacttgggtaggcaaaattcttggtattaaatttaggatgttttaaaaattattaagaagatattaatgtctgctttttgatagcatattttcatgtaatgtttagtgtattaaaatcaaccattcaagatttattttattgggtgacactattgactgtgttccaaaatgcccatagtgttaggaaatgtggtgtgagttttatttgtgggctaaggataaaataatcatatgctaatataccttttattataaatgactaaaaatttggatataaaactgatgttttactacacaaattacagagagagataatataattatataattattaaataattagaaaatgcaaataagcaaaagtcacccatgttcccagttctcatctcctgaagatagttataactaacatattattttgtactcttcctgttaattagtttctagtgtactttctcctgtagctgaaattaagctgagaaaaaaggaagagatagttcctccctcctctttcttctctcccactctgtctctctcctgtgctatctgtgtgtatatacaaatatgtatgcatatatatataatgatgtacataatatatataaaatacaaatactaatgtgcatattttcaaacatacacatattttttattatttgaaataagaatgagtcagactacatatttggtagccagatttttttcactcagtgatatatcatgaacatatttccatgctaatataattttctaataattttagatgctgtaactacaatttcattgttaatgggcaatttgttgctttacaaatggtaaattatatgataaataatatgatcattattcttgtagccaatatcattattagaaatgatggaccgcattaaagctataaaattaaataagaatttataaatgtaaggagttattcagacatcttgtatctagtattacaatatcagaaaactcagcaggttatatgacatatacactttgagatagtcactcagaggttttcacatacaggattaaccttgctgcagtgcgtgtgcaagattaaaaaagatgtcatgggtcactttgtaatgtcatatcgttgctgttgataaataaaggaaatgttataaataaaaaaaga

SEQ ID NO: 2274 - DNA, 2097 bp, Homo sapiens
gagatgaagtctcgctctgttgcccaggctggagagtgcagtggtacggtctcagctcactgcaacctccacctcccaggttcaagcgattctccagcctgagcctcctgagtagctgggattacaggtgcctaccaccacgcccaggtaattttttttttttttgtatttttagtagagacggggtttcaccatgttggccaggctggtctcgaactcctgacctcatgatccgcccgtgttggcctcccaaagtgtgggattacaggcgtaagccacctcacctggcggtacaaagaatttctgcattttcttccctggcccctagtcctgcaccgatttctccttttcgaatgtattcctcctgccaccttctctgggcaacttcgtgcgactacagaaccactgtcctgaggagctagaggcctcctctctgaccatccagagcccaaatccacagcttccccaaatttcatcagctgccacttgacgacttctccccgtctctctgaggcccggaaaccacggctggaggtggggaggggatggcggctgaggtccattcctcattctcagacctcattgctcagttgcactatttggggcacagaataatcaccaaaagtgagaaaaacgagtttgggtggctggggaggactttgggactcttgatgcaaggcgcaacttgagaaaattctgggtgtgatatttgcacagacaccctcctttcaaaaacagccaccccccaagctattctcagctccacacctgcagccccagctaaggtaccaggtctcctgagcaaggcagagagaagccttgagccttctctgtgtcttctttcaagaaccccgctgtgtcttctttcaagattttttttttgagacagtttcaagattttggttttgtttttgagatggagtctcactgtgtcacccaggctgaggtggcagtggttcaatctccgttcactgccacctccacctcccgggttcaagcgattctcctgcttcagcctctcgagtagctgggactacaggcacctgccaccatgtctggctaatttttgtatttttagtagagacagggtttcactacgttggccaggctggtctcaaactcctgacctcaagtgatccgcccgcctcggcctccccaattgctgggattacaggcgtgagccactgtgcccggccttcttctttcaagttatatagaatggagcatgggggtggcagtggctagggacatttcctggggacactctcccctaaccccccagaaggacttcacaaaaacctgtggataatggaagggatgttacggtacaaacgtatatttatgtgtgtgtgtgtgtatgtgtgtgcgcgcgcgcgtgtgcacataggcgtgatgtctgtgaccctcctctcctcgtcacatttcccccagaatgaatgctgtcctgtctgctcatgtttgtgttgaagctgccaaagtcggggagctctggtcctgcccagacccctttggaattgctggcccatcctcccactggagagctggggtgcagctcaccttggggaaggaaacctcatgcctcagagtaatttcttgtgaatgcaaagcctgggggagcgggtctttggggggcaaggagccagtcaggggcttgtttcccctcatagagctccccagacgtgcctccgcaatgcctgaaacccagacctaggctaataaacggttcaatttctgtaaaaaaaaaaaaacaaaaaacaaacaaatcacacaacaagagaacaaacccaaagacagccaacacaaacacaagacaacgcgcacgaaaaacaccgaacacaaccagcagaacacaaaaacacagatcggcgcgggcagaaacgctcaccgaggacggcccacacctgttcaacgagccccgcctatgcagacagcaggagggcgcccactcagagagaggcggccacaaaacaaacgaagcggagaaggggcggcagcaaagacaccgcacgagcgcgggagaaaaaccacagcgggaggagaagtacggagagagacaaccccgcggggcgggagcaaacgaggaacgcagacacacga

SEQ ID NO: 2275 - DNA, 1162 bp, Homo sapiens
gagatgaagtctcgctctgttgcccaggctggagagtgcagtggtacggtctcagctcactgcaacctccacctcccaggttcaagcgattctccagcctgagcctcctgagtagctgggattacaggtgcctaccaccacgcccaggtaattttttttttttttgtatttttagtagagacggggtttcaccatgttggccaggctggtctcgaactcctgacctcatgatccgcccgtgttggcctcccaaagtgtgggattacaggcgtaagccacctcacctggcggtacaaagaatttctgcattttcttccctggcccctagtcctgcaccgatttctccttttcgaatgtattcctcctgccaccttctctgggcaacttcgtgcgactacagaaccactgtcctgaggagctagaggcctcctctctgaccatccagagcccaaatccacagcttccccaaatttcatcagctgccacttgacgacttctccccgtctctctgaggcccggaaaccacggctggagctgccaaagtcggggagctctggtcctgcccagacccctttggaattgctggcccatcctcccactggagagctggggtgcagctcaccttggggaaggaaacctcatgcctcagagtaatttcttgtgaatgcaaagcctgggggagcgggtctttggggggcaaggagccagtcaggggcttgtttcccctcatagagctccccagacgtgcctccgcaatgcctgaaacccagacctaggctaataaacggttcaatttctgtaaaaaaaaaaaaacaaaaaacaaacaaatcacacaacaagagaacaaacccaaagacagccaacacaaacacaagacaacgcgcacgaaaaacaccgaacacaaccagcagaacacaaaaacacagatcggcgcgggcagaaacgctcaccgaggacggcccacacctgttcaacgagccccgcctatgcagacagcaggagggcgcccactcagagagaggcggccacaaaacaaacgaagcggagaaggggcggcagcaaagacaccgcacgagcgcgggagaaaaaccacagcgggaggagaagtacggagagagacaaccccgcggggcgggagcaaacgaggaacgcagacacacga

SEQ ID NO: 2276 - DNA, 448 bp, Homo sapiens
cgaagggcagtcaccttgaaaatgagcaaggaaaaagccttgaggcagcaccctcccctccaaagagcttctcgccaagcatgtcttcctgggggctgggaaatggcatgcggcctcctctactctccttcttatatgccagacccctgtcctttcagcggtccatggagtaaggaccacaaatcggcctccacatccacagcctgcctgggaagggaaaggtctgaggtgcactaggctggacacactggcaccgcctatggtcccagctactcaggaggccgagacaggaggatggcttgagcccaggagctcgaagctgcaaagagccatgacggcacctgtgagtggtcacacaggggccaccgagaacttgcgaggggcgttcagaggcagcactgcagaaccgcagacgcctagccagccaggtccaggacagctgtggcgg

SEQ ID NO: 2277 - DNA, 144 bp, Homo sapiens
atcctgcatttctgctatcttcacctcctttgtttccgattcttccctcatttctacatcccccaaatctcagcaccaccacccccagtttcccatcctccaaattttccaggctgtagcccacttgccttctcatgaccccaa

SEQ ID NO: 2278 - DNA, 239 bp, Homo sapiens
gaaatgtaatgtagtctattttactttgaaaggattcctttatttactttgaaaggattcctttttcaagaaatagctttggagaaaacaaacaaagaaaataaccaaaataaactgtccctaactccttttccttgagtattgaattttctgaaggaaaccctccctgaagaatgtttatatatatatatatatatatatatatatatatatatatatatatatatatatatatatat

SEQ ID NO: 2279 - DNA, 175 bp, Homo sapiens
gcatcacttggtggtgactgtggacgaggccatctttttaaggctgtgctattttatatgatcctcatgttcccagtgagccacattttagaaagctgaggcacaaagaagtttagtgattttgccaagccaccacagtagtgaatagtccagcagggccttgtgctccaggggt

SEQ ID NO: 2280 - DNA, 460 bp, Homo sapiens
atttcccggcatacagcaagcacttaatagatgtttaagtgaatgcatgattgacaatttttctgagattgttttcacagacgtaacagcagttaccaccccacatgctctcctgaggattgagtgggattatgggtatcagagctctctgtaaatgtaatagtgctggttgatgatgcctggaagtgaatgtggtctgggagacagggagagggctctgccatacaagagcctctgcccaggccaggcatctcttctgtcagactgagtcccaggccctggggtagtgctctgattccagctctccttctcagctctctatctcaccctcggtccaacctcctcaccatggctcagctctaggtattgcttttctccttcagccagtcaggacaggacccaggagacttaccattggccaagcctcttgcctgcaggccactctacctcttgtgctggc

SEQ ID NO: 2281 - DNA, 1451 bp, Homo sapiens
  misc_feature (447)..(447): n is a, c, g, or t
cccctcctgccacctcccagggctctggataattgaatcttcctgagtcccacagctggagactcaaccaggatatagctgtaaatgcccaagtagaatctgacagaataagacagagacactgaaaataaagccctagaaaggaagaaattggaagcaaagaaaaggagaggtgaaaagataaaaagcctccttcaaggttaggttcaggttctgttttccatttaacctcatgtgccataaagctgcccaggcacaccagagccacatcctgaacccgaccctccctgacagtgctgctctgccagtagcaagccccagatggaggaagctgggcccatttctggccacttccacccatttggagctttgccagaggagtcgtctatgccaataatatttctgcaacagcatattatattatttgaagattagtagatctttttngggggggtggggcaggggacagtttctatagatgaagaaccagtgttggttgtacagctgttgggggtcatctatcccatgtgaagctattctttttccaaatcttgttgtttctgcatttgtgtcctccaccactcccttcttggctgacatagatatgcctgccagattgtcatcaagggtcatatttcaataaaaggtgctaaggacaaaaaaaaatctcatgtgttttaactcaggtgatggaagtctaaagattctgctgaaaagtactggaaaggaatttggtcacctatccatagtccttcacagataaacatatgaccagacccttacccacatccctaaacccttaccctggcctctgagggatggtattgatgctataccattcatcatccccagttaaatagcaggatctgccatagcctttttaggggaacagcttttagacatctatttcaagaccatcctgagtagggggtacagagtttaagccattggttatttctgtagttatcacagtattgaagcatggtatttttctactcagaaggatctcaggatcacagccctgccctttagctcactgatatatttcttcctctctggttactcagtggcaacatcacatccagtctaaccccatgtttagaatgcagaaaaagtcaacaataggtgtaatctcaggtatagacctaagcagtatacagagtctagttctggagtctagcctgatcgaaggtaagccattctttctagacttcttccaatcttgaattctgtctagtattttcatcttacttctagctgatagtccaatctcacaccttcatgctcagctccctggaaagcaagggccttggtgatctgctctccaaggcaacctcaaagattagactcaaatgtattccaggaagcaactctgacattgaaaagctttcttttttcgtgatccatattctgttcacattccaactatcctccttctactcaagatatcc

SEQ ID NO: 2282 - DNA, 472 bp, Homo sapiens
tcgtgccaaggcctggactactttttaataattaaatataaatcatgatcaccaaaacaaaacattctaataactaaaatcacagagaacaatgagatttttctgatttttcacagggctgggaagaaaaatccatcagagtaagagatggcagtggttggaaaaagtaaagacattctctacttgtaccctctgtggagttcagactttccataaatcaggcactgtgtcaatgaggatacccaggagatgaatggaatctactgtctttcccacgcttgtcaaggcatctcatctgagcagttaccaacatcagcacagtggggctggtctgccccatctccatctgacccgcccagcttgcccagtgatgcatcacaccgcaatagtgggacattttttttctaacaatggttctactcccctggtgtaaaagcaaataaacgggaatggggtataacttgatactaaa

SEQ ID NO: 2283 - DNA, 441 bp, Homo sapiens
gtttgtttttgagatggagtttcgctcttgttgcccaggctggagtgcaatgacgtgatcttggcttaccgcaccctctgtctccccggttcaagcgatcctcctgcctcaccctcctgactatctgggattacaggcatgcgccacaatgcccagataattttatacttttagtaaagacatttcttcatgttgggcagcctggtctaaaattactagaaaaataaaagtaatctattatagtaatttatttaagtgattcttatatttaaaataccagcagttaaatatgcctaggaaaatctaaataatgacccattggtattggaaggaaattggggaaatgtttaacctaaagggatgacttcctaaaattcagtagaatttcagtcactgcgatacctgggaagggaaggtaatttttttgggaggtgcatgcag

SEQ ID NO: 2284 - DNA, 648 bp, Homo sapiens
tttttaaaaaaactaataaaacatcaatagagaccttccaataaatgcctgagttgtttttgtttcgtttcgcttttgagacatagcttcactctgtggcccaggctggagtgcagtggtgtgatctcagctcactgcaacctacacctctgggttccaccaatcctcatgccttggcctcccaagtagctgcgtgtgccaccacacccagctaatttttgtattattagtagagatggggtttcaccatgttggccaggctggtctcgaactcctgacctcaaggtgatctacctgcctcaagcctcccaaaagttctgggattacaggcatgagccaccgtgcccagacaagcacccaaggttttcccacacatagagcatatgcctaggagcagaggaatagactaaatgatctattatcctgtatcctgtaagaaacagacccaactacccatgtgctccaaagccatactccataaccatcttgggcactgcaccctggaacgctgcacacacagaactcccttcagttcccaccaactgtgggacctctacccctcatcgggccatcttcatgcactgcttccaactgtgatttatccatctgtgtgtacatctgggccccattcaattttaacttaaattc

SEQ ID NO: 2285 - DNA, 403 bp, Homo sapiens
ggggaaaccccgtctctactaaaaatacaaaaaaattagccgggtgtggtggtgggcgcctgtaatcccagctactagggaggctgaggcaggagaatcgcttgagccggggaggcagaggttgcggtgagccgagatcatgccattgcactccagcctgggcaacaagagaaaaactctgtctcaaattaaaaaaaaaaaaaaaaaaaagagagagaaaagtcaaactcatcaaagacaattgggaacaaagaaggaagctaacacttaatgtgctcccactatgcaccacaaatcctgtaaagtgggacttacaaattcccatttgacagatgaggaaatggaggtttagagctgttaaatgtcttgcccaaaggccacccagctgttaagataagaaagc

SEQ ID NO: 2286 - DNA, 398 bp, Homo sapiens
taccagaagagcctcggggaaacgcggcgtggattcgcaggccttggcggggctccgaagcagtgaagggtctaggtataaggcggacacccaggctaggcctgaaagcagaggggtgaggaggacgaaggtgcgagtgtgtgggggttgtctcttgtggggagccagcgggaagccaagcaccctaagagtaggactccagatccttttgttcaccagactccccagattctagggaggctggggaccacgggctgagccccctcctggcttcagtgctgaaggagaaggcagagaggcaacggggagagagacagagacagtgacacacagcttagaggaaaggaggggagaggatgagaggacagagagagagaggagaagggagacaggaaagc

SEQ ID NO: 2287 - DNA, 587 bp, Homo sapiens
caggctcacctccctttggcttcactctctttgctcctcagcttcagagcactgcatcctcaaaggccaagatgaggatgctaaattaggaaaaaaggctgtggagtctgaattttagttcctatcttgggctagaggggtcaaagaattcctgaagcttatgtaagggccggctggtcagctccctagaaccacgggctccacagaggtggcaaaacccagtgattttgccagtatccctgcagggacctgcggtacaggcaggttgaagatctgagactcaggaaccttggcccctttgtcacttacaactgtgtgtgaaacaggactaacagtttggactgagagcactgaagctgctgtgtgttgtgcatataacttaatgctgtgtgttgtggcttgcactgctgtgggggcggggagggcagtggtggggaatggctggcatgaagcttgcttgagccaatgctatgcttgctgggctttggctgactggctttgggccaccaactgtatttgcatagtgatggcttggaagtgtccatagaagggattgcaataaaggtgtgtcttccttctgctcggga

SEQ ID NO: 2288 - DNA, 457 bp, Homo sapiens
aggcgggcggatagcttaagcccgggagtttgagcctgggcaacatggtgaaaccccttgcctaccccaagaaaacacaaaaattagccaggtgtggtggcataagcctggagtcccagctactcaggaggctaaggtgggaggactgcttgaacctgggaggcagaggttgcagtaggccaagatcatgccactgcactccagcctgggcaacagagtgagagcctgtctttgaaaaaaaaaaaaaaaaaaaaaagcaaaaaatgaggccaggtatataaataattgtaattcttcattggagttgttcagattatcttcgggtggcagaagaaggagtcgtggaatttttatatttatcagaaggtgaaatgggttacaaatcagtgtggaagctcagacccagctcaacctttgggtttgggcaggtgcaggaacagggctggtattgagggga

SEQ ID NO: 2289 - DNA, 423 bp, Homo sapiens
tagctgggactacaggcgcacaccattatgctcagctaattttttgtagagacacggtttcactttgttgcccaggctgatcttgaactcctgggctcaagtgatcctcctgcctcagcctcccaagcagctaggattacaggcgtgagccactgcgtccagccataggggtaaatcttgactgggcgaagtcttagactctaagccagtcatggttatatcagtccccttgccagggattgtttaagagtgaggatgtgatccatttctagtccatgaaatatgagaagtatatgagagggaggggtcgcttctgggtaggttttttttgtggttttgtttttttttttttttttgagacggagtctctcactctatcacccaggctggagtgcagtggcgctatctgggctcaccacaacc

SEQ ID NO: 2290 - DNA, 669 bp, Homo sapiens
tcatatttagttaactaaaacccaaaaatttggtacgtaaaacataatgcatattcctagagtgccaatggcggtatttttctgtattgtcatatccctaaagtcatattttgtactttattgatccaagggcacacttttcctcccatgtttaacatgtctaacacagggctacatcttaaaactaatgttgtcttgcagttatattggcagctttttccccttagtggtacataatctaatgttgaatcttaaaaatattgatatctcaaattcagtgaaatgggaatatttgggggaaaaatctttaaacaatacaaaaccatagactgtaaaaaataagtcttccttgatgacatcctaatctgctgtcctccccactggtagccattcttaacaattcagtggatatccatttctatgcattgacaaacaggaatatttagaaaaatgtacttacaagcaaacgtgtcatatttgtaatctttaaaaatgcacataagatcataataaatattattattctgacttgctttctttacctgaaaatgtactgtggattttttttcatatcaatggattcttcttaataaaaagtgacataattgctgtgcagcgtggtttagccatgatgaatttttcccagtgtggagagaagactatttttca

SEQ ID NO: 2291 - DNA, 283 bp, Homo sapiens
gaactctattgtatgtttactacaattcagtaaaaaaataaataataaagggataaggttttgagaaaaagtgatagatacagacagattgctaagagtattcaacacatacataatagaaatctcaaagaaagaaaacaaaaacagtggaatagaaccaatattaacatcttcacttccctgaaataagatttaaatgatttaaaatttcttattggaaaggcatacatataagaaaaaaaatctacctagaaaagtaaaaatcactggattacaaaaagga

SEQ ID NO: 2292 - DNA, 201 bp, Homo sapiens
gaaactgtgctatatgaatagtgcctaaatatttgtcaatactctagctgtccaggatatgtttctacttataggactcctgatggatgtattacctgatatcagacatcaataatataatattattggtcattttagctgtttattttaatgttatcgtggatgctactttacttctttaatttgaattttgcatcttct

SEQ ID NO: 2293 - DNA, 290 bp, Homo sapiens
tcagaaagaacatggcagagttaggagtcgaacttagacctttctgatgtcaacactgcggcttttatttattggcccaaataaaagtaaagaaccctttattagtatgatagctaactttcaacttgtccatctcaggcgatagaatgcctgaattcagctaaaatatttgcctggttaacaaatgtggtgctctgaagagaacttgaatgagatgcctttcctgtacttcccttttcctgttctatttctttggctctgcagaacatctgatgcaggtcaatggggga

SEQ ID NO: 2294 - DNA, 466 bp, Homo sapiens
gaaaaaattaaaattattaagtaaataattgagtagaaattttgagtaaattgggttgaaaaaatacttgaagtgacaggcaatgtagactttttttgaagagcaatatagacaacataggagttaaaacaaaaacaaaaacaaaaacgatacgcctcaaactatatggggcaatcttcctgcccatgattcctcccgaggtgatatgttaggaatcgtgtgcaaatgatttttgtcatccagttgctacttcttatttattcttctgtagcaagcatccaacattacatctcttatcaagactgatgctcaactggtactcactggtaggctgcagtggttatttatagcctgtgtctgttctgattggtctgattactggctgttgttataactgctgcttttagtgatttatattctctgacaccactgatttaggaagactgtctcgacatctgcctcttcc

SEQ ID NO: 2295 - DNA, 168 bp, Homo sapiens
tagtagagacggggtttcaccgtggtctcgatctcctgacctcgtggctaggtaagaggattttaaaaaaatactccaggtaattctgatgtggggcacatgagcacagccaccaagcattttttccctacacaactgcttttaaatgcagagtagttaccaatcaat

SEQ ID NO: 2296 - DNA, 340 bp, Homo sapiens
ctcaatgatctgtctaacactgtcattggggtgtgttccaatctgtgtgctccaatgttggctgcatatatatttagaatagacatatattgcatatatatttagaatatatttaaaatacattttacttactggtacttcactcacttttattagctggatgccatcatgggggcagtttgcctccattctccttcctgggatctggtgtgtccttcatgattctggtggattcctattcttcttcttaaattaaagctcagagagttgacatttatgcactattgtgctatgtccatgtggctgaagcatgctttaagtctctaatccatcatcttga

SEQ ID NO: 2297 - DNA, 419 bp, Homo sapiens
atagtattagatgtgatagttactgttatcaaagcttagaatcattactctgctaatgatggaaggagagtcagtaaatattaatatctaagctagataaaccatccttgcaaaaattatctagtaatacccagagtaaagtggctcatgcctgtaatcccagcactttgggaggccaaggagggcagatcacttgaggtcaggagtttgagaccagcatggccaacaaggtgaaacctcatctctactaaaagtagaaaaattagccgggcgttgtgacacatgcctgtaatcccacctactcaggaagctggagcaggagaattgctttaacttggaaggtggaggttgcagtgagccaagatcataccactacactccagcctgggccacagaatgagactctgactccaaaaaaa

SEQ ID NO: 2298 - DNA, 405 bp, Homo sapiens
agaattgctcatctggtagcgctccacaacccttacccactttgagcagtgtcacatactaaactttgacataaaatattgctggcagagatgttttggcttttggtattaatgttaatatcaaaaaacccccttaaaacactttcactctaaaagaacttaagctttagacaaactctgctaattcaccattttctcccccacaaactgggaagcctcagttatcttttgatgacttgaaactgatttcaattatttgtgttattgccagcaatataaatgaaaaaaatagtcaggcatggtggcttaggactgttatcctggcactttgggaggctgaggtggcaggatcacttgagtccaggagtttgagaccaacctaggcaacatagcaagaccctgcta

SEQ ID NO: 2299 - DNA, 453 bp, Homo sapiens
gcagaaccaaaaagactaaaaatgtaaaaagatgatgaaggaaagtaaatgttaaaagaaaaaaaatttccgaaaagcagccctggtgccctaacttcagcccctaggtccttaacatggctgcatcaggcaagtttcctaccctaagacccacagctttcaaatattttaaggagcaatttggtggccaaagagagaaagtctcattataaagtggcctttatgtgaggggaccttgcccaagtcatgcccaagacagaggacactgggccatctgtcctcaagtagtttttgctcatgaatccctaagataatttttgaaaaatcatgtttcccctacacatttttaagttgtcacctaaagtttttctcattaattcaaagctgtacaaaataagtttttagcatatttattttaaaataaaagtattacataatcctatgatatctaag

SEQ ID NO: 2300 - DNA, 677 bp, Homo sapiens
catccacttttgagtactgatttgcctcctcctgacttctttttgtttcaaaatctttaaaagtttttaaagggaacccatttgcatcagtaaataatgtaaagaagactgcattgatatggttacatttccaaaacccccagttctttagggatagactaagtggctggtatcatcacttaaaaaagtgtcttgaacttgatggagctcatgttgagaaataaagcttacactttttatttctattttttaattccatttttccgcaaaccctttgaagcccttttgtataactggtaaaatctgtatgagttctgtggattgtaccaatgtcaattacctggttttgatattgtactatagttatataagatgttaacattggaggagactgggccaaagtacacaagacttccctgtatatcttttttgcaaattcttatgaatttacaaatatttcaaaataaaatggtttttaaaatgaaggcaaaacaaggacatcctcagccaaatgaagactaaaagaatttgtagttagcatacttgctttacaagaaataccaagggaagcttaaggaaaatgactccatatggtaacatgaatgcacagcaagagataaagagtactggaaatagtaatcatgcgggcaaaaataaaagactgtatgaacatatat

SEQ ID NO: 2301 - DNA, 415 bp, Homo sapiens
caataggaaattagtgtgtatggcaactccatgctgaagcttctgaggcactgccaaactgttttccaggtggctgctacatgttacatccccaccaccacttggtgtgggcagtccttttgtgtacagccattccagtgactgtgtgtctcactgtggtttgagtttgtatttctctaatgactgatgatgttgaggatcttgccctatggtcattagccatccagatatattctgtggcgaagtgtctattaaaatcttttacccatttaagagttatggactttcggctgggagaggtggctcacacctataatcccagcactttgggaggctgaggcgggcagatcacctgagatcagaagttcaagaccagcctgggcaacatggcaaaaccctgtctctactaaaaata

SEQ ID NO: 2302 - DNA, 419 bp, Homo sapiens
agtacctttatgatttcatttccttctttatccatctggtattcattttgacaaatggtgtgagctgggaaataacgtgtattatttatttatttatttcccggatgggtactcaattctttcatcactgttaaaaagcacgtatttgtgtgtgtgtgtgtgtgtgtgtgtgtgtgtgtgtgtaactattcctaaagtgaacatcttgaacagctggacactgaaggtaacgcagctctagactttgggtcatcattagaaataccagcttaacaggcagaaatatcagcttaacaggcagatgtggcactttctaacagatgtgagcttttgaatcaaacggattgacatttgacattcaaatccagctttgcagctcactgctggtgcaactttgagcaaaccaaggatcctccctg

SEQ ID NO: 2303 - DNA, 1838 bp, Homo sapiens
cttgatgtcttgtttccagtcccttcagaaattatggtggagatacacacatacacattaatggaataaacactcttccctcctctcccttggggctccttcccccaaagaggtccattgtccacaagtactcatttgtgggactcaatatgttcccagccacaacaagagcattacattagaataggagctaacatgtgggaatcagcatatgtttagaattacatcttacacactgaaaaatgcactggaagagcagccattattgacagagacggtcctggctaatagatctgcctagttttaggctgcttaggggaacaggggtcctggaataagaagccccaccccctcctatgaagagaggaaagctggagacaaaaagaggaagcaagagatgaattgcaaaaaactaatcagattgcaacctcaaggtaacattttgcataataagttctaacaatgttttcttgtttatatcagcctcctcctcttagcctggcttactaggctggtgtttaattccaatgcttctgggttaatttattcaactttattatccttactatagtagcctcccctagcgttctcccctacctctcaaaggtctcatctaagtgtgtataaagctgttaaatagaggagaggaatcaggatgaactgcacagcattttcttaaggcctgtgggttctggagcctatgcttcagcaactgaagctgaactgtgtggttgttgctaacattggtgtatccaccactaagcctcagaaataaaactttactgatatctttgaatcccatgtgtgtccttccctgaatgcattgctttgtcacccagaggtaacagctatccagcattcagtgcttatcatccccatgtctttctttattggttttctaaatttggaatatccctggagacaactttggcaactgaagctaaactgtgatggttgttgacctctgatgtgctactttttaatcaagaacttattttccctctttctctctcagctcccacaggcccattctggtgactcatgacttgtatacacagaacaacagagaaaagaaaaatagaattagataaacaagcaggggcaacagtgagggctatgtcttacaaagaaccatttttaattgaattcattttctctcttgaaattcttttttttttccctcaaaagtgggaaaaaattctcaaataacaacagcaaaccaagaaagcagcttagtctgcactgcatttgcatttcttagtttcattccctattcaaaaatgtcttaggcaaatgtgtgggaatgaacatgcactttaaaattatgggacctagtagatttaatggaatgagccctggattgggagccaggggacctggctttgaatggtcccaacccaggcacttatttaccttagtttcttcacttataaaattaaacacaccatctactgatgaatggataaacaaaatgtgatatatccacagaagggaatcttgttcagctgtgagaaggaatgaagtatggacatgtgctataatgtggatgtgcgttaaagacattatgctaagtgaaagaagccagacacaaagaccatacatttcacgattccacttacatgaaatgtacagaatagctaaatctaaggacataaagtaggttagctaatgggtacaggtttcattctgggttgatgaaatgttccaaaattgattgtgctgatggttgtatttaaaactctgcatatactgaaaaccatttaattgtacattttaaatgagtgaattgtatgctatgtgaattatatctcaataaagttgttcaaaaaaaagagaaa

SEQ ID NO: 2304 - DNA, 667 bp, Homo sapiens
cccccatatgacatattgagaaggacacaatcagaaatatcacttcagtgattaaaaaaatgcataacgtcaacctaatcatgaaaaacaaaattagacaaacccaaattaaaagacgtcctaaagacaattagccagtattcatcaaaagtgtcaaggtcatgaaagccaggaaagtaggaactgtcacagattgagggagactaagaagagagaacaaataaatgaaatgtgagattggattctggagtagaaaaagaacaatacaggaaaaatgggtgaaattcaaataaggtctacagtttagtaagttatctaaaataaggtctatagtttagttatctacagttagtattatgaaaggtctttgttctttttcatacttaattttttatattttcttaattgaaaacattacttttacaataggaaaaataattttacttgtttatcaccttttcctttctaatatgttcatttattcaaaactacatcatacagagtaatataaaagggtatataaatagcaactttgcttattggctcattttgcctcccatatatacctaccacagctcttgctgtgagcattctccttagcacgacaacattcactgtaggaaaaaggtatgggcatcacgatcactacgtgaaaagggctcagtgg

SEQ ID NO: 2305 - DNA, 388 bp, Homo sapiens
caagggcacaccaggctaatttttaatcagatggatttagtgatagcaaataaagagaaggagaacaaaaccctcagccaggctattgtgaatgggtgttaccaaaaaatggcattagcagggcaccaggggccaggccagctccaggcagccccgcatctgctcagcaatccccggagtcttctagggggcctggggcagccggaacctggccgggtggaggatttctaccacgagaaagtcagggccctccccgaaggagcagaagctctgcgggtgactgtttgggaagctggtctgctcctgatactctgcaggaagagaatcacactctttagaccggggtctcagatttcagccggacgggaactctctgcagggccggtgg

SEQ ID NO: 2306 - DNA, 367 bp, Homo sapiens
agtctagctttaaataattcaatttaaataccttgagataaggcatcaaggccttgtatataaatatgtttttaaaaatttcctgtgttggtcgagcgcaatggctcacgcctgtaatcccagcactttgggagaccaaggcgggtggatcacctgagatcgggagttcgagaccagcctgaccaacatggagaaacccagtctctactaaaaatacaaaattagctgggcatgatggtgcatgcctgtaatcccagctactcaggaggctgaggcaggcgaatcacttgaacccaggtagcggaggttgcagtgagctagattgcgccattgcactctagcctgggcaacaagagcataactgtcc

SEQ ID NO: 2307 - DNA, 388 bp, Homo sapiens
tttttttttagctcatttgctattgttagtgttagtgtattttatgtgtggcccaagacaattcttcctcttccaatgtagcccagcaaagccaaaagattggacatccctggagaacatcacaggtatataacacacactgctgtgggttgaattgtatcccctagaagatacgttcaagccctaacccctgggacctatggtgtgacctcacctggatagagggtctttgcagatgggatcaagtaaagatgatgtcatgctggaggaggatgggccctaaatccaatggctggtgtccttataagaaaaagtttggacagtcacagatagccaggaaaacactgtgatgacagaggcagagactggggttaggagtctatgagcc

SEQ ID NO: 2308 - DNA, 406 bp, Homo sapiens
gctgtgccgcctactactactaaattcgcggccgcgtcgacagaacaggagacgagaaggaggggagagtgaggagaggaggagagaggcttgtcaaaatctttttagtgcacaaaactaattttgttcatcttggatttggtgagctgggtaatattctgtgcacggctcctaaatgaattattaaatgtcaactcaagatggcttaactaaaatactcaatttaataaccaaaagtatctaaggtaacaacaacaattttgcaggtgattgtagagttgtcaagtcaaaccattatagacaagcatttggggttttcacataatctccttccacatctcatcttctgtcactaaatacccactctggtgagcatattccatttcaataaagatcatcgcttcgg

SEQ ID NO: 2309 - DNA, 402 bp, Homo sapiens
gctgtgccgcctactactactaaattcgcggccgcgtcgacagataatctccttccacatctcatcttctgtcactaaatacccactctggtgagcatattccatttcaataaagatcatcgcttcggtgccagcttctttttattcagatcgagccagaaaaccttttttttttttctaaaatataaagcaaaacaagatctcagtcacaaccaccaaatctttattaatgcattccttgtgctacttctgaatattaataaaaattaataattaattttgcctttggcattgcaagatatactagttttaattagtgtactgtactcctatacaattaaaaaataattgatgtccatgaaaaaaaaaaagtcgacgcggccgcgaatttagtagtagtag

SEQ ID NO: 2310 - DNA, 680 bp, Homo sapiens
gctgtgccgcctactactactaaattcgcggccgcgtcgacagaacaggagacgagaaggaggggagagtgaggagaggaggagagaggcttgtcaaaatctttttagtgcacaaaactaattttgttcatcttggatttggtgagctgggtaatattctgtgcacggctcctaaatgaattattaaatgtcaactcaagatggcttaactaaaatactcaatttaataaccaaaagtatctaaggtaacaacaacaattttgcaggtgattgtagagttgtcaagtcaaaccattatagacaagcatttggggttttcacataatctccttccacatctcatcttctgtcactaaatacccactctggtgagcatattccatttcaataaagatcatcgcttcggtgccagcttctttttattcagatcgagccagaaaaccttttttttttttctaaaatataaagcaaaacaagatctcagtcacaaccaccaaatctttattaatgcattccttgtgctacttctgaatattaataaaaattaataattaattttgcctttggcattgcaagatatactagttttaattagtgtactgtactcctatacaattaaaaaataattgatgtccatgaaaaaaaaaaagtcgacgcggccgcgaatttagtagtagtag

SEQ ID NO: 2311 - DNA, 947 bp, Homo sapiens
  misc_feature (355)..(355): n is a, c, g, or t
  misc_feature (393)..(394): n is a, c, g, or t
  misc_feature (407)..(407): n is a, c, g, or t
  misc_feature (441)..(441): n is a, c, g, or t
  misc_feature (462)..(462): n is a, c, g, or t
  misc_feature (480)..(480): n is a, c, g, or t
  misc_feature (484)..(484): n is a, c, g, or t
  misc_feature (487)..(487): n is a, c, g, or t
  misc_feature (517)..(517): n is a, c, g, or t
  misc_feature (520)..(520): n is a, c, g, or t
  misc_feature (542)..(543): n is a, c, g, or t
  misc_feature (554)..(555): n is a, c, g, or t
  misc_feature (557)..(557): n is a, c, g, or t
  misc_feature (561)..(561): n is a, c, g, or t
  misc_feature (622)..(622): n is a, c, g, or t
  misc_feature (653)..(653): n is a, c, g, or t
  misc_feature (658)..(658): n is a, c, g, or t
  misc_feature (720)..(720): n is a, c, g, or t
  misc_feature (726)..(727): n is a, c, g, or t
  misc_feature (759)..(759): n is a, c, g, or t
  misc_feature (776)..(776): n is a, c, g, or t
  misc_feature (789)..(789): n is a, c, g, or t
  misc_feature (795)..(795): n is a, c, g, or t
  misc_feature (798)..(798): n is a, c, g, or t
  misc_feature (820)..(820): n is a, c, g, or t
  misc_feature (822)..(823): n is a, c, g, or t
  misc_feature (825)..(825): n is a, c, g, or t
  misc_feature (894)..(894): n is a, c, g, or t
gcaccctaccacgtcccaggcgaagggaccgagcccccagaccaacaaggaactgggaaactttttccggagcctgtggggaccttatgctggctgggcccaagcgggcctccttggcaatgcatttgatggccaccagcttctgcgtcctcttatcttctgccaggatcacctccgagaaggcccccctatcgggagaggggattcacaaggtgaagaactggaaccccagcttccctccagcctctcctccattccctatgggttctgtgaccactgctggaccaaggacgtggatgaccctcccctagtcactcatccatcccctggctccagagatggtcacatgacccanccctcggccagtcaaagtagtctctcccctggccacannaattgatcatatnatgcaagccagcaaaatagcactttgagaatgantctcctgttgagactggtagnatgtaagcactggacgcnaatngcnatcatctttcccaccacctgaaaaaagccnacntgaaaatgaaattaacaaaaannaaatccaaccnnanaaanagcacaaatatattctacctgataacaattatgtgtcacctctgagatccagcacatgacnctgaggtctacaccctgggacttattggatntcatntgatacagttaggttcatccctttttccatgctaattgcgagtacggtggctaatttaacancccttnngaaccttaaagaacacatcaacatacacccgngaacttttttagaaaancaaaatctctacngctttngancctgggtcaaaaaaaagaaaanannanagaaatacaaaactttaggccctgccccagatttactaaatcaatctgcagtttaacaaaatcctcagntgatttctatgctcattgaactttaagaaccagtgttttagaacagattctta

SEQ ID NO: 2312 - DNA, 508 bp, Homo sapiens
gcagctgttacggggcagctggctctggtgcagctgctggtggagaggcacgcggatgttgacaagcaggacagcgtgcatggctggacggccctcatgcaggcaacctaccatgggtcagtgccagccccacgccctcagcgacaaggccagacagatgctctggcctgagatggaggttcccaatgggctcttctggtcctgagatgctgcatacaaaccccaggactatgacgacattgaggcatggaaaaaaaaaaaaaagcggcacaggctcattttagtcccacccttctgtgtccagatttcctgttcccccatcacagaatttcacaatggccctgaaaaaccatgcagcaggagcattttatgcagagagataaggttctctaggttggtttcagttgaacacagtgactgattcattggagttttcacattgagatatagtgacctccttaagtagctcctgtatgaagtaaacattggttattcatacaaatgtcgt

SEQ ID NO: 2313 - DNA, 550 bp, Homo sapiens
cccatctgacaccaagtccagtgttcctgtaccacatgcaccctcaagtgggcacacaagcaggaaagaacctcacgaggccatttaatctttggctgtttcaaggaaggactggcccctgaactaacacatcagaaacagatcctcaagtggggagctgaatgctacctggtgttcctatgatccattcctgctctgtttactctcccactgcctgaatggctagttcacacctcctcccctaactgctggcagagggaggggccttgcttcccatttcactaagaaaatttaagcctgggcgtggtggttcatgcctgtaatcccagcactttgggaggccgagatgggcaaatcacttgagctccggagttcaagaccagcctgggcaacatggcaaaaccctgcctctactaaaaatacaaaaattagctgggcatggtggcgcatgcctggaggagaattgcttgaacctgggaggcagaggttacagtgagccgagattgcaccactgcactccagcctgggcgacagagcaagactctgcctc

SEQ ID NO: 2314 - DNA, 449 bp, Homo sapiens
gtttctattttctcatcagtagttcaggggaattgtaactgcagggacaaccctgtgttgaggcagctcagactaaagctctctgttgagttatggatatggcctccacaagcattgccatgctttttctgtgggtttgtttggtttggtttttttaaacttttgcactaaaagcagtcagttcctcctgtttcttcaccagtgaaacagcattctgttttgaaagtatagtgacagtgctaggcttttgaaataaagaaggtgagtgggagcagaggtcaacctgagaaactcatcacaagtccaggtggaaggaaagatgcgaccctaactattagaaagccagtccccatagaggtgcactttattagattaggcctctgaccagaacatggacttagccagcccacttgtctatgtgggcttaaaaactggtctatgtctgcttt

SEQ ID NO: 2315 - DNA, 307 bp, Homo sapiens
attgcaaggactggtcaagagaacgtgtttggaaattggaaattaatcatctatgttgaggaaataatttataacatttgagtttctccggtgaatcattaacatagtttccatatttaaatttctgccattatattttttcacattgtctgtcttctttccaaataacttctcagagaaactcttagaaaaagcagtaataattaagggctaaaaaaaagagcttcagtgcacttgtgacatcattttatccgttataattaaccattaaaaattagttaatattagttacctaactaaagttagt

SEQ ID NO: 2316 - DNA, 659 bp, Homo sapiens
gtgacgggacaagtctgcctccatgagacatctggcaatatctggagacatttcagttttgttgttgtggggttctgagacagggtcttgctgtcagccaggtgggaatgcagtgagccaccacagctcactgcagccttgacattccaggctcaagtgatctgcctgcctcggcctcccaaagtgctgggattgcaggcatgagccactgtgcccatccgggatatgattgccttataatgttttgaggtgtgggctgtggcatttacatgcttagggctttgtcagtttttggatatttatcttgtggtgaggtaaagtgttctgagcaaacaaaatgtatgtgagtgtagtctttttaccggctattgtagagtgggcattttcagtcttggcactgttgacattttggattaactaattctttgttgtgggagcctgtcctgtgcattgtaggaatttagcagcatccctaaccttataagttgtcagtagcattccatgtagtgaatactgaaatgtcagcagggcatgctggctcatacccataattcagaactttgggatgctgaggcgggaggaccacttgagcccaggaattaaagaccaatccgggcaatataacaagatcccgtctctactcaaaaaaaaaaaaaaaa

SEQ ID NO: 2317 - DNA, 383 bp, Homo sapiens
gcttttgcagacatgagctgggaagtgaaaagtttgagcctcccaacacacatgttcccaactgaggtggaacaaagggatgctcatctttcatactgtgaataagtgtccttttcttgggtctttttagtgccttttttttttttttttttgcatttttgtattttttttgttgttggtgatttcactattaaaagcccctaagtgtagtgatgaagtgctgactagtgttcctaagtgaaagaaggctgtgttgtgccatatgtagaaaatatgtatattggatgtttcttttaggtctgggttacagtgctgtttgccatgagtacaatgttaatgaatcagtatatattaaataaagtgtcttaaacatgcgttaacat

SEQ ID NO: 2318 - DNA, 261 bp, Homo sapiens
aggactaacaaagcagtggtactggaatgccagctatattaatgagttttgtattaattacatattgaatgaaacaaagatacaaaagacaaaatctagattttgattgttttcaaaaccgtctcacacccaaatgcaaagcagttggaaagtacaagctgagggaggactaaaagatgttttctacattcttctaaataatgagccaatatagtttaaactgactgctgaaaataatttcctaaagtctttatatgtatt

SEQ ID NO: 2319 - DNA, 972 bp, Homo sapiens
acgaacagatgaatgggccaaccactgtgctggagcatgtcattgtggccctgatgagctgtagaaatggaagcttgggattagggtttttctgtgtgtgtgtcgtgtttgttttttttttttcctttctgtggagatcagtgcctcactccgttgcctaggctggtcttggtctcctgggctcaagcaatcctcctgcctctaccttccttagtgctagaatgacaggcgtgagctactgcaccggtgtgtaaattacacgtgtaaatatagtggcttcgaggctctcatgacagtaatgctactctaacattctgatatgctttctaagtgggagagggctgatttcagtgaagagaagcgtcgcacaaagccagcttgtgtctgtgtctccgtgtgtgttttgtgtctcatgtttcaccacagttaatgggtagcttcgctttccagccatcagtgtcatcatcttcatttttccccctttccatttcactgccaaactgttatcactgctggagtaaaagctaggaatgcaagtagtttcccagtttatagctggttgtatcaacccatgacgttactgtttatgaatttgaacattcaaaaaggctaatcttcaaaaaagcttagcaggattttcacaatgactgacagatagtgtcctgaggccccaattatgaagattcttatggttaaaattgagcaagttttttttggagtacattggcacgatctcggctcactgtagcctctgactcctgggttcaacgattctcttgcctcagcctcctgagtagctgggactacaggcgggcaccaccctgcccagctaatttttgtatttttagtagagatggggtttcaccatgttggccggggtggtcttgatctcttgacctcgtgacccgctgcctcggcctcccaaagtgctgggattacaggcgtgagccaccgcacccggtctagcagtga

SEQ ID NO: 2320 - DNA, 685 bp, Homo sapiens
acgaacagatgaatgggccaaccactgtgctggagcatgtcattgtggccctgatgagctgtagaaatggaagcttgggattagggtttttctgtgtgtgtgtcgtgtttgttttttttttttcctttctgtggagatcagtgcctcactccgttgcctaggctggtcttggtctcctgggctcaagcaatcctcctgcctctaccttccttagtgctagaatgacaggcgtgagctactgcaccggtgtgtaaattacacgtgtaaatatagtggcttcgaggctctcatgacagtaatgctactctaacattctgatatgctttctaagtgggagagggctgatttcagtgaagagaagcgtcgcacaaagccagcttgtgtctgtgtctccgtgtgtgttttgtgtctcatgtttcaccacagttaatgggtagcttcgctttccagccatcagtgtcatcatcttcatttttccccctttccatttcactgccaaactgttatcactgctggagtaaaagctaggaatgcaagtagtttcccagtttatagctggttgtatcaacccatgacgttactgtttatgaatttgaacctgggaggcggaggttgtagtgagccgagattgccccactgcactccaacctgggtgacagagccagactgcctcaaaaaaaaaaaa

SEQ ID NO: 2321 - DNA, 466 bp, Homo sapiens
ggcttcaccatgttagctaggctggtctcgaattcctgacctcatgatcagcccaccttggcctcccaaagtggtgagataataggcgtgagccgctgcgcctggtgtgcttaagtctttaatacatcttgagttgatttttgtaaatggtgagggagaagtgtccagttttatttttctgcatatggatatccaattttctcagtatcatttattgaagaggttgtcctttccccagtagatgttcttggtgcctttgttgaaaatcagttggctaccaatccatggatttatttttgagttctctattctgctccattggtctatgtgtttgtttttatactaataccatgctgttttggttattattgctttataatatattttgaaatcaggtagtgtggtgtctccagcttttgaacaaatatttattgaacatctattatatgccaggcaatgctctaag

SEQ ID NO: 2322 - DNA, 388 bp, Homo sapiens
atatgaaggttaaggttaaagaaattgtaaacaagataaaaaggcaaataatggaaatgttggtagaatatataagagatttaatatccctactctacaaggatcacctacaaatcaattgaaaatggtcaaccatgccaggcatggtgattcacacctgtaattctagcactttgagaggctgaggcagaaggatcacttgagcccaggagttcgagaccagcctgagcaagatagcaagaccctgcctctaccaaaaaaaaaaaaaaaaaagctgagtatgatggtgcacatctgtagacctagttacttgggaggctgaggctgaggaggatcccttgagcccaggagttcaaggctgcagtgagctacaatctcaccactgcac

SEQ ID NO: 2323 - DNA, 345 bp, Homo sapiens
tagaagaatgaagctgtgtcctcatctctcaccttatacaaaaatcaactcaagattcatcaaagacttaaatctaagacatgaaaccatagaaattctagaagatacatcagaaaaactcttgtagatattggcttagggaaagaattcatgactaaggacccaaaagcaaatgtaagaaaaaccaaaataaataaatgagacctaattaaactaaaaagcttctgcacagcaaaagaaatagtcagcaagtaaatagacaacccgcagaatgggagaaaatatttgcaaactatgcatctgacaaaggactaaaatatcgagaatctgcaaggaactcaagaa

SEQ ID NO: 2324 - DNA, 358 bp, Homo sapiens
gatgatgacagtgacaaaaatgataacacagataatttccttagactcctcatcccctggatggttttctgcagggctgatgtttatcaccttcttcaaggtttcatactttgcagaatcttgaacaagcctgtgcagattatacctttctttgccatgaacaagtctatgatcatgagaaagttattaacctctctgagcctcagttttctcatctgtaaaatgggaatggtaatagttcctacctcctagtgttactgtgaagaataagttaacatgtgtctaacatttagaagaatgtctggcccttaaatatatatgcatgttgtgtgtttttagattttcctgccaatgagag

SEQ ID NO: 2325 - DNA, 322 bp, Homo sapiens
gaagagttccccacagcacaggacagtgactgtggcagatccttgccagactgcttccttaggtgggacccagatctattcctttttactggttgggcctccctgtgggaatttcagcaactccagccagggttttacaggcagaattctgatctctcagggacaaagcccctgtgaggaggggcagctgtggtcttcatgtttcagcagacctagtcttccctgcatgctggctctgaagattccaggcattctggacaaaggggcctccccacagtgcagtatggctgctccactgagagacagccagagtgatttatta

SEQ ID NO: 2326 - DNA, 432 bp, Homo sapiens
ctgattattatttaatcactggaagtatataaattaaaattagaatgacaggctgggctcagtggctcatgtctgtaatagcagtgctttgggaggctaaggagggaggaccactttaggccaggagtttgaggccagcctgggcaatatagtgagaccctatctctacctacccccacccctaaaaaaagaatgacagataacctaatacagtgacttacaaaaaaagttagtttatttctctgtaacctaaaagtctagataagtggtcttgggcaggtggcaaatactcaaatactcagatttcttctgtcttaatgttctacaatgtgtggctttgaccatatcatcccaattgggagcatcccaatcccaggaagcaggctaggggaagcaaaaaagggacaaagaatatatacagactgccccttc

SEQ ID NO: 2327 - DNA, 376 bp, Homo sapiens
tgtatgaactttacctgacattttatcatgccttgagatattaactagtattgtgaagccaatatttaaaactacttttcattttatctttgtgtcatcttattaaaagtgctgtttttggccagacatggtggctcacgcctgtaatccgaggactttgagaagtcgaggcgggaggtttgcttgagcccaggagttcgagaccagcctgggcaacatagtgagactttggctttactaacaaaaataaaataattagccactggtggtggtgcgtgcccgtagcaccagctacttgggaggctgatgcttgaggttggaggatacaaggctgcagtgagctgtgatcgtaccactgcactccagcctgggcgac

SEQ ID NO: 2328 - DNA, 394 bp, Homo sapiens
tctgtacactgaccccctattctgccaccccaaggcggggaccacgtgctccagtcaagatccgcccccctccccaaaatcccatcttgctagagctgcaggtcgtctctggtttctacccagagagctggaggaactccccacaccccttgacccacgcttggtgtccagtcagccggcgagctcggcagcttccccagggacacaaagggttaaatccaggcgaggggactcggtcggatttgcctcctaaacgcattttccagttcattccccagcacaatatgcctgggctggtcccagcctccgtccccaccccacccgtcagaatgggccaccagggccaccccggggtcgggcgcgaggttaacccctcggctgccggcagcccgca

SEQ ID NO: 2329 - DNA, 412 bp, Homo sapiens
attctgtggttttgtttcgacaaaaactggaagttttatgggttccacttttaatcttgttctacttatttgctcattattattaagaatgatttctagtccaggcttggtggctcacgcctgtaatcccagcactttgggaggccgaagtgggtggatcacctgaggtcaggagtttgagaccagcctggccaacatggtgaaatcccatctctactaaaaatataaaaattagccgggtgtggtggcgggcgcctgtaatcccagctacttgcagggctgaggcatgagaatcgcttggacctgggaggtggaggttgcagtgaactgagatctgagatcacgccactgcactccagcctgggtgacagagtgagacttcatctcaaaaaaaaaaaaaaaaagatttctg

SEQ ID NO: 2330 - DNA, 1658 bp, Homo sapiens
tcttatcacactctttcaagtttccttaatgtatctggaaggaatagaagttggattcagaattgataactggcatggtgatgacaaacctgtgtagcaccaaggttctcacagctaacagctgtttcacaaacggcatcttccaaatgaacagtcacctctgctatgcagaaaacccccatcctgctgtgagcaagttaggctcttcaagaactggacaacttttgggtgaggtgttcaatatcaaactgcataatcattagccattttcatatatactattttatagatttaagtctctcaactatcaaaaagtagagcgatttttaggagaaaaaagtcgtggggactgagttcaggacaccctgaaactatgcgaccagtaatttttttaaggtattttttcctacaagtaaggtatctgaaaagtcaacgttttgagggtggaatcaagacttttcacttctcctggcaaagagcaacaaggctcttgtctcgtgtccttctgtgtgtctctgtcaggatcacagcagctgtgctcttggtctgcttactcctctgtaatccacgtatgcagaagggagttaataaggtgatcaccatctccccagaattcaaaggtctttgcctctataaggtctgcccctatggggccaggaaaatataaacctatataaggacttgcaagagagcataaagaaggtagaaaaggtttacttgttgggttttcaagccttcaagttgaatgagtcttagcttttgctgggcagttgttctggacaagtcatcagtttcatgtggagaactcagtgtaagcccaaggctaatgaatgagaggggtcccatggaaacacagctgaaatgaaatgggactttatccatcttctttgagaatggaagagcttttgtgaagcagtacatcattgctcaagataatggttgataagcattagattttatagatctaataaggaaaatattttattatctcaagttaacaaaacatttttttacctctcgagtgcctcataggaccaactattactctttggcttttatttttctttttgtattatttttatatattctttaaccttgctgagctagtattgactgaaatctttagaactttgcctctgggcaatgaagtaatgtttctctaccctaagatatctatttgtataatctctggctgtaatgatcactttggaagatttcctttgcatctctaattatttctttttaatggaataaggcataagggggaataaatatattgtaaccaatgttatgtaaacccatatccatacaggccaggaaagccaaatgaagtcatttccagaattctagtgtgaaaaacctatttttgaaaagtggggagatggctttgtgtagaactgggtgggttttctctgcagactaagtctagccatgagcttccagatcctttagttttatcagccttgtgcttaccccattttcataaatgctactttaacagccagtcttcgtaagtcatggttcctaggttttcctgtcacctcattgaattcatctgtggtaggatattaacgggctcattcaaccaaatgtaatgtgtgcctcagacctatttagcatggttggggggcatcagcaggacaaaccaacaggtactc

SEQ ID NO: 2331 - DNA, 360 bp, Homo sapiens
gcttttcctgaacatgttttcagaatttaaaattgtatatggaaaacaaattacatgaaagatttgagcatttcaaaattttaaacataaaagcataaacgtagataaaatgaaggtgtactatgatatcttcagttttatcagaaatgatgtaaaaattacaacctctttaaaaagtagtgttaatcattaagttagaaaatatatagctgggcatggtggcagatgcctgtaatcccagctacatgggaaggtgaggtgggagaatcgcttgaacccaggcagtggaggatgcagtgagccaagatcatgccactgcaccccagcctgggtgacagaacaagactccatctcaagaaa

SEQ ID NO: 2332 - DNA, 383 bp, Homo sapiens
cccttgtataaaacaaggacagagtaggtcagccccaacactccccctacctgtctggcctttctttcatggaggcacacaacactattcactctctgtagattgaggaggccctaaatccattgctcccttctgtctggacctaaaggacacaagaccttattaagcttcagcttcatttgcataccacatgggatgaggtattcactcctccctggcttgggctggtctgctgaccctgtcttggagtctcagtaagcccaccctttctcccactccctcatctctctccttccatcctgggccctgcctagctctgtcccaacctagaccactccaggaattttccagcctgccagatctggccccccaggagccactag

SEQ ID NO: 2333 - DNA, 330 bp, Homo sapiens
aatagctttctttcatgtcccctccttaattcattatattttaaaaagtagccgggcacagtgtctcatgcctataattccagcactttgggaggctcaggtgggcagatcacctgaggtcaggagtttgaaaccaacctggccaacatggtgaaaccctgtctctactaaaaatacagaaaaattagctggacgtggtggtgcacacctgtaatcacagctactcgggaggctgaggcaggagaatcacttgaacctgggaggcagaggctgcagtgagctgagatcatgccactgcactccagcctgggtgacatgtctcaaaaaaaa

SEQ ID NO: 2334 - DNA, 1402 bp, Homo sapiens
ggccagctctggacagaagcctgggattagtgagctgtgattacatcactccttttctgctcctccgcctttaagagcaagcttctttatgctatccctggatggttttgttccaacccctatgctatgaggtctctcttgcccttggagatttaaagttttgtatcagaaatagatttgaagatcatcatgaccaaatgtagttagtgctatgtgagaaggatatctatcacacaaaatgctttatggtcacagagagattagttctgtctgaagggaaaggggagaagatgacaaacatgccatcggggcaattaacatataacccttccacgggtgagaatactggaccaaatgacctttttggggtgcctttctgttgtgaattttctagtttattaataacccaagaactgtgccttatagtccatagtattcatacctctcaaaaccaaggtacttaggattggggaggaaaaagactctactaatttttaaagtagacctaaacaatttgcactgcctgtgtctttgacctgattttttactctcacctttctttatctgtccagttacctttgtatactaccaaagctttaaccttctgtcctctcaaacttttttaaattttactttatttaactaccaatttatcaaaacagtcatttacacttgacgccagcccactccgaaacagctgctgtctagcttctgctaccagcacttgactatgcttatttgaagatcatcagtgatacactaattaaaactccagtgacttatctggctttgtgttccttcatctatgccacagttgaatcattgaccactttttgcttgaagttctcagctcatgctgctttctgttgagtgcttctcatgctacctcagtggtacttgttaaatgttttccttttctactttccctccatttagtcgcacaaagcccccaccctctatactcgtctctgcctatttaacagatcctacctatgctctaaggcctggttcataggccatcttccctttaaatctttgagctaaaatgttttctcagttctgtagtttttaatctaatttttacttggagcacttttaggatgactgttgccttgatagtatgattttgtacacatttcttaactactctagcagatgttaaaaaaataaaaaaaggagagaaatcatcactgtagcttctgcaatgctgtgcattattagaaatctttaaatatttttcttaatatactgtggtagggagaataatggcaccccaaagatccccatgtcttattctttgagttagtgggtgcagcgcaccagcatggcacatgtatacatatgtaactaacctgcacaatgtgcacatgtaccctaaaacttaaagtataataaaaaataa

SEQ ID NO: 2335 - DNA, 337 bp, Homo sapiens
agtactgtgtcagaccttgtggaagatagacaaagtaatgtcccttaccttaactaatttgatagtctgggaggtgagaccgacttttctgcttattattactgtgtaataaattatgcaaaaacttagcacataaaacagccattttatcatgattattttttggatcagaaattcagaaaggccatagcaaaaattgatctgtgctccatgatgtccgaggcctcagccaggaagatagctgggaaccaaacaactggggctggaggatccccttctaagatggtttcttcactcccaggtttggtgcctgggcaggtttgacaggaaggctcag

SEQ ID NO: 2336 - DNA, 452 bp, Homo sapiens
tctcccttcactttaaaaaaattcaagtcctggccggatgcagtggctaacacctgtaatcccaacattttgggaggccaaggcgggcggttcacgaggtcaggagatggagaccatcttcgccaactggtaaaatttcatctctactaaaaatacaaaaattagctagacatggtggcgctcacctggaatcccagctactcaggaggctgaggcaggagagtcgcttgaacccgggagtcagaggttgcagtgagctgagatcatgtgtggcaacagagcaagactccggtctcaaaaaaaaaattcaagtcctatctcagggtagcaactaaaatgtgagaatttcgtttaaaaattaaagccaaccgtgaacctggggttggagcctgcagtgagccgagatcgcgccactgcactccagcctgggcaacacagcgagactccgtctc

SEQ ID NO: 2337 - DNA, 1430 bp, Homo sapiens
taaagcaatgtgagtccactgaggaggaagagaccctgggatttcaccctctgggttagtctctgtctcaccctgttagaatgtcacgagggactgtactgtcccctctgtcaccagggaagccacaatgagagcttgaaagggtgctgtcaagataaatgtcatccttcttaaaatacatatgattgcctttttgggtgcctcacagagccccagagtgtgagacctgaaagaatgttcagcatctagctccatgtccctgcaaccactctctgtttgccttctgcattctgcactctgcggggcctttgcagccagactgctgtgtcaatgttactttcttgtcactttcctaccctgatggtcacactagcccaccccaagctccgacattgaggttttcatctctgcagggagaggttccaatgtccaccccacccccaggtacccgcctcttcccacagaagcaattttagaattttgcaaaattcttttccccttattgagattaatatttaagattaaaaaaaaaatacccaaagccaaatgcagttccaaatagtggacataatctcccagggaaatctgggctcgaggcctacaacttaggggctggaatcacaggtctcacatagagaaatagccagcttgaatttgttagtcgtattccttcacctgatgaataacagtgttttaaaacatatttgaaaggtaagtaaaaaactaccatcttgaaggtgaagggagttaagaaaagtaatcaagacctgctcctaagcatatgagaccagatgtaattaatcaatggcaatgcagaacaggaccttggctctaaattaatggttgaccggaagggattggaggcggcagaaccattaaccctacacaagaacactccagcccaaaaccgtgaggaaggtgatatatctctgcattttcccttgttgttgcttgaagtctgtgattggggatttgcgttataaaatgaatattttaaaaagcaacagccctaatagcctctgtgggaactgagtggtttcggactcctcacaggcggtggaaataattaataccatattttatacatctccagagcctttcatcttgaggatctcaaagaccgtagaagacatttaatttctaaagcttgaagtgccccgaggagcaggtagaatttccagcagggccttggtggattaaccaaggccttggattccagaatgtttcatggtaagcactgtggagaacctacatgtcaggttctggagttggccctgagctctatccaccaagccagcaccccaccatccctttgcaggggagtcaaagggccagaactccttgggggaccagaacatggttttccttctgcctatcttagtcatggctcctaaaattgaagctgatatgagctggagtgcaaggagtcc

SEQ ID NO: 2338 - DNA, 293 bp, Homo sapiens
catgtgtcgtggaacaggccaatgatggagcaagtctttaagttactgggagccaaggcaggactgtctaaagcagacagggcagacacagggatttgatgcatacctgatttttaatggcattcctgaaaaatcagtgccagaaagtatgatacctaaaataggacaagggcagccacaaattggtatgcatcatggcaaagtatgacaaagaacttactgagtactctgtcccattttcataaaagttcttgcaggtcctacatgtgagattatcctgtgaaagttcattt

SEQ ID NO: 2339 - DNA, 379 bp, Homo sapiens
gagtaacatcttattttataaattatttttggcttaggataggcctaatattaacaaatgtgtttaatattctattacatagaaagtagacactggtggaaggcccattaagatgtcatgatgggccggacatggtggctcatgcctgtaatcctaacactttgggagtccgaggtgggcgaatcacctgaggtcaggagttcaagagcagcctggccaaaatggtaaaacgctgtctttactaaaaatacaaaaattagctgggcgtggtggcatgcgcctgtaatcccagctactcgggaggctgaggcaggagaatcacttgaacccaggaggtggaggttgcagtgagctgggattgtgccactgcactccagcc

SEQ ID NO: 2340 - DNA, 1827 bp, Homo sapiens
atgcaaccaagaggcttggggctccattgcttcccccgctcccacccataggttggaagctctacccaggcacagtgaactcagatttgggccctgattgcctttgcctcagcttgcttgtaaggcagaggtttcacaagagaaacaaaatggctaccacccagcccattgcccagaatggtggttcagagattttgtccagagggagagacagtgtataagaatagagctctgaagctctctcaagaagaatggaatttatttgaaacagtgtcagaaacttcccttaattaaaaacaacatgaaccgtaagtcagctagttaatcaggtaattccaggggaagacacagctaaggagcccttctaaggtcaaaagaaaccttaaagactggcctcaaaaactagccctgcttggcttaaattataccaaactgcttagtaattaatgctccaaggacttgtggagaacagtagactgatcagacagaagccagtggagcctagtgggctagaaataataccaaaggagacaaacatcttaacagagagatcagggaaagatggtcaaagagactcctgtttaaaaccataccagggtatattctgcgtatgtccaaggctgtaccctctgaagagcaacaaaatgcttcccactgccagctatttcactaaaatagcttagtgaaaacacaaaacaaataactacgagtaactctgcatatgtccaaggctgcaccctctgaagaacaacaaaatgcttcccactgcaagctacttcactaaaatagcttagtcaaagcagaaaacaaataacaaaacaaaacaaacaacaaaaccactctgaagaacaacaacaaaaaccactctgaagaaggggacagggaatcagtatccagaatcgctatagtatgttacctaatatgtccacttatcaacaagaaattgtaagacatacaaagaaactgaaatgttcgacttataaacaggaaaaaagcaggcaacagaaatggcctttgacagggaacagatatcagatttaaaagacaaaaacttcaaggtagccattatatatatattcacagcagtaagggaaaatacaaagataatgtctcatcaaataaagaatatcaataaaggaaatcataagatgaaccaaatgtaaattctggagttgaagactataataactaatataaaaaatcattagaagggctaaataagtttgagctggcagaagaattagaaaactttcaaatagatcaatagaaattatgcaacctcaattccatcttcccattagaaaatagaataggaaaatgaagaaataggatgagaaaatagaacaaagaaatataaacagagcctcagagaaattcaggacgcctttcagtgcaccagtgtacatgtaatgagaataccataaggtgaggagaaagagaagcacaaaaatattcaaagaaataatggctaaaaacatccacaatttattgaacaaacattaatctatactcacaagcatctcaacaaactgtgaacagaatgaatgcaaacatatccacaaacagacacgtcatagtaaaaatgttaaaagtgaaaggaaatgttgaaagctgtaagagaaaaacaatgtgccacaagggtaccccaatagattaacagcaaacttctcatcagaaacaatggaggggatgaaggcagtgggatgatacattcaaagtactcaaaggacaaaagctttgtgaaccatgatcttatttctagtaatgctgccttcaaaaaaaaggtgaaacaaagccctcccagatctgccatatgagaaattgtaa

SEQ ID NO: 2341 - DNA, 626 bp, Homo sapiens
  misc_feature (610)..(610): n is a, c, g, or t
ctactactactaaattcgcggccgcgtcgacttgggcattttcaggtgccaatctgggtcgtgaacctccacatctggggcatcaatgtccactttgggccctttaatgtcaacatctggcactttcatttcaccttctaccttgggcacagacacatccatatcccctttgactttggggcctttcaagtgtaagtccacatcgggcatggagatcttgggggccttgaaatgcatctcaggcatcttaaacttggggcccttcaacttcccttctggaccttcaatatcaatatcaccaacattcacatccatcttaggggctttcacatcaatttcaggacccttcaagtctccttccactttgggaagggaaacatctacatcagttttcagtttaggggctttcaaattaagtccaacatcaggcatagagattttgtgcgtctgtatattcatgcttggcatcttgaacttagggccttttagtttcccctctggagcttcaagattcacatctggaacatcaatgtccaccttgggtcctgaaacaccaaggtcagccttgggcaggttcatatccacctctgggccctgtcgacgcggccgngaatttagtagtagta

SEQ ID NO: 2342 - DNA, 373 bp, Homo sapiens
atccccacctgtgtgctcatccccacctgtgtgctcacctgtgtgctccatccccatctgtgtgctcatccccacctgtgtgctatccccacctgtgtgctctagattcacatctggaacatcaatgtccaccttgggtcctgaaacaccaaggtcagccttgggcaggttcatatccacctctgggccctctcctttaaagccaggcatgctgaacttgggcatttttaccttgggcatcttcaggtgccagtctgggccatgaacctccacatctggtgcattaatatcaactttggggcctttgatgtcaacatcaggagcttgtatctctccttctacttttggaactgttacatcataatctcctttc

SEQ ID NO: 2343 - DNA, 163 bp, Homo sapiens
catactgaacttgggcattttcatcttgggcattttcaggtgccaatctgggtcgtgaacctccacatctggggcatcaatgtccactttgggccctttaatgtcaacatctctccctttgactttggggctataatgcatctcaggcactctaacttgggcc

SEQ ID NO: 2344 - DNA, 778 bp, Homo sapiens
ctactactactaaattcgcggccgcgtcgacttgggcattttcaggtgccaatctgggtcgtgaacctccacatctggggcatcaatgtccactttgggccctttaatgtcaacatctggcactttcatttcaccttctaccttgggcacagacacatccatatcccctttgactttggggcctttcaagtgtaagtccacatcgggcatggagatcttgggggccttgaaatgcatctcaggcatcttaaacttggggcccttcaacttcccttctggaccttcaatatcaatatcaccaacattcacatccatcttaggggctttcacatcaatttcaggacccttcaagtctccttccactttgggaagggaaacatctacatcagttttcagtttaggggctttcaaattaagtccaacatcaggcatagagattttgtgcgtctgtatattcatgcttggcatcttgaacttagggccttttagtttcccctctggagcttcaagattcacatctggaacatcaatgtccaccttgggtcctgaaacaccaaggtcagccttgggcaggttcatatccacctctgggccctctcctttaaagccaggcatgctgaacttgggcatttttaccttgggcatcttcaggtgccagtctgggccatgaacctccacatctggtgcattaatatcaactttggggcctttgatgtcaacatcaggagcttgtatctctccttctacttttggaactgttacatcataatctcctttc

SEQ ID NO: 2345 - DNA, 1795 bp, Homo sapiens
ggcactcccgtcctctgcatggggtcaggtgcttctgtgcttgctgtcctacctctctccacagcagggctctcaaaaccattttgatcccccattggcagagggttcccctctttacagagttcagtcattaaaagcatggatcagctgttaatctcattggaggagggaactgtttcctgcattcattcatctgggaaccttcttgagtagccactgtctgccagccactgctctagagatgggaaaacagcacggaacaaaaccaaggtctttcttccagcgaatttatatccttcaggaagctggttcctgccaccaacttagcaggcaacagttctcctcccctagtggcacagggtaccagttttgtaggaaaagtggtccagcaaaggaagaaagcagaccaacccagctgccttaccttattctggggccattcccccagcgatgagagctgctcttgtttctactgccaccatctcttctggctgcacttcacctgctgcttgagcttctgaccttccttcagttccaccaaatgaggacaggaaatagcagtcaagacccctggccctgctgagcgtgaaacagaagcaatggatgagtgctggacgaagaatggcctgggcagaacaaatagggagcatttgaaagcttctggctgataaatctccaggtgcatcccggttgccacgcctgcccccattaacctgctcctggtaaatactgatccagcagctgctccaggagaggccgtctttttttcccagccacgctgtgtcttgcatgagactcctggggcctgggcacagagagaaaagaattgagactcaggaggctcagtgggtgagaaaatgcaaagtggcttcacagacacagggctgtgggagcagatcgacggggaacttgggagatgaacttcagggccttccgacgccttgtctcaggaacatgctttgagaaaaatggtagcatcctttccataactcagtctctcttccctagtttccctgaagtgtgacgttttagtatctggagctcagtgatccccatgaatgagggataaagtttcactcttggtattttctaactagtgctagggaaagtcctgagacacgatcacagccactgcttggcatacagggcctccacccaataagcaaactggagattcctcagcctctcgtggacacccacatctcattcttctcacagcagagaagctctcccttcagcctgagctgtcttctttctgctgcagtgcagcctgctccctcctaccctggcctcaaggaaggtgggaaacatcttctgcatttcaaagtcctcactttgacttatttggccttcatcttggcatggaaggtggcaggcagaatggaaatactccccccaaacagaacagatattcttgcgtgtgtaagggcagaagggacaagctctctatcccatgagactaggggccggagcccacctgcctttccccacaacttttcctgctcaaacccactcctcttgacacactggaatctgtattatatatatttttaagaaaatacaatgatggttgtctggttttgttgtttttacaggtgttgtggaataaaaactgtaagaaaattaagtatttaaaatgttccaataaagtggggttttttgttattctaatatattattgtgtacctattgtaaatatgaaacactcctattttgcaagctgaggacacaatttgtactgttgttatatataaataaagtttactgaattaaaaaaaccttaaatctttaaata

SEQ ID NO: 2346 - DNA, 899 bp, Homo sapiens
aacaagaaaccctttctgggctggtagaaatcctgtaatgttgcctttagactgattatccactgaaggaactcttgtctgaaatagaaagatcccacagaatgccatggtcctgaggaacattaaaataaatagaaaatgagttcaggcacttagctttacaaattgatcctggttctcctggcagaaaggtagatacaggtgacgccagctgagtggaaggttgctgcctgttctttcatctggcttcataagaaccaacatggaatttgtgggtgagctggtgagaagtttttgtctgcagcttgtattagggcccctgaactcccatgtctgcctctctgaggcctgggtgtcctaaggctggaagttgtggatatgggtcgtgtagagacttcaccatgcctccactgttactcaccccaattccttccgcttccctccagcctgtccccatcgatgataacttctgtggactggacatcaaccagcccctgggaggctcaactccagtggagggcctgaccctgtacaccaccagcagggaccgcatgacctctgtggcctcctacgtttacaacggctacagcgtggtttttgtggggactaagagtggcaagctgaaaaaggtaagagtctatgagttcagatgctccaatgccattcacctcctcagcaaagagtccctcttggaaggtagctattggtggagatttaactataggcaactttattttcttggggaacaaaggtgaaatggggaggtaagaaggggttaattttgtgacttagcttctagctacttcctccagccatcagtcattgggtatgtaaggaatgcaagcgtatttcaatatttcccaaactttaagaaaaaactttaagaaggtacatctgca

SEQ ID NO: 2347 - DNA, 957 bp, Homo sapiens
ccgccgccaccggcgggagccagagctgccgggaggagcggcatccgcgccagactggagcgggagggcggcggagggcagttgctgggaatttttcagccgagagggcgagcgatccggagagagaccccgagagcttgggagcggtagggcgtgcgagcgccgcagccagcggagcaaacctcgaaatagatctggaaagccaggctcccggaggaaatgggactgtgaacgaaccggagagcaagaagggaaggaagcgccgggattgctgatgtcagaggagcccggaaagtcgcgctggaaaaatctgaagacagccggggctctgcttcttcctcaggagagacaccgccggccgcccccacacgccccctcggcgcctccgggtgccccctgagagccggcgacagcgcccagccgggctgctgcggggcgacggaggactgaggggcgcgcggagcggagaccgaggagcgacttcaggaatacagataagtgtctggtggcttgacgtggattttaatgaatttggactccatgtggatttggtcgtctccctgattccgagctgcgggcagggagaggggcctcgcgccgccctcagcagccggcggcggccgaggtagaccgagcggggacggaaggacagaccgacgtcgccgagctgggtgcctggaacaacccagcaagagcaacacaagtggtcctaaatcacccaagggccatgagcaggagggtggcctgaaatcatgggaccactgatagaaatggtgggaatgacaactcaagacctcaggtcagcacggggagaaggtgggactagcagcaccctgtttgtttcttccgaggggactgggtctggggaggcaggtgctgggtcaccaggttctgctgcacaatgatcaccaatctctcgagctaaaacagaaccctcggagtttgtcaccatcatac

SEQ ID NO: 2348 - DNA, 6851 bp, Homo sapiens
  misc_feature (1857)..(1857): n is a, c, g, or t
  misc_feature (1864)..(1864): n is a, c, g, or t
ccgccgccaccggcgggagccagagctgccgggaggagcggcatccgcgccagactggagcgggagggcggcggagggcagttgctgggaatttttcagccgagagggcgagcgatccggagagagaccccgagagcttgggagcggtagggcgtgcgagcgccgcagccagcggagcaaacctcgaaatagatctggaaagccaggctcccggaggaaatgggactgtgaacgaaccggagagcaagaagggaaggaagcgccgggattgctgatgtcagaggagcccggaaagtcgcgctggaaaaatctgaagacagccggggctctgcttcttcctcaggagagacaccgccggccgcccccacacgccccctcggcgcctccgggtgccccctgagagccggcgacagcgcccagccgggctgctgcggggcgacggaggactgaggggcgcgcggagcggagaccgaggagcgacttcaggaatacagataagtgtctggtggcttgacgtggattttaatgaatttggactccatgtggatttggtcgtctccctgattccgagctgcgggcagggagaggggcctcgcgccgccctcagcagccggcggcggccgaggtagaccgagcggggacggaaggacagaccgacgtcgccgagctggaatcatgtgagggccaaccggggaaggtggagcagatgagcacacacaggagccgtctcctcaccgccgcccctctcagcatggaacagaggcagccctggccccgggccctggaggtggacagccgctctgtggtcctgctctcagtggtctgggtgctgctggcccccccagcagccggcatgcctcagttcagcaccttccactctgagaatcgtgactggaccttcaaccacttgaccgtccaccaagggacgggggccgtctatgtgggggccatcaaccgggtctataagctgacaggcaacctgaccatccaggtggctcataagacagggccagaagaggacaacaagtcttgttacccgcccctcatcgtgcagccctgcagcgaagtgctcaccctcaccaacaatgtcaacaagctgctcatcattgactactctgagaaccgcctgctggcctgtgggagcctctaccagggggtctgcaagctgctgcggctggatgacctcttcatcctggtggagccatcccacaagaaggagcactacctgtccagtgtcaacaagacgggcaccatgtacggggtgattgtgcgctctgagggtgaggatggcaagctcttcatcggcacggctgtggatgggaagcaggattacttcccgaccctgtccagccggaagctgccccgagaccctgagtcctcagccatgctcgactatgagctacacagcgattttgtctcctctctcatcaagatcccttcagacaccctggccctggtctcccactttgacatcttctacatctacggctttgctagtgggggctttgtctactttctcactgtccagcccgagacccctgagggtgtggccatcaactccgctggagacctcttctacacctcacgcatcgtgcggctctgcaaggatgaccccaagttccactcatacgtgtccctgcccttcggctgcacccgggccggggtggaataccgcctcctgcaggctgcttacctggccaagcctggggactcactggcccaggccttcaatatcaccagccaggacgatgtactctttgccatcttctccaaagggcagaagcagtatcaccacccgcccgatgactctgccctgtgtgccttccctatccgggccatcaacttgcagatcaaggngcgcctncagtcctgctaccagggcgagggcaacctggagctcaactggctgctggggaaggacgtccagtgcaccaaggcgcctgtccccatcgatgataacttctgtggactggacatcaaccagcccctgggaggctcaactccagtggagggcctgaccctgtacaccaccagcagggaccgcatgacctctgtggcctcctacgtttacaacggctacagcgtggtttttgtggggactaagagtggcaagctgaaaaagattcgggccgacggtcccccccatggtggggtccagtacgagatggtctctgtgctcaaggacggaagccccatcctccgggacatggccttctccattgatcagcgctacctgtacgtcatgtctgagagacaggtcaccagggtccccgtggagtcatgtgagcagtatacgacttgtggggagtgcctgagctctggggaccctcactgtggctggtgtgccctgcacaacatgtgctcccgcagggacaaatgccaacaggcctgggaacctaatcgatttgctgccagcatcagccagtgtgtgagccttgcagtgcatcccagcagcatctcagtatctgagcacagccggttgcttagcctggtagtgagtgatgctcctgatctatctgcgggtatcgcctgtgcctttgggaacctgacagaggtggaggggcaggtgtccgggagccaggtcatctgcatctcacctgggcccaaggatgtccctgtcatcccgctggatcaagactggtttgggctggagctacagctgaggtccaaggagacagggaagatatttgtcagcaccgagttcaagttttacaactgcagtgcccaccaactgtgcctgtcctgtgtcaacagcgccttccgctgccattggtgcaagtaccgcaacctctgcactcatgaccccaccacctgctccttccaggagggccggatcaatatttcagaggactgtccccagctggtgcccacagaggagatcttgattccagtcggggaggtaaagccaatcacccttaaggcgcgaaatctgccccagccgcagtccggccagcgaggctatgagtgtgtcctcaacatacaaggagccatccaccgggtccccgctctgcgcttcaacagctccagcgttcagtgtcagaacagctcgtaccagtatgatggcatggacatcagcaatctggccgtggatttcgctgtggtgtggaacggcaatttcatcattgacaaccctcaggacctgaaagtccatctctacaagtgtgcagcccagcgggagagctgcggcctctgcctcaaggccgaccggaagtttgagtgtggctggtgcagcggcgagcgcaggtgcaccctccaccagcactgtaccagcccttccagcccctggctcgactggtccagccacaatgtcaagtgctccaaccctcaaatcaccgagattttgacggtgtctggaccgccggaaggagggacgcgagtgaccatccatggcgtgaacctgggtctggacttctccgagatcgcccaccatgtgcaggtggctggggtgccctgcacgcccctcccaggggaatacatcatcgctgagcagattgtctgtgagatgggccatgccctcgtgggaaccacctccgggccagtacgcctgtgtattggcgagtgtaagccagagttcatgacgaagtcccatcagcagtacaccttcgtgaacccttctgtgctgtcactcaacccaatccgaggtcccgagtcaggaggcactatggtgaccattaccggccattaccttggggctgggagcagcgtggcagtctacctgggcaaccagacctgcgagttctacgggaggtcaatgagtgagatcgtgtgtgtctcacccccatcatccaatggccttggcccggtccctgtttctgtgagtgtcgaccgagcccatgtggatagcaacctgcagtttgagtacatagatgaccctcgggtccagcgcatcgagccagagtggagcattgccagtggccacacacccctgaccatcacaggcttcaacctggatgtcattcaggagccaaggatccgagtcaaattcaatggcaaagaatctgtcaatgtgtgtaaagttgtgaacacaaccaccctcacctgcctggcaccctctctgaccacggactaccgccctggcctggacactgtggaacgcccagatgagtttggatttgtctttaacaatgtccaatccttgctaatttacaacgacaccaagtttatctactaccccaacccgacctttgaactgcttagccctactggagtcttggatcaaaagccaggatcgcccatcattctgaagggcaaaaacctctgccctcctgcctctggaggggccaaactcaactacactgtgctcatcggagagaccccttgtgctgtcaccgtatctgagacccagcttctctgcgagcctcccaacctcaccgggcagcacaaggtcatggttcacgtgggcgggatggtgttctcgcctggctcggtgagtgtcatctcagacagcttgctgaccctgccagccatcgtcagcatcgcggccggcggcagcctcctcctcatcatcgtcatcatcgtcctcattgcctacaagcgcaagtctcgagaaaatgacctcactctcaagcggctgcaaatgcagatggacaatctggagtcccgtgtggccttggagtgcaaggaagcttttgctgagctccagacggatatcaatgagttgaccagtgacctggaccgctcaggaatcccttacctggactatcgtacctacgctatgcgagtcctgttcccgggcatcgaggaccaccccgtcctgcgggagctggaggtacaaggaaacgggcagcagcacgtggagaaggccctgaagctctttgcccagctcatcaacaacaaggtgttcctgctgaccttcatccgcaccctggagctgcagcgcagtttctccatgcgcgaccggggcaacgtggcttcgctcatcatgaccggcctgcagggccgcctggaatatgccactgatgtcctcaagcagctgctctctgacctcatcgataagaacctggagaacaagaaccaccccaagctgctactccggaggacagagtctgtggctgaaaagatgctgaccaattggttcgccttcctcctgcacaagttcctaaaggagtgcgcaggggagccactcttcatgctatactgtgccatcaagcagcagatggagaagggccccattgatgccatcacgggcgaggcccgctactccctgagcgaggacaagctcatccggcagcagatcgagtacaagaccctgatcctgaactgcgtcaaccctgacaacgagaacagtccagagatcccagtgaaggtgttaaactgtgacaccatcacacaggtcaaggagaagattcttgatgccgtgtataagaatgtgccctattcccagcggccgagggcagtggacatggacttggagtggcgccaaggccggatcgcccgggtcgtgctgcaagatgaggacatcaccaccaagattgagggtgactggaagcggctcaacacactgatgcattatcaggtgtcagacaggtcggtggtggctctggtccccaaacagacctcctcctacaacatccctgcctctgccagcatctcccggacgtccatcagcagatacgactcctccttcaggtatacgggcagccccgacagcctgcggtcccgggccccgatgatcaccccagacctggaaagtggggtcaaggtgtggcatctggtgaagaaccatgaccacggtgaccagaaggagggtgaccggggcagcaagatggtgtccgagatctacctgacccggctactggccaccaagggcaccctgcagaagtttgtggacgacttgtttgagaccttgttcagcactgtgcaccggggcagcgctctccccctggccatcaagtacatgtttgatttcctagatgagcaggcagacaggcacagcatccatgacacagatgtgcggcacacctggaaaagcaactgcctccctctgcgcttctgggtgaacgtgattaagaacccccagttcgtgtttgacatccacaagggcagcatcacggacgcctgcctctctgtggtggcccagaccttcatggactcttgttcaacgtcagagcaccggctgggcaaggactccccctccaacaagctgctctatgccaaggacatccccagctacaagagctgggtggagagatactacgcagacatcgccaagctcccagccatcagtgaccaggacatgaatgcctacctcgccgagcagtcccgcctgcacgccgtggagttcaacatgctgagtgccctcaatgagatctactcctatgtcagcaagtatagtgaggagctcatcggggccctagagcaggatgagcaggcacggcggcagcggctggcttataaggtggagcagctcattaatgccatgtccattgagagctgagaggaggagcctcgcattcctgggaagagggacctgtccaagctgtcacactgggagtctcagatggaaggacaagtgatggggatcaggccccagagcttgctgtcccctgagaccccatcctggggagaggggaggactcctctccctacgccagccaagtttcgtcatagccagttccagctgggagagacagtgggcgtcgtccatcctcagtgagaacaccagagaacccggggccgggagaaggtggttcttcaagccgagaggcacgagctggggacagttctgcctctgtgactgctgctttgcatgaaaactcatttgatgtatattggggaaataatgagaactttatttaatttttttaagaaaaagggaaaaaaacagaaataaaacaaaaagccgccctgtt

SEQ ID NO: 2349 - DNA, 9139 bp, Homo sapiens
  misc_feature (1857)..(1857): n is a, c, g, or t
  misc_feature (1864)..(1864): n is a, c, g, or t
ccgccgccaccggcgggagccagagctgccgggaggagcggcatccgcgccagactggagcgggagggcggcggagggcagttgctgggaatttttcagccgagagggcgagcgatccggagagagaccccgagagcttgggagcggtagggcgtgcgagcgccgcagccagcggagcaaacctcgaaatagatctggaaagccaggctcccggaggaaatgggactgtgaacgaaccggagagcaagaagggaaggaagcgccgggattgctgatgtcagaggagcccggaaagtcgcgctggaaaaatctgaagacagccggggctctgcttcttcctcaggagagacaccgccggccgcccccacacgccccctcggcgcctccgggtgccccctgagagccggcgacagcgcccagccgggctgctgcggggcgacggaggactgaggggcgcgcggagcggagaccgaggagcgacttcaggaatacagataagtgtctggtggcttgacgtggattttaatgaatttggactccatgtggatttggtcgtctccctgattccgagctgcgggcagggagaggggcctcgcgccgccctcagcagccggcggcggccgaggtagaccgagcggggacggaaggacagaccgacgtcgccgagctggaatcatgtgagggccaaccggggaaggtggagcagatgagcacacacaggagccgtctcctcaccgccgcccctctcagcatggaacagaggcagccctggccccgggccctggaggtggacagccgctctgtggtcctgctctcagtggtctgggtgctgctggcccccccagcagccggcatgcctcagttcagcaccttccactctgagaatcgtgactggaccttcaaccacttgaccgtccaccaagggacgggggccgtctatgtgggggccatcaaccgggtctataagctgacaggcaacctgaccatccaggtggctcataagacagggccagaagaggacaacaagtcttgttacccgcccctcatcgtgcagccctgcagcgaagtgctcaccctcaccaacaatgtcaacaagctgctcatcattgactactctgagaaccgcctgctggcctgtgggagcctctaccagggggtctgcaagctgctgcggctggatgacctcttcatcctggtggagccatcccacaagaaggagcactacctgtccagtgtcaacaagacgggcaccatgtacggggtgattgtgcgctctgagggtgaggatggcaagctcttcatcggcacggctgtggatgggaagcaggattacttcccgaccctgtccagccggaagctgccccgagaccctgagtcctcagccatgctcgactatgagctacacagcgattttgtctcctctctcatcaagatcccttcagacaccctggccctggtctcccactttgacatcttctacatctacggctttgctagtgggggctttgtctactttctcactgtccagcccgagacccctgagggtgtggccatcaactccgctggagacctcttctacacctcacgcatcgtgcggctctgcaaggatgaccccaagttccactcatacgtgtccctgcccttcggctgcacccgggccggggtggaataccgcctcctgcaggctgcttacctggccaagcctggggactcactggcccaggccttcaatatcaccagccaggacgatgtactctttgccatcttctccaaagggcagaagcagtatcaccacccgcccgatgactctgccctgtgtgccttccctatccgggccatcaacttgcagatcaaggngcgcctncagtcctgctaccagggcgagggcaacctggagctcaactggctgctggggaaggacgtccagtgcaccaaggcgcctgtccccatcgatgataacttctgtggactggacatcaaccagcccctgggaggctcaactccagtggagggcctgaccctgtacaccaccagcagggaccgcatgacctctgtggcctcctacgtttacaacggctacagcgtggtttttgtggggactaagagtggcaagctgaaaaagattcgggccgacggtcccccccatggtggggtccagtacgagatggtctctgtgctcaaggacggaagccccatcctccgggacatggccttctccattgatcagcgctacctgtacgtcatgtctgagagacaggtcaccagggtccccgtggagtcatgtgagcagtatacgacttgtggggagtgcctgagctctggggaccctcactgtggctggtgtgccctgcacaacatgtgctcccgcagggacaaatgccaacaggcctgggaacctaatcgatttgctgccagcatcagccagtgtgtgagccttgcagtgcatcccagcagcatctcagtatctgagcacagccggttgcttagcctggtagtgagtgatgctcctgatctatctgcgggtatcgcctgtgcctttgggaacctgacagaggtggaggggcaggtgtccgggagccaggtcatctgcatctcacctgggcccaaggatgtccctgtcatcccgctggatcaagactggtttgggctggagctacagctgaggtccaaggagacagggaagatatttgtcagcaccgagttcaagttttacaactgcagtgcccaccaactgtgcctgtcctgtgtcaacagcgccttccgctgccattggtgcaagtaccgcaacctctgcactcatgaccccaccacctgctccttccaggagggccggatcaatatttcagaggactgtccccagctggtgcccacagaggagatcttgattccagtcggggaggtaaagccaatcacccttaaggcgcgaaatctgccccagccgcagtccggccagcgaggctatgagtgtgtcctcaacatacaaggagccatccaccgggtccccgctctgcgcttcaacagctccagcgttcagtgtcagaacagctcgtaccagtatgatggcatggacatcagcaatctggccgtggatttcgctgtggtgtggaacggcaatttcatcattgacaaccctcaggacctgaaagtccatctctacaagtgtgcagcccagcgggagagctgcggcctctgcctcaaggccgaccggaagtttgagtgtggctggtgcagcggcgagcgcaggtgcaccctccaccagcactgtaccagcccttccagcccctggctcgactggtccagccacaatgtcaagtgctccaaccctcaaatcaccgagattttgacggtgtctggaccgccggaaggagggacgcgagtgaccatccatggcgtgaacctgggtctggacttctccgagatcgcccaccatgtgcaggtggctggggtgccctgcacgcccctcccaggggaatacatcatcgctgagcagattgtctgtgagatgggccatgccctcgtgggaaccacctccgggccagtacgcctgtgtattggcgagtgtaagccagagttcatgacgaagtcccatcagcagtacaccttcgtgaacccttctgtgctgtcactcaacccaatccgaggtcccgagtcaggaggcactatggtgaccattaccggccattaccttggggctgggagcagcgtggcagtctacctgggcaaccagacctgcgagttctacgggaggtcaatgagtgagatcgtgtgtgtctcacccccatcatccaatggccttggcccggtccctgtttctgtgagtgtcgaccgagcccatgtggatagcaacctgcagtttgagtacatagatgaccctcgggtccagcgcatcgagccagagtggagcattgccagtggccacacacccctgaccatcacaggcttcaacctggatgtcattcaggagccaaggatccgagtcaaattcaatggcaaagaatctgtcaatgtgtgtaaagttgtgaacacaaccaccctcacctgcctggcaccctctctgaccacggactaccgccctggcctggacactgtggaacgcccagatgagtttggatttgtctttaacaatgtccaatccttgctaatttacaacgacaccaagtttatctactaccccaacccgacctttgaactgcttagccctactggagtcttggatcaaaagccaggatcgcccatcattctgaagggcaaaaacctctgccctcctgcctctggaggggccaaactcaactacactgtgctcatcggagagaccccttgtgctgtcaccgtatctgagacccagcttctctgcgagcctcccaacctcaccgggcagcacaaggtcatggttcacgtgggcgggatggtgttctcgcctggctcggtgagtgtcatctcagacagcttgctgaccctgccagccatcgtcagcatcgcggccggcggcagcctcctcctcatcatcgtcatcatcgtcctcattgcctacaagcgcaagtctcgagaaaatgacctcactctcaagcggctgcaaatgcagatggacaatctggagtcccgtgtggccttggagtgcaaggaagcttttgctgagctccagacggatatcaatgagttgaccagtgacctggaccgctcaggaatcccttacctggactatcgtacctacgctatgcgagtcctgttcccgggcatcgaggaccaccccgtcctgcgggagctggaggtacaaggaaacgggcagcagcacgtggagaaggccctgaagctctttgcccagctcatcaacaacaaggtgttcctgctgaccttcatccgcaccctggagctgcagcgcagtttctccatgcgcgaccggggcaacgtggcttcgctcatcatgaccggcctgcagggccgcctggaatatgccactgatgtcctcaagcagctgctctctgacctcatcgataagaacctggagaacaagaaccaccccaagctgctactccggaggacagagtctgtggctgaaaagatgctgaccaattggttcgccttcctcctgcacaagttcctaaaggagtgcgcaggggagccactcttcatgctatactgtgccatcaagcagcagatggagaagggccccattgatgccatcacgggcgaggcccgctactccctgagcgaggacaagctcatccggcagcagatcgagtacaagaccctgatcctgaactgcgtcaaccctgacaacgagaacagtccagagatcccagtgaaggtgttaaactgtgacaccatcacacaggtcaaggagaagattcttgatgccgtgtataagaatgtgccctattcccagcggccgagggcagtggacatggacttggagtggcgccaaggccggatcgcccgggtcgtgctgcaagatgaggacatcaccaccaagattgagggtgactggaagcggctcaacacactgatgcattatcaggtgtcagacaggtcggtggtggctctggtccccaaacagacctcctcctacaacatccctgcctctgccagcatctcccggacgtccatcagcagatacgactcctccttcaggtatacgggcagccccgacagcctgcggtcccgggccccgatgatcaccccagacctggaaagtggggtcaaggtgtggcatctggtgaagaaccatgaccacggtgaccagaaggagggtgaccggggcagcaagatggtgtccgagatctacctgacccggctactggccaccaagggcaccctgcagaagtttgtggacgacttgtttgagaccttgttcagcactgtgcaccggggcagcgctctccccctggccatcaagtacatgtttgatttcctagatgagcaggcagacaggcacagcatccatgacacagatgtgcggcacacctggaaaagcaactgcctccctctgcgcttctgggtgaacgtgattaagaacccccagttcgtgtttgacatccacaagggcagcatcacggacgcctgcctctctgtggtggcccagaccttcatggactcttgttcaacgtcagagcaccggctgggcaaggactccccctccaacaagctgctctatgccaaggacatccccagctacaagagctgggtggagagatactacgcagacatcgccaagctcccagccatcagtgaccaggacatgaatgcctacctcgccgagcagtcccgcctgcacgccgtggagttcaacatgctgagtgccctcaatgagatctactcctatgtcagcaagtatagtgaggagctcatcggggccctagagcaggatgagcaggcacggcggcagcggctggcttataaggtggagcagctcattaatgccatgtccattgagagctgagaggaggagcctcgcattcctgggaagagggacctgtccaagctgtcacactgggagtctcagatggaaggacaagtgatggggatcaggccccagagcttgctgtcccctgagaccccatcctggggagaggggaggactcctctccctacgccagccaagtttcgtcatagccagttccagctgggagagacagtgggcgtcgtccatcctcagtgagaacaccagagaacccggggccgggagaaggtggttcttcaagccgagaggcacgagctggggacagttctgcctctgtgactgctgctttgcatgaaaactcatttgatgtatattggggaaataatgagaactttatttaatttttttaagaaaaagggaaaaaaacagaaataaaacaaaaagccgccctgttaatcccgtccaacttttgtttaattctgatttctgtctcccttccttcttttctcccattcctccttctttatataatgcctatttccaaatgccagagaaagcagagatgctgagagacattggagagaaaatgactgtctccttttccttgaaattaaaaaaaaaaaaaaaaagagagaaagaggagaagaagaatgatgagcacaagtatgcaccaaacacttcgcaaaaacagaggccagtaaaacctggaattatcccggcagccagaggagtatggaacttccagaactttgcacaaattgcaaagccatcaagagctcaccctggctggctggaaactgagctttatctaccacacacctgtatattctcatcttttgagaggagatgtgtacctagatagtaccaatgctttttgctactgttttttgttttgttttatttaatcctaaacctcaacaaatgaggagctggtctttgatatgtttcctttcaatttccctaaagttactatgagaagtggggtgaggtgggcctctcccagaccagacacctggcagccctgcctcatatcaatccctgtcataaaccaggcaccctggggaaacggcctggaggtgtgtgggccaggcctccacgaggttccatttgaaagttgatttggagacataggtgtttgactttggagttcactccaatcatccagtggtccctggcaattaaaaagaaaacaaaaatcaaacactgtttacagcaagcaatacttgaagagcataggttacagaagctgcagtatttattattatgctttctttctttcattctctcgtgcctggagaggggagaccacccttcgctcatatacggaagctcctgaccatctgggcctacagcacttcctcagtagaaatgactgtggcatgcccacgttactaccttctgcctctctttctgcctctcacggacttgtgagtgtgaaggacaagtggatgacttctcactggactttccttctctgtctcttctgatgatgcctaaaactatggataaccaattccctggccctgctgagcgtgaaacagaagcaatggatgagtgctggacgaagaatggcctgggcagaacaaatagggagcatttgaaagcttctggctgataaatctccaggtgcatcccggttgccacgcctgcccccattaacctgctcctggtaaatactgatccagcagctgctccaggagaggccgtctttttttcccagccacgctgtgtcttgcatgagactcctggggcctgggcacagagagaaaagaattgagactcaggaggctcagtgggtgagaaaatgcaaagtggcttcacagacacagggctgtgggagcagatcgacggggaacttgggagatgaacttcagggccttccgacgccttgtctcaggaacatgctttgagaaaaatggtagcatcctttccataactcagtctctcttccctagtttccctgaagtgtgacgttttagtatctggagctcagtgatccccatgaatgagggataaagtttcactcttggtattttctaactagtgctagggaaagtcctgagacacgatcacagccactgcttggcatacagggcctccacccaataagcaaactggagattcctcagcctctcgtggacacccacatctcattcttctcacagcagagaagctctcccttcagcctgagctgtcttctttctgctgcagtgcagcctgctccctcctaccctggcctcaaggaaggtgggaaacatcttctgcatttcaaagtcctcactttgacttatttggccttcatcttggcatggaaggtggcaggcagaatggaaatactccccccaaacagaacagatattcttgcgtgtgtaagggcagaagggacaagctctctatcccatgagactaggggccggagcccacctgcctttccccacaacttttcctgctcaaacccactcctcttgacacactggaatctgtattatatatatttttaagaaaatacaatgatggttgtctggttttgttgtttttacaggtgttgtggaataaaaactgtaagaaaattaagtatttaaaatgttccaataaagtggggttttttgttattctaatatattattgtgtacctattgtaaatatgaaacactcctattttgcaagctgaggacacaatttgtactgttgttatatataaataaagtttactgaattaaaaaaaccttaaatctttaaata

SEQ ID NO: 2350 - DNA, 8528 bp, Homo sapiens
  misc_feature (1857)..(1857): n is a, c, g, or t
  misc_feature (1864)..(1864): n is a, c, g, or t
ccgccgccaccggcgggagccagagctgccgggaggagcggcatccgcgccagactggagcgggagggcggcggagggcagttgctgggaatttttcagccgagagggcgagcgatccggagagagaccccgagagcttgggagcggtagggcgtgcgagcgccgcagccagcggagcaaacctcgaaatagatctggaaagccaggctcccggaggaaatgggactgtgaacgaaccggagagcaagaagggaaggaagcgccgggattgctgatgtcagaggagcccggaaagtcgcgctggaaaaatctgaagacagccggggctctgcttcttcctcaggagagacaccgccggccgcccccacacgccccctcggcgcctccgggtgccccctgagagccggcgacagcgcccagccgggctgctgcggggcgacggaggactgaggggcgcgcggagcggagaccgaggagcgacttcaggaatacagataagtgtctggtggcttgacgtggattttaatgaatttggactccatgtggatttggtcgtctccctgattccgagctgcgggcagggagaggggcctcgcgccgccctcagcagccggcggcggccgaggtagaccgagcggggacggaaggacagaccgacgtcgccgagctggaatcatgtgagggccaaccggggaaggtggagcagatgagcacacacaggagccgtctcctcaccgccgcccctctcagcatggaacagaggcagccctggccccgggccctggaggtggacagccgctctgtggtcctgctctcagtggtctgggtgctgctggcccccccagcagccggcatgcctcagttcagcaccttccactctgagaatcgtgactggaccttcaaccacttgaccgtccaccaagggacgggggccgtctatgtgggggccatcaaccgggtctataagctgacaggcaacctgaccatccaggtggctcataagacagggccagaagaggacaacaagtcttgttacccgcccctcatcgtgcagccctgcagcgaagtgctcaccctcaccaacaatgtcaacaagctgctcatcattgactactctgagaaccgcctgctggcctgtgggagcctctaccagggggtctgcaagctgctgcggctggatgacctcttcatcctggtggagccatcccacaagaaggagcactacctgtccagtgtcaacaagacgggcaccatgtacggggtgattgtgcgctctgagggtgaggatggcaagctcttcatcggcacggctgtggatgggaagcaggattacttcccgaccctgtccagccggaagctgccccgagaccctgagtcctcagccatgctcgactatgagctacacagcgattttgtctcctctctcatcaagatcccttcagacaccctggccctggtctcccactttgacatcttctacatctacggctttgctagtgggggctttgtctactttctcactgtccagcccgagacccctgagggtgtggccatcaactccgctggagacctcttctacacctcacgcatcgtgcggctctgcaaggatgaccccaagttccactcatacgtgtccctgcccttcggctgcacccgggccggggtggaataccgcctcctgcaggctgcttacctggccaagcctggggactcactggcccaggccttcaatatcaccagccaggacgatgtactctttgccatcttctccaaagggcagaagcagtatcaccacccgcccgatgactctgccctgtgtgccttccctatccgggccatcaacttgcagatcaaggngcgcctncagtcctgctaccagggcgagggcaacctggagctcaactggctgctggggaaggacgtccagtgcaccaaggcgcctgtccccatcgatgataacttctgtggactggacatcaaccagcccctgggaggctcaactccagtggagggcctgaccctgtacaccaccagcagggaccgcatgacctctgtggcctcctacgtttacaacggctacagcgtggtttttgtggggactaagagtggcaagctgaaaaagattcgggccgacggtcccccccatggtggggtccagtacgagatggtctctgtgctcaaggacggaagccccatcctccgggacatggccttctccattgatcagcgctacctgtacgtcatgtctgagagacaggtcaccagggtccccgtggagtcatgtgagcagtatacgacttgtggggagtgcctgagctctggggaccctcactgtggctggtgtgccctgcacaacatgtgctcccgcagggacaaatgccaacaggcctgggaacctaatcgatttgctgccagcatcagccagtgtgtgagccttgcagtgcatcccagcagcatctcagtatctgagcacagccggttgcttagcctggtagtgagtgatgctcctgatctatctgcgggtatcgcctgtgcctttgggaacctgacagaggtggaggggcaggtgtccgggagccaggtcatctgcatctcacctgggcccaaggatgtccctgtcatcccgctggatcaagactggtttgggctggagctacagctgaggtccaaggagacagggaagatatttgtcagcaccgagttcaagttttacaactgcagtgcccaccaactgtgcctgtcctgtgtcaacagcgccttccgctgccattggtgcaagtaccgcaacctctgcactcatgaccccaccacctgctccttccaggagggccggatcaatatttcagaggactgtccccagctggtgcccacagaggagatcttgattccagtcggggaggtaaagccaatcacccttaaggcgcgaaatctgccccagccgcagtccggccagcgaggctatgagtgtgtcctcaacatacaaggagccatccaccgggtccccgctctgcgcttcaacagctccagcgttcagtgtcagaacagctcgtaccagtatgatggcatggacatcagcaatctggccgtggatttcgctgtggtgtggaacggcaatttcatcattgacaaccctcaggacctgaaagtccatctctacaagtgtgcagcccagcgggagagctgcggcctctgcctcaaggccgaccggaagtttgagtgtggctggtgcagcggcgagcgcaggtgcaccctccaccagcactgtaccagcccttccagcccctggctcgactggtccagccacaatgtcaagtgctccaaccctcaaatcaccgagattttgacggtgtctggaccgccggaaggagggacgcgagtgaccatccatggcgtgaacctgggtctggacttctccgagatcgcccaccatgtgcaggtggctggggtgccctgcacgcccctcccaggggaatacatcatcgctgagcagattgtctgtgagatgggccatgccctcgtgggaaccacctccgggccagtacgcctgtgtattggcgagtgtaagccagagttcatgacgaagtcccatcagcagtacaccttcgtgaacccttctgtgctgtcactcaacccaatccgaggtcccgagtcaggaggcactatggtgaccattaccggccattaccttggggctgggagcagcgtggcagtctacctgggcaaccagacctgcgagttctacgggaggtcaatgagtgagatcgtgtgtgtctcacccccatcatccaatggccttggcccggtccctgtttctgtgagtgtcgaccgagcccatgtggatagcaacctgcagtttgagtacatagatgaccctcgggtccagcgcatcgagccagagtggagcattgccagtggccacacacccctgaccatcacaggcttcaacctggatgtcattcaggagccaaggatccgagtcaaattcaatggcaaagaatctgtcaatgtgtgtaaagttgtgaacacaaccaccctcacctgcctggcaccctctctgaccacggactaccgccctggcctggacactgtggaacgcccagatgagtttggatttgtctttaacaatgtccaatccttgctaatttacaacgacaccaagtttatctactaccccaacccgacctttgaactgcttagccctactggagtcttggatcaaaagccaggatcgcccatcattctgaagggcaaaaacctctgccctcctgcctctggaggggccaaactcaactacactgtgctcatcggagagaccccttgtgctgtcaccgtatctgagacccagcttctctgcgagcctcccaacctcaccgggcagcacaaggtcatggttcacgtgggcgggatggtgttctcgcctggctcggtgagtgtcatctcagacagcttgctgaccctgccagccatcgtcagcatcgcggccggcggcagcctcctcctcatcatcgtcatcatcgtcctcattgcctacaagcgcaagtctcgagaaaatgacctcactctcaagcggctgcaaatgcagatggacaatctggagtcccgtgtggccttggagtgcaaggaagcttttgctgagctccagacggatatcaatgagttgaccagtgacctggaccgctcaggaatcccttacctggactatcgtacctacgctatgcgagtcctgttcccgggcatcgaggaccaccccgtcctgcgggagctggaggtacaaggaaacgggcagcagcacgtggagaaggccctgaagctctttgcccagctcatcaacaacaaggtgttcctgctgaccttcatccgcaccctggagctgcagcgcagtttctccatgcgcgaccggggcaacgtggcttcgctcatcatgaccggcctgcagggccgcctggaatatgccactgatgtcctcaagcagctgctctctgacctcatcgataagaacctggagaacaagaaccaccccaagctgctactccggaggacagagtctgtggctgaaaagatgctgaccaattggttcgccttcctcctgcacaagttcctaaaggagtgcgcaggggagccactcttcatgctatactgtgccatcaagcagcagatggagaagggccccattgatgccatcacgggcgaggcccgctactccctgagcgaggacaagctcatccggcagcagatcgagtacaagaccctgatcctgaactgcgtcaaccctgacaacgagaacagtccagagatcccagtgaaggtgttaaactgtgacaccatcacacaggtcaaggagaagattcttgatgccgtgtataagaatgtgccctattcccagcggccgagggcagtggacatggacttggagtggcgccaaggccggatcgcccgggtcgtgctgcaagatgaggacatcaccaccaagattgagggtgactggaagcggctcaacacactgatgcattatcaggtgtcagacaggtcggtggtggctctggtccccaaacagacctcctcctacaacatccctgcctctgccagcatctcccggacgtccatcagcagatacgactcctccttcaggtatacgggcagccccgacagcctgcggtcccgggccccgatgatcaccccagacctggaaagtggggtcaaggtgtggcatctggtgaagaaccatgaccacggtgaccagaaggagggtgaccggggcagcaagatggtgtccgagatctacctgacccggctactggccaccaagggcaccctgcagaagtttgtggacgacttgtttgagaccttgttcagcactgtgcaccggggcagcgctctccccctggccatcaagtacatgtttgatttcctagatgagcaggcagacaggcacagcatccatgacacagatgtgcggcacacctggaaaagcaactgcctccctctgcgcttctgggtgaacgtgattaagaacccccagttcgtgtttgacatccacaagggcagcatcacggacgcctgcctctctgtggtggcccagaccttcatggactcttgttcaacgtcagagcaccggctgggcaaggactccccctccaacaagctgctctatgccaaggacatccccagctacaagagctgggtggagagatactacgcagacatcgccaagctcccagccatcagtgaccaggacatgaatgcctacctcgccgagcagtcccgcctgcacgccgtggagttcaacatgctgagtgccctcaatgagatctactcctatgtcagcaagtatagtgaggagctcatcggggccctagagcaggatgagcaggcacggcggcagcggctggcttataaggtggagcagctcattaatgccatgtccattgagagctgagaggaggagcctcgcattcctgggaagagggacctgtccaagctgtcacactgggagtctcagatggaaggacaagtgatggggatcaggccccagagcttgctgtcccctgagaccccatcctggggagaggggaggactcctctccctacgccagccaagtttcgtcatagccagttccagctgggagagacagtgggcgtcgtccatcctcagtgagaacaccagagaacccggggccgggagaaggtggttcttcaagccgagaggcacgagctggggacagttctgcctctgtgactgctgctttgcatgaaaactcatttgatgtatattggggaaataatgagaactttatttaatttttttaagaaaaagggaaaaaaacagaaataaaacaaaaagccgccctgttaatcccgtccaacttttgtttaattctgatttctgtctcccttccttcttttctcccattcctccttctttatataatgcctatttccaaatgccagagaaagcagagatgctgagagacattggagagaaaatgactgtctccttttccttgaaattaaaaaaaaaaaaaaaaagagagaaagaggagaagaagaatgatgagcacaagtatgcaccaaacacttcgcaaaaacagaggccagtaaaacctggaattatcccggcagccagaggagtatggaacttccagaactttgcacaaattgcaaagccatcaagagctcaccctggctggctggaaactgagctttatctaccacacacctgtatattctcatcttttgagaggagatgtgtacctagatagtaccaatgctttttgctactgttttttgttttgttttatttaatcctaaacctcaacaaatgaggagctggtctttgatatgtttcctttcaatttccctaaagttactatgagaagtggggtgaggtgggcctctcccagaccagacacctggcagccctgcctcatatcaatccctgtcataaaccaggcaccctggggaaacggcctggaggtgtgtgggccaggcctccacgaggttccatttgaaagttgatttggagacataggtgtttgactttggagttcactccaatcatccagtggtccctggcaattaaaaagaaaacaaaaatcaaacactgtttacagcaagcaatacttgaagagcataggttacagaagctgcagtatttattattatgctttctttctttcattctctcgtgcctggagaggggagaccacccttcgctcatatacggaagctcctgaccatctgggcctacagcacttcctcagtagaaatgactgtggcatgcccacgttactaccttctgcctctctttctgcctctcacggacttgtgagtgtgaaggacaagtggatgacttctcactggactttccttctctgtctcttctgatgatgcctaaaactatggataaccaattctcctgagtgtagattccaaacaaagagaccaaagctccatgcccaggtccaaaggccccatagaagccagtgggagtcatcgagaggaaaggcgctctgtgagtgtcaggaccttggtggccaggatagccatcagagtgtccaggcctcccacattaccttggatccgagcagccagctccaactgttctgcaagcagcactggagtcagggggtaggaggacaagtggaagcaaaggtgtgggactggggaagacaaagaggaacaagctgcccttcctcacttttcaaagggtcaggaatcctaggctatgatgctgggaagctagaccagctcctccaagagagactagaccagggtcattttctctgttattaactctgggctccagcttctccgtgccctgctttacctccaagtggttccaatttccaaaggccctgctgaccacatgtgattcccaggagagggctgggggaggggagcgcagaggtctggcttccatccttggcgtgtagctttggatcgctgtctaaccacacagcagacgttgcccggtctccccagctctagtttcttgcctgaatgcggctgacaaatgggaagagaaaagc

SEQ ID NO: 2351 - DNA, 5358 bp, Homo sapiens
aacaagaaaccctttctgggctggtagaaatcctgtaatgttgcctttagactgattatccactgaaggaactcttgtctgaaatagaaagatcccacagaatgccatggtcctgaggaacattaaaataaatagaaaatgagttcaggcacttagctttacaaattgatcctggttctcctggcagaaaggtagatacaggtgacgccagctgagtggaaggttgctgcctgttctttcatctggcttcataagaaccaacatggaatttgtgggtgagctggtgagaagtttttgtctgcagcttgtattagggcccctgaactcccatgtctgcctctctgaggcctgggtgtcctaaggctggaagttgtggatatgggtcgtgtagagacttcaccatgcctccactgttactcaccccaattccttccgcttccctccagcctgtccccatcgatgataacttctgtggactggacatcaaccagcccctgggaggctcaactccagtggagggcctgaccctgtacaccaccagcagggaccgcatgacctctgtggcctcctacgtttacaacggctacagcgtggtttttgtggggactaagagtggcaagctgaaaaagattcgggccgacggtcccccccatggtggggtccagtacgagatggtctctgtgctcaaggacggaagccccatcctccgggacatggccttctccattgatcagcgctacctgtacgtcatgtctgagagacaggtcaccagggtccccgtggagtcatgtgagcagtatacgacttgtggggagtgcctgagctctggggaccctcactgtggctggtgtgccctgcacaacatgtgctcccgcagggacaaatgccaacaggcctgggaacctaatcgatttgctgccagcatcagccagtgtgtgagccttgcagtgcatcccagcagcatctcagtatctgagcacagccggttgcttagcctggtagtgagtgatgctcctgatctatctgcgggtatcgcctgtgcctttgggaacctgacagaggtggaggggcaggtgtccgggagccaggtcatctgcatctcacctgggcccaaggatgtccctgtcatcccgctggatcaagactggtttgggctggagctacagctgaggtccaaggagacagggaagatatttgtcagcaccgagttcaagttttacaactgcagtgcccaccaactgtgcctgtcctgtgtcaacagcgccttccgctgccattggtgcaagtaccgcaacctctgcactcatgaccccaccacctgctccttccaggagggccggatcaatatttcagaggactgtccccagctggtgcccacagaggagatcttgattccagtcggggaggtaaagccaatcacccttaaggcgcgaaatctgccccagccgcagtccggccagcgaggctatgagtgtgtcctcaacatacaaggagccatccaccgggtccccgctctgcgcttcaacagctccagcgttcagtgtcagaacagctcgtaccagtatgatggcatggacatcagcaatctggccgtggatttcgctgtggtgtggaacggcaatttcatcattgacaaccctcaggacctgaaagtccatctctacaagtgtgcagcccagcgggagagctgcggcctctgcctcaaggccgaccggaagtttgagtgtggctggtgcagcggcgagcgcaggtgcaccctccaccagcactgtaccagcccttccagcccctggctcgactggtccagccacaatgtcaagtgctccaaccctcaaatcaccgagattttgacggtgtctggaccgccggaaggagggacgcgagtgaccatccatggcgtgaacctgggtctggacttctccgagatcgcccaccatgtgcaggtggctggggtgccctgcacgcccctcccaggggaatacatcatcgctgagcagattgtctgtgagatgggccatgccctcgtgggaaccacctccgggccagtacgcctgtgtattggcgagtgtaagccagagttcatgacgaagtcccatcagcagtacaccttcgtgaacccttctgtgctgtcactcaacccaatccgaggtcccgagtcaggaggcactatggtgaccattaccggccattaccttggggctgggagcagcgtggcagtctacctgggcaaccagacctgcgagttctacgggaggtcaatgagtgagatcgtgtgtgtctcacccccatcatccaatggccttggcccggtccctgtttctgtgagtgtcgaccgagcccatgtggatagcaacctgcagtttgagtacatagatgaccctcgggtccagcgcatcgagccagagtggagcattgccagtggccacacacccctgaccatcacaggcttcaacctggatgtcattcaggagccaaggatccgagtcaaattcaatggcaaagaatctgtcaatgtgtgtaaagttgtgaacacaaccaccctcacctgcctggcaccctctctgaccacggactaccgccctggcctggacactgtggaacgcccagatgagtttggatttgtctttaacaatgtccaatccttgctaatttacaacgacaccaagtttatctactaccccaacccgacctttgaactgcttagccctactggagtcttggatcaaaagccaggatcgcccatcattctgaagggcaaaaacctctgccctcctgcctctggaggggccaaactcaactacactgtgctcatcggagagaccccttgtgctgtcaccgtatctgagacccagcttctctgcgagcctcccaacctcaccgggcagcacaaggtcatggttcacgtgggcgggatggtgttctcgcctggctcggtgagtgtcatctcagacagcttgctgaccctgccagccatcgtcagcatcgcggccggcggcagcctcctcctcatcatcgtcatcatcgtcctcattgcctacaagcgcaagtctcgagaaaatgacctcactctcaagcggctgcaaatgcagatggacaatctggagtcccgtgtggccttggagtgcaaggaagcttttgctgagctccagacggatatcaatgagttgaccagtgacctggaccgctcaggaatcccttacctggactatcgtacctacgctatgcgagtcctgttcccgggcatcgaggaccaccccgtcctgcgggagctggaggtacaaggaaacgggcagcagcacgtggagaaggccctgaagctctttgcccagctcatcaacaacaaggtgttcctgctgaccttcatccgcaccctggagctgcagcgcagtttctccatgcgcgaccggggcaacgtggcttcgctcatcatgaccggcctgcagggccgcctggaatatgccactgatgtcctcaagcagctgctctctgacctcatcgataagaacctggagaacaagaaccaccccaagctgctactccggaggacagagtctgtggctgaaaagatgctgaccaattggttcgccttcctcctgcacaagttcctaaaggagtgcgcaggggagccactcttcatgctatactgtgccatcaagcagcagatggagaagggccccattgatgccatcacgggcgaggcccgctactccctgagcgaggacaagctcatccggcagcagatcgagtacaagaccctgatcctgaactgcgtcaaccctgacaacgagaacagtccagagatcccagtgaaggtgttaaactgtgacaccatcacacaggtcaaggagaagattcttgatgccgtgtataagaatgtgccctattcccagcggccgagggcagtggacatggacttggagtggcgccaaggccggatcgcccgggtcgtgctgcaagatgaggacatcaccaccaagattgagggtgactggaagcggctcaacacactgatgcattatcaggtgtcagacaggtcggtggtggctctggtccccaaacagacctcctcctacaacatccctgcctctgccagcatctcccggacgtccatcagcagatacgactcctccttcaggtatacgggcagccccgacagcctgcggtcccgggccccgatgatcaccccagacctggaaagtggggtcaaggtgtggcatctggtgaagaaccatgaccacggtgaccagaaggagggtgaccggggcagcaagatggtgtccgagatctacctgacccggctactggccaccaagggcaccctgcagaagtttgtggacgacttgtttgagaccttgttcagcactgtgcaccggggcagcgctctccccctggccatcaagtacatgtttgatttcctagatgagcaggcagacaggcacagcatccatgacacagatgtgcggcacacctggaaaagcaactgcctccctctgcgcttctgggtgaacgtgattaagaacccccagttcgtgtttgacatccacaagggcagcatcacggacgcctgcctctctgtggtggcccagaccttcatggactcttgttcaacgtcagagcaccggctgggcaaggactccccctccaacaagctgctctatgccaaggacatccccagctacaagagctgggtggagagatactacgcagacatcgccaagctcccagccatcagtgaccaggacatgaatgcctacctcgccgagcagtcccgcctgcacgccgtggagttcaacatgctgagtgccctcaatgagatctactcctatgtcagcaagtatagtgaggagctcatcggggccctagagcaggatgagcaggcacggcggcagcggctggcttataaggtggagcagctcattaatgccatgtccattgagagctgagaggaggagcctcgcattcctgggaagagggacctgtccaagctgtcacactgggagtctcagatggaaggacaagtgatggggatcaggccccagagcttgctgtcccctgagaccccatcctggggagaggggaggactcctctccctacgccagccaagtttcgtcatagccagttccagctgggagagacagtgggcgtcgtccatcctcagtgagaacaccagagaacccggggccgggagaaggtggttcttcaagccgagaggcacgagctggggacagttctgcctctgtgactgctgctttgcatgaaaactcatttgatgtatattggggaaataatgagaactttatttaatttttttaagaaaaagggaaaaaaacagaaataaaacaaaaagccgccctgtt

SEQ ID NO: 2352 - DNA, 9039 bp, Homo sapiens
  misc_feature (1857)..(1857): n is a, c, g, or t
  misc_feature (1864)..(1864): n is a, c, g, or t
ccgccgccaccggcgggagccagagctgccgggaggagcggcatccgcgccagactggagcgggagggcggcggagggcagttgctgggaatttttcagccgagagggcgagcgatccggagagagaccccgagagcttgggagcggtagggcgtgcgagcgccgcagccagcggagcaaacctcgaaatagatctggaaagccaggctcccggaggaaatgggactgtgaacgaaccggagagcaagaagggaaggaagcgccgggattgctgatgtcagaggagcccggaaagtcgcgctggaaaaatctgaagacagccggggctctgcttcttcctcaggagagacaccgccggccgcccccacacgccccctcggcgcctccgggtgccccctgagagccggcgacagcgcccagccgggctgctgcggggcgacggaggactgaggggcgcgcggagcggagaccgaggagcgacttcaggaatacagataagtgtctggtggcttgacgtggattttaatgaatttggactccatgtggatttggtcgtctccctgattccgagctgcgggcagggagaggggcctcgcgccgccctcagcagccggcggcggccgaggtagaccgagcggggacggaaggacagaccgacgtcgccgagctggaatcatgtgagggccaaccggggaaggtggagcagatgagcacacacaggagccgtctcctcaccgccgcccctctcagcatggaacagaggcagccctggccccgggccctggaggtggacagccgctctgtggtcctgctctcagtggtctgggtgctgctggcccccccagcagccggcatgcctcagttcagcaccttccactctgagaatcgtgactggaccttcaaccacttgaccgtccaccaagggacgggggccgtctatgtgggggccatcaaccgggtctataagctgacaggcaacctgaccatccaggtggctcataagacagggccagaagaggacaacaagtcttgttacccgcccctcatcgtgcagccctgcagcgaagtgctcaccctcaccaacaatgtcaacaagctgctcatcattgactactctgagaaccgcctgctggcctgtgggagcctctaccagggggtctgcaagctgctgcggctggatgacctcttcatcctggtggagccatcccacaagaaggagcactacctgtccagtgtcaacaagacgggcaccatgtacggggtgattgtgcgctctgagggtgaggatggcaagctcttcatcggcacggctgtggatgggaagcaggattacttcccgaccctgtccagccggaagctgccccgagaccctgagtcctcagccatgctcgactatgagctacacagcgattttgtctcctctctcatcaagatcccttcagacaccctggccctggtctcccactttgacatcttctacatctacggctttgctagtgggggctttgtctactttctcactgtccagcccgagacccctgagggtgtggccatcaactccgctggagacctcttctacacctcacgcatcgtgcggctctgcaaggatgaccccaagttccactcatacgtgtccctgcccttcggctgcacccgggccggggtggaataccgcctcctgcaggctgcttacctggccaagcctggggactcactggcccaggccttcaatatcaccagccaggacgatgtactctttgccatcttctccaaagggcagaagcagtatcaccacccgcccgatgactctgccctgtgtgccttccctatccgggccatcaacttgcagatcaaggngcgcctncagtcctgctaccagggcgagggcaacctggagctcaactggctgctggggaaggacgtccagtgcaccaaggcgcctgtccccatcgatgataacttctgtggactggacatcaaccagcccctgggaggctcaactccagtggagggcctgaccctgtacaccaccagcagggaccgcatgacctctgtggcctcctacgtttacaacggctacagcgtggtttttgtggggactaagagtggcaagctgaaaaagattcgggccgacggtcccccccatggtggggtccagtacgagatggtctctgtgctcaaggacggaagccccatcctccgggacatggccttctccattgatcagcgctacctgtacgtcatgtctgagagacaggtcaccagggtccccgtggagtcatgtgagcagtatacgacttgtggggagtgcctgagctctggggaccctcactgtggctggtgtgccctgcacaacatgtgctcccgcagggacaaatgccaacaggcctgggaacctaatcgatttgctgccagcatcagccagtgtgtgagccttgcagtgcatcccagcagcatctcagtatctgagcacagccggttgcttagcctggtagtgagtgatgctcctgatctatctgcgggtatcgcctgtgcctttgggaacctgacagaggtggaggggcaggtgtccgggagccaggtcatctgcatctcacctgggcccaaggatgtccctgtcatcccgctggatcaagactggtttgggctggagctacagctgaggtccaaggagacagggaagatatttgtcagcaccgagttcaagttttacaactgcagtgcccaccaactgtgcctgtcctgtgtcaacagcgccttccgctgccattggtgcaagtaccgcaacctctgcactcatgaccccaccacctgctccttccaggagggccggatcaatatttcagaggactgtccccagctggtgcccacagaggagatcttgattccagtcggggaggtaaagccaatcacccttaaggcgcgaaatctgccccagccgcagtccggccagcgaggctatgagtgtgtcctcaacatacaaggagccatccaccgggtccccgctctgcgcttcaacagctccagcgttcagtgtcagaacagctcgtaccagtatgatggcatggacatcagcaatctggccgtggatttcgctgtggtgtggaacggcaatttcatcattgacaaccctcaggacctgaaagtccatctctacaagtgtgcagcccagcgggagagctgcggcctctgcctcaaggccgaccggaagtttgagtgtggctggtgcagcggcgagcgcaggtgcaccctccaccagcactgtaccagcccttccagcccctggctcgactggtccagccacaatgtcaagtgctccaaccctcaaatcaccgagattttgacggtgtctggaccgccggaaggagggacgcgagtgaccatccatggcgtgaacctgggtctggacttctccgagatcgcccaccatgtgcaggtggctggggtgccctgcacgcccctcccaggggaatacatcatcgctgagcagattgtctgtgagatgggccatgccctcgtgggaaccacctccgggccagtacgcctgtgtattggcgagtgtaagccagagttcatgacgaagtcccatcagcagtacaccttcgtgaacccttctgtgctgtcactcaacccaatccgaggtcccgagtcaggaggcactatggtgaccattaccggccattaccttggggctgggagcagcgtggcagtctacctgggcaaccagacctgcgagttctacgggaggtcaatgagtgagatcgtgtgtgtctcacccccatcatccaatggccttggcccggtccctgtttctgtgagtgtcgaccgagcccatgtggatagcaacctgcagtttgagtacatagatgaccctcgggtccagcgcatcgagccagagtggagcattgccagtggccacacacccctgaccatcacaggcttcaacctggatgtcattcaggagccaaggatccgagtcaaattcaatggcaaagaatctgtcaatgtgtgtaaagttgtgaacacaaccaccctcacctgcctggcaccctctctgaccacggactaccgccctggcctggacactgtggaacgcccagatgagtttggatttgtctttaacaatgtccaatccttgctaatttacaacgacaccaagtttatctactaccccaacccgacctttgaactgcttagccctactggagtcttggatcaaaagccaggatcgcccatcattctgaagggcaaaaacctctgccctcctgcctctggaggggccaaactcaactacactgtgctcatcggagagaccccttgtgctgtcaccgtatctgagacccagcttctctgcgagcctcccaacctcaccgggcagcacaaggtcatggttcacgtgggcgggatggtgttctcgcctggctcggtgagtgtcatctcagacagcttgctgaccctgccagccatcgtcagcatcgcggccggcggcagcctcctcctcatcatcgtcatcatcgtcctcattgcctacaagcgcaagtctcgagaaaatgacctcactctcaagcggctgcaaatgcagatggacaatctggagtcccgtgtggccttggagtgcaaggaagcttttgctgagctccagacggatatcaatgagttgaccagtgacctggaccgctcaggaatcccttacctggactatcgtacctacgctatgcgagtcctgttcccgggcatcgaggaccaccccgtcctgcgggagctggaggtacaaggaaacgggcagcagcacgtggagaaggccctgaagctctttgcccagctcatcaacaacaaggtgttcctgctgaccttcatccgcaccctggagctgcagcgcagtttctccatgcgcgaccggggcaacgtggcttcgctcatcatgaccggcctgcagggccgcctggaatatgccactgatgtcctcaagcagctgctctctgacctcatcgataagaacctggagaacaagaaccaccccaagctgctactccggaggacagagtctgtggctgaaaagatgctgaccaattggttcgccttcctcctgcacaagttcctaaaggagtgcgcaggggagccactcttcatgctatactgtgccatcaagcagcagatggagaagggccccattgatgccatcacgggcgaggcccgctactccctgagcgaggacaagctcatccggcagcagatcgagtacaagaccctgatcctgaactgcgtcaaccctgacaacgagaacagtccagagatcccagtgaaggtgttaaactgtgacaccatcacacaggtcaaggagaagattcttgatgccgtgtataagaatgtgccctattcccagcggccgagggcagtggacatggacttggagtggcgccaaggccggatcgcccgggtcgtgctgcaagatgaggacatcaccaccaagattgagggtgactggaagcggctcaacacactgatgcattatcaggtgtcagacaggtcggtggtggctctggtccccaaacagacctcctcctacaacatccctgcctctgccagcatctcccggacgtccatcagcagatacgactcctccttcaggtatacgggcagccccgacagcctgcggtcccgggccccgatgatcaccccagacctggaaagtggggtcaaggtgtggcatctggtgaagaaccatgaccacggtgaccagaaggagggtgaccggggcagcaagatggtgtccgagatctacctgacccggctactggccaccaagggcaccctgcagaagtttgtggacgacttgtttgagaccttgttcagcactgtgcaccggggcagcgctctccccctggccatcaagtacatgtttgatttcctagatgagcaggcagacaggcacagcatccatgacacagatgtgcggcacacctggaaaagcaactgcctccctctgcgcttctgggtgaacgtgattaagaacccccagttcgtgtttgacatccacaagggcagcatcacggacgcctgcctctctgtggtggcccagaccttcatggactcttgttcaacgtcagagcaccggctgggcaaggactccccctccaacaagctgctctatgccaaggacatccccagctacaagagctgggtggagagatactacgcagacatcgccaagctcccagccatcagtgaccaggacatgaatgcctacctcgccgagcacaggatgagcaggcacggcggcagcggctggcttataaggtggagcagctcattaatgccatgtccattgagagctgagaggaggagcctcgcattcctgggaagagggacctgtccaagctgtcacactgggagtctcagatggaaggacaagtgatggggatcaggccccagagcttgctgtcccctgagaccccatcctggggagaggggaggactcctctccctacgccagccaagtttcgtcatagccagttccagctgggagagacagtgggcgtcgtccatcctcagtgagaacaccagagaacccggggccgggagaaggtggttcttcaagccgagaggcacgagctggggacagttctgcctctgtgactgctgctttgcatgaaaactcatttgatgtatattggggaaataatgagaactttatttaatttttttaagaaaaagggaaaaaaacagaaataaaacaaaaagccgccctgttaatcccgtccaacttttgtttaattctgatttctgtctcccttccttcttttctcccattcctccttctttatataatgcctatttccaaatgccagagaaagcagagatgctgagagacattggagagaaaatgactgtctccttttccttgaaattaaaaaaaaaaaaaaaaagagagaaagaggagaagaagaatgatgagcacaagtatgcaccaaacacttcgcaaaaacagaggccagtaaaacctggaattatcccggcagccagaggagtatggaacttccagaactttgcacaaattgcaaagccatcaagagctcaccctggctggctggaaactgagctttatctaccacacacctgtatattctcatcttttgagaggagatgtgtacctagatagtaccaatgctttttgctactgttttttgttttgttttatttaatcctaaacctcaacaaatgaggagctggtctttgatatgtttcctttcaatttccctaaagttactatgagaagtggggtgaggtgggcctctcccagaccagacacctggcagccctgcctcatatcaatccctgtcataaaccaggcaccctggggaaacggcctggaggtgtgtgggccaggcctccacgaggttccatttgaaagttgatttggagacataggtgtttgactttggagttcactccaatcatccagtggtccctggcaattaaaaagaaaacaaaaatcaaacactgtttacagcaagcaatacttgaagagcataggttacagaagctgcagtatttattattatgctttctttctttcattctctcgtgcctggagaggggagaccacccttcgctcatatacggaagctcctgaccatctgggcctacagcacttcctcagtagaaatgactgtggcatgcccacgttactaccttctgcctctctttctgcctctcacggacttgtgagtgtgaaggacaagtggatgacttctcactggactttccttctctgtctcttctgatgatgcctaaaactatggataaccaattccctggccctgctgagcgtgaaacagaagcaatggatgagtgctggacgaagaatggcctgggcagaacaaatagggagcatttgaaagcttctggctgataaatctccaggtgcatcccggttgccacgcctgcccccattaacctgctcctggtaaatactgatccagcagctgctccaggagaggccgtctttttttcccagccacgctgtgtcttgcatgagactcctggggcctgggcacagagagaaaagaattgagactcaggaggctcagtgggtgagaaaatgcaaagtggcttcacagacacagggctgtgggagcagatcgacggggaacttgggagatgaacttcagggccttccgacgccttgtctcaggaacatgctttgagaaaaatggtagcatcctttccataactcagtctctcttccctagtttccctgaagtgtgacgttttagtatctggagctcagtgatccccatgaatgagggataaagtttcactcttggtattttctaactagtgctagggaaagtcctgagacacgatcacagccactgcttggcatacagggcctccacccaataagcaaactggagattcctcagcctctcgtggacacccacatctcattcttctcacagcagagaagctctcccttcagcctgagctgtcttctttctgctgcagtgcagcctgctccctcctaccctggcctcaaggaaggtgggaaacatcttctgcatttcaaagtcctcactttgacttatttggccttcatcttggcatggaaggtggcaggcagaatggaaatactccccccaaacagaacagatattcttgcgtgtgtaagggcagaagggacaagctctctatcccatgagactaggggccggagcccacctgcctttccccacaacttttcctgctcaaacccactcctcttgacacactggaatctgtattatatatatttttaagaaaatacaatgatggttgtctggttttgttgtttttacaggtgttgtggaataaaaactgtaagaaaattaagtatttaaaatgttccaataaagtggggttttttgttattctaatatattattgtgtacctattgtaaatatgaaacactcctattttgcaagctgaggacacaatttgtactgttgttatatataaataaagtttactgaattaaaaaaaccttaaatctttaaata

SEQ ID NO: 2353 - DNA, 3329 bp, Homo sapiens
ccaacagctttggctaaattaaccctggctggacccattttcttccattttactcctttgccccttcaggtggacaatttgacctttgatggggaagaatatcagtgggcagcagaaggggcacggcccgcatgcattctcaagtcttctctgcctttccccacagcctccctctgcgcttctgggtgaacgtgattaagaacccccagttcgtgtttgacatccacaagggcagcatcacggacgcctgcctctctgtggtggcccagaccttcatggactcttgttcaacgtcagagcaccggctgggcaaggactccccctccaacaagctgctctatgccaaggacatccccagctacaagagctgggtggagagatactacgcagacatcgccaagctcccagccatcagtgaccaggacatgaatgcctacctcgccgagcagtcccgcctgcacgccgtggagttcaacatgctgagtgccctcaatgagatctactcctatgtcagcaagtatagtgaggagctcatcggggccctagagcaggatgagcaggcacggcggcagcggctggcttataaggtggagcagctcattaatgccatgtccattgagagctgagaggaggagcctcgcattcctgggaagagggacctgtccaagctgtcacactgggagtctcagatggaaggacaagtgatggggatcaggccccagagcttgctgtcccctgagaccccatcctggggagaggggaggactcctctccctacgccagccaagtttcgtcatagccagttccagctgggagagacagtgggcgtcgtccatcctcagtgagaacaccagagaacccggggccgggagaaggtggttcttcaagccgagaggcacgagctggggacagttctgcctctgtgactgctgctttgcatgaaaactcatttgatgtatattggggaaataatgagaactttatttaatttttttaagaaaaagggaaaaaaacagaaataaaacaaaaagccgccctgttaatcccgtccaacttttgtttaattctgatttctgtctcccttccttcttttctcccattcctccttctttatataatgcctatttccaaatgccagagaaagcagagatgctgagagacattggagagaaaatgactgtctccttttccttgaaattaaaaaaaaaaaaaaaaagagagaaagaggagaagaagaatgatgagcacaagtatgcaccaaacacttcgcaaaaacagaggccagtaaaacctggaattatcccggcagccagaggagtatggaacttccagaactttgcacaaattgcaaagccatcaagagctcaccctggctggctggaaactgagctttatctaccacacacctgtatattctcatcttttgagaggagatgtgtacctagatagtaccaatgctttttgctactgttttttgttttgttttatttaatcctaaacctcaacaaatgaggagctggtctttgatatgtttcctttcaatttccctaaagttactatgagaagtggggtgaggtgggcctctcccagaccagacacctggcagccctgcctcatatcaatccctgtcataaaccaggcaccctggggaaacggcctggaggtgtgtgggccaggcctccacgaggttccatttgaaagttgatttggagacataggtgtttgactttggagttcactccaatcatccagtggtccctggcaattaaaaagaaaacaaaaatcaaacactgtttacagcaagcaatacttgaagagcataggttacagaagctgcagtatttattattatgctttctttctttcattctctcgtgcctggagaggggagaccacccttcgctcatatacggaagctcctgaccatctgggcctacagcacttcctcagtagaaatgactgtggcatgcccacgttactaccttctgcctctctttctgcctctcacggacttgtgagtgtgaaggacaagtggatgacttctcactggactttccttctctgtctcttctgatgatgcctaaaactatggataaccaattccctggccctgctgagcgtgaaacagaagcaatggatgagtgctggacgaagaatggcctgggcagaacaaatagggagcatttgaaagcttctggctgataaatctccaggtgcatcccggttgccacgcctgcccccattaacctgctcctggtaaatactgatccagcagctgctccaggagaggccgtctttttttcccagccacgctgtgtcttgcatgagactcctggggcctgggcacagagagaaaagaattgagactcaggaggctcagtgggtgagaaaatgcaaagtggcttcacagacacagggctgtgggagcagatcgacggggaacttgggagatgaacttcagggccttccgacgccttgtctcaggaacatgctttgagaaaaatggtagcatcctttccataactcagtctctcttccctagtttccctgaagtgtgacgttttagtatctggagctcagtgatccccatgaatgagggataaagtttcactcttggtattttctaactagtgctagggaaagtcctgagacacgatcacagccactgcttggcatacagggcctccacccaataagcaaactggagattcctcagcctctcgtggacacccacatctcattcttctcacagcagagaagctctcccttcagcctgagctgtcttctttctgctgcagtgcagcctgctccctcctaccctggcctcaaggaaggtgggaaacatcttctgcatttcaaagtcctcactttgacttatttggccttcatcttggcatggaaggtggcaggcagaatggaaatactccccccaaacagaacagatattcttgcgtgtgtaagggcagaagggacaagctctctatcccatgagactaggggccggagcccacctgcctttccccacaacttttcctgctcaaacccactcctcttgacacactggaatctgtattatatatatttttaagaaaatacaatgatggttgtctggttttgttgtttttacaggtgttgtggaataaaaactgtaagaaaattaagtatttaaaatgttccaataaagtggggttttttgttattctaatatattattgtgtacctattgtaaatatgaaacactcctattttgcaagctgaggacacaatttgtactgttgttatatataaataaagtttactgaattaaaaaaaccttaaatctttaaata

SEQ ID NO: 2354 - DNA, 3790 bp, Homo sapiens
gtatagtattgtgctctatcccctacgtctcccgcgggcatgctggtcctactggaccttggagtggcgccaaggccggatcgcccgggtcgtgctgcaagatgaggacatcaccaccaagattgagggtgactggaagcggctcaacacactgatgcattatcaggtgtcagacaggtcggtggtggctctggtccccaaacagacctcctcctacaacatccctgcctctgccagcatctcccggacgtccatcagcagatacgactcctccttcaggtatacgggcagccccgacagcctgcggtcccgggccccgatgatcaccccagacctggaaagtggggtcaaggtgtggcatctggtgaagaaccatgaccacggtgaccagaaggagggtgaccggggcagcaagatggtgtccgagatctacctgacccggctactggccaccaagggcaccctgcagaagtttgtggacgacttgtttgagaccttgttcagcactgtgcaccggggcagcgctctccccctggccatcaagtacatgtttgatttcctagatgagcaggcagacaggcacagcatccatgacacagatgtgcggcacacctggaaaagcaactgcctccctctgcgcttctgggtgaacgtgattaagaacccccagttcgtgtttgacatccacaagggcagcatcacggacgcctgcctctctgtggtggcccagaccttcatggactcttgttcaacgtcagagcaccggctgggcaaggactccccctccaacaagctgctctatgccaaggacatccccagctacaagagctgggtggagagatactacgcagacatcgccaagctcccagccatcagtgaccaggacatgaatgcctacctcgccgagcagtcccgcctgcacgccgtggagttcaacatgctgagtgccctcaatgagatctactcctatgtcagcaagtatagtgaggagctcatcggggccctagagcaggatgagcaggcacggcggcagcggctggcttataaggtggagcagctcattaatgccatgtccattgagagctgagaggaggagcctcgcattcctgggaagagggacctgtccaagctgtcacactgggagtctcagatggaaggacaagtgatggggatcaggccccagagcttgctgtcccctgagaccccatcctggggagaggggaggactcctctccctacgccagccaagtttcgtcatagccagttccagctgggagagacagtgggcgtcgtccatcctcagtgagaacaccagagaacccggggccgggagaaggtggttcttcaagccgagaggcacgagctggggacagttctgcctctgtgactgctgctttgcatgaaaactcatttgatgtatattggggaaataatgagaactttatttaatttttttaagaaaaagggaaaaaaacagaaataaaacaaaaagccgccctgttaatcccgtccaacttttgtttaattctgatttctgtctcccttccttcttttctcccattcctccttctttatataatgcctatttccaaatgccagagaaagcagagatgctgagagacattggagagaaaatgactgtctccttttccttgaaattaaaaaaaaaaaaaaaaagagagaaagaggagaagaagaatgatgagcacaagtatgcaccaaacacttcgcaaaaacagaggccagtaaaacctggaattatcccggcagccagaggagtatggaacttccagaactttgcacaaattgcaaagccatcaagagctcaccctggctggctggaaactgagctttatctaccacacacctgtatattctcatcttttgagaggagatgtgtacctagatagtaccaatgctttttgctactgttttttgttttgttttatttaatcctaaacctcaacaaatgaggagctggtctttgatatgtttcctttcaatttccctaaagttactatgagaagtggggtgaggtgggcctctcccagaccagacacctggcagccctgcctcatatcaatccctgtcataaaccaggcaccctggggaaacggcctggaggtgtgtgggccaggcctccacgaggttccatttgaaagttgatttggagacataggtgtttgactttggagttcactccaatcatccagtggtccctggcaattaaaaagaaaacaaaaatcaaacactgtttacagcaagcaatacttgaagagcataggttacagaagctgcagtatttattattatgctttctttctttcattctctcgtgcctggagaggggagaccacccttcgctcatatacggaagctcctgaccatctgggcctacagcacttcctcagtagaaatgactgtggcatgcccacgttactaccttctgcctctctttctgcctctcacggacttgtgagtgtgaaggacaagtggatgacttctcactggactttccttctctgtctcttctgatgatgcctaaaactatggataaccaattccctggccctgctgagcgtgaaacagaagcaatggatgagtgctggacgaagaatggcctgggcagaacaaatagggagcatttgaaagcttctggctgataaatctccaggtgcatcccggttgccacgcctgcccccattaacctgctcctggtaaatactgatccagcagctgctccaggagaggccgtctttttttcccagccacgctgtgtcttgcatgagactcctggggcctgggcacagagagaaaagaattgagactcaggaggctcagtgggtgagaaaatgcaaagtggcttcacagacacagggctgtgggagcagatcgacggggaacttgggagatgaacttcagggccttccgacgccttgtctcaggaacatgctttgagaaaaatggtagcatcctttccataactcagtctctcttccctagtttccctgaagtgtgacgttttagtatctggagctcagtgatccccatgaatgagggataaagtttcactcttggtattttctaactagtgctagggaaagtcctgagacacgatcacagccactgcttggcatacagggcctccacccaataagcaaactggagattcctcagcctctcgtggacacccacatctcattcttctcacagcagagaagctctcccttcagcctgagctgtcttctttctgctgcagtgcagcctgctccctcctaccctggcctcaaggaaggtgggaaacatcttctgcatttcaaagtcctcactttgacttatttggccttcatcttggcatggaaggtggcaggcagaatggaaatactccccccaaacagaacagatattcttgcgtgtgtaagggcagaagggacaagctctctatcccatgagactaggggccggagcccacctgcctttccccacaacttttcctgctcaaacccactcctcttgacacactggaatctgtattatatatatttttaagaaaatacaatgatggttgtctggttttgttgtttttacaggtgttgtggaataaaaactgtaagaaaattaagtatttaaaatgttccaataaagtggggttttttgttattctaatatattattgtgtacctattgtaaatatgaaacactcctattttgcaagctgaggacacaatttgtactgttgttatatataaataaagtttactgaattaaaaaaaccttaaatctttaaata

SEQ ID NO: 2355 - DNA, 3143 bp, Homo sapiens
  misc_feature (162)..(162): n is a, c, g, or t
gggcagacatcaaggcagcgccatgcctcctctgtgcgtgcgaccacacccctcagtgaacgtcttgctacaacgtgcagaggcagcgaggtgtccccttgattccctcctcctaacaaggctgctcttatgcgcaacgtgacatttcccagtctactaagnagcttgagtgtgtggagatgatacgtacagcatagatcggaacgaagcttcctcagcccgatctacgtgaccaggacatgaatgcctacctcgccgagcagtcccgcctgcacgccgtggagttcaacatgctgagtgccctcaatgagatctactcctatgtcagcaagtatagtgaggagctcatcggggccctagagcaggatgagcaggcacggcggcagcggctggcttataaggtggagcagctcattaatgccatgtccattgagagctgagaggaggagcctcgcattcctgggaagagggacctgtccaagctgtcacactgggagtctcagatggaaggacaagtgatggggatcaggccccagagcttgctgtcccctgagaccccatcctggggagaggggaggactcctctccctacgccagccaagtttcgtcatagccagttccagctgggagagacagtgggcgtcgtccatcctcagtgagaacaccagagaacccggggccgggagaaggtggttcttcaagccgagaggcacgagctggggacagttctgcctctgtgactgctgctttgcatgaaaactcatttgatgtatattggggaaataatgagaactttatttaatttttttaagaaaaagggaaaaaaacagaaataaaacaaaaagccgccctgttaatcccgtccaacttttgtttaattctgatttctgtctcccttccttcttttctcccattcctccttctttatataatgcctatttccaaatgccagagaaagcagagatgctgagagacattggagagaaaatgactgtctccttttccttgaaattaaaaaaaaaaaaaaaaagagagaaagaggagaagaagaatgatgagcacaagtatgcaccaaacacttcgcaaaaacagaggccagtaaaacctggaattatcccggcagccagaggagtatggaacttccagaactttgcacaaattgcaaagccatcaagagctcaccctggctggctggaaactgagctttatctaccacacacctgtatattctcatcttttgagaggagatgtgtacctagatagtaccaatgctttttgctactgttttttgttttgttttatttaatcctaaacctcaacaaatgaggagctggtctttgatatgtttcctttcaatttccctaaagttactatgagaagtggggtgaggtgggcctctcccagaccagacacctggcagccctgcctcatatcaatccctgtcataaaccaggcaccctggggaaacggcctggaggtgtgtgggccaggcctccacgaggttccatttgaaagttgatttggagacataggtgtttgactttggagttcactccaatcatccagtggtccctggcaattaaaaagaaaacaaaaatcaaacactgtttacagcaagcaatacttgaagagcataggttacagaagctgcagtatttattattatgctttctttctttcattctctcgtgcctggagaggggagaccacccttcgctcatatacggaagctcctgaccatctgggcctacagcacttcctcagtagaaatgactgtggcatgcccacgttactaccttctgcctctctttctgcctctcacggacttgtgagtgtgaaggacaagtggatgacttctcactggactttccttctctgtctcttctgatgatgcctaaaactatggataaccaattccctggccctgctgagcgtgaaacagaagcaatggatgagtgctggacgaagaatggcctgggcagaacaaatagggagcatttgaaagcttctggctgataaatctccaggtgcatcccggttgccacgcctgcccccattaacctgctcctggtaaatactgatccagcagctgctccaggagaggccgtctttttttcccagccacgctgtgtcttgcatgagactcctggggcctgggcacagagagaaaagaattgagactcaggaggctcagtgggtgagaaaatgcaaagtggcttcacagacacagggctgtgggagcagatcgacggggaacttgggagatgaacttcagggccttccgacgccttgtctcaggaacatgctttgagaaaaatggtagcatcctttccataactcagtctctcttccctagtttccctgaagtgtgacgttttagtatctggagctcagtgatccccatgaatgagggataaagtttcactcttggtattttctaactagtgctagggaaagtcctgagacacgatcacagccactgcttggcatacagggcctccacccaataagcaaactggagattcctcagcctctcgtggacacccacatctcattcttctcacagcagagaagctctcccttcagcctgagctgtcttctttctgctgcagtgcagcctgctccctcctaccctggcctcaaggaaggtgggaaacatcttctgcatttcaaagtcctcactttgacttatttggccttcatcttggcatggaaggtggcaggcagaatggaaatactccccccaaacagaacagatattcttgcgtgtgtaagggcagaagggacaagctctctatcccatgagactaggggccggagcccacctgcctttccccacaacttttcctgctcaaacccactcctcttgacacactggaatctgtattatatatatttttaagaaaatacaatgatggttgtctggttttgttgtttttacaggtgttgtggaataaaaactgtaagaaaattaagtatttaaaatgttccaataaagtggggttttttgttattctaatatattattgtgtacctattgtaaatatgaaacactcctattttgcaagctgaggacacaatttgtactgttgttatatataaataaagtttactgaattaaaaaaaccttaaatctttaaata

SEQ ID NO: 2356 - DNA, 2392 bp, Homo sapiens
  misc_feature (1857)..(1857): n is a, c, g, or t
  misc_feature (1864)..(1864): n is a, c, g, or t
ccgccgccaccggcgggagccagagctgccgggaggagcggcatccgcgccagactggagcgggagggcggcggagggcagttgctgggaatttttcagccgagagggcgagcgatccggagagagaccccgagagcttgggagcggtagggcgtgcgagcgccgcagccagcggagcaaacctcgaaatagatctggaaagccaggctcccggaggaaatgggactgtgaacgaaccggagagcaagaagggaaggaagcgccgggattgctgatgtcagaggagcccggaaagtcgcgctggaaaaatctgaagacagccggggctctgcttcttcctcaggagagacaccgccggccgcccccacacgccccctcggcgcctccgggtgccccctgagagccggcgacagcgcccagccgggctgctgcggggcgacggaggactgaggggcgcgcggagcggagaccgaggagcgacttcaggaatacagataagtgtctggtggcttgacgtggattttaatgaatttggactccatgtggatttggtcgtctccctgattccgagctgcgggcagggagaggggcctcgcgccgccctcagcagccggcggcggccgaggtagaccgagcggggacggaaggacagaccgacgtcgccgagctggaatcatgtgagggccaaccggggaaggtggagcagatgagcacacacaggagccgtctcctcaccgccgcccctctcagcatggaacagaggcagccctggccccgggccctggaggtggacagccgctctgtggtcctgctctcagtggtctgggtgctgctggcccccccagcagccggcatgcctcagttcagcaccttccactctgagaatcgtgactggaccttcaaccacttgaccgtccaccaagggacgggggccgtctatgtgggggccatcaaccgggtctataagctgacaggcaacctgaccatccaggtggctcataagacagggccagaagaggacaacaagtcttgttacccgcccctcatcgtgcagccctgcagcgaagtgctcaccctcaccaacaatgtcaacaagctgctcatcattgactactctgagaaccgcctgctggcctgtgggagcctctaccagggggtctgcaagctgctgcggctggatgacctcttcatcctggtggagccatcccacaagaaggagcactacctgtccagtgtcaacaagacgggcaccatgtacggggtgattgtgcgctctgagggtgaggatggcaagctcttcatcggcacggctgtggatgggaagcaggattacttcccgaccctgtccagccggaagctgccccgagaccctgagtcctcagccatgctcgactatgagctacacagcgattttgtctcctctctcatcaagatcccttcagacaccctggccctggtctcccactttgacatcttctacatctacggctttgctagtgggggctttgtctactttctcactgtccagcccgagacccctgagggtgtggccatcaactccgctggagacctcttctacacctcacgcatcgtgcggctctgcaaggatgaccccaagttccactcatacgtgtccctgcccttcggctgcacccgggccggggtggaataccgcctcctgcaggctgcttacctggccaagcctggggactcactggcccaggccttcaatatcaccagccaggacgatgtactctttgccatcttctccaaagggcagaagcagtatcaccacccgcccgatgactctgccctgtgtgccttccctatccgggccatcaacttgcagatcaaggngcgcctncagtcctgctaccagggcgagggcaacctggagctcaactggctgctggggaaggacgtccagtgcaccaaggcgcctgtccccatcgatgataacttctgtggactggacatcaaccagcccctgggaggctcaactccagtggagggcctgaccctgtacaccaccagcagggaccgcatgacctctgtggcctcctacgtttacaacggctacagcgtggtttttgtggggactaagagtggcaagctgaaaaaggtaagagtctatgagttcagatgctccaatgccattcacctcctcagcaaagagtccctcttggaaggtagctattggtggagatttaactataggcaactttattttcttggggaacaaaggtgaaatggggaggtaagaaggggttaattttgtgacttagcttctagctacttcctccagccatcagtcattgggtatgtaaggaatgcaagcgtatttcaatatttcccaaactttaagaaaaaactttaagaaggtacatctgca

SEQ ID NO: 2357 - DNA, 201 bp, Homo sapiens
acaaaaaggatggccatgggtgcaacaggggccctgactgcgggttgtactgaacggcaaacatatcgcagttcttgcttttagggaataaagtagggagaggaagaggaggtagagtctccagcagtgacttcaacagctcgctgtcttcactatctaggaaataggtgtaaaaacctgctcaaaacgaaatagatttgt

SEQ ID NO: 2358 - DNA, 317 bp, Homo sapiens
ttcttcttctttttttttttttgagacagttttgctcttgttgcccagactggagagcaatggcgtgatctcggctcactgcaacctccgcctcctgtgttcaagcgattctcctgcctcagcctcctgagtagctgggattacaggcgcccgccaccgtgcccagctagctctcatttctcttgaaatataattgtcatgtgagtttcttcaatccaaacaattggaaacgatagccattggtagacactttgtttcctgtccaagacaagaaacaattagcctctaacaagctctttgacctagaacttaatctt

SEQ ID NO: 2359 - DNA, 245 bp, Homo sapiens
ggcatgcctgttaatttttattgaaaagtgggcattgtatataaaaaaattgtagcgaccctagatgattttctaatatctagatggcttacaccatttgctaggcaaatagaatgggggctgattccatttatcttgtctgagctgaccacagcaagggcgtggttttggtcaggctccatctctttttggtttgcctctactctttggaagtaccctgcaggagttctggctaagaactgggg

SEQ ID NO: 2360 - DNA, 835 bp, Homo sapiens
atggagtttctccatgttggtcaggctggtctcgaactcctgatctcaggtgatccacccgccttggcctcccaaagtgctgggattacaggcgtgagccaccgtgcgcggcgcatgtgtttgttttcatagctgtgaagacagcaacaggcaggtgagagagtctggtctcgtccctccctcacttgtgacctcagaccagccattgccctcactgggcctcagttactccaactttatagtggggggttggatccaacaattttgaagagctctctcttaatctctgacataatgagtctgaaacaaagaaaagttaccttaccgtgtctttacttcctttcttctgggctgtgaactcaagtgccttgagggccagctaagagctttttgggatatttgtctaacttaattgaactgttactgaaagataaattaacaaaatggttcagagttttggattaagacctttgtaactaactgaccgtcagcacaggagcttcggtttccttctctgtaaaacagggctcctcattccaattccacctatcctgtagccttgtgggaataaaaggaggcaccacatcccttgcccccacagggctttgaaaaaccagagtgctgggatttgcccaaggtgagtcagggtcactaccttcctgctgcctttggccgttcccaggataaaactcccctggttgagtgagatggaaacctaaaatgaaaccttgctagagtcccggactcaagcctcattactgtcacctttgtcagcagccgcagcgccaaatctatcgtcaccatcatcacttctccctgaggcctggtatcccgt

SEQ ID NO: 2361 - DNA, 608 bp, Homo sapiens
atggagtttctccatgttggtcaggctggtctcgaactcctgatctcaggtgatccacccgccttggcctcccaaagtgctgggattacaggcgtgagccaccgtgcgcggcgcatgtgtttgttttcatagctgtgaagacagcaacaggcaggtgagagagtctggtctcgtccctccctcacttgtgacctcagaccagccattgccctcactgggcctcagttactccaactttatagtggggggttggatccaacaattttgaagagctctctcttaatctctgacataatgagtctgaaacaaagaaaagttaccttaccgtgtctttacttcctttcttctgggctgtgaactcaagtgccttgagggccagctaagagctttttgggatatttgtctaacttaattgaactgttactgaaagataaattaacaaaatggttcagagttttggattaagacctttgtaactaactgaccgtcagcacaggagcttcggtttccttctctgtaaaacagggctcctcattccaattccacctatcctgtagccttgtgggaataaaaggaggcaccacgtggaggtgcttggcagggtgaaa

SEQ ID NO: 2362 - DNA, 596 bp, Homo sapiens
gttgttgtgtaagcccatcagaggaggacaaccaaccaggctgtgtggagggcagacttcgagcccaacagccctgacttgaactctgatcctacttggcatcctattctgggagacaagactagctccttggagaaccaggcagtaaatgagatcaagccttggaaaacgagtgaagtccccggggaaggctttctggatacggtgaggcgcacagcgagtgaaatttaaagaggtagcagagaaaaattgattctccttcaaaagtatggatcccattctgttcacttttccaggagcattctagaaactggtggtgaaggggttaactgtgccagctaccacatcccttgcccccacagggctttgaaaaaccagagtgctgggatttgcccaaggtgagtcagggtcactaccttcctgctgcctttggccgttcccaggataaaactcccctggttgagtgagatggaaacctaaaatgaaaccttgctagagtcccggactcaagcctcattactgtcacctttgtcagcagccgcagcgccaaatctatcgtcaccatcatcacttctccctgaggcctggtatcccgt

SEQ ID NO: 2363 - DNA, 428 bp, Homo sapiens
tgtatagggcagctgatagagtgccagtggcccagcatctggggggtggttagtagtgatcatgagctcatcaggggcaaagcccagggggtccatctgtacctgttttgcccatcagataccaattgggaactttatcttctcttgaaaccatagcctataaccaggtcaccatgattaatgtgcatataattagcaaagtacagagaagccatagaaattccctgtgagaagatgcaaaactcagtgtgggaaagcagagtcctcaggaatacacggaagtgggaggaacccggggcttacctcacacatcttggccatagccgggaatatcacaggcaggccgacaactgtgtgacaaagggctgtcttctaatcacacaaccaaatggcaggagaaccaccctttctccatcgcctgctttaaa

SEQ ID NO: 2364 - DNA, 330 bp, Homo sapiens
gttcggtaggttagatgtgtttgatgcattttcagcttagggtattttcaacttacagaacatttatcaggaagtaaccccatcgtaagttgattagtatctctacttgaaattgagattatggaagcaatgcagttagtaatgaaaaggtaaaggtgttgtcatggagttgacttccgaggtagtaaagaaaggataaggccagacatggtgggtcacacctgtaattccagcactttgggaggctgaggtgggaggattgcttgaggccaggagtttgagaccagcctgggcaacagcgagaccccatctctgtttttaaaataaaaa

SEQ ID NO: 2365 - DNA, 429 bp, Homo sapiens
ctcatgaatttgttgaatgaagaaattcgttttaaaaatttattttctttgcttccttcattgtctggccttcctactttggttaatgcttatgttttcctgagccttactaacacgaggccgctcttaaaaaagagagagcgctgggtgctgtggctcacgcctgtaatcccagtactttgggaggccgaggtgggcagatcacctgaggtcaggagttcgagaccagcctgaccaccatggtgaaaccccatctctagtaaaaatgcaaaattagccagttgtggtggcgcatgcctgtaatcccagctactcgggaggctgaggcaggagaatcacttgaacccgggaggtggaggttgcagttagctgagatcgcagcattgcattccagcctggacaacaaaagcgaaactccatctcaaaaaa

SEQ ID NO: 2366 - DNA, 1858 bp, Homo sapiens
  misc_feature (1253)..(1253): n is a, c, g, or t
gagtaaacttttctctgcttctagaaaactgacttctcaatctctggaagttggaggttttgttgtggcaatttgcttgtgttgttttttaatgtggactgcgagaaacaggggcagttgaggtcatgttgaaatctgctgtggttggttctgatgtgctttctagtatgttctttctttagtgggaccaacagggttataataccttcctctgagttggaagataggcgcttctgacttattgccaagctcgggtaactgagctggactgcctctttttcttctctttccccccacatatgtgtgcatatctaaggtgaccacctatagaccgcatgattcctggtgactcaaggatgagggtgggagcaacagtaccagtggggggtggtaatgtggtcagctctgcaataagtgaaaaagcagacaagaaaatatgcagggaaagactgtgagtaggactggagtctcttttgattggtacaggttcttattgacaaaaagcatgtcatgatatatcctaggaaaaatacttgaatttagcatgaacttttccgtgagtggttcctcaaaaattttcaagagtagaagaacagcagtggactggcagatgcagatgttgtacaggaagaagaaccccctgctcaaaatactatccagtgagcctcaggatatatttttttttaaattttgcttccttgaaggagtaagatacttacaaaaagatgcatctagaaaacaaaaataaactctgaaatttaaaatgtgatatcagaagtgtacaacctaatagacaggttagaagataaaactgagaaagtctcaccaaaaaacaaagtaatggtaagtcggggacaggagataaaagaattagaggacctgtccaggatgtccaatatttgaataatgggagttctaaaaagagtgaacaagggaaacaaaaggtaattattcgagaaaatatccctgcactgaagaatgggagtttctgcactgaaagggccagagatggtagctgcaaagagacacatcgagagctttaagaggtgaaagttttggcctctgtgcagaggaagtggtagggacaggtctcctcttggcttcctttaaacaagccctgaagaatattcaactcttcaaattattgcatgtataacgatttaaaaaacaaaaactttggtaaggttgaaaaataaaagacatcaatagatgttcatgaaagagaaaatccaaatgccaatgaatctgagaanatccagagattgtctcttaaactggacatgtgttgtgacaaattgagaaaaaaggaaaaaaatatctatctctctatctatatagtccactaggatgtgtggtgggtgagttcctgtaggacctgaccccgccgacacagctggtcaccttattgctgtgatgttgtctatgatttattctactcatgggtgagaaatgggatgtgatgcctgtgggttttgaaataacgtgtatattgtggagtggctaaatcaaaccagttaacatatgcgttacttcacatatttctttgtggttagaacacttaaaatttactcctttaggccgggcacggtggctcacgcctgtaatcccagcactttgggagtccgaggcgggtggatcacgaggtcaagagatcgagaccatcctggccaacatggtgaaaccctgtctctactaaaaatataaaaattagccaggtgtggtggcatgcacctgtagtcccagccactcaggaggctgaggcaggagaatcgcttgaacctgctgggaggtggaggttgcagttagccgggatcacgccactgcaccccagcctggcaacagagtgagactacgtctc

SEQ ID NO: 2367 - DNA, 197 bp, Homo sapiens
ggcaagatcttgctctgtcacccaggctggagtgcagtggcactgtcttggctcactgcagtctccacctcccgggttcaagtgattctcctgcctcagcctcccagtgctgggattacaggagtgagccactgtgcccggccaagcaacctcatttaatacatccaaatgcctccataggtgcctcttgattgtga

SEQ ID NO: 2368 - DNA, 507 bp, Homo sapiens
attgttactttttccaaatatgcctgtcagcatgcccataattttacaaaagaatcactaagcaagatatcaaaagtgactgagaggttattttagataagatcgttgaggaagacctccataaagaagtgagtttgagctgagacttgaataatgagaggaagtcctccatatgaagatctaaggtcagggcatttaagtcagaagaaatatcaaatataaatacacaatatcaaaactcagggcaggaatatatcagatatatttgaggaactgtatgaaaattgtctcaggtgaaaatcaagagattgttcaaagcttttttaataaggtgagattatagaatgtgaagaaataaaattgttacagtatatataagctggatttttcttttttctgttttgtaaagaatgtcatttttttaaaaagtgcactttttaaattcagaagttccataaatgctatctaaaatgtcacttgactaacttaattattaggtatataaag

SEQ ID NO: 2369 - DNA, 283 bp, Homo sapiens
tgtctcaaaaataaaagttacatcttgtgaaaacaacacggaagacttttaaacaataatctctaagtaggatatgcctttctaattatgactcgaaacccagagccacagaagaaatcgatccctaccaacacatatgccgaacaaagtctaccaggaaaacaccaaaaacaaagtcaaaagtcaaacaacaaatctgaaaaaacaaccgcaactgatcttaccaacaggaggcttccctaaaataaaccagttcttctgaatcaataaaaaaaaaatagtg

SEQ ID NO: 2370 - DNA, 823 bp, Homo sapiens
gtgctcttgacccactcctttgaagtgggccccttcctgaactggactgctggcctggcttactgtccccctcacttgggacaacagctgccagccaggcttgggggcttcctccaggcccagcttggcaggacatgaatcagagcctaaagtgtcaaaccctgtgcttggtccttgagaacacttcatctgtcaaccacggctgttgtagcaccactgactaaatgctcacatcttcaactgaggccaagaaccttcactgttcagatgaggaaacagaggtgttacacgggtaaactatgattcaaatgcaggctttgtgacttcagggctcacattcttaattggctctccagaatattacctgccgtctgtacaaccttgtggtctacacaatgactacagagctacattggaagatgtcattgcattctgcagaagctgaggttcagaaatgtccagtgactagctcaagatcagattgctgctaggaaacagagccagggctcatcccatctgacaccaagtccagtgttcctgtaccacatgcaccctcaagtgggcacacaagcaggaaagaacctcacgaggccatttaatctttggctgtttcaaggaaggactggcccctgaactaacacatcagaaacagatcctcaagtggggagctgaatgctacctggtgttcctatgatccattcctgctctgtttactctcccactgcctgaatggctagttcacacctcctcccctaactgctggcagagggaggggccttgcttcccatttcactaagaaaatttaagcctgggcgtggtggtt

SEQ ID NO: 2371 - DNA, 249 bp, Homo sapiens
ggctttagcgtcacacatacaaacacaactgcttctagctcttcagatgttatggctcagaaaaaccgttcctttttgtcttgttatttcaagagcaactgatttctttttggtagctctgaaatatatgccagtgtgtgggcacagtcacacagctacgcacaggcccacaccctggaaagattggaaggagtggagacacatttttcagctaggaaaggaaaaagtttgggttagcatttataaaac

SEQ ID NO: 2372 - DNA, 387 bp, Homo sapiens
ttgggctctctctcgctcacacctcttcttctgcctctctctgtcacctttttcctccttcaggtctctcagcccagcatcaccttctcagagcagcctgcatccatcccctagactagaaatatccccctttcaaataacctcatggcacccacacctcaagacaggttgcaattgaatgtctgtttatccctccctgtctccattctatccccagggcctcccactctgcctggcaaagaacggatgtgctcacatcaggaatattttaatgaaggtgctgttactggaaagggatcccaatccagaccccaagagagggttcttggatctcataaaagaaagaattcagggcgagtccataaagtgaaagcaagtccataaagg

SEQ ID NO: 2373 - DNA, 1435 bp, Homo sapiens
cagctgaatgtggaggcctttaagagaacttccagctcctgtaaaaacccagaccagaggactactgaccaacatttcaggctgatcctccagacctcgaagttactctccttactctcctgactcttaattacatcacacctgtgtcgacactctctgggaaaagactgaagaaataatcttttcaagaagcagaaagctcctgcatacataggctgatacgccacctactgcaaaaccgagctgacagcgcaggcgatgctgccagcgtttccattccatcaccaggctggggctgaataaaggcgtgcttgtgtggtagtgtctctttttaaaaaatctcaaagccaagaagaacaagctgaaatagcatcttcaaaaaatggagcgtaaaataaacagaagagaaaaagaaaaggagtatgaagggaaacacaacagcctggaagatactgatcaaggaaagaactgcaaatccacactgatgaccctcaacgttggtggatatttatacattactcaaaaacaaacactgaccaagtacccagacactttccttgaaggtatagtaaatggaaaaatcctctgcccgtttgatgctgatggtcattatttcatagacagggatggtctcctcttcaggcatgtcctaaacttcctacgaaatggagaacttctattgcccgaagggtttcgagaaaatcaacttcttgcacaagaagcagaattctttcagctcaagggactggcagaggaagtgaaatccaggtgggagaaagaacagctaacacccagagagactactttcttggaaataacagataaccacgatcgttcacaaggattaagaatcttctgtaatgctcctgatttcatatcaaaaataaagtctcgcattgttctggtgtccaaaagcaggctggatggatttccagaggagttttcaatatcgtcaaatatcatccaatttaaatacttcataaagtctgaaaatggcactcgacttgtactaaaggaagacaacacctttgtctgtaccttggaaactcttaagtttgaggctatcatgatggctttaaagtgtggctttagactgctgaccagcctggattgttccaaagggtcaattgttcacagcgatgcacttcattttatcaagtaattacctgtgtcacgaacaaaggcaacaagcatgcagccagcaagcttcggaaaaccacagcatcaaagacatcccaaataacatgcccagctagctctgtactacagagccctgctactaatcaattactgtgagctaacggtatgtaaattctatcgctaaagatgtccttcctctggggtgttcctactgatcagactcttccacctaaaatgaaaacagtaaccttctatatactgtaaataaagactgaaagcttttgctatttatttg

SEQ ID NO: 2374 - DNA, 322 bp, Homo sapiens
tgtttaattccataagtttcctatttgtgtcctgcccctgatttaactgctagaaatattactcatctctttgtgattttaaaggaagcattgaccacctcccctgccttggtttctctgtgagtcactgctagatacggctgtgggagcaggctgatgataggtaagaatcatgtatctagaatctctctccccacaaatatatgactttctagtaaaatcatgctttcaaaatagttgccattttaaatatgaatgtaagttttgatatgattaatattggaaagagccttaaattccaatgcataaatttaaaagaaaa

SEQ ID NO: 2375 - DNA, 449 bp, Homo sapiens
tccctaacggttctccaaacttaggtcagaaaggtggggaactttatttttctgggcagagagtgcatgaataatacacttgcaacctgctcagcttccctaagttctctttagctagcttctccactcgaactacacatcaatctgtcaccagtggtcagcagctcagcagagagccagtgttattgtgaacctacggtggaatgacttgcttcccagctggtgatcaatctgtgttagacggcaacatgtttgcttctacaaatgagctggacccctctgtaacatatctctgccaacttttgaaagaaagagtctgtttcaattcttttccggggtaaagacaaaaagcctgtctccctttgcacaaccagctattgaacaatccgtgcaaatatttacagccagtatcctaaagaaattgttttcagaggtcaggaagttgcact

SEQ ID NO: 2376 - DNA, 787 bp, Homo sapiens
gtcattactcccaaatatttttggagtatctgttcactcttgatttacctagagattttaagaaaaacaaacaaacaaaaaaaacaaaaacgctctggagaagctgaaaacctaatttgggtgtgggggaaggctgtcctcagacacatggacagagattaacagatataactagtaggtctaggaagccaaagctgagggctaggtactaatgggaataggacatcaagtgtgtccctctccccttcctgcccgcccccacccccacttcaatgagcaggtgtggtcagatgtttgaaacatcaccatttcagtttatgcatgatgcttgattaccgtagggaatgcagttcagacaaagttcctagctctgattggtatcatttaatcctttgttatatcactgaatctggcttttccagagctcctgaaggttttaagccttatttgttggactttgacttagaacatcgatttaaacaacttttgtgaactcccatgacatactttggttactttaaacatatttatgggacagagcatttaaaatgcctgcctgatatttacagggcctgtgaacagtcctccaaagcttgcattctgtggtgtatcaggtcagtcattaatgaggataaagctcatgtgatagccttcttacttaattcaaggcacacttctgtagggctgcactgagtcagtgtctgaggcaacagtataggccagcgttggcactctgaaaacacacccccactggctctcactgttatccgtgaaagcatccttaact

SEQ ID NO: 2377 - DNA, 455 bp, Homo sapiens
agaagttttgggctctttgataaccacattagctgctgttgaaatcccaagaaataaagaaagtcactactcatttttagccttgcaagtagtgctttgtgtgctttgaaatataacaagttttacctactaaggcacaagttcacaaaacatgaaatcattaaatcagaagtgagatagggaccatgtcacatgctgttaacttgttctgtagacagttcctctcttgacttaaatgaggtagggtccagtcatctctagtaaatgatgaacttaagtttataggacaccagtccaaagcacctaggcttcaggggttgaaggccagtattgctttcaccttctggtttaattctttaaagattctgctcgcagatttgaagatcggctttggcaaagctgccagtcctgtattacttgactttttgctgttgtctatttggatcatttctttc

SEQ ID NO: 2378 - DNA, 365 bp, Homo sapiens
gtttacattctagtgaaacatagcttctcacttttatcttttgcttgttcattccagagatatttatttgatatctactatgtgctggttgttttgctagagactagttttctctgtatacactatgttttctcagctgtccatttttgcacatattgttcatttggtcagaatacctttctcagactctcacagaagtctctggaaggacttcacctcccttccagaacgagttccaatgccagcgttactgtgaagactttctttactacactggtagttgctatatctttctcatattcagaacactatacatatctctgttataggtcttacaaagaattgtaattctcaattttagccta

SEQ ID NO: 2379 - DNA, 356 bp, Homo sapiens
cagcagatgagtgggtgaagcaaatgtgttatagccatatggtggaatattattcactcataaaaaatgaaattttcgactgggcgtggaggttcatgcctgtaatcccagcactttgggaggccaagcagggcagaacacttgaagtcaggagtttgagaccagcctggccaacatggaaaaaccccatctctactgaaatacaaaaattagctgggcatggtggcacacgcctgtaatcccagctagttgggaggctgaggcaggagaaccgcttgaacccaggaagcagggttcgcagtgaggtgagacgccactgcactccagcgtgggtgacagagtgagactcggtctca

SEQ ID NO: 2380 - DNA, 402 bp, Homo sapiens
gtgactgtattgtggggacaggaagcacaaattcccatgtggatcactaggagagataataagtggggtcatttcaccccttggtcccctgcttccagacccaaagaggcctacatggcattgtgcttccttcttagttgtaggaggtgtgagatacaatcatttgcctctgactttggagggttggtcctagcatgcccctgaccagtagccccttaaatacttcattgatatggaaggtctctgaatcttcgtgggcttaatctaccactctctgaagtgcttatgtctttcaaaggcctctaaaatctctgccatgtcttgctcatccagttgttagcatgatgtcattgatacagtggactttggaatctaagtggggagacactggtaagtgaccaa

SEQ ID NO: 2381 - DNA, 445 bp, Homo sapiens
cttatgagttaatgcagctaaagctctttagagccatgtctaacactgttaataaatgtaagatgtcattattgccactgccctcctcatcatccctaggaagaggggtgaggggcaggtgagggataaacctgtaatgcaggggaaatggactaagccactctgagaagctgtgtggaatctggaattcttggagagttagtagaggccagaccttcaggtggtatttaatgtagacagagtgtgcacaggtttgcatttgctacacagaaaaggtaaaacctgtgttgacttctcttttctgaataccgtgtcacggaatgaaagcttgtaattattttctgcaagcaaaatttcaaaagataataaaataaccagagagtttgtcaggagactgtgtaattagttgtgaatcgttttcctactaggacatcagtttacaagc

SEQ ID NO: 2382 - DNA, 346 bp, Homo sapiens
gtacttgaatgatgctttacgttattagctcccacctacccaccccaaactagactacaagctcctggaggtcagaccacatgtttgtgcctaagtgcagacttcactgtaataggaactcaaaaaactgtttgccaggtgactgataggtcctgtagtaatcccaattacttttccactagacactaaaattcagctaacataaaaaacagtcactctccccaacttcatcttcattttttaacatttaaattatagggaaatgcattgtgggagaatatttgacaattcctttagggaaagggcaataatgagaccaacccaaggcaaattaatcacagtgagg

SEQ ID NO: 2383 - DNA, 301 bp, Homo sapiens
gtatgtcaggttcatgcgagtgcagctcagagtggagcctaggagtttataaacaactttgttatgtagatttcgtgcattccttcctctccacattcatgccattactttatcattttctcgagatcctctttttagtcttctgaacagaaagatggaagttttgtttcctcactctgctgctcactttctgcagctgtgctcaagtccagcaccagccagcaagaggacagagtttaatggatgattacccctacctgttggtgccattgctctctgatcagagagaaaagctcttggg

SEQ ID NO: 2384 - DNA, 514 bp, Homo sapiens
tcgactacagctttgagttttatagcttgattaatggggaaactcaggcagggcacggaacttctctgctttgtcaaaggagttgtggctcttgctcagatcctcgtctgtaggttcaatacttaggtgccctctgccttgggttagtgataagtcacgtatgtccactgatgctcagagaggatgccgttgcattcattggatgctaagaatgcaagtttggacttaggtactgggtacagagaaaaaggtttaaacagccaagatccattagtcgactaccatgcctatgactgtgtgtaataccataaggagaaacggcacattagacagggtcccttactcatggagttctaagcctgctggggaggtggctgtgtccagtgataaccatgatacaaggcagagattgaaaagtgtcatgagcaaggactaagggtcacagcagaagttgtcatcttatttatgatgtgcctgagatactgtctgaagagcaaacttttgaccaaaaaaa

SEQ ID NO: 2385 - DNA, 443 bp, Homo sapiens
gctagttacataagtgtttgcttcatcatgattcaccaagctctgcattttgtattataaacattttcgtgtataatgcttatacattatacacgaaaatgtatataattttgtgggttatattttgtaaggtttaaaaaatggaagtcaggatgggcggttacaagtggtgactcacgcttgtaatcccagcactttggtaggcctacgcaggcagatcacttgagaccaggagttcgagaccagcctggccaacatagcaaaaccccttctctactaaaagtacaaaaattagccaggtgtggtggcaggcacctctaatcccagctacttgggaggctgaggcaggagaatcacttgaacccaggaggcagaggttgcagtgagctgagatcccgccattgcactccagtctgggcaacaagagcgaaactctgtctcca

SEQ ID NO: 2386 - DNA, 673 bp, Homo sapiens
ggcaatgatgcttagaaaggaactgctgaccgagtattaaagggtctagtttacagcataaagttattacagtgccacagaagtgctaccatgctacaaacaaatttaataactgaatcgtgtttgactaagaatatatttacacggtaaatctttagacaaagaatagtgtgtcagctaataatgaaagaatggttatactttgaatgtatatctccttcatgaagctaggtaagtttttttaggtgtttttcagctgtaaggcaaacaatgataggaagtatatgtattttacttggcacaatgtcttatcagttacctctaatcctgctatatattctaacagggttgaaagaatttcatttctttccattaagaaaacctaactagctgggcgtggtggctcatgcctgtaatctcagcactttgggaggccgcggccgggcagttcacctgaggtcaggagttcgagaccagcctaggcaacattgtgaaaccccatctctactaaaaacacaaaaaattagccaggcaaggtgacagccacctgtaatctcagctacttaggagactgagacaggagaatcgcttgaacccgggaggtggaggttgcagtgagtcgagattatgccattgtactccagcctgtgtgacagagtgagactctatctaa

SEQ ID NO: 2387 - DNA, 131 bp, Homo sapiens
tggaaaatttaatgactcaaacttataaaacacggtacctgcttgatctgttattccgatttacaacttaggtaccagttttcttaagtaaatatgccttccccgcttgcgtggtgttttaaagctcttca

SEQ ID NO: 2388 - DNA, 312 bp, Homo sapiens
actgaaaacacatttactcatttcaaaagaataagaaataaacatttgttattttcttattagaagcttccttgaatttaaataagcacttagttttcctttgtcttaattttttgtcatgataaaatcatatagtattagtacttcattgtacttaaagttactgtttttgtctgaaataatttccaaggaaaatgtgatgaaaatataaaacatgtatattatgcctaagatgagacattttggcaaaaatatacaacattaattcttaggcttttttaatcacataatttaaagtttcaatgaactatt

SEQ ID NO: 2389 - DNA, 2627 bp, Homo sapiens
agtgggtaccgggacgccgtgaggcggaagctgtgtatggcgggaggctgtggcggtcccttggtggggaagctgttgctgttgctagacgacgggaactagctctcgtcacttcctcagcccgccgtctgcccactcctctagccggaacctgggggcccggagccggggtaggcacagagttgtcctcggaggtccaggacagcggccagcccggcggcgggagtcagggccacgccacctgcagggaagaacccgagtcgaagcgggaagatggctgcagacaagcctgcagatcagggagcagagaaacatgaaggcacaggtcagtcctctgggatcactgatcaagagaaggagttatccaccaatgctttccaagctttcacatctggaaattatgatgcctgtctacaacaccttgcctgtctacaagatataaacaaagatgattataaaataattttgaatacagcagtagctgagttttttaaaagtaaccaaacaacaacagataatttgagacaaacacttaaccagctgaagaatcaggtccactcagctgttgaagaaatggatggattagatgatgttgaaaacagcatgttgtactataatcaagcagtcattctttatcatctgcggcagtatacagaagccatatcagttggtgaaaaactttatcagttcatagagccttttgaagaaaaatttgcccaagcagtgtgttttttgcttgtagacctgtatatattaacctaccaagctgagaaagctttgcatcttcttgctgtcctagaaaaaatgatttcacagggtaacaataacaaaaatggaaagaatgagactggtaataacaacaacaaagatggatctaatcataaagctgaaagtggagctctaatagaagctgcaaaatcaaagatacatcagtacaaagtacgagcttatatccaaatgaagtctctgaaagcatgtaaaagggaaatcaagtcagtcatgaatacagctggaaattccgcaccctctctctttcttaaaagcaattttgagtacttaagaggtaattatcgaaaagccgtgaagctattaaatagttcaaacattgctgagcatccaggattcatgaaaacaggtgaatgcttgagatgcatgttctggaataaccttggttgcatccattttgccatgagcaagcacaatttgggaatattctactttaaaaaggctctgcaagagaatgacaatgtctgtgcacagctcagtgcaggtagcactgatccaggtaaaaaattttcaggaagacccatgtgtacgttactaaccaataagagatatgagttgctgtataactgtggaattcagcttcttcacattggaaggcctcttgctgccttcgaatgtctgattgaagctgttcaggtttatcatgcaaatcctcgcctctggctacggctggctgaatgctgcattgctgccaataaggggacttctgaacaagaaactaaaggccttcccagcaaaaaaggaattgtacagtctattgttggtcaaggctatcatcgtaaaatagttttggcatcacagtctatacagaatactgtttataatgatgggcagtcttcggccattcctgtagccagtatggagtttgcagccatatgtctcagaaatgccttgttgctgctacctgaagaacagcaagatccaaagcaggaaaatggggctaaaaatagtaatcaattaggtgggaacacagagagcagcgaaagcagtgaaacttgcagcagtaaaagccatgatggagataaattcattccagctccaccttcttctccattgagaaaacaggaattagaaaacttaaagtgctccatacttgcttgcagtgcctacgtggctctggctttgggtgataacctcatggctttgaatcatgcagataaacttcttcagcagcccaagctgtcaggatctcttaagtttttgggacatttatatgctgcagaagccctcatctctctcgacagaatatctgatgccattactcacttgaacccggagaatgtcactgatgtctccttagggatctcttcaaatgagcaggaccaaggatcagacaaaggtgaaaatgaagcaatggaatcctctggtaagcgggcccctcagtgctaccccagttccgtcaactctgccaggactgtgatgctgttcaaccttggcagcgcttactgcctgaggagcgaatatgacaaagcccgaaagtgtctccaccaggcggcttcaatgatccatcctaaagaggtgccccctgaggccatcttgctggcagtctaccttgaactgcagaatggtaatactcagctggccttacagatcatcaaaaggaatcagctgctccctgcagtgaaaacacactctgaagtgagaaagaagccagtgtttcagcctgtccacccgatccagcccatccaaatgccggctttcaccactgtgcagagaaagtgatacttcacttttggaaaactgttacctgagacccaggggagaatttactggccattttagttgtatcacagcagaatgaataaaagatggtgaaggctgttaattttgagtcaattcta

SEQ ID NO: 2390 - DNA, 2772 bp, Homo sapiens
agtgggtaccgggacgccgtgaggcggaagctgtgtatggcgggaggctgtggcggtcccttggtggggaagctgttgctgttgctagacgacgggaactagctctcgtcacttcctcagcccgccgtctgcccactcctctagccggaacctgggggcccggagccggggtaggcacagagttgtcctcggaggtccaggacagcggccagcccggcggcgggagtcagggccacgccacctgcagggaagaacccgagtcgaagcgggaagatggctgcagacaagcctgcagatcagggagcagagaaacatgaaggcacaggtcagtcctctgggatcactgatcaagagaaggagttatccaccaatgctttccaagctttcacatctggaaattatgatgcctgtctacaacaccttgcctgtctacaagatataaacaaagatgattataaaataattttgaatacagcagtagctgagttttttaaaagtaaccaaacaacaacagataatttgagacaaacacttaaccagctgaagaatcaggtccactcagctgttgaagaaatggatggattagatgatgttgaaaacagcatgttgtactataatcaagcagtcattctttatcatctgcggcagtatacagaagccatatcagttggtgaaaaactttatcagttcatagagccttttgaagaaaaatttgcccaagcagtgtgttttttgcttgtagacctgtatatattaacctaccaagctgagaaagctttgcatcttcttgctgtcctagaaaaaatgatttcacagggtaacaataacaaaaatggaaagaatgagactggtaataacaacaacaaagatggatctaatcataaagctgaaagtggagctctaatagaagctgcaaaatcaaagatacatcagtacaaagtacgagcttatatccaaatgaagtctctgaaagcatgtaaaagggaaatcaagtcagtcatgaatacagctggaaattccgcaccctctctctttcttaaaagcaattttgagtacttaagaggtaattatcgaaaagccgtgaagctattaaatagttcaaacattgctgagcatccaggattcatgaaaacaggtgaatgcttgagatgcatgttctggaataaccttggttgcatccattttgccatgagcaagcacaatttgggaatattctactttaaaaaggctctgcaagagaatgacaatgtctgtgcacagctcagtgcaggtagcactgatccaggtaaaaaattttcaggaagacccatgtgtacgttactaaccaataagagatatgagttgctgtataactgtggaattcagcttcttcacattggaaggcctcttgctgccttcgaatgtctgattgaagctgttcaggtttatcatgcaaatcctcgcctctggctacggctggctgaatgctgcattgctgccaataaggggacttctgaacaagaaactaaaggccttcccagcaaaaaaggaattgtacagtctattgttggtcaaggctatcatcgtaaaatagttttggcatcacagtctatacagaatactgtttataatgatgggcagtcttcggccattcctgtagccagtatggagtttgcagccatatgtctcagaaatgccttgttgctgctacctgaagaacagcaagatccaaagcaggaaaatggggctaaaaatagtaatcaattaggtgggaacacagagagcagcgaaagcagtgaaacttgcagcagtaaaagccatgatggagataaattcattccagctccaccttcttctccattgagaaaacaggaattagaaaacttaaagtgctccatacttgcttgcagtgcctacgtggctctggctttgggtgataacctcatggctttgaatcatgcagataaacttcttcagcagcccaagctgtcaggatctcttaagtttttgggacatttatatgctgcagaagccctcatctctctcgacagaatatctgatgccattactcacttgaacccggagaatgtcactgatgtctccttagggatctcttcaaatgagcaggaccaaggatcagacaaaggtgaaaatgaagcaatggaatcctctggtaagcgggcccctcagtgctaccccagttccgtcaactctgccaggactgtgatgctgttcaaccttggcagcgcttactgcctgaggagcgaatatgacaaagcccgaaagtgtctccaccaggcggcttcaatgatccatcctaaagaggtgccccctgaggccatcttgctggcagtctaccttgaactgcagaatggtaatactcagctggccttacagatcatcaaaaggaatcagctgctccctgcagtgaaaacacactctgaagtgagaaagaagccagtgtttcagcctgtccacccgatccagcccatccaaatgccggctttcaccactgtgcagagaaagtgatacttcacttttggaaaactgttacctgagacccaggggagaatttactggccattttagttgtatcacagcagaatgaataaaagatggtgaaggctgttaattttgagtcaattctacccctgacttttggccaaaagcttacttaaaattaaggatttactaagtcatcatcagctgtttttcttaatttcagccagactattaattttgagccattatgtaatatatgccataggcaattaaaacataattttatcagaa

SEQ ID NO: 2391 - DNA, 2475 bp, Homo sapiens
aaaaaaaaaaaaaaaaaaaaatttacagagttgtcctcggaggtccaggacagcggccagcccggcggcgggagtcagggccacgccacctgcagggaagaacccgagtcgaagcgggaagatggctgcagacaagcctgcagatcagggagcagagaaacatgaaggcacaggtcagtcctctgggatcactgatcaagagaaggagttatccaccaatgctttccaagctttcacatctggaaattatgatgcctgtctacaacaccttgcctgtctacaagatataaacaaagatgattataaaataattttgaatacagcagtagctgagttttttaaaagtaaccaaacaacaacagataatttgagacaaacacttaaccagctgaagaatcaggtccactcagctgttgaagaaatggatggattagatgatgttgaaaacagcatgttgtactataatcaagcagtcattctttatcatctgcggcagtatacagaagccatatcagttggtgaaaaactttatcagttcatagagccttttgaagaaaaatttgcccaagcagtgtgttttttgcttgtagacctgtatatattaacctaccaagctgagaaagctttgcatcttcttgctgtcctagaaaaaatgatttcacagggtaacaataacaaaaatggaaagaatgagactggtaataacaacaacaaagatggatctaatcataaagctgaaagtggagctctaatagaagctgcaaaatcaaagatacatcagtacaaagtacgagcttatatccaaatgaagtctctgaaagcatgtaaaagggaaatcaagtcagtcatgaatacagctggaaattccgcaccctctctctttcttaaaagcaattttgagtacttaagaggtaattatcgaaaagccgtgaagctattaaatagttcaaacattgctgagcatccaggattcatgaaaacaggtgaatgcttgagatgcatgttctggaataaccttggttgcatccattttgccatgagcaagcacaatttgggaatattctactttaaaaaggctctgcaagagaatgacaatgtctgtgcacagctcagtgcaggtagcactgatccaggtaaaaaattttcaggaagacccatgtgtacgttactaaccaataagagatatgagttgctgtataactgtggaattcagcttcttcacattggaaggcctcttgctgccttcgaatgtctgattgaagctgttcaggtttatcatgcaaatcctcgcctctggctacggctggctgaatgctgcattgctgccaataaggggacttctgaacaagaaactaaaggccttcccagcaaaaaaggaattgtacagtctattgttggtcaaggctatcatcgtaaaatagttttggcatcacagtctatacagaatactgtttataatgatgggcagtcttcggccattcctgtagccagtatggagtttgcagccatatgtctcagaaatgccttgttgctgctacctgaagaacagcaagatccaaagcaggaaaatggggctaaaaatagtaatcaattaggtgggaacacagagagcagcgaaagcagtgaaacttgcagcagtaaaagccatgatggagataaattcattccagctccaccttcttctccattgagaaaacaggaattagaaaacttaaagtgctccatacttgcttgcagtgcctacgtggctctggctttgggtgataacctcatggctttgaatcatgcagataaacttcttcagcagcccaagctgtcaggatctcttaagtttttgggacatttatatgctgcagaagccctcatctctctcgacagaatatctgatgccattactcacttgaacccggagaatgtcactgatgtctccttagggatctcttcaaatgagcaggaccaaggatcagacaaaggtgaaaatgaagcaatggaatcctctggtaagcgggcccctcagtgctaccccagttccgtcaactctgccaggactgtgatgctgttcaaccttggcagcgcttactgcctgaggagcgaatatgacaaagcccgaaagtgtctccaccaggcggcttcaatgatccatcctaaagaggtgccccctgaggccatcttgctggcagtctaccttgaactgcagaatggtaatactcagctggccttacagatcatcaaaaggaatcagctgctccctgcagtgaaaacacactctgaagtgagaaagaagccagtgtttcagcctgtccacccgatccagcccatccaaatgccggctttcaccactgtgcagagaaagtgatacttcacttttggaaaactgttacctgagacccaggggagaatttactggccattttagttgtatcacagcagaatgaataaaagatggtgaaggctgttaattttgagtcaattcta

SEQ ID NO: 2392 - DNA, 2546 bp, Homo sapiens
agtgggtaccgggacgccgtgaggcggaagctgtgtatggcgggaggctgtggcggtcccttggtggggaagctgttgctgttgctagacgacgggaactagctctcgtcacttcctcagcccgccgtctgcccactcctctagccggaacctgggggcccggagccggggtaggcacagagttgtcctcggaggtccaggacagcggccagcccggcggcgggagtcagggccacgccacctgcagggaagaacccgagtcgaagcgggaagatggctgcagacaagcctgcagatcagggagcagagaaacatgaaggcacaggtcagtcctctgggatcactgatcaagagaaggagttatccaccaatgctttccaagctttcacatctggaaattatgatgcctgtctacaacaccttgcctgtctacaagatataaacaaagatgattataaaataattttgaatacagcagtagctgagttttttaaaagtaaccaaacaacaacagataatttgagacaaacacttaaccagctgaagaatcaggtccactcagctgttgaagaaatggatggattagatgatgttgaaaacagcatgttgtactataatcaagcagtcattctttatcatctgcggcagtatacagaagccatatcagttggtgaaaaactttatcagttcatagagccttttgaagaaaaatttgcccaagcagtgtgttttttgcttgtagacctgtatatattaacctaccaagctgagaaagctttgcatcttcttgctgtcctagaaaaaatgatttcacagggtaacaataacaaaaatggaaagaatgagactggtaataacaacaacaaagatggatctaatcataaagctgaaagtggagctctaatagaagctgcaaaatcaaagatacatcagtacaaagtacgagcttatatccaaatgaagtctctgaaagcatgtaaaagggaaatcaagtcagtcatgaatacagctggaaattccgcaccctctctctttcttaaaagcaattttgagtacttaagaggtaattatcgaaaagccgtgaagctattaaatagttcaaacattgctgagcatccaggattcatgaaaacaggtgaatgcttgagatgcatgttctggaataaccttggttgcatccattttgccatgagcaagcacaatttgggaatattctactttaaaaaggctctgcaagagaatgacaatgtctgtgcacagctcagtgcaggtagcactgatccaggtaaaaaattttcaggaagacccatgtgtacgttactaaccaataagagatatgagttgctgtataactgtggaattcagcttcttcacattggaaggcctcttgctgccttcgaatgtctgattgaagctgttcaggtttatcatgcaaatcctcgcctctggctacggctggctgaatgctgcattgctgccaataaggggacttctgaacaagaaactaaaggccttcccagcaaaaaaggaattgtacagtctattgttggtcaaggctatcatcgtaaaatagttttggcatcacagtctatacagaatactgtttataatgatgggcagtcttcggccattcctgtagccagtatggagtttgcagccatatgtctcagaaatgccttgttgctgctacctgaagaacagcaagatccaaagcaggaaaatggggctaaaaatagtaatcaattaggtgggaacacagagagcagcgaaagcagtgaaacttgcaggtgctccatacttgcttgcagtgcctacgtggctctggctttgggtgataacctcatggctttgaatcatgcagataaacttcttcagcagcccaagctgtcaggatctcttaagtttttgggacatttatatgctgcagaagccctcatctctctcgacagaatatctgatgccattactcacttgaacccggagaatgtcactgatgtctccttagggatctcttcaaatgagcaggaccaaggatcagacaaaggtgaaaatgaagcaatggaatcctctggtaagcgggcccctcagtgctaccccagttccgtcaactctgccaggactgtgatgctgttcaaccttggcagcgcttactgcctgaggagcgaatatgacaaagcccgaaagtgtctccaccaggcggcttcaatgatccatcctaaagaggtgccccctgaggccatcttgctggcagtctaccttgaactgcagaatggtaatactcagctggccttacagatcatcaaaaggaatcagctgctccctgcagtgaaaacacactctgaagtgagaaagaagccagtgtttcagcctgtccacccgatccagcccatccaaatgccggctttcaccactgtgcagagaaagtgatacttcacttttggaaaactgttacctgagacccaggggagaatttactggccattttagttgtatcacagcagaatgaataaaagatggtgaaggctgttaattttgagtcaattcta

SEQ ID NO: 2393 - DNA, 627 bp, Homo sapiens
tcccggtagattagattctaaatcttctgtgttcgtttttctgcctgaggaatactgctgtgccaagtggctcctcaaggcgatagattgggttgcttccttgctgttggcacggcctcttcaccagtgtctacactctttttccccagctggtaagcgggcccctcagtgctaccccagttccgtcaactctgccaggactgtgatgctgttcaaccttggcagcgcttactgcctgaggagcgaatatgacaaagcccgaaagtgtctccaccaggcggcttcaatgatccatcctaaagaggtgccccctgaggccatcttgctggcagtctaccttgaactgcagaatggtaatactcagctggccttacagatcatcaaaaggaatcagctgctccctgcagtgaaaacacactctgaagtgagaaagaagccagtgtttcagcctgtccacccgatccagcccatccaaatgccggctttcaccactgtgcagagaaagtgatacttcacttttggaaaactgttacctgagacccaggggagaatttactggccattttagttgtatcacagcagaatgaataaaagatggtgaaggctgttaattttgagtcaattcta

SEQ ID NO: 2394 - DNA, 696 bp, Homo sapiens
aatactgaagtgttacttaggaaaacaaatgggcatgcagattttgatgtaattgcaactgtatgtgtctgttgtgaaagccaccagcagaattggatggttgactgtagtatcggggtgtccagtcacccatctcaaaacccagagtattacatgtctagcttaattgttaggttttaagacaaaaggaactgaggctcatcagagcagaacaacaggtagtccctaggaagtcacgtgggaatgagcttgaataagtttgttaccttgttggttggcagatgtacttggagtgtgtatcttaagcttttgttttttcacgggcatctttctgttttgagcaaaggcggcttcaatgatccatcctaaagaggtgccccctgaggccatcttgctggcagtctaccttgaactgcagaatggtaatactcagctggccttacagatcatcaaaaggaatcagctgctccctgcagtgaaaacacactctgaagtgagaaagaagccagtgtttcagcctgtccacccgatccagcccatccaaatgccggctttcaccactgtgcagagaaagtgatacttcacttttggaaaactgttacctgagacccaggggagaatttactggccattttagttgtatcacagcagaatgaataaaagatggtgaaggctgttaattttgagtcaattcta

SEQ ID NO: 2395 - DNA, 510 bp, Homo sapiens
aatactgaagtgttacttaggaaaacaaatgggcatgcagattttgatgtaattgcaactgtatgtgtctgttgtgaaagccaccagcagaattggatggttgactgtagtatcggggtgtccagtcacccatctcaaaacccagagtattacatgtctagcttaattgttaggttttaagacaaaaggaactgaggctcatcagagcagaacaacaggtagtccctaggaagtcacgtgggaatgagcttgaataagtttgttaccttgttggttggcagatgtacttggagtgtgtatcttaagcttttgttttttcacgggcatctttctgttttgagcaaaggcggcttcaatgatccatcctaaagaggtgccccctgaggccatcttgctggcagtctaccttgaactgcagaatggtgagtaattctctctgtttaggactttatcccttgaaagagcctgagattttttggttgggcaacagagcgaggctccatctcaaaa

SEQ ID NO: 2396 - DNA, 2509 bp, Homo sapiens
agtgggtaccgggacgccgtgaggcggaagctgtgtatggcgggaggctgtggcggtcccttggtggggaagctgttgctgttgctagacgacgggaactagctctcgtcacttcctcagcccgccgtctgcccactcctctagccggaacctgggggcccggagccggggtaggcacagagttgtcctcggaggtccaggacagcggccagcccggcggcgggagtcagggccacgccacctgcagggaagaacccgagtcgaagcgggaagatggctgcagacaagcctgcagatcagggagcagagaaacatgaaggcacaggtcagtcctctgggatcactgatcaagagaaggagttatccaccaatgctttccaagctttcacatctggaaattatgatgcctgtctacaacaccttgcctgtctacaagatataaacaaagatgattataaaataattttgaatacagcagtagctgagttttttaaaagtaaccaaacaacaacagataatttgagacaaacacttaaccagctgaagaatcaggtccactcagctgttgaagaaatggatggattagatgatgttgaaaacagcatgttgtactataatcaagcagtcattctttatcatctgcggcagtatacagaagccatatcagttggtgaaaaactttatcagttcatagagccttttgaagaaaaatttgcccaagcagtgtgttttttgcttgtagacctgtatatattaacctaccaagctgagaaagctttgcatcttcttgctgtcctagaaaaaatgatttcacagggtaacaataacaaaaatggaaagaatgagactggtaataacaacaacaaagatggatctaatcataaagctgaaagtggagctctaatagaagctgcaaaatcaaagatacatcagtacaaagtacgagcttatatccaaatgaagtctctgaaagcatgtaaaagggaaatcaagtcagtcatgaatacagctggaaatgtgaatgcttgagatgcatgttctggaataaccttggttgcatccattttgccatgagcaagcacaatttgggaatattctactttaaaaaggctctgcaagagaatgacaatgtctgtgcacagctcagtgcaggtagcactgatccaggtaaaaaattttcaggaagacccatgtgtacgttactaaccaataagagatatgagttgctgtataactgtggaattcagcttcttcacattggaaggcctcttgctgccttcgaatgtctgattgaagctgttcaggtttatcatgcaaatcctcgcctctggctacggctggctgaatgctgcattgctgccaataaggggacttctgaacaagaaactaaaggccttcccagcaaaaaaggaattgtacagtctattgttggtcaaggctatcatcgtaaaatagttttggcatcacagtctatacagaatactgtttataatgatgggcagtcttcggccattcctgtagccagtatggagtttgcagccatatgtctcagaaatgccttgttgctgctacctgaagaacagcaagatccaaagcaggaaaatggggctaaaaatagtaatcaattaggtgggaacacagagagcagcgaaagcagtgaaacttgcagcagtaaaagccatgatggagataaattcattccagctccaccttcttctccattgagaaaacaggaattagaaaacttaaagtgctccatacttgcttgcagtgcctacgtggctctggctttgggtgataacctcatggctttgaatcatgcagataaacttcttcagcagcccaagctgtcaggatctcttaagtttttgggacatttatatgctgcagaagccctcatctctctcgacagaatatctgatgccattactcacttgaacccggagaatgtcactgatgtctccttagggatctcttcaaatgagcaggaccaaggatcagacaaaggtgaaaatgaagcaatggaatcctctggtaagcgggcccctcagtgctaccccagttccgtcaactctgccaggactgtgatgctgttcaaccttggcagcgcttactgcctgaggagcgaatatgacaaagcccgaaagtgtctccaccaggcggcttcaatgatccatcctaaagaggtgccccctgaggccatcttgctggcagtctaccttgaactgcagaatggtaatactcagctggccttacagatcatcaaaaggaatcagctgctccctgcagtgaaaacacactctgaagtgagaaagaagccagtgtttcagcctgtccacccgatccagcccatccaaatgccggctttcaccactgtgcagagaaagtgatacttcacttttggaaaactgttacctgagacccaggggagaatttactggccattttagttgtatcacagcagaatgaataaaagatggtgaaggctgttaattttgagtcaattcta

SEQ ID NO: 2397 - DNA, 2480 bp, Homo sapiens
agtgggtaccgggacgccgtgaggcggaagctgtgtatggcgggaggctgtggcggtcccttggtggggaagctgttgctgttgctagacgacgggaactagctctcgtcacttcctcagcccgccgtctgcccactcctctagccggaacctgggggcccggagccggggtaggcacagagttgtcctcggaggtccaggacagcggccagcccggcggcgggagtcagggccacgccacctgcagggaagaacccgagtcgaagcgggaagatggctgcagacaagcctgcagatcagggagcagagaaacatgaaggcacaggtcagtcctctgggatcactgatcaagagaaggagttatccaccaatgctttccaagctttcacatctggaaattatgatgcctgtctacaacaccttgcctgtctacaagatataaacaaagatgattataaaataattttgaatacagcagtagctgagttttttaaaagtaaccaaacaacaacagataatttgagacaaacacttaaccagctgaagaatcaggtccactcagctgttgaagaaatggatggattagatgatgttgaaaacagcatgttgtactataatcaagcagtcattctttatcatctgcggcagtatacagaagccatatcagttggtgaaaaactttatcagttcatagagccttttgaagaaaaatttgcccaagcagtgtgttttttgcttgtagacctgtatatattaacctaccaagctgagaaagctttgcatcttcttgctgtcctagaaaaaatgatttcacagggtaacaataacaaaaatggaaagaatgagactggtaataacaacaacaaagatggatctaatcataaagctgaaagtggagctctaatagaagctgcaaaatcaaagatacatcagtacaaagtacgagcttatatccaaatgaagtctctgaaagcatgtaaaagggaaatcaagtcagtcatgaatacagctggaaattccgcaccctctctctttcttaaaagcaattttgagtacttaagaggtaattatcgaaaagccgtgaagctattaaatagttcaaacattgctgagcatccaggattcatgaaaacaggtgaatgcttgagatgcatgttctggaataaccttggttgcatccattttgccatgagcaagcacaatttgggaatattctactttaaaaaggctctgcaagagaatgacaatgtctgtgcacagctcagtgcaggtagcactgatccaggtaaaaaattttcaggaagacccatgtgtacgttactaaccaataagagatatgagttgctgtataactgtggaattcagcttcttcacattggaaggcctcttgctgccttcgaatgtctgattgaagctgttcaggtttatcatgcaaatcctcgcctctggctacggctggctgaatgctgcattgctgccaataaggggacttctgaacaagaaactaaaggccttcccagcaaaaaaggaattgtacagtctattgttggtcaaggctatcatcgtaaaatagttttggcatcacagtctatacagaatactgtttataatgatgggcagtcttcggccattcctgtagccagtatggagtttgcagccatatgtctcagaaatgccttgttgctgctacctgaagaacagcaagatccaaagcaggaaaatggggctaaaaatagtaatcaattaggtgggaacacagagagcagcgaaagcagtgaaacttgcaggtgctccatacttgcttgcagtgcctacgtggctctggctttgggtgataacctcatggctttgaatcatgcagaagccctcatctctctcgacagaatatctgatgccattactcacttgaacccggagaatgtcactgatgtctccttagggatctcttcaaatgagcaggaccaaggatcagacaaaggtgaaaatgaagcaatggaatcctctggtaagcgggcccctcagtgctaccccagttccgtcaactctgccaggactgtgatgctgttcaaccttggcagcgcttactgcctgaggagcgaatatgacaaagcccgaaagtgtctccaccaggcggcttcaatgatccatcctaaagaggtgccccctgaggccatcttgctggcagtctaccttgaactgcagaatggtaatactcagctggccttacagatcatcaaaaggaatcagctgctccctgcagtgaaaacacactctgaagtgagaaagaagccagtgtttcagcctgtccacccgatccagcccatccaaatgccggctttcaccactgtgcagagaaagtgatacttcacttttggaaaactgttacctgagacccaggggagaatttactggccattttagttgtatcacagcagaatgaataaaagatggtgaaggctgttaattttgagtcaattcta

SEQ ID NO: 2398 - DNA, 3128 bp, Homo sapiens
  misc_feature (3041)..(3041): n is a, c, g, or t
agtgggtaccgggacgccgtgaggcggaagctgtgtatggcgggaggctgtggcggtcccttggtggggaagctgttgctgttgctagacgacgggaactagctctcgtcacttcctcagcccgccgtctgcccactcctctagccggaacctgggggcccggagccggggtaggcacagagttgtcctcggaggtccaggacagcggccagcccggcggcgggagtcagggccacgccacctgcagggaagaacccgagtcgaagcgggaagatggctgcagacaagcctgcagatcagggagcagagaaacatgaaggcacaggtcagtcctctgggatcactgatcaagagaaggagttatccaccaatgctttccaagctttcacatctggaaattatgatgcctgtctacaacaccttgcctgtctacaagatataaacaaagatgattataaaataattttgaatacagcagtagctgagttttttaaaagtaaccaaacaacaacagataatttgagacaaacacttaaccagctgaagaatcaggtccactcagctgttgaagaaatggatggattagatgatgttgaaaacagcatgttgtactataatcaagcagtcattctttatcatctgcggcagtatacagaagccatatcagttggtgaaaaactttatcagttcatagagccttttgaagaaaaatttgcccaagcagtgtgttttttgcttgtagacctgtatatattaacctaccaagctgagaaagctttgcatcttcttgctgtcctagaaaaaatgatttcacagggtaacaataacaaaaatggaaagaatgagactggtaataacaacaacaaagatggatctaatcataaagctgaaagtggagctctaatagaagctgcaaaatcaaagatacatcagtacaaagtacgagcttatatccaaatgaagtctctgaaagcatgtaaaagggaaatcaagtcagtcatgaatacagctggaaattccgcaccctctctctttcttaaaagcaattttgagtacttaagaggtaattatcgaaaagccgtgaagctattaaatagttcaaacattgctgagcatccaggattcatgaaaacaggtgaatgcttgagatgcatgttctggaataaccttggttgcatccattttgccatgagcaagcacaatttgggaatattctactttaaaaaggctctgcaagagaatgacaatgtctgtgcacagctcagtgcaggtagcactgatccaggtaaaaaattttcaggaagacccatgtgtacgttactaaccaataagagatatgagttgctgtataactgtggaattcagcttcttcacattggaaggcctcttgctgccttcgaatgtctgattgaagctgttcaggtttatcatgcaaatcctcgcctctggctacggctggctgaatgctgcattgctgccaataaggggacttctgaacaagaaactaaaggccttcccagcaaaaaaggaattgtacagtctattgttggtcaaggctatcatcgtaaaatagttttggcatcacagtctatacagaatactgtttataatgatgggcagtcttcggccattcctgtagccagtatggagtttgcagccatatgtctcagaaatgccttgttgctgctacctgaagaacagcaagatccaaagcaggaaaatggggctaaaaatagtaatcaattaggtgggaacacagagagcagcgaaagcagtgaaacttgcagcagtaaaagccatgatggagataaattcattccagctccaccttcttctccattgagaaaacaggaattagaaaacttaaagtgctccatacttgcttgcagtgcctacgtggctctggctttgggtgataacctcatggctttgaatcatgcagataaacttcttcagcagcccaagctgtcaggatctcttaagtttttgggacatttatatgctgcagaagccctcatctctctcgacagaatatctgatgccattactcacttgaacccggagaatgtcactgatgtctccttagggatctcttcaaatgagcaggaccaaggatcagacaaaggtgaaaatgaagcaatggaatcctctggtaagcgggcccctcagtgctaccccagttccgtcaactctgccaggactgtgatgctgttcaaccttggcagcgcttactgcctgaggagcgaatatgacaaagcccgaaagtgtctccaccaggcggcttcaatgatccatcctaaagaggtgccccctgaggccatcttgctggcagtctaccttgaactgcagaatggtaatactcagctggccttacagatcatcaaaaggaatcagctgctccctgcagtgaaaacacactctgaagtgagaaagaagccagtgtttcagcctgtccacccgatccagcccatccaaatgccggctttcaccactgtgcagagaaagtgatacttcacttttggaaaactgttacctgagacccaggggagaatttactggccattttagttgtatcacagcagaatgaataaaagatggtgaaggctgttaattttgagtcaattctacccctgacttttggccaaaagcttacttaaaattaaggatttactaagtcatcatcagctgtttttcttaatttcagccagactattaattttgagccattatgtaatatatgccataggcaattaaaacataattttatcagaaacaccaagcacaagcaaaatcaaaacagaaatgtgtccgcggccgcagcggcgccacaaagaaaagaggcatatgaaaccactccgtgcgggcgcccgcgccccaattgggatgagacacaggggccaaacctgcgcctcgagaacacgccgcgccagtacaccgggcggactccacccaacaaaaagctcccgggcaaccggcgtcgtcaacgcacccaaggatcctgaggaacacagggtctcaacaggacacgagacgaataatgncccgccggtgaaacggagccaaacacaaggcacagcgaccagacgagccaccaacaacgagcagccacgcgaacaacaacgccgcca

SEQ ID NO: 2399 - DNA, 841 bp, Homo sapiens
aatactgaagtgttacttaggaaaacaaatgggcatgcagattttgatgtaattgcaactgtatgtgtctgttgtgaaagccaccagcagaattggatggttgactgtagtatcggggtgtccagtcacccatctcaaaacccagagtattacatgtctagcttaattgttaggttttaagacaaaaggaactgaggctcatcagagcagaacaacaggtagtccctaggaagtcacgtgggaatgagcttgaataagtttgttaccttgttggttggcagatgtacttggagtgtgtatcttaagcttttgttttttcacgggcatctttctgttttgagcaaaggcggcttcaatgatccatcctaaagaggtgccccctgaggccatcttgctggcagtctaccttgaactgcagaatggtaatactcagctggccttacagatcatcaaaaggaatcagctgctccctgcagtgaaaacacactctgaagtgagaaagaagccagtgtttcagcctgtccacccgatccagcccatccaaatgccggctttcaccactgtgcagagaaagtgatacttcacttttggaaaactgttacctgagacccaggggagaatttactggccattttagttgtatcacagcagaatgaataaaagatggtgaaggctgttaattttgagtcaattctacccctgacttttggccaaaagcttacttaaaattaaggatttactaagtcatcatcagctgtttttcttaatttcagccagactattaattttgagccattatgtaatatatgccataggcaattaaaacataattttatcagaa

SEQ ID NO: 2400 - DNA, 2822 bp, Homo sapiens
agtgggtaccgggacgccgtgaggcggaagctgtgtatggcgggaggctgtggcggtcccttggtggggaagctgttgctgttgctagacgacgggaactagctctcgtcacttcctcagcccgccgtctgcccactcctctagccggaacctgggggcccggagccggggtaggcacagagttgtcctcggaggtccaggacagcggccagcccggcggcgggagtcagggccacgccacctgcagggaagaacccgagtcgaagcgggaagatggctgcagacaagcctgcagatcagggagcagagaaacatgaaggcacaggtcagtcctctgggatcactgatcaagagaaggagttatccaccaatgctttccaagctttcacatctggaaattatgatgcctgtctacaacaccttgcctgtctacaagatataaacaaagatgattataaaataattttgaatacagcagtagctgagttttttaaaagtaaccaaacaacaacagataatttgagacaaacacttaaccagctgaagaatcaggtccactcagctgttgaagaaatggatggattagatgatgttgaaaacagcatgttgtactataatcaagcagtcattctttatcatctgcggcagtatacagaagccatatcagttggtgaaaaactttatcagttcatagagccttttgaagaaaaatttgcccaagcagtgtgttttttgcttgtagacctgtatatattaacctaccaagctgagaaagctttgcatcttcttgctgtcctagaaaaaatgatttcacagggtaacaataacaaaaatggaaagaatgagactggtaataacaacaacaaagatggatctaatcataaagctgaaagtggagctctaatagaagctgcaaaatcaaagatacatcagtacaaagtacgagcttatatccaaatgaagtctctgaaagcatgtaaaagggaaatcaagtcagtcatgaatacagctggaaattccgcaccctctctctttcttaaaagcaattttgagtacttaagaggtaattatcgaaaagccgtgaagctattaaatagttcaaacattgctgagcatccaggattcatgaaaacaggtgaatgcttgagatgcatgttctggaataaccttggttgcatccattttgccatgagcaagcacaatttgggaatattctactttaaaaaggctctgcaagagaatgacaatgtctgtgcacagctcagtgcaggtagcactgatccaggtaaaaaattttcaggaagacccatgtgtacgttactaaccaataagagatatgagttgctgtataactgtggaattcagcttcttcacattggaaggcctcttgctgccttcgaatgtctgattgaagctgttcaggtttatcatgcaaatcctcgcctctggctacggctggctgaatgctgcattgctgccaataaggggacttctgaacaagaaactaaaggccttcccagcaaaaaaggaattgtacagtctattgttggtcaaggctatcatcgtaaaatagttttggcatcacagtctatacagaatactgtttataatgatgggcagtcttcggccattcctgtagccagtatggagtttgcagccatatgtctcagaaatgccttgttgctgctacctgaagaacagcaagatccaaagcaggaaaatggggctaaaaatagtaatcaattaggtgggaacacagagagcagcgaaagcagtgaaacttgcagcagtaaaagccatgatggagataaattcattccagctccaccttcttctccattgagaaaacaggaattagaaaacttaaagtgctccatacttgcttgcagtgcctacgtggctctggctttgggtgataacctcatggctttgaatcatgcagataaacttcttcagcagcccaagctgtcaggatctcttaagtttttgggacatttatatgctgcagaagccctcatctctctcgacagaatatctgatgccattactcacttgaacccggagaatgtcactgatgtctccttagggatctcttcaaatgagcaggaccaaggatcagacaaaggtgaaaatgaagcaatggaatcctctggtaagcgggcccctcagtgctaccccagttccgtcaactctgccaggactgtgatgctgttcaaccttggcagcgcttactgcctgaggagcgaatatgacaaagcccgaaagtgtctccaccaggcggcttcaatgatccatcctaaagaggtgccccctgaggccatcttgctggcagtctaccttgaactgcagaatggtaatactcagctggccttacagatcatcaaaaggaatcagctgctccctgcagtgaaaacacactctgaagtgagaaagaagccagtgtttcagcctgtccacccgatccagcccatccaaatgccggctttcaccactgtgcagagaaagtgatacttcacttttggaaaactgttacctgagacccaggggagaatttactggccattttagttgtatcacagcagaatgaataaaagatggtgaaggctgttaattttgagtcaattctaaaaaaaaaaaaaaaaaaaaaaaaaaaacaaaaccacacacaccaatccttcccggaaaaattagattgggcaggttatgcatgcgcccgaatttagactcactggccaattcccctatagggagcgtttacattaactgcccgcgttttaaccggcggactggaaacccggggtacccaatatcgcttgagaaat

SEQ ID NO: 2401 - DNA, 787 bp, Homo sapiens
aatactgaagtgttacttaggaaaacaaatgggcatgcagattttgatgtaattgcaactgtatgtgtctgttgtgaaagccaccagcagaattggatggttgactgtagtatcggggtgtccagtcacccatctcaaaacccagagtattacatgtctagcttaattgttaggttttaagacaaaaggaactgaggctcatcagagcagaacaacaggtagtccctaggaagtcacgtgggaatgagcttgaataagtttgttaccttgttggttggcagatgtacttggagtgtgtatcttaagcttttgttttttcacgggcatctttctgttttgagcaaaggcggcttcaatgatccatcctaaagaggtgccccctgaggccatcttgctggcagtctaccttgaactgcagaatggtaatactcagctggccttacagatcatcaaaaggaatcagctgctccctgcagtgcagcccatccaaatgccggctttcaccactgtgcagagaaagtgatacttcacttttggaaaactgttacctgagacccaggggagaatttactggccattttagttgtatcacagcagaatgaataaaagatggtgaaggctgttaattttgagtcaattctacccctgacttttggccaaaagcttacttaaaattaaggatttactaagtcatcatcagctgtttttcttaatttcagccagactattaattttgagccattatgtaatatatgccataggcaattaaaacataattttatcagaa

SEQ ID NO: 2402 - DNA, 408 bp, Homo sapiens
caacttgttacccaataacaatttaatgttaaatttggctttcttctgtgtcccagcctcttaaattaatagatgggcctttccattatcattatgaccggacattgtaaagtacttaaggtaacacccagttttctattacttgccctcagttccttaaatcacttgccttattccttaaatagctggaagacatgtatgtgttttcaaaatcaaaagaaaggaattcagacaaattatatctgataattcaaggagtacttttagaaaagagttataaaagtgatcttttaacatatgcattttgtagttgtagcaaaagttaacacacagaggtgtttattatccttaataactattcttgctttttgaatgttctatacttttaaaatacagaatatttttact

SEQ ID NO: 2403 - DNA, 408 bp, Homo sapiens
gcactttagagtggactcagcatctctctgcttaaagatatgtccagcctactagcacagacaataggtttgttaaaattaaggaactggattgaccttaggattgactcagttagcatgtactataaaggttgactaaattgtaggtagaaaaggagggtaaagatgttcctaggaaagaggtagcataatatacagatcaaatcctgttaatgagaatgtcagtaaactatctataatcttgttgaattgaaatcctttgatgtaaacttattttggataattgggctgtttttcaggtttgaattgcttcgtgtaccaaaatattttgttgtttttgaattttgtttatcttttctttgaatcatattgaaagagatggaacttttacacaagtacacttgttgt

SEQ ID NO: 2404 - DNA, 454 bp, Homo sapiens
gtaggttgttagagggacagggtaggttggccataggctacccccaacccccgatgtgccttctgcctcctgtggtgtcatcggccagtccttgggtccttcccacttcctataaatggaggtgagctcttgcagcgctgttaatgttgggcccagccacacgcaggtgctgtgagcttcacaccccatctccccaggaggcagaaactgtgctcgccaccgctgtgacaaaagctgcacacaggatccaggtggtgatggtgaatccttcctcttgaagctcctcaccggctggtcacccaggggcctctctctggggtgggccctgcagacattgaggagtacactgaggcttgcaggcttgcatctgatgacttcctaatcctggcatgccttcgcagtgatgagctgagattcttccatctcgaagaactttcacatatcaaataagatg

SEQ ID NO: 2405 - DNA, 238 bp, Homo sapiens
taatgataccatttttaaattcttttgatagcctgctgtgacttaaagggcaaagccacaccatttaaagtgttcttctaaagctttggcagtaattctgaaacttaagctatgtgctagattatctgaaaaactttttcaaatatcgattgcaaaatgcagaactgttaaagttatttggcggtgggtttccaacatctgcaggttttttggatggtgtttgataatcattggccta

SEQ ID NO: 2406 - DNA, 418 bp, Homo sapiens
ttgagacagagtctcactctgtcgcccaggttggagtgtagtggcatgatctcagctcaccacaagctctgcctcctgggttcaggccattctcctgcctcagcctcccaaggagctgggaccacaggtgcccaccaccatgcccagataatcccttgcacccctactaaagacgggatttcaccgtgttagtcaggatggtctcgatcttgtgaccttgtgatccacccgcctcggcctcccaaaatgctgggattacaggcgtgagccactgcgcccagcggaaaagactacctttttcctagtatatcaccatggcattttgtccaaaatcaattaccatttgtttgttggcctttttcctgaactttattctatttcattgatgtgtacgtctatctttacacaaaaatcatgc

SEQ ID NO: 2407 - DNA, 786 bp, Homo sapiens
cagaaccaagaaagaacacaataagaaaacacaaagaagtcacatccccactcaagtgcgctgttccgctcagccttagaacctctgaaggaaagagttaatgatgctctgaaaatcagatgctggggaaaaccagctccccccacagacctcatccatcccacagacaggcatctgtctcccccaaactcctagcctcttcctgtctgtccctctcatttggcttggcctcatctgccttgccctacctgtgtgtaagtgtgcacgtgcgtgtacaaacctggtctcccagctagactgtgagccctgagaagtgagctactttgatgatgtttcatcacaatcccaacattacttggcatgatgctttgtccctggtggatactcaacaaacatatacagatcgctatgcacccctcccatagccacatcattaggagaggtccagggatgacgtttacgaagttacagattgcctgaagcatcgtcaggcattgcctgaaatgaaacagcagtttctgcccagctgatccagctgctgacccagcagcttctcatgatgccgattcatcccaggaacttttctccccgaaacgctgagtcagggcttggtagagaaggtgcagtgggagagaggactgcagaggccagctagaccacctggctcctccctgagcagtcggactgcactctcctgcgtgctgtactcgttcacacgctcccttgtgctctctcattctcaaaccaacctgttctctgtcccgaacccagcaagggaaacggatg

SEQ ID NO: 2408 - DNA, 561 bp, Homo sapiens
tgattctagccctgggccattgagttgcctgcagtcttcccagtgtaagattcagacatcaggaagcagagacaagcatttcagctgtgctttgtacaaattcctgactcacagaaattgtgaaagataataaaatgattgttgttagtttaagccgttatattttgggatgatttattacgcagcagtagataattgtaataaagaaatcatgaattcaaatagtagttcttcttctaattttgcatactgtctttaccacttagtaactgtgtaacctggggcaaaatttgtaatttctttgtgtctgttttcttaattgtaaatgggactcgcgtaattccctctggacttctgatgagaattagtgatttaatacttgatacgctcaataaatgttgcttgtcattattttctattaaactatattgttggatttttgagaatgcatgaagaaacttaacgttaattgtgttttgatttttaaaggcgttatgtaaattttgttttgtgcttttctccaggcaagaaaccggtttgaatgtaattttcatgaaatga

SEQ ID NO: 2409 - DNA, 666 bp, Homo sapiens
aatctatttggagagagaagacttaaacagggctataagacagtggatcactgactaaacaggctagaaaggaaggaagaaagatgatctattgggtatctactgtgagtgggatactaggctggatactttcatgtttgtcatcttttacttgtattaatatttgaacgtgtgctaagtaaatgtttcttaccttcatgcacagttgaagttgtgcttacgtagtggtggagcaatattatttcccattttttgtctttagtaaaatagtatgatttttatgagtttggtctttagctgtatcagtgacttctgaagttagccacaactagatagacttattttagttacggcaacaggatttacctaacacggtcatcgtggcttatttttacactggcaaaataccttttatttgataggctattaacaaaacatctttgctgctactttttaatcttaacgattctctttgttgcaaacagagtaccccaaatgggttggaaaggccctcatattattatagtcattgttttcttgaaacttagaatcctgaaattagccgggcatggtggcgggtgcctgtaatcccagctactcaggaggctgaggcaggagaatcgcttgaaccaggaggcggaggttgcagtgagtggagatcgcacc

SEQ ID NO: 2410 - DNA, 373 bp, Homo sapiens
ctgacaataagcccttactagaggttaggcatggttctaaatctttacatgtcacattttaccgcatttaatattagggacaatacttggttgtctgcagtggctgacacctgtaataccaatactttgggaggtcgaggtgggcagatcacttgatgtgaaaagttcaaaaccagcctggccaacaaggtaaaacccagtctctactaaaaatacaataaattagccaggcatggtggtgcacgcctgtaatccccactaatagggaggctgaagcacaaaaatcacttgaacccgggaggcggaggctgcagtaagccgggacaagcgaatgcactccagcctgggcgacagaggagactccatctcacac

SEQ ID NO: 2411 - DNA, 395 bp, Homo sapiens
cactaacactaaatttccttttcttctattattttccacatttaaaaaaataagaatgcatacttttcataattacaaaatacataaaaagcagaaaaaatacctgcaaattaaggaaataccgaccaatttaaaagcctaaaccattagctggcctgtctgccactcagctgtgaatgccagaagaggaaggacttaacctgttttattcacagctgttttcccaggccctcgcacaatagctggcgtgtagtagaaataaagttcagtaaatgcaccttcattcaaatccttgttaattttcagtcttatgtaccagcttcaatggactctaagctgcctgaatacgtgcaccctgacctcatatttgcattcctcacagcaacttggtttaa

SEQ ID NO: 2412 - DNA, 225 bp, Homo sapiens
tgtatgtattatgatgtatctgaatctatttgactatttcccattgaacgatatttgggttctttctacaattttgctatcacatgcacaaaaaaatgctaaactaagtatccgtatgcatgatgtgatttctctaagatagttagacatgtaaatatgagttcaaggggatgaatgttctgccccttttctacacagtttcattgtaactacatggagttgggg

SEQ ID NO: 2413 - DNA, 581 bp, Homo sapiens
tcttgagaagagcagtgacctctcaggtgactcaggagtgactcaggacaaagtctgaagcagccgctccaggagtgaccctgaggagaaggagtctaccctcactccatttccttccctcattggccacacccaaccagagaccagaggggaagggagtccctgatgtggtccagacagaggagtttgaaattcttgcttcaggccatatggagtggatattccttccagaaggaaattacagaccactctctgtttctactcaactgcttttcactccaggatgcttcacctcttggggccttccccagcagaggcccaggatcacctgcaaaaggcttccccaagggtggggccagaagcagggctgcagatatgtgtcctgaacctcccatggaccctgctggctcccttcaaaggcttcgggcatagcgacttgcctttccgtcttgttcagtcgtcaccagtcagccgtctgcagacttctctccctcacgttgtggcagaggagttgtacattctctagattttaaaaatatataagttactttttctttaaaataaaaattgtctctgaaata

SEQ ID NO: 2414 - DNA, 552 bp, Homo sapiens
tcttgagaagagcagtgacctctcaggtgactcaggagtgactcaggacaaagtctgaagcagccgctccaggagtgaccctgaggagaaggagtctaccctcactccatttccttccctcattggccacacccaaccagagaccagaggggaagggagtccctgatgtggtccagacagaggagtttgaaattcttgcttcaggccatatggagtggatattccttccagaaggaaattacagaccactctctgtttctactcaactgcttttcactccaggatgcttcacctcttggggccttccccagcagaggcccaggatcacctgcaaaaggcttccccaagggtggggccagaagcagggctgcagatatgtgtcctgaacctcccatggaccctgctggctcccttcaaaggcttcgggcatagcgacttgcctttccgtcttgttcagtcgtcaccagtcagccgtctgcagacttctctccctcacgttgtggcagaggagttgtacattctcaccatgttatggtcgacgcggccgcgaat

SEQ ID NO: 2415 - DNA, 290 bp, Homo sapiens
gactaaatactgtttaggccgcaggagagtttggaatccagaataaatactacctggaggtttgtcctctccatttttctctttctcctcctggcctggcctgaatattatgctactctaaatagcatatttcatccaagtgcaataatgtaagctgaatcttttttggacttctgctggcctgttttatttcttttatataaatgtgatttctcagaaattgatattaaacactatcttatcttctcctgaactgttgattttaattaaaattaagtgctaattacaaa

SEQ ID NO: 2416 - DNA, 463 bp, Homo sapiens
cagatgagaaaactatgatgcacatactttttatctgtatccaggacatgaattccaggagattaagtaaagatcctttgtgcctctctcagcatctgtcacggggcctggcacagacgtttaatatgtaatttctgattgattgattagttgataagcagaatgaaactctcacccccccaccccctccccgcccaacaaagaaaatcaaaacccctctccagtggagcgaaaccctggcagagtttgattcagcctaaggccaccccagcctgcaggacttgtgttcttatgtgacactggtcggagacatccttagactgaggtcagccaacgtatagctatgtctctgagctggtctgcacagctctgtgggcccaggggccagagtcatgctgggacccagcctccctctagcataggtcttatcatactctcgtggtcttcttttcctctacctgtt

SEQ ID NO: 2417 - DNA, 3307 bp, Homo sapiens
cccgcctcccaccctagtacccacgttttgctccacactccttgaccgcaggggctcggacacaaacccctgtcaccaggagagtcagtcagcactacttgggagggctaaagggaaatttggaaataaaattccaaagtttggagtaaaaaaattcaagtgttgattttatattctttccctttctgacacagcctaaagcgtagggggaacatgtgtttatctgtgggagataaacaagatggagtcccaaagactttaacaaaatatttttttaaaaatccactagaatagaaaatacattatttagatatactttatgctgagagtgagtatatatgcttgtcctatttaaacttgtgagaaaaagtggtatcccttgatacatttagaaatatgggggctatcttgtttcattgtgggggtggggcagaaggagaataaatgcaggatgaccctgttgaaggaatcttagcatggccaacaggggacgtttccagtcgattaccaggaaatgcaagccttggggtttctactggtggtggggctgtcatgaactttaaaatccaaagcctagacaaggaaaagtgttagaccaattgaaaagcaatccagccctttttttttttttttttttggctttgcacgacatgtcaacagaaaccatgcctttcaatataagaaataaatgtgatgatcatgtaaaatgtgaaaaattgaaagcattccagcaaaataagaattttttatatatttgttttttaagatgtatatgttaaaaaaagagaaggtcgcattatggacagacttcgtgaatgggaatttgcttagaattgtgagtagttctgaattagaaaagtatgtgaaggaaaggcagctgtaaacgtattgtgccctggagagttgtacacatgttgaaatgtaatctgggcttacctgatccatttggagtggatgtcactgccgagtctgttctcacatggaaccatgtgtgtggggttgccagcctcacagatacaatcaatcctattcccctctgacataaggaactcctctggagtggcagagtcttatcacagaaggcagccaccatttcaccaaaacaaaagttcacggcattcaattcctttttcctttagctatttatatatgcagtactctcagtcatatgcagaaatacttttttttttttaattaatagttacaggcttgttggtccagtgggatttgggtagggggagaaagataccttctaaaatggatcaatagaaccaaaataatacagcatgttctataaccacaaggaaatcaaatgatcctgtcatgattccagttagtcataactatgttagcagtgctaaatgcattttagaaatggtgacttctgtggttttcctagcatttgtctctaacaaatggtgaaataattactcatggccctctctgccattgtctttcattttttcacagtgaaattagacccctttacttcaccattctgccactgcaaattaagtataaagaaaatagcaagagtgtccacaccagtagacagtaagcttctctacctgtaagtgatgaaatcatagctaatgcacttgccatggagttttcaagatgattggtgtcagacagttttcactttgtttaaaaagtgttggtggccttttgtggtggtgttacaatcctctgggggcttaggaggatgttgatgcaacttttagaagcttttaatttcaaaaacaactcaaaaatctgaaggacagtcatagctgccactcagccccagttagtcaaaccccagtgacctttgcccctggttgccaagggctttgcaacatcaagcagggaaataaggatctgtctgtttagtggataccgtgtatcctttaatagaccaggtaacagttcgtgttagtttagactattgttttgtactgtactttcttgggtggcagaggaaagaaaagtaaaacattaaaaaaaaaaaaaaaactgcgttctttaaattctgtattattagcaacctctgtgtgtacatagtgtttgataataaagtattaatttgattcttatgtcttttgtaagtgagaacaatagactttcaggatacaaaacatgcattgaggctttgaaacatccaatgtgtaccatggctgaaaaaaagagtcacaagtggctgagacactgctccatacaggactcatgtgtggtcattgcccacccaatcttatgactccatcatcttgggacctggaacaacatgacttttttgatcgatattttgtcctcggtgttttcaaggtctgatgttggagccctgtggcccaccctcccttctccaccagcatgttggtttgaaaaggatagggaatttagaaacagttctgtactttggtttggtttggttttctgtttgtgattgttttcatggactgttttattttttcccaggaagagtctttatcaatatcatgtgcagctcactcatggaaatggttgcaaaccaatcagtgtaggaagcttaaatggggctgtttccctctctgtgtcgttgtgaaaggaagagtcacacagtacctgtggattttcagggactctgtttttctccggtgccttagcaacggcagcagccatttgtattattttcaaataattagaaaaacagttttcaactcctcctttccattcattgctctcagagttgtggtcactgacttttcttttgaaaaccgcctccaccaacacccccgtttgcctacaccaccccccttttacttagtatgtttattttttgtgtgtctcttgccttcctcccacgttttatttcccctcagagctgtgaatgggcaggtctgtctctggtttggcatcactgagtttttcccatgcattggccccagggctgctaggatgtgagacaaatctccctacaatgggcttgctcccattgtctgtacagtttaatagatgctggcatgtcggaggttacccatgagtcaaaatccgctctccatgcttactcttgacaccccattgaagccactcattgtgtgtgcgtctgggtgtgaagtccagctccgtgtggtcctgtgcttgtactgccctgctttgcagttcctttgcacttactcatcgagtgctgttttgaaatgctgacattatataaacgtaaaagaaaatgtaaaaaaaaaaaacccacacacaaacaaacccatacgatctgtatttgtatatacacgtgtccgtacaagtataactaaataaaaattaaagattttcatcattttaattggatccctccttc

SEQ ID NO: 2418 - DNA, 2147 bp, Homo sapiens
agtgactatacctcatataattatcatctgtttccaaaaaaaaatctttgtataaaaagaccccgtggtgccacgagtttgaatggggaaaacaccctccaatggctccattgccccattaaatccccacgttcaaacgccccgggaatcccagtgctccggtcagatcgccgttgttcataactatgttagcagtgctaaatgcattttagaaatggtgacttctgtggttttcctagcatttgtctctaacaaatggtgaaataattactcatggccctctctgccattgtctttcattttttcacagtgaaattagacccctttacttcaccattctgccactgcaaattaagtataaagaaaatagcaagagtgtccacaccagtagacagtaagcttctctacctgtaagtgatgaaatcatagctaatgcacttgccatggagttttcaagatgattggtgtcagacagttttcactttgtttaaaaagtgttggtggccttttgtggtggtgttacaatcctctgggggcttaggaggatgttgatgcaacttttagaagcttttaatttcaaaaacaactcaaaaatctgaaggacagtcatagctgccactcagccccagttagtcaaaccccagtgacctttgcccctggttgccaagggctttgcaacatcaagcagggaaataaggatctgtctgtttagtggataccgtgtatcctttaatagaccaggtaacagttcgtgttagtttagactattgttttgtactgtactttcttgggtggcagaggaaagaaaagtaaaacattaaaaaaaaaaaaaaaactgcgttctttaaattctgtattattagcaacctctgtgtgtacatagtgtttgataataaagtattaatttgattcttatgtcttttgtaagtgagaacaatagactttcaggatacaaaacatgcattgaggctttgaaacatccaatgtgtaccatggctgaaaaaaagagtcacaagtggctgagacactgctccatacaggactcatgtgtggtcattgcccacccaatcttatgactccatcatcttgggacctggaacaacatgacttttttgatcgatattttgtcctcggtgttttcaaggtctgatgttggagccctgtggcccaccctcccttctccaccagcatgttggtttgaaaaggatagggaatttagaaacagttctgtactttggtttggtttggttttctgtttgtgattgttttcatggactgttttattttttcccaggaagagtctttatcaatatcatgtgcagctcactcatggaaatggttgcaaaccaatcagtgtaggaagcttaaatggggctgtttccctctctgtgtcgttgtgaaaggaagagtcacacagtacctgtggattttcagggactctgtttttctccggtgccttagcaacggcagcagccatttgtattattttcaaataattagaaaaacagttttcaactcctcctttccattcattgctctcagagttgtggtcactgacttttcttttgaaaaccgcctccaccaacacccccgtttgcctacaccaccccccttttacttagtatgtttattttttgtgtgtctcttgccttcctcccacgttttatttcccctcagagctgtgaatgggcaggtctgtctctggtttggcatcactgagtttttcccatgcattggccccagggctgctaggatgtgagacaaatctccctacaatgggcttgctcccattgtctgtacagtttaatagatgctggcatgtcggaggttacccatgagtcaaaatccgctctccatgcttactcttgacaccccattgaagccactcattgtgtgtgcgtctgggtgtgaagtccagctccgtgtggtcctgtgcttgtactgccctgctttgcagttcctttgcacttactcatcgagtgctgttttgaaatgctgacattatataaacgtaaaagaaaatgtaaaaaaaaaaaacccacacacaaacaaacccatacgatctgtatttgtatatacacgtgtccgtacaagtataactaaataaaaattaaagattttcatcattttaattggatccctccttc

SEQ ID NO: 2419 - DNA, 2229 bp, Homo sapiens
cccgcctcccaccctagtacccacgttttgctccacactccttgaccgcaggggctcggacacaaacccctgtcaccaggagagtcagtcagcactacttgggagggctaaagggaaatttggaaataaaattccaaagtttggagtaaaaaaattcaagtgttgattttatattctttccctttctgacacagcctaaagcgtagggggaacatgtgtttatctgtgggagataaacaagatggagtcccaaagactttaacaaaatatttttttaaaaatccactagaatagaaatggtgacttctgtggttttcctagcatttgtctctaacaaatggtgaaataattactcatggccctctctgccattgtctttcattttttcacagtgaaattagacccctttacttcaccattctgccactgcaaattaagtataaagaaaatagcaagagtgtccacaccagtagacagtaagcttctctacctgtaagtgatgaaatcatagctaatgcacttgccatggagttttcaagatgattggtgtcagacagttttcactttgtttaaaaagtgttggtggccttttgtggtggtgttacaatcctctgggggcttaggaggatgttgatgcaacttttagaagcttttaatttcaaaaacaactcaaaaatctgaaggacagtcatagctgccactcagccccagttagtcaaaccccagtgacctttgcccctggttgccaagggctttgcaacatcaagcagggaaataaggatctgtctgtttagtggataccgtgtatcctttaatagaccaggtaacagttcgtgttagtttagactattgttttgtactgtactttcttgggtggcagaggaaagaaaagtaaaacattaaaaaaaaaaaaaaaactgcgttctttaaattctgtattattagcaacctctgtgtgtacatagtgtttgataataaagtattaatttgattcttatgtcttttgtaagtgagaacaatagactttcaggatacaaaacatgcattgaggctttgaaacatccaatgtgtaccatggctgaaaaaaagagtcacaagtggctgagacactgctccatacaggactcatgtgtggtcattgcccacccaatcttatgactccatcatcttgggacctggaacaacatgacttttttgatcgatattttgtcctcggtgttttcaaggtctgatgttggagccctgtggcccaccctcccttctccaccagcatgttggtttgaaaaggatagggaatttagaaacagttctgtactttggtttggtttggttttctgtttgtgattgttttcatggactgttttattttttcccaggaagagtctttatcaatatcatgtgcagctcactcatggaaatggttgcaaaccaatcagtgtaggaagcttaaatggggctgtttccctctctgtgtcgttgtgaaaggaagagtcacacagtacctgtggattttcagggactctgtttttctccggtgccttagcaacggcagcagccatttgtattattttcaaataattagaaaaacagttttcaactcctcctttccattcattgctctcagagttgtggtcactgacttttcttttgaaaaccgcctccaccaacacccccgtttgcctacaccaccccccttttacttagtatgtttattttttgtgtgtctcttgccttcctcccacgttttatttcccctcagagctgtgaatgggcaggtctgtctctggtttggcatcactgagtttttcccatgcattggccccagggctgctaggatgtgagacaaatctccctacaatgggcttgctcccattgtctgtacagtttaatagatgctggcatgtcggaggttacccatgagtcaaaatccgctctccatgcttactcttgacaccccattgaagccactcattgtgtgtgcgtctgggtgtgaagtccagctccgtgtggtcctgtgcttgtactgccctgctttgcagttcctttgcacttactcatcgagtgctgttttgaaatgctgacattatataaacgtaaaagaaaatgtaaaaaaaaaaaacccacacacaaacaaacccatacgatctgtatttgtatatacacgtgtccgtacaagtataactaaataaaaattaaagattttcatcattttaattggatccctccttc

SEQ ID NO: 2420 - DNA, 2697 bp, Homo sapiens
cccgcctcccaccctagtacccacgttttgctccacactccttgaccgcaggggctcggacacaaacccctgtcaccaggagagtcagtcagcactacttgggagggctaaagggaaatttggaaataaaattccaaagtttggagtaaaaaaattcaagtgttgattttatattctttccctttctgacacagcctaaagcgtagggggaacatgtgtttatctgtgggagataaacaagatggagtcccaaagactttaacaaaatatttttttaaaaatccactagaatagaaaatacattatttagatatactttatgctgagagtgagtatatatgcttgtcctatttaaacttgtgagaaaaagtggtatcccttgatacatttagaaatatgggggctatcttgtttcattgtgggggtggggcagaaggagaataaatgcaggatgaccctgttgaaggaatcttagcatggccaacaggggacgtttccagtcgattaccaggaaatgcaagccttggggtttctactggtggtggggctgtcatgaactttaaaatccaaagcctagacaaggaaaagtgttagaccaattgaaaagcaatccagccctttttttttttttttttttggctttgcacgacatgtcaacagaaaccatgcctttcaatataagaaataaatgtgatgatcatgtaaaatgtgaaaaattgaaagcattccagcaaaataagaattttttatatatttgttttttaagatgtatatgttaaaaaaagagaaggtcgcattatggacagacttcgtgaatgggaatttgcttagaattgtgagtagttctgaattagaaaagtatgtgaaggaaaggcagctgtaaacgtattgtgccctggagagttgtacacatgttgaaatgtaatctgggcttacctgatccatttggagtggatgtcactgccgagtctgttctcacatggaaccatgtgtgtggggttgccagcctcacagatacaatcaatcctattcccctctgacataaggaactcctctggagtggcagagtcttatcacagaaggcagccaccatttcaccaaaacaaaagttcacggcattcaattcctttttcctttagctatttatatatgcagtactctcagtcatatgcagaaatacttttttttttttaattaatagttacaggcttgttggtccagtgggatttgggtagggggagaaagataccttctaaaatggatcaatagaaccaaaataatacagcatgttctataaccacaaggaaatcaaatgatcctgtcatgattccagttagtcataactatgttagcagtgctaaatgcattttagaaatggtgacttctgtggttttcctagcatttgtctctaacaaatggtgaaataattactcatggccctctctgccattgtctttcattttttcacagtgaaattagacccctttacttcaccattctgccactgcaaattaagtataaagaaaatagcaagagtgtccacaccagtagacagtaagcttctctacctgtaagtgatgaaatcatagctaatgcacttgccatggagttttcaagatgattggtgtcagacagttttcactttgtttaaaaagtgttggtggccttttgtggtggtgttacaatcctctgggggcttaggaggatgttgatgcaacttttagaagcttttaatttcaaaaacaactcaaaaatctgaaggacagtcatagctgccactcagccccagttagtcaaaccccagtgacctttgcccctggttgccaagggctttgcaacatcaagcagggaaataaggatctgtctgtttagtggataccgtgtatcctttaatagaccaggtaacagttcgtgttagtttagactattgttttgtactgtactttcttgggtggcagaggaaagaaaagtaaaacattaaaaaaaaaaaaaaaactgcgttctttaaattctgtattattagcaacctctgtgtgtacatagtgtttgataataaagtattaattggaaaaaaaaaaaaaaaaaaaaaaaaaaaaaaaaaaaaaaaaaaaaaaaaaaaaaaaaaaaaagaggggggcccaccaaagaagcacccgcggaagggcacacagacgcccaaacaccccaccagaaggaacagaggggccccacaacacgacgcccaaaaatgagaccaacggcgacgggaggaaaaacgcaccaacaacccgcaccgggaggacaaacacggacagcaagaggcaaacagggacgaaagggaacacaagaacgcgagggggaaaacacaaaaaagaagaccaaaaccacacccagacaagcacaacaaacaccacaaccgaagatcacagaaaccacctacaaagaacacacaaccgcggaccaacaaagagcaccacacacaacgcgcagcacacacaagacacaaaaaatgcagaacaaacagagaagcacacaaacacccagaaacgcaccaacataatacaaagtagccagcgacagccggcgcacagacttcaaaaaagagcgagaaaaaacaagcaaccgaccgcggacacccgacaaagaacaagaaccagcgaacgcgcaacaccaacgagagaggacaagcgcagaggagggcgcgggggcgggcggacc

SEQ ID NO: 2421 - DNA, 1686 bp, Homo sapiens
  misc_feature (23)..(23): n is a, c, g, or t
  misc_feature (30)..(30): n is a, c, g, or t
  misc_feature (42)..(42): n is a, c, g, or t
gaagcttttaatttcaaaaagtngcatcancatcctcctaancccccagaggattgtaacacaatcctctgggggcttaggaggatgttgatgcaacttttagaagcttttaatttcaaaaacaactcaaaaatctgaaggacagtcatagctgccactcagccccagttagtcaaaccccagtgacctttgcccctggttgccaagggctttgcaacatcaagcagggaaataaggatctgtctgtttagtggataccgtgtatcctttaatagaccaggtaacagttcgtgttagtttagactattgttttgtactgtactttcttgggtggcagaggaaagaaaagtaaaacattaaaaaaaaaaaaaaaactgcgttctttaaattctgtattattagcaacctctgtgtgtacatagtgtttgataataaagtattaatttgattcttatgtcttttgtaagtgagaacaatagactttcaggatacaaaacatgcattgaggctttgaaacatccaatgtgtaccatggctgaaaaaaagagtcacaagtggctgagacactgctccatacaggactcatgtgtggtcattgcccacccaatcttatgactccatcatcttgggacctggaacaacatgacttttttgatcgatattttgtcctcggtgttttcaaggtctgatgttggagccctgtggcccaccctcccttctccaccagcatgttggtttgaaaaggatagggaatttagaaacagttctgtactttggtttggtttggttttctgtttgtgattgttttcatggactgttttattttttcccaggaagagtctttatcaatatcatgtgcagctcactcatggaaatggttgcaaaccaatcagtgtaggaagcttaaatggggctgtttccctctctgtgtcgttgtgaaaggaagagtcacacagtacctgtggattttcagggactctgtttttctccggtgccttagcaacggcagcagccatttgtattattttcaaataattagaaaaacagttttcaactcctcctttccattcattgctctcagagttgtggtcactgacttttcttttgaaaaccgcctccaccaacacccccgtttgcctacaccaccccccttttacttagtatgtttattttttgtgtgtctcttgccttcctcccacgttttatttcccctcagagctgtgaatgggcaggtctgtctctggtttggcatcactgagtttttcccatgcattggccccagggctgctaggatgtgagacaaatctccctacaatgggcttgctcccattgtctgtacagtttaatagatgctggcatgtcggaggttacccatgagtcaaaatccgctctccatgcttactcttgacaccccattgaagccactcattgtgtgtgcgtctgggtgtgaagtccagctccgtgtggtcctgtgcttgtactgccctgctttgcagttcctttgcacttactcatcgagtgctgttttgaaatgctgacattatataaacgtaaaagaaaatgtaaaaaaaaaaaacccacacacaaacaaacccatacgatctgtatttgtatatacacgtgtccgtacaagtataactaaataaaaattaaagattttcatcattttaattggatccctccttc

SEQ ID NO: 2422 - DNA, 1849 bp, Homo sapiens
  misc_feature (1849)..(1849): n is a, c, g, or t
cccgcctcccaccctagtacccacgttttgctccacactccttgaccgcaggggctcggacacaaacccctgtcaccaggagagtcagtcagcactacttgggagggctaaagggaaatttggaaataaaattccaaagtttggagtaaaaaaattcaagtgttgattttatattctttccctttctgacacagcctaaagcgtagggggaacatgtgtttatctgtgggagataaacaagatggagtcccaaagactttaacaaaatatttttttaaaaatccactagaatagaaaatacattatttagatatactttatgctgagagtgagtatatatgcttgtcctatttaaacttgtgagaaaaagtggtatcccttgatacatttagaaatatgggggctatcttgtttcattgtgggggtggggcagaaggagaataaatgcaggatgaccctgttgaaggaatcttagcatggccaacaggggacgtttccagtcgattaccaggaaatgcaagccttggggtttctactggtggtggggctgtcatgaactttaaaatccaaagcctagacaaggaaaagtgttagaccaattgaaaagcaatccagccctttttttttttttttttttggctttgcacgacatgtcaacagaaaccatgcctttcaatataagaaataaatgtgatgatcatgtaaaatgtgaaaaattgaaagcattccagcaaaataagaattttttatatatttgttttttaagatgtatatgttaaaaaaagagaaggtcgcattatggacagacttcgtgaatgggaatttgcttagaattgtgagtagttctgaattagaaaagtatgtgaaggaaaggcagctgtaaacgtattgtgccctggagagttgtacacatgttgaaatgtaatctgggcttacctgatccatttggagtggatgtcactgccgagtctgttctcacatggaaccatgtgtgtggggttgccagcctcacagatacaatcaatcctattcccctctgacataaggaactcctctggagtggcagagtcttatcacagaaggcagccaccatttcaccaaaacaaaagttcacggcattcaattcctttttcctttagctatttatatatgcagtactctcagtcatatgcagaaatacttttttttttttaattaatagttacaggcttgttggtccagtgggatttgggtagggggagaaagataccttctaaaatggatcaatagaaccaaaataatacagcatgttctataaccacaaggaaatcaaatgatcctgtcatgattccagttagtcataactatgttagcagtgctaaatgcattttagaaatggtgacttctgtggttttcctagcatttgtctctaacaaatggtgaaataattactcatggccctctctgccattgtctttcattttttcacagtgaaattagacccctttacttcaccattctgccactgcaaattaagtataaagaaaatagcaagagtgtccacaccagtagacagtaagcttctctacctgtaagtgatgaaatcatagctaatgcacttgccatggagttttcaagatgattggtgtcagacagttttcactttgtttaaaaagtgttggtggccttttgtggtggtgttacaatcctctgggggcttaggaggatgttgatgcaacttttagaagcttttaatttcaaaaacaactcaaaaatctgaaggacagtcatagctgccactcagccccagttagtcggcaggtaaatacaggtcctgtctcgctaaggggatacccgggatcctttaacn

SEQ ID NO: 2423 - DNA, 575 bp, Homo sapiens
ggattacaggtatgcacctccaccacgcccagctaattttttgtatttttagtagagatggggtttcattatgttggccaggctggtctcgaactcctagcctcacgtgttctgcctgcctctgcctccgcctcccaaagtgctgggattacagatgtgagccaccaagcccggccataaagttggttctaaactcctgctacatagaatgacataaaagactttgccagacataaagagctaaagatgccagacacacggaagacatgctgtaagatttcattcgcatgaagttcaaaaacagacacaacgaatctctgtgcctgtttttgaaaggcattagatgggtggttgcttctggagcaggggaattgacagggaaagagcacaaggaagacgtctgggtgctggaaatgttctctgattagcggttacatggatgcataaatttgtgaaaattcattacctggtacacttaagatctgtgccctttatatactttaccacacttaagttatatgtcacccaaaaagaaaataaataaaaataaagaaaaataagtacttatacatttt

SEQ ID NO: 2424 - DNA, 369 bp, Homo sapiens
catggttaggggtgaaggagggttggggagatgttggtcaaaggatacataattacagttgaataggaggaatacattcaagagatctattggacagcatggtggctatagttaatgacattgtaatcttggaaaacattgtgtttttgaaaaacacagcagatgttaagtgttctcattactaaaataactatgtgaggtaaaacattttttaattagctagagttaaccatttcacaatgtacgtatacttcaaaacattatgttgtacatgacatatacacacagttttatctgtcagttgggatcacctgaggtcaggagtttgagaccaacctggccaacattgtgaaaccccagctctactta

SEQ ID NO: 2425 - DNA, 257 bp, Homo sapiens
tgggggttccttattagctgccactggtattcaggggaggctccttggaggaacaggggaagaccgcaagaccttctccctcagggtttggagaatgaaactgactttgtaagggagggactttcttctgggcaaagatccctcttcaagaagaagaaagaagagaacaggtccctgtcacaggctgcatagggccttgtatttctttgctcctttgccacaattctgattttaaaatgaattgtgtaaaaaatttg

SEQ ID NO: 2426 - DNA, 619 bp, Homo sapiens
gacagttaccttgaaatgctacgggaaggatgagcatggagagctgcctgttattctgagccaacttctggcaagatgctgggtgaatcgactgcctagaattgaagaactggctctcaagcagttgctgctaaagaatgccagcaaacaaaccacacacaactgtggtaagccaggcggaaatccctccaccctctggcatgagatggcagtctagaaaggactctccatgagatgcctggggcctgaggaagcagaggcatggacacactgttctacgatgactcagggccacccatgagtgggacattcgtggggatgagatgggagcagggagaagcagcagttgtaatggccagccacgtggggaccagttccgtgcctggcctttctttctctggtggaagccatcttgttttgatcctaagaaaaatgggtgtcattttatccaggaatctaagaattataataataaattaataaagtgaatgtgataatcaaactgtgaggatacgaacaacataagatttaatgatcgttgtcaaaaccagtccgtagggctgtggaactttatcgtacaattcgactttgatatgtgtttaaatatattttctaagtt

SEQ ID NO: 2427 - DNA, 471 bp, Homo sapiens
ttttggccacaacaaagaaactataaatattgctctaaatgtgaaactttcagatattaaatcctaaattgaagacataccaatctgggtatgagcgatacagagttgcctagtggtacaaacacataagaggagataagagtagcatgggggagatgaccgaattgagaaagaaaagaaataggaatcaagttttattccacaaccctggaataaaacctgcaggagtagagggaggcaaacaaatgagactcttggaaaagcctgctctgttgtctgagggatgtcagattcaaagtaagttgatgctggctggtcgcggtggttcatgcctgtaatcccagcactttgggaggctgaggagggtggatcacgaggtcaggagttcgagaccagcctggccagcatagtgaaaccctgtgtccactaaaaatacaaaaactaactgggcatggtggtgcatgcctgtag

SEQ ID NO: 2428 - DNA, 211 bp, Homo sapiens
gtcacagtttatatagcattatgacagaggtttaatgcatttgatggtatctgaagataaaaaaatcctccagggtttatatttgtttaccatatgtttatcatatatattccttatttacttgtttatcatacatatttaccacagggaacttcccatactgcaggtactcaatacattgtttcagaattcagttccacagagtgatttc

SEQ ID NO: 2429 - DNA, 554 bp, Homo sapiens
ggtagagacagggtcttgttatgttgcccatgctggttccagaactcctaggctcctcaagcaatcctcccaccttagcctcccaaagtgctacaggcatgagccaccacacccagccaccaatagtgtaatcgtatcagccacatctttttcaatgaaatcagaggaattacaaagtaaatcggtggaagcagtattgtgcagtaataaacaaaacatctacaaaaacaaacatacacgtaaaaatctcagactcagaattttgtccctgccaggcatggttggtcatgcctgtaattccaatactttgggaggccaaggcaggacatgactcaaggacaggagttcaagaccagcctgggcaacatagcgaaaacccatctctacaaaaattttaaaacattatctgggagcactggcatgcacctgtggtcgtagctacttggcaggctgaggcaggaagaacccttgaacccaggagttcaaggcttcagtgagccatgatcgctccactacactccagcctgggtgacagagtaagaccctgtctctaa

SEQ ID NO: 2430 - DNA, 3180 bp, Homo sapiens
ggcagcgagcggcctggcggggcgggcggcggcgctcggagtcgccgggagctgccaggctgtccgcgccgccgctgcggggccatgatccggaacgggcgcggggctgcaggcggcgcagagcagccgggcccggggggcaggcgcgccgtgagggtgtggtgcgatggctgctatgacatggtgcattacggccactccaaccagctgcgccaggcacgggccatgggtgactacctcatcgtaggcgtgcacaccgatgaggagatcgccaagcacaaggggcccccggtgttcactcaggaggagagatacaagatggtgcaggccatcaaatgggtggacgaggtggtgccagcggctccctacgtcactacactagagaccctggacaaatacaactgtgacttctgtgttcacggcaatgacatcaccctgactgtagatggccgggacacctatgaggaagtaaagcaggctgggaggtacagagaatgcaagcgcacgcaaggggtgtccaccacagacctcgtgggccgcatgctgctggtaaccaaagcccatcacagcagccaggagatgtcctctgagtaccgggagtatgcagacagttttggcaagtgccctggtgggcggaacccctggaccggggtatcccagttcctgcagacatctcagaagatcatccagtttgcttctgggaaggagccccagccaggggagacagtcatctatgtggctggtgccttcgacctgttccacatcgggcatgtggacttcctggagaaggtgcacaggctggcagagaggccctacatcatcgcgggcttacactttgaccaggaggtcaatcactacaaggggaagaactaccccatcatgaatctgcatgaacggactctgagcgtgctggcctgccggtacgtgtcagaagtggtgattggagccccgtacgcggtcacagcagagctcctaagtcacttcaaggtggacctggtgtgtcacggcaagacagaaattatccctgacagggatggctccgacccataccaggagcccaagagaaggggcatcttccgtcagattgacagtggcagcaacctcaccacagacctcatcgtccagcggatcatcaccaacaggttggagtatgaggcgcgaaaccagaagaaggaagccaaggagctggccttcctggaggctgccaggcagcaggcggcacagcccctgggggagcgcgatggtgacttctaacctggcagaggccctggccggccctccccctgctctgcttctgcgccttctgcgtttggacataggactctgcagggccgccctctctaactggcctggctctggaagggctggtgaggactctgcctccttgcctgcctacaaggtgcctggtttgcagcaggctctccgctctttccagcaaagctgctcagagagggtgtccagcacagtggagaggccggaagtgagacgggcagacggcacctgcagcctgaaacgcaccgctcctgcgtgcgcccccacctggtccccggatgcccccaccacctggacagaggccacactgactgcccacccagctgtggcgggaggtgcagagcagagggctttagggagcagtgactgcggtcacccctttagttctctgggtgtagaccacaccacctcccactgggcaccccccaacacggtgtcctgccacccagcgcctggctccaggaaaacacgcttgccttccttcccggcagcttcgccactctccttatggactctgttctgtttgtacatggctgacggaaatctctttggtacaaccgaataaagcctggtggcagtgctgcgcggggctcccagccctgctgggaaggaccagggaaccactcagcaaggagaccctcttggccctgcccccaccatgcacccagcagccgggagtgcagcgggcagcctggcagtgagtgaaacccaggcctccagccctccaaagcctggggccaccccctgtagcaggcgatgctagaataaggaggagagccagagctgaggctccttgccccttggcccctccaggggccatgggatctctgtctcccacacccctgtcacggcccgcctggagcagcccagaggccgaagaggttcttactgcagcctccgggaggtgtctagggaggccatagattgcctggtctcgccgcattcaaaatgaggcttatgatcagtacttttttcagccccacattcctctccagaatggcctctgccctacagcacctggcccatgtggcaccccatgggcctgtcctctgctgttgtgaggtcgacctcacgacccagcacaggagctggaggcgaggtgcacgcgaggctctccacagcccaggaaggcagcctgtcaccctgctctccgagccaggggccaaggtgtggggggcacaggccatcctcatcctgccaggcccccgctttcaggagtggggtggtgccaatgctcccactcagaaccctggactgcggggtcccctgagcagagggaccagccagttccccatagacagattggtgctggacaggggctgcctgggccccaggcttggggagggtagaaaggccctgcagtgctgctgcctgggcccggaggtgggcctggccccgtagcagcattggaggccagagcccaagccagttccggagtcacacccaacggcggagggagaacctacccatctcccaccttcagctctggggaggcatgctctgggcctctggagccagggctcaggcccccaactctcctccttgcccctgcaccctcggacttggcctggccagaagggatgggggcaagaggaaggcagccaggggctccagcccatgccctcacagatttggctctcgagttggggagcgaagggctgggggaggacactgggaaccgggccagccgtggccctgcacttcccccagggagcaccaaggctaggcgcggcttcaccgcggggctgggtcgtggccagcttcgcccctgggtctgaagacctctgggcggcccaggccaaccttgccctgccgccgcacactcggctgccttctcatacccaggcttggggatttccaggtcccgttcccctcgtggcctggctgccagtcctccagcacccctca

SEQ ID NO: 2431 - DNA, 1855 bp, Homo sapiens
ggcagcgagcggcctggcggggcgggcggcggcgctcggagtcgccgggagctgccaggctgtccgcgccgccgctgcggggccatgatccggaacgggcgcggggctgcaggcggcgcagagcagccgggcccggggggcaggcgcgccgtgagggtgtggtgcgatggctgctatgacatggtgcattacggccactccaaccagctgcgccaggcacgggccatgggtgactacctcatcgtaggcgtgcacaccgatgaggagatcgccaagcacaaggggcccccggtgttcactcaggaggagagatacaagatggtgcaggccatcaaatgggtggacgaggtggtgccagcggctccctacgtcactacactagagaccctggacaaatacaactgtgacttctgtgttcacggcaatgacatcaccctgactgtagatggccgggacacctatgaggaagtaaagcaggctgggaggtacagagaatgcaagcgcacgcaaggggtgtccaccacagacctcgtgggccgcatgctgctggtaaccaaagcccatcacagcagccaggagatgtcctctgagtaccgggagtatgcagacagttttggcaagtgccctggtgggcggaacccctggaccggggtatcccagttcctgcagacatctcagaagatcatccagtttgcttctgggaaggagccccagccaggggagacagtcatctatgtggctggtgccttcgacctgttccacatcgggcatgtggacttcctggagaaggtgcacaggctggcagagaggccctacatcatcgcgggcttacactttgaccaggaggtcaatcactacaaggggaagaactaccccatcatgaatctgcatgaacggactctgagcgtgctggcctgccggtacgtgtcagaagtggtgattggagccccgtacgcggtcacagcagagctcctaagtcacttcaaggtggacctggtgtgtcacggcaagacagaaattatccctgacagggatggctccgacccataccaggagcccaagagaaggggcatcttccgtcagattgacagtggcagcaacctcaccacagacctcatcgtccagcggatcatcaccaacaggttggagtatgaggcgcgaaaccagaagaaggaagccaaggagctggccttcctggaggctgccaggcagcaggcggcacagcccctgggggagcgcgatggtgacttctaacctggcagaggccctggccggccctccccctgctctgcttctgcgccttctgcgtttggacataggactctgcagggccgccctctctaactggcctggctctggaagggctggtgaggactctgcctccttgcctgcctacaaggtgcctggtttgcagcaggctctccgctctttccagcaaagctgctcagagagggtgtccagcacagtggagaggccggaagtgagacgggcagacggcacctgcagcctgaaacgcaccgctcctgcgtgcgcccccacctggtccccggatgcccccaccacctggacagaggccacactgactgcccacccagctgtggcgggaggtgcagagcagagggctttagggagcagtgactgcggtcacccctttagttctctgggtgtagaccacaccacctcccactgggcaccccccaacacggtgtcctgccacccagcgcctggctccaggaaaacacgcttgccttccttcccggcagcttcgccactctccttatggactctgttctgtttgtacatggctgacggaaatctctttggtacaaccgaataaagcctggtggcagtgctg

SEQ ID NO: 2432 - DNA, 785 bp, Homo sapiens
  misc_feature (782)..(782): n is a, c, g, or t
ggcagcgagcggcctggcggggcgggcggcggcgctcggagtcgccgggagctgccaggctgtccgcgccgccgctgcggggccatgatccggaacgggcgcggggctgcaggcggcgcagagcagccgggcccggggggcaggcgcgccgtgagggtgtggtgcgatggctgctatgacatggtgcattacggccactccaaccagctgcgccaggcacgggccatgggtgactacctcatcgtaggcgtgcacaccgatgaggagatcgccaagcacaaggggcccccggtgttcactcaggaggagagatacaagatggtgcaggccatcaaatgggtggacgaggtggtgccagcggctccctacgtcactacactagagaccctggacaaatacaactgtgacttctgtgttcacggcaatgacatcaccctgactgtagatggccgggacacctatgaggaagtaaagcaggctgggaggtacagagaatgcaagcgcacgcaaggggtgtccaccacagacctcgtgggccgcatgctgctggtaaccaaagcccatcacagcagccaggagatgtcctctgagtaccgggagtatgcagacagttttggcaagtgccctggtgggcggaacccctggaccggggtatcccagttcctgcagacatctcagaagatcatccagtttgcttctgggaaggagccccagccaggggagacagtcatctatgtggctggtgccttcgacctgttccccacaattcgggggcaattgtnggg

SEQ ID NO: 2433 - DNA, 1580 bp, Homo sapiens
ggcagtcggccgggtgaatcggcgagggggagcagtgactgcggtcacccctttagttctctgggtgtagaccacaccacctcccactgggcaccccccaacacggtgtcctgccacccagcgcctggctccaggaaaacacgcttgccttccttcccggcagcttcgccactctccttatggactctgttctgtttgtacatggctgacggaaatctctttggtacaaccgaataaagcctggtggcagtgctgcgcggggctcccagccctgctgggaaggaccagggaaccactcagcaaggagaccctcttggccctgcccccaccatgcacccagcagccgggagtgcagcgggcagcctggcagtgagtgaaacccaggcctccagccctccaaagcctggggccaccccctgtagcaggcgatgctagaataaggaggagagccagagctgaggctccttgccccttggcccctccaggggccatgggatctctgtctcccacacccctgtcacggcccgcctggagcagcccagaggccgaagaggttcttactgcagcctccgggaggtgtctagggaggccatagattgcctggtctcgccgcattcaaaatgaggcttatgatcagtacttttttcagccccacattcctctccagaatggcctctgccctacagcacctggcccatgtggcaccccatgggcctgtcctctgctgttgtgaggtcgacctcacgacccagcacaggagctggaggcgaggtgcacgcgaggctctccacagcccaggaaggcagcctgtcaccctgctctccgagccaggggccaaggtgtggggggcacaggccatcctcatcctgccaggcccccgctttcaggagtggggtggtgccaatgctcccactcagaaccctggactgcggggtcccctgagcagagggaccagccagttccccatagacagattggtgctggacaggggctgcctgggccccaggcttggggagggtagaaaggccctgcagtgctgctgcctgggcccggaggtgggcctggccccgtagcagcattggaggccagagcccaagccagttccggagtcacacccaacggcggagggagaacctacccatctcccaccttcagctctggggaggcatgctctgggcctctggagccagggctcaggcccccaactctcctccttgcccctgcaccctcggacttggcctggccagaagggatgggggcaagaggaaggcagccaggggctccagcccatgccctcacagatttggctctcgagttggggagcgaagggctgggggaggacactgggaaccgggccagccgtggccctgcacttcccccagggagcaccaaggctaggcgcggcttcaccgcggggctgggtcgtggccagcttcgcccctgggtctgaagacctctgggcggcccaggccaaccttgccctgccgccgcacactcggctgccttctcatacccaggcttggggatttccaggtcccgttcccctcgtggcctggctgccagtcctccagcacccctca

SEQ ID NO: 2434 - DNA, 981 bp, Homo sapiens
aaggctggtaccggcctcggattttttggatccggcatgggccggggctggcaggctgcggggctcgcctgccgggagggtcgggctgcagaggctccgcgccctgccgtgggcgaccccgtctacctctggcggaggccccgcccggtcacgccgacctctccggtgcagccaccgcgctgagatctggagccacggcctccctgcttctccgtaaccaccagcaaccagcttgcccggctccggtccaggggttcccctggcctccgggcgagcgtccctgtctatgacatggtgcattacggccactccaaccagctgcgccaggcacgggccatgggtgactacctcatcgtaggcgtgcacaccgatgaggagatcgccaagcacaaggggcccccggtgttcactcaggaggagagatacaagatggtgcaggccatcaaatgggtggacgaggtggtgccagcggctccctacgtcactacactagagaccctggacaaatacaactgtgacttctgtgttcacggcaatgacatcaccctgactgtagatggccgggacacctatgaggaagtaaagcaggctgggaggtacagagaatgcaagcgcacgcaaggggtgtccaccacagacctcgtgggccgcatgctgctggtaaccaaagcccatcacagcagccaggagatgtcctctgagtaccgggagtatgcagacagttttggcaagtgccctggtgggcggaacccctggaccggggtatcccagttcctgcagacatctcagaagatcatccagtttgcttctgggaaggagccccagccaggggagacagtcatctatgtggctggtgccttcgacctgttccacatcgggcatgtggacttcctggagaaggtgcacaggctggcagagaggccctacatcatcgcgggcttacactttgaccaggtcactcccttcaagctccctgggccc

SEQ ID NO: 2435 - DNA, 3199 bp, Homo sapiens
  misc_feature (27)..(27): n is a, c, g, or t
agggcttttgggtttacccggcccccncctgatgtactgtgatatctgtcgatccagcgctcctctggatgtgccaggctgtccgcgccgccgctgcggggccatgatccggaacgggcgcggggctgcaggcggcgcagagcagccgggcccggggggcaggcgcgccgtgagggtgtggtgcgatggctgctatgacatggtgcattacggccactccaaccagctgcgccaggcacgggccatgggtgactacctcatcgtaggcgtgcacaccgatgaggagatcgccaagcacaaggggcccccggtgttcactcaggaggagagatacaagatggtgcaggccatcaaatgggtggacgaggtggtgccagcggctccctacgtcactacactagagaccctggacaaatacaactgtgacttctgtgttcacggcaatgacatcaccctgactgtagatggccgggacacctatgaggaagtaaagcaggctgggaggtacagagaatgcaagcgcacgcaaggggtgtccaccacagacctcgtgggccgcatgctgctggtaaccaaagcccatcacagcagccaggagatgtcctctgagtaccgggagtatgcagacagttttggcaagtgccctggtgggcggaacccctggaccggggtatcccagttcctgcagacatctcagaagatcatccagtttgcttctgggaaggagccccagccaggggagacagtcatctatgtggctggtgccttcgacctgttccacatcgggcatgtggacttcctggagaaggtgcacaggctggcagagaggccctacatcatcgcgggcttacactttgaccaggaggtcaatcactacaaggggaagaactaccccatcatgaatctgcatgaacggactctgagcgtgctggcctgccggtacgtgtcagaagtggtgattggagccccgtacgcggtcacagcagagctcctaagtcacttcaaggtggacctggtgtgtcacggcaagacagaaattatccctgacagggatggctccgacccataccaggagcccaagagaaggggcatcttccgtcagattgacagtggcagcaacctcaccacagacctcatcgtccagcggatcatcaccaacaggttggagtatgaggcgcgaaaccagaagaaggaagccaaggagctggccttcctggaggctgccaggcagcaggcggcacagcccctgggggagcgcgatggtgacttctaacctggcagaggccctggccggccctccccctgctctgcttctgcgccttctgcgtttggacataggactctgcagggccgccctctctaactggcctggctctggaagggctggtgaggactctgcctccttgcctgcctacaaggtgcctggtttgcagcaggctctccgctctttccagcaaagctgctcagagagggtgtccagcacagtggagaggccggaagtgagacgggcagacggcacctgcagcctgaaacgcaccgctcctgcgtgcgcccccacctggtccccggatgcccccaccacctggacagaggccacactgactgcccacccagctgtggcgggaggtgcagagcagagggctttagggagcagtgactgcggtcacccctttagttctctgggtgtagaccacaccacctcccactgggcaccccccaacacggtgtcctgccacccagcgcctggctccaggaaaacacgcttgccttccttcccggcagcttcgccactctccttatggactctgttctgtttgtacatggctgacggaaatctctttggtacaaccgaataaagcctggtggcagtgctgcgcggggctcccagccctgctgggaaggaccagggaaccactcagcaaggagaccctcttggccctgcccccaccatgcacccagcagccgggagtgcagcgggcagcctggcagtgagtgaaacccaggcctccagccctccaaagcctggggccaccccctgtagcaggcgatgctagaataaggaggagagccagagctgaggctccttgccccttggcccctccaggggccatgggatctctgtctcccacacccctgtcacggcccgcctggagcagcccagaggccgaagaggttcttactgcagcctccgggaggtgtctagggaggccatagattgcctggtctcgccgcattcaaaatgaggcttatgatcagtacttttttcagccccacattcctctccagaatggcctctgccctacagcacctggcccatgtggcaccccatgggcctgtcctctgctgttgtgaggtcgacctcacgacccagcacaggagctggaggcgaggtgcacgcgaggctctccacagcccaggaaggcagcctgtcaccctgctctccgagccaggggccaaggtgtggggggcacaggccatcctcatcctgccaggcccccgctttcaggagtggggtggtgccaatgctcccactcagaaccctggactgcggggtcccctgagcagagggaccagccagttccccatagacagattggtgctggacaggggctgcctgggccccaggcttggggagggtagaaaggccctgcagtgctgctgcctgggcccggaggtgggcctggccccgtagcagcattggaggccagagcccaagccagttccggagtcacacccaacggcggagggagaacctacccatctcccaccttcagctctggggaggcatgctctgggcctctggagccagggctcaggcccccaactctcctccttgcccctgcaccctcggacttggcctggccagaagggatgggggcaagaggaaggcagccaggggctccagcccatgccctcacagatttggctctcgagttggggagcgaagggctgggggaggacactgggaaccgggccagccgtggccctgcacttcccccagggagcaccaaggctaggcgcggcttcaccgcggggctgggtcgtggccagcttcgcccctgggtctgaagacctctgggcggcccaggccaaccttgccctgccgccgcacactcggctgccttctcatacccaggcttggggatttccaggtcccgttcccctcgtggcctggctgccagtcctccagcacccctca

SEQ ID NO: 2436 - DNA, 3167 bp, Homo sapiens
aaacttcggctaggtcgaggctgggtttaaattcggccgtgccaggctgtccgcgccgccgctgcggggccatgatccggaacgggcgcggggctgcaggcggcgcagagcagccgggcccggggggcaggcgcgccgtgagggtgtggtgcgatggctgctatgacatggtgcattacggccactccaaccagctgcgccaggcacgggccatgggtgactacctcatcgtaggcgtgcacaccgatgaggagatcgccaagcacaaggggcccccggtgttcactcaggaggagagatacaagatggtgcaggccatcaaatgggtggacgaggtggtgccagcggctccctacgtcactacactagagaccctggacaaatacaactgtgacttctgtgttcacggcaatgacatcaccctgactgtagatggccgggacacctatgaggaagtaaagcaggctgggaggtacagagaatgcaagcgcacgcaaggggtgtccaccacagacctcgtgggccgcatgctgctggtaaccaaagcccatcacagcagccaggagatgtcctctgagtaccgggagtatgcagacagttttggcaagtgccctggtgggcggaacccctggaccggggtatcccagttcctgcagacatctcagaagatcatccagtttgcttctgggaaggagccccagccaggggagacagtcatctatgtggctggtgccttcgacctgttccacatcgggcatgtggacttcctggagaaggtgcacaggctggcagagaggccctacatcatcgcgggcttacactttgaccaggaggtcaatcactacaaggggaagaactaccccatcatgaatctgcatgaacggactctgagcgtgctggcctgccggtacgtgtcagaagtggtgattggagccccgtacgcggtcacagcagagctcctaagtcacttcaaggtggacctggtgtgtcacggcaagacagaaattatccctgacagggatggctccgacccataccaggagcccaagagaaggggcatcttccgtcagattgacagtggcagcaacctcaccacagacctcatcgtccagcggatcatcaccaacaggttggagtatgaggcgcgaaaccagaagaaggaagccaaggagctggccttcctggaggctgccaggcagcaggcggcacagcccctgggggagcgcgatggtgacttctaacctggcagaggccctggccggccctccccctgctctgcttctgcgccttctgcgtttggacataggactctgcagggccgccctctctaactggcctggctctggaagggctggtgaggactctgcctccttgcctgcctacaaggtgcctggtttgcagcaggctctccgctctttccagcaaagctgctcagagagggtgtccagcacagtggagaggccggaagtgagacgggcagacggcacctgcagcctgaaacgcaccgctcctgcgtgcgcccccacctggtccccggatgcccccaccacctggacagaggccacactgactgcccacccagctgtggcgggaggtgcagagcagagggctttagggagcagtgactgcggtcacccctttagttctctgggtgtagaccacaccacctcccactgggcaccccccaacacggtgtcctgccacccagcgcctggctccaggaaaacacgcttgccttccttcccggcagcttcgccactctccttatggactctgttctgtttgtacatggctgacggaaatctctttggtacaaccgaataaagcctggtggcagtgctgcgcggggctcccagccctgctgggaaggaccagggaaccactcagcaaggagaccctcttggccctgcccccaccatgcacccagcagccgggagtgcagcgggcagcctggcagtgagtgaaacccaggcctccagccctccaaagcctggggccaccccctgtagcaggcgatgctagaataaggaggagagccagagctgaggctccttgccccttggcccctccaggggccatgggatctctgtctcccacacccctgtcacggcccgcctggagcagcccagaggccgaagaggttcttactgcagcctccgggaggtgtctagggaggccatagattgcctggtctcgccgcattcaaaatgaggcttatgatcagtacttttttcagccccacattcctctccagaatggcctctgccctacagcacctggcccatgtggcaccccatgggcctgtcctctgctgttgtgaggtcgacctcacgacccagcacaggagctggaggcgaggtgcacgcgaggctctccacagcccaggaaggcagcctgtcaccctgctctccgagccaggggccaaggtgtggggggcacaggccatcctcatcctgccaggcccccgctttcaggagtggggtggtgccaatgctcccactcagaaccctggactgcggggtcccctgagcagagggaccagccagttccccatagacagattggtgctggacaggggctgcctgggccccaggcttggggagggtagaaaggccctgcagtgctgctgcctgggcccggaggtgggcctggccccgtagcagcattggaggccagagcccaagccagttccggagtcacacccaacggcggagggagaacctacccatctcccaccttcagctctggggaggcatgctctgggcctctggagccagggctcaggcccccaactctcctccttgcccctgcaccctcggacttggcctggccagaagggatgggggcaagaggaaggcagccaggggctccagcccatgccctcacagatttggctctcgagttggggagcgaagggctgggggaggacactgggaaccgggccagccgtggccctgcacttcccccagggagcaccaaggctaggcgcggcttcaccgcggggctgggtcgtggccagcttcgcccctgggtctgaagacctctgggcggcccaggccaaccttgccctgccgccgcacactcggctgccttctcatacccaggcttggggatttccaggtcccgttcccctcgtggcctggctgccagtcctccagcacccctca

SEQ ID NO: 2437 - DNA, 1791 bp, Homo sapiens
ggcagcgagcggcctggcggggcgggcggcggcgctcggagtcgccgggagctgccaggctgtccgcgccgccgctgcggggccatgatccggaacgggcgcggggctgcaggcggcgcagagcagccgggcccggggggcaggcgcgccgtgagggtgtggtgcgatggctgctatgacatggtgcattacggccactccaaccagctgcgccaggcacgggccatgggtgactacctcatcgtaggcgtgcacaccgatgaggagatcgccaagcacaaggggcccccggtgttcactcaggaggagagatacaagatggtgcaggccatcaaatgggtggacgaggtggtgccagcggctccctacgtcactacactagagaccctggacaaatacaactgtgacttctgtgttcacggcaatgacatcaccctgactgtagatggccgggacacctatgaggaagtaaagcaggctgggaggtacagagaatgcaagcgcacgcaaggggtgtccaccacagacctcgtgggccgcatgctgctggtaaccaaagcccatcacagcagccaggagatgtcctctgagtaccgggagtatgcagacagttttggcaagtgccctggtgggcggaacccctggaccggggtatcccagttcctgcagacatctcagaagatcatccagtttgcttctgggaaggagccccagccaggggagacagtcatctatgtggctggtgccttcgacctgttccacatcgggcatgtggacttcctggagaaggtgcacaggctggcagagaggccctacatcatcgcgggcttacactttgaccaggaggtcaatcactacaaggggaagaactaccccatcatgaatctgcatgaacggactctgagcgtgctggcctgccggtacgtgtcagaagtggtgattggagccccgtacgcggtcacagcagagctcctaagtcacttcaaggtggacctggtgtgtcacggcaagacagaaattatccctgacagggatggctccgacccataccaggagcccaagagaaggggcatcttccgtcagattgacagtggcagcaacctcaccacagacctcatcgtccagcggatcatcaccaacaggttggagtatgaggcgcgaaaccagaagaaggaagccaaggagctggccttcctggaggctgccaggcagcaggcggcacagcccctgggggagcgcgatggtgacttctaacctggcagaggccctggccggccctccccctgctctgcttctgcgccttctgcgtttggacataggactctgcagggccgccctctctaactggcctggctctggaagggctggtgaggactctgcctccttgcctgcctacaaggtgcctggtttgcagcaggctctccgctctttccagcaaagctgctcagagagggtgtccagcacagtggagaggccggaagtgagacgggcagacggcacctgcagcctgaaacgcaccgctcctgcgtgcgcccccacctggtccccggatgcccccaccacctggacagaggccacactgactgcccacccagctgtggcgggaggtgcagagcagagggctttagggagcagtgactgcggtcacccctttagttctctgggtgtagaccacaccacctcccactgggcaccccccaacacggtgtcctgccacccagcgcctggctccaggaaaacacgcttgccttccttcccgggttataacctttcccgccgaggctcctcctt

SEQ ID NO: 2438 - DNA, 3307 bp, Homo sapiens
agcgggttgcccggggaccgggcccgcgttctgggtggcgtcctcgtccggcatgggccggggctggcaggctgcggggctcgcctgccgggagggtcgggctgcagaggctccgcgccctgccgtgggcgaccccgtctacctctggcggaggccccgcccggtcacgccgacctctccggtgcagccaccgcgctgagatctggagccacggcctccctgcttctccgtaaccaccagcaaccagcttgcccggctccggtccaggggttcccctggcctccgggcgagcgtccctgtctatgacatggtgcattacggccactccaaccagctgcgccaggcacgggccatgggtgactacctcatcgtaggcgtgcacaccgatgaggagatcgccaagcacaaggggcccccggtgttcactcaggaggagagatacaagatggtgcaggccatcaaatgggtggacgaggtggtgccagcggctccctacgtcactacactagagaccctggacaaatacaactgtgacttctgtgttcacggcaatgacatcaccctgactgtagatggccgggacacctatgaggaagtaaagcaggctgggaggtacagagaatgcaagcgcacgcaaggggtgtccaccacagacctcgtgggccgcatgctgctggtaaccaaagcccatcacagcagccaggagatgtcctctgagtaccgggagtatgcagacagttttggcaagtgccctggtgggcggaacccctggaccggggtatcccagttcctgcagacatctcagaagatcatccagtttgcttctgggaaggagccccagccaggggagacagtcatctatgtggctggtgccttcgacctgttccacatcgggcatgtggacttcctggagaaggtgcacaggctggcagagaggccctacatcatcgcgggcttacactttgaccaggaggtcaatcactacaaggggaagaactaccccatcatgaatctgcatgaacggactctgagcgtgctggcctgccggtacgtgtcagaagtggtgattggagccccgtacgcggtcacagcagagctcctaagtcacttcaaggtggacctggtgtgtcacggcaagacagaaattatccctgacagggatggctccgacccataccaggagcccaagagaaggggcatcttccgtcagattgacagtggcagcaacctcaccacagacctcatcgtccagcggatcatcaccaacaggttggagtatgaggcgcgaaaccagaagaaggaagccaaggagctggccttcctggaggctgccaggcagcaggcggcacagcccctgggggagcgcgatggtgacttctaacctggcagaggccctggccggccctccccctgctctgcttctgcgccttctgcgtttggacataggactctgcagggccgccctctctaactggcctggctctggaagggctggtgaggactctgcctccttgcctgcctacaaggtgcctggtttgcagcaggctctccgctctttccagcaaagctgctcagagagggtgtccagcacagtggagaggccggaagtgagacgggcagacggcacctgcagcctgaaacgcaccgctcctgcgtgcgcccccacctggtccccggatgcccccaccacctggacagaggccacactgactgcccacccagctgtggcgggaggtgcagagcagagggctttagggagcagtgactgcggtcacccctttagttctctgggtgtagaccacaccacctcccactgggcaccccccaacacggtgtcctgccacccagcgcctggctccaggaaaacacgcttgccttccttcccggcagcttcgccactctccttatggactctgttctgtttgtacatggctgacggaaatctctttggtacaaccgaataaagcctggtggcagtgctgcgcggggctcccagccctgctgggaaggaccagggaaccactcagcaaggagaccctcttggccctgcccccaccatgcacccagcagccgggagtgcagcgggcagcctggcagtgagtgaaacccaggcctccagccctccaaagcctggggccaccccctgtagcaggcgatgctagaataaggaggagagccagagctgaggctccttgccccttggcccctccaggggccatgggatctctgtctcccacacccctgtcacggcccgcctggagcagcccagaggccgaagaggttcttactgcagcctccgggaggtgtctagggaggccatagattgcctggtctcgccgcattcaaaatgaggcttatgatcagtacttttttcagccccacattcctctccagaatggcctctgccctacagcacctggcccatgtggcaccccatgggcctgtcctctgctgttgtgaggtcgacctcacgacccagcacaggagctggaggcgaggtgcacgcgaggctctccacagcccaggaaggcagcctgtcaccctgctctccgagccaggggccaaggtgtggggggcacaggccatcctcatcctgccaggcccccgctttcaggagtggggtggtgccaatgctcccactcagaaccctggactgcggggtcccctgagcagagggaccagccagttccccatagacagattggtgctggacaggggctgcctgggccccaggcttggggagggtagaaaggccctgcagtgctgctgcctgggcccggaggtgggcctggccccgtagcagcattggaggccagagcccaagccagttccggagtcacacccaacggcggagggagaacctacccatctcccaccttcagctctggggaggcatgctctgggcctctggagccagggctcaggcccccaactctcctccttgcccctgcaccctcggacttggcctggccagaagggatgggggcaagaggaaggcagccaggggctccagcccatgccctcacagatttggctctcgagttggggagcgaagggctgggggaggacactgggaaccgggccagccgtggccctgcacttcccccagggagcaccaaggctaggcgcggcttcaccgcggggctgggtcgtggccagcttcgcccctgggtctgaagacctctgggcggcccaggccaaccttgccctgccgccgcacactcggctgccttctcatacccaggcttggggatttccaggtcccgttcccctcgtggcctggctgccagtcctccagcacccctca

SEQ ID NO: 2439 - DNA, 3023 bp, Homo sapiens
tagctaggtacgagcctgtgtgttgaattggccgaggctgtgccgaatgacatgaggtgccaggctgtccgcgccgccgctgcggggccatgatccggaacgggcgcggggctgcaggcggcgcagagcagccgggcccggggggcaggcgcgccgtgagggtgtggtgcgatggctgctatgacatggtgcattacggccactccaaccagctgcgccaggcacgggccatgggtgactacctcatcgtaggcgtgcacaccgatgatgacatcaccctgactgtagatggccgggacacctatgaggaagtaaagcaggctgggaggtacagagaatgcaagcgcacgcaaggggtgtccaccacagacctcgtgggccgcatgctgctggtaaccaaagcccatcacagcagccaggagatgtcctctgagtaccgggagtatgcagacagttttggcaagtgccctggtgggcggaacccctggaccggggtatcccagttcctgcagacatctcagaagatcatccagtttgcttctgggaaggagccccagccaggggagacagtcatctatgtggctggtgccttcgacctgttccacatcgggcatgtggacttcctggagaaggtgcacaggctggcagagaggccctacatcatcgcgggcttacactttgaccaggaggtcaatcactacaaggggaagaactaccccatcatgaatctgcatgaacggactctgagcgtgctggcctgccggtacgtgtcagaagtggtgattggagccccgtacgcggtcacagcagagctcctaagtcacttcaaggtggacctggtgtgtcacggcaagacagaaattatccctgacagggatggctccgacccataccaggagcccaagagaaggggcatcttccgtcagattgacagtggcagcaacctcaccacagacctcatcgtccagcggatcatcaccaacaggttggagtatgaggcgcgaaaccagaagaaggaagccaaggagctggccttcctggaggctgccaggcagcaggcggcacagcccctgggggagcgcgatggtgacttctaacctggcagaggccctggccggccctccccctgctctgcttctgcgccttctgcgtttggacataggactctgcagggccgccctctctaactggcctggctctggaagggctggtgaggactctgcctccttgcctgcctacaaggtgcctggtttgcagcaggctctccgctctttccagcaaagctgctcagagagggtgtccagcacagtggagaggccggaagtgagacgggcagacggcacctgcagcctgaaacgcaccgctcctgcgtgcgcccccacctggtccccggatgcccccaccacctggacagaggccacactgactgcccacccagctgtggcgggaggtgcagagcagagggctttagggagcagtgactgcggtcacccctttagttctctgggtgtagaccacaccacctcccactgggcaccccccaacacggtgtcctgccacccagcgcctggctccaggaaaacacgcttgccttccttcccggcagcttcgccactctccttatggactctgttctgtttgtacatggctgacggaaatctctttggtacaaccgaataaagcctggtggcagtgctgcgcggggctcccagccctgctgggaaggaccagggaaccactcagcaaggagaccctcttggccctgcccccaccatgcacccagcagccgggagtgcagcgggcagcctggcagtgagtgaaacccaggcctccagccctccaaagcctggggccaccccctgtagcaggcgatgctagaataaggaggagagccagagctgaggctccttgccccttggcccctccaggggccatgggatctctgtctcccacacccctgtcacggcccgcctggagcagcccagaggccgaagaggttcttactgcagcctccgggaggtgtctagggaggccatagattgcctggtctcgccgcattcaaaatgaggcttatgatcagtacttttttcagccccacattcctctccagaatggcctctgccctacagcacctggcccatgtggcaccccatgggcctgtcctctgctgttgtgaggtcgacctcacgacccagcacaggagctggaggcgaggtgcacgcgaggctctccacagcccaggaaggcagcctgtcaccctgctctccgagccaggggccaaggtgtggggggcacaggccatcctcatcctgccaggcccccgctttcaggagtggggtggtgccaatgctcccactcagaaccctggactgcggggtcccctgagcagagggaccagccagttccccatagacagattggtgctggacaggggctgcctgggccccaggcttggggagggtagaaaggccctgcagtgctgctgcctgggcccggaggtgggcctggccccgtagcagcattggaggccagagcccaagccagttccggagtcacacccaacggcggagggagaacctacccatctcccaccttcagctctggggaggcatgctctgggcctctggagccagggctcaggcccccaactctcctccttgcccctgcaccctcggacttggcctggccagaagggatgggggcaagaggaaggcagccaggggctccagcccatgccctcacagatttggctctcgagttggggagcgaagggctgggggaggacactgggaaccgggccagccgtggccctgcacttcccccagggagcaccaaggctaggcgcggcttcaccgcggggctgggtcgtggccagcttcgcccctgggtctgaagacctctgggcggcccaggccaaccttgccctgccgccgcacactcggctgccttctcatacccaggcttggggatttccaggtcccgttcccctcgtggcctggctgccagtcctccagcacccctca

SEQ ID NO: 2440 - DNA, 3253 bp, Homo sapiens
  misc_feature (27)..(27): n is a, c, g, or t
agggcttttgggtttacccggcccccncctgatgtactgtgatatctgtcgatccagcgctcctctggatgtgccaggctgtccgcgccgccgctgcggggccatgatccggaacgggcgcggggctgcaggcggcgcagagcagccgggcccggggggcaggcgcgccgtgagggtgtggtgcgatggctgctatgacatggtgcattacggccactccaaccagctgcgccaggcacgggccatgggtgactacctcatcgtaggcgtgcacaccgatgaggagatcgccaagcacaaggggcccccggtgttcactcaggaggagagatacaagatggtgcaggccatcaaatgggtggacgaggtggtgccagcggctccctacgtcactacactagagaccctggacaaatacaactgtgacttctgtgttcacggcaatgacatcaccctgactgtagatggccgggacacctatgaggaagtaaagcaggctgggaggtacagagaatgcaagcgcacgcaaggggtgtccaccacagacctcgtgggccgcatgctgctggtaaccaaagcccatcacagcagccaggagatgtcctctgagtaccgggagtatgcagacagttttggcaagccccctcacccgatacccgccggggacatactttcctcagaaggctgctcccagtgccctggtgggcggaacccctggaccggggtatcccagttcctgcagacatctcagaagatcatccagtttgcttctgggaaggagccccagccaggggagacagtcatctatgtggctggtgccttcgacctgttccacatcgggcatgtggacttcctggagaaggtgcacaggctggcagagaggccctacatcatcgcgggcttacactttgaccaggaggtcaatcactacaaggggaagaactaccccatcatgaatctgcatgaacggactctgagcgtgctggcctgccggtacgtgtcagaagtggtgattggagccccgtacgcggtcacagcagagctcctaagtcacttcaaggtggacctggtgtgtcacggcaagacagaaattatccctgacagggatggctccgacccataccaggagcccaagagaaggggcatcttccgtcagattgacagtggcagcaacctcaccacagacctcatcgtccagcggatcatcaccaacaggttggagtatgaggcgcgaaaccagaagaaggaagccaaggagctggccttcctggaggctgccaggcagcaggcggcacagcccctgggggagcgcgatggtgacttctaacctggcagaggccctggccggccctccccctgctctgcttctgcgccttctgcgtttggacataggactctgcagggccgccctctctaactggcctggctctggaagggctggtgaggactctgcctccttgcctgcctacaaggtgcctggtttgcagcaggctctccgctctttccagcaaagctgctcagagagggtgtccagcacagtggagaggccggaagtgagacgggcagacggcacctgcagcctgaaacgcaccgctcctgcgtgcgcccccacctggtccccggatgcccccaccacctggacagaggccacactgactgcccacccagctgtggcgggaggtgcagagcagagggctttagggagcagtgactgcggtcacccctttagttctctgggtgtagaccacaccacctcccactgggcaccccccaacacggtgtcctgccacccagcgcctggctccaggaaaacacgcttgccttccttcccggcagcttcgccactctccttatggactctgttctgtttgtacatggctgacggaaatctctttggtacaaccgaataaagcctggtggcagtgctgcgcggggctcccagccctgctgggaaggaccagggaaccactcagcaaggagaccctcttggccctgcccccaccatgcacccagcagccgggagtgcagcgggcagcctggcagtgagtgaaacccaggcctccagccctccaaagcctggggccaccccctgtagcaggcgatgctagaataaggaggagagccagagctgaggctccttgccccttggcccctccaggggccatgggatctctgtctcccacacccctgtcacggcccgcctggagcagcccagaggccgaagaggttcttactgcagcctccgggaggtgtctagggaggccatagattgcctggtctcgccgcattcaaaatgaggcttatgatcagtacttttttcagccccacattcctctccagaatggcctctgccctacagcacctggcccatgtggcaccccatgggcctgtcctctgctgttgtgaggtcgacctcacgacccagcacaggagctggaggcgaggtgcacgcgaggctctccacagcccaggaaggcagcctgtcaccctgctctccgagccaggggccaaggtgtggggggcacaggccatcctcatcctgccaggcccccgctttcaggagtggggtggtgccaatgctcccactcagaaccctggactgcggggtcccctgagcagagggaccagccagttccccatagacagattggtgctggacaggggctgcctgggccccaggcttggggagggtagaaaggccctgcagtgctgctgcctgggcccggaggtgggcctggccccgtagcagcattggaggccagagcccaagccagttccggagtcacacccaacggcggagggagaacctacccatctcccaccttcagctctggggaggcatgctctgggcctctggagccagggctcaggcccccaactctcctccttgcccctgcaccctcggacttggcctggccagaagggatgggggcaagaggaaggcagccaggggctccagcccatgccctcacagatttggctctcgagttggggagcgaagggctgggggaggacactgggaaccgggccagccgtggccctgcacttcccccagggagcaccaaggctaggcgcggcttcaccgcggggctgggtcgtggccagcttcgcccctgggtctgaagacctctgggcggcccaggccaaccttgccctgccgccgcacactcggctgccttctcatacccaggcttggggatttccaggtcccgttcccctcgtggcctggctgccagtcctccagcacccctca

SEQ ID NO: 2441 - DNA, 3591 bp, Homo sapiens
agcgggttgcccggggaccgggcccgcgttctgggtggcgtcctcgtccggcatgggccggggctggcaggctgcggggctcgcctgccgggagggtcgggctgcagaggctccgcgccctgccgtgggcgaccccgtctacctctggcggaggccccgcccggtcacgccgacctctccggtgcagccaccgcgctgagatctggagccacggcctccctgcttctccgtaaccaccagcaaccagcttgcccggctccggtccaggggttcccctggcctccgggcgagcgtccctgtctatgacatggtgcattacggccactccaaccagctgcgccaggcacgggccatgggtgactacctcatcgtaggcgtgcacaccgatgctaaagagaaggggcacctgctccccaccactgccagcgaggctcccaagccttcaggggctgagcacctgctcgtcagaaggaatctctgcctttgcctgagaccctcgcagggaagagagccacccagttggccagcactagtgggctaagggccagggtagagagacagcctgcccccaccggccctcttgtgtggctacagctgggtgctgggaaggggcctcctactggaggggccgggtgggctggggtccccagtctccccgttgtccttttcctagaggagatcgccaagcacaaggggcccccggtgttcactcaggaggagagatacaagatggtgcaggccatcaaatgggtggacgaggtggtgccagcggctccctacgtcactacactagagaccctggacaaatacaactgtgacttctgtgttcacggcaatgacatcaccctgactgtagatggccgggacacctatgaggaagtaaagcaggctgggaggtacagagaatgcaagcgcacgcaaggggtgtccaccacagacctcgtgggccgcatgctgctggtaaccaaagcccatcacagcagccaggagatgtcctctgagtaccgggagtatgcagacagttttggcaagtgccctggtgggcggaacccctggaccggggtatcccagttcctgcagacatctcagaagatcatccagtttgcttctgggaaggagccccagccaggggagacagtcatctatgtggctggtgccttcgacctgttccacatcgggcatgtggacttcctggagaaggtgcacaggctggcagagaggccctacatcatcgcgggcttacactttgaccaggaggtcaatcactacaaggggaagaactaccccatcatgaatctgcatgaacggactctgagcgtgctggcctgccggtacgtgtcagaagtggtgattggagccccgtacgcggtcacagcagagctcctaagtcacttcaaggtggacctggtgtgtcacggcaagacagaaattatccctgacagggatggctccgacccataccaggagcccaagagaaggggcatcttccgtcagattgacagtggcagcaacctcaccacagacctcatcgtccagcggatcatcaccaacaggttggagtatgaggcgcgaaaccagaagaaggaagccaaggagctggccttcctggaggctgccaggcagcaggcggcacagcccctgggggagcgcgatggtgacttctaacctggcagaggccctggccggccctccccctgctctgcttctgcgccttctgcgtttggacataggactctgcagggccgccctctctaactggcctggctctggaagggctggtgaggactctgcctccttgcctgcctacaaggtgcctggtttgcagcaggctctccgctctttccagcaaagctgctcagagagggtgtccagcacagtggagaggccggaagtgagacgggcagacggcacctgcagcctgaaacgcaccgctcctgcgtgcgcccccacctggtccccggatgcccccaccacctggacagaggccacactgactgcccacccagctgtggcgggaggtgcagagcagagggctttagggagcagtgactgcggtcacccctttagttctctgggtgtagaccacaccacctcccactgggcaccccccaacacggtgtcctgccacccagcgcctggctccaggaaaacacgcttgccttccttcccggcagcttcgccactctccttatggactctgttctgtttgtacatggctgacggaaatctctttggtacaaccgaataaagcctggtggcagtgctgcgcggggctcccagccctgctgggaaggaccagggaaccactcagcaaggagaccctcttggccctgcccccaccatgcacccagcagccgggagtgcagcgggcagcctggcagtgagtgaaacccaggcctccagccctccaaagcctggggccaccccctgtagcaggcgatgctagaataaggaggagagccagagctgaggctccttgccccttggcccctccaggggccatgggatctctgtctcccacacccctgtcacggcccgcctggagcagcccagaggccgaagaggttcttactgcagcctccgggaggtgtctagggaggccatagattgcctggtctcgccgcattcaaaatgaggcttatgatcagtacttttttcagccccacattcctctccagaatggcctctgccctacagcacctggcccatgtggcaccccatgggcctgtcctctgctgttgtgaggtcgacctcacgacccagcacaggagctggaggcgaggtgcacgcgaggctctccacagcccaggaaggcagcctgtcaccctgctctccgagccaggggccaaggtgtggggggcacaggccatcctcatcctgccaggcccccgctttcaggagtggggtggtgccaatgctcccactcagaaccctggactgcggggtcccctgagcagagggaccagccagttccccatagacagattggtgctggacaggggctgcctgggccccaggcttggggagggtagaaaggccctgcagtgctgctgcctgggcccggaggtgggcctggccccgtagcagcattggaggccagagcccaagccagttccggagtcacacccaacggcggagggagaacctacccatctcccaccttcagctctggggaggcatgctctgggcctctggagccagggctcaggcccccaactctcctccttgcccctgcaccctcggacttggcctggccagaagggatgggggcaagaggaaggcagccaggggctccagcccatgccctcacagatttggctctcgagttggggagcgaagggctgggggaggacactgggaaccgggccagccgtggccctgcacttcccccagggagcaccaaggctaggcgcggcttcaccgcggggctgggtcgtggccagcttcgcccctgggtctgaagacctctgggcggcccaggccaaccttgccctgccgccgcacactcggctgccttctcatacccaggcttggggatttccaggtcccgttcccctcgtggcctggctgccagtcctccagcacccctca

SEQ ID NO: 2442 - DNA, 3467 bp, Homo sapiens
agcgggttgcccggggaccgggcccgcgttctgggtggcgtcctcgtccggcatgggccggggctggcaggctgcggggctcgcctgccgggagggtcgggctgcagaggctccgcgccctgccgtgggcgaccccgtctacctctggcggaggccccgcccggtcacgccgacctctccggtgcagccaccgcgctgagatctggagccacggcctccctgcttctccgtaaccaccagcaaccagcttgcccggctccggtccaggggttcccctggcctccgggcgagcgtccctgtctatgacatggtgcattacggccactccaaccagctgcgccaggcacgggccatgggtgactacctcatcgtaggcgtgcacaccgatgctaaagagaaggggcacctgctccccaccactgccagcgaggctcccaagccttcaggggctgagcacctgctcgtcagaaggaatctctgcctttgcctgagaccctcgcagggaagagagccacccagttggccagcactagtgggctaagggccaggaggagatcgccaagcacaaggggcccccggtgttcactcaggaggagagatacaagatggtgcaggccatcaaatgggtggacgaggtggtgccagcggctccctacgtcactacactagagaccctggacaaatacaactgtgacttctgtgttcacggcaatgacatcaccctgactgtagatggccgggacacctatgaggaagtaaagcaggctgggaggtacagagaatgcaagcgcacgcaaggggtgtccaccacagacctcgtgggccgcatgctgctggtaaccaaagcccatcacagcagccaggagatgtcctctgagtaccgggagtatgcagacagttttggcaagtgccctggtgggcggaacccctggaccggggtatcccagttcctgcagacatctcagaagatcatccagtttgcttctgggaaggagccccagccaggggagacagtcatctatgtggctggtgccttcgacctgttccacatcgggcatgtggacttcctggagaaggtgcacaggctggcagagaggccctacatcatcgcgggcttacactttgaccaggaggtcaatcactacaaggggaagaactaccccatcatgaatctgcatgaacggactctgagcgtgctggcctgccggtacgtgtcagaagtggtgattggagccccgtacgcggtcacagcagagctcctaagtcacttcaaggtggacctggtgtgtcacggcaagacagaaattatccctgacagggatggctccgacccataccaggagcccaagagaaggggcatcttccgtcagattgacagtggcagcaacctcaccacagacctcatcgtccagcggatcatcaccaacaggttggagtatgaggcgcgaaaccagaagaaggaagccaaggagctggccttcctggaggctgccaggcagcaggcggcacagcccctgggggagcgcgatggtgacttctaacctggcagaggccctggccggccctccccctgctctgcttctgcgccttctgcgtttggacataggactctgcagggccgccctctctaactggcctggctctggaagggctggtgaggactctgcctccttgcctgcctacaaggtgcctggtttgcagcaggctctccgctctttccagcaaagctgctcagagagggtgtccagcacagtggagaggccggaagtgagacgggcagacggcacctgcagcctgaaacgcaccgctcctgcgtgcgcccccacctggtccccggatgcccccaccacctggacagaggccacactgactgcccacccagctgtggcgggaggtgcagagcagagggctttagggagcagtgactgcggtcacccctttagttctctgggtgtagaccacaccacctcccactgggcaccccccaacacggtgtcctgccacccagcgcctggctccaggaaaacacgcttgccttccttcccggcagcttcgccactctccttatggactctgttctgtttgtacatggctgacggaaatctctttggtacaaccgaataaagcctggtggcagtgctgcgcggggctcccagccctgctgggaaggaccagggaaccactcagcaaggagaccctcttggccctgcccccaccatgcacccagcagccgggagtgcagcgggcagcctggcagtgagtgaaacccaggcctccagccctccaaagcctggggccaccccctgtagcaggcgatgctagaataaggaggagagccagagctgaggctccttgccccttggcccctccaggggccatgggatctctgtctcccacacccctgtcacggcccgcctggagcagcccagaggccgaagaggttcttactgcagcctccgggaggtgtctagggaggccatagattgcctggtctcgccgcattcaaaatgaggcttatgatcagtacttttttcagccccacattcctctccagaatggcctctgccctacagcacctggcccatgtggcaccccatgggcctgtcctctgctgttgtgaggtcgacctcacgacccagcacaggagctggaggcgaggtgcacgcgaggctctccacagcccaggaaggcagcctgtcaccctgctctccgagccaggggccaaggtgtggggggcacaggccatcctcatcctgccaggcccccgctttcaggagtggggtggtgccaatgctcccactcagaaccctggactgcggggtcccctgagcagagggaccagccagttccccatagacagattggtgctggacaggggctgcctgggccccaggcttggggagggtagaaaggccctgcagtgctgctgcctgggcccggaggtgggcctggccccgtagcagcattggaggccagagcccaagccagttccggagtcacacccaacggcggagggagaacctacccatctcccaccttcagctctggggaggcatgctctgggcctctggagccagggctcaggcccccaactctcctccttgcccctgcaccctcggacttggcctggccagaagggatgggggcaagaggaaggcagccaggggctccagcccatgccctcacagatttggctctcgagttggggagcgaagggctgggggaggacactgggaaccgggccagccgtggccctgcacttcccccagggagcaccaaggctaggcgcggcttcaccgcggggctgggtcgtggccagcttcgcccctgggtctgaagacctctgggcggcccaggccaaccttgccctgccgccgcacactcggctgccttctcatacccaggcttggggatttccaggtcccgttcccctcgtggcctggctgccagtcctccagcacccctca

SEQ ID NO: 2443 - DNA, 3102 bp, Homo sapiens
ggcagcgagcggcctggcggggcgggcggcggcgctcggagtcgccgggagctgccaggctgtccgcgccgccgctgcggggccatgatccggaacgggcgcggggctgcaggcggcgcagagcagccgggcccggggggcaggcgcgccgtgagggtgtggtgcgatggctgctatgacatggtgcattacggccactccaaccagctgcgccaggcacgggccatgggtgactacctcatcgtaggcgtgcacaccgatgaggagatcgccaagcacaaggggcccccggtgttcactcaggaggagagatacaagatggtgcaggccatcaaatgggtggacgaggtggtgccagcggctccctacgtcactacactagagaccctggacaaatacaactgtgacttctgtgttcacggcaatgacatcaccctgactgtagatggccgggacacctatgaggaagtaaagcaggctgggaggtacagagaatgcaagcgcacgcaaggggtgtccaccacagacctcgtgggccgcatgctgctggtaaccaaagcccatcacagcagccaggagatgtcctctgagtaccgggagtatgcagacagttttggcaagtgccctggtgggcggaacccctggaccggggtatcccagttcctgcagacatctcagaagatcatccagtttgcttctgggaaggagccccagccaggggagacagtcatctatgtggctggtgccttcgacctgttccacatcgggcatgtggacttcctggagaaggtgcacaggctggcagagaggccctacatcatcgcgggcttacactttgaccagtacgtgtcagaagtggtgattggagccccgtacgcggtcacagcagagctcctaagtcacttcaaggtggacctggtgtgtcacggcaagacagaaattatccctgacagggatggctccgacccataccaggagcccaagagaaggggcatcttccgtcagattgacagtggcagcaacctcaccacagacctcatcgtccagcggatcatcaccaacaggttggagtatgaggcgcgaaaccagaagaaggaagccaaggagctggccttcctggaggctgccaggcagcaggcggcacagcccctgggggagcgcgatggtgacttctaacctggcagaggccctggccggccctccccctgctctgcttctgcgccttctgcgtttggacataggactctgcagggccgccctctctaactggcctggctctggaagggctggtgaggactctgcctccttgcctgcctacaaggtgcctggtttgcagcaggctctccgctctttccagcaaagctgctcagagagggtgtccagcacagtggagaggccggaagtgagacgggcagacggcacctgcagcctgaaacgcaccgctcctgcgtgcgcccccacctggtccccggatgcccccaccacctggacagaggccacactgactgcccacccagctgtggcgggaggtgcagagcagagggctttagggagcagtgactgcggtcacccctttagttctctgggtgtagaccacaccacctcccactgggcaccccccaacacggtgtcctgccacccagcgcctggctccaggaaaacacgcttgccttccttcccggcagcttcgccactctccttatggactctgttctgtttgtacatggctgacggaaatctctttggtacaaccgaataaagcctggtggcagtgctgcgcggggctcccagccctgctgggaaggaccagggaaccactcagcaaggagaccctcttggccctgcccccaccatgcacccagcagccgggagtgcagcgggcagcctggcagtgagtgaaacccaggcctccagccctccaaagcctggggccaccccctgtagcaggcgatgctagaataaggaggagagccagagctgaggctccttgccccttggcccctccaggggccatgggatctctgtctcccacacccctgtcacggcccgcctggagcagcccagaggccgaagaggttcttactgcagcctccgggaggtgtctagggaggccatagattgcctggtctcgccgcattcaaaatgaggcttatgatcagtacttttttcagccccacattcctctccagaatggcctctgccctacagcacctggcccatgtggcaccccatgggcctgtcctctgctgttgtgaggtcgacctcacgacccagcacaggagctggaggcgaggtgcacgcgaggctctccacagcccaggaaggcagcctgtcaccctgctctccgagccaggggccaaggtgtggggggcacaggccatcctcatcctgccaggcccccgctttcaggagtggggtggtgccaatgctcccactcagaaccctggactgcggggtcccctgagcagagggaccagccagttccccatagacagattggtgctggacaggggctgcctgggccccaggcttggggagggtagaaaggccctgcagtgctgctgcctgggcccggaggtgggcctggccccgtagcagcattggaggccagagcccaagccagttccggagtcacacccaacggcggagggagaacctacccatctcccaccttcagctctggggaggcatgctctgggcctctggagccagggctcaggcccccaactctcctccttgcccctgcaccctcggacttggcctggccagaagggatgggggcaagaggaaggcagccaggggctccagcccatgccctcacagatttggctctcgagttggggagcgaagggctgggggaggacactgggaaccgggccagccgtggccctgcacttcccccagggagcaccaaggctaggcgcggcttcaccgcggggctgggtcgtggccagcttcgcccctgggtctgaagacctctgggcggcccaggccaaccttgccctgccgccgcacactcggctgccttctcatacccaggcttggggatttccaggtcccgttcccctcgtggcctggctgccagtcctccagcacccctca

SEQ ID NO: 2444 - DNA, 3001 bp, Homo sapiens
ttggactcggtgctctgaattttacattagtgcacggcttgtccgctgaccgtctgcatgcggggccatgatccggaacgggcgcggggctgcaggcggcgcagagcagccgggcccggggggcaggcgcgccgtgagggtgtggtgcgatggctgctatgacatggtgcattacggccactccaaccagctgcgccaggcacgggccatgggtgactacctcatcgtaggcgtgcacaccgatgatgacatcaccctgactgtagatggccgggacacctatgaggaagtaaagcaggctgggaggtacagagaatgcaagcgcacgcaaggggtgtccaccacagacctcgtgggccgcatgctgctggtaaccaaagcccatcacagcagccaggagatgtcctctgagtaccgggagtatgcagacagttttggcaagtgccctggtgggcggaacccctggaccggggtatcccagttcctgcagacatctcagaagatcatccagtttgcttctgggaaggagccccagccaggggagacagtcatctatgtggctggtgccttcgacctgttccacatcgggcatgtggacttcctggagaaggtgcacaggctggcagagaggccctacatcatcgcgggcttacactttgaccaggaggtcaatcactacaaggggaagaactaccccatcatgaatctgcatgaacggactctgagcgtgctggcctgccggtacgtgtcagaagtggtgattggagccccgtacgcggtcacagcagagctcctaagtcacttcaaggtggacctggtgtgtcacggcaagacagaaattatccctgacagggatggctccgacccataccaggagcccaagagaaggggcatcttccgtcagattgacagtggcagcaacctcaccacagacctcatcgtccagcggatcatcaccaacaggttggagtatgaggcgcgaaaccagaagaaggaagccaaggagctggccttcctggaggctgccaggcagcaggcggcacagcccctgggggagcgcgatggtgacttctaacctggcagaggccctggccggccctccccctgctctgcttctgcgccttctgcgtttggacataggactctgcagggccgccctctctaactggcctggctctggaagggctggtgaggactctgcctccttgcctgcctacaaggtgcctggtttgcagcaggctctccgctctttccagcaaagctgctcagagagggtgtccagcacagtggagaggccggaagtgagacgggcagacggcacctgcagcctgaaacgcaccgctcctgcgtgcgcccccacctggtccccggatgcccccaccacctggacagaggccacactgactgcccacccagctgtggcgggaggtgcagagcagagggctttagggagcagtgactgcggtcacccctttagttctctgggtgtagaccacaccacctcccactgggcaccccccaacacggtgtcctgccacccagcgcctggctccaggaaaacacgcttgccttccttcccggcagcttcgccactctccttatggactctgttctgtttgtacatggctgacggaaatctctttggtacaaccgaataaagcctggtggcagtgctgcgcggggctcccagccctgctgggaaggaccagggaaccactcagcaaggagaccctcttggccctgcccccaccatgcacccagcagccgggagtgcagcgggcagcctggcagtgagtgaaacccaggcctccagccctccaaagcctggggccaccccctgtagcaggcgatgctagaataaggaggagagccagagctgaggctccttgccccttggcccctccaggggccatgggatctctgtctcccacacccctgtcacggcccgcctggagcagcccagaggccgaagaggttcttactgcagcctccgggaggtgtctagggaggccatagattgcctggtctcgccgcattcaaaatgaggcttatgatcagtacttttttcagccccacattcctctccagaatggcctctgccctacagcacctggcccatgtggcaccccatgggcctgtcctctgctgttgtgaggtcgacctcacgacccagcacaggagctggaggcgaggtgcacgcgaggctctccacagcccaggaaggcagcctgtcaccctgctctccgagccaggggccaaggtgtggggggcacaggccatcctcatcctgccaggcccccgctttcaggagtggggtggtgccaatgctcccactcagaaccctggactgcggggtcccctgagcagagggaccagccagttccccatagacagattggtgctggacaggggctgcctgggccccaggcttggggagggtagaaaggccctgcagtgctgctgcctgggcccggaggtgggcctggccccgtagcagcattggaggccagagcccaagccagttccggagtcacacccaacggcggagggagaacctacccatctcccaccttcagctctggggaggcatgctctgggcctctggagccagggctcaggcccccaactctcctccttgcccctgcaccctcggacttggcctggccagaagggatgggggcaagaggaaggcagccaggggctccagcccatgccctcacagatttggctctcgagttggggagcgaagggctgggggaggacactgggaaccgggccagccgtggccctgcacttcccccagggagcaccaaggctaggcgcggcttcaccgcggggctgggtcgtggccagcttcgcccctgggtctgaagacctctgggcggcccaggccaaccttgccctgccgccgcacactcggctgccttctcatacccaggcttggggatttccaggtcccgttcccctcgtggcctggctgccagtcctccagcacccctca

SEQ ID NO: 2445 - DNA, 3354 bp, Homo sapiens
ggcagcgagcggcctggcggggcgggcggcggcgctcggagtcgccgggagctgccaggctgtccgcgccgccgctgcggggccatgatccggaacgggcgcggggctgcaggcggcgcagagcagccgggcccggggggcaggcgcgccgtgagggtgtggtgcgatggctgctatgacatggtgcattacggccactccaaccagctgcgccaggcacgggccatgggtgactacctcatcgtaggcgtgcacaccgatgaggagatcgccaagcacaaggggcccccggtgttcactcaggaggagagatacaagatggtgcaggccatcaaatgggtggacgaggtggtgccagcggctccctacgtcactacactagagaccctggacaaatacaactgtgacttctgtgttcacggcaatgacatcaccctgactgtagatggccgggacacctatgaggaagtaaagcaggctgggaggtacagagaatgcaagcgcacgcaaggggtgtccaccacagacctcgtgggccgcatgctgctggtaaccaaagcccatcacagcagccaggtgagtcggcggcggaatccccgaggcccctgggtcgaggtctccaggggaaaggaggggcacctccctgccctctcagggtcctcctgcccactgctccccatccccagccggttctggggtggccacgccgggagggcaggcccctcagccctgctctgaccttctgtgcaggagatgtcctctgagtaccgggagtatgcagacagttttggcaagtgccctggtgggcggaacccctggaccggggtatcccagttcctgcagacatctcagaagatcatccagtttgcttctgggaaggagccccagccaggggagacagtcatctatgtggctggtgccttcgacctgttccacatcgggcatgtggacttcctggagaaggtgcacaggctggcagagaggccctacatcatcgcgggcttacactttgaccaggaggtcaatcactacaaggggaagaactaccccatcatgaatctgcatgaacggactctgagcgtgctggcctgccggtacgtgtcagaagtggtgattggagccccgtacgcggtcacagcagagctcctaagtcacttcaaggtggacctggtgtgtcacggcaagacagaaattatccctgacagggatggctccgacccataccaggagcccaagagaaggggcatcttccgtcagattgacagtggcagcaacctcaccacagacctcatcgtccagcggatcatcaccaacaggttggagtatgaggcgcgaaaccagaagaaggaagccaaggagctggccttcctggaggctgccaggcagcaggcggcacagcccctgggggagcgcgatggtgacttctaacctggcagaggccctggccggccctccccctgctctgcttctgcgccttctgcgtttggacataggactctgcagggccgccctctctaactggcctggctctggaagggctggtgaggactctgcctccttgcctgcctacaaggtgcctggtttgcagcaggctctccgctctttccagcaaagctgctcagagagggtgtccagcacagtggagaggccggaagtgagacgggcagacggcacctgcagcctgaaacgcaccgctcctgcgtgcgcccccacctggtccccggatgcccccaccacctggacagaggccacactgactgcccacccagctgtggcgggaggtgcagagcagagggctttagggagcagtgactgcggtcacccctttagttctctgggtgtagaccacaccacctcccactgggcaccccccaacacggtgtcctgccacccagcgcctggctccaggaaaacacgcttgccttccttcccggcagcttcgccactctccttatggactctgttctgtttgtacatggctgacggaaatctctttggtacaaccgaataaagcctggtggcagtgctgcgcggggctcccagccctgctgggaaggaccagggaaccactcagcaaggagaccctcttggccctgcccccaccatgcacccagcagccgggagtgcagcgggcagcctggcagtgagtgaaacccaggcctccagccctccaaagcctggggccaccccctgtagcaggcgatgctagaataaggaggagagccagagctgaggctccttgccccttggcccctccaggggccatgggatctctgtctcccacacccctgtcacggcccgcctggagcagcccagaggccgaagaggttcttactgcagcctccgggaggtgtctagggaggccatagattgcctggtctcgccgcattcaaaatgaggcttatgatcagtacttttttcagccccacattcctctccagaatggcctctgccctacagcacctggcccatgtggcaccccatgggcctgtcctctgctgttgtgaggtcgacctcacgacccagcacaggagctggaggcgaggtgcacgcgaggctctccacagcccaggaaggcagcctgtcaccctgctctccgagccaggggccaaggtgtggggggcacaggccatcctcatcctgccaggcccccgctttcaggagtggggtggtgccaatgctcccactcagaaccctggactgcggggtcccctgagcagagggaccagccagttccccatagacagattggtgctggacaggggctgcctgggccccaggcttggggagggtagaaaggccctgcagtgctgctgcctgggcccggaggtgggcctggccccgtagcagcattggaggccagagcccaagccagttccggagtcacacccaacggcggagggagaacctacccatctcccaccttcagctctggggaggcatgctctgggcctctggagccagggctcaggcccccaactctcctccttgcccctgcaccctcggacttggcctggccagaagggatgggggcaagaggaaggcagccaggggctccagcccatgccctcacagatttggctctcgagttggggagcgaagggctgggggaggacactgggaaccgggccagccgtggccctgcacttcccccagggagcaccaaggctaggcgcggcttcaccgcggggctgggtcgtggccagcttcgcccctgggtctgaagacctctgggcggcccaggccaaccttgccctgccgccgcacactcggctgccttctcatacccaggcttggggatttccaggtcccgttcccctcgtggcctggctgccagtcctccagcacccctca

SEQ ID NO: 2446 - DNA, 3244 bp, Homo sapiens
agcgggttgcccggggaccgggcccgcgttctgggtggcgtcctcgtccggcatgggccggggctggcaggctgcggggctcgcctgccgggagggtcgggctgcagaggctccgcgccctgccgtgggcgaccccgtctacctctggcggaggccccgcccggtcacgccgacctctccggtgcagccaccgcgctgagatctggagccacggcctccctgcttctccgtaaccaccagcaaccagcttgcccggctccggtccaggggttcccctggcctccgggcgagcgtccctgtctatgacatggtgcattacggccactccaaccagctgcgccaggcacgggccatgggtgactacctcatcgtaggcgtgcacaccgatgaggagatcgccaagcacaaggggcccccggtgttcactcaggaggagagatacaagatggtgcaggccatcaaatgggtggacgaggtggtgccagcggctccctacgtcactacactagagaccctggacaaatacaactgtgacttctgtgttcacggcaatgacatcaccctgactgtagatggccgggacacctatgaggaagtaaagcaggctgggaggtacagagaatgcaagcgcacgcaaggggagatgtcctctgagtaccgggagtatgcagacagttttggcaagtgccctggtgggcggaacccctggaccggggtatcccagttcctgcagacatctcagaagatcatccagtttgcttctgggaaggagccccagccaggggagacagtcatctatgtggctggtgccttcgacctgttccacatcgggcatgtggacttcctggagaaggtgcacaggctggcagagaggccctacatcatcgcgggcttacactttgaccaggaggtcaatcactacaaggggaagaactaccccatcatgaatctgcatgaacggactctgagcgtgctggcctgccggtacgtgtcagaagtggtgattggagccccgtacgcggtcacagcagagctcctaagtcacttcaaggtggacctggtgtgtcacggcaagacagaaattatccctgacagggatggctccgacccataccaggagcccaagagaaggggcatcttccgtcagattgacagtggcagcaacctcaccacagacctcatcgtccagcggatcatcaccaacaggttggagtatgaggcgcgaaaccagaagaaggaagccaaggagctggccttcctggaggctgccaggcagcaggcggcacagcccctgggggagcgcgatggtgacttctaacctggcagaggccctggccggccctccccctgctctgcttctgcgccttctgcgtttggacataggactctgcagggccgccctctctaactggcctggctctggaagggctggtgaggactctgcctccttgcctgcctacaaggtgcctggtttgcagcaggctctccgctctttccagcaaagctgctcagagagggtgtccagcacagtggagaggccggaagtgagacgggcagacggcacctgcagcctgaaacgcaccgctcctgcgtgcgcccccacctggtccccggatgcccccaccacctggacagaggccacactgactgcccacccagctgtggcgggaggtgcagagcagagggctttagggagcagtgactgcggtcacccctttagttctctgggtgtagaccacaccacctcccactgggcaccccccaacacggtgtcctgccacccagcgcctggctccaggaaaacacgcttgccttccttcccggcagcttcgccactctccttatggactctgttctgtttgtacatggctgacggaaatctctttggtacaaccgaataaagcctggtggcagtgctgcgcggggctcccagccctgctgggaaggaccagggaaccactcagcaaggagaccctcttggccctgcccccaccatgcacccagcagccgggagtgcagcgggcagcctggcagtgagtgaaacccaggcctccagccctccaaagcctggggccaccccctgtagcaggcgatgctagaataaggaggagagccagagctgaggctccttgccccttggcccctccaggggccatgggatctctgtctcccacacccctgtcacggcccgcctggagcagcccagaggccgaagaggttcttactgcagcctccgggaggtgtctagggaggccatagattgcctggtctcgccgcattcaaaatgaggcttatgatcagtacttttttcagccccacattcctctccagaatggcctctgccctacagcacctggcccatgtggcaccccatgggcctgtcctctgctgttgtgaggtcgacctcacgacccagcacaggagctggaggcgaggtgcacgcgaggctctccacagcccaggaaggcagcctgtcaccctgctctccgagccaggggccaaggtgtggggggcacaggccatcctcatcctgccaggcccccgctttcaggagtggggtggtgccaatgctcccactcagaaccctggactgcggggtcccctgagcagagggaccagccagttccccatagacagattggtgctggacaggggctgcctgggccccaggcttggggagggtagaaaggccctgcagtgctgctgcctgggcccggaggtgggcctggccccgtagcagcattggaggccagagcccaagccagttccggagtcacacccaacggcggagggagaacctacccatctcccaccttcagctctggggaggcatgctctgggcctctggagccagggctcaggcccccaactctcctccttgcccctgcaccctcggacttggcctggccagaagggatgggggcaagaggaaggcagccaggggctccagcccatgccctcacagatttggctctcgagttggggagcgaagggctgggggaggacactgggaaccgggccagccgtggccctgcacttcccccagggagcaccaaggctaggcgcggcttcaccgcggggctgggtcgtggccagcttcgcccctgggtctgaagacctctgggcggcccaggccaaccttgccctgccgccgcacactcggctgccttctcatacccaggcttggggatttccaggtcccgttcccctcgtggcctggctgccagtcctccagcacccctca

SEQ ID NO: 2447 - DNA, 3366 bp, Homo sapiens
  misc_feature (27)..(27): n is a, c, g, or t
agggcttttgggtttacccggcccccncctgatgtactgtgatatctgtcgatccagcgctcctctggatgtgccaggctgtccgcgccgccgctgcggggccatgatccggaacgggcgcggggctgcaggcggcgcagagcagccgggcccggggggcaggcgcgccgtgagggtgtggtgcgatggctgccaccgcgctgagatctggagccacggcctccctgcttctccgtaaccaccagcaaccagcttgcccggctccggtccaggggttcccctggcctccgggcgagcgtccctgtctatgacatggtgcattacggccactccaaccagctgcgccaggcacgggccatgggtgactacctcatcgtaggcgtgcacaccgatgaggagatcgccaagcacaaggggcccccggtgttcactcaggaggagagatacaagatggtgcaggccatcaaatgggtggacgaggtggtgccagcggctccctacgtcactacactagagaccctggacaaatacaactgtgacttctgtgttcacggcaatgacatcaccctgactgtagatggccgggacacctatgaggaagtaaagcaggctgggaggtacagagaatgcaagcgcacgcaaggggtgtccaccacagacctcgtgggccgcatgctgctggtaaccaaagcccatcacagcagccaggagatgtcctctgagtaccgggagtatgcagacagttttggcaagccccctcacccgatacccgccggggacatactttcctcagaaggctgctcccagtgccctggtgggcggaacccctggaccggggtatcccagttcctgcagacatctcagaagatcatccagtttgcttctgggaaggagccccagccaggggagacagtcatctatgtggctggtgccttcgacctgttccacatcgggcatgtggacttcctggagaaggtgcacaggctggcagagaggccctacatcatcgcgggcttacactttgaccaggaggtcaatcactacaaggggaagaactaccccatcatgaatctgcatgaacggactctgagcgtgctggcctgccggtacgtgtcagaagtggtgattggagccccgtacgcggtcacagcagagctcctaagtcacttcaaggtggacctggtgtgtcacggcaagacagaaattatccctgacagggatggctccgacccataccaggagcccaagagaaggggcatcttccgtcagattgacagtggcagcaacctcaccacagacctcatcgtccagcggatcatcaccaacaggttggagtatgaggcgcgaaaccagaagaaggaagccaaggagctggccttcctggaggctgccaggcagcaggcggcacagcccctgggggagcgcgatggtgacttctaacctggcagaggccctggccggccctccccctgctctgcttctgcgccttctgcgtttggacataggactctgcagggccgccctctctaactggcctggctctggaagggctggtgaggactctgcctccttgcctgcctacaaggtgcctggtttgcagcaggctctccgctctttccagcaaagctgctcagagagggtgtccagcacagtggagaggccggaagtgagacgggcagacggcacctgcagcctgaaacgcaccgctcctgcgtgcgcccccacctggtccccggatgcccccaccacctggacagaggccacactgactgcccacccagctgtggcgggaggtgcagagcagagggctttagggagcagtgactgcggtcacccctttagttctctgggtgtagaccacaccacctcccactgggcaccccccaacacggtgtcctgccacccagcgcctggctccaggaaaacacgcttgccttccttcccggcagcttcgccactctccttatggactctgttctgtttgtacatggctgacggaaatctctttggtacaaccgaataaagcctggtggcagtgctgcgcggggctcccagccctgctgggaaggaccagggaaccactcagcaaggagaccctcttggccctgcccccaccatgcacccagcagccgggagtgcagcgggcagcctggcagtgagtgaaacccaggcctccagccctccaaagcctggggccaccccctgtagcaggcgatgctagaataaggaggagagccagagctgaggctccttgccccttggcccctccaggggccatgggatctctgtctcccacacccctgtcacggcccgcctggagcagcccagaggccgaagaggttcttactgcagcctccgggaggtgtctagggaggccatagattgcctggtctcgccgcattcaaaatgaggcttatgatcagtacttttttcagccccacattcctctccagaatggcctctgccctacagcacctggcccatgtggcaccccatgggcctgtcctctgctgttgtgaggtcgacctcacgacccagcacaggagctggaggcgaggtgcacgcgaggctctccacagcccaggaaggcagcctgtcaccctgctctccgagccaggggccaaggtgtggggggcacaggccatcctcatcctgccaggcccccgctttcaggagtggggtggtgccaatgctcccactcagaaccctggactgcggggtcccctgagcagagggaccagccagttccccatagacagattggtgctggacaggggctgcctgggccccaggcttggggagggtagaaaggccctgcagtgctgctgcctgggcccggaggtgggcctggccccgtagcagcattggaggccagagcccaagccagttccggagtcacacccaacggcggagggagaacctacccatctcccaccttcagctctggggaggcatgctctgggcctctggagccagggctcaggcccccaactctcctccttgcccctgcaccctcggacttggcctggccagaagggatgggggcaagaggaaggcagccaggggctccagcccatgccctcacagatttggctctcgagttggggagcgaagggctgggggaggacactgggaaccgggccagccgtggccctgcacttcccccagggagcaccaaggctaggcgcggcttcaccgcggggctgggtcgtggccagcttcgcccctgggtctgaagacctctgggcggcccaggccaaccttgccctgccgccgcacactcggctgccttctcatacccaggcttggggatttccaggtcccgttcccctcgtggcctggctgccagtcctccagcacccctca

SEQ ID NO: 2448 - DNA, 2408 bp, Homo sapiens
gacagccgggaggggcacaccctgtccccccaaaaagtctccgggctgagctagccgcactctggccgcaggaggtcaatcactacaaggggaagaactaccccatcatgaatctgcatgaacggactctgagcgtgctggcctgccggtacgtgtcagaagtggtgattggagccccgtacgcggtcacagcagagctcctaagtcacttcaaggtggacctggtgtgtcacggcaagacagaaattatccctgacagggatggctccgacccataccaggagcccaagagaaggggcatcttccgtcagattgacagtggcagcaacctcaccacagacctcatcgtccagcggatcatcaccaacaggttggagtatgaggcgcgaaaccagaagaaggaagccaaggagctggccttcctggaggctgccaggcagcaggcggcacagcccctgggggagcgcgatggtgacttctaacctggcagaggccctggccggccctccccctgctctgcttctgcgccttctgcgtttggacataggactctgcagggccgccctctctaactggcctggctctggaagggctggtgaggactctgcctccttgcctgcctacaaggtgcctggtttgcagcaggctctccgctctttccagcaaagctgctcagagagggtgtccagcacagtggagaggccggaagtgagacgggcagacggcacctgcagcctgaaacgcaccgctcctgcgtgcgcccccacctggtccccggatgcccccaccacctggacagaggccacactgactgcccacccagctgtggcgggaggtgcagagcagagggctttagggagcagtgactgcggtcacccctttagttctctgggtgtagaccacaccacctcccactgggcaccccccaacacggtgtcctgccacccagcgcctggctccaggaaaacacgcttgccttccttcccggcagcttcgccactctccttatggactctgttctgtttgtacatggctgacggaaatctctttggtacaaccgaataaagcctggtggcagtgctgcgcggggctcccagccctgctgggaaggaccagggaaccactcagcaaggagaccctcttggccctgcccccaccatgcacccagcagccgggagtgcagcgggcagcctggcagtgagtgaaacccaggcctccagccctccaaagcctggggccaccccctgtagcaggcgatgctagaataaggaggagagccagagctgaggctccttgccccttggcccctccaggggccatgggatctctgtctcccacacccctgtcacggcccgcctggagcagcccagaggccgaagaggttcttactgcagcctccgggaggtgtctagggaggccatagattgcctggtctcgccgcattcaaaatgaggcttatgatcagtacttttttcagccccacattcctctccagaatggcctctgccctacagcacctggcccatgtggcaccccatgggcctgtcctctgctgttgtgaggtcgacctcacgacccagcacaggagctggaggcgaggtgcacgcgaggctctccacagcccaggaaggcagcctgtcaccctgctctccgagccaggggccaaggtgtggggggcacaggccatcctcatcctgccaggcccccgctttcaggagtggggtggtgccaatgctcccactcagaaccctggactgcggggtcccctgagcagagggaccagccagttccccatagacagattggtgctggacaggggctgcctgggccccaggcttggggagggtagaaaggccctgcagtgctgctgcctgggcccggaggtgggcctggccccgtagcagcattggaggccagagcccaagccagttccggagtcacacccaacggcggagggagaacctacccatctcccaccttcagctctggggaggcatgctctgggcctctggagccagggctcaggcccccaactctcctccttgcccctgcaccctcggacttggcctggccagaagggatgggggcaagaggaaggcagccaggggctccagcccatgccctcacagatttggctctcgagttggggagcgaagggctgggggaggacactgggaaccgggccagccgtggccctgcacttcccccagggagcaccaaggctaggcgcggcttcaccgcggggctgggtcgtggccagcttcgcccctgggtctgaagacctctgggcggcccaggccaaccttgccctgccgccgcacactcggctgccttctcatacccaggcttggggatttccaggtcccgttcccctcgtggcctggctgccagtcctccagcacccctca

SEQ ID NO: 2449 - DNA, 1146 bp, Homo sapiens
ggcagcgagcggcctggcggggcgggcggcggcgctcggagtcgccgggagctgccaggctgtccgcgccgccgctgcggggccatgatccggaacgggcgcggggctgcaggcggcgcagagcagccgggcccggggggcaggcgcgccgtgagggtgtggtgcgatggctgctatgacatggtgcattacggccactccaaccagctgcgccaggcacgggccatgggtgactacctcatcgtaggcgtgcacaccgatgaggagatcgccaagcacaaggggcccccggtgttcactcaggaggagagatacaagatggtgcaggccatcaaatgggtggacgaggtggtgccagcggctccctacgtcactacactagagaccctggacaaatacaactgtgacttctgtgttcacggcaatgacatcaccctgactgtagatggccgggacacctatgaggaagtaaagcaggctgggaggtacagagaatgcaagcgcacgcaaggggtgtccaccacagacctcgtgggccgcatgctgctggtaaccaaagcccatcacagcagccaggagatgtcctctgagtaccgggagtatgcagacagttttggcaagtgccctggtgggcggaacccctggaccggggtatcccagttcctgcagacatctcagaagatcatccagtttgcttctgggaaggagccccagccaggggagacagtcatctatgtggctggtgccttcgacctgttccacatcgggcatgtggacttcctggagaaggtgcacaggctggcagagaggccctacatcatcgcgggcttacactttgaccaggaggtcaatcactacaaggggaagaactaccccatcatgaatctgcatgaacggactctgagcgtgctggcctgccggtacgtgtcagaagtggtgattggagccccgtacgcggtcacagcagagctcctaagtcacttcaaggagcccaagagaaggggcatcttccgtcagattgacagtggcagcaacctcaccacagacctcatcgtccagcggatcatcaccaacaggttggagtatgaggcgcgaaaccagaagaaggaagccaaggaggtctttctggaggtgcaaagacagtag

SEQ ID NO: 2450 - DNA, 2957 bp, Homo sapiens
tagctaggtacgagcctgtgtgttgaattggccgaggctgtgccgaatgacatgaggtgccaggctgtccgcgccgccgctgcggggccatgatccggaacgggcgcggggctgcaggcggcgcagagcagccgggcccggggggcaggcgcgccgtgagggtgtggtgcgatggctgctatgacatggtgcattacggccactccaaccagctgcgccaggcacgggccatgggtgactacctcatcgtaggcgtgcacaccgatgatgacatcaccctgactgtagatggccgggacacctatgaggaagtaaagcaggctgggaggtacagagaatgcaagcgcacgcaaggggtgtccaccacagacctcgtgggccgcatgctgctggtaaccaaagcccatcacagcagccaggagatgtcctctgagtaccgggagtatgcagacagttttggcaagtgccctggtgggcggaacccctggaccggggtatcccagttcctgcagacatctcagaagatcatccagtttgcttctgggaaggagccccagccaggggagacagtcatctatgtggctggtgccttcgacctgttccacatcgggcatgtggacttcctggagaaggtgcacaggctggcagagaggccctacatcatcgcgggcttacactttgaccaggaggtcaatcactacaaggggaagaactaccccatcatgaatctgcatgaacggactctgagcgtgctggcctgccggtacgtgtcagaagtggtgattggagccccgtacgcggtcacagcagagctcctaagtcacttcaaggagcccaagagaaggggcatcttccgtcagattgacagtggcagcaacctcaccacagacctcatcgtccagcggatcatcaccaacaggttggagtatgaggcgcgaaaccagaagaaggaagccaaggagctggccttcctggaggctgccaggcagcaggcggcacagcccctgggggagcgcgatggtgacttctaacctggcagaggccctggccggccctccccctgctctgcttctgcgccttctgcgtttggacataggactctgcagggccgccctctctaactggcctggctctggaagggctggtgaggactctgcctccttgcctgcctacaaggtgcctggtttgcagcaggctctccgctctttccagcaaagctgctcagagagggtgtccagcacagtggagaggccggaagtgagacgggcagacggcacctgcagcctgaaacgcaccgctcctgcgtgcgcccccacctggtccccggatgcccccaccacctggacagaggccacactgactgcccacccagctgtggcgggaggtgcagagcagagggctttagggagcagtgactgcggtcacccctttagttctctgggtgtagaccacaccacctcccactgggcaccccccaacacggtgtcctgccacccagcgcctggctccaggaaaacacgcttgccttccttcccggcagcttcgccactctccttatggactctgttctgtttgtacatggctgacggaaatctctttggtacaaccgaataaagcctggtggcagtgctgcgcggggctcccagccctgctgggaaggaccagggaaccactcagcaaggagaccctcttggccctgcccccaccatgcacccagcagccgggagtgcagcgggcagcctggcagtgagtgaaacccaggcctccagccctccaaagcctggggccaccccctgtagcaggcgatgctagaataaggaggagagccagagctgaggctccttgccccttggcccctccaggggccatgggatctctgtctcccacacccctgtcacggcccgcctggagcagcccagaggccgaagaggttcttactgcagcctccgggaggtgtctagggaggccatagattgcctggtctcgccgcattcaaaatgaggcttatgatcagtacttttttcagccccacattcctctccagaatggcctctgccctacagcacctggcccatgtggcaccccatgggcctgtcctctgctgttgtgaggtcgacctcacgacccagcacaggagctggaggcgaggtgcacgcgaggctctccacagcccaggaaggcagcctgtcaccctgctctccgagccaggggccaaggtgtggggggcacaggccatcctcatcctgccaggcccccgctttcaggagtggggtggtgccaatgctcccactcagaaccctggactgcggggtcccctgagcagagggaccagccagttccccatagacagattggtgctggacaggggctgcctgggccccaggcttggggagggtagaaaggccctgcagtgctgctgcctgggcccggaggtgggcctggccccgtagcagcattggaggccagagcccaagccagttccggagtcacacccaacggcggagggagaacctacccatctcccaccttcagctctggggaggcatgctctgggcctctggagccagggctcaggcccccaactctcctccttgcccctgcaccctcggacttggcctggccagaagggatgggggcaagaggaaggcagccaggggctccagcccatgccctcacagatttggctctcgagttggggagcgaagggctgggggaggacactgggaaccgggccagccgtggccctgcacttcccccagggagcaccaaggctaggcgcggcttcaccgcggggctgggtcgtggccagcttcgcccctgggtctgaagacctctgggcggcccaggccaaccttgccctgccgccgcacactcggctgccttctcatacccaggcttggggatttccaggtcccgttcccctcgtggcctggctgccagtcctccagcacccctca

SEQ ID NO: 2451 - DNA, 2398 bp, Homo sapiens
tgattgactcatgatggatcccatggtactcctcatctgcgtgctttacactcttgactcggagtgtaatcacgacatggtgaaaatccatcccgttatgaatcagtctaaacggacgcttaccgtgctggcctgccgctacgtgtcacaacttctgactgggaacccccctgcggtcacagcagagctcctaagtcacttcaaggtggacctggtgtgtcacggcaagacagaaattatccctgacagggatggctccgacccataccaggagcccaagagaaggggcatcttccgtcagattgacagtggcagcaacctcaccacagacctcatcgtccagcggatcatcaccaacaggttggagtatgaggcgcgaaaccagaagaaggaagccaaggagctggccttcctggaggctgccaggcagcaggcggcacagcccctgggggagcgcgatggtgacttctaacctggcagaggccctggccggccctccccctgctctgcttctgcgccttctgcgtttggacataggactctgcagggccgccctctctaactggcctggctctggaagggctggtgaggactctgcctccttgcctgcctacaaggtgcctggtttgcagcaggctctccgctctttccagcaaagctgctcagagagggtgtccagcacagtggagaggccggaagtgagacgggcagacggcacctgcagcctgaaacgcaccgctcctgcgtgcgcccccacctggtccccggatgcccccaccacctggacagaggccacactgactgcccacccagctgtggcgggaggtgcagagcagagggctttagggagcagtgactgcggtcacccctttagttctctgggtgtagaccacaccacctcccactgggcaccccccaacacggtgtcctgccacccagcgcctggctccaggaaaacacgcttgccttccttcccggcagcttcgccactctccttatggactctgttctgtttgtacatggctgacggaaatctctttggtacaaccgaataaagcctggtggcagtgctgcgcggggctcccagccctgctgggaaggaccagggaaccactcagcaaggagaccctcttggccctgcccccaccatgcacccagcagccgggagtgcagcgggcagcctggcagtgagtgaaacccaggcctccagccctccaaagcctggggccaccccctgtagcaggcgatgctagaataaggaggagagccagagctgaggctccttgccccttggcccctccaggggccatgggatctctgtctcccacacccctgtcacggcccgcctggagcagcccagaggccgaagaggttcttactgcagcctccgggaggtgtctagggaggccatagattgcctggtctcgccgcattcaaaatgaggcttatgatcagtacttttttcagccccacattcctctccagaatggcctctgccctacagcacctggcccatgtggcaccccatgggcctgtcctctgctgttgtgaggtcgacctcacgacccagcacaggagctggaggcgaggtgcacgcgaggctctccacagcccaggaaggcagcctgtcaccctgctctccgagccaggggccaaggtgtggggggcacaggccatcctcatcctgccaggcccccgctttcaggagtggggtggtgccaatgctcccactcagaaccctggactgcggggtcccctgagcagagggaccagccagttccccatagacagattggtgctggacaggggctgcctgggccccaggcttggggagggtagaaaggccctgcagtgctgctgcctgggcccggaggtgggcctggccccgtagcagcattggaggccagagcccaagccagttccggagtcacacccaacggcggagggagaacctacccatctcccaccttcagctctggggaggcatgctctgggcctctggagccagggctcaggcccccaactctcctccttgcccctgcaccctcggacttggcctggccagaagggatgggggcaagaggaaggcagccaggggctccagcccatgccctcacagatttggctctcgagttggggagcgaagggctgggggaggacactgggaaccgggccagccgtggccctgcacttcccccagggagcaccaaggctaggcgcggcttcaccgcggggctgggtcgtggccagcttcgcccctgggtctgaagacctctgggcggcccaggccaaccttgccctgccgccgcacactcggctgccttctcatacccaggcttggggatttccaggtcccgttcccctcgtggcctggctgccagtcctccagcacccctca

SEQ ID NO: 2452 - DNA, 1044 bp, Homo sapiens
ggcagcgagcggcctggcggggcgggcggcggcgctcggagtcgccgggagctgccaggctgtccgcgccgccgctgcggggccatgatccggaacgggcgcggggctgcaggcggcgcagagcagccgggcccggggggcaggcgcgccgtgagggtgtggtgcgatggctgctatgacatggtgcattacggccactccaaccagctgcgccaggcacgggccatgggtgactacctcatcgtaggcgtgcacaccgatgaggagatcgccaagcacaaggggcccccggtgttcactcaggaggagagatacaagatggtgcaggccatcaaatgggtggacgaggtggtgccagcggctccctacgtcactacactagagaccctggacaaatacaactgtgacttctgtgttcacggcaatgacatcaccctgactgtagatggccgggacacctatgaggaagtaaagcaggctgggaggtacagagaatgcaagcgcacgcaaggggtgtccaccacagacctcgtgggccgcatgctgctggtaaccaaagcccatcacagcagccaggtgagtcggcggcggaatccccgaggcccctgggtcgaggtctccaggggaaaggaggggcacctccctgccctctcagggtcctcctgcccactgctccccatccccagccggttctggggtggccacgccgggagggcaggcccctcagccctgctctgaccttctgtgcaggagatgtcctctgagtaccgggagtatgcagacagttttggcaagtgccctggtgggcggaacccctggaccggggtatcccagttcctgcagacatctcagaagatcatccagtttgcttctgggaaggagccccagccaggggagacagtcatctatgtggctggtgccttcgacctgttccacatcgggcatgtggacttcctggagaaggtgcacaggctggcagagaggccctacatcatcgcgggcttacactttgaccaggtcactcccttcaagctccctgggccc

SEQ ID NO: 2453 - DNA, 821 bp, Homo sapiens
  misc_feature (27)..(27): n is a, c, g, or t
agggcttttgggtttacccggcccccncctgatgtactgtgatatctgtcgatccagcgctcctctggatgtgccaggctgtccgcgccgccgctgcggggccatgatccggaacgggcgcggggctgcaggcggcgcagagcagccgggcccggggggcaggcgcgccgtgagggtgtggtgcgatggctgctatgacatggtgcattacggccactccaaccagctgcgccaggcacgggccatgggtgactacctcatcgtaggcgtgcacaccgatggaggagagatacaagatggtgcaggccatcaaatgggtggacgaggtggtgccagcggctccctacgtcactacactagagaccctggacaaatacaactgtgacttctgtgttcacggcaatgacatcaccctgactgtagatggccgggacacctatgaggaagtaaagcaggctgggaggtacagagaatgcaagcgcacgcaaggggtgtccaccacagacctcgtgggccgcatgctgctggtaaccaaagcccatcacagcagccaggagatgtcctctgagtaccgggagtatgcagacagttttggcaagtgccctggtgggcggaacccctggaccggggtatcccagttcctgcagacatctcagaagattcgaaagttccccgaaagattatattgggcgttttcccattggcggacggcaaaaaaggccgggcaacgggacaccaacaacgaaagagccacaacacgaaagtgcggggaaggcaaaagcggaaaccgaaaaggtaatatcccgaagttttccctttac

SEQ ID NO: 2454 - DNA, 2694 bp, Homo sapiens
  misc_feature (1217)..(1217): n is a, c, g, or t
  misc_feature (1255)..(1255): n is a, c, g, or t
  misc_feature (1270)..(1270): n is a, c, g, or t
  misc_feature (1310)..(1310): n is a, c, g, or t
  misc_feature (1314)..(1314): n is a, c, g, or t
  misc_feature (1738)..(1738): n is a, c, g, or t
  misc_feature (2203)..(2203): n is a, c, g, or t
aatatctagtcctgtagcaaatttggaaaataaagaaaggtataaggaagaaaattaaaatcactcctgagtctatcccacgttcatagccaccactgaggctgtagtcctttgagcataaatgtatattcagcaacattaagctcattctctatgattatgaatctgcatttttccaagtgaaaagagatgtcatgaattgaaaagatccttccaaagcaccattgctaatggctcttccagttgtcacagatgtgtgacatttgtcgcctgttccccccacttctgacttatgatactgcagttgttcgcatgtttccctcttgtgaataacgcttcaggaacggcctcatcatctcaaagctttgctcttgtctttaggacgctgccctgtgagccgctcgcccagctactttgcacagcaagacatcaccttgtagctgttcttgagcggtgcactggcatccaggccagtagtgtggttgcctcacccccagctcctcctacaagttctagaaggcctctctctggttcagctcttggcagctcagtaaagataagacctgcccacagccctggggatgggcggagactgggggattagaggagccagaggtcacctccaactgccatttagctcttagtgggctcttcagctggatctggaaaccagattgacagcaggcagattaataagaatagcataccaattgtattggttttacatatacatggggatcttctgcaagagagcgaaatgcaaagaagtgacccaagcaagacgcttttgtactttttgacaaagaatgataaatttgaaaagaaacgacagggcaaagaaaatctggctaggacagtaaattttctagtggagtccctaggacatatacaggtggtgtaaagcagtggaagatgagggctactccattatgtatgtttactcaggcccactgcagcctccagtgcccagcctctggtgacaagggccattttcttgccctggtgcagagaggggaccccttccagaggcatctctatcactggctgcatgtaggaagcgacaggtcagctcaccctttctgaaactatagtttctccaatgtttcaacatgatatagtcagtataatcaggcatatgtgaggatggcctgtccttcactctttcagaggcatggaataatatactttttttttttttgagacagagtcttgctctnttgcccaggctggagtgcagtggtgtgatcttggctcnctgcaacctctgccncctgggttcaagcgattctcctgcctcagcctcccgagtngctnggattacaggcgcgcgccaccacccccagctaatttttgtatttttcttggagatgggatttcaccatgttggccaggctggtctcaaactcctgacctcaagtgatccacctgcctcagcctcccaaagtgctaggatttcaggcgtgaggcaccacaccaatacacttctcaaactaggggggcttgtacccactgttacacgggccccatgcttgtgtaatgttctgctgtcagcacccggagactctgaatcattttaaacaaggggctctttgtcattttgcccggggtctcacagcttacacagtgggttccactgacttgagccgtcctcatccttagagaccttcaccttttagacctcagagctttgctgcctttaaacaaagacaccttgtggtgaaaacccccaggcccagtngcgatttcctggcttcctcaccttgatggcacagaccaggggcagattctggagtcctggcagctcaactgggaacggggatttggctccaggaagtgttcattatttatgaacctccaaatcctaaatccatcagtggccgtgtgtggccacagtggggcaggctggccggcagcccagctgctcctggaatgagcttagagtcacccctcccggtggaggcagaagctcgctgggcccccagcgcggctccacgcccctcctccaggtggcttgggtgagagcctctgtcctgtgaagtaactgccaaaaactgccagatcccctggagccatcgtccgacccgatggatacccacccactccacccagcccagctgctcccttcacctttttaaccctgagaatgtgctcagaaggttccagcactgcagtcctcatgcaggaagatgagctgccactgggnatctccatccagatgccactgccctgggatgggccccacctgggtcaggcgcccagggacccagctgcctccaccacttctgtgtgctggtcacttgtgcatgtggtcacaaggtgcctggccctccatgtctctgaaagagcccgtcactccttcgcgatggtgtgctgagatggcaagaagccgtcttttatagaaactgtctctgggccgaaggccgtgggtcatgcctgtaatcccagcactttcagaggctgagaagggtagatcacctgagctcaggagttcaagaccagcctgggcaacatgatgaaaactcatctctaccaaaaatacaaaaaaattagccaggtgtgatggcacatgcctgtggtcccagctactcaggaggctgaggtgggtgtatcgcttgagcctgggaggcggaggttgcagtgaaccaagattgcaccactgcattccaacctgggtgacagagtgagaccctgtca

SEQ ID NO: 2455 - DNA, 194 bp, Homo sapiens
caaggctggggaagagaatagttagcaaaagaggcagaagtggacccattgttagaatgatgaataccagaggttgggaaggacgtgtgtgtggggtgcggggaatgaagaaaggctggtcaaacgatacaaacatacagccagatggaaggactacattctaatgttccatagcaaccatgaactgtatactt

SEQ ID NO: 2456 - DNA, 314 bp, Homo sapiens
aggatgagctggcccttcttcaagtcaagtctagccccctcaccctgtccacacctcctcaaaaaacagctccaaagtctcctggtctcttttccctctatcattcccatctgcacacaaacatgctataatttctcccatcttataaacatcccactggaactttcagaagcattttagattctccattttccttaaagttcactattcaccaaactgcaaaatatctgtcgctctgtcacctaggctggagtgcagtggcgtgatctcggctcactgcaacctctgcctctcagcttcaagcaattctcgtg

SEQ ID NO: 2457 - DNA, 368 bp, Homo sapiens
ggattttcagattagggatgctcaaccaggaagtataatgcaaatattccaaaatccaaaggaaaaaaaatctgaaattggaaacgcatctgatcccaagcattttggataaggggtactcaacttgtactaccgtaacatactacatacttttagaaaagaataaggtgaatctagatgcactgatagagtaggtaaattgttgaagtctaaaaaacaagtgagagaacactgtaaatagcccagtctattggtgtcaacagaggtcctcttggaagcaaggtaattttttgaaagatgcaaagaggtagtgagaggggtatcaagagagtagagggccaggtgaggtggctcatacctgtaatccc

SEQ ID NO: 2458 - DNA, 426 bp, Homo sapiens
ggtagagacaaggtttcaccatgttgcccagactggtctggaactcctggggttgcaggcatgagccaccatgcctggcctgactatactacttaagggtcagggacttcaacaatttcctgttgaatgcaggaaattgcctggagctcagtaattaaatgctacctgcgtgtttcctacttaatggcattctggtggtgagcagtgacgtagcccataatatgagggaaagcagggagatggttggagatgtaggcgttaaacgcttaatgaccagcatttctccttgatgtgcctagagcaaaatgattcagtttcatctcacccacagcatgcctcttaaatacgcatcctcaaagaaaaatgaaaggtaggaagtagggaaaacccaaatcacagcagagaaactggaaacttggtgaggtt

SEQ ID NO: 2459 - DNA, 432 bp, Homo sapiens
gagaactgctttctggcttctctctttcacatcacactgaaggcccacacaagtggtacttggaactgtgcaggagagaagactctttggtggaagtaaggaggaggatcacctgctcacgtttgctaagggcatttgcttgaaatgcgtgtgtgggagggagtctgtcttcaaacctagacacaaaagagattttatttgctttcatgatttcttttctctcccttctcatatttttactccaaagtgtgtgcaaattattcaagcatctgggacctaatgcaccatcactcactgcagcttttattaaactttgtgccattcacaactgaatagcagtgaagttaattaatggccaaattagttggaagttatttggaatctatattgcatcaatttctatgtttttggcaagaagaatagaaaaaagaa

SEQ ID NO: 2460 - DNA, 336 bp, Homo sapiens
gcagaccacttgaggtcaggagttcaagaccagcctggccaacatggtgaaaccctgtctctactaaaaacacaaaaaataaaaaataaaaataaacaaataaataaataaataaataactgagcgtgatggcacacgcctgtgatcctagctacttgggaggctgaggcaggagaatcgcttgaacccaggaggtggaggttgcagtgagctgagatcgtgccactgtactccagcctgggtgacagagcaagactctgtctcaaaaaaaagaattacatattatagaaaacacataagaagctgaattatgaattgtggtctataatatatagt

SEQ ID NO: 2461 - DNA, 1197 bp, Homo sapiens
taggtaagaagtagtagggtcctaagttcaagggttggtatcaggaatggaaaggatcaaaaagtttccagagactgtgaaggacagaatgactcccttacttatgtcactgcctcttgggtagagagatgtttatcatgacaggcgcctacttcattagatcagatcatcatccttggcaaaatgtatatcggtggataaattagacctatacaatactgttaggacaagtggatgcttcttttagcaagagtttggccctgggagaacgtatttctgctcagatgaaaaaccattaatttgagagacagcatacatagtgaaagacacctgggctttggacaacaaaagtccctttgataaagtccaaatacctcataatacactatattgtctaaattacttactatctgtgagccttactgtgttcatctgtaacatgggatcataatatttaccttgtataatggtaagttttatgtgtcaacttggctaggtcatggtatccagatatttggacaaacattagatgtttcagtgaaggtattttttagatgagattaacaatgaaatcagtagactttgaggaaagctgattactcttaataatgtgtatgattttcatccaatcagctgaagaccttagtagaaaaatgctgacttcccctaagcaagaaggaattctggcagcaaacagccattgacttgcagccttttccctagacctgcagcccgcctacctactctgaagattttggagttgccaagcctccacaaccatataagccaatacctttctctctctttctctcttttctctctcttaaactgcaaaaagcaaacaaacaaacaaacaaacagacagcaggttcaaaatggagtcactcatactagtgtcacataaccaaaccaaaacttgcgttatttacttgcaagatttgaccttgtgagaaatcagaagagagataacagtggaatccaactaggccaacaagattttgcttacatctgtagaagaaaagtaaccttgaaatgaccaaccctctatttgttctttatttctgcttttctcttcttttttctgcccataaaactcacccactctgtttagctcatcagagtttctttctactttgtagactggatgctgcccagttcatgaatcgctaataaaagccaatcagatatttgaaactc

SEQ ID NO: 2462 - DNA, 760 bp, Homo sapiens
tgaagcagctactcattgctttttccttttgctgtgaagatcatggattgggaatgtcctcgtgaggtggacctaaggcagtaacatttaaacttcatgtcctagcacccgccctccatctgacccaaagataaaaaaggcatcaagcttcatggttatgcctaagcttaaaaattcccttccccactactaatattgagttcagcagggccccatcttacttatttttcaaaaaagttatagctttgaattatagactatattactaaatttggtaaggtagttctttgcatgaatgggaatgtgtgtcaaaatactttcacaaaaggcatgattacaatggaaatgcccctttgcctccagttttgctaaccctaaaaagtatttcactaatttcaagcactgtttacactcaaatcccaaaattggccaaattatataattctcttaaattttcatttctgtaggtggagatttaactatggttctggtgaatcatagaagggagagacaatatttgaggggagtttatcagcagaatatcatgccttatgaccccattactgaaacacagacattacaatcagaaatagacctaataattccaatatccctccattaactagttccagtgatgctgaggagacacagcaccctgtgccagggtattcaggaaatattaagcctcaggcaggaggggtaactgaaaactttcaatcagaaacactctccaaggcttatggctagattatgtaggtca

SEQ ID NO: 2463 - DNA, 351 bp, Homo sapiens
gtctagataagcccagctttcctggtacccttcatcacctggcagacagacagccccatgccaaccctggacattacttgcttttgaacctttcctttctcaacaaccatgaacttcaaatgctttctgtctcaggacactttagaataacaatggaagccatcacttattgagcaccccttatgtccatttattcaaccaatgattatttagggatctcttattgagcaccaggcagcatcctgggtgcttggtgcagcaaggaacaggaccaagtctctgcctcatggggctgacatcctagtgggtgagaaagacaataaaccaataaatgacatgccagttatttgc

SEQ ID NO: 2464 - DNA, 258 bp, Homo sapiens
gcacgaggagaaaggaaaggttcaaaagcaagtaatgtccaggacactttagaataacaatggaagccatcacttattgagcaccccttatgtccatttattcaaccaatgattatttagggatctcttattgagcaccaggcagcatcctgggtgcttggtgcagcaaggaacaggaccaagtctctgcctcatggggctgacatcctagtgggtgagaaagacaataaaccaataaatgacatgccagttatttgc

SEQ ID NO: 2465 - DNA, 448 bp, Homo sapiens
attatatccattattgttttgaacatggattctatttttctgacattaacataacagctttgagacatcagtatttgcatgacgtatccttttcaccctttaattttggaccatttttatgattttataaattatttcatttataataagtatatgtctggattggctgggtgtggtggctcatgcctgtaatctcagcactttgggaggctaaggcagacagataatcagaggccaggagtttgagaccagcctggccaatatggtgaaactccatctctactaaaaatacaaaaatgatccaggcatggtggctcatacccgtaatcccagctactcaggaggctgaggcaggagaatcacatgaacccaagaggtggaggttgcagtgagccaagattgagccactgtactccagcctgggcaacagagcaagacttggtctcag

SEQ ID NO: 2466 - DNA, 563 bp, Homo sapiens
gcggccgccggccaggatcgagccctggcccgggccctggcccagccccggcctccaaggaccgcgccgaaggaggtgcccactggagggaggaggcgctcgactttctcaggatactgtccctctcccacagaggagctgaaggagtaggacagaagaactgtcaaattctggaatccttaaagccatgtccaaggatttggtgacatttggggatgtggctgtaaatttctctcaagaggaatgggaatggctgaaccctgctcagaggaatttgtacaggaaagtgatgttggagaactacaggagcttggtatcattgggagtttctgtttctaagccagatgtgatctcattattggagcaaggaaaagagccctggatggtgaagaaggagggaacaagaggcccatgccctggtgagtgagagagaaatagggagacagaagccattgccaggaaaagctcagcaattctgaaagatttcagttcataattgacgtttcctgggtagctcttcttaaagactcaaagcctgggaagaaatattgaggcatctttag

SEQ ID NO: 2467 - DNA, 558 bp, Homo sapiens
ttgagacagagtctcgctctgtggcccagactggagtgtggtggcgcgatcttggctcactgcaagctccgcctcctgggttcacgccattctcctgcctcctcagtagctgggactacaggcgcccgccaccacacctggctaattttgtgtattttttagtagagacggggtttccccgtgttagccaggatggtctcgatctcctgacttcgtgattcgccagcctcggcctcccaaagtgctgggattacaggcgtgagccaccgcgcctggcccgtatgttgtattcttaagatccaaagcatgtgggaaaaagaattgtaaatttagatataaatgaattgctcagtgatacctctaatttactcctgaggttggggaaagaaggagaaagagaaggaaaggtttctaggctgatgatactgagagctgcagggcaggcctggcattttatggtttcttttccttctccagctcgactttctcaggatactgtccctctcccacagaggagctgaaggagtaggacagaagaactgtcaaattctggaatcc

SEQ ID NO: 2468 - DNA, 208 bp, Homo sapiens
ttctcaggatactgtccctctcccacagaggagctgaaggagtaggacagaagaactgtcaaattctggaatccttaaagccatgtccaaggtaaggaagcatttcttctctcttccctaaaatgccatcttattttttaggttatacgaacattttgtttttcttccaaaattctgcaacctaataaggttccattcatccagtgac

SEQ ID NO: 2469 - DNA, 706 bp, Homo sapiens
gtgagattatccaggcatgtacttggatatttagggcaaaaaaatcatagcaaatactttactagtgcctactatgtgtcaggcactgtttctggtggataataactcctgaggaataagcacaacactgtggagtagtcaagaaggtaggaagaaagcctggagtttctgcctttaaaagggagcaggccgggcacggtggctcacacctgtaatcccagcactttgggaggccgaagcaggttgcaggtataatttatataatcgggagtttgagactagcctggccaacatggcgaaactctatctctactaaaaatacaaaaattagtcaggtgtggtggcaggtgcctacaatcccaggtactcaggaggctgcggcaggagaattgcttgaacccggtgggcagaggttgcagtgagctgagattgcgccacttcactccagcttgggtgatagagcaagactccgtctcaaaaaaaaaaaaaaaaaaaaggaagtggtaagttacagtctacggagaggtcaagagaactgactgaaagtgtccgtatgctagagcaagtaggagtcagcggtggccctttatgagagtcactttagtggcacaacagggatggaggagtgaaggtgaggtgaataaatttagactactcttaaagcttgggggtaaagggaaggagagggagcgctagttaggaaagg

SEQ ID NO: 2470 - DNA, 226 bp, Homo sapiens
aaaccctataggcaaattatatgtgtatcatttgtatataattgtacacaaatatgtatatatctgagctccaaaatgaagccatttgaaattttatataaaatttaggaacaaattaagtaaatgtatgaaataattaccattattatgaatttaaaaatgcaaattaaaatgaggtggcattttttttgtacacatcattagcactggaaaaattagtgatggt

SEQ ID NO: 2471 - DNA, 384 bp, Homo sapiens
caaacatgcacatgttcacagcagcgttctttacaatagcaaaaatgtggaaacagctcacatgttcatcaatgagttaatggataagcaaattgtgggatgttcataaaatgaaatattactcagctataaaaaaggaatgaagtactgatacatggtacaacatggattaaccttaaaaacaggtgctaagtgaaagaagacagaagctatcacatattttatgggaagtgactgcttcatgtgtacaagttttcttttgagatggtgaaactgttttggaattagggagagttgagctaagacaacattgtggttatagcaaatgccactgaattgcatactttaaatgggtaattttaccatatatgaattttatcttca

SEQ ID NO: 2472 - DNA, 264 bp, Homo sapiens
catggtctgggtcctcttttctctgagcttctgcgctgtcctcctccctttaccagccagcttcttcacaccctactctgtatcttacaactcaaagtgcggtccctggaccagcagcagaagctgcagcagcaactgggttccacctcagacctatttattttaatgagatcgcagggtgattcagatgcacattcaagtctgagaagcgcggctcggaaccatctctgcttttcaagcctcagcttgtatgtggctttgacg

SEQ ID NO: 2473 - DNA, 310 bp, Homo sapiens
aactcacagtctaaacaaatacgagacaaaacatggaaggcaataagctgcaattaaagattttgtttttggaaatggtcattaggcttaaaaatagtcacagggtcagtttttcacgaagccaatgcagggtaaaaggctaatctcacttgtaattcttagcagctctctcactgatggtttagttacttaatctccttggtgtttactgtgtcgttccttacgggtgaagaatgggagatgaacgggaatgctttgtctaaagcacagaagagttgctggaaattttaagactcaccagtcaggcaac

SEQ ID NO: 2474 - DNA, 867 bp, Homo sapiens
ttcaatatgatcaggaattcctgtttttagctagatatatttttccaagcctcccttagatttaggtatggctatgctaactaagcgttggcacgtaagatacaaccagagtagtgtatgcaacttctgagaagtcctacagaggggtaaggagatgtccttctccatttctccttcctgctggctggaatgcatacattgctgctggagcaaccctcttggataaagtaggaagaacaatgagatgaaaagacattggttccagatgatcacagagctgccttcccatccctgaattgcctttatttattaatacatgggataaaaataaaagttccatcttcctaagccactatatttttgggttttaggcacttggagccaaaacaaattctaatggatacaaaattaagaagtgaaaccacagaaacatttttgtctgataaatggtgggagaggcaaatcctgaagagtcggcagagacttttaaaacactagcataatctccctagggaacagaatgaatagacttcttcattggtgcagacatagtaagatggaggctgagactaaagggaggctaaaaccaaaaagccattcagccattggcattcaagttctgtagggaaatatacaccaagtcataggaaatcaaagtcccaaccttcaaggaatgactctataatgagaaacatcaggtcagcaagggcagccgcatgaaggtgttctaactttaatatgcaaaaactctgagaaatctagagccggaggacaagaggaaggactttcctctaggcttctcccctcatcagttccagttttaagtcacaccttttcacaaggcaatgacagcaaggccatttcagt

SEQ ID NO: 2475 - DNA, 318 bp, Homo sapiens
cgagttgctaccatttctactgccttctttagctgccctcaccaccccgctcagagtcctacaccgcatcctgggatgttgttgtcactcaacctccacctggataccttttgtcacctgctttggttctgacaacccatgcagggctgctgcttcattctcccctctcctctagtctccccatccctttgagatgtcctcttcaccccacttgggtcctggtagtcgtatggacaccatccttatcttgctcaggttgtgatcccctgccctggatcctcacttccaccaccttccacgtggatgccctttccatcc

SEQ ID NO: 2476 - DNA, 791 bp, Homo sapiens
tttctgctttttttttttttttttttttttgatagagagtctcactcttgcccaggctggaatgcagtggtgcaatcaaagcccactgcagcctccaccccctgggctcatgcaatcatcctacttcagtgtccactagtagctgggactacaggtgcaggtcatcaatttttgtatttttgtattttgtattttttatagagactggggtcccactgtgttgtcagggctggtctagacctcctgggctcaagcaatccttctgcctctgcctcccgaagtgctggggttacaggcgtgaaccacagctcccagcctctgcttttgttctacacagttcactccttccggggcaaggcaatggctctgacactgctgcaggacttcatggtgaattccttatttggagggacagcataggggccgccagaaaatatcgccatggccagaagcagagcaagggagagagggttttaaaaggcagggctgtaaacctcagcataaaataagcagccagcctctcatttcagtcatgtaaacagtaatgtgtattcattaaaactgcattagtctaaggagtccccagagatcaggggctaacgggagaaggggtaggggagaggctgccaactgcacctgctgttttctaacacagtgcaaacaggccaaaagtgggtttctggtgcatgtcacagccagaaaaggctgcccagaggggcttcacagcccccatccatcttgttaaaggtaaacagacatggagaaaacagaagcacccaggaccccaaaca

SEQ ID NO: 2477 - DNA, 782 bp, Homo sapiens
atgctaatcctgcacattttgttatcaagataagttattctcgctatagctcaggatttttttttcacctcttaaataaacatgttagccaggcacagtgccttatagctggaatcccagcactttgagaggctggtgcagggagatcacttgagaccaaaagtccaagaccagcctgggtaacatagcaagactccatttctacaaaaaaatatatatatttttttttaattagccaggcacggtggtatacaactgtagtactagccactcaggaggctgaggcaggatgatcatttgagcccaggagttcaaggttacagtgaactatgattgtgccactgcactccagcaagaccctatctctaaaaaaaaaaaaaaaaattaattagactaaatggcctctaaatccctaatctttcttacctctaaaaactatagtttctacaccatgtaagtatcttgtgattactttgtagatccttacagaacctattagataacaatactcagtgtaaaagggaagacaatgagggaccacaaatttatatttttatgatttgtaaatatgatttatttaatgacttgttttataaatagttttaaatactaaatattttataatgaatgttaatgttcacttctagtctccttgttacatattaatggagattttactgccttttccattagtttatttatgtcatacaggcataactcgttttatttgctttattgtattgtactttgcagattgccgtgttttaagaaactgaaggttt

SEQ ID NO: 2478 - DNA, 713 bp, Homo sapiens
cggtgtctgttggcagctagggcgagcctctgccacttcacctgtgatcctgggcaagttccttatctgctttgtgtctccgtctcctcgtttgtaaagttagagctgagaggattaatttcgcacatataaagtacttagtgcctggtacagggtaagtattctgtaagtattagctatttggtctattttgttggagtaaagtgggttatagttaaaatcctaagatttttaaagtccctcaagttcatgtggacatctgcctaggtcctactatcctagaattcgcatgtcttatcacacaaataactgattcttccatatcttataaataaaggtttgatttagcaaagtcacatgttgtgtaatagctcgaagaagccctttttgtccacagttgccagagcttttggagaacagtccttatgttattgaaacaaacctaatctgtagctgagttgggagggagctaagtggacagagagtcctccacccaaacaaaagaatctttgattcttgggcataatgggagcaatatttaaaaaaaaaaaaaaaaaaaaaaaaggaatgtttggggaagactcttgcggtgcaaaggctgtttcagattgctgagatcagaccttaagtaccaaagcccaaatatagtacaacataatacaaatgagaagaaaatagctgaagaataattcgagtttatacagtacaattca

SEQ ID NO: 2479 - DNA, 519 bp, Homo sapiens
agactttttagtagcttccaactacaaaaaaagagaaataatcaattatgtactaatcagacacttttaaaaattacaacagtttattcagagaaacaagctttgtgtgacattctaagcggattttattctgcaggtccttttaacataatgagtaatatttgtgttgggaatgactgagaagaaatttcataatgatgtgaagatctacctgtaaatagttcctctgtcgtatgctggtatttatattctagcatctcaacagtgctgatggtcactcatcttggagttccctgaatttttttttttttttcaaaactcctgtaatgttacattacccatacttttgttgttgctgctgttgttgttgttttgagacggagtgtcgctctgtcgcccaggctggagtgcagtggtgccgcgcccggcacatgactgcatactttcaaggagaggactcagagcttttatttatttaaagaaacttgaaaggaggaaagtggattaagaaaaaaaaaa

SEQ ID NO: 2480 - DNA, 746 bp, Homo sapiens
ccagtgtcttagggtatgtgtgtgtgtgtgtgtgtgtgtgtgtgtgtgtgtgtgtgtgtcttacctaaacactgactttttctctctctctgtcatgaacaagaattgagaggttaaatgggaattgtctcatgaattgtctcaatgttttctaagttgaatgaagaatcttttttggtagctattcttaagtgaatgctggatttttattaagggaagctaacagatatttaaaagcaccctccatatataaaagcacaatccatggaagcatagtgcaaggaataatgatatagacaaatggaggaggggcaataaaaagtcataaaacaggcaggtagaggtttctggaaaaataaggtggtgagggaagagtctaactgtaaaagtaaaaaggtagaagatagaaccgttgaaaaaaaaaagaaatatcagaaatataaagagaaataaacagcaagaagactccgtagtaatttaagaagtgaaaacttttaggacagaggtaggagagaaatgggaaacactggagaggaagtaacaactaggaagtgtggaagaaaaacctgcaggccagaaatctgagcaaagacttgagagaggatgatggtaaatgtgaaacattgaaagggatgttttaagggattcagacattgagaggaaagtaaattttcatcacaacaccccatgacgacaggctcaacacatttggattatgagaaaggaaattaacatggttagaacga

SEQ ID NO: 2481 - DNA, 606 bp, Homo sapiens
ccagtgtcttagggtatgtgtgtgtgtgtgtgtgtgtgtgtgtgtgtgtgtgtgtgtgtcttacctaaacactgactttttctctctctctgtcatgaacaagaattgagaggttaaatgggaattgtctcatgaattgtctcaatgttttctaagttgaatgaagaatcttttttggtagctattcttaagtgaatgctggatttttattaagggaagctaacagatatttaaaagcaccctccatatataaaagcacaatccatggaagcatagtgcaaggaataatgatatagacaaatggaggaggggcaataaaaagtcataaaacaggcaggtagaggtttctggaaaaataaggtggtgagggaagagtctaactgtaaaagtaaaaaggtagaagatagaaccgttgaaaaaaaaaagaaatatcagaaatataaagagaaataaacagcaagaagactccgtagtaatttaagaagtgaaaacttttaggacagaggtaggagaggtttctggaaaaataaggtggtgagggaagagtctaactgtaaaagtaaaaaggtagaagatagaaccgttgaaaaaaaaaagtaatatcag

SEQ ID NO: 2482 - DNA, 342 bp, Homo sapiens
cttaggttcatcatattatgttactgatataacacaattaacttggtaaaagtgaaggtgtgggtgggcgtggtggctcacgcttgtaatcccagcactttgggagtccgaggcgggtggatcacctgaggtcgggagttcgagaccagcctgaccaacatggagaaaccccatctctactaaaaatataaaattagccaggcatggtggcacacgcctctaatcccagctactcgggaggctgaggcaggagaagcgcttaaacctgggaggtggagtttgcagtgagctgagattgagccactgcactctagcctgggcaacaagagcaaaactctgtct

SEQ ID NO: 2483 - DNA, 428 bp, Homo sapiens
aaatcatagtgaatacattgcgggctttaatgtaaatatgaaaggcaggcccacttagagacgtggatgccaactcgacgtgtgggagtcgaaattgcggtgtggcttgcaatgcagccccacagccatgcagagaaagcgtgcgtgtggcggggttgaagctggctacactggctgacagcaccccacagcggcctgcaagcgcatgtgggagcttgggatcactaggcagcctggttcccactcctttatggcatcaaaagttaggtttctctacctcctactctcttcatttgggtctttgtaagaaagcaaaaacagcccctaccaccagtggtgcccagggtgggtccattgaagcaacgccagatgcagttggttttccagcctctgttcctgcaccagtgctgctgggcgcacccctgccc

SEQ ID NO: 2484 - DNA, 403 bp, Homo sapiens
gactaaaaaaattcatatgccttttgactcagctattccatttcaaggaatttaccctaaggaaaaaatgatggtttttcataaagccttagtcccaaaaatgtttgacagtgcagtctataatagaagcaattaaggaaattaaatgcccgtaaaggagagattggttgcaaaagttatgctacactagaaagctgatttttctccatcacagccccctcattactttcagagcacttactatgttaatcgtgtctcctgcagtaaactccaggaaagcagggtccttgtctgtcttgttcgccattgtatacaccactgtctatgagctggcacacaacagacactaatgaatatttaaatacatacaagacagtttacgtagtatgattccatttttgta

SEQ ID NO: 2485 - DNA, 462 bp, Homo sapiens
ccaggttgcctttatatttcctgcatttttctcctgttgctcttcagagaagctgtatgatataaatgaatgaatgaatgtgtgtgtgtgtacacacacatatatctccattcaaaagctatagcacatgcatgtttgtgtgtatgtgtatatatgtgcatgtatataagtatatatgcatacacacatatacacacacacaaaggtacagaaaatatatatcttgtgactaaaattccctgaactaccagtaactccagaaattctattctggaaaacaatggctaacatctaattcattatcttagaattatcacaaaaggaatatgaaaatgtggtttctagtgcaatgcagttaagataggtattcttgtaggccatggttccaagaaatttgtttgacaactgtactgagtagtatatttctccacttcctttatttttttcccttaccttttttga

SEQ ID NO: 2486 - DNA, 321 bp, Homo sapiens
actgaagcttcagaggaggccctctgcatttatcctctgactttctgtgaagaaggtgcccagtgttgaggcaaaaggaagattaatcagacttcggcagacctcaagcatcaaaatgttctgtaaaagcagagggaggcagctattgcactggctattacaagaaaatacctttgaaaaaactatttgtcaggacaaagccacctaaatcctcaagctacagctctcagcctaaaatagtaaacttaaaaattatttcagctaaagttaaagttactctcctatggaatgtcaaaagaaatgtgttatacagacattagg

SEQ ID NO: 2487 - DNA, 2939 bp, Homo sapiens
  misc_feature (2176)..(2176): n is a, c, g, or t
  misc_feature (2217)..(2217): n is a, c, g, or t
aacggactttttcagagagggaactatctctttgacacaaaacatacgttttaattaataatacttgctctggtaatatagtttcttatgagttgctacatattttctagaatagattttccctaaaatatgcctttgtaagatttttttaataaaatcaagtttagaaataatttgaacttttttgggggatagagtttcagtcttgtcgcccaggctggaatgcaatggcacgatctcagctcaccgcaacctccacctcctgggttcaagtgatttttctgcttcagcctcccgagtagctgggattacaggcacgcaccaccacacctgtctaattttggtgtttttagtagaaacggggtttcaccatgttggccaggctgatttctagttcctgacctccggtgatccacctgcatcagcctcccaaagtgttgggattataggcgtgagctaccgtgcccggcctgaacttttttttttttggagacggagtctccctctgtcgcccaggctggagtgcagtggtgctatcctggctcactgcaacttccgcttcctgggttcaagcgattctcctgcctcagcctccggagtagctgggattacaggcactccgccgccatgcccagctaatttttgtatttttagtagagacgggatttcaccatgttggccaggctggtcttgaactcctgacctcaagtgttctgccaccttggcctcccaaagtgctgggattgcagatgtgagccacgtcatctggcctggcctgaacttttagaattcaatattaaccattttcccctagtttattccctagagctcttcacaaagtatggcttgacttctctgagacagctagtgataagaaaaatgaagtttattttggtataccactcaaaaagattgtgaaaacaaaatggagattaattttttttttccaaactctttgtaccacaattttaagttgaatagctgacttcctaggcatggataagatcagttctatcttatcttctgtcctagtaatgtgtctgcagtggaatccccattgcttggcttctataattgatcttgaaccttcccaattatcattccctgaaaaaataattctacttaaataccttcttgacttaaatgtcatgagttgctacatctgggttctgataagatttttctaagaaaaactacatttgacatgtgacatcttcaggaattcaatatcttgtttctttgacagagggacgctattcatgtctgtgaatttggcagtctttgaaatgccatgtcttttttggaaaaagcttttgatggactttattttgatatacatcttaaggtcccctgacctatactataagcagagcatagcaaagagggtcattatgaacattgtgtgtagttctgggcagggcttgggatcctttgggattgttggtatctacaccacatggccccaccctgctatgttttaaggttttctgctgactttttaggtcttcagccttgattttgatgctttgagtgcctgcctctagcagcaccacccccagcccttttccagttggctgcatctcatctgttgtgggctaagaaaccagatcacagagcttattaaaattgtgtctaaaataagatccagtaggctcttgactgaagagggcttcatgtgctctgtgaactgtgtggtttccttggctgatcggagacctttctgacttgcttcctgtttttcttctttacttttgctatacagatgtaggaggctttttggtgctcttagagtgctgtaatgttgaagtatttggttaatttctctattcttgggaagggtaaaaggctaaataaatatcttgattctttgaggagttgaagactgaccagagttggatactaaaagcttttcttaacagtaatagtgcattgtacattttaatggtgtcctactagttgcagataacgtttggcatacatagctttcaaacaaagtaatgccaggattatcacttgatctatttctgtgatagagattttttttctttctttttttttttttttgaggcagtcttgctcaggctggagtgcagtgtcatgatcttggctcactacaaactctggctcccagggtcaagcagttctcttgcctcagactcccaagtagctgggattncaggcactcaccaccatgcccagctaatttttgtatttttnatagagacagggtttctccctgttggccaggctggtcttgaactcctgacgtcaggagatccgtccgtctcggcctcccaaagtgttgggattacaggtgtaagccactgtgcccggcctatggctagcttcttttaaggcgtctcaagacaaagttctcaatgaaataaagatttcaggtcatgcacagtgggtcacgcctgtaatcccagcactttgggaggcccaggtgggcagatcgcttgagctcaggagttcgagaccagcctgagcaacatgacgaaacatggtctttacaaaaaatacaaaaagttagctgggtatggtggtggatggctgtggtcccagctaggtgggaggctgaggtgggaggatctcgggagcctgggaggtagaggctgcagtgaaccgtgatcaggccgctacactccagcctatgcaacagagtgagaccctgtctcaaacaaacaaacaaacaaaaagatttcaaactctgatgtctataaaagccaggcaggtaccaaagtgagcagagagaacttgagggagctagaaaatgcatgtgctatcagatgagggcaactgctaaccagctccctgcaaatgttgctattgctaaaatctgtgggcccagtgttgcaatatcttccattcaaaaaaaaaagagaagccacaaatccagattttttggcaaccgattcaacttaaaaaaaaaaagaaca

SEQ ID NO: 2488 - DNA, 2360 bp, Homo sapiens
aacggactttttcagagagggaactatctctttgacacaaaacatacgttttaattaataatacttgctctggtaatatagtttcttatgagttgctacatattttctagaatagattttccctaaaatatgcctttgtaagatttttttaataaaatcaagtttagaaataatttgaacttttttgggggatagagtttcagtcttgtcgcccaggctggaatgcaatggcacgatctcagctcaccgcaacctccacctcctgggttcaagtgatttttctgcttcagcctcccgagtagctgggattacaggcacgcaccaccacacctgtctaattttggtgtttttagtagaaacggggtttcaccatgttggccaggctgatttctagttcctgacctccggtgatccacctgcatcagcctcccaaagtgttgggattataggcgtgagctaccgtgcccggcctgaacttttttttttttggagacggagtctccctctgtcgcccaggctggagtgcagtggtgctatcctggctcactgcaacttccgcttcctgggttcaagcgattctcctgcctcagcctccggagtagctgggattacaggcactccgccgccatgcccagctaatttttgtatttttagtagagacgggatttcaccatgttggccaggctggtcttgaactcctgacctcaagtgttctgccaccttggcctcccaaagtgctgggattgcagatgtgagccacgtcatctggcctggcctgaacttttagaattcaatattaaccattttcccctagtttattccctagagctcttcacaaagtatggcttgacttctctgagacagctagtgataagaaaaatgaagtttattttggtataccactcaaaaagattgtgaaaacaaaatggagattaattttttttttccaaactctttgtaccacaattttaagttgaatagctgacttcctaggcatggataagatcagttctatcttatcttctgtcctagtaatgtgtctgcagtggaatccccattgcttggcttctataattgatcttgaaccttcccaattatcattccctgaaaaaataattctacttaaataccttcttgacttaaatgtcatgagttgctacatctgggttctgataagatttttctaagaaaaactacatttgacatgtgacatcttcaggaattcaatatcttgtttctttgacagagggacgctattcatgtctgtgaatttggcagtctttgaaatgccatgtcttttttggaaaaagcttttgatggactttattttgatatacatcttaaggtcccctgacctatactataagcagagcatagcaaagagggtcattatgaacattgtgtgtagttctgggcagggcttgggatcctttgggattgttggtatctacaccacatggccccaccctgctatgttttaaggttttctgctgactttttaggtcttcagccttgattttgatgctttgagtgcctgcctctagcagcaccacccccagcccttttccagttggctgcatctcatctgttgtgggctaagaaaccagatcacagagcttattaaaattgtgtctaaaataagatccagtaggctcttgactgaagagggcttcatgtgctctgtgaactgtgtggtttccttggctgatcggagacctttctgacttgcttcctgtttttcttctttacttttgctatacagatgtaggaggctttttggtgctcttagagtgctgtaatgttgaagtatttggttaatttctctattcttgggaagggtaaaaggctaaataaatatcttgattctttgaggagttgaagactgaccagagttggatactaaaagcttttcttaacagtaatagtgcattgtacattttaatggtgtcctactagttgcagataacgtttggcatacatagctttcaaacaaagtaatgccaggattatcacttgatctatttctgtgatagagattttttttctttctttttttttttttttgaggcagtctatgcaacagagtgagaccctgtctcaaacaaacaaacaaacaaaaagatttcaaactctgatgtctataaaagccaggcaggtaccaaagtgagcagagagaacttgagggagctagaaaatgcatgtgctatcagatgagggcaactgctaaccagctccctgcaaatgttgctattgctaaaatctgtgggcccagtgttgcaatatcttccattcaaaaaaaaaagagaagccacaaatccagattttttggcaaccgattcaacttaaaaaaaaaaagaaca

SEQ ID NO: 2489 - DNA, 2307 bp, Homo sapiens
aacggactttttcagagagggaactatctctttgacacaaaacatacgttttaattaataatacttgctctggtaatatagtttcttatgagttgctacatattttctagaatagattttccctaaaatatgcctttgtaagatttttttaataaaatcaagtttagaaataatttgaacttttttgggggatagagtttcagtcttgtcgcccaggctggaatgcaatggcacgatctcagctcaccgcaacctccacctcctgggttcaagtgatttttctgcttcagcctcccgagtagctgggattacaggcacgcaccaccacacctgtctaattttggtgtttttagtagaaacggggtttcaccatgttggccaggctgatttctagttcctgacctccggtgatccacctgcatcagcctcccaaagtgttgggattataggcgtgagctaccgtgcccggcctgaacttttttttttttggagacggagtctccctctgtcgcccaggctggagtgcagtggtgctatcctggctcactgcaacttccgcttcctgggttcaagcgattctcctgcctcagcctccggagtagctgggattacaggcactccgccgccatgcccagctaatttttgtatttttagtagagacgggatttcaccatgttggccaggctggtcttgaactcctgacctcaagtgttctgccaccttggcctcccaaagtgctgggattgcagatgtgagccacgtcatctggcctggcctgaacttttagaattcaatattaaccattttcccctagtttattccctagagctcttcacaaagtatggcttgacttctctgagacagctagtgataagaaaaatgaagtttattttggtataccactcaaaaagattgtgaaaacaaaatggagattaattttttttttccaaaatcagttctatcttatcttctgtcctagtaatgtgtctgcagtggaatccccattgcttggcttctataattgatcttgaaccttcccaattatcattccctgaaaaaataattctacttaaataccttcttgacttaaatgtcatgagttgctacatctgggttctgataagatttttctaagaaaaactacatttgacatgtgacatcttcaggaattcaatatcttgtttctttgacagagggacgctattcatgtctgtgaatttggcagtctttgaaatgccatgtcttttttggaaaaagcttttgatggactttattttgatatacatcttaaggtcccctgacctatactataagcagagcatagcaaagagggtcattatgaacattgtgtgtagttctgggcagggcttgggatcctttgggattgttggtatctacaccacatggccccaccctgctatgttttaaggttttctgctgactttttaggtcttcagccttgattttgatgctttgagtgcctgcctctagcagcaccacccccagcccttttccagttggctgcatctcatctgttgtgggctaagaaaccagatcacagagcttattaaaattgtgtctaaaataagatccagtaggctcttgactgaagagggcttcatgtgctctgtgaactgtgtggtttccttggctgatcggagacctttctgacttgcttcctgtttttcttctttacttttgctatacagatgtaggaggctttttggtgctcttagagtgctgtaatgttgaagtatttggttaatttctctattcttgggaagggtaaaaggctaaataaatatcttgattctttgaggagttgaagactgaccagagttggatactaaaagcttttcttaacagtaatagtgcattgtacattttaatggtgtcctactagttgcagataacgtttggcatacatagctttcaaacaaagtaatgccaggattatcacttgatctatttctgtgatagagattttttttctttctttttttttttttttgaggcagtctatgcaacagagtgagaccctgtctcaaacaaacaaacaaacaaaaagatttcaaactctgatgtctataaaagccaggcaggtaccaaagtgagcagagagaacttgagggagctagaaaatgcatgtgctatcagatgagggcaactgctaaccagctccctgcaaatgttgctattgctaaaatctgtgggcccagtgttgcaatatcttccattcaaaaaaaaaagagaagccacaaatccagattttttggcaaccgattcaacttaaaaaaaaaaagaaca

SEQ ID NO: 2490 - DNA, 292 bp, Homo sapiens
tccaagagatccttctcagtagcaatttttcaccgtgctctgatggcaaacataccagcttctgtgcagacacttctaatctcagcagcagtgccatttggacacagtcgtgctaacaattcaaatctgatatatctttcaacactcattgaatgagcgtgaatcttaaagatgtgggtccgaccctctagatcaggcaagctaaattcaatttttctgtctaatctgcctggcctcatcagtgctggatccaaattatcaggtcagttagtggccatcagcactttaatat

SEQ ID NO: 2491 - DNA, 343 bp, Homo sapiens
ggaacacatgatgcgattactttccccaatccataaatccactactgcagcccacatctggatagatacagtgattcaaagtagaaaatgataccagttgagtcccttctcagtatttttcaagccatcgttcctgcattaaacaggtacgcccaattacaaataacaacagttaccatctacctatccccttctgtgggccagtatgagtgctagccacttaacatctttcatgtcatttaatccctagagcaactctgtaagaaacatatcattacctccatttaatagatgggaaagtaaggactcaaagaggatgtaaggctgctaagcggcagagcca

SEQ ID NO: 2492 - DNA, 288 bp, Homo sapiens
cccagggtgagtgggggtctctagcttgtcctttgcacctttttactccataatggtctcaagaggttcctggcttttccgtttgaggaggaagaatcatttgacaaatagtttttacctgcctggcgtgtgccagatctccatagccccaagtcccctggctccgccctctcatacccattgtcctagaatttgagagggcaggtgggaggggtgggactacttccactttccccaaattcttttgccttattcactgtctactgatgaggccagatccaggtttaa

SEQ ID NO: 2493 - DNA, 282 bp, Homo sapiens
ggaagaatggacagggggttaactgaaacatgtatgtctaaaattacaaaagatacaaaagggaggacaccaggggtacagacgggcaagtattgaaggtaatcagatacaatttctaaaaataaaaacactcacggaaactaacatctcagtggatggctgaaccacagattcttctcagccgaggacagattaatgtcctaaaaaaaaattcacttgaggaagttacccatcaggagtagagataaacacaccaattcaaacaataaaaggaaggctaag

SEQ ID NO: 2494 - DNA, 396 bp, Homo sapiens
gtgagacccgagcagcagtcgctctgttcttgtgatcatggctgagtgggatccagtgtgagtctccacccggcctgttacccagttccagctgcagggcctgggcgcccttttccgcctgggcagcagtgaatgaagttgctctaagtcccttgctgctcttggtgcacttaagagagggctcgcaggccacaggataacaggagaggctgagtgcgcggcatcctccatcatggaaacgcatctcgcaccagcacacgcagctggcttttccactacttttgcccgtcgatggcaccacccagcttttctctgggtgggacaggtatctgtccacctggggtttctactctgcatgttttatctttttttttttttttttcctgagatggagtt

SEQ ID NO: 2495 - DNA, 300 bp, Homo sapiens
gcccagggcagatggaccatagtgggaagccactagttcagggatgagagaaaacttagcagcaatgaaatagaaacgattgctggggaaggcagagaaggatttgggaaaaatttctcactgtcttatgaaccacacctcctccacccctcccatatactgccccatgcttatgagtatggatcattatgtaagaaaataaaatagtgaactatcggtattataaacatatcattatgtttattattattataataaacatatatatgtgtgtatgtgcatatatatatatttgacatg

SEQ ID NO: 2496 - DNA, 119 bp, Homo sapiens
tgtctgaatcctcagctgcagaggaaaacacaggtagtatgggagttccccccaagagttcacatttgaactaggttgttttttttttaaccgcaacctctgcctcctagttgcaagtg

SEQ ID NO: 2497 - DNA, 1790 bp, Homo sapiens
ggagatgacaagcaactgagatattgtgatatataatcatgctcttagcttcagctaaattcagctaaattcttgtacactgaaccaatgtcataatcaggcttatttagaaaacactttgaactatgctataaaagattatatcagaattcatattatacatgtgttcacatcagcgctacctgtgatgttttcatgtatttatgtatgtgttataaatacttgatttgtacatatacaaatgcacatacgtagtgtgtttgtgtgtttatgtataaatttataggcacacaataatagaggtaattataagtaggatgcggtatggaataatttgcttaaaatatgctaaataaccaaaactgtttaacgtcatgttcctgttagtgcttccatactccacgtggggtagggactacatcacacttttccaactctgtgcagtactgcatgggtggaagacatatttaagataatgtgcttcccaaaacaactgaataaaagccatcccactacattgagtgctttctctggctccttgcaaagaaagatactttttgtaatggtccaggaaaggaacattgctttctttttgtctttcagcacatttgtattatgctcaccttgtctctgtctcactgtgacccctttacacttgagttcagagttcaagcattccaaatataaattggaatgttggcagcccagtggcttgaaggccaatgatgagcagtccaagaccccacagcgagatgagcaactcttaggaattcccacatcctagagtgaatgcaccaactaacagtatagaatgctgtccttttcaaagcgtcctaacagcaggattacctggtcaagtatggactttctttgaatctttcttttcacaaattggactgcctgtaataccaataacattgttgtatctaactaaataaatgactgcatatacacacataccctcaattctcttgcttccccattttctttttcatcccctgtctcaggacttttattttcagtgttgacctttggtttggccatatatcactgttataggaaatctcatgagaggaatggctagtgaccccaactctccaaatgtctaagttagtagttacagctgattttttatgatgcataattggaatgtggagcctctgaggttgtgatagcttgtacatgaatttcaaatgtcattctaaagaatgaggggtgggagggatttatagttagaaacgacagtgcaggaaggggtattttcttgttgtcagggctggaatgaatcactgctgctcaagtcaaaggttcttgaatatccttagtttttgcatttcccctccttttcctttgacctttatttatttaattatgtatttatttatttatttatatacttttgctccattcagcacaaacacaaagcaaagcaaaaaaaaatatatatatatatatctgtatatgtgttgtaggcaaaacactgtgaatttcacaacaaccaccaccaagcaactattttgccatcttaacatacatctcaggagacgaaatgagaaaagatggggatgtcattttttagtctatgcgtttgaggccaggtccatgtttatttatttctttagtctatgcattaatgaaaatgatcctgagtggaggttagctgaacgttcaatgtactggagcaagcatcataaaagctgctagtagccatgtgtttgaacaggaaaaatattacagaaaatgaaatgtaaaggcctatatcttgcagcttgtatatcttactattgctt

SEQ ID NO: 2498 - DNA, 1814 bp, Homo sapiens
attcatttattcaacaagtatttattgaactcttatttaaaaattgatgaactgctaaatgttcgtataaatcttcagctaaattcagctaaattcttgtacactgaaccaatgtcataatcaggcttatttagaaaacactttgaactatgctataaaagattatatcagaattcatattatacatgtgttcacatcagcgctacctgtgatgttttcatgtatttatgtatgtgttataaatacttgatttgtacatatacaaatgcacatacgtagtgtgtttgtgtgtttatgtataaatttataggcacacaataatagaggtaattataagtaggatgcggtatggaataatttgcttaaaatatgctaaataaccaaaactgtttaacgtcatgttcctgttagtgcttccatactccacgtggggtagggactacatcacacttttccaactctgtgcagtactgcatgggtggaagacatatttaagataatgtgcttcccaaaacaactgaataaaagccatcccactacattgagtgctttctctggctccttgcaaagaaagatactttttgtaatggtccaggaaaggaacattgctttctttttgtctttcagcacatttgtattatgctcaccttgtctctgtctcactgtgacccctttacacttgagttcagagttcaagcattccaaatataaattggaatgttggcagcccagtggcttgaaggccaatgatgagcagtccaagaccccacagcgagatgagcaactcttaggaattcccacatcctagagtgaatgcaccaactaacagtatagaatgctgtccttttcaaagcgtcctaacagcaggattacctggtcaagtatggactttctttgaatctttcttttcacaaattggactgcctgtaataccaataacattgttgtatctaactaaataaatgactgcatatacacacataccctcaattctcttgcttccccattttctttttcatcccctgtctcaggacttttattttcagtgttgacctttggtttggccatatatcactgttataggaaatctcatgagaggaatggctagtgaccccaactctccaaatgtctaagttagtagttacagctgattttttatgatgcataattggaatgtggagcctctgaggttgtgatagcttgtacatgaatttcaaatgtcattctaaagaatgaggggtgggagggatttatagttagaaacgacagtgcaggaaggggtattttcttgttgtcagggctggaatgaatcactgctgctcaagtcaaaggttcttgaatatccttagtttttgcatttcccctccttttcctttgacctttatttatttaattatgtatttatttatttatttatatacttttgctccattcagcacaaacacaaagcaaagcaaaaaaaaatatatatatatatatctgtatatgtgttgtaggcaaaacactgtgaatttcacaacaaccaccaccaagcaactattttgccatcttaacatacatctcaggagacgaaatgagaaaagatggggatgtcattttttagtctatgcgtttgaggccaggtccatgtttatttatttctttagtctatgcattaatgaaaatgatcctgagtggaggttagctgaacgttcaatgtactggagcaagcatcataaaagctgctagtagccatgtgtttgaacaggaaaaatattacagaaaatgaaatgtaaaggcctatatcttgcagcttgtatatcttactattgctt

SEQ ID NO: 2499 - DNA, 360 bp, Homo sapiens
gcctcccaaagtgctggcattacagttgtgagccaccatgaccagctgagacatactttttttttttaaaaagaatcatttaaaagcatctctaaaaatctcttcttagatgagcttcacttccaatgcaaatattaatttttaagttagaatagcaaattctggacctagatggctctgtcacacactagctgtgtgactttgaataagttatttcacccctttttgtcccaaatacctacctaatttggagactcttgaattgttgattaaatgagtgaatgtatataaagtgttaagagtaatgcctggatgttgttccctgcaaaaagaaaaaagaatagtgcctagcctacagtg

SEQ ID NO: 2500 - DNA, 1829 bp, Homo sapiens
  misc_feature (1031)..(1031): n is a, c, g, or t
  misc_feature (1033)..(1033): n is a, c, g, or t
aacgaacagaattcttgggctggataaccagctgtcatccccaggttcctggataattccagcagggatgtgaggctctgggtgctgaaaaaagtaactagaaccgtaccaaacactcttctcacttccatctgggtgctaaggagcctagaggggagcaactctgtgtctagacacagtggcatctacctgggtttggagtctgataagccctgaggggaagctgtcaaaaagctaataatactgtgtgcttagccaacatgtgctccccacggggtttccaccgctgctctggaagttccttcctcagaaaagagagtcagaccctccttgtctccattccacggctctagagactaagcctggactggaaatcgcagccaagtggagttgtggggctagtcagagacgatgcttaggatcctgggactcgaccattgcccaggaacatctcagacagggagacatgtagccaggtttgcacaactctgcctgcgtgcgcaaccccagctgaaccccttccattgctacgtaaagaactcaagtggcttgaaggcttctaggacaggtttttaaatcccaactgtacgactccctagttgagtgaccttagccaagggaagtgggaaataaattattggatggctaaatgtgccaggcactgtgcttgcattggagcctgtctgaccccgaagcacaaatcctctctctgtgagcactcgtcctacactcagagccagaggccttaggctggaggcacagttatttgactctgggaagtcacttccatcctctctggacctcaatctctcttcaggcaaataggacagtcctgctgaccccatggggtgatggtgacattaaaatggaacagcgtggtgaaagctctctcatactcagcgtgtacgatctttgggaccatcacaaggaagtttttagaaatatagattgctagatgatgggtgagggtcttgacccagtggccctgagaatctatgtctaaaaaaaaaaaaaaaaaaaaaaaaaaagcncnctcaaggcaggtttgtgaagcagctcatgtttacagatgtaagggatgaatatcatttccccagacctccgggatgccaaaattttgcttcctcttccctgccccacctaaaacgttgccagtcccagccctgcccttggactctatctctgaaggtttttattttattccttcactgatagaatctggctgcctctcagcaccttccagccaaagacccagggaagggagagaagggtaggaaagagaaggctctgatccaatgcataaattgcccttagttacccaaattgggtaaattggcatggagggtatccaagccacaaggtggagaagcagccagggtctgagtaagcagacgaagcatccaggtggtggctcaccctctgcctttggctaggaaacaatgtgtgttggttgaatcccaagggacacatcttgtatttattttactgactttgcttgtatttttctaaccttgttgggtacttttttgggggtgaagaaagtctaggacaaccttttatgtttgaaattctcaaatatccctaccagaagaggcacaggctagcatggatgattccaaacaagggattgagaagtcacttccactggttttaaggtgaatggcatggaggtacccactcccccattaaatttaccttcaagcctggtgtggtggctcacgcctgtaatcccatgactcaggaggctcaggtgggaggattacatgaccccagaagtttgagacaagcctgggcaacagagcaagactctctaccctgtctcaaaaaac

SEQ ID NO: 2501 - DNA, 606 bp, Homo sapiens
tgacaatcacccttgctcctctgcatgtgagatagacagcccaggccggctattccaacagcgggatcccagcaaagccctcagttatccacctgctgcttcacagctccatctgctctgggccaccaaccgcacccgggtcactgcccaagggagcagctggacaggtcccccggcacaggcctcctcaccaccaagccctgccaaaaaacattctgccggacgatggcccctcaagtggaagggtgggggtcacagattacatcctttgaactgttcccagtgatgcccagagcctggcacccagagaggggcattccagggggcaggagagaaggctttggagctaggcagacctgggctggagcctggctctgacatgtgggacgagcctctccactccaccgttctaacccttggtcttcacatctgtaaaatgggggtgacaacatctcaatctcgagccaggcgtggtggctcacgcctataatcccagcactttgggaggcggagggaggcaaatcgcttgagtccagtagttggagaccagccctgtctctacaaaaaatacaaaaattgtctgggtgtggtggcacatgcttgtaa

SEQ ID NO: 2502 - DNA, 3684 bp, Homo sapiens
  misc_feature (720)..(720): n is a, c, g, or t
  misc_feature (837)..(837): n is a, c, g, or t
  misc_feature (1231)..(1231): n is a, c, g, or t
  misc_feature (1391)..(1391): n is a, c, g, or t
  misc_feature (3683)..(3684): n is a, c, g, or t
ggccttcgttcctcccagaaaggtctctgcctttctctagaaaaagaaagaaaagaatgaccgtttccaaggagatggtgacattcaaggatgttgctgtggtcttcactgaggaggagctggggctgctggactctgtccagaggaagctgtaccgagatgtgatgctggagaacttcaggaacctgctcttagtagcacatcagcccttcaagccagacctaatatcccagctggagagagaagaaaagcttttgatggtggagacagaaaccccaagagatggatgttcaggaaggaagaatcaacaaaagatggagagtattcaggaagtaacagtaagctacttttcccccaaagagctttcctcccgtcagacctggcaacaaagtgcaggtgggttaatcaggtgtcaagatttcctgaaagtttttcaagggaagaattctcagttgcaagaacaaggtaattccctcggccaggtttgggcaggaataccagttcagatttctgaagataagaactatatattcactcatatagggaatggctccaattatataaaaagtcaagggtatccatcttggagggcacatcattcttggaggaaaatgtatctgaaagagtcacataattatcagtgtagatgtcagcaaatttccatgaaaaatcatttctgtaagtgtgacagtgtcagttggctctcacatcacaatgatnaactggaagtacacagaaaagaaaactacagctgccatgactgtggagaagatatcatgaaggtatcattacttaatcaggagtcaattcaaacagaggagaagccctatccatgtnctgggtatagaaaagccttcagtaatgactccagctctgaagttcatcagcagttccacttggaagggaagccctatacatacagttcatgtggaaagggctgtaattatagttcacttcttcatattcatcaaaatattgagagagaagatgatattgagaattcacatctgaaatcctatcagagagtgcatacagaggagaaaccatgcaaatgtggtgaatatggtgagaacttcaatcactgttcccctcttaacacttatgaacttatccacacaggtgagatgtcctataggcacaacatttatgagaaagccttcagtcatagcttagaccttaatagtatttttagggtccatactagggatgaaccccatgaatatgaggaaantgagaatgtctttaatcagagttcatgtcttcaagtccatcaaaaaatccacactgaagagaaactatacacagatatagagtatggaaagagtttcatttgtagttcaaatcttgacattcagcatagggttcatatggaagagaattcatataattcncaggagtgtggtaatggcttcagtctggcctcacattttcaggaccttcagatagtccacactaaggaacaaccatataaacgctatgtgtgtagtaacagcttcagccataatttacatcttcaaggtcatccaaaaattcacattggagagaaaccacgtaaggagcatgggaatggcttcaactggagctcaaaacttaaagatcatcagagagtccacactggacagaagccatacaaatgcaatatatgcggcaaaggtttcaatcatagatcagttctgaatgttcatcagagagtccacaccggagagaaaccttataaatgcgaggaatgtgataagggattcagtcggagttcatatcttcaagcccatcagagagtccacactggagaaaaaccttataaatgtgaggaatgtgggaaggggttcagtcgaaattcataccttcaaggccatcagagagttcacactggagaaaaaccatacaagtgtgaggagtgtgggaagggcttcagtcggagttcacaccttcaaggccatcagagagtccacactggagaaaaaccattcaaatgtgaggaatgtgggaaggggttcagttggagctttaatcttcaaattcatcagagggttcacacaggagaaaaaccctataaatgtgaagaatgtggtaaaggcttcagtaaggcctcaacacttttggcccatcagagggtccacacgggagagaagccataccaatgtgatgagtgtggtaagagtttcagtcagagatcataccttcagagtcatcagagtgtccattctggagaaagaccatatatatgtgaggtatgtggaaagggcttcagtcagagagcatatcttcaaggtcatcagagagtccacactagagtgaaaccgtataaatgtgagatgtgtgggaagggctttagtcagagttcgcgccttgaagcacatcggagggttcacacaggagggaaaccatacaaatgtgaggtgtgtacaaagggtttcagtgagagttcacgccttcaagcacaccaaagggttcatgtggaagggagaccctataaatgtgaacagtgtggtaagggtttcagtgggtattcaagtcttcaagcccatcacagagtccacacaggagagaaaccatacaaatgtgaggtatgtggaaagggcttcagtcagagatcaaatcttcaggctcaccagagagtccacacaggagagaaaccatacaaatgtgatgcatgtggtaagggtttccgttggagctcaggtcttctcattcatcaaagagtccatagtagtgataaattctataaaagcgaagactatggtaaggactacccttcatcagagaatctacacagaaatgaagattctgttttgttttgaagtcctcaaatgggagctgaaattttccagtcactagagttctttcagtagaaaaagaatttttaaaaattaaaatgtaatgttgctgcccaacttcaacattcataatggccaggagaccacacaacagagacatttaatgagaggggtttcacgagggattttgttagaactttaacatcagtcattgcacaggagctaaggcttataaaatatgagtatggtcaggaatttaataaaagtacagtgatgagcatgcctaaatccatgttctctagaatgtaagcttggtgaaagaagggactttgttcattgctagtctacaaaactaggacatttcataacgcaatgtaggtgctcagtactttttgctaaataactaaaagtatgtaaaggtaaaaggtttgaaatttttaagcgcattttttaaaacttaaaatgtatttggaggagaaatcctgcaagtaatcttaataaaatcatttcaagtaaatatttgaaatgtagaacaataagcattatgatgatctgaaataacattaatttgattgtaaccctattggggttagttcccaccctttgttccatcttgagcagagatgtgctgcatttcttaacgtttggtctctatacattataccatctgctgaagtttagctttgtgtgtgtgtatatgtacccatgtgtgcactttaaatatcagtacaaactgataaacaatgtttctggttaatgttgcaaaaatggaacactgtattttacataattgattttctactcctgccctgtgaattaaggcagagttttactgtaatatttgcaagtatccaaaatggttactgatgacaaatactttttaataaatgtcaaaatcacaaaaaaaann

SEQ ID NO: 2503 - DNA, 3662 bp, Homo sapiens
  misc_feature (698)..(698): n is a, c, g, or t
  misc_feature (815)..(815): n is a, c, g, or t
  misc_feature (1209)..(1209): n is a, c, g, or t
  misc_feature (1369)..(1369): n is a, c, g, or t
  misc_feature (3661)..(3662): n is a, c, g, or t
acttccgccccaggtacgctaggccgcggccttcgttcctcccagaaaggagatggtgacattcaaggatgttgctgtggtcttcactgaggaggagctggggctgctggactctgtccagaggaagctgtaccgagatgtgatgctggagaacttcaggaacctgctcttagtagcacatcagcccttcaagccagacctaatatcccagctggagagagaagaaaagcttttgatggtggagacagaaaccccaagagatggatgttcaggaaggaagaatcaacaaaagatggagagtattcaggaagtaacagtaagctacttttcccccaaagagctttcctcccgtcagacctggcaacaaagtgcaggtgggttaatcaggtgtcaagatttcctgaaagtttttcaagggaagaattctcagttgcaagaacaaggtaattccctcggccaggtttgggcaggaataccagttcagatttctgaagataagaactatatattcactcatatagggaatggctccaattatataaaaagtcaagggtatccatcttggagggcacatcattcttggaggaaaatgtatctgaaagagtcacataattatcagtgtagatgtcagcaaatttccatgaaaaatcatttctgtaagtgtgacagtgtcagttggctctcacatcacaatgatnaactggaagtacacagaaaagaaaactacagctgccatgactgtggagaagatatcatgaaggtatcattacttaatcaggagtcaattcaaacagaggagaagccctatccatgtnctgggtatagaaaagccttcagtaatgactccagctctgaagttcatcagcagttccacttggaagggaagccctatacatacagttcatgtggaaagggctgtaattatagttcacttcttcatattcatcaaaatattgagagagaagatgatattgagaattcacatctgaaatcctatcagagagtgcatacagaggagaaaccatgcaaatgtggtgaatatggtgagaacttcaatcactgttcccctcttaacacttatgaacttatccacacaggtgagatgtcctataggcacaacatttatgagaaagccttcagtcatagcttagaccttaatagtatttttagggtccatactagggatgaaccccatgaatatgaggaaantgagaatgtctttaatcagagttcatgtcttcaagtccatcaaaaaatccacactgaagagaaactatacacagatatagagtatggaaagagtttcatttgtagttcaaatcttgacattcagcatagggttcatatggaagagaattcatataattcncaggagtgtggtaatggcttcagtctggcctcacattttcaggaccttcagatagtccacactaaggaacaaccatataaacgctatgtgtgtagtaacagcttcagccataatttacatcttcaaggtcatccaaaaattcacattggagagaaaccacgtaaggagcatgggaatggcttcaactggagctcaaaacttaaagatcatcagagagtccacactggacagaagccatacaaatgcaatatatgcggcaaaggtttcaatcatagatcagttctgaatgttcatcagagagtccacaccggagagaaaccttataaatgcgaggaatgtgataagggattcagtcggagttcatatcttcaagcccatcagagagtccacactggagaaaaaccttataaatgtgaggaatgtgggaaggggttcagtcgaaattcataccttcaaggccatcagagagttcacactggagaaaaaccatacaagtgtgaggagtgtgggaagggcttcagtcggagttcacaccttcaaggccatcagagagtccacactggagaaaaaccattcaaatgtgaggaatgtgggaaggggttcagttggagctttaatcttcaaattcatcagagggttcacacaggagaaaaaccctataaatgtgaagaatgtggtaaaggcttcagtaaggcctcaacacttttggcccatcagagggtccacacgggagagaagccataccaatgtgatgagtgtggtaagagtttcagtcagagatcataccttcagagtcatcagagtgtccattctggagaaagaccatatatatgtgaggtatgtggaaagggcttcagtcagagagcatatcttcaaggtcatcagagagtccacactagagtgaaaccgtataaatgtgagatgtgtgggaagggctttagtcagagttcgcgccttgaagcacatcggagggttcacacaggagggaaaccatacaaatgtgaggtgtgtacaaagggtttcagtgagagttcacgccttcaagcacaccaaagggttcatgtggaagggagaccctataaatgtgaacagtgtggtaagggtttcagtgggtattcaagtcttcaagcccatcacagagtccacacaggagagaaaccatacaaatgtgaggtatgtggaaagggcttcagtcagagatcaaatcttcaggctcaccagagagtccacacaggagagaaaccatacaaatgtgatgcatgtggtaagggtttccgttggagctcaggtcttctcattcatcaaagagtccatagtagtgataaattctataaaagcgaagactatggtaaggactacccttcatcagagaatctacacagaaatgaagattctgttttgttttgaagtcctcaaatgggagctgaaattttccagtcactagagttctttcagtagaaaaagaatttttaaaaattaaaatgtaatgttgctgcccaacttcaacattcataatggccaggagaccacacaacagagacatttaatgagaggggtttcacgagggattttgttagaactttaacatcagtcattgcacaggagctaaggcttataaaatatgagtatggtcaggaatttaataaaagtacagtgatgagcatgcctaaatccatgttctctagaatgtaagcttggtgaaagaagggactttgttcattgctagtctacaaaactaggacatttcataacgcaatgtaggtgctcagtactttttgctaaataactaaaagtatgtaaaggtaaaaggtttgaaatttttaagcgcattttttaaaacttaaaatgtatttggaggagaaatcctgcaagtaatcttaataaaatcatttcaagtaaatatttgaaatgtagaacaataagcattatgatgatctgaaataacattaatttgattgtaaccctattggggttagttcccaccctttgttccatcttgagcagagatgtgctgcatttcttaacgtttggtctctatacattataccatctgctgaagtttagctttgtgtgtgtgtatatgtacccatgtgtgcactttaaatatcagtacaaactgataaacaatgtttctggttaatgttgcaaaaatggaacactgtattttacataattgattttctactcctgccctgtgaattaaggcagagttttactgtaatatttgcaagtatccaaaatggttactgatgacaaatactttttaataaatgtcaaaatcacaaaaaaaann

SEQ ID NO: 2504 - DNA, 3121 bp, Homo sapiens
  misc_feature (698)..(698): n is a, c, g, or t
  misc_feature (815)..(815): n is a, c, g, or t
  misc_feature (1209)..(1209): n is a, c, g, or t
  misc_feature (1369)..(1369): n is a, c, g, or t
  misc_feature (3071)..(3071): n is a, c, g, or t
acttccgccccaggtacgctaggccgcggccttcgttcctcccagaaaggagatggtgacattcaaggatgttgctgtggtcttcactgaggaggagctggggctgctggactctgtccagaggaagctgtaccgagatgtgatgctggagaacttcaggaacctgctcttagtagcacatcagcccttcaagccagacctaatatcccagctggagagagaagaaaagcttttgatggtggagacagaaaccccaagagatggatgttcaggaaggaagaatcaacaaaagatggagagtattcaggaagtaacagtaagctacttttcccccaaagagctttcctcccgtcagacctggcaacaaagtgcaggtgggttaatcaggtgtcaagatttcctgaaagtttttcaagggaagaattctcagttgcaagaacaaggtaattccctcggccaggtttgggcaggaataccagttcagatttctgaagataagaactatatattcactcatatagggaatggctccaattatataaaaagtcaagggtatccatcttggagggcacatcattcttggaggaaaatgtatctgaaagagtcacataattatcagtgtagatgtcagcaaatttccatgaaaaatcatttctgtaagtgtgacagtgtcagttggctctcacatcacaatgatnaactggaagtacacagaaaagaaaactacagctgccatgactgtggagaagatatcatgaaggtatcattacttaatcaggagtcaattcaaacagaggagaagccctatccatgtnctgggtatagaaaagccttcagtaatgactccagctctgaagttcatcagcagttccacttggaagggaagccctatacatacagttcatgtggaaagggctgtaattatagttcacttcttcatattcatcaaaatattgagagagaagatgatattgagaattcacatctgaaatcctatcagagagtgcatacagaggagaaaccatgcaaatgtggtgaatatggtgagaacttcaatcactgttcccctcttaacacttatgaacttatccacacaggtgagatgtcctataggcacaacatttatgagaaagccttcagtcatagcttagaccttaatagtatttttagggtccatactagggatgaaccccatgaatatgaggaaantgagaatgtctttaatcagagttcatgtcttcaagtccatcaaaaaatccacactgaagagaaactatacacagatatagagtatggaaagagtttcatttgtagttcaaatcttgacattcagcatagggttcatatggaagagaattcatataattcncaggagtgtggtaatggcttcagtctggcctcacattttcaggaccttcagatagtccacactaaggaacaaccatataaacgctatgtgtgtagtaacagcttcagccataatttacatcttcaaggtcatccaaaaattcacattggagagaaaccacgtaaggagcatgggaatggcttcaactggagctcaaaacttaaagatcatcagagagtccacactggacagaagccatacaaatgcaatatatgcggcaaaggtttcaatcatagatcagttctgaatgttcatcagagagtccacaccggagagaaaccttataaatgcgaggaatgtgataagggattcagtcggagttcatatcttcaagcccatcagagagtccacactggagaaaaaccttataaatgtgaggaatgtgggaaggggttcagtcgaaattcataccttcaaggccatcagagagttcacactggagaaaaaccatacaagtgtgaggagtgtgggaagggcttcagtcggagttcacaccttcaaggccatcagagagtccacactggagaaaaaccattcaaatgtgaggaatgtgggaaggggttcagttggagctttaatcttcaaattcatcagagggttcacacaggagaaaaaccctataaatgtgaagaatgtggtaaaggcttcagtaaggcctcaacacttttggcccatcagagggtccacacgggagagaagccataccaatgtgatgagtgtggtaagagtttcagtcagagatcataccttcagagtcatcagagtgtccattctggagaaagaccatatatatgtgaggtatgtggaaagggcttcagtcagagagcatatcttcaaggtcatcagagagtccacactagagtgaaaccgtataaatgtgagatgtgtgggaagggctttagtcagagttcgcgccttgaagcacatcggagggttcacacaggagggaaaccatacaaatgtgaggtgtgtacaaagggtttcagtgagagttcacgccttcaagcacaccaaagggttcatgtggaagggagaccctataaatgtgaacagtgtggtaagggtttcagtgggtattcaagtcttcaagcccatcacagagtccacacaggagagaaaccatacaaatgtgaggtatgtggaaagggcttcagtcagagatcaaatcttcaggctcaccagagagtccacacaggagagaaaccatacaaatgtgatgcatgtggtaagggtttccgttggagctcaggtcttctcattcatcaaagagtccatagtagtgataaattctataaaagcgaagactatggtaaggactacccttcatcagagaatctacacagaaatgaagattctgttttgttttgaagtcctcaaatgggagctgaaattttccagtcactagagttctttcagtagaaaaagaatttttaaaaattaaaatgtaatgttgctgcccaacttcaacattcataatggccaggagaccacacaacagagacatttaatgagaggggtttcacgagggattttgttagaactttaacatcagtcattgcaggactaggctatctgtgaagaggacttgtatgtagctcaactagcattatacgatgagtgtagactttgtatactaagttgaaggtaaggtgaattagccatntaactaatgattgaggatctgagactataacatcagaatgatggactagt

SEQ ID NO: 2505 - DNA, 483 bp, Homo sapiens
ccgctgtccacggggagggagccccaaagaagccgcaaggttgaaggagaggtgaggagaggtcagtcatcatcagaagaaatacttttctggctccaaaggacgacaactttgacagatgccctctttcacaccaaccaataagtggtgtttgtttgttttcaggaaataataaccacaacaacgtgccaagcactttgcaagtataatattaattactttccgcaacacccttcctagctaagtttgtaatttctctcgctttagcaatggataaactcagggaagttaagcatgttcggccctccagatttgcggattcatcatccaaattcagctaaccacggatgagaaacatttgaggaaaaaaagaatgcttgcatctgtacggaacatgtacggacttttttttccttgtcatcattccctaaataatccaatgtaacaactacttatgtaacaattacatagtacttgatatta

SEQ ID NO: 2506 - DNA, 1498 bp, Homo sapiens
tttttttttttttttttttgggatggagttttgcgcttcttccccaggctggagtgcagtggcgcaatctcggctcactaaaacctctgcctcccaggttcaagcaattctcctgcctcagcctcccaagtagctgaaattacaggtgcccgccactatatctggctaattttttttatatttttgatagagatggggtttcgtcatgttggccaggctggtcttgaaatcctgacctcaggtgatctacccacctcggcctcccaaagtgctgggattacaagtatgagccaccttgcctggcccgttttttcttacttttagtaaaaataacctcacgtaaactgtcataggtgtctgtgggcttatttttgatgttctcctttgttggaaattcttgtgaaataccttccaggtcttagtctttgtgaggatcaggttctgctttcaattggatgttttaagaattagttttaaaataatttgtttttcttattattagcaccctatgtttagttgctgtacttatttggatagtgtggtaagcacagtggcttaggcatgagaaatataactagagatctcataattttatgtgtttataaagtgttttatttaaaaattaaataattgcaaatgagtggataaagaaactgatatatatatatctgattatatatatatatatctgattatgtatatatatctgattatatatatatgatggaatactacccggctataagaatgaatgaattaatggcatttgcagtaacctggatgggattggagactattattctaagtgaagtaactcaggaatggaaaaccaaacatcgttatgttctcgctcataagtaggagctaagctataaggatgcaaaggcataagaatgacacagtggcttttggggactcagagggaaagggtaggaaggagatgagggataaaagactacaaattgggttcatgtgtactgcttgggagatgggtgcaacaaaatctcagaaattaccactaaagaatttactcgtgtaaccaaataccacgtattccccagaagcctgtggaaataaaaaattaaaaaaattgcaaatgtaaataagacagtaacaaagatggcaaagaacaaagatgaaaaagtatgctgtattacctgaaagtgcttttatggatatcttagcttatccttcgtccatttaaatattgttagttttagccgggaacatgcctgtagtcccagcaccttgggaggctgaggcgggcagaccacttgagaccaggagtttgagaccagccaggccaacatggtgaaacccgtctctactgaaaatataaaaattggccgggcgttggggcgcatgcctgtggtcccagctatttaggaggctgaggcgggacaatcgcttgaacctgggaggcggaggttgcagtgagacgagattgtgccactgaactccagcatgggtgacagagtgggaccctgtctccaaaaaa

SEQ ID NO: 2507 - DNA, 324 bp, Homo sapiens
tcatgaataagtgttgttaaaatagaataggttttccagttttcttaaacagtaataatgcttttgaatgcattaaatatttttaaaaacagttttattgtggatagttaggttacacaccatgacaaaacctacctaacataaaatatatctggtgatatttagaacttatagacatatgagggctaaagaaagggtctcaattacattaggatcatattagactagagacctagcattgcctaaattctgcttttctgtctccatagttgctacaaggtcctaagggagccattcacagatcaatggactgattaaaaaaaa

SEQ ID NO: 2508 - DNA, 620 bp, Homo sapiens
ttttttttcttgagatggagtttcactcatcgcccaggctggaggataatgccataatctcagctcactgccctccagcctggcagaagagcgagactccatggacagcagcctcttgctcatgtgaccgtcccgtgtgtgctcctggagaggaggctccggtgtctcttcccatgagggcactcatctcatcgtgagggtcccccaggatcttctctaaacctgctcccctcccaaaggccccacctccaacactgtcttgctgggggtgaggactttaacatgtgaactggaggtgagggacaagtatccagtccacagcaaccccaactctgggacccagtttctctactggcacttgctgagtaaccacccacccagacgcctggtggctcacagctgcagggacacggtgcttctgtggccgcaggcgtgaggacccgggtcctggcctccctggggcctgttcctcggctgtgcccggttactcagggctgctctggtcctgcctccccaaggagagcccttgtgaggtcacaggtgcagaaggaagcccgtccgatgcagacggatgttccagccaggcagagaggagaaaatcagtacctaaagcatctgac

SEQ ID NO: 2509 - DNA, 1026 bp, Homo sapiens
acattttcagatatgcaaactcttacttttaaaaattcattttcaaaatacatgttttcaggagcctactaaaggaggagctccaaatcaagggagcaaaccaagaaagaggaagaaggggctggccactgtgctgtaatcccagcaacccgcccaaaggcaatttttttcacccaaatttttcactactacctaatcatggtttcttctgctaatagtctcctccccgtgtttctgttctccagccccagactgcactcgcagtcagtgcactgcgtcttaggtgttgcttctgccaacagctgtcttagacgaggtggctctgccaacacctgtcttagacgaggtggctctgccggcacctgtcttagacgaggttgctgtgtcaaaattccacagaccgactggcttcacagcagacatttctttctcccagctctgcaggctgggagtccagcctccaggtgccacagacccagttcctgttgagggaccacccccagcttacggacagcagcctcttgctcatgtgaccgtcccgtgtgtgctcctggagaggaggctccggtgtctcttcccatgagggcactcatctcatcgtgagggtcccccaggatcttctctaaacctgctcccctcccaaaggccccacctccaacactgtcttgctgggggtgaggactttaacatgtgaactggaggtgagggacaagtatccagtccacagcaaccccaactctgggacccagtttctctactggcacttgctgagtaaccacccacccagacgcctggtggctcacagctgcagggacacggtgcttctgtggccgcaggcgtgaggacccgggtcctggcctccctggggcctgttcctcggctgtgcccggttactcagggctgctctggtcctgcctccccaaggagagcccttgtgaggtcacaggtgcagaaggaagcccgtccgatgcagacggatgttccagccaggcagagaggagaaaatcagtacctaaagcatctgac

SEQ ID NO: 2510 - DNA, 367 bp, Homo sapiens
tacatctttgcaaacttaaatggttttcatggcttttcagcaaaaacacaataaacaaccttacgtagcttccataaagaaattaaatgggccaggcacggtggctcatgcctgaaatctcagtactttgggaggctgaggtgggaggattgcttgagcttagagcccagtctgggcaatataaggagaccttgtttctactaaaaacaaaacaaaaacaaaaactaactgggtgtgttggtgtgcatctatagtctcagctacttgggaggctgaggcgggaggatcgcttgagcccaggaggttgaggctgcagatcgcgccactgcactccagcctgggcaagaaaatgaggccctgtctttca

SEQ ID NO: 2511 - DNA, 261 bp, Homo sapiens
gcttctgagtctgagtcactgaggacagccttattcagaaacacaaaatcttaagagtttgaagaagatctcaaatttcccttccccttttaatgcaatctggacatattcaaagaaatatatgagccctcagatgtgaaggatatcctttccccagcatctctgccagtgggcacacagtctctttttaaatattttgaagatggtgaagggacattacttctcagggcaaccagtgctaatgaagttttgtgttactgt

SEQ ID NO: 2512 - DNA, 855 bp, Homo sapiens
gtgctggttgacttgacctgctgcgtttctggctgggtcccgttctgtttttcccagtgtttgttccagtgtagaggctgggtgtggttcttgatacaggcccttcatgtctacatctgccctaactgtaggtcaccaaatcttacacagccttttacatgacaaaaggtgttgattcagatgaaccgattctgaagaccaggctgctgggcactgggctcccagatggagggtggatcagaaccttctgaggatcctgaaacatcccacttcctactgacatcactaatgtacacgtctaggaagcctttcttgtgtggaccaatcctatgaatccctacatctggtggctccggtggttagtgtgtgaaccaggggactatatgtctgcaaacagtggcttgaatgttaaagatttgctttgggtagatttaacctcattatttttttccccccttggttagtaatacccagagtgtttcatctattacctcatttgtcttctagaagtctgggaattaggatttgcaggcgcccactcttttattgatatggaaggagaaagcatggggcttacctaaaggtcagagagaaagaatagattgtaacttttattctcggcctggattacatatttcttgtgtgtcatatttagcttcacaattttagctgtcttaaaagaaaaagaaaaaaatctattagtgttcaataattgaagattttgtttgttgttaaaaccaggaaattagatcatttccctggtctaattgatctgaaataaattgcagactgagggagagatgaagagggagacaaactaatgcgtgtaacgtttttaacactcagtgatctggg

SEQ ID NO: 2513 - DNA, 229 bp, Homo sapiens
gtagccctgaggctacgttgctcagtgtcacacacagccaagactcatgtcacacacagccaagactcagacctgggcctttggacttcggagtctttaacatttgtgattacccttcttctatactgtctctttccgtgtctgtaagtgctgttcagtttccacatgtcaactcattccatccactcagcaacctcatgtggtataggtcctgccatatggggtagcc

SEQ ID NO: 2514 - DNA, 446 bp, Homo sapiens
ttgagaaagcctgaagaccctgagctagagacacactgtttagaaagatgagccctggaaacactagtgagggagaaaagtaagcagaaatgagcgccggagactccaccaagggagtctgaaaagtcagggcactgtgggtgaacttgaacctgaatgtagaatggctcttacggtatctataatttgcaaacttcttatatactatttacataatagttctccacttagagatctttaacacaccttcttgttttttggaatgtgacaagttttatagctagtatggacaggagagaggataactttaaaatgtggtgaatagggctgggcgctgatggcctatgcctgtaatggcagcattttgggaggctgaggcaggaggatcgcttgagcccaggaatttgaggacagcctgaacaacacagcaagaccttgtctcttta

SEQ ID NO: 2515 - DNA, 957 bp, Homo sapiens
aaaccagccagtgaagttaactaaactcctaacgtgccagagtgctttctttagaacaaatatacctgtttacaagagagtagtgatctcgtcaagtgaaccttgttgttatattttaaatctttagtatctgctggacaaaaagaggtatcagctgatgtggtttacacctcattgcttcctagtgaacgttacctggcacagacttttgtttctgagataggaaggaagaagctagagatcaccagtccctgaggcactgttttcaaatatgctgttaaccactggtcaggagtctgcagtgcagccacgctattggctgcttcttgacaatgtcatgtaaattatcagtgagctcttctcagagtcaagccgtccaagagctttgcttcgtccctggtgcctaatagcagactataaagaagtcttatccctgagagagatttaccagcatggggaagaaagcttgcatttagatgccatgttccagttggaaaagtcctttcagatgcatcagtgcctggctgtaacttcacagtgactctgggcagagcccagggttcctatctctgttgtccaaatgggcagactgaggctggcccaaggtcatccacagctgctgatgagacccgaggcccttgatgtggacctgctggccacagggcagtgtgcttgtcacgtggtggaatttcagattgcgttgcatggaacagagctcccacaagctggccgagggatgctggggagaacgcactcagggcaccagggctcctacgccactcagccagagctgctcctctcttacctgttttataggttaaaagcttttgacagaaactatcataaaggtttaaaaactgctgaccctggccaggcgtggtggctaatgcatgtaaccccagcactttgagaggccgaggcaggtggatcacctgaggtcaggagtttgagagcagc

SEQ ID NO: 2516 - DNA, 227 bp, Homo sapiens
gagaggaaagaatgtgctatcaggaaatggggcttagacgaaagagaaggtatccttaggccctgccaccttggatactgctgagtaaggtctaggaactggctcatccagcccttcccttagagggtttccacctcccctctcccacactggctgtcctctccttcccttcatctaccacaccctctgctgcctgtgcccccatccctctgcctggaactatggcc

SEQ ID NO: 2517 - DNA, 793 bp, Homo sapiens
aattttctgagtttttttttaaaaaaactaattatacaaacttgaaagggttcaccttgccctagcaaaactaggattgggacacctttttttccccctgaggatcactgacaaaaaacactgcaccagtaaggaagcaactaaattttgttttgttctttgaaaaaggctaacctgagctaggtaaaggttatatcattcacttttgaaataaaccatcgagaacacaaaatgacaagtgagttaggttgggctgatgggatagaaggtgggaggggaatgctatacagctgggaacagcagactttctctgaagggccagatggtaactacattagggtttgcgggtctgatggtcgccatcataactgcatactcaactctgccgttgtagggtaagagcagcactcgatgacacagaaatgaatgcacatgactgtgttccagtaaaattttattttaattaaaatcaattcatgtttgaaaaaggatttaaagtagcttctaataaaggacatgtgtaatgaaacttaaaatatgatattttctttaaaaatctttatccttatgtagacttctaaaactatgttttgcatttagacagtcaaggaaaatacaagttgttatacaattctcattgactaattgaagtttactaggagaggaaaactttttcttgataccggcaatcttttacttataatggcttgagttaaaatgctccaacttttctaatttttgcttttgaaaataaaacacctatagtgacaataaaaacacacatttaaagcca

SEQ ID NO: 2518 - DNA, 490 bp, Homo sapiens
gcaatggtcctgtcggttttggtgtttggattgtttggctttgttttccttttttattcttcctgtttttaatgctgtgtaagatctcctgctatgaatgttccagttacccctattgtactgtatatacgtgtgctgcatgtgtaaattctgtttcaggttttggagttttcatcttaagtacagctggtcctgttgtgaactcatctttcctgtatgctcctctgtgtctgatttccaattgccaaaatgtttgaccaaatgtgttttgacaaatatcccgagacagccatgcgtatccttgtgaaagggcatgctccatgtgggatggctcgtgtacagcataaatctatcaaacttggaattgtgtatacatttatatgccagataactaacattcatgtaacagctgcaaagatatttagtgtatatcagattaataaaagagcatttttttttttgctccattatattcaaatacagattgctg

SEQ ID NO: 2519 - DNA, 525 bp, Homo sapiens
gcttatgagaggttggagaagcaaaagctagggagaatggagaaagtgaagcatttttgaaaaagctgctgatgtgctatacgtcccggtctcttctcaagaaagaagcctcaaatccagtggaaaaagtttaacaaaactatttggaagatgtaggggtggcaaaactacttggaataacttgatatctttctcattcagagaatccagcctcctacctgccatatctaagtgataagagattcacaagctagttgctgataaaagtgcaaaagaaggccaggggcagtgggtaatgcctgtaatcccagcagtttgggaggccaaggagggcggatcacctgaggtcaggagttcaagaccagcctggccaacatggcgaaactccgtctctactaaaaatacaaaaattagctgggcatggtgttgggcacctataatcccagttgcttgggaggctgaggcagggagaatcgcttgaactcgggaggcggaggtttcagtgagctgagattgagccattgc

SEQ ID NO: 2520 - DNA, 591 bp, Homo sapiens
ggattcctttcctatgatgccaatcaaacatgcaatccagtggctttatccatatagtattttactaggtcatgaagggaagatggctgtggaaggtgttttaaagcgctttgaacttcaagattcaggaagctctctacttcctaaagagattgtaaaagtagagaagatgatggaaaaccatgtgtcccaagcttctgtgaccatccggattgcagataaagaggtgaccattaaggtgccagccgggaccaggctattaagtcaaccttgtgcgtcagaccgtttcatacagactttgagccataagcagctacaggctgaaatgatgcagtctcacatggttaaagatatatgtttaattggaggaaagggttgtggaaaaacagtgatcgctaagaactttgccgataccttaggatacaacatagaacctattatgctctatcaggtacagtgttcatttttagctgcacttggactataagcatatatgcttaggccatcagcagaatttatggatatcttcttgttatgacctgtgtttttttatataggtaaagaaccaaaatagtaataaaattattcaaa

SEQ ID NO: 2521 - DNA, 6123 bp, Homo sapiens
ggattcctttcctatgatgccaatcaaacatgcaatccagtggctttatccatatagtattttactaggtcatgaagggaagatggctgtggaaggtgttttaaagcgctttgaacttcaagattcaggaagctctctacttcctaaagagattgtaaaagtagagaagatgatggaaaaccatgtgtcccaagcttctgtgaccatccggattgcagataaagaggtgaccattaaggtgccagccgggaccaggctattaagtcaaccttgtgcgtcagaccgtttcatacagactttgagccataagcagctacaggctgaaatgatgcagtctcacatggttaaagatatatgtttaattggaggaaagggttgtggaaaaacagtgatcgctaagaactttgccgataccttaggatacaacatagaacctattatgctctatcaggatatgacagcgcgtgatctgctacagcagagatacacccttccaaatggagacactgcctggcggtcctcaccccttgtgaatgctgctctggaaggcaagctggtcctgctggatggcattcaccgggtgaatgcgggcacgcttgctgtattgcaaaggttaatccatgatcgagagctaagcctctatgatggttctaggctgctgagagaagacaggtatatgcgtttaaaggaggagctgcaactgtctgatgaacagctacagaagagatccatttttcctatccatccctccttcagaatcattgccttggcagaaccccctgttattggaagcacagcacaccagtggctgggaccagaattcttaaccatgttctttttccattacatgaaaccacttgtgaaaagtgaagaaatccaagtgattaaggaaaaggtcccaaatgtacctcaggaagctctggataagttattatcatttacacacaaactcagagaaacacaggatccaacggcacaatcattagcggcatcactttctaccagacaactgttgcgaatttctcgtcggctgtcacagtatcctaatgaaaatcttcacagtgctgttactaaagcctgcctttccaggtttttacccagtcttgctaggtcagcattagaaaaaatctggcagatgctacaatagaaataaatactgatgacaatttggagccagaactgaaggattacaaatgtgaagtaacatctggaactctgaggattggtgctgttagtgcaccgatctataatgcacatgagaaaatgaaagtgcctgatgttcttttctatgacaacattcagcatgtgatagtgatggaagatatgctgaaagactttctccttggagaacacttattattggttggcaaccagggtgtaggaaaaaacaagattgttgacagattccttcacctgctcaacagaccccgagaatatattcagctacacagggataccacagtacaaactcttacgcttcagccttcggttaaagacggacttattgtatatgaagactcacctttggttaaagcagtaaagttgggtcatattctggtagtagatgaggctgacaaagctccaacaaatgtcacgtgtattttaaaaactctagtagaaaatggagaaatgattctagcagatggaagacgcattgttgcaaattctgctaatgtgaatggaagagaaaatgttgtagtgattcatcctgattttaggatgattgttctggcaaatagacctggatttcctttcctaggcaatgatttcttcggtaccttaggtgatatttttagctgccatgcagttgataaccccaaaccccactcggagctcgagatgctcagacagtatggaccaaatgtgcctgagcccatccttcagaagcttgtggctgcctttggagagctgaggagtttggctgaccaagggattattaactatccttattctaccagagaagttgtcaacatagtcaaacatttacagaaatttccgactgaaggtctctccagtgtagttcgaaatgtgtttgactttgattcctacaacaatgacatgagggagatattgattaacactttacacaaatacgggatacctatcggagcaaagcctaccagtgtgcagctggcaaaggagttgactctgccagaacaaacgttcatgggctactggacaattggtcaggcaagaagtgggatgcaaaaactcttgtgtccagtggaaactcatcatatagacataaagggtccagcacttataaatatacaggagtatccaatagaaagacatgaagaaagatccctaaactttactgaagaatgtgcctcatggagaataccattggatgaaattaatataatctgtgacattgctacatcacatgaaaatgagcaaaatactctctatgtagttacatgcaatcccgcttccctgtactttatgaatatgactgggaaaagtggcttctttgtggacttttttgatatcttcccaagaacagccaatggcgtttggcacccttttgtgacagtggcaccgctgggaagtcctctcaaaggtcaagtggttctccatgagcagcagagtaatgttatcctgttgttagatactactggccgggcccttcatcgtctcatcctcccttccgagaagtttacatctaagaaacctttctggtggaacaaagaagaagctgaaacttataaaatgtgtaaagaattttcacacaaaaactggctggtgttctacaaagaaaaagggaacagcctgactgtgctggatgttctagaagggcgaactcacaccatctcacttcccatcaacctcaagacagttttccttgtagcagaggacaaatggcttctggtggagagcaaaacaaatcagaaatatcttttaactaagcctgcacacatcgaatctgagggtagtggggtttgccagttgtatgtgctgaaagaggagccgcccagcacagggtttggagttacacaagaaacagagttcagcatacctcataaaatttccagtgatcaactatcatctgaacatctaagttcagctgtggaacaaaagattgcctctcccaacagaattctctcagatgagaaaaattatgctacaatagttgttggttttccagatctcatgtcacccagtgaagtttattcttggaagagaccatcatctttgcataaacgaagggcactgatacatcattctatagaggaaagaagaaaagggggactccaaaacaaagcaattgtgtgactcttttagatacgaatcaggtagtgaggattttacccccaggagaagtccctctaaaagatatctacccaaaagatgttactcctccacaaacatctggttatatagaagtcactgatcttcaatcaaagaaactccgatatatccctattcccagatcagaatctctctcgccgtataccacatggctgtcgaccatttcagacacagatgcactgctggctgagtgggacaaaagcggtgttgttactgttgatatgggaggtcacatcaggctttgggaaactggacttgaacgtctgcagcgatcactcatggaatggagaaacatgattggacaagatgacagaaatatgcagataacaatcaacagagacagtggtgaagatgtaagctcccccaaacacgggaaggaggacccagacaacatgcctcacgtgggcggcaacacttgggctggcggaacagggggaagagacacggcaggcctgggtggcaaaggaggcccttaccggctggatgcaggccatacggtgtaccaggtctctcaggctgagaaagatgcagttcccgaagaggtcaagagagctgctagagagatgggccagagagcattccagcagaggctaaaggagatccaaatgagtgaatacgatgctgcaacctatgaaaggttttcaggtgctgttcggcgacaggtgcactccctccgaatcatcctggataatttacaggctaaaggtaaagaaagacaatggctaagacatcaagctactggagaattagatgatgccaagatcattgatgggctgactggagaaaaagccatctacaaacgtcggggtgagctggagccacaacttggcagcccacaacagaaacccaagcgtctgcgcctggtggtagatgtgtctggtagcatgtaccgtttcaacaggatggatggccggcttgagcgcacaatggaggctgtgtgtatggtcatggaagccttcgagaactatgaggagaagttccagtatgacatcgttggacactctggagatggctacaacattggtctggttccaatgaacaaaatccccaaggacaataagcaaagactagaaattctgaagacaatgcatgcccactctcagttctgcatgagtggggaccacacgttagaagggacagaacatgccatcaaggaaattgtcaaagaagaagctgatgagtactttgtcatagtcttgagtgatgcaaatctgtcacgatatggaatacatcctgctaagtttgctcaaatcctcacaagagaccctcaagtaaatgcttttgccatttttattggctctttaggtgatcaagcaaccaggcttcagagaactttaccagctggtcggtctttcgttgccatggataccaaggatatccctcagattttacaacagatcttcacctccaccatgttgtcgagtgtctaagaagtgcccttcatcaccctgatgacaccaggatttgaaataagacaggaataaagagtattctgaaaaaaagaagatatggatgaagtgaacccatgcagtgactggatgattccggcattcctgggtcttcctacacttgctccgtaatgagaattcagagaagcagccagaaggagacttaaacatggaaagatactccactgatgagtttagaagtgattagggcaagctagttgacctgcactttatcaaaggttggggttaaaggaaggtggttttgagaactatgtgtttggtctatttccaaaaacctgagggggagaaaatactttgcttttgccttaacacatcatctggtcacgttagaaaagtgaccccatcaaactgagcctttgatgtcacattctgacacaagatgcaagtctgtgcaaaacccaccaaaatgctcctatccaacaattatttttattttctccctgctctgtattgaccagaaaacaatgattttataatatttaacccaccaaaaagtccctccaacagcaatatcttatgaaaggctggctgttctcaataatttcattttcttggccaaagccaaaaggaatcaaaaaatccttggagtgcttgcctttccacgtgacttttaaaaggctcttaaagagcaaatgtcctcttctccttgctgctagagtgggaggagaaagatgtcttgccttaaaagtttactgtttcttctgttcttctagcatctctcaaaaaattcacagtactccattttggggtccaaactgtaatgctcaaaataataaatgcttacacgaaaattatttattgagaatattcatataaaaattacctaaagcaaagtaaaaaaagtaaaatcaaggtggtatatttgaagtgaatggtgattggaaatttttagctgtaacaaaaagaaagaaaacaactttttttaaagcctcattctcttttctttcaaaatgtaccttattcccacacactcttgggctgacctttattttatcaataagctcaatattactttgtttaaaataagatgcttcagcaaaagtcattctctctttaaccatataatttaaaaactcctcttcacgattgatagcaaaatcagaaacgttagggcaccagtgagttgaaaaaactggtcttaagttggaaaaactattattaataatattatcctatccatccatatctattgaaattgtacaggtccataatttcattttaattaattataggaaagaagaaaagataatacccatttgttctatcacccctctccctatcattaactatcaaataaataaataaaagcaatctgatttccaacgtggtactaaaaaaaaag

SEQ ID NO: 2522 - DNA, 5177 bp, Homo sapiens
tagggaacggagcggggacggcggagtgagggagagtatgaggggatactttctaccagacaactgttgcgaatttctcgtcggctgtcacagtatcctaatgaaaatcttcacagtgctgttactaaagcctgcctttccaggtttttacccagtcttgctaggtcagcattagaaaaaatctggcagatgctacaatagaaataaatactgatgacaatttggagccagaactgaaggattacaaatgtgaagtaacatctggaactctgaggattggtgctgttagtgcaccgatctataatgcacatgagaaaatgaaagtgcctgatgttcttttctatgacaacattcagcatgtgatagtgatggaagatatgctgaaagactttctccttggagaacacttattattggttggcaaccagggtgtaggaaaaaacaagattgttgacagattccttcacctgctcaacagaccccgagaatatattcagctacacagggataccacagtacaaactcttacgcttcagccttcggttaaagacggacttattgtatatgaagactcacctttggttaaagcagtaaagttgggtcatattctggtagtagatgaggctgacaaagctccaacaaatgtcacgtgtattttaaaaactctagtagaaaatggagaaatgattctagcagatggaagacgcattgttgcaaattctgctaatgtgaatggaagagaaaatgttgtagtgattcatcctgattttaggatgattgttctggcaaatagacctggatttcctttcctaggcaatgatttcttcggtaccttaggtgatatttttagctgccatgcagttgataaccccaaaccccactcggagctcgagatgctcagacagtatggaccaaatgtgcctgagcccatccttcagaagcttgtggctgcctttggagagctgaggagtttggctgaccaagggattattaactatccttattctaccagagaagttgtcaacatagtcaaacatttacagaaatttccgactgaaggtctctccagtgtagttcgaaatgtgtttgactttgattcctacaacaatgacatgagggagatattgattaacactttacacaaatacgggatacctatcggagcaaagcctaccagtgtgcagctggcaaaggagttgactctgccagaacaaacgttcatgggctactggacaattggtcaggcaagaagtgggatgcaaaaactcttgtgtccagtggaaactcatcatatagacataaagggtccagcacttataaatatacaggagtatccaatagaaagacatgaagaaagatccctaaactttactgaagaatgtgcctcatggagaataccattggatgaaattaatataatctgtgacattgctacatcacatgaaaatgagcaaaatactctctatgtagttacatgcaatcccgcttccctgtactttatgaatatgactgggaaaagtggcttctttgtggacttttttgatatcttcccaagaacagccaatggcgtttggcacccttttgtgacagtggcaccgctgggaagtcctctcaaaggtcaagtggttctccatgagcagcagagtaatgttatcctgttgttagatactactggccgggcccttcatcgtctcatcctcccttccgagaagtttacatctaagaaacctttctggtggaacaaagaagaagctgaaacttataaaatgtgtaaagaattttcacacaaaaactggctggtgttctacaaagaaaaagggaacagcctgactgtgctggatgttctagaagggcgaactcacaccatctcacttcccatcaacctcaagacagttttccttgtagcagaggacaaatggcttctggtggagagcaaaacaaatcagaaatatcttttaactaagcctgcacacatcgaatctgagggtagtggggtttgccagttgtatgtgctgaaagaggagccgcccagcacagggtttggagttacacaagaaacagagttcagcatacctcataaaatttccagtgatcaactatcatctgaacatctaagttcagctgtggaacaaaagattgcctctcccaacagaattctctcagatgagaaaaattatgctacaatagttgttggttttccagatctcatgtcacccagtgaagtttattcttggaagagaccatcatctttgcataaacgaagggcactgatacatcattctatagaggaaagaagaaaagggggactccaaaacaaagcaattgtgtgactcttttagatacgaatcaggtagtgaggattttacccccaggagaagtccctctaaaagatatctacccaaaagatgttactcctccacaaacatctggttatatagaagtcactgatcttcaatcaaagaaactccgatatatccctattcccagatcagaatctctctcgccgtataccacatggctgtcgaccatttcagacacagatgcactgctggctgagtgggacaaaagcggtgttgttactgttgatatgggaggtcacatcaggctttgggaaactggacttgaacgtctgcagcgatcactcatggaatggagaaacatgattggacaagatgacagaaatatgcagataacaatcaacagagacagtggtgaagatgtaagctcccccaaacacgggaaggaggacccagacaacatgcctcacgtgggcggcaacacttgggctggcggaacagggggaagagacacggcaggcctgggtggcaaaggaggcccttaccggctggatgcaggccatacggtgtaccaggtctctcaggctgagaaagatgcagttcccgaagaggtcaagagagctgctagagagatgggccagagagcattccagcagaggctaaaggagatccaaatgagtgaatacgatgctgcaacctatgaaaggttttcaggtgctgttcggcgacaggtgcactccctccgaatcatcctggataatttacaggctaaaggtaaagaaagacaatggctaagacatcaagctactggagaattagatgatgccaagatcattgatgggctgactggagaaaaagccatctacaaacgtcggggtgagctggagccacaacttggcagcccacaacagaaacccaagcgtctgcgcctggtggtagatgtgtctggtagcatgtaccgtttcaacaggatggatggccggcttgagcgcacaatggaggctgtgtgtatggtcatggaagccttcgagaactatgaggagaagttccagtatgacatcgttggacactctggagatggctacaacattggtctggttccaatgaacaaaatccccaaggacaataagcaaagactagaaattctgaagacaatgcatgcccactctcagttctgcatgagtggggaccacacgttagaagggacagaacatgccatcaaggaaattgtcaaagaagaagctgatgagtactttgtcatagtcttgagtgatgcaaatctgtcacgatatggaatacatcctgctaagtttgctcaaatcctcacaagagaccctcaagtaaatgcttttgccatttttattggctctttaggtgatcaagcaaccaggcttcagagaactttaccagctggtcggtctttcgttgccatggataccaaggatatccctcagattttacaacagatcttcacctccaccatgttgtcgagtgtctaagaagtgcccttcatcaccctgatgacaccaggatttgaaataagacaggaataaagagtattctgaaaaaaagaagatatggatgaagtgaacccatgcagtgactggatgattccggcattcctgggtcttcctacacttgctccgtaatgagaattcagagaagcagccagaaggagacttaaacatggaaagatactccactgatgagtttagaagtgattagggcaagctagttgacctgcactttatcaaaggttggggttaaaggaaggtggttttgagaactatgtgtttggtctatttccaaaaacctgagggggagaaaatactttgcttttgccttaacacatcatctggtcacgttagaaaagtgaccccatcaaactgagcctttgatgtcacattctgacacaagatgcaagtctgtgcaaaacccaccaaaatgctcctatccaacaattatttttattttctccctgctctgtattgaccagaaaacaatgattttataatatttaacccaccaaaaagtccctccaacagcaatatcttatgaaaggctggctgttctcaataatttcattttcttggccaaagccaaaaggaatcaaaaaatccttggagtgcttgcctttccacgtgacttttaaaaggctcttaaagagcaaatgtcctcttctccttgctgctagagtgggaggagaaagatgtcttgccttaaaagtttactgtttcttctgttcttctagcatctctcaaaaaattcacagtactccattttggggtccaaactgtaatgctcaaaataataaatgcttacacgaaaattatttattgagaatattcatataaaaattacctaaagcaaagtaaaaaaagtaaaatcaaggtggtatatttgaagtgaatggtgattggaaatttttagctgtaacaaaaagaaagaaaacaactttttttaaagcctcattctcttttctttcaaaatgtaccttattcccacacactcttgggctgacctttattttatcaataagctcaatattactttgtttaaaataagatgcttcagcaaaagtcattctctctttaaccatataatttaaaaactcctcttcacgattgatagcaaaatcagaaacgttagggcaccagtgagttgaaaaaactggtcttaagttggaaaaactattattaataatattatcctatccatccatatctattgaaattgtacaggtccataatttcattttaattaattataggaaagaagaaaagataatacccatttgttctatcacccctctccctatcattaactatcaaataaataaataaaagcaatctgatttccaacgtggtactaaaaaaaaag

SEQ ID NO: 2523 - DNA, 6068 bp, Homo sapiens
ggattcctttcctatgatgccaatcaaacatgcaatccagtggctttatccatatagtattttactaggtcatgaagggaagatggctgtggaaggtgttttaaagcgctttgaacttcaagattcaggaagctctctacttcctaaagagattgtaaaagtagagaagatgatggaaaaccatgtgtcccaagcttctgtgaccatccggattgcagataaagaggtgaccattaaggtgccagccgggaccaggctattaagtcaaccttgtgcgtcagaccgtttcatacagactttgagccataagcagctacaggctgaaatgatgcagtctcacatggttaaagatatatgtttaattggaggaaagggttgtggaaaaacagtgatcgctaagaactttgccgataccttaggatacaacatagaacctattatgctctatcaggatatgacagcgcgtgatctgctacagcagagatacacccttccaaatggagacactgcctggcggtcctcaccccttgtgaatgctgctctggaaggcaagctggtcctgctggatggcattcaccgggtgaatgcgggcacgcttgctgtattgcaaaggttaatccatgatcgagagctaagcctctatgatggttctaggctgctgagagaagacaggtatatgcgtttaaaggaggagctgcaactgtctgatgaacagctacagaagagatccatttttcctatccatccctccttcagaatcattgccttggcagaaccccctgttattggaagcacagcacaccagtggctgggaccagaattcttaaccatgttctttttccattacatgaaaccacttgtgaaaagtgaagaaatccaagtgattaaggaaaaggtcccaaatgtacctcaggaagctctggataagttattatcatttacacacaaactcagagaaacacaggatccaacggcacaatcattagcggcatcactttctaccagacaactgttgcgaatttctcgtcggctgtcacagtatcctaatgaaaatcttcacagtgctgttactaaagcctgcctttccaggtttttacccagtcttgctaggtcagcattagaaaaaatctggcagatgctacaatagaaataaatactgatgacaatttggagccagaactgaaggattacaaatgtgaagtaacatctggaactctgaggattggtgctgttagtgcaccgatctataatgcacatgagaaaatgaaagtgcctgatgttcttttctatgacaacattcagcatgtgatagtgatggaagatatgctgaaagactttctccttggagaacacttattattggttggcaaccagggtgtaggaaaaaacaagattgttgacagattccttcacctgctcaacagaccccgagaatatattcagctacacagggataccacagtacaaactcttacgcttcagccttcggttaaagacggacttattgtatatgaagactcacctttggttaaagcagtaaagttgggtcatattctggtagtagatgaggctgacaaagctccaacaaatgtcacgtgtattttaaaaactctagtagaaaatggagaaatgattctagcagatggaagacgcattgttgcaagtgagtattttagaaagcaatacctggatttcctttcctaggcaatgatttcttcggtaccttaggtgatatttttagctgccatgcagttgataaccccaaaccccactcggagctcgagatgctcagacagtatggaccaaatgtgcctgagcccatccttcagaagcttgtggctgcctttggagagctgaggagtttggctgaccaagggattattaactatccttattctaccagagaagttgtcaacatagtcaaacatttacagaaatttccgactgaaggtctctccagtgtagttcgaaatgtgtttgactttgattcctacaacaatgacatgagggagatattgattaacactttacacaaatacgggatacctatcggagcaaagcctaccagtgtgcagctggcaaaggagttgactctgccagaacaaacgttcatgggctactggacaattggtcaggcaagaagtgggatgcaaaaactcttgtgtccagtggaaactcatcatatagacataaagggtccagcacttataaatatacaggagtatccaatagaaagacatgaagaaagatccctaaactttactgaagaatgtgcctcatggagaataccattggatgaaattaatataatctgtgacattgctacatcacatgaaaatgagcaaaatactctctatgtagttacatgcaatcccgcttccctgtactttatgaatatgactgggaaaagtggcttctttgtggacttttttgatatcttcccaagaacagccaatggcgtttggcacccttttgtgacagtggcaccgctgggaagtcctctcaaaggtcaagtggttctccatgagcagcagagtaatgttatcctgttgttagatactactggccgggcccttcatcgtctcatcctcccttccgagaagtttacatctaagaaacctttctggtggaacaaagaagaagctgaaacttataaaatgtgtaaagaattttcacacaaaaactggctggtgttctacaaagaaaaagggaacagcctgactgtgctggatgttctagaagggcgaactcacaccatctcacttcccatcaacctcaagacagttttccttgtagcagaggacaaatggcttctggtggagagcaaaacaaatcagaaatatcttttaactaagcctgcacacatcgaatctgagggtagtggggtttgccagttgtatgtgctgaaagaggagccgcccagcacagggtttggagttacacaagaaacagagttcagcatacctcataaaatttccagtgatcaactatcatctgaacatctaagttcagctgtggaacaaaagattgcctctcccaacagaattctctcagatgagaaaaattatgctacaatagttgttggttttccagatctcatgtcacccagtgaagtttattcttggaagagaccatcatctttgcataaacgaagggcactgatacatcattctatagaggaaagaagaaaagggggactccaaaacaaagcaattgtgtgactcttttagatacgaatcaggtagtgaggattttacccccaggagaagtccctctaaaagatatctacccaaaagatgttactcctccacaaacatctggttatatagaagtcactgatcttcaatcaaagaaactccgatatatccctattcccagatcagaatctctctcgccgtataccacatggctgtcgaccatttcagacacagatgcactgctggctgagtgggacaaaagcggtgttgttactgttgatatgggaggtcacatcaggctttgggaaactggacttgaacgtctgcagcgatcactcatggaatggagaaacatgattggacaagatgacagaaatatgcagataacaatcaacagagacagtggtgaagatgtaagctcccccaaacacgggaaggaggacccagacaacatgcctcacgtgggcggcaacacttgggctggcggaacagggggaagagacacggcaggcctgggtggcaaaggaggcccttaccggctggatgcaggccatacggtgtaccaggtctctcaggctgagaaagatgcagttcccgaagaggtcaagagagctgctagagagatgggccagagagcattccagcagaggctaaaggagatccaaatgagtgaatacgatgctgcaacctatgaaaggttttcaggtgctgttcggcgacaggtgcactccctccgaatcatcctggataatttacaggctaaaggtaaagaaagacaatggctaagacatcaagctactggagaattagatgatgccaagatcattgatgggctgactggagaaaaagccatctacaaacgtcggggtgagctggagccacaacttggcagcccacaacagaaacccaagcgtctgcgcctggtggtagatgtgtctggtagcatgtaccgtttcaacaggatggatggccggcttgagcgcacaatggaggctgtgtgtatggtcatggaagccttcgagaactatgaggagaagttccagtatgacatcgttggacactctggagatggctacaacattggtctggttccaatgaacaaaatccccaaggacaataagcaaagactagaaattctgaagacaatgcatgcccactctcagttctgcatgagtggggaccacacgttagaagggacagaacatgccatcaaggaaattgtcaaagaagaagctgatgagtactttgtcatagtcttgagtgatgcaaatctgtcacgatatggaatacatcctgctaagtttgctcaaatcctcacaagagaccctcaagtaaatgcttttgccatttttattggctctttaggtgatcaagcaaccaggcttcagagaactttaccagctggtcggtctttcgttgccatggataccaaggatatccctcagattttacaacagatcttcacctccaccatgttgtcgagtgtctaagaagtgcccttcatcaccctgatgacaccaggatttgaaataagacaggaataaagagtattctgaaaaaaagaagatatggatgaagtgaacccatgcagtgactggatgattccggcattcctgggtcttcctacacttgctccgtaatgagaattcagagaagcagccagaaggagacttaaacatggaaagatactccactgatgagtttagaagtgattagggcaagctagttgacctgcactttatcaaaggttggggttaaaggaaggtggttttgagaactatgtgtttggtctatttccaaaaacctgagggggagaaaatactttgcttttgccttaacacatcatctggtcacgttagaaaagtgaccccatcaaactgagcctttgatgtcacattctgacacaagatgcaagtctgtgcaaaacccaccaaaatgctcctatccaacaattatttttattttctccctgctctgtattgaccagaaaacaatgattttataatatttaacccaccaaaaagtccctccaacagcaatatcttatgaaaggctggctgttctcaataatttcattttcttggccaaagccaaaaggaatcaaaaaatccttggagtgcttgcctttccacgtgacttttaaaaggctcttaaagagcaaatgtcctcttctccttgctgctagagtgggaggagaaagatgtcttgccttaaaagtttactgtttcttctgttcttctagcatctctcaaaaaattcacagtactccattttggggtccaaactgtaatgctcaaaataataaatgcttacacgaaaattatttattgagaatattcatataaaaattacctaaagcaaagtaaaaaaagtaaaatcaaggtggtatatttgaagtgaatggtgattggaaatttttagctgtaacaaaaagaaagaaaacaactttttttaaagcctcattctcttttctttcaaaatgtaccttattcccacacactcttgggctgacctttattttatcaataagctcaatattactttgtttaaaataagatgcttcagcaaaagtcattctctctttaaccatataatttaaaaactcctcttcacgattgatagcaaaatcagaaacgttagggcaccagtgagttgaaaaaactggtcttaagttggaaaaactattattaataatattatcctatccatccatatctattgaaattgtacaggtccataatttcattttaattaattataggaaagaagaaaagataatacccatttgttctatcacccctctccctatcattaactatcaaataaataaataaaagcaatctgatttccaacgtggtactaaaaaaaaag

SEQ ID NO: 2524 - DNA, 2403 bp, Homo sapiens
ggattcctttcctatgatgccaatcaaacatgcaatccagtggctttatccatatagtattttactaggtcatgaagggaagatggctgtggaaggtgttttaaagcgctttgaacttcaagattcaggaagctctctacttcctaaagagattgtaaaagtagagaagatgatggaaaaccatgtgtcccaagcttctgtgaccatccggattgcagataaagaggtgaccattaaggtgccagccgggaccaggctattaagtcaaccttgtgcgtcagaccgtttcatacagactttgagccataagcagctacaggctgaaatgatgcagtctcacatggttaaagatatatgtttaattggaggaaagggttgtggaaaaacagtgatcgctaagaactttgccgataccttaggatacaacatagaacctattatgctctatcaggatatgacagcgcgtgatctgctacagcagagatacacccttccaaatggagacactgcctggcggtcctcaccccttgtgaatgctgctctggaaggcaagctggtcctgctggatggcattcaccgggtgaatgcgggcacgcttgctgtattgcaaaggttaatccatgatcgagagctaagcctctatgatggttctaggctgctgagagaagacaggtatatgcgtttaaaggaggagctgcaactgtctgatgaacagctacagaagagatccatttttcctatccatccctccttcagaatcattgccttggcagaaccccctgttattggaagcacagcacaccagtggctgggaccagaattcttaaccatgttctttttccattacatgaaaccacttgtgaaaagtgaagaaatccaagtgattaaggaaaaggtcccaaatgtacctcaggaagctctggataagttattatcatttacacacaaactcagagaaacacaggatccaacggcacaatcattagcggcatcactttctaccagacaactgttgcgaatttctcgtcggctgtcacagtatcctaatgaaaatcttcacagtgctgttactaaagcctgcctttccaggtttttacccagtcttgctaggtcagcattagaaaaaatctggcagatgctacaatagaaataaatactgatgacaatttggagccagaactgaaggattacaaatgtgaagtaacatctggaactctgaggattggtgctgttagtgcaccgatctataatgcacatgagaaaatgaaagtgcctgatgttcttttctatgacaacattcagcatgtgatagtgatggaagatatgctgaaagactttctccttggagaacacttattattggttggcaaccagggtgtaggaaaaaacaagattgttgacagattccttcacctgctcaacagaccccgagaatatattcagctacacagggataccacagtacaaactcttacgcttcagccttcggttaaagacggacttattgtatatgaagactcacctttggttaaagcagtaaagttgggtcatattctggtagtagatgaggctgacaaagctccaacaaatgtcacgtgtattttaaaaactctagtagaaaatggagaaatgattctagcagatggaagacgcattgttgcaaattctgctaatgtgaatggaagagaaaatgttgtagtgattcatcctgattttaggatgattgttctggcaaatagacctggatttcctttcctaggcaatgatttcttcggtaccttaggtgatatttttagctgccatgcagttgataaccccaaaccccactcggagctcgagatgctcagacagtatggaccaaatgtgcctgagcccatccttcagaagcttgtggctgcctttggagagctgaggagtttggctgaccaagggattattaactatccttattctaccagagaagttgtcaacatagtcaaacatttacagaaatttccgactgaaggtctctccagtgtagttcgaaatgtgtttgactttgattcctacaacaatgacatgagggagatattgattaacactttacacaaatacgggatacctatcggagcaaagcctaccagtgtgcagctggcaaaggagtaaggcaaattcagtactcttctgattcttaaatgctgatagttcttgatttatcattccattctacaaaactgagttgctatggaaattactttccatgagtaagcttttcaaatacatgtatatgttgctgtttgctggctgcttttcagttaaatagcattatttataggcctgtaaattgaaaattttgattattatgtatgtcccatgagtagatgtaataaataaagggaaatatttgtttctttaaaaaaaaaa

SEQ ID NO: 2525 - DNA, 2438 bp, Homo sapiens
ggattcctttcctatgatgccaatcaaacatgcaatccagtggctttatccatatagtattttactaggtcatgaagggaagatggctgtggaaggtgttttaaagcgctttgaacttcaagattcaggaagctctctacttcctaaagagattgtaaaagtagagaagatgatggaaaaccatgtgtcccaagcttctgtgaccatccggattgcagataaagaggtgaccattaaggtgccagccgggaccaggctattaagtcaaccttgtgcgtcagaccgtttcatacagactttgagccataagcagctacaggctgaaatgatgcagtctcacatggttaaagatatatgtttaattggaggaaagggttgtggaaaaacagtgatcgctaagaactttgccgataccttaggatacaacatagaacctattatgctctatcaggatatgacagcgcgtgatctgctacagcagagatacacccttccaaatggagacactgcctggcggtcctcaccccttgtgaatgctgctctggaaggcaagctggtcctgctggatggcattcaccgggtgaatgcgggcacgcttgctgtattgcaaaggttaatccatgatcgagagctaagcctctatgatggttctaggctgctgagagaagacaggtatatgcgtttaaaggaggagctgcaactgtctgatgaacagctacagaagagatccatttttcctatccatccctccttcagaatcattgccttggcagaaccccctgttattggaagcacagcacaccagtggctgggaccagaattcttaaccatgttctttttccattacatgaaaccacttgtgaaaagtgaagaaatccaagtgattaaggaaaaggtcccaaatgtacctcaggaagctctggataagttattatcatttacacacaaactcagagaaacacaggatccaacggcacaatcattagcggcatcactttctaccagacaactgttgcgaatttctcgtcggctgtcacagtatcctaatgaaaatcttcacagtgctgttactaaagcctgcctttccaggtttttacccagtcttgctaggtcagcattagaaaaaatctggcagatgctacaatagaaataaatactgatgacaatttggagccagaactgaaggattacaaatgtgaagtaacatctggaactctgaggattggtgctgttagtgcaccgatctataatgcacatgagaaaatgaaagtgcctgatgttcttttctatgacaacattcagcatgtgatagtgatggaagatatgctgaaagactttctccttggagaacacttattattggttggcaaccagggtgtaggaaaaaacaagattgttgacagattccttcacctgctcaacagaccccgagaatatattcagctacacagggataccacagtacaaactcttacgcttcagccttcggttaaagacggacttattgtatatgaagactcacctttggttaaagcagtaaagttgggtcatattctggtagtagatgaggctgacaaagctccaacaaatgtcacgtgtattttaaaaactctagtagaaaatggagaaatgattctagcagatggaagacgcattgttgcaaattctgctaatgtgaatggaagagaaaatgttgtagtgattcatcctgattttaggatgattgttctggcaaatagacctggatttcctttcctaggcaatgatttcttcggtaccttaggtgatatttttagctgccatgcagttgataaccccaaaccccactcggagctcgagatgctcagacagtatggaccaaatgtgcctgagcccatccttcagaagcttgtggctgcctttggagagctgaggagtttggctgaccaagggattattaactatccttattctaccagagaagttgtcaacatagtcaaacatttacagaaatttccgactgaaggtctctccagtgtagttcgaaatgtgtttgactttgattcctacaacaatgacatgagggagatattgattaacactttacacaaatacgggatacctatcggagcaaagcctaccagtgtgcagctggcaaaggagtaaggcaaattcagtactcttctgattcttaaatgctgatagttcttgatttatcattccattctacaaaactgagttgctatggaaattactttccatgagtaagcttttcaaatacatgtatatgttgctgtttgctggctgcttttcagttaaatagcattatttataggcctgtaaattgaaaattttgattattatgtatgtcccatgagtagatgtaataaataaagggagatcgcgtcctgcttctctcctccttttcttccacttcaatgctgtgctatcatagtaga

SEQ ID NO: 2526 - DNA, 899 bp, Homo sapiens
  misc_feature (12)..(12): n is a, c, g, or t
  misc_feature (244)..(244): n is a, c, g, or t
  misc_feature (331)..(331): n is a, c, g, or t
cgaccccccacncctaaataagaataataactacggagacgaccacaaagaggacacacaaactaggtgatactgtcgtcctgactgcgcacagcgggtactcgagcgtaggagccccgagatccacgggtcagataggaaaaaagaggttcccgccccctggaatccaaaagagcgaacccaattggtttagccgggcccctttgggggaccccttagcctgtggttccgaagaactggatcncggcccctggaagcctacccttagtcagacctggtcccagttcactgaccagaaggtctgaagggctagcatttctgtggaggtggncaggtcttctggagcagcctcgtgccgaattcggcacgagatccttcagaagcttgtggctgcctttggagagctgaggagtttggctgaccaagggattattaactatccttattctaccagagaagttgtcaacatagtcaaacatttacagaaatttccgactgaaggtctctccagtgtagttcgaaatgtgtttgactttgattcctacaacaatgacatgagggagatattgattaacactttacacaaatacgggatacctatcggagcaaagcctaccagtgtgcagctggcaaaggagtaaggcaaattcagtactcttctgattcttaaatgctgatagttcttgatttatcattccattctacaaaactgagttgctatggaaattactttccatgagtaagcttttcaaatacatgtatatgttgctgtttgctggctgcttttcagttaaatagcattatttataggcctgtaaattgaaaattttgattattatgtatgtcccatgagtagatgtaataaataaagggaaatatttgtttctttaaaaaaaaaa

SEQ ID NO: 2527 - DNA, 720 bp, Homo sapiens
tccttagctgcataatggcaggctctatgcaaaaggatgaggttactgatttgataaaaactaaagaacttatcctttagctattccttggattctcccttattatggatttctatttttaatttttttaaggactaaaaacatctcaagccaggcttaagtactgtaagtctacatttggacaaggttgcttttttttagatgtactctgaaggtatataagagtgcaagtccctgtacaatttagtatatgctttatcagtgtttggttcttgagcaaattttttcaagaaagtttttgtttctgcaaccaagttatcacagccaaatatcttagagctttttacaattgaacagtataactatttatgttatctaaaagattgttgcttgatatttttaagaattattaaatattgataaagaataaacaaattttgtttttcagattctgctaatgtgaatggaagagaaaatgttgtagtgattcatcctgattttaggatgattgttctggcaaatagacctggatttcctttcctaggcaatgatttcttcggtaccttaggtaaaaacagtaatgataataacaataccaatagcagtaataataatattagtaacactgctgtaatggctgtcattgaatgcttatcatgtgctgtgccaccatcataatcaccttgtgagaatatttattatcccccttttagtgaagaa

SEQ ID NO: 2528 - DNA, 495 bp, Homo sapiens
agaaggtaatttgactgtttaattactagttaagtacaattaatatcctccacaaggctgtcctaaaaccatgacccaacttttgttctgtggtcaagttcagatttatcatctgaatttccacgttttccttccagggggaagagacacggcaggcctgggtggcaaaggaggcccttaccggctggatgcaggccatacggtgtaccaggtctctcaggctgagaaagatgcagttcccgaagaggtcaagagagctgctagagagatgggccagagagcattccagcagaggtcagtgctcccatcacatttagaccagcactactgctatggtgaaatgtcatgatggactgtggggaaacctagatttgtgtgtgtttccacctccacctcatgcagcaactcggacctcaaactgaaatccacagccatccccgtccctaacggaaacagccaaataaacaaaatcacctgttctttctactcaggctc

SEQ ID NO: 2529 - DNA, 281 bp, Homo sapiens
ttgtgtgtgtatgtgtgtcttttgtaggctaaaggtaaagaaagacaatggctaagacatcaagctactggagaattagatgatgccaagatcattgatgggctgactggagaaaaagccatctacaaacgtcggggtgagctggagccacaagtaagtcatggtgaactgctagcctcagctctgcatagtctagccctctttacagaaacttgctttcgtgagttgtgtcaaaatatcacaaatcctgaatatggtaaccaaggaaagcattatgttaa

SEQ ID NO: 2530 - DNA, 449 bp, Homo sapiens
tattgttccatatgttgaaagaattaaaacggacaaagggcatttatttgtcagcagagcagaaaccacttcatttatatgactgtgttcatgcagaaccatcacttactgaaaagatcccaggtgtgtttcctgttattcatgcacaaagtatgtcagagactctgcataactaattaaggctttgtgtgtgtatgtgtgtcttttgtaggctaaaggtaaagaaagacaatggctaagacatcaagctactggagaattagatgatgccaagatcattgatgggctgactggagaaaaagccatctacaaacgtcggggtgagctggagccacaagtaagtcatggtgaactgctagcctcagctctgcatagtctagccctctttacagaaacttgctttcgtgagttgtgtcaaaatatcacaaatcctgaatatggtaaccaag

SEQ ID NO: 2531 - DNA, 393 bp, Homo sapiens
cccactgcttctctgccctcatctcgtagcactccagccccggcccccgctggctggcctcccgtgcagcacgctctcccctcagggcctttacacttggcttctcccttgatctgggttgtgctcttccctatcttcccaccctctaatgtccatgtgccttcttcctcactttcttcagctctctgttcagacgtcaccttttctgtgaggccttccctgacctaacataaacagcaacaaggtcagtctcagtggctcacgcctgttatcccaaagtgctgggattacaggtgtgagccaccttgtccggccatcaatttttctgtaagcctaaaattgctttaaaaatagtctgtttaacttttaaaaataaattgaacatatatgtgt

SEQ ID NO: 2532 - DNA, 698 bp, Homo sapiens
agaacagccctcaagctgcggtacagcataactcatcaagtatcgtcggcctcctccttcaacaaaatataaatatcttttctcaagacctgttggccagactgccgaggattatgctgtttgttataatttcagaagcattcaacaacaaattttggaacataaaaataagatacttaaaagtcatctttgaaatgataatcaagaaacagcagctatgaagccttgaattttgaaaaaaagacaagaaggtgcaaaagtctttaatcctggcagggattcacgggcgcacacacacacactcaggattcagatcttgttgaaagctgcgatatcgacactctgcacgtgctcctcaaacttggtgatctcctccagcaagtctgtccccaccttgtcgtcctccaccacacactgaatctgtagcttccggataccgtagcccatgggcaccagcttggaggccccctagaccagctcttccagctggatggagcacacacaggcctccagctgggccatgtcagtctcatcgtcccaaggcttgaaatccagcaggatggaggacttggccaccagttcaggcttcttggccttcttctccgcgtactgctgcagccgctcctcctgcagctgtgccgccttcttgtcctcctcctcattgtcgctgccaaacaggtcagtgtcatcatcgtcgt

SEQ ID NO: 2533 - DNA, 460 bp, Homo sapiens
  misc_feature (53)..(53): n is a, c, g, or t
ctctacaggatcttagcaccgtctgagaatgtggcaggcctacgcacggcgcncgtacacacactcaggattcagatcttgttgaaagctgcgatatcgacactctgcacgtgctcctcaaacttggtgatctcctccagcaagtctgtccccaccttgtcgtcctccaccacacactgaatctgtagcttccggataccgtagcccatgggcaccagcttggaggccccctagaccagctcttccagctggatggagcacacacaggcctccagctgggccatgtcagtctcatcgtcccaaggcttgaaatccagcaggatggaggacttggccaccagttcaggcttcttggccttcttctccgcgtactgctgcagccgctcctcctgcagctgtgccgccttcttgtcctcctcctcattgtcgctgccaaacaggtcagtgtcatcatcgtcgt

SEQ ID NO: 2534 - DNA, 924 bp, Homo sapiens
agaacagccctcaagctgcggtacagcataactcatcaagtatcgtcggcctcctccttcaacaaaatataaatatcttttctcaagacctgttggccagactgccgaggattatgctgtttgttataatttcagaagcattcaacaacaaattttggaacataaaaataagatacttaaaagtcatctttgaaatgataatcaagaaacagcagctatgaagccttgaattttgaaaaaaagacaagaaggtgcaaaagggattcaagacgtctgactagaggcatctagcatttgcctcctccacaaagaagaaccaaaatagtgagtgatcacacttctaatagataatctaaaaaagaatactggaattcaacagagaagtaacaggaaacacctaacgcaaggaaagagagggaagagaggcagcctgcctggctagggttggctgggaacctcaaagaggctccacaatgtgggaaaaagtctttaatcctggcagggattcacgggcgcacacacacacactcaggattcagatcttgttgaaagctgcgatatcgacactctgcacgtgctcctcaaacttggtgatctcctccagcaagtctgtccccaccttgtcgtcctccaccacacactgaatctgtagcttccggataccgtagcccatgggcaccagcttggaggccccctagaccagctcttccagctggatggagcacacacaggcctccagctgggccatgtcagtctcatcgtcccaaggcttgaaatccagcaggatggaggacttggccaccagttcaggcttcttggccttcttctccgcgtactgctgcagccgctcctcctgcagctgtgccgccttcttgtcctcctcctcattgtcgctgccaaacaggtcagtgtcatcatcgtcgt

SEQ ID NO: 2535 - DNA, 584 bp, Homo sapiens
agaacagccctcaagctgcggtacagcataactcatcaagtatcgtcggcctcctccttcaacaaaatataaatatcttttctcaagacctgttggccagactgccgaggattatgctgtttgttataatttcagaagcattcaacaacaaattttggaacataaaaataagatacttaaaagtcatctttgaaatgataatcaagaaacagcagctatgaagccttgaattttgaaaaaaagacaagaaggtgcaaaagggattcaagacgtctgactagaggcatctagcatttgcctcctccacaaagaagaaccaaaatagtgagtgatcacacttctaatagataatctaaaaaagaatactggaattcaacagagaagtaacaggaaacacctaacgcaaggaaagagagggaagagaggcagcctgcctggctagggttggctgggaacctcaaagaggctccacaatgtgggaaaaagataatatgatcttatatttagaaaaatctaaagacttcaccaaaaatctcccatcagtaaatttagtaaagttgcaggagacaaaattaacatacaaa

SEQ ID NO: 2536 - DNA, 370 bp, Homo sapiens
ggaaagtggcagtttggtttttacggccttgcagtgtatggagatggttaccacagctcccattgttttagagcagttcttagattggacagcagtaactgagtctgatagatgcttgtataccagtagctacctctggctattgtgcgcaggaggtgttccataaatacttttcaaacaaaagaatgaaggagcataaaaggaaagaattaaagtaggtaatatatgagaattcttcctgctcaggtgtctctgattggttgtcatggattcttcaaatgcttctgtgatacatcataaagatcatgttggttctcttcaatctggccaccctaacttgtggattgctgagaaatccccaaaacccata

SEQ ID NO: 2537 - DNA, 396 bp, Homo sapiens
gccaatcacctttccccatgccttagaccaccctgcttctctaacccataaacatctctatgccttattttcgggaggcagatatgagagctatttacctgcccccttgctgggctgccttgtggataaatcttttctcttttgcaaaatgtgccatcacagtgattggtttacccagcacgggcagaacaaacctggttgataatttttctcatcctcgccaacacttactgtcattgtctgtgtttttcactatagccatgctggtggatatgaagtggcatctgattgtggttttcatttcatttcccttgtgactaatgagcctattttttgtgcttattgattatttgcatatcttctttaaaaaatatgtgttcgaatactttgcccatt

SEQ ID NO: 2538 - DNA, 411 bp, Homo sapiens
atctgggtgccatgttttataaacacaattattcactagtagtctttcaattctgcctttattacatgatgatctgctaattcagaatgagaaatttccacattaagtacttggcaggactgggtgtggtagctcatgcctataatcccagctacttgggaggctgacacaggagaatcacttgaacctgggaggctgaggttgcagtgagctgagatggagccattgcactccagcctgggcaaaaagcgaaattccatcccaaaaaagaaaaaaaaagatcttggcaggccaggcgtggtggctcatgcctgtaatcctagcactttcggagggcaaggtgggtggatcacatgaggtcacaagttcgagaccagcctggccaacatggtgaaacccccatctctacta

SEQ ID NO: 2539 - DNA, 2787 bp, Homo sapiens
accttcagcaccgtcctgcaggactgcaagaggaccttggagagagcctatcagatgggctggacccccaacatgtctgccgcctcctcctagcgctcctgcctcgcctagtccactgggatcattcagcagagcagaggagaattgtacatttggggagctgatctctcggaagggttttaactgtcacctgtctgtgtgtgttcaagtatgtgtatttgtgtcttgtttgcatactgcataccaaaagtgcagttgtcatttgttcccaagtgagctggctttttttcttagaaattaaagattatgaaagccacaaactttttagtttttaacttcaaaggcttctttctcttttaaaaaaaattatttttaatatagagtcaaaaaattggatgtattattttgagcttctaattgctgccacttggagatgtccaagtaagaaggccttctttttacatgggatgaattgtgcacttctactgatgatgactacagcagaagtgatgttatacgtacaggcacttacactctctcacatattcacacgtgtgcacatctacaccagggctctgatctactctagatcgtttcctgacagagaagccttcttccaggccactaaggtagcatgttatccactgtggcactgcctaactccgtgtatcctcgggtggccaacttgctatctggtgggtgacttggggactagaaagaataaagccttttctaaatttgttatatagaggcaacagtctgaactctcctggccagctcacgaaagttaattatacattattctacaaatgcattctgttgagcactaaatattttagttggttttatgttaaccattgtgttagcttttatttcctggatagtaactggtcaggatatattttaatgatatttgaaactaatcttagcattgaagccaccaatgtaattaatggtgtgcagttattttaaaaactacagatcatttcattattttcttaattttggtaattattaaagtctatttctgagatacgagagggtagtcacattaatagaagattcatgagtgagatataagtagacaatctttctactgttgttgctctttttgctttgctttgggttcttgaacaggttttttggatatatgcatgttgtcattttggactagttctcatgctactgcaaagatctattgctagctaatatatgagttaagaaagaaaattagaaaatctgttcattgaaattctgtttacacttgtcagaaataagcatttctttgtttaattaaggattgccagcttcagttaagacaagacctatcagtaaatgaatatatgttttgatttaacacatctttacaattaattcataatagggactcaggctcaaataactgttcctgtgtctagatttataatgaggacatcagggagcctttttaagctaaagagtgattatctttcacagtagaactagaaacaaaaccctaacttgtgaagttgctatttatttttccctgagtgaatataactgttatttggtctttaacagatatactgaggtttgagtttcactttctttaagtctcacattgctaacatgacattagctgtaagaaacaagatagctttacatttgaatgccatttactgatttctaatgattctctttttttgtaaacaactgtttcctttgattatgtcaacatgtttctgatgtggcatttttgttttaatcccaatcggttaggaaaatctagtcagtaagcgccatgagtattcttcccataactaaatgggtttctaatttaatttgaagggaataaaatttgtgtaagaaaaaagctgtttaacattaataaactatatttcttcttacacattgaactgtatcattttcatatccacttccccaccactgaaatatcttatttcacaatattttaactgatttttaatccaaaactaatttataagacagtatgtatagtaatagtagcttgagtgaatatgcaaaagtttaatttttatatatgtcatactatattttaaatagttaaaaaagacaaaagaagggagagccatctatgatatagatggtaccatttcagttcaaagttgtaataacctttggagtgttacagtttggttgtcaaatggtttcagaatgtataattgatttttttaaatgttgcattgtttgaatctaaagtacagcactataacatgctttagcttgggggggtgggggtggggtggggacttgcacttattctctaaaatgttgactaatccagaaagcctgatgcaacataatctggaaaactgctttggtacatttgtagaaatccgtagaaataccatatccagcctcaaagcattaatctcaaaaaaaaaaaaaaaaaaaaaaaaaaaacagccagaaaaaagcatcaccttgagtggtcctgtgatggttgttgaatgtgttctcattagatgctttgaaatgaggcttaaaataatttttctgggcaatatagagtttcttttttttgcttagaatgtcataaatacatgtgaacacgtttaatgcagggctttttattctctccaaaatgtcaacagtattttcagaataaagactatgaaatatattgctgtagtggaaaattctggtcctttgtctttaatgtctttttgagtggataaagaaaattcacccggtttgtagtttctatatttccgtgaatctttgaccttgcaatgggttgcaataaaagagaaacaaaaaaaaaaa

SEQ ID NO: 2540 - DNA, 3405 bp, Homo sapiens
  misc_feature (3141)..(3141): n is a, c, g, or t
  misc_feature (3237)..(3237): n is a, c, g, or t
accttcagcaccgtcctgcaggactgcaagaggaccttggagagagcctatcagatgggctggacccccaacatgtctgccgcctcctcctagcgctcctgcctcgcctagtccactgggatcattcagcagagcagaggagaattgtacatttggggagctgatctctcggaagggttttaactgtcacctgtctgtgtgtgttcaagtatgtgtatttgtgtcttgtttgcatactgcataccaaaagtgcagttgtcatttgttcccaagtgagctggctttttttcttagaaattaaagattatgaaagccacaaactttttagtttttaacttcaaaggcttctttctcttttaaaaaaaattatttttaatatagagtcaaaaaattggatgtattattttgagcttctaattgctgccacttggagatgtccaagtaagaaggccttctttttacatgggatgaattgtgcacttctactgatgatgactacagcagaagtgatgttatacgtacaggcacttacactctctcacatattcacacgtgtgcacatctacaccagggctctgatctactctagatcgtttcctgacagagaagccttcttccaggccactaaggtagcatgttatccactgtggcactgcctaactccgtgtatcctcgggtggccaacttgctatctggtgggtgacttggggactagaaagaataaagccttttctaaatttgttatatagaggcaacagtctgaactctcctggccagctcacgaaagttaattatacattattctacaaatgcattctgttgagcactaaatattttagttggttttatgttaaccattgtgttagcttttatttcctggatagtaactggtcaggatatattttaatgatatttgaaactaatcttagcattgaagccaccaatgtaattaatggtgtgcagttattttaaaaactacagatcatttcattattttcttaattttggtaattattaaagtctatttctgagatacgagagggtagtcacattaatagaagattcatgagtgagatataagtagacaatctttctactgttgttgctctttttgctttgctttgggttcttgaacaggttttttggatatatgcatgttgtcattttggactagttctcatgctactgcaaagatctattgctagctaatatatgagttaagaaagaaaattagaaaatctgttcattgaaattctgtttacacttgtcagaaataagcatttctttgtttaattaaggattgccagcttcagttaagacaagacctatcagtaaatgaatatatgttttgatttaacacatctttacaattaattcataatagggactcaggctcaaataactgttcctgtgtctagatttataatgaggacatcagggagcctttttaagctaaagagtgattatctttcacagtagaactagaaacaaaaccctaacttgtgaagttgctatttatttttccctgagtgaatataactgttatttggtctttaacagatatactgaggtttgagtttcactttctttaagtctcacattgctaacatgacattagctgtaagaaacaagatagctttacatttgaatgccatttactgatttctaatgattctctttttttgtaaacaactgtttcctttgattatgtcaacatgtttctgatgtggcatttttgttttaatcccaatcggttaggaaaatctagtcagtaagcgccatgagtattcttcccataactaaatgggtttctaatttaatttgaagggaataaaatttgtgtaagaaaaaagctgtttaacattaataaactatatttcttcttacacattgaactgtatcattttcatatccacttccccaccactgaaatatcttatttcacaatattttaactgatttttaatccaaaactaatttataagacagtatgtatagtaatagtagcttgagtgaatatgcaaaagtttaatttttatatatgtcatactatattttaaatagttaaaaaagacaaaagaagggagagccatctatgatatagatggtaccatttcagttcaaagttgtaataacctttggagtgttacagtttggttgtcaaatggtttcagaatgtataattgatttttttaaatgttgcattgtttgaatctaaagtacagcactataacatgctttagcttgggggggtgggggtggggtggggacttgcacttattctctaaaatgttgactaatccagaaagcctgatgcaacataatctggaaaactgctttggtacatttgtagaaatccgtagaaataccatatccagcctcaaagcattaatctcaaaaaaaaaaaaaaaaaaaaaaaaaaaaccggccaaaaaaagcttcccttgggggggcccggggggggtgggggaggggttccccttaaaaggttggaagggggctaaaaaatttttgggggcaagataatagagtttctttttttgcgctcagacgtgtcttaacttccgtgttgacccggtttaactggcaggggtttttaattccttctccaaagtgtgtcaccggttttttcaggaataaagcactatggaaatattttggcgcgcggggaacaattccgggccctttggcttcacagtgctcttcgagagggtataaagagaattacccccgggttggaagttcactatatatacccgggaactcttgggcccttgtgcaacgggcgcgtttcgcaacttaactaggagcaaccgactaagaaccatataagctaaatacacacacacacactcaacaacaaacaaagaaagggcggggcgggccgaaataaaaaaaatctcctccagagggggggccaccaaaatatgcccgaccaccccgtttttttgtgtcaacaacagggcggcgccataaagaggagcgagcgatataaacagacagagccgagcgcggcgccgttaaaacaccacgcgtggtcgtgctgggaaacacgctgctctggagcacctcgtggagagcagcccccatcttctgggcgggcgcacatgtggggcaccaccccaacgagagattaaaganccgggggactatcaaacacttggctgttcaggggccaaccaccggcgcatgctcgcggcgcaaacattggtctccgacttgttttgaacatagccngtcgcttctatcataccaaggaagtggcgacgaagcagagatcgaggatcaagtagtatcatacgatcatgtcgaactgtaagacgacacgaagcgacgagagcgccatcacaatccgagtacgaggatcaatcgtcgacatgccagcgagacacggcagtgatgtac

SEQ ID NO: 2541 - DNA, 384 bp, Homo sapiens
ctgaacatggcccagcttgtcattgtgaaggtgacattggttcagtgattgcttaaatggcatgtggaccgtgggaagcagtaggagcgtagtaagacagttggctgccattcaacatttcaaatagatggtttactcaaatcactcacttctggttgatggtaaagagagcagatggcttagaaaacatgatacaggaaaatttagtatgtaatccagtaaatatcctaagttatttattttcatgtgtgtgtgtgtgtttaaatcaagtaacccttttaattgaattttaaaatgacagcgaattttgacattctgagaaatggggattttgagatgtttctctccatatctccctttgtcctgtgtgtgtggccgacgccc

SEQ ID NO: 2542 - DNA, 2557 bp, Homo sapiens
cttagccttgggtgtctagaactagagccaatgtctgatgttaaagtgataacatttatttggaagataagtccagggcagcaatggccaggacatgtggaaattgaggcaaagcaaatgtgaaaccatgtcttgtgatgtatgatatgactctgctgatgaccacttcacaatgagatgagagagacagcatggtggtcatcagatgcgtggacttgactcccagtacttttccagaagggctgcaaggggaaaccacagccggcattagtccacggaagagaaagagaagagaaaatgtatctgctcagctgtcttctgtcttctatttcccattggccagggtttccctgaggcagaactaccatctctgctgttctgcgttccatcatccagtcccttggtggtagttatgaaagccaaacctcatgcccccagtgtggtgttccattgaagtcccaaatggaaggatgatctggatcaagcaaggtgctgaccaagaaaagagaagacagtcaagataatctgaggaaggatatgtttgtgggcaatactgtccactccttgtgcaactcagattggctcatgccctccaatcatggctggctttataggcatatgacttcacagttgcacagggtcttgtgcttagaagtgcttatgcttagaggggctttatgcttggattaatcttctgcacttgctgttttgtttttcagacagaaggtagtcctctgctggagaaggaatagtcttccactaattcgctaggagtttgctctccccactcctatgggcttgtgagaggcatgcacagagtcctataatgcccactatgcatgcctgtagcaactttgaattctgttacatcatctggcacaatggccaagcaacttgggccagactctatatctgctatagagcccgtttttgtttcgggtttgacttgagacaagcagcccttgcaaactcctttagtgagtcagagaaatatccttaaatgtggtatatgttgaattcaaaaccccaataagcccccataaaactgtatttcccttttagtgataggaagtatatatatatagggcaacatgccatttactgtaaaaaggatgttttgacaaaaggaccagaagcattggacccctataaacttcatctatgttataggtctttgaatctgctgaagtttatgtctcttcttccagtattttacttctgttcaatgttataatattttactatacttaaggaacttgccacttcctgcttatgggtaccactttatgtaatattattaatatattgaattaacatgatgttttgcaaaatgtcaattaaactgaaagcagaagtgacagccctgacagaaaacagtgaagcagtgttcttgtttttaccacaccaaagcaaattgttttgattttcctccacaatgtgtgtagattaaaaagcattagctaaatcaaaagccgcatacaaagtgctggaaaccacattctgctcagtgaagataccacatcctagagcgaatgtgcaagtgtgacttaagtttatgctaatgtgcattcatcctataatccatctggttttgacagaggccagttaggttaactgaataaagatataaaatggacgaccgccccctggaacttttgagttttttgttgtggcagcgaccaattctgtttcctggagaatgcagttattatgttttattcattttattgccaggaaagtagaatttcagaagcctccccttggtcctgcttacaataatgtcccttggtatacaggtcaggaagaaatgtaagagtcctgacagctgttgaacctgtcaacttcaattacactttcaggaaggggtaactacgatgaactcattagaacccctttgggttggacatgggccaaagctctatgtaccatctgatcttcaaaaactcatactccagtcctattgaggcagctcatacctgtaatcctaataatttaggaggccgaagtgggaggatcactttaggctgagagtttcagatcagccttggcaacatagtaagaatctgtaaaaaaaaaaaaaaaaattagttgtttgtggtagtgtgtgcctgtagttacagctacccagaagactcaggcaggaggattgctttagcccaggaattcgagtttgcagtgagctatgatggtgtcattgcactccagcctgggcaatcaagcaagatcttgtctctaaaaagaaacaaacaaaaacaacaaacaaaagcccaaaaagggcctggtgcggtggctcatgcctgtaatcccagcactttgggtggctgagtggttggatcacttgaggtcaggagttcgagatcagcctggccaacatggtgaaaccccacctctactaaaaatacaaaaattagccaggtgtggtggtgttgcacctgtaatccaagccacttgggaggctgaggcatgagaatcacttgaacccgggaggcagaggttgcagtgagctgagatcatgccactgaactccagcctgggcgacagagcgagtctccacctc

SEQ ID NO: 2543 - DNA, 421 bp, Homo sapiens
agtcaatgattataataacttcttttttaatttagaagggaaataaaggaaggaaggggagaaaaggaagtaatgaagtgggggaaaggaaggaatgaaggaaggaaagaagcaatattaactatagtaactgtagttggtactatttatggaacacttgatatttcaggcattatgatttgcaaaaattatctcataatatccccattttacagagggaaaattgaggttcagggagattaactattcaagactggcacttcaaaattagatactttttttaaaaaaatgactaaaacttggaatttttataaatatatatcactgaaaagggccagacgtggtggctcactcctgtaatcctagcactttaggagcctgaggcaggagaatcacttgagcctaggagtttgaaaccagc

SEQ ID NO: 2544 - DNA, 589 bp, Homo sapiens
ctgaggctgttcccgtctccagtctttctgctacagggcgctgtatacacttcctatcgcgtagtttctgtgctcaaaaccgttttttaactcctccctccccgcgcttttcaaagtcctcacccgagatgtgtatttccgcctgggcgcctcccagtctcaacctttaggcgcctgaagcgcaaacgtcgcgatcccagtctcagggaggccgagttctctgcctggtgctgggatcttgtggaccccaccgaaggcgtcgtcgcaccccacctcccgcctcatgctgggccttgctgcaccccaagtctccccttagcagtcaccactttccttgagccagcgttggggaggtgccaggggccagtcctgtgacacggtgtgttcttgcctgcctagctccaacccctgaaaaatgagcctctctgggatgcaggcgtcttacttcaaaccctcctgtgattgtgtgggctaaagagatcaggagacagagagtagtagaaaacctgagacagagaaaagaagaatgagaaagacccataacagatggcaaagtagaggatgggtgagggatttgccaagagacagc

SEQ ID NO: 2545 - DNA, 307 bp, Homo sapiens
ttggccaggctggtctcaaactcctgacctcaggtgatccgcccacctcagcctccctaagtgctggattacaggcatgagccactgtgctcggcctccagccacccatttctaaagttgagatacttcaaaagtattatggatgtctctcacataatctcatctaatagaaagattatcttttttagacagtagcagaaacagcagttttagtttgcaaaagaaacactttaactggatattagtggccaagtaaaaaaattaagtaaataaaagacgtagtaaatccctaaaccaaattgggcat

SEQ ID NO: 2546 - DNA, 875 bp, Homo sapiens
agagtaggtctgagatgtggtttctttgtttgtaaaattagggagttggactaggtcgtctctagtccagctacagatgttgtatcttatgttactaaatttcaagtggctttttctctatttatacaaaactcaaagttgcttgcctgtgtagatccccagattcagtatttttcagtcacgatgtagaagaatatttggagtacacatttagtgcttactggaatcattgacaggctgaagcttgtccatttatttttccttaattaccttccccaaacctgctcctcctccaattcctttatcgtttggtggcatcaccagcttctcagttactggactcaaagccttgcagctgtcttcagttattccctctcccttgtccctaacattaagtcagccataaaactcattgggggcacctgctgatgcctgtcccacctgtgcccttctattttttgaaggattcaactccatgttcttgccttcacagatctcgagctccagctgtactagaccactcactctttccctgcttgcccagtgcttgcagcagagtgggtgctccataattgttatatgaaaaaaaaaaaaaaaaaaaaaaagagcaaggcaaagcaaagcagagcgaagcaaagcaaggggtggaggaagctgtggtctcagccctgtattgcctgtgctgctccctctgctgggggagcttttccctgcatcctgccaggccatctcatccacctggactttccacccagctcaatcaactctgtgaagtttctcgtcatcgcccttgtgctcgcagagtatcttgcttattcaacttcatagtatttgtcacattggccttgagtgacagccaggtagagtgatttctc

SEQ ID NO: 2547 - DNA, 439 bp, Homo sapiens
atgggctgcagaatgggtgttgtgttaaaaagtacacaaacaaggagatttacaaatcttgtacgtctctataagagttctagggtgatcaagaccagtatcaatgagcactaatattttgttgtatgagcactacatctcaacagtgggcctaaaatatttaataaaccattggtgaaaatagatgtgctgtcatccaggctttgttccatttataggcaaaatagatttagcataattcttaagagctaggattttcaaaatggtaaatgagctttgacaccaacttaaatttatgtttccccctaaaaaggaagtgagcctgtcctttgaagccaggcactgacttctcctctctagctatggaagtcctagatggcgtcttcttccaatataaggctgttttatctacatttagaatctgttatttaatgtagcc

SEQ ID NO: 2548 - DNA, 431 bp, Homo sapiens
gatcagaggaacattagtttaagccatgaaaactatttgcattagtatgtgggtatgtgtgagagagagagagcacatgcatgggagagtgagatagccagcaagtgattataataaagcagagagacagagactagaaagcagggaaacttttgttttctaccatgactaataacaatttggttcaacatgtatattaaatacctctcagattaaatcccagagtgctccagaaattgtaaagattggctatatctgtgcaatcaagaggctcacggggtgagttaaatgagtaaaaactagtaagacaaaatgaaaagctgacggagccatacgtaaatatggaaatactctggaagcatggaggtggaaataatttaacttcttaggattaaagaagcctttaatcaaagagaagggggatgtttatc

SEQ ID NO: 2549 - DNA, 3226 bp, Homo sapiens
  misc_feature (196)..(196): n is a, c, g, or t
  misc_feature (2538)..(2538): n is a, c, g, or t
cgttatttttttaatctgccagaacatacatttttcttacctgtcattattattattattatttgaggtggagtcctgctgtatcaccaggctggagtgcagtggtgcaatctcggctcactgcagtccctgcctcctgagttcaagcaattcttgtgcctcagcctccctagtagctgagattacaggcgtgtgncaccacgcccagctaatttttctatttctagtagatatggggtttcaccatgttggccaggctggtctcgaactcctatcctcaagcaatctgcctgccttggcctcccaaagtgctgggattagaggcgtgagtcacctcgcccagcctcttacctgtcattcttgaggagcccagtgtaggagggaagggctgtgtatctgtgagtgcgggtaaagcacacggaagctggccatgttcgtcatcttggtttcatactgacaagcaggagtcagtgtgccccatggcgtgggggccctggaaggaagcctctgcagctgcagaaagacagaccccacttggaaaataaaacagcagcataaggacttgggctctaattacagagttgtcaggttgaagagaagtggttgtgggataacaggaagagaaaatattttggttcttctcagcataatgaattttcatcagtacgcctatttccttgtttagctttttgcgcaaatgtggacctttcgcctcctcctgtgtgctcttccttaaaaccctatttctccaattgttttatagatcagctttgtcagagcttgggcgtcagaggtcattgctgttcttgtattgacttgttcatttgttctttatccattcacttgttccctgcatattttgaaagtgttttgcattgcattgaactggagacaggggatacaaaagacaagccctgcttttgtcactcagtcctgtggcccagtttcctttcgcgcttttctcttccaatggtggggagaaggatccagagctccctaggtgcactgtccagaaaaatggaaaagtgaagtcaccatgagaacacgaagttcagcgtgagagtaccagcaggtaacagttattgagtacttactccaggccccggcattgtcctgtgccctgtacgtaaattaaggtcttcggatctcatgatgccaggaaaccccagccccacccactagtcttctctgttctgcctctggtctttctgtttctcccctctgttcccagtgtcctcacccgaatccacatctgtgaatgtccctctgaaccattgccgaaactttctagctagtctcctttcagcctcttctcctgtccagttctcacgtctttgtaaatttccatgtcacttttttgcttaaaaccatcaggaacaatgccttttaacagtagactttcaagagagcgtctggctttatcttccttctttattgtgaatctcatgagggcaacaagttataaatacttggcttcccaacaagcgtaggatagtgcctggcacacagcggccatccttgatgttgagtggatgcatttccttgcagttcccaccatgcagtcagcagcgccaacccatgtaggggacctttgatcattccccagttctctcagcctcttctgactcagttccctgtccccataaaagtttgttcctcccctgctgttttggctgtgagagaatgctgacaacaccagcaaaccaccacgcggcgagtgcttcagtatggggccgtggcctgtgcattccataaccctgctgcctggcccagtgtgtagcacctgatgtttgcaatcatgttcgtgcagagttcacatatttgctctgttacttttttatttaattgaggtgaaattcaaagaacagaattaaccgttttaaagtgacccgtgcagtagcatgaagcactttccctgcatgtgcggtccccacctctgcctagcaccagccttcccatccctccactctgttgtttaccagctctgtgacattgtcagctgcttcctctgtaagacgtgactgcgaattctgacctgccaggtttgaggcacaggacttgcacacggccagtgcagaagtcccataagaacataacctacccaaggccagctcacctctctgttacatatgctcatgagattagtgctatagactcagtgtgccacttccctgcacatgcgagggacgacagtgtcctgacacagcagtgaacccagtgtggtgccaaggagaaagttgtttttttggggccagccagcacacatggggtggcttgtccaataccctcaccggtccagatatttaatactcaaaaactgtcttctccaaagctgtcttctccactgtccatcaagttggggtcatgaagcatttttcttaaaggggaatgagtagaaattgcttagctatattctactccatccagtcttgctcaaggagaggtctgctgcaagcaagagacggcggctacacccctactggaagtgcttgacctgcaggaggcacagctgccctagagttaaccttgaggggtacnttatttttgatctctgaagcccactgtggtttctgctgccttggtggagaaggcagtgcaggtacaggagactcacatccagcccagctcgccctgctgctgggggcctcaggcggtggggatgcaggagaggctggcgggctgccattgcacactgctgccggcctggcctctggacacatggccagtgtgcagggtgctgtcccggggatggtgatggttgcacttcattcattccatccacaggtgtctgtggagggcccacgacgtgtcagttgtggtgcgttgtggtgtgcaggacagggaaggtacctatgcctcatgcagcagtggtatagtcatgtgagagtgactagtcatttctgaagcatcttcaacatcacattaaaaaaaacttaaattaggccgggcatggttgctcatgctggtaatcccagcactctgggaggccgagtcgggctgatctcctgagctcaggagttcgagaccaccctgggcaacatggtgaaaccccgtctctactaaaataaaaaaatatatatatattagctggacatggtagcacaagcctgtagtcccagctacttgggaggctgaggcatgagaatcgcttgagccccagagacagaggttgcagtgagccacaccactgtactccagcttgggctacacagtgagactccgtctc

SEQ ID NO: 2550 - DNA, 2922 bp, Homo sapiens
  misc_feature (2234)..(2234): n is a, c, g, or t
gaggaatgaacaactccagacgcgctgccttaagagctgtaacactcaccgcgaaggtctgcagcttcactcctgagccagcgagaccacaaactcaccagatgcaagaaactccgaacacatctgaacatcagaagggacagactccagacgcgccaccttaagagctgtaacactcaccgcgagggtccgcggcttcattcttgaagtcagtgagaccaagaccccacttggaaaataaaacagcagcataaggacttgggctctaattacagagttgtcaggttgaagagaagtggttgtgggataacaggaagagaaaatattttggttcttctcagcataatgaattttcatcagtacgcctatttccttgtttagctttttgcgcaaatgtggacctttcgcctcctcctgtgtgctcttccttaaaaccctatttctccaattgttttatagatcagctttgtcagagcttgggcgtcagaggtcattgctgttcttgtattgacttgttcatttgttctttatccattcacttgttccctgcatattttgaaagtgttttgcattgcattgaactggagacaggggatacaaaagacaagccctgcttttgtcactcagtcctgtggcccagtttcctttcgcgcttttctcttccaatggtggggagaaggatccagagctccctaggtgcactgtccagaaaaatggaaaagtgaagtcaccatgagaacacgaagttcagcgtgagagtaccagcaggtaacagttattgagtacttactccaggccccggcattgtcctgtgccctgtacgtaaattaaggtcttcggatctcatgatgccaggaaaccccagccccacccactagtcttctctgttctgcctctggtctttctgtttctcccctctgttcccagtgtcctcacccgaatccacatctgtgaatgtccctctgaaccattgccgaaactttctagctagtctcctttcagcctcttctcctgtccagttctcacgtctttgtaaatttccatgtcacttttttgcttaaaaccatcaggaacaatgccttttaacagtagactttcaagagagcgtctggctttatcttccttctttattgtgaatctcatgagggcaacaagttataaatacttggcttcccaacaagcgtaggatagtgcctggcacacagcggccatccttgatgttgagtggatgcatttccttgcagttcccaccatgcagtcagcagcgccaacccatgtaggggacctttgatcattccccagttctctcagcctcttctgactcagttccctgtccccataaaagtttgttcctcccctgctgttttggctgtgagagaatgctgacaacaccagcaaaccaccacgcggcgagtgcttcagtatggggccgtggcctgtgcattccataaccctgctgcctggcccagtgtgtagcacctgatgtttgcaatcatgttcgtgcagagttcacatatttgctctgttacttttttatttaattgaggtgaaattcaaagaacagaattaaccgttttaaagtgacccgtgcagtagcatgaagcactttccctgcatgtgcggtccccacctctgcctagcaccagccttcccatccctccactctgttgtttaccagctctgtgacattgtcagctgcttcctctgtaagacgtgactgcgaattctgacctgccaggtttgaggcacaggacttgcacacggccagtgcagaagtcccataagaacataacctacccaaggccagctcacctctctgttacatatgctcatgagattagtgctatagactcagtgtgccacttccctgcacatgcgagggacgacagtgtcctgacacagcagtgaacccagtgtggtgccaaggagaaagttgtttttttggggccagccagcacacatggggtggcttgtccaataccctcaccggtccagatatttaatactcaaaaactgtcttctccaaagctgtcttctccactgtccatcaagttggggtcatgaagcatttttcttaaaggggaatgagtagaaattgcttagctatattctactccatccagtcttgctcaaggagaggtctgctgcaagcaagagacggcggctacacccctactggaagtgcttgacctgcaggaggcacagctgccctagagttaaccttgaggggtacnttatttttgatctctgaagcccactgtggtttctgctgccttggtggagaaggcagtgcaggtacaggagactcacatccagcccagctcgccctgctgctgggggcctcaggcggtggggatgcaggagaggctggcgggctgccattgcacactgctgccggcctggcctctggacacatggccagtgtgcagggtgctgtcccggggatggtgatggttgcacttcattcattccatccacaggtgtctgtggagggcccacgacgtgtcagttgtggtgcgttgtggtgtgcaggacagggaaggtacctatgcctcatgcagcagtggtatagtcatgtgagagtgactagtcatttctgaagcatcttcaacatcacattaaaaaaaacttaaattaggccgggcatggttgctcatgctggtaatcccagcactctgggaggccgagtcgggctgatctcctgagctcaggagttcgagaccaccctgggcaacatggtgaaaccccgtctctactaaaataaaaaaatatatatatattagctggacatggtagcacaagcctgtagtcccagctacttgggaggctgaggcatgagaatcgcttgagccccagagacagaggttgcagtgagccacaccactgtactccagcttgggctacacagtgagactccgtctc

SEQ ID NO: 2551 - DNA, 1615 bp, Homo sapiens
tcaatgtttagggtatgatgttttttttttttacccatcagttttgaaaaagttaattacatttggcaattccccattcccttatagtgaggggtctcaagagctggctcctacacataaagggcttagaacagtggctggtacctaggccaccaatagtcttttgccccacccaaccggtgacacagcccggggccccgccgccccctggcggccattacggatttccgcctccctcacagaaggcagtcactgcaacgtgcgtggcctcagttgcgtcatatccggcccttgcgatcagggcttgaggaacccgcgccatgaagtgcgtgtttgttaccgtagggaccaccagctttgacgacctcattgcgtgtgtgtcggcgcccgacagtctgcaaaaaatcgagagccttggttacaaccgacttatcctgcaaattggtagaggaacggtggtacctgaacccttcagtactgagtcgtttactctggatgtttacaggtacaaggattccttgaaagaagacattcagaaagcagatcttgttattagtcacgcaggtgcaggaagctgtttggagactctggaaaaaggaaagccactcgtagtggttataaacgaaaagttgatgaacaatcatcagctggaactggcaaagcagctacacaaagagggtcatctcttctattgtacctgcagcacgcttcctgggctgttacagtcaatggacttatcaacactgaaatgttatcctcctggccagccagaaaaattttctgcatttttggataaagttgttggattacaaaaataaacactaaactctcaacactttaaaagcaacccccaaattcaacctatgtaatgtgattaaatcaaattaaatacataatatatatttacaaaataatataattaataaacttcctacatctatagaatgtataggaaattttatgttgtgcacatttgcattgggtccaaatcctaattgcagtttagtgaaattactagatttttttctaatcttcagtatgtagtgagcattcacaggttttctcctagaatctcaagtggaattggaatcataaaaatgaatgagatttgaaaactttcacaaagattataaatgtagttagtttgatactccttagaataaaaaaatgaaacagtaacaacttttatgtaaaaaaattttacataagagttagcatctttagctttataatctaaggaaccaaatttaaaaaatgatggattatgctctgtgaaatgaaaagttcaatcattgcctaaaaaagatgatcaagttagttgatctcttgtacttggaaaagctacttttttcctaaagaacagagtggagtggatatattcactttttttttctaaaacatacaaagtgataaaataatcgtgcctaatgtcaaaactttactggtttgagaagaataatcaaaaaggacttataccaataggacttactattgttttttaaggatctcctctcacagtggtaatgaaacattaactgtaacagaaatttacaatttatgtgcttataaaattagttttatgaatgaacaataaactgatgcatataatggctta

SEQ ID NO: 2552 - DNA, 908 bp, Homo sapiens
tcaatgtttagggtatgatgttttttttttttacccatcagttttgaaaaagttaattacatttggcaattccccattcccttatagtgaggggtctcaagagctggctcctacacataaagggcttagaacagtggctggtacctaggccaccaatagtcttttgccccacccaaccggtgacacagcccggggccccgccgccccctggcggccattacggatttccgcctccctcacagaaggcagtcactgcaacgtgcgtggcctcagttgcgtcatatccggcccttgcgatcagggcttgaggaacccgcgccatgaagtgcgtgtttgttaccgtagggaccaccagctttgacgacctcattgcgtgtgtgtcggcgcccgacagtctgcaaaaaatcgagagccttggttacaaccgacttatcctgcaaattggtagaggaacggtggtacctgaacccttcagtactgagtcgtttactctggatgtttacaggtacaaggattccttgaaagaagacattcagaaagcagatcttgttattagtcacgcaggtgcaggaagctgtttggagactctggaaaaaggaaagccactcgtagtggttataaacgaaaagttgatgaacaatcatcagctggaactggcaaagcagctacacaaagagggtcatctcttctattgtacctgcagcacgcttcctgggctgttacagtcaatggacttatcaacactgaaatgttatcctcctggccagccagaaaaattttctgcatttttggataaagttgttggattacaaaaataaacactaaactctcaacactttaaaagcaacccccaaattcaacctatgtaatgtgattaaatcaaattaaatacataatatatatttaca

SEQ ID NO: 2553 - DNA, 853 bp, Homo sapiens
tcaatgtttagggtatgatgttttttttttttacccatcagttttgaaaaagttaattacatttggcaattccccattcccttatagtgaggggtctcaagagctggctcctacacataaagggcttagaacagtggctggtacctaggccaccaatagtcttttgccccacccaaccggtgacacagcccggggccccgccgccccctggcggccattacggatttccgcctccctcacagaaggcagtcactgcaacgtgcgtggcctcagttgcgtcatatccggcccttgcgatcagggcttgaggaacccgcgccatgaagtgcgtgtttgttaccgtagggaccaccagctttgacgacctcattgcgtgtgtgtcggcgcccgacagtctgcaaaaaatcgagagccttggttacaaccgacttatcctgcaaattggtagaggaacggtggtacctgaacccttcagtactgagtcgtttactctggatgtttacaggtacaaggattccttgaaagaagacattcagaaagcagatcttgttattagtcacgcaggtgcaggaagctgtttggagactctggaaaaaggaaagccactcgtagtggttataaacgaaaagttgatgaacaatcatcagctggaactggcaaagcagctacacaaagagggtcatctcttctattgtacctgcagcacgcttcctgggctgttacagtcaatggacttatcaacactgaaatgttatcctcctggccagccagaaaaattttctgcatttttggataaagttgttggattacaaaaataaacactaaactctcaacactttaaaagcaaccccca

SEQ ID NO: 2554 - DNA, 946 bp, Homo sapiens
tcaatgtttagggtatgatgttttttttttttacccatcagttttgaaaaagttaattacatttggcaattccccattcccttatagtgaggggtctcaagagctggctcctacacataaagggcttagaacagtggctggtacctaggccaccaatagtcttttgccccacccaaccggtgacacagcccggggccccgccgccccctggcggccattacggatttccgcctccctcacagaaggcagtcactgcaacgtgcgtggcctcagttgcgtcatatccggcccttgcgatcagggcttgaggaacccgcgccatgaagtgcgtgtttgttaccgtagggaccaccagctttgacgacctcattgcgtgtgtgtcggcgcccgacagtctgcaaaaaatcgagagccttggttacaaccgacttatcctgcaaattggtagaggaacggtggtacctgaacccttcagtactgagtcgtttactctggatgtttacaggtacaaggattccttgaaagaagacattcagaaagcagatcttgttattagtcacgcaggtgcaggaagctgtttggagactctggaaaaaggaaagccactcgtagtggttataaacgaaaagttgatgaacaatcatcagctggaactggcaaagcagctacacaaagagggtcatctcttctattgtacctgcagttcttccttgagacactagaagcttgccaaagggccagcacgcttcctgggctgttacagtcaatggacttatcaacactgaaatgttatcctcctggccagccagaaaaattttctgcatttttggataaagttgttggattacaaaaataaacactaaactctcaacactttaaaagcaacccccaaattcaacctatgtaatgtgattaaatcaaattaaatacataatatatatttaca

SEQ ID NO: 2555 - DNA, 938 bp, Homo sapiens
aaaaggagagagtggcctagcctccctcccagcctacatctttctcccatgctggatacttcctgccttcaaacatcagactccaagttcttcagttttgggactcggactggctctccttgctcctcagcttgcagacatcctattgtgggaccttgtgattgtaaaatcgagagccttggttacaaccgacttatcctgcaaattggtagaggaacggtggtacctgaacccttcagtactgagtcgtttactctggatgtttacaggtacaaggattccttgaaagaagacattcagaaagcagatcttgttattagtcacgcaggtgcaggaagctgtttggagactctggaaaaaggaaagccactcgtagtggttataaacgaaaagttgatgaacaatcatcagctggaactggcaaagcagctacacaaagagggtcatctcttctattgtacctgcaggctaatattaaaaaaatgcttactagtggtagaaggtggtgacaaagaaatactctgggtagcaggaggaagccaacttggattaaaattttgctgagaataatctaaaaagaaatatgtggagggatcttctgagaaatacctggaaacggatgcgaggatcccaaggcacagtgctggccagctggacactatggagctcttttctctactttactaatcgggatgtcaatccttctatcgctgtcctggagaaaccctcccacgtttatggccacaagactagatgcgataatcaacgagaagaattctgaacccaaggaagtcaacgttaagatggcccagtatcgcatccctgggtaccccgacagacgcaatgtccgcgcgaacgggcgaaccacgacggggacgcgccagaaaggggaccgaaaaccgcgcataaaaaacacgggccgccggaggacgcgacac

SEQ ID NO: 2556 - DNA, 1040 bp, Homo sapiens
tcaatgtttagggtatgatgttttttttttttacccatcagttttgaaaaagttaattacatttggcaattccccattcccttatagtgaggggtctcaagagctggctcctacacataaagggcttagaacagtggctggtacctaggccaccaatagtcttttgccccacccaaccggtgacacagcccggggccccgccgccccctggcggccattacggatttccgcctccctcacagaaggcagtcactgcaacgtgcgtggcctcagttgcgtcatatccggcccttgcgatcagggcttgaggaacccgcgccatgaagtgcgtgtttgttaccgtagggaccaccagctttgacgacctcattgcgtgtgtgtcggcgcccgacagtctgcaaggtacaaggattccttgaaagaagacattcagaaagcagatcttgttattagtcacgcaggtgcaggaagctgtttggagactctggaaaaaggaaagccactcgtagtggttataaacgaaaagttgatgaacaatcatcagctggaactggcaaagcagctacacaaagagggtcatctcttctattgtacctgcagggtcctgacttgtcctgggcaagccaagtccattgcttctgctcctgggaagtgccaagattctgcagcgctgacttcaactgccttttcaggcctagactttgggctgctttccggatacctgcataagcaagcccttgttactgctacccatcctacctgcaccctgctttttccctcttgccacgctttttttcctctccctcttacccccaccctgtacaaaatgcataaaggatggaaaaactactgcagccagaagtctttgaatgaggcatcaatggatgaatatttaggcagcttagggctgtttcgaaagctgactgccaaggatgcctcttgcctctttcgggccatttcggagcagttgttttgcagccaggtccatcatttggaaatcaggaaggcttgtgtctcatatatgagggaaaatcaacaaa

SEQ ID NO: 2557 - DNA, 2087 bp, Homo sapiens
tcaatgtttagggtatgatgttttttttttttacccatcagttttgaaaaagttaattacatttggcaattccccattcccttatagtgaggggtctcaagagctggctcctacacataaagggcttagaacagtggctggtacctaggccaccaatagtcttttgccccacccaaccggtgacacagcccggggccccgccgccccctggcggccattacggatttccgcctccctcacagaaggcagtcactgcaacgtgcgtggcctcagttgcgtcatatccggcccttgcgatcagggcttgaggaacccgcgccatgaagtgcgtgtttgttaccgtagggaccaccagctttgacgacctcattgcgtgtgtgtcggcgcccgacagtctgcaaaaaatcgagagccttggttacaaccgacttatcctgcaaattggtagaggaacggtggtacctgaacccttcagtactgagtcgtttactctggatgtttacaggtacaaggattccttgaaagaagacattcagaaagcagatcttgttattagtcacgcaggtgcaggaagctgtttggagactctggaaaaaggaaagccactcgtagtggttataaacgaaaagttgatgaacaatcatcagctggaactggcaaagcagctacacaaagagggtcatctcttctattgtacctgcagcacgcttcctgggctgttacagtcaatggacttatcaacactgaaatgttatcctcctggccagccagaaaaattttctgcatttttggataaagttgttggattacaaaaataaacactaaactctcaacactttaaaagcaacccccaaattcaacctatgtaatgtgattaaatcaaattaaatacataatatatatttacaaaataatataattaataaacttcctacatctatagaatgtataggaaattttatgttgtgcacatttgcattgggtccaaatcctaattgcagtttagtgaaattactagatttttttctaatcttcagtatgtagtgagcattcacaggttttctcctagaatctcaagtggaattggaatcataaaaatgaatgagatttgaaaactttcacaaagattataaatgtagttagtttgatactccttagaataaaaaaatgaaacagtaacaacttttatgtaaaaaaattttacataagagttagcatctttagctttataatctaaggaaccaaatttaaaaaatgatggattatgctctgtgaaatgaaaagttcaatcattgcctaaaaaagatgatcaagttagttgatctcttgtacttggaaaagctacttttttcctaaagaacagagtggagtggatatattcactttttttttctaaaacatacaaagtgataaaataatcgtgcctaatgtcaaaactttactggtttgagaagaataatcaaaaaggacttataccaataggacttactattgttttttaaggatctcctctcacagtggtaatgaaacattaactgtaacagaaatttacaatttatgtgcttataaaattagttttatgaatgaacaataaactgatgcatataatggcttaaatatatggttttaaaattgacttaacttgagcaagatacattatgaagttctttctgattagagtgtgtggtctcaagacctttacagtagattatccttaagtgtccatagctctctggtacaatgtttagatatagtttatctatcaaaatagaacattcactataaagacctctcttccattccaatcatattatcccaacatgctaaatgttccaaacattttatttggaatgcattttatcatgtttttataggtttatttttctgattgtgttttatttaggctaatattaaaaaaatgcttactagtggtagaaggtggtgacaaagaaatactctgggtagcaggaggaagccaacttggattaaaattttgctgagaataatctaaaaattgttttgcagccaggtccatcatttggaaatcaggaaggcttgtgtctcatatatgagggaaaatcaacaaa

SEQ ID NO: 2558 - DNA, 1740 bp, Homo sapiens
tcaatgtttagggtatgatgttttttttttttacccatcagttttgaaaaagttaattacatttggcaattccccattcccttatagtgaggggtctcaagagctggctcctacacataaagggcttagaacagtggctggtacctaggccaccaatagtcttttgccccacccaaccggtgacacagcccggggccccgccgccccctggcggccattacggatttccgcctccctcacagaaggcagtcactgcaacgtgcgtggcctcagttgcgtcatatccggcccttgcgatcagggcttgaggaacccgcgccatgaagtgcgtgtttgttaccgtagggaccaccagctttgacgacctcattgcgtgtgtgtcggcgcccgacagtctgcaagtgagtgagggaggcgagcaggcggcggcttggctcgccacccgccatctccggccatactgccagccgcgttagccttgcctgaccgtcgcgctcggaaagaaacccccgcaactctaccacagaaaatcgagagccttggttacaaccgacttatcctgcaaattggtagaggaacggtggtacctgaacccttcagtactgagtcgtttactctggatgtttacaggtacaaggattccttgaaagaagacattcagaaagcagatcttgttattagtcacgcaggtgcaggaagctgtttggagactctggaaaaaggaaagccactcgtagtggttataaacgaaaagttgatgaacaatcatcagctggaactggcaaagcagctacacaaagagggtcatctcttctattgtacctgcagcacgcttcctgggctgttacagtcaatggacttatcaacactgaaatgttatcctcctggccagccagaaaaattttctgcatttttggataaagttgttggattacaaaaataaacactaaactctcaacactttaaaagcaacccccaaattcaacctatgtaatgtgattaaatcaaattaaatacataatatatatttacaaaataatataattaataaacttcctacatctatagaatgtataggaaattttatgttgtgcacatttgcattgggtccaaatcctaattgcagtttagtgaaattactagatttttttctaatcttcagtatgtagtgagcattcacaggttttctcctagaatctcaagtggaattggaatcataaaaatgaatgagatttgaaaactttcacaaagattataaatgtagttagtttgatactccttagaataaaaaaatgaaacagtaacaacttttatgtaaaaaaattttacataagagttagcatctttagctttataatctaaggaaccaaatttaaaaaatgatggattatgctctgtgaaatgaaaagttcaatcattgcctaaaaaagatgatcaagttagttgatctcttgtacttggaaaagctacttttttcctaaagaacagagtggagtggatatattcactttttttttctaaaacatacaaagtgataaaataatcgtgcctaatgtcaaaactttactggtttgagaagaataatcaaaaaggacttataccaataggacttactattgttttttaaggatctcctctcacagtggtaatgaaacattaactgtaacagaaatttacaatttatgtgcttataaaattagttttatgaatgaacaataaactgatgcatataatggctta

SEQ ID NO: 2559 - DNA, 1637 bp, Homo sapiens
tcaatgtttagggtatgatgttttttttttttacccatcagttttgaaaaagttaattacatttggcaattccccattcccttatagtgaggggtctcaagagctggctcctacacataaagggcttagaacagtggctggtacctaggccaccaatagtcttttgccccacccaaccggtgacacagcccggggccccgccgccccctggcggccattacggatttccgcctccctcacagaaggcagtcactgcaacgtgcgtggcctcagttgcgtcatatccggcccttgcgatcagggcttgaggaacccgcgccatgaagtgcgtgtttgttaccgtagggaccaccagctttgacgacctcattgcgtgtgtgtcggcgcccgacagtctgcaagtgagtgagggaggcgagcaggcggcggcttggctcgccacccgccatctccggccatactgccagccgcgttagccttgcctgaccgtcgcgctcggaaagaaacccccgcaactctaccacagggtacaaggattccttgaaagaagacattcagaaagcagatcttgttattagtcacgcaggtgcaggaagctgtttggagactctggaaaaaggaaagccactcgtagtggttataaacgaaaagttgatgaacaatcatcagctggaactggcaaagcagctacacaaagagggtcatctcttctattgtacctgcagcacgcttcctgggctgttacagtcaatggacttatcaacactgaaatgttatcctcctggccagccagaaaaattttctgcatttttggataaagttgttggattacaaaaataaacactaaactctcaacactttaaaagcaacccccaaattcaacctatgtaatgtgattaaatcaaattaaatacataatatatatttacaaaataatataattaataaacttcctacatctatagaatgtataggaaattttatgttgtgcacatttgcattgggtccaaatcctaattgcagtttagtgaaattactagatttttttctaatcttcagtatgtagtgagcattcacaggttttctcctagaatctcaagtggaattggaatcataaaaatgaatgagatttgaaaactttcacaaagattataaatgtagttagtttgatactccttagaataaaaaaatgaaacagtaacaacttttatgtaaaaaaattttacataagagttagcatctttagctttataatctaaggaaccaaatttaaaaaatgatggattatgctctgtgaaatgaaaagttcaatcattgcctaaaaaagatgatcaagttagttgatctcttgtacttggaaaagctacttttttcctaaagaacagagtggagtggatatattcactttttttttctaaaacatacaaagtgataaaataatcgtgcctaatgtcaaaactttactggtttgagaagaataatcaaaaaggacttataccaataggacttactattgttttttaaggatctcctctcacagtggtaatgaaacattaactgtaacagaaatttacaatttatgtgcttataaaattagttttatgaatgaacaataaactgatgcatataatggctta

SEQ ID NO: 2560 - DNA, 1512 bp, Homo sapiens
tcaatgtttagggtatgatgttttttttttttacccatcagttttgaaaaagttaattacatttggcaattccccattcccttatagtgaggggtctcaagagctggctcctacacataaagggcttagaacagtggctggtacctaggccaccaatagtcttttgccccacccaaccggtgacacagcccggggccccgccgccccctggcggccattacggatttccgcctccctcacagaaggcagtcactgcaacgtgcgtggcctcagttgcgtcatatccggcccttgcgatcagggcttgaggaacccgcgccatgaagtgcgtgtttgttaccgtagggaccaccagctttgacgacctcattgcgtgtgtgtcggcgcccgacagtctgcaaggtacaaggattccttgaaagaagacattcagaaagcagatcttgttattagtcacgcaggtgcaggaagctgtttggagactctggaaaaaggaaagccactcgtagtggttataaacgaaaagttgatgaacaatcatcagctggaactggcaaagcagctacacaaagagggtcatctcttctattgtacctgcagcacgcttcctgggctgttacagtcaatggacttatcaacactgaaatgttatcctcctggccagccagaaaaattttctgcatttttggataaagttgttggattacaaaaataaacactaaactctcaacactttaaaagcaacccccaaattcaacctatgtaatgtgattaaatcaaattaaatacataatatatatttacaaaataatataattaataaacttcctacatctatagaatgtataggaaattttatgttgtgcacatttgcattgggtccaaatcctaattgcagtttagtgaaattactagatttttttctaatcttcagtatgtagtgagcattcacaggttttctcctagaatctcaagtggaattggaatcataaaaatgaatgagatttgaaaactttcacaaagattataaatgtagttagtttgatactccttagaataaaaaaatgaaacagtaacaacttttatgtaaaaaaattttacataagagttagcatctttagctttataatctaaggaaccaaatttaaaaaatgatggattatgctctgtgaaatgaaaagttcaatcattgcctaaaaaagatgatcaagttagttgatctcttgtacttggaaaagctacttttttcctaaagaacagagtggagtggatatattcactttttttttctaaaacatacaaagtgataaaataatcgtgcctaatgtcaaaactttactggtttgagaagaataatcaaaaaggacttataccaataggacttactattgttttttaaggatctcctctcacagtggtaatgaaacattaactgtaacagaaatttacaatttatgtgcttataaaattagttttatgaatgaacaataaactgatgcatataatggctta

SEQ ID NO: 2561 - DNA, 1778 bp, Homo sapiens
tcaatgtttagggtatgatgttttttttttttacccatcagttttgaaaaagttaattacatttggcaattccccattcccttatagtgaggggtctcaagagctggctcctacacataaagggcttagaacagtggctggtacctaggccaccaatagtcttttgccccacccaaccggtgacacagcccggggccccgccgccccctggcggccattacggatttccgcctccctcacagaaggcagtcactgcaacgtgcgtggcctcagttgcgtcatatccggcccttgcgatcagggcttgaggaacccgcgccatgaagtgcgtgtttgttaccgtagggaccaccagctttgacgacctcattgcgtgtgtgtcggcgcccgacagtctgcaagtgagtgagggaggcgagcaggcggcggcttggctcgccacccgccatctccggccatactgccagccgcgttagccttgcctgaccgtcgcgctcggaaagaaacccccgcaactctaccacagaaaatcgagagccttggttacaaccgacttatcctgcaaattggtagaggaacggtggtacctgaacccttcagtactgagtcgtttactctggatgtttacaggtacaaggattccttgaaagaagacattcagaaagcagatcttgttattagtcacgcaggtgcaggaagctgtttggagactctggaaaaaggaaagccactcgtagtggttataaacgaaaagttgatgaacaatcatcagctggaactggcaaagcagctacacaaagagggtcatctcttctattgtacctgcagttcttccttgagacactagaagcttgccaaagggccagcacgcttcctgggctgttacagtcaatggacttatcaacactgaaatgttatcctcctggccagccagaaaaattttctgcatttttggataaagttgttggattacaaaaataaacactaaactctcaacactttaaaagcaacccccaaattcaacctatgtaatgtgattaaatcaaattaaatacataatatatatttacaaaataatataattaataaacttcctacatctatagaatgtataggaaattttatgttgtgcacatttgcattgggtccaaatcctaattgcagtttagtgaaattactagatttttttctaatcttcagtatgtagtgagcattcacaggttttctcctagaatctcaagtggaattggaatcataaaaatgaatgagatttgaaaactttcacaaagattataaatgtagttagtttgatactccttagaataaaaaaatgaaacagtaacaacttttatgtaaaaaaattttacataagagttagcatctttagctttataatctaaggaaccaaatttaaaaaatgatggattatgctctgtgaaatgaaaagttcaatcattgcctaaaaaagatgatcaagttagttgatctcttgtacttggaaaagctacttttttcctaaagaacagagtggagtggatatattcactttttttttctaaaacatacaaagtgataaaataatcgtgcctaatgtcaaaactttactggtttgagaagaataatcaaaaaggacttataccaataggacttactattgttttttaaggatctcctctcacagtggtaatgaaacattaactgtaacagaaatttacaatttatgtgcttataaaattagttttatgaatgaacaataaactgatgcatataatggctta

SEQ ID NO: 2562 - DNA, 1680 bp, Homo sapiens
tcaatgtttagggtatgatgttttttttttttacccatcagttttgaaaaagttaattacatttggcaattccccattcccttatagtgaggggtctcaagagctggctcctacacataaagggcttagaacagtggctggtacctaggccaccaatagtcttttgccccacccaaccggtgacacagcccggggccccgccgccccctggcggccattacggatttccgcctccctcacagaaggcagtcactgcaacgtgcgtggcctcagttgcgtcatatccggcccttgcgatcagggcttgaggaacccgcgccatgaagtgcgtgtttgttaccgtagggaccaccagctttgacgacctcattgcgtgtgtgtcggcgcccgacagtctgcaagtgagtgagggaggcgagcaggcggcggcttggctcgccacccgccatctccggccatactgccagccgcgttagccttgcctgaccgtcgcgctcggaaagaaacccccgcaactctaccacagaaaatcgagagccttggttacaaccgacttatcctgcaaattggtagaggaacggtggtacctgaacccttcagtactgagtcgtttactctggatgtttacagtgcaggaagctgtttggagactctggaaaaaggaaagccactcgtagtggttataaacgaaaagttgatgaacaatcatcagctggaactggcaaagcagctacacaaagagggtcatctcttctattgtacctgcagcacgcttcctgggctgttacagtcaatggacttatcaacactgaaatgttatcctcctggccagccagaaaaattttctgcatttttggataaagttgttggattacaaaaataaacactaaactctcaacactttaaaagcaacccccaaattcaacctatgtaatgtgattaaatcaaattaaatacataatatatatttacaaaataatataattaataaacttcctacatctatagaatgtataggaaattttatgttgtgcacatttgcattgggtccaaatcctaattgcagtttagtgaaattactagatttttttctaatcttcagtatgtagtgagcattcacaggttttctcctagaatctcaagtggaattggaatcataaaaatgaatgagatttgaaaactttcacaaagattataaatgtagttagtttgatactccttagaataaaaaaatgaaacagtaacaacttttatgtaaaaaaattttacataagagttagcatctttagctttataatctaaggaaccaaatttaaaaaatgatggattatgctctgtgaaatgaaaagttcaatcattgcctaaaaaagatgatcaagttagttgatctcttgtacttggaaaagctacttttttcctaaagaacagagtggagtggatatattcactttttttttctaaaacatacaaagtgataaaataatcgtgcctaatgtcaaaactttactggtttgagaagaataatcaaaaaggacttataccaataggacttactattgttttttaaggatctcctctcacagtggtaatgaaacattaactgtaacagaaatttacaatttatgtgcttataaaattagttttatgaatgaacaataaactgatgcatataatggctta

SEQ ID NO: 2563 - DNA, 1550 bp, Homo sapiens
tcaatgtttagggtatgatgttttttttttttacccatcagttttgaaaaagttaattacatttggcaattccccattcccttatagtgaggggtctcaagagctggctcctacacataaagggcttagaacagtggctggtacctaggccaccaatagtcttttgccccacccaaccggtgacacagcccggggccccgccgccccctggcggccattacggatttccgcctccctcacagaaggcagtcactgcaacgtgcgtggcctcagttgcgtcatatccggcccttgcgatcagggcttgaggaacccgcgccatgaagtgcgtgtttgttaccgtagggaccaccagctttgacgacctcattgcgtgtgtgtcggcgcccgacagtctgcaaggtacaaggattccttgaaagaagacattcagaaagcagatcttgttattagtcacgcaggtgcaggaagctgtttggagactctggaaaaaggaaagccactcgtagtggttataaacgaaaagttgatgaacaatcatcagctggaactggcaaagcagctacacaaagagggtcatctcttctattgtacctgcagttcttccttgagacactagaagcttgccaaagggccagcacgcttcctgggctgttacagtcaatggacttatcaacactgaaatgttatcctcctggccagccagaaaaattttctgcatttttggataaagttgttggattacaaaaataaacactaaactctcaacactttaaaagcaacccccaaattcaacctatgtaatgtgattaaatcaaattaaatacataatatatatttacaaaataatataattaataaacttcctacatctatagaatgtataggaaattttatgttgtgcacatttgcattgggtccaaatcctaattgcagtttagtgaaattactagatttttttctaatcttcagtatgtagtgagcattcacaggttttctcctagaatctcaagtggaattggaatcataaaaatgaatgagatttgaaaactttcacaaagattataaatgtagttagtttgatactccttagaataaaaaaatgaaacagtaacaacttttatgtaaaaaaattttacataagagttagcatctttagctttataatctaaggaaccaaatttaaaaaatgatggattatgctctgtgaaatgaaaagttcaatcattgcctaaaaaagatgatcaagttagttgatctcttgtacttggaaaagctacttttttcctaaagaacagagtggagtggatatattcactttttttttctaaaacatacaaagtgataaaataatcgtgcctaatgtcaaaactttactggtttgagaagaataatcaaaaaggacttataccaataggacttactattgttttttaaggatctcctctcacagtggtaatgaaacattaactgtaacagaaatttacaatttatgtgcttataaaattagttttatgaatgaacaataaactgatgcatataatggctta

SEQ ID NO: 2564 - DNA, 1033 bp, Homo sapiens
tcaatgtttagggtatgatgttttttttttttacccatcagttttgaaaaagttaattacatttggcaattccccattcccttatagtgaggggtctcaagagctggctcctacacataaagggcttagaacagtggctggtacctaggccaccaatagtcttttgccccacccaaccggtgacacagcccggggccccgccgccccctggcggccattacggatttccgcctccctcacagaaggcagtcactgcaacgtgcgtggcctcagttgcgtcatatccggcccttgcgatcagggcttgaggaacccgcgccatgaagtgcgtgtttgttaccgtagggaccaccagctttgacgacctcattgcgtgtgtgtcggcgcccgacagtctgcaagtgagtgagggaggcgagcaggcggcggcttggctcgccacccgccatctccggccatactgccagccgcgttagccttgcctgaccgtcgcgctcggaaagaaacccccgcaactctaccacagaaaatcgagagccttggttacaaccgacttatcctgcaaattggtagaggaacggtggtacctgaacccttcagtactgagtcgtttactctggatgtttacaggtacaaggattccttgaaagaagacattcagaaagcagatcttgttattagtcacgcaggtgcaggaagctgtttggagactctggaaaaaggaaagccactcgtagtggttataaacgaaaagttgatgaacaatcatcagctggaactggcaaagcagctacacaaagagggtcatctcttctattgtacctgcagcacgcttcctgggctgttacagtcaatggacttatcaacactgaaatgttatcctcctggccagccagaaaaattttctgcatttttggataaagttgttggattacaaaaataaacactaaactctcaacactttaaaagcaacccccaaattcaacctatgtaatgtgattaaatcaaattaaatacataatatatatttaca

SEQ ID NO: 2565 - DNA, 1268 bp, Homo sapiens
tcaatgtttagggtatgatgttttttttttttacccatcagttttgaaaaagttaattacatttggcaattccccattcccttatagtgaggggtctcaagagctggctcctacacataaagggcttagaacagtggctggtacctaggccaccaatagtcttttgccccacccaaccggtgacacagcccggggccccgccgccccctggcggccattacggatttccgcctccctcacagaaggcagtcactgcaacgtgcgtggcctcagttgcgtcatatccggcccttgcgatcagggcttgaggaacccgcgccatgaagtgcgtgtttgttaccgtagggaccaccagctttgacgacctcattgcgtgtgtgtcggcgcccgacagtctgcaagtgagtgagggaggcgagcaggcggcggcttggctcgccacccgccatctccggccatactgccagccgcgttagccttgcctgaccgtcgcgctcggaaagaaacccccgcaactctaccacagaaaatcgagagccttggttacaaccgacttatcctgcaaattggtagaggaacggtggtacctgaacccttcagtactgagtcgtttactctggatgtttacaggtacaaggattccttgaaagaagacattcagaaagcagatcttgttattagtcacgcaggtgcaggaagctgtttggagactctggaaaaaggaaagccactcgtagtggttataaacgaaaagttgatgaacaatcatcagctggaactggcaaagcagctacacaaagagggtcatctcttctattgtacctgcagggtcctgacttgtcctgggcaagccaagtccattgcttctgctcctgggaagtgccaagattctgcagcgctgacttcaactgccttttcaggcctagactttgggctgctttccggatacctgcataagcaagcccttgttactgctacccatcctacctgcaccctgctttttccctcttgccacgctttttttcctctccctcttacccccaccctgtacaaaatgcataaaggatggaaaaactactgcagccagaagtctttgaatgaggcatcaatggatgaatatttaggcagcttagggctgtttcgaaagctgactgccaaggatgcctcttgcctctttcgggccatttcggagcagttgttttgcagccaggtccatcatttggaaatcaggaaggcttgtgtctcatatatgagggaaaatcaacaaa

SEQ ID NO: 2566 - DNA, 1071 bp, Homo sapiens
tcaatgtttagggtatgatgttttttttttttacccatcagttttgaaaaagttaattacatttggcaattccccattcccttatagtgaggggtctcaagagctggctcctacacataaagggcttagaacagtggctggtacctaggccaccaatagtcttttgccccacccaaccggtgacacagcccggggccccgccgccccctggcggccattacggatttccgcctccctcacagaaggcagtcactgcaacgtgcgtggcctcagttgcgtcatatccggcccttgcgatcagggcttgaggaacccgcgccatgaagtgcgtgtttgttaccgtagggaccaccagctttgacgacctcattgcgtgtgtgtcggcgcccgacagtctgcaagtgagtgagggaggcgagcaggcggcggcttggctcgccacccgccatctccggccatactgccagccgcgttagccttgcctgaccgtcgcgctcggaaagaaacccccgcaactctaccacagaaaatcgagagccttggttacaaccgacttatcctgcaaattggtagaggaacggtggtacctgaacccttcagtactgagtcgtttactctggatgtttacaggtacaaggattccttgaaagaagacattcagaaagcagatcttgttattagtcacgcaggtgcaggaagctgtttggagactctggaaaaaggaaagccactcgtagtggttataaacgaaaagttgatgaacaatcatcagctggaactggcaaagcagctacacaaagagggtcatctcttctattgtacctgcagttcttccttgagacactagaagcttgccaaagggccagcacgcttcctgggctgttacagtcaatggacttatcaacactgaaatgttatcctcctggccagccagaaaaattttctgcatttttggataaagttgttggattacaaaaataaacactaaactctcaacactttaaaagcaacccccaaattcaacctatgtaatgtgattaaatcaaattaaatacataatatatatttaca

SEQ ID NO: 2567 - DNA, 1016 bp, Homo sapiens
tcaatgtttagggtatgatgttttttttttttacccatcagttttgaaaaagttaattacatttggcaattccccattcccttatagtgaggggtctcaagagctggctcctacacataaagggcttagaacagtggctggtacctaggccaccaatagtcttttgccccacccaaccggtgacacagcccggggccccgccgccccctggcggccattacggatttccgcctccctcacagaaggcagtcactgcaacgtgcgtggcctcagttgcgtcatatccggcccttgcgatcagggcttgaggaacccgcgccatgaagtgcgtgtttgttaccgtagggaccaccagctttgacgacctcattgcgtgtgtgtcggcgcccgacagtctgcaagtgagtgagggaggcgagcaggcggcggcttggctcgccacccgccatctccggccatactgccagccgcgttagccttgcctgaccgtcgcgctcggaaagaaacccccgcaactctaccacagaaaatcgagagccttggttacaaccgacttatcctgcaaattggtagaggaacggtggtacctgaacccttcagtactgagtcgtttactctggatgtttacaggtacaaggattccttgaaagaagacattcagaaagcagatcttgttattagtcacgcaggtgcaggaagctgtttggagactctggaaaaaggaaagccactcgtagtggttataaacgaaaagttgatgaacaatcatcagctggaactggcaaagcagctacacaaagagggtcatctcttctattgtacctgcagttcttccttgagacactagaagcttgccaaagggccagcacgcttcctgggctgttacagtcaatggacttatcaacactgaaatgttatcctcctggccagccagaaaaattttctgcatttttggataaagttgttggattacaaaaataaacactaaactctcaacactttaaaagcaaccccca

SEQ ID NO: 2568 - DNA, 918 bp, Homo sapiens
tcaatgtttagggtatgatgttttttttttttacccatcagttttgaaaaagttaattacatttggcaattccccattcccttatagtgaggggtctcaagagctggctcctacacataaagggcttagaacagtggctggtacctaggccaccaatagtcttttgccccacccaaccggtgacacagcccggggccccgccgccccctggcggccattacggatttccgcctccctcacagaaggcagtcactgcaacgtgcgtggcctcagttgcgtcatatccggcccttgcgatcagggcttgaggaacccgcgccatgaagtgcgtgtttgttaccgtagggaccaccagctttgacgacctcattgcgtgtgtgtcggcgcccgacagtctgcaagtgagtgagggaggcgagcaggcggcggcttggctcgccacccgccatctccggccatactgccagccgcgttagccttgcctgaccgtcgcgctcggaaagaaacccccgcaactctaccacagaaaatcgagagccttggttacaaccgacttatcctgcaaattggtagaggaacggtggtacctgaacccttcagtactgagtcgtttactctggatgtttacagtgcaggaagctgtttggagactctggaaaaaggaaagccactcgtagtggttataaacgaaaagttgatgaacaatcatcagctggaactggcaaagcagctacacaaagagggtcatctcttctattgtacctgcagcacgcttcctgggctgttacagtcaatggacttatcaacactgaaatgttatcctcctggccagccagaaaaattttctgcatttttggataaagttgttggattacaaaaataaacactaaactctcaacactttaaaagcaaccccca

SEQ ID NO: 2569 - DNA, 435 bp, Homo sapiens
ccccacccaaccggtgacacagcccggggccccgccgccccctggcggccattacggatttccgcctccctcacagaaggcagtcactgcaacgtgcgtggcctcagttgcgtcatatccggcccttgcgatcagggcttgaggaacccgcgccatgaagtgcgtgtttgttaccgtagggaccaccagctttgacgacctcattgcgtgtgtgtcggcgcccgacagtctgcaagtgagtgagggaggcgagcaggcggcggcttggctcgccacccgccatctccggccatactgccagccgcgttagccttgcctgaccgtcgcgctcggaaagaaacccccgcaactctaccacaggtgccgctgccccttagctggcttctgcccacgcccggcggggcccttctccggctacccggccactcggggttg

SEQ ID NO: 2570 - DNA, 938 bp, Homo sapiens
tcccaaagtgctgggattacaggcatgagccaccacacccagccaataattggttatattttcattttaggtaaatcatttattttccccagacctaggctggggggtagtatgtttgttctaatttaagcgattggtttaaataaatttccgatgtaatggttctatgtttaaaaccttatttccagcatacatggtggtgtggtatattgtttaattgtatatgaagttatgatagtaaattactggcaaagattatttcacagtcttcatgcatggtctagtagtttccccagcttattatcttgtctggcagctattacttttggtttcaatttttaaattctgttttcatgaatgaattgtgcttcagtttaaatatgcccagtcctgagaagtattacaaagccatgtgaagacatttttcatgaaatatcatttctgaaatatatcagttgacataggagataaggtatctgctgaatttatattgacattttatagtactctttgtattgctttaataatcctagtatgtatacttattaaaatatataaaaattcacatgtgcagtttttagaagtaccactatattcttggaagttagattcagtcatcagtgggcagcagatgaagtatggaattttctcccatgttacctaatatttttcttcttttgttttagcacgcttcctgggctgttacagtcaatggacttatcaacactgaaatgttatcctcctggccagccagaaaaattttctgcatttttggataaagttgttggattacaaaaataaacactaaactctcaacactttaaaagcaacccccaaattcaacctatgtaatgtgattaaatcaaattaaatacataatatatatttacaaaataatataattaataaacttcctacatctatagaatgtataggaa

SEQ ID NO: 2571 - DNA, 453 bp, Homo sapiens
ggatacatttgcattgttatatctgtgcatgaatgtataaaatggtatattaaagagaaataatttaagccagaaaaaaaattagttaatatttgttgtgaataaaattggaaagtaattaattattatttgcaggtattatctttgtttacttagataacaaaagaaactaaaagactaggctgggtgtggtggctcacgcctgtaatcccagcactttgggaggccgaggcaggtggatcacaaggtcaggagatcgagaccatcctggctaacacggtgaaaccccgtctctactaaaaatacgaaaaatagctgggcacctgtagtcccagctactggggaggtcgaggcaggagaatggcgtgaacccgggaggcggagcttgcagtagccgagatggcgccggcgcccctgcactcaagcctgggcaacacagcaagactccgtctc

SEQ ID NO: 2572 - DNA, 426 bp, Homo sapiens
tttttgttttattatgcatatgagtaaaagagatttgagttacatgaaaatctaatctctcatttcctgggagaaaaacaccagtatccttagaactaagaatattatggtgaacaatttagacaatatcttttctctaatgtttcttacattcttacgtcaggtggtgatgagggctgtggatcataaagaaataactgattatattaatgagataatccaaataatgataaagagctatgaagaaaataaaatgagataattgcagaaaatcagtggttggtgatggtagtattataaaacttgagatattgtgggccagaaggttttattgaggaggtaagatttgacataaaatgaataatgagaagttaaatgtgccaatgttttgtggaagagcattatagacagagaagtaaggtaaaa

SEQ ID NO: 2573 - DNA, 441 bp, Homo sapiens
gtagacggcaatcaatttgtcagacagatttcttagggtacgtgaggttggagaagtataagacctatggccaggaactcatcacatctgtgctgccctttccctgaagagtcagtagggtattgtagcataaaagtttaggaagtcttggctggacacagtggctcacacctgtaatcccagcactttgggccaaggtggacgaatcacttgagatcatgaattcaagaccaccctggccaacatggcaaaaccccgtctctactaaaaatattaaaaaaaaaattagctgggcatggtggtgctcacctgtagtcccagctactcgggaggctgaggcatgagaatcacttgaacccaggagggggaggttgcagtgagccgagattgccacactgcagcctggatgacagaataagactccgtttcaaaaaaaaaaag

SEQ ID NO: 2574 - DNA, 695 bp, Homo sapiens
taattccttgccaatcatacgctgctttttggtgtgtgtttcttttaattctgattactaacactttaagggatgctgccttcctgtggttacattttctgaactattttatgagattagttattcttgatttaggatataccatgggccagccatcaggctaaggagtttatattttatcaataattctcagaaaaaatttcctcaataatttgtgtcatttccatctcacaaatgaggatattgaggttctaaaaggtggtggtactgaaaactcgaaaatgtacctctgtttctcatttccaaaatctgaggttgcacctgtgtttctcatttccaaagcctgaggatgcacctctgttcctcgtctccaaagcccgaggtcccacttctgttcctcatctccaaagcctgaggttgcacctctgtttctcgtctccaaagcctgaggttgcctgcaagtctcttgaggattttttggtgtaaacaggttgagtttctggataggtgggcatattggcagctgaatatgtgggttttgagtgtgaaatacaggttcttagctatgacccagcaatcttctacttgttctgtgctcttccacataaattgctttttcttgattgtattttcataggagcaatttctgaggctggaaggcaggagcattgtaagagacatgtcagtggatgggg

SEQ ID NO: 2575 - DNA, 457 bp, Homo sapiens
caaccttgtgctttccccactcacagctctcattgcctgtaatcaaagtgcccagattaatgtctgtatcgtccctccagcggagatggcagtagttatctgccttatttcccctattcaacagcagctcagtgaacagttgtagggtaactgaaatgaatatgaaaatgtagattaggtgttagaaaaagagctaagaggatcctttataggagtgtttattttattttattttttgagacagggtctcactctgtcacccaggctggagtgcaatggcactatctcagctcactgcaacttccaccttcagggctcaagcaatcctcccacctcagcctcccaagcagctgactacaggcacacaccaccacggccggctattgttttgtatttttagtagagacaggggtcttgtcatattgcccaagctggtcttgaatgcctgaactccacc

SEQ ID NO: 2576 - DNA, 162 bp, Homo sapiens
caaaacaaatatttatcatattattagaaagctaatgtccctgtaaccagcactggggttgggaaatagagcataggtagtcaccccagaaatcccttcataagctttgtcctttctcttccttcaaaactagctgtcttcctcactcttatggcaatgacc

SEQ ID NO: 2577 - DNA, 331 bp, Homo sapiens
agtggttttggaatacaatcctcagtctgagccaaatctgtgataaaaatgcaaattcagacgttgcctctggatcacaaacctgaaatgtgatcaatctaaacctgttcttgtccatcaacaggagtttctatagcctgaaatcacaaaagtagaagcagaacatttcctaactttagaagtctgagaggcaagggtggcacgtaacagcctagggcaggctgccctttctgcccctccccatccacatcagtagcctcactccctctggctcccatcctcccgaggactcacagagctgtaaggcccacagttctgctctctatggaaa

SEQ ID NO: 2578 - DNA, 676 bp, Homo sapiens
  misc_feature (672)..(676): n is a, c, g, or t
aagaacaggggaggcctcgcgcggtggctcatgcctgtaatcacagcactttgggaggccaagacgggtggatcacctgaggtcaggagttcaacaccagcttggccaagatgatgaaaccccatctctactaaaaataccaaaattagccgggcgtgatagcgggcacctgtagtcccagctacttgggaggctgaggcagagaatcgcttgaatccgggaggcagaggttgcagtgagccaagattgcgccactgcactccagcctgggcgacagagcgagactccgtatcaaaaacaaacaaaaaacaggggaaacaggtgagaggcctgtcttggggattcattgtgattcctgcggcagttgcctccccagacacccagagcttgctggtcatcccagacccttgggcaagggcaagacagcagcgtccagcagtcggcttgtgcagggcagccttccaattgcccaaaatatgcgccctcccggacaccatccttggaagagaacctagttccttaccgatcctttcgtgcctcagtccacccagaccaattccagccttggtgaggcgtttccctctgaccaagcacccacccatgggaggcccgtgtcacccggctgcgtttcgcatctctgctcccatgaataaatgtatttactctaaaaannnnn

SEQ ID NO: 2579 - DNA, 1150 bp, Homo sapiens
ttaaaggtgcaataatgctgtttgaaatgaggagaacgcctgtgttttgtttgctgagagaaatccactatctctcatccagaagatgattagacccataatggaagccagtcagtggcatgaggaatcatggagatgattctcacctggttgattggatcagacgttcctagcccgaatgagggtggaaagggaaccaagagatgaagtggattgttgggtttatgagaggacggtggttgtctgtctatagttaaggttgtttaaactcatgaccatgagaatgagctttttctggataactctttccttttccttctgatttttgagagtgctgaaaactcaagtcctgtatttaaaaattccatcgttgaaaacatgtttcaaggacagatgacacacttatgattatagcatctgaagtgatgggaatattaaataacctttggttggacatgtaaccatcagggctccacttggtcttaaaaccaaacacacacagttcttgtcgttaaagatatccatggcctggcacagtggctcacgcctgtaatcctaacactttggaaagccgaggcgaggggttaacttgagcccaggggtttgagaccagcctgggcaacatggtgaaaccttgtctctacaaaaaatacaaaaattagctgggtgtggtgttgtgtgcctgtagtcccagctactagggaggctgaggcaggaaaatcacctgaacccaggaggtggaggttgcagtcaggcaccatcctgcgattgcactccagcctgggagacacagccagactccatctcacaaaaaaaaaaaaaaaaaaaaaaagacttacacagagaaagcctgaagcccacaagagcaattagcaaaaggaaccctgacataacaaatacggtggtgtgattagcaaccaggtagttaagctcaagggttgctatgtgtcataaacttgaaagctacattggccacgagtaacacaaatgtaggtgctaatcacagataggtggtgggcatttcaaactttctcttcatatctatggatacccttgcttgagtccaggagaacgagattagcgtgttcctcccttccttccttccttcctctatctctccctccctctctccgtgtcttcctccctccct

SEQ ID NO: 2580 - DNA, 262 bp, Homo sapiens
taaatcctttattgagcgccttctatgagccaagttctgttctggaagagaggattccagcagtgaacaaacagaagtctctgttcttacagagcttatattatgttgaacagaaataaataatgaacaaataagaatataataccaggtaaagagttctaggaagaacaaagcagggtaaaagcataagactaatgcctggcagatgtaatttacttagggtgaccaggaaaggccttactgagaagaaagcattagggca

SEQ ID NO: 2581 - DNA, 346 bp, Homo sapiens
tgagtcagagcctcactctgtcgctcaggctagagtgcagtggcatgatcttggctcactgcaacctccacctcacaggttcaagcaattctcctctctcagccacctgagtagctaggattaccagcacctgccaccatgcccagctaattttttgtatttttagaagagacggggtttcaccatgttggccaggctggtctcgaactcctgacctcaagtgatcctcccacctttgcctcccaaagtgctgggattacaggcatgagccactgtgcctggccagtactgggtcttgaccaaactaaaaatgaagactgtgttaattgtaaggtaattgtgattc

SEQ ID NO: 2582 - DNA, 485 bp, Homo sapiens
ttatgtctgcttattttacagttgaagtttgattctaaagtatgtacgattattcacaatatgtacaattatatataatcttagagaaattaatacaagccataccaagatatcagtgagacttactcatgccattacattctcatgacaggagcaagtcagtgtattttgtatattctgaatttccccggattaaagagttggagatactaaattctcttttagtaaaaggtttctcaatgaagttttctttcttaaaataccagggtaaagactttatagcactactagcttttttcctaagaaacaaaatgtaactaaaaactgcagactacatgagcatgacacaggatggcactctctgtttattacagttgccaagttgcatcataatgttgaatattgaaattggtttttcctaatttctctgaccacaagtataggtggggtttttcctctattgaagtagttccaaagtgactgag

SEQ ID NO: 2583 - DNA, 268 bp, Homo sapiens
aggattgttgttatttctgttttttcttattgttgtttgtttaatggcatttctaaacttattctgcaaggtctatattcattgtagtgtatagccattgaaatctgctcagtcagctttgtggtcagctaataattggatatagatatccttagatacctgaaaccagtaagtgttctagcctttgctaagaggttttgtgtacatattgggacatactgtcaatgcttaggcacaccatttacaacctcaacctctttttattttt

SEQ ID NO: 2584 - DNA, 455 bp, Homo sapiens
gcccggaatgtgtgatggtgggtgctccagatattctacacaagagaagggctcagggcaggagcagatgcttcaggcacccgggaagactgcggctggtggagacctggggataccgggttatttctgcctccacactgcaaggactctcatctcttatgagaaaggcaaatgacacccagctgaggctgggaagtgctgtaatgtgggtggggtgatggggctggctgccatgtccaggatcttcattggactgctgtgtggagagtctacccttcccttgccttactctgtgtgtgtgtttaagttcataacttattcttgcctgtggatctgggagagtgagggacaggggcggatggtatatttaattaaatatcgccactccctcctctttaaggtcattacagtcaataagggggagaagaaatatctctttaggaggcctttcaaat

SEQ ID NO: 2585 - DNA, 460 bp, Homo sapiens
aagtacctggctgtaaaaaatgtctccacggaaatggctacattctaggtgcacataacaacacttcagtcaacggcaggctgcatatacaaggtggtcccattagattacaataccatacttctaccataacttttctatgttaagatatgtttagatacacaaatacttaccattgtgttacaattgcctacagaattgagtagagtaacatgctgtacaggtccataacctaggagcaataggccataccagatagcctaggtgtgtaataagctataccatctaggcttgtgtaagtacactctacaacgttcgcacaactatgaaatcgcctaacatgtttctcagaagatatccccaccactaagtgatgcatgactgtataagtattatatgccacaatacccagaagctacatgcaaaccccagtgttaaagatggagaagaacatgattac

SEQ ID NO: 2586 - DNA, 436 bp, Homo sapiens
tttaaagaggaaaagtgcaataaaataaatagtgactgttttctttagcaatagctctttcaaaatcttgctctcaggactgaaaagtgatagatagtacctggattatcagataatgcccttgacttctgggggctcattcacagtctctgtagtttcttcttcttcccacgtgttcacatgactcctgtcctcttgagatctgacctccttctggaatggacacatatgctaagatgcagtgtatgcacaaggaaggcctgtgagagggctttgtcactttgtctccttcctgtgtgcacctctctgtctccatgtgtgtctctgtcccctctccctctgtctccccatttctgcctgctgtcatacagcatccttacaacctctaggcatgaaaatcctaagtttgtgtgaccttttcagcccattttgttga

SEQ ID NO: 2587 - DNA, 341 bp, Homo sapiens
ggaagcaagcatgttttaaccatggtagagcatgagtgggatgggggaggtgccacacacttttaaatgatcagatcttgtgagacctcccctgatttgggtggggacacagagccaaaagatatcattctgccccagcccctcccaaatctcatgtccttctcacatttcaaaacaaatcatgcctatccaacagtccctcaatgtcttaactcattccagtattaactcaaaagtccaagtccaaagtctcagcagacacaaggtgatataatttggctctgtccccacctgaatctcatttttgaattgtaatccgaattgtaattcccatgggtcag

SEQ ID NO: 2588 - DNA, 423 bp, Homo sapiens
ttttgaatagtcactctgcaattggggagggtcgcaagattaccttgttcaacaatttgttagaagaactcacagaatgtggcaaagctggtatcctcaccatcacagtttattatagcgaaatgataccgattaaaatcagcaacaagaaagaaaaggtgcttagggtaggatctctgggagcctgggtgtagaacttccagttctctcccagtgggtcacgcagagtgggctcattcctcgcagcaaaaacctgcgatcgcatgcacagagtactgctaactggggaaacccctctggagcttggcatgcagaattcctacgaagggttgctcccacggtcagggcttgaccacctgcaaggctgaccttcaaccttttaggctccttcccaggagatgagtcaatgttgggtggatcaag

SEQ ID NO: 2589 - DNA, 1173 bp, Homo sapiens
agtaacaacgctcaaattatcagaaactgtaaaaatttccagtttttactggaaataaaaactgtgctgggtgcagtgtctcaggcctgtaatcccagcaattttggtggccgaggcaggtgtatcacttgagctcaggagctcgagaccagcctgggaagcatggtgaaaccctgtctctaccagaaatacaagaaattagctgggcatggcagctcaagcctgtggtctcagctactcgggaggcggaggtggaaggatcacttgagcccaggacgcggagattgcaatgagcctagatcccgccactgcactccaggctgggtgacagagtgaaaccctgtctctaaaaataataataataattaaaggtaccaaaaataaataattgatggtaatgctgacccaaattaaatttaaccttcaaattacttatgaaaaatgtagtatatcataagaaagtcaatagtaagaaatttcatgttaagacagtgttttcatatattttaacattttacatataaatagtatgctaattgcaaattcattttatttaatgtttaatagtttatgttatgaattcaaggcattttctatacttgtcaataatgaaaaggcatttctccttttaaaaattctatgaagtcagccttcttattccttaggaacatgaactagtgtggtttggttttgaatctgattgttcaaacactttacaaagtgaataggaaaataatttgggaacatttatatttaaacttgtcaatctatgattctgtttttcatgtgacagccaatcacaatgtgttctctactcaggaagtttagctcagtatatggattaacacgtgttctacttgtgtgatatttcttatgacaaccacagaaaacatatggggctgggcacagtggcttatgcctgtaatcccagaactttgggaggccaaggcgggtggatcacttgagcgcagtaatttgacaccagcctgggcagcatgtcgaaactgcgtctctacaaaaaataccaaaattaaccaggtgtggcggcacatgcctgtaatcctagcttctcgagaagctgaggtgggaggattacctgagccggggaggtcaaggttgcggtgagccgtgatagtgccactgcactcaagcctgggtgacagagtgagaccc

SEQ ID NO: 2590 - DNA, 165 bp, Homo sapiens
caaaaagattgcttgaggctaggcattcaagattacagtgaggtgctgggtgcagtgtctcaggcctgtaatcccagcaattttggtggccgaggcaggtgtatcacttgagctcaggagctcgagaccagcctgggaagcatggtgaaaccctgtctctaccag

SEQ ID NO: 2591 - DNA, 938 bp, Homo sapiens
cacacacatacacacaatgacaacaacaacaacaaacccaacccgttggatatcttatcagcagccctattgctatataaaaatttttagctgctactgaccaatcaatataaacctgataatcaagccagaagttctccaaatatgttagaggaaatctaattctaatcttaaaccactaatctccctttcagcacatgaaatgtacatgtaatgcacatacagcaaatgataggttaacagtagaacttggttatatataataatggctatttcaggacactgtgaagttctgcttgctaagattcaattcaagatgaaagatcacataggtattgtaacatgcaaccctggatagcgaggtagtttaaaaataggtagtctacttcaaacttggaagaagtactgattgaagctgtgaggaatggcctttgtctccatttctgatttgtcggaatgatctgtcttaaaggctgcaggtaccttatgctacctcagacctatgaaggtaggacctatgttaaaagaaaggagaataattgctgtccaagtagtcataattttagaattatgtagaatttgacatggacctgtgttttcagatcatgcctggtgccagcatttccagttgccttcttcccagaactgaggctgtccatgacccatcagtagtcccttcccagtcctgtagtcattctcaaccttggttgcacaatgaaatcaccttgggcactggaaaaataccaacgtccagacccacacccagagattctgatctaattaaatggggaggggatccaggcatcagtgattctaatgtgcagtcagggttgaaagtctctgctctagagactgcttgtacctcaggcaggagagatttcaggagattgaggtgaatgctcttcagctcagcgatgccatcgctgttgttgtctggc

SEQ ID NO: 2592 - DNA, 454 bp, Homo sapiens
attcacttttatagtcataatttcataattgtctgctttattggtgggggcatatgaaagaagtatatcaaccactatgggtataaaatagcttcttaatctttgttctggatagtcacctttcttattcattgagatgagtcatatttccatattaaaatgtatcattttggctgagcacagtggctcctgcctgtaatcccagcactttgggaggctgaagtgggaggatcgcttgagtccaggaattcaacaccagccagggcaaaatagcaaaaccccatctctacaaaaaatactaaaatcagctgggtgtggtgacaggcacctatagttcaagctacttgggaggctgaggtgggaggattgtttgagcctgggaggtggagtttgctgtgagccaagattgagccacagtgtactacatcgtaggtgaaagagtgagacccagtct

SEQ ID NO: 2593 - DNA, 374 bp, Homo sapiens
cctttgtgacaccctttctctggctttgggtgttgtcttcccagtttcctgaagagaaagaatgtgtaggccgggtgcagtggctcatgcctataatcccagcactttgggaggccgagttgggcggatcacctgaggtctggagttcgagaccagcctggccaacatggtgaaaccccgtctctactaaaatacaaaaattagctgggtgtggtggcaggcgcctgtaatcccacctacatgggagcctgaggcaggagaatcacttgaacccgggaggcggcgattggagtgagctgagaccacaccatggcactccagcctgggtgacaagagcgagactccatctcaaaaaaaaaaaaaaaaaaaagaga

SEQ ID NO: 2594 - DNA, 417 bp, Homo sapiens
taaaatgcccttgtcagaaaacacagagatcccagttcagatgtgccccctcaggaccagcaaatctaaggcagtgcctaccagtcttgatttcttgcgtttcactctgtcacatcctggtctttatagtacttactactgtctgagattacattggtcagctatttatttacttgtatgtttactgactccttttattctagactgtaatttccaattatattgcccctcttattgttgtagctcaaatttttagaactgtgcttggcatttaaaaggtactcaattaaagttgaataaacgaatgattccttaaccatttgttgataaagtccttcctatttagtctttcatttgatgacttcatttgatgccattcaagttagagcagttattagccacattttacacatccca

SEQ ID NO: 2595 - DNA, 490 bp, Homo sapiens
tcccatgtagaaatggtaacttggagtcaaacagactgaagatttttttttaattaatcaggaaaaatgatctatgtgtgaacctttactataagttattcttacttctagtatgttgtgatttagaacagtagtaagaagaaaaatactgcagaaataaagcactaattcttttcagagccaaacacagtttgaagcctacagaagctcctagaccaagtaaaataggttctatagaaataataaattctataccctgtagaaagaataacttttaaacccttgtagagtgaatagaaaaaaaaccaaatccattgaaaatttgtagaaaatataaaactccataattgtaggaaatataaatatcagaaaagctgcataaaagtggtcgcatattattgtgacttctggcatatgtagatgcagccaaataacttgacattttgatgtaaaattaaaatgctcccttgtccatcccccaactccctgc

SEQ ID NO: 2596 - DNA, 275 bp, Homo sapiens
aaaaagccatgtatcaaaacgattagattaaagaaaaaaaattggcctggctcggtggctcatgcctgtaatcctgaggcaggaggattgcttgagcctaggagtttgaggccagcctgggcaacatagcaagaccccatttctagttaaaaaagacagctggcctggggcagtggctcatgcttgtaatcccagcaatttgggaggccgaggcaggcagatcacgaagtcaggagttcgagaccaacctggtcaacatggtccctgtctctact

SEQ ID NO: 2597 - DNA, 358 bp, Homo sapiens
ggaaaacgattacctttatctcattatcttagttctctttggaagatatataagcttgaaccatggtgacaggtgttgcctttaaacatggtgacaggtgttttcctttaaagtccttggcaaatcaactcatagacttcttcaacttcaaaaaaaaagtttttttaaaaaatattttaaaaatatttaacttgaggatcttcattgaaaattggtcatctttcgtgaatttgcttaagtaggctttgatctctttttaaaggattccttcctgcctgatacatttggtccttttagaattcgggctagaacaattctccatgaaggtggacgtgttaaaatctatttggttcattgt

SEQ ID NO: 2598 - DNA, 580 bp, Homo sapiens
aaaaaatgtataaagcagctggaaatgttttaaatacaaggtctttgaattaaatgtggattttaaaaatatgtaatccccctgacaaaaggacccaaaattatggtgaaactaatgcctccccctgcgttcctttgaatcattaccctatgacttaacaaatctgcccctggagatgtggacattcctgcatttgccttctgtatctggagagatgtttgtatatatcccaggccgtatacacacacatttccatatctctctacagatatatttccccttcaatcgtgacctggtatttggaactctccttttcatttggcttatcttccttttaatgtgatgtctctgtgctaatacttaccagttcttgttttgcaatctgttttgaggtccattgctttactaagacccactgcatcttggctgatttcaaagtgacacctgaatacagtgtttaaaaaaaaaaaagttttgtttgtaaatcatgtgaccagcttctctcaacctgacatggaaagtctcttgtactacagtgtatttaataaaaatgatgtcttacaataaataacatactcca

SEQ ID NO: 2599 - DNA, 529 bp, Homo sapiens
cttgcaataattcgacatgggccgcttctgtctgtgggtctcagtgcaaacctgccaccatgagatgagctaaaaagcaagcttgcaaaatgaagttcctgaggagtgtgatctctagggccctagttgaggtactcttactacagccaggctgaaagcatatttcagcttgtagcaagctggtttcgtctctacctgaggaaagataaagaactttgctcaggaaatgtgagcccctgttcccaggcttcattcctctcaagctgatggacaggtatggaaggaatgcgttcgttggcaggaattagataatgcccaggcacaaatggcagtcacgttcttttcctccctctctctgctttgggggaaaaatgtggtaggaggggatgctctgcagggagaggggtgcagaacaagctgtctcagcttcagccagctgccgtttgtcactggattctgacaatggcatctggctccgtgagtgtggaagccagggacctccctcacggtgaaggccgagtgaccagtg

SEQ ID NO: 2600 - DNA, 352 bp, Homo sapiens
aaagacaatgcaatgcagagataatccagaagtataagctagataggacatccactaatctttttttcgttctcttttcaaagtatttcacagattttcctgagtacttttactgttattccccttttacaggtgaggaaattgttaagtaaattttccaaggtcccataaccagtaagtggtagagacatatgtgaacacaagtctaactgaatctgaaaaaataattcagtttattgaatcagttttcctcttggaggtggagcttgcagtgagccgagatcgcaccactgcactccaacctgggcggcagagcgagactctgtgtcaaaaaaaaaaacaaacaaacaaa

SEQ ID NO: 2601 - DNA, 226 bp, Homo sapiens
ctgagggtggatcttctggctcagtacccacagttcctccccgtttcccagctgattaggttccagagtcactctccggtctgtgcactcgctggggaaaagctcaaattggtcaacattttcttgaaacagggtacctgacctcatcccagacctctgggacagttgtaaaagtagtggcatttctaagaactcaaaggggttaactgtaagacgaaaacaactt

SEQ ID NO: 2602 - DNA, 429 bp, Homo sapiens
tcttacagaacagtttcccaagcagcagcctgcctgatccacccttaattcagctgtgcgtctgacaacatgttctacaggaaagataaccttgtacatcaggtgtttcctgtttccagtaccaaaagtgtcttcctttggctttggtatcaaggtaatgctggcctcataagttgtctccctttatccatgagggacatcttccaaggcccccagtggatgtctgaaaccgcagcatacttttgtccataaagcaaaatccgaagattagtgttaagaaacaggatttggaactctcagaacaaggccattgggggtggagatttcttacctatggcttaaagaggcttccgaggtgatcgggcagcatcagtcttcagctgctaagccgagaagatctgggaaggagtcagtcagagagccgtgggc

SEQ ID NO: 2603 - DNA, 469 bp, Homo sapiens
cttcttgctttgcacagtcatgtgaggaggtaaggcccagagctgtggtggccatcttgtgactgagatggacacattggtggataaaagccaatccactgagggcgagaagtaggggaacacctttgaaacatcaaaacaacctcaggactgcccactgccatgttgtctttttaagtgaactataaattccttatggctcattccactgttactcaaattgtctcttatttggagctcaatgcaccctaagtgataaaacaaacataaggtcctcagaaggaacagaacagagacaaggcacagaaaactggagttcagatgcagcctcccggatactaaagatccacccattcttcccagcgaagagcaaccttacattgctgtttgaactccagtgcatggcagcatatcactaagcatcttcctgaggagttactatatggtgatatgcctagagcactcactc

SEQ ID NO: 2604 - DNA, 451 bp, Homo sapiens
gtgtcctattaatttctgaggtcctgaaagaaccacacttattcttaggagagatgtctgatcttgaagttactgaagaacccccaattttatccaggtatcgaggacctctctgaaggactctgagcagaatttaacattcaggagtgatttctttaaattttaattttatttaagaaatttggctcttcctattctccatgatggtgcaggatcaaggtgaaaagaagatccccacttgggaacttcacatccacaaactcgcctcaatatctgtgtggggagggtagagacagactgacctgagcagctcacaggccagacccctgtgttttccaaagccaagtacagcatcagatccttcagcatcaggagaaatgaagagattgccgtccactgcacactctgaggggccaaggcagaaacaatcctggagaaaggtctaaaggta

SEQ ID NO: 2605 - DNA, 421 bp, Homo sapiens
gatcacttgagctcaggagattgagaccggcctgggcaacatggcgaaaccccatctctaccaaaaatacaaaaaaatcagccaggcgtggtggcgggcacatgtggtcccagctacttgggatgctgagatggtaggatcgcttaagcccaggagatggaggttgcagtgagctgagatcacaccactgcactccagcctgggtgacagagtaagactctgtctcaaaaaaaaaaaaaaaaaaagaaagagaaaaagaagtaaagcatggattcagagtttgagcaggcgaggaagaggaagagaaagagaatcagacccatatctgccttcctcttggttttcacctcagccgtcaacaggtttgttggtctttgttgaaccagcaaaggagcggagtggggctgagggaaatctggtg

SEQ ID NO: 2606 - DNA, 356 bp, Homo sapiens
gatgcccatcctgtctgggcaagtctggggagacctcccccaggagagcaggatgcttgaatgggctctcaaggcctgacattggtggctcatgcctataatcccagcactttgggaggcagaggcaggcagatcacttgaggccaagggttcaaaaccagcctggccaacatggtgaaaccccgtctctactaaaaatacaaaaagattagctgggcgtggtggcaggcacctgtagtcccagctactcgggagggtgaggcaggagaatcgcctgagcctgggaggtggaggttgcagtgagcagagatcatgtcactgcactgcagcctgggagacagagacctgtctcaaat

SEQ ID NO: 2607 - DNA, 2040 bp, Homo sapiens
gctttgttccacaatattatatggaccactgaacaagaatgacagccctttgttatcacttggcatatgaaaagtgttgtgtgcatagtttgtgttaattttttatgtgcataaaaatgtgattttaatttatatgctctgaaggataattcagggtatagttaaaaatgtacaatgtgccagttcagtatatataaccctagccctcaaattattctgattaaggttaaaatgtgctggtattacgtgctttttcctgaggccttctgattggttcttggtaacagaattttaaagtaaggtgtgagtagtgcaactcctgtcctttatatataaagatatcaagtaatttcatgtcctgatatttaaaaaaattacccacaaatgtgtttttttaaatcgatcaaagctagcaacaggttaaattgtctcagttctcttacataattgggttaaaaattataaggtattagaagaattttaattaatgccaaattggtaaatatggtgtaaaaaaaaaaaaaaagacttttcattttctcccacatagaatagtcagatatattaaacatcccttttccataaagatggtttcaatgggaatggaagaaacaaaatcttaaaagagtgagtatagctgaaccaattcttcattctagcaataaccacactaagttcattactttacaaatgactaaacccaatgtcttgtcctttaaaaaatataggtagtgcagaattgtgataaatacgcatttgtttttttagagagccccactccccaaagggtagccattaattcaggtagccttttaaatgtatttgagagggttccgtctttttggctgctatcctagttaggtgagatgttgctatgggaagaacttgccactatacactaaacagacactttaagcaaaagatgtattctggagcctggcacagtagcttatgtctttggttctagctactcaggagcctgaggtgggagcatcatttgaactcagttctgggccactgagaccctctttaaagagaaggaaaaaaaggtattctggaagatcttgtgcagttgcaacaatgtttcagcatatatatgtgaattcatatatgacacctgaacggaatcatgaagtaacagctgagattatatggtggcaaaaatgacctgcttttcctgaagctttgggaggcctaggattcttgctttaggcatcacctttgttaagccttaaagggggctacaacttgtgcaaaatggtgtctctggtaacacttcagaaataattggcaaaagtgtaataggaatacacaaatctttattttgaaataatcttgtattttaatgtggaattagaagcagcacatcaaactggtgagttcacagaaacttacctgagatgatgctgggttccattgctgttgtgctaagtcacgtatttttgtagctgctgttagctgtgtctagcgttttgtaacctaaggagggtcttatagaagttggtatgttaactaaatcttggactgggaaacagcaccatttgtatcctctgcaaacagatttacgcttttgaggctcaaaccaactagtgttctcatgggctgttgcctaaggacagataaacatggaaaacaggctatgtccagggacagatgattggtggttaagaattacagtaaaggaaaattacacctggattttcttctgtaaagtttcaaggaacttggatttgaactgtgaatctactgttttggcaaaaaatctcaaagaaaaggatgtttgttactgtctcagtcttcctgtctttgctacacgatttggatcccttacgctttttcgttaagaatatctgtctgctatagtgaatttgctagccccttatttttttttttaattttagttctttattagaacgtgtacttgaatggactgtagttgctcataacccatgttaatctctgatagtatttgggttttatttcaggagcttttgcaataaagcagtaactgcaatctgctaaagtcagactgttagcaag

SEQ ID NO: 2608 - DNA, 586 bp, Homo sapiens
gccacttttgagctggtagtttctgacactggtacaccacagggttgaggagatgaggctaatagcaggagagtggttgacatgatgggaaatggagtctaattaatagaaaagagagtgaagatagatgggactgaaagactacaagaaaagggcctgggagaagggaacaaagaattattggactcaggaagaatggcggaagaggagattaattcccttattgggggttacccaagataaaaagcatctttttctcaaaaattcatatattttaaagagaactttctgatactagaaagtaatattgccctgggctcgcccctgtaatcttagcaccttgggaggctgaggcgggcagatcgcctgagctcagggcttcaagatgagcctggccaacatggtgaaaacccgtatctactaaaatacaaaaatttccctaggcatggtggcacgtgcctataatcctagctactcaggaggctgaggcgtgggaattgctggagtccgggaggtggaggttgcagtgaactgacattgcaccactgcactccagcctgggcgacagagtgagactccatctcaa

SEQ ID NO: 2609 - DNA, 447 bp, Homo sapiens
tccatcaggaatttcctgagcaggggcagcctttttcttcctccactcagctttctccaggtagatgggacaaagcccaagacaagcgctgcctccatcacaggaatagtctggggcctggcccagccaagtctatgggccatgcatttttcctgtattttaccctcggtggctggagcgtgtggcgggatgaggaggttggcaggcttgcctcagtgccccaactgggggccttgcccagctgagctccgtttggccagaggccagctgggaaacacttgattattcaaatcatgtggccgcccaagaggaaagcatccgtttcctccaagagggggaagtggggcaggcaggccagcccagggatttggttgttgaaaagggaaatttcagaacaaagttctcacacaaaccagcactctgagattcactgccccaggaagactc

SEQ ID NO: 2610 - DNA, 421 bp, Homo sapiens
ttattaagatatatacttagcactttgaattgcttcaaacataatttgaggggaacaaagacttattggcttgttggttttaagaactgaatttgcctaggcattagaaaaagtacagaaagctccccagagcagtctagagcccagcagtcgcaggcccctaggccatttgagttataggacagaaggtgggggtgtcagtgaacactattccttctgagtgtctgtcaatggaggttgcatgtgaaacaggaaagaggtttgctgaggctctatgtttatgtttgccttttcttcaactggagactgaagtttgagaatagcaagtaagcacgtaatcattctcctagatctcattacttgagatcttttttttttttttttttgagacagggtctggctctgttgcccaggctggagt

SEQ ID NO: 2611 - DNA, 303 bp, Homo sapiens
gaatggggtgtgtgtgtgtgtgtgtgtgtgtgtgtgtgttttctcggctgctgaagagactgagtgttcctgcagatatataacaaagatgaagatgtgccaccgttggagacaaatggggaccagaggccacatgtcagaggtcaggtcaggtgttcaaatataaaggggttccctggctgggcatggtggctcacatccataatccaagccctttgtggggctgaggccggaggatcacttgagcccaagagttcaagaccagcctggacaacatagcaaagccccatctctaaaaaaaaa

SEQ ID NO: 2612 - DNA, 496 bp, Homo sapiens
tctgtatctccagctaccatttagtcagtcacagacctccatgccggtgtagacacacaaggtggcagagagggaaaggcagtataacatacaggttaagcacatgctctggagccagatttcctggatttagatcttagctcttttatttccagctatgtaactttgagtaagtttcctaacctctatttctctcagtttccttaaccgtaaaatgataataatcatacatactcacaaggttgtcgtaagaattcagccagaaaataactggaaagtactgagacgagcctgccagtaaatgttagccatcatgttcagtaatggccttgcaaaacagattaccccttcaccttctcacttaattgtctacctatgaatcattaatgttttgttttgtttttaattctgtgataggtaggaaaggatggaactccttggcagactagtgttagaaagttttcgaagcagtgtgagtcttgtacctttgtggtcc

SEQ ID NO: 2613 - DNA, 411 bp, Homo sapiens
atggagatagcttctttggctaaacttccatgaaccaacctctgttagcttcccaacttttccttctgtagcttccttacctcactcagccttcacgtaattgaagagagttagggccttactctggattaggctttggcttaagggactgttgtaactggtttgatcttcagtgatgttcccagatcactgaaactttctctacatcagccataaggcccttttactttcttactattcatatgtttactggagtcacccttaaaaaaatttttttaagcttttcctttgcattcacagcatgcttaatgggcacctgaggcctagttttggcctctctctgatttcaacatgacttcctttctaagctcaatcatttctagctttcaactgaaagtttaaaaaaaaaaa

SEQ ID NO: 2614 - DNA, 517 bp, Homo sapiens
ttactgatgtatgatgccatttttaccctcagtttggtaacagctggatgtacacatgtatactagttctagttaggcaccgagatatttgtcagctgttttctttgaaactaggtttctttcaatatggcccattggctaaggccaagtaatatagtccagtctatttctctaagctgagtgaactgctttctatattctttccagtcttctgccaggtcccctttttcctgccatctgtcacaatgagagagattgataggaaaagagtttttgtgattaaaattcaaaacgaatacagatttccattgcttattataattagaagtacagtgatatctaaccatgtaacgacattatatacctcaccccactctcatactccaacaagaagatgaaaacccagacatgttactagttaataactcagcataatatgagttataataatgtacacagtgcttacaacttaaatgtgaactagaactttttttcctataatttgctttcaacttat

SEQ ID NO: 2615 - DNA, 298 bp, Homo sapiens
cgagaacatattctttagtttacaaaaggccaggaaaatctcaacttgcctgggaaaagaaaatcaacagatgtcagtgctgacatgacacagacaatggaattatctgacaaaggctttaaagcggctgctattttttaaaatgctccagtaagtaagggcaaacattactgaaacaactggaaagatgtttcagcaaagaaatagaagatataatgaagaagcaagtgaaaactagaactgaaaaaatacaataactgaaaaaaagaacctcactgaatgatctcagtaatagaat

SEQ ID NO: 2616 - DNA, 411 bp, Homo sapiens
ctgagaatgtaataacatgtaactatttaggggtccaaacccatttcaggaaaatagtaattgaggagaaaaatagatcacgtttttctatccttggagaagctgagaaaagaaagttatctcctggtggggtactaggtagagtgggctgaataacagatactccctgccacaaaaatcacatcctcatcttcaacaccgtgaatatgttactttacttggtaaaagggactttgcagatgtgattaggttaaggttgagacgggggattgccctggattatctgagtagatccaaaagagagaggcaggagagccacaggtggaaagagatgtggtggtagaagtagaggtgagagagagagaaagagagagatccaaagatgctatgctgctggttctgaagatgaac

SEQ ID NO: 2617 - DNA, 383 bp, Homo sapiens
ctaaatattaatgagtaagtagttgcatggagtgtcatgatggctgacagctgtagatggaggtgtttttagtggtctgaaactgtatactggtcacccatttctatttttttttttttagttttttgagacagagtcctgctctgtcgcccaagtagctgggactacaggcacgcgccaccatacccagctaatttttgtatttttagtagagacggggtttcaccatattggccaggatagtctcgatctcttgacctcgtgattggctggaatgcagtggggtgatttcagctcagtgcagcctctgtctcctgggttcaagcaattctcctgcctcagcctcccgagtagctgggattacaggcacccgccacgaggcc

SEQ ID NO: 2618 - DNA, 312 bp, Homo sapiens
aactcttctaccagccacactgatgagacccttaggatgagggtgcaggaggtggacagtggaccaaatcagagagcactgccataccatctccctgaacctgaacccccatggaccactggaccatgagctcaggcatcagaatgagtgagggccaggaccagaaaaatggccctggcaggcccacctacacccacgtttggacagcatggtgtccctctttaagtcacgtctcaaatgggctctgctttcaatctggtgctgttcacgagtcctgtggcctctccagtccagactgctcctcgatgaaat

SEQ ID NO: 2619 - DNA, 535 bp, Homo sapiens
atactcagaaattgataatctgaaagtagtaatttgtagactatgaaaccatagaaaataatcttctggtttaaaaaaaattagagggttgtttgaaaaataacatgaattttgcatataaaaaaactgaaaggttttgcaaaatacagtatttagcggtcacaaacagtgcaggaaaataagaagtctacgagctttaagaaatgtagaagattacttggaaagacatagtatgtttgtagatgataagactgagcattataacgtgtcagtctttctcgactacgtttcttgaaagcagttttccaggtaattttttagtgttcatttggaagaatgaaaggtaaatagtgaaatgccatttgacaaaaatgaacaagaaatgttaatgcccaaatcttagggagagtttaagacaggcagtcttgtattactaccgtttttgtgtaaattgatttatattttgagacaagcaaatttagaaatatttatcgagtcaaaaattactcatagtagaattcctaagtaggccaat

SEQ ID NO: 2620 - DNA, 394 bp, Homo sapiens
ccatcgttaggagggttggacctgcactctaggatttggagagttgggagcacattctaactctcagggaaacatggggctgtgtctgtgaaaagccactaaaggaccgggcgcggtagctcaagcctataattccagcactttggcaggccgaggcaggcagatcacttgaggtcaggagttcaagaccagcctggccaacgtggtgaaatcctgtatctactaaaaatacaaaaattagccgggtgtggtggtggacacctgtaatccaggctacttgggaggctgaggcagaagaattgcttaaacccaggagatggagactgcagtgagccaagattgcaccactgcactccagcctgggcgataagcgagactctgtctcaaaaaaaaa

SEQ ID NO: 2621 - DNA, 381 bp, Homo sapiens
aggctacatactgccaacaaccatgtgtctctctagtccacctcctgcccctgagctccggactcacatccgattgcctctttaatctctccgtttgaatgcccaacaggcatctcaaaaacacttcccccatggcctcccagtttcccccatggtaagaaacagcccaccggctactctgttcgagtcacactctcagacagatttctcctttctgtccatcatctcttccccacctctgtctctaaagtatatcacagcttcgtgccccagcacctagcacagcacatggcaagcttcccgtaaatgtgtgctgagtcacctctggaggtcacctgctaatgagggaggtctctcctggcacaggtcacttaggaaagg

SEQ ID NO: 2622 - DNA, 294 bp, Homo sapiens
taggcataactaacttttctcaaataaagtgtgaaagaaagtatttttaaaatttcatctcttaaccagatgttttaagaatatatccctaggccgggtgcagtggctcacacctgtaatcccagcactttgggaggccgaggtggggggaccacctgaggttgggagttcgagactagcctgaccaatatggagaaaccccatctctattaaaaatacaaaatttttaaaaaaaatacaaaattagccaggcgtggtggcacatgcctgtaatcccagctactcaggaggctg

SEQ ID NO: 2623 - DNA, 437 bp, Homo sapiens
aatgtagcttactcatagtctgtgcagtgtgaagtgtggccaaagctggtttgggggtcaggtgatctgggttagaatcctaccactgccattacaaactgtgagaatttgtagaactcactgaatccttttgaccttattttcttcatctataaattgagcaagtaacactatgatttagagttttttgggtttttttgagacagggtcttgctccgtcccacccaggctggagtgcagtggtgcgatcatgactcactgcagccttgagacttcctgggctcaagtgatccccctgcctcagtctcctgggtgactaggactagaggcacacccaccatgactagctagttgtagagattttaaattacacaaagcaagcaaaaggttgagcttattgcctggcatgtagtaggtacttgaaaaattgttagctc

SEQ ID NO: 2624 - DNA, 1428 bp, Homo sapiens
  misc_feature (8)..(8): n is a, c, g, or t
  misc_feature (10)..(10): n is a, c, g, or t
  misc_feature (12)..(12): n is a, c, g, or t
ccgaattngncnttggccgggcgatttcgttctgcaaacaatgtcaaaggtattttcaaccaccaggaacttggatacagtgtgctttagaatccagggaacttcttgctttgtgcttgaaaaaaatcaaagcccctctgagtaaggtacggcttgtagatgcaggctttgtttggactgagcctcattctaagagacttaaagttaaactgactattcagaaagaggtgatgaatggtgctatccttcaacaagtgtttgtggtggattatgttgttcagtcccaaatgtgtggagattgccatagagtagaagctaaggatttctggaaggctgtgattcaagtgaggcaaaagactttgcataaaaaaactttctactatctggaacagttaattctgaaatatggaatgcatcagaatacacttcgtatcaaagagattcatgatggtctggatttttattattcctcaaaacaacatgctcagaagatggtcgaatttcttcagtgtacagttccctgtagatacaaagcatcacaaagactgatctctcaagatatccatagtaacacatacaattacaaaagcactttttctgtggaaattgttccaatatgcaaggataatgttgtctgtctgtctccaaaactggcacaaagcctgggaaatatgaaccagatttgtgtgtgtattcgagtaaccagtgccattcacctcattgatccaaacaccctacaagtggcagatattgatgggagcactttctggagtcaccctttcaatagtttatgtcatcccaaacagctagaggagtttattgtgatggaatgcagcatagtccaagatataaaacgtgctgcaggtgctggaatgatatcaaaaaagcataccctcggggaagtctgggtacagaagacatctgaaatgaatacagataaacagtatttttgtcgtactcatttgggacatcttctaaatcctggagagctggtgttagggtttgatttggccaactgtaacttaaatgatgagcatggcaacaaaatgaactcagatagagttccagatgtggtattaatcaagaagaactaagactggaccaaacgtcagcgtcgtagaaactggaaattgaaagagcttgcaagagagagagaaaacatggatacagatgatgaaaggcaataccaagattttcttgaagatcttgaagaagatgaggcaattcgaaaaaatgtcaacatttacagagattcagccatccctgtggaaagtgacaccgatgatgaaggagcacctcgaattagtctggctgagatgcttgaagaccttcatatttcccaagatgccactggtgaagaaggtgcatcaatgctgacataatgagatgttgtagactgtttccacatatgtgggcttaagaagttgg

SEQ ID NO: 2625 - DNA, 959 bp, Homo sapiens
gtctggaggtgtgaagcatacagaacaatggagtatatgacagaatcgactgaccgcagccctggactcatcctgtgctgtgagtgtggtattgcaataagtcccaatcctgccaatatttgtgtggcctgtttgcaaagtaaagtgggcatcagccaagatattccaaaacaagtctcactttcgttctgcaaacaatgtcaaaggtattttcaaccaccaggaacttggatacagtgtgctttagaatccagggaacttcttgctttgtgcttgaaaaaaatcaaagcccctctgagtaaggtacggcttgtagatgcaggctttgtttggactgagcctcattctaagagacttaaagttaaactgactattcagaaagaggtgatgaatggtgctatccttcaacaagtgtttgtggtggattatgttgttcagtcccaaatgtgtggagattgccatagagtagaagctaaggatttctggaaggctgtgattcaagtgaggcaaaagactttgcataaaaaaactttctactatctggaacagttaattctgaaatatggaatgcatcagaatacacttcgtatcaaagagattcatgatggtctggatttttattattcctcaaaacaacatgctcagaagatggtcgaatttcttcagtgtacagttccctgtagatacaaagcatcacaaagactgatctctcaagatatccatagtaacacatacaattacaaaagcactttttctgtggaaattgttccaatatgcaaggataatgttgtctgtctgtctccaaaactggcacaaagcctgggaaatatgaaccagatttgtgtgtgtattcgagtaaccagtgccattcacctcattgatccaaacaccctacaagtggcagatattgatgggagcactttctggagtcaccctttcaatagtttatgtcatcccaa

SEQ ID NO: 2626 - DNA, 318 bp, Homo sapiens
ccgcttccaggtcacttccctcacctggaactcccacctgctcttccagcccttgttcatcccagctcctgctggaccatcgcccccttccagcctcttctcggaccttccacctggcttaggctgagaccctctctttctgcccctcggcaacactgtgcgcattggggcgcgatgccccgcgtctgcctgaaatagctgcccgagtccccgggagcccagcccagcctcagctctcggcgggctccggggctgcctgcactcaattagagacaactctgtcggcccaaaggagaccctggcaggaacgaagtatcc

SEQ ID NO: 2627 - DNA, 458 bp, Homo sapiens
agcaatcctctcacctcagcctgccaaagttctgcgattataggtgcgagccaccacacctggccacaggcacatattatttttcttgtgtttcttcaggatgattttaaatgatagggtctccctcatgttctggttttcccatctgcacttgggaaatagttggctaagtttagcttcatttgaataactcaaacatgtgctacattgttccacatgacttcgtttgtggattttctccaatttctttttgtaaaaaatccctcttggaggttttcacaaatatttattgagcacctaccattttttcatgtcagggtgtggagctcctcgctgacctggaacctggcttccctgcctcgtgcctgtgccttcctgccctctcccctggcccgggtcgctgtggcccatggcctctctttgcccgctgaacacttatccctgccatcatgtgctca

SEQ ID NO: 2628 - DNA, 437 bp, Homo sapiens
actagccccctctgtgcttttagcatttgacctagaggctaagcactcagtaatgtagcttgccccagtgagaacatttccaaataaggaagccagccctgggataggaacgccactgtaaactggggcagtgattctgaggctggcaaatgaaataccgtttatttccaaatgttcaggggaaaaaattccagccttcagagttgaaagaacaggcaaaaacgagaaggataagagatcattccttaatcttgcagaactgcattagctaaaggctgccagaaaatggaaatttggcaaagactttgcacattgaactgtcctcaagctgaagatctgagaggggtgttctggcagcatccaggtgtaccgtgagagattacaaagggaaaacacacatcttatctgtgctgcacagcaaactactggaagagagc

SEQ ID NO: 2629 - DNA, 472 bp, Homo sapiens
ttttaccatttgcaagattctgatttactgcattctgatgctaaatgaaacagatattatctggaccattcaacaaaacctttactacatgtagactatcaagtctattttacctaaagtacaaatatatctttcctaggtctccagtttgatgccaccagttctcttaagtagcaaaccctgcctggttccaaaggtatctgagagacctcaaacataaaatcattacaagaaaaaaacagatcaaattcacccaaagtaggaatctagcaaaaatctaaccaaatatggctaccttaatcaaacaataattttagctctagacttaaagacagtggcagcaaacaacaataaaacaacaaaaaagcaatcacagcaagctctgtaattcagagagaaaaaccttactgtcactaacatttaaaaggaatttttcagatgcgtcattacacaggtacgttgaacaaaataa

SEQ ID NO: 2630 - DNA, 482 bp, Homo sapiens
tgacatgaaaagtaaattttattaaacatgtttacatacatgaattggaatttcatttaaaagcacaggggagtgttaagacaagtggtcaaaatagaaagatactacccaattataatcagttgattgttggccactaagacagaacggaatctagtagaagtgcaccaatgcttcagttcctcctactcagcatggtgagcagtggtcaatctgtgccctgtggaatgatgggcagataattctggcatgtgtaaataataataaataattcacttggtgcaggcagtatgtctatgaattaaaacctagtgtgtacacagtgtctacatgtgttacagccccacagtaggaatctacaccaaaatatttattagaaggaatttggtccgtactacatcacgttttccggagggtaaaaaataaagtccatctatagacatttcaccacagacccagagactgagtctggctaaaacctg

SEQ ID NO: 2631 - DNA, 568 bp, Homo sapiens
caccactgtattctgggtttcaaagacttgtaattcatttcattaagactctccaaaccatccccttaaacatttgtttaaatgtctctgttcttcattagcgttttattacgttacattctctaggctccagaaaaacgaggcaagaaataggaggatttttttttttgccttttttcttttttttggttgaagttttggtcaaacaagccaaaataacattatcattaaacagatcgacctgtacttttaaatggaaggaataaagatataaaaagaactgaggcgtgtaagtaacctctttgatttttaatggcatgcagcagatggaattcattattgactttaaaaaatgaaattgctctgcattattatttatttatagttttgcctttcaaaagaagtaattaccattactaggttagtttttcctcaatcacaagcaactgtgtgacagtatcagaatgtataatatactttaccacttatttagacatgaggcttaatgatgttgcaggacattatccctttttaagttagtaataaatttatgagcataatgcacagc

SEQ ID NO: 2632 - DNA, 381 bp, Homo sapiens
atccatctccctttgaaacactcttttgtgggcaaggttgaaggaaatgctagactcccagcattaaccttccagcatccatcttgggtcttgggaccacttcttggtctggagttggaaaaggcgtcctctctgccccttcctttcatatgtttgaaaacagctttgtggtcatcagtacccaagtcaccatttctgtacttcacgttcatctccagctcacattctgatgtcctcggaggacaggaaccacactcctaataaaggattcctactaatagtcagctcccgcactaaagccagggtcctggtccaggtgtgatagccttcatgtgtgtcagctcagggggtccttgggagagcttctcatggtgggtgtca

SEQ ID NO: 2633 - DNA, 288 bp, Homo sapiens
gtgcacattacacccatgaacttagaccagttgcctttatgtatgatcgtatttatactgagaagttactgtgttttttgactttcttttctatttgctacatattagttcggtctaaacgtttggtcttctggtctccatagttctacattggttaaatgcaactcacttctgggagtagtggtgacattcaactagtaggctttttaataaactacagaagttcattactctcatgtaaggaaggaaaactaatgtaactttcgttaagtatgaaaagcgttggat

SEQ ID NO: 2634 - DNA, 184 bp, Homo sapiens
aatcatcatttgcataaattcagcctgtagactaaaaatagggccatatttaaattttaaaaataatgacgtgttcaaatacaatgtttagagttcttatttggataattcagcagcatttagaccatattttgatataaaaaatagtataaatactatgagatataacatatttgacttcaaa

SEQ ID NO: 2635 - DNA, 433 bp, Homo sapiens
tgcatgaccttggcttaatcaacctctctgggcttcacttccctgtgtgcaaaatgtgtgtgaagaaatctgtgtgaaggtgaggagaaggctgaacttattggcagctctaaaggtgtgtaattccacagtactgtgtgacaagtcccctcatgctaagctgggcttccagtgacaggcagggctctgtcttctagaaagtcctctctctaaacccacagacttcctcagcaatgggctaagtacattttggagaggctagctcagcgacaggtgcaaaggtactttctttccattttggtagctgcactgactaaaaaagggttattgccttcttcagtttgtgagcatttagaagttatagaaaaaaacgaaaatcagtgtcaacaagtcccagaggtgatgggtctaatggtttttctcctggtgagtc

SEQ ID NO: 2636 - DNA, 132 bp, Homo sapiens
gttatttaccaatgacctggtaattattgaaaatggttatatattcaagaatatttgtgctgagtgctgtggctcatgcctgtaatcccagcactttgggaggctgaggcagggggattgcttgagcccagg

SEQ ID NO: 2637 - DNA, 460 bp, Homo sapiens
aagtttagatactacctgaggctctaagaagagatccagaatgccccacccccaagccttgactcagagtggcagggagaaaagatgacaggagcctcagatctcagacccaacatggtgtgccagctttagagcagcattggtggacggaggtgccaggtggtgagatgggcatggtgctcctggcagccttgagccacaggtgccaccagagagtacatgcaagtatcaacagccctagagttggaacaaaaaggcttatagtgagagacaccctgaccaggggcaatggcagggatcatggccatcagcatgaaacttgctctgtacccaagacaaggtaggagccaccaaagcttagtggacaccagtgcagggaaaccagcagccaaggtgggagtggggagccacccagaggaggttggcagggccctggaggacagcacatggagcccagacc

SEQ ID NO: 2638 - DNA, 361 bp, Homo sapiens
cgggaacgtggtgctctgaagttcctttactcactccttccttgggtctggtccaggtccaggagcagggtcctgatgcccagtgatgctgagcagccagccccgcttccttcctctttaaccatgctgtcttctgtcacctctctgttaaattttgtttttttctcttaaaacacttgttccaagtgtgaaggtttactcaatattttggttcttctccatgagagaaggcacaatccagctgcatctagtcagccatcttttaatctctctacaaatcttgataaaatttattttatcaaactgtaaaagtacttatttagaaatagatctcaatgagaaatgtggggttatttttcaa

SEQ ID NO: 2639 - DNA, 747 bp, Homo sapiens
ctgccccctccctcctccctgacacatggggctctggcacaaggaatctattctccaatttaaaacaaatcccattgtgtcctccagggccaaaatccttcagccaccaaactgttagtattctctctgaattagtgaccaataatgctagcattggtgaaagttcccagtgttctacatccttgccaacatttactagtctttaattttagtcattctataggtgttcagtattgtctcatcgtggttttaatttgtatttccctaaagactactgatgtagagcatctttttatgtgcatatttgccatacttacattttctttagtgaagtgtctgcttaaatatcttgaccatgttttaactaagttgctttgttttcttactattgagtttagagaattctctacaaattttggatacaagtcctttatcaaaaatatgatttacacatatcttcttctattctggagctcgtacttccattctcttaacagtgtcctgacaaaagacattcttaacttcagtaagtccagtatttctatttttttctcatgtggatcatgttcttggtgtctcatctaagaaaccttagatttctaacccaaaatgagaaagatatttttccctgaactttgttctaagcacttctgtttttaggttttacattttaagtctgtgatccatttttatcaatttttacatattgtgagaactatggattgaagttcattcttttgcatacgg

SEQ ID NO: 2640 - DNA, 560 bp, Homo sapiens
acagccagctcagctattaacacattgtgtgaccatagctagttacttctccatgctggaactcagttccctctaaaaaattggagaactgaagcaaatgagctctgtaattctatgaaaataaacgcacaggataaaaaaagagaacttgtttcaacaagataattctctgtctttggcctagttgaggggtccccaacccccaggccatggaccagtactggtccgaggcctgttaggaacccgatcgcgcagctgtaggtgagcggggcaagcgagcattaacgcctgtgctctgcctcctgttcagatcagcggagcattagattctcataggggcgggaacacaattgtgaactgttcatgcgagggatctgggttgcccgcagcttatgagattctaacacctgatgatctgaggtaggacagtttcattcatcacccccccatctatggaaaaattgtcttcctcaagactggtccctggtgtcagaaaagtttgggactgctggcctaggcgatcacttctctcatttcagcttcactttctgacacaggag

SEQ ID NO: 2641 - DNA, 392 bp, Homo sapiens
cagcaggtacaagactagtataatctggctccagaacaccacttatataagaagaagctgagctagaaaaggacatggaatgcttgagaaacaatagaccaccccaaggttctaacacttaagtcctggatctcaaacattccatccctggcaccaaaatagcataatggtggactggatgcacctggaaattaataataaccagaaaagaaccattggctcccaggtaaccatctacttgtcagacatggtgttactcctttaagccaattatgctcaaaataaggagtttgtccctcctagaaaacacatccaaactcacaaaatagtttcatttaataataaattccccccttgtcacccacaccaccaaaaaacaccaacattttttc

SEQ ID NO: 2642 - DNA, 460 bp, Homo sapiens
gcctttctgtgtacccgtttcctccctcagggcaagcccctgcactctggtctgcaccagctgagcaagctcagcatccacatcagcccagctgctctcctgtctctaacagcctgtgggagatttcctcttggatcacatatccttgccttaagccaatttccctattccaggagctctcaaacttgagaggcatgaaaatcaccaggtgggcttgttaaaacacagattgccaggcccacccccaaaatgtctgattcagcaggtctgaggtggggcctgaacatctgcccttctaccaagtgcccctggtcccccactgaagacccctgccctctgtaccaccatctgccactcagatttgcctcttccttccctcccttggcacctgcagccagcaggctccaggctttggacttttcctctgtaggaacttttctcctcagcccttccttattac

SEQ ID NO: 2643 - DNA, 434 bp, Homo sapiens
gctgccttaattcgtaggatagctaaagtgtaattattatgtgattacaccttattatgtaattattagacagaacccacttggagctgagagccccacagagggcacagcaggggcgtgaggtccaacaagctcaggctgtgtgtgcttctggcccagagaagacgacagcgctgggagagacagcagccacagtttctctagaaacactagaatcccaggagcagctgctgggcaggggcagatgagggggcaggtgtcattatcatgacctccactttatagatggggaagctcaggtacaaagaagtaaagtgccttatataagtcacgtagttaagtcttcaggctgagattcaaaccaggtctgtctaactttaaagcctgttttgttcactctccctggcagggctattataaccattacatgaaat

SEQ ID NO: 2644 - DNA, 412 bp, Homo sapiens
gtttgaagataacagggaccttgccttgctcagggtcaacattgtaaacctcaatgcttattgtacagtagtggacataggtagagaagaccaaagagacaggctgaatggctgctggctacaagacaggcctggaaatgggccactggggcacatcctggctcatcggagcccttgctgtcatttgcctctttctactgaaaggatagtaagaaaacataattcttgtcaatcgaggttttggttaattggtcctgagtttttagaggttttccatatatacatatatttatgtgtgtatatatatatatatagtatatgtatatatgtatactatttttaaattatagaattatacattgaccaatctccttagtttcacttatgtggaataaatttggcaatccaagga

SEQ ID NO: 2645 - DNA, 447 bp, Homo sapiens
ggcaggagaattgcttgaacccaggaggtggaggttgcagtgagccaagattgtgccaccacactccagcttgggtgacagagcaagactccatctcaaaaaaaaaatttgttatacaaaggaatgaataaatgcatattacattattacattcctattgtagagaagaggaagcatagctggtggcaaaccagagatttgaacccaggagttcctgatccctgtcttgaacactttctttttcttttttttttagagatggtgtcttgctatgttgcccaagctggacttgaactcctgggcttaacggatcctctggcctcagcctctcaagtagctaggactacaagcaagcccggctagcttagaccctttgtatggccccagtgtggggcctcatataccctttggctgtgtttgaggacgtgtttgacagatttgatgatc

SEQ ID NO: 2646 - DNA, 112 bp, Homo sapiens
gtaactttaaattggccatggcgaaagtatttacaatgtagaaatcagccaatgctacacgtttgcaccaccctcagcacccggagattatttgtaaaacatttaccagtat

SEQ ID NO: 2647 - DNA, 292 bp, Homo sapiens
gacaataagaaacacgtggaaaacggcatgtgtgtagcaggcaggggtagcagatagtacaaatatattacccctgaaattcacaggcaagaaatgttgccatttttaatataaaaatattatatgaaaaaacatgaaaagttttattttttcatagaggtcatgtgtaaagcattaataagctaaagtacacaaagccaaatgacaaagcttgattaacaaactgcccacaaagctcatatttgcctcagtgtgtttaaagatgcttgaaggctgtaaatctctgaccctt

SEQ ID NO: 2648 - DNA, 467 bp, Homo sapiens
ccaacaaatattttaaacaaacaaaccaataaattaatatttcttaaaccagtaaagaatgaaaactttccagccactcatcaggcatttgttcataactgcttggtgtcattcatggtgagagattttgctgacacaatgatagctatgaacaatccctgcttccagaagcctatggtgcagcaggagaggtttgtacccacattcatggcatagtgatggagagtgttggtgccagaacagagatacactgaggcctttctgaagggacccagaatggagcatcttcgacttcatgtgtgttcaagaaggtcttcataaaggaagtgacaaacatattcaggtatctgaaagttgaacacacactgaggcttacactggacagaagacagaagggtagtgtcgtccctgaccctgaggccttaaatccctattgggaagtgaacacactgacagattttcacata

SEQ ID NO: 2649 - DNA, 362 bp, Homo sapiens
cctgctgccggagttgggattcggcagtgttctccagtgaggggctgggctgggaagtcctgcgtttcatttgagcatatgagcgtcaagtcctgctttctcagtagtcccattgctgggccccaccattcatcctgtctgaaggtcctggttggtgtgaccggttggtggctggtgagtggggtttccaagtgggtgacagcgctctgtggcagccggggatggccttgtccgcgctgaccaggcctgtagagagtgctcagcctaaccttagaacacatttataactgaatacagtgttttcaatttgtacataatagttagaatattctattaaagttatgaaacacggagaaaaaaaa

SEQ ID NO: 2650 - DNA, 403 bp, Homo sapiens
gttttgttgcctccagaccactactatccccttcagcaatgaggcactcattccccgagctgctgctgggacagctcacacctgagcccctgcccaggcacacatgctccagtggctgaccgacgcaggggtaaaaaggtcttgtctccttgccctgcaggtacctctgaaaggcccaccagctctcagtatgatgagctgaggcctaaccgcagctactcaattctccttcttccacatccttccaggtgttggtcctgagtgttccccccagtaaacctcccgagcaaatctcagtctctcatccgattcccctgaggcctgaactgctgtgtaatatttcactgcatggctgcaccacatgtcattaaacagtgccctccttaggcgcattcagcttatt

SEQ ID NO: 2651 - DNA, 478 bp, Homo sapiens
ctgggggccttgaggggcatcttcctgtccccgagagcctgggttggcatctcaagacatgagaagggagatactggggtgcaggactggggttgtccttgggcctctctcaggttacccccccgaataggcacttgcctgccccacctcagctctgggacagctcccatccaactgggggtactgggcaaccttgtgcaaggggcaggaagggcccagagtggtccaggattcccccgagatcacacagcagggtggggtgcactggctggagcccattttgctcatccagaatgggcctcctgtcagccctgcccgactctcactcctctccaccaagcctgctgctcctggagggcagagcctatatatagaagcctttaaacactaagatgctctgacaattaaaattcataatttatcaacacaactgccagacgctgcaaacacaacggcaggcatcgcaaaaacacaacgg

SEQ ID NO: 2652 - DNA, 285 bp, Homo sapiens
gctacaaactcagccgtacagttcgtacactaaactcttgttgcttttgcattataaggaattaagtctccgattattaggtgatcaccctggatgatcagttttgtgctgaaggcacctgctcagtatcttttcgtctttatcactctgcattggtgaattcaatcctctcctttgtgctcaacttttgtgtgcttttaaaatcagctttattctaagcaaatctgtgtctactttaaaaaactggaaatggaaaaaaaaataaatctttgccaaatccttcaa

SEQ ID NO: 2653 - DNA, 519 bp, Homo sapiens
ttattaagaattcatacttaattccactgactgccactcaattttaatgtacagtagggaattcctgtactatgtattatgaatccattcctttgaatttcatttataatacttcatgactgacacctggctttccaccaagactcaattttcatagcaagcctcatcatcataagcccccaaattaacaggatgaggaggaagaattggcaggctaaagaagatgattatatcaattaatgcagaaaaagcatttgataaaatccaatattcatttgtaattaaaaactctcagcaagttagggataggaattacttcaacttaatgaagagtgtctttaaaaaccttattttcatcagttataacaaatgtaccactctggtggtgaatgttgctaaggagggaagctatacatgtgtggggaaaggagatgtgtgagcaatttctgtaccttctactcaatcttctgtgagactaaaattgctgtaaaaaataaagttcatttttttaaaaaccta

SEQ ID NO: 2654 - DNA, 921 bp, Homo sapiens
ccactctggccaatagtttacttcaaactggaaaataaaaccactttctcagtgccatgtcactactttctagtggtgctaagaaagtagtgttggacattcatagcctacagttcttttttttttgaggtggagtcttgctctgtcgcccagtctagagtgcagtggcacgatctcggctcactgcaacctctgcctcccaggttcaagcgattttcctgcctcagcctcctgagtagctgggactacaggcgcctaccaccgcgcccggctaattttttatttttagtagagacggggtttcaccatcttggccagggtggtcttgaactcctgacccttgtgatccacctgccttggcctcctaaagtgctgggattacaggcgtgagcaaccgcgcccggcctgcctacagttcttatattggttaatcctgtaattttactaggaaagtattttctcaagtcctttttgtagtattgtgccaggcattggggttccatggctgaggttcatgagttggtgatatcatgtcctaattcttcatttattcatcaggttttaagggaaataatagaaccagggctatagaaagtagcttccatgaggctagattagcttttgctgaatattctgagatctaaatgtatacggtaatatatatacaggcacataaatactactaacaaacatagagcagtgcttggcacatcatatgaagagttttatgcacagtagcttccttaatgctcatgataattttatcaagtgtgtactgttgtcttactttacagataaactgcagcagagagggtaaatgacttatccaaggtacacagctaggaagcagcagagccaggattcaaactgagatggaacacatgaccacatcaggtcctgccccacaacatgtgttattgg

SEQ ID NO: 2655 - DNA, 534 bp, Homo sapiens
ttttttcctgtgttttcctttagttatttgagcatataaaagacagttgatgtaaagtctttgtctagtaagtccaatacttgtttttcttcaggggtggtttctcccagtttattttctttctttgaatgaacatgtttttcagtttctttatatgccttgtgattattatttgtgtgttgataattgagcatttgaaaaaacaaccacctctttcagtctttacagatttgctctgtgcttgaacagtcctgcacaattagtcaggtatgcatgccctgagtcttgggatcagcctgaggtgatagctgaaggtcttcttaagtcttttctgtgtatatgtcttgcttgggccctggtgtggctttttaaatcccctgtatagatagctgaaatttgaatatcttagtttccaaaaatgtctcattccagtttctccttgggacattagatggtccattgtatgtctccacctatattttcttgtcccacacaactacaggtctgttgctctcttgcagctttcaaaagcaa

SEQ ID NO: 2656 - DNA, 339 bp, Homo sapiens
aactgtagacagcatgtgagctgcttgccaatgccacagatggggtcctctgtctggggataccccagctttgctgcagtagtctgagtcccacaggaggaaagtcatttgttggtggccacacaagacacagagccagatgcaggtctcctggtagttttagttttgaatgggggcaacttggtatcccagagcactttctctttgccaaatcaaatagctcctccgaacactgcccacctgccctggccatgggctgggaagaggagatttggggtgctccttaagccctaggctcctgggaaaacactgcccatctggctgagctgggaactcacc

SEQ ID NO: 2657 - DNA, 389 bp, Homo sapiens
  misc_feature (356)..(356): n is a, c, g, or t
ggatggatatgttcattggcttggaatcattccacagtgtatacatacaacatcacattgtgccccataaatatacacaattatttgtcaattaaaagaaattagtatccgcaccctcactaggttggtgcatcaaagggccctctgtctgggaaggtgacatgaaggagggaaagatccctcctgatgggaaggacctgattgtagtaccctttcctgttggcttacccttgattgggacatagtgcagccacatgcagcagggtgttgtcatgtggacgatttcataaaaacacaacccatctctagttctcacttcacctgaggctcaggtgatccaccttacttgggccttnccaaagttactggggatttacaggtcatgtagg

SEQ ID NO: 2658 - DNA, 443 bp, Homo sapiens
gtgaggttagaaaatgggtcttcacatgacctcattatgataactgctattattaatgatagctgtcatctatttagtgcttactgcctgccagggactctgcctagaatcttaaatagatcattcttacaccactgagttatcattatcggtgacattttacatgaagaaataaatctcagagaggtttcacaacttgtccaaagtcacacagctagtaagtggcagagtggggatttgaacccaggtctttcctattctgaggtttcctataaccaggctatcctgccctcaccaccgctccacatatgctcgctactagccagttcaggggtgactgaggaatgattttaggtcacatgggaacaattttttctatgttaagtggtggcatttattttggtaagtattagaaaaataaaattagcacatcaaacctgtga

SEQ ID NO: 2659 - DNA, 413 bp, Homo sapiens
gtcatgtgttctatatgtctgcatgtaatgccctttctatatgtatttttctcctctgtgtgtagagaacagtggttataggcatctataggtagtccaaatacttaaaaaacaacactaacggccgggcacggtggttcacacctgtaatcccagcactttgggaggccgaggcgggtggattgcctgagctcaggagtttgagatcagcctggctaacacggtgaaaccccatctctactaaaatacaaaaaatagcctggcgtggtggtatgcacctataatcccagctactcaggaggctgaggcaggagaattgctagaacccaggaggtggaggttgcagtgagccgagatcgtaccactgcactccagcctgagcgacagagcaagactctgtctcaaaaaaaaaa

SEQ ID NO: 2660 - DNA, 447 bp, Homo sapiens
tgaaacctgtggagagaaacaacaagggtgacaaggctactcaggaaggaaatgaatccatgacttcagggactctcatctgttcagtaatagtgtgaagtccatttcctatgtcccctcacttcccagaagcctggtgagggctgccagggggaagggaaactgtccagaagaggtgaagtaagatccatgtgctagcaagcatcccctggagagaaaggagatgaggcagccaatctgaagacctcccaggtaacatttcagttgatgatcagatcccatctcctggccagcatccccagccctgcctggtgtggtccgtccctgtctacatgctggctcttttttgaacaagacagatgttgggggccgggcatggaggctcatggctgcaatcccagcactttgggaggccgaggtgggtggatcactcgaggtcaggagttc

SEQ ID NO: 2661 - DNA, 418 bp, Homo sapiens
ggattggccacacacgttggctcatgcctgtaattccagcactttgggaggctgaggtgggagtatcccttgagcctaggagttcaagaccagcctggttaacatagcaagacctcatctctacaaaatttggaaacttagccaggcatggtggcatgcacctgtagtcctggttactcaagagaccgaggtgggaggattgcttgagcctgggaggttgaggctgcagtgagctgtgatcactgtagcctagccaacattgcaagaatctgtctcaaaaaaataataaaatgataaaaaatgtaaatagaagccgagcatggtggctcatgcctgtaatcctagcacttggggaggccgaaggcagacagattgcttgagctcaggagtttgataccagcctgggcaacatggtgaa

SEQ ID NO: 2662 - DNA, 286 bp, Homo sapiens
ctgttattaccggtctttaatgacagctggatataaattcttagacactcatggcaaaaccattgtcaaaacaatctgatttcatactgctatggatggtccatgttatttgtaactcatttacagtgagaataggaagacagaggtgtctggctctacatagctattaaaagagcttttacagtgtatgtgatgctgggttgaattgacagtttgttaaaactcaagtggacagtattcagtttcctacaacagacatattttaactgctttgtgattaagttta

SEQ ID NO: 2663 - DNA, 403 bp, Homo sapiens
ataatgttgcattgaaaattaaagtaagttggaacagttaagctattttgtttttaagagcgtataaatacctaactttaaagtagtttaaatgatttctggttacatgttttcatttttaaaaatatggactgcaggacatttttttttgtgactggagtatgaactagatgtcaaaaaacagtgttaatgcttactgtcttttaaagccatcttggaagtttttacttgtctaacttttcttctttcctttgtaaaacttaccgtacagaatatgtgtacatggaaaaagtcttctttttgcagatttaaagtctttaattatattagaaaattttcagtagaaaacaactagttttatttttaattctaaaaaaataaataatgacctcttaacttctta

SEQ ID NO: 2664 - DNA, 483 bp, Homo sapiens
ttttggagcaacatggctgtttatttcacctgggtgcaggtgggctgagtctgaaaaaagagtcagcaagggtggtgggattatcattagttcttataggttttgggataggcggtggagttaagagcaatgttttgggggcagtgggtggatctcacaaagtgcattctcaagggacccagccctctattttcaaagaataggttctatctaatattatcatggtaaatatccatattagtttaagagagaaatgaaaataatttttgaatcctgttcttacagacatcaaagaaagcaggacagaatgcacattgcactattcaatttgttgatttgtcctctgtcatcttgtggagagtgatagagtattttttaatttcttcaattaggatagtccaattgcaataaggtggcataaacatgctgtctcatgcttaaatagtaaagactagtcagcagtcagttatatatataattgtc

SEQ ID NO: 2665 - DNA, 502 bp, Homo sapiens
gttctaaacagaatttgtatgaaggagggcatattctcttgtgaggaaaaattcttgcatgtattcaaatatgaattcttgataaagaaaaatatgccctttggttatttatttatttatttagagacagggtctaattctcatccaggctggagtacagtggcatgattatagcttgctacagcctccacctcctgggctccagtgagcctcccacctcagtcttcccagtagctgggaccacaggtatgcaccatcatgcctggcaaatttttcaattttttttatacagacagagtttcactctgttacccgggctggtctcaaactcctgggctcaagcaatcctccctccttggactccggaagtgctgggattacaggcatgaaacaccacatccagccatgtcctctggtcttaaaatgactatttttccaatgcactattaatttcttacgcaaaatatgcaatcgagatttcgtatgaaacatattgacagca

SEQ ID NO: 2666 - DNA, 316 bp, Homo sapiens
tctaggacagtaggaaaatgaattgacagaaaagtttgagtagtattgctactcagttgtggtcaatgatcatgaaatcaggttgagatcagagtcagcaaagtatatgcttttctgctactgtaggttttatcagacagttatgaaagagggagggaagggcaaggcagtaattataatgatgggccatttaaagttaagatggataagaaagtagggggcctgggcacagtggctcatgcctgtaatagcactttgggagactgaggtgagtggatcacttgaggtcaggagttcgagaccagcctgaccaaca

SEQ ID NO: 2667 - DNA, 552 bp, Homo sapiens
tcccttcctctctctctctctctcacacacacatacatacatacatgcatggagacacagatacacacagttgttttgcattgtcttttggattctttttcagtcactatcttcctgtatgttccacagctgtgaggctaagcagtcacagagaatttcagagctaactgtaaccactgtgcaaaaaattagctcaaatcctcagcaagggggagagtggctgcttatccacccaaatgaggtcatatcttcctctctctgttggtcctctgtaaataaaaagactgacaatcctgccagctttgctgagtaatagaacttaagaaagctgcttccccttgggccaaatagtagaggatcttgtcatctctctaggagccgtggtgtattattgttctcttctgttcttggagagggaaggagttccttggggttggcaaccatacttctataggatcttcaataaggaataactgcctacagaatgtgggaattttccacatgctttgccagtgccagagattacaaaggcggcaaataggtagcttttgc

SEQ ID NO: 2668 - DNA, 353 bp, Homo sapiens
aaaatggcagtttctcttgagtaccaggatggttctagctggtaactagagaagatatttcactctctgagcctcagtttcctccttgtaagttgagaataaccacacctatcttataggactatggtgagagtaaactcatgcggtaaaccatgtaggaaataccctagttgtggccttctcccctgggtggaactttaccctatgaaggtttagcaaatcattcaacacaatcaaacagtggagtctaggggcaggcgacatggctccaacctcgcctctgccttacttcgtgagtttgatcaacagtttgaatctaaataaaagctaacttttatatatctgatgaacca

SEQ ID NO: 2669 - DNA, 699 bp, Homo sapiens
tttctgttttttaattggtttttccctgttctctaaaatgagtgtcttattagactaaactggatatagccctacccagtgacctgtagagtcaggaagggcttaaactctttcagcaatgaaaatcttctgggcacctgctgtgtgtgagagagagaggctttgttctgggcatatggccacccctcctagagctttgcccacccctcccgctgcctctacacttagacagcattcctcaggaggctgaagacactgtgaggaacagcggctcttgctctgccaggcggaccacaggccccacatccatccaccagccagtcccatcagctctaccttgaaacagagccagcatctgacccctggccaccaccgccaccacaagcacaagtgatgttctggtaaatgctcaacagccagctctctggggcgcagaggcaggccctgctgtggggcgtttgccagtgtccatggtgtgaatattcccgtcatggccaactcctggctgccaacatgacatcgatgtggacttgaggggagatgtgcagtggccacaccagcacaatggacagaaataaccccatcagcatagacgatagtaaagtggaacaaaataattagcaagtggtatgctttgagtatttgttacctttgtttttaataaaattgtatcccattgtaacgctgatataatttaat

SEQ ID NO: 2670 - DNA, 221 bp, Homo sapiens
agtaatttcaccatgaatataatactcctcttatcattttgtattcccttccaactaatttttctcttaaaagtggcactatgtttttgaaaaagctgactactttaagaaaatttctctcagtttactttcttaatcgtgtgcttttctgaagagttggctctgacgttgactactatagtaaatccaattttgatgagtttttcttttttagtgggcca

SEQ ID NO: 2671 - DNA, 418 bp, Homo sapiens
acatcagtcagagtaagggctggttcaaggagagtgagtgcccatacttggctttgagtgatggagtggcctcttgtctctgatcagagaaagccacatgccagtcttgcagggtgtcaaacacatagcatgtctgctgctctgtgtgctgagtgcctgctctgtggctctcctggccctgtgattggcggttgattgcatcacagacacttgtctgatctagaccttgcccaaggtcatctggcggcttggtttttgcaagtgactggggtacacttgccacatggaccccttcctccccagtatttttgttgttgttgttgttgttgttgttgttgagatggagttttgctcttgttacccaggttggagtgcagtggcgcgatctcagctcaccgcaacctccgcctcccgggtt

SEQ ID NO: 2672 - DNA, 387 bp, Homo sapiens
cactggaaattggaaacattgctggtaggactgtaaaatggcaaagctactttgaaaatcagtttggaatttcttagaacgttaaacatatgattgccatatgacccagcaattccacttctaggtagaataggcaaaactagtccgaggacgaaaaaaaattgaattgatggttgcccaacgtgaagaggaggaacggaggcgaagagacagcaaggggcctcaaggggccaatggcagtgttctatagcttgattgccatggcttgattgtcgtggtggttatctgggtgtatacactttttaaaacttcatcaaactatgtatgtaaattataccttaatgaagctgctctttaaagtaaaaaatcatcagatttcatgtctat

SEQ ID NO: 2673 - DNA, 470 bp, Homo sapiens
ctaacaatcctcatttttcctgtcttaactcagcagacttaaccgtcagactgatggttagctaatttgttgctctgcccattcagcattggtgaacaacctaagtcatgtctgtacttctgtgagcgtctaagccttgcctcagcttttttgtatttacttagaaataatgtcctgggtggccaggcgcggtggctcacacctgtaatctcagtactttgggaagacaaggcaggtggatcacctgaggtcaggagttcgagaccagcctggccaacatggtgaaaccccgtctctacaaaaaaaaaaaatacaaaaattagctgggcgtggtggcgggcgcctgtaatcccagctactcacgaggctgaggtaggagaatcacttgaacccaggaggggtgggttgcagtgagccgaaatcgcaccattgcactccagcctgggtgaaaagagcaaggctttgtctta

SEQ ID NO: 2674 - DNA, 421 bp, Homo sapiens
gcctccccagtcatgcagaactgtgagttaattaaacctcttttttttttttttttaaataaattacccagtcttggggagtgtctttataacagtgtaagagcggactaatacatccagcaacctggtgagctatctgtgattttagtcatttacagcaaaaggaagcagaggcacagcctggcctgggtttgcctgaggttccacagcttcctgaccccattgacgcctatctttggcttcatcacatttggcatatatgactttgcttctatagtgggcatgcagcttgcttatagactctggaagagcctaatccttctgcttctggcatctctctgggaggcaggccagaatttcattaccccttccatgatcaggccagggtcatcccttcatcccatggatatgagtatctgag

SEQ ID NO: 2675 - DNA, 238 bp, Homo sapiens
aaaagaaatatatatatatatacacacacatatatacacatatatacatatatacacatatatacatatatacacatatatacatatatacacatatatacatatatacacatatatatacatacatacacatatatatacacatatatatacatatatatatgataccaatgtcctctatgtcatacgaaagccaatgttgttacaaaaggcagtgagatccaagtctgaagaagcc

SEQ ID NO: 2676 - DNA, 1021 bp, Homo sapiens
tcatggggaatttgtctcttttctcccattaatttattccaaatttaatttatatcatggatgtgtgtgtgtgtgtgtttaaatgttggattataatccaatactacttgattttgttgctcaaaatgttcagcattggccattgagagctgattttggctcctgtgatctttagacatatctccattaatgtattttgtttctttttctttttttcccagcacgtccttactctggcactacgaaatgctccagactcgtgtgtatttcttgctccaccatagaatcagccatttctacaaatgtcactggtttcttttatggagaatgacattggaaaccaagatctgactactaagtgtgttctttgctactgggttgtcatttctcttaaggcttccaagctgacagagcaaacgagtatatgacacatctgattttttatttgactgtggaactctgtatctatgtgagaggatttaattgtttctgattaaaatttctcataactagttctacaatgatattttaattacaactgatacaaagcctataacttaaaagattctcttttggtatgagagagtgataagttggtttgataaaatttttctaaactcatgtctgagttgttatgtatttatactcattaaaattttagaacttactatcaagacctttatgatatactttttgtcctataaattctggcatggtctttgccccaaatagcaaaatttgacatgactctaagagatcttcttcaaagtcataaaaagcaatgaatttaataggaaagcagactcatgatctttagaagtgaaattgaaatgcaacttaaatatcaagatttctggtgtttctatttgtcagttgtcactttattaattactatctgctaaaaaactgtcagaatcaggattttgtaagtcataaactcaaaatcatgcttcttatggtatctatagaaaatacaactaatagactgaattttacttcctagaagtatattatgtaaacc

SEQ ID NO: 2677 - DNA, 992 bp, Homo sapiens
tcatggggaatttgtctcttttctcccattaatttattccaaatttaatttatatcatggatgtgtgtgtgtgtgtgtttaaatgttggattataatccaatactacttgattttgttgctcaaaatgttcagcattggccattgagagctgattttggctcctgtgatctttagacatatctccattaatgtattttgtttctttttctttttttcccagcacgtccttactctggcactacgaaatgctccagactcgtgtgtatttcttgctccaccatagaatcagccatttctacaaatgtcactggtttcttttatggagaatgacattggaaaccaagatctgactactaagtgtgttctttgctactgggttgtcatttctcttaaggcttccaagctgacagagcaaacgagtatatgacacatctgattttttatttgactgtggaactctgtatctatatacacttgcaattcttatcaagtaaaaatacatcaaagatatcaacaaccacagacgtatacacccgacaagaaccgctgtatattctagtacatcatttattggaccaacaaatacatggcatctggcaaggaattgaaaagtggcttgtctatctggaatacagggaggaaggagttgaaatgagatgggaagagtcatctgtatgcagaggaggtataaagtcatgcaaatggataagatttcaagaagaaagaagaaaaaggtaggctctgagtttggagagttgaatgagcctacagagataatgaagttgttgctggagagcctccataacttctgttgagaaatcggccttaatcttattgatgatgactttcacatgatcctcagatatctgcctctagatcccagatgagcaccagttgcagcagtcaaacgtcatctatctgtatatcaagataaattatgaaaggattatataccaactgtctaaatgacaaagagaagaaaggtaagtag

SEQ ID NO: 2678 - DNA, 540 bp, Homo sapiens
tcgggttcagtggcaaaggtgaagaccagcactgccgacctgggacctgggcctctcccgggcctggggaggacactggactttgaaggggaatgcagcctagaaggcctggaccctggagtcaggagatgctgctcccatccagtaagccctggctggagctcttctgggcaccaaccctggcataaaaccagtggggcctctgggcctgcactcaacagtgcctctgatggagcaggttcagcttggttgtgacctctgctagaagccctccctggcctccctgtgcactgagctggtggttcctcctttgcgccccaggtacatgctcagatctgtgtaccctacactttgtcctccagcttcgtgtttggatgttcacaactcccatgagaagggcccccgagagctggcacagtgcatgtgtttcctctccagacttctacaaacctggcacataattgtttgctgaaagatggcatgttcctaaaacagaggaagtagaacctgaataaagcgaaatccaacttcccactccct

SEQ ID NO: 2679 - DNA, 316 bp, Homo sapiens
acccacagatgtgaatgtcgtgtgatgttggctttccagtgtcttgcatggcgtggtagcagcagaaatgagcttggctgggcaccctctctgggccttggaggcaagcctgggctcctctgaaaatacaggcagcttcctttccctgacttgcctggaggagccaggccctgtggtgcggtctggctctgaggcctgtggtcctgcttgggactggcagtcttaggctgagggaacattttccagagtatagccgagggacagaatgtctcagtaagacgggctcggaggggaagtgttttggaaaggcctctgc

SEQ ID NO: 2680 - DNA, 769 bp, Homo sapiens
gtctggctctgaggcctgtggtcctgcttgggactggcagtcttaggctgagggaacattttccagagtatagccgagggacagaatgtctcagtaagacgggctcggaggggaagtgttttggaaaggcctctgcttgctctgggaggcgttcaggatgctgaggttttggaaatctatggcggctcttcacaactgctcccagctttgggaggaggaatagacgggtgctcgtttcctcgggttcagtggcaaaggtgaagaccagcactgccgacctgggacctgggcctctcccgggcctggggaggacactggactttgaaggggaatgcagcctagaaggcctggaccctggagtcaggagatgctgctcccatccagtaagccctggctggagctcttctgggcaccaaccctggcataaaaccagtggggcctctgggcctgcactcaacagtgcctctgatggagcaggtaggagaaccccccgcaaatccaccaggcagaacagaacacgctggaggcatttaaccaggcaggcacgtctcctgcaaggagaggccagggaagggagagttcagatgcccccagctgccaggggatgcttagcggaggaagtgaggcctgagcccccctttctagcaccctctcccttcttctgttctgcttttgtatacaaccagcatgccgagggtccagttccagctctgttctgtgatcttggacaagtccgtttatctccttgggcccatttcccgcctgtgaa

SEQ ID NO: 2681 - DNA, 1875 bp, Homo sapiens
caggccagagtcccagctgtcctggactctgctgtggggaagggctgatgcaggtgtggagtcaatgtgggtgcctcctgcagccgggtgccaggaggggtggaggggccaccctgggctttgtccgggagcctggtcttcccgtccttgggctgacaggtgctgctgcctctgagccctccctgctaagagctgtgtgctgggtaaggctggtggccctttgggctccctgtccaggatttgcgctctggagggtagggcttgctgggctggggactggaggggaacgtggagctccttctgcctcctttcctgccccatgacagcaggcagatcccaggagagaagagctcaggagatgggaagaggatctgtccaggggttagacctcaagggtgacttggagttctttacggcacccatgctttctttgaggagttttgtgtttgtgggtgtggggtcggggctcacctcctcccacatccctgcccagaggtgggcagagtgggggcagtgccttgctccccctgctcgctctctgctgacctccggctccctgtgctgccccaggaccatgaatggcacctacaacacctgtggctccagcgacctcacctggcccccagcgatcaagctgggcttctacgcctacttgggcgtcctgctggtgctaggcctgctgctcaacagcctggcgctctgggtgttctgctgccgcatgcagcagtggacggagacccgcatctacatgaccaacctggcggtggccgacctctgcctgctgtgcaccttgcccttcgtgctgcactccctgcgagacacctcagacacgccgctgtgccagctctcccagggcatctacctgaccaacaggtacatgagcatcagcctggtcacggccatcgccgtggaccgctatgtggccgtgcggcacccgctgcgtgcccgcgggctgcggtcccccaggcaggctgcggccgtgtgcgcggtcctctgggtgctggtcatcggctccctggtggctcgctggctcctggggattcaggagggcggcttctgcttcaggagcacccggcacaatttcaactccatggcgttcccgctgctgggattctacctgcccctggccgtggtggtcttctgctccctgaaggtggtgactgccctggcccagaggccacccaccgacgtggggcaggcagaggccacccgcaaggctgcccgcatggtctgggccaacctcctggtgttcgtggtctgcttcctgcccctgcacgtggggctgacagtgcgcctcgcagtgggctggaacgcctgtgccctcctggagacgatccgtcgcgccctgtacataaccagcaagctctcagatgccaactgctgcctggacgccatctgctactactacatggccaaggagttccaggaggcgtctgcactggccgtggctcccagtgctaaggcccacaaaagccaggactctctgtgcgtgaccctcgcctaagaggcgtgctgtgggcgctgtgggccaggtctcgggggctccgggaggtgctgcctgccaggggaagctggaaccagtagcaaggagcccgggatcagccctgaactcactgtgtattctcttggagccttgggtgggcagggacggcccaggtacctgctctcttgggaagagagagggacagggacaagggcaagaggactgaggccagagcaaggccaatgtcagagacccccgggatggggcctcacacttgccacccccagaaccagctcacctggccagagtgggttcctgctggccagggtgcagccttgatgacacctgccgctgcccctcggggctggaataaaactccccacccagagtca

SEQ ID NO: 2682 - DNA, 1859 bp, Homo sapiens
  misc_feature (21)..(21): n is a, c, g, or t
tcgatctagcaggatcccctntgacaggctgatgcaggtgtggagtcaatgtgggtgcctcctgcagccgggtgccaggaggggtggaggggccaccctgggctttgtccgggagcctggtcttcccgtccttgggctgacaggtgctgctgcctctgagccctccctgctaagagctgtgtgctgggtaaggctggtggccctttgggctccctgtccaggatttgcgctctggagggtagggcttgctgggctggggactggaggggaacgtggagctccttctgcctcctttcctgccccatgacagcaggcagatcccaggagagaagagctcaggagatgggaagaggatctgtccaggggttagacctcaagggtgacttggagttctttacggcacccatgctttctttgaggagttttgtgtttgtgggtgtggggtcggggctcacctcctcccacatccctgcccagaggtgggcagagtgggggcagtgccttgctccccctgctcgctctctgctgacctccggctccctgtgctgccccaggaccatgaatggcacctacaacacctgtggctccagcgacctcacctggcccccagcgatcaagctgggcttctacgcctacttgggcgtcctgctggtgctaggcctgctgctcaacagcctggcgctctgggtgttctgctgccgcatgcagcagtggacggagacccgcatctacatgaccaacctggcggtggccgacctctgcctgctgtgcaccttgcccttcgtgctgcactccctgcgagacacctcagacacgccgctgtgccagctctcccagggcatctacctgaccaacaggtacatgagcatcagcctggtcacggccatcgccgtggaccgctatgtggccgtgcggcacccgctgcgtgcccgcgggctgcggtcccccaggcaggctgcggccgtgtgcgcggtcctctgggtgctggtcatcggctccctggtggctcgctggctcctggggattcaggagggcggcttctgcttcaggagcacccggcacaatttcaactccatggcgttcccgctgctgggattctacctgcccctggccgtggtggtcttctgctccctgaaggtggtgactgccctggcccagaggccacccaccgacgtggggcaggcagaggccacccgcaaggctgcccgcatggtctgggccaacctcctggtgttcgtggtctgcttcctgcccctgcacgtggggctgacagtgcgcctcgcagtgggctggaacgcctgtgccctcctggagacgatccgtcgcgccctgtacataaccagcaagctctcagatgccaactgctgcctggacgccatctgctactactacatggccaaggagttccaggaggcgtctgcactggccgtggctcccagtgctaaggcccacaaaagccaggactctctgtgcgtgaccctcgcctaagaggcgtgctgtgggcgctgtgggccaggtctcgggggctccgggaggtgctgcctgccaggggaagctggaaccagtagcaaggagcccgggatcagccctgaactcactgtgtattctcttggagccttgggtgggcagggacggcccaggtacctgctctcttgggaagagagagggacagggacaagggcaagaggactgaggccagagcaaggccaatgtcagagacccccgggatggggcctcacacttgccacccccagaaccagctcacctggccagagtgggttcctgctggccagggtgcagccttgatgacacctgccgctgcccctcggggctggaataaaactccccacccagagtca

SEQ ID NO: 2683 - DNA, 1708 bp, Homo sapiens
tccgatcaggctgatgcaggtgctgatgagtaggagaggtatcaaagatatattggccaaacccattacagtactacttggttcccggtagggcttgctgggctggggactggaggggaacgtggagctccttctgcctcctttcctgccccatgacagcaggcagatcccaggagagaagagctcaggagatgggaagaggatctgtccaggggttagacctcaagggtgacttggagttctttacggcacccatgctttctttgaggagttttgtgtttgtgggtgtggggtcggggctcacctcctcccacatccctgcccagaggtgggcagagtgggggcagtgccttgctccccctgctcgctctctgctgacctccggctccctgtgctgccccaggaccatgaatggcacctacaacacctgtggctccagcgacctcacctggcccccagcgatcaagctgggcttctacgcctacttgggcgtcctgctggtgctaggcctgctgctcaacagcctggcgctctgggtgttctgctgccgcatgcagcagtggacggagacccgcatctacatgaccaacctggcggtggccgacctctgcctgctgtgcaccttgcccttcgtgctgcactccctgcgagacacctcagacacgccgctgtgccagctctcccagggcatctacctgaccaacaggtacatgagcatcagcctggtcacggccatcgccgtggaccgctatgtggccgtgcggcacccgctgcgtgcccgcgggctgcggtcccccaggcaggctgcggccgtgtgcgcggtcctctgggtgctggtcatcggctccctggtggctcgctggctcctggggattcaggagggcggcttctgcttcaggagcacccggcacaatttcaactccatggcgttcccgctgctgggattctacctgcccctggccgtggtggtcttctgctccctgaaggtggtgactgccctggcccagaggccacccaccgacgtggggcaggcagaggccacccgcaaggctgcccgcatggtctgggccaacctcctggtgttcgtggtctgcttcctgcccctgcacgtggggctgacagtgcgcctcgcagtgggctggaacgcctgtgccctcctggagacgatccgtcgcgccctgtacataaccagcaagctctcagatgccaactgctgcctggacgccatctgctactactacatggccaaggagttccaggaggcgtctgcactggccgtggctcccagtgctaaggcccacaaaagccaggactctctgtgcgtgaccctcgcctaagaggcgtgctgtgggcgctgtgggccaggtctcgggggctccgggaggtgctgcctgccaggggaagctggaaccagtagcaaggagcccgggatcagccctgaactcactgtgtattctcttggagccttgggtgggcagggacggcccaggtacctgctctcttgggaagagagagggacagggacaagggcaagaggactgaggccagagcaaggccaatgtcagagacccccgggatggggcctcacacttgccacccccagaaccagctcacctggccagagtgggttcctgctggccagggtgcagccttgatgacacctgccgctgcccctcggggctggaataaaactccccacccagagtca

SEQ ID NO: 2684 - DNA, 509 bp, Homo sapiens
ccagccgagttattaatttcttcaccagtgttgtggtatcagcacatccagtccggtggcattcaatccatccactaaacattcagacagtaaccaaacagtgggaatgccctaaagccagaagtaaatcaacaaaatccatctggagtcctgcaaggggcagtgtgggccttggaggactccccgaggaatgttggtttcctccagagattccatgagatttataagttgtgcactgggaaacagtgtggccagaagttttgtggatgccagggtagaactaattatattttagttcctttgctatcctccatctccatatgtcccatttgataagtgcaagccaaaaggtcaaaagaaaggaagccacgggaagtctatttggtccaatgtatcatctgtctggtaattatttgctgtccttttgaattcatttgtctttttcagattgtggggcatttgcctggtaatactaacaataatcaataatatcagtcagggataaagac

SEQ ID NO: 2685 - DNA, 629 bp, Homo sapiens
ctaaagtatctgtaccctctttctctcttcttcttcacaactttaaaatatagttttagtataacttttatgtattggttattttaaaacacagtgtaatatatataagactctgtttctaggatcagctgctttattgactgccacacctttcctcccaaattgtttcccgagttatgtcatctgtcccattacttttactcttgtgaaggtttacaacatttacattttcttttgtaactatagtaaattgtaaaatcttccatgttttggctgtagattgattctaaacattaaaaaaagaatgtttatattaccatgctttttcaaattccttggaaaatctttagaatattttgctttgtaggactgaaattgttattctggatcctttgtttctgagcttcttcatcttgtgtatgtgttatgacatacatatttttgtcagacactatgactgtgacatattatgtcagacaatgtatgattgtagtaaaaaaaaaaaataaaaccttgttatgtcaaccacagggcaccctgcaaaggctcaggagtgctctgacactattccaggatttggtagggattggactatctccagcggagctgttctaatgggctgttgctgg

SEQ ID NO: 2686 - DNA, 890 bp, Homo sapiens
cttccttacaggttgtgatgagataggcaccatataggcactgatacaggcaccatatcagtctgtaggcctaccataacaaaataccacaaggtgggtggactagcaaacagaaattggtttctcacaactctggaggctagaagtccaatactgaggtgtcatcaggtttggtttttcctgaggcctctgtctttggctgcagatagccttctgctgctgtgtccttacacagccttttctttgtgagctcaagagaacctctgatgtctcttcctgtccttataaggacgccagtcctagtggattagagtgccaaccttatgacctcattaaaccttaattacttcttcaaaggccttatctccaaatacagttggtaggagcttagggcttcaccctatgtattttaggggacacaatcagcccataacattgcctaatatccacaaatcctagtttcctaagaccaaggtgtttaagcatagacagctaccttacagggatattttgcaggatactgaagccataacccatttatgcctagtgttccactattggaatgctaagcttgtggcagttatgtgtatcctgttgctcaaggtcatcaccaagttctgatttttcacacatacacacacacacacacacaaaattgcaacatttggcataaatgggttaaacagatgattgtcatatataattttaatggactctgctaacactgatattctgtcattataaaaataaaatctttggggccagacacagtagctcacacctgtaatcccagcaccttgggaggccaaggagggaggatcacttgaagacaggagtttgagacaagcttgggcccccaagcaaaaccctgtctatacaaaaaaaaaaaa

SEQ ID NO: 2687 - DNA, 650 bp, Homo sapiens
ctccagcctgggagacagagtgagactccatctcaaaagaagaagaagaggaagaagaagatcaatggaatcatttttaagaaagcaaagttagtgtgacaaagcttatttcatagacatatttaataaagagactaagataccctgattagctatagctattaaaaataaaaatatgtgactgctaaaatattaaagtcacttaaagggtgaactataagttttcaaggtaatttattcaaggaaagatagatttgcctccacttggcctatttcagcccagtaatttattttaaatacacacatgaagagataatagtattatgtttatgatttagaaagtatctttatgggccaggcgtggtggctcacacctgtaatcccagcattttgggaagcagaggcgggcggatcacctgaggtcaggagtttcagaccaccctggccaacatggcgaaaccccgtctctactaaaaatacaaaaattaaccaggtgtggtggggcatgcctgtaattccagctactcaggaggctgaggcacgagagttgctttagcccaggaggcggaagttgcagtgatgtgagattgcaccactgcaccccagcctgggcgacaagagcaaaactccatctcaaaaaagaaaaaaag

SEQ ID NO: 2688 - DNA, 527 bp, Homo sapiens
agggacattaggttggattaagtgttgccaatgctcactgtacctaccactatcttagctcctaccacattctattacaattttcagattatgtaggttatgtttttaagactttagctatccctatttggatcaccaatacctagcataaaaatgatctctcaatagataatcaatatgtatttattaaactcgattgacctgaactgctctgagaatatattgtggtgtcaggatataccctattatttaataaaaacatgtgtatgatacaatataacatgtatccaaattttaaaacccatccctcatcaggtttagtaaatggggagctttctttctcgtgctaaacaaaaacaaacaaaaaaattgaagaaagatgtttgaaaacaccctgactagtttttctttatagtagccaatccagtgaaatgaaaggatcttaaccttaaattcttttcactgaatgttttgctttatgttttatttaacaattttcattaaagatgtaaatattggaatacaat

SEQ ID NO: 2689 - DNA, 1633 bp, Homo sapiens
agagaatgtacattaaggaacaattgtcctccaaaagagagccaagcaactgctctggagcctcctaggctgactctgctggagggtgagacaagcagattcccattgcagcactggtccctggggtaccctgaacggctgtgctctccacccttgtatcggtgagtggatcttgtctacatcagccgtaagcctagaagcagagcgggatcgaggcgtttttaataattcgagttgggaagacccggatggttcatcaaaatgatggtgttgagcacccgggaggcagacattgggtatttgttcacaattttgcacctgtaagaaaatgttcctttataactttcaaggattgccgtgagcgtctttggggccttttcattcatgtacaagtttcattcattactattcaacttggtagacttggtgaaaaatgtaaaagcattctgtatttggatcagtcttgggaactaaatttgtcgtgaattggggcctgtcacagattgcctccagtgtgcatcctccacgcagaccctccttgctcagtctccctctggcgcccatggggaagccgtgctgtggttggcagtgcggccatctgggctgccgcaacgtggcagggcaccgtccagcaagactgccccttagtgcagggctaagcaaggaaaagaagaagcccaaaaaggcgggttctttttgatacttgtaattcaggcgtcctccagagtgaaggccactctgcaggcccctggtgagaacctgtctggcttttccactgcgggcccctaaccagtaccctgcccttgtggcccatttgtgcctggggcagatgtttctggccagcagacactgaaggcctttttgctgtgacagtatttatgggcactgaagaggataaagaagcttgagccctctttctgactcccactttatggggcagagagagctttttttctacatagcacattgcagtctcaccgctatcagaaaaatatcctgttcatggtttatactgaatttgcaaactactgatatgatttttcaataaccacttgtatcttccatcatccatgagaggtgggaagaggtacactgtatctctgcaataaaactttggccaggttctacctcctctgagcaaaggatacttttctatgtaggtgtagatggttctcctttactaatctgacatggtgcatctggagacaacatctgatgggatccaaagacaacttgaaacaaaggtggatgtcagctcttggtgtgttttcatttggttctcttttttaaatctcccttttgttatcgctcctgttgtagcgtgtccatcagtgtgtgaagggtgcgccctgttccaatgatactgcattgctgcatccagcctttcgtgggagcacggtaccaagcgtccggaattgattatcccaatcatttttgatatgtaactgaaaaatttggtctcatgcaataaaaatgtactggctgcattttagcaaggtttatttactcttgcaagtaaaaacgatcaaccgtgaagcgtaacaaattctgtatttagtttttttttctgttgtggtggtttttgttttgttttttgtttttgtaagattctaaataaattaaatacgagtca

SEQ ID NO: 2690 - DNA, 1558 bp, Homo sapiens
agagaatgtacattaaggaacaattgtcctccaaaagagagccaagcaactgctctggagcctcctaggctgactctgctggagggtgagacaagcagattcccattgcagcactggtccctggggtaccctgaacggctgtgctctccacccttgtatcggtgagtggatcttgtctacatcagccgtaagcctagaagcagagcgggatcgaggcgtttttaataattcgagttgggaagacccggatggttcatcaaaatgatggtgttgagcacccgggaggcagacattgggtatttgttcacaattttgcacctgtaagaaaatgttcctttataactttcaaggattgccgtgagcgtctttggggccttttcattcatgtacaagtttcattcattactattcaacttggtagacttggtgaaaaatgtaaaagcattctgtatttggatcagtcttgggaactaaatttgtcgtgaattggggcctgtcacagattgcctccagtgtgcatcctccacgcagaccctccttgctcagtctccctctggcgcccatggggaagccgtgctgtggttggcagtgcggccatctgggctgccgcaacgtggcagggcaccgtccagcaagactgccccttagtgcagggctaagcaaggaaaagaagaagcccaaaaaggcgggttctttttgatacttgtaattcaggcgtcctccagagtgaaggccactctgcaggcccctggtgagaacctgtctggcttttccactgcgggcccctaaccagtaccctgcccttgtggcccatttgtgcctggggcagatgtttctggccagcagacactgaaggcctttttgctgtgacagtatttatgggcactgaagaggataaagaagcttgagccctctttctgactcccactttatggggcagagagagctttttttctacatagcacattgcagtctcaccgctatcagaaaaatatcctgttcatggtttatactgaatttgcaaactactgatatgatttttcaataaccacttgtatcttccatcatccatgagaggtgggaagaggtacactgtatctctgcaataaaactttggccaggttctacctcctctgagcaaaggatacttttctatgtaggtgtagatggttctcctttactaatctgacatggtgcatctggagacaacatctgatgggatccaaagacaacttgaaacaaaggtggatgtcagctcttggtgtgttttcatttggttccaatgatactgcattgctgcatccagcctttcgtgggagcacggtaccaagcgtccggaattgattatcccaatcatttttgatatgtaactgaaaaatttggtctcatgcaataaaaatgtactggctgcattttagcaaggtttatttactcttgcaagtaaaaacgatcaaccgtgaagcgtaacaaattctgtatttagtttttttttctgttgtggtggtttttgttttgttttttgtttttgtaagattctaaataaattaaatacgagtca

SEQ ID NO: 2691 - DNA, 461 bp, Homo sapiens
ccatcacagtctcctcattttaacaccatgaaatgttgtcaaacaactgtccttgtgcttgctttaatatgggcagggaactaaatctaaatgtgagatttttggctaattagtttgaaatcttactgcattttcagtggttttattgatttttcatgtctactcttatgaaaaataatcacatgcaaaaggagctccttaatgaaatatataacagcgtatatttttactttcatgttcttgctattaatgtttttttaaaaaagtattcttggtattcttgaaaattgctaaaagagtagattttaagttttctcaccacaaaaaatgtatgtgaggtaacgcatatgttaattatctgtttaactgttccacagtgtatacatatttcagaacaacatgttgtacaggatgaatatatataatttttgtcaataaaaaagtcagtctcagcaaatatg

SEQ ID NO: 2692 - DNA, 381 bp, Homo sapiens
gagacgctcttgtgataccaggaacaccagctcccactggggaggagcccagcctgcaggcagagcctccaaccggcaccaaaggggacgccagccggccaggtctcgggaggaagggagggtgggtgaacaccaggaacctccacccaggggcctcggctaagccctcttctcagcggacaccctcactccaagatgtctcagcacaggggcctccccagggcagctgcagcctcaggaaggggccgtgagccccacaccccacttccttctaagcccacgccttcccgcagaccagctcctgggtcaggtcctggccagttgggaagggctgggccttgtgggttcaccagagacactgtagggtaagcagccagctga

SEQ ID NO: 2693 - DNA, 206 bp, Homo sapiens
tttttgaaagggctgttctcacatcagtgccatattttgctcttttaactgttaatggtttaatatctatataaatagcaaaaatgagcagctgttgtacctaattgcagtgtgaatactaaacattctcatagcatttgtgtgagtttgtctgttctgtctgtgatttcttgcagttcagtaaaattgtctcaaaagctttgcca

SEQ ID NO: 2694 - DNA, 309 bp, Homo sapiens
aactcaattatggattttagaaaatcagtgtcggccgggcgcagtggctcacgcctgtaatcccagcactttgggaggccgaggcgggcagatcaggagatcgagaccatcctggctaacatggtgaaaccccgtctctactaaaaaaaatacaaaaaagttagtagggcgtggtagtgggcgcctgtagtcccagctactcaggaggctgaggcaggagaatggcgtgaacccgggagttggagcttgcagttagccgagatcacgccactgcactccagcctgggcgacagagcaagactccatcta

SEQ ID NO: 2695 - DNA, 401 bp, Homo sapiens
cgcccatttttctactgccgagctttcccctcttcctccctgtcccctactcccctttttaagtcaaatgactgagttcttgcactggcatctaccccaagtgccagcatcatcacaccagaacaaaggcctcatggccacacagtgcaaacaaacagaagactctcagaatatgagggaatggccagacgtttctacttagttattttgtattatatatgatgctaatatgagtgccttggttccaaggaacatcccatggcacacaatgtcctcaagagagtctgtaagctttctgggaagctcagggttctgtccaaaatagcatcttccactcactgagccacgcactgtgccaaggcttaccctgcattatcctatgtcaccccctacccccgccc

SEQ ID NO: 2696 - DNA, 456 bp, Homo sapiens
ttgtgtggaatagatccctaaaaaggtgagctgaggatgacacacaatgagaggaaactctattacccaacacataggaagtacagtcgaatgttcccagtgggttcctctgatacgcacccaaaagcacccaaagggcataaactaccctccctggatagtggaaagtgcagtaaagacagtaacagtaaaatgggggttcctggatatccacacttcacccctctgcaactttgatcactgtgcagtagaaactgtccttaagaagatgctgaaggaggaatgcaagccgaaggtggggaagaacagaaggttctcccctcagcttctgaggccgggaatatcttgcctgcagcagatcccatctaggcaaaaggagtgatgagttgagaggtatattagtctgctctcacactgccaataaagatatacccaagaatgggtaatttataaagg

SEQ ID NO: 2697 - DNA, 433 bp, Homo sapiens
acactgtatcagtgaatgtatgtcattatacgttgtcaaaatccataaaatgtacaacaccaagagtgaaccctaatgttgggctttaggtgataatgatgagtcaatgtagtttcattgattctaacaaatcatccaccattctagtggtggatgtccatagtcggggggagacatcccctgacacctgtgagaattcattgtactttgctctttatgttgctgtaaacctaaaactcctctaaaaaacaaagttcattaacttttaaaaagtcaaacacatttatttgcctttatttgcaaattctagcctattttaataaattggtggcgggggtatctaaatagtttctttaaaataacatacatacttaggtaaaatacaagatagaatattaaaaatattcttattcttccccaaatagaagcagtc

SEQ ID NO: 2698 - DNA, 467 bp, Homo sapiens
cctacagccacgttcctcagaacactgagtccccaagactccagaggaggcaggtgttatcattccccattttgcagaagaggaaccttgagccttgagattccacgagctaaaggaactttcccaaggtcacagagctgagctgggaactgagccatggcagatttggcttcacccattaccctcaagagccccagtcaagggtaccaagaggggagacagaggaaagaagtccaggtaactgtaggtccctccctctacaaagatcctgcttccccccttcactctccacccccccgcccaagcaaacccatcctctctgcatcccaaatcccaggaagaaacccggactggcagacaatgcccagtcccggtgggcggtagagagggtggagcaagctggagagggggctggagtggggatggggggaggagctggggtcagaactcacgccctggggaggagg

SEQ ID NO: 2699 - DNA, 1591 bp, Homo sapiens
  misc_feature (716)..(716): n is a, c, g, or t
ggacattttatccttaaaaaaaagaaaaaaaaagaaaatatttaatttttaaataccaatttttagagtaagaaattggtttgatagttatctctaatagtgtcaaatgagtattttttttcctttttctcttttttgaatatcatggactttggatgttttaaaatccaatattttaccctcagttacagtcactattcattttttattgagatataattcagataccataaaattcaccttttaaaacatacaattcaacatctaaaaatgtattcacaaagttgtggaaccaccactactatctacttccagaatattcatcccctgcccccctgaaagaagccctgccctcttcagcaatcacaccccattactccttcccttcagccgcaggcaaccgctcacctgctagttctgtcttgcagatgtgcctgttctggacatttcgtataaatggaatcagacaatatgtggcctttcatgtctggcatctttcagcacagtgtttcgaggttcatgcatgtttgtagcacttcatttctaatattccattgtatggatataccacattttgtacatcagttgatggatacgtgtacgttttatatgaacagttcccatggcttttccactcaagttaggatttcttggtttaagccaggtagggtaaaaggtggagctgagtttggtgactgtgcttattgtcaaatgcngcttcttccatatgttgcagtctaatgctggcgtgctatgcgggacacctagatgttgtgaaatatctccgaagacatggcgcttcttggcaggctagagacctgggaggctgtacagctctgcactgggctgcagatggaggccactgcagtgtgattgagtggatgataaaggatggctgtgaggtagacgtcgtggacactggttcaggatggaccccactcatgagagtctctgcggtgtcgggaaatcagagggtggcctctcttctaattgatgctggggccaatgtgaatgtgaaggacagaaatggaaagacgccccttatggtggctgtgttaaataatcatgaagagttagttcagttacttcttgacaaaggggcagatgcaagtgtaaaaaatgaggtaaatgagtccatctttatgtaaagattttcctcggagggggagaaaacatttataagcatgtaaaatttttgttgtttcctgtttcagttcggcaaaggtgtcctagaaatggccagagtttttgacagacaggttgggatgctctttctgcctatcaaggctaatttttagtccttctagactcagaaaaaccaccaaaaccctggattacattcgcctgtctgttttgtttatctagagtgtagtctccttattagaagaaaggaaaaaaaagcagaggccaaagaagtcttgtgtctgctgatgagagcaccactcatctgcgaaacgcacgtaaaacaaagtgaaccgtgactgttaaactagggatgggaaattctgcatcttggggggctgtacatttatttatttagttgaagattcactgatcccactttgaaatacatctttttacctaaaacaag

SEQ ID NO: 2700 - DNA, 384 bp, Homo sapiens
  misc_feature (54)..(54): n is a, c, g, or t
aaattcaggaaatagatatgaccgcgattatggccttagcaacggggcgagatncgagggtctctgcggtgtcgggaaatcagagggtggcctctcttctaattgatgctggggccaatgtgaatgtgaaggacagaaatggaaagacgccccttatgagtgtagtctccttattagaagaaaggaaaaaaaagcagaggccaaagaagtcttgtgtctgctgatgagagcaccactcatctgcgaaacgcacgtaaaacaaagtgaaccgtgactgttaaactagggatgggaaattctgcatcttggggggctgtacatttatttatttagttgaagattcactgatcccactttgaaatacatctttttacctaaaacaag

SEQ ID NO: 2701 - DNA, 506 bp, Homo sapiens
tgtcacacagataaatatgagtcacaggagtttgttgtacatagtattacatcacccagaaatcatgccaccctcaaagcctcatccacctgtcgtgggcaaagtgactcatcacagcattgaattatactgggatctggaaaagaaagccaaacgccaaggacctcaagagcagtggttcaggttctcgattgaagaagaagaccccaaaatgcacacttatggtatcatttatacgggatatgcaacgaagcatgttgttgaaggtctggaaccaaggacgctgtacagatttcgcctgaaggtcaccagcccctctggggagtgtgagtacagcccactcgtctcagtgtctacaaccagagagcccataagtagtgagcacttgcaccgggctgtcagtgtgaatgatgaagatttgctggtccgaatacttcaaggagggtgagagaactctgtcagttgttttttttcccccatgcctataaagtgcatagaaatacatg

SEQ ID NO: 2702 - DNA, 362 bp, Homo sapiens
atgtgagtcattgtgacatcaccagccagaattgctgggattcagtgagatgactcacagtaagagaaatcatgccaccctcaaagcctcatccacctgtcgtgggcaaagtgactcatcacagcattgaattatactgggatctggaaaagaaagccaaacgccaaggacctcaagagcagtggttcaggttctcgattgaagaagaagaccccaaaatgcacacttatggtatcatttatacgtaggtgcagtgttgaattgcttgccactttgccttacttcctgattagctggaatgatttctgttgtctctaaaaagccactgcttgtttcaaattaaagaatgagtcagcatcatt

SEQ ID NO: 2703 - DNA, 1424 bp, Homo sapiens
ccctttagttctgcggcatttcgcctccgggttgtcagggcaaccgtagcgacgccggccctggctgagaggcgttaggagtccgggggttcgcccgcggaggccggggagcagccgaccatggagccccagaaaatcatgccaccctcaaagcctcatccacctgtcgtgggcaaagtgactcatcacagcattgaattatactgggatctggaaaagaaagccaaacgccaaggacctcaagagcagtggttcaggttctcgattgaagaagaagaccccaaaatgcacacttatggtatcatttatacgggatatgcaacgaagcatgttgttgaaggtctggaaccaaggacgctgtacagatttcgcctgaaggtcaccagcccctctggggagtgtgagtacagcccactcgtctcagtgtctacaaccagagagcccataagtagtgagcacttgcaccgggctgtcagtgtgaatgatgaagatttgctggtccgaatacttcaaggaggccgtgttaaggttgatgttcccaataagtttggctttaccgctctgatggttgctgcccagaaaggatacaccaggcttgtgaaaatcctagtttctaatggcacagacgtgaatctgaagaatggaagtggcaaggacagtctaatgctggcgtgctatgcgggacacctagatgttgtgaaatatctccgaagacatggcgcttcttggcaggctagagacctgggaggctgtacagctctgcactgggctgcagatggaggccactgcagtgtgattgagtggatgataaaggatggctgtgaggtagacgtcgtggacactggttcaggatggaccccactcatgagagtctctgcggtgtcgggaaatcagagggtggcctctcttctaattgatgctggggccaatgtgaatgtgaaggacagaaatggaaagacgccccttatggtggctgtgttaaataatcatgaagagttagttcagttacttcttgacaaaggggcagatgcaagtgtaaaaaatgagttcggcaaaggtgtcctagaaatggccagagtttttgacagacaggttgggatgctctttctgcctatcaaggctaatttttagtccttctagactcagaaaaaccaccaaaaccctggattacattcgcctgtctgttttgtttatctagagtgtagtctccttattagaagaaaggaaaaaaaagcagaggccaaagaagtcttgtgtctgctgatgagagcaccactcatctgcgaaacgcacgtaaaacaaagtgaaccgtgactgttaaactagggatgggaaattctgcatcttggggggctgtacatttatttatttagttgaagattcactgatcccactttgaaatacatctttttacctaaaacaag

SEQ ID NO: 2704 - DNA, 1246 bp, Homo sapiens
ccctttagttctgcggcatttcgcctccgggttgtcagggcaaccgtagcgacgccggccctggctgagaggcgttaggagtccgggggttcgcccgcggaggccggggagcagccgaccatggagccccagagggatatgcaacgaagcatgttgttgaaggtctggaaccaaggacgctgtacagatttcgcctgaaggtcaccagcccctctggggagtgtgagtacagcccactcgtctcagtgtctacaaccagagagcccataagtagtgagcacttgcaccgggctgtcagtgtgaatgatgaagatttgctggtccgaatacttcaaggaggccgtgttaaggttgatgttcccaataagtttggctttaccgctctgatggttgctgcccagaaaggatacaccaggcttgtgaaaatcctagtttctaatggcacagacgtgaatctgaagaatggaagtggcaaggacagtctaatgctggcgtgctatgcgggacacctagatgttgtgaaatatctccgaagacatggcgcttcttggcaggctagagacctgggaggctgtacagctctgcactgggctgcagatggaggccactgcagtgtgattgagtggatgataaaggatggctgtgaggtagacgtcgtggacactggttcaggatggaccccactcatgagagtctctgcggtgtcgggaaatcagagggtggcctctcttctaattgatgctggggccaatgtgaatgtgaaggacagaaatggaaagacgccccttatggtggctgtgttaaataatcatgaagagttagttcagttacttcttgacaaaggggcagatgcaagtgtaaaaaatgagttcggcaaaggtgtcctagaaatggccagagtttttgacagacaggttgggatgctctttctgcctatcaaggctaatttttagtccttctagactcagaaaaaccaccaaaaccctggattacattcgcctgtctgttttgtttatctagagtgtagtctccttattagaagaaaggaaaaaaaagcagaggccaaagaagtcttgtgtctgctgatgagagcaccactcatctgcgaaacgcacgtaaaacaaagtgaaccgtgactgttaaactagggatgggaaattctgcatcttggggggctgtacatttatttatttagttgaagattcactgatcccactttgaaatacatctttttacctaaaacaag

SEQ ID NO: 2705 - DNA, 1195 bp, Homo sapiens
ccctttagttctgcggcatttcgcctccgggttgtcagggcaaccgtagcgacgccggccctggctgagaggcgttaggagtccgggggttcgcccgcggaggccggggagcagccgaccatggagccccagaaaatcatgccaccctcaaagcctcatccacctgtcgtgggcaaagtgactcatcacagcattgaattatactgggatctggaaaagaaagccaaacgccaaggacctcaagagcagtggttcaggttctcgattgaagaagaagaccccaaaatgcacacttatggtatcatttatacgggatatgcaacgaagcatgttgttgaaggtctggaaccaaggacgctgtacagatttcgcctgaaggtcaccagcccctctggggagtgtgagtacagcccactcgtctcagtgtctacaaccagagagcccataagtagtgagcacttgcaccgggctgtcagtgtgaatgatgaagatttgctggtccgaatacttcaaggaggccgtgttaaggttgatgttcccaataagtttggctttaccgctctgatggttgctgcccagaaaggatacaccaggcttgtgaaaatcctagtttctaatggcacagacgtgaatctgaagaatggaagtggcaaggacagtctaatgctggcgtgctatgcgggacacctagatgttgtgaaatatctccgaagacatggcgcttcttggcaggctagagacctgggaggctgtacagctctgcactgggctgcagatggaggccactgcagtgtgattgagtggatgataaaggatggctgtgaggtagacgtcgtggacactggttcaggatggaccccactcatgagagtctctgcggtgtcgggaaatcagagggtggcctctcttctaattgatgctggggccaatgtgaatgtgaaggacagaaatggaaagacgccccttatgagtgtagtctccttattagaagaaaggaaaaaaaagcagaggccaaagaagtcttgtgtctgctgatgagagcaccactcatctgcgaaacgcacgtaaaacaaagtgaaccgtgactgttaaactagggatgggaaattctgcatcttggggggctgtacatttatttatttagttgaagattcactgatcccactttgaaatacatctttttacctaaaacaag

SEQ ID NO: 2706 - DNA, 1542 bp, Homo sapiens
ccctttagttctgcggcatttcgcctccgggttgtcagggcaaccgtagcgacgccggccctggctgagaggcgttaggagtccgggggttcgcccgcggaggccggggagcagccgaccatggagccccagaggtcttgctctgtcacccaggctggagtatagtggtgcgatcatagctcagtacaccctcgaactcttggactcaagcaatcctctcacctgagcctcctggctagatgtgactacagaaatcatgccaccctcaaagcctcatccacctgtcgtgggcaaagtgactcatcacagcattgaattatactgggatctggaaaagaaagccaaacgccaaggacctcaagagcagtggttcaggttctcgattgaagaagaagaccccaaaatgcacacttatggtatcatttatacgggatatgcaacgaagcatgttgttgaaggtctggaaccaaggacgctgtacagatttcgcctgaaggtcaccagcccctctggggagtgtgagtacagcccactcgtctcagtgtctacaaccagagagcccataagtagtgagcacttgcaccgggctgtcagtgtgaatgatgaagatttgctggtccgaatacttcaaggaggccgtgttaaggttgatgttcccaataagtttggctttaccgctctgatggttgctgcccagaaaggatacaccaggcttgtgaaaatcctagtttctaatggcacagacgtgaatctgaagaatggaagtggcaaggacagtctaatgctggcgtgctatgcgggacacctagatgttgtgaaatatctccgaagacatggcgcttcttggcaggctagagacctgggaggctgtacagctctgcactgggctgcagatggaggccactgcagtgtgattgagtggatgataaaggatggctgtgaggtagacgtcgtggacactggttcaggatggaccccactcatgagagtctctgcggtgtcgggaaatcagagggtggcctctcttctaattgatgctggggccaatgtgaatgtgaaggacagaaatggaaagacgccccttatggtggctgtgttaaataatcatgaagagttagttcagttacttcttgacaaaggggcagatgcaagtgtaaaaaatgagttcggcaaaggtgtcctagaaatggccagagtttttgacagacaggttgggatgctctttctgcctatcaaggctaatttttagtccttctagactcagaaaaaccaccaaaaccctggattacattcgcctgtctgttttgtttatctagagtgtagtctccttattagaagaaaggaaaaaaaagcagaggccaaagaagtcttgtgtctgctgatgagagcaccactcatctgcgaaacgcacgtaaaacaaagtgaaccgtgactgttaaactagggatgggaaattctgcatcttggggggctgtacatttatttatttagttgaagattcactgatcccactttgaaatacatctttttacctaaaacaag

SEQ ID NO: 2707 - DNA, 1629 bp, Homo sapiens
atgtgagtcattgtgacatcaccagccagaattgctgggattcagtgagatgactcacagtaagaggtcagtgtctggttcagtagttccttcttccacatgtatccctcagtatctagaaccctgaaattggtttctctaagaaaaccaagaggcccataagggtaatgtatactgttgatttttatggttatttttcaaaaactaatattttaaacatatcaaaattatttcaaatggtaatgtactcaatgtaccatttggtttaagatgttaacattttgccatatatgtcataaagtcttttcatgaagaaatcaaaccttacaaatatactgaaatcatgccaccctcaaagcctcatccacctgtcgtgggcaaagtgactcatcacagcattgaattatactgggatctggaaaagaaagccaaacgccaaggacctcaagagcagtggttcaggttctcgattgaagaagaagaccccaaaatgcacacttatggtatcatttatacgggatatgcaacgaagcatgttgttgaaggtctggaaccaaggacgctgtacagatttcgcctgaaggtcaccagcccctctggggagtgtgagtacagcccactcgtctcagtgtctacaaccagagagcccataagtagtgagcacttgcaccgggctgtcagtgtgaatgatgaagatttgctggtccgaatacttcaaggaggccgtgttaaggttgatgttcccaataagtttggctttaccgctctgatggttgctgcccagaaaggatacaccaggcttgtgaaaatcctagtttctaatggcacagacgtgaatctgaagaatggaagtggcaaggacagtctaatgctggcgtgctatgcgggacacctagatgttgtgaaatatctccgaagacatggcgcttcttggcaggctagagacctgggaggctgtacagctctgcactgggctgcagatggaggccactgcagtgtgattgagtggatgataaaggatggctgtgaggtagacgtcgtggacactggttcaggatggaccccactcatgagagtctctgcggtgtcgggaaatcagagggtggcctctcttctaattgatgctggggccaatgtgaatgtgaaggacagaaatggaaagacgccccttatggtggctgtgttaaataatcatgaagagttagttcagttacttcttgacaaaggggcagatgcaagtgtaaaaaatgagttcggcaaaggtgtcctagaaatggccagagtttttgacagacaggttgggatgctctttctgcctatcaaggctaatttttagtccttctagactcagaaaaaccaccaaaaccctggattacattcgcctgtctgttttgtttatctagagtgtagtctccttattagaagaaaggaaaaaaaagcagaggccaaagaagtcttgtgtctgctgatgagagcaccactcatctgcgaaacgcacgtaaaacaaagtgaaccgtgactgttaaactagggatgggaaattctgcatcttggggggctgtacatttatttatttagttgaagattcactgatcccactttgaaatacatctttttacctaaaacaag

SEQ ID NO: 2708 - DNA, 1318 bp, Homo sapiens
ccctttagttctgcggcatttcgcctccgggttgtcagggcaaccgtagcgacgccggccctggctgagaggcgttaggagtccgggggttcgcccgcggaggccggggagcagccgaccatggagccccagaaaatcatgccaccctcaaagcctcatccacctgtcgtgggcaaagtgactcatcacagcattgaattatactgggatctggaaaagaaagccaaacgccaaggacctcaagagcagtggttcaggttctcgattgaagaagaagaccccaaaatgcacacttatggtatcatttatacgggatatgcaacgaagcatgttgttgaaggtctggaaccaaggacgctgtacagatttcgcctgaaggtcaccagcccctctggggagtgtgagtacagcccactcgtctcagtgtctacaaccagagagcccataagtagtgagcacttgcaccgggctgtcagtgtgaatgatgaagatttgctggtccgaatacttcaaggaggccgtgttaaggttgatgttcccaataagtttggctttaccgctctgatggttgctgcccagaaaggatacaccaggcttgtgaaaatcctagtttctaatggcacagacgtgaatctgaagaatggaagtggcaaggacagtctaatgctggcgtgctatgcgggacacctagatgttgtgaaatatctccgaagacatggcgcttcttggcaggctagagacctgggaggctgtacagctctgcactgggctgcagatggaggccactgcagtgtgattgagtggatgataaaggatggctgtgaggtagacgtcgtggacactggttcaggatggaccccactcatgagagtctctgcggtgtcgggaaatcagagggtggcctctcttctaattgatgctggggccaatgtgaatgtgaaggacagaaatggaaagacgccccttatggtggctgtgttaaataatcatgaagagttagttcagttacttcttgacaaaggggcagatgcaagtgtaaaaaatgagttcggcaaaggtgtcctagaaatggccagagtttttgacagacagagtgtagtctccttattagaagaaaggaaaaaaaagcagaggccaaagaagtcttgtgtctgctgatgagagcaccactcatctgcgaaacgcacgtaaaacaaagtgaaccgtgactgttaaactagggatgggaaattctgcatcttggggggctgtacatttatttatttagttgaagattcactgatcccactttgaaatacatctttttacctaaaacaag

SEQ ID NO: 2709 - DNA, 1583 bp, Homo sapiens
ccctttagttctgcggcatttcgcctccgggttgtcagggcaaccgtagcgacgccggccctggctgagaggcgttaggagtccgggggttcgcccgcggaggccggggagcagccgaccatggagccccagaaaatcatgccaccctcaaagcctcatccacctgtcgtgggcaaagtgactcatcacagcattgaattatactgggatctggaaaagaaagccaaacgccaaggacctcaagagcagtggttcaggttctcgattgaagaagaagaccccaaaatgcacacttatggtatcatttatacgggatatgcaacgaagcatgttgttgaaggtctggaaccaaggacgctgtacagatttcgcctgaaggtcaccagcccctctggggagtgtgagtacagcccactcgtctcagtgtctacaaccagagagcccataagtagtgagcacttgcaccgggctgtcagtgtgaatgatgaagatttgctggtccgaatacttcaaggaggccgtgttaaggttgatgttcccaataagtttggctttaccgctctgatggttgctgcccagaaaggatacaccaggcttgtgaaaatcctagtttctaatggcacagacgtgaatctgaagaatggaagtggcaaggacagtctaatgctggcgtgctatgcgggacacctagatgttgtgaaatatctccgaagacatggcgcttcttggcaggctagagacctgggaggctgtacagctctgcactgggctgcagatggaggccactgcagtgtgattgagtggatgataaaggatggctgtgaggtggctcacctgatgcttctgaagcccatgggaaggacttgagagccaatcaccaccttcttcccaaatgtagacgtcgtggacactggttcaggatggaccccactcatgagagtctctgcggtgtcgggaaatcagagggtggcctctcttctaattgatgctggggccaatgtgaatgtgaaggacagaaatggaaagacgccccttatggtggctgtgttaaataatcatgaagagttagttcagttacttcttgacaaaggggcagatgcaagtgtaaaaaatgaggtaaatgagtccatctttatgtaaagattttcctcggagggggagaaaacatttataagcatgtaaaatttttgttgtttcctgtttcagttcggcaaaggtgtcctagaaatggccagagtttttgacagacaggttgggatgctctttctgcctatcaaggctaatttttagtccttctagactcagaaaaaccaccaaaaccctggattacattcgcctgtctgttttgtttatctagagtgtagtctccttattagaagaaaggaaaaaaaagcagaggccaaagaagtcttgtgtctgctgatgagagcaccactcatctgcgaaacgcacgtaaaacaaagtgaaccgtgactgttaaactagggatgggaaattctgcatcttggggggctgtacatttatttatttagttgaagattcactgatcccactttgaaatacatctttttacctaaaacaag

SEQ ID NO: 2710 - DNA, 1479 bp, Homo sapiens
atgtgagtcattgtgacatcaccagccagaattgctgggattcagtgagatgactcacagtaagaggtcagtgtctggttcagtagttccttcttccacatgtatccctcagtatctagaaccctgaaattggtttctctaagaaaaccaagaggcccataaggaaatcatgccaccctcaaagcctcatccacctgtcgtgggcaaagtgactcatcacagcattgaattatactgggatctggaaaagaaagccaaacgccaaggacctcaagagcagtggttcaggttctcgattgaagaagaagaccccaaaatgcacacttatggtatcatttatacgggatatgcaacgaagcatgttgttgaaggtctggaaccaaggacgctgtacagatttcgcctgaaggtcaccagcccctctggggagtgtgagtacagcccactcgtctcagtgtctacaaccagagagcccataagtagtgagcacttgcaccgggctgtcagtgtgaatgatgaagatttgctggtccgaatacttcaaggaggccgtgttaaggttgatgttcccaataagtttggctttaccgctctgatggttgctgcccagaaaggatacaccagtctaatgctggcgtgctatgcgggacacctagatgttgtgaaatatctccgaagacatggcgcttcttggcaggctagagacctgggaggctgtacagctctgcactgggctgcagatggaggccactgcagtgtgattgagtggatgataaaggatggctgtgaggtagacgtcgtggacactggttcaggatggaccccactcatgagagtctctgcggtgtcgggaaatcagagggtggcctctcttctaattgatgctggggccaatgtgaatgtgaaggacagaaatggaaagacgccccttatggtggctgtgttaaataatcatgaagagttagttcagttacttcttgacaaaggggcagatgcaagtgtaaaaaatgaggtaaatgagtccatctttatgtaaagattttcctcggagggggagaaaacatttataagcatgtaaaatttttgttgtttcctgtttcagttcggcaaaggtgtcctagaaatggccagagtttttgacagacaggttgggatgctctttctgcctatcaaggctaatttttagtccttctagactcagaaaaaccaccaaaaccctggattacattcgcctgtctgttttgtttatctagagtgtagtctccttattagaagaaaggaaaaaaaagcagaggccaaagaagtcttgtgtctgctgatgagagcaccactcatctgcgaaacgcacgtaaaacaaagtgaaccgtgactgttaaactagggatgggaaattctgcatcttggggggctgtacatttatttatttagttgaagattcactgatcccactttgaaatacatctttttacctaaaacaag

SEQ ID NO: 2711 - DNA, 926 bp, Homo sapiens
ccctttagttctgcggcatttcgcctccgggttgtcagggcaaccgtagcgacgccggccctggctgagaggcgttaggagtccgggggttcgcccgcggaggccggggagcagccgaccatggagccccagaaaatcatgccaccctcaaagcctcatccacctgtcgtgggcaaagtgactcatcacagcattgaattatactgggatctggaaaagaaagccaaacgccaaggacctcaagagcagtggttcaggttctcgattgaagaagaagaccccaaaatgcacacttatggtatcatttatacgggatatgcaacgaagcatgttgttgaaggtctggaaccaaggacgctgtacagatttcgcctgaaggtcaccagcccctctggggagtgtgagtacagcccactcgtctcagtgtctacaaccagagagcccataagtagtgagcacttgcaccgggctgtcagtgtgaatgatgaagatttgctggtccgaatacttcaaggaggccgtgttaaggttgatgttcccaataagtttggctttaccgctctgatggttgctgcccagaaaggatacaccaggcttgtgaaaatcctagtttctaatggcacagacgtgaatctgaagaatggaagtggcaaggacagtctaatgctggcgtgctatgcgggacacctagatgttgtgaaatatctccgaagacatggcgcttcttggcaggctagagacctgggaggctgtacagctctgcactgggctgcagatggaggccactgcagtgtgatctcgtgttgctatggctgtggtgtaggtcagcggctgcagctgcaattcgacccttgcctgggaacctctatatgccgcaggtacagccctaaaaaagaaaagaaaagaaactttggcagagacagtga

SEQ ID NO: 2712 - DNA, 423 bp, Homo sapiens
ttctttgtctctgagagttagcttcactttgtcagcctgcttctttatactcttcctgtttttcactctgacttactgtgtttataattatcttgggttagtttttcttattgctcatttggaaaaactatcagtacttctgattagtaatttcagatgtttttatattttaattttgtatgcaaaataagtatccgtgatattttaaaaatatttactaagtatttccctagtctttctctaaagggtaatctcaaatgaaacaactggaactggattctcatttgtttaatgactgaagaagtcttccaattactctacaaaccattgataacttttgttatttgtgaccagtattcatctagtaagatgttaaatgcttttatgaaagagacaagtgttttacctaaagaatgagaaaaa

SEQ ID NO: 2713 - DNA, 365 bp, Homo sapiens
atggcaggacagcctgaattagaggttatgtagtctgactttgcatcagcattactgacagaacatgtcaaagatacagattacttcctagaaattccaatttagtaggactgaggaggaatcagagaacttctacttttgggggttgtctggggcataatcccctgttaatacctgttctaacatccaataattccaagtggctggaaaattgttttggaacttacaacaacttgtcattctaaacaacatcccagtgggaagcatcagtgatgttcaagctagtgcctgccttcagtccatcactgagggcatgtagggtgctgagctgcaggcataggcaagtggccaggtatgtagaggtg

SEQ ID NO: 2714 - DNA, 469 bp, Homo sapiens
ataagctaccacacttggccatgagtcatttttaaaaaaacagattccaacaacctttttgattgctgtgtttagaagatttatatttaattttggacgggtttttattatctattttctacttgttccctctgggtttttttatacctgtttcccttttcttgcctttttatggggtacttagacatttcttagtatgccatttaacttcatatgccgtgctaaatcaattcagtatgccatttagtatatatttttgtataggattttataggtggctgtagagattatattatacatacttatgatcattggctagtatcaaccttttaccaattcaagtggaatgtagaaactctactgctttctaggcccctctgcccttctttatggtattgttgtcttgaatatcacctctacattcattgagaaccactgagataatgttatggttttgcttttgcccatc

SEQ ID NO: 2715 - DNA, 322 bp, Homo sapiens
gcagcaacagttctcaaatttattattttagctgttgtgaatatgacttttgttagattcagcataaacagcaaggtatgtagtgatttcactaggggagtaaatgctatccaagagtgctattttcctaaatgaattaagttgcaagaaacaaattacatagtgtcccaaagatttaaaaatagagggaactccataaataacagggaggttagtaatagataacctcattctctggcttaaaccataaaggaaataaattggctcaaaggattgtaccctccagaggttagtcatggcttcagcatgatttcattagact

SEQ ID NO: 2716 - DNA, 350 bp, Homo sapiens
ggttgggaagtttcaggagtgaatatcagctgaggtggggatgccctggctcccaacacaattagcttcattctgctacagttgggggttttcttatcattagtcgggaaggcctagccagagaattccagtattccagagcaagtttaattgtgggtgatttcattctgccctttttatgtcgcagccaggggcttgcgtcatataacagtgaattcagggagatttttatttgcatgtgaatcatagcttttccagctgaatgtcacttacttggaatttttgtctgattttgtttttgtttttgtctcttggtgtttttccatcgggctctttggctaaccagaaaa

SEQ ID NO: 2717 - DNA, 346 bp, Homo sapiens
cccattcctgcacttacaacagacactgatcatcagtcacagcactttgccccttgagcacagtcagagccctccctttcagacttctatacagtcattttcaataaactggagatagtacatgagataaaacctatttgccatcctacatatccttaagcaagatgtgaatttcattacaattcaaagactttcttagtgaatagtgcctacataaacagctttttaaaaaactctgggccgggtgctgtggctggctgggtgctgtggctcacacctgtaatcccgaggtgggtggatcacctgaggtcaggagttccagagcagcctggccaacatggcgaaa

SEQ ID NO: 2718 - DNA, 794 bp, Homo sapiens
ataataacataatgaaagccatatctccatgatatatatgtgcacatatatatacatacatgtgcatgtatgtatcatattaaggacccatggtactcttaaaacactgtagaactctgtgacgcagtaaggaaggggcagatttgtacaaaaacttttctagattccatcagcaaaaaccaacacaggtttgtcacgctgcatgtctggccagctaatctcgggggaaaagctacaagttatttattttattttaagagaataaagtaggtaataatttaagggatcaaattcaaggaggaatgtgcaattttagagcaaagatttgtttaaggcaaatgagactttgggagcatcccattccagttttgtcttttttttctctgaaagaaaaaagcaaaaaataaaataaaattccacttataccttctgacaagtccctaaaggtcttgaaataaaaggttctatgcaagtgcaaagttttatagttatttttattgctgattattactattactatctctgttgtcttaagagtatgtgctgatttcagagacatctcaaattgaaagaatatcagattgcttttaaagtagctgaacgagccacagaatatctgaaattattcattgttgttcctccaccaccccctttctcatggtctgatttttagaagagtggcatcctcgttctaaaatgtaatgatcaccaaatacggccttccatcaaatttgtgaaaactacaacagtataacagtgacaaacctaattctctagcccaaacctggtctgac

SEQ ID NO: 2719 - DNA, 427 bp, Homo sapiens
acaatagtaactgcttattgtttaagccattgagatttgaggtagtttgttacacagtaataggtgtgataaatatttcaaactttgtaccctacagaaaatacctattctttttaaatggctgtaaaaatttatgaaattgattctagggttatcataaaggaaccttaatagattctttcaaatagaaactatataaataactttttaaaatcatactgccttaaaactagaaatttgttcctttttaaaaaaagtttaaatataattcaagctacttgataattgaacactcctaactcttggttctttgggggaaaaaggatcattaaagtggacgtgacctatgaattcaatcaaatacaaatgaaaaaattcaatgtgggaaaagggcatacagagaagattgagaatcctatgtagttaa

SEQ ID NO: 2720 - DNA, 458 bp, Homo sapiens
ttgcgtagaatccctaatggtcttagtgcaaaggtctcacagttctttcagagtggtttctcaggtttccttagctggagggagatcagtgcattttcagatgtcagagctggtgctgacaatggagccaaacttggcttttcggaactgaaagtatgcctaatccttaaattccttttggagggtaagaaaggaaggctgaaaggacatcaggaattggagggtaagaaaggaaggctgaaaggacatcaggaattggagggtaagaaaggaaggctgaaaggacatcaggagttgaggtcttgtgtttggtgattggccatgttgcttttcttctgctttagcaagtcgacatttgaacagtaacagagtgtcttaagcaggcttctctaataacttttcatctgtcttgttgggagactgtcagggtgtcaagcttttagaaaaccatacagcac

SEQ ID NO: 2721 - DNA, 504 bp, Homo sapiens
ttgactacggctgcagaagtgttcctttagacaaagttgtgacccattttactctgaataagggcagaaacggttcacatttcattatttgtaaagttacctgctgttagctttcatcatttttattacactcattttatttgtatttaaatgttttaggcaacctaagaacaaatgtaaaagtaaagatgcaggaaaaacgaattgcttggtgttcattactacatgtatatcaagcacagcagtaaaacaacaacaacaaaaaaaaaacatgtatttaactttttttaggtttttttgcttttgtggtttttcttgatacttgcctaacatgcgtgtgctgtaaaaatagttaacagggaaataacttgagatgatggctagctttgtttaatgtcttatgaaattttcaagaacagtccaagcacaattgttaagaacatgtgtattaaattcatgtcagtggaataaaagttttatgaatgcacttttcaactactttct

SEQ ID NO: 2722 - DNA, 501 bp, Homo sapiens
ccatggggagaagggcaaagtgaacagggccacgccttctcgaggagagtgtgtaggccgggctcagtgctggtctaaaggacttctcagaactctccttctctgtccacctgactttctgggctgaggggccacctgaagatgagtctgccctgcctccaagaggtgtcctggagtctgagacctctcatggttactctggaaaagaatgagcactcctttagacctggtccacctgcggcctgtcctgggccaggagctgcccctgcacccttttggagagggaagccagggaccagaccatgctctagggccacacctaccacatggtacagggggacagaaagggtccagtgaaagtgaagtcagccttgacaagcagaaaatgatgtggctcaaacagcagaatccctgtgcatgcagcaggtctgctttataaaacacaagactgagctatttccattagcagccgttctatgtagccctgaacatttttatgca

SEQ ID NO: 2723 - DNA, 294 bp, Homo sapiens
aagcagtgagccttggcgacctgcacatgctgcttattctgcaggcacacagcaagagctgtgaggcatagcagcttccacctagatttcaaaggatgtatcagacagcttgtgggcccacgcagagacttactgcaagggcacaaccactgcagagaacccctctgctagggcaatgctgagtggaaatgtgggaccagagctgctgcagaaagttcccaacagagcagtgcactctggagccgcaggggcaggaccaccctgggacctcagaactgtagagctaccagtatg

SEQ ID NO: 2724 - DNA, 475 bp, Homo sapiens
tcggggatgccaaacacctctatttactcttgttactccagggcgcaccattccaataaaaaacaacattctgaggctgaaaaaacaaaagtgccctgaacgccagccctaagtaaacatcaggggagaagagcagctccgcaggaaggccccatcccggcactgggactgcagcccatccacgaagaactccagcagggctaagaggacagtgtggaggccagacacacccgagtgcaaacagaatgcagaagagcttgcattccagtcaggaagacaacagtcctcagacggggcaaggatggaaagaggacactctagacgttaatgctaaaatgttaatagctaacatttattgcagactgtttgtttccggtgctcttcaagcactttgcattcgtaatgttcacaacagctctatgaggtaggtgctttaggaaggagggaatggaggctccgagaggttaagctactt

SEQ ID NO: 2725 - DNA, 826 bp, Homo sapiens
tgatggcaggcgcctgtaatcctagctacttaggagctgaggcaggagaatcacttgaaaacaggaggcagaggttgcactgagctgagatctctccagtgcactccagcctgggcgacagagcaagcctctgatctcaaaatctcatctcaaagcttggctctgacaccttaacagtcctgtgaccttgggaaaggtacttaactcagagttgtagggattaatgagataacatctggaatgcactccttttccgccctcctcctctttcttcagatcgtccctaacctcccagcttgcccctctgctcttatcacatactgtattgtagcttttatcgtaacaatagttataataacaataaatataactacatgtttggtaatttttcttaatgtgtctggtacctgtctcatctgacagtaaggagcatgtaaacaggattgtgtcttcgaaatgcctagcacttagtgggcattaatgagtatttgctgtatgaatgaatggcagatattaaagtgcctagcccagtattagtggagtttcatctcccctcaccaagtgagaggatgtcagatttttcttacatacacattttctctccccaaataattctcattgtaagcctcactacagtttttatgaaatacctacagaggcagggcatggtggctcacacctgtggtcccagcactttgggaggctaaggcgggcgggatcatgaggtcaggagatcgagaccatcctggctaacacagtgaaaccccatctctaataaaaatacaaaaaattagccaggtgtggtggcgcatgcctgtagtcccag

SEQ ID NO: 2726 - DNA, 342 bp, Homo sapiens
agtgggggagacctcagctttgtaaactcctgtggccctgggtgaccaaacccacaagggctctcagcttcctgtggggaggggctgggaaggcaagtggtccctggggatggagagcactgaggtcatcagtcccttttacctctgcagagggcaaagagagtcccaaagcacagagctgtgcccggttgggggtcaccagagctaggcactctgggggccaaggggtggaaggaggagctggagcaggcgttgaggaagagttagaccctgtggctgtgggcagccagctcccaaaagctaagactagagctacagtagcaggaactgaaattaaactat

SEQ ID NO: 2727 - DNA, 465 bp, Homo sapiens
gtcaccgggcaagcagcgcacgctgtgggcagacactgtcccaagtcttagcctgcgtgaactcactggcgccacaaccccatcgcggttttgtgatcacccctattctacaggaaactaagacacagagaggacaagtcacttgaccaaagtcactgagctggctgggcgcaatggctcacgcctgtaattccagcactttgggaggccgaggcgggtggatcacctgaggtcaggagttcgagaccagcctgaccaacatggtgaaaccccgtctctactaataatacaaaattagccgggcatggtgctgggcacctgtcatccaggctactcgggaggttgaggcgggagaatcacttgaacccaggaggtggaggttgcagtgagccgagatcacatcattgcactccagcctgggcaacaagagtgaaactttgtctcaaaaaaaaccaaaaaaacaac

SEQ ID NO: 2728 - DNA, 458 bp, Homo sapiens
aaatcgctgttcttgttgtttttagatctttgtagtcataattgtccattatgtttaacagcactggagattttgcaagtggaattgggtagatctgttaaggacattcagtcctgtcttctgccaggcattagggtctcttctagcatgtttcactcaatttctccagccaagaaatgtagggttattctttggaaaggggattgtgataagttaggatattttggttgtaagcttcagaatcccatttcaaagttgcataggcaacaagagatatgttgccacccataactgtaacagtcaggggtattcctgggctgggggcaggatgctgcctggactgtgtctcccccgcatgggtatttgattctctataacccaaaccagatttccccatgcaggcagcaacatggcagttggaagctccaggctcccttcttcccggctttgatagcaga

SEQ ID NO: 2729 - DNA, 414 bp, Homo sapiens
accccccccaccctgcctctctcctgtctttctctgtcttccttcccttctcctctccctccctccttctctacttgatttgactctcttactgtcttcctttctgcctccctgtcttcttcccctccttccctgctctctttctcattttagtgagtcactgccttggtccattcatggagccggggccaggggatagatagaaagatgcattaagacacacccttgccctctaggtcctagagaagagatcagggtgcatggggagatcagaatgtgaatagctcattgctacacaggctttccctatcatttggacagtctttctctttcacttaatgaatgaaactgaagggttgttggaggcccaggcttccagtattgaattgacgttggatcctgggaattaaaaaa

SEQ ID NO: 2730 - DNA, 426 bp, Homo sapiens
agtacaaccaactctctaccaaattagggacaaatgctccccggcacaggagcttttgttgttgtttaaagctaatcttaggaatgaccaacataaacagtgtgtgttttccacatgttaggcaatgttctaagtgatttacagccctctaacaaccgtgaaatattaatactattattttctccattttatatgaattaactgggacatagagaagtgacgcagtgtgcccaagttaacacaactgggaagtggaaaagctgttcaggtcctctgtctccagagcccagctcttgctcataacaccttttctacctctcttaaaccagtttattgagtgcctaattggtcctcttagttactttatatgatttatatctaatcctcccaacaatttcctaagcacagctgattatcccctttgag

SEQ ID NO: 2731 - DNA, 266 bp, Homo sapiens
cgaactgtgagttaaacattgaatgacaatatcttgcaaacatccctggaaacttatttttcttctagcaaaaataacaacaatgatattaatggctaagctgtctgtggtgaccctgcctgtaatcccagctactcgggagactgaggcaggaggatcacttgagcccaggaggctgaggcaggagaattgcttgaatgcaggaggcggaggttgcagtgagccgagatcaggccattgcactccagcctgagcagcagagtgag

SEQ ID NO: 2732 - DNA, 329 bp, Homo sapiens
ttttttttttgctaaggagtccggcttacaggaagtgctcaatgttttatttggggaccaggacttaacagggtgaatctggtatgtttggtcaacctcaggatgcaacctaatttttcttcctgactatgatatgccatgaatgtgatgattttcctttcagatgtattgcttataaaataaagaagttaagaactttgtaaggaaaaaagaagaaaagccaaagatatgaacaattgtaagacatatttcaatgtgagaaatattaaaatgtaaataactaacaactcagcatcaataaaatattatttactggccgggcacggtgg

SEQ ID NO: 2733 - DNA, 619 bp, Homo sapiens
aaagagatatagctacaggtaaactagattgaatctgctgtttatgtgttggaagatgacgtttgaagatgagttttagttcttagcaccaatacaacaaatgatgggatttgaggtttaagtgcctaagtttaaggctctcatataataactcttaatttctttttgtgtcgggaaaagaacaaactcttgccttgaattaaccagttattttaaaaaatcatagacttctgtcattagaggaaacggcctgaactccattaccaggtgactttttagctttagtgggtggcacatgggactgtctgtggtgtgccatctgcagtgcgcaagccatttgtttctggaaacagtctcacaagcaatgattctggtgagtttagaaatgaatcaggatgtgctaagctcaatgaggactcattagccttggataatgtgattctataaatgaacagaatggagacggtgaagactcaggagtatagagaaaataggatgacactggaagctaggctgattggtgggagttttggaatcaatgtgcttcaactattagttgattaagcatatagttgaattagtaaagagtgggagacttgccccttgactgtgtgttatt

SEQ ID NO: 2734 - DNA, 406 bp, Homo sapiens
taaaatgtattgcaaaaataggcaaattgtttaattttttctcttgttctctgcttgatcctggcataagccatgttctccaacacactctccacgtctccacctccctagcccagcacgaggccccaacaacatatgtgcacgtactctgacagtgggtggagatgttaagcaaaagcaaagaaaaaaaaatcagtttggacggctggggaaagagatttgggagtcacgggtatatatgagtaaaagtgaacaaaccaggctactttccatgtgcctgctggtcctcttgctattgtgttttcattagccaaacacactttgcaatatgtattaacagacttaataatgccttgctgttgggggatgtgcattatttcaaatgttctgttttgagaataaggaa

SEQ ID NO: 2735 - DNA, 410 bp, Homo sapiens
ccatgttggtcaagctggtctcaaactcctgacctcaggtgatccgcccacctcggcctcccaaagtgttgagattacaggcgtgagccaccgtgcctggcctagaaattttctttattgctatttgaatgctctactcatacttctaagaaaaaaaaagtttattcctttgaacttcataaacagagcttataaatagtcttctctggtaactgtatctaaatatctcacctttccctgtggatctggaaattttccatcagggaatttagctataccaagttttccatcacctctgagaacatcagtgtactccatttgtgtataaccatgggcaaacctctgtaaaatgtgaatttatctttgaaacaggccaaatcttgaaaaacccaaagaaccaacttatccct

SEQ ID NO: 2736 - DNA, 347 bp, Homo sapiens
agatattctcaaatggggttgatataagttggaggtggaagaaggaagcattgctctgaaagtgctggtaccaaaacttactctgtgaagaaaaacaggacttcggcaggatttgactcagaatagagagttctgctatttgttctttaattggctgctgttaaacacttcttcattgtgcttatgagtttagcatgttaatgcttacatgtaaaaactaattgcttaaaatgctggttctgaaattaatcacctaatgcactctttattaagaaggttaaggagagagtctttgacaatgattctagagtctcaaagggaacaaagagtttaaatggaaggacaat

SEQ ID NO: 2737 - DNA, 437 bp, Homo sapiens
aaagaagaatcatcaaagggctgggcatttccttccaagcactctcccccagggactgcccactgggacctctcacctctaacgattctgccttagttggtctggggtgccgcctggacatctgtgttttcagaaagttcccaggacattctaatgggcatccagggtgcgaacttactgagctggtctaaaccatcagttggcagatgaggagatggaggctgtgatttattttaaactatagcccttcatttaaattcctgtcggcctcctcaggaggtttggctaacacagaaatctccagtattctaaaatggagaaacggtgcggtggctcacgccgttgatcgcagcactttgggaagccgaggcgagagatcgcttgaggtcaggagtttgagaccatcctggacaatgtggtaaaaccccatctctatt

SEQ ID NO: 2738 - DNA, 3588 bp, Homo sapiens
agcgggtcgtgcctgtcagcaggggcagagtagcgatcgtcgccaaagcgcgcggttttatttctctccgctttggacggggcaaactagcttttgggagtgaagcgggtacgcagttatccaacaatgtctggtgagtcaggacagcctgaggctggtccctcacatgcagggctagattggccgaaccctgagaggaatcgggctggggtcccgggaggggtgatccgaagagctggttcccaagggcccaggtcctggatccaaaaggttcttgagcagattatggactcacctcgccagtgtgtcaccccctcggaggtggtgcctgtaactgtgctggccgtccagaggtacctgttagaggatgagccacgcgacacggtgcccaagcctcccctttattgctatgatgtgacgatctcagatggggtgtaccaggagaagtgctacctggaccccagcttgaactctctcgtatatcaaaatattcttaaagttggcattcaaatgagaatttccagggtctcatgtctttacaatgagaaaaggataggccaggggatcctgtgcatagataacgtccactgtggggagacttcagacagtatttctttagaaactcccttcagaaatagagcgcaccaggagaaaccagagaggcctttaagaggcgggaagagtcattacctggcgctgtggaataacgaagatccctatggagatatctggttaacagacaagcaacctgaggaacacaactttagcgataccaaaataatttccctttctcatcttgaaatgacctggactaacagaagaaattttcctgcattgcttgtgaggatcttacataaatcaaaactgcgatactatggaaaacctgataaaaagatgattgaaccatatcagacctttttggaagttgctgacagttcaggcacagtgtcagtgattatgtggaatgccctgtgtcctgagtggtataaaagtttgcgggttggtttagttcttctgcttcaagactattctgttaaaaagagttatccattcagaatacagcctgtccccgtggatccacagatcaaactaatttctacaatggaaatctgcctgaatcttcgagatcccccaacaaatataattatcattccagaaaagcaggtgaaaccagaatggagactgccaaagctaaatcaccgatttaccacaaggtcagaactggatgatatgccagaaaattgcatctgtgatgttattggccttttagtttttgtaggaagggtccagcggtcaaaaaagaaagaaaaccgtgaagatttttggtcatatcgctggattcacattgctgacggtacttcagaacaaccatttatagtggaactgttttcaacatcgcagccagaaatctttgaaaatatttacccaatggcatattttgtgtgtacacagttgaaagttgtcagaaatgacaatcaagtacctaagctgctttacctcaccactacaaatgagagtggagtgtttattactggtcatagaggccagccgtatacgtatgatgccaagaatgctaacagaccctcgacctctcaagcagctagagtagaaattcaagaaagaaatggtaaacggcatcaagatgatgagcctgtgaattctcagtatttccaaactacatctacaaatttaagtctgagcaataaaataagaattcttcaaggcccacacgctaatccagttgctgtacctcaaccaggagcttctgtacaaacaaagggaattaaaccgggcatgccaagcatcttcaaccgtcgagcaaatataaatgctaatctgcaagggaaagccagaaaaactataagtgataggtgggagagtcagctgtggagagagaaaaagtttggcttaatagatcacctacactacagccgtgtttatcctgaaagtattccacggaaatttatgtttgaacacagaaagtttcttagtgaccagtataattctcagcctgcgaaatatgtaccaccagaaggaaggcccccaaaacttgatgattttaagagcgcccgaagccttggacattttgaagtaaccatactaggtctgaaccatgagatagcaatcgatgttgctttcctacccatgtattgtccagaagatattcgaacatctcaaatagacacactgttgacctccatgaattacagctgtgcatatccacaggacacaactggaaatgaccgattgccaggtccaagagcggttgcaggtgatattataaaagcagcaactgaactggatagagtgcatatcgtcggtatcttggatatctgtaatttgggtaataataaagtggaagtctatttgcacaagatttatagtccagagaatacttcttaaaagttagcaaatgaaattattacagattatacgagtgtactgctttaaagatattccatcattttgctggtaatttcagtaactgttttcagcaagaatattacatgagctctaaagttattaagcagttttatgttcgttttgtgtttagggagctttttaaaacacttcatttcagattcattattgaaaaaggtcatcaaaataatttttgtgtataagggaatttaccttgcttaccttactagtatgactattatcttgacttctggtaatttatgttcactattccatttgtgaagtgtactttcattctaaagcctcagtataaggcatcctaacttacaagagtaactttccatggacatttaacatccttccaattttattcacatataatgggaaattttgaattgccagtttgaagactgttctcctaaagtgttcaacctgcacttcttacaaccaaggtagtttgtatcattttcaaaagtacacattattagggtctagttgcccctggtccttagcttgctcagctgcaaaataagcgtgctaaattaaattgtcttaaggtttttccacttcattttgtgactttgtgtggttcgaatttctcagtattttaaccagtgtgttgatgttaaagtcaaaggctgcagtatgtctatattcttgctgtactcattggtagtttcagtatatgtaatgtgagtttaaatagtgaaattgtatctcatattaacatttcaaatgctcatattgaaaatggaaaatagtaaacacgggaattgattttattctggttgtctataatacttcattttaaatgtaaatggccactctgcatttgcaaggcccggtggttgacatctgtgtggtttgttagatgagacaaaatgaccattaaatgagtttatagattattctgtatcaagataaatctgattccagttaagctataaacttgtgggattttcttgtagccctatagttctgtgacttcatttgctatacgctttaaatgtgttgagcagcctatgaacctaaagacatactgcagtttgttcataaatgtattcagtcttttattctttataattgtgtgtaaatgttaactaaacagtggattcctctcgtgttacagttttgagtgaattattaaagaagttaaaatgcaataac

SEQ ID NO: 2739 - DNA, 2318 bp, Homo sapiens
agcgggtcgtgcctgtcagcaggggcagagtagcgatcgtcgccaaagcgcgcggttttatttctctccgctttggacggggcaaactagcttttgggagtgaagcgggtacgcagttatccaacaatgtctggtgagtcaggacagcctgaggctggtccctcacatgcagggctagattggccgaaccctgagaggaatcgggctggggtcccgggaggggtgatccgaagagctggttcccaagggcccaggtcctggatccaaaaggttcttgagcagattatggactcacctcgccagtgtgtcaccccctcggaggtggtgcctgtaactgtgctggccgtccagaggtacctgttagaggatgagccacgcgacacggtgcccaagcctcccctttattgctatgatgtgacgatctcagatggggtgtaccaggagaagtgctacctggaccccagcttgaactctctcgtatatcaaaatattcttaaagttggcattcaaatgagaatttccagggtctcatgtctttacaatgagaaaaggataggccaggggatcctgtgcatagataacgtccactgtggggagacttcagacagtatttctttagaaactcccttcagaaatagagcgcaccaggagaaaccagagaggcctttaagaggcgggaagagtcattacctggcgctgtggaataacgaagatccctatggagatatctggttaacagacaagcaacctgaggaacacaactttagcgataccaaaataatttccctttctcatcttgaaatgacctggactaacagaagaaattttcctgcattgcttgtgaggatcttacataaatcaaaactgcgatactatggaaaacctgataaaaagatgattgaaccatatcagacctttttggaagttgctgacagttcaggcacagtgtcagtgattatgtggaatgccctgtgtcctgagtggtataaaagtttgcgggttggtttagttcttctgcttcaagactattctgttaaaaagagttatccattcagaatacagcctgtccccgtggatccacagatcaaactaatttctacaatggaaatctgcctgaatcttcgagatcccccaacaaatataattatcattccagaaaagcaggtgaaaccagaatggagactgccaaagctaaatcaccgatttaccacaaggtcagaactggatgatatgccagaaaattgcatctgtgatgttattggccttttagtttttgtaggaagggtccagcggtcaaaaaagaaagaaaaccgtgaagatttttggtcatatcgctggattcacattgctgacggtacttcagaacaaccatttatagtggaactgttttcaacatcgcagccagaaatctttgaaaatatttacccaatggcatattttgtgtgtacacagttgaaagttgtcagaaatgacaatcaagtacctaagctgctttacctcaccactacaaatgagagtggagtgtttattactggtcatagaggccagccgtatacgtatgatgccaaggtaaaaaactttattcaatggattagaacaaagtctgattccggggaacagaagaatatggttattggtggatattacccctatccaccagtgccagagacattttccaagtatagtagttctattaaaggtactaatgtaattgccagtccttctaaatatgtttatattttatatgtatggcttatgctatttcaattagtcatctttattcttttcttttatgggagtgatctaaagtttagcaacattcaccgataatagctttgtcttaatgcagatctaaaaatatatgtcacgtattttctatatagttttccctatatctcgcatggtgctctaaagattaatactttgatttttatcagactggaagaaaagagaaaacacagatgataaccaactggagatataggttgagtattcctaatccaaaaatccgaaatctgaaatgttccaaaacctgaaacttcttttttttttttgagacggagtctcgctctgtcgcccaggctggagtgcagtggcgggatctcggctcactgcaagctccgcctcccgggttcacgccattctcctgcctcggcctcccaaagtgctgggattacaggcgtgagccaccgcgcccggcctaacctgaaacttcttgagtactgaagtgacactcaaagaactactcattggagcagttcagattttggaattttgcattagggaagctgaactgataagtataatacaaatattcc

SEQ ID NO: 2740 - DNA, 2419 bp, Homo sapiens
tttttttttattttgcaaatgaggggtacagagtggaagcctgtattcaaatttaactgataaaagtattttgcctatttcacaaaattatatagaaggatgccagatataaacacagtgtctcacagttaatgtagtaagtttataattttgtgttgtgaaattacattgcaaatctaattcttatttttatcatttcagttctttaaaacttacaattttcttggacttttttgcagttgagtcgctcttgacagctataagtgaagtcaggaaggagattgaagacttgcagtatagggaacaaaagcgcattgcaattcaggggataattactgctataaagtatatcccccatagcagtgcgactgaaagtgcctcagcatcagaaacacttcggaatgctaacagaccctcgacctctcaagcagctagagtagaaattcaagaaagaaatggtaaacggcatcaagatgatgagcctgtgaattctcagtatttccaaactacatctacaaatttaagtctgagcaataaaataagaattcttcaaggcccacacgctaatccagttgctgtacctcaaccaggagcttctgtacaaacaaagggaattaaaccgggcatgccaagcatcttcaaccgtcgagcaaatataaatgctaatctgcaagggaaagccagaaaaactataagtgataggtgggagagtcagctgtggagagagaaaaagtttggcttaatagatcacctacactacagccgtgtttatcctgaaagtattccacggaaatttatgtttgaacacagaaagtttcttagtgaccagtataattctcagcctgcgaaatatgtaccaccagaaggaaggcccccaaaacttgatgattttaagagcgcccgaagccttggacattttgaagtaaccatactaggtctgaaccatgagatagcaatcgatgttgctttcctacccatgtattgtccagaagatattcgaacatctcaaatagacacactgttgacctccatgaattacagctgtgcatatccacaggacacaactggaaatgaccgattgccaggtccaagagcggttgcaggtgatattataaaagcagcaactgaactggatagagtgcatatcgtcggtatcttggatatctgtaatttgggtaataataaagtggaagtctatttgcacaagatttatagtccagagaatacttcttaaaagttagcaaatgaaattattacagattatacgagtgtactgctttaaagatattccatcattttgctggtaatttcagtaactgttttcagcaagaatattacatgagctctaaagttattaagcagttttatgttcgttttgtgtttagggagctttttaaaacacttcatttcagattcattattgaaaaaggtcatcaaaataatttttgtgtataagggaatttaccttgcttaccttactagtatgactattatcttgacttctggtaatttatgttcactattccatttgtgaagtgtactttcattctaaagcctcagtataaggcatcctaacttacaagagtaactttccatggacatttaacatccttccaattttattcacatataatgggaaattttgaattgccagtttgaagactgttctcctaaagtgttcaacctgcacttcttacaaccaaggtagtttgtatcattttcaaaagtacacattattagggtctagttgcccctggtccttagcttgctcagctgcaaaataagcgtgctaaattaaattgtcttaaggtttttccacttcattttgtgactttgtgtggttcgaatttctcagtattttaaccagtgtgttgatgttaaagtcaaaggctgcagtatgtctatattcttgctgtactcattggtagtttcagtatatgtaatgtgagtttaaatagtgaaattgtatctcatattaacatttcaaatgctcatattgaaaatggaaaatagtaaacacgggaattgattttattctggttgtctataatacttcattttaaatgtaaatggccactctgcatttgcaaggcccggtggttgacatctgtgtggtttgttagatgagacaaaatgaccattaaatgagtttatagattattctgtatcaagataaatctgattccagttaagctataaacttgtgggattttcttgtagccctatagttctgtgacttcatttgctatacgctttaaatgtgttgagcagcctatgaacctaaagacatactgcagtttgttcataaatgtattcagtcttttattctttataattgtgtgtaaatgttaactaaacagtggattcctctcgtgttacagttttgagtgaattattaaagaagttaaaatgcaataac

SEQ ID NO: 2741 - DNA, 300 bp, Homo sapiens
cccatcattccttttacattactgtctcctacatgaacagatctggactcttgggctgcagagaaaggaaagcattcattcagcgttcattccactaacatggactaagcaccttccacgagcctggcactgggggcagactcagagattgtagtttcatgggggaggcagagcagtaaaaaaaagaaattacagtatagtgtggcaagtgctattttctcagctgtaaaaagatataatagtggtacttacctcaaggattacaataagaaataaataagttagtatttgtaaactgct

SEQ ID NO: 2742 - DNA, 453 bp, Homo sapiens
ctcttacactgcacacattataaagcatttcatgctctttaaaactgttatacagcctttttactcgaaggtaataaacctacagctctctcctggcgagaaagagattccattttgcggaaacagattccagtcaaaatcttaccacattcccctcaactatgggtatgagcctaaaccaatgagaagctccttggtgcatgtgtaatggtctccaagaattacaacaacatcctacccggaggaccacaaccacgacaccactggctttaaaatcaaagcctggtccctagcgaagaaagcgctttaatgtgctcctcccgctcccgggtgcgagattcctgcccagctactaggccacgactgaaagcacaactgctgtagggggaaaacgcaacagcgccatcgcgaataacagcgaagaggaacagcgggaaaacacaaggggcggcc

SEQ ID NO: 2743 - DNA, 217 bp, Homo sapiens
atagtttgaggtcttacatttaaatctttaatctatctattgttaatttttgaaaggtatgatccagtttcattcttccacatgttgctagctagccatcccaacactattgaatagggagtcctttccccattgcttttttgttgttgttgattttcttgaatataagatggttgtgcagctttatatctggtttttctattctattcccattggt

SEQ ID NO: 2744 - DNA, 2545 bp, Homo sapiens
cgatttgtaaaacctccgtgtccccgcgcgtttttatatatggtgggaaacaccagccgcattttcggcccaggtttctttgggacaccggctatgcacactggtgcaccataaccacaatgcggcccggcgccccaccaagagtgttgtaaaaaacgttcttctcggcgtccgatgcgcgtccgcaacacgttttttgttgatgagttagttgacgttgctcttcttggactgaagatggggtctccctatgttgcccaggctggtcttgagctcctgggctcaagaaatccttccacctcgggctcccaaagtgctgagattacagggtgtgagctaccgcacccagccatgaaaacttctgtaaatcttaactatcgtgttctgcttaaagtgaggtacacataaagtttcctgtgctttgtttttgtaggaaaaagtacatagtttgtatctttaccttacggagtctatgagatttgagaatttgatttcactttttgtaacttaacccacagaaaaggacattaacttagcagataggaccaaggactgaatgacttctgacaaaaagcgtttggtctatccttcacttgttgagctacaaccatgcattacacttctcagctgagctctcaaagagctctatgccctgtgaaaagcagtggctgagttggatgaacacatagcattattaattttgcactgggaaaacagattatgacaggaccacagaccacaatataaaaacttggcagttctttggtgtgatatattttaattagtatttgcaaataatcagagttacttgtgtacataaacgtgtgtttcacaactatggccagatgcaaccttttggtctgtttcaggaaaagacctattattccactaacaattatgctgccttagaaacataatgggagtgtaattgaagaaagcatgtctcagaaggttttgatatgcagaactggaagctattgtaattcctacatacatttccattagctatgccttatgtaatgtgagtgcagatttttacaacttagagttcccatcagtgtttttttgccacatcaccgggtttcttattttactgttttcttttcaactttgggtgctttatttccattctctaaaactaagtttcttgctcttacgagacttagtgttccttttgaacccaggtgttccacctgacagtgtttgtctttcatagactttccagaatagacatagtcaagatcagacacgtgagcttctctctcattttaatgtgaggaaaatcatctttcagagacaaggcaccgcttagaaatgtatgtccaggtatgaaagaacctttttaaaatggctggttgttccagatccagatttctctgcacactggacttcgtagagtaagtgtggtagacaaagagactacactgcacaaccaccagtgaatatcattgctaagaagactttgggtcgtgtttctcagccactctcacagcttttgtagacttatttgattttgaaacaagcagttagctaaatctattttccttttatgcatatatgttaattggctcaacttaatatggtgttcttacagaatatgagcccatttgaaataaggttttaggcaattttgctgttggctctgatttgtatatagcaaatttaaagttacagagtgtttcctagatagaagattagttcatttggttcattttgtctttgaagcaagccaagctcatgagccagttggttatttgtcataaatgaacacccatcactatatgctatgttgaggggaggcaagtctgatcttcgaataattgataaagtttaatatctttgtagccaaaatacaatttgcaaaccctaactccagatgtgtcgtatgaatcttgacaaccaggtcttgagatttgttttactgattgccaatcaggtatattatttgtgatgttcgtgggagcatgcaaattagaagacagtgttgtgggagttcctcagtattgaattacatgtgtgcactcaggcctgccagtcactgaattctgacttgtaaagggtttaacctgctgttccaatcattgaggaccaatttgctttttgataagattggaaaacatttatggagactttcccagttaaatctatgacagtgtccacttaaatagtgcaatttagtatattctcagataactgcaacacaaaattgaaatgtgccagtatgtcatctttctacctggaagatactgtatatttggaaagtttatgcttctctcaataaatacatgttattaaataagccatatcacagtttaagaaattgtatatactttatcatatgccctttcagaaaccaggtattttgcatatgattgattttagaaagattttgaagctggggtttgtccatgttaattaagatcaaagtatatatatatatatatatatgtgctgtatttgcaactttcacattgtaatttcctatacacttattaaagtattgttttgccatgtggtttattaaataaaaatgtacagtctctta

SEQ ID NO: 2745 - DNA, 2684 bp, Homo sapiens
cgatttgtaaaacctccgtgtccccgcgcgtttttatatatggtgggaaacaccagccgcattttcggcccaggtttctttgggacaccggctatgcacactggtgcaccataaccacaatgcggcccggcgccccaccaagagtgttgtaaaaaacgttcttctcggcgtccgatgcgcgtccgcaacacgttttttgttgatgagttagttgacgttgctcttcttggactgaagatggggtctccctatgttgcccaggctggtcttgagctcctgggctcaagaaatccttccacctcgggctcccaaagtgctgagattacagggtgtgagctaccgcacccagccatgaaaacttctgtaaatcttaactatcgtgttctgcttaaagtgaggtacacataaagtttcctgtgctttgtttttgtaggaaaaagtacatagtttgtatctttaccttacggagtctatgagatttgagaatttgatttcactttttgtaacttaacccacagaaaaggacattaacttagcagataggaccaaggactgaatgacttctgacaaaaagcgtttggtctatccttcacttgttgagctacaaccatgcattacacttctcagctgagctctcaaagagctctatgccctgtgaaaagcagtggctgagttggatgaacacatagcattattaattttgcactgggaaaacagattatgacaggaccacagaccacaatataaaaacttggcagttctttggtgtgatatattttaattagtatttgcaaataatcagagttacttgtgtacataaacgtgtgtttcacaactatggccagatgcaaccttttggtctgtttcaggaaaagacctattattccactaacaattatgctgccttagaaacataatgggagtgtaattgaagaaagcatgtctcagaaggttttgatatgcagaactggaagctattgtaattcctacatacatttccattagctatgccttatgtaatgtgagtgcagatttttacaacttagagttcccatcagtgtttttttgccacatcaccgggtttcttattttactgttttcttttcaactttgggtgctttatttccattctctaaaactaagtttcttgctcttacgagacttagtgttccttttgaacccaggtgttccacctgacagtgtttgtctttcatagactttccagaatagacatagtcaagatcagacacgtgagcttctctctcattttaatgtgaggaaaatcatctttcagagacaaggcaccgcttagaaatgtatgtccaggtatgaaagaacctttttaaaatggctggttgttccagatccagatttctctgcacactggacttcgtagagtaagtgtggtagacaaagagactacactgcacaaccaccagtgaatatcattgctaagaagactttgggtcgtgtttctcagccactctcacagcttttgtagacttatttgattttgaaacaagcagttagctaaatctattttccttttatgcatatatgttaattggctcaacttaatatggtgttcttacagaatatgagcccatttgaaataaggttttaggcaattttgctgttggctctgatttgtatatagcaaatttaaagttacagagtgtttcctagatagaagattagttcatttggttcattttgtctttgaagcaagccaagctcatgagccagttggttatttgtcataaatgaacacccatcactatatgctatgttgaggggaggcaagtctgatcttcgaataattgataaagtttaatatctttgtagccaaaatacaatttgcaaaccctaactccagatgtgtcgtatgaatcttgacaaccaggtcttgagatttgttttactgattgccaatcaggtatattatttgtgatgttcgtgggagcatgcaaattagaagacagtgttgtgggagttcctcagtattgaattacatgtgtgcactcaggcctgccagtcactgaattctgacttgtaaagggtttaacctgctgttccaatcattgaggaccaatttgctttttgataagattggaaaacatttatggagactttcccagttaaatctatgacagtgtccacttaaatagtgcaatttagtatattctcagataactgcaacacaaaattgaaatgtgccagtatgtcatctttctacctggaagatactgtatatttggaaagtttatgcttctctcaataaatacatgttattaaataagccatatcacagtttaagaaattgtatatactttatcatatgccctttcagaaaccaggtattttgcatatgattgattttagaaagattttgaagctggggtttgtccatgttaattaagatcaaagtatatatatatatatatatatgtgctgtatttgcaactttcacattgtaatttcctatacacttattaaagtattgttttgccatgtggtttattaaataaaaatgtacagtctcttaaatatctgctctttttattaagtaatattagtaggcctaaaaacattgttcttaaaagaaaatcttttataattataatgtcattttataatgccctcttatatgtttaagaaataaaactgaaaaaaatcttaaaaaa

SEQ ID NO: 2746 - DNA, 487 bp, Homo sapiens
gaggtcaggagttcgagatcagcctggccaacatggtaaaaccccgtctctacgaaaaatacaaaaattagccgggtgtggtggtgggcagctgtaatcccagctactcgggaggctgaggcacaagaatcacttgaacccaggaggtggaggttgcagtgagctgagactgtgccactgcactccagcctgggcgccagagccagactccctgcatcttgcgtggagattgcagtggtgccatctcagcttactacaacctccccctctgtgtgatatgcagtgagaggtttctcacccaagacccacctgctgtctcacatgtaggggacatgctctggactcctgtcctggggaagaaggggcaggagagagagctgtggggaaagtggctgaggtcttttttctgcccagggtgactgggccacattcagggcttggatggtgctgagttcaagggaaagtgcgtccccgacagttgcccttc

SEQ ID NO: 2747 - DNA, 447 bp, Homo sapiens
tgattattgtataactccccatttctaaaatataaatatacggagagatagatatatgtgagatagattttattacttagtttgcagtaggaaaccaaggtccttagcagctatgtatttgcccttggtcacatcaccaagaaataacagagctagatagaagttgattccaaatcagactagtattgtattttctgtttctgaaaatagtgtttaatgtacatcagtcctgaagatatggcagttgtgtttttctttgtacaatcacattcctttttttttcaggtaatatgatgcaagcacacatagaaaagtaccaaggcagcttaagttatcacttataagcagaatgtgaaatgtcacatctcaagaaatatcaggctgtctcagaggaacactttgaagacagtagccactcaactttctcacttacctttgcatactctg

SEQ ID NO: 2748 - DNA, 297 bp, Homo sapiens
ccctaactataagtggataggaaattgttattcacctggataattggaaaaagaggaaacatatgctagaagtctccaccatagtgaaagattcattcagaaaatactcttacaaaatatagtgctacatcatctgttgcaagtgttcactttttttacgtcccattttaaacatggcagctaatagttattttttaagccattttccttttgctcttaagcatccaacacaactatgtttcccagcttcctttttggttaggtatgtcaaagtgactgattctgaccaacagaata

SEQ ID NO: 2749 - DNA, 418 bp, Homo sapiens
ttaaaattggaaacagatgacacacttacattatgttttatttgattacaaaaatgtggcagggatcaaggaaagaacaagttataatgcagaagccccatgctgccagccccgttgctgttatcgccataaaaaaatgatgtgaggatttattctggacagagagacaagcagatccttaagaagagcagtgacctttagtaaagtgagcatagctggcttgaggaaattactacagcaggggaaaataaaataaatacccaatcctcatgatttactcccccttcctatgtccagctttggatccctgtaagccagttctttttttttgagatggagtctcactctgtcgcccaggctggagtgcagtggcgcaatctcggctcactgaaacctccgcctcccgggttcacaccat

SEQ ID NO: 2750 - DNA, 777 bp, Homo sapiens
tctctattcattttttttgaaaagtaccaatggaggatcagaaaggttaaattagaaaaacatctagttgaatccccctgtttttaaatagatggggaaaacccaagaccccagagaatataatcccaaagctaccctgtcacataggcccacaatttcttttcccaatattctgttcttcgctgttccttctaatttgcagaactccctctttaaaaaacctttggagaatgtattggcctcataccctcttccttcagcctgaaagacatgcacctgtcacttatttatgatatttaaatgcaacctctagaacaggggtgtccaatcttctggcttccctgggccacattggaagaagaaatgtcctgggccacacataaaatacactaatgatagccgatgaacttaaaaaaaattgcaaaaaaaaaatctcgtaatgttttcagaaagtttacaaatttgtgatgggctgcatccaaagccctgggccacgtgcagcccgcaggccctgggttggaaaagcttgctctagaaggtactcattgtttgagtgtccagttttctccctgttttccttatttattgatcattttgcatttggaattggtggtttgggcttgtaagtaagaactgtgtactagaacttttgtggtattgcaaatgttttatatctgtgctatccaatgtggtggttataggcaccagctgcctgtggctaattattaagcaactgaaatgcagctagtggtgagcagtaacgttgtggagaagaaa

SEQ ID NO: 2751 - DNA, 299 bp, Homo sapiens
ttatggaaacaaaaactagtaatcccatcactcaagaaataactactgtcaacattttaaacatttttgtgctttgtctttccttcatgtatacatacacaattttcttttagtatgtttggaattgaactagtaattacttttctgtttacttttttacattcaactacatcataagcagtgtctcatgatactaaatatttgaatattactttaatgactacataatattgaaaatatataggtgattagaagtattttctctgccagacgcggggactcacacctataatcccagc

SEQ ID NO: 2752 - DNA, 590 bp, Homo sapiens
agtgaccttatttaattctcgtagtttttctgaatcttggttattttttctgataaatacatactttaccgtgttgttgtacatactaggtaatatatacaagtgcttggtaaacaataaagtcatatacaagtggtagcaataatttaaagcaatattcaaaactcgaagtttagcacacattgtctggaggtaattactcagatgttttgtgggagacatagaaatggacatgtatgtttttaagaaccatgtatttgctgagatggttaaaaaaaaaaaaagaagaaaagaaaagtacatccaaggccaggcatgatggctcatgcctgtaatcccatcattttggaaagtcatggcaggtggatcgcttgagctcaggagtttcagaccatcctgggcaacatggtggaatcctgtttctacaaaaaatacaaaaatgagctatgcatggtgacaaatgcctgtagttccagctacttgggaggctgaggtgggaagatggcttgagccctggaggtggaggttgccgtgagccaagacagcatcagtgcactccaccatggtcgacggagctagaccatatctca

SEQ ID NO: 2753 - DNA, 273 bp, Homo sapiens
cacttgtgcacacaatctgggagacttggagatagagccaccccacctgccacgactgatgcccatgcacaccttgtgggcacctgaggatagggctctctttgcctactgccacctgcacacaatctccagggttctggagattggtctactatacccaccactactgtcactcacaaatgtcatccagtggcataaggacagaccattcctgctcaccactggcaaatgtgcacatatcccagaatcccaaggactggcctgctcagccca

SEQ ID NO: 2754 - DNA, 151 bp, Homo sapiens
atgaaaaacataaaattgccatcttaaacattttcaagtacagtctagtggagctaagtacatttacattattttgcaatggatctttagattaattttatcttacgaaagtaaaatgtaataataaataaactgcccttttcctctcttc

SEQ ID NO: 2755 - DNA, 821 bp, Homo sapiens
caaaactctgtctcaaaaaatatatatatatccctaaaactacctcagttgaagaattcaaagtgcaaaataacttttcttaggattttttaatctattccccccaaaatggtggcttaagtgttctcaaatacataaatatacacatatacgtatatgtatacgttttatatatatatacacacacacgtatgtgtgtatatatatgtatgtacgtatatatatgtattatatatacacacatatgcatatatatatatatatatatatatatatatatatatatataatctcaaagaagtgcggtctgccatttatctgccattttgaggatttaggtactacataaaatattagaaattcatttagaccagatctgtaaactggtagttcacataggccagtttgacccacagttattttattagatgtacataatgtttcaaaaatgtttgaatttgaaaagtcttttgattgggtgtgtgttccccagtttgccacagcctactggacttccctcttatatcagacaacttctctactttgtagttcctgctcagccctgaagacctctaagtttgagacccctgatttagatctgtaattagaaaaaggttctgaatttcatgatttgctaatgtaattactattaagtcattttagcatgtgcattttagagtccttctttgtatttttgtaatgtggtgctttctctcataaagataattgaattgttaacactgtaattgaaattttaaaaatcatttccaaatcttttattatatttcacagtaaaagtctatttaaaaagctaatcattt

SEQ ID NO: 2756 - DNA, 354 bp, Homo sapiens
ttggggggccacttctttcttttcctttccgtttctatctctgtctgtctccgtctctgtctctctctttctcacttgttgccaatgtcttgttgctgagaaggaacactctattcagatgccatccaggaaagaaaggccagatggatggagggtccactgtgtatatttgtacagaatcatttataaagttttctacacttctaaaaaaagtatttctaacttgggctgttggacagtttgtgtgcctctgagccagcaagcctgttgtttcttgtgtttagtgcaatgtttagtgagaaaccaatgtctgaattatttatgccaataaaaaatttgagaattactgcattg

SEQ ID NO: 2757 - DNA, 399 bp, Homo sapiens
tccgtttgcaaatcactgatctggacctgaggtgaccggtctgcagcccacggcccacatgtgtctcctccccaccgccccagcttcacaatggggccatgatataattacaggatgaagaatcagagctgcaccatgttgcctcatggctaacgtatccagaatgtacattttaatggccaaagagcagtgctgttattctcatggacgttattctagtcaataagataggtgatttaagttgtaggggaatccgttttcactagaactgtgtaagatttattgaatgaaatatgactcataaatattttcttttctttttttcttacctttggtctggacttagtcctaactcttttgatggtaaagatcagaagaaacctattcaaacaagctctg

SEQ ID NO: 2758 - DNA, 392 bp, Homo sapiens
aagatctgagacaggtgtgattgagcttcttagaataaacacgtggtaacataaaggttgttacagtaaaaacaaagatgaatgtactataaaatcttcatagtaagatgcaccctgttgtttagtatgtaacaagaaaccattgttgtaatatcctgatgtaaggttatgtttctgaattatattcaaaccaggtggcccctcagttttgaatacttaagaactacagctgtggatttaatgggtttaattaataggaaattcacttcaggttcatccatttgacctctgctacatagccaacagaaattacatagaatgtttctaaaacttccagaaaattcaggctagctttagcattcttcacctagcataggtgaagtcttaattct

SEQ ID NO: 2759 - DNA, 427 bp, Homo sapiens
ctccaaaagaaaagaaatgtcaataaatatttttcaactctttaagccagggtttctgaacgtccaccccactgacatctgggaccaggtaagtctttgttgtcggggcacctgtgtgcattgtaaaatgttcagcagctcctggactctacccactaaatatcagtagcaccctccccacccccagttgtgacagccaaaactgtctccagatattgtcaaatgtaccctgagaggcaaaattactactacattgaaaattactgatttaaatggaaatatctggtgagctagttgttgccttcttacaaaccatttaaaacattcacctctcctcatctcctgagaagaagagtttagtgctttccctgttctaatcttgttttcttagtacagcaaaacacagctatgtagctatttcatgggc

SEQ ID NO: 2760 - DNA, 714 bp, Homo sapiens
taaccaccacctcctatcctttgaccccttgctattcatagaggtggagggtcctcaaaatggcagcattaatatcccctgggagtgtaagaaagctgaagctgcagtttcacaagatcctggggagatttgcatgcacatctgagcatccagtgtcgtcgctgcagcagcccttcatccgttgccgtcactccttttcactgtcagcgctactttgccttcatgtccctttttacccatctcagatgtcctgtcccattttagtgacacttttcaaacaccctttaaaaattaccatcggccgtgtgcggtgtctcacgcctgtaaccccaacactttgggaggccaaggctagtggatcacaaggtcaggagattgagaccatcctggccaatatggtgaaaccccgtctctactaaagatacaggatttagctgggcgtggtggtgggcgcctgtagtcccagctactcatgagtctgaggcgggagagtcgcttgaacctgggaggcggaggtcgcagagagctgagattgcgccactgcactccagactggcgacagagcgagactgtctcaaaaaaaaaaaaaaaaaaattaccatcaactcacttgtttcccttccagttttaacttaactggcaaattttgattatggttgaatttaggtatcttctttgtgcctgtgcctgaacagaaatgtgttagaagagaaa

SEQ ID NO: 2761 - DNA, 444 bp, Homo sapiens
taaccaccacctcctatcctttgaccccttgctattcatagaggtggagggtcctcaaaatggcagcattaatatcccctgggagtgtaagaaagctgaagctgcagtttcacaagatcctggggagatttgcatgcacatctgagcatccagtgtcgtcgctgcagcagcccttcatccgttgccgtcactccttttcactgtcagcgctactttgccttcatgtccctttttacccatctcagatgaggtgtctccagttcatgacacaggtcaatcaccgtcaccactacgatcttcctaggaacgacatatgacgcaatctctcctgaactctacacaacatattttgtctaccaagacccgagttgtaacctacctgttattatgaattcgaacagcagaccccgcgattccgatacgctggtatggattgggggatat

SEQ ID NO: 2762 - DNA, 853 bp, Homo sapiens
gaagatcatactgcattataaatttctgtaactaatagtaatcaacaattgtctattttgttctacccatgcaaacagactctagcactgtccaatcctgtacccactagctacagcacaatttgacaactgaccacttgaaatgtggctactctgaatctaatttcagttaatttaagtgtaaacagccacatgcagctagtggctactgaattgcacagtgcaggtctagactcctaaagcagtgcttctttaccttggtttcataatgggatcacctgtgaagctttacaatacaccgctgcctaggccccttgccagagcaattggattttaatctgtgggcccagaacaaggacgtttaaagagctccccaggtgattttaatacagagagaaacactgctctagtgttccctttatactctccctctcccccatcaattagtaccctcatttcaagaaaaaaagggcagtgtttttgatctgttgatattttatagatacttctaataactttccttatatctatgactggatctataactccaagtattatctgtgtctcttctctcaaattttttgtcactgataaaatagggaatggctaatatatacagtattatctatggaatcataaatatgtattaaaagtagacagaaagaatatcaacttcaggttaatcaagagagggaagaggaacataggtattgaaaaatccaactgtagttaatgttctattgatgtaaaaattcttttttaagtttttactgcttttaattgtagaaataaagagctaaaccatagcataactctttttgcagtgacaattctgttcatatacaggggatgt

SEQ ID NO: 2763 - DNA, 3021 bp, Homo sapiens
  misc_feature (3021)..(3021): n is a, c, g, or t
cctccaggtcctggcgcacagggtgggagcgctgcgctgcgccgcgctgcgcatcgcggcccgcttgccgcctgccccctgccctagctgggccacctccccgggctgccggtggagggctaagaggcgctaacgttacgctgtttccggttttccagcgggctctgtttcccctcccaaggcggcggcggctgagcggcggagccccccaaatggcctggccagatgcggcaggtttgctgctcagcgctgccgccgccgccactggagaagggtcggtgcagcagctacagcgacagcagcagcagcagcagcgagaggagcagcagcagcagcagcagcagcagcgagagcggcagcagcagcaggagcagcagcaacaacagcagcatctctcgtcccgctgcgcccccagagccgcggccgcagcaacagccgcagccccgcagccccgcagcccggagagccgccgcccgttcgcgagccgcagccgccggcggcatgaggcgcgacccggcccccggcttctccatgctgctcttcggtgtgtcgctcgcctgctactcgcccagcctcaagtcagtgcaggaccaggcgtacaaggcacccgtggtggtggagggcaaggtacaggggctggtcccagccggcggctccagctccaacagcacccgagagccgcccgcctcgggtcgggtggcgttggtaaaggtgctggacaagtggccgctccggagcggggggctgcagcgcgagcaggtgatcagcgtgggctcctgtgtgccgctcgaaaggaaccagcgctacatctttttcctggagcccacggaacagcccttagtctttaagacggcctttgcccccctcgataccaacggcaaaaatctcaagaaagaggtgggcaagatcctgtgcactgactgcgccacccggcccaagttgaagaagatgaagagccagacgggacaggtgggtgagaagcaatcgctgaagtgtgaggcagcagccggtaatccccagccttcctaccgttggttcaaggatggcaaggagctcaaccgcagccgagacattcgcatcaaatatggcaacggcagaaagaactcacgactacagttcaacaaggtgaaggtggaggacgctggggagtatgtctgcgaggccgagaacatcctggggaaggacaccgtccggggccggctttacgtcaacagcgtgagcaccaccctgtcatcctggtcggggcacgcccggaagtgcaacgagacagccaagtcctattgcgtcaatggaggcgtctgctactacatcgagggcatcaaccagctctcctgcaaatgtccaaatggattcttcggacagagatgtttggagaaactgcctttgcgattgtacatgccagatcctaagcaaaaagccgaggagctgtaccagaagagggtcctgaccatcacgggcatctgcgtggctctgctggtcgtgggcatcgtctgtgtggtggcctactgcaagaccaaaaaacagcggaagcagatgcacaaccacctccggcagaacatgtgcccggcccatcagaaccggagcttggccaatgggcccagccacccccggctggacccagaggagatccagatggcagattatatttccaagaacgtgccagccacagaccatgtcatcaggagagaaactgagaccaccttctctgggagccactcctgttctccttctcaccactgctccacagccacacccacctccagccacagacacgagagccacacgtggagcctggaacgttctgagagcctgacttctgactcccagtcggggatcatgctatcatcagtgggtaccagcaaatgcaacagcccagcatgtgtggaggcccgggcaaggcgggcagcagcctacaacctggaggagcggcgcagggccaccgcgccaccctatcacgattccgtggactcccttcgcgactccccacacagcgagaggtacgtgtcggccctgaccacgcccgcgcgcctctcgcccgtggacttccactactcgctggccacgcaggtgccaactttcgagatcacgtcccccaactcggcgcacgccgtgtcgctgccgccggcggcgcccatcagttaccgcctggccgagcagcagccgttactgcggcacccggcgccccccggcccgggacccggacccgggcccgggcccgggcccggcgcagacatgcagcgcagctatgacagctactattaccccgcggcggggcccggaccgcggcgcgggacctgcgcgctcggcggcagcctgggcagcctgcctgccagccccttccgcatccccgaggacgacgagtacgagaccacgcaggagtgcgcgcccccgccgccgccgcggccgcgcgcgcgcggtgcgtcccgcaggacgtcggcggggccccggcgctggcgccgctcgcgcctcaacgggctggcggcgcagcgcgcacgggcggcgagggactcgctgtcgctgagcagcggctcgggcggcggctcagcctcggcgtcggacgacgacgcggacgacgcggacggggcgctggcggccgagagcacacctttcctgggcctgcgtggggcgcacgacgcgctgcgctcggactcgccgccactgtgcccggcggccgacagcaggacttactactcactggacagccacagcacgcgggccagcagcagacacagccgcgggccgcccccgcgggccaagcaggactcggcgccactctagggccccgccgcgcgcccctccgccccgcccgccccactatctttaaggagaccagagaccgcctactggagagaaaggaggaaaaaagaaataaaaatatttttattttctataaaaggaaaaaagtataacaaaatgttttattttcattttagcaaaaattgtcttataatactagctaacggcaaaggcgtttttatagggaaactatttatatgtaacatcctgatttacagcttcggn

SEQ ID NO: 2764 - DNA, 3045 bp, Homo sapiens
  misc_feature (3045)..(3045): n is a, c, g, or t
cctccaggtcctggcgcacagggtgggagcgctgcgctgcgccgcgctgcgcatcgcggcccgcttgccgcctgccccctgccctagctgggccacctccccgggctgccggtggagggctaagaggcgctaacgttacgctgtttccggttttccagcgggctctgtttcccctcccaaggcggcggcggctgagcggcggagccccccaaatggcctggccagatgcggcaggtttgctgctcagcgctgccgccgccgccactggagaagggtcggtgcagcagctacagcgacagcagcagcagcagcagcgagaggagcagcagcagcagcagcagcagcagcgagagcggcagcagcagcaggagcagcagcaacaacagcagcatctctcgtcccgctgcgcccccagagccgcggccgcagcaacagccgcagccccgcagccccgcagcccggagagccgccgcccgttcgcgagccgcagccgccggcggcatgaggcgcgacccggcccccggcttctccatgctgctcttcggtgtgtcgctcgcctgctactcgcccagcctcaagtcagtgcaggaccaggcgtacaaggcacccgtggtggtggagggcaaggtacaggggctggtcccagccggcggctccagctccaacagcacccgagagccgcccgcctcgggtcgggtggcgttggtaaaggtgctggacaagtggccgctccggagcggggggctgcagcgcgagcaggtgatcagcgtgggctcctgtgtgccgctcgaaaggaaccagcgctacatctttttcctggagcccacggaacagcccttagtctttaagacggcctttgcccccctcgataccaacggcaaaaatctcaagaaagaggtgggcaagatcctgtgcactgactgcgccacccggcccaagttgaagaagatgaagagccagacgggacaggtgggtgagaagcaatcgctgaagtgtgaggcagcagccggtaatccccagccttcctaccgttggttcaaggatggcaaggagctcaaccgcagccgagacattcgcatcaaatatggcaacggcagaaagaactcacgactacagttcaacaaggtgaaggtggaggacgctggggagtatgtctgcgaggccgagaacatcctggggaaggacaccgtccggggccggctttacgtcaacagcgtgagcaccaccctgtcatcctggtcggggcacgcccggaagtgcaacgagacagccaagtcctattgcgtcaatggaggcgtctgctactacatcgagggcatcaaccagctctcctgcaaatgtccaaatggattcttcggacagagatgtttggagaaactgcctttgcgattgtacatgccagatcctaagcaaaagcaccttggatttgaattaaaggaagccgaggagctgtaccagaagagggtcctgaccatcacgggcatctgcgtggctctgctggtcgtgggcatcgtctgtgtggtggcctactgcaagaccaaaaaacagcggaagcagatgcacaaccacctccggcagaacatgtgcccggcccatcagaaccggagcttggccaatgggcccagccacccccggctggacccagaggagatccagatggcagattatatttccaagaacgtgccagccacagaccatgtcatcaggagagaaactgagaccaccttctctgggagccactcctgttctccttctcaccactgctccacagccacacccacctccagccacagacacgagagccacacgtggagcctggaacgttctgagagcctgacttctgactcccagtcggggatcatgctatcatcagtgggtaccagcaaatgcaacagcccagcatgtgtggaggcccgggcaaggcgggcagcagcctacaacctggaggagcggcgcagggccaccgcgccaccctatcacgattccgtggactcccttcgcgactccccacacagcgagaggtacgtgtcggccctgaccacgcccgcgcgcctctcgcccgtggacttccactactcgctggccacgcaggtgccaactttcgagatcacgtcccccaactcggcgcacgccgtgtcgctgccgccggcggcgcccatcagttaccgcctggccgagcagcagccgttactgcggcacccggcgccccccggcccgggacccggacccgggcccgggcccgggcccggcgcagacatgcagcgcagctatgacagctactattaccccgcggcggggcccggaccgcggcgcgggacctgcgcgctcggcggcagcctgggcagcctgcctgccagccccttccgcatccccgaggacgacgagtacgagaccacgcaggagtgcgcgcccccgccgccgccgcggccgcgcgcgcgcggtgcgtcccgcaggacgtcggcggggccccggcgctggcgccgctcgcgcctcaacgggctggcggcgcagcgcgcacgggcggcgagggactcgctgtcgctgagcagcggctcgggcggcggctcagcctcggcgtcggacgacgacgcggacgacgcggacggggcgctggcggccgagagcacacctttcctgggcctgcgtggggcgcacgacgcgctgcgctcggactcgccgccactgtgcccggcggccgacagcaggacttactactcactggacagccacagcacgcgggccagcagcagacacagccgcgggccgcccccgcgggccaagcaggactcggcgccactctagggccccgccgcgcgcccctccgccccgcccgccccactatctttaaggagaccagagaccgcctactggagagaaaggaggaaaaaagaaataaaaatatttttattttctataaaaggaaaaaagtataacaaaatgttttattttcattttagcaaaaattgtcttataatactagctaacggcaaaggcgtttttatagggaaactatttatatgtaacatcctgatttacagcttcggn

SEQ ID NO: 2765 - DNA, 3027 bp, Homo sapiens
  misc_feature (3027)..(3027): n is a, c, g, or t
cctccaggtcctggcgcacagggtgggagcgctgcgctgcgccgcgctgcgcatcgcggcccgcttgccgcctgccccctgccctagctgggccacctccccgggctgccggtggagggctaagaggcgctaacgttacgctgtttccggttttccagcgggctctgtttcccctcccaaggcggcggcggctgagcggcggagccccccaaatggcctggccagatgcggcaggtttgctgctcagcgctgccgccgccgccactggagaagggtcggtgcagcagctacagcgacagcagcagcagcagcagcgagaggagcagcagcagcagcagcagcagcagcgagagcggcagcagcagcaggagcagcagcaacaacagcagcatctctcgtcccgctgcgcccccagagccgcggccgcagcaacagccgcagccccgcagccccgcagcccggagagccgccgcccgttcgcgagccgcagccgccggcggcatgaggcgcgacccggcccccggcttctccatgctgctcttcggtgtgtcgctcgcctgctactcgcccagcctcaagtcagtgcaggaccaggcgtacaaggcacccgtggtggtggagggcaaggtacaggggctggtcccagccggcggctccagctccaacagcacccgagagccgcccgcctcgggtcgggtggcgttggtaaaggtgctggacaagtggccgctccggagcggggggctgcagcgcgagcaggtgatcagcgtgggctcctgtgtgccgctcgaaaggaaccagcgctacatctttttcctggagcccacggaacagcccttagtctttaagacggcctttgcccccctcgataccaacggcaaaaatctcaagaaagaggtgggcaagatcctgtgcactgactgcgccacccggcccaagttgaagaagatgaagagccagacgggacaggtgggtgagaagcaatcgctgaagtgtgaggcagcagccggtaatccccagccttcctaccgttggttcaaggatggcaaggagctcaaccgcagccgagacattcgcatcaaatatggcaacggcagaaagaactcacgactacagttcaacaaggtgaaggtggaggacgctggggagtatgtctgcgaggccgagaacatcctggggaaggacaccgtccggggccggctttacgtcaacagcgtgagcaccaccctgtcatcctggtcggggcacgcccggaagtgcaacgagacagccaagtcctattgcgtcaatggaggcgtctgctactacatcgagggcatcaaccagctctcctgcaagtgtcctgtgggatacaccggggacaggtgtcagcagttcgcaatggtcaacttctccaagcaccttggatttgaattaaaggaagccgaggagctgtaccagaagagggtcctgaccatcacgggcatctgcgtggctctgctggtcgtgggcatcgtctgtgtggtggcctactgcaagaccaaaaaacagcggaagcagatgcacaaccacctccggcagaacatgtgcccggcccatcagaaccggagcttggccaatgggcccagccacccccggctggacccagaggagatccagatggcagattatatttccaagaacgtgccagccacagaccatgtcatcaggagagaaactgagaccaccttctctgggagccactcctgttctccttctcaccactgctccacagccacacccacctccagccacagacacgagagccacacgtggagcctggaacgttctgagagcctgacttctgactcccagtcggggatcatgctatcatcagtgggtaccagcaaatgcaacagcccagcatgtgtggaggcccgggcaaggcgggcagcagcctacaacctggaggagcggcgcagggccaccgcgccaccctatcacgattccgtggactcccttcgcgactccccacacagcgagaggtacgtgtcggccctgaccacgcccgcgcgcctctcgcccgtggacttccactactcgctggccacgcaggtgccaactttcgagatcacgtcccccaactcggcgcacgccgtgtcgctgccgccggcggcgcccatcagttaccgcctggccgagcagcagccgttactgcggcacccggcgccccccggcccgggacccggacccgggcccgggcccgggcccggcgcagacatgcagcgcagctatgacagctactattaccccgcggcggggcccggaccgcggcgcgggacctgcgcgctcggcggcagcctgggcagcctgcctgccagccccttccgcatccccgaggacgacgagtacgagaccacgcaggagtgcgcgcccccgccgccgccgcggccgcgcgcgcgcggtgcgtcccgcaggacgtcggcggggccccggcgctggcgccgctcgcgcctcaacgggctggcggcgcagcgcgcacgggcggcgagggactcgctgtcgctgagcagcggctcgggcggcggctcagcctcggcgtcggacgacgacgcggacgacgcggacggggcgctggcggccgagagcacacctttcctgggcctgcgtggggcgcacgacgcgctgcgctcggactcgccgccactgtgcccggcggccgacagcaggacttactactcactggacagccacagcacgcgggccagcagcagacacagccgcgggccgcccccgcgggccaagcaggactcggcgccactctagggccccgccgcgcgcccctccgccccgcccgccccactatctttaaggagaccagagaccgcctactggagagaaaggaggaaaaaagaaataaaaatatttttattttctataaaaggaaaaaagtataacaaaatgttttattttcattttagcaaaaattgtcttataatactagctaacggcaaaggcgtttttatagggaaactatttatatgtaacatcctgatttacagcttcggn

SEQ ID NO: 2766 - DNA, 3003 bp, Homo sapiens
  misc_feature (3003)..(3003): n is a, c, g, or t
cctccaggtcctggcgcacagggtgggagcgctgcgctgcgccgcgctgcgcatcgcggcccgcttgccgcctgccccctgccctagctgggccacctccccgggctgccggtggagggctaagaggcgctaacgttacgctgtttccggttttccagcgggctctgtttcccctcccaaggcggcggcggctgagcggcggagccccccaaatggcctggccagatgcggcaggtttgctgctcagcgctgccgccgccgccactggagaagggtcggtgcagcagctacagcgacagcagcagcagcagcagcgagaggagcagcagcagcagcagcagcagcagcgagagcggcagcagcagcaggagcagcagcaacaacagcagcatctctcgtcccgctgcgcccccagagccgcggccgcagcaacagccgcagccccgcagccccgcagcccggagagccgccgcccgttcgcgagccgcagccgccggcggcatgaggcgcgacccggcccccggcttctccatgctgctcttcggtgtgtcgctcgcctgctactcgcccagcctcaagtcagtgcaggaccaggcgtacaaggcacccgtggtggtggagggcaaggtacaggggctggtcccagccggcggctccagctccaacagcacccgagagccgcccgcctcgggtcgggtggcgttggtaaaggtgctggacaagtggccgctccggagcggggggctgcagcgcgagcaggtgatcagcgtgggctcctgtgtgccgctcgaaaggaaccagcgctacatctttttcctggagcccacggaacagcccttagtctttaagacggcctttgcccccctcgataccaacggcaaaaatctcaagaaagaggtgggcaagatcctgtgcactgactgcgccacccggcccaagttgaagaagatgaagagccagacgggacaggtgggtgagaagcaatcgctgaagtgtgaggcagcagccggtaatccccagccttcctaccgttggttcaaggatggcaaggagctcaaccgcagccgagacattcgcatcaaatatggcaacggcagaaagaactcacgactacagttcaacaaggtgaaggtggaggacgctggggagtatgtctgcgaggccgagaacatcctggggaaggacaccgtccggggccggctttacgtcaacagcgtgagcaccaccctgtcatcctggtcggggcacgcccggaagtgcaacgagacagccaagtcctattgcgtcaatggaggcgtctgctactacatcgagggcatcaaccagctctcctgcaagtgtcctgtgggatacaccggggacaggtgtcagcagttcgcaatggtcaacttctccaaagccgaggagctgtaccagaagagggtcctgaccatcacgggcatctgcgtggctctgctggtcgtgggcatcgtctgtgtggtggcctactgcaagaccaaaaaacagcggaagcagatgcacaaccacctccggcagaacatgtgcccggcccatcagaaccggagcttggccaatgggcccagccacccccggctggacccagaggagatccagatggcagattatatttccaagaacgtgccagccacagaccatgtcatcaggagagaaactgagaccaccttctctgggagccactcctgttctccttctcaccactgctccacagccacacccacctccagccacagacacgagagccacacgtggagcctggaacgttctgagagcctgacttctgactcccagtcggggatcatgctatcatcagtgggtaccagcaaatgcaacagcccagcatgtgtggaggcccgggcaaggcgggcagcagcctacaacctggaggagcggcgcagggccaccgcgccaccctatcacgattccgtggactcccttcgcgactccccacacagcgagaggtacgtgtcggccctgaccacgcccgcgcgcctctcgcccgtggacttccactactcgctggccacgcaggtgccaactttcgagatcacgtcccccaactcggcgcacgccgtgtcgctgccgccggcggcgcccatcagttaccgcctggccgagcagcagccgttactgcggcacccggcgccccccggcccgggacccggacccgggcccgggcccgggcccggcgcagacatgcagcgcagctatgacagctactattaccccgcggcggggcccggaccgcggcgcgggacctgcgcgctcggcggcagcctgggcagcctgcctgccagccccttccgcatccccgaggacgacgagtacgagaccacgcaggagtgcgcgcccccgccgccgccgcggccgcgcgcgcgcggtgcgtcccgcaggacgtcggcggggccccggcgctggcgccgctcgcgcctcaacgggctggcggcgcagcgcgcacgggcggcgagggactcgctgtcgctgagcagcggctcgggcggcggctcagcctcggcgtcggacgacgacgcggacgacgcggacggggcgctggcggccgagagcacacctttcctgggcctgcgtggggcgcacgacgcgctgcgctcggactcgccgccactgtgcccggcggccgacagcaggacttactactcactggacagccacagcacgcgggccagcagcagacacagccgcgggccgcccccgcgggccaagcaggactcggcgccactctagggccccgccgcgcgcccctccgccccgcccgccccactatctttaaggagaccagagaccgcctactggagagaaaggaggaaaaaagaaataaaaatatttttattttctataaaaggaaaaaagtataacaaaatgttttattttcattttagcaaaaattgtcttataatactagctaacggcaaaggcgtttttatagggaaactatttatatgtaacatcctgatttacagcttcggn

SEQ ID NO: 2767 - DNA, 1080 bp, Homo sapiens
  misc_feature (20)..(20): n is a, c, g, or t
  misc_feature (1080)..(1080): n is a, c, g, or t
cctcccccgcgccggccggncctggccttggcccatgcctctgcctctccccgcaggtacgtgtcggccctgaccacgcccgcgcgcctctcgcccgtggacttccactactcgctggccacgcaggtgccaactttcgagatcacgtcccccaactcggcgcacgccgtgtcgctgccgccggcggcgcccatcagttaccgcctggccgagcagcagccgttactgcggcacccggcgccccccggcccgggacccggacccgggcccgggcccgggcccggcgcagacatgcagcgcagctatgacagctactattaccccgcggcggggcccggaccgcggcgcgggacctgcgcgctcggcggcagcctgggcagcctgcctgccagccccttccgcatccccgaggacgacgagtacgagaccacgcaggagtgcgcgcccccgccgccgccgcggccgcgcgcgcgcggtgcgtcccgcaggacgtcggcggggccccggcgctggcgccgctcgcgcctcaacgggctggcggcgcagcgcgcacgggcggcgagggactcgctgtcgctgagcagcggctcgggcggcggctcagcctcggcgtcggacgacgacgcggacgacgcggacggggcgctggcggccgagagcacacctttcctgggcctgcgtggggcgcacgacgcgctgcgctcggactcgccgccactgtgcccggcggccgacagcaggacttactactcactggacagccacagcacgcgggccagcagcagacacagccgcgggccgcccccgcgggccaagcaggactcggcgccactctagggccccgccgcgcgcccctccgccccgcccgccccactatctttaaggagaccagagaccgcctactggagagaaaggaggaaaaaagaaataaaaatatttttattttctataaaaggaaaaaagtataacaaaatgttttattttcattttagcaaaaattgtcttataatactagctaacggcaaaggcgtttttatagggaaactatttatatgtaacatcctgatttacagcttcggn

SEQ ID NO: 2768 - DNA, 803 bp, Homo sapiens
gcggccgcggcaagaagcacccagaggggaggaagcgggagagggagcccgatcccggggagaaagccacccggcccaagttgaagaagatgaagagccagacgggacaggtgggtgagaagcaatcgctgaagtgtgaggcagcagccggtaatccccagccttcctaccgttggttcaaggatggcaaggagctcaaccgcagccgagacattcgcatcaaatatggcaacggcagaaagaactcacgactacagttcaacaaggtgaaggtggaggacgctggggagtatgtctgcgaggccgagaacatcctggggaaggacaccgtccggggccggctttacgtcaacagcgtgagcaccaccctgtcatcctggtcggggcacgcccggaagtgcaacgagacagccaagtcctattgcgtcaatggaggcgtctgctactacatcgagggcatcaaccagctctcctgcaaggcacctgggctgcactgcttagaacttggtacccagagccaccacttccccatctcagcctcccctggttccagccaaggttcctggaaccaacttccccaacaccctttgtcagccctcgggggagagggcagccctggtggagatgcggtcagaacaccaggtcctcagagctgtgctggagaagggcaggggggtggggggcagggcagagcccagaggccattctgcgggtggacgagctgggagggaaggtgggcaggcctcttggggttcctgatgacacctgaatggaataaaaaggaaagaacttaggaaacggaa

SEQ ID NO: 2769 - DNA, 3080 bp, Homo sapiens
  misc_feature (3080)..(3080): n is a, c, g, or t
cctccaggtcctggcgcacagggtgggagcgctgcgctgcgccgcgctgcgcatcgcggcccgcttgccgcctgccccctgccctagctgggccacctccccgggctgccggtggagggctaagaggcgctaacgttacgctgtttccggttttccagcgggctctgtttcccctcccaaggcggcggcggctgagcggcggagccccccaaatggcctggccagatgcggcaggtttgctgctcagcgctgccgccgccgccactggagaagggtcggtgcagcagctacagcgacagcagcagcagcagcagcgagaggagcagcagcagcagcagcagcagcagcgagagcggcagcagcagcaggagcagcagcaacaacagcagcatctctcgtcccgctgcgcccccagagccgcggccgcagcaacagccgcagccccgcagccccgcagcccggagagccgccgcccgttcgcgagccgcagccgccggcggcatgaggcgcgacccggcccccggcttctccatgctgctcttcggtgtgtcgctcgcctgctactcgcccagcctcaagtcagtgcaggaccaggcgtacaaggcacccgtggtggtggagggcaaggtacaggggctggtcccagccggcggctccagctccaacagcacccgagagccgcccgcctcgggtcgggtggcgttggtaaaggtgctggacaagtggccgctccggagcggggggctgcagcgcgagcaggtgatcagcgtgggctcctgtgtgccgctcgaaaggaaccagcgctacatctttttcctggagcccacggaacagcccttagtctttaagacggcctttgcccccctcgataccaacggcaaaaatctcaagaaagaggtgggcaagatcctgtgcactgactgcgccacccggcccaagttgaagaagatgaagagccagacgggacaggtgggtgagaagcaatcgctgaagtgtgaggcagcagccggtaatccccagccttcctaccgttggttcaaggatggcaaggagctcaaccgcagccgagacattcgcatcaaatatggcaacggcagaaagaactcacgactacagttcaacaaggtgaaggtggaggacgctggggagtatgtctgcgaggccgagaacatcctggggaaggacaccgtccggggccggctttacgtcaacagcgtgagcaccaccctgtcatcctggtcggggcacgcccggaagtgcaacgagacagccaagtcctattgcgtcaatggaggcgtctgctactacatcgagggcatcaaccagctctcctgcaaatgtccaaatggattcttcggacagagatgtttggagaaactgcctttgcgattgtacatgccagatcctaagcaaagtgtcctgtgggatacaccggggacaggtgtcagcagttcgcaatggtcaacttctccaaagccgaggagctgtaccagaagagggtcctgaccatcacgggcatctgcgtggctctgctggtcgtgggcatcgtctgtgtggtggcctactgcaagaccaaaaaacagcggaagcagatgcacaaccacctccggcagaacatgtgcccggcccatcagaaccggagcttggccaatgggcccagccacccccggctggacccagaggagatccagatggcagattatatttccaagaacgtgccagccacagaccatgtcatcaggagagaaactgagaccaccttctctgggagccactcctgttctccttctcaccactgctccacagccacacccacctccagccacagacacgagagccacacgtggagcctggaacgttctgagagcctgacttctgactcccagtcggggatcatgctatcatcagtgggtaccagcaaatgcaacagcccagcatgtgtggaggcccgggcaaggcgggcagcagcctacaacctggaggagcggcgcagggccaccgcgccaccctatcacgattccgtggactcccttcgcgactccccacacagcgagaggtacgtgtcggccctgaccacgcccgcgcgcctctcgcccgtggacttccactactcgctggccacgcaggtgccaactttcgagatcacgtcccccaactcggcgcacgccgtgtcgctgccgccggcggcgcccatcagttaccgcctggccgagcagcagccgttactgcggcacccggcgccccccggcccgggacccggacccgggcccgggcccgggcccggcgcagacatgcagcgcagctatgacagctactattaccccgcggcggggcccggaccgcggcgcgggacctgcgcgctcggcggcagcctgggcagcctgcctgccagccccttccgcatccccgaggacgacgagtacgagaccacgcaggagtgcgcgcccccgccgccgccgcggccgcgcgcgcgcggtgcgtcccgcaggacgtcggcggggccccggcgctggcgccgctcgcgcctcaacgggctggcggcgcagcgcgcacgggcggcgagggactcgctgtcgctgagcagcggctcgggcggcggctcagcctcggcgtcggacgacgacgcggacgacgcggacggggcgctggcggccgagagcacacctttcctgggcctgcgtggggcgcacgacgcgctgcgctcggactcgccgccactgtgcccggcggccgacagcaggacttactactcactggacagccacagcacgcgggccagcagcagacacagccgcgggccgcccccgcgggccaagcaggactcggcgccactctagggccccgccgcgcgcccctccgccccgcccgccccactatctttaaggagaccagagaccgcctactggagagaaaggaggaaaaaagaaataaaaatatttttattttctataaaaggaaaaaagtataacaaaatgttttattttcattttagcaaaaattgtcttataatactagctaacggcaaaggcgtttttatagggaaactatttatatgtaacatcctgatttacagcttcggn

SEQ ID NO: 2770 - DNA, 3104 bp, Homo sapiens
  misc_feature (3104)..(3104): n is a, c, g, or t
cctccaggtcctggcgcacagggtgggagcgctgcgctgcgccgcgctgcgcatcgcggcccgcttgccgcctgccccctgccctagctgggccacctccccgggctgccggtggagggctaagaggcgctaacgttacgctgtttccggttttccagcgggctctgtttcccctcccaaggcggcggcggctgagcggcggagccccccaaatggcctggccagatgcggcaggtttgctgctcagcgctgccgccgccgccactggagaagggtcggtgcagcagctacagcgacagcagcagcagcagcagcgagaggagcagcagcagcagcagcagcagcagcgagagcggcagcagcagcaggagcagcagcaacaacagcagcatctctcgtcccgctgcgcccccagagccgcggccgcagcaacagccgcagccccgcagccccgcagcccggagagccgccgcccgttcgcgagccgcagccgccggcggcatgaggcgcgacccggcccccggcttctccatgctgctcttcggtgtgtcgctcgcctgctactcgcccagcctcaagtcagtgcaggaccaggcgtacaaggcacccgtggtggtggagggcaaggtacaggggctggtcccagccggcggctccagctccaacagcacccgagagccgcccgcctcgggtcgggtggcgttggtaaaggtgctggacaagtggccgctccggagcggggggctgcagcgcgagcaggtgatcagcgtgggctcctgtgtgccgctcgaaaggaaccagcgctacatctttttcctggagcccacggaacagcccttagtctttaagacggcctttgcccccctcgataccaacggcaaaaatctcaagaaagaggtgggcaagatcctgtgcactgactgcgccacccggcccaagttgaagaagatgaagagccagacgggacaggtgggtgagaagcaatcgctgaagtgtgaggcagcagccggtaatccccagccttcctaccgttggttcaaggatggcaaggagctcaaccgcagccgagacattcgcatcaaatatggcaacggcagaaagaactcacgactacagttcaacaaggtgaaggtggaggacgctggggagtatgtctgcgaggccgagaacatcctggggaaggacaccgtccggggccggctttacgtcaacagcgtgagcaccaccctgtcatcctggtcggggcacgcccggaagtgcaacgagacagccaagtcctattgcgtcaatggaggcgtctgctactacatcgagggcatcaaccagctctcctgcaaatgtccaaatggattcttcggacagagatgtttggagaaactgcctttgcgattgtacatgccagatcctaagcaaagtgtcctgtgggatacaccggggacaggtgtcagcagttcgcaatggtcaacttctccaagcaccttggatttgaattaaaggaagccgaggagctgtaccagaagagggtcctgaccatcacgggcatctgcgtggctctgctggtcgtgggcatcgtctgtgtggtggcctactgcaagaccaaaaaacagcggaagcagatgcacaaccacctccggcagaacatgtgcccggcccatcagaaccggagcttggccaatgggcccagccacccccggctggacccagaggagatccagatggcagattatatttccaagaacgtgccagccacagaccatgtcatcaggagagaaactgagaccaccttctctgggagccactcctgttctccttctcaccactgctccacagccacacccacctccagccacagacacgagagccacacgtggagcctggaacgttctgagagcctgacttctgactcccagtcggggatcatgctatcatcagtgggtaccagcaaatgcaacagcccagcatgtgtggaggcccgggcaaggcgggcagcagcctacaacctggaggagcggcgcagggccaccgcgccaccctatcacgattccgtggactcccttcgcgactccccacacagcgagaggtacgtgtcggccctgaccacgcccgcgcgcctctcgcccgtggacttccactactcgctggccacgcaggtgccaactttcgagatcacgtcccccaactcggcgcacgccgtgtcgctgccgccggcggcgcccatcagttaccgcctggccgagcagcagccgttactgcggcacccggcgccccccggcccgggacccggacccgggcccgggcccgggcccggcgcagacatgcagcgcagctatgacagctactattaccccgcggcggggcccggaccgcggcgcgggacctgcgcgctcggcggcagcctgggcagcctgcctgccagccccttccgcatccccgaggacgacgagtacgagaccacgcaggagtgcgcgcccccgccgccgccgcggccgcgcgcgcgcggtgcgtcccgcaggacgtcggcggggccccggcgctggcgccgctcgcgcctcaacgggctggcggcgcagcgcgcacgggcggcgagggactcgctgtcgctgagcagcggctcgggcggcggctcagcctcggcgtcggacgacgacgcggacgacgcggacggggcgctggcggccgagagcacacctttcctgggcctgcgtggggcgcacgacgcgctgcgctcggactcgccgccactgtgcccggcggccgacagcaggacttactactcactggacagccacagcacgcgggccagcagcagacacagccgcgggccgcccccgcgggccaagcaggactcggcgccactctagggccccgccgcgcgcccctccgccccgcccgccccactatctttaaggagaccagagaccgcctactggagagaaaggaggaaaaaagaaataaaaatatttttattttctataaaaggaaaaaagtataacaaaatgttttattttcattttagcaaaaattgtcttataatactagctaacggcaaaggcgtttttatagggaaactatttatatgtaacatcctgatttacagcttcggn

SEQ ID NO: 2771 - DNA, 2162 bp, Homo sapiens
  misc_feature (2162)..(2162): n is a, c, g, or t
gcggccgcggcaagaagcacccagaggggaggaagcgggagagggagcccgatcccggggagaaagccacccggcccaagttgaagaagatgaagagccagacgggacaggtgggtgagaagcaatcgctgaagtgtgaggcagcagccggtaatccccagccttcctaccgttggttcaaggatggcaaggagctcaaccgcagccgagacattcgcatcaaatatggcaacggcagaaagaactcacgactacagttcaacaaggtgaaggtggaggacgctggggagtatgtctgcgaggccgagaacatcctggggaaggacaccgtccggggccggctttacgtcaacagcgtgagcaccaccctgtcatcctggtcggggcacgcccggaagtgcaacgagacagccaagtcctattgcgtcaatggaggcgtctgctactacatcgagggcatcaaccagctctcctgcaaatgtccaaatggattcttcggacagagatgtttggagaaactgcctttgcgattgtacatgccagatcctaagcaaaaagccgaggagctgtaccagaagagggtcctgaccatcacgggcatctgcgtggctctgctggtcgtgggcatcgtctgtgtggtggcctactgcaagaccaaaaaacagcggaagcagatgcacaaccacctccggcagaacatgtgcccggcccatcagaaccggagcttggccaatgggcccagccacccccggctggacccagaggagatccagatggcagattatatttccaagaacgtgccagccacagaccatgtcatcaggagagaaactgagaccaccttctctgggagccactcctgttctccttctcaccactgctccacagccacacccacctccagccacagacacgagagccacacgtggagcctggaacgttctgagagcctgacttctgactcccagtcggggatcatgctatcatcagtgggtaccagcaaatgcaacagcccagcatgtgtggaggcccgggcaaggcgggcagcagcctacaacctggaggagcggcgcagggccaccgcgccaccctatcacgattccgtggactcccttcgcgactccccacacagcgagaggtacgtgtcggccctgaccacgcccgcgcgcctctcgcccgtggacttccactactcgctggccacgcaggtgccaactttcgagatcacgtcccccaactcggcgcacgccgtgtcgctgccgccggcggcgcccatcagttaccgcctggccgagcagcagccgttactgcggcacccggcgccccccggcccgggacccggacccgggcccgggcccgggcccggcgcagacatgcagcgcagctatgacagctactattaccccgcggcggggcccggaccgcggcgcgggacctgcgcgctcggcggcagcctgggcagcctgcctgccagccccttccgcatccccgaggacgacgagtacgagaccacgcaggagtgcgcgcccccgccgccgccgcggccgcgcgcgcgcggtgcgtcccgcaggacgtcggcggggccccggcgctggcgccgctcgcgcctcaacgggctggcggcgcagcgcgcacgggcggcgagggactcgctgtcgctgagcagcggctcgggcggcggctcagcctcggcgtcggacgacgacgcggacgacgcggacggggcgctggcggccgagagcacacctttcctgggcctgcgtggggcgcacgacgcgctgcgctcggactcgccgccactgtgcccggcggccgacagcaggacttactactcactggacagccacagcacgcgggccagcagcagacacagccgcgggccgcccccgcgggccaagcaggactcggcgccactctagggccccgccgcgcgcccctccgccccgcccgccccactatctttaaggagaccagagaccgcctactggagagaaaggaggaaaaaagaaataaaaatatttttattttctataaaaggaaaaaagtataacaaaatgttttattttcattttagcaaaaattgtcttataatactagctaacggcaaaggcgtttttatagggaaactatttatatgtaacatcctgatttacagcttcggn

SEQ ID NO: 2772 - DNA, 1767 bp, Homo sapiens
cctccaggtcctggcgcacagggtgggagcgctgcgctgcgccgcgctgcgcatcgcggcccgcttgccgcctgccccctgccctagctgggccacctccccgggctgccggtggagggctaagaggcgctaacgttacgctgtttccggttttccagcgggctctgtttcccctcccaaggcggcggcggctgagcggcggagccccccaaatggcctggccagatgcggcaggtttgctgctcagcgctgccgccgccgccactggagaagggtcggtgcagcagctacagcgacagcagcagcagcagcagcgagaggagcagcagcagcagcagcagcagcagcgagagcggcagcagcagcaggagcagcagcaacaacagcagcatctctcgtcccgctgcgcccccagagccgcggccgcagcaacagccgcagccccgcagccccgcagcccggagagccgccgcccgttcgcgagccgcagccgccggcggcatgaggcgcgacccggcccccggcttctccatgctgctcttcggtgtgtcgctcgcctgctactcgcccagcctcaagtcagtgcaggaccaggcgtacaaggcacccgtggtggtggagggcaaggtacaggggctggtcccagccggcggctccagctccaacagcacccgagagccgcccgcctcgggtcgggtggcgttggtaaaggtgctggacaagtggccgctccggagcggggggctgcagcgcgagcaggtgatcagcgtgggctcctgtgtgccgctcgaaaggaaccagcgctacatctttttcctggagcccacggaacagcccttagtctttaagacggcctttgcccccctcgataccaacggcaaaaatctcaagaaagaggtgggcaagatcctgtgcactgactgcgccacccggcccaagttgaagaagatgaagagccagacgggacaggtgggtgagaagcaatcgctgaagtgtgaggcagcagccggtaatccccagccttcctaccgttggttcaaggatggcaaggagctcaaccgcagccgagacattcgcatcaaatatggcaacggcagaaagaactcacgactacagttcaacaaggtgaaggtggaggacgctggggagtatgtctgcgaggccgagaacatcctggggaaggacaccgtccggggccggctttacgtcaacagcgtgagcaccaccctgtcatcctggtcggggcacgcccggaagtgcaacgagacagccaagtcctattgcgtcaatggaggcgtctgctactacatcgagggcatcaaccagctctcctgcaagaccccattgtacaaagatgccatccctgggtgctgcctgtgtcccttcagcccctagcccccactccatgggatgaggggataccagcaaggacactactctagggcacctgggctgcactgcttagaacttggtacccagagccaccacttccccatctcagcctcccctggttccagccaaggttcctggaaccaacttccccaacaccctttgtcagccctcgggggagagggcagccctggtggagatgcggtcagaacaccaggtcctcagagctgtgctggagaagggcaggggggtggggggcagggcagagcccagaggccattctgcgggtggacgagctgggagggaaggtgggcaggcctcttggggttcctgatgacacctgaatggaataaaaaggaaagaacttaggaaacggaa

SEQ ID NO: 2773 - DNA, 415 bp, Homo sapiens
attttggtttgttagttctttttgttttgttttgttttgctttgttttcatttttggcctaatccttgggtttaaagttcagggctgcaggtaaggggcagagtggcaaggccaatacaaatggtaacggtggcaaggaacccagctggcattggcaggagcccgtgccggggtgttgcaatgcctgtgtcttgctatcctggctctctctttctggttttctttcttttggtaggtgtcctgtgggatacaccggggacaggtgtcagcagttcgcaatggtcaacttctccagtatgtctctttcttctatttcttctcttccctggtgactgacagtctccccctggggagggatggggccttgcttagcaagactagggggagatgtagagggtgtcctgcgctccttaga

SEQ ID NO: 2774 - DNA, 392 bp, Homo sapiens
gcacagggatgcctaatgacctgcaatgcatgggacagtcctctatagggagaaattctccagcccaggtggttgaacagaactcccactgggaacacttcacagcccagtgaggaagccctgaagatagctgtggtcttacgatatacagacagacagacagacagacaagatattcatccatggttcctggctcataactcctaacatctctaagatctccaaagtacgatgttttgtgtgtcttttgtctgataaattcaaagtggggctggtaaccagaaaggccaaggcaggatcagagggttggaactttcagccccattccccaacctctggggaggggagaggagctgaaaagttgatcaccagtggccaatggcttaatcaat

SEQ ID NO: 2775 - DNA, 1118 bp, Homo sapiens
  misc_feature (314)..(314): n is a, c, g, or t
  misc_feature (323)..(323): n is a, c, g, or t
ctctctctacaaaaaatcaaaaaattagccaggtgtggtgtagtcccagctactcaggaggctgagatgggaggatcacctgagcctaggacgtggaggctgcagtgagccagaatcatgccactccatgccagcctggtgacagggtgagaccctgcccctccagaaaaaaagaatttgaaatttataggtacttctggcttttagaaaccagagactgagtaaataatttattttttaaattaatatacagtaaaattgacattttgatattcatacagttctgtgaatatcaatttgtataaccaccaccnaccaccacncacagccaggacacggaacagttccatcactccagataactccctcccactgtcccattgcactcataccctcccctcaccctgggcaactatcgatctgttgtcactgtagtttcgtcttttgcagaatgtgacatggactcatatagtatgtaacctttagagactggcttcttttagtcatagtaatgctgctgagatttttctaagtatttgggtttatcaacagtttgttcctttttattgccaggtaatactcctttgtatggatataccacagatcacgtacattcgtaaccatttgagggacatttggcttccagtttcgggtgattatgaacagagccactgtaaatgttcatggcaggttttggggtgaatataagtttcatttcttgtgggtaaatacctaggagggggattgctaggtcatatagtatgtatctttaacttataagaaattaccaaattgtttctacatccctactggaaagacataaaaattctacttgttccacatttttgtcagcagctgatactgttaatatttttatgtaggaatacttcattttgagccttatgagaagaatctgggtactaggctcagctctgccatcagctagctgctgacttagaggagccatttaacttttctgaacctcttgtttcctcatctctcatataataggtttattttggatatattataagttctttcagctcccaaattcattgatttggaaaggttagtccttggcaagaagacgagagatttgtttgcttgtgaaaaaaaaa

SEQ ID NO: 2776 - DNA, 445 bp, Homo sapiens
tggcatagctcctaccagtcaaaggttttgattctgtgcttcccatagaactttctgtgatgatggaaatgtcccatatgtgtgctgtccagtgtggtagacactagccacatgtgactaatgagcacctgagatgtggctagagtgactgaggagctgaaattttcattttattccattctaactaatttaaatagtcacacatggttagcagctgtcatactgggcagcgcagctatgggtaaatcttaatatcagtctatgatgacagcatattcccatacttgcctgagcctgctgggaatctgaggccatgtgggcttggtgatcaggcagacctgagttcgaatcctggctctgctactaatcagctgtgcggctttgggccagtcactcagcttctctgggcctgaatttcctcatttgtaaaataagacttagagta

SEQ ID NO: 2777 - DNA, 442 bp, Homo sapiens
ctactcaggaggcgtgacggcaggagaatggcatgaacccgggaggcagagcttgcagtgagccaagatcgtgccactgcactccagcctgggcgacagagcaagactccatctcaaaaaaaaaaaaaaaaaaagaattgataacagctgtgctgccaaggctattggaacgtaggaggtcctaggacagtgctgttgggagcataaataagcccaaccctgtggcgggaaattgggcatcagttctcaaaatgtcatgggctgggcacggtggctcacgcctgtaatcccagcactttgggaggctgagggaggcggatcacttggggtcaggagttcgagaccagcctgaccaccatggagaaaccccgtctctattaaaaatacaaaaaaaactagccaggcatagtggcacatacctgtaatcccagctactcgggag

SEQ ID NO: 2778 - DNA, 1742 bp, Homo sapiens
gttgatgtcagtgttgcggtcagtactcctgcaggactcatcacacctatgtgtttaatgcacatataaaaggagtggaaaccatgctaatgatgtgtttctttagcaaccaaagcaagagagggtaaactacagccacatgaattccaggtggcacttttacgatctccaatttaggaatgtttggaattaagaatttctctgctattattaacccacctcaagcatgtattttggcaattggtgcttcagaggataaactggtccctgcagataatgaaaaagggtttgatgtggctagcatgatgtctgttacactcagttgtgatcaccgggtggtggatggagcagttggagcccagtggcttgctgagtttagaaagtaccttgaaaaacctatcactatgttgttgtaactaactcaagaatttctaaactctcccaggtcacactgattcattcttaacaagatatttatatgttattaaacaggtggttctttttattttaaacagttatttttattattgagtctgtccagataagttatttataatgggcattactgaatttttaaaatgccgattacacccaaatattgtgcacatttaataatcagacaccagatttttagctctgtactcctaattaagggacatgtatgtggccttgcctagccctttggtgataagtacttcctctaggaaatgtacgataggtagaattgtggttccctaaagacaagtacataaaggtgaccctgatgaaaccttgaagttctgaaatttaactgcctaaaatgttctccttagatgtgagagaaagagaaatcagaaaaattaattctcttgggggaagggcttgaattgaagctttactttagaatttagccctggtttgaaattttcccattacatgatcttggtttatcatcgatgggaagggtagaaaacttcaaggaaaataagtgaaattttaaaagtcagcattttcttagacctcttcagctgattgtttatttttctatgaattcctacacatggttattcccccctacttgagataatctaaatataaaccagctacttgatgtaactgagaattgtgtggatatttatttaaacaaatgtgtaattttgagtacagaattcaacagttacctccaaaaaagaaacattgttaatataatttaacagaagttgtgaaactaaaattttctaagattaactggtagttcattgtaaatgaacataatgaacagaatttatgactccactgtggaaaatgctatcaaataactaaggaatatatatggaataagtgtacatatgtaaaatattgttactagagttagatatgtgccaaagtccatttatcccaaatcctgtctgaaaaggaggggtacattggtaaacattttggagtgcttaaaaatgccaaaaacaaaatggtaatttctactttgataaagtaaaaaagttaaatgtgtgtaaaaaagtgttctgtgtccttctactccagcatcgtctcatgtaaaataagaaagccctaaaatactattggagagaaaaaattaactaggttgctactttatttgcctaaatacttttttctattttgttagattttgcctttcttttggaaggaaggaggcgatattctggattataaaaatgaattgggaacattatcacaattccagactttctattaatatttatgtgttttaataaacgtttgaa

SEQ ID NO: 2779 - DNA, 297 bp, Homo sapiens
aaattaaaaggttttgttccacgaaagatccttaaagaaaggatgaaaagacaagccacatactgggagaaaatatctggaaatgatatatctgactaaggactagtacactataatagattacataaagaattctcaaaactcagtagtaaaaagaaccacccaattcgaatatgggcaaaagaccatgaagagacatttcaccaaaaaagatacacagatggcaaataagcacatgaaaagatgtccaaaatcatttgccatcagggaaatgtggctacacatcgatgacaatga

SEQ ID NO: 2780 - DNA, 431 bp, Homo sapiens
cctcctgggaatacagcaaagtcataggaagcagataacttatccaagaaaattggtagagttgttctccctcttcaagtgtaaattccaaactatctgctcgtattttagccttaattctttagttttcatgcagaaactaccattttcaacacagaggacagattcagaaaagcttgattctcgagccttattcaaggcttaaaataagctaatttaaaaaaaaatctgtcgctgtattataatcagtgaattaatagacaataaaatagttttctaaccattttgaatttcaaaactaaggcttttaacttattttttatttttcactcccttaaaacagcaggaagtaaataattttaaattcactgctttttttcaaacatgcattttaaagtaatttagttatttttaaagctgtgacttaagct

SEQ ID NO: 2781 - DNA, 452 bp, Homo sapiens
gtggcaagcgcctgtaatcccagcttcttgggaggttaaggcaggagaattgcttgaaccctggagccggaagttgcagtgagctgagatcatgccactgcactccagactgggtgacagagactccaaaaataaaaaaagaaaaagagaaaaagaaatagaaagcaagcaagcagcttcagagtgggaggctgtagacgtcgccaacctttccttgaaatcaggtttatgcactcatttattaactcattcattcatacattgcctctttattaagtacctctttggtacaaacacttcggtaggcttgggtgcaaaggtgaatgtcttccagataggaattctaaaagagttggaaactcaggagattagggttaattttcgtaatcacagatacttgacttttcacccggcctcccattcctttgtcaatgccagaagccagtgtctgc

SEQ ID NO: 2782 - DNA, 466 bp, Homo sapiens
ggggagctggggtgtgccggaccctgcacccaggtcaggatgctcaacatgccaggcctcaggaaccccttcacaccccattagtcagtcctcactaccgtcaagggcagccactctcctggcgtcatcggaccttcaacagacctgcgctgcctgttcttgaaatttatagaaatagattgggccaggtgcggtggctcacgcctgtaatgccagcgctttgggaggccaaggcagatggattgcttgaggtcaggagttcgagaccagcctggccaacatggcaaaaccccgtctctagtaaaaatacaaaaaaaattagccagtgtggttctgtacacctgtagtcccacctactcaggaggctgaggcaggagattgcttgaacctggaaggcagaggttgcagtgagccgagattgtgccactgcactccagcctgggcaacagcgcaggactccatctca

SEQ ID NO: 2783 - DNA, 665 bp, Homo sapiens
ggcgggcgcctgtagtcccagctactctggaggctcaggcaggagaatggagtgaactcggaaggcggagcttgcagtgagccaaagtttgcgccactgcactccagcctgggggacagagtgagactctgtctcaaaaaataaaataaaataaaaaataaaaataaaaacttgaattattagcatgaatattgcagttctttatattatgcaaaaccagatttaaataagagcatttaattcatatatggaattgccaagttataccattagtactttacagcacatcttgggaggttcccttgaactagccagaagaagcaaactgaagccagacagaggaagattgcaaagaggaagagagggtctccaccaggcacagagccacccaagggagccctccctcaggctcagggataccgagggagccagagcagattcacacaggtccctggggcccctctgccctggtgactctaggatgcatgtacttgcacctgacttctaggcatccccctcctgctagcttcccctcgatccagcctggggcaggctctgtggaagtcaagccttgcatctccctttcccaagcacctaccatcctaacccacagtgtagtggccacgtccaagggtctttacgtctctgcctcagatatgctaggt

SEQ ID NO: 2784 - DNA, 349 bp, Homo sapiens
agcatttttaatgagaattggtaaagtggctacaaagtttcaaaagctttagagaaaaatacatatatatattccaattggtgttctaagactaatatataaacatattggtgcagttgccaagtagcaaattagtacatctttataatggcagagaagagcctgattgaagaatattaagccttagatagggaatttacagaaataataagttaagacaatctattaagttgacattattctgttcttttttgtaacatgctgtttaaactctttgacttggttgctgctacatggaagaaaatctcatataagaacagattccaaggtgtgatactcatcatatatg

SEQ ID NO: 2785 - DNA, 158 bp, Homo sapiens
cattaattgtattacagagattagagagttgaaacccagaaatatcaaatgtgtgtcgagtgccccacactaatgccatattgatattcatacccagtctagccacagcctggctttctcacagttgtatttctagttgtatttttcattcctttcct

SEQ ID NO: 2786 - DNA, 441 bp, Homo sapiens
gatcatctgtacttgccatatcccacttatgaacaatgtctttttctaccctgtgtttgtgaaatgtgattttactcttaacattaagaaagaaacagatagtgaatataaatacaaatttgaaattttgataaaatagttattcagaatttaatgtaaggccgggcacagtggttcatgcctgtaatcttagcactttgggaagccgaggcaggcggatcacttgaagtcaggaattcaagactagcctggccaacatggtaaaaccccgtctctactaaaaatacaaaaattagctggatgtggtggcacacgcctatagtcccagctactcaggaggctgaggcaggagaatcacttaaacctgggaggcggaggttgcagtgagctgagatcacgccactgcactccagcttgggtgacaagagtgaaactctgtct

SEQ ID NO: 2787 - DNA, 405 bp, Homo sapiens
gaagggagaagagtggaagtggaggtgggaatgaagcttcccaggaggtgaactgctgttcttggagttgttttccctgtcaggaaaaacatcaagggatgaatttagagcagtcccgtagaaatataatgctcaccgtttgtggtggcttacgcctgtaatcccaaatgctttggaaaccaaggtgggaggattacttgaggccagcagtttgagaccagcctgggcaacataagcaagaccccatctctacaaaataagaataaaaaattagccgagtgtggtggtacacagctgtaatccccactactcaagaggctgaggaaggaagatcgtttgagcccaggaggtcaaggctgcaatgaactgtgatccagacagtgcaagactctgtctcaaaaaaaa

SEQ ID NO: 2788 - DNA, 416 bp, Homo sapiens
aaggggaggtatcaaggatgaatctcaggattctggcttaagcagttgagtgagtggtgttagttctcactgagatagcaaataggaagacaggtttgggggaaggtaatagtttgcctatagatttgttgaatttggggtgcctggggaaaatttgagagggaagatctctgaagcagtttggatatgttgggtaaggcttaggaaggagaaaagggctgtaaatacatatttgatagtcatttgtacacatgatttgagttgaagctgtaggagtgggtaagacagatcagggagggaatagattgcctaccatgagaaaagagacctaggagagacttttgaggaacatctttatttttttacagtggtagaagaagagcatcccacaaagaagaagaaagaaatggagaagg

SEQ ID NO: 2789 - DNA, 449 bp, Homo sapiens
aatatacacttgaaattaaactcaaaaaactgtaatcctgtaacgataaaataaaaattatagtaaaaagggaaagttaatctttgttttaaaaataacaagtaccaaagtcatgtaaagaagctaaaagtactggtcttgaattatggcttcatcaagtgttggctttttgaaattagagaagttattggaatgtctttgtgcctcagtttctttatctttaaaatggggataattgcaatatctaccttgtaggattgttaattcatataggacacttggaacagtacctgaggtgtggtaaacactagtaagtgtttatttttattatgctgaataaaggctgtagatcaagaatgtgtcccaaagttgtgaatagagtgtcacaatgtatccaagaattgtgaagcaatgattctgtacaatacaataaagtttaattatttaca

SEQ ID NO: 2790 - DNA, 423 bp, Homo sapiens
cctcctggacttgggtgatcctcccaccttagcctcccaagtagttgggactacaagtgcgcaccagcacgcccggctaatttttgtattttttggagagatgggatttctcttatgttgcccaggctagtctcgaacgcctgggctcaagcgatccacctgccttggcctcccaaagtgttgggatgacaggtgtgagccaccgtgcccggcccccttcactcttctataccacttatttccatttatgtctacttaaaaagtggtactagacctaaagaaggggaaattgattgggaaggcttgctttctttcttttttttgagacagagtctcactgttgtcgcctgggctggagtaaaatggcgcgatctcagctcactgcaacctccgcctcccgggttccagcaattctcccgcctc

SEQ ID NO: 2791 - DNA, 1583 bp, Homo sapiens
ggaagtgtgcgcagagcacctcagcctgcctgggtgtgcgcatctgcggcatgcaggtttatcaaacagataagaagtactttctctgcaaagacaagtactatggaagaaaactctcagtggaggggttcagacaagccctctatcagttcctacataatggaagccacctccggagggagctcctggagcccatcctgcaccagctccgggccctcctctctgtcattaggagccagagttcataccgcttctattccagctctctccttgtcatctatgatgggcaggaaccaccagaaagagccccaggcagcccgcatcctcacgaggctccccaggcagcccacggtagctctcccggtggtctcaccaaggttgacatccgcatgattgactttgctcataccacatacaagggctactggaatgagcacaccacctacgatggaccagaccctggctatatttttggcctggaaaacctcatcaggatcctgcaggatatccaagagggagaatgaaacttcctgggcttatctggattcttctgggctatagatctcaaatagagacctgttggttgctagggtagtccagacaccccttagatgtcttcataatagtcctatctaccttcaaaaaccatctctatatatggcagactatattaacagctgctgaacaaatcagctctggaggtgattccacatcccctggcattatgctctaatgctgctcatcggagaacagacagccaggataaagtggcaccttctggagtacactggagggggcagcccaagttagaggccagcattgctgacattctggaatatttgcatctaaaaatgtttactcgttgccatgctgcagtccgcacaagctgtgaggcagaaaacttgacttgaagcagccttgaagagtgagttcatgagctcatggtttttctccttgtatgggactgctcgctccaagggcaggcagagctcatgaatgcctcttatcttcctaagcggagttttaggtgacacaggatgaagcagaaggagatctacccatctcatctgctctgcacccagcttctaagtggacaaagccaagcccaggcatgagctctggcaaagcaagaccccagattctcccatttttgcctgtggaaaggagggtccctttacaggcttttttttcctttttttcccccaaaatctcttaaaatgaggaatctcttagcagactttggagttccccattctgccacattctgaccatgagacgcggcttgcagtgggggtgaacgcacataaaaagggaccactgacgtcctgctctactctctgctttctatttatttattttgggggtgggttggggagtcagaagaacctggaggacggaggaaaccaggggcaatgtttacaagactggtggacaagtgtaaatatggaataagaacaaacagttctaattaattccttcttctgcagtatggaaacctattacgatgcccttgagtcaagcactgagatacgttacccaattagggaaataaatttgttaataaaattgctgaggtcaccagt

SEQ ID NO: 2792 - DNA, 485 bp, Homo sapiens
  misc_feature (71)..(71): n is a, c, g, or t
gagaccagcctggccaacatggtgaaaccccctctctgctaaaaatacaaaaattagctagacgtggtggntgtgtgcctgtaatctcagctgctcggaaggctgaggcaggagaatcacttgagcccgggaggcagaggttgcagtgagccgagattgtgccactgcactccagcctgggcgacagagtgagactccatcaaaaaaacaaaaaatccctggcgtagagcagtattgctgatgaattgaggtgttttatagacaaatttttttaaaaatttatatattataatgtgaaatagaaaagcaaactcagatgccaaacctatgattttatgaatattctcgcttaggacttacgtaaaggttttgtgaagcactaaaattaaggagatctgtttttcacaaatttgagctctcttaaaatgtcgggatggcacggtggctcacacctgtaatccagcactttgaggggacgaggcagg

SEQ ID NO: 2793 - DNA, 904 bp, Homo sapiens
atgagcccttctctctaatgcatttttcattcctgttcctcttttgcttcactttccctctatcgactcttgcgacctgtgtctctgatgtctctggggcccccagttctgtcttgccataccaaaaaaccttcttcagcaaaaaacctctttctgggacagttcatatcactctatgaataggcccctgaagtgttgaggtcaaggacatgtgtgaacgtggaaatgtatttatggaaagaccctacactgagggtctctaactaaacatttcaggtatgatgggcaaaatgctggtttgttacagaaatgactgaagaagacctaggggccatagtgggccacaggccaagcctgcaatacagcctgaagtgtgggaaagaatgtatcagtcctgttgatggagtggtgtgtttgctgtctctataaatatgtcagggtttgaaagacagaaaacaaagcatctttgctgaccgccagactcccagggtatatgtggctactgcaaattagcgaggcttgtttatctgcttcaacttgactcaatttgcatttcttgagccactgtctattgtggataatgatttcatcaacactttctcagcatcagcagcccctccagagtattccttgaattttcttagctttgtgcaacccacgagcacttaatatatcactaacccttgagtttattggagggagtgaatgaaataatgaatgtcaataacgttacgcaatacctggcacacagtagtggcaacaagggggttctttcaacaccaatgactcccaaatccctctgggggatctcgaaacgggcgaacacggggggggcccctatagtcccaacaggggggacgagaagaacccccaaggagctcaagtgtagaccccaccttcctcc

SEQ ID NO: 2794 - DNA, 288 bp, Homo sapiens
gtgcttaaaattccatagtaaatgtattcacttttctctagcaatgtcagagctaaaaaggggaattattgtcagcagcataaacagattatgcttatgaaccaagccacaagaaaggagttcatacttctttctggtagatgaatgctttgtcaccccatgtcaccctatggcaaaagtataacattcaaaatcaactgtagaaaagagacaaatacagattcttcagaggggtgaataaaaactattttcatatacatatgtcagttcttataaaaactagccagg

SEQ ID NO: 2795 - DNA, 803 bp, Homo sapiens
tcgatttggaattaagttacattacagagaaagtgtgggtccgtgtttttctctctgtttgggaaaaggtgggttggacagaggaaggatggcccagggttataagcttggctccagtacagccgggagacccccaggcagcatgagtcggtgggactggacctgcctggctggtgtccagaggggcccgtagccagtgggacggtgctgcacgtggtcgtgcctcaagccctccactgcaccgggcgccctggccaaccctgccaggaagtaaggagaccggggaggccactgagggcctggacctggctgggtagtcagaagtgggggcaagtcttggctggcagcccctgagatgtgtagaatgtttgaaaattcgcctgtgggttgacctgaacccaccgggcttgaaaccaacggtccaaagtttggagtgtggtcttaaggaaggagaccactactactcctgctgccttcctcccaccaccttgcctagttcacaagacaggaggagagaaaatgcaaaaagttggaaaaaaaatgcaaaagtaagataaacagacaaccttggcaccaccacccggccctaggagttaaaaaaaaagtaataataacatcaaccactgacctaaactacttgtgttatctgtaaattccagacactacgaaaaagcattgtaaaactttctgttgtgttagctgatgcatgcagcccccactcacgttttccacacttgcttgatgtatcacgaccctttcacgtggaccccttaaagttgtaagcctttaaaaaggccaagaat

SEQ ID NO: 2796 - DNA, 237 bp, Homo sapiens
gagaagttaccaaaagcagcaggaaaagtttaaatcattcactccccaaattttgctttcagcttagcttaaaggaaaccccaggatggagatggctctgcccaagcccgagagcaggcagacaggaaagccagcccagaagaggaggcaggtacaggtgcccacacctctggcctcacctcatgcatgaaggcacatcccgatcttggcaggatttctcatctgccctccaatttg

SEQ ID NO: 2797 - DNA, 560 bp, Homo sapiens
agcccccaagttgtaaagaaatatatatcatgctccggctcctccaaatgtaaaaaaaaatcagccattcctatctaattttgaccacgtgttcatattttcaacttgttttaattgtagcaagtaagaaaacttgacattctctagtttttcaaaggaaaggtgacgtatacatgcttcctaataggagatcataaccacttttaaaaacacatcagccaaatatacggaagagattgctttatggtaacacaaggaagaaggatctttaaaaataattcctggccgggcacggtggctcacacctgtaatcccagcactttaggaagccaaggtgggcagatcacgaggtcaggagatcgagatcatcctggctaacacggtgaaaccctgtctttactaaaaatacaaaaaaaattagctgcgcatgatggtgggcgcctgtagtgccagctactcgggaggctgaggcaggagaatggcatgaacccgggaggcagagcttgcagtgagccaagatcatgccactgcactccagcctgggtgacagagtgagactc

SEQ ID NO: 2798 - DNA, 328 bp, Homo sapiens
aagttatatgtgaaatgaatatttgtcacccatccactgatttgcacctgtaagcaaatccagatatccagcccacagtctatactaagtgcaataacagaggaaccaaaagacatctgttcagagaaggaaatgcctccaagcctgcctgttctttttacttttgtctcgaagcagttatgctcatgcagttgcagtactggggtgagtgcctggcaattccatgccgctctgtataccctgggagatgaacactctggagcagttttctgaagagcttacataaattagaagttaaatattcaaataacaggggttccgttttgcc

SEQ ID NO: 2799 - DNA, 573 bp, Homo sapiens
gcggccgcctactactactaaattcgcggccgcgtcgactaataatatatcttggcaattattcaatattaatatgtaaatagttgcctctttctttttcatgcgccatataatatggacttataatttatttaacctctatctaggttggttttaggcattggttattacaaataatgctgcattgaatacctttgtatgtaaagtcatttcccacatctatgcctatagaataaattactagaattgaaataattcagttaaagattatgtgcatttttaattttggtagttattgccaaactgctctcaatggaagttttatgaattcccactagtgaatgcatttgtcctcacaattatgtcagtgaaatttttgttctttgccaatgcaagaaatggaaagtatctcttggaaactaatttgcatgttttttttccttgcacagttatattttcatatgttaaagagccatttgtatttcttggtgaattgttcataaactttgcttacttattatctaatgtctgactaatttgctacactctaaattcccaattcatacttaagtc

SEQ ID NO: 2800 - DNA, 1616 bp, Homo sapiens
gtattaaagggaccggagcggggcagttcccgacgccgcagcgctcgctttcccttccctcctctctggccctccctcctcccacccactggctccctcccccagcgctctccagtttctgtgccccaggagctacgcgacagtcttccaggattatggagtttctgagcgagaagtttgccctcaagagccctccgagtaaaaacagtgacttttacatgggcgcaggaggtcctctggagcacgttatggagacgctggacaatgagtccttttacagcaaagcgtctgcaggcaaatgcgtgcaggccttcggacccctgccccgcgccgagcatcacgtgcgcttggagaggacctcgccctgtcaggacagcagcgtgaactatgggatcactaaagtagaaggacagccccttcacaccgaactgaatagagctatggacaactgtaacagtctccgaatgtctcccgtgaaagggatgcaagagaagggagagctggatgaacttggggataaatgtgatagcaatgtatccagcagtaagaaacggaggcaccgaaccaccttcaccagtttgcagctagaggagctggagaaagtctttcagaaaactcattacccggatgtgtatgtcagagaacagcttgctctgaggacagagctcactgaggccagggtccaggtttggtttcaaaatcgaagggccaaatggagaaaaagggaacgttatggccaaatacaacaagcgaaaagccattttgctgccacctatgatatatcagttttgccaaggactgacagctacccacagattcagaacaatttgtgggcaggaaatgcaagtggtggttctgtggttacttcatgcatgttaccacgtgacacttcctcctgtatgacaccttattctcactcgcctcggacagattccagttacacggggttttcaaaccaccagaaccagttcagccacgtgcccctcaacaattttttcactgactctcttcttactggggcaaccaatggacatgcatttgaaacaaagccagagtttgaaaggaggtcttccagtatcgcagttcttcgaatgaaagccaaggagcacaccgccaatatttcatgggccatgtaacatacagtactcttttatttttcttttaatagcaaagttaaacattcttatttctcatatttaaaggataccacaataagctgctgtgtgtggaattgctaaaggtcaagatattcagtgagaccagcttaaatgaatagttgttatttaacattaaaatctaagaatgaacctctgaaaagactaaataggtttaccatgtgccagtctccacaaaccctgttttagtagtaaggttttctttttctattgtacaagtcaatgaaatatgatcacgcaacttattaaagaataaatgtgttaaacaaattcttctgttatagattgatttatgttacttctgtataacaagaaatctcatgtaaaataatacctgataaagaaggaaatgcactggggaaaatgtcaagatgccaaagtcgtcaggtaaatattgaatcagggtgttctggggagttaactgctctctctctctctcca

SEQ ID NO: 2801 - DNA, 1442 bp, Homo sapiens
gtattaaagggaccggagcggggcagttcccgacgccgcagcgctcgctttcccttccctcctctctggccctccctcctcccacccactggctccctcccccagcgctctccagtttctgtgccccaggagctacgcgacagtcttccaggattatggagtttctgagcgagaagtttgccctcaagagccctccgagtaaaaacagtgacttttacatgggcgcaggaggtcctctggagcacgttatggagacgctggacaatgagtccttttacagcaaagcgtctgcaggcaaatgcgtgcaggccttcggacccctgccccgcgccgagcatcacgtgcgcttggagaggacctcgccctgtcaggacagcagcgtgaactatgggatcactaaagtagaaggacagccccttcacaccgaactgaatagagctatggacaactgtaacagtctccgaatgtctcccgtgaaagggatgcaagagaagggagagctggatgaacttggggataaatgtgatagcaatgtatccagcagtaagaaacggaggcaccgaaccaccttcaccagtttgcagctagaggagctggagaaagtctttcagaaaactcattacccggatgtgtatgtcagagaacagcttgctctgaggacagagctcactgaggccagggtccaggtttggtttcaaaatcgaagggccaaatggagaaaaagggaacgttatggccaaatacaacaagcgaaaagccattttgctgccacctatgatatatcagttttgccaaggactgacagctacccacagattcagaacaatttgtgggcaggaaatgcaagtggtggttctgtggttacttcatgcatgttaccacgtgacacttcctcctgtatgacaccttattctcactcgcctcggacagattccagttacacggggttttcaaaccaccagaaccagttcagccacgtgcccctcaacaattttttcactgactctcttcttactggggcaaccaatggacatgcatttgaaacaaagccagagtttgaaaggaggtcttccagtatcgcagttcttcgaatgaaagccaaggagcacaccgccaatatttcatgggccatgtaacatacagtactcttttatttttcttttaatagcaaagttaaacattcttatttctcatatttaaaggataccacaataagctgctgtgtgtggaattgctaaaggtcaagatattcagtgagaccagcttaaatgaatagttgttatttaacattaaaatctaagaatgaacctctgaaaagactaaataggtttaccatgtgccagtctccacaaaccctgttttagtagtaaggttttctttttctattgtacaagtcaatgaaatatgatcacgcaacttattaaagaataaatgtgttaaac

SEQ ID NO: 2802 - DNA, 180 bp, Homo sapiens
taaaaagttctatttttcccctttgaattttctcagtacccttgtcaaaaatcaattgaccataatatgagagtttatttctggattctcgattctattccattcatctctatgcctgtttttatgccagtaccatactgtcttgattactgtggctttgtagtaaatactaaaattgag

SEQ ID NO: 2803 - DNA, 369 bp, Homo sapiens
gagcaaggaagctggagtgagggagggaggcagaaaggagagaggacacggtgggtcacagcacccaggggtacctgggacaggcactggcctttggcttttcaacatggaggattcaggcaggccctgtcctctctgcttttgaatctcttgcctgagaggggaatcctaattccaccctcccctgcccaacccaaccatgatgccagtgggtcgctggtgcctcctctcacagaggcaaggtctagggtggggttggggattccaagtggagatggggtttgtggacttcgacttgggaagagtggaccactgaatgcacttctcaaaatgacagggccctgtttgttggtggggactgcaagttgg

SEQ ID NO: 2804 - DNA, 500 bp, Homo sapiens
gctatttctgtacctcatttccgatttttgtcagtttcctttttttttatctataaatttgttccgaccacgaggcatccctggtgtctctctaaatctgctgtgattctgggggctgcccgattcgcaaattgtttgttgctcaatcaaactcctttaaatttaattcaactgaagtttcttttaacaagtacaagatcatcattattttttgccaacccttataattgatccctctatctttagtccttttatttattttcttactcaattactgaaataaagaggagaaatgaactctagaggcagaaataatctcagcatcataaataaaaccatttcccttttatagcactaaatgcccacaagagaaagcaggaaagatctaaaatcggcaacctaacatcacaattaaaagaactagagaagcaagagcaaacaaattcaaaagctagcagaaggcaagaaataactaagatcagagcagaactgaagacaca

SEQ ID NO: 2805 - DNA, 446 bp, Homo sapiens
tgacagagtttcactctgtcgcctaggctggagtgcagtggtaggatcttggctcactgcaacctccgcctcctgggttcaagcaattctcccgcctcagcctcctgagtagccgggactacaggcggccacaccatgcccggctaatttttgtattttcagtagaggcggggttttgccatattggccaggctggtctcgaactcctgaccttgtgatccgcctgcctcagcctcccaaaatgctgagattacaggcgtgagccaccacgcctggcccaagatttcttaatatgcacgttttcatgtacttcttttaaaataactgttaaacaacaatttgaaacacacacacacacacacacacacacacacacacacacacgaatatagcattgactcgtctcacagaggaaaagtaaatgtaaaaactaagacataagattt

SEQ ID NO: 2806 - DNA, 691 bp, Homo sapiens
ggacagtacatgaatcactcctactaagagatcctgaaagaggtcatcaaagccaccagaaactattcctggacagaggaggttttataggtgtggttggtctccttactgacgtgtcaactacaaatgcacagggttctgcctgaaatgttttagttgttgcagatgtgtagcttctatatgtaaagtcttcactgcatgtgctacagaaacttgaactatctgaagagaggatggagtcatcagatactgggaacaagaagactaagcaataagtgagaaaagaaatgatggaatagatgtgaggcttccacagcaaactcctgtaaaacctgcagttaaacctgagcaagaggaatgtgacatatgtgtctttgctctttatttggatctgtgtgtatgctcttggagcagtggcgaagaagctccaggtaaggtatagagttctttatttttcatcaagctaagatttttaatgaaacaatatccaaaatgcttgctatgaaagattcaagtgatttttgtagttctacattcttgggtaggagaagataaaaaatgcagttattacaactatattatgagcctcttctaaccttttctttaaagaggtaggtatttatatttctaataaataaaaacgttgtatcaaataagtaaaataaacaatgttattttacatatggtctac

SEQ ID NO: 2807 - DNA, 442 bp, Homo sapiens
ggacagtacatgaatcactcctactaagagatcctgaaagaggtcatcaaagccaccagaaactattcctggacagaggaggttttataggtgtggttggtctccttactgacgtgtcaactacaaatgcacagggttctgcctgaaatgttttagttgttgcagatgtgtagcttctatatgtaaagtcttcactgcatgtgctacagaaacttgaactatctgaagagaggatggagtcatcagatactggatccagtcaaaatatttggatgctttcagaaacatctgcctagctgagatgtggggaaggaacataaagcattttctctcccagtccctgctgaaagggtgagcctgtggtctatatatataggaatgactaaagttaattgttaagaattatttgataggcaaaaataaaagctaatgctttatatag

SEQ ID NO: 2808 - DNA, 283 bp, Homo sapiens
ggtatgaatatagcaagttggttttattatatttatgtttagagattatagattgtccttttatgtgacatgttttccccacaactgttttttccacatgtgcaggaggaggttttataggtgtggttggtctccttactgacgtgtcaactacaaatgcacagggttctgcctgaaatgttttagttgttgcagatgtgtagcttctatatgtaaagtcttcactgcatgtgctacagaaacttgaactatctgaagagaggatggagtcatcagatactgg

SEQ ID NO: 2809 - DNA, 398 bp, Homo sapiens
ggtgtttagaatgttgagacacggtcagaaatgattggtggtttcatgtgatgcaaagaatttcccatactccgcctgttttctggatcacctgtccccagaaattgcctgaaaacaaatcacaggttgaaactagaaataacttccctctcctaggcagcttggagactggccaccctgtttcttggtttggtaagaatgttccagacacaaggaggggagcaacacacactggggcctgtcgggggttggggtatggggagggagagcattaggaaaaataactaatgcatgctgggcttaatacctaggtgatgggttgataggtgcagcaaaccaccatggcacacatttacctaagtaacgaaactgcacatcctgcacatgttaccccagaa

SEQ ID NO: 2810 - DNA, 245 bp, Homo sapiens
ggaggaggaacagtttcaagttggtgagagtgttgaggggagggaaaaaatggctggtttgtaagatccttgaggtcagggattatttttatcttgttctcttttgtaatcccagtgcctagtacaatgcctgactcaatcaatgtgaatgagtgaataatgaatcaatggtcaaactaatgaactgggggtctgaatgaaaatgatgaggcactttcactcagccaataaacttttaccagccc

SEQ ID NO: 2811 - DNA, 292 bp, Homo sapiens
ggggattttatagtttttaccttcacatacaaaagttactaaatgatcaaataaatgaagaaatgagtaaaagaaagaagcaaagtgtggtgtgaactagtggatgtcagttataactacagtggaaagagaaagctggcctccccagtctgtatccccaacccttggccattttgctgcttcagccacatgttatgagagaggctgcaggtatgtctttccagcacattcactccatttattacggtaaggctgttggcgcgatttggagtccctgactagcagggcttgc

SEQ ID NO: 2812 - DNA, 293 bp, Homo sapiens
catctgcaggggaagaacgaagttgggaagaaacagtgaataaaggtggacggtgcttcactttttatagcttctcttcccaccctaggggaatgagtggtacggatggtaaatacacccaactcctccctcaagcttcctgcacatttgagggaaacaatccttattaaaatatgggaggggccaggtgcggtggctcacgtttgtaattccagcactttgggaggctgaggcaggtggatcacctgaggtcaggacttcaagaccagcctaggcaacatcgcaaaaccctg

SEQ ID NO: 2813 - DNA, 381 bp, Homo sapiens
cttcaccaccagcccaagtctaaagaaactcacaaatctgctagtgagtcaccacctccctctcctctgagcaactgtaagatacctagtagtagccctgccctatcctggaattagccagaacgtcctcatgtagcctaccaagaccgcttctggccctgtaatcaccagtgtgcatttgaattctgactccactatatatcagatgtatgggtttgggtcagttacccaatctcattaagttactgttttcttatctgtaaaaccctgtatctcatgtagataatgtattccctgcttagcacagtccctgcacagaatgtgtagtcagctatgatggtgctggtggtggcagcagcagtggcagctttcaaaggctga

SEQ ID NO: 2814 - DNA, 441 bp, Homo sapiens
aaatgacagggcaaggcttgagccagatcttctgagtcctatccagtgttctttccaatctactgcttgttttgtaaagcatggcacttgcttataaatccctctgaagaaataaaactctctagctctcatccttgtgtatttaccctagaaatatgaacatttatgtccacacaaaaaccttacacgaatggtcataacagctttgtttctattagcaaaaaactggaaacaactgaaatgctcttcaccgtgggcacatataaacaaattgtagaatattcacatagtagaatactacttagtaataaaaaataaaaaactattgatgtacacaacaaattcagtggctctcagggccattatgatgagtgacatagcaaatcacagtattttacatactatatgattccatttacataacattctagaaatgagaaa

SEQ ID NO: 2815 - DNA, 588 bp, Homo sapiens
aagccccggggtcaggtaagtagcctcaggggctcccttggccagagcttctgttcaggcgctctccatgaaagcagccctggaaaactgagcctgaagtcagagacagctcaggcccagcacagggggcagtcccttgccactggctcgggcccttccctggactttttgccttcctccatttttgcttctctgggtctgtcttcgtccatgcctgctctgagatgctcccccacccctccctgtacctgggaccaccgccctctggtgttttctttctcctgtgagtccccccctggatactgctgctttctggaaggctgtcctgggttacgtcctgcgctcctctccctcccacgcaaagacaaccagaaggacaagccttgagcacgccgataccccagctcgtggctccccagaccatctgtttcccgtgaagacgccccgctccccgtgtctgtgtcctgcgtgtatgtgtcgtgtgttgtgtagattgtgagccccctgggcagggatccctgtctgcatacatgttccatgtggcacgcccaggtgtgctaataaacgttcatcttgcagaaaaaaaaa

SEQ ID NO: 2816 - DNA, 423 bp, Homo sapiens
ataatttcaacgttattttttaaaattaagatgaaatgaacaggttacaaccagtaaataaagagcgacttaacactcttgttacctcattaaaattatttgctgtttttaagttcatttcttgctatttagattctggagagaatcttgaccctcgaaatggaagatctgattttgggtcctgctgtactactcacagggtgctcatacatcctctcgaattactcacagtctctggggcttattttccccctataatattggaattaggatactggcattgagtaatttagagggttttagtgaggagcaatggaaataatattttaaaaaatgctttgttacacacaaagtcctgtgcaattgtaaggtattacgtttaatatcggaactcaataaaatttctatattaatcaaaataat

SEQ ID NO: 2817 - DNA, 485 bp, Homo sapiens
taattaccagcactcctgctgcaggcagccacccatggggtccaagtggcctgtggaaagccagccctgatcaaagagccctctgcagccgctcctcacacagagccagttccatgggacaccccagtagagagcctgtaagtttgtgtgcacagtcctgcatcagcaatggcaggttctctcttaccctgagcttattacacctgggtatattgccatgtggagccacatgtattcttttagaaccactcccttatcccaagcccttttttcacaatgaaggcttgcgcctctgcaatccaagtagacttcctggaagtagtgtctttgctgaagatgttgtggacataacagacacaccaggctctgctagatgacgtccctgctgccgctctttccagacagagctcaggtgccagcggccaccattctgactcagcggtggtcataatggtccttttgtgggggacaggcctttgttaggg

SEQ ID NO: 2818 - DNA, 730 bp, Homo sapiens
agttcatcctgacttccagttatttacgaggaagaaagttttggagtagttggcctctgacagtcttgcgtacagcttacatcatccataaccaaagcagtttagtccttcctgttgtaggactaataacttgcaaactgcttctgggagaacccatcacagaaattcatgaaacttgttgaattgacagtaaacacctggacaggactcagtaaatatggcttaaaagtgacagactgaatgaattcctttgttcaacaaatactgtttagctacctgtttggagccaggctccctctaagtgctaggaatacagaggtaaacagagcagaaggtcctggtcttacagagcttactttctagtagggagaagacagtagtaagaaaatgtaagaatttctgagattaatgctatgaagaaaaccaagcagggaaatgagactgagggatgggacaaggtgggacaagcacacccgtggttgaggcagtcagaggaggcttcctgagcgctgagacaggaacaaaaagaagccagccacttggtgacccgggagaagagtgttccagacggaaggtgccgcatgagccagaggggcaggggcagggtggaacttgtgggtgccgcatcaagagaagccccatgtgaatatgtggagcctaagtcacatgggacgttggccagagaaggagcctgccgtttcttctatctgccgtggaaaggcatgggggg

SEQ ID NO: 2819 - DNA, 957 bp, Homo sapiens
gacctgccccatccttgactctcagcttgccatgtgacatgctttggtgtaaagaataaggtggaagggatgatgtcctggttttaagcccagaggtaggcctgggctcctgtgtttctgtatcattatgagagcatggctgggttcacctgcttttccaggaggaggaaccagtgggaacactaagatagccataaacttcttctctattacactatacccttttctaatctgtattttgactttgttaacaaatcctcaagtcaataaatattcttccataatatattttttggagattcttgccactacacttctgggaaacaaatgaacaaattacattttctatgtattatttttctgcttatttacattaaattaaaaaaattcacaaaacaaggaatacgctattgcagagtgggttaggcagtggaattccttttctaaaatacaatgttatctatttaaagcacactcagcaaaatggcttggctaccttcaccagaattctctaccataacattaatctattactttagcgtttcagaaccaagaattcatcctcaagtactattgtccttcataaaccattcccacaatttttttcattatttgaaaaattaaacttattttgagatgattatagatttgcatgtagttgtaggaaatactacagagattctgtgtaccctttatctaatttctcccaatagtagcagtttgcaaaactatagtacaacctggcaaccaggatattgacatcacagcattccattgatcttattcagatctctccagttttacttgtactcatttgcaaaacaactttagaggctatggaatattctattgtattgataaatgtatcagattttcttaagcaatcccttaatgttgaacattagtatgtttctaattttcagtgcaataaaggtttcataaacaaaaaaaaaaaat

SEQ ID NO: 2820 - DNA, 210 bp, Homo sapiens
ttttgagattttattgagtactactaatcttgacatattttggttggcaccacattcttggtatagtgggttagtggttgaatagtttgcagactttgtgaaacaaaatcctcatttaatggtttagtttggctacattttgaaaatatacaaaaacataatgcacttttattttatagggaattttttttcaacttgtggctttgtttt

SEQ ID NO: 2821 - DNA, 341 bp, Homo sapiens
tttttttttgagatggagtctcactttgtcactcaggctggagtgcagtggcgctatctcggctcactgtagcctcgcctcctgggttcaagcgattctcttgcctcggcctcttggtagagatggggtctcaccatgttggccaggcgggtcttgaactcctgacctcaggtgatctgcctgcctcagcctcccaaagtgttgggattataggcatgagccattgtgcctggccccataaacaccatttctaatggctacaaaagcatatattacattccaaaatctaagccattattgttaaatataccaaacactacagaaacaaacattttaataag

SEQ ID NO: 2822 - DNA, 470 bp, Homo sapiens
agtaagaggtgtatcaggcagtccttgaaggagggggcatatgagtgctttcaggctggtcttgaactcctggcctcaagtgatctgcccgcctcagccttccaaagtggtgagctaccacacccagcctgattttcatcatctacgtatttagctcctacagaagatttttaaaaatagaatacgtggctgggtgcggtgactcatgcctgtaatcccaggactttgggaggcctaggtgggtggatctcaaggtcaggagtttgagaccagcctgaccaacatggtgaaaccccatctctactaaaaatacaaaaactagccaggtgtggtggtgcacatctgtaatcccagctactcaggaggctgaggcaggagaatcacttgaacctgggaggcggaggttgcagtgagcgaagattacaccactgcactccagcctgggcgacagagtgagactctgtctcaag

SEQ ID NO: 2823 - DNA, 324 bp, Homo sapiens
tgtaacatcctcacccctgttcctttattacttatgcttctcagatttcttccatgcagaataaactagcttaatatattccaagtcacacttcaaaatagctttgttacctccctccatgcttattcctcccgtgttccccagagccgcttccctaagaaatgtaggcagcagagagctaagctaaggggtttgaatcagtgctgactttaggagcctacaacaaactataaacagccagtggagttttggttctcccggggctcctgtgtaagcagaagccctcatcactacatctggaaaaggagaagcatatgtcagcag

SEQ ID NO: 2824 - DNA, 369 bp, Homo sapiens
gtgcccggcagagagcaaggacccctgaccaccggctgggttggtcctgggagggccccggtgatacctggggggtgtacaccatggagcagagcctcctccagtgtagcctgggagcctctgtgaggccacagcccccaggaagagcacagtgctgcattcccaggtgctgccggctgcgcccctcccagctgcgtgtcctcacctgccggccccagctgtcgctgcccacgccctgcctgcctctcctgacaggaacttcccaagcagaggcctcaggtagcaggcgctccttgtcccctctgccacctgggctgctgagggtgtatcaccaggagtgagctcaggacctggacacccaagcccagg

SEQ ID NO: 2825 - DNA, 357 bp, Homo sapiens
attcaggttcccgtgtgagaagggatactgtgattcattcttctgaagagctggtggagagcccccacccccatcccatcagtagcccctggggactgaagcaaatgggcaagtcggtctatccccaagccacaacccctgcgtaatgatgatggagaccttcaagcggccaccccttggcactgcagcctttgaataacaaggaaaagcaacagctgtgagaataaattcttgcatggtaaacttagggcctcgaactcagagtcgaagcactgtatttctcatcatattccttccactagggttgtgatgatcttgccagaaagtgttgtttctcggttttctcctgtcttttct

SEQ ID NO: 2826 - DNA, 453 bp, Homo sapiens
cttgaatagatttagaaaggtcactgaagaggcaggtggattacaggagttaagggggacccttctccactccttatgtttacttccacatgaaggaccatcattaatttaactcacggcctggagtacttacctgatttgtgaatttgggagaaaaaaattgacatctcagcttcatcctgttttcctctttggagggagctgccctcaggaagcacccttatcttgggggagctcttctgcccatgggtagactagcattggcgtcttgctgctgacacaggttcagtgtttttttgtgtgtgtttgttttcgttgttgttgttgttattttcgagactccatctcaaaaaaaaattcttactctgcactatttttaaattctcccgatgtggtccagtaaactagtgagttggcttatgaatatattctgccagagacttagaaaacaaa

SEQ ID NO: 2827 - DNA, 481 bp, Homo sapiens
ctctcaggcctcagtgggcataagagtcacgaagggtcgtgtatttgaaatgcagactccctggccctgccctagagaccctgattctgcaggtgtgagcgaggccctggaatctgcattcttataagcccatcctgtgattccattgtcgggaatgctgcaaagtgctgctctcagccttagagtcgaagttcgtggctgggcacggtggctcacgcctgtaatcccagcactttgggaggctcaggcgggtggatcacctgaggtcaggagtttgagaccagcctggccaacttggtgaaacctcatctctactaaaaatacaaaaaattagctgggcgagttggtgggcacctgtaatcccagctactccgggggctgaggcggggagaaccgcttgaacctgggagctggaggttgcagttagccgagattgtgctattgtacttcagcctgggcaaaaagagcgaaactccatctc

SEQ ID NO: 2828 - DNA, 184 bp, Homo sapiens
tcccagtactcctcagaccacagcacaaaagtccagcaagttactccccaccccaaccccacaggggcatagagacccctgggggatgggagctgcttggcccagatggtcaactatcttaatagagtgtgggaggccaaggaggaagggcagagcctgtgggcaggacatgtggcccaacaga

SEQ ID NO: 2829 - DNA, 284 bp, Homo sapiens
actggtctttatttctcattaccattatgtcaggtagaaacaattaaggggaaacagtgagtgcctggagatgttctgacttaataatagtgagtttctttatcaaggctgtcaatgggtaaatacaaggcacacaccataaaccaaggctggccacgatatggttctgagccacctagctctgccaagtttgtgaacagattttaagattctaagaatgtgccatttcagaagaaaggagagggaatccatggaaaattagcctgctggtgagagagacatta

SEQ ID NO: 2830 - DNA, 398 bp, Homo sapiens
agtaacctcataatgcattcctgaggagcccagttagtccttgctcctgtccatcccacctccttcaggcggtagaacagaagaagggtcttcatctcaccccagctaaagcatctctgcttccagaaagtgtggatgagtgggagccataaacctggggaaataagccacatgctacccttttggttgttgtttattttaacaaaattctatgaccccagggaccatgtttctaagagtagccacttgaagcagaagggaaatatttagttcaaattctacaatcacagccaaatacagtcttaatgggcagccagcaggacactgtgggaaagagagtgttcacacaccattcttatgtgggggagttagggatgatgaagaatcagtcataggtc

SEQ ID NO: 2831 - DNA, 440 bp, Homo sapiens
gctgtgagttctgcagcttcacagaaatgaatttggccgacaatcatgtgagctccattagaaatgcaccctaagctctctcaacctctcccatcccccacagcacctatttactgattatctgtacatgatagcagggcaggaactagactctcagccccctgaggacagaccttgtctgtcagtgcatttcactgtctgtcccagcaccttgcacagagcctggcacatatcaagaacacggcacatttttattgagacagactcctcaaagctggaatctaaaaccaatggcacctaatctcagccaaaaaggttaatgtgacacctgtgcttttattacccatttctgcagatggaagggttggttgtttgtggctatctcaagtgaaatgcagaattagtgaataaaattttcatctgaatttaaagaaaatctt

SEQ ID NO: 2832 - DNA, 1204 bp, Homo sapiens
tttaagcaactgtgtgcggctaagtgatgcctctgttatgaaactatctgagcgctgccctaatttaaactacttgagtttacgaaattgtgaacatttgactgcccaaggaattggatatattgtaaacatcttttccttggtatcaatagatctctctggaacagacatctctaatgagggtttgaatgtgctttccagacataaaaaattgaaggaactttctgtatctgaatgttatagaatcactgatgatggaattcaggcattctgcaaaagctcactgatcttggaacatttggatgtctcttattgctcccagctgtcagatatgattatcaaagcactggccatttactgcattaacctcacatctctcagcattgctggctgtccaaagattactgactcagcaatggagatgttatcggcaaaatgccattacctgcacattttggatatctctggttgtgtcttgcttactgaccaaatccttgaggaccttcagataggctgcaaacaactccggatccttaagatgcaatactgcacaaatatttccaagaaggcagctcaaagaatgtcatctaaagttcagcagcaggaatacaacactaatgaccctccacgttggtttggctatgatagggaaggaaaccctgttacagagcttgacaacataacatcatctaaaggagccttagaattaacagtgaaaaagtcaacatatcagcagtgaagaccaaagcagcgtgaccttcagcctcaagcaggaagaacaaaaaatcaagaacttggcaagttttctccatttgttgcaagtatgtttactagctgaatctcaataacaatgtaaacaagcaacaaaccatcttctgattcttattccaactacaaatatttccaaacacatcagtagttcttctgtctaaataatcatgatttaaaaaagaagccaggccaggagcggtggctcacacctgtaatcctagcactttggtaggccaaggcgggtggaccataagtcaggagttcaagaccagcctggccaacatggtgaaaccccatctttactaaaaatacaaaaattagccgggtgtggtggtgggcgcctgtaatcccagctactcaggaggctgaggcaggggacttgcttgaacctgagaggcggaggttgcagtgagcctagatcacgtcactgcat

SEQ ID NO: 2833 - DNA, 889 bp, Homo sapiens
atgtgtagtttccttacccattcactgtatctgttaatttctgaactggctgaatcagagttactgaggctttgggaccctgtttatttgtacacttacccatatcctcactctcagcaaggcaagagaggtctcatgtgaattcagattgtgacagtgaattccctaactccaaatttggttgagtttgaaaattttgcactaggggttacttctgcaactagctaatgctaagcactgttattacaggaaggcagctcaaagaatgtcatctaaagttcagcagcaggaatacaacactaatgaccctccacgttggtttggctatgatagggaaggaaaccctgttacagagcttgacaacataacatcatctaaaggagccttagaattaacagtgaaaaagtcaacatatcagcagtgaagaccaaagcagcgtgaccttcagcctcaagcaggaagaacaaaaaatcaagaacttggcaagttttctccatttgttgcaagtatgtttactagctgaatctcaataacaatgtaaacaagcaacaaaccatcttctgattcttattccaactacaaatatttccaaacacatcagtagttcttctgtctaaataatcatgatttaaaaaagaagccaggccaggagcggtggctcacacctgtaatcctagcactttggtaggccaaggcgggtggaccataagtcaggagttcaagaccagcctggccaacatggtgaaaccccatctttactaaaaatacaaaaattagccgggtgtggtggtgggcgcctgtaatcccagctactcaggaggctgaggcaggggacttgcttgaacctgagaggcggaggttgcagtgagcctagatcacgtcactgcat

SEQ ID NO: 2834 - DNA, 5491 bp, Homo sapiens
gaaaagagagcacgcaaaacaacatgggatgatccgcacagagataacaggagctgagattgcggaagaaatggagaaggaaaggcgcctctttcagctccaaatgtgtgaatatctcattaaagttaatgaaatcaagaccaaaaagggtgtggatctgctgcagaatcttataaagtattaccatgcacagtgcaatttctttcaagatggcttgaaaacagctgataagttgaaacagtacattgaaaaactggctgctgatttatataatataaaacagacccaggatgaagaaaagaaacagctaactgcactccgagacttaataaaatcctctcttcaactggatcagaaagaatctaggagagattctcagagccggcaaggaggatacagcatgcatcagctccagggcaataaggaatatggcagtgaaaagaaggggtacctgctaaagaaaagtgacgggatccggaaagtatggcagaggaggaagtgttcagtcaagaatgggattctaaccatctcacatgccacatctaacaggcaaccagccaagttgaaccttctcacctgccaagtaaaacctaatgccgaagacaaaaaatcttttgacctgatatcacataatagaacatatcactttcaggcagaagatgagcaggattatgtagcatggatatcagtattgacaaatagcaaagaagaggccctaaccatggccttccgtggagagcagagtgcgggagagaacagcctggaagacctgacaaaagccattattgaggatgtccagcggctcccagggaatgacatttgctgcgattgtggctcatcagaacccacctggctttcaaccaacttgggtattttgacctgtatagaatgttctggcatccatagggaaatgggggttcatatttctcgcattcagtctttggaactagacaaattaggaacttctgaactcttgctggccaagaatgtaggaaacaatagttttaatgatattatggaagcaaatttacccagcccctcaccaaaacccaccccttcaagtgatatgactgtacgaaaagaatatatcactgcaaagtatgtagatcataggttttcaaggaagacctgttcaacttcatcagctaaactaaatgaattgcttgaggccatcaaatccagggatttacttgcactaattcaagtctatgcagaaggggtagagctaatggaaccactgctggaacctgggcaggagcttggggagacagcccttcaccttgccgtccgaactgcagatcagacatctctccatttggttgacttccttgtacaaaactgtgggaacctggataagcagacggccctgggaaacacagttctacactactgtagtatgtacagtaaacctgagtgtttgaagcttttgctcaggagcaagcccactgtggatatagttaaccaggctggagaaactgccctagacatagcaaagagactaaaagctacccagtgtgaagatctgctttcccaggctaaatctggaaagttcaatccacacgtccacgtagaatatgagtggaatcttcgacaggaggagatagatgagagcgatgatgatctggatgacaaaccaagccctgtcaagaaagagcgctcacccagacctcagagcttctgccactcctccagcatctccccccaggacaagctggcactgccaggattcagcactccaagggacaaacagcggctctcctatggagccttcaccaaccagatcttcgtttccacaagcacagactcgcccacatcaccaaccacggaggctccccctctgcctcctaggaacgccgggaaaggtccaactggcccaccttcaacactccctctaagcacccagacctctagtggcagctccaccctatccaagaagaggcctcctcccccaccacccggacacaagagaaccctatccgaccctcccagcccactacctcatgggcccccaaacaaaggcgcagttccttggggtaacgatgggggtccatcctcttcaagtaagactacaaacaagtttgagggactatcccagcagtcgagcaccagttctgcaaagactgcccttggcccaagagttcttcctaaactacctcagaaagtggcactaaggaaaacagatcatctctccctagacaaagccaccatcccgcccgaaatctttcagaaatcatcacagttggcagagttgccacaaaagccaccacctggagacctgcccccaaagcccacagaactggcccccaagccccaaattggagatttgccgcctaagccaggagaactgccccccaaaccacagctgggggacctgccacccaaaccccaactctcagacttacctcccaaaccacagatgaaggacctgccccccaaaccacagctgggagacctgctagcaaaatcccagactggagatgtctcacccaaggctcagcaaccctctgaggtcacactgaagtcacacccattggatctatccccaaatgtgcagtccagagacgccatccaaaagcaagcatctgaagactccaacgacctcacgcctactctgccagagacgcccgtaccactgcccagaaaaatcaatacggggaaaaataaagtgaggcgagtgaagaccatttatgactgccaggcagacaacgatgacgagctcacattcatcgagggagaagtgattatcgtcacaggggaagaggaccaggagtggtggattggccacatcgaaggacagcctgaaaggaagggggtctttccagtgtcctttgttcatatcctgtctgactagcaaaacgcagaaccttaagattgtccacatccttcatgcaagactgctgccttcatgtaaccctgggcacagtgtgtatatagctgctgttacagagtaagaaactcatggaagggccacctcaggagggggatataatgtgtgttgtaaatatcctgtggttttctgccttcaccagtatgagggtagcctcggacccggcgcgccttactggtttgccaaagccatccttggcatctagcacttacatctctctatgctgttctacaagcaaacaaacaaaaataggagtataggaactgctggctttgcaaatagaagtggtctccagcaaccgttgaaaggcatagaattgactctgttcctaacaatgcagtattctcaattgtgttactgaaaatgcaacattagcaaagaggtgggttctgttttccaggtgaaacttttagctccatgacagaccagcctgtagttatctgtgtacacagtttacagctacaaaaacctactttggtatttattacagaaaagtgctcagttaaatgtaagtgttattccttcagcaaaatattcactgacccaaaactctttatggcattttacaatgcacacagcctcatgcaagtttagacaagtggatttatactgtcttatgagtgcccgcccctgatatattacctcattatgcaaaaataacatatctttcatgactattttgacaaaagtttaaaacacatatgaagttcaaatttcaggaaccaaggactgccagaaaatattagcctctacattacgcatgcatttagaagcttacctgaaatctgccttttataaaggaatagtatggataagtggaattgtacattttttaaacttgattgccattaaagcagaaattataaggttgcaacaatatttgtttctaatcactggctttctcaagagtatggattgacatattgtgttatgaatgcacatctctcagatgtgttgaagcatccattgcatccattttttattattttcttagttttgttcttggacaaatttaaacttttaaaagattattcaagatgaatttaaaagtcaacccttcacacagtttccctactgtatgtagaatccaggtgctgaaaccaagtgtttcttttcccatgctctttgttaaaccccaattatagataatttttccagtcttaagctctgtccaccttcaagtcaattcataaccaagtttttgaacgctgctatgaattgcactgtgaaaagcactcttccctctcagttttcttttcatcccagccatgtttatcagatccttaagaacattgtatttcagtcttttacatcagtctgaattttggaaaagaatgcaatagttgtactccacagtcagtggaactgttccctgagtccgaggctcatgtgtcattctggcactacatttgcttaaattgctattttggcaacagcacagaaaactaatatttttaagcagagaatcttggcaatgagtgagagatgttaatttcacagaagcacaactcccaacccaacccttaggaaaagccctcttccatcgttacagtgctcagtgaatattaatttagttctgcttaagtggttgctatacaaactttgaatagccacctaataaataaaccttgcatgacaaacctgcaaaatattttatcagctgttattggaaagtgattttaagcaattgcttcctcagtgtcagggcacatgtgaatttccacaccaaacagagcatgaggaaccagttgacatgctgggttgtgactggcagctttagcagcctcggtactgaagccacaccagtgtccggatggaagtctgcatctgaggttgctcagtgtcccggtcattcatttacacattttaacttgcattaaagagctgttcttttctgtggcctagactcttttcactgatctcaaaataaactggtttttttcaaaaaaaaaaaaaaaacaaaaacaaaaaaaaaacacaaaagctgcttgtctaaaattactatggagttagtggtctattctttttccccttttggcagcaactttacacagcatttttaacaccttttttttctagtttttttgttcggttttgttttccatcaggaatttgagttctctctaacccagcttactgtgggacataggaaaactcagtagaaatacctttggtgatcttgttgagtttaagtctgatcttgatcttaaactcagtaagccactatctgcaattttgtacattatatagtattttgaagatatggaaccttatgaaaaaaaaatagcaaattagttctttttcccccagaggggaaagttatgttctgcaaatagtgtgtgtcttattttactgttgaacagcaattgctatttatttttttattgcctagaacttcaacatgttgtataggaatcctgtagtgccactagttaaatgccgaattctcatctggatgttaccatcaaacatcagtacacttgtcatttcacatgtgtttaatgtgacagtttttcagtactgtatgtgttaatttctactttttttaatatttaaaattgcttttaaataaacatattctcagttgatcccaaaaaaaaaaaa

SEQ ID NO: 2835 - DNA, 331 bp, Homo sapiens
cgagctcggtaccccttttggggtctctgttattggaaagtgattttaagcaattgcttcctcagtgtcagggcacatgtgaatttccacaccaaacagagcatgaggaaccagttgacatgctgggttgtgactggcagctttagcagcctcggtactgaagccacaccagtgtccggatggaagtctgcatctgaggttgctcagtgtcccggtcattcatttacacattttaacttgcattaaagagctgttcttttctgtggcctagactcttttcactgatctcaaaataaactggtttttttcaaaaaaaaaaaaaaaacaaaaa

SEQ ID NO: 2836 - DNA, 4852 bp, Homo sapiens
gaaaagagagcacgcaaaacaacatgggatgatccgcacagagataacaggagctgagattgcggaagaaatggagaaggaaaggcgcctctttcagctccaaatgtgtgaatatctcattaaagttaatgaaatcaagaccaaaaagggtgtggatctgctgcagaatcttataaagtattaccatgcacagtgcaatttctttcaagatggcttgaaaacagctgataagttgaaacagtacattgaaaaactggctgctgatttatataatataaaacagacccaggatgaagaaaagaaacagctaactgcactccgagacttaataaaatcctctcttcaactggatcagaaagaatctaggagagattctcagagccggcaaggaggatacagcatgcatcagctccagggcaataaggaatatggcagtgaaaagaaggggtacctgctaaagaaaagtgacgggatccggaaagtatggcagaggaggaagtgttcagtcaagaatgggattctaaccatctcacatgccacatctaacaggcaaccagccaagttgaaccttctcacctgccaagtaaaacctaatgccgaagacaaaaaatcttttgacctgatatcacataatagaacatatcactttcaggcagaagatgagcaggattatgtagcatggatatcagtattgacaaatagcaaagaagaggccctaaccatggccttccgtggagagcagagtgcgggagagaacagcctggaagacctgacaaaagccattattgaggatgtccagcggctcccagggaatgacatttgctgcgattgtggctcatcagaacccacctggctttcaaccaacttgggtattttgacctgtatagaatgttctggcatccatagggaaatgggggttcatatttctcgcattcagtctttggaactagacaaattaggaacttctgaactcttgctggccaagaatgtaggaaacaatagttttaatgatattatggaagcaaatttacccagcccctcaccaaaacccaccccttcaagtgatatgactgtacgaaaagaatatatcactgcaaagtatgtagatcataggttttcaaggaagacctgttcaacttcatcagctaaactaaatgaattgcttgaggccatcaaatccagggatttacttgcactaattcaagtctatgcagaaggggtagagctaatggaaccactgctggaacctgggcaggagcttggggagacagcccttcaccttgccgtccgaactgcagatcagacatctctccatttggttgacttccttgtacaaaactgtgggaacctggataagcagacggccctgggaaacacagttctacactactgtagtatgtacagtaaacctgagtgtttgaagcttttgctcaggagcaagcccactgtggatatagttaaccaggctggagaaactgccctagacatagcaaagagactaaaagctacccagtgtgaagatctgctttcccaggctaaatctggaaagttcaatccacacgtccacgtagaatatgagtggaatcttcgacaggaggagatagatgagagcgatgatgatctggatgacaaaccaagccctgtcaagaaagagcgctcacccagacctcagagcttctgccactcctccagcatctccccccaggacaagctggcactgccaggattcagcactccaagggacaaacagcggctctcctatggagccttcaccaaccagatcttcgtttccacaagcacagactcgcccacatcaccaaccacggaggctccccctctgcctcctaggaacgccgggaaaggtccaactggcccaccttcaacactccctctaagcacccagacctctagtggcagctccaccctatccaagaagaggcctcctcccccaccacccggacacaagagaaccctatccgaccctcccagcccactacctcatgggcccccaaacaaaggcgcagttccttggggtaacgatgggggtccatcctcttcaagtaagactacaaacaagtttgagggactatcccagcagtcgagcaccagttctgcaaagactgcccttggcccaagagttcttcctaaactacctcagaaagtggcactaaggaaaacagatcatctctccctagacaaagccaccatcccgcccgaaatctttcagaaatcatcacagttggcagagttgccacaaaagccaccacctggagacctgcccccaaagcccacagaactggcccccaagccccaaattggagatttgccgcctaagccaggagaactgccccccaaaccacagctgggggacctgccacccaaaccccaactctcagacttacctcccaaaccacagatgaaggacctgccccccaaaccacagctgggagacctgctagcaaaatcccagactggagatgtctcacccaaggctcagcaaccctctgaggtcacactgaagtcacacccattggatctatccccaaatgtgcagtccagagacgccatccaaaagcaagcatctgaagactccaacgacctcacgcctactctgccagagacgcccgtaccactgcccagaaaaatcaatacggggaaaaataaagtgaggcgagtgaagaccatttatgactgccaggcagacaacgatgacgagctcacattcatcgagggagaagtgattatcgtcacaggggaagaggaccaggagtggtggattggccacatcgaaggacagcctgaaaggaagggggtctttccagtgtcctttgttcatatcctgtctgactagcaaaacgcagaaccttaagattgtccacatccttcatgcaagactgctgccttcatgtaaccctgggcacagtgtgtatatagctgctgttacagagtaagaaactcatggaagggccacctcaggagggggatataatgtgtgttgtaaatatcctgtggttttctgccttcaccagtatgagggtagcctcggacccggcgcgccttactggtttgccaaagccatccttggcatctagcacttacatctctctatgctgttctacaagcaaacaaacaaaaataggagtataggaactgctggctttgcaaatagaagtggtctccagcaaccgttgaaaggcatagaattgactctgttcctaacaatgcagtattctcaattgtgttactgaaaatgcaacattagcaaagaggtgggttctgttttccaggtgaaacttttagctccatgacagaccagcctgtagttatctgtgtacacagtttacagctacaaaaacctactttggtatttattacagaaaagtgctcagttaaatgtaagtgttattccttcagcaaaatattcactgacccaaaactctttatggcattttacaatgcacacagcctcatgcaagtttagacaagtggatttatactgtcttatgagtgcccgcccctgatatattacctcattatgcaaaaataacatatctttcatgactattttgacaaaagtttaaaacacatatgaagttcaaatttcaggaaccaaggactgccagaaaatattagcctctacattacgcatgcatttagaagcttacctgaaatctgccttttataaaggaatagtatggataagtggaattgtacattttttaaacttgattgccattaaagcagaaattataaggttgcaacaatatttgtttctaatcactggctttctcaagagtatggattgacatattgtgttatgaatgcacatctctcagatgtgttgaagcatccattgcatccattttttattattttcttagttttgttcttggacaaatttaaacttttaaaagattattcaagatgaatttaaaagtcaacccttcacacagtttccctactgtatgtagaatccaggtgctgaaaccaagtgtttcttttcccatgctctttgttaaaccccaattatagataatttttccagtcttaagctctgtccaccttcaagtcaattcataaccaagtttttgaacgctgctatgaattgcactgtgaaaagcactcttccctctcagttttcttttcatcccagccatgtttatcagatccttaagaacattgtatttcagtcttttacatcagtctgaattttggaaaagaatgcaatagttgtactccacagtcagtggaactgttccctgagtccgaggctcatgtgtcattctggcactacatttgcttaaattgctattttggcaacagcacagaaaactaatatttttaagcagagaatcttggcaatgagtgagagatgttaatttcacagaagcacaactcccaacccaacccttaggaaaagccctcttccatcgttacagtgctcagtgaatattaatttagttctgcttaagtggttgctatacaaactttgaatagccacctaataaataaaccttgcatgacaaacctgcaaaatattttatcagctgttattggaaagtgattttaagcaattgcttcctcagtgtcagggcacatgtgaatttccacaccaaacagagcatgaggaaccagttgacatgctgggttgtgactggcagctttagcagcctcggtactgaagccacaccagtgtccggatggaagtctgcatctgaggttgctcagtgtcccggtcattcatttacacattttaacttgcattaaagagctgttcttttctgtggcctagactcttttcactgatctcaaaataaactggtttttttcaaaaaaaaaaaaaaaacaaaaa

SEQ ID NO: 2837 - DNA, 4681 bp, Homo sapiens
gaaaagagagcacgcaaaacaacatgggatgatccgcacagagataacaggagctgagattgcggaagaaatggagaaggaaaggcgcctctttcagctccaaatgtgtgaatatctcattaaagttaatgaaatcaagaccaaaaagggtgtggatctgctgcagaatcttataaagtattaccatgcacagtgcaatttctttcaagatggcttgaaaacagctgataagttgaaacagtacattgaaaaactggctgctgatttatataatataaaacagacccaggatgaagaaaagaaacagctaactgcactccgagacttaataaaatcctctcttcaactggatcagaaagaatctaggagagattctcagagccggcaaggaggatacagcatgcatcagctccagggcaataaggaatatggcagtgaaaagaaggggtacctgctaaagaaaagtgacgggatccggaaagtatggcagaggaggaagtgttcagtcaagaatgggattctaaccatctcacatgccacatctaacaggcaaccagccaagttgaaccttctcacctgccaagtaaaacctaatgccgaagacaaaaaatcttttgacctgatatcacataatagaacatatcactttcaggcagaagatgagcaggattatgtagcatggatatcagtattgacaaatagcaaagaagaggccctaaccatggccttccgtggagagcagagtgcgggagagaacagcctggaagacctgacaaaagccattattgaggatgtccagcggctcccagggaatgacatttgctgcgattgtggctcatcagaacccacctggctttcaaccaacttgggtattttgacctgtatagaatgttctggcatccatagggaaatgggggttcatatttctcgcattcagtctttggaactagacaaattaggaacttctgaactcttgctggccaagaatgtaggaaacaatagttttaatgatattatggaagcaaatttacccagcccctcaccaaaacccaccccttcaagtgatatgactgtacgaaaagaatatatcactgcaaagtatgtagatcataggttttcaaggaagacctgttcaacttcatcagctaaactaaatgaattgcttgaggccatcaaatccagggatttacttgcactaattcaagtctatgcagaaggggtagagctaatggaaccactgctggaacctgggcaggagcttggggagacagcccttcaccttgccgtccgaactgcagatcagacatctctccatttggttgacttccttgtacaaaactgtgggaacctggataagcagacggccctgggaaacacagttctacactactgtagtatgtacagtaaacctgagtgtttgaagcttttgctcaggagcaagcccactgtggatatagttaaccaggctggagaaactgccctagacatagcaaagagactaaaagctacccagtgtgaagatctgctttcccaggctaaatctggaaagttcaatccacacgtccacgtagaatatgagtggaatcttcgacaggaggagatagatgagagcgatgatgatctggatgacaaaccaagccctgtcaagaaagagcgctcacccagacctcagagcttctgccactcctccagcatctccccccaggacaagctggcactgccaggattcagcactccaagggacaaacagcggctctcctatggagccttcaccaaccagatcttcgtttccacaagcacagactcgcccacatcaccaaccacggaggctccccctctgcctcctaggaacgccgggaaaggtaacgatgggggtccatcctcttcaagtaagactacaaacaagtttgagggactatcccagcagtcgagcaccagttctgcaaagactgcccttggcccaagagttcttcctaaactacctcagaaagtggcactaaggaaaacagatcatctctccctagacaaagccaccatcccgcccgaaatctttcagaaatcatcacagttggcagagttgccacaaaagccaccacctggagacctgcccccaaagcccacagaactggcccccaagccccaaattggagatttgccgcctaagccaggagaactgccccccaaaccacagctgggggacctgccacccaaaccccaactctcagacttacctcccaaaccacagatgaaggacctgccccccaaaccacagctgggagacctgctagcaaaatcccagactggagatgtctcacccaaggctcagcaaccctctgaggtcacactgaagtcacacccattggatctatccccaaatgtgcagtccagagacgccatccaaaagcaagcatctgaagactccaacgacctcacgcctactctgccagagacgcccgtaccactgcccagaaaaatcaatacggggaaaaataaagtgaggcgagtgaagaccatttatgactgccaggcagacaacgatgacgagctcacattcatcgagggagaagtgattatcgtcacaggggaagaggaccaggagtggtggattggccacatcgaaggacagcctgaaaggaagggggtctttccagtgtcctttgttcatatcctgtctgactagcaaaacgcagaaccttaagattgtccacatccttcatgcaagactgctgccttcatgtaaccctgggcacagtgtgtatatagctgctgttacagagtaagaaactcatggaagggccacctcaggagggggatataatgtgtgttgtaaatatcctgtggttttctgccttcaccagtatgagggtagcctcggacccggcgcgccttactggtttgccaaagccatccttggcatctagcacttacatctctctatgctgttctacaagcaaacaaacaaaaataggagtataggaactgctggctttgcaaatagaagtggtctccagcaaccgttgaaaggcatagaattgactctgttcctaacaatgcagtattctcaattgtgttactgaaaatgcaacattagcaaagaggtgggttctgttttccaggtgaaacttttagctccatgacagaccagcctgtagttatctgtgtacacagtttacagctacaaaaacctactttggtatttattacagaaaagtgctcagttaaatgtaagtgttattccttcagcaaaatattcactgacccaaaactctttatggcattttacaatgcacacagcctcatgcaagtttagacaagtggatttatactgtcttatgagtgcccgcccctgatatattacctcattatgcaaaaataacatatctttcatgactattttgacaaaagtttaaaacacatatgaagttcaaatttcaggaaccaaggactgccagaaaatattagcctctacattacgcatgcatttagaagcttacctgaaatctgccttttataaaggaatagtatggataagtggaattgtacattttttaaacttgattgccattaaagcagaaattataaggttgcaacaatatttgtttctaatcactggctttctcaagagtatggattgacatattgtgttatgaatgcacatctctcagatgtgttgaagcatccattgcatccattttttattattttcttagttttgttcttggacaaatttaaacttttaaaagattattcaagatgaatttaaaagtcaacccttcacacagtttccctactgtatgtagaatccaggtgctgaaaccaagtgtttcttttcccatgctctttgttaaaccccaattatagataatttttccagtcttaagctctgtccaccttcaagtcaattcataaccaagtttttgaacgctgctatgaattgcactgtgaaaagcactcttccctctcagttttcttttcatcccagccatgtttatcagatccttaagaacattgtatttcagtcttttacatcagtctgaattttggaaaagaatgcaatagttgtactccacagtcagtggaactgttccctgagtccgaggctcatgtgtcattctggcactacatttgcttaaattgctattttggcaacagcacagaaaactaatatttttaagcagagaatcttggcaatgagtgagagatgttaatttcacagaagcacaactcccaacccaacccttaggaaaagccctcttccatcgttacagtgctcagtgaatattaatttagttctgcttaagtggttgctatacaaactttgaatagccacctaataaataaaccttgcatgacaaacctgcaaaatattttatcagctgttattggaaagtgattttaagcaattgcttcctcagtgtcagggcacatgtgaatttccacaccaaacagagcatgaggaaccagttgacatgctgggttgtgactggcagctttagcagcctcggtactgaagccacaccagtgtccggatggaagtctgcatctgaggttgctcagtgtcccggtcattcatttacacattttaacttgcattaaagagctgttcttttctgtggcctagactcttttcactgatctcaaaataaactggtttttttcaaaaaaaaaaaaaaaacaaaaa

SEQ ID NO: 2838 - DNA, 5523 bp, Homo sapiens
gaaaagagagcacgcaaaacaacatgggatgatccgcacagagataacaggagctgagattgcggaagaaatggagaaggaaaggcgcctctttcagctccaaatgtgtgaatatctcattaaagttaatgaaatcaagaccaaaaagggtgtggatctgctgcagaatcttataaagtattaccatgcacagtgcaatttctttcaagatggcttgaaaacagctgataagttgaaacagtacattgaaaaactggctgctgatttatataatataaaacagacccaggatgaagaaaagaaacagctaactgcactccgagacttaataaaatcctctcttcaactggatcagaaagaatctaggagagattctcagagccggcaaggaggatacagcatgcatcagctccagggcaataaggaatatggcagtgaaaagaaggggtacctgctaaagaaaagtgacgggatccggaaagtatggcagaggaggaagtgttcagtcaagaatgggattctaaccatctcacatgccacatctaacaggcaaccagccaagttgaaccttctcacctgccaagtaaaacctaatgccgaagacaaaaaatcttttgacctgatatcacataatagaacatatcactttcaggcagaagatgagcaggattatgtagcatggatatcagtattgacaaatagcaaagaagaggccctaaccatggccttccgtggagagcagagtgcgggagagaacagcctggaagacctgacaaaagccattattgaggatgtccagcggctcccagggaatgacatttgctgcgattgtggctcatcagaacccacctggctttcaaccaacttgggtattttgacctgtatagaatgttctggcatccatagggaaatgggggttcatatttctcgcattcagtctttggaactagacaaattaggaacttctgaactcttgctggccaagaatgtaggaaacaatagttttaatgatattatggaagcaaatttacccagcccctcaccaaaacccaccccttcaagtgatatgactgtacgaaaagaatatatcactgcaaagtatgtagatcataggttttcaaggaagacctgttcaacttcatcagctaaactaaatgaattgcttgaggccatcaaatccagggatttacttgcactaattcaagtctatgcagaaggggtagagctaatggaaccactgctggaacctgggcaggagcttggggagacagcccttcaccttgccgtccgaactgcagatcagacatctctccatttggttgacttccttgtacaaaactgtgggaacctggataagcagacggccctgggaaacacagttctacactactgtagtatgtacagtaaacctgagtgtttgaagcttttgctcaggagcaagcccactgtggatatagttaaccaggctggagaaactgccctagacatagcaaagagactaaaagctacccagtgtgaagatctgctttcccaggctaaatctggaaagttcaatccacacgtccacgtagaatatgagtggaatcttcgacaggaggagatagatgagagcgatgatgatctggatgacaaaccaagccctgtcaagaaagagcgctcacccagacctcagagcttctgccactcctccagcatctccccccaggacaagctggcactgccaggattcagcactccaagggacaaacagcggctctcctatggagccttcaccaaccagatcttcgtttccacaagcacagactcgcccacatcaccaaccacggaggctccccctctgcctcctaggaacgccgggaaaggtccaactggcccaccttcaacactccctctaagcacccagacctctagtggcagctccaccctatccaagaagaggcctcctcccccaccacccggacacaagagaaccctatccgaccctcccagcccactacctcatgggcccccaaacaaaggcgcagttccttggggtaacgatgggggtccatcctcttcaagtaagactacaaacaagtttgagggactatcccagcagtcgagcaccagttctgcaaagactgcccttggcccaagagttcttcctaaactacctcagaaagtggcactaaggaaaacagatcatctctccctagacaaagccaccatcccgcccgaaatctttcagaaatcatcacagttggcagagttgccacaaaagccaccacctggagacctgcccccaaagcccacagaactggcccccaagccccaaattggagatttgccgcctaagccaggagaactgccccccaaaccacagctgggggacctgccacccaaaccccaactctcagacttacctcccaaaccacagatgaaggacctgccccccaaaccacagctgggagacctgctagcaaaatcccagactggagatgtctcacccaaggctcagcaaccctctgaggtcacactgaagtcacacccattggatctatccccaaatgtgcagtccagagacgccatccaaaagcaagcatctgaagactccaacgacctcacgcctactctgccagagacgcccgtaccactgcccagaaaaatcaatacggggaaaaataaagtgaggcgagtgaagaccatttatgactgccaggcagacaacgatgacgagctcacattcatcgagggagaagtgattatcgtcacaggggaagaggaccaggagtggtggattggccacatcgaaggacagcctgaaaggaagggggtctttccagtgtcctttgttcatatcctgtctgactagcaaaacgcagaaccttaagattgtccacatccttcatgcaagactgctgccttcatgtaaccctgggcacagtgtgtatatagctgctgttacagagtaagaaactcatggaagggccacctcaggagggggatataatgtgtgttgtaaatatcctgtggttttctgccttcaccagtatgagggtagcctcggacccggcgcgccttactggtttgccaaagccatccttggcatctagcacttacatctctctatgctgttctacaagcaaacaaacaaaaataggagtataggaactgctggctttgcaaatagaagtggtctccagcaaccgttgaaaggcatagaattgactctgttcctaacaatgcagtattctcaattgtgttactgaaaatgcaacattagcaaagaggtgggttctgttttccaggtgaaacttttagctccatgacagaccagcctgtagttatctgtgtacacagtttacagctacaaaaacctactttggtatttattacagaaaagtgctcagttaaatgtaagtgttattccttcagcaaaatattcactgacccaaaactctttatggcattttacaatgcacacagcctcatgcaagtttagacaagtggatttatactgtcttatgagtgcccgcccctgatatattacctcattatgcaaaaataacatatctttcatgactattttgacaaaagtttaaaacacatatgaagttcaaatttcaggaaccaaggactgccagaaaatattagcctctacattacgcatgcatttagaagcttacctgaaatctgccttttataaaggaatagtatggataagtggaattgtacattttttaaacttgattgccattaaagcagaaattataaggttgcaacaatatttgtttctaatcactggctttctcaagagtatggattgacatattgtgttatgaatgcacatctctcagatgtgttgaagcatccattgcatccattttttattattttcttagttttgttcttggacaaatttaaacttttaaaagattattcaagatgaatttaaaagtcaacccttcacacagtttccctactgtatgtagaatccaggtgctgaaaccaagtgtttcttttcccatgctctttgttaaaccccaattatagataatttttccagtcttaagctctgtccaccttcaagtcaattcataaccaagtttttgaacgctgctatgaattgcactgtgaaaagcactcttccctctcagttttcttttcatcccagccatgtttatcagatccttaagaacattgtatttcagtcttttacatcagtctgaattttggaaaagaatgcaatagttgtactccacagtcagtggaactgttccctgagtccgaggctcatgtgtcattctggcactacatttgcttaaattgctattttggcaacagcacagaaaactaatatttttaagcagagaatcttggcaatgagtgagagatgttaatttcacagaagcacaactcccaacccaacccttaggaaaagccctcttccatcgttacagtgctcagtgaatattaatttagttctgcttaagtggttgctatacaaactttgaatagccacctaataaataaaccttgcatgacaaacctgcaaaatattttatcagctgttattggaaagtgattttaagcaattgcttcctcagtgtcagggcacatgtgaatttccacaccaaacagagcatgaggaaccagttgacatgctgggttgtgactggcagctttagcagcctcggtactgaagccacaccagtgtccggatggaagtctgcatctgaggttgctcagtgtcccggtcattcatttacacattttaacttgcattaaagagctgttcttttctgtggcctagactcttttcactgatctcaaaataaactggtttttttcaaaaaaaaaaaaaaaacaaaaacaaaaaaaaaacacaaaggcgtgcgtgtggtctttaaaattcacgtgggggttgggtgccaatattctcttttcccccctttgtggcggcacttttccacggcatttttaaccccctttttttcccaagtttttggggttcgggcttggggtttcccccactcgagggaatttggaggttctcttcttcttaccccaagtcttaccggggggggacacatgggaaaacctctcagagtagagaaaaatcacctttggggggggaactcgtggtggaagtttaagagttcgggaactctggaactcctaaaccttcgagttaggccacttatccgggcatttggggcctttaatatagttatccgggaaggaatggtggacactttatgaaaaaaaaatttgccaaatttgtgtccttttccccccagggggaatgtgtttgtgtccgggcaattggggggtgtcttatttaggtggtggaccggcagtggttataattttttaatggcaagaactcaccgtttggtatgggagtcggggtgcctatgtaaggcgaatcttgtgggtggtcctcacattgtacttgtcttcctggtgagggacgttagaggggggatcactttattttaatgttataatttctgtgaaaaaaattgggggcgaattaatggg

SEQ ID NO: 2839 - DNA, 1013 bp, Homo sapiens
ccaggctggtacggctccggagattcccgggatatcgcttagttttgttcttggacaaatttaaacttttaaaagattattcaagatgaatttaaaagtcaacccttcacacagtttccctactgtatgtagaatccaggtgctgaaaccaagtgtttcttttcccatgctctttgttaaaccccaattatagataatttttccagtcttaagctctgtccaccttcaagtcaattcataaccaagtttttgaacgctgctatgaattgcactgtgaaaagcactcttccctctcagttttcttttcatcccagccatgtttatcagatccttaagaacattgtatttcagtcttttacatcagtctgaattttggaaaagaatgcaatagttgtactccacagtcagtggaactgttccctgagtccgaggctcatgtgtcattctggcactacatttgcttaaattgctattttggcaacagcacagaaaactaatatttttaagcagagaatcttggcaatgagtgagagatgttaatttcacagaagcacaactcccaacccaacccttaggaaaagccctcttccatcgttacagtgctcagtgaatattaatttagttctgcttaagtggttgctatacaaactttgaatagccacctaataaataaaccttgcatgacaaacctgcaaaatattttatcagctgttattggaaagtgattttaagcaattgcttcctcagtgtcagggcacatgtgaatttccacaccaaacagagcatgaggaaccagttgacatgctgggttgtgactggcagctttagcagcctcggtactgaagccacaccagtgtccggatggaagtctgcatctgaggttgctcagtgtcccggtcattcatttacacattttaacttgcattaaagagctgttcttttctgtggcctagactcttttcactgatctcaaaataaactggtttttttcaaaaaaaaaaaaaaaacaaaaa

SEQ ID NO: 2840 - DNA, 4177 bp, Homo sapiens
gaaaagagagcacgcaaaacaacatgggatgatccgcacagagataacaggagctgagattgcggaagaaatggagaaggaaaggcgcctctttcagctccaaatgtgtgaatatctcattaaagttaatgaaatcaagaccaaaaagggtgtggatctgctgcagaatcttataaagtattaccatgcacagtgcaatttctttcaagatggcttgaaaacagctgataagttgaaacagtacattgaaaaactggctgctgatttatataatataaaacagacccaggatgaagaaaagaaacagctaactgcactccgagacttaataaaatcctctcttcaactggatcagaaagaatctaggagagattctcagagccggcaaggaggatacagcatgcatcagctccagggcaataaggaatatggcagtgaaaagaaggggtacctgctaaagaaaagtgacgggatccggaaagtatggcagaggaggaagtgttcagtcaagaatgggattctaaccatctcacatgccacatctaacaggcaaccagccaagttgaaccttctcacctgccaagtaaaacctaatgccgaagacaaaaaatcttttgacctgatatcacataatagaacatatcactttcaggcagaagatgagcaggattatgtagcatggatatcagtattgacaaatagcaaagaagaggccctaaccatggccttccgtggagagcagagtgcgggagagaacagcctggaagacctgacaaaagccattattgaggatgtccagcggctcccagggaatgacatttgctgcgattgtggctcatcagaacccacctggctttcaaccaacttgggtattttgacctgtatagaatgttctggcatccatagggaaatgggggttcatatttctcgcattcagtctttggaactagacaaattaggaacttctgaactcttgctggccaagaatgtaggaaacaatagttttaatgatattatggaagcaaatttacccagcccctcaccaaaacccaccccttcaagtgatatgactgtacgaaaagaatatatcactgcaaagtatgtagatcataggttttcaaggaagacctgttcaacttcatcagctaaactaaatgaattgcttgaggccatcaaatccagggatttacttgcactaattcaagtctatgcagaaggggtagagctaatggaaccactgctggaacctgggcaggagcttggggagacagcccttcaccttgccgtccgaactgcagatcagacatctctccatttggttgacttccttgtacaaaactgtgggaacctggataagcagacggccctgggaaacacagttctacactactgtagtatgtacagtaaacctgagtgtttgaagcttttgctcaggagcaagcccactgtggatatagttaaccaggctggagaaactgccctagacatagcaaagagactaaaagctacccagtgtgaagatctgctttcccaggctaaatctggaaagttcaatccacacgtccacgtagaatatgagtggaatcttcgacaggaggagatagatgagagcgatgatgatctggatgacaaaccaagccctgtcaagaaagagcgctcacccagacctcagagcttctgccactcctccagcatctccccccaggacaagctggcactgccaggattcagcactccaagggacaaacagcggctctcctatggagccttcaccaaccagatcttcgtttccacaagcacagactcgcccacatcaccaaccacggaggctccccctctgcctcctaggaacgccgggaaaggtccaactggcccaccttcaacactccctctaagcacccagacctctagtggcagctccaccctatccaagaagaggcctcctcccccaccacccggacacaagagaaccctatccgaccctcccagcccactacctcatgggcccccaaacaaaggcgcagttccttggggtaacgatgggggtccatcctcttcaagtaagactacaaacaagtttgagggactatcccagcagtcgagcaccagttctgcaaagactgcccttggcccaagagttcttcctaaactacctcagaaagtggcactaaggaaaacagatcatctctccctagacaaagccaccatcccgcccgaaatctttcagaaatcatcacagttggcagagttgccacaaaagccaccacctggagacctgcccccaaagcccacagaactggcccccaagccccaaattggagatttgccgcctaagccaggagaactgccccccaaaccacagctgggggacctgccacccaaaccccaactctcagacttacctcccaaaccacagatgaaggacctgccccccaaaccacagctgggagacctgctagcaaaatcccagactggagatgtctcacccaaggctcagcaaccctctgaggtcacactgaagtcacacccattggatctatccccaaatgtgcagtccagagacgccatccaaaagcaagcatctgaagactccaacgacctcacgcctactctgccagagacgcccgtaccactgcccagaaaaatcaatacggggaaaaataaagtgaggcgagtgaagaccatttatgactgccaggcagacaacgatgacgagctcacattcatcgagggagaagtgattatcgtcacaggggaagaggaccaggagtggtggattggccacatcgaaggacagcctgaaaggaagggggtctttccagtgtcctttgttcatatcctgtctgactagcaaaacgcagaaccttaagattgtccacatccttcatgcaagactgctgccttcatgtaaccctgggcacagtgtgtatatagctgctgttacagagtaagaaactcatggaagggccacctcaggagggggatataatgtgtgttgtaaatatcctgtggttttctgccttcaccagtatgagggtagcctcggacccggcgcgccttactggtttgccaaagccatccttggcatctagcacttacatctctctatgctgttctacaagcaaacaaacaaaaataggagtataggaactgctggctttgcaaatagaagtggtctccagcaaccgttgaaaggcatagaattgactctgttcctaacaatgcagtattctcaattgtgttactgaaaatgcaacattagcaaagaggtgggttctgttttccaggtgaaacttttagctccatgacagaccagcctgtagttatctgtgtacacagtttacagctacaaaaacctactttggtatttattacagaaaagtgctcagttaaatgtaagtgttattccttcagcaaaatattcactgacccaaaactctttatggcattttacaatgcacacagcctcatgcaagtttagacaagtggatttatactgtcttatgagtgcccgcccctgatatattacctcattatgcaaaaataacatatctttcatgactattttgacaaaagtttaaaacacatatgaagttcaaatttcaggaaccaaggactgccagaaaatattagcctctacattacgcatgcatttagaagcttacctgaaatctgccttttataaaggaatagtatggataagtggaattgtacattttttaaacttgattgccattaaagcagaaattataaggttgcaacaatatttgtttctaatcactggctttctcaagagtatggattgacatattgtgttatgaatgcacatctctcagatgtgttgaagcatccattgcatccattttttattattttcttagttttgttcttggacaaatttaaacttttaaaagattattcaagatgaatttaaaagtcaacccttcacacagtttccctactgtatgtagaatccaggtgctgaaaccaagtgtttcttttcccatgctctttgttaaaccccaattatagataatttttccagtcttaagctctgtccaccttcaagtcaattcataaccaagtttttgaacgctgctatgaattgcactgtgaaaagcactcttccctctcagttttcttttcatcctgagccagaatcaaaaaaaaaaagctt

SEQ ID NO: 2841 - DNA, 3761 bp, Homo sapiens
gaaaagagagcacgcaaaacaacatgggatgatccgcacagagataacaggagctgagattgcggaagaaatggagaaggaaaggcgcctctttcagctccaaatgtgtgaatatctcattaaagttaatgaaatcaagaccaaaaagggtgtggatctgctgcagaatcttataaagtattaccatgcacagtgcaatttctttcaagatggcttgaaaacagctgataagttgaaacagtacattgaaaaactggctgctgatttatataatataaaacagacccaggatgaagaaaagaaacagctaactgcactccgagacttaataaaatcctctcttcaactggatcagaaagaatctaggagagattctcagagccggcaaggaggatacagcatgcatcagctccagggcaataaggaatatggcagtgaaaagaaggggtacctgctaaagaaaagtgacgggatccggaaagtatggcagaggaggaagtgttcagtcaagaatgggattctaaccatctcacatgccacatctaacaggcaaccagccaagttgaaccttctcacctgccaagtaaaacctaatgccgaagacaaaaaatcttttgacctgatatcacataatagaacatatcactttcaggcagaagatgagcaggattatgtagcatggatatcagtattgacaaatagcaaagaagaggccctaaccatggccttccgtggagagcagagtgcgggagagaacagcctggaagacctgacaaaagccattattgaggatgtccagcggctcccagggaatgacatttgctgcgattgtggctcatcagaacccacctggctttcaaccaacttgggtattttgacctgtatagaatgttctggcatccatagggaaatgggggttcatatttctcgcattcagtctttggaactagacaaattaggaacttctgaactcttgctggccaagaatgtaggaaacaatagttttaatgatattatggaagcaaatttacccagcccctcaccaaaacccaccccttcaagtgatatgactgtacgaaaagaatatatcactgcaaagtatgtagatcataggttttcaaggaagacctgttcaacttcatcagctaaactaaatgaattgcttgaggccatcaaatccagggatttacttgcactaattcaagtctatgcagaaggggtagagctaatggaaccactgctggaacctgggcaggagcttggggagacagcccttcaccttgccgtccgaactgcagatcagacatctctccatttggttgacttccttgtacaaaactgtgggaacctggataagcagacggccctgggaaacacagttctacactactgtagtatgtacagtaaacctgagtgtttgaagcttttgctcaggagcaagcccactgtggatatagttaaccaggctggagaaactgccctagacatagcaaagagactaaaagctacccagtgtgaagatctgctttcccaggctaaatctggaaagttcaatccacacgtccacgtagaatatgagtggaatcttcgacaggaggagatagatgagagcgatgatgatctggatgacaaaccaagccctgtcaagaaagagcgctcacccagacctcagagcttctgccactcctccagcatctccccccaggacaagctggcactgccaggattcagcactccaagggacaaacagcggctctcctatggagccttcaccaaccagatcttcgtttccacaagcacagactcgcccacatcaccaaccacggaggctccccctctgcctcctaggaacgccgggaaaggtccaactggcccaccttcaacactccctctaagcacccagacctctagtggcagctccaccctatccaagaagaggcctcctcccccaccacccggacacaagagaaccctatccgaccctcccagcccactacctcatgggcccccaaacaaaggcgcagttccttggggtaacgatgggggtccatcctcttcaagtaagactacaaacaagtttgagggactatcccagcagtcgagcaccagttctgcaaagactgcccttggcccaagagttcttcctaaactacctcagaaagtggcactaaggaaaacagatcatctctccctagacaaagccaccatcccgcccgaaatctttcagaaatcatcacagttggcagagttgccacaaaagccaccacctggagacctgcccccaaagcccacagaactggcccccaagccccaaattggagatttgccgcctaagccaggagaactgccccccaaaccacagctgggggacctgccacccaaaccccaactctcagacttacctcccaaaccacagatgaaggacctgccccccaaaccacagctgggagacctgctagcaaaatcccagactggagatgtctcacccaaggctcagcaaccctctgaggtcacactgaagtcacacccattggatctatccccaaatgtgcagtccagagacgccatccaaaagcaagcatctgaagactccaacgacctcacgcctactctgccagagacgcccgtaccactgcccagaaaaatcaatacggggaaaaataaagtgaggcgagtgaagaccatttatgactgccaggcagacaacgatgacgagctcacattcatcgagggagaagtgattatcgtcacaggggaagaggaccaggagtggtggattggccacatcgaaggacagcctgaaaggaagggggtctttccagtgtcctttgttcatatcctgtctgactagcaaaacgcagaaccttaagattgtccacatccttcatgcaagactgctgccttcatgtaaccctgggcacagtgtgtatatagctgctgttacagagtaagaaactcatggaagggccacctcaggagggggatataatgtgtgttgtaaatatcctgtggttttctgccttcaccagtatgagggtagcctcggacccggcgcgccttactggtttgccaaagccatccttggcatctagcacttacatctctctatgctgttctacaagcaaacaaacaaaaataggagtataggaactgctggctttgcaaatagaagtggtctccagcaaccgttgaaaggcatagaattgactctgttcctaacaatgcagtattctcaattgtgttactgaaaatgcaacattagcaaagaggtgggttctgttttccaggtgaaacttttagctccatgacagaccagcctgtagttatctgtgtacacagtttacagctacaaaaacctactttggtatttattacagaaaagtgctcagttaaatgtaagtgttattccttcagcaaaatattcactgacccaaaactctttatggcattttacaatgcacacagcctcatgcaagtttagacaagtggatttatactgtcttatgagtgcccgcccctgatatattacctcattatgcaaaaataacatatctttcatgactattttgacaaaagtttaaaacacatatgaagttcaaatttcaggaaccaaggactgccagaaaatattagcctctacattacgcatgcatttagaagcttacctgaaatctgccttttataaaggaatagtatggataagtggaattgtacattttttaaacttgattgcgggggggagggggagggataagttttct

SEQ ID NO: 2842 - DNA, 3507 bp, Homo sapiens
gaaaagagagcacgcaaaacaacatgggatgatccgcacagagataacaggagctgagattgcggaagaaatggagaaggaaaggcgcctctttcagctccaaatgtgtgaatatctcattaaagttaatgaaatcaagaccaaaaagggtgtggatctgctgcagaatcttataaagtattaccatgcacagtgcaatttctttcaagatggcttgaaaacagctgataagttgaaacagtacattgaaaaactggctgctgatttatataatataaaacagacccaggatgaagaaaagaaacagctaactgcactccgagacttaataaaatcctctcttcaactggatcagaaagaatctaggagagattctcagagccggcaaggaggatacagcatgcatcagctccagggcaataaggaatatggcagtgaaaagaaggggtacctgctaaagaaaagtgacgggatccggaaagtatggcagaggaggaagtgttcagtcaagaatgggattctaaccatctcacatgccacatctaacaggcaaccagccaagttgaaccttctcacctgccaagtaaaacctaatgccgaagacaaaaaatcttttgacctgatatcacataatagaacatatcactttcaggcagaagatgagcaggattatgtagcatggatatcagtattgacaaatagcaaagaagaggccctaaccatggccttccgtggagagcagagtgcgggagagaacagcctggaagacctgacaaaagccattattgaggatgtccagcggctcccagggaatgacatttgctgcgattgtggctcatcagaacccacctggctttcaaccaacttgggtattttgacctgtatagaatgttctggcatccatagggaaatgggggttcatatttctcgcattcagtctttggaactagacaaattaggaacttctgaactcttgctggccaagaatgtaggaaacaatagttttaatgatattatggaagcaaatttacccagcccctcaccaaaacccaccccttcaagtgatatgactgtacgaaaagaatatatcactgcaaagtatgtagatcataggttttcaaggaagacctgttcaacttcatcagctaaactaaatgaattgcttgaggccatcaaatccagggatttacttgcactaattcaagtctatgcagaaggggtagagctaatggaaccactgctggaacctgggcaggagcttggggagacagcccttcaccttgccgtccgaactgcagatcagacatctctccatttggttgacttccttgtacaaaactgtgggaacctggataagcagacggccctgggaaacacagttctacactactgtagtatgtacagtaaacctgagtgtttgaagcttttgctcaggagcaagcccactgtggatatagttaaccaggctggagaaactgccctagacatagcaaagagactaaaagctacccagtgtgaagatctgctttcccaggctaaatctggaaagttcaatccacacgtccacgtagaatatgagtggaatcttcgacaggaggagatagatgagagcgatgatgatctggatgacaaaccaagccctgtcaagaaagagcgctcacccagacctcagagcttctgccactcctccagcatctccccccaggacaagctggcactgccaggattcagcactccaagggacaaacagcggctctcctatggagccttcaccaaccagatcttcgtttccacaagcacagactcgcccacatcaccaaccacggaggctccccctctgcctcctaggaacgccgggaaaggtccaactggcccaccttcaacactccctctaagcacccagacctctagtggcagctccaccctatccaagaagaggcctcctcccccaccacccggacacaagagaaccctatccgaccctcccagcccactacctcatgggcccccaaacaaaggcgcagttccttggggtaacgatgggggtccatcctcttcaagtaagactacaaacaagtttgagggactatcccagcagtcgagcaccagttctgcaaagactgcccttggcccaagagttcttcctaaactacctcagaaagtggcactaaggaaaacagatcatctctccctagacaaagccaccatcccgcccgaaatctttcagaaatcatcacagttggcagagttgccacaaaagccaccacctggagacctgcccccaaagcccacagaactggcccccaagccccaaattggagatttgccgcctaagccaggagaactgccccccaaaccacagctgggggacctgccacccaaaccccaactctcagacttacctcccaaaccacagatgaaggacctgccccccaaaccacagctgggagacctgctagcaaaatcccagactggagatgtctcacccaaggctcagcaaccctctgaggtcacactgaagtcacacccattggatctatccccaaatgtgcagtccagagacgccatccaaaagcaagcatctgaagactccaacgacctcacgcctactctgccagagacgcccgtaccactgcccagaaaaatcaatacggggaaaaataaagtgaggcgagtgaagaccatttatgactgccaggcagacaacgatgacgagctcacattcatcgagggagaagtgattatcgtcacaggggaagaggaccaggagtggtggattggccacatcgaaggacagcctgaaaggaagggggtctttccagtgtcctttgttcatatcctgtctgactagcaaaacgcagaaccttaagattgtccacatccttcatgcaagactgctgccttcatgtaaccctgggcacagtgtgtatatagctgctgttacagagtaagaaactcatggaagggccacctcaggagggggatataatgtgtgttgtaaatatcctgtggttttctgccttcaccagtatgagggtagcctcggacccggcgcgccttactggtttgccaaagccatccttggcatctagcacttacatctctctatgctgttctacaagcaaacaaacaaaaataggagtataggaactgctggctttgcaaatagaagtggtctccagcaaccgttgaaaggcatagaattgactctgttcctaacaatgcagtattctcaattgtgttactgaaaatgcaacattagcaaagaggtgggttctgttttccaggtgaaacttttagctccatgacagaccagcctgtagttatctgtgtacacagtttacagctacaaaaacctactttggtatttattacagaaaagtgctcagttaaatgtaagtgttattccttcagcaaaatattcactgacccaaaactctttatggcattttacaatgcacacagcacagttatctacatttccggcacagttatctacatttccgg

SEQ ID NO: 2843 - DNA, 1935 bp, Homo sapiens
gaaaagagagcacgcaaaacaacatgggatgatccgcacagagataacaggagctgagattgcggaagaaatggagaaggaaaggcgcctctttcagctccaaatgtgtgaatatctcattaaagttaatgaaatcaagaccaaaaagggtgtggatctgctgcagaatcttataaagtattaccatgcacagtgcaatttctttcaagatggcttgaaaacagctgataagttgaaacagtacattgaaaaactggctgctgatttatataatataaaacagacccaggatgaagaaaagaaacagctaactgcactccgagacttaataaaatcctctcttcaactggatcagaaagaatctaggagagattctcagagccggcaaggaggatacagcatgcatcagctccagggcaataaggaatatggcagtgaaaagaaggggtacctgctaaagaaaagtgacgggatccggaaagtatggcagaggaggaagtgttcagtcaagaatgggattctaaccatctcacatgccacatctaacaggcaaccagccaagttgaaccttctcacctgccaagtaaaacctaatgccgaagacaaaaaatcttttgacctgatatcacataatagaacatatcactttcaggcagaagatgagcaggattatgtagcatggatatcagtattgacaaatagcaaagaagaggccctaaccatggccttccgtggagagcagagtgcgggagagaacagcctggaagacctgacaaaagccattattgaggatgtccagcggctcccagggaatgacatttgctgcgattgtggctcatcagaacccacctggctttcaaccaacttgggtattttgacctgtatagaatgttctggcatccatagggaaatgggggttcatatttctcgcattcagtctttggaactagacaaattaggaacttctgaactcttgctggccaagaatgtaggaaacaatagttttaatgatattatggaagcaaatttacccagcccctcaccaaaacccaccccttcaagtgatatgactgtacgaaaagaatatatcactgcaaagtatgtagatcataggttttcaaggaagacctgttcaacttcatcagctaaactaaatgaattgcttgaggccatcaaatccagggatttacttgcactaattcaagtctatgcagaaggggtagagctaatggaaccactgctggaacctgggcaggagcttggggagacagcccttcaccttgccgtccgaactgcagatcagacatctctccatttggttgacttccttgtacaaaactgtgggaacctggataagcagacggccctgggaaacacagttctacactactgtagtatgtacagtaaacctgagtgtttgaagcttttgctcaggagcaagcccactgtggatatagttaaccaggctggagaaactgccctagacatagcaaagagactaaaagctacccagtgtgaagatctgctttcccaggctaaatctggaaagttcaatccacacgtccacgtagaatatgagtggaatcttcgacaggaggagatagatgagagcgatgatgatctggatgacaaaccaagccctgtcaagaaagagcgctcacccagacctcagagcttctgccactcctccagcatctccccccaggacaagctggcactgccaggattcagcactccaagggacaaacagcggctctcctatggagccttcaccaaccagatcttcgtttccacaagcacagactcgcccacatcaccaaccacggaggctccccctctgcctcctaggaacgccgggaaaggtccaactggcccaccttcaacactccctctaagcacccaggaaccggggataatcactagtgaattcgcgct

SEQ ID NO: 2844 - DNA, 2176 bp, Homo sapiens
gaaaagagagcacgcaaaacaacatgggatgatccgcacagagataacaggagctgagattgcggaagaaatggagaaggaaaggcgcctctttcagctccaaatgtgtgaatatctcattaaagttaatgaaatcaagaccaaaaagggtgtggatctgctgcagaatcttataaagtattaccatgcacagtgcaatttctttcaagatggcttgaaaacagctgataagttgaaacagtacattgaaaaactggctgctgatttatataatataaaacagacccaggatgaagaaaagaaacagctaactgcactccgagacttaataaaatcctctcttcaactggatcagaaagaatctaggagagattctcagagccggcaaggaggatacagcatgcatcagctccagggcaataaggaatatggcagtgaaaagaaggggtacctgctaaagaaaagtgacgggatccggaaagtatggcagaggaggaagtgttcagtcaagaatgggattctaaccatctcacatgccacatctaacaggcaaccagccaagttgaaccttctcacctgccaagtaaaacctaatgccgaagacaaaaaatcttttgacctgatatcacataatagaacatatcactttcaggcagaagatgagcaggattatgtagcatggatatcagtattgacaaatagcaaagaagaggccctaaccatggccttccgtggagagcagagtgcgggagagaacagcctggaagacctgacaaaagccattattgaggatgtccagcggctcccagggaatgacatttgctgcgattgtggctcatcagaacccacctggctttcaaccaacttgggtattttgacctgtatagaatgttctggcatccatagggaaatgggggttcatatttctcgcattcagtctttggaactagacaaattaggaacttctgaactcttgctggccaagaatgtaggaaacaatagttttaatgatattatggaagcaaatttacccagcccctcaccaaaacccaccccttcaagtgatatgactgtacgaaaagaatatatcactgcaaagtatgtagatcataggttttcaaggaagacctgttcaacttcatcagctaaactaaatgaattgcttgaggccatcaaatccagggatttacttgcactaattcaagtctatgcagaaggggtagagctaatggaaccactgctggaacctgggcaggagcttggggagacagcccttcaccttgccgtccgaactgcagatcagacatctctccatttggttgacttccttgtacaaaactgtgggaacctggataagcagacggccctgggaaacacagttctacactactgtagtatgtacagtaaacctgagtgtttgaagcttttgctcaggagcaagcccactgtggatatagttaaccaggctggagaaactgccctagacatagcaaagagactaaaagctacccagtgtgaagatctgctttcccaggctaaatctggaaagttcaatccacacgtccacgtagaatatgagtggaatcttcgacaggaggagatagatgagagcgatgatgatctggatgacaaaccaagccctgtcaagaaagagcgctcacccagacctcagagcttctgccactcctccagcatctccccccaggacaagctggcactgccaggattcagcactccaagggacaaacagcggctctcctatggagccttcaccaaccagatcttcgtttccacaagcacagactcgcccacatcaccaaccacggaggctccccctctgcctcctaggaacgccgggaaaggtaacgatgggggtccatcctcttcaagtaagactacaaacaagtttgagggactatcccagcagtcgagcaccagttctgcaaagactgcccttggcccaagagttcttcctaaactacctcagaaagtggcactaaggaaaacagatcatctctccctagacaaagccaccatcccgcccgaaatctttcagaaatcatcacagttggcagagttgccacaaaagccaccaccctggagatcgaggctgcagtgagcgtaatcatgccactgcactctagcctgggcaacagagtgaaaccccgtctcaaaa

SEQ ID NO: 2845 - DNA, 396 bp, Homo sapiens
atcctttgagacaattatccctgctcccattttatgaatgagaaaatggggccacagattggactgggaccttaaaagcctacgtcttaaacttcaaagactcgttttgcctttcagccaggaatttgcaagtttgaggcccatttaataagaagaaagcttttaattttggagacaagtcatcaaaataaagaaggctctgcgtgcgattgtttgcatttcttcttgagcctgtcacatagcagtgcagcttgtctaagcagagtgttgcctatagtacacctacagatgattcattgaaaactaggaataaggtgggatttgctcagtgtttgtataatattgggatgtttcagcatttaaattaaaatggtgcacatttgctgttccttccag

SEQ ID NO: 2846 - DNA, 706 bp, Homo sapiens
  misc_feature (706)..(706): n is a, c, g, or t
agcggaagttcctaggccagcctgtcacgtgggagggaggctcggcgctcaggaagcatggcactctggcgggcataccagcgggccctggccgctcacccgtggaaagtacaggtcctgacagctgggtccctgatgggcctgggtgacattatctcacagcagctggtggagaggcggggtctgcaggaacaccagagaggccggactctgaccatggtgtccctgggctgtggctttgtgggccctgtggtaggaggctggtacaaggttttggatcggttcatccctggcaccaccaaagtggatgcactgaagaagatgttgttggatcaggggggctttgccccgtgttttctaggctgctttctcccactggtaggggcacttaatggactgtcagcccaggacaactgggccaaactacagcgggattatcctgatgcccttatcaccaactactatctatggcctgctgtgcagttagccaacttctacctggtcccccttcattacagggaggatcctgcttctaccacccttgtctccatcccacctgagctccgtctttgatggcatatctggagggacagtggctggggtgctgcagcctaggttagacagagaggtagaccagaaggccaagtaggagcctggtcagacactcacaataaagacagttgctgaactgcacccaaaaagatan

SEQ ID NO: 2847 - DNA, 1007 bp, Homo sapiens
agcggaagttcctaggccagcctgtcacgtgggagggaggctcggcgctcaggaagcatggcactctggcgggcataccagcgggccctggccgctcacccgtggaaagtacaggtcctgacagctgggtccctgatgggcctgggtgacattatctcacagcagctggtggagaggcggggtctgcaggaacaccagagaggccggactctgaccatggtgtccctgggctgtggctttgtgggccctgtggtaggaggctggtacaaggttttggatcggttcatccctggcaccaccaaagtggatgcactgaagaagatgttgttggatcaggggggctttgccccgtgttttctaggctgctttctcccactggtaggggcacttaatggactgtcagcccaggacaactgggccaaactacagcgggattatcctgatgcccttatcaccaactactatctatggcctgctgtgcagttagccaacttctacctggtcccccttcattacaggttggccgttgtccaatgtgttgctgttatctggaactcctacctgtcctggaaggcacatcggctctaagcctgcctcactccatcgtttccaccttgcagtgatgcagcttgaccctggaacggtcagacaacctcctcaaagtgggcataccagtttccacggggttgggttgccggtcagagcttaagaggactagcaccctgcaatgcccctcttcactctaaaatgtacactgactgctttagagcccttgataatagtcttattcccaccacatactaggcactccataaatatctgttgaaccttcatgaccttatcaactttacacccatatcccagcaaatgccactcatccccactcttcatagacacatttgttactctaaccctgcctaggcttcttgtagctccagctctttagagactcccggaaccctttatatggtgcctcagtaaatatgttattaaatatgtaatccgga

SEQ ID NO: 2848 - DNA, 1004 bp, Homo sapiens
  misc_feature (1)..(1): n is a, c, g, or t
  misc_feature (3)..(3): n is a, c, g, or t
  misc_feature (6)..(6): n is a, c, g, or t
ngncgngggagggacggtgggggtgaccccctctcctcttggcttgacagaagcatggcactctggcgggcataccagcgggccctggccgctcacccgtggaaagtacaggtcctgacagctgggtccctgatgggcctgggtgacattatctcacagcagctggtggagaggcggggtctgcaggaacaccagagaggccggactctgaccatggtgtccctgggctgtggctttgtgggccctgtggtaggaggctggtacaaggttttggatcggttcatccctggcaccaccaaagtggatgcactgaagaagatgttgttggatcaggggggctttgccccgtgttttctaggctgctttctcccactggtaggggcacttaatggactgtcagcccaggacaactgggccaaactacagcgggattatcctgatgcccttatcaccaactactatctatggcctgctgtgcagttagccaacttctacctggtcccccttcattacaggttggccgttgtccaatgtgttgctgttatctggaactcctacctgtcctggaaggcacatcggctctaagcctgcctcactccatcgtttccaccttgcagtgatgcagcttgaccctggaacggtcagacaacctcctcaaagtgggcataccagtttccacggggttgggttgccggtcagagcttaagaggactagcaccctgcaatgcccctcttcactctaaaatgtacactgactgctttagagcccttgataatagtcttattcccaccacatactaggcactccataaatatctgttgaaccttcatgaccttatcaactttacacccatatcccagcaaatgccactcatccccactcttcatagacacatttgttactctaaccctgcctaggcttcttgtagctccagctctttagagactcccggaaccctttatatggtgcctcagtaaatatgttattaaatatgtaatccgga

SEQ ID NO: 2849 - DNA, 703 bp, Homo sapiens
  misc_feature (1)..(1): n is a, c, g, or t
  misc_feature (3)..(3): n is a, c, g, or t
  misc_feature (6)..(6): n is a, c, g, or t
  misc_feature (703)..(703): n is a, c, g, or t
ngncgngggagggacggtgggggtgaccccctctcctcttggcttgacagaagcatggcactctggcgggcataccagcgggccctggccgctcacccgtggaaagtacaggtcctgacagctgggtccctgatgggcctgggtgacattatctcacagcagctggtggagaggcggggtctgcaggaacaccagagaggccggactctgaccatggtgtccctgggctgtggctttgtgggccctgtggtaggaggctggtacaaggttttggatcggttcatccctggcaccaccaaagtggatgcactgaagaagatgttgttggatcaggggggctttgccccgtgttttctaggctgctttctcccactggtaggggcacttaatggactgtcagcccaggacaactgggccaaactacagcgggattatcctgatgcccttatcaccaactactatctatggcctgctgtgcagttagccaacttctacctggtcccccttcattacagggaggatcctgcttctaccacccttgtctccatcccacctgagctccgtctttgatggcatatctggagggacagtggctggggtgctgcagcctaggttagacagagaggtagaccagaaggccaagtaggagcctggtcagacactcacaataaagacagttgctgaactgcacccaaaaagatan

SEQ ID NO: 2850 - DNA, 404 bp, Homo sapiens
agtagactctagaggagtcccggagggtctgagcttaagaggactagcaccctgcaatgcccctcttcactctaaaatgtacactgactgctttagagcccttgataatagtcttattcccaccacatactaggcactccataaatatctgttgaaccttcatgaccttatcaactttacacccatatcccagcaaatgccactcatccccactcttcatagacacatttgttactctaaccctgcctaggcttcttgtagctccagctctttagagactcccggaaccctttatatggtgcctcagtaaatatgttattaaatatgtaatccggaatctgcagtggtaatgagtaagtttttaagcagaaaactattggggagtcatttctagagctggaaag

SEQ ID NO: 2851 - DNA, 196 bp, Homo sapiens
gttgcttggtttctttccagctctagaaatgactccccaatagttttctgcttaaaaacttactcatccccactcttcatagacacatttgttactctaaccctgcctaggcttcttgtagctccagctctttagagactcccggaaccctttatatggtgcctcagtaaatatgttattaaatatgtaatccgga

SEQ ID NO: 2852 - DNA, 1007 bp, Homo sapiens
ggtgatctgcggtctctggcttaaagcgtcgcaagccatgagtgcccacaaggaagcatggcactctggcgggcataccagcgggccctggccgctcacccgtggaaagtacaggtcctgacagctgggtccctgatgggcctgggtgacattatctcacagcagctggtggagaggcggggtctgcaggaacaccagagaggccggactctgaccatggtgtccctgggctgtggctttgtgggccctgtggtaggaggctggtacaaggttttggatcggttcatccctggcaccaccaaagtggatgcactgaagaagatgttgttggatcaggggggctttgccccgtgttttctaggctgctttctcccactggtaggggcacttaatggactgtcagcccaggacaactgggccaaactacagcgggattatcctgatgcccttatcaccaactactatctatggcctgctgtgcagttagccaacttctacctggtcccccttcattacaggttggccgttgtccaatgtgttgctgttatctggaactcctacctgtcctggaaggcacatcggctctaagcctgcctcactccatcgtttccaccttgcagtgatgcagcttgaccctggaacggtcagacaacctcctcaaagtgggcataccagtttccacggggttgggttgccggtcagagcttaagaggactagcaccctgcaatgcccctcttcactctaaaatgtacactgactgctttagagcccttgataatagtcttattcccaccacatactaggcactccataaatatctgttgaaccttcatgaccttatcaactttacacccatatcccagcaaatgccactcatccccactcttcatagacacatttgttactctaaccctgcctaggcttcttgtagctccagctctttagagactcccggaaccctttatatggtgcctcagtaaatatgttattaaatatgtaatccgga

SEQ ID NO: 2853 - DNA, 984 bp, Homo sapiens
acccacgctgtcgacccacgcgtacgctcgaagcatggcactctggcgggcataccagcgggccctggccgctcacccgtggaaagtacaggtcctgacagctgggtccctgatgggcctgggtgacattatctcacagcagctggtggagaggcggggtctgcaggaacaccagagaggccggactctgaccatggtgtccctgggctgtggctttgtgggccctgtggtaggaggctggtacaaggttttggatcggttcatccctggcaccaccaaagtggatgcactgaagaagatgttgttggatcaggggggctttgccccgtgttttctaggctgctttctcccactggtaggggcacttaatggactgtcagcccaggacaactgggccaaactacagcgggattatcctgatgcccttatcaccaactactatctatggcctgctgtgcagttagccaacttctacctggtcccccttcattacaggttggccgttgtccaatgtgttgctgttatctggaactcctacctgtcctggaaggcacatcggctctaagcctgcctcactccatcgtttccaccttgcagtgatgcagcttgaccctggaacggtcagacaacctcctcaaagtgggcataccagtttccacggggttgggttgccggtcagagcttaagaggactagcaccctgcaatgcccctcttcactctaaaatgtacactgactgctttagagcccttgataatagtcttattcccaccacatactaggcactccataaatatctgttgaaccttcatgaccttatcaactttacacccatatcccagcaaatgccactcatccccactcttcatagacacatttgttactctaaccctgcctaggcttcttgtagctccagctctttagagactcccggaaccctttatatggtgcctcagtaaatatgttattaaatatgtaatccgga

SEQ ID NO: 2854 - DNA, 1738 bp, Homo sapiens
actcttgttttattactttttttttctttttgagatagggtcttgttctgtcgcccaggcagcagtgtagtggcgtgatcactgcagcctggacctcctgggctcggacagtcctcctgcttcagctacttgagaggctgaggcaggggaatcgcttgaatcgggaggcagaggttgcagtgagccaagatcatgccactgcactctagcctggacaacagagtgagactcagtctttaaaaaaaaaagttattcttgctgttctctacaaatagagatcccctagaccaaggtgaaagctgttggcagggtcttgcattgggcttgggggagaaaacagggtttcctaccattctacacatgatttattcattgtgctgagtcctggaaagaacagtgtctaggaatccagccacctggttgttgcattggccctgcacttactggttatgtgagaccctggacttcatttccatacctctaaaataagtggtttgcattaaattatcttaaagccccttttgattctgacagtctgtggttctcagccctgtggccttaaattctccttcctctctctatactttctgactctgacttccctttactgctcaatgcaaagttcctggacctgggtctgctcatcccagtttctgacagaatacacatgaggtgtcaccatcattggggaggtgagggctttgaggcagcaggaagggactagtcatttgtttccacaatgaagccctggggttcagagtaccagagcctcagtggaggtcagcagatgtccctccctccttggaatggcagcccatcccaggagatgtcctgacaacacctgtgtaccctgcatagggtccctgatgggcctgggtgacattatctcacagcagctggtggagaggcggggtctgcaggaacaccagagaggccggactctgaccatggtgtccctgggctgtggctttgtgggccctgtggtaggaggctggtacaaggttttggatcggttcatccctggcaccaccaaagtggatgcactgaagaagatgttgttggatcaggggggctttgccccgtgttttctaggctgctttctcccactggtaggggcacttaatggactgtcagcccaggacaactgggccaaactacagcgggattatcctgatgcccttatcaccaactactatctatggcctgctgtgcagttagccaacttctacctggtcccccttcattacaggttggccgttgtccaatgtgttgctgttatctggaactcctacctgtcctggaaggcacatcggctctaagcctgcctcactccatcgtttccaccttgcagtgatgcagcttgaccctggaacggtcagacaacctcctcaaagtgggcataccagtttccacggggttgggttgccggtcagagcttaagaggactagcaccctgcaatgcccctcttcactctaaaatgtacactgactgctttagagcccttgataatagtcttattcccaccacatactaggcactccataaatatctgttgaaccttcatgaccttatcaactttacacccatatcccagcaaatgccactcatccccactcttcatagacacatttgttactctaaccctgcctaggcttcttgtagctccagctctttagagactcccggaaccctttatatggtgcctcagtaaatatgttattaaatatgtaatccgga

SEQ ID NO: 2855 - DNA, 1141 bp, Homo sapiens
acccacgctgtcgacccacgcgtacgctcgaagcatggcactctggcgggcataccagcgggccctggccgctcacccgtggaaagtacaggtcctgacagctgacttctggggaggaaggcagcactgctggccccatgccagtagctatacctgccgacccaggcctcctggactgaaggacacgcttcctgctcctcactccaagaagccacttcttgcccctctgccttctgcgcatgaaactcaaaagccacaaaaggtccctgatgggcctgggtgacattatctcacagcagctggtggagaggcggggtctgcaggaacaccagagaggccggactctgaccatggtgtccctgggctgtggctttgtgggccctgtggtaggaggctggtacaaggttttggatcggttcatccctggcaccaccaaagtggatgcactgaagaagatgttgttggatcaggggggctttgccccgtgttttctaggctgctttctcccactggtaggggcacttaatggactgtcagcccaggacaactgggccaaactacagcgggattatcctgatgcccttatcaccaactactatctatggcctgctgtgcagttagccaacttctacctggtcccccttcattacaggttggccgttgtccaatgtgttgctgttatctggaactcctacctgtcctggaaggcacatcggctctaagcctgcctcactccatcgtttccaccttgcagtgatgcagcttgaccctggaacggtcagacaacctcctcaaagtgggcataccagtttccacggggttgggttgccggtcagagcttaagaggactagcaccctgcaatgcccctcttcactctaaaatgtacactgactgctttagagcccttgataatagtcttattcccaccacatactaggcactccataaatatctgttgaaccttcatgaccttatcaactttacacccatatcccagcaaatgccactcatccccactcttcatagacacatttgttactctaaccctgcctaggcttcttgtagctccagctctttagagactcccggaaccctttatatggtgcctcagtaaatatgttattaaatatgtaatccgga

SEQ ID NO: 2856 - DNA, 972 bp, Homo sapiens
agcggaagttcctaggccagcctgtcacgtgggagggaggctcggcgctcaggaagcatggcactctggcgggcataccagcgggccctggccgctcacccgtggaaagtacaggtcctgacagctgcagctggtggagaggcggggtctgcaggaacaccagagaggccggactctgaccatggtgtccctgggctgtggctttgtgggccctgtggtaggaggctggtacaaggttttggatcggttcatccctggcaccaccaaagtggatgcactgaagaagatgttgttggatcaggggggctttgccccgtgttttctaggctgctttctcccactggtaggggcacttaatggactgtcagcccaggacaactgggccaaactacagcgggattatcctgatgcccttatcaccaactactatctatggcctgctgtgcagttagccaacttctacctggtcccccttcattacaggttggccgttgtccaatgtgttgctgttatctggaactcctacctgtcctggaaggcacatcggctctaagcctgcctcactccatcgtttccaccttgcagtgatgcagcttgaccctggaacggtcagacaacctcctcaaagtgggcataccagtttccacggggttgggttgccggtcagagcttaagaggactagcaccctgcaatgcccctcttcactctaaaatgtacactgactgctttagagcccttgataatagtcttattcccaccacatactaggcactccataaatatctgttgaaccttcatgaccttatcaactttacacccatatcccagcaaatgccactcatccccactcttcatagacacatttgttactctaaccctgcctaggcttcttgtagctccagctctttagagactcccggaaccctttatatggtgcctcagtaaatatgttattaaatatgtaatccgga

SEQ ID NO: 2857 - DNA, 891 bp, Homo sapiens
agcggaagttcctaggccagcctgtcacgtgggagggaggctcggcgctcaggaagcatggcactctggcgggcataccagcgggccctggccgctcacccgtggaaagtacaggtcctgacagctgggccctgtggtaggaggctggtacaaggttttggatcggttcatccctggcaccaccaaagtggatgcactgaagaagatgttgttggatcaggggggctttgccccgtgttttctaggctgctttctcccactggtaggggcacttaatggactgtcagcccaggacaactgggccaaactacagcgggattatcctgatgcccttatcaccaactactatctatggcctgctgtgcagttagccaacttctacctggtcccccttcattacaggttggccgttgtccaatgtgttgctgttatctggaactcctacctgtcctggaaggcacatcggctctaagcctgcctcactccatcgtttccaccttgcagtgatgcagcttgaccctggaacggtcagacaacctcctcaaagtgggcataccagtttccacggggttgggttgccggtcagagcttaagaggactagcaccctgcaatgcccctcttcactctaaaatgtacactgactgctttagagcccttgataatagtcttattcccaccacatactaggcactccataaatatctgttgaaccttcatgaccttatcaactttacacccatatcccagcaaatgccactcatccccactcttcatagacacatttgttactctaaccctgcctaggcttcttgtagctccagctctttagagactcccggaaccctttatatggtgcctcagtaaatatgttattaaatatgtaatccgga

SEQ ID NO: 2858 - DNA, 1959 bp, Homo sapiens
actcttgttttattactttttttttctttttgagatagggtcttgttctgtcgcccaggcagcagtgtagtggcgtgatcactgcagcctggacctcctgggctcggacagtcctcctgcttcagctacttgagaggctgaggcaggggaatcgcttgaatcgggaggcagaggttgcagtgagccaagatcatgccactgcactctagcctggacaacagagtgagactcagtctttaaaaaaaaaagttattcttgctgttctctacaaatagagatcccctagaccaaggtgaaagctgttggcagggtcttgcattgggcttgggggagaaaacagggtttcctaccattctacacatgatttattcattgtgctgagtcctggaaagaacagtgtctaggaatccagccacctggttgttgcattggccctgcacttactggttatgtgagaccctggacttcatttccatacctctaaaataagtggtttgcattaaattatcttaaagccccttttgattctgacagtctgtggttctcagccctgtggccttaaattctccttcctctctctatactttctgactctgacttccctttactgctcaatgcaaagttcctggacctgggtctgctcatcccagtttctgacagaatacacatgaggtgtcaccatcattggggaggtgagggctttgaggcagcaggaagggactagtcatttgtttccacaatgaagccctggggttcagagtaccagagcctcagtggaggtcagcagatgtccctccctccttggaatggcagcccatcccaggagatgtcctgacaacacctgtgtaccctgcatagggtccctgatgggcctgggtgacattatctcacagcagctggtggagaggcggggtctgcaggaacaccagagaggccggactctgaccatggtgtccctgggctgtggctttgtggtaagttctcccctcaacagggcttcagtggactcaacagtggtcttagttctttgccatcctttggcttcccttggactctcacacctaagccaacctgccgccctcttttttcttagtgtccacttcccctattctgatacttggggcagggagcttagtgaggtagaggcctagggctccctcactgcagcctgctgctatctggggtttacttccagggccctgtggtaggaggctggtacaaggttttggatcggttcatccctggcaccaccaaagtggatgcactgaagaagatgttgttggatcaggggggctttgccccgtgttttctaggctgctttctcccactggtaggggcacttaatggactgtcagcccaggacaactgggccaaactacagcgggattatcctgatgcccttatcaccaactactatctatggcctgctgtgcagttagccaacttctacctggtcccccttcattacaggttggccgttgtccaatgtgttgctgttatctggaactcctacctgtcctggaaggcacatcggctctaagcctgcctcactccatcgtttccaccttgcagtgatgcagcttgaccctggaacggtcagacaacctcctcaaagtgggcataccagtttccacggggttgggttgccggtcagagcttaagaggactagcaccctgcaatgcccctcttcactctaaaatgtacactgactgctttagagcccttgataatagtcttattcccaccacatactaggcactccataaatatctgttgaaccttcatgaccttatcaactttacacccatatcccagcaaatgccactcatccccactcttcatagacacatttgttactctaaccctgcctaggcttcttgtagctccagctctttagagactcccggaaccctttatatggtgcctcagtaaatatgttattaaatatgtaatccgga

SEQ ID NO: 2859 - DNA, 1025 bp, Homo sapiens
acccacgctgtcgacccacgcgtacgctcgaagcatggcactctggcgggcataccagcgggccctggccgctcacccgtggaaagtacaggtcctgacagctgacttctggggaggaaggcagcactgctggccccatgccagtagctatacctgccgacccaggcctcctggactgaaggacacgcttcctgctcctcactccaagaagccacttcttgcccctctgccttctgcgcatgaaactcaaaagccacaaaaggccctgtggtaggaggctggtacaaggttttggatcggttcatccctggcaccaccaaagtggatgcactgaagaagatgttgttggatcaggggggctttgccccgtgttttctaggctgctttctcccactggtaggggcacttaatggactgtcagcccaggacaactgggccaaactacagcgggattatcctgatgcccttatcaccaactactatctatggcctgctgtgcagttagccaacttctacctggtcccccttcattacaggttggccgttgtccaatgtgttgctgttatctggaactcctacctgtcctggaaggcacatcggctctaagcctgcctcactccatcgtttccaccttgcagtgatgcagcttgaccctggaacggtcagacaacctcctcaaagtgggcataccagtttccacggggttgggttgccggtcagagcttaagaggactagcaccctgcaatgcccctcttcactctaaaatgtacactgactgctttagagcccttgataatagtcttattcccaccacatactaggcactccataaatatctgttgaaccttcatgaccttatcaactttacacccatatcccagcaaatgccactcatccccactcttcatagacacatttgttactctaaccctgcctaggcttcttgtagctccagctctttagagactcccggaaccctttatatggtgcctcagtaaatatgttattaaatatgtaatccgga

SEQ ID NO: 2860 - DNA, 1985 bp, Homo sapiens
actcttgttttattactttttttttctttttgagatagggtcttgttctgtcgcccaggcagcagtgtagtggcgtgatcactgcagcctggacctcctgggctcggacagtcctcctgcttcagctacttgagaggctgaggcaggggaatcgcttgaatcgggaggcagaggttgcagtgagccaagatcatgccactgcactctagcctggacaacagagtgagactcagtctttaaaaaaaaaagttattcttgctgttctctacaaatagagatcccctagaccaaggtgaaagctgttggcagggtcttgcattgggcttgggggagaaaacagggtttcctaccattctacacatgatttattcattgtgctgagtcctggaaagaacagtgtctaggaatccagccacctggttgttgcattggccctgcacttactggttatgtgagaccctggacttcatttccatacctctaaaataagtggtttgcattaaattatcttaaagccccttttgattctgacagtctgtggttctcagccctgtggccttaaattctccttcctctctctatactttctgactctgacttccctttactgctcaatgcaaagttcctggacctgggtctgctcatcccagtttctgacagaatacacatgaggtgtcaccatcattggggaggtgagggctttgaggcagcaggaagggactagtcatttgtttccacaatgaagccctggggttcagagtaccagagcctcagtggaggtcagcagatgtccctccctccttggaatggcagcccatcccaggagatgtcctgacaacacctgtgtaccctgcatagggtccctgatgggcctgggtgacattatctcacagcagctggtggagaggcggggtctgcaggaacaccagagaggccggactctgaccatggtgtccctgggctgtggctttgtgggccctgtggtaggaggctggtacaaggttttggatcggttcatccctggcaccaccaaagtggatgcactgaagaagatgttgttggatcaggggggctttgccccgtgttttctaggctgctttctcccactggtaggggcacttaatggactgtcagcccaggacaactgggccaaactacagcgggtgagctgggcaggtgtggagaatgtctctggctggcgggctgacagcccaggggaagaagacaggttttacagggataaaaaagggggtaagtgcaggtagggccccaggccatggaggagaggagctgagggttatggtgcaggaatgtgctctttgaacccaagtctgtgtgtgacattcatactgggaagtgggagctgcttggaggcgcaagtgttaatttgttccttctctgtctccccaggattatcctgatgcccttatcaccaactactatctatggcctgctgtgcagttagccaacttctacctggtcccccttcattacaggttggccgttgtccaatgtgttgctgttatctggaactcctacctgtcctggaaggcacatcggctctaagcctgcctcactccatcgtttccaccttgcagtgatgcagcttgaccctggaacggtcagacaacctcctcaaagtgggcataccagtttccacggggttgggttgccggtcagagcttaagaggactagcaccctgcaatgcccctcttcactctaaaatgtacactgactgctttagagcccttgataatagtcttattcccaccacatactaggcactccataaatatctgttgaaccttcatgaccttatcaactttacacccatatcccagcaaatgccactcatccccactcttcatagacacatttgttactctaaccctgcctaggcttcttgtagctccagctctttagagactcccggaaccctttatatggtgcctcagtaaatatgttattaaatatgtaatccgga

SEQ ID NO: 2861 - DNA, 1642 bp, Homo sapiens
actcttgttttattactttttttttctttttgagatagggtcttgttctgtcgcccaggcagcagtgtagtggcgtgatcactgcagcctggacctcctgggctcggacagtcctcctgcttcagctacttgagaggctgaggcaggggaatcgcttgaatcgggaggcagaggttgcagtgagccaagatcatgccactgcactctagcctggacaacagagtgagactcagtctttaaaaaaaaaagttattcttgctgttctctacaaatagagatcccctagaccaaggtgaaagctgttggcagggtcttgcattgggcttgggggagaaaacagggtttcctaccattctacacatgatttattcattgtgctgagtcctggaaagaacagtgtctaggaatccagccacctggttgttgcattggccctgcacttactggttatgtgagaccctggacttcatttccatacctctaaaataagtggtttgcattaaattatcttaaagccccttttgattctgacagtctgtggttctcagccctgtggccttaaattctccttcctctctctatactttctgactctgacttccctttactgctcaatgcaaagttcctggacctgggtctgctcatcccagtttctgacagaatacacatgaggtgtcaccatcattggggaggtgagggctttgaggcagcaggaagggactagtcatttgtttccacaatgaagccctggggttcagagtaccagagcctcagtggaggtcagcagatgtccctccctccttggaatggcagcccatcccaggagatgtcctgacaacacctgtgtaccctgcatagggtccctgatgggcctgggtgacattatctcacagcagctggtggagaggcggggtctgcaggaacaccagagaggccggactctgaccatggtgtccctgggctgtggctttgtgggccctgtggtaggaggctggtacaaggttttggatcggttcatccctggcaccaccaaagtggatgcactgaagaagatgttgttggatcaggattatcctgatgcccttatcaccaactactatctatggcctgctgtgcagttagccaacttctacctggtcccccttcattacaggttggccgttgtccaatgtgttgctgttatctggaactcctacctgtcctggaaggcacatcggctctaagcctgcctcactccatcgtttccaccttgcagtgatgcagcttgaccctggaacggtcagacaacctcctcaaagtgggcataccagtttccacggggttgggttgccggtcagagcttaagaggactagcaccctgcaatgcccctcttcactctaaaatgtacactgactgctttagagcccttgataatagtcttattcccaccacatactaggcactccataaatatctgttgaaccttcatgaccttatcaactttacacccatatcccagcaaatgccactcatccccactcttcatagacacatttgttactctaaccctgcctaggcttcttgtagctccagctctttagagactcccggaaccctttatatggtgcctcagtaaatatgttattaaatatgtaatccgga

SEQ ID NO: 2862 - DNA, 1254 bp, Homo sapiens
agcggaagttcctaggccagcctgtcacgtgggagggaggctcggcgctcaggaagcatggcactctggcgggcataccagcgggccctggccgctcacccgtggaaagtacaggtcctgacagctgggtccctgatgggcctgggtgacattatctcacagcagctggtggagaggcggggtctgcaggaacaccagagaggccggactctgaccatggtgtccctgggctgtggctttgtgggccctgtggtaggaggctggtacaaggttttggatcggttcatccctggcaccaccaaagtggatgcactgaagaagatgttgttggatcaggggggctttgccccgtgttttctaggctgctttctcccactggtaggggcacttaatggactgtcagcccaggacaactgggccaaactacagcgggtgagctgggcaggtgtggagaatgtctctggctggcgggctgacagcccaggggaagaagacaggttttacagggataaaaaagggggtaagtgcaggtagggccccaggccatggaggagaggagctgagggttatggtgcaggaatgtgctctttgaacccaagtctgtgtgtgacattcatactgggaagtgggagctgcttggaggcgcaagtgttaatttgttccttctctgtctccccaggattatcctgatgcccttatcaccaactactatctatggcctgctgtgcagttagccaacttctacctggtcccccttcattacaggttggccgttgtccaatgtgttgctgttatctggaactcctacctgtcctggaaggcacatcggctctaagcctgcctcactccatcgtttccaccttgcagtgatgcagcttgaccctggaacggtcagacaacctcctcaaagtgggcataccagtttccacggggttgggttgccggtcagagcttaagaggactagcaccctgcaatgcccctcttcactctaaaatgtacactgactgctttagagcccttgataatagtcttattcccaccacatactaggcactccataaatatctgttgaaccttcatgaccttatcaactttacacccatatcccagcaaatgccactcatccccactcttcatagacacatttgttactctaaccctgcctaggcttcttgtagctccagctctttagagactcccggaaccctttatatggtgcctcagtaaatatgttattaaatatgtaatccgga

SEQ ID NO: 2863 - DNA, 2248 bp, Homo sapiens
actcttgttttattactttttttttctttttgagatagggtcttgttctgtcgcccaggcagcagtgtagtggcgtgatcactgcagcctggacctcctgggctcggacagtcctcctgcttcagctacttgagaggctgaggcaggggaatcgcttgaatcgggaggcagaggttgcagtgagccaagatcatgccactgcactctagcctggacaacagagtgagactcagtctttaaaaaaaaaagttattcttgctgttctctacaaatagagatcccctagaccaaggtgaaagctgttggcagggtcttgcattgggcttgggggagaaaacagggtttcctaccattctacacatgatttattcattgtgctgagtcctggaaagaacagtgtctaggaatccagccacctggttgttgcattggccctgcacttactggttatgtgagaccctggacttcatttccatacctctaaaataagtggtttgcattaaattatcttaaagccccttttgattctgacagtctgtggttctcagccctgtggccttaaattctccttcctctctctatactttctgactctgacttccctttactgctcaatgcaaagttcctggacctgggtctgctcatcccagtttctgacagaatacacatgaggtgtcaccatcattggggaggtgagggctttgaggcagcaggaagggactagtcatttgtttccacaatgaagccctggggttcagagtaccagagcctcagtggaggtcagcagatgtccctccctccttggaatggcagcccatcccaggagatgtcctgacaacacctgtgtaccctgcatagggtccctgatgggcctgggtgacattatctcacagcagctggtggagaggcggggtctgcaggaacaccagagaggccggactctgaccatggtgtccctgggctgtggctttgtgggccctgtggtaggaggctggtacaaggttttggatcggttcatccctggcaccaccaaagtggatgcactgaagaagatgttgttggatcaggggggctttgccccgtgttttctaggctgctttctcccactggtaggggcacttaatggactgtcagcccaggacaactgggccaaactacagcgggtgagctgggcaggtgtggagaatgtctctggctggcgggctgacagcccaggggaagaagacaggttttacagggataaaaaagggggtaagtgcaggtagggccccaggccatggaggagaggagctgagggttatggtgcaggaatgtgctctttgaacccaagtctgtgtgtgacattcatactgggaagtgggagctgcttggaggcgcaagtgttaatttgttccttctctgtctccccaggattatcctgatgcccttatcaccaactactatgtaagagctgacacctcaactgcttgttctcctgcttccttaagtctagaactgtcctgggattgggctatcaatcctgacatgggaaacccttccgttgggattactctttcattcccaggatgggcaccataaatagggaagccatcacccaactgttcacctttttcttgtgtgcagaagttggggtagggccaggcaagacagtgagtctggggtcaggtggtggggcagccatccaacctttacattttctcttgcagctatggcctgctgtgcagttagccaacttctacctggtcccccttcattacaggttggccgttgtccaatgtgttgctgttatctggaactcctacctgtcctggaaggcacatcggctctaagcctgcctcactccatcgtttccaccttgcagtgatgcagcttgaccctggaacggtcagacaacctcctcaaagtgggcataccagtttccacggggttgggttgccggtcagagcttaagaggactagcaccctgcaatgcccctcttcactctaaaatgtacactgactgctttagagcccttgataatagtcttattcccaccacatactaggcactccataaatatctgttgaaccttcatgaccttatcaactttacacccatatcccagcaaatgccactcatccccactcttcatagacacatttgttactctaaccctgcctaggcttcttgtagctccagctctttagagactcccggaaccctttatatggtgcctcagtaaatatgttattaaatatgtaatccgga

SEQ ID NO: 2864 - DNA, 818 bp, Homo sapiens
agcggaagttcctaggccagcctgtcacgtgggagggaggctcggcgctcaggaagcatggcactctggcgggcataccagcgggccctggccgctcacccgtggaaagtacaggtcctgacagctgggtccctgatgggcctgggtgacattatctcacagcagctggtggagaggcggggtctgcaggaacaccagagaggccggactctgaccatggtgtccctgggctgtggctttgtggattatcctgatgcccttatcaccaactactatctatggcctgctgtgcagttagccaacttctacctggtcccccttcattacaggttggccgttgtccaatgtgttgctgttatctggaactcctacctgtcctggaaggcacatcggctctaagcctgcctcactccatcgtttccaccttgcagtgatgcagcttgaccctggaacggtcagacaacctcctcaaagtgggcataccagtttccacggggttgggttgccggtcagagcttaagaggactagcaccctgcaatgcccctcttcactctaaaatgtacactgactgctttagagcccttgataatagtcttattcccaccacatactaggcactccataaatatctgttgaaccttcatgaccttatcaactttacacccatatcccagcaaatgccactcatccccactcttcatagacacatttgttactctaaccctgcctaggcttcttgtagctccagctctttagagactcccggaaccctttatatggtgcctcagtaaatatgttattaaatatgtaatccgga

SEQ ID NO: 2865 - DNA, 2222 bp, Homo sapiens
actcttgttttattactttttttttctttttgagatagggtcttgttctgtcgcccaggcagcagtgtagtggcgtgatcactgcagcctggacctcctgggctcggacagtcctcctgcttcagctacttgagaggctgaggcaggggaatcgcttgaatcgggaggcagaggttgcagtgagccaagatcatgccactgcactctagcctggacaacagagtgagactcagtctttaaaaaaaaaagttattcttgctgttctctacaaatagagatcccctagaccaaggtgaaagctgttggcagggtcttgcattgggcttgggggagaaaacagggtttcctaccattctacacatgatttattcattgtgctgagtcctggaaagaacagtgtctaggaatccagccacctggttgttgcattggccctgcacttactggttatgtgagaccctggacttcatttccatacctctaaaataagtggtttgcattaaattatcttaaagccccttttgattctgacagtctgtggttctcagccctgtggccttaaattctccttcctctctctatactttctgactctgacttccctttactgctcaatgcaaagttcctggacctgggtctgctcatcccagtttctgacagaatacacatgaggtgtcaccatcattggggaggtgagggctttgaggcagcaggaagggactagtcatttgtttccacaatgaagccctggggttcagagtaccagagcctcagtggaggtcagcagatgtccctccctccttggaatggcagcccatcccaggagatgtcctgacaacacctgtgtaccctgcatagggtccctgatgggcctgggtgacattatctcacagcagctggtggagaggcggggtctgcaggaacaccagagaggccggactctgaccatggtgtccctgggctgtggctttgtggtaagttctcccctcaacagggcttcagtggactcaacagtggtcttagttctttgccatcctttggcttcccttggactctcacacctaagccaacctgccgccctcttttttcttagtgtccacttcccctattctgatacttggggcagggagcttagtgaggtagaggcctagggctccctcactgcagcctgctgctatctggggtttacttccagggccctgtggtaggaggctggtacaaggttttggatcggttcatccctggcaccaccaaagtggatgcactgaagaagatgttgttggatcaggggggctttgccccgtgttttctaggctgctttctcccactggtaggggcacttaatggactgtcagcccaggacaactgggccaaactacagcgggattatcctgatgcccttatcaccaactactatgtaagagctgacacctcaactgcttgttctcctgcttccttaagtctagaactgtcctgggattgggctatcaatcctgacatgggaaacccttccgttgggattactctttcattcccaggatgggcaccataaatagggaagccatcacccaactgttcacctttttcttgtgtgcagaagttggggtagggccaggcaagacagtgagtctggggtcaggtggtggggcagccatccaacctttacattttctcttgcagctatggcctgctgtgcagttagccaacttctacctggtcccccttcattacaggttggccgttgtccaatgtgttgctgttatctggaactcctacctgtcctggaaggcacatcggctctaagcctgcctcactccatcgtttccaccttgcagtgatgcagcttgaccctggaacggtcagacaacctcctcaaagtgggcataccagtttccacggggttgggttgccggtcagagcttaagaggactagcaccctgcaatgcccctcttcactctaaaatgtacactgactgctttagagcccttgataatagtcttattcccaccacatactaggcactccataaatatctgttgaaccttcatgaccttatcaactttacacccatatcccagcaaatgccactcatccccactcttcatagacacatttgttactctaaccctgcctaggcttcttgtagctccagctctttagagactcccggaaccctttatatggtgcctcagtaaatatgttattaaatatgtaatccgga

SEQ ID NO: 2866 - DNA, 1388 bp, Homo sapiens
acccacgctgtcgacccacgcgtacgctcgaagcatggcactctggcgggcataccagcgggccctggccgctcacccgtggaaagtacaggtcctgacagctgacttctggggaggaaggcagcactgctggccccatgccagtagctatacctgccgacccaggcctcctggactgaaggacacgcttcctgctcctcactccaagaagccacttcttgcccctctgccttctgcgcatgaaactcaaaagccacaaaaggtccctgatgggcctgggtgacattatctcacagcagctggtggagaggcggggtctgcaggaacaccagagaggccggactctgaccatggtgtccctgggctgtggctttgtgggccctgtggtaggaggctggtacaaggttttggatcggttcatccctggcaccaccaaagtggatgcactgaagaagatgttgttggatcaggggggctttgccccgtgttttctaggctgctttctcccactggtaggggcacttaatggactgtcagcccaggacaactgggccaaactacagcgggtgagctgggcaggtgtggagaatgtctctggctggcgggctgacagcccaggggaagaagacaggttttacagggataaaaaagggggtaagtgcaggtagggccccaggccatggaggagaggagctgagggttatggtgcaggaatgtgctctttgaacccaagtctgtgtgtgacattcatactgggaagtgggagctgcttggaggcgcaagtgttaatttgttccttctctgtctccccaggattatcctgatgcccttatcaccaactactatctatggcctgctgtgcagttagccaacttctacctggtcccccttcattacaggttggccgttgtccaatgtgttgctgttatctggaactcctacctgtcctggaaggcacatcggctctaagcctgcctcactccatcgtttccaccttgcagtgatgcagcttgaccctggaacggtcagacaacctcctcaaagtgggcataccagtttccacggggttgggttgccggtcagagcttaagaggactagcaccctgcaatgcccctcttcactctaaaatgtacactgactgctttagagcccttgataatagtcttattcccaccacatactaggcactccataaatatctgttgaaccttcatgaccttatcaactttacacccatatcccagcaaatgccactcatccccactcttcatagacacatttgttactctaaccctgcctaggcttcttgtagctccagctctttagagactcccggaaccctttatatggtgcctcagtaaatatgttattaaatatgtaatccgga

SEQ ID NO: 2867 - DNA, 1517 bp, Homo sapiens
agcggaagttcctaggccagcctgtcacgtgggagggaggctcggcgctcaggaagcatggcactctggcgggcataccagcgggccctggccgctcacccgtggaaagtacaggtcctgacagctgggtccctgatgggcctgggtgacattatctcacagcagctggtggagaggcggggtctgcaggaacaccagagaggccggactctgaccatggtgtccctgggctgtggctttgtgggccctgtggtaggaggctggtacaaggttttggatcggttcatccctggcaccaccaaagtggatgcactgaagaagatgttgttggatcaggggggctttgccccgtgttttctaggctgctttctcccactggtaggggcacttaatggactgtcagcccaggacaactgggccaaactacagcgggtgagctgggcaggtgtggagaatgtctctggctggcgggctgacagcccaggggaagaagacaggttttacagggataaaaaagggggtaagtgcaggtagggccccaggccatggaggagaggagctgagggttatggtgcaggaatgtgctctttgaacccaagtctgtgtgtgacattcatactgggaagtgggagctgcttggaggcgcaagtgttaatttgttccttctctgtctccccaggattatcctgatgcccttatcaccaactactatgtaagagctgacacctcaactgcttgttctcctgcttccttaagtctagaactgtcctgggattgggctatcaatcctgacatgggaaacccttccgttgggattactctttcattcccaggatgggcaccataaatagggaagccatcacccaactgttcacctttttcttgtgtgcagaagttggggtagggccaggcaagacagtgagtctggggtcaggtggtggggcagccatccaacctttacattttctcttgcagctatggcctgctgtgcagttagccaacttctacctggtcccccttcattacaggttggccgttgtccaatgtgttgctgttatctggaactcctacctgtcctggaaggcacatcggctctaagcctgcctcactccatcgtttccaccttgcagtgatgcagcttgaccctggaacggtcagacaacctcctcaaagtgggcataccagtttccacggggttgggttgccggtcagagcttaagaggactagcaccctgcaatgcccctcttcactctaaaatgtacactgactgctttagagcccttgataatagtcttattcccaccacatactaggcactccataaatatctgttgaaccttcatgaccttatcaactttacacccatatcccagcaaatgccactcatccccactcttcatagacacatttgttactctaaccctgcctaggcttcttgtagctccagctctttagagactcccggaaccctttatatggtgcctcagtaaatatgttattaaatatgtaatccgga

SEQ ID NO: 2868 - DNA, 1205 bp, Homo sapiens
tctgaggatccccttgatagccaccaggagatgtcctgacaacacctgtgtaccctgcatagggtccctgatgggcctgggtgacattatctcacagcagctggtggagaggcggggtctgcaggaacaccagagaggccggactctgaccatggtgtccctgggctgtggctttgtgggccctgtggtaggaggctggtacaaggttttggatcggttcatccctggcaccaccaaagtggatgcactgaagaagatgttgttggatcaggggggctttgccccgtgttttctaggctgctttctcccactggtaggggcacttaatggactgtcagcccaggacaactgggccaaactacagcgggattatcctgatgcccttatcaccaactactatgtaagagctgacacctcaactgcttgttctcctgcttccttaagtctagaactgtcctgggattgggctatcaatcctgacatgggaaacccttccgttgggattactctttcattcccaggatgggcaccataaatagggaagccatcacccaactgttcacctttttcttgtgtgcagaagttggggtagggccaggcaagacagtgagtctggggtcaggtggtggggcagccatccaacctttacattttctcttgcagctatggcctgctgtgcagttagccaacttctacctggtcccccttcattacaggttggccgttgtccaatgtgttgctgttatctggaactcctacctgtcctggaaggcacatcggctctaagcctgcctcactccatcgtttccaccttgcagtgatgcagcttgaccctggaacggtcagacaacctcctcaaagtgggcataccagtttccacggggttgggttgccggtcagagcttaagaggactagcaccctgcaatgcccctcttcactctaaaatgtacactgactgctttagagcccttgataatagtcttattcccaccacatactaggcactccataaatatctgttgaaccttcatgaccttatcaactttacacccatatcccagcaaatgccactcatccccactcttcatagacacatttgttactctaaccctgcctaggcttcttgtagctccagctctttagagactcccggaaccctttatatggtgcctcagtaaatatgttattaaatatgtaatccgga

SEQ ID NO: 2869 - DNA, 1488 bp, Homo sapiens
acccacgctgtcgacccacgcgtacgctcgaagcatggcactctggcgggcataccagcgggccctggccgctcacccgtggaaagtacaggtcctgacagctgacttctggggaggaaggcagcactgctggccccatgccagtagctatacctgccgacccaggcctcctggactgaaggacacgcttcctgctcctcactccaagaagccacttcttgcccctctgccttctgcgcatgaaactcaaaagccacaaaagaatattgctgtctgccatccccacgaggtgacaaggagcagaatgatggaatttgggggagtaaagacagagaggaagtgcattagtctagggaatgtcctttgatatgcaggccctttggggcctcacttgggcaggaacacccagcaggggagcagccacaggggcctcctggtgccactgacctctgagcccatctcagcccatgccaggaataccctggcctccttggtcctccttgagagaaggcctgggttcagttccaactgcactccttaccaagtcatctcatctctcaaagactcatcattaaatgggggtgtaggctgggtgccgtggtcacacctgtaatcccagcactttgggaggccgaggtgggtggctcacttgaggtcaggagttcgagaccagcctggccaacatggtgaaaccctgtctctcctaaaaatacaaaaattagccaggtgtggtggagcacacctgtagtcccagctacttgggaggctgaggcacgagaattgattgaacccgggaggcagtgagccaagattgtgctactgcactccagcctgggcaacagaggagactccatctcaaaaaaaaggtgctgaaggaaagagacctaaacctgccaatcctttgtcatgatccctcctttgccatttcatgctcccatctccagcccttgctcactgcttagccttcctcctcttcattgtgttattcctgttccttaggttggccgttgtccaatgtgttgctgttatctggaactcctacctgtcctggaaggcacatcggctctaagcctgcctcactccatcgtttccaccttgcagtgatgcagcttgaccctggaacggtcagacaacctcctcaaagtgggcataccagtttccacggggttgggttgccggtcagagcttaagaggactagcaccctgcaatgcccctcttcactctaaaatgtacactgactgctttagagcccttgataatagtcttattcccaccacatactaggcactccataaatatctgttgaaccttcatgaccttatcaactttacacccatatcccagcaaatgccactcatccccactcttcatagacacatttgttactctaaccctgcctaggcttcttgtagctccagctctttagagactcccggaaccctttatatggtgcctcagtaaatatgttattaaatatgtaatccgga

SEQ ID NO: 2870 - DNA, 477 bp, Homo sapiens
  misc_feature (14)..(14): n is a, c, g, or t
  misc_feature (21)..(21): n is a, c, g, or t
gatgttggtcaccnggagtantgggatatgtcgaacccgcgccgtcgatcggctctaagcctgcctcactccatcgtttccaccttgcagtgatgcagcttgaccctggaacggtcagacaacctcctcaaagtgggcataccagtttccacggggttgggttgccggtcagagcttaagaggactagcaccctgcaatgcccctcttcactctaaaatgtacactgactgctttagagcccttgataatagtcttattcccaccacatactaggcactccataaatatctgttgaaccttcatgaccttatcaactttacacccatatcccagcaaatgccactcatccccactcttcatagacacatttgttactctaaccctgcctaggcttcttgtagctccagctctttagagactcccggaaccctttatatggtgcctcagtaaatatgttattaaatatgtaatccgga

SEQ ID NO: 2871 - DNA, 2142 bp, Homo sapiens
  misc_feature (2142)..(2142): n is a, c, g, or t
actcttgttttattactttttttttctttttgagatagggtcttgttctgtcgcccaggcagcagtgtagtggcgtgatcactgcagcctggacctcctgggctcggacagtcctcctgcttcagctacttgagaggctgaggcaggggaatcgcttgaatcgggaggcagaggttgcagtgagccaagatcatgccactgcactctagcctggacaacagagtgagactcagtctttaaaaaaaaaagttattcttgctgttctctacaaatagagatcccctagaccaaggtgaaagctgttggcagggtcttgcattgggcttgggggagaaaacagggtttcctaccattctacacatgatttattcattgtgctgagtcctggaaagaacagtgtctaggaatccagccacctggttgttgcattggccctgcacttactggttatgtgagaccctggacttcatttccatacctctaaaataagtggtttgcattaaattatcttaaagccccttttgattctgacagtctgtggttctcagccctgtggccttaaattctccttcctctctctatactttctgactctgacttccctttactgctcaatgcaaagttcctggacctgggtctgctcatcccagtttctgacagaatacacatgaggtgtcaccatcattggggaggtgagggctttgaggcagcaggaagggactagtcatttgtttccacaatgaagccctggggttcagagtaccagagcctcagtggaggtcagcagatgtccctccctccttggaatggcagcccatcccaggagatgtcctgacaacacctgtgtaccctgcatagggtccctgatgggcctgggtgacattatctcacagcagctggtggagaggcggggtctgcaggaacaccagagaggccggactctgaccatggtgtccctgggctgtggctttgtggtaagttctcccctcaacagggcttcagtggactcaacagtggtcttagttctttgccatcctttggcttcccttggactctcacacctaagccaacctgccgccctcttttttcttagtgtccacttcccctattctgatacttggggcagggagcttagtgaggtagaggcctagggctccctcactgcagcctgctgctatctggggtttacttccagggccctgtggtaggaggctggtacaaggttttggatcggttcatccctggcaccaccaaagtggatgcactgaagaagatgttgttggatcaggggggctttgccccgtgttttctaggctgctttctcccactggtaggggcacttaatggactgtcagcccaggacaactgggccaaactacagcgggattatcctgatgcccttatcaccaactactatgtaagagctgacacctcaactgcttgttctcctgcttccttaagtctagaactgtcctgggattgggctatcaatcctgacatgggaaacccttccgttgggattactctttcattcccaggatgggcaccataaatagggaagccatcacccaactgttcacctttttcttgtgtgcagaagttggggtagggccaggcaagacagtgagtctggggtcaggtggtggggcagccatccaacctttacattttctcttgcagctatggcctgctgtgcagttagccaacttctacctggtcccccttcattacaggtatgttgcacccctaccccacccatcaaggaagacccacgttaccaacagttggagacaaaatgtttctcatttcaaccttgagctaccttagacccccaaacggaacactgagccgtgatcagagttcctcagattcccaagcgtgttattcagaatgtcttgccatttccggaaactgtcccagagtgtctgcccactgaccttcttcatctccctagggaggatcctgcttctaccacccttgtctccatcccacctgagctccgtctttgatggcatatctggagggacagtggctggggtgctgcagcctaggttagacagagaggtagaccagaaggccaagtaggagcctggtcagacactcacaataaagacagttgctgaactgcacccaaaaagatan

SEQ ID NO: 2872 - DNA, 395 bp, Homo sapiens
acccacgctgtcgacccacgcgtacgctcgaagcatggcactctggcgggcataccagcgggccctggccgctcacccgtggaaagtacaggtcctgacagctgacttctggggaggaaggcagcactgctggccccatgccagtagctatacctgccgacccaggcctcctggactgaaggacacgcttcctgctcctcactccaagaagccacttcttgcccctctgccttctgcgcatgaaactcaaaagccacaaaagtaagtagaggaacaaaataggagaagtagggaatttaccctgcccatgcccgggaagagggtgtggaagttggggcttttccactagtgggcaggaagtggtcccaaattgatctgctcagaggcaggctccc

SEQ ID NO: 2873 - DNA, 231 bp, Homo sapiens
acccacgctgtcgacccacgcgtacgctcgaagcatggcactctggcgggcataccagcgggccctggccgctcacccgtggaaagtacaggtcctgacagctggtgagtgtccctctaggacttgagtgggaccagggcagactgatttggaagccagaggcttgccccactgcaccaccctcacttcctgtttctattcggctctcttgaagggttggctgtctttcat

SEQ ID NO: 2874 - DNA, 495 bp, Homo sapiens
ctctgggctctgtgccagactgagcccctatcctaggcagctaactaatgtttgcagacttctggggaggaaggcagcactgctggccccatgccagtagctatacctgccgacccaggcctcctggactgaaggacacgcttcctgctcctcactccaagaagccacttcttgcccctctgccttctgcgcatgaaactcaaaagccacaaaagtaagtagaggaacaaaataggagaagtagggaatttaccctgcccatgcccgggaagagggtgtggaagttggggcttttccactagtgggcaggaagtggtcccaaattgatctgctcagaggcaggctcccttccccctggccgctggatctgttcgggagtgacggcatgagaactggcacctacccaggggcatgatgtcacacctgcgccagcatctgctcgctgggctccacgcccagcctgtcattgggcatcactgcccagcagcccctagc

SEQ ID NO: 2875 - DNA, 373 bp, Homo sapiens
gtcacaaacattttctttaagttttacagtctgatttacatttgggtctgatccattattaattttgtattaaatgtgagctaaagtacattttaaaaatatgtacatcttaattattccagtactacccagcactttgggaggccgaggcgggtggatcacgaggtcaggagatcgagaccatcctggctaacatggtgaaagcccatctctactaaaaaaattaggcgggcttggtggtgggcgcctgtattcccagctactggggaggctgaggcagcagaatgatgtgaatccgggaggcggagcttgcagtgagccgagatcacgccactgcactccagcctgggcaacagagcaagactctgactca

SEQ ID NO: 2876 - DNA, 401 bp, Homo sapiens
gaagccaccaagctccctccgcactccccgcccttgtgcatgctgttccctctgcctggtcccggctctgtgaggtgtgaggtctccccgttagccctagttttctttctgcctcctgggaaccgtgtccaccacctctccactttgatcaattatttccttgccgttgtctgtcggcctgtcagcctacccccacccgaccgagaacgccttgacggtagtgaaatggtcttgccaatagactccagagcaggctccgccacgatgtcagcgccaggaaatgttggtgaatgaatgaatgaaggctttctgctgcgaatcaggcccactctccacaaacagacctgaggagaggggcccaggcccggcccccagcgcttctgcagcgggaaagctgcgtc

SEQ ID NO: 2877 - DNA, 503 bp, Homo sapiens
cataacacttcataggttttcccaaacgagaggcttttcctcctcatctttttcttcgcaaaatatttttctgtcagttattgctgtatattttgttatttcattttaaaatccaatctctgatctaaatctagagtacaaacgtgaaaaaatacctcactaaaaaagaagttcttttggcgccaaaagctcaggaatgttagcttggtggaagagtttgccttttggccaggtgcagtggctcatgcctataatcccagcactttgggagaccgaggtgggagggttgcatgaggccaggagtttcagaccagcctaagcaacatagggagaccacgtctctacagaaaaatttaaaaataatagttaaaagaaaagaaaatttagccttttttcagagtttccacctttctttgcatatgcactctgggaagaaggagatactttccctggaaagatgtagaaagacttatgcaaggctgggcgcagtggctcatgcctgt

SEQ ID NO: 2878 - DNA, 429 bp, Homo sapiens
tttttgtaccagttccatgctgtttggattactgtaacttattaggatagtttcaagtcaggtaacatgatacctccaactttgttccctttgcttaggattgttttggctgttcctgctcttttttggttccatgtaaatttcagaatagcttttttctagttctgtgaaaaatgacattggtaatttggtaagaatagcattgaatctgtagattgctttgggcagtatggctactttaatgatattgattcttccaatctgagcatggaatgtttttccatctgtttgtatcatctgtgtttgtagttctccttgtagtggcctttcacctccttggttagatatgttcttaggtacttctctctctctctctgtctctctctctctctgtgtgtgtgtgtgtatgtgttgtacgtgggattgcat

SEQ ID NO: 2879 - DNA, 384 bp, Homo sapiens
gactttttcccctgtgcaattgtctcctcatggaattttggcacacatttacttaaagatacacacatacacacacacacagtatttgagcacatcggggaataaaatatagaacttgtctagcaaaatgattatatatatatatatatatacacacacacacacacatacccatccccaccccctatttatgtatatatatacacacacaccacattttctttatccaattatccattgatagacaataaggttggttccatattgcagcacttagtgctgtaacaaatatatgtaagtatctttagaatataataattttttcctttggatagatgaaaagcagtgggattgatggatcaaataatagttctacattcttag

SEQ ID NO: 2880 - DNA, 389 bp, Homo sapiens
ttaacttcagttagagtcagtgtcactttgacctacggtggcaacatttatccccatctaaaatttctttggggaatgaaaagaaaaaagatcatgcaggcatatttttttgttaaaaataacttacgtattttattttactgatacattttgcaatttactggttgaaatcctgaactagttttagcttggtaaaagttataaaagggaaaggaatatttcagtgttgtcattccacccaaatatccttggatactttgatacttccatcttaatgctcataatttgatacttgatgcttataattttaatgtaagtttgcctcatcctttgtaaagcggagagtaatgcatataatgctatgttttaaaagctatcattataataga

SEQ ID NO: 2881 - DNA, 228 bp, Homo sapiens
cacaggggttccctttacttttatcatttccctctctcattcaacaggtgttgttgcttgctctgccatcacctctccttgcactgccatcctcagctcttttcccatacctgaccagggtcaatgtcggttcacttgccattttccccaaatggagaatatcctctatcttccccttatgatgttatttaaattttcatgtagctaaatggataagatatacacatg

SEQ ID NO: 2882 - DNA, 435 bp, Homo sapiens
gatagctgaatatgctgtactgggtgaaagcaactgctgtaaatgggcctttagtaatgcggtggtaaggtgtaggggaaggggaggcattttatagtcttagattagatctcagttaacttcaagtgggtttttgctttgcttttcgactgtgaacttcacaggttcttttcagtccccccaccccacttaggtgggacacgacggctggagtgggctggggttgggcacttctctttacccaggtcaattaagctctgataaaacccgagcaggtccagctgtgattagtgtatcttgaatgcagcccttgttaagaagaacagaatgctctggtgcctttcaaaatttttccttttcccttctctctgtgggaagcacaaggagattctctaagaaaaaaaccagttaaagctcctggaggtaaaacttata

SEQ ID NO: 2883 - DNA, 362 bp, Homo sapiens
ggctgtagattttggactttatcctgagaactgtgggggcttagataataaaaatcagtctagagttgtgaaaaatcaaagggcatgagaagaggtgaggcagagagagctttggcaggttgcagtagtattcgagcacaatgataaagccttgaactgggatgccataaattcaaaactagataataagaagtcatgaatctgcattctcagagtaatgacctctaaaggtatttctaggttaatttagaagagatgttggttgtccctctcctgtccctgtgtccttggctgaatttttcatctaccacgtggagaatactgggagatatgccacaataaaaatgggaaacaggattcag

SEQ ID NO: 2884 - DNA, 406 bp, Homo sapiens
tgaaaactatttcataacttttccttattaacagatctaaatatatttagtttttctatatcatataaatgactcaagtattttataattacctattaatttaacataatatgactttaagattaagtttctgaaaaagatttttgaaattatgaaaattttgtttataaacttttattccgtttatatttatttaatgtattcattcttaacaattatgcttgactagttcgttaaacaaagtcaggcatcatctcgagttatttctttgttaatcacttctgtaactcataatgttaggcagttatcatgtgaaaaagagctctaaagttaaacacatgtttattttgctgatcagaagacacagctgttttcattaaaccaataatgttaaacgagttattta

SEQ ID NO: 2885 - DNA, 331 bp, Homo sapiens
atagtagttactggattttgtttcaagttaaataagatgccatttaatagatctgagcagcaatataaaggcttatgcatgaccctggcttattcaatagtttatttttttgtgtctcaaaagattagacatctaaatctgaaagaaattaaaattatatttcctagattaaaaaaaattgtaatcctataataaactgcatcaaatatttttctgtgttgtgaaaatagaccatgctctgacacatttctgttttcttctcaaggaacgataagaacacaattaccaaactattcgtgatagaaatcctgaaagtacatgcaaaaaaaaa

SEQ ID NO: 2886 - DNA, 590 bp, Homo sapiens
  misc_feature (582)..(584): n is a, c, g, or t
  misc_feature (586)..(589): n is a, c, g, or t
gttaaaagggacaaaaaggaatttttttgtattttacattcagtccttttcatggaatagaatattttaaaacaactttggcttgaatttttaattatcatatttagaaatcctgcttttatgaaaatacagaaccctcactctgtggcttacagacaatagtagtatattatgtagggtagcctaaacaatggttgattattgtgtttgtgtatatttcattctctctgaattggacttgagaggcaaactttgtctttaaacctttagctgttgctttctggacctttgtattgcctaagggatgcaaacttcttggaaagtagaaccataaagttgtaaatgaacaagggaagaaatagaaaatataatttttgtcttcattaatgtttctaaagtagacagtaatttcacaattacagtatccactctcatgaaatttactaactacattaatgagcaaatgtgaagctgttttgctaatgtggaaattaaattttttaaaacaaaacttttttattctgtcaccaaagaaagaagcacattggttatgttaataaaaataatagaataaacagtcannnannnna

SEQ ID NO: 2887 - DNA, 361 bp, Homo sapiens
aaccaccaaaaaaaaggactgataaacatgacaattaaaatgaagaatttatgtttatcaaaaacaaaaaggggaaccatcgactgggagaacatagttacaacacttgtatccaactgagaatttatattcaggttagaagactcaaaaacaaaaaggcaagcaatccactaagaacaaattctgggcagaagacttcacaaaagatctgcaaatgaccagtgacatcaggtaaacatggattgaaacaacaagaagacacacccacaagatccgtgacaattttgaaaatgaaaccctgaggcaggcagaattctaaggtcatgtcccagattccccctcttggtgtccgagccctgca

SEQ ID NO: 2888 - DNA, 462 bp, Homo sapiens
agcctcacggaagaatcttgcctttggggtggcagtggccacatctcggatgtctcttccccaaaggccagggctggggtgaacccagcacatgccccccgtggccaccccatgccccagggctcagggagggagggctccgggaagattttgacagtggaagttagggcaggtgaggggagaaaggacccggaagtcggggacacctttctcaggctctgccctgcacagggagctgggaaggaccagcctcctggcatctgtgtgtgatggtgcccggcacatctgtttcctgccccagtgcacctcaccggcctgggcacagaactgctaaacgtgactcaggaaaaggaactttcccacatcgcttcacttcattgattttcaacagcaggaaaaattttgctcactggtctggcaaataaataagtggttatatctgagcgtgtctgtgtgtgtgtg

SEQ ID NO: 2889 - DNA, 1055 bp, Homo sapiens
cgctaggctcctttggttagagaagccacagtccttcagcctccaattggtgtcagtacttaggaagaccacagctagatggacaaacagcattgggaggccttagccctgctcctctcaattccatcctgtagagaacaggagtcaggagccgctggcaggagacagcatgtcacccaggactctgccggtgcagaatatgaacaatgccatgttcttgcagaaaacgcttagcctgagtttcataggaggtaatcaccagacaactgcagaatgtagaacactgagcaggacaactgacctgtctccttcacatagtccttatcaccacaaatcacacaacaaaaaggagaagagatattttgggttcaaaaaaagtaaaaagataatgtagctgcatttctttagttattttgaaccccaaatatttcctcatctttttgttgttgtcatggatggtggtgacatggacttgtttatagaggacaggtcagctgtctggctcaatgatctacattctgaagttgtctgaaaatgtcttcatgattaaattcagcctaaacgttttgccgggaacactgcagagacaatgctgtgagtttccaacctcagcccatctgcgggcagagaaggtctagtttgtccatcaccattatgatatcaggactggttacttggttaaggaggggtctaggagatctgtcccttttagagacaccttacttataatgaagtacttgggaaagcgggtttcaagagtataaatatcctgtattctaatgatcatcctctaaacattttatcatttattaatcctccctgcctgtgtctattattatattcatatctctacgctgcaaattttgggtctcaatttttactgtgcctttgtttttactagtgtctgctgttgcaaaaagaagaaaacattctctgcctgagttttaatttttgtccaaagttaattttaatctatacaattaaaaccttttgcctatcactctggacttttggattgttttttacattcagtgttataatatttgattatgctg

SEQ ID NO: 2890 - DNA, 241 bp, Homo sapiens
ctcacttagggaatgccacattgggtgctaggtagtaaaatatggcttctaactttgagatagtaaaaatgcaatggatatatctgtatatgtgtaatacctgatgtatactatatgcatttatctgtatataaacattatctatgtattatatattttaaatatagataggtagagtctatcaatctgtcatctctctaccttcctttcaataaaagtgatcaaaatctaataacgtttt

SEQ ID NO: 2891 - DNA, 404 bp, Homo sapiens
ccccttctaggtttcactattggcacctggttaatgggaaggggatttagggacccggtgctgagatggtcttttactgttcttcagagcaaagtcctgtgaacgctgacaggtagcgcactcaccttctaggtttgaaagctcgcttgttcctgtctgtgtggctggcccacacctaactgccatgaggtttttttccgctgcctttctgatggcttcacagtgggaaacctgctgtgtccatcccagccagccctttctttgtgaaagtggtaagaagataaccccattctaacttggttgttcttttttcctttccttttgcaaagagtgcttttgccgggggtggggtgggaggctgcaagggttttggagccatggaaacttaatccttgtgtgtccag

SEQ ID NO: 2892 - DNA, 475 bp, Homo sapiens
ttttttttgacaccgttttgctcgtcaccctgctggagtacagtggcgtgatctcggctcactgcaccctctgcctcctgggttcaagtgattctcctgcctcagcctctcaagtagctgggattacaagtgcccaccaccatgccctgccaatttttgtatttttagtagagatagggtttcaccatgttgcccaggctggtcttgaattcctgacctcaggtgatccacctgccttggcctcccaaattgctgggtttacaggtgtgagccagcgtgcccagcccagatgacttttatatggtagttcataaagaatgatcctgacaaaagaacagatttgtatttataccatgcaaaggaatgttaattacaaaactgttggctatggcagaaaaaatttcccaatggcttagctttatataaagtgttcccttaagatatattacctgaagaaaaagctcaaaagtccttg

SEQ ID NO: 2893 - DNA, 442 bp, Homo sapiens
gttaaaagagctttctagaaatttctttgaaaactattgtaaagtgacatatttcctcaggatgtctgtcacgccagcagtgggagccaacacaccaactctcagaggctgttccccctgcgcggcagatccagacgctcagctcccaggcctggaggctggcggcttagcccagggcacaggaggaggctgcctgggtttggcgctgacttacagcaggtgctgagggaatgctgaggagaggcaaggctgattcaagaggccgacaacagagaacattcctagagctctcccgccagctaggcatggtgctaagtgcattacctgcgtccactcgtaacatcctcacaacactgtgaatacgatgaccatccccatgtacaggcgtggacgctaaggctcagagcaataaataattagcctgagatcacacggcaggtga

SEQ ID NO: 2894 - DNA, 1026 bp, Homo sapiens
agcaggcttgcatgtctgtttgtttgtatttagagactgggtctcactctgttgcccaagctggagaacagtggcaccatcatagctcactgcagccttcaacttctgggctcaagtgcttctcccacctcagcctcccaagtagctgggacaacaggtgaaattgaaggccagcttttggaactcaaccttcaaaggaacttaaaatttccattatgtagagtccctgaggaaactggatccactagctacactggctgagaatgctctcaccccaggatttcatttttattttaccacatcattgttggtatcttaagatcaatgtactggagcagcggggtctcacaaagaggatacctggtgacacgcccaggctttcagaatgcactatagggctttagtgacttgtccaggttcagctgaaatgtgccatctgggacctactaatgcttgttgaactttactggatctcagaagctgggtctcagaagctcagatgttcctcagagctacgatatcaacaacctgtgatgacagagagaaggttgctccatgatggatttggaaacttactggctagctaaacctgactgaatgggaaggaatgtggatagctttgggaactctagtttcactaggatggagctgggaatttgtatttttgacaaattgcacgttatgattattaagtaatgcaactgatttttttttcccttaaaacaaacaatctagaatctgtgtaatcaaaataatttctctaaaaggctgcaagtatatgcttaaagtgttggggcattcagagcatttggaacattacattcttttgaatgtcaattggtagatgaaaataccagcttttaagtcatacatttgattttttgaaacaatatgcatttagagtttgtaagtcaagtgaataactgataaggtaaaaaaaagggggagttcattgttgagtatgaatttaaagtaaccagactgccttttgtccagtggctgtcagtaatttacttcagcaggcat

SEQ ID NO: 2895 - DNA, 479 bp, Homo sapiens
gccactgcactctagcctgggcgacagagcaggactgcatctcaaataaataaataaataaataaataaataaatacgtaagttcatgtcttccttggtcccacagcagccttgaggtttgaaggtggaccgcttcctttaagtcttctcttgaccagctgagctaccaggactccatctgagcccttctccaccctggtggtctggttctgtgcacccaagacacgtgccctccttttgttctggatttcagttctaggggccggggagggggctctggccagcaggtccctggtcttaatacaccagacgtcacacatgcacctgcataagattctctctccaagccaccttcccacctgtcagccaggtcttgaacaccaatcggtttccaaagtctcttctggggcaggtgttttataacctgattctagtctctcaataggtgcctctgtggtataaggaggtgactgtccaag

SEQ ID NO: 2896 - DNA, 313 bp, Homo sapiens
attttaatctgaacaagtccaaaatcacaccatggttacatgtaagtactgcagtattctaacagaactttctgcttccatcctctgtctctttctcccccaccctatcttccttatcactattaaattagtcttaactgaaagcttaaggatgtggaaaaagatatcaacattatgtaagaaactcccttgcaggctccagttgacttttctggccatatgctctgtctaaagtgtttatgaatataccttgcatattatattagtctttagcacctagctcagtatacttcatagaagatgcttaacatag

SEQ ID NO: 2897 - DNA, 533 bp, Homo sapiens
gagataagatgtatctggcaggcttagctcaaaatataaagttactagctgacaaaatctgacactgttaggtgagtcagtattcatctcctgtccttctgaagtaagccttttagctgttgagtcctcagttctcagcttcagcaaaaagaccaaaggatggaatgaaatgaagattagtttgccactgactatccccgcagagtcttaggcatgttattgaggaagattgtcttatcgtggtggttcttttccgtgtctgagggcttccattagtactgctgggatcactttatttacatgctcagcacccacctatatggaatcaactcttcatattctttcagagtgtgtgattttgggggcatgtttttgtaactcttgccaactggcttccaagagttaatctccagcttttattgtccccttgtcacaacaatacatcctcctaactaatcatgactaaggaataatgtgggtttacattctggaatcgattccccacccccacccccaccccgccccaccttgtt

SEQ ID NO: 2898 - DNA, 513 bp, Homo sapiens
tatccccagggtctgagaaatgtttaagttcattacaacccctttggaatgtggcatcacaaaatttggtgtctgaaaataatgttagagattattgtatacaattagagacaagactcaaatgtaggaaccacattacctaactcctaagtcagtgtttcttgtgtatttcatgacatttagattttgaccactataaattattacggcaagttattaggtaacatagtaagtgtttaccatatgccagatactaatgcattatctcactgaatctcagtacccggtcctattattgtcctttggggaggctaaatattagcttgtctaaagtcatatctcggttttggtgcagtggctcaagcctgtaatcccagcactttgagagtccaaggcaggaggattgcttcaggccaggagtttaggagcagcttgagtaaccctgtctctacctgcaaaaaagaaaaattagctagacatgatggcacatgcctgtaatcccactgaggcaga

SEQ ID NO: 2899 - DNA, 504 bp, Homo sapiens
gtcagagtaaaaaattctggacctgtttgaaagaatgtaatggagatctaagaagtggtcatggaactcacagggagaggggaagcctgcccaagtgactgtaacattgactaataatcaataatcatgttgataatgatgactaccagttaatgagtgcctgccatatgccaaggactaggctagatacttaaatttatgtttcagtaattgcaacatactacaaaagcttaggcttgaattaagtgcactgggtttcctttatcataatggaataccctaaaaggatatacttgagattacatcattcagcatcaaaggccttagagcccttattaggaaaaacaacattataagaaattcatgaataagagaatgggcatttttttaagttttcttttatttttattttttaattttattattattattattatttctttttttgagatggagtctcgctctgtcgcccaggctggagtgcagtggcactatctcagctca

SEQ ID NO: 2900 - DNA, 1141 bp, Homo sapiens
gtttgaagaagaaagacatgtgccctatttgtatgaaaccaatcttgagaatgatggttttatcagcaatgggaataaggatttatctattataataaagattcggctactgagtgtcaatctaatacatgtattaagtgggtcaatgaggtggggactccagtctgtggctaagaagcagagcagagttgcctgtgaacaccagagtgcccaatacacaaggattgaagtgcagcaagtcagtaatgaggccgattgagttaaaccaagatctgacctctccattttaggaagaagaggaaaaaacaattctgaattaatgtttgcatggacttaactttttaaatgtcttttaaagtagttactctctcgttctctagcagatgagtttgtttcatgcttttaactttttaaacgtcttttaaaatagttactctgtcttgttctctagcagatgagtttgtctcatgcttttcactttttaaatgtcttttaaaatagttactctctctcattctgtagcagatgagtttgtgtcatgcttttgtgtctcttacccattagctgactttgggtgtgataagtgactaagactcctcaaactttgaacaaggaatataccatttatttatgctgtatgcatgaagggaaaagagacgaatatcaagtttttctggccaaccaagaaataaaactttaaaagtgtttattttttcaggaaaaaaaatcacagatactacttaaatattattaccaggacaacaaattagcaaataaggcaagttagaaagcagcattttcaaggttaaaggttgcactttaaagctttaaccatgacttctgaagggatcacacaaacatctttaaagacttctttgttaatcagaaaacagtttacatgcaaatttccacactggagagccgaccgagatcaatactttcatgattattcccaatttactgctttatcagaaagaactttactacgaagcaagaagtgtctactcttctgtgaaggagtaagttttctccttgtttctgaaattctttattctagctgaattctcaagactgagcagtgaacttccattggttagcaccaaatagagcaagcctgagtaagctgcttataaaaaaaaaa

(The sequence listing continues in the following parts.)

What is claimed is:

1. An isolated protein having the sequence according to the amino acid sequence of any of SEQ ID NOs: 35-38, 737437-1034311.

2. An isolated polynucleotide, consisting of a nucleic acid sequence encoding the amino acid sequence of the protein of claim 1.

3. A pharmaceutical composition comprising an isolated protein having the sequence according to the amino acid sequence of any of SEQ ID NOs: 35-38, 737437-1034311, and a pharmaceutically acceptable carrier.
